United States Patent Application Publication US 2005/0244851 A1 - sequence listing, part 113

SEQ ID NO: 4407503 - DNA, 25 bp, Homo sapien
tggtctcgggtcagacgtcagccag

SEQ ID NO: 4407504 - DNA, 25 bp, Homo sapien
gagatgtgtcactgctgttcatttc

SEQ ID NO: 4407505 - DNA, 25 bp, Homo sapien
ctgctgttcatttctggtctcgggt

SEQ ID NO: 4407506 - DNA, 25 bp, Homo sapien
cactgaacgagggccctgaatggtt

SEQ ID NO: 4407507 - DNA, 25 bp, Homo sapien
ctcggtgtggagattcgtgctacca

SEQ ID NO: 4407508 - DNA, 25 bp, Homo sapien
catctgccgcattgagggcactgaa

SEQ ID NO: 4407509 - DNA, 25 bp, Homo sapien
gtggagattcgtgctaccaacagca

SEQ ID NO: 4407510 - DNA, 25 bp, Homo sapien
gccagctcttgtgcttggaggaatc

SEQ ID NO: 4407511 - DNA, 25 bp, Homo sapien
ggcctctgtccacattagtcccagg

SEQ ID NO: 4407512 - DNA, 25 bp, Homo sapien
tggcctctgtccacattagtcccag

SEQ ID NO: 4407513 - DNA, 25 bp, Homo sapien
gaggaatccgtcgtgggaggaccca

SEQ ID NO: 4407514 - DNA, 25 bp, Homo sapien
catggatggaccagaagctctgacg

SEQ ID NO: 4407515 - DNA, 25 bp, Homo sapien
ttcagaaaaccaacgccattcactg

SEQ ID NO: 4407516 - DNA, 25 bp, Homo sapien
gccagcataaaatacggccttcaga

SEQ ID NO: 4407517 - DNA, 25 bp, Homo sapien
tcaaagaaacacgaagccagcataa

SEQ ID NO: 4407518 - DNA, 25 bp, Homo sapien
aaccttaactttgggtctgcggcag

SEQ ID NO: 4407519 - DNA, 25 bp, Homo sapien
tctgcggcagacactgggaacgccg

SEQ ID NO: 4407520 - DNA, 25 bp, Homo sapien
tgcgtgtgctatcaaactagtgaga

SEQ ID NO: 4407521 - DNA, 25 bp, Homo sapien
gaacagcccagtttatgtgtagaga

SEQ ID NO: 4407522 - DNA, 25 bp, Homo sapien
tcagatctgagggggagctccccat

SEQ ID NO: 4407523 - DNA, 25 bp, Homo sapien
gggcggatgcgtctgcgatgccctc

SEQ ID NO: 4407524 - DNA, 25 bp, Homo sapien
tgccttgaggaggaattacttggag

SEQ ID NO: 4407525 - DNA, 25 bp, Homo sapien
ccctccacactggtgccttgaggag

SEQ ID NO: 4407526 - DNA, 25 bp, Homo sapien
ctccagtcctggggcggatgggcca

SEQ ID NO: 4407527 - DNA, 25 bp, Homo sapien
agtcctggggcggatgggccagaga

SEQ ID NO: 4407528 - DNA, 25 bp, Homo sapien
ccagtcctggggcggatgggccaga

SEQ ID NO: 4407529 - DNA, 25 bp, Homo sapien
tccagtcctggggcggatgggccag

SEQ ID NO: 4407530 - DNA, 25 bp, Homo sapien
cttagaatggtggtactactgagaa

SEQ ID NO: 4407531 - DNA, 25 bp, Homo sapien
tctttcatgtttgattgcggtggaa

SEQ ID NO: 4407532 - DNA, 25 bp, Homo sapien
ggtctttcagggtaaatccaggcat

SEQ ID NO: 4407533 - DNA, 25 bp, Homo sapien
gacaatgtttatgtgcaagcttaga

SEQ ID NO: 4407534 - DNA, 25 bp, Homo sapien
ttctgagtcagagcgccaaggtcac

SEQ ID NO: 4407535 - DNA, 25 bp, Homo sapien
cacagccgtgagttatggaacgggc

SEQ ID NO: 4407536 - DNA, 25 bp, Homo sapien
aaaatcaaagcttggacattctgag

SEQ ID NO: 4407537 - DNA, 25 bp, Homo sapien
cacaattggctcattaatctacatg

SEQ ID NO: 4407538 - DNA, 25 bp, Homo sapien
gtttgctggccacaccaggtggagt

SEQ ID NO: 4407539 - DNA, 25 bp, Homo sapien
ctgtttgctggccacaccaggtgga

SEQ ID NO: 4407540 - DNA, 25 bp, Homo sapien
tgtttgctggccacaccaggtggag

SEQ ID NO: 4407541 - DNA, 25 bp, Homo sapien
tgctgtttgctggccacaccaggtg

SEQ ID NO: 4407542 - DNA, 25 bp, Homo sapien
aaacaccagagtggacttacttggc

SEQ ID NO: 4407543 - DNA, 25 bp, Homo sapien
ggcacttctgggtgaatggaatctg

SEQ ID NO: 4407544 - DNA, 25 bp, Homo sapien
cctgcccttgggttgatggacgatc

SEQ ID NO: 4407545 - DNA, 25 bp, Homo sapien
tgttccaacactaatctgcttcaag

SEQ ID NO: 4407546 - DNA, 25 bp, Homo sapien
gccttcagcatccgtgcccaggcct

SEQ ID NO: 4407547 - DNA, 25 bp, Homo sapien
ggccttcagcatccgtgcccaggcc

SEQ ID NO: 4407548 - DNA, 25 bp, Homo sapien
caatgccccccaggggcggccttca

SEQ ID NO: 4407549 - DNA, 25 bp, Homo sapien
cggccttcagcatccgtgcccaggc

SEQ ID NO: 4407550 - DNA, 25 bp, Homo sapien
ccgccaggcgccgcgtccgcgcccg

SEQ ID NO: 4407551 - DNA, 25 bp, Homo sapien
ccggccgagctcaacgccaggaccc

SEQ ID NO: 4407552 - DNA, 25 bp, Homo sapien
gagctcaacgccaggaccccgtccg

SEQ ID NO: 4407553 - DNA, 25 bp, Homo sapien
tcaacgccaggaccccgtccgagcc

SEQ ID NO: 4407554 - DNA, 25 bp, Homo sapien
cgccgcccctgcggctgggtccgcg

SEQ ID NO: 4407555 - DNA, 25 bp, Homo sapien
caggcagccctggcgtccgcgggag

SEQ ID NO: 4407556 - DNA, 25 bp, Homo sapien
ttagaagacgctggaggagcaaagc

SEQ ID NO: 4407557 - DNA, 25 bp, Homo sapien
acgctggaggagcaaagcctgcaag

SEQ ID NO: 4407558 - DNA, 25 bp, Homo sapien
tggaggagcaaagcctgcaagtttc

SEQ ID NO: 4407559 - DNA, 25 bp, Homo sapien
aagacgctggaggagcaaagcctgc

SEQ ID NO: 4407560 - DNA, 25 bp, Homo sapien
ttttaacatcacagtagcgacgacc

SEQ ID NO: 4407561 - DNA, 25 bp, Homo sapien
taaactgttttcacaactcgaggct

SEQ ID NO: 4407562 - DNA, 25 bp, Homo sapien
ccactgtcctataagggagggctaa

SEQ ID NO: 4407563 - DNA, 25 bp, Homo sapien
tgacgataggaatttgtagcagccc

SEQ ID NO: 4407564 - DNA, 25 bp, Homo sapien
ctttggggtccctcgtgtgcctgct

SEQ ID NO: 4407565 - DNA, 25 bp, Homo sapien
tacatgagctaacaggaaagccaga

SEQ ID NO: 4407566 - DNA, 25 bp, Homo sapien
tagtaagtctatcctgaatataccc

SEQ ID NO: 4407567 - DNA, 25 bp, Homo sapien
gaaaatcacactgcttagtaagtct

SEQ ID NO: 4407568 - DNA, 25 bp, Homo sapien
caggcagtaggagcacccccttcag

SEQ ID NO: 4407569 - DNA, 25 bp, Homo sapien
aggcagtaggagcacccccttcaga

SEQ ID NO: 4407570 - DNA, 25 bp, Homo sapien
cagtaggagcacccccttcagaacc

SEQ ID NO: 4407571 - DNA, 25 bp, Homo sapien
ggcagtaggagcacccccttcagaa

SEQ ID NO: 4407572 - DNA, 25 bp, Homo sapien
tgggagctgcccgtccaggcgggga

SEQ ID NO: 4407573 - DNA, 25 bp, Homo sapien
tcatgggagctgcccgtccaggcgg

SEQ ID NO: 4407574 - DNA, 25 bp, Homo sapien
gagctgcccgtccaggcggggagtg

SEQ ID NO: 4407575 - DNA, 25 bp, Homo sapien
gctgcccgtccaggcggggagtgac

SEQ ID NO: 4407576 - DNA, 25 bp, Homo sapien
tgcctctggagagctgctgggtaaa

SEQ ID NO: 4407577 - DNA, 25 bp, Homo sapien
tcgccttggctgaggctgcctctgg

SEQ ID NO: 4407578 - DNA, 25 bp, Homo sapien
ctccccatggcctccactcgccttg

SEQ ID NO: 4407579 - DNA, 25 bp, Homo sapien
gagctgctgggtaaactgagcaaat

SEQ ID NO: 4407580 - DNA, 25 bp, Homo sapien
aggtcttccaagaaggccattctca

SEQ ID NO: 4407581 - DNA, 25 bp, Homo sapien
gaccttgtgtacctgtagagtggaa

SEQ ID NO: 4407582 - DNA, 25 bp, Homo sapien
gttgatgaccagacacacatagggt

SEQ ID NO: 4407583 - DNA, 25 bp, Homo sapien
cataagccacgtgcttagagagggc

SEQ ID NO: 4407584 - DNA, 25 bp, Homo sapien
gagagggcacccagcttaacctaga

SEQ ID NO: 4407585 - DNA, 25 bp, Homo sapien
taatgttaattgttccctagttgct

SEQ ID NO: 4407586 - DNA, 25 bp, Homo sapien
tttttaccttgagcctactaatgtc

SEQ ID NO: 4407587 - DNA, 25 bp, Homo sapien
tgtttccacgtttagaactctccat

SEQ ID NO: 4407588 - DNA, 25 bp, Homo sapien
cactcaggtgggtttcttgtaagca

SEQ ID NO: 4407589 - DNA, 25 bp, Homo sapien
ggatataccatgtagtggtgcatgc

SEQ ID NO: 4407590 - DNA, 25 bp, Homo sapien
attattctactatggttgtgtgtac

SEQ ID NO: 4407591 - DNA, 25 bp, Homo sapien
gccagagagtttacattgtgcccat

SEQ ID NO: 4407592 - DNA, 25 bp, Homo sapien
catgcaggcttttagtgtagctatc

SEQ ID NO: 4407593 - DNA, 25 bp, Homo sapien
aggccacactcttgactatacactg

SEQ ID NO: 4407594 - DNA, 25 bp, Homo sapien
cacactcttgactatacactgtcat

SEQ ID NO: 4407595 - DNA, 25 bp, Homo sapien
ccaggccacactcttgactatacac

SEQ ID NO: 4407596 - DNA, 25 bp, Homo sapien
cttacccaattccaggccacactct

SEQ ID NO: 4407597 - DNA, 25 bp, Homo sapien
gcagctccttccgaaactcatagct

SEQ ID NO: 4407598 - DNA, 25 bp, Homo sapien
gaaacacttggctgcctaaccattc

SEQ ID NO: 4407599 - DNA, 25 bp, Homo sapien
gaacaggttctcacagaaacacttg

SEQ ID NO: 4407600 - DNA, 25 bp, Homo sapien
gcttaggacatcactggaacaggtt

SEQ ID NO: 4407601 - DNA, 25 bp, Homo sapien
tcttacaaccacacgagaagctgct

SEQ ID NO: 4407602 - DNA, 25 bp, Homo sapien
gcgtagcgacgccattggaagttga

SEQ ID NO: 4407603 - DNA, 25 bp, Homo sapien
cagtgctgggtcacgaagttttgca

SEQ ID NO: 4407604 - DNA, 25 bp, Homo sapien
caggaacagctaacaaacgtacagt

SEQ ID NO: 4407605 - DNA, 25 bp, Homo sapien
cagcgccgccgtgcctgcctggggc

SEQ ID NO: 4407606 - DNA, 25 bp, Homo sapien
ctgcagcgccgccgtgcctgcctgg

SEQ ID NO: 4407607 - DNA, 25 bp, Homo sapien
tgcagcgccgccgtgcctgcctggg

SEQ ID NO: 4407608 - DNA, 25 bp, Homo sapien
gctaccggttaattgtcctggtgag

SEQ ID NO: 4407609 - DNA, 25 bp, Homo sapien
ctaccggttaattgtcctggtgagg

SEQ ID NO: 4407610 - DNA, 25 bp, Homo sapien
tgctaccggttaattgtcctggtga

SEQ ID NO: 4407611 - DNA, 25 bp, Homo sapien
ggacgtctgtggatccaccagctct

SEQ ID NO: 4407612 - DNA, 25 bp, Homo sapien
gagctcacgggacgtctgtggatcc

SEQ ID NO: 4407613 - DNA, 25 bp, Homo sapien
gccagaccgggtgggtgctggaact

SEQ ID NO: 4407614 - DNA, 25 bp, Homo sapien
tacacgggtgagattgccagaccgg

SEQ ID NO: 4407615 - DNA, 25 bp, Homo sapien
tacaacagagcaatagtggttttcg

SEQ ID NO: 4407616 - DNA, 25 bp, Homo sapien
tcttgtttctgaattgtcagcacct

SEQ ID NO: 4407617 - DNA, 25 bp, Homo sapien
cataggcattttcggactcttcatc

SEQ ID NO: 4407618 - DNA, 25 bp, Homo sapien
acctctttcgtcagcttcagccgga

SEQ ID NO: 4407619 - DNA, 25 bp, Homo sapien
tttcaaagaccgttcatggggctcg

SEQ ID NO: 4407620 - DNA, 25 bp, Homo sapien
agacttccctgaagtgatggcactt

SEQ ID NO: 4407621 - DNA, 25 bp, Homo sapien
catggggctcgtccgaaacactcca

SEQ ID NO: 4407622 - DNA, 25 bp, Homo sapien
tcgtccgaaacactccaagacttcc

SEQ ID NO: 4407623 - DNA, 25 bp, Homo sapien
cttgtacacgatacacatcaacagc

SEQ ID NO: 4407624 - DNA, 25 bp, Homo sapien
tcgggaaacccgtcatactttgcta

SEQ ID NO: 4407625 - DNA, 25 bp, Homo sapien
cagcagaacggtttacggtgggatc

SEQ ID NO: 4407626 - DNA, 25 bp, Homo sapien
gttcacaggagccacttgtacacga

SEQ ID NO: 4407627 - DNA, 25 bp, Homo sapien
aggcaatcagcaagacatctggtag

SEQ ID NO: 4407628 - DNA, 25 bp, Homo sapien
gattttcgtaagaaggatatcctcc

SEQ ID NO: 4407629 - DNA, 25 bp, Homo sapien
caatcagcaagacatctggtaggcc

SEQ ID NO: 4407630 - DNA, 25 bp, Homo sapien
ggatatcctcccacttaaagccagc

SEQ ID NO: 4407631 - DNA, 25 bp, Homo sapien
ctaaaatgatcattgggcacagcca

SEQ ID NO: 4407632 - DNA, 25 bp, Homo sapien
accttatgatgtttgcgtcctggca

SEQ ID NO: 4407633 - DNA, 25 bp, Homo sapien
ttagtcacagatgcgaatgggcctg

SEQ ID NO: 4407634 - DNA, 25 bp, Homo sapien
cagcctggcctgcactatcagggca

SEQ ID NO: 4407635 - DNA, 25 bp, Homo sapien
actcaggcccaagccgccaactggc

SEQ ID NO: 4407636 - DNA, 25 bp, Homo sapien
ctcaggcccaagccgccaactggct

SEQ ID NO: 4407637 - DNA, 25 bp, Homo sapien
tcaggcccaagccgccaactggctg

SEQ ID NO: 4407638 - DNA, 25 bp, Homo sapien
caggcccaagccgccaactggctgt

SEQ ID NO: 4407639 - DNA, 25 bp, Homo sapien
cagggacgttgtgctcagaacctcc

SEQ ID NO: 4407640 - DNA, 25 bp, Homo sapien
ctgcttggtcttcgaatatttttga

SEQ ID NO: 4407641 - DNA, 25 bp, Homo sapien
tgatatgacgacagggacgttgtgc

SEQ ID NO: 4407642 - DNA, 25 bp, Homo sapien
tatttttgatatgacgacagggacg

SEQ ID NO: 4407643 - DNA, 25 bp, Homo sapien
tgcaatcacagcatgcacggaggct

SEQ ID NO: 4407644 - DNA, 25 bp, Homo sapien
catctcatagggtagttaaaggtca

SEQ ID NO: 4407645 - DNA, 25 bp, Homo sapien
aaaacgtcgtaaccacattgcactg

SEQ ID NO: 4407646 - DNA, 25 bp, Homo sapien
ccgattcaatgagtgtgcgcctgca

SEQ ID NO: 4407647 - DNA, 25 bp, Homo sapien
ctcggcttttccgtaagcaatgaag

SEQ ID NO: 4407648 - DNA, 25 bp, Homo sapien
caatgaagtcgtggatgatttctgg

SEQ ID NO: 4407649 - DNA, 25 bp, Homo sapien
gaagtcgtggatgatttctgggcca

SEQ ID NO: 4407650 - DNA, 25 bp, Homo sapien
ccgtaagcaatgaagtcgtggatga

SEQ ID NO: 4407651 - DNA, 25 bp, Homo sapien
acacgcgggggaggctgatcttcca

SEQ ID NO: 4407652 - DNA, 25 bp, Homo sapien
gagacttggggtgccatcctgtgcc

SEQ ID NO: 4407653 - DNA, 25 bp, Homo sapien
gaggctgatcttccaggtgagggtg

SEQ ID NO: 4407654 - DNA, 25 bp, Homo sapien
catcctgtgccatgcatcggagcag

SEQ ID NO: 4407655 - DNA, 25 bp, Homo sapien
ttaccaaggagctctccataccctg

SEQ ID NO: 4407656 - DNA, 25 bp, Homo sapien
tattaccaaggagctctccataccc

SEQ ID NO: 4407657 - DNA, 25 bp, Homo sapien
attaccaaggagctctccataccct

SEQ ID NO: 4407658 - DNA, 25 bp, Homo sapien
ctgcacccgagtgacagcacgtgtc

SEQ ID NO: 4407659 - DNA, 25 bp, Homo sapien
cactattaccaaggagctctccata

SEQ ID NO: 4407660 - DNA, 25 bp, Homo sapien
cagcaggtgtccactattaccaagg

SEQ ID NO: 4407661 - DNA, 25 bp, Homo sapien
tgtccactattaccaaggagctctc

SEQ ID NO: 4407662 - DNA, 25 bp, Homo sapien
gcaggtgtccactattaccaaggag

SEQ ID NO: 4407663 - DNA, 25 bp, Homo sapien
cactattaccaaggagctctccata

SEQ ID NO: 4407664 - DNA, 25 bp, Homo sapien
gcaggtgtccactattaccaaggag

SEQ ID NO: 4407665 - DNA, 25 bp, Homo sapien
tgtccactattaccaaggagctctc

SEQ ID NO: 4407666 - DNA, 25 bp, Homo sapien
cagcaggtgtccactattaccaagg

SEQ ID NO: 4407667 - DNA, 25 bp, Homo sapien
gacagcacgcatccactattaccaa

SEQ ID NO: 4407668 - DNA, 25 bp, Homo sapien
acagcacgcatccactattaccaag

SEQ ID NO: 4407669 - DNA, 25 bp, Homo sapien
cagcacgtgtccattattatcaagg

SEQ ID NO: 4407670 - DNA, 25 bp, Homo sapien
tgacagcacgtgtccattattatca

SEQ ID NO: 4407671 - DNA, 25 bp, Homo sapien
tatgaactgggtgatcaccgagagc

SEQ ID NO: 4407672 - DNA, 25 bp, Homo sapien
tgtaaattccatccagtcatagagg

SEQ ID NO: 4407673 - DNA, 25 bp, Homo sapien
ttgctgtgttggaaacaccacatgt

SEQ ID NO: 4407674 - DNA, 25 bp, Homo sapien
tatatggagcctggcttcggtttcg

SEQ ID NO: 4407675 - DNA, 25 bp, Homo sapien
gcagattttggcttgtgacagaaag

SEQ ID NO: 4407676 - DNA, 25 bp, Homo sapien
tgctgtacctctgtctagatctggg

SEQ ID NO: 4407677 - DNA, 25 bp, Homo sapien
ctgcacacatgtagccagatccagg

SEQ ID NO: 4407678 - DNA, 25 bp, Homo sapien
caccgccaggtgagaaaagatttct

SEQ ID NO: 4407679 - DNA, 25 bp, Homo sapien
ggctgaacttgaggagcaatggcaa

SEQ ID NO: 4407680 - DNA, 25 bp, Homo sapien
gcggtcctaatctcaacagcaggga

SEQ ID NO: 4407681 - DNA, 25 bp, Homo sapien
caatggcaaagtagatcccaggaca

SEQ ID NO: 4407682 - DNA, 25 bp, Homo sapien
gacacctgccataacactggctgaa

SEQ ID NO: 4407683 - DNA, 25 bp, Homo sapien
ctttccaatgttgtcaggctgataa

SEQ ID NO: 4407684 - DNA, 25 bp, Homo sapien
tgtttcctttccaatgttgtcaggc

SEQ ID NO: 4407685 - DNA, 25 bp, Homo sapien
ccaatgttgtcaggctgataaagtg

SEQ ID NO: 4407686 - DNA, 25 bp, Homo sapien
tttccaatgttgtcaggctgataaa

SEQ ID NO: 4407687 - DNA, 25 bp, Homo sapien
ccagtgatgaccgactcatcacgaa

SEQ ID NO: 4407688 - DNA, 25 bp, Homo sapien
tgatgaccgactcatcacgaagggc

SEQ ID NO: 4407689 - DNA, 25 bp, Homo sapien
gatgaccgactcatcacgaagggcc

SEQ ID NO: 4407690 - DNA, 25 bp, Homo sapien
agtgatgaccgactcatcacgaagg

SEQ ID NO: 4407691 - DNA, 25 bp, Homo sapien
gaacagcatctcctacgaacaacat

SEQ ID NO: 4407692 - DNA, 25 bp, Homo sapien
gagaacagcatctcctacgaacaac

SEQ ID NO: 4407693 - DNA, 25 bp, Homo sapien
ctcctacgaacaacatccctgtctg

SEQ ID NO: 4407694 - DNA, 25 bp, Homo sapien
tggagaacagcatctcctacgaaca

SEQ ID NO: 4407695 - DNA, 25 bp, Homo sapien
tcatgagttgcattttctacatgta

SEQ ID NO: 4407696 - DNA, 25 bp, Homo sapien
atgagttgcattttctacatgtatg

SEQ ID NO: 4407697 - DNA, 25 bp, Homo sapien
cttcatgagttgcattttctacatg

SEQ ID NO: 4407698 - DNA, 25 bp, Homo sapien
catgagttgcattttctacatgtat

SEQ ID NO: 4407699 - DNA, 25 bp, Homo sapien
gtggggttggagctcggttcagcag

SEQ ID NO: 4407700 - DNA, 25 bp, Homo sapien
gttggagctcggttcagcagccgca

SEQ ID NO: 4407701 - DNA, 25 bp, Homo sapien
ttggagctcggttcagcagccgcat

SEQ ID NO: 4407702 - DNA, 25 bp, Homo sapien
gggttggagctcggttcagcagccg

SEQ ID NO: 4407703 - DNA, 25 bp, Homo sapien
taaagaataatataagtcataaaaa

SEQ ID NO: 4407704 - DNA, 25 bp, Homo sapien
ctaaagaataatataagtcataaaa

SEQ ID NO: 4407705 - DNA, 25 bp, Homo sapien
aaatccaggacgcaaaggctttcgg

SEQ ID NO: 4407706 - DNA, 25 bp, Homo sapien
caaagtgatgagaagcacggcacgc

SEQ ID NO: 4407707 - DNA, 25 bp, Homo sapien
gcaaagggcgcgcagcaaatccagg

SEQ ID NO: 4407708 - DNA, 25 bp, Homo sapien
gctcatctgcatcgtcaccaggttc

SEQ ID NO: 4407709 - DNA, 25 bp, Homo sapien
taagcctgacggcactgggagagac

SEQ ID NO: 4407710 - DNA, 25 bp, Homo sapien
caaactcgacctgttgacggaggct

SEQ ID NO: 4407711 - DNA, 25 bp, Homo sapien
gacacaaagtccagtccgaaatggg

SEQ ID NO: 4407712 - DNA, 25 bp, Homo sapien
tctgcgccgacaaagtcaaggtagg

SEQ ID NO: 4407713 - DNA, 25 bp, Homo sapien
tgttgggaggcttcacgtgcctact

SEQ ID NO: 4407714 - DNA, 25 bp, Homo sapien
ctgttgggaggcttcacgtgcctac

SEQ ID NO: 4407715 - DNA, 25 bp, Homo sapien
ctcctgttgggaggcttcacgtgcc

SEQ ID NO: 4407716 - DNA, 25 bp, Homo sapien
cctgttgggaggcttcacgtgccta

SEQ ID NO: 4407717 - DNA, 25 bp, Homo sapien
agcttcagaaatgccggcgcttccc

SEQ ID NO: 4407718 - DNA, 25 bp, Homo sapien
cctgagatactcaacggtgatggta

SEQ ID NO: 4407719 - DNA, 25 bp, Homo sapien
aatgccggcgcttccctgagatact

SEQ ID NO: 4407720 - DNA, 25 bp, Homo sapien
ggtgatggtaacttcatcgccagca

SEQ ID NO: 4407721 - DNA, 25 bp, Homo sapien
gtctgtgggcggcttctaggcttca

SEQ ID NO: 4407722 - DNA, 25 bp, Homo sapien
tgggcggcttgtaggcttcagttct

SEQ ID NO: 4407723 - DNA, 25 bp, Homo sapien
tgtgggcggcttctaggcttcagtt

SEQ ID NO: 4407724 - DNA, 25 bp, Homo sapien
tctgtgggcggcttctaggcttcag

SEQ ID NO: 4407725 - DNA, 25 bp, Homo sapien
ctgtgatcgatgggaaaaatggagt

SEQ ID NO: 4407726 - DNA, 25 bp, Homo sapien
gctgaaatggatttgttcctggttg

SEQ ID NO: 4407727 - DNA, 25 bp, Homo sapien
aaaaatggagttgctgaaatggatt

SEQ ID NO: 4407728 - DNA, 25 bp, Homo sapien
ggagttgctgaaatggatttgttcc

SEQ ID NO: 4407729 - DNA, 25 bp, Homo sapien
ggaagatcgattttcctaagattgt

SEQ ID NO: 4407730 - DNA, 25 bp, Homo sapien
tccaggtttgctacaatggcaggaa

SEQ ID NO: 4407731 - DNA, 25 bp, Homo sapien
aagattgtgaatagcatagttatcc

SEQ ID NO: 4407732 - DNA, 25 bp, Homo sapien
gtttgctacaatggcaggaagatcg

SEQ ID NO: 4407733 - DNA, 25 bp, Homo sapien
gctgttgcttaaattctgctccttc

SEQ ID NO: 4407734 - DNA, 25 bp, Homo sapien
agggaagctggcttagacgcagcac

SEQ ID NO: 4407735 - DNA, 25 bp, Homo sapien
tggcttagacgcagcacccatctca

SEQ ID NO: 4407736 - DNA, 25 bp, Homo sapien
tctcactcggcctgtgaagtcacct

SEQ ID NO: 4407737 - DNA, 25 bp, Homo sapien
ccggcagcaacgctcattgaagtca

SEQ ID NO: 4407738 - DNA, 25 bp, Homo sapien
atgtgactggcaatggaccccggag

SEQ ID NO: 4407739 - DNA, 25 bp, Homo sapien
tcattgaagtcactatgtgactggc

SEQ ID NO: 4407740 - DNA, 25 bp, Homo sapien
tcaggatgccggcagcaacgctcat

SEQ ID NO: 4407741 - DNA, 25 bp, Homo sapien
gctgctcggtggatttctgcttcat

SEQ ID NO: 4407742 - DNA, 25 bp, Homo sapien
tcaggcacagcaattttaccttcac

SEQ ID NO: 4407743 - DNA, 25 bp, Homo sapien
gaaagtgaagtctgctcaggcacag

SEQ ID NO: 4407744 - DNA, 25 bp, Homo sapien
tgtgaattcagcagaggacgtttcg

SEQ ID NO: 4407745 - DNA, 25 bp, Homo sapien
tgctgtggtcgctggatggccctgg

SEQ ID NO: 4407746 - DNA, 25 bp, Homo sapien
gctgtggtcgctggatggccctggg

SEQ ID NO: 4407747 - DNA, 25 bp, Homo sapien
ctgctgtggtcgctggatggccctg

SEQ ID NO: 4407748 - DNA, 25 bp, Homo sapien
ggagtttccgttcagatgcaaaccg

SEQ ID NO: 4407749 - DNA, 25 bp, Homo sapien
actggagtttccgttcagatgcaaa

SEQ ID NO: 4407750 - DNA, 25 bp, Homo sapien
ggtactggagtttccgttcagatgc

SEQ ID NO: 4407751 - DNA, 25 bp, Homo sapien
tgtggtactggagtttccgttcaga

SEQ ID NO: 4407752 - DNA, 25 bp, Homo sapien
ggtaccataaaacacactcttgagt

SEQ ID NO: 4407753 - DNA, 25 bp, Homo sapien
ggtcagaggtatccacttgtaaaga

SEQ ID NO: 4407754 - DNA, 25 bp, Homo sapien
caggtaattactccagctgtcagga

SEQ ID NO: 4407755 - DNA, 25 bp, Homo sapien
tgaaaatgcagccaacaaagcaact

SEQ ID NO: 4407756 - DNA, 25 bp, Homo sapien
caagctcgaaatttcctgcgtgaag

SEQ ID NO: 4407757 - DNA, 25 bp, Homo sapien
tacttctcttatcgcacagcactgg

SEQ ID NO: 4407758 - DNA, 25 bp, Homo sapien
tgaaggaagcccgtctcacattgtt

SEQ ID NO: 4407759 - DNA, 25 bp, Homo sapien
cacaactgattaacgcaagctcgaa

SEQ ID NO: 4407760 - DNA, 25 bp, Homo sapien
gtccacgggaagcaccagccctgag

SEQ ID NO: 4407761 - DNA, 25 bp, Homo sapien
tgcttcagtgtccacgggaagcacc

SEQ ID NO: 4407762 - DNA, 25 bp, Homo sapien
ggaatccgagcatctgtctgcaaga

SEQ ID NO: 4407763 - DNA, 25 bp, Homo sapien
ctgtggaccatagggtccagggact

SEQ ID NO: 4407764 - DNA, 25 bp, Homo sapien
ctatgggcgaggaaggtgacgatgg

SEQ ID NO: 4407765 - DNA, 25 bp, Homo sapien
tgggcgaggaaggtgacgatggggc

SEQ ID NO: 4407766 - DNA, 25 bp, Homo sapien
tatgggcgaggaaggtgacgatggg

SEQ ID NO: 4407767 - DNA, 25 bp, Homo sapien
atgggcgaggaaggtgacgatgggg

SEQ ID NO: 4407768 - DNA, 25 bp, Homo sapien
agccagcgcttctcatacctcgggt

SEQ ID NO: 4407769 - DNA, 25 bp, Homo sapien
gacagaggcacggacaaggtgtcca

SEQ ID NO: 4407770 - DNA, 25 bp, Homo sapien
tgtaccttgagatgcgagccatgga

SEQ ID NO: 4407771 - DNA, 25 bp, Homo sapien
tccgttccggctttgtaccttgaga

SEQ ID NO: 4407772 - DNA, 25 bp, Homo sapien
gtaaccagcggcctgtaggaactgg

SEQ ID NO: 4407773 - DNA, 25 bp, Homo sapien
gcacggggttcatcaaagtttccca

SEQ ID NO: 4407774 - DNA, 25 bp, Homo sapien
aactggcaaaagtgcacggggttca

SEQ ID NO: 4407775 - DNA, 25 bp, Homo sapien
cacagtcaagcgctctggagtaacc

SEQ ID NO: 4407776 - DNA, 25 bp, Homo sapien
gtgcagtaggtttgtctacgtcagc

SEQ ID NO: 4407777 - DNA, 25 bp, Homo sapien
taggtttgtctacgtcagcatcacc

SEQ ID NO: 4407778 - DNA, 25 bp, Homo sapien
gaggttacgatggttgatgtcacca

SEQ ID NO: 4407779 - DNA, 25 bp, Homo sapien
gaaggtccaggacattactgtttcc

SEQ ID NO: 4407780 - DNA, 25 bp, Homo sapien
gaactgagtcctataaagtcaaggg

SEQ ID NO: 4407781 - DNA, 25 bp, Homo sapien
tttcagcctggtgagatcccaagca

SEQ ID NO: 4407782 - DNA, 25 bp, Homo sapien
gcaaccctgagtgagccttgaagat

SEQ ID NO: 4407783 - DNA, 25 bp, Homo sapien
cagagggtgaccatgtcaatgaaca

SEQ ID NO: 4407784 - DNA, 25 bp, Homo sapien
caaaacaaattagagtatttagcag

SEQ ID NO: 4407785 - DNA, 25 bp, Homo sapien
ttccattatgactactatagagccc

SEQ ID NO: 4407786 - DNA, 25 bp, Homo sapien
tagcagtataattctgacttgcagt

SEQ ID NO: 4407787 - DNA, 25 bp, Homo sapien
tctgacttgcagtatcacttttcaa

SEQ ID NO: 4407788 - DNA, 25 bp, Homo sapien
ctctacagcgatccagcacctccag

SEQ ID NO: 4407789 - DNA, 25 bp, Homo sapien
cctctacagcgatccagcacctcca

SEQ ID NO: 4407790 - DNA, 25 bp, Homo sapien
tgtgctaagctgcacacaccgtggg

SEQ ID NO: 4407791 - DNA, 25 bp, Homo sapien
aatgatttcttagtccagacggtgc

SEQ ID NO: 4407792 - DNA, 25 bp, Homo sapien
tacacggctggtgttaatgggcctc

SEQ ID NO: 4407793 - DNA, 25 bp, Homo sapien
gaaagacctggtgtcactcaagagc

SEQ ID NO: 4407794 - DNA, 25 bp, Homo sapien
tgtcctccacccatccgtggcctcg

SEQ ID NO: 4407795 - DNA, 25 bp, Homo sapien
gctggacaggctgttagtcctatag

SEQ ID NO: 4407796 - DNA, 25 bp, Homo sapien
gacaggctgttagtcctataggaat

SEQ ID NO: 4407797 - DNA, 25 bp, Homo sapien
gctgttagtcctataggaatccttc

SEQ ID NO: 4407798 - DNA, 25 bp, Homo sapien
ttccttctaggtgtgggcggtgcat

SEQ ID NO: 4407799 - DNA, 25 bp, Homo sapien
ctggagaaggaattttccttctagg

SEQ ID NO: 4407800 - DNA, 25 bp, Homo sapien
agaaggaattttccttctaggtgtg

SEQ ID NO: 4407801 - DNA, 25 bp, Homo sapien
attttccttctaggtgtgggcggtg

SEQ ID NO: 4407802 - DNA, 25 bp, Homo sapien
aggagcaggccacggcggctttgtc

SEQ ID NO: 4407803 - DNA, 25 bp, Homo sapien
gagcaggccacggcggctttgtcca

SEQ ID NO: 4407804 - DNA, 25 bp, Homo sapien
gaaggagcaggccacggcggctttg

SEQ ID NO: 4407805 - DNA, 25 bp, Homo sapien
agcaggccacggcggctttgtccat

SEQ ID NO: 4407806 - DNA, 25 bp, Homo sapien
ttagggcgtgggcggcagcagtagc

SEQ ID NO: 4407807 - DNA, 25 bp, Homo sapien
ggcagcagtagcaggaggccacagt

SEQ ID NO: 4407808 - DNA, 25 bp, Homo sapien
agcagtagcaggaggccacagttca

SEQ ID NO: 4407809 - DNA, 25 bp, Homo sapien
gcagtagcaggaggccacagttcac

SEQ ID NO: 4407810 - DNA, 25 bp, Homo sapien
cccggtcccaagcagccggattggc

SEQ ID NO: 4407811 - DNA, 25 bp, Homo sapien
gcaccccggtcccaagcagccggat

SEQ ID NO: 4407812 - DNA, 25 bp, Homo sapien
accccggtcccaagcagccggattg

SEQ ID NO: 4407813 - DNA, 25 bp, Homo sapien
cggtcccaagcagccggattggcag

SEQ ID NO: 4407814 - DNA, 25 bp, Homo sapien
ctactgtgtgatggtcccgaggacg

SEQ ID NO: 4407815 - DNA, 25 bp, Homo sapien
tcccgaggacgtcccatgcgagagg

SEQ ID NO: 4407816 - DNA, 25 bp, Homo sapien
cgtcccatgcgagagggaggtccac

SEQ ID NO: 4407817 - DNA, 25 bp, Homo sapien
tgtgatggtcccgaggacgtcccat

SEQ ID NO: 4407818 - DNA, 25 bp, Homo sapien
gttcaactggctgccgccttcctat

SEQ ID NO: 4407819 - DNA, 25 bp, Homo sapien
aggttcaactggctgccgccttcct

SEQ ID NO: 4407820 - DNA, 25 bp, Homo sapien
tcagcacccgccagaatctgaacag

SEQ ID NO: 4407821 - DNA, 25 bp, Homo sapien
ttcctatcagcacccgccagaatct

SEQ ID NO: 4407822 - DNA, 25 bp, Homo sapien
tacaacctgacacacagcctatgtg

SEQ ID NO: 4407823 - DNA, 25 bp, Homo sapien
tcgtgtgagttaataaactcccata

SEQ ID NO: 4407824 - DNA, 25 bp, Homo sapien
ctaatacagtaagtatatggtttcc

SEQ ID NO: 4407825 - DNA, 25 bp, Homo sapien
taagtatatggtttcctacaacctg

SEQ ID NO: 4407826 - DNA, 25 bp, Homo sapien
caggtagctcttctgggatagactg

SEQ ID NO: 4407827 - DNA, 25 bp, Homo sapien
gaagcgattctgttcattaacaaaa

SEQ ID NO: 4407828 - DNA, 25 bp, Homo sapien
ctcttctgggatagactgagagcca

SEQ ID NO: 4407829 - DNA, 25 bp, Homo sapien
ggagagaaatcacatgggcacaggt

SEQ ID NO: 4407830 - DNA, 25 bp, Homo sapien
ttttttttgagagagagagtttcgc

SEQ ID NO: 4407831 - DNA, 25 bp, Homo sapien
agaataccagaaataaaaccatctt

SEQ ID NO: 4407832 - DNA, 25 bp, Homo sapien
tttttttgagagagagagtttcgct

SEQ ID NO: 4407833 - DNA, 25 bp, Homo sapien
ctaagaataccagaaataaaaccat

SEQ ID NO: 4407834 - DNA, 25 bp, Homo sapien
aagtatcaattttgagaaaacattc

SEQ ID NO: 4407835 - DNA, 25 bp, Homo sapien
ctagaaaaaagtatcaattttgaga

SEQ ID NO: 4407836 - DNA, 25 bp, Homo sapien
tttgagaaaacattctttaataatg

SEQ ID NO: 4407837 - DNA, 25 bp, Homo sapien
aaaagtatcaattttgagaaaacat

SEQ ID NO: 4407838 - DNA, 25 bp, Homo sapien
ccaacgcgaaatccaccgtgaaaca

SEQ ID NO: 4407839 - DNA, 25 bp, Homo sapien
ctcaaaacaggtaaatcccaacgcg

SEQ ID NO: 4407840 - DNA, 25 bp, Homo sapien
gaaatccaccgtgaaacacagcatc

SEQ ID NO: 4407841 - DNA, 25 bp, Homo sapien
caggtaaatcccaacgcgaaatcca

SEQ ID NO: 4407842 - DNA, 25 bp, Homo sapien
cctccagcccactcaactctcccgc

SEQ ID NO: 4407843 - DNA, 25 bp, Homo sapien
tcctccagcccactcaactctcccg

SEQ ID NO: 4407844 - DNA, 25 bp, Homo sapien
acagcagctttactcgagttttccc

SEQ ID NO: 4407845 - DNA, 25 bp, Homo sapien
ttcgtctcaatctgtttggtgtcca

SEQ ID NO: 4407846 - DNA, 25 bp, Homo sapien
agcagctttactcgagttttcccat

SEQ ID NO: 4407847 - DNA, 25 bp, Homo sapien
cttcgtctcaatctgtttggtgtcc

SEQ ID NO: 4407848 - DNA, 25 bp, Homo sapien
ttaaggcagcaaaaggttacggtgc

SEQ ID NO: 4407849 - DNA, 25 bp, Homo sapien
cggtgatggcgcccaaggcaaacag

SEQ ID NO: 4407850 - DNA, 25 bp, Homo sapien
ctccccggtgatggcgcccaaggca

SEQ ID NO: 4407851 - DNA, 25 bp, Homo sapien
cagcaaaaggttacggtgctcctcc

SEQ ID NO: 4407852 - DNA, 25 bp, Homo sapien
gcaacacccgctggatttatggagc

SEQ ID NO: 4407853 - DNA, 25 bp, Homo sapien
ctgagctctcctttaaggggcaccc

SEQ ID NO: 4407854 - DNA, 25 bp, Homo sapien
tggcaacacccgctggatttatgga

SEQ ID NO: 4407855 - DNA, 25 bp, Homo sapien
cccgttggcaacacccgctggattt

SEQ ID NO: 4407856 - DNA, 25 bp, Homo sapien
gagccaggaagtatgtcaggaccca

SEQ ID NO: 4407857 - DNA, 25 bp, Homo sapien
agtatgtcaggacccattctgtcat

SEQ ID NO: 4407858 - DNA, 25 bp, Homo sapien
agagagccaggaagtatgtcaggac

SEQ ID NO: 4407859 - DNA, 25 bp, Homo sapien
ccaggaagtatgtcaggacccattc

SEQ ID NO: 4407860 - DNA, 25 bp, Homo sapien
gaagctatagccctggttcaccttt

SEQ ID NO: 4407861 - DNA, 25 bp, Homo sapien
aagctatagccctggttcacctttc

SEQ ID NO: 4407862 - DNA, 25 bp, Homo sapien
ctgctgacggctcaggccactgctg

SEQ ID NO: 4407863 - DNA, 25 bp, Homo sapien
ctggctgcccctggaattcggcact

SEQ ID NO: 4407864 - DNA, 25 bp, Homo sapien
ccgcgttggagggagcttgcccctc

SEQ ID NO: 4407865 - DNA, 25 bp, Homo sapien
ctagttgtgaatgctgaagcccgcg

SEQ ID NO: 4407866 - DNA, 25 bp, Homo sapien
cctggaattcggcactggagaggtt

SEQ ID NO: 4407867 - DNA, 25 bp, Homo sapien
gtagctccagagtcaggtagacata

SEQ ID NO: 4407868 - DNA, 25 bp, Homo sapien
tagctccagagtcaggtagacatac

SEQ ID NO: 4407869 - DNA, 25 bp, Homo sapien
agctccagagtcaggtagacataca

SEQ ID NO: 4407870 - DNA, 25 bp, Homo sapien
cgtagctccagagtcaggtagacat

SEQ ID NO: 4407871 - DNA, 25 bp, Homo sapien
gaagacaccgaaccatgtccatggg

SEQ ID NO: 4407872 - DNA, 25 bp, Homo sapien
ctggaagacaccgaaccatgtccat

SEQ ID NO: 4407873 - DNA, 25 bp, Homo sapien
ggctggaagacaccgaaccatgtcc

SEQ ID NO: 4407874 - DNA, 25 bp, Homo sapien
tcggctggaagacaccgaaccatgt

SEQ ID NO: 4407875 - DNA, 25 bp, Homo sapien
cctggagctcaggtcgtgctccttc

SEQ ID NO: 4407876 - DNA, 25 bp, Homo sapien
gctcaggtcgtgctccttccgccca

SEQ ID NO: 4407877 - DNA, 25 bp, Homo sapien
gagctcaggtcgtgctccttccgcc

SEQ ID NO: 4407878 - DNA, 25 bp, Homo sapien
tggagctcaggtcgtgctccttccg

SEQ ID NO: 4407879 - DNA, 25 bp, Homo sapien
aggctgtagccctcacatatgaaca

SEQ ID NO: 4407880 - DNA, 25 bp, Homo sapien
gctgtagccctcacatatgaacaca

SEQ ID NO: 4407881 - DNA, 25 bp, Homo sapien
ggctgtagccctcacatatgaacac

SEQ ID NO: 4407882 - DNA, 25 bp, Homo sapien
ctgtagccctcacatatgaacacac

SEQ ID NO: 4407883 - DNA, 25 bp, Homo sapien
gtagtttgtcttagaataagcccaa

SEQ ID NO: 4407884 - DNA, 25 bp, Homo sapien
aagcgaggatgctttgtagtttgtc

SEQ ID NO: 4407885 - DNA, 25 bp, Homo sapien
cccaagaagtataggatgaaatgca

SEQ ID NO: 4407886 - DNA, 25 bp, Homo sapien
gcaacaatcacgaggaacagccaca

SEQ ID NO: 4407887 - DNA, 25 bp, Homo sapien
tgtgagatgactggcccctccgatg

SEQ ID NO: 4407888 - DNA, 25 bp, Homo sapien
tttccgtctcagtgcacaaactgct

SEQ ID NO: 4407889 - DNA, 25 bp, Homo sapien
ggaaatcacacctccttacggcacg

SEQ ID NO: 4407890 - DNA, 25 bp, Homo sapien
ggcacggtccatttttccgtctcag

SEQ ID NO: 4407891 - DNA, 25 bp, Homo sapien
tgctcagcgttagtgacctttgtgg

SEQ ID NO: 4407892 - DNA, 25 bp, Homo sapien
cagcatcggtgtatctcatggaagt

SEQ ID NO: 4407893 - DNA, 25 bp, Homo sapien
gctcagtgtcagtcattttcgtgga

SEQ ID NO: 4407894 - DNA, 25 bp, Homo sapien
cactcagtgttggtgaccttcgtgg

SEQ ID NO: 4407895 - DNA, 25 bp, Homo sapien
tgattttgtgatgtggatcccgtcg

SEQ ID NO: 4407896 - DNA, 25 bp, Homo sapien
gattttgtgatgtggatcccgtcgc

SEQ ID NO: 4407897 - DNA, 25 bp, Homo sapien
tttgtgatgtggatcccgtcgcagc

SEQ ID NO: 4407898 - DNA, 25 bp, Homo sapien
tgtgatgtggatcccgtcgcagcag

SEQ ID NO: 4407899 - DNA, 25 bp, Homo sapien
aggccaccttggctgctatgaagga

SEQ ID NO: 4407900 - DNA, 25 bp, Homo sapien
ccatgaagccggggtccacggaggc

SEQ ID NO: 4407901 - DNA, 25 bp, Homo sapien
ccctcaggtcctggaactcgagttc

SEQ ID NO: 4407902 - DNA, 25 bp, Homo sapien
ggccaccttggctgctatgaaggag

SEQ ID NO: 4407903 - DNA, 25 bp, Homo sapien
tacatgtattttctggcaagactct

SEQ ID NO: 4407904 - DNA, 25 bp, Homo sapien
agctgctgtacatgtattttctggc

SEQ ID NO: 4407905 - DNA, 25 bp, Homo sapien
catgtattttctggcaagactctga

SEQ ID NO: 4407906 - DNA, 25 bp, Homo sapien
tgtacatgtattttctggcaagact

SEQ ID NO: 4407907 - DNA, 25 bp, Homo sapien
tattggtatcacaactataggctca

SEQ ID NO: 4407908 - DNA, 25 bp, Homo sapien
ttttattggtatcacaactataggc

SEQ ID NO: 4407909 - DNA, 25 bp, Homo sapien
ggtatcacaactataggctcatcat

SEQ ID NO: 4407910 - DNA, 25 bp, Homo sapien
catgttttattggtatcacaactat

SEQ ID NO: 4407911 - DNA, 25 bp, Homo sapien
tcaaggaaggattccggcaccgacc

SEQ ID NO: 4407912 - DNA, 25 bp, Homo sapien
tctgagctgggtgcgtgtttccagc

SEQ ID NO: 4407913 - DNA, 25 bp, Homo sapien
tgctgactgacggagccctttctga

SEQ ID NO: 4407914 - DNA, 25 bp, Homo sapien
gccttcaatccttgtagcaacaatc

SEQ ID NO: 4407915 - DNA, 25 bp, Homo sapien
gaataatccgtgagagaaagaccgt

SEQ ID NO: 4407916 - DNA, 25 bp, Homo sapien
gaaagaccgtattccaatgcatacg

SEQ ID NO: 4407917 - DNA, 25 bp, Homo sapien
tctgtgtaagtcaagctgaaaaata

SEQ ID NO: 4407918 - DNA, 25 bp, Homo sapien
tgcatacgactttcttctgtgtaag

SEQ ID NO: 4407919 - DNA, 25 bp, Homo sapien
agagcagcacggagtcgcagtcgcc

SEQ ID NO: 4407920 - DNA, 25 bp, Homo sapien
accagcacgggccacatggacagga

SEQ ID NO: 4407921 - DNA, 25 bp, Homo sapien
agtcgccctggaggcaggtgctcca

SEQ ID NO: 4407922 - DNA, 25 bp, Homo sapien
agcatctgccgggtgcacggcattc

SEQ ID NO: 4407923 - DNA, 25 bp, Homo sapien
cctctgccaaatgggtttaacatct

SEQ ID NO: 4407924 - DNA, 25 bp, Homo sapien
agaatccaatcagagccctctgcca

SEQ ID NO: 4407925 - DNA, 25 bp, Homo sapien
ggcagaatccaatcagagccctctg

SEQ ID NO: 4407926 - DNA, 25 bp, Homo sapien
atgggtttaacatctctcggacctt

SEQ ID NO: 4407927 - DNA, 25 bp, Homo sapien
taatgcatcagggagcttctttcgg

SEQ ID NO: 4407928 - DNA, 25 bp, Homo sapien
tcctgtgccctagtgggactgaaac

SEQ ID NO: 4407929 - DNA, 25 bp, Homo sapien
ttatacttgggagctgtttgccgca

SEQ ID NO: 4407930 - DNA, 25 bp, Homo sapien
tttcggtcaaaagatagactgcagg

SEQ ID NO: 4407931 - DNA, 25 bp, Homo sapien
ggatgagactgtctccccgtgacgc

SEQ ID NO: 4407932 - DNA, 25 bp, Homo sapien
tgggatgagactgtctccccgtgac

SEQ ID NO: 4407933 - DNA, 25 bp, Homo sapien
atttgggatgagactgtctccccgt

SEQ ID NO: 4407934 - DNA, 25 bp, Homo sapien
atgagactgtctccccgtgacgcga

SEQ ID NO: 4407935 - DNA, 25 bp, Homo sapien
agagggaagaaatgtctctggtctg

SEQ ID NO: 4407936 - DNA, 25 bp, Homo sapien
gagggaagaaatgtctctggtctgg

SEQ ID NO: 4407937 - DNA, 25 bp, Homo sapien
agggaagaaatgtctctggtctggt

SEQ ID NO: 4407938 - DNA, 25 bp, Homo sapien
agagtcctgtcctgcagaaacaact

SEQ ID NO: 4407939 - DNA, 25 bp, Homo sapien
ggcatgggtgaacccagagtcctgt

SEQ ID NO: 4407940 - DNA, 25 bp, Homo sapien
gatggctgaacagaggagggcatgg

SEQ ID NO: 4407941 - DNA, 25 bp, Homo sapien
gggcagacaagggagggatggctga

SEQ ID NO: 4407942 - DNA, 25 bp, Homo sapien
cacccgttgatgtgccttgttccta

SEQ ID NO: 4407943 - DNA, 25 bp, Homo sapien
ggattttcctgtgcacccgttgatg

SEQ ID NO: 4407944 - DNA, 25 bp, Homo sapien
tgtcaaataacaagtaagatttcca

SEQ ID NO: 4407945 - DNA, 25 bp, Homo sapien
caagtaagatttccatgtaaggatt

SEQ ID NO: 4407946 - DNA, 25 bp, Homo sapien
tctccatcaatgtccagtgcctgtg

SEQ ID NO: 4407947 - DNA, 25 bp, Homo sapien
catcaatgtccagtgcctgtgtctg

SEQ ID NO: 4407948 - DNA, 25 bp, Homo sapien
tccacctgcagcaaaataaattttt

SEQ ID NO: 4407949 - DNA, 25 bp, Homo sapien
tccatcaatgtccagtgcctgtgtc

SEQ ID NO: 4407950 - DNA, 25 bp, Homo sapien
cgcgcttggatagcccgtcaagatg

SEQ ID NO: 4407951 - DNA, 25 bp, Homo sapien
ctttgttgtgtttgcgccgggcctc

SEQ ID NO: 4407952 - DNA, 25 bp, Homo sapien
tcaagatgctaggaagtcgagtggc

SEQ ID NO: 4407953 - DNA, 25 bp, Homo sapien
cttataaactgactccgcgcttgga

SEQ ID NO: 4407954 - DNA, 25 bp, Homo sapien
gctgagtaattttcacggctgtaac

SEQ ID NO: 4407955 - DNA, 25 bp, Homo sapien
aattttcacggctgtaactcttctg

SEQ ID NO: 4407956 - DNA, 25 bp, Homo sapien
ggcgccttaattgccttccagggac

SEQ ID NO: 4407957 - DNA, 25 bp, Homo sapien
ttctgaaatgggcgccttaattgcc

SEQ ID NO: 4407958 - DNA, 25 bp, Homo sapien
tacagccactcttgggccactttac

SEQ ID NO: 4407959 - DNA, 25 bp, Homo sapien
ataatggcccaaattacagccactc

SEQ ID NO: 4407960 - DNA, 25 bp, Homo sapien
tcttgggccactttacaagttccaa

SEQ ID NO: 4407961 - DNA, 25 bp, Homo sapien
caaattacagccactcttgggccac

SEQ ID NO: 4407962 - DNA, 25 bp, Homo sapien
tgtgcaggccataaccagcgtgaca

SEQ ID NO: 4407963 - DNA, 25 bp, Homo sapien
ccaaaggagttctttccctctcgag

SEQ ID NO: 4407964 - DNA, 25 bp, Homo sapien
gttctttccctctcgagatgaaggg

SEQ ID NO: 4407965 - DNA, 25 bp, Homo sapien
agcgtgacagacagcacagcgagcg

SEQ ID NO: 4407966 - DNA, 25 bp, Homo sapien
gcttttgggatgttgccggcattct

SEQ ID NO: 4407967 - DNA, 25 bp, Homo sapien
cccaggactctggtgcttttgggat

SEQ ID NO: 4407968 - DNA, 25 bp, Homo sapien
ggatgttgccggcattcttaagtgg

SEQ ID NO: 4407969 - DNA, 25 bp, Homo sapien
tgttgccggcattcttaagtggcag

SEQ ID NO: 4407970 - DNA, 25 bp, Homo sapien
cctccaagacgctagagacacgaga

SEQ ID NO: 4407971 - DNA, 25 bp, Homo sapien
gagacacgagactcctcaggctttc

SEQ ID NO: 4407972 - DNA, 25 bp, Homo sapien
caccaggcgcttgctttcctccaag

SEQ ID NO: 4407973 - DNA, 25 bp, Homo sapien
cgtggcgtacatggcggtgtccacc

SEQ ID NO: 4407974 - DNA, 25 bp, Homo sapien
gaaaggattggagattaaataccag

SEQ ID NO: 4407975 - DNA, 25 bp, Homo sapien
ttaaccagggtatacgtaattgcta

SEQ ID NO: 4407976 - DNA, 25 bp, Homo sapien
tgtcttgcttaagaaaggattggag

SEQ ID NO: 4407977 - DNA, 25 bp, Homo sapien
gagattaaataccagttctgtctgc

SEQ ID NO: 4407978 - DNA, 25 bp, Homo sapien
cctgggtggatcagagcattgtcca

SEQ ID NO: 4407979 - DNA, 25 bp, Homo sapien
acctgggtggatcagagcattgtcc

SEQ ID NO: 4407980 - DNA, 25 bp, Homo sapien
ctgggtggatcagagcattgtccag

SEQ ID NO: 4407981 - DNA, 25 bp, Homo sapien
ttatctctgctgctcgggcaatcac

SEQ ID NO: 4407982 - DNA, 25 bp, Homo sapien
tcatcgcttgtattgatgtttccat

SEQ ID NO: 4407983 - DNA, 25 bp, Homo sapien
gatgctgtgattgttgagttttcag

SEQ ID NO: 4407984 - DNA, 25 bp, Homo sapien
caatcactccgcttgttggctcagg

SEQ ID NO: 4407985 - DNA, 25 bp, Homo sapien
gacatgtttgcaatgatgctcagca

SEQ ID NO: 4407986 - DNA, 25 bp, Homo sapien
tgatgggcctgtatttgttcgccag

SEQ ID NO: 4407987 - DNA, 25 bp, Homo sapien
tgttgttgcaagctcctgtgatggg

SEQ ID NO: 4407988 - DNA, 25 bp, Homo sapien
tgttcgccaggcaagtgtttgggca

SEQ ID NO: 4407989 - DNA, 25 bp, Homo sapien
tcacgagaagattaagaaaatccac

SEQ ID NO: 4407990 - DNA, 25 bp, Homo sapien
gattaagaaaatccacaaacaatac

SEQ ID NO: 4407991 - DNA, 25 bp, Homo sapien
aagattaagaaaatccacaaacaat

SEQ ID NO: 4407992 - DNA, 25 bp, Homo sapien
acgagaagattaagaaaatccacaa

SEQ ID NO: 4407993 - DNA, 25 bp, Homo sapien
gcatcctttgtctacatctatgtct

SEQ ID NO: 4407994 - DNA, 25 bp, Homo sapien
catctcctgtgcatcctttgtctac

SEQ ID NO: 4407995 - DNA, 25 bp, Homo sapien
cctgtgcatcctttgtctacatcta

SEQ ID NO: 4407996 - DNA, 25 bp, Homo sapien
tgtgcatcctttgtctacatctatg

SEQ ID NO: 4407997 - DNA, 25 bp, Homo sapien
cagtttcggaatggtcgggcttata

SEQ ID NO: 4407998 - DNA, 25 bp, Homo sapien
tggcagtttcggaatggtcgggctt

SEQ ID NO: 4407999 - DNA, 25 bp, Homo sapien
ttagttggcagtttcggaatggtcg

SEQ ID NO: 4408000 - DNA, 25 bp, Homo sapien
cggaatggtcgggcttatatttcat

SEQ ID NO: 4408001 - DNA, 25 bp, Homo sapien
cattgtgtggtcagcagagattctc

SEQ ID NO: 4408002 - DNA, 25 bp, Homo sapien
gctttgcaggtggatgtagacgtca

SEQ ID NO: 4408003 - DNA, 25 bp, Homo sapien
gaaaccagctcagatctaagtgtcc

SEQ ID NO: 4408004 - DNA, 25 bp, Homo sapien
agattctcccaggagcgtcagtgga

SEQ ID NO: 4408005 - DNA, 25 bp, Homo sapien
gcaatgactggatcatacaaacagg

SEQ ID NO: 4408006 - DNA, 25 bp, Homo sapien
tacaaacaagaaggagcctgctcat

SEQ ID NO: 4408007 - DNA, 25 bp, Homo sapien
gactggatcatacaaacaggaagga

SEQ ID NO: 4408008 - DNA, 25 bp, Homo sapien
gggtacctcctgcagcaatgactgg

SEQ ID NO: 4408009 - DNA, 25 bp, Homo sapien
gcaatgactggatcatacaaacagg

SEQ ID NO: 4408010 - DNA, 25 bp, Homo sapien
gactggatcatacaaacaggaagga

SEQ ID NO: 4408011 - DNA, 25 bp, Homo sapien
tacaaacaagaaggagcctgctcat

SEQ ID NO: 4408012 - DNA, 25 bp, Homo sapien
gggtacctcctgcagcaatgactgg

SEQ ID NO: 4408013 - DNA, 25 bp, Homo sapien
gccggaggaagtctatgagtgtcct

SEQ ID NO: 4408014 - DNA, 25 bp, Homo sapien
cggctcccacgcgaggccggaggaa

SEQ ID NO: 4408015 - DNA, 25 bp, Homo sapien
agcacagcgagatgcagaccacagg

SEQ ID NO: 4408016 - DNA, 25 bp, Homo sapien
agcccagccgatgcgtgcaggagct

SEQ ID NO: 4408017 - DNA, 25 bp, Homo sapien
tcgccgtaactcttacgatggccgg

SEQ ID NO: 4408018 - DNA, 25 bp, Homo sapien
agaggtgacagtcgccgtaactctt

SEQ ID NO: 4408019 - DNA, 25 bp, Homo sapien
gtgacagtcgccgtaactcttacga

SEQ ID NO: 4408020 - DNA, 25 bp, Homo sapien
ctgagaggtgacagtcgccgtaact

SEQ ID NO: 4408021 - DNA, 25 bp, Homo sapien
ccaagaggtccgatgccgaggagtg

SEQ ID NO: 4408022 - DNA, 25 bp, Homo sapien
caagaggtccgatgccgaggagtgg

SEQ ID NO: 4408023 - DNA, 25 bp, Homo sapien
tttatgacattctgtggtcaatgcc

SEQ ID NO: 4408024 - DNA, 25 bp, Homo sapien
gaccactgctctcgtggaaaaacac

SEQ ID NO: 4408025 - DNA, 25 bp, Homo sapien
ctccgaccactgctctcgtggaaaa

SEQ ID NO: 4408026 - DNA, 25 bp, Homo sapien
actgctctcgtggaaaaacacactg

SEQ ID NO: 4408027 - DNA, 25 bp, Homo sapien
ctgttggaaagatcctttcccagtg

SEQ ID NO: 4408028 - DNA, 25 bp, Homo sapien
tggaaatctattgtaccacactgtt

SEQ ID NO: 4408029 - DNA, 25 bp, Homo sapien
gatcagctcctgttggaaagatcct

SEQ ID NO: 4408030 - DNA, 25 bp, Homo sapien
tgttcctttcttagatctgaattaa

SEQ ID NO: 4408031 - DNA, 25 bp, Homo sapien
gtgccagggccgtgttggaggcgcc

SEQ ID NO: 4408032 - DNA, 25 bp, Homo sapien
gaagccgtcctcatagactggaggg

SEQ ID NO: 4408033 - DNA, 25 bp, Homo sapien
agccatcgtgccagggccgtgttgg

SEQ ID NO: 4408034 - DNA, 25 bp, Homo sapien
cagtgggaacccgttgtacaagaag

SEQ ID NO: 4408035 - DNA, 25 bp, Homo sapien
agatttcaatctccctgagccttgg

SEQ ID NO: 4408036 - DNA, 25 bp, Homo sapien
cagtgattgctacatcaaagggagg

SEQ ID NO: 4408037 - DNA, 25 bp, Homo sapien
tttaaatctgcagggttccactcac

SEQ ID NO: 4408038 - DNA, 25 bp, Homo sapien
gatctgaagggattgcacgcagcac

SEQ ID NO: 4408039 - DNA, 25 bp, Homo sapien
gagcgtgagcccaattgccttgtcc

SEQ ID NO: 4408040 - DNA, 25 bp, Homo sapien
ggaaagcgacttgcaggaagccagt

SEQ ID NO: 4408041 - DNA, 25 bp, Homo sapien
ttctcacggcttctgggaataccag

SEQ ID NO: 4408042 - DNA, 25 bp, Homo sapien
caccgagccgtcttcagtgacacag

SEQ ID NO: 4408043 - DNA, 25 bp, Homo sapien
tggttctcacaagtcatctggcagt

SEQ ID NO: 4408044 - DNA, 25 bp, Homo sapien
ctctgtggtgtgaacgcgatgtcgt

SEQ ID NO: 4408045 - DNA, 25 bp, Homo sapien
atgccatcaggaggtcagaatagcg

SEQ ID NO: 4408046 - DNA, 25 bp, Homo sapien
ggtcgatgtattgtccccatgccat

SEQ ID NO: 4408047 - DNA, 25 bp, Homo sapien
ggtgaccgggctcactctaactgag

SEQ ID NO: 4408048 - DNA, 25 bp, Homo sapien
tgaccgggctcactctaactgagcc

SEQ ID NO: 4408049 - DNA, 25 bp, Homo sapien
ggggtgaccgggctcactctaactg

SEQ ID NO: 4408050 - DNA, 25 bp, Homo sapien
ctggggtgaccgggctcactctaac

SEQ ID NO: 4408051 - DNA, 25 bp, Homo sapien
ttgaaatagggcagagagacggtac

SEQ ID NO: 4408052 - DNA, 25 bp, Homo sapien
ctcggggcaaagtgcagcctgggca

SEQ ID NO: 4408053 - DNA, 25 bp, Homo sapien
cctctcggggcaaagtgcagcctgg

SEQ ID NO: 4408054 - DNA, 25 bp, Homo sapien
gctcctctcggggcaaagtgcagcc

SEQ ID NO: 4408055 - DNA, 25 bp, Homo sapien
tcctctcggggcaaagtgcagcctg

SEQ ID NO: 4408056 - DNA, 25 bp, Homo sapien
ggttaaatcgctcatccagaatcac

SEQ ID NO: 4408057 - DNA, 25 bp, Homo sapien
gacagattccgaaagagactcttcc

SEQ ID NO: 4408058 - DNA, 25 bp, Homo sapien
cctgggcgttatcagatttaggagg

SEQ ID NO: 4408059 - DNA, 25 bp, Homo sapien
tcacggtcttctcgtaataggacat

SEQ ID NO: 4408060 - DNA, 25 bp, Homo sapien
gcaggcaaaggggagttcaaggtca

SEQ ID NO: 4408061 - DNA, 25 bp, Homo sapien
gcaaaggggagttcaaggtcaccca

SEQ ID NO: 4408062 - DNA, 25 bp, Homo sapien
ctgcaggcaaaggggagttcaaggt

SEQ ID NO: 4408063 - DNA, 25 bp, Homo sapien
tgcaggcaaaggggagttcaaggtc

SEQ ID NO: 4408064 - DNA, 25 bp, Homo sapien
cgttcatctgctgccgcgggttggc

SEQ ID NO: 4408065 - DNA, 25 bp, Homo sapien
tccagtgcgcattgagggccttgag

SEQ ID NO: 4408066 - DNA, 25 bp, Homo sapien
cgtggacaggttcccaaagagcgcg

SEQ ID NO: 4408067 - DNA, 25 bp, Homo sapien
tggacgcgtccaggaacgaggtcaa

SEQ ID NO: 4408068 - DNA, 25 bp, Homo sapien
gagaagccacgatgctgcgcaccca

SEQ ID NO: 4408069 - DNA, 25 bp, Homo sapien
acgatgctgcgcacccacacgaggc

SEQ ID NO: 4408070 - DNA, 25 bp, Homo sapien
cgatgctgcgcacccacacgaggcg

SEQ ID NO: 4408071 - DNA, 25 bp, Homo sapien
agagagaagccacgatgctgcgcac

SEQ ID NO: 4408072 - DNA, 25 bp, Homo sapien
ggcgcccatgatggctgtgcaagta

SEQ ID NO: 4408073 - DNA, 25 bp, Homo sapien
gcgcccatgatggctgtgcaagtac

SEQ ID NO: 4408074 - DNA, 25 bp, Homo sapien
acctgggtggtctggctgccactgt

SEQ ID NO: 4408075 - DNA, 25 bp, Homo sapien
gcaggctcccggctaggactgcaga

SEQ ID NO: 4408076 - DNA, 25 bp, Homo sapien
caggctcccggctaggactgcagac

SEQ ID NO: 4408077 - DNA, 25 bp, Homo sapien
taggactgcagacacgatgcccagg

SEQ ID NO: 4408078 - DNA, 25 bp, Homo sapien
gacacgatgcccaggccgccacagg

SEQ ID NO: 4408079 - DNA, 25 bp, Homo sapien
accccagtgcagtgaaggccagaaa

SEQ ID NO: 4408080 - DNA, 25 bp, Homo sapien
cagtgcctcctttagaacaggactg

SEQ ID NO: 4408081 - DNA, 25 bp, Homo sapien
ctcctcggacaaggctccagtgcct

SEQ ID NO: 4408082 - DNA, 25 bp, Homo sapien
cgggggcagccggtgccacacacag

SEQ ID NO: 4408083 - DNA, 25 bp, Homo sapien
tgcccacagcagaagtcctgtggcc

SEQ ID NO: 4408084 - DNA, 25 bp, Homo sapien
cccgagagatgccggatcccaggaa

SEQ ID NO: 4408085 - DNA, 25 bp, Homo sapien
caagatcctcagagtgggggcggct

SEQ ID NO: 4408086 - DNA, 25 bp, Homo sapien
gggatagctctcagctttcgacaaa

SEQ ID NO: 4408087 - DNA, 25 bp, Homo sapien
gactgaaaggtccacacttgggaaa

SEQ ID NO: 4408088 - DNA, 25 bp, Homo sapien
tgtcaccgacggtgggaaacagccg

SEQ ID NO: 4408089 - DNA, 25 bp, Homo sapien
tgaactttctgactctcgactgctt

SEQ ID NO: 4408090 - DNA, 25 bp, Homo sapien
gagacctggagatgcgatccttgtc

SEQ ID NO: 4408091 - DNA, 25 bp, Homo sapien
cctcgctgtcccgctccacctcgga

SEQ ID NO: 4408092 - DNA, 25 bp, Homo sapien
ccctcgctgtcccgctccacctcgg

SEQ ID NO: 4408093 - DNA, 25 bp, Homo sapien
agccgtgagtcttgtgtggcctggg

SEQ ID NO: 4408094 - DNA, 25 bp, Homo sapien
gagaccagggagagccgtgagtctt

SEQ ID NO: 4408095 - DNA, 25 bp, Homo sapien
ccagggagagccgtgagtcttgtgt

SEQ ID NO: 4408096 - DNA, 25 bp, Homo sapien
ggagagccgtgagtcttgtgtggcc

SEQ ID NO: 4408097 - DNA, 25 bp, Homo sapien
tgtttcttccatgtgccagaatgca

SEQ ID NO: 4408098 - DNA, 25 bp, Homo sapien
gtttcttccatgtgccagaatgcat

SEQ ID NO: 4408099 - DNA, 25 bp, Homo sapien
tggggatgtaatccctcagggtgat

SEQ ID NO: 4408100 - DNA, 25 bp, Homo sapien
ggatgtaatccctcagggtgatgat

SEQ ID NO: 4408101 - DNA, 25 bp, Homo sapien
gggatgtaatccctcagggtgatga

SEQ ID NO: 4408102 - DNA, 25 bp, Homo sapien
ctggggatgtaatccctcagggtga

SEQ ID NO: 4408103 - DNA, 25 bp, Homo sapien
gttggcggtggagtcatagccttca

SEQ ID NO: 4408104 - DNA, 25 bp, Homo sapien
tccacggagtaatgtccatgggctg

SEQ ID NO: 4408105 - DNA, 25 bp, Homo sapien
atagccttcatagggacccacgtac

SEQ ID NO: 4408106 - DNA, 25 bp, Homo sapien
ctcaccagcgggtggatcgtggcat

SEQ ID NO: 4408107 - DNA, 25 bp, Homo sapien
tcatcagctgatcctgcacctgcag

SEQ ID NO: 4408108 - DNA, 25 bp, Homo sapien
tgcaagaaggcctcgtattagtggg

SEQ ID NO: 4408109 - DNA, 25 bp, Homo sapien
agcacaaagagcctttccgtcagct

SEQ ID NO: 4408110 - DNA, 25 bp, Homo sapien
gcaggttgatggacgccagatccaa

SEQ ID NO: 4408111 - DNA, 25 bp, Homo sapien
ccagatattcacagcctgtgtggct

SEQ ID NO: 4408112 - DNA, 25 bp, Homo sapien
atttagtccccagatattcacagcc

SEQ ID NO: 4408113 - DNA, 25 bp, Homo sapien
gtccccagatattcacagcctgtgt

SEQ ID NO: 4408114 - DNA, 25 bp, Homo sapien
tgtgtggctgctgatcccagccctt

SEQ ID NO: 4408115 - DNA, 25 bp, Homo sapien
gcagaactccctccactcattgtaa

SEQ ID NO: 4408116 - DNA, 25 bp, Homo sapien
gaagttttcagctaagcctcccagc

SEQ ID NO: 4408117 - DNA, 25 bp, Homo sapien
tcgatgttgtcaggatgcttgtaca

SEQ ID NO: 4408118 - DNA, 25 bp, Homo sapien
gcctcccagccagacatcgatgttg

SEQ ID NO: 4408119 - DNA, 25 bp, Homo sapien
gaacgtgaaggaagacgctctggat

SEQ ID NO: 4408120 - DNA, 25 bp, Homo sapien
agaacgtgaaggaagacgctctgga

SEQ ID NO: 4408121 - DNA, 25 bp, Homo sapien
gcagaacgtgaaggaagacgctctg

SEQ ID NO: 4408122 - DNA, 25 bp, Homo sapien
cagaacgtgaaggaagacgctctgg

SEQ ID NO: 4408123 - DNA, 25 bp, Homo sapien
tgacccgagacagggagtgcttctc

SEQ ID NO: 4408124 - DNA, 25 bp, Homo sapien
cagtgttgtcacagatgacccgaga

SEQ ID NO: 4408125 - DNA, 25 bp, Homo sapien
gatgctgtcacaagactcaaagtct

SEQ ID NO: 4408126 - DNA, 25 bp, Homo sapien
tctgtgcatccgtgaagacgtggct

SEQ ID NO: 4408127 - DNA, 25 bp, Homo sapien
actcctcacagtgcacaaagtcccc

SEQ ID NO: 4408128 - DNA, 25 bp, Homo sapien
gctctctgggaagccacacttgtcg

SEQ ID NO: 4408129 - DNA, 25 bp, Homo sapien
tcacagtgcacaaagtccccattct

SEQ ID NO: 4408130 - DNA, 25 bp, Homo sapien
gcaggaatacaccagcacgcgcctc

SEQ ID NO: 4408131 - DNA, 25 bp, Homo sapien
ggctggaaatcccatccttcctggg

SEQ ID NO: 4408132 - DNA, 25 bp, Homo sapien
ctgctcccggccttggagctcatac

SEQ ID NO: 4408133 - DNA, 25 bp, Homo sapien
cctgggtgcaagtgagctgctcccg

SEQ ID NO: 4408134 - DNA, 25 bp, Homo sapien
gaaatcccatccttcctgggtgcaa

SEQ ID NO: 4408135 - DNA, 25 bp, Homo sapien
cattggtcacgattccacgtgcctg

SEQ ID NO: 4408136 - DNA, 25 bp, Homo sapien
tcacgattccacgtgcctgtcctga

SEQ ID NO: 4408137 - DNA, 25 bp, Homo sapien
gaccccattggtcacgattccacgt

SEQ ID NO: 4408138 - DNA, 25 bp, Homo sapien
gtgaccccattggtcacgattccac

SEQ ID NO: 4408139 - DNA, 25 bp, Homo sapien
gggagtggaacccagtggctggagg

SEQ ID NO: 4408140 - DNA, 25 bp, Homo sapien
tcaaattaccgccaggaagccacac

SEQ ID NO: 4408141 - DNA, 25 bp, Homo sapien
taccgccaggaagccacacttgtcc

SEQ ID NO: 4408142 - DNA, 25 bp, Homo sapien
ccgccaggaagccacacttgtccac

SEQ ID NO: 4408143 - DNA, 25 bp, Homo sapien
gccaggaagccacacttgtccacac

SEQ ID NO: 4408144 - DNA, 25 bp, Homo sapien
cacgcccggccttaatatcaagttt

SEQ ID NO: 4408145 - DNA, 25 bp, Homo sapien
accacgcccggccttaatatcaagt

SEQ ID NO: 4408146 - DNA, 25 bp, Homo sapien
ccacgcccggccttaatatcaagtt

SEQ ID NO: 4408147 - DNA, 25 bp, Homo sapien
actcgtaggggtccgcgcagagaca

SEQ ID NO: 4408148 - DNA, 25 bp, Homo sapien
tgggcaccgtctgcacactcgttca

SEQ ID NO: 4408149 - DNA, 25 bp, Homo sapien
tcccatcgtctcctaactcgtaggg

SEQ ID NO: 4408150 - DNA, 25 bp, Homo sapien
tgcacctcgcagaggcgtggcaggg

SEQ ID NO: 4408151 - DNA, 25 bp, Homo sapien
cagctgtcggagaggaagctcctcg

SEQ ID NO: 4408152 - DNA, 25 bp, Homo sapien
gaagacgtgttctgcggcggaccct

SEQ ID NO: 4408153 - DNA, 25 bp, Homo sapien
tgacttcaggttcggcagccaggag

SEQ ID NO: 4408154 - DNA, 25 bp, Homo sapien
agggaggtcagggaggtacacggca

SEQ ID NO: 4408155 - DNA, 25 bp, Homo sapien
gagactccgtctaatacgatcagca

SEQ ID NO: 4408156 - DNA, 25 bp, Homo sapien
tccgtctaatacgatcagcacacgg

SEQ ID NO: 4408157 - DNA, 25 bp, Homo sapien
aatacgatcagcacacgggctggcc

SEQ ID NO: 4408158 - DNA, 25 bp, Homo sapien
ctggagactccgtctaatacgatca

SEQ ID NO: 4408159 - DNA, 25 bp, Homo sapien
taagggacgcggtataacgctgtga

SEQ ID NO: 4408160 - DNA, 25 bp, Homo sapien
gctctcagtgccctcggagtggacc

SEQ ID NO: 4408161 - DNA, 25 bp, Homo sapien
ctgtgaggttttgcccttggctgca

SEQ ID NO: 4408162 - DNA, 25 bp, Homo sapien
gtggacagcaccttgcagagctgga

SEQ ID NO: 4408163 - DNA, 25 bp, Homo sapien
tgtgggttcggcatggacgcgtcct

SEQ ID NO: 4408164 - DNA, 25 bp, Homo sapien
acgcgtcctgcaggacagaaagcac

SEQ ID NO: 4408165 - DNA, 25 bp, Homo sapien
cggcatggacgcgtcctgcaggaca

SEQ ID NO: 4408166 - DNA, 25 bp, Homo sapien
catggacgcgtcctgcaggacagaa

SEQ ID NO: 4408167 - DNA, 25 bp, Homo sapien
gagcagccagcgacatggagatcca

SEQ ID NO: 4408168 - DNA, 25 bp, Homo sapien
gcgaagcctccgatcagcagagcag

SEQ ID NO: 4408169 - DNA, 25 bp, Homo sapien
cacctgcaaatcaccgtcgaggtga

SEQ ID NO: 4408170 - DNA, 25 bp, Homo sapien
agtcacccgagggagcctcccggag

SEQ ID NO: 4408171 - DNA, 25 bp, Homo sapien
gcctttgcgatgtgtcagacttgaa

SEQ ID NO: 4408172 - DNA, 25 bp, Homo sapien
tgtttgggtgtagcctttgcgatgt

SEQ ID NO: 4408173 - DNA, 25 bp, Homo sapien
tgaacattcgaagccaggttgagat

SEQ ID NO: 4408174 - DNA, 25 bp, Homo sapien
tgtgtcagacttgaacattcgaagc

SEQ ID NO: 4408175 - DNA, 25 bp, Homo sapien
tctgtacaggcccaacggtccttgg

SEQ ID NO: 4408176 - DNA, 25 bp, Homo sapien
tgcttgtgacggtgtcattaggagc

SEQ ID NO: 4408177 - DNA, 25 bp, Homo sapien
acccttgcggactccgacctaggtg

SEQ ID NO: 4408178 - DNA, 25 bp, Homo sapien
tccgacctaggtgtacatggaagac

SEQ ID NO: 4408179 - DNA, 25 bp, Homo sapien
gcaccatcatcaccggtcctgagca

SEQ ID NO: 4408180 - DNA, 25 bp, Homo sapien
caccatcatcaccggtcctgagcat

SEQ ID NO: 4408181 - DNA, 25 bp, Homo sapien
ggcaccatcatcaccggtcctgagc

SEQ ID NO: 4408182 - DNA, 25 bp, Homo sapien
ggtggtcattcatccctgaactctg

SEQ ID NO: 4408183 - DNA, 25 bp, Homo sapien
ttccccaaatactgagctgctggac

SEQ ID NO: 4408184 - DNA, 25 bp, Homo sapien
tgctggactccttcccttgccttgg

SEQ ID NO: 4408185 - DNA, 25 bp, Homo sapien
ccccattccccaaatactgagctgc

SEQ ID NO: 4408186 - DNA, 25 bp, Homo sapien
gacacgtgtccagttatcgggagag

SEQ ID NO: 4408187 - DNA, 25 bp, Homo sapien
ctgtgggagacacgtgtccagttat

SEQ ID NO: 4408188 - DNA, 25 bp, Homo sapien
atcgggagagggtccggcaccgtga

SEQ ID NO: 4408189 - DNA, 25 bp, Homo sapien
tccggcaccgtgactgtggagggta

SEQ ID NO: 4408190 - DNA, 25 bp, Homo sapien
cggcctggtgctttccgcatctcag

SEQ ID NO: 4408191 - DNA, 25 bp, Homo sapien
cgctgcggtgaggtccctacggcct

SEQ ID NO: 4408192 - DNA, 25 bp, Homo sapien
tccgcatctcagctcgggagttcct

SEQ ID NO: 4408193 - DNA, 25 bp, Homo sapien
gagttcctccgcctgtctccgagat

SEQ ID NO: 4408194 - DNA, 25 bp, Homo sapien
ggcagcctgtgagtatcccggcctt

SEQ ID NO: 4408195 - DNA, 25 bp, Homo sapien
gctctcggcagcctgtgagtatccc

SEQ ID NO: 4408196 - DNA, 25 bp, Homo sapien
tctcggcagcctgtgagtatcccgg

SEQ ID NO: 4408197 - DNA, 25 bp, Homo sapien
gcctgtgagtatcccggccttccat

SEQ ID NO: 4408198 - DNA, 25 bp, Homo sapien
ctgtgtttggaaaagagtcgtacgg

SEQ ID NO: 4408199 - DNA, 25 bp, Homo sapien
cgtacggtgattttgggaacatgaa

SEQ ID NO: 4408200 - DNA, 25 bp, Homo sapien
ccgtgttgggaaaacagtcgtcctg

SEQ ID NO: 4408201 - DNA, 25 bp, Homo sapien
ctgctgatttcggatttgcctgtgt

SEQ ID NO: 4408202 - DNA, 25 bp, Homo sapien
tttattcatccatgcctgagagtaa

SEQ ID NO: 4408203 - DNA, 25 bp, Homo sapien
cctgagagtaactacgacatggtac

SEQ ID NO: 4408204 - DNA, 25 bp, Homo sapien
gagtaactacgacatggtactagat

SEQ ID NO: 4408205 - DNA, 25 bp, Homo sapien
tccatgcctgagagtaactacgaca

SEQ ID NO: 4408206 - DNA, 25 bp, Homo sapien
gaaggaacaaatcaggcaatgttta

SEQ ID NO: 4408207 - DNA, 25 bp, Homo sapien
aacagtctggtatttttgggtcaca

SEQ ID NO: 4408208 - DNA, 25 bp, Homo sapien
aagccaggagtgctcttcccaggag

SEQ ID NO: 4408209 - DNA, 25 bp, Homo sapien
tttgctttcaatgccgaaggactcc

SEQ ID NO: 4408210 - DNA, 25 bp, Homo sapien
cagctttacagggtcgcgtggctaa

SEQ ID NO: 4408211 - DNA, 25 bp, Homo sapien
ttattccagagctcagtaagcccac

SEQ ID NO: 4408212 - DNA, 25 bp, Homo sapien
taagtccgtaagcaatgagcagttc

SEQ ID NO: 4408213 - DNA, 25 bp, Homo sapien
tgtggcttttgcgaaggcatctgca

SEQ ID NO: 4408214 - DNA, 25 bp, Homo sapien
tctgtcggccctaagtggatgctcg

SEQ ID NO: 4408215 - DNA, 25 bp, Homo sapien
agtccggtgccctaactgcagattg

SEQ ID NO: 4408216 - DNA, 25 bp, Homo sapien
tagggatagtgttcctccacgaccc

SEQ ID NO: 4408217 - DNA, 25 bp, Homo sapien
catgtgctgacatctccacgtgtgc

SEQ ID NO: 4408218 - DNA, 25 bp, Homo sapien
tcatgagcgaagagaccgtgagcct

SEQ ID NO: 4408219 - DNA, 25 bp, Homo sapien
gactgaggactggaggtactctgca

SEQ ID NO: 4408220 - DNA, 25 bp, Homo sapien
aggactgaggactggaggtactctg

SEQ ID NO: 4408221 - DNA, 25 bp, Homo sapien
ggaggtactctgcagacaggtgctg

SEQ ID NO: 4408222 - DNA, 25 bp, Homo sapien
ggactgaggactggaggtactctgc

SEQ ID NO: 4408223 - DNA, 25 bp, Homo sapien
ggacctagaagccactgagtaactg

SEQ ID NO: 4408224 - DNA, 25 bp, Homo sapien
tctggtttccgagagagggacctag

SEQ ID NO: 4408225 - DNA, 25 bp, Homo sapien
ttccgagagagggacctagaagcca

SEQ ID NO: 4408226 - DNA, 25 bp, Homo sapien
actgagtaactgtgactggagggac

SEQ ID NO: 4408227 - DNA, 25 bp, Homo sapien
tccttttaaacagactctgccctgt

SEQ ID NO: 4408228 - DNA, 25 bp, Homo sapien
tgaggtggcggccatctcttcgtag

SEQ ID NO: 4408229 - DNA, 25 bp, Homo sapien
gggatttcctcattattgcgacaat

SEQ ID NO: 4408230 - DNA, 25 bp, Homo sapien
gagactgtcggagcttccttttaaa

SEQ ID NO: 4408231 - DNA, 25 bp, Homo sapien
gaaccttggtataaagtccctgtga

SEQ ID NO: 4408232 - DNA, 25 bp, Homo sapien
gaatgcatgactaagacgtcctgag

SEQ ID NO: 4408233 - DNA, 25 bp, Homo sapien
tctttgtgcaacgtggagaaccttg

SEQ ID NO: 4408234 - DNA, 25 bp, Homo sapien
tgatcactgacaactgcctagaagg

SEQ ID NO: 4408235 - DNA, 25 bp, Homo sapien
ctgagggtgtctgtgaggctggatg

SEQ ID NO: 4408236 - DNA, 25 bp, Homo sapien
cagggtcacgtcctgacccagaagc

SEQ ID NO: 4408237 - DNA, 25 bp, Homo sapien
ccagggtcacgtcctgacccagaag

SEQ ID NO: 4408238 - DNA, 25 bp, Homo sapien
gcccgtctgcagggtggaggtcagc

SEQ ID NO: 4408239 - DNA, 25 bp, Homo sapien
tgggcccaggcggctgtgctgagtc

SEQ ID NO: 4408240 - DNA, 25 bp, Homo sapien
cccacacagtcagggggagacccgg

SEQ ID NO: 4408241 - DNA, 25 bp, Homo sapien
gctgagtcctgcgagcacttcacat

SEQ ID NO: 4408242 - DNA, 25 bp, Homo sapien
tgtcactgtcaccaccgcactctcc

SEQ ID NO: 4408243 - DNA, 25 bp, Homo sapien
tcactgtcaccaccgcactctccag

SEQ ID NO: 4408244 - DNA, 25 bp, Homo sapien
actgtcaccaccgcactctccaggg

SEQ ID NO: 4408245 - DNA, 25 bp, Homo sapien
ctgtcaccaccgcactctccagggt

SEQ ID NO: 4408246 - DNA, 25 bp, Homo sapien
cgtcgagcaccagcaattttactct

SEQ ID NO: 4408247 - DNA, 25 bp, Homo sapien
caattttactctctgcagggtggaa

SEQ ID NO: 4408248 - DNA, 25 bp, Homo sapien
tggattttcagtagctttgcaagga

SEQ ID NO: 4408249 - DNA, 25 bp, Homo sapien
gaagcgactgccgtgcacgcgttcc

SEQ ID NO: 4408250 - DNA, 25 bp, Homo sapien
cgggaacattcgtggcatccaggag

SEQ ID NO: 4408251 - DNA, 25 bp, Homo sapien
cacgggccaggctctcataggtgct

SEQ ID NO: 4408252 - DNA, 25 bp, Homo sapien
ttgattgaaggatgctccgcggtga

SEQ ID NO: 4408253 - DNA, 25 bp, Homo sapien
gttctcaaacatccaccaacggctg

SEQ ID NO: 4408254 - DNA, 25 bp, Homo sapien
agggaccacggcctcccaggattgt

SEQ ID NO: 4408255 - DNA, 25 bp, Homo sapien
tagtggctggtttactggtgtagca

SEQ ID NO: 4408256 - DNA, 25 bp, Homo sapien
caggatgtggcctgaccgtgggctc

SEQ ID NO: 4408257 - DNA, 25 bp, Homo sapien
tgacttggtacaacgagggaccacg

SEQ ID NO: 4408258 - DNA, 25 bp, Homo sapien
gtttactggtgtggccgctggtata

SEQ ID NO: 4408259 - DNA, 25 bp, Homo sapien
catgctggtgtagcggctggcttac

SEQ ID NO: 4408260 - DNA, 25 bp, Homo sapien
tatgctggtgtagcggctggcatgc

SEQ ID NO: 4408261 - DNA, 25 bp, Homo sapien
ttgctggtgtagtggctggtatgct

SEQ ID NO: 4408262 - DNA, 25 bp, Homo sapien
tgtgttgcggccatcgtggctgcct

SEQ ID NO: 4408263 - DNA, 25 bp, Homo sapien
acccacgtcccctgtgttgcggcca

SEQ ID NO: 4408264 - DNA, 25 bp, Homo sapien
acgctggaacccacgccccttgcat

SEQ ID NO: 4408265 - DNA, 25 bp, Homo sapien
gttgcggccatcgtggctgcctcca

SEQ ID NO: 4408266 - DNA, 25 bp, Homo sapien
cagattggcgtgatgactagctgca

SEQ ID NO: 4408267 - DNA, 25 bp, Homo sapien
caacacacgtctttggttgtaaagc

SEQ ID NO: 4408268 - DNA, 25 bp, Homo sapien
tgcatacggacacatacaacacacg

SEQ ID NO: 4408269 - DNA, 25 bp, Homo sapien
tgaccttgtgtccatccctgtgatg

SEQ ID NO: 4408270 - DNA, 25 bp, Homo sapien
cttcttgttatcatcgttgcccgtg

SEQ ID NO: 4408271 - DNA, 25 bp, Homo sapien
tgttatcatcgttgcccgtggcctg

SEQ ID NO: 4408272 - DNA, 25 bp, Homo sapien
tcttgttatcatcgttgcccgtggc

SEQ ID NO: 4408273 - DNA, 25 bp, Homo sapien
cttgttatcatcgttgcccgtggcc

SEQ ID NO: 4408274 - DNA, 25 bp, Homo sapien
ttagtagacacgatttttgaggtcc

SEQ ID NO: 4408275 - DNA, 25 bp, Homo sapien
tgtctgctgacgggccactttcctc

SEQ ID NO: 4408276 - DNA, 25 bp, Homo sapien
tgctgacgggccactttcctcacag

SEQ ID NO: 4408277 - DNA, 25 bp, Homo sapien
atttttgaggtccaagatgatcggg

SEQ ID NO: 4408278 - DNA, 25 bp, Homo sapien
aagcagcaaccacatggagaagtga

SEQ ID NO: 4408279 - DNA, 25 bp, Homo sapien
cagcaaccacatggagaagtgacca

SEQ ID NO: 4408280 - DNA, 25 bp, Homo sapien
cagcatcgggtcagtgttgtttgag

SEQ ID NO: 4408281 - DNA, 25 bp, Homo sapien
ttggtcctcacccagcatcgggtca

SEQ ID NO: 4408282 - DNA, 25 bp, Homo sapien
cttgggcaggagattaatcctcaca

SEQ ID NO: 4408283 - DNA, 25 bp, Homo sapien
agtgctagacgtgcccactttgtag

SEQ ID NO: 4408284 - DNA, 25 bp, Homo sapien
tgggcaggagattaatcctcacagt

SEQ ID NO: 4408285 - DNA, 25 bp, Homo sapien
ctcacagtgctagacgtgcccactt

SEQ ID NO: 4408286 - DNA, 25 bp, Homo sapien
gggctggtaatgaaaaagacttgca

SEQ ID NO: 4408287 - DNA, 25 bp, Homo sapien
caagcctgttcttaacccactgaag

SEQ ID NO: 4408288 - DNA, 25 bp, Homo sapien
tcttcgtaggttatctgggattcgc

SEQ ID NO: 4408289 - DNA, 25 bp, Homo sapien
tcagcgtggtacagcattgcaagcc

SEQ ID NO: 4408290 - DNA, 25 bp, Homo sapien
ttaagccatctctagtgatgtgtta

SEQ ID NO: 4408291 - DNA, 25 bp, Homo sapien
tatttgttatgttctcctttgtgct

SEQ ID NO: 4408292 - DNA, 25 bp, Homo sapien
ttagatgcctagtgcatttgttatt

SEQ ID NO: 4408293 - DNA, 25 bp, Homo sapien
ttcctttgctatttagatgcctagt

SEQ ID NO: 4408294 - DNA, 25 bp, Homo sapien
taaatcttccagaataaactgaaca

SEQ ID NO: 4408295 - DNA, 25 bp, Homo sapien
tcataaatcttccagaataaactga

SEQ ID NO: 4408296 - DNA, 25 bp, Homo sapien
ctttcataaatcttccagaataaac

SEQ ID NO: 4408297 - DNA, 25 bp, Homo sapien
aaatcttccagaataaactgaacat

SEQ ID NO: 4408298 - DNA, 25 bp, Homo sapien
ctggaggacaagaaaagtggtacag

SEQ ID NO: 4408299 - DNA, 25 bp, Homo sapien
tggaggacaagaaaagtggtacagc

SEQ ID NO: 4408300 - DNA, 25 bp, Homo sapien
gccctgcgtagtgggcttgacagag

SEQ ID NO: 4408301 - DNA, 25 bp, Homo sapien
tagtgggcttgacagagtcgcaggg

SEQ ID NO: 4408302 - DNA, 25 bp, Homo sapien
cctgcgtagtgggcttgacagagtc

SEQ ID NO: 4408303 - DNA, 25 bp, Homo sapien
cagagtcgcagggcccttcctcaag

SEQ ID NO: 4408304 - DNA, 25 bp, Homo sapien
tgtcatagtggatagtcctgcgcac

SEQ ID NO: 4408305 - DNA, 25 bp, Homo sapien
acaatgggctgctgtcatagtggat

SEQ ID NO: 4408306 - DNA, 25 bp, Homo sapien
tgggctgctgtcatagtggatagtc

SEQ ID NO: 4408307 - DNA, 25 bp, Homo sapien
gctgctgtcatagtggatagtcctg

SEQ ID NO: 4408308 - DNA, 25 bp, Homo sapien
taccagattagaactgaggaccaga

SEQ ID NO: 4408309 - DNA, 25 bp, Homo sapien
gaggaccagactccagacttccaaa

SEQ ID NO: 4408310 - DNA, 25 bp, Homo sapien
agagaccgcaagaacacatgaacga

SEQ ID NO: 4408311 - DNA, 25 bp, Homo sapien
aaattttcaacctctcacttgagga

SEQ ID NO: 4408312 - DNA, 25 bp, Homo sapien
gtagctctcgacattaccatagttc

SEQ ID NO: 4408313 - DNA, 25 bp, Homo sapien
gtgccagtgcccgtacacgttgggt

SEQ ID NO: 4408314 - DNA, 25 bp, Homo sapien
ttctttacccgtgcctttccatgcc

SEQ ID NO: 4408315 - DNA, 25 bp, Homo sapien
catgcctccttaggtcaaaggcagt

SEQ ID NO: 4408316 - DNA, 25 bp, Homo sapien
gatcccagttcttcggtaaatgtgg

SEQ ID NO: 4408317 - DNA, 25 bp, Homo sapien
cccagttcttcggtaaatgtggagc

SEQ ID NO: 4408318 - DNA, 25 bp, Homo sapien
ggaggaggatcccagttcttcggta

SEQ ID NO: 4408319 - DNA, 25 bp, Homo sapien
gaggatcccagttcttcggtaaatg

SEQ ID NO: 4408320 - DNA, 25 bp, Homo sapien
gtctctatagcagttccccttcttc

SEQ ID NO: 4408321 - DNA, 25 bp, Homo sapien
tctctatagcagttccccttcttct

SEQ ID NO: 4408322 - DNA, 25 bp, Homo sapien
tctatagcagttccccttcttctcc

SEQ ID NO: 4408323 - DNA, 25 bp, Homo sapien
agtctctatagcagttccccttctt

SEQ ID NO: 4408324 - DNA, 25 bp, Homo sapien
aaaatgcatgcaggggtcatcactg

SEQ ID NO: 4408325 - DNA, 25 bp, Homo sapien
gaaaaatgcatgcaggggtcatcac

SEQ ID NO: 4408326 - DNA, 25 bp, Homo sapien
aaatgcatgcaggggtcatcactgt

SEQ ID NO: 4408327 - DNA, 25 bp, Homo sapien
ctgaaaaatgcatgcaggggtcatc

SEQ ID NO: 4408328 - DNA, 25 bp, Homo sapien
tagaacacagtggtgattagccagc

SEQ ID NO: 4408329 - DNA, 25 bp, Homo sapien
cagtggtgattagccagctctctaa

SEQ ID NO: 4408330 - DNA, 25 bp, Homo sapien
gccagctctctaacacctgtgtgct

SEQ ID NO: 4408331 - DNA, 25 bp, Homo sapien
gaacacagtggtgattagccagctc

SEQ ID NO: 4408332 - DNA, 25 bp, Homo sapien
tatattatggacgaaaaagcaactc

SEQ ID NO: 4408333 - DNA, 25 bp, Homo sapien
acatacgctaactggatggcaagga

SEQ ID NO: 4408334 - DNA, 25 bp, Homo sapien
taaatcctaactttttatgcaccca

SEQ ID NO: 4408335 - DNA, 25 bp, Homo sapien
cttgatgtatagctgacacagtgct

SEQ ID NO: 4408336 - DNA, 25 bp, Homo sapien
tgcccagcatgcggctgcggaatga

SEQ ID NO: 4408337 - DNA, 25 bp, Homo sapien
ccagcatgcggctgcggaatgaggg

SEQ ID NO: 4408338 - DNA, 25 bp, Homo sapien
catgcggctgcggaatgaggggtgc

SEQ ID NO: 4408339 - DNA, 25 bp, Homo sapien
gcggctgcggaatgaggggtgcacc

SEQ ID NO: 4408340 - DNA, 25 bp, Homo sapien
gataagattcatccccatagcgcaa

SEQ ID NO: 4408341 - DNA, 25 bp, Homo sapien
cctccgggatgtggtcttgaaggac

SEQ ID NO: 4408342 - DNA, 25 bp, Homo sapien
gagtgataaatgaccgagcctgtga

SEQ ID NO: 4408343 - DNA, 25 bp, Homo sapien
ggctgccatcaggacttttacagga

SEQ ID NO: 4408344 - DNA, 25 bp, Homo sapien
atatcactgatggtccactcgccca

SEQ ID NO: 4408345 - DNA, 25 bp, Homo sapien
gatatcactgatggtccactcgccc

SEQ ID NO: 4408346 - DNA, 25 bp, Homo sapien
tatcactgatggtccactcgcccat

SEQ ID NO: 4408347 - DNA, 25 bp, Homo sapien
tccaatctgtggtctcggtaaactc

SEQ ID NO: 4408348 - DNA, 25 bp, Homo sapien
gcttggacctggagggcacttcgaa

SEQ ID NO: 4408349 - DNA, 25 bp, Homo sapien
aactcaaaaaacgtggcacccacag

SEQ ID NO: 4408350 - DNA, 25 bp, Homo sapien
gcacccacagaccttggaaccgtga

SEQ ID NO: 4408351 - DNA, 25 bp, Homo sapien
tattctaacacttcggaagcctggg

SEQ ID NO: 4408352 - DNA, 25 bp, Homo sapien
taggaagtacgtagaagactgtccc

SEQ ID NO: 4408353 - DNA, 25 bp, Homo sapien
catttattgagagtccaccccgtgc

SEQ ID NO: 4408354 - DNA, 25 bp, Homo sapien
taggcccacattacagctgcagagg

SEQ ID NO: 4408355 - DNA, 25 bp, Homo sapien
gatcctgtctaaccaactgggctac

SEQ ID NO: 4408356 - DNA, 25 bp, Homo sapien
tgtgtgccacctgtcaagctaagct

SEQ ID NO: 4408357 - DNA, 25 bp, Homo sapien
aagctaagcttcacgtacacaagag

SEQ ID NO: 4408358 - DNA, 25 bp, Homo sapien
tcatgtattcattctggccttcaaa

SEQ ID NO: 4408359 - DNA, 25 bp, Homo sapien
agaggcgctttgtcttcactcacag

SEQ ID NO: 4408360 - DNA, 25 bp, Homo sapien
caggacgacggtgaagtcaggattc

SEQ ID NO: 4408361 - DNA, 25 bp, Homo sapien
tatttcaccacctgtcagcgcccat

SEQ ID NO: 4408362 - DNA, 25 bp, Homo sapien
ccgcaatttagtgcccgatgtcatc

SEQ ID NO: 4408363 - DNA, 25 bp, Homo sapien
gggttgatagcactgcccagggaca

SEQ ID NO: 4408364 - DNA, 25 bp, Homo sapien
gacactttcccaaggcaggtcaggg

SEQ ID NO: 4408365 - DNA, 25 bp, Homo sapien
ctgggttgatagcactgcccaggga

SEQ ID NO: 4408366 - DNA, 25 bp, Homo sapien
gggacactttcccaaggcaggtcag

SEQ ID NO: 4408367 - DNA, 25 bp, Homo sapien
aacttcatatcggaacgtctggctc

SEQ ID NO: 4408368 - DNA, 25 bp, Homo sapien
tgctgtgatttacgcacggagccaa

SEQ ID NO: 4408369 - DNA, 25 bp, Homo sapien
catatcggaacgtctggctctgcag

SEQ ID NO: 4408370 - DNA, 25 bp, Homo sapien
cgcacggagccaacttcatatcgga

SEQ ID NO: 4408371 - DNA, 25 bp, Homo sapien
tacagggcaccccaaatcatccaga

SEQ ID NO: 4408372 - DNA, 25 bp, Homo sapien
actgaagttcaaagacgtgagttcc

SEQ ID NO: 4408373 - DNA, 25 bp, Homo sapien
ctctgccctgcgacctgcttggtga

SEQ ID NO: 4408374 - DNA, 25 bp, Homo sapien
tgagttccacaggagtacagggcac

SEQ ID NO: 4408375 - DNA, 25 bp, Homo sapien
tcattattccatgcagtggagctgg

SEQ ID NO: 4408376 - DNA, 25 bp, Homo sapien
ggtgctgctacccatcaggaacggc

SEQ ID NO: 4408377 - DNA, 25 bp, Homo sapien
tggctgcctattcaccaaagctgtg

SEQ ID NO: 4408378 - DNA, 25 bp, Homo sapien
cactttgttcccagaatggctgcgg

SEQ ID NO: 4408379 - DNA, 25 bp, Homo sapien
agcatcccggcagactccaggctcg

SEQ ID NO: 4408380 - DNA, 25 bp, Homo sapien
aagcatcccggcagactccaggctc

SEQ ID NO: 4408381 - DNA, 25 bp, Homo sapien
gcatcccggcagactccaggctcgg

SEQ ID NO: 4408382 - DNA, 25 bp, Homo sapien
tcaagcatcccggcagactccaggc

SEQ ID NO: 4408383 - DNA, 25 bp, Homo sapien
ttgcacgccactggcattgcctgga

SEQ ID NO: 4408384 - DNA, 25 bp, Homo sapien
aggcttgcacgccactggcattgcc

SEQ ID NO: 4408385 - DNA, 25 bp, Homo sapien
ccaaggcttgcacgccactggcatt

SEQ ID NO: 4408386 - DNA, 25 bp, Homo sapien
gtccccaaggcttgcacgccactgg

SEQ ID NO: 4408387 - DNA, 25 bp, Homo sapien
tgccgttcttttgagcacgttccca

SEQ ID NO: 4408388 - DNA, 25 bp, Homo sapien
gtgctttgccgttcttttgagcacg

SEQ ID NO: 4408389 - DNA, 25 bp, Homo sapien
ttaagccacacgtgtccctgggtgc

SEQ ID NO: 4408390 - DNA, 25 bp, Homo sapien
ttcttttgagcacgttcccacaaag

SEQ ID NO: 4408391 - DNA, 25 bp, Homo sapien
acttcccggcttgtgaatgcagagg

SEQ ID NO: 4408392 - DNA, 25 bp, Homo sapien
aagtcagcggtgagctcaaactcca

SEQ ID NO: 4408393 - DNA, 25 bp, Homo sapien
tgcagaggtgccgatgatgcgggca

SEQ ID NO: 4408394 - DNA, 25 bp, Homo sapien
cggaggaagtcagcggtgagctcaa

SEQ ID NO: 4408395 - DNA, 25 bp, Homo sapien
gcggactggattctgcagcctgagt

SEQ ID NO: 4408396 - DNA, 25 bp, Homo sapien
gcagcctgagtgtggcacctatcag

SEQ ID NO: 4408397 - DNA, 25 bp, Homo sapien
cgtggacatggcatacatgaaggcc

SEQ ID NO: 4408398 - DNA, 25 bp, Homo sapien
agacacagagcggactggattctgc

SEQ ID NO: 4408399 - DNA, 25 bp, Homo sapien
ctggggcaggcagcagggtccatgc

SEQ ID NO: 4408400 - DNA, 25 bp, Homo sapien
tggggcaggcagcagggtccatgca

SEQ ID NO: 4408401 - DNA, 25 bp, Homo sapien
ggggcaggcagcagggtccatgcat

SEQ ID NO: 4408402 - DNA, 25 bp, Homo sapien
tggtcctgctatggtgcagctgccc

SEQ ID NO: 4408403 - DNA, 25 bp, Homo sapien
agccgccgtgagaggcccctggtcc

SEQ ID NO: 4408404 - DNA, 25 bp, Homo sapien
ggccatggtccagccgccgtgagag

SEQ ID NO: 4408405 - DNA, 25 bp, Homo sapien
gcttgcctagggcagccccggccat

SEQ ID NO: 4408406 - DNA, 25 bp, Homo sapien
tggaagagtccgtccctgttgtgag

SEQ ID NO: 4408407 - DNA, 25 bp, Homo sapien
tgaatggaagagtccgtccctgttg

SEQ ID NO: 4408408 - DNA, 25 bp, Homo sapien
gaatgaatggaagagtccgtccctg

SEQ ID NO: 4408409 - DNA, 25 bp, Homo sapien
ggaatgaatggaagagtccgtccct

SEQ ID NO: 4408410 - DNA, 25 bp, Homo sapien
ggtggagccctttatgtccatgagg

SEQ ID NO: 4408411 - DNA, 25 bp, Homo sapien
aggtggagccctttatgtccatgag

SEQ ID NO: 4408412 - DNA, 25 bp, Homo sapien
gtggagccctttatgtccatgaggc

SEQ ID NO: 4408413 - DNA, 25 bp, Homo sapien
tctgggagtccagtacatgcagggc

SEQ ID NO: 4408414 - DNA, 25 bp, Homo sapien
gcagggcagttaattcccgcattcc

SEQ ID NO: 4408415 - DNA, 25 bp, Homo sapien
cttccacctacagcaggctctggga

SEQ ID NO: 4408416 - DNA, 25 bp, Homo sapien
gactgagctctaggatgccagggaa

SEQ ID NO: 4408417 - DNA, 25 bp, Homo sapien
tgcctttaccttccatgcagatgta

SEQ ID NO: 4408418 - DNA, 25 bp, Homo sapien
caaggagacacatcatgcctttacc

SEQ ID NO: 4408419 - DNA, 25 bp, Homo sapien
taatagtggcaaggcaaatgctctc

SEQ ID NO: 4408420 - DNA, 25 bp, Homo sapien
acagtgagaatccaggcccaatcct

SEQ ID NO: 4408421 - DNA, 25 bp, Homo sapien
ggcacagtgctcacaggaattgctg

SEQ ID NO: 4408422 - DNA, 25 bp, Homo sapien
gaatgtggagggcatcacccgacca

SEQ ID NO: 4408423 - DNA, 25 bp, Homo sapien
tggagggcatcacccgaccacggct

SEQ ID NO: 4408424 - DNA, 25 bp, Homo sapien
gctcacaggaattgctgcttccagg

SEQ ID NO: 4408425 - DNA, 25 bp, Homo sapien
tgttgttgaccaattcttctcagag

SEQ ID NO: 4408426 - DNA, 25 bp, Homo sapien
gttgttgaccaattcttctcagagg

SEQ ID NO: 4408427 - DNA, 25 bp, Homo sapien
ttgttgaccaattcttctcagaggc

SEQ ID NO: 4408428 - DNA, 25 bp, Homo sapien
gttgttgttgaccaattcttctcag

SEQ ID NO: 4408429 - DNA, 25 bp, Homo sapien
tttagacaatgggtgggcagtggag

SEQ ID NO: 4408430 - DNA, 25 bp, Homo sapien
tagatagagccaaacacaggcctgg

SEQ ID NO: 4408431 - DNA, 25 bp, Homo sapien
aagaacctgtgagtcttccaagtag

SEQ ID NO: 4408432 - DNA, 25 bp, Homo sapien
caaactggcttcacgttggttggtt

SEQ ID NO: 4408433 - DNA, 25 bp, Homo sapien
agagcagcagcttcagggactgaaa

SEQ ID NO: 4408434 - DNA, 25 bp, Homo sapien
agcagcttcagggactgaaaaaccc

SEQ ID NO: 4408435 - DNA, 25 bp, Homo sapien
gcagcagcttcagggactgaaaaac

SEQ ID NO: 4408436 - DNA, 25 bp, Homo sapien
gagcagcagcttcagggactgaaaa

SEQ ID NO: 4408437 - DNA, 25 bp, Homo sapien
cattagagaacccagtcaggtggtt

SEQ ID NO: 4408438 - DNA, 25 bp, Homo sapien
caccggaagcagaagtccaaacaca

SEQ ID NO: 4408439 - DNA, 25 bp, Homo sapien
aaacacacaagccagcggcaggtgc

SEQ ID NO: 4408440 - DNA, 25 bp, Homo sapien
attcggaagataccagccagccaga

SEQ ID NO: 4408441 - DNA, 25 bp, Homo sapien
tattggcaggaactatcagggaagc

SEQ ID NO: 4408442 - DNA, 25 bp, Homo sapien
aaatctttggcccatgagcgtgaaa

SEQ ID NO: 4408443 - DNA, 25 bp, Homo sapien
tccgtggaagtgcagattctgggca

SEQ ID NO: 4408444 - DNA, 25 bp, Homo sapien
gcagaaagatagtagtgggatccca

SEQ ID NO: 4408445 - DNA, 25 bp, Homo sapien
atggaaaatccgctgggcaaagcct

SEQ ID NO: 4408446 - DNA, 25 bp, Homo sapien
gaaaagctctaatttggcgatggaa

SEQ ID NO: 4408447 - DNA, 25 bp, Homo sapien
gagtcacaagaataagagaaggctg

SEQ ID NO: 4408448 - DNA, 25 bp, Homo sapien
cagtcaggcgaggaaagaaaagctc

SEQ ID NO: 4408449 - DNA, 25 bp, Homo sapien
aagtcctcaggctcttcagggctcc

SEQ ID NO: 4408450 - DNA, 25 bp, Homo sapien
tggtctcaaagtcctcaggctcttc

SEQ ID NO: 4408451 - DNA, 25 bp, Homo sapien
ctcaaagtcctcaggctcttcaggg

SEQ ID NO: 4408452 - DNA, 25 bp, Homo sapien
aaagtcctcaggctcttcagggctc

SEQ ID NO: 4408453 - DNA, 25 bp, Homo sapien
gctggggcgccattgagtccaagca

SEQ ID NO: 4408454 - DNA, 25 bp, Homo sapien
tgagtccaagcaccatcaggcacgc

SEQ ID NO: 4408455 - DNA, 25 bp, Homo sapien
ctgcaagaagcacatgcagtggcac

SEQ ID NO: 4408456 - DNA, 25 bp, Homo sapien
aagcacatgcagtggcacccgaggg

SEQ ID NO: 4408457 - DNA, 25 bp, Homo sapien
gggataccaaccagaatgcgtgctt

SEQ ID NO: 4408458 - DNA, 25 bp, Homo sapien
ttgattgtgaggcatggcaccagag

SEQ ID NO: 4408459 - DNA, 25 bp, Homo sapien
aaaagcctaaaagagttgcaagtgg

SEQ ID NO: 4408460 - DNA, 25 bp, Homo sapien
gcccctgcaggacttacggcacggg

SEQ ID NO: 4408461 - DNA, 25 bp, Homo sapien
gacaatgtcttcacttaaccgcgta

SEQ ID NO: 4408462 - DNA, 25 bp, Homo sapien
ggcacttgacaatgtcttcacttaa

SEQ ID NO: 4408463 - DNA, 25 bp, Homo sapien
gcagccacaggcacttgacaatgtc

SEQ ID NO: 4408464 - DNA, 25 bp, Homo sapien
cacttaaccgcgtatcgctgcatcg

SEQ ID NO: 4408465 - DNA, 25 bp, Homo sapien
ccaagtgaagggtactcaggagacc

SEQ ID NO: 4408466 - DNA, 25 bp, Homo sapien
gatcactcaccatgcagagctcagc

SEQ ID NO: 4408467 - DNA, 25 bp, Homo sapien
caagctataggagcaagatcactca

SEQ ID NO: 4408468 - DNA, 25 bp, Homo sapien
tcaggagacccaaacggattgacac

SEQ ID NO: 4408469 - DNA, 25 bp, Homo sapien
gagccgcggcactcggtgtgcccat

SEQ ID NO: 4408470 - DNA, 25 bp, Homo sapien
gctcttaggaatatgattaacataa

SEQ ID NO: 4408471 - DNA, 25 bp, Homo sapien
gaatatcactactggagcagagccg

SEQ ID NO: 4408472 - DNA, 25 bp, Homo sapien
ggtgctgacacgatgctcttgttta

SEQ ID NO: 4408473 - DNA, 25 bp, Homo sapien
ttgagaaccgtctgcatcagcctgg

SEQ ID NO: 4408474 - DNA, 25 bp, Homo sapien
aagagattgctaagttcctggaggc

SEQ ID NO: 4408475 - DNA, 25 bp, Homo sapien
cctgagtggtttcccgacttgagaa

SEQ ID NO: 4408476 - DNA, 25 bp, Homo sapien
gccatcagatgaaccaggaccctgg

SEQ ID NO: 4408477 - DNA, 25 bp, Homo sapien
gcttccagcaagagacaggcagctc

SEQ ID NO: 4408478 - DNA, 25 bp, Homo sapien
cggcttccagcaagagacaggcagc

SEQ ID NO: 4408479 - DNA, 25 bp, Homo sapien
agcccggcttccagcaagagacagg

SEQ ID NO: 4408480 - DNA, 25 bp, Homo sapien
cccggcttccagcaagagacaggca

SEQ ID NO: 4408481 - DNA, 25 bp, Homo sapien
tcaatagtcgagtgcagtatagggt

SEQ ID NO: 4408482 - DNA, 25 bp, Homo sapien
gaggacgtggctccactaaggagaa

SEQ ID NO: 4408483 - DNA, 25 bp, Homo sapien
tgagatcaccatcggtgcctgaaac

SEQ ID NO: 4408484 - DNA, 25 bp, Homo sapien
gagatgacactcctcttccatgaga

SEQ ID NO: 4408485 - DNA, 25 bp, Homo sapien
tctattctgcccctcggtgggtgac

SEQ ID NO: 4408486 - DNA, 25 bp, Homo sapien
caatgtgtgtgctcggtggtcctgt

SEQ ID NO: 4408487 - DNA, 25 bp, Homo sapien
agcaaacagcggctccaggctctat

SEQ ID NO: 4408488 - DNA, 25 bp, Homo sapien
cattttaacctgagaatgacaagca

SEQ ID NO: 4408489 - DNA, 25 bp, Homo sapien
aatgatgaacatcccacaaagattt

SEQ ID NO: 4408490 - DNA, 25 bp, Homo sapien
ggcaaaccgaagaacaaatgatgaa

SEQ ID NO: 4408491 - DNA, 25 bp, Homo sapien
taggagaggctgcatcaaaacccac

SEQ ID NO: 4408492 - DNA, 25 bp, Homo sapien
tctttgaggactgtgctctcttagg

SEQ ID NO: 4408493 - DNA, 25 bp, Homo sapien
ggttcctggcatggcgctcttaagc

SEQ ID NO: 4408494 - DNA, 25 bp, Homo sapien
ttgagctcaatcaccaacggccgat

SEQ ID NO: 4408495 - DNA, 25 bp, Homo sapien
gaacaagcatgtgcccctgattaga

SEQ ID NO: 4408496 - DNA, 25 bp, Homo sapien
gaatccaccgtgtctcagcaatgaa

SEQ ID NO: 4408497 - DNA, 25 bp, Homo sapien
gcagctggaaagagccgtcttatga

SEQ ID NO: 4408498 - DNA, 25 bp, Homo sapien
tctgcctaggcttacatgaaacagc

SEQ ID NO: 4408499 - DNA, 25 bp, Homo sapien
catccagatgtcagtcgggctgtgt

SEQ ID NO: 4408500 - DNA, 25 bp, Homo sapien
caaacttgctccaggtggtcacttc

SEQ ID NO: 4408501 - DNA, 25 bp, Homo sapien
tgaggctggatgtcccttaagaacc

SEQ ID NO: 4408502 - DNA, 25 bp, Homo sapien
ctcgcaggtggtgacaactcatagg

SEQ ID NO: 4408503 - DNA, 25 bp, Homo sapien
ctaatacagcgagtctgaggctgga

SEQ ID NO: 4408504 - DNA, 25 bp, Homo sapien
taagaacctgccgagtggtcagcca

SEQ ID NO: 4408505 - DNA, 25 bp, Homo sapien
atctgagcgtcctggccccctgtta

SEQ ID NO: 4408506 - DNA, 25 bp, Homo sapien
ttgctggcaacgctgcggcccgcag

SEQ ID NO: 4408507 - DNA, 25 bp, Homo sapien
tatttttgccacagtgccgcctcat

SEQ ID NO: 4408508 - DNA, 25 bp, Homo sapien
gttatttttgccacagtgccgcctc

SEQ ID NO: 4408509 - DNA, 25 bp, Homo sapien
gaggggaggatccttgcagacctca

SEQ ID NO: 4408510 - DNA, 25 bp, Homo sapien
aggggaggatccttgcagacctcac

SEQ ID NO: 4408511 - DNA, 25 bp, Homo sapien
tccgggaaacgctgctccttagatg

SEQ ID NO: 4408512 - DNA, 25 bp, Homo sapien
atttccatatttgccggagaaccag

SEQ ID NO: 4408513 - DNA, 25 bp, Homo sapien
cgaatacgtactcggtacccagcac

SEQ ID NO: 4408514 - DNA, 25 bp, Homo sapien
cacatcctggacgagttaacttcct

SEQ ID NO: 4408515 - DNA, 25 bp, Homo sapien
cagggcaggcccatcagggaacacg

SEQ ID NO: 4408516 - DNA, 25 bp, Homo sapien
gcagggcaggcccatcagggaacac

SEQ ID NO: 4408517 - DNA, 25 bp, Homo sapien
agggcaggcccatcagggaacacgg

SEQ ID NO: 4408518 - DNA, 25 bp, Homo sapien
agcagggcaggcccatcagggaaca

SEQ ID NO: 4408519 - DNA, 25 bp, Homo sapien
ccttgacggcttttggttcaggatt

SEQ ID NO: 4408520 - DNA, 25 bp, Homo sapien
catctgcatggagacttccttgacg

SEQ ID NO: 4408521 - DNA, 25 bp, Homo sapien
tgcccatcgatgtagaccaagggac

SEQ ID NO: 4408522 - DNA, 25 bp, Homo sapien
gtgcagatgcccatcgatgtagacc

SEQ ID NO: 4408523 - DNA, 25 bp, Homo sapien
gctgatccccgaccctcttccctag

SEQ ID NO: 4408524 - DNA, 25 bp, Homo sapien
tgccctgcgaagacctggggcaaga

SEQ ID NO: 4408525 - DNA, 25 bp, Homo sapien
gcaagaggcgacatctgctcttttc

SEQ ID NO: 4408526 - DNA, 25 bp, Homo sapien
ggggcaagaggcgacatctgctctt

SEQ ID NO: 4408527 - DNA, 25 bp, Homo sapien
ttggtcaagaattctaggcgaaacc

SEQ ID NO: 4408528 - DNA, 25 bp, Homo sapien
cctgtgcctggtgacgcagccatgg

SEQ ID NO: 4408529 - DNA, 25 bp, Homo sapien
tcaagaattctaggcgaaaccacag

SEQ ID NO: 4408530 - DNA, 25 bp, Homo sapien
aacacggggagggatgccttggtca

SEQ ID NO: 4408531 - DNA, 25 bp, Homo sapien
cagaaccatggacgccagtggtgcc

SEQ ID NO: 4408532 - DNA, 25 bp, Homo sapien
cagacagaaccatggacgccagtgg

SEQ ID NO: 4408533 - DNA, 25 bp, Homo sapien
gcctgggcagacagaaccatggacg

SEQ ID NO: 4408534 - DNA, 25 bp, Homo sapien
aaccatggacgccagtggtgcccat

SEQ ID NO: 4408535 - DNA, 25 bp, Homo sapien
tttcttagctgggtgccctatttct

SEQ ID NO: 4408536 - DNA, 25 bp, Homo sapien
ttcttagctgggtgccctatttctg

SEQ ID NO: 4408537 - DNA, 25 bp, Homo sapien
tcttagctgggtgccctatttctgt

SEQ ID NO: 4408538 - DNA, 25 bp, Homo sapien
agcggagtccgggaagtccctcagg

SEQ ID NO: 4408539 - DNA, 25 bp, Homo sapien
tttcttccgccttagagctcagctc

SEQ ID NO: 4408540 - DNA, 25 bp, Homo sapien
tggagagactccgtcgcatgtcccg

SEQ ID NO: 4408541 - DNA, 25 bp, Homo sapien
ggaagtccctcaggggcaagcacag

SEQ ID NO: 4408542 - DNA, 25 bp, Homo sapien
agagagggccgctgagaaagagcag

SEQ ID NO: 4408543 - DNA, 25 bp, Homo sapien
gagagagggccgctgagaaagagca

SEQ ID NO: 4408544 - DNA, 25 bp, Homo sapien
ggagagagggccgctgagaaagagc

SEQ ID NO: 4408545 - DNA, 25 bp, Homo sapien
gccctcgttgggtgtgggcattggg

SEQ ID NO: 4408546 - DNA, 25 bp, Homo sapien
gcatgtcccacggtgcttccagggc

SEQ ID NO: 4408547 - DNA, 25 bp, Homo sapien
cactgtcctcggagggcccgcatgt

SEQ ID NO: 4408548 - DNA, 25 bp, Homo sapien
cttccagggccctcgttgggtgtgg

SEQ ID NO: 4408549 - DNA, 25 bp, Homo sapien
gaggcagtggtgtgagacctcaatg

SEQ ID NO: 4408550 - DNA, 25 bp, Homo sapien
gtgacagaggcagtggtgtgagacc

SEQ ID NO: 4408551 - DNA, 25 bp, Homo sapien
acagaggcagtggtgtgagacctca

SEQ ID NO: 4408552 - DNA, 25 bp, Homo sapien
agaggcagtggtgtgagacctcaat

SEQ ID NO: 4408553 - DNA, 25 bp, Homo sapien
tagacgcggcaaagacacctggagc

SEQ ID NO: 4408554 - DNA, 25 bp, Homo sapien
tcaaagccagctggggttctgtaca

SEQ ID NO: 4408555 - DNA, 25 bp, Homo sapien
tctgcatagataacaccaaccaggt

SEQ ID NO: 4408556 - DNA, 25 bp, Homo sapien
taacaccaaccaggtgtagacgcgg

SEQ ID NO: 4408557 - DNA, 25 bp, Homo sapien
ccaggcctggaatgcagctctccat

SEQ ID NO: 4408558 - DNA, 25 bp, Homo sapien
acaccaggcctggaatgcagctctc

SEQ ID NO: 4408559 - DNA, 25 bp, Homo sapien
gacaccaggcctggaatgcagctct

SEQ ID NO: 4408560 - DNA, 25 bp, Homo sapien
ctgggacaccaggcctggaatgcag

SEQ ID NO: 4408561 - DNA, 25 bp, Homo sapien
caggaaatggttgtgttgccagtga

SEQ ID NO: 4408562 - DNA, 25 bp, Homo sapien
gaaggagggatttgaccaagccgta

SEQ ID NO: 4408563 - DNA, 25 bp, Homo sapien
tgaccaagccgtaggagtcaggaaa

SEQ ID NO: 4408564 - DNA, 25 bp, Homo sapien
cttcaggacaggagcacggaaggag

SEQ ID NO: 4408565 - DNA, 25 bp, Homo sapien
cacaacgtggcaccaggagcccgag

SEQ ID NO: 4408566 - DNA, 25 bp, Homo sapien
aacacctcttcgtcctgaagctgag

SEQ ID NO: 4408567 - DNA, 25 bp, Homo sapien
ttggacaggcacaacgtggcaccag

SEQ ID NO: 4408568 - DNA, 25 bp, Homo sapien
tcagggctgcaagaaccagcatgac

SEQ ID NO: 4408569 - DNA, 25 bp, Homo sapien
accaaggatgagcacgggagcacca

SEQ ID NO: 4408570 - DNA, 25 bp, Homo sapien
accagggatgtgaacaggagcatta

SEQ ID NO: 4408571 - DNA, 25 bp, Homo sapien
gagtattggggacgcacacagcagc

SEQ ID NO: 4408572 - DNA, 25 bp, Homo sapien
gaacaggagcattagagatgcatgc

SEQ ID NO: 4408573 - DNA, 25 bp, Homo sapien
ggctcttgaaggccagcatccagga

SEQ ID NO: 4408574 - DNA, 25 bp, Homo sapien
gagtgagaccacaccccaaatagca

SEQ ID NO: 4408575 - DNA, 25 bp, Homo sapien
caggaaccatcagctaggcaaagcc

SEQ ID NO: 4408576 - DNA, 25 bp, Homo sapien
tggcttctggcacggggatgacccc

SEQ ID NO: 4408577 - DNA, 25 bp, Homo sapien
ggctgtcctgcccattcgatgttcc

SEQ ID NO: 4408578 - DNA, 25 bp, Homo sapien
cattcgatgttccagccccacctgg

SEQ ID NO: 4408579 - DNA, 25 bp, Homo sapien
ctgtggctgctcgggtgtgggatcc

SEQ ID NO: 4408580 - DNA, 25 bp, Homo sapien
aagccacttcaaagccaccgctgtg

SEQ ID NO: 4408581 - DNA, 25 bp, Homo sapien
cataagcacatgatgtgcctgcagg

SEQ ID NO: 4408582 - DNA, 25 bp, Homo sapien
agagacataagcacatgatgtgcct

SEQ ID NO: 4408583 - DNA, 25 bp, Homo sapien
gacataagcacatgatgtgcctgca

SEQ ID NO: 4408584 - DNA, 25 bp, Homo sapien
atgtgctgtttaagtgggagagaca

SEQ ID NO: 4408585 - DNA, 25 bp, Homo sapien
ggacatcgctgagctcagggaaacg

SEQ ID NO: 4408586 - DNA, 25 bp, Homo sapien
catcaaagaggacatcgctgagctc

SEQ ID NO: 4408587 - DNA, 25 bp, Homo sapien
aagaggacatcgctgagctcaggga

SEQ ID NO: 4408588 - DNA, 25 bp, Homo sapien
catcgctgagctcagggaaacgtgg

SEQ ID NO: 4408589 - DNA, 25 bp, Homo sapien
agtgatgtcagtcccagaaaggcct

SEQ ID NO: 4408590 - DNA, 25 bp, Homo sapien
tgcccaaatgattaagaggcaagac

SEQ ID NO: 4408591 - DNA, 25 bp, Homo sapien
gttttgcccaaatgattaagaggca

SEQ ID NO: 4408592 - DNA, 25 bp, Homo sapien
gccagtgatgtcagtcccagaaagg

SEQ ID NO: 4408593 - DNA, 25 bp, Homo sapien
catataagtctgagggtttgcccca

SEQ ID NO: 4408594 - DNA, 25 bp, Homo sapien
ctttgaaaccgctgaggtagtggcc

SEQ ID NO: 4408595 - DNA, 25 bp, Homo sapien
tagtggcctgtcaacaagagagtgc

SEQ ID NO: 4408596 - DNA, 25 bp, Homo sapien
gagagtgcgtctacccaaacggaaa

SEQ ID NO: 4408597 - DNA, 25 bp, Homo sapien
gaaccttttagtttggcagcacaga

SEQ ID NO: 4408598 - DNA, 25 bp, Homo sapien
taacacgaggtactggctacagcac

SEQ ID NO: 4408599 - DNA, 25 bp, Homo sapien
tatttccgggagcttaatgatatcc

SEQ ID NO: 4408600 - DNA, 25 bp, Homo sapien
gctacagcactagggcaagatagaa

SEQ ID NO: 4408601 - DNA, 25 bp, Homo sapien
cccgaggatcaaggaggtgtccaag

SEQ ID NO: 4408602 - DNA, 25 bp, Homo sapien
ctgccagccaaagctcggagtgaag

SEQ ID NO: 4408603 - DNA, 25 bp, Homo sapien
cagaatgattcacagaagggccccg

SEQ ID NO: 4408604 - DNA, 25 bp, Homo sapien
ggtgacgcgggtgattctggcggcg

SEQ ID NO: 4408605 - DNA, 25 bp, Homo sapien
gcagctgcccggagtcctgtacctc

SEQ ID NO: 4408606 - DNA, 25 bp, Homo sapien
cagagccgctgtgcaccatgggcag

SEQ ID NO: 4408607 - DNA, 25 bp, Homo sapien
ccccctccttttccaagcagctgcc

SEQ ID NO: 4408608 - DNA, 25 bp, Homo sapien
acatccaccgtgcaccctctcccag

SEQ ID NO: 4408609 - DNA, 25 bp, Homo sapien
gttgtacatcgccactgacaggtag

SEQ ID NO: 4408610 - DNA, 25 bp, Homo sapien
tagatcgacgaaagtcccgctgtcc

SEQ ID NO: 4408611 - DNA, 25 bp, Homo sapien
tgtcctcatgatctcggccaccgta

SEQ ID NO: 4408612 - DNA, 25 bp, Homo sapien
gccactgacaggtagatcgacgaaa

SEQ ID NO: 4408613 - DNA, 25 bp, Homo sapien
gttgcctgggaatccattgctggga

SEQ ID NO: 4408614 - DNA, 25 bp, Homo sapien
gcaggaggtgaaggatatgcagcag

SEQ ID NO: 4408615 - DNA, 25 bp, Homo sapien
cacgttgcctgggaatccattgctg

SEQ ID NO: 4408616 - DNA, 25 bp, Homo sapien
caggaggtgaaggatatgcagcagg

SEQ ID NO: 4408617 - DNA, 25 bp, Homo sapien
gtcactcctacactggctgcagaca

SEQ ID NO: 4408618 - DNA, 25 bp, Homo sapien
tgggaagtcactcctacactggctg

SEQ ID NO: 4408619 - DNA, 25 bp, Homo sapien
tgtgggaagtcactcctacactggc

SEQ ID NO: 4408620 - DNA, 25 bp, Homo sapien
ggaagtcactcctacactggctgca

SEQ ID NO: 4408621 - DNA, 25 bp, Homo sapien
cttgtgtgcccatcgaccaggactg

SEQ ID NO: 4408622 - DNA, 25 bp, Homo sapien
cagtgccctggaaaaccgccagcgt

SEQ ID NO: 4408623 - DNA, 25 bp, Homo sapien
gtgccctggaaaaccgccagcgtct

SEQ ID NO: 4408624 - DNA, 25 bp, Homo sapien
catcgaccaggactgcaaacacttc

SEQ ID NO: 4408625 - DNA, 25 bp, Homo sapien
cacagaatgttttgcgggtcttcat

SEQ ID NO: 4408626 - DNA, 25 bp, Homo sapien
ggcccttgggtaccggtgatgtcac

SEQ ID NO: 4408627 - DNA, 25 bp, Homo sapien
caagttctcagagggcccttgggta

SEQ ID NO: 4408628 - DNA, 25 bp, Homo sapien
ggtaccggtgatgtcacagaatgtt

SEQ ID NO: 4408629 - DNA, 25 bp, Homo sapien
tgcgtccctgagatctgatttgctt

SEQ ID NO: 4408630 - DNA, 25 bp, Homo sapien
cgtccctgagatctgatttgcttgc

SEQ ID NO: 4408631 - DNA, 25 bp, Homo sapien
ctgagatctgatttgcttgctgctg

SEQ ID NO: 4408632 - DNA, 25 bp, Homo sapien
ccctgagatctgatttgcttgctgc

SEQ ID NO: 4408633 - DNA, 25 bp, Homo sapien
cacgttggccaccagacgtcctgga

SEQ ID NO: 4408634 - DNA, 25 bp, Homo sapien
gtctccccttgtctgacttggtgcc

SEQ ID NO: 4408635 - DNA, 25 bp, Homo sapien
cttgtctgacttggtgccaactcga

SEQ ID NO: 4408636 - DNA, 25 bp, Homo sapien
acgttggccaccagacgtcctggag

SEQ ID NO: 4408637 - DNA, 25 bp, Homo sapien
aagctcaggccacagtaagcaagcc

SEQ ID NO: 4408638 - DNA, 25 bp, Homo sapien
ggaagctcaggccacagtaagcaag

SEQ ID NO: 4408639 - DNA, 25 bp, Homo sapien
gctcaggccacagtaagcaagccag

SEQ ID NO: 4408640 - DNA, 25 bp, Homo sapien
ctcaggccacagtaagcaagccagg

SEQ ID NO: 4408641 - DNA, 25 bp, Homo sapien
tgtgtctgcgccagatgctctgtgc

SEQ ID NO: 4408642 - DNA, 25 bp, Homo sapien
cactttggccgtaagaggctgagtc

SEQ ID NO: 4408643 - DNA, 25 bp, Homo sapien
tctgtgccccatgctagaggctggc

SEQ ID NO: 4408644 - DNA, 25 bp, Homo sapien
ccttcttgggcatagacatcaggga

SEQ ID NO: 4408645 - DNA, 25 bp, Homo sapien
ccaggccgacacaggactcgccgtc

SEQ ID NO: 4408646 - DNA, 25 bp, Homo sapien
caccaggccgacacaggactcgccg

SEQ ID NO: 4408647 - DNA, 25 bp, Homo sapien
ccaccaggccgacacaggactcgcc

SEQ ID NO: 4408648 - DNA, 25 bp, Homo sapien
accaggccgacacaggactcgccgt

SEQ ID NO: 4408649 - DNA, 25 bp, Homo sapien
cacagtgtcacaatgtggacgccat

SEQ ID NO: 4408650 - DNA, 25 bp, Homo sapien
agtgtcacaatgtggacgccatgcc

SEQ ID NO: 4408651 - DNA, 25 bp, Homo sapien
tcacaatgtggacgccatgcctcag

SEQ ID NO: 4408652 - DNA, 25 bp, Homo sapien
agcacacagtgtcacaatgtggacg

SEQ ID NO: 4408653 - DNA, 25 bp, Homo sapien
ttgcagtctcttgctgggcttggtg

SEQ ID NO: 4408654 - DNA, 25 bp, Homo sapien
tgcagtctcttgctgggcttggtga

SEQ ID NO: 4408655 - DNA, 25 bp, Homo sapien
cagtcaacaactatgacataaggag

SEQ ID NO: 4408656 - DNA, 25 bp, Homo sapien
acaactatgacataaggagagcttg

SEQ ID NO: 4408657 - DNA, 25 bp, Homo sapien
caacaactatgacataaggagagct

SEQ ID NO: 4408658 - DNA, 25 bp, Homo sapien
ataaggagagcttgaagacagcacc

SEQ ID NO: 4408659 - DNA, 25 bp, Homo sapien
cactggacgctctccacagctgagc

SEQ ID NO: 4408660 - DNA, 25 bp, Homo sapien
catgtccactggacgctctccacag

SEQ ID NO: 4408661 - DNA, 25 bp, Homo sapien
tcaggtgttataggcccccatgtcc

SEQ ID NO: 4408662 - DNA, 25 bp, Homo sapien
gagcttgtcactcatccggatccca

SEQ ID NO: 4408663 - DNA, 25 bp, Homo sapien
gttccaggcgctcagaatatcttcc

SEQ ID NO: 4408664 - DNA, 25 bp, Homo sapien
ggcacctctggtcacattcgtcctg

SEQ ID NO: 4408665 - DNA, 25 bp, Homo sapien
tggctcaaatgctctgggcgacttc

SEQ ID NO: 4408666 - DNA, 25 bp, Homo sapien
gcccagatgaccaggtgacacttct

SEQ ID NO: 4408667 - DNA, 25 bp, Homo sapien
gcatcgcctttgtcaaccatacagg

SEQ ID NO: 4408668 - DNA, 25 bp, Homo sapien
aaccatacaggtccacaagggcaca

SEQ ID NO: 4408669 - DNA, 25 bp, Homo sapien
cgcctttgtcaaccatacaggtcca

SEQ ID NO: 4408670 - DNA, 25 bp, Homo sapien
tgtcaaccatacaggtccacaaggg

SEQ ID NO: 4408671 - DNA, 25 bp, Homo sapien
agatggagtgcagcaaacctacgaa

SEQ ID NO: 4408672 - DNA, 25 bp, Homo sapien
gatttcagtttgtgtgcaaggacag

SEQ ID NO: 4408673 - DNA, 25 bp, Homo sapien
tgtcgttgatttcagtttgtgtgca

SEQ ID NO: 4408674 - DNA, 25 bp, Homo sapien
tatcaaatctgatatgagctctaag

SEQ ID NO: 4408675 - DNA, 25 bp, Homo sapien
tgccgcgtggttacatgaaggagcc

SEQ ID NO: 4408676 - DNA, 25 bp, Homo sapien
gagccttggatagacttgcttccca

SEQ ID NO: 4408677 - DNA, 25 bp, Homo sapien
tctaggactagtgcctgccaactgc

SEQ ID NO: 4408678 - DNA, 25 bp, Homo sapien
agtacagcgtgatatggaagcgccg

SEQ ID NO: 4408679 - DNA, 25 bp, Homo sapien
tgtgctcagtgtcgtggggctccat

SEQ ID NO: 4408680 - DNA, 25 bp, Homo sapien
tcctcggaatgctgaggaaactgca

SEQ ID NO: 4408681 - DNA, 25 bp, Homo sapien
tctttgcctgcagccttaaatacac

SEQ ID NO: 4408682 - DNA, 25 bp, Homo sapien
ggctccatgggaatgagctcattaa

SEQ ID NO: 4408683 - DNA, 25 bp, Homo sapien
gcactatgggtgtctgtcgagggcg

SEQ ID NO: 4408684 - DNA, 25 bp, Homo sapien
cgagggcgtatgtccaagtgtgcac

SEQ ID NO: 4408685 - DNA, 25 bp, Homo sapien
gaggtgcactatgggtgtctgtcga

SEQ ID NO: 4408686 - DNA, 25 bp, Homo sapien
tcgagggcgtatgtccagggggtac

SEQ ID NO: 4408687 - DNA, 25 bp, Homo sapien
tgtctctcgagggtgttatgtccag

SEQ ID NO: 4408688 - DNA, 25 bp, Homo sapien
ggtgcgtgtctctcgagggtgttat

SEQ ID NO: 4408689 - DNA, 25 bp, Homo sapien
cgtgtctctcgagggtgttatgtcc

SEQ ID NO: 4408690 - DNA, 25 bp, Homo sapien
tctctcgagggtgttatgtccaggg

SEQ ID NO: 4408691 - DNA, 25 bp, Homo sapien
tctgggaggtacactgaggatgtct

SEQ ID NO: 4408692 - DNA, 25 bp, Homo sapien
tgtatgggtgcgcactatgcatgtc

SEQ ID NO: 4408693 - DNA, 25 bp, Homo sapien
gatgcattgtccatgtctgttgagg

SEQ ID NO: 4408694 - DNA, 25 bp, Homo sapien
tctctcgagggcgtatgtctgggtt

SEQ ID NO: 4408695 - DNA, 25 bp, Homo sapien
cacaatgtggcttcctaagcaacat

SEQ ID NO: 4408696 - DNA, 25 bp, Homo sapien
ttgtctgagtcttagtccacctggg

SEQ ID NO: 4408697 - DNA, 25 bp, Homo sapien
accaggcaccgtctggcaacagctg

SEQ ID NO: 4408698 - DNA, 25 bp, Homo sapien
gaccatgggtttcatctctgcaata

SEQ ID NO: 4408699 - DNA, 25 bp, Homo sapien
ttccaatccatccctgcacactgga

SEQ ID NO: 4408700 - DNA, 25 bp, Homo sapien
tccaatccatccctgcacactggag

SEQ ID NO: 4408701 - DNA, 25 bp, Homo sapien
caggcacagcctcttccaatccatc

SEQ ID NO: 4408702 - DNA, 25 bp, Homo sapien
ctccaggcacagcctcttccaatcc

SEQ ID NO: 4408703 - DNA, 25 bp, Homo sapien
cagggtccagccatcctgtctgcat

SEQ ID NO: 4408704 - DNA, 25 bp, Homo sapien
atgatgcaggtctggcatggagata

SEQ ID NO: 4408705 - DNA, 25 bp, Homo sapien
ctggcatggagatacccgcagggaa

SEQ ID NO: 4408706 - DNA, 25 bp, Homo sapien
tctcaaagtgttagagatgatgcag

SEQ ID NO: 4408707 - DNA, 25 bp, Homo sapien
gactgtgagctgtcggggagccatc

SEQ ID NO: 4408708 - DNA, 25 bp, Homo sapien
tggagcaggactgtgagctgtcggg

SEQ ID NO: 4408709 - DNA, 25 bp, Homo sapien
cctggagcaggactgtgagctgtcg

SEQ ID NO: 4408710 - DNA, 25 bp, Homo sapien
caggactgtgagctgtcggggagcc

SEQ ID NO: 4408711 - DNA, 25 bp, Homo sapien
tcctgcctgggacagcgagctgttg

SEQ ID NO: 4408712 - DNA, 25 bp, Homo sapien
tcatcctggagcaggaccatgagct

SEQ ID NO: 4408713 - DNA, 25 bp, Homo sapien
tccccctgcatggcactggctgggt

SEQ ID NO: 4408714 - DNA, 25 bp, Homo sapien
ggtggacccaggcataaggagcacc

SEQ ID NO: 4408715 - DNA, 25 bp, Homo sapien
gtctcccttcgcaggtgtcgaacca

SEQ ID NO: 4408716 - DNA, 25 bp, Homo sapien
acagcaggagttgtgggcggccgct

SEQ ID NO: 4408717 - DNA, 25 bp, Homo sapien
gtcgaaccaggagtcacctccgcat

SEQ ID NO: 4408718 - DNA, 25 bp, Homo sapien
ctgcgcgacagcaggagttgtgggc

SEQ ID NO: 4408719 - DNA, 25 bp, Homo sapien
gaaagcgccggattttcgagctttc

SEQ ID NO: 4408720 - DNA, 25 bp, Homo sapien
ttcttcctggcggggttgctttgtc

SEQ ID NO: 4408721 - DNA, 25 bp, Homo sapien
ctttcttcctggcggggttgctttg

SEQ ID NO: 4408722 - DNA, 25 bp, Homo sapien
ctagaaagcgccggattttcgagct

SEQ ID NO: 4408723 - DNA, 25 bp, Homo sapien
tggccctcaggtgaagtggcctcag

SEQ ID NO: 4408724 - DNA, 25 bp, Homo sapien
cttggccctcaggtgaagtggcctc

SEQ ID NO: 4408725 - DNA, 25 bp, Homo sapien
agtggcctcaggggccgtgagcacc

SEQ ID NO: 4408726 - DNA, 25 bp, Homo sapien
tggcctcaggggccgtgagcaccca

SEQ ID NO: 4408727 - DNA, 25 bp, Homo sapien
ttggtcagatggatctctcgaggag

SEQ ID NO: 4408728 - DNA, 25 bp, Homo sapien
tgggggacggcggaatgaggcagac

SEQ ID NO: 4408729 - DNA, 25 bp, Homo sapien
cagatgccgtgggcatggctccagg

SEQ ID NO: 4408730 - DNA, 25 bp, Homo sapien
tttggtcagatggatctctcgagga

SEQ ID NO: 4408731 - DNA, 25 bp, Homo sapien
tggtgaggagacaatcccgttccaa

SEQ ID NO: 4408732 - DNA, 25 bp, Homo sapien
tgtggtgaggagacaatcccgttcc

SEQ ID NO: 4408733 - DNA, 25 bp, Homo sapien
gtggtgaggagacaatcccgttcca

SEQ ID NO: 4408734 - DNA, 25 bp, Homo sapien
ctgtggtgaggagacaatcccgttc

SEQ ID NO: 4408735 - DNA, 25 bp, Homo sapien
actcagcactcagcgtgcagctgtc

SEQ ID NO: 4408736 - DNA, 25 bp, Homo sapien
agcactcagcgtgcagctgtccggg

SEQ ID NO: 4408737 - DNA, 25 bp, Homo sapien
cagcactcagcgtgcagctgtccgg

SEQ ID NO: 4408738 - DNA, 25 bp, Homo sapien
tcagcactcagcgtgcagctgtccg

SEQ ID NO: 4408739 - DNA, 25 bp, Homo sapien
gaggaagcccctgatatcttccagg

SEQ ID NO: 4408740 - DNA, 25 bp, Homo sapien
cagaaaggccgttcctcactggagg

SEQ ID NO: 4408741 - DNA, 25 bp, Homo sapien
ggcaggcagccatatgtacccatct

SEQ ID NO: 4408742 - DNA, 25 bp, Homo sapien
tacccatctcgtgggccgaggaagc

SEQ ID NO: 4408743 - DNA, 25 bp, Homo sapien
tgtaaggtgattcggtacaagggct

SEQ ID NO: 4408744 - DNA, 25 bp, Homo sapien
atccccacactgtcgggcaccgtga

SEQ ID NO: 4408745 - DNA, 25 bp, Homo sapien
ctcttgggggcaggaacgctgtttc

SEQ ID NO: 4408746 - DNA, 25 bp, Homo sapien
caggaacgctgtttctggatctctg

SEQ ID NO: 4408747 - DNA, 25 bp, Homo sapien
tctgaagcgcgtctttcctctggtg

SEQ ID NO: 4408748 - DNA, 25 bp, Homo sapien
ttgcaaaagtgccctttgattcctt

SEQ ID NO: 4408749 - DNA, 25 bp, Homo sapien
gaatgaatgtgctgtgcatgctctt

SEQ ID NO: 4408750 - DNA, 25 bp, Homo sapien
caaaggtgtggcgaagcgtgtgggt

SEQ ID NO: 4408751 - DNA, 25 bp, Homo sapien
catggctggccattagtgtctgctt

SEQ ID NO: 4408752 - DNA, 25 bp, Homo sapien
atggctggccattagtgtctgcttc

SEQ ID NO: 4408753 - DNA, 25 bp, Homo sapien
ggatgggctttccttcagaaagatg

SEQ ID NO: 4408754 - DNA, 25 bp, Homo sapien
gggatgggctttccttcagaaagat

SEQ ID NO: 4408755 - DNA, 25 bp, Homo sapien
tgggctttccttcagaaagatggtc

SEQ ID NO: 4408756 - DNA, 25 bp, Homo sapien
gctttccttcagaaagatggtccat

SEQ ID NO: 4408757 - DNA, 25 bp, Homo sapien
tggccagattagcttccgaatccag

SEQ ID NO: 4408758 - DNA, 25 bp, Homo sapien
gctttgtgaagtcgccttggaaccc

SEQ ID NO: 4408759 - DNA, 25 bp, Homo sapien
gactcaccctgtggatcctaggact

SEQ ID NO: 4408760 - DNA, 25 bp, Homo sapien
agaaccctggctgacgtgctcttca

SEQ ID NO: 4408761 - DNA, 25 bp, Homo sapien
gtgaatagaacggtgacaccttcaa

SEQ ID NO: 4408762 - DNA, 25 bp, Homo sapien
taggtgaatagaacggtgacacctt

SEQ ID NO: 4408763 - DNA, 25 bp, Homo sapien
aagtaggtgaatagaacggtgacac

SEQ ID NO: 4408764 - DNA, 25 bp, Homo sapien
aatagaacggtgacaccttcaaagg

SEQ ID NO: 4408765 - DNA, 25 bp, Homo sapien
cagggccgttgtatacgtagctaag

SEQ ID NO: 4408766 - DNA, 25 bp, Homo sapien
catggcttggcagacttcctctttg

SEQ ID NO: 4408767 - DNA, 25 bp, Homo sapien
agcgctccatggcttggcagacttc

SEQ ID NO: 4408768 - DNA, 25 bp, Homo sapien
tttgccagggccgttgtatacgtag

SEQ ID NO: 4408769 - DNA, 25 bp, Homo sapien
ttctctgtttcttataatcattatc

SEQ ID NO: 4408770 - DNA, 25 bp, Homo sapien
tctgtttcttataatcattatcatc

SEQ ID NO: 4408771 - DNA, 25 bp, Homo sapien
ttcttataatcattatcatcttccc

SEQ ID NO: 4408772 - DNA, 25 bp, Homo sapien
tcttataatcattatcatcttcccc

SEQ ID NO: 4408773 - DNA, 25 bp, Homo sapien
ccaagacggcgtgatgctcaggagc

SEQ ID NO: 4408774 - DNA, 25 bp, Homo sapien
gaggatctattgatgcgcagacagc

SEQ ID NO: 4408775 - DNA, 25 bp, Homo sapien
gggagtgcacggcacactcaactgg

SEQ ID NO: 4408776 - DNA, 25 bp, Homo sapien
tctcctctgtcgatgagaggatcta

SEQ ID NO: 4408777 - DNA, 25 bp, Homo sapien
tgccctgtgcacgtgaactcattta

SEQ ID NO: 4408778 - DNA, 25 bp, Homo sapien
tcttgtagtggcctccgcatttgaa

SEQ ID NO: 4408779 - DNA, 25 bp, Homo sapien
aaaaaggcaagctcaattccggcag

SEQ ID NO: 4408780 - DNA, 25 bp, Homo sapien
gatcctaatggttgcagctaagctg

SEQ ID NO: 4408781 - DNA, 25 bp, Homo sapien
gttcccactctccttgccttgactg

SEQ ID NO: 4408782 - DNA, 25 bp, Homo sapien
ccttgactgacacctggcacattct

SEQ ID NO: 4408783 - DNA, 25 bp, Homo sapien
cattttctttgagtgttcccactct

SEQ ID NO: 4408784 - DNA, 25 bp, Homo sapien
ggtctatctggacaaacctatctcc

SEQ ID NO: 4408785 - DNA, 25 bp, Homo sapien
taccactcctactgaggagcactgt

SEQ ID NO: 4408786 - DNA, 25 bp, Homo sapien
atgcctcctctctaccactcctact

SEQ ID NO: 4408787 - DNA, 25 bp, Homo sapien
tcagtggggacacttagtaggtcct

SEQ ID NO: 4408788 - DNA, 25 bp, Homo sapien
cttagtaggtcctcagcagcaaatg

SEQ ID NO: 4408789 - DNA, 25 bp, Homo sapien
ctgaggagccggctggatgcagaga

SEQ ID NO: 4408790 - DNA, 25 bp, Homo sapien
agctgaggagccggctggatgcaga

SEQ ID NO: 4408791 - DNA, 25 bp, Homo sapien
gctgaggagccggctggatgcagag

SEQ ID NO: 4408792 - DNA, 25 bp, Homo sapien
tgcagacgccatcctacaaggtgag

SEQ ID NO: 4408793 - DNA, 25 bp, Homo sapien
gcagacgccatcctacaaggtgagc

SEQ ID NO: 4408794 - DNA, 25 bp, Homo sapien
cagacgccatcctacaaggtgagca

SEQ ID NO: 4408795 - DNA, 25 bp, Homo sapien
agacgccatcctacaaggtgagcac

SEQ ID NO: 4408796 - DNA, 25 bp, Homo sapien
agctgattgggcaccacatcggatg

SEQ ID NO: 4408797 - DNA, 25 bp, Homo sapien
gctgattgggcaccacatcggatgt

SEQ ID NO: 4408798 - DNA, 25 bp, Homo sapien
ctgattgggcaccacatcggatgtt

SEQ ID NO: 4408799 - DNA, 25 bp, Homo sapien
cgcctcaggcttccaccttggctcc

SEQ ID NO: 4408800 - DNA, 25 bp, Homo sapien
taaaatgcacccaccaacaatgagc

SEQ ID NO: 4408801 - DNA, 25 bp, Homo sapien
gatatcataacccatagtccaggga

SEQ ID NO: 4408802 - DNA, 25 bp, Homo sapien
ggctcaaaatacacagacagggaag

SEQ ID NO: 4408803 - DNA, 25 bp, Homo sapien
tcgcccgggcaggaatgacaaatgc

SEQ ID NO: 4408804 - DNA, 25 bp, Homo sapien
tgagctacggtaaaacacatcctgc

SEQ ID NO: 4408805 - DNA, 25 bp, Homo sapien
cctcatatgccagtaagggtggttt

SEQ ID NO: 4408806 - DNA, 25 bp, Homo sapien
tgtggattacaaagcctccagtcca

SEQ ID NO: 4408807 - DNA, 25 bp, Homo sapien
ggaacatttcagctaccagccatgc

SEQ ID NO: 4408808 - DNA, 25 bp, Homo sapien
tatccacatagtcctaaggtcatgc

SEQ ID NO: 4408809 - DNA, 25 bp, Homo sapien
tgaatgcaatcgctatcagctgcgg

SEQ ID NO: 4408810 - DNA, 25 bp, Homo sapien
tgtctacagaacaatggcagccaac

SEQ ID NO: 4408811 - DNA, 25 bp, Homo sapien
ccccgaagaagactaggtactcata

SEQ ID NO: 4408812 - DNA, 25 bp, Homo sapien
tgctccacgactacaaaactcttct

SEQ ID NO: 4408813 - DNA, 25 bp, Homo sapien
tttcagacaggaaactaacaggcct

SEQ ID NO: 4408814 - DNA, 25 bp, Homo sapien
taagttgacaccactaaacgacagg

SEQ ID NO: 4408815 - DNA, 25 bp, Homo sapien
ttttgaacgcccaccatttgttctc

SEQ ID NO: 4408816 - DNA, 25 bp, Homo sapien
acaaatgtgacggagagtggcacgc

SEQ ID NO: 4408817 - DNA, 25 bp, Homo sapien
acctttcattgtctttgcccgtgag

SEQ ID NO: 4408818 - DNA, 25 bp, Homo sapien
ccgtgaagtggagactaatatgaca

SEQ ID NO: 4408819 - DNA, 25 bp, Homo sapien
agcctgagaacaaatgtgacggaga

SEQ ID NO: 4408820 - DNA, 25 bp, Homo sapien
gggtctcgccttttctcttcagcat

SEQ ID NO: 4408821 - DNA, 25 bp, Homo sapien
taaggggtctcgccttttctcttca

SEQ ID NO: 4408822 - DNA, 25 bp, Homo sapien
cttcagcattgactttgatattttc

SEQ ID NO: 4408823 - DNA, 25 bp, Homo sapien
aggggtctcgccttttctcttcagc

SEQ ID NO: 4408824 - DNA, 25 bp, Homo sapien
ttcatagtaatatagaaggcctggt

SEQ ID NO: 4408825 - DNA, 25 bp, Homo sapien
catgttcatagtaatatagaaggcc

SEQ ID NO: 4408826 - DNA, 25 bp, Homo sapien
tagtaatatagaaggcctggtcctt

SEQ ID NO: 4408827 - DNA, 25 bp, Homo sapien
catagtaatatagaaggcctggtcc

SEQ ID NO: 4408828 - DNA, 25 bp, Homo sapien
cccactcttcttatgtttggatccc

SEQ ID NO: 4408829 - DNA, 25 bp, Homo sapien
tgctttctaccccattcccactctt

SEQ ID NO: 4408830 - DNA, 25 bp, Homo sapien
agatagagacaaagtcggcattagg

SEQ ID NO: 4408831 - DNA, 25 bp, Homo sapien
atggagatagagacaaagtcggcat

SEQ ID NO: 4408832 - DNA, 25 bp, Homo sapien
gaagactcctggaattttgtgccca

SEQ ID NO: 4408833 - DNA, 25 bp, Homo sapien
tggaacaggagcaaggtcaaaggct

SEQ ID NO: 4408834 - DNA, 25 bp, Homo sapien
tctggacaatggcatcttcgggagc

SEQ ID NO: 4408835 - DNA, 25 bp, Homo sapien
ccatgaacccgagtgtgaagactcc

SEQ ID NO: 4408836 - DNA, 25 bp, Homo sapien
gaaaccattgccaaggatagccacc

SEQ ID NO: 4408837 - DNA, 25 bp, Homo sapien
tctcagaggacaacgtatgtaacgc

SEQ ID NO: 4408838 - DNA, 25 bp, Homo sapien
tgcacttaggcagcgtacggactgt

SEQ ID NO: 4408839 - DNA, 25 bp, Homo sapien
gagcacacatcttagaggacaccgt

SEQ ID NO: 4408840 - DNA, 25 bp, Homo sapien
tttgccagggagtagtcaatcaggc

SEQ ID NO: 4408841 - DNA, 25 bp, Homo sapien
gtggttccacggcatgctcggcttg

SEQ ID NO: 4408842 - DNA, 25 bp, Homo sapien
gacttgttgaaaaagcggatcgctc

SEQ ID NO: 4408843 - DNA, 25 bp, Homo sapien
tcaactttgagtggccgtggttcca

SEQ ID NO: 4408844 - DNA, 25 bp, Homo sapien
taaagttacacaacgaggacctgag

SEQ ID NO: 4408845 - DNA, 25 bp, Homo sapien
gccactcaggatgctcaaaggcatt

SEQ ID NO: 4408846 - DNA, 25 bp, Homo sapien
gggactgctcaaggaagaacaaatg

SEQ ID NO: 4408847 - DNA, 25 bp, Homo sapien
caaaggcattcactccagaaggttc

SEQ ID NO: 4408848 - DNA, 25 bp, Homo sapien
gcgggtggctgtgcccgggctgaga

SEQ ID NO: 4408849 - DNA, 25 bp, Homo sapien
gagcgctcgacagcccgcaggtgca

SEQ ID NO: 4408850 - DNA, 25 bp, Homo sapien
gagacgtcagagtgcgattctaaga

SEQ ID NO: 4408851 - DNA, 25 bp, Homo sapien
tctaagagtgcagaggagcgctcga

SEQ ID NO: 4408852 - DNA, 25 bp, Homo sapien
cacctcgtccttggctacagcctcc

SEQ ID NO: 4408853 - DNA, 25 bp, Homo sapien
attggacaaacgtccaggcaacagc

SEQ ID NO: 4408854 - DNA, 25 bp, Homo sapien
tcaacgtggattggacaaacgtcca

SEQ ID NO: 4408855 - DNA, 25 bp, Homo sapien
ccctcaaatgtcaacgtggattgga

SEQ ID NO: 4408856 - DNA, 25 bp, Homo sapien
ggtaaggtcccattgcaattcacat

SEQ ID NO: 4408857 - DNA, 25 bp, Homo sapien
caacggtaaggtcccattgcaattc

SEQ ID NO: 4408858 - DNA, 25 bp, Homo sapien
acggtaaggtcccattgcaattcac

SEQ ID NO: 4408859 - DNA, 25 bp, Homo sapien
taaggtcccattgcaattcacatac

SEQ ID NO: 4408860 - DNA, 25 bp, Homo sapien
gacaaccaagtgaaccaactccaag

SEQ ID NO: 4408861 - DNA, 25 bp, Homo sapien
cacagctttacgtattgttgatttg

SEQ ID NO: 4408862 - DNA, 25 bp, Homo sapien
ggtaataggcattatctccaggaca

SEQ ID NO: 4408863 - DNA, 25 bp, Homo sapien
tatcaaagttgccttggtaataggc

SEQ ID NO: 4408864 - DNA, 25 bp, Homo sapien
gaaaaaatacccacgatacagccag

SEQ ID NO: 4408865 - DNA, 25 bp, Homo sapien
catccaatgttacgagtgacagaaa

SEQ ID NO: 4408866 - DNA, 25 bp, Homo sapien
tataaagttactgcccttcaggtgt

SEQ ID NO: 4408867 - DNA, 25 bp, Homo sapien
agtcctgggactggttcttttcctg

SEQ ID NO: 4408868 - DNA, 25 bp, Homo sapien
ggcaccaatggcctatttactatcg

SEQ ID NO: 4408869 - DNA, 25 bp, Homo sapien
gtctctcacggaatccaaagcctgg

SEQ ID NO: 4408870 - DNA, 25 bp, Homo sapien
ccttgctgtctctcacggaatccaa

SEQ ID NO: 4408871 - DNA, 25 bp, Homo sapien
tatcgcaggacctttcggccctggt

SEQ ID NO: 4408872 - DNA, 25 bp, Homo sapien
ggatgtggttgcgtgttcttcgctt

SEQ ID NO: 4408873 - DNA, 25 bp, Homo sapien
atgtggttgcgtgttcttcgcttcc

SEQ ID NO: 4408874 - DNA, 25 bp, Homo sapien
aaggatgtggttgcgtgttcttcgc

SEQ ID NO: 4408875 - DNA, 25 bp, Homo sapien
caaggatgtggttgcgtgttcttcg

SEQ ID NO: 4408876 - DNA, 25 bp, Homo sapien
ttatatggtgcacccaagcattcgg

SEQ ID NO: 4408877 - DNA, 25 bp, Homo sapien
caggtgtctctttgcggacattatt

SEQ ID NO: 4408878 - DNA, 25 bp, Homo sapien
gcgatgtgtagatttgtagctgtgt

SEQ ID NO: 4408879 - DNA, 25 bp, Homo sapien
tgcggacattattatatggtgcacc

SEQ ID NO: 4408880 - DNA, 25 bp, Homo sapien
cgtgaggccaaactggtccgcaggc

SEQ ID NO: 4408881 - DNA, 25 bp, Homo sapien
tgtaaccatcttcactcgcgtcggg

SEQ ID NO: 4408882 - DNA, 25 bp, Homo sapien
tgctgacatggcacgctgctcaaag

SEQ ID NO: 4408883 - DNA, 25 bp, Homo sapien
tagacagaggctccgggctgtagat

SEQ ID NO: 4408884 - DNA, 25 bp, Homo sapien
acaggtacagaagccgtcttcatcc

SEQ ID NO: 4408885 - DNA, 25 bp, Homo sapien
ggtacagaagccgtcttcatcctca

SEQ ID NO: 4408886 - DNA, 25 bp, Homo sapien
agtgacaggtacagaagccgtcttc

SEQ ID NO: 4408887 - DNA, 25 bp, Homo sapien
gtgacaggtacagaagccgtcttca

SEQ ID NO: 4408888 - DNA, 25 bp, Homo sapien
gagcatcagagcagctgcaaaccca

SEQ ID NO: 4408889 - DNA, 25 bp, Homo sapien
agcatcagagcagctgcaaacccac

SEQ ID NO: 4408890 - DNA, 25 bp, Homo sapien
cagagcatcagagcagctgcaaacc

SEQ ID NO: 4408891 - DNA, 25 bp, Homo sapien
tcagagcatcagagcagctgcaaac

SEQ ID NO: 4408892 - DNA, 25 bp, Homo sapien
ctgaggagagcgttaggcgctttct

SEQ ID NO: 4408893 - DNA, 25 bp, Homo sapien
cctttggctgagtcagcatatgaaa

SEQ ID NO: 4408894 - DNA, 25 bp, Homo sapien
ttctctactcttccacctttggctg

SEQ ID NO: 4408895 - DNA, 25 bp, Homo sapien
cacacagtgacttcgccttgaaggt

SEQ ID NO: 4408896 - DNA, 25 bp, Homo sapien
tcagatatcggtgatgaggcttgaa

SEQ ID NO: 4408897 - DNA, 25 bp, Homo sapien
gatatcggtgatgaggcttgaagcc

SEQ ID NO: 4408898 - DNA, 25 bp, Homo sapien
atatcggtgatgaggcttgaagccc

SEQ ID NO: 4408899 - DNA, 25 bp, Homo sapien
cagatatcggtgatgaggcttgaag

SEQ ID NO: 4408900 - DNA, 25 bp, Homo sapien
ttcctcagagcttccccttagaggg

SEQ ID NO: 4408901 - DNA, 25 bp, Homo sapien
tcagagcttccccttagaggcgtgt

SEQ ID NO: 4408902 - DNA, 25 bp, Homo sapien
gcaaccacaggttcttcttagaggg

SEQ ID NO: 4408903 - DNA, 25 bp, Homo sapien
gaaatagatgagtgctcaggcctca

SEQ ID NO: 4408904 - DNA, 25 bp, Homo sapien
ttgtagctcttagataagtccatgc

SEQ ID NO: 4408905 - DNA, 25 bp, Homo sapien
gaagtgacatttgtgaaacgcacag

SEQ ID NO: 4408906 - DNA, 25 bp, Homo sapien
ggcactgatcttataaccaggcttg

SEQ ID NO: 4408907 - DNA, 25 bp, Homo sapien
cacatttatcaggtcaagaagtgac

SEQ ID NO: 4408908 - DNA, 25 bp, Homo sapien
gaaacagccactgctcaagggtcta

SEQ ID NO: 4408909 - DNA, 25 bp, Homo sapien
tcataaggccatggcaggattgcgg

SEQ ID NO: 4408910 - DNA, 25 bp, Homo sapien
caagggtctattttcttatggggag

SEQ ID NO: 4408911 - DNA, 25 bp, Homo sapien
cttcataaggccatggcaggattgc

SEQ ID NO: 4408912 - DNA, 25 bp, Homo sapien
cctgtactggcctgccaagctcgtg

SEQ ID NO: 4408913 - DNA, 25 bp, Homo sapien
cgtggcctttaactatgtccagcca

SEQ ID NO: 4408914 - DNA, 25 bp, Homo sapien
ggcctgccaagctcgtggcctttaa

SEQ ID NO: 4408915 - DNA, 25 bp, Homo sapien
caagctcgtggcctttaactatgtc

SEQ ID NO: 4408916 - DNA, 25 bp, Homo sapien
gactcttcctgggagctacgatagg

SEQ ID NO: 4408917 - DNA, 25 bp, Homo sapien
tatcatgttgaaccaaggcagcccc

SEQ ID NO: 4408918 - DNA, 25 bp, Homo sapien
ttgtaacaagagagcggaaccagcc

SEQ ID NO: 4408919 - DNA, 25 bp, Homo sapien
cctagggttgcgctgtgatgctaaa

SEQ ID NO: 4408920 - DNA, 25 bp, Homo sapien
gcaaaggcttcttttgcaaatatcc

SEQ ID NO: 4408921 - DNA, 25 bp, Homo sapien
ttatgcaaaggcttcttttgcaaat

SEQ ID NO: 4408922 - DNA, 25 bp, Homo sapien
tatgcaaaggcttcttttgcaaata

SEQ ID NO: 4408923 - DNA, 25 bp, Homo sapien
tgcaaaggcttcttttgcaaatatc

SEQ ID NO: 4408924 - DNA, 25 bp, Homo sapien
taagtaatatgtgacgcctgttccc

SEQ ID NO: 4408925 - DNA, 25 bp, Homo sapien
tgagagaagtaagccccactgtagg

SEQ ID NO: 4408926 - DNA, 25 bp, Homo sapien
gacttgtcagtagagggagccttaa

SEQ ID NO: 4408927 - DNA, 25 bp, Homo sapien
catggagcactactgtgagacggct

SEQ ID NO: 4408928 - DNA, 25 bp, Homo sapien
ttcttctcctaaattgtgcttcttt

SEQ ID NO: 4408929 - DNA, 25 bp, Homo sapien
gtagtacaatacaccgtcaagaaca

SEQ ID NO: 4408930 - DNA, 25 bp, Homo sapien
tcactaaacaagttgaattcatcaa

SEQ ID NO: 4408931 - DNA, 25 bp, Homo sapien
gttgaattcatcaaacgctgtacct

SEQ ID NO: 4408932 - DNA, 25 bp, Homo sapien
tcaagaacaatgtcgtgacatctgt

SEQ ID NO: 4408933 - DNA, 25 bp, Homo sapien
tctttggtatgccacttatatctgg

SEQ ID NO: 4408934 - DNA, 25 bp, Homo sapien
tctgtaaagctgtggaatatgttat

SEQ ID NO: 4408935 - DNA, 25 bp, Homo sapien
cagttgtctccccaggatttgggct

SEQ ID NO: 4408936 - DNA, 25 bp, Homo sapien
taaatgaggcaaatgtgtagggttt

SEQ ID NO: 4408937 - DNA, 25 bp, Homo sapien
cgagtcccgcgttcctttcgtgagg

SEQ ID NO: 4408938 - DNA, 25 bp, Homo sapien
gtgagggggacgcagccaggccttc

SEQ ID NO: 4408939 - DNA, 25 bp, Homo sapien
acgcagccaggccttccgggccttc

SEQ ID NO: 4408940 - DNA, 25 bp, Homo sapien
ccgagtcccgcgttcctttcgtgag

SEQ ID NO: 4408941 - DNA, 25 bp, Homo sapien
gtgagggggacgcagccaggccttc

SEQ ID NO: 4408942 - DNA, 25 bp, Homo sapien
cgcagccaggccttccgggccttcc

SEQ ID NO: 4408943 - DNA, 25 bp, Homo sapien
gagggggacgcagccaggccttccg

SEQ ID NO: 4408944 - DNA, 25 bp, Homo sapien
gacgcagccaggccttccgggcctt

SEQ ID NO: 4408945 - DNA, 25 bp, Homo sapien
gcgttccttctgtgaggcggacgca

SEQ ID NO: 4408946 - DNA, 25 bp, Homo sapien
gttccttccgtgagggggacgcagc

SEQ ID NO: 4408947 - DNA, 25 bp, Homo sapien
cgagtcccgcgttccttccgtgagg

SEQ ID NO: 4408948 - DNA, 25 bp, Homo sapien
agtcccgcgttccttctgtgaggcg

SEQ ID NO: 4408949 - DNA, 25 bp, Homo sapien
gttccttccgtgagggggacgcagc

SEQ ID NO: 4408950 - DNA, 25 bp, Homo sapien
gcctcctcgagtcccgcgttccttc

SEQ ID NO: 4408951 - DNA, 25 bp, Homo sapien
cgagtcccgcgttccttccgtgagg

SEQ ID NO: 4408952 - DNA, 25 bp, Homo sapien
ctgtgagggggacgcagccaggcct

SEQ ID NO: 4408953 - DNA, 25 bp, Homo sapien
acgcagccaggccttccgggccttc

SEQ ID NO: 4408954 - DNA, 25 bp, Homo sapien
cgcagccaggccttccgggccttcc

SEQ ID NO: 4408955 - DNA, 25 bp, Homo sapien
gagggggacgcagccaggccttccg

SEQ ID NO: 4408956 - DNA, 25 bp, Homo sapien
tgtggcgtgcaaactaatatattca

SEQ ID NO: 4408957 - DNA, 25 bp, Homo sapien
taatatattcacctgattggcctcc

SEQ ID NO: 4408958 - DNA, 25 bp, Homo sapien
cacaaattgtgtggcgtgcaaacta

SEQ ID NO: 4408959 - DNA, 25 bp, Homo sapien
cctgattggcctccacacgtgaggg

SEQ ID NO: 4408960 - DNA, 25 bp, Homo sapien
tgtgatgatataagcctctcctcat

SEQ ID NO: 4408961 - DNA, 25 bp, Homo sapien
agagccggcagatttccccagctgt

SEQ ID NO: 4408962 - DNA, 25 bp, Homo sapien
cagctgtgggaggaaagctctgttc

SEQ ID NO: 4408963 - DNA, 25 bp, Homo sapien
tcctcatccgtcagcttcagttgta

SEQ ID NO: 4408964 - DNA, 25 bp, Homo sapien
aacacaagacagagttcgtccctgt

SEQ ID NO: 4408965 - DNA, 25 bp, Homo sapien
tgggacagaacggacgaaggccctc

SEQ ID NO: 4408966 - DNA, 25 bp, Homo sapien
gaaggccctcagtgcttccaatcca

SEQ ID NO: 4408967 - DNA, 25 bp, Homo sapien
cagtgaaaatgtgcagcgcccataa

SEQ ID NO: 4408968 - DNA, 25 bp, Homo sapien
tgggagcccttgagcataggaacct

SEQ ID NO: 4408969 - DNA, 25 bp, Homo sapien
ggtactgcgaacgaacacccaatgc

SEQ ID NO: 4408970 - DNA, 25 bp, Homo sapien
ctggggtactgcgaacgaacaccca

SEQ ID NO: 4408971 - DNA, 25 bp, Homo sapien
ctgggagcccttgagcataggaacc

SEQ ID NO: 4408972 - DNA, 25 bp, Homo sapien
ctaaaggatagagcgacaacacaaa

SEQ ID NO: 4408973 - DNA, 25 bp, Homo sapien
aaaggatagagcgacaacacaaaat

SEQ ID NO: 4408974 - DNA, 25 bp, Homo sapien
aggatagagcgacaacacaaaatac

SEQ ID NO: 4408975 - DNA, 25 bp, Homo sapien
aaggatagagcgacaacacaaaata

SEQ ID NO: 4408976 - DNA, 25 bp, Homo sapien
gatctcaggacctgatattcttccg

SEQ ID NO: 4408977 - DNA, 25 bp, Homo sapien
ggaattcaccaattctcctctgagt

SEQ ID NO: 4408978 - DNA, 25 bp, Homo sapien
gatgcccactggataggaattcacc

SEQ ID NO: 4408979 - DNA, 25 bp, Homo sapien
tccgccgtcgaccagggtttgaaga

SEQ ID NO: 4408980 - DNA, 25 bp, Homo sapien
aggggcacctgcactctgtcaccag

SEQ ID NO: 4408981 - DNA, 25 bp, Homo sapien
aggagccccgtgctgggcagaggta

SEQ ID NO: 4408982 - DNA, 25 bp, Homo sapien
actgtggccagaagccccgtgctgg

SEQ ID NO: 4408983 - DNA, 25 bp, Homo sapien
ctgcactgtggccagaagccccgtg

SEQ ID NO: 4408984 - DNA, 25 bp, Homo sapien
tgcagcaatcctgggagccccgtgc

SEQ ID NO: 4408985 - DNA, 25 bp, Homo sapien
ccccgtgctgggcaggagtacctgc

SEQ ID NO: 4408986 - DNA, 25 bp, Homo sapien
gagtacctgcactctgtggccagga

SEQ ID NO: 4408987 - DNA, 25 bp, Homo sapien
cagcaatcctgggagccccgtgctg

SEQ ID NO: 4408988 - DNA, 25 bp, Homo sapien
cttgggcagtgtggtaggagcacac

SEQ ID NO: 4408989 - DNA, 25 bp, Homo sapien
tgggcagtgtggtaggagcacactc

SEQ ID NO: 4408990 - DNA, 25 bp, Homo sapien
ccttgggcagtgtggtaggagcaca

SEQ ID NO: 4408991 - DNA, 25 bp, Homo sapien
gcagtgtggtaggagcacactctgc

SEQ ID NO: 4408992 - DNA, 25 bp, Homo sapien
gcaggtccttgcacatcagctgttt

SEQ ID NO: 4408993 - DNA, 25 bp, Homo sapien
tcccacctggatctgcacagcgttg

SEQ ID NO: 4408994 - DNA, 25 bp, Homo sapien
catggtctctcaccatctacagagc

SEQ ID NO: 4408995 - DNA, 25 bp, Homo sapien
gaacaacttctcctggactctgtca

SEQ ID NO: 4408996 - DNA, 25 bp, Homo sapien
tctcctctgttggacgcaatgatgt

SEQ ID NO: 4408997 - DNA, 25 bp, Homo sapien
agtcctccctgaaggcagacctcca

SEQ ID NO: 4408998 - DNA, 25 bp, Homo sapien
gtcctccctgaaggcagacctccat

SEQ ID NO: 4408999 - DNA, 25 bp, Homo sapien
cagagtcctccctgaaggcagacct

SEQ ID NO: 4409000 - DNA, 25 bp, Homo sapien
agagtcctccctgaaggcagacctc

SEQ ID NO: 4409001 - DNA, 25 bp, Homo sapien
tggcgtttacgttcaggatagactc

SEQ ID NO: 4409002 - DNA, 25 bp, Homo sapien
ctggtagtttcggaagcaggcacac

SEQ ID NO: 4409003 - DNA, 25 bp, Homo sapien
ggatagactcgcttagccaatgtcc

SEQ ID NO: 4409004 - DNA, 25 bp, Homo sapien
cgagaaccgttctttgaatactggt

SEQ ID NO: 4409005 - DNA, 25 bp, Homo sapien
tccgcaggttgctgtagcaatcagc

SEQ ID NO: 4409006 - DNA, 25 bp, Homo sapien
caggttgctgtagcaatcagccggc

SEQ ID NO: 4409007 - DNA, 25 bp, Homo sapien
tgctgtagcaatcagccggcacggg

SEQ ID NO: 4409008 - DNA, 25 bp, Homo sapien
ttccacaatccgcaggttgctgtag

SEQ ID NO: 4409009 - DNA, 25 bp, Homo sapien
tctaaaacactcagtgcatcatgac

SEQ ID NO: 4409010 - DNA, 25 bp, Homo sapien
aaaacactcagtgcatcatgacaag

SEQ ID NO: 4409011 - DNA, 25 bp, Homo sapien
taaaacactcagtgcatcatgacaa

SEQ ID NO: 4409012 - DNA, 25 bp, Homo sapien
atctaaaacactcagtgcatcatga

SEQ ID NO: 4409013 - DNA, 25 bp, Homo sapien
taggcacaacagagttttgaccatg

SEQ ID NO: 4409014 - DNA, 25 bp, Homo sapien
agatttcattcaagcccgtttaggc

SEQ ID NO: 4409015 - DNA, 25 bp, Homo sapien
tgggttcggcaaaataagtgtcctg

SEQ ID NO: 4409016 - DNA, 25 bp, Homo sapien
gctgatgacgtcacagtctgaatgg

SEQ ID NO: 4409017 - DNA, 25 bp, Homo sapien
gaacattaagacaggagccaaccat

SEQ ID NO: 4409018 - DNA, 25 bp, Homo sapien
gagcaaagcctctgcctttctgaac

SEQ ID NO: 4409019 - DNA, 25 bp, Homo sapien
caaaccagaactatgatgtatgtca

SEQ ID NO: 4409020 - DNA, 25 bp, Homo sapien
gcacaatccttcgtttattcatgaa

SEQ ID NO: 4409021 - DNA, 25 bp, Homo sapien
agactctctgagtgggtttccatga

SEQ ID NO: 4409022 - DNA, 25 bp, Homo sapien
tggaggccggcctgaatagaggaaa

SEQ ID NO: 4409023 - DNA, 25 bp, Homo sapien
cagcagctggtgtcgggtggcatct

SEQ ID NO: 4409024 - DNA, 25 bp, Homo sapien
gaggatggtgggctcgccagcagct

SEQ ID NO: 4409025 - DNA, 25 bp, Homo sapien
caagcattctgctgagaacgcattg

SEQ ID NO: 4409026 - DNA, 25 bp, Homo sapien
cattctggcattgcaagcattctgc

SEQ ID NO: 4409027 - DNA, 25 bp, Homo sapien
cagggctgtttcattctggcattgc

SEQ ID NO: 4409028 - DNA, 25 bp, Homo sapien
gaacgcattgttaccctcatttgca

SEQ ID NO: 4409029 - DNA, 25 bp, Homo sapien
aaggaggagaattcagtcatgtctg

SEQ ID NO: 4409030 - DNA, 25 bp, Homo sapien
aattcagtcatgtctggttcagtgg

SEQ ID NO: 4409031 - DNA, 25 bp, Homo sapien
gagaattcagtcatgtctggttcag

SEQ ID NO: 4409032 - DNA, 25 bp, Homo sapien
aggagaattcagtcatgtctggttc

SEQ ID NO: 4409033 - DNA, 25 bp, Homo sapien
tgaagtaagcattggaaatccgcca

SEQ ID NO: 4409034 - DNA, 25 bp, Homo sapien
gctgcaggactctcgctctgatgag

SEQ ID NO: 4409035 - DNA, 25 bp, Homo sapien
tgttctgatcagaggaaccaatcca

SEQ ID NO: 4409036 - DNA, 25 bp, Homo sapien
gcctgaggcagtcaacacaagtgtt

SEQ ID NO: 4409037 - DNA, 25 bp, Homo sapien
tgactttccatagaacttaaacatt

SEQ ID NO: 4409038 - DNA, 25 bp, Homo sapien
catagaacttaaacattaaaggcaa

SEQ ID NO: 4409039 - DNA, 25 bp, Homo sapien
acattaaaggcaaacctttatccat

SEQ ID NO: 4409040 - DNA, 25 bp, Homo sapien
cttgtgagtgactttccatagaact

SEQ ID NO: 4409041 - DNA, 25 bp, Homo sapien
cttccgcatcagtggagggttctgt

SEQ ID NO: 4409042 - DNA, 25 bp, Homo sapien
ccttccgcatcagtggagggttctg

SEQ ID NO: 4409043 - DNA, 25 bp, Homo sapien
tccttccgcatcagtggagggttct

SEQ ID NO: 4409044 - DNA, 25 bp, Homo sapien
cagctgtccccattgagtgcgcact

SEQ ID NO: 4409045 - DNA, 25 bp, Homo sapien
gctgtccccattgagtgcgcactgt

SEQ ID NO: 4409046 - DNA, 25 bp, Homo sapien
tccccattgagtgcgcactgtgtgg

SEQ ID NO: 4409047 - DNA, 25 bp, Homo sapien
aatcctgcagactcccccgaagtcc

SEQ ID NO: 4409048 - DNA, 25 bp, Homo sapien
gcatcgttggatcagcaggcggacc

SEQ ID NO: 4409049 - DNA, 25 bp, Homo sapien
cgggacttcagtgggcatcgttgga

SEQ ID NO: 4409050 - DNA, 25 bp, Homo sapien
tcagtgggcatcgttggatcagcag

SEQ ID NO: 4409051 - DNA, 25 bp, Homo sapien
atcgttggatcagcaggcggaccgc

SEQ ID NO: 4409052 - DNA, 25 bp, Homo sapien
ggcatcagcccagcagttgtcagaa

SEQ ID NO: 4409053 - DNA, 25 bp, Homo sapien
tgggcatcagcccagcagttgtcag

SEQ ID NO: 4409054 - DNA, 25 bp, Homo sapien
catcagcccagcagttgtcagaaga

SEQ ID NO: 4409055 - DNA, 25 bp, Homo sapien
tggctccacttcaaggcccgggggc

SEQ ID NO: 4409056 - DNA, 25 bp, Homo sapien
gcaccacgtccagtcgacgaaaaca

SEQ ID NO: 4409057 - DNA, 25 bp, Homo sapien
gtaggatgcaccacgtccagtcgac

SEQ ID NO: 4409058 - DNA, 25 bp, Homo sapien
gatgcaccacgtccagtcgatgaaa

SEQ ID NO: 4409059 - DNA, 25 bp, Homo sapien
cagcgggagagctgtgctgtgcagt

SEQ ID NO: 4409060 - DNA, 25 bp, Homo sapien
cctgtttgcaacagtctttggaatg

SEQ ID NO: 4409061 - DNA, 25 bp, Homo sapien
agtatgggaacaccttgattgtgga

SEQ ID NO: 4409062 - DNA, 25 bp, Homo sapien
gtttgctgggtatggtcctgtttgc

SEQ ID NO: 4409063 - DNA, 25 bp, Homo sapien
ggaacaccttgattgtggacagtca

SEQ ID NO: 4409064 - DNA, 25 bp, Homo sapien
gcactctgagaataccgaggccacg

SEQ ID NO: 4409065 - DNA, 25 bp, Homo sapien
gtctgccgtgtccatttcttttgag

SEQ ID NO: 4409066 - DNA, 25 bp, Homo sapien
tgagaataccgaggccacgctccca

SEQ ID NO: 4409067 - DNA, 25 bp, Homo sapien
tcttgaacaaaagtctgccgtgtcc

SEQ ID NO: 4409068 - DNA, 25 bp, Homo sapien
agccctggtgaacgtggacacgcgt

SEQ ID NO: 4409069 - DNA, 25 bp, Homo sapien
catgcccagggggaattgcacagag

SEQ ID NO: 4409070 - DNA, 25 bp, Homo sapien
cagatacggcgtcctctgactatca

SEQ ID NO: 4409071 - DNA, 25 bp, Homo sapien
ttcatgggtgggtctgtggcgccca

SEQ ID NO: 4409072 - DNA, 25 bp, Homo sapien
ctaagaaaggttggaatggtattcg

SEQ ID NO: 4409073 - DNA, 25 bp, Homo sapien
gattaatgtttatatagtaggcaca

SEQ ID NO: 4409074 - DNA, 25 bp, Homo sapien
ctgagctattacttactaaattgac

SEQ ID NO: 4409075 - DNA, 25 bp, Homo sapien
caaagccactctaatatattgccag

SEQ ID NO: 4409076 - DNA, 25 bp, Homo sapien
tacgtctgtgagaccaactggaacc

SEQ ID NO: 4409077 - DNA, 25 bp, Homo sapien
acacttgattgaattcaataactac

SEQ ID NO: 4409078 - DNA, 25 bp, Homo sapien
tcggatatccatacgtctgtgagac

SEQ ID NO: 4409079 - DNA, 25 bp, Homo sapien
gctcctcggatatccatacgtctgt

SEQ ID NO: 4409080 - DNA, 25 bp, Homo sapien
ctattttgggatgcaagccctgtta

SEQ ID NO: 4409081 - DNA, 25 bp, Homo sapien
caggtacaactgacacatggaaatt

SEQ ID NO: 4409082 - DNA, 25 bp, Homo sapien
aattggatatctgtgcttgcaagga

SEQ ID NO: 4409083 - DNA, 25 bp, Homo sapien
ttgcaaggatgatggcacaagtagg

SEQ ID NO: 4409084 - DNA, 25 bp, Homo sapien
gcagcctgagacaaagccttcttag

SEQ ID NO: 4409085 - DNA, 25 bp, Homo sapien
tgcaaatgcagatatggtgtgccca

SEQ ID NO: 4409086 - DNA, 25 bp, Homo sapien
tctgatcgtggtacaatgggacaag

SEQ ID NO: 4409087 - DNA, 25 bp, Homo sapien
tacaatggcaagacagtacctactg

SEQ ID NO: 4409088 - DNA, 25 bp, Homo sapien
tagagatagggaaaaccacatgagg

SEQ ID NO: 4409089 - DNA, 25 bp, Homo sapien
tcagggcacctcattaagtagcaag

SEQ ID NO: 4409090 - DNA, 25 bp, Homo sapien
tcaagagactcatagctgctctggc

SEQ ID NO: 4409091 - DNA, 25 bp, Homo sapien
cacatgaggaaacaaaggtggaagg

SEQ ID NO: 4409092 - DNA, 25 bp, Homo sapien
tgacagccctgggaaggccggtcat

SEQ ID NO: 4409093 - DNA, 25 bp, Homo sapien
tgtccttgtgaaccgccttttgtgg

SEQ ID NO: 4409094 - DNA, 25 bp, Homo sapien
tgtgctccagcaaacgtgataatcc

SEQ ID NO: 4409095 - DNA, 25 bp, Homo sapien
gatttaatgccttaataaccagccc

SEQ ID NO: 4409096 - DNA, 25 bp, Homo sapien
accggaggctcatggtcaccgtgag

SEQ ID NO: 4409097 - DNA, 25 bp, Homo sapien
aactcattgcccgtgtggcccactg

SEQ ID NO: 4409098 - DNA, 25 bp, Homo sapien
aacccaaactcattgcccgtgtggc

SEQ ID NO: 4409099 - DNA, 25 bp, Homo sapien
accgtgagggcacaagggctcagat

SEQ ID NO: 4409100 - DNA, 25 bp, Homo sapien
tgaaatgcagggacagttaggtgtt

SEQ ID NO: 4409101 - DNA, 25 bp, Homo sapien
tgtctgaagctgcaagtctgaaggc

SEQ ID NO: 4409102 - DNA, 25 bp, Homo sapien
tgtatgttgttaagttctgcttggc

SEQ ID NO: 4409103 - DNA, 25 bp, Homo sapien
tgcttggctatgaacaagctgtgaa

SEQ ID NO: 4409104 - DNA, 25 bp, Homo sapien
tcagttggtctgtcattggatgcca

SEQ ID NO: 4409105 - DNA, 25 bp, Homo sapien
aaactgctttccatgtatgccacat

SEQ ID NO: 4409106 - DNA, 25 bp, Homo sapien
gatgccactggtaagtgtcaggcca

SEQ ID NO: 4409107 - DNA, 25 bp, Homo sapien
aggccactgttgtgctccaggttgc

SEQ ID NO: 4409108 - DNA, 25 bp, Homo sapien
tagggaacaacgtcaggacctcctg

SEQ ID NO: 4409109 - DNA, 25 bp, Homo sapien
ggcatgacctcttagcacctcaggg

SEQ ID NO: 4409110 - DNA, 25 bp, Homo sapien
tagagatcatgtcgcaccactgtgt

SEQ ID NO: 4409111 - DNA, 25 bp, Homo sapien
taaccctgctccacggtgagaaata

SEQ ID NO: 4409112 - DNA, 25 bp, Homo sapien
aatctctctatgccttgatttctcc

SEQ ID NO: 4409113 - DNA, 25 bp, Homo sapien
gagtcaggggctcgctctaagctct

SEQ ID NO: 4409114 - DNA, 25 bp, Homo sapien
gctcgctctaagctctactcctggt

SEQ ID NO: 4409115 - DNA, 25 bp, Homo sapien
gaagtcttctctcctaggaacggag

SEQ ID NO: 4409116 - DNA, 25 bp, Homo sapien
gaaatgcaccgctaatatcacactg

SEQ ID NO: 4409117 - DNA, 25 bp, Homo sapien
tatgtgcccagtgcggtagctgtga

SEQ ID NO: 4409118 - DNA, 25 bp, Homo sapien
gaagaacccggaaaatgcacagggc

SEQ ID NO: 4409119 - DNA, 25 bp, Homo sapien
tgggagtgcccttcaccatgagaga

SEQ ID NO: 4409120 - DNA, 25 bp, Homo sapien
gtgaaattgtgattcatatcctttg

SEQ ID NO: 4409121 - DNA, 25 bp, Homo sapien
tgtgaaattgtgattcatatccttt

SEQ ID NO: 4409122 - DNA, 25 bp, Homo sapien
ctgtgaggggtaaggaaggctcggg

SEQ ID NO: 4409123 - DNA, 25 bp, Homo sapien
gggaaggaatgttgaagagaaactg

SEQ ID NO: 4409124 - DNA, 25 bp, Homo sapien
gaaggaatgttgaagagaaactgga

SEQ ID NO: 4409125 - DNA, 25 bp, Homo sapien
attttgccaaccagccagaccctgc

SEQ ID NO: 4409126 - DNA, 25 bp, Homo sapien
tgctgctcaattcgcttggtcaatt

SEQ ID NO: 4409127 - DNA, 25 bp, Homo sapien
ctccactaaccaggaagcaatttcc

SEQ ID NO: 4409128 - DNA, 25 bp, Homo sapien
ctcctgctgctcaattcgcttggtc

SEQ ID NO: 4409129 - DNA, 25 bp, Homo sapien
tttggaccgcgtgcgatgccgcttc

SEQ ID NO: 4409130 - DNA, 25 bp, Homo sapien
cgtgcgatgccgcttctcctcggtg

SEQ ID NO: 4409131 - DNA, 25 bp, Homo sapien
tcgaacccctttggaccgcgtgcga

SEQ ID NO: 4409132 - DNA, 25 bp, Homo sapien
gtgcgatgccgcttctcctcggtgt

SEQ ID NO: 4409133 - DNA, 25 bp, Homo sapien
cctcagttccgcaggatgaaggtga

SEQ ID NO: 4409134 - DNA, 25 bp, Homo sapien
taccatctatcacaagcgaccctct

SEQ ID NO: 4409135 - DNA, 25 bp, Homo sapien
aggatgcagggaagcgcggacatac

SEQ ID NO: 4409136 - DNA, 25 bp, Homo sapien
ggtgaccctgagccggcctcaggat

SEQ ID NO: 4409137 - DNA, 25 bp, Homo sapien
cagctcttgtatggctggttccacg

SEQ ID NO: 4409138 - DNA, 25 bp, Homo sapien
acagctcttgtatggctggttccac

SEQ ID NO: 4409139 - DNA, 25 bp, Homo sapien
gaacagctcttgtatggctggttcc

SEQ ID NO: 4409140 - DNA, 25 bp, Homo sapien
ctgaacagctcttgtatggctggtt

SEQ ID NO: 4409141 - DNA, 25 bp, Homo sapien
tcacacaatccaaaggagggggaaa

SEQ ID NO: 4409142 - DNA, 25 bp, Homo sapien
aggctttttacgagcaagtctcggg

SEQ ID NO: 4409143 - DNA, 25 bp, Homo sapien
ccattagaaggcgtgaattttccaa

SEQ ID NO: 4409144 - DNA, 25 bp, Homo sapien
gtctcgggggaattaatttcatcag

SEQ ID NO: 4409145 - DNA, 25 bp, Homo sapien
aaagaatggattacacggtgccgca

SEQ ID NO: 4409146 - DNA, 25 bp, Homo sapien
ggtgagacggaaagcttccgtggca

SEQ ID NO: 4409147 - DNA, 25 bp, Homo sapien
agaatggattacacggtgccgcagg

SEQ ID NO: 4409148 - DNA, 25 bp, Homo sapien
aagaatggattacacggtgccgcag

SEQ ID NO: 4409149 - DNA, 25 bp, Homo sapien
tgcatatttgccactgacatgacca

SEQ ID NO: 4409150 - DNA, 25 bp, Homo sapien
ttgcatatttgccactgacatgacc

SEQ ID NO: 4409151 - DNA, 25 bp, Homo sapien
cactgacatgaccactgccgtcaca

SEQ ID NO: 4409152 - DNA, 25 bp, Homo sapien
ctgacatgaccactgccgtcacagc

SEQ ID NO: 4409153 - DNA, 25 bp, Homo sapien
tattctgcccacgagatcgaacggc

SEQ ID NO: 4409154 - DNA, 25 bp, Homo sapien
tcaagagacaaagactgagttccag

SEQ ID NO: 4409155 - DNA, 25 bp, Homo sapien
cactcccagaatgaggacgtgagga

SEQ ID NO: 4409156 - DNA, 25 bp, Homo sapien
tcgaacggcttatgttttgagaacc

SEQ ID NO: 4409157 - DNA, 25 bp, Homo sapien
cctgcagccgtccagatgtaagaat

SEQ ID NO: 4409158 - DNA, 25 bp, Homo sapien
cagccgtccagatgtaagaatgggc

SEQ ID NO: 4409159 - DNA, 25 bp, Homo sapien
ccgtccagatgtaagaatgggctta

SEQ ID NO: 4409160 - DNA, 25 bp, Homo sapien
agatgtaagaatgggcttagtttcc

SEQ ID NO: 4409161 - DNA, 25 bp, Homo sapien
tcttgcaagcttgatatgccctgac

SEQ ID NO: 4409162 - DNA, 25 bp, Homo sapien
tcagccacgggcatgtaacatataa

SEQ ID NO: 4409163 - DNA, 25 bp, Homo sapien
gaggcctcccagatgtgcggcagat

SEQ ID NO: 4409164 - DNA, 25 bp, Homo sapien
taaaggactgatgtgtacctgacag

SEQ ID NO: 4409165 - DNA, 25 bp, Homo sapien
aaaactatggctataaaattatatc

SEQ ID NO: 4409166 - DNA, 25 bp, Homo sapien
actatggctataaaattatatctag

SEQ ID NO: 4409167 - DNA, 25 bp, Homo sapien
ctatggctataaaattatatctagc

SEQ ID NO: 4409168 - DNA, 25 bp, Homo sapien
atggctataaaattatatctagctc

SEQ ID NO: 4409169 - DNA, 25 bp, Homo sapien
cccagaaactaccatagcgtctgtc

SEQ ID NO: 4409170 - DNA, 25 bp, Homo sapien
tggcccccagaaactaccatagcgt

SEQ ID NO: 4409171 - DNA, 25 bp, Homo sapien
agagggtgacgtatggcccccagaa

SEQ ID NO: 4409172 - DNA, 25 bp, Homo sapien
tggcagagagggtgacgtatggccc

SEQ ID NO: 4409173 - DNA, 25 bp, Homo sapien
agatcccacagctttctgagaccca

SEQ ID NO: 4409174 - DNA, 25 bp, Homo sapien
caaacagactgccagatcccactgc

SEQ ID NO: 4409175 - DNA, 25 bp, Homo sapien
tttctgagacccacagcagatcccg

SEQ ID NO: 4409176 - DNA, 25 bp, Homo sapien
agactgccagatcccactgccagat

SEQ ID NO: 4409177 - DNA, 25 bp, Homo sapien
tccttcgctgccaagagtgtctgcg

SEQ ID NO: 4409178 - DNA, 25 bp, Homo sapien
tgttagcttcctaggaggtctggcc

SEQ ID NO: 4409179 - DNA, 25 bp, Homo sapien
aagaccacatgagcacgttcactcg

SEQ ID NO: 4409180 - DNA, 25 bp, Homo sapien
tgtatcagggcccaaaaatgttgag

SEQ ID NO: 4409181 - DNA, 25 bp, Homo sapien
aggatttcagaacagcaagttgacc

SEQ ID NO: 4409182 - DNA, 25 bp, Homo sapien
taaacaatcacctacacagacagag

SEQ ID NO: 4409183 - DNA, 25 bp, Homo sapien
taggcaatgagctcagtagcagcag

SEQ ID NO: 4409184 - DNA, 25 bp, Homo sapien
tctttagcaggtacttgagccccac

SEQ ID NO: 4409185 - DNA, 25 bp, Homo sapien
tagtgagtgctctctgtcaaggcat

SEQ ID NO: 4409186 - DNA, 25 bp, Homo sapien
gcatgaataatacagcccctaggct

SEQ ID NO: 4409187 - DNA, 25 bp, Homo sapien
caaatgaggcgtgcatacatcagga

SEQ ID NO: 4409188 - DNA, 25 bp, Homo sapien
gatgctcctctcagttgcaagttgc

SEQ ID NO: 4409189 - DNA, 25 bp, Homo sapien
ttttgtgtctgcaaatcctatgggt

SEQ ID NO: 4409190 - DNA, 25 bp, Homo sapien
tgcaaatcctatgggtactcaggcc

SEQ ID NO: 4409191 - DNA, 25 bp, Homo sapien
tatgggtactcaggcctgaattttg

SEQ ID NO: 4409192 - DNA, 25 bp, Homo sapien
aatcctatgggtactcaggcctgaa

SEQ ID NO: 4409193 - DNA, 25 bp, Homo sapien
tacaggtcatatacattacagactg

SEQ ID NO: 4409194 - DNA, 25 bp, Homo sapien
tcagacaacagctgtactgcacgca

SEQ ID NO: 4409195 - DNA, 25 bp, Homo sapien
tgtggtgtttcagtgggtaaacctc

SEQ ID NO: 4409196 - DNA, 25 bp, Homo sapien
gaaatctggccttgaccaatacagg

SEQ ID NO: 4409197 - DNA, 25 bp, Homo sapien
gcatcccgtggtcggcagaggctcc

SEQ ID NO: 4409198 - DNA, 25 bp, Homo sapien
gttgcaatggacagagatctccaca

SEQ ID NO: 4409199 - DNA, 25 bp, Homo sapien
cacccctgagtagttgcaatggaca

SEQ ID NO: 4409200 - DNA, 25 bp, Homo sapien
gggtgcacacccctgagtagttgca

SEQ ID NO: 4409201 - DNA, 25 bp, Homo sapien
ttattctaataatgtgatgagtgcc

SEQ ID NO: 4409202 - DNA, 25 bp, Homo sapien
tattctaataatgtgatgagtgcct

SEQ ID NO: 4409203 - DNA, 25 bp, Homo sapien
ttctaataatgtgatgagtgccttc

SEQ ID NO: 4409204 - DNA, 25 bp, Homo sapien
tctaataatgtgatgagtgccttct

SEQ ID NO: 4409205 - DNA, 25 bp, Homo sapien
gctagaggcttctctcgggtgctca

SEQ ID NO: 4409206 - DNA, 25 bp, Homo sapien
gcatgtcacctgcagctagaggctt

SEQ ID NO: 4409207 - DNA, 25 bp, Homo sapien
tggacccttccttgcatgtcacctg

SEQ ID NO: 4409208 - DNA, 25 bp, Homo sapien
gcatcacctccctggacccttcctt

SEQ ID NO: 4409209 - DNA, 25 bp, Homo sapien
tcatgtctgcgcagaaaacttgctg

SEQ ID NO: 4409210 - DNA, 25 bp, Homo sapien
cactacaggtgttaggtgactcatt

SEQ ID NO: 4409211 - DNA, 25 bp, Homo sapien
acccagatagggttgctttatcact

SEQ ID NO: 4409212 - DNA, 25 bp, Homo sapien
aggtgactcatttgtcataggaaag

SEQ ID NO: 4409213 - DNA, 25 bp, Homo sapien
agctgttgctccacatagatttcca

SEQ ID NO: 4409214 - DNA, 25 bp, Homo sapien
gggcatcaggctacaaataataaac

SEQ ID NO: 4409215 - DNA, 25 bp, Homo sapien
gaacgtttgctccatggtatctccc

SEQ ID NO: 4409216 - DNA, 25 bp, Homo sapien
ggtcagttacaagctgccatgtctg

SEQ ID NO: 4409217 - DNA, 25 bp, Homo sapien
tcagagatgctgtgcactctggtca

SEQ ID NO: 4409218 - DNA, 25 bp, Homo sapien
ctcagagatgctgtgcactctggtc

SEQ ID NO: 4409219 - DNA, 25 bp, Homo sapien
agagatgctgtgcactctggtcacc

SEQ ID NO: 4409220 - DNA, 25 bp, Homo sapien
cagagatgctgtgcactctggtcac

SEQ ID NO: 4409221 - DNA, 25 bp, Homo sapien
agggcccgcccactttcattgcttt

SEQ ID NO: 4409222 - DNA, 25 bp, Homo sapien
gcagagggcccgcccactttcattg

SEQ ID NO: 4409223 - DNA, 25 bp, Homo sapien
tgcagagggcccgcccactttcatt

SEQ ID NO: 4409224 - DNA, 25 bp, Homo sapien
agagggcccgcccactttcattgct

SEQ ID NO: 4409225 - DNA, 25 bp, Homo sapien
ctaaaacagataactaggcccaccg

SEQ ID NO: 4409226 - DNA, 25 bp, Homo sapien
agataactaggcccaccgtgaccat

SEQ ID NO: 4409227 - DNA, 25 bp, Homo sapien
aaaacagataactaggcccaccgtg

SEQ ID NO: 4409228 - DNA, 25 bp, Homo sapien
aacagataactaggcccaccgtgac

SEQ ID NO: 4409229 - DNA, 25 bp, Homo sapien
gctgtgcacggatggctcctccaga

SEQ ID NO: 4409230 - DNA, 25 bp, Homo sapien
cctgcccttggtgtcgcgggtcata

SEQ ID NO: 4409231 - DNA, 25 bp, Homo sapien
tagcagataatagatgcagctgtgc

SEQ ID NO: 4409232 - DNA, 25 bp, Homo sapien
cataatgaccggagcttttcccagc

SEQ ID NO: 4409233 - DNA, 25 bp, Homo sapien
gggagctccttggtacagtcagacc

SEQ ID NO: 4409234 - DNA, 25 bp, Homo sapien
ggaccaagggccgtgagggagctcc

SEQ ID NO: 4409235 - DNA, 25 bp, Homo sapien
accaagggccgtgagggagctcctt

SEQ ID NO: 4409236 - DNA, 25 bp, Homo sapien
gaggaccaagggccgtgagggagct

SEQ ID NO: 4409237 - DNA, 25 bp, Homo sapien
tcctggggctgtttatcttgtgttt

SEQ ID NO: 4409238 - DNA, 25 bp, Homo sapien
ctgtctgctttcacggcaaatggct

SEQ ID NO: 4409239 - DNA, 25 bp, Homo sapien
tggctttcgtttaggagcaggttcc

SEQ ID NO: 4409240 - DNA, 25 bp, Homo sapien
cggcaaatggctttcgtttaggagc

SEQ ID NO: 4409241 - DNA, 25 bp, Homo sapien
ctcagtcccatcactgtcgtcacac

SEQ ID NO: 4409242 - DNA, 25 bp, Homo sapien
gtcctcagtcccatcactgtcgtca

SEQ ID NO: 4409243 - DNA, 25 bp, Homo sapien
catgtcctcagtcccatcactgtcg

SEQ ID NO: 4409244 - DNA, 25 bp, Homo sapien
catccatgtcctcagtcccatcact

SEQ ID NO: 4409245 - DNA, 25 bp, Homo sapien
tcccctggctcatcattgtcctcgg

SEQ ID NO: 4409246 - DNA, 25 bp, Homo sapien
ctggctcatcattgtcctcggagta

SEQ ID NO: 4409247 - DNA, 25 bp, Homo sapien
ccctggctcatcattgtcctcggag

SEQ ID NO: 4409248 - DNA, 25 bp, Homo sapien
ctcatcccctggctcatcattgtcc

SEQ ID NO: 4409249 - DNA, 25 bp, Homo sapien
cagccatcagatcgcacactgagaa

SEQ ID NO: 4409250 - DNA, 25 bp, Homo sapien
cgcagccatcagatcgtacgtcgag

SEQ ID NO: 4409251 - DNA, 25 bp, Homo sapien
tgtccacagccatcagatcacaagt

SEQ ID NO: 4409252 - DNA, 25 bp, Homo sapien
cagccatcagatcgcacagtgagaa

SEQ ID NO: 4409253 - DNA, 25 bp, Homo sapien
tctgcgtttcaacttgctttcctca

SEQ ID NO: 4409254 - DNA, 25 bp, Homo sapien
gtctgcgtttcaacttgctttcctc

SEQ ID NO: 4409255 - DNA, 25 bp, Homo sapien
tgctttcctcatcagggatatttcc

SEQ ID NO: 4409256 - DNA, 25 bp, Homo sapien
tattcgagtattgtgacaattcatt

SEQ ID NO: 4409257 - DNA, 25 bp, Homo sapien
agcatgtccgagtagtttctgtccg

SEQ ID NO: 4409258 - DNA, 25 bp, Homo sapien
tgagagcacaacaccgtgtccttgg

SEQ ID NO: 4409259 - DNA, 25 bp, Homo sapien
tcttctggccggacatgctgacgga

SEQ ID NO: 4409260 - DNA, 25 bp, Homo sapien
tggccaggtcgaagcactgattcct

SEQ ID NO: 4409261 - DNA, 25 bp, Homo sapien
ccccgggaagttgtctcggagactg

SEQ ID NO: 4409262 - DNA, 25 bp, Homo sapien
ggagactggtcctcatatgacctca

SEQ ID NO: 4409263 - DNA, 25 bp, Homo sapien
catagtatggctttttgacatggct

SEQ ID NO: 4409264 - DNA, 25 bp, Homo sapien
ttccaaagcgatggctttctccagc

SEQ ID NO: 4409265 - DNA, 25 bp, Homo sapien
tttctggagggaccctatctttgtg

SEQ ID NO: 4409266 - DNA, 25 bp, Homo sapien
ctttgtgcgggcatccggacaggct

SEQ ID NO: 4409267 - DNA, 25 bp, Homo sapien
gctgcggtgatgtgggtacagccca

SEQ ID NO: 4409268 - DNA, 25 bp, Homo sapien
tacagcccagttacgtggccggttc

SEQ ID NO: 4409269 - DNA, 25 bp, Homo sapien
gtcctggatgtggtaggtcctagta

SEQ ID NO: 4409270 - DNA, 25 bp, Homo sapien
cctggatgtggtaggtcctagtaag

SEQ ID NO: 4409271 - DNA, 25 bp, Homo sapien
agagtttgctttggtattagcttta

SEQ ID NO: 4409272 - DNA, 25 bp, Homo sapien
tagctttatcgctcccacagttcct

SEQ ID NO: 4409273 - DNA, 25 bp, Homo sapien
tgttgctgttgacatgcccgcgccc

SEQ ID NO: 4409274 - DNA, 25 bp, Homo sapien
cttcggtgggagttcctgttgctgt

SEQ ID NO: 4409275 - DNA, 25 bp, Homo sapien
ggcacttgaggacactttcatgcat

SEQ ID NO: 4409276 - DNA, 25 bp, Homo sapien
gggcacttgaggacactttcatgca

SEQ ID NO: 4409277 - DNA, 25 bp, Homo sapien
tgcttctgcagattaaacacctgaa

SEQ ID NO: 4409278 - DNA, 25 bp, Homo sapien
caacctatcgatcatttcctgcttc

SEQ ID NO: 4409279 - DNA, 25 bp, Homo sapien
ctgcttctgcagattaaacacctga

SEQ ID NO: 4409280 - DNA, 25 bp, Homo sapien
tctccaacctatcgatcatttcctg

SEQ ID NO: 4409281 - DNA, 25 bp, Homo sapien
cgtcgcagctctggtgcttttcctg

SEQ ID NO: 4409282 - DNA, 25 bp, Homo sapien
ctctgctgcagcgatcgggcatccg

SEQ ID NO: 4409283 - DNA, 25 bp, Homo sapien
ggacttggacacgtcgcagctctgg

SEQ ID NO: 4409284 - DNA, 25 bp, Homo sapien
gacacgtcgcagctctggtgctttt

SEQ ID NO: 4409285 - DNA, 25 bp, Homo sapien
cttgggagctatggctcgcttgcca

SEQ ID NO: 4409286 - DNA, 25 bp, Homo sapien
ttggaatatttctcgagctccttgg

SEQ ID NO: 4409287 - DNA, 25 bp, Homo sapien
ccataagtatggttgtcgtaactgt

SEQ ID NO: 4409288 - DNA, 25 bp, Homo sapien
tgttgtattcaaacgaggtcttgga

SEQ ID NO: 4409289 - DNA, 25 bp, Homo sapien
tttgggggatatatccctggtttgc

SEQ ID NO: 4409290 - DNA, 25 bp, Homo sapien
ttgggggatatatccctggtttgca

SEQ ID NO: 4409291 - DNA, 25 bp, Homo sapien
tgggggatatatccctggtttgcac

SEQ ID NO: 4409292 - DNA, 25 bp, Homo sapien
catcaatggcaacgtgtctctcatg

SEQ ID NO: 4409293 - DNA, 25 bp, Homo sapien
caatggcaacgtgtctctcatgtat

SEQ ID NO: 4409294 - DNA, 25 bp, Homo sapien
tggcaacgtgtctctcatgtataag

SEQ ID NO: 4409295 - DNA, 25 bp, Homo sapien
atcatcaatggcaacgtgtctctca

SEQ ID NO: 4409296 - DNA, 25 bp, Homo sapien
tgtgtggacctgaggggctttcagc

SEQ ID NO: 4409297 - DNA, 25 bp, Homo sapien
tgtggacctgaggggctttcagctc

SEQ ID NO: 4409298 - DNA, 25 bp, Homo sapien
gtggacctgaggggctttcagctcc

SEQ ID NO: 4409299 - DNA, 25 bp, Homo sapien
agctgtgtggacctgaggggctttc

SEQ ID NO: 4409300 - DNA, 25 bp, Homo sapien
caggtggtacccaagaggtgacaca

SEQ ID NO: 4409301 - DNA, 25 bp, Homo sapien
gtgtggcaccgagctccatggacgc

SEQ ID NO: 4409302 - DNA, 25 bp, Homo sapien
gctggagagtggtaggaagggccgc

SEQ ID NO: 4409303 - DNA, 25 bp, Homo sapien
cttgcggcccgtgggaagacaggcc

SEQ ID NO: 4409304 - DNA, 25 bp, Homo sapien
cgaatctgcagacccggcctgtgac

SEQ ID NO: 4409305 - DNA, 25 bp, Homo sapien
ctagagggtggagcgaatctgcaga

SEQ ID NO: 4409306 - DNA, 25 bp, Homo sapien
gtggagcgaatctgcagacccggcc

SEQ ID NO: 4409307 - DNA, 25 bp, Homo sapien
gagcgaatctgcagacccggcctgt

SEQ ID NO: 4409308 - DNA, 25 bp, Homo sapien
cacctactctgcttgtgaaattctt

SEQ ID NO: 4409309 - DNA, 25 bp, Homo sapien
cttccaggtaggaccttttcattca

SEQ ID NO: 4409310 - DNA, 25 bp, Homo sapien
ggaaaagcacacaggatttgtgtga

SEQ ID NO: 4409311 - DNA, 25 bp, Homo sapien
tgttctagaaatgcctattgcctta

SEQ ID NO: 4409312 - DNA, 25 bp, Homo sapien
caggcgcccagaacatcactgtatg

SEQ ID NO: 4409313 - DNA, 25 bp, Homo sapien
gagcagccgctggatcttaaaccat

SEQ ID NO: 4409314 - DNA, 25 bp, Homo sapien
ttaactctagatgccagagctgcct

SEQ ID NO: 4409315 - DNA, 25 bp, Homo sapien
tacgagcaatgcagcagctttaact

SEQ ID NO: 4409316 - DNA, 25 bp, Homo sapien
tcctgcggtgtcttctgtgccatcg

SEQ ID NO: 4409317 - DNA, 25 bp, Homo sapien
cacattgctgatacggtcattatga

SEQ ID NO: 4409318 - DNA, 25 bp, Homo sapien
ttatgagcaatgctaagaaattgcc

SEQ ID NO: 4409319 - DNA, 25 bp, Homo sapien
tcgcagttggtcatggctcctgcgg

SEQ ID NO: 4409320 - DNA, 25 bp, Homo sapien
tagagacactctagcccgggttctc

SEQ ID NO: 4409321 - DNA, 25 bp, Homo sapien
gagaacttggtgataggctagagac

SEQ ID NO: 4409322 - DNA, 25 bp, Homo sapien
agtcctaatcggcaaagctccaagc

SEQ ID NO: 4409323 - DNA, 25 bp, Homo sapien
tccctgggaccgttgtgagtgtagc

SEQ ID NO: 4409324 - DNA, 25 bp, Homo sapien
tagcttttaggagccgcagggtgta

SEQ ID NO: 4409325 - DNA, 25 bp, Homo sapien
tatctgtcaagaggtgggctgttcc

SEQ ID NO: 4409326 - DNA, 25 bp, Homo sapien
tttggtgacccaacctggatccgcg

SEQ ID NO: 4409327 - DNA, 25 bp, Homo sapien
agtcaaatcccagtcgaggccctaa

SEQ ID NO: 4409328 - DNA, 25 bp, Homo sapien
gccgcagggcacacggcagacagca

SEQ ID NO: 4409329 - DNA, 25 bp, Homo sapien
acacacagccgcgtgggacggccct

SEQ ID NO: 4409330 - DNA, 25 bp, Homo sapien
tgctggggcttacgcgtaaagaaaa

SEQ ID NO: 4409331 - DNA, 25 bp, Homo sapien
agccacacacagccgcgtgggacgg

SEQ ID NO: 4409332 - DNA, 25 bp, Homo sapien
ccccgccgcagctcaggttgctgct

SEQ ID NO: 4409333 - DNA, 25 bp, Homo sapien
ctgctgggcgcgtagctgctggtgc

SEQ ID NO: 4409334 - DNA, 25 bp, Homo sapien
tgctgggcgcgtagctgctggtgct

SEQ ID NO: 4409335 - DNA, 25 bp, Homo sapien
cccccgccgcagctcaggttgctgc

SEQ ID NO: 4409336 - DNA, 25 bp, Homo sapien
gctcaggttctgcggcatctcgcgg

SEQ ID NO: 4409337 - DNA, 25 bp, Homo sapien
ctcaggttctgcggcatctcgcggc

SEQ ID NO: 4409338 - DNA, 25 bp, Homo sapien
caggttctgcggcatctcgcggcag

SEQ ID NO: 4409339 - DNA, 25 bp, Homo sapien
tcaggttctgcggcatctcgcggca

SEQ ID NO: 4409340 - DNA, 25 bp, Homo sapien
agcgccgcgtgtctcggtggctggg

SEQ ID NO: 4409341 - DNA, 25 bp, Homo sapien
tcggtggctgggtccgcggcccggc

SEQ ID NO: 4409342 - DNA, 25 bp, Homo sapien
cccgaaagcgccgcgtgtctcggtg

SEQ ID NO: 4409343 - DNA, 25 bp, Homo sapien
tacagctgccccgaaagcgccgcgt

SEQ ID NO: 4409344 - DNA, 25 bp, Homo sapien
ggaaacaccggttgttcatcactgc

SEQ ID NO: 4409345 - DNA, 25 bp, Homo sapien
ttttggtgtagtctacgggcaagtc

SEQ ID NO: 4409346 - DNA, 25 bp, Homo sapien
agtaatgtctttggactcgtcctcg

SEQ ID NO: 4409347 - DNA, 25 bp, Homo sapien
tagtctacgggcaagtcccagcagt

SEQ ID NO: 4409348 - DNA, 25 bp, Homo sapien
cttgcactgagggtacttgggtttg

SEQ ID NO: 4409349 - DNA, 25 bp, Homo sapien
tttgggacttgggatggtcacctcc

SEQ ID NO: 4409350 - DNA, 25 bp, Homo sapien
cgggataccgtctttcttctagagc

SEQ ID NO: 4409351 - DNA, 25 bp, Homo sapien
gtcctttttgctctccttgcactga

SEQ ID NO: 4409352 - DNA, 25 bp, Homo sapien
ggcgtaattaccagtcacatgacca

SEQ ID NO: 4409353 - DNA, 25 bp, Homo sapien
tgtgtgaggcgtaattaccagtcac

SEQ ID NO: 4409354 - DNA, 25 bp, Homo sapien
cttctgtgtgaggcgtaattaccag

SEQ ID NO: 4409355 - DNA, 25 bp, Homo sapien
tgaggcgtaattaccagtcacatga

SEQ ID NO: 4409356 - DNA, 25 bp, Homo sapien
tggccagcatacttcgaatgctttt

SEQ ID NO: 4409357 - DNA, 25 bp, Homo sapien
tggtggccagcatacttcgaatgct

SEQ ID NO: 4409358 - DNA, 25 bp, Homo sapien
cttcgaatgcttttgtccgccaggg

SEQ ID NO: 4409359 - DNA, 25 bp, Homo sapien
agctggtggccagcatacttcgaat

SEQ ID NO: 4409360 - DNA, 25 bp, Homo sapien
tatgaacaagctggaggtatgtcag

SEQ ID NO: 4409361 - DNA, 25 bp, Homo sapien
cacccatgctttaggatatcccaga

SEQ ID NO: 4409362 - DNA, 25 bp, Homo sapien
gaaaagtggctgaaattccgaggat

SEQ ID NO: 4409363 - DNA, 25 bp, Homo sapien
tcccatgtctacatcaaggcactgg

SEQ ID NO: 4409364 - DNA, 25 bp, Homo sapien
agcaggtgatctagggccctagggc

SEQ ID NO: 4409365 - DNA, 25 bp, Homo sapien
aggtgatctagggccctagggcctt

SEQ ID NO: 4409366 - DNA, 25 bp, Homo sapien
tgatctagggccctagggccttgga

SEQ ID NO: 4409367 - DNA, 25 bp, Homo sapien
taagcaggtgatctagggccctagg

SEQ ID NO: 4409368 - DNA, 25 bp, Homo sapien
tctgaccagttagaggcaacactag

SEQ ID NO: 4409369 - DNA, 25 bp, Homo sapien
caaaagacgcctgaacaaagtgggt

SEQ ID NO: 4409370 - DNA, 25 bp, Homo sapien
tacagccgttaggtaagaggaagcc

SEQ ID NO: 4409371 - DNA, 25 bp, Homo sapien
ccaagcccaacgtgaagggatgcaa

SEQ ID NO: 4409372 - DNA, 25 bp, Homo sapien
aaggcatgaagagctaaccggctcc

SEQ ID NO: 4409373 - DNA, 25 bp, Homo sapien
gggaccgtcacaccatcttgcaaga

SEQ ID NO: 4409374 - DNA, 25 bp, Homo sapien
taaccggctccctcggaaaatgcta

SEQ ID NO: 4409375 - DNA, 25 bp, Homo sapien
gctccctcggaaaatgctaaaggtg

SEQ ID NO: 4409376 - DNA, 25 bp, Homo sapien
tttgcaaagataggtttagacacat

SEQ ID NO: 4409377 - DNA, 25 bp, Homo sapien
tctatcagaataggattgacttttt

SEQ ID NO: 4409378 - DNA, 25 bp, Homo sapien
cacatgtgtggcttttcgatcaacc

SEQ ID NO: 4409379 - DNA, 25 bp, Homo sapien
tatagaagatgcttgattgaaattc

SEQ ID NO: 4409380 - DNA, 25 bp, Homo sapien
aaagaaagttgttgcgagtcatgag

SEQ ID NO: 4409381 - DNA, 25 bp, Homo sapien
ggactcatgcgggaattattctaaa

SEQ ID NO: 4409382 - DNA, 25 bp, Homo sapien
gaacgattagagactgttacaggac

SEQ ID NO: 4409383 - DNA, 25 bp, Homo sapien
tgttaatcagggacgatgctgctgc

SEQ ID NO: 4409384 - DNA, 25 bp, Homo sapien
tgttttgtccatgatcaagaatgtc

SEQ ID NO: 4409385 - DNA, 25 bp, Homo sapien
gctgctttgggtaagaccaggcaaa

SEQ ID NO: 4409386 - DNA, 25 bp, Homo sapien
gcttagaggatccaagagcgagagt

SEQ ID NO: 4409387 - DNA, 25 bp, Homo sapien
caggcaaagtgttatctcaggaagt

SEQ ID NO: 4409388 - DNA, 25 bp, Homo sapien
atgcgtccacgcgtggccttcgtgc

SEQ ID NO: 4409389 - DNA, 25 bp, Homo sapien
atccgtgcccaggactccgagtcca

SEQ ID NO: 4409390 - DNA, 25 bp, Homo sapien
acgcgtggccttcgtgccatccgtg

SEQ ID NO: 4409391 - DNA, 25 bp, Homo sapien
cctggtgatgcgtccacgcgtggcc

SEQ ID NO: 4409392 - DNA, 25 bp, Homo sapien
gcccatccgtggtcctccctccaga

SEQ ID NO: 4409393 - DNA, 25 bp, Homo sapien
tccctccagagtccttgcgttcctc

SEQ ID NO: 4409394 - DNA, 25 bp, Homo sapien
cagagtccttgcgttcctcacagag

SEQ ID NO: 4409395 - DNA, 25 bp, Homo sapien
gctggcccatccgtggtcctccctc

SEQ ID NO: 4409396 - DNA, 25 bp, Homo sapien
tagggcaacgggattttcaggctcg

SEQ ID NO: 4409397 - DNA, 25 bp, Homo sapien
tcaggctcgcgtgaacttctgacaa

SEQ ID NO: 4409398 - DNA, 25 bp, Homo sapien
cactaaggaagagcccggagcttgg

SEQ ID NO: 4409399 - DNA, 25 bp, Homo sapien
ggaaaggtgacatgctggcctcagc

SEQ ID NO: 4409400 - DNA, 25 bp, Homo sapien
gagccagagggagccacgtccctct

SEQ ID NO: 4409401 - DNA, 25 bp, Homo sapien
ctgcaggtgatgatgtcggacacag

SEQ ID NO: 4409402 - DNA, 25 bp, Homo sapien
tgtgatgctgcaacctgatcccact

SEQ ID NO: 4409403 - DNA, 25 bp, Homo sapien
tccagcagccagtcttacagctgtc

SEQ ID NO: 4409404 - DNA, 25 bp, Homo sapien
acctgctcccccgtctgaggccctg

SEQ ID NO: 4409405 - DNA, 25 bp, Homo sapien
ggctgggccggatgtccttcctcca

SEQ ID NO: 4409406 - DNA, 25 bp, Homo sapien
agcggctgggccggatgtccttcct

SEQ ID NO: 4409407 - DNA, 25 bp, Homo sapien
tgggccggatgtccttcctccatca

SEQ ID NO: 4409408 - DNA, 25 bp, Homo sapien
ctaatgggcaatgatgtggcttcca

SEQ ID NO: 4409409 - DNA, 25 bp, Homo sapien
taatgggcaatgatgtggcttccac

SEQ ID NO: 4409410 - DNA, 25 bp, Homo sapien
aatgggcaatgatgtggcttccacc

SEQ ID NO: 4409411 - DNA, 25 bp, Homo sapien
gggcaatgatgtggcttccaccaac

SEQ ID NO: 4409412 - DNA, 25 bp, Homo sapien
catgatggggggcagccaggcgtac

SEQ ID NO: 4409413 - DNA, 25 bp, Homo sapien
tcagggcatgatggggggcagccag

SEQ ID NO: 4409414 - DNA, 25 bp, Homo sapien
agggcatgatggggggcagccaggc

SEQ ID NO: 4409415 - DNA, 25 bp, Homo sapien
ggcatgatggggggcagccaggcgt

SEQ ID NO: 4409416 - DNA, 25 bp, Homo sapien
gatactggattctatgggacagggc

SEQ ID NO: 4409417 - DNA, 25 bp, Homo sapien
ttctatgggacagggcacgaagaaa

SEQ ID NO: 4409418 - DNA, 25 bp, Homo sapien
tactggattctatgggacagggcac

SEQ ID NO: 4409419 - DNA, 25 bp, Homo sapien
tggattctatgggacagggcacgaa

SEQ ID NO: 4409420 - DNA, 25 bp, Homo sapien
ctcgacaaatagatcttgacttcct

SEQ ID NO: 4409421 - DNA, 25 bp, Homo sapien
aaaactcgacaaatagatcttgact

SEQ ID NO: 4409422 - DNA, 25 bp, Homo sapien
tagaaaaactcgacaaatagatctt

SEQ ID NO: 4409423 - DNA, 25 bp, Homo sapien
aacatgacagatttaacataaaaca

SEQ ID NO: 4409424 - DNA, 25 bp, Homo sapien
tattcgtagagacaatggagcacct

SEQ ID NO: 4409425 - DNA, 25 bp, Homo sapien
cactgatagtaagaggtgaccatcc

SEQ ID NO: 4409426 - DNA, 25 bp, Homo sapien
caacagaggtcatcgctgagacatg

SEQ ID NO: 4409427 - DNA, 25 bp, Homo sapien
agacatgaaactcggaagcgccaca

SEQ ID NO: 4409428 - DNA, 25 bp, Homo sapien
actgagcttccgcaggccatgggtg

SEQ ID NO: 4409429 - DNA, 25 bp, Homo sapien
caggccatgggtgctagagcttcag

SEQ ID NO: 4409430 - DNA, 25 bp, Homo sapien
cagctgtcactgagcttccgcaggc

SEQ ID NO: 4409431 - DNA, 25 bp, Homo sapien
tgctagagcttcagccaggactgcc

SEQ ID NO: 4409432 - DNA, 25 bp, Homo sapien
gctctggaatcagtgacgtgtgttc

SEQ ID NO: 4409433 - DNA, 25 bp, Homo sapien
ctgctgcaaacgctgcagggatgtg

SEQ ID NO: 4409434 - DNA, 25 bp, Homo sapien
gccgtctcatattctggctctggaa

SEQ ID NO: 4409435 - DNA, 25 bp, Homo sapien
agggatgtggccgtctcatattctg

SEQ ID NO: 4409436 - DNA, 25 bp, Homo sapien
ttactctcaacacggccattattag

SEQ ID NO: 4409437 - DNA, 25 bp, Homo sapien
tgtccttatcactctcagaggcaag

SEQ ID NO: 4409438 - DNA, 25 bp, Homo sapien
gaggcaaggactgtttgtcccttag

SEQ ID NO: 4409439 - DNA, 25 bp, Homo sapien
tggagatgctttcacaaacagtcct

SEQ ID NO: 4409440 - DNA, 25 bp, Homo sapien
ctctcgctgcggtttggctgtttgg

SEQ ID NO: 4409441 - DNA, 25 bp, Homo sapien
gccgcgctggtgacaggtctgtctc

SEQ ID NO: 4409442 - DNA, 25 bp, Homo sapien
ttttctggggattctctcgctgcgg

SEQ ID NO: 4409443 - DNA, 25 bp, Homo sapien
acccgggccgcgctggtgacaggtc

SEQ ID NO: 4409444 - DNA, 25 bp, Homo sapien
gataccctggaggacgcacgcatgc

SEQ ID NO: 4409445 - DNA, 25 bp, Homo sapien
ggaggacgcacgcatgctgccccag

SEQ ID NO: 4409446 - DNA, 25 bp, Homo sapien
gacagcgcgccggatgagaggggct

SEQ ID NO: 4409447 - DNA, 25 bp, Homo sapien
cagcgttggggacagcgcgccggat

SEQ ID NO: 4409448 - DNA, 25 bp, Homo sapien
gcataattgccggtgatatgtccag

SEQ ID NO: 4409449 - DNA, 25 bp, Homo sapien
gccggtgatatgtccagaaccatca

SEQ ID NO: 4409450 - DNA, 25 bp, Homo sapien
gatgagaagcataattgccggtgat

SEQ ID NO: 4409451 - DNA, 25 bp, Homo sapien
aaccatcacagccaggcgtggggca

SEQ ID NO: 4409452 - DNA, 25 bp, Homo sapien
tgccgcacaggtcccacggtgcgga

SEQ ID NO: 4409453 - DNA, 25 bp, Homo sapien
ggtgaagagcttgcaacgttggcac

SEQ ID NO: 4409454 - DNA, 25 bp, Homo sapien
gagcttgcaacgttggcacggagtc

SEQ ID NO: 4409455 - DNA, 25 bp, Homo sapien
ttggcacggagtctggagaatcctc

SEQ ID NO: 4409456 - DNA, 25 bp, Homo sapien
tcgtgttctaccaaatgtggtggct

SEQ ID NO: 4409457 - DNA, 25 bp, Homo sapien
gtgttctaccaaatgtggtggctgt

SEQ ID NO: 4409458 - DNA, 25 bp, Homo sapien
cacatcaatgtcataagccctctgc

SEQ ID NO: 4409459 - DNA, 25 bp, Homo sapien
acatcaatgtcataagccctctgct

SEQ ID NO: 4409460 - DNA, 25 bp, Homo sapien
caatcttgttggacggcgcgactca

SEQ ID NO: 4409461 - DNA, 25 bp, Homo sapien
gcaatcttgttggacggcgcgactc

SEQ ID NO: 4409462 - DNA, 25 bp, Homo sapien
aatcttgttggacggcgcgactcac

SEQ ID NO: 4409463 - DNA, 25 bp, Homo sapien
ggcaatcttgttggacggcgcgact

SEQ ID NO: 4409464 - DNA, 25 bp, Homo sapien
tctaggtggtttaggcacacctact

SEQ ID NO: 4409465 - DNA, 25 bp, Homo sapien
tggtttaggcacacctacttcctcc

SEQ ID NO: 4409466 - DNA, 25 bp, Homo sapien
cttctctaggtggtttaggcacacc

SEQ ID NO: 4409467 - DNA, 25 bp, Homo sapien
gtttaggcacacctacttcctccag

SEQ ID NO: 4409468 - DNA, 25 bp, Homo sapien
aatgtggacttgacttctgcattgg

SEQ ID NO: 4409469 - DNA, 25 bp, Homo sapien
cacagggtgttctagtgggagtcgg

SEQ ID NO: 4409470 - DNA, 25 bp, Homo sapien
tgggagtcggattcctggagcatca

SEQ ID NO: 4409471 - DNA, 25 bp, Homo sapien
gtggaaaatgtggacttgacttctg

SEQ ID NO: 4409472 - DNA, 25 bp, Homo sapien
cacagcaggtaaggcctttgggatc

SEQ ID NO: 4409473 - DNA, 25 bp, Homo sapien
catgctggaggcttcgattttgcgc

SEQ ID NO: 4409474 - DNA, 25 bp, Homo sapien
tagacactgtctggccgtttgactg

SEQ ID NO: 4409475 - DNA, 25 bp, Homo sapien
tccggattttggcagcgggacctga

SEQ ID NO: 4409476 - DNA, 25 bp, Homo sapien
tccggaccctctgactaaacagctt

SEQ ID NO: 4409477 - DNA, 25 bp, Homo sapien
tctggcgaaacagctctatgccccg

SEQ ID NO: 4409478 - DNA, 25 bp, Homo sapien
tatgccccgcatgagaatggatcct

SEQ ID NO: 4409479 - DNA, 25 bp, Homo sapien
agaatggatcctgtgaccctccgga

SEQ ID NO: 4409480 - DNA, 25 bp, Homo sapien
cctttgctcacctgaatatatcata

SEQ ID NO: 4409481 - DNA, 25 bp, Homo sapien
ggaacagctcatctgctggtgactc

SEQ ID NO: 4409482 - DNA, 25 bp, Homo sapien
tatatcataagaatcccaaagttaa

SEQ ID NO: 4409483 - DNA, 25 bp, Homo sapien
cttttcgtgaatgagttggaacagc

SEQ ID NO: 4409484 - DNA, 25 bp, Homo sapien
ggtgggcagctcggcacctgtgccc

SEQ ID NO: 4409485 - DNA, 25 bp, Homo sapien
gcagctcggcacctgtgccccacgg

SEQ ID NO: 4409486 - DNA, 25 bp, Homo sapien
ctcttccacacgccgtagcccaggg

SEQ ID NO: 4409487 - DNA, 25 bp, Homo sapien
tcctctcttccacacgccgtagccc

SEQ ID NO: 4409488 - DNA, 25 bp, Homo sapien
tggccgatgtccctgccttgtctgt

SEQ ID NO: 4409489 - DNA, 25 bp, Homo sapien
gccgccatccttcgggctggccgat

SEQ ID NO: 4409490 - DNA, 25 bp, Homo sapien
cgagttcttccacgcgactcgtagg

SEQ ID NO: 4409491 - DNA, 25 bp, Homo sapien
ttagcatcatccgaggctctccgct

SEQ ID NO: 4409492 - DNA, 25 bp, Homo sapien
cgggtgcgtccttgctgagttttgc

SEQ ID NO: 4409493 - DNA, 25 bp, Homo sapien
caggttccgttgatgtcacacccaa

SEQ ID NO: 4409494 - DNA, 25 bp, Homo sapien
ttttgcttccctcaggttccgttga

SEQ ID NO: 4409495 - DNA, 25 bp, Homo sapien
cagtccagcagaccgggtgcgtcct

SEQ ID NO: 4409496 - DNA, 25 bp, Homo sapien
gcgcggatgccccaaaattagactc

SEQ ID NO: 4409497 - DNA, 25 bp, Homo sapien
aattagactcatcgtccacgtcacc

SEQ ID NO: 4409498 - DNA, 25 bp, Homo sapien
tgaccgctgcacaactgcgcggatg

SEQ ID NO: 4409499 - DNA, 25 bp, Homo sapien
aaaggaggttgtcagggccccacag

SEQ ID NO: 4409500 - DNA, 25 bp, Homo sapien
tgtgctatcctgataccacttttct

SEQ ID NO: 4409501 - DNA, 25 bp, Homo sapien
tctgtgctatcctgataccactttt

SEQ ID NO: 4409502 - DNA, 25 bp, Homo sapien
tctttgctctgtgctatcctgatac

SEQ ID NO: 4409503 - DNA, 25 bp, Homo sapien
tgctctgtgctatcctgataccact

SEQ ID NO: 4409504 - DNA, 25 bp, Homo sapien
tgtgtgggtttttggggcccaggca

SEQ ID NO: 4409505 - DNA, 25 bp, Homo sapien
gctgcgatgggacgcgtacttccca

SEQ ID NO: 4409506 - DNA, 25 bp, Homo sapien
gagccattcaggtacccgtctttct

SEQ ID NO: 4409507 - DNA, 25 bp, Homo sapien
tcttgaccgacttccaggagaactg

SEQ ID NO: 4409508 - DNA, 25 bp, Homo sapien
gggacgcgtacttcccagtgatgtg

SEQ ID NO: 4409509 - DNA, 25 bp, Homo sapien
gctgacgtggcctgagccgtcgcat

SEQ ID NO: 4409510 - DNA, 25 bp, Homo sapien
gtggcctgagccgtcgcatcctggc

SEQ ID NO: 4409511 - DNA, 25 bp, Homo sapien
cctgagccgtcgcatcctggcgtgg

SEQ ID NO: 4409512 - DNA, 25 bp, Homo sapien
agctgccgctgacgtggcctgagcc

SEQ ID NO: 4409513 - DNA, 25 bp, Homo sapien
aggctccgcagaggcagctctgaac

SEQ ID NO: 4409514 - DNA, 25 bp, Homo sapien
cagaggcagctctgaaccagtgccg

SEQ ID NO: 4409515 - DNA, 25 bp, Homo sapien
caggctccgcagaggcagctctgaa

SEQ ID NO: 4409516 - DNA, 25 bp, Homo sapien
aggcagctctgaaccagtgccgtcc

SEQ ID NO: 4409517 - DNA, 25 bp, Homo sapien
accacggggatggatacaggtgctc

SEQ ID NO: 4409518 - DNA, 25 bp, Homo sapien
taccacggggatggatacaggtgct

SEQ ID NO: 4409519 - DNA, 25 bp, Homo sapien
ataccacggggatggatacaggtgc

SEQ ID NO: 4409520 - DNA, 25 bp, Homo sapien
atggatacaggtactcctccacata

SEQ ID NO: 4409521 - DNA, 25 bp, Homo sapien
ggatacaggtactcctccacatacc

SEQ ID NO: 4409522 - DNA, 25 bp, Homo sapien
tggatacaggtactcctccacatac

SEQ ID NO: 4409523 - DNA, 25 bp, Homo sapien
ccacggggatggatacaggtactcc

SEQ ID NO: 4409524 - DNA, 25 bp, Homo sapien
gggcgggcgaatgtgggagtgcttc

SEQ ID NO: 4409525 - DNA, 25 bp, Homo sapien
tggggggcgggcgaatgtgggagtg

SEQ ID NO: 4409526 - DNA, 25 bp, Homo sapien
gcgggcgaatgtgggagtgcttcag

SEQ ID NO: 4409527 - DNA, 25 bp, Homo sapien
gggcgaatgtgggagtgcttcagga

SEQ ID NO: 4409528 - DNA, 25 bp, Homo sapien
ctgcgctggcgcagagggccctgct

SEQ ID NO: 4409529 - DNA, 25 bp, Homo sapien
cagcatctgctgaatgcttgccagg

SEQ ID NO: 4409530 - DNA, 25 bp, Homo sapien
ctcgggcatgggacacagttcggct

SEQ ID NO: 4409531 - DNA, 25 bp, Homo sapien
ctagaagaccggcacggtgctcggg

SEQ ID NO: 4409532 - DNA, 25 bp, Homo sapien
taattcacatatgggaacccgcttt

SEQ ID NO: 4409533 - DNA, 25 bp, Homo sapien
gtttgtttaattgagattaattcac

SEQ ID NO: 4409534 - DNA, 25 bp, Homo sapien
tgtttgtttaattgagattaattca

SEQ ID NO: 4409535 - DNA, 25 bp, Homo sapien
ttcacatatgggaacccgcttttaa

SEQ ID NO: 4409536 - DNA, 25 bp, Homo sapien
actccgcagtatcccggctgatgca

SEQ ID NO: 4409537 - DNA, 25 bp, Homo sapien
ggaggactccgcagtatcccggctg

SEQ ID NO: 4409538 - DNA, 25 bp, Homo sapien
aggactccgcagtatcccggctgat

SEQ ID NO: 4409539 - DNA, 25 bp, Homo sapien
ggactccgcagtatcccggctgatg

SEQ ID NO: 4409540 - DNA, 25 bp, Homo sapien
cgagttgtcgagaggagagagtgga

SEQ ID NO: 4409541 - DNA, 25 bp, Homo sapien
actcagggatggatccgtgcagcga

SEQ ID NO: 4409542 - DNA, 25 bp, Homo sapien
atggatccgtgcagcgagttgtcga

SEQ ID NO: 4409543 - DNA, 25 bp, Homo sapien
agcactcagggatggatccgtgcag

SEQ ID NO: 4409544 - DNA, 25 bp, Homo sapien
tctgccatctttgtgtgggttgggt

SEQ ID NO: 4409545 - DNA, 25 bp, Homo sapien
ggagagcgcagggtgtgtccactgt

SEQ ID NO: 4409546 - DNA, 25 bp, Homo sapien
ggtctgtttcctggagagcgcaggg

SEQ ID NO: 4409547 - DNA, 25 bp, Homo sapien
ttccccagggatgctcctgcgtgct

SEQ ID NO: 4409548 - DNA, 25 bp, Homo sapien
cagcagcctggaggatgcttgcaga

SEQ ID NO: 4409549 - DNA, 25 bp, Homo sapien
gggggggccagcgaggaagctggca

SEQ ID NO: 4409550 - DNA, 25 bp, Homo sapien
gcctggaggatgcttgcagagggca

SEQ ID NO: 4409551 - DNA, 25 bp, Homo sapien
gggccagcgaggaagctggcagagg

SEQ ID NO: 4409552 - DNA, 25 bp, Homo sapien
ggaacagaactaagttatgtgcggt

SEQ ID NO: 4409553 - DNA, 25 bp, Homo sapien
cccatcctggcttctcctaccttga

SEQ ID NO: 4409554 - DNA, 25 bp, Homo sapien
atatctattagggatctccccatcc

SEQ ID NO: 4409555 - DNA, 25 bp, Homo sapien
gtgtatttagtcatatctattaggg

SEQ ID NO: 4409556 - DNA, 25 bp, Homo sapien
tagcgaatgaagcagaagcacttgg

SEQ ID NO: 4409557 - DNA, 25 bp, Homo sapien
caggccccgcggatagcagttgtgt

SEQ ID NO: 4409558 - DNA, 25 bp, Homo sapien
tctgagctacgctgtatggattagc

SEQ ID NO: 4409559 - DNA, 25 bp, Homo sapien
ctccgccgggttcccagaagctttg

SEQ ID NO: 4409560 - DNA, 25 bp, Homo sapien
cttcctcgaatcccctgcgccctgg

SEQ ID NO: 4409561 - DNA, 25 bp, Homo sapien
ttttgtccacaaagcagggcccggc

SEQ ID NO: 4409562 - DNA, 25 bp, Homo sapien
tgtccacaaagcagggcccggcctg

SEQ ID NO: 4409563 - DNA, 25 bp, Homo sapien
tcccaactctttactgttttgtcca

SEQ ID NO: 4409564 - DNA, 25 bp, Homo sapien
gcccggcctgcaccaggaggccctc

SEQ ID NO: 4409565 - DNA, 25 bp, Homo sapien
ccctgtgtttgcgaatggcattgag

SEQ ID NO: 4409566 - DNA, 25 bp, Homo sapien
tatgatcctcacaaatgcagggagc

SEQ ID NO: 4409567 - DNA, 25 bp, Homo sapien
gcagccctttcgactttccctgtgt

SEQ ID NO: 4409568 - DNA, 25 bp, Homo sapien
caagggtgacgcctggtcggtccac

SEQ ID NO: 4409569 - DNA, 25 bp, Homo sapien
ctatcccatcccagggcaagccgca

SEQ ID NO: 4409570 - DNA, 25 bp, Homo sapien
tatcccatcccagggcaagccgcac

SEQ ID NO: 4409571 - DNA, 25 bp, Homo sapien
cccatcccagggcaagccgcacggg

SEQ ID NO: 4409572 - DNA, 25 bp, Homo sapien
atcccagggcaagccgcacgggaag

SEQ ID NO: 4409573 - DNA, 25 bp, Homo sapien
gtgtttgctgatgatgttcctaggt

SEQ ID NO: 4409574 - DNA, 25 bp, Homo sapien
gagcagcggggactttaaccccagc

SEQ ID NO: 4409575 - DNA, 25 bp, Homo sapien
tttaaccccagcgtcatcagctcca

SEQ ID NO: 4409576 - DNA, 25 bp, Homo sapien
gatgttcctaggttcagtgggagaa

SEQ ID NO: 4409577 - DNA, 25 bp, Homo sapien
cgattacagaattatagcctctggg

SEQ ID NO: 4409578 - DNA, 25 bp, Homo sapien
tagaaacactctttactagtgcagg

SEQ ID NO: 4409579 - DNA, 25 bp, Homo sapien
tgaagtgttagatggaccgtgtccg

SEQ ID NO: 4409580 - DNA, 25 bp, Homo sapien
accgtgtccgtaagtggtgtgatga

SEQ ID NO: 4409581 - DNA, 25 bp, Homo sapien
tgtggacaagacacaggacggccat

SEQ ID NO: 4409582 - DNA, 25 bp, Homo sapien
caggacggccattagtcaactgtct

SEQ ID NO: 4409583 - DNA, 25 bp, Homo sapien
caagacacaggacggccattagtca

SEQ ID NO: 4409584 - DNA, 25 bp, Homo sapien
tagtcaactgtctaatgtcccagcc

SEQ ID NO: 4409585 - DNA, 25 bp, Homo sapien
gttgctggcccgctgtttgatggtc

SEQ ID NO: 4409586 - DNA, 25 bp, Homo sapien
ttcatcgctgacgtggctctcgggc

SEQ ID NO: 4409587 - DNA, 25 bp, Homo sapien
tcttcatcgctgacgtggctctcgg

SEQ ID NO: 4409588 - DNA, 25 bp, Homo sapien
catcgctgacgtggctctcgggcat

SEQ ID NO: 4409589 - DNA, 25 bp, Homo sapien
tgaggaatagtttgtactggctgct

SEQ ID NO: 4409590 - DNA, 25 bp, Homo sapien
tttctggtgaacaatgggccacatg

SEQ ID NO: 4409591 - DNA, 25 bp, Homo sapien
aggaatagtttgtactggctgctgg

SEQ ID NO: 4409592 - DNA, 25 bp, Homo sapien
caatgtcaagaagctgatgaccttt

SEQ ID NO: 4409593 - DNA, 25 bp, Homo sapien
gggcacctggatcagtcctggcata

SEQ ID NO: 4409594 - DNA, 25 bp, Homo sapien
gtcctggcatagctgggcacagggc

SEQ ID NO: 4409595 - DNA, 25 bp, Homo sapien
ctggggcacctggatcagtcctggc

SEQ ID NO: 4409596 - DNA, 25 bp, Homo sapien
cagtcctggcatagctgggcacagg

SEQ ID NO: 4409597 - DNA, 25 bp, Homo sapien
tctgagtttaatcatatcggcttcc

SEQ ID NO: 4409598 - DNA, 25 bp, Homo sapien
gaattggattcatttagctccttga

SEQ ID NO: 4409599 - DNA, 25 bp, Homo sapien
tcttcatctaactgtttgatttctt

SEQ ID NO: 4409600 - DNA, 25 bp, Homo sapien
catatcggcttccatctgggaattg

SEQ ID NO: 4409601 - DNA, 25 bp, Homo sapien
catttttgacatcaggtccaaatag

SEQ ID NO: 4409602 - DNA, 25 bp, Homo sapien
tcatttttgacatcaggtccaaata

SEQ ID NO: 4409603 - DNA, 25 bp, Homo sapien
tctctcatcagccgagtcagtgaga

SEQ ID NO: 4409604 - DNA, 25 bp, Homo sapien
ctcatcagccgagtcagtgagaata

SEQ ID NO: 4409605 - DNA, 25 bp, Homo sapien
ggcttgagaggtaacaagcaacccc

SEQ ID NO: 4409606 - DNA, 25 bp, Homo sapien
accccttccgcagagagtggcagga

SEQ ID NO: 4409607 - DNA, 25 bp, Homo sapien
aggcgtggcggtcttccccatccgg

SEQ ID NO: 4409608 - DNA, 25 bp, Homo sapien
catccggcacaggtgtgaaatttaa

SEQ ID NO: 4409609 - DNA, 25 bp, Homo sapien
gcgctggcggacctgagtctgcatt

SEQ ID NO: 4409610 - DNA, 25 bp, Homo sapien
gccacctcggccgtcatcaatgatg

SEQ ID NO: 4409611 - DNA, 25 bp, Homo sapien
ggcctgtgtcgcgagtgggtgtggg

SEQ ID NO: 4409612 - DNA, 25 bp, Homo sapien
tcatcaatgatgtgcgctggcggac

SEQ ID NO: 4409613 - DNA, 25 bp, Homo sapien
cagacgtaggttttctatgacggaa

SEQ ID NO: 4409614 - DNA, 25 bp, Homo sapien
gatgatgtcagtgtaagcagacgta

SEQ ID NO: 4409615 - DNA, 25 bp, Homo sapien
ttttctatgacggaatctaatctag

SEQ ID NO: 4409616 - DNA, 25 bp, Homo sapien
aatctaatctagaatgaggcgtcat

SEQ ID NO: 4409617 - DNA, 25 bp, Homo sapien
caggatgaagtggggagggccggcc

SEQ ID NO: 4409618 - DNA, 25 bp, Homo sapien
tctccttggaaggaatcgcagcccc

SEQ ID NO: 4409619 - DNA, 25 bp, Homo sapien
ccttctccttggaaggaatcgcagc

SEQ ID NO: 4409620 - DNA, 25 bp, Homo sapien
gatgaagtggggagggccggccttc

SEQ ID NO: 4409621 - DNA, 25 bp, Homo sapien
catgtgcggcagctggatgttagcc

SEQ ID NO: 4409622 - DNA, 25 bp, Homo sapien
ggaggagagactcgttctgctgctc

SEQ ID NO: 4409623 - DNA, 25 bp, Homo sapien
gagactggctcaggttcgccagctc

SEQ ID NO: 4409624 - DNA, 25 bp, Homo sapien
tctgctgctcaatcactttgttctc

SEQ ID NO: 4409625 - DNA, 25 bp, Homo sapien
ctctgataacgatcttgatttgtat

SEQ ID NO: 4409626 - DNA, 25 bp, Homo sapien
gataacgatcttgatttgtatacat

SEQ ID NO: 4409627 - DNA, 25 bp, Homo sapien
tgtatacatttccgtcaaagtagtc

SEQ ID NO: 4409628 - DNA, 25 bp, Homo sapien
gactctgataacgatcttgatttgt

SEQ ID NO: 4409629 - DNA, 25 bp, Homo sapien
catggaaacgtacaaaatgtgggtg

SEQ ID NO: 4409630 - DNA, 25 bp, Homo sapien
tgataacgtctaaaaagcggctgct

SEQ ID NO: 4409631 - DNA, 25 bp, Homo sapien
tacatggcagaacactatgtcagct

SEQ ID NO: 4409632 - DNA, 25 bp, Homo sapien
agagtttcatcactacagcagctgt

SEQ ID NO: 4409633 - DNA, 25 bp, Homo sapien
gaaacgtcgtggtaagagtcctctg

SEQ ID NO: 4409634 - DNA, 25 bp, Homo sapien
aaagtgtcaacaaacccatgccgtg

SEQ ID NO: 4409635 - DNA, 25 bp, Homo sapien
tatgtaccaacgttagatgagcagc

SEQ ID NO: 4409636 - DNA, 25 bp, Homo sapien
aacattattgatcagccgtgagggc

SEQ ID NO: 4409637 - DNA, 25 bp, Homo sapien
cttgctcaacgaagattcgaagaaa

SEQ ID NO: 4409638 - DNA, 25 bp, Homo sapien
ccagaaagatggactcacactcacc

SEQ ID NO: 4409639 - DNA, 25 bp, Homo sapien
gatggactcacactcaccagaagtg

SEQ ID NO: 4409640 - DNA, 25 bp, Homo sapien
gaaagatggactcacactcaccaga

SEQ ID NO: 4409641 - DNA, 25 bp, Homo sapien
agtgaacgtgtcctgaaaaacgact

SEQ ID NO: 4409642 - DNA, 25 bp, Homo sapien
gccaacccatcagcttcttcgttgt

SEQ ID NO: 4409643 - DNA, 25 bp, Homo sapien
ctgatgctctagatccttctgaggc

SEQ ID NO: 4409644 - DNA, 25 bp, Homo sapien
gctctagatccttctgaggccaacc

SEQ ID NO: 4409645 - DNA, 25 bp, Homo sapien
tgctgctaggaccaggaacatactt

SEQ ID NO: 4409646 - DNA, 25 bp, Homo sapien
aaagagatcagggtgcgaaggcatt

SEQ ID NO: 4409647 - DNA, 25 bp, Homo sapien
ggcaacacctgcaaagattcgtcac

SEQ ID NO: 4409648 - DNA, 25 bp, Homo sapien
aaggcattgcatagagacgcccagg

SEQ ID NO: 4409649 - DNA, 25 bp, Homo sapien
tcataacaacgctggaaacatgtgg

SEQ ID NO: 4409650 - DNA, 25 bp, Homo sapien
ctgaaccctgtagttgaaggctgta

SEQ ID NO: 4409651 - DNA, 25 bp, Homo sapien
gactgcaggcttctgaaccctgtag

SEQ ID NO: 4409652 - DNA, 25 bp, Homo sapien
cctgtagttgaaggctgtagtttgc

SEQ ID NO: 4409653 - DNA, 25 bp, Homo sapien
agttgaaggctgtagtttgcagctc

SEQ ID NO: 4409654 - DNA, 25 bp, Homo sapien
taccctgggcacctaaagctcttgt

SEQ ID NO: 4409655 - DNA, 25 bp, Homo sapien
gccggcctcctgtgcatagatgata

SEQ ID NO: 4409656 - DNA, 25 bp, Homo sapien
tcaaaacaatagagctcagtgctgg

SEQ ID NO: 4409657 - DNA, 25 bp, Homo sapien
tattcagaactggtgctcccaaggc

SEQ ID NO: 4409658 - DNA, 25 bp, Homo sapien
tatgtaaattaagccgcacacttag

SEQ ID NO: 4409659 - DNA, 25 bp, Homo sapien
tttttctcagataggcgccaacagg

SEQ ID NO: 4409660 - DNA, 25 bp, Homo sapien
taggcgccaacaggggctttctgca

SEQ ID NO: 4409661 - DNA, 25 bp, Homo sapien
tcccccatgggatctttatgtaaat

SEQ ID NO: 4409662 - DNA, 25 bp, Homo sapien
gatcctgcgcacacattcgagtggg

SEQ ID NO: 4409663 - DNA, 25 bp, Homo sapien
tcagattagactccgggtgccatcg

SEQ ID NO: 4409664 - DNA, 25 bp, Homo sapien
cacactcgagtaggtccagctgaaa

SEQ ID NO: 4409665 - DNA, 25 bp, Homo sapien
agctgaaactccatatgccatcgcc

SEQ ID NO: 4409666 - DNA, 25 bp, Homo sapien
tgatccgggcacgattccaggcgcg

SEQ ID NO: 4409667 - DNA, 25 bp, Homo sapien
acgattccaggcgcgcaggcgcgct

SEQ ID NO: 4409668 - DNA, 25 bp, Homo sapien
agagcgcttgctctgatccgggcac

SEQ ID NO: 4409669 - DNA, 25 bp, Homo sapien
gcttgctctgatccgggcacgattc

SEQ ID NO: 4409670 - DNA, 25 bp, Homo sapien
cgcggacggacgctcggacgcacgg

SEQ ID NO: 4409671 - DNA, 25 bp, Homo sapien
accacggccggctcccgactgcgcc

SEQ ID NO: 4409672 - DNA, 25 bp, Homo sapien
acggacgctcggacgcacggagcca

SEQ ID NO: 4409673 - DNA, 25 bp, Homo sapien
gccgacggcgcggacggacgctcgg

SEQ ID NO: 4409674 - DNA, 25 bp, Homo sapien
cagcgcacggtggtgcggaagcaca

SEQ ID NO: 4409675 - DNA, 25 bp, Homo sapien
agaacagcacgagcgccaacaggca

SEQ ID NO: 4409676 - DNA, 25 bp, Homo sapien
tccagcagcagatgcatgcagcgca

SEQ ID NO: 4409677 - DNA, 25 bp, Homo sapien
gaagcacaggcagcggctcggacac

SEQ ID NO: 4409678 - DNA, 25 bp, Homo sapien
ccactgctgttgagtgagatgcccc

SEQ ID NO: 4409679 - DNA, 25 bp, Homo sapien
gctgttgagtgagatgcccccgagt

SEQ ID NO: 4409680 - DNA, 25 bp, Homo sapien
atgcccccgagtcgtccggcctggg

SEQ ID NO: 4409681 - DNA, 25 bp, Homo sapien
gttgagtgagatgcccccgagtcgt

SEQ ID NO: 4409682 - DNA, 25 bp, Homo sapien
tgccctgcagactggaattctgtct

SEQ ID NO: 4409683 - DNA, 25 bp, Homo sapien
ccagctttgagattcatgacgtctg

SEQ ID NO: 4409684 - DNA, 25 bp, Homo sapien
agctttgagattcatgacgtctgcc

SEQ ID NO: 4409685 - DNA, 25 bp, Homo sapien
gctttgagattcatgacgtctgccc

SEQ ID NO: 4409686 - DNA, 25 bp, Homo sapien
cgcagcctgctttcccgtaaacacc

SEQ ID NO: 4409687 - DNA, 25 bp, Homo sapien
tgaaccctgctttccacgggcagat

SEQ ID NO: 4409688 - DNA, 25 bp, Homo sapien
gcagatgacgcaggaggcagtcaga

SEQ ID NO: 4409689 - DNA, 25 bp, Homo sapien
cgtaaacaccctgccctggtgctcc

SEQ ID NO: 4409690 - DNA, 25 bp, Homo sapien
ggtagagaaccttgcttttatgttg

SEQ ID NO: 4409691 - DNA, 25 bp, Homo sapien
ctggtagagaaccttgcttttatgt

SEQ ID NO: 4409692 - DNA, 25 bp, Homo sapien
ggctggtagagaaccttgcttttat

SEQ ID NO: 4409693 - DNA, 25 bp, Homo sapien
gctggtagagaaccttgcttttatg

SEQ ID NO: 4409694 - DNA, 25 bp, Homo sapien
ctcaggttattccggtcagcagcca

SEQ ID NO: 4409695 - DNA, 25 bp, Homo sapien
tcaggttattccggtcagcagccag

SEQ ID NO: 4409696 - DNA, 25 bp, Homo sapien
tcccggaccgcagctggttggacct

SEQ ID NO: 4409697 - DNA, 25 bp, Homo sapien
ctcccggaccgcagctggttggacc

SEQ ID NO: 4409698 - DNA, 25 bp, Homo sapien
gggcgcctgacccaggacagcagtc

SEQ ID NO: 4409699 - DNA, 25 bp, Homo sapien
ggtgggcgcctgacccaggacagca

SEQ ID NO: 4409700 - DNA, 25 bp, Homo sapien
catacctcgcagatggcatgtgagg

SEQ ID NO: 4409701 - DNA, 25 bp, Homo sapien
cccgaagaccatacctcgcagatgg

SEQ ID NO: 4409702 - DNA, 25 bp, Homo sapien
tccagcccaaagaggggttcttatg

SEQ ID NO: 4409703 - DNA, 25 bp, Homo sapien
agcaacttgccacaactccagccca

SEQ ID NO: 4409704 - DNA, 25 bp, Homo sapien
agtgcctccggagcatgggggcaca

SEQ ID NO: 4409705 - DNA, 25 bp, Homo sapien
ctcggtccccccgaatgctcgtgtg

SEQ ID NO: 4409706 - DNA, 25 bp, Homo sapien
cccgaatgctcgtgtgctcctggtc

SEQ ID NO: 4409707 - DNA, 25 bp, Homo sapien
cactgcagtgcctccggagcatggg

SEQ ID NO: 4409708 - DNA, 25 bp, Homo sapien
ggaacttgctcaagtctgaccgtag

SEQ ID NO: 4409709 - DNA, 25 bp, Homo sapien
tgtgggccacgtctataaatacagg

SEQ ID NO: 4409710 - DNA, 25 bp, Homo sapien
agcacatggatctacaaacacccag

SEQ ID NO: 4409711 - DNA, 25 bp, Homo sapien
gtaggtgtgggccacgtctataaat

SEQ ID NO: 4409712 - DNA, 25 bp, Homo sapien
gccatggtgtgacggaacctcctct

SEQ ID NO: 4409713 - DNA, 25 bp, Homo sapien
tgggcacgcccagttcatagaaacg

SEQ ID NO: 4409714 - DNA, 25 bp, Homo sapien
ggtatcgatttggatcacctcactt

SEQ ID NO: 4409715 - DNA, 25 bp, Homo sapien
ggcatctgagttgcacgggcactgg

SEQ ID NO: 4409716 - DNA, 25 bp, Homo sapien
gccgaaagcgacgatctgcagatat

SEQ ID NO: 4409717 - DNA, 25 bp, Homo sapien
caaggtgccgaaagcgacgatctgc

SEQ ID NO: 4409718 - DNA, 25 bp, Homo sapien
gacgatctgcagatatccttcccct

SEQ ID NO: 4409719 - DNA, 25 bp, Homo sapien
gaaagcgacgatctgcagatatcct

SEQ ID NO: 4409720 - DNA, 25 bp, Homo sapien
ggtgcagggtgcagctccctgtgac

SEQ ID NO: 4409721 - DNA, 25 bp, Homo sapien
gcagggtgcagggtgcagctccctg

SEQ ID NO: 4409722 - DNA, 25 bp, Homo sapien
cagggtgcagggtgcagctccctgt

SEQ ID NO: 4409723 - DNA, 25 bp, Homo sapien
ctgggacgcagggtgcagggtgcag

SEQ ID NO: 4409724 - DNA, 25 bp, Homo sapien
gggatgcagggtacagagtgcagct

SEQ ID NO: 4409725 - DNA, 25 bp, Homo sapien
tgggatcctggagtatcgcaaatac

SEQ ID NO: 4409726 - DNA, 25 bp, Homo sapien
catttcttgtgggatcctggagtat

SEQ ID NO: 4409727 - DNA, 25 bp, Homo sapien
cttgtgggatcctggagtatcgcaa

SEQ ID NO: 4409728 - DNA, 25 bp, Homo sapien
ttcttgtgggatcctggagtatcgc

SEQ ID NO: 4409729 - DNA, 25 bp, Homo sapien
gcggcaacagcgtggaagctggaaa

SEQ ID NO: 4409730 - DNA, 25 bp, Homo sapien
gtgggaacccacacgcaagccacag

SEQ ID NO: 4409731 - DNA, 25 bp, Homo sapien
aagatgtggacttggctcctggagc

SEQ ID NO: 4409732 - DNA, 25 bp, Homo sapien
cagatctgaagtcggtgccaccaaa

SEQ ID NO: 4409733 - DNA, 25 bp, Homo sapien
aacagtctcctcacacgcaccctcc

SEQ ID NO: 4409734 - DNA, 25 bp, Homo sapien
ccgggttcgctttcctcagtgatac

SEQ ID NO: 4409735 - DNA, 25 bp, Homo sapien
caacagtctcctcacacgcaccctc

SEQ ID NO: 4409736 - DNA, 25 bp, Homo sapien
ccccaggttggatctctctgattct

SEQ ID NO: 4409737 - DNA, 25 bp, Homo sapien
gaatgccccaggttggatctctctg

SEQ ID NO: 4409738 - DNA, 25 bp, Homo sapien
atgccccaggttggatctctctgat

SEQ ID NO: 4409739 - DNA, 25 bp, Homo sapien
ctgaatgccccaggttggatctctc

SEQ ID NO: 4409740 - DNA, 25 bp, Homo sapien
tatcctcttgatctgattattattg

SEQ ID NO: 4409741 - DNA, 25 bp, Homo sapien
gctccactaggtatcctcttgatct

SEQ ID NO: 4409742 - DNA, 25 bp, Homo sapien
cctcttgatctgattattattgaga

SEQ ID NO: 4409743 - DNA, 25 bp, Homo sapien
aaatgctccactaggtatcctcttg

SEQ ID NO: 4409744 - DNA, 25 bp, Homo sapien
agtcccttaaatgcttgcctgtcaa

SEQ ID NO: 4409745 - DNA, 25 bp, Homo sapien
ttgcctgtcaattgactggatctca

SEQ ID NO: 4409746 - DNA, 25 bp, Homo sapien
agaggcaagtcccttaaatgcttgc

SEQ ID NO: 4409747 - DNA, 25 bp, Homo sapien
taaatgcttgcctgtcaattgactg

SEQ ID NO: 4409748 - DNA, 25 bp, Homo sapien
tccttgacaccgcgtgagaagggca

SEQ ID NO: 4409749 - DNA, 25 bp, Homo sapien
tgaggtccttgacaccgcgtgagaa

SEQ ID NO: 4409750 - DNA, 25 bp, Homo sapien
aggtccttgacaccgcgtgagaagg

SEQ ID NO: 4409751 - DNA, 25 bp, Homo sapien
cttgacaccgcgtgagaagggcagt

SEQ ID NO: 4409752 - DNA, 25 bp, Homo sapien
ctcgagcttcgggagatgctggaac

SEQ ID NO: 4409753 - DNA, 25 bp, Homo sapien
cgaatctgggtccaaagtttctatc

SEQ ID NO: 4409754 - DNA, 25 bp, Homo sapien
gtttctatctgattaaagtgcaggt

SEQ ID NO: 4409755 - DNA, 25 bp, Homo sapien
gagatgctggaacgaatctgggtcc

SEQ ID NO: 4409756 - DNA, 25 bp, Homo sapien
tggaactaaatgtgtaatccggttg

SEQ ID NO: 4409757 - DNA, 25 bp, Homo sapien
aatgtccctggaactaaatgtgtaa

SEQ ID NO: 4409758 - DNA, 25 bp, Homo sapien
tgtaatccggttgttatgcaaaaat

SEQ ID NO: 4409759 - DNA, 25 bp, Homo sapien
tctcttcatagattccaagtgatta

SEQ ID NO: 4409760 - DNA, 25 bp, Homo sapien
ctgacctggaaagtttctagtgagt

SEQ ID NO: 4409761 - DNA, 25 bp, Homo sapien
aaggaagatgcagccggtgagacat

SEQ ID NO: 4409762 - DNA, 25 bp, Homo sapien
tgggaaggaagatgcagccggtgag

SEQ ID NO: 4409763 - DNA, 25 bp, Homo sapien
ctgtgggaaggaagatgcagccggt

SEQ ID NO: 4409764 - DNA, 25 bp, Homo sapien
ggaaggaagatgcagccggtgagac

SEQ ID NO: 4409765 - DNA, 25 bp, Homo sapien
cagtcgcagtgaagtgtgtttgagt

SEQ ID NO: 4409766 - DNA, 25 bp, Homo sapien
cgactccgcgtaggttttcagcaaa

SEQ ID NO: 4409767 - DNA, 25 bp, Homo sapien
cactgagcgtccctggatgcgtctg

SEQ ID NO: 4409768 - DNA, 25 bp, Homo sapien
tgggatattcacagatggccgctgc

SEQ ID NO: 4409769 - DNA, 25 bp, Homo sapien
cccgaggtcacatctgcgtcctggg

SEQ ID NO: 4409770 - DNA, 25 bp, Homo sapien
tgcaggtgaagtacacggtgttccc

SEQ ID NO: 4409771 - DNA, 25 bp, Homo sapien
tgtttcgcagccagatgatctcagg

SEQ ID NO: 4409772 - DNA, 25 bp, Homo sapien
ggttgccttcggctctgcaggtgaa

SEQ ID NO: 4409773 - DNA, 25 bp, Homo sapien
tgtcagcagctgcatggcgctccag

SEQ ID NO: 4409774 - DNA, 25 bp, Homo sapien
agcagctgcatggcgctccaggctc

SEQ ID NO: 4409775 - DNA, 25 bp, Homo sapien
ctgtgtcagcagctgcatggcgctc

SEQ ID NO: 4409776 - DNA, 25 bp, Homo sapien
cagcagctgcatggcgctccaggct

SEQ ID NO: 4409777 - DNA, 25 bp, Homo sapien
ggctcgctgccaggacgcatgtaat

SEQ ID NO: 4409778 - DNA, 25 bp, Homo sapien
gagacaagttagatccacacgggag

SEQ ID NO: 4409779 - DNA, 25 bp, Homo sapien
taatggtcagcggtaggacttccct

SEQ ID NO: 4409780 - DNA, 25 bp, Homo sapien
tttgtggacacaagagaagacttcc

SEQ ID NO: 4409781 - DNA, 25 bp, Homo sapien
cagaaacacggcgagccagcaggtg

SEQ ID NO: 4409782 - DNA, 25 bp, Homo sapien
ctctggatgttaggtaaggccagcc

SEQ ID NO: 4409783 - DNA, 25 bp, Homo sapien
agaaacacggcgagccagcaggtga

SEQ ID NO: 4409784 - DNA, 25 bp, Homo sapien
gtgactctggatgttaggtaaggcc

SEQ ID NO: 4409785 - DNA, 25 bp, Homo sapien
tgagggtcacctcttgcgtcttcac

SEQ ID NO: 4409786 - DNA, 25 bp, Homo sapien
tagataccctggtctgtctcctgtg

SEQ ID NO: 4409787 - DNA, 25 bp, Homo sapien
ctggagacccgaagtacctgagggt

SEQ ID NO: 4409788 - DNA, 25 bp, Homo sapien
cagggtcccatcgtccagcaagttt

SEQ ID NO: 4409789 - DNA, 25 bp, Homo sapien
actgccccggctgtgtggactatga

SEQ ID NO: 4409790 - DNA, 25 bp, Homo sapien
tagagacctcgttaccacatggcaa

SEQ ID NO: 4409791 - DNA, 25 bp, Homo sapien
ggatcatctacgaccctgcgcttag

SEQ ID NO: 4409792 - DNA, 25 bp, Homo sapien
gaaagctttctgagccaaccctggt

SEQ ID NO: 4409793 - DNA, 25 bp, Homo sapien
tgagcaatggccatggataacacag

SEQ ID NO: 4409794 - DNA, 25 bp, Homo sapien
catggtgggtacacccaatgcctca

SEQ ID NO: 4409795 - DNA, 25 bp, Homo sapien
aggcagacccgtccagaggcatgaa

SEQ ID NO: 4409796 - DNA, 25 bp, Homo sapien
tcaatccgctgttcttcaagggccc

SEQ ID NO: 4409797 - DNA, 25 bp, Homo sapien
aaccctggcatgatttgtggctgaa

SEQ ID NO: 4409798 - DNA, 25 bp, Homo sapien
tatgctgggatgtactaggtgctgc

SEQ ID NO: 4409799 - DNA, 25 bp, Homo sapien
tccttctatgagcagcggctgtgtc

SEQ ID NO: 4409800 - DNA, 25 bp, Homo sapien
gatagccaggaattctcagtcactg

SEQ ID NO: 4409801 - DNA, 25 bp, Homo sapien
actccctgtgcaccggatggcggga

SEQ ID NO: 4409802 - DNA, 25 bp, Homo sapien
ggcgggagactcttcatgtgtatct

SEQ ID NO: 4409803 - DNA, 25 bp, Homo sapien
tgtatctgagggagctacacccaca

SEQ ID NO: 4409804 - DNA, 25 bp, Homo sapien
cagtgtgtcagcctaggcttctggg

SEQ ID NO: 4409805 - DNA, 25 bp, Homo sapien
gctccaagaaaacttaatcatagac

SEQ ID NO: 4409806 - DNA, 25 bp, Homo sapien
catagacaatgacgcctgaatttcc

SEQ ID NO: 4409807 - DNA, 25 bp, Homo sapien
tagaaaagtattctcagttcataga

SEQ ID NO: 4409808 - DNA, 25 bp, Homo sapien
tcctctagctgtcatgtggtcataa

SEQ ID NO: 4409809 - DNA, 25 bp, Homo sapien
tcacagagacctacacgtcactcta

SEQ ID NO: 4409810 - DNA, 25 bp, Homo sapien
tcacagagcttcaggatactgggtg

SEQ ID NO: 4409811 - DNA, 25 bp, Homo sapien
taccatagtccgtgacagcagttgg

SEQ ID NO: 4409812 - DNA, 25 bp, Homo sapien
gcgatatgcccctttgtgtctcaca

SEQ ID NO: 4409813 - DNA, 25 bp, Homo sapien
cagaagtacgaacaccaaagtcaaa

SEQ ID NO: 4409814 - DNA, 25 bp, Homo sapien
caaagtcaaagtcggccttgagggc

SEQ ID NO: 4409815 - DNA, 25 bp, Homo sapien
caaactggaaaccatgaagctactc

SEQ ID NO: 4409816 - DNA, 25 bp, Homo sapien
tcaaagtcggccttgagggcatctg

SEQ ID NO: 4409817 - DNA, 25 bp, Homo sapien
caattaatttctcccggtttgacat

SEQ ID NO: 4409818 - DNA, 25 bp, Homo sapien
caactggcaagggtgtgcggtcacc

SEQ ID NO: 4409819 - DNA, 25 bp, Homo sapien
aaggcgtgatgttcacccgcgggtc

SEQ ID NO: 4409820 - DNA, 25 bp, Homo sapien
caatgttgttggtcgcagagcacgc

SEQ ID NO: 4409821 - DNA, 25 bp, Homo sapien
gacgttctgtatgtaaagcccgcca

SEQ ID NO: 4409822 - DNA, 25 bp, Homo sapien
tgtcctgaggcgtcacagtgaactg

SEQ ID NO: 4409823 - DNA, 25 bp, Homo sapien
ctcaataacgactctgtcctgaggc

SEQ ID NO: 4409824 - DNA, 25 bp, Homo sapien
aataacgactctgtcctgaggcgtc

SEQ ID NO: 4409825 - DNA, 25 bp, Homo sapien
gtcctgaggcgtcacagtgaactga

SEQ ID NO: 4409826 - DNA, 25 bp, Homo sapien
ggtccaggcgatgacgggcggcggg

SEQ ID NO: 4409827 - DNA, 25 bp, Homo sapien
tccaggcgatgacgggcggcgggtt

SEQ ID NO: 4409828 - DNA, 25 bp, Homo sapien
ctcccttggtccaggcgatgacggg

SEQ ID NO: 4409829 - DNA, 25 bp, Homo sapien
tgacgggcggcgggttgcccttggc

SEQ ID NO: 4409830 - DNA, 25 bp, Homo sapien
gctgcacagtcaggtgggccacgac

SEQ ID NO: 4409831 - DNA, 25 bp, Homo sapien
tgggagccgatgatgttgacagcct

SEQ ID NO: 4409832 - DNA, 25 bp, Homo sapien
gagattctaagtgttcccgatgaca

SEQ ID NO: 4409833 - DNA, 25 bp, Homo sapien
tgacagcctggcattcgtactggcc

SEQ ID NO: 4409834 - DNA, 25 bp, Homo sapien
aggcatatgctgtgccgcagggccc

SEQ ID NO: 4409835 - DNA, 25 bp, Homo sapien
gggcccacagaggataacaagctct

SEQ ID NO: 4409836 - DNA, 25 bp, Homo sapien
ggcagtctcaggcatatgctgtgcc

SEQ ID NO: 4409837 - DNA, 25 bp, Homo sapien
gagagcccgactctcggagaaggaa

SEQ ID NO: 4409838 - DNA, 25 bp, Homo sapien
caggagaacgagtcaattacatcaa

SEQ ID NO: 4409839 - DNA, 25 bp, Homo sapien
tccaggagaacgagtcaattacatc

SEQ ID NO: 4409840 - DNA, 25 bp, Homo sapien
gaatccaggagaacgagtcaattac

SEQ ID NO: 4409841 - DNA, 25 bp, Homo sapien
gagaatccaggagaacgagtcaatt

SEQ ID NO: 4409842 - DNA, 25 bp, Homo sapien
gcgcccacctccactgttgtgtcgc

SEQ ID NO: 4409843 - DNA, 25 bp, Homo sapien
gggagctgcacattggcgcccacct

SEQ ID NO: 4409844 - DNA, 25 bp, Homo sapien
ggaatgctggcaaacactggggtga

SEQ ID NO: 4409845 - DNA, 25 bp, Homo sapien
ctgcacgggagctgcacattggcgc

SEQ ID NO: 4409846 - DNA, 25 bp, Homo sapien
ctcaaggcttaagatctgaatgttt

SEQ ID NO: 4409847 - DNA, 25 bp, Homo sapien
aatgtttttctttctgctacagaaa

SEQ ID NO: 4409848 - DNA, 25 bp, Homo sapien
ctgaatgtttttctttctgctacag

SEQ ID NO: 4409849 - DNA, 25 bp, Homo sapien
tgtttttctttctgctacagaaagt

SEQ ID NO: 4409850 - DNA, 25 bp, Homo sapien
gccgacccaatggtgttccgggcca

SEQ ID NO: 4409851 - DNA, 25 bp, Homo sapien
cagggccaacgtcattgatggtcaa

SEQ ID NO: 4409852 - DNA, 25 bp, Homo sapien
cactcatagcgacctgcgtctgcag

SEQ ID NO: 4409853 - DNA, 25 bp, Homo sapien
tggtcaagaatccttcagggctgat

SEQ ID NO: 4409854 - DNA, 25 bp, Homo sapien
cattcacactgagcaccatgctcac

SEQ ID NO: 4409855 - DNA, 25 bp, Homo sapien
ggaacttcctcatggcgtcccggta

SEQ ID NO: 4409856 - DNA, 25 bp, Homo sapien
tgctgggaacttcctcatggcgtcc

SEQ ID NO: 4409857 - DNA, 25 bp, Homo sapien
tgggaacttcctcatggcgtcccgg

SEQ ID NO: 4409858 - DNA, 25 bp, Homo sapien
gaacttcctcatggcgtcccggtat

SEQ ID NO: 4409859 - DNA, 25 bp, Homo sapien
ctgagcactccatttcagctgtggg

SEQ ID NO: 4409860 - DNA, 25 bp, Homo sapien
tgactgagacctagtcctttcctga

SEQ ID NO: 4409861 - DNA, 25 bp, Homo sapien
gaacctgccccctgttgtctggaac

SEQ ID NO: 4409862 - DNA, 25 bp, Homo sapien
ttgggacccgccctctcctgacaag

SEQ ID NO: 4409863 - DNA, 25 bp, Homo sapien
cgcaatcgcttccacgatggaggta

SEQ ID NO: 4409864 - DNA, 25 bp, Homo sapien
ggtagctacaaacggatctccattt

SEQ ID NO: 4409865 - DNA, 25 bp, Homo sapien
caaacaaatgtgttcgggttgagtt

SEQ ID NO: 4409866 - DNA, 25 bp, Homo sapien
ggatctccatttcgactgacgtcag

SEQ ID NO: 4409867 - DNA, 25 bp, Homo sapien
aaagctcagtgatttgagggtcagc

SEQ ID NO: 4409868 - DNA, 25 bp, Homo sapien
gagggtcagcgtgtttacagcccca

SEQ ID NO: 4409869 - DNA, 25 bp, Homo sapien
cttcaccctaaagctcagtgatttg

SEQ ID NO: 4409870 - DNA, 25 bp, Homo sapien
tcagtgatttgagggtcagcgtgtt

SEQ ID NO: 4409871 - DNA, 25 bp, Homo sapien
gatccctcggataccggaacaaggc

SEQ ID NO: 4409872 - DNA, 25 bp, Homo sapien
tcctgaatgagctgcaatgtccgtt

SEQ ID NO: 4409873 - DNA, 25 bp, Homo sapien
cgcccgtgcctgttcaactgtgtaa

SEQ ID NO: 4409874 - DNA, 25 bp, Homo sapien
tgttccgttgaggtcgaccatcaag

SEQ ID NO: 4409875 - DNA, 25 bp, Homo sapien
aggaggaagaaaaggctttggcact

SEQ ID NO: 4409876 - DNA, 25 bp, Homo sapien
aggaagaaaaggctttggcactgac

SEQ ID NO: 4409877 - DNA, 25 bp, Homo sapien
actcaggccatggaggaggaagaaa

SEQ ID NO: 4409878 - DNA, 25 bp, Homo sapien
gaggaggaagaaaaggctttggcac

SEQ ID NO: 4409879 - DNA, 25 bp, Homo sapien
agggacttcacgtcccccagagatt

SEQ ID NO: 4409880 - DNA, 25 bp, Homo sapien
gtagcctgatcagcactccaaggga

SEQ ID NO: 4409881 - DNA, 25 bp, Homo sapien
gcaggtggacctgctgtagcctgat

SEQ ID NO: 4409882 - DNA, 25 bp, Homo sapien
gatcagcactccaagggacttcacg

SEQ ID NO: 4409883 - DNA, 25 bp, Homo sapien
caaccagcagctctcctctgggaga

SEQ ID NO: 4409884 - DNA, 25 bp, Homo sapien
aaccagcagctctcctctgggagac

SEQ ID NO: 4409885 - DNA, 25 bp, Homo sapien
ttcaaccagcagctctcctctggga

SEQ ID NO: 4409886 - DNA, 25 bp, Homo sapien
ggtttcaaccagcagctctcctctg

SEQ ID NO: 4409887 - DNA, 25 bp, Homo sapien
caaacacaggtattctctccacagc

SEQ ID NO: 4409888 - DNA, 25 bp, Homo sapien
gccccaaacacaggtattctctcca

SEQ ID NO: 4409889 - DNA, 25 bp, Homo sapien
cccaaacacaggtattctctccaca

SEQ ID NO: 4409890 - DNA, 25 bp, Homo sapien
ccaaacacaggtattctctccacag

SEQ ID NO: 4409891 - DNA, 25 bp, Homo sapien
catgtccgagcagttgttcacgcgc

SEQ ID NO: 4409892 - DNA, 25 bp, Homo sapien
tctcgtacacggatttcagcaggcg

SEQ ID NO: 4409893 - DNA, 25 bp, Homo sapien
tcatagtagatggtgtcgccgtccc

SEQ ID NO: 4409894 - DNA, 25 bp, Homo sapien
gaagttctcgtccagccggtaaagc

SEQ ID NO: 4409895 - DNA, 25 bp, Homo sapien
tgagttaatgagaaccccactgtgg

SEQ ID NO: 4409896 - DNA, 25 bp, Homo sapien
tatggaagatgctacaggccaagcc

SEQ ID NO: 4409897 - DNA, 25 bp, Homo sapien
cagggtccgaggtctcctaatctac

SEQ ID NO: 4409898 - DNA, 25 bp, Homo sapien
gatacaacagcaggaacccgaagct

SEQ ID NO: 4409899 - DNA, 25 bp, Homo sapien
gagtctaaagcctccacctgaatcc

SEQ ID NO: 4409900 - DNA, 25 bp, Homo sapien
gagacctcgcagttccggaatgtcc

SEQ ID NO: 4409901 - DNA, 25 bp, Homo sapien
gggctggaatagtcacattccttag

SEQ ID NO: 4409902 - DNA, 25 bp, Homo sapien
tccttaggctcaccagagtctaaag

SEQ ID NO: 4409903 - DNA, 25 bp, Homo sapien
tgtgctgagaagacacatcagggtg

SEQ ID NO: 4409904 - DNA, 25 bp, Homo sapien
tctcgcaggcgcttgaactgtgtgc

SEQ ID NO: 4409905 - DNA, 25 bp, Homo sapien
agcgccggaaacaggtcgatgttga

SEQ ID NO: 4409906 - DNA, 25 bp, Homo sapien
cgatgttgagtgtcgagccatacaa

SEQ ID NO: 4409907 - DNA, 25 bp, Homo sapien
ctgccgtagccgtgagggaactccg

SEQ ID NO: 4409908 - DNA, 25 bp, Homo sapien
tgcacccgggtgatgttgtccgcgt

SEQ ID NO: 4409909 - DNA, 25 bp, Homo sapien
ggccagcgacgtctgcttgatctga

SEQ ID NO: 4409910 - DNA, 25 bp, Homo sapien
gggatctcgtcacagctgccgtagc

SEQ ID NO: 4409911 - DNA, 25 bp, Homo sapien
gaaaaggcattgaactgccccctgg

SEQ ID NO: 4409912 - DNA, 25 bp, Homo sapien
tcctggtagctgaactcaagagacc

SEQ ID NO: 4409913 - DNA, 25 bp, Homo sapien
ttggtcggcttgtcctcctggtagc

SEQ ID NO: 4409914 - DNA, 25 bp, Homo sapien
gagaccgtctgcctcggaaatgata

SEQ ID NO: 4409915 - DNA, 25 bp, Homo sapien
cagatgcatctgagcgtgtgctgaa

SEQ ID NO: 4409916 - DNA, 25 bp, Homo sapien
ttctgaggtctgtgatggtcttctg

SEQ ID NO: 4409917 - DNA, 25 bp, Homo sapien
tgaggtctgtgatggtcttctgcat

SEQ ID NO: 4409918 - DNA, 25 bp, Homo sapien
ctgtgttctgaggtctgtgatggtc

SEQ ID NO: 4409919 - DNA, 25 bp, Homo sapien
tgtgttctgaggtctgtgatggtct

SEQ ID NO: 4409920 - DNA, 25 bp, Homo sapien
cctgggggatgtacacctggtctct

SEQ ID NO: 4409921 - DNA, 25 bp, Homo sapien
gctgtccactctgacagctgcctgg

SEQ ID NO: 4409922 - DNA, 25 bp, Homo sapien
tgtacacctggtctctaggctgtgg

SEQ ID NO: 4409923 - DNA, 25 bp, Homo sapien
ggaggaggacctgccacacgctgtc

SEQ ID NO: 4409924 - DNA, 25 bp, Homo sapien
ctctaggttgtggaggcaggaggac

SEQ ID NO: 4409925 - DNA, 25 bp, Homo sapien
ctggtctctaggttgtggaggcagg

SEQ ID NO: 4409926 - DNA, 25 bp, Homo sapien
tctctaggttgtggaggcaggagga

SEQ ID NO: 4409927 - DNA, 25 bp, Homo sapien
ggtctctaggttgtggaggcaggag

SEQ ID NO: 4409928 - DNA, 25 bp, Homo sapien
cacatggggtgcagggaaatgacca

SEQ ID NO: 4409929 - DNA, 25 bp, Homo sapien
acatttctcagacccagcgctgcca

SEQ ID NO: 4409930 - DNA, 25 bp, Homo sapien
caagatacacgaacacctctgcaca

SEQ ID NO: 4409931 - DNA, 25 bp, Homo sapien
agagagaagcagtgaccacgccggc

SEQ ID NO: 4409932 - DNA, 25 bp, Homo sapien
taatgacagctggacatctaggacc

SEQ ID NO: 4409933 - DNA, 25 bp, Homo sapien
catgctgaaaaaggtggacgtcccc

SEQ ID NO: 4409934 - DNA, 25 bp, Homo sapien
cgtagtcacaaaggcgacgttctca

SEQ ID NO: 4409935 - DNA, 25 bp, Homo sapien
tccttattagactggcggcagctga

SEQ ID NO: 4409936 - DNA, 25 bp, Homo sapien
cattcacaaatggtgcatgcatctt

SEQ ID NO: 4409937 - DNA, 25 bp, Homo sapien
ggtactgagccgtgattcaagtttc

SEQ ID NO: 4409938 - DNA, 25 bp, Homo sapien
cacgcactctgtggtactgagccgt

SEQ ID NO: 4409939 - DNA, 25 bp, Homo sapien
gtgttgttggcgtgagattcgcccc

SEQ ID NO: 4409940 - DNA, 25 bp, Homo sapien
ctcttctgtaagcagactggacagc

SEQ ID NO: 4409941 - DNA, 25 bp, Homo sapien
ttccacgaagcaggtgacctgcccg

SEQ ID NO: 4409942 - DNA, 25 bp, Homo sapien
acagcaggcccctgggatgttcacg

SEQ ID NO: 4409943 - DNA, 25 bp, Homo sapien
caggggggcaagcttccacgaagca

SEQ ID NO: 4409944 - DNA, 25 bp, Homo sapien
taacgtgaagctaggactcctgcct

SEQ ID NO: 4409945 - DNA, 25 bp, Homo sapien
catgaaatgtcacgagttctgggtg

SEQ ID NO: 4409946 - DNA, 25 bp, Homo sapien
cagcaccagctggacgttgtcatga

SEQ ID NO: 4409947 - DNA, 25 bp, Homo sapien
cgatctcacgatggcacagcagaca

SEQ ID NO: 4409948 - DNA, 25 bp, Homo sapien
gattcaactgtgcaatttaatagta

SEQ ID NO: 4409949 - DNA, 25 bp, Homo sapien
ggcaaaatcaatttaggcgcctaaa

SEQ ID NO: 4409950 - DNA, 25 bp, Homo sapien
ggaggcaaaatcaatttaggcgcct

SEQ ID NO: 4409951 - DNA, 25 bp, Homo sapien
aaatgattcaactgtgcaatttaat

SEQ ID NO: 4409952 - DNA, 25 bp, Homo sapien
cgctctcatcaaaggttctgttccg

SEQ ID NO: 4409953 - DNA, 25 bp, Homo sapien
ctgacgtgtggtgaaatgttacaga

SEQ ID NO: 4409954 - DNA, 25 bp, Homo sapien
cagtgtccctgtgaacgctctcatc

SEQ ID NO: 4409955 - DNA, 25 bp, Homo sapien
taaacatagcttgtgatggaacccc

SEQ ID NO: 4409956 - DNA, 25 bp, Homo sapien
tgggagcggcgttgtcaacacacac

SEQ ID NO: 4409957 - DNA, 25 bp, Homo sapien
ggatactcaggtcagcgtgctgcac

SEQ ID NO: 4409958 - DNA, 25 bp, Homo sapien
gacacacggagagtcacaggctata

SEQ ID NO: 4409959 - DNA, 25 bp, Homo sapien
tggccctcggcaggtatcagataca

SEQ ID NO: 4409960 - DNA, 25 bp, Homo sapien
ctggaacacgggttgtgcacaaatc

SEQ ID NO: 4409961 - DNA, 25 bp, Homo sapien
cgcccatcctgtcagaaggaagctg

SEQ ID NO: 4409962 - DNA, 25 bp, Homo sapien
tgtgcacaaatcacaccaggcactg

SEQ ID NO: 4409963 - DNA, 25 bp, Homo sapien
caggcactgtatgcgcccatcctgt

SEQ ID NO: 4409964 - DNA, 25 bp, Homo sapien
tatcaatcacttaccaatatgaggt

SEQ ID NO: 4409965 - DNA, 25 bp, Homo sapien
cctccagggcatgtaagaggcacag

SEQ ID NO: 4409966 - DNA, 25 bp, Homo sapien
ccatcagcttttagacgaacttaca

SEQ ID NO: 4409967 - DNA, 25 bp, Homo sapien
gagtgcctgagcaacttacataacc

SEQ ID NO: 4409968 - DNA, 25 bp, Homo sapien
tgttacagcgatcccgcacagtggc

SEQ ID NO: 4409969 - DNA, 25 bp, Homo sapien
gagtatcaaactggtgattccgcag

SEQ ID NO: 4409970 - DNA, 25 bp, Homo sapien
ttacgcaggtgtgctacaggtgtgc

SEQ ID NO: 4409971 - DNA, 25 bp, Homo sapien
tggctgctagacacgttcacccagg

SEQ ID NO: 4409972 - DNA, 25 bp, Homo sapien
ggagattagtcaccgtggatccggc

SEQ ID NO: 4409973 - DNA, 25 bp, Homo sapien
gctggacgccttcccggagattagt

SEQ ID NO: 4409974 - DNA, 25 bp, Homo sapien
caggactttacgtctagcagggaag

SEQ ID NO: 4409975 - DNA, 25 bp, Homo sapien
gtgcaggcctcacggctcacgctgg

SEQ ID NO: 4409976 - DNA, 25 bp, Homo sapien
aaagatcagtgctgtgagccagtcc

SEQ ID NO: 4409977 - DNA, 25 bp, Homo sapien
tctgttgacagtgcgtagatatcca

SEQ ID NO: 4409978 - DNA, 25 bp, Homo sapien
cagtcccaggcgtgatgatcttctc

SEQ ID NO: 4409979 - DNA, 25 bp, Homo sapien
gagggacccgtcttatgtgactgcc

SEQ ID NO: 4409980 - DNA, 25 bp, Homo sapien
gacatgtcacttggtcaaaggtccg

SEQ ID NO: 4409981 - DNA, 25 bp, Homo sapien
caaaaggtagctctgcggtcaatca

SEQ ID NO: 4409982 - DNA, 25 bp, Homo sapien
taaagaggtgaacgagacgctgacc

SEQ ID NO: 4409983 - DNA, 25 bp, Homo sapien
taaggcccagcagtcagacaggatg

SEQ ID NO: 4409984 - DNA, 25 bp, Homo sapien
aatggtaaggaacactctcggcaca

SEQ ID NO: 4409985 - DNA, 25 bp, Homo sapien
acagcagcgggtgacattctcgaca

SEQ ID NO: 4409986 - DNA, 25 bp, Homo sapien
tacacgagagttgctcacgacgtgc

SEQ ID NO: 4409987 - DNA, 25 bp, Homo sapien
ccagaatgtccaagtccagcctgat

SEQ ID NO: 4409988 - DNA, 25 bp, Homo sapien
gaaccactcgctttgtacccattat

SEQ ID NO: 4409989 - DNA, 25 bp, Homo sapien
tggctggcacctgtgaaccactcgc

SEQ ID NO: 4409990 - DNA, 25 bp, Homo sapien
taatgaacgttctgatcgggccctc

SEQ ID NO: 4409991 - DNA, 25 bp, Homo sapien
tgactgaaataatgaacgttctgat

SEQ ID NO: 4409992 - DNA, 25 bp, Homo sapien
gaagctgtcgccagaacatgtccat

SEQ ID NO: 4409993 - DNA, 25 bp, Homo sapien
tggaatcgcagagcaagtactgtgg

SEQ ID NO: 4409994 - DNA, 25 bp, Homo sapien
catgttcaggcaaccactggtctgc

SEQ ID NO: 4409995 - DNA, 25 bp, Homo sapien
tgaagtgaccgatgcatttgcctgt

SEQ ID NO: 4409996 - DNA, 25 bp, Homo sapien
tgcattagttgtctgtcaaggaagg

SEQ ID NO: 4409997 - DNA, 25 bp, Homo sapien
tacccagtggtacagttcatatagg

SEQ ID NO: 4409998 - DNA, 25 bp, Homo sapien
cagtgccaagatccattaattattt

SEQ ID NO: 4409999 - DNA, 25 bp, Homo sapien
gaaagtaccatgttgacggcagctg

SEQ ID NO: 4410000 - DNA, 25 bp, Homo sapien
gctgcaaccacaagtaatacaattc

SEQ ID NO: 4410001 - DNA, 25 bp, Homo sapien
gagagtgtcactaggcatagaatac

SEQ ID NO: 4410002 - DNA, 25 bp, Homo sapien
aatacaattctagtgagagtgtcac

SEQ ID NO: 4410003 - DNA, 25 bp, Homo sapien
cggctcgctgcaaccacaagtaata

SEQ ID NO: 4410004 - DNA, 25 bp, Homo sapien
gattattttccttatcatacaagta

SEQ ID NO: 4410005 - DNA, 25 bp, Homo sapien
tgattattttccttatcatacaagt

SEQ ID NO: 4410006 - DNA, 25 bp, Homo sapien
attattttccttatcatacaagtaa

SEQ ID NO: 4410007 - DNA, 25 bp, Homo sapien
ctgagatgcttgaacctgaacaact

SEQ ID NO: 4410008 - DNA, 25 bp, Homo sapien
ctctctagaggccactgagatgctt

SEQ ID NO: 4410009 - DNA, 25 bp, Homo sapien
gaacctgaacaactgctccttcgaa

SEQ ID NO: 4410010 - DNA, 25 bp, Homo sapien
ctgaacaactgctccttcgaatcat

SEQ ID NO: 4410011 - DNA, 25 bp, Homo sapien
cacaggtgtagagtctgacgtgcag

SEQ ID NO: 4410012 - DNA, 25 bp, Homo sapien
tgacgaaagccttatggtgctggtg

SEQ ID NO: 4410013 - DNA, 25 bp, Homo sapien
gcaaaaattggtcctctatatccag

SEQ ID NO: 4410014 - DNA, 25 bp, Homo sapien
taaaactataaggtgcgactctgcc

SEQ ID NO: 4410015 - DNA, 25 bp, Homo sapien
cgggagcctggcggtccgagtctgt

SEQ ID NO: 4410016 - DNA, 25 bp, Homo sapien
ggtccgagtctgtgccgcgcgctgt

SEQ ID NO: 4410017 - DNA, 25 bp, Homo sapien
ccgagtctgtgccgcgcgctgtggc

SEQ ID NO: 4410018 - DNA, 25 bp, Homo sapien
gcgggagcctggcggtccgagtctg

SEQ ID NO: 4410019 - DNA, 25 bp, Homo sapien
cccagacctcgcccgccttcgggat

SEQ ID NO: 4410020 - DNA, 25 bp, Homo sapien
tcagccccgctcccataggccccgc

SEQ ID NO: 4410021 - DNA, 25 bp, Homo sapien
cagccccgctcccataggccccgcc

SEQ ID NO: 4410022 - DNA, 25 bp, Homo sapien
ccgcacgtgggtgccgggcgccagg

SEQ ID NO: 4410023 - DNA, 25 bp, Homo sapien
ccgcggttaccgcacgtgggtgccg

SEQ ID NO: 4410024 - DNA, 25 bp, Homo sapien
ggtgacccgagcacgccggggcgtg

SEQ ID NO: 4410025 - DNA, 25 bp, Homo sapien
agctctcgaggagccgcggttaccg

SEQ ID NO: 4410026 - DNA, 25 bp, Homo sapien
ccctggttaaacacccacgtgcagt

SEQ ID NO: 4410027 - DNA, 25 bp, Homo sapien
tggtgcttgaggcactggatatccc

SEQ ID NO: 4410028 - DNA, 25 bp, Homo sapien
tggatatcccctggttaaacaccca

SEQ ID NO: 4410029 - DNA, 25 bp, Homo sapien
caactcagttttctcccgggtcgtg

SEQ ID NO: 4410030 - DNA, 25 bp, Homo sapien
ttacttgatttgcttacagagcaaa

SEQ ID NO: 4410031 - DNA, 25 bp, Homo sapien
aaaattacttgatttgcttacagag

SEQ ID NO: 4410032 - DNA, 25 bp, Homo sapien
aattacttgatttgcttacagagca

SEQ ID NO: 4410033 - DNA, 25 bp, Homo sapien
acgcccctccaacccatgaacactt

SEQ ID NO: 4410034 - DNA, 25 bp, Homo sapien
gtgtgcaaaaggcttgttagaagac

SEQ ID NO: 4410035 - DNA, 25 bp, Homo sapien
catggcaggtgtgcaaaaggcttgt

SEQ ID NO: 4410036 - DNA, 25 bp, Homo sapien
aatacatggcaggtgtgcaaaaggc

SEQ ID NO: 4410037 - DNA, 25 bp, Homo sapien
tgacaaaatacatggcaggtgtgca

SEQ ID NO: 4410038 - DNA, 25 bp, Homo sapien
tgcctgcgcactatttgctgatgtg

SEQ ID NO: 4410039 - DNA, 25 bp, Homo sapien
acagcttgttctgcctgcgcactat

SEQ ID NO: 4410040 - DNA, 25 bp, Homo sapien
tatttgctgatgtgttatctccggg

SEQ ID NO: 4410041 - DNA, 25 bp, Homo sapien
tctccggggattctcgaatttctca

SEQ ID NO: 4410042 - DNA, 25 bp, Homo sapien
tcctgactctccaggtgcgggtgct

SEQ ID NO: 4410043 - DNA, 25 bp, Homo sapien
ggcgttctgatgtgaggccctcctg

SEQ ID NO: 4410044 - DNA, 25 bp, Homo sapien
tccaggtgcgggtgcttctctgctc

SEQ ID NO: 4410045 - DNA, 25 bp, Homo sapien
tttgctcaggcgttctgatgtgagg

SEQ ID NO: 4410046 - DNA, 25 bp, Homo sapien
tacgcgtcgcttttgcctgggccgt

SEQ ID NO: 4410047 - DNA, 25 bp, Homo sapien
ttgcctgggccgttccttcttccta

SEQ ID NO: 4410048 - DNA, 25 bp, Homo sapien
gcctgggccgttccttcttcctaga

SEQ ID NO: 4410049 - DNA, 25 bp, Homo sapien
cacgccaatgtacgcgtcgcttttg

SEQ ID NO: 4410050 - DNA, 25 bp, Homo sapien
gtatattgtgggcacaattcttgaa

SEQ ID NO: 4410051 - DNA, 25 bp, Homo sapien
gcagaacatgtaggtgctatataga

SEQ ID NO: 4410052 - DNA, 25 bp, Homo sapien
gcattggacgatgcaggtctggaca

SEQ ID NO: 4410053 - DNA, 25 bp, Homo sapien
ggtctggacaagtgcctggtatatt

SEQ ID NO: 4410054 - DNA, 25 bp, Homo sapien
cctgtcaccggcctatgctgtaaac

SEQ ID NO: 4410055 - DNA, 25 bp, Homo sapien
tcgttcctgtcaccggcctatgctg

SEQ ID NO: 4410056 - DNA, 25 bp, Homo sapien
gtcaccggcctatgctgtaaacacc

SEQ ID NO: 4410057 - DNA, 25 bp, Homo sapien
ctcgttcctgtcaccggcctatgct

SEQ ID NO: 4410058 - DNA, 25 bp, Homo sapien
caataaagaacaggaacgccacctt

SEQ ID NO: 4410059 - DNA, 25 bp, Homo sapien
gggcaatcctcgtgtcacaagcaat

SEQ ID NO: 4410060 - DNA, 25 bp, Homo sapien
aacgtctgaccctgcattgcatgca

SEQ ID NO: 4410061 - DNA, 25 bp, Homo sapien
tgagagatgaatccaacgtctgacc

SEQ ID NO: 4410062 - DNA, 25 bp, Homo sapien
gctgaggtccgggttgaggcccaga

SEQ ID NO: 4410063 - DNA, 25 bp, Homo sapien
gccggctgctaccacagggcaggga

SEQ ID NO: 4410064 - DNA, 25 bp, Homo sapien
tttaagaaggagatggaataacaga

SEQ ID NO: 4410065 - DNA, 25 bp, Homo sapien
cccagggattcccatgctgaggtcc

SEQ ID NO: 4410066 - DNA, 25 bp, Homo sapien
caagcatccatttgatacccagaat

SEQ ID NO: 4410067 - DNA, 25 bp, Homo sapien
gaatgcattatttcagcacccgtat

SEQ ID NO: 4410068 - DNA, 25 bp, Homo sapien
gagggaccaggtatccaatctatcc

SEQ ID NO: 4410069 - DNA, 25 bp, Homo sapien
tcagctctggcaaaaactaacagag

SEQ ID NO: 4410070 - DNA, 25 bp, Homo sapien
tccgtggaccagtgcaagtgagatg

SEQ ID NO: 4410071 - DNA, 25 bp, Homo sapien
ccagtgcaagtgagatgaatatgcc

SEQ ID NO: 4410072 - DNA, 25 bp, Homo sapien
cgtggaccagtgcaagtgagatgaa

SEQ ID NO: 4410073 - DNA, 25 bp, Homo sapien
gaccagtgcaagtgagatgaatatg

SEQ ID NO: 4410074 - DNA, 25 bp, Homo sapien
tggagccgaaaggtcgaggctgccg

SEQ ID NO: 4410075 - DNA, 25 bp, Homo sapien
ccagctaccccggaggccgacgcgg

SEQ ID NO: 4410076 - DNA, 25 bp, Homo sapien
aggatcgctggagccgaaaggtcga

SEQ ID NO: 4410077 - DNA, 25 bp, Homo sapien
tcgctggagccgaaaggtcgaggct

SEQ ID NO: 4410078 - DNA, 25 bp, Homo sapien
gcggaaaagcgttaccaagacactc

SEQ ID NO: 4410079 - DNA, 25 bp, Homo sapien
gaaaagcgttaccaagacactcgtc

SEQ ID NO: 4410080 - DNA, 25 bp, Homo sapien
cactgaagacgggaaccttgggagc

SEQ ID NO: 4410081 - DNA, 25 bp, Homo sapien
ctgcaacctgcactgaagacgggaa

SEQ ID NO: 4410082 - DNA, 25 bp, Homo sapien
caccaaagtacgaatcctagggcgg

SEQ ID NO: 4410083 - DNA, 25 bp, Homo sapien
gctcggaaacggcaccaaagtacga

SEQ ID NO: 4410084 - DNA, 25 bp, Homo sapien
ccgccctaggattcgtactttggtg

SEQ ID NO: 4410085 - DNA, 25 bp, Homo sapien
gctcccaaggttcccgtcttcagtg

SEQ ID NO: 4410086 - DNA, 25 bp, Homo sapien
agcggtaggaggctagagagtccca

SEQ ID NO: 4410087 - DNA, 25 bp, Homo sapien
ttcccgtcttcagtgcaggttgcag

SEQ ID NO: 4410088 - DNA, 25 bp, Homo sapien
tcgtactttggtgccgtttccgagc

SEQ ID NO: 4410089 - DNA, 25 bp, Homo sapien
gagtgtcttggtaacgcttttccgc

SEQ ID NO: 4410090 - DNA, 25 bp, Homo sapien
tcttgccttcggacgccggattttg

SEQ ID NO: 4410091 - DNA, 25 bp, Homo sapien
gacgccggattttgacgtgctctcg

SEQ ID NO: 4410092 - DNA, 25 bp, Homo sapien
cgtgctctcgcgagatttgggtctc

SEQ ID NO: 4410093 - DNA, 25 bp, Homo sapien
cggattttgacgtgctctcgcgaga

SEQ ID NO: 4410094 - DNA, 25 bp, Homo sapien
cttcggacgccggattttgacgtgc

SEQ ID NO: 4410095 - DNA, 25 bp, Homo sapien
gctgtttccgcctcttgccttcgga

SEQ ID NO: 4410096 - DNA, 25 bp, Homo sapien
tctcgcgagagcacgtcaaaatccg

SEQ ID NO: 4410097 - DNA, 25 bp, Homo sapien
gagacccaaatctcgcgagagcacg

SEQ ID NO: 4410098 - DNA, 25 bp, Homo sapien
agcacgtcaaaatccggcgtccgaa

SEQ ID NO: 4410099 - DNA, 25 bp, Homo sapien
tccgaaggcaagaggcggaaacagc

SEQ ID NO: 4410100 - DNA, 25 bp, Homo sapien
aaaatccggcgtccgaaggcaagag

SEQ ID NO: 4410101 - DNA, 25 bp, Homo sapien
gcgagagcacgtcaaaatccggcgt

SEQ ID NO: 4410102 - DNA, 25 bp, Homo sapien
gcctgctctccgacagaacttttct

SEQ ID NO: 4410103 - DNA, 25 bp, Homo sapien
ctggaggggcgagccttgctcacag

SEQ ID NO: 4410104 - DNA, 25 bp, Homo sapien
gcggcctgctctccgacagaacttt

SEQ ID NO: 4410105 - DNA, 25 bp, Homo sapien
gttggcggcctgctctccgacagaa

SEQ ID NO: 4410106 - DNA, 25 bp, Homo sapien
taggttggcggcctgctctccgaca

SEQ ID NO: 4410107 - DNA, 25 bp, Homo sapien
tgctctccgacagaacttttcttct

SEQ ID NO: 4410108 - DNA, 25 bp, Homo sapien
agaagaaaagttctgtcggagagca

SEQ ID NO: 4410109 - DNA, 25 bp, Homo sapien
ctgtgagcaaggctcgcccctccag

SEQ ID NO: 4410110 - DNA, 25 bp, Homo sapien
gaagaaaagttctgtcggagagcag

SEQ ID NO: 4410111 - DNA, 25 bp, Homo sapien
tgtcggagagcaggccgccaaccta

SEQ ID NO: 4410112 - DNA, 25 bp, Homo sapien
aaagttctgtcggagagcaggccgc

SEQ ID NO: 4410113 - DNA, 25 bp, Homo sapien
gaaaagttctgtcggagagcaggcc

SEQ ID NO: 4410114 - DNA, 25 bp, Homo sapien
gatacagccgattacccgccctgtg

SEQ ID NO: 4410115 - DNA, 25 bp, Homo sapien
ttacccgccctgtgctttccgatgg

SEQ ID NO: 4410116 - DNA, 25 bp, Homo sapien
cgccctgtgctttccgatggcttct

SEQ ID NO: 4410117 - DNA, 25 bp, Homo sapien
gccctgtgctttccgatggcttctg

SEQ ID NO: 4410118 - DNA, 25 bp, Homo sapien
gattacccgccctgtgctttccgat

SEQ ID NO: 4410119 - DNA, 25 bp, Homo sapien
gggatacagccgattacccgccctg

SEQ ID NO: 4410120 - DNA, 25 bp, Homo sapien
catcggaaagcacagggcgggtaat

SEQ ID NO: 4410121 - DNA, 25 bp, Homo sapien
cagaagccatcggaaagcacagggc

SEQ ID NO: 4410122 - DNA, 25 bp, Homo sapien
cacagggcgggtaatcggctgtatc

SEQ ID NO: 4410123 - DNA, 25 bp, Homo sapien
cagggcgggtaatcggctgtatccc

SEQ ID NO: 4410124 - DNA, 25 bp, Homo sapien
agaagccatcggaaagcacagggcg

SEQ ID NO: 4410125 - DNA, 25 bp, Homo sapien
ccatcggaaagcacagggcgggtaa

SEQ ID NO: 4410126 - DNA, 25 bp, Homo sapien
gccgcgtaacgctgaccgctgtgcc

SEQ ID NO: 4410127 - DNA, 25 bp, Homo sapien
cgggccgcgtaacgctgaccgctgt

SEQ ID NO: 4410128 - DNA, 25 bp, Homo sapien
ggccgcgtaacgctgaccgctgtgc

SEQ ID NO: 4410129 - DNA, 25 bp, Homo sapien
gcgtaacgctgaccgctgtgccttc

SEQ ID NO: 4410130 - DNA, 25 bp, Homo sapien
ccgcgtaacgctgaccgctgtgcct

SEQ ID NO: 4410131 - DNA, 25 bp, Homo sapien
cgcgtaacgctgaccgctgtgcctt

SEQ ID NO: 4410132 - DNA, 25 bp, Homo sapien
aggcacagcggtcagcgttacgcgg

SEQ ID NO: 4410133 - DNA, 25 bp, Homo sapien
aaggcacagcggtcagcgttacgcg

SEQ ID NO: 4410134 - DNA, 25 bp, Homo sapien
gcacagcggtcagcgttacgcggcc

SEQ ID NO: 4410135 - DNA, 25 bp, Homo sapien
acagcggtcagcgttacgcggcccg

SEQ ID NO: 4410136 - DNA, 25 bp, Homo sapien
ggcacagcggtcagcgttacgcggc

SEQ ID NO: 4410137 - DNA, 25 bp, Homo sapien
gaaggcacagcggtcagcgttacgc

SEQ ID NO: 4410138 - DNA, 25 bp, Homo sapien
cgggccgcgtaacgctgaccgctgt

SEQ ID NO: 4410139 - DNA, 25 bp, Homo sapien
ggccgcgtaacgctgaccgctgtgc

SEQ ID NO: 4410140 - DNA, 25 bp, Homo sapien
gcgtaacgctgaccgctgtgccttc

SEQ ID NO: 4410141 - DNA, 25 bp, Homo sapien
cgtaacgctgaccgctgtgccttca

SEQ ID NO: 4410142 - DNA, 25 bp, Homo sapien
cgcgtaacgctgaccgctgtgcctt

SEQ ID NO: 4410143 - DNA, 25 bp, Homo sapien
gtaacgctgaccgctgtgccttcag

SEQ ID NO: 4410144 - DNA, 25 bp, Homo sapien
aaggcacagcggtcagcgttacgcg

SEQ ID NO: 4410145 - DNA, 25 bp, Homo sapien
gcacagcggtcagcgttacgcggcc

SEQ ID NO: 4410146 - DNA, 25 bp, Homo sapien
acagcggtcagcgttacgcggcccg

SEQ ID NO: 4410147 - DNA, 25 bp, Homo sapien
gaaggcacagcggtcagcgttacgc

SEQ ID NO: 4410148 - DNA, 25 bp, Homo sapien
tgaaggcacagcggtcagcgttacg

SEQ ID NO: 4410149 - DNA, 25 bp, Homo sapien
ctgaaggcacagcggtcagcgttac

SEQ ID NO: 4410150 - DNA, 25 bp, Homo sapien
tgttcagttcgagcgccaagatcgt

SEQ ID NO: 4410151 - DNA, 25 bp, Homo sapien
ggacgagttcgagtccggcatctcc

SEQ ID NO: 4410152 - DNA, 25 bp, Homo sapien
aagccggacgagttcgagtccggca

SEQ ID NO: 4410153 - DNA, 25 bp, Homo sapien
acgagttcgagtccggcatctccca

SEQ ID NO: 4410154 - DNA, 25 bp, Homo sapien
aagcccaatggcgagaagccggacg

SEQ ID NO: 4410155 - DNA, 25 bp, Homo sapien
tcgagcgccaagatcgtgaagccca

SEQ ID NO: 4410156 - DNA, 25 bp, Homo sapien
ccattgggcttcacgatcttggcgc

SEQ ID NO: 4410157 - DNA, 25 bp, Homo sapien
tgggagatgccggactcgaactcgt

SEQ ID NO: 4410158 - DNA, 25 bp, Homo sapien
gagatgccggactcgaactcgtccg

SEQ ID NO: 4410159 - DNA, 25 bp, Homo sapien
cgatcttggcgctcgaactgaacat

SEQ ID NO: 4410160 - DNA, 25 bp, Homo sapien
tcgtccggcttctcgccattgggct

SEQ ID NO: 4410161 - DNA, 25 bp, Homo sapien
ggagatgccggactcgaactcgtcc

SEQ ID NO: 4410162 - DNA, 25 bp, Homo sapien
cggggtgctcggacgcgcgctcagg

SEQ ID NO: 4410163 - DNA, 25 bp, Homo sapien
tcagggtcggtcctgctgttcgttg

SEQ ID NO: 4410164 - DNA, 25 bp, Homo sapien
cgcgctcagggtcggtcctgctgtt

SEQ ID NO: 4410165 - DNA, 25 bp, Homo sapien
cgctcagggtcggtcctgctgttcg

SEQ ID NO: 4410166 - DNA, 25 bp, Homo sapien
gctcagggtcggtcctgctgttcgt

SEQ ID NO: 4410167 - DNA, 25 bp, Homo sapien
cagggtcggtcctgctgttcgttgc

SEQ ID NO: 4410168 - DNA, 25 bp, Homo sapien
cgaacagcaggaccgaccctgagcg

SEQ ID NO: 4410169 - DNA, 25 bp, Homo sapien
gcaacgaacagcaggaccgaccctg

SEQ ID NO: 4410170 - DNA, 25 bp, Homo sapien
caacgaacagcaggaccgaccctga

SEQ ID NO: 4410171 - DNA, 25 bp, Homo sapien
aacagcaggaccgaccctgagcgcg

SEQ ID NO: 4410172 - DNA, 25 bp, Homo sapien
aacgaacagcaggaccgaccctgag

SEQ ID NO: 4410173 - DNA, 25 bp, Homo sapien
ctgagcgcgcgtccgagcaccccgg

SEQ ID NO: 4410174 - DNA, 25 bp, Homo sapien
agggagctgaatattacggcagcta

SEQ ID NO: 4410175 - DNA, 25 bp, Homo sapien
gggagctgaatattacggcagctaa

SEQ ID NO: 4410176 - DNA, 25 bp, Homo sapien
cagggagctgaatattacggcagct

SEQ ID NO: 4410177 - DNA, 25 bp, Homo sapien
tgaactcggacctcaaggctcagct

SEQ ID NO: 4410178 - DNA, 25 bp, Homo sapien
ggagctgaatattacggcagctaag

SEQ ID NO: 4410179 - DNA, 25 bp, Homo sapien
gagatgaactcggacctcaaggctc

SEQ ID NO: 4410180 - DNA, 25 bp, Homo sapien
agctgccgtaatattcagctccctg

SEQ ID NO: 4410181 - DNA, 25 bp, Homo sapien
tagctgccgtaatattcagctccct

SEQ ID NO: 4410182 - DNA, 25 bp, Homo sapien
cttagctgccgtaatattcagctcc

SEQ ID NO: 4410183 - DNA, 25 bp, Homo sapien
agctgagccttgaggtccgagttca

SEQ ID NO: 4410184 - DNA, 25 bp, Homo sapien
gagccttgaggtccgagttcatctc

SEQ ID NO: 4410185 - DNA, 25 bp, Homo sapien
ttagctgccgtaatattcagctccc

SEQ ID NO: 4410186 - DNA, 25 bp, Homo sapien
tccaagtccggctagtacgcgaatt

SEQ ID NO: 4410187 - DNA, 25 bp, Homo sapien
ccaagtccggctagtacgcgaattg

SEQ ID NO: 4410188 - DNA, 25 bp, Homo sapien
tctttgttcccgttcctcaactgaa

SEQ ID NO: 4410189 - DNA, 25 bp, Homo sapien
aagtccggctagtacgcgaattgga

SEQ ID NO: 4410190 - DNA, 25 bp, Homo sapien
atccaagtccggctagtacgcgaat

SEQ ID NO: 4410191 - DNA, 25 bp, Homo sapien
gtccggctagtacgcgaattggaga

SEQ ID NO: 4410192 - DNA, 25 bp, Homo sapien
aattcgcgtactagccggacttgga

SEQ ID NO: 4410193 - DNA, 25 bp, Homo sapien
tccaattcgcgtactagccggactt

SEQ ID NO: 4410194 - DNA, 25 bp, Homo sapien
caattcgcgtactagccggacttgg

SEQ ID NO: 4410195 - DNA, 25 bp, Homo sapien
tctccaattcgcgtactagccggac

SEQ ID NO: 4410196 - DNA, 25 bp, Homo sapien
gattatgatagctttccgaccacca

SEQ ID NO: 4410197 - DNA, 25 bp, Homo sapien
ttcagttgaggaacgggaacaaaga

SEQ ID NO: 4410198 - DNA, 25 bp, Homo sapien
gcagcacgtttctgtttgtgaattt

SEQ ID NO: 4410199 - DNA, 25 bp, Homo sapien
gcttgtatttagactgcattggtag

SEQ ID NO: 4410200 - DNA, 25 bp, Homo sapien
gaaagataaagtacaggcagagcgc

SEQ ID NO: 4410201 - DNA, 25 bp, Homo sapien
tctgttctactgttgcagcacgttt

SEQ ID NO: 4410202 - DNA, 25 bp, Homo sapien
tggagtcatgaaaacaatcctttta

SEQ ID NO: 4410203 - DNA, 25 bp, Homo sapien
actgcattggtagttggagtcatga

SEQ ID NO: 4410204 - DNA, 25 bp, Homo sapien
gcgctctgcctgtactttatctttc

SEQ ID NO: 4410205 - DNA, 25 bp, Homo sapien
caaaattcacaaacagaaacgtgct

SEQ ID NO: 4410206 - DNA, 25 bp, Homo sapien
gaaacgtgctgcaacagtagaacag

SEQ ID NO: 4410207 - DNA, 25 bp, Homo sapien
taaaaggattgttttcatgactcca

SEQ ID NO: 4410208 - DNA, 25 bp, Homo sapien
ctaccaatgcagtctaaatacaagc

SEQ ID NO: 4410209 - DNA, 25 bp, Homo sapien
tcatgactccaactaccaatgcagt

SEQ ID NO: 4410210 - DNA, 25 bp, Homo sapien
gcagtatggcagttacagctttttg

SEQ ID NO: 4410211 - DNA, 25 bp, Homo sapien
tccatagaagggtttgctcagtcaa

SEQ ID NO: 4410212 - DNA, 25 bp, Homo sapien
gttgtttagccttctcgaactttga

SEQ ID NO: 4410213 - DNA, 25 bp, Homo sapien
tgctcagtcaattgttcgtctaagt

SEQ ID NO: 4410214 - DNA, 25 bp, Homo sapien
caggaagtaactccatagaagggtt

SEQ ID NO: 4410215 - DNA, 25 bp, Homo sapien
cactggcgtattagtagaggctgtg

SEQ ID NO: 4410216 - DNA, 25 bp, Homo sapien
tgactgagcaaacccttctatggag

SEQ ID NO: 4410217 - DNA, 25 bp, Homo sapien
tcgagaaggctaaacaacttagacg

SEQ ID NO: 4410218 - DNA, 25 bp, Homo sapien
taagttcaaagttcgagaaggctaa

SEQ ID NO: 4410219 - DNA, 25 bp, Homo sapien
cacagcctctactaatacgccagtg

SEQ ID NO: 4410220 - DNA, 25 bp, Homo sapien
caaaaagctgtaactgccatactgc

SEQ ID NO: 4410221 - DNA, 25 bp, Homo sapien
aacttagacgaacaattgactgagc

SEQ ID NO: 4410222 - DNA, 25 bp, Homo sapien
aaaataagcaaaagcgtcccaggag

SEQ ID NO: 4410223 - DNA, 25 bp, Homo sapien
tgcctaagccaactcgaaaaagccg

SEQ ID NO: 4410224 - DNA, 25 bp, Homo sapien
taagccaactcgaaaaagccgtaca

SEQ ID NO: 4410225 - DNA, 25 bp, Homo sapien
agaattctgcctaagccaactcgaa

SEQ ID NO: 4410226 - DNA, 25 bp, Homo sapien
gagaattctgcctaagccaactcga

SEQ ID NO: 4410227 - DNA, 25 bp, Homo sapien
ggagaattctgcctaagccaactcg

SEQ ID NO: 4410228 - DNA, 25 bp, Homo sapien
cggctttttcgagttggcttaggca

SEQ ID NO: 4410229 - DNA, 25 bp, Homo sapien
ctcctgggacgcttttgcttatttt

SEQ ID NO: 4410230 - DNA, 25 bp, Homo sapien
tgtacggctttttcgagttggctta

SEQ ID NO: 4410231 - DNA, 25 bp, Homo sapien
tcgagttggcttaggcagaattctc

SEQ ID NO: 4410232 - DNA, 25 bp, Homo sapien
ttcgagttggcttaggcagaattct

SEQ ID NO: 4410233 - DNA, 25 bp, Homo sapien
cgagttggcttaggcagaattctcc

SEQ ID NO: 4410234 - DNA, 25 bp, Homo sapien
tgtgaactattaaatccctgtggac

SEQ ID NO: 4410235 - DNA, 25 bp, Homo sapien
cacaagatgagatgatttcctccga

SEQ ID NO: 4410236 - DNA, 25 bp, Homo sapien
aaaaaatcctagtgttgcctgtgcc

SEQ ID NO: 4410237 - DNA, 25 bp, Homo sapien
tgctagacacagttgacatgggctt

SEQ ID NO: 4410238 - DNA, 25 bp, Homo sapien
gatgaggaaactgatccaaggctgg

SEQ ID NO: 4410239 - DNA, 25 bp, Homo sapien
cctactaggtcagtgctgtcacaag

SEQ ID NO: 4410240 - DNA, 25 bp, Homo sapien
tgtgacagcactgacctagtaggca

SEQ ID NO: 4410241 - DNA, 25 bp, Homo sapien
tctagtggttttcagaacaagaccg

SEQ ID NO: 4410242 - DNA, 25 bp, Homo sapien
tatcctgtgcacaaataatcggagg

SEQ ID NO: 4410243 - DNA, 25 bp, Homo sapien
ttcaagttctagaaaagctggcacc

SEQ ID NO: 4410244 - DNA, 25 bp, Homo sapien
aagcccatgtcaactgtgtctagca

SEQ ID NO: 4410245 - DNA, 25 bp, Homo sapien
ggcacaggcaacactaggatttttt

SEQ ID NO: 4410246 - DNA, 25 bp, Homo sapien
agtgggacctagtctgtacattgaa

SEQ ID NO: 4410247 - DNA, 25 bp, Homo sapien
tcagtgtttctagtgggacctagtc

SEQ ID NO: 4410248 - DNA, 25 bp, Homo sapien
gcttcagtgtttctagtgggaccta

SEQ ID NO: 4410249 - DNA, 25 bp, Homo sapien
ggacctagtctgtacattgaaagcc

SEQ ID NO: 4410250 - DNA, 25 bp, Homo sapien
ggcttcagtgtttctagtgggacct

SEQ ID NO: 4410251 - DNA, 25 bp, Homo sapien
tgggacctagtctgtacattgaaag

SEQ ID NO: 4410252 - DNA, 25 bp, Homo sapien
ctttcaatgtacagactaggtccca

SEQ ID NO: 4410253 - DNA, 25 bp, Homo sapien
taggtcccactagaaacactgaagc

SEQ ID NO: 4410254 - DNA, 25 bp, Homo sapien
gactaggtcccactagaaacactga

SEQ ID NO: 4410255 - DNA, 25 bp, Homo sapien
gctttcaatgtacagactaggtccc

SEQ ID NO: 4410256 - DNA, 25 bp, Homo sapien
ggctttcaatgtacagactaggtcc

SEQ ID NO: 4410257 - DNA, 25 bp, Homo sapien
ttcaatgtacagactaggtcccact

SEQ ID NO: 4410258 - DNA, 25 bp, Homo sapien
tattcagacgaggagcaagattcca

SEQ ID NO: 4410259 - DNA, 25 bp, Homo sapien
tctaaagcgctccagtccctgtggt

SEQ ID NO: 4410260 - DNA, 25 bp, Homo sapien
aagaggtgccctctggagttgccca

SEQ ID NO: 4410261 - DNA, 25 bp, Homo sapien
ttaactgtgtatatgggcgctgcca

SEQ ID NO: 4410262 - DNA, 25 bp, Homo sapien
catggtacatggtagctgccccaaa

SEQ ID NO: 4410263 - DNA, 25 bp, Homo sapien
gataaccatatgtaaggcagctccc

SEQ ID NO: 4410264 - DNA, 25 bp, Homo sapien
tactaggaaagcacccaaatacgga

SEQ ID NO: 4410265 - DNA, 25 bp, Homo sapien
ggcaatgagtgaccatctctaggga

SEQ ID NO: 4410266 - DNA, 25 bp, Homo sapien
tggcagcgcccatatacacagttaa

SEQ ID NO: 4410267 - DNA, 25 bp, Homo sapien
tacctgccacctaacaaatgagaag

SEQ ID NO: 4410268 - DNA, 25 bp, Homo sapien
gagcgctttagaggaaaaaccctgc

SEQ ID NO: 4410269 - DNA, 25 bp, Homo sapien
gataaactacaaactcaccaaggca

SEQ ID NO: 4410270 - DNA, 25 bp, Homo sapien
gggcaagagaatccgcgtcaaacta

SEQ ID NO: 4410271 - DNA, 25 bp, Homo sapien
gagaatccgcgtcaaactagatggc

SEQ ID NO: 4410272 - DNA, 25 bp, Homo sapien
tccgcgtcaaactagatggcagccg

SEQ ID NO: 4410273 - DNA, 25 bp, Homo sapien
gaatccgcgtcaaactagatggcag

SEQ ID NO: 4410274 - DNA, 25 bp, Homo sapien
cgtactctgacagctgtgcacgatg

SEQ ID NO: 4410275 - DNA, 25 bp, Homo sapien
cgtcaaactagatggcagccggctc

SEQ ID NO: 4410276 - DNA, 25 bp, Homo sapien
gagccggctgccatctagtttgacg

SEQ ID NO: 4410277 - DNA, 25 bp, Homo sapien
catcgtgcacagctgtcagagtacg

SEQ ID NO: 4410278 - DNA, 25 bp, Homo sapien
cggctgccatctagtttgacgcgga

SEQ ID NO: 4410279 - DNA, 25 bp, Homo sapien
ccatctagtttgacgcggattctct

SEQ ID NO: 4410280 - DNA, 25 bp, Homo sapien
tagtttgacgcggattctcttgccc

SEQ ID NO: 4410281 - DNA, 25 bp, Homo sapien
ctgccatctagtttgacgcggattc

SEQ ID NO: 4410282 - DNA, 25 bp, Homo sapien
atttggacaaagcacagcagaacaa

SEQ ID NO: 4410283 - DNA, 25 bp, Homo sapien
tggacaaagcacagcagaacaatgt

SEQ ID NO: 4410284 - DNA, 25 bp, Homo sapien
ttggacaaagcacagcagaacaatg

SEQ ID NO: 4410285 - DNA, 25 bp, Homo sapien
acagcagaacaatgtggaacacaag

SEQ ID NO: 4410286 - DNA, 25 bp, Homo sapien
tttggacaaagcacagcagaacaat

SEQ ID NO: 4410287 - DNA, 25 bp, Homo sapien
cacagcagaacaatgtggaacacaa

SEQ ID NO: 4410288 - DNA, 25 bp, Homo sapien
ttgtgttccacattgttctgctgtg

SEQ ID NO: 4410289 - DNA, 25 bp, Homo sapien
cttgtgttccacattgttctgctgt

SEQ ID NO: 4410290 - DNA, 25 bp, Homo sapien
acattgttctgctgtgctttgtcca

SEQ ID NO: 4410291 - DNA, 25 bp, Homo sapien
cacattgttctgctgtgctttgtcc

SEQ ID NO: 4410292 - DNA, 25 bp, Homo sapien
ccacattgttctgctgtgctttgtc

SEQ ID NO: 4410293 - DNA, 25 bp, Homo sapien
cattgttctgctgtgctttgtccaa

SEQ ID NO: 4410294 - DNA, 25 bp, Homo sapien
gctctcctttggattatgtgtcagg

SEQ ID NO: 4410295 - DNA, 25 bp, Homo sapien
caatgactgtagtaaactcaggact

SEQ ID NO: 4410296 - DNA, 25 bp, Homo sapien
tcaggactagttcttttacccgcac

SEQ ID NO: 4410297 - DNA, 25 bp, Homo sapien
ttatcatggaaaggttcagccacag

SEQ ID NO: 4410298 - DNA, 25 bp, Homo sapien
catgcgccaccatagcaatgactgt

SEQ ID NO: 4410299 - DNA, 25 bp, Homo sapien
ttagtgtaaccagtctccatgcgcc

SEQ ID NO: 4410300 - DNA, 25 bp, Homo sapien
cctgacacataatccaaaggagagc

SEQ ID NO: 4410301 - DNA, 25 bp, Homo sapien
tgtggctgaacctttccatgataaa

SEQ ID NO: 4410302 - DNA, 25 bp, Homo sapien
tacagtcattgctatggtggcgcat

SEQ ID NO: 4410303 - DNA, 25 bp, Homo sapien
tgcgggtaaaagaactagtcctgag

SEQ ID NO: 4410304 - DNA, 25 bp, Homo sapien
gttacactaaaatccactctcactg

SEQ ID NO: 4410305 - DNA, 25 bp, Homo sapien
ggcgcatggagactggttacactaa

SEQ ID NO: 4410306 - DNA, 25 bp, Homo sapien
caatacagggcacaatttcacgaaa

SEQ ID NO: 4410307 - DNA, 25 bp, Homo sapien
ccggtcgtgaagactgctgcagaca

SEQ ID NO: 4410308 - DNA, 25 bp, Homo sapien
cagttctgtcccacagcattggaga

SEQ ID NO: 4410309 - DNA, 25 bp, Homo sapien
agaagagcttgtccccggtcgtgaa

SEQ ID NO: 4410310 - DNA, 25 bp, Homo sapien
tccccggtgcagtggtgtacagttc

SEQ ID NO: 4410311 - DNA, 25 bp, Homo sapien
catgttgtgtgtacttagttgctga

SEQ ID NO: 4410312 - DNA, 25 bp, Homo sapien
tagtttcgtgaaattgtgccctgta

SEQ ID NO: 4410313 - DNA, 25 bp, Homo sapien
tctccaatgctgtgggacagaactg

SEQ ID NO: 4410314 - DNA, 25 bp, Homo sapien
acagaactgtacaccactgcaccgg

SEQ ID NO: 4410315 - DNA, 25 bp, Homo sapien
aactaagtacacacaacatgtctgc

SEQ ID NO: 4410316 - DNA, 25 bp, Homo sapien
ctcagcttaaaacctaatagtttcg

SEQ ID NO: 4410317 - DNA, 25 bp, Homo sapien
tgtctgcagcagtcttcacgaccgg

SEQ ID NO: 4410318 - DNA, 25 bp, Homo sapien
agctcacgggcaaggatgttaattt

SEQ ID NO: 4410319 - DNA, 25 bp, Homo sapien
ctataagaagctcacgggcaaggat

SEQ ID NO: 4410320 - DNA, 25 bp, Homo sapien
tataagaagctcacgggcaaggatg

SEQ ID NO: 4410321 - DNA, 25 bp, Homo sapien
tgtctataagaagctcacgggcaag

SEQ ID NO: 4410322 - DNA, 25 bp, Homo sapien
tctggtgtctataagaagctcacgg

SEQ ID NO: 4410323 - DNA, 25 bp, Homo sapien
taattttgaattcccagagtttcaa

SEQ ID NO: 4410324 - DNA, 25 bp, Homo sapien
ttgaaactctgggaattcaaaatta

SEQ ID NO: 4410325 - DNA, 25 bp, Homo sapien
ccgtgagcttcttatagacaccaga

SEQ ID NO: 4410326 - DNA, 25 bp, Homo sapien
tatagacaccagaaaaagtttcaac

SEQ ID NO: 4410327 - DNA, 25 bp, Homo sapien
aaattaacatccttgcccgtgagct

SEQ ID NO: 4410328 - DNA, 25 bp, Homo sapien
atccttgcccgtgagcttcttatag

SEQ ID NO: 4410329 - DNA, 25 bp, Homo sapien
catccttgcccgtgagcttcttata

SEQ ID NO: 4410330 - DNA, 25 bp, Homo sapien
caagcctttatcagtgacgccatga

SEQ ID NO: 4410331 - DNA, 25 bp, Homo sapien
taaaagctaacagtgccaaggtggg

SEQ ID NO: 4410332 - DNA, 25 bp, Homo sapien
tttcaggcatctcaacgattgggtt

SEQ ID NO: 4410333 - DNA, 25 bp, Homo sapien
gaccaatttgtagctcatgacctcc

SEQ ID NO: 4410334 - DNA, 25 bp, Homo sapien
gataattcaacagccctatgccaag

SEQ ID NO: 4410335 - DNA, 25 bp, Homo sapien
gcaatttaaacgctccccagaaaga

SEQ ID NO: 4410336 - DNA, 25 bp, Homo sapien
tggtttcacaggagggtctacaaaa

SEQ ID NO: 4410337 - DNA, 25 bp, Homo sapien
catttcagggccagatggtttcaca

SEQ ID NO: 4410338 - DNA, 25 bp, Homo sapien
catggctgctatttagagaggcggc

SEQ ID NO: 4410339 - DNA, 25 bp, Homo sapien
tgtgggaacgcctggaactccctga

SEQ ID NO: 4410340 - DNA, 25 bp, Homo sapien
agacagcccagcaaatcaggccgcc

SEQ ID NO: 4410341 - DNA, 25 bp, Homo sapien
cgcagcgttatctcggggagcttcc

SEQ ID NO: 4410342 - DNA, 25 bp, Homo sapien
ctgagcgcaggcaggacaccaactc

SEQ ID NO: 4410343 - DNA, 25 bp, Homo sapien
cctgagcgcaggcaggacaccaact

SEQ ID NO: 4410344 - DNA, 25 bp, Homo sapien
aggctgattagaacgcccaccaggg

SEQ ID NO: 4410345 - DNA, 25 bp, Homo sapien
ggccaggctgattagaacgcccacc

SEQ ID NO: 4410346 - DNA, 25 bp, Homo sapien
ggaaggccaggctgattagaacgcc

SEQ ID NO: 4410347 - DNA, 25 bp, Homo sapien
aaggccaggctgattagaacgccca

SEQ ID NO: 4410348 - DNA, 25 bp, Homo sapien
gccagggacgaggatctgcacagag

SEQ ID NO: 4410349 - DNA, 25 bp, Homo sapien
ttgaggccagggacgaggatctgca

SEQ ID NO: 4410350 - DNA, 25 bp, Homo sapien
ctttgaggccagggacgaggatctg

SEQ ID NO: 4410351 - DNA, 25 bp, Homo sapien
aggatctgcacagagcaggcgtcat

SEQ ID NO: 4410352 - DNA, 25 bp, Homo sapien
agcccagagtccagggagcggttac

SEQ ID NO: 4410353 - DNA, 25 bp, Homo sapien
cagctggcccggaggccactgccca

SEQ ID NO: 4410354 - DNA, 25 bp, Homo sapien
tcagctggcccggaggccactgccc

SEQ ID NO: 4410355 - DNA, 25 bp, Homo sapien
agcagcccagagtccagggagcggt

SEQ ID NO: 4410356 - DNA, 25 bp, Homo sapien
gcagggaagacaaccgtagggactc

SEQ ID NO: 4410357 - DNA, 25 bp, Homo sapien
aaacttctgagagagccgtaggcat

SEQ ID NO: 4410358 - DNA, 25 bp, Homo sapien
gcaggacagtccacttggtttccaa

SEQ ID NO: 4410359 - DNA, 25 bp, Homo sapien
tcggaggcacccaccacattgggca

SEQ ID NO: 4410360 - DNA, 25 bp, Homo sapien
tctgctggctgggactcggctctgt

SEQ ID NO: 4410361 - DNA, 25 bp, Homo sapien
gctcttccggattctctcaacaggg

SEQ ID NO: 4410362 - DNA, 25 bp, Homo sapien
tctccgggaggctcttccggattct

SEQ ID NO: 4410363 - DNA, 25 bp, Homo sapien
ctgctggctgggactcggctctgta

SEQ ID NO: 4410364 - DNA, 25 bp, Homo sapien
acagtgccgcgtctaaacgccggct

SEQ ID NO: 4410365 - DNA, 25 bp, Homo sapien
ctaacaccaatgagaagggcggcag

SEQ ID NO: 4410366 - DNA, 25 bp, Homo sapien
tgggtgcacagtgccgcgtctaaac

SEQ ID NO: 4410367 - DNA, 25 bp, Homo sapien
ctcttggcgggctcctagtctgtcc

SEQ ID NO: 4410368 - DNA, 25 bp, Homo sapien
ctcccgtggggccgactcttccagg

SEQ ID NO: 4410369 - DNA, 25 bp, Homo sapien
cgtggggccgactcttccaggccgt

SEQ ID NO: 4410370 - DNA, 25 bp, Homo sapien
ccgtggggccgactcttccaggccg

SEQ ID NO: 4410371 - DNA, 25 bp, Homo sapien
tggggccgactcttccaggccgtcc

SEQ ID NO: 4410372 - DNA, 25 bp, Homo sapien
tcagagctctgagggccggcccagg

SEQ ID NO: 4410373 - DNA, 25 bp, Homo sapien
gctctgagggccggcccagggctgc

SEQ ID NO: 4410374 - DNA, 25 bp, Homo sapien
agctctgagggccggcccagggctg

SEQ ID NO: 4410375 - DNA, 25 bp, Homo sapien
agagctctgagggccggcccagggc

SEQ ID NO: 4410376 - DNA, 25 bp, Homo sapien
ggctctagcaggagcggtgcctcca

SEQ ID NO: 4410377 - DNA, 25 bp, Homo sapien
ctccccacccggctctagcaggagc

SEQ ID NO: 4410378 - DNA, 25 bp, Homo sapien
ccggctctagcaggagcggtgcctc

SEQ ID NO: 4410379 - DNA, 25 bp, Homo sapien
cacccggctctagcaggagcggtgc

SEQ ID NO: 4410380 - DNA, 25 bp, Homo sapien
aagctggactgtactgctgccatct

SEQ ID NO: 4410381 - DNA, 25 bp, Homo sapien
gctggactgtactgctgccatctcg

SEQ ID NO: 4410382 - DNA, 25 bp, Homo sapien
tggactgtactgctgccatctcggc

SEQ ID NO: 4410383 - DNA, 25 bp, Homo sapien
gaagctggactgtactgctgccatc

SEQ ID NO: 4410384 - DNA, 25 bp, Homo sapien
gaccagacttctctcgttctcgcac

SEQ ID NO: 4410385 - DNA, 25 bp, Homo sapien
tctcgttctcgcacgcctcgctccg

SEQ ID NO: 4410386 - DNA, 25 bp, Homo sapien
agacttctctcgttctcgcacgcct

SEQ ID NO: 4410387 - DNA, 25 bp, Homo sapien
ttctctcgttctcgcacgcctcgct

SEQ ID NO: 4410388 - DNA, 25 bp, Homo sapien
atttctacaaaggacgaggtgcact

SEQ ID NO: 4410389 - DNA, 25 bp, Homo sapien
cagaagctgtcacgactggctgtga

SEQ ID NO: 4410390 - DNA, 25 bp, Homo sapien
ggtgcacttccttttggagatgtca

SEQ ID NO: 4410391 - DNA, 25 bp, Homo sapien
ccttttggagatgtcagaagctgtc

SEQ ID NO: 4410392 - DNA, 25 bp, Homo sapien
gtgctcagcgtcatcgtgcccagag

SEQ ID NO: 4410393 - DNA, 25 bp, Homo sapien
cagagtcattatgcccagatccacc

SEQ ID NO: 4410394 - DNA, 25 bp, Homo sapien
gtcatcgtgcccagcgtcactgtgc

SEQ ID NO: 4410395 - DNA, 25 bp, Homo sapien
catacctagatccaccgtcatcgtg

SEQ ID NO: 4410396 - DNA, 25 bp, Homo sapien
tgacatacccatgcatactacagga

SEQ ID NO: 4410397 - DNA, 25 bp, Homo sapien
catacatatgtaagagcacttggaa

SEQ ID NO: 4410398 - DNA, 25 bp, Homo sapien
ggacccgtggcctggctttgttatc

SEQ ID NO: 4410399 - DNA, 25 bp, Homo sapien
ttgttatctcaaaacagggcatcca

SEQ ID NO: 4410400 - DNA, 25 bp, Homo sapien
caaagttggtcgatgcacaggtgac

SEQ ID NO: 4410401 - DNA, 25 bp, Homo sapien
gcaaagttggtcgatgcacaggtga

SEQ ID NO: 4410402 - DNA, 25 bp, Homo sapien
agagcaaagttggtcgatgcacagg

SEQ ID NO: 4410403 - DNA, 25 bp, Homo sapien
aagttggtcgatgcacaggtgacac

SEQ ID NO: 4410404 - DNA, 25 bp, Homo sapien
tccatgacgacccacactgcctttc

SEQ ID NO: 4410405 - DNA, 25 bp, Homo sapien
ccatgacgacccacactgcctttct

SEQ ID NO: 4410406 - DNA, 25 bp, Homo sapien
tttccatgacgacccacactgcctt

SEQ ID NO: 4410407 - DNA, 25 bp, Homo sapien
caatttttccatgacgacccacact

SEQ ID NO: 4410408 - DNA, 25 bp, Homo sapien
atcctgcagaatggggagcgcttca

SEQ ID NO: 4410409 - DNA, 25 bp, Homo sapien
aatcctgcagaatggggagcgcttc

SEQ ID NO: 4410410 - DNA, 25 bp, Homo sapien
aaatcctgcagaatggggagcgctt

SEQ ID NO: 4410411 - DNA, 25 bp, Homo sapien
agtcttgcccaagcacactagctgc

SEQ ID NO: 4410412 - DNA, 25 bp, Homo sapien
tcttgcccaagcacactagctgcag

SEQ ID NO: 4410413 - DNA, 25 bp, Homo sapien
tgtggctacacagccagagtcttgc

SEQ ID NO: 4410414 - DNA, 25 bp, Homo sapien
gctacacagccagagtcttgcccaa

SEQ ID NO: 4410415 - DNA, 25 bp, Homo sapien
tacgtgaggctctaagtctgttacc

SEQ ID NO: 4410416 - DNA, 25 bp, Homo sapien
ggtgcgtccgctccttacgtgaggc

SEQ ID NO: 4410417 - DNA, 25 bp, Homo sapien
cagcggagacggtgcaattagaacc

SEQ ID NO: 4410418 - DNA, 25 bp, Homo sapien
aattagaacccgcaggtgcagactg

SEQ ID NO: 4410419 - DNA, 25 bp, Homo sapien
gaacaagccaggcgctccaaagacg

SEQ ID NO: 4410420 - DNA, 25 bp, Homo sapien
ctcccaccgacttcgtcccccagag

SEQ ID NO: 4410421 - DNA, 25 bp, Homo sapien
tcccaccgacttcgtcccccagagc

SEQ ID NO: 4410422 - DNA, 25 bp, Homo sapien
aagccaggcgctccaaagacgtcca

SEQ ID NO: 4410423 - DNA, 25 bp, Homo sapien
tcaaaccccagaccgtagcctcttg

SEQ ID NO: 4410424 - DNA, 25 bp, Homo sapien
tgggccaacctgctccgaggcagat

SEQ ID NO: 4410425 - DNA, 25 bp, Homo sapien
tccgaggcagatgaatgaggtagaa

SEQ ID NO: 4410426 - DNA, 25 bp, Homo sapien
agaacctggcccctgaattggacag

SEQ ID NO: 4410427 - DNA, 25 bp, Homo sapien
gaaggtgcctctcacgggttttcca

SEQ ID NO: 4410428 - DNA, 25 bp, Homo sapien
tcctgtggttctctgcgtgctcttc

SEQ ID NO: 4410429 - DNA, 25 bp, Homo sapien
ccacagagccctttctaccaggtac

SEQ ID NO: 4410430 - DNA, 25 bp, Homo sapien
tcttcactgcattggccgtggcagg

SEQ ID NO: 4410431 - DNA, 25 bp, Homo sapien
gaaggagtttcgcagtctccaccca

SEQ ID NO: 4410432 - DNA, 25 bp, Homo sapien
ccattcgcataaggagggaaggagt

SEQ ID NO: 4410433 - DNA, 25 bp, Homo sapien
gaaaagacttcagtagattccaatt

SEQ ID NO: 4410434 - DNA, 25 bp, Homo sapien
cacccacctgattcctctgtgttcc

SEQ ID NO: 4410435 - DNA, 25 bp, Homo sapien
tatgtcaccggaatctcctttctca

SEQ ID NO: 4410436 - DNA, 25 bp, Homo sapien
gggtcctatgtcaccggaatctcct

SEQ ID NO: 4410437 - DNA, 25 bp, Homo sapien
gaccagggggtcctatgtcaccgga

SEQ ID NO: 4410438 - DNA, 25 bp, Homo sapien
ctggttctccattaggaccaggggg

SEQ ID NO: 4410439 - DNA, 25 bp, Homo sapien
ccttccgaatgggatccaccgtggg

SEQ ID NO: 4410440 - DNA, 25 bp, Homo sapien
ttttctccctggtatccaagagtca

SEQ ID NO: 4410441 - DNA, 25 bp, Homo sapien
gagtcagatccttctcggaaagcac

SEQ ID NO: 4410442 - DNA, 25 bp, Homo sapien
tttattcagaaatccagcccctctc

SEQ ID NO: 4410443 - DNA, 25 bp, Homo sapien
tcagccaagtcacaccggcaagcac

SEQ ID NO: 4410444 - DNA, 25 bp, Homo sapien
agccaagtcacaccggcaagcacac

SEQ ID NO: 4410445 - DNA, 25 bp, Homo sapien
actcagccaagtcacaccggcaagc

SEQ ID NO: 4410446 - DNA, 25 bp, Homo sapien
aagtcacaccggcaagcacaccttc

SEQ ID NO: 4410447 - DNA, 25 bp, Homo sapien
cagaggctttgtccgggcccctcag

SEQ ID NO: 4410448 - DNA, 25 bp, Homo sapien
agcggatgctgctcggccagtcagt

SEQ ID NO: 4410449 - DNA, 25 bp, Homo sapien
tctcccagaggctttgtccgggccc

SEQ ID NO: 4410450 - DNA, 25 bp, Homo sapien
gtgacactgatctcagcgcactcac

SEQ ID NO: 4410451 - DNA, 25 bp, Homo sapien
gagctcattccgttcccatacgcct

SEQ ID NO: 4410452 - DNA, 25 bp, Homo sapien
gcgtgctgctcctatccctgcatca

SEQ ID NO: 4410453 - DNA, 25 bp, Homo sapien
tacgcctgtgaccacacgcgtgctg

SEQ ID NO: 4410454 - DNA, 25 bp, Homo sapien
cctttctggcaacagatctcattct

SEQ ID NO: 4410455 - DNA, 25 bp, Homo sapien
tccccgatggccttgcgcagctggc

SEQ ID NO: 4410456 - DNA, 25 bp, Homo sapien
agctggctgcactcacatgggaggc

SEQ ID NO: 4410457 - DNA, 25 bp, Homo sapien
gatgaacttgagctcgctggtcagc

SEQ ID NO: 4410458 - DNA, 25 bp, Homo sapien
ggttgtccatctccccgatggcctt

SEQ ID NO: 4410459 - DNA, 25 bp, Homo sapien
tcaccgctgcgccacttgttgaagg

SEQ ID NO: 4410460 - DNA, 25 bp, Homo sapien
ctcgtcgtaggcattgttgggctca

SEQ ID NO: 4410461 - DNA, 25 bp, Homo sapien
cgttgatgccgatgaagacacgggc

SEQ ID NO: 4410462 - DNA, 25 bp, Homo sapien
gtggtcagagtacacgaaggcgccc

SEQ ID NO: 4410463 - DNA, 25 bp, Homo sapien
aaggcacaagctttatggaagagca

SEQ ID NO: 4410464 - DNA, 25 bp, Homo sapien
gggctacaatacaggtaatgaaact

SEQ ID NO: 4410465 - DNA, 25 bp, Homo sapien
ttattgtatagcttggacaaaggca

SEQ ID NO: 4410466 - DNA, 25 bp, Homo sapien
tggctggcaccatggtctgggctct

SEQ ID NO: 4410467 - DNA, 25 bp, Homo sapien
catggataatagtgtgaaggaacct

SEQ ID NO: 4410468 - DNA, 25 bp, Homo sapien
tagtgtgaaggaacctatattgtaa

SEQ ID NO: 4410469 - DNA, 25 bp, Homo sapien
gaaggaacctatattgtaatgtaat

SEQ ID NO: 4410470 - DNA, 25 bp, Homo sapien
ttgtttttacatggataatagtgtg

SEQ ID NO: 4410471 - DNA, 25 bp, Homo sapien
ggtgcctcgcctcaagctggtagag

SEQ ID NO: 4410472 - DNA, 25 bp, Homo sapien
tgaaatgtgaccctcatggtggagg

SEQ ID NO: 4410473 - DNA, 25 bp, Homo sapien
tcgggagcggaaccctcatgagtat

SEQ ID NO: 4410474 - DNA, 25 bp, Homo sapien
aaaaccatgaggtactgtggcaggc

SEQ ID NO: 4410475 - DNA, 25 bp, Homo sapien
ccaatgaagcaaaagcctggtcgct

SEQ ID NO: 4410476 - DNA, 25 bp, Homo sapien
ctctcatacacagagtctgcgccaa

SEQ ID NO: 4410477 - DNA, 25 bp, Homo sapien
aaagcctggtcgctctgacgggctc

SEQ ID NO: 4410478 - DNA, 25 bp, Homo sapien
tgcttctccagctgtacatcattcc

SEQ ID NO: 4410479 - DNA, 25 bp, Homo sapien
tcaaggtgcagtcaaggagcctgac

SEQ ID NO: 4410480 - DNA, 25 bp, Homo sapien
gacttggcattggattggttatcaa

SEQ ID NO: 4410481 - DNA, 25 bp, Homo sapien
actcacaggcccagacttggcattg

SEQ ID NO: 4410482 - DNA, 25 bp, Homo sapien
agatagggtctcaccggcgcacatc

SEQ ID NO: 4410483 - DNA, 25 bp, Homo sapien
aggaggtgtcccggcttcctctgcc

SEQ ID NO: 4410484 - DNA, 25 bp, Homo sapien
ccttccaattgagggcactgtgcag

SEQ ID NO: 4410485 - DNA, 25 bp, Homo sapien
gcagccagtgccgaacggctcttgt

SEQ ID NO: 4410486 - DNA, 25 bp, Homo sapien
tgctatctaattccctaaaccccag

SEQ ID NO: 4410487 - DNA, 25 bp, Homo sapien
gacccccacagaactatggggcagg

SEQ ID NO: 4410488 - DNA, 25 bp, Homo sapien
cccccacagaactatggggcaggtg

SEQ ID NO: 4410489 - DNA, 25 bp, Homo sapien
ccccacagaactatggggcaggtgg

SEQ ID NO: 4410490 - DNA, 25 bp, Homo sapien
tgacccccacagaactatggggcag

SEQ ID NO: 4410491 - DNA, 25 bp, Homo sapien
aaatacacgcgtgccagctctccgg

SEQ ID NO: 4410492 - DNA, 25 bp, Homo sapien
tgtgtgtctgcgctcatccatctca

SEQ ID NO: 4410493 - DNA, 25 bp, Homo sapien
tgtgtctgcgctcatccatctcagc

SEQ ID NO: 4410494 - DNA, 25 bp, Homo sapien
ccacgcttcagagggctctgagaaa

SEQ ID NO: 4410495 - DNA, 25 bp, Homo sapien
tctttcggtcgtcaggtctacgtgg

SEQ ID NO: 4410496 - DNA, 25 bp, Homo sapien
tgctctttcggtcgtcaggtctacg

SEQ ID NO: 4410497 - DNA, 25 bp, Homo sapien
cctgactgctctttcggtcgtcagg

SEQ ID NO: 4410498 - DNA, 25 bp, Homo sapien
ttcggtcgtcaggtctacgtggctg

SEQ ID NO: 4410499 - DNA, 25 bp, Homo sapien
tccatccagagttcgtctttgccat

SEQ ID NO: 4410500 - DNA, 25 bp, Homo sapien
gctccgcatggggttggcccagcct

SEQ ID NO: 4410501 - DNA, 25 bp, Homo sapien
tccccggccgatggagctccgcatg

SEQ ID NO: 4410502 - DNA, 25 bp, Homo sapien
tgaagaaacgccgggcatgtttccc

SEQ ID NO: 4410503 - DNA, 25 bp, Homo sapien
gattgagagccacgcgacatctgtc

SEQ ID NO: 4410504 - DNA, 25 bp, Homo sapien
tttcaggcctaagggaggagcatcc

SEQ ID NO: 4410505 - DNA, 25 bp, Homo sapien
tagctgcccgcgaataaggacgatt

SEQ ID NO: 4410506 - DNA, 25 bp, Homo sapien
gagcatccggatgaatagctgcccg

SEQ ID NO: 4410507 - DNA, 25 bp, Homo sapien
tcagttcaacacatgcccagtcctt

SEQ ID NO: 4410508 - DNA, 25 bp, Homo sapien
ggaaagcggcaagggctggatcgta

SEQ ID NO: 4410509 - DNA, 25 bp, Homo sapien
gctggatcgtagctggcaggacgca

SEQ ID NO: 4410510 - DNA, 25 bp, Homo sapien
agtccttgccggtcacctggagtgg

SEQ ID NO: 4410511 - DNA, 25 bp, Homo sapien
tggcagcaccctcgtggtacctgag

SEQ ID NO: 4410512 - DNA, 25 bp, Homo sapien
agcttgaggtcatcaaggatgagca

SEQ ID NO: 4410513 - DNA, 25 bp, Homo sapien
tgagcccaagagcaatgccagaaac

SEQ ID NO: 4410514 - DNA, 25 bp, Homo sapien
cagagcatctcggtgtggtctggca

SEQ ID NO: 4410515 - DNA, 25 bp, Homo sapien
tagggcaacttcaaggtgctgggcc

SEQ ID NO: 4410516 - DNA, 25 bp, Homo sapien
taattcgtgctaacttgctgtgccg

SEQ ID NO: 4410517 - DNA, 25 bp, Homo sapien
tgggacacatgtgccagcctgggta

SEQ ID NO: 4410518 - DNA, 25 bp, Homo sapien
cctgaaaacagtcatgcggtcctct

SEQ ID NO: 4410519 - DNA, 25 bp, Homo sapien
gctcgaggcttgtcttatggctcca

SEQ ID NO: 4410520 - DNA, 25 bp, Homo sapien
cacagggcagcgcttaggggctcca

SEQ ID NO: 4410521 - DNA, 25 bp, Homo sapien
agctcaggggcaatgctcgaggctt

SEQ ID NO: 4410522 - DNA, 25 bp, Homo sapien
cggagcgggcaacaggctttgcagc

SEQ ID NO: 4410523 - DNA, 25 bp, Homo sapien
ctgggagctcgctggctctgctgac

SEQ ID NO: 4410524 - DNA, 25 bp, Homo sapien
tgggagctcgctggctctgctgaca

SEQ ID NO: 4410525 - DNA, 25 bp, Homo sapien
cagcctgcgatgatggaggtgctgg

SEQ ID NO: 4410526 - DNA, 25 bp, Homo sapien
tgggtgtcccgctcactaggtgggg

SEQ ID NO: 4410527 - DNA, 25 bp, Homo sapien
aagtgggtgtcccgctcactaggtg

SEQ ID NO: 4410528 - DNA, 25 bp, Homo sapien
tcagcctgcgatgatggaggtgctg

SEQ ID NO: 4410529 - DNA, 25 bp, Homo sapien
cataaatggatctcttgctccccag

SEQ ID NO: 4410530 - DNA, 25 bp, Homo sapien
gacgtccactgacgcgcaggccagg

SEQ ID NO: 4410531 - DNA, 25 bp, Homo sapien
actgagccacagagacggggccagc

SEQ ID NO: 4410532 - DNA, 25 bp, Homo sapien
ccacacgggaacagacgtccactga

SEQ ID NO: 4410533 - DNA, 25 bp, Homo sapien
gaacagacgtccactgacgcgcagg

SEQ ID NO: 4410534 - DNA, 25 bp, Homo sapien
ggctcctgacgctaagatttgagac

SEQ ID NO: 4410535 - DNA, 25 bp, Homo sapien
tgacgctaagatttgagactttcaa

SEQ ID NO: 4410536 - DNA, 25 bp, Homo sapien
cccgtctaggctcctgacgctaaga

SEQ ID NO: 4410537 - DNA, 25 bp, Homo sapien
gagtgaggccccgtctaggctcctg

SEQ ID NO: 4410538 - DNA, 25 bp, Homo sapien
gggagagggcagctcggtcaacctt

SEQ ID NO: 4410539 - DNA, 25 bp, Homo sapien
gagagggcagctcggtcaaccttgg

SEQ ID NO: 4410540 - DNA, 25 bp, Homo sapien
aagggagagggcagctcggtcaacc

SEQ ID NO: 4410541 - DNA, 25 bp, Homo sapien
agggcagctcggtcaaccttggggg

SEQ ID NO: 4410542 - DNA, 25 bp, Homo sapien
tttcctcctacggattcagatgcca

SEQ ID NO: 4410543 - DNA, 25 bp, Homo sapien
catcagctgggtgaagtccagaaac

SEQ ID NO: 4410544 - DNA, 25 bp, Homo sapien
tgaagtccagaaaccgggtcagtct

SEQ ID NO: 4410545 - DNA, 25 bp, Homo sapien
gatgccatgtccatcagctgggtga

SEQ ID NO: 4410546 - DNA, 25 bp, Homo sapien
gcagcactcagctggcccatcccca

SEQ ID NO: 4410547 - DNA, 25 bp, Homo sapien
cccaattcccccaggctacccatgg

SEQ ID NO: 4410548 - DNA, 25 bp, Homo sapien
ccccaattcccccaggctacccatg

SEQ ID NO: 4410549 - DNA, 25 bp, Homo sapien
tgcctccagcagcactcagctggcc

SEQ ID NO: 4410550 - DNA, 25 bp, Homo sapien
ctctcctcgcagacacctctgccag

SEQ ID NO: 4410551 - DNA, 25 bp, Homo sapien
gtgctcccaactcttctcacaaacg

SEQ ID NO: 4410552 - DNA, 25 bp, Homo sapien
tctccagactcgtgctcccaactct

SEQ ID NO: 4410553 - DNA, 25 bp, Homo sapien
aaacgcgcagcgtgttcttgaaaca

SEQ ID NO: 4410554 - DNA, 25 bp, Homo sapien
gccatgatgccttgaaatgcttcca

SEQ ID NO: 4410555 - DNA, 25 bp, Homo sapien
tgcttccatttcattgtctgcctcc

SEQ ID NO: 4410556 - DNA, 25 bp, Homo sapien
aagccatgatgccttgaaatgcttc

SEQ ID NO: 4410557 - DNA, 25 bp, Homo sapien
ttaagccatgatgccttgaaatgct

SEQ ID NO: 4410558 - DNA, 25 bp, Homo sapien
tttctgcaggagcaaaaaagtcatc

SEQ ID NO: 4410559 - DNA, 25 bp, Homo sapien
ctttatgaggttttctgcaggagca

SEQ ID NO: 4410560 - DNA, 25 bp, Homo sapien
aaaagtcatctgttgcaaataaaat

SEQ ID NO: 4410561 - DNA, 25 bp, Homo sapien
ctgcaggagcaaaaaagtcatctgt

SEQ ID NO: 4410562 - DNA, 25 bp, Homo sapien
aactccgtatattcatgctctttga

SEQ ID NO: 4410563 - DNA, 25 bp, Homo sapien
cccaaactccgtatattcatgctct

SEQ ID NO: 4410564 - DNA, 25 bp, Homo sapien
ttcccaaactccgtatattcatgct

SEQ ID NO: 4410565 - DNA, 25 bp, Homo sapien
catttcccaaactccgtatattcat

SEQ ID NO: 4410566 - DNA, 25 bp, Homo sapien
gctgcacttcgatgaacgaaccgtt

SEQ ID NO: 4410567 - DNA, 25 bp, Homo sapien
tgtcagctgcacttcgatgaacgaa

SEQ ID NO: 4410568 - DNA, 25 bp, Homo sapien
tcgatgaacgaaccgttgttattac

SEQ ID NO: 4410569 - DNA, 25 bp, Homo sapien
gcagtgtcagctgcacttcgatgaa

SEQ ID NO: 4410570 - DNA, 25 bp, Homo sapien
gacactcgaggagcgtaatctcccg

SEQ ID NO: 4410571 - DNA, 25 bp, Homo sapien
gaagccccggatgactccttggatc

SEQ ID NO: 4410572 - DNA, 25 bp, Homo sapien
gtttgctgcttgaatggacactcga

SEQ ID NO: 4410573 - DNA, 25 bp, Homo sapien
tctcccgtgaagtaagaaacgtcca

SEQ ID NO: 4410574 - DNA, 25 bp, Homo sapien
acgttccagggatgatggcctgcct

SEQ ID NO: 4410575 - DNA, 25 bp, Homo sapien
agacctgggtccacatcacccgggt

SEQ ID NO: 4410576 - DNA, 25 bp, Homo sapien
acatcacccgggtcatctgaggcac

SEQ ID NO: 4410577 - DNA, 25 bp, Homo sapien
aacctgctcacccacgttccaggga

SEQ ID NO: 4410578 - DNA, 25 bp, Homo sapien
ctcagcaatggcttcaaactcctca

SEQ ID NO: 4410579 - DNA, 25 bp, Homo sapien
cctgtcctggttcctctttctggga

SEQ ID NO: 4410580 - DNA, 25 bp, Homo sapien
tggctgcagctcctgtcctggttcc

SEQ ID NO: 4410581 - DNA, 25 bp, Homo sapien
ctttctgggatttctggtagtttat

SEQ ID NO: 4410582 - DNA, 25 bp, Homo sapien
gcagggtttcctggcttaagctcag

SEQ ID NO: 4410583 - DNA, 25 bp, Homo sapien
ttaagctcagtcatgggaaccaagt

SEQ ID NO: 4410584 - DNA, 25 bp, Homo sapien
gagtctgatatgagtccatctctgc

SEQ ID NO: 4410585 - DNA, 25 bp, Homo sapien
gaaccaagtaactccagtcgtcgga

SEQ ID NO: 4410586 - DNA, 25 bp, Homo sapien
aagccatggaactggtgataagtcc

SEQ ID NO: 4410587 - DNA, 25 bp, Homo sapien
ggtgataagtccatgtcacgattac

SEQ ID NO: 4410588 - DNA, 25 bp, Homo sapien
tggaactggtgataagtccatgtca

SEQ ID NO: 4410589 - DNA, 25 bp, Homo sapien
aaataaagaagccatggaactggtg

SEQ ID NO: 4410590 - DNA, 25 bp, Homo sapien
aaaatcgagtgaaatgacagcggtg

SEQ ID NO: 4410591 - DNA, 25 bp, Homo sapien
ccccaaaatcgagtgaaatgacagc

SEQ ID NO: 4410592 - DNA, 25 bp, Homo sapien
ccaaaatcgagtgaaatgacagcgg

SEQ ID NO: 4410593 - DNA, 25 bp, Homo sapien
caagatcccccccaaaatcgagtga

SEQ ID NO: 4410594 - DNA, 25 bp, Homo sapien
agaagactgacatcaatggaaatcc

SEQ ID NO: 4410595 - DNA, 25 bp, Homo sapien
gcaagttccacagtatcatcaaggc

SEQ ID NO: 4410596 - DNA, 25 bp, Homo sapien
tggcaagttccacagtatcatcaag

SEQ ID NO: 4410597 - DNA, 25 bp, Homo sapien
gaatgagaagactgacatcaatgga

SEQ ID NO: 4410598 - DNA, 25 bp, Homo sapien
cattcagcaggagccgggttatgag

SEQ ID NO: 4410599 - DNA, 25 bp, Homo sapien
taattgctagaaggtggaaaccaag

SEQ ID NO: 4410600 - DNA, 25 bp, Homo sapien
tctgcagagcagcaaatagctacca

SEQ ID NO: 4410601 - DNA, 25 bp, Homo sapien
tatcctagagggagtcattcagcag

SEQ ID NO: 4410602 - DNA, 25 bp, Homo sapien
ggtcaaacagcattcgggaaattca

SEQ ID NO: 4410603 - DNA, 25 bp, Homo sapien
cactcttgtatcgtctctacctaga

SEQ ID NO: 4410604 - DNA, 25 bp, Homo sapien
cacttctgtaccactcttgtatcgt

SEQ ID NO: 4410605 - DNA, 25 bp, Homo sapien
acctagaagaggtctgggcacatag

SEQ ID NO: 4410606 - DNA, 25 bp, Homo sapien
gcacttgatattaccctgtaccaga

SEQ ID NO: 4410607 - DNA, 25 bp, Homo sapien
tcagtctccaatacccagaatgcga

SEQ ID NO: 4410608 - DNA, 25 bp, Homo sapien
tctcttggtaggctttggccacacc

SEQ ID NO: 4410609 - DNA, 25 bp, Homo sapien
cagaatgcgaaatccttgtaggcca

SEQ ID NO: 4410610 - DNA, 25 bp, Homo sapien
aaagcgatggccactaggtctgcag

SEQ ID NO: 4410611 - DNA, 25 bp, Homo sapien
tactctaagtcgtgcaattccacca

SEQ ID NO: 4410612 - DNA, 25 bp, Homo sapien
gttgcagtccagtctttttgtccag

SEQ ID NO: 4410613 - DNA, 25 bp, Homo sapien
tttgggtgcccaaacttagcattac

SEQ ID NO: 4410614 - DNA, 25 bp, Homo sapien
tatttaatgccggtacccagacttc

SEQ ID NO: 4410615 - DNA, 25 bp, Homo sapien
atgccggtacccagacttcctaaat

SEQ ID NO: 4410616 - DNA, 25 bp, Homo sapien
ttaatgccggtacccagacttccta

SEQ ID NO: 4410617 - DNA, 25 bp, Homo sapien
tgccggtacccagacttcctaaata

SEQ ID NO: 4410618 - DNA, 25 bp, Homo sapien
ttgcagtttcccaaccatccgccat

SEQ ID NO: 4410619 - DNA, 25 bp, Homo sapien
ttctaatattggtggccggtccagc

SEQ ID NO: 4410620 - DNA, 25 bp, Homo sapien
ggtccagccttcttgcagtttccca

SEQ ID NO: 4410621 - DNA, 25 bp, Homo sapien
tattggtggccggtccagccttctt

SEQ ID NO: 4410622 - DNA, 25 bp, Homo sapien
tgtgccaatcggaaaactgcccatt

SEQ ID NO: 4410623 - DNA, 25 bp, Homo sapien
tattttgtgtcaatttcaattcgag

SEQ ID NO: 4410624 - DNA, 25 bp, Homo sapien
ttcgagttattactccaggatgtgc

SEQ ID NO: 4410625 - DNA, 25 bp, Homo sapien
attcacaacccggaaccaagagaat

SEQ ID NO: 4410626 - DNA, 25 bp, Homo sapien
tcccacttccatagaactcagtctt

SEQ ID NO: 4410627 - DNA, 25 bp, Homo sapien
caattatagggtacttctttatggc

SEQ ID NO: 4410628 - DNA, 25 bp, Homo sapien
aagtccagtgtcctcagtcccactt

SEQ ID NO: 4410629 - DNA, 25 bp, Homo sapien
tcagtctttagaataaacaaaccaa

SEQ ID NO: 4410630 - DNA, 25 bp, Homo sapien
tccactttacagctgtcaggagcat

SEQ ID NO: 4410631 - DNA, 25 bp, Homo sapien
tgatcacggcttcttcttcctgagt

SEQ ID NO: 4410632 - DNA, 25 bp, Homo sapien
tggtcactggaagcagtggtttcca

SEQ ID NO: 4410633 - DNA, 25 bp, Homo sapien
tgggccgggagaatccacttttgcc

SEQ ID NO: 4410634 - DNA, 25 bp, Homo sapien
ctatcgaacagatgactttggttgg

SEQ ID NO: 4410635 - DNA, 25 bp, Homo sapien
gatgacatcttggagctctagggtc

SEQ ID NO: 4410636 - DNA, 25 bp, Homo sapien
gggacgatggtgagcctggcgtgag

SEQ ID NO: 4410637 - DNA, 25 bp, Homo sapien
gccccggagccgaaggcggctcact

SEQ ID NO: 4410638 - DNA, 25 bp, Homo sapien
gaacttcaacatgggcttctcccgg

SEQ ID NO: 4410639 - DNA, 25 bp, Homo sapien
tattaaatcaccaggtgttcaaaac

SEQ ID NO: 4410640 - DNA, 25 bp, Homo sapien
ttgaaaagaagactatgactgggaa

SEQ ID NO: 4410641 - DNA, 25 bp, Homo sapien
ttactgctgtgtgtccgacaccggg

SEQ ID NO: 4410642 - DNA, 25 bp, Homo sapien
actgggaaattactgctgtgtgtcc

SEQ ID NO: 4410643 - DNA, 25 bp, Homo sapien
ctccccctacactcgccgccttcct

SEQ ID NO: 4410644 - DNA, 25 bp, Homo sapien
caggcccgggcaccgccgacgggag

SEQ ID NO: 4410645 - DNA, 25 bp, Homo sapien
gcaccgccgacgggaggtccgctcc

SEQ ID NO: 4410646 - DNA, 25 bp, Homo sapien
cgccgacgggaggtccgctccagcc

SEQ ID NO: 4410647 - DNA, 25 bp, Homo sapien
accgccgacgggaggtccgctccag

SEQ ID NO: 4410648 - DNA, 25 bp, Homo sapien
ggcgtggtgtccaccggcgcggagg

SEQ ID NO: 4410649 - DNA, 25 bp, Homo sapien
gcgtggtgtccaccggcgcggaggg

SEQ ID NO: 4410650 - DNA, 25 bp, Homo sapien
gcagcgcctcgaaggtggccgcgcg

SEQ ID NO: 4410651 - DNA, 25 bp, Homo sapien
cacgcgtgggcgtgaagaggcggcg

SEQ ID NO: 4410652 - DNA, 25 bp, Homo sapien
acgccgaacgggacgtccacctgct

SEQ ID NO: 4410653 - DNA, 25 bp, Homo sapien
gcggcccgccgccacgtacttgccg

SEQ ID NO: 4410654 - DNA, 25 bp, Homo sapien
ttgcaggttttcggggaactatatg

SEQ ID NO: 4410655 - DNA, 25 bp, Homo sapien
gcaggttttcggggaactatatgaa

SEQ ID NO: 4410656 - DNA, 25 bp, Homo sapien
gttttcggggaactatatgaatata

SEQ ID NO: 4410657 - DNA, 25 bp, Homo sapien
caggttttcggggaactatatgaat

SEQ ID NO: 4410658 - DNA, 25 bp, Homo sapien
gcagcggaacgcttctggaagctgg

SEQ ID NO: 4410659 - DNA, 25 bp, Homo sapien
ctggtgcctgtgaacaatgctgggg

SEQ ID NO: 4410660 - DNA, 25 bp, Homo sapien
agaaggcagcggaacgcttctggaa

SEQ ID NO: 4410661 - DNA, 25 bp, Homo sapien
tgctggcgtgtcctgcatggagctc

SEQ ID NO: 4410662 - DNA, 25 bp, Homo sapien
taagggtgatgtcggaggctggttt

SEQ ID NO: 4410663 - DNA, 25 bp, Homo sapien
gaggctggtttggtacctgaagcct

SEQ ID NO: 4410664 - DNA, 25 bp, Homo sapien
ggctggtttggtacctgaagcctct

SEQ ID NO: 4410665 - DNA, 25 bp, Homo sapien
tttaagggtgatgtcggaggctggt

SEQ ID NO: 4410666 - DNA, 25 bp, Homo sapien
cctcaccctctcaagaggtgcttta

SEQ ID NO: 4410667 - DNA, 25 bp, Homo sapien
tttaccctgcagcatccgacctggt

SEQ ID NO: 4410668 - DNA, 25 bp, Homo sapien
ctggcacacgggctgggtcgtccca

SEQ ID NO: 4410669 - DNA, 25 bp, Homo sapien
tgagctattctctggagcctcgcct

SEQ ID NO: 4410670 - DNA, 25 bp, Homo sapien
gggacaagtgcagtttccacagctg

SEQ ID NO: 4410671 - DNA, 25 bp, Homo sapien
ccccagaggggacaagtgcagtttc

SEQ ID NO: 4410672 - DNA, 25 bp, Homo sapien
caagtgcagtttccacagctgctgc

SEQ ID NO: 4410673 - DNA, 25 bp, Homo sapien
gacaagtgcagtttccacagctgct

SEQ ID NO: 4410674 - DNA, 25 bp, Homo sapien
tcactctggcggtctccctccagga

SEQ ID NO: 4410675 - DNA, 25 bp, Homo sapien
tgctcatctccctccgggatccacc

SEQ ID NO: 4410676 - DNA, 25 bp, Homo sapien
atctccctccgggatccacctggcc

SEQ ID NO: 4410677 - DNA, 25 bp, Homo sapien
cacctggccatcctcgtcactctgg

SEQ ID NO: 4410678 - DNA, 25 bp, Homo sapien
agatatacgatgatatgtttgccac

SEQ ID NO: 4410679 - DNA, 25 bp, Homo sapien
tatgtcgagatatacgatgatatgt

SEQ ID NO: 4410680 - DNA, 25 bp, Homo sapien
tttatatgtcgagatatacgatgat

SEQ ID NO: 4410681 - DNA, 25 bp, Homo sapien
tttatatcacaatgcaccactggtt

SEQ ID NO: 4410682 - DNA, 25 bp, Homo sapien
actccgttcctgtagcaacacctga

SEQ ID NO: 4410683 - DNA, 25 bp, Homo sapien
tgaggctctaatgcactccgttcct

SEQ ID NO: 4410684 - DNA, 25 bp, Homo sapien
cactgagcacctcggtgcctggcac

SEQ ID NO: 4410685 - DNA, 25 bp, Homo sapien
tgacttggatgtgctgtagcccatg

SEQ ID NO: 4410686 - DNA, 25 bp, Homo sapien
gccaagtttggcgaattctcggcca

SEQ ID NO: 4410687 - DNA, 25 bp, Homo sapien
gcctgaggatctgtcgggtgaatca

SEQ ID NO: 4410688 - DNA, 25 bp, Homo sapien
ctctttctcgttcccagcctgagga

SEQ ID NO: 4410689 - DNA, 25 bp, Homo sapien
gtttccagcctcatgagcctccaag

SEQ ID NO: 4410690 - DNA, 25 bp, Homo sapien
cataaaaacgtggattgcgagagct

SEQ ID NO: 4410691 - DNA, 25 bp, Homo sapien
ggatcatgtcttggagtcttctccc

SEQ ID NO: 4410692 - DNA, 25 bp, Homo sapien
gagagcttcaccgagctcaggactt

SEQ ID NO: 4410693 - DNA, 25 bp, Homo sapien
caattactccctgcctttgtccttc

SEQ ID NO: 4410694 - DNA, 25 bp, Homo sapien
gaagggctctgtactttcaccccca

SEQ ID NO: 4410695 - DNA, 25 bp, Homo sapien
tgaagggctctgtactttcaccccc

SEQ ID NO: 4410696 - DNA, 25 bp, Homo sapien
ctgaagggctctgtactttcacccc

SEQ ID NO: 4410697 - DNA, 25 bp, Homo sapien
ttaggccacgataagggagtcatcc

SEQ ID NO: 4410698 - DNA, 25 bp, Homo sapien
cctatctaaagacactttcatgaac

SEQ ID NO: 4410699 - DNA, 25 bp, Homo sapien
cgataagggagtcatccctggaccc

SEQ ID NO: 4410700 - DNA, 25 bp, Homo sapien
cccctatctaaagacactttcatga

SEQ ID NO: 4410701 - DNA, 25 bp, Homo sapien
taaacgggccatgaacatattgtga

SEQ ID NO: 4410702 - DNA, 25 bp, Homo sapien
gaaggtcgcctaatgcttgctctca

SEQ ID NO: 4410703 - DNA, 25 bp, Homo sapien
cactgcagttgggtagtaaacgggc

SEQ ID NO: 4410704 - DNA, 25 bp, Homo sapien
catattgtgacatcctgggctggcc

SEQ ID NO: 4410705 - DNA, 25 bp, Homo sapien
caatcaacccagagtccaacttctt

SEQ ID NO: 4410706 - DNA, 25 bp, Homo sapien
cacccgacagaaaagtggacaaaga

SEQ ID NO: 4410707 - DNA, 25 bp, Homo sapien
gacactttggcaaaatagatcaatg

SEQ ID NO: 4410708 - DNA, 25 bp, Homo sapien
ttccatatttaagacgctgcccaca

SEQ ID NO: 4410709 - DNA, 25 bp, Homo sapien
cgatcgtggccagcacgatgtccca

SEQ ID NO: 4410710 - DNA, 25 bp, Homo sapien
caatcggacagactaaatttgggta

SEQ ID NO: 4410711 - DNA, 25 bp, Homo sapien
ttccgaacgcctcctagagggaaga

SEQ ID NO: 4410712 - DNA, 25 bp, Homo sapien
ttgcaggtggaataaataatcttcc

SEQ ID NO: 4410713 - DNA, 25 bp, Homo sapien
ggctgaggaccgagactgctctgct

SEQ ID NO: 4410714 - DNA, 25 bp, Homo sapien
cgtagctgctcacatgacgtgtttc

SEQ ID NO: 4410715 - DNA, 25 bp, Homo sapien
tcacatgacgtgtttcctctctgct

SEQ ID NO: 4410716 - DNA, 25 bp, Homo sapien
tgaggaccgagactgctctgctcat

SEQ ID NO: 4410717 - DNA, 25 bp, Homo sapien
ccccgctccatactaaacgtcattc

SEQ ID NO: 4410718 - DNA, 25 bp, Homo sapien
atgtcccccgctccatactaaacgt

SEQ ID NO: 4410719 - DNA, 25 bp, Homo sapien
gagtgggtcgtgctcgtccccatcc

SEQ ID NO: 4410720 - DNA, 25 bp, Homo sapien
tccatactaaacgtcattcctttct

SEQ ID NO: 4410721 - DNA, 25 bp, Homo sapien
tcacggatgctgatgttccgaacac

SEQ ID NO: 4410722 - DNA, 25 bp, Homo sapien
cacccgctagtggataagggacatt

SEQ ID NO: 4410723 - DNA, 25 bp, Homo sapien
tgagtgtcgcctacatcacggatgc

SEQ ID NO: 4410724 - DNA, 25 bp, Homo sapien
gcagggcagcatgactgacactgag

SEQ ID NO: 4410725 - DNA, 25 bp, Homo sapien
caggatagtcaagatgggcaaactc

SEQ ID NO: 4410726 - DNA, 25 bp, Homo sapien
gtcaagatgggcaaactcaagttca

SEQ ID NO: 4410727 - DNA, 25 bp, Homo sapien
agatgggcaaactcaagttcatggt

SEQ ID NO: 4410728 - DNA, 25 bp, Homo sapien
ctaatcaggatagtcaagatgggca

SEQ ID NO: 4410729 - DNA, 25 bp, Homo sapien
taagggctatgttttagcactagtg

SEQ ID NO: 4410730 - DNA, 25 bp, Homo sapien
tccggggaggagcatttatcattaa

SEQ ID NO: 4410731 - DNA, 25 bp, Homo sapien
ttttagcactagtgagcgggcagct

SEQ ID NO: 4410732 - DNA, 25 bp, Homo sapien
ctgtgcaggacaggggcagtttcca

SEQ ID NO: 4410733 - DNA, 25 bp, Homo sapien
caaaagatgcccattcattgtaaat

SEQ ID NO: 4410734 - DNA, 25 bp, Homo sapien
ggtctccagtcccacagcaacataa

SEQ ID NO: 4410735 - DNA, 25 bp, Homo sapien
tgtcttgcaaatcctttgagtcgcc

SEQ ID NO: 4410736 - DNA, 25 bp, Homo sapien
cttggagacttccagtaaggaaaat

SEQ ID NO: 4410737 - DNA, 25 bp, Homo sapien
gagtttttttcaacattcgcatacc

SEQ ID NO: 4410738 - DNA, 25 bp, Homo sapien
agtttttttcaacattcgcatacct

SEQ ID NO: 4410739 - DNA, 25 bp, Homo sapien
tgagtgagtggaacaggtaagactt

SEQ ID NO: 4410740 - DNA, 25 bp, Homo sapien
cagtgggcagtgtacagacataacc

SEQ ID NO: 4410741 - DNA, 25 bp, Homo sapien
gtaagacttgactccggacacactg

SEQ ID NO: 4410742 - DNA, 25 bp, Homo sapien
gacacactggcagcggttgggcatc

SEQ ID NO: 4410743 - DNA, 25 bp, Homo sapien
ggtcgcgggcccaccacgtcagctg

SEQ ID NO: 4410744 - DNA, 25 bp, Homo sapien
ggcccaccacgtcagctgtgtggtc

SEQ ID NO: 4410745 - DNA, 25 bp, Homo sapien
cagcgctgggtcgcgggcccaccac

SEQ ID NO: 4410746 - DNA, 25 bp, Homo sapien
gcgggcccaccacgtcagctgtgtg

SEQ ID NO: 4410747 - DNA, 25 bp, Homo sapien
cagaatcctgtgttttagggggtat

SEQ ID NO: 4410748 - DNA, 25 bp, Homo sapien
cctttggactaaaggttctgccaat

SEQ ID NO: 4410749 - DNA, 25 bp, Homo sapien
ttggactaaaggttctgccaatgtt

SEQ ID NO: 4410750 - DNA, 25 bp, Homo sapien
gggtatgccatcatatttacaaggt

SEQ ID NO: 4410751 - DNA, 25 bp, Homo sapien
tccttgctaggagtcggtgctttat

SEQ ID NO: 4410752 - DNA, 25 bp, Homo sapien
gagtcggtgctttatacacgtcacc

SEQ ID NO: 4410753 - DNA, 25 bp, Homo sapien
ctttgacgtccagcgccccttgggt

SEQ ID NO: 4410754 - DNA, 25 bp, Homo sapien
attgtgctcctctttgacgtccagc

SEQ ID NO: 4410755 - DNA, 25 bp, Homo sapien
taaaaggcgtctctccagcagaagc

SEQ ID NO: 4410756 - DNA, 25 bp, Homo sapien
cacacagtgaagtgttaaaaggcgt

SEQ ID NO: 4410757 - DNA, 25 bp, Homo sapien
gaagtgttaaaaggcgtctctccag

SEQ ID NO: 4410758 - DNA, 25 bp, Homo sapien
acagtgaagtgttaaaaggcgtctc

SEQ ID NO: 4410759 - DNA, 25 bp, Homo sapien
gtctgcacaaaccacatcctatgtt

SEQ ID NO: 4410760 - DNA, 25 bp, Homo sapien
tctgcacaaaccacatcctatgttc

SEQ ID NO: 4410761 - DNA, 25 bp, Homo sapien
ggcttggcccactcggatgcagcca

SEQ ID NO: 4410762 - DNA, 25 bp, Homo sapien
tgtgtccatgggtatgccagtcacc

SEQ ID NO: 4410763 - DNA, 25 bp, Homo sapien
acgctcgcgcaagttctccaggctt

SEQ ID NO: 4410764 - DNA, 25 bp, Homo sapien
gtcaccctgacgcagagccaagagc

SEQ ID NO: 4410765 - DNA, 25 bp, Homo sapien
ctgttagtgtcactgaccacgaagc

SEQ ID NO: 4410766 - DNA, 25 bp, Homo sapien
tgttagtgtcactgaccacgaagca

SEQ ID NO: 4410767 - DNA, 25 bp, Homo sapien
ttagtgtcactgaccacgaagcaat

SEQ ID NO: 4410768 - DNA, 25 bp, Homo sapien
gttagtgtcactgaccacgaagcaa

SEQ ID NO: 4410769 - DNA, 25 bp, Homo sapien
acagatattgaaggtgtcacaggaa

SEQ ID NO: 4410770 - DNA, 25 bp, Homo sapien
tccacattggacatcctccatggat

SEQ ID NO: 4410771 - DNA, 25 bp, Homo sapien
ggaaaatcgaagtgtccttccacat

SEQ ID NO: 4410772 - DNA, 25 bp, Homo sapien
cctccatggatgctcggatgctgtg

SEQ ID NO: 4410773 - DNA, 25 bp, Homo sapien
catttctccaaacctgacaatggga

SEQ ID NO: 4410774 - DNA, 25 bp, Homo sapien
atttctccaaacctgacaatgggag

SEQ ID NO: 4410775 - DNA, 25 bp, Homo sapien
tttctccaaacctgacaatgggagt

SEQ ID NO: 4410776 - DNA, 25 bp, Homo sapien
tcatttctccaaacctgacaatggg

SEQ ID NO: 4410777 - DNA, 25 bp, Homo sapien
tcttctttaactatctcagcttgtc

SEQ ID NO: 4410778 - DNA, 25 bp, Homo sapien
aggggtgttctcatgtatctcttca

SEQ ID NO: 4410779 - DNA, 25 bp, Homo sapien
cttgttgccctcaaaatcaggggtg

SEQ ID NO: 4410780 - DNA, 25 bp, Homo sapien
caaaatcaggggtgttctcatgtat

SEQ ID NO: 4410781 - DNA, 25 bp, Homo sapien
gggatccgtggattctcttgttagg

SEQ ID NO: 4410782 - DNA, 25 bp, Homo sapien
cacctgagaagatttggggatccgt

SEQ ID NO: 4410783 - DNA, 25 bp, Homo sapien
tgtcttcagaatagaaaacgcaaaa

SEQ ID NO: 4410784 - DNA, 25 bp, Homo sapien
aaactacagcatttgttgttgatac

SEQ ID NO: 4410785 - DNA, 25 bp, Homo sapien
tggctttgtcttggggaaaagctgc

SEQ ID NO: 4410786 - DNA, 25 bp, Homo sapien
tcttggggaaaagctgccaggttcc

SEQ ID NO: 4410787 - DNA, 25 bp, Homo sapien
tgtcttggggaaaagctgccaggtt

SEQ ID NO: 4410788 - DNA, 25 bp, Homo sapien
ctttgtcttggggaaaagctgccag

SEQ ID NO: 4410789 - DNA, 25 bp, Homo sapien
ttccgatgcagaaggcggcactgaa

SEQ ID NO: 4410790 - DNA, 25 bp, Homo sapien
cacaggcgcatttgtcagctgcagg

SEQ ID NO: 4410791 - DNA, 25 bp, Homo sapien
gaatgctgcacaggcttccgatgca

SEQ ID NO: 4410792 - DNA, 25 bp, Homo sapien
gaattgtaagatcccacagactcag

SEQ ID NO: 4410793 - DNA, 25 bp, Homo sapien
ctgctgggatgcgatactgttgttg

SEQ ID NO: 4410794 - DNA, 25 bp, Homo sapien
gggatgcgatactgttgttgaaagt

SEQ ID NO: 4410795 - DNA, 25 bp, Homo sapien
tgctgggatgcgatactgttgttga

SEQ ID NO: 4410796 - DNA, 25 bp, Homo sapien
ctgggatgcgatactgttgttgaaa

SEQ ID NO: 4410797 - DNA, 25 bp, Homo sapien
cacaacctggtactcaaggatatta

SEQ ID NO: 4410798 - DNA, 25 bp, Homo sapien
gcaatacctctgtccacaacctggt

SEQ ID NO: 4410799 - DNA, 25 bp, Homo sapien
ttagcaagagcttgaggaactcctc

SEQ ID NO: 4410800 - DNA, 25 bp, Homo sapien
caaggatattagcaagagcttgagg

SEQ ID NO: 4410801 - DNA, 25 bp, Homo sapien
gctgagagaacaaaggcgtgattga

SEQ ID NO: 4410802 - DNA, 25 bp, Homo sapien
gaggacgaaggtgtctgctggctta

SEQ ID NO: 4410803 - DNA, 25 bp, Homo sapien
gaaatgcagaggcacataaagacct

SEQ ID NO: 4410804 - DNA, 25 bp, Homo sapien
taaagacctaagttcagactgcatg

SEQ ID NO: 4410805 - DNA, 25 bp, Homo sapien
gagctgctgccggattcgaatagca

SEQ ID NO: 4410806 - DNA, 25 bp, Homo sapien
gcaggtttccccgagtgccagccgg

SEQ ID NO: 4410807 - DNA, 25 bp, Homo sapien
ttccccgagtgccagccgggagctg

SEQ ID NO: 4410808 - DNA, 25 bp, Homo sapien
ggattcgaatagcacctctctccat

SEQ ID NO: 4410809 - DNA, 25 bp, Homo sapien
gatgcctgtgtaagcagctgagcat

SEQ ID NO: 4410810 - DNA, 25 bp, Homo sapien
cagatgcctgtgtaagcagctgagc

SEQ ID NO: 4410811 - DNA, 25 bp, Homo sapien
tgcctgggcacacttcgcccacccc

SEQ ID NO: 4410812 - DNA, 25 bp, Homo sapien
agcagatgcctgtgtaagcagctga

SEQ ID NO: 4410813 - DNA, 25 bp, Homo sapien
catggggcccctgcaatgggcctga

SEQ ID NO: 4410814 - DNA, 25 bp, Homo sapien
ggatacagcccctcgacagcaggtc

SEQ ID NO: 4410815 - DNA, 25 bp, Homo sapien
tctgcaccacactgcagtactaggc

SEQ ID NO: 4410816 - DNA, 25 bp, Homo sapien
actgcagtactaggcatcattttac

SEQ ID NO: 4410817 - DNA, 25 bp, Homo sapien
agaggcccttaagagattggccagt

SEQ ID NO: 4410818 - DNA, 25 bp, Homo sapien
tacttgtgttcctactgagctccat

SEQ ID NO: 4410819 - DNA, 25 bp, Homo sapien
cccttaagagattggccagtgtact

SEQ ID NO: 4410820 - DNA, 25 bp, Homo sapien
ggccagtgtacttgtgttcctactg

SEQ ID NO: 4410821 - DNA, 25 bp, Homo sapien
tcaggtattgcgaagtccacgggct

SEQ ID NO: 4410822 - DNA, 25 bp, Homo sapien
tcaacactcgcaagataaaacacac

SEQ ID NO: 4410823 - DNA, 25 bp, Homo sapien
atcttctccgacaattctgccttga

SEQ ID NO: 4410824 - DNA, 25 bp, Homo sapien
aacttttccacagatctgccccatt

SEQ ID NO: 4410825 - DNA, 25 bp, Homo sapien
tgctctgagggcgaagcgactctct

SEQ ID NO: 4410826 - DNA, 25 bp, Homo sapien
ctttgtttctgaagtgcccagctca

SEQ ID NO: 4410827 - DNA, 25 bp, Homo sapien
gcctggcacatgaaagaaactcaga

SEQ ID NO: 4410828 - DNA, 25 bp, Homo sapien
tcaagtctgtctccccgactagagg

SEQ ID NO: 4410829 - DNA, 25 bp, Homo sapien
atgatatgatactcatcatcacata

SEQ ID NO: 4410830 - DNA, 25 bp, Homo sapien
tgatatgatactcatcatcacataa

SEQ ID NO: 4410831 - DNA, 25 bp, Homo sapien
tatgatactcatcatcacataaaag

SEQ ID NO: 4410832 - DNA, 25 bp, Homo sapien
gatatgatactcatcatcacataaa

SEQ ID NO: 4410833 - DNA, 25 bp, Homo sapien
actgtaggattaagatgacatgaca

SEQ ID NO: 4410834 - DNA, 25 bp, Homo sapien
agatgacatgacaatgaaagcacat

SEQ ID NO: 4410835 - DNA, 25 bp, Homo sapien
aggaactgtaggattaagatgacat

SEQ ID NO: 4410836 - DNA, 25 bp, Homo sapien
gaactgtaggattaagatgacatga

SEQ ID NO: 4410837 - DNA, 25 bp, Homo sapien
gaaagagagaatacgatgcacacac

SEQ ID NO: 4410838 - DNA, 25 bp, Homo sapien
aaagagagaatacgatgcacacaca

SEQ ID NO: 4410839 - DNA, 25 bp, Homo sapien
ctgaaagagagaatacgatgcacac

SEQ ID NO: 4410840 - DNA, 25 bp, Homo sapien
agagaatacgatgcacacacataat

SEQ ID NO: 4410841 - DNA, 25 bp, Homo sapien
ttttcagaagtaacgcgtagaccca

SEQ ID NO: 4410842 - DNA, 25 bp, Homo sapien
agaactcggcacattcacacactgc

SEQ ID NO: 4410843 - DNA, 25 bp, Homo sapien
ccaggtcgctcagctgacgtggaga

SEQ ID NO: 4410844 - DNA, 25 bp, Homo sapien
ggcccagcgcggtccattttgtcca

SEQ ID NO: 4410845 - DNA, 25 bp, Homo sapien
tagcaatcaacctttcaccggccaa

SEQ ID NO: 4410846 - DNA, 25 bp, Homo sapien
tagaaccaactttcggagctcagga

SEQ ID NO: 4410847 - DNA, 25 bp, Homo sapien
ggagaatccagaggccatgcccttc

SEQ ID NO: 4410848 - DNA, 25 bp, Homo sapien
tcaggaagaataccccatagcaatc

SEQ ID NO: 4410849 - DNA, 25 bp, Homo sapien
tggggtttctagtagtacaggtgta

SEQ ID NO: 4410850 - DNA, 25 bp, Homo sapien
tgtgattgtcccatcggtggttctc

SEQ ID NO: 4410851 - DNA, 25 bp, Homo sapien
gcttctatttctactggggtttcta

SEQ ID NO: 4410852 - DNA, 25 bp, Homo sapien
tcttcttgtcttagtgatgattttt

SEQ ID NO: 4410853 - DNA, 25 bp, Homo sapien
ggctgtcccaggcatggctgctcag

SEQ ID NO: 4410854 - DNA, 25 bp, Homo sapien
ctcaggtggctgctctcagtgtggc

SEQ ID NO: 4410855 - DNA, 25 bp, Homo sapien
gctgtcccaggcatggctgctcaga

SEQ ID NO: 4410856 - DNA, 25 bp, Homo sapien
gctgctctcagtgtggctgtcccag

SEQ ID NO: 4410857 - DNA, 25 bp, Homo sapien
atgactgtcctgaggacggctgcgt

SEQ ID NO: 4410858 - DNA, 25 bp, Homo sapien
ctacatgggcaactctggcgtctca

SEQ ID NO: 4410859 - DNA, 25 bp, Homo sapien
gctgctcttggcatgactgtcctga

SEQ ID NO: 4410860 - DNA, 25 bp, Homo sapien
atgggcaactctggcgtctcaggtg

SEQ ID NO: 4410861 - DNA, 25 bp, Homo sapien
atgtgtttctgagacggttgtgcca

SEQ ID NO: 4410862 - DNA, 25 bp, Homo sapien
ttgttaccccttaatcatgtgtttc

SEQ ID NO: 4410863 - DNA, 25 bp, Homo sapien
cattttgttctcatggtgtttgttg

SEQ ID NO: 4410864 - DNA, 25 bp, Homo sapien
tttctgagacggttgtgccaggcat

SEQ ID NO: 4410865 - DNA, 25 bp, Homo sapien
tgtccatatgtgacgtggaagcccc

SEQ ID NO: 4410866 - DNA, 25 bp, Homo sapien
tgttaatctacaggtttccactccc

SEQ ID NO: 4410867 - DNA, 25 bp, Homo sapien
gggctttagtttcaccccacatgtg

SEQ ID NO: 4410868 - DNA, 25 bp, Homo sapien
ggagctcaattatgaaacctcgtct

SEQ ID NO: 4410869 - DNA, 25 bp, Homo sapien
gcccctgcttgtggctttgtcccct

SEQ ID NO: 4410870 - DNA, 25 bp, Homo sapien
ggccattaatgtcccctgcccctgc

SEQ ID NO: 4410871 - DNA, 25 bp, Homo sapien
gctttgtcccctggccattaatgtc

SEQ ID NO: 4410872 - DNA, 25 bp, Homo sapien
ctgcccctgcttgtggctttgtccc

SEQ ID NO: 4410873 - DNA, 25 bp, Homo sapien
gaccatgcttcagcgggcacggcat

SEQ ID NO: 4410874 - DNA, 25 bp, Homo sapien
tgcttcagcgggcacggcattccca

SEQ ID NO: 4410875 - DNA, 25 bp, Homo sapien
tacagaatgaccatgcttcagcggg

SEQ ID NO: 4410876 - DNA, 25 bp, Homo sapien
aatgaccatgcttcagcgggcacgg

SEQ ID NO: 4410877 - DNA, 25 bp, Homo sapien
gcaggaaagattcacccttcactgg

SEQ ID NO: 4410878 - DNA, 25 bp, Homo sapien
gattcacccttcactggcggctctg

SEQ ID NO: 4410879 - DNA, 25 bp, Homo sapien
gttgtgggagcaggaaagattcacc

SEQ ID NO: 4410880 - DNA, 25 bp, Homo sapien
tgtgggagcaggaaagattcaccct

SEQ ID NO: 4410881 - DNA, 25 bp, Homo sapien
catattcacttgctcgtcagtatca

SEQ ID NO: 4410882 - DNA, 25 bp, Homo sapien
caggatgctcccgtgagacgtggcc

SEQ ID NO: 4410883 - DNA, 25 bp, Homo sapien
tcccatcggagcaggcaggcaaaag

SEQ ID NO: 4410884 - DNA, 25 bp, Homo sapien
ggcccgtttctttgctcccatcgga

SEQ ID NO: 4410885 - DNA, 25 bp, Homo sapien
gggtactgttttgcacagggtgtac

SEQ ID NO: 4410886 - DNA, 25 bp, Homo sapien
ctgtcttgcatgaggggtactgttt

SEQ ID NO: 4410887 - DNA, 25 bp, Homo sapien
tttgcacagggtgtaccctccttca

SEQ ID NO: 4410888 - DNA, 25 bp, Homo sapien
gcatgaggggtactgttttgcacag

SEQ ID NO: 4410889 - DNA, 25 bp, Homo sapien
caatgggggtactgtcctacaccag

SEQ ID NO: 4410890 - DNA, 25 bp, Homo sapien
aatgggggtactgtcctacaccagg

SEQ ID NO: 4410891 - DNA, 25 bp, Homo sapien
ctgcaatgggggtactgtcctacac

SEQ ID NO: 4410892 - DNA, 25 bp, Homo sapien
gcaatgggggtactgtcctacacca

SEQ ID NO: 4410893 - DNA, 25 bp, Homo sapien
tcacttgttgtatggtcccgcaccg

SEQ ID NO: 4410894 - DNA, 25 bp, Homo sapien
cacagtgtactgttctacatgaggg

SEQ ID NO: 4410895 - DNA, 25 bp, Homo sapien
cactgggggtaccatcctgtacaag

SEQ ID NO: 4410896 - DNA, 25 bp, Homo sapien
gcaccgagggtactgttctgcacag

SEQ ID NO: 4410897 - DNA, 25 bp, Homo sapien
gaccatcagatttcactttccggga

SEQ ID NO: 4410898 - DNA, 25 bp, Homo sapien
gcaaagagctgaacgaatgacccct

SEQ ID NO: 4410899 - DNA, 25 bp, Homo sapien
gagaatgagctggagtaacctcgat

SEQ ID NO: 4410900 - DNA, 25 bp, Homo sapien
agtctggaccgcagaaatgttcaca

SEQ ID NO: 4410901 - DNA, 25 bp, Homo sapien
gaaccagtagctgattcaaagcaaa

SEQ ID NO: 4410902 - DNA, 25 bp, Homo sapien
tcttcaaatctaagagtgcctggct

SEQ ID NO: 4410903 - DNA, 25 bp, Homo sapien
tttggactgagtttgcggcacttgc

SEQ ID NO: 4410904 - DNA, 25 bp, Homo sapien
tacctacaactatgccaaaactgga

SEQ ID NO: 4410905 - DNA, 25 bp, Homo sapien
tgatcctcagaatttgattccccat

SEQ ID NO: 4410906 - DNA, 25 bp, Homo sapien
ctgtttcctgatcctcagaatttga

SEQ ID NO: 4410907 - DNA, 25 bp, Homo sapien
tcctgatcctcagaatttgattccc

SEQ ID NO: 4410908 - DNA, 25 bp, Homo sapien
tgtttcctgatcctcagaatttgat

SEQ ID NO: 4410909 - DNA, 25 bp, Homo sapien
cgatccttaggtgtgaatccctggc

SEQ ID NO: 4410910 - DNA, 25 bp, Homo sapien
ctggccatgagcctctcgatcctta

SEQ ID NO: 4410911 - DNA, 25 bp, Homo sapien
gagcctctcgatccttaggtgtgaa

SEQ ID NO: 4410912 - DNA, 25 bp, Homo sapien
gatccttaggtgtgaatccctggca

SEQ ID NO: 4410913 - DNA, 25 bp, Homo sapien
tgagaaccgcttccactagtgaaac

SEQ ID NO: 4410914 - DNA, 25 bp, Homo sapien
tccttggactcaaccaacttctcag

SEQ ID NO: 4410915 - DNA, 25 bp, Homo sapien
aggtcaagcctacttggctggcctg

SEQ ID NO: 4410916 - DNA, 25 bp, Homo sapien
tcttggcaggtcaagcctacttggc

SEQ ID NO: 4410917 - DNA, 25 bp, Homo sapien
ataactgtttctgggcacaagataa

SEQ ID NO: 4410918 - DNA, 25 bp, Homo sapien
ggagtcattacacgcacatgccagt

SEQ ID NO: 4410919 - DNA, 25 bp, Homo sapien
ccagtgccaagggtctcataccctt

SEQ ID NO: 4410920 - DNA, 25 bp, Homo sapien
cagatgtatgccactccctcaacca

SEQ ID NO: 4410921 - DNA, 25 bp, Homo sapien
ccctggtgtcagatgactgacagga

SEQ ID NO: 4410922 - DNA, 25 bp, Homo sapien
gctgccagtgtctctaaacagctcc

SEQ ID NO: 4410923 - DNA, 25 bp, Homo sapien
tgtctctaaacagctcctttgcttt

SEQ ID NO: 4410924 - DNA, 25 bp, Homo sapien
cagtgtctctaaacagctcctttgc

SEQ ID NO: 4410925 - DNA, 25 bp, Homo sapien
tgcacttgattgcaacctctgtggg

SEQ ID NO: 4410926 - DNA, 25 bp, Homo sapien
tggtctgaagagccgcgcatggcaa

SEQ ID NO: 4410927 - DNA, 25 bp, Homo sapien
gagcttcttcacagtcagggaaaca

SEQ ID NO: 4410928 - DNA, 25 bp, Homo sapien
tccaaatggaaagagcccatcgcag

SEQ ID NO: 4410929 - DNA, 25 bp, Homo sapien
tcctcgccttgataaaaatcagtca

SEQ ID NO: 4410930 - DNA, 25 bp, Homo sapien
ctgtcctcgccttgataaaaatcag

SEQ ID NO: 4410931 - DNA, 25 bp, Homo sapien
tctgtcctcgccttgataaaaatca

SEQ ID NO: 4410932 - DNA, 25 bp, Homo sapien
tgtcctcgccttgataaaaatcagt

SEQ ID NO: 4410933 - DNA, 25 bp, Homo sapien
ggagtcatgcgcacgctgccttttg

SEQ ID NO: 4410934 - DNA, 25 bp, Homo sapien
ccttttgatgacgatgccagcatga

SEQ ID NO: 4410935 - DNA, 25 bp, Homo sapien
ccagcatgaagaggtggcctaccca

SEQ ID NO: 4410936 - DNA, 25 bp, Homo sapien
gcatgaagaggtggcctacccacag

SEQ ID NO: 4410937 - DNA, 25 bp, Homo sapien
cactcccttgggtcagtagatgccg

SEQ ID NO: 4410938 - DNA, 25 bp, Homo sapien
caagggtttccttcgtcagtagaga

SEQ ID NO: 4410939 - DNA, 25 bp, Homo sapien
aggttctaccacagctgggtccgaa

SEQ ID NO: 4410940 - DNA, 25 bp, Homo sapien
tcagtagagatagcatgggccactt

SEQ ID NO: 4410941 - DNA, 25 bp, Homo sapien
cctgggcaggcaataggattccaac

SEQ ID NO: 4410942 - DNA, 25 bp, Homo sapien
gagcacctgggcaggcaataggatt

SEQ ID NO: 4410943 - DNA, 25 bp, Homo sapien
tcagcagccccttgataccccaggg

SEQ ID NO: 4410944 - DNA, 25 bp, Homo sapien
caaccccaggtgtggtgataggcca

SEQ ID NO: 4410945 - DNA, 25 bp, Homo sapien
gaatgtggctacatctgtctcatta

SEQ ID NO: 4410946 - DNA, 25 bp, Homo sapien
gctaaactcaaagaactgcccctca

SEQ ID NO: 4410947 - DNA, 25 bp, Homo sapien
ccgactctgccttaacgttaggaca

SEQ ID NO: 4410948 - DNA, 25 bp, Homo sapien
tgccttggcttttatccgactctgc

SEQ ID NO: 4410949 - DNA, 25 bp, Homo sapien
ggcacttagttgcagttagattcca

SEQ ID NO: 4410950 - DNA, 25 bp, Homo sapien
ctggtacagggcacggcacttagtt

SEQ ID NO: 4410951 - DNA, 25 bp, Homo sapien
tgcagttagattccataggtaattg

SEQ ID NO: 4410952 - DNA, 25 bp, Homo sapien
ggcacggcacttagttgcagttaga

SEQ ID NO: 4410953 - DNA, 25 bp, Homo sapien
tgtgttccaccactgtccttctcgt

SEQ ID NO: 4410954 - DNA, 25 bp, Homo sapien
ctgctccgtccctctgcagagcatg

SEQ ID NO: 4410955 - DNA, 25 bp, Homo sapien
ccaggcccatgggtgtgttccacca

SEQ ID NO: 4410956 - DNA, 25 bp, Homo sapien
gctccgtccctctgcagagcatgct

SEQ ID NO: 4410957 - DNA, 25 bp, Homo sapien
ccagaaagctcggaagtgacttagt

SEQ ID NO: 4410958 - DNA, 25 bp, Homo sapien
agctcggaagtgacttagttcattc

SEQ ID NO: 4410959 - DNA, 25 bp, Homo sapien
aatgtgtagccagaaagctcggaag

SEQ ID NO: 4410960 - DNA, 25 bp, Homo sapien
tgtagccagaaagctcggaagtgac

SEQ ID NO: 4410961 - DNA, 25 bp, Homo sapien
taagacaccggtgctccttgttcca

SEQ ID NO: 4410962 - DNA, 25 bp, Homo sapien
aacgcaagaatgaggaggtgctaac

SEQ ID NO: 4410963 - DNA, 25 bp, Homo sapien
tcttccttaagctcggcacatgtgc

SEQ ID NO: 4410964 - DNA, 25 bp, Homo sapien
ccctgcatgtgtgatccggtaaaat

SEQ ID NO: 4410965 - DNA, 25 bp, Homo sapien
ttcgcagctattgcaggagccctcc

SEQ ID NO: 4410966 - DNA, 25 bp, Homo sapien
tcagtcccattttcgcagctattgc

SEQ ID NO: 4410967 - DNA, 25 bp, Homo sapien
cagctcagtcccattttcgcagcta

SEQ ID NO: 4410968 - DNA, 25 bp, Homo sapien
cccattttcgcagctattgcaggag

SEQ ID NO: 4410969 - DNA, 25 bp, Homo sapien
gactgccagtgcttccgtgcaaggc

SEQ ID NO: 4410970 - DNA, 25 bp, Homo sapien
ggcagcatctggacccccttgtttt

SEQ ID NO: 4410971 - DNA, 25 bp, Homo sapien
gcttccgtgcaaggcggaccacaga

SEQ ID NO: 4410972 - DNA, 25 bp, Homo sapien
tggacgaagctagaacatagaaggc

SEQ ID NO: 4410973 - DNA, 25 bp, Homo sapien
tatctattatcgctggcttctactt

SEQ ID NO: 4410974 - DNA, 25 bp, Homo sapien
ttatctattatcgctggcttctact

SEQ ID NO: 4410975 - DNA, 25 bp, Homo sapien
atctattatcgctggcttctacttc

SEQ ID NO: 4410976 - DNA, 25 bp, Homo sapien
cttcttcctttaacacgggcttgat

SEQ ID NO: 4410977 - DNA, 25 bp, Homo sapien
tttaacacgggcttgatccaagttc

SEQ ID NO: 4410978 - DNA, 25 bp, Homo sapien
gggcttgatccaagttcccttaagc

SEQ ID NO: 4410979 - DNA, 25 bp, Homo sapien
cttgatccaagttcccttaagccag

SEQ ID NO: 4410980 - DNA, 25 bp, Homo sapien
agtcttctggaggggggagaccaca

SEQ ID NO: 4410981 - DNA, 25 bp, Homo sapien
gcattttctgcaaaccccggatgtg

SEQ ID NO: 4410982 - DNA, 25 bp, Homo sapien
cagcacactggtggttgctggatcc

SEQ ID NO: 4410983 - DNA, 25 bp, Homo sapien
cctgaatgccggcacagcacactgg

SEQ ID NO: 4410984 - DNA, 25 bp, Homo sapien
tgtgcacactcatcatctactgcag

SEQ ID NO: 4410985 - DNA, 25 bp, Homo sapien
gtttccgcactgtaactattcccat

SEQ ID NO: 4410986 - DNA, 25 bp, Homo sapien
tgtaactattcccatccccagccag

SEQ ID NO: 4410987 - DNA, 25 bp, Homo sapien
tgtgcttcagtttccgcactgtaac

SEQ ID NO: 4410988 - DNA, 25 bp, Homo sapien
cttcagtttccgcactgtaactatt

SEQ ID NO: 4410989 - DNA, 25 bp, Homo sapien
ctttatgaagaccatctttcccatt

SEQ ID NO: 4410990 - DNA, 25 bp, Homo sapien
tctgagacacgcagtgttctccatc

SEQ ID NO: 4410991 - DNA, 25 bp, Homo sapien
ttgccacttcggctgagctgagctc

SEQ ID NO: 4410992 - DNA, 25 bp, Homo sapien
gctgagctgagctctctcattataa

SEQ ID NO: 4410993 - DNA, 25 bp, Homo sapien
agtgtgattgccacttcggctgagc

SEQ ID NO: 4410994 - DNA, 25 bp, Homo sapien
gtgaacagtcacttccaggggcaca

SEQ ID NO: 4410995 - DNA, 25 bp, Homo sapien
tgaacagtcacttccaggggcacaa

SEQ ID NO: 4410996 - DNA, 25 bp, Homo sapien
tgtgaacagtcacttccaggggcac

SEQ ID NO: 4410997 - DNA, 25 bp, Homo sapien
gtggctttagagttgcagacttaaa

SEQ ID NO: 4410998 - DNA, 25 bp, Homo sapien
ctttagagttgcagacttaaacggg

SEQ ID NO: 4410999 - DNA, 25 bp, Homo sapien
taaacgggggcagcaaaaggatgcc

SEQ ID NO: 4411000 - DNA, 25 bp, Homo sapien
cttaaacgggggcagcaaaaggatg

SEQ ID NO: 4411001 - DNA, 25 bp, Homo sapien
gggtccggcctttccaagcaggaca

SEQ ID NO: 4411002 - DNA, 25 bp, Homo sapien
gggacgtggcattgcctaagtaggg

SEQ ID NO: 4411003 - DNA, 25 bp, Homo sapien
cgtggcattgcctaagtagggctct

SEQ ID NO: 4411004 - DNA, 25 bp, Homo sapien
gacgtggcattgcctaagtagggct

SEQ ID NO: 4411005 - DNA, 25 bp, Homo sapien
gacacaacagaccttccaggaactc

SEQ ID NO: 4411006 - DNA, 25 bp, Homo sapien
ggaactctggaatgtcttaaaaatc

SEQ ID NO: 4411007 - DNA, 25 bp, Homo sapien
agccgggaccctcagacacaacaga

SEQ ID NO: 4411008 - DNA, 25 bp, Homo sapien
ggaccctcagacacaacagaccttc

SEQ ID NO: 4411009 - DNA, 25 bp, Homo sapien
cacagtgtggcatcccagacactgg

SEQ ID NO: 4411010 - DNA, 25 bp, Homo sapien
tgctacaaatgaaggtgccaaccag

SEQ ID NO: 4411011 - DNA, 25 bp, Homo sapien
tccaactccagggtaacgtgctaca

SEQ ID NO: 4411012 - DNA, 25 bp, Homo sapien
cagccacagtgtggcatcccagaca

SEQ ID NO: 4411013 - DNA, 25 bp, Homo sapien
cattcccttgtggttcatgtggaca

SEQ ID NO: 4411014 - DNA, 25 bp, Homo sapien
tgaactcaggtcatacaatgccagg

SEQ ID NO: 4411015 - DNA, 25 bp, Homo sapien
catgtggacatggaagtaaggccca

SEQ ID NO: 4411016 - DNA, 25 bp, Homo sapien
caaagagaagaggagtgtaacacac

SEQ ID NO: 4411017 - DNA, 25 bp, Homo sapien
actacctgaccctgccaagcagaga

SEQ ID NO: 4411018 - DNA, 25 bp, Homo sapien
ctacctgaccctgccaagcagagaa

SEQ ID NO: 4411019 - DNA, 25 bp, Homo sapien
gactacctgaccctgccaagcagag

SEQ ID NO: 4411020 - DNA, 25 bp, Homo sapien
ggactacctgaccctgccaagcaga

SEQ ID NO: 4411021 - DNA, 25 bp, Homo sapien
tgtgtgcacagagaacgtattccat

SEQ ID NO: 4411022 - DNA, 25 bp, Homo sapien
ctgtgtgcacagagaacgtattcca

SEQ ID NO: 4411023 - DNA, 25 bp, Homo sapien
ccttgacttgacaggacccaggctg

SEQ ID NO: 4411024 - DNA, 25 bp, Homo sapien
tgccccaggtcgtccactggactgt

SEQ ID NO: 4411025 - DNA, 25 bp, Homo sapien
caggctccccttgatctgacagcag

SEQ ID NO: 4411026 - DNA, 25 bp, Homo sapien
tctgagggacagctcaaataacatt

SEQ ID NO: 4411027 - DNA, 25 bp, Homo sapien
agctctgcaactgccggaattccat

SEQ ID NO: 4411028 - DNA, 25 bp, Homo sapien
aggaagctctgcaactgccggaatt

SEQ ID NO: 4411029 - DNA, 25 bp, Homo sapien
ggagcatgcggcctcagtgatgcca

SEQ ID NO: 4411030 - DNA, 25 bp, Homo sapien
ttttcctctgtggagcatgcggcct

SEQ ID NO: 4411031 - DNA, 25 bp, Homo sapien
tataaatactgcctacaagacatgc

SEQ ID NO: 4411032 - DNA, 25 bp, Homo sapien
acaatgcactaggatttcaacctgg

SEQ ID NO: 4411033 - DNA, 25 bp, Homo sapien
gcatttactctgtcccaagcgcagg

SEQ ID NO: 4411034 - DNA, 25 bp, Homo sapien
caaggaaggtaggacatttctccaa

SEQ ID NO: 4411035 - DNA, 25 bp, Homo sapien
cctttctagacttcctgagagagct

SEQ ID NO: 4411036 - DNA, 25 bp, Homo sapien
gaacaaataactcatacaggtgcct

SEQ ID NO: 4411037 - DNA, 25 bp, Homo sapien
agttaaacatgaatgggccaagccc

SEQ ID NO: 4411038 - DNA, 25 bp, Homo sapien
cccttcttatgatgaaacttctctc

SEQ ID NO: 4411039 - DNA, 25 bp, Homo sapien
tgtttcaaagttatgacaagcagcc

SEQ ID NO: 4411040 - DNA, 25 bp, Homo sapien
ggagctggtgtttcaaagttatgac

SEQ ID NO: 4411041 - DNA, 25 bp, Homo sapien
gagctggtgtttcaaagttatgaca

SEQ ID NO: 4411042 - DNA, 25 bp, Homo sapien
ctggtgtttcaaagttatgacaagc

SEQ ID NO: 4411043 - DNA, 25 bp, Homo sapien
tatatccctgataaaatcgttcagt

SEQ ID NO: 4411044 - DNA, 25 bp, Homo sapien
ttctcatcccaatagatggaacatt

SEQ ID NO: 4411045 - DNA, 25 bp, Homo sapien
caccacaaccattaaagctagcttc

SEQ ID NO: 4411046 - DNA, 25 bp, Homo sapien
cgttcagttgatagcatttcacaaa

SEQ ID NO: 4411047 - DNA, 25 bp, Homo sapien
tcctgggttgtagaatatgcaagac

SEQ ID NO: 4411048 - DNA, 25 bp, Homo sapien
caaaccctgctgtaggaatgcagac

SEQ ID NO: 4411049 - DNA, 25 bp, Homo sapien
cttgaataccgtggccagatgcagg

SEQ ID NO: 4411050 - DNA, 25 bp, Homo sapien
tatgcaagactaatatggaaatctt

SEQ ID NO: 4411051 - DNA, 25 bp, Homo sapien
gagcatggtttccagcccgaataac

SEQ ID NO: 4411052 - DNA, 25 bp, Homo sapien
tcagtggcagatcaaggtctttttc

SEQ ID NO: 4411053 - DNA, 25 bp, Homo sapien
cattgtgtacgctcaggtggagccc

SEQ ID NO: 4411054 - DNA, 25 bp, Homo sapien
cttccctggcgtagaagagccattg

SEQ ID NO: 4411055 - DNA, 25 bp, Homo sapien
cttgtgggaagatgtcaacagcgac

SEQ ID NO: 4411056 - DNA, 25 bp, Homo sapien
caacagcgacagagacttgcttgag

SEQ ID NO: 4411057 - DNA, 25 bp, Homo sapien
aatcgtattactggttctgatcccg

SEQ ID NO: 4411058 - DNA, 25 bp, Homo sapien
gacaggagtcgtgctgaatggcaaa

SEQ ID NO: 4411059 - DNA, 25 bp, Homo sapien
cttaagggaagagatttctgagaat

SEQ ID NO: 4411060 - DNA, 25 bp, Homo sapien
aagggaagagatttctgagaatggc

SEQ ID NO: 4411061 - DNA, 25 bp, Homo sapien
gggaagagatttctgagaatggcac

SEQ ID NO: 4411062 - DNA, 25 bp, Homo sapien
taagggaagagatttctgagaatgg

SEQ ID NO: 4411063 - DNA, 25 bp, Homo sapien
aagcagaacttaggtggtctggaag

SEQ ID NO: 4411064 - DNA, 25 bp, Homo sapien
tagggatgtcctctgaatctgggtc

SEQ ID NO: 4411065 - DNA, 25 bp, Homo sapien
gtcctctgaatctgggtcagtaggg

SEQ ID NO: 4411066 - DNA, 25 bp, Homo sapien
gaaatcagaaagcagaacttaggtg

SEQ ID NO: 4411067 - DNA, 25 bp, Homo sapien
ttcatgtggtcgtgtcccttgtcca

SEQ ID NO: 4411068 - DNA, 25 bp, Homo sapien
catgtggtcgtgtcccttgtccaca

SEQ ID NO: 4411069 - DNA, 25 bp, Homo sapien
gtcttcatgtggtcgtgtcccttgt

SEQ ID NO: 4411070 - DNA, 25 bp, Homo sapien
tcttcatgtggtcgtgtcccttgtc

SEQ ID NO: 4411071 - DNA, 25 bp, Homo sapien
gtccccagggcccacaggacatcct

SEQ ID NO: 4411072 - DNA, 25 bp, Homo sapien
ccagggcccacaggacatccttggg

SEQ ID NO: 4411073 - DNA, 25 bp, Homo sapien
gaagggacaacattcttcttccctg

SEQ ID NO: 4411074 - DNA, 25 bp, Homo sapien
ctggaagggacaacattcttcttcc

SEQ ID NO: 4411075 - DNA, 25 bp, Homo sapien
caggaatagggtccccgatggagct

SEQ ID NO: 4411076 - DNA, 25 bp, Homo sapien
gccttttcaattgtgttcccacaga

SEQ ID NO: 4411077 - DNA, 25 bp, Homo sapien
tagggtccccgatggagcttttaga

SEQ ID NO: 4411078 - DNA, 25 bp, Homo sapien
cttttcaattgtgttcccacagagg

SEQ ID NO: 4411079 - DNA, 25 bp, Homo sapien
ccaatctgcttccagttgttgtagc

SEQ ID NO: 4411080 - DNA, 25 bp, Homo sapien
tcactcccaatctgcttccagttgt

SEQ ID NO: 4411081 - DNA, 25 bp, Homo sapien
tcccaatctgcttccagttgttgta

SEQ ID NO: 4411082 - DNA, 25 bp, Homo sapien
actcccaatctgcttccagttgttg

SEQ ID NO: 4411083 - DNA, 25 bp, Homo sapien
ggtgtagcgctgaaacgtgctctga

SEQ ID NO: 4411084 - DNA, 25 bp, Homo sapien
caagttctgtatgccttccgggtca

SEQ ID NO: 4411085 - DNA, 25 bp, Homo sapien
gaaacgtgctctgaatcctgatccc

SEQ ID NO: 4411086 - DNA, 25 bp, Homo sapien
cactccaagttctgtatgccttccg

SEQ ID NO: 4411087 - DNA, 25 bp, Homo sapien
gctctgagggttttccaagaaagcc

SEQ ID NO: 4411088 - DNA, 25 bp, Homo sapien
actaccagcaactctagagcaggca

SEQ ID NO: 4411089 - DNA, 25 bp, Homo sapien
ccagtaaagcttctcaagacagctg

SEQ ID NO: 4411090 - DNA, 25 bp, Homo sapien
gaaagccaaagataacatctaagga

SEQ ID NO: 4411091 - DNA, 25 bp, Homo sapien
ccagctgttttccccccggagacat

SEQ ID NO: 4411092 - DNA, 25 bp, Homo sapien
ggagacatttgccagttctgagcat

SEQ ID NO: 4411093 - DNA, 25 bp, Homo sapien
cccccggagacatttgccagttctg

SEQ ID NO: 4411094 - DNA, 25 bp, Homo sapien
cagctgttttccccccggagacatt

SEQ ID NO: 4411095 - DNA, 25 bp, Homo sapien
tgagggagagagtgtttcctctctg

SEQ ID NO: 4411096 - DNA, 25 bp, Homo sapien
tcagatcctaacaagatcaagggta

SEQ ID NO: 4411097 - DNA, 25 bp, Homo sapien
cagatcctaacaagatcaagggtac

SEQ ID NO: 4411098 - DNA, 25 bp, Homo sapien
agccggtctacaatccacagcccac

SEQ ID NO: 4411099 - DNA, 25 bp, Homo sapien
cgaagccggtctacaatccacagcc

SEQ ID NO: 4411100 - DNA, 25 bp, Homo sapien
ctcgaagccggtctacaatccacag

SEQ ID NO: 4411101 - DNA, 25 bp, Homo sapien
aagccggtctacaatccacagccca

SEQ ID NO: 4411102 - DNA, 25 bp, Homo sapien
ccagtgaacaccggcccaggtctga

SEQ ID NO: 4411103 - DNA, 25 bp, Homo sapien
tgagctgccccaacaattcgctgtc

SEQ ID NO: 4411104 - DNA, 25 bp, Homo sapien
ccaacaattcgctgtccttcctcac

SEQ ID NO: 4411105 - DNA, 25 bp, Homo sapien
caggtctgagctgccccaacaattc

SEQ ID NO: 4411106 - DNA, 25 bp, Homo sapien
ttttgtgaaggaggacttcttgtgt

SEQ ID NO: 4411107 - DNA, 25 bp, Homo sapien
gagcttttacctttaaacatcagta

SEQ ID NO: 4411108 - DNA, 25 bp, Homo sapien
tttgtgaaggaggacttcttgtgtt

SEQ ID NO: 4411109 - DNA, 25 bp, Homo sapien
tgttctgagcttttacctttaaaca

SEQ ID NO: 4411110 - DNA, 25 bp, Homo sapien
acctgtctagcagcttccatggcca

SEQ ID NO: 4411111 - DNA, 25 bp, Homo sapien
ctgtctagcagcttccatggccagc

SEQ ID NO: 4411112 - DNA, 25 bp, Homo sapien
cctgtctagcagcttccatggccag

SEQ ID NO: 4411113 - DNA, 25 bp, Homo sapien
aactgtaaaatgtctatccctaatt

SEQ ID NO: 4411114 - DNA, 25 bp, Homo sapien
actgtaaaatgtctatccctaattt

SEQ ID NO: 4411115 - DNA, 25 bp, Homo sapien
ctgtaaaatgtctatccctaatttc

SEQ ID NO: 4411116 - DNA, 25 bp, Homo sapien
ttgaaggcagtttcttggatctccc

SEQ ID NO: 4411117 - DNA, 25 bp, Homo sapien
gactggcttctgcaggggctcctct

SEQ ID NO: 4411118 - DNA, 25 bp, Homo sapien
gatcaagactggcttctgcaggggc

SEQ ID NO: 4411119 - DNA, 25 bp, Homo sapien
actggcttctgcaggggctcctctt

SEQ ID NO: 4411120 - DNA, 25 bp, Homo sapien
tcagatcaagactggcttctgcagg

SEQ ID NO: 4411121 - DNA, 25 bp, Homo sapien
aattgcaggcggagtcatccatggc

SEQ ID NO: 4411122 - DNA, 25 bp, Homo sapien
aggagggagcgggacttatatgaca

SEQ ID NO: 4411123 - DNA, 25 bp, Homo sapien
gagcgggacttatatgacagagcaa

SEQ ID NO: 4411124 - DNA, 25 bp, Homo sapien
catgtgggaattggcaattgcaggc

SEQ ID NO: 4411125 - DNA, 25 bp, Homo sapien
tggaagcagggcaattagaataggc

SEQ ID NO: 4411126 - DNA, 25 bp, Homo sapien
taaagtggcatgagcactgacaccc

SEQ ID NO: 4411127 - DNA, 25 bp, Homo sapien
acacccatgattgagtaatggagca

SEQ ID NO: 4411128 - DNA, 25 bp, Homo sapien
catgatgggcctgtataaagtggca

SEQ ID NO: 4411129 - DNA, 25 bp, Homo sapien
cacgaatggcattcatgtttcctcc

SEQ ID NO: 4411130 - DNA, 25 bp, Homo sapien
tcagccagaacaaagaataacacga

SEQ ID NO: 4411131 - DNA, 25 bp, Homo sapien
aagaataacacgaatggcattcatg

SEQ ID NO: 4411132 - DNA, 25 bp, Homo sapien
catgtttcctcccattaacacatca

SEQ ID NO: 4411133 - DNA, 25 bp, Homo sapien
aatattgtcgcttatggtggtggca

SEQ ID NO: 4411134 - DNA, 25 bp, Homo sapien
caagaagtgtactgcaatgccaaca

SEQ ID NO: 4411135 - DNA, 25 bp, Homo sapien
gcttagaatcttttatgccaaaaga

SEQ ID NO: 4411136 - DNA, 25 bp, Homo sapien
aagagaatattgtcgcttatggtgg

SEQ ID NO: 4411137 - DNA, 25 bp, Homo sapien
gccaatggactagcacagacacctt

SEQ ID NO: 4411138 - DNA, 25 bp, Homo sapien
tcttgcccaattttgacagccaatg

SEQ ID NO: 4411139 - DNA, 25 bp, Homo sapien
gaggacaaggcaactgggtatattt

SEQ ID NO: 4411140 - DNA, 25 bp, Homo sapien
ttcaccacgaaagacatctagacta

SEQ ID NO: 4411141 - DNA, 25 bp, Homo sapien
tcatcatcttagtcctgggcatggc

SEQ ID NO: 4411142 - DNA, 25 bp, Homo sapien
tggccagaatacttaaagagtccac

SEQ ID NO: 4411143 - DNA, 25 bp, Homo sapien
gattgctacactgccatcatcatag

SEQ ID NO: 4411144 - DNA, 25 bp, Homo sapien
aaagagtccactacagagaagattg

SEQ ID NO: 4411145 - DNA, 25 bp, Homo sapien
acccgaccacaccgacattctggca

SEQ ID NO: 4411146 - DNA, 25 bp, Homo sapien
cccgaccacaccgacattctggcat

SEQ ID NO: 4411147 - DNA, 25 bp, Homo sapien
cacccgaccacaccgacattctggc

SEQ ID NO: 4411148 - DNA, 25 bp, Homo sapien
aatctttatcaacctgacatgtcag

SEQ ID NO: 4411149 - DNA, 25 bp, Homo sapien
actggtcttattactggtactaggg

SEQ ID NO: 4411150 - DNA, 25 bp, Homo sapien
tcaatctttatcaacctgacatgtc

SEQ ID NO: 4411151 - DNA, 25 bp, Homo sapien
tgacatgtcagctgcactggtctta

SEQ ID NO: 4411152 - DNA, 25 bp, Homo sapien
tgaggcacatgggagaggaatcatc

SEQ ID NO: 4411153 - DNA, 25 bp, Homo sapien
ggcacatgggagaggaatcatcacc

SEQ ID NO: 4411154 - DNA, 25 bp, Homo sapien
cccatgaggcacatgggagaggaat

SEQ ID NO: 4411155 - DNA, 25 bp, Homo sapien
acatgggagaggaatcatcaccaaa

SEQ ID NO: 4411156 - DNA, 25 bp, Homo sapien
tgacacttccgactggcttctgaga

SEQ ID NO: 4411157 - DNA, 25 bp, Homo sapien
tgagtaaactgtctgctgaggaccg

SEQ ID NO: 4411158 - DNA, 25 bp, Homo sapien
ctgaggaccgggatggcaacacttc

SEQ ID NO: 4411159 - DNA, 25 bp, Homo sapien
gcaacacttccataagagccttgga

SEQ ID NO: 4411160 - DNA, 25 bp, Homo sapien
cagcagtctatcaggagctgctctc

SEQ ID NO: 4411161 - DNA, 25 bp, Homo sapien
tcagcagtctatcaggagctgctct

SEQ ID NO: 4411162 - DNA, 25 bp, Homo sapien
agcagtctatcaggagctgctctct

SEQ ID NO: 4411163 - DNA, 25 bp, Homo sapien
tataatgttttgcaagaattccaca

SEQ ID NO: 4411164 - DNA, 25 bp, Homo sapien
tcataagtggaaatataatgttttg

SEQ ID NO: 4411165 - DNA, 25 bp, Homo sapien
cagaagcgatggtaagaagaactca

SEQ ID NO: 4411166 - DNA, 25 bp, Homo sapien
caaggcgagtatatacatttagcaa

SEQ ID NO: 4411167 - DNA, 25 bp, Homo sapien
cggatgcggagattgcttacacagg

SEQ ID NO: 4411168 - DNA, 25 bp, Homo sapien
agctcggatgcggagattgcttaca

SEQ ID NO: 4411169 - DNA, 25 bp, Homo sapien
ttctgagcgttgtagctcggatgcg

SEQ ID NO: 4411170 - DNA, 25 bp, Homo sapien
ctttgaatttctgagcgttgtagct

SEQ ID NO: 4411171 - DNA, 25 bp, Homo sapien
agaactcagaatgcggccaaccctg

SEQ ID NO: 4411172 - DNA, 25 bp, Homo sapien
cctgtgatactgtccacggtggtca

SEQ ID NO: 4411173 - DNA, 25 bp, Homo sapien
gcagctcgggttctgtcctgaggag

SEQ ID NO: 4411174 - DNA, 25 bp, Homo sapien
gacaccccctttctacgtgcgagga

SEQ ID NO: 4411175 - DNA, 25 bp, Homo sapien
agaagggctgttccgccctccaggg

SEQ ID NO: 4411176 - DNA, 25 bp, Homo sapien
agagagcagccgtgagttaggtcac

SEQ ID NO: 4411177 - DNA, 25 bp, Homo sapien
tctgccctgattattgcatgtcctc

SEQ ID NO: 4411178 - DNA, 25 bp, Homo sapien
gaagagctttgatgtcttgaagcat

SEQ ID NO: 4411179 - DNA, 25 bp, Homo sapien
actggactgtaaccccttctccaga

SEQ ID NO: 4411180 - DNA, 25 bp, Homo sapien
gactgtaaccccttctccagaatgg

SEQ ID NO: 4411181 - DNA, 25 bp, Homo sapien
ctggtgtgaggagctcaagatgctc

SEQ ID NO: 4411182 - DNA, 25 bp, Homo sapien
gtgtgaggagctcaagatgctccca

SEQ ID NO: 4411183 - DNA, 25 bp, Homo sapien
tgagctatgatcaaatgaaccacct

SEQ ID NO: 4411184 - DNA, 25 bp, Homo sapien
tgaaccacctctacggcctctgttt

SEQ ID NO: 4411185 - DNA, 25 bp, Homo sapien
aatgaaccacctctacggcctctgt

SEQ ID NO: 4411186 - DNA, 25 bp, Homo sapien
tttctgagctatgatcaaatgaacc

SEQ ID NO: 4411187 - DNA, 25 bp, Homo sapien
gattccctcctgaagtacaagccag

SEQ ID NO: 4411188 - DNA, 25 bp, Homo sapien
tgggattccctcctgaagtacaagc

SEQ ID NO: 4411189 - DNA, 25 bp, Homo sapien
ccctcctgaagtacaagccaggtgt

SEQ ID NO: 4411190 - DNA, 25 bp, Homo sapien
ctgtgggattccctcctgaagtaca

SEQ ID NO: 4411191 - DNA, 25 bp, Homo sapien
aacagctttgtctgattgactggag

SEQ ID NO: 4411192 - DNA, 25 bp, Homo sapien
tcccagctgggtacaaacagctttg

SEQ ID NO: 4411193 - DNA, 25 bp, Homo sapien
gactgtgcatttatggctgagccca

SEQ ID NO: 4411194 - DNA, 25 bp, Homo sapien
gagttgactgtgcatttatggctga

SEQ ID NO: 4411195 - DNA, 25 bp, Homo sapien
tgggccgcagccatgactccgtgca

SEQ ID NO: 4411196 - DNA, 25 bp, Homo sapien
tgctgtcttttcagatggcaccttc

SEQ ID NO: 4411197 - DNA, 25 bp, Homo sapien
gcaccttcccagtgagttcagcctg

SEQ ID NO: 4411198 - DNA, 25 bp, Homo sapien
atgactccgtgcatcacccactcct

SEQ ID NO: 4411199 - DNA, 25 bp, Homo sapien
aaaactgtgtccaaggtcctgtttg

SEQ ID NO: 4411200 - DNA, 25 bp, Homo sapien
aaactgtgtccaaggtcctgtttgc

SEQ ID NO: 4411201 - DNA, 25 bp, Homo sapien
gcaattcaggacattggaaagtagg

SEQ ID NO: 4411202 - DNA, 25 bp, Homo sapien
taggtcattattaagagtacactgg

SEQ ID NO: 4411203 - DNA, 25 bp, Homo sapien
ttattaagagtacactgggagatgg

SEQ ID NO: 4411204 - DNA, 25 bp, Homo sapien
gtttggccaataggagccttcagag

SEQ ID NO: 4411205 - DNA, 25 bp, Homo sapien
tttgttactagtatgcttaactgcc

SEQ ID NO: 4411206 - DNA, 25 bp, Homo sapien
aatctttgttactagtatgcttaac

SEQ ID NO: 4411207 - DNA, 25 bp, Homo sapien
tactagtatgcttaactgccaacca

SEQ ID NO: 4411208 - DNA, 25 bp, Homo sapien
gtatgcttaactgccaaccagctca

SEQ ID NO: 4411209 - DNA, 25 bp, Homo sapien
tcagagccactctcagcgtctgaag

SEQ ID NO: 4411210 - DNA, 25 bp, Homo sapien
aaggcaccagtcagggcaggtctca

SEQ ID NO: 4411211 - DNA, 25 bp, Homo sapien
gaggtcatccaggtaggtggaaaga

SEQ ID NO: 4411212 - DNA, 25 bp, Homo sapien
atcttaaagcttgtaggcaatgcca

SEQ ID NO: 4411213 - DNA, 25 bp, Homo sapien
aaaggccacttcgtttctccctgtg

SEQ ID NO: 4411214 - DNA, 25 bp, Homo sapien
ttctctgcctactgaaagctgattt

SEQ ID NO: 4411215 - DNA, 25 bp, Homo sapien
gtgggtgcctgcataggttcttcct

SEQ ID NO: 4411216 - DNA, 25 bp, Homo sapien
ctccaggaagtaacgaaaggccact

SEQ ID NO: 4411217 - DNA, 25 bp, Homo sapien
gatgttgacaaccaccctgtcatgg

SEQ ID NO: 4411218 - DNA, 25 bp, Homo sapien
cacagcctccatgtgacatgtgtaa

SEQ ID NO: 4411219 - DNA, 25 bp, Homo sapien
catgtgtaagcagatggtgtgctgt

SEQ ID NO: 4411220 - DNA, 25 bp, Homo sapien
ggtgtgctgtcagtaacgcagttct

SEQ ID NO: 4411221 - DNA, 25 bp, Homo sapien
gattttgactctgtgctataggacc

SEQ ID NO: 4411222 - DNA, 25 bp, Homo sapien
aacttctaaattgtgcgtctgggat

SEQ ID NO: 4411223 - DNA, 25 bp, Homo sapien
gctataggaccaggcaattacatca

SEQ ID NO: 4411224 - DNA, 25 bp, Homo sapien
aagccaatcaactgggccactttcc

SEQ ID NO: 4411225 - DNA, 25 bp, Homo sapien
aagactgatgtttatagccaaggct

SEQ ID NO: 4411226 - DNA, 25 bp, Homo sapien
cagggcctgagaagactgatgttta

SEQ ID NO: 4411227 - DNA, 25 bp, Homo sapien
atgtttatagccaaggctgtgtccc

SEQ ID NO: 4411228 - DNA, 25 bp, Homo sapien
ctgatgtttatagccaaggctgtgt

SEQ ID NO: 4411229 - DNA, 25 bp, Homo sapien
ggatggttgtatcgatggacgacat

SEQ ID NO: 4411230 - DNA, 25 bp, Homo sapien
catggatggttgtatcgatggacga

SEQ ID NO: 4411231 - DNA, 25 bp, Homo sapien
atggatggttgtatcgatggacgac

SEQ ID NO: 4411232 - DNA, 25 bp, Homo sapien
tggatggttgtatcgatggacgaca

SEQ ID NO: 4411233 - DNA, 25 bp, Homo sapien
gactgaatcacaccagctactctgg

SEQ ID NO: 4411234 - DNA, 25 bp, Homo sapien
ttctgaagctgtttggactgaatca

SEQ ID NO: 4411235 - DNA, 25 bp, Homo sapien
tgccctacgagcttttagagccaac

SEQ ID NO: 4411236 - DNA, 25 bp, Homo sapien
ggtcggcaaatgctgtaccaagcct

SEQ ID NO: 4411237 - DNA, 25 bp, Homo sapien
ttgcgggatgccgtagcagaagtct

SEQ ID NO: 4411238 - DNA, 25 bp, Homo sapien
tctctcggcagagggacgatcgtag

SEQ ID NO: 4411239 - DNA, 25 bp, Homo sapien
tcgctgtagaccttacaatcagcat

SEQ ID NO: 4411240 - DNA, 25 bp, Homo sapien
tacggttctagtcacatcgctgtag

SEQ ID NO: 4411241 - DNA, 25 bp, Homo sapien
tagtcatttatctccatccgccttc

SEQ ID NO: 4411242 - DNA, 25 bp, Homo sapien
gaaggacctctggtgtgattctgtc

SEQ ID NO: 4411243 - DNA, 25 bp, Homo sapien
tgactgttctcttgagcagtagtca

SEQ ID NO: 4411244 - DNA, 25 bp, Homo sapien
ctgctctttaacatagaaggacctc

SEQ ID NO: 4411245 - DNA, 25 bp, Homo sapien
gaagctgacggtgtcgcacggttca

SEQ ID NO: 4411246 - DNA, 25 bp, Homo sapien
tcttttccacgtgaaggcattctgg

SEQ ID NO: 4411247 - DNA, 25 bp, Homo sapien
tttgcctcaagttccaactgagagg

SEQ ID NO: 4411248 - DNA, 25 bp, Homo sapien
gagttgtcgagaactccatagccat

SEQ ID NO: 4411249 - DNA, 25 bp, Homo sapien
gtgctcccagatggaaccatttgtg

SEQ ID NO: 4411250 - DNA, 25 bp, Homo sapien
agggattccaacctgccagtaatgt

SEQ ID NO: 4411251 - DNA, 25 bp, Homo sapien
tgccagtaatgttggccctgggcct

SEQ ID NO: 4411252 - DNA, 25 bp, Homo sapien
cagatggaaccatttgtgtgcccca

SEQ ID NO: 4411253 - DNA, 25 bp, Homo sapien
tgcacaaccgtgtcactgaagtgga

SEQ ID NO: 4411254 - DNA, 25 bp, Homo sapien
catggactcctgtgttaccctcaaa

SEQ ID NO: 4411255 - DNA, 25 bp, Homo sapien
taaatgcgcataagtttcccatgga

SEQ ID NO: 4411256 - DNA, 25 bp, Homo sapien
caaaactaggcagtccctgcacaac

SEQ ID NO: 4411257 - DNA, 25 bp, Homo sapien
tcctcggcagcatcactgctcagag

SEQ ID NO: 4411258 - DNA, 25 bp, Homo sapien
ggcatgtagacctgatctatagaaa

SEQ ID NO: 4411259 - DNA, 25 bp, Homo sapien
aatccccactttaacagagctgtag

SEQ ID NO: 4411260 - DNA, 25 bp, Homo sapien
caaagccccatggaagtgggcatgt

SEQ ID NO: 4411261 - DNA, 25 bp, Homo sapien
tgtgttacatccactccacacttta

SEQ ID NO: 4411262 - DNA, 25 bp, Homo sapien
ctgtgttacatccactccacacttt

SEQ ID NO: 4411263 - DNA, 25 bp, Homo sapien
taagatgaggatttgggtcattacc

SEQ ID NO: 4411264 - DNA, 25 bp, Homo sapien
agtaagatgaggatttgggtcatta

SEQ ID NO: 4411265 - DNA, 25 bp, Homo sapien
gtaaggagtaagatgaggatttggg

SEQ ID NO: 4411266 - DNA, 25 bp, Homo sapien
ctgtaaggagtaagatgaggatttg

SEQ ID NO: 4411267 - DNA, 25 bp, Homo sapien
cagagacaagttttcggtaggagta

SEQ ID NO: 4411268 - DNA, 25 bp, Homo sapien
tcttctcacttcttgttccttcatt

SEQ ID NO: 4411269 - DNA, 25 bp, Homo sapien
ttcatttccagggtctgtcttccat

SEQ ID NO: 4411270 - DNA, 25 bp, Homo sapien
catttccagggtctgtcttccatct

SEQ ID NO: 4411271 - DNA, 25 bp, Homo sapien
tccttcatttccagggtctgtcttc

SEQ ID NO: 4411272 - DNA, 25 bp, Homo sapien
tttgcccatccaagtgtggcaacag

SEQ ID NO: 4411273 - DNA, 25 bp, Homo sapien
caacagtagctgtttaggttaagat

SEQ ID NO: 4411274 - DNA, 25 bp, Homo sapien
ggcaacagtagctgtttaggttaag

SEQ ID NO: 4411275 - DNA, 25 bp, Homo sapien
ctttgcccatccaagtgtggcaaca

SEQ ID NO: 4411276 - DNA, 25 bp, Homo sapien
cttagtttgcatagtagagagtatc

SEQ ID NO: 4411277 - DNA, 25 bp, Homo sapien
cttcttagtttgcatagtagagagt

SEQ ID NO: 4411278 - DNA, 25 bp, Homo sapien
gataagtgacagataatatgatggg

SEQ ID NO: 4411279 - DNA, 25 bp, Homo sapien
tatgatgggatcttgagcttcccat

SEQ ID NO: 4411280 - DNA, 25 bp, Homo sapien
ggtacaacacgtgccaaaataaata

SEQ ID NO: 4411281 - DNA, 25 bp, Homo sapien
gtacaacacgtgccaaaataaatac

SEQ ID NO: 4411282 - DNA, 25 bp, Homo sapien
tggtacaacacgtgccaaaataaat

SEQ ID NO: 4411283 - DNA, 25 bp, Homo sapien
ctggtacaacacgtgccaaaataaa

SEQ ID NO: 4411284 - DNA, 25 bp, Homo sapien
gcatacataatgcaactcgcctaag

SEQ ID NO: 4411285 - DNA, 25 bp, Homo sapien
cccgcaagcacagccaaatgatgag

SEQ ID NO: 4411286 - DNA, 25 bp, Homo sapien
gagacgcttccgtgcatacataatg

SEQ ID NO: 4411287 - DNA, 25 bp, Homo sapien
cgcctaagtaagaattgactcggat

SEQ ID NO: 4411288 - DNA, 25 bp, Homo sapien
tatacatgaagcctgcttgggaacg

SEQ ID NO: 4411289 - DNA, 25 bp, Homo sapien
tcggtgtcgatgcagtagacctcaa

SEQ ID NO: 4411290 - DNA, 25 bp, Homo sapien
tgggcggctgcctgcttgcaatgct

SEQ ID NO: 4411291 - DNA, 25 bp, Homo sapien
tattgtgatgccacactcggtgtcg

SEQ ID NO: 4411292 - DNA, 25 bp, Homo sapien
gaaacgcccatgctcattgacaaaa

SEQ ID NO: 4411293 - DNA, 25 bp, Homo sapien
gattccgtggctatggtgataggat

SEQ ID NO: 4411294 - DNA, 25 bp, Homo sapien
tggtgataggattggcagaaacgcc

SEQ ID NO: 4411295 - DNA, 25 bp, Homo sapien
taatttgattccgtggctatggtga

SEQ ID NO: 4411296 - DNA, 25 bp, Homo sapien
cattagtggggtgaattcttcctgc

SEQ ID NO: 4411297 - DNA, 25 bp, Homo sapien
agggatcctcatcagcattagtggg

SEQ ID NO: 4411298 - DNA, 25 bp, Homo sapien
ccagagatacctgatatggataaat

SEQ ID NO: 4411299 - DNA, 25 bp, Homo sapien
tcagggatcctcatcagcattagtg

SEQ ID NO: 4411300 - DNA, 25 bp, Homo sapien
gtatcctgaccaggtttggatgctc

SEQ ID NO: 4411301 - DNA, 25 bp, Homo sapien
tgctctgtcatctcatagagcctaa

SEQ ID NO: 4411302 - DNA, 25 bp, Homo sapien
tacctgcagggtattgaggtatcct

SEQ ID NO: 4411303 - DNA, 25 bp, Homo sapien
cagggtattgaggtatcctgaccag

SEQ ID NO: 4411304 - DNA, 25 bp, Homo sapien
ggtaaatagagatcattacatgtgc

SEQ ID NO: 4411305 - DNA, 25 bp, Homo sapien
gagatcattacatgtgctgtcaaac

SEQ ID NO: 4411306 - DNA, 25 bp, Homo sapien
cattacatgtgctgtcaaactgctg

SEQ ID NO: 4411307 - DNA, 25 bp, Homo sapien
aaagggattcgtggtaaatagagat

SEQ ID NO: 4411308 - DNA, 25 bp, Homo sapien
gagccccaaaagcagcgggtctgag

SEQ ID NO: 4411309 - DNA, 25 bp, Homo sapien
tcatgtggattcacggacggtgtcg

SEQ ID NO: 4411310 - DNA, 25 bp, Homo sapien
acggtgtcgcgaattggctcagagc

SEQ ID NO: 4411311 - DNA, 25 bp, Homo sapien
caaaagcagcgggtctgagtcactg

SEQ ID NO: 4411312 - DNA, 25 bp, Homo sapien
tccctgcactgaacatagttgaatg

SEQ ID NO: 4411313 - DNA, 25 bp, Homo sapien
gaacaacctgaatcagttccctgca

SEQ ID NO: 4411314 - DNA, 25 bp, Homo sapien
tgactatgtccagtgcaagcacagg

SEQ ID NO: 4411315 - DNA, 25 bp, Homo sapien
ggtgtgcagtgagcttcatcattag

SEQ ID NO: 4411316 - DNA, 25 bp, Homo sapien
atcatccctcttctcacttccttcc

SEQ ID NO: 4411317 - DNA, 25 bp, Homo sapien
tcatccctcttctcacttccttcca

SEQ ID NO: 4411318 - DNA, 25 bp, Homo sapien
catcatccctcttctcacttccttc

SEQ ID NO: 4411319 - DNA, 25 bp, Homo sapien
catccctcttctcacttccttccat

SEQ ID NO: 4411320 - DNA, 25 bp, Homo sapien
tcttttcttctaaaggagtccatac

SEQ ID NO: 4411321 - DNA, 25 bp, Homo sapien
ttttcttctaaaggagtccatacca

SEQ ID NO: 4411322 - DNA, 25 bp, Homo sapien
cattcttttcttctaaaggagtcca

SEQ ID NO: 4411323 - DNA, 25 bp, Homo sapien
tttcttctaaaggagtccataccat

SEQ ID NO: 4411324 - DNA, 25 bp, Homo sapien
ccatcatggaatggaaagggtagtg

SEQ ID NO: 4411325 - DNA, 25 bp, Homo sapien
gggacacttgaagaccctccaattg

SEQ ID NO: 4411326 - DNA, 25 bp, Homo sapien
tctccatcatggaatggaaagggta

SEQ ID NO: 4411327 - DNA, 25 bp, Homo sapien
ggacacttgaagaccctccaattgg

SEQ ID NO: 4411328 - DNA, 25 bp, Homo sapien
cttcaattctggaatggtcatcagt

SEQ ID NO: 4411329 - DNA, 25 bp, Homo sapien
ttctggaatggtcatcagtgatggg

SEQ ID NO: 4411330 - DNA, 25 bp, Homo sapien
tcaattctggaatggtcatcagtga

SEQ ID NO: 4411331 - DNA, 25 bp, Homo sapien
aattctggaatggtcatcagtgatg

SEQ ID NO: 4411332 - DNA, 25 bp, Homo sapien
ttcaaacaggaatgttggacaaacc

SEQ ID NO: 4411333 - DNA, 25 bp, Homo sapien
tcaaagtcatagttcactggatgtt

SEQ ID NO: 4411334 - DNA, 25 bp, Homo sapien
cactacttcttagactgatgggact

SEQ ID NO: 4411335 - DNA, 25 bp, Homo sapien
tcttgttcaaagtcatagttcactg

SEQ ID NO: 4411336 - DNA, 25 bp, Homo sapien
caagaggctcagtagcattaatctc

SEQ ID NO: 4411337 - DNA, 25 bp, Homo sapien
gcactggaccaatggaccggctcta

SEQ ID NO: 4411338 - DNA, 25 bp, Homo sapien
cagcaagttggtgtgcaagaggctc

SEQ ID NO: 4411339 - DNA, 25 bp, Homo sapien
taatctctgtgactctgatgggcca

SEQ ID NO: 4411340 - DNA, 25 bp, Homo sapien
ggtgattctatcgaaaaaacgaggc

SEQ ID NO: 4411341 - DNA, 25 bp, Homo sapien
ctatcgaaaaaacgaggccccagag

SEQ ID NO: 4411342 - DNA, 25 bp, Homo sapien
gcacctttgggttgagtaggatcca

SEQ ID NO: 4411343 - DNA, 25 bp, Homo sapien
catgtgggtgattctatcgaaaaaa

SEQ ID NO: 4411344 - DNA, 25 bp, Homo sapien
tgcataggaagagcatcctttgctt

SEQ ID NO: 4411345 - DNA, 25 bp, Homo sapien
tctgcataggaagagcatcctttgc

SEQ ID NO: 4411346 - DNA, 25 bp, Homo sapien
tcctctgcataggaagagcatcctt

SEQ ID NO: 4411347 - DNA, 25 bp, Homo sapien
cctctgcataggaagagcatccttt

SEQ ID NO: 4411348 - DNA, 25 bp, Homo sapien
ttgggagaacccaattcttctgatt

SEQ ID NO: 4411349 - DNA, 25 bp, Homo sapien
gagttgtcactctagtctgtttcag

SEQ ID NO: 4411350 - DNA, 25 bp, Homo sapien
taaaacgggcattcacgacagccac

SEQ ID NO: 4411351 - DNA, 25 bp, Homo sapien
gaataaaggtgtcctcatcactgag

SEQ ID NO: 4411352 - DNA, 25 bp, Homo sapien
aatatttgttagctgtgtatctgct

SEQ ID NO: 4411353 - DNA, 25 bp, Homo sapien
tctgcttcaagggaagctaaaaggg

SEQ ID NO: 4411354 - DNA, 25 bp, Homo sapien
gaggaattgagtcctaaaagtgtac

SEQ ID NO: 4411355 - DNA, 25 bp, Homo sapien
tgtccatgttcaagcaggcatgaca

SEQ ID NO: 4411356 - DNA, 25 bp, Homo sapien
tcacctttcactatgggacgaagaa

SEQ ID NO: 4411357 - DNA, 25 bp, Homo sapien
gattttcctggtactacactgagca

SEQ ID NO: 4411358 - DNA, 25 bp, Homo sapien
cgaagaaggatgaaggccctcagca

SEQ ID NO: 4411359 - DNA, 25 bp, Homo sapien
ttaggtcatgaggatactgccttca

SEQ ID NO: 4411360 - DNA, 25 bp, Homo sapien
ttcttttaaagtgcacctcatgcca

SEQ ID NO: 4411361 - DNA, 25 bp, Homo sapien
gctgtagcctatttcatgacttccc

SEQ ID NO: 4411362 - DNA, 25 bp, Homo sapien
tcatgcttgctgtagcctatttcat

SEQ ID NO: 4411363 - DNA, 25 bp, Homo sapien
tagcctatttcatgacttcccttca

SEQ ID NO: 4411364 - DNA, 25 bp, Homo sapien
tccttgtggcagaattagcctgatt

SEQ ID NO: 4411365 - DNA, 25 bp, Homo sapien
ttgtggcagaattagcctgattgtc

SEQ ID NO: 4411366 - DNA, 25 bp, Homo sapien
gtggcagaattagcctgattgtcat

SEQ ID NO: 4411367 - DNA, 25 bp, Homo sapien
tccatagaatgctgtgtctctccca

SEQ ID NO: 4411368 - DNA, 25 bp, Homo sapien
gagaggcttccatgtccaaaaatgt

SEQ ID NO: 4411369 - DNA, 25 bp, Homo sapien
ggagaggcttccatgtccaaaaatg

SEQ ID NO: 4411370 - DNA, 25 bp, Homo sapien
gaggcttccatgtccaaaaatgtat

SEQ ID NO: 4411371 - DNA, 25 bp, Homo sapien
aggcttccatgtccaaaaatgtata

SEQ ID NO: 4411372 - DNA, 25 bp, Homo sapien
tccttctttcgttcactcatccaat

SEQ ID NO: 4411373 - DNA, 25 bp, Homo sapien
tgggaataccatagggaattcgaac

SEQ ID NO: 4411374 - DNA, 25 bp, Homo sapien
atggctgtggaacactctcacgtgc

SEQ ID NO: 4411375 - DNA, 25 bp, Homo sapien
cacgtgcaggcgttctttcactggg

SEQ ID NO: 4411376 - DNA, 25 bp, Homo sapien
gactctttggcacattgccgtctag

SEQ ID NO: 4411377 - DNA, 25 bp, Homo sapien
tttggcacattgccgtctagcaggc

SEQ ID NO: 4411378 - DNA, 25 bp, Homo sapien
ttggcacattgccgtctagcaggca

SEQ ID NO: 4411379 - DNA, 25 bp, Homo sapien
tggcacattgccgtctagcaggcag

SEQ ID NO: 4411380 - DNA, 25 bp, Homo sapien
tccttctgggagaagcacgctcatg

SEQ ID NO: 4411381 - DNA, 25 bp, Homo sapien
gaagcacgctcatgtattggtgtgt

SEQ ID NO: 4411382 - DNA, 25 bp, Homo sapien
tgtggaggtttgaacccttgcgagc

SEQ ID NO: 4411383 - DNA, 25 bp, Homo sapien
tgaacccttgcgagctgagcatttt

SEQ ID NO: 4411384 - DNA, 25 bp, Homo sapien
tggcctcttagtggatattgaggaa

SEQ ID NO: 4411385 - DNA, 25 bp, Homo sapien
cttgtggcctcttagtggatattga

SEQ ID NO: 4411386 - DNA, 25 bp, Homo sapien
cctcttagtggatattgaggaatgc

SEQ ID NO: 4411387 - DNA, 25 bp, Homo sapien
tcttagtggatattgaggaatgcct

SEQ ID NO: 4411388 - DNA, 25 bp, Homo sapien
gtgggtgctgactcttctctctgag

SEQ ID NO: 4411389 - DNA, 25 bp, Homo sapien
cattttctcggttgctcccggctgt

SEQ ID NO: 4411390 - DNA, 25 bp, Homo sapien
tcccggctgtcctcaatgggggctg

SEQ ID NO: 4411391 - DNA, 25 bp, Homo sapien
atctttgagtgggtgctgactcttc

SEQ ID NO: 4411392 - DNA, 25 bp, Homo sapien
gagggtaactgcaataaactcccac

SEQ ID NO: 4411393 - DNA, 25 bp, Homo sapien
ggcgagagggtaactgcaataaact

SEQ ID NO: 4411394 - DNA, 25 bp, Homo sapien
ccgtgaaacggcgagagggtaactg

SEQ ID NO: 4411395 - DNA, 25 bp, Homo sapien
tgaaacggcgagagggtaactgcaa

SEQ ID NO: 4411396 - DNA, 25 bp, Homo sapien
agggtggcatctgttgttagaagca

SEQ ID NO: 4411397 - DNA, 25 bp, Homo sapien
gaagcagcacgaataatcataagaa

SEQ ID NO: 4411398 - DNA, 25 bp, Homo sapien
tgaaaaacgaatgtacctccactct

SEQ ID NO: 4411399 - DNA, 25 bp, Homo sapien
cccctctcttcatgagagaaaatat

SEQ ID NO: 4411400 - DNA, 25 bp, Homo sapien
gcagcaagagtaccgccattgcaaa

SEQ ID NO: 4411401 - DNA, 25 bp, Homo sapien
agcaagagtaccgccattgcaaaca

SEQ ID NO: 4411402 - DNA, 25 bp, Homo sapien
ctggcagcaagagtaccgccattgc

SEQ ID NO: 4411403 - DNA, 25 bp, Homo sapien
cttcagcggcacaagtctcagattc

SEQ ID NO: 4411404 - DNA, 25 bp, Homo sapien
tcatgagaaccagtgtgcaaaattc

SEQ ID NO: 4411405 - DNA, 25 bp, Homo sapien
ctctctgagactgagggaacttcca

SEQ ID NO: 4411406 - DNA, 25 bp, Homo sapien
tgtgtagagagcaagcttcccctct

SEQ ID NO: 4411407 - DNA, 25 bp, Homo sapien
atggcaggtctcccctgggtctgca

SEQ ID NO: 4411408 - DNA, 25 bp, Homo sapien
tggcaggtctcccctgggtctgcat

SEQ ID NO: 4411409 - DNA, 25 bp, Homo sapien
gatggcaggtctcccctgggtctgc

SEQ ID NO: 4411410 - DNA, 25 bp, Homo sapien
ttttattaaagctgtgcaaaaccat

SEQ ID NO: 4411411 - DNA, 25 bp, Homo sapien
tgtccacttcttgcatcttaaatct

SEQ ID NO: 4411412 - DNA, 25 bp, Homo sapien
tttgggggcaattaatctgtccact

SEQ ID NO: 4411413 - DNA, 25 bp, Homo sapien
aaagctgtgcaaaaccattttgcat

SEQ ID NO: 4411414 - DNA, 25 bp, Homo sapien
gcctctgccagttggcgaacggctg

SEQ ID NO: 4411415 - DNA, 25 bp, Homo sapien
tgaaatgaatcaggacgccagcgat

SEQ ID NO: 4411416 - DNA, 25 bp, Homo sapien
atcaggacgccagcgatgtcggcct

SEQ ID NO: 4411417 - DNA, 25 bp, Homo sapien
ttcccatcggaagcttctgattcct

SEQ ID NO: 4411418 - DNA, 25 bp, Homo sapien
gcatgtaacagaagcactccctgac

SEQ ID NO: 4411419 - DNA, 25 bp, Homo sapien
atgcatgtaacagaagcactccctg

SEQ ID NO: 4411420 - DNA, 25 bp, Homo sapien
tgcatgtaacagaagcactccctga

SEQ ID NO: 4411421 - DNA, 25 bp, Homo sapien
gtctgcagcctttcacttgtgtcca

SEQ ID NO: 4411422 - DNA, 25 bp, Homo sapien
ggtcgtgggaggagttccttgagta

SEQ ID NO: 4411423 - DNA, 25 bp, Homo sapien
gaatgtcgggtgctggcttcagcca

SEQ ID NO: 4411424 - DNA, 25 bp, Homo sapien
tccttgagtattgaatgtcgggtgc

SEQ ID NO: 4411425 - DNA, 25 bp, Homo sapien
cacaattcctctaaacctgaagata

SEQ ID NO: 4411426 - DNA, 25 bp, Homo sapien
aatataacatcgttgtctggtttac

SEQ ID NO: 4411427 - DNA, 25 bp, Homo sapien
acaattcctctaaacctgaagataa

SEQ ID NO: 4411428 - DNA, 25 bp, Homo sapien
agataaatataacatcgttgtctgg

SEQ ID NO: 4411429 - DNA, 25 bp, Homo sapien
gaggttcctgcatagcaagttggta

SEQ ID NO: 4411430 - DNA, 25 bp, Homo sapien
ggagctccagtacaaggactcatgt

SEQ ID NO: 4411431 - DNA, 25 bp, Homo sapien
gactcatgtactgctaaatcctgcc

SEQ ID NO: 4411432 - DNA, 25 bp, Homo sapien
catatgacagtcttcttgtagctta

SEQ ID NO: 4411433 - DNA, 25 bp, Homo sapien
agagccaccgggccttctgctctgg

SEQ ID NO: 4411434 - DNA, 25 bp, Homo sapien
tctgggcctacccttccccagacca

SEQ ID NO: 4411435 - DNA, 25 bp, Homo sapien
aggacacttccactctcagtttctc

SEQ ID NO: 4411436 - DNA, 25 bp, Homo sapien
ccaaggacacttccactctcagttt

SEQ ID NO: 4411437 - DNA, 25 bp, Homo sapien
gtggttcttgcttccagaaataatg

SEQ ID NO: 4411438 - DNA, 25 bp, Homo sapien
ggttcttgcttccagaaataatgtg

SEQ ID NO: 4411439 - DNA, 25 bp, Homo sapien
tggttcttgcttccagaaataatgt

SEQ ID NO: 4411440 - DNA, 25 bp, Homo sapien
gtcaatattgtcagtcattaacttg

SEQ ID NO: 4411441 - DNA, 25 bp, Homo sapien
tgtcctgccgatagatgttccaatg

SEQ ID NO: 4411442 - DNA, 25 bp, Homo sapien
gtcattaacttgtcctgccgataga

SEQ ID NO: 4411443 - DNA, 25 bp, Homo sapien
gatgttccaatgcaaggaaactgca

SEQ ID NO: 4411444 - DNA, 25 bp, Homo sapien
tgtctccccaaagcaggggcagcag

SEQ ID NO: 4411445 - DNA, 25 bp, Homo sapien
aagctggtgggctggcctctcggat

SEQ ID NO: 4411446 - DNA, 25 bp, Homo sapien
gcagcagaagctggtgggctggcct

SEQ ID NO: 4411447 - DNA, 25 bp, Homo sapien
ggtgggctggcctctcggattccat

SEQ ID NO: 4411448 - DNA, 25 bp, Homo sapien
tttctctccaatggaagagcaagat

SEQ ID NO: 4411449 - DNA, 25 bp, Homo sapien
catatattcaaagactggcctctgg

SEQ ID NO: 4411450 - DNA, 25 bp, Homo sapien
ctggttgaactccattgctctgaaa

SEQ ID NO: 4411451 - DNA, 25 bp, Homo sapien
cattgctctgaaaacgtgcatccct

SEQ ID NO: 4411452 - DNA, 25 bp, Homo sapien
cacttggtatttggatcacgtctcc

SEQ ID NO: 4411453 - DNA, 25 bp, Homo sapien
ccacttggtatttggatcacgtctc

SEQ ID NO: 4411454 - DNA, 25 bp, Homo sapien
ggtatttggatcacgtctccttttc

SEQ ID NO: 4411455 - DNA, 25 bp, Homo sapien
cttggtatttggatcacgtctcctt

SEQ ID NO: 4411456 - DNA, 25 bp, Homo sapien
ctccggtgcacaggaggccctgtga

SEQ ID NO: 4411457 - DNA, 25 bp, Homo sapien
cagtggctacccctgcttctgcaaa

SEQ ID NO: 4411458 - DNA, 25 bp, Homo sapien
ggctgctgctatgagggacagtggc

SEQ ID NO: 4411459 - DNA, 25 bp, Homo sapien
tggctacccctgcttctgcaaaggc

SEQ ID NO: 4411460 - DNA, 25 bp, Homo sapien
ggacctcgagctaaatgatgattga

SEQ ID NO: 4411461 - DNA, 25 bp, Homo sapien
gggacctcgagctaaatgatgattg

SEQ ID NO: 4411462 - DNA, 25 bp, Homo sapien
ctggggacctcgagctaaatgatga

SEQ ID NO: 4411463 - DNA, 25 bp, Homo sapien
tggggacctcgagctaaatgatgat

SEQ ID NO: 4411464 - DNA, 25 bp, Homo sapien
tcatggccaggctcaatgtcaagtg

SEQ ID NO: 4411465 - DNA, 25 bp, Homo sapien
gtgggcatagatccacatcatggcc

SEQ ID NO: 4411466 - DNA, 25 bp, Homo sapien
atctgaacagtcagactccgggcca

SEQ ID NO: 4411467 - DNA, 25 bp, Homo sapien
gctgaaggcgtgctccaagtgcagt

SEQ ID NO: 4411468 - DNA, 25 bp, Homo sapien
gccaaggacattgagacaatctagt

SEQ ID NO: 4411469 - DNA, 25 bp, Homo sapien
aggacattgagacaatctagtctgg

SEQ ID NO: 4411470 - DNA, 25 bp, Homo sapien
caaggacattgagacaatctagtct

SEQ ID NO: 4411471 - DNA, 25 bp, Homo sapien
ggacattgagacaatctagtctggt

SEQ ID NO: 4411472 - DNA, 25 bp, Homo sapien
tgcagctgactgtggatgccatgga

SEQ ID NO: 4411473 - DNA, 25 bp, Homo sapien
gcagatggcggggagcaaatcccac

SEQ ID NO: 4411474 - DNA, 25 bp, Homo sapien
gccatggagtaacccgactgcaggg

SEQ ID NO: 4411475 - DNA, 25 bp, Homo sapien
tggcatcctgcaaaacctgctgact

SEQ ID NO: 4411476 - DNA, 25 bp, Homo sapien
tactcagaacaaccctggatccgct

SEQ ID NO: 4411477 - DNA, 25 bp, Homo sapien
ctctcgctttcccactcaggttgaa

SEQ ID NO: 4411478 - DNA, 25 bp, Homo sapien
caggttgaatgtggttgtactcaga

SEQ ID NO: 4411479 - DNA, 25 bp, Homo sapien
tccagcagcacctttgtaggcaaca

SEQ ID NO: 4411480 - DNA, 25 bp, Homo sapien
caaggattccggttgcttggcacca

SEQ ID NO: 4411481 - DNA, 25 bp, Homo sapien
tgcaatctgtgtaggatgtcttcca

SEQ ID NO: 4411482 - DNA, 25 bp, Homo sapien
tatcagattgcttgatcagattgcc

SEQ ID NO: 4411483 - DNA, 25 bp, Homo sapien
tcagattgcctaaattgctcaagga

SEQ ID NO: 4411484 - DNA, 25 bp, Homo sapien
tctgctccaggacttgattccttgt

SEQ ID NO: 4411485 - DNA, 25 bp, Homo sapien
tattttcacccgaagggctctctgc

SEQ ID NO: 4411486 - DNA, 25 bp, Homo sapien
ccttgtgctagcaatggcatcaggg

SEQ ID NO: 4411487 - DNA, 25 bp, Homo sapien
tagcatttattttcacccgaagggc

SEQ ID NO: 4411488 - DNA, 25 bp, Homo sapien
ccactgcgttttgtcggcacctgca

SEQ ID NO: 4411489 - DNA, 25 bp, Homo sapien
ggcttcccttccgtcgagggcacat

SEQ ID NO: 4411490 - DNA, 25 bp, Homo sapien
ggcacatccggagccactgcgtttt

SEQ ID NO: 4411491 - DNA, 25 bp, Homo sapien
ttccgtcgagggcacatccggagcc

SEQ ID NO: 4411492 - DNA, 25 bp, Homo sapien
tcctgttccttcgctgtactctcac

SEQ ID NO: 4411493 - DNA, 25 bp, Homo sapien
tccttctctatcgacacccttttct

SEQ ID NO: 4411494 - DNA, 25 bp, Homo sapien
tgttccttcgctgtactctcacctc

SEQ ID NO: 4411495 - DNA, 25 bp, Homo sapien
acctccttctctatcgacacccttt

SEQ ID NO: 4411496 - DNA, 25 bp, Homo sapien
tgactctgcctggcccgtgccgccc

SEQ ID NO: 4411497 - DNA, 25 bp, Homo sapien
tttgcaaaggacactcgggccttgg

SEQ ID NO: 4411498 - DNA, 25 bp, Homo sapien
gcaaaggacactcgggccttgggct

SEQ ID NO: 4411499 - DNA, 25 bp, Homo sapien
attttgcaaaggacactcgggcctt

SEQ ID NO: 4411500 - DNA, 25 bp, Homo sapien
ttgggctggtgctgtttgacagtgt

SEQ ID NO: 4411501 - DNA, 25 bp, Homo sapien
ccatgtttagatgtttcaccctgct

SEQ ID NO: 4411502 - DNA, 25 bp, Homo sapien
tcaaggacttgccagtggtttgcag

SEQ ID NO: 4411503 - DNA, 25 bp, Homo sapien
ctgctgcacagagagtttgtggaag

SEQ ID NO: 4411504 - DNA, 25 bp, Homo sapien
acagagagtttgtggaaggaacctc

SEQ ID NO: 4411505 - DNA, 25 bp, Homo sapien
catttgtgctgtggaaacaagcgcc

SEQ ID NO: 4411506 - DNA, 25 bp, Homo sapien
tccaattttagcatttgtgctgtgg

SEQ ID NO: 4411507 - DNA, 25 bp, Homo sapien
ttttagcatttgtgctgtggaaaca

SEQ ID NO: 4411508 - DNA, 25 bp, Homo sapien
agcatttgtgctgtggaaacaagcg

SEQ ID NO: 4411509 - DNA, 25 bp, Homo sapien
cacgctcccaccgatgacagcccag

SEQ ID NO: 4411510 - DNA, 25 bp, Homo sapien
gctcccaccgatgacagcccaggag

SEQ ID NO: 4411511 - DNA, 25 bp, Homo sapien
ctcccaccgatgacagcccaggagc

SEQ ID NO: 4411512 - DNA, 25 bp, Homo sapien
gagccgatggggagaacttgagcat

SEQ ID NO: 4411513 - DNA, 25 bp, Homo sapien
tctgggattccgcattgcaggcccc

SEQ ID NO: 4411514 - DNA, 25 bp, Homo sapien
ctcttttctgggattccgcattgca

SEQ ID NO: 4411515 - DNA, 25 bp, Homo sapien
gattccgcattgcaggccccattgc

SEQ ID NO: 4411516 - DNA, 25 bp, Homo sapien
ttttctgggattccgcattgcaggc

SEQ ID NO: 4411517 - DNA, 25 bp, Homo sapien
tgttgtgtgggtaaaatccatgatg

SEQ ID NO: 4411518 - DNA, 25 bp, Homo sapien
ccatgatgtttaatgagaagacatt

SEQ ID NO: 4411519 - DNA, 25 bp, Homo sapien
agacattaaagggatggagttcttt

SEQ ID NO: 4411520 - DNA, 25 bp, Homo sapien
cattaaagggatggagttctttgtt

SEQ ID NO: 4411521 - DNA, 25 bp, Homo sapien
tagctggcattcctcggtattttgg

SEQ ID NO: 4411522 - DNA, 25 bp, Homo sapien
tgtcacgtgaagagggtttctgctc

SEQ ID NO: 4411523 - DNA, 25 bp, Homo sapien
actgcgttctggaaggctaagtgtg

SEQ ID NO: 4411524 - DNA, 25 bp, Homo sapien
tctgcacagacacccgtgtgggcag

SEQ ID NO: 4411525 - DNA, 25 bp, Homo sapien
tgatccgcggcatccgtgtgctgga

SEQ ID NO: 4411526 - DNA, 25 bp, Homo sapien
ctccctgtgggtgaaagacctgaag

SEQ ID NO: 4411527 - DNA, 25 bp, Homo sapien
ggatgtgccttccagcattaacaga

SEQ ID NO: 4411528 - DNA, 25 bp, Homo sapien
tcagggctctctgtatagttgagac

SEQ ID NO: 4411529 - DNA, 25 bp, Homo sapien
tggtctgggatggttcccgcgctca

SEQ ID NO: 4411530 - DNA, 25 bp, Homo sapien
catgctgatgttccgtgcgctggtc

SEQ ID NO: 4411531 - DNA, 25 bp, Homo sapien
tccccaggtgagctcttgaatgtct

SEQ ID NO: 4411532 - DNA, 25 bp, Homo sapien
taacagcgtcctccaaatccacagt

SEQ ID NO: 4411533 - DNA, 25 bp, Homo sapien
tggaagaactaccaaaactgtatca

SEQ ID NO: 4411534 - DNA, 25 bp, Homo sapien
ctctgacatagaggcgccatttgga

SEQ ID NO: 4411535 - DNA, 25 bp, Homo sapien
taggaggtccaagtgcaatgcggaa

SEQ ID NO: 4411536 - DNA, 25 bp, Homo sapien
tccaagtagggatgtttatggaagg

SEQ ID NO: 4411537 - DNA, 25 bp, Homo sapien
tcaataccgtggagctccccagaga

SEQ ID NO: 4411538 - DNA, 25 bp, Homo sapien
tgtgcctgactgatgccgctccagg

SEQ ID NO: 4411539 - DNA, 25 bp, Homo sapien
cagccaaccgggtgagaccaaaagg

SEQ ID NO: 4411540 - DNA, 25 bp, Homo sapien
caggtagcctggacggtggttcaac

SEQ ID NO: 4411541 - DNA, 25 bp, Homo sapien
gggtgctcagacatgccgtaagaca

SEQ ID NO: 4411542 - DNA, 25 bp, Homo sapien
cagggtaaactgagggcctgtgtga

SEQ ID NO: 4411543 - DNA, 25 bp, Homo sapien
gaggagccccgcattgactccagtg

SEQ ID NO: 4411544 - DNA, 25 bp, Homo sapien
ccgtaagacacagggtcgctggctc

SEQ ID NO: 4411545 - DNA, 25 bp, Homo sapien
gccttagcaggtccagaccagaagc

SEQ ID NO: 4411546 - DNA, 25 bp, Homo sapien
gcaagccttagcaggtccagaccag

SEQ ID NO: 4411547 - DNA, 25 bp, Homo sapien
gcagcaagccttagcaggtccagac

SEQ ID NO: 4411548 - DNA, 25 bp, Homo sapien
ggagcagcaagccttagcaggtcca

SEQ ID NO: 4411549 - DNA, 25 bp, Homo sapien
aaggcgctgtccctgctggacactc

SEQ ID NO: 4411550 - DNA, 25 bp, Homo sapien
cacggaaggcgctgtccctgctgga

SEQ ID NO: 4411551 - DNA, 25 bp, Homo sapien
agaaccggccggtgaatgaatggcc

SEQ ID NO: 4411552 - DNA, 25 bp, Homo sapien
cgctccaggcgggtagcaggttcca

SEQ ID NO: 4411553 - DNA, 25 bp, Homo sapien
agggcgctccggaccccaggtcagt

SEQ ID NO: 4411554 - DNA, 25 bp, Homo sapien
gtgagaggggcacttgtctctactc

SEQ ID NO: 4411555 - DNA, 25 bp, Homo sapien
agaggggcacttgtctctactcctg

SEQ ID NO: 4411556 - DNA, 25 bp, Homo sapien
cagggcgctccggaccccaggtcag

SEQ ID NO: 4411557 - DNA, 25 bp, Homo sapien
gagtgcttccgctggcaagaaggcc

SEQ ID NO: 4411558 - DNA, 25 bp, Homo sapien
acacagtgacctgcggctgattcca

SEQ ID NO: 4411559 - DNA, 25 bp, Homo sapien
cctcgcgggacgcttgtgtggaccc

SEQ ID NO: 4411560 - DNA, 25 bp, Homo sapien
caaaggtgaacatgcttgtcgtggt

SEQ ID NO: 4411561 - DNA, 25 bp, Homo sapien
tttctgtgcactggtgccctccagg

SEQ ID NO: 4411562 - DNA, 25 bp, Homo sapien
tggtggccttggctcgctccgtccc

SEQ ID NO: 4411563 - DNA, 25 bp, Homo sapien
ggtcccctcgtagcacagctgggtg

SEQ ID NO: 4411564 - DNA, 25 bp, Homo sapien
ttcccgatgtcgctcctcatccatg

SEQ ID NO: 4411565 - DNA, 25 bp, Homo sapien
tgatgcagaaggtaaagcatccttc

SEQ ID NO: 4411566 - DNA, 25 bp, Homo sapien
gatgcagaaggtaaagcatccttca

SEQ ID NO: 4411567 - DNA, 25 bp, Homo sapien
atgcagaaggtaaagcatccttcat

SEQ ID NO: 4411568 - DNA, 25 bp, Homo sapien
gacaatcatagaattcccgagaccc

SEQ ID NO: 4411569 - DNA, 25 bp, Homo sapien
cgggtgagggatgctggcgagtggg

SEQ ID NO: 4411570 - DNA, 25 bp, Homo sapien
gggacaggccttgtctggacaatca

SEQ ID NO: 4411571 - DNA, 25 bp, Homo sapien
aatgcaaataacgaatcctgagagc

SEQ ID NO: 4411572 - DNA, 25 bp, Homo sapien
gaggccattgttgggtggtggacag

SEQ ID NO: 4411573 - DNA, 25 bp, Homo sapien
taggtgaggccattgttgggtggtg

SEQ ID NO: 4411574 - DNA, 25 bp, Homo sapien
tgttgggtggtggacagtcctgtgc

SEQ ID NO: 4411575 - DNA, 25 bp, Homo sapien
gtggtggacagtcctgtgccagtgc

SEQ ID NO: 4411576 - DNA, 25 bp, Homo sapien
ggccatcgcaggcaggtaaggccat

SEQ ID NO: 4411577 - DNA, 25 bp, Homo sapien
ggcaggtgaggctgtcgtgggcagg

SEQ ID NO: 4411578 - DNA, 25 bp, Homo sapien
aggatgatgcgcagggccccgtcag

SEQ ID NO: 4411579 - DNA, 25 bp, Homo sapien
tcagtgcgaggatgatgcgcagggc

SEQ ID NO: 4411580 - DNA, 25 bp, Homo sapien
tggccccacgctctggaggctttga

SEQ ID NO: 4411581 - DNA, 25 bp, Homo sapien
tctgtgtagcaaggctgcactcttc

SEQ ID NO: 4411582 - DNA, 25 bp, Homo sapien
gtatgtaagggtgagtgttcaggca

SEQ ID NO: 4411583 - DNA, 25 bp, Homo sapien
ggtacgaggagactgtgtgtctctt

SEQ ID NO: 4411584 - DNA, 25 bp, Homo sapien
tccatgaagcaggttctggtcacgg

SEQ ID NO: 4411585 - DNA, 25 bp, Homo sapien
ttttgggcacaggaggtagaggtcc

SEQ ID NO: 4411586 - DNA, 25 bp, Homo sapien
gaggtccatgaagcaggttctggtc

SEQ ID NO: 4411587 - DNA, 25 bp, Homo sapien
gtagaggtccatgaagcaggttctg

SEQ ID NO: 4411588 - DNA, 25 bp, Homo sapien
ccatgtgcctggtgataatgggcaa

SEQ ID NO: 4411589 - DNA, 25 bp, Homo sapien
taatgggcaagttcgcccacgtttg

SEQ ID NO: 4411590 - DNA, 25 bp, Homo sapien
taaaatgttcttatgctcccgttgt

SEQ ID NO: 4411591 - DNA, 25 bp, Homo sapien
tctgagcaaatcaactatcgttcct

SEQ ID NO: 4411592 - DNA, 25 bp, Homo sapien
cagaaccatcagtgcaatcggaggt

SEQ ID NO: 4411593 - DNA, 25 bp, Homo sapien
cacaggcacaaagagggactcgagt

SEQ ID NO: 4411594 - DNA, 25 bp, Homo sapien
gatggtgctggatgcacacggcaca

SEQ ID NO: 4411595 - DNA, 25 bp, Homo sapien
cagtgcaatcggaggtgacaagtgc

SEQ ID NO: 4411596 - DNA, 25 bp, Homo sapien
atttaacatggttagatggtccttg

SEQ ID NO: 4411597 - DNA, 25 bp, Homo sapien
gatggtaggtaagagaggcaggtac

SEQ ID NO: 4411598 - DNA, 25 bp, Homo sapien
gagctgatggtaggtaagagaggca

SEQ ID NO: 4411599 - DNA, 25 bp, Homo sapien
aacatggttagatggtccttgtcca

SEQ ID NO: 4411600 - DNA, 25 bp, Homo sapien
cggatctgcacaacccccttgttga

SEQ ID NO: 4411601 - DNA, 25 bp, Homo sapien
atctcaacaaccttcctgtgtgcgg

SEQ ID NO: 4411602 - DNA, 25 bp, Homo sapien
tgtgtgcggcttccctctcggatct

SEQ ID NO: 4411603 - DNA, 25 bp, Homo sapien
gtaagctgcgcggtctccctctccc

SEQ ID NO: 4411604 - DNA, 25 bp, Homo sapien
ttcacgggatgatcggccaggctct

SEQ ID NO: 4411605 - DNA, 25 bp, Homo sapien
ggcagagtgaagtcctcgagtcctc

SEQ ID NO: 4411606 - DNA, 25 bp, Homo sapien
ttcccttccaaagagacggcagttc

SEQ ID NO: 4411607 - DNA, 25 bp, Homo sapien
gggttgaagtggaatccaggatctg

SEQ ID NO: 4411608 - DNA, 25 bp, Homo sapien
aggtggtaccaagcaggcgtctgca

SEQ ID NO: 4411609 - DNA, 25 bp, Homo sapien
caggaagcccgaggaaactgtggag

SEQ ID NO: 4411610 - DNA, 25 bp, Homo sapien
gtggagtccacctcacaagttggga

SEQ ID NO: 4411611 - DNA, 25 bp, Homo sapien
caagttgggatcctgtagttctccc

SEQ ID NO: 4411612 - DNA, 25 bp, Homo sapien
gtgggtggaaatggtatctagatgt

SEQ ID NO: 4411613 - DNA, 25 bp, Homo sapien
tggctgttggtgataatgattccat

SEQ ID NO: 4411614 - DNA, 25 bp, Homo sapien
tgtgggagtggctgttggtgataat

SEQ ID NO: 4411615 - DNA, 25 bp, Homo sapien
gagtggctgttggtgataatgattc

SEQ ID NO: 4411616 - DNA, 25 bp, Homo sapien
gtctatcagcattgattgaggggct

SEQ ID NO: 4411617 - DNA, 25 bp, Homo sapien
gtgagggcgattccatgtctatcag

SEQ ID NO: 4411618 - DNA, 25 bp, Homo sapien
ggtgataatgattccatgtctatca

SEQ ID NO: 4411619 - DNA, 25 bp, Homo sapien
tggtgataatgattccatgtctatc

SEQ ID NO: 4411620 - DNA, 25 bp, Homo sapien
gttggtgataatgattccatgtcta

SEQ ID NO: 4411621 - DNA, 25 bp, Homo sapien
ttctcccaagcaagcgctgtccttg

SEQ ID NO: 4411622 - DNA, 25 bp, Homo sapien
gctccaccgtcatcgggtcatctgg

SEQ ID NO: 4411623 - DNA, 25 bp, Homo sapien
tgccaccccacctgggagcagggag

SEQ ID NO: 4411624 - DNA, 25 bp, Homo sapien
taaaccagcaaggtcatgcagtctg

SEQ ID NO: 4411625 - DNA, 25 bp, Homo sapien
gtctgggcctcttggtttcaggtga

SEQ ID NO: 4411626 - DNA, 25 bp, Homo sapien
gcagagacctggcaagccagtctcc

SEQ ID NO: 4411627 - DNA, 25 bp, Homo sapien
tgatgatgcacctcccggaaagtct

SEQ ID NO: 4411628 - DNA, 25 bp, Homo sapien
ggggctcccggcacagccaaagtgt

SEQ ID NO: 4411629 - DNA, 25 bp, Homo sapien
cttgagtacactcgagccccaagtt

SEQ ID NO: 4411630 - DNA, 25 bp, Homo sapien
gctgtcaggggtcagggttccccca

SEQ ID NO: 4411631 - DNA, 25 bp, Homo sapien
ttgagtacactcgagccccaagttc

SEQ ID NO: 4411632 - DNA, 25 bp, Homo sapien
gagtacactcgagccccaagttctg

SEQ ID NO: 4411633 - DNA, 25 bp, Homo sapien
catgcggtgagttctaagggtccca

SEQ ID NO: 4411634 - DNA, 25 bp, Homo sapien
tgctctagtgcaacatacacgcaga

SEQ ID NO: 4411635 - DNA, 25 bp, Homo sapien
tgctgacaaagtttccacctaagtt

SEQ ID NO: 4411636 - DNA, 25 bp, Homo sapien
tctagacatctatcaaacaagtatg

SEQ ID NO: 4411637 - DNA, 25 bp, Homo sapien
cctgcaatctgacggcgccagtgcc

SEQ ID NO: 4411638 - DNA, 25 bp, Homo sapien
actgactggcccaaatcactcttct

SEQ ID NO: 4411639 - DNA, 25 bp, Homo sapien
ccagtgcccactgactggcccaaat

SEQ ID NO: 4411640 - DNA, 25 bp, Homo sapien
atctgacggcgccagtgcccactga

SEQ ID NO: 4411641 - DNA, 25 bp, Homo sapien
ttagcccaaggccaaagcacctggc

SEQ ID NO: 4411642 - DNA, 25 bp, Homo sapien
gagcatggtgtttatttcctctccc

SEQ ID NO: 4411643 - DNA, 25 bp, Homo sapien
gacagacttggctggattctgattc

SEQ ID NO: 4411644 - DNA, 25 bp, Homo sapien
tggcaccagtcctctgttcgacaga

SEQ ID NO: 4411645 - DNA, 25 bp, Homo sapien
cagcacattatagggtcagaccgcg

SEQ ID NO: 4411646 - DNA, 25 bp, Homo sapien
ggcctgtgatcgaaagtctgcatga

SEQ ID NO: 4411647 - DNA, 25 bp, Homo sapien
gccttcacggctgtaggtggcacca

SEQ ID NO: 4411648 - DNA, 25 bp, Homo sapien
gaagtgcagccgtctcaggaaggca

SEQ ID NO: 4411649 - DNA, 25 bp, Homo sapien
acacatcgaggtggccactccccaa

SEQ ID NO: 4411650 - DNA, 25 bp, Homo sapien
catcgaggtggccactccccaaacc

SEQ ID NO: 4411651 - DNA, 25 bp, Homo sapien
ccacacatcgaggtggccactcccc

SEQ ID NO: 4411652 - DNA, 25 bp, Homo sapien
tcgaggtggccactccccaaaccac

SEQ ID NO: 4411653 - DNA, 25 bp, Homo sapien
attgatgaggcccatattcttttcc

SEQ ID NO: 4411654 - DNA, 25 bp, Homo sapien
gtagtaagaggtgggctgaaccaca

SEQ ID NO: 4411655 - DNA, 25 bp, Homo sapien
gggctgaaccacaggacgcattgat

SEQ ID NO: 4411656 - DNA, 25 bp, Homo sapien
accacaggacgcattgatgaggccc

SEQ ID NO: 4411657 - DNA, 25 bp, Homo sapien
agcacggtgccccaaggtgctgaga

SEQ ID NO: 4411658 - DNA, 25 bp, Homo sapien
gctgagagttcacgtcgttcttggt

SEQ ID NO: 4411659 - DNA, 25 bp, Homo sapien
ggcgtctacttttccttgaaatgtg

SEQ ID NO: 4411660 - DNA, 25 bp, Homo sapien
tgaacttccatttcagcgcgcgtgt

SEQ ID NO: 4411661 - DNA, 25 bp, Homo sapien
cgtggttacagctgtgtgctcggcc

SEQ ID NO: 4411662 - DNA, 25 bp, Homo sapien
tctgtaaccaggactcatgggccat

SEQ ID NO: 4411663 - DNA, 25 bp, Homo sapien
cctctgtaaccaggactcatgggcc

SEQ ID NO: 4411664 - DNA, 25 bp, Homo sapien
acacagcaggacctggttcgctcct

SEQ ID NO: 4411665 - DNA, 25 bp, Homo sapien
gacctggttcgctcctgacttcctg

SEQ ID NO: 4411666 - DNA, 25 bp, Homo sapien
gcccgagaactgacagctcttggag

SEQ ID NO: 4411667 - DNA, 25 bp, Homo sapien
gggcgcccgtatgcccgagaactga

SEQ ID NO: 4411668 - DNA, 25 bp, Homo sapien
tgcagacccgagctggccacgtgat

SEQ ID NO: 4411669 - DNA, 25 bp, Homo sapien
cagacccgagctggccacgtgatgc

SEQ ID NO: 4411670 - DNA, 25 bp, Homo sapien
aacagccgggcagtgtgcagacagc

SEQ ID NO: 4411671 - DNA, 25 bp, Homo sapien
atgaacagccgggcagtgtgcagac

SEQ ID NO: 4411672 - DNA, 25 bp, Homo sapien
acagccgggcagtgtgcagacagcg

SEQ ID NO: 4411673 - DNA, 25 bp, Homo sapien
tgaacagccgggcagtgtgcagaca

SEQ ID NO: 4411674 - DNA, 25 bp, Homo sapien
agcagggaccgtgtagatcagtgca

SEQ ID NO: 4411675 - DNA, 25 bp, Homo sapien
ctgcagagtgatcaggcgactgcta

SEQ ID NO: 4411676 - DNA, 25 bp, Homo sapien
actgctatcgaaggcggttccgctg

SEQ ID NO: 4411677 - DNA, 25 bp, Homo sapien
gagtgatcaggcgactgctatcgaa

SEQ ID NO: 4411678 - DNA, 25 bp, Homo sapien
gatcaggcgactgctatcgaaggcg

SEQ ID NO: 4411679 - DNA, 25 bp, Homo sapien
accagggcccatccacggatttcct

SEQ ID NO: 4411680 - DNA, 25 bp, Homo sapien
gtgaccagggcccatccacggattt

SEQ ID NO: 4411681 - DNA, 25 bp, Homo sapien
agggcccatccacggatttcctttg

SEQ ID NO: 4411682 - DNA, 25 bp, Homo sapien
cgtgactgtgaccagggcccatcca

SEQ ID NO: 4411683 - DNA, 25 bp, Homo sapien
agggcacaagctgaaccctgagggc

SEQ ID NO: 4411684 - DNA, 25 bp, Homo sapien
ggacagggcacaagctgaaccctga

SEQ ID NO: 4411685 - DNA, 25 bp, Homo sapien
gaggacagggcacaagctgaaccct

SEQ ID NO: 4411686 - DNA, 25 bp, Homo sapien
gacagggcacaagctgaaccctgag

SEQ ID NO: 4411687 - DNA, 25 bp, Homo sapien
ggccaggcattcaggcccatcaggc

SEQ ID NO: 4411688 - DNA, 25 bp, Homo sapien
ggtctgggcagttcctgtgccccag

SEQ ID NO: 4411689 - DNA, 25 bp, Homo sapien
tgactgccaggctctttcaggtctg

SEQ ID NO: 4411690 - DNA, 25 bp, Homo sapien
gcagagccagttctgtctgcaggct

SEQ ID NO: 4411691 - DNA, 25 bp, Homo sapien
cagtgacgcctctgatgcgcactcg

SEQ ID NO: 4411692 - DNA, 25 bp, Homo sapien
ctcgggcatcgcgagaatgcttcgc

SEQ ID NO: 4411693 - DNA, 25 bp, Homo sapien
gcctctgatgcgcactcgggcatcg

SEQ ID NO: 4411694 - DNA, 25 bp, Homo sapien
agaatgcttcgcgaacacgcgcacc

SEQ ID NO: 4411695 - DNA, 25 bp, Homo sapien
gcaaggaccgtggtccaggtgtttc

SEQ ID NO: 4411696 - DNA, 25 bp, Homo sapien
caaggaccgtggtccaggtgtttct

SEQ ID NO: 4411697 - DNA, 25 bp, Homo sapien
tcagggcaaggaccgtggtccaggt

SEQ ID NO: 4411698 - DNA, 25 bp, Homo sapien
agggcaaggaccgtggtccaggtgt

SEQ ID NO: 4411699 - DNA, 25 bp, Homo sapien
tgttgtcaacagggcccacgagatc

SEQ ID NO: 4411700 - DNA, 25 bp, Homo sapien
gttgtcaacagggcccacgagatca

SEQ ID NO: 4411701 - DNA, 25 bp, Homo sapien
ctgttgtcaacagggcccacgagat

SEQ ID NO: 4411702 - DNA, 25 bp, Homo sapien
ttgtcaacagggcccacgagatcat

SEQ ID NO: 4411703 - DNA, 25 bp, Homo sapien
tccctcgttcctgagtcggtttctg

SEQ ID NO: 4411704 - DNA, 25 bp, Homo sapien
ccttcagcagggagcgtgttccagc

SEQ ID NO: 4411705 - DNA, 25 bp, Homo sapien
ctgcatagacgtccctgaagtggcc

SEQ ID NO: 4411706 - DNA, 25 bp, Homo sapien
cctgagtcggtttctgggctcttcc

SEQ ID NO: 4411707 - DNA, 25 bp, Homo sapien
gtgaggcggccccatgaaggggctg

SEQ ID NO: 4411708 - DNA, 25 bp, Homo sapien
ggcggccccatgaaggggctgattt

SEQ ID NO: 4411709 - DNA, 25 bp, Homo sapien
ggagtgtgaggcggccccatgaagg

SEQ ID NO: 4411710 - DNA, 25 bp, Homo sapien
gagtgtgaggcggccccatgaaggg

SEQ ID NO: 4411711 - DNA, 25 bp, Homo sapien
tggaatagtgagcgtccccgtgtcg

SEQ ID NO: 4411712 - DNA, 25 bp, Homo sapien
gaatagtgagcgtccccgtgtcggt

SEQ ID NO: 4411713 - DNA, 25 bp, Homo sapien
aatagtgagcgtccccgtgtcggtg

SEQ ID NO: 4411714 - DNA, 25 bp, Homo sapien
ctggaatagtgagcgtccccgtgtc

SEQ ID NO: 4411715 - DNA, 25 bp, Homo sapien
caatagtgagcgtccccacgtcggt

SEQ ID NO: 4411716 - DNA, 25 bp, Homo sapien
gcaatagtgagcgtccccacgtcgg

SEQ ID NO: 4411717 - DNA, 25 bp, Homo sapien
aatagtgagcgtccccacgtcggtg

SEQ ID NO: 4411718 - DNA, 25 bp, Homo sapien
ctgcaatagtgagcgtccccacgtc

SEQ ID NO: 4411719 - DNA, 25 bp, Homo sapien
aacatccccgtgttggtgccccttg

SEQ ID NO: 4411720 - DNA, 25 bp, Homo sapien
tggaattgtgaacatccccgtgttg

SEQ ID NO: 4411721 - DNA, 25 bp, Homo sapien
cccatgtcggtgctggaattgtgaa

SEQ ID NO: 4411722 - DNA, 25 bp, Homo sapien
catgtcggtgctggaattgtgaaca

SEQ ID NO: 4411723 - DNA, 25 bp, Homo sapien
tgaaatagtgaacgtccccgtgtcg

SEQ ID NO: 4411724 - DNA, 25 bp, Homo sapien
gaatagtgagtgtccccgtgtcggt

SEQ ID NO: 4411725 - DNA, 25 bp, Homo sapien
ccccgtgtcggtgctggaatagtga

SEQ ID NO: 4411726 - DNA, 25 bp, Homo sapien
tgctggaatagtgagcgtccccgtg

SEQ ID NO: 4411727 - DNA, 25 bp, Homo sapien
gcatccctgtatcggtgctgcaata

SEQ ID NO: 4411728 - DNA, 25 bp, Homo sapien
tagcgctggaatagtgagcatccct

SEQ ID NO: 4411729 - DNA, 25 bp, Homo sapien
tggtgccccgtatcggtgctggaac

SEQ ID NO: 4411730 - DNA, 25 bp, Homo sapien
caatagtgagcgtcctcatgttggt

SEQ ID NO: 4411731 - DNA, 25 bp, Homo sapien
tatagatttccccaagtaaggttca

SEQ ID NO: 4411732 - DNA, 25 bp, Homo sapien
gacacccggagcatgaggtcagtga

SEQ ID NO: 4411733 - DNA, 25 bp, Homo sapien
cggtggagcccacatcataactgca

SEQ ID NO: 4411734 - DNA, 25 bp, Homo sapien
gaaaacatcgtgacactcccagctg

SEQ ID NO: 4411735 - DNA, 25 bp, Homo sapien
ttgctagtttttgacgtaatgttgc

SEQ ID NO: 4411736 - DNA, 25 bp, Homo sapien
tgacgtaatgttgctaccaattctt

SEQ ID NO: 4411737 - DNA, 25 bp, Homo sapien
aataatgtgtacactcgaatcattg

SEQ ID NO: 4411738 - DNA, 25 bp, Homo sapien
tgtgtacactcgaatcattgctagt

SEQ ID NO: 4411739 - DNA, 25 bp, Homo sapien
ggacgcaagcggtgctccattttgc

SEQ ID NO: 4411740 - DNA, 25 bp, Homo sapien
cttaagctgaaggttaggatgtgtt

SEQ ID NO: 4411741 - DNA, 25 bp, Homo sapien
tatcccgtgggttttggacgcaagc

SEQ ID NO: 4411742 - DNA, 25 bp, Homo sapien
aatctagacgagtccttaagctgaa

SEQ ID NO: 4411743 - DNA, 25 bp, Homo sapien
gtgcttcatacgtcctgcgccctag

SEQ ID NO: 4411744 - DNA, 25 bp, Homo sapien
tggccgttttgtaagccagcccctc

SEQ ID NO: 4411745 - DNA, 25 bp, Homo sapien
tttccttggtattggtcagcgtgca

SEQ ID NO: 4411746 - DNA, 25 bp, Homo sapien
tcagcgtgcatgtagtagggtctgc

SEQ ID NO: 4411747 - DNA, 25 bp, Homo sapien
cactgtgagtgttctagagtgtacc

SEQ ID NO: 4411748 - DNA, 25 bp, Homo sapien
gactcactgtgagtgttctagagtg

SEQ ID NO: 4411749 - DNA, 25 bp, Homo sapien
ctcactgtgagtgttctagagtgta

SEQ ID NO: 4411750 - DNA, 25 bp, Homo sapien
tcactgtgagtgttctagagtgtac

SEQ ID NO: 4411751 - DNA, 25 bp, Homo sapien
cactgtgagtgttctagagtgtacg

SEQ ID NO: 4411752 - DNA, 25 bp, Homo sapien
tcaactgactgtgaatgttctagag

SEQ ID NO: 4411753 - DNA, 25 bp, Homo sapien
ctgactgtgaatgttctagagtgta

SEQ ID NO: 4411754 - DNA, 25 bp, Homo sapien
aactgactgtgaatgttctagagtg

SEQ ID NO: 4411755 - DNA, 25 bp, Homo sapien
tgactgtgaatgttctagagtgtac

SEQ ID NO: 4411756 - DNA, 25 bp, Homo sapien
aaaggcctcttaggtgcctgtcaca

SEQ ID NO: 4411757 - DNA, 25 bp, Homo sapien
gagctcgttgctcatacagttgaga

SEQ ID NO: 4411758 - DNA, 25 bp, Homo sapien
tgtggatcagtcaactccgtgggag

SEQ ID NO: 4411759 - DNA, 25 bp, Homo sapien
gaaagtcccagcgacctttgtggat

SEQ ID NO: 4411760 - DNA, 25 bp, Homo sapien
tccttgggcattgctcacagatccc

SEQ ID NO: 4411761 - DNA, 25 bp, Homo sapien
ccttgggcattgctcacagatcccc

SEQ ID NO: 4411762 - DNA, 25 bp, Homo sapien
tgggtaagatgtgggtaggatggcc

SEQ ID NO: 4411763 - DNA, 25 bp, Homo sapien
tggtgactccggtcctgagctgctg

SEQ ID NO: 4411764 - DNA, 25 bp, Homo sapien
ggatggccacacatgattgagtttg

SEQ ID NO: 4411765 - DNA, 25 bp, Homo sapien
tccggaaagccgtgttggtgactcc

SEQ ID NO: 4411766 - DNA, 25 bp, Homo sapien
tgtccatgcagagcagacgcacgat

SEQ ID NO: 4411767 - DNA, 25 bp, Homo sapien
gatggccaaatcagaagacggatcc

SEQ ID NO: 4411768 - DNA, 25 bp, Homo sapien
gaagacaaaactgccggcacactga

SEQ ID NO: 4411769 - DNA, 25 bp, Homo sapien
ttaatttgtgaactggcccataccc

SEQ ID NO: 4411770 - DNA, 25 bp, Homo sapien
tgcctggtccgtggtgtcgagtcgg

SEQ ID NO: 4411771 - DNA, 25 bp, Homo sapien
cctcttgccatttgtcctggtacct

SEQ ID NO: 4411772 - DNA, 25 bp, Homo sapien
cgtggtgtcgagtcgggagctcctg

SEQ ID NO: 4411773 - DNA, 25 bp, Homo sapien
ggtccgtggtgtcgagtcgggagct

SEQ ID NO: 4411774 - DNA, 25 bp, Homo sapien
gtcgggggcctgaaatctctgtctt

SEQ ID NO: 4411775 - DNA, 25 bp, Homo sapien
gagtcgggggcctgaaatctctgtc

SEQ ID NO: 4411776 - DNA, 25 bp, Homo sapien
tgtcttccagccgtcagtggctgct

SEQ ID NO: 4411777 - DNA, 25 bp, Homo sapien
cgggggcctgaaatctctgtcttcc

SEQ ID NO: 4411778 - DNA, 25 bp, Homo sapien
caccatcattggatagatacatatc

SEQ ID NO: 4411779 - DNA, 25 bp, Homo sapien
gtctgagcacaagcttccacgccat

SEQ ID NO: 4411780 - DNA, 25 bp, Homo sapien
gcatttggaatcttagtctgagcac

SEQ ID NO: 4411781 - DNA, 25 bp, Homo sapien
ccatcattggatagatacatatctt

SEQ ID NO: 4411782 - DNA, 25 bp, Homo sapien
gaagttgggatgtggtgtctccaca

SEQ ID NO: 4411783 - DNA, 25 bp, Homo sapien
gctgattagccacaacagggtaatt

SEQ ID NO: 4411784 - DNA, 25 bp, Homo sapien
agtgcccttcggagccctgataaag

SEQ ID NO: 4411785 - DNA, 25 bp, Homo sapien
tgttctcttgtgtcggcttgctgtg

SEQ ID NO: 4411786 - DNA, 25 bp, Homo sapien
gacagtcggtgacttctgctccgtg

SEQ ID NO: 4411787 - DNA, 25 bp, Homo sapien
gtcggtgacttctgctccgtgcgag

SEQ ID NO: 4411788 - DNA, 25 bp, Homo sapien
tcggtgacttctgctccgtgcgagg

SEQ ID NO: 4411789 - DNA, 25 bp, Homo sapien
cagtcggtgacttctgctccgtgcg

SEQ ID NO: 4411790 - DNA, 25 bp, Homo sapien
agtgtggtggacgagctttgtggaa

SEQ ID NO: 4411791 - DNA, 25 bp, Homo sapien
tgtggtggacgagctttgtggaaca

SEQ ID NO: 4411792 - DNA, 25 bp, Homo sapien
tggtggacgagctttgtggaacatg

SEQ ID NO: 4411793 - DNA, 25 bp, Homo sapien
gtggacgagctttgtggaacatgtt

SEQ ID NO: 4411794 - DNA, 25 bp, Homo sapien
gtgaacgcgctttctggattgtgaa

SEQ ID NO: 4411795 - DNA, 25 bp, Homo sapien
agtgaacgagctttctggagcgcag

SEQ ID NO: 4411796 - DNA, 25 bp, Homo sapien
tagtgaacgagctttctggagcgca

SEQ ID NO: 4411797 - DNA, 25 bp, Homo sapien
gaacgcgctttctggattgtgaacg

SEQ ID NO: 4411798 - DNA, 25 bp, Homo sapien
tccaccgcctgggtacataggggct

SEQ ID NO: 4411799 - DNA, 25 bp, Homo sapien
acagcatgccgaatgagctttctgg

SEQ ID NO: 4411800 - DNA, 25 bp, Homo sapien
tgcacacgaccttggcccctccacc

SEQ ID NO: 4411801 - DNA, 25 bp, Homo sapien
cctgggtacataggggctacagcat

SEQ ID NO: 4411802 - DNA, 25 bp, Homo sapien
tgttttgcagcctaaacggctgtct

SEQ ID NO: 4411803 - DNA, 25 bp, Homo sapien
agcagtccgggttctccctggggca

SEQ ID NO: 4411804 - DNA, 25 bp, Homo sapien
ttgcagcctaaacggctgtctgggt

SEQ ID NO: 4411805 - DNA, 25 bp, Homo sapien
agcctaaacggctgtctgggtgcca

SEQ ID NO: 4411806 - DNA, 25 bp, Homo sapien
gatgggcccgtctttgaagcaggtc

SEQ ID NO: 4411807 - DNA, 25 bp, Homo sapien
caccacatgcgtccagagtgatggg

SEQ ID NO: 4411808 - DNA, 25 bp, Homo sapien
gcatccaacagctgtcgggaccatt

SEQ ID NO: 4411809 - DNA, 25 bp, Homo sapien
tccagtcgtggctgatgggcccgtc

SEQ ID NO: 4411810 - DNA, 25 bp, Homo sapien
agcggtgtaagatgtgaatggctgt

SEQ ID NO: 4411811 - DNA, 25 bp, Homo sapien
cagcggtgtaagatgtgaatggctg

SEQ ID NO: 4411812 - DNA, 25 bp, Homo sapien
gcggtgtaagatgtgaatggctgtc

SEQ ID NO: 4411813 - DNA, 25 bp, Homo sapien
cggtgtaagatgtgaatggctgtct

SEQ ID NO: 4411814 - DNA, 25 bp, Homo sapien
atggagagcccgagcaccttagaga

SEQ ID NO: 4411815 - DNA, 25 bp, Homo sapien
ttctgaatactgagtgagctcttgg

SEQ ID NO: 4411816 - DNA, 25 bp, Homo sapien
gaacacggcccctctttggctgctg

SEQ ID NO: 4411817 - DNA, 25 bp, Homo sapien
ggacaccggaatttgcttgttgaga

SEQ ID NO: 4411818 - DNA, 25 bp, Homo sapien
tggaaggctgggcttgacgtctgca

SEQ ID NO: 4411819 - DNA, 25 bp, Homo sapien
tttgtgccgacactggaatgccttc

SEQ ID NO: 4411820 - DNA, 25 bp, Homo sapien
ccaggaagcatttgtgccgacactg

SEQ ID NO: 4411821 - DNA, 25 bp, Homo sapien
cagagctgtacgtgtcttctcccag

SEQ ID NO: 4411822 - DNA, 25 bp, Homo sapien
gaagtacagccttgagaaacggaca

SEQ ID NO: 4411823 - DNA, 25 bp, Homo sapien
tgggagcccagtccaggctttttag

SEQ ID NO: 4411824 - DNA, 25 bp, Homo sapien
agcgcgaaagcccatttgaccctga

SEQ ID NO: 4411825 - DNA, 25 bp, Homo sapien
gaaacggacacattggagaggctgt

SEQ ID NO: 4411826 - DNA, 25 bp, Homo sapien
gacgcgaatattccagtttggagca

SEQ ID NO: 4411827 - DNA, 25 bp, Homo sapien
tgccctgtgcgtacacgggcactgc

SEQ ID NO: 4411828 - DNA, 25 bp, Homo sapien
tttctctaacagagtgtggtgacct

SEQ ID NO: 4411829 - DNA, 25 bp, Homo sapien
ttgccgtgggcacataacctcaggg

SEQ ID NO: 4411830 - DNA, 25 bp, Homo sapien
tctggtaatcgtctgagagtgggca

SEQ ID NO: 4411831 - DNA, 25 bp, Homo sapien
gtagtaaccttgtctttgcttgcca

SEQ ID NO: 4411832 - DNA, 25 bp, Homo sapien
tgtgcacatactaggcctaagtaag

SEQ ID NO: 4411833 - DNA, 25 bp, Homo sapien
gagtgggcatcttcatatgctccat

SEQ ID NO: 4411834 - DNA, 25 bp, Homo sapien
aagactgtagatcacgctggcgcag

SEQ ID NO: 4411835 - DNA, 25 bp, Homo sapien
gcgtgtgtgctctgcatccgccgat

SEQ ID NO: 4411836 - DNA, 25 bp, Homo sapien
cagagtcctcgggaaattagagcca

SEQ ID NO: 4411837 - DNA, 25 bp, Homo sapien
agcgcggcgccccaatgacatatgg

SEQ ID NO: 4411838 - DNA, 25 bp, Homo sapien
ttcgacatggcagcggttccacttg

SEQ ID NO: 4411839 - DNA, 25 bp, Homo sapien
ccgtttcgacatggcagcggttcca

SEQ ID NO: 4411840 - DNA, 25 bp, Homo sapien
catggcagcggttccacttggaggt

SEQ ID NO: 4411841 - DNA, 25 bp, Homo sapien
ggagccgttaggagccacggctgtg

SEQ ID NO: 4411842 - DNA, 25 bp, Homo sapien
tgttggctgcaggtgtgttatcccc

SEQ ID NO: 4411843 - DNA, 25 bp, Homo sapien
tcctgcccgcaggtgtggtgtcatc

SEQ ID NO: 4411844 - DNA, 25 bp, Homo sapien
tgtcatccgcaggtatagtgttgtc

SEQ ID NO: 4411845 - DNA, 25 bp, Homo sapien
cccataggtgcggtgttgcctgcag

SEQ ID NO: 4411846 - DNA, 25 bp, Homo sapien
cacacaggtgcagtgttgtccgcag

SEQ ID NO: 4411847 - DNA, 25 bp, Homo sapien
gagcacacaggtgcagtgttgtccg

SEQ ID NO: 4411848 - DNA, 25 bp, Homo sapien
gcacacaggtgcagtgttgtccgca

SEQ ID NO: 4411849 - DNA, 25 bp, Homo sapien
acacaggtgcagtgttgtccgcagg

SEQ ID NO: 4411850 - DNA, 25 bp, Homo sapien
gcctctgggactttgtatgcaggac

SEQ ID NO: 4411851 - DNA, 25 bp, Homo sapien
tgagggtggaattcaccaccgatcc

SEQ ID NO: 4411852 - DNA, 25 bp, Homo sapien
gataagatgctgtcgagaattggct

SEQ ID NO: 4411853 - DNA, 25 bp, Homo sapien
cttcccgtgaagtgagggtggaatt

SEQ ID NO: 4411854 - DNA, 25 bp, Homo sapien
ccaccgatccctcggataagatgct

SEQ ID NO: 4411855 - DNA, 25 bp, Homo sapien
cactctggctcctgatccgacagtg

SEQ ID NO: 4411856 - DNA, 25 bp, Homo sapien
gcggatttcagaatcccactctggc

SEQ ID NO: 4411857 - DNA, 25 bp, Homo sapien
ctcgctgggaagagcggatttcaga

SEQ ID NO: 4411858 - DNA, 25 bp, Homo sapien
gatccgacagtggaatatgccctgg

SEQ ID NO: 4411859 - DNA, 25 bp, Homo sapien
cctgccaggggaggaccgtgctgac

SEQ ID NO: 4411860 - DNA, 25 bp, Homo sapien
cgtgaccgtcagccctaaagccaag

SEQ ID NO: 4411861 - DNA, 25 bp, Homo sapien
ccctgccaggggaggaccgtgctga

SEQ ID NO: 4411862 - DNA, 25 bp, Homo sapien
ccagatcacccactcgcttcggcag

SEQ ID NO: 4411863 - DNA, 25 bp, Homo sapien
cagccagatcacccactcgcttcgg

SEQ ID NO: 4411864 - DNA, 25 bp, Homo sapien
gccagatcacccactcgcttcggca

SEQ ID NO: 4411865 - DNA, 25 bp, Homo sapien
agccagatcacccactcgcttcggc

SEQ ID NO: 4411866 - DNA, 25 bp, Homo sapien
gaatgaagaccttgtcgcgtgcagg

SEQ ID NO: 4411867 - DNA, 25 bp, Homo sapien
cccgaggccacaaggagaaaatgca

SEQ ID NO: 4411868 - DNA, 25 bp, Homo sapien
ttaaggaactctttaccctcatcag

SEQ ID NO: 4411869 - DNA, 25 bp, Homo sapien
ctctttaccctcatcagtgaaggag

SEQ ID NO: 4411870 - DNA, 25 bp, Homo sapien
acaacacggcgaacgttggctgagg

SEQ ID NO: 4411871 - DNA, 25 bp, Homo sapien
cgaacgttggctgagggcccatgtc

SEQ ID NO: 4411872 - DNA, 25 bp, Homo sapien
tgacaacacggcgaacgttggctga

SEQ ID NO: 4411873 - DNA, 25 bp, Homo sapien
ggctgacaacacggcgaacgttggc

SEQ ID NO: 4411874 - DNA, 25 bp, Homo sapien
gagttagcatcatgggagaatcccc

SEQ ID NO: 4411875 - DNA, 25 bp, Homo sapien
tcacaaacaagtggtgccctgggca

SEQ ID NO: 4411876 - DNA, 25 bp, Homo sapien
gggctgccctaagcctgagttagca

SEQ ID NO: 4411877 - DNA, 25 bp, Homo sapien
cagagttgaggacgtcctgagagac

SEQ ID NO: 4411878 - DNA, 25 bp, Homo sapien
ctctgcacaggctcgctgcacaggg

SEQ ID NO: 4411879 - DNA, 25 bp, Homo sapien
agcttggccttctcgtcaactttcc

SEQ ID NO: 4411880 - DNA, 25 bp, Homo sapien
gatatttggggtggtcctgaccgcc

SEQ ID NO: 4411881 - DNA, 25 bp, Homo sapien
ctgtgagcatcaggcgtgctctgca

SEQ ID NO: 4411882 - DNA, 25 bp, Homo sapien
gcagtgctgcagccatagcctcctc

SEQ ID NO: 4411883 - DNA, 25 bp, Homo sapien
ggattgtagctactcttgccacaga

SEQ ID NO: 4411884 - DNA, 25 bp, Homo sapien
gacatctatggcatatccaccgcct

SEQ ID NO: 4411885 - DNA, 25 bp, Homo sapien
catgttgcagaccttaagtatagac

SEQ ID NO: 4411886 - DNA, 25 bp, Homo sapien
ggccagaggcctcatttacagcagg

SEQ ID NO: 4411887 - DNA, 25 bp, Homo sapien
ctccccgtgcacagctgaaggatct

SEQ ID NO: 4411888 - DNA, 25 bp, Homo sapien
ggatctggcgcccacaggcagtctc

SEQ ID NO: 4411889 - DNA, 25 bp, Homo sapien
gaatgtcagtgttgagctccccgtg

SEQ ID NO: 4411890 - DNA, 25 bp, Homo sapien
gaagagtgatgttctcttcacactg

SEQ ID NO: 4411891 - DNA, 25 bp, Homo sapien
ttcgcccttcgaagcacacacggcg

SEQ ID NO: 4411892 - DNA, 25 bp, Homo sapien
acacggcgccacgtctcatctgaat

SEQ ID NO: 4411893 - DNA, 25 bp, Homo sapien
tctcatctgaatcaggtcatctgca

SEQ ID NO: 4411894 - DNA, 25 bp, Homo sapien
tcatctgcagcagtggtcgcacccg

SEQ ID NO: 4411895 - DNA, 25 bp, Homo sapien
tgtatgcatgcctctaaaataagtc

SEQ ID NO: 4411896 - DNA, 25 bp, Homo sapien
ttccttgacaccttgcgatccctga

SEQ ID NO: 4411897 - DNA, 25 bp, Homo sapien
cctgagctggaactaattgatgcct

SEQ ID NO: 4411898 - DNA, 25 bp, Homo sapien
gacacatattgtgaggccaaggacc

SEQ ID NO: 4411899 - DNA, 25 bp, Homo sapien
agggtacatccctagatggtctgcc

SEQ ID NO: 4411900 - DNA, 25 bp, Homo sapien
gggtacatccctagatggtctgcca

SEQ ID NO: 4411901 - DNA, 25 bp, Homo sapien
ggtacatccctagatggtctgccat

SEQ ID NO: 4411902 - DNA, 25 bp, Homo sapien
ggaaaatgcccggtacctgcatcgt

SEQ ID NO: 4411903 - DNA, 25 bp, Homo sapien
cagtcgttgattccctggaaaatgc

SEQ ID NO: 4411904 - DNA, 25 bp, Homo sapien
aatgcagctgcgctatctttctgaa

SEQ ID NO: 4411905 - DNA, 25 bp, Homo sapien
tgcatcgttactgcataatgcagct

SEQ ID NO: 4411906 - DNA, 25 bp, Homo sapien
ggtaaaggcatgtgacattgttgag

SEQ ID NO: 4411907 - DNA, 25 bp, Homo sapien
taaaggcatgtgacattgttgagct

SEQ ID NO: 4411908 - DNA, 25 bp, Homo sapien
ctggtaaaggcatgtgacattgttg

SEQ ID NO: 4411909 - DNA, 25 bp, Homo sapien
aggcatgtgacattgttgagctgtt

SEQ ID NO: 4411910 - DNA, 25 bp, Homo sapien
tcatgtatttccacacttgcctgca

SEQ ID NO: 4411911 - DNA, 25 bp, Homo sapien
tgtctgtgtgtgaatccgtatggta

SEQ ID NO: 4411912 - DNA, 25 bp, Homo sapien
ggtaggtatgaagctgtgtttttga

SEQ ID NO: 4411913 - DNA, 25 bp, Homo sapien
gtatttccacacttgcctgcagttg

SEQ ID NO: 4411914 - DNA, 25 bp, Homo sapien
gatatgctgatcaaaggtgtcggga

SEQ ID NO: 4411915 - DNA, 25 bp, Homo sapien
tatgctgatcaaaggtgtcgggaac

SEQ ID NO: 4411916 - DNA, 25 bp, Homo sapien
gatcaaaggtgtcgggaacagacag

SEQ ID NO: 4411917 - DNA, 25 bp, Homo sapien
tgctgatcaaaggtgtcgggaacag

SEQ ID NO: 4411918 - DNA, 25 bp, Homo sapien
tgctgatcaaaggtgtccggaacag

SEQ ID NO: 4411919 - DNA, 25 bp, Homo sapien
gatatgctgatcaaaggtgtccgga

SEQ ID NO: 4411920 - DNA, 25 bp, Homo sapien
tatgctgatcaaaggtgtccggaac

SEQ ID NO: 4411921 - DNA, 25 bp, Homo sapien
atgctgatcaaaggtgtccggaaca

SEQ ID NO: 4411922 - DNA, 25 bp, Homo sapien
tctgtagcatggatatgctgatcaa

SEQ ID NO: 4411923 - DNA, 25 bp, Homo sapien
gatatgctgatcaaaggtgtcggga

SEQ ID NO: 4411924 - DNA, 25 bp, Homo sapien
agcttctgtagcatggatatgctga

SEQ ID NO: 4411925 - DNA, 25 bp, Homo sapien
gatcaaaggtgtcgggaacagacag

SEQ ID NO: 4411926 - DNA, 25 bp, Homo sapien
gattggctgagacctccattgcaga

SEQ ID NO: 4411927 - DNA, 25 bp, Homo sapien
cctgtttgaatcctcggtagccgtt

SEQ ID NO: 4411928 - DNA, 25 bp, Homo sapien
gaatagttcccaagagcactcgcta

SEQ ID NO: 4411929 - DNA, 25 bp, Homo sapien
cttaactctgaagggccgtccggct

SEQ ID NO: 4411930 - DNA, 25 bp, Homo sapien
ttagagtggagtaaattgaataccg

SEQ ID NO: 4411931 - DNA, 25 bp, Homo sapien
cagctctcggctctgcaaattgctt

SEQ ID NO: 4411932 - DNA, 25 bp, Homo sapien
aattgctttagagtggagtaaattg

SEQ ID NO: 4411933 - DNA, 25 bp, Homo sapien
tggagtaaattgaataccggttcat

SEQ ID NO: 4411934 - DNA, 25 bp, Homo sapien
tgatccgcgaatgttgctgtatgat

SEQ ID NO: 4411935 - DNA, 25 bp, Homo sapien
tccgcgaatgttgctgtatgatcgt

SEQ ID NO: 4411936 - DNA, 25 bp, Homo sapien
gaaccgcggattttcgtgatccgcg

SEQ ID NO: 4411937 - DNA, 25 bp, Homo sapien
ttcgtgatccgcgaatgttgctgta

SEQ ID NO: 4411938 - DNA, 25 bp, Homo sapien
ggtccttagcgtgtgagtggccggg

SEQ ID NO: 4411939 - DNA, 25 bp, Homo sapien
acgcgccggccgtagcgaggtcctt

SEQ ID NO: 4411940 - DNA, 25 bp, Homo sapien
gggtcgggtcgcttccccgcagcat

SEQ ID NO: 4411941 - DNA, 25 bp, Homo sapien
aatgaatgggcgctgggaacacgcc

SEQ ID NO: 4411942 - DNA, 25 bp, Homo sapien
tccgaaaaataggaagtggccacta

SEQ ID NO: 4411943 - DNA, 25 bp, Homo sapien
agcccggatgtgagcccaagtggcc

SEQ ID NO: 4411944 - DNA, 25 bp, Homo sapien
tggccactacggaagctgttctggg

SEQ ID NO: 4411945 - DNA, 25 bp, Homo sapien
ccaagtggccatgcgcacaagccag

SEQ ID NO: 4411946 - DNA, 25 bp, Homo sapien
ttatttcctctgggccgggttctca

SEQ ID NO: 4411947 - DNA, 25 bp, Homo sapien
tatttcctctgggccgggttctcac

SEQ ID NO: 4411948 - DNA, 25 bp, Homo sapien
tccgcggcccgctccgcccaccaac

SEQ ID NO: 4411949 - DNA, 25 bp, Homo sapien
ggcctccacccacagccggcctccg

SEQ ID NO: 4411950 - DNA, 25 bp, Homo sapien
tgcgctcggagccggcctccaccca

SEQ ID NO: 4411951 - DNA, 25 bp, Homo sapien
ggagccggcctccacccacagccgg

SEQ ID NO: 4411952 - DNA, 25 bp, Homo sapien
caggcaggtctcgaactgaccttgt

SEQ ID NO: 4411953 - DNA, 25 bp, Homo sapien
tgccaccacgctgggctaagtttcg

SEQ ID NO: 4411954 - DNA, 25 bp, Homo sapien
accacgctgggctaagtttcgtatt

SEQ ID NO: 4411955 - DNA, 25 bp, Homo sapien
ccaggcaggtctcgaactgaccttg

SEQ ID NO: 4411956 - DNA, 25 bp, Homo sapien
tcgtttccggttcgtctgctgtggg

SEQ ID NO: 4411957 - DNA, 25 bp, Homo sapien
gttcgtttccggttcgtctgctgtg

SEQ ID NO: 4411958 - DNA, 25 bp, Homo sapien
ttccggttcgtctgctgtgggcggg

SEQ ID NO: 4411959 - DNA, 25 bp, Homo sapien
cgtttccggttcgtctgctgtgggc

SEQ ID NO: 4411960 - DNA, 25 bp, Homo sapien
cagaagccgggaatcggagaggaac

SEQ ID NO: 4411961 - DNA, 25 bp, Homo sapien
cgcggcgcgcctagttctgctcagg

SEQ ID NO: 4411962 - DNA, 25 bp, Homo sapien
agctctgtacgcctgcgcgtgccgg

SEQ ID NO: 4411963 - DNA, 25 bp, Homo sapien
ctgcggccgtgaccaaggtccgtga

SEQ ID NO: 4411964 - DNA, 25 bp, Homo sapien
cactggagctgggctaaggggtcac

SEQ ID NO: 4411965 - DNA, 25 bp, Homo sapien
cccactggagctgggctaaggggtc

SEQ ID NO: 4411966 - DNA, 25 bp, Homo sapien
ctgccacccgcccactggagctggg

SEQ ID NO: 4411967 - DNA, 25 bp, Homo sapien
cgcccactggagctgggctaagggg

SEQ ID NO: 4411968 - DNA, 25 bp, Homo sapien
ggaggcgcgagctgaggggggtgcg

SEQ ID NO: 4411969 - DNA, 25 bp, Homo sapien
cggaggcgcgagctgaggggggtgc

SEQ ID NO: 4411970 - DNA, 25 bp, Homo sapien
gaggacgctctccatcatgtgttcg

SEQ ID NO: 4411971 - DNA, 25 bp, Homo sapien
ggactcgagccttccgatgcggtct

SEQ ID NO: 4411972 - DNA, 25 bp, Homo sapien
tgtgttcgttcagcttgtccgcgag

SEQ ID NO: 4411973 - DNA, 25 bp, Homo sapien
gcggtctcgttctcttcggatccaa

SEQ ID NO: 4411974 - DNA, 25 bp, Homo sapien
ggcttcgctgcctgggacctcgcgg

SEQ ID NO: 4411975 - DNA, 25 bp, Homo sapien
tccgctactgggtgccgcgtcctcg

SEQ ID NO: 4411976 - DNA, 25 bp, Homo sapien
ggaccggctccgcaacgggaggctc

SEQ ID NO: 4411977 - DNA, 25 bp, Homo sapien
tgaagatggtgcacaccgggaccgg

SEQ ID NO: 4411978 - DNA, 25 bp, Homo sapien
tgaaggcggaggtagtaaaggagtc

SEQ ID NO: 4411979 - DNA, 25 bp, Homo sapien
tggcgccaccgaagctgggcgactt

SEQ ID NO: 4411980 - DNA, 25 bp, Homo sapien
tcgaagaagtccgaggccaaggagt

SEQ ID NO: 4411981 - DNA, 25 bp, Homo sapien
tctccgaagaacgtgctgaggctgg

SEQ ID NO: 4411982 - DNA, 25 bp, Homo sapien
cggggagcccgcgccgggattgctg

SEQ ID NO: 4411983 - DNA, 25 bp, Homo sapien
gggagcccgcgccgggattgctgac

SEQ ID NO: 4411984 - DNA, 25 bp, Homo sapien
cgggcacagcgaggggaggcgggct

SEQ ID NO: 4411985 - DNA, 25 bp, Homo sapien
ctcggtcccgggcacagcgagggga

SEQ ID NO: 4411986 - DNA, 25 bp, Homo sapien
cgcgaaaggctctggcgacgccggg

SEQ ID NO: 4411987 - DNA, 25 bp, Homo sapien
gggccctcgcatggccacgggttcg

SEQ ID NO: 4411988 - DNA, 25 bp, Homo sapien
ctggatgtgcgcgaaaggctctggc

SEQ ID NO: 4411989 - DNA, 25 bp, Homo sapien
tgcctggggccctcgcatggccacg

SEQ ID NO: 4411990 - DNA, 25 bp, Homo sapien
gaagccaggcgtcgttcctccggtc

SEQ ID NO: 4411991 - DNA, 25 bp, Homo sapien
tggatgttgtcgaacctgaggcccg

SEQ ID NO: 4411992 - DNA, 25 bp, Homo sapien
cgctcatgctcagggcggtggcaaa

SEQ ID NO: 4411993 - DNA, 25 bp, Homo sapien
aggcccggcatggtgaggttctcct

SEQ ID NO: 4411994 - DNA, 25 bp, Homo sapien
gattacaggacatggagaactgact

SEQ ID NO: 4411995 - DNA, 25 bp, Homo sapien
ctgactgagagaattacggtagaac

SEQ ID NO: 4411996 - DNA, 25 bp, Homo sapien
gaactgtctgccttggtggtattta

SEQ ID NO: 4411997 - DNA, 25 bp, Homo sapien
tctgagtagcagtccattaaatatg

SEQ ID NO: 4411998 - DNA, 25 bp, Homo sapien
ggttgtcggcataatctcgttcttc

SEQ ID NO: 4411999 - DNA, 25 bp, Homo sapien
ggtaccaagacagcaataacactgt

SEQ ID NO: 4412000 - DNA, 25 bp, Homo sapien
tctggttgtcggcataatctcgttc

SEQ ID NO: 4412001 - DNA, 25 bp, Homo sapien
agaactcaggactccgcggagtgca

SEQ ID NO: 4412002 - DNA, 25 bp, Homo sapien
caactggttttttccactgtcgtgc

SEQ ID NO: 4412003 - DNA, 25 bp, Homo sapien
tgtgctcaataaaactcgtccgccc

SEQ ID NO: 4412004 - DNA, 25 bp, Homo sapien
acactgggagagacaccacctgact

SEQ ID NO: 4412005 - DNA, 25 bp, Homo sapien
tgcccacctttgagtggtgactttg

SEQ ID NO: 4412006 - DNA, 25 bp, Homo sapien
cattgtgtactgaattccaaagtcg

SEQ ID NO: 4412007 - DNA, 25 bp, Homo sapien
tccaccaggtgcatgcatatagtca

SEQ ID NO: 4412008 - DNA, 25 bp, Homo sapien
ttaacacaaccgtcactacccatag

SEQ ID NO: 4412009 - DNA, 25 bp, Homo sapien
tgaagctctgtaccctttgagtaac

SEQ ID NO: 4412010 - DNA, 25 bp, Homo sapien
ctggataattcttatatccagagat

SEQ ID NO: 4412011 - DNA, 25 bp, Homo sapien
actggataattcttatatccagaga

SEQ ID NO: 4412012 - DNA, 25 bp, Homo sapien
gggaaggggcagcagcactgaggtc

SEQ ID NO: 4412013 - DNA, 25 bp, Homo sapien
tgggaaggggcagcagcactgaggt

SEQ ID NO: 4412014 - DNA, 25 bp, Homo sapien
ctgggaaggggcagcagcactgagg

SEQ ID NO: 4412015 - DNA, 25 bp, Homo sapien
aagggcctgaagttaccaagtctgt

SEQ ID NO: 4412016 - DNA, 25 bp, Homo sapien
tgctcacaggacacgatgctctcca

SEQ ID NO: 4412017 - DNA, 25 bp, Homo sapien
tcagtgctgtttcggtggctgcacc

SEQ ID NO: 4412018 - DNA, 25 bp, Homo sapien
ggacaaactagtcatcccaacagtg

SEQ ID NO: 4412019 - DNA, 25 bp, Homo sapien
ctggacgtggaatctgaagcatgcc

SEQ ID NO: 4412020 - DNA, 25 bp, Homo sapien
actcctctgattagaacgatcttta

SEQ ID NO: 4412021 - DNA, 25 bp, Homo sapien
gacggtgctgaagaacactggacgt

SEQ ID NO: 4412022 - DNA, 25 bp, Homo sapien
gaacgatctttagacggtgctgaag

SEQ ID NO: 4412023 - DNA, 25 bp, Homo sapien
gctgctgggcgcacttcatgctgca

SEQ ID NO: 4412024 - DNA, 25 bp, Homo sapien
tcggtagcctcgctgagccaggcct

SEQ ID NO: 4412025 - DNA, 25 bp, Homo sapien
agttgcctctgcacgggaccgtttc

SEQ ID NO: 4412026 - DNA, 25 bp, Homo sapien
aggtcaccagccaagccaaaggaaa

SEQ ID NO: 4412027 - DNA, 25 bp, Homo sapien
gagtcggcatttaggacttgtctct

SEQ ID NO: 4412028 - DNA, 25 bp, Homo sapien
atccaacaaaagattgttccactga

SEQ ID NO: 4412029 - DNA, 25 bp, Homo sapien
gattagctgtttcaatccaacaaaa

SEQ ID NO: 4412030 - DNA, 25 bp, Homo sapien
ctttttcacccagaaagcgaagcat

SEQ ID NO: 4412031 - DNA, 25 bp, Homo sapien
acccaaatggagagtgtctggacca

SEQ ID NO: 4412032 - DNA, 25 bp, Homo sapien
ttggtgaaatctgaagcccggtgca

SEQ ID NO: 4412033 - DNA, 25 bp, Homo sapien
tctggaccatgtgccgctgaaatac

SEQ ID NO: 4412034 - DNA, 25 bp, Homo sapien
gaaatacagtcaggataagggcgca

SEQ ID NO: 4412035 - DNA, 25 bp, Homo sapien
tcagtctctgcaagtcagggaacag

SEQ ID NO: 4412036 - DNA, 25 bp, Homo sapien
gagctctcgggattcccgccagtta

SEQ ID NO: 4412037 - DNA, 25 bp, Homo sapien
tctctgcaagtcagggaacagctgg

SEQ ID NO: 4412038 - DNA, 25 bp, Homo sapien
ttcccgccagttacagaagcagggt

SEQ ID NO: 4412039 - DNA, 25 bp, Homo sapien
tgactgtggctactgtgagagccag

SEQ ID NO: 4412040 - DNA, 25 bp, Homo sapien
ccttccaaggtgggatgtgactgtg

SEQ ID NO: 4412041 - DNA, 25 bp, Homo sapien
aaccagcacatccttccaaggtggg

SEQ ID NO: 4412042 - DNA, 25 bp, Homo sapien
cagttcttatgatcgcatgccgtct

SEQ ID NO: 4412043 - DNA, 25 bp, Homo sapien
tgataggcttgtccgcttccctcct

SEQ ID NO: 4412044 - DNA, 25 bp, Homo sapien
gctctgcaagacaattcacgttcga

SEQ ID NO: 4412045 - DNA, 25 bp, Homo sapien
cacgttcgaatcaacaatgtgtgct

SEQ ID NO: 4412046 - DNA, 25 bp, Homo sapien
tgctgcctacccttactaactggtg

SEQ ID NO: 4412047 - DNA, 25 bp, Homo sapien
ttgtataatcatttagaaaaacatt

SEQ ID NO: 4412048 - DNA, 25 bp, Homo sapien
agagaagaaaacacattatttacca

SEQ ID NO: 4412049 - DNA, 25 bp, Homo sapien
aatttatactttcccaaatggtgat

SEQ ID NO: 4412050 - DNA, 25 bp, Homo sapien
ccacggcctgggctctggcaatcct

SEQ ID NO: 4412051 - DNA, 25 bp, Homo sapien
ttcagcccgcgagtggcttgcgtct

SEQ ID NO: 4412052 - DNA, 25 bp, Homo sapien
cagaagcaggcgagtatttgtagag

SEQ ID NO: 4412053 - DNA, 25 bp, Homo sapien
ggcatgcagtgataacaaagcaggg

SEQ ID NO: 4412054 - DNA, 25 bp, Homo sapien
gagatgctcctgtagtcacgtgaca

SEQ ID NO: 4412055 - DNA, 25 bp, Homo sapien
tattagcagggcaactcaaatgaga

SEQ ID NO: 4412056 - DNA, 25 bp, Homo sapien
tggaaatgaggacaccagagcgtac

SEQ ID NO: 4412057 - DNA, 25 bp, Homo sapien
gcctgacggtgagtactggcctcca

SEQ ID NO: 4412058 - DNA, 25 bp, Homo sapien
aactggcatgcgtttcactctcagg

SEQ ID NO: 4412059 - DNA, 25 bp, Homo sapien
gtcttttctcaatgtaacgggcact

SEQ ID NO: 4412060 - DNA, 25 bp, Homo sapien
caatgtaacgggcactatctttgaa

SEQ ID NO: 4412061 - DNA, 25 bp, Homo sapien
tctttgaatacggtagatgtcctca

SEQ ID NO: 4412062 - DNA, 25 bp, Homo sapien
cgggcactatctttgaatacggtag

SEQ ID NO: 4412063 - DNA, 25 bp, Homo sapien
ccagccagccgttagtaatggtgac

SEQ ID NO: 4412064 - DNA, 25 bp, Homo sapien
taatggtgacaacgtcagtgtgctg

SEQ ID NO: 4412065 - DNA, 25 bp, Homo sapien
tcaccttgctggaagcagcgccagc

SEQ ID NO: 4412066 - DNA, 25 bp, Homo sapien
caaggcatggtggaatccatgaccc

SEQ ID NO: 4412067 - DNA, 25 bp, Homo sapien
cttgccgtagccctggccgtgggct

SEQ ID NO: 4412068 - DNA, 25 bp, Homo sapien
ctgcagtgaatctgtcgtgtggctg

SEQ ID NO: 4412069 - DNA, 25 bp, Homo sapien
tgtgaggagacgtccgcacaggtcc

SEQ ID NO: 4412070 - DNA, 25 bp, Homo sapien
gtgagcagcccgctcttgccgtagc

SEQ ID NO: 4412071 - DNA, 25 bp, Homo sapien
aaagccatgccggttccaccatgag

SEQ ID NO: 4412072 - DNA, 25 bp, Homo sapien
cctgacgggccgaagtgagaattcc

SEQ ID NO: 4412073 - DNA, 25 bp, Homo sapien
tataccacgaggagcaaatggcaca

SEQ ID NO: 4412074 - DNA, 25 bp, Homo sapien
tgctactgccagtcgtgaggcgaac

SEQ ID NO: 4412075 - DNA, 25 bp, Homo sapien
accatattggtgttgagctagtgcc

SEQ ID NO: 4412076 - DNA, 25 bp, Homo sapien
gagctagtgccaacacctgatcaac

SEQ ID NO: 4412077 - DNA, 25 bp, Homo sapien
ggttcctggctctagggaggtcacc

SEQ ID NO: 4412078 - DNA, 25 bp, Homo sapien
tcttgactagctccgtttcagacct

SEQ ID NO: 4412079 - DNA, 25 bp, Homo sapien
aaggcccaacttcactagtagtgcc

SEQ ID NO: 4412080 - DNA, 25 bp, Homo sapien
gatctggctgatcaagatttccgaa

SEQ ID NO: 4412081 - DNA, 25 bp, Homo sapien
ctagtagtgccagcctgacaaacca

SEQ ID NO: 4412082 - DNA, 25 bp, Homo sapien
tacacgtgcgggtagtactcgtaat

SEQ ID NO: 4412083 - DNA, 25 bp, Homo sapien
tgacaatcgagcctgcaaaatgcgg

SEQ ID NO: 4412084 - DNA, 25 bp, Homo sapien
gacaacagggcgtgggctttcaata

SEQ ID NO: 4412085 - DNA, 25 bp, Homo sapien
tacagttggtactagatagcagcca

SEQ ID NO: 4412086 - DNA, 25 bp, Homo sapien
tttgatctttaggacaacccaggca

SEQ ID NO: 4412087 - DNA, 25 bp, Homo sapien
tacttctagcctttttagttcatct

SEQ ID NO: 4412088 - DNA, 25 bp, Homo sapien
cttctagcctttttagttcatctat

SEQ ID NO: 4412089 - DNA, 25 bp, Homo sapien
tagcctttttagttcatctatttac

SEQ ID NO: 4412090 - DNA, 25 bp, Homo sapien
tctagcctttttagttcatctattt

SEQ ID NO: 4412091 - DNA, 25 bp, Homo sapien
gagagaggatggataaagccctgct

SEQ ID NO: 4412092 - DNA, 25 bp, Homo sapien
agtgctcacgaccaccgagcagctt

SEQ ID NO: 4412093 - DNA, 25 bp, Homo sapien
gtgcggactggacggaactttggga

SEQ ID NO: 4412094 - DNA, 25 bp, Homo sapien
gagggacgtagacgagacttgctcc

SEQ ID NO: 4412095 - DNA, 25 bp, Homo sapien
tacctggtcatgataggaaacatct

SEQ ID NO: 4412096 - DNA, 25 bp, Homo sapien
atcttgagatcttcacggcctccca

SEQ ID NO: 4412097 - DNA, 25 bp, Homo sapien
tcttgagatcttcacggcctcccaa

SEQ ID NO: 4412098 - DNA, 25 bp, Homo sapien
atttttacctggtcatgataggaaa

SEQ ID NO: 4412099 - DNA, 25 bp, Homo sapien
aggcacgtagtcctcgggattcttc

SEQ ID NO: 4412100 - DNA, 25 bp, Homo sapien
ggccccaggcacgtagtcctcggga

SEQ ID NO: 4412101 - DNA, 25 bp, Homo sapien
cgcacagacctcagctccgggggcg

SEQ ID NO: 4412102 - DNA, 25 bp, Homo sapien
tgggtcggccccaggcacgtagtcc

SEQ ID NO: 4412103 - DNA, 25 bp, Homo sapien
gacagaacagctcagttgccaagtt

SEQ ID NO: 4412104 - DNA, 25 bp, Homo sapien
tatgtgtgaagtctgagggagctaa

SEQ ID NO: 4412105 - DNA, 25 bp, Homo sapien
tgaattcctgaagctgcatgacaat

SEQ ID NO: 4412106 - DNA, 25 bp, Homo sapien
cagtatgaccaacgccgatcctctg

SEQ ID NO: 4412107 - DNA, 25 bp, Homo sapien
cctcgttgccacagagggtgatcgg

SEQ ID NO: 4412108 - DNA, 25 bp, Homo sapien
ctgggcatcctcgttgccacagagg

SEQ ID NO: 4412109 - DNA, 25 bp, Homo sapien
cggccagtccctcggtccagatgga

SEQ ID NO: 4412110 - DNA, 25 bp, Homo sapien
tccctcggtccagatggaaaactgt

SEQ ID NO: 4412111 - DNA, 25 bp, Homo sapien
ctggaatccaatcagtgctgagtga

SEQ ID NO: 4412112 - DNA, 25 bp, Homo sapien
gaatccaatcagtgctgagtgagtt

SEQ ID NO: 4412113 - DNA, 25 bp, Homo sapien
atccaatcagtgctgagtgagtttg

SEQ ID NO: 4412114 - DNA, 25 bp, Homo sapien
gctgagtgagtttgtttgccataac

SEQ ID NO: 4412115 - DNA, 25 bp, Homo sapien
tatccagcgactcctgtgggttccc

SEQ ID NO: 4412116 - DNA, 25 bp, Homo sapien
tgctgcagacagtcttcaccttgtg

SEQ ID NO: 4412117 - DNA, 25 bp, Homo sapien
tactgctgaagctccgcgtgcaaga

SEQ ID NO: 4412118 - DNA, 25 bp, Homo sapien
tcaccttgtgcagtctatccagcga

SEQ ID NO: 4412119 - DNA, 25 bp, Homo sapien
aaccgggtcacctagccttctgaag

SEQ ID NO: 4412120 - DNA, 25 bp, Homo sapien
catagtaccaggcagtaagaattac

SEQ ID NO: 4412121 - DNA, 25 bp, Homo sapien
tcagctggcagccttggcaagaaag

SEQ ID NO: 4412122 - DNA, 25 bp, Homo sapien
gactcaagctctgctagaaactctt

SEQ ID NO: 4412123 - DNA, 25 bp, Homo sapien
tgaaataggacataacaggaccagg

SEQ ID NO: 4412124 - DNA, 25 bp, Homo sapien
cacaaatcaccctatggcccagaat

SEQ ID NO: 4412125 - DNA, 25 bp, Homo sapien
acccagcctgtagtatgcatttaag

SEQ ID NO: 4412126 - DNA, 25 bp, Homo sapien
tatgctgctgctcctaataactgct

SEQ ID NO: 4412127 - DNA, 25 bp, Homo sapien
gacttgggttcaactcatgtgatcc

SEQ ID NO: 4412128 - DNA, 25 bp, Homo sapien
gaagccaggcaagtgatgaagagca

SEQ ID NO: 4412129 - DNA, 25 bp, Homo sapien
gactttagagccagatgacttgggt

SEQ ID NO: 4412130 - DNA, 25 bp, Homo sapien
gacagcactgtcctttcttggagca

SEQ ID NO: 4412131 - DNA, 25 bp, Homo sapien
ctcgagtaaccggctgctctccacg

SEQ ID NO: 4412132 - DNA, 25 bp, Homo sapien
tcgagtaaccggctgctctccacgc

SEQ ID NO: 4412133 - DNA, 25 bp, Homo sapien
cctcgagtaaccggctgctctccac

SEQ ID NO: 4412134 - DNA, 25 bp, Homo sapien
cgagtaaccggctgctctccacgcc

SEQ ID NO: 4412135 - DNA, 25 bp, Homo sapien
tcgcgtaaccggctgctctagacgc

SEQ ID NO: 4412136 - DNA, 25 bp, Homo sapien
gtaaccggctgctctagacgcccta

SEQ ID NO: 4412137 - DNA, 25 bp, Homo sapien
gcgtaaccggctgctctagacgccc

SEQ ID NO: 4412138 - DNA, 25 bp, Homo sapien
cctcgcgtaaccggctgctctagac

SEQ ID NO: 4412139 - DNA, 25 bp, Homo sapien
cctcgcgtaaccggctgctctccac

SEQ ID NO: 4412140 - DNA, 25 bp, Homo sapien
tcgcgtaaccggctgctctccacgc

SEQ ID NO: 4412141 - DNA, 25 bp, Homo sapien
gtaaccggctgctctccacgcccta

SEQ ID NO: 4412142 - DNA, 25 bp, Homo sapien
cgcgtaaccggctgctctccacgcc

SEQ ID NO: 4412143 - DNA, 25 bp, Homo sapien
ttcactcagtggctcaaagacaaca

SEQ ID NO: 4412144 - DNA, 25 bp, Homo sapien
gatgaacgtgaaactctcagccaag

SEQ ID NO: 4412145 - DNA, 25 bp, Homo sapien
gaatgaaactacaaccgaacagtgc

SEQ ID NO: 4412146 - DNA, 25 bp, Homo sapien
gaacagtgcatcattccgtatggat

SEQ ID NO: 4412147 - DNA, 25 bp, Homo sapien
cagccaggtcaagacattcccctgg

SEQ ID NO: 4412148 - DNA, 25 bp, Homo sapien
tgcccagtgctttccgctccctctt

SEQ ID NO: 4412149 - DNA, 25 bp, Homo sapien
cctggaaagccctgatgcccagtgc

SEQ ID NO: 4412150 - DNA, 25 bp, Homo sapien
caagacattcccctggaaagccctg

SEQ ID NO: 4412151 - DNA, 25 bp, Homo sapien
atgtcccaggattggccacgatgaa

SEQ ID NO: 4412152 - DNA, 25 bp, Homo sapien
gtcccaggattggccacgatgaact

SEQ ID NO: 4412153 - DNA, 25 bp, Homo sapien
ctaagtccatgtcccaggattggcc

SEQ ID NO: 4412154 - DNA, 25 bp, Homo sapien
gtccatgtcccaggattggccacga

SEQ ID NO: 4412155 - DNA, 25 bp, Homo sapien
gatgcacagagcagtaagcgaccag

SEQ ID NO: 4412156 - DNA, 25 bp, Homo sapien
gcagtcccgtgtttgtgtcccagaa

SEQ ID NO: 4412157 - DNA, 25 bp, Homo sapien
tatcagagaccaatcagcagtcccg

SEQ ID NO: 4412158 - DNA, 25 bp, Homo sapien
tccatggagctgtctggtcaggcgc

SEQ ID NO: 4412159 - DNA, 25 bp, Homo sapien
gtttcccaccccaatgatgcataaa

SEQ ID NO: 4412160 - DNA, 25 bp, Homo sapien
gaaacagagtttcccaccccaatga

SEQ ID NO: 4412161 - DNA, 25 bp, Homo sapien
ttcccaccccaatgatgcataaatg

SEQ ID NO: 4412162 - DNA, 25 bp, Homo sapien
aacagagtttcccaccccaatgatg

SEQ ID NO: 4412163 - DNA, 25 bp, Homo sapien
ggctgacgttccctgtggactatca

SEQ ID NO: 4412164 - DNA, 25 bp, Homo sapien
tccctgtggactatcacggccaatg

SEQ ID NO: 4412165 - DNA, 25 bp, Homo sapien
tgtggactatcacggccaatgaggg

SEQ ID NO: 4412166 - DNA, 25 bp, Homo sapien
cgttccctgtggactatcacggcca

SEQ ID NO: 4412167 - DNA, 25 bp, Homo sapien
tctgtagtgagcacgcaaggcctga

SEQ ID NO: 4412168 - DNA, 25 bp, Homo sapien
gaaacaccccagacctctgtagtga

SEQ ID NO: 4412169 - DNA, 25 bp, Homo sapien
tgggcgatctctccacgtgctgagt

SEQ ID NO: 4412170 - DNA, 25 bp, Homo sapien
tctgggcaaatcctctatgcggcga

SEQ ID NO: 4412171 - DNA, 25 bp, Homo sapien
tcagagatcactgcacacccgtgtg

SEQ ID NO: 4412172 - DNA, 25 bp, Homo sapien
taaccgttatcttgggctacctcga

SEQ ID NO: 4412173 - DNA, 25 bp, Homo sapien
tgtacatcagtgcaaccactaggga

SEQ ID NO: 4412174 - DNA, 25 bp, Homo sapien
ttttgtgcaacgtgtcgcttcccgg

SEQ ID NO: 4412175 - DNA, 25 bp, Homo sapien
cacccaggtagtcagcatgggaccc

SEQ ID NO: 4412176 - DNA, 25 bp, Homo sapien
ttggggtacgattgaagccatcacc

SEQ ID NO: 4412177 - DNA, 25 bp, Homo sapien
tagtcagcatgggacccaacagatc

SEQ ID NO: 4412178 - DNA, 25 bp, Homo sapien
gcatgggacccaacagatcattttt

SEQ ID NO: 4412179 - DNA, 25 bp, Homo sapien
ccgccgtcttctgctaagccttgct

SEQ ID NO: 4412180 - DNA, 25 bp, Homo sapien
gctaagccttgctccaaattggcca

SEQ ID NO: 4412181 - DNA, 25 bp, Homo sapien
cttgtctgccctcctgagtcacgct

SEQ ID NO: 4412182 - DNA, 25 bp, Homo sapien
agtgagggagtgaggctagggtggg

SEQ ID NO: 4412183 - DNA, 25 bp, Homo sapien
gagtgagggagtgaggctagggtgg

SEQ ID NO: 4412184 - DNA, 25 bp, Homo sapien
agatgctgccacaaggagtgaggga

SEQ ID NO: 4412185 - DNA, 25 bp, Homo sapien
aaggaggagatgaccaggccaccag

SEQ ID NO: 4412186 - DNA, 25 bp, Homo sapien
ggaggagatgaccaggccaccaggc

SEQ ID NO: 4412187 - DNA, 25 bp, Homo sapien
tgtgggaaggaggagatgaccaggc

SEQ ID NO: 4412188 - DNA, 25 bp, Homo sapien
ggaaggaggagatgaccaggccacc

SEQ ID NO: 4412189 - DNA, 25 bp, Homo sapien
ggctgcacatcgagtaggacagaag

SEQ ID NO: 4412190 - DNA, 25 bp, Homo sapien
ctgcggaaacggagaccacccgatc

SEQ ID NO: 4412191 - DNA, 25 bp, Homo sapien
aaacggagaccacccgatcttgact

SEQ ID NO: 4412192 - DNA, 25 bp, Homo sapien
ttgggctgcacatcgagtaggacag

SEQ ID NO: 4412193 - DNA, 25 bp, Homo sapien
ccagcagttccccagaaaccccagc

SEQ ID NO: 4412194 - DNA, 25 bp, Homo sapien
cagccagcagttccccagaaacccc

SEQ ID NO: 4412195 - DNA, 25 bp, Homo sapien
agcagttccccagaaaccccagcac

SEQ ID NO: 4412196 - DNA, 25 bp, Homo sapien
cagttccccagaaaccccagcacac

SEQ ID NO: 4412197 - DNA, 25 bp, Homo sapien
catttacggtgtgcttcaggagaac

SEQ ID NO: 4412198 - DNA, 25 bp, Homo sapien
tctgttagatttccaggaacagcct

SEQ ID NO: 4412199 - DNA, 25 bp, Homo sapien
ccaagaatgctgaatgggacatcca

SEQ ID NO: 4412200 - DNA, 25 bp, Homo sapien
atgctcattcccaccaaagcaggag

SEQ ID NO: 4412201 - DNA, 25 bp, Homo sapien
gatgaccaggaggaaggcgcaggtt

SEQ ID NO: 4412202 - DNA, 25 bp, Homo sapien
caatggtgcctgtttatcattggga

SEQ ID NO: 4412203 - DNA, 25 bp, Homo sapien
tatcattgggatgaccaggaggaag

SEQ ID NO: 4412204 - DNA, 25 bp, Homo sapien
gggctgaccaatggtgcctgtttat

SEQ ID NO: 4412205 - DNA, 25 bp, Homo sapien
gacagaaacgacgacattgcctgca

SEQ ID NO: 4412206 - DNA, 25 bp, Homo sapien
gctcgacaaggctgggagggccact

SEQ ID NO: 4412207 - DNA, 25 bp, Homo sapien
acacaaggccaaatggtccgaccgg

SEQ ID NO: 4412208 - DNA, 25 bp, Homo sapien
agagaaccaggagggtggctgctca

SEQ ID NO: 4412209 - DNA, 25 bp, Homo sapien
ttcggcctggaatgctgaatatgct

SEQ ID NO: 4412210 - DNA, 25 bp, Homo sapien
ttaacaccactggatttcggcctgg

SEQ ID NO: 4412211 - DNA, 25 bp, Homo sapien
tacagcactcgcattgggaccagag

SEQ ID NO: 4412212 - DNA, 25 bp, Homo sapien
gccctcaattactgggtcctgtgaa

SEQ ID NO: 4412213 - DNA, 25 bp, Homo sapien
acgtgacctccacagccggatagag

SEQ ID NO: 4412214 - DNA, 25 bp, Homo sapien
cagtttgccatggagtacatcaccc

SEQ ID NO: 4412215 - DNA, 25 bp, Homo sapien
ttcatcaggagcagacagtttgcca

SEQ ID NO: 4412216 - DNA, 25 bp, Homo sapien
agtacatcacccggcccagacgtga

SEQ ID NO: 4412217 - DNA, 25 bp, Homo sapien
caggtgttgtaagcatcaatcataa

SEQ ID NO: 4412218 - DNA, 25 bp, Homo sapien
tctggggtgacgtcctaagaaggtc

SEQ ID NO: 4412219 - DNA, 25 bp, Homo sapien
agatagggagaacaaaggacacctt

SEQ ID NO: 4412220 - DNA, 25 bp, Homo sapien
aaacaccctccacgaagatagggag

SEQ ID NO: 4412221 - DNA, 25 bp, Homo sapien
ttgctaccgaggatgaacaggacgc

SEQ ID NO: 4412222 - DNA, 25 bp, Homo sapien
tcagtgggactatctcaggagtggc

SEQ ID NO: 4412223 - DNA, 25 bp, Homo sapien
aatgcaaatgaaagcccgccagtgg

SEQ ID NO: 4412224 - DNA, 25 bp, Homo sapien
cataagaatgttccggcaagctggt

SEQ ID NO: 4412225 - DNA, 25 bp, Homo sapien
caagacggaaggtagctgatgcagc

SEQ ID NO: 4412226 - DNA, 25 bp, Homo sapien
tttccatcatgtgcggagccacggc

SEQ ID NO: 4412227 - DNA, 25 bp, Homo sapien
gcagccacacgtgtttacaggccgt

SEQ ID NO: 4412228 - DNA, 25 bp, Homo sapien
ccacggcgggttctgatgtgcatac

SEQ ID NO: 4412229 - DNA, 25 bp, Homo sapien
ctgagctgtgcgcatcgcaacggcg

SEQ ID NO: 4412230 - DNA, 25 bp, Homo sapien
cagtcgggccgggattctgagctgt

SEQ ID NO: 4412231 - DNA, 25 bp, Homo sapien
gattctgagctgtgcgcatcgcaac

SEQ ID NO: 4412232 - DNA, 25 bp, Homo sapien
gccgggattctgagctgtgcgcatc

SEQ ID NO: 4412233 - DNA, 25 bp, Homo sapien
cagacgcggtgtagagagaggacac

SEQ ID NO: 4412234 - DNA, 25 bp, Homo sapien
agcacgcggtgctcggctgccaggg

SEQ ID NO: 4412235 - DNA, 25 bp, Homo sapien
aggacacgctgacgcaggagctggc

SEQ ID NO: 4412236 - DNA, 25 bp, Homo sapien
gtgtagaagagcacaagtgtataca

SEQ ID NO: 4412237 - DNA, 25 bp, Homo sapien
ccaacgtactttagagctgagaaca

SEQ ID NO: 4412238 - DNA, 25 bp, Homo sapien
cccaacgtactttagagctgagaac

SEQ ID NO: 4412239 - DNA, 25 bp, Homo sapien
aacccaacgtactttagagctgaga

SEQ ID NO: 4412240 - DNA, 25 bp, Homo sapien
aaacccaacgtactttagagctgag

SEQ ID NO: 4412241 - DNA, 25 bp, Homo sapien
ctgcagggaaatccggccgatgccg

SEQ ID NO: 4412242 - DNA, 25 bp, Homo sapien
tcttgctctgggtaatacttgataa

SEQ ID NO: 4412243 - DNA, 25 bp, Homo sapien
taaccgaatgatacgcctccacggc

SEQ ID NO: 4412244 - DNA, 25 bp, Homo sapien
aaatccggccgatgccgctgagcag

SEQ ID NO: 4412245 - DNA, 25 bp, Homo sapien
ataaggcctttctggctcatgtctg

SEQ ID NO: 4412246 - DNA, 25 bp, Homo sapien
taaggcctttctggctcatgtctga

SEQ ID NO: 4412247 - DNA, 25 bp, Homo sapien
aaggcctttctggctcatgtctgac

SEQ ID NO: 4412248 - DNA, 25 bp, Homo sapien
agccatcccttgctcgtgcctcctt

SEQ ID NO: 4412249 - DNA, 25 bp, Homo sapien
tttgggacgtgacctaagactgagg

SEQ ID NO: 4412250 - DNA, 25 bp, Homo sapien
acgtgacctaagactgagggtgaga

SEQ ID NO: 4412251 - DNA, 25 bp, Homo sapien
tggcccaggtttgggacgtgaccta

SEQ ID NO: 4412252 - DNA, 25 bp, Homo sapien
cacaccgtgaggtgaaatgctcagc

SEQ ID NO: 4412253 - DNA, 25 bp, Homo sapien
taatgttacacatgaggcagcctgg

SEQ ID NO: 4412254 - DNA, 25 bp, Homo sapien
caggtaacgagggttgctgcaagca

SEQ ID NO: 4412255 - DNA, 25 bp, Homo sapien
cagagctttctcacacaggtaacga

SEQ ID NO: 4412256 - DNA, 25 bp, Homo sapien
ttctgtagcagccacgtcacaacgt

SEQ ID NO: 4412257 - DNA, 25 bp, Homo sapien
agatggcaatgcagtcgtcagctgc

SEQ ID NO: 4412258 - DNA, 25 bp, Homo sapien
tcagctgcgcgaggctgtctgagaa

SEQ ID NO: 4412259 - DNA, 25 bp, Homo sapien
tcagagatatcccaaatagctaggt

SEQ ID NO: 4412260 - DNA, 25 bp, Homo sapien
tgctgatcacaacggtgctctcggg

SEQ ID NO: 4412261 - DNA, 25 bp, Homo sapien
ctgctgtgtgctcgggcatccactg

SEQ ID NO: 4412262 - DNA, 25 bp, Homo sapien
gctgatatgtggtcgttcttgctga

SEQ ID NO: 4412263 - DNA, 25 bp, Homo sapien
tctgctgaacccagcggagatgagg

SEQ ID NO: 4412264 - DNA, 25 bp, Homo sapien
cgcaggacgggggacgagggacgtg

SEQ ID NO: 4412265 - DNA, 25 bp, Homo sapien
ctacgcgcaggacgggggacgaggg

SEQ ID NO: 4412266 - DNA, 25 bp, Homo sapien
gacgggggacgagggacgtgctgag

SEQ ID NO: 4412267 - DNA, 25 bp, Homo sapien
ggcagctcagcaccacgtgtacaca

SEQ ID NO: 4412268 - DNA, 25 bp, Homo sapien
tgtactcccggaaggctaatggcag

SEQ ID NO: 4412269 - DNA, 25 bp, Homo sapien
acaaggccctagcaggacctctgac

SEQ ID NO: 4412270 - DNA, 25 bp, Homo sapien
aggccacaaggccctagcaggacct

SEQ ID NO: 4412271 - DNA, 25 bp, Homo sapien
gcagggtggagtgtactcccggaag

SEQ ID NO: 4412272 - DNA, 25 bp, Homo sapien
catcccgtgctgagatgcggcattg

SEQ ID NO: 4412273 - DNA, 25 bp, Homo sapien
ggcgtcctccatcccgtgctgagat

SEQ ID NO: 4412274 - DNA, 25 bp, Homo sapien
ctgactccgtgtggcgtcctccatc

SEQ ID NO: 4412275 - DNA, 25 bp, Homo sapien
tctcatcgactgcaatctgactccg

SEQ ID NO: 4412276 - DNA, 25 bp, Homo sapien
cccgagactcagcatcgacgcgatg

SEQ ID NO: 4412277 - DNA, 25 bp, Homo sapien
agactcagcatcgacgcgatgccca

SEQ ID NO: 4412278 - DNA, 25 bp, Homo sapien
catctcccaccttcaatgctgatga

SEQ ID NO: 4412279 - DNA, 25 bp, Homo sapien
atctcccaccttcaatgctgatgaa

SEQ ID NO: 4412280 - DNA, 25 bp, Homo sapien
gagctggaaatctgccttctccgca

SEQ ID NO: 4412281 - DNA, 25 bp, Homo sapien
tccttgtggaacagggtgttcttag

SEQ ID NO: 4412282 - DNA, 25 bp, Homo sapien
gggcacgtcagcttccttgtggaac

SEQ ID NO: 4412283 - DNA, 25 bp, Homo sapien
tggaaatctgccttctccgcagaga

SEQ ID NO: 4412284 - DNA, 25 bp, Homo sapien
gaagaatggccttttggcgtgggtc

SEQ ID NO: 4412285 - DNA, 25 bp, Homo sapien
gggctgcgaaccacgcacagcagcg

SEQ ID NO: 4412286 - DNA, 25 bp, Homo sapien
agcacgcagtgcaggccatcgtttg

SEQ ID NO: 4412287 - DNA, 25 bp, Homo sapien
tcagctgagagggtgatcaggacac

SEQ ID NO: 4412288 - DNA, 25 bp, Homo sapien
cgcagtgcaggccatcgtttgccgg

SEQ ID NO: 4412289 - DNA, 25 bp, Homo sapien
ccggctgggtcatctctggagttag

SEQ ID NO: 4412290 - DNA, 25 bp, Homo sapien
tgttactgatttggcgacggcactg

SEQ ID NO: 4412291 - DNA, 25 bp, Homo sapien
ggtgttcggcccactcttttgccaa

SEQ ID NO: 4412292 - DNA, 25 bp, Homo sapien
tatagcacgttttcccaaaggtgtc

SEQ ID NO: 4412293 - DNA, 25 bp, Homo sapien
tgcgctgacagttggcagggaacgt

SEQ ID NO: 4412294 - DNA, 25 bp, Homo sapien
cagttggcagggaacgtggctatga

SEQ ID NO: 4412295 - DNA, 25 bp, Homo sapien
tgtctggcgggtgcgctgacagttg

SEQ ID NO: 4412296 - DNA, 25 bp, Homo sapien
gggaacgtggctatgatagttctgc

SEQ ID NO: 4412297 - DNA, 25 bp, Homo sapien
tgaggtcctctcagccatagcggtg

SEQ ID NO: 4412298 - DNA, 25 bp, Homo sapien
tgacctttggtccaggacaccgagg

SEQ ID NO: 4412299 - DNA, 25 bp, Homo sapien
catagcggtgagtggtcctgcatcc

SEQ ID NO: 4412300 - DNA, 25 bp, Homo sapien
gatcaccttgggctctgacctttgg

SEQ ID NO: 4412301 - DNA, 25 bp, Homo sapien
tacgtggctgtgtgcgtaaaaccac

SEQ ID NO: 4412302 - DNA, 25 bp, Homo sapien
gatcgtacaacctgagggatgctgg

SEQ ID NO: 4412303 - DNA, 25 bp, Homo sapien
tatggctgatgtacaggaacctgca

SEQ ID NO: 4412304 - DNA, 25 bp, Homo sapien
ggtcgtgcccctctgtaaaacgtgc

SEQ ID NO: 4412305 - DNA, 25 bp, Homo sapien
agcacaacagtttttagttttggtg

SEQ ID NO: 4412306 - DNA, 25 bp, Homo sapien
gcacaacagtttttagttttggtga

SEQ ID NO: 4412307 - DNA, 25 bp, Homo sapien
gatcaagattaacgtgtgccggcgg

SEQ ID NO: 4412308 - DNA, 25 bp, Homo sapien
tctaacaggaccgtgtgagacactg

SEQ ID NO: 4412309 - DNA, 25 bp, Homo sapien
taaaaagaaaccgaaggcagcatgg

SEQ ID NO: 4412310 - DNA, 25 bp, Homo sapien
tgtgcgaatccacgagaaaacaggg

SEQ ID NO: 4412311 - DNA, 25 bp, Homo sapien
gccgtttgaagtccactactatcga

SEQ ID NO: 4412312 - DNA, 25 bp, Homo sapien
tgcccgtcgtctgcacagtccgaag

SEQ ID NO: 4412313 - DNA, 25 bp, Homo sapien
aatggcatctgtccatcgctgcccg

SEQ ID NO: 4412314 - DNA, 25 bp, Homo sapien
ctactatcgatttcccacttgcgga

SEQ ID NO: 4412315 - DNA, 25 bp, Homo sapien
gagaaacaagctgaatgcgcgcggc

SEQ ID NO: 4412316 - DNA, 25 bp, Homo sapien
gaatgctgtcctctgtctcgatgag

SEQ ID NO: 4412317 - DNA, 25 bp, Homo sapien
aaaagtcctattatggcccaagccg

SEQ ID NO: 4412318 - DNA, 25 bp, Homo sapien
gaaacaggataacatctcaggccct

SEQ ID NO: 4412319 - DNA, 25 bp, Homo sapien
ctgcccgactgaaatgcagccggat

SEQ ID NO: 4412320 - DNA, 25 bp, Homo sapien
gctgcccgactgaaatgcagccgga

SEQ ID NO: 4412321 - DNA, 25 bp, Homo sapien
tgcccgactgaaatgcagccggatg

SEQ ID NO: 4412322 - DNA, 25 bp, Homo sapien
cggctgcccgactgaaatgcagccg

SEQ ID NO: 4412323 - DNA, 25 bp, Homo sapien
gtaggtgccaccacatttgcaaatt

SEQ ID NO: 4412324 - DNA, 25 bp, Homo sapien
gaaactaagttgctaatatacacgc

SEQ ID NO: 4412325 - DNA, 25 bp, Homo sapien
ttatcacgcatgtcaggaaacccac

SEQ ID NO: 4412326 - DNA, 25 bp, Homo sapien
gagcaggtcctacgtcaacttatga

SEQ ID NO: 4412327 - DNA, 25 bp, Homo sapien
tttagttccctaatatcatgttaga

SEQ ID NO: 4412328 - DNA, 25 bp, Homo sapien
tcatgttagaatatgaagacattta

SEQ ID NO: 4412329 - DNA, 25 bp, Homo sapien
gaaatattaagtctatactcatata

SEQ ID NO: 4412330 - DNA, 25 bp, Homo sapien
aagacatttatatgtcaggcagagg

SEQ ID NO: 4412331 - DNA, 25 bp, Homo sapien
tctgtgttactttctcaacgtcttg

SEQ ID NO: 4412332 - DNA, 25 bp, Homo sapien
caaaaccatgattttaccctgtagt

SEQ ID NO: 4412333 - DNA, 25 bp, Homo sapien
attttaccctgtagtccatctaatt

SEQ ID NO: 4412334 - DNA, 25 bp, Homo sapien
tgttactttctcaacgtcttgaaaa

SEQ ID NO: 4412335 - DNA, 25 bp, Homo sapien
gagaagcgccttctctagggagctt

SEQ ID NO: 4412336 - DNA, 25 bp, Homo sapien
ggagctttccaactcagtaagtggg

SEQ ID NO: 4412337 - DNA, 25 bp, Homo sapien
cactgcgattcaagaaaacacctgt

SEQ ID NO: 4412338 - DNA, 25 bp, Homo sapien
gcaatacaagcgcttctctgaagaa

SEQ ID NO: 4412339 - DNA, 25 bp, Homo sapien
ggctttgtccaaggcgtgtttcctc

SEQ ID NO: 4412340 - DNA, 25 bp, Homo sapien
tgcgttctaccacagaacaccagag

SEQ ID NO: 4412341 - DNA, 25 bp, Homo sapien
tgtttcctcctcacgaacgtgcact

SEQ ID NO: 4412342 - DNA, 25 bp, Homo sapien
aacgtgcactcgcacgacgctgtgc

SEQ ID NO: 4412343 - DNA, 25 bp, Homo sapien
tagagtaacttcacctaaatgactt

SEQ ID NO: 4412344 - DNA, 25 bp, Homo sapien
gagatagagtaacttcacctaaatg

SEQ ID NO: 4412345 - DNA, 25 bp, Homo sapien
gatagagtaacttcacctaaatgac

SEQ ID NO: 4412346 - DNA, 25 bp, Homo sapien
gagtaacttcacctaaatgacttcc

SEQ ID NO: 4412347 - DNA, 25 bp, Homo sapien
agagacccagcgtatggccctgtgt

SEQ ID NO: 4412348 - DNA, 25 bp, Homo sapien
gctcgcacattaaagccactctagt

SEQ ID NO: 4412349 - DNA, 25 bp, Homo sapien
gcgttttgcattcaggctcgcacat

SEQ ID NO: 4412350 - DNA, 25 bp, Homo sapien
ctgtaacacaagcaacggtggcagt

SEQ ID NO: 4412351 - DNA, 25 bp, Homo sapien
cactgcgtttcttggatccatcctt

SEQ ID NO: 4412352 - DNA, 25 bp, Homo sapien
tattctgcccgaggtgaaggaacgc

SEQ ID NO: 4412353 - DNA, 25 bp, Homo sapien
tgcaaagttattctgcccgaggtga

SEQ ID NO: 4412354 - DNA, 25 bp, Homo sapien
gatctctgtgaagaacctgtgggct

SEQ ID NO: 4412355 - DNA, 25 bp, Homo sapien
cctgctgagacgtgtgtgggtgtat

SEQ ID NO: 4412356 - DNA, 25 bp, Homo sapien
ggagcacacgcccagggttggccca

SEQ ID NO: 4412357 - DNA, 25 bp, Homo sapien
tatgtttctagcgtctgtgaaaggc

SEQ ID NO: 4412358 - DNA, 25 bp, Homo sapien
gaggatggaggatcctgcagcttgg

SEQ ID NO: 4412359 - DNA, 25 bp, Homo sapien
gaggactccagctcgtacatggtgg

SEQ ID NO: 4412360 - DNA, 25 bp, Homo sapien
gcacgctctcgtgcaggtagtgcct

SEQ ID NO: 4412361 - DNA, 25 bp, Homo sapien
tggtcaggttgaagagcacgctctc

SEQ ID NO: 4412362 - DNA, 25 bp, Homo sapien
tgaggcactgtgtgttgaagctgtc

SEQ ID NO: 4412363 - DNA, 25 bp, Homo sapien
cgggtccttctgacgtagtgtgttg

SEQ ID NO: 4412364 - DNA, 25 bp, Homo sapien
ggtccttctgacgtagtgtgttgga

SEQ ID NO: 4412365 - DNA, 25 bp, Homo sapien
ccgggtccttctgacgtagtgtgtt

SEQ ID NO: 4412366 - DNA, 25 bp, Homo sapien
gtccttctgacgtagtgtgttggag

SEQ ID NO: 4412367 - DNA, 25 bp, Homo sapien
tagcttcaagacacagtttcaaaga

SEQ ID NO: 4412368 - DNA, 25 bp, Homo sapien
agcttcaagacacagtttcaaagac

SEQ ID NO: 4412369 - DNA, 25 bp, Homo sapien
gaagcaggagttttattgagttcct

SEQ ID NO: 4412370 - DNA, 25 bp, Homo sapien
gagttttattgagttcctccatgtc

SEQ ID NO: 4412371 - DNA, 25 bp, Homo sapien
caggagttttattgagttcctccat

SEQ ID NO: 4412372 - DNA, 25 bp, Homo sapien
gttttattgagttcctccatgtcac

SEQ ID NO: 4412373 - DNA, 25 bp, Homo sapien
gccgtggcttgggaccaagaagaca

SEQ ID NO: 4412374 - DNA, 25 bp, Homo sapien
ttgcattcatgaacagtgacccagc

SEQ ID NO: 4412375 - DNA, 25 bp, Homo sapien
gatttcctgtctacgagctgtgtcc

SEQ ID NO: 4412376 - DNA, 25 bp, Homo sapien
tggctgaacgccgaccaactgcggg

SEQ ID NO: 4412377 - DNA, 25 bp, Homo sapien
gaaaacacgtgtctggcttcaaaac

SEQ ID NO: 4412378 - DNA, 25 bp, Homo sapien
caaggtggagggcttctaattacat

SEQ ID NO: 4412379 - DNA, 25 bp, Homo sapien
gaataactgtgtaaacgtaagggca

SEQ ID NO: 4412380 - DNA, 25 bp, Homo sapien
gatatttagagaacccttggcagag

SEQ ID NO: 4412381 - DNA, 25 bp, Homo sapien
gggctccataatcctctggcaaatc

SEQ ID NO: 4412382 - DNA, 25 bp, Homo sapien
ctgctttcccgcacaactggccggg

SEQ ID NO: 4412383 - DNA, 25 bp, Homo sapien
ccgagcctgtaaaggacgggctcca

SEQ ID NO: 4412384 - DNA, 25 bp, Homo sapien
gatttgccgggctcatgtctagctg

SEQ ID NO: 4412385 - DNA, 25 bp, Homo sapien
tttgaaggaggacctcatggcggca

SEQ ID NO: 4412386 - DNA, 25 bp, Homo sapien
acacaggtgggcgtctcaagaactg

SEQ ID NO: 4412387 - DNA, 25 bp, Homo sapien
acaagatggcatgggaagcttcccg

SEQ ID NO: 4412388 - DNA, 25 bp, Homo sapien
tgctgggtgcaagacgtgacaagat

SEQ ID NO: 4412389 - DNA, 25 bp, Homo sapien
aagccggtgttctcggcgtcatgtc

SEQ ID NO: 4412390 - DNA, 25 bp, Homo sapien
tggcaaagccggtgttctcggcgtc

SEQ ID NO: 4412391 - DNA, 25 bp, Homo sapien
gcacacgtgtgcctgaagccacggg

SEQ ID NO: 4412392 - DNA, 25 bp, Homo sapien
acacgtgtgcctgaagccacgggaa

SEQ ID NO: 4412393 - DNA, 25 bp, Homo sapien
ctgcaggtgaccccgggtggggcag

SEQ ID NO: 4412394 - DNA, 25 bp, Homo sapien
tgcaggtgaccccgggtggggcaga

SEQ ID NO: 4412395 - DNA, 25 bp, Homo sapien
gcaggtgaccccgggtggggcagac

SEQ ID NO: 4412396 - DNA, 25 bp, Homo sapien
ggtcccacgtgccacacaaggcagg

SEQ ID NO: 4412397 - DNA, 25 bp, Homo sapien
gacattctgggtgctgtcgcatccc

SEQ ID NO: 4412398 - DNA, 25 bp, Homo sapien
tcgcatccccggaatcagggcctgg

SEQ ID NO: 4412399 - DNA, 25 bp, Homo sapien
acacaaggcaggacattctgggtgc

SEQ ID NO: 4412400 - DNA, 25 bp, Homo sapien
cacttcctatgagggtgatccgaca

SEQ ID NO: 4412401 - DNA, 25 bp, Homo sapien
gctttacggccatcgggtctgcaag

SEQ ID NO: 4412402 - DNA, 25 bp, Homo sapien
tagtaatctcactgacccttggtcg

SEQ ID NO: 4412403 - DNA, 25 bp, Homo sapien
aaaggaaatcctatgctcgcgggct

SEQ ID NO: 4412404 - DNA, 25 bp, Homo sapien
ggatgttcctcagcgtcttttggcg

SEQ ID NO: 4412405 - DNA, 25 bp, Homo sapien
gtccctgtgaccctcgggatgttcc

SEQ ID NO: 4412406 - DNA, 25 bp, Homo sapien
tcttttggcgatggttcctttcctg

SEQ ID NO: 4412407 - DNA, 25 bp, Homo sapien
cctttcctgtaggatgcgaggctga

SEQ ID NO: 4412408 - DNA, 25 bp, Homo sapien
tctactagatccaaaattactatca

SEQ ID NO: 4412409 - DNA, 25 bp, Homo sapien
ttagaagtgtttcataacgtctctg

SEQ ID NO: 4412410 - DNA, 25 bp, Homo sapien
gcctggatggcagtgcggtgtagac

SEQ ID NO: 4412411 - DNA, 25 bp, Homo sapien
agtgtttcataacgtctctgcagca

SEQ ID NO: 4412412 - DNA, 25 bp, Homo sapien
gggcagtcgtcaccatcaagtggat

SEQ ID NO: 4412413 - DNA, 25 bp, Homo sapien
gatttgctgtgaccacctggctggg

SEQ ID NO: 4412414 - DNA, 25 bp, Homo sapien
ggctgattgtccctggtcctgacca

SEQ ID NO: 4412415 - DNA, 25 bp, Homo sapien
caggacgtccctgcgggctgattgt

SEQ ID NO: 4412416 - DNA, 25 bp, Homo sapien
cagcgcagacatggccgtcggctga

SEQ ID NO: 4412417 - DNA, 25 bp, Homo sapien
gacaggatcgcgcagcgcagacatg

SEQ ID NO: 4412418 - DNA, 25 bp, Homo sapien
cattacgcagaggagtgacttcagc

SEQ ID NO: 4412419 - DNA, 25 bp, Homo sapien
caggtcagcggctctgacagggaca

SEQ ID NO: 4412420 - DNA, 25 bp, Homo sapien
ccttagaagtagttatcctgtggag

SEQ ID NO: 4412421 - DNA, 25 bp, Homo sapien
ctgtggttcacccaagactttggag

SEQ ID NO: 4412422 - DNA, 25 bp, Homo sapien
caatcgtggcttccgtccactgtga

SEQ ID NO: 4412423 - DNA, 25 bp, Homo sapien
cattaagcctcacgtccaatcgtgg

SEQ ID NO: 4412424 - DNA, 25 bp, Homo sapien
ggtagataccgcactgcagacagca

SEQ ID NO: 4412425 - DNA, 25 bp, Homo sapien
gccgtcttcctactcgaggtagata

SEQ ID NO: 4412426 - DNA, 25 bp, Homo sapien
gggacttcacgcttgtttctaagga

SEQ ID NO: 4412427 - DNA, 25 bp, Homo sapien
ccggtttggaatagctgttacaggc

SEQ ID NO: 4412428 - DNA, 25 bp, Homo sapien
ggttgaaaaacactaagcgagcgga

SEQ ID NO: 4412429 - DNA, 25 bp, Homo sapien
cagcatgttcacgtttgtatccggc

SEQ ID NO: 4412430 - DNA, 25 bp, Homo sapien
gaatttgatgcacgtggaatcctgc

SEQ ID NO: 4412431 - DNA, 25 bp, Homo sapien
gggcagccccttgttagtatcttaa

SEQ ID NO: 4412432 - DNA, 25 bp, Homo sapien
tacccaccggtggtgtgatgatgcc

SEQ ID NO: 4412433 - DNA, 25 bp, Homo sapien
caattccgagataggattatgccta

SEQ ID NO: 4412434 - DNA, 25 bp, Homo sapien
ttatgcctagtttgtcatatcacag

SEQ ID NO: 4412435 - DNA, 25 bp, Homo sapien
tgatgatgccatataccgcagggct

SEQ ID NO: 4412436 - DNA, 25 bp, Homo sapien
cctgggaactaacacgtgcctcgta

SEQ ID NO: 4412437 - DNA, 25 bp, Homo sapien
cctgccgtgtaagaaggtgcaatcc

SEQ ID NO: 4412438 - DNA, 25 bp, Homo sapien
cccgcgggcagtacgtgaaatttct

SEQ ID NO: 4412439 - DNA, 25 bp, Homo sapien
aaccggcccgctgaccattttgaag

SEQ ID NO: 4412440 - DNA, 25 bp, Homo sapien
cacgtgcgatgcctacggtgagctt

SEQ ID NO: 4412441 - DNA, 25 bp, Homo sapien
tccctataagacaaagcgcggccga

SEQ ID NO: 4412442 - DNA, 25 bp, Homo sapien
ctctactggaaggtacgcgagccca

SEQ ID NO: 4412443 - DNA, 25 bp, Homo sapien
tttgcttccgaaaacagcggagccg

SEQ ID NO: 4412444 - DNA, 25 bp, Homo sapien
cttctggaagagacagttcaagttc

SEQ ID NO: 4412445 - DNA, 25 bp, Homo sapien
tcttcaaaggaggaatcccatgggc

SEQ ID NO: 4412446 - DNA, 25 bp, Homo sapien
cggcaatgtccgtatgaagtaatga

SEQ ID NO: 4412447 - DNA, 25 bp, Homo sapien
tgattctgcccgcttgaactcctgc

SEQ ID NO: 4412448 - DNA, 25 bp, Homo sapien
acttccacccaaccatccactcctt

SEQ ID NO: 4412449 - DNA, 25 bp, Homo sapien
ggactctgtgtggagagcctcttct

SEQ ID NO: 4412450 - DNA, 25 bp, Homo sapien
cattcaattcatgtttgttgacagc

SEQ ID NO: 4412451 - DNA, 25 bp, Homo sapien
gacagcctggtgtacatgggactct

SEQ ID NO: 4412452 - DNA, 25 bp, Homo sapien
agagaagaagcaccaggcgtctgaa

SEQ ID NO: 4412453 - DNA, 25 bp, Homo sapien
ctacagccgacatgtgagtcaaacc

SEQ ID NO: 4412454 - DNA, 25 bp, Homo sapien
cctgcaagacactgtaaagttcaga

SEQ ID NO: 4412455 - DNA, 25 bp, Homo sapien
tctgaatctgctctgtcctcgacaa

SEQ ID NO: 4412456 - DNA, 25 bp, Homo sapien
gagcatctgctctacgaatggtccc

SEQ ID NO: 4412457 - DNA, 25 bp, Homo sapien
atctgctctacgaatggtccccggt

SEQ ID NO: 4412458 - DNA, 25 bp, Homo sapien
tctacgaatggtccccggtgtgccc

SEQ ID NO: 4412459 - DNA, 25 bp, Homo sapien
tgctctacgaatggtccccggtgtg

SEQ ID NO: 4412460 - DNA, 25 bp, Homo sapien
tgtctcatcaatctcccccattaat

SEQ ID NO: 4412461 - DNA, 25 bp, Homo sapien
gtctcatcaatctcccccattaatt

SEQ ID NO: 4412462 - DNA, 25 bp, Homo sapien
atttgtatgtctcatcaatctcccc

SEQ ID NO: 4412463 - DNA, 25 bp, Homo sapien
tttgtatgtctcatcaatctccccc

SEQ ID NO: 4412464 - DNA, 25 bp, Homo sapien
cataacctttgtgggtgttggcgtg

SEQ ID NO: 4412465 - DNA, 25 bp, Homo sapien
gatactcagctgtgattctgtcaac

SEQ ID NO: 4412466 - DNA, 25 bp, Homo sapien
gggtgtcaacaaacgctccttgatt

SEQ ID NO: 4412467 - DNA, 25 bp, Homo sapien
catctggtgggtcccgatactcagc

SEQ ID NO: 4412468 - DNA, 25 bp, Homo sapien
tgcgtggagatactctcagattctg

SEQ ID NO: 4412469 - DNA, 25 bp, Homo sapien
gcgtggagatactctcagattctgt

SEQ ID NO: 4412470 - DNA, 25 bp, Homo sapien
tttccgcaatggaagacttggcagc

SEQ ID NO: 4412471 - DNA, 25 bp, Homo sapien
tgttgaaggatgatatcagtccacc

SEQ ID NO: 4412472 - DNA, 25 bp, Homo sapien
ggcgtttaggatctgctttccgcaa

SEQ ID NO: 4412473 - DNA, 25 bp, Homo sapien
tattctaggagatatgactggcgtt

SEQ ID NO: 4412474 - DNA, 25 bp, Homo sapien
ctcctttagtcgccttgacttgtaa

SEQ ID NO: 4412475 - DNA, 25 bp, Homo sapien
tcctttagtcgccttgacttgtaat

SEQ ID NO: 4412476 - DNA, 25 bp, Homo sapien
cctttagtcgccttgacttgtaatg

SEQ ID NO: 4412477 - DNA, 25 bp, Homo sapien
cctcctttagtcgccttgacttgta

SEQ ID NO: 4412478 - DNA, 25 bp, Homo sapien
gggagagaggatggtccatgtcctg

SEQ ID NO: 4412479 - DNA, 25 bp, Homo sapien
tcttgagtcaaaagacgctgtaccg

SEQ ID NO: 4412480 - DNA, 25 bp, Homo sapien
aaagacgctgtaccgcccagatgca

SEQ ID NO: 4412481 - DNA, 25 bp, Homo sapien
agtcaaaagacgctgtaccgcccag

SEQ ID NO: 4412482 - DNA, 25 bp, Homo sapien
gtctcttgagtcaaaagacgctgta

SEQ ID NO: 4412483 - DNA, 25 bp, Homo sapien
actgggctgtactgcaacccgggac

SEQ ID NO: 4412484 - DNA, 25 bp, Homo sapien
gggcttaggacctttgccaccagga

SEQ ID NO: 4412485 - DNA, 25 bp, Homo sapien
ccgggacctcccagatagtaatcat

SEQ ID NO: 4412486 - DNA, 25 bp, Homo sapien
tcttggtatcatggaaacctgtgct

SEQ ID NO: 4412487 - DNA, 25 bp, Homo sapien
tgaggccatggcgtcaagggcactc

SEQ ID NO: 4412488 - DNA, 25 bp, Homo sapien
gggtgctgttgaggccatggcgtca

SEQ ID NO: 4412489 - DNA, 25 bp, Homo sapien
gccatggcgtcaagggcactctgga

SEQ ID NO: 4412490 - DNA, 25 bp, Homo sapien
cgtcaagggcactctggagttaatt

SEQ ID NO: 4412491 - DNA, 25 bp, Homo sapien
tctttcttctgtcatccggcctgga

SEQ ID NO: 4412492 - DNA, 25 bp, Homo sapien
gagcctgttccgacactggcagaaa

SEQ ID NO: 4412493 - DNA, 25 bp, Homo sapien
aatccattaccaggcattgctccac

SEQ ID NO: 4412494 - DNA, 25 bp, Homo sapien
tccggcctggattccttggtggtgc

SEQ ID NO: 4412495 - DNA, 25 bp, Homo sapien
ggtcccagaagaagtggcaggaaat

SEQ ID NO: 4412496 - DNA, 25 bp, Homo sapien
tttcttggtcccagaagaagtggca

SEQ ID NO: 4412497 - DNA, 25 bp, Homo sapien
cttggtcccagaagaagtggcagga

SEQ ID NO: 4412498 - DNA, 25 bp, Homo sapien
gaagaagtggcaggaaataaactca

SEQ ID NO: 4412499 - DNA, 25 bp, Homo sapien
cagggattgttgatgcagtgactca

SEQ ID NO: 4412500 - DNA, 25 bp, Homo sapien
taagagaggatgttctaacacaggg

SEQ ID NO: 4412501 - DNA, 25 bp, Homo sapien
tcaatgtgctggcatcgaacccact

SEQ ID NO: 4412502 - DNA, 25 bp, Homo sapien
cgtgtgggagctgatgactcttgtc

SEQ ID NO: 4412503 - DNA, 25 bp, Homo sapien
ttctaagaatgtaactttgtaggac

SEQ ID NO: 4412504 - DNA, 25 bp, Homo sapien
taagaatgtaactttgtaggacttc

SEQ ID NO: 4412505 - DNA, 25 bp, Homo sapien
agatgtttctaagaatgtaactttg

SEQ ID NO: 4412506 - DNA, 25 bp, Homo sapien
tcaggacctgaaccatatttgtgaa

SEQ ID NO: 4412507 - DNA, 25 bp, Homo sapien
tgagatgaaatattttctgttcatc

SEQ ID NO: 4412508 - DNA, 25 bp, Homo sapien
ctgagatgaaatattttctgttcat

SEQ ID NO: 4412509 - DNA, 25 bp, Homo sapien
ccagatcatcagttgtttgctttca

SEQ ID NO: 4412510 - DNA, 25 bp, Homo sapien
agatcatcagttgtttgctttcaga

SEQ ID NO: 4412511 - DNA, 25 bp, Homo sapien
attccagatcatcagttgtttgctt

SEQ ID NO: 4412512 - DNA, 25 bp, Homo sapien
ttcagaactttacgtttgccatttg

SEQ ID NO: 4412513 - DNA, 25 bp, Homo sapien
aatgacttcgctccctgtggtgcat

SEQ ID NO: 4412514 - DNA, 25 bp, Homo sapien
tggaaactgcgcaaggatatgtgct

SEQ ID NO: 4412515 - DNA, 25 bp, Homo sapien
tggtttgcagatatgccacctcctt

SEQ ID NO: 4412516 - DNA, 25 bp, Homo sapien
gtggagccaggcctaacacatcttc

SEQ ID NO: 4412517 - DNA, 25 bp, Homo sapien
gatatgtgctcagtgaccgttaggg

SEQ ID NO: 4412518 - DNA, 25 bp, Homo sapien
caggagataagctctggacacctgc

SEQ ID NO: 4412519 - DNA, 25 bp, Homo sapien
agctctggacacctgcagactgtct

SEQ ID NO: 4412520 - DNA, 25 bp, Homo sapien
agcacaggagataagctctggacac

SEQ ID NO: 4412521 - DNA, 25 bp, Homo sapien
ctctggacacctgcagactgtcttc

SEQ ID NO: 4412522 - DNA, 25 bp, Homo sapien
atccattcctgtgccgcaatgccgt

SEQ ID NO: 4412523 - DNA, 25 bp, Homo sapien
atgccgtctgcaagacaggctgctg

SEQ ID NO: 4412524 - DNA, 25 bp, Homo sapien
caggctgctgcctttatggctgatg

SEQ ID NO: 4412525 - DNA, 25 bp, Homo sapien
tgccgcaatgccgtctgcaagacag

SEQ ID NO: 4412526 - DNA, 25 bp, Homo sapien
gagtttttgagcaaataaactcatc

SEQ ID NO: 4412527 - DNA, 25 bp, Homo sapien
ctttgcaaagattaagagtttttga

SEQ ID NO: 4412528 - DNA, 25 bp, Homo sapien
tgcaaagattaagagtttttgagca

SEQ ID NO: 4412529 - DNA, 25 bp, Homo sapien
gcaaagattaagagtttttgagcaa

SEQ ID NO: 4412530 - DNA, 25 bp, Homo sapien
agctgccgctcctgcatggtttgtg

SEQ ID NO: 4412531 - DNA, 25 bp, Homo sapien
gttttctctgatgcttaggcaccaa

SEQ ID NO: 4412532 - DNA, 25 bp, Homo sapien
ctctgatgcttaggcaccaaatgct

SEQ ID NO: 4412533 - DNA, 25 bp, Homo sapien
ccgctcctgcatggtttgtgttttc

SEQ ID NO: 4412534 - DNA, 25 bp, Homo sapien
tccctgcaaggatgctccattccct

SEQ ID NO: 4412535 - DNA, 25 bp, Homo sapien
tgcaaggatgctccattccctgatg

SEQ ID NO: 4412536 - DNA, 25 bp, Homo sapien
aggatgctccattccctgatgcctc

SEQ ID NO: 4412537 - DNA, 25 bp, Homo sapien
cctgcaaggatgctccattccctga

SEQ ID NO: 4412538 - DNA, 25 bp, Homo sapien
tgtgagggtactctatctcctgtga

SEQ ID NO: 4412539 - DNA, 25 bp, Homo sapien
tggcttcctcacatctggactctgg

SEQ ID NO: 4412540 - DNA, 25 bp, Homo sapien
cacttatcatctggtctttggcttc

SEQ ID NO: 4412541 - DNA, 25 bp, Homo sapien
cctgcgagggtattccttgccctgc

SEQ ID NO: 4412542 - DNA, 25 bp, Homo sapien
gattcgccaagcactcatcctattt

SEQ ID NO: 4412543 - DNA, 25 bp, Homo sapien
aagcactcatcctatttttcacatg

SEQ ID NO: 4412544 - DNA, 25 bp, Homo sapien
tcctcggatttgctcttggattcgc

SEQ ID NO: 4412545 - DNA, 25 bp, Homo sapien
tgctcttggattcgccaagcactca

SEQ ID NO: 4412546 - DNA, 25 bp, Homo sapien
agtcctggcagctttatgtaatgga

SEQ ID NO: 4412547 - DNA, 25 bp, Homo sapien
ggtaggaagcaaatgtagcatttga

SEQ ID NO: 4412548 - DNA, 25 bp, Homo sapien
taggaagcaaatgtagcatttgata

SEQ ID NO: 4412549 - DNA, 25 bp, Homo sapien
gaagtcctggcagctttatgtaatg

SEQ ID NO: 4412550 - DNA, 25 bp, Homo sapien
ctatggtcaggaggtttagaagatg

SEQ ID NO: 4412551 - DNA, 25 bp, Homo sapien
ctctatggtcaggaggtttagaaga

SEQ ID NO: 4412552 - DNA, 25 bp, Homo sapien
gtcaggaggtttagaagatggagct

SEQ ID NO: 4412553 - DNA, 25 bp, Homo sapien
caggaggtttagaagatggagcttc

SEQ ID NO: 4412554 - DNA, 25 bp, Homo sapien
tgcccatcgcaatcttcaggtggtc

SEQ ID NO: 4412555 - DNA, 25 bp, Homo sapien
tcacatgaggccgagtcgaaaggat

SEQ ID NO: 4412556 - DNA, 25 bp, Homo sapien
tcaggtggtcttccctttgcatagg

SEQ ID NO: 4412557 - DNA, 25 bp, Homo sapien
aggtggtcttccctttgcataggag

SEQ ID NO: 4412558 - DNA, 25 bp, Homo sapien
cagatttatgcgagcttcggataag

SEQ ID NO: 4412559 - DNA, 25 bp, Homo sapien
aaacgggactcagatttatgcgagc

SEQ ID NO: 4412560 - DNA, 25 bp, Homo sapien
tgcgagcttcggataagtttaatga

SEQ ID NO: 4412561 - DNA, 25 bp, Homo sapien
tagggaaacgggactcagatttatg

SEQ ID NO: 4412562 - DNA, 25 bp, Homo sapien
ccgtcggatagtggacagttgtcaa

SEQ ID NO: 4412563 - DNA, 25 bp, Homo sapien
ttgtcaacttgtgggttctggtggt

SEQ ID NO: 4412564 - DNA, 25 bp, Homo sapien
ggttctggtggtattttgcaatctg

SEQ ID NO: 4412565 - DNA, 25 bp, Homo sapien
gaacccgaagataatttaggcacta

SEQ ID NO: 4412566 - DNA, 25 bp, Homo sapien
ctgaacatctgtcacagggtccata

SEQ ID NO: 4412567 - DNA, 25 bp, Homo sapien
acagggtccatagtggaactggttc

SEQ ID NO: 4412568 - DNA, 25 bp, Homo sapien
tctttgtacctgaacatctgtcaca

SEQ ID NO: 4412569 - DNA, 25 bp, Homo sapien
tcacagggtccatagtggaactggt

SEQ ID NO: 4412570 - DNA, 25 bp, Homo sapien
gcattcgcagatggtgttaggtgcc

SEQ ID NO: 4412571 - DNA, 25 bp, Homo sapien
tctgcattcgcagatggtgttaggt

SEQ ID NO: 4412572 - DNA, 25 bp, Homo sapien
tctctgcattcgcagatggtgttag

SEQ ID NO: 4412573 - DNA, 25 bp, Homo sapien
agactctctgcattcgcagatggtg

SEQ ID NO: 4412574 - DNA, 25 bp, Homo sapien
tccaaggatgttggtaccggcgatc

SEQ ID NO: 4412575 - DNA, 25 bp, Homo sapien
agtgtggcatgaagagctccatgag

SEQ ID NO: 4412576 - DNA, 25 bp, Homo sapien
cactccaaggatgttggtaccggcg

SEQ ID NO: 4412577 - DNA, 25 bp, Homo sapien
aggatgttggtaccggcgatctccc

SEQ ID NO: 4412578 - DNA, 25 bp, Homo sapien
gctggtggtgaagagaacctcttgc

SEQ ID NO: 4412579 - DNA, 25 bp, Homo sapien
gatgttgattggagggaaagtggaa

SEQ ID NO: 4412580 - DNA, 25 bp, Homo sapien
aatcatagctggtggtgaagagaac

SEQ ID NO: 4412581 - DNA, 25 bp, Homo sapien
agatcagaagaggatgttgattgga

SEQ ID NO: 4412582 - DNA, 25 bp, Homo sapien
tgcctgaggcactttaccttccctc

SEQ ID NO: 4412583 - DNA, 25 bp, Homo sapien
ttcattgtgatgaaacgtaaattcc

SEQ ID NO: 4412584 - DNA, 25 bp, Homo sapien
cctgaggcactttaccttccctctt

SEQ ID NO: 4412585 - DNA, 25 bp, Homo sapien
gcctgaggcactttaccttccctct

SEQ ID NO: 4412586 - DNA, 25 bp, Homo sapien
ctgagagccggcacaaataaggcag

SEQ ID NO: 4412587 - DNA, 25 bp, Homo sapien
aggctgagagccggcacaaataagg

SEQ ID NO: 4412588 - DNA, 25 bp, Homo sapien
ttctaatgttggagagcatcctggg

SEQ ID NO: 4412589 - DNA, 25 bp, Homo sapien
gctgagagccggcacaaataaggca

SEQ ID NO: 4412590 - DNA, 25 bp, Homo sapien
caaagtcagccaagcatggagttgt

SEQ ID NO: 4412591 - DNA, 25 bp, Homo sapien
aaagtcagccaagcatggagttgtt

SEQ ID NO: 4412592 - DNA, 25 bp, Homo sapien
tctgatgctatatgaggtgctccga

SEQ ID NO: 4412593 - DNA, 25 bp, Homo sapien
tacctcaacaattaagctgtcctgg

SEQ ID NO: 4412594 - DNA, 25 bp, Homo sapien
tgattactcacaagcatccacagga

SEQ ID NO: 4412595 - DNA, 25 bp, Homo sapien
aaatagaggcaaagaaagcccttct

SEQ ID NO: 4412596 - DNA, 25 bp, Homo sapien
cacatggctggtgtacaatatcttt

SEQ ID NO: 4412597 - DNA, 25 bp, Homo sapien
catagcataaagtaggcacatggct

SEQ ID NO: 4412598 - DNA, 25 bp, Homo sapien
ccaagctctacacttttagtctaag

SEQ ID NO: 4412599 - DNA, 25 bp, Homo sapien
tcttcttcacgggacatagcataaa

SEQ ID NO: 4412600 - DNA, 25 bp, Homo sapien
tttggtcactgacaaggccagcttc

SEQ ID NO: 4412601 - DNA, 25 bp, Homo sapien
tccgtgacacgtggcacaagatgtg

SEQ ID NO: 4412602 - DNA, 25 bp, Homo sapien
tgcgccagctctgaacataaccagg

SEQ ID NO: 4412603 - DNA, 25 bp, Homo sapien
taaccaggcaggagttccgtgacac

SEQ ID NO: 4412604 - DNA, 25 bp, Homo sapien
catgggaattggttgaccaagtggc

SEQ ID NO: 4412605 - DNA, 25 bp, Homo sapien
gaccaagtggcaaacactagttcac

SEQ ID NO: 4412606 - DNA, 25 bp, Homo sapien
acactagttcacattgagccagtga

SEQ ID NO: 4412607 - DNA, 25 bp, Homo sapien
gtccaacggcttcatgggaattggt

SEQ ID NO: 4412608 - DNA, 25 bp, Homo sapien
ggtatggacaagtgatggaaggaca

SEQ ID NO: 4412609 - DNA, 25 bp, Homo sapien
gtgcatgaaggcactgggcataaga

SEQ ID NO: 4412610 - DNA, 25 bp, Homo sapien
ggagcaagcccaggaaacggcagtt

SEQ ID NO: 4412611 - DNA, 25 bp, Homo sapien
catgaaggcactgggcataagaagc

SEQ ID NO: 4412612 - DNA, 25 bp, Homo sapien
catctttccagctgatcgggtctgc

SEQ ID NO: 4412613 - DNA, 25 bp, Homo sapien
tccatctttccagctgatcgggtct

SEQ ID NO: 4412614 - DNA, 25 bp, Homo sapien
ggtctgcaggcgagagggtgacagt

SEQ ID NO: 4412615 - DNA, 25 bp, Homo sapien
ctttccagctgatcgggtctgcagg

SEQ ID NO: 4412616 - DNA, 25 bp, Homo sapien
tagtcataaacctccactctgaaag

SEQ ID NO: 4412617 - DNA, 25 bp, Homo sapien
aaaaatagtcataaacctccactct

SEQ ID NO: 4412618 - DNA, 25 bp, Homo sapien
agtcataaacctccactctgaaagg

SEQ ID NO: 4412619 - DNA, 25 bp, Homo sapien
aaatagtcataaacctccactctga

SEQ ID NO: 4412620 - DNA, 25 bp, Homo sapien
cttgaaagacaggaacaaaaacagg

SEQ ID NO: 4412621 - DNA, 25 bp, Homo sapien
gaaagacaggaacaaaaacaggaga

SEQ ID NO: 4412622 - DNA, 25 bp, Homo sapien
ggaagtcaggggcacttgaaagaca

SEQ ID NO: 4412623 - DNA, 25 bp, Homo sapien
aacaggagaattccctgtcaccaga

SEQ ID NO: 4412624 - DNA, 25 bp, Homo sapien
cagcccttgcataaggtgcagagtg

SEQ ID NO: 4412625 - DNA, 25 bp, Homo sapien
agacagcccttgcataaggtgcaga

SEQ ID NO: 4412626 - DNA, 25 bp, Homo sapien
gacagcccttgcataaggtgcagag

SEQ ID NO: 4412627 - DNA, 25 bp, Homo sapien
gcccttgcataaggtgcagagtgac

SEQ ID NO: 4412628 - DNA, 25 bp, Homo sapien
ttagcgaatccacaggaagtccaac

SEQ ID NO: 4412629 - DNA, 25 bp, Homo sapien
tagcgaatccacaggaagtccaaca

SEQ ID NO: 4412630 - DNA, 25 bp, Homo sapien
tcactgtatcatagctgaagtcact

SEQ ID NO: 4412631 - DNA, 25 bp, Homo sapien
ttagcttatgtctcccttagcagcc

SEQ ID NO: 4412632 - DNA, 25 bp, Homo sapien
tgttcactgtatcatagctgaagtc

SEQ ID NO: 4412633 - DNA, 25 bp, Homo sapien
ttatgtctcccttagcagccctgtt

SEQ ID NO: 4412634 - DNA, 25 bp, Homo sapien
tcacagctgatgtcttccaatacag

SEQ ID NO: 4412635 - DNA, 25 bp, Homo sapien
tcgcaaatgcccttatccatggtca

SEQ ID NO: 4412636 - DNA, 25 bp, Homo sapien
caatacagatgctctatgatgtggc

SEQ ID NO: 4412637 - DNA, 25 bp, Homo sapien
tgggacagctctgagaaatgtaacc

SEQ ID NO: 4412638 - DNA, 25 bp, Homo sapien
ccgggcactcctgttgacgatgcat

SEQ ID NO: 4412639 - DNA, 25 bp, Homo sapien
tgtttagcagtgtacagagggctgg

SEQ ID NO: 4412640 - DNA, 25 bp, Homo sapien
tgggatggcagaacccgggcactcc

SEQ ID NO: 4412641 - DNA, 25 bp, Homo sapien
caatcctgcctttcaggtgtttagc

SEQ ID NO: 4412642 - DNA, 25 bp, Homo sapien
ctctgcagcaatggagggcaccaag

SEQ ID NO: 4412643 - DNA, 25 bp, Homo sapien
ggattccaagacctcaacctgatgg

SEQ ID NO: 4412644 - DNA, 25 bp, Homo sapien
agaagtgattgtgccctctctgcag

SEQ ID NO: 4412645 - DNA, 25 bp, Homo sapien
tgagggaagattcacacaggccatc

SEQ ID NO: 4412646 - DNA, 25 bp, Homo sapien
actctgaattccactccaatccttc

SEQ ID NO: 4412647 - DNA, 25 bp, Homo sapien
caatccttccccactaaaggccctg

SEQ ID NO: 4412648 - DNA, 25 bp, Homo sapien
tctgcttcatcagggagtcctgctg

SEQ ID NO: 4412649 - DNA, 25 bp, Homo sapien
taaaggccctgctgaagtgtctgct

SEQ ID NO: 4412650 - DNA, 25 bp, Homo sapien
cagcactgtgatgtgtatgaggcag

SEQ ID NO: 4412651 - DNA, 25 bp, Homo sapien
gagccatatggcagaaatttccttc

SEQ ID NO: 4412652 - DNA, 25 bp, Homo sapien
cagtggcgagtcctttgtcctcctc

SEQ ID NO: 4412653 - DNA, 25 bp, Homo sapien
tgtctcccagcgaagggcactcttt

SEQ ID NO: 4412654 - DNA, 25 bp, Homo sapien
tgtcccatttgaagttaattgccct

SEQ ID NO: 4412655 - DNA, 25 bp, Homo sapien
ctgtctctgtcccatttgaagttaa

SEQ ID NO: 4412656 - DNA, 25 bp, Homo sapien
attgcccttttccctgttgtcccat

SEQ ID NO: 4412657 - DNA, 25 bp, Homo sapien
tctctgtcccatttgaagttaattg

SEQ ID NO: 4412658 - DNA, 25 bp, Homo sapien
ttcttgtgagaaaggtaccatcatc

SEQ ID NO: 4412659 - DNA, 25 bp, Homo sapien
gctgttgaacactgagagttcttgt

SEQ ID NO: 4412660 - DNA, 25 bp, Homo sapien
tctgcttctgacagttcattggcac

SEQ ID NO: 4412661 - DNA, 25 bp, Homo sapien
ttcattggcaccaggacagcaacag

SEQ ID NO: 4412662 - DNA, 25 bp, Homo sapien
cagacactggtgatccttggccctg

SEQ ID NO: 4412663 - DNA, 25 bp, Homo sapien
taatgtgtcgctcaaagagaactgg

SEQ ID NO: 4412664 - DNA, 25 bp, Homo sapien
tggccctgccactctcacaatagtg

SEQ ID NO: 4412665 - DNA, 25 bp, Homo sapien
actctcacaatagtgcccagagaga

SEQ ID NO: 4412666 - DNA, 25 bp, Homo sapien
tgctccagcctgatagatggccctt

SEQ ID NO: 4412667 - DNA, 25 bp, Homo sapien
cctggaatttccagcttaggcggca

SEQ ID NO: 4412668 - DNA, 25 bp, Homo sapien
ttaggcggcagctgttcggataacc

SEQ ID NO: 4412669 - DNA, 25 bp, Homo sapien
tgtgcacggatacgttgacaactga

SEQ ID NO: 4412670 - DNA, 25 bp, Homo sapien
gattgccccatgcattgtcccaatg

SEQ ID NO: 4412671 - DNA, 25 bp, Homo sapien
gggaaacatcagcttagggtttatc

SEQ ID NO: 4412672 - DNA, 25 bp, Homo sapien
catcagcttagggtttatcacagca

SEQ ID NO: 4412673 - DNA, 25 bp, Homo sapien
ctgtggatggtgacatggcatgatt

SEQ ID NO: 4412674 - DNA, 25 bp, Homo sapien
tctcaaaacgcatgtcagaagacgg

SEQ ID NO: 4412675 - DNA, 25 bp, Homo sapien
cagaagacggtgctgaccatctcag

SEQ ID NO: 4412676 - DNA, 25 bp, Homo sapien
ttccgcgagcttgtttctatgggtc

SEQ ID NO: 4412677 - DNA, 25 bp, Homo sapien
gagcgtttgctacccctgctggatt

SEQ ID NO: 4412678 - DNA, 25 bp, Homo sapien
tgcctctctgcatccgtcatcaaac

SEQ ID NO: 4412679 - DNA, 25 bp, Homo sapien
ttttaggtatgtctccttcaaacag

SEQ ID NO: 4412680 - DNA, 25 bp, Homo sapien
tctgcatccgtcatcaaacttttga

SEQ ID NO: 4412681 - DNA, 25 bp, Homo sapien
tgatgaagttgttgcctctcagttt

SEQ ID NO: 4412682 - DNA, 25 bp, Homo sapien
tgccaatttgccttgacattggatg

SEQ ID NO: 4412683 - DNA, 25 bp, Homo sapien
cttcaggatgtgacacattccgtta

SEQ ID NO: 4412684 - DNA, 25 bp, Homo sapien
cctctagacgatggagaaatgaatc

SEQ ID NO: 4412685 - DNA, 25 bp, Homo sapien
taacatataagctgccaatttgcct

SEQ ID NO: 4412686 - DNA, 25 bp, Homo sapien
tcaattcctcattgcacggattcat

SEQ ID NO: 4412687 - DNA, 25 bp, Homo sapien
tggttcaattcctcattgcacggat

SEQ ID NO: 4412688 - DNA, 25 bp, Homo sapien
gctctagactgagatggttcaattc

SEQ ID NO: 4412689 - DNA, 25 bp, Homo sapien
aaactctgccggctggctctagact

SEQ ID NO: 4412690 - DNA, 25 bp, Homo sapien
tgtgtcttctctgatctcagggaga

SEQ ID NO: 4412691 - DNA, 25 bp, Homo sapien
aatactctgcttcattggcacagta

SEQ ID NO: 4412692 - DNA, 25 bp, Homo sapien
attctctttcaaactgtgtgtcttc

SEQ ID NO: 4412693 - DNA, 25 bp, Homo sapien
gtatgacaaatactctgcttcattg

SEQ ID NO: 4412694 - DNA, 25 bp, Homo sapien
ggatttttgagaggattcggtacat

SEQ ID NO: 4412695 - DNA, 25 bp, Homo sapien
tggtggatttttgagaggattcggt

SEQ ID NO: 4412696 - DNA, 25 bp, Homo sapien
gtggatttttgagaggattcggtac

SEQ ID NO: 4412697 - DNA, 25 bp, Homo sapien
cttggtggatttttgagaggattcg

SEQ ID NO: 4412698 - DNA, 25 bp, Homo sapien
gaataggcttccagttgccgtcctg

SEQ ID NO: 4412699 - DNA, 25 bp, Homo sapien
cagttgccgtcctggattctgtagc

SEQ ID NO: 4412700 - DNA, 25 bp, Homo sapien
cattccctgggaataggcttccagt

SEQ ID NO: 4412701 - DNA, 25 bp, Homo sapien
tggaacattccctgggaataggctt

SEQ ID NO: 4412702 - DNA, 25 bp, Homo sapien
aaagtcccaatgaggagctccttgg

SEQ ID NO: 4412703 - DNA, 25 bp, Homo sapien
ggaatggtccacacattcctatttg

SEQ ID NO: 4412704 - DNA, 25 bp, Homo sapien
ggccacacgctgctctggaatggtc

SEQ ID NO: 4412705 - DNA, 25 bp, Homo sapien
cacacgctgctctggaatggtccac

SEQ ID NO: 4412706 - DNA, 25 bp, Homo sapien
ctggaatggtccacacattcctatt

SEQ ID NO: 4412707 - DNA, 25 bp, Homo sapien
acctctgtgagtgtgtccacctggc

SEQ ID NO: 4412708 - DNA, 25 bp, Homo sapien
agtctcagagcaggcaaagcgaagg

SEQ ID NO: 4412709 - DNA, 25 bp, Homo sapien
tgtgcagccacttcaaaacatcacc

SEQ ID NO: 4412710 - DNA, 25 bp, Homo sapien
ggtgtgaggtggacggtgtgggagg

SEQ ID NO: 4412711 - DNA, 25 bp, Homo sapien
ccagaggctgatggatgcgcttttc

SEQ ID NO: 4412712 - DNA, 25 bp, Homo sapien
gccttcgtgaagatcgagtggtagt

SEQ ID NO: 4412713 - DNA, 25 bp, Homo sapien
taaaatcgagtgagccccagaggct

SEQ ID NO: 4412714 - DNA, 25 bp, Homo sapien
caggatgtagctaataattgccagg

SEQ ID NO: 4412715 - DNA, 25 bp, Homo sapien
gactggaggagagggctgcactttt

SEQ ID NO: 4412716 - DNA, 25 bp, Homo sapien
ggaggagagggctgcacttttcttc

SEQ ID NO: 4412717 - DNA, 25 bp, Homo sapien
gagactggaggagagggctgcactt

SEQ ID NO: 4412718 - DNA, 25 bp, Homo sapien
cggagactggaggagagggctgcac

SEQ ID NO: 4412719 - DNA, 25 bp, Homo sapien
ctctggctgtagaccattgatcact

SEQ ID NO: 4412720 - DNA, 25 bp, Homo sapien
tcattgtgacatcttcatgtgctct

SEQ ID NO: 4412721 - DNA, 25 bp, Homo sapien
cttcttctgagcctaatctgctgct

SEQ ID NO: 4412722 - DNA, 25 bp, Homo sapien
ggctgtagaccattgatcacttctt

SEQ ID NO: 4412723 - DNA, 25 bp, Homo sapien
ttgaaccgggacagctttatgtctc

SEQ ID NO: 4412724 - DNA, 25 bp, Homo sapien
tgttgtctctgcatccgcgctcctg

SEQ ID NO: 4412725 - DNA, 25 bp, Homo sapien
ctcttggttttgaaccgggacagct

SEQ ID NO: 4412726 - DNA, 25 bp, Homo sapien
ctcctgcttcgcctctgctcttggc

SEQ ID NO: 4412727 - DNA, 25 bp, Homo sapien
taaactgtgccccttgaaaggctgt

SEQ ID NO: 4412728 - DNA, 25 bp, Homo sapien
gactgcacagtgttttatgccatgg

SEQ ID NO: 4412729 - DNA, 25 bp, Homo sapien
ccaagggctccctttattcttgtgg

SEQ ID NO: 4412730 - DNA, 25 bp, Homo sapien
cacctggacttagctttgaaatgac

SEQ ID NO: 4412731 - DNA, 25 bp, Homo sapien
ccagcaacccggtcatggggtcctt

SEQ ID NO: 4412732 - DNA, 25 bp, Homo sapien
ggtcatggggtcctttcaccacata

SEQ ID NO: 4412733 - DNA, 25 bp, Homo sapien
tggtttccacattgccgtttgcccc

SEQ ID NO: 4412734 - DNA, 25 bp, Homo sapien
ccccagctggatgatagcatgcatc

SEQ ID NO: 4412735 - DNA, 25 bp, Homo sapien
cagcaggtaattgtctttgcctcct

SEQ ID NO: 4412736 - DNA, 25 bp, Homo sapien
cacacagcaggtaattgtctttgcc

SEQ ID NO: 4412737 - DNA, 25 bp, Homo sapien
atgcacacagcaggtaattgtcttt

SEQ ID NO: 4412738 - DNA, 25 bp, Homo sapien
cacagcaggtaattgtctttgcctc

SEQ ID NO: 4412739 - DNA, 25 bp, Homo sapien
tccaaactcatctcacagtagttgt

SEQ ID NO: 4412740 - DNA, 25 bp, Homo sapien
ccaaactcatctcacagtagttgtt

SEQ ID NO: 4412741 - DNA, 25 bp, Homo sapien
ttccaaactcatctcacagtagttg

SEQ ID NO: 4412742 - DNA, 25 bp, Homo sapien
gaataacgatgtctgtgtaacaccc

SEQ ID NO: 4412743 - DNA, 25 bp, Homo sapien
gatgacatggatagaggagccacgt

SEQ ID NO: 4412744 - DNA, 25 bp, Homo sapien
caagatctggtgtgcgcagctttaa

SEQ ID NO: 4412745 - DNA, 25 bp, Homo sapien
agccacgtggaaacgcacaagcagg

SEQ ID NO: 4412746 - DNA, 25 bp, Homo sapien
gattcatgaacacattaactggggc

SEQ ID NO: 4412747 - DNA, 25 bp, Homo sapien
tggggctggtggattctgatttcca

SEQ ID NO: 4412748 - DNA, 25 bp, Homo sapien
catgcagcatcacagcgctatgtgt

SEQ ID NO: 4412749 - DNA, 25 bp, Homo sapien
aaagaagaaagcggtttcatgcagc

SEQ ID NO: 4412750 - DNA, 25 bp, Homo sapien
tgtgtctcaagccaggtcccacggc

SEQ ID NO: 4412751 - DNA, 25 bp, Homo sapien
ctgctgtgtctcaagccaggtccca

SEQ ID NO: 4412752 - DNA, 25 bp, Homo sapien
gtgcttccgactcagtcgaggcttt

SEQ ID NO: 4412753 - DNA, 25 bp, Homo sapien
tgggtttagtcgcaccagtgtttcc

SEQ ID NO: 4412754 - DNA, 25 bp, Homo sapien
gtcatagaccctggagcaaccacag

SEQ ID NO: 4412755 - DNA, 25 bp, Homo sapien
ttgagaagtgctcctatggcttcgt

SEQ ID NO: 4412756 - DNA, 25 bp, Homo sapien
agggcttgagaagtgctcctatggc

SEQ ID NO: 4412757 - DNA, 25 bp, Homo sapien
ggagggtcatagaccctggagcaac

SEQ ID NO: 4412758 - DNA, 25 bp, Homo sapien
ctccagcagcggacactagagatga

SEQ ID NO: 4412759 - DNA, 25 bp, Homo sapien
tagagatgatgcttggaaagaagag

SEQ ID NO: 4412760 - DNA, 25 bp, Homo sapien
cactagagatgatgcttggaaagaa

SEQ ID NO: 4412761 - DNA, 25 bp, Homo sapien
ccagcagcggacactagagatgatg

SEQ ID NO: 4412762 - DNA, 25 bp, Homo sapien
tggaaggttcttcgcatttcctggc

SEQ ID NO: 4412763 - DNA, 25 bp, Homo sapien
cattactggaaggttcttcgcattt

SEQ ID NO: 4412764 - DNA, 25 bp, Homo sapien
actggaaggttcttcgcatttcctg

SEQ ID NO: 4412765 - DNA, 25 bp, Homo sapien
aaggttcttcgcatttcctggcaac

SEQ ID NO: 4412766 - DNA, 25 bp, Homo sapien
tccagctacccagagcatgagcatt

SEQ ID NO: 4412767 - DNA, 25 bp, Homo sapien
tgtagttaagagtgccccatagcca

SEQ ID NO: 4412768 - DNA, 25 bp, Homo sapien
agctgttgtaaggtccggccccctg

SEQ ID NO: 4412769 - DNA, 25 bp, Homo sapien
tgccccatagccaacaggcatcaga

SEQ ID NO: 4412770 - DNA, 25 bp, Homo sapien
tcaaaattgcccagaaatttttctc

SEQ ID NO: 4412771 - DNA, 25 bp, Homo sapien
actcctagcaacaatgtagtgttga

SEQ ID NO: 4412772 - DNA, 25 bp, Homo sapien
cacgtgaactgaaggacgtcttctt

SEQ ID NO: 4412773 - DNA, 25 bp, Homo sapien
ctagcggatgtgcaaagccctgcct

SEQ ID NO: 4412774 - DNA, 25 bp, Homo sapien
catatttttcaaaaatctggggaag

SEQ ID NO: 4412775 - DNA, 25 bp, Homo sapien
gattgaagatcacatagagtagtgg

SEQ ID NO: 4412776 - DNA, 25 bp, Homo sapien
tgtaggagattgaagatcacataga

SEQ ID NO: 4412777 - DNA, 25 bp, Homo sapien
tatttccaaaatggtgtaggagatt

SEQ ID NO: 4412778 - DNA, 25 bp, Homo sapien
aatggtgtaggagattgaagatcac

SEQ ID NO: 4412779 - DNA, 25 bp, Homo sapien
tctgtgaagttcaacagtctctcct

SEQ ID NO: 4412780 - DNA, 25 bp, Homo sapien
agcaggcaggttctgcgtcccacag

SEQ ID NO: 4412781 - DNA, 25 bp, Homo sapien
gaggctaaatctcctcccggtgcaa

SEQ ID NO: 4412782 - DNA, 25 bp, Homo sapien
cctgtttttccggaagtctgtgaag

SEQ ID NO: 4412783 - DNA, 25 bp, Homo sapien
ctccagtctgggcatagctcttcag

SEQ ID NO: 4412784 - DNA, 25 bp, Homo sapien
cagtctgggcatagctcttcagccc

SEQ ID NO: 4412785 - DNA, 25 bp, Homo sapien
cagcaagcagactcgtgctccagtc

SEQ ID NO: 4412786 - DNA, 25 bp, Homo sapien
aagcagactcgtgctccagtctggg

SEQ ID NO: 4412787 - DNA, 25 bp, Homo sapien
ctctgctgtgcaggtaatttttgca

SEQ ID NO: 4412788 - DNA, 25 bp, Homo sapien
cctctgctgtgcaggtaatttttgc

SEQ ID NO: 4412789 - DNA, 25 bp, Homo sapien
tcctctgctgtgcaggtaatttttg

SEQ ID NO: 4412790 - DNA, 25 bp, Homo sapien
ggcctctttattgccacgtgcaccc

SEQ ID NO: 4412791 - DNA, 25 bp, Homo sapien
tgtggagttggctggcctctttatt

SEQ ID NO: 4412792 - DNA, 25 bp, Homo sapien
gtggagttggctggcctctttattg

SEQ ID NO: 4412793 - DNA, 25 bp, Homo sapien
gcctctttattgccacgtgcaccca

SEQ ID NO: 4412794 - DNA, 25 bp, Homo sapien
ccattttcacctgcgagcctctaga

SEQ ID NO: 4412795 - DNA, 25 bp, Homo sapien
gtcaagaaatgcatgccgcttttgg

SEQ ID NO: 4412796 - DNA, 25 bp, Homo sapien
tttctgtcaagaaatgcatgccgct

SEQ ID NO: 4412797 - DNA, 25 bp, Homo sapien
tgtcatttgtaagtctacagcttgc

SEQ ID NO: 4412798 - DNA, 25 bp, Homo sapien
cttcgtttgagaagtgaatctgaga

SEQ ID NO: 4412799 - DNA, 25 bp, Homo sapien
ggaaggcagctcagtattaaactcc

SEQ ID NO: 4412800 - DNA, 25 bp, Homo sapien
cagtattaaactcccttcgtttgag

SEQ ID NO: 4412801 - DNA, 25 bp, Homo sapien
taaactcccttcgtttgagaagtga

SEQ ID NO: 4412802 - DNA, 25 bp, Homo sapien
tccccagagctcgctgagatcttcc

SEQ ID NO: 4412803 - DNA, 25 bp, Homo sapien
ccagagctcgctgagatcttcccag

SEQ ID NO: 4412804 - DNA, 25 bp, Homo sapien
tctccccagagctcgctgagatctt

SEQ ID NO: 4412805 - DNA, 25 bp, Homo sapien
gtctccccagagctcgctgagatct

SEQ ID NO: 4412806 - DNA, 25 bp, Homo sapien
gctgtttgaagctgcgaacctggca

SEQ ID NO: 4412807 - DNA, 25 bp, Homo sapien
tgtccggccggacttcctttcattg

SEQ ID NO: 4412808 - DNA, 25 bp, Homo sapien
cggccggacttcctttcattggctc

SEQ ID NO: 4412809 - DNA, 25 bp, Homo sapien
atgtggttgctgtttgaagctgcga

SEQ ID NO: 4412810 - DNA, 25 bp, Homo sapien
cctggcgctgactgccgttgacctt

SEQ ID NO: 4412811 - DNA, 25 bp, Homo sapien
tgaccttgacgcataaccttggaca

SEQ ID NO: 4412812 - DNA, 25 bp, Homo sapien
ctctccttatctccccaaagtggaa

SEQ ID NO: 4412813 - DNA, 25 bp, Homo sapien
tcagtacagtctcaggagctcctct

SEQ ID NO: 4412814 - DNA, 25 bp, Homo sapien
tcacagggcgatcccagtgctacag

SEQ ID NO: 4412815 - DNA, 25 bp, Homo sapien
acagggcgatcccagtgctacagag

SEQ ID NO: 4412816 - DNA, 25 bp, Homo sapien
gcgatcccagtgctacagaggcctg

SEQ ID NO: 4412817 - DNA, 25 bp, Homo sapien
cccagtgctacagaggcctgccgga

SEQ ID NO: 4412818 - DNA, 25 bp, Homo sapien
tgaaaggagcctattccctgccttt

SEQ ID NO: 4412819 - DNA, 25 bp, Homo sapien
gaaatgaaaggagcctattccctgc

SEQ ID NO: 4412820 - DNA, 25 bp, Homo sapien
tccaccagtgcagaatgaaaatgag

SEQ ID NO: 4412821 - DNA, 25 bp, Homo sapien
gtgaatgcacccctcgtgcacccgg

SEQ ID NO: 4412822 - DNA, 25 bp, Homo sapien
tgcttgtccctttgagagatgtgct

SEQ ID NO: 4412823 - DNA, 25 bp, Homo sapien
agatgtgctgtgcatcccagttccc

SEQ ID NO: 4412824 - DNA, 25 bp, Homo sapien
gcagtgtggccgctttgcatgtgct

SEQ ID NO: 4412825 - DNA, 25 bp, Homo sapien
agccatgctgagagggcggagctcc

SEQ ID NO: 4412826 - DNA, 25 bp, Homo sapien
aaaacgagcatcctcagccaacaga

SEQ ID NO: 4412827 - DNA, 25 bp, Homo sapien
gcttgagtatgcaactgaaaacgag

SEQ ID NO: 4412828 - DNA, 25 bp, Homo sapien
caacaattccaaacgaggcggccgt

SEQ ID NO: 4412829 - DNA, 25 bp, Homo sapien
cggccgtgcaatgcttgagtatgca

SEQ ID NO: 4412830 - DNA, 25 bp, Homo sapien
actgaccatacatgagaggaagctg

SEQ ID NO: 4412831 - DNA, 25 bp, Homo sapien
cgtgtagatgtgtttgtgagtctgc

SEQ ID NO: 4412832 - DNA, 25 bp, Homo sapien
gtgcccgaagccctggagtcgtgta

SEQ ID NO: 4412833 - DNA, 25 bp, Homo sapien
tgactgaccatacatgagaggaagc

SEQ ID NO: 4412834 - DNA, 25 bp, Homo sapien
agataccgacgaggctaccatcaaa

SEQ ID NO: 4412835 - DNA, 25 bp, Homo sapien
catgcagaagcgcagtcatctgctt

SEQ ID NO: 4412836 - DNA, 25 bp, Homo sapien
gggagccatccaacaacaacacccc

SEQ ID NO: 4412837 - DNA, 25 bp, Homo sapien
tctgcttggcaaagataccgacgag

SEQ ID NO: 4412838 - DNA, 25 bp, Homo sapien
tccaaatgggtagactgcgttgtca

SEQ ID NO: 4412839 - DNA, 25 bp, Homo sapien
ccacacagacatgagttcgttttct

SEQ ID NO: 4412840 - DNA, 25 bp, Homo sapien
tcagaacataacgtggtctccacac

SEQ ID NO: 4412841 - DNA, 25 bp, Homo sapien
tgtcagggagctcgttcagaacata

SEQ ID NO: 4412842 - DNA, 25 bp, Homo sapien
ccagccccaacaggattggagcctc

SEQ ID NO: 4412843 - DNA, 25 bp, Homo sapien
cagccccaacaggattggagcctca

SEQ ID NO: 4412844 - DNA, 25 bp, Homo sapien
aggattggagcctcaggcagtgcag

SEQ ID NO: 4412845 - DNA, 25 bp, Homo sapien
ggattggagcctcaggcagtgcagt

SEQ ID NO: 4412846 - DNA, 25 bp, Homo sapien
ggtcctttcctttgcgcagctgaca

SEQ ID NO: 4412847 - DNA, 25 bp, Homo sapien
aggcgctgcgttgcggagcctggtc

SEQ ID NO: 4412848 - DNA, 25 bp, Homo sapien
cacaggcgctgcgttgcggagcctg

SEQ ID NO: 4412849 - DNA, 25 bp, Homo sapien
gcagaaaagcccagtgcttccggct

SEQ ID NO: 4412850 - DNA, 25 bp, Homo sapien
tgccggccatccagcaccaagctca

SEQ ID NO: 4412851 - DNA, 25 bp, Homo sapien
gccggccatccagcaccaagctcac

SEQ ID NO: 4412852 - DNA, 25 bp, Homo sapien
ctgccggccatccagcaccaagctc

SEQ ID NO: 4412853 - DNA, 25 bp, Homo sapien
tctgcgctgtgcctgcggtcctgtg

SEQ ID NO: 4412854 - DNA, 25 bp, Homo sapien
ctgattctgagtgtaagctcctgga

SEQ ID NO: 4412855 - DNA, 25 bp, Homo sapien
agctgtctggctgattctgagtgta

SEQ ID NO: 4412856 - DNA, 25 bp, Homo sapien
tagcttctcctcaacggccactgcc

SEQ ID NO: 4412857 - DNA, 25 bp, Homo sapien
gagggaacagcttggatgcctagaa

SEQ ID NO: 4412858 - DNA, 25 bp, Homo sapien
ggtgctagcacagccataggagcct

SEQ ID NO: 4412859 - DNA, 25 bp, Homo sapien
gagacacttgagctgagtcctccta

SEQ ID NO: 4412860 - DNA, 25 bp, Homo sapien
gatgctgtacggagagagacacttg

SEQ ID NO: 4412861 - DNA, 25 bp, Homo sapien
tagagcggctgccattctgggttct

SEQ ID NO: 4412862 - DNA, 25 bp, Homo sapien
ttatagtcttctttcctcacgtttg

SEQ ID NO: 4412863 - DNA, 25 bp, Homo sapien
ccctgaaatagagcggctgccattc

SEQ ID NO: 4412864 - DNA, 25 bp, Homo sapien
ttctttcctcacgtttgtgcagagc

SEQ ID NO: 4412865 - DNA, 25 bp, Homo sapien
tgctgcactgggaatatgaacactt

SEQ ID NO: 4412866 - DNA, 25 bp, Homo sapien
cactgggaatatgaacactttcgca

SEQ ID NO: 4412867 - DNA, 25 bp, Homo sapien
aatatgaacactttcgcactagtca

SEQ ID NO: 4412868 - DNA, 25 bp, Homo sapien
gaggtgctgcactgggaatatgaac

SEQ ID NO: 4412869 - DNA, 25 bp, Homo sapien
cagctgagcagcctgaaatgaattc

SEQ ID NO: 4412870 - DNA, 25 bp, Homo sapien
ccagccataccacgaactgttttct

SEQ ID NO: 4412871 - DNA, 25 bp, Homo sapien
ttcagtaacactttggcaccatcat

SEQ ID NO: 4412872 - DNA, 25 bp, Homo sapien
tcaaggacttctacagcaccgagtt

SEQ ID NO: 4412873 - DNA, 25 bp, Homo sapien
cccaataaattgtcgtccattggca

SEQ ID NO: 4412874 - DNA, 25 bp, Homo sapien
taagccacccaataaattgtcgtcc

SEQ ID NO: 4412875 - DNA, 25 bp, Homo sapien
tcaagacgctctaagccacccaata

SEQ ID NO: 4412876 - DNA, 25 bp, Homo sapien
gcatactctcaagacgctctaagcc

SEQ ID NO: 4412877 - DNA, 25 bp, Homo sapien
catctgtccactggggtgcacacag

SEQ ID NO: 4412878 - DNA, 25 bp, Homo sapien
gcactcgctgctcagtgcacatgag

SEQ ID NO: 4412879 - DNA, 25 bp, Homo sapien
tgggaattaaaaacagtggtgcctg

SEQ ID NO: 4412880 - DNA, 25 bp, Homo sapien
acagcacctctcgtgggaattaaaa

SEQ ID NO: 4412881 - DNA, 25 bp, Homo sapien
tgtgtattctcccactctcgggaga

SEQ ID NO: 4412882 - DNA, 25 bp, Homo sapien
gggagaactcaacgctcctgaagaa

SEQ ID NO: 4412883 - DNA, 25 bp, Homo sapien
gaactcaacgctcctgaagaacaca

SEQ ID NO: 4412884 - DNA, 25 bp, Homo sapien
actctcgggagaactcaacgctcct

SEQ ID NO: 4412885 - DNA, 25 bp, Homo sapien
ctggcgtcggctgcctcccacaatg

SEQ ID NO: 4412886 - DNA, 25 bp, Homo sapien
ccccaggtagccaagaggagtcatc

SEQ ID NO: 4412887 - DNA, 25 bp, Homo sapien
ccaagaggagtcatccaggtgtcgg

SEQ ID NO: 4412888 - DNA, 25 bp, Homo sapien
tagccaagaggagtcatccaggtgt

SEQ ID NO: 4412889 - DNA, 25 bp, Homo sapien
tcactgacaaagaatcctcctccgg

SEQ ID NO: 4412890 - DNA, 25 bp, Homo sapien
tcctcctccggcctgtcagtggcaa

SEQ ID NO: 4412891 - DNA, 25 bp, Homo sapien
gacaaagaatcctcctccggcctgt

SEQ ID NO: 4412892 - DNA, 25 bp, Homo sapien
aagaatcctcctccggcctgtcagt

SEQ ID NO: 4412893 - DNA, 25 bp, Homo sapien
cagggcatactgagtgggacagctg

SEQ ID NO: 4412894 - DNA, 25 bp, Homo sapien
ccagggcatactgagtgggacagct

SEQ ID NO: 4412895 - DNA, 25 bp, Homo sapien
gacgcttctgaagtgtcatttcctc

SEQ ID NO: 4412896 - DNA, 25 bp, Homo sapien
gccttgtggccaccactgtatcaca

SEQ ID NO: 4412897 - DNA, 25 bp, Homo sapien
tgttgctagtatcggcctgccttcc

SEQ ID NO: 4412898 - DNA, 25 bp, Homo sapien
ttgtaagggaggacgcttctgaagt

SEQ ID NO: 4412899 - DNA, 25 bp, Homo sapien
ccgagaccacgactgttctttgatt

SEQ ID NO: 4412900 - DNA, 25 bp, Homo sapien
gtgggcctgctcaggcatcctgctg

SEQ ID NO: 4412901 - DNA, 25 bp, Homo sapien
ctgctcttcccatcaagacctttgt

SEQ ID NO: 4412902 - DNA, 25 bp, Homo sapien
agccctgagaacccggtgggcctgc

SEQ ID NO: 4412903 - DNA, 25 bp, Homo sapien
gatcatgaaaagatctaggccaggc

SEQ ID NO: 4412904 - DNA, 25 bp, Homo sapien
accacatggagtaacatttcacgta

SEQ ID NO: 4412905 - DNA, 25 bp, Homo sapien
tacccctggctcactacatgacaaa

SEQ ID NO: 4412906 - DNA, 25 bp, Homo sapien
taggccaggcaagtatgcaaacaag

SEQ ID NO: 4412907 - DNA, 25 bp, Homo sapien
caggcatcgtctggctctcagcact

SEQ ID NO: 4412908 - DNA, 25 bp, Homo sapien
ctcctctaatgcatgtccaggcatc

SEQ ID NO: 4412909 - DNA, 25 bp, Homo sapien
ctctaatgcatgtccaggcatcgtc

SEQ ID NO: 4412910 - DNA, 25 bp, Homo sapien
gcatgtccaggcatcgtctggctct

SEQ ID NO: 4412911 - DNA, 25 bp, Homo sapien
aaaataggctccatggcccagtaac

SEQ ID NO: 4412912 - DNA, 25 bp, Homo sapien
catcgttggagtgtggtcaacatca

SEQ ID NO: 4412913 - DNA, 25 bp, Homo sapien
ttcttggtccatactgagggtttga

SEQ ID NO: 4412914 - DNA, 25 bp, Homo sapien
cccagtaactgctgatgacctcaaa

SEQ ID NO: 4412915 - DNA, 25 bp, Homo sapien
cattgctccacagtcattctgcttg

SEQ ID NO: 4412916 - DNA, 25 bp, Homo sapien
gccatctctcagctcgtactgtgcg

SEQ ID NO: 4412917 - DNA, 25 bp, Homo sapien
tctcagctcgtactgtgcgagaacc

SEQ ID NO: 4412918 - DNA, 25 bp, Homo sapien
ctgtgcgagaacctccaggaagcca

SEQ ID NO: 4412919 - DNA, 25 bp, Homo sapien
cttgttaacgctgtccaaagccccg

SEQ ID NO: 4412920 - DNA, 25 bp, Homo sapien
cgagttaatccctgtcttggctttg

SEQ ID NO: 4412921 - DNA, 25 bp, Homo sapien
tgtgcaacaccaaagcacgaacatc

SEQ ID NO: 4412922 - DNA, 25 bp, Homo sapien
gtttctgctagaaatcgaggcacag

SEQ ID NO: 4412923 - DNA, 25 bp, Homo sapien
tgtcagccaccagcgattgcctctg

SEQ ID NO: 4412924 - DNA, 25 bp, Homo sapien
ccagggatggtcactctctcctata

SEQ ID NO: 4412925 - DNA, 25 bp, Homo sapien
aagtcatgtccgctgagaccatcat

SEQ ID NO: 4412926 - DNA, 25 bp, Homo sapien
catcatgattacactcagtcctgct

SEQ ID NO: 4412927 - DNA, 25 bp, Homo sapien
gcccagctgcatcacagtgaggaca

SEQ ID NO: 4412928 - DNA, 25 bp, Homo sapien
ccagctgcatcacagtgaggacaca

SEQ ID NO: 4412929 - DNA, 25 bp, Homo sapien
tgcccagctgcatcacagtgaggac

SEQ ID NO: 4412930 - DNA, 25 bp, Homo sapien
agctgcatcacagtgaggacacagc

SEQ ID NO: 4412931 - DNA, 25 bp, Homo sapien
catgatgctccctcgctaaatggga

SEQ ID NO: 4412932 - DNA, 25 bp, Homo sapien
taactgcggacagagagtaaccctg

SEQ ID NO: 4412933 - DNA, 25 bp, Homo sapien
agagagtaaccctggtctgagaagg

SEQ ID NO: 4412934 - DNA, 25 bp, Homo sapien
taaatgggatcctaactgcggacag

SEQ ID NO: 4412935 - DNA, 25 bp, Homo sapien
tcctccgtaggccagggctgttggt

SEQ ID NO: 4412936 - DNA, 25 bp, Homo sapien
tcagtttccaggagcgagtggcact

SEQ ID NO: 4412937 - DNA, 25 bp, Homo sapien
agggtctcttgcaaatgtggctcac

SEQ ID NO: 4412938 - DNA, 25 bp, Homo sapien
gctgttggttgaagggtctcttgca

SEQ ID NO: 4412939 - DNA, 25 bp, Homo sapien
gcttatgttgactgttgtcagctct

SEQ ID NO: 4412940 - DNA, 25 bp, Homo sapien
tagctccaggtctgtgtcaaggctc

SEQ ID NO: 4412941 - DNA, 25 bp, Homo sapien
cacgggttttatgacaacatcattg

SEQ ID NO: 4412942 - DNA, 25 bp, Homo sapien
tgacaacatcattgcgtagcttatg

SEQ ID NO: 4412943 - DNA, 25 bp, Homo sapien
aagggtagaagatttggaataatct

SEQ ID NO: 4412944 - DNA, 25 bp, Homo sapien
taagggtagaagatttggaataatc

SEQ ID NO: 4412945 - DNA, 25 bp, Homo sapien
tttggaataatcttttatcattgct

SEQ ID NO: 4412946 - DNA, 25 bp, Homo sapien
ggaataatcttttatcattgctatc

SEQ ID NO: 4412947 - DNA, 25 bp, Homo sapien
tgtgtcggcccagaaagtggctgtt

SEQ ID NO: 4412948 - DNA, 25 bp, Homo sapien
tttgtgtcggcccagaaagtggctg

SEQ ID NO: 4412949 - DNA, 25 bp, Homo sapien
agtggctgttatgcctttgccgttt

SEQ ID NO: 4412950 - DNA, 25 bp, Homo sapien
tgccgtttccccacaacccagagta

SEQ ID NO: 4412951 - DNA, 25 bp, Homo sapien
tggcaggtttttcactggattcctc

SEQ ID NO: 4412952 - DNA, 25 bp, Homo sapien
catggcaggtttttcactggattcc

SEQ ID NO: 4412953 - DNA, 25 bp, Homo sapien
tcatggcaggtttttcactggattc

SEQ ID NO: 4412954 - DNA, 25 bp, Homo sapien
gcaggtttttcactggattcctcac

SEQ ID NO: 4412955 - DNA, 25 bp, Homo sapien
atttttacataagcagagcgtttag

SEQ ID NO: 4412956 - DNA, 25 bp, Homo sapien
tttttacataagcagagcgtttagg

SEQ ID NO: 4412957 - DNA, 25 bp, Homo sapien
cactatttttacataagcagagcgt

SEQ ID NO: 4412958 - DNA, 25 bp, Homo sapien
ctcgcactatttttacataagcaga

SEQ ID NO: 4412959 - DNA, 25 bp, Homo sapien
cagttctctggagaccccccttatt

SEQ ID NO: 4412960 - DNA, 25 bp, Homo sapien
gccgccgccgtctggctttccttct

SEQ ID NO: 4412961 - DNA, 25 bp, Homo sapien
cccccttattaagctgctgccgccg

SEQ ID NO: 4412962 - DNA, 25 bp, Homo sapien
agacctcctcggaagcccagtgcag

SEQ ID NO: 4412963 - DNA, 25 bp, Homo sapien
tctcccaagacgcaaggccaggagt

SEQ ID NO: 4412964 - DNA, 25 bp, Homo sapien
tttcagcggctgaattgaatacacg

SEQ ID NO: 4412965 - DNA, 25 bp, Homo sapien
gaatacacgcacaaacaatccaagg

SEQ ID NO: 4412966 - DNA, 25 bp, Homo sapien
gactctgtttcagcgcaactgtgaa

SEQ ID NO: 4412967 - DNA, 25 bp, Homo sapien
gaaaggcaatgtgactccaaacttc

SEQ ID NO: 4412968 - DNA, 25 bp, Homo sapien
tcacagtacctccatcttagacaaa

SEQ ID NO: 4412969 - DNA, 25 bp, Homo sapien
tcagcgtctgtggtcacttccacct

SEQ ID NO: 4412970 - DNA, 25 bp, Homo sapien
cttcacctgcgtgccagctgaggga

SEQ ID NO: 4412971 - DNA, 25 bp, Homo sapien
ggtgtgaacacccttgcttgacgcc

SEQ ID NO: 4412972 - DNA, 25 bp, Homo sapien
tgacaaggtcattccagggtggctc

SEQ ID NO: 4412973 - DNA, 25 bp, Homo sapien
gcttgacgcccttgatatagtcact

SEQ ID NO: 4412974 - DNA, 25 bp, Homo sapien
tatagtcacttacaacaaggcctgc

SEQ ID NO: 4412975 - DNA, 25 bp, Homo sapien
gttttcgatgatacagacaagaggg

SEQ ID NO: 4412976 - DNA, 25 bp, Homo sapien
gggagagctggtaactcaggcaaac

SEQ ID NO: 4412977 - DNA, 25 bp, Homo sapien
catgtgaatagctatgaatgtgtca

SEQ ID NO: 4412978 - DNA, 25 bp, Homo sapien
caggcaaacacgtgtccggtagatt

SEQ ID NO: 4412979 - DNA, 25 bp, Homo sapien
gagatggaaaggtgcgctggcggcc

SEQ ID NO: 4412980 - DNA, 25 bp, Homo sapien
cggaccccggcgatcgtgccgtgtt

SEQ ID NO: 4412981 - DNA, 25 bp, Homo sapien
gagtccctactacctctacggatat

SEQ ID NO: 4412982 - DNA, 25 bp, Homo sapien
gccgtgttcgtctcctttgtgtttc

SEQ ID NO: 4412983 - DNA, 25 bp, Homo sapien
gtggcgacggcggtcgaggcagccc

SEQ ID NO: 4412984 - DNA, 25 bp, Homo sapien
tgggcaagttgcaaagtcctcggca

SEQ ID NO: 4412985 - DNA, 25 bp, Homo sapien
cgctgggtctcgtgcggaggtcccc

SEQ ID NO: 4412986 - DNA, 25 bp, Homo sapien
gtgggagctgcggtcgcgacaggag

SEQ ID NO: 4412987 - DNA, 25 bp, Homo sapien
cagtctgggtcgctctcgtccaggg

SEQ ID NO: 4412988 - DNA, 25 bp, Homo sapien
atcggccgcttgatgtggcccgacg

SEQ ID NO: 4412989 - DNA, 25 bp, Homo sapien
gccaccgggctgcaagccatgaatt

SEQ ID NO: 4412990 - DNA, 25 bp, Homo sapien
gacgccgtcttgcaccagtctgggt

SEQ ID NO: 4412991 - DNA, 25 bp, Homo sapien
tgatcttcctgcgttcgatcttgga

SEQ ID NO: 4412992 - DNA, 25 bp, Homo sapien
gatcttcctgcgttcgatcttggac

SEQ ID NO: 4412993 - DNA, 25 bp, Homo sapien
tcttcctgcgttcgatcttggacca

SEQ ID NO: 4412994 - DNA, 25 bp, Homo sapien
tcctgcgttcgatcttggaccatac

SEQ ID NO: 4412995 - DNA, 25 bp, Homo sapien
gatgaacgggatcttctcgctgtcc

SEQ ID NO: 4412996 - DNA, 25 bp, Homo sapien
ctcccggatgaacgggatcttctcg

SEQ ID NO: 4412997 - DNA, 25 bp, Homo sapien
gggatcttctcgctgtccttcagca

SEQ ID NO: 4412998 - DNA, 25 bp, Homo sapien
tcagcattttccagcgcttgcccag

SEQ ID NO: 4412999 - DNA, 25 bp, Homo sapien
cttggaggtcttggcaccgcccgcg

SEQ ID NO: 4413000 - DNA, 25 bp, Homo sapien
gagcttgccgcatttcttgctggag

SEQ ID NO: 4413001 - DNA, 25 bp, Homo sapien
ctggctggcgctgggcttggccgag

SEQ ID NO: 4413002 - DNA, 25 bp, Homo sapien
tagtccccggactgggccgccttgc

SEQ ID NO: 4413003 - DNA, 25 bp, Homo sapien
cgccgcccgagccgctcacgcgcag

SEQ ID NO: 4413004 - DNA, 25 bp, Homo sapien
ccgccgccgcccgagccgctcacgc

SEQ ID NO: 4413005 - DNA, 25 bp, Homo sapien
gccgccgcccgagccgctcacgcgc

SEQ ID NO: 4413006 - DNA, 25 bp, Homo sapien
gccgcccgagccgctcacgcgcagg

SEQ ID NO: 4413007 - DNA, 25 bp, Homo sapien
tcgtcgtcgtcctcatccagaaaca

SEQ ID NO: 4413008 - DNA, 25 bp, Homo sapien
tcgtcctcatccagaaacacgcact

SEQ ID NO: 4413009 - DNA, 25 bp, Homo sapien
tcctcatccagaaacacgcacttga

SEQ ID NO: 4413010 - DNA, 25 bp, Homo sapien
gtcgtcgtcgtcctcatccagaaac

SEQ ID NO: 4413011 - DNA, 25 bp, Homo sapien
ctggcgggcactttggcgacgttgt

SEQ ID NO: 4413012 - DNA, 25 bp, Homo sapien
ttggcgacgttgtagcgtctcagca

SEQ ID NO: 4413013 - DNA, 25 bp, Homo sapien
tgctggtgcggtggttcctcgtcct

SEQ ID NO: 4413014 - DNA, 25 bp, Homo sapien
tgtagcgtctcagcagctgcgacgg

SEQ ID NO: 4413015 - DNA, 25 bp, Homo sapien
cgggggactccgccgagctgctcag

SEQ ID NO: 4413016 - DNA, 25 bp, Homo sapien
ccctcgggggactccgccgagctgc

SEQ ID NO: 4413017 - DNA, 25 bp, Homo sapien
cctcgggggactccgccgagctgct

SEQ ID NO: 4413018 - DNA, 25 bp, Homo sapien
tcgggggactccgccgagctgctca

SEQ ID NO: 4413019 - DNA, 25 bp, Homo sapien
gcgggtgctgcttggtgatgttctt

SEQ ID NO: 4413020 - DNA, 25 bp, Homo sapien
cgagcgcgaggacgcgggcgacagc

SEQ ID NO: 4413021 - DNA, 25 bp, Homo sapien
tgaagctgtagtagaggcggctgcc

SEQ ID NO: 4413022 - DNA, 25 bp, Homo sapien
gcgacagcgcgggctgcgcgagcgg

SEQ ID NO: 4413023 - DNA, 25 bp, Homo sapien
cgctgtgcgcgctttgagagaaatt

SEQ ID NO: 4413024 - DNA, 25 bp, Homo sapien
gaacatcaggtcgtcggcgtcctcg

SEQ ID NO: 4413025 - DNA, 25 bp, Homo sapien
cagcgacagggacaggttcccggcc

SEQ ID NO: 4413026 - DNA, 25 bp, Homo sapien
tgagagaaattcaagctcaggtcga

SEQ ID NO: 4413027 - DNA, 25 bp, Homo sapien
aggctgccctcgctgaacgaatcca

SEQ ID NO: 4413028 - DNA, 25 bp, Homo sapien
cccgcgatcatctcgctcagctccg

SEQ ID NO: 4413029 - DNA, 25 bp, Homo sapien
ctcagctccggcgtgcagtagtcgg

SEQ ID NO: 4413030 - DNA, 25 bp, Homo sapien
aacaccaggtcggagaagttcgcct

SEQ ID NO: 4413031 - DNA, 25 bp, Homo sapien
cctccgagagaaagagcgagcagcg

SEQ ID NO: 4413032 - DNA, 25 bp, Homo sapien
aagcttcaaacagcgccttccggag

SEQ ID NO: 4413033 - DNA, 25 bp, Homo sapien
taacagttgtgctgccaaaagggtc

SEQ ID NO: 4413034 - DNA, 25 bp, Homo sapien
gtatgcaactaccttgagacacgat

SEQ ID NO: 4413035 - DNA, 25 bp, Homo sapien
cgaatgctctgcgacaacaggacct

SEQ ID NO: 4413036 - DNA, 25 bp, Homo sapien
agaggtcaaacactgcggcggcgtt

SEQ ID NO: 4413037 - DNA, 25 bp, Homo sapien
tcaaatctggaaacggctgtcccca

SEQ ID NO: 4413038 - DNA, 25 bp, Homo sapien
cctctgagcacacgcgaagatgcag

SEQ ID NO: 4413039 - DNA, 25 bp, Homo sapien
atgttcctcggggtgccctcggccg

SEQ ID NO: 4413040 - DNA, 25 bp, Homo sapien
ctcggccggcctgccgcgtcttccc

SEQ ID NO: 4413041 - DNA, 25 bp, Homo sapien
tgcggccccgcaccgtcctccttcc

SEQ ID NO: 4413042 - DNA, 25 bp, Homo sapien
ctcccgctcgtagcctgggtcccgc

SEQ ID NO: 4413043 - DNA, 25 bp, Homo sapien
cggagaccgcgactcggatcgcaca

SEQ ID NO: 4413044 - DNA, 25 bp, Homo sapien
tcggccctcccaggcaccccggaga

SEQ ID NO: 4413045 - DNA, 25 bp, Homo sapien
gcaccccggagaccgcgactcggat

SEQ ID NO: 4413046 - DNA, 25 bp, Homo sapien
accgcgactcggatcgcacagaggc

SEQ ID NO: 4413047 - DNA, 25 bp, Homo sapien
agggctctgccttgcgcgtcccgga

SEQ ID NO: 4413048 - DNA, 25 bp, Homo sapien
acgcggtggcgaggcaagaagagcc

SEQ ID NO: 4413049 - DNA, 25 bp, Homo sapien
tggtgtctccgcgcgcctcaagggc

SEQ ID NO: 4413050 - DNA, 25 bp, Homo sapien
actaccgcccgggtgccctctgcca

SEQ ID NO: 4413051 - DNA, 25 bp, Homo sapien
atgcggatccaccttcgttgcggcg

SEQ ID NO: 4413052 - DNA, 25 bp, Homo sapien
gaacaatcaagatgcggatccacct

SEQ ID NO: 4413053 - DNA, 25 bp, Homo sapien
ccccaggaggctcccggagaacaat

SEQ ID NO: 4413054 - DNA, 25 bp, Homo sapien
gagcgccagcgggatgggtcgcgcc

SEQ ID NO: 4413055 - DNA, 25 bp, Homo sapien
tgatcaaacagtgagacgggagcct

SEQ ID NO: 4413056 - DNA, 25 bp, Homo sapien
caagtttcggaactgcagcagaggg

SEQ ID NO: 4413057 - DNA, 25 bp, Homo sapien
taaaatcaccagcacggagcacgtg

SEQ ID NO: 4413058 - DNA, 25 bp, Homo sapien
gaagcgcctgtcctgagttctaaca

SEQ ID NO: 4413059 - DNA, 25 bp, Homo sapien
tggtttgagacaacattttcagaat

SEQ ID NO: 4413060 - DNA, 25 bp, Homo sapien
cctgccgaggctgacagccgtgctg

SEQ ID NO: 4413061 - DNA, 25 bp, Homo sapien
tctccaacctgcccagaaaactcac

SEQ ID NO: 4413062 - DNA, 25 bp, Homo sapien
ctctccaacctgcccagaaaactca

SEQ ID NO: 4413063 - DNA, 25 bp, Homo sapien
gctctccaacctgcccagaaaactc

SEQ ID NO: 4413064 - DNA, 25 bp, Homo sapien
agctctccaacctgcccagaaaact

SEQ ID NO: 4413065 - DNA, 25 bp, Homo sapien
ggtattgaattcaatagcagcaact

SEQ ID NO: 4413066 - DNA, 25 bp, Homo sapien
aatctacccctctacactttgtctg

SEQ ID NO: 4413067 - DNA, 25 bp, Homo sapien
gatgtaatcaccatgctcattctca

SEQ ID NO: 4413068 - DNA, 25 bp, Homo sapien
tccaaggatcacttacaggctctca

SEQ ID NO: 4413069 - DNA, 25 bp, Homo sapien
tattctctgacaaggctattactat

SEQ ID NO: 4413070 - DNA, 25 bp, Homo sapien
ggctattactatccgtatttggatc

SEQ ID NO: 4413071 - DNA, 25 bp, Homo sapien
tctgacaaggctattactatccgta

SEQ ID NO: 4413072 - DNA, 25 bp, Homo sapien
gaggagaaccaacatattctctgac

SEQ ID NO: 4413073 - DNA, 25 bp, Homo sapien
ctttttaatgaaatagtatgtgctc

SEQ ID NO: 4413074 - DNA, 25 bp, Homo sapien
gtatgtgctctgaccaatgttataa

SEQ ID NO: 4413075 - DNA, 25 bp, Homo sapien
gaaatagtatgtgctctgaccaatg

SEQ ID NO: 4413076 - DNA, 25 bp, Homo sapien
gctctgaccaatgttataatcagga

SEQ ID NO: 4413077 - DNA, 25 bp, Homo sapien
actatgtatgcttccttgtagaggg

SEQ ID NO: 4413078 - DNA, 25 bp, Homo sapien
ccactatgtatgcttccttgtagag

SEQ ID NO: 4413079 - DNA, 25 bp, Homo sapien
tgtagaggggttttcctggtcacat

SEQ ID NO: 4413080 - DNA, 25 bp, Homo sapien
ttcctggtcacatggtcatctctct

SEQ ID NO: 4413081 - DNA, 25 bp, Homo sapien
tgtgaagcccggacttttattgtaa

SEQ ID NO: 4413082 - DNA, 25 bp, Homo sapien
gcaatattctatgagttggaaaacc

SEQ ID NO: 4413083 - DNA, 25 bp, Homo sapien
ttgtaaccgtctcccaaataatgta

SEQ ID NO: 4413084 - DNA, 25 bp, Homo sapien
agaaatactgtgtagttgtgaagcc

SEQ ID NO: 4413085 - DNA, 25 bp, Homo sapien
aggatcgtcccaggcacaaccagca

SEQ ID NO: 4413086 - DNA, 25 bp, Homo sapien
gactcacggacaccagttcttccct

SEQ ID NO: 4413087 - DNA, 25 bp, Homo sapien
gcacgttcagtgtccagcgagtggc

SEQ ID NO: 4413088 - DNA, 25 bp, Homo sapien
ccagctcgccgtcagactcacggac

SEQ ID NO: 4413089 - DNA, 25 bp, Homo sapien
gggcaggttagcaaagctccagagt

SEQ ID NO: 4413090 - DNA, 25 bp, Homo sapien
gaaaccaagtcgttcaggcctcaga

SEQ ID NO: 4413091 - DNA, 25 bp, Homo sapien
cagagtcccgcggtcgaaagcagcg

SEQ ID NO: 4413092 - DNA, 25 bp, Homo sapien
ggcaccagaggcctttgccgcgtga

SEQ ID NO: 4413093 - DNA, 25 bp, Homo sapien
tccacggacttagatttcctccagt

SEQ ID NO: 4413094 - DNA, 25 bp, Homo sapien
gtctccacggacttagatttcctcc

SEQ ID NO: 4413095 - DNA, 25 bp, Homo sapien
tctccacggacttagatttcctcca

SEQ ID NO: 4413096 - DNA, 25 bp, Homo sapien
acggacttagatttcctccagtcca

SEQ ID NO: 4413097 - DNA, 25 bp, Homo sapien
tcttttccagaacggagctggtgcc

SEQ ID NO: 4413098 - DNA, 25 bp, Homo sapien
tgaatgacagccctcgagtgtgcca

SEQ ID NO: 4413099 - DNA, 25 bp, Homo sapien
tttctcaatgcatcgtggtgtgggc

SEQ ID NO: 4413100 - DNA, 25 bp, Homo sapien
gaaatacagagcagaggtcacggct

SEQ ID NO: 4413101 - DNA, 25 bp, Homo sapien
ccgtctttcatctgcgtgtgctcaa

SEQ ID NO: 4413102 - DNA, 25 bp, Homo sapien
aattttgtagaatgaggcatgacca

SEQ ID NO: 4413103 - DNA, 25 bp, Homo sapien
aaactcggctctcacacatctggct

SEQ ID NO: 4413104 - DNA, 25 bp, Homo sapien
tcagtgtgcaggtgagcattgcaga

SEQ ID NO: 4413105 - DNA, 25 bp, Homo sapien
gcccgcctatcactattagaagctg

SEQ ID NO: 4413106 - DNA, 25 bp, Homo sapien
gcctatcactattagaagctgaaaa

SEQ ID NO: 4413107 - DNA, 25 bp, Homo sapien
gaaaagcccgcctatcactattaga

SEQ ID NO: 4413108 - DNA, 25 bp, Homo sapien
ccagccaatcggttgcacttattct

SEQ ID NO: 4413109 - DNA, 25 bp, Homo sapien
gaagaatcagcagggcgagctctca

SEQ ID NO: 4413110 - DNA, 25 bp, Homo sapien
gaagtgggctttctgactcatggaa

SEQ ID NO: 4413111 - DNA, 25 bp, Homo sapien
gagaagggcatctatccaggtggaa

SEQ ID NO: 4413112 - DNA, 25 bp, Homo sapien
gctagcaaaaggacggtatgaaccc

SEQ ID NO: 4413113 - DNA, 25 bp, Homo sapien
tacttctgaatatctgtagagtggg

SEQ ID NO: 4413114 - DNA, 25 bp, Homo sapien
taccaagtagacatggatcccatcc

SEQ ID NO: 4413115 - DNA, 25 bp, Homo sapien
tgctcaggagacaaacataccaagt

SEQ ID NO: 4413116 - DNA, 25 bp, Homo sapien
caattacttcacagttacttctgaa

SEQ ID NO: 4413117 - DNA, 25 bp, Homo sapien
ccttgccggatgaaatatccagctt

SEQ ID NO: 4413118 - DNA, 25 bp, Homo sapien
cttgccggatgaaatatccagcttt

SEQ ID NO: 4413119 - DNA, 25 bp, Homo sapien
ccctccacattcgtggctgctctaa

SEQ ID NO: 4413120 - DNA, 25 bp, Homo sapien
tggctgctctaagagcttgcagagg

SEQ ID NO: 4413121 - DNA, 25 bp, Homo sapien
ctgccctccacattcgtggctgctc

SEQ ID NO: 4413122 - DNA, 25 bp, Homo sapien
ctccacattcgtggctgctctaaga

SEQ ID NO: 4413123 - DNA, 25 bp, Homo sapien
cacattcttggacattacaagtccc

SEQ ID NO: 4413124 - DNA, 25 bp, Homo sapien
ccgccacattcttggacattacaag

SEQ ID NO: 4413125 - DNA, 25 bp, Homo sapien
cattcttggacattacaagtcccca

SEQ ID NO: 4413126 - DNA, 25 bp, Homo sapien
tgcccgccacattcttggacattac

SEQ ID NO: 4413127 - DNA, 25 bp, Homo sapien
ctaacagggaacagtgagtcccaga

SEQ ID NO: 4413128 - DNA, 25 bp, Homo sapien
agggaacagtgagtcccagagcctg

SEQ ID NO: 4413129 - DNA, 25 bp, Homo sapien
gaacagtgagtcccagagcctggga

SEQ ID NO: 4413130 - DNA, 25 bp, Homo sapien
aacagtgagtcccagagcctgggac

SEQ ID NO: 4413131 - DNA, 25 bp, Homo sapien
tgcaggccgtcatgacaaaggacac

SEQ ID NO: 4413132 - DNA, 25 bp, Homo sapien
gcatcgacatgcatccagttgttct

SEQ ID NO: 4413133 - DNA, 25 bp, Homo sapien
gccgcgtctgatacatgtcactgca

SEQ ID NO: 4413134 - DNA, 25 bp, Homo sapien
gattcccagtcacacctgggctgga

SEQ ID NO: 4413135 - DNA, 25 bp, Homo sapien
ctccttcatatgtggtgcctatagc

SEQ ID NO: 4413136 - DNA, 25 bp, Homo sapien
aaaaactaggcagccagaatcaaga

SEQ ID NO: 4413137 - DNA, 25 bp, Homo sapien
gaggatagactcttggaaggcagca

SEQ ID NO: 4413138 - DNA, 25 bp, Homo sapien
tttgatcatggtgcctctgtagcgg

SEQ ID NO: 4413139 - DNA, 25 bp, Homo sapien
gaacaaacagccatcactgagggcg

SEQ ID NO: 4413140 - DNA, 25 bp, Homo sapien
agaagcccaaacaggtaattcaggg

SEQ ID NO: 4413141 - DNA, 25 bp, Homo sapien
caacccacacggcaagaaggaacaa

SEQ ID NO: 4413142 - DNA, 25 bp, Homo sapien
taattcagggaagcggagaccagaa

SEQ ID NO: 4413143 - DNA, 25 bp, Homo sapien
tcaagctgctccaagccgattatgg

SEQ ID NO: 4413144 - DNA, 25 bp, Homo sapien
tgctccaagccgattatggctcttt

SEQ ID NO: 4413145 - DNA, 25 bp, Homo sapien
cgattatggctctttccgaaaggtg

SEQ ID NO: 4413146 - DNA, 25 bp, Homo sapien
tggctctttccgaaaggtgtactaa

SEQ ID NO: 4413147 - DNA, 25 bp, Homo sapien
tcccacactgcgctaataagtcggg

SEQ ID NO: 4413148 - DNA, 25 bp, Homo sapien
ccgtcttgaaagagagcagtgattg

SEQ ID NO: 4413149 - DNA, 25 bp, Homo sapien
tcaggaagcgccttccatgcctttc

SEQ ID NO: 4413150 - DNA, 25 bp, Homo sapien
taagtcgggtggagtccgtcttgaa

SEQ ID NO: 4413151 - DNA, 25 bp, Homo sapien
gcagcccacaggtgagttcacaact

SEQ ID NO: 4413152 - DNA, 25 bp, Homo sapien
gcccaggttccacagtgctaagtaa

SEQ ID NO: 4413153 - DNA, 25 bp, Homo sapien
cataagaactctgttaggtagggaa

SEQ ID NO: 4413154 - DNA, 25 bp, Homo sapien
gaaaggctcgtcaacttagcccagg

SEQ ID NO: 4413155 - DNA, 25 bp, Homo sapien
tgttcacgtggaatgagctttttcc

SEQ ID NO: 4413156 - DNA, 25 bp, Homo sapien
tcaagatcacttgctcgccatcatg

SEQ ID NO: 4413157 - DNA, 25 bp, Homo sapien
tcacttgctcgccatcatgttcacg

SEQ ID NO: 4413158 - DNA, 25 bp, Homo sapien
ccatcatgttcacgtggaatgagct

SEQ ID NO: 4413159 - DNA, 25 bp, Homo sapien
cagtgacacgtgcaaaggaattttc

SEQ ID NO: 4413160 - DNA, 25 bp, Homo sapien
tttctgtctacagtgacacgtgcaa

SEQ ID NO: 4413161 - DNA, 25 bp, Homo sapien
tgtgtcaaggtacgcagcagctcag

SEQ ID NO: 4413162 - DNA, 25 bp, Homo sapien
tgtttctgcccaggttgcatcccag

SEQ ID NO: 4413163 - DNA, 25 bp, Homo sapien
gaggcatgtgtctacttagcccacc

SEQ ID NO: 4413164 - DNA, 25 bp, Homo sapien
tgtgtctacttagcccaccgacatc

SEQ ID NO: 4413165 - DNA, 25 bp, Homo sapien
tggttctcacatcgccaccctgcat

SEQ ID NO: 4413166 - DNA, 25 bp, Homo sapien
ggtagaggcatgtgtctacttagcc

SEQ ID NO: 4413167 - DNA, 25 bp, Homo sapien
tttgcagaactgtagtcaagagcac

SEQ ID NO: 4413168 - DNA, 25 bp, Homo sapien
tcaagagcacatgcatgatcctgcc

SEQ ID NO: 4413169 - DNA, 25 bp, Homo sapien
cacatgtgtcctctaccaagtttcc

SEQ ID NO: 4413170 - DNA, 25 bp, Homo sapien
aagtctctgtgagttggtgactcca

SEQ ID NO: 4413171 - DNA, 25 bp, Homo sapien
aagctcatctgactcctccatcaca

SEQ ID NO: 4413172 - DNA, 25 bp, Homo sapien
tcatccaagctcatctgactcctcc

SEQ ID NO: 4413173 - DNA, 25 bp, Homo sapien
catctgactcctccatcacacatac

SEQ ID NO: 4413174 - DNA, 25 bp, Homo sapien
catccaagctcatctgactcctcca

SEQ ID NO: 4413175 - DNA, 25 bp, Homo sapien
gacactctgcttcttcttacccctc

SEQ ID NO: 4413176 - DNA, 25 bp, Homo sapien
gtgacactctgcttcttcttacccc

SEQ ID NO: 4413177 - DNA, 25 bp, Homo sapien
ccggtgacactctgcttcttcttac

SEQ ID NO: 4413178 - DNA, 25 bp, Homo sapien
ggtgacactctgcttcttcttaccc

SEQ ID NO: 4413179 - DNA, 25 bp, Homo sapien
aaagtactaggcttgtccaaagctt

SEQ ID NO: 4413180 - DNA, 25 bp, Homo sapien
tactaggcttgtccaaagcttggaa

SEQ ID NO: 4413181 - DNA, 25 bp, Homo sapien
taggcttgtccaaagcttggaagag

SEQ ID NO: 4413182 - DNA, 25 bp, Homo sapien
ggcttgtccaaagcttggaagagtc

SEQ ID NO: 4413183 - DNA, 25 bp, Homo sapien
caggtaactgctggaaggagggata

SEQ ID NO: 4413184 - DNA, 25 bp, Homo sapien
agcagaggacgcaggaccacacatc

SEQ ID NO: 4413185 - DNA, 25 bp, Homo sapien
gacttcttgggggtgccagtccagc

SEQ ID NO: 4413186 - DNA, 25 bp, Homo sapien
gggatacagactccagtaagatgca

SEQ ID NO: 4413187 - DNA, 25 bp, Homo sapien
acagagaggtgatttcaacacagcg

SEQ ID NO: 4413188 - DNA, 25 bp, Homo sapien
gagaggtgatttcaacacagcgtga

SEQ ID NO: 4413189 - DNA, 25 bp, Homo sapien
ggtgatttcaacacagcgtgatagg

SEQ ID NO: 4413190 - DNA, 25 bp, Homo sapien
tcaacacagcgtgataggttatatt

SEQ ID NO: 4413191 - DNA, 25 bp, Homo sapien
tcgaaagatgagtccaactctttct

SEQ ID NO: 4413192 - DNA, 25 bp, Homo sapien
tgaatcgaaagatgagtccaactct

SEQ ID NO: 4413193 - DNA, 25 bp, Homo sapien
ctttgtctttatcctccaggagctc

SEQ ID NO: 4413194 - DNA, 25 bp, Homo sapien
gatgagtccaactctttctttgtct

SEQ ID NO: 4413195 - DNA, 25 bp, Homo sapien
tataggcttgcttggagtgaacagc

SEQ ID NO: 4413196 - DNA, 25 bp, Homo sapien
cccacttggactggtccgttcagtg

SEQ ID NO: 4413197 - DNA, 25 bp, Homo sapien
ccccatttcgcagaatataggcttg

SEQ ID NO: 4413198 - DNA, 25 bp, Homo sapien
tcagcacaggtaggtccccccattt

SEQ ID NO: 4413199 - DNA, 25 bp, Homo sapien
ctctgcatcccacggaggaggaggg

SEQ ID NO: 4413200 - DNA, 25 bp, Homo sapien
ttcttcagctgggacagtgcctctg

SEQ ID NO: 4413201 - DNA, 25 bp, Homo sapien
tgggacagtgcctctgcatcccacg

SEQ ID NO: 4413202 - DNA, 25 bp, Homo sapien
ttcagctgggacagtgcctctgcat

SEQ ID NO: 4413203 - DNA, 25 bp, Homo sapien
ttaagcagcatggtgtatttaggtc

SEQ ID NO: 4413204 - DNA, 25 bp, Homo sapien
tttaggtcacattcagggagccgta

SEQ ID NO: 4413205 - DNA, 25 bp, Homo sapien
cacattcagggagccgtatttcccc

SEQ ID NO: 4413206 - DNA, 25 bp, Homo sapien
gccgtatttcccctgctgcggtcat

SEQ ID NO: 4413207 - DNA, 25 bp, Homo sapien
tcaggagtgaagtggactgggtgca

SEQ ID NO: 4413208 - DNA, 25 bp, Homo sapien
caggagtgaagtggactgggtgcac

SEQ ID NO: 4413209 - DNA, 25 bp, Homo sapien
agtgaagtggactgggtgcacagcc

SEQ ID NO: 4413210 - DNA, 25 bp, Homo sapien
aagtggactgggtgcacagcctgtg

SEQ ID NO: 4413211 - DNA, 25 bp, Homo sapien
ctgggaaggatgcctcctcccgctc

SEQ ID NO: 4413212 - DNA, 25 bp, Homo sapien
aggatgcctcctcccgctccctctc

SEQ ID NO: 4413213 - DNA, 25 bp, Homo sapien
tgcctcctcccgctccctctcctcc

SEQ ID NO: 4413214 - DNA, 25 bp, Homo sapien
gatgcctcctcccgctccctctcct

SEQ ID NO: 4413215 - DNA, 25 bp, Homo sapien
ctactcagtacaaagatgttcaagg

SEQ ID NO: 4413216 - DNA, 25 bp, Homo sapien
gtacaaagatgttcaaggagcttct

SEQ ID NO: 4413217 - DNA, 25 bp, Homo sapien
ttcttttcctgaagggccagaaata

SEQ ID NO: 4413218 - DNA, 25 bp, Homo sapien
tgaagggccagaaatattgtggaat

SEQ ID NO: 4413219 - DNA, 25 bp, Homo sapien
tctggcaaccaggacttgagattcc

SEQ ID NO: 4413220 - DNA, 25 bp, Homo sapien
aggatccaggtggatgactctggca

SEQ ID NO: 4413221 - DNA, 25 bp, Homo sapien
ggatgactctggcaaccaggacttg

SEQ ID NO: 4413222 - DNA, 25 bp, Homo sapien
ggacttgagattcctccagaaggca

SEQ ID NO: 4413223 - DNA, 25 bp, Homo sapien
agcagcagttggtgtcaggtccgat

SEQ ID NO: 4413224 - DNA, 25 bp, Homo sapien
ctggagaaagcagcagttggtgtca

SEQ ID NO: 4413225 - DNA, 25 bp, Homo sapien
agaaagcagcagttggtgtcaggtc

SEQ ID NO: 4413226 - DNA, 25 bp, Homo sapien
cagttggtgtcaggtccgatgatct

SEQ ID NO: 4413227 - DNA, 25 bp, Homo sapien
tgcgtgctccgaagcagttatgggt

SEQ ID NO: 4413228 - DNA, 25 bp, Homo sapien
ttcaatcccgtgtagcatgctgcgt

SEQ ID NO: 4413229 - DNA, 25 bp, Homo sapien
tgactatggtctttgcacaggccct

SEQ ID NO: 4413230 - DNA, 25 bp, Homo sapien
ccgaggagcccggtgtagcccagac

SEQ ID NO: 4413231 - DNA, 25 bp, Homo sapien
ctttacaatagaccaccccgacctg

SEQ ID NO: 4413232 - DNA, 25 bp, Homo sapien
atagaccaccccgacctgctactac

SEQ ID NO: 4413233 - DNA, 25 bp, Homo sapien
tccaccatttccctttacaatagac

SEQ ID NO: 4413234 - DNA, 25 bp, Homo sapien
caccatttccctttacaatagacca

SEQ ID NO: 4413235 - DNA, 25 bp, Homo sapien
tatgtcttcctgttcagcaccttct

SEQ ID NO: 4413236 - DNA, 25 bp, Homo sapien
gtcttcctgttcagcaccttctgca

SEQ ID NO: 4413237 - DNA, 25 bp, Homo sapien
catttatgtcttcctgttcagcacc

SEQ ID NO: 4413238 - DNA, 25 bp, Homo sapien
gcaccttctgcagcaaaacccagca

SEQ ID NO: 4413239 - DNA, 25 bp, Homo sapien
tgaaaagtgaggaatgtagacataa

SEQ ID NO: 4413240 - DNA, 25 bp, Homo sapien
caagtgaaaagtgaggaatgtagac

SEQ ID NO: 4413241 - DNA, 25 bp, Homo sapien
tgtagacataaagaatggggaatcc

SEQ ID NO: 4413242 - DNA, 25 bp, Homo sapien
tgctcaagtgaaaagtgaggaatgt

SEQ ID NO: 4413243 - DNA, 25 bp, Homo sapien
ccccgaaacctaatgtaatgtctat

SEQ ID NO: 4413244 - DNA, 25 bp, Homo sapien
tcagctccttaggagaggacattgg

SEQ ID NO: 4413245 - DNA, 25 bp, Homo sapien
tgtaatgtctatgcagacagcatag

SEQ ID NO: 4413246 - DNA, 25 bp, Homo sapien
gaaattgtctcttggatgaacaaag

SEQ ID NO: 4413247 - DNA, 25 bp, Homo sapien
tatgggcagcctttaccaatacaca

SEQ ID NO: 4413248 - DNA, 25 bp, Homo sapien
taaatatcccattgaattcagagaa

SEQ ID NO: 4413249 - DNA, 25 bp, Homo sapien
taatctaaatccttagacatttcta

SEQ ID NO: 4413250 - DNA, 25 bp, Homo sapien
agatgtaaatatcccattgaattca

SEQ ID NO: 4413251 - DNA, 25 bp, Homo sapien
tgtaagggagctaagacatgatgtg

SEQ ID NO: 4413252 - DNA, 25 bp, Homo sapien
tgcattatctccgtgtgtgtcctca

SEQ ID NO: 4413253 - DNA, 25 bp, Homo sapien
gatcctgcttccaaagtggttcctc

SEQ ID NO: 4413254 - DNA, 25 bp, Homo sapien
gcctcagtcaccatatggcgatgta

SEQ ID NO: 4413255 - DNA, 25 bp, Homo sapien
tggctggagcactcattgaggagaa

SEQ ID NO: 4413256 - DNA, 25 bp, Homo sapien
gaaatgtgaggcagtgtgcaaaggt

SEQ ID NO: 4413257 - DNA, 25 bp, Homo sapien
cagtgtgcaaaggtcggacagagta

SEQ ID NO: 4413258 - DNA, 25 bp, Homo sapien
tctgcaggtttggtcatcagtggct

SEQ ID NO: 4413259 - DNA, 25 bp, Homo sapien
tcagatctcaaaggcaatagcaggc

SEQ ID NO: 4413260 - DNA, 25 bp, Homo sapien
tctgtatggtgacaactctggtgct

SEQ ID NO: 4413261 - DNA, 25 bp, Homo sapien
cagagtgtccaaagtcgggtgtttg

SEQ ID NO: 4413262 - DNA, 25 bp, Homo sapien
ggcactggccttgtgaacttcacct

SEQ ID NO: 4413263 - DNA, 25 bp, Homo sapien
tctgcatttgtaagttgaaaggaat

SEQ ID NO: 4413264 - DNA, 25 bp, Homo sapien
gcaaaacacaagaattttgggtgag

SEQ ID NO: 4413265 - DNA, 25 bp, Homo sapien
cagcctcaagaactagggcaaaaca

SEQ ID NO: 4413266 - DNA, 25 bp, Homo sapien
tgagggtgaaatcagataaccagcc

SEQ ID NO: 4413267 - DNA, 25 bp, Homo sapien
cacaaaaagctttgatcataagacg

SEQ ID NO: 4413268 - DNA, 25 bp, Homo sapien
ccgggtagcctactattccatgagc

SEQ ID NO: 4413269 - DNA, 25 bp, Homo sapien
gacgcttccgggtagcctactattc

SEQ ID NO: 4413270 - DNA, 25 bp, Homo sapien
gatcataagacgcttccgggtagcc

SEQ ID NO: 4413271 - DNA, 25 bp, Homo sapien
cctggtcgttctcactcttgcctct

SEQ ID NO: 4413272 - DNA, 25 bp, Homo sapien
tcagttccctcttcacatatctcct

SEQ ID NO: 4413273 - DNA, 25 bp, Homo sapien
gcatctgctgatccttcagttccct

SEQ ID NO: 4413274 - DNA, 25 bp, Homo sapien
ttttcttgcatctgctgatccttca

SEQ ID NO: 4413275 - DNA, 25 bp, Homo sapien
aattcctgtaaatactaagcttgat

SEQ ID NO: 4413276 - DNA, 25 bp, Homo sapien
gaaagctacttgcaattcctgtaaa

SEQ ID NO: 4413277 - DNA, 25 bp, Homo sapien
taaatactaagcttgatttcttgct

SEQ ID NO: 4413278 - DNA, 25 bp, Homo sapien
ctgaaagctacttgcaattcctgta

SEQ ID NO: 4413279 - DNA, 25 bp, Homo sapien
caaattccatcccaaggagcttatc

SEQ ID NO: 4413280 - DNA, 25 bp, Homo sapien
caaggagcttatctcaccacactct

SEQ ID NO: 4413281 - DNA, 25 bp, Homo sapien
tttgcaatgttagccttcaaattcc

SEQ ID NO: 4413282 - DNA, 25 bp, Homo sapien
cacactcttgggtcccttcagacat

SEQ ID NO: 4413283 - DNA, 25 bp, Homo sapien
cgggataagtgtgtggcatgaaggc

SEQ ID NO: 4413284 - DNA, 25 bp, Homo sapien
caaagcgagccccactcagtagagc

SEQ ID NO: 4413285 - DNA, 25 bp, Homo sapien
agcgagccccactcagtagagccat

SEQ ID NO: 4413286 - DNA, 25 bp, Homo sapien
aaggcattgaggtgcagtcctccaa

SEQ ID NO: 4413287 - DNA, 25 bp, Homo sapien
gttttactgcttgcattccttcccg

SEQ ID NO: 4413288 - DNA, 25 bp, Homo sapien
gcttgcattccttcccgtgacatta

SEQ ID NO: 4413289 - DNA, 25 bp, Homo sapien
gtgcagggatcatgcgttttactgc

SEQ ID NO: 4413290 - DNA, 25 bp, Homo sapien
cccgtgacattacccaacattgtga

SEQ ID NO: 4413291 - DNA, 25 bp, Homo sapien
taacaacagccagtatgcatcagaa

SEQ ID NO: 4413292 - DNA, 25 bp, Homo sapien
tctgccaatcctgggcctggtgaat

SEQ ID NO: 4413293 - DNA, 25 bp, Homo sapien
aggtgggactgctaactctgccaat

SEQ ID NO: 4413294 - DNA, 25 bp, Homo sapien
ttttcagaaacttcctagccagacc

SEQ ID NO: 4413295 - DNA, 25 bp, Homo sapien
gattggcatccagcgtcaccttcct

SEQ ID NO: 4413296 - DNA, 25 bp, Homo sapien
tgtggagatgatacgtgtgtgttca

SEQ ID NO: 4413297 - DNA, 25 bp, Homo sapien
tgttgtgctctagtgacagattggc

SEQ ID NO: 4413298 - DNA, 25 bp, Homo sapien
tgtgtgttcaactcaattgttctta

SEQ ID NO: 4413299 - DNA, 25 bp, Homo sapien
cttaggtgatttggatctttggaga

SEQ ID NO: 4413300 - DNA, 25 bp, Homo sapien
gcttaggtgatttggatctttggag

SEQ ID NO: 4413301 - DNA, 25 bp, Homo sapien
agaacatatgttgtctcttaaggga

SEQ ID NO: 4413302 - DNA, 25 bp, Homo sapien
ttgtaaggcttggtcattagaacat

SEQ ID NO: 4413303 - DNA, 25 bp, Homo sapien
ggcttggtcattagaacatatgttg

SEQ ID NO: 4413304 - DNA, 25 bp, Homo sapien
ggtcattagaacatatgttgtctct

SEQ ID NO: 4413305 - DNA, 25 bp, Homo sapien
gattcaagagcattgtcgcgtagcg

SEQ ID NO: 4413306 - DNA, 25 bp, Homo sapien
cattgtcgcgtagcggtggagagca

SEQ ID NO: 4413307 - DNA, 25 bp, Homo sapien
tttcctggtatgatgccttcaagat

SEQ ID NO: 4413308 - DNA, 25 bp, Homo sapien
ccttttcctggtatgatgccttcaa

SEQ ID NO: 4413309 - DNA, 25 bp, Homo sapien
taatacctgctccatatgggataga

SEQ ID NO: 4413310 - DNA, 25 bp, Homo sapien
attgagtttccccagaccagacgtc

SEQ ID NO: 4413311 - DNA, 25 bp, Homo sapien
gaacacataagtgggtgcgtgtacc

SEQ ID NO: 4413312 - DNA, 25 bp, Homo sapien
tctggagggctctcagcagccaata

SEQ ID NO: 4413313 - DNA, 25 bp, Homo sapien
cctgggggaatcaacctgcccttga

SEQ ID NO: 4413314 - DNA, 25 bp, Homo sapien
agcgtctcctctagttggcttccca

SEQ ID NO: 4413315 - DNA, 25 bp, Homo sapien
gtcagcagtgccagcgtctcctcta

SEQ ID NO: 4413316 - DNA, 25 bp, Homo sapien
cttgtcttttggtactgacttccag

SEQ ID NO: 4413317 - DNA, 25 bp, Homo sapien
cagagggaccccttgaggcgagggt

SEQ ID NO: 4413318 - DNA, 25 bp, Homo sapien
tgaggcgagggtgctaatccttgtt

SEQ ID NO: 4413319 - DNA, 25 bp, Homo sapien
accccttgaggcgagggtgctaatc

SEQ ID NO: 4413320 - DNA, 25 bp, Homo sapien
cccttgaggcgagggtgctaatcct

SEQ ID NO: 4413321 - DNA, 25 bp, Homo sapien
aattacatttcgaaatatatcaagc

SEQ ID NO: 4413322 - DNA, 25 bp, Homo sapien
gttttcagaagacgttgtttcagta

SEQ ID NO: 4413323 - DNA, 25 bp, Homo sapien
cagaagacgttgtttcagtatacat

SEQ ID NO: 4413324 - DNA, 25 bp, Homo sapien
tttcgaaatatatcaagccaagtca

SEQ ID NO: 4413325 - DNA, 25 bp, Homo sapien
tcatctttcatccagtaattgcctg

SEQ ID NO: 4413326 - DNA, 25 bp, Homo sapien
taattgcctgcgtgtccattgccac

SEQ ID NO: 4413327 - DNA, 25 bp, Homo sapien
catccagtaattgcctgcgtgtcca

SEQ ID NO: 4413328 - DNA, 25 bp, Homo sapien
cagccttccgagggacacaggacat

SEQ ID NO: 4413329 - DNA, 25 bp, Homo sapien
tcatagtcttcatgtaacagggtcc

SEQ ID NO: 4413330 - DNA, 25 bp, Homo sapien
gagtcatagtcttcatgtaacaggg

SEQ ID NO: 4413331 - DNA, 25 bp, Homo sapien
atagtcttcatgtaacagggtcctg

SEQ ID NO: 4413332 - DNA, 25 bp, Homo sapien
tgtaggagtcatagtcttcatgtaa

SEQ ID NO: 4413333 - DNA, 25 bp, Homo sapien
actcacagcccaacccctgtaaaca

SEQ ID NO: 4413334 - DNA, 25 bp, Homo sapien
ccagtctctgtaggatgcatctctc

SEQ ID NO: 4413335 - DNA, 25 bp, Homo sapien
tagtgaggcagtcgtcaaaacactg

SEQ ID NO: 4413336 - DNA, 25 bp, Homo sapien
cactggcgctgcgtgatataactcg

SEQ ID NO: 4413337 - DNA, 25 bp, Homo sapien
aaacactgccgggactgcagaatga

SEQ ID NO: 4413338 - DNA, 25 bp, Homo sapien
cggctccgagccgtgaaggttctgt

SEQ ID NO: 4413339 - DNA, 25 bp, Homo sapien
tctgtgcttccaacgaggctcgtct

SEQ ID NO: 4413340 - DNA, 25 bp, Homo sapien
gctcgtctgggaggcatcagcacag

SEQ ID NO: 4413341 - DNA, 25 bp, Homo sapien
agcagggctccctttgtcacggtgt

SEQ ID NO: 4413342 - DNA, 25 bp, Homo sapien
gtgctcctgggcagcgtcatccagg

SEQ ID NO: 4413343 - DNA, 25 bp, Homo sapien
ctgggcagcgtcatccaggcctggc

SEQ ID NO: 4413344 - DNA, 25 bp, Homo sapien
ctgagataaaaggtgcctgaggcag

SEQ ID NO: 4413345 - DNA, 25 bp, Homo sapien
aggctggactgagataaaaggtgcc

SEQ ID NO: 4413346 - DNA, 25 bp, Homo sapien
gaattgtgtcttagacttagaaggg

SEQ ID NO: 4413347 - DNA, 25 bp, Homo sapien
ttcagagaacagaattgtgtcttag

SEQ ID NO: 4413348 - DNA, 25 bp, Homo sapien
ttagacttagaagggttttcataca

SEQ ID NO: 4413349 - DNA, 25 bp, Homo sapien
gaacagaattgtgtcttagacttag

SEQ ID NO: 4413350 - DNA, 25 bp, Homo sapien
tccgggctctgctagtcaacagttc

SEQ ID NO: 4413351 - DNA, 25 bp, Homo sapien
caacagttccgctgtgttagctccc

SEQ ID NO: 4413352 - DNA, 25 bp, Homo sapien
ttccgctgtgttagctccctgacta

SEQ ID NO: 4413353 - DNA, 25 bp, Homo sapien
tctgctagtcaacagttccgctgtg

SEQ ID NO: 4413354 - DNA, 25 bp, Homo sapien
gctgggccacagggcgttattcaca

SEQ ID NO: 4413355 - DNA, 25 bp, Homo sapien
ctgggccacagggcgttattcacac

SEQ ID NO: 4413356 - DNA, 25 bp, Homo sapien
tgctgggccacagggcgttattcac

SEQ ID NO: 4413357 - DNA, 25 bp, Homo sapien
cctgcagagagtctatgcagagggc

SEQ ID NO: 4413358 - DNA, 25 bp, Homo sapien
gagagtctatgcagagggctgccaa

SEQ ID NO: 4413359 - DNA, 25 bp, Homo sapien
ctgcagagagtctatgcagagggct

SEQ ID NO: 4413360 - DNA, 25 bp, Homo sapien
cagagagtctatgcagagggctgcc

SEQ ID NO: 4413361 - DNA, 25 bp, Homo sapien
taaggggaattgctacacgggtatg

SEQ ID NO: 4413362 - DNA, 25 bp, Homo sapien
cacgggtatgcttcttcattgggaa

SEQ ID NO: 4413363 - DNA, 25 bp, Homo sapien
cacagggctttcgatgtcattgttt

SEQ ID NO: 4413364 - DNA, 25 bp, Homo sapien
gggaagtctccctgatttctgtggt

SEQ ID NO: 4413365 - DNA, 25 bp, Homo sapien
ccaacaataaagaccagggccagat

SEQ ID NO: 4413366 - DNA, 25 bp, Homo sapien
tcttggaaagacacaaccctcctag

SEQ ID NO: 4413367 - DNA, 25 bp, Homo sapien
tatcaatctctttggtgtacagcaa

SEQ ID NO: 4413368 - DNA, 25 bp, Homo sapien
gaacagccagtaacaagcaatgagg

SEQ ID NO: 4413369 - DNA, 25 bp, Homo sapien
atttgcagcctaatgatgcaatgga

SEQ ID NO: 4413370 - DNA, 25 bp, Homo sapien
aaatgccgatagtgatatgggacaa

SEQ ID NO: 4413371 - DNA, 25 bp, Homo sapien
tcagagcttagtacaatttggaggg

SEQ ID NO: 4413372 - DNA, 25 bp, Homo sapien
ttcgagtacgtctttatcaacagtg

SEQ ID NO: 4413373 - DNA, 25 bp, Homo sapien
cataattacaaaggcaggtcacagg

SEQ ID NO: 4413374 - DNA, 25 bp, Homo sapien
acatgcacagtgagttgctgccgca

SEQ ID NO: 4413375 - DNA, 25 bp, Homo sapien
gatataacatggaatggcacaggcc

SEQ ID NO: 4413376 - DNA, 25 bp, Homo sapien
tatggtcactctcagggtcagtaag

SEQ ID NO: 4413377 - DNA, 25 bp, Homo sapien
taatcaagtttatgtatgggccact

SEQ ID NO: 4413378 - DNA, 25 bp, Homo sapien
tatgtatgggccactacgaaactga

SEQ ID NO: 4413379 - DNA, 25 bp, Homo sapien
tcaagtttatgtatgggccactacg

SEQ ID NO: 4413380 - DNA, 25 bp, Homo sapien
ggccactacgaaactgaatagttac

SEQ ID NO: 4413381 - DNA, 25 bp, Homo sapien
ccattagtggtcaagtctcatggtg

SEQ ID NO: 4413382 - DNA, 25 bp, Homo sapien
tgaagaacgtttgcttaattttaga

SEQ ID NO: 4413383 - DNA, 25 bp, Homo sapien
tgggcagggccatgacaaagccact

SEQ ID NO: 4413384 - DNA, 25 bp, Homo sapien
taattttagatcaaagcagtacttt

SEQ ID NO: 4413385 - DNA, 25 bp, Homo sapien
aaagtcagcctaggaacatgtgagc

SEQ ID NO: 4413386 - DNA, 25 bp, Homo sapien
tatttacagtgaaaaggtccccatc

SEQ ID NO: 4413387 - DNA, 25 bp, Homo sapien
ggaagtggcctgctaacaaatcaaa

SEQ ID NO: 4413388 - DNA, 25 bp, Homo sapien
gaggctctgcacatagtaaagtcag

SEQ ID NO: 4413389 - DNA, 25 bp, Homo sapien
catggtgcctgaccttaaaaagtct

SEQ ID NO: 4413390 - DNA, 25 bp, Homo sapien
tgttccaagacaaggataattgctg

SEQ ID NO: 4413391 - DNA, 25 bp, Homo sapien
aacttttggtaaatgaaggctgcca

SEQ ID NO: 4413392 - DNA, 25 bp, Homo sapien
taaccatctggattaggaaggagag

SEQ ID NO: 4413393 - DNA, 25 bp, Homo sapien
tagaactcaggtcttagggctccag

SEQ ID NO: 4413394 - DNA, 25 bp, Homo sapien
tccagctgtgaaggaatgcatccgg

SEQ ID NO: 4413395 - DNA, 25 bp, Homo sapien
tgcatccggacagccatagaaggcc

SEQ ID NO: 4413396 - DNA, 25 bp, Homo sapien
cacatgcaaagtactgggcctgccc

SEQ ID NO: 4413397 - DNA, 25 bp, Homo sapien
tgagtcctcggaggtgtgcagccca

SEQ ID NO: 4413398 - DNA, 25 bp, Homo sapien
tgaaacacaaagaactgagtcctcg

SEQ ID NO: 4413399 - DNA, 25 bp, Homo sapien
ccttatgatagctgctgaggagagc

SEQ ID NO: 4413400 - DNA, 25 bp, Homo sapien
tgaggagagcagttgacacaaccct

SEQ ID NO: 4413401 - DNA, 25 bp, Homo sapien
gatctccgaggttaggacctagcta

SEQ ID NO: 4413402 - DNA, 25 bp, Homo sapien
tgtgaaccgagagacaggagagatc

SEQ ID NO: 4413403 - DNA, 25 bp, Homo sapien
gatcttgtcactcactgaaggcgag

SEQ ID NO: 4413404 - DNA, 25 bp, Homo sapien
tataagaatttttggcacccagcag

SEQ ID NO: 4413405 - DNA, 25 bp, Homo sapien
ccaccacgctcggtctaatggtcag

SEQ ID NO: 4413406 - DNA, 25 bp, Homo sapien
cctgctgtagcgaaaataatgactt

SEQ ID NO: 4413407 - DNA, 25 bp, Homo sapien
aggccaaacccctcaaatgcttagg

SEQ ID NO: 4413408 - DNA, 25 bp, Homo sapien
taccttgggaacttgagtgaactcc

SEQ ID NO: 4413409 - DNA, 25 bp, Homo sapien
tcaagaatgtgacctcaatggatgt

SEQ ID NO: 4413410 - DNA, 25 bp, Homo sapien
cctgttaaaagcagagtggacccac

SEQ ID NO: 4413411 - DNA, 25 bp, Homo sapien
tcggacgttagcaaagatcaagcgc

SEQ ID NO: 4413412 - DNA, 25 bp, Homo sapien
cttggtacagaaggctaagcatcgc

SEQ ID NO: 4413413 - DNA, 25 bp, Homo sapien
taagactctgccctctgacgtgaga

SEQ ID NO: 4413414 - DNA, 25 bp, Homo sapien
gtctcagaaatgccttgagctctgc

SEQ ID NO: 4413415 - DNA, 25 bp, Homo sapien
ttaggaatcattctcccatggagtc

SEQ ID NO: 4413416 - DNA, 25 bp, Homo sapien
tctcccatggagtctcagaaatgcc

SEQ ID NO: 4413417 - DNA, 25 bp, Homo sapien
cttccttaggaatcattctcccatg

SEQ ID NO: 4413418 - DNA, 25 bp, Homo sapien
gcttgttccctcacatagtaaggtg

SEQ ID NO: 4413419 - DNA, 25 bp, Homo sapien
taaggtgatgtccacaatgcctggc

SEQ ID NO: 4413420 - DNA, 25 bp, Homo sapien
gagattcaaggtcaagggaggcaca

SEQ ID NO: 4413421 - DNA, 25 bp, Homo sapien
ttttaatgtgtcagcgtaacccgcc

SEQ ID NO: 4413422 - DNA, 25 bp, Homo sapien
aatcattcccttctgagaccagaca

SEQ ID NO: 4413423 - DNA, 25 bp, Homo sapien
cattaggaggtgcaatagggacaat

SEQ ID NO: 4413424 - DNA, 25 bp, Homo sapien
tgataaaagctacctcaagcaccct

SEQ ID NO: 4413425 - DNA, 25 bp, Homo sapien
cttgctaatgtgattgtgggtggcc

SEQ ID NO: 4413426 - DNA, 25 bp, Homo sapien
tccccaaagccgtgacactcagtgt

SEQ ID NO: 4413427 - DNA, 25 bp, Homo sapien
gaatgtggcatccatgagtgcagga

SEQ ID NO: 4413428 - DNA, 25 bp, Homo sapien
caacaaaatgttgacctaggcctta

SEQ ID NO: 4413429 - DNA, 25 bp, Homo sapien
tggccactggtgagctagactactt

SEQ ID NO: 4413430 - DNA, 25 bp, Homo sapien
tctccatcccttttagataagctga

SEQ ID NO: 4413431 - DNA, 25 bp, Homo sapien
tgttcccacagaagtactctccatc

SEQ ID NO: 4413432 - DNA, 25 bp, Homo sapien
ttccgtagagtccaaacatcaaagg

SEQ ID NO: 4413433 - DNA, 25 bp, Homo sapien
ttgaacacaattcccaaagattccg

SEQ ID NO: 4413434 - DNA, 25 bp, Homo sapien
cagtaggatgtctcagttaaggctc

SEQ ID NO: 4413435 - DNA, 25 bp, Homo sapien
aggcattctggcaacgtggacccca

SEQ ID NO: 4413436 - DNA, 25 bp, Homo sapien
tatggatctcgtgccttgggtgaca

SEQ ID NO: 4413437 - DNA, 25 bp, Homo sapien
caggcctctcagttgtggaaaacac

SEQ ID NO: 4413438 - DNA, 25 bp, Homo sapien
aactggctatctgggacctgttaaa

SEQ ID NO: 4413439 - DNA, 25 bp, Homo sapien
cctgttaaaggatacccatgcttgt

SEQ ID NO: 4413440 - DNA, 25 bp, Homo sapien
taagcttctggtaacaggacattgt

SEQ ID NO: 4413441 - DNA, 25 bp, Homo sapien
caaggtctgcaataagcttctggta

SEQ ID NO: 4413442 - DNA, 25 bp, Homo sapien
tgtcaggaaatcagatgtcggtatt

SEQ ID NO: 4413443 - DNA, 25 bp, Homo sapien
gtgtgccctgggccaacacaatgat

SEQ ID NO: 4413444 - DNA, 25 bp, Homo sapien
gaaatgctttcctactcaatgtcag

SEQ ID NO: 4413445 - DNA, 25 bp, Homo sapien
tttacctcagcctggaatctccttc

SEQ ID NO: 4413446 - DNA, 25 bp, Homo sapien
tatacattcgaattctattataaac

SEQ ID NO: 4413447 - DNA, 25 bp, Homo sapien
atacctgatcaaattatttcaatga

SEQ ID NO: 4413448 - DNA, 25 bp, Homo sapien
aagaactgttaggacgcatccaaga

SEQ ID NO: 4413449 - DNA, 25 bp, Homo sapien
ctgtgtgggtgcgtatctgtagaaa

SEQ ID NO: 4413450 - DNA, 25 bp, Homo sapien
gatgatccttctcttcccgagtgca

SEQ ID NO: 4413451 - DNA, 25 bp, Homo sapien
aaagcccaagctgtgtctgagtgaa

SEQ ID NO: 4413452 - DNA, 25 bp, Homo sapien
cataaatgactgctaccagcacttg

SEQ ID NO: 4413453 - DNA, 25 bp, Homo sapien
cgaccgcgtgtgtaagtgatttcca

SEQ ID NO: 4413454 - DNA, 25 bp, Homo sapien
ctcagcatcctgccttgtggccata

SEQ ID NO: 4413455 - DNA, 25 bp, Homo sapien
ccacgtcagccaccattttagtgtg

SEQ ID NO: 4413456 - DNA, 25 bp, Homo sapien
gtctccacgtcagccaccattttag

SEQ ID NO: 4413457 - DNA, 25 bp, Homo sapien
actagaaaggagcttcctctgtctc

SEQ ID NO: 4413458 - DNA, 25 bp, Homo sapien
aaccaagcggttagcaaatgtcaag

SEQ ID NO: 4413459 - DNA, 25 bp, Homo sapien
gagtcaaatcgattagaggccacct

SEQ ID NO: 4413460 - DNA, 25 bp, Homo sapien
ttgaagtggagagaacggtaccgcc

SEQ ID NO: 4413461 - DNA, 25 bp, Homo sapien
gacaggatttctatagcgtgttccc

SEQ ID NO: 4413462 - DNA, 25 bp, Homo sapien
cggaggcaggggaagaaatttatag

SEQ ID NO: 4413463 - DNA, 25 bp, Homo sapien
gcaggggaagaaatttatagcaaaa

SEQ ID NO: 4413464 - DNA, 25 bp, Homo sapien
gaacagaagacggaggcaggggaag

SEQ ID NO: 4413465 - DNA, 25 bp, Homo sapien
aggaaaggaacagaagacggaggca

SEQ ID NO: 4413466 - DNA, 25 bp, Homo sapien
aatgatgaggggaatttaaaaatca

SEQ ID NO: 4413467 - DNA, 25 bp, Homo sapien
atgatgaggggaatttaaaaatcat

SEQ ID NO: 4413468 - DNA, 25 bp, Homo sapien
tcagcgcagctcacgaactgttttc

SEQ ID NO: 4413469 - DNA, 25 bp, Homo sapien
aggctctgggaccaccacaatgcgg

SEQ ID NO: 4413470 - DNA, 25 bp, Homo sapien
tgctcccatggtcctgaaaaagact

SEQ ID NO: 4413471 - DNA, 25 bp, Homo sapien
ggctgacggcctcgcttcaatagaa

SEQ ID NO: 4413472 - DNA, 25 bp, Homo sapien
ttctttctatcaaatatcctttgtg

SEQ ID NO: 4413473 - DNA, 25 bp, Homo sapien
cttctgtcctgagaatcttcccaac

SEQ ID NO: 4413474 - DNA, 25 bp, Homo sapien
ctccaaggatggaaattagccgctt

SEQ ID NO: 4413475 - DNA, 25 bp, Homo sapien
tcctttgtgagataaagctccaagg

SEQ ID NO: 4413476 - DNA, 25 bp, Homo sapien
agctttcctctattgggaaaaatgt

SEQ ID NO: 4413477 - DNA, 25 bp, Homo sapien
catccagagtcaacccatttggaaa

SEQ ID NO: 4413478 - DNA, 25 bp, Homo sapien
tttgcatccagagtcaacccatttg

SEQ ID NO: 4413479 - DNA, 25 bp, Homo sapien
ctttcctctattgggaaaaatgtga

SEQ ID NO: 4413480 - DNA, 25 bp, Homo sapien
aattagtggcggaggtaacaccctg

SEQ ID NO: 4413481 - DNA, 25 bp, Homo sapien
taacttccctagtgtgaacgagctc

SEQ ID NO: 4413482 - DNA, 25 bp, Homo sapien
ggccagcctaattcaagttgcacag

SEQ ID NO: 4413483 - DNA, 25 bp, Homo sapien
tcaaagccagtggtagtaacttccc

SEQ ID NO: 4413484 - DNA, 25 bp, Homo sapien
gaagggtgggcccaccacactggga

SEQ ID NO: 4413485 - DNA, 25 bp, Homo sapien
ggtctaccgtctggttgtagggaca

SEQ ID NO: 4413486 - DNA, 25 bp, Homo sapien
gcaggataattctggggcaaatcca

SEQ ID NO: 4413487 - DNA, 25 bp, Homo sapien
ggcaaatccaggcatacgccaaaga

SEQ ID NO: 4413488 - DNA, 25 bp, Homo sapien
attcaaaagatgacaaggaggcact

SEQ ID NO: 4413489 - DNA, 25 bp, Homo sapien
tttcacgtcccctgcaaatgcggga

SEQ ID NO: 4413490 - DNA, 25 bp, Homo sapien
tcttttccgttgtgcgaagtctctg

SEQ ID NO: 4413491 - DNA, 25 bp, Homo sapien
tactgtccgaaggtgagcttcttgc

SEQ ID NO: 4413492 - DNA, 25 bp, Homo sapien
tgccgctgctgtctacaccgactgt

SEQ ID NO: 4413493 - DNA, 25 bp, Homo sapien
cttaattaaagaacacgctcacggc

SEQ ID NO: 4413494 - DNA, 25 bp, Homo sapien
aagatcttgaattgccaccgtgtgg

SEQ ID NO: 4413495 - DNA, 25 bp, Homo sapien
cgctcacggcatccaaaagatcttg

SEQ ID NO: 4413496 - DNA, 25 bp, Homo sapien
actgtgggccacagcggaactctga

SEQ ID NO: 4413497 - DNA, 25 bp, Homo sapien
ccaaactgcctgaagcatggggcat

SEQ ID NO: 4413498 - DNA, 25 bp, Homo sapien
agaccaaactgcctgaagcatgggg

SEQ ID NO: 4413499 - DNA, 25 bp, Homo sapien
aagaccaaactgcctgaagcatggg

SEQ ID NO: 4413500 - DNA, 25 bp, Homo sapien
gaccaaactgcctgaagcatggggc

SEQ ID NO: 4413501 - DNA, 25 bp, Homo sapien
tttatgtgagggtagtcaaatcccc

SEQ ID NO: 4413502 - DNA, 25 bp, Homo sapien
caggaatcccctgacactccaagaa

SEQ ID NO: 4413503 - DNA, 25 bp, Homo sapien
aatcccctggagaatatcaactaca

SEQ ID NO: 4413504 - DNA, 25 bp, Homo sapien
tcttctttcgccagtgagattcctg

SEQ ID NO: 4413505 - DNA, 25 bp, Homo sapien
ctgtcagcaaataggcatatgacac

SEQ ID NO: 4413506 - DNA, 25 bp, Homo sapien
gcatcagtgcaaagaaagcctaaga

SEQ ID NO: 4413507 - DNA, 25 bp, Homo sapien
cagcaaataggcatatgacacaagc

SEQ ID NO: 4413508 - DNA, 25 bp, Homo sapien
catatgacacaagcatcagtgcaaa

SEQ ID NO: 4413509 - DNA, 25 bp, Homo sapien
aataaacattacggtcagctgtgtc

SEQ ID NO: 4413510 - DNA, 25 bp, Homo sapien
gtgtccagactctggcgagagaaca

SEQ ID NO: 4413511 - DNA, 25 bp, Homo sapien
ttgaataaacattacggtcagctgt

SEQ ID NO: 4413512 - DNA, 25 bp, Homo sapien
tgtccagactctggcgagagaacag

SEQ ID NO: 4413513 - DNA, 25 bp, Homo sapien
tgctccacaggttcgggaacaggtt

SEQ ID NO: 4413514 - DNA, 25 bp, Homo sapien
tgtaacccagttgacccagattgga

SEQ ID NO: 4413515 - DNA, 25 bp, Homo sapien
accttcacatcagcgacttcttcag

SEQ ID NO: 4413516 - DNA, 25 bp, Homo sapien
ccagattggatctgtctttcttgta

SEQ ID NO: 4413517 - DNA, 25 bp, Homo sapien
tcttctatgccaccaatggatacag

SEQ ID NO: 4413518 - DNA, 25 bp, Homo sapien
tcagagacaaatctttcagtttcaa

SEQ ID NO: 4413519 - DNA, 25 bp, Homo sapien
caatgataggttctgattcaaaggc

SEQ ID NO: 4413520 - DNA, 25 bp, Homo sapien
gatgaccttgaaactctgtctgcta

SEQ ID NO: 4413521 - DNA, 25 bp, Homo sapien
gaaatttgcctctggactgcatcag

SEQ ID NO: 4413522 - DNA, 25 bp, Homo sapien
cagacatgagcttagatatgctacg

SEQ ID NO: 4413523 - DNA, 25 bp, Homo sapien
gatctctctgcctgctaaaattcca

SEQ ID NO: 4413524 - DNA, 25 bp, Homo sapien
gattgaacaccacagagttaaggtg

SEQ ID NO: 4413525 - DNA, 25 bp, Homo sapien
cctttccaaatgcaattgctaatgg

SEQ ID NO: 4413526 - DNA, 25 bp, Homo sapien
aatggatgttgagagcttgctaaag

SEQ ID NO: 4413527 - DNA, 25 bp, Homo sapien
tttgcctttccaaatgcaattgcta

SEQ ID NO: 4413528 - DNA, 25 bp, Homo sapien
tcatttgcctttccaaatgcaattg

SEQ ID NO: 4413529 - DNA, 25 bp, Homo sapien
tcaccccttcttgccgtgaccagtg

SEQ ID NO: 4413530 - DNA, 25 bp, Homo sapien
tcttgccgtgaccagtgaagttgtc

SEQ ID NO: 4413531 - DNA, 25 bp, Homo sapien
ttgccgtgaccagtgaagttgtctc

SEQ ID NO: 4413532 - DNA, 25 bp, Homo sapien
ccttcttgccgtgaccagtgaagtt

SEQ ID NO: 4413533 - DNA, 25 bp, Homo sapien
tccttctgcacctttatgtgatatt

SEQ ID NO: 4413534 - DNA, 25 bp, Homo sapien
gtgatattgctacacaatatattag

SEQ ID NO: 4413535 - DNA, 25 bp, Homo sapien
ttctgcacctttatgtgatattgct

SEQ ID NO: 4413536 - DNA, 25 bp, Homo sapien
tatgtgatattgctacacaatatat

SEQ ID NO: 4413537 - DNA, 25 bp, Homo sapien
ggagctaactcatgcagacacctgc

SEQ ID NO: 4413538 - DNA, 25 bp, Homo sapien
gcctgcgttgtcgtagagatgtgtt

SEQ ID NO: 4413539 - DNA, 25 bp, Homo sapien
ctgccagcacattcgggagctaact

SEQ ID NO: 4413540 - DNA, 25 bp, Homo sapien
tgttcctgggtggctgtatttcatt

SEQ ID NO: 4413541 - DNA, 25 bp, Homo sapien
catgaagtagcatgaacagcagcaa

SEQ ID NO: 4413542 - DNA, 25 bp, Homo sapien
tgcacacacatgaagtagcatgaac

SEQ ID NO: 4413543 - DNA, 25 bp, Homo sapien
gaacagcagcaaggtccatttcacc

SEQ ID NO: 4413544 - DNA, 25 bp, Homo sapien
gcaaggtccatttcaccctcatcat

SEQ ID NO: 4413545 - DNA, 25 bp, Homo sapien
cctgatgtgacacgcaagggtacca

SEQ ID NO: 4413546 - DNA, 25 bp, Homo sapien
gatgtgacacgcaagggtaccaaga

SEQ ID NO: 4413547 - DNA, 25 bp, Homo sapien
tgacacgcaagggtaccaagaaata

SEQ ID NO: 4413548 - DNA, 25 bp, Homo sapien
ctcctgatgtgacacgcaagggtac

SEQ ID NO: 4413549 - DNA, 25 bp, Homo sapien
tcattgtcttgtggggttttgccaa

SEQ ID NO: 4413550 - DNA, 25 bp, Homo sapien
ctaaagaattgcatgccatatgagt

SEQ ID NO: 4413551 - DNA, 25 bp, Homo sapien
tagttggatgttgcagattcattgt

SEQ ID NO: 4413552 - DNA, 25 bp, Homo sapien
gcatgccatatgagttaaatagttg

SEQ ID NO: 4413553 - DNA, 25 bp, Homo sapien
ccagggcatgtgcagtggagctaaa

SEQ ID NO: 4413554 - DNA, 25 bp, Homo sapien
cagggcatgtgcagtggagctaaat

SEQ ID NO: 4413555 - DNA, 25 bp, Homo sapien
gtttccagggcatgtgcagtggagc

SEQ ID NO: 4413556 - DNA, 25 bp, Homo sapien
tgtctctcttggtctcatttagagg

SEQ ID NO: 4413557 - DNA, 25 bp, Homo sapien
agcccccagtactccccatcagttt

SEQ ID NO: 4413558 - DNA, 25 bp, Homo sapien
tctctcttggtctcatttagaggga

SEQ ID NO: 4413559 - DNA, 25 bp, Homo sapien
ctcttggtctcatttagagggacag

SEQ ID NO: 4413560 - DNA, 25 bp, Homo sapien
tgcacctgcaactaattggagaccc

SEQ ID NO: 4413561 - DNA, 25 bp, Homo sapien
gtggcaagtagttaattgcacccca

SEQ ID NO: 4413562 - DNA, 25 bp, Homo sapien
ggagacccttatattgttcgtggaa

SEQ ID NO: 4413563 - DNA, 25 bp, Homo sapien
cacaattgtctacgggcattctcag

SEQ ID NO: 4413564 - DNA, 25 bp, Homo sapien
caaccgtaaaggaggttgctgtgcc

SEQ ID NO: 4413565 - DNA, 25 bp, Homo sapien
caaacagtccaagtaggctagcaac

SEQ ID NO: 4413566 - DNA, 25 bp, Homo sapien
ccagagacctttataagacagcatg

SEQ ID NO: 4413567 - DNA, 25 bp, Homo sapien
tcaatgtctctagcctcttgaaggc

SEQ ID NO: 4413568 - DNA, 25 bp, Homo sapien
ggggctagagggtaagcactgagca

SEQ ID NO: 4413569 - DNA, 25 bp, Homo sapien
tgagcagtcacagccatgtgtcttt

SEQ ID NO: 4413570 - DNA, 25 bp, Homo sapien
tgggacaaggcgatgccccttctct

SEQ ID NO: 4413571 - DNA, 25 bp, Homo sapien
tgtcatatgtaccactttgaaagtc

SEQ ID NO: 4413572 - DNA, 25 bp, Homo sapien
cacgagagtcagtcctggttttgaa

SEQ ID NO: 4413573 - DNA, 25 bp, Homo sapien
tagatatttcagacagttattcacg

SEQ ID NO: 4413574 - DNA, 25 bp, Homo sapien
agttattcacgagagtcagtcctgg

SEQ ID NO: 4413575 - DNA, 25 bp, Homo sapien
tcagacagttattcacgagagtcag

SEQ ID NO: 4413576 - DNA, 25 bp, Homo sapien
gtcacttccacggaacagcattgct

SEQ ID NO: 4413577 - DNA, 25 bp, Homo sapien
ctgtcacttccacggaacagcattg

SEQ ID NO: 4413578 - DNA, 25 bp, Homo sapien
ctctgtcacttccacggaacagcat

SEQ ID NO: 4413579 - DNA, 25 bp, Homo sapien
tcacttccacggaacagcattgctt

SEQ ID NO: 4413580 - DNA, 25 bp, Homo sapien
ttatggtatcccgagttcccatacc

SEQ ID NO: 4413581 - DNA, 25 bp, Homo sapien
gaggtaactatgctgaaacccatcc

SEQ ID NO: 4413582 - DNA, 25 bp, Homo sapien
tatggtatcccgagttcccataccc

SEQ ID NO: 4413583 - DNA, 25 bp, Homo sapien
agtgtttgagaggtaactatgctga

SEQ ID NO: 4413584 - DNA, 25 bp, Homo sapien
tggattgcagccagggccattgaaa

SEQ ID NO: 4413585 - DNA, 25 bp, Homo sapien
attgaaactgcacaccccgcatctg

SEQ ID NO: 4413586 - DNA, 25 bp, Homo sapien
gcagcttctgtgtggaatacggaac

SEQ ID NO: 4413587 - DNA, 25 bp, Homo sapien
tcacacattgacaacagtaggaggc

SEQ ID NO: 4413588 - DNA, 25 bp, Homo sapien
gatttcatccgaacaatttctgagt

SEQ ID NO: 4413589 - DNA, 25 bp, Homo sapien
gggttggcaagacacattcccagct

SEQ ID NO: 4413590 - DNA, 25 bp, Homo sapien
tcccttgatttcatccgaacaattt

SEQ ID NO: 4413591 - DNA, 25 bp, Homo sapien
tttctgagtgggttggcaagacaca

SEQ ID NO: 4413592 - DNA, 25 bp, Homo sapien
gagccgaccaactcgatattgatgt

SEQ ID NO: 4413593 - DNA, 25 bp, Homo sapien
tacccaatggtctgtgaggccaccg

SEQ ID NO: 4413594 - DNA, 25 bp, Homo sapien
gagtgtggagcatccgcacggccct

SEQ ID NO: 4413595 - DNA, 25 bp, Homo sapien
tattgatgtgactccctcctccaag

SEQ ID NO: 4413596 - DNA, 25 bp, Homo sapien
cagcatcacctgctgttgcattatt

SEQ ID NO: 4413597 - DNA, 25 bp, Homo sapien
tcctgtccatctctccagcatcacc

SEQ ID NO: 4413598 - DNA, 25 bp, Homo sapien
tcacctgctgttgcattattgcttt

SEQ ID NO: 4413599 - DNA, 25 bp, Homo sapien
tgggtcctgtccatctctccagcat

SEQ ID NO: 4413600 - DNA, 25 bp, Homo sapien
cagccctctaccatcatggagaaag

SEQ ID NO: 4413601 - DNA, 25 bp, Homo sapien
cccattcctgggcagtcaagaagag

SEQ ID NO: 4413602 - DNA, 25 bp, Homo sapien
ggacaaatttcccagtggtagccca

SEQ ID NO: 4413603 - DNA, 25 bp, Homo sapien
tgagaagtccgagtatagaagcaac

SEQ ID NO: 4413604 - DNA, 25 bp, Homo sapien
ctctgcgcagcaggagaactggagg

SEQ ID NO: 4413605 - DNA, 25 bp, Homo sapien
ctgcgcagcaggagaactggaggaa

SEQ ID NO: 4413606 - DNA, 25 bp, Homo sapien
tctgcgcagcaggagaactggagga

SEQ ID NO: 4413607 - DNA, 25 bp, Homo sapien
ggctgggtgtctatgcagatttgga

SEQ ID NO: 4413608 - DNA, 25 bp, Homo sapien
tctatgcagatttggaagggggagc

SEQ ID NO: 4413609 - DNA, 25 bp, Homo sapien
aaggctgggtgtctatgcagatttg

SEQ ID NO: 4413610 - DNA, 25 bp, Homo sapien
ctgggtgtctatgcagatttggaag

SEQ ID NO: 4413611 - DNA, 25 bp, Homo sapien
cagcactgcagggattgcacaagct

SEQ ID NO: 4413612 - DNA, 25 bp, Homo sapien
ctgtgtggacggaggtcctatttgc

SEQ ID NO: 4413613 - DNA, 25 bp, Homo sapien
tatttgccgcgtgctgattttcatc

SEQ ID NO: 4413614 - DNA, 25 bp, Homo sapien
cactgcagggattgcacaagctgct

SEQ ID NO: 4413615 - DNA, 25 bp, Homo sapien
attgaacaatggtaaggaagcattt

SEQ ID NO: 4413616 - DNA, 25 bp, Homo sapien
aattgaacaatggtaaggaagcatt

SEQ ID NO: 4413617 - DNA, 25 bp, Homo sapien
ttgaacaatggtaaggaagcatttg

SEQ ID NO: 4413618 - DNA, 25 bp, Homo sapien
tgtgaatacgtgtgcttgaaggtga

SEQ ID NO: 4413619 - DNA, 25 bp, Homo sapien
gcacatcccagtgtgtgaatacgtg

SEQ ID NO: 4413620 - DNA, 25 bp, Homo sapien
cagtgtgtgaatacgtgtgcttgaa

SEQ ID NO: 4413621 - DNA, 25 bp, Homo sapien
catcccagtgtgtgaatacgtgtgc

SEQ ID NO: 4413622 - DNA, 25 bp, Homo sapien
tcaggcttgtgaacgagactcagat

SEQ ID NO: 4413623 - DNA, 25 bp, Homo sapien
tctgaaatgcgggaacgaggagcaa

SEQ ID NO: 4413624 - DNA, 25 bp, Homo sapien
aacatgcccagagctcggtggctcc

SEQ ID NO: 4413625 - DNA, 25 bp, Homo sapien
ggatctcagagtccactctgaaatg

SEQ ID NO: 4413626 - DNA, 25 bp, Homo sapien
catctccaacgtccccactgaggcc

SEQ ID NO: 4413627 - DNA, 25 bp, Homo sapien
ttcccactgggtctccaagttccat

SEQ ID NO: 4413628 - DNA, 25 bp, Homo sapien
ctgggtctccaagttccatctccaa

SEQ ID NO: 4413629 - DNA, 25 bp, Homo sapien
ccaagttccatctccaacgtcccca

SEQ ID NO: 4413630 - DNA, 25 bp, Homo sapien
aggtagggtccaggccgagatgatg

SEQ ID NO: 4413631 - DNA, 25 bp, Homo sapien
ggacataacactgcccctgtcctgg

SEQ ID NO: 4413632 - DNA, 25 bp, Homo sapien
agaggagacccaaggccttccgcaa

SEQ ID NO: 4413633 - DNA, 25 bp, Homo sapien
cagaatgtgggcttcctcttgcact

SEQ ID NO: 4413634 - DNA, 25 bp, Homo sapien
ttcgtcgccccggtagtagagagaa

SEQ ID NO: 4413635 - DNA, 25 bp, Homo sapien
gccaaactatgtccagggaggctct

SEQ ID NO: 4413636 - DNA, 25 bp, Homo sapien
ctttaggaaacatctatgaggctct

SEQ ID NO: 4413637 - DNA, 25 bp, Homo sapien
tagtagagagaatttgtgccacaca

SEQ ID NO: 4413638 - DNA, 25 bp, Homo sapien
tcctgacttgcatggcccagtcaat

SEQ ID NO: 4413639 - DNA, 25 bp, Homo sapien
gaaggcatcctgacttgcatggccc

SEQ ID NO: 4413640 - DNA, 25 bp, Homo sapien
acttgcatggcccagtcaatggtga

SEQ ID NO: 4413641 - DNA, 25 bp, Homo sapien
catggcccagtcaatggtgatgcct

SEQ ID NO: 4413642 - DNA, 25 bp, Homo sapien
gcaacatgatttccatgtgttgtca

SEQ ID NO: 4413643 - DNA, 25 bp, Homo sapien
ttgctccagcaacatgatttccatg

SEQ ID NO: 4413644 - DNA, 25 bp, Homo sapien
gcttgctccagcaacatgatttcca

SEQ ID NO: 4413645 - DNA, 25 bp, Homo sapien
tccagcaacatgatttccatgtgtt

SEQ ID NO: 4413646 - DNA, 25 bp, Homo sapien
cagtcaccatctctcttaagtgaga

SEQ ID NO: 4413647 - DNA, 25 bp, Homo sapien
ataactattaatcatcatgcagttg

SEQ ID NO: 4413648 - DNA, 25 bp, Homo sapien
gctttcatgttgaatcctgcatatt

SEQ ID NO: 4413649 - DNA, 25 bp, Homo sapien
ttaagtgagaagaactcctttctgc

SEQ ID NO: 4413650 - DNA, 25 bp, Homo sapien
agggacgtataaccaggagcaagga

SEQ ID NO: 4413651 - DNA, 25 bp, Homo sapien
tagccagggacgtataaccaggagc

SEQ ID NO: 4413652 - DNA, 25 bp, Homo sapien
ggacatcatagccagggacgtataa

SEQ ID NO: 4413653 - DNA, 25 bp, Homo sapien
gaaggtccactgacaggggacatca

SEQ ID NO: 4413654 - DNA, 25 bp, Homo sapien
ggggggtcaatttcagcacagcttt

SEQ ID NO: 4413655 - DNA, 25 bp, Homo sapien
ctgcagtgcagaggggggtcaattt

SEQ ID NO: 4413656 - DNA, 25 bp, Homo sapien
tgcagaggggggtcaatttcagcac

SEQ ID NO: 4413657 - DNA, 25 bp, Homo sapien
cagaggggggtcaatttcagcacag

SEQ ID NO: 4413658 - DNA, 25 bp, Homo sapien
ccagtagtgccaattgtcagggtcc

SEQ ID NO: 4413659 - DNA, 25 bp, Homo sapien
cttctttcccagtagtgccaattgt

SEQ ID NO: 4413660 - DNA, 25 bp, Homo sapien
ttgttgtcaagcttctttcccagta

SEQ ID NO: 4413661 - DNA, 25 bp, Homo sapien
tgtttttgttgtcaagcttctttcc

SEQ ID NO: 4413662 - DNA, 25 bp, Homo sapien
tccagactgggatggcttcaaagct

SEQ ID NO: 4413663 - DNA, 25 bp, Homo sapien
aacaggtgcaaaggcgagatcacgc

SEQ ID NO: 4413664 - DNA, 25 bp, Homo sapien
tcacgcaggtgaactcccataatcc

SEQ ID NO: 4413665 - DNA, 25 bp, Homo sapien
ccagatgtccagactgggatggctt

SEQ ID NO: 4413666 - DNA, 25 bp, Homo sapien
gaccatgaagctcgaattctggaag

SEQ ID NO: 4413667 - DNA, 25 bp, Homo sapien
taggaggaattcacagcctttcact

SEQ ID NO: 4413668 - DNA, 25 bp, Homo sapien
gcttaagcatctcttcacgaccatg

SEQ ID NO: 4413669 - DNA, 25 bp, Homo sapien
gacataagaatctgctccctaaggt

SEQ ID NO: 4413670 - DNA, 25 bp, Homo sapien
tctgctctcatcatatatgtctcca

SEQ ID NO: 4413671 - DNA, 25 bp, Homo sapien
ccaggggttgagcattttcatctgc

SEQ ID NO: 4413672 - DNA, 25 bp, Homo sapien
ttcatctgctctcatcatatatgtc

SEQ ID NO: 4413673 - DNA, 25 bp, Homo sapien
ctcttccaggggttgagcattttca

SEQ ID NO: 4413674 - DNA, 25 bp, Homo sapien
tgcagttagttcattttctgccttc

SEQ ID NO: 4413675 - DNA, 25 bp, Homo sapien
cttgcagttagttcattttctgcct

SEQ ID NO: 4413676 - DNA, 25 bp, Homo sapien
agttagttcattttctgccttcagg

SEQ ID NO: 4413677 - DNA, 25 bp, Homo sapien
cttgttcttgcagttagttcatttt

SEQ ID NO: 4413678 - DNA, 25 bp, Homo sapien
cattgttatttcttgtatttcgaca

SEQ ID NO: 4413679 - DNA, 25 bp, Homo sapien
ttaattgctgccgtcattgttattt

SEQ ID NO: 4413680 - DNA, 25 bp, Homo sapien
gtatttcgacataacaaaattcaaa

SEQ ID NO: 4413681 - DNA, 25 bp, Homo sapien
gctgccgtcattgttatttcttgta

SEQ ID NO: 4413682 - DNA, 25 bp, Homo sapien
aaagtggagccttcttcttcaggac

SEQ ID NO: 4413683 - DNA, 25 bp, Homo sapien
ccatccccatgccatgttgtcatgt

SEQ ID NO: 4413684 - DNA, 25 bp, Homo sapien
tgttcacccgagatcctgaaggacg

SEQ ID NO: 4413685 - DNA, 25 bp, Homo sapien
tcttcaggacgcagccattgctgtg

SEQ ID NO: 4413686 - DNA, 25 bp, Homo sapien
tccaaagccagctcgtggggctgct

SEQ ID NO: 4413687 - DNA, 25 bp, Homo sapien
ctccccgctccaagtttgtaggact

SEQ ID NO: 4413688 - DNA, 25 bp, Homo sapien
tgctcccagtctccccgctccaagt

SEQ ID NO: 4413689 - DNA, 25 bp, Homo sapien
cagtctccccgctccaagtttgtag

SEQ ID NO: 4413690 - DNA, 25 bp, Homo sapien
agatgcaggaaggtagcttggcttc

SEQ ID NO: 4413691 - DNA, 25 bp, Homo sapien
ctttatccaccaaaccaaaacactg

SEQ ID NO: 4413692 - DNA, 25 bp, Homo sapien
atggctggcactttatccaccaaac

SEQ ID NO: 4413693 - DNA, 25 bp, Homo sapien
tggggcctttctagaagcattgcag

SEQ ID NO: 4413694 - DNA, 25 bp, Homo sapien
cttctgaacccactatggcaaaagt

SEQ ID NO: 4413695 - DNA, 25 bp, Homo sapien
tcttctgaacccactatggcaaaag

SEQ ID NO: 4413696 - DNA, 25 bp, Homo sapien
tgaaccatacaagccctgcgtgtag

SEQ ID NO: 4413697 - DNA, 25 bp, Homo sapien
aagccctgcgtgtaggagctgtgac

SEQ ID NO: 4413698 - DNA, 25 bp, Homo sapien
gaggtaaagtgaaccatacaagccc

SEQ ID NO: 4413699 - DNA, 25 bp, Homo sapien
cttgagggtgaggtaaagtgaacca

SEQ ID NO: 4413700 - DNA, 25 bp, Homo sapien
gagaccatgaagtccaaggatcttt

SEQ ID NO: 4413701 - DNA, 25 bp, Homo sapien
gaagtccaaggatcttttcttattc

SEQ ID NO: 4413702 - DNA, 25 bp, Homo sapien
catgaagtccaaggatcttttctta

SEQ ID NO: 4413703 - DNA, 25 bp, Homo sapien
cttgagaccatgaagtccaaggatc

SEQ ID NO: 4413704 - DNA, 25 bp, Homo sapien
ccccaggacccaattgtagccactt

SEQ ID NO: 4413705 - DNA, 25 bp, Homo sapien
gcccaggctttcccgaaatgtgaag

SEQ ID NO: 4413706 - DNA, 25 bp, Homo sapien
ctgccccaggacccaattgtagcca

SEQ ID NO: 4413707 - DNA, 25 bp, Homo sapien
gccccaggacccaattgtagccact

SEQ ID NO: 4413708 - DNA, 25 bp, Homo sapien
taagctggcatacaacctctccaag

SEQ ID NO: 4413709 - DNA, 25 bp, Homo sapien
tctcccctgtcttaggatatggcct

SEQ ID NO: 4413710 - DNA, 25 bp, Homo sapien
tccccacagagctgtcgggtagtga

SEQ ID NO: 4413711 - DNA, 25 bp, Homo sapien
ggagcccctcttttggaataagctg

SEQ ID NO: 4413712 - DNA, 25 bp, Homo sapien
attaatacatgtaatacatcacata

SEQ ID NO: 4413713 - DNA, 25 bp, Homo sapien
tatgcaaattaatacatgtaataca

SEQ ID NO: 4413714 - DNA, 25 bp, Homo sapien
caatagatgcatagaaggcctttgg

SEQ ID NO: 4413715 - DNA, 25 bp, Homo sapien
atagatgcatagaaggcctttggca

SEQ ID NO: 4413716 - DNA, 25 bp, Homo sapien
tggagaggatgctctgttgagtggc

SEQ ID NO: 4413717 - DNA, 25 bp, Homo sapien
ggagaggatgctctgttgagtggct

SEQ ID NO: 4413718 - DNA, 25 bp, Homo sapien
cttgtaagacatccctgaccgcaca

SEQ ID NO: 4413719 - DNA, 25 bp, Homo sapien
tctgccggctgccaggacttctctg

SEQ ID NO: 4413720 - DNA, 25 bp, Homo sapien
gccggctgccaggacttctctggaa

SEQ ID NO: 4413721 - DNA, 25 bp, Homo sapien
tgaccgcacagtgcaagaagctctt

SEQ ID NO: 4413722 - DNA, 25 bp, Homo sapien
acatgattggacaagccaggaaaaa

SEQ ID NO: 4413723 - DNA, 25 bp, Homo sapien
acaggatcacctgagagaaagccac

SEQ ID NO: 4413724 - DNA, 25 bp, Homo sapien
tctgtcctttgctggcattcccctt

SEQ ID NO: 4413725 - DNA, 25 bp, Homo sapien
aaagaagatccccttggtcgctgat

SEQ ID NO: 4413726 - DNA, 25 bp, Homo sapien
ggtggccagaggtaacacgacacat

SEQ ID NO: 4413727 - DNA, 25 bp, Homo sapien
aagtttgtgtcagccctgtgtggcc

SEQ ID NO: 4413728 - DNA, 25 bp, Homo sapien
gagtggaagtttgtgtcagccctgt

SEQ ID NO: 4413729 - DNA, 25 bp, Homo sapien
cagggatgtttgtctggtggccaga

SEQ ID NO: 4413730 - DNA, 25 bp, Homo sapien
aaagcaggaatcatatcttgactat

SEQ ID NO: 4413731 - DNA, 25 bp, Homo sapien
ttctgaatttcagccccatggaggc

SEQ ID NO: 4413732 - DNA, 25 bp, Homo sapien
tcttgttttcgtcagactttcctcc

SEQ ID NO: 4413733 - DNA, 25 bp, Homo sapien
tccgggcttattccaggagaaggag

SEQ ID NO: 4413734 - DNA, 25 bp, Homo sapien
aatagtattctttcccacaggtgag

SEQ ID NO: 4413735 - DNA, 25 bp, Homo sapien
gacatagagccctttccacttcctt

SEQ ID NO: 4413736 - DNA, 25 bp, Homo sapien
tcaaccttcctcgttccatgtacag

SEQ ID NO: 4413737 - DNA, 25 bp, Homo sapien
ggagaaacatttgagtcctctttga

SEQ ID NO: 4413738 - DNA, 25 bp, Homo sapien
ggtgaattccttgcagctcgcttcc

SEQ ID NO: 4413739 - DNA, 25 bp, Homo sapien
cagcatgtgggtagcgtctgctttc

SEQ ID NO: 4413740 - DNA, 25 bp, Homo sapien
tgatgagggatgaatcggcttgtca

SEQ ID NO: 4413741 - DNA, 25 bp, Homo sapien
gggttacctcctcgcatgactctgg

SEQ ID NO: 4413742 - DNA, 25 bp, Homo sapien
tgccatgatatcagcaaggacttca

SEQ ID NO: 4413743 - DNA, 25 bp, Homo sapien
tcatgccatgatatcagcaaggact

SEQ ID NO: 4413744 - DNA, 25 bp, Homo sapien
tcagcaaggacttcaatgtaaaata

SEQ ID NO: 4413745 - DNA, 25 bp, Homo sapien
gatatcagcaaggacttcaatgtaa

SEQ ID NO: 4413746 - DNA, 25 bp, Homo sapien
gacataaaagcacactagacctaaa

SEQ ID NO: 4413747 - DNA, 25 bp, Homo sapien
cagggagggagctaagaatattctc

SEQ ID NO: 4413748 - DNA, 25 bp, Homo sapien
taattgatgagtgggtgtatcagcc

SEQ ID NO: 4413749 - DNA, 25 bp, Homo sapien
gaagactggcaaattcagcgtggaa

SEQ ID NO: 4413750 - DNA, 25 bp, Homo sapien
tgttttgtgtgcatcagatttagcc

SEQ ID NO: 4413751 - DNA, 25 bp, Homo sapien
ctgacataagaagctagaatcgcaa

SEQ ID NO: 4413752 - DNA, 25 bp, Homo sapien
gcatcagatttagcccctcttcgtt

SEQ ID NO: 4413753 - DNA, 25 bp, Homo sapien
tcagaggaagatgtagcacgagttt

SEQ ID NO: 4413754 - DNA, 25 bp, Homo sapien
tcccttacatccatttgggcaaagc

SEQ ID NO: 4413755 - DNA, 25 bp, Homo sapien
ttacatccatttgggcaaagccctt

SEQ ID NO: 4413756 - DNA, 25 bp, Homo sapien
catccatttgggcaaagcccttctt

SEQ ID NO: 4413757 - DNA, 25 bp, Homo sapien
ccttacatccatttgggcaaagccc

SEQ ID NO: 4413758 - DNA, 25 bp, Homo sapien
cattgctaccttggtgtccctggac

SEQ ID NO: 4413759 - DNA, 25 bp, Homo sapien
tgtccctggacttctcggtctacat

SEQ ID NO: 4413760 - DNA, 25 bp, Homo sapien
ttctccagctcagtagcttcattgc

SEQ ID NO: 4413761 - DNA, 25 bp, Homo sapien
ttctcggtctacatcagggagtctc

SEQ ID NO: 4413762 - DNA, 25 bp, Homo sapien
tacacacttctacaagatttcccag

SEQ ID NO: 4413763 - DNA, 25 bp, Homo sapien
cacttctacaagatttcccagcatc

SEQ ID NO: 4413764 - DNA, 25 bp, Homo sapien
atttttcctgaatttatgttctttg

SEQ ID NO: 4413765 - DNA, 25 bp, Homo sapien
tttgtacacacttctacaagatttc

SEQ ID NO: 4413766 - DNA, 25 bp, Homo sapien
gcatccacctctcttctgtccctaa

SEQ ID NO: 4413767 - DNA, 25 bp, Homo sapien
acctctcttctgtccctaaaatcca

SEQ ID NO: 4413768 - DNA, 25 bp, Homo sapien
ccacctctcttctgtccctaaaatc

SEQ ID NO: 4413769 - DNA, 25 bp, Homo sapien
aggcatccacctctcttctgtccct

SEQ ID NO: 4413770 - DNA, 25 bp, Homo sapien
tattcgagagtgtgatttgtcatcc

SEQ ID NO: 4413771 - DNA, 25 bp, Homo sapien
tatcatggggaactgtgcactctgg

SEQ ID NO: 4413772 - DNA, 25 bp, Homo sapien
tgtcatccactttaaatatcatggg

SEQ ID NO: 4413773 - DNA, 25 bp, Homo sapien
tggaggcgtctatgaagagacattc

SEQ ID NO: 4413774 - DNA, 25 bp, Homo sapien
ttcctatcagcttcgctgatgcttg

SEQ ID NO: 4413775 - DNA, 25 bp, Homo sapien
cagcttcgctgatgcttgaagggaa

SEQ ID NO: 4413776 - DNA, 25 bp, Homo sapien
tttcctatcagcttcgctgatgctt

SEQ ID NO: 4413777 - DNA, 25 bp, Homo sapien
tcctatcagcttcgctgatgcttga

SEQ ID NO: 4413778 - DNA, 25 bp, Homo sapien
tctttaggaaccatcagaagcttaa

SEQ ID NO: 4413779 - DNA, 25 bp, Homo sapien
accatcagaagcttaaccaaaggaa

SEQ ID NO: 4413780 - DNA, 25 bp, Homo sapien
taggaaccatcagaagcttaaccaa

SEQ ID NO: 4413781 - DNA, 25 bp, Homo sapien
gaaccatcagaagcttaaccaaagg

SEQ ID NO: 4413782 - DNA, 25 bp, Homo sapien
agaaacagtcaatatattaattttc

SEQ ID NO: 4413783 - DNA, 25 bp, Homo sapien
tcaggagaaacagtcaatatattaa

SEQ ID NO: 4413784 - DNA, 25 bp, Homo sapien
ggagaaacagtcaatatattaattt

SEQ ID NO: 4413785 - DNA, 25 bp, Homo sapien
ctcaggagaaacagtcaatatatta

SEQ ID NO: 4413786 - DNA, 25 bp, Homo sapien
actgccactggataatcataaatat

SEQ ID NO: 4413787 - DNA, 25 bp, Homo sapien
ccaaaactgccactggataatcata

SEQ ID NO: 4413788 - DNA, 25 bp, Homo sapien
gggttgtcaaggttactgagatgcc

SEQ ID NO: 4413789 - DNA, 25 bp, Homo sapien
tgagatgccaggatttttggacaca

SEQ ID NO: 4413790 - DNA, 25 bp, Homo sapien
aagttagagtactggtatgaacgcc

SEQ ID NO: 4413791 - DNA, 25 bp, Homo sapien
tagagtactggtatgaacgccagaa

SEQ ID NO: 4413792 - DNA, 25 bp, Homo sapien
cttaaagttagagtactggtatgaa

SEQ ID NO: 4413793 - DNA, 25 bp, Homo sapien
gagtactggtatgaacgccagaatt

SEQ ID NO: 4413794 - DNA, 25 bp, Homo sapien
ggtgtctgaatttgacttcccatct

SEQ ID NO: 4413795 - DNA, 25 bp, Homo sapien
agttagcaaccactctgccaacatt

SEQ ID NO: 4413796 - DNA, 25 bp, Homo sapien
cactctgccaacattgcaatgtctt

SEQ ID NO: 4413797 - DNA, 25 bp, Homo sapien
tgtagtatatgttttgtccaatgac

SEQ ID NO: 4413798 - DNA, 25 bp, Homo sapien
ggatgtagtatatgttttgtccaat

SEQ ID NO: 4413799 - DNA, 25 bp, Homo sapien
ttctataccctgtagagggcagatg

SEQ ID NO: 4413800 - DNA, 25 bp, Homo sapien
ggtctagagaaggtaatcctgttac

SEQ ID NO: 4413801 - DNA, 25 bp, Homo sapien
tgagctggagtttctataccctgta

SEQ ID NO: 4413802 - DNA, 25 bp, Homo sapien
cagctgttaggtcttgatactcaga

SEQ ID NO: 4413803 - DNA, 25 bp, Homo sapien
tgaaacctgctccaggtcccctgac

SEQ ID NO: 4413804 - DNA, 25 bp, Homo sapien
ctgaaacctgctccaggtcccctga

SEQ ID NO: 4413805 - DNA, 25 bp, Homo sapien
ggtcccctgactccccagatgcctc

SEQ ID NO: 4413806 - DNA, 25 bp, Homo sapien
ccaggtcccctgactccccagatgc

SEQ ID NO: 4413807 - DNA, 25 bp, Homo sapien
atcccccaccgggaagacagctgat

SEQ ID NO: 4413808 - DNA, 25 bp, Homo sapien
agcaagccggctggaccgctgatcc

SEQ ID NO: 4413809 - DNA, 25 bp, Homo sapien
atgaggtgatgcaagcaagccggct

SEQ ID NO: 4413810 - DNA, 25 bp, Homo sapien
gaaccggaccatggcttgagaatga

SEQ ID NO: 4413811 - DNA, 25 bp, Homo sapien
agcatgtccagcgtcccgtgatccc

SEQ ID NO: 4413812 - DNA, 25 bp, Homo sapien
taggtgcacacttgttcctatggca

SEQ ID NO: 4413813 - DNA, 25 bp, Homo sapien
gttcctatggcattggtgctgttta

SEQ ID NO: 4413814 - DNA, 25 bp, Homo sapien
tgggtgtcccctgagtaggtgcaca

SEQ ID NO: 4413815 - DNA, 25 bp, Homo sapien
ataggaataacaacaactgcctcta

SEQ ID NO: 4413816 - DNA, 25 bp, Homo sapien
gaacttggtagtaaatattatctcc

SEQ ID NO: 4413817 - DNA, 25 bp, Homo sapien
ggaataacaacaactgcctctattt

SEQ ID NO: 4413818 - DNA, 25 bp, Homo sapien
acaagaacttggtagtaaatattat

SEQ ID NO: 4413819 - DNA, 25 bp, Homo sapien
catgctccagcgtagaaaatgaaag

SEQ ID NO: 4413820 - DNA, 25 bp, Homo sapien
gatccatgctccagcgtagaaaatg

SEQ ID NO: 4413821 - DNA, 25 bp, Homo sapien
caccaacaccagatccatgctccag

SEQ ID NO: 4413822 - DNA, 25 bp, Homo sapien
caccagatccatgctccagcgtaga

SEQ ID NO: 4413823 - DNA, 25 bp, Homo sapien
caagtctcatcgctgagtcctggag

SEQ ID NO: 4413824 - DNA, 25 bp, Homo sapien
ctggagcagtgtcatagcaagctct

SEQ ID NO: 4413825 - DNA, 25 bp, Homo sapien
gacacattcagtgccagcgttcttg

SEQ ID NO: 4413826 - DNA, 25 bp, Homo sapien
tccaggataaccaaggcaagtctca

SEQ ID NO: 4413827 - DNA, 25 bp, Homo sapien
cacttggcggtcacctggtgcctac

SEQ ID NO: 4413828 - DNA, 25 bp, Homo sapien
tggtgcctactgtccgacaggacgc

SEQ ID NO: 4413829 - DNA, 25 bp, Homo sapien
ccaagtcttccagccggtggatctg

SEQ ID NO: 4413830 - DNA, 25 bp, Homo sapien
atcggctcgagcgacccaccttgtg

SEQ ID NO: 4413831 - DNA, 25 bp, Homo sapien
cttgctcttggctgaggagggtcac

SEQ ID NO: 4413832 - DNA, 25 bp, Homo sapien
aaatgcctccttcgcgcagcggcgg

SEQ ID NO: 4413833 - DNA, 25 bp, Homo sapien
cataaacggaaatgcctccttcgcg

SEQ ID NO: 4413834 - DNA, 25 bp, Homo sapien
ggtgctgggctgctcgaggctgcac

SEQ ID NO: 4413835 - DNA, 25 bp, Homo sapien
aaggagctaaacagccataaacgga

SEQ ID NO: 4413836 - DNA, 25 bp, Homo sapien
gctggcccacaacgtgtccgaagat

SEQ ID NO: 4413837 - DNA, 25 bp, Homo sapien
tggaaaccgagtgaactggctggcc

SEQ ID NO: 4413838 - DNA, 25 bp, Homo sapien
agataaccggcagtagcggctcctc

SEQ ID NO: 4413839 - DNA, 25 bp, Homo sapien
tgaagtttaacgaagccctccgcga

SEQ ID NO: 4413840 - DNA, 25 bp, Homo sapien
ctttgtccatgtgattgagcagggg

SEQ ID NO: 4413841 - DNA, 25 bp, Homo sapien
gctgctccaaagacatccggtatct

SEQ ID NO: 4413842 - DNA, 25 bp, Homo sapien
gaaagggcctaacaccatcctgcgg

SEQ ID NO: 4413843 - DNA, 25 bp, Homo sapien
catcctcacctatgactttgtccat

SEQ ID NO: 4413844 - DNA, 25 bp, Homo sapien
atttcaagaccacgtttggaatcaa

SEQ ID NO: 4413845 - DNA, 25 bp, Homo sapien
gaatttcaagaccacgtttggaatc

SEQ ID NO: 4413846 - DNA, 25 bp, Homo sapien
tttcaagaccacgtttggaatcaac

SEQ ID NO: 4413847 - DNA, 25 bp, Homo sapien
aatttcaagaccacgtttggaatca

SEQ ID NO: 4413848 - DNA, 25 bp, Homo sapien
tcatgatccgagcgagtgggcagct

SEQ ID NO: 4413849 - DNA, 25 bp, Homo sapien
gagcgagtgggcagctgttccacat

SEQ ID NO: 4413850 - DNA, 25 bp, Homo sapien
tgatccgagcgagtgggcagctgtt

SEQ ID NO: 4413851 - DNA, 25 bp, Homo sapien
gatccgagcgagtgggcagctgttc

SEQ ID NO: 4413852 - DNA, 25 bp, Homo sapien
atcggtgatcggcacagcgacaaca

SEQ ID NO: 4413853 - DNA, 25 bp, Homo sapien
tactgtgtggccacgtacgtgctgg

SEQ ID NO: 4413854 - DNA, 25 bp, Homo sapien
tcaacaaccgcaacatggatggagg

SEQ ID NO: 4413855 - DNA, 25 bp, Homo sapien
tggaggcaacgaagagttcaccctc

SEQ ID NO: 4413856 - DNA, 25 bp, Homo sapien
tcagccttaagagggatgatgacct

SEQ ID NO: 4413857 - DNA, 25 bp, Homo sapien
gtggagcagtgcaccctcatggact

SEQ ID NO: 4413858 - DNA, 25 bp, Homo sapien
ccctgctggctgaagtctgcgtgga

SEQ ID NO: 4413859 - DNA, 25 bp, Homo sapien
tgctgaccatgcagacgatccggct

SEQ ID NO: 4413860 - DNA, 25 bp, Homo sapien
gtgcccagtgccctccatgctccag

SEQ ID NO: 4413861 - DNA, 25 bp, Homo sapien
cccagtgccctccatgctccagctc

SEQ ID NO: 4413862 - DNA, 25 bp, Homo sapien
ctggcttgtctctcctgtgcccagt

SEQ ID NO: 4413863 - DNA, 25 bp, Homo sapien
tgtgcccagtgccctccatgctcca

SEQ ID NO: 4413864 - DNA, 25 bp, Homo sapien
ctaaccaggttaaatcaacagcaca

SEQ ID NO: 4413865 - DNA, 25 bp, Homo sapien
taaccaggttaaatcaacagcacag

SEQ ID NO: 4413866 - DNA, 25 bp, Homo sapien
aaactggatgagatgttgtctttgg

SEQ ID NO: 4413867 - DNA, 25 bp, Homo sapien
ctggatgagatgttgtctttggttc

SEQ ID NO: 4413868 - DNA, 25 bp, Homo sapien
aattgactgaaagccttgtaaatgg

SEQ ID NO: 4413869 - DNA, 25 bp, Homo sapien
ctttggttcttgtactaagccatgg

SEQ ID NO: 4413870 - DNA, 25 bp, Homo sapien
aggagcccttcgtaaggcagagtga

SEQ ID NO: 4413871 - DNA, 25 bp, Homo sapien
gagtgaggatagaggtgttgaactt

SEQ ID NO: 4413872 - DNA, 25 bp, Homo sapien
caacctggtccccaggtgtacacat

SEQ ID NO: 4413873 - DNA, 25 bp, Homo sapien
tgaacttctgacctgcaagccaggt

SEQ ID NO: 4413874 - DNA, 25 bp, Homo sapien
ttttgagatagggagtcagcttttg

SEQ ID NO: 4413875 - DNA, 25 bp, Homo sapien
tgtggtccttgaggttgtgcgttcc

SEQ ID NO: 4413876 - DNA, 25 bp, Homo sapien
tcttttcaatacatgtggtccttga

SEQ ID NO: 4413877 - DNA, 25 bp, Homo sapien
tgtgcgttcctaattgttgccttca

SEQ ID NO: 4413878 - DNA, 25 bp, Homo sapien
acatcccacctttgaggaaaatctt

SEQ ID NO: 4413879 - DNA, 25 bp, Homo sapien
catcccacctttgaggaaaatcttc

SEQ ID NO: 4413880 - DNA, 25 bp, Homo sapien
cacatcccacctttgaggaaaatct

SEQ ID NO: 4413881 - DNA, 25 bp, Homo sapien
cttccaccttttcataaaacacagc

SEQ ID NO: 4413882 - DNA, 25 bp, Homo sapien
gaggcagaacgctgtatcccacgca

SEQ ID NO: 4413883 - DNA, 25 bp, Homo sapien
tgtgtgacaatctgagcatacagtg

SEQ ID NO: 4413884 - DNA, 25 bp, Homo sapien
gtgacaatctgagcatacagtgaca

SEQ ID NO: 4413885 - DNA, 25 bp, Homo sapien
agaacgctgtatcccacgcagaggg

SEQ ID NO: 4413886 - DNA, 25 bp, Homo sapien
atttatgctcaagttcggctttcat

SEQ ID NO: 4413887 - DNA, 25 bp, Homo sapien
gactcttgagggattccaatttatg

SEQ ID NO: 4413888 - DNA, 25 bp, Homo sapien
gctcaagttcggctttcattccaga

SEQ ID NO: 4413889 - DNA, 25 bp, Homo sapien
tgactcttgagggattccaatttat

SEQ ID NO: 4413890 - DNA, 25 bp, Homo sapien
ttagattaacgaggaaacatatccg

SEQ ID NO: 4413891 - DNA, 25 bp, Homo sapien
gaaacatatccgtgagaaggttctg

SEQ ID NO: 4413892 - DNA, 25 bp, Homo sapien
gcctgttggtgtcggctgagccatt

SEQ ID NO: 4413893 - DNA, 25 bp, Homo sapien
gaaggttctggtttacaaacattga

SEQ ID NO: 4413894 - DNA, 25 bp, Homo sapien
tgagacacagtagctctgtacgagt

SEQ ID NO: 4413895 - DNA, 25 bp, Homo sapien
tgtacgagtgctccaagatcaaatg

SEQ ID NO: 4413896 - DNA, 25 bp, Homo sapien
caatctggaccgtgaaactctcctc

SEQ ID NO: 4413897 - DNA, 25 bp, Homo sapien
tatgagactttccaatctggaccgt

SEQ ID NO: 4413898 - DNA, 25 bp, Homo sapien
gctgtgcagggccatctagtgaccc

SEQ ID NO: 4413899 - DNA, 25 bp, Homo sapien
tacttcctcctagggtgttagatgc

SEQ ID NO: 4413900 - DNA, 25 bp, Homo sapien
catatgttcatttcggaattagaga

SEQ ID NO: 4413901 - DNA, 25 bp, Homo sapien
caccaagacgaaagcacagggaatt

SEQ ID NO: 4413902 - DNA, 25 bp, Homo sapien
ttttggtaataaactgcctcaggga

SEQ ID NO: 4413903 - DNA, 25 bp, Homo sapien
tttggtaataaactgcctcagggat

SEQ ID NO: 4413904 - DNA, 25 bp, Homo sapien
ggatgatgtattgtccttcctgact

SEQ ID NO: 4413905 - DNA, 25 bp, Homo sapien
gggatgcctcagacaatcggtcatc

SEQ ID NO: 4413906 - DNA, 25 bp, Homo sapien
gacaaagagaactattcggtgctgg

SEQ ID NO: 4413907 - DNA, 25 bp, Homo sapien
tcatcagtgaggaagaactgaagca

SEQ ID NO: 4413908 - DNA, 25 bp, Homo sapien
catcttcatagtgtgggcaaaacct

SEQ ID NO: 4413909 - DNA, 25 bp, Homo sapien
tcatagtgtgggcaaaacctgcaga

SEQ ID NO: 4413910 - DNA, 25 bp, Homo sapien
tcttcatagtgtgggcaaaacctgc

SEQ ID NO: 4413911 - DNA, 25 bp, Homo sapien
gcatcttcatagtgtgggcaaaacc

SEQ ID NO: 4413912 - DNA, 25 bp, Homo sapien
tctaggcatccacgatacttaatat

SEQ ID NO: 4413913 - DNA, 25 bp, Homo sapien
cacgatacttaatattagcctctgc

SEQ ID NO: 4413914 - DNA, 25 bp, Homo sapien
ttggattttcaccaatgtctatgcc

SEQ ID NO: 4413915 - DNA, 25 bp, Homo sapien
tatgcccgaaatagaagacatctct

SEQ ID NO: 4413916 - DNA, 25 bp, Homo sapien
tgtgagctggctgataaaagttcca

SEQ ID NO: 4413917 - DNA, 25 bp, Homo sapien
cccaaacttggtccgttgtgtgagc

SEQ ID NO: 4413918 - DNA, 25 bp, Homo sapien
ttccaggtaaccttccttgttctca

SEQ ID NO: 4413919 - DNA, 25 bp, Homo sapien
tccgttgtgtgagctggctgataaa

SEQ ID NO: 4413920 - DNA, 25 bp, Homo sapien
caaaattatcttccttgttgaacaa

SEQ ID NO: 4413921 - DNA, 25 bp, Homo sapien
tccaaaattatcttccttgttgaac

SEQ ID NO: 4413922 - DNA, 25 bp, Homo sapien
tatcttccttgttgaacaatccaca

SEQ ID NO: 4413923 - DNA, 25 bp, Homo sapien
aattatcttccttgttgaacaatcc

SEQ ID NO: 4413924 - DNA, 25 bp, Homo sapien
catctgttcctgtaatagagtgccc

SEQ ID NO: 4413925 - DNA, 25 bp, Homo sapien
cctgtacaactttggtgttgctgct

SEQ ID NO: 4413926 - DNA, 25 bp, Homo sapien
ctgtaatagagtgccctgtgaagcc

SEQ ID NO: 4413927 - DNA, 25 bp, Homo sapien
gtgaagcctgtacaactttggtgtt

SEQ ID NO: 4413928 - DNA, 25 bp, Homo sapien
ggatgattgctaatagacatgtcgt

SEQ ID NO: 4413929 - DNA, 25 bp, Homo sapien
gctaatagacatgtcgttagaaacc

SEQ ID NO: 4413930 - DNA, 25 bp, Homo sapien
acatgtcgttagaaaccaaagggag

SEQ ID NO: 4413931 - DNA, 25 bp, Homo sapien
caattactaccaggatgattgctaa

SEQ ID NO: 4413932 - DNA, 25 bp, Homo sapien
catggagggactgtggtggattatc

SEQ ID NO: 4413933 - DNA, 25 bp, Homo sapien
gggactgtggtggattatctgcaaa

SEQ ID NO: 4413934 - DNA, 25 bp, Homo sapien
gagggactgtggtggattatctgca

SEQ ID NO: 4413935 - DNA, 25 bp, Homo sapien
gactgtggtggattatctgcaaaga

SEQ ID NO: 4413936 - DNA, 25 bp, Homo sapien
tggcttccagaaagacggagatttg

SEQ ID NO: 4413937 - DNA, 25 bp, Homo sapien
gtagttaggcaatttggcttccaga

SEQ ID NO: 4413938 - DNA, 25 bp, Homo sapien
gccagaatgatctctggactcccca

SEQ ID NO: 4413939 - DNA, 25 bp, Homo sapien
gacctatgaccagagtagttaggca

SEQ ID NO: 4413940 - DNA, 25 bp, Homo sapien
ctcctgcaggcagcatctcattcat

SEQ ID NO: 4413941 - DNA, 25 bp, Homo sapien
ttctgccctggtcccagtgcccgga

SEQ ID NO: 4413942 - DNA, 25 bp, Homo sapien
cagtgcccggagctcctgcaggcag

SEQ ID NO: 4413943 - DNA, 25 bp, Homo sapien
cctggtcccagtgcccggagctcct

SEQ ID NO: 4413944 - DNA, 25 bp, Homo sapien
cctgtgtgctggaggattcctagtg

SEQ ID NO: 4413945 - DNA, 25 bp, Homo sapien
tcctgtgtgctggaggattcctagt

SEQ ID NO: 4413946 - DNA, 25 bp, Homo sapien
tgtgtgctggaggattcctagtgcc

SEQ ID NO: 4413947 - DNA, 25 bp, Homo sapien
tgtgctggaggattcctagtgcccc

SEQ ID NO: 4413948 - DNA, 25 bp, Homo sapien
ggccctggtcttcagcttatgtctg

SEQ ID NO: 4413949 - DNA, 25 bp, Homo sapien
ggagggcttcggtctcctctgctgc

SEQ ID NO: 4413950 - DNA, 25 bp, Homo sapien
aatcataagggaaatcattcacggg

SEQ ID NO: 4413951 - DNA, 25 bp, Homo sapien
cccatcgggttacagtagaatcata

SEQ ID NO: 4413952 - DNA, 25 bp, Homo sapien
gattcccacaatccgaagctgatcc

SEQ ID NO: 4413953 - DNA, 25 bp, Homo sapien
gggcccatgtagcatgggaaacttg

SEQ ID NO: 4413954 - DNA, 25 bp, Homo sapien
taatgccatcgcactgattcccaca

SEQ ID NO: 4413955 - DNA, 25 bp, Homo sapien
gaaacttgagttgcagatctagccg

SEQ ID NO: 4413956 - DNA, 25 bp, Homo sapien
tcaggccgtcattttgcaaccactg

SEQ ID NO: 4413957 - DNA, 25 bp, Homo sapien
tgtatctatttcttggactcctcct

SEQ ID NO: 4413958 - DNA, 25 bp, Homo sapien
caaccactggtctaaatgaacaacg

SEQ ID NO: 4413959 - DNA, 25 bp, Homo sapien
aatgaacaacgcacaactctccctg

SEQ ID NO: 4413960 - DNA, 25 bp, Homo sapien
ccatgccagcctactttcctaagaa

SEQ ID NO: 4413961 - DNA, 25 bp, Homo sapien
ccctggtgttcaagaggcaaccaaa

SEQ ID NO: 4413962 - DNA, 25 bp, Homo sapien
taatacagagggctagtagtaatgg

SEQ ID NO: 4413963 - DNA, 25 bp, Homo sapien
tagttgcacacttactgcatgattg

SEQ ID NO: 4413964 - DNA, 25 bp, Homo sapien
agggaacgcacacggcaattttggc

SEQ ID NO: 4413965 - DNA, 25 bp, Homo sapien
atttcccactaagacgcagacgttc

SEQ ID NO: 4413966 - DNA, 25 bp, Homo sapien
gttttccttcccttcgtgtgcattc

SEQ ID NO: 4413967 - DNA, 25 bp, Homo sapien
tgcattcgaagggaacgcacacggc

SEQ ID NO: 4413968 - DNA, 25 bp, Homo sapien
cacagctccggaaggctcttgcagt

SEQ ID NO: 4413969 - DNA, 25 bp, Homo sapien
catcacaacacagctccggaaggct

SEQ ID NO: 4413970 - DNA, 25 bp, Homo sapien
tagacgcagaggaaatttgaatgtc

SEQ ID NO: 4413971 - DNA, 25 bp, Homo sapien
ggctcttgcagtcatgttagacgca

SEQ ID NO: 4413972 - DNA, 25 bp, Homo sapien
cagaatagaggtgtgaacccagtga

SEQ ID NO: 4413973 - DNA, 25 bp, Homo sapien
agaatagaggtgtgaacccagtgag

SEQ ID NO: 4413974 - DNA, 25 bp, Homo sapien
gcagaatagaggtgtgaacccagtg

SEQ ID NO: 4413975 - DNA, 25 bp, Homo sapien
gcaagcagaatagaggtgtgaaccc

SEQ ID NO: 4413976 - DNA, 25 bp, Homo sapien
tacagaacctggaacgtagagttgg

SEQ ID NO: 4413977 - DNA, 25 bp, Homo sapien
agctttcccggaacgctgtgcagca

SEQ ID NO: 4413978 - DNA, 25 bp, Homo sapien
gaaatcgtgatgaagggaccaaaga

SEQ ID NO: 4413979 - DNA, 25 bp, Homo sapien
cctgaatggaagcttgaggcccgtt

SEQ ID NO: 4413980 - DNA, 25 bp, Homo sapien
ccagggtgagtcaaacatgaacatt

SEQ ID NO: 4413981 - DNA, 25 bp, Homo sapien
tctacaaccagattggccatggcct

SEQ ID NO: 4413982 - DNA, 25 bp, Homo sapien
tgtccctcaaacagctcttgggtat

SEQ ID NO: 4413983 - DNA, 25 bp, Homo sapien
catggcctttatgggttgccccaca

SEQ ID NO: 4413984 - DNA, 25 bp, Homo sapien
tatctggacctcagcaagattccaa

SEQ ID NO: 4413985 - DNA, 25 bp, Homo sapien
gaaactctgcctcgtatctgtccat

SEQ ID NO: 4413986 - DNA, 25 bp, Homo sapien
tcacccaagagcatctataagagca

SEQ ID NO: 4413987 - DNA, 25 bp, Homo sapien
accattgcttcgcaagagccttgca

SEQ ID NO: 4413988 - DNA, 25 bp, Homo sapien
tttgatttgggcgatattgtaggca

SEQ ID NO: 4413989 - DNA, 25 bp, Homo sapien
ccacggtgaaggtctgcccgaggaa

SEQ ID NO: 4413990 - DNA, 25 bp, Homo sapien
ggcgatattgtaggcagctttctgc

SEQ ID NO: 4413991 - DNA, 25 bp, Homo sapien
ctgctccacggtgaaggtctgcccg

SEQ ID NO: 4413992 - DNA, 25 bp, Homo sapien
ctgcaaatttgacttcacaggtgat

SEQ ID NO: 4413993 - DNA, 25 bp, Homo sapien
gacttcacaggtgatccgcttcaca

SEQ ID NO: 4413994 - DNA, 25 bp, Homo sapien
acaggtgatccgcttcacagatgag

SEQ ID NO: 4413995 - DNA, 25 bp, Homo sapien
ccacaggggattcacccatcgtcat

SEQ ID NO: 4413996 - DNA, 25 bp, Homo sapien
gaaatttgatggtaactcgcgggca

SEQ ID NO: 4413997 - DNA, 25 bp, Homo sapien
ccggagggctaaagtggcctttgct

SEQ ID NO: 4413998 - DNA, 25 bp, Homo sapien
cactttgctaagtggttgttgtgaa

SEQ ID NO: 4413999 - DNA, 25 bp, Homo sapien
gcacagaatttaggacaacctgttc

SEQ ID NO: 4414000 - DNA, 25 bp, Homo sapien
aacttgggccatagcaaagataggc

SEQ ID NO: 4414001 - DNA, 25 bp, Homo sapien
tgaatgtatgatcgcctatgctccc

SEQ ID NO: 4414002 - DNA, 25 bp, Homo sapien
caagccacggtttgctcatgtgtaa

SEQ ID NO: 4414003 - DNA, 25 bp, Homo sapien
ttaaataagatgacggaacctgtgc

SEQ ID NO: 4414004 - DNA, 25 bp, Homo sapien
tgttgtttacgatcagaagagttca

SEQ ID NO: 4414005 - DNA, 25 bp, Homo sapien
agagcaggcaacagtttctgttgtt

SEQ ID NO: 4414006 - DNA, 25 bp, Homo sapien
gtctaatatctccaccaagagcagg

SEQ ID NO: 4414007 - DNA, 25 bp, Homo sapien
tcctttgtctaatatctccaccaag

SEQ ID NO: 4414008 - DNA, 25 bp, Homo sapien
ccacattccccgatcttctggagat

SEQ ID NO: 4414009 - DNA, 25 bp, Homo sapien
ctttaagatctacatgcagtgaccg

SEQ ID NO: 4414010 - DNA, 25 bp, Homo sapien
ccgaagcgtgaagccacttcctaag

SEQ ID NO: 4414011 - DNA, 25 bp, Homo sapien
tgtgcatgaacccagagtctgccac

SEQ ID NO: 4414012 - DNA, 25 bp, Homo sapien
gaaccgtcgtgggagaatggcaata

SEQ ID NO: 4414013 - DNA, 25 bp, Homo sapien
tacaatcgggattaggctgaagctg

SEQ ID NO: 4414014 - DNA, 25 bp, Homo sapien
ctcgcaacgacgtgagaaccgtcgt

SEQ ID NO: 4414015 - DNA, 25 bp, Homo sapien
ttcagctgatacaacctcgcaacga

SEQ ID NO: 4414016 - DNA, 25 bp, Homo sapien
gccacattgcatctcctgaccactc

SEQ ID NO: 4414017 - DNA, 25 bp, Homo sapien
gaatctgaccccttaaatgctgact

SEQ ID NO: 4414018 - DNA, 25 bp, Homo sapien
gacaatgatgtcctcgctatgcccc

SEQ ID NO: 4414019 - DNA, 25 bp, Homo sapien
tgaatggctcacgttgaatctgacc

SEQ ID NO: 4414020 - DNA, 25 bp, Homo sapien
gctatgcccctgtagatgtactgcc

SEQ ID NO: 4414021 - DNA, 25 bp, Homo sapien
agtctcaggaggcattgaatgtgaa

SEQ ID NO: 4414022 - DNA, 25 bp, Homo sapien
catcgtggcctccaggccgacttgc

SEQ ID NO: 4414023 - DNA, 25 bp, Homo sapien
tctcaggaggcattgaatgtgaagt

SEQ ID NO: 4414024 - DNA, 25 bp, Homo sapien
ccgacttgcattctcaccctgagag

SEQ ID NO: 4414025 - DNA, 25 bp, Homo sapien
ctgtcattagccatcgtggcctcca

SEQ ID NO: 4414026 - DNA, 25 bp, Homo sapien
tcattagccatcgtggcctccaggc

SEQ ID NO: 4414027 - DNA, 25 bp, Homo sapien
attagccatcgtggcctccaggccc

SEQ ID NO: 4414028 - DNA, 25 bp, Homo sapien
tgtcattagccatcgtggcctccag

SEQ ID NO: 4414029 - DNA, 25 bp, Homo sapien
ttccaggaaccaagcctgtcattag

SEQ ID NO: 4414030 - DNA, 25 bp, Homo sapien
ggatgcctctggctcccgttgccac

SEQ ID NO: 4414031 - DNA, 25 bp, Homo sapien
gcaagaaggttctggctcacactgg

SEQ ID NO: 4414032 - DNA, 25 bp, Homo sapien
ctctggctcccgttgccacagccct

SEQ ID NO: 4414033 - DNA, 25 bp, Homo sapien
cacagccatgactccccagcattgc

SEQ ID NO: 4414034 - DNA, 25 bp, Homo sapien
catcatggtcatcattcctggcatc

SEQ ID NO: 4414035 - DNA, 25 bp, Homo sapien
tcatggtcatcattcctggcatctt

SEQ ID NO: 4414036 - DNA, 25 bp, Homo sapien
atggtcatcattcctggcatcttca

SEQ ID NO: 4414037 - DNA, 25 bp, Homo sapien
tcatcatggtcatcattcctggcat

SEQ ID NO: 4414038 - DNA, 25 bp, Homo sapien
tgaaaagggcaaaaggcgccctcat

SEQ ID NO: 4414039 - DNA, 25 bp, Homo sapien
ggtgactacaacatgtggggtgcct

SEQ ID NO: 4414040 - DNA, 25 bp, Homo sapien
tggggtgcctttgctggaggaacaa

SEQ ID NO: 4414041 - DNA, 25 bp, Homo sapien
ctgttgtcataatctttctctgcat

SEQ ID NO: 4414042 - DNA, 25 bp, Homo sapien
ctctgttgtcataatctttctctgc

SEQ ID NO: 4414043 - DNA, 25 bp, Homo sapien
tgggtctctgcctagcagggcttcc

SEQ ID NO: 4414044 - DNA, 25 bp, Homo sapien
gcctctcacacagccgtgttaccat

SEQ ID NO: 4414045 - DNA, 25 bp, Homo sapien
tgcctctcacacagccgtgttacca

SEQ ID NO: 4414046 - DNA, 25 bp, Homo sapien
tcccagatggcctgcctctcacaca

SEQ ID NO: 4414047 - DNA, 25 bp, Homo sapien
gctttctggccacataggccctcat

SEQ ID NO: 4414048 - DNA, 25 bp, Homo sapien
ctctgcgttgttagggcctggctcg

SEQ ID NO: 4414049 - DNA, 25 bp, Homo sapien
cttgcactgacctggcaggtttctc

SEQ ID NO: 4414050 - DNA, 25 bp, Homo sapien
cacctctgaggacgcctccggtcct

SEQ ID NO: 4414051 - DNA, 25 bp, Homo sapien
gctagacttagagacagggcagctt

SEQ ID NO: 4414052 - DNA, 25 bp, Homo sapien
gttaagtgagctgtgatacccggct

SEQ ID NO: 4414053 - DNA, 25 bp, Homo sapien
aagagatgttagcacgaggccaggc

SEQ ID NO: 4414054 - DNA, 25 bp, Homo sapien
gcatgtaggctgcaagtactctcag

SEQ ID NO: 4414055 - DNA, 25 bp, Homo sapien
ctctgtctatgtctatgtccatggc

SEQ ID NO: 4414056 - DNA, 25 bp, Homo sapien
tgtctatgtctatgtccatggccat

SEQ ID NO: 4414057 - DNA, 25 bp, Homo sapien
tctgtctatgtctatgtccatggcc

SEQ ID NO: 4414058 - DNA, 25 bp, Homo sapien
ctgtctatgtctatgtccatggcca

SEQ ID NO: 4414059 - DNA, 25 bp, Homo sapien
tgtttcctcagcataggagctatga

SEQ ID NO: 4414060 - DNA, 25 bp, Homo sapien
gcatttcatttagccaatccagtaa

SEQ ID NO: 4414061 - DNA, 25 bp, Homo sapien
tgactttagggagtaggttgaacca

SEQ ID NO: 4414062 - DNA, 25 bp, Homo sapien
taaataagtacagtggatcttggag

SEQ ID NO: 4414063 - DNA, 25 bp, Homo sapien
tcattcggtgtcagccccgggagcc

SEQ ID NO: 4414064 - DNA, 25 bp, Homo sapien
ttatcgcgcacatctcgcggcgagg

SEQ ID NO: 4414065 - DNA, 25 bp, Homo sapien
gtctgctcccgagcgccggccgttt

SEQ ID NO: 4414066 - DNA, 25 bp, Homo sapien
gggcctcattcggtgtcagccccgg

SEQ ID NO: 4414067 - DNA, 25 bp, Homo sapien
tgagtccttcaccacctgagttgca

SEQ ID NO: 4414068 - DNA, 25 bp, Homo sapien
gagcatgttagactcccaactgggc

SEQ ID NO: 4414069 - DNA, 25 bp, Homo sapien
tccagcagtgaactaccaggacgtg

SEQ ID NO: 4414070 - DNA, 25 bp, Homo sapien
tatgaagggctagatatgcaggcac

SEQ ID NO: 4414071 - DNA, 25 bp, Homo sapien
ttttggctcgtaaatccagctggag

SEQ ID NO: 4414072 - DNA, 25 bp, Homo sapien
tgcagtgacctgacaaacttgctcc

SEQ ID NO: 4414073 - DNA, 25 bp, Homo sapien
catagactgactgagaagcccttgc

SEQ ID NO: 4414074 - DNA, 25 bp, Homo sapien
gggaaagtcctctccagcgtctgga

SEQ ID NO: 4414075 - DNA, 25 bp, Homo sapien
gctttctcaacaaggagtctgcgtg

SEQ ID NO: 4414076 - DNA, 25 bp, Homo sapien
ggtgttggtcctgcaagcgctaatc

SEQ ID NO: 4414077 - DNA, 25 bp, Homo sapien
tgagccatgagtcgggtaaaacccc

SEQ ID NO: 4414078 - DNA, 25 bp, Homo sapien
cagaagacaggtagagcaacaggca

SEQ ID NO: 4414079 - DNA, 25 bp, Homo sapien
tgccagggactctctttatataggg

SEQ ID NO: 4414080 - DNA, 25 bp, Homo sapien
gagcagtctctgtatgccagggact

SEQ ID NO: 4414081 - DNA, 25 bp, Homo sapien
tatatagggatggaaatcagcagtc

SEQ ID NO: 4414082 - DNA, 25 bp, Homo sapien
gactctctttatatagggatggaaa

SEQ ID NO: 4414083 - DNA, 25 bp, Homo sapien
gccagcagaacagcgggaccaggct

SEQ ID NO: 4414084 - DNA, 25 bp, Homo sapien
ggttgcctgaacacactcaagagct

SEQ ID NO: 4414085 - DNA, 25 bp, Homo sapien
ctagcagccagaaggttgccctcag

SEQ ID NO: 4414086 - DNA, 25 bp, Homo sapien
gctcctccacagagagctcagaggt

SEQ ID NO: 4414087 - DNA, 25 bp, Homo sapien
tctttggtctcatctggccctctca

SEQ ID NO: 4414088 - DNA, 25 bp, Homo sapien
cctcaaggggcagcacaaaggatgt

SEQ ID NO: 4414089 - DNA, 25 bp, Homo sapien
tgcactggcgagtgaagtgatagtt

SEQ ID NO: 4414090 - DNA, 25 bp, Homo sapien
cagaagccgcatttgtagttgcact

SEQ ID NO: 4414091 - DNA, 25 bp, Homo sapien
tttctgtctaggaccatgtactcac

SEQ ID NO: 4414092 - DNA, 25 bp, Homo sapien
gagaatcctgatttctgtctaggac

SEQ ID NO: 4414093 - DNA, 25 bp, Homo sapien
cttctcgccttaccccactgcccag

SEQ ID NO: 4414094 - DNA, 25 bp, Homo sapien
cactgcccagtggttgagaatcctg

SEQ ID NO: 4414095 - DNA, 25 bp, Homo sapien
ttggagaagctctccagcttgtgca

SEQ ID NO: 4414096 - DNA, 25 bp, Homo sapien
gagaagctctccagcttgtgcatac

SEQ ID NO: 4414097 - DNA, 25 bp, Homo sapien
tcaagctttggagaagctctccagc

SEQ ID NO: 4414098 - DNA, 25 bp, Homo sapien
agctttggagaagctctccagcttg

SEQ ID NO: 4414099 - DNA, 25 bp, Homo sapien
ccccggtcttgaagaaatggctctc

SEQ ID NO: 4414100 - DNA, 25 bp, Homo sapien
ataattctggaaccacctctcccgg

SEQ ID NO: 4414101 - DNA, 25 bp, Homo sapien
gctgggcagccgcaactctactttg

SEQ ID NO: 4414102 - DNA, 25 bp, Homo sapien
gatcaggcttccattgctcacgatg

SEQ ID NO: 4414103 - DNA, 25 bp, Homo sapien
tgtttactgagagccctaaggaact

SEQ ID NO: 4414104 - DNA, 25 bp, Homo sapien
gccataatgccgtgcacagcttgaa

SEQ ID NO: 4414105 - DNA, 25 bp, Homo sapien
taagaagaatgccatcccatggagc

SEQ ID NO: 4414106 - DNA, 25 bp, Homo sapien
taaggaactaaaactgccataatgc

SEQ ID NO: 4414107 - DNA, 25 bp, Homo sapien
tcacaggagatagcgagaatgtcca

SEQ ID NO: 4414108 - DNA, 25 bp, Homo sapien
ttggccacggccaataaggacattg

SEQ ID NO: 4414109 - DNA, 25 bp, Homo sapien
tttccagcggacagggtttagtgct

SEQ ID NO: 4414110 - DNA, 25 bp, Homo sapien
tcttgaaagcgactctataatccct

SEQ ID NO: 4414111 - DNA, 25 bp, Homo sapien
ggcagcagatatgaggcccaagaag

SEQ ID NO: 4414112 - DNA, 25 bp, Homo sapien
agggcagcagatatgaggcccaaga

SEQ ID NO: 4414113 - DNA, 25 bp, Homo sapien
gcagcagatatgaggcccaagaagc

SEQ ID NO: 4414114 - DNA, 25 bp, Homo sapien
gggcagcagatatgaggcccaagaa

SEQ ID NO: 4414115 - DNA, 25 bp, Homo sapien
gcaggagaaaagcaagccgtaggag

SEQ ID NO: 4414116 - DNA, 25 bp, Homo sapien
tccagaatcagccagctagactgga

SEQ ID NO: 4414117 - DNA, 25 bp, Homo sapien
cagaatcagccagctagactggaag

SEQ ID NO: 4414118 - DNA, 25 bp, Homo sapien
tttccagggactttgactccagaat

SEQ ID NO: 4414119 - DNA, 25 bp, Homo sapien
tagagcatcttctccacaattctca

SEQ ID NO: 4414120 - DNA, 25 bp, Homo sapien
tttgtggcgctccaagaatctttca

SEQ ID NO: 4414121 - DNA, 25 bp, Homo sapien
cctcaattaagaggcactggaacac

SEQ ID NO: 4414122 - DNA, 25 bp, Homo sapien
tggttagattcaggcaccaagcagg

SEQ ID NO: 4414123 - DNA, 25 bp, Homo sapien
ccagaataaggtaggagtctttcat

SEQ ID NO: 4414124 - DNA, 25 bp, Homo sapien
tccagaataaggtaggagtctttca

SEQ ID NO: 4414125 - DNA, 25 bp, Homo sapien
tattttcctcctcgcttcagaaaca

SEQ ID NO: 4414126 - DNA, 25 bp, Homo sapien
taccaatccagcttcagatcagcct

SEQ ID NO: 4414127 - DNA, 25 bp, Homo sapien
caatccagcttcagatcagccttac

SEQ ID NO: 4414128 - DNA, 25 bp, Homo sapien
ccaatccagcttcagatcagcctta

SEQ ID NO: 4414129 - DNA, 25 bp, Homo sapien
ctaccaatccagcttcagatcagcc

SEQ ID NO: 4414130 - DNA, 25 bp, Homo sapien
taccaacgggatagtattgcagaca

SEQ ID NO: 4414131 - DNA, 25 bp, Homo sapien
tacaagactgcaatggcataaaggc

SEQ ID NO: 4414132 - DNA, 25 bp, Homo sapien
caagttattcgtgtgttcagtgacc

SEQ ID NO: 4414133 - DNA, 25 bp, Homo sapien
tatcttatgccaacccagtgtgccg

SEQ ID NO: 4414134 - DNA, 25 bp, Homo sapien
gatggtgcttaatgacatcaggcga

SEQ ID NO: 4414135 - DNA, 25 bp, Homo sapien
gccacctagtgaggaacactgaaat

SEQ ID NO: 4414136 - DNA, 25 bp, Homo sapien
cctagtgaggaacactgaaattgca

SEQ ID NO: 4414137 - DNA, 25 bp, Homo sapien
gacatcaggcgacatttaaatgcca

SEQ ID NO: 4414138 - DNA, 25 bp, Homo sapien
tagaagacaacctatcctatcctgg

SEQ ID NO: 4414139 - DNA, 25 bp, Homo sapien
cttagacacaatcaaaacccatggg

SEQ ID NO: 4414140 - DNA, 25 bp, Homo sapien
tgtgccatgaggattagtaaagtgc

SEQ ID NO: 4414141 - DNA, 25 bp, Homo sapien
tgtatatcaaacagtgtccttgggc

SEQ ID NO: 4414142 - DNA, 25 bp, Homo sapien
tggaaggtgactactcatgactgca

SEQ ID NO: 4414143 - DNA, 25 bp, Homo sapien
tacaaaggtggcaagataaatgaca

SEQ ID NO: 4414144 - DNA, 25 bp, Homo sapien
gaaccctaatacacctccagaactg

SEQ ID NO: 4414145 - DNA, 25 bp, Homo sapien
gtactttgtttcaccaggcctagca

SEQ ID NO: 4414146 - DNA, 25 bp, Homo sapien
aacaagtcaaataggccaagtgcca

SEQ ID NO: 4414147 - DNA, 25 bp, Homo sapien
cactgtgtggtctaaattcaagctc

SEQ ID NO: 4414148 - DNA, 25 bp, Homo sapien
tcttcggagggattaaacaagtcaa

SEQ ID NO: 4414149 - DNA, 25 bp, Homo sapien
tcttacgtggaaaatgaggtggcaa

SEQ ID NO: 4414150 - DNA, 25 bp, Homo sapien
tgctttagtggcctccagaagacac

SEQ ID NO: 4414151 - DNA, 25 bp, Homo sapien
gccgggtgcccgcagtttgccgccc

SEQ ID NO: 4414152 - DNA, 25 bp, Homo sapien
tgaaaatgctattcctgctttagtg

SEQ ID NO: 4414153 - DNA, 25 bp, Homo sapien
gagaccgcccgtgcacgctaacatg

SEQ ID NO: 4414154 - DNA, 25 bp, Homo sapien
gatgcggacacaaaggggacgcgcg

SEQ ID NO: 4414155 - DNA, 25 bp, Homo sapien
gcccgggcgatgcggacacaaaggg

SEQ ID NO: 4414156 - DNA, 25 bp, Homo sapien
acacaaaggggacgcgcgtcactct

SEQ ID NO: 4414157 - DNA, 25 bp, Homo sapien
cgggcgatgcggacacaaaggggac

SEQ ID NO: 4414158 - DNA, 25 bp, Homo sapien
ctcattccccgggaaagggctcgcg

SEQ ID NO: 4414159 - DNA, 25 bp, Homo sapien
catcctcttggccagttccgacctt

SEQ ID NO: 4414160 - DNA, 25 bp, Homo sapien
ggcataagcgaccaaacagctggga

SEQ ID NO: 4414161 - DNA, 25 bp, Homo sapien
cgatgccccggacgcgtcgtccttt

SEQ ID NO: 4414162 - DNA, 25 bp, Homo sapien
cttctcatctgtgcaatgccagtgt

SEQ ID NO: 4414163 - DNA, 25 bp, Homo sapien
gctttaactccgtcccagttctgct

SEQ ID NO: 4414164 - DNA, 25 bp, Homo sapien
tctcatctgtgcaatgccagtgtca

SEQ ID NO: 4414165 - DNA, 25 bp, Homo sapien
ctggaccctggagctttaactccgt

SEQ ID NO: 4414166 - DNA, 25 bp, Homo sapien
gccctgatcagtcgcctaggctggc

SEQ ID NO: 4414167 - DNA, 25 bp, Homo sapien
acagtcaagctggtcctcccgagga

SEQ ID NO: 4414168 - DNA, 25 bp, Homo sapien
tcaaggccctgatcagtcgcctagg

SEQ ID NO: 4414169 - DNA, 25 bp, Homo sapien
agtcaagctggtcctcccgaggaaa

SEQ ID NO: 4414170 - DNA, 25 bp, Homo sapien
agtatttcaaaaagcagtatagctc

SEQ ID NO: 4414171 - DNA, 25 bp, Homo sapien
agctctgcgcagttaagcttatgca

SEQ ID NO: 4414172 - DNA, 25 bp, Homo sapien
caaaaagcagtatagctctgcgcag

SEQ ID NO: 4414173 - DNA, 25 bp, Homo sapien
attccttacacatacgtacgtaaag

SEQ ID NO: 4414174 - DNA, 25 bp, Homo sapien
tcacacagctgactggcatccgcat

SEQ ID NO: 4414175 - DNA, 25 bp, Homo sapien
ctggacagtggcccatggtcacaca

SEQ ID NO: 4414176 - DNA, 25 bp, Homo sapien
tggtcacacagctgactggcatccg

SEQ ID NO: 4414177 - DNA, 25 bp, Homo sapien
catggtcacacagctgactggcatc

SEQ ID NO: 4414178 - DNA, 25 bp, Homo sapien
gaaatgggagaaggtctctggcacc

SEQ ID NO: 4414179 - DNA, 25 bp, Homo sapien
gagaaggtctctggcaccagggctc

SEQ ID NO: 4414180 - DNA, 25 bp, Homo sapien
aatgggagaaggtctctggcaccag

SEQ ID NO: 4414181 - DNA, 25 bp, Homo sapien
aggtctctggcaccagggctccctg

SEQ ID NO: 4414182 - DNA, 25 bp, Homo sapien
gctgtgcttatacacactcagatgt

SEQ ID NO: 4414183 - DNA, 25 bp, Homo sapien
cctgctgtgcttatacacactcaga

SEQ ID NO: 4414184 - DNA, 25 bp, Homo sapien
gtgtcctgctgtgcttatacacact

SEQ ID NO: 4414185 - DNA, 25 bp, Homo sapien
tgcttatacacactcagatgtctct

SEQ ID NO: 4414186 - DNA, 25 bp, Homo sapien
tacggaccatgaaaacgtgagacag

SEQ ID NO: 4414187 - DNA, 25 bp, Homo sapien
gatgactgagaagccgagcctttgg

SEQ ID NO: 4414188 - DNA, 25 bp, Homo sapien
tgggcgtggccaacagagagaacac

SEQ ID NO: 4414189 - DNA, 25 bp, Homo sapien
ttgagacagattcccaaacacagcg

SEQ ID NO: 4414190 - DNA, 25 bp, Homo sapien
gtcattaagagcaggctgcattgac

SEQ ID NO: 4414191 - DNA, 25 bp, Homo sapien
attaagagcaggctgcattgacaca

SEQ ID NO: 4414192 - DNA, 25 bp, Homo sapien
tcattaagagcaggctgcattgaca

SEQ ID NO: 4414193 - DNA, 25 bp, Homo sapien
taagagcaggctgcattgacacaga

SEQ ID NO: 4414194 - DNA, 25 bp, Homo sapien
tgacgacagctaagtttaccagtgc

SEQ ID NO: 4414195 - DNA, 25 bp, Homo sapien
tacacgcacgtaagatctcagtcct

SEQ ID NO: 4414196 - DNA, 25 bp, Homo sapien
gaccatgtgttctgacctcaatgca

SEQ ID NO: 4414197 - DNA, 25 bp, Homo sapien
taagtggactacagaattctaaggc

SEQ ID NO: 4414198 - DNA, 25 bp, Homo sapien
ctgtcctctcactgagggagtttat

SEQ ID NO: 4414199 - DNA, 25 bp, Homo sapien
tcaatgaggtgcttcgccaggagca

SEQ ID NO: 4414200 - DNA, 25 bp, Homo sapien
ccaggagcatcacgtgttctgtgct

SEQ ID NO: 4414201 - DNA, 25 bp, Homo sapien
ttatttggaatgagtcaatgaggtg

SEQ ID NO: 4414202 - DNA, 25 bp, Homo sapien
tctcaaatgcaaagccactcctggg

SEQ ID NO: 4414203 - DNA, 25 bp, Homo sapien
gggcatacagtgtgtcccacgcctg

SEQ ID NO: 4414204 - DNA, 25 bp, Homo sapien
taaattcatttttgacgtccccagc

SEQ ID NO: 4414205 - DNA, 25 bp, Homo sapien
cacaccaaggacacatgactcggaa

SEQ ID NO: 4414206 - DNA, 25 bp, Homo sapien
gttttcttaattcagtctatcatag

SEQ ID NO: 4414207 - DNA, 25 bp, Homo sapien
cgttttcttaattcagtctatcata

SEQ ID NO: 4414208 - DNA, 25 bp, Homo sapien
ggttttgcattatgcctcaggctta

SEQ ID NO: 4414209 - DNA, 25 bp, Homo sapien
ggaaacagcgtcacggatgccatcc

SEQ ID NO: 4414210 - DNA, 25 bp, Homo sapien
catcttcccgctgtttgcgcttagg

SEQ ID NO: 4414211 - DNA, 25 bp, Homo sapien
tcctgaagatgcaatcctgtcccgt

SEQ ID NO: 4414212 - DNA, 25 bp, Homo sapien
attttgcctgcaatccgtcacttga

SEQ ID NO: 4414213 - DNA, 25 bp, Homo sapien
gtggcattgtcagcactcaacgttt

SEQ ID NO: 4414214 - DNA, 25 bp, Homo sapien
gcactcaacgtttcatactctgcag

SEQ ID NO: 4414215 - DNA, 25 bp, Homo sapien
gcaatccgtcacttgaggtcaaata

SEQ ID NO: 4414216 - DNA, 25 bp, Homo sapien
gagaatgatgtgaacccgggaagca

SEQ ID NO: 4414217 - DNA, 25 bp, Homo sapien
attttataaaagatttggccaggcg

SEQ ID NO: 4414218 - DNA, 25 bp, Homo sapien
ctgaaggtataattttataaaagat

SEQ ID NO: 4414219 - DNA, 25 bp, Homo sapien
ttagccgggcgtggcagtgtgcgcc

SEQ ID NO: 4414220 - DNA, 25 bp, Homo sapien
cctacaacacatgggaattatggga

SEQ ID NO: 4414221 - DNA, 25 bp, Homo sapien
ccttcctacaacacatgggaattat

SEQ ID NO: 4414222 - DNA, 25 bp, Homo sapien
ttcctacaacacatgggaattatgg

SEQ ID NO: 4414223 - DNA, 25 bp, Homo sapien
ctacaacacatgggaattatgggag

SEQ ID NO: 4414224 - DNA, 25 bp, Homo sapien
tgcagaaccagcctacttgtttcct

SEQ ID NO: 4414225 - DNA, 25 bp, Homo sapien
aggctcagactgcagaaccagccta

SEQ ID NO: 4414226 - DNA, 25 bp, Homo sapien
tctgagtccaacctcgagggacttg

SEQ ID NO: 4414227 - DNA, 25 bp, Homo sapien
gaaagagagctctcttctaaagaga

SEQ ID NO: 4414228 - DNA, 25 bp, Homo sapien
tctcctccagttgcctgggacactc

SEQ ID NO: 4414229 - DNA, 25 bp, Homo sapien
tgccttcctccagcaagtccctgct

SEQ ID NO: 4414230 - DNA, 25 bp, Homo sapien
tcatgccttcctccagcaagtccct

SEQ ID NO: 4414231 - DNA, 25 bp, Homo sapien
tttcatgccttcctccagcaagtcc

SEQ ID NO: 4414232 - DNA, 25 bp, Homo sapien
tttcctgtttactgcctctctgttg

SEQ ID NO: 4414233 - DNA, 25 bp, Homo sapien
ggcacagcgtacagggttccatctg

SEQ ID NO: 4414234 - DNA, 25 bp, Homo sapien
tgccccatcgtgcttgttcccaaga

SEQ ID NO: 4414235 - DNA, 25 bp, Homo sapien
caagccagttatagcctctgtgctg

SEQ ID NO: 4414236 - DNA, 25 bp, Homo sapien
gtgaattccacatggagggagaatt

SEQ ID NO: 4414237 - DNA, 25 bp, Homo sapien
ctggtgaattccacatggagggaga

SEQ ID NO: 4414238 - DNA, 25 bp, Homo sapien
tggtgaattccacatggagggagaa

SEQ ID NO: 4414239 - DNA, 25 bp, Homo sapien
ggtgaattccacatggagggagaat

SEQ ID NO: 4414240 - DNA, 25 bp, Homo sapien
cttgcaagacaccagcgggtcgagg

SEQ ID NO: 4414241 - DNA, 25 bp, Homo sapien
cagagcttgcaagacaccagcgggt

SEQ ID NO: 4414242 - DNA, 25 bp, Homo sapien
tgggccggtaccttgttgtggtcat

SEQ ID NO: 4414243 - DNA, 25 bp, Homo sapien
tccactgggtactccccaagacaga

SEQ ID NO: 4414244 - DNA, 25 bp, Homo sapien
caacctgtataactgcaacttcata

SEQ ID NO: 4414245 - DNA, 25 bp, Homo sapien
tacttccggcttctatgcactcatt

SEQ ID NO: 4414246 - DNA, 25 bp, Homo sapien
tgtatacatcataaatccatcaagc

SEQ ID NO: 4414247 - DNA, 25 bp, Homo sapien
taccgtcctacttccggcttctatg

SEQ ID NO: 4414248 - DNA, 25 bp, Homo sapien
tgcagagcagacatgatcagacagc

SEQ ID NO: 4414249 - DNA, 25 bp, Homo sapien
atggtcctcggaaccccaggagcca

SEQ ID NO: 4414250 - DNA, 25 bp, Homo sapien
catactgaaagagcaagcttggctt

SEQ ID NO: 4414251 - DNA, 25 bp, Homo sapien
gatcagacagcctcctagtgcctaa

SEQ ID NO: 4414252 - DNA, 25 bp, Homo sapien
gttataactacagcatccctgggct

SEQ ID NO: 4414253 - DNA, 25 bp, Homo sapien
tcatcctccgcattttagtttttca

SEQ ID NO: 4414254 - DNA, 25 bp, Homo sapien
cgtcaagctgttctgcttcatggag

SEQ ID NO: 4414255 - DNA, 25 bp, Homo sapien
gaggttctgggctacattctgggta

SEQ ID NO: 4414256 - DNA, 25 bp, Homo sapien
aggaaggccgctctttgttctcaca

SEQ ID NO: 4414257 - DNA, 25 bp, Homo sapien
gtctgggcggcagccaaagaggcag

SEQ ID NO: 4414258 - DNA, 25 bp, Homo sapien
tctagggacgccactgggcttttcc

SEQ ID NO: 4414259 - DNA, 25 bp, Homo sapien
cactgacgtggagactgtgctttcc

SEQ ID NO: 4414260 - DNA, 25 bp, Homo sapien
gaatattgcttacacgctccgcaag

SEQ ID NO: 4414261 - DNA, 25 bp, Homo sapien
tgcttacacgctccgcaagggtttc

SEQ ID NO: 4414262 - DNA, 25 bp, Homo sapien
gctccgcaagggtttctctcagcct

SEQ ID NO: 4414263 - DNA, 25 bp, Homo sapien
agcggtgctccggaatattgcttac

SEQ ID NO: 4414264 - DNA, 25 bp, Homo sapien
agaaatatctgcctcgcctaaaact

SEQ ID NO: 4414265 - DNA, 25 bp, Homo sapien
tcgcctaaaactacagcgagtctga

SEQ ID NO: 4414266 - DNA, 25 bp, Homo sapien
aactacagcgagtctgatttttgtc

SEQ ID NO: 4414267 - DNA, 25 bp, Homo sapien
ctccggtgcgtcagaagtttcctgc

SEQ ID NO: 4414268 - DNA, 25 bp, Homo sapien
taaaatcctacaacggcatccccaa

SEQ ID NO: 4414269 - DNA, 25 bp, Homo sapien
gcttatataagaactcaaagagcat

SEQ ID NO: 4414270 - DNA, 25 bp, Homo sapien
tcactaccaagagaaactagatgta

SEQ ID NO: 4414271 - DNA, 25 bp, Homo sapien
caactttaatcacagtcccagtata

SEQ ID NO: 4414272 - DNA, 25 bp, Homo sapien
gcctcgatgtgaacccaagcttgct

SEQ ID NO: 4414273 - DNA, 25 bp, Homo sapien
taaggctatgggttagatcccggca

SEQ ID NO: 4414274 - DNA, 25 bp, Homo sapien
gccagggactgtatgctcaatcaca

SEQ ID NO: 4414275 - DNA, 25 bp, Homo sapien
ttctaaaagcaagatgaaaggcagc

SEQ ID NO: 4414276 - DNA, 25 bp, Homo sapien
aaacagagaagtgtctataaacatc

SEQ ID NO: 4414277 - DNA, 25 bp, Homo sapien
aacatctttacctccttaatgctga

SEQ ID NO: 4414278 - DNA, 25 bp, Homo sapien
tctataaacatctttacctccttaa

SEQ ID NO: 4414279 - DNA, 25 bp, Homo sapien
acagagaagtgtctataaacatctt

SEQ ID NO: 4414280 - DNA, 25 bp, Homo sapien
atccttctttgatcaagagctcaac

SEQ ID NO: 4414281 - DNA, 25 bp, Homo sapien
ccctgtttagggcaggcagcatctg

SEQ ID NO: 4414282 - DNA, 25 bp, Homo sapien
gctaattgcagtttctaatccttct

SEQ ID NO: 4414283 - DNA, 25 bp, Homo sapien
tctgggcagctaattgcagtttcta

SEQ ID NO: 4414284 - DNA, 25 bp, Homo sapien
aacagcccagtctgttcaattgcac

SEQ ID NO: 4414285 - DNA, 25 bp, Homo sapien
aaacagcccagtctgttcaattgca

SEQ ID NO: 4414286 - DNA, 25 bp, Homo sapien
tgacaagttcagcagtgcacgcctg

SEQ ID NO: 4414287 - DNA, 25 bp, Homo sapien
gacaagttcagcagtgcacgcctgt

SEQ ID NO: 4414288 - DNA, 25 bp, Homo sapien
agttcagcagtgcacgcctgtgcac

SEQ ID NO: 4414289 - DNA, 25 bp, Homo sapien
caagttcagcagtgcacgcctgtgc

SEQ ID NO: 4414290 - DNA, 25 bp, Homo sapien
ctctttcaaattgtagctttttata

SEQ ID NO: 4414291 - DNA, 25 bp, Homo sapien
tgtagctttttatatctttgcataa

SEQ ID NO: 4414292 - DNA, 25 bp, Homo sapien
cataatttcagctgcaaccatgcac

SEQ ID NO: 4414293 - DNA, 25 bp, Homo sapien
tttcagctgcaaccatgcactcaat

SEQ ID NO: 4414294 - DNA, 25 bp, Homo sapien
gcagagctaaagacctctcctggac

SEQ ID NO: 4414295 - DNA, 25 bp, Homo sapien
tatgaccccggagtatttcagagag

SEQ ID NO: 4414296 - DNA, 25 bp, Homo sapien
tatcctgagaatcatgttctgctct

SEQ ID NO: 4414297 - DNA, 25 bp, Homo sapien
tacagtttcattgtatgaccccgga

SEQ ID NO: 4414298 - DNA, 25 bp, Homo sapien
gatgttctgcatatggagtgtcgcc

SEQ ID NO: 4414299 - DNA, 25 bp, Homo sapien
gcctgcaaggtccacacaatgatgt

SEQ ID NO: 4414300 - DNA, 25 bp, Homo sapien
tcaagaacccgagaatcagtgcagg

SEQ ID NO: 4414301 - DNA, 25 bp, Homo sapien
gcagatgccagcaatccaaactcag

SEQ ID NO: 4414302 - DNA, 25 bp, Homo sapien
tccccatccggccatgttttcatgt

SEQ ID NO: 4414303 - DNA, 25 bp, Homo sapien
tatacaaacaacaggtctctgcatg

SEQ ID NO: 4414304 - DNA, 25 bp, Homo sapien
gttttcatgtaagcccaccctccag

SEQ ID NO: 4414305 - DNA, 25 bp, Homo sapien
tctctgcatgcagctaaactgggag

SEQ ID NO: 4414306 - DNA, 25 bp, Homo sapien
gagcagaattccatacggcaggctt

SEQ ID NO: 4414307 - DNA, 25 bp, Homo sapien
cgggcaccaagtccgacagggatca

SEQ ID NO: 4414308 - DNA, 25 bp, Homo sapien
tgatcggcatggtctccgggcagcc

SEQ ID NO: 4414309 - DNA, 25 bp, Homo sapien
agcttggcaggtggacgccgggcac

SEQ ID NO: 4414310 - DNA, 25 bp, Homo sapien
gcccacagccatgcctttggtggca

SEQ ID NO: 4414311 - DNA, 25 bp, Homo sapien
taatcacaatctacacgtggcccag

SEQ ID NO: 4414312 - DNA, 25 bp, Homo sapien
cataaaattttgcatggaatagaca

SEQ ID NO: 4414313 - DNA, 25 bp, Homo sapien
gaggagtttggacagtttaatcaca

SEQ ID NO: 4414314 - DNA, 25 bp, Homo sapien
taggattcggatttcccagagaagc

SEQ ID NO: 4414315 - DNA, 25 bp, Homo sapien
gcagttgagcaaattctggcttttt

SEQ ID NO: 4414316 - DNA, 25 bp, Homo sapien
tattcacggcagttgagcaaattct

SEQ ID NO: 4414317 - DNA, 25 bp, Homo sapien
cagaatttaacacatgtatgggtat

SEQ ID NO: 4414318 - DNA, 25 bp, Homo sapien
catgtatgggtatatattcacggca

SEQ ID NO: 4414319 - DNA, 25 bp, Homo sapien
ctgtgggagaaacgccgtgaggact

SEQ ID NO: 4414320 - DNA, 25 bp, Homo sapien
gcagcgcttgatgggcgcgtcatct

SEQ ID NO: 4414321 - DNA, 25 bp, Homo sapien
gcgcagccttcgtctcgctcgatgt

SEQ ID NO: 4414322 - DNA, 25 bp, Homo sapien
gtaccagcagaaggcgtgcttgcag

SEQ ID NO: 4414323 - DNA, 25 bp, Homo sapien
gctcgatgtagactttgcacttggg

SEQ ID NO: 4414324 - DNA, 25 bp, Homo sapien
tcattccaaatctaaacctcaaagc

SEQ ID NO: 4414325 - DNA, 25 bp, Homo sapien
caaacggtgttgcttcactgttaca

SEQ ID NO: 4414326 - DNA, 25 bp, Homo sapien
tgttacacaggagtaggcaccaagc

SEQ ID NO: 4414327 - DNA, 25 bp, Homo sapien
tcaaagctaaatgccgcaaggtgaa

SEQ ID NO: 4414328 - DNA, 25 bp, Homo sapien
cactgaagcagagcatacttaggag

SEQ ID NO: 4414329 - DNA, 25 bp, Homo sapien
caggcacacacggtagggtgtgttt

SEQ ID NO: 4414330 - DNA, 25 bp, Homo sapien
gaaggctgccgtatgagaccagaac

SEQ ID NO: 4414331 - DNA, 25 bp, Homo sapien
tctgccagagagcaaagggcttgca

SEQ ID NO: 4414332 - DNA, 25 bp, Homo sapien
ggaactctgccttgacacagcctga

SEQ ID NO: 4414333 - DNA, 25 bp, Homo sapien
ctgaggcataacaatcccaggagct

SEQ ID NO: 4414334 - DNA, 25 bp, Homo sapien
gaaacaatggtgcaagctccgggaa

SEQ ID NO: 4414335 - DNA, 25 bp, Homo sapien
cagaaatactgtgcgttaagggaag

SEQ ID NO: 4414336 - DNA, 25 bp, Homo sapien
agggtcccttatcgtagtgtatcag

SEQ ID NO: 4414337 - DNA, 25 bp, Homo sapien
cagatcacagatgcccgggagtggc

SEQ ID NO: 4414338 - DNA, 25 bp, Homo sapien
ctgtgtccgatgccagatcacagat

SEQ ID NO: 4414339 - DNA, 25 bp, Homo sapien
ggcccagcttgttccggcagggtcc

SEQ ID NO: 4414340 - DNA, 25 bp, Homo sapien
taactcactgacgtaccgttggcag

SEQ ID NO: 4414341 - DNA, 25 bp, Homo sapien
ggaacacggccaaggtaactcactg

SEQ ID NO: 4414342 - DNA, 25 bp, Homo sapien
cacgtggtcggcatttaagattgtc

SEQ ID NO: 4414343 - DNA, 25 bp, Homo sapien
cagaacgtagttccgtagaaggaca

SEQ ID NO: 4414344 - DNA, 25 bp, Homo sapien
tgcacttgcacttgcagcaaagtac

SEQ ID NO: 4414345 - DNA, 25 bp, Homo sapien
gcacttgcacttgcagcaaagtaca

SEQ ID NO: 4414346 - DNA, 25 bp, Homo sapien
cacttgcacttgcagcaaagtacaa

SEQ ID NO: 4414347 - DNA, 25 bp, Homo sapien
aaaagcgttttctgctacctgggag

SEQ ID NO: 4414348 - DNA, 25 bp, Homo sapien
tacatctgcggatcaatgaggctgc

SEQ ID NO: 4414349 - DNA, 25 bp, Homo sapien
cataggtccctgaaatcacggcgtc

SEQ ID NO: 4414350 - DNA, 25 bp, Homo sapien
gaataagtccgtccactcaacgcag

SEQ ID NO: 4414351 - DNA, 25 bp, Homo sapien
ggaactggcctgtgccctaaactgg

SEQ ID NO: 4414352 - DNA, 25 bp, Homo sapien
tgagaggtcaggcatttccagcaaa

SEQ ID NO: 4414353 - DNA, 25 bp, Homo sapien
aaatgtggtcagttactcaagggcc

SEQ ID NO: 4414354 - DNA, 25 bp, Homo sapien
tgggctatggactacacagcagagc

SEQ ID NO: 4414355 - DNA, 25 bp, Homo sapien
tgggtgactttagctagagaagagc

SEQ ID NO: 4414356 - DNA, 25 bp, Homo sapien
cccattcgatgttggcttcatccga

SEQ ID NO: 4414357 - DNA, 25 bp, Homo sapien
gcttcatccgaaaatgcacatcctg

SEQ ID NO: 4414358 - DNA, 25 bp, Homo sapien
acaccaggtcgtgggcagcaattgc

SEQ ID NO: 4414359 - DNA, 25 bp, Homo sapien
ttttctttgcattaaccacaggctg

SEQ ID NO: 4414360 - DNA, 25 bp, Homo sapien
tatgaaaatattgactccatttttc

SEQ ID NO: 4414361 - DNA, 25 bp, Homo sapien
tgatgtgagctgttcgtttctcagg

SEQ ID NO: 4414362 - DNA, 25 bp, Homo sapien
ggctgtacgcacaaccacttccttg

SEQ ID NO: 4414363 - DNA, 25 bp, Homo sapien
gcactaagctcaggaagatcccatg

SEQ ID NO: 4414364 - DNA, 25 bp, Homo sapien
tgtccttgggttattctgaatactg

SEQ ID NO: 4414365 - DNA, 25 bp, Homo sapien
tcttggaagtcagcactaagctcag

SEQ ID NO: 4414366 - DNA, 25 bp, Homo sapien
gggattcattgatactcttggaagt

SEQ ID NO: 4414367 - DNA, 25 bp, Homo sapien
tcagaccgtggcacaaagctttagg

SEQ ID NO: 4414368 - DNA, 25 bp, Homo sapien
ctcatggtggaaaagacggaaggca

SEQ ID NO: 4414369 - DNA, 25 bp, Homo sapien
cggaaggcaaaaagggctagctact

SEQ ID NO: 4414370 - DNA, 25 bp, Homo sapien
cacctatgagggatttggcaacaga

SEQ ID NO: 4414371 - DNA, 25 bp, Homo sapien
actgccggggagtttttggtgcaca

SEQ ID NO: 4414372 - DNA, 25 bp, Homo sapien
tggtgcacatatttaatattgtcct

SEQ ID NO: 4414373 - DNA, 25 bp, Homo sapien
gcaaggaacgtcagggtcctcagca

SEQ ID NO: 4414374 - DNA, 25 bp, Homo sapien
gatggaggctccaaagaactaagag

SEQ ID NO: 4414375 - DNA, 25 bp, Homo sapien
catagctcatgttaccctcgtggct

SEQ ID NO: 4414376 - DNA, 25 bp, Homo sapien
tgtccctaggtcctcagagtgagct

SEQ ID NO: 4414377 - DNA, 25 bp, Homo sapien
tgttaccctggcagctatctcaggt

SEQ ID NO: 4414378 - DNA, 25 bp, Homo sapien
ggtttcacaaccgactgccatagct

SEQ ID NO: 4414379 - DNA, 25 bp, Homo sapien
tgcagcgccacttttactcaagaga

SEQ ID NO: 4414380 - DNA, 25 bp, Homo sapien
caagtgccggcatgctgatctgacc

SEQ ID NO: 4414381 - DNA, 25 bp, Homo sapien
gacaacgatgtggttagggacaacg

SEQ ID NO: 4414382 - DNA, 25 bp, Homo sapien
ttctgggaacgcagaatgccagcct

SEQ ID NO: 4414383 - DNA, 25 bp, Homo sapien
attcagtattatggagaatgcattt

SEQ ID NO: 4414384 - DNA, 25 bp, Homo sapien
gctgcttccgttatgctcagcaaaa

SEQ ID NO: 4414385 - DNA, 25 bp, Homo sapien
gccagtgcagtctgacattttgaaa

SEQ ID NO: 4414386 - DNA, 25 bp, Homo sapien
cctggcttttgtctgactcggattc

SEQ ID NO: 4414387 - DNA, 25 bp, Homo sapien
tcaacctggatgaacatatcaatgc

SEQ ID NO: 4414388 - DNA, 25 bp, Homo sapien
aggagtagaccttcccagggatgga

SEQ ID NO: 4414389 - DNA, 25 bp, Homo sapien
caattccggggagtgatagacacat

SEQ ID NO: 4414390 - DNA, 25 bp, Homo sapien
tccagagccaatactcaattccggg

SEQ ID NO: 4414391 - DNA, 25 bp, Homo sapien
taatcctgcatcagaaagtacaaag

SEQ ID NO: 4414392 - DNA, 25 bp, Homo sapien
gaatatcaggcagtatgataccaag

SEQ ID NO: 4414393 - DNA, 25 bp, Homo sapien
tgatgtcgtaacaccattgagtcct

SEQ ID NO: 4414394 - DNA, 25 bp, Homo sapien
agtaacggctttattttgcccacag

SEQ ID NO: 4414395 - DNA, 25 bp, Homo sapien
ggtgatcttgaaaccagtagcgcaa

SEQ ID NO: 4414396 - DNA, 25 bp, Homo sapien
tgagctggatgctccccgactctgt

SEQ ID NO: 4414397 - DNA, 25 bp, Homo sapien
tctcacagatgtgaggctgtttctc

SEQ ID NO: 4414398 - DNA, 25 bp, Homo sapien
gcagaggcttgagctggatgctccc

SEQ ID NO: 4414399 - DNA, 25 bp, Homo sapien
tctccaaggaggcagctcgtaacgc

SEQ ID NO: 4414400 - DNA, 25 bp, Homo sapien
acagaagcaactggccagaaacctc

SEQ ID NO: 4414401 - DNA, 25 bp, Homo sapien
taccacaatctaaaaacagaagcaa

SEQ ID NO: 4414402 - DNA, 25 bp, Homo sapien
agcaactggccagaaacctcccggt

SEQ ID NO: 4414403 - DNA, 25 bp, Homo sapien
aaaacagaagcaactggccagaaac

SEQ ID NO: 4414404 - DNA, 25 bp, Homo sapien
gggccacaagtctgcgggctcgctt

SEQ ID NO: 4414405 - DNA, 25 bp, Homo sapien
tcatggtagcagtaaaaccaagagc

SEQ ID NO: 4414406 - DNA, 25 bp, Homo sapien
agagcacactttgactctccaatac

SEQ ID NO: 4414407 - DNA, 25 bp, Homo sapien
gggctcgcttttcgtctcttcatgg

SEQ ID NO: 4414408 - DNA, 25 bp, Homo sapien
ctgtccttgtgaagcctgcaccgca

SEQ ID NO: 4414409 - DNA, 25 bp, Homo sapien
tgtccttgtgaagcctgcaccgcac

SEQ ID NO: 4414410 - DNA, 25 bp, Homo sapien
tttgtccccgcagtacatcggccag

SEQ ID NO: 4414411 - DNA, 25 bp, Homo sapien
tagagtcgggcctggaagcatcttc

SEQ ID NO: 4414412 - DNA, 25 bp, Homo sapien
tcggccagcagtgtgaagtaatgct

SEQ ID NO: 4414413 - DNA, 25 bp, Homo sapien
aggtcagccctgagtaaaaccccag

SEQ ID NO: 4414414 - DNA, 25 bp, Homo sapien
gggcctcttgaatcgggtgagtcca

SEQ ID NO: 4414415 - DNA, 25 bp, Homo sapien
cctggtgaggcccttgagaatcagt

SEQ ID NO: 4414416 - DNA, 25 bp, Homo sapien
catcctggaggatagggcaaagata

SEQ ID NO: 4414417 - DNA, 25 bp, Homo sapien
catttaaggactcccaagatgaagg

SEQ ID NO: 4414418 - DNA, 25 bp, Homo sapien
caaagtttccgacctattctctggg

SEQ ID NO: 4414419 - DNA, 25 bp, Homo sapien
caatggacaagagagcgacatggtc

SEQ ID NO: 4414420 - DNA, 25 bp, Homo sapien
taatgcacagtctagattaaggacc

SEQ ID NO: 4414421 - DNA, 25 bp, Homo sapien
tggagtatgcccttgccaatggcag

SEQ ID NO: 4414422 - DNA, 25 bp, Homo sapien
gctcacatcataggcccgagaatcg

SEQ ID NO: 4414423 - DNA, 25 bp, Homo sapien
caatccgctcttagatgaaaaaggc

SEQ ID NO: 4414424 - DNA, 25 bp, Homo sapien
gctgggagccggaatgccaatctta

SEQ ID NO: 4414425 - DNA, 25 bp, Homo sapien
tgggccagtaaaacgcagtgcaatc

SEQ ID NO: 4414426 - DNA, 25 bp, Homo sapien
gaaaggctaattagactcccagaca

SEQ ID NO: 4414427 - DNA, 25 bp, Homo sapien
tatgcccagcgtagctgacacatgg

SEQ ID NO: 4414428 - DNA, 25 bp, Homo sapien
tattttaaacaggttgcgggctcgc

SEQ ID NO: 4414429 - DNA, 25 bp, Homo sapien
gcgggctcgcctgcaaatcttcaaa

SEQ ID NO: 4414430 - DNA, 25 bp, Homo sapien
gatttctcaaagacaattctctgta

SEQ ID NO: 4414431 - DNA, 25 bp, Homo sapien
gggttttctgctacaacagtgacac

SEQ ID NO: 4414432 - DNA, 25 bp, Homo sapien
tgacacctgctgttgaggacaaagt

SEQ ID NO: 4414433 - DNA, 25 bp, Homo sapien
gaatctcatgttgggccttttctct

SEQ ID NO: 4414434 - DNA, 25 bp, Homo sapien
gctaccaggattacttgacttgaag

SEQ ID NO: 4414435 - DNA, 25 bp, Homo sapien
gatgctctccatactggaacgtgtc

SEQ ID NO: 4414436 - DNA, 25 bp, Homo sapien
ttccacagtcatgaatgctaccagg

SEQ ID NO: 4414437 - DNA, 25 bp, Homo sapien
gaacgtgtcagctggtcaattagaa

SEQ ID NO: 4414438 - DNA, 25 bp, Homo sapien
tattgccaatggcacccttggtggg

SEQ ID NO: 4414439 - DNA, 25 bp, Homo sapien
ttgccaatggcacccttggtgggtc

SEQ ID NO: 4414440 - DNA, 25 bp, Homo sapien
tgccaatggcacccttggtgggtcc

SEQ ID NO: 4414441 - DNA, 25 bp, Homo sapien
ttattgccaatggcacccttggtgg

SEQ ID NO: 4414442 - DNA, 25 bp, Homo sapien
tagccctcactgttaagattgcttt

SEQ ID NO: 4414443 - DNA, 25 bp, Homo sapien
catactgtcggagtgaaggatttca

SEQ ID NO: 4414444 - DNA, 25 bp, Homo sapien
tatgaaatcatcgagtctgctcccc

SEQ ID NO: 4414445 - DNA, 25 bp, Homo sapien
ttttcaacggtttcatagccctcac

SEQ ID NO: 4414446 - DNA, 25 bp, Homo sapien
tgggatatgcctactatgacgttgt

SEQ ID NO: 4414447 - DNA, 25 bp, Homo sapien
aatacgggtggcaagaggtatcaga

SEQ ID NO: 4414448 - DNA, 25 bp, Homo sapien
ttgtgtgaccacttaaatacgggtg

SEQ ID NO: 4414449 - DNA, 25 bp, Homo sapien
cttgggcaagggatagttacattac

SEQ ID NO: 4414450 - DNA, 25 bp, Homo sapien
gttgtagcacccctcattatgtcga

SEQ ID NO: 4414451 - DNA, 25 bp, Homo sapien
tatgcagggctcagggttgtagcac

SEQ ID NO: 4414452 - DNA, 25 bp, Homo sapien
ctgtgttataactctgtgtattggc

SEQ ID NO: 4414453 - DNA, 25 bp, Homo sapien
tctcctcattggcacaatatgcagg

SEQ ID NO: 4414454 - DNA, 25 bp, Homo sapien
caagagcatgggacaccgttatcat

SEQ ID NO: 4414455 - DNA, 25 bp, Homo sapien
tttccaagacaccacattgccatgg

SEQ ID NO: 4414456 - DNA, 25 bp, Homo sapien
tcaactgtgtcctaacaagagcatg

SEQ ID NO: 4414457 - DNA, 25 bp, Homo sapien
gaatctggtcttaccacgccactga

SEQ ID NO: 4414458 - DNA, 25 bp, Homo sapien
tatggtatcagtcaaattaagtatt

SEQ ID NO: 4414459 - DNA, 25 bp, Homo sapien
gagaacgcaggtattggagacagaa

SEQ ID NO: 4414460 - DNA, 25 bp, Homo sapien
ctttaggagaaagcaatatgtgtag

SEQ ID NO: 4414461 - DNA, 25 bp, Homo sapien
aaatggcagctattgtattttcata

SEQ ID NO: 4414462 - DNA, 25 bp, Homo sapien
tagttcaaaggactagtcttcaagc

SEQ ID NO: 4414463 - DNA, 25 bp, Homo sapien
caattccggaagctctgactgatct

SEQ ID NO: 4414464 - DNA, 25 bp, Homo sapien
gtttacctgtctagcaagattagga

SEQ ID NO: 4414465 - DNA, 25 bp, Homo sapien
ggagaaggcagcatacaagccctag

SEQ ID NO: 4414466 - DNA, 25 bp, Homo sapien
ggaactaaatccatgaactctgggc

SEQ ID NO: 4414467 - DNA, 25 bp, Homo sapien
ggttaacattctgtgccagatcagg

SEQ ID NO: 4414468 - DNA, 25 bp, Homo sapien
tgaacaagactgagcaccgtggaaa

SEQ ID NO: 4414469 - DNA, 25 bp, Homo sapien
tatgacgctaccaacagctgaggga

SEQ ID NO: 4414470 - DNA, 25 bp, Homo sapien
ctttcccaagctgaaatttaggaat

SEQ ID NO: 4414471 - DNA, 25 bp, Homo sapien
tctcgagaggtaattgcaaatttct

SEQ ID NO: 4414472 - DNA, 25 bp, Homo sapien
aatggcatgttctcgagaggtaatt

SEQ ID NO: 4414473 - DNA, 25 bp, Homo sapien
cttgaaatcaaaagcaccagttggc

SEQ ID NO: 4414474 - DNA, 25 bp, Homo sapien
aaaaagcttaattatttcagcatga

SEQ ID NO: 4414475 - DNA, 25 bp, Homo sapien
gcaataaaacatctgtgacccaatt

SEQ ID NO: 4414476 - DNA, 25 bp, Homo sapien
agcttaattatttcagcatgaattt

SEQ ID NO: 4414477 - DNA, 25 bp, Homo sapien
aaagcttaattatttcagcatgaat

SEQ ID NO: 4414478 - DNA, 25 bp, Homo sapien
caaaaagcgaccattcatcatagaa

SEQ ID NO: 4414479 - DNA, 25 bp, Homo sapien
cgccaaaaagcgaccattcatcata

SEQ ID NO: 4414480 - DNA, 25 bp, Homo sapien
ttaaacgccaaaaagcgaccattca

SEQ ID NO: 4414481 - DNA, 25 bp, Homo sapien
aagcgaccattcatcatagaaatta

SEQ ID NO: 4414482 - DNA, 25 bp, Homo sapien
gacactgtaagggaactaactctgt

SEQ ID NO: 4414483 - DNA, 25 bp, Homo sapien
gttgacatcacctctcctgttagta

SEQ ID NO: 4414484 - DNA, 25 bp, Homo sapien
tctgttgttcagagcaatgtcccct

SEQ ID NO: 4414485 - DNA, 25 bp, Homo sapien
catttggatagcattagacactgta

SEQ ID NO: 4414486 - DNA, 25 bp, Homo sapien
cactctgtcatacagtggtatgatc

SEQ ID NO: 4414487 - DNA, 25 bp, Homo sapien
cactttttacatggtagtgggaaga

SEQ ID NO: 4414488 - DNA, 25 bp, Homo sapien
ttgtacagactggtgtattagtcca

SEQ ID NO: 4414489 - DNA, 25 bp, Homo sapien
ggtgggaactctgggagatacaatc

SEQ ID NO: 4414490 - DNA, 25 bp, Homo sapien
tcacggaggtaggaatgagcttgtc

SEQ ID NO: 4414491 - DNA, 25 bp, Homo sapien
tttgcaagaccatgccacatacgag

SEQ ID NO: 4414492 - DNA, 25 bp, Homo sapien
tactttatacctcgctagaccccag

SEQ ID NO: 4414493 - DNA, 25 bp, Homo sapien
cacatacgagtcttaagttctggtc

SEQ ID NO: 4414494 - DNA, 25 bp, Homo sapien
tctctgtttactgcacggatgaagg

SEQ ID NO: 4414495 - DNA, 25 bp, Homo sapien
ggtactggaatcagttctaggaaga

SEQ ID NO: 4414496 - DNA, 25 bp, Homo sapien
tacagttttgcaaactaagacaggt

SEQ ID NO: 4414497 - DNA, 25 bp, Homo sapien
gttgcatgaccttctttgggaccct

SEQ ID NO: 4414498 - DNA, 25 bp, Homo sapien
tgcacaaagagttgagggcagacgc

SEQ ID NO: 4414499 - DNA, 25 bp, Homo sapien
gagctggcggcacagcatctactga

SEQ ID NO: 4414500 - DNA, 25 bp, Homo sapien
ggtgtgtctcactcctggtcagtca

SEQ ID NO: 4414501 - DNA, 25 bp, Homo sapien
tctccctcaaggtacaagtgctttg

SEQ ID NO: 4414502 - DNA, 25 bp, Homo sapien
gttcatagccttgactcacaaagcc

SEQ ID NO: 4414503 - DNA, 25 bp, Homo sapien
tgagttcatagccttgactcacaaa

SEQ ID NO: 4414504 - DNA, 25 bp, Homo sapien
gagttcatagccttgactcacaaag

SEQ ID NO: 4414505 - DNA, 25 bp, Homo sapien
ttcatagccttgactcacaaagcca

SEQ ID NO: 4414506 - DNA, 25 bp, Homo sapien
gcagacatgatttcaatagcccaga

SEQ ID NO: 4414507 - DNA, 25 bp, Homo sapien
gcagctaggaaaaaatagcgtccca

SEQ ID NO: 4414508 - DNA, 25 bp, Homo sapien
tgcacgtttcacaaaaagtacttgg

SEQ ID NO: 4414509 - DNA, 25 bp, Homo sapien
taaacgtgttcatgtggtcagcagc

SEQ ID NO: 4414510 - DNA, 25 bp, Homo sapien
ccaaggcacaatatggatcacccat

SEQ ID NO: 4414511 - DNA, 25 bp, Homo sapien
caatatggatcacccatatggagca

SEQ ID NO: 4414512 - DNA, 25 bp, Homo sapien
ttcaccaaggcacaatatggatcac

SEQ ID NO: 4414513 - DNA, 25 bp, Homo sapien
gatcacccatatggagcagaagttg

SEQ ID NO: 4414514 - DNA, 25 bp, Homo sapien
ggtgttctccaaggttcaggctgtg

SEQ ID NO: 4414515 - DNA, 25 bp, Homo sapien
tgtgagctgaaacacgccctttgca

SEQ ID NO: 4414516 - DNA, 25 bp, Homo sapien
agtcatatgaaagggaggtgttctc

SEQ ID NO: 4414517 - DNA, 25 bp, Homo sapien
tctccaaggttcaggctgtggatag

SEQ ID NO: 4414518 - DNA, 25 bp, Homo sapien
gaatcagtgcatgggcattttgact

SEQ ID NO: 4414519 - DNA, 25 bp, Homo sapien
gcatgggcattttgactcactgtag

SEQ ID NO: 4414520 - DNA, 25 bp, Homo sapien
cactgtaggacgctgtggtttagga

SEQ ID NO: 4414521 - DNA, 25 bp, Homo sapien
ttaggaagatggatgtcaaactggg

SEQ ID NO: 4414522 - DNA, 25 bp, Homo sapien
tagcggattttcacatctggaacag

SEQ ID NO: 4414523 - DNA, 25 bp, Homo sapien
tgccgtatgacctacagcaagacgc

SEQ ID NO: 4414524 - DNA, 25 bp, Homo sapien
gcaagacgcttaagcctgtgagccg

SEQ ID NO: 4414525 - DNA, 25 bp, Homo sapien
gacgagcgtaacctgtgttcttgcc

SEQ ID NO: 4414526 - DNA, 25 bp, Homo sapien
aaggaaaagacatcatcgtttccca

SEQ ID NO: 4414527 - DNA, 25 bp, Homo sapien
gccagacgtgacttcactgtgtcca

SEQ ID NO: 4414528 - DNA, 25 bp, Homo sapien
agtatttgcggagcgagccagacgt

SEQ ID NO: 4414529 - DNA, 25 bp, Homo sapien
caagatcttgcacctcgttgtggag

SEQ ID NO: 4414530 - DNA, 25 bp, Homo sapien
caaccacaatatctggctcgtgagt

SEQ ID NO: 4414531 - DNA, 25 bp, Homo sapien
cataggcagaactgatcagggagcc

SEQ ID NO: 4414532 - DNA, 25 bp, Homo sapien
aaaatcccacgtgcttcctcaaagg

SEQ ID NO: 4414533 - DNA, 25 bp, Homo sapien
gactcaagaagcactacagggcaag

SEQ ID NO: 4414534 - DNA, 25 bp, Homo sapien
ttaccacggagggtgaacactcgga

SEQ ID NO: 4414535 - DNA, 25 bp, Homo sapien
aattcaccgtgttgttccttctaga

SEQ ID NO: 4414536 - DNA, 25 bp, Homo sapien
ggggcatgtcatttttgtgtccgac

SEQ ID NO: 4414537 - DNA, 25 bp, Homo sapien
tgttccttctagactgcaatatggg

SEQ ID NO: 4414538 - DNA, 25 bp, Homo sapien
ctttaaacctgcttggtgggctagt

SEQ ID NO: 4414539 - DNA, 25 bp, Homo sapien
tatgactcccaaccggtgaaggcat

SEQ ID NO: 4414540 - DNA, 25 bp, Homo sapien
actcccaaccggtgaaggcatcaca

SEQ ID NO: 4414541 - DNA, 25 bp, Homo sapien
tgactcccaaccggtgaaggcatca

SEQ ID NO: 4414542 - DNA, 25 bp, Homo sapien
ctatgactcccaaccggtgaaggca

SEQ ID NO: 4414543 - DNA, 25 bp, Homo sapien
actggaacttcaattcaccatgtag

SEQ ID NO: 4414544 - DNA, 25 bp, Homo sapien
ccatgtagtaatcgagacagagtga

SEQ ID NO: 4414545 - DNA, 25 bp, Homo sapien
tccctctctactggaacttcaattc

SEQ ID NO: 4414546 - DNA, 25 bp, Homo sapien
attcaccatgtagtaatcgagacag

SEQ ID NO: 4414547 - DNA, 25 bp, Homo sapien
ttgtatggctcaaacagaactcctc

SEQ ID NO: 4414548 - DNA, 25 bp, Homo sapien
cacatggcttggagcaatgaacacc

SEQ ID NO: 4414549 - DNA, 25 bp, Homo sapien
tggaaactacacatctcttgggctc

SEQ ID NO: 4414550 - DNA, 25 bp, Homo sapien
catgagtaaggttgtggtcctcaac

SEQ ID NO: 4414551 - DNA, 25 bp, Homo sapien
ggtggcttcacattttcagctcaga

SEQ ID NO: 4414552 - DNA, 25 bp, Homo sapien
gatccatccctgtcaagtctgcaaa

SEQ ID NO: 4414553 - DNA, 25 bp, Homo sapien
tgcgtgggtggaaaggcaaaccaca

SEQ ID NO: 4414554 - DNA, 25 bp, Homo sapien
cagaacatgctctttgccatagtca

SEQ ID NO: 4414555 - DNA, 25 bp, Homo sapien
ggcaatgtcttaactgtatgcatgt

SEQ ID NO: 4414556 - DNA, 25 bp, Homo sapien
atgtcttaactgtatgcatgttgtc

SEQ ID NO: 4414557 - DNA, 25 bp, Homo sapien
atgttgtcaggccaagcgtcccttc

SEQ ID NO: 4414558 - DNA, 25 bp, Homo sapien
aagcgtcccttccagcattgtcaag

SEQ ID NO: 4414559 - DNA, 25 bp, Homo sapien
cattcagcattgtctctcttccaga

SEQ ID NO: 4414560 - DNA, 25 bp, Homo sapien
gcataatgtattacgcagcagtggg

SEQ ID NO: 4414561 - DNA, 25 bp, Homo sapien
gcaacagcagtttgatgatgcataa

SEQ ID NO: 4414562 - DNA, 25 bp, Homo sapien
ttccaaacgttcatgaaagggtgcg

SEQ ID NO: 4414563 - DNA, 25 bp, Homo sapien
tttcatcaaacctggtgccctttgc

SEQ ID NO: 4414564 - DNA, 25 bp, Homo sapien
ggtgccctttgcattctctcctgtc

SEQ ID NO: 4414565 - DNA, 25 bp, Homo sapien
gattcctttcatcaaacctggtgcc

SEQ ID NO: 4414566 - DNA, 25 bp, Homo sapien
gacccagattcctttcatcaaacct

SEQ ID NO: 4414567 - DNA, 25 bp, Homo sapien
ccttcttggagccttgcagcttata

SEQ ID NO: 4414568 - DNA, 25 bp, Homo sapien
ggcgctctaccatcgagaacccttt

SEQ ID NO: 4414569 - DNA, 25 bp, Homo sapien
ttgcagcttatatcagcatccaggc

SEQ ID NO: 4414570 - DNA, 25 bp, Homo sapien
atccaggcagtaaggcgctctacca

SEQ ID NO: 4414571 - DNA, 25 bp, Homo sapien
gtgccatctccacaacagaattact

SEQ ID NO: 4414572 - DNA, 25 bp, Homo sapien
gccatctccacaacagaattacttt

SEQ ID NO: 4414573 - DNA, 25 bp, Homo sapien
ccatctccacaacagaattactttt

SEQ ID NO: 4414574 - DNA, 25 bp, Homo sapien
tgccatctccacaacagaattactt

SEQ ID NO: 4414575 - DNA, 25 bp, Homo sapien
cccgatttggtgtgtgtgaggtcac

SEQ ID NO: 4414576 - DNA, 25 bp, Homo sapien
caaagtgtgatggatgtcagctccc

SEQ ID NO: 4414577 - DNA, 25 bp, Homo sapien
ccctttagaaagatcaggaaatgat

SEQ ID NO: 4414578 - DNA, 25 bp, Homo sapien
ggccaggtgctgtgatccctttaga

SEQ ID NO: 4414579 - DNA, 25 bp, Homo sapien
tcacaaggttatgtgggctcaaggt

SEQ ID NO: 4414580 - DNA, 25 bp, Homo sapien
gctggttggcaactgaattgctgcc

SEQ ID NO: 4414581 - DNA, 25 bp, Homo sapien
gacgtggagtgtgtctaagttgctc

SEQ ID NO: 4414582 - DNA, 25 bp, Homo sapien
cctctgagagcttcccccgtggtgt

SEQ ID NO: 4414583 - DNA, 25 bp, Homo sapien
ctttgagttccacgtgctgtcggcc

SEQ ID NO: 4414584 - DNA, 25 bp, Homo sapien
agttccacgtgctgtcggcccatct

SEQ ID NO: 4414585 - DNA, 25 bp, Homo sapien
catgacacaattgttgacacataga

SEQ ID NO: 4414586 - DNA, 25 bp, Homo sapien
acatagatggtagccagtgcttgtc

SEQ ID NO: 4414587 - DNA, 25 bp, Homo sapien
ggtgtttcacactttgatgtccgga

SEQ ID NO: 4414588 - DNA, 25 bp, Homo sapien
ctttgatgtccggatagtaggcggt

SEQ ID NO: 4414589 - DNA, 25 bp, Homo sapien
acactttgatgtccggatagtaggc

SEQ ID NO: 4414590 - DNA, 25 bp, Homo sapien
gtttcacactttgatgtccggatag

SEQ ID NO: 4414591 - DNA, 25 bp, Homo sapien
caagcatatggagactgcaataggg

SEQ ID NO: 4414592 - DNA, 25 bp, Homo sapien
tgtacatgtctagtactctgctgag

SEQ ID NO: 4414593 - DNA, 25 bp, Homo sapien
caacgctagagtagaatgagtgcag

SEQ ID NO: 4414594 - DNA, 25 bp, Homo sapien
caatagggtgaaaggacaggtaact

SEQ ID NO: 4414595 - DNA, 25 bp, Homo sapien
acaaatgactgtagttgctgcatgc

SEQ ID NO: 4414596 - DNA, 25 bp, Homo sapien
ctctgagaacaaatgactgtagttg

SEQ ID NO: 4414597 - DNA, 25 bp, Homo sapien
gagaacaaatgactgtagttgctgc

SEQ ID NO: 4414598 - DNA, 25 bp, Homo sapien
gaacaaatgactgtagttgctgcat

SEQ ID NO: 4414599 - DNA, 25 bp, Homo sapien
tacatgacagaggaatggtgctgcc

SEQ ID NO: 4414600 - DNA, 25 bp, Homo sapien
aaaactcgccttcagtgggtccgtg

SEQ ID NO: 4414601 - DNA, 25 bp, Homo sapien
aataaggccaccactagatctcagg

SEQ ID NO: 4414602 - DNA, 25 bp, Homo sapien
taagcccgctgcactgagagctact

SEQ ID NO: 4414603 - DNA, 25 bp, Homo sapien
tgttgctcagcttcggcctttggta

SEQ ID NO: 4414604 - DNA, 25 bp, Homo sapien
taagtcatatatgcaagagagacag

SEQ ID NO: 4414605 - DNA, 25 bp, Homo sapien
ctgaaagtaaaactggtaagtcata

SEQ ID NO: 4414606 - DNA, 25 bp, Homo sapien
agcgctgcatgctgaacccaggcag

SEQ ID NO: 4414607 - DNA, 25 bp, Homo sapien
gggatatttagtccaagaatatatt

SEQ ID NO: 4414608 - DNA, 25 bp, Homo sapien
ggatatttagtccaagaatatattt

SEQ ID NO: 4414609 - DNA, 25 bp, Homo sapien
gatatttagtccaagaatatatttc

SEQ ID NO: 4414610 - DNA, 25 bp, Homo sapien
gagtctctctggttcagggaactgc

SEQ ID NO: 4414611 - DNA, 25 bp, Homo sapien
ctcttgctttagactcaagagtagc

SEQ ID NO: 4414612 - DNA, 25 bp, Homo sapien
cgattctcttgctttagactcaaga

SEQ ID NO: 4414613 - DNA, 25 bp, Homo sapien
tcagcccttaaatcttccccaatca

SEQ ID NO: 4414614 - DNA, 25 bp, Homo sapien
gactctggcctcgtggataattctt

SEQ ID NO: 4414615 - DNA, 25 bp, Homo sapien
ggactctggcctcgtggataattct

SEQ ID NO: 4414616 - DNA, 25 bp, Homo sapien
tctggcctcgtggataattctttat

SEQ ID NO: 4414617 - DNA, 25 bp, Homo sapien
ctggactctggcctcgtggataatt

SEQ ID NO: 4414618 - DNA, 25 bp, Homo sapien
ggagcctccactcctccgtatatga

SEQ ID NO: 4414619 - DNA, 25 bp, Homo sapien
tatgaaagtttcaactgctgtcgtc

SEQ ID NO: 4414620 - DNA, 25 bp, Homo sapien
gaatcaaagttcaggccaaccttgg

SEQ ID NO: 4414621 - DNA, 25 bp, Homo sapien
caacttgaagtgtcaaaagcctgca

SEQ ID NO: 4414622 - DNA, 25 bp, Homo sapien
atttaagaaccacatgcagagcctt

SEQ ID NO: 4414623 - DNA, 25 bp, Homo sapien
tcagtttggcaacacgctctttgtt

SEQ ID NO: 4414624 - DNA, 25 bp, Homo sapien
caattacccattgaattggcagaaa

SEQ ID NO: 4414625 - DNA, 25 bp, Homo sapien
gatcacgaaagtggactgaacattg

SEQ ID NO: 4414626 - DNA, 25 bp, Homo sapien
gttcttattgccagcgcagactgca

SEQ ID NO: 4414627 - DNA, 25 bp, Homo sapien
ccagtcctttcacttagatgcggtg

SEQ ID NO: 4414628 - DNA, 25 bp, Homo sapien
tttcccgcagattcagcctcagagc

SEQ ID NO: 4414629 - DNA, 25 bp, Homo sapien
caatcccaggctcttgtggctgtca

SEQ ID NO: 4414630 - DNA, 25 bp, Homo sapien
atgttcgcgtttcccttgaaagtca

SEQ ID NO: 4414631 - DNA, 25 bp, Homo sapien
catttggctgtattctcattcggcg

SEQ ID NO: 4414632 - DNA, 25 bp, Homo sapien
cagcgctgaaaacgtgagcaagttc

SEQ ID NO: 4414633 - DNA, 25 bp, Homo sapien
gaaagtcacactgccatagtttaag

SEQ ID NO: 4414634 - DNA, 25 bp, Homo sapien
tactaactctttaggagacctcatc

SEQ ID NO: 4414635 - DNA, 25 bp, Homo sapien
ttcctgatgtctccatttgagtatc

SEQ ID NO: 4414636 - DNA, 25 bp, Homo sapien
gaagagctcaggtcaaaatctgggc

SEQ ID NO: 4414637 - DNA, 25 bp, Homo sapien
tccacatcttagaaaatgtcaccaa

SEQ ID NO: 4414638 - DNA, 25 bp, Homo sapien
tgcccagtgcaacttgtcccaaatc

SEQ ID NO: 4414639 - DNA, 25 bp, Homo sapien
gcccagtgcaacttgtcccaaatct

SEQ ID NO: 4414640 - DNA, 25 bp, Homo sapien
gtgcccagtgcaacttgtcccaaat

SEQ ID NO: 4414641 - DNA, 25 bp, Homo sapien
tcccgcctgtcccctcagtaccaac

SEQ ID NO: 4414642 - DNA, 25 bp, Homo sapien
gtggtctcttcatacggacgcgcat

SEQ ID NO: 4414643 - DNA, 25 bp, Homo sapien
ttggtggtctcttcatacggacgcg

SEQ ID NO: 4414644 - DNA, 25 bp, Homo sapien
ggtggtctcttcatacggacgcgca

SEQ ID NO: 4414645 - DNA, 25 bp, Homo sapien
gtttggtggtctcttcatacggacg

SEQ ID NO: 4414646 - DNA, 25 bp, Homo sapien
tctccctggcttgtcttctcctgtg

SEQ ID NO: 4414647 - DNA, 25 bp, Homo sapien
tctgaggctgcaagggagaatctgc

SEQ ID NO: 4414648 - DNA, 25 bp, Homo sapien
cttctcctgtgtcttcgacatcttc

SEQ ID NO: 4414649 - DNA, 25 bp, Homo sapien
ccaggactgattccttctgaggctg

SEQ ID NO: 4414650 - DNA, 25 bp, Homo sapien
gctacacaatggaggagagccactt

SEQ ID NO: 4414651 - DNA, 25 bp, Homo sapien
gccacttgacctgtagggactttga

SEQ ID NO: 4414652 - DNA, 25 bp, Homo sapien
gaagcacgagttacaagcaaatacc

SEQ ID NO: 4414653 - DNA, 25 bp, Homo sapien
tatttgtcagaacagccctatgaga

SEQ ID NO: 4414654 - DNA, 25 bp, Homo sapien
gaaggaaggcaactgggcaagttca

SEQ ID NO: 4414655 - DNA, 25 bp, Homo sapien
tcaagtctcgggctaatttccagag

SEQ ID NO: 4414656 - DNA, 25 bp, Homo sapien
ttccatagagaaaggaattctcaaa

SEQ ID NO: 4414657 - DNA, 25 bp, Homo sapien
caaatgcaacctgaattgcttcaag

SEQ ID NO: 4414658 - DNA, 25 bp, Homo sapien
catggtttctgaggcggaatcagct

SEQ ID NO: 4414659 - DNA, 25 bp, Homo sapien
gattggatgagttaactttcagcac

SEQ ID NO: 4414660 - DNA, 25 bp, Homo sapien
tgatgagttctctggacctaaggct

SEQ ID NO: 4414661 - DNA, 25 bp, Homo sapien
taaggctttgaagcagctccaatcc

SEQ ID NO: 4414662 - DNA, 25 bp, Homo sapien
agcagcagtgcggtctgattattca

SEQ ID NO: 4414663 - DNA, 25 bp, Homo sapien
tattgcctcaaacgctgcaggtgtg

SEQ ID NO: 4414664 - DNA, 25 bp, Homo sapien
gcttatatagtaaacagcacctgga

SEQ ID NO: 4414665 - DNA, 25 bp, Homo sapien
tgacaacctcaaagctgcacagtgc

SEQ ID NO: 4414666 - DNA, 25 bp, Homo sapien
cctaactgtcaccagaattggtggg

SEQ ID NO: 4414667 - DNA, 25 bp, Homo sapien
caccatttcaagcacagatttagca

SEQ ID NO: 4414668 - DNA, 25 bp, Homo sapien
ccatcctttgtaaagtcaccttgca

SEQ ID NO: 4414669 - DNA, 25 bp, Homo sapien
tcatggatataggaacagagactca

SEQ ID NO: 4414670 - DNA, 25 bp, Homo sapien
ggcccgggagatgctctcacataag

SEQ ID NO: 4414671 - DNA, 25 bp, Homo sapien
cataagtggccacgttcgttctcat

SEQ ID NO: 4414672 - DNA, 25 bp, Homo sapien
gggagatgctctcacataagtggcc

SEQ ID NO: 4414673 - DNA, 25 bp, Homo sapien
aggtgtcacatggcccgggagatgc

SEQ ID NO: 4414674 - DNA, 25 bp, Homo sapien
cagaaatgtcgtgtttggcagctgc

SEQ ID NO: 4414675 - DNA, 25 bp, Homo sapien
aggccccttgcaggtagccagacgt

SEQ ID NO: 4414676 - DNA, 25 bp, Homo sapien
tgacagataaaaggctgctctccag

SEQ ID NO: 4414677 - DNA, 25 bp, Homo sapien
ccagatgtcccctgccgagggtgag

SEQ ID NO: 4414678 - DNA, 25 bp, Homo sapien
ttaatgagccaagcatccatgccat

SEQ ID NO: 4414679 - DNA, 25 bp, Homo sapien
tatcctaacctgagggcatggccag

SEQ ID NO: 4414680 - DNA, 25 bp, Homo sapien
tatttctagggcaaaagcttcctcc

SEQ ID NO: 4414681 - DNA, 25 bp, Homo sapien
tgtagggaagagcatagaggaccac

SEQ ID NO: 4414682 - DNA, 25 bp, Homo sapien
tcattaaggaggtctgatgccactc

SEQ ID NO: 4414683 - DNA, 25 bp, Homo sapien
tccttagttgtccagagaagaacca

SEQ ID NO: 4414684 - DNA, 25 bp, Homo sapien
caaatttcattgctacgtgggcctg

SEQ ID NO: 4414685 - DNA, 25 bp, Homo sapien
gatgccactcgaatattaccaccag

SEQ ID NO: 4414686 - DNA, 25 bp, Homo sapien
ggtacttggctttgacgacctccca

SEQ ID NO: 4414687 - DNA, 25 bp, Homo sapien
cacagagattccgtggcgtggccat

SEQ ID NO: 4414688 - DNA, 25 bp, Homo sapien
accagacaaatatgccatgggctgt

SEQ ID NO: 4414689 - DNA, 25 bp, Homo sapien
cgaaatttcagatgtcaggtacttg

SEQ ID NO: 4414690 - DNA, 25 bp, Homo sapien
gcagggtgtccttgactagaagctc

SEQ ID NO: 4414691 - DNA, 25 bp, Homo sapien
tggcagaaagctgaccctcacaccc

SEQ ID NO: 4414692 - DNA, 25 bp, Homo sapien
gaagctcccctgtctgaatcccttt

SEQ ID NO: 4414693 - DNA, 25 bp, Homo sapien
ctttctttccatcgctgaggtcagg

SEQ ID NO: 4414694 - DNA, 25 bp, Homo sapien
tcattccatggcactcacttctacc

SEQ ID NO: 4414695 - DNA, 25 bp, Homo sapien
ccagacaaatgatgaggactcacaa

SEQ ID NO: 4414696 - DNA, 25 bp, Homo sapien
acttctacccgcctcacgttccaga

SEQ ID NO: 4414697 - DNA, 25 bp, Homo sapien
cccgcctcacgttccagacaaatga

SEQ ID NO: 4414698 - DNA, 25 bp, Homo sapien
gagtctagacttggcggctctgtgg

SEQ ID NO: 4414699 - DNA, 25 bp, Homo sapien
ccgctggatctgacttggctgggta

SEQ ID NO: 4414700 - DNA, 25 bp, Homo sapien
tctgttgacatagctggtgggctgc

SEQ ID NO: 4414701 - DNA, 25 bp, Homo sapien
ggtagcggtgaacacacatctggag

SEQ ID NO: 4414702 - DNA, 25 bp, Homo sapien
ccaagcatggcctgtgagggttctc

SEQ ID NO: 4414703 - DNA, 25 bp, Homo sapien
gcaatgccagaggttaagactaagg

SEQ ID NO: 4414704 - DNA, 25 bp, Homo sapien
tcacagggtataagcggatggtgct

SEQ ID NO: 4414705 - DNA, 25 bp, Homo sapien
ccagggtgcaggtaccattctgtca

SEQ ID NO: 4414706 - DNA, 25 bp, Homo sapien
ctgagacgtaagtgttgacctggta

SEQ ID NO: 4414707 - DNA, 25 bp, Homo sapien
tccttttcagcaggcccaacatgtt

SEQ ID NO: 4414708 - DNA, 25 bp, Homo sapien
tacatgttggtaagggcttgcagct

SEQ ID NO: 4414709 - DNA, 25 bp, Homo sapien
cccagctcctgctgatacatgttgg

SEQ ID NO: 4414710 - DNA, 25 bp, Homo sapien
gttgcccaattaaatgcaacaatcc

SEQ ID NO: 4414711 - DNA, 25 bp, Homo sapien
atgcaacaatccagtagtgctcaag

SEQ ID NO: 4414712 - DNA, 25 bp, Homo sapien
gctcaagcagttcacaggagatttc

SEQ ID NO: 4414713 - DNA, 25 bp, Homo sapien
cagtagtgctcaagcagttcacagg

SEQ ID NO: 4414714 - DNA, 25 bp, Homo sapien
gcattattccaaactgaggccactc

SEQ ID NO: 4414715 - DNA, 25 bp, Homo sapien
tcctctttggtaacacagcctcctg

SEQ ID NO: 4414716 - DNA, 25 bp, Homo sapien
aagaaactcccatcgcttgtgtcca

SEQ ID NO: 4414717 - DNA, 25 bp, Homo sapien
tacatttgccttgatgcctgaacag

SEQ ID NO: 4414718 - DNA, 25 bp, Homo sapien
tgctggatgattccatgagccaaac

SEQ ID NO: 4414719 - DNA, 25 bp, Homo sapien
tggtatttgctggatgattccatga

SEQ ID NO: 4414720 - DNA, 25 bp, Homo sapien
tccatgagccaaacacagtcttcct

SEQ ID NO: 4414721 - DNA, 25 bp, Homo sapien
ctctctgcagctgcccaagatgtga

SEQ ID NO: 4414722 - DNA, 25 bp, Homo sapien
tggtcagtgctcaacagaaggacgc

SEQ ID NO: 4414723 - DNA, 25 bp, Homo sapien
cagcccgtggtcagtgctcaacaga

SEQ ID NO: 4414724 - DNA, 25 bp, Homo sapien
acagaaggacgcctctgcgactggg

SEQ ID NO: 4414725 - DNA, 25 bp, Homo sapien
tgctcaacagaaggacgcctctgcg

SEQ ID NO: 4414726 - DNA, 25 bp, Homo sapien
ggtcatgaatccattgatattaatg

SEQ ID NO: 4414727 - DNA, 25 bp, Homo sapien
gacgaggacccttttgatctggaag

SEQ ID NO: 4414728 - DNA, 25 bp, Homo sapien
cagatgccttcagagcacggagagt

SEQ ID NO: 4414729 - DNA, 25 bp, Homo sapien
catgggtaatcaactcagatgcctt

SEQ ID NO: 4414730 - DNA, 25 bp, Homo sapien
cagccttatgagtggttctcatctc

SEQ ID NO: 4414731 - DNA, 25 bp, Homo sapien
catgaatggaactgtgggccgttcc

SEQ ID NO: 4414732 - DNA, 25 bp, Homo sapien
tctacagaagtaggatatgggaaca

SEQ ID NO: 4414733 - DNA, 25 bp, Homo sapien
tgggaacatgtacacaacagcgtgg

SEQ ID NO: 4414734 - DNA, 25 bp, Homo sapien
tctttgaagagggttattaatctgg

SEQ ID NO: 4414735 - DNA, 25 bp, Homo sapien
ctctgtccgtatcatatcctttctg

SEQ ID NO: 4414736 - DNA, 25 bp, Homo sapien
gtccgtatcatatcctttctgtcac

SEQ ID NO: 4414737 - DNA, 25 bp, Homo sapien
tgtccgtatcatatcctttctgtca

SEQ ID NO: 4414738 - DNA, 25 bp, Homo sapien
gacagtaaacctgaatgtctgtgtt

SEQ ID NO: 4414739 - DNA, 25 bp, Homo sapien
tccaggcccacaccattgtgaaaga

SEQ ID NO: 4414740 - DNA, 25 bp, Homo sapien
tcaagtttaccaaatcctggacacc

SEQ ID NO: 4414741 - DNA, 25 bp, Homo sapien
tccagacagggcaagaggtgtagac

SEQ ID NO: 4414742 - DNA, 25 bp, Homo sapien
aattttcaagcaccaaccaagtctt

SEQ ID NO: 4414743 - DNA, 25 bp, Homo sapien
tgaattttcaagcaccaaccaagtc

SEQ ID NO: 4414744 - DNA, 25 bp, Homo sapien
ccaaccaagtctttctcacagattc

SEQ ID NO: 4414745 - DNA, 25 bp, Homo sapien
tttgaattttcaagcaccaaccaag

SEQ ID NO: 4414746 - DNA, 25 bp, Homo sapien
tgctgtttccaaagcgtggcttcct

SEQ ID NO: 4414747 - DNA, 25 bp, Homo sapien
tggcttcctaatcctagaatatatt

SEQ ID NO: 4414748 - DNA, 25 bp, Homo sapien
tcttttcactctgctaactgtcatg

SEQ ID NO: 4414749 - DNA, 25 bp, Homo sapien
caaatgcgtgacacttattcctgcc

SEQ ID NO: 4414750 - DNA, 25 bp, Homo sapien
gcacgttatagctaaattgctcatg

SEQ ID NO: 4414751 - DNA, 25 bp, Homo sapien
cacgttatagctaaattgctcatga

SEQ ID NO: 4414752 - DNA, 25 bp, Homo sapien
ctgcacgttatagctaaattgctca

SEQ ID NO: 4414753 - DNA, 25 bp, Homo sapien
gttatagctaaattgctcatgagag

SEQ ID NO: 4414754 - DNA, 25 bp, Homo sapien
gatttattttcttatgatccttgaa

SEQ ID NO: 4414755 - DNA, 25 bp, Homo sapien
attttcttatgatccttgaagccgc

SEQ ID NO: 4414756 - DNA, 25 bp, Homo sapien
ttattttcttatgatccttgaagcc

SEQ ID NO: 4414757 - DNA, 25 bp, Homo sapien
tttcttatgatccttgaagccgcca

SEQ ID NO: 4414758 - DNA, 25 bp, Homo sapien
ttccaggctccatgtagtgtcctca

SEQ ID NO: 4414759 - DNA, 25 bp, Homo sapien
tgcctctgcgcgatcctctgcgtgg

SEQ ID NO: 4414760 - DNA, 25 bp, Homo sapien
ggctccatgtagtgtcctcatcctg

SEQ ID NO: 4414761 - DNA, 25 bp, Homo sapien
gacgcatttcagaggcacggacatc

SEQ ID NO: 4414762 - DNA, 25 bp, Homo sapien
gagggaaagatgctcctcccacagc

SEQ ID NO: 4414763 - DNA, 25 bp, Homo sapien
gaaggttcagaaggcccagacaatt

SEQ ID NO: 4414764 - DNA, 25 bp, Homo sapien
gattccgtccatgcttccagagagc

SEQ ID NO: 4414765 - DNA, 25 bp, Homo sapien
ccatgtgtgttcagcgcagagcaag

SEQ ID NO: 4414766 - DNA, 25 bp, Homo sapien
ccgttgatcagtgaaggaggattct

SEQ ID NO: 4414767 - DNA, 25 bp, Homo sapien
tagggtgatattttccgttgatcag

SEQ ID NO: 4414768 - DNA, 25 bp, Homo sapien
cattgaacttcggaatagggtgata

SEQ ID NO: 4414769 - DNA, 25 bp, Homo sapien
tgagcgtctcttagaaagtgttctt

SEQ ID NO: 4414770 - DNA, 25 bp, Homo sapien
cagcattctgcgcaccgtggggaag

SEQ ID NO: 4414771 - DNA, 25 bp, Homo sapien
tctgagcatgcaggcaagagtagag

SEQ ID NO: 4414772 - DNA, 25 bp, Homo sapien
cacattggcggtccattttggcaaa

SEQ ID NO: 4414773 - DNA, 25 bp, Homo sapien
ggagacaagccgtggacacattggc

SEQ ID NO: 4414774 - DNA, 25 bp, Homo sapien
tgctggagtggtctgctggcttctc

SEQ ID NO: 4414775 - DNA, 25 bp, Homo sapien
gtggtctcctgctggagtggtctgc

SEQ ID NO: 4414776 - DNA, 25 bp, Homo sapien
gtctcctgctggagtggtctgctgg

SEQ ID NO: 4414777 - DNA, 25 bp, Homo sapien
ctgctggagtggtctgctggcttct

SEQ ID NO: 4414778 - DNA, 25 bp, Homo sapien
ttctggttttgttcaagggcttcac

SEQ ID NO: 4414779 - DNA, 25 bp, Homo sapien
ctggttttgttcaagggcttcacgg

SEQ ID NO: 4414780 - DNA, 25 bp, Homo sapien
tgttcaagggcttcacggggcactg

SEQ ID NO: 4414781 - DNA, 25 bp, Homo sapien
cgtataaggctgtttatttttcact

SEQ ID NO: 4414782 - DNA, 25 bp, Homo sapien
gagttggagtctgggtcacactcaa

SEQ ID NO: 4414783 - DNA, 25 bp, Homo sapien
taggtgctcaaaaatggcttactgt

SEQ ID NO: 4414784 - DNA, 25 bp, Homo sapien
tagttccctggattaagagcctgcc

SEQ ID NO: 4414785 - DNA, 25 bp, Homo sapien
tatagaccattcctccacaagtgca

SEQ ID NO: 4414786 - DNA, 25 bp, Homo sapien
tccaactgtggcccccttcatgata

SEQ ID NO: 4414787 - DNA, 25 bp, Homo sapien
aactgtggcccccttcatgatacca

SEQ ID NO: 4414788 - DNA, 25 bp, Homo sapien
aactccaactgtggcccccttcatg

SEQ ID NO: 4414789 - DNA, 25 bp, Homo sapien
tccaactccaactgtggcccccttc

SEQ ID NO: 4414790 - DNA, 25 bp, Homo sapien
ctccctgcccacactcaggcctcgg

SEQ ID NO: 4414791 - DNA, 25 bp, Homo sapien
tccctgctccctgcccacactcagg

SEQ ID NO: 4414792 - DNA, 25 bp, Homo sapien
ctgctccctgcccacactcaggcct

SEQ ID NO: 4414793 - DNA, 25 bp, Homo sapien
ttacctggttcactttccagtcttc

SEQ ID NO: 4414794 - DNA, 25 bp, Homo sapien
tcgagacagagctcggaaacgatgt

SEQ ID NO: 4414795 - DNA, 25 bp, Homo sapien
gagggcagagtcatttaccggctcc

SEQ ID NO: 4414796 - DNA, 25 bp, Homo sapien
cccttgccgtaatagactgtggaca

SEQ ID NO: 4414797 - DNA, 25 bp, Homo sapien
gaaacgatgttccacccaggtcgga

SEQ ID NO: 4414798 - DNA, 25 bp, Homo sapien
gattatcacacggtcccacgttcct

SEQ ID NO: 4414799 - DNA, 25 bp, Homo sapien
ggtgcaagcgcaatgtccagattat

SEQ ID NO: 4414800 - DNA, 25 bp, Homo sapien
agaaattccggtgcaagcgcaatgt

SEQ ID NO: 4414801 - DNA, 25 bp, Homo sapien
atgtccagattatcacacggtccca

SEQ ID NO: 4414802 - DNA, 25 bp, Homo sapien
gattaaagcagacgcagagaggaga

SEQ ID NO: 4414803 - DNA, 25 bp, Homo sapien
ttgaaagactttccatcatgcacct

SEQ ID NO: 4414804 - DNA, 25 bp, Homo sapien
cctcagccactacgggcagggatga

SEQ ID NO: 4414805 - DNA, 25 bp, Homo sapien
gagagggcaggattgtaacctcagc

SEQ ID NO: 4414806 - DNA, 25 bp, Homo sapien
agaagcatggctgatcctcctctct

SEQ ID NO: 4414807 - DNA, 25 bp, Homo sapien
aagaagcatggctgatcctcctctc

SEQ ID NO: 4414808 - DNA, 25 bp, Homo sapien
tgttcttgccaacccatcccacttt

SEQ ID NO: 4414809 - DNA, 25 bp, Homo sapien
ttcttgccaacccatcccactttcc

SEQ ID NO: 4414810 - DNA, 25 bp, Homo sapien
cagtgttaccataaggggtgtttgg

SEQ ID NO: 4414811 - DNA, 25 bp, Homo sapien
cccagaggccgtgacatggggcttt

SEQ ID NO: 4414812 - DNA, 25 bp, Homo sapien
cttttaggccatttttgagcaggtt

SEQ ID NO: 4414813 - DNA, 25 bp, Homo sapien
aggccatttttgagcaggttcccac

SEQ ID NO: 4414814 - DNA, 25 bp, Homo sapien
ctccggaggctctgctgaagagcaa

SEQ ID NO: 4414815 - DNA, 25 bp, Homo sapien
cagaaccccttgtgagaatgcatgg

SEQ ID NO: 4414816 - DNA, 25 bp, Homo sapien
tctgcagcgtcacccatatccgggt

SEQ ID NO: 4414817 - DNA, 25 bp, Homo sapien
cactgccttctaggatggtcttggt

SEQ ID NO: 4414818 - DNA, 25 bp, Homo sapien
aacgttcagggcgaggaagaacact

SEQ ID NO: 4414819 - DNA, 25 bp, Homo sapien
cactgatggacaagctttgggagcc

SEQ ID NO: 4414820 - DNA, 25 bp, Homo sapien
gttgcatctccgtgaactctgagca

SEQ ID NO: 4414821 - DNA, 25 bp, Homo sapien
tttatgaaatggaaggtacagcgga

SEQ ID NO: 4414822 - DNA, 25 bp, Homo sapien
ttgtgtttctgcattagtgatggac

SEQ ID NO: 4414823 - DNA, 25 bp, Homo sapien
aagggatgctagtcacattggctgc

SEQ ID NO: 4414824 - DNA, 25 bp, Homo sapien
tagtgatggactagggctcttttga

SEQ ID NO: 4414825 - DNA, 25 bp, Homo sapien
tgttttccaacctctatctggtcgt

SEQ ID NO: 4414826 - DNA, 25 bp, Homo sapien
ccttcaggataaagttcaagctgct

SEQ ID NO: 4414827 - DNA, 25 bp, Homo sapien
aatgggggtcccatagccttcagga

SEQ ID NO: 4414828 - DNA, 25 bp, Homo sapien
gagatgcagggtgactttgattatc

SEQ ID NO: 4414829 - DNA, 25 bp, Homo sapien
cactgtcctgtgttaacagctttaa

SEQ ID NO: 4414830 - DNA, 25 bp, Homo sapien
actgtcctcctctcagcgccgtttc

SEQ ID NO: 4414831 - DNA, 25 bp, Homo sapien
gactgcgtgcatccctccattgcac

SEQ ID NO: 4414832 - DNA, 25 bp, Homo sapien
tcctagcctggcgacactgtcctcc

SEQ ID NO: 4414833 - DNA, 25 bp, Homo sapien
cagcgccgtttcctggggagcagat

SEQ ID NO: 4414834 - DNA, 25 bp, Homo sapien
ttttcccactcctggagccaacatt

SEQ ID NO: 4414835 - DNA, 25 bp, Homo sapien
gccctgcagcgtgagtggctctcct

SEQ ID NO: 4414836 - DNA, 25 bp, Homo sapien
cactcctggagccaacattcttgag

SEQ ID NO: 4414837 - DNA, 25 bp, Homo sapien
cagccaggatgaccccgtgtgagga

SEQ ID NO: 4414838 - DNA, 25 bp, Homo sapien
tgcagagcctctaaaggaccttcct

SEQ ID NO: 4414839 - DNA, 25 bp, Homo sapien
cctgctctgagatgtcgggattccc

SEQ ID NO: 4414840 - DNA, 25 bp, Homo sapien
ggagccagttatgtctggtgcaccg

SEQ ID NO: 4414841 - DNA, 25 bp, Homo sapien
taacatcgatgacttcacgggagcc

SEQ ID NO: 4414842 - DNA, 25 bp, Homo sapien
tttctatttcatgtcgagttggtcg

SEQ ID NO: 4414843 - DNA, 25 bp, Homo sapien
ttataaatgtgcctccaaaagcacc

SEQ ID NO: 4414844 - DNA, 25 bp, Homo sapien
aagcaccctcaatttgattattagg

SEQ ID NO: 4414845 - DNA, 25 bp, Homo sapien
gagttggtcgaattataaatgtgcc

SEQ ID NO: 4414846 - DNA, 25 bp, Homo sapien
gtctccaatctgaactctaagctcg

SEQ ID NO: 4414847 - DNA, 25 bp, Homo sapien
tctaagctcgatgggtgtaatgtgt

SEQ ID NO: 4414848 - DNA, 25 bp, Homo sapien
tgaacgttctggacctttgcacagt

SEQ ID NO: 4414849 - DNA, 25 bp, Homo sapien
taatgtgtgggttgggcttgctctg

SEQ ID NO: 4414850 - DNA, 25 bp, Homo sapien
ggcacttcccagagtttgtctatta

SEQ ID NO: 4414851 - DNA, 25 bp, Homo sapien
ctttcactgggttgtatccagagca

SEQ ID NO: 4414852 - DNA, 25 bp, Homo sapien
tgtctattaagcgaatgagcgatgc

SEQ ID NO: 4414853 - DNA, 25 bp, Homo sapien
tgcgtgcgtcttttctactttcagg

SEQ ID NO: 4414854 - DNA, 25 bp, Homo sapien
tgttgtccaaatagagtggtcctgg

SEQ ID NO: 4414855 - DNA, 25 bp, Homo sapien
ggtcctggagccaatataggcattg

SEQ ID NO: 4414856 - DNA, 25 bp, Homo sapien
cagggttggtgatctgcagtaattc

SEQ ID NO: 4414857 - DNA, 25 bp, Homo sapien
gagatgtaggctccagtgatgtcca

SEQ ID NO: 4414858 - DNA, 25 bp, Homo sapien
acattgccccgatctccagaaggct

SEQ ID NO: 4414859 - DNA, 25 bp, Homo sapien
ggatctgagctttgcgacagcagct

SEQ ID NO: 4414860 - DNA, 25 bp, Homo sapien
cagtccaagttctacacgtggccac

SEQ ID NO: 4414861 - DNA, 25 bp, Homo sapien
acagcagctcgtggccaagagccag

SEQ ID NO: 4414862 - DNA, 25 bp, Homo sapien
tgccactgttccagaatccgatcag

SEQ ID NO: 4414863 - DNA, 25 bp, Homo sapien
cactgttccagaatccgatcagaca

SEQ ID NO: 4414864 - DNA, 25 bp, Homo sapien
gccactgttccagaatccgatcaga

SEQ ID NO: 4414865 - DNA, 25 bp, Homo sapien
actgttccagaatccgatcagacaa

SEQ ID NO: 4414866 - DNA, 25 bp, Homo sapien
gggcccacgtcttctgccttccatg

SEQ ID NO: 4414867 - DNA, 25 bp, Homo sapien
tatggagaccacagacaaaagatgg

SEQ ID NO: 4414868 - DNA, 25 bp, Homo sapien
tactgggtgttcaacactggctgca

SEQ ID NO: 4414869 - DNA, 25 bp, Homo sapien
gaaacagcctccaccggcatgggga

SEQ ID NO: 4414870 - DNA, 25 bp, Homo sapien
ggagcttccagagctgactttgaag

SEQ ID NO: 4414871 - DNA, 25 bp, Homo sapien
catggagcttccagagctgactttg

SEQ ID NO: 4414872 - DNA, 25 bp, Homo sapien
tgttgggccacagtagagggcttcc

SEQ ID NO: 4414873 - DNA, 25 bp, Homo sapien
tataaagagaaagaccggatgttgg

SEQ ID NO: 4414874 - DNA, 25 bp, Homo sapien
agggagaattggaaacagggaacag

SEQ ID NO: 4414875 - DNA, 25 bp, Homo sapien
aaactgatgatgtctagttggtctt

SEQ ID NO: 4414876 - DNA, 25 bp, Homo sapien
gatgatgtctagttggtcttcagca

SEQ ID NO: 4414877 - DNA, 25 bp, Homo sapien
gtctagttggtcttcagcaaactgg

SEQ ID NO: 4414878 - DNA, 25 bp, Homo sapien
ggctctgtgagaacacttgctccag

SEQ ID NO: 4414879 - DNA, 25 bp, Homo sapien
gtcacaggctccacggtcactggct

SEQ ID NO: 4414880 - DNA, 25 bp, Homo sapien
tgagaacacttgctccagagccttg

SEQ ID NO: 4414881 - DNA, 25 bp, Homo sapien
tctgcacggtcacaggctccacggt

SEQ ID NO: 4414882 - DNA, 25 bp, Homo sapien
tcatcgtgggcaggtcaagtgtccc

SEQ ID NO: 4414883 - DNA, 25 bp, Homo sapien
gcttttctcatcgtgggcaggtcaa

SEQ ID NO: 4414884 - DNA, 25 bp, Homo sapien
tacaggacagcttgctatgcacagc

SEQ ID NO: 4414885 - DNA, 25 bp, Homo sapien
cgctggtggacaagctcttggtgtt

SEQ ID NO: 4414886 - DNA, 25 bp, Homo sapien
ggtctgtactccacggctcattcca

SEQ ID NO: 4414887 - DNA, 25 bp, Homo sapien
cctggtgactgccatacagcttcat

SEQ ID NO: 4414888 - DNA, 25 bp, Homo sapien
tgcacctcctggtgactgccataca

SEQ ID NO: 4414889 - DNA, 25 bp, Homo sapien
tgtggctggtctgtactccacggct

SEQ ID NO: 4414890 - DNA, 25 bp, Homo sapien
ctgtttagttccctgcaatgttctc

SEQ ID NO: 4414891 - DNA, 25 bp, Homo sapien
gttccctgcaatgttctcttggcct

SEQ ID NO: 4414892 - DNA, 25 bp, Homo sapien
tcgtttttgcccttggttatgatct

SEQ ID NO: 4414893 - DNA, 25 bp, Homo sapien
ctcgtttttgcccttggttatgatc

SEQ ID NO: 4414894 - DNA, 25 bp, Homo sapien
gtttctgagtccattagaaggtgta

SEQ ID NO: 4414895 - DNA, 25 bp, Homo sapien
gagaggatggaggttactggaggca

SEQ ID NO: 4414896 - DNA, 25 bp, Homo sapien
tgtagaagaggtctcaggttcttgt

SEQ ID NO: 4414897 - DNA, 25 bp, Homo sapien
tgagtccattagaaggtgtagaaga

SEQ ID NO: 4414898 - DNA, 25 bp, Homo sapien
ttaggagagcttcacacaggttccc

SEQ ID NO: 4414899 - DNA, 25 bp, Homo sapien
tgctgctgtcaaagtggaatctggg

SEQ ID NO: 4414900 - DNA, 25 bp, Homo sapien
tattagggcccatggaagtgtctgc

SEQ ID NO: 4414901 - DNA, 25 bp, Homo sapien
cgttcttgggtacatggagtctggc

SEQ ID NO: 4414902 - DNA, 25 bp, Homo sapien
tgggcagaggcccatgagctaggtt

SEQ ID NO: 4414903 - DNA, 25 bp, Homo sapien
gcagaggcccatgagctaggttttc

SEQ ID NO: 4414904 - DNA, 25 bp, Homo sapien
tggcccaactgtctgttccctgtcc

SEQ ID NO: 4414905 - DNA, 25 bp, Homo sapien
tgtgggcagaggcccatgagctagg

SEQ ID NO: 4414906 - DNA, 25 bp, Homo sapien
gtggtaagattgcttgctgctttct

SEQ ID NO: 4414907 - DNA, 25 bp, Homo sapien
caaaacgtaggggttccatctgcca

SEQ ID NO: 4414908 - DNA, 25 bp, Homo sapien
ggtggtaagattgcttgctgctttc

SEQ ID NO: 4414909 - DNA, 25 bp, Homo sapien
gccaaaacgtaggggttccatctgc

SEQ ID NO: 4414910 - DNA, 25 bp, Homo sapien
ctatacgagtctgatgggaaaagca

SEQ ID NO: 4414911 - DNA, 25 bp, Homo sapien
attcccagcgggatcaaatacactg

SEQ ID NO: 4414912 - DNA, 25 bp, Homo sapien
gggaaaagcacgctgcttcctccat

SEQ ID NO: 4414913 - DNA, 25 bp, Homo sapien
tcgggaccccgttatgctgaccctg

SEQ ID NO: 4414914 - DNA, 25 bp, Homo sapien
gattccaaggaaggattccgatggt

SEQ ID NO: 4414915 - DNA, 25 bp, Homo sapien
caaggaaggattccgatggtctgtc

SEQ ID NO: 4414916 - DNA, 25 bp, Homo sapien
tggccaaggcgatgagattctctgg

SEQ ID NO: 4414917 - DNA, 25 bp, Homo sapien
ggtgtactcatttgactgtggccaa

SEQ ID NO: 4414918 - DNA, 25 bp, Homo sapien
cagggttgttcgtcctcctagtgag

SEQ ID NO: 4414919 - DNA, 25 bp, Homo sapien
tgtaaagttataatcagggttgttc

SEQ ID NO: 4414920 - DNA, 25 bp, Homo sapien
ctagtgagtacttgctgcgtgggtc

SEQ ID NO: 4414921 - DNA, 25 bp, Homo sapien
tccttcagggcgcactggacaaggg

SEQ ID NO: 4414922 - DNA, 25 bp, Homo sapien
gctgcttagcgaggtccatgcacca

SEQ ID NO: 4414923 - DNA, 25 bp, Homo sapien
tggtgtagagacagcgctgcagcct

SEQ ID NO: 4414924 - DNA, 25 bp, Homo sapien
gggtgtgatacctccaaacacggag

SEQ ID NO: 4414925 - DNA, 25 bp, Homo sapien
tggctgtcatgaccctttctgaaag

SEQ ID NO: 4414926 - DNA, 25 bp, Homo sapien
catccgctcattatggaggtagaaa

SEQ ID NO: 4414927 - DNA, 25 bp, Homo sapien
ggagcaggtgactgttagtgtctct

SEQ ID NO: 4414928 - DNA, 25 bp, Homo sapien
tttcagtggccagatagtatatcga

SEQ ID NO: 4414929 - DNA, 25 bp, Homo sapien
tcacataactgtggcctcaacactt

SEQ ID NO: 4414930 - DNA, 25 bp, Homo sapien
gctttaccagcaatagatggcaatt

SEQ ID NO: 4414931 - DNA, 25 bp, Homo sapien
taccagcaatagatggcaattcctg

SEQ ID NO: 4414932 - DNA, 25 bp, Homo sapien
tttaccagcaatagatggcaattcc

SEQ ID NO: 4414933 - DNA, 25 bp, Homo sapien
ccagcaatagatggcaattcctgcc

SEQ ID NO: 4414934 - DNA, 25 bp, Homo sapien
cattcgtagcaagtgaatccaaccc

SEQ ID NO: 4414935 - DNA, 25 bp, Homo sapien
agtggcaaagaatcacgtcggtgac

SEQ ID NO: 4414936 - DNA, 25 bp, Homo sapien
tccaaccctccttaataagtggcaa

SEQ ID NO: 4414937 - DNA, 25 bp, Homo sapien
ggtaatctgttggtgaactcggacc

SEQ ID NO: 4414938 - DNA, 25 bp, Homo sapien
ccttgtctgctactttggttggcca

SEQ ID NO: 4414939 - DNA, 25 bp, Homo sapien
gggaagaaccccactgagctcatga

SEQ ID NO: 4414940 - DNA, 25 bp, Homo sapien
aaatgttgaactcttcgctgaccat

SEQ ID NO: 4414941 - DNA, 25 bp, Homo sapien
actcttcgctgaccatcgacatggg

SEQ ID NO: 4414942 - DNA, 25 bp, Homo sapien
ccaattgggaagtctgcgcaggtca

SEQ ID NO: 4414943 - DNA, 25 bp, Homo sapien
ttagcctctgaggtcggtcagccag

SEQ ID NO: 4414944 - DNA, 25 bp, Homo sapien
tgtgagccacttgagggcacgtcct

SEQ ID NO: 4414945 - DNA, 25 bp, Homo sapien
cttgttaatggtgacccaattggga

SEQ ID NO: 4414946 - DNA, 25 bp, Homo sapien
aaacagcccccagtgatatgggtgt

SEQ ID NO: 4414947 - DNA, 25 bp, Homo sapien
gcccccagtgatatgggtgtagaaa

SEQ ID NO: 4414948 - DNA, 25 bp, Homo sapien
ccccagtgatatgggtgtagaaact

SEQ ID NO: 4414949 - DNA, 25 bp, Homo sapien
cagcccccagtgatatgggtgtaga

SEQ ID NO: 4414950 - DNA, 25 bp, Homo sapien
tggtgtccatgtccactccgtgtct

SEQ ID NO: 4414951 - DNA, 25 bp, Homo sapien
gctcctacggccatcttggtgtcca

SEQ ID NO: 4414952 - DNA, 25 bp, Homo sapien
tcacggcaccctctcgaaggaggtg

SEQ ID NO: 4414953 - DNA, 25 bp, Homo sapien
tattcctaatagcagtcacttcggg

SEQ ID NO: 4414954 - DNA, 25 bp, Homo sapien
tcttatgaaacctttgtaaggtgga

SEQ ID NO: 4414955 - DNA, 25 bp, Homo sapien
cactacggccagctaatttctatat

SEQ ID NO: 4414956 - DNA, 25 bp, Homo sapien
gcccagccctctcctttaattctta

SEQ ID NO: 4414957 - DNA, 25 bp, Homo sapien
gccctctcctttaattcttatgaaa

SEQ ID NO: 4414958 - DNA, 25 bp, Homo sapien
ttccttgttaacatgtaggtccatt

SEQ ID NO: 4414959 - DNA, 25 bp, Homo sapien
tcagaagcccggtaaatggcaaact

SEQ ID NO: 4414960 - DNA, 25 bp, Homo sapien
ccttgttaacatgtaggtccatttc

SEQ ID NO: 4414961 - DNA, 25 bp, Homo sapien
aatctgttaccatcagaagcccggt

SEQ ID NO: 4414962 - DNA, 25 bp, Homo sapien
ccaggtttgcactggactgtacccc

SEQ ID NO: 4414963 - DNA, 25 bp, Homo sapien
ccctttcgggaaaccactgctgtca

SEQ ID NO: 4414964 - DNA, 25 bp, Homo sapien
tttcgggaaaccactgctgtcactg

SEQ ID NO: 4414965 - DNA, 25 bp, Homo sapien
gcactggactgtacccctttcggga

SEQ ID NO: 4414966 - DNA, 25 bp, Homo sapien
cctcagggggccagaggggtgctag

SEQ ID NO: 4414967 - DNA, 25 bp, Homo sapien
cagggggccagaggggtgctaggct

SEQ ID NO: 4414968 - DNA, 25 bp, Homo sapien
atttccaaacctcagggggccagag

SEQ ID NO: 4414969 - DNA, 25 bp, Homo sapien
acctcagggggccagaggggtgcta

SEQ ID NO: 4414970 - DNA, 25 bp, Homo sapien
gatcttcacggcatgaatagacccg

SEQ ID NO: 4414971 - DNA, 25 bp, Homo sapien
gatgctgaatatccacgcctcacgg

SEQ ID NO: 4414972 - DNA, 25 bp, Homo sapien
tcagctaaagcgcacagccctgagg

SEQ ID NO: 4414973 - DNA, 25 bp, Homo sapien
cagccaccgggaagcggtttctcca

SEQ ID NO: 4414974 - DNA, 25 bp, Homo sapien
tccactcctcttggggagctcagag

SEQ ID NO: 4414975 - DNA, 25 bp, Homo sapien
gaggccagttcaccacaagacggta

SEQ ID NO: 4414976 - DNA, 25 bp, Homo sapien
agttcaccacaagacggtacctggg

SEQ ID NO: 4414977 - DNA, 25 bp, Homo sapien
gtgtggcgggtcgaggagcagctgc

SEQ ID NO: 4414978 - DNA, 25 bp, Homo sapien
caggaaggcacattcagctggttgg

SEQ ID NO: 4414979 - DNA, 25 bp, Homo sapien
agataggccacaatactgactgtcc

SEQ ID NO: 4414980 - DNA, 25 bp, Homo sapien
gttggaagaaatgagataggccaca

SEQ ID NO: 4414981 - DNA, 25 bp, Homo sapien
ttggggatgccaacaatttgactgt

SEQ ID NO: 4414982 - DNA, 25 bp, Homo sapien
gctcaaggaaacacggatcaacatt

SEQ ID NO: 4414983 - DNA, 25 bp, Homo sapien
catgctctgctcaaggaaacacgga

SEQ ID NO: 4414984 - DNA, 25 bp, Homo sapien
gaaacacggatcaacattcacttct

SEQ ID NO: 4414985 - DNA, 25 bp, Homo sapien
gactttgtgctctgatcttctcccc

SEQ ID NO: 4414986 - DNA, 25 bp, Homo sapien
cggctagcccaggagcaaggaagca

SEQ ID NO: 4414987 - DNA, 25 bp, Homo sapien
cacaataggccatcggctagcccag

SEQ ID NO: 4414988 - DNA, 25 bp, Homo sapien
tcacacggttagaaggtgaagtccc

SEQ ID NO: 4414989 - DNA, 25 bp, Homo sapien
ttaaggagaatcgactcacacggtt

SEQ ID NO: 4414990 - DNA, 25 bp, Homo sapien
acaaagggacgaccatgtgtggaca

SEQ ID NO: 4414991 - DNA, 25 bp, Homo sapien
tggccaccacggattcatgagcttt

SEQ ID NO: 4414992 - DNA, 25 bp, Homo sapien
tgcatctctgttgtttaaggcccca

SEQ ID NO: 4414993 - DNA, 25 bp, Homo sapien
gccttgggaggaatcagacctgcca

SEQ ID NO: 4414994 - DNA, 25 bp, Homo sapien
gggcagattaggtgcagacatccag

SEQ ID NO: 4414995 - DNA, 25 bp, Homo sapien
gctacttctggtgtggaaagcctca

SEQ ID NO: 4414996 - DNA, 25 bp, Homo sapien
ggaagttcacactcatacctgtgag

SEQ ID NO: 4414997 - DNA, 25 bp, Homo sapien
gggcctgttgcttctgtagcagcta

SEQ ID NO: 4414998 - DNA, 25 bp, Homo sapien
tatcctggcaaggagcgctaacgac

SEQ ID NO: 4414999 - DNA, 25 bp, Homo sapien
aagggctttagaggctatcctggca

SEQ ID NO: 4415000 - DNA, 25 bp, Homo sapien
tctcgttcgctcagaggcctcaagg

SEQ ID NO: 4415001 - DNA, 25 bp, Homo sapien
gagcctccaggttccgagcttgtga

SEQ ID NO: 4415002 - DNA, 25 bp, Homo sapien
cctgttcatctgaacaggaaggggc

SEQ ID NO: 4415003 - DNA, 25 bp, Homo sapien
gcttgcctggcagtcggcctgatgt

SEQ ID NO: 4415004 - DNA, 25 bp, Homo sapien
gggttgcaggtgctgaaaccagggc

SEQ ID NO: 4415005 - DNA, 25 bp, Homo sapien
agcttctggtggcaaatgggatttt

SEQ ID NO: 4415006 - DNA, 25 bp, Homo sapien
gacttggaacacaggtggtgctagt

SEQ ID NO: 4415007 - DNA, 25 bp, Homo sapien
tcggactcttcatctgtgacttgga

SEQ ID NO: 4415008 - DNA, 25 bp, Homo sapien
tgtgacttggaacacaggtggtgct

SEQ ID NO: 4415009 - DNA, 25 bp, Homo sapien
ctgtgacttggaacacaggtggtgc

SEQ ID NO: 4415010 - DNA, 25 bp, Homo sapien
tcaacccgggacagcctccaaacca

SEQ ID NO: 4415011 - DNA, 25 bp, Homo sapien
ctcctgtgaacaccccgcctctctg

SEQ ID NO: 4415012 - DNA, 25 bp, Homo sapien
gacacctgggcttcaacccgggaca

SEQ ID NO: 4415013 - DNA, 25 bp, Homo sapien
agaccctcctgtgaacaccccgcct

SEQ ID NO: 4415014 - DNA, 25 bp, Homo sapien
tgtgtggactctggtagatgctgtc

SEQ ID NO: 4415015 - DNA, 25 bp, Homo sapien
atctccactcttggatggagatgcg

SEQ ID NO: 4415016 - DNA, 25 bp, Homo sapien
atgctgtccctccaaagggcaatct

SEQ ID NO: 4415017 - DNA, 25 bp, Homo sapien
cactcttggatggagatgcgtgctg

SEQ ID NO: 4415018 - DNA, 25 bp, Homo sapien
tcaggttttggcaggtgaatacaca

SEQ ID NO: 4415019 - DNA, 25 bp, Homo sapien
gaccgaggatgtgccggaaacatgc

SEQ ID NO: 4415020 - DNA, 25 bp, Homo sapien
tgaatacacatcgagtggaccgagg

SEQ ID NO: 4415021 - DNA, 25 bp, Homo sapien
tcaagtgagagccagtcccgtggaa

SEQ ID NO: 4415022 - DNA, 25 bp, Homo sapien
ggagtcgcctgcagaacttcactgc

SEQ ID NO: 4415023 - DNA, 25 bp, Homo sapien
tcctggaacggagatgaaaaagaca

SEQ ID NO: 4415024 - DNA, 25 bp, Homo sapien
atcacgtccaagaccggcaggagtc

SEQ ID NO: 4415025 - DNA, 25 bp, Homo sapien
ccagttttggcgatgtcaggttgaa

SEQ ID NO: 4415026 - DNA, 25 bp, Homo sapien
gccaagagctcgtgcctgctggcct

SEQ ID NO: 4415027 - DNA, 25 bp, Homo sapien
cctgagcaatcttggggaaatggtc

SEQ ID NO: 4415028 - DNA, 25 bp, Homo sapien
aaatggtccgagtgaagtgcagggc

SEQ ID NO: 4415029 - DNA, 25 bp, Homo sapien
tctgcttggagaagctctggatgct

SEQ ID NO: 4415030 - DNA, 25 bp, Homo sapien
gagcttggcgatggtagagacacca

SEQ ID NO: 4415031 - DNA, 25 bp, Homo sapien
acagagcttggcgatggtagagaca

SEQ ID NO: 4415032 - DNA, 25 bp, Homo sapien
tgtccattgacctccccagcaaaga

SEQ ID NO: 4415033 - DNA, 25 bp, Homo sapien
cccagcaaagaagcctggaattcct

SEQ ID NO: 4415034 - DNA, 25 bp, Homo sapien
agctgctactggttttttagtcagc

SEQ ID NO: 4415035 - DNA, 25 bp, Homo sapien
cagctgctactggttttttagtcag

SEQ ID NO: 4415036 - DNA, 25 bp, Homo sapien
ccagctgctactggttttttagtca

SEQ ID NO: 4415037 - DNA, 25 bp, Homo sapien
cttccaggatgaagaaaggcttttc

SEQ ID NO: 4415038 - DNA, 25 bp, Homo sapien
tgcttgggcccgtatctgccacctg

SEQ ID NO: 4415039 - DNA, 25 bp, Homo sapien
tcccatgcggcaaccgggagggttc

SEQ ID NO: 4415040 - DNA, 25 bp, Homo sapien
tggcatctcggtttcccagccggct

SEQ ID NO: 4415041 - DNA, 25 bp, Homo sapien
tgtttctttacatagccgagcgcgc

SEQ ID NO: 4415042 - DNA, 25 bp, Homo sapien
ctgactggaatcgtatggcaaggga

SEQ ID NO: 4415043 - DNA, 25 bp, Homo sapien
gatggtgccaagttttcggcctgac

SEQ ID NO: 4415044 - DNA, 25 bp, Homo sapien
ggcctgacaccagcgaaatacaaat

SEQ ID NO: 4415045 - DNA, 25 bp, Homo sapien
gcatgactcggagaccactgggcat

SEQ ID NO: 4415046 - DNA, 25 bp, Homo sapien
cctcttcggcgtgctatttaaaagc

SEQ ID NO: 4415047 - DNA, 25 bp, Homo sapien
tgggcatgtctcctcttcggcgtgc

SEQ ID NO: 4415048 - DNA, 25 bp, Homo sapien
tttaggcaaatgacctggatcctgt

SEQ ID NO: 4415049 - DNA, 25 bp, Homo sapien
gagatgtaccgtgactccccagtct

SEQ ID NO: 4415050 - DNA, 25 bp, Homo sapien
tggagtgtgacagccaccgtttgaa

SEQ ID NO: 4415051 - DNA, 25 bp, Homo sapien
cccagtctctgttgaaggccacgtg

SEQ ID NO: 4415052 - DNA, 25 bp, Homo sapien
tcttcccctgggttagagatgtacc

SEQ ID NO: 4415053 - DNA, 25 bp, Homo sapien
acagcttctgcgggggacctggctc

SEQ ID NO: 4415054 - DNA, 25 bp, Homo sapien
ctggcctcccgctgcagacaggaca

SEQ ID NO: 4415055 - DNA, 25 bp, Homo sapien
caggccttcactcccacaagcccag

SEQ ID NO: 4415056 - DNA, 25 bp, Homo sapien
ccttgcacaggccttcactcccaca

SEQ ID NO: 4415057 - DNA, 25 bp, Homo sapien
ctgatccactttctcagttcccggg

SEQ ID NO: 4415058 - DNA, 25 bp, Homo sapien
tgatccactttctcagttcccgggg

SEQ ID NO: 4415059 - DNA, 25 bp, Homo sapien
actggacgggagtttcccagctgga

SEQ ID NO: 4415060 - DNA, 25 bp, Homo sapien
cagattccctgcgtggactggacgg

SEQ ID NO: 4415061 - DNA, 25 bp, Homo sapien
tgacttgtggctgactgctcaaggg

SEQ ID NO: 4415062 - DNA, 25 bp, Homo sapien
tctcggccaagctgcctgtgacatg

SEQ ID NO: 4415063 - DNA, 25 bp, Homo sapien
tacgatggctgtacccaggaagccg

SEQ ID NO: 4415064 - DNA, 25 bp, Homo sapien
tcaggagtccttcccgtgtcctctg

SEQ ID NO: 4415065 - DNA, 25 bp, Homo sapien
tctttcctacgatggctgtacccag

SEQ ID NO: 4415066 - DNA, 25 bp, Homo sapien
tgaggaaaggccctctttcctacga

SEQ ID NO: 4415067 - DNA, 25 bp, Homo sapien
tggagctctggctgcgtgctggctc

SEQ ID NO: 4415068 - DNA, 25 bp, Homo sapien
cagcccggaagcgctggtgcaggtg

SEQ ID NO: 4415069 - DNA, 25 bp, Homo sapien
gcgaggacgacctgtttttctgacc

SEQ ID NO: 4415070 - DNA, 25 bp, Homo sapien
ctctggctgcgtgctggctcccaga

SEQ ID NO: 4415071 - DNA, 25 bp, Homo sapien
gctgctgtttctcccgaggcggcca

SEQ ID NO: 4415072 - DNA, 25 bp, Homo sapien
ctcagccaggtaagacagcgacata

SEQ ID NO: 4415073 - DNA, 25 bp, Homo sapien
gcttgttgcttgtggctactcagcc

SEQ ID NO: 4415074 - DNA, 25 bp, Homo sapien
gagagccacagtgttctcccctcag

SEQ ID NO: 4415075 - DNA, 25 bp, Homo sapien
cgtgggtgaaagttcctctcccctg

SEQ ID NO: 4415076 - DNA, 25 bp, Homo sapien
gggtgaaagttcctctcccctgcag

SEQ ID NO: 4415077 - DNA, 25 bp, Homo sapien
tgggtgaaagttcctctcccctgca

SEQ ID NO: 4415078 - DNA, 25 bp, Homo sapien
gtgggtgaaagttcctctcccctgc

SEQ ID NO: 4415079 - DNA, 25 bp, Homo sapien
tggtccctgaagcattcaggtttcg

SEQ ID NO: 4415080 - DNA, 25 bp, Homo sapien
tttcgggtaaagccctgggcacagc

SEQ ID NO: 4415081 - DNA, 25 bp, Homo sapien
gtgagaaggcgagaggccctggagg

SEQ ID NO: 4415082 - DNA, 25 bp, Homo sapien
acagctctgcggccctcacattggg

SEQ ID NO: 4415083 - DNA, 25 bp, Homo sapien
tctggctgaactgtttccgaggctt

SEQ ID NO: 4415084 - DNA, 25 bp, Homo sapien
caccatttgggtggcaaaattgttc

SEQ ID NO: 4415085 - DNA, 25 bp, Homo sapien
ggtggcaaaattgttctggctgaac

SEQ ID NO: 4415086 - DNA, 25 bp, Homo sapien
ctccttgagtcaccatttgggtggc

SEQ ID NO: 4415087 - DNA, 25 bp, Homo sapien
aatgctgtctacactacagcagggg

SEQ ID NO: 4415088 - DNA, 25 bp, Homo sapien
cagcaggggacctgattggcagggt

SEQ ID NO: 4415089 - DNA, 25 bp, Homo sapien
agctgctcacggggaattcagcccc

SEQ ID NO: 4415090 - DNA, 25 bp, Homo sapien
tgctgtctacactacagcaggggac

SEQ ID NO: 4415091 - DNA, 25 bp, Homo sapien
actcggttagggagcctgtcctctg

SEQ ID NO: 4415092 - DNA, 25 bp, Homo sapien
gtggcttgttcctcacgctctggcc

SEQ ID NO: 4415093 - DNA, 25 bp, Homo sapien
cactggcggcgggatacagaactcg

SEQ ID NO: 4415094 - DNA, 25 bp, Homo sapien
ggccgtggcgccctggcactggcgg

SEQ ID NO: 4415095 - DNA, 25 bp, Homo sapien
agagtcctgcttccagtcgccgtca

SEQ ID NO: 4415096 - DNA, 25 bp, Homo sapien
ttccagtcgccgtcacttaagcccg

SEQ ID NO: 4415097 - DNA, 25 bp, Homo sapien
agagagtcctgcttccagtcgccgt

SEQ ID NO: 4415098 - DNA, 25 bp, Homo sapien
agtcgccgtcacttaagcccgacat

SEQ ID NO: 4415099 - DNA, 25 bp, Homo sapien
ggtttaattgttcttagaggccaca

SEQ ID NO: 4415100 - DNA, 25 bp, Homo sapien
aggtgggatcctcggaaggcttcca

SEQ ID NO: 4415101 - DNA, 25 bp, Homo sapien
accggcggccggaagactgaggtgg

SEQ ID NO: 4415102 - DNA, 25 bp, Homo sapien
tcaaatcctctagccccagtgatgg

SEQ ID NO: 4415103 - DNA, 25 bp, Homo sapien
gggtctggcttctcccacatggtgg

SEQ ID NO: 4415104 - DNA, 25 bp, Homo sapien
gcacctgtggcccatttttagccct

SEQ ID NO: 4415105 - DNA, 25 bp, Homo sapien
cacatggtggcctctaggagcacct

SEQ ID NO: 4415106 - DNA, 25 bp, Homo sapien
actttgtgtctgcttgcgcccaggc

SEQ ID NO: 4415107 - DNA, 25 bp, Homo sapien
caccataaccctttgcactttctgg

SEQ ID NO: 4415108 - DNA, 25 bp, Homo sapien
ttgaatccgtgatctattttgtaag

SEQ ID NO: 4415109 - DNA, 25 bp, Homo sapien
ttctggccctggccatggtacacca

SEQ ID NO: 4415110 - DNA, 25 bp, Homo sapien
aagatgaggttgatgggctgcacca

SEQ ID NO: 4415111 - DNA, 25 bp, Homo sapien
gaatctcttcgcataatctaataca

SEQ ID NO: 4415112 - DNA, 25 bp, Homo sapien
gaatgaatctcttcgcataatctaa

SEQ ID NO: 4415113 - DNA, 25 bp, Homo sapien
tcttcgcataatctaatacaaggtt

SEQ ID NO: 4415114 - DNA, 25 bp, Homo sapien
agaatgaatctcttcgcataatcta

SEQ ID NO: 4415115 - DNA, 25 bp, Homo sapien
gtacaaacaatcccacagcatttat

SEQ ID NO: 4415116 - DNA, 25 bp, Homo sapien
ttagtacaaacaatcccacagcatt

SEQ ID NO: 4415117 - DNA, 25 bp, Homo sapien
tagtacaaacaatcccacagcattt

SEQ ID NO: 4415118 - DNA, 25 bp, Homo sapien
ttttagtacaaacaatcccacagca

SEQ ID NO: 4415119 - DNA, 25 bp, Homo sapien
agtaaaatcattcgtgcacaatctg

SEQ ID NO: 4415120 - DNA, 25 bp, Homo sapien
cattagtaaaatcattcgtgcacaa

SEQ ID NO: 4415121 - DNA, 25 bp, Homo sapien
ttagtaaaatcattcgtgcacaatc

SEQ ID NO: 4415122 - DNA, 25 bp, Homo sapien
ctcattagtaaaatcattcgtgcac

SEQ ID NO: 4415123 - DNA, 25 bp, Homo sapien
gcccatcctcaatcgggcagcagtg

SEQ ID NO: 4415124 - DNA, 25 bp, Homo sapien
cttctgctttgccacacgatagccg

SEQ ID NO: 4415125 - DNA, 25 bp, Homo sapien
ccgtattggacctggctggtttcct

SEQ ID NO: 4415126 - DNA, 25 bp, Homo sapien
tcctcaatcgggcagcagtgtggta

SEQ ID NO: 4415127 - DNA, 25 bp, Homo sapien
ggttgtagccagtcttgccgactgc

SEQ ID NO: 4415128 - DNA, 25 bp, Homo sapien
caacagggaggacttgataaaggag

SEQ ID NO: 4415129 - DNA, 25 bp, Homo sapien
tgtagccagtcttgccgactgccat

SEQ ID NO: 4415130 - DNA, 25 bp, Homo sapien
tggatttttcgttatccaacaggga

SEQ ID NO: 4415131 - DNA, 25 bp, Homo sapien
ccgtccctcggaagctcatgtacac

SEQ ID NO: 4415132 - DNA, 25 bp, Homo sapien
accgtccctcggaagctcatgtaca

SEQ ID NO: 4415133 - DNA, 25 bp, Homo sapien
gtccctcggaagctcatgtacacac

SEQ ID NO: 4415134 - DNA, 25 bp, Homo sapien
cgtccctcggaagctcatgtacaca

SEQ ID NO: 4415135 - DNA, 25 bp, Homo sapien
cttttttgagtgtgtggctcacaaa

SEQ ID NO: 4415136 - DNA, 25 bp, Homo sapien
tttttgagtgtgtggctcacaaatt

SEQ ID NO: 4415137 - DNA, 25 bp, Homo sapien
ttgagtgtgtggctcacaaatttca

SEQ ID NO: 4415138 - DNA, 25 bp, Homo sapien
tgagtgtgtggctcacaaatttcac

SEQ ID NO: 4415139 - DNA, 25 bp, Homo sapien
gcctggacgtgatctccctagtctt

SEQ ID NO: 4415140 - DNA, 25 bp, Homo sapien
gacgtgatctccctagtctttgagc

SEQ ID NO: 4415141 - DNA, 25 bp, Homo sapien
cgcgcctggacgtgatctccctagt

SEQ ID NO: 4415142 - DNA, 25 bp, Homo sapien
tgatctccctagtctttgagctccc

SEQ ID NO: 4415143 - DNA, 25 bp, Homo sapien
gaacgatggtggtaggacccactgc

SEQ ID NO: 4415144 - DNA, 25 bp, Homo sapien
tgctggacccggccaggtgggtggc

SEQ ID NO: 4415145 - DNA, 25 bp, Homo sapien
gcctgaacgatggtggtaggaccca

SEQ ID NO: 4415146 - DNA, 25 bp, Homo sapien
ggcctgggcctgaacgatggtggta

SEQ ID NO: 4415147 - DNA, 25 bp, Homo sapien
agcagcgcatctgtggtccccgcat

SEQ ID NO: 4415148 - DNA, 25 bp, Homo sapien
tgcgtccatcgtccaccagtctgct

SEQ ID NO: 4415149 - DNA, 25 bp, Homo sapien
ccaggcagccccgttttctagggct

SEQ ID NO: 4415150 - DNA, 25 bp, Homo sapien
cctggtgactgggacgacttggcag

SEQ ID NO: 4415151 - DNA, 25 bp, Homo sapien
cactcagggcggaatgacacttaga

SEQ ID NO: 4415152 - DNA, 25 bp, Homo sapien
gcagatagcacttgattgcgccact

SEQ ID NO: 4415153 - DNA, 25 bp, Homo sapien
tcactgcaagctgggacttagcgca

SEQ ID NO: 4415154 - DNA, 25 bp, Homo sapien
agagaaggccctgtaatccggaggt

SEQ ID NO: 4415155 - DNA, 25 bp, Homo sapien
tctgggctccggaagctgctccgtt

SEQ ID NO: 4415156 - DNA, 25 bp, Homo sapien
cggagctgcttacagcaaagcatga

SEQ ID NO: 4415157 - DNA, 25 bp, Homo sapien
gggcccggagctgcttacagcaaag

SEQ ID NO: 4415158 - DNA, 25 bp, Homo sapien
tccgttgagctgaacgaatgggccc

SEQ ID NO: 4415159 - DNA, 25 bp, Homo sapien
tccatgacttacaaagcagcagaaa

SEQ ID NO: 4415160 - DNA, 25 bp, Homo sapien
cagaaatgctgcctcctcaaggaag

SEQ ID NO: 4415161 - DNA, 25 bp, Homo sapien
gctccaggccttgggccttataggg

SEQ ID NO: 4415162 - DNA, 25 bp, Homo sapien
ccagatgttgggagtgttctcctca

SEQ ID NO: 4415163 - DNA, 25 bp, Homo sapien
aggaagctcagactgtgggctttga

SEQ ID NO: 4415164 - DNA, 25 bp, Homo sapien
ccgccccgttgatatgtggtccaca

SEQ ID NO: 4415165 - DNA, 25 bp, Homo sapien
agctcagactgtgggctttgaacaa

SEQ ID NO: 4415166 - DNA, 25 bp, Homo sapien
cacacgagaagaccacaggaagctc

SEQ ID NO: 4415167 - DNA, 25 bp, Homo sapien
tgggtctgtgctcgtgcaagacagc

SEQ ID NO: 4415168 - DNA, 25 bp, Homo sapien
tgcgtgagatgtgtgggtctgtgct

SEQ ID NO: 4415169 - DNA, 25 bp, Homo sapien
tgctcgtgcaagacagcccggtgct

SEQ ID NO: 4415170 - DNA, 25 bp, Homo sapien
tcctctgttttctgcaggtttaaaa

SEQ ID NO: 4415171 - DNA, 25 bp, Homo sapien
actccaatggtgttgcgtattccct

SEQ ID NO: 4415172 - DNA, 25 bp, Homo sapien
tcctgtagggtgatggacaccacac

SEQ ID NO: 4415173 - DNA, 25 bp, Homo sapien
cctgctgaaggatgggcaagtccac

SEQ ID NO: 4415174 - DNA, 25 bp, Homo sapien
tggaggagattactgagagcctgct

SEQ ID NO: 4415175 - DNA, 25 bp, Homo sapien
gcctcggacagagggcggagcctcg

SEQ ID NO: 4415176 - DNA, 25 bp, Homo sapien
agggcctcggacagagggcggagcc

SEQ ID NO: 4415177 - DNA, 25 bp, Homo sapien
ggcggagcctcggtgcttgtcggag

SEQ ID NO: 4415178 - DNA, 25 bp, Homo sapien
gacagagggcggagcctcggtgctt

SEQ ID NO: 4415179 - DNA, 25 bp, Homo sapien
agcgctttccggggccgtgactcca

SEQ ID NO: 4415180 - DNA, 25 bp, Homo sapien
tggggcctcgtaggcgctccgggca

SEQ ID NO: 4415181 - DNA, 25 bp, Homo sapien
tccgggcacacggacagatcccggg

SEQ ID NO: 4415182 - DNA, 25 bp, Homo sapien
accgtctcggcagctgccctctcgg

SEQ ID NO: 4415183 - DNA, 25 bp, Homo sapien
agcctgtcctggtcggcgcccagcc

SEQ ID NO: 4415184 - DNA, 25 bp, Homo sapien
ccagcaccgtttggccattgtagag

SEQ ID NO: 4415185 - DNA, 25 bp, Homo sapien
ggcctagcacgagcttctggcagga

SEQ ID NO: 4415186 - DNA, 25 bp, Homo sapien
gatcagcccatgttattctggccag

SEQ ID NO: 4415187 - DNA, 25 bp, Homo sapien
cattgtagaggcctagcacgagctt

SEQ ID NO: 4415188 - DNA, 25 bp, Homo sapien
gtggcctctgcctccacgtgggttt

SEQ ID NO: 4415189 - DNA, 25 bp, Homo sapien
ccacgtgggtttgaacagaggccat

SEQ ID NO: 4415190 - DNA, 25 bp, Homo sapien
ctgctctggagcacacagtgtctcc

SEQ ID NO: 4415191 - DNA, 25 bp, Homo sapien
tgctctggagcacacagtgtctccc

SEQ ID NO: 4415192 - DNA, 25 bp, Homo sapien
ccaaggcttcctctgaggctgcatc

SEQ ID NO: 4415193 - DNA, 25 bp, Homo sapien
aaggcttcctctgaggctgcatcgg

SEQ ID NO: 4415194 - DNA, 25 bp, Homo sapien
ccaggcggccaaggcttcctctgag

SEQ ID NO: 4415195 - DNA, 25 bp, Homo sapien
cttcctctgaggctgcatcgggcat

SEQ ID NO: 4415196 - DNA, 25 bp, Homo sapien
gagcgttcgggatcttttggtatcc

SEQ ID NO: 4415197 - DNA, 25 bp, Homo sapien
tttggtatcctcatagccagtctat

SEQ ID NO: 4415198 - DNA, 25 bp, Homo sapien
cgtcagggccacagttgagcgttcg

SEQ ID NO: 4415199 - DNA, 25 bp, Homo sapien
gaggaacacccttctcgtgagtggg

SEQ ID NO: 4415200 - DNA, 25 bp, Homo sapien
ccaaccacagggatgaggctggggc

SEQ ID NO: 4415201 - DNA, 25 bp, Homo sapien
tcaaccaaccacagggatgaggctg

SEQ ID NO: 4415202 - DNA, 25 bp, Homo sapien
aaccacagggatgaggctggggctg

SEQ ID NO: 4415203 - DNA, 25 bp, Homo sapien
ccacagggatgaggctggggctggc

SEQ ID NO: 4415204 - DNA, 25 bp, Homo sapien
tggccatacggtgatgaaaagtggc

SEQ ID NO: 4415205 - DNA, 25 bp, Homo sapien
agtagtcatggccatacggtgatga

SEQ ID NO: 4415206 - DNA, 25 bp, Homo sapien
cagcagcagcggtttagtttttcct

SEQ ID NO: 4415207 - DNA, 25 bp, Homo sapien
cagcagcggtttagtttttcctgac

SEQ ID NO: 4415208 - DNA, 25 bp, Homo sapien
ttcaggctccgtgtgacgtgaggaa

SEQ ID NO: 4415209 - DNA, 25 bp, Homo sapien
agctgtgcttcaggctccgtgtgac

SEQ ID NO: 4415210 - DNA, 25 bp, Homo sapien
tagccctgagcacgccctgaggaag

SEQ ID NO: 4415211 - DNA, 25 bp, Homo sapien
tttagccctgagcacgccctgagga

SEQ ID NO: 4415212 - DNA, 25 bp, Homo sapien
ccctcggaggttgcgcataaacaat

SEQ ID NO: 4415213 - DNA, 25 bp, Homo sapien
ctcctcggaaccctcggaggttgcg

SEQ ID NO: 4415214 - DNA, 25 bp, Homo sapien
gcgcagagcctagcgcgattcgcgc

SEQ ID NO: 4415215 - DNA, 25 bp, Homo sapien
tcgcgcgcgcagagcctagcgcgat

SEQ ID NO: 4415216 - DNA, 25 bp, Homo sapien
gtccgggcccctcgcggtaatcaga

SEQ ID NO: 4415217 - DNA, 25 bp, Homo sapien
ccctcgcggtaatcagaagcagctc

SEQ ID NO: 4415218 - DNA, 25 bp, Homo sapien
gggcccctcgcggtaatcagaagca

SEQ ID NO: 4415219 - DNA, 25 bp, Homo sapien
cccctcgcggtaatcagaagcagct

SEQ ID NO: 4415220 - DNA, 25 bp, Homo sapien
ttcgattctattggcacgctaccca

SEQ ID NO: 4415221 - DNA, 25 bp, Homo sapien
cgattctattggcacgctacccagt

SEQ ID NO: 4415222 - DNA, 25 bp, Homo sapien
tgaattcgattctattggcacgcta

SEQ ID NO: 4415223 - DNA, 25 bp, Homo sapien
aattcgattctattggcacgctacc

SEQ ID NO: 4415224 - DNA, 25 bp, Homo sapien
tgtaccctgatgtagtaaaatggct

SEQ ID NO: 4415225 - DNA, 25 bp, Homo sapien
taacatccgtgccagcctcattatc

SEQ ID NO: 4415226 - DNA, 25 bp, Homo sapien
caaggacaccgtatgttaacatccg

SEQ ID NO: 4415227 - DNA, 25 bp, Homo sapien
tgcaaagttgattaaggcagtgcct

SEQ ID NO: 4415228 - DNA, 25 bp, Homo sapien
acacgggcgagttcagcaccgcagg

SEQ ID NO: 4415229 - DNA, 25 bp, Homo sapien
taaaatcacagctacacgggcgagt

SEQ ID NO: 4415230 - DNA, 25 bp, Homo sapien
tagagctgtcggcagctctaaaatc

SEQ ID NO: 4415231 - DNA, 25 bp, Homo sapien
gctgtcggcagctctaaaatcacag

SEQ ID NO: 4415232 - DNA, 25 bp, Homo sapien
tgggcttggttcttccgcgttcgca

SEQ ID NO: 4415233 - DNA, 25 bp, Homo sapien
tccccattggcggaaggtggcacgt

SEQ ID NO: 4415234 - DNA, 25 bp, Homo sapien
ttggcaccgggctcggctcagaatg

SEQ ID NO: 4415235 - DNA, 25 bp, Homo sapien
gtctatcaagacgagcgggcgcttc

SEQ ID NO: 4415236 - DNA, 25 bp, Homo sapien
caggctcatcgggtcgtccacaggg

SEQ ID NO: 4415237 - DNA, 25 bp, Homo sapien
gagtagcagtcgttcatgttgtata

SEQ ID NO: 4415238 - DNA, 25 bp, Homo sapien
gtagcagtcgttcatgttgtatagc

SEQ ID NO: 4415239 - DNA, 25 bp, Homo sapien
catgttgtatagcaggctcatcggg

SEQ ID NO: 4415240 - DNA, 25 bp, Homo sapien
gctacggatctcctagtgacagccc

SEQ ID NO: 4415241 - DNA, 25 bp, Homo sapien
tcacgcacagctcaatctacagcag

SEQ ID NO: 4415242 - DNA, 25 bp, Homo sapien
taaatagctcatacgaaagtcaccg

SEQ ID NO: 4415243 - DNA, 25 bp, Homo sapien
aaagtcaccgtctgggctacggatc

SEQ ID NO: 4415244 - DNA, 25 bp, Homo sapien
ttgctgtcatttgacattaactcag

SEQ ID NO: 4415245 - DNA, 25 bp, Homo sapien
catttgacattaactcagaagggaa

SEQ ID NO: 4415246 - DNA, 25 bp, Homo sapien
cattaactcagaagggaattcagaa

SEQ ID NO: 4415247 - DNA, 25 bp, Homo sapien
tcagccacacagtgctttgctgtca

SEQ ID NO: 4415248 - DNA, 25 bp, Homo sapien
caaagattgggcaaaccctggcgtc

SEQ ID NO: 4415249 - DNA, 25 bp, Homo sapien
tttggatctccaacagcagtgctac

SEQ ID NO: 4415250 - DNA, 25 bp, Homo sapien
catcacagggttgaaggcacagggt

SEQ ID NO: 4415251 - DNA, 25 bp, Homo sapien
gggtaacaccgcgaagtaagcatgc

SEQ ID NO: 4415252 - DNA, 25 bp, Homo sapien
cacttaaaagattccgtgaatttgt

SEQ ID NO: 4415253 - DNA, 25 bp, Homo sapien
gcacttaaaagattccgtgaatttg

SEQ ID NO: 4415254 - DNA, 25 bp, Homo sapien
gacatctctgccactatacaagaaa

SEQ ID NO: 4415255 - DNA, 25 bp, Homo sapien
taaataacgaatatcacagtccaag

SEQ ID NO: 4415256 - DNA, 25 bp, Homo sapien
ggcaaagtctgcttagattgggcaa

SEQ ID NO: 4415257 - DNA, 25 bp, Homo sapien
cgctccccatggtgggaatagtata

SEQ ID NO: 4415258 - DNA, 25 bp, Homo sapien
tgggttcagttataacatagcataa

SEQ ID NO: 4415259 - DNA, 25 bp, Homo sapien
gttttattataatcttatacagtct

SEQ ID NO: 4415260 - DNA, 25 bp, Homo sapien
catgttttattataatcttatacag

SEQ ID NO: 4415261 - DNA, 25 bp, Homo sapien
cttcagacatgttttattataatct

SEQ ID NO: 4415262 - DNA, 25 bp, Homo sapien
gacatgttttattataatcttatac

SEQ ID NO: 4415263 - DNA, 25 bp, Homo sapien
ggttgggaccagagcgcgcttccct

SEQ ID NO: 4415264 - DNA, 25 bp, Homo sapien
gtccgagcggactacgcgcgggtcc

SEQ ID NO: 4415265 - DNA, 25 bp, Homo sapien
aggtccgcgggtagcctgcgacggg

SEQ ID NO: 4415266 - DNA, 25 bp, Homo sapien
ccctcagggcttcctccgggtatga

SEQ ID NO: 4415267 - DNA, 25 bp, Homo sapien
tggaaaggccgcactccctggcgtt

SEQ ID NO: 4415268 - DNA, 25 bp, Homo sapien
tggaaacggctgtacacatgctgga

SEQ ID NO: 4415269 - DNA, 25 bp, Homo sapien
catgctggagcagcactcatttgga

SEQ ID NO: 4415270 - DNA, 25 bp, Homo sapien
cggattgctcctcgggttcccagtg

SEQ ID NO: 4415271 - DNA, 25 bp, Homo sapien
tagatagaggactgggttatttttc

SEQ ID NO: 4415272 - DNA, 25 bp, Homo sapien
catatgcaaaaggagtgaacggagg

SEQ ID NO: 4415273 - DNA, 25 bp, Homo sapien
gcatctctgtgctccagtagataga

SEQ ID NO: 4415274 - DNA, 25 bp, Homo sapien
tgaacggaggacacctatgtgcctg

SEQ ID NO: 4415275 - DNA, 25 bp, Homo sapien
tagccatgcagcgtctcagtaggag

SEQ ID NO: 4415276 - DNA, 25 bp, Homo sapien
aacttacagcgttgtccctaggtgg

SEQ ID NO: 4415277 - DNA, 25 bp, Homo sapien
aatgctaagatccatgctaggcgcc

SEQ ID NO: 4415278 - DNA, 25 bp, Homo sapien
taatcatatacgtggaagtacacac

SEQ ID NO: 4415279 - DNA, 25 bp, Homo sapien
tctctaaaagtcattgtcaggtaca

SEQ ID NO: 4415280 - DNA, 25 bp, Homo sapien
aaagccaggacttgacaaacttgtc

SEQ ID NO: 4415281 - DNA, 25 bp, Homo sapien
aagtcattgtcaggtacaaagccag

SEQ ID NO: 4415282 - DNA, 25 bp, Homo sapien
cattgtcaggtacaaagccaggact

SEQ ID NO: 4415283 - DNA, 25 bp, Homo sapien
gatgcatggattagaccacggcctt

SEQ ID NO: 4415284 - DNA, 25 bp, Homo sapien
aatgttcagtatcgggctaatgatc

SEQ ID NO: 4415285 - DNA, 25 bp, Homo sapien
gctaatgatcgatggatatcactca

SEQ ID NO: 4415286 - DNA, 25 bp, Homo sapien
ccacggccttaaactttgtacatag

SEQ ID NO: 4415287 - DNA, 25 bp, Homo sapien
aaatggcttgccgtgtttgaacaca

SEQ ID NO: 4415288 - DNA, 25 bp, Homo sapien
cgtcaatgctccttaccagttaggg

SEQ ID NO: 4415289 - DNA, 25 bp, Homo sapien
tctatcagtattaatgggctcggga

SEQ ID NO: 4415290 - DNA, 25 bp, Homo sapien
ggtgccgcccactcttgacgtgata

SEQ ID NO: 4415291 - DNA, 25 bp, Homo sapien
tagactactagaagcaatcattggc

SEQ ID NO: 4415292 - DNA, 25 bp, Homo sapien
tagttgcttccagccattgcatggc

SEQ ID NO: 4415293 - DNA, 25 bp, Homo sapien
gtgtgactctgggtttaacaaacag

SEQ ID NO: 4415294 - DNA, 25 bp, Homo sapien
tctgtgctcactaaggtgcgttcgg

SEQ ID NO: 4415295 - DNA, 25 bp, Homo sapien
tctgtttctcgagctagaagcctct

SEQ ID NO: 4415296 - DNA, 25 bp, Homo sapien
gaaagacatcaaacgtcaggctagc

SEQ ID NO: 4415297 - DNA, 25 bp, Homo sapien
ggtacaaattgccagtcatctctag

SEQ ID NO: 4415298 - DNA, 25 bp, Homo sapien
gaagtgccccagatattgaatatgt

SEQ ID NO: 4415299 - DNA, 25 bp, Homo sapien
gacctgaaggccaccgagggaatta

SEQ ID NO: 4415300 - DNA, 25 bp, Homo sapien
gtaagaggcgctattctagtgggac

SEQ ID NO: 4415301 - DNA, 25 bp, Homo sapien
tactcgttacctttggacagcttta

SEQ ID NO: 4415302 - DNA, 25 bp, Homo sapien
ctcagctacagggtttactcgttac

SEQ ID NO: 4415303 - DNA, 25 bp, Homo sapien
gaaatgaactcttaatcaaaactcc

SEQ ID NO: 4415304 - DNA, 25 bp, Homo sapien
gcttcccagaatattagggctagaa

SEQ ID NO: 4415305 - DNA, 25 bp, Homo sapien
aaaaaattagtactatatgcaagac

SEQ ID NO: 4415306 - DNA, 25 bp, Homo sapien
ggctagaaaggaacagtgtttttca

SEQ ID NO: 4415307 - DNA, 25 bp, Homo sapien
ggaacactgtagtgcttatagcttg

SEQ ID NO: 4415308 - DNA, 25 bp, Homo sapien
acattaaggaacactgtagtgctta

SEQ ID NO: 4415309 - DNA, 25 bp, Homo sapien
taaggaacactgtagtgcttatagc

SEQ ID NO: 4415310 - DNA, 25 bp, Homo sapien
tgtagtgcttatagcttgtgatgtc

SEQ ID NO: 4415311 - DNA, 25 bp, Homo sapien
tagctggtaccgctagtctttctag

SEQ ID NO: 4415312 - DNA, 25 bp, Homo sapien
aaggtctccgaccttggagtctctg

SEQ ID NO: 4415313 - DNA, 25 bp, Homo sapien
cacgtgatctgtcagttcgcggaga

SEQ ID NO: 4415314 - DNA, 25 bp, Homo sapien
ttccgccggagctgaggaccaggtt

SEQ ID NO: 4415315 - DNA, 25 bp, Homo sapien
tcaagattgacgcttgttggcagca

SEQ ID NO: 4415316 - DNA, 25 bp, Homo sapien
gattgacgcttgttggcagcaaggc

SEQ ID NO: 4415317 - DNA, 25 bp, Homo sapien
caagattgacgcttgttggcagcaa

SEQ ID NO: 4415318 - DNA, 25 bp, Homo sapien
aagattgacgcttgttggcagcaag

SEQ ID NO: 4415319 - DNA, 25 bp, Homo sapien
gagcctcgagtgttaagtaccattt

SEQ ID NO: 4415320 - DNA, 25 bp, Homo sapien
cgagtgttaagtaccatttgggaat

SEQ ID NO: 4415321 - DNA, 25 bp, Homo sapien
gggtgggagtagcagcgtgggaggg

SEQ ID NO: 4415322 - DNA, 25 bp, Homo sapien
cctctgaagagcctcgagtgttaag

SEQ ID NO: 4415323 - DNA, 25 bp, Homo sapien
tgaaatcatcatctcggtatgctga

SEQ ID NO: 4415324 - DNA, 25 bp, Homo sapien
gctgaaatcatcatctcggtatgct

SEQ ID NO: 4415325 - DNA, 25 bp, Homo sapien
ctgaaatcatcatctcggtatgctg

SEQ ID NO: 4415326 - DNA, 25 bp, Homo sapien
aaatcatcatctcggtatgctgata

SEQ ID NO: 4415327 - DNA, 25 bp, Homo sapien
tcacaaggggccttggcaataggag

SEQ ID NO: 4415328 - DNA, 25 bp, Homo sapien
cccagagctgagtgcgagagagctc

SEQ ID NO: 4415329 - DNA, 25 bp, Homo sapien
ctgagtgcgagagagctccacagag

SEQ ID NO: 4415330 - DNA, 25 bp, Homo sapien
agagctgagtgcgagagagctccac

SEQ ID NO: 4415331 - DNA, 25 bp, Homo sapien
aaacgttgtcttgatctctgcctag

SEQ ID NO: 4415332 - DNA, 25 bp, Homo sapien
tcaatgaagtacatttgcctctggc

SEQ ID NO: 4415333 - DNA, 25 bp, Homo sapien
tctgcctagtagtagttgagccctc

SEQ ID NO: 4415334 - DNA, 25 bp, Homo sapien
tcagtcgcccaaacatgaggagaga

SEQ ID NO: 4415335 - DNA, 25 bp, Homo sapien
ttcctcagccataagcaaacgggtt

SEQ ID NO: 4415336 - DNA, 25 bp, Homo sapien
tgaacggagccattagcaaggtctg

SEQ ID NO: 4415337 - DNA, 25 bp, Homo sapien
tcaggaccagttgggtgtcgtgaac

SEQ ID NO: 4415338 - DNA, 25 bp, Homo sapien
tctgtaggattcaaggacttgggca

SEQ ID NO: 4415339 - DNA, 25 bp, Homo sapien
tataatttggtatgcctcagctgtc

SEQ ID NO: 4415340 - DNA, 25 bp, Homo sapien
agcttctaaaatatccggcaggata

SEQ ID NO: 4415341 - DNA, 25 bp, Homo sapien
cttcaaaaatgtctggtgaccactt

SEQ ID NO: 4415342 - DNA, 25 bp, Homo sapien
tcactctagagatgatcaatcaaca

SEQ ID NO: 4415343 - DNA, 25 bp, Homo sapien
aagtttagaaatatcctaatctatt

SEQ ID NO: 4415344 - DNA, 25 bp, Homo sapien
acaaggcaaccatctggcttatgct

SEQ ID NO: 4415345 - DNA, 25 bp, Homo sapien
tctggcttatgctatataatacttc

SEQ ID NO: 4415346 - DNA, 25 bp, Homo sapien
gcacttgcagcttttgaggtctcag

SEQ ID NO: 4415347 - DNA, 25 bp, Homo sapien
cacgcgtgccctgttgctgaatgta

SEQ ID NO: 4415348 - DNA, 25 bp, Homo sapien
cactaaagcagtgatcgggaaggct

SEQ ID NO: 4415349 - DNA, 25 bp, Homo sapien
cagcacttgtccgtagggtcacacg

SEQ ID NO: 4415350 - DNA, 25 bp, Homo sapien
tgttgcgtatcccaaggcactgaag

SEQ ID NO: 4415351 - DNA, 25 bp, Homo sapien
tatagcctccctgagatcatagaga

SEQ ID NO: 4415352 - DNA, 25 bp, Homo sapien
tctagttaccctaaatcctgtcagg

SEQ ID NO: 4415353 - DNA, 25 bp, Homo sapien
tcattgcaggctttgtaaactcggg

SEQ ID NO: 4415354 - DNA, 25 bp, Homo sapien
tagggtgtgttatgaacgaacctcc

SEQ ID NO: 4415355 - DNA, 25 bp, Homo sapien
tctcttggagaagcgaaattgcctg

SEQ ID NO: 4415356 - DNA, 25 bp, Homo sapien
gcttttaccacctagatgccagtag

SEQ ID NO: 4415357 - DNA, 25 bp, Homo sapien
gaaccactggcttagtctgtaggtg

SEQ ID NO: 4415358 - DNA, 25 bp, Homo sapien
cccttgagctgtgacgaccataaat

SEQ ID NO: 4415359 - DNA, 25 bp, Homo sapien
ggagagggttggagacgctgtgaag

SEQ ID NO: 4415360 - DNA, 25 bp, Homo sapien
gaaggacagacatcgtgaaaagctg

SEQ ID NO: 4415361 - DNA, 25 bp, Homo sapien
cactggggatctgagcaacccagtc

SEQ ID NO: 4415362 - DNA, 25 bp, Homo sapien
atctgagcaacccagtctgagggag

SEQ ID NO: 4415363 - DNA, 25 bp, Homo sapien
ctctttgttggtagagtgtcttgct

SEQ ID NO: 4415364 - DNA, 25 bp, Homo sapien
aatctctttgttggtagagtgtctt

SEQ ID NO: 4415365 - DNA, 25 bp, Homo sapien
gctgctcacttatcagagtgttgtc

SEQ ID NO: 4415366 - DNA, 25 bp, Homo sapien
ggctgctcacttatcagagtgttgt

SEQ ID NO: 4415367 - DNA, 25 bp, Homo sapien
catgtttgcccatagtagatgctca

SEQ ID NO: 4415368 - DNA, 25 bp, Homo sapien
gactcatgcatgtttagatttccca

SEQ ID NO: 4415369 - DNA, 25 bp, Homo sapien
ggattgggaaatgctgcccgccctg

SEQ ID NO: 4415370 - DNA, 25 bp, Homo sapien
cctcctatggttgtggagatcagcg

SEQ ID NO: 4415371 - DNA, 25 bp, Homo sapien
catctttacttaactggctgcgagg

SEQ ID NO: 4415372 - DNA, 25 bp, Homo sapien
tgttgaccacgtatgagaaatccca

SEQ ID NO: 4415373 - DNA, 25 bp, Homo sapien
tgttttccaaacgtagctgcacgta

SEQ ID NO: 4415374 - DNA, 25 bp, Homo sapien
gaaatcccattgctctacattgtag

SEQ ID NO: 4415375 - DNA, 25 bp, Homo sapien
ccttgattaaatcgctcgctttctg

SEQ ID NO: 4415376 - DNA, 25 bp, Homo sapien
gattaaatcgctcgctttctgcttc

SEQ ID NO: 4415377 - DNA, 25 bp, Homo sapien
ttgattaaatcgctcgctttctgct

SEQ ID NO: 4415378 - DNA, 25 bp, Homo sapien
tgccttgattaaatcgctcgctttc

SEQ ID NO: 4415379 - DNA, 25 bp, Homo sapien
aacagataggtagtgtgctgatgtt

SEQ ID NO: 4415380 - DNA, 25 bp, Homo sapien
acagataggtagtgtgctgatgttg

SEQ ID NO: 4415381 - DNA, 25 bp, Homo sapien
tagagctttctgtactagtacatcc

SEQ ID NO: 4415382 - DNA, 25 bp, Homo sapien
cacagtgttgagcagtagatcccca

SEQ ID NO: 4415383 - DNA, 25 bp, Homo sapien
gcacacagctcagtagtgataagta

SEQ ID NO: 4415384 - DNA, 25 bp, Homo sapien
gccacttgcgctcccacttaaggaa

SEQ ID NO: 4415385 - DNA, 25 bp, Homo sapien
gcgggcgcgccgctgcatccccatc

SEQ ID NO: 4415386 - DNA, 25 bp, Homo sapien
gggcgggcgcgccgctgcatcccca

SEQ ID NO: 4415387 - DNA, 25 bp, Homo sapien
cccaggggcgggcgcgccgctgcat

SEQ ID NO: 4415388 - DNA, 25 bp, Homo sapien
caggggcgggcgcgccgctgcatcc

SEQ ID NO: 4415389 - DNA, 25 bp, Homo sapien
ttttcagagagacaaacgtaagccc

SEQ ID NO: 4415390 - DNA, 25 bp, Homo sapien
gacgggattgcactgatgagttcca

SEQ ID NO: 4415391 - DNA, 25 bp, Homo sapien
tcagctgagaatccaccaaactagg

SEQ ID NO: 4415392 - DNA, 25 bp, Homo sapien
gattccaatctacttaccagctgtg

SEQ ID NO: 4415393 - DNA, 25 bp, Homo sapien
caaaacaaaagcagcttggcagatt

SEQ ID NO: 4415394 - DNA, 25 bp, Homo sapien
aaaacaaaagcagcttggcagatta

SEQ ID NO: 4415395 - DNA, 25 bp, Homo sapien
caaaagcagcttggcagattattca

SEQ ID NO: 4415396 - DNA, 25 bp, Homo sapien
aacaaaagcagcttggcagattatt

SEQ ID NO: 4415397 - DNA, 25 bp, Homo sapien
gaacattagaaatactactgtaagt

SEQ ID NO: 4415398 - DNA, 25 bp, Homo sapien
aatctgaacattgctcatgtgtaac

SEQ ID NO: 4415399 - DNA, 25 bp, Homo sapien
gccttggcataaatacaacttagga

SEQ ID NO: 4415400 - DNA, 25 bp, Homo sapien
tatgttttcccatctcaaattgaac

SEQ ID NO: 4415401 - DNA, 25 bp, Homo sapien
gctaactctgcttatccattctggt

SEQ ID NO: 4415402 - DNA, 25 bp, Homo sapien
tataggaccatgaaagctaactctg

SEQ ID NO: 4415403 - DNA, 25 bp, Homo sapien
gtaaattggaatagtcatgaccgca

SEQ ID NO: 4415404 - DNA, 25 bp, Homo sapien
catgaccgcagaaggaatattcttc

SEQ ID NO: 4415405 - DNA, 25 bp, Homo sapien
taaattgacaggcaaatgtaaagca

SEQ ID NO: 4415406 - DNA, 25 bp, Homo sapien
tacagttacattaccaaatatgtct

SEQ ID NO: 4415407 - DNA, 25 bp, Homo sapien
aagcaagtccttgttggtgtacaga

SEQ ID NO: 4415408 - DNA, 25 bp, Homo sapien
ccttgttggtgtacagaacaaatta

SEQ ID NO: 4415409 - DNA, 25 bp, Homo sapien
ggcatcctttgtgcaaactggccag

SEQ ID NO: 4415410 - DNA, 25 bp, Homo sapien
agcagcacccagatggttccgtcag

SEQ ID NO: 4415411 - DNA, 25 bp, Homo sapien
taactatgggcaaaggcgatcctaa

SEQ ID NO: 4415412 - DNA, 25 bp, Homo sapien
ggtcacgtcagctaaagagaaagca

SEQ ID NO: 4415413 - DNA, 25 bp, Homo sapien
aagaacttctgaacatggacaattg

SEQ ID NO: 4415414 - DNA, 25 bp, Homo sapien
aggtccaaggccaccgctgcttggg

SEQ ID NO: 4415415 - DNA, 25 bp, Homo sapien
ggacaattgtccagcccagtcaggt

SEQ ID NO: 4415416 - DNA, 25 bp, Homo sapien
ctgtgccatccgcttgacctgggca

SEQ ID NO: 4415417 - DNA, 25 bp, Homo sapien
tctggattgaaataatctttgggct

SEQ ID NO: 4415418 - DNA, 25 bp, Homo sapien
tatggcaaccgtctggattgaaata

SEQ ID NO: 4415419 - DNA, 25 bp, Homo sapien
gattgaaataatctttgggcttttc

SEQ ID NO: 4415420 - DNA, 25 bp, Homo sapien
gaacagatatggcaaccgtctggat

SEQ ID NO: 4415421 - DNA, 25 bp, Homo sapien
gacagtgtgggcagacgcaggggca

SEQ ID NO: 4415422 - DNA, 25 bp, Homo sapien
aggtggtgggcacacgacagtgtgg

SEQ ID NO: 4415423 - DNA, 25 bp, Homo sapien
caagatgcaggtggtgggcacacga

SEQ ID NO: 4415424 - DNA, 25 bp, Homo sapien
gcacacgacagtgtgggcagacgca

SEQ ID NO: 4415425 - DNA, 25 bp, Homo sapien
tgtctccatccaccagaggctcggg

SEQ ID NO: 4415426 - DNA, 25 bp, Homo sapien
tctccatccaccagaggctcgggga

SEQ ID NO: 4415427 - DNA, 25 bp, Homo sapien
ctgtctccatccaccagaggctcgg

SEQ ID NO: 4415428 - DNA, 25 bp, Homo sapien
ccatccaccagaggctcggggagag

SEQ ID NO: 4415429 - DNA, 25 bp, Homo sapien
agcccgggctgagtgacgggtccct

SEQ ID NO: 4415430 - DNA, 25 bp, Homo sapien
cctgtggtgtttggtggcatctctg

SEQ ID NO: 4415431 - DNA, 25 bp, Homo sapien
gatgacatctcatagcgcccttgtt

SEQ ID NO: 4415432 - DNA, 25 bp, Homo sapien
agagccgcctcagcacgttcagcag

SEQ ID NO: 4415433 - DNA, 25 bp, Homo sapien
agtgataccagctcaaacgcgggca

SEQ ID NO: 4415434 - DNA, 25 bp, Homo sapien
caaaacagggtcaaagcttcatacg

SEQ ID NO: 4415435 - DNA, 25 bp, Homo sapien
tctgaccgcatcaaagggagtttac

SEQ ID NO: 4415436 - DNA, 25 bp, Homo sapien
tggacgatagagtgcaggcttctgc

SEQ ID NO: 4415437 - DNA, 25 bp, Homo sapien
gcttcccgccttcgatctcataagg

SEQ ID NO: 4415438 - DNA, 25 bp, Homo sapien
catcagagatccgagctgctcggcc

SEQ ID NO: 4415439 - DNA, 25 bp, Homo sapien
tgttccaaagcttcccgccttcgat

SEQ ID NO: 4415440 - DNA, 25 bp, Homo sapien
ttcgatctcataaggcggccacctg

SEQ ID NO: 4415441 - DNA, 25 bp, Homo sapien
ccctgacacccacatgaaagaggaa

SEQ ID NO: 4415442 - DNA, 25 bp, Homo sapien
ggaaaagaggcgcttccccatctct

SEQ ID NO: 4415443 - DNA, 25 bp, Homo sapien
ttccgaggcagacgcgaaaccctgc

SEQ ID NO: 4415444 - DNA, 25 bp, Homo sapien
tcacctttgctttcaaacatccagt

SEQ ID NO: 4415445 - DNA, 25 bp, Homo sapien
tgtatttaggtttcgtgacttgtca

SEQ ID NO: 4415446 - DNA, 25 bp, Homo sapien
cacaagcgtttgttgagtgttgcga

SEQ ID NO: 4415447 - DNA, 25 bp, Homo sapien
actccttccacaagcgtttgttgag

SEQ ID NO: 4415448 - DNA, 25 bp, Homo sapien
cccagggtagggtagtcagacccag

SEQ ID NO: 4415449 - DNA, 25 bp, Homo sapien
cgtgtggttttaccgccaaatgaat

SEQ ID NO: 4415450 - DNA, 25 bp, Homo sapien
ctgggtgctggaaacggtgagggct

SEQ ID NO: 4415451 - DNA, 25 bp, Homo sapien
ctggaaacggtgagggcttggtgat

SEQ ID NO: 4415452 - DNA, 25 bp, Homo sapien
cttggtgatgtaatagggttcgtgt

SEQ ID NO: 4415453 - DNA, 25 bp, Homo sapien
gaagtagctactgtgatcctgaagg

SEQ ID NO: 4415454 - DNA, 25 bp, Homo sapien
tccataaagggcaacacgagagcta

SEQ ID NO: 4415455 - DNA, 25 bp, Homo sapien
tttccatgcaaagcgaagggacttc

SEQ ID NO: 4415456 - DNA, 25 bp, Homo sapien
gatgcatagtcttaccctcaatggg

SEQ ID NO: 4415457 - DNA, 25 bp, Homo sapien
ccttgggcccatccttcttcctgtc

SEQ ID NO: 4415458 - DNA, 25 bp, Homo sapien
ctccttgggcccatccttcttcctg

SEQ ID NO: 4415459 - DNA, 25 bp, Homo sapien
tcctccttgggcccatccttcttcc

SEQ ID NO: 4415460 - DNA, 25 bp, Homo sapien
ctctgacgcaattctcctccttggg

SEQ ID NO: 4415461 - DNA, 25 bp, Homo sapien
ctatgtttgttcatcacaagcttcc

SEQ ID NO: 4415462 - DNA, 25 bp, Homo sapien
ttccttatgggttccctgtttgtgc

SEQ ID NO: 4415463 - DNA, 25 bp, Homo sapien
caaggtgtgtttccatccaatattc

SEQ ID NO: 4415464 - DNA, 25 bp, Homo sapien
gccacaggtctgtgcattttcaagg

SEQ ID NO: 4415465 - DNA, 25 bp, Homo sapien
ttattaaagcctgcctggcgagggc

SEQ ID NO: 4415466 - DNA, 25 bp, Homo sapien
tattgctagggtggccgtaattcct

SEQ ID NO: 4415467 - DNA, 25 bp, Homo sapien
tacagatcaaggaagtcactcgcca

SEQ ID NO: 4415468 - DNA, 25 bp, Homo sapien
taaacctgtgttccgccgtgtgagt

SEQ ID NO: 4415469 - DNA, 25 bp, Homo sapien
taaattgtcatcatttccatatgtt

SEQ ID NO: 4415470 - DNA, 25 bp, Homo sapien
catcatttccatatgtttaatagct

SEQ ID NO: 4415471 - DNA, 25 bp, Homo sapien
tgtcatcatttccatatgtttaata

SEQ ID NO: 4415472 - DNA, 25 bp, Homo sapien
ttaaattgtcatcatttccatatgt

SEQ ID NO: 4415473 - DNA, 25 bp, Homo sapien
tgcccaagttcttccggaggccaca

SEQ ID NO: 4415474 - DNA, 25 bp, Homo sapien
ggaggccacaacaataaatccaagc

SEQ ID NO: 4415475 - DNA, 25 bp, Homo sapien
tgagggatgtcagaccatagccttg

SEQ ID NO: 4415476 - DNA, 25 bp, Homo sapien
caattcaccgattaacaacctcggg

SEQ ID NO: 4415477 - DNA, 25 bp, Homo sapien
cccctcttggcaccgccgccgatgt

SEQ ID NO: 4415478 - DNA, 25 bp, Homo sapien
ctcttggcaccgccgccgatgttga

SEQ ID NO: 4415479 - DNA, 25 bp, Homo sapien
ttggcaccgccgccgatgttgacat

SEQ ID NO: 4415480 - DNA, 25 bp, Homo sapien
gcccctcttggcaccgccgccgatg

SEQ ID NO: 4415481 - DNA, 25 bp, Homo sapien
catgatgaccaactggccctgtgcg

SEQ ID NO: 4415482 - DNA, 25 bp, Homo sapien
tccctgaagcatatcccagcagggc

SEQ ID NO: 4415483 - DNA, 25 bp, Homo sapien
ttggtcccaaaggccacgtgggctg

SEQ ID NO: 4415484 - DNA, 25 bp, Homo sapien
caggtccctgaagcatatcccagca

SEQ ID NO: 4415485 - DNA, 25 bp, Homo sapien
gagcatgagttcctccgtctgcgaa

SEQ ID NO: 4415486 - DNA, 25 bp, Homo sapien
ttttttcaacgagcgggagcacagc

SEQ ID NO: 4415487 - DNA, 25 bp, Homo sapien
gctgtgcggcgtctcctaaaagcct

SEQ ID NO: 4415488 - DNA, 25 bp, Homo sapien
gccacactccgttgtgaagctcggt

SEQ ID NO: 4415489 - DNA, 25 bp, Homo sapien
acagaactcggtgttccctctgctc

SEQ ID NO: 4415490 - DNA, 25 bp, Homo sapien
agaactcggtgttccctctgctcac

SEQ ID NO: 4415491 - DNA, 25 bp, Homo sapien
aacgtaaattgatagcttgtcttcc

SEQ ID NO: 4415492 - DNA, 25 bp, Homo sapien
tagcttgtcttcctaggtgtgggaa

SEQ ID NO: 4415493 - DNA, 25 bp, Homo sapien
ggttgccatcctgctaccaggcacg

SEQ ID NO: 4415494 - DNA, 25 bp, Homo sapien
tcgccatcgggttgccatcctgcta

SEQ ID NO: 4415495 - DNA, 25 bp, Homo sapien
ctgaagtcgccatcgggttgccatc

SEQ ID NO: 4415496 - DNA, 25 bp, Homo sapien
tgctaccaggcacgtgtgaggccag

SEQ ID NO: 4415497 - DNA, 25 bp, Homo sapien
tctgtggcttggggtacctgctttg

SEQ ID NO: 4415498 - DNA, 25 bp, Homo sapien
ttgtctgtggcttggggtacctgct

SEQ ID NO: 4415499 - DNA, 25 bp, Homo sapien
ctgtggcttggggtacctgctttgc

SEQ ID NO: 4415500 - DNA, 25 bp, Homo sapien
tgtctgtggcttggggtacctgctt

SEQ ID NO: 4415501 - DNA, 25 bp, Homo sapien
gagccgctgaacgtcaccaggatcc

SEQ ID NO: 4415502 - DNA, 25 bp, Homo sapien
cccactgatggggttgtgatactgg

SEQ ID NO: 4415503 - DNA, 25 bp, Homo sapien
gcccactgatggggttgtgatactg

SEQ ID NO: 4415504 - DNA, 25 bp, Homo sapien
ccagagccgctgaacgtcaccagga

SEQ ID NO: 4415505 - DNA, 25 bp, Homo sapien
ggtgccagggccacaccacagccag

SEQ ID NO: 4415506 - DNA, 25 bp, Homo sapien
gcccccgaggggtgccagggccaca

SEQ ID NO: 4415507 - DNA, 25 bp, Homo sapien
gggtgccagggccacaccacagcca

SEQ ID NO: 4415508 - DNA, 25 bp, Homo sapien
gaggggtgccagggccacaccacag

SEQ ID NO: 4415509 - DNA, 25 bp, Homo sapien
gtcccgccagccacctctcagcgag

SEQ ID NO: 4415510 - DNA, 25 bp, Homo sapien
ccacctctcagcgaggccccgaggg

SEQ ID NO: 4415511 - DNA, 25 bp, Homo sapien
gggccatcgagagccgctgaactct

SEQ ID NO: 4415512 - DNA, 25 bp, Homo sapien
gagagccgctgaactctcatcctct

SEQ ID NO: 4415513 - DNA, 25 bp, Homo sapien
ttagtccaattggataacggattta

SEQ ID NO: 4415514 - DNA, 25 bp, Homo sapien
tggataacggatttagcatccctga

SEQ ID NO: 4415515 - DNA, 25 bp, Homo sapien
ccaattggataacggatttagcatc

SEQ ID NO: 4415516 - DNA, 25 bp, Homo sapien
gataacggatttagcatccctgaag

SEQ ID NO: 4415517 - DNA, 25 bp, Homo sapien
cactcaatcccaaagtcatcagcat

SEQ ID NO: 4415518 - DNA, 25 bp, Homo sapien
ttcctgaaggcaaccctccaactgt

SEQ ID NO: 4415519 - DNA, 25 bp, Homo sapien
tgtgtttcataaggagctcaaaagc

SEQ ID NO: 4415520 - DNA, 25 bp, Homo sapien
ccaaagtcatcagcatgaggcagga

SEQ ID NO: 4415521 - DNA, 25 bp, Homo sapien
gctgtaataaccaacatgtacgtga

SEQ ID NO: 4415522 - DNA, 25 bp, Homo sapien
gaaaggtgaagtgatgcgctcagca

SEQ ID NO: 4415523 - DNA, 25 bp, Homo sapien
aagtcatgtcttacacggcggctga

SEQ ID NO: 4415524 - DNA, 25 bp, Homo sapien
cggcggctgacaaagagaaagcttg

SEQ ID NO: 4415525 - DNA, 25 bp, Homo sapien
gctctcctcgctgctatcctcatgc

SEQ ID NO: 4415526 - DNA, 25 bp, Homo sapien
ctgctatcctcatgctgagcacagg

SEQ ID NO: 4415527 - DNA, 25 bp, Homo sapien
cacaggtctctcctagtcccaggtc

SEQ ID NO: 4415528 - DNA, 25 bp, Homo sapien
ggtctctcctagtcccaggtccctg

SEQ ID NO: 4415529 - DNA, 25 bp, Homo sapien
tgccgccgcgtcctctcagagcgag

SEQ ID NO: 4415530 - DNA, 25 bp, Homo sapien
cacagccggcgggaactacccgcca

SEQ ID NO: 4415531 - DNA, 25 bp, Homo sapien
gaccgccgctcggacaccgccgctg

SEQ ID NO: 4415532 - DNA, 25 bp, Homo sapien
ctcaactgccgcagcaggctccgac

SEQ ID NO: 4415533 - DNA, 25 bp, Homo sapien
cgcacagccgcaggggcgccgccgc

SEQ ID NO: 4415534 - DNA, 25 bp, Homo sapien
ggcgcacagccgcaggggcgccgcc

SEQ ID NO: 4415535 - DNA, 25 bp, Homo sapien
gcgcacagccgcaggggcgccgccg

SEQ ID NO: 4415536 - DNA, 25 bp, Homo sapien
ctggcgcacagccgcaggggcgccg

SEQ ID NO: 4415537 - DNA, 25 bp, Homo sapien
aattccgacacggagatctggtccg

SEQ ID NO: 4415538 - DNA, 25 bp, Homo sapien
tcgatggccgccacagtgttccggc

SEQ ID NO: 4415539 - DNA, 25 bp, Homo sapien
tgggtctcggccacgaattccgaca

SEQ ID NO: 4415540 - DNA, 25 bp, Homo sapien
ggcgccttgtagtcctcatgggtct

SEQ ID NO: 4415541 - DNA, 25 bp, Homo sapien
ccggagccgccgcgcaggccgcctc

SEQ ID NO: 4415542 - DNA, 25 bp, Homo sapien
ctgcggccggagccgccgcgcaggc

SEQ ID NO: 4415543 - DNA, 25 bp, Homo sapien
ggagccgccgcgcaggccgcctcac

SEQ ID NO: 4415544 - DNA, 25 bp, Homo sapien
ggccggagccgccgcgcaggccgcc

SEQ ID NO: 4415545 - DNA, 25 bp, Homo sapien
gcttcggagcaaagaaagttttctc

SEQ ID NO: 4415546 - DNA, 25 bp, Homo sapien
gaacaagttgataaggtccgcaccg

SEQ ID NO: 4415547 - DNA, 25 bp, Homo sapien
acaaagggcttctgtctcgggcagg

SEQ ID NO: 4415548 - DNA, 25 bp, Homo sapien
taaagaggcccaaggtggccatcac

SEQ ID NO: 4415549 - DNA, 25 bp, Homo sapien
cttctccgggcacgggtggagcgca

SEQ ID NO: 4415550 - DNA, 25 bp, Homo sapien
gctgaggcgggcacgccttcccggg

SEQ ID NO: 4415551 - DNA, 25 bp, Homo sapien
ttgcccgcagttccttctccgggca

SEQ ID NO: 4415552 - DNA, 25 bp, Homo sapien
gcagcccgggatgccccggacccgc

SEQ ID NO: 4415553 - DNA, 25 bp, Homo sapien
ttggacccagaagcgccgactctca

SEQ ID NO: 4415554 - DNA, 25 bp, Homo sapien
tggaggcttcttggacccagaagcg

SEQ ID NO: 4415555 - DNA, 25 bp, Homo sapien
aagggcggcattccgggttcaagca

SEQ ID NO: 4415556 - DNA, 25 bp, Homo sapien
cttcttggacccagaagcgccgact

SEQ ID NO: 4415557 - DNA, 25 bp, Homo sapien
caggacctggagagcgtactgctta

SEQ ID NO: 4415558 - DNA, 25 bp, Homo sapien
tgtgcctcaaaccacagccaacggt

SEQ ID NO: 4415559 - DNA, 25 bp, Homo sapien
cagctaggcgtgatgactttgcacc

SEQ ID NO: 4415560 - DNA, 25 bp, Homo sapien
cacacagtctctgatcctggaaagg

SEQ ID NO: 4415561 - DNA, 25 bp, Homo sapien
gaaggctacccaagttatattaaca

SEQ ID NO: 4415562 - DNA, 25 bp, Homo sapien
taggaaaggtttacatgcagctctc

SEQ ID NO: 4415563 - DNA, 25 bp, Homo sapien
gggaatcaccgaattcataggaaag

SEQ ID NO: 4415564 - DNA, 25 bp, Homo sapien
catttaaagctctttggtgacaccc

SEQ ID NO: 4415565 - DNA, 25 bp, Homo sapien
tctcctgcacagcatacaaaaagag

SEQ ID NO: 4415566 - DNA, 25 bp, Homo sapien
gacggcagcatgaagcaagcttgca

SEQ ID NO: 4415567 - DNA, 25 bp, Homo sapien
tgagctctagggtaatctcctgcac

SEQ ID NO: 4415568 - DNA, 25 bp, Homo sapien
caattcttgggcttagacggcagca

SEQ ID NO: 4415569 - DNA, 25 bp, Homo sapien
gatagaacctacattggaaataaca

SEQ ID NO: 4415570 - DNA, 25 bp, Homo sapien
taccctctcatgtttcgtctcagta

SEQ ID NO: 4415571 - DNA, 25 bp, Homo sapien
tagtttgctagttccgtgattcatt

SEQ ID NO: 4415572 - DNA, 25 bp, Homo sapien
tttaaacataagaccaagagcttgc

SEQ ID NO: 4415573 - DNA, 25 bp, Homo sapien
tgaccatcatcataaaaatacagcc

SEQ ID NO: 4415574 - DNA, 25 bp, Homo sapien
cccaagtattccagctcgggttggt

SEQ ID NO: 4415575 - DNA, 25 bp, Homo sapien
aggccatcctgtccacttttacatc

SEQ ID NO: 4415576 - DNA, 25 bp, Homo sapien
tcagtcaaatcccttcatagaaatg

SEQ ID NO: 4415577 - DNA, 25 bp, Homo sapien
cacagcacagtccttaatacagaat

SEQ ID NO: 4415578 - DNA, 25 bp, Homo sapien
cacagcactgggattcttactctat

SEQ ID NO: 4415579 - DNA, 25 bp, Homo sapien
ggaacctggaggcatgtcactatag

SEQ ID NO: 4415580 - DNA, 25 bp, Homo sapien
caaatgctggttgtgggatgtggaa

SEQ ID NO: 4415581 - DNA, 25 bp, Homo sapien
tgtttcaaaggatgacacgacaacc

SEQ ID NO: 4415582 - DNA, 25 bp, Homo sapien
acgacaaccttgattttgcaaacca

SEQ ID NO: 4415583 - DNA, 25 bp, Homo sapien
cgatcatccttagaagattttcctg

SEQ ID NO: 4415584 - DNA, 25 bp, Homo sapien
ggtttatagagtggagatttcgatc

SEQ ID NO: 4415585 - DNA, 25 bp, Homo sapien
gaactccgcagaacccacggcctgg

SEQ ID NO: 4415586 - DNA, 25 bp, Homo sapien
gaacccacggcctggtatggagcag

SEQ ID NO: 4415587 - DNA, 25 bp, Homo sapien
agaacccacggcctggtatggagca

SEQ ID NO: 4415588 - DNA, 25 bp, Homo sapien
ccgcagaacccacggcctggtatgg

SEQ ID NO: 4415589 - DNA, 25 bp, Homo sapien
tatctgctcttactcccagctgtga

SEQ ID NO: 4415590 - DNA, 25 bp, Homo sapien
tgtgatggaaaacatggaccgtcct

SEQ ID NO: 4415591 - DNA, 25 bp, Homo sapien
tctccagtgattagaaaatgcaggc

SEQ ID NO: 4415592 - DNA, 25 bp, Homo sapien
taaatctggtctgcttaaaagggct

SEQ ID NO: 4415593 - DNA, 25 bp, Homo sapien
gcataaaggcctctcatcaaggtaa

SEQ ID NO: 4415594 - DNA, 25 bp, Homo sapien
aaagaactaccagagcccataaagg

SEQ ID NO: 4415595 - DNA, 25 bp, Homo sapien
tctggagacctcaacatagtacggc

SEQ ID NO: 4415596 - DNA, 25 bp, Homo sapien
tcaaggtaaccttctcatctggacc

SEQ ID NO: 4415597 - DNA, 25 bp, Homo sapien
ccatttaacatgtgttaagcactta

SEQ ID NO: 4415598 - DNA, 25 bp, Homo sapien
ccatggccacacaggtatcaattag

SEQ ID NO: 4415599 - DNA, 25 bp, Homo sapien
ggattaaatccatttaacatgtgtt

SEQ ID NO: 4415600 - DNA, 25 bp, Homo sapien
taaatgagcatatttgcccatggcc

SEQ ID NO: 4415601 - DNA, 25 bp, Homo sapien
cagaggttgcaatgagctgggatga

SEQ ID NO: 4415602 - DNA, 25 bp, Homo sapien
gaggttgcaatgagctgggatgatg

SEQ ID NO: 4415603 - DNA, 25 bp, Homo sapien
acagaggttgcaatgagctgggatg

SEQ ID NO: 4415604 - DNA, 25 bp, Homo sapien
ggttgcaatgagctgggatgatgcc

SEQ ID NO: 4415605 - DNA, 25 bp, Homo sapien
agaacctctggagcaccacatggtg

SEQ ID NO: 4415606 - DNA, 25 bp, Homo sapien
taatgccaagcaccgatgaggaagt

SEQ ID NO: 4415607 - DNA, 25 bp, Homo sapien
caggttccttcatcaaaacagggca

SEQ ID NO: 4415608 - DNA, 25 bp, Homo sapien
tgaacagcccttcaggtaagagaca

SEQ ID NO: 4415609 - DNA, 25 bp, Homo sapien
cttcatacaggcatgatggcacgcg

SEQ ID NO: 4415610 - DNA, 25 bp, Homo sapien
tgatggcacgcgcctatcattccca

SEQ ID NO: 4415611 - DNA, 25 bp, Homo sapien
ggcatgatggcacgcgcctatcatt

SEQ ID NO: 4415612 - DNA, 25 bp, Homo sapien
tcatacaggcatgatggcacgcgcc

SEQ ID NO: 4415613 - DNA, 25 bp, Homo sapien
taatagtgattaccagtgtcctcca

SEQ ID NO: 4415614 - DNA, 25 bp, Homo sapien
caggaccgtctcagtcattacgaca

SEQ ID NO: 4415615 - DNA, 25 bp, Homo sapien
taaagtggccgttaagaagacgctg

SEQ ID NO: 4415616 - DNA, 25 bp, Homo sapien
tactagccgcgtgacctcaaaaacg

SEQ ID NO: 4415617 - DNA, 25 bp, Homo sapien
cagacggccgtcaactgtgcctgaa

SEQ ID NO: 4415618 - DNA, 25 bp, Homo sapien
gaacccatgtagctctaaacccaca

SEQ ID NO: 4415619 - DNA, 25 bp, Homo sapien
ggcacctggccttctagcagtactt

SEQ ID NO: 4415620 - DNA, 25 bp, Homo sapien
tatagaagaaccaggcaaactgtgc

SEQ ID NO: 4415621 - DNA, 25 bp, Homo sapien
agaaccatccggtccacgtccaaag

SEQ ID NO: 4415622 - DNA, 25 bp, Homo sapien
cagcccagagctgttgattgctttc

SEQ ID NO: 4415623 - DNA, 25 bp, Homo sapien
tgtaaagaaccatccggtccacgtc

SEQ ID NO: 4415624 - DNA, 25 bp, Homo sapien
gttgattgctttcacggatttcttc

SEQ ID NO: 4415625 - DNA, 25 bp, Homo sapien
tctccaacaccccgggcttgttcca

SEQ ID NO: 4415626 - DNA, 25 bp, Homo sapien
ttcatctcaaacataaaacttacta

SEQ ID NO: 4415627 - DNA, 25 bp, Homo sapien
acttactatttccagcccggcaaca

SEQ ID NO: 4415628 - DNA, 25 bp, Homo sapien
cccggcaacagggatgtgacggtat

SEQ ID NO: 4415629 - DNA, 25 bp, Homo sapien
caaacataaaacttactatttccag

SEQ ID NO: 4415630 - DNA, 25 bp, Homo sapien
ggttcttctcggttgtgaataacac

SEQ ID NO: 4415631 - DNA, 25 bp, Homo sapien
gttcttctcggttgtgaataacact

SEQ ID NO: 4415632 - DNA, 25 bp, Homo sapien
caggttcttctcggttgtgaataac

SEQ ID NO: 4415633 - DNA, 25 bp, Homo sapien
aggttcttctcggttgtgaataaca

SEQ ID NO: 4415634 - DNA, 25 bp, Homo sapien
gggtcatctctgcatacacagttgc

SEQ ID NO: 4415635 - DNA, 25 bp, Homo sapien
gaacgcacttcctaaatctgggtca

SEQ ID NO: 4415636 - DNA, 25 bp, Homo sapien
gagaacttcaggaacgcacttccta

SEQ ID NO: 4415637 - DNA, 25 bp, Homo sapien
tgcatacacagttgccgccaaactt

SEQ ID NO: 4415638 - DNA, 25 bp, Homo sapien
tgtcccggcacatgtcttctaataa

SEQ ID NO: 4415639 - DNA, 25 bp, Homo sapien
gtcccggcacatgtcttctaataaa

SEQ ID NO: 4415640 - DNA, 25 bp, Homo sapien
ccggcacatgtcttctaataaaagc

SEQ ID NO: 4415641 - DNA, 25 bp, Homo sapien
ggctgtcccggcacatgtcttctaa

SEQ ID NO: 4415642 - DNA, 25 bp, Homo sapien
ctttcaggctctaagtggagagaaa

SEQ ID NO: 4415643 - DNA, 25 bp, Homo sapien
gcttctctggcagtcaacagctctg

SEQ ID NO: 4415644 - DNA, 25 bp, Homo sapien
ctgcttctctggcagtcaacagctc

SEQ ID NO: 4415645 - DNA, 25 bp, Homo sapien
tttcaggctctaagtggagagaaaa

SEQ ID NO: 4415646 - DNA, 25 bp, Homo sapien
gtgaagttctcacgactggtttggc

SEQ ID NO: 4415647 - DNA, 25 bp, Homo sapien
catgccccttggtactgtgtagcaa

SEQ ID NO: 4415648 - DNA, 25 bp, Homo sapien
tgcccacggccatgcgaagtgctgg

SEQ ID NO: 4415649 - DNA, 25 bp, Homo sapien
ctcatgtccaattgcagtccccagt

SEQ ID NO: 4415650 - DNA, 25 bp, Homo sapien
caaacaaagataggccagaaggcac

SEQ ID NO: 4415651 - DNA, 25 bp, Homo sapien
gggatcccatctagaagcctgaagc

SEQ ID NO: 4415652 - DNA, 25 bp, Homo sapien
tctggccactgatcaacagctgctg

SEQ ID NO: 4415653 - DNA, 25 bp, Homo sapien
taaggagcagccaaaggtcactggg

SEQ ID NO: 4415654 - DNA, 25 bp, Homo sapien
gcaggggtagactgggcaaaaggaa

SEQ ID NO: 4415655 - DNA, 25 bp, Homo sapien
ccgtggcagtcgaggagtcagcaga

SEQ ID NO: 4415656 - DNA, 25 bp, Homo sapien
catagagggtggtcgaagtgctggt

SEQ ID NO: 4415657 - DNA, 25 bp, Homo sapien
caaaaggaatggcatagagggtggt

SEQ ID NO: 4415658 - DNA, 25 bp, Homo sapien
ttggtcggcttgctttcgttcttcg

SEQ ID NO: 4415659 - DNA, 25 bp, Homo sapien
tggtcggcttgctttcgttcttcgt

SEQ ID NO: 4415660 - DNA, 25 bp, Homo sapien
accacgcctggactaaattttacat

SEQ ID NO: 4415661 - DNA, 25 bp, Homo sapien
tataggcacgggccaacatgcttgg

SEQ ID NO: 4415662 - DNA, 25 bp, Homo sapien
cctcaacttcttgagctcaggcgat

SEQ ID NO: 4415663 - DNA, 25 bp, Homo sapien
gactaaattttacattagaaacaga

SEQ ID NO: 4415664 - DNA, 25 bp, Homo sapien
tgctgcaaaggcacacgagcgaatg

SEQ ID NO: 4415665 - DNA, 25 bp, Homo sapien
catgttaagggactaagggtgtgat

SEQ ID NO: 4415666 - DNA, 25 bp, Homo sapien
tgacagaattacgtcgaaagcctag

SEQ ID NO: 4415667 - DNA, 25 bp, Homo sapien
atcacggctccacccataagctgga

SEQ ID NO: 4415668 - DNA, 25 bp, Homo sapien
tgtccaaagggaaggagattatgtt

SEQ ID NO: 4415669 - DNA, 25 bp, Homo sapien
tcactcctttcaggtcccccttcag

SEQ ID NO: 4415670 - DNA, 25 bp, Homo sapien
ggagattatgttgttcatattctga

SEQ ID NO: 4415671 - DNA, 25 bp, Homo sapien
ttcagcaaactgtccaaagggaagg

SEQ ID NO: 4415672 - DNA, 25 bp, Homo sapien
aaggtggtcccaagatggcaaatca

SEQ ID NO: 4415673 - DNA, 25 bp, Homo sapien
tggtcccaagatggcaaatcagagg

SEQ ID NO: 4415674 - DNA, 25 bp, Homo sapien
ggtggtcccaagatggcaaatcaga

SEQ ID NO: 4415675 - DNA, 25 bp, Homo sapien
ctgaaaggtggtcccaagatggcaa

SEQ ID NO: 4415676 - DNA, 25 bp, Homo sapien
caactttgttgtgccaacaggacgg

SEQ ID NO: 4415677 - DNA, 25 bp, Homo sapien
gtgccaacaggacggccagaaaggc

SEQ ID NO: 4415678 - DNA, 25 bp, Homo sapien
tgttgtgccaacaggacggccagaa

SEQ ID NO: 4415679 - DNA, 25 bp, Homo sapien
tttgttgtgccaacaggacggccag

SEQ ID NO: 4415680 - DNA, 25 bp, Homo sapien
tccttccaagctttatcaaaaggct

SEQ ID NO: 4415681 - DNA, 25 bp, Homo sapien
ttgtttcatagtccttccaagcttt

SEQ ID NO: 4415682 - DNA, 25 bp, Homo sapien
ttcatagtccttccaagctttatca

SEQ ID NO: 4415683 - DNA, 25 bp, Homo sapien
tagtccttccaagctttatcaaaag

SEQ ID NO: 4415684 - DNA, 25 bp, Homo sapien
tcccatggagcttggcgtgttcctt

SEQ ID NO: 4415685 - DNA, 25 bp, Homo sapien
tcttcggcaatttccgctccgctta

SEQ ID NO: 4415686 - DNA, 25 bp, Homo sapien
tatttcagtccgaatcatcccatgg

SEQ ID NO: 4415687 - DNA, 25 bp, Homo sapien
tccgctccgcttatttcagtccgaa

SEQ ID NO: 4415688 - DNA, 25 bp, Homo sapien
tgcttggcatcatgtctctcgtcct

SEQ ID NO: 4415689 - DNA, 25 bp, Homo sapien
taactgctaacgtattgtagctgag

SEQ ID NO: 4415690 - DNA, 25 bp, Homo sapien
gcatcatgtctctcgtcctgagaca

SEQ ID NO: 4415691 - DNA, 25 bp, Homo sapien
caataactgctaacgtattgtagct

SEQ ID NO: 4415692 - DNA, 25 bp, Homo sapien
ttaatcttgatttcgttgaccttca

SEQ ID NO: 4415693 - DNA, 25 bp, Homo sapien
atgaaagtatttgatcagattctga

SEQ ID NO: 4415694 - DNA, 25 bp, Homo sapien
gattctgaagtaaatctactccctt

SEQ ID NO: 4415695 - DNA, 25 bp, Homo sapien
cagattctgaagtaaatctactccc

SEQ ID NO: 4415696 - DNA, 25 bp, Homo sapien
tcactgagcttatgtcaccttggcc

SEQ ID NO: 4415697 - DNA, 25 bp, Homo sapien
tgagtaggaactatgccagcactgt

SEQ ID NO: 4415698 - DNA, 25 bp, Homo sapien
gaggcctgcagctcattcaagaaac

SEQ ID NO: 4415699 - DNA, 25 bp, Homo sapien
ttcctgccttaagacctagaccctg

SEQ ID NO: 4415700 - DNA, 25 bp, Homo sapien
tgtgaagatccgtagacagcgtttc

SEQ ID NO: 4415701 - DNA, 25 bp, Homo sapien
tggaaggtttgaggctttccacggc

SEQ ID NO: 4415702 - DNA, 25 bp, Homo sapien
cggctttgagtccatcctgaaaaaa

SEQ ID NO: 4415703 - DNA, 25 bp, Homo sapien
cgtagacagcgtttcaatggaaggt

SEQ ID NO: 4415704 - DNA, 25 bp, Homo sapien
tctgttcaacctgcaatgcggattt

SEQ ID NO: 4415705 - DNA, 25 bp, Homo sapien
caaaatatctcgaagctgtatcaac

SEQ ID NO: 4415706 - DNA, 25 bp, Homo sapien
cctgcaatgcggatttcaaaatatc

SEQ ID NO: 4415707 - DNA, 25 bp, Homo sapien
tatctcgaagctgtatcaactgcct

SEQ ID NO: 4415708 - DNA, 25 bp, Homo sapien
gtccacttccctaatatttatgcaa

SEQ ID NO: 4415709 - DNA, 25 bp, Homo sapien
tctgtgaactcagatcactgtgggc

SEQ ID NO: 4415710 - DNA, 25 bp, Homo sapien
cttcagagggactagagagatgtgt

SEQ ID NO: 4415711 - DNA, 25 bp, Homo sapien
gcctttaataaagtctacaacaatg

SEQ ID NO: 4415712 - DNA, 25 bp, Homo sapien
taagctgtgctctgacgaatttggg

SEQ ID NO: 4415713 - DNA, 25 bp, Homo sapien
agctgtgctctgacgaatttgggag

SEQ ID NO: 4415714 - DNA, 25 bp, Homo sapien
aagctgtgctctgacgaatttggga

SEQ ID NO: 4415715 - DNA, 25 bp, Homo sapien
ctgtgctctgacgaatttgggagtc

SEQ ID NO: 4415716 - DNA, 25 bp, Homo sapien
tgccgttccgctcggtcccatgttc

SEQ ID NO: 4415717 - DNA, 25 bp, Homo sapien
gctgccgttccgctcggtcccatgt

SEQ ID NO: 4415718 - DNA, 25 bp, Homo sapien
cgttccgctcggtcccatgttcctt

SEQ ID NO: 4415719 - DNA, 25 bp, Homo sapien
aggctgccgttccgctcggtcccat

SEQ ID NO: 4415720 - DNA, 25 bp, Homo sapien
ccatgggatatggtcagaaaaccat

SEQ ID NO: 4415721 - DNA, 25 bp, Homo sapien
ttccttttctgccacacttttcgga

SEQ ID NO: 4415722 - DNA, 25 bp, Homo sapien
tccttttctgccacacttttcggat

SEQ ID NO: 4415723 - DNA, 25 bp, Homo sapien
ggtaccatgggatatggtcagaaaa

SEQ ID NO: 4415724 - DNA, 25 bp, Homo sapien
aatcttcctaagtgagatgtttgat

SEQ ID NO: 4415725 - DNA, 25 bp, Homo sapien
ttctcatggatttctggtccccaga

SEQ ID NO: 4415726 - DNA, 25 bp, Homo sapien
ttcctaagtgagatgtttgatttcc

SEQ ID NO: 4415727 - DNA, 25 bp, Homo sapien
catggatttctggtccccagagtcc

SEQ ID NO: 4415728 - DNA, 25 bp, Homo sapien
ctgcaggatgtaggcggcgatggct

SEQ ID NO: 4415729 - DNA, 25 bp, Homo sapien
gtaggcggcgatggctgctaaaggc

SEQ ID NO: 4415730 - DNA, 25 bp, Homo sapien
aggagacctctggaagtggagattc

SEQ ID NO: 4415731 - DNA, 25 bp, Homo sapien
gagacctctggaagtggagattccc

SEQ ID NO: 4415732 - DNA, 25 bp, Homo sapien
taaacagggttgtactagactctcc

SEQ ID NO: 4415733 - DNA, 25 bp, Homo sapien
gagagttgaacccatccttgcagcg

SEQ ID NO: 4415734 - DNA, 25 bp, Homo sapien
gaattcctggatcgtcagaaatcag

SEQ ID NO: 4415735 - DNA, 25 bp, Homo sapien
tgtgaaaccctcaagcacttacagg

SEQ ID NO: 4415736 - DNA, 25 bp, Homo sapien
gctaagcccaaaacattcagttctg

SEQ ID NO: 4415737 - DNA, 25 bp, Homo sapien
taagcccaaaacattcagttctgat

SEQ ID NO: 4415738 - DNA, 25 bp, Homo sapien
ggctaagcccaaaacattcagttct

SEQ ID NO: 4415739 - DNA, 25 bp, Homo sapien
agcccaaaacattcagttctgattc

SEQ ID NO: 4415740 - DNA, 25 bp, Homo sapien
ctggacaagaggacaagcgatgcca

SEQ ID NO: 4415741 - DNA, 25 bp, Homo sapien
gacaagaggacaagcgatgccagct

SEQ ID NO: 4415742 - DNA, 25 bp, Homo sapien
aagaggacaagcgatgccagctttg

SEQ ID NO: 4415743 - DNA, 25 bp, Homo sapien
aggacaagcgatgccagctttgagg

SEQ ID NO: 4415744 - DNA, 25 bp, Homo sapien
tggcaggttagcaggttgagctttg

SEQ ID NO: 4415745 - DNA, 25 bp, Homo sapien
ctggcaggttagcaggttgagcttt

SEQ ID NO: 4415746 - DNA, 25 bp, Homo sapien
cctggcaggttagcaggttgagctt

SEQ ID NO: 4415747 - DNA, 25 bp, Homo sapien
acctggcaggttagcaggttgagct

SEQ ID NO: 4415748 - DNA, 25 bp, Homo sapien
tgttttgccaggctgtggacctgtg

SEQ ID NO: 4415749 - DNA, 25 bp, Homo sapien
gataacatgtaccacggactactgg

SEQ ID NO: 4415750 - DNA, 25 bp, Homo sapien
caagtgagactacagaaccgataca

SEQ ID NO: 4415751 - DNA, 25 bp, Homo sapien
aagacgccgcttctaaaaactgaag

SEQ ID NO: 4415752 - DNA, 25 bp, Homo sapien
agcttgaaagtggtaagttctgtca

SEQ ID NO: 4415753 - DNA, 25 bp, Homo sapien
gcttgaaagtggtaagttctgtcat

SEQ ID NO: 4415754 - DNA, 25 bp, Homo sapien
tgcattgtttaaagcttcttctttg

SEQ ID NO: 4415755 - DNA, 25 bp, Homo sapien
tcctttgtcagttcttggacgatgt

SEQ ID NO: 4415756 - DNA, 25 bp, Homo sapien
tgtcatcccccttaaatgcattgtt

SEQ ID NO: 4415757 - DNA, 25 bp, Homo sapien
ttctccagtattgtcatccccctta

SEQ ID NO: 4415758 - DNA, 25 bp, Homo sapien
tcacagcagacgtcattgcccgtca

SEQ ID NO: 4415759 - DNA, 25 bp, Homo sapien
agcagacgtcattgcccgtcatcct

SEQ ID NO: 4415760 - DNA, 25 bp, Homo sapien
cagtcacagcagacgtcattgcccg

SEQ ID NO: 4415761 - DNA, 25 bp, Homo sapien
cacagtcacagcagacgtcattgcc

SEQ ID NO: 4415762 - DNA, 25 bp, Homo sapien
gaaaatgcacctgtgtagtccccga

SEQ ID NO: 4415763 - DNA, 25 bp, Homo sapien
gattgaaatgtcctagagcccaggg

SEQ ID NO: 4415764 - DNA, 25 bp, Homo sapien
gccgcggtctgcacagttcattaag

SEQ ID NO: 4415765 - DNA, 25 bp, Homo sapien
gggattaaccattctagccaagcct

SEQ ID NO: 4415766 - DNA, 25 bp, Homo sapien
ccagctctcggtggattccggaaca

SEQ ID NO: 4415767 - DNA, 25 bp, Homo sapien
cagcagctcagatgttcccagtaca

SEQ ID NO: 4415768 - DNA, 25 bp, Homo sapien
tggaataatgaacccccagctctcg

SEQ ID NO: 4415769 - DNA, 25 bp, Homo sapien
agtacatctaaggtcagggactgca

SEQ ID NO: 4415770 - DNA, 25 bp, Homo sapien
ggaaatccttcatcccagtacctga

SEQ ID NO: 4415771 - DNA, 25 bp, Homo sapien
gggcctaatgaacactcactataca

SEQ ID NO: 4415772 - DNA, 25 bp, Homo sapien
ttcgtaagaacagacaaccagacag

SEQ ID NO: 4415773 - DNA, 25 bp, Homo sapien
tatggttcttaacggtgtgtcagac

SEQ ID NO: 4415774 - DNA, 25 bp, Homo sapien
cagctggtaggcaacattccatgat

SEQ ID NO: 4415775 - DNA, 25 bp, Homo sapien
tgggttgggtttgactgagtcctca

SEQ ID NO: 4415776 - DNA, 25 bp, Homo sapien
agtcctcagctggtaggcaacattc

SEQ ID NO: 4415777 - DNA, 25 bp, Homo sapien
atgtcgctgcctgggttgggtttga

SEQ ID NO: 4415778 - DNA, 25 bp, Homo sapien
attactgcgacctccacaggaaagg

SEQ ID NO: 4415779 - DNA, 25 bp, Homo sapien
tcttctgacaggcagttagactgga

SEQ ID NO: 4415780 - DNA, 25 bp, Homo sapien
tcaattggcatagggtaaaactggt

SEQ ID NO: 4415781 - DNA, 25 bp, Homo sapien
ggaagacccattttattcctgcagg

SEQ ID NO: 4415782 - DNA, 25 bp, Homo sapien
ctgaaaccaaacgtaattgccttgc

SEQ ID NO: 4415783 - DNA, 25 bp, Homo sapien
gaaaccaaacgtaattgccttgcaa

SEQ ID NO: 4415784 - DNA, 25 bp, Homo sapien
atgaagggcttctacccgccgtccg

SEQ ID NO: 4415785 - DNA, 25 bp, Homo sapien
atcatgaagggcttctacccgccgt

SEQ ID NO: 4415786 - DNA, 25 bp, Homo sapien
gcgtatctcctctcgatgtacttgg

SEQ ID NO: 4415787 - DNA, 25 bp, Homo sapien
gactgtgaagcttcgccgcgttatc

SEQ ID NO: 4415788 - DNA, 25 bp, Homo sapien
tgacggcctcgcaaagactgtgaag

SEQ ID NO: 4415789 - DNA, 25 bp, Homo sapien
gcgttatccgcgtgcttcttccttg

SEQ ID NO: 4415790 - DNA, 25 bp, Homo sapien
atgtccgttggccagtgggattttt

SEQ ID NO: 4415791 - DNA, 25 bp, Homo sapien
tcctgaagtaaagtactggatccca

SEQ ID NO: 4415792 - DNA, 25 bp, Homo sapien
gaagtaaagtactggatcccaggca

SEQ ID NO: 4415793 - DNA, 25 bp, Homo sapien
gcctcctgaagtaaagtactggatc

SEQ ID NO: 4415794 - DNA, 25 bp, Homo sapien
gctcaaccgattcctctcaccccag

SEQ ID NO: 4415795 - DNA, 25 bp, Homo sapien
gaagagatgaacaaggattgtttca

SEQ ID NO: 4415796 - DNA, 25 bp, Homo sapien
ctgcattggtgggcatgagttcttt

SEQ ID NO: 4415797 - DNA, 25 bp, Homo sapien
gggagaagagatgaacaaggattgt

SEQ ID NO: 4415798 - DNA, 25 bp, Homo sapien
ctgggccctctggcggcagcacagc

SEQ ID NO: 4415799 - DNA, 25 bp, Homo sapien
actgtctccaactcatactggggat

SEQ ID NO: 4415800 - DNA, 25 bp, Homo sapien
aaagttttgcgttctacacttacag

SEQ ID NO: 4415801 - DNA, 25 bp, Homo sapien
tctacacttacagacaaggctacga

SEQ ID NO: 4415802 - DNA, 25 bp, Homo sapien
gctacgaatgctaataactgcactg

SEQ ID NO: 4415803 - DNA, 25 bp, Homo sapien
tgaagagaggttcgatccacggatc

SEQ ID NO: 4415804 - DNA, 25 bp, Homo sapien
ggtggagggccgtttcatccggctc

SEQ ID NO: 4415805 - DNA, 25 bp, Homo sapien
gatccacggatctgactgcaaggtg

SEQ ID NO: 4415806 - DNA, 25 bp, Homo sapien
aagtctacaatgtgaagagaggttc

SEQ ID NO: 4415807 - DNA, 25 bp, Homo sapien
cagagagagagcatagtgtgtcaca

SEQ ID NO: 4415808 - DNA, 25 bp, Homo sapien
gggactgcccggcagggagcctggg

SEQ ID NO: 4415809 - DNA, 25 bp, Homo sapien
tgtcacaggctggacgaccagggac

SEQ ID NO: 4415810 - DNA, 25 bp, Homo sapien
acagagagagagcatagtgtgtcac

SEQ ID NO: 4415811 - DNA, 25 bp, Homo sapien
cccgcaggagcaacttgaggcactc

SEQ ID NO: 4415812 - DNA, 25 bp, Homo sapien
caacttgaggcactcggcattgtcg

SEQ ID NO: 4415813 - DNA, 25 bp, Homo sapien
cattgtcggtcaggcagcagtagtg

SEQ ID NO: 4415814 - DNA, 25 bp, Homo sapien
actcggcattgtcggtcaggcagca

SEQ ID NO: 4415815 - DNA, 25 bp, Homo sapien
aagtaacaaccagggcccttcatgg

SEQ ID NO: 4415816 - DNA, 25 bp, Homo sapien
actgtgccttggctgttggcatgtc

SEQ ID NO: 4415817 - DNA, 25 bp, Homo sapien
taagcacggctctcaggcagatgtg

SEQ ID NO: 4415818 - DNA, 25 bp, Homo sapien
tgtaatccgtctaaacccagagcca

SEQ ID NO: 4415819 - DNA, 25 bp, Homo sapien
cagctcctcacagtgctcgtgcttg

SEQ ID NO: 4415820 - DNA, 25 bp, Homo sapien
cttgaggcgcttggcaatgtccagc

SEQ ID NO: 4415821 - DNA, 25 bp, Homo sapien
tgtccagcggagtctctcctgactc

SEQ ID NO: 4415822 - DNA, 25 bp, Homo sapien
tcacagtgctcgtgcttgaggcgct

SEQ ID NO: 4415823 - DNA, 25 bp, Homo sapien
cacagtattgcacggtgtatatgtg

SEQ ID NO: 4415824 - DNA, 25 bp, Homo sapien
atttgttacatacgtacaaatgtgc

SEQ ID NO: 4415825 - DNA, 25 bp, Homo sapien
ggctgcacagtattgcacggtgtat

SEQ ID NO: 4415826 - DNA, 25 bp, Homo sapien
cagatttgttacatacgtacaaatg

SEQ ID NO: 4415827 - DNA, 25 bp, Homo sapien
ggtcttcgtggagtagtcgccattc

SEQ ID NO: 4415828 - DNA, 25 bp, Homo sapien
ttaaatcttccagataaggcttggg

SEQ ID NO: 4415829 - DNA, 25 bp, Homo sapien
cattcatattcaacgtgaacgtgag

SEQ ID NO: 4415830 - DNA, 25 bp, Homo sapien
aatttctcatccatgtcgtcatcac

SEQ ID NO: 4415831 - DNA, 25 bp, Homo sapien
gctccaagtcctgcgtgaaggcagc

SEQ ID NO: 4415832 - DNA, 25 bp, Homo sapien
ctttgggtcacaaggcctaagtctg

SEQ ID NO: 4415833 - DNA, 25 bp, Homo sapien
gacatgcctcgaagcaccatgctga

SEQ ID NO: 4415834 - DNA, 25 bp, Homo sapien
ggcatttgccactaattcagcacag

SEQ ID NO: 4415835 - DNA, 25 bp, Homo sapien
tctctggccaaagatacagcgttag

SEQ ID NO: 4415836 - DNA, 25 bp, Homo sapien
caggagggctccgtaagtctcattc

SEQ ID NO: 4415837 - DNA, 25 bp, Homo sapien
caagatgctgggcatgaaagccctc

SEQ ID NO: 4415838 - DNA, 25 bp, Homo sapien
ttagactgaagctggttggagccca

SEQ ID NO: 4415839 - DNA, 25 bp, Homo sapien
ttcactgtcacttctctgggcctcc

SEQ ID NO: 4415840 - DNA, 25 bp, Homo sapien
aggttcactgtcacttctctgggcc

SEQ ID NO: 4415841 - DNA, 25 bp, Homo sapien
atgacaggttcactgtcacttctct

SEQ ID NO: 4415842 - DNA, 25 bp, Homo sapien
tgacaggttcactgtcacttctctg

SEQ ID NO: 4415843 - DNA, 25 bp, Homo sapien
tgctctcagcaggtttgttcttcgg

SEQ ID NO: 4415844 - DNA, 25 bp, Homo sapien
ttcggggtatgactcagtgactcac

SEQ ID NO: 4415845 - DNA, 25 bp, Homo sapien
gctctcagcaggtttgttcttcggg

SEQ ID NO: 4415846 - DNA, 25 bp, Homo sapien
gttcttcggggtatgactcagtgac

SEQ ID NO: 4415847 - DNA, 25 bp, Homo sapien
gaccagccagcctgggggtttgaca

SEQ ID NO: 4415848 - DNA, 25 bp, Homo sapien
aggagatgcgactgtgtggcttcat

SEQ ID NO: 4415849 - DNA, 25 bp, Homo sapien
ggcttcatcttgtagctgccttctg

SEQ ID NO: 4415850 - DNA, 25 bp, Homo sapien
ctcagggacgtcctcatcaagccag

SEQ ID NO: 4415851 - DNA, 25 bp, Homo sapien
tgtgaagaggaacaccgtgtgccca

SEQ ID NO: 4415852 - DNA, 25 bp, Homo sapien
gttcaggtgacccacaagagatggc

SEQ ID NO: 4415853 - DNA, 25 bp, Homo sapien
gaacactgcacttggagcttctgga

SEQ ID NO: 4415854 - DNA, 25 bp, Homo sapien
taggtgtgaccccatgttggaggct

SEQ ID NO: 4415855 - DNA, 25 bp, Homo sapien
cggtggatggacagctggcggatct

SEQ ID NO: 4415856 - DNA, 25 bp, Homo sapien
tgacgaagatcgctgccggcttcca

SEQ ID NO: 4415857 - DNA, 25 bp, Homo sapien
agggtgttagcagaggaggctgtct

SEQ ID NO: 4415858 - DNA, 25 bp, Homo sapien
cacttacagagtttgtcttccacag

SEQ ID NO: 4415859 - DNA, 25 bp, Homo sapien
ttggaaacctctgaagaccctccca

SEQ ID NO: 4415860 - DNA, 25 bp, Homo sapien
gaagtcacgagcacctcggctctag

SEQ ID NO: 4415861 - DNA, 25 bp, Homo sapien
gcctttggtgtgttcgccttggaaa

SEQ ID NO: 4415862 - DNA, 25 bp, Homo sapien
gtctgactctagcacacaaatgcag

SEQ ID NO: 4415863 - DNA, 25 bp, Homo sapien
gggcaggcttgctcggctggctcaa

SEQ ID NO: 4415864 - DNA, 25 bp, Homo sapien
cgcaggcttcttctgcgggaggcgg

SEQ ID NO: 4415865 - DNA, 25 bp, Homo sapien
ttccattacgctgggcgtcttggca

SEQ ID NO: 4415866 - DNA, 25 bp, Homo sapien
gctggctcaaggcttccattacgct

SEQ ID NO: 4415867 - DNA, 25 bp, Homo sapien
gaaggcctgatcctctgagacagca

SEQ ID NO: 4415868 - DNA, 25 bp, Homo sapien
tcgctgctcggaatgaaccctgtct

SEQ ID NO: 4415869 - DNA, 25 bp, Homo sapien
taactacagaacactcgcagggaag

SEQ ID NO: 4415870 - DNA, 25 bp, Homo sapien
caatgcttgcagtcccagaatgaag

SEQ ID NO: 4415871 - DNA, 25 bp, Homo sapien
caagatccgtcaactccagagctaa

SEQ ID NO: 4415872 - DNA, 25 bp, Homo sapien
cagtggcttcagctccccggtggat

SEQ ID NO: 4415873 - DNA, 25 bp, Homo sapien
ctggcagccctggataaatgggttc

SEQ ID NO: 4415874 - DNA, 25 bp, Homo sapien
cagagctaaggaccagtgccagtgg

SEQ ID NO: 4415875 - DNA, 25 bp, Homo sapien
gatttactgctaccggagggcacct

SEQ ID NO: 4415876 - DNA, 25 bp, Homo sapien
ccaatgtggctgaccacgggctcaa

SEQ ID NO: 4415877 - DNA, 25 bp, Homo sapien
ggtcccatcacatgaaagggcaggg

SEQ ID NO: 4415878 - DNA, 25 bp, Homo sapien
agggcagggctgaaccttaacctca

SEQ ID NO: 4415879 - DNA, 25 bp, Homo sapien
aggtcctctcggttggcctttgttg

SEQ ID NO: 4415880 - DNA, 25 bp, Homo sapien
tcctctcggttggcctttgttggtc

SEQ ID NO: 4415881 - DNA, 25 bp, Homo sapien
tctcggttggcctttgttggtcagt

SEQ ID NO: 4415882 - DNA, 25 bp, Homo sapien
ggtcagtggggtggacttgtcagcc

SEQ ID NO: 4415883 - DNA, 25 bp, Homo sapien
gacagaggacccagagcttccgttg

SEQ ID NO: 4415884 - DNA, 25 bp, Homo sapien
tagcattggacagaggacccagagc

SEQ ID NO: 4415885 - DNA, 25 bp, Homo sapien
aggacccagagcttccgttgcagag

SEQ ID NO: 4415886 - DNA, 25 bp, Homo sapien
caggaccatagcattggacagagga

SEQ ID NO: 4415887 - DNA, 25 bp, Homo sapien
ttcacccgcttaggcttcaacttgg

SEQ ID NO: 4415888 - DNA, 25 bp, Homo sapien
tatagagcgctttcacccgcttagg

SEQ ID NO: 4415889 - DNA, 25 bp, Homo sapien
ttgtcagccacacagttatagagcg

SEQ ID NO: 4415890 - DNA, 25 bp, Homo sapien
gctcatcggggttgtcagccacaca

SEQ ID NO: 4415891 - DNA, 25 bp, Homo sapien
tcctcctccccgtccacgatgatca

SEQ ID NO: 4415892 - DNA, 25 bp, Homo sapien
ctcctccccgtccacgatgatcaca

SEQ ID NO: 4415893 - DNA, 25 bp, Homo sapien
tccccgtccacgatgatcacatccc

SEQ ID NO: 4415894 - DNA, 25 bp, Homo sapien
cctccccgtccacgatgatcacatc

SEQ ID NO: 4415895 - DNA, 25 bp, Homo sapien
aatgacaccgggaatgcgcctttgc

SEQ ID NO: 4415896 - DNA, 25 bp, Homo sapien
gcgcctttgcgaccaggatctccat

SEQ ID NO: 4415897 - DNA, 25 bp, Homo sapien
tcagtcagcgataaagtgcacaaat

SEQ ID NO: 4415898 - DNA, 25 bp, Homo sapien
gataaagtgcacaaatgacaccggg

SEQ ID NO: 4415899 - DNA, 25 bp, Homo sapien
gtttagctaattccgtagaggcagg

SEQ ID NO: 4415900 - DNA, 25 bp, Homo sapien
agtggcattagagaacatgggctgc

SEQ ID NO: 4415901 - DNA, 25 bp, Homo sapien
tggtaccaataacgaaacaggaaca

SEQ ID NO: 4415902 - DNA, 25 bp, Homo sapien
tcagttcacctgttgggaaattcag

SEQ ID NO: 4415903 - DNA, 25 bp, Homo sapien
taaacattctcctgggctagaaggg

SEQ ID NO: 4415904 - DNA, 25 bp, Homo sapien
taaaggtcaccaactccagaactgg

SEQ ID NO: 4415905 - DNA, 25 bp, Homo sapien
tagctgcaacctcacaaattagggc

SEQ ID NO: 4415906 - DNA, 25 bp, Homo sapien
tgttaatacagcatggtctgcgcca

SEQ ID NO: 4415907 - DNA, 25 bp, Homo sapien
ttatttttttccagtcaaatgacta

SEQ ID NO: 4415908 - DNA, 25 bp, Homo sapien
tgaatcctgcaatcaagtagaagtc

SEQ ID NO: 4415909 - DNA, 25 bp, Homo sapien
gaaaatggattgtgtaaaatgctga

SEQ ID NO: 4415910 - DNA, 25 bp, Homo sapien
ttatccaccgcttttgactctgtat

SEQ ID NO: 4415911 - DNA, 25 bp, Homo sapien
gccatttgcaaggttttatccaccg

SEQ ID NO: 4415912 - DNA, 25 bp, Homo sapien
tctctacttaataatccggatggtg

SEQ ID NO: 4415913 - DNA, 25 bp, Homo sapien
cacagatgcaagcaatgaggaatac

SEQ ID NO: 4415914 - DNA, 25 bp, Homo sapien
aatccggatggtgtgttacgatgac

SEQ ID NO: 4415915 - DNA, 25 bp, Homo sapien
cagcctgtgggtttatcagtgcaac

SEQ ID NO: 4415916 - DNA, 25 bp, Homo sapien
gaaggacatcagtgaatctaaattg

SEQ ID NO: 4415917 - DNA, 25 bp, Homo sapien
tgccatttaagagagaactcgggct

SEQ ID NO: 4415918 - DNA, 25 bp, Homo sapien
agtgtggtgttatgcactggtagtc

SEQ ID NO: 4415919 - DNA, 25 bp, Homo sapien
atttaagagagaactcgggctgggc

SEQ ID NO: 4415920 - DNA, 25 bp, Homo sapien
catcacccaggtcagaatgaaagga

SEQ ID NO: 4415921 - DNA, 25 bp, Homo sapien
aaaagcatcacccaggtcagaatga

SEQ ID NO: 4415922 - DNA, 25 bp, Homo sapien
cagaccgctgtatgtgggacctttg

SEQ ID NO: 4415923 - DNA, 25 bp, Homo sapien
ctctctgtgcagaccgctgtatgtg

SEQ ID NO: 4415924 - DNA, 25 bp, Homo sapien
gaaggtgctccatcacggtgacaga

SEQ ID NO: 4415925 - DNA, 25 bp, Homo sapien
aaagttctcggcttcagtaagcgcg

SEQ ID NO: 4415926 - DNA, 25 bp, Homo sapien
tccttactctggtgaccctgggcag

SEQ ID NO: 4415927 - DNA, 25 bp, Homo sapien
tcactgactcttcgggcgctttggc

SEQ ID NO: 4415928 - DNA, 25 bp, Homo sapien
ttcctaaattggaagcacagccacc

SEQ ID NO: 4415929 - DNA, 25 bp, Homo sapien
taaattggaagcacagccaccggta

SEQ ID NO: 4415930 - DNA, 25 bp, Homo sapien
aagagcacaacttccgtcactccgg

SEQ ID NO: 4415931 - DNA, 25 bp, Homo sapien
gaagcacagccaccggtaaataaaa

SEQ ID NO: 4415932 - DNA, 25 bp, Homo sapien
ggtcggatcagcagctggtcgctct

SEQ ID NO: 4415933 - DNA, 25 bp, Homo sapien
agcagctggtcgctctcctcagcag

SEQ ID NO: 4415934 - DNA, 25 bp, Homo sapien
cggatcagcagctggtcgctctcct

SEQ ID NO: 4415935 - DNA, 25 bp, Homo sapien
tctcctcagcaggaatcgcagacat

SEQ ID NO: 4415936 - DNA, 25 bp, Homo sapien
aagcgcggaccaaaggcaggctgcc

SEQ ID NO: 4415937 - DNA, 25 bp, Homo sapien
atcccgttcactctatagcaggccc

SEQ ID NO: 4415938 - DNA, 25 bp, Homo sapien
tagcaggccccttccgatcaacggt

SEQ ID NO: 4415939 - DNA, 25 bp, Homo sapien
cccgcaagcgcggaccaaaggcagg

SEQ ID NO: 4415940 - DNA, 25 bp, Homo sapien
taattcttccctgcacggctgtagc

SEQ ID NO: 4415941 - DNA, 25 bp, Homo sapien
gatcgaaactcacggcaagtcccta

SEQ ID NO: 4415942 - DNA, 25 bp, Homo sapien
tcttagcgtgtacgaaagcgagcgg

SEQ ID NO: 4415943 - DNA, 25 bp, Homo sapien
tcccgactgatgaggatcgtgtcca

SEQ ID NO: 4415944 - DNA, 25 bp, Homo sapien
tgttgatattccgagggtttgctcc

SEQ ID NO: 4415945 - DNA, 25 bp, Homo sapien
ttgatattccgagggtttgctcctt

SEQ ID NO: 4415946 - DNA, 25 bp, Homo sapien
aaatgttgatattccgagggtttgc

SEQ ID NO: 4415947 - DNA, 25 bp, Homo sapien
ctttctgacatgctaaggacttcca

SEQ ID NO: 4415948 - DNA, 25 bp, Homo sapien
tcctttgaactcgagaataatacat

SEQ ID NO: 4415949 - DNA, 25 bp, Homo sapien
tgaactcgagaataatacatgatct

SEQ ID NO: 4415950 - DNA, 25 bp, Homo sapien
ctttgaactcgagaataatacatga

SEQ ID NO: 4415951 - DNA, 25 bp, Homo sapien
cttcctttgaactcgagaataatac

SEQ ID NO: 4415952 - DNA, 25 bp, Homo sapien
ctcagctgggtcaattaaatcaata

SEQ ID NO: 4415953 - DNA, 25 bp, Homo sapien
attaaatcaatataaggaagagcat

SEQ ID NO: 4415954 - DNA, 25 bp, Homo sapien
taataggagatcaatctcagctggg

SEQ ID NO: 4415955 - DNA, 25 bp, Homo sapien
taattaataggagatcaatctcagc

SEQ ID NO: 4415956 - DNA, 25 bp, Homo sapien
tctgtagaaaccagggcagagctcc

SEQ ID NO: 4415957 - DNA, 25 bp, Homo sapien
ttctgtagaaaccagggcagagctc

SEQ ID NO: 4415958 - DNA, 25 bp, Homo sapien
aaattgtggataacatctccatgaa

SEQ ID NO: 4415959 - DNA, 25 bp, Homo sapien
agaaattgtggataacatctccatg

SEQ ID NO: 4415960 - DNA, 25 bp, Homo sapien
gaaattgtggataacatctccatga

SEQ ID NO: 4415961 - DNA, 25 bp, Homo sapien
caaaacttgattcccgcaacttcct

SEQ ID NO: 4415962 - DNA, 25 bp, Homo sapien
ttcacgcctgcgatctcaatcatga

SEQ ID NO: 4415963 - DNA, 25 bp, Homo sapien
tctcggtatacagcatgtcgtctgc

SEQ ID NO: 4415964 - DNA, 25 bp, Homo sapien
aacatggcggctcctaggacgtgac

SEQ ID NO: 4415965 - DNA, 25 bp, Homo sapien
tattgtaatggaggtaggaactgca

SEQ ID NO: 4415966 - DNA, 25 bp, Homo sapien
cactttgcaagtcttagggaatttt

SEQ ID NO: 4415967 - DNA, 25 bp, Homo sapien
tatcttatgtttccgtgttctgaca

SEQ ID NO: 4415968 - DNA, 25 bp, Homo sapien
aagaaagtattgtaatggaggtagg

SEQ ID NO: 4415969 - DNA, 25 bp, Homo sapien
attaggaatttcagctgccattaag

SEQ ID NO: 4415970 - DNA, 25 bp, Homo sapien
gaatatcaggcttaatattaggaat

SEQ ID NO: 4415971 - DNA, 25 bp, Homo sapien
ttcagctgccattaagtgcctatct

SEQ ID NO: 4415972 - DNA, 25 bp, Homo sapien
attaagtgcctatcttcttgtcttg

SEQ ID NO: 4415973 - DNA, 25 bp, Homo sapien
cttcacgtttctcatggatatgggt

SEQ ID NO: 4415974 - DNA, 25 bp, Homo sapien
aaagacaggaatgagacccctgcct

SEQ ID NO: 4415975 - DNA, 25 bp, Homo sapien
gaatcttgcttctcgctcttcacgt

SEQ ID NO: 4415976 - DNA, 25 bp, Homo sapien
tacaatatcgtggacagtgttacag

SEQ ID NO: 4415977 - DNA, 25 bp, Homo sapien
agagagattttgcaagaaacaaaca

SEQ ID NO: 4415978 - DNA, 25 bp, Homo sapien
tagagagattttgcaagaaacaaac

SEQ ID NO: 4415979 - DNA, 25 bp, Homo sapien
gagagattttgcaagaaacaaacat

SEQ ID NO: 4415980 - DNA, 25 bp, Homo sapien
ctagagagattttgcaagaaacaaa

SEQ ID NO: 4415981 - DNA, 25 bp, Homo sapien
tggcatttacatatgtctggtacac

SEQ ID NO: 4415982 - DNA, 25 bp, Homo sapien
gtttgcggattttgtcattcatggc

SEQ ID NO: 4415983 - DNA, 25 bp, Homo sapien
aatgtcatgtagttctgggtgattc

SEQ ID NO: 4415984 - DNA, 25 bp, Homo sapien
cttcttggccaaagatgatgcatag

SEQ ID NO: 4415985 - DNA, 25 bp, Homo sapien
tgggaaaagtatgttagctaccagc

SEQ ID NO: 4415986 - DNA, 25 bp, Homo sapien
gaaaagtatgttagctaccagcagc

SEQ ID NO: 4415987 - DNA, 25 bp, Homo sapien
aaagtatgttagctaccagcagctg

SEQ ID NO: 4415988 - DNA, 25 bp, Homo sapien
gaatgggaaaagtatgttagctacc

SEQ ID NO: 4415989 - DNA, 25 bp, Homo sapien
aacactgggaccaatgtcatcaaaa

SEQ ID NO: 4415990 - DNA, 25 bp, Homo sapien
tctacacagtatcccgctataatga

SEQ ID NO: 4415991 - DNA, 25 bp, Homo sapien
taagccactttgcatcatgcctggg

SEQ ID NO: 4415992 - DNA, 25 bp, Homo sapien
tcttatcagtacaccagctttcaaa

SEQ ID NO: 4415993 - DNA, 25 bp, Homo sapien
tccagacatagtagtgatttcttca

SEQ ID NO: 4415994 - DNA, 25 bp, Homo sapien
cactggtttgctggtaatccgtgtg

SEQ ID NO: 4415995 - DNA, 25 bp, Homo sapien
catgaggcggtttcaaagcacgaat

SEQ ID NO: 4415996 - DNA, 25 bp, Homo sapien
tgctggtaatccgtgtgagctgaga

SEQ ID NO: 4415997 - DNA, 25 bp, Homo sapien
tctgtattccgaggattatgaacct

SEQ ID NO: 4415998 - DNA, 25 bp, Homo sapien
tattctcgaatcagtgctgctttca

SEQ ID NO: 4415999 - DNA, 25 bp, Homo sapien
gctgctttcaatctggccatttcat

SEQ ID NO: 4416000 - DNA, 25 bp, Homo sapien
tttcattctgttctccatggactaa

SEQ ID NO: 4416001 - DNA, 25 bp, Homo sapien
tcgcaaggagaaagtatgtgataat

SEQ ID NO: 4416002 - DNA, 25 bp, Homo sapien
tggacaggtcgcaaggagaaagtat

SEQ ID NO: 4416003 - DNA, 25 bp, Homo sapien
caggtcgcaaggagaaagtatgtga

SEQ ID NO: 4416004 - DNA, 25 bp, Homo sapien
gacaggtcgcaaggagaaagtatgt

SEQ ID NO: 4416005 - DNA, 25 bp, Homo sapien
cgtgctcatggccaggtcagtataa

SEQ ID NO: 4416006 - DNA, 25 bp, Homo sapien
tgcagctggtaacagagcaaattaa

SEQ ID NO: 4416007 - DNA, 25 bp, Homo sapien
tgcttcaccgtgctcatggccaggt

SEQ ID NO: 4416008 - DNA, 25 bp, Homo sapien
gctggtaacagagcaaattaaaggg

SEQ ID NO: 4416009 - DNA, 25 bp, Homo sapien
ccatgcctggttcttgtattacagt

SEQ ID NO: 4416010 - DNA, 25 bp, Homo sapien
atgcctggttcttgtattacagtaa

SEQ ID NO: 4416011 - DNA, 25 bp, Homo sapien
catgcctggttcttgtattacagta

SEQ ID NO: 4416012 - DNA, 25 bp, Homo sapien
gcctggttcttgtattacagtaata

SEQ ID NO: 4416013 - DNA, 25 bp, Homo sapien
tgtttaggtaaatgatcttttctta

SEQ ID NO: 4416014 - DNA, 25 bp, Homo sapien
attgtttaggtaaatgatcttttct

SEQ ID NO: 4416015 - DNA, 25 bp, Homo sapien
cattgtttaggtaaatgatcttttc

SEQ ID NO: 4416016 - DNA, 25 bp, Homo sapien
tcattgtttaggtaaatgatctttt

SEQ ID NO: 4416017 - DNA, 25 bp, Homo sapien
atatcattagaagggtttgccagcc

SEQ ID NO: 4416018 - DNA, 25 bp, Homo sapien
tgggatttgactgaacttccaatat

SEQ ID NO: 4416019 - DNA, 25 bp, Homo sapien
agttgttactgtatctgcatacata

SEQ ID NO: 4416020 - DNA, 25 bp, Homo sapien
gtatctgcatacatatcattagaag

SEQ ID NO: 4416021 - DNA, 25 bp, Homo sapien
tccatatgccggagactcacagctc

SEQ ID NO: 4416022 - DNA, 25 bp, Homo sapien
ggagactcacagctcaaaacatgta

SEQ ID NO: 4416023 - DNA, 25 bp, Homo sapien
aaacatgtaaagagctgggtacagt

SEQ ID NO: 4416024 - DNA, 25 bp, Homo sapien
acaggactactccatatgccggaga

SEQ ID NO: 4416025 - DNA, 25 bp, Homo sapien
ctcttgctgtaaacgtgcatttcta

SEQ ID NO: 4416026 - DNA, 25 bp, Homo sapien
acctcttgctgtaaacgtgcatttc

SEQ ID NO: 4416027 - DNA, 25 bp, Homo sapien
cctcttgctgtaaacgtgcatttct

SEQ ID NO: 4416028 - DNA, 25 bp, Homo sapien
tctttcctaacagagaagcaggcct

SEQ ID NO: 4416029 - DNA, 25 bp, Homo sapien
tcactgtcttgttgagaaataatgg

SEQ ID NO: 4416030 - DNA, 25 bp, Homo sapien
tgaaggagtcagagccgaatccagg

SEQ ID NO: 4416031 - DNA, 25 bp, Homo sapien
tccttccggccgctgtcactgtctt

SEQ ID NO: 4416032 - DNA, 25 bp, Homo sapien
tcaagaatgatctattcagcaggca

SEQ ID NO: 4416033 - DNA, 25 bp, Homo sapien
taaggatccccttttacatgtgaag

SEQ ID NO: 4416034 - DNA, 25 bp, Homo sapien
gctagtaaacagctgagccggcatt

SEQ ID NO: 4416035 - DNA, 25 bp, Homo sapien
caggtatctaggtttaaatggctcc

SEQ ID NO: 4416036 - DNA, 25 bp, Homo sapien
aaataagcagaaatgcaggattagt

SEQ ID NO: 4416037 - DNA, 25 bp, Homo sapien
agcagaaatgcaggattagtgaaaa

SEQ ID NO: 4416038 - DNA, 25 bp, Homo sapien
gaaatgcaggattagtgaaaatgcc

SEQ ID NO: 4416039 - DNA, 25 bp, Homo sapien
taagcagaaatgcaggattagtgaa

SEQ ID NO: 4416040 - DNA, 25 bp, Homo sapien
tccactgtgacgctaagaatagagt

SEQ ID NO: 4416041 - DNA, 25 bp, Homo sapien
gttggcagttttcccgtccactgtg

SEQ ID NO: 4416042 - DNA, 25 bp, Homo sapien
gagtcatcctttacacttacacagt

SEQ ID NO: 4416043 - DNA, 25 bp, Homo sapien
ccgtgtctccaagttaaggttggca

SEQ ID NO: 4416044 - DNA, 25 bp, Homo sapien
tccaccatttctcggagggattcat

SEQ ID NO: 4416045 - DNA, 25 bp, Homo sapien
tctcggagggattcatcgtcttcac

SEQ ID NO: 4416046 - DNA, 25 bp, Homo sapien
ccatttctcggagggattcatcgtc

SEQ ID NO: 4416047 - DNA, 25 bp, Homo sapien
ggagggattcatcgtcttcacttcc

SEQ ID NO: 4416048 - DNA, 25 bp, Homo sapien
taggtaacaaaagtagagtcaagta

SEQ ID NO: 4416049 - DNA, 25 bp, Homo sapien
aggtaacaaaagtagagtcaagtat

SEQ ID NO: 4416050 - DNA, 25 bp, Homo sapien
gaaggatgccttgaaatcacggagc

SEQ ID NO: 4416051 - DNA, 25 bp, Homo sapien
tttaggttgctcgtcccaagctcgc

SEQ ID NO: 4416052 - DNA, 25 bp, Homo sapien
tcggcagccgagctaaaaacgaacg

SEQ ID NO: 4416053 - DNA, 25 bp, Homo sapien
aactgtgcaatgaagttcggcagcc

SEQ ID NO: 4416054 - DNA, 25 bp, Homo sapien
cgcaggtgcgttcggcaaagggcag

SEQ ID NO: 4416055 - DNA, 25 bp, Homo sapien
aggagtgtgacctcaggacgcgcgg

SEQ ID NO: 4416056 - DNA, 25 bp, Homo sapien
cgcgggcgcaggtgcgttcggcaaa

SEQ ID NO: 4416057 - DNA, 25 bp, Homo sapien
ggcaggagtgtgacctcaggacgcg

SEQ ID NO: 4416058 - DNA, 25 bp, Homo sapien
acaagcgaggccagagcagggcact

SEQ ID NO: 4416059 - DNA, 25 bp, Homo sapien
tgggtgatggagtccccgaagagca

SEQ ID NO: 4416060 - DNA, 25 bp, Homo sapien
cggcctcgcacagcgccatggagca

SEQ ID NO: 4416061 - DNA, 25 bp, Homo sapien
ccccgaagagcaacaagcgaggcca

SEQ ID NO: 4416062 - DNA, 25 bp, Homo sapien
gcgggcccggaaggcgcagccactg

SEQ ID NO: 4416063 - DNA, 25 bp, Homo sapien
gaggacggcgaggagcctcggcctg

SEQ ID NO: 4416064 - DNA, 25 bp, Homo sapien
cggcccagccgtctcgggcgccgaa

SEQ ID NO: 4416065 - DNA, 25 bp, Homo sapien
tccggtgtctccacgggcgtggcca

SEQ ID NO: 4416066 - DNA, 25 bp, Homo sapien
gaccgttcccttcatgggaggtgag

SEQ ID NO: 4416067 - DNA, 25 bp, Homo sapien
accgcgcatctcgacccgggtggga

SEQ ID NO: 4416068 - DNA, 25 bp, Homo sapien
tgatcttggatgaacggatggtcct

SEQ ID NO: 4416069 - DNA, 25 bp, Homo sapien
tgaaggcgttttacttccaaggtca

SEQ ID NO: 4416070 - DNA, 25 bp, Homo sapien
tggaattcggcagctctgactgccc

SEQ ID NO: 4416071 - DNA, 25 bp, Homo sapien
ttcccatggaattcggcagctctga

SEQ ID NO: 4416072 - DNA, 25 bp, Homo sapien
ctttgctggttaccgagctgagggt

SEQ ID NO: 4416073 - DNA, 25 bp, Homo sapien
tgctttgctggttaccgagctgagg

SEQ ID NO: 4416074 - DNA, 25 bp, Homo sapien
tttgattgcttcactccaggaggtc

SEQ ID NO: 4416075 - DNA, 25 bp, Homo sapien
ctgtaaccgggcatctcagcgaggg

SEQ ID NO: 4416076 - DNA, 25 bp, Homo sapien
tacaggtaagtacacctggcagcac

SEQ ID NO: 4416077 - DNA, 25 bp, Homo sapien
gcgagggcagttctgattggcaact

SEQ ID NO: 4416078 - DNA, 25 bp, Homo sapien
cagcctgtcagccagcgatgctccc

SEQ ID NO: 4416079 - DNA, 25 bp, Homo sapien
gtcagccagcgatgctccccatcca

SEQ ID NO: 4416080 - DNA, 25 bp, Homo sapien
ctgtcagccagcgatgctccccatc

SEQ ID NO: 4416081 - DNA, 25 bp, Homo sapien
accagcctgtcagccagcgatgctc

SEQ ID NO: 4416082 - DNA, 25 bp, Homo sapien
agtgtttatggtcgcagtaaccggc

SEQ ID NO: 4416083 - DNA, 25 bp, Homo sapien
gaattgtgggcaagaagtgtttatg

SEQ ID NO: 4416084 - DNA, 25 bp, Homo sapien
tgggcaagaagtgtttatggtcgca

SEQ ID NO: 4416085 - DNA, 25 bp, Homo sapien
taaaaagatgaattgtgggcaagaa

SEQ ID NO: 4416086 - DNA, 25 bp, Homo sapien
aaatccacgattcagaacatcacat

SEQ ID NO: 4416087 - DNA, 25 bp, Homo sapien
atccacgattcagaacatcacattt

SEQ ID NO: 4416088 - DNA, 25 bp, Homo sapien
gaaaatccacgattcagaacatcac

SEQ ID NO: 4416089 - DNA, 25 bp, Homo sapien
ctgaaaatccacgattcagaacatc

SEQ ID NO: 4416090 - DNA, 25 bp, Homo sapien
ctgctactgggatgtccaaactgtt

SEQ ID NO: 4416091 - DNA, 25 bp, Homo sapien
aagaaaattgtaactgctactggga

SEQ ID NO: 4416092 - DNA, 25 bp, Homo sapien
taattttggcccacctggtattgta

SEQ ID NO: 4416093 - DNA, 25 bp, Homo sapien
ttcctgattaatcttggaaggataa

SEQ ID NO: 4416094 - DNA, 25 bp, Homo sapien
caagagaaacatgagtcctcaccag

SEQ ID NO: 4416095 - DNA, 25 bp, Homo sapien
gcctgttattcatgatgtcactggg

SEQ ID NO: 4416096 - DNA, 25 bp, Homo sapien
tataagtgacaattcaggtgaacac

SEQ ID NO: 4416097 - DNA, 25 bp, Homo sapien
ttttcgtcactagtatccagatggt

SEQ ID NO: 4416098 - DNA, 25 bp, Homo sapien
gcaccatgctctttaggttcgcagc

SEQ ID NO: 4416099 - DNA, 25 bp, Homo sapien
gtcggcgtgatgagaatgactcgat

SEQ ID NO: 4416100 - DNA, 25 bp, Homo sapien
aggttcgcagcgtactcctccaggg

SEQ ID NO: 4416101 - DNA, 25 bp, Homo sapien
ttctcagggatgtccacggacttca

SEQ ID NO: 4416102 - DNA, 25 bp, Homo sapien
gcaggaaaccactgtcctatcagag

SEQ ID NO: 4416103 - DNA, 25 bp, Homo sapien
tccctcagcattcctatccagattt

SEQ ID NO: 4416104 - DNA, 25 bp, Homo sapien
gccgagattggctgtggtttgttta

SEQ ID NO: 4416105 - DNA, 25 bp, Homo sapien
tggacataccgagcccctaagaaac

SEQ ID NO: 4416106 - DNA, 25 bp, Homo sapien
aaagtctgcattgggctacattcaa

SEQ ID NO: 4416107 - DNA, 25 bp, Homo sapien
aaaaagtctgcattgggctacattc

SEQ ID NO: 4416108 - DNA, 25 bp, Homo sapien
ccatcactgaccttttaaaaagtct

SEQ ID NO: 4416109 - DNA, 25 bp, Homo sapien
ttaaaaagtctgcattgggctacat

SEQ ID NO: 4416110 - DNA, 25 bp, Homo sapien
gtaaacacgcattggcatattcacc

SEQ ID NO: 4416111 - DNA, 25 bp, Homo sapien
aagtacgtcagtcccacagtcttgg

SEQ ID NO: 4416112 - DNA, 25 bp, Homo sapien
ggtccacaggtcaagtacgtcagtc

SEQ ID NO: 4416113 - DNA, 25 bp, Homo sapien
cacgcattggcatattcaccaacaa

SEQ ID NO: 4416114 - DNA, 25 bp, Homo sapien
tgagtcagtgcaccattccatggga

SEQ ID NO: 4416115 - DNA, 25 bp, Homo sapien
tgtgtgatcctatttaccccgagag

SEQ ID NO: 4416116 - DNA, 25 bp, Homo sapien
gatgtcactgcgcactaactcctag

SEQ ID NO: 4416117 - DNA, 25 bp, Homo sapien
tgtgactgcgtcagaaaccagctgt

SEQ ID NO: 4416118 - DNA, 25 bp, Homo sapien
gaactctagatgtcgacccttttgg

SEQ ID NO: 4416119 - DNA, 25 bp, Homo sapien
aaaggtgactggtgactcggcatcc

SEQ ID NO: 4416120 - DNA, 25 bp, Homo sapien
ggtagtatgactttcccactggtga

SEQ ID NO: 4416121 - DNA, 25 bp, Homo sapien
caggctagagaacgatggcacagtc

SEQ ID NO: 4416122 - DNA, 25 bp, Homo sapien
taagtgagctgggacctcattccag

SEQ ID NO: 4416123 - DNA, 25 bp, Homo sapien
cattaagtgagctgggacctcattc

SEQ ID NO: 4416124 - DNA, 25 bp, Homo sapien
attaagtgagctgggacctcattcc

SEQ ID NO: 4416125 - DNA, 25 bp, Homo sapien
aagtgagctgggacctcattccagg

SEQ ID NO: 4416126 - DNA, 25 bp, Homo sapien
gggtgatagactgtctccccccaca

SEQ ID NO: 4416127 - DNA, 25 bp, Homo sapien
ctgggtgatagactgtctcccccca

SEQ ID NO: 4416128 - DNA, 25 bp, Homo sapien
tgggtgatagactgtctccccccac

SEQ ID NO: 4416129 - DNA, 25 bp, Homo sapien
catcccgccagtaaggaagcagcaa

SEQ ID NO: 4416130 - DNA, 25 bp, Homo sapien
catctcccagcagacttaattcagg

SEQ ID NO: 4416131 - DNA, 25 bp, Homo sapien
tcccctttggagacaaatgtagtcc

SEQ ID NO: 4416132 - DNA, 25 bp, Homo sapien
ttctctatcaaaggccagagatgcg

SEQ ID NO: 4416133 - DNA, 25 bp, Homo sapien
gcagatttgggtctcctgtgattgg

SEQ ID NO: 4416134 - DNA, 25 bp, Homo sapien
gacaactttgagttctgtagataac

SEQ ID NO: 4416135 - DNA, 25 bp, Homo sapien
tctacgtattgacaactttgagttc

SEQ ID NO: 4416136 - DNA, 25 bp, Homo sapien
tgtagataacaagcagatttgggtc

SEQ ID NO: 4416137 - DNA, 25 bp, Homo sapien
cagtggcaaaggtttaagcctgagg

SEQ ID NO: 4416138 - DNA, 25 bp, Homo sapien
tggcaaaggtttaagcctgaggaaa

SEQ ID NO: 4416139 - DNA, 25 bp, Homo sapien
agtggcaaaggtttaagcctgagga

SEQ ID NO: 4416140 - DNA, 25 bp, Homo sapien
tcagtggcaaaggtttaagcctgag

SEQ ID NO: 4416141 - DNA, 25 bp, Homo sapien
taaccacctaccttacagtgagggc

SEQ ID NO: 4416142 - DNA, 25 bp, Homo sapien
gccagccaggagatagaatactacc

SEQ ID NO: 4416143 - DNA, 25 bp, Homo sapien
aatctaccaactgtttagggccctg

SEQ ID NO: 4416144 - DNA, 25 bp, Homo sapien
gggctgtccccacaagacttgatac

SEQ ID NO: 4416145 - DNA, 25 bp, Homo sapien
tcaggctgacttcgttgcaatagag

SEQ ID NO: 4416146 - DNA, 25 bp, Homo sapien
tctgcacaaataggatgtagggact

SEQ ID NO: 4416147 - DNA, 25 bp, Homo sapien
gggcccagctgtcatatagagtatt

SEQ ID NO: 4416148 - DNA, 25 bp, Homo sapien
ttgggctttgactaaggaactcctg

SEQ ID NO: 4416149 - DNA, 25 bp, Homo sapien
cggtagtatgtctagccagcagctc

SEQ ID NO: 4416150 - DNA, 25 bp, Homo sapien
cagacattctgctctcggtagtatg

SEQ ID NO: 4416151 - DNA, 25 bp, Homo sapien
gtggtgtaatacaggcagcacagac

SEQ ID NO: 4416152 - DNA, 25 bp, Homo sapien
gacaacatcgttgggtctgtcctgg

SEQ ID NO: 4416153 - DNA, 25 bp, Homo sapien
tgcagggacctttctggccgctgtg

SEQ ID NO: 4416154 - DNA, 25 bp, Homo sapien
gaacaatccagctgtcaatgcgtgt

SEQ ID NO: 4416155 - DNA, 25 bp, Homo sapien
ggagaggcaggtctcagaacaatcc

SEQ ID NO: 4416156 - DNA, 25 bp, Homo sapien
actgacaactcctgcaaggtgtgct

SEQ ID NO: 4416157 - DNA, 25 bp, Homo sapien
cgatctcaggtcaccgcagcctccg

SEQ ID NO: 4416158 - DNA, 25 bp, Homo sapien
gcgcgatctcaggtcaccgcagcct

SEQ ID NO: 4416159 - DNA, 25 bp, Homo sapien
atggggtcttgccatgttggccagg

SEQ ID NO: 4416160 - DNA, 25 bp, Homo sapien
tggggtcttgccatgttggccaggc

SEQ ID NO: 4416161 - DNA, 25 bp, Homo sapien
aagtgcctggttatctgttgggtac

SEQ ID NO: 4416162 - DNA, 25 bp, Homo sapien
tgactgttgacatgatgaatgccca

SEQ ID NO: 4416163 - DNA, 25 bp, Homo sapien
gctgtgtaaccttctgtcaggtgat

SEQ ID NO: 4416164 - DNA, 25 bp, Homo sapien
gaaaggttttatgagaaccagaggc

SEQ ID NO: 4416165 - DNA, 25 bp, Homo sapien
cagggacctagtgaatgaagttgtg

SEQ ID NO: 4416166 - DNA, 25 bp, Homo sapien
tgcatagtatgacatgttgcccatg

SEQ ID NO: 4416167 - DNA, 25 bp, Homo sapien
caaatgttaggaacctgatggcccg

SEQ ID NO: 4416168 - DNA, 25 bp, Homo sapien
cctaggttttgtgataaggatgcaa

SEQ ID NO: 4416169 - DNA, 25 bp, Homo sapien
caagtggtagctacttccattgcct

SEQ ID NO: 4416170 - DNA, 25 bp, Homo sapien
tcaccaagtggtagctacttccatt

SEQ ID NO: 4416171 - DNA, 25 bp, Homo sapien
gtggtagctacttccattgccttca

SEQ ID NO: 4416172 - DNA, 25 bp, Homo sapien
tccattgccttcatccccttgatat

SEQ ID NO: 4416173 - DNA, 25 bp, Homo sapien
gccttgccataactccagggtggct

SEQ ID NO: 4416174 - DNA, 25 bp, Homo sapien
gaagaattatagatccttaaccaag

SEQ ID NO: 4416175 - DNA, 25 bp, Homo sapien
gatccttaaccaagttcacatcagc

SEQ ID NO: 4416176 - DNA, 25 bp, Homo sapien
actgtggtggccttgccataactcc

SEQ ID NO: 4416177 - DNA, 25 bp, Homo sapien
ccttttatcgttagtgctctccagc

SEQ ID NO: 4416178 - DNA, 25 bp, Homo sapien
aaagccagagttgcgggttggtcct

SEQ ID NO: 4416179 - DNA, 25 bp, Homo sapien
tcttaggaaggtttgctgaacggaa

SEQ ID NO: 4416180 - DNA, 25 bp, Homo sapien
gaagtcttatgacaaggatgcaaac

SEQ ID NO: 4416181 - DNA, 25 bp, Homo sapien
gaggagctgtgaagtcataagttga

SEQ ID NO: 4416182 - DNA, 25 bp, Homo sapien
aaaagtagcgcggatgtagaggagc

SEQ ID NO: 4416183 - DNA, 25 bp, Homo sapien
catgataccatcctgtctacttcat

SEQ ID NO: 4416184 - DNA, 25 bp, Homo sapien
ttgattattgttgaagctggtgagg

SEQ ID NO: 4416185 - DNA, 25 bp, Homo sapien
ttttggagtcacaacttcttaatgg

SEQ ID NO: 4416186 - DNA, 25 bp, Homo sapien
ttggagtcacaacttcttaatggct

SEQ ID NO: 4416187 - DNA, 25 bp, Homo sapien
tttttggagtcacaacttcttaatg

SEQ ID NO: 4416188 - DNA, 25 bp, Homo sapien
tttggagtcacaacttcttaatggc

SEQ ID NO: 4416189 - DNA, 25 bp, Homo sapien
tgtctcagtcaacaagaagttcagg

SEQ ID NO: 4416190 - DNA, 25 bp, Homo sapien
ttttctgggtggtacagcaactcag

SEQ ID NO: 4416191 - DNA, 25 bp, Homo sapien
ctcatggttttaagatggttctctt

SEQ ID NO: 4416192 - DNA, 25 bp, Homo sapien
tgtcctcatggatgtcacctcatgg

SEQ ID NO: 4416193 - DNA, 25 bp, Homo sapien
catgtgtttagttggaatagtctgg

SEQ ID NO: 4416194 - DNA, 25 bp, Homo sapien
gataggtaatagtctgggaagttaa

SEQ ID NO: 4416195 - DNA, 25 bp, Homo sapien
gttcaggcggttctcccgccttaga

SEQ ID NO: 4416196 - DNA, 25 bp, Homo sapien
cagccttgggcacaccttttggtgc

SEQ ID NO: 4416197 - DNA, 25 bp, Homo sapien
aggatctggcctcgttgcctaggct

SEQ ID NO: 4416198 - DNA, 25 bp, Homo sapien
tccaacttacagctattgccattat

SEQ ID NO: 4416199 - DNA, 25 bp, Homo sapien
aatttccaacttacagctattgcca

SEQ ID NO: 4416200 - DNA, 25 bp, Homo sapien
taatgaaatttccaacttacagcta

SEQ ID NO: 4416201 - DNA, 25 bp, Homo sapien
tcctccaaggccaattgtggttgat

SEQ ID NO: 4416202 - DNA, 25 bp, Homo sapien
tttgaaacctaaatgcttaactgcc

SEQ ID NO: 4416203 - DNA, 25 bp, Homo sapien
gatgttaattttgcttactggctgc

SEQ ID NO: 4416204 - DNA, 25 bp, Homo sapien
gctccaagggagatttaatgtaact

SEQ ID NO: 4416205 - DNA, 25 bp, Homo sapien
cagacgtgggcatcaagacaaagga

SEQ ID NO: 4416206 - DNA, 25 bp, Homo sapien
gactcatacgtctgcgtccaggaag

SEQ ID NO: 4416207 - DNA, 25 bp, Homo sapien
tcgaaaggctcgtctcgcaggagct

SEQ ID NO: 4416208 - DNA, 25 bp, Homo sapien
tgtactcacaggtaaggtcctagga

SEQ ID NO: 4416209 - DNA, 25 bp, Homo sapien
taacttgcagtgtgctttgggaaaa

SEQ ID NO: 4416210 - DNA, 25 bp, Homo sapien
ctgcccctaacttgcagtgtgcttt

SEQ ID NO: 4416211 - DNA, 25 bp, Homo sapien
cactgtttaggcagttgagccctgg

SEQ ID NO: 4416212 - DNA, 25 bp, Homo sapien
ccactgtttaggcagttgagccctg

SEQ ID NO: 4416213 - DNA, 25 bp, Homo sapien
ggcagctcagatgcaatccaggaat

SEQ ID NO: 4416214 - DNA, 25 bp, Homo sapien
aagacataaaagagttggccttgcc

SEQ ID NO: 4416215 - DNA, 25 bp, Homo sapien
taaccacctgctactaggagttccc

SEQ ID NO: 4416216 - DNA, 25 bp, Homo sapien
actcaatgcccgttccatggcggca

SEQ ID NO: 4416217 - DNA, 25 bp, Homo sapien
tagtgacatgacctaggacttgggc

SEQ ID NO: 4416218 - DNA, 25 bp, Homo sapien
gcttcatagccaagtagcggtgtca

SEQ ID NO: 4416219 - DNA, 25 bp, Homo sapien
gaccaactggtaacaaacttcatgg

SEQ ID NO: 4416220 - DNA, 25 bp, Homo sapien
aactgaagcaccgaagttagtgaca

SEQ ID NO: 4416221 - DNA, 25 bp, Homo sapien
tctgaaccagttctgcaagtgactg

SEQ ID NO: 4416222 - DNA, 25 bp, Homo sapien
gaaatggctcctgtatcacatacgg

SEQ ID NO: 4416223 - DNA, 25 bp, Homo sapien
tgttatgccctatgtaacagcagag

SEQ ID NO: 4416224 - DNA, 25 bp, Homo sapien
tctgtggcaacagggagtttcctta

SEQ ID NO: 4416225 - DNA, 25 bp, Homo sapien
taggcacacaccaccccgtacctgg

SEQ ID NO: 4416226 - DNA, 25 bp, Homo sapien
tgaaattttttgtagacgtgggatc

SEQ ID NO: 4416227 - DNA, 25 bp, Homo sapien
gcagtgtcataatcatggatcactc

SEQ ID NO: 4416228 - DNA, 25 bp, Homo sapien
acacaccaccccgtacctggccaat

SEQ ID NO: 4416229 - DNA, 25 bp, Homo sapien
tgcacttcttatttttcgctcttca

SEQ ID NO: 4416230 - DNA, 25 bp, Homo sapien
cagaaacgatagataattcccaagg

SEQ ID NO: 4416231 - DNA, 25 bp, Homo sapien
taatgtactgtgtactggatggtta

SEQ ID NO: 4416232 - DNA, 25 bp, Homo sapien
gagctagtagcatatgttcaagttg

SEQ ID NO: 4416233 - DNA, 25 bp, Homo sapien
ctatctgaaaatgaagggtgattac

SEQ ID NO: 4416234 - DNA, 25 bp, Homo sapien
actaatccagagagtaaggtcttct

SEQ ID NO: 4416235 - DNA, 25 bp, Homo sapien
tatttaatagccaatgcaactaatc

SEQ ID NO: 4416236 - DNA, 25 bp, Homo sapien
tgattacttccggtaccttgctgaa

SEQ ID NO: 4416237 - DNA, 25 bp, Homo sapien
actgattaaatctctaagctgggca

SEQ ID NO: 4416238 - DNA, 25 bp, Homo sapien
taagtcttaggtgattcactgcctc

SEQ ID NO: 4416239 - DNA, 25 bp, Homo sapien
gcctccttggttaaggcaacaaatc

SEQ ID NO: 4416240 - DNA, 25 bp, Homo sapien
cactgcgcttcagtctgggttggca

SEQ ID NO: 4416241 - DNA, 25 bp, Homo sapien
atcaagataactccttaccttcgga

SEQ ID NO: 4416242 - DNA, 25 bp, Homo sapien
aatcaagataactccttaccttcgg

SEQ ID NO: 4416243 - DNA, 25 bp, Homo sapien
tcaagataactccttaccttcggac

SEQ ID NO: 4416244 - DNA, 25 bp, Homo sapien
caatcaagataactccttaccttcg

SEQ ID NO: 4416245 - DNA, 25 bp, Homo sapien
tgtatacactgtcatcagcagtggt

SEQ ID NO: 4416246 - DNA, 25 bp, Homo sapien
ccggccgtggttcagacttttaatg

SEQ ID NO: 4416247 - DNA, 25 bp, Homo sapien
cagcagtggttgagaaggtcattca

SEQ ID NO: 4416248 - DNA, 25 bp, Homo sapien
aaagatgtgcggttttttccagata

SEQ ID NO: 4416249 - DNA, 25 bp, Homo sapien
cttcatagttgtctccaaagccctg

SEQ ID NO: 4416250 - DNA, 25 bp, Homo sapien
ttttaaagacttcgcacagactgca

SEQ ID NO: 4416251 - DNA, 25 bp, Homo sapien
tgatgaacggcaaatctcctcccct

SEQ ID NO: 4416252 - DNA, 25 bp, Homo sapien
ccctccttcatagtagcttggcata

SEQ ID NO: 4416253 - DNA, 25 bp, Homo sapien
gatcttactgagtgttggcaagagc

SEQ ID NO: 4416254 - DNA, 25 bp, Homo sapien
tgtagagtaatgcaggtcctagcca

SEQ ID NO: 4416255 - DNA, 25 bp, Homo sapien
gaatacatgacaggttgaaaactgg

SEQ ID NO: 4416256 - DNA, 25 bp, Homo sapien
taaagtccagattgaagaatacatg

SEQ ID NO: 4416257 - DNA, 25 bp, Homo sapien
tctagcatcgagcagaagaccgaca

SEQ ID NO: 4416258 - DNA, 25 bp, Homo sapien
tgagatccatctgcaccacggtgct

SEQ ID NO: 4416259 - DNA, 25 bp, Homo sapien
tccgcctggagggtcatctctagca

SEQ ID NO: 4416260 - DNA, 25 bp, Homo sapien
cacctgcatgaaggcagtgaccgag

SEQ ID NO: 4416261 - DNA, 25 bp, Homo sapien
tgttgagcgttcaccgaatacaaga

SEQ ID NO: 4416262 - DNA, 25 bp, Homo sapien
gcgttcaccgaatacaagataacaa

SEQ ID NO: 4416263 - DNA, 25 bp, Homo sapien
aaacccttaccctcaagaggctcat

SEQ ID NO: 4416264 - DNA, 25 bp, Homo sapien
cagctgttgagcgttcaccgaatac

SEQ ID NO: 4416265 - DNA, 25 bp, Homo sapien
tattggaaatgcgtcctgaatggtc

SEQ ID NO: 4416266 - DNA, 25 bp, Homo sapien
gacatggaggtcagatgtaacttct

SEQ ID NO: 4416267 - DNA, 25 bp, Homo sapien
cgtggcccagtaaagtcaccaggga

SEQ ID NO: 4416268 - DNA, 25 bp, Homo sapien
tgaatggtctggatccactctccaa

SEQ ID NO: 4416269 - DNA, 25 bp, Homo sapien
gttgagggtagcacagtgagtctcc

SEQ ID NO: 4416270 - DNA, 25 bp, Homo sapien
gagggtagcacagtgagtctcccag

SEQ ID NO: 4416271 - DNA, 25 bp, Homo sapien
tagcacagtgagtctcccagcatgg

SEQ ID NO: 4416272 - DNA, 25 bp, Homo sapien
cacttgcacttttcacagagctgct

SEQ ID NO: 4416273 - DNA, 25 bp, Homo sapien
cagcgtgattgatcacattcaaaag

SEQ ID NO: 4416274 - DNA, 25 bp, Homo sapien
gggttctcttaactgtcaggccttc

SEQ ID NO: 4416275 - DNA, 25 bp, Homo sapien
taaatcagcgtgattgatcacattc

SEQ ID NO: 4416276 - DNA, 25 bp, Homo sapien
cttcactgggttctcttaactgtca

SEQ ID NO: 4416277 - DNA, 25 bp, Homo sapien
ggctgggccaggcattgaccctttc

SEQ ID NO: 4416278 - DNA, 25 bp, Homo sapien
gctgggccaggcattgaccctttca

SEQ ID NO: 4416279 - DNA, 25 bp, Homo sapien
ctgggccaggcattgaccctttcat

SEQ ID NO: 4416280 - DNA, 25 bp, Homo sapien
taaggccgcagctcgcaaagaatgc

SEQ ID NO: 4416281 - DNA, 25 bp, Homo sapien
tgaaacagctcactcaatgacaggg

SEQ ID NO: 4416282 - DNA, 25 bp, Homo sapien
gatcaataccctgaaggtgaaccgt

SEQ ID NO: 4416283 - DNA, 25 bp, Homo sapien
caagggatccctagcggttgaggct

SEQ ID NO: 4416284 - DNA, 25 bp, Homo sapien
tccctactgcgtcacgggtcactgt

SEQ ID NO: 4416285 - DNA, 25 bp, Homo sapien
actgcgtcacgggtcactgttgcac

SEQ ID NO: 4416286 - DNA, 25 bp, Homo sapien
gccatccataaaggcctaatgggag

SEQ ID NO: 4416287 - DNA, 25 bp, Homo sapien
gggaggcaggccatccataaaggcc

SEQ ID NO: 4416288 - DNA, 25 bp, Homo sapien
ggactgtgacgggaccaggtaccag

SEQ ID NO: 4416289 - DNA, 25 bp, Homo sapien
ctggctgcctcgaggtctagagtcc

SEQ ID NO: 4416290 - DNA, 25 bp, Homo sapien
aggtctagagtcctgggactgtgac

SEQ ID NO: 4416291 - DNA, 25 bp, Homo sapien
cctcgaggtctagagtcctgggact

SEQ ID NO: 4416292 - DNA, 25 bp, Homo sapien
aaggagtagctgtcaaggtcacgca

SEQ ID NO: 4416293 - DNA, 25 bp, Homo sapien
cagtttccagatgaggacgttcagg

SEQ ID NO: 4416294 - DNA, 25 bp, Homo sapien
tttgcaggaaccctaggaggcaagt

SEQ ID NO: 4416295 - DNA, 25 bp, Homo sapien
gtggcaggaccagacatagaaactc

SEQ ID NO: 4416296 - DNA, 25 bp, Homo sapien
gctccttctcctggagaactgggcc

SEQ ID NO: 4416297 - DNA, 25 bp, Homo sapien
tgctccttctcctggagaactgggc

SEQ ID NO: 4416298 - DNA, 25 bp, Homo sapien
catgtccaagatcaataatcaatag

SEQ ID NO: 4416299 - DNA, 25 bp, Homo sapien
tccaagatcaataatcaatagcatg

SEQ ID NO: 4416300 - DNA, 25 bp, Homo sapien
tcaataatcaatagcatgacagcat

SEQ ID NO: 4416301 - DNA, 25 bp, Homo sapien
gatcaataatcaatagcatgacagc

SEQ ID NO: 4416302 - DNA, 25 bp, Homo sapien
agtgcaagctcggttttcagggacg

SEQ ID NO: 4416303 - DNA, 25 bp, Homo sapien
ggctaaaagaagaactggcaccagg

SEQ ID NO: 4416304 - DNA, 25 bp, Homo sapien
tacctagtgtcgtgttgtgccctgc

SEQ ID NO: 4416305 - DNA, 25 bp, Homo sapien
cccaggtagtttgccatggctgaca

SEQ ID NO: 4416306 - DNA, 25 bp, Homo sapien
gaggaaggagatctaacaagctgct

SEQ ID NO: 4416307 - DNA, 25 bp, Homo sapien
tgctgtaggagtccccggtagaacc

SEQ ID NO: 4416308 - DNA, 25 bp, Homo sapien
tgtgatgctcatttctcaaatcggg

SEQ ID NO: 4416309 - DNA, 25 bp, Homo sapien
ggattccgtctcgttgctcacaagc

SEQ ID NO: 4416310 - DNA, 25 bp, Homo sapien
ctgtaaagtactggcaggaccctca

SEQ ID NO: 4416311 - DNA, 25 bp, Homo sapien
ttcctgtaaagtactggcaggaccc

SEQ ID NO: 4416312 - DNA, 25 bp, Homo sapien
agtgtctaagccctttctttgacaa

SEQ ID NO: 4416313 - DNA, 25 bp, Homo sapien
gtgtctaagccctttctttgacaaa

SEQ ID NO: 4416314 - DNA, 25 bp, Homo sapien
ggaggccacggagcactcgaagact

SEQ ID NO: 4416315 - DNA, 25 bp, Homo sapien
acagaagccgcccacggagaggcag

SEQ ID NO: 4416316 - DNA, 25 bp, Homo sapien
acttgggcagcgctggcacaggaca

SEQ ID NO: 4416317 - DNA, 25 bp, Homo sapien
tgcttctcggaggcctcacagaagc

SEQ ID NO: 4416318 - DNA, 25 bp, Homo sapien
ctgcatgagcgtgtgggtaaatgct

SEQ ID NO: 4416319 - DNA, 25 bp, Homo sapien
tgagcttgttgacaagtggcttgaa

SEQ ID NO: 4416320 - DNA, 25 bp, Homo sapien
ctttgagcttgttgacaagtggctt

SEQ ID NO: 4416321 - DNA, 25 bp, Homo sapien
gcttgttgacaagtggcttgaatct

SEQ ID NO: 4416322 - DNA, 25 bp, Homo sapien
gaaacactcgctgcttacaaccagg

SEQ ID NO: 4416323 - DNA, 25 bp, Homo sapien
ggtggagactacactcaaaccctga

SEQ ID NO: 4416324 - DNA, 25 bp, Homo sapien
tgaaagattcttcgtgagcccacag

SEQ ID NO: 4416325 - DNA, 25 bp, Homo sapien
catcagtgtggtagggagtcaccca

SEQ ID NO: 4416326 - DNA, 25 bp, Homo sapien
atctgagcacaacgtccccgccagc

SEQ ID NO: 4416327 - DNA, 25 bp, Homo sapien
aacacatctgagcacaacgtccccg

SEQ ID NO: 4416328 - DNA, 25 bp, Homo sapien
acatctgagcacaacgtccccgcca

SEQ ID NO: 4416329 - DNA, 25 bp, Homo sapien
gtccccgccagccagatttggcgct

SEQ ID NO: 4416330 - DNA, 25 bp, Homo sapien
gccacatatgtgtctgagcagcgag

SEQ ID NO: 4416331 - DNA, 25 bp, Homo sapien
caggcctggccggtatccagaagga

SEQ ID NO: 4416332 - DNA, 25 bp, Homo sapien
cttctcagtgatgccgatggcctct

SEQ ID NO: 4416333 - DNA, 25 bp, Homo sapien
tctccaggcaaatagcgcaggcctg

SEQ ID NO: 4416334 - DNA, 25 bp, Homo sapien
tcacagtctatccttgcttgtttcc

SEQ ID NO: 4416335 - DNA, 25 bp, Homo sapien
gcttgtttccagcaaagaagaacgt

SEQ ID NO: 4416336 - DNA, 25 bp, Homo sapien
aaaggccccactgaggtggcccagg

SEQ ID NO: 4416337 - DNA, 25 bp, Homo sapien
agcgccaatggtgctgcctgcagaa

SEQ ID NO: 4416338 - DNA, 25 bp, Homo sapien
gctaaaggccccactgaggtggccc

SEQ ID NO: 4416339 - DNA, 25 bp, Homo sapien
agccaccagcgccaatggtgctgcc

SEQ ID NO: 4416340 - DNA, 25 bp, Homo sapien
ggtagatctcttgtgaccccattaa

SEQ ID NO: 4416341 - DNA, 25 bp, Homo sapien
tgagccccaccgggtgtccggtcag

SEQ ID NO: 4416342 - DNA, 25 bp, Homo sapien
ttgtgaccccattaactctgagccc

SEQ ID NO: 4416343 - DNA, 25 bp, Homo sapien
ttcctgagctggtagatctcttgtg

SEQ ID NO: 4416344 - DNA, 25 bp, Homo sapien
agcaccccgacccagttctgtgaag

SEQ ID NO: 4416345 - DNA, 25 bp, Homo sapien
tggatccctagcaccccgacccagt

SEQ ID NO: 4416346 - DNA, 25 bp, Homo sapien
accccgacccagttctgtgaagcgt

SEQ ID NO: 4416347 - DNA, 25 bp, Homo sapien
cctagcaccccgacccagttctgtg

SEQ ID NO: 4416348 - DNA, 25 bp, Homo sapien
ctgcttcctccgaaccttctgggca

SEQ ID NO: 4416349 - DNA, 25 bp, Homo sapien
acttgcagacgctcagaagcaccag

SEQ ID NO: 4416350 - DNA, 25 bp, Homo sapien
tggcacattccggaaactgcagctg

SEQ ID NO: 4416351 - DNA, 25 bp, Homo sapien
gggccacacttgcagacgctcagaa

SEQ ID NO: 4416352 - DNA, 25 bp, Homo sapien
cttggcttgcagaggaacgtctcct

SEQ ID NO: 4416353 - DNA, 25 bp, Homo sapien
tttcctccgggcatggctatgtcca

SEQ ID NO: 4416354 - DNA, 25 bp, Homo sapien
gaaacacaattcaggtcataagact

SEQ ID NO: 4416355 - DNA, 25 bp, Homo sapien
gttcaactcataacacacactgtga

SEQ ID NO: 4416356 - DNA, 25 bp, Homo sapien
gccctgggatccacggcattttctc

SEQ ID NO: 4416357 - DNA, 25 bp, Homo sapien
gagctttggccctgggatccacggc

SEQ ID NO: 4416358 - DNA, 25 bp, Homo sapien
tgggatccacggcattttctcccaa

SEQ ID NO: 4416359 - DNA, 25 bp, Homo sapien
caaggcgctaccctgattccatttt

SEQ ID NO: 4416360 - DNA, 25 bp, Homo sapien
gccgtggacaggtggttgaagggtg

SEQ ID NO: 4416361 - DNA, 25 bp, Homo sapien
ggacaggtggttgaagggtgctgct

SEQ ID NO: 4416362 - DNA, 25 bp, Homo sapien
gcaggggccgtggacaggtggttga

SEQ ID NO: 4416363 - DNA, 25 bp, Homo sapien
ggagcaggggccgtggacaggtggt

SEQ ID NO: 4416364 - DNA, 25 bp, Homo sapien
tggggggttggcgagctcttctgag

SEQ ID NO: 4416365 - DNA, 25 bp, Homo sapien
gggttggcgagctcttctgagaagg

SEQ ID NO: 4416366 - DNA, 25 bp, Homo sapien
cttggggggttggcgagctcttctg

SEQ ID NO: 4416367 - DNA, 25 bp, Homo sapien
gggggttggcgagctcttctgagaa

SEQ ID NO: 4416368 - DNA, 25 bp, Homo sapien
ctccactcagagccctcttctggct

SEQ ID NO: 4416369 - DNA, 25 bp, Homo sapien
tccactcagagccctcttctggctg

SEQ ID NO: 4416370 - DNA, 25 bp, Homo sapien
ctcttctggctgctccttggcccac

SEQ ID NO: 4416371 - DNA, 25 bp, Homo sapien
agagccctcttctggctgctccttg

SEQ ID NO: 4416372 - DNA, 25 bp, Homo sapien
ggcaaacaaaaaccacgcaagctga

SEQ ID NO: 4416373 - DNA, 25 bp, Homo sapien
cctagcacgcagactctgggcttca

SEQ ID NO: 4416374 - DNA, 25 bp, Homo sapien
tctgtggccaaatgcggctcgcgag

SEQ ID NO: 4416375 - DNA, 25 bp, Homo sapien
agatgggaggctgcaaagaaacacg

SEQ ID NO: 4416376 - DNA, 25 bp, Homo sapien
agctccttctggcatgtcacatcct

SEQ ID NO: 4416377 - DNA, 25 bp, Homo sapien
tgtttgcagcctggcgtgctgttac

SEQ ID NO: 4416378 - DNA, 25 bp, Homo sapien
ctgtttgcagcctggcgtgctgtta

SEQ ID NO: 4416379 - DNA, 25 bp, Homo sapien
tcctgaaagcatctccgaataatat

SEQ ID NO: 4416380 - DNA, 25 bp, Homo sapien
ctgatgccaaacacatcctgaaagc

SEQ ID NO: 4416381 - DNA, 25 bp, Homo sapien
ggacccctgaatgatgcattgaaat

SEQ ID NO: 4416382 - DNA, 25 bp, Homo sapien
attgaaatcccacaaatcccaagtg

SEQ ID NO: 4416383 - DNA, 25 bp, Homo sapien
tgtgccatgctctgctggcgtggtc

SEQ ID NO: 4416384 - DNA, 25 bp, Homo sapien
cctgctgacggccagtgtgtgtcct

SEQ ID NO: 4416385 - DNA, 25 bp, Homo sapien
tgaggctcagggctctaggtttgct

SEQ ID NO: 4416386 - DNA, 25 bp, Homo sapien
tcaataggacactggcaaacacggg

SEQ ID NO: 4416387 - DNA, 25 bp, Homo sapien
aagggcttgtatatcccgaagccag

SEQ ID NO: 4416388 - DNA, 25 bp, Homo sapien
tatcccgaagccaggttcgcaggtc

SEQ ID NO: 4416389 - DNA, 25 bp, Homo sapien
ggctggttaggcagcggaagatcat

SEQ ID NO: 4416390 - DNA, 25 bp, Homo sapien
cgaagccaggttcgcaggtctggct

SEQ ID NO: 4416391 - DNA, 25 bp, Homo sapien
caacttacccgagcagagggagcag

SEQ ID NO: 4416392 - DNA, 25 bp, Homo sapien
taattaacatctccgtgcgtatgcg

SEQ ID NO: 4416393 - DNA, 25 bp, Homo sapien
gcttacctgactgcctgtgaggaga

SEQ ID NO: 4416394 - DNA, 25 bp, Homo sapien
gaaatacccgagaccagtcaaggaa

SEQ ID NO: 4416395 - DNA, 25 bp, Homo sapien
ttagcaggtcttcacgcgaccgcac

SEQ ID NO: 4416396 - DNA, 25 bp, Homo sapien
ctcctgctgttagcaggtcttcacg

SEQ ID NO: 4416397 - DNA, 25 bp, Homo sapien
aggtcttcacgcgaccgcacatgct

SEQ ID NO: 4416398 - DNA, 25 bp, Homo sapien
tcttgggggagtcggccgaggtcag

SEQ ID NO: 4416399 - DNA, 25 bp, Homo sapien
gcgctgctcacactcggctgctgtg

SEQ ID NO: 4416400 - DNA, 25 bp, Homo sapien
caagatctggaagcgcgttgtcact

SEQ ID NO: 4416401 - DNA, 25 bp, Homo sapien
gccctctggtggcaagatctggaag

SEQ ID NO: 4416402 - DNA, 25 bp, Homo sapien
agcgcgttgtcactgcatcccagca

SEQ ID NO: 4416403 - DNA, 25 bp, Homo sapien
cagggcctgggacatttccgaggaa

SEQ ID NO: 4416404 - DNA, 25 bp, Homo sapien
caaggatgccagagctacgaggagc

SEQ ID NO: 4416405 - DNA, 25 bp, Homo sapien
ggacatttccgaggaatcagaggca

SEQ ID NO: 4416406 - DNA, 25 bp, Homo sapien
gaatcagaggcaaggatgccagagc

SEQ ID NO: 4416407 - DNA, 25 bp, Homo sapien
tgtgtggaagaggtcattccaattt

SEQ ID NO: 4416408 - DNA, 25 bp, Homo sapien
tggtggtcccaccagaccctctcct

SEQ ID NO: 4416409 - DNA, 25 bp, Homo sapien
gagagagggcctcgaatggtggtcc

SEQ ID NO: 4416410 - DNA, 25 bp, Homo sapien
ctgtgtggaagaggtcattccaatt

SEQ ID NO: 4416411 - DNA, 25 bp, Homo sapien
gggtcttccatgatgacaccaggtc

SEQ ID NO: 4416412 - DNA, 25 bp, Homo sapien
cagtgaccaggtgtttagaagcagc

SEQ ID NO: 4416413 - DNA, 25 bp, Homo sapien
gagggtgaactctgctttcaagcag

SEQ ID NO: 4416414 - DNA, 25 bp, Homo sapien
caaggtaggctgttagcactgaggc

SEQ ID NO: 4416415 - DNA, 25 bp, Homo sapien
aacacatgagccaatctgccatctc

SEQ ID NO: 4416416 - DNA, 25 bp, Homo sapien
gggcttgggaaaccataggtgataa

SEQ ID NO: 4416417 - DNA, 25 bp, Homo sapien
catctccactggagccaatgctctt

SEQ ID NO: 4416418 - DNA, 25 bp, Homo sapien
tctttctgtgttcccattggcctgc

SEQ ID NO: 4416419 - DNA, 25 bp, Homo sapien
aaggcgtcccgggtcctagagagca

SEQ ID NO: 4416420 - DNA, 25 bp, Homo sapien
cactgcccatcagaagctcatacag

SEQ ID NO: 4416421 - DNA, 25 bp, Homo sapien
catcactgcccatcagaagctcata

SEQ ID NO: 4416422 - DNA, 25 bp, Homo sapien
acagcagaaggcgtcccgggtccta

SEQ ID NO: 4416423 - DNA, 25 bp, Homo sapien
tcacccatccacccatccttgctgc

SEQ ID NO: 4416424 - DNA, 25 bp, Homo sapien
acccatccacccatccttgctgcag

SEQ ID NO: 4416425 - DNA, 25 bp, Homo sapien
cccatccacccatccttgctgcaga

SEQ ID NO: 4416426 - DNA, 25 bp, Homo sapien
ccatccacccatccttgctgcagac

SEQ ID NO: 4416427 - DNA, 25 bp, Homo sapien
aggccgtctcgctctccggtgtccc

SEQ ID NO: 4416428 - DNA, 25 bp, Homo sapien
gggccttctttagcgaggccgtctc

SEQ ID NO: 4416429 - DNA, 25 bp, Homo sapien
gggccagggcgcttagccctaagtg

SEQ ID NO: 4416430 - DNA, 25 bp, Homo sapien
cctcatcctgaaaggccagggggcc

SEQ ID NO: 4416431 - DNA, 25 bp, Homo sapien
tctcttagcagagcctggacggaat

SEQ ID NO: 4416432 - DNA, 25 bp, Homo sapien
gacatgtccttgtatggcctgctag

SEQ ID NO: 4416433 - DNA, 25 bp, Homo sapien
ttagggaggccaattctgaaagact

SEQ ID NO: 4416434 - DNA, 25 bp, Homo sapien
catagacgcacattcacctgcaagc

SEQ ID NO: 4416435 - DNA, 25 bp, Homo sapien
acaaaggcttgggtaagtgacttca

SEQ ID NO: 4416436 - DNA, 25 bp, Homo sapien
tctgatgcggacttgtcacaaaggc

SEQ ID NO: 4416437 - DNA, 25 bp, Homo sapien
gaaatggtcccttgtcccacgttca

SEQ ID NO: 4416438 - DNA, 25 bp, Homo sapien
ggtcgccaccttccagctatagtag

SEQ ID NO: 4416439 - DNA, 25 bp, Homo sapien
taaattttcatggagagctttaagt

SEQ ID NO: 4416440 - DNA, 25 bp, Homo sapien
gcatgttatcctcatggttgtactc

SEQ ID NO: 4416441 - DNA, 25 bp, Homo sapien
ccttcggtaattatctttaatgacg

SEQ ID NO: 4416442 - DNA, 25 bp, Homo sapien
tatcctcatggttgtactctccagg

SEQ ID NO: 4416443 - DNA, 25 bp, Homo sapien
tctgcaggccgcaaagtgactggtg

SEQ ID NO: 4416444 - DNA, 25 bp, Homo sapien
aaagaccatacataggccaggcaca

SEQ ID NO: 4416445 - DNA, 25 bp, Homo sapien
catgggcaagctgtccttaagaaac

SEQ ID NO: 4416446 - DNA, 25 bp, Homo sapien
actataggcccctgtggattggaca

SEQ ID NO: 4416447 - DNA, 25 bp, Homo sapien
ctgtaaacctagaagtggacttgct

SEQ ID NO: 4416448 - DNA, 25 bp, Homo sapien
catttctgttggctgtaaacctaga

SEQ ID NO: 4416449 - DNA, 25 bp, Homo sapien
ttcttggtacatctgcatgcatttc

SEQ ID NO: 4416450 - DNA, 25 bp, Homo sapien
ggctcatagggtgtgcagatattca

SEQ ID NO: 4416451 - DNA, 25 bp, Homo sapien
cggcagggaaaccgcgcgctcgggg

SEQ ID NO: 4416452 - DNA, 25 bp, Homo sapien
gctggagaagcttccggccggaaac

SEQ ID NO: 4416453 - DNA, 25 bp, Homo sapien
gttacccgggtagcgagcgcagctt

SEQ ID NO: 4416454 - DNA, 25 bp, Homo sapien
gaaacgcgagatccgcgcctaggat

SEQ ID NO: 4416455 - DNA, 25 bp, Homo sapien
cgagcgcagcttccgggaaaggctg

SEQ ID NO: 4416456 - DNA, 25 bp, Homo sapien
tcgccgagccagaaactccagcctc

SEQ ID NO: 4416457 - DNA, 25 bp, Homo sapien
ctcgccgagccagaaactccagcct

SEQ ID NO: 4416458 - DNA, 25 bp, Homo sapien
cgccgagccagaaactccagcctct

SEQ ID NO: 4416459 - DNA, 25 bp, Homo sapien
agcgtgtgccatttggccgagggcg

SEQ ID NO: 4416460 - DNA, 25 bp, Homo sapien
caaagcgtgtgccatttggccgagg

SEQ ID NO: 4416461 - DNA, 25 bp, Homo sapien
cgtgtgccatttggccgagggcggg

SEQ ID NO: 4416462 - DNA, 25 bp, Homo sapien
catcaaagcgtgtgccatttggccg

SEQ ID NO: 4416463 - DNA, 25 bp, Homo sapien
tctgtaacattgtggcaagaagtgc

SEQ ID NO: 4416464 - DNA, 25 bp, Homo sapien
gagtacagcgttctttaaactcttc

SEQ ID NO: 4416465 - DNA, 25 bp, Homo sapien
gcaagaagtgcaataatatttgcct

SEQ ID NO: 4416466 - DNA, 25 bp, Homo sapien
agacagcagcacactgagtacagcg

SEQ ID NO: 4416467 - DNA, 25 bp, Homo sapien
taacctatgtgtaagtacctaagac

SEQ ID NO: 4416468 - DNA, 25 bp, Homo sapien
ggacttagactacatatcaggctga

SEQ ID NO: 4416469 - DNA, 25 bp, Homo sapien
gcatccttggaatgttggcattgca

SEQ ID NO: 4416470 - DNA, 25 bp, Homo sapien
tacctaagaccacatgcatccttgg

SEQ ID NO: 4416471 - DNA, 25 bp, Homo sapien
ctcacaatgtgaaggtagcctcgtt

SEQ ID NO: 4416472 - DNA, 25 bp, Homo sapien
tatcaataggctctcacagttagtg

SEQ ID NO: 4416473 - DNA, 25 bp, Homo sapien
tgtgttcaccacaataggacctagc

SEQ ID NO: 4416474 - DNA, 25 bp, Homo sapien
gatgctggcccgaaggtgtgttcac

SEQ ID NO: 4416475 - DNA, 25 bp, Homo sapien
cctgtcgtctgaaaggaaggcactg

SEQ ID NO: 4416476 - DNA, 25 bp, Homo sapien
tccacaggagttgacagtcttccaa

SEQ ID NO: 4416477 - DNA, 25 bp, Homo sapien
cagggagcccctaccacattatatt

SEQ ID NO: 4416478 - DNA, 25 bp, Homo sapien
tgcctggaccgccataaagccaaga

SEQ ID NO: 4416479 - DNA, 25 bp, Homo sapien
tgtactagacaaaacgtgaaagagc

SEQ ID NO: 4416480 - DNA, 25 bp, Homo sapien
gggttggccacactgaaaacataag

SEQ ID NO: 4416481 - DNA, 25 bp, Homo sapien
taaaacttgcaaagggtagccagga

SEQ ID NO: 4416482 - DNA, 25 bp, Homo sapien
caattttggtatactgggttggcca

SEQ ID NO: 4416483 - DNA, 25 bp, Homo sapien
gaataagatcagtgtttgtaacttc

SEQ ID NO: 4416484 - DNA, 25 bp, Homo sapien
attaggaataagatcagtgtttgta

SEQ ID NO: 4416485 - DNA, 25 bp, Homo sapien
ataagatcagtgtttgtaacttcct

SEQ ID NO: 4416486 - DNA, 25 bp, Homo sapien
tattaggaataagatcagtgtttgt

SEQ ID NO: 4416487 - DNA, 25 bp, Homo sapien
ctttaactctgggcctactccaagg

SEQ ID NO: 4416488 - DNA, 25 bp, Homo sapien
tctgggcctactccaaggttcttta

SEQ ID NO: 4416489 - DNA, 25 bp, Homo sapien
agaatatactggaaaccttcacaca

SEQ ID NO: 4416490 - DNA, 25 bp, Homo sapien
ttcacacacataccaatcccagcct

SEQ ID NO: 4416491 - DNA, 25 bp, Homo sapien
tgatgcactcaggtgaacgactggt

SEQ ID NO: 4416492 - DNA, 25 bp, Homo sapien
caagtcctgatggacgttatgtaca

SEQ ID NO: 4416493 - DNA, 25 bp, Homo sapien
gcatatcgctgtccaaagtgcattc

SEQ ID NO: 4416494 - DNA, 25 bp, Homo sapien
tatgtacatacaccaaacgattttg

SEQ ID NO: 4416495 - DNA, 25 bp, Homo sapien
aaaaatcacttagcatatcaccata

SEQ ID NO: 4416496 - DNA, 25 bp, Homo sapien
taggctggacctctcaacacttggt

SEQ ID NO: 4416497 - DNA, 25 bp, Homo sapien
aatgaagcatatgaagcaagtgaac

SEQ ID NO: 4416498 - DNA, 25 bp, Homo sapien
gcaagtgaacaacttgttgctaaat

SEQ ID NO: 4416499 - DNA, 25 bp, Homo sapien
tgctcttctgaaggtagcgcttcca

SEQ ID NO: 4416500 - DNA, 25 bp, Homo sapien
aaggtagcgcttccaaaaattatgt

SEQ ID NO: 4416501 - DNA, 25 bp, Homo sapien
tataaactgggttcttacaatatgc

SEQ ID NO: 4416502 - DNA, 25 bp, Homo sapien
ggttcttacaatatgcctgcttgct

SEQ ID NO: 4416503 - DNA, 25 bp, Homo sapien
agtgaccccgtcctctagactgtaa

SEQ ID NO: 4416504 - DNA, 25 bp, Homo sapien
taactgaaaatcctctgacaagcat

SEQ ID NO: 4416505 - DNA, 25 bp, Homo sapien
tattccaacgtttaaatcagtgacc

SEQ ID NO: 4416506 - DNA, 25 bp, Homo sapien
tactcaaactggtcatgaacccatc

SEQ ID NO: 4416507 - DNA, 25 bp, Homo sapien
actagtctgataagatgtcaaaatt

SEQ ID NO: 4416508 - DNA, 25 bp, Homo sapien
aactagtctgataagatgtcaaaat

SEQ ID NO: 4416509 - DNA, 25 bp, Homo sapien
caactagtctgataagatgtcaaaa

SEQ ID NO: 4416510 - DNA, 25 bp, Homo sapien
gatgtgaaacctatgagaacccaag

SEQ ID NO: 4416511 - DNA, 25 bp, Homo sapien
cagacctgggtttctcagtactggg

SEQ ID NO: 4416512 - DNA, 25 bp, Homo sapien
cagttagctttctcaggttggcccc

SEQ ID NO: 4416513 - DNA, 25 bp, Homo sapien
caaacaaggaaacactgggccaaat

SEQ ID NO: 4416514 - DNA, 25 bp, Homo sapien
ttgattgcatcagctagtgaggact

SEQ ID NO: 4416515 - DNA, 25 bp, Homo sapien
catcagctagtgaggactgtgcatt

SEQ ID NO: 4416516 - DNA, 25 bp, Homo sapien
cagctagtgaggactgtgcattcct

SEQ ID NO: 4416517 - DNA, 25 bp, Homo sapien
ttgcatcagctagtgaggactgtgc

SEQ ID NO: 4416518 - DNA, 25 bp, Homo sapien
cactagcccagtctgaatgacttag

SEQ ID NO: 4416519 - DNA, 25 bp, Homo sapien
ctgattgtgatgctttgctgacggg

SEQ ID NO: 4416520 - DNA, 25 bp, Homo sapien
gaggacagctgacatcacttagcag

SEQ ID NO: 4416521 - DNA, 25 bp, Homo sapien
gtgtggatgtcagactgagactccg

SEQ ID NO: 4416522 - DNA, 25 bp, Homo sapien
tacagtcatggtcttctgggaatat

SEQ ID NO: 4416523 - DNA, 25 bp, Homo sapien
tttacagtcatggtcttctgggaat

SEQ ID NO: 4416524 - DNA, 25 bp, Homo sapien
ggttttacagtcatggtcttctggg

SEQ ID NO: 4416525 - DNA, 25 bp, Homo sapien
gtcatggtcttctgggaatatttga

SEQ ID NO: 4416526 - DNA, 25 bp, Homo sapien
tccagagatccagagcagacagacg

SEQ ID NO: 4416527 - DNA, 25 bp, Homo sapien
catccagagatccagagcagacaga

SEQ ID NO: 4416528 - DNA, 25 bp, Homo sapien
tccatccagagatccagagcagaca

SEQ ID NO: 4416529 - DNA, 25 bp, Homo sapien
agagatccagagcagacagacgttt

SEQ ID NO: 4416530 - DNA, 25 bp, Homo sapien
ttctcctttcgttgtgagtattcaa

SEQ ID NO: 4416531 - DNA, 25 bp, Homo sapien
tggtcatcttcacgattcccttctc

SEQ ID NO: 4416532 - DNA, 25 bp, Homo sapien
gatctgaaagtgttattgcttctct

SEQ ID NO: 4416533 - DNA, 25 bp, Homo sapien
tgccaaagtaaggacagataacaga

SEQ ID NO: 4416534 - DNA, 25 bp, Homo sapien
gcccatgtgtggtaagtactataat

SEQ ID NO: 4416535 - DNA, 25 bp, Homo sapien
taaacgcttactatctggataacac

SEQ ID NO: 4416536 - DNA, 25 bp, Homo sapien
caaaacactctgtagattatcctga

SEQ ID NO: 4416537 - DNA, 25 bp, Homo sapien
caagaagatgaattactagcccagg

SEQ ID NO: 4416538 - DNA, 25 bp, Homo sapien
ggtcttgcaaccatgtcaaatatat

SEQ ID NO: 4416539 - DNA, 25 bp, Homo sapien
atgcattgccttgaagagctgggct

SEQ ID NO: 4416540 - DNA, 25 bp, Homo sapien
gctaaagacaggaataagtacacaa

SEQ ID NO: 4416541 - DNA, 25 bp, Homo sapien
tagtcctattctagactgcagggaa

SEQ ID NO: 4416542 - DNA, 25 bp, Homo sapien
tatgtaaggaatatggtcctcttca

SEQ ID NO: 4416543 - DNA, 25 bp, Homo sapien
catttatgtaaggaatatggtcctc

SEQ ID NO: 4416544 - DNA, 25 bp, Homo sapien
agcatttatgtaaggaatatggtcc

SEQ ID NO: 4416545 - DNA, 25 bp, Homo sapien
aaagcatttatgtaaggaatatggt

SEQ ID NO: 4416546 - DNA, 25 bp, Homo sapien
tctgtcacgtccatataatttcatc

SEQ ID NO: 4416547 - DNA, 25 bp, Homo sapien
ctctgtcacgtccatataatttcat

SEQ ID NO: 4416548 - DNA, 25 bp, Homo sapien
cctctgtcacgtccatataatttca

SEQ ID NO: 4416549 - DNA, 25 bp, Homo sapien
tgtcacgtccatataatttcatctg

SEQ ID NO: 4416550 - DNA, 25 bp, Homo sapien
aagccaagacttagcggagaaagct

SEQ ID NO: 4416551 - DNA, 25 bp, Homo sapien
aactccactggcatatcttcatcgc

SEQ ID NO: 4416552 - DNA, 25 bp, Homo sapien
catttactacacttggctgaggatg

SEQ ID NO: 4416553 - DNA, 25 bp, Homo sapien
gcacacaatgaagaaaagctgcctg

SEQ ID NO: 4416554 - DNA, 25 bp, Homo sapien
tacatgcttcaatcctaattttgca

SEQ ID NO: 4416555 - DNA, 25 bp, Homo sapien
catatcatgcatcatattaagcagc

SEQ ID NO: 4416556 - DNA, 25 bp, Homo sapien
taagaaaacgtgctttgataggctg

SEQ ID NO: 4416557 - DNA, 25 bp, Homo sapien
tattcatagtacaatgctcaatttt

SEQ ID NO: 4416558 - DNA, 25 bp, Homo sapien
aaccagtcttgcctcattgttatgc

SEQ ID NO: 4416559 - DNA, 25 bp, Homo sapien
aaatctctgacaacttagagaaacc

SEQ ID NO: 4416560 - DNA, 25 bp, Homo sapien
agaaaccctctgttaggatctgggt

SEQ ID NO: 4416561 - DNA, 25 bp, Homo sapien
gatctgggtggacttttctctcagc

SEQ ID NO: 4416562 - DNA, 25 bp, Homo sapien
gcactctctcattactcttcaaatt

SEQ ID NO: 4416563 - DNA, 25 bp, Homo sapien
ctctctcattactcttcaaattcat

SEQ ID NO: 4416564 - DNA, 25 bp, Homo sapien
ctgcactctctcattactcttcaaa

SEQ ID NO: 4416565 - DNA, 25 bp, Homo sapien
actctctcattactcttcaaattca

SEQ ID NO: 4416566 - DNA, 25 bp, Homo sapien
atggtaaaatcactacttcttgcct

SEQ ID NO: 4416567 - DNA, 25 bp, Homo sapien
tatggtaaaatcactacttcttgcc

SEQ ID NO: 4416568 - DNA, 25 bp, Homo sapien
atatggtaaaatcactacttcttgc

SEQ ID NO: 4416569 - DNA, 25 bp, Homo sapien
gatagcagtcttcagttatgtctgg

SEQ ID NO: 4416570 - DNA, 25 bp, Homo sapien
catcaagtatttcatacacagtatg

SEQ ID NO: 4416571 - DNA, 25 bp, Homo sapien
tatgtctggaaaacgaggcaaatct

SEQ ID NO: 4416572 - DNA, 25 bp, Homo sapien
agatgtcctcgtagtcaggccaaga

SEQ ID NO: 4416573 - DNA, 25 bp, Homo sapien
gcagtttcaataccaccacaatgat

SEQ ID NO: 4416574 - DNA, 25 bp, Homo sapien
cattccagtcatttttaccacgtgg

SEQ ID NO: 4416575 - DNA, 25 bp, Homo sapien
taccacgtggcaagttaagctatgc

SEQ ID NO: 4416576 - DNA, 25 bp, Homo sapien
gatagctacagcttgtacatcgtac

SEQ ID NO: 4416577 - DNA, 25 bp, Homo sapien
tatgcttttcagcaagattagacaa

SEQ ID NO: 4416578 - DNA, 25 bp, Homo sapien
cattatgcttttcagcaagattaga

SEQ ID NO: 4416579 - DNA, 25 bp, Homo sapien
tttcattatgcttttcagcaagatt

SEQ ID NO: 4416580 - DNA, 25 bp, Homo sapien
cttttcagcaagattagacaaagac

SEQ ID NO: 4416581 - DNA, 25 bp, Homo sapien
ttctcatcaaaagctttcttcataa

SEQ ID NO: 4416582 - DNA, 25 bp, Homo sapien
tttttctcatcaaaagctttcttca

SEQ ID NO: 4416583 - DNA, 25 bp, Homo sapien
tggcccttgcttcttcccatttttg

SEQ ID NO: 4416584 - DNA, 25 bp, Homo sapien
ctttcttcataatttggtaccactt

SEQ ID NO: 4416585 - DNA, 25 bp, Homo sapien
aagtaaggcaggtgcatctaaacca

SEQ ID NO: 4416586 - DNA, 25 bp, Homo sapien
caggtgcatctaaaccaggaaggag

SEQ ID NO: 4416587 - DNA, 25 bp, Homo sapien
gcaggtgcatctaaaccaggaagga

SEQ ID NO: 4416588 - DNA, 25 bp, Homo sapien
taaggcaggtgcatctaaaccagga

SEQ ID NO: 4416589 - DNA, 25 bp, Homo sapien
gagtgtagggctaatatttccagaa

SEQ ID NO: 4416590 - DNA, 25 bp, Homo sapien
aaacactggtgaaatccacatcaaa

SEQ ID NO: 4416591 - DNA, 25 bp, Homo sapien
taggcaagtctcatgcaaattataa

SEQ ID NO: 4416592 - DNA, 25 bp, Homo sapien
aaaaagtatactgtggtatcctgca

SEQ ID NO: 4416593 - DNA, 25 bp, Homo sapien
gctgctattcttgtgcccactgaga

SEQ ID NO: 4416594 - DNA, 25 bp, Homo sapien
taatctcatgcataggaacccatgc

SEQ ID NO: 4416595 - DNA, 25 bp, Homo sapien
taacactgcaataatgaactgggcc

SEQ ID NO: 4416596 - DNA, 25 bp, Homo sapien
ttaggatccgtcaggactaacccca

SEQ ID NO: 4416597 - DNA, 25 bp, Homo sapien
tgatctcaggcaactactggtctgt

SEQ ID NO: 4416598 - DNA, 25 bp, Homo sapien
tgtagttctgctagcactgacaaac

SEQ ID NO: 4416599 - DNA, 25 bp, Homo sapien
acatacagttgcatgtgtgtactca

SEQ ID NO: 4416600 - DNA, 25 bp, Homo sapien
caattactacgtagaacagttccat

SEQ ID NO: 4416601 - DNA, 25 bp, Homo sapien
caagaaagcattatgatgcccttgg

SEQ ID NO: 4416602 - DNA, 25 bp, Homo sapien
tgaacagtctaatcccaatccctgg

SEQ ID NO: 4416603 - DNA, 25 bp, Homo sapien
cagtaaatgcctacacaagtggcaa

SEQ ID NO: 4416604 - DNA, 25 bp, Homo sapien
tgggcacactcactgttaaacattc

SEQ ID NO: 4416605 - DNA, 25 bp, Homo sapien
tacacacagtgaacagtaaatgcgt

SEQ ID NO: 4416606 - DNA, 25 bp, Homo sapien
ccaatgcctttttgctgagagttgt

SEQ ID NO: 4416607 - DNA, 25 bp, Homo sapien
ttctcataaagtgaagctacctcag

SEQ ID NO: 4416608 - DNA, 25 bp, Homo sapien
aaagactggattccaggatgacaca

SEQ ID NO: 4416609 - DNA, 25 bp, Homo sapien
ctggagcaggacggagatgaaacgg

SEQ ID NO: 4416610 - DNA, 25 bp, Homo sapien
gatgaaacggacataaacacattgt

SEQ ID NO: 4416611 - DNA, 25 bp, Homo sapien
ggagcaggacggagatgaaacggac

SEQ ID NO: 4416612 - DNA, 25 bp, Homo sapien
agcaggacggagatgaaacggacat

SEQ ID NO: 4416613 - DNA, 25 bp, Homo sapien
tggtttgtcgacaaatgagtagtag

SEQ ID NO: 4416614 - DNA, 25 bp, Homo sapien
tgctactggtttgtcgacaaatgag

SEQ ID NO: 4416615 - DNA, 25 bp, Homo sapien
tactggtttgtcgacaaatgagtag

SEQ ID NO: 4416616 - DNA, 25 bp, Homo sapien
ttgtcgacaaatgagtagtagagtg

SEQ ID NO: 4416617 - DNA, 25 bp, Homo sapien
tttgaagaacgacatattcctgaag

SEQ ID NO: 4416618 - DNA, 25 bp, Homo sapien
ggctctgttttgaagaacgacatat

SEQ ID NO: 4416619 - DNA, 25 bp, Homo sapien
tcctgaagtagattcctgcagagat

SEQ ID NO: 4416620 - DNA, 25 bp, Homo sapien
cagagtatgatgctcctttggatgt

SEQ ID NO: 4416621 - DNA, 25 bp, Homo sapien
cagttgctgttgactcgaccagtgt

SEQ ID NO: 4416622 - DNA, 25 bp, Homo sapien
cgaccagtgtgctaaattgtttctg

SEQ ID NO: 4416623 - DNA, 25 bp, Homo sapien
gctgttgactcgaccagtgtgctaa

SEQ ID NO: 4416624 - DNA, 25 bp, Homo sapien
gactcgaccagtgtgctaaattgtt

SEQ ID NO: 4416625 - DNA, 25 bp, Homo sapien
gaaacacgttctatcagtgtcctct

SEQ ID NO: 4416626 - DNA, 25 bp, Homo sapien
agccaatataatgaattcttagtca

SEQ ID NO: 4416627 - DNA, 25 bp, Homo sapien
gaatttctgtgtactaagccaatat

SEQ ID NO: 4416628 - DNA, 25 bp, Homo sapien
atggaaacacgttctatcagtgtcc

SEQ ID NO: 4416629 - DNA, 25 bp, Homo sapien
actgtggtcacttaagagaatatcc

SEQ ID NO: 4416630 - DNA, 25 bp, Homo sapien
gccacactgcaggttaatttagcta

SEQ ID NO: 4416631 - DNA, 25 bp, Homo sapien
agtttgtgctaattgccctgtatcc

SEQ ID NO: 4416632 - DNA, 25 bp, Homo sapien
tagaactcctacacaagactcaatg

SEQ ID NO: 4416633 - DNA, 25 bp, Homo sapien
cagtatgccacagagccgatcatta

SEQ ID NO: 4416634 - DNA, 25 bp, Homo sapien
ccaatatcgaccgtttatagggaat

SEQ ID NO: 4416635 - DNA, 25 bp, Homo sapien
cactatgtcctacacagattcctct

SEQ ID NO: 4416636 - DNA, 25 bp, Homo sapien
tactaagccggaagtctaagagcca

SEQ ID NO: 4416637 - DNA, 25 bp, Homo sapien
tactatgtgacacacatcaaatacc

SEQ ID NO: 4416638 - DNA, 25 bp, Homo sapien
cttatgtttgattgagtacttacta

SEQ ID NO: 4416639 - DNA, 25 bp, Homo sapien
taaaataataatggtcatacttatg

SEQ ID NO: 4416640 - DNA, 25 bp, Homo sapien
tcccgagtagattatacacgtgcac

SEQ ID NO: 4416641 - DNA, 25 bp, Homo sapien
aaaggctgagttttagtcacggtct

SEQ ID NO: 4416642 - DNA, 25 bp, Homo sapien
ttcctctgcagttctaggctctggt

SEQ ID NO: 4416643 - DNA, 25 bp, Homo sapien
gagttttagtcacggtctctgtggc

SEQ ID NO: 4416644 - DNA, 25 bp, Homo sapien
ttttagtcacggtctctgtggcatt

SEQ ID NO: 4416645 - DNA, 25 bp, Homo sapien
acctggccataactgccaatctcaa

SEQ ID NO: 4416646 - DNA, 25 bp, Homo sapien
gccaatctcaaactaactacatcaa

SEQ ID NO: 4416647 - DNA, 25 bp, Homo sapien
caaactaactacatcaacatatagg

SEQ ID NO: 4416648 - DNA, 25 bp, Homo sapien
agtctcaccccgctgactgcaacct

SEQ ID NO: 4416649 - DNA, 25 bp, Homo sapien
ttctcaactaagctcacttcttcat

SEQ ID NO: 4416650 - DNA, 25 bp, Homo sapien
aggagaagagatttagtataaactg

SEQ ID NO: 4416651 - DNA, 25 bp, Homo sapien
ggagaagagatttagtataaactga

SEQ ID NO: 4416652 - DNA, 25 bp, Homo sapien
ctcaactaagctcacttcttcatgg

SEQ ID NO: 4416653 - DNA, 25 bp, Homo sapien
ttgtccaccatatgctgcaaaaatt

SEQ ID NO: 4416654 - DNA, 25 bp, Homo sapien
gctttgcaagagctattgatacatt

SEQ ID NO: 4416655 - DNA, 25 bp, Homo sapien
aaaaattgactttgccattccaaga

SEQ ID NO: 4416656 - DNA, 25 bp, Homo sapien
gctcacctgctttacaatatacatt

SEQ ID NO: 4416657 - DNA, 25 bp, Homo sapien
gcctgaacacaggagttgctatctg

SEQ ID NO: 4416658 - DNA, 25 bp, Homo sapien
tctttgccaatccagtatgtgggaa

SEQ ID NO: 4416659 - DNA, 25 bp, Homo sapien
tatcagctttcacctagttggaacc

SEQ ID NO: 4416660 - DNA, 25 bp, Homo sapien
ttccaatgtccataccaggttttac

SEQ ID NO: 4416661 - DNA, 25 bp, Homo sapien
gggtcacatggtaggtctaattttc

SEQ ID NO: 4416662 - DNA, 25 bp, Homo sapien
caaacttttctccaccggaaggatg

SEQ ID NO: 4416663 - DNA, 25 bp, Homo sapien
gctggctgagcatcctgtatataat

SEQ ID NO: 4416664 - DNA, 25 bp, Homo sapien
tctggagtcggagacttgggcccaa

SEQ ID NO: 4416665 - DNA, 25 bp, Homo sapien
cattgtatggatatccaccatgtgt

SEQ ID NO: 4416666 - DNA, 25 bp, Homo sapien
ttttttattcaaaggaagtgccata

SEQ ID NO: 4416667 - DNA, 25 bp, Homo sapien
aaatcatgtcaattccatgacactc

SEQ ID NO: 4416668 - DNA, 25 bp, Homo sapien
gtgccataacacttcaaatcatgtc

SEQ ID NO: 4416669 - DNA, 25 bp, Homo sapien
tatctaaagacgattgcatggcccc

SEQ ID NO: 4416670 - DNA, 25 bp, Homo sapien
tatctcatattcatgggtggcccaa

SEQ ID NO: 4416671 - DNA, 25 bp, Homo sapien
tcatagctttgagcgctctgtccca

SEQ ID NO: 4416672 - DNA, 25 bp, Homo sapien
gactgaatttcgtatggcaggacct

SEQ ID NO: 4416673 - DNA, 25 bp, Homo sapien
gattgttggacccacactgtgtttc

SEQ ID NO: 4416674 - DNA, 25 bp, Homo sapien
tgagaaccaatgtgataatcaagaa

SEQ ID NO: 4416675 - DNA, 25 bp, Homo sapien
ccgaaggatgcaaacgaaagggaga

SEQ ID NO: 4416676 - DNA, 25 bp, Homo sapien
gcctggagcgaaccagaggacttgt

SEQ ID NO: 4416677 - DNA, 25 bp, Homo sapien
cagccctgcacgggacagagggctt

SEQ ID NO: 4416678 - DNA, 25 bp, Homo sapien
agccctgcacgggacagagggcttt

SEQ ID NO: 4416679 - DNA, 25 bp, Homo sapien
ggcagccctgcacgggacagagggc

SEQ ID NO: 4416680 - DNA, 25 bp, Homo sapien
agggtgctccgtgtcagtgcaggtg

SEQ ID NO: 4416681 - DNA, 25 bp, Homo sapien
tttgtagtttagaaacagctgcggc

SEQ ID NO: 4416682 - DNA, 25 bp, Homo sapien
ggcatccattgtggcactcagccca

SEQ ID NO: 4416683 - DNA, 25 bp, Homo sapien
cagctgcggcaagcatttaggtaaa

SEQ ID NO: 4416684 - DNA, 25 bp, Homo sapien
ttaaaggagattaagactcgactcc

SEQ ID NO: 4416685 - DNA, 25 bp, Homo sapien
aaaaacaagtaaatggtgtggctgg

SEQ ID NO: 4416686 - DNA, 25 bp, Homo sapien
gtctttcccagggtccgctcactga

SEQ ID NO: 4416687 - DNA, 25 bp, Homo sapien
ttgtccttcccgagctgccgtcttt

SEQ ID NO: 4416688 - DNA, 25 bp, Homo sapien
acaactcctcgccttcctagttggg

SEQ ID NO: 4416689 - DNA, 25 bp, Homo sapien
cggctccgcgcgggctgcgcgcact

SEQ ID NO: 4416690 - DNA, 25 bp, Homo sapien
gctgcgcgcactgggcgccgggctc

SEQ ID NO: 4416691 - DNA, 25 bp, Homo sapien
tccgcgcgggctgcgcgcactgggc

SEQ ID NO: 4416692 - DNA, 25 bp, Homo sapien
tgcgcgcactgggcgccgggctcgg

SEQ ID NO: 4416693 - DNA, 25 bp, Homo sapien
tgggtttgcttttctcgctctgagc

SEQ ID NO: 4416694 - DNA, 25 bp, Homo sapien
gccgcagaactggactttcgggttg

SEQ ID NO: 4416695 - DNA, 25 bp, Homo sapien
tcgggttgggacagtacacccgatc

SEQ ID NO: 4416696 - DNA, 25 bp, Homo sapien
tggactttcgggttgggacagtaca

SEQ ID NO: 4416697 - DNA, 25 bp, Homo sapien
gattgactgatgtactgctaagcta

SEQ ID NO: 4416698 - DNA, 25 bp, Homo sapien
tgagccatcaggaccagagtacaac

SEQ ID NO: 4416699 - DNA, 25 bp, Homo sapien
tcatgacagtcaggaagtaggcttc

SEQ ID NO: 4416700 - DNA, 25 bp, Homo sapien
tgagccttaaactccgcgtctgcga

SEQ ID NO: 4416701 - DNA, 25 bp, Homo sapien
ctgaagaaccaacactggccgtttg

SEQ ID NO: 4416702 - DNA, 25 bp, Homo sapien
gtcttcatctccattgatgctcatc

SEQ ID NO: 4416703 - DNA, 25 bp, Homo sapien
catcgctttggtcgctgcagtgaga

SEQ ID NO: 4416704 - DNA, 25 bp, Homo sapien
ttgatgctcatcatcgctttggtcg

SEQ ID NO: 4416705 - DNA, 25 bp, Homo sapien
gtcgctgcagtgagagggttttcca

SEQ ID NO: 4416706 - DNA, 25 bp, Homo sapien
aaagacgtagccacccccaaatgtg

SEQ ID NO: 4416707 - DNA, 25 bp, Homo sapien
gtagcaccctaaagacgtagccacc

SEQ ID NO: 4416708 - DNA, 25 bp, Homo sapien
aagtagcaccctaaagacgtagcca

SEQ ID NO: 4416709 - DNA, 25 bp, Homo sapien
ttaagtagcaccctaaagacgtagc

SEQ ID NO: 4416710 - DNA, 25 bp, Homo sapien
caactggcgattctgggtaaaggta

SEQ ID NO: 4416711 - DNA, 25 bp, Homo sapien
gaagcttctggtaatcccaaacaga

SEQ ID NO: 4416712 - DNA, 25 bp, Homo sapien
tacaggtactgatgacaacacaatg

SEQ ID NO: 4416713 - DNA, 25 bp, Homo sapien
tacacaggttagtcacacagagtga

SEQ ID NO: 4416714 - DNA, 25 bp, Homo sapien
ggctttgctgttgatgaccttctct

SEQ ID NO: 4416715 - DNA, 25 bp, Homo sapien
tagaaacctgaagctatgcgatctg

SEQ ID NO: 4416716 - DNA, 25 bp, Homo sapien
ggttacagcatagacgccagggtca

SEQ ID NO: 4416717 - DNA, 25 bp, Homo sapien
ttgggtcctgtgcaataacacttga

SEQ ID NO: 4416718 - DNA, 25 bp, Homo sapien
gaaatttcagagcaacagaggcaaa

SEQ ID NO: 4416719 - DNA, 25 bp, Homo sapien
ggctgctctgtcacaattggtatgc

SEQ ID NO: 4416720 - DNA, 25 bp, Homo sapien
tgctctgtcacaattggtatgctgt

SEQ ID NO: 4416721 - DNA, 25 bp, Homo sapien
atggggaaggacaatgttaaatggc

SEQ ID NO: 4416722 - DNA, 25 bp, Homo sapien
ctctgtcacaattggtatgctgttt

SEQ ID NO: 4416723 - DNA, 25 bp, Homo sapien
agtgactgtcgtatctggagctgtc

SEQ ID NO: 4416724 - DNA, 25 bp, Homo sapien
gatggcctctcttatcaatgcccag

SEQ ID NO: 4416725 - DNA, 25 bp, Homo sapien
tcagatggcctctcttatcaatgcc

SEQ ID NO: 4416726 - DNA, 25 bp, Homo sapien
agacagtgactgtcgtatctggagc

SEQ ID NO: 4416727 - DNA, 25 bp, Homo sapien
ggtttctgtcttgatggagtgggta

SEQ ID NO: 4416728 - DNA, 25 bp, Homo sapien
tctgtcttgatggagtgggtaggca

SEQ ID NO: 4416729 - DNA, 25 bp, Homo sapien
gggtttctgtcttgatggagtgggt

SEQ ID NO: 4416730 - DNA, 25 bp, Homo sapien
tttctgtcttgatggagtgggtagg

SEQ ID NO: 4416731 - DNA, 25 bp, Homo sapien
tggagttcgcctttgagcatttggg

SEQ ID NO: 4416732 - DNA, 25 bp, Homo sapien
tgaactggtcagtattgagattccg

SEQ ID NO: 4416733 - DNA, 25 bp, Homo sapien
gagattccgatcgaaaaccaccacc

SEQ ID NO: 4416734 - DNA, 25 bp, Homo sapien
agaaggtcgagtctggagttcgcct

SEQ ID NO: 4416735 - DNA, 25 bp, Homo sapien
atcccaactctgttcaaacactagg

SEQ ID NO: 4416736 - DNA, 25 bp, Homo sapien
cccaactctgttcaaacactaggac

SEQ ID NO: 4416737 - DNA, 25 bp, Homo sapien
acatcccaactctgttcaaacacta

SEQ ID NO: 4416738 - DNA, 25 bp, Homo sapien
tcacacacatcccaactctgttcaa

SEQ ID NO: 4416739 - DNA, 25 bp, Homo sapien
cactgtcaaaaacatagtcctctga

SEQ ID NO: 4416740 - DNA, 25 bp, Homo sapien
gcatccgcagactgagatccgaggg

SEQ ID NO: 4416741 - DNA, 25 bp, Homo sapien
ttcatgccaggcatccgcagactga

SEQ ID NO: 4416742 - DNA, 25 bp, Homo sapien
tcctctgaattcatgccaggcatcc

SEQ ID NO: 4416743 - DNA, 25 bp, Homo sapien
ttctagggtatattcaaagttgttc

SEQ ID NO: 4416744 - DNA, 25 bp, Homo sapien
gcttctagggtatattcaaagttgt

SEQ ID NO: 4416745 - DNA, 25 bp, Homo sapien
gaagcttctagggtatattcaaagt

SEQ ID NO: 4416746 - DNA, 25 bp, Homo sapien
tttgaagcttctagggtatattcaa

SEQ ID NO: 4416747 - DNA, 25 bp, Homo sapien
ggatgatggattccttcactgctgc

SEQ ID NO: 4416748 - DNA, 25 bp, Homo sapien
tcaaggtgatgggatagaactggcc

SEQ ID NO: 4416749 - DNA, 25 bp, Homo sapien
tacgtcatggtactgtctcctggct

SEQ ID NO: 4416750 - DNA, 25 bp, Homo sapien
aactggcctttgttcaggtacgtca

SEQ ID NO: 4416751 - DNA, 25 bp, Homo sapien
caatgccttaactgatcttctctgc

SEQ ID NO: 4416752 - DNA, 25 bp, Homo sapien
catctttgtttagcggtgtgctgcc

SEQ ID NO: 4416753 - DNA, 25 bp, Homo sapien
tatgtcaatgcatctttgtttagcg

SEQ ID NO: 4416754 - DNA, 25 bp, Homo sapien
tgtgctgccgggagtgccagtactt

SEQ ID NO: 4416755 - DNA, 25 bp, Homo sapien
tgggatcccagcagttcaaaataag

SEQ ID NO: 4416756 - DNA, 25 bp, Homo sapien
gggacattctcaggttagccagcta

SEQ ID NO: 4416757 - DNA, 25 bp, Homo sapien
ctctgggaataaaagcgggctcttg

SEQ ID NO: 4416758 - DNA, 25 bp, Homo sapien
cccacagagaggttagttacacggt

SEQ ID NO: 4416759 - DNA, 25 bp, Homo sapien
tgtgaaggaaatggcgttatacgca

SEQ ID NO: 4416760 - DNA, 25 bp, Homo sapien
gcaatctcctcgatgttactgatag

SEQ ID NO: 4416761 - DNA, 25 bp, Homo sapien
ggcgttatacgcaatctcctcgatg

SEQ ID NO: 4416762 - DNA, 25 bp, Homo sapien
tactgatagtgttgaagctttcttt

SEQ ID NO: 4416763 - DNA, 25 bp, Homo sapien
tcaaatggctggacataaggcgccc

SEQ ID NO: 4416764 - DNA, 25 bp, Homo sapien
tcaatagagggaggagacagatatc

SEQ ID NO: 4416765 - DNA, 25 bp, Homo sapien
ttagagtcgcccacaaggagtaact

SEQ ID NO: 4416766 - DNA, 25 bp, Homo sapien
cagactcaaggctgaacaggcagga

SEQ ID NO: 4416767 - DNA, 25 bp, Homo sapien
tttaatgcttcaaaggcaattgctt

SEQ ID NO: 4416768 - DNA, 25 bp, Homo sapien
caaagctccatcttttaatgcttca

SEQ ID NO: 4416769 - DNA, 25 bp, Homo sapien
gcttcaaaggcaattgcttcttctc

SEQ ID NO: 4416770 - DNA, 25 bp, Homo sapien
taatgcttcaaaggcaattgcttct

SEQ ID NO: 4416771 - DNA, 25 bp, Homo sapien
tgttgaaattggctctggcacaccc

SEQ ID NO: 4416772 - DNA, 25 bp, Homo sapien
tcacaaactgggacaaagagcttcc

SEQ ID NO: 4416773 - DNA, 25 bp, Homo sapien
ccccagggaacaaggcgctctgatt

SEQ ID NO: 4416774 - DNA, 25 bp, Homo sapien
cacagcgtcctctgttctgacaggg

SEQ ID NO: 4416775 - DNA, 25 bp, Homo sapien
acaccgcccacatgtgggcttggtt

SEQ ID NO: 4416776 - DNA, 25 bp, Homo sapien
ccacaccgcccacatgtgggcttgg

SEQ ID NO: 4416777 - DNA, 25 bp, Homo sapien
cttcccacaccgcccacatgtgggc

SEQ ID NO: 4416778 - DNA, 25 bp, Homo sapien
tcccacaccgcccacatgtgggctt

SEQ ID NO: 4416779 - DNA, 25 bp, Homo sapien
accaagacacaattccagtaaagct

SEQ ID NO: 4416780 - DNA, 25 bp, Homo sapien
cagtaaagcttgctaactgtctagt

SEQ ID NO: 4416781 - DNA, 25 bp, Homo sapien
ttccagtaaagcttgctaactgtct

SEQ ID NO: 4416782 - DNA, 25 bp, Homo sapien
accacaaaccaagacacaattccag

SEQ ID NO: 4416783 - DNA, 25 bp, Homo sapien
tcacagcaggtatagggaaagtaac

SEQ ID NO: 4416784 - DNA, 25 bp, Homo sapien
tcaaaacacagatcaccatcagagg

SEQ ID NO: 4416785 - DNA, 25 bp, Homo sapien
tgcgtctgccaagttagtcctcaaa

SEQ ID NO: 4416786 - DNA, 25 bp, Homo sapien
aagcgctgttcacacctggctgcgt

SEQ ID NO: 4416787 - DNA, 25 bp, Homo sapien
cagcccacaagaacaatatttaaag

SEQ ID NO: 4416788 - DNA, 25 bp, Homo sapien
gacttccaagtgcagtaggttagca

SEQ ID NO: 4416789 - DNA, 25 bp, Homo sapien
taaagatgacttccaagtgcagtag

SEQ ID NO: 4416790 - DNA, 25 bp, Homo sapien
ctcagcccacaagaacaatatttaa

SEQ ID NO: 4416791 - DNA, 25 bp, Homo sapien
gtaactataggtatcaacttgaatg

SEQ ID NO: 4416792 - DNA, 25 bp, Homo sapien
accttgatctggcagtaggcccggt

SEQ ID NO: 4416793 - DNA, 25 bp, Homo sapien
acttgaatgttaagaggcaacccct

SEQ ID NO: 4416794 - DNA, 25 bp, Homo sapien
caggcttgttgctgcggttgttgta

SEQ ID NO: 4416795 - DNA, 25 bp, Homo sapien
tttcgttcttcatccctgattttcc

SEQ ID NO: 4416796 - DNA, 25 bp, Homo sapien
ttcgttcttcatccctgattttccg

SEQ ID NO: 4416797 - DNA, 25 bp, Homo sapien
ctttcgttcttcatccctgattttc

SEQ ID NO: 4416798 - DNA, 25 bp, Homo sapien
tcgttcttcatccctgattttccgc

SEQ ID NO: 4416799 - DNA, 25 bp, Homo sapien
ccacagagtgctcgcctctgagtaa

SEQ ID NO: 4416800 - DNA, 25 bp, Homo sapien
gagtgctcgcctctgagtaagatac

SEQ ID NO: 4416801 - DNA, 25 bp, Homo sapien
gcctctgagtaagatactccaagtg

SEQ ID NO: 4416802 - DNA, 25 bp, Homo sapien
tgagtaagatactccaagtgtagca

SEQ ID NO: 4416803 - DNA, 25 bp, Homo sapien
gggaagcagtggcactttaacatca

SEQ ID NO: 4416804 - DNA, 25 bp, Homo sapien
aggacaggctgagtatcgagatcaa

SEQ ID NO: 4416805 - DNA, 25 bp, Homo sapien
gagtgccccgctgcaagttggcaaa

SEQ ID NO: 4416806 - DNA, 25 bp, Homo sapien
agtatcgagatcaatgaagggtttg

SEQ ID NO: 4416807 - DNA, 25 bp, Homo sapien
atgagtgccccgctgcaagttggca

SEQ ID NO: 4416808 - DNA, 25 bp, Homo sapien
accctccaattcttcagaggcaatg

SEQ ID NO: 4416809 - DNA, 25 bp, Homo sapien
ttcaccctccaattcttcagaggca

SEQ ID NO: 4416810 - DNA, 25 bp, Homo sapien
tccaattcttcagaggcaatgggaa

SEQ ID NO: 4416811 - DNA, 25 bp, Homo sapien
cctccaattcttcagaggcaatggg

SEQ ID NO: 4416812 - DNA, 25 bp, Homo sapien
gagcagcagacacacgcaaactaag

SEQ ID NO: 4416813 - DNA, 25 bp, Homo sapien
gccatctgctaggacacacggagaa

SEQ ID NO: 4416814 - DNA, 25 bp, Homo sapien
taaactgacatcaagcgccatctgc

SEQ ID NO: 4416815 - DNA, 25 bp, Homo sapien
tggcctctatgacatccctgccagg

SEQ ID NO: 4416816 - DNA, 25 bp, Homo sapien
ccttctcgaagatgaggcgctttgg

SEQ ID NO: 4416817 - DNA, 25 bp, Homo sapien
tatttacaggcagacatgggaccac

SEQ ID NO: 4416818 - DNA, 25 bp, Homo sapien
gagcctgtcatggaactagatttaa

SEQ ID NO: 4416819 - DNA, 25 bp, Homo sapien
cagtgatccaaaatatgccgttagt

SEQ ID NO: 4416820 - DNA, 25 bp, Homo sapien
tatccgggccagcttggtagaagga

SEQ ID NO: 4416821 - DNA, 25 bp, Homo sapien
tggttcttctatccgggccagcttg

SEQ ID NO: 4416822 - DNA, 25 bp, Homo sapien
aagtcatcttctgtgccgtacggcc

SEQ ID NO: 4416823 - DNA, 25 bp, Homo sapien
tctttggttcttctatccgggccag

SEQ ID NO: 4416824 - DNA, 25 bp, Homo sapien
catcaagcccttcaaagatggggtt

SEQ ID NO: 4416825 - DNA, 25 bp, Homo sapien
tctgactcctttcgaacgtagagca

SEQ ID NO: 4416826 - DNA, 25 bp, Homo sapien
gactcctttcgaacgtagagcagca

SEQ ID NO: 4416827 - DNA, 25 bp, Homo sapien
aagatggggttttgagcatcagggc

SEQ ID NO: 4416828 - DNA, 25 bp, Homo sapien
caaacacgtgtttcagaccagaccc

SEQ ID NO: 4416829 - DNA, 25 bp, Homo sapien
aacagagcctcaggtggcaaacgtg

SEQ ID NO: 4416830 - DNA, 25 bp, Homo sapien
taagacctgtcatgagttcctcgtg

SEQ ID NO: 4416831 - DNA, 25 bp, Homo sapien
gaatgggtgaattgctccaaggaca

SEQ ID NO: 4416832 - DNA, 25 bp, Homo sapien
catggggaacatcgtatttgtctga

SEQ ID NO: 4416833 - DNA, 25 bp, Homo sapien
ggggaacatcgtatttgtctgagat

SEQ ID NO: 4416834 - DNA, 25 bp, Homo sapien
ttgtcatggggaacatcgtatttgt

SEQ ID NO: 4416835 - DNA, 25 bp, Homo sapien
tgtcatggggaacatcgtatttgtc

SEQ ID NO: 4416836 - DNA, 25 bp, Homo sapien
aagcaaaagcacatcaataacacta

SEQ ID NO: 4416837 - DNA, 25 bp, Homo sapien
acttacatgatgtgaagtcacagcc

SEQ ID NO: 4416838 - DNA, 25 bp, Homo sapien
actaacttacatgatgtgaagtcac

SEQ ID NO: 4416839 - DNA, 25 bp, Homo sapien
gcacatcaataacactaacttacat

SEQ ID NO: 4416840 - DNA, 25 bp, Homo sapien
cctcattggagtaatgcttcacaat

SEQ ID NO: 4416841 - DNA, 25 bp, Homo sapien
cgtcagggtgagcttgtaagacccc

SEQ ID NO: 4416842 - DNA, 25 bp, Homo sapien
ttagatctccgtcagggtgagcttg

SEQ ID NO: 4416843 - DNA, 25 bp, Homo sapien
gcttcacaatgttgtcgtccatgtt

SEQ ID NO: 4416844 - DNA, 25 bp, Homo sapien
taaatgctaccaccaagccagatgc

SEQ ID NO: 4416845 - DNA, 25 bp, Homo sapien
tgtactgaattcaggcaagggcacg

SEQ ID NO: 4416846 - DNA, 25 bp, Homo sapien
cagttgatatgtccgagaaagtcgc

SEQ ID NO: 4416847 - DNA, 25 bp, Homo sapien
gacatagacctgtgctggcgacatg

SEQ ID NO: 4416848 - DNA, 25 bp, Homo sapien
tactgagcagtgcaaagtcaaattg

SEQ ID NO: 4416849 - DNA, 25 bp, Homo sapien
gcagtgcaaagtcaaattgaaaaac

SEQ ID NO: 4416850 - DNA, 25 bp, Homo sapien
tgagcagtgcaaagtcaaattgaaa

SEQ ID NO: 4416851 - DNA, 25 bp, Homo sapien
agtgcaaagtcaaattgaaaaacag

SEQ ID NO: 4416852 - DNA, 25 bp, Homo sapien
tctgatcacctaatctgagcggctg

SEQ ID NO: 4416853 - DNA, 25 bp, Homo sapien
tcaatcccctgcgagagctgcttgt

SEQ ID NO: 4416854 - DNA, 25 bp, Homo sapien
gatgccctgaagataagagccggcc

SEQ ID NO: 4416855 - DNA, 25 bp, Homo sapien
gcagtaggcgatgctatagtccaca

SEQ ID NO: 4416856 - DNA, 25 bp, Homo sapien
tggccagacaccaaaaggcagccgg

SEQ ID NO: 4416857 - DNA, 25 bp, Homo sapien
gcatctgtcccagccatgctatcca

SEQ ID NO: 4416858 - DNA, 25 bp, Homo sapien
gccatgctatccacgcgcatgcggg

SEQ ID NO: 4416859 - DNA, 25 bp, Homo sapien
tgtcccagccatgctatccacgcgc

SEQ ID NO: 4416860 - DNA, 25 bp, Homo sapien
cagccatgctatccacgcgcatgcg

SEQ ID NO: 4416861 - DNA, 25 bp, Homo sapien
cagcagtgtcggccctgatgggctc

SEQ ID NO: 4416862 - DNA, 25 bp, Homo sapien
agcagtgtcggccctgatgggctct

SEQ ID NO: 4416863 - DNA, 25 bp, Homo sapien
cagcagcagtgtcggccctgatggg

SEQ ID NO: 4416864 - DNA, 25 bp, Homo sapien
aggcagcagcagtgtcggccctgat

SEQ ID NO: 4416865 - DNA, 25 bp, Homo sapien
ggcctgttccgtagccacagcagct

SEQ ID NO: 4416866 - DNA, 25 bp, Homo sapien
cctcctgctggcctgttccgtagcc

SEQ ID NO: 4416867 - DNA, 25 bp, Homo sapien
ctgctggcctgttccgtagccacag

SEQ ID NO: 4416868 - DNA, 25 bp, Homo sapien
ctggcctgttccgtagccacagcag

SEQ ID NO: 4416869 - DNA, 25 bp, Homo sapien
tggagaaacatctcacagggtgact

SEQ ID NO: 4416870 - DNA, 25 bp, Homo sapien
ctgacagagtgaccagtggagaaac

SEQ ID NO: 4416871 - DNA, 25 bp, Homo sapien
tgggtatgttgccagcccgacttcc

SEQ ID NO: 4416872 - DNA, 25 bp, Homo sapien
tagtgctggcaccagcgcagacagg

SEQ ID NO: 4416873 - DNA, 25 bp, Homo sapien
tccttgaccggagaggtcggaaagc

SEQ ID NO: 4416874 - DNA, 25 bp, Homo sapien
tctcttaggaatgcgtccttgaccg

SEQ ID NO: 4416875 - DNA, 25 bp, Homo sapien
cagcgggagtcagagcttattggcc

SEQ ID NO: 4416876 - DNA, 25 bp, Homo sapien
gaaagctggccggttctaggtgaca

SEQ ID NO: 4416877 - DNA, 25 bp, Homo sapien
gcggggcgtgagctcgggcgcagca

SEQ ID NO: 4416878 - DNA, 25 bp, Homo sapien
ccgggagcaacaaagcggccgcggg

SEQ ID NO: 4416879 - DNA, 25 bp, Homo sapien
aggccggccgggagcaacaaagcgg

SEQ ID NO: 4416880 - DNA, 25 bp, Homo sapien
tcctgcggccggcacgcgcctcgcc

SEQ ID NO: 4416881 - DNA, 25 bp, Homo sapien
cgtcgtctgggcctgcgaagtccgg

SEQ ID NO: 4416882 - DNA, 25 bp, Homo sapien
tgcgcgcgcgtcgtctgggcctgcg

SEQ ID NO: 4416883 - DNA, 25 bp, Homo sapien
tctgggcctgcgaagtccggcgtgt

SEQ ID NO: 4416884 - DNA, 25 bp, Homo sapien
ggcctgcgaagtccggcgtgtgcat

SEQ ID NO: 4416885 - DNA, 25 bp, Homo sapien
gcctccaaggcagtgcggcgctccc

SEQ ID NO: 4416886 - DNA, 25 bp, Homo sapien
ccaacgctcgcgtgccgcgttcccg

SEQ ID NO: 4416887 - DNA, 25 bp, Homo sapien
ggcactaccgctagccgctcttaac

SEQ ID NO: 4416888 - DNA, 25 bp, Homo sapien
aagcccccaggtcgcgacgcttagg

SEQ ID NO: 4416889 - DNA, 25 bp, Homo sapien
gtctatagcaacaaacaccgaggtg

SEQ ID NO: 4416890 - DNA, 25 bp, Homo sapien
taaaggcgacacaacacaacggctt

SEQ ID NO: 4416891 - DNA, 25 bp, Homo sapien
cagaactaagctggcaagcgttgcc

SEQ ID NO: 4416892 - DNA, 25 bp, Homo sapien
caaggaatgctcatgacaattcggc

SEQ ID NO: 4416893 - DNA, 25 bp, Homo sapien
tgctccaagatgctgcaagtagacc

SEQ ID NO: 4416894 - DNA, 25 bp, Homo sapien
catccatatgcacagtggtggtgac

SEQ ID NO: 4416895 - DNA, 25 bp, Homo sapien
caaacaagagcctcgacagcttcca

SEQ ID NO: 4416896 - DNA, 25 bp, Homo sapien
gggtcttatccgcaacaggtcacct

SEQ ID NO: 4416897 - DNA, 25 bp, Homo sapien
gagaggatacgcaacttatttgcca

SEQ ID NO: 4416898 - DNA, 25 bp, Homo sapien
aatcttctcacaagttcttcaacac

SEQ ID NO: 4416899 - DNA, 25 bp, Homo sapien
caacttatttgccagcatcccaggg

SEQ ID NO: 4416900 - DNA, 25 bp, Homo sapien
cactgagttcagctactctagtcat

SEQ ID NO: 4416901 - DNA, 25 bp, Homo sapien
ccactacggcagaggactggagaac

SEQ ID NO: 4416902 - DNA, 25 bp, Homo sapien
catgctttggaatctgttacttggg

SEQ ID NO: 4416903 - DNA, 25 bp, Homo sapien
tgtccttgtcgatggctccacgaga

SEQ ID NO: 4416904 - DNA, 25 bp, Homo sapien
gaacatccgtggctgtacatgcttt

SEQ ID NO: 4416905 - DNA, 25 bp, Homo sapien
gctactttgtccagtcacagggatc

SEQ ID NO: 4416906 - DNA, 25 bp, Homo sapien
tgtcggatcacgctagtccccttgg

SEQ ID NO: 4416907 - DNA, 25 bp, Homo sapien
caggtcccacgaacacaggttgagg

SEQ ID NO: 4416908 - DNA, 25 bp, Homo sapien
gaaagccggcaatctggagtctgga

SEQ ID NO: 4416909 - DNA, 25 bp, Homo sapien
catacatagttcctccttcgggaaa

SEQ ID NO: 4416910 - DNA, 25 bp, Homo sapien
ggcaacaacttggtattcccggcag

SEQ ID NO: 4416911 - DNA, 25 bp, Homo sapien
tgaagtaggtcttccggcaacctgg

SEQ ID NO: 4416912 - DNA, 25 bp, Homo sapien
aaagtctacctgagggacacagttt

SEQ ID NO: 4416913 - DNA, 25 bp, Homo sapien
cacagggtctggtgtgcccaatgcc

SEQ ID NO: 4416914 - DNA, 25 bp, Homo sapien
gggtctggtgtgcccaatgccccac

SEQ ID NO: 4416915 - DNA, 25 bp, Homo sapien
acagggtctggtgtgcccaatgccc

SEQ ID NO: 4416916 - DNA, 25 bp, Homo sapien
agggtctggtgtgcccaatgcccca

SEQ ID NO: 4416917 - DNA, 25 bp, Homo sapien
gaaatgcagagctcaccaagtcaac

SEQ ID NO: 4416918 - DNA, 25 bp, Homo sapien
tgtcagtacttctaccaaggtaaac

SEQ ID NO: 4416919 - DNA, 25 bp, Homo sapien
aacttgtttcaatcactgcaggtca

SEQ ID NO: 4416920 - DNA, 25 bp, Homo sapien
gtgtaatgcaaagttcccctggaga

SEQ ID NO: 4416921 - DNA, 25 bp, Homo sapien
gtgagaaaatacatattaaagagaa

SEQ ID NO: 4416922 - DNA, 25 bp, Homo sapien
gagaaaatacatattaaagagaaag

SEQ ID NO: 4416923 - DNA, 25 bp, Homo sapien
gaaaatacatattaaagagaaagga

SEQ ID NO: 4416924 - DNA, 25 bp, Homo sapien
ctgtgaggtgagaaaatacatatta

SEQ ID NO: 4416925 - DNA, 25 bp, Homo sapien
gatcttcttggtcgtcatgtggcgc

SEQ ID NO: 4416926 - DNA, 25 bp, Homo sapien
gaggcgattctgttcagcttgccaa

SEQ ID NO: 4416927 - DNA, 25 bp, Homo sapien
ccgggcatgcttcgtcaggtggtca

SEQ ID NO: 4416928 - DNA, 25 bp, Homo sapien
catgaaacgtcggtcacacaccggg

SEQ ID NO: 4416929 - DNA, 25 bp, Homo sapien
caaaagatactgaacagggtcccaa

SEQ ID NO: 4416930 - DNA, 25 bp, Homo sapien
ccatgagtgatgtcctaatggacct

SEQ ID NO: 4416931 - DNA, 25 bp, Homo sapien
ctttattgccgaaatatttgtttga

SEQ ID NO: 4416932 - DNA, 25 bp, Homo sapien
atttgtttgaatgctggtgattcag

SEQ ID NO: 4416933 - DNA, 25 bp, Homo sapien
gatcctgcagcaagtactggtccct

SEQ ID NO: 4416934 - DNA, 25 bp, Homo sapien
tatagtacggataaggccacagcaa

SEQ ID NO: 4416935 - DNA, 25 bp, Homo sapien
gaagacacgacactcacctatggag

SEQ ID NO: 4416936 - DNA, 25 bp, Homo sapien
gaggtccttactcaaccaggtccga

SEQ ID NO: 4416937 - DNA, 25 bp, Homo sapien
gccgaatccatacacaaggtttgtg

SEQ ID NO: 4416938 - DNA, 25 bp, Homo sapien
tccatgccgaatccatacacaaggt

SEQ ID NO: 4416939 - DNA, 25 bp, Homo sapien
ccatacacaaggtttgtggttctca

SEQ ID NO: 4416940 - DNA, 25 bp, Homo sapien
agctgagggctccatgccgaatcca

SEQ ID NO: 4416941 - DNA, 25 bp, Homo sapien
aataaagtgcacgaggggagcccac

SEQ ID NO: 4416942 - DNA, 25 bp, Homo sapien
gcaataaagtgcacgaggggagccc

SEQ ID NO: 4416943 - DNA, 25 bp, Homo sapien
ctgcccaggcaataaagtgcacgag

SEQ ID NO: 4416944 - DNA, 25 bp, Homo sapien
gcccaggcaataaagtgcacgaggg

SEQ ID NO: 4416945 - DNA, 25 bp, Homo sapien
tacacatgctcgtttaaataatgtc

SEQ ID NO: 4416946 - DNA, 25 bp, Homo sapien
agtctctaggtatacttaggccacc

SEQ ID NO: 4416947 - DNA, 25 bp, Homo sapien
tacagttaaatgacacaggacacac

SEQ ID NO: 4416948 - DNA, 25 bp, Homo sapien
tacttaggccaccaggtacagttaa

SEQ ID NO: 4416949 - DNA, 25 bp, Homo sapien
agaccttttgtgtggtgagggtctg

SEQ ID NO: 4416950 - DNA, 25 bp, Homo sapien
cttttgtgtggtgagggtctggacc

SEQ ID NO: 4416951 - DNA, 25 bp, Homo sapien
tcagaccttttgtgtggtgagggtc

SEQ ID NO: 4416952 - DNA, 25 bp, Homo sapien
tttgtgtggtgagggtctggacccc

SEQ ID NO: 4416953 - DNA, 25 bp, Homo sapien
taaagcagtgtgtaccagccgctga

SEQ ID NO: 4416954 - DNA, 25 bp, Homo sapien
ttgaagtcagagcttggagcggccc

SEQ ID NO: 4416955 - DNA, 25 bp, Homo sapien
gcaggtccttagaacacagcagagc

SEQ ID NO: 4416956 - DNA, 25 bp, Homo sapien
gctgttcgcagctgggaaactccaa

SEQ ID NO: 4416957 - DNA, 25 bp, Homo sapien
tgggccagccactggcggtcatggt

SEQ ID NO: 4416958 - DNA, 25 bp, Homo sapien
attcagtatactttaatgggagcct

SEQ ID NO: 4416959 - DNA, 25 bp, Homo sapien
cattcagtatactttaatgggagcc

SEQ ID NO: 4416960 - DNA, 25 bp, Homo sapien
agtgctgccctaggcgtaggagtgc

SEQ ID NO: 4416961 - DNA, 25 bp, Homo sapien
ctgccctaggcgtaggagtgcccag

SEQ ID NO: 4416962 - DNA, 25 bp, Homo sapien
cgaacgcagcgcgcgcagccctcag

SEQ ID NO: 4416963 - DNA, 25 bp, Homo sapien
ctcgcgaacgcagcgcgcgcagccc

SEQ ID NO: 4416964 - DNA, 25 bp, Homo sapien
tcgcgaacgcagcgcgcgcagccct

SEQ ID NO: 4416965 - DNA, 25 bp, Homo sapien
gcgaacgcagcgcgcgcagccctca

SEQ ID NO: 4416966 - DNA, 25 bp, Homo sapien
taacggcttgggagtgccatgattg

SEQ ID NO: 4416967 - DNA, 25 bp, Homo sapien
tgggaaactgcaggatatctgagca

SEQ ID NO: 4416968 - DNA, 25 bp, Homo sapien
attgtaatgactggtccatgagtcg

SEQ ID NO: 4416969 - DNA, 25 bp, Homo sapien
gagtagatctgcgagtcctgaagca

SEQ ID NO: 4416970 - DNA, 25 bp, Homo sapien
tgaggccagcggctgtggacactgt

SEQ ID NO: 4416971 - DNA, 25 bp, Homo sapien
aggccagcggctgtggacactgtac

SEQ ID NO: 4416972 - DNA, 25 bp, Homo sapien
ctgaggccagcggctgtggacactg

SEQ ID NO: 4416973 - DNA, 25 bp, Homo sapien
gaggccagcggctgtggacactgta

SEQ ID NO: 4416974 - DNA, 25 bp, Homo sapien
actttgtgtagcagatttgcaagga

SEQ ID NO: 4416975 - DNA, 25 bp, Homo sapien
tcaaaactgtgggttcatggacagg

SEQ ID NO: 4416976 - DNA, 25 bp, Homo sapien
tgtagcagatttgcaaggagaagga

SEQ ID NO: 4416977 - DNA, 25 bp, Homo sapien
gggagtcagctcacagatcactttg

SEQ ID NO: 4416978 - DNA, 25 bp, Homo sapien
tggcttcaagaccttaggccagctc

SEQ ID NO: 4416979 - DNA, 25 bp, Homo sapien
gctccccactcttcggagcctcagt

SEQ ID NO: 4416980 - DNA, 25 bp, Homo sapien
agctccccactcttcggagcctcag

SEQ ID NO: 4416981 - DNA, 25 bp, Homo sapien
gtctctggcttcaagaccttaggcc

SEQ ID NO: 4416982 - DNA, 25 bp, Homo sapien
ctagtgccgatgctgcaaaactgga

SEQ ID NO: 4416983 - DNA, 25 bp, Homo sapien
gccttcagctggtgatacattctcc

SEQ ID NO: 4416984 - DNA, 25 bp, Homo sapien
ccagggaacaggttctttccactga

SEQ ID NO: 4416985 - DNA, 25 bp, Homo sapien
gtcactgagttgacaccagccttca

SEQ ID NO: 4416986 - DNA, 25 bp, Homo sapien
agggcctcaaaaccggtcactgagt

SEQ ID NO: 4416987 - DNA, 25 bp, Homo sapien
attgacacagtcagctgagcatcaa

SEQ ID NO: 4416988 - DNA, 25 bp, Homo sapien
ccacattgcacacaggtattgacac

SEQ ID NO: 4416989 - DNA, 25 bp, Homo sapien
tttttattgcagaagagacatctta

SEQ ID NO: 4416990 - DNA, 25 bp, Homo sapien
gacatcttattgcagaagagacatt

SEQ ID NO: 4416991 - DNA, 25 bp, Homo sapien
cctgaaacacgacctgaaggaacag

SEQ ID NO: 4416992 - DNA, 25 bp, Homo sapien
ctgacctgaaacacgacctgaagga

SEQ ID NO: 4416993 - DNA, 25 bp, Homo sapien
tgaaacacgacctgaaggaacaggg

SEQ ID NO: 4416994 - DNA, 25 bp, Homo sapien
gacctgaaacacgacctgaaggaac

SEQ ID NO: 4416995 - DNA, 25 bp, Homo sapien
gcctcaccagatgagttctacctgg

SEQ ID NO: 4416996 - DNA, 25 bp, Homo sapien
acatcacgtggagaagaaaaattgc

SEQ ID NO: 4416997 - DNA, 25 bp, Homo sapien
tggtgacttcagcttacatcacgtg

SEQ ID NO: 4416998 - DNA, 25 bp, Homo sapien
gttattattcggctgcaccaggcct

SEQ ID NO: 4416999 - DNA, 25 bp, Homo sapien
gatgcgtacgtgttgttaaaggccg

SEQ ID NO: 4417000 - DNA, 25 bp, Homo sapien
tagccattgtagaagacgccgaaag

SEQ ID NO: 4417001 - DNA, 25 bp, Homo sapien
ttaaaggccgggtgaagtcgccatc

SEQ ID NO: 4417002 - DNA, 25 bp, Homo sapien
ttcctggccacgtaattaacatagc

SEQ ID NO: 4417003 - DNA, 25 bp, Homo sapien
cattggctttggtgccccggccctt

SEQ ID NO: 4417004 - DNA, 25 bp, Homo sapien
tccagcagcctttaaatctcccgcg

SEQ ID NO: 4417005 - DNA, 25 bp, Homo sapien
agtggaggcgcagcgaagcagagcg

SEQ ID NO: 4417006 - DNA, 25 bp, Homo sapien
cgcgattttcaagcgcagcgcggga

SEQ ID NO: 4417007 - DNA, 25 bp, Homo sapien
ccccttcagcggcgagagctgcagc

SEQ ID NO: 4417008 - DNA, 25 bp, Homo sapien
gccccttcagcggcgagagctgcag

SEQ ID NO: 4417009 - DNA, 25 bp, Homo sapien
cccttcagcggcgagagctgcagct

SEQ ID NO: 4417010 - DNA, 25 bp, Homo sapien
cctggaagatcctcctcgcggtctt

SEQ ID NO: 4417011 - DNA, 25 bp, Homo sapien
gaagatcctcctcgcggtcttgctg

SEQ ID NO: 4417012 - DNA, 25 bp, Homo sapien
ggtcttgctggccaggacgcgggtc

SEQ ID NO: 4417013 - DNA, 25 bp, Homo sapien
cgcggtcttgctggccaggacgcgg

SEQ ID NO: 4417014 - DNA, 25 bp, Homo sapien
gtcgcactccgtgggtcgcagcaga

SEQ ID NO: 4417015 - DNA, 25 bp, Homo sapien
cccgatgtgaaaacgtggctgtccc

SEQ ID NO: 4417016 - DNA, 25 bp, Homo sapien
ccaagtcctttccattggcggcaat

SEQ ID NO: 4417017 - DNA, 25 bp, Homo sapien
taagtaccgggcgaaccatatgaaa

SEQ ID NO: 4417018 - DNA, 25 bp, Homo sapien
cggctcatcctccacgccgggggca

SEQ ID NO: 4417019 - DNA, 25 bp, Homo sapien
cagcagcggctcatcctccacgccg

SEQ ID NO: 4417020 - DNA, 25 bp, Homo sapien
gcagcggctcatcctccacgccggg

SEQ ID NO: 4417021 - DNA, 25 bp, Homo sapien
gctcatcctccacgccgggggcagc

SEQ ID NO: 4417022 - DNA, 25 bp, Homo sapien
atggggaagatgacaaagcggcggg

SEQ ID NO: 4417023 - DNA, 25 bp, Homo sapien
tgccttcttatacatctgccagata

SEQ ID NO: 4417024 - DNA, 25 bp, Homo sapien
ctcggcggtccaaaaggaagcctct

SEQ ID NO: 4417025 - DNA, 25 bp, Homo sapien
cagatatcatggtactcgatgggga

SEQ ID NO: 4417026 - DNA, 25 bp, Homo sapien
caggggtcttctggggtcctccgat

SEQ ID NO: 4417027 - DNA, 25 bp, Homo sapien
ccctgcaggggtcttctggggtcct

SEQ ID NO: 4417028 - DNA, 25 bp, Homo sapien
ctgcaggggtcttctggggtcctcc

SEQ ID NO: 4417029 - DNA, 25 bp, Homo sapien
gcaggggtcttctggggtcctccga

SEQ ID NO: 4417030 - DNA, 25 bp, Homo sapien
tgggatataaaatatctctcctcgg

SEQ ID NO: 4417031 - DNA, 25 bp, Homo sapien
gggatataaaatatctctcctcggg

SEQ ID NO: 4417032 - DNA, 25 bp, Homo sapien
ggccacaaagagtcatcacattgct

SEQ ID NO: 4417033 - DNA, 25 bp, Homo sapien
tctagagtcgggaaaataccataag

SEQ ID NO: 4417034 - DNA, 25 bp, Homo sapien
gaactagttcgacctcagatcgtca

SEQ ID NO: 4417035 - DNA, 25 bp, Homo sapien
catacaagacgaggaaagcgaacta

SEQ ID NO: 4417036 - DNA, 25 bp, Homo sapien
cagcagcaactgtcaacggatactg

SEQ ID NO: 4417037 - DNA, 25 bp, Homo sapien
caactgtcaacggatactggcagca

SEQ ID NO: 4417038 - DNA, 25 bp, Homo sapien
gcagcatcgcactctttgtaccatt

SEQ ID NO: 4417039 - DNA, 25 bp, Homo sapien
gatactggcagcatcgcactctttg

SEQ ID NO: 4417040 - DNA, 25 bp, Homo sapien
ctttctttgggatcttttatgtaag

SEQ ID NO: 4417041 - DNA, 25 bp, Homo sapien
ttggaagccatagaaacagcgggct

SEQ ID NO: 4417042 - DNA, 25 bp, Homo sapien
ttatgtaagtgtcaataagaagact

SEQ ID NO: 4417043 - DNA, 25 bp, Homo sapien
gaacttcttggctaaatcgctccac

SEQ ID NO: 4417044 - DNA, 25 bp, Homo sapien
ggagtaccttcacaactctaagtga

SEQ ID NO: 4417045 - DNA, 25 bp, Homo sapien
catttaggccccttgctaagagcag

SEQ ID NO: 4417046 - DNA, 25 bp, Homo sapien
gctgggaatgcctatgactgtctta

SEQ ID NO: 4417047 - DNA, 25 bp, Homo sapien
taagagcagacatgaccacgggtgc

SEQ ID NO: 4417048 - DNA, 25 bp, Homo sapien
cctttgtatctagactactccagca

SEQ ID NO: 4417049 - DNA, 25 bp, Homo sapien
caccctaaagctgacctttgtatct

SEQ ID NO: 4417050 - DNA, 25 bp, Homo sapien
atctagactactccagcagcccatt

SEQ ID NO: 4417051 - DNA, 25 bp, Homo sapien
gcgccaccctaaagctgacctttgt

SEQ ID NO: 4417052 - DNA, 25 bp, Homo sapien
taccaactgctagataagagctctg

SEQ ID NO: 4417053 - DNA, 25 bp, Homo sapien
taaaacatagtccagtacagcaggg

SEQ ID NO: 4417054 - DNA, 25 bp, Homo sapien
cacatacggtatcagcaattgaagc

SEQ ID NO: 4417055 - DNA, 25 bp, Homo sapien
taaaagacctccgattaccaactgc

SEQ ID NO: 4417056 - DNA, 25 bp, Homo sapien
ccttcttcttgacacaaggcatcgt

SEQ ID NO: 4417057 - DNA, 25 bp, Homo sapien
cttcttcttgacacaaggcatcgtt

SEQ ID NO: 4417058 - DNA, 25 bp, Homo sapien
tgtccccaatccagcgcaaggccca

SEQ ID NO: 4417059 - DNA, 25 bp, Homo sapien
ctttgtccccaatccagcgcaaggc

SEQ ID NO: 4417060 - DNA, 25 bp, Homo sapien
gccaaaaatccagtaacattacttg

SEQ ID NO: 4417061 - DNA, 25 bp, Homo sapien
acaccaacatgattctagtgagttg

SEQ ID NO: 4417062 - DNA, 25 bp, Homo sapien
caaaaatccagtaacattacttgga

SEQ ID NO: 4417063 - DNA, 25 bp, Homo sapien
ccaacatgattctagtgagttggta

SEQ ID NO: 4417064 - DNA, 25 bp, Homo sapien
tcctcgtttcttgagccagaatatc

SEQ ID NO: 4417065 - DNA, 25 bp, Homo sapien
ctcgtttcttgagccagaatatcga

SEQ ID NO: 4417066 - DNA, 25 bp, Homo sapien
gtcctcgtttcttgagccagaatat

SEQ ID NO: 4417067 - DNA, 25 bp, Homo sapien
cctcgtttcttgagccagaatatcg

SEQ ID NO: 4417068 - DNA, 25 bp, Homo sapien
taaatgtggatatatgccatctagc

SEQ ID NO: 4417069 - DNA, 25 bp, Homo sapien
tctcaggtccccgtcagtgaacaca

SEQ ID NO: 4417070 - DNA, 25 bp, Homo sapien
gtggatatatgccatctagcatctc

SEQ ID NO: 4417071 - DNA, 25 bp, Homo sapien
tgaacacaagagcatgcccgagttg

SEQ ID NO: 4417072 - DNA, 25 bp, Homo sapien
tctcccaatccagtaaggaaggccc

SEQ ID NO: 4417073 - DNA, 25 bp, Homo sapien
gaggagtcagagcttcactcagtga

SEQ ID NO: 4417074 - DNA, 25 bp, Homo sapien
cagccatgagtgctaattttgccac

SEQ ID NO: 4417075 - DNA, 25 bp, Homo sapien
gaaaggcaaagctcagtaataaggc

SEQ ID NO: 4417076 - DNA, 25 bp, Homo sapien
cacttgaactctcaaagggaagatg

SEQ ID NO: 4417077 - DNA, 25 bp, Homo sapien
ctaccaaggcaagctcagtcccatt

SEQ ID NO: 4417078 - DNA, 25 bp, Homo sapien
cagccatactgagagcacttgaact

SEQ ID NO: 4417079 - DNA, 25 bp, Homo sapien
atgtcactaccaaggcaagctcagt

SEQ ID NO: 4417080 - DNA, 25 bp, Homo sapien
tcctccgatggtttgtgtaccaggt

SEQ ID NO: 4417081 - DNA, 25 bp, Homo sapien
ctccgatggtttgtgtaccaggtgt

SEQ ID NO: 4417082 - DNA, 25 bp, Homo sapien
cctccgatggtttgtgtaccaggtg

SEQ ID NO: 4417083 - DNA, 25 bp, Homo sapien
ctcctccgatggtttgtgtaccagg

SEQ ID NO: 4417084 - DNA, 25 bp, Homo sapien
gttctatccgaacagcattgataat

SEQ ID NO: 4417085 - DNA, 25 bp, Homo sapien
tctatccgaacagcattgataatta

SEQ ID NO: 4417086 - DNA, 25 bp, Homo sapien
tccgaacagcattgataattatttc

SEQ ID NO: 4417087 - DNA, 25 bp, Homo sapien
ctgttctatccgaacagcattgata

SEQ ID NO: 4417088 - DNA, 25 bp, Homo sapien
ctaaaacccagttccagcataagtc

SEQ ID NO: 4417089 - DNA, 25 bp, Homo sapien
caatgtattgcttcattagagtgca

SEQ ID NO: 4417090 - DNA, 25 bp, Homo sapien
gcataagtctgtctgccacaaactc

SEQ ID NO: 4417091 - DNA, 25 bp, Homo sapien
tagagtgcaattcatcccaatgagc

SEQ ID NO: 4417092 - DNA, 25 bp, Homo sapien
ttggacttgacatcactcccatcct

SEQ ID NO: 4417093 - DNA, 25 bp, Homo sapien
gatactcgcctactctcttctcaaa

SEQ ID NO: 4417094 - DNA, 25 bp, Homo sapien
gcatccaaggtaaaagaattctctg

SEQ ID NO: 4417095 - DNA, 25 bp, Homo sapien
cataaagtcaaatgggttctctact

SEQ ID NO: 4417096 - DNA, 25 bp, Homo sapien
taccagcactataaacagacaggac

SEQ ID NO: 4417097 - DNA, 25 bp, Homo sapien
cattacggacaattcatggtgtggc

SEQ ID NO: 4417098 - DNA, 25 bp, Homo sapien
acaggactggttgtgaggtagctac

SEQ ID NO: 4417099 - DNA, 25 bp, Homo sapien
tcagccaagtaagggcacatcttca

SEQ ID NO: 4417100 - DNA, 25 bp, Homo sapien
tgcatcttttaactggctgtgctgg

SEQ ID NO: 4417101 - DNA, 25 bp, Homo sapien
tcccgctgtgctaagctcactaaag

SEQ ID NO: 4417102 - DNA, 25 bp, Homo sapien
aatctgcgttgaagcagtgaggctg

SEQ ID NO: 4417103 - DNA, 25 bp, Homo sapien
ctgtgctggttaaaggactgtttaa

SEQ ID NO: 4417104 - DNA, 25 bp, Homo sapien
tcagctaatgagagacagaatccta

SEQ ID NO: 4417105 - DNA, 25 bp, Homo sapien
tatctaggtatacacaggactgact

SEQ ID NO: 4417106 - DNA, 25 bp, Homo sapien
gaattggctcccattagtggtcagg

SEQ ID NO: 4417107 - DNA, 25 bp, Homo sapien
tgaacaacttgtaggaaccacctct

SEQ ID NO: 4417108 - DNA, 25 bp, Homo sapien
taagacttgtgcattattcaatttt

SEQ ID NO: 4417109 - DNA, 25 bp, Homo sapien
tattttaatcacttaagacttgtgc

SEQ ID NO: 4417110 - DNA, 25 bp, Homo sapien
cttgtgcattattcaattttgagac

SEQ ID NO: 4417111 - DNA, 25 bp, Homo sapien
cacttaagacttgtgcattattcaa

SEQ ID NO: 4417112 - DNA, 25 bp, Homo sapien
ttaaatacctgatccttggaggcct

SEQ ID NO: 4417113 - DNA, 25 bp, Homo sapien
taggagtaaacccaagctccagagg

SEQ ID NO: 4417114 - DNA, 25 bp, Homo sapien
acgtcacctgacaagagagctgctg

SEQ ID NO: 4417115 - DNA, 25 bp, Homo sapien
ttatcaaagtgggtgggattccgag

SEQ ID NO: 4417116 - DNA, 25 bp, Homo sapien
taaaccatatacctccaaggcctaa

SEQ ID NO: 4417117 - DNA, 25 bp, Homo sapien
tcccagaggaacaatcattctttag

SEQ ID NO: 4417118 - DNA, 25 bp, Homo sapien
ccgtcaagctttaactcctctgcaa

SEQ ID NO: 4417119 - DNA, 25 bp, Homo sapien
tcttctggtgctatgcctccagtgg

SEQ ID NO: 4417120 - DNA, 25 bp, Homo sapien
acgtgggcgagatgcagccccagcc

SEQ ID NO: 4417121 - DNA, 25 bp, Homo sapien
acgtgggccccgcacatgacagcga

SEQ ID NO: 4417122 - DNA, 25 bp, Homo sapien
cagccgccagttcacaggagcgagg

SEQ ID NO: 4417123 - DNA, 25 bp, Homo sapien
cacatgacagcgacgtgggcgagat

SEQ ID NO: 4417124 - DNA, 25 bp, Homo sapien
agaagatgcacacccacgagggctg

SEQ ID NO: 4417125 - DNA, 25 bp, Homo sapien
gggacaacatcctagcacagcatga

SEQ ID NO: 4417126 - DNA, 25 bp, Homo sapien
cagtctccctggagagggcacacta

SEQ ID NO: 4417127 - DNA, 25 bp, Homo sapien
ggcagtgaccaaggatgcagaagca

SEQ ID NO: 4417128 - DNA, 25 bp, Homo sapien
gctttgcacttcacggtctcccagc

SEQ ID NO: 4417129 - DNA, 25 bp, Homo sapien
tgctttgcacttcacggtctcccag

SEQ ID NO: 4417130 - DNA, 25 bp, Homo sapien
ctgctttgcacttcacggtctccca

SEQ ID NO: 4417131 - DNA, 25 bp, Homo sapien
cactgggtgggtgattggtctccat

SEQ ID NO: 4417132 - DNA, 25 bp, Homo sapien
acactgggtgggtgattggtctcca

SEQ ID NO: 4417133 - DNA, 25 bp, Homo sapien
tcactggcgtgctgtctccccgagg

SEQ ID NO: 4417134 - DNA, 25 bp, Homo sapien
tccctcactggcgtgctgtctcccc

SEQ ID NO: 4417135 - DNA, 25 bp, Homo sapien
tccctttcaagacgtaaggctggtc

SEQ ID NO: 4417136 - DNA, 25 bp, Homo sapien
cccgagtaacacctgacacgcagaa

SEQ ID NO: 4417137 - DNA, 25 bp, Homo sapien
gtaacacctgacacgcagaagcagg

SEQ ID NO: 4417138 - DNA, 25 bp, Homo sapien
tggtcagaccttcccgagcttctca

SEQ ID NO: 4417139 - DNA, 25 bp, Homo sapien
gtgctgcccgagaccattccagatg

SEQ ID NO: 4417140 - DNA, 25 bp, Homo sapien
aacacagccacatcgtctgaggtgc

SEQ ID NO: 4417141 - DNA, 25 bp, Homo sapien
gatgctatgtgtgcaatggactggc

SEQ ID NO: 4417142 - DNA, 25 bp, Homo sapien
gcctgcagggatacggctatactga

SEQ ID NO: 4417143 - DNA, 25 bp, Homo sapien
agaaggagggctgccatggttcccc

SEQ ID NO: 4417144 - DNA, 25 bp, Homo sapien
cagcttcggaggctattctggttcc

SEQ ID NO: 4417145 - DNA, 25 bp, Homo sapien
ttgtacatgtaaacccttctgctgg

SEQ ID NO: 4417146 - DNA, 25 bp, Homo sapien
tgactctcggcaggtaggctaggct

SEQ ID NO: 4417147 - DNA, 25 bp, Homo sapien
agcaggggcagagcgaggagcatgc

SEQ ID NO: 4417148 - DNA, 25 bp, Homo sapien
gcagcaggggcagagcgaggagcat

SEQ ID NO: 4417149 - DNA, 25 bp, Homo sapien
ctgcagcaggggcagagcgaggagc

SEQ ID NO: 4417150 - DNA, 25 bp, Homo sapien
gcaggggcagagcgaggagcatgcg

SEQ ID NO: 4417151 - DNA, 25 bp, Homo sapien
ctctcctgcgccctccaagcatggc

SEQ ID NO: 4417152 - DNA, 25 bp, Homo sapien
cctgcgccctccaagcatggcccac

SEQ ID NO: 4417153 - DNA, 25 bp, Homo sapien
tctcctgcgccctccaagcatggcc

SEQ ID NO: 4417154 - DNA, 25 bp, Homo sapien
tcctgcgccctccaagcatggccca

SEQ ID NO: 4417155 - DNA, 25 bp, Homo sapien
aaacgcaggcatttcctcactacct

SEQ ID NO: 4417156 - DNA, 25 bp, Homo sapien
gtatacatctaaaacaggaagttag

SEQ ID NO: 4417157 - DNA, 25 bp, Homo sapien
ttagaaatgaacacgcacccaaacg

SEQ ID NO: 4417158 - DNA, 25 bp, Homo sapien
tgtgtacactttccccgtgctcaaa

SEQ ID NO: 4417159 - DNA, 25 bp, Homo sapien
agtggcatgatcctggctcatggca

SEQ ID NO: 4417160 - DNA, 25 bp, Homo sapien
actttgtatttttactagagacagg

SEQ ID NO: 4417161 - DNA, 25 bp, Homo sapien
cctccacttcccaggttcaagcaat

SEQ ID NO: 4417162 - DNA, 25 bp, Homo sapien
ttcccaggttcaagcaattctcctg

SEQ ID NO: 4417163 - DNA, 25 bp, Homo sapien
tggaggaaatccagctggagagcac

SEQ ID NO: 4417164 - DNA, 25 bp, Homo sapien
tcaggcagactcaggccagagaaac

SEQ ID NO: 4417165 - DNA, 25 bp, Homo sapien
cagagagcccatgtcattgtgcgaa

SEQ ID NO: 4417166 - DNA, 25 bp, Homo sapien
gcagctctgggcgaactctttgcca

SEQ ID NO: 4417167 - DNA, 25 bp, Homo sapien
aggaaagactgaaaatacagtgggc

SEQ ID NO: 4417168 - DNA, 25 bp, Homo sapien
gaaagactgaaaatacagtgggctg

SEQ ID NO: 4417169 - DNA, 25 bp, Homo sapien
agactgaaaatacagtgggctgcat

SEQ ID NO: 4417170 - DNA, 25 bp, Homo sapien
aagactgaaaatacagtgggctgca

SEQ ID NO: 4417171 - DNA, 25 bp, Homo sapien
gcccctcgtgcacgcgggtggtgga

SEQ ID NO: 4417172 - DNA, 25 bp, Homo sapien
ggtggtggaggtcatgacacacaca

SEQ ID NO: 4417173 - DNA, 25 bp, Homo sapien
gtggaggtcatgacacacacatcca

SEQ ID NO: 4417174 - DNA, 25 bp, Homo sapien
ctgcaagaggctgtgcccctcgtgc

SEQ ID NO: 4417175 - DNA, 25 bp, Homo sapien
atcgagacgccgcatcccaaagcct

SEQ ID NO: 4417176 - DNA, 25 bp, Homo sapien
tggcagcgttttgattgactgagag

SEQ ID NO: 4417177 - DNA, 25 bp, Homo sapien
ccaaagcctgctgtggcagcgtttt

SEQ ID NO: 4417178 - DNA, 25 bp, Homo sapien
cctgctgtggcagcgttttgattga

SEQ ID NO: 4417179 - DNA, 25 bp, Homo sapien
ggtttcccactaaacagcgggtgca

SEQ ID NO: 4417180 - DNA, 25 bp, Homo sapien
ttgacctcatgaaggaagatggttt

SEQ ID NO: 4417181 - DNA, 25 bp, Homo sapien
ggaagatggtttcccactaaacagc

SEQ ID NO: 4417182 - DNA, 25 bp, Homo sapien
aaagtgagggctttgacctcatgaa

SEQ ID NO: 4417183 - DNA, 25 bp, Homo sapien
ctgcttcactgatgagctcagggcc

SEQ ID NO: 4417184 - DNA, 25 bp, Homo sapien
cttcactgatgagctcagggcccgg

SEQ ID NO: 4417185 - DNA, 25 bp, Homo sapien
cactgatgagctcagggcccggggc

SEQ ID NO: 4417186 - DNA, 25 bp, Homo sapien
actgatgagctcagggcccggggcc

SEQ ID NO: 4417187 - DNA, 25 bp, Homo sapien
ttctttccaagagcagtctctctga

SEQ ID NO: 4417188 - DNA, 25 bp, Homo sapien
tctgaatagccttcgcaggcacaat

SEQ ID NO: 4417189 - DNA, 25 bp, Homo sapien
caagagcagtctctctgaatagcct

SEQ ID NO: 4417190 - DNA, 25 bp, Homo sapien
cacaattaagcaggttcagcttgac

SEQ ID NO: 4417191 - DNA, 25 bp, Homo sapien
agcacacgcggtatccctgacccac

SEQ ID NO: 4417192 - DNA, 25 bp, Homo sapien
gagcacagaagccagtcggctgacc

SEQ ID NO: 4417193 - DNA, 25 bp, Homo sapien
agtcggctgacctaagcgcatcggc

SEQ ID NO: 4417194 - DNA, 25 bp, Homo sapien
acacggacgcagacagcagggagca

SEQ ID NO: 4417195 - DNA, 25 bp, Homo sapien
gacccactgtgatgcgattctgcag

SEQ ID NO: 4417196 - DNA, 25 bp, Homo sapien
ggaaggaactatcgccttaggtata

SEQ ID NO: 4417197 - DNA, 25 bp, Homo sapien
gggctcagccacatatacagcaagg

SEQ ID NO: 4417198 - DNA, 25 bp, Homo sapien
taggaattaatagccggagcagggt

SEQ ID NO: 4417199 - DNA, 25 bp, Homo sapien
ggcttctctgttgcgttggcaccag

SEQ ID NO: 4417200 - DNA, 25 bp, Homo sapien
gcgttggcaccagaggacatcaagg

SEQ ID NO: 4417201 - DNA, 25 bp, Homo sapien
cttcacagcgcctatgagcactttt

SEQ ID NO: 4417202 - DNA, 25 bp, Homo sapien
atcaaggccttcacagcgcctatga

SEQ ID NO: 4417203 - DNA, 25 bp, Homo sapien
cagtgtggagggtcatctagatgcc

SEQ ID NO: 4417204 - DNA, 25 bp, Homo sapien
tataatgatgagtggcgcagcctgt

SEQ ID NO: 4417205 - DNA, 25 bp, Homo sapien
agcctataatgagtggcgcagccta

SEQ ID NO: 4417206 - DNA, 25 bp, Homo sapien
gaacaattgcagaaatgtcaccagc

SEQ ID NO: 4417207 - DNA, 25 bp, Homo sapien
ggtgctggaactgggtcatccctag

SEQ ID NO: 4417208 - DNA, 25 bp, Homo sapien
cacttgccactattgtgcatcttgg

SEQ ID NO: 4417209 - DNA, 25 bp, Homo sapien
tgggtcatccctagagccagatgat

SEQ ID NO: 4417210 - DNA, 25 bp, Homo sapien
gggtgactggccaacgcagtggtgg

SEQ ID NO: 4417211 - DNA, 25 bp, Homo sapien
catgagggccgattccaggtgaggc

SEQ ID NO: 4417212 - DNA, 25 bp, Homo sapien
tccttctctactgaggcatgagggc

SEQ ID NO: 4417213 - DNA, 25 bp, Homo sapien
tactgaggcatgagggccgattcca

SEQ ID NO: 4417214 - DNA, 25 bp, Homo sapien
aagcccagaaggagactgtgcatcg

SEQ ID NO: 4417215 - DNA, 25 bp, Homo sapien
tcaggccgcagacaggaaagcgtaa

SEQ ID NO: 4417216 - DNA, 25 bp, Homo sapien
tcagtagtctacagtcattgaggtc

SEQ ID NO: 4417217 - DNA, 25 bp, Homo sapien
agctgggagagcttcacctacccgg

SEQ ID NO: 4417218 - DNA, 25 bp, Homo sapien
tgaagagagtgacccctcgggtaat

SEQ ID NO: 4417219 - DNA, 25 bp, Homo sapien
cagaagcaggaagcggatggctctc

SEQ ID NO: 4417220 - DNA, 25 bp, Homo sapien
tcagagtaaaaaagtgccagggcca

SEQ ID NO: 4417221 - DNA, 25 bp, Homo sapien
actttgagaaccgtggcatcaggga

SEQ ID NO: 4417222 - DNA, 25 bp, Homo sapien
gcaaatggccgaatgctgcagaagc

SEQ ID NO: 4417223 - DNA, 25 bp, Homo sapien
acaggaccaccgtgacagccttcag

SEQ ID NO: 4417224 - DNA, 25 bp, Homo sapien
tgtggcaaccagtcctacacaggac

SEQ ID NO: 4417225 - DNA, 25 bp, Homo sapien
ggaccaactcacaggtctgccacat

SEQ ID NO: 4417226 - DNA, 25 bp, Homo sapien
agccagtcacgacacgtccctgagg

SEQ ID NO: 4417227 - DNA, 25 bp, Homo sapien
gatgttgtccccactcgaaggaggg

SEQ ID NO: 4417228 - DNA, 25 bp, Homo sapien
tgggcagaaggaacatgacgaaacg

SEQ ID NO: 4417229 - DNA, 25 bp, Homo sapien
gtgactacctgtgacttccctcgat

SEQ ID NO: 4417230 - DNA, 25 bp, Homo sapien
agtacagacctagggcctggagaga

SEQ ID NO: 4417231 - DNA, 25 bp, Homo sapien
attagatgtttcagtgggcgctgcc

SEQ ID NO: 4417232 - DNA, 25 bp, Homo sapien
tgtgctacccagaacaaatcgacct

SEQ ID NO: 4417233 - DNA, 25 bp, Homo sapien
gagagaattgtgtttcaaaaactgt

SEQ ID NO: 4417234 - DNA, 25 bp, Homo sapien
ctggagatcactaaaacctaagctg

SEQ ID NO: 4417235 - DNA, 25 bp, Homo sapien
gccagtggacagagtggcagctgcc

SEQ ID NO: 4417236 - DNA, 25 bp, Homo sapien
cagtggacagagtggcagctgccca

SEQ ID NO: 4417237 - DNA, 25 bp, Homo sapien
ctgccagtggacagagtggcagctg

SEQ ID NO: 4417238 - DNA, 25 bp, Homo sapien
agctgcccaccaaccgttcctccct

SEQ ID NO: 4417239 - DNA, 25 bp, Homo sapien
tgctccggtgggctccatcagagac

SEQ ID NO: 4417240 - DNA, 25 bp, Homo sapien
taggctgctccggtgggctccatca

SEQ ID NO: 4417241 - DNA, 25 bp, Homo sapien
ccggtgggctccatcagagacttgg

SEQ ID NO: 4417242 - DNA, 25 bp, Homo sapien
cagaagccaggtaggctgctccggt

SEQ ID NO: 4417243 - DNA, 25 bp, Homo sapien
gtctgctcatcgatccaaatgtttg

SEQ ID NO: 4417244 - DNA, 25 bp, Homo sapien
tgcccaagagattcggtgagatcct

SEQ ID NO: 4417245 - DNA, 25 bp, Homo sapien
tcccagcaacacagagcaatgtaca

SEQ ID NO: 4417246 - DNA, 25 bp, Homo sapien
gatgagtggcgtgcaattactttcc

SEQ ID NO: 4417247 - DNA, 25 bp, Homo sapien
cagctggcagttggatctatagctc

SEQ ID NO: 4417248 - DNA, 25 bp, Homo sapien
agctggcagttggatctatagctct

SEQ ID NO: 4417249 - DNA, 25 bp, Homo sapien
gctggcagttggatctatagctctg

SEQ ID NO: 4417250 - DNA, 25 bp, Homo sapien
agtccatgagggagaaaggtccaca

SEQ ID NO: 4417251 - DNA, 25 bp, Homo sapien
aagccaggcaccatgggtcacaagg

SEQ ID NO: 4417252 - DNA, 25 bp, Homo sapien
cacatactgggcactagggagccgg

SEQ ID NO: 4417253 - DNA, 25 bp, Homo sapien
cttcgccattctgggagtaagctct

SEQ ID NO: 4417254 - DNA, 25 bp, Homo sapien
gagagaactggttgagatcctggaa

SEQ ID NO: 4417255 - DNA, 25 bp, Homo sapien
ctgcagtgagagaactggttgagat

SEQ ID NO: 4417256 - DNA, 25 bp, Homo sapien
agtgagagaactggttgagatcctg

SEQ ID NO: 4417257 - DNA, 25 bp, Homo sapien
gagaactggttgagatcctggaaga

SEQ ID NO: 4417258 - DNA, 25 bp, Homo sapien
tgtcttgctgtgagcaccacggtgg

SEQ ID NO: 4417259 - DNA, 25 bp, Homo sapien
agcgccctctgtgcattcttggtga

SEQ ID NO: 4417260 - DNA, 25 bp, Homo sapien
tcttggtgagttcccacccagataa

SEQ ID NO: 4417261 - DNA, 25 bp, Homo sapien
cattctgaaacagggtcgctccagg

SEQ ID NO: 4417262 - DNA, 25 bp, Homo sapien
gagatggcacttcgacatgttggcc

SEQ ID NO: 4417263 - DNA, 25 bp, Homo sapien
tggaaatctcacagcaaggtgccgg

SEQ ID NO: 4417264 - DNA, 25 bp, Homo sapien
tgaatatctgctcagtcagcttggg

SEQ ID NO: 4417265 - DNA, 25 bp, Homo sapien
cacatgggagaaccataagggcacc

SEQ ID NO: 4417266 - DNA, 25 bp, Homo sapien
cagaggtagtgtgtagtcagattta

SEQ ID NO: 4417267 - DNA, 25 bp, Homo sapien
aaaaggatggtagcttctgggtcat

SEQ ID NO: 4417268 - DNA, 25 bp, Homo sapien
cagcagctcagaggtagtgtgtagt

SEQ ID NO: 4417269 - DNA, 25 bp, Homo sapien
tggagtggaggcctgcctcctactt

SEQ ID NO: 4417270 - DNA, 25 bp, Homo sapien
cgggcacagagctggatccgcaagc

SEQ ID NO: 4417271 - DNA, 25 bp, Homo sapien
ctgctttccggatgtgtgcaagagg

SEQ ID NO: 4417272 - DNA, 25 bp, Homo sapien
ggcacagagctggatccgcaagccc

SEQ ID NO: 4417273 - DNA, 25 bp, Homo sapien
gccgggcacagagctggatccgcaa

SEQ ID NO: 4417274 - DNA, 25 bp, Homo sapien
ctgcatggaaatgcacagccccctc

SEQ ID NO: 4417275 - DNA, 25 bp, Homo sapien
gctaggggtgttcaccagcttccaa

SEQ ID NO: 4417276 - DNA, 25 bp, Homo sapien
agaatgctgccttcggccacactgg

SEQ ID NO: 4417277 - DNA, 25 bp, Homo sapien
gaaggcctggactggtccagaatgc

SEQ ID NO: 4417278 - DNA, 25 bp, Homo sapien
catacataatggaacaaactcggac

SEQ ID NO: 4417279 - DNA, 25 bp, Homo sapien
aaaaatcatgattcatcatccccaa

SEQ ID NO: 4417280 - DNA, 25 bp, Homo sapien
ggaacaaactcggacatggtgattc

SEQ ID NO: 4417281 - DNA, 25 bp, Homo sapien
gccatcatacataatggaacaaact

SEQ ID NO: 4417282 - DNA, 25 bp, Homo sapien
tttctgccatttgtccgcggagcgg

SEQ ID NO: 4417283 - DNA, 25 bp, Homo sapien
ccagcttcaaagaagggtgaatagg

SEQ ID NO: 4417284 - DNA, 25 bp, Homo sapien
cacctctcgcggtgctcctggtggg

SEQ ID NO: 4417285 - DNA, 25 bp, Homo sapien
ctgggccaacgatgctgtgttttct

SEQ ID NO: 4417286 - DNA, 25 bp, Homo sapien
ctggagggggagcggctctctttcc

SEQ ID NO: 4417287 - DNA, 25 bp, Homo sapien
tggagggggagcggctctctttccc

SEQ ID NO: 4417288 - DNA, 25 bp, Homo sapien
tgccgggcatgtgaaagtgaataaa

SEQ ID NO: 4417289 - DNA, 25 bp, Homo sapien
tgtgctgaccggatggcaggcttca

SEQ ID NO: 4417290 - DNA, 25 bp, Homo sapien
tgcaggttagatggcaagggccacc

SEQ ID NO: 4417291 - DNA, 25 bp, Homo sapien
gggcctactagcttggtgctctgag

SEQ ID NO: 4417292 - DNA, 25 bp, Homo sapien
ggtttgcaaggatggcatgagctca

SEQ ID NO: 4417293 - DNA, 25 bp, Homo sapien
acatcttcatactgctacaagggca

SEQ ID NO: 4417294 - DNA, 25 bp, Homo sapien
cctctagggcattgaacaaggcacc

SEQ ID NO: 4417295 - DNA, 25 bp, Homo sapien
ttcagaccgtagcaaacagcatctc

SEQ ID NO: 4417296 - DNA, 25 bp, Homo sapien
agctcgtcacgtggcgccaagcctg

SEQ ID NO: 4417297 - DNA, 25 bp, Homo sapien
aagggaactgcagctcgtcacgtgg

SEQ ID NO: 4417298 - DNA, 25 bp, Homo sapien
actgcagctcgtcacgtggcgccaa

SEQ ID NO: 4417299 - DNA, 25 bp, Homo sapien
ggaactgcagctcgtcacgtggcgc

SEQ ID NO: 4417300 - DNA, 25 bp, Homo sapien
ggcccacggcagaggtgacatctag

SEQ ID NO: 4417301 - DNA, 25 bp, Homo sapien
agcctccatcctgacagctgagcag

SEQ ID NO: 4417302 - DNA, 25 bp, Homo sapien
tcatcaccctgattaaccacctccc

SEQ ID NO: 4417303 - DNA, 25 bp, Homo sapien
tcgcctggcgctgacagctaaattc

SEQ ID NO: 4417304 - DNA, 25 bp, Homo sapien
ataggaggtgtcagtagtaaagggc

SEQ ID NO: 4417305 - DNA, 25 bp, Homo sapien
aataggaggtgtcagtagtaaaggg

SEQ ID NO: 4417306 - DNA, 25 bp, Homo sapien
taggaggtgtcagtagtaaagggct

SEQ ID NO: 4417307 - DNA, 25 bp, Homo sapien
cagaaggacacccacatggatttgt

SEQ ID NO: 4417308 - DNA, 25 bp, Homo sapien
tggtgacctggaacgacctggtttc

SEQ ID NO: 4417309 - DNA, 25 bp, Homo sapien
tgataaaacgaagtccgcaggccct

SEQ ID NO: 4417310 - DNA, 25 bp, Homo sapien
tgagcgggtgagtcttgcgtcttcc

SEQ ID NO: 4417311 - DNA, 25 bp, Homo sapien
gggtcgcaagtgaggagccaccagt

SEQ ID NO: 4417312 - DNA, 25 bp, Homo sapien
agcgttgctgctgccgttacttagg

SEQ ID NO: 4417313 - DNA, 25 bp, Homo sapien
gggacgttcagaccggctttgccaa

SEQ ID NO: 4417314 - DNA, 25 bp, Homo sapien
agtgctgtccacacggctggagcgt

SEQ ID NO: 4417315 - DNA, 25 bp, Homo sapien
agcaccgccaggtcccttgagctgt

SEQ ID NO: 4417316 - DNA, 25 bp, Homo sapien
tgcagctgcaggtactaggtggttc

SEQ ID NO: 4417317 - DNA, 25 bp, Homo sapien
agcgtgtgttgttctcagccaggcc

SEQ ID NO: 4417318 - DNA, 25 bp, Homo sapien
ttgagctgtccgcaggctgagaccc

SEQ ID NO: 4417319 - DNA, 25 bp, Homo sapien
attaatctctgcgtctgggctctgg

SEQ ID NO: 4417320 - DNA, 25 bp, Homo sapien
ctgactgaagccataccccggtggc

SEQ ID NO: 4417321 - DNA, 25 bp, Homo sapien
ggcggtgtttgctcctgccgattaa

SEQ ID NO: 4417322 - DNA, 25 bp, Homo sapien
gggcttttgattatgggagccatgg

SEQ ID NO: 4417323 - DNA, 25 bp, Homo sapien
cccaaactctcaggttgacactgca

SEQ ID NO: 4417324 - DNA, 25 bp, Homo sapien
atgcctggatagccgctgctcccat

SEQ ID NO: 4417325 - DNA, 25 bp, Homo sapien
aactctcaggttgacactgcagatg

SEQ ID NO: 4417326 - DNA, 25 bp, Homo sapien
agatgcagaccccgatgctggcacc

SEQ ID NO: 4417327 - DNA, 25 bp, Homo sapien
tgtgtccctgtccaccttggggccc

SEQ ID NO: 4417328 - DNA, 25 bp, Homo sapien
tgtccctgtccaccttggggcccac

SEQ ID NO: 4417329 - DNA, 25 bp, Homo sapien
ctgtgtccctgtccaccttggggcc

SEQ ID NO: 4417330 - DNA, 25 bp, Homo sapien
gtgtccctgtccaccttggggccca

SEQ ID NO: 4417331 - DNA, 25 bp, Homo sapien
agggacgaggtcagcagacgccctg

SEQ ID NO: 4417332 - DNA, 25 bp, Homo sapien
gggacgaggtcagcagacgccctgc

SEQ ID NO: 4417333 - DNA, 25 bp, Homo sapien
cttgtggctgcgaccacacgccagg

SEQ ID NO: 4417334 - DNA, 25 bp, Homo sapien
aacacactgcccgtgagaggtgcca

SEQ ID NO: 4417335 - DNA, 25 bp, Homo sapien
tctgcagtgtagcacgctgggtgct

SEQ ID NO: 4417336 - DNA, 25 bp, Homo sapien
tgcccttgtggctgcgaccacacgc

SEQ ID NO: 4417337 - DNA, 25 bp, Homo sapien
gacgtccctcaggtcgttcatgatg

SEQ ID NO: 4417338 - DNA, 25 bp, Homo sapien
tattcagggccttgatagggggctc

SEQ ID NO: 4417339 - DNA, 25 bp, Homo sapien
ctgcaggtttttgacctctgctctt

SEQ ID NO: 4417340 - DNA, 25 bp, Homo sapien
gtctcccaatacgttcacttagacg

SEQ ID NO: 4417341 - DNA, 25 bp, Homo sapien
ggctccccaaccaaggcgagtgcat

SEQ ID NO: 4417342 - DNA, 25 bp, Homo sapien
cggcgagggcaatgccatgggctcc

SEQ ID NO: 4417343 - DNA, 25 bp, Homo sapien
ccacgcgggacgctttgccaagctc

SEQ ID NO: 4417344 - DNA, 25 bp, Homo sapien
caaggcgagtgcatcgtgtgcctgt

SEQ ID NO: 4417345 - DNA, 25 bp, Homo sapien
cctgcggcggctggcctcaagctga

SEQ ID NO: 4417346 - DNA, 25 bp, Homo sapien
gcccctccagtctcagatctaacag

SEQ ID NO: 4417347 - DNA, 25 bp, Homo sapien
ctccagtctcagatctaacaggact

SEQ ID NO: 4417348 - DNA, 25 bp, Homo sapien
ccctgcggcggctggcctcaagctg

SEQ ID NO: 4417349 - DNA, 25 bp, Homo sapien
ttggggaagccatgcgtcaggactt

SEQ ID NO: 4417350 - DNA, 25 bp, Homo sapien
gggaagccatgcgtcaggacttgga

SEQ ID NO: 4417351 - DNA, 25 bp, Homo sapien
tggggaagccatgcgtcaggacttg

SEQ ID NO: 4417352 - DNA, 25 bp, Homo sapien
ggaagccatgcgtcaggacttggag

SEQ ID NO: 4417353 - DNA, 25 bp, Homo sapien
cagggcttggggtaaaggcacagct

SEQ ID NO: 4417354 - DNA, 25 bp, Homo sapien
gacttccagacgcacggggagtgtg

SEQ ID NO: 4417355 - DNA, 25 bp, Homo sapien
gccttcgcagcttggcatagtgaac

SEQ ID NO: 4417356 - DNA, 25 bp, Homo sapien
tggacttccagacgcacggggagtg

SEQ ID NO: 4417357 - DNA, 25 bp, Homo sapien
tgtgccttcgcagcttggcatagtg

SEQ ID NO: 4417358 - DNA, 25 bp, Homo sapien
catggaagccgtttctgtccttctc

SEQ ID NO: 4417359 - DNA, 25 bp, Homo sapien
gagccatggaagccgtttctgtcct

SEQ ID NO: 4417360 - DNA, 25 bp, Homo sapien
gccatggaagccgtttctgtccttc

SEQ ID NO: 4417361 - DNA, 25 bp, Homo sapien
ggagccatggaagccgtttctgtcc

SEQ ID NO: 4417362 - DNA, 25 bp, Homo sapien
gtggccacatctacagactcgagcc

SEQ ID NO: 4417363 - DNA, 25 bp, Homo sapien
cagacagagagcctttgacctctgt

SEQ ID NO: 4417364 - DNA, 25 bp, Homo sapien
acacttcacactcttggtagagctc

SEQ ID NO: 4417365 - DNA, 25 bp, Homo sapien
tcttggtagagctcccggctgtctt

SEQ ID NO: 4417366 - DNA, 25 bp, Homo sapien
gctttcccatggcagcctcttcaca

SEQ ID NO: 4417367 - DNA, 25 bp, Homo sapien
tgctttcccatggcagcctcttcac

SEQ ID NO: 4417368 - DNA, 25 bp, Homo sapien
tcacgactgctttcccatggcagcc

SEQ ID NO: 4417369 - DNA, 25 bp, Homo sapien
ttcccatggcagcctcttcacagcc

SEQ ID NO: 4417370 - DNA, 25 bp, Homo sapien
tagtcatcaagggtacaccaggacc

SEQ ID NO: 4417371 - DNA, 25 bp, Homo sapien
ggatagtcatcaagggtacaccagg

SEQ ID NO: 4417372 - DNA, 25 bp, Homo sapien
cactgacggtattggatagtcatca

SEQ ID NO: 4417373 - DNA, 25 bp, Homo sapien
agggtactggacagtcactgacggt

SEQ ID NO: 4417374 - DNA, 25 bp, Homo sapien
ctatttgctgcaaagcggtgactgt

SEQ ID NO: 4417375 - DNA, 25 bp, Homo sapien
gtgaaactgtctttccttgtgtctt

SEQ ID NO: 4417376 - DNA, 25 bp, Homo sapien
tgtgtctttagtgctggctcctcct

SEQ ID NO: 4417377 - DNA, 25 bp, Homo sapien
tgaaactgtctttccttgtgtcttt

SEQ ID NO: 4417378 - DNA, 25 bp, Homo sapien
tggggagaaaatggtcccatctgtg

SEQ ID NO: 4417379 - DNA, 25 bp, Homo sapien
tgtgcccactttcgtggagctcaga

SEQ ID NO: 4417380 - DNA, 25 bp, Homo sapien
ccagcttggactgctactttcaacc

SEQ ID NO: 4417381 - DNA, 25 bp, Homo sapien
tggactgctactttcaacctcttgg

SEQ ID NO: 4417382 - DNA, 25 bp, Homo sapien
aactgcgggctgattggaagctgtt

SEQ ID NO: 4417383 - DNA, 25 bp, Homo sapien
aggaactgcgggctgattggaagct

SEQ ID NO: 4417384 - DNA, 25 bp, Homo sapien
gctgattggaagctgttgttcccat

SEQ ID NO: 4417385 - DNA, 25 bp, Homo sapien
tcatcaagctgtccaggggactcga

SEQ ID NO: 4417386 - DNA, 25 bp, Homo sapien
ctatggtagattcatgggtaccagg

SEQ ID NO: 4417387 - DNA, 25 bp, Homo sapien
tatggtagattcatgggtaccaggg

SEQ ID NO: 4417388 - DNA, 25 bp, Homo sapien
atggtagattcatgggtaccagggc

SEQ ID NO: 4417389 - DNA, 25 bp, Homo sapien
gccccaacatggaagtcagaagccc

SEQ ID NO: 4417390 - DNA, 25 bp, Homo sapien
gctccgcacaacacacagacatctt

SEQ ID NO: 4417391 - DNA, 25 bp, Homo sapien
caggccccaacatggaagtcagaag

SEQ ID NO: 4417392 - DNA, 25 bp, Homo sapien
caacatggaagtcagaagccccagc

SEQ ID NO: 4417393 - DNA, 25 bp, Homo sapien
aaatgccctgataactccccagcag

SEQ ID NO: 4417394 - DNA, 25 bp, Homo sapien
ggaaatgccctgataactccccagc

SEQ ID NO: 4417395 - DNA, 25 bp, Homo sapien
aggcggaggaaatgccctgataact

SEQ ID NO: 4417396 - DNA, 25 bp, Homo sapien
ggaggaaatgccctgataactcccc

SEQ ID NO: 4417397 - DNA, 25 bp, Homo sapien
gagcaaggtggaggcgcccgtcagt

SEQ ID NO: 4417398 - DNA, 25 bp, Homo sapien
ggaggagtgactagcagcgcgggcc

SEQ ID NO: 4417399 - DNA, 25 bp, Homo sapien
gcttcccgagcccaagttcggcgcc

SEQ ID NO: 4417400 - DNA, 25 bp, Homo sapien
atcgccgcccagaaagacaaaagga

SEQ ID NO: 4417401 - DNA, 25 bp, Homo sapien
tgtgcggggctttggaccaagagct

SEQ ID NO: 4417402 - DNA, 25 bp, Homo sapien
gctgtcttcagtgcgttctcatttc

SEQ ID NO: 4417403 - DNA, 25 bp, Homo sapien
aggaacgagcggatcgcctccgcgt

SEQ ID NO: 4417404 - DNA, 25 bp, Homo sapien
gcgtctggcccaggtcgcagtgcgg

SEQ ID NO: 4417405 - DNA, 25 bp, Homo sapien
gcagggccttagcacctgccagagc

SEQ ID NO: 4417406 - DNA, 25 bp, Homo sapien
gcaagcagggccttagcacctgcca

SEQ ID NO: 4417407 - DNA, 25 bp, Homo sapien
tgccagagccctgcgtctaccttta

SEQ ID NO: 4417408 - DNA, 25 bp, Homo sapien
agagccctgcgtctacctttactcg

SEQ ID NO: 4417409 - DNA, 25 bp, Homo sapien
acaaaatctggtcagtagtttacat

SEQ ID NO: 4417410 - DNA, 25 bp, Homo sapien
tactatcctaatctaatctatctaa

SEQ ID NO: 4417411 - DNA, 25 bp, Homo sapien
tcagtctctttatacctacatctac

SEQ ID NO: 4417412 - DNA, 25 bp, Homo sapien
taccgctaatgtgctaatttcaaat

SEQ ID NO: 4417413 - DNA, 25 bp, Homo sapien
ggctgccactgtgggatgctctgtt

SEQ ID NO: 4417414 - DNA, 25 bp, Homo sapien
gctctgtttcagtgagtttgaggat

SEQ ID NO: 4417415 - DNA, 25 bp, Homo sapien
tttcagtgagtttgaggatgctggt

SEQ ID NO: 4417416 - DNA, 25 bp, Homo sapien
tgtgggatgctctgtttcagtgagt

SEQ ID NO: 4417417 - DNA, 25 bp, Homo sapien
ccggctgcacatggaggctggagtc

SEQ ID NO: 4417418 - DNA, 25 bp, Homo sapien
catcgccaatgtccggagcggtcat

SEQ ID NO: 4417419 - DNA, 25 bp, Homo sapien
tttcctcacatcgccaatgtccgga

SEQ ID NO: 4417420 - DNA, 25 bp, Homo sapien
ctcacatcgccaatgtccggagcgg

SEQ ID NO: 4417421 - DNA, 25 bp, Homo sapien
tcaaggaaacctgcagtctcagaca

SEQ ID NO: 4417422 - DNA, 25 bp, Homo sapien
tcacgatgaggacgacaatgatgtt

SEQ ID NO: 4417423 - DNA, 25 bp, Homo sapien
gatgttgatgatggtccttacattg

SEQ ID NO: 4417424 - DNA, 25 bp, Homo sapien
gaatttggaaagactcacgatgagg

SEQ ID NO: 4417425 - DNA, 25 bp, Homo sapien
cttgcacgcttgtacaaaaaaaact

SEQ ID NO: 4417426 - DNA, 25 bp, Homo sapien
acaaaaaacttgcacgcttgtacaa

SEQ ID NO: 4417427 - DNA, 25 bp, Homo sapien
tgcacgcttgtacaaaaaaaacttg

SEQ ID NO: 4417428 - DNA, 25 bp, Homo sapien
caaaaaaaacttgttcctcgcagca

SEQ ID NO: 4417429 - DNA, 25 bp, Homo sapien
tccatcaatgaggaatgcatttggc

SEQ ID NO: 4417430 - DNA, 25 bp, Homo sapien
cggtggcttagataagagtggctta

SEQ ID NO: 4417431 - DNA, 25 bp, Homo sapien
gggacaatgttggacattccatcaa

SEQ ID NO: 4417432 - DNA, 25 bp, Homo sapien
cataaaacgtgacaagcggtggctt

SEQ ID NO: 4417433 - DNA, 25 bp, Homo sapien
ggttctgaagcaggcccagccacag

SEQ ID NO: 4417434 - DNA, 25 bp, Homo sapien
ctccaaggagcagccagccaaggtt

SEQ ID NO: 4417435 - DNA, 25 bp, Homo sapien
aaggagcagccagccaaggttctga

SEQ ID NO: 4417436 - DNA, 25 bp, Homo sapien
gccaaggttctgaagcaggcccagc

SEQ ID NO: 4417437 - DNA, 25 bp, Homo sapien
ttcacagctgagaacaaggggctca

SEQ ID NO: 4417438 - DNA, 25 bp, Homo sapien
cttcacagctgagaacaaggggctc

SEQ ID NO: 4417439 - DNA, 25 bp, Homo sapien
tcacagctgagaacaaggggctcat

SEQ ID NO: 4417440 - DNA, 25 bp, Homo sapien
ctgctcgatatggcctcggcctgca

SEQ ID NO: 4417441 - DNA, 25 bp, Homo sapien
cctgctcgatatggcctcggcctgc

SEQ ID NO: 4417442 - DNA, 25 bp, Homo sapien
tgctcgatatggcctcggcctgcat

SEQ ID NO: 4417443 - DNA, 25 bp, Homo sapien
catctctagcttgccacataaattg

SEQ ID NO: 4417444 - DNA, 25 bp, Homo sapien
gaacacagcataaaggccgctctga

SEQ ID NO: 4417445 - DNA, 25 bp, Homo sapien
tctagcttgccacataaattgtgca

SEQ ID NO: 4417446 - DNA, 25 bp, Homo sapien
tgtggcgccgacagacagccccgaa

SEQ ID NO: 4417447 - DNA, 25 bp, Homo sapien
tctgactcaaccagcacggtgtggg

SEQ ID NO: 4417448 - DNA, 25 bp, Homo sapien
gtccgcagtcggagacacactgaca

SEQ ID NO: 4417449 - DNA, 25 bp, Homo sapien
tctcacaaagatgatcggggtccgc

SEQ ID NO: 4417450 - DNA, 25 bp, Homo sapien
agctctgactcaaccagcacggtgt

SEQ ID NO: 4417451 - DNA, 25 bp, Homo sapien
agccagcgcttggccgtggaaaagc

SEQ ID NO: 4417452 - DNA, 25 bp, Homo sapien
cggaaaacctcgctgctgcatccgt

SEQ ID NO: 4417453 - DNA, 25 bp, Homo sapien
ctgcatccgttccaccagcaaggtt

SEQ ID NO: 4417454 - DNA, 25 bp, Homo sapien
gaaaacctcgctgctgcatccgttc

SEQ ID NO: 4417455 - DNA, 25 bp, Homo sapien
gtatcgaaaatatgtccaacttcac

SEQ ID NO: 4417456 - DNA, 25 bp, Homo sapien
caataatgtatcgaaaatatgtcca

SEQ ID NO: 4417457 - DNA, 25 bp, Homo sapien
tccaacttcactagaacttagggaa

SEQ ID NO: 4417458 - DNA, 25 bp, Homo sapien
aaatatgtccaacttcactagaact

SEQ ID NO: 4417459 - DNA, 25 bp, Homo sapien
tacttgtaagaatacgtgaggaggc

SEQ ID NO: 4417460 - DNA, 25 bp, Homo sapien
tcatcacagcacgtggtgagtggtc

SEQ ID NO: 4417461 - DNA, 25 bp, Homo sapien
tagccattcccacgtctgagcagaa

SEQ ID NO: 4417462 - DNA, 25 bp, Homo sapien
ggtatattgttcctgccgggtccag

SEQ ID NO: 4417463 - DNA, 25 bp, Homo sapien
gaaatggtccttctacagcactcct

SEQ ID NO: 4417464 - DNA, 25 bp, Homo sapien
tactggatccccgtgaaacacagga

SEQ ID NO: 4417465 - DNA, 25 bp, Homo sapien
tgattaagaggtccgtctcactgac

SEQ ID NO: 4417466 - DNA, 25 bp, Homo sapien
gatttggcccatactccgtgccagg

SEQ ID NO: 4417467 - DNA, 25 bp, Homo sapien
tctctgcctcagtgcgtcggacaat

SEQ ID NO: 4417468 - DNA, 25 bp, Homo sapien
aagtcgacattggtttcagcccaga

SEQ ID NO: 4417469 - DNA, 25 bp, Homo sapien
cggaatttgagtcccgacacctcgg

SEQ ID NO: 4417470 - DNA, 25 bp, Homo sapien
tggctgaccaagaccgtggccttaa

SEQ ID NO: 4417471 - DNA, 25 bp, Homo sapien
cgttaaactcttatgcacccttcaa

SEQ ID NO: 4417472 - DNA, 25 bp, Homo sapien
gttaaactcttatgcacccttcaaa

SEQ ID NO: 4417473 - DNA, 25 bp, Homo sapien
taaactcttatgcacccttcaaagc

SEQ ID NO: 4417474 - DNA, 25 bp, Homo sapien
ccgttaaactcttatgcacccttca

SEQ ID NO: 4417475 - DNA, 25 bp, Homo sapien
tcagagcagaattctgccatggccg

SEQ ID NO: 4417476 - DNA, 25 bp, Homo sapien
tgctgcttcctaacaggaggacggt

SEQ ID NO: 4417477 - DNA, 25 bp, Homo sapien
tgtcacaggcgacgatctaaagcca

SEQ ID NO: 4417478 - DNA, 25 bp, Homo sapien
tgcatggaggaaaaacacgctttct

SEQ ID NO: 4417479 - DNA, 25 bp, Homo sapien
cttaatctctgcgttgaagtctcct

SEQ ID NO: 4417480 - DNA, 25 bp, Homo sapien
aactctgcctctaatcctgctgctg

SEQ ID NO: 4417481 - DNA, 25 bp, Homo sapien
aaatgttccctctgggccaactctg

SEQ ID NO: 4417482 - DNA, 25 bp, Homo sapien
gggaacaaagacatctcaacttctt

SEQ ID NO: 4417483 - DNA, 25 bp, Homo sapien
tccctgtgccttcacaatacatcaa

SEQ ID NO: 4417484 - DNA, 25 bp, Homo sapien
gtgggaccgccagccactgagtggg

SEQ ID NO: 4417485 - DNA, 25 bp, Homo sapien
gcttggtcctgatgggctctaaaga

SEQ ID NO: 4417486 - DNA, 25 bp, Homo sapien
aatacatcaataaaaccgccaccgc

SEQ ID NO: 4417487 - DNA, 25 bp, Homo sapien
ctgcctgggagtctagggaacttct

SEQ ID NO: 4417488 - DNA, 25 bp, Homo sapien
ccacatcaaacctggtgggcgctgt

SEQ ID NO: 4417489 - DNA, 25 bp, Homo sapien
gaatgagttagtgacggtgtgctca

SEQ ID NO: 4417490 - DNA, 25 bp, Homo sapien
ccgacacgctctacccagggggaat

SEQ ID NO: 4417491 - DNA, 25 bp, Homo sapien
atttctccatcttccgtatttgagc

SEQ ID NO: 4417492 - DNA, 25 bp, Homo sapien
tcattcgctttgtgagagaagtctc

SEQ ID NO: 4417493 - DNA, 25 bp, Homo sapien
catgaaacgggacctcagggactct

SEQ ID NO: 4417494 - DNA, 25 bp, Homo sapien
aagtctcccatgaaacgggacctca

SEQ ID NO: 4417495 - DNA, 25 bp, Homo sapien
aaagaagcagacatgttccttccct

SEQ ID NO: 4417496 - DNA, 25 bp, Homo sapien
ctttcctgaaggaaagaagcagaca

SEQ ID NO: 4417497 - DNA, 25 bp, Homo sapien
gaaggaaagaagcagacatgttcct

SEQ ID NO: 4417498 - DNA, 25 bp, Homo sapien
tcctgaaggaaagaagcagacatgt

SEQ ID NO: 4417499 - DNA, 25 bp, Homo sapien
ttcaacccaatctcatgactcagca

SEQ ID NO: 4417500 - DNA, 25 bp, Homo sapien
tgctaaagccgccattcaacccaat

SEQ ID NO: 4417501 - DNA, 25 bp, Homo sapien
ctctctaacacaggccacagctgtg

SEQ ID NO: 4417502 - DNA, 25 bp, Homo sapien
catgactcagcactcctacctgatg

SEQ ID NO: 4417503 - DNA, 25 bp, Homo sapien
agaaggcaggcaaccccgacagtgc

SEQ ID NO: 4417504 - DNA, 25 bp, Homo sapien
cagaaggcaggcaaccccgacagtg

SEQ ID NO: 4417505 - DNA, 25 bp, Homo sapien
ccactcaggtgggtgtagggagcct

SEQ ID NO: 4417506 - DNA, 25 bp, Homo sapien
tgccacacctttggcttcgaagcag

SEQ ID NO: 4417507 - DNA, 25 bp, Homo sapien
tccctgaagtgaacacagaaaggcc

SEQ ID NO: 4417508 - DNA, 25 bp, Homo sapien
accaagcacctgttagctgttgcca

SEQ ID NO: 4417509 - DNA, 25 bp, Homo sapien
gcccggcgctgtgctgagaggccag

SEQ ID NO: 4417510 - DNA, 25 bp, Homo sapien
cccggcgctgtgctgagaggccagc

SEQ ID NO: 4417511 - DNA, 25 bp, Homo sapien
ccggcgctgtgctgagaggccagct

SEQ ID NO: 4417512 - DNA, 25 bp, Homo sapien
ctgcggagaaagctcagtaaacaca

SEQ ID NO: 4417513 - DNA, 25 bp, Homo sapien
gagaaagctcagtaaacacacacat

SEQ ID NO: 4417514 - DNA, 25 bp, Homo sapien
gcggagaaagctcagtaaacacaca

SEQ ID NO: 4417515 - DNA, 25 bp, Homo sapien
gaaagctcagtaaacacacacatca

SEQ ID NO: 4417516 - DNA, 25 bp, Homo sapien
aatgccattttggagctgccggagc

SEQ ID NO: 4417517 - DNA, 25 bp, Homo sapien
tgaagaaaacgaagccagttacggc

SEQ ID NO: 4417518 - DNA, 25 bp, Homo sapien
gggaaaatcaagtcaccacagcatt

SEQ ID NO: 4417519 - DNA, 25 bp, Homo sapien
gattccgcaagtactgaaatgtcgg

SEQ ID NO: 4417520 - DNA, 25 bp, Homo sapien
actcctgtgccctgcaaaaggccaa

SEQ ID NO: 4417521 - DNA, 25 bp, Homo sapien
tgctcagttcccacatgttagaccc

SEQ ID NO: 4417522 - DNA, 25 bp, Homo sapien
tgagggctagctcacagttgctgct

SEQ ID NO: 4417523 - DNA, 25 bp, Homo sapien
catctggagtctgccctatgtgccc

SEQ ID NO: 4417524 - DNA, 25 bp, Homo sapien
ggtccagtgcctggctgacactcag

SEQ ID NO: 4417525 - DNA, 25 bp, Homo sapien
tcttgggtcccttgtagggctgatc

SEQ ID NO: 4417526 - DNA, 25 bp, Homo sapien
ttgggtcccttgtagggctgatccc

SEQ ID NO: 4417527 - DNA, 25 bp, Homo sapien
cttgggtcccttgtagggctgatcc

SEQ ID NO: 4417528 - DNA, 25 bp, Homo sapien
tgatctgatgatgccgatgcttccg

SEQ ID NO: 4417529 - DNA, 25 bp, Homo sapien
tcatctatcctgagatccgctgagc

SEQ ID NO: 4417530 - DNA, 25 bp, Homo sapien
tgcagaagcagcatgccatcatgaa

SEQ ID NO: 4417531 - DNA, 25 bp, Homo sapien
tcttggcccttgtagttacagaaac

SEQ ID NO: 4417532 - DNA, 25 bp, Homo sapien
gatgcctcctgctggaccgtcagct

SEQ ID NO: 4417533 - DNA, 25 bp, Homo sapien
tccttgcatcctgaagaggaacagc

SEQ ID NO: 4417534 - DNA, 25 bp, Homo sapien
aagaggaacagctgtcgctgtaaac

SEQ ID NO: 4417535 - DNA, 25 bp, Homo sapien
ggcaggcaggctcggtctccttgca

SEQ ID NO: 4417536 - DNA, 25 bp, Homo sapien
ttccaggtaaagcactgctggtgtg

SEQ ID NO: 4417537 - DNA, 25 bp, Homo sapien
gttgcatttgctgcggctccactca

SEQ ID NO: 4417538 - DNA, 25 bp, Homo sapien
aagcactgttcagacacctttccag

SEQ ID NO: 4417539 - DNA, 25 bp, Homo sapien
cagggttgcatttgctgcggctcca

SEQ ID NO: 4417540 - DNA, 25 bp, Homo sapien
agccgggcacaggaggtcttcactg

SEQ ID NO: 4417541 - DNA, 25 bp, Homo sapien
tctcatccagaacctcatagagctg

SEQ ID NO: 4417542 - DNA, 25 bp, Homo sapien
ttcactgggtcccacacgggagcag

SEQ ID NO: 4417543 - DNA, 25 bp, Homo sapien
ctagctgacttgcttgggatgcgtg

SEQ ID NO: 4417544 - DNA, 25 bp, Homo sapien
aggaaaagggctgagtgccctgtgg

SEQ ID NO: 4417545 - DNA, 25 bp, Homo sapien
tgagtgccctgtggtgtggctgggc

SEQ ID NO: 4417546 - DNA, 25 bp, Homo sapien
ctgtggtgtggctgggcagaaacag

SEQ ID NO: 4417547 - DNA, 25 bp, Homo sapien
gggcagaaacaggaaggtgtgcagc

SEQ ID NO: 4417548 - DNA, 25 bp, Homo sapien
ctacactcgcaggtccaggtatgac

SEQ ID NO: 4417549 - DNA, 25 bp, Homo sapien
caggtccaggtatgaccagctaaca

SEQ ID NO: 4417550 - DNA, 25 bp, Homo sapien
tccaggtatgaccagctaacactcc

SEQ ID NO: 4417551 - DNA, 25 bp, Homo sapien
tcgcaggtccaggtatgaccagcta

SEQ ID NO: 4417552 - DNA, 25 bp, Homo sapien
cttctcaggcagcatctgaggcact

SEQ ID NO: 4417553 - DNA, 25 bp, Homo sapien
ttctcaggcagcatctgaggcactg

SEQ ID NO: 4417554 - DNA, 25 bp, Homo sapien
ctgaggcactgaggcacctcctgtt

SEQ ID NO: 4417555 - DNA, 25 bp, Homo sapien
catctgaggcactgaggcacctcct

SEQ ID NO: 4417556 - DNA, 25 bp, Homo sapien
ggagtgtttccgcgtcctgactggg

SEQ ID NO: 4417557 - DNA, 25 bp, Homo sapien
gtgtttccgcgtcctgactgggcca

SEQ ID NO: 4417558 - DNA, 25 bp, Homo sapien
gagtgtttccgcgtcctgactgggc

SEQ ID NO: 4417559 - DNA, 25 bp, Homo sapien
gtttccgcgtcctgactgggccact

SEQ ID NO: 4417560 - DNA, 25 bp, Homo sapien
gacttatccatgatcacccaggcct

SEQ ID NO: 4417561 - DNA, 25 bp, Homo sapien
agcccggctgaaacgctaggcacag

SEQ ID NO: 4417562 - DNA, 25 bp, Homo sapien
taactgttggcaagtgacttatcca

SEQ ID NO: 4417563 - DNA, 25 bp, Homo sapien
taataaaatggcctcagcccggctg

SEQ ID NO: 4417564 - DNA, 25 bp, Homo sapien
gggttttcagtgacagaccccagaa

SEQ ID NO: 4417565 - DNA, 25 bp, Homo sapien
agagtggagtctctggactggttcc

SEQ ID NO: 4417566 - DNA, 25 bp, Homo sapien
gtgacagaccccagaaacatcaggc

SEQ ID NO: 4417567 - DNA, 25 bp, Homo sapien
cagtggttcccgagtcctgttccat

SEQ ID NO: 4417568 - DNA, 25 bp, Homo sapien
tgcagaaggaaaaggttcctccttc

SEQ ID NO: 4417569 - DNA, 25 bp, Homo sapien
ctgtgagtcccacacggttctcttt

SEQ ID NO: 4417570 - DNA, 25 bp, Homo sapien
aaggaatcagagggctcaggccatt

SEQ ID NO: 4417571 - DNA, 25 bp, Homo sapien
caaggaatcagagggctcaggccat

SEQ ID NO: 4417572 - DNA, 25 bp, Homo sapien
tcaaggaatcagagggctcaggcca

SEQ ID NO: 4417573 - DNA, 25 bp, Homo sapien
tcatcagtcagatccccgaagcttg

SEQ ID NO: 4417574 - DNA, 25 bp, Homo sapien
gccaggccaaccagactctgagatg

SEQ ID NO: 4417575 - DNA, 25 bp, Homo sapien
gtcagatccccgaagcttgccaggc

SEQ ID NO: 4417576 - DNA, 25 bp, Homo sapien
ccaaaatgctttcatcagtcagatc

SEQ ID NO: 4417577 - DNA, 25 bp, Homo sapien
gccactgagtcagcaaagacgtaca

SEQ ID NO: 4417578 - DNA, 25 bp, Homo sapien
ggcagttccacttcctaggcccaga

SEQ ID NO: 4417579 - DNA, 25 bp, Homo sapien
catggcccgcctaaaagatgttgaa

SEQ ID NO: 4417580 - DNA, 25 bp, Homo sapien
tgaggttaccttgactgccgctaag

SEQ ID NO: 4417581 - DNA, 25 bp, Homo sapien
gaggaatcacatcagactcagaaca

SEQ ID NO: 4417582 - DNA, 25 bp, Homo sapien
aagcatggcccctgtttcatggagg

SEQ ID NO: 4417583 - DNA, 25 bp, Homo sapien
ggaaatggccatagagatttctaca

SEQ ID NO: 4417584 - DNA, 25 bp, Homo sapien
catccagaaatatgacccaccctgg

SEQ ID NO: 4417585 - DNA, 25 bp, Homo sapien
tgtaacagcaaactactcaggtgcc

SEQ ID NO: 4417586 - DNA, 25 bp, Homo sapien
gaaaagaagacaaacatacgtgctt

SEQ ID NO: 4417587 - DNA, 25 bp, Homo sapien
gtgcaaataatctgtgcaggtggcc

SEQ ID NO: 4417588 - DNA, 25 bp, Homo sapien
cattgcctacgtggtctgtaacagc

SEQ ID NO: 4417589 - DNA, 25 bp, Homo sapien
caggcacttatgaggagtgtgcagt

SEQ ID NO: 4417590 - DNA, 25 bp, Homo sapien
ctgtgttgcccttccaggcacttat

SEQ ID NO: 4417591 - DNA, 25 bp, Homo sapien
cagcccatcccaggttttatagtac

SEQ ID NO: 4417592 - DNA, 25 bp, Homo sapien
tcccaggttttatagtacatacatg

SEQ ID NO: 4417593 - DNA, 25 bp, Homo sapien
tgcagctcgtggtcggtgaactccg

SEQ ID NO: 4417594 - DNA, 25 bp, Homo sapien
gatcttcttgaactcgtccacggtc

SEQ ID NO: 4417595 - DNA, 25 bp, Homo sapien
gtgaactccgtgttctcccgcaggt

SEQ ID NO: 4417596 - DNA, 25 bp, Homo sapien
tgctcggcgaacttggaagcgtcgc

SEQ ID NO: 4417597 - DNA, 25 bp, Homo sapien
tcagcgcaatgatgaactcccggaa

SEQ ID NO: 4417598 - DNA, 25 bp, Homo sapien
ctcagcgcaatgatgaactcccgga

SEQ ID NO: 4417599 - DNA, 25 bp, Homo sapien
ccgtcgccgttggtgtcgaaggtgc

SEQ ID NO: 4417600 - DNA, 25 bp, Homo sapien
actcccggaagtcgatggtgccgtc

SEQ ID NO: 4417601 - DNA, 25 bp, Homo sapien
tgatgtagccgttgccgtccaggtc

SEQ ID NO: 4417602 - DNA, 25 bp, Homo sapien
ctgatgtagccgttgccgtccaggt

SEQ ID NO: 4417603 - DNA, 25 bp, Homo sapien
cggctgatgtagccgttgccgtcca

SEQ ID NO: 4417604 - DNA, 25 bp, Homo sapien
gctgatgtagccgttgccgtccagg

SEQ ID NO: 4417605 - DNA, 25 bp, Homo sapien
caagcctctgcacggccagtgacag

SEQ ID NO: 4417606 - DNA, 25 bp, Homo sapien
cagtgccttgatgttctgaccaagc

SEQ ID NO: 4417607 - DNA, 25 bp, Homo sapien
tgccttgatgttctgaccaagcctc

SEQ ID NO: 4417608 - DNA, 25 bp, Homo sapien
tgaccaagcctctgcacggccagtg

SEQ ID NO: 4417609 - DNA, 25 bp, Homo sapien
tctgtgcgcttctccggggtggact

SEQ ID NO: 4417610 - DNA, 25 bp, Homo sapien
ttctccggggtggactcatcctccg

SEQ ID NO: 4417611 - DNA, 25 bp, Homo sapien
catcacagacgacaccatcttgtag

SEQ ID NO: 4417612 - DNA, 25 bp, Homo sapien
cagacgacaccatcttgtagatggc

SEQ ID NO: 4417613 - DNA, 25 bp, Homo sapien
tgccccaggacgactctgagggctg

SEQ ID NO: 4417614 - DNA, 25 bp, Homo sapien
tccagtcaggagaaccagagctgcc

SEQ ID NO: 4417615 - DNA, 25 bp, Homo sapien
agagagcaggccagcccagatggac

SEQ ID NO: 4417616 - DNA, 25 bp, Homo sapien
ggagcttccgaaggttccactggct

SEQ ID NO: 4417617 - DNA, 25 bp, Homo sapien
caatacatcaggtacctcaaagggc

SEQ ID NO: 4417618 - DNA, 25 bp, Homo sapien
ccgttcagacatggcctcaagggca

SEQ ID NO: 4417619 - DNA, 25 bp, Homo sapien
tggtcgtgctaaggaatcagctgcc

SEQ ID NO: 4417620 - DNA, 25 bp, Homo sapien
gacaatgggattagccagtgctcac

SEQ ID NO: 4417621 - DNA, 25 bp, Homo sapien
caggcggacgatggaggggtcgctc

SEQ ID NO: 4417622 - DNA, 25 bp, Homo sapien
gacgatggaggggtcgctcttggca

SEQ ID NO: 4417623 - DNA, 25 bp, Homo sapien
gaggggtcgctcttggcacctctga

SEQ ID NO: 4417624 - DNA, 25 bp, Homo sapien
gcagcaggcggacgatggaggggtc

SEQ ID NO: 4417625 - DNA, 25 bp, Homo sapien
tatctatacgtgcaagcggctgtgg

SEQ ID NO: 4417626 - DNA, 25 bp, Homo sapien
cctgtgctcacaacacggatgggag

SEQ ID NO: 4417627 - DNA, 25 bp, Homo sapien
ttttaataccggaaatgccagacca

SEQ ID NO: 4417628 - DNA, 25 bp, Homo sapien
ttgggatcacaaaacgcatgggccg

SEQ ID NO: 4417629 - DNA, 25 bp, Homo sapien
accagaagcactgacggcagcggcg

SEQ ID NO: 4417630 - DNA, 25 bp, Homo sapien
gctatgcccgtcctctcttggaatg

SEQ ID NO: 4417631 - DNA, 25 bp, Homo sapien
tgactgcacccttggctatgcccgt

SEQ ID NO: 4417632 - DNA, 25 bp, Homo sapien
gaccagaagcactgacggcagcggc

SEQ ID NO: 4417633 - DNA, 25 bp, Homo sapien
tatggaagactaggatatgggtcac

SEQ ID NO: 4417634 - DNA, 25 bp, Homo sapien
aatgtgtagatagcactctggtagc

SEQ ID NO: 4417635 - DNA, 25 bp, Homo sapien
ctgcctgtgtcttgtgcctgggaga

SEQ ID NO: 4417636 - DNA, 25 bp, Homo sapien
tctttgtaagagtagggtcgccatg

SEQ ID NO: 4417637 - DNA, 25 bp, Homo sapien
ccaacatgtgatggcctcgatcgga

SEQ ID NO: 4417638 - DNA, 25 bp, Homo sapien
cctttctagacgaagatgagtcgag

SEQ ID NO: 4417639 - DNA, 25 bp, Homo sapien
gaatcatagctgagcccggcagata

SEQ ID NO: 4417640 - DNA, 25 bp, Homo sapien
gattgttgagcgctgtgacctgcct

SEQ ID NO: 4417641 - DNA, 25 bp, Homo sapien
tggttttgcggattgccactgatga

SEQ ID NO: 4417642 - DNA, 25 bp, Homo sapien
tccaaagcagtctgtcgtctcagtg

SEQ ID NO: 4417643 - DNA, 25 bp, Homo sapien
cgtctcagtgtgaaattcggtgcca

SEQ ID NO: 4417644 - DNA, 25 bp, Homo sapien
ggaacgggcgaaagagctaaatatc

SEQ ID NO: 4417645 - DNA, 25 bp, Homo sapien
ggctagcgtttgctctgtttctgtg

SEQ ID NO: 4417646 - DNA, 25 bp, Homo sapien
ttctgcttacggctagcgtttgctc

SEQ ID NO: 4417647 - DNA, 25 bp, Homo sapien
tgcttacggctagcgtttgctctgt

SEQ ID NO: 4417648 - DNA, 25 bp, Homo sapien
ttacggctagcgtttgctctgtttc

SEQ ID NO: 4417649 - DNA, 25 bp, Homo sapien
tctgcctggaggctgcatactgggc

SEQ ID NO: 4417650 - DNA, 25 bp, Homo sapien
tcaaagatgtctcattcagcgctgg

SEQ ID NO: 4417651 - DNA, 25 bp, Homo sapien
tccggagtgtgaggaaaattgcgtc

SEQ ID NO: 4417652 - DNA, 25 bp, Homo sapien
tcagcgctggagctataacgttctc

SEQ ID NO: 4417653 - DNA, 25 bp, Homo sapien
taatgtttctatctgaccaccccca

SEQ ID NO: 4417654 - DNA, 25 bp, Homo sapien
tggcctctacgttccagttaatgtt

SEQ ID NO: 4417655 - DNA, 25 bp, Homo sapien
atgtgcaacagtcagagccctcctg

SEQ ID NO: 4417656 - DNA, 25 bp, Homo sapien
cctgagccaagaactggcctctacg

SEQ ID NO: 4417657 - DNA, 25 bp, Homo sapien
ggctcaccttcccagcatgcgggca

SEQ ID NO: 4417658 - DNA, 25 bp, Homo sapien
catgcattttaagtaaggccaggtt

SEQ ID NO: 4417659 - DNA, 25 bp, Homo sapien
gcatgcgggcaggagtttgggcttt

SEQ ID NO: 4417660 - DNA, 25 bp, Homo sapien
ggatgaagtttactgaaaatacatt

SEQ ID NO: 4417661 - DNA, 25 bp, Homo sapien
catgagggtgattcctaagtgcgtg

SEQ ID NO: 4417662 - DNA, 25 bp, Homo sapien
tcctaagtgcgtggcatcacgtatt

SEQ ID NO: 4417663 - DNA, 25 bp, Homo sapien
aaatctcatctccacatgagggtga

SEQ ID NO: 4417664 - DNA, 25 bp, Homo sapien
catctccacatgagggtgattccta

SEQ ID NO: 4417665 - DNA, 25 bp, Homo sapien
tttctctgggacagcccacaggtgg

SEQ ID NO: 4417666 - DNA, 25 bp, Homo sapien
cgggatctcttgtcaacaggcttct

SEQ ID NO: 4417667 - DNA, 25 bp, Homo sapien
gaaaatgacactgaccgggatctct

SEQ ID NO: 4417668 - DNA, 25 bp, Homo sapien
cagtcctctgggtgatagtggcttc

SEQ ID NO: 4417669 - DNA, 25 bp, Homo sapien
gcctctcgaggcactgggattatat

SEQ ID NO: 4417670 - DNA, 25 bp, Homo sapien
gaagggatccgtgcattcctcctgg

SEQ ID NO: 4417671 - DNA, 25 bp, Homo sapien
cacgttctgcaatactagggttagg

SEQ ID NO: 4417672 - DNA, 25 bp, Homo sapien
ttaggactcaacatacggtctcggg

SEQ ID NO: 4417673 - DNA, 25 bp, Homo sapien
tcaaatacagtagccacagccttgg

SEQ ID NO: 4417674 - DNA, 25 bp, Homo sapien
gacgacctattgcaggaccttgtga

SEQ ID NO: 4417675 - DNA, 25 bp, Homo sapien
catttaattcccgtgaggtggcttc

SEQ ID NO: 4417676 - DNA, 25 bp, Homo sapien
taattaacctgcctatgagaggctg

SEQ ID NO: 4417677 - DNA, 25 bp, Homo sapien
tatgctgcccgcacaattccattcc

SEQ ID NO: 4417678 - DNA, 25 bp, Homo sapien
tattcctccatctattcgatattta

SEQ ID NO: 4417679 - DNA, 25 bp, Homo sapien
cctccatctattcgatatttatcgg

SEQ ID NO: 4417680 - DNA, 25 bp, Homo sapien
tctattcgatatttatcggacctct

SEQ ID NO: 4417681 - DNA, 25 bp, Homo sapien
cactgctgattgatgcaaagtgagg

SEQ ID NO: 4417682 - DNA, 25 bp, Homo sapien
acagtgggtatgtcacattcactgc

SEQ ID NO: 4417683 - DNA, 25 bp, Homo sapien
ctgctgattgatgcaaagtgaggct

SEQ ID NO: 4417684 - DNA, 25 bp, Homo sapien
acattcactgctgattgatgcaaag

SEQ ID NO: 4417685 - DNA, 25 bp, Homo sapien
tgagcaaacgaagactccgcatctt

SEQ ID NO: 4417686 - DNA, 25 bp, Homo sapien
ggtaaagccgatgagaagataagat

SEQ ID NO: 4417687 - DNA, 25 bp, Homo sapien
cacagggtaagacggcttcctcaga

SEQ ID NO: 4417688 - DNA, 25 bp, Homo sapien
catcttcacgtgcagcacagggtaa

SEQ ID NO: 4417689 - DNA, 25 bp, Homo sapien
ctgcgcgtggaggtcgaggagtggc

SEQ ID NO: 4417690 - DNA, 25 bp, Homo sapien
gggcaggtgactgcgcgtggaggtc

SEQ ID NO: 4417691 - DNA, 25 bp, Homo sapien
tgctgtctccatgcccctcccgcag

SEQ ID NO: 4417692 - DNA, 25 bp, Homo sapien
cgtggaggtcgaggagtggctggtg

SEQ ID NO: 4417693 - DNA, 25 bp, Homo sapien
tgggtggccagaaagaaggccgtcc

SEQ ID NO: 4417694 - DNA, 25 bp, Homo sapien
ggtggccagaaagaaggccgtccat

SEQ ID NO: 4417695 - DNA, 25 bp, Homo sapien
aaggccgtccatccgcacacaccgg

SEQ ID NO: 4417696 - DNA, 25 bp, Homo sapien
actgggtggccagaaagaaggccgt

SEQ ID NO: 4417697 - DNA, 25 bp, Homo sapien
caaggtggggaggtgctccctggcg

SEQ ID NO: 4417698 - DNA, 25 bp, Homo sapien
actcggagacagaaacgttgctgcc

SEQ ID NO: 4417699 - DNA, 25 bp, Homo sapien
caccttcagacctcgggcaggggag

SEQ ID NO: 4417700 - DNA, 25 bp, Homo sapien
aggaaggaggcgttgacttgttggg

SEQ ID NO: 4417701 - DNA, 25 bp, Homo sapien
gtgactagaggagccaaatccttcc

SEQ ID NO: 4417702 - DNA, 25 bp, Homo sapien
tgtgactagaggagccaaatccttc

SEQ ID NO: 4417703 - DNA, 25 bp, Homo sapien
ctgtgactagaggagccaaatcctt

SEQ ID NO: 4417704 - DNA, 25 bp, Homo sapien
cctccgtaaggaggagtgaaggcca

SEQ ID NO: 4417705 - DNA, 25 bp, Homo sapien
gaaacccgagcacctctcaggcggg

SEQ ID NO: 4417706 - DNA, 25 bp, Homo sapien
tgagccccctccgtaaggaggagtg

SEQ ID NO: 4417707 - DNA, 25 bp, Homo sapien
caagagaaacccgagcacctctcag

SEQ ID NO: 4417708 - DNA, 25 bp, Homo sapien
agccctgtgctctaccaagttgaag

SEQ ID NO: 4417709 - DNA, 25 bp, Homo sapien
gaaggtgaaagatgccctttcccag

SEQ ID NO: 4417710 - DNA, 25 bp, Homo sapien
tgaagccaatggtgccggcctcagc

SEQ ID NO: 4417711 - DNA, 25 bp, Homo sapien
tcctggagaccgctgtgtgtcagcc

SEQ ID NO: 4417712 - DNA, 25 bp, Homo sapien
gagggcgttttccacctggcatcag

SEQ ID NO: 4417713 - DNA, 25 bp, Homo sapien
cccaattcctcatctagagggcgtt

SEQ ID NO: 4417714 - DNA, 25 bp, Homo sapien
cagtgactcccaaattattcatcag

SEQ ID NO: 4417715 - DNA, 25 bp, Homo sapien
catcagattcctcgaattgtacaca

SEQ ID NO: 4417716 - DNA, 25 bp, Homo sapien
tccacagtgcatgacgcggctgaag

SEQ ID NO: 4417717 - DNA, 25 bp, Homo sapien
cacagtgcatgacgcggctgaagga

SEQ ID NO: 4417718 - DNA, 25 bp, Homo sapien
cagtgcatgacgcggctgaaggata

SEQ ID NO: 4417719 - DNA, 25 bp, Homo sapien
agtgcatgacgcggctgaaggatac

SEQ ID NO: 4417720 - DNA, 25 bp, Homo sapien
ggctcccatcctcagtgcccctggg

SEQ ID NO: 4417721 - DNA, 25 bp, Homo sapien
accctgtcggcatcgccttgagtgc

SEQ ID NO: 4417722 - DNA, 25 bp, Homo sapien
ttgcacccatccgtgcccgtcttct

SEQ ID NO: 4417723 - DNA, 25 bp, Homo sapien
ctgggaaccctgtcggcatcgcctt

SEQ ID NO: 4417724 - DNA, 25 bp, Homo sapien
ttcgggagagagcaaccagatgtcc

SEQ ID NO: 4417725 - DNA, 25 bp, Homo sapien
cccgctcggtaagcggtatctgcag

SEQ ID NO: 4417726 - DNA, 25 bp, Homo sapien
gccccgctcggtaagcggtatctgc

SEQ ID NO: 4417727 - DNA, 25 bp, Homo sapien
tgagttgggtgtttcgggagagagc

SEQ ID NO: 4417728 - DNA, 25 bp, Homo sapien
gggaacccagccagatcatgaactg

SEQ ID NO: 4417729 - DNA, 25 bp, Homo sapien
agccagatcatgaactgcccaggcc

SEQ ID NO: 4417730 - DNA, 25 bp, Homo sapien
tctgtgcgcgtgaactgcctgagcg

SEQ ID NO: 4417731 - DNA, 25 bp, Homo sapien
cccggcttgatttgctgcagttttc

SEQ ID NO: 4417732 - DNA, 25 bp, Homo sapien
gtaagcaattacagatgatggccat

SEQ ID NO: 4417733 - DNA, 25 bp, Homo sapien
tactctttgtggaagactagtctcc

SEQ ID NO: 4417734 - DNA, 25 bp, Homo sapien
caaaatcctagagtttatgctgtca

SEQ ID NO: 4417735 - DNA, 25 bp, Homo sapien
taactttacccatgtagccatgaag

SEQ ID NO: 4417736 - DNA, 25 bp, Homo sapien
gcccagctaatgttttcgtatattt

SEQ ID NO: 4417737 - DNA, 25 bp, Homo sapien
cccagctaatgttttcgtatattta

SEQ ID NO: 4417738 - DNA, 25 bp, Homo sapien
cgcccagctaatgttttcgtatatt

SEQ ID NO: 4417739 - DNA, 25 bp, Homo sapien
ccagctaatgttttcgtatatttag

SEQ ID NO: 4417740 - DNA, 25 bp, Homo sapien
tctcaccggagtaagcagcaaggtt

SEQ ID NO: 4417741 - DNA, 25 bp, Homo sapien
tagctcacagtttcagtcgatcagg

SEQ ID NO: 4417742 - DNA, 25 bp, Homo sapien
gattctgtccaagttcctcctgagg

SEQ ID NO: 4417743 - DNA, 25 bp, Homo sapien
tgaaatatttgatccccagacgtcc

SEQ ID NO: 4417744 - DNA, 25 bp, Homo sapien
gggagccggtattccgcagggccag

SEQ ID NO: 4417745 - DNA, 25 bp, Homo sapien
gccggtattccgcagggccagattc

SEQ ID NO: 4417746 - DNA, 25 bp, Homo sapien
caggcagcggtgctctctgttcacc

SEQ ID NO: 4417747 - DNA, 25 bp, Homo sapien
ccacaggcagcggtgctctctgttc

SEQ ID NO: 4417748 - DNA, 25 bp, Homo sapien
tgggtctccgctcctttacagagta

SEQ ID NO: 4417749 - DNA, 25 bp, Homo sapien
tttggtcagcacgtaaatcaagctc

SEQ ID NO: 4417750 - DNA, 25 bp, Homo sapien
tgtaagggacttgttcaccacttgg

SEQ ID NO: 4417751 - DNA, 25 bp, Homo sapien
taacaagttggtgcacatgctgtgc

SEQ ID NO: 4417752 - DNA, 25 bp, Homo sapien
aaaccttgcggtgcaggcatggcag

SEQ ID NO: 4417753 - DNA, 25 bp, Homo sapien
tcctcgaaaccttgcggtgcaggca

SEQ ID NO: 4417754 - DNA, 25 bp, Homo sapien
ttgatcctcctcgaaaccttgcggt

SEQ ID NO: 4417755 - DNA, 25 bp, Homo sapien
caggcatggcagtgttgtcctcatt

SEQ ID NO: 4417756 - DNA, 25 bp, Homo sapien
acacccaccttcttagcatcttttt

SEQ ID NO: 4417757 - DNA, 25 bp, Homo sapien
tcatcacctttttccacacccacct

SEQ ID NO: 4417758 - DNA, 25 bp, Homo sapien
ccacacccaccttcttagcatcttt

SEQ ID NO: 4417759 - DNA, 25 bp, Homo sapien
ctttctcatcacctttttccacacc

SEQ ID NO: 4417760 - DNA, 25 bp, Homo sapien
ggaaagactgttagcaatctggatg

SEQ ID NO: 4417761 - DNA, 25 bp, Homo sapien
tggattattatcacctttgacacct

SEQ ID NO: 4417762 - DNA, 25 bp, Homo sapien
tgtcattgttgttccgtgccattat

SEQ ID NO: 4417763 - DNA, 25 bp, Homo sapien
tatccttgacctggctttcatccaa

SEQ ID NO: 4417764 - DNA, 25 bp, Homo sapien
tattgggatctatagtggacatttc

SEQ ID NO: 4417765 - DNA, 25 bp, Homo sapien
cagttgttcttcacaccccatgagc

SEQ ID NO: 4417766 - DNA, 25 bp, Homo sapien
gaataaatatagctctccttccatg

SEQ ID NO: 4417767 - DNA, 25 bp, Homo sapien
taaacaagtgagcaaataaggcaat

SEQ ID NO: 4417768 - DNA, 25 bp, Homo sapien
cttgaacagtgttgtgcggcgccat

SEQ ID NO: 4417769 - DNA, 25 bp, Homo sapien
tccagagaacgcaaccatttgggcc

SEQ ID NO: 4417770 - DNA, 25 bp, Homo sapien
tgaagatttacagcctcagctgcgg

SEQ ID NO: 4417771 - DNA, 25 bp, Homo sapien
tgcggcaagtcccttcctgaggtga

SEQ ID NO: 4417772 - DNA, 25 bp, Homo sapien
ccgcgcccggcttgtgtctagtctt

SEQ ID NO: 4417773 - DNA, 25 bp, Homo sapien
ttgcccgtagcagcgtcgccgacag

SEQ ID NO: 4417774 - DNA, 25 bp, Homo sapien
ggcttgtgtctagtcttgcccgtag

SEQ ID NO: 4417775 - DNA, 25 bp, Homo sapien
ctagtcttgcccgtagcagcgtcgc

SEQ ID NO: 4417776 - DNA, 25 bp, Homo sapien
tgtggaggatcttaaatttgaggac

SEQ ID NO: 4417777 - DNA, 25 bp, Homo sapien
tgaggacagagttaaggaatatatc

SEQ ID NO: 4417778 - DNA, 25 bp, Homo sapien
gccacctttcccaaagatgtttaca

SEQ ID NO: 4417779 - DNA, 25 bp, Homo sapien
gagtctgtgatctaaccattctatt

SEQ ID NO: 4417780 - DNA, 25 bp, Homo sapien
atgatcccattactggtgagcatgg

SEQ ID NO: 4417781 - DNA, 25 bp, Homo sapien
ctgaggacacccaacgctcgttgcg

SEQ ID NO: 4417782 - DNA, 25 bp, Homo sapien
tgcttcggcttcactagtagctagg

SEQ ID NO: 4417783 - DNA, 25 bp, Homo sapien
tcgttgcgtgctacagccaagaact

SEQ ID NO: 4417784 - DNA, 25 bp, Homo sapien
cagtcgggatttgaatcttgccagt

SEQ ID NO: 4417785 - DNA, 25 bp, Homo sapien
aactctgtgaagtggatactactgt

SEQ ID NO: 4417786 - DNA, 25 bp, Homo sapien
tttacacaggtacagagaggttagg

SEQ ID NO: 4417787 - DNA, 25 bp, Homo sapien
tattttacaaacacttacatggtct

SEQ ID NO: 4417788 - DNA, 25 bp, Homo sapien
tgaaactgctccgcccctgaaatct

SEQ ID NO: 4417789 - DNA, 25 bp, Homo sapien
ccgcccctgaaatcttgaatacaag

SEQ ID NO: 4417790 - DNA, 25 bp, Homo sapien
gaaatcttgaatacaagtaccccac

SEQ ID NO: 4417791 - DNA, 25 bp, Homo sapien
ttgaatacaagtaccccacctccat

SEQ ID NO: 4417792 - DNA, 25 bp, Homo sapien
tccacacttgtgtagaagcccctgc

SEQ ID NO: 4417793 - DNA, 25 bp, Homo sapien
ccagaccccgatacctccacacttg

SEQ ID NO: 4417794 - DNA, 25 bp, Homo sapien
ctgccatcctgctgaacaccctctg

SEQ ID NO: 4417795 - DNA, 25 bp, Homo sapien
caactgcaggtctccgccctccagg

SEQ ID NO: 4417796 - DNA, 25 bp, Homo sapien
gagatgagttcatgatcggtgctgt

SEQ ID NO: 4417797 - DNA, 25 bp, Homo sapien
agagatgagttcatgatcggtgctg

SEQ ID NO: 4417798 - DNA, 25 bp, Homo sapien
gtgtgcgcccggttgcccaggaaac

SEQ ID NO: 4417799 - DNA, 25 bp, Homo sapien
ggttgcccaggaaactcccacctca

SEQ ID NO: 4417800 - DNA, 25 bp, Homo sapien
tgcgtagacagcgaagcttttcctg

SEQ ID NO: 4417801 - DNA, 25 bp, Homo sapien
gcgtagacagcgaagcttttcctgt

SEQ ID NO: 4417802 - DNA, 25 bp, Homo sapien
agccgcgcaacaggtgcgcaggtgc

SEQ ID NO: 4417803 - DNA, 25 bp, Homo sapien
tggggagccgcgcaacaggtgcgca

SEQ ID NO: 4417804 - DNA, 25 bp, Homo sapien
gggagccgcgcaacaggtgcgcagg

SEQ ID NO: 4417805 - DNA, 25 bp, Homo sapien
gagccgcgcaacaggtgcgcaggtg

SEQ ID NO: 4417806 - DNA, 25 bp, Homo sapien
gcgcgggccgcgcggtagggggctg

SEQ ID NO: 4417807 - DNA, 25 bp, Homo sapien
cgcggtagggggctgcgggcgacgg

SEQ ID NO: 4417808 - DNA, 25 bp, Homo sapien
gcgggtgcggggccggagcgctctg

SEQ ID NO: 4417809 - DNA, 25 bp, Homo sapien
cggcgggtgcggggccggagcgctc

SEQ ID NO: 4417810 - DNA, 25 bp, Homo sapien
tttccactaggcgaggtgcccgctc

SEQ ID NO: 4417811 - DNA, 25 bp, Homo sapien
tggtttcgcggccgcgtctgcagcc

SEQ ID NO: 4417812 - DNA, 25 bp, Homo sapien
tacggccgattcgattcgtgctgct

SEQ ID NO: 4417813 - DNA, 25 bp, Homo sapien
tcgtgctgctccttcacaggtgtcc

SEQ ID NO: 4417814 - DNA, 25 bp, Homo sapien
gcttccagtcttctcttacccagtg

SEQ ID NO: 4417815 - DNA, 25 bp, Homo sapien
cttccagtcttctcttacccagtga

SEQ ID NO: 4417816 - DNA, 25 bp, Homo sapien
caaattttccttatcgccaggggca

SEQ ID NO: 4417817 - DNA, 25 bp, Homo sapien
tattataagacaggttggacttgga

SEQ ID NO: 4417818 - DNA, 25 bp, Homo sapien
gaagtcaggaatagcgaatttggta

SEQ ID NO: 4417819 - DNA, 25 bp, Homo sapien
gttacagtattcatcctctccagag

SEQ ID NO: 4417820 - DNA, 25 bp, Homo sapien
actcatcagagaggccaaccaggga

SEQ ID NO: 4417821 - DNA, 25 bp, Homo sapien
cagcaaaggtgtcgagtttccccaa

SEQ ID NO: 4417822 - DNA, 25 bp, Homo sapien
gagtttccccaactcatcagagagg

SEQ ID NO: 4417823 - DNA, 25 bp, Homo sapien
ctttcagcaaaggtgtcgagtttcc

SEQ ID NO: 4417824 - DNA, 25 bp, Homo sapien
aggaggtgctcctggaccttcccct

SEQ ID NO: 4417825 - DNA, 25 bp, Homo sapien
tggaccttcccctttgagtcctcca

SEQ ID NO: 4417826 - DNA, 25 bp, Homo sapien
ctccgtttgccaggaggtgctcctg

SEQ ID NO: 4417827 - DNA, 25 bp, Homo sapien
gtgctcctggaccttcccctttgag

SEQ ID NO: 4417828 - DNA, 25 bp, Homo sapien
tggccacagcaaggacgactctggt

SEQ ID NO: 4417829 - DNA, 25 bp, Homo sapien
tgggccatctcggtgattgctgtgt

SEQ ID NO: 4417830 - DNA, 25 bp, Homo sapien
catctcggtgattgctgtgtggcca

SEQ ID NO: 4417831 - DNA, 25 bp, Homo sapien
aatccagagcatccactgagacctg

SEQ ID NO: 4417832 - DNA, 25 bp, Homo sapien
cataaagcccgttcaacaaatgaag

SEQ ID NO: 4417833 - DNA, 25 bp, Homo sapien
aggcacagaggtcataaagcccgtt

SEQ ID NO: 4417834 - DNA, 25 bp, Homo sapien
gtcataaagcccgttcaacaaatga

SEQ ID NO: 4417835 - DNA, 25 bp, Homo sapien
cagaggtcataaagcccgttcaaca

SEQ ID NO: 4417836 - DNA, 25 bp, Homo sapien
caagccagacaagcctcgagggttt

SEQ ID NO: 4417837 - DNA, 25 bp, Homo sapien
gctgtggctgcaatcaaagctgtct

SEQ ID NO: 4417838 - DNA, 25 bp, Homo sapien
tgagggactgtgaccaaccagactg

SEQ ID NO: 4417839 - DNA, 25 bp, Homo sapien
tggtcttgtccgagaacaaaaagga

SEQ ID NO: 4417840 - DNA, 25 bp, Homo sapien
tctgggggagtcctctgaggctggt

SEQ ID NO: 4417841 - DNA, 25 bp, Homo sapien
agaagccagcaggaacgtgggaggg

SEQ ID NO: 4417842 - DNA, 25 bp, Homo sapien
ggagagggtggtgccaagaggagtg

SEQ ID NO: 4417843 - DNA, 25 bp, Homo sapien
cagcaggaacgtgggagggagaggg

SEQ ID NO: 4417844 - DNA, 25 bp, Homo sapien
ggtaggatcggtcaccaagggtcat

SEQ ID NO: 4417845 - DNA, 25 bp, Homo sapien
tactcggggcactgtgagtcaggga

SEQ ID NO: 4417846 - DNA, 25 bp, Homo sapien
gtgtggacggatgctgaacagaaag

SEQ ID NO: 4417847 - DNA, 25 bp, Homo sapien
cagaaaggggtaggatcggtcacca

SEQ ID NO: 4417848 - DNA, 25 bp, Homo sapien
taatacgccgggtctatggaagagc

SEQ ID NO: 4417849 - DNA, 25 bp, Homo sapien
tccctacctgagacacagcggagtg

SEQ ID NO: 4417850 - DNA, 25 bp, Homo sapien
ggctctaggctaggagggaatcaat

SEQ ID NO: 4417851 - DNA, 25 bp, Homo sapien
gcagggaggtgcgtttttcagtata

SEQ ID NO: 4417852 - DNA, 25 bp, Homo sapien
gagacttcggaatcccaagccaagc

SEQ ID NO: 4417853 - DNA, 25 bp, Homo sapien
agccatcatgggcaacgccggcggg

SEQ ID NO: 4417854 - DNA, 25 bp, Homo sapien
catccatgattgagacttcggaatc

SEQ ID NO: 4417855 - DNA, 25 bp, Homo sapien
tgagcctgcgctctgcatccatgat

SEQ ID NO: 4417856 - DNA, 25 bp, Homo sapien
tcaaagtgggtcacaaaggatgtta

SEQ ID NO: 4417857 - DNA, 25 bp, Homo sapien
gcggctgcttgacaggatatttggc

SEQ ID NO: 4417858 - DNA, 25 bp, Homo sapien
accacactcacgagcggctgcttga

SEQ ID NO: 4417859 - DNA, 25 bp, Homo sapien
gccatgtcccattcaaagtgggtca

SEQ ID NO: 4417860 - DNA, 25 bp, Homo sapien
tagtacacagagatcctaagtcccc

SEQ ID NO: 4417861 - DNA, 25 bp, Homo sapien
tactattttgcactatacagctctg

SEQ ID NO: 4417862 - DNA, 25 bp, Homo sapien
gctctgtgactacactgtactgtcc

SEQ ID NO: 4417863 - DNA, 25 bp, Homo sapien
tctgcacgatagaagtatactgtac

SEQ ID NO: 4417864 - DNA, 25 bp, Homo sapien
ttttgaaatggccacaacagctcat

SEQ ID NO: 4417865 - DNA, 25 bp, Homo sapien
ctgagcattgaaggagttggctgaa

SEQ ID NO: 4417866 - DNA, 25 bp, Homo sapien
gaactttttgaaatggccacaacag

SEQ ID NO: 4417867 - DNA, 25 bp, Homo sapien
gagcattgaaggagttggctgaact

SEQ ID NO: 4417868 - DNA, 25 bp, Homo sapien
tcttcagagtgttgtaggcggccgt

SEQ ID NO: 4417869 - DNA, 25 bp, Homo sapien
ggtccatctcgatctgcgccagttg

SEQ ID NO: 4417870 - DNA, 25 bp, Homo sapien
gttctccaggtttgtcttcagagtg

SEQ ID NO: 4417871 - DNA, 25 bp, Homo sapien
ggccgttcgggacttcaggtccatc

SEQ ID NO: 4417872 - DNA, 25 bp, Homo sapien
tgctcacaatatcactcagtgtccg

SEQ ID NO: 4417873 - DNA, 25 bp, Homo sapien
gacgatgaccagaagtgtgacgaga

SEQ ID NO: 4417874 - DNA, 25 bp, Homo sapien
tcagaatccagcacgaagtcctctt

SEQ ID NO: 4417875 - DNA, 25 bp, Homo sapien
tcagtgtccgggtgaagaggttccc

SEQ ID NO: 4417876 - DNA, 25 bp, Homo sapien
tgtcctgagtgcctaggaagctgca

SEQ ID NO: 4417877 - DNA, 25 bp, Homo sapien
gtgtcctgagtgcctaggaagctgc

SEQ ID NO: 4417878 - DNA, 25 bp, Homo sapien
ccatgtctgagagagattcgtaggt

SEQ ID NO: 4417879 - DNA, 25 bp, Homo sapien
gagggaccaccatgtctgagagaga

SEQ ID NO: 4417880 - DNA, 25 bp, Homo sapien
gagagattcgtaggttttttgccat

SEQ ID NO: 4417881 - DNA, 25 bp, Homo sapien
gagagagattcgtaggttttttgcc

SEQ ID NO: 4417882 - DNA, 25 bp, Homo sapien
cctgtcaaggatccccggctcttgg

SEQ ID NO: 4417883 - DNA, 25 bp, Homo sapien
tagatcccgattgccatctcgtagc

SEQ ID NO: 4417884 - DNA, 25 bp, Homo sapien
taacctcgggctgtgattgtcctgt

SEQ ID NO: 4417885 - DNA, 25 bp, Homo sapien
ctgttccttgcacccttcaatttag

SEQ ID NO: 4417886 - DNA, 25 bp, Homo sapien
gagcccatgcccataggggctgccg

SEQ ID NO: 4417887 - DNA, 25 bp, Homo sapien
catctgtgcaggctttcaggtggcc

SEQ ID NO: 4417888 - DNA, 25 bp, Homo sapien
cctgtgacaatgaagggcctgaggc

SEQ ID NO: 4417889 - DNA, 25 bp, Homo sapien
ggctgccgccagactccaggtattt

SEQ ID NO: 4417890 - DNA, 25 bp, Homo sapien
ggctcagaggccccgggcctggtgg

SEQ ID NO: 4417891 - DNA, 25 bp, Homo sapien
agtggggctcagaggccccgggcct

SEQ ID NO: 4417892 - DNA, 25 bp, Homo sapien
ttgtgcgggagtggggctcagaggc

SEQ ID NO: 4417893 - DNA, 25 bp, Homo sapien
aggccccgggcctggtggcctgcac

SEQ ID NO: 4417894 - DNA, 25 bp, Homo sapien
tgttggagagaagcatctgttggct

SEQ ID NO: 4417895 - DNA, 25 bp, Homo sapien
tggagagaagcatctgttggctgga

SEQ ID NO: 4417896 - DNA, 25 bp, Homo sapien
agagaagcatctgttggctggactc

SEQ ID NO: 4417897 - DNA, 25 bp, Homo sapien
ctgttggagagaagcatctgttggc

SEQ ID NO: 4417898 - DNA, 25 bp, Homo sapien
ttttcgaaacagagtcacagtgaaa

SEQ ID NO: 4417899 - DNA, 25 bp, Homo sapien
gagtcacagtgaaaaggcccccttc

SEQ ID NO: 4417900 - DNA, 25 bp, Homo sapien
cagagtcacagtgaaaaggccccct

SEQ ID NO: 4417901 - DNA, 25 bp, Homo sapien
ttcgaaacagagtcacagtgaaaag

SEQ ID NO: 4417902 - DNA, 25 bp, Homo sapien
ggccttggttttgaaatcttcaatc

SEQ ID NO: 4417903 - DNA, 25 bp, Homo sapien
ttggccttggttttgaaatcttcaa

SEQ ID NO: 4417904 - DNA, 25 bp, Homo sapien
tttggccttggttttgaaatcttca

SEQ ID NO: 4417905 - DNA, 25 bp, Homo sapien
ccttggttttgaaatcttcaatcac

SEQ ID NO: 4417906 - DNA, 25 bp, Homo sapien
atactgttgcttcttatcagacagc

SEQ ID NO: 4417907 - DNA, 25 bp, Homo sapien
tcttatcagacagcaatctggccat

SEQ ID NO: 4417908 - DNA, 25 bp, Homo sapien
tactgttgcttcttatcagacagca

SEQ ID NO: 4417909 - DNA, 25 bp, Homo sapien
tgcttcttatcagacagcaatctgg

SEQ ID NO: 4417910 - DNA, 25 bp, Homo sapien
gagtatggaaggtgcccacttcccg

SEQ ID NO: 4417911 - DNA, 25 bp, Homo sapien
cctccgtgaagggtttctgagtggc

SEQ ID NO: 4417912 - DNA, 25 bp, Homo sapien
tgctccctggtgagctacgctgtcc

SEQ ID NO: 4417913 - DNA, 25 bp, Homo sapien
ggctgtggtcggaagtctccagata

SEQ ID NO: 4417914 - DNA, 25 bp, Homo sapien
ggactcgcgtgctggctagactaga

SEQ ID NO: 4417915 - DNA, 25 bp, Homo sapien
gtggaaacggctctctgcgctctgt

SEQ ID NO: 4417916 - DNA, 25 bp, Homo sapien
ggcatgcagttaggacactcaccct

SEQ ID NO: 4417917 - DNA, 25 bp, Homo sapien
taaatcattctcatcgcctgaaagg

SEQ ID NO: 4417918 - DNA, 25 bp, Homo sapien
aggcctatcagggttacctagcggg

SEQ ID NO: 4417919 - DNA, 25 bp, Homo sapien
tgccccgcagcaggcctatcagggt

SEQ ID NO: 4417920 - DNA, 25 bp, Homo sapien
gcagcaggcctatcagggttaccta

SEQ ID NO: 4417921 - DNA, 25 bp, Homo sapien
ctctctctgtcggtctgccccgcag

SEQ ID NO: 4417922 - DNA, 25 bp, Homo sapien
aaggcgcctgagctggcgaggagat

SEQ ID NO: 4417923 - DNA, 25 bp, Homo sapien
cctgagctggcgaggagatgtgagc

SEQ ID NO: 4417924 - DNA, 25 bp, Homo sapien
tttcccagaaggcgcctgagctggc

SEQ ID NO: 4417925 - DNA, 25 bp, Homo sapien
tgagctggcgaggagatgtgagcca

SEQ ID NO: 4417926 - DNA, 25 bp, Homo sapien
gattccggctcctcaaatttaagac

SEQ ID NO: 4417927 - DNA, 25 bp, Homo sapien
ccctgcagattaggaggaaggcatg

SEQ ID NO: 4417928 - DNA, 25 bp, Homo sapien
gtcttggagcaagagccccgagctc

SEQ ID NO: 4417929 - DNA, 25 bp, Homo sapien
cttcctgggagctcaagagtcttgg

SEQ ID NO: 4417930 - DNA, 25 bp, Homo sapien
agcagagagtcggtcagaccagccc

SEQ ID NO: 4417931 - DNA, 25 bp, Homo sapien
ttttgacagagcacgccctgagctg

SEQ ID NO: 4417932 - DNA, 25 bp, Homo sapien
gaaaggacttgggttttgacagagc

SEQ ID NO: 4417933 - DNA, 25 bp, Homo sapien
tcaggacctcgaggtccagggcacc

SEQ ID NO: 4417934 - DNA, 25 bp, Homo sapien
aagttcaccttgagccagcgcagca

SEQ ID NO: 4417935 - DNA, 25 bp, Homo sapien
ctctcagggccttgatgtggatcca

SEQ ID NO: 4417936 - DNA, 25 bp, Homo sapien
ggatccaggcaatgaaggcttcact

SEQ ID NO: 4417937 - DNA, 25 bp, Homo sapien
tgagcacggactccacaaacactct

SEQ ID NO: 4417938 - DNA, 25 bp, Homo sapien
caggtgacacttgccccaagtgtag

SEQ ID NO: 4417939 - DNA, 25 bp, Homo sapien
tcggaattgagcgtgttgccaacag

SEQ ID NO: 4417940 - DNA, 25 bp, Homo sapien
ggccctgcgggcttcacgagggtgg

SEQ ID NO: 4417941 - DNA, 25 bp, Homo sapien
gagggtgtacttgactcggaattga

SEQ ID NO: 4417942 - DNA, 25 bp, Homo sapien
ttctatagccggagtttctcttgtt

SEQ ID NO: 4417943 - DNA, 25 bp, Homo sapien
tttctatagccggagtttctcttgt

SEQ ID NO: 4417944 - DNA, 25 bp, Homo sapien
ttttctatagccggagtttctcttg

SEQ ID NO: 4417945 - DNA, 25 bp, Homo sapien
tagcggctacttcatccagatgtcg

SEQ ID NO: 4417946 - DNA, 25 bp, Homo sapien
ggatgacttcttatgcggctgcagg

SEQ ID NO: 4417947 - DNA, 25 bp, Homo sapien
tgtcggaagacagagtttagaacct

SEQ ID NO: 4417948 - DNA, 25 bp, Homo sapien
tcttaaacgcttggtggatgacttc

SEQ ID NO: 4417949 - DNA, 25 bp, Homo sapien
tagaaatactgctgtttctggatac

SEQ ID NO: 4417950 - DNA, 25 bp, Homo sapien
tgtagaaatactgctgtttctggat

SEQ ID NO: 4417951 - DNA, 25 bp, Homo sapien
gtagaaatactgctgtttctggata

SEQ ID NO: 4417952 - DNA, 25 bp, Homo sapien
tctgcgtagctgtggtccacccctc

SEQ ID NO: 4417953 - DNA, 25 bp, Homo sapien
atgacatgtagattttcataacagg

SEQ ID NO: 4417954 - DNA, 25 bp, Homo sapien
gcgtagctgtggtccacccctccaa

SEQ ID NO: 4417955 - DNA, 25 bp, Homo sapien
taatgtgtatgacatgtagattttc

SEQ ID NO: 4417956 - DNA, 25 bp, Homo sapien
aaatagtcttggttattgagttgca

SEQ ID NO: 4417957 - DNA, 25 bp, Homo sapien
ggtcaatatggaagtagacataagg

SEQ ID NO: 4417958 - DNA, 25 bp, Homo sapien
ttgcagtcccgggatctccacagat

SEQ ID NO: 4417959 - DNA, 25 bp, Homo sapien
gtcaagaagactaaggtcaatatgg

SEQ ID NO: 4417960 - DNA, 25 bp, Homo sapien
gaaaaagatcttagttctgtaagac

SEQ ID NO: 4417961 - DNA, 25 bp, Homo sapien
gacatttgaaccattctctggctaa

SEQ ID NO: 4417962 - DNA, 25 bp, Homo sapien
tacaactgtcactaacttttgtgag

SEQ ID NO: 4417963 - DNA, 25 bp, Homo sapien
taatctgcacgaacatgagacagag

SEQ ID NO: 4417964 - DNA, 25 bp, Homo sapien
ttttacatggaaaccgggctcagtg

SEQ ID NO: 4417965 - DNA, 25 bp, Homo sapien
tgaacctcaaaatagccgttaagac

SEQ ID NO: 4417966 - DNA, 25 bp, Homo sapien
ccgttaagacatgaaatacagcagc

SEQ ID NO: 4417967 - DNA, 25 bp, Homo sapien
tctagctggttatacagttcaaggc

SEQ ID NO: 4417968 - DNA, 25 bp, Homo sapien
tttccagcagtgaagggacattctc

SEQ ID NO: 4417969 - DNA, 25 bp, Homo sapien
tcttgggagccagtggatttttcca

SEQ ID NO: 4417970 - DNA, 25 bp, Homo sapien
tcagatgactctaccagtggccttt

SEQ ID NO: 4417971 - DNA, 25 bp, Homo sapien
ttgtgagagccacaacagaggcttc

SEQ ID NO: 4417972 - DNA, 25 bp, Homo sapien
cttcccgtggaggatgacattgacc

SEQ ID NO: 4417973 - DNA, 25 bp, Homo sapien
ggaggatgacattgacctcagtgat

SEQ ID NO: 4417974 - DNA, 25 bp, Homo sapien
acctcagtgatgtggagcttgatga

SEQ ID NO: 4417975 - DNA, 25 bp, Homo sapien
gacctcagtgatgtggagcttgatg

SEQ ID NO: 4417976 - DNA, 25 bp, Homo sapien
ccttctgcagatctaacagtggctt

SEQ ID NO: 4417977 - DNA, 25 bp, Homo sapien
caggagtagctccagagagtcgctc

SEQ ID NO: 4417978 - DNA, 25 bp, Homo sapien
taatcataggtacgaaggtcagggt

SEQ ID NO: 4417979 - DNA, 25 bp, Homo sapien
acagtggctttctgtcgtctcccag

SEQ ID NO: 4417980 - DNA, 25 bp, Homo sapien
tcaaaaggacacgttcaagtggctt

SEQ ID NO: 4417981 - DNA, 25 bp, Homo sapien
aaaggacacgttcaagtggcttcca

SEQ ID NO: 4417982 - DNA, 25 bp, Homo sapien
agtgttaaaatggtgagtgatgtga

SEQ ID NO: 4417983 - DNA, 25 bp, Homo sapien
gacacgttcaagtggcttccagtgt

SEQ ID NO: 4417984 - DNA, 25 bp, Homo sapien
tctcttgagcctgtgcatctctgca

SEQ ID NO: 4417985 - DNA, 25 bp, Homo sapien
agtttaagtgctgcatggcatttga

SEQ ID NO: 4417986 - DNA, 25 bp, Homo sapien
gcatttgatactcttgacagccaag

SEQ ID NO: 4417987 - DNA, 25 bp, Homo sapien
catttcagtagtaaggttgctttcc

SEQ ID NO: 4417988 - DNA, 25 bp, Homo sapien
ttttgggcgtggctccacggcacct

SEQ ID NO: 4417989 - DNA, 25 bp, Homo sapien
ggagctctcttttgggcgtggctcc

SEQ ID NO: 4417990 - DNA, 25 bp, Homo sapien
tctcttttgggcgtggctccacggc

SEQ ID NO: 4417991 - DNA, 25 bp, Homo sapien
atcgttgagagagagccttgggacg

SEQ ID NO: 4417992 - DNA, 25 bp, Homo sapien
ttctgatatgctccctctgtacagg

SEQ ID NO: 4417993 - DNA, 25 bp, Homo sapien
gatgtttatgcacatacgcaccccg

SEQ ID NO: 4417994 - DNA, 25 bp, Homo sapien
gcagtcttagaaagctcgcaggcag

SEQ ID NO: 4417995 - DNA, 25 bp, Homo sapien
gcaggcagcccatgttctagatcaa

SEQ ID NO: 4417996 - DNA, 25 bp, Homo sapien
gatatttcagaaaggcgagtctcct

SEQ ID NO: 4417997 - DNA, 25 bp, Homo sapien
gcgagtctcctgtggattatgacgg

SEQ ID NO: 4417998 - DNA, 25 bp, Homo sapien
tttcctacaatcaagatatttcaga

SEQ ID NO: 4417999 - DNA, 25 bp, Homo sapien
ttatgacggtgggcggacaagatcc

SEQ ID NO: 4418000 - DNA, 25 bp, Homo sapien
gggctgccgcagcttcagaagtaaa

SEQ ID NO: 4418001 - DNA, 25 bp, Homo sapien
gacagacgacagctttgataagaat

SEQ ID NO: 4418002 - DNA, 25 bp, Homo sapien
gcagaagtgatagttcaagtaagaa

SEQ ID NO: 4418003 - DNA, 25 bp, Homo sapien
tgtgattgagctgacagacgacagc

SEQ ID NO: 4418004 - DNA, 25 bp, Homo sapien
gataagaatgttctggacagtgaag

SEQ ID NO: 4418005 - DNA, 25 bp, Homo sapien
ggacggagcggaggatacagttctg

SEQ ID NO: 4418006 - DNA, 25 bp, Homo sapien
ctcgggggacggagcggaggataca

SEQ ID NO: 4418007 - DNA, 25 bp, Homo sapien
acggagcggaggatacagttctgga

SEQ ID NO: 4418008 - DNA, 25 bp, Homo sapien
gacggagcggaggatacagttctgg

SEQ ID NO: 4418009 - DNA, 25 bp, Homo sapien
gatactgggattgagtttaggcccc

SEQ ID NO: 4418010 - DNA, 25 bp, Homo sapien
tatgtagaagtagcatttcaggaca

SEQ ID NO: 4418011 - DNA, 25 bp, Homo sapien
ccagttgcagaacccctgggtagac

SEQ ID NO: 4418012 - DNA, 25 bp, Homo sapien
gaagagaggatgaactctgacagtc

SEQ ID NO: 4418013 - DNA, 25 bp, Homo sapien
gcctggcgtggtcactcatacctgt

SEQ ID NO: 4418014 - DNA, 25 bp, Homo sapien
aagacaggaatagatagaaatttcg

SEQ ID NO: 4418015 - DNA, 25 bp, Homo sapien
taaaagttagccagggatgcacctg

SEQ ID NO: 4418016 - DNA, 25 bp, Homo sapien
tgtaagtacattttggcctggcgtg

SEQ ID NO: 4418017 - DNA, 25 bp, Homo sapien
ttctgcagcagtgaaaagattaatg

SEQ ID NO: 4418018 - DNA, 25 bp, Homo sapien
ggactgtcagtgcttatgttcttga

SEQ ID NO: 4418019 - DNA, 25 bp, Homo sapien
tagctgcggctacagatgcacccta

SEQ ID NO: 4418020 - DNA, 25 bp, Homo sapien
tacttggctttgttaaacgtgtcaa

SEQ ID NO: 4418021 - DNA, 25 bp, Homo sapien
gagcggagtccgctgcgctcccaca

SEQ ID NO: 4418022 - DNA, 25 bp, Homo sapien
gcggagtccgctgcgctcccacaag

SEQ ID NO: 4418023 - DNA, 25 bp, Homo sapien
cagagcggagtccgctgcgctccca

SEQ ID NO: 4418024 - DNA, 25 bp, Homo sapien
gagtccgctgcgctcccacaagggc

SEQ ID NO: 4418025 - DNA, 25 bp, Homo sapien
tctggggtcgccctcttctgccctg

SEQ ID NO: 4418026 - DNA, 25 bp, Homo sapien
aggagatgcctcatctggggtcgcc

SEQ ID NO: 4418027 - DNA, 25 bp, Homo sapien
gctgcccctcccctcaggagatgcc

SEQ ID NO: 4418028 - DNA, 25 bp, Homo sapien
gatgcctcatctggggtcgccctct

SEQ ID NO: 4418029 - DNA, 25 bp, Homo sapien
tccaaacgggaaaggatgattaaca

SEQ ID NO: 4418030 - DNA, 25 bp, Homo sapien
gctgatcgggaaattccaaacggga

SEQ ID NO: 4418031 - DNA, 25 bp, Homo sapien
cctgctgatcgggaaattccaaacg

SEQ ID NO: 4418032 - DNA, 25 bp, Homo sapien
gctcagagacacagcagcaaagtgg

SEQ ID NO: 4418033 - DNA, 25 bp, Homo sapien
tccaggcctgacgttgccagtgtct

SEQ ID NO: 4418034 - DNA, 25 bp, Homo sapien
caggccatcgtaggacctgagtgtg

SEQ ID NO: 4418035 - DNA, 25 bp, Homo sapien
acctgagtgtgccttaagggagtgt

SEQ ID NO: 4418036 - DNA, 25 bp, Homo sapien
ttcaggaagattcagcttgtatttc

SEQ ID NO: 4418037 - DNA, 25 bp, Homo sapien
ggatataatccaccctccttctcgt

SEQ ID NO: 4418038 - DNA, 25 bp, Homo sapien
cactctatggcgtctctaaggatat

SEQ ID NO: 4418039 - DNA, 25 bp, Homo sapien
cacagtttatgcttgttacagagcc

SEQ ID NO: 4418040 - DNA, 25 bp, Homo sapien
ggctgtctatgacgagggcatccca

SEQ ID NO: 4418041 - DNA, 25 bp, Homo sapien
tataagaactatcaagccatctgcc

SEQ ID NO: 4418042 - DNA, 25 bp, Homo sapien
caggaataacatcaagtgaggttca

SEQ ID NO: 4418043 - DNA, 25 bp, Homo sapien
ttttggctttcagtgtccatgccca

SEQ ID NO: 4418044 - DNA, 25 bp, Homo sapien
tcagagagtagatgagtctttccag

SEQ ID NO: 4418045 - DNA, 25 bp, Homo sapien
agtggtgcctggtgtcaacagctgc

SEQ ID NO: 4418046 - DNA, 25 bp, Homo sapien
ttgaaatctggacagccgacagcta

SEQ ID NO: 4418047 - DNA, 25 bp, Homo sapien
tggtgcctggtgtcaacagctgcca

SEQ ID NO: 4418048 - DNA, 25 bp, Homo sapien
agaagtggtgcctggtgtcaacagc

SEQ ID NO: 4418049 - DNA, 25 bp, Homo sapien
taagctttactaggtaatgccagag

SEQ ID NO: 4418050 - DNA, 25 bp, Homo sapien
tcttcgtgcacgtatttggagtggc

SEQ ID NO: 4418051 - DNA, 25 bp, Homo sapien
aactgctaggtactaagatacgggc

SEQ ID NO: 4418052 - DNA, 25 bp, Homo sapien
tctctaggctccataccgaggagtg

SEQ ID NO: 4418053 - DNA, 25 bp, Homo sapien
gatcgttgtctataccatggaggct

SEQ ID NO: 4418054 - DNA, 25 bp, Homo sapien
taaacttccaaacgggctgcacagg

SEQ ID NO: 4418055 - DNA, 25 bp, Homo sapien
gaggctttccgttgacagagttcca

SEQ ID NO: 4418056 - DNA, 25 bp, Homo sapien
gaagaattcatgaaacggccctgct

SEQ ID NO: 4418057 - DNA, 25 bp, Homo sapien
tgaacttcaacatggcggtagcagt

SEQ ID NO: 4418058 - DNA, 25 bp, Homo sapien
ggtagcagttcacgctgaccttctc

SEQ ID NO: 4418059 - DNA, 25 bp, Homo sapien
caacatggcggtagcagttcacgct

SEQ ID NO: 4418060 - DNA, 25 bp, Homo sapien
caggcagcttctcgcagtgaagaga

SEQ ID NO: 4418061 - DNA, 25 bp, Homo sapien
gctaaacccttgagttggacaacag

SEQ ID NO: 4418062 - DNA, 25 bp, Homo sapien
gactgagatacagaggactcctccc

SEQ ID NO: 4418063 - DNA, 25 bp, Homo sapien
gatggtttcccagcagcactagtgt

SEQ ID NO: 4418064 - DNA, 25 bp, Homo sapien
tggacaacagttggaccagagtcac

SEQ ID NO: 4418065 - DNA, 25 bp, Homo sapien
cagcaggcaatgagtggatgagaaa

SEQ ID NO: 4418066 - DNA, 25 bp, Homo sapien
catctgttgaatggtcagagtgcat

SEQ ID NO: 4418067 - DNA, 25 bp, Homo sapien
tctccgtccaccagaagagtgacat

SEQ ID NO: 4418068 - DNA, 25 bp, Homo sapien
caaatagacgggctctcctcgtgtc

SEQ ID NO: 4418069 - DNA, 25 bp, Homo sapien
ctccccagcctcttagagcacgacc

SEQ ID NO: 4418070 - DNA, 25 bp, Homo sapien
ctgggtcagctcacctccccagcct

SEQ ID NO: 4418071 - DNA, 25 bp, Homo sapien
tgagcgtgtgcctgggtcagctcac

SEQ ID NO: 4418072 - DNA, 25 bp, Homo sapien
cccagcctcttagagcacgacccat

SEQ ID NO: 4418073 - DNA, 25 bp, Homo sapien
gaggaagacggagtagaaacagcaa

SEQ ID NO: 4418074 - DNA, 25 bp, Homo sapien
tgaggaagacggagtagaaacagca

SEQ ID NO: 4418075 - DNA, 25 bp, Homo sapien
ctgaggaagacggagtagaaacagc

SEQ ID NO: 4418076 - DNA, 25 bp, Homo sapien
aggaagacggagtagaaacagcaac

SEQ ID NO: 4418077 - DNA, 25 bp, Homo sapien
ctcaggttatcctctgaaggctccc

SEQ ID NO: 4418078 - DNA, 25 bp, Homo sapien
gtaagacatcctggggctcaggtta

SEQ ID NO: 4418079 - DNA, 25 bp, Homo sapien
cttcaggaggtaagacatcctgggg

SEQ ID NO: 4418080 - DNA, 25 bp, Homo sapien
ggaaggagaacacaaatatggtata

SEQ ID NO: 4418081 - DNA, 25 bp, Homo sapien
tgggcgcattcagctgccccagagg

SEQ ID NO: 4418082 - DNA, 25 bp, Homo sapien
gtagaaagatgtcagaggctttggg

SEQ ID NO: 4418083 - DNA, 25 bp, Homo sapien
tcagaggctttgggcgcattcagct

SEQ ID NO: 4418084 - DNA, 25 bp, Homo sapien
cagaggctgcgggtaggacccctct

SEQ ID NO: 4418085 - DNA, 25 bp, Homo sapien
ttgttgcatagaaacttgagccagc

SEQ ID NO: 4418086 - DNA, 25 bp, Homo sapien
gttgcatagaaacttgagccagcag

SEQ ID NO: 4418087 - DNA, 25 bp, Homo sapien
cattgttgcatagaaacttgagcca

SEQ ID NO: 4418088 - DNA, 25 bp, Homo sapien
ttgcatagaaacttgagccagcagc

SEQ ID NO: 4418089 - DNA, 25 bp, Homo sapien
tggcaggcggacaaatctagaatct

SEQ ID NO: 4418090 - DNA, 25 bp, Homo sapien
agctgaaagggccacacggtttgga

SEQ ID NO: 4418091 - DNA, 25 bp, Homo sapien
aatacactattgaccccaggctgag

SEQ ID NO: 4418092 - DNA, 25 bp, Homo sapien
gtttgcctgtgaaagatacgctcca

SEQ ID NO: 4418093 - DNA, 25 bp, Homo sapien
cgacctggcttgaagcggcaggcat

SEQ ID NO: 4418094 - DNA, 25 bp, Homo sapien
tcaccgaggggttgcgacctggctt

SEQ ID NO: 4418095 - DNA, 25 bp, Homo sapien
gggttgcgacctggcttgaagcggc

SEQ ID NO: 4418096 - DNA, 25 bp, Homo sapien
ggcttgaagcggcaggcattctctc

SEQ ID NO: 4418097 - DNA, 25 bp, Homo sapien
gaattccagcctgacgtcaggagct

SEQ ID NO: 4418098 - DNA, 25 bp, Homo sapien
gtgaaattctgcaaggcacgcgcgg

SEQ ID NO: 4418099 - DNA, 25 bp, Homo sapien
aggaattccagcctgacgtcaggag

SEQ ID NO: 4418100 - DNA, 25 bp, Homo sapien
tcttctggtgaaattctgcaaggca

SEQ ID NO: 4418101 - DNA, 25 bp, Homo sapien
gggtctcctcgtgggcggctggcac

SEQ ID NO: 4418102 - DNA, 25 bp, Homo sapien
agctggcggacccacgccgtccgcg

SEQ ID NO: 4418103 - DNA, 25 bp, Homo sapien
aacttgggctggctttgcccgagcc

SEQ ID NO: 4418104 - DNA, 25 bp, Homo sapien
ctcgaggtgtgcagagagcgaactt

SEQ ID NO: 4418105 - DNA, 25 bp, Homo sapien
ggtgccacccgtgcgctgatctcgg

SEQ ID NO: 4418106 - DNA, 25 bp, Homo sapien
cgcgggggaggcatgcacccggcgg

SEQ ID NO: 4418107 - DNA, 25 bp, Homo sapien
cggcgggtgccacccgtgcgctgat

SEQ ID NO: 4418108 - DNA, 25 bp, Homo sapien
cggggaagggcggtcacagcgggca

SEQ ID NO: 4418109 - DNA, 25 bp, Homo sapien
tgtcaaagtagaactcgcgcttgcc

SEQ ID NO: 4418110 - DNA, 25 bp, Homo sapien
cacacaagaagctgatggccgcgtt

SEQ ID NO: 4418111 - DNA, 25 bp, Homo sapien
tcacttgcaactctggagccgggtc

SEQ ID NO: 4418112 - DNA, 25 bp, Homo sapien
ccagggcagagaagacgaagatacc

SEQ ID NO: 4418113 - DNA, 25 bp, Homo sapien
caggacagcccttctgtgctgtcga

SEQ ID NO: 4418114 - DNA, 25 bp, Homo sapien
tagaggagtcttacccagccttggc

SEQ ID NO: 4418115 - DNA, 25 bp, Homo sapien
caggaggctttattgagggagatac

SEQ ID NO: 4418116 - DNA, 25 bp, Homo sapien
gctgtcgatgacatgcctgccacat

SEQ ID NO: 4418117 - DNA, 25 bp, Homo sapien
aaagggcccggtgcacgtgataact

SEQ ID NO: 4418118 - DNA, 25 bp, Homo sapien
cttggcgccgaacctgactatgagc

SEQ ID NO: 4418119 - DNA, 25 bp, Homo sapien
cgtgataactaaatgctgcaggctg

SEQ ID NO: 4418120 - DNA, 25 bp, Homo sapien
aatgtggtaaggctccttggcgccg

SEQ ID NO: 4418121 - DNA, 25 bp, Homo sapien
tcagaggagattcagtgagacacca

SEQ ID NO: 4418122 - DNA, 25 bp, Homo sapien
tgggcttcgaacccagatctgtttg

SEQ ID NO: 4418123 - DNA, 25 bp, Homo sapien
gatctgtttgatctgttccctcggg

SEQ ID NO: 4418124 - DNA, 25 bp, Homo sapien
ctctcagaggagattcagtgagaca

SEQ ID NO: 4418125 - DNA, 25 bp, Homo sapien
gactaaggacagtgtgacaatgccc

SEQ ID NO: 4418126 - DNA, 25 bp, Homo sapien
taaggcttccgaatcctcgaaggtc

SEQ ID NO: 4418127 - DNA, 25 bp, Homo sapien
cactgactgaaagccacacaagagt

SEQ ID NO: 4418128 - DNA, 25 bp, Homo sapien
tatagggaaacctacgcccagagga

SEQ ID NO: 4418129 - DNA, 25 bp, Homo sapien
acctaccgcctctgggactggatct

SEQ ID NO: 4418130 - DNA, 25 bp, Homo sapien
agttccagaactcgtgccccagaga

SEQ ID NO: 4418131 - DNA, 25 bp, Homo sapien
ccaatgcatggctttgtagccgtaa

SEQ ID NO: 4418132 - DNA, 25 bp, Homo sapien
ggtcactcctgcataacacaacatg

SEQ ID NO: 4418133 - DNA, 25 bp, Homo sapien
ctcttgctgttcaaagtggggtcca

SEQ ID NO: 4418134 - DNA, 25 bp, Homo sapien
attttaacaaggtctctggatggct

SEQ ID NO: 4418135 - DNA, 25 bp, Homo sapien
gctgttcaaagtggggtccatgccc

SEQ ID NO: 4418136 - DNA, 25 bp, Homo sapien
ctacattttaacaaggtctctggat

SEQ ID NO: 4418137 - DNA, 25 bp, Homo sapien
ttcatggactgtaccaaaacaggta

SEQ ID NO: 4418138 - DNA, 25 bp, Homo sapien
tcttaattcatggactgtaccaaaa

SEQ ID NO: 4418139 - DNA, 25 bp, Homo sapien
tttttcagccatgtaaatacataga

SEQ ID NO: 4418140 - DNA, 25 bp, Homo sapien
aaacaggtagcagatcagattggcc

SEQ ID NO: 4418141 - DNA, 25 bp, Homo sapien
taaaatcatgattacggcggccctg

SEQ ID NO: 4418142 - DNA, 25 bp, Homo sapien
aagtcggagcaatcaacgtttctgg

SEQ ID NO: 4418143 - DNA, 25 bp, Homo sapien
tctttagccgcgtgaccacaggcaa

SEQ ID NO: 4418144 - DNA, 25 bp, Homo sapien
acaggcaatttggactcacgggacc

SEQ ID NO: 4418145 - DNA, 25 bp, Homo sapien
tctccgctcagagctacacacaaca

SEQ ID NO: 4418146 - DNA, 25 bp, Homo sapien
cagctctccgctcagagctacacac

SEQ ID NO: 4418147 - DNA, 25 bp, Homo sapien
cagagctacacacaacacgcacttg

SEQ ID NO: 4418148 - DNA, 25 bp, Homo sapien
cgctcagagctacacacaacacgca

SEQ ID NO: 4418149 - DNA, 25 bp, Homo sapien
acatttgtctctgggactggaggcc

SEQ ID NO: 4418150 - DNA, 25 bp, Homo sapien
agcagacatttgtctctgggactgg

SEQ ID NO: 4418151 - DNA, 25 bp, Homo sapien
tctggccgtattctcagagggggct

SEQ ID NO: 4418152 - DNA, 25 bp, Homo sapien
ttggggatcccacttcacctcgagg

SEQ ID NO: 4418153 - DNA, 25 bp, Homo sapien
cctccagaatgcctggcgctgtccc

SEQ ID NO: 4418154 - DNA, 25 bp, Homo sapien
tgtgtgtctgtcctcccgtcagcca

SEQ ID NO: 4418155 - DNA, 25 bp, Homo sapien
cccctccagaatgcctggcgctgtc

SEQ ID NO: 4418156 - DNA, 25 bp, Homo sapien
cccgtcagccaccagaacagtgtgg

SEQ ID NO: 4418157 - DNA, 25 bp, Homo sapien
cagtgagtgtggatgccaactccca

SEQ ID NO: 4418158 - DNA, 25 bp, Homo sapien
cttctcccatgaccatcggtgctac

SEQ ID NO: 4418159 - DNA, 25 bp, Homo sapien
tctcaaaaagcatgggctgggcaga

SEQ ID NO: 4418160 - DNA, 25 bp, Homo sapien
agaaatctcaaaaagcatgggctgg

SEQ ID NO: 4418161 - DNA, 25 bp, Homo sapien
tctgacccaagagccaccttagttt

SEQ ID NO: 4418162 - DNA, 25 bp, Homo sapien
tgcctccagattccccgatcagttt

SEQ ID NO: 4418163 - DNA, 25 bp, Homo sapien
catgtggacgattgtcacagggaca

SEQ ID NO: 4418164 - DNA, 25 bp, Homo sapien
gacaaatggtcttcaccctctccag

SEQ ID NO: 4418165 - DNA, 25 bp, Homo sapien
ctgcccaggagatgaatagcaccct

SEQ ID NO: 4418166 - DNA, 25 bp, Homo sapien
tgcccaggagatgaatagcaccctc

SEQ ID NO: 4418167 - DNA, 25 bp, Homo sapien
ccctctctccttcaccgtgtcagtg

SEQ ID NO: 4418168 - DNA, 25 bp, Homo sapien
ctccttcaccgtgtcagtgctacca

SEQ ID NO: 4418169 - DNA, 25 bp, Homo sapien
ggcctttctccggtcagtctgcagc

SEQ ID NO: 4418170 - DNA, 25 bp, Homo sapien
gggcctttctccggtcagtctgcag

SEQ ID NO: 4418171 - DNA, 25 bp, Homo sapien
tggggcctttctccggtcagtctgc

SEQ ID NO: 4418172 - DNA, 25 bp, Homo sapien
ttctggggcctttctccggtcagtc

SEQ ID NO: 4418173 - DNA, 25 bp, Homo sapien
gccattctggaagacggtgtgcgct

SEQ ID NO: 4418174 - DNA, 25 bp, Homo sapien
ttctgggcatagcagcctcggtgtc

SEQ ID NO: 4418175 - DNA, 25 bp, Homo sapien
tttcattctgggcatagcagccttg

SEQ ID NO: 4418176 - DNA, 25 bp, Homo sapien
tgcgctgggaattgccttctgggca

SEQ ID NO: 4418177 - DNA, 25 bp, Homo sapien
caatataggtggacagtgtggcctc

SEQ ID NO: 4418178 - DNA, 25 bp, Homo sapien
tgctgatcccgaggatgggccacct

SEQ ID NO: 4418179 - DNA, 25 bp, Homo sapien
tgtggcctctacacagggcatctgg

SEQ ID NO: 4418180 - DNA, 25 bp, Homo sapien
actctgggcagaaaaggtggaacct

SEQ ID NO: 4418181 - DNA, 25 bp, Homo sapien
ggtgccgagttcagggtcacgtgca

SEQ ID NO: 4418182 - DNA, 25 bp, Homo sapien
ttctacttctgtcgttctgtgtgca

SEQ ID NO: 4418183 - DNA, 25 bp, Homo sapien
gtgtgcatgtctcccgctgtcggag

SEQ ID NO: 4418184 - DNA, 25 bp, Homo sapien
aagcatgctaaaagcccggggtcag

SEQ ID NO: 4418185 - DNA, 25 bp, Homo sapien
tggatgggaggagtctgcgggaggc

SEQ ID NO: 4418186 - DNA, 25 bp, Homo sapien
gctcctgccgggctgatgcccgtga

SEQ ID NO: 4418187 - DNA, 25 bp, Homo sapien
tgcccgtgacctgccgatgtggatg

SEQ ID NO: 4418188 - DNA, 25 bp, Homo sapien
tgggatcatcctgtggcctagctcc

SEQ ID NO: 4418189 - DNA, 25 bp, Homo sapien
ctcatctttcttcccctcacccctt

SEQ ID NO: 4418190 - DNA, 25 bp, Homo sapien
ctggcttctcatctttcttcccctc

SEQ ID NO: 4418191 - DNA, 25 bp, Homo sapien
tcttcccctcaccccttttgctcac

SEQ ID NO: 4418192 - DNA, 25 bp, Homo sapien
ttcttcccctcaccccttttgctca

SEQ ID NO: 4418193 - DNA, 25 bp, Homo sapien
cacagttgatgcaagttgatgggtc

SEQ ID NO: 4418194 - DNA, 25 bp, Homo sapien
cactgggctgtagcatctgcttcca

SEQ ID NO: 4418195 - DNA, 25 bp, Homo sapien
ggagcttctttgcagccctgtcttg

SEQ ID NO: 4418196 - DNA, 25 bp, Homo sapien
tcccaatttggtgacagacctgcag

SEQ ID NO: 4418197 - DNA, 25 bp, Homo sapien
cgaagttttttgggtctcctcaatg

SEQ ID NO: 4418198 - DNA, 25 bp, Homo sapien
tcctttttcggtgtgagatgatggt

SEQ ID NO: 4418199 - DNA, 25 bp, Homo sapien
ttttttgggtctcctcaatggtctc

SEQ ID NO: 4418200 - DNA, 25 bp, Homo sapien
cctttttcggtgtgagatgatggtt

SEQ ID NO: 4418201 - DNA, 25 bp, Homo sapien
aggaggagggcgttaatcacgttct

SEQ ID NO: 4418202 - DNA, 25 bp, Homo sapien
ggagggcgttaatcacgttctcgta

SEQ ID NO: 4418203 - DNA, 25 bp, Homo sapien
ttaatcacgttctcgtaggcctcat

SEQ ID NO: 4418204 - DNA, 25 bp, Homo sapien
gggcgttaatcacgttctcgtaggc

SEQ ID NO: 4418205 - DNA, 25 bp, Homo sapien
aggcagaggaggtgagggtgggtcc

SEQ ID NO: 4418206 - DNA, 25 bp, Homo sapien
gcagaggaggtgagggtgggtccta

SEQ ID NO: 4418207 - DNA, 25 bp, Homo sapien
cagaggaggtgagggtgggtcctac

SEQ ID NO: 4418208 - DNA, 25 bp, Homo sapien
tcaggcagaggaggtgagggtgggt

SEQ ID NO: 4418209 - DNA, 25 bp, Homo sapien
gattcagttagtcaagcgtggcggc

SEQ ID NO: 4418210 - DNA, 25 bp, Homo sapien
ttcaactgagatccgagaggagagt

SEQ ID NO: 4418211 - DNA, 25 bp, Homo sapien
gcctagcctaggcatgacatgacaa

SEQ ID NO: 4418212 - DNA, 25 bp, Homo sapien
ttaagcaggttaaccacaattggtg

SEQ ID NO: 4418213 - DNA, 25 bp, Homo sapien
catgagaggttcttctgtatctgga

SEQ ID NO: 4418214 - DNA, 25 bp, Homo sapien
agaggttcttctgtatctggacagt

SEQ ID NO: 4418215 - DNA, 25 bp, Homo sapien
tcatgagaggttcttctgtatctgg

SEQ ID NO: 4418216 - DNA, 25 bp, Homo sapien
tgagaggttcttctgtatctggaca

SEQ ID NO: 4418217 - DNA, 25 bp, Homo sapien
tgcacacggtgaggtacatcagcag

SEQ ID NO: 4418218 - DNA, 25 bp, Homo sapien
gccccaagggtgaggaatattgagt

SEQ ID NO: 4418219 - DNA, 25 bp, Homo sapien
ccccaagggtgaggaatattgagtg

SEQ ID NO: 4418220 - DNA, 25 bp, Homo sapien
ttgagtgggtgaagagtaaacacag

SEQ ID NO: 4418221 - DNA, 25 bp, Homo sapien
aatattgagtgggtgaagagtaaac

SEQ ID NO: 4418222 - DNA, 25 bp, Homo sapien
tgtcccaggatgcaagtgtgaggcc

SEQ ID NO: 4418223 - DNA, 25 bp, Homo sapien
ttccatagatgtggaggtgtccagc

SEQ ID NO: 4418224 - DNA, 25 bp, Homo sapien
gatcatctggtgtcatgggttccat

SEQ ID NO: 4418225 - DNA, 25 bp, Homo sapien
tttgggcagaagcatgcctccacag

SEQ ID NO: 4418226 - DNA, 25 bp, Homo sapien
tcagtcttgaggtgatgccttttca

SEQ ID NO: 4418227 - DNA, 25 bp, Homo sapien
agtttttcagtcttgaggtgatgcc

SEQ ID NO: 4418228 - DNA, 25 bp, Homo sapien
cagtcttgaggtgatgccttttcac

SEQ ID NO: 4418229 - DNA, 25 bp, Homo sapien
ttcttgagtttttcagtcttgaggt

SEQ ID NO: 4418230 - DNA, 25 bp, Homo sapien
caactcctctgacaaggacgggatt

SEQ ID NO: 4418231 - DNA, 25 bp, Homo sapien
gccaactcctctgacaaggacggga

SEQ ID NO: 4418232 - DNA, 25 bp, Homo sapien
ctgccaactcctctgacaaggacgg

SEQ ID NO: 4418233 - DNA, 25 bp, Homo sapien
ctcctctgacaaggacgggattgag

SEQ ID NO: 4418234 - DNA, 25 bp, Homo sapien
ttggacttcgcagctaagtacttcc

SEQ ID NO: 4418235 - DNA, 25 bp, Homo sapien
tggacttcgcagctaagtacttcct

SEQ ID NO: 4418236 - DNA, 25 bp, Homo sapien
ggacttcgcagctaagtacttcctc

SEQ ID NO: 4418237 - DNA, 25 bp, Homo sapien
cttggacttcgcagctaagtacttc

SEQ ID NO: 4418238 - DNA, 25 bp, Homo sapien
ccaactggtttgtaacagttgcaag

SEQ ID NO: 4418239 - DNA, 25 bp, Homo sapien
caactggtttgtaacagttgcaaga

SEQ ID NO: 4418240 - DNA, 25 bp, Homo sapien
caccaactggtttgtaacagttgca

SEQ ID NO: 4418241 - DNA, 25 bp, Homo sapien
actggtttgtaacagttgcaagaac

SEQ ID NO: 4418242 - DNA, 25 bp, Homo sapien
ggcgcatctccggtagggtaatatc

SEQ ID NO: 4418243 - DNA, 25 bp, Homo sapien
ctttcgaggcgcatctccggtaggg

SEQ ID NO: 4418244 - DNA, 25 bp, Homo sapien
cgcatctccggtagggtaatatcta

SEQ ID NO: 4418245 - DNA, 25 bp, Homo sapien
tcgaggcgcatctccggtagggtaa

SEQ ID NO: 4418246 - DNA, 25 bp, Homo sapien
gttttggttgaggtggcaatgacaa

SEQ ID NO: 4418247 - DNA, 25 bp, Homo sapien
ctgatgtcagttttggttgaggtgg

SEQ ID NO: 4418248 - DNA, 25 bp, Homo sapien
tttggttgaggtggcaatgacaaat

SEQ ID NO: 4418249 - DNA, 25 bp, Homo sapien
tggttgaggtggcaatgacaaatgt

SEQ ID NO: 4418250 - DNA, 25 bp, Homo sapien
cttgaagcaagcatcagtgagatgt

SEQ ID NO: 4418251 - DNA, 25 bp, Homo sapien
cagtgagatgttttgggatttttac

SEQ ID NO: 4418252 - DNA, 25 bp, Homo sapien
gtgagatgttttgggatttttacat

SEQ ID NO: 4418253 - DNA, 25 bp, Homo sapien
gagatgttttgggatttttacattg

SEQ ID NO: 4418254 - DNA, 25 bp, Homo sapien
cgctgccctgtgatctcgtatttct

SEQ ID NO: 4418255 - DNA, 25 bp, Homo sapien
cttgcgctgccctgtgatctcgtat

SEQ ID NO: 4418256 - DNA, 25 bp, Homo sapien
tgcgctgccctgtgatctcgtattt

SEQ ID NO: 4418257 - DNA, 25 bp, Homo sapien
tcttgcgctgccctgtgatctcgta

SEQ ID NO: 4418258 - DNA, 25 bp, Homo sapien
gatttttggtaaaatctgtgagtcc

SEQ ID NO: 4418259 - DNA, 25 bp, Homo sapien
ttgatttttggtaaaatctgtgagt

SEQ ID NO: 4418260 - DNA, 25 bp, Homo sapien
actttgatttttggtaaaatctgtg

SEQ ID NO: 4418261 - DNA, 25 bp, Homo sapien
tttttggtaaaatctgtgagtccac

SEQ ID NO: 4418262 - DNA, 25 bp, Homo sapien
ggataaattccattcctcagaacaa

SEQ ID NO: 4418263 - DNA, 25 bp, Homo sapien
tccattcctcagaacaaacacagat

SEQ ID NO: 4418264 - DNA, 25 bp, Homo sapien
aattccattcctcagaacaaacaca

SEQ ID NO: 4418265 - DNA, 25 bp, Homo sapien
cattcctcagaacaaacacagatct

SEQ ID NO: 4418266 - DNA, 25 bp, Homo sapien
tgggcgagtccaaggaggagcgctg

SEQ ID NO: 4418267 - DNA, 25 bp, Homo sapien
cttgtgctgggcgagtccaaggagg

SEQ ID NO: 4418268 - DNA, 25 bp, Homo sapien
tgctgggcgagtccaaggaggagcg

SEQ ID NO: 4418269 - DNA, 25 bp, Homo sapien
tgtgctgggcgagtccaaggaggag

SEQ ID NO: 4418270 - DNA, 25 bp, Homo sapien
tgaggaccagggtcgggagctgggg

SEQ ID NO: 4418271 - DNA, 25 bp, Homo sapien
ctgaggaccagggtcgggagctggg

SEQ ID NO: 4418272 - DNA, 25 bp, Homo sapien
gaaagtcttcggaagctcagggaaa

SEQ ID NO: 4418273 - DNA, 25 bp, Homo sapien
gggagaaagtcttcggaagctcagg

SEQ ID NO: 4418274 - DNA, 25 bp, Homo sapien
gagaaagtcttcggaagctcaggga

SEQ ID NO: 4418275 - DNA, 25 bp, Homo sapien
cggggagaaagtcttcggaagctca

SEQ ID NO: 4418276 - DNA, 25 bp, Homo sapien
tctgtgatacttccctggtggtctc

SEQ ID NO: 4418277 - DNA, 25 bp, Homo sapien
gcagtcgggcagaatcagcctctgg

SEQ ID NO: 4418278 - DNA, 25 bp, Homo sapien
tctgacggggctgtatggcctccct

SEQ ID NO: 4418279 - DNA, 25 bp, Homo sapien
caggctgaacactcgaggagctgga

SEQ ID NO: 4418280 - DNA, 25 bp, Homo sapien
gttcacccgtgagcgacgaggagca

SEQ ID NO: 4418281 - DNA, 25 bp, Homo sapien
tgggcagcagctgttcacccgtgag

SEQ ID NO: 4418282 - DNA, 25 bp, Homo sapien
cccgtgagcgacgaggagcatcagc

SEQ ID NO: 4418283 - DNA, 25 bp, Homo sapien
agcagctgttcacccgtgagcgacg

SEQ ID NO: 4418284 - DNA, 25 bp, Homo sapien
ggagagcatttgagcccagtttcgt

SEQ ID NO: 4418285 - DNA, 25 bp, Homo sapien
ttcgttttgaactcccgcctgtgct

SEQ ID NO: 4418286 - DNA, 25 bp, Homo sapien
taggcctcgagctcagagtggccga

SEQ ID NO: 4418287 - DNA, 25 bp, Homo sapien
tgggaacggacagctcctaggaaag

SEQ ID NO: 4418288 - DNA, 25 bp, Homo sapien
tcggtacccagctgatgtggttctc

SEQ ID NO: 4418289 - DNA, 25 bp, Homo sapien
tacccagctgatgtggttctctgga

SEQ ID NO: 4418290 - DNA, 25 bp, Homo sapien
caatcggtacccagctgatgtggtt

SEQ ID NO: 4418291 - DNA, 25 bp, Homo sapien
gggcaatcggtacccagctgatgtg

SEQ ID NO: 4418292 - DNA, 25 bp, Homo sapien
gccacccgctgcgccttcagagcct

SEQ ID NO: 4418293 - DNA, 25 bp, Homo sapien
gagccacccgctgcgccttcagagc

SEQ ID NO: 4418294 - DNA, 25 bp, Homo sapien
ctgagccacccgctgcgccttcaga

SEQ ID NO: 4418295 - DNA, 25 bp, Homo sapien
cctgctgcacgccatcgcaggcagc

SEQ ID NO: 4418296 - DNA, 25 bp, Homo sapien
gggtcatagtctttcaggaaactcc

SEQ ID NO: 4418297 - DNA, 25 bp, Homo sapien
tgggtcatagtctttcaggaaactc

SEQ ID NO: 4418298 - DNA, 25 bp, Homo sapien
cattgggtcatagtctttcaggaaa

SEQ ID NO: 4418299 - DNA, 25 bp, Homo sapien
tttcaggaaactccagttctgaatc

SEQ ID NO: 4418300 - DNA, 25 bp, Homo sapien
cacaacctggttcgtggaactggga

SEQ ID NO: 4418301 - DNA, 25 bp, Homo sapien
gagaggcacatggtctggcaacttc

SEQ ID NO: 4418302 - DNA, 25 bp, Homo sapien
gaagtccatgcggatgagagtctgt

SEQ ID NO: 4418303 - DNA, 25 bp, Homo sapien
gaactgtgtccgaaaagagaggcac

SEQ ID NO: 4418304 - DNA, 25 bp, Homo sapien
tgctaggatgctggcttcaaagacg

SEQ ID NO: 4418305 - DNA, 25 bp, Homo sapien
tacggccgtggaccagttactgact

SEQ ID NO: 4418306 - DNA, 25 bp, Homo sapien
taaggagctgccaactaaggaatac

SEQ ID NO: 4418307 - DNA, 25 bp, Homo sapien
ttacagacagtgcagacccaagctg

SEQ ID NO: 4418308 - DNA, 25 bp, Homo sapien
gatcagatcataaatcactgcagcc

SEQ ID NO: 4418309 - DNA, 25 bp, Homo sapien
ggcaagagtgcttcctaggtaagta

SEQ ID NO: 4418310 - DNA, 25 bp, Homo sapien
gaatcaaggccaactctttggcaga

SEQ ID NO: 4418311 - DNA, 25 bp, Homo sapien
gtaggtagcgttgtcctcagtgaac

SEQ ID NO: 4418312 - DNA, 25 bp, Homo sapien
tattttgccaacaggtcctgacgac

SEQ ID NO: 4418313 - DNA, 25 bp, Homo sapien
gtaacacaggacaactcgaagaggg

SEQ ID NO: 4418314 - DNA, 25 bp, Homo sapien
catacacagtaggtctgaggaagca

SEQ ID NO: 4418315 - DNA, 25 bp, Homo sapien
ttcttggcatgatcctgagtagggt

SEQ ID NO: 4418316 - DNA, 25 bp, Homo sapien
ttgccacccgatagtttagccgccg

SEQ ID NO: 4418317 - DNA, 25 bp, Homo sapien
atttccgcgttcttgccacccgata

SEQ ID NO: 4418318 - DNA, 25 bp, Homo sapien
cagcagctgcttcgcatttccgcgt

SEQ ID NO: 4418319 - DNA, 25 bp, Homo sapien
tgggtggaccgagaggcaaatggcc

SEQ ID NO: 4418320 - DNA, 25 bp, Homo sapien
tgggcggccgcagcgagaagggacc

SEQ ID NO: 4418321 - DNA, 25 bp, Homo sapien
ctgggcggccgcagcgagaagggac

SEQ ID NO: 4418322 - DNA, 25 bp, Homo sapien
ctgccgaagccttccgccttcccgg

SEQ ID NO: 4418323 - DNA, 25 bp, Homo sapien
ctcagcctcggcggcgcagctctgc

SEQ ID NO: 4418324 - DNA, 25 bp, Homo sapien
gcccagcgtgctccagttacacagc

SEQ ID NO: 4418325 - DNA, 25 bp, Homo sapien
tctgcggcagcttcagcgcggcgca

SEQ ID NO: 4418326 - DNA, 25 bp, Homo sapien
tccagaagtaaactcggaaggctga

SEQ ID NO: 4418327 - DNA, 25 bp, Homo sapien
tgcgcgccgctagcacagcggagat

SEQ ID NO: 4418328 - DNA, 25 bp, Homo sapien
aaagtttggcgctctggcatgatga

SEQ ID NO: 4418329 - DNA, 25 bp, Homo sapien
tggtggcaccaacctgaaacgcatg

SEQ ID NO: 4418330 - DNA, 25 bp, Homo sapien
ggtagagtcactcacaagcctggaa

SEQ ID NO: 4418331 - DNA, 25 bp, Homo sapien
tgcaagacccttagacaggccagca

SEQ ID NO: 4418332 - DNA, 25 bp, Homo sapien
cctgcaggttttgccgtctactccc

SEQ ID NO: 4418333 - DNA, 25 bp, Homo sapien
agatgaagagcctggatttcccgag

SEQ ID NO: 4418334 - DNA, 25 bp, Homo sapien
caggttttgccgtctactccctgct

SEQ ID NO: 4418335 - DNA, 25 bp, Homo sapien
tggatttcccgaggctgatctggat

SEQ ID NO: 4418336 - DNA, 25 bp, Homo sapien
catgggacttcaacacacaggaggg

SEQ ID NO: 4418337 - DNA, 25 bp, Homo sapien
ggaggcccatagacaccaagaacat

SEQ ID NO: 4418338 - DNA, 25 bp, Homo sapien
ccagcttcagggacaagcggtgcct

SEQ ID NO: 4418339 - DNA, 25 bp, Homo sapien
tctgacagtgcacaacttagctggg

SEQ ID NO: 4418340 - DNA, 25 bp, Homo sapien
tcaatttcgctaagaagactccggc

SEQ ID NO: 4418341 - DNA, 25 bp, Homo sapien
aagagctgcccggttgagagggcag

SEQ ID NO: 4418342 - DNA, 25 bp, Homo sapien
gaagaaccaccctcaatttcgctaa

SEQ ID NO: 4418343 - DNA, 25 bp, Homo sapien
gctaagaagactccggctgtgagga

SEQ ID NO: 4418344 - DNA, 25 bp, Homo sapien
gcagaggcgcaaggatccgaggagc

SEQ ID NO: 4418345 - DNA, 25 bp, Homo sapien
aaggatccgaggagccgcaaccatc

SEQ ID NO: 4418346 - DNA, 25 bp, Homo sapien
ctgtggccgtgtttttagagttaga

SEQ ID NO: 4418347 - DNA, 25 bp, Homo sapien
gagccgcaaccatccctggatgcgg

SEQ ID NO: 4418348 - DNA, 25 bp, Homo sapien
cagctgctgcacacatctgccctcc

SEQ ID NO: 4418349 - DNA, 25 bp, Homo sapien
tgagcaagaatatgagactgggcct

SEQ ID NO: 4418350 - DNA, 25 bp, Homo sapien
tatagagtgccttgagatggtcgct

SEQ ID NO: 4418351 - DNA, 25 bp, Homo sapien
cagtttgccgaatccttgcagtggg

SEQ ID NO: 4418352 - DNA, 25 bp, Homo sapien
tttggagcatccagaacttactggg

SEQ ID NO: 4418353 - DNA, 25 bp, Homo sapien
gcaatacccacgatctctatagagt

SEQ ID NO: 4418354 - DNA, 25 bp, Homo sapien
cggctgccccaaaacgcagctgtcg

SEQ ID NO: 4418355 - DNA, 25 bp, Homo sapien
gctgccccaaaacgcagctgtcggg

SEQ ID NO: 4418356 - DNA, 25 bp, Homo sapien
tgccccaaaacgcagctgtcggggc

SEQ ID NO: 4418357 - DNA, 25 bp, Homo sapien
cacggctgccccaaaacgcagctgt

SEQ ID NO: 4418358 - DNA, 25 bp, Homo sapien
cccatagtaacactggtaccgcaga

SEQ ID NO: 4418359 - DNA, 25 bp, Homo sapien
tcagcggcggatacccatagtaaca

SEQ ID NO: 4418360 - DNA, 25 bp, Homo sapien
ctggtaccgcagaaacaccaggaat

SEQ ID NO: 4418361 - DNA, 25 bp, Homo sapien
tccaggtaggtcagcggcggatacc

SEQ ID NO: 4418362 - DNA, 25 bp, Homo sapien
gggagacccgtggcagtccgctgga

SEQ ID NO: 4418363 - DNA, 25 bp, Homo sapien
gagacccgtggcagtccgctggaca

SEQ ID NO: 4418364 - DNA, 25 bp, Homo sapien
aaggggagacccgtggcagtccgct

SEQ ID NO: 4418365 - DNA, 25 bp, Homo sapien
agacccgtggcagtccgctggacag

SEQ ID NO: 4418366 - DNA, 25 bp, Homo sapien
aggagtggcctgcttcacgttcccg

SEQ ID NO: 4418367 - DNA, 25 bp, Homo sapien
gtaaggagtggcctgcttcacgttc

SEQ ID NO: 4418368 - DNA, 25 bp, Homo sapien
ctgcttcacgttcccgttaaaatga

SEQ ID NO: 4418369 - DNA, 25 bp, Homo sapien
cctgcttcacgttcccgttaaaatg

SEQ ID NO: 4418370 - DNA, 25 bp, Homo sapien
aataacatccccgttcccacttctg

SEQ ID NO: 4418371 - DNA, 25 bp, Homo sapien
cattcacaaataacatccccgttcc

SEQ ID NO: 4418372 - DNA, 25 bp, Homo sapien
ttcacaaataacatccccgttccca

SEQ ID NO: 4418373 - DNA, 25 bp, Homo sapien
cacaaataacatccccgttcccact

SEQ ID NO: 4418374 - DNA, 25 bp, Homo sapien
aaggagcctgcttcacaatgcatac

SEQ ID NO: 4418375 - DNA, 25 bp, Homo sapien
tctggtaaaggagcctgcttcacaa

SEQ ID NO: 4418376 - DNA, 25 bp, Homo sapien
acatctggtaaaggagcctgcttca

SEQ ID NO: 4418377 - DNA, 25 bp, Homo sapien
ggtaaaggagcctgcttcacaatgc

SEQ ID NO: 4418378 - DNA, 25 bp, Homo sapien
gcagggcaaggatgaaccaagaaga

SEQ ID NO: 4418379 - DNA, 25 bp, Homo sapien
tgcacaggtataggaagagaggctc

SEQ ID NO: 4418380 - DNA, 25 bp, Homo sapien
caagtcagcgcactcacagttcctg

SEQ ID NO: 4418381 - DNA, 25 bp, Homo sapien
gccgcgctgatgaaagtacatagat

SEQ ID NO: 4418382 - DNA, 25 bp, Homo sapien
gacactggagctgtgcaaacttact

SEQ ID NO: 4418383 - DNA, 25 bp, Homo sapien
ccccaccatgtgagtccggttctta

SEQ ID NO: 4418384 - DNA, 25 bp, Homo sapien
gacacttggtgctaccaaaggcctc

SEQ ID NO: 4418385 - DNA, 25 bp, Homo sapien
tgtaaagtagtaaagcgccagggac

SEQ ID NO: 4418386 - DNA, 25 bp, Homo sapien
gatacacttaggaggttctagctga

SEQ ID NO: 4418387 - DNA, 25 bp, Homo sapien
cttggaaacccgcagtgagtgaaga

SEQ ID NO: 4418388 - DNA, 25 bp, Homo sapien
ctacttggaaacccgcagtgagtga

SEQ ID NO: 4418389 - DNA, 25 bp, Homo sapien
tacttggaaacccgcagtgagtgaa

SEQ ID NO: 4418390 - DNA, 25 bp, Homo sapien
ttggaaacccgcagtgagtgaagat

SEQ ID NO: 4418391 - DNA, 25 bp, Homo sapien
tctccaaagaaaacatacagggcca

SEQ ID NO: 4418392 - DNA, 25 bp, Homo sapien
caaagaaaacatacagggccaggtg

SEQ ID NO: 4418393 - DNA, 25 bp, Homo sapien
tttctccaaagaaaacatacagggc

SEQ ID NO: 4418394 - DNA, 25 bp, Homo sapien
tccaaagaaaacatacagggccagg

SEQ ID NO: 4418395 - DNA, 25 bp, Homo sapien
gaaaacttgcagcaataagtaactt

SEQ ID NO: 4418396 - DNA, 25 bp, Homo sapien
cagcaataagtaacttgcctctcgg

SEQ ID NO: 4418397 - DNA, 25 bp, Homo sapien
aacttgcagcaataagtaacttgcc

SEQ ID NO: 4418398 - DNA, 25 bp, Homo sapien
aataagtaacttgcctctcggacat

SEQ ID NO: 4418399 - DNA, 25 bp, Homo sapien
gtcattaaggttgtgattattcttg

SEQ ID NO: 4418400 - DNA, 25 bp, Homo sapien
gtaaaatcattggtggtcattaagg

SEQ ID NO: 4418401 - DNA, 25 bp, Homo sapien
aaatcattggtggtcattaaggttg

SEQ ID NO: 4418402 - DNA, 25 bp, Homo sapien
cattggtggtcattaaggttgtgat

SEQ ID NO: 4418403 - DNA, 25 bp, Homo sapien
ttacaatacagaccaaaaccacctc

SEQ ID NO: 4418404 - DNA, 25 bp, Homo sapien
caacctccgaaatgaacaattttgg

SEQ ID NO: 4418405 - DNA, 25 bp, Homo sapien
catcttaagtgctcaattgacagta

SEQ ID NO: 4418406 - DNA, 25 bp, Homo sapien
ggctctggctaagaagggttataac

SEQ ID NO: 4418407 - DNA, 25 bp, Homo sapien
tatagcggtcttccggtagcgaagt

SEQ ID NO: 4418408 - DNA, 25 bp, Homo sapien
ccggtagcgaagtactgtcactgtt

SEQ ID NO: 4418409 - DNA, 25 bp, Homo sapien
tcattcagcctttatagcggtcttc

SEQ ID NO: 4418410 - DNA, 25 bp, Homo sapien
ctgttacccatatatttaaagccag

SEQ ID NO: 4418411 - DNA, 25 bp, Homo sapien
gccttggtatccttgctagagcaca

SEQ ID NO: 4418412 - DNA, 25 bp, Homo sapien
tcagtcccagaaagtgaaccctagt

SEQ ID NO: 4418413 - DNA, 25 bp, Homo sapien
gtgactggcctcaacactgcagatg

SEQ ID NO: 4418414 - DNA, 25 bp, Homo sapien
tattatacacaacaaggccaccctg

SEQ ID NO: 4418415 - DNA, 25 bp, Homo sapien
aaactggtgccggtattactgttga

SEQ ID NO: 4418416 - DNA, 25 bp, Homo sapien
tggtaaagtagagaaactcggacac

SEQ ID NO: 4418417 - DNA, 25 bp, Homo sapien
cagaaatactctaggttgccacacc

SEQ ID NO: 4418418 - DNA, 25 bp, Homo sapien
gataagcataccagtaaagccaaag

SEQ ID NO: 4418419 - DNA, 25 bp, Homo sapien
cctattctgaattggagagtatata

SEQ ID NO: 4418420 - DNA, 25 bp, Homo sapien
tcaagtttacatatgagtaactgaa

SEQ ID NO: 4418421 - DNA, 25 bp, Homo sapien
tctgtgctcagactagacgtgcatg

SEQ ID NO: 4418422 - DNA, 25 bp, Homo sapien
tatgggaggttctatcctattctga

SEQ ID NO: 4418423 - DNA, 25 bp, Homo sapien
aacagtctctctttatataaataca

SEQ ID NO: 4418424 - DNA, 25 bp, Homo sapien
ttaacagtctctctttatataaata

SEQ ID NO: 4418425 - DNA, 25 bp, Homo sapien
aatacacagagtttggtatgatatt

SEQ ID NO: 4418426 - DNA, 25 bp, Homo sapien
taaatacacagagtttggtatgata

SEQ ID NO: 4418427 - DNA, 25 bp, Homo sapien
gaagcaacaggttgaaccaacaatg

SEQ ID NO: 4418428 - DNA, 25 bp, Homo sapien
tccataaagctctctcggcagtcgc

SEQ ID NO: 4418429 - DNA, 25 bp, Homo sapien
gctcacactacaatgcacacaagga

SEQ ID NO: 4418430 - DNA, 25 bp, Homo sapien
ttcctgagagactgatacatacact

SEQ ID NO: 4418431 - DNA, 25 bp, Homo sapien
cgtgccttgaaacctaccttgtagt

SEQ ID NO: 4418432 - DNA, 25 bp, Homo sapien
taatactcgcctagaaaaaacagca

SEQ ID NO: 4418433 - DNA, 25 bp, Homo sapien
taaggagctctcttggtaccatagt

SEQ ID NO: 4418434 - DNA, 25 bp, Homo sapien
gatgtctgacttacctaaggagctc

SEQ ID NO: 4418435 - DNA, 25 bp, Homo sapien
tcctcggtaatatgaccagcactac

SEQ ID NO: 4418436 - DNA, 25 bp, Homo sapien
tataagtcacattaaggaggtacaa

SEQ ID NO: 4418437 - DNA, 25 bp, Homo sapien
tatccgactagcacaaataatgaca

SEQ ID NO: 4418438 - DNA, 25 bp, Homo sapien
caattctgccaaagttagagcttct

SEQ ID NO: 4418439 - DNA, 25 bp, Homo sapien
tttgcatgttatgcttgtgcagcgg

SEQ ID NO: 4418440 - DNA, 25 bp, Homo sapien
caagaatttgcatgttatgcttgtg

SEQ ID NO: 4418441 - DNA, 25 bp, Homo sapien
aatttgcatgttatgcttgtgcagc

SEQ ID NO: 4418442 - DNA, 25 bp, Homo sapien
gcatgttatgcttgtgcagcggcca

SEQ ID NO: 4418443 - DNA, 25 bp, Homo sapien
tcagttgaatctaacatcttttggg

SEQ ID NO: 4418444 - DNA, 25 bp, Homo sapien
actttgtaaatgtagatgtgtggaa

SEQ ID NO: 4418445 - DNA, 25 bp, Homo sapien
taggctgtccagttacttgctgttc

SEQ ID NO: 4418446 - DNA, 25 bp, Homo sapien
tgatgagtcgcattttcctttttgc

SEQ ID NO: 4418447 - DNA, 25 bp, Homo sapien
ttctctgaggcgttcggccttttga

SEQ ID NO: 4418448 - DNA, 25 bp, Homo sapien
cgttcggccttttgatcgctgtctt

SEQ ID NO: 4418449 - DNA, 25 bp, Homo sapien
gaggcgttcggccttttgatcgctg

SEQ ID NO: 4418450 - DNA, 25 bp, Homo sapien
tcggccttttgatcgctgtcttcct

SEQ ID NO: 4418451 - DNA, 25 bp, Homo sapien
gtaaccccgacagctgatcgtgacg

SEQ ID NO: 4418452 - DNA, 25 bp, Homo sapien
cgtcagcagtaaccccgacagctga

SEQ ID NO: 4418453 - DNA, 25 bp, Homo sapien
agaagcgtcagcagtaaccccgaca

SEQ ID NO: 4418454 - DNA, 25 bp, Homo sapien
agcagtaaccccgacagctgatcgt

SEQ ID NO: 4418455 - DNA, 25 bp, Homo sapien
catcttccaacgtaatcttcaacca

SEQ ID NO: 4418456 - DNA, 25 bp, Homo sapien
gccatcttccaacgtaatcttcaac

SEQ ID NO: 4418457 - DNA, 25 bp, Homo sapien
atcttccaacgtaatcttcaaccac

SEQ ID NO: 4418458 - DNA, 25 bp, Homo sapien
ctgccatcttccaacgtaatcttca

SEQ ID NO: 4418459 - DNA, 25 bp, Homo sapien
aacaaagtacagtctgaagaacctg

SEQ ID NO: 4418460 - DNA, 25 bp, Homo sapien
taaaacaacaaagtacagtctgaag

SEQ ID NO: 4418461 - DNA, 25 bp, Homo sapien
tgttgtaaaacaacaaagtacagtc

SEQ ID NO: 4418462 - DNA, 25 bp, Homo sapien
tctgaagaacctgaagctgtggcaa

SEQ ID NO: 4418463 - DNA, 25 bp, Homo sapien
ctcaaaacatgttgtacgtgctcac

SEQ ID NO: 4418464 - DNA, 25 bp, Homo sapien
tactcaaaacatgttgtacgtgctc

SEQ ID NO: 4418465 - DNA, 25 bp, Homo sapien
actcaaaacatgttgtacgtgctca

SEQ ID NO: 4418466 - DNA, 25 bp, Homo sapien
ctactcaaaacatgttgtacgtgct

SEQ ID NO: 4418467 - DNA, 25 bp, Homo sapien
agcagcaactcgaagaaactcacag

SEQ ID NO: 4418468 - DNA, 25 bp, Homo sapien
gcagcaactcgaagaaactcacagc

SEQ ID NO: 4418469 - DNA, 25 bp, Homo sapien
cagcaactcgaagaaactcacagca

SEQ ID NO: 4418470 - DNA, 25 bp, Homo sapien
tatcctttaagggctcttcataaaa

SEQ ID NO: 4418471 - DNA, 25 bp, Homo sapien
ccatctctaatgattcgagtcacca

SEQ ID NO: 4418472 - DNA, 25 bp, Homo sapien
gagtcaccagttccagattcacatt

SEQ ID NO: 4418473 - DNA, 25 bp, Homo sapien
cacatttccatatctgcggaggtga

SEQ ID NO: 4418474 - DNA, 25 bp, Homo sapien
acagcttgcaacactggatcttccc

SEQ ID NO: 4418475 - DNA, 25 bp, Homo sapien
tttgatttcgaatctcctaaagtac

SEQ ID NO: 4418476 - DNA, 25 bp, Homo sapien
tggtttgatttcgaatctcctaaag

SEQ ID NO: 4418477 - DNA, 25 bp, Homo sapien
atgttggtttgatttcgaatctcct

SEQ ID NO: 4418478 - DNA, 25 bp, Homo sapien
gttggtttgatttcgaatctcctaa

SEQ ID NO: 4418479 - DNA, 25 bp, Homo sapien
gtgcaattataatccattattacag

SEQ ID NO: 4418480 - DNA, 25 bp, Homo sapien
caaaaagtgcaattataatccatta

SEQ ID NO: 4418481 - DNA, 25 bp, Homo sapien
ttcacatgacttcaacttactgttt

SEQ ID NO: 4418482 - DNA, 25 bp, Homo sapien
tcacatgacttcaacttactgttta

SEQ ID NO: 4418483 - DNA, 25 bp, Homo sapien
tgctgacctcgtagaatgattctgg

SEQ ID NO: 4418484 - DNA, 25 bp, Homo sapien
gaatccatctggacctcatgctttc

SEQ ID NO: 4418485 - DNA, 25 bp, Homo sapien
cccacttggttgtggcgtataattc

SEQ ID NO: 4418486 - DNA, 25 bp, Homo sapien
taatagttggtacatttcaccactg

SEQ ID NO: 4418487 - DNA, 25 bp, Homo sapien
cgcctctcctaaaactggcgcccca

SEQ ID NO: 4418488 - DNA, 25 bp, Homo sapien
gcgcctctcctaaaactggcgcccc

SEQ ID NO: 4418489 - DNA, 25 bp, Homo sapien
ggcgcctctcctaaaactggcgccc

SEQ ID NO: 4418490 - DNA, 25 bp, Homo sapien
gcctctcctaaaactggcgccccag

SEQ ID NO: 4418491 - DNA, 25 bp, Homo sapien
aattctcttcttcaccaggtgccaa

SEQ ID NO: 4418492 - DNA, 25 bp, Homo sapien
ctagcaggaaaagaatcaggagacc

SEQ ID NO: 4418493 - DNA, 25 bp, Homo sapien
cttcttcagattccaaattctcttc

SEQ ID NO: 4418494 - DNA, 25 bp, Homo sapien
aagaatcaggagaccctgctccagc

SEQ ID NO: 4418495 - DNA, 25 bp, Homo sapien
tggttccagtggcaaccttggtaag

SEQ ID NO: 4418496 - DNA, 25 bp, Homo sapien
ggttccagtggcaaccttggtaaga

SEQ ID NO: 4418497 - DNA, 25 bp, Homo sapien
tatggtttagctatttgaagaacat

SEQ ID NO: 4418498 - DNA, 25 bp, Homo sapien
atggtttagctatttgaagaacatc

SEQ ID NO: 4418499 - DNA, 25 bp, Homo sapien
cacaatatggtttagctatttgaag

SEQ ID NO: 4418500 - DNA, 25 bp, Homo sapien
aagaacatctttagtggcaaatgca

SEQ ID NO: 4418501 - DNA, 25 bp, Homo sapien
aacaaacaccctgaattaagaatgg

SEQ ID NO: 4418502 - DNA, 25 bp, Homo sapien
tgaattaagaatggtggcagtcacc

SEQ ID NO: 4418503 - DNA, 25 bp, Homo sapien
aacaccctgaattaagaatggtggc

SEQ ID NO: 4418504 - DNA, 25 bp, Homo sapien
gcagataacaaacaccctgaattaa

SEQ ID NO: 4418505 - DNA, 25 bp, Homo sapien
tgaaaacgttggattagaggcctga

SEQ ID NO: 4418506 - DNA, 25 bp, Homo sapien
tgctaactcatagggcagatatgtg

SEQ ID NO: 4418507 - DNA, 25 bp, Homo sapien
taccttgtagtggaattgctaactc

SEQ ID NO: 4418508 - DNA, 25 bp, Homo sapien
cctcagcccctgaaaacgttggatt

SEQ ID NO: 4418509 - DNA, 25 bp, Homo sapien
tgcacagatctgaagtgtaccgctg

SEQ ID NO: 4418510 - DNA, 25 bp, Homo sapien
tcacaccttttcagctaatttcaca

SEQ ID NO: 4418511 - DNA, 25 bp, Homo sapien
tacagaccattattaccaactcaga

SEQ ID NO: 4418512 - DNA, 25 bp, Homo sapien
tagcattgtttctgagagttatctg

SEQ ID NO: 4418513 - DNA, 25 bp, Homo sapien
tctctataaagcgtgctgcctagca

SEQ ID NO: 4418514 - DNA, 25 bp, Homo sapien
tcctggcttgtgtggaacagaagca

SEQ ID NO: 4418515 - DNA, 25 bp, Homo sapien
tggctggaccattcacagttcgttg

SEQ ID NO: 4418516 - DNA, 25 bp, Homo sapien
tcactacaacaatgccagcctgcgt

SEQ ID NO: 4418517 - DNA, 25 bp, Homo sapien
ccactgacactgatgtcgaagaaca

SEQ ID NO: 4418518 - DNA, 25 bp, Homo sapien
agatgccaggacgtatacgcttcag

SEQ ID NO: 4418519 - DNA, 25 bp, Homo sapien
ccaagggcttgccactgacactgat

SEQ ID NO: 4418520 - DNA, 25 bp, Homo sapien
tgaaagcttgtctgcaaatatcctg

SEQ ID NO: 4418521 - DNA, 25 bp, Homo sapien
gtccccatagccaacttctgatcca

SEQ ID NO: 4418522 - DNA, 25 bp, Homo sapien
ccatagccaacttctgatccagcca

SEQ ID NO: 4418523 - DNA, 25 bp, Homo sapien
tccccatagccaacttctgatccag

SEQ ID NO: 4418524 - DNA, 25 bp, Homo sapien
cccatagccaacttctgatccagcc

SEQ ID NO: 4418525 - DNA, 25 bp, Homo sapien
catgtgcattacatggatatagata

SEQ ID NO: 4418526 - DNA, 25 bp, Homo sapien
gcaggtcatcgatggaggggtcagc

SEQ ID NO: 4418527 - DNA, 25 bp, Homo sapien
gcagaagcaggtcatcgatggaggg

SEQ ID NO: 4418528 - DNA, 25 bp, Homo sapien
gaagcaggtcatcgatggaggggtc

SEQ ID NO: 4418529 - DNA, 25 bp, Homo sapien
agcagaagcaggtcatcgatggagg

SEQ ID NO: 4418530 - DNA, 25 bp, Homo sapien
gagaagataccaggcctctgctccg

SEQ ID NO: 4418531 - DNA, 25 bp, Homo sapien
gaagataccaggcctctgctccggt

SEQ ID NO: 4418532 - DNA, 25 bp, Homo sapien
aagataccaggcctctgctccggtg

SEQ ID NO: 4418533 - DNA, 25 bp, Homo sapien
tgagaagataccaggcctctgctcc

SEQ ID NO: 4418534 - DNA, 25 bp, Homo sapien
agcaagcatctacagcaagggtggg

SEQ ID NO: 4418535 - DNA, 25 bp, Homo sapien
gcaagcatctacagcaagggtgggg

SEQ ID NO: 4418536 - DNA, 25 bp, Homo sapien
caagcatctacagcaagggtggggt

SEQ ID NO: 4418537 - DNA, 25 bp, Homo sapien
gaggaagttgagcctttcgttcagc

SEQ ID NO: 4418538 - DNA, 25 bp, Homo sapien
aggaggaagttgagcctttcgttca

SEQ ID NO: 4418539 - DNA, 25 bp, Homo sapien
ggaggaagttgagcctttcgttcag

SEQ ID NO: 4418540 - DNA, 25 bp, Homo sapien
ggttctgcctcttgtcctggaactt

SEQ ID NO: 4418541 - DNA, 25 bp, Homo sapien
gttctgcctcttgtcctggaacttg

SEQ ID NO: 4418542 - DNA, 25 bp, Homo sapien
cttccttgggggtgatagcactcag

SEQ ID NO: 4418543 - DNA, 25 bp, Homo sapien
agacctgttggatccagcagtgggt

SEQ ID NO: 4418544 - DNA, 25 bp, Homo sapien
ccttccttgggggtgatagcactca

SEQ ID NO: 4418545 - DNA, 25 bp, Homo sapien
ggcactggggcagacctgttggatc

SEQ ID NO: 4418546 - DNA, 25 bp, Homo sapien
cactcaggaacttctttcccgttgg

SEQ ID NO: 4418547 - DNA, 25 bp, Homo sapien
agagtgggaatttccagtcctggtt

SEQ ID NO: 4418548 - DNA, 25 bp, Homo sapien
agctccaggaatgcctctgcattcc

SEQ ID NO: 4418549 - DNA, 25 bp, Homo sapien
cagctccaggaatgcctctgcattc

SEQ ID NO: 4418550 - DNA, 25 bp, Homo sapien
tcactgaatccagggattcttaggt

SEQ ID NO: 4418551 - DNA, 25 bp, Homo sapien
actgaatccagggattcttaggtcc

SEQ ID NO: 4418552 - DNA, 25 bp, Homo sapien
ctgaatccagggattcttaggtcca

SEQ ID NO: 4418553 - DNA, 25 bp, Homo sapien
tgaatccagggattcttaggtccac

SEQ ID NO: 4418554 - DNA, 25 bp, Homo sapien
cttcaggcttcttggcgctcagcct

SEQ ID NO: 4418555 - DNA, 25 bp, Homo sapien
gactctgaatgcttttcccgctaga

SEQ ID NO: 4418556 - DNA, 25 bp, Homo sapien
tcccgctagattctggaatcttcag

SEQ ID NO: 4418557 - DNA, 25 bp, Homo sapien
ctgttcgttgatccccctgctgctt

SEQ ID NO: 4418558 - DNA, 25 bp, Homo sapien
gggtgccattacgtcttaaagctcc

SEQ ID NO: 4418559 - DNA, 25 bp, Homo sapien
cagcagggtgccattacgtcttaaa

SEQ ID NO: 4418560 - DNA, 25 bp, Homo sapien
gcagggtgccattacgtcttaaagc

SEQ ID NO: 4418561 - DNA, 25 bp, Homo sapien
gtgccattacgtcttaaagctccaa

SEQ ID NO: 4418562 - DNA, 25 bp, Homo sapien
aacttacaatcttgtggtggaggaa

SEQ ID NO: 4418563 - DNA, 25 bp, Homo sapien
agaaaacttacaatcttgtggtgga

SEQ ID NO: 4418564 - DNA, 25 bp, Homo sapien
acttacaatcttgtggtggaggaag

SEQ ID NO: 4418565 - DNA, 25 bp, Homo sapien
cttacaatcttgtggtggaggaagg

SEQ ID NO: 4418566 - DNA, 25 bp, Homo sapien
tgacctgacaccatcgatgctggaa

SEQ ID NO: 4418567 - DNA, 25 bp, Homo sapien
tgacaccatcgatgctggaagtggc

SEQ ID NO: 4418568 - DNA, 25 bp, Homo sapien
agaggacctgacctgacaccatcga

SEQ ID NO: 4418569 - DNA, 25 bp, Homo sapien
acctgacctgacaccatcgatgctg

SEQ ID NO: 4418570 - DNA, 25 bp, Homo sapien
aaaaattgagagtcgccatcttggt

SEQ ID NO: 4418571 - DNA, 25 bp, Homo sapien
gagtcgccatcttggttgtctgcct

SEQ ID NO: 4418572 - DNA, 25 bp, Homo sapien
attgagagtcgccatcttggttgtc

SEQ ID NO: 4418573 - DNA, 25 bp, Homo sapien
cgccatcttggttgtctgccttctc

SEQ ID NO: 4418574 - DNA, 25 bp, Homo sapien
cactggcgtattgaaagaatggctc

SEQ ID NO: 4418575 - DNA, 25 bp, Homo sapien
tgtgacaatatctacccaaccctct

SEQ ID NO: 4418576 - DNA, 25 bp, Homo sapien
tctccaaggcttgcaagaataggat

SEQ ID NO: 4418577 - DNA, 25 bp, Homo sapien
gattcccaaatggatctggagtctc

SEQ ID NO: 4418578 - DNA, 25 bp, Homo sapien
cagctgcttctatccatgggtgcac

SEQ ID NO: 4418579 - DNA, 25 bp, Homo sapien
atcaaattaatgagtgcctgtccca

SEQ ID NO: 4418580 - DNA, 25 bp, Homo sapien
ccttgaaaacgtcttccaggagctt

SEQ ID NO: 4418581 - DNA, 25 bp, Homo sapien
ctagggaactcaggaaacattgggc

SEQ ID NO: 4418582 - DNA, 25 bp, Homo sapien
acagagcccagaggttgcaagggca

SEQ ID NO: 4418583 - DNA, 25 bp, Homo sapien
cctagaaccccgtggcatttgtcaa

SEQ ID NO: 4418584 - DNA, 25 bp, Homo sapien
ccctctgaagtaggaaagcgaaagc

SEQ ID NO: 4418585 - DNA, 25 bp, Homo sapien
tctgggcaggaacaatcttactact

SEQ ID NO: 4418586 - DNA, 25 bp, Homo sapien
cctggatgctcagtggcttcagcca

SEQ ID NO: 4418587 - DNA, 25 bp, Homo sapien
actcaggtgggagggatcctggatg

SEQ ID NO: 4418588 - DNA, 25 bp, Homo sapien
ctcaggtgggagggatcctggatgc

SEQ ID NO: 4418589 - DNA, 25 bp, Homo sapien
ctggatgctcagtggcttcagccag

SEQ ID NO: 4418590 - DNA, 25 bp, Homo sapien
ctgccaggagcttggagcaacctga

SEQ ID NO: 4418591 - DNA, 25 bp, Homo sapien
tctcactaagctaggccttatccac

SEQ ID NO: 4418592 - DNA, 25 bp, Homo sapien
ttggagcaacctgagtccacaccag

SEQ ID NO: 4418593 - DNA, 25 bp, Homo sapien
ccagctctcactaagctaggcctta

SEQ ID NO: 4418594 - DNA, 25 bp, Homo sapien
ggcagttctgtctcctgtccgtggg

SEQ ID NO: 4418595 - DNA, 25 bp, Homo sapien
catagcttgagccaatgacgggaac

SEQ ID NO: 4418596 - DNA, 25 bp, Homo sapien
tatcccggcgcttggctataatgca

SEQ ID NO: 4418597 - DNA, 25 bp, Homo sapien
tgtccgtgggagtgctttaactctg

SEQ ID NO: 4418598 - DNA, 25 bp, Homo sapien
gctgctttggccgtgaatgtgacac

SEQ ID NO: 4418599 - DNA, 25 bp, Homo sapien
tggacctgttgggtttgagacacca

SEQ ID NO: 4418600 - DNA, 25 bp, Homo sapien
tgaggacctccgagattcttccaga

SEQ ID NO: 4418601 - DNA, 25 bp, Homo sapien
gtgacacatacgtactttggacctg

SEQ ID NO: 4418602 - DNA, 25 bp, Homo sapien
ttcagaggccgaaaaatactcagca

SEQ ID NO: 4418603 - DNA, 25 bp, Homo sapien
ttgagaggaccccagaatttcgctt

SEQ ID NO: 4418604 - DNA, 25 bp, Homo sapien
catgtgaccgtcctgttcagaggcc

SEQ ID NO: 4418605 - DNA, 25 bp, Homo sapien
aaggcaacccctggcaatgacaaag

SEQ ID NO: 4418606 - DNA, 25 bp, Homo sapien
ggtcatttccaagcagtcgaagcat

SEQ ID NO: 4418607 - DNA, 25 bp, Homo sapien
cgcgtttagcgcaaggaaggtcctg

SEQ ID NO: 4418608 - DNA, 25 bp, Homo sapien
gattcagactttggtgcattcccag

SEQ ID NO: 4418609 - DNA, 25 bp, Homo sapien
tgtgatggatttaccacagggccac

SEQ ID NO: 4418610 - DNA, 25 bp, Homo sapien
tatccgcttgaagtcagccctgaga

SEQ ID NO: 4418611 - DNA, 25 bp, Homo sapien
tgcgagttgtcctcacagaaaacag

SEQ ID NO: 4418612 - DNA, 25 bp, Homo sapien
ggaatgtcgtatgtgggcaagctca

SEQ ID NO: 4418613 - DNA, 25 bp, Homo sapien
tggagcaggcaatcagctgtgtcgc

SEQ ID NO: 4418614 - DNA, 25 bp, Homo sapien
ttgtgcactgagctttctgtggcta

SEQ ID NO: 4418615 - DNA, 25 bp, Homo sapien
agggtgtgtctttactttgtgcact

SEQ ID NO: 4418616 - DNA, 25 bp, Homo sapien
caagggtgtgtctttactttgtgca

SEQ ID NO: 4418617 - DNA, 25 bp, Homo sapien
tgtgcactgagctttctgtggctat

SEQ ID NO: 4418618 - DNA, 25 bp, Homo sapien
tagacatcttgcctcctgaagtagc

SEQ ID NO: 4418619 - DNA, 25 bp, Homo sapien
gaagtgctctcgttctcagtagcgg

SEQ ID NO: 4418620 - DNA, 25 bp, Homo sapien
tatgccattaacctgagaatacgtg

SEQ ID NO: 4418621 - DNA, 25 bp, Homo sapien
gccagtagtgtctttgaggagttca

SEQ ID NO: 4418622 - DNA, 25 bp, Homo sapien
aagtcattatgcctggttcccctac

SEQ ID NO: 4418623 - DNA, 25 bp, Homo sapien
tggagatgcatgtaacgccggcttg

SEQ ID NO: 4418624 - DNA, 25 bp, Homo sapien
tttcacggttgccaaaacagacttg

SEQ ID NO: 4418625 - DNA, 25 bp, Homo sapien
gctccaaatgtctaactccagatga

SEQ ID NO: 4418626 - DNA, 25 bp, Homo sapien
catgaatggcggctctcccagtctc

SEQ ID NO: 4418627 - DNA, 25 bp, Homo sapien
tccagctgccggcgccctggtggcc

SEQ ID NO: 4418628 - DNA, 25 bp, Homo sapien
ctctgcatgaatggcggctctccca

SEQ ID NO: 4418629 - DNA, 25 bp, Homo sapien
agcaaaatggcccggagtccctctg

SEQ ID NO: 4418630 - DNA, 25 bp, Homo sapien
tgagaccaggcgcattcaggtcggt

SEQ ID NO: 4418631 - DNA, 25 bp, Homo sapien
aagtctacagcaccgggtctcccca

SEQ ID NO: 4418632 - DNA, 25 bp, Homo sapien
cttctgagaccaggcgcattcaggt

SEQ ID NO: 4418633 - DNA, 25 bp, Homo sapien
accaggcgcattcaggtcggtccag

SEQ ID NO: 4418634 - DNA, 25 bp, Homo sapien
tgaccttgacgtcaaacaactggaa

SEQ ID NO: 4418635 - DNA, 25 bp, Homo sapien
ttctctcagcaggttgtccactcca

SEQ ID NO: 4418636 - DNA, 25 bp, Homo sapien
gactctaggtttctggaactcaaaa

SEQ ID NO: 4418637 - DNA, 25 bp, Homo sapien
tatctactgctctacagacctgaag

SEQ ID NO: 4418638 - DNA, 25 bp, Homo sapien
ttccatttggcaggtcctcaagagc

SEQ ID NO: 4418639 - DNA, 25 bp, Homo sapien
tgcaagccttccattgaaaaaactt

SEQ ID NO: 4418640 - DNA, 25 bp, Homo sapien
cagaactttccatagggctccaggt

SEQ ID NO: 4418641 - DNA, 25 bp, Homo sapien
cacacgtgttaaaagccatgtcctt

SEQ ID NO: 4418642 - DNA, 25 bp, Homo sapien
gccaggcactggaaactcgaagagt

SEQ ID NO: 4418643 - DNA, 25 bp, Homo sapien
caggcactggaaactcgaagagtaa

SEQ ID NO: 4418644 - DNA, 25 bp, Homo sapien
cactggaaactcgaagagtaaagtc

SEQ ID NO: 4418645 - DNA, 25 bp, Homo sapien
ctggaaactcgaagagtaaagtcct

SEQ ID NO: 4418646 - DNA, 25 bp, Homo sapien
ctggtcacttcaggcactccacaga

SEQ ID NO: 4418647 - DNA, 25 bp, Homo sapien
cttacaaaaagctggtcacttcagg

SEQ ID NO: 4418648 - DNA, 25 bp, Homo sapien
aaccagccaagaggctaagcccagc

SEQ ID NO: 4418649 - DNA, 25 bp, Homo sapien
ggcgcgtaatgccctgctgtgcaga

SEQ ID NO: 4418650 - DNA, 25 bp, Homo sapien
agtacaagatgtgcgctttgattct

SEQ ID NO: 4418651 - DNA, 25 bp, Homo sapien
aggagagcccttcctatgggcatca

SEQ ID NO: 4418652 - DNA, 25 bp, Homo sapien
gaggagagcccttcctatgggcatc

SEQ ID NO: 4418653 - DNA, 25 bp, Homo sapien
gcatcaaagtacaagatgtgcgctt

SEQ ID NO: 4418654 - DNA, 25 bp, Homo sapien
actacagacgtgcaccactatgccc

SEQ ID NO: 4418655 - DNA, 25 bp, Homo sapien
ctacagacgtgcaccactatgcccg

SEQ ID NO: 4418656 - DNA, 25 bp, Homo sapien
gaagatcaatccatgaggcccagaa

SEQ ID NO: 4418657 - DNA, 25 bp, Homo sapien
tctcaacagcaatagtggacattgg

SEQ ID NO: 4418658 - DNA, 25 bp, Homo sapien
ttaaaggaccaatcaagagcccagc

SEQ ID NO: 4418659 - DNA, 25 bp, Homo sapien
tcaggatgactttggatttctcaac

SEQ ID NO: 4418660 - DNA, 25 bp, Homo sapien
cccgcagagctagagaccgatgata

SEQ ID NO: 4418661 - DNA, 25 bp, Homo sapien
tccaagggaacagacatactctaga

SEQ ID NO: 4418662 - DNA, 25 bp, Homo sapien
cattgtataggcgacagacactccc

SEQ ID NO: 4418663 - DNA, 25 bp, Homo sapien
tgcaaaggcacgaaaactccaaggg

SEQ ID NO: 4418664 - DNA, 25 bp, Homo sapien
gctgcggcggtgggagcgctgaatc

SEQ ID NO: 4418665 - DNA, 25 bp, Homo sapien
ggctgcggcggtgggagcgctgaat

SEQ ID NO: 4418666 - DNA, 25 bp, Homo sapien
ctgcggcggtgggagcgctgaatcc

SEQ ID NO: 4418667 - DNA, 25 bp, Homo sapien
tgcggcggtgggagcgctgaatcct

SEQ ID NO: 4418668 - DNA, 25 bp, Homo sapien
tatttttggccacggctcgtcctgc

SEQ ID NO: 4418669 - DNA, 25 bp, Homo sapien
agggctgagtaggatatttttggcc

SEQ ID NO: 4418670 - DNA, 25 bp, Homo sapien
taggatatttttggccacggctcgt

SEQ ID NO: 4418671 - DNA, 25 bp, Homo sapien
gagtaggatatttttggccacggct

SEQ ID NO: 4418672 - DNA, 25 bp, Homo sapien
tctctaatttagcactcagcagagc

SEQ ID NO: 4418673 - DNA, 25 bp, Homo sapien
tcagcagagcctgacacctcttaga

SEQ ID NO: 4418674 - DNA, 25 bp, Homo sapien
ttagactgtttcactaggagctgcc

SEQ ID NO: 4418675 - DNA, 25 bp, Homo sapien
tacaggaagttatataagtaacagc

SEQ ID NO: 4418676 - DNA, 25 bp, Homo sapien
aggtagaaggtgaaacagctgcaag

SEQ ID NO: 4418677 - DNA, 25 bp, Homo sapien
ctggctccacgcaaggtagaaggtg

SEQ ID NO: 4418678 - DNA, 25 bp, Homo sapien
tgtagccttcgctcagcagagacga

SEQ ID NO: 4418679 - DNA, 25 bp, Homo sapien
tcagattcggtgcaaaagcctggct

SEQ ID NO: 4418680 - DNA, 25 bp, Homo sapien
caccaggttgttggaccgcagggat

SEQ ID NO: 4418681 - DNA, 25 bp, Homo sapien
ttctagagcggcaagctgctgctca

SEQ ID NO: 4418682 - DNA, 25 bp, Homo sapien
cagctgtccagcgtaagaatttccc

SEQ ID NO: 4418683 - DNA, 25 bp, Homo sapien
gatggaattgtgcaagacctcttca

SEQ ID NO: 4418684 - DNA, 25 bp, Homo sapien
taaaaaccatctttaatgtcattgt

SEQ ID NO: 4418685 - DNA, 25 bp, Homo sapien
agcaccctggtcataaaaaccatct

SEQ ID NO: 4418686 - DNA, 25 bp, Homo sapien
tcataaaaaccatctttaatgtcat

SEQ ID NO: 4418687 - DNA, 25 bp, Homo sapien
cagcaccctggtcataaaaaccatc

SEQ ID NO: 4418688 - DNA, 25 bp, Homo sapien
cattctataacagggtcaggtatgg

SEQ ID NO: 4418689 - DNA, 25 bp, Homo sapien
tatggtatggatgtaggaagctttt

SEQ ID NO: 4418690 - DNA, 25 bp, Homo sapien
caggtatggtatggatgtaggaagc

SEQ ID NO: 4418691 - DNA, 25 bp, Homo sapien
agccattctataacagggtcaggta

SEQ ID NO: 4418692 - DNA, 25 bp, Homo sapien
tcctcattgtccactcggctaccac

SEQ ID NO: 4418693 - DNA, 25 bp, Homo sapien
cttcctcattgtccactcggctacc

SEQ ID NO: 4418694 - DNA, 25 bp, Homo sapien
gagggtgcagctggaaagggtttgg

SEQ ID NO: 4418695 - DNA, 25 bp, Homo sapien
agggtgcagctggaaagggtttggg

SEQ ID NO: 4418696 - DNA, 25 bp, Homo sapien
aaatggagacaaggcgcaggtcctt

SEQ ID NO: 4418697 - DNA, 25 bp, Homo sapien
tctggcaagaacctcttgtcaacgg

SEQ ID NO: 4418698 - DNA, 25 bp, Homo sapien
tcaacggcgcacaccaggagatggt

SEQ ID NO: 4418699 - DNA, 25 bp, Homo sapien
ccccacgaggagaaagcccgcaggg

SEQ ID NO: 4418700 - DNA, 25 bp, Homo sapien
gatcaaaggctagtggtgccggtgg

SEQ ID NO: 4418701 - DNA, 25 bp, Homo sapien
aaagatcaaaggctagtggtgccgg

SEQ ID NO: 4418702 - DNA, 25 bp, Homo sapien
gaaagatcaaaggctagtggtgccg

SEQ ID NO: 4418703 - DNA, 25 bp, Homo sapien
aagatcaaaggctagtggtgccggt

SEQ ID NO: 4418704 - DNA, 25 bp, Homo sapien
ttctctgccaagatgggactggctg

SEQ ID NO: 4418705 - DNA, 25 bp, Homo sapien
ctctgccaagatgggactggctgtt

SEQ ID NO: 4418706 - DNA, 25 bp, Homo sapien
tctctgccaagatgggactggctgt

SEQ ID NO: 4418707 - DNA, 25 bp, Homo sapien
ccaccgtgcctagctgattgttttg

SEQ ID NO: 4418708 - DNA, 25 bp, Homo sapien
gcatctgccaccgtgcctagctgat

SEQ ID NO: 4418709 - DNA, 25 bp, Homo sapien
accgtgcctagctgattgttttgta

SEQ ID NO: 4418710 - DNA, 25 bp, Homo sapien
tctgccaccgtgcctagctgattgt

SEQ ID NO: 4418711 - DNA, 25 bp, Homo sapien
cagattaaaggtcctttggttagag

SEQ ID NO: 4418712 - DNA, 25 bp, Homo sapien
ggttagagtcccttgtgcattacgg

SEQ ID NO: 4418713 - DNA, 25 bp, Homo sapien
cagtttcagatttatatgattggag

SEQ ID NO: 4418714 - DNA, 25 bp, Homo sapien
cggaccaggtaatacttcaagtgtt

SEQ ID NO: 4418715 - DNA, 25 bp, Homo sapien
gggcaaggtgcacacgtgaaaacca

SEQ ID NO: 4418716 - DNA, 25 bp, Homo sapien
gtgcacacgtgaaaaccaactcgct

SEQ ID NO: 4418717 - DNA, 25 bp, Homo sapien
cagtgagctatggagacagccacac

SEQ ID NO: 4418718 - DNA, 25 bp, Homo sapien
gctcttctccaacaactacgaaatg

SEQ ID NO: 4418719 - DNA, 25 bp, Homo sapien
tggcggggatctgccggcttctaaa

SEQ ID NO: 4418720 - DNA, 25 bp, Homo sapien
ttcgtcccaggaacgggctcgctgg

SEQ ID NO: 4418721 - DNA, 25 bp, Homo sapien
gatgctggggttcgtcccaggaacg

SEQ ID NO: 4418722 - DNA, 25 bp, Homo sapien
tggaacaagtactggcggggatctg

SEQ ID NO: 4418723 - DNA, 25 bp, Homo sapien
gctctgtgggtttagcagctctggt

SEQ ID NO: 4418724 - DNA, 25 bp, Homo sapien
ggacacatcggagacagtgccagct

SEQ ID NO: 4418725 - DNA, 25 bp, Homo sapien
caaattcaagatgaaagtaaaggtg

SEQ ID NO: 4418726 - DNA, 25 bp, Homo sapien
ttgaagaatgcttgacggcatagtc

SEQ ID NO: 4418727 - DNA, 25 bp, Homo sapien
ctaaagccgatggtcgcggcagggc

SEQ ID NO: 4418728 - DNA, 25 bp, Homo sapien
cggacccattgctgcgtttagtgag

SEQ ID NO: 4418729 - DNA, 25 bp, Homo sapien
gaatctttgccgttgaaaacagccg

SEQ ID NO: 4418730 - DNA, 25 bp, Homo sapien
cagggccaacaggttattctttgcc

SEQ ID NO: 4418731 - DNA, 25 bp, Homo sapien
ggtcactcgccattaccacaggtgt

SEQ ID NO: 4418732 - DNA, 25 bp, Homo sapien
actgctccttggcacatacggtaac

SEQ ID NO: 4418733 - DNA, 25 bp, Homo sapien
agctgtgcagcccataggacaggtc

SEQ ID NO: 4418734 - DNA, 25 bp, Homo sapien
ctaacaagagacagcggtaggtttt

SEQ ID NO: 4418735 - DNA, 25 bp, Homo sapien
tcccgggctgaaggaggccctcatc

SEQ ID NO: 4418736 - DNA, 25 bp, Homo sapien
gcagccacagggttgcccccaaatg

SEQ ID NO: 4418737 - DNA, 25 bp, Homo sapien
ccaaatgcagcaccggcagagaagc

SEQ ID NO: 4418738 - DNA, 25 bp, Homo sapien
gcagcgtggcatccccagcatcctc

SEQ ID NO: 4418739 - DNA, 25 bp, Homo sapien
tccaagatgcacatgaccaaggcgc

SEQ ID NO: 4418740 - DNA, 25 bp, Homo sapien
atgcacatgaccaaggcgctgccct

SEQ ID NO: 4418741 - DNA, 25 bp, Homo sapien
cgctgccctcgggaactgcacagcg

SEQ ID NO: 4418742 - DNA, 25 bp, Homo sapien
ctcgggaactgcacagcgccgaggc

SEQ ID NO: 4418743 - DNA, 25 bp, Homo sapien
tatgtagagtgctttgtgcaacgaa

SEQ ID NO: 4418744 - DNA, 25 bp, Homo sapien
gcttggacccaataaggtagccaga

SEQ ID NO: 4418745 - DNA, 25 bp, Homo sapien
tgtgtctaaacgatctctctctgag

SEQ ID NO: 4418746 - DNA, 25 bp, Homo sapien
ggacactaaatcctactctgaaagg

SEQ ID NO: 4418747 - DNA, 25 bp, Homo sapien
gtgcggacacccgatcggcatagcg

SEQ ID NO: 4418748 - DNA, 25 bp, Homo sapien
cctggtggtcctccactcccgggag

SEQ ID NO: 4418749 - DNA, 25 bp, Homo sapien
ccatattgatgccaaacttagtgcg

SEQ ID NO: 4418750 - DNA, 25 bp, Homo sapien
gtggtcctccactcccgggaggtca

SEQ ID NO: 4418751 - DNA, 25 bp, Homo sapien
tttaaggacctagtgaaatatctat

SEQ ID NO: 4418752 - DNA, 25 bp, Homo sapien
gaaatatctatgcataaggaaatgt

SEQ ID NO: 4418753 - DNA, 25 bp, Homo sapien
atatctatgcataaggaaatgtcaa

SEQ ID NO: 4418754 - DNA, 25 bp, Homo sapien
aaggacctagtgaaatatctatgca

SEQ ID NO: 4418755 - DNA, 25 bp, Homo sapien
acttagctctgttcccaccaccttg

SEQ ID NO: 4418756 - DNA, 25 bp, Homo sapien
aaatatcactggcttggccttgcat

SEQ ID NO: 4418757 - DNA, 25 bp, Homo sapien
atattttcagcaagttgtcaggaac

SEQ ID NO: 4418758 - DNA, 25 bp, Homo sapien
ggtgactgaagctggtcccaccaag

SEQ ID NO: 4418759 - DNA, 25 bp, Homo sapien
ggaacagacactggttctccagagg

SEQ ID NO: 4418760 - DNA, 25 bp, Homo sapien
caggttctgccggaccaagggctac

SEQ ID NO: 4418761 - DNA, 25 bp, Homo sapien
ggcgatgcaggttctgccggaccaa

SEQ ID NO: 4418762 - DNA, 25 bp, Homo sapien
ccatttgggtagcaccatttacaaa

SEQ ID NO: 4418763 - DNA, 25 bp, Homo sapien
gaccaagggctaccatttgggtagc

SEQ ID NO: 4418764 - DNA, 25 bp, Homo sapien
ggtgaagctatcaaatcctctcggg

SEQ ID NO: 4418765 - DNA, 25 bp, Homo sapien
taaaaccaggtgaagcggtgaagct

SEQ ID NO: 4418766 - DNA, 25 bp, Homo sapien
tgctgagctcccaaaggtggcgtgt

SEQ ID NO: 4418767 - DNA, 25 bp, Homo sapien
cagtctccgcatttgtaaaaccagg

SEQ ID NO: 4418768 - DNA, 25 bp, Homo sapien
gagcctaggatgagaggagtcacct

SEQ ID NO: 4418769 - DNA, 25 bp, Homo sapien
caccaatgggacaccttgtgggcag

SEQ ID NO: 4418770 - DNA, 25 bp, Homo sapien
agataggtgagctgcgccaggtccc

SEQ ID NO: 4418771 - DNA, 25 bp, Homo sapien
gtcttgtgcacagcttacggtccca

SEQ ID NO: 4418772 - DNA, 25 bp, Homo sapien
cgtatgcccgtgagacagactggga

SEQ ID NO: 4418773 - DNA, 25 bp, Homo sapien
cattcaggttcccacagaggtaagg

SEQ ID NO: 4418774 - DNA, 25 bp, Homo sapien
tagtagacggtaagcaggagctgca

SEQ ID NO: 4418775 - DNA, 25 bp, Homo sapien
gactgggaattctggtagcacgtgt

SEQ ID NO: 4418776 - DNA, 25 bp, Homo sapien
ttatacgtccggatttcgtatttga

SEQ ID NO: 4418777 - DNA, 25 bp, Homo sapien
acgtccggatttcgtatttgatgtg

SEQ ID NO: 4418778 - DNA, 25 bp, Homo sapien
tatacgtccggatttcgtatttgat

SEQ ID NO: 4418779 - DNA, 25 bp, Homo sapien
tacgtccggatttcgtatttgatgt

SEQ ID NO: 4418780 - DNA, 25 bp, Homo sapien
tgcatcggacaagcgctggttttac

SEQ ID NO: 4418781 - DNA, 25 bp, Homo sapien
gagcaccaccgtttacttagcaagg

SEQ ID NO: 4418782 - DNA, 25 bp, Homo sapien
tttaccacgcgaacggtgcatcgga

SEQ ID NO: 4418783 - DNA, 25 bp, Homo sapien
taatgtcccatcatacgtgagcacc

SEQ ID NO: 4418784 - DNA, 25 bp, Homo sapien
gaccaacagccggaacatctcggag

SEQ ID NO: 4418785 - DNA, 25 bp, Homo sapien
cagggagtaagcacactcgatgacg

SEQ ID NO: 4418786 - DNA, 25 bp, Homo sapien
tgccggatctcggtcaggtgcgact

SEQ ID NO: 4418787 - DNA, 25 bp, Homo sapien
ggcgcctgctggtactgccggatct

SEQ ID NO: 4418788 - DNA, 25 bp, Homo sapien
tctggtactccgcaggagtgagaag

SEQ ID NO: 4418789 - DNA, 25 bp, Homo sapien
ctctcggaaagaatccgggcttggt

SEQ ID NO: 4418790 - DNA, 25 bp, Homo sapien
agggtgctaaagaaggcccccagcg

SEQ ID NO: 4418791 - DNA, 25 bp, Homo sapien
ttccccgtaaccagctcgtaattga

SEQ ID NO: 4418792 - DNA, 25 bp, Homo sapien
gggatgctgctttagtgacagaaga

SEQ ID NO: 4418793 - DNA, 25 bp, Homo sapien
tgaggaagaaatatggccttgattt

SEQ ID NO: 4418794 - DNA, 25 bp, Homo sapien
ttgtgcacaccggtgtcccactgac

SEQ ID NO: 4418795 - DNA, 25 bp, Homo sapien
ttcctggtgaaatttgtccagcaaa

SEQ ID NO: 4418796 - DNA, 25 bp, Homo sapien
aaaggatcccaggtccagattttgg

SEQ ID NO: 4418797 - DNA, 25 bp, Homo sapien
aagggccggatgctgtgtggctcca

SEQ ID NO: 4418798 - DNA, 25 bp, Homo sapien
cagattttgggtgctggaatccgca

SEQ ID NO: 4418799 - DNA, 25 bp, Homo sapien
ggaatgcaaatgagaaagtccacct

SEQ ID NO: 4418800 - DNA, 25 bp, Homo sapien
ctggaaggagttttgcagaaaagcc

SEQ ID NO: 4418801 - DNA, 25 bp, Homo sapien
tgttccaccctctgcttcgtcatgt

SEQ ID NO: 4418802 - DNA, 25 bp, Homo sapien
tcacaagatcccagtgcgcatggtc

SEQ ID NO: 4418803 - DNA, 25 bp, Homo sapien
tgtgcctccgtgtctagcttcagaa

SEQ ID NO: 4418804 - DNA, 25 bp, Homo sapien
gcagttgagcaatcggtccaccaat

SEQ ID NO: 4418805 - DNA, 25 bp, Homo sapien
gctgtgtctgcagtgcatacgggaa

SEQ ID NO: 4418806 - DNA, 25 bp, Homo sapien
aggcaggccagtggatctcgttgta

SEQ ID NO: 4418807 - DNA, 25 bp, Homo sapien
ccaccgacgggtcactttgagaata

SEQ ID NO: 4418808 - DNA, 25 bp, Homo sapien
tggcctcaaaggagctatcgtatct

SEQ ID NO: 4418809 - DNA, 25 bp, Homo sapien
tcaataaactccgacagcccgaagt

SEQ ID NO: 4418810 - DNA, 25 bp, Homo sapien
tgtgtcctgaaagggtggattcaat

SEQ ID NO: 4418811 - DNA, 25 bp, Homo sapien
ttttcctaatgcagtgaccatggcc

SEQ ID NO: 4418812 - DNA, 25 bp, Homo sapien
tgttgttattacgtttttccagcat

SEQ ID NO: 4418813 - DNA, 25 bp, Homo sapien
aaatggtataaatgcctattttgtc

SEQ ID NO: 4418814 - DNA, 25 bp, Homo sapien
gcctctggttcctactagaaacagg

SEQ ID NO: 4418815 - DNA, 25 bp, Homo sapien
ttgtctctatcagcacaatgtgcag

SEQ ID NO: 4418816 - DNA, 25 bp, Homo sapien
cattatacgcagttgtgttgcctct

SEQ ID NO: 4418817 - DNA, 25 bp, Homo sapien
tgccaagtcacccaagacatccgtc

SEQ ID NO: 4418818 - DNA, 25 bp, Homo sapien
cagttgtgttgcctctggaaggtgg

SEQ ID NO: 4418819 - DNA, 25 bp, Homo sapien
ggcaactccggcattatacgcagtt

SEQ ID NO: 4418820 - DNA, 25 bp, Homo sapien
agagagaccatgtctgtgacggccg

SEQ ID NO: 4418821 - DNA, 25 bp, Homo sapien
agaccatgtctgtgacggccgcgcc

SEQ ID NO: 4418822 - DNA, 25 bp, Homo sapien
agagaccatgtctgtgacggccgcg

SEQ ID NO: 4418823 - DNA, 25 bp, Homo sapien
acagagagaccatgtctgtgacggc

SEQ ID NO: 4418824 - DNA, 25 bp, Homo sapien
tgctttacgaagtgcttccccacgg

SEQ ID NO: 4418825 - DNA, 25 bp, Homo sapien
gaggttctgcgtgatctccagcgtc

SEQ ID NO: 4418826 - DNA, 25 bp, Homo sapien
gtagttcttcatctgcgggaggccg

SEQ ID NO: 4418827 - DNA, 25 bp, Homo sapien
gagaacaaaggtcctgatcaccgcg

SEQ ID NO: 4418828 - DNA, 25 bp, Homo sapien
atggagattagccagccagagcatg

SEQ ID NO: 4418829 - DNA, 25 bp, Homo sapien
ggccaccgtattttcagtcggctag

SEQ ID NO: 4418830 - DNA, 25 bp, Homo sapien
cgtattttcagtcggctagaacatg

SEQ ID NO: 4418831 - DNA, 25 bp, Homo sapien
catccacttggccaccgtattttca

SEQ ID NO: 4418832 - DNA, 25 bp, Homo sapien
ccatgcgggtccatcccactgaaga

SEQ ID NO: 4418833 - DNA, 25 bp, Homo sapien
aggatgcaaggcagaccctccagct

SEQ ID NO: 4418834 - DNA, 25 bp, Homo sapien
actgaagatcaggatgcaaggcaga

SEQ ID NO: 4418835 - DNA, 25 bp, Homo sapien
gcaaggactccccatgcgggtccat

SEQ ID NO: 4418836 - DNA, 25 bp, Homo sapien
ccttctccaagggaacctcgttgct

SEQ ID NO: 4418837 - DNA, 25 bp, Homo sapien
agcaggaggagtttatcaatcgcag

SEQ ID NO: 4418838 - DNA, 25 bp, Homo sapien
aatcgcaggtcacagtacctcaaag

SEQ ID NO: 4418839 - DNA, 25 bp, Homo sapien
ctccaagggaacctcgttgctcaca

SEQ ID NO: 4418840 - DNA, 25 bp, Homo sapien
gatgctgagtcgtgggagcgggacc

SEQ ID NO: 4418841 - DNA, 25 bp, Homo sapien
gatgaggatgctgagtcgtgggagc

SEQ ID NO: 4418842 - DNA, 25 bp, Homo sapien
agtcgtgggagcgggacctctccct

SEQ ID NO: 4418843 - DNA, 25 bp, Homo sapien
tgggagcgggacctctcccttttca

SEQ ID NO: 4418844 - DNA, 25 bp, Homo sapien
tgatggccgagggtggcccctgact

SEQ ID NO: 4418845 - DNA, 25 bp, Homo sapien
gaggactcgccaccgagcgctgaac

SEQ ID NO: 4418846 - DNA, 25 bp, Homo sapien
gggcgacctggcatgctctccctgg

SEQ ID NO: 4418847 - DNA, 25 bp, Homo sapien
tgggctgagccgaggactcgccacc

SEQ ID NO: 4418848 - DNA, 25 bp, Homo sapien
ccggtcctgaggctacagtcgggct

SEQ ID NO: 4418849 - DNA, 25 bp, Homo sapien
gcaccgtccactgccggtagtagag

SEQ ID NO: 4418850 - DNA, 25 bp, Homo sapien
tgtcgtacacgagcttgggcaagaa

SEQ ID NO: 4418851 - DNA, 25 bp, Homo sapien
tgtcagtggacacaaccatgtcgta

SEQ ID NO: 4418852 - DNA, 25 bp, Homo sapien
ggaactgcaggtaggcacctgtctt

SEQ ID NO: 4418853 - DNA, 25 bp, Homo sapien
acaagcatcctggacaggacactga

SEQ ID NO: 4418854 - DNA, 25 bp, Homo sapien
gcaggtaggcacctgtcttcccgat

SEQ ID NO: 4418855 - DNA, 25 bp, Homo sapien
agacatccacttctgtgagccgaac

SEQ ID NO: 4418856 - DNA, 25 bp, Homo sapien
cttcgggtcgtgaatgatgtagtca

SEQ ID NO: 4418857 - DNA, 25 bp, Homo sapien
gggtcgctaagctggagataatgcc

SEQ ID NO: 4418858 - DNA, 25 bp, Homo sapien
ggctggcatcttcatacttcgggtc

SEQ ID NO: 4418859 - DNA, 25 bp, Homo sapien
gatagtgcgaacaaatcaggctggc

SEQ ID NO: 4418860 - DNA, 25 bp, Homo sapien
agtttataatcgcaatggccccggt

SEQ ID NO: 4418861 - DNA, 25 bp, Homo sapien
tagtctaagtttataatcgcaatgg

SEQ ID NO: 4418862 - DNA, 25 bp, Homo sapien
ttataatcgcaatggccccggtaca

SEQ ID NO: 4418863 - DNA, 25 bp, Homo sapien
gcaatggccccggtacactgcagcg

SEQ ID NO: 4418864 - DNA, 25 bp, Homo sapien
cgtctgacgccgcacataaaggtcc

SEQ ID NO: 4418865 - DNA, 25 bp, Homo sapien
ggacagtctcatccgtgccgtctga

SEQ ID NO: 4418866 - DNA, 25 bp, Homo sapien
gtggtaagtgttgtacgctgcgtac

SEQ ID NO: 4418867 - DNA, 25 bp, Homo sapien
gggtggaagcccatgtactggtggc

SEQ ID NO: 4418868 - DNA, 25 bp, Homo sapien
taaataggacactagataggacagc

SEQ ID NO: 4418869 - DNA, 25 bp, Homo sapien
tgatatataaaaagtgcctaggcac

SEQ ID NO: 4418870 - DNA, 25 bp, Homo sapien
ttgcaggcgtggcttcaggtgaccc

SEQ ID NO: 4418871 - DNA, 25 bp, Homo sapien
gccctgggtcaggagccttatccat

SEQ ID NO: 4418872 - DNA, 25 bp, Homo sapien
tgacaacgtgcagctcacagtcacc

SEQ ID NO: 4418873 - DNA, 25 bp, Homo sapien
gagcttgccgtcagagtccggcctg

SEQ ID NO: 4418874 - DNA, 25 bp, Homo sapien
cactctgctgtgacaacgtgcagct

SEQ ID NO: 4418875 - DNA, 25 bp, Homo sapien
gaaaggacagagcttgccgtcagag

SEQ ID NO: 4418876 - DNA, 25 bp, Homo sapien
tggctgaagacaaagtggtgctcct

SEQ ID NO: 4418877 - DNA, 25 bp, Homo sapien
gtagtcgcatgctctccagctggcc

SEQ ID NO: 4418878 - DNA, 25 bp, Homo sapien
ttgtctgtcacgaggggtagtcgca

SEQ ID NO: 4418879 - DNA, 25 bp, Homo sapien
gctggatctcctctcctagcatgga

SEQ ID NO: 4418880 - DNA, 25 bp, Homo sapien
taggaggtacctaacaatgaagtcc

SEQ ID NO: 4418881 - DNA, 25 bp, Homo sapien
tgctggctcactatcgacacgagtg

SEQ ID NO: 4418882 - DNA, 25 bp, Homo sapien
agtgagtgagcacaacagagcccag

SEQ ID NO: 4418883 - DNA, 25 bp, Homo sapien
tagagcttagctatccactcgggtt

SEQ ID NO: 4418884 - DNA, 25 bp, Homo sapien
cgtgcaaatggctggcaccgtccat

SEQ ID NO: 4418885 - DNA, 25 bp, Homo sapien
tattccttgacaaccagcacgtgca

SEQ ID NO: 4418886 - DNA, 25 bp, Homo sapien
gattaaagagcccatgttcgtgacg

SEQ ID NO: 4418887 - DNA, 25 bp, Homo sapien
ccgtccattgcgtggtacagattaa

SEQ ID NO: 4418888 - DNA, 25 bp, Homo sapien
ctgagtagatgatgttaaaggacac

SEQ ID NO: 4418889 - DNA, 25 bp, Homo sapien
gagtagatgatgttaaaggacactc

SEQ ID NO: 4418890 - DNA, 25 bp, Homo sapien
gtagatgatgttaaaggacactcac

SEQ ID NO: 4418891 - DNA, 25 bp, Homo sapien
gagtttgactgagtagatgatgtta

SEQ ID NO: 4418892 - DNA, 25 bp, Homo sapien
ttccgctcgagctccaggttatggt

SEQ ID NO: 4418893 - DNA, 25 bp, Homo sapien
tcctcctgccggttccgctcgagct

SEQ ID NO: 4418894 - DNA, 25 bp, Homo sapien
gccagatgtcctgcggcttgattcc

SEQ ID NO: 4418895 - DNA, 25 bp, Homo sapien
ggttatggtaggacagctccttgat

SEQ ID NO: 4418896 - DNA, 25 bp, Homo sapien
gtagtgcatgatgtcgggggccgcc

SEQ ID NO: 4418897 - DNA, 25 bp, Homo sapien
tcaaagacacgttcctttccgacca

SEQ ID NO: 4418898 - DNA, 25 bp, Homo sapien
gatgtgcttcaaagacacgttcctt

SEQ ID NO: 4418899 - DNA, 25 bp, Homo sapien
tgcatgatgtgcttcaaagacacgt

SEQ ID NO: 4418900 - DNA, 25 bp, Homo sapien
ggtccacgttcaggatgatgaagtt

SEQ ID NO: 4418901 - DNA, 25 bp, Homo sapien
gaagttgtgcacgtggcagcgggag

SEQ ID NO: 4418902 - DNA, 25 bp, Homo sapien
agaagggctcttgcacctcgctggc

SEQ ID NO: 4418903 - DNA, 25 bp, Homo sapien
tactgcacgttctgggtcaggtcca

SEQ ID NO: 4418904 - DNA, 25 bp, Homo sapien
cacgctgaagcggttgaaccggcag

SEQ ID NO: 4418905 - DNA, 25 bp, Homo sapien
cttcatcacgctgaagcggttgaac

SEQ ID NO: 4418906 - DNA, 25 bp, Homo sapien
gaagtctacatcgtcacacaggaac

SEQ ID NO: 4418907 - DNA, 25 bp, Homo sapien
tgcacccgcaggttgaagtctacat

SEQ ID NO: 4418908 - DNA, 25 bp, Homo sapien
tggatgtgatgtggaaggacctgtg

SEQ ID NO: 4418909 - DNA, 25 bp, Homo sapien
ttggatgtgatgtggaaggacctgt

SEQ ID NO: 4418910 - DNA, 25 bp, Homo sapien
cttggatgtgatgtggaaggacctg

SEQ ID NO: 4418911 - DNA, 25 bp, Homo sapien
cggcacgaccgcggcagagttatca

SEQ ID NO: 4418912 - DNA, 25 bp, Homo sapien
cgaccgcggcagagttatcagacac

SEQ ID NO: 4418913 - DNA, 25 bp, Homo sapien
gcacgaccgcggcagagttatcaga

SEQ ID NO: 4418914 - DNA, 25 bp, Homo sapien
gccggcacgaccgcggcagagttat

SEQ ID NO: 4418915 - DNA, 25 bp, Homo sapien
tgtggtgctgcaggaacttctccag

SEQ ID NO: 4418916 - DNA, 25 bp, Homo sapien
tgcgaggaacgtgtgcttgctgtcc

SEQ ID NO: 4418917 - DNA, 25 bp, Homo sapien
acagcactgggtggtcatggttctt

SEQ ID NO: 4418918 - DNA, 25 bp, Homo sapien
ggttcaggtaacagtcgacagacag

SEQ ID NO: 4418919 - DNA, 25 bp, Homo sapien
ctgaacagcaagtccgagcagctga

SEQ ID NO: 4418920 - DNA, 25 bp, Homo sapien
gcaagtccgagcagctgatgtttaa

SEQ ID NO: 4418921 - DNA, 25 bp, Homo sapien
aagtccgagcagctgatgtttaaag

SEQ ID NO: 4418922 - DNA, 25 bp, Homo sapien
aacagcaagtccgagcagctgatgt

SEQ ID NO: 4418923 - DNA, 25 bp, Homo sapien
aaaaagctagctcccacaaaagagt

SEQ ID NO: 4418924 - DNA, 25 bp, Homo sapien
ttttcaaaaagctagctcccacaaa

SEQ ID NO: 4418925 - DNA, 25 bp, Homo sapien
aagagtcacagaggtacagcagcag

SEQ ID NO: 4418926 - DNA, 25 bp, Homo sapien
ccacaaaagagtcacagaggtacag

SEQ ID NO: 4418927 - DNA, 25 bp, Homo sapien
tgagctccggtcctgacagatgaca

SEQ ID NO: 4418928 - DNA, 25 bp, Homo sapien
tcagatgtgtcgtcccgtcagaaaa

SEQ ID NO: 4418929 - DNA, 25 bp, Homo sapien
cattggcggtctggaactcatcgcg

SEQ ID NO: 4418930 - DNA, 25 bp, Homo sapien
cgtcagaaaaaagagcggccggtct

SEQ ID NO: 4418931 - DNA, 25 bp, Homo sapien
taaatttgatgcctttgggctagcc

SEQ ID NO: 4418932 - DNA, 25 bp, Homo sapien
tctcttcagaaaactcgccgctgtc

SEQ ID NO: 4418933 - DNA, 25 bp, Homo sapien
tgtccatggaagcacacgaatggca

SEQ ID NO: 4418934 - DNA, 25 bp, Homo sapien
gaaaatgagctacttcagcaactga

SEQ ID NO: 4418935 - DNA, 25 bp, Homo sapien
gtaagaatgcattctgaggccaggc

SEQ ID NO: 4418936 - DNA, 25 bp, Homo sapien
caagaaaggactgaacaagatgaac

SEQ ID NO: 4418937 - DNA, 25 bp, Homo sapien
gtggcctctcaactgtggctttaaa

SEQ ID NO: 4418938 - DNA, 25 bp, Homo sapien
gattgacatcaactcttcggcatca

SEQ ID NO: 4418939 - DNA, 25 bp, Homo sapien
ctggaacagacaagaatattagttt

SEQ ID NO: 4418940 - DNA, 25 bp, Homo sapien
attaactaataaagtggggagaatg

SEQ ID NO: 4418941 - DNA, 25 bp, Homo sapien
aataaagtggggagaatgacacaaa

SEQ ID NO: 4418942 - DNA, 25 bp, Homo sapien
aactaataaagtggggagaatgaca

SEQ ID NO: 4418943 - DNA, 25 bp, Homo sapien
aatgagaaccaagtgaaatggcttt

SEQ ID NO: 4418944 - DNA, 25 bp, Homo sapien
ggcagaaggcaaaagccacgtctta

SEQ ID NO: 4418945 - DNA, 25 bp, Homo sapien
agaatgagaaccaagtgaaatggct

SEQ ID NO: 4418946 - DNA, 25 bp, Homo sapien
gagaaccaagtgaaatggcttttcc

SEQ ID NO: 4418947 - DNA, 25 bp, Homo sapien
agctggagctgcgaatgccgtcctg

SEQ ID NO: 4418948 - DNA, 25 bp, Homo sapien
cccagctggagctgcgaatgccgtc

SEQ ID NO: 4418949 - DNA, 25 bp, Homo sapien
ggagctgcgaatgccgtcctgttcc

SEQ ID NO: 4418950 - DNA, 25 bp, Homo sapien
tggagctgcgaatgccgtcctgttc

SEQ ID NO: 4418951 - DNA, 25 bp, Homo sapien
cagcctcctctataaatgcagcctt

SEQ ID NO: 4418952 - DNA, 25 bp, Homo sapien
gcaatcactatgcattttccatcca

SEQ ID NO: 4418953 - DNA, 25 bp, Homo sapien
taaatgcagccttctgaataggagc

SEQ ID NO: 4418954 - DNA, 25 bp, Homo sapien
aagcaatcactatgcattttccatc

SEQ ID NO: 4418955 - DNA, 25 bp, Homo sapien
tcaggccggccagaggtagcagcct

SEQ ID NO: 4418956 - DNA, 25 bp, Homo sapien
accgtcaggggcgtgcgctccaaag

SEQ ID NO: 4418957 - DNA, 25 bp, Homo sapien
cacacaggcatttcagggggttcgc

SEQ ID NO: 4418958 - DNA, 25 bp, Homo sapien
acaccccaggcgccagtgccttcag

SEQ ID NO: 4418959 - DNA, 25 bp, Homo sapien
tatgtgtagtggcagagtgtcacct

SEQ ID NO: 4418960 - DNA, 25 bp, Homo sapien
cagacactgtggttgggtttccagg

SEQ ID NO: 4418961 - DNA, 25 bp, Homo sapien
gtttcctatgtgtagtggcagagtg

SEQ ID NO: 4418962 - DNA, 25 bp, Homo sapien
tcagacactgtggttgggtttccag

SEQ ID NO: 4418963 - DNA, 25 bp, Homo sapien
tctgcagcagaaagatgacgatcgc

SEQ ID NO: 4418964 - DNA, 25 bp, Homo sapien
caaagtagccggtgagaaaggacct

SEQ ID NO: 4418965 - DNA, 25 bp, Homo sapien
taaacggcaataatagggcgcacca

SEQ ID NO: 4418966 - DNA, 25 bp, Homo sapien
gagggaagcctacacactaaggtgc

SEQ ID NO: 4418967 - DNA, 25 bp, Homo sapien
tttaaacgaggacaacccatccaca

SEQ ID NO: 4418968 - DNA, 25 bp, Homo sapien
taaacgaggacaacccatccacaaa

SEQ ID NO: 4418969 - DNA, 25 bp, Homo sapien
aacgaggacaacccatccacaaaag

SEQ ID NO: 4418970 - DNA, 25 bp, Homo sapien
acgaggacaacccatccacaaaagt

SEQ ID NO: 4418971 - DNA, 25 bp, Homo sapien
tgagaaggagagtgctctttcccgc

SEQ ID NO: 4418972 - DNA, 25 bp, Homo sapien
tcgttgctcgctcgcatgagaagga

SEQ ID NO: 4418973 - DNA, 25 bp, Homo sapien
cattccaactgcaaacactgtgagg

SEQ ID NO: 4418974 - DNA, 25 bp, Homo sapien
gggcgtattcatgggtcctcacata

SEQ ID NO: 4418975 - DNA, 25 bp, Homo sapien
ccacacagggtctcacgcagtctat

SEQ ID NO: 4418976 - DNA, 25 bp, Homo sapien
cgcagtctatggacagccctatggg

SEQ ID NO: 4418977 - DNA, 25 bp, Homo sapien
gttggtgagcttggctacttttgag

SEQ ID NO: 4418978 - DNA, 25 bp, Homo sapien
tgcctcccccgtgagtgttggtgag

SEQ ID NO: 4418979 - DNA, 25 bp, Homo sapien
tcaaaggatgttgcaaggagccctg

SEQ ID NO: 4418980 - DNA, 25 bp, Homo sapien
tggtagctctgggaggttacttcct

SEQ ID NO: 4418981 - DNA, 25 bp, Homo sapien
ctgggaggttacttcctctaggagt

SEQ ID NO: 4418982 - DNA, 25 bp, Homo sapien
ttcaaaggatgttgcaaggagccct

SEQ ID NO: 4418983 - DNA, 25 bp, Homo sapien
tgattcgcgccggtgcgtcctgtcc

SEQ ID NO: 4418984 - DNA, 25 bp, Homo sapien
ggacccgagcgaccgcaagatgttt

SEQ ID NO: 4418985 - DNA, 25 bp, Homo sapien
caagatgtttctgcgaagggctgca

SEQ ID NO: 4418986 - DNA, 25 bp, Homo sapien
tttgtcaacactcccctgtggcgag

SEQ ID NO: 4418987 - DNA, 25 bp, Homo sapien
gccctacagacaccttgctcgccag

SEQ ID NO: 4418988 - DNA, 25 bp, Homo sapien
catcctgtgctgccctacagacacc

SEQ ID NO: 4418989 - DNA, 25 bp, Homo sapien
gacatcctgtgctgccctacagaca

SEQ ID NO: 4418990 - DNA, 25 bp, Homo sapien
acatcctgtgctgccctacagacac

SEQ ID NO: 4418991 - DNA, 25 bp, Homo sapien
cagatgctgctgacgtgcagaacca

SEQ ID NO: 4418992 - DNA, 25 bp, Homo sapien
gcaggagcccctgttctgaagggtc

SEQ ID NO: 4418993 - DNA, 25 bp, Homo sapien
gatgctgctgacgtgcagaaccact

SEQ ID NO: 4418994 - DNA, 25 bp, Homo sapien
acagatgctgctgacgtgcagaacc

SEQ ID NO: 4418995 - DNA, 25 bp, Homo sapien
gcttctaggccaaaccagggagaag

SEQ ID NO: 4418996 - DNA, 25 bp, Homo sapien
ccagcttctaggccaaaccagggag

SEQ ID NO: 4418997 - DNA, 25 bp, Homo sapien
agggagaagcaggagccgagcacag

SEQ ID NO: 4418998 - DNA, 25 bp, Homo sapien
cagcttctaggccaaaccagggaga

SEQ ID NO: 4418999 - DNA, 25 bp, Homo sapien
tccaccaggactgtaggcaaaactg

SEQ ID NO: 4419000 - DNA, 25 bp, Homo sapien
tccatgtaatgtgcggtagggcttg

SEQ ID NO: 4419001 - DNA, 25 bp, Homo sapien
tgcccctcgggagaacctgcatttc

SEQ ID NO: 4419002 - DNA, 25 bp, Homo sapien
actagtctggcttgtgactgagggc

SEQ ID NO: 4419003 - DNA, 25 bp, Homo sapien
tcacacgtgagtgggttcttctgca

SEQ ID NO: 4419004 - DNA, 25 bp, Homo sapien
tctgaaactgttggagccacgtggt

SEQ ID NO: 4419005 - DNA, 25 bp, Homo sapien
tctgcagaaatagcaccaggaacat

SEQ ID NO: 4419006 - DNA, 25 bp, Homo sapien
tgtgtgctgttcctacgtttcccgg

SEQ ID NO: 4419007 - DNA, 25 bp, Homo sapien
atacccgctgacatcagggcgccgg

SEQ ID NO: 4419008 - DNA, 25 bp, Homo sapien
agggactccatacccatacccgctg

SEQ ID NO: 4419009 - DNA, 25 bp, Homo sapien
taaaaggtgagcgttctggtgtctg

SEQ ID NO: 4419010 - DNA, 25 bp, Homo sapien
catcagggcgccggtcaagtctaag

SEQ ID NO: 4419011 - DNA, 25 bp, Homo sapien
aaggaaaggtgctcccatgactcac

SEQ ID NO: 4419012 - DNA, 25 bp, Homo sapien
cactcagtgacccttcgtccgatgg

SEQ ID NO: 4419013 - DNA, 25 bp, Homo sapien
cagcacacggtggtcactcagtgac

SEQ ID NO: 4419014 - DNA, 25 bp, Homo sapien
ccagcacacggtggtcactcagtga

SEQ ID NO: 4419015 - DNA, 25 bp, Homo sapien
gtgacccttcgtccgatggtgaatg

SEQ ID NO: 4419016 - DNA, 25 bp, Homo sapien
ctgttctcggtgtgagtcagactcc

SEQ ID NO: 4419017 - DNA, 25 bp, Homo sapien
gagccacattcctgttctcggtgtg

SEQ ID NO: 4419018 - DNA, 25 bp, Homo sapien
cattcctgttctcggtgtgagtcag

SEQ ID NO: 4419019 - DNA, 25 bp, Homo sapien
gccacattcctgttctcggtgtgag

SEQ ID NO: 4419020 - DNA, 25 bp, Homo sapien
tgtggaatatttcagcatgctgcaa

SEQ ID NO: 4419021 - DNA, 25 bp, Homo sapien
gcaacttgggtacagatattctgga

SEQ ID NO: 4419022 - DNA, 25 bp, Homo sapien
tatacgttgcttaatatggcagcta

SEQ ID NO: 4419023 - DNA, 25 bp, Homo sapien
taatgaagtcctcatttcaactgag

SEQ ID NO: 4419024 - DNA, 25 bp, Homo sapien
aacgacattctatcacagcggcact

SEQ ID NO: 4419025 - DNA, 25 bp, Homo sapien
catacatttcgaatccacccagggt

SEQ ID NO: 4419026 - DNA, 25 bp, Homo sapien
cacccagggtctctcattattggaa

SEQ ID NO: 4419027 - DNA, 25 bp, Homo sapien
cagcggcactcacgttaatgtttga

SEQ ID NO: 4419028 - DNA, 25 bp, Homo sapien
catggatggcggacgctttctgtaa

SEQ ID NO: 4419029 - DNA, 25 bp, Homo sapien
ccgtcctgagctccctgtattgctg

SEQ ID NO: 4419030 - DNA, 25 bp, Homo sapien
gcggattgcctttccttacctgcct

SEQ ID NO: 4419031 - DNA, 25 bp, Homo sapien
tacctgcctctcgtgtgtcctgcac

SEQ ID NO: 4419032 - DNA, 25 bp, Homo sapien
caacaatgatcaatgccgggataga

SEQ ID NO: 4419033 - DNA, 25 bp, Homo sapien
cttctgcggacagcgggacacaaca

SEQ ID NO: 4419034 - DNA, 25 bp, Homo sapien
agaggtgtgggttggaagcctgcct

SEQ ID NO: 4419035 - DNA, 25 bp, Homo sapien
cggacagcgggacacaacaatgatc

SEQ ID NO: 4419036 - DNA, 25 bp, Homo sapien
cattgtcaggacctggctcagcttc

SEQ ID NO: 4419037 - DNA, 25 bp, Homo sapien
cccatcagaaggcacattgtcagga

SEQ ID NO: 4419038 - DNA, 25 bp, Homo sapien
ggcccctgctcatgcgaacctgggt

SEQ ID NO: 4419039 - DNA, 25 bp, Homo sapien
taacttcagataaaggcccctgctc

SEQ ID NO: 4419040 - DNA, 25 bp, Homo sapien
tgtggacacacgacatcattcacaa

SEQ ID NO: 4419041 - DNA, 25 bp, Homo sapien
tctctcgagaatgaaaatgaccagg

SEQ ID NO: 4419042 - DNA, 25 bp, Homo sapien
cacattctacagaggttaacccagc

SEQ ID NO: 4419043 - DNA, 25 bp, Homo sapien
aatgaccaggccatcctcacattct

SEQ ID NO: 4419044 - DNA, 25 bp, Homo sapien
taagcaggtggccttgaattctggc

SEQ ID NO: 4419045 - DNA, 25 bp, Homo sapien
ctcatggatgaggtttctagttgtc

SEQ ID NO: 4419046 - DNA, 25 bp, Homo sapien
gttgtcttctgttaagcaggtggcc

SEQ ID NO: 4419047 - DNA, 25 bp, Homo sapien
ttctggcagctcacgcttcagagtt

SEQ ID NO: 4419048 - DNA, 25 bp, Homo sapien
aaggccgtggctggccgctggtggg

SEQ ID NO: 4419049 - DNA, 25 bp, Homo sapien
aggtgcttgaaagaaggccgtggct

SEQ ID NO: 4419050 - DNA, 25 bp, Homo sapien
ccgtggctggccgctggtgggcggg

SEQ ID NO: 4419051 - DNA, 25 bp, Homo sapien
ggtgcttgaaagaaggccgtggctg

SEQ ID NO: 4419052 - DNA, 25 bp, Homo sapien
gagagcaaacagctggaaccaaagc

SEQ ID NO: 4419053 - DNA, 25 bp, Homo sapien
ggacagtgatcctcggagagcaaac

SEQ ID NO: 4419054 - DNA, 25 bp, Homo sapien
gaggcccacttcacagttagggcag

SEQ ID NO: 4419055 - DNA, 25 bp, Homo sapien
ttttgacggtcacccgggctatcca

SEQ ID NO: 4419056 - DNA, 25 bp, Homo sapien
gcgtggccgcctttgtattgcaaac

SEQ ID NO: 4419057 - DNA, 25 bp, Homo sapien
tttgtattgcaaacacccagcccgc

SEQ ID NO: 4419058 - DNA, 25 bp, Homo sapien
gcgcgtggccgcctttgtattgcaa

SEQ ID NO: 4419059 - DNA, 25 bp, Homo sapien
ccgcgcgtggccgcctttgtattgc

SEQ ID NO: 4419060 - DNA, 25 bp, Homo sapien
gggaggctggaggcggcggctactc

SEQ ID NO: 4419061 - DNA, 25 bp, Homo sapien
ggaggctggaggcggcggctactca

SEQ ID NO: 4419062 - DNA, 25 bp, Homo sapien
gaggctggaggcggcggctactcac

SEQ ID NO: 4419063 - DNA, 25 bp, Homo sapien
cgggaggctggaggcggcggctact

SEQ ID NO: 4419064 - DNA, 25 bp, Homo sapien
gtgagccgagacggcgccactgaac

SEQ ID NO: 4419065 - DNA, 25 bp, Homo sapien
ccagcttgggcgacagagcgagact

SEQ ID NO: 4419066 - DNA, 25 bp, Homo sapien
gccgagacggcgccactgaactcca

SEQ ID NO: 4419067 - DNA, 25 bp, Homo sapien
ctccagcttgggcgacagagcgaga

SEQ ID NO: 4419068 - DNA, 25 bp, Homo sapien
ctccccatacctgcccattaatctc

SEQ ID NO: 4419069 - DNA, 25 bp, Homo sapien
ccccatacctgcccattaatctcat

SEQ ID NO: 4419070 - DNA, 25 bp, Homo sapien
tccccatacctgcccattaatctca

SEQ ID NO: 4419071 - DNA, 25 bp, Homo sapien
ttcacggtgacaaacacctggccgg

SEQ ID NO: 4419072 - DNA, 25 bp, Homo sapien
tttccattgggctggcggatgacaa

SEQ ID NO: 4419073 - DNA, 25 bp, Homo sapien
tggcgggattcagccccttgtagag

SEQ ID NO: 4419074 - DNA, 25 bp, Homo sapien
tgatgtcaatgcaccctgagagtgt

SEQ ID NO: 4419075 - DNA, 25 bp, Homo sapien
gcattctctaaggagagccggtgcc

SEQ ID NO: 4419076 - DNA, 25 bp, Homo sapien
tcaccagagtacaagggcattctct

SEQ ID NO: 4419077 - DNA, 25 bp, Homo sapien
ggcattctctaaggagagccggtgc

SEQ ID NO: 4419078 - DNA, 25 bp, Homo sapien
agggcattctctaaggagagccggt

SEQ ID NO: 4419079 - DNA, 25 bp, Homo sapien
attatctcccaatttcatatgcaaa

SEQ ID NO: 4419080 - DNA, 25 bp, Homo sapien
cattatctcccaatttcatatgcaa

SEQ ID NO: 4419081 - DNA, 25 bp, Homo sapien
tgctggactggagcaactagagaag

SEQ ID NO: 4419082 - DNA, 25 bp, Homo sapien
ggctgtaatacccagagcacagagg

SEQ ID NO: 4419083 - DNA, 25 bp, Homo sapien
gctgggaattggatgcactcttgca

SEQ ID NO: 4419084 - DNA, 25 bp, Homo sapien
ggccctgaacatcgaggaagtagat

SEQ ID NO: 4419085 - DNA, 25 bp, Homo sapien
ggctgcccaatctggtagaagatca

SEQ ID NO: 4419086 - DNA, 25 bp, Homo sapien
tggccaggtgcatagggataacttc

SEQ ID NO: 4419087 - DNA, 25 bp, Homo sapien
ggtggccaggtgcatagggataact

SEQ ID NO: 4419088 - DNA, 25 bp, Homo sapien
gtggccaggtgcatagggataactt

SEQ ID NO: 4419089 - DNA, 25 bp, Homo sapien
tggcattccattctcgaagctcctt

SEQ ID NO: 4419090 - DNA, 25 bp, Homo sapien
acagagctgcttgacggcgtctcgc

SEQ ID NO: 4419091 - DNA, 25 bp, Homo sapien
ctcgctgggagcgatcacttgggct

SEQ ID NO: 4419092 - DNA, 25 bp, Homo sapien
tcttctttactacagagctgcttga

SEQ ID NO: 4419093 - DNA, 25 bp, Homo sapien
tccatggcctcatccgagctcatct

SEQ ID NO: 4419094 - DNA, 25 bp, Homo sapien
atggcctcatccgagctcatctcga

SEQ ID NO: 4419095 - DNA, 25 bp, Homo sapien
ggcctcatccgagctcatctcgatg

SEQ ID NO: 4419096 - DNA, 25 bp, Homo sapien
cctcatccgagctcatctcgatggg

SEQ ID NO: 4419097 - DNA, 25 bp, Homo sapien
taactgcaaatgacctcgtttcagg

SEQ ID NO: 4419098 - DNA, 25 bp, Homo sapien
cacaatttcaatcatgcagaggcca

SEQ ID NO: 4419099 - DNA, 25 bp, Homo sapien
gacgctggttctaagcctgtcacag

SEQ ID NO: 4419100 - DNA, 25 bp, Homo sapien
tcgtttcaggtataagcacactcac

SEQ ID NO: 4419101 - DNA, 25 bp, Homo sapien
agtgggtgaccactctctatccgaa

SEQ ID NO: 4419102 - DNA, 25 bp, Homo sapien
caggaatatcatcttggaatggagg

SEQ ID NO: 4419103 - DNA, 25 bp, Homo sapien
tggaggtatatcattaggaagagtt

SEQ ID NO: 4419104 - DNA, 25 bp, Homo sapien
tccgaattagggtatgaggctgact

SEQ ID NO: 4419105 - DNA, 25 bp, Homo sapien
catgcagggactttgtcacaggcct

SEQ ID NO: 4419106 - DNA, 25 bp, Homo sapien
taacccgcgacatcagtattggctg

SEQ ID NO: 4419107 - DNA, 25 bp, Homo sapien
tattgaacagggctaggctctgacg

SEQ ID NO: 4419108 - DNA, 25 bp, Homo sapien
gaataacccaaggatgtcactggca

SEQ ID NO: 4419109 - DNA, 25 bp, Homo sapien
aagaactagacagacctccctcggc

SEQ ID NO: 4419110 - DNA, 25 bp, Homo sapien
cctcggccgcaactgcaagatgagg

SEQ ID NO: 4419111 - DNA, 25 bp, Homo sapien
agtccttttgcaatctaccaggcta

SEQ ID NO: 4419112 - DNA, 25 bp, Homo sapien
tggagggcaagaactagacagacct

SEQ ID NO: 4419113 - DNA, 25 bp, Homo sapien
taggtaggtcaaaactgagggaatg

SEQ ID NO: 4419114 - DNA, 25 bp, Homo sapien
gatgactacatcgagtgaacacacc

SEQ ID NO: 4419115 - DNA, 25 bp, Homo sapien
taatcgtagcttcatttgctaaggc

SEQ ID NO: 4419116 - DNA, 25 bp, Homo sapien
ttttgccagtcccaataaggctagt

SEQ ID NO: 4419117 - DNA, 25 bp, Homo sapien
cctatgcccgggaaagtctgacaga

SEQ ID NO: 4419118 - DNA, 25 bp, Homo sapien
tctgctctagaagaacgaaatgcgg

SEQ ID NO: 4419119 - DNA, 25 bp, Homo sapien
tggcagatatctcgggctttacggg

SEQ ID NO: 4419120 - DNA, 25 bp, Homo sapien
tagacaaagcttgctccgaacaggg

SEQ ID NO: 4419121 - DNA, 25 bp, Homo sapien
caactggttaaggctcgctcagtaa

SEQ ID NO: 4419122 - DNA, 25 bp, Homo sapien
aactggttaaggctcgctcagtaac

SEQ ID NO: 4419123 - DNA, 25 bp, Homo sapien
ctggttaaggctcgctcagtaacca

SEQ ID NO: 4419124 - DNA, 25 bp, Homo sapien
ggttaaggctcgctcagtaaccacc

SEQ ID NO: 4419125 - DNA, 25 bp, Homo sapien
atcacttttaggtgttgaaggtcgg

SEQ ID NO: 4419126 - DNA, 25 bp, Homo sapien
tctgaatcacttttaggtgttgaag

SEQ ID NO: 4419127 - DNA, 25 bp, Homo sapien
gacttgctgaccaattctgaatcac

SEQ ID NO: 4419128 - DNA, 25 bp, Homo sapien
ctgccctgtcctttccgtggacttg

SEQ ID NO: 4419129 - DNA, 25 bp, Homo sapien
aatgggctggactctttcatcttgt

SEQ ID NO: 4419130 - DNA, 25 bp, Homo sapien
ctttcatcttgtgtggagaagaaga

SEQ ID NO: 4419131 - DNA, 25 bp, Homo sapien
atgggctggactctttcatcttgtg

SEQ ID NO: 4419132 - DNA, 25 bp, Homo sapien
tgttctggtccaaaagtgccccacc

SEQ ID NO: 4419133 - DNA, 25 bp, Homo sapien
tttgctgtctggactacactggcag

SEQ ID NO: 4419134 - DNA, 25 bp, Homo sapien
ggtttgagctcctcgatcatgggca

SEQ ID NO: 4419135 - DNA, 25 bp, Homo sapien
aagagtggcgctgctgctcctaagg

SEQ ID NO: 4419136 - DNA, 25 bp, Homo sapien
cctctgtaaagtgcctgaagtgtac

SEQ ID NO: 4419137 - DNA, 25 bp, Homo sapien
gtcacacttgtaggtaccgaggccc

SEQ ID NO: 4419138 - DNA, 25 bp, Homo sapien
acagcctgcgcttttcccattggaa

SEQ ID NO: 4419139 - DNA, 25 bp, Homo sapien
tactgagcactaaacgcattgaggc

SEQ ID NO: 4419140 - DNA, 25 bp, Homo sapien
atacagggccgccacttcaggatcc

SEQ ID NO: 4419141 - DNA, 25 bp, Homo sapien
gcaccaagatgtcggcttcgtttat

SEQ ID NO: 4419142 - DNA, 25 bp, Homo sapien
gccgtcagcaccaagatgtcggctt

SEQ ID NO: 4419143 - DNA, 25 bp, Homo sapien
tgaggtcatccaagtagacgccgtc

SEQ ID NO: 4419144 - DNA, 25 bp, Homo sapien
gtctcacacagaatgatattcagat

SEQ ID NO: 4419145 - DNA, 25 bp, Homo sapien
ctcacacagaatgatattcagatta

SEQ ID NO: 4419146 - DNA, 25 bp, Homo sapien
tctcacacagaatgatattcagatt

SEQ ID NO: 4419147 - DNA, 25 bp, Homo sapien
gatattcagattataggaaatgatg

SEQ ID NO: 4419148 - DNA, 25 bp, Homo sapien
tcagggtcctacatcaccatccagt

SEQ ID NO: 4419149 - DNA, 25 bp, Homo sapien
gagaccggctgaggactgtcccagt

SEQ ID NO: 4419150 - DNA, 25 bp, Homo sapien
tattaaagcaccacgacaaggaaag

SEQ ID NO: 4419151 - DNA, 25 bp, Homo sapien
tctcagcacagatgtttattaaagc

SEQ ID NO: 4419152 - DNA, 25 bp, Homo sapien
ccgggctccgttgtcgcttgcatgt

SEQ ID NO: 4419153 - DNA, 25 bp, Homo sapien
ctttcgtgatctcccggtggtcgct

SEQ ID NO: 4419154 - DNA, 25 bp, Homo sapien
gatggcgatggaagggaggtccctc

SEQ ID NO: 4419155 - DNA, 25 bp, Homo sapien
gcttgcatgttttgcgagtccggaa

SEQ ID NO: 4419156 - DNA, 25 bp, Homo sapien
gggttgtccacaaactgttgatatg

SEQ ID NO: 4419157 - DNA, 25 bp, Homo sapien
tcccaatctttaccacgagattggg

SEQ ID NO: 4419158 - DNA, 25 bp, Homo sapien
gttgatatgacacagcttgctccag

SEQ ID NO: 4419159 - DNA, 25 bp, Homo sapien
tcatcgataatagcggggttgtcca

SEQ ID NO: 4419160 - DNA, 25 bp, Homo sapien
tcttgccacgtgtcaaggtaaaggc

SEQ ID NO: 4419161 - DNA, 25 bp, Homo sapien
tgctgcaccaaaccacgacgtgctt

SEQ ID NO: 4419162 - DNA, 25 bp, Homo sapien
aaatcccaccgtacagctgctgcac

SEQ ID NO: 4419163 - DNA, 25 bp, Homo sapien
cagacagttggacatgccagcagcc

SEQ ID NO: 4419164 - DNA, 25 bp, Homo sapien
ggaggaggggtgctgctgttgtcca

SEQ ID NO: 4419165 - DNA, 25 bp, Homo sapien
ctggaaggcctgcattgccaggagg

SEQ ID NO: 4419166 - DNA, 25 bp, Homo sapien
tggaaggcctgcattgccaggagga

SEQ ID NO: 4419167 - DNA, 25 bp, Homo sapien
tttatccctcatgatagattccaca

SEQ ID NO: 4419168 - DNA, 25 bp, Homo sapien
cttgattgtggtgtttcttcccctc

SEQ ID NO: 4419169 - DNA, 25 bp, Homo sapien
ttatccctcatgatagattccacag

SEQ ID NO: 4419170 - DNA, 25 bp, Homo sapien
cctttttgggcattttatccctcat

SEQ ID NO: 4419171 - DNA, 25 bp, Homo sapien
gaaatcacaggcactcatagacatg

SEQ ID NO: 4419172 - DNA, 25 bp, Homo sapien
gacgaaatcttaccatgagggagtg

SEQ ID NO: 4419173 - DNA, 25 bp, Homo sapien
tcatggaaactcagcactagggcct

SEQ ID NO: 4419174 - DNA, 25 bp, Homo sapien
gaacgccaaagccatggacctttag

SEQ ID NO: 4419175 - DNA, 25 bp, Homo sapien
tgcggcggttgctctccggtgctat

SEQ ID NO: 4419176 - DNA, 25 bp, Homo sapien
gctgcggcggttgctctccggtgct

SEQ ID NO: 4419177 - DNA, 25 bp, Homo sapien
cggttgctctccggtgctatgggcc

SEQ ID NO: 4419178 - DNA, 25 bp, Homo sapien
ggcggttgctctccggtgctatggg

SEQ ID NO: 4419179 - DNA, 25 bp, Homo sapien
aagtatcaacgtaagtcctggtcag

SEQ ID NO: 4419180 - DNA, 25 bp, Homo sapien
taaaggactattgcatgccaggacc

SEQ ID NO: 4419181 - DNA, 25 bp, Homo sapien
actttggaaacgactactctgtggg

SEQ ID NO: 4419182 - DNA, 25 bp, Homo sapien
taattagtgtataacgggactgtcc

SEQ ID NO: 4419183 - DNA, 25 bp, Homo sapien
tatcgataccctggtgccttcctat

SEQ ID NO: 4419184 - DNA, 25 bp, Homo sapien
gaaatatcgataccctggtgccttc

SEQ ID NO: 4419185 - DNA, 25 bp, Homo sapien
ccagctgggaaatatcgataccctg

SEQ ID NO: 4419186 - DNA, 25 bp, Homo sapien
tgggaaatatcgataccctggtgcc

SEQ ID NO: 4419187 - DNA, 25 bp, Homo sapien
agcttgtgcagtaaacaaccactta

SEQ ID NO: 4419188 - DNA, 25 bp, Homo sapien
gactgcttccgctacagcttgtgca

SEQ ID NO: 4419189 - DNA, 25 bp, Homo sapien
tacagcttgtgcagtaaacaaccac

SEQ ID NO: 4419190 - DNA, 25 bp, Homo sapien
ctgactccaatgtcgactgcttccg

SEQ ID NO: 4419191 - DNA, 25 bp, Homo sapien
ttgccgttaactataatcattctac

SEQ ID NO: 4419192 - DNA, 25 bp, Homo sapien
tatcaaaatatcatgcataccatga

SEQ ID NO: 4419193 - DNA, 25 bp, Homo sapien
ctgataaacgtatatatttgcattt

SEQ ID NO: 4419194 - DNA, 25 bp, Homo sapien
catgcataccatgatcaaatcaggg

SEQ ID NO: 4419195 - DNA, 25 bp, Homo sapien
gctcggaagtcagccggagagtctt

SEQ ID NO: 4419196 - DNA, 25 bp, Homo sapien
gctgcgcgctcctcatcactggagg

SEQ ID NO: 4419197 - DNA, 25 bp, Homo sapien
cctgcgtttgatggcttggcagctg

SEQ ID NO: 4419198 - DNA, 25 bp, Homo sapien
tgtagctgacattaggcagaagagg

SEQ ID NO: 4419199 - DNA, 25 bp, Homo sapien
cctcacagcggcacgtgccttggta

SEQ ID NO: 4419200 - DNA, 25 bp, Homo sapien
ctgaaaaccacgtcgttggggccat

SEQ ID NO: 4419201 - DNA, 25 bp, Homo sapien
ttggtactgcgtggtgacactgaaa

SEQ ID NO: 4419202 - DNA, 25 bp, Homo sapien
gttggggccattcttcaacttcaag

SEQ ID NO: 4419203 - DNA, 25 bp, Homo sapien
gcaaaatgtggccaagagtatctga

SEQ ID NO: 4419204 - DNA, 25 bp, Homo sapien
tgatgggtccaatccttcccaaggg

SEQ ID NO: 4419205 - DNA, 25 bp, Homo sapien
tttatggtacagcttagcgatgccc

SEQ ID NO: 4419206 - DNA, 25 bp, Homo sapien
tcccaagggtgggcaaaatgtggcc

SEQ ID NO: 4419207 - DNA, 25 bp, Homo sapien
tacacgttcatcaatagagggcgag

SEQ ID NO: 4419208 - DNA, 25 bp, Homo sapien
tatctagacgacaggattctgccca

SEQ ID NO: 4419209 - DNA, 25 bp, Homo sapien
taaccttttgagagggcaattcggc

SEQ ID NO: 4419210 - DNA, 25 bp, Homo sapien
tgggaatctactttacagcgggact

SEQ ID NO: 4419211 - DNA, 25 bp, Homo sapien
tgactagggtcacagattgtggcct

SEQ ID NO: 4419212 - DNA, 25 bp, Homo sapien
tatccacatagagtccagcaagtcc

SEQ ID NO: 4419213 - DNA, 25 bp, Homo sapien
tggaggctgccatcgtgtccagact

SEQ ID NO: 4419214 - DNA, 25 bp, Homo sapien
gaagagaccagagctgactagggtc

SEQ ID NO: 4419215 - DNA, 25 bp, Homo sapien
cgccatcccgatggcacgggcagaa

SEQ ID NO: 4419216 - DNA, 25 bp, Homo sapien
tgcaggtagccccgcgtcatgtccg

SEQ ID NO: 4419217 - DNA, 25 bp, Homo sapien
cgtcatgtccgccatcccgatggca

SEQ ID NO: 4419218 - DNA, 25 bp, Homo sapien
cacgggcagaacagtagagaaattt

SEQ ID NO: 4419219 - DNA, 25 bp, Homo sapien
agatggaggtgcagggagcaggcct

SEQ ID NO: 4419220 - DNA, 25 bp, Homo sapien
tggaggtgcagggagcaggcctggt

SEQ ID NO: 4419221 - DNA, 25 bp, Homo sapien
gaggtgcagggagcaggcctggtac

SEQ ID NO: 4419222 - DNA, 25 bp, Homo sapien
gatggaggtgcagggagcaggcctg

SEQ ID NO: 4419223 - DNA, 25 bp, Homo sapien
caacgccgtgatggaaaaggtacct

SEQ ID NO: 4419224 - DNA, 25 bp, Homo sapien
tgagacatcccagaaaagcacgaga

SEQ ID NO: 4419225 - DNA, 25 bp, Homo sapien
tacgaaaacgagcagaaagccaggc

SEQ ID NO: 4419226 - DNA, 25 bp, Homo sapien
caggacagctagcacatggaacggc

SEQ ID NO: 4419227 - DNA, 25 bp, Homo sapien
agcagcataaaagggttctgtgttg

SEQ ID NO: 4419228 - DNA, 25 bp, Homo sapien
aaacaggtttttgatgtctgtcaaa

SEQ ID NO: 4419229 - DNA, 25 bp, Homo sapien
ctgtcaaacactggactttaaactt

SEQ ID NO: 4419230 - DNA, 25 bp, Homo sapien
agctggtcggtttccaaaagcagca

SEQ ID NO: 4419231 - DNA, 25 bp, Homo sapien
tgggatgagaatctgactctacata

SEQ ID NO: 4419232 - DNA, 25 bp, Homo sapien
ggctcttcaccaggctactgcttct

SEQ ID NO: 4419233 - DNA, 25 bp, Homo sapien
atatggttctcggatagggctttca

SEQ ID NO: 4419234 - DNA, 25 bp, Homo sapien
tagatgtgggcaagtggctcttcac

SEQ ID NO: 4419235 - DNA, 25 bp, Homo sapien
tcctacttgcttgtatgaatacaca

SEQ ID NO: 4419236 - DNA, 25 bp, Homo sapien
ggtctttgcatgttcctgtaccagc

SEQ ID NO: 4419237 - DNA, 25 bp, Homo sapien
tattctattcaaagacactcctact

SEQ ID NO: 4419238 - DNA, 25 bp, Homo sapien
gggttgacggtaaatattctattca

SEQ ID NO: 4419239 - DNA, 25 bp, Homo sapien
aacgagacattgtcacagtcagcca

SEQ ID NO: 4419240 - DNA, 25 bp, Homo sapien
gccacttagaacagtggaggtggca

SEQ ID NO: 4419241 - DNA, 25 bp, Homo sapien
catgaaaacagactataacacagat

SEQ ID NO: 4419242 - DNA, 25 bp, Homo sapien
gaaaacagactataacacagatcct

SEQ ID NO: 4419243 - DNA, 25 bp, Homo sapien
gccttagccttccaagtagttggat

SEQ ID NO: 4419244 - DNA, 25 bp, Homo sapien
ttagccttccaagtagttggattac

SEQ ID NO: 4419245 - DNA, 25 bp, Homo sapien
ttacaggtgcaagctgccatgcctg

SEQ ID NO: 4419246 - DNA, 25 bp, Homo sapien
tttttttggcatttctagtagagac

SEQ ID NO: 4419247 - DNA, 25 bp, Homo sapien
cagtggctctctccaaaaggtgaag

SEQ ID NO: 4419248 - DNA, 25 bp, Homo sapien
tactgaaggtatccgaacagggaaa

SEQ ID NO: 4419249 - DNA, 25 bp, Homo sapien
cgtggtcgactacttcacagagtct

SEQ ID NO: 4419250 - DNA, 25 bp, Homo sapien
tcagcaacgggaaaacgtggtcgac

SEQ ID NO: 4419251 - DNA, 25 bp, Homo sapien
ggagacctatcctttaatgggtgac

SEQ ID NO: 4419252 - DNA, 25 bp, Homo sapien
cggaaaggcagcgtcgtaactggca

SEQ ID NO: 4419253 - DNA, 25 bp, Homo sapien
gacccggtggcgtccagatttctat

SEQ ID NO: 4419254 - DNA, 25 bp, Homo sapien
tctaaggcgttgcaaagttaccatg

SEQ ID NO: 4419255 - DNA, 25 bp, Homo sapien
tcttgcttagaaatgtcagccccgg

SEQ ID NO: 4419256 - DNA, 25 bp, Homo sapien
ggagagctcccaacagaagtcagta

SEQ ID NO: 4419257 - DNA, 25 bp, Homo sapien
tgttaatatgccagccttgccaggg

SEQ ID NO: 4419258 - DNA, 25 bp, Homo sapien
tacaacggaggcaacaactctgtgg

SEQ ID NO: 4419259 - DNA, 25 bp, Homo sapien
gagaaaccgtctgaacctttgcagg

SEQ ID NO: 4419260 - DNA, 25 bp, Homo sapien
aagaagaccacagggaaggtgaggc

SEQ ID NO: 4419261 - DNA, 25 bp, Homo sapien
cacagagagcttggtatgggtctgc

SEQ ID NO: 4419262 - DNA, 25 bp, Homo sapien
tctgcttgaagaagaccacagggaa

SEQ ID NO: 4419263 - DNA, 25 bp, Homo sapien
ggtatgggtctgcttgaagaagacc

SEQ ID NO: 4419264 - DNA, 25 bp, Homo sapien
gcaccacagcataattgggtccttg

SEQ ID NO: 4419265 - DNA, 25 bp, Homo sapien
caggaagtgcctaccccatttttca

SEQ ID NO: 4419266 - DNA, 25 bp, Homo sapien
cataatttgcttagtcctgtgtccc

SEQ ID NO: 4419267 - DNA, 25 bp, Homo sapien
tgcacacaatgattcaaccctgagg

SEQ ID NO: 4419268 - DNA, 25 bp, Homo sapien
tctactctgtgtagccacctcactt

SEQ ID NO: 4419269 - DNA, 25 bp, Homo sapien
ctgtcttctactctgtgtagccacc

SEQ ID NO: 4419270 - DNA, 25 bp, Homo sapien
gccacctcacttccaataagtatct

SEQ ID NO: 4419271 - DNA, 25 bp, Homo sapien
acctcacttccaataagtatctgca

SEQ ID NO: 4419272 - DNA, 25 bp, Homo sapien
tgacagccctggattcctactagaa

SEQ ID NO: 4419273 - DNA, 25 bp, Homo sapien
ctccaacttcaccagatccaaaggg

SEQ ID NO: 4419274 - DNA, 25 bp, Homo sapien
tagaacatgcatctgtcgtttttgt

SEQ ID NO: 4419275 - DNA, 25 bp, Homo sapien
acttgagtaatatggcaggtcagcc

SEQ ID NO: 4419276 - DNA, 25 bp, Homo sapien
caggtgaacagttggctcctcaaac

SEQ ID NO: 4419277 - DNA, 25 bp, Homo sapien
tcccaacagtaagaagtcagtgaac

SEQ ID NO: 4419278 - DNA, 25 bp, Homo sapien
ctcaaacatctccagagggctagga

SEQ ID NO: 4419279 - DNA, 25 bp, Homo sapien
agagctgagactatgccgagggaac

SEQ ID NO: 4419280 - DNA, 25 bp, Homo sapien
gatgctgtccaaccgcagagtggag

SEQ ID NO: 4419281 - DNA, 25 bp, Homo sapien
ccgcagagtggagtctgcacagaga

SEQ ID NO: 4419282 - DNA, 25 bp, Homo sapien
agagatcttcacaatccctgagctg

SEQ ID NO: 4419283 - DNA, 25 bp, Homo sapien
caaaatgcatgtctcagggatgctg

SEQ ID NO: 4419284 - DNA, 25 bp, Homo sapien
cagcagcatcgctaaggcccggcaa

SEQ ID NO: 4419285 - DNA, 25 bp, Homo sapien
acagggcacaaagcctcgggggagg

SEQ ID NO: 4419286 - DNA, 25 bp, Homo sapien
agcagcatcgctaaggcccggcaac

SEQ ID NO: 4419287 - DNA, 25 bp, Homo sapien
tgcagcagcatcgctaaggcccggc

SEQ ID NO: 4419288 - DNA, 25 bp, Homo sapien
tgaaccaatgttggccagcagacct

SEQ ID NO: 4419289 - DNA, 25 bp, Homo sapien
tgcatagagtgactaccaggtccca

SEQ ID NO: 4419290 - DNA, 25 bp, Homo sapien
tgcacaagggttcaagagtcagaga

SEQ ID NO: 4419291 - DNA, 25 bp, Homo sapien
gcaactcaggaagacaataagcccc

SEQ ID NO: 4419292 - DNA, 25 bp, Homo sapien
gagggagatggtacccagatcttca

SEQ ID NO: 4419293 - DNA, 25 bp, Homo sapien
gtctgctgagctatgtggattttcc

SEQ ID NO: 4419294 - DNA, 25 bp, Homo sapien
ttttccaccagcgatacaacatttc

SEQ ID NO: 4419295 - DNA, 25 bp, Homo sapien
tccaccagcgatacaacatttccct

SEQ ID NO: 4419296 - DNA, 25 bp, Homo sapien
taagcacagcgtgttctggattctg

SEQ ID NO: 4419297 - DNA, 25 bp, Homo sapien
tgttctggattctggttgatcacaa

SEQ ID NO: 4419298 - DNA, 25 bp, Homo sapien
tcactccattaagcacagcgtgttc

SEQ ID NO: 4419299 - DNA, 25 bp, Homo sapien
tcacaggcagttcactccattaagc

SEQ ID NO: 4419300 - DNA, 25 bp, Homo sapien
caagacgattcaaagggaagggcgc

SEQ ID NO: 4419301 - DNA, 25 bp, Homo sapien
taggccgggtgagccatcaggtaaa

SEQ ID NO: 4419302 - DNA, 25 bp, Homo sapien
tccccagacaaaggacatgaccttc

SEQ ID NO: 4419303 - DNA, 25 bp, Homo sapien
ctgaggcaagttgtgtctggccttc

SEQ ID NO: 4419304 - DNA, 25 bp, Homo sapien
aaagatgcaggctcagctgaagtcc

SEQ ID NO: 4419305 - DNA, 25 bp, Homo sapien
ctcctgggagaacccttaaggagag

SEQ ID NO: 4419306 - DNA, 25 bp, Homo sapien
gaggccgaacaaaccctcagagtcg

SEQ ID NO: 4419307 - DNA, 25 bp, Homo sapien
tgatttattaagggagttctcctgg

SEQ ID NO: 4419308 - DNA, 25 bp, Homo sapien
cacgaagaacttgatggcatgatga

SEQ ID NO: 4419309 - DNA, 25 bp, Homo sapien
agaacttgatggcatgatgagaatc

SEQ ID NO: 4419310 - DNA, 25 bp, Homo sapien
tgaggaacacgaagaacttgatggc

SEQ ID NO: 4419311 - DNA, 25 bp, Homo sapien
tccctccttgaggaacacgaagaac

SEQ ID NO: 4419312 - DNA, 25 bp, Homo sapien
gctatcgacactcctggaggtttct

SEQ ID NO: 4419313 - DNA, 25 bp, Homo sapien
acaatcctggacattctttggatct

SEQ ID NO: 4419314 - DNA, 25 bp, Homo sapien
aggactctcttcatgtccccgtgca

SEQ ID NO: 4419315 - DNA, 25 bp, Homo sapien
gagctatcgacactcctggaggttt

SEQ ID NO: 4419316 - DNA, 25 bp, Homo sapien
ttgagttatctttctcccgagtctc

SEQ ID NO: 4419317 - DNA, 25 bp, Homo sapien
atttgagttatctttctcccgagtc

SEQ ID NO: 4419318 - DNA, 25 bp, Homo sapien
gagttatctttctcccgagtctctc

SEQ ID NO: 4419319 - DNA, 25 bp, Homo sapien
ttatctttctcccgagtctctcctt

SEQ ID NO: 4419320 - DNA, 25 bp, Homo sapien
tacactctgattagtccgtgggcac

SEQ ID NO: 4419321 - DNA, 25 bp, Homo sapien
aatgctacactctgattagtccgtg

SEQ ID NO: 4419322 - DNA, 25 bp, Homo sapien
tctgattagtccgtgggcacaggaa

SEQ ID NO: 4419323 - DNA, 25 bp, Homo sapien
tccgtgggcacaggaagtcttgatt

SEQ ID NO: 4419324 - DNA, 25 bp, Homo sapien
tgcgaattgcctgatgagactggaa

SEQ ID NO: 4419325 - DNA, 25 bp, Homo sapien
cgatcatgcgcttttcttagaatca

SEQ ID NO: 4419326 - DNA, 25 bp, Homo sapien
ggagcaataacatgtcttcataggc

SEQ ID NO: 4419327 - DNA, 25 bp, Homo sapien
gaggcgcaagcactgcgtctatgcg

SEQ ID NO: 4419328 - DNA, 25 bp, Homo sapien
acctttcaaccttacagagccctat

SEQ ID NO: 4419329 - DNA, 25 bp, Homo sapien
cttacacaacctttcaaccttacag

SEQ ID NO: 4419330 - DNA, 25 bp, Homo sapien
ctatgatggaatggccggagggagc

SEQ ID NO: 4419331 - DNA, 25 bp, Homo sapien
tttcaaccttacagagccctatgat

SEQ ID NO: 4419332 - DNA, 25 bp, Homo sapien
gccacagaaactcctacagtaacta

SEQ ID NO: 4419333 - DNA, 25 bp, Homo sapien
gaaactcctacagtaactatggctc

SEQ ID NO: 4419334 - DNA, 25 bp, Homo sapien
ctcctacagtaactatggctcttgt

SEQ ID NO: 4419335 - DNA, 25 bp, Homo sapien
acagaaactcctacagtaactatgg

SEQ ID NO: 4419336 - DNA, 25 bp, Homo sapien
ccaaggtcagggaactggcatggga

SEQ ID NO: 4419337 - DNA, 25 bp, Homo sapien
aaggtcagggaactggcatgggaca

SEQ ID NO: 4419338 - DNA, 25 bp, Homo sapien
aagactgcatacacatccagcacat

SEQ ID NO: 4419339 - DNA, 25 bp, Homo sapien
tgcatacacatccagcacatgtcct

SEQ ID NO: 4419340 - DNA, 25 bp, Homo sapien
aattgaatcagcaatggcacactca

SEQ ID NO: 4419341 - DNA, 25 bp, Homo sapien
gtacgcagccacatgagatgcacat

SEQ ID NO: 4419342 - DNA, 25 bp, Homo sapien
caggagtacgcagccacatgagatg

SEQ ID NO: 4419343 - DNA, 25 bp, Homo sapien
catgcatggtaaaaacgtaatgaac

SEQ ID NO: 4419344 - DNA, 25 bp, Homo sapien
ttcatgactagaaacaaatcttcct

SEQ ID NO: 4419345 - DNA, 25 bp, Homo sapien
aacaaatcttcctcagctgctattt

SEQ ID NO: 4419346 - DNA, 25 bp, Homo sapien
ggttcatgactagaaacaaatcttc

SEQ ID NO: 4419347 - DNA, 25 bp, Homo sapien
tggttcatgactagaaacaaatctt

SEQ ID NO: 4419348 - DNA, 25 bp, Homo sapien
cagagacactccagatatgcctcgt

SEQ ID NO: 4419349 - DNA, 25 bp, Homo sapien
gagacactccagatatgcctcgtgg

SEQ ID NO: 4419350 - DNA, 25 bp, Homo sapien
ggcatttgccatatttaaacgtagt

SEQ ID NO: 4419351 - DNA, 25 bp, Homo sapien
cactccagatatgcctcgtggtcag

SEQ ID NO: 4419352 - DNA, 25 bp, Homo sapien
tctgcttgtgaccagccctatcaaa

SEQ ID NO: 4419353 - DNA, 25 bp, Homo sapien
gcagcaggaatcaggctaccatgga

SEQ ID NO: 4419354 - DNA, 25 bp, Homo sapien
aatcaggctaccatggaaattctgc

SEQ ID NO: 4419355 - DNA, 25 bp, Homo sapien
aaattctgcttgtgaccagccctat

SEQ ID NO: 4419356 - DNA, 25 bp, Homo sapien
gtggtgggtgaagctggggggctgt

SEQ ID NO: 4419357 - DNA, 25 bp, Homo sapien
tggggggctgtggcctggttccagg

SEQ ID NO: 4419358 - DNA, 25 bp, Homo sapien
ctggggggctgtggcctggttccag

SEQ ID NO: 4419359 - DNA, 25 bp, Homo sapien
ggtagggaggtggtgggtgaagctg

SEQ ID NO: 4419360 - DNA, 25 bp, Homo sapien
tgttcacaaaggcccgaagctcatt

SEQ ID NO: 4419361 - DNA, 25 bp, Homo sapien
ggcccgaagctcattcactttgcgg

SEQ ID NO: 4419362 - DNA, 25 bp, Homo sapien
catgttcacaaaggcccgaagctca

SEQ ID NO: 4419363 - DNA, 25 bp, Homo sapien
gaagctcattcactttgcgggggtc

SEQ ID NO: 4419364 - DNA, 25 bp, Homo sapien
tttcctcggtgtgcagaacactcag

SEQ ID NO: 4419365 - DNA, 25 bp, Homo sapien
atttcctcggtgtgcagaacactca

SEQ ID NO: 4419366 - DNA, 25 bp, Homo sapien
cctcggtgtgcagaacactcagatc

SEQ ID NO: 4419367 - DNA, 25 bp, Homo sapien
tcaggaagcacatttcctcggtgtg

SEQ ID NO: 4419368 - DNA, 25 bp, Homo sapien
tcctcacttgatggttcgtctgcct

SEQ ID NO: 4419369 - DNA, 25 bp, Homo sapien
tttcctcacttgatggttcgtctgc

SEQ ID NO: 4419370 - DNA, 25 bp, Homo sapien
ctcacttgatggttcgtctgccttt

SEQ ID NO: 4419371 - DNA, 25 bp, Homo sapien
cttcctccaccttcttactattagg

SEQ ID NO: 4419372 - DNA, 25 bp, Homo sapien
tcaatcacaccttctttgtcaattt

SEQ ID NO: 4419373 - DNA, 25 bp, Homo sapien
aaacagccaagcgaggattcagctt

SEQ ID NO: 4419374 - DNA, 25 bp, Homo sapien
tcctccgttatctctgcattttcac

SEQ ID NO: 4419375 - DNA, 25 bp, Homo sapien
tccgttatctctgcattttcacctc

SEQ ID NO: 4419376 - DNA, 25 bp, Homo sapien
aagtctatgtgctttccctcgccac

SEQ ID NO: 4419377 - DNA, 25 bp, Homo sapien
tctatgtgctttccctcgccacttg

SEQ ID NO: 4419378 - DNA, 25 bp, Homo sapien
tagaagtctatgtgctttccctcgc

SEQ ID NO: 4419379 - DNA, 25 bp, Homo sapien
atgtgctttccctcgccacttgtga

SEQ ID NO: 4419380 - DNA, 25 bp, Homo sapien
gccttcttaactcattctattcttg

SEQ ID NO: 4419381 - DNA, 25 bp, Homo sapien
ttctcgagccttcttaactcattct

SEQ ID NO: 4419382 - DNA, 25 bp, Homo sapien
tctcgagccttcttaactcattcta

SEQ ID NO: 4419383 - DNA, 25 bp, Homo sapien
cttaactcattctattcttgctttg

SEQ ID NO: 4419384 - DNA, 25 bp, Homo sapien
ctgagctcctgactgcggtctggct

SEQ ID NO: 4419385 - DNA, 25 bp, Homo sapien
agccatactgagctcctgactgcgg

SEQ ID NO: 4419386 - DNA, 25 bp, Homo sapien
gggaaaattgccaggcattccccca

SEQ ID NO: 4419387 - DNA, 25 bp, Homo sapien
catactgagctcctgactgcggtct

SEQ ID NO: 4419388 - DNA, 25 bp, Homo sapien
ttgagtccaggcattccggccattc

SEQ ID NO: 4419389 - DNA, 25 bp, Homo sapien
atttcattgagtccaggcattccgg

SEQ ID NO: 4419390 - DNA, 25 bp, Homo sapien
aggcattccggccattccaggcatt

SEQ ID NO: 4419391 - DNA, 25 bp, Homo sapien
ccaggcattccggccattccaggca

SEQ ID NO: 4419392 - DNA, 25 bp, Homo sapien
ctggatcctgtatggttgcaagaac

SEQ ID NO: 4419393 - DNA, 25 bp, Homo sapien
tggatcctgtatggttgcaagaacc

SEQ ID NO: 4419394 - DNA, 25 bp, Homo sapien
atcctgtatggttgcaagaacctct

SEQ ID NO: 4419395 - DNA, 25 bp, Homo sapien
acttctggatcctgtatggttgcaa

SEQ ID NO: 4419396 - DNA, 25 bp, Homo sapien
gaaactgttcttgagttaagccaag

SEQ ID NO: 4419397 - DNA, 25 bp, Homo sapien
agaaactgttcttgagttaagccaa

SEQ ID NO: 4419398 - DNA, 25 bp, Homo sapien
aagaaactgttcttgagttaagcca

SEQ ID NO: 4419399 - DNA, 25 bp, Homo sapien
gaagaaactgttcttgagttaagcc

SEQ ID NO: 4419400 - DNA, 25 bp, Homo sapien
cagtttacgcacattacctgggcca

SEQ ID NO: 4419401 - DNA, 25 bp, Homo sapien
taatggctgctataatgagtaacgc

SEQ ID NO: 4419402 - DNA, 25 bp, Homo sapien
taggatagacgtgatccctggaata

SEQ ID NO: 4419403 - DNA, 25 bp, Homo sapien
caactctgcaggtcgtagatgtcaa

SEQ ID NO: 4419404 - DNA, 25 bp, Homo sapien
tgcttggaacttgttccaaggaacc

SEQ ID NO: 4419405 - DNA, 25 bp, Homo sapien
catttaagcctgtggtgcttggaac

SEQ ID NO: 4419406 - DNA, 25 bp, Homo sapien
caaggaaccccacgttctaacagca

SEQ ID NO: 4419407 - DNA, 25 bp, Homo sapien
tacatgtttcatttaagcctgtggt

SEQ ID NO: 4419408 - DNA, 25 bp, Homo sapien
ccttccatagcaagtgttagctggg

SEQ ID NO: 4419409 - DNA, 25 bp, Homo sapien
caggccttccatagcaagtgttagc

SEQ ID NO: 4419410 - DNA, 25 bp, Homo sapien
tgagtgaggacggtgtgtccaggcc

SEQ ID NO: 4419411 - DNA, 25 bp, Homo sapien
gtccaggccttccatagcaagtgtt

SEQ ID NO: 4419412 - DNA, 25 bp, Homo sapien
gttttggctttctggcaacaaaaga

SEQ ID NO: 4419413 - DNA, 25 bp, Homo sapien
caaaattccagcttcggttttggct

SEQ ID NO: 4419414 - DNA, 25 bp, Homo sapien
gtctgctccggcctgatttcagtcc

SEQ ID NO: 4419415 - DNA, 25 bp, Homo sapien
agtccccgacgaggcagcactgatg

SEQ ID NO: 4419416 - DNA, 25 bp, Homo sapien
cattgttgcagagtaattttatcgc

SEQ ID NO: 4419417 - DNA, 25 bp, Homo sapien
catcctaattggtggcttttgagcc

SEQ ID NO: 4419418 - DNA, 25 bp, Homo sapien
gctgggcctcgttccctctggtgga

SEQ ID NO: 4419419 - DNA, 25 bp, Homo sapien
cagcttgggcacattcgctgggcct

SEQ ID NO: 4419420 - DNA, 25 bp, Homo sapien
gtttgctaggccctgatctccctgc

SEQ ID NO: 4419421 - DNA, 25 bp, Homo sapien
tgtcctcaaagtttgctaggccctg

SEQ ID NO: 4419422 - DNA, 25 bp, Homo sapien
ggcacaccaaaggtgtcctcaaagt

SEQ ID NO: 4419423 - DNA, 25 bp, Homo sapien
tgtggtttctcagatccagacccat

SEQ ID NO: 4419424 - DNA, 25 bp, Homo sapien
cagttcctgaaacaaagggctggtc

SEQ ID NO: 4419425 - DNA, 25 bp, Homo sapien
tgttctcgagtcctgtgccatgcac

SEQ ID NO: 4419426 - DNA, 25 bp, Homo sapien
caatgtcgggccagagctgatcaga

SEQ ID NO: 4419427 - DNA, 25 bp, Homo sapien
gcgtgatccacctcaacgtgctgta

SEQ ID NO: 4419428 - DNA, 25 bp, Homo sapien
tgggcttcacatgtagaacaaagtt

SEQ ID NO: 4419429 - DNA, 25 bp, Homo sapien
gttctcaatatttgtctgctcagcc

SEQ ID NO: 4419430 - DNA, 25 bp, Homo sapien
ggtggtgggcttcacatgtagaaca

SEQ ID NO: 4419431 - DNA, 25 bp, Homo sapien
cattttgttctcaatatttgtctgc

SEQ ID NO: 4419432 - DNA, 25 bp, Homo sapien
gctgaaatcgtagctgtagacgccg

SEQ ID NO: 4419433 - DNA, 25 bp, Homo sapien
tgcaaagatccagattatgggccac

SEQ ID NO: 4419434 - DNA, 25 bp, Homo sapien
tcctgagcaagcttagcagtaggct

SEQ ID NO: 4419435 - DNA, 25 bp, Homo sapien
cagtaggcttaaggctgcttctcaa

SEQ ID NO: 4419436 - DNA, 25 bp, Homo sapien
tcaaaactgagagtgaaaacgacca

SEQ ID NO: 4419437 - DNA, 25 bp, Homo sapien
gagtgaaaacgaccaaaccagggca

SEQ ID NO: 4419438 - DNA, 25 bp, Homo sapien
ggaccttctgactccattctggaaa

SEQ ID NO: 4419439 - DNA, 25 bp, Homo sapien
aaaataggaccttctgactccattc

SEQ ID NO: 4419440 - DNA, 25 bp, Homo sapien
tctggtctgtgactacaaactgcag

SEQ ID NO: 4419441 - DNA, 25 bp, Homo sapien
ctctggtctgtgactacaaactgca

SEQ ID NO: 4419442 - DNA, 25 bp, Homo sapien
cctctggtctgtgactacaaactgc

SEQ ID NO: 4419443 - DNA, 25 bp, Homo sapien
tggagaacaggaacatctcagagcc

SEQ ID NO: 4419444 - DNA, 25 bp, Homo sapien
gcagagaccggtgttccttcagcca

SEQ ID NO: 4419445 - DNA, 25 bp, Homo sapien
acataggcagtgtcggcagagaccg

SEQ ID NO: 4419446 - DNA, 25 bp, Homo sapien
actcagcagacagttcagacccaga

SEQ ID NO: 4419447 - DNA, 25 bp, Homo sapien
ctcgagggggttctggaaggtccat

SEQ ID NO: 4419448 - DNA, 25 bp, Homo sapien
tcgagggggttctggaaggtccatc

SEQ ID NO: 4419449 - DNA, 25 bp, Homo sapien
cgagggggttctggaaggtccatct

SEQ ID NO: 4419450 - DNA, 25 bp, Homo sapien
tgacagccatgaccctacgaccctg

SEQ ID NO: 4419451 - DNA, 25 bp, Homo sapien
atgaccctacgaccctgtttctgtg

SEQ ID NO: 4419452 - DNA, 25 bp, Homo sapien
tctgtgtcttaaattcaccttcctt

SEQ ID NO: 4419453 - DNA, 25 bp, Homo sapien
ctgtttctgtgtcttaaattcacct

SEQ ID NO: 4419454 - DNA, 25 bp, Homo sapien
tcctctcttattggtgttgtaagga

SEQ ID NO: 4419455 - DNA, 25 bp, Homo sapien
ctctcttattggtgttgtaaggaaa

SEQ ID NO: 4419456 - DNA, 25 bp, Homo sapien
gtaacaccatgcctccagggaccct

SEQ ID NO: 4419457 - DNA, 25 bp, Homo sapien
cctctcttattggtgttgtaaggaa

SEQ ID NO: 4419458 - DNA, 25 bp, Homo sapien
gaatgttattcccagcatccattta

SEQ ID NO: 4419459 - DNA, 25 bp, Homo sapien
tcaaaacagcctgtctgtcggtgct

SEQ ID NO: 4419460 - DNA, 25 bp, Homo sapien
tgaaatcaggcaggtccccggtcac

SEQ ID NO: 4419461 - DNA, 25 bp, Homo sapien
ttgatagagggcctggaatacacag

SEQ ID NO: 4419462 - DNA, 25 bp, Homo sapien
ttgatgggcagccaagattccatac

SEQ ID NO: 4419463 - DNA, 25 bp, Homo sapien
cagccagtctgctgagttgatgggc

SEQ ID NO: 4419464 - DNA, 25 bp, Homo sapien
cagttttctatccaaacaggcctgg

SEQ ID NO: 4419465 - DNA, 25 bp, Homo sapien
tccatactgaaataacaaggacgta

SEQ ID NO: 4419466 - DNA, 25 bp, Homo sapien
gagggggaggcctgggtaagccaca

SEQ ID NO: 4419467 - DNA, 25 bp, Homo sapien
aggcctgggtaagccacagaggcag

SEQ ID NO: 4419468 - DNA, 25 bp, Homo sapien
gaggcctgggtaagccacagaggca

SEQ ID NO: 4419469 - DNA, 25 bp, Homo sapien
ggggaggcctgggtaagccacagag

SEQ ID NO: 4419470 - DNA, 25 bp, Homo sapien
tctaggaaagaggagtagcagaccc

SEQ ID NO: 4419471 - DNA, 25 bp, Homo sapien
tatccatgtcctggaatccacaaag

SEQ ID NO: 4419472 - DNA, 25 bp, Homo sapien
agttctctgagacccggatgctgta

SEQ ID NO: 4419473 - DNA, 25 bp, Homo sapien
ctgggcacagagagttatccatgtc

SEQ ID NO: 4419474 - DNA, 25 bp, Homo sapien
ttagtgaacttcttttcgataggaa

SEQ ID NO: 4419475 - DNA, 25 bp, Homo sapien
tgaacttcttttcgataggaaaggc

SEQ ID NO: 4419476 - DNA, 25 bp, Homo sapien
gaacttcttttcgataggaaaggca

SEQ ID NO: 4419477 - DNA, 25 bp, Homo sapien
cttcttttcgataggaaaggcagaa

SEQ ID NO: 4419478 - DNA, 25 bp, Homo sapien
taaaaactatattgggagccggctg

SEQ ID NO: 4419479 - DNA, 25 bp, Homo sapien
ggctggcccgccatctgtggatgca

SEQ ID NO: 4419480 - DNA, 25 bp, Homo sapien
ccttctgtagagcacgctgcgcgtg

SEQ ID NO: 4419481 - DNA, 25 bp, Homo sapien
gcagttgttaaatgggacttccgaa

SEQ ID NO: 4419482 - DNA, 25 bp, Homo sapien
ctgtgtccttacttcgtgccttatt

SEQ ID NO: 4419483 - DNA, 25 bp, Homo sapien
gcttgtccccagtgcacacagtctg

SEQ ID NO: 4419484 - DNA, 25 bp, Homo sapien
tgcttgtccccagtgcacacagtct

SEQ ID NO: 4419485 - DNA, 25 bp, Homo sapien
tgtgtccttacttcgtgccttattt

SEQ ID NO: 4419486 - DNA, 25 bp, Homo sapien
atatgaagcccatcagtgtttgagt

SEQ ID NO: 4419487 - DNA, 25 bp, Homo sapien
tcatgagaaaaccatgcctggcata

SEQ ID NO: 4419488 - DNA, 25 bp, Homo sapien
ctcatgagaaaaccatgcctggcat

SEQ ID NO: 4419489 - DNA, 25 bp, Homo sapien
ctggcatatgaagcccatcagtgtt

SEQ ID NO: 4419490 - DNA, 25 bp, Homo sapien
tagcagtgtcactgagacatacgac

SEQ ID NO: 4419491 - DNA, 25 bp, Homo sapien
gacactgtacaatgtggcccctgcc

SEQ ID NO: 4419492 - DNA, 25 bp, Homo sapien
tcactgagacatacgacactgtaca

SEQ ID NO: 4419493 - DNA, 25 bp, Homo sapien
atttggcacatcattagcagtgtca

SEQ ID NO: 4419494 - DNA, 25 bp, Homo sapien
agtccaatatatttggccaagggtg

SEQ ID NO: 4419495 - DNA, 25 bp, Homo sapien
gaagctgtaacagagtccaatatat

SEQ ID NO: 4419496 - DNA, 25 bp, Homo sapien
gtaacagagtccaatatatttggcc

SEQ ID NO: 4419497 - DNA, 25 bp, Homo sapien
tggagaagctgtaacagagtccaat

SEQ ID NO: 4419498 - DNA, 25 bp, Homo sapien
gacaacactctagatggtttctctc

SEQ ID NO: 4419499 - DNA, 25 bp, Homo sapien
actttacaggcttaaatgtatcagg

SEQ ID NO: 4419500 - DNA, 25 bp, Homo sapien
agttttggccactggacaccatgac

SEQ ID NO: 4419501 - DNA, 25 bp, Homo sapien
cccggtagagttcttatcattccat

SEQ ID NO: 4419502 - DNA, 25 bp, Homo sapien
ggtttccagggcagattgtggcttt

SEQ ID NO: 4419503 - DNA, 25 bp, Homo sapien
cagggcagattgtggctttcaggct

SEQ ID NO: 4419504 - DNA, 25 bp, Homo sapien
cacctcctgatgtagtggaagcagg

SEQ ID NO: 4419505 - DNA, 25 bp, Homo sapien
tttcaggctttatcaggcattgaag

SEQ ID NO: 4419506 - DNA, 25 bp, Homo sapien
tataagctctagaaagcttctttcc

SEQ ID NO: 4419507 - DNA, 25 bp, Homo sapien
gactcggccccgtatataagctcta

SEQ ID NO: 4419508 - DNA, 25 bp, Homo sapien
ttttcctcccactggtgtttcacac

SEQ ID NO: 4419509 - DNA, 25 bp, Homo sapien
tgatgaagtgtgcatgactcggccc

SEQ ID NO: 4419510 - DNA, 25 bp, Homo sapien
cagaaatgctatgtgccaactccag

SEQ ID NO: 4419511 - DNA, 25 bp, Homo sapien
tgtgacctggatttcagacctaaga

SEQ ID NO: 4419512 - DNA, 25 bp, Homo sapien
taaacccctgtgcatcctgctcatg

SEQ ID NO: 4419513 - DNA, 25 bp, Homo sapien
gaagaatgatggtctgggtcgtccc

SEQ ID NO: 4419514 - DNA, 25 bp, Homo sapien
gaagcagggctctgtctgtctgttg

SEQ ID NO: 4419515 - DNA, 25 bp, Homo sapien
ctgtctgtctgttgattgctctagg

SEQ ID NO: 4419516 - DNA, 25 bp, Homo sapien
tgtctgtctgttgattgctctaggg

SEQ ID NO: 4419517 - DNA, 25 bp, Homo sapien
ctgtctgttgattgctctaggggtt

SEQ ID NO: 4419518 - DNA, 25 bp, Homo sapien
gtctgtttcagcgtgtgagctccag

SEQ ID NO: 4419519 - DNA, 25 bp, Homo sapien
caacaaccctgaggtgttgcatcct

SEQ ID NO: 4419520 - DNA, 25 bp, Homo sapien
gtttcagcgtgtgagctccaggaga

SEQ ID NO: 4419521 - DNA, 25 bp, Homo sapien
aaccctgaggtgttgcatcctgtct

SEQ ID NO: 4419522 - DNA, 25 bp, Homo sapien
ctttgacatctgcctctctggtggc

SEQ ID NO: 4419523 - DNA, 25 bp, Homo sapien
tttgacatctgcctctctggtggca

SEQ ID NO: 4419524 - DNA, 25 bp, Homo sapien
ctctctggtggcacttagcgcagtg

SEQ ID NO: 4419525 - DNA, 25 bp, Homo sapien
cctctctggtggcacttagcgcagt

SEQ ID NO: 4419526 - DNA, 25 bp, Homo sapien
ccttctttccttcggatctgacttt

SEQ ID NO: 4419527 - DNA, 25 bp, Homo sapien
tccttcggatctgactttcccagag

SEQ ID NO: 4419528 - DNA, 25 bp, Homo sapien
gccttctttccttcggatctgactt

SEQ ID NO: 4419529 - DNA, 25 bp, Homo sapien
tttccttcggatctgactttcccag

SEQ ID NO: 4419530 - DNA, 25 bp, Homo sapien
catgtgccatgaagggctcaatgga

SEQ ID NO: 4419531 - DNA, 25 bp, Homo sapien
tgaaaacagccggaaggtacagtca

SEQ ID NO: 4419532 - DNA, 25 bp, Homo sapien
aacagccggaaggtacagtcatgtg

SEQ ID NO: 4419533 - DNA, 25 bp, Homo sapien
acagtcatgtgccatgaagggctca

SEQ ID NO: 4419534 - DNA, 25 bp, Homo sapien
gaggataaatatgaaagggtctctc

SEQ ID NO: 4419535 - DNA, 25 bp, Homo sapien
catctgaagtgtcacttagaatcac

SEQ ID NO: 4419536 - DNA, 25 bp, Homo sapien
gaatcactaccctggcttctatctt

SEQ ID NO: 4419537 - DNA, 25 bp, Homo sapien
tttgtatgaaacaggaatcccaatt

SEQ ID NO: 4419538 - DNA, 25 bp, Homo sapien
tttttcatctcaggtagctgaagag

SEQ ID NO: 4419539 - DNA, 25 bp, Homo sapien
cttgatgaggaggaccgggaagggc

SEQ ID NO: 4419540 - DNA, 25 bp, Homo sapien
cacacagcttgatgaggaggaccgg

SEQ ID NO: 4419541 - DNA, 25 bp, Homo sapien
acacacacagcttgatgaggaggac

SEQ ID NO: 4419542 - DNA, 25 bp, Homo sapien
gcttgatgaggaggaccgggaaggg

SEQ ID NO: 4419543 - DNA, 25 bp, Homo sapien
gaacttgatcccaggtcttacaaga

SEQ ID NO: 4419544 - DNA, 25 bp, Homo sapien
gtaagaggttaacaccaggaacaca

SEQ ID NO: 4419545 - DNA, 25 bp, Homo sapien
caagtcccctattgtaccgtactgt

SEQ ID NO: 4419546 - DNA, 25 bp, Homo sapien
tagtgagcaagggaaacagtaagag

SEQ ID NO: 4419547 - DNA, 25 bp, Homo sapien
tgtgtcccatcactcaatcttgctg

SEQ ID NO: 4419548 - DNA, 25 bp, Homo sapien
ttgaaatctcaagcgctgtgtccca

SEQ ID NO: 4419549 - DNA, 25 bp, Homo sapien
ccattctacgatacagcagggtgag

SEQ ID NO: 4419550 - DNA, 25 bp, Homo sapien
gaagctaatcatgttgagtacgaca

SEQ ID NO: 4419551 - DNA, 25 bp, Homo sapien
ttccattcaaccacatgtgccccca

SEQ ID NO: 4419552 - DNA, 25 bp, Homo sapien
gttccattcaaccacatgtgccccc

SEQ ID NO: 4419553 - DNA, 25 bp, Homo sapien
tccattcaaccacatgtgcccccat

SEQ ID NO: 4419554 - DNA, 25 bp, Homo sapien
tgttccattcaaccacatgtgcccc

SEQ ID NO: 4419555 - DNA, 25 bp, Homo sapien
acatggtctccagctagaagtaaat

SEQ ID NO: 4419556 - DNA, 25 bp, Homo sapien
gaaagcagccatgcatgcttcgcct

SEQ ID NO: 4419557 - DNA, 25 bp, Homo sapien
gtccttttacatggtctccagctag

SEQ ID NO: 4419558 - DNA, 25 bp, Homo sapien
gcatgcttcgcctttagccatgtgg

SEQ ID NO: 4419559 - DNA, 25 bp, Homo sapien
tcccctacttcatgtgagatgagaa

SEQ ID NO: 4419560 - DNA, 25 bp, Homo sapien
ccacgcttttcccttatgcaggcaa

SEQ ID NO: 4419561 - DNA, 25 bp, Homo sapien
acaagtgctccaaggttttctgctc

SEQ ID NO: 4419562 - DNA, 25 bp, Homo sapien
gcttttcccttatgcaggcaataca

SEQ ID NO: 4419563 - DNA, 25 bp, Homo sapien
acccacgctgggatttacacatcct

SEQ ID NO: 4419564 - DNA, 25 bp, Homo sapien
cgctgggatttacacatcctccctt

SEQ ID NO: 4419565 - DNA, 25 bp, Homo sapien
cacgctgggatttacacatcctccc

SEQ ID NO: 4419566 - DNA, 25 bp, Homo sapien
aaacccacgctgggatttacacatc

SEQ ID NO: 4419567 - DNA, 25 bp, Homo sapien
ggacattccaggacatcagtctcaa

SEQ ID NO: 4419568 - DNA, 25 bp, Homo sapien
tctgcaggatttaatcagagctgat

SEQ ID NO: 4419569 - DNA, 25 bp, Homo sapien
tagagctgaatagattcctgaaggg

SEQ ID NO: 4419570 - DNA, 25 bp, Homo sapien
cctgcttccagatgagacaattctt

SEQ ID NO: 4419571 - DNA, 25 bp, Homo sapien
agtgaactacctttcagcagacctg

SEQ ID NO: 4419572 - DNA, 25 bp, Homo sapien
gaaaagggtcaaggcagcttacaga

SEQ ID NO: 4419573 - DNA, 25 bp, Homo sapien
ggtcattaatgttcactggtgtcaa

SEQ ID NO: 4419574 - DNA, 25 bp, Homo sapien
ggcagcgcaagagatggatattata

SEQ ID NO: 4419575 - DNA, 25 bp, Homo sapien
gacatgggtttggttgctactatcc

SEQ ID NO: 4419576 - DNA, 25 bp, Homo sapien
ttatcattgacatgggtttggttgc

SEQ ID NO: 4419577 - DNA, 25 bp, Homo sapien
gggtttggttgctactatccgacat

SEQ ID NO: 4419578 - DNA, 25 bp, Homo sapien
gacaggatttatcattgacatgggt

SEQ ID NO: 4419579 - DNA, 25 bp, Homo sapien
ggatgtggatcctcgttcattatct

SEQ ID NO: 4419580 - DNA, 25 bp, Homo sapien
gcttgtgggatgtggatcctcgttc

SEQ ID NO: 4419581 - DNA, 25 bp, Homo sapien
tctggcttgtgggatgtggatcctc

SEQ ID NO: 4419582 - DNA, 25 bp, Homo sapien
gtggatcctcgttcattatcttcca

SEQ ID NO: 4419583 - DNA, 25 bp, Homo sapien
taaaggaaggttgtaattgatggag

SEQ ID NO: 4419584 - DNA, 25 bp, Homo sapien
caacagcttagccaaggcatagatc

SEQ ID NO: 4419585 - DNA, 25 bp, Homo sapien
tggagtcgagaaggaggaacaatcc

SEQ ID NO: 4419586 - DNA, 25 bp, Homo sapien
ggaacaatccaaacagccaacagct

SEQ ID NO: 4419587 - DNA, 25 bp, Homo sapien
catggcatgtacttcctctgtgtgc

SEQ ID NO: 4419588 - DNA, 25 bp, Homo sapien
ggccctggaagacccttcagtcaga

SEQ ID NO: 4419589 - DNA, 25 bp, Homo sapien
cttttaatatgcctgaactttctga

SEQ ID NO: 4419590 - DNA, 25 bp, Homo sapien
cctggaagacccttcagtcagaaga

SEQ ID NO: 4419591 - DNA, 25 bp, Homo sapien
ggaacagggaccctgaagcagggcc

SEQ ID NO: 4419592 - DNA, 25 bp, Homo sapien
ggaacctacacctgcctcatttgtc

SEQ ID NO: 4419593 - DNA, 25 bp, Homo sapien
tcatgggcttgaaggcatcggcctc

SEQ ID NO: 4419594 - DNA, 25 bp, Homo sapien
gagcgggcaccacaggaacctacac

SEQ ID NO: 4419595 - DNA, 25 bp, Homo sapien
gatggtttctcactgtaggatgatg

SEQ ID NO: 4419596 - DNA, 25 bp, Homo sapien
tcagcttatgttcaattcaaccaca

SEQ ID NO: 4419597 - DNA, 25 bp, Homo sapien
gaagccatgatgtctagcccttcag

SEQ ID NO: 4419598 - DNA, 25 bp, Homo sapien
accattcgccatcctaattgcaaca

SEQ ID NO: 4419599 - DNA, 25 bp, Homo sapien
ctccacaaggattgaagccatgatg

SEQ ID NO: 4419600 - DNA, 25 bp, Homo sapien
cttggatgtgatttggtccagatca

SEQ ID NO: 4419601 - DNA, 25 bp, Homo sapien
cacttggatgtgatttggtccagat

SEQ ID NO: 4419602 - DNA, 25 bp, Homo sapien
cataggccacaggatttgcaggagg

SEQ ID NO: 4419603 - DNA, 25 bp, Homo sapien
cagatcataggccacaggatttgca

SEQ ID NO: 4419604 - DNA, 25 bp, Homo sapien
gaacactatggcaaatgaaacacag

SEQ ID NO: 4419605 - DNA, 25 bp, Homo sapien
gacaggatgttgctagactggtgat

SEQ ID NO: 4419606 - DNA, 25 bp, Homo sapien
ccatcaggtaattcacagtctaggg

SEQ ID NO: 4419607 - DNA, 25 bp, Homo sapien
gactatgttttaagcccttgacaaa

SEQ ID NO: 4419608 - DNA, 25 bp, Homo sapien
tcagatcatctaatgcccgggaaga

SEQ ID NO: 4419609 - DNA, 25 bp, Homo sapien
catcctcacagggaaaccgtgtcct

SEQ ID NO: 4419610 - DNA, 25 bp, Homo sapien
aggacactgcatgaagccccttgat

SEQ ID NO: 4419611 - DNA, 25 bp, Homo sapien
tgacctaatcatgcctaagagcccc

SEQ ID NO: 4419612 - DNA, 25 bp, Homo sapien
ttcctgagcgcctcaccaaccgtca

SEQ ID NO: 4419613 - DNA, 25 bp, Homo sapien
gggccttagtgcagctctcgtgtct

SEQ ID NO: 4419614 - DNA, 25 bp, Homo sapien
ctgggccttagtgcagctctcgtgt

SEQ ID NO: 4419615 - DNA, 25 bp, Homo sapien
caccaaccgtcacacagctgggcct

SEQ ID NO: 4419616 - DNA, 25 bp, Homo sapien
ggcctgagtggggttggtctggcac

SEQ ID NO: 4419617 - DNA, 25 bp, Homo sapien
ggagaggagactggagtggtgacct

SEQ ID NO: 4419618 - DNA, 25 bp, Homo sapien
ctgagtggggttggtctggcacagg

SEQ ID NO: 4419619 - DNA, 25 bp, Homo sapien
aggagaggagactggagtggtgacc

SEQ ID NO: 4419620 - DNA, 25 bp, Homo sapien
tattttgcttaatgtaatgatctcc

SEQ ID NO: 4419621 - DNA, 25 bp, Homo sapien
tccaggtttattttgcttaatgtaa

SEQ ID NO: 4419622 - DNA, 25 bp, Homo sapien
gtttattttgcttaatgtaatgatc

SEQ ID NO: 4419623 - DNA, 25 bp, Homo sapien
ttgcttaatgtaatgatctccagtt

SEQ ID NO: 4419624 - DNA, 25 bp, Homo sapien
catcaaacctaagtaacaatgtagc

SEQ ID NO: 4419625 - DNA, 25 bp, Homo sapien
tagaacttctcccatcaaacctaag

SEQ ID NO: 4419626 - DNA, 25 bp, Homo sapien
gagaaatggaatacagcgataattt

SEQ ID NO: 4419627 - DNA, 25 bp, Homo sapien
cacctgattttcactatcaagtaga

SEQ ID NO: 4419628 - DNA, 25 bp, Homo sapien
gctggcgcttgagttatccacagga

SEQ ID NO: 4419629 - DNA, 25 bp, Homo sapien
gatgtaactcgatgcataatgctgg

SEQ ID NO: 4419630 - DNA, 25 bp, Homo sapien
gtggaaccgggaagagatgtaactc

SEQ ID NO: 4419631 - DNA, 25 bp, Homo sapien
tatccacaggatgtgtggaaccggg

SEQ ID NO: 4419632 - DNA, 25 bp, Homo sapien
agttgcatcaggtcatgtgaccatg

SEQ ID NO: 4419633 - DNA, 25 bp, Homo sapien
ctctgagacaacaggcagttctgtc

SEQ ID NO: 4419634 - DNA, 25 bp, Homo sapien
gtcatgtgaccatggtggctcggca

SEQ ID NO: 4419635 - DNA, 25 bp, Homo sapien
gcctctgagacaacaggcagttctg

SEQ ID NO: 4419636 - DNA, 25 bp, Homo sapien
gctcaggaaatgtacccaagagaat

SEQ ID NO: 4419637 - DNA, 25 bp, Homo sapien
ggaaatgtacccaagagaatatggg

SEQ ID NO: 4419638 - DNA, 25 bp, Homo sapien
ggccagagccttggttgaaagatct

SEQ ID NO: 4419639 - DNA, 25 bp, Homo sapien
tcaggaaatgtacccaagagaatat

SEQ ID NO: 4419640 - DNA, 25 bp, Homo sapien
aatattaacctagttcccacaagat

SEQ ID NO: 4419641 - DNA, 25 bp, Homo sapien
tttgcaaatattaacctagttccca

SEQ ID NO: 4419642 - DNA, 25 bp, Homo sapien
tattaacctagttcccacaagataa

SEQ ID NO: 4419643 - DNA, 25 bp, Homo sapien
tgcaaatattaacctagttcccaca

SEQ ID NO: 4419644 - DNA, 25 bp, Homo sapien
atttccactcgcctcttgctttctg

SEQ ID NO: 4419645 - DNA, 25 bp, Homo sapien
tttccactcgcctcttgctttctgt

SEQ ID NO: 4419646 - DNA, 25 bp, Homo sapien
catggatccaggtggatcagatgtg

SEQ ID NO: 4419647 - DNA, 25 bp, Homo sapien
atggatccaggtggatcagatgtgg

SEQ ID NO: 4419648 - DNA, 25 bp, Homo sapien
gtctcaacaagcctaatggcccttt

SEQ ID NO: 4419649 - DNA, 25 bp, Homo sapien
gctgtggccttaatagacactgaac

SEQ ID NO: 4419650 - DNA, 25 bp, Homo sapien
gccacggtaatgttgatcatcagca

SEQ ID NO: 4419651 - DNA, 25 bp, Homo sapien
tatgcgggcttgtccagataactag

SEQ ID NO: 4419652 - DNA, 25 bp, Homo sapien
tgcatgttccagagagtaatatcct

SEQ ID NO: 4419653 - DNA, 25 bp, Homo sapien
tatgattatgtcttagaaaaccacg

SEQ ID NO: 4419654 - DNA, 25 bp, Homo sapien
tgtcttagaaaaccacgtgcattgc

SEQ ID NO: 4419655 - DNA, 25 bp, Homo sapien
cttagaaaaccacgtgcattgccca

SEQ ID NO: 4419656 - DNA, 25 bp, Homo sapien
ttatgtcttagaaaaccacgtgcat

SEQ ID NO: 4419657 - DNA, 25 bp, Homo sapien
tcctgcagggtcattaacctcactc

SEQ ID NO: 4419658 - DNA, 25 bp, Homo sapien
tgcagggtcattaacctcactcttg

SEQ ID NO: 4419659 - DNA, 25 bp, Homo sapien
ggctcctgcagggtcattaacctca

SEQ ID NO: 4419660 - DNA, 25 bp, Homo sapien
gggtcattaacctcactcttgagta

SEQ ID NO: 4419661 - DNA, 25 bp, Homo sapien
tgagagcaaaatccctgtatttgct

SEQ ID NO: 4419662 - DNA, 25 bp, Homo sapien
gttcattttgtcacgatgtctccac

SEQ ID NO: 4419663 - DNA, 25 bp, Homo sapien
ccctgtatttgctcctgagttcatt

SEQ ID NO: 4419664 - DNA, 25 bp, Homo sapien
cctgtatttgctcctgagttcattt

SEQ ID NO: 4419665 - DNA, 25 bp, Homo sapien
cattggcaatgggtaatctactatt

SEQ ID NO: 4419666 - DNA, 25 bp, Homo sapien
tttcccatgagcaagaacagaatga

SEQ ID NO: 4419667 - DNA, 25 bp, Homo sapien
gcctggttctgggattactgcaacc

SEQ ID NO: 4419668 - DNA, 25 bp, Homo sapien
gtcctgttcacccatctgcctggtt

SEQ ID NO: 4419669 - DNA, 25 bp, Homo sapien
atgaacaacgaccacccagggccag

SEQ ID NO: 4419670 - DNA, 25 bp, Homo sapien
tgagtaacatgaacaacgaccaccc

SEQ ID NO: 4419671 - DNA, 25 bp, Homo sapien
agtaacatgaacaacgaccacccag

SEQ ID NO: 4419672 - DNA, 25 bp, Homo sapien
taacatgaacaacgaccacccaggg

SEQ ID NO: 4419673 - DNA, 25 bp, Homo sapien
cctttgactacatccccagtcaggt

SEQ ID NO: 4419674 - DNA, 25 bp, Homo sapien
attttctgacgcatggtcccctttc

SEQ ID NO: 4419675 - DNA, 25 bp, Homo sapien
acgcatggtcccctttctgtaatac

SEQ ID NO: 4419676 - DNA, 25 bp, Homo sapien
actacatccccagtcaggtcagttt

SEQ ID NO: 4419677 - DNA, 25 bp, Homo sapien
gtcatgtcggcagatcaggctctcc

SEQ ID NO: 4419678 - DNA, 25 bp, Homo sapien
tcagtcatgtcggcagatcaggctc

SEQ ID NO: 4419679 - DNA, 25 bp, Homo sapien
cagtcatgtcggcagatcaggctct

SEQ ID NO: 4419680 - DNA, 25 bp, Homo sapien
catgtcggcagatcaggctctcctc

SEQ ID NO: 4419681 - DNA, 25 bp, Homo sapien
catacaggagctggttaggccatag

SEQ ID NO: 4419682 - DNA, 25 bp, Homo sapien
tatgaacagtaaaaccatggcggcc

SEQ ID NO: 4419683 - DNA, 25 bp, Homo sapien
tgcatggaggatctgggccaggtgt

SEQ ID NO: 4419684 - DNA, 25 bp, Homo sapien
taggccatagcttaacattaaaagt

SEQ ID NO: 4419685 - DNA, 25 bp, Homo sapien
tccgacatccgcgaacaaacagata

SEQ ID NO: 4419686 - DNA, 25 bp, Homo sapien
tagcagacttctggtaatctcttct

SEQ ID NO: 4419687 - DNA, 25 bp, Homo sapien
caaacagatagcagacttctggtaa

SEQ ID NO: 4419688 - DNA, 25 bp, Homo sapien
tccgcgaacaaacagatagcagact

SEQ ID NO: 4419689 - DNA, 25 bp, Homo sapien
gaagatccgagatgagttcttagca

SEQ ID NO: 4419690 - DNA, 25 bp, Homo sapien
cgatttggaattctaagaagatccg

SEQ ID NO: 4419691 - DNA, 25 bp, Homo sapien
gcagccaaggtgaagacagctttta

SEQ ID NO: 4419692 - DNA, 25 bp, Homo sapien
ttttagctcctgataatccttcccc

SEQ ID NO: 4419693 - DNA, 25 bp, Homo sapien
gctaagccatttggcccagagcctc

SEQ ID NO: 4419694 - DNA, 25 bp, Homo sapien
tcctggctaagccatttggcccaga

SEQ ID NO: 4419695 - DNA, 25 bp, Homo sapien
tgaattcctggctaagccatttggc

SEQ ID NO: 4419696 - DNA, 25 bp, Homo sapien
ggcccagagcctccataaaacctgg

SEQ ID NO: 4419697 - DNA, 25 bp, Homo sapien
caagcacattgaagacatggagaca

SEQ ID NO: 4419698 - DNA, 25 bp, Homo sapien
gagacagactcttgactgctgaggg

SEQ ID NO: 4419699 - DNA, 25 bp, Homo sapien
tcatcatgcagaaccacttggactt

SEQ ID NO: 4419700 - DNA, 25 bp, Homo sapien
gggccttcaggtcagagttcataca

SEQ ID NO: 4419701 - DNA, 25 bp, Homo sapien
gaccaagcctgacgttaagcacaag

SEQ ID NO: 4419702 - DNA, 25 bp, Homo sapien
gaatgcatgcctctgcgagcaaaag

SEQ ID NO: 4419703 - DNA, 25 bp, Homo sapien
tatatcaagtacctctagccatgga

SEQ ID NO: 4419704 - DNA, 25 bp, Homo sapien
cctgggagaagacgcctggtgaaat

SEQ ID NO: 4419705 - DNA, 25 bp, Homo sapien
tatgactttgataggtagccagcgc

SEQ ID NO: 4419706 - DNA, 25 bp, Homo sapien
taagccaaataggtgtctgaacaga

SEQ ID NO: 4419707 - DNA, 25 bp, Homo sapien
gaacagactggatctactagaacag

SEQ ID NO: 4419708 - DNA, 25 bp, Homo sapien
cactatgataacgttgggcacagcc

SEQ ID NO: 4419709 - DNA, 25 bp, Homo sapien
caggaagaacattatggtcgaagca

SEQ ID NO: 4419710 - DNA, 25 bp, Homo sapien
aagtagaacttcttcaagcatagat

SEQ ID NO: 4419711 - DNA, 25 bp, Homo sapien
aggaaagtagaacttcttcaagcat

SEQ ID NO: 4419712 - DNA, 25 bp, Homo sapien
gaagaacattatggtcgaagcaaac

SEQ ID NO: 4419713 - DNA, 25 bp, Homo sapien
tctgctataggctgggctttttgct

SEQ ID NO: 4419714 - DNA, 25 bp, Homo sapien
gagaatttcccgagcactggaaaat

SEQ ID NO: 4419715 - DNA, 25 bp, Homo sapien
tcaagcatctgctataggctgggct

SEQ ID NO: 4419716 - DNA, 25 bp, Homo sapien
ttgctgagaatttcccgagcactgg

SEQ ID NO: 4419717 - DNA, 25 bp, Homo sapien
tgaaccagtaagagagaaccatccc

SEQ ID NO: 4419718 - DNA, 25 bp, Homo sapien
caatgctggatgagtactggacaca

SEQ ID NO: 4419719 - DNA, 25 bp, Homo sapien
tgggccccagaatgacagagacagt

SEQ ID NO: 4419720 - DNA, 25 bp, Homo sapien
tagtcactgtgcacgcgggagttac

SEQ ID NO: 4419721 - DNA, 25 bp, Homo sapien
gccctgttcgctgtctgcccagata

SEQ ID NO: 4419722 - DNA, 25 bp, Homo sapien
tctcattcagcagagatagctgctg

SEQ ID NO: 4419723 - DNA, 25 bp, Homo sapien
gagttttcgctgtcagcctgcggca

SEQ ID NO: 4419724 - DNA, 25 bp, Homo sapien
cagatacccctgttgtgctgagagt

SEQ ID NO: 4419725 - DNA, 25 bp, Homo sapien
taaaacccaattgaacagaatgcct

SEQ ID NO: 4419726 - DNA, 25 bp, Homo sapien
gaaagaccttccatgatgtggcaac

SEQ ID NO: 4419727 - DNA, 25 bp, Homo sapien
tcaaggtgttgggtctaccatttac

SEQ ID NO: 4419728 - DNA, 25 bp, Homo sapien
caaaagaatggacgtctacatgatc

SEQ ID NO: 4419729 - DNA, 25 bp, Homo sapien
gggagataaatgtcttggtcttggc

SEQ ID NO: 4419730 - DNA, 25 bp, Homo sapien
gagataaatgtcttggtcttggcca

SEQ ID NO: 4419731 - DNA, 25 bp, Homo sapien
tatcatcattctcttgtccaacaga

SEQ ID NO: 4419732 - DNA, 25 bp, Homo sapien
ttctcttgtccaacagaaactcttt

SEQ ID NO: 4419733 - DNA, 25 bp, Homo sapien
tctctctcggtctctatgtggtctc

SEQ ID NO: 4419734 - DNA, 25 bp, Homo sapien
ctctcctgtatggtggcattgctgg

SEQ ID NO: 4419735 - DNA, 25 bp, Homo sapien
cagcttcaggatagctgcagggttt

SEQ ID NO: 4419736 - DNA, 25 bp, Homo sapien
taggtatcaacccatgcagctggca

SEQ ID NO: 4419737 - DNA, 25 bp, Homo sapien
aaatcagcctgacaaacctgcccag

SEQ ID NO: 4419738 - DNA, 25 bp, Homo sapien
catacgtggatgtaaaagcttctca

SEQ ID NO: 4419739 - DNA, 25 bp, Homo sapien
tcaaggacacagatgctcacatgct

SEQ ID NO: 4419740 - DNA, 25 bp, Homo sapien
gagtcacagctactaaagaatggag

SEQ ID NO: 4419741 - DNA, 25 bp, Homo sapien
ctcattgcggtcattttcagatttg

SEQ ID NO: 4419742 - DNA, 25 bp, Homo sapien
gggtttaacctcatgctggcttggt

SEQ ID NO: 4419743 - DNA, 25 bp, Homo sapien
cattttctcattgcggtcattttca

SEQ ID NO: 4419744 - DNA, 25 bp, Homo sapien
tcatgctggcttggtaaaaagaatc

SEQ ID NO: 4419745 - DNA, 25 bp, Homo sapien
cagggaggcctcaagtatgatacgg

SEQ ID NO: 4419746 - DNA, 25 bp, Homo sapien
gaatgcccatcgcatccgaggactg

SEQ ID NO: 4419747 - DNA, 25 bp, Homo sapien
gactgcagcttgagggaatgcccat

SEQ ID NO: 4419748 - DNA, 25 bp, Homo sapien
gacttcaaattatggcagcctctca

SEQ ID NO: 4419749 - DNA, 25 bp, Homo sapien
tagtatgcaagatgaatgccagaac

SEQ ID NO: 4419750 - DNA, 25 bp, Homo sapien
tgtgtaggctgataaccttccacca

SEQ ID NO: 4419751 - DNA, 25 bp, Homo sapien
aattgatcatacgagtgacatgacc

SEQ ID NO: 4419752 - DNA, 25 bp, Homo sapien
tctgataatgctccagtgtgtaggc

SEQ ID NO: 4419753 - DNA, 25 bp, Homo sapien
tcttatatgagataagacgtatata

SEQ ID NO: 4419754 - DNA, 25 bp, Homo sapien
gataagacgtatatatctctgctgt

SEQ ID NO: 4419755 - DNA, 25 bp, Homo sapien
tttcatacagcccatgttgttgttt

SEQ ID NO: 4419756 - DNA, 25 bp, Homo sapien
ttcatacagcccatgttgttgtttt

SEQ ID NO: 4419757 - DNA, 25 bp, Homo sapien
gcaaggcggaataagccactcagct

SEQ ID NO: 4419758 - DNA, 25 bp, Homo sapien
ttattctggaggtgataattgggaa

SEQ ID NO: 4419759 - DNA, 25 bp, Homo sapien
gagcagaatgctttgacttgagaat

SEQ ID NO: 4419760 - DNA, 25 bp, Homo sapien
agtaaatgccagtgtgattgcgtgg

SEQ ID NO: 4419761 - DNA, 25 bp, Homo sapien
ttttaactgctaaagtccaggtagc

SEQ ID NO: 4419762 - DNA, 25 bp, Homo sapien
caggtagcattaaccaatttatgca

SEQ ID NO: 4419763 - DNA, 25 bp, Homo sapien
taactgctaaagtccaggtagcatt

SEQ ID NO: 4419764 - DNA, 25 bp, Homo sapien
tccaggtagcattaaccaatttatg

SEQ ID NO: 4419765 - DNA, 25 bp, Homo sapien
caaagctccatggtttgaggaaata

SEQ ID NO: 4419766 - DNA, 25 bp, Homo sapien
gaaataccagagagcctcaagttga

SEQ ID NO: 4419767 - DNA, 25 bp, Homo sapien
caagttgagacttgaaggggctaga

SEQ ID NO: 4419768 - DNA, 25 bp, Homo sapien
tccatggtttgaggaaataccagag

SEQ ID NO: 4419769 - DNA, 25 bp, Homo sapien
catgcctctgcaccaatgtcctcaa

SEQ ID NO: 4419770 - DNA, 25 bp, Homo sapien
atgcctctgcaccaatgtcctcaac

SEQ ID NO: 4419771 - DNA, 25 bp, Homo sapien
tcatgcctctgcaccaatgtcctca

SEQ ID NO: 4419772 - DNA, 25 bp, Homo sapien
tggaggtacacatttcagccaataa

SEQ ID NO: 4419773 - DNA, 25 bp, Homo sapien
aggtacacatttcagccaataacaa

SEQ ID NO: 4419774 - DNA, 25 bp, Homo sapien
gaggtacacatttcagccaataaca

SEQ ID NO: 4419775 - DNA, 25 bp, Homo sapien
ggaggtacacatttcagccaataac

SEQ ID NO: 4419776 - DNA, 25 bp, Homo sapien
cattatctaatagaccagtgttctc

SEQ ID NO: 4419777 - DNA, 25 bp, Homo sapien
gaaattcagataattggtctgcaat

SEQ ID NO: 4419778 - DNA, 25 bp, Homo sapien
tgggcatcaggatttgtctaaagct

SEQ ID NO: 4419779 - DNA, 25 bp, Homo sapien
tttggatagacacaggaatcacctg

SEQ ID NO: 4419780 - DNA, 25 bp, Homo sapien
tgcagccatcagcattatccccaga

SEQ ID NO: 4419781 - DNA, 25 bp, Homo sapien
caaatgcagccatcagcattatccc

SEQ ID NO: 4419782 - DNA, 25 bp, Homo sapien
ctcttccccaaatgcagccatcagc

SEQ ID NO: 4419783 - DNA, 25 bp, Homo sapien
aatgcagccatcagcattatcccca

SEQ ID NO: 4419784 - DNA, 25 bp, Homo sapien
gaagctcagactcaatcggtgacat

SEQ ID NO: 4419785 - DNA, 25 bp, Homo sapien
tagtgtccactctcctacctgaagg

SEQ ID NO: 4419786 - DNA, 25 bp, Homo sapien
tcggtgacatttgtctcttgcagcc

SEQ ID NO: 4419787 - DNA, 25 bp, Homo sapien
aattgaattggaaatacttgtgcct

SEQ ID NO: 4419788 - DNA, 25 bp, Homo sapien
ggaatcagagctttttaggataatt

SEQ ID NO: 4419789 - DNA, 25 bp, Homo sapien
ggctggtgaattaggagtggtgatt

SEQ ID NO: 4419790 - DNA, 25 bp, Homo sapien
gggaatcagagctttttaggataat

SEQ ID NO: 4419791 - DNA, 25 bp, Homo sapien
ggtgattggttagctcagggatgaa

SEQ ID NO: 4419792 - DNA, 25 bp, Homo sapien
caggtaatcagcttaacctctgtgc

SEQ ID NO: 4419793 - DNA, 25 bp, Homo sapien
aaaacttccaggtacaggtaatcag

SEQ ID NO: 4419794 - DNA, 25 bp, Homo sapien
tgcatgtaaatgcattatgtccctt

SEQ ID NO: 4419795 - DNA, 25 bp, Homo sapien
acctgcatgtaaatgcattatgtcc

SEQ ID NO: 4419796 - DNA, 25 bp, Homo sapien
tttgcattgtcagctcccacactgc

SEQ ID NO: 4419797 - DNA, 25 bp, Homo sapien
ggagccaagacagcccacgtctgca

SEQ ID NO: 4419798 - DNA, 25 bp, Homo sapien
cccacactgctaggctccgtggaag

SEQ ID NO: 4419799 - DNA, 25 bp, Homo sapien
tacccacaacgggagccaagacagc

SEQ ID NO: 4419800 - DNA, 25 bp, Homo sapien
aatttgaagtggaaacagtgacaat

SEQ ID NO: 4419801 - DNA, 25 bp, Homo sapien
aatatcggtcacagctgtgtttgct

SEQ ID NO: 4419802 - DNA, 25 bp, Homo sapien
ctgcgagggatctgatgtgactgca

SEQ ID NO: 4419803 - DNA, 25 bp, Homo sapien
gaaacagtgacaatatcggtcacag

SEQ ID NO: 4419804 - DNA, 25 bp, Homo sapien
tttgagatcttcttgaattttccct

SEQ ID NO: 4419805 - DNA, 25 bp, Homo sapien
ttgaattttcccttcttcatctttc

SEQ ID NO: 4419806 - DNA, 25 bp, Homo sapien
tcttgaattttcccttcttcatctt

SEQ ID NO: 4419807 - DNA, 25 bp, Homo sapien
gaattttcccttcttcatctttcat

SEQ ID NO: 4419808 - DNA, 25 bp, Homo sapien
gatacctcctggattggcaaagtag

SEQ ID NO: 4419809 - DNA, 25 bp, Homo sapien
ttaggtcgatattctcttgatgagg

SEQ ID NO: 4419810 - DNA, 25 bp, Homo sapien
tttcccattccaggaagcttcatgg

SEQ ID NO: 4419811 - DNA, 25 bp, Homo sapien
ttcatggcttaattcagaagcaaag

SEQ ID NO: 4419812 - DNA, 25 bp, Homo sapien
taccatggcttttgataaacgagag

SEQ ID NO: 4419813 - DNA, 25 bp, Homo sapien
tggcaattactatatgagtcacagt

SEQ ID NO: 4419814 - DNA, 25 bp, Homo sapien
tttgttccaagctctgccctggata

SEQ ID NO: 4419815 - DNA, 25 bp, Homo sapien
cgagagattatcctggcaattacta

SEQ ID NO: 4419816 - DNA, 25 bp, Homo sapien
tcaaacttgcaaacctctaaaggaa

SEQ ID NO: 4419817 - DNA, 25 bp, Homo sapien
tctaaaggaacgtccaagctcccca

SEQ ID NO: 4419818 - DNA, 25 bp, Homo sapien
tgcggttcctaatgtggctgcttca

SEQ ID NO: 4419819 - DNA, 25 bp, Homo sapien
ctgagatgaccagagggcgagtcaa

SEQ ID NO: 4419820 - DNA, 25 bp, Homo sapien
atctcatcagctgctagcctggagc

SEQ ID NO: 4419821 - DNA, 25 bp, Homo sapien
gacttttgcatatgtggccctcccc

SEQ ID NO: 4419822 - DNA, 25 bp, Homo sapien
tccatgccttgcagggtgctgcgtg

SEQ ID NO: 4419823 - DNA, 25 bp, Homo sapien
ctccggagggtggagtctcctccat

SEQ ID NO: 4419824 - DNA, 25 bp, Homo sapien
acagaagctgactaaggattggaac

SEQ ID NO: 4419825 - DNA, 25 bp, Homo sapien
caagtcgttgatccacagaagctga

SEQ ID NO: 4419826 - DNA, 25 bp, Homo sapien
cagaagctgactaaggattggaacc

SEQ ID NO: 4419827 - DNA, 25 bp, Homo sapien
taatctgaaatcaagtcgttgatcc

SEQ ID NO: 4419828 - DNA, 25 bp, Homo sapien
cgtcctgttaagtattgctgagcag

SEQ ID NO: 4419829 - DNA, 25 bp, Homo sapien
tcctcctgcgtatttggtgcctcca

SEQ ID NO: 4419830 - DNA, 25 bp, Homo sapien
tgctcatcaccccatggactccagg

SEQ ID NO: 4419831 - DNA, 25 bp, Homo sapien
caggctcctacttttgtgtttatga

SEQ ID NO: 4419832 - DNA, 25 bp, Homo sapien
gtttatgacttggatcatttcctcc

SEQ ID NO: 4419833 - DNA, 25 bp, Homo sapien
tcaggcagaggcttcaaacgccagc

SEQ ID NO: 4419834 - DNA, 25 bp, Homo sapien
tctatttccctaggcgatcaccagg

SEQ ID NO: 4419835 - DNA, 25 bp, Homo sapien
cagggagcgctgttgggtcctatcc

SEQ ID NO: 4419836 - DNA, 25 bp, Homo sapien
ttgggagattccagtccgcgggctt

SEQ ID NO: 4419837 - DNA, 25 bp, Homo sapien
ctggagtttcgagaattcgtttcat

SEQ ID NO: 4419838 - DNA, 25 bp, Homo sapien
tctgttttggaagaatgcgctttca

SEQ ID NO: 4419839 - DNA, 25 bp, Homo sapien
cgtagctcgttcatgttcctggcgc

SEQ ID NO: 4419840 - DNA, 25 bp, Homo sapien
agaaagccaggcacgctctgagcat

SEQ ID NO: 4419841 - DNA, 25 bp, Homo sapien
aatgcgctttcatcggtattgctgc

SEQ ID NO: 4419842 - DNA, 25 bp, Homo sapien
cggctgcgagccggctgcgagccca

SEQ ID NO: 4419843 - DNA, 25 bp, Homo sapien
tcggctgcgagccggctgcgagccc

SEQ ID NO: 4419844 - DNA, 25 bp, Homo sapien
gcgcgcctcgctcgcgctcggtctc

SEQ ID NO: 4419845 - DNA, 25 bp, Homo sapien
tgtcaccgacacatttccacggagc

SEQ ID NO: 4419846 - DNA, 25 bp, Homo sapien
gctcggtctccccattcaatgtcac

SEQ ID NO: 4419847 - DNA, 25 bp, Homo sapien
cccattcaatgtcaccgacacattt

SEQ ID NO: 4419848 - DNA, 25 bp, Homo sapien
cggcgaggcggtattaatagttact

SEQ ID NO: 4419849 - DNA, 25 bp, Homo sapien
taatttgcaatcaccccgtctcccc

SEQ ID NO: 4419850 - DNA, 25 bp, Homo sapien
acggccgacggtgcccgaggccaat

SEQ ID NO: 4419851 - DNA, 25 bp, Homo sapien
gaaaattgacggcttgtctcctcct

SEQ ID NO: 4419852 - DNA, 25 bp, Homo sapien
ggtcagcgctgccaacaaaagattg

SEQ ID NO: 4419853 - DNA, 25 bp, Homo sapien
aggtcttcctccgaatgcagccaga

SEQ ID NO: 4419854 - DNA, 25 bp, Homo sapien
tgaggcttttccaagatcgcgagct

SEQ ID NO: 4419855 - DNA, 25 bp, Homo sapien
catttaacttggtgcggtcagcgct

SEQ ID NO: 4419856 - DNA, 25 bp, Homo sapien
aggccggcttccgaatcgcagacgg

SEQ ID NO: 4419857 - DNA, 25 bp, Homo sapien
gagcccgcggtagtttgtgcagtct

SEQ ID NO: 4419858 - DNA, 25 bp, Homo sapien
gagaaaggaaacaagcacgggtcta

SEQ ID NO: 4419859 - DNA, 25 bp, Homo sapien
gcgactcagtcccaacgcgttagaa

SEQ ID NO: 4419860 - DNA, 25 bp, Homo sapien
ttaccccaaagcagtcggcgatgtg

SEQ ID NO: 4419861 - DNA, 25 bp, Homo sapien
ccccggcgtggatctggatgagtac

SEQ ID NO: 4419862 - DNA, 25 bp, Homo sapien
gaatcgccgcacttttagttactct

SEQ ID NO: 4419863 - DNA, 25 bp, Homo sapien
tcggcaggcaactcgggtctttttg

SEQ ID NO: 4419864 - DNA, 25 bp, Homo sapien
agcccccaaatgggcgccgccggat

SEQ ID NO: 4419865 - DNA, 25 bp, Homo sapien
gcccccaaatgggcgccgccggata

SEQ ID NO: 4419866 - DNA, 25 bp, Homo sapien
agaaagagttagaagcccccaaatg

SEQ ID NO: 4419867 - DNA, 25 bp, Homo sapien
aaaaaaaacccgctggagagatgag

SEQ ID NO: 4419868 - DNA, 25 bp, Homo sapien
agtcgctggcgagtgcggctgcagg

SEQ ID NO: 4419869 - DNA, 25 bp, Homo sapien
ggagagatgagtcgctggcgagtgc

SEQ ID NO: 4419870 - DNA, 25 bp, Homo sapien
aaaaaaacccgctggagagatgagt

SEQ ID NO: 4419871 - DNA, 25 bp, Homo sapien
caatgcgacaagttcggagtctcgg

SEQ ID NO: 4419872 - DNA, 25 bp, Homo sapien
tgggctccgcggaccttatagacga

SEQ ID NO: 4419873 - DNA, 25 bp, Homo sapien
gatgcacggcacgaaaaacgtggtc

SEQ ID NO: 4419874 - DNA, 25 bp, Homo sapien
ttcccgatacaagaaacgcaatgcg

SEQ ID NO: 4419875 - DNA, 25 bp, Homo sapien
cacggtaattatcccgcgaatctcc

SEQ ID NO: 4419876 - DNA, 25 bp, Homo sapien
ataaggccacggtaattatcccgcg

SEQ ID NO: 4419877 - DNA, 25 bp, Homo sapien
aggccacggtaattatcccgcgaat

SEQ ID NO: 4419878 - DNA, 25 bp, Homo sapien
catttaataaggccacggtaattat

SEQ ID NO: 4419879 - DNA, 25 bp, Homo sapien
tacaggcaaaggtgttgttcagggg

SEQ ID NO: 4419880 - DNA, 25 bp, Homo sapien
ggcaaaggtgttgttcaggggggca

SEQ ID NO: 4419881 - DNA, 25 bp, Homo sapien
caaaggtgttgttcaggggggcacg

SEQ ID NO: 4419882 - DNA, 25 bp, Homo sapien
caggcaaaggtgttgttcagggggg

SEQ ID NO: 4419883 - DNA, 25 bp, Homo sapien
aaagcacggtgccagggattcctgg

SEQ ID NO: 4419884 - DNA, 25 bp, Homo sapien
ctatgagcagacaggcaaaagcacg

SEQ ID NO: 4419885 - DNA, 25 bp, Homo sapien
gcagacaggcaaaagcacggtgcca

SEQ ID NO: 4419886 - DNA, 25 bp, Homo sapien
acggtgccagggattcctggtagca

SEQ ID NO: 4419887 - DNA, 25 bp, Homo sapien
tgcggacgaaggaatgcatgtcccc

SEQ ID NO: 4419888 - DNA, 25 bp, Homo sapien
gcttcgctcaaagaacacataggct

SEQ ID NO: 4419889 - DNA, 25 bp, Homo sapien
aaagatgaatttccgcagcttgagg

SEQ ID NO: 4419890 - DNA, 25 bp, Homo sapien
gccgaggcaatctggtagaacagtc

SEQ ID NO: 4419891 - DNA, 25 bp, Homo sapien
tacccaggtctggacaggatgagac

SEQ ID NO: 4419892 - DNA, 25 bp, Homo sapien
ggaagctgttgttaggagcagtcca

SEQ ID NO: 4419893 - DNA, 25 bp, Homo sapien
gcagtccatcacagtacccaggtct

SEQ ID NO: 4419894 - DNA, 25 bp, Homo sapien
tgttgttaggagcagtccatcacag

SEQ ID NO: 4419895 - DNA, 25 bp, Homo sapien
gggcctcattcaggaactacggtga

SEQ ID NO: 4419896 - DNA, 25 bp, Homo sapien
ttaacggcataagccagttgcctgc

SEQ ID NO: 4419897 - DNA, 25 bp, Homo sapien
cacggacctctattctgagctggta

SEQ ID NO: 4419898 - DNA, 25 bp, Homo sapien
cttgtaatcaaaatcggctgggaga

SEQ ID NO: 4419899 - DNA, 25 bp, Homo sapien
agagggtatcgaaggcaaaaccagg

SEQ ID NO: 4419900 - DNA, 25 bp, Homo sapien
ccaagatcacagagggtatcgaagg

SEQ ID NO: 4419901 - DNA, 25 bp, Homo sapien
ccaatacagcatacagaaggtaaca

SEQ ID NO: 4419902 - DNA, 25 bp, Homo sapien
gaaaagaccttagagccaatacagc

SEQ ID NO: 4419903 - DNA, 25 bp, Homo sapien
gcactttggagctctcgtctataca

SEQ ID NO: 4419904 - DNA, 25 bp, Homo sapien
tgctctttcctgtccgtaactttgg

SEQ ID NO: 4419905 - DNA, 25 bp, Homo sapien
ggacttcaccacgttgcactttgga

SEQ ID NO: 4419906 - DNA, 25 bp, Homo sapien
tctcgtctatacaatggacatgatg

SEQ ID NO: 4419907 - DNA, 25 bp, Homo sapien
gctttagctccactaaaagtgatgc

SEQ ID NO: 4419908 - DNA, 25 bp, Homo sapien
cactaaaagtgatgcaattagggtg

SEQ ID NO: 4419909 - DNA, 25 bp, Homo sapien
agagaatctgccatgaaactcaatg

SEQ ID NO: 4419910 - DNA, 25 bp, Homo sapien
ggagaaggaagctttagctccacta

SEQ ID NO: 4419911 - DNA, 25 bp, Homo sapien
gatggcacacaatcgaaactttagg

SEQ ID NO: 4419912 - DNA, 25 bp, Homo sapien
gcattaggtccaaacataacgctgg

SEQ ID NO: 4419913 - DNA, 25 bp, Homo sapien
tgaaggcgctggcagttccactaac

SEQ ID NO: 4419914 - DNA, 25 bp, Homo sapien
aaactttaggcacaaggagtcagcc

SEQ ID NO: 4419915 - DNA, 25 bp, Homo sapien
caaagggctcttcgcatcttgagtg

SEQ ID NO: 4419916 - DNA, 25 bp, Homo sapien
cttccttgagcagcataagggtgca

SEQ ID NO: 4419917 - DNA, 25 bp, Homo sapien
tcttgagtgagccagggaactggcc

SEQ ID NO: 4419918 - DNA, 25 bp, Homo sapien
cagcataagggtgcacctgctcaaa

SEQ ID NO: 4419919 - DNA, 25 bp, Homo sapien
tgtcacgtcaagagataaagatctt

SEQ ID NO: 4419920 - DNA, 25 bp, Homo sapien
ctgtcacgtcaagagataaagatct

SEQ ID NO: 4419921 - DNA, 25 bp, Homo sapien
ccccaggccactgagttcctgcaaa

SEQ ID NO: 4419922 - DNA, 25 bp, Homo sapien
gtactgaccggcttccacaaagcgg

SEQ ID NO: 4419923 - DNA, 25 bp, Homo sapien
tgaccggcttccacaaagcggagga

SEQ ID NO: 4419924 - DNA, 25 bp, Homo sapien
ttcctgcaaacagtcgcagcttcca

SEQ ID NO: 4419925 - DNA, 25 bp, Homo sapien
tgtgaatctgggcaggtggcgttta

SEQ ID NO: 4419926 - DNA, 25 bp, Homo sapien
ctgtgaatctgggcaggtggcgttt

SEQ ID NO: 4419927 - DNA, 25 bp, Homo sapien
gagtctcattgtacccgaacacctt

SEQ ID NO: 4419928 - DNA, 25 bp, Homo sapien
tgccctgtccgcatgcaggtgcaca

SEQ ID NO: 4419929 - DNA, 25 bp, Homo sapien
gaagtccatcctgtcgccataggaa

SEQ ID NO: 4419930 - DNA, 25 bp, Homo sapien
gacaggaattcctcatcaatgctcc

SEQ ID NO: 4419931 - DNA, 25 bp, Homo sapien
gtcacaggccactaaacgatgccaa

SEQ ID NO: 4419932 - DNA, 25 bp, Homo sapien
ggttcatgtatgcacagacttttcc

SEQ ID NO: 4419933 - DNA, 25 bp, Homo sapien
cagctgcattagaacgtcacaggcc

SEQ ID NO: 4419934 - DNA, 25 bp, Homo sapien
cattggcaccatcatgccggcctgg

SEQ ID NO: 4419935 - DNA, 25 bp, Homo sapien
gctgtgaaagccagggtcccgcccg

SEQ ID NO: 4419936 - DNA, 25 bp, Homo sapien
ctgtgaaagccagggtcccgcccgg

SEQ ID NO: 4419937 - DNA, 25 bp, Homo sapien
gactgttactgaaaaagtcctctgg

SEQ ID NO: 4419938 - DNA, 25 bp, Homo sapien
cttgccctgactgttactgaaaaag

SEQ ID NO: 4419939 - DNA, 25 bp, Homo sapien
cagggttgctcagttcactaggctc

SEQ ID NO: 4419940 - DNA, 25 bp, Homo sapien
aagcagctggcggaggaaaccacac

SEQ ID NO: 4419941 - DNA, 25 bp, Homo sapien
cactaggctccatcaaggtgcgctg

SEQ ID NO: 4419942 - DNA, 25 bp, Homo sapien
gtacgtgtgcttccccagtgtcagg

SEQ ID NO: 4419943 - DNA, 25 bp, Homo sapien
ccagcgcaagccagactcctcatct

SEQ ID NO: 4419944 - DNA, 25 bp, Homo sapien
ctccaatttcactgttttagcagaa

SEQ ID NO: 4419945 - DNA, 25 bp, Homo sapien
agactcctcatctccaatttcactg

SEQ ID NO: 4419946 - DNA, 25 bp, Homo sapien
tcatctccaatttcactgttttagc

SEQ ID NO: 4419947 - DNA, 25 bp, Homo sapien
tagctgccagctactattccagggc

SEQ ID NO: 4419948 - DNA, 25 bp, Homo sapien
ttcatgcagctgataatccactggg

SEQ ID NO: 4419949 - DNA, 25 bp, Homo sapien
catcacccctgcgatgagggaacaa

SEQ ID NO: 4419950 - DNA, 25 bp, Homo sapien
caaaccttgagcaccttagcgaacc

SEQ ID NO: 4419951 - DNA, 25 bp, Homo sapien
gaatgttgaactggccacgccggat

SEQ ID NO: 4419952 - DNA, 25 bp, Homo sapien
aatgcttcggatgaggcacttggcc

SEQ ID NO: 4419953 - DNA, 25 bp, Homo sapien
gcttgtcggagagggaatcatcatc

SEQ ID NO: 4419954 - DNA, 25 bp, Homo sapien
tccagaatttcctgcgaggtcagcc

SEQ ID NO: 4419955 - DNA, 25 bp, Homo sapien
tatgtcatcccaagtcaacccgtaa

SEQ ID NO: 4419956 - DNA, 25 bp, Homo sapien
tatacatgtgggacaacctgctttg

SEQ ID NO: 4419957 - DNA, 25 bp, Homo sapien
aaatgctaacagtgcgatgccagga

SEQ ID NO: 4419958 - DNA, 25 bp, Homo sapien
tacaggcagtcaaatccgaacaagt

SEQ ID NO: 4419959 - DNA, 25 bp, Homo sapien
tcctggttacgaagggtgaagccgc

SEQ ID NO: 4419960 - DNA, 25 bp, Homo sapien
catggccgccttgtctcctggttac

SEQ ID NO: 4419961 - DNA, 25 bp, Homo sapien
catactagagtccacgtgtcaccta

SEQ ID NO: 4419962 - DNA, 25 bp, Homo sapien
ggcataaagcatccaagagtctgca

SEQ ID NO: 4419963 - DNA, 25 bp, Homo sapien
gttgcttattgctttcctcctccat

SEQ ID NO: 4419964 - DNA, 25 bp, Homo sapien
cagttgcttattgctttcctcctcc

SEQ ID NO: 4419965 - DNA, 25 bp, Homo sapien
agttgcttattgctttcctcctcca

SEQ ID NO: 4419966 - DNA, 25 bp, Homo sapien
gagcttatgggtccactggcagcca

SEQ ID NO: 4419967 - DNA, 25 bp, Homo sapien
tcctctaaggaaatgtctgtcccag

SEQ ID NO: 4419968 - DNA, 25 bp, Homo sapien
caaggattcccttacaatggactcc

SEQ ID NO: 4419969 - DNA, 25 bp, Homo sapien
ctatcaggcccattaggtacatgga

SEQ ID NO: 4419970 - DNA, 25 bp, Homo sapien
ctggccctggctccaccggttgagc

SEQ ID NO: 4419971 - DNA, 25 bp, Homo sapien
gccctggctccaccggttgagcata

SEQ ID NO: 4419972 - DNA, 25 bp, Homo sapien
ggccctggctccaccggttgagcat

SEQ ID NO: 4419973 - DNA, 25 bp, Homo sapien
ccctggccctggctccaccggttga

SEQ ID NO: 4419974 - DNA, 25 bp, Homo sapien
ccccatgtgccgtctgctaaagtaa

SEQ ID NO: 4419975 - DNA, 25 bp, Homo sapien
gagcggaactctttctaaacagaaa

SEQ ID NO: 4419976 - DNA, 25 bp, Homo sapien
aagttctccccatgtgccgtctgct

SEQ ID NO: 4419977 - DNA, 25 bp, Homo sapien
tctgctaaagtaatgagcggaactc

SEQ ID NO: 4419978 - DNA, 25 bp, Homo sapien
tgtgtgacattgcaactagctggct

SEQ ID NO: 4419979 - DNA, 25 bp, Homo sapien
cagtctagactgtagagccagcctc

SEQ ID NO: 4419980 - DNA, 25 bp, Homo sapien
gcaactgtgccagaacccaggctta

SEQ ID NO: 4419981 - DNA, 25 bp, Homo sapien
acaggatgactttaccaaggtggac

SEQ ID NO: 4419982 - DNA, 25 bp, Homo sapien
gggacacgtccctacatgacaattc

SEQ ID NO: 4419983 - DNA, 25 bp, Homo sapien
ggactcaatgagctgcgagtggctc

SEQ ID NO: 4419984 - DNA, 25 bp, Homo sapien
cacgtccctacatgacaattccggg

SEQ ID NO: 4419985 - DNA, 25 bp, Homo sapien
caatgagctgcgagtggctccctgg

SEQ ID NO: 4419986 - DNA, 25 bp, Homo sapien
aagggagcaagtgcgaagttttcca

SEQ ID NO: 4419987 - DNA, 25 bp, Homo sapien
tctcctgatacagcactggcaaggg

SEQ ID NO: 4419988 - DNA, 25 bp, Homo sapien
agggagcaagtgcgaagttttccac

SEQ ID NO: 4419989 - DNA, 25 bp, Homo sapien
caagggagcaagtgcgaagttttcc

SEQ ID NO: 4419990 - DNA, 25 bp, Homo sapien
gatctgtcctcccatagcctttcag

SEQ ID NO: 4419991 - DNA, 25 bp, Homo sapien
ggatctgtcctcccatagcctttca

SEQ ID NO: 4419992 - DNA, 25 bp, Homo sapien
gaagtcatggttacagacatactag

SEQ ID NO: 4419993 - DNA, 25 bp, Homo sapien
gaaaatgcattccatgccaatgctg

SEQ ID NO: 4419994 - DNA, 25 bp, Homo sapien
gcagagtcaacttcagaccacagtt

SEQ ID NO: 4419995 - DNA, 25 bp, Homo sapien
ttattttgtctcatagttcagagtt

SEQ ID NO: 4419996 - DNA, 25 bp, Homo sapien
gtggatgagaataatgacccctttg

SEQ ID NO: 4419997 - DNA, 25 bp, Homo sapien
ccttcttggcgctgtctgtggatga

SEQ ID NO: 4419998 - DNA, 25 bp, Homo sapien
ctgtttctgggctgagcaattcctc

SEQ ID NO: 4419999 - DNA, 25 bp, Homo sapien
tgttaggctcgccaaagcagtgctt

SEQ ID NO: 4420000 - DNA, 25 bp, Homo sapien
ttttgctctaccctatccaatttgt

SEQ ID NO: 4420001 - DNA, 25 bp, Homo sapien
gctctaccctatccaatttgtccat

SEQ ID NO: 4420002 - DNA, 25 bp, Homo sapien
ttagctgatgtgtctccttttgtca

SEQ ID NO: 4420003 - DNA, 25 bp, Homo sapien
tctccttttgtcagccaaggctctc

SEQ ID NO: 4420004 - DNA, 25 bp, Homo sapien
ggcaagctcgccacattcaagctga

SEQ ID NO: 4420005 - DNA, 25 bp, Homo sapien
gaagataaatcctctctggcaagct

SEQ ID NO: 4420006 - DNA, 25 bp, Homo sapien
tgcattatgcaatcctgtgtccggc

SEQ ID NO: 4420007 - DNA, 25 bp, Homo sapien
taattgcctatctgacatgctagcc

SEQ ID NO: 4420008 - DNA, 25 bp, Homo sapien
cctggtctacgctggctgcttggaa

SEQ ID NO: 4420009 - DNA, 25 bp, Homo sapien
caggcctgtcatgaaaaaccacttt

SEQ ID NO: 4420010 - DNA, 25 bp, Homo sapien
gacagccgcggtaaatcactaggca

SEQ ID NO: 4420011 - DNA, 25 bp, Homo sapien
aatgaacttggagattccggctggc

SEQ ID NO: 4420012 - DNA, 25 bp, Homo sapien
gcatttcttccctgaacactaaaca

SEQ ID NO: 4420013 - DNA, 25 bp, Homo sapien
caatcatcctttggtccagtcctac

SEQ ID NO: 4420014 - DNA, 25 bp, Homo sapien
tgtgatccacaatcatcctttggtc

SEQ ID NO: 4420015 - DNA, 25 bp, Homo sapien
cctactgagatagttgcatttcttc

SEQ ID NO: 4420016 - DNA, 25 bp, Homo sapien
ccacccacatgtatggtagtgacta

SEQ ID NO: 4420017 - DNA, 25 bp, Homo sapien
tatggtagtgactagctcacactta

SEQ ID NO: 4420018 - DNA, 25 bp, Homo sapien
aagaacagagttaccacccacatgt

SEQ ID NO: 4420019 - DNA, 25 bp, Homo sapien
tgactagctcacacttatttagagg

SEQ ID NO: 4420020 - DNA, 25 bp, Homo sapien
gccgcatctttggtggtgaaggcat

SEQ ID NO: 4420021 - DNA, 25 bp, Homo sapien
acagtccctggatgaaatccctgga

SEQ ID NO: 4420022 - DNA, 25 bp, Homo sapien
gccagccagccgcatctttggtggt

SEQ ID NO: 4420023 - DNA, 25 bp, Homo sapien
acaacagtccctggatgaaatccct

SEQ ID NO: 4420024 - DNA, 25 bp, Homo sapien
agaaactgcttgtctggaagtggtg

SEQ ID NO: 4420025 - DNA, 25 bp, Homo sapien
gaaactgcttgtctggaagtggtga

SEQ ID NO: 4420026 - DNA, 25 bp, Homo sapien
ctgcttgtctggaagtggtgagctc

SEQ ID NO: 4420027 - DNA, 25 bp, Homo sapien
aactgcttgtctggaagtggtgagc

SEQ ID NO: 4420028 - DNA, 25 bp, Homo sapien
aatgggctttctgtactgagcctct

SEQ ID NO: 4420029 - DNA, 25 bp, Homo sapien
ggctttctgtactgagcctctccat

SEQ ID NO: 4420030 - DNA, 25 bp, Homo sapien
gggctttctgtactgagcctctcca

SEQ ID NO: 4420031 - DNA, 25 bp, Homo sapien
tgggctttctgtactgagcctctcc

SEQ ID NO: 4420032 - DNA, 25 bp, Homo sapien
acatgtgtggggtcctttttcacca

SEQ ID NO: 4420033 - DNA, 25 bp, Homo sapien
gctgtggtattttgtgctctcattc

SEQ ID NO: 4420034 - DNA, 25 bp, Homo sapien
tggcagcaaggacccgaaacccctc

SEQ ID NO: 4420035 - DNA, 25 bp, Homo sapien
cctttaaatgccaggcacagatgtc

SEQ ID NO: 4420036 - DNA, 25 bp, Homo sapien
ggcattggcagcaaggacccgaaac

SEQ ID NO: 4420037 - DNA, 25 bp, Homo sapien
ctccttgaccccctttaaatgccag

SEQ ID NO: 4420038 - DNA, 25 bp, Homo sapien
gactcttggccttggcagaaaaggc

SEQ ID NO: 4420039 - DNA, 25 bp, Homo sapien
gaagggactcttggccttggcagaa

SEQ ID NO: 4420040 - DNA, 25 bp, Homo sapien
gcagaaggaagggactcttggcctt

SEQ ID NO: 4420041 - DNA, 25 bp, Homo sapien
cagaaggaagggactcttggccttg

SEQ ID NO: 4420042 - DNA, 25 bp, Homo sapien
aatgacgagcgtcctcctgcaagtg

SEQ ID NO: 4420043 - DNA, 25 bp, Homo sapien
tcagcggtgtcgattcatacaaaag

SEQ ID NO: 4420044 - DNA, 25 bp, Homo sapien
caactgaggtaggtatatggagcct

SEQ ID NO: 4420045 - DNA, 25 bp, Homo sapien
tacttaatcctcctaatgtcagcgg

SEQ ID NO: 4420046 - DNA, 25 bp, Homo sapien
aaaatgtgtaaggagacctgagggt

SEQ ID NO: 4420047 - DNA, 25 bp, Homo sapien
caaaatgtgtaaggagacctgaggg

SEQ ID NO: 4420048 - DNA, 25 bp, Homo sapien
tggaagtctgtagatgtgtcactgt

SEQ ID NO: 4420049 - DNA, 25 bp, Homo sapien
cctggaagtctgtagatgtgtcact

SEQ ID NO: 4420050 - DNA, 25 bp, Homo sapien
ggcctggaagtctgtagatgtgtca

SEQ ID NO: 4420051 - DNA, 25 bp, Homo sapien
aagtctgtagatgtgtcactgtggc

SEQ ID NO: 4420052 - DNA, 25 bp, Homo sapien
catccaagaaccactagggcaacca

SEQ ID NO: 4420053 - DNA, 25 bp, Homo sapien
gaataacacagttgatgtcccatcc

SEQ ID NO: 4420054 - DNA, 25 bp, Homo sapien
tgcatctcctgctatgaaccttcct

SEQ ID NO: 4420055 - DNA, 25 bp, Homo sapien
gcatcatcaacatcacaccaaagag

SEQ ID NO: 4420056 - DNA, 25 bp, Homo sapien
tggtttgttgctttcgggctatatg

SEQ ID NO: 4420057 - DNA, 25 bp, Homo sapien
gtttgttgctttcgggctatatgcg

SEQ ID NO: 4420058 - DNA, 25 bp, Homo sapien
tctgtactttgcatcctttctcctc

SEQ ID NO: 4420059 - DNA, 25 bp, Homo sapien
ttgctttcgggctatatgcgatcat

SEQ ID NO: 4420060 - DNA, 25 bp, Homo sapien
ccatttcggcagtttcttctggata

SEQ ID NO: 4420061 - DNA, 25 bp, Homo sapien
tagtttgcagtctgctattttgtat

SEQ ID NO: 4420062 - DNA, 25 bp, Homo sapien
tcatgtcttacccatttcggcagtt

SEQ ID NO: 4420063 - DNA, 25 bp, Homo sapien
tacccatttcggcagtttcttctgg

SEQ ID NO: 4420064 - DNA, 25 bp, Homo sapien
agcagtctttaaggagatgcaggtg

SEQ ID NO: 4420065 - DNA, 25 bp, Homo sapien
gaggaactggagaatatcacagaat

SEQ ID NO: 4420066 - DNA, 25 bp, Homo sapien
tttgggaaattggggctggacatga

SEQ ID NO: 4420067 - DNA, 25 bp, Homo sapien
cagcagtctttaaggagatgcaggt

SEQ ID NO: 4420068 - DNA, 25 bp, Homo sapien
caggttcttgaccccaaacatcctc

SEQ ID NO: 4420069 - DNA, 25 bp, Homo sapien
gttcttgaccccaaacatcctccac

SEQ ID NO: 4420070 - DNA, 25 bp, Homo sapien
ggttcttgaccccaaacatcctcca

SEQ ID NO: 4420071 - DNA, 25 bp, Homo sapien
ttcttgaccccaaacatcctccact

SEQ ID NO: 4420072 - DNA, 25 bp, Homo sapien
caggatggcaatcttacaagcatgg

SEQ ID NO: 4420073 - DNA, 25 bp, Homo sapien
agggaaaaatctagtgcagtcagga

SEQ ID NO: 4420074 - DNA, 25 bp, Homo sapien
acaagcatggcccttggtagcccaa

SEQ ID NO: 4420075 - DNA, 25 bp, Homo sapien
ggagacagcccgaagaggcagtcct

SEQ ID NO: 4420076 - DNA, 25 bp, Homo sapien
ctttgaagggcagtatgaagcctga

SEQ ID NO: 4420077 - DNA, 25 bp, Homo sapien
aatctatttccggttgctctgtggg

SEQ ID NO: 4420078 - DNA, 25 bp, Homo sapien
caaccagaaattgaagggagttcat

SEQ ID NO: 4420079 - DNA, 25 bp, Homo sapien
tgctcgcctcagtgggtcagtcatg

SEQ ID NO: 4420080 - DNA, 25 bp, Homo sapien
taccaaacgcagtatttctctcaaa

SEQ ID NO: 4420081 - DNA, 25 bp, Homo sapien
aactcttctcattaaatctaagggc

SEQ ID NO: 4420082 - DNA, 25 bp, Homo sapien
gaagcccggtatgcattagctcaat

SEQ ID NO: 4420083 - DNA, 25 bp, Homo sapien
cagtaaagcgtcaaaatcctaggca

SEQ ID NO: 4420084 - DNA, 25 bp, Homo sapien
gcactggcatcccacaaaatctggt

SEQ ID NO: 4420085 - DNA, 25 bp, Homo sapien
catagtaacagccagatcattgcag

SEQ ID NO: 4420086 - DNA, 25 bp, Homo sapien
taatcagatttgtaagaggcaccag

SEQ ID NO: 4420087 - DNA, 25 bp, Homo sapien
tagggcctcggcagtttagtcgtga

SEQ ID NO: 4420088 - DNA, 25 bp, Homo sapien
ggatccgttaaaaactgcttgctga

SEQ ID NO: 4420089 - DNA, 25 bp, Homo sapien
taccagacattctagagtaaccgga

SEQ ID NO: 4420090 - DNA, 25 bp, Homo sapien
tactactctcagttggaaggctgct

SEQ ID NO: 4420091 - DNA, 25 bp, Homo sapien
tacctcctaatggtgaatcacgttg

SEQ ID NO: 4420092 - DNA, 25 bp, Homo sapien
gaatgtgaaaacctctaaggaacca

SEQ ID NO: 4420093 - DNA, 25 bp, Homo sapien
ggcccagaatgtgaaaacctctaag

SEQ ID NO: 4420094 - DNA, 25 bp, Homo sapien
ggtgatttggcccagaatgtgaaaa

SEQ ID NO: 4420095 - DNA, 25 bp, Homo sapien
ttttactaaggtgatttggcccaga

SEQ ID NO: 4420096 - DNA, 25 bp, Homo sapien
tggcattcttgtccataggtcagta

SEQ ID NO: 4420097 - DNA, 25 bp, Homo sapien
gacagtttgccaatacttaaggacg

SEQ ID NO: 4420098 - DNA, 25 bp, Homo sapien
tcgggtaagtccatctgaagcagtc

SEQ ID NO: 4420099 - DNA, 25 bp, Homo sapien
cacacgtcgtgggaatgtcagcctc

SEQ ID NO: 4420100 - DNA, 25 bp, Homo sapien
tgatagaatcaccactgaagtattg

SEQ ID NO: 4420101 - DNA, 25 bp, Homo sapien
tttaaacagtagtctagcaacacct

SEQ ID NO: 4420102 - DNA, 25 bp, Homo sapien
gcaacacctatgcacatataagagt

SEQ ID NO: 4420103 - DNA, 25 bp, Homo sapien
gttcataacatgatctcacaaagga

SEQ ID NO: 4420104 - DNA, 25 bp, Homo sapien
ttaaatgacgccctaattgcacgct

SEQ ID NO: 4420105 - DNA, 25 bp, Homo sapien
ttgcacgctcagctaaaccattcat

SEQ ID NO: 4420106 - DNA, 25 bp, Homo sapien
cataatttaaatgacgccctaattg

SEQ ID NO: 4420107 - DNA, 25 bp, Homo sapien
cgccctaattgcacgctcagctaaa

SEQ ID NO: 4420108 - DNA, 25 bp, Homo sapien
tcccatattgtaaatcctctttgct

SEQ ID NO: 4420109 - DNA, 25 bp, Homo sapien
tttgattggttgaaagcaaatgctg

SEQ ID NO: 4420110 - DNA, 25 bp, Homo sapien
ggttttcatcaggtataccatctgt

SEQ ID NO: 4420111 - DNA, 25 bp, Homo sapien
tgttcctagccttggatactcctaa

SEQ ID NO: 4420112 - DNA, 25 bp, Homo sapien
agcatgggagttttctactacattg

SEQ ID NO: 4420113 - DNA, 25 bp, Homo sapien
tgggagttttctactacattgttta

SEQ ID NO: 4420114 - DNA, 25 bp, Homo sapien
catgggagttttctactacattgtt

SEQ ID NO: 4420115 - DNA, 25 bp, Homo sapien
gcatgggagttttctactacattgt

SEQ ID NO: 4420116 - DNA, 25 bp, Homo sapien
tcagtcatgctcctcccagaaatgc

SEQ ID NO: 4420117 - DNA, 25 bp, Homo sapien
tggctctttgctattctgaggaata

SEQ ID NO: 4420118 - DNA, 25 bp, Homo sapien
taggtaatccttaatggctataaag

SEQ ID NO: 4420119 - DNA, 25 bp, Homo sapien
caattacctataactgcacaaaacc

SEQ ID NO: 4420120 - DNA, 25 bp, Homo sapien
aaggttgatgatggaatctattaca

SEQ ID NO: 4420121 - DNA, 25 bp, Homo sapien
gactccatagtcaacctgaagatgg

SEQ ID NO: 4420122 - DNA, 25 bp, Homo sapien
gatgacatagtaaaggttgatgatg

SEQ ID NO: 4420123 - DNA, 25 bp, Homo sapien
tggagtcttagaagccagcaggact

SEQ ID NO: 4420124 - DNA, 25 bp, Homo sapien
caattggatcaattttgccgacata

SEQ ID NO: 4420125 - DNA, 25 bp, Homo sapien
tggatcaattttgccgacataaaaa

SEQ ID NO: 4420126 - DNA, 25 bp, Homo sapien
ttccaattggatcaattttgccgac

SEQ ID NO: 4420127 - DNA, 25 bp, Homo sapien
aattggatcaattttgccgacataa

SEQ ID NO: 4420128 - DNA, 25 bp, Homo sapien
ttcatcctgtctatgtcttctttaa

SEQ ID NO: 4420129 - DNA, 25 bp, Homo sapien
tttcatcctgtctatgtcttcttta

SEQ ID NO: 4420130 - DNA, 25 bp, Homo sapien
atttcatcctgtctatgtcttcttt

SEQ ID NO: 4420131 - DNA, 25 bp, Homo sapien
tatttcatcctgtctatgtcttctt

SEQ ID NO: 4420132 - DNA, 25 bp, Homo sapien
ccttcgtggtaactacatgaaagca

SEQ ID NO: 4420133 - DNA, 25 bp, Homo sapien
ctaagccaaacgtagaccttcgtgg

SEQ ID NO: 4420134 - DNA, 25 bp, Homo sapien
tagatatgtcaaatcagtgcaggac

SEQ ID NO: 4420135 - DNA, 25 bp, Homo sapien
catgaaagcatcttcggcgtgtaaa

SEQ ID NO: 4420136 - DNA, 25 bp, Homo sapien
tagttacttttatgatataataggg

SEQ ID NO: 4420137 - DNA, 25 bp, Homo sapien
cctggccaagttagttacttttatg

SEQ ID NO: 4420138 - DNA, 25 bp, Homo sapien
ccaagcctggccaagttagttactt

SEQ ID NO: 4420139 - DNA, 25 bp, Homo sapien
ggccaagttagttacttttatgata

SEQ ID NO: 4420140 - DNA, 25 bp, Homo sapien
ctcctagatctattccactggcatt

SEQ ID NO: 4420141 - DNA, 25 bp, Homo sapien
cctcctagatctattccactggcat

SEQ ID NO: 4420142 - DNA, 25 bp, Homo sapien
agagaatgaatacagggagctaggt

SEQ ID NO: 4420143 - DNA, 25 bp, Homo sapien
ctgacttttgtggatgattggaagg

SEQ ID NO: 4420144 - DNA, 25 bp, Homo sapien
gtaagttaccgttctgatttctgac

SEQ ID NO: 4420145 - DNA, 25 bp, Homo sapien
aaggtggtgtcattcgctgagagaa

SEQ ID NO: 4420146 - DNA, 25 bp, Homo sapien
caaagatcgtatcacattgtcagaa

SEQ ID NO: 4420147 - DNA, 25 bp, Homo sapien
aaatgtttacgatgctatgccggga

SEQ ID NO: 4420148 - DNA, 25 bp, Homo sapien
ggcttttccctataatgacttccca

SEQ ID NO: 4420149 - DNA, 25 bp, Homo sapien
tcaatttgattataccagacagggt

SEQ ID NO: 4420150 - DNA, 25 bp, Homo sapien
ttttgttggcttcttcatttggtgc

SEQ ID NO: 4420151 - DNA, 25 bp, Homo sapien
actggtcaactctggttttgttggc

SEQ ID NO: 4420152 - DNA, 25 bp, Homo sapien
tcttcatttggtgcatcaaaaacca

SEQ ID NO: 4420153 - DNA, 25 bp, Homo sapien
ctcacactggtcaactctggttttg

SEQ ID NO: 4420154 - DNA, 25 bp, Homo sapien
acttgactgagccacgggattctag

SEQ ID NO: 4420155 - DNA, 25 bp, Homo sapien
gatattgggtcaaacattatcccag

SEQ ID NO: 4420156 - DNA, 25 bp, Homo sapien
ctttatcttagactgggcaacagca

SEQ ID NO: 4420157 - DNA, 25 bp, Homo sapien
cctaagattcatggcctagccttgc

SEQ ID NO: 4420158 - DNA, 25 bp, Homo sapien
tgtctcttgaacaccctcataaaga

SEQ ID NO: 4420159 - DNA, 25 bp, Homo sapien
tcataaagaggcagcccaccacttt

SEQ ID NO: 4420160 - DNA, 25 bp, Homo sapien
tgtaactaccttcagatgtctcgcc

SEQ ID NO: 4420161 - DNA, 25 bp, Homo sapien
tgtctcgccaggtagatgtctcttg

SEQ ID NO: 4420162 - DNA, 25 bp, Homo sapien
ttttctgtcattatcgatgtctgat

SEQ ID NO: 4420163 - DNA, 25 bp, Homo sapien
cgatgtctgattctctttgatgaca

SEQ ID NO: 4420164 - DNA, 25 bp, Homo sapien
tgtcattatcgatgtctgattctct

SEQ ID NO: 4420165 - DNA, 25 bp, Homo sapien
tatcgatgtctgattctctttgatg

SEQ ID NO: 4420166 - DNA, 25 bp, Homo sapien
ttcattgaaacttttagttctgctt

SEQ ID NO: 4420167 - DNA, 25 bp, Homo sapien
accttcattgaaacttttagttctg

SEQ ID NO: 4420168 - DNA, 25 bp, Homo sapien
cttcattgaaacttttagttctgct

SEQ ID NO: 4420169 - DNA, 25 bp, Homo sapien
ccttcattgaaacttttagttctgc

SEQ ID NO: 4420170 - DNA, 25 bp, Homo sapien
ctggtcacagggctttttgtacttc

SEQ ID NO: 4420171 - DNA, 25 bp, Homo sapien
tttgtacttcttgtgttcatagata

SEQ ID NO: 4420172 - DNA, 25 bp, Homo sapien
tgtacttcttgtgttcatagatatg

SEQ ID NO: 4420173 - DNA, 25 bp, Homo sapien
tacttcttgtgttcatagatatgct

SEQ ID NO: 4420174 - DNA, 25 bp, Homo sapien
gttttgtagttcaactctatcttca

SEQ ID NO: 4420175 - DNA, 25 bp, Homo sapien
ttttgtagttcaactctatcttcat

SEQ ID NO: 4420176 - DNA, 25 bp, Homo sapien
agttttgtagttcaactctatcttc

SEQ ID NO: 4420177 - DNA, 25 bp, Homo sapien
taatgtgaagtaaaaatcttttata

SEQ ID NO: 4420178 - DNA, 25 bp, Homo sapien
tccttttcctccaagatttaatgtg

SEQ ID NO: 4420179 - DNA, 25 bp, Homo sapien
tctccttttcctccaagatttaatg

SEQ ID NO: 4420180 - DNA, 25 bp, Homo sapien
ccttttcctccaagatttaatgtga

SEQ ID NO: 4420181 - DNA, 25 bp, Homo sapien
atttgctctaactttgtagttcttc

SEQ ID NO: 4420182 - DNA, 25 bp, Homo sapien
ttgctctaactttgtagttcttctt

SEQ ID NO: 4420183 - DNA, 25 bp, Homo sapien
tgctctaactttgtagttcttcttc

SEQ ID NO: 4420184 - DNA, 25 bp, Homo sapien
tagaggaagacatcgtgcactgctg

SEQ ID NO: 4420185 - DNA, 25 bp, Homo sapien
agaggaagacatcgtgcactgctgg

SEQ ID NO: 4420186 - DNA, 25 bp, Homo sapien
caagagacagggagtctttacagcc

SEQ ID NO: 4420187 - DNA, 25 bp, Homo sapien
tgtgtactccgttgttttgcttaag

SEQ ID NO: 4420188 - DNA, 25 bp, Homo sapien
atgcaatgtgtactccgttgttttg

SEQ ID NO: 4420189 - DNA, 25 bp, Homo sapien
ctggacctgtcaccttgtatgggag

SEQ ID NO: 4420190 - DNA, 25 bp, Homo sapien
ggtcatctgtgctttgtatgccccc

SEQ ID NO: 4420191 - DNA, 25 bp, Homo sapien
cccacaggataattgactcctctct

SEQ ID NO: 4420192 - DNA, 25 bp, Homo sapien
gaaggccccacaggataattgactc

SEQ ID NO: 4420193 - DNA, 25 bp, Homo sapien
tgtgctttgtatgccccctgaaggc

SEQ ID NO: 4420194 - DNA, 25 bp, Homo sapien
tccacagaagaacaattaggttttg

SEQ ID NO: 4420195 - DNA, 25 bp, Homo sapien
actgttccacagaagaacaattagg

SEQ ID NO: 4420196 - DNA, 25 bp, Homo sapien
tgttccacagaagaacaattaggtt

SEQ ID NO: 4420197 - DNA, 25 bp, Homo sapien
tcactgttccacagaagaacaatta

SEQ ID NO: 4420198 - DNA, 25 bp, Homo sapien
tttgctgctgttaactcttctgcca

SEQ ID NO: 4420199 - DNA, 25 bp, Homo sapien
cttcttttgctgctgttaactcttc

SEQ ID NO: 4420200 - DNA, 25 bp, Homo sapien
cttttgctgctgttaactcttctgc

SEQ ID NO: 4420201 - DNA, 25 bp, Homo sapien
tcttttgctgctgttaactcttctg

SEQ ID NO: 4420202 - DNA, 25 bp, Homo sapien
ctgagggctttctctacagaagtct

SEQ ID NO: 4420203 - DNA, 25 bp, Homo sapien
gaagctgcgttgtcccagatgaaaa

SEQ ID NO: 4420204 - DNA, 25 bp, Homo sapien
gaggaagctgcgttgtcccagatga

SEQ ID NO: 4420205 - DNA, 25 bp, Homo sapien
ctacagaagtctgcctcttggaaaa

SEQ ID NO: 4420206 - DNA, 25 bp, Homo sapien
ccaaacatatggtgtcataatcacc

SEQ ID NO: 4420207 - DNA, 25 bp, Homo sapien
ctcccctaataattcctgttcctgt

SEQ ID NO: 4420208 - DNA, 25 bp, Homo sapien
ggtgtcataatcacctcccctaata

SEQ ID NO: 4420209 - DNA, 25 bp, Homo sapien
cagtagtgtccaaacatatggtgtc

SEQ ID NO: 4420210 - DNA, 25 bp, Homo sapien
catatggtggttttattaaggagac

SEQ ID NO: 4420211 - DNA, 25 bp, Homo sapien
tggttttattaaggagactcaagaa

SEQ ID NO: 4420212 - DNA, 25 bp, Homo sapien
tagcatatggtggttttattaagga

SEQ ID NO: 4420213 - DNA, 25 bp, Homo sapien
cttgaagatgtagcatatggtggtt

SEQ ID NO: 4420214 - DNA, 25 bp, Homo sapien
tcatttttaatgaggtccgtgtcac

SEQ ID NO: 4420215 - DNA, 25 bp, Homo sapien
gaggtccgtgtcacactgaagggtt

SEQ ID NO: 4420216 - DNA, 25 bp, Homo sapien
actgctgagttgctggtaagttttc

SEQ ID NO: 4420217 - DNA, 25 bp, Homo sapien
gctgagttgctggtaagttttcatt

SEQ ID NO: 4420218 - DNA, 25 bp, Homo sapien
cctccagagtcgtgggccatagtcc

SEQ ID NO: 4420219 - DNA, 25 bp, Homo sapien
ctccagagtcgtgggccatagtccc

SEQ ID NO: 4420220 - DNA, 25 bp, Homo sapien
aggagactcacactcacggcggaag

SEQ ID NO: 4420221 - DNA, 25 bp, Homo sapien
gcctcaggagactcacactcacggc

SEQ ID NO: 4420222 - DNA, 25 bp, Homo sapien
tcaggagactcacactcacggcgga

SEQ ID NO: 4420223 - DNA, 25 bp, Homo sapien
gagactcacactcacggcggaaggc

SEQ ID NO: 4420224 - DNA, 25 bp, Homo sapien
cagtgcgaaagagaggtccacggga

SEQ ID NO: 4420225 - DNA, 25 bp, Homo sapien
ggtccacgggacctggaccaagcat

SEQ ID NO: 4420226 - DNA, 25 bp, Homo sapien
tgcgaaagagaggtccacgggacct

SEQ ID NO: 4420227 - DNA, 25 bp, Homo sapien
gagaggtccacgggacctggaccaa

SEQ ID NO: 4420228 - DNA, 25 bp, Homo sapien
ggcttatcatagcatagaccttctt

SEQ ID NO: 4420229 - DNA, 25 bp, Homo sapien
cttacaaatgtagcatccgaaggct

SEQ ID NO: 4420230 - DNA, 25 bp, Homo sapien
agcatagaccttcttttgcttgagg

SEQ ID NO: 4420231 - DNA, 25 bp, Homo sapien
gcttgagggctagatctttttagaa

SEQ ID NO: 4420232 - DNA, 25 bp, Homo sapien
ttcccttattgtggtatgtgccagg

SEQ ID NO: 4420233 - DNA, 25 bp, Homo sapien
tattgctgggaacaataccatactg

SEQ ID NO: 4420234 - DNA, 25 bp, Homo sapien
ggtctcgaatattcagctttgcccg

SEQ ID NO: 4420235 - DNA, 25 bp, Homo sapien
gtaacagtattacctcctggagatg

SEQ ID NO: 4420236 - DNA, 25 bp, Homo sapien
ctcggcattttcagattcattgatc

SEQ ID NO: 4420237 - DNA, 25 bp, Homo sapien
ttcctcggcattttcagattcattg

SEQ ID NO: 4420238 - DNA, 25 bp, Homo sapien
cttcctcggcattttcagattcatt

SEQ ID NO: 4420239 - DNA, 25 bp, Homo sapien
gcattttcagattcattgatctcag

SEQ ID NO: 4420240 - DNA, 25 bp, Homo sapien
catgatgccatgtacctactattac

SEQ ID NO: 4420241 - DNA, 25 bp, Homo sapien
cagttcacactagggtttattctgt

SEQ ID NO: 4420242 - DNA, 25 bp, Homo sapien
ttattaactagagactacagttcac

SEQ ID NO: 4420243 - DNA, 25 bp, Homo sapien
agggttctcatatactatcttttct

SEQ ID NO: 4420244 - DNA, 25 bp, Homo sapien
gaaatcatactaaccacagtctcaa

SEQ ID NO: 4420245 - DNA, 25 bp, Homo sapien
gaacacacagtcgtccataaagcac

SEQ ID NO: 4420246 - DNA, 25 bp, Homo sapien
tatggaaaactccacccaacgacaa

SEQ ID NO: 4420247 - DNA, 25 bp, Homo sapien
catgacacatactctaagactgaac

SEQ ID NO: 4420248 - DNA, 25 bp, Homo sapien
cagctatacccatgttgtgccacag

SEQ ID NO: 4420249 - DNA, 25 bp, Homo sapien
cagggttagagaacacagtccagga

SEQ ID NO: 4420250 - DNA, 25 bp, Homo sapien
gagtgtgaaactgaaccttgcccag

SEQ ID NO: 4420251 - DNA, 25 bp, Homo sapien
ccagattgaaatggctgaaacgtca

SEQ ID NO: 4420252 - DNA, 25 bp, Homo sapien
ctcataacattgagggggaatggga

SEQ ID NO: 4420253 - DNA, 25 bp, Homo sapien
cttatagcagccaaacgctacctca

SEQ ID NO: 4420254 - DNA, 25 bp, Homo sapien
tatagcagccaaacgctacctcata

SEQ ID NO: 4420255 - DNA, 25 bp, Homo sapien
gctacctcataacattgagggggaa

SEQ ID NO: 4420256 - DNA, 25 bp, Homo sapien
agtctgctttcaacaaatgctccaa

SEQ ID NO: 4420257 - DNA, 25 bp, Homo sapien
cccctctggcaacttggaactctcc

SEQ ID NO: 4420258 - DNA, 25 bp, Homo sapien
ggttagaatcatatcccaaggttgt

SEQ ID NO: 4420259 - DNA, 25 bp, Homo sapien
cagcaccttgggacgttgctgccgg

SEQ ID NO: 4420260 - DNA, 25 bp, Homo sapien
gccgggcaggacagtaagggttaga

SEQ ID NO: 4420261 - DNA, 25 bp, Homo sapien
gtgactccctagacactccacattt

SEQ ID NO: 4420262 - DNA, 25 bp, Homo sapien
aggaggcaggttgccctctgttcca

SEQ ID NO: 4420263 - DNA, 25 bp, Homo sapien
ctgtttgtgacacccgcagccttta

SEQ ID NO: 4420264 - DNA, 25 bp, Homo sapien
gacacccgcagcctttaatccaagg

SEQ ID NO: 4420265 - DNA, 25 bp, Homo sapien
caagaagtcaagttatctgcctcca

SEQ ID NO: 4420266 - DNA, 25 bp, Homo sapien
agagacggttatgggtgtcattgtc

SEQ ID NO: 4420267 - DNA, 25 bp, Homo sapien
taattttgctcctggaaagaactcc

SEQ ID NO: 4420268 - DNA, 25 bp, Homo sapien
caattcaataaaccctcttctgagt

SEQ ID NO: 4420269 - DNA, 25 bp, Homo sapien
catccgtcagacaacttcttgcaaa

SEQ ID NO: 4420270 - DNA, 25 bp, Homo sapien
ctcatccgtcagacaacttcttgca

SEQ ID NO: 4420271 - DNA, 25 bp, Homo sapien
ccagtgcagttacacataaccaaac

SEQ ID NO: 4420272 - DNA, 25 bp, Homo sapien
tccagtgcagttacacataaccaaa

SEQ ID NO: 4420273 - DNA, 25 bp, Homo sapien
cactgagtattttgcacagcagaca

SEQ ID NO: 4420274 - DNA, 25 bp, Homo sapien
actgagtattttgcacagcagacat

SEQ ID NO: 4420275 - DNA, 25 bp, Homo sapien
cagacatggtccatcatcagcataa

SEQ ID NO: 4420276 - DNA, 25 bp, Homo sapien
agcagacatggtccatcatcagcat

SEQ ID NO: 4420277 - DNA, 25 bp, Homo sapien
taatgagtccatgtaccctcctgag

SEQ ID NO: 4420278 - DNA, 25 bp, Homo sapien
caagggccacctgggacttatctta

SEQ ID NO: 4420279 - DNA, 25 bp, Homo sapien
gccccgtttcgtggatggagatcat

SEQ ID NO: 4420280 - DNA, 25 bp, Homo sapien
ttgactgcagtctggcaagggccac

SEQ ID NO: 4420281 - DNA, 25 bp, Homo sapien
tatatgttagagtgctcatagcagc

SEQ ID NO: 4420282 - DNA, 25 bp, Homo sapien
ggatgaggcaccacttccggcctta

SEQ ID NO: 4420283 - DNA, 25 bp, Homo sapien
gtgctgcgatcatgatcactgctca

SEQ ID NO: 4420284 - DNA, 25 bp, Homo sapien
caacaacattgctgaatctcacaga

SEQ ID NO: 4420285 - DNA, 25 bp, Homo sapien
atagtagtctctagggagtatttgt

SEQ ID NO: 4420286 - DNA, 25 bp, Homo sapien
tagtctctagggagtatttgtcttt

SEQ ID NO: 4420287 - DNA, 25 bp, Homo sapien
tcttggaaggttataggagtccagg

SEQ ID NO: 4420288 - DNA, 25 bp, Homo sapien
attattagtctgttctgggattcaa

SEQ ID NO: 4420289 - DNA, 25 bp, Homo sapien
tggttgtatttttatctaccattgc

SEQ ID NO: 4420290 - DNA, 25 bp, Homo sapien
tatttttatctaccattgctagttg

SEQ ID NO: 4420291 - DNA, 25 bp, Homo sapien
ttgtatttttatctaccattgctag

SEQ ID NO: 4420292 - DNA, 25 bp, Homo sapien
tttatctaccattgctagttgattt

SEQ ID NO: 4420293 - DNA, 25 bp, Homo sapien
caagagatgattatctggtggaaga

SEQ ID NO: 4420294 - DNA, 25 bp, Homo sapien
aagagatgattatctggtggaagaa

SEQ ID NO: 4420295 - DNA, 25 bp, Homo sapien
ccaagagatgattatctggtggaag

SEQ ID NO: 4420296 - DNA, 25 bp, Homo sapien
gggaattggagtaaagtgactcttg

SEQ ID NO: 4420297 - DNA, 25 bp, Homo sapien
gacagaagagtgtcttaagacaacc

SEQ ID NO: 4420298 - DNA, 25 bp, Homo sapien
atgctcaatttatgaaaagatccta

SEQ ID NO: 4420299 - DNA, 25 bp, Homo sapien
ggacagaagagtgtcttaagacaac

SEQ ID NO: 4420300 - DNA, 25 bp, Homo sapien
aatcttaaccaatttaactttgatg

SEQ ID NO: 4420301 - DNA, 25 bp, Homo sapien
gagcctcatcagtatgtggtttgca

SEQ ID NO: 4420302 - DNA, 25 bp, Homo sapien
cctcaaagttatgtagagcctcatc

SEQ ID NO: 4420303 - DNA, 25 bp, Homo sapien
cttatacttagtgggatttgtgggc

SEQ ID NO: 4420304 - DNA, 25 bp, Homo sapien
caaagagcagtcacggtttctacca

SEQ ID NO: 4420305 - DNA, 25 bp, Homo sapien
gaacattctgattctagtcaccctc

SEQ ID NO: 4420306 - DNA, 25 bp, Homo sapien
catcacctttttgacagtcgtaata

SEQ ID NO: 4420307 - DNA, 25 bp, Homo sapien
cattctgattctagtcaccctcatc

SEQ ID NO: 4420308 - DNA, 25 bp, Homo sapien
gacagtcgtaataactttgattgtg

SEQ ID NO: 4420309 - DNA, 25 bp, Homo sapien
cttgtatctattgatctctattgaa

SEQ ID NO: 4420310 - DNA, 25 bp, Homo sapien
ctattgatctctattgaatttcctt

SEQ ID NO: 4420311 - DNA, 25 bp, Homo sapien
tctaacttgtatctattgatctcta

SEQ ID NO: 4420312 - DNA, 25 bp, Homo sapien
taaatatctaacttgtatctattga

SEQ ID NO: 4420313 - DNA, 25 bp, Homo sapien
cagttgaatctgcatcaatgtaaac

SEQ ID NO: 4420314 - DNA, 25 bp, Homo sapien
tcacccagttgaatctgcatcaatg

SEQ ID NO: 4420315 - DNA, 25 bp, Homo sapien
tatttcacccagttgaatctgcatc

SEQ ID NO: 4420316 - DNA, 25 bp, Homo sapien
agttatttcacccagttgaatctgc

SEQ ID NO: 4420317 - DNA, 25 bp, Homo sapien
cctgtcaagttagcacagagcagtt

SEQ ID NO: 4420318 - DNA, 25 bp, Homo sapien
ttatctgcatgtggaacctgtcaag

SEQ ID NO: 4420319 - DNA, 25 bp, Homo sapien
gacttagcataattagggataccca

SEQ ID NO: 4420320 - DNA, 25 bp, Homo sapien
gtttggccgccactgatacttcaca

SEQ ID NO: 4420321 - DNA, 25 bp, Homo sapien
agttcagtggtaacagcatatccca

SEQ ID NO: 4420322 - DNA, 25 bp, Homo sapien
gcatatcccacataacgaacgcctt

SEQ ID NO: 4420323 - DNA, 25 bp, Homo sapien
acttctttgataacttcaagttcag

SEQ ID NO: 4420324 - DNA, 25 bp, Homo sapien
taacttcaagttcagtggtaacagc

SEQ ID NO: 4420325 - DNA, 25 bp, Homo sapien
gaggccagcttcgacttccctatga

SEQ ID NO: 4420326 - DNA, 25 bp, Homo sapien
agaagtgactcagccaaagaggcca

SEQ ID NO: 4420327 - DNA, 25 bp, Homo sapien
ggacagagagaacccatcaggcagt

SEQ ID NO: 4420328 - DNA, 25 bp, Homo sapien
tttgacccaatcagaaccgccatta

SEQ ID NO: 4420329 - DNA, 25 bp, Homo sapien
gaaagagtctctcacaaagagccaa

SEQ ID NO: 4420330 - DNA, 25 bp, Homo sapien
tatgacaaataagagagcagagctc

SEQ ID NO: 4420331 - DNA, 25 bp, Homo sapien
gatataacaaggaggcggtcttcta

SEQ ID NO: 4420332 - DNA, 25 bp, Homo sapien
taccagaggactgagctttcaatgg

SEQ ID NO: 4420333 - DNA, 25 bp, Homo sapien
taacctatgggtcctagaagaagac

SEQ ID NO: 4420334 - DNA, 25 bp, Homo sapien
cacagaatacacaccaagacagatg

SEQ ID NO: 4420335 - DNA, 25 bp, Homo sapien
gcctccagaaccgtaggaaatagag

SEQ ID NO: 4420336 - DNA, 25 bp, Homo sapien
taagaaaggatccaagagctagctc

SEQ ID NO: 4420337 - DNA, 25 bp, Homo sapien
tccacttggtctttgtgcattacca

SEQ ID NO: 4420338 - DNA, 25 bp, Homo sapien
tgtcagttagttcaagttggccatt

SEQ ID NO: 4420339 - DNA, 25 bp, Homo sapien
gctttcccagcataaactccacttg

SEQ ID NO: 4420340 - DNA, 25 bp, Homo sapien
tctgtttaccaatgatgtgttctct

SEQ ID NO: 4420341 - DNA, 25 bp, Homo sapien
cctatggaatacgatcgtgagaacc

SEQ ID NO: 4420342 - DNA, 25 bp, Homo sapien
tgagcagagcctaagaaacctatgg

SEQ ID NO: 4420343 - DNA, 25 bp, Homo sapien
gatctgatgacaggcctactagaga

SEQ ID NO: 4420344 - DNA, 25 bp, Homo sapien
tgtactaggcatatttgagcaggca

SEQ ID NO: 4420345 - DNA, 25 bp, Homo sapien
ccctttgtgatataaagcagaacat

SEQ ID NO: 4420346 - DNA, 25 bp, Homo sapien
ttccatacaatatggtaaatgccat

SEQ ID NO: 4420347 - DNA, 25 bp, Homo sapien
aaatccaggagtttcaaagaagagt

SEQ ID NO: 4420348 - DNA, 25 bp, Homo sapien
aaagaagagttttgtatgatctttt

SEQ ID NO: 4420349 - DNA, 25 bp, Homo sapien
tcacattagaagtctcagtgccagg

SEQ ID NO: 4420350 - DNA, 25 bp, Homo sapien
tctcagtgccaggacggtcaggtta

SEQ ID NO: 4420351 - DNA, 25 bp, Homo sapien
gacggtcaggttataatcctggtat

SEQ ID NO: 4420352 - DNA, 25 bp, Homo sapien
taatcctggtatttataatcaccag

SEQ ID NO: 4420353 - DNA, 25 bp, Homo sapien
cagctaacttactttcaactcctaa

SEQ ID NO: 4420354 - DNA, 25 bp, Homo sapien
ctaatttagtatgctggatgatgca

SEQ ID NO: 4420355 - DNA, 25 bp, Homo sapien
ccttaggctctcttcatgtcgtgta

SEQ ID NO: 4420356 - DNA, 25 bp, Homo sapien
cattgaaactctctaatggttttcc

SEQ ID NO: 4420357 - DNA, 25 bp, Homo sapien
gaataacttttacatagcctttgga

SEQ ID NO: 4420358 - DNA, 25 bp, Homo sapien
ccacagtttcggtcattagcatcta

SEQ ID NO: 4420359 - DNA, 25 bp, Homo sapien
atttagtataccagcaaggtgctcc

SEQ ID NO: 4420360 - DNA, 25 bp, Homo sapien
catgagttccaatgctctgaatgaa

SEQ ID NO: 4420361 - DNA, 25 bp, Homo sapien
ctttgtagaggattagaatgaacaa

SEQ ID NO: 4420362 - DNA, 25 bp, Homo sapien
catgccatacaatgctttgtagagg

SEQ ID NO: 4420363 - DNA, 25 bp, Homo sapien
aatgctttgtagaggattagaatga

SEQ ID NO: 4420364 - DNA, 25 bp, Homo sapien
tacaatgctttgtagaggattagaa

SEQ ID NO: 4420365 - DNA, 25 bp, Homo sapien
caacccaatagtaacaagtaaatat

SEQ ID NO: 4420366 - DNA, 25 bp, Homo sapien
gtgaattttggcacaatgtttctct

SEQ ID NO: 4420367 - DNA, 25 bp, Homo sapien
cagtgaattttggcacaatgtttct

SEQ ID NO: 4420368 - DNA, 25 bp, Homo sapien
ttctgaattactggataaggctccc

SEQ ID NO: 4420369 - DNA, 25 bp, Homo sapien
tccctgtagtttggaatctgtgttt

SEQ ID NO: 4420370 - DNA, 25 bp, Homo sapien
tagactcccttccttgtattccagc

SEQ ID NO: 4420371 - DNA, 25 bp, Homo sapien
cccggccaggccaaagcatttctga

SEQ ID NO: 4420372 - DNA, 25 bp, Homo sapien
gatatactctggctatgaccaacaa

SEQ ID NO: 4420373 - DNA, 25 bp, Homo sapien
gcatttctgacacgcatagactccc

SEQ ID NO: 4420374 - DNA, 25 bp, Homo sapien
aacatccaacaagtgtctaggaagc

SEQ ID NO: 4420375 - DNA, 25 bp, Homo sapien
tctgggaccatctccgcctggacat

SEQ ID NO: 4420376 - DNA, 25 bp, Homo sapien
tatagcagtactacactgtctgcag

SEQ ID NO: 4420377 - DNA, 25 bp, Homo sapien
aagctgctcccacattttcaagtag

SEQ ID NO: 4420378 - DNA, 25 bp, Homo sapien
ctttctccttcaacacgtagggatt

SEQ ID NO: 4420379 - DNA, 25 bp, Homo sapien
tcaagagaacagcactgagtaaact

SEQ ID NO: 4420380 - DNA, 25 bp, Homo sapien
ccgatagaatgtagttttggcagta

SEQ ID NO: 4420381 - DNA, 25 bp, Homo sapien
gagagccaggatttattatgacatt

SEQ ID NO: 4420382 - DNA, 25 bp, Homo sapien
tcagcccatggtgagagattacagc

SEQ ID NO: 4420383 - DNA, 25 bp, Homo sapien
tgaccgagtaagtcactagcccttg

SEQ ID NO: 4420384 - DNA, 25 bp, Homo sapien
caatgtttcatctgccccaagtggt

SEQ ID NO: 4420385 - DNA, 25 bp, Homo sapien
aatatgtcagagttatccaaagccc

SEQ ID NO: 4420386 - DNA, 25 bp, Homo sapien
caggtgctttgcgtaaaccgtaaca

SEQ ID NO: 4420387 - DNA, 25 bp, Homo sapien
taacatttttctacgttggaaatga

SEQ ID NO: 4420388 - DNA, 25 bp, Homo sapien
ttctacgttggaaatgattatcttc

SEQ ID NO: 4420389 - DNA, 25 bp, Homo sapien
catttttctacgttggaaatgatta

SEQ ID NO: 4420390 - DNA, 25 bp, Homo sapien
ttgttttggggcttgagcgggtgag

SEQ ID NO: 4420391 - DNA, 25 bp, Homo sapien
ttttggggcttgagcgggtgagcat

SEQ ID NO: 4420392 - DNA, 25 bp, Homo sapien
gttttggggcttgagcgggtgagca

SEQ ID NO: 4420393 - DNA, 25 bp, Homo sapien
tgttttggggcttgagcgggtgagc

SEQ ID NO: 4420394 - DNA, 25 bp, Homo sapien
cagcggctgttcaggtacttttctg

SEQ ID NO: 4420395 - DNA, 25 bp, Homo sapien
ccgtaggctttatagtagaatttgc

SEQ ID NO: 4420396 - DNA, 25 bp, Homo sapien
taaagtctgttgtataaccgtaggc

SEQ ID NO: 4420397 - DNA, 25 bp, Homo sapien
ctaagtagtgttttcattaatcacc

SEQ ID NO: 4420398 - DNA, 25 bp, Homo sapien
ggtgaggattcgtgcttattttgtc

SEQ ID NO: 4420399 - DNA, 25 bp, Homo sapien
tatgaacttccttggcgtttccaag

SEQ ID NO: 4420400 - DNA, 25 bp, Homo sapien
tcctgccttctatgaacttccttgg

SEQ ID NO: 4420401 - DNA, 25 bp, Homo sapien
ttccaagccttttttctactggtga

SEQ ID NO: 4420402 - DNA, 25 bp, Homo sapien
ccaggttcaaggtaagccttcagga

SEQ ID NO: 4420403 - DNA, 25 bp, Homo sapien
caggttcaaggtaagccttcaggaa

SEQ ID NO: 4420404 - DNA, 25 bp, Homo sapien
gccaggttcaaggtaagccttcagg

SEQ ID NO: 4420405 - DNA, 25 bp, Homo sapien
gggcatttcccactaccaagcaggt

SEQ ID NO: 4420406 - DNA, 25 bp, Homo sapien
taagtacttcagtagggtaactgag

SEQ ID NO: 4420407 - DNA, 25 bp, Homo sapien
taagtggttcctaccattgagaaga

SEQ ID NO: 4420408 - DNA, 25 bp, Homo sapien
aagaccacagaatgtgtactagaaa

SEQ ID NO: 4420409 - DNA, 25 bp, Homo sapien
tgtgtgtacagcatggtccagcagg

SEQ ID NO: 4420410 - DNA, 25 bp, Homo sapien
cagcaggttcgcaggtgaaggctgg

SEQ ID NO: 4420411 - DNA, 25 bp, Homo sapien
catggtccagcaggttcgcaggtga

SEQ ID NO: 4420412 - DNA, 25 bp, Homo sapien
acagccagagaatatatggccacaa

SEQ ID NO: 4420413 - DNA, 25 bp, Homo sapien
ggaaatactccctaagcgtcttcta

SEQ ID NO: 4420414 - DNA, 25 bp, Homo sapien
gtccttgtacagagggcagcactga

SEQ ID NO: 4420415 - DNA, 25 bp, Homo sapien
actgaaagctgcagccgtcaatttc

SEQ ID NO: 4420416 - DNA, 25 bp, Homo sapien
tgcagccgtcaatttccacccttgt

SEQ ID NO: 4420417 - DNA, 25 bp, Homo sapien
gccagataggttcaatggaaacaaa

SEQ ID NO: 4420418 - DNA, 25 bp, Homo sapien
ccagataggttcaatggaaacaaaa

SEQ ID NO: 4420419 - DNA, 25 bp, Homo sapien
cagataggttcaatggaaacaaaaa

SEQ ID NO: 4420420 - DNA, 25 bp, Homo sapien
taagtgccacagctcctttagtaaa

SEQ ID NO: 4420421 - DNA, 25 bp, Homo sapien
gacctaagatcctgtacaaggcaca

SEQ ID NO: 4420422 - DNA, 25 bp, Homo sapien
tcttccatcaactgaatgctagggt

SEQ ID NO: 4420423 - DNA, 25 bp, Homo sapien
cataaattctttgtgaggacctaag

SEQ ID NO: 4420424 - DNA, 25 bp, Homo sapien
aaggagcggaagaaactgaagatca

SEQ ID NO: 4420425 - DNA, 25 bp, Homo sapien
tgtagtcaagactcttaaggagcgg

SEQ ID NO: 4420426 - DNA, 25 bp, Homo sapien
gggaaaaaaccgcatgcagcaatac

SEQ ID NO: 4420427 - DNA, 25 bp, Homo sapien
ttattcctggtatactgtgagcatg

SEQ ID NO: 4420428 - DNA, 25 bp, Homo sapien
acagtactggcagcatcaggtttat

SEQ ID NO: 4420429 - DNA, 25 bp, Homo sapien
actggcagcatcaggtttataaagc

SEQ ID NO: 4420430 - DNA, 25 bp, Homo sapien
tcaaacagtactggcagcatcaggt

SEQ ID NO: 4420431 - DNA, 25 bp, Homo sapien
ctggcagcatcaggtttataaagca

SEQ ID NO: 4420432 - DNA, 25 bp, Homo sapien
aacaaagattcatgtctacgcaaag

SEQ ID NO: 4420433 - DNA, 25 bp, Homo sapien
gattcatgtctacgcaaagattcat

SEQ ID NO: 4420434 - DNA, 25 bp, Homo sapien
ggtagcctcttgtaaacaaagattc

SEQ ID NO: 4420435 - DNA, 25 bp, Homo sapien
gatacagagggtagcctcttgtaaa

SEQ ID NO: 4420436 - DNA, 25 bp, Homo sapien
ttgaaggtgaacctgatgccagcag

SEQ ID NO: 4420437 - DNA, 25 bp, Homo sapien
ccagcagcaaatgagtgcacagagg

SEQ ID NO: 4420438 - DNA, 25 bp, Homo sapien
aatctgtcactcaggattgaaggtg

SEQ ID NO: 4420439 - DNA, 25 bp, Homo sapien
tgatgccagcagcaaatgagtgcac

SEQ ID NO: 4420440 - DNA, 25 bp, Homo sapien
atttccattcgggtcaattctgttg

SEQ ID NO: 4420441 - DNA, 25 bp, Homo sapien
tttccattcgggtcaattctgttga

SEQ ID NO: 4420442 - DNA, 25 bp, Homo sapien
catttccattcgggtcaattctgtt

SEQ ID NO: 4420443 - DNA, 25 bp, Homo sapien
tccattcgggtcaattctgttgaag

SEQ ID NO: 4420444 - DNA, 25 bp, Homo sapien
tgggacacaagaactttcctgggaa

SEQ ID NO: 4420445 - DNA, 25 bp, Homo sapien
tggccgccagctcagatactgtatc

SEQ ID NO: 4420446 - DNA, 25 bp, Homo sapien
tgggaatttcctggccgccagctca

SEQ ID NO: 4420447 - DNA, 25 bp, Homo sapien
aactcgccaaaccttcagaagggca

SEQ ID NO: 4420448 - DNA, 25 bp, Homo sapien
ttcaatgactgggtgaagaagcgaa

SEQ ID NO: 4420449 - DNA, 25 bp, Homo sapien
tgactgggtgaagaagcgaagacaa

SEQ ID NO: 4420450 - DNA, 25 bp, Homo sapien
tgatcccaatgaaatgatctcctct

SEQ ID NO: 4420451 - DNA, 25 bp, Homo sapien
gaagacaagctactcagttttgcca

SEQ ID NO: 4420452 - DNA, 25 bp, Homo sapien
tgcaagggtgatggccaactgtgtt

SEQ ID NO: 4420453 - DNA, 25 bp, Homo sapien
ctgtgttaaaatgaccccaggtggc

SEQ ID NO: 4420454 - DNA, 25 bp, Homo sapien
ctttttggtatgcaagggtgatggc

SEQ ID NO: 4420455 - DNA, 25 bp, Homo sapien
caactgtgttaaaatgaccccaggt

SEQ ID NO: 4420456 - DNA, 25 bp, Homo sapien
gcccttccccatacaggatgctttt

SEQ ID NO: 4420457 - DNA, 25 bp, Homo sapien
tgcattttccttgcccttccccata

SEQ ID NO: 4420458 - DNA, 25 bp, Homo sapien
ggatgcttttccataacaactttta

SEQ ID NO: 4420459 - DNA, 25 bp, Homo sapien
gatgcttttccataacaacttttaa

SEQ ID NO: 4420460 - DNA, 25 bp, Homo sapien
aagcgagctcagagagacacatgga

SEQ ID NO: 4420461 - DNA, 25 bp, Homo sapien
tctgtgcaagcgagctcagagagac

SEQ ID NO: 4420462 - DNA, 25 bp, Homo sapien
aagctctgtgcaagcgagctcagag

SEQ ID NO: 4420463 - DNA, 25 bp, Homo sapien
tgcaagcgagctcagagagacacat

SEQ ID NO: 4420464 - DNA, 25 bp, Homo sapien
atgcattttcctttgtgatacccat

SEQ ID NO: 4420465 - DNA, 25 bp, Homo sapien
aggagtttattgcaaggtagtgatc

SEQ ID NO: 4420466 - DNA, 25 bp, Homo sapien
agttcagaggagtttattgcaaggt

SEQ ID NO: 4420467 - DNA, 25 bp, Homo sapien
gcagtgagttcagaggagtttattg

SEQ ID NO: 4420468 - DNA, 25 bp, Homo sapien
cagaggagtttattgcaaggtagtg

SEQ ID NO: 4420469 - DNA, 25 bp, Homo sapien
gcctgatttgacagccctatcctgt

SEQ ID NO: 4420470 - DNA, 25 bp, Homo sapien
gtgtattagcttagataccaatgag

SEQ ID NO: 4420471 - DNA, 25 bp, Homo sapien
aatctctgatatgtttgagcctgat

SEQ ID NO: 4420472 - DNA, 25 bp, Homo sapien
tattggtaaagtttgaccccagata

SEQ ID NO: 4420473 - DNA, 25 bp, Homo sapien
ttatgtcccgggcatctgccttctg

SEQ ID NO: 4420474 - DNA, 25 bp, Homo sapien
aggttttcttatgtcccgggcatct

SEQ ID NO: 4420475 - DNA, 25 bp, Homo sapien
tgtcccgggcatctgccttctgtgc

SEQ ID NO: 4420476 - DNA, 25 bp, Homo sapien
ggttttcttatgtcccgggcatctg

SEQ ID NO: 4420477 - DNA, 25 bp, Homo sapien
tctcttatccttgaccagacagtgt

SEQ ID NO: 4420478 - DNA, 25 bp, Homo sapien
cagtgtaggtctaacatgggaagac

SEQ ID NO: 4420479 - DNA, 25 bp, Homo sapien
ccttgaccagacagtgtaggtctaa

SEQ ID NO: 4420480 - DNA, 25 bp, Homo sapien
gtaggtctaacatgggaagacacat

SEQ ID NO: 4420481 - DNA, 25 bp, Homo sapien
cacagtgtctgtcaaggcgagattc

SEQ ID NO: 4420482 - DNA, 25 bp, Homo sapien
caaagtgaccactttcgtactcaga

SEQ ID NO: 4420483 - DNA, 25 bp, Homo sapien
cttggatttacgcttgactttgtga

SEQ ID NO: 4420484 - DNA, 25 bp, Homo sapien
caacacaggccttggaatttgtcct

SEQ ID NO: 4420485 - DNA, 25 bp, Homo sapien
tgtgactcttggaacgcattctcaa

SEQ ID NO: 4420486 - DNA, 25 bp, Homo sapien
ttctcaaatcctaggggctcaagct

SEQ ID NO: 4420487 - DNA, 25 bp, Homo sapien
tcttggaacgcattctcaaatccta

SEQ ID NO: 4420488 - DNA, 25 bp, Homo sapien
tggaacgcattctcaaatcctaggg

SEQ ID NO: 4420489 - DNA, 25 bp, Homo sapien
tgtacacagtccatcttttcggcac

SEQ ID NO: 4420490 - DNA, 25 bp, Homo sapien
attcttctgtacacagtccatcttt

SEQ ID NO: 4420491 - DNA, 25 bp, Homo sapien
tacacagtccatcttttcggcacat

SEQ ID NO: 4420492 - DNA, 25 bp, Homo sapien
ttctgtacacagtccatcttttcgg

SEQ ID NO: 4420493 - DNA, 25 bp, Homo sapien
ccctgggatcatctgcaccgcgata

SEQ ID NO: 4420494 - DNA, 25 bp, Homo sapien
tgcaccgcgataatcagcgtctggc

SEQ ID NO: 4420495 - DNA, 25 bp, Homo sapien
ccgcgataatcagcgtctggctgtc

SEQ ID NO: 4420496 - DNA, 25 bp, Homo sapien
ggatcatctgcaccgcgataatcag

SEQ ID NO: 4420497 - DNA, 25 bp, Homo sapien
catgcctatgattgttgatatcttg

SEQ ID NO: 4420498 - DNA, 25 bp, Homo sapien
aaactgaagtccaactgcatgcatg

SEQ ID NO: 4420499 - DNA, 25 bp, Homo sapien
tcttgatcacatgattaagatttag

SEQ ID NO: 4420500 - DNA, 25 bp, Homo sapien
tgatatcttgatcacatgattaaga

SEQ ID NO: 4420501 - DNA, 25 bp, Homo sapien
agtgtttgattttttgttcttgcaa

SEQ ID NO: 4420502 - DNA, 25 bp, Homo sapien
cagtgtttgattttttgttcttgca

SEQ ID NO: 4420503 - DNA, 25 bp, Homo sapien
cttgcatatatgtctcagttcagct

SEQ ID NO: 4420504 - DNA, 25 bp, Homo sapien
cagttcagctaaatcaaatagagga

SEQ ID NO: 4420505 - DNA, 25 bp, Homo sapien
caaatagaggagatgcaccaggact

SEQ ID NO: 4420506 - DNA, 25 bp, Homo sapien
aggacttgccaacattgtccatgct

SEQ ID NO: 4420507 - DNA, 25 bp, Homo sapien
atgtagtgttctcttaatgctggca

SEQ ID NO: 4420508 - DNA, 25 bp, Homo sapien
tgtagtgttctcttaatgctggcaa

SEQ ID NO: 4420509 - DNA, 25 bp, Homo sapien
tggccacggactactccttctgtag

SEQ ID NO: 4420510 - DNA, 25 bp, Homo sapien
cttctgtatggccacggactactcc

SEQ ID NO: 4420511 - DNA, 25 bp, Homo sapien
tttttatacttggtgctatcacaat

SEQ ID NO: 4420512 - DNA, 25 bp, Homo sapien
gagcattgactctctcggttacaga

SEQ ID NO: 4420513 - DNA, 25 bp, Homo sapien
cagttactgagcattgactctctcg

SEQ ID NO: 4420514 - DNA, 25 bp, Homo sapien
ggtgctatcacaatatcccataatg

SEQ ID NO: 4420515 - DNA, 25 bp, Homo sapien
ttgaagaagatccaacttgcaggat

SEQ ID NO: 4420516 - DNA, 25 bp, Homo sapien
cttgaagaagatccaacttgcagga

SEQ ID NO: 4420517 - DNA, 25 bp, Homo sapien
catcatctagccttaaactggtagg

SEQ ID NO: 4420518 - DNA, 25 bp, Homo sapien
gtccatccagtgacttgagaatgat

SEQ ID NO: 4420519 - DNA, 25 bp, Homo sapien
tgagaatgatagactgtgcctcaat

SEQ ID NO: 4420520 - DNA, 25 bp, Homo sapien
tccagtgacttgagaatgatagact

SEQ ID NO: 4420521 - DNA, 25 bp, Homo sapien
ctgaaggattcccatgggagagtga

SEQ ID NO: 4420522 - DNA, 25 bp, Homo sapien
tgaaggattcccatgggagagtgat

SEQ ID NO: 4420523 - DNA, 25 bp, Homo sapien
aaggattcccatgggagagtgataa

SEQ ID NO: 4420524 - DNA, 25 bp, Homo sapien
gaaggattcccatgggagagtgata

SEQ ID NO: 4420525 - DNA, 25 bp, Homo sapien
acctggcccagcatgtggcactgaa

SEQ ID NO: 4420526 - DNA, 25 bp, Homo sapien
gaaggctgacataatctggtctccc

SEQ ID NO: 4420527 - DNA, 25 bp, Homo sapien
cctgacctgtatgcacatgcttggg

SEQ ID NO: 4420528 - DNA, 25 bp, Homo sapien
cacatcgcgtggataaacatggttc

SEQ ID NO: 4420529 - DNA, 25 bp, Homo sapien
cactcggggttctcgtacaagttca

SEQ ID NO: 4420530 - DNA, 25 bp, Homo sapien
ttcaaaatgatgtgttcaatgcttt

SEQ ID NO: 4420531 - DNA, 25 bp, Homo sapien
tcactcggggttctcgtacaagttc

SEQ ID NO: 4420532 - DNA, 25 bp, Homo sapien
gggttctcgtacaagttcaaaatga

SEQ ID NO: 4420533 - DNA, 25 bp, Homo sapien
ctttccatgagatcaaaagagccac

SEQ ID NO: 4420534 - DNA, 25 bp, Homo sapien
caaaagagccacaaggcacctgtgg

SEQ ID NO: 4420535 - DNA, 25 bp, Homo sapien
atcaaaagagccacaaggcacctgt

SEQ ID NO: 4420536 - DNA, 25 bp, Homo sapien
tccatgagatcaaaagagccacaag

SEQ ID NO: 4420537 - DNA, 25 bp, Homo sapien
tgtccacagaccttggaagcttcaa

SEQ ID NO: 4420538 - DNA, 25 bp, Homo sapien
cacagaccttggaagcttcaacgga

SEQ ID NO: 4420539 - DNA, 25 bp, Homo sapien
gcttcaacggatagtttatgtttac

SEQ ID NO: 4420540 - DNA, 25 bp, Homo sapien
ccttggaagcttcaacggatagttt

SEQ ID NO: 4420541 - DNA, 25 bp, Homo sapien
ttttgatatcatgcaccagaaatcc

SEQ ID NO: 4420542 - DNA, 25 bp, Homo sapien
gttttgatatcatgcaccagaaatc

SEQ ID NO: 4420543 - DNA, 25 bp, Homo sapien
acattttctaaatggccctgggtga

SEQ ID NO: 4420544 - DNA, 25 bp, Homo sapien
ggttttgatatcatgcaccagaaat

SEQ ID NO: 4420545 - DNA, 25 bp, Homo sapien
tacggccctctttctgtcgagtcag

SEQ ID NO: 4420546 - DNA, 25 bp, Homo sapien
aatcaagtgtcgagaagtaaaatcc

SEQ ID NO: 4420547 - DNA, 25 bp, Homo sapien
atccaaaaacggtgcaattcttctt

SEQ ID NO: 4420548 - DNA, 25 bp, Homo sapien
ctaggagaggtcttttcagattgag

SEQ ID NO: 4420549 - DNA, 25 bp, Homo sapien
ggacacggagtcttaattacctaca

SEQ ID NO: 4420550 - DNA, 25 bp, Homo sapien
cctgaggctgtactgaatacccact

SEQ ID NO: 4420551 - DNA, 25 bp, Homo sapien
gctgaagactaaggaatggagccca

SEQ ID NO: 4420552 - DNA, 25 bp, Homo sapien
taaagatacaaagacaaggccaggt

SEQ ID NO: 4420553 - DNA, 25 bp, Homo sapien
ggtgtaggttgccatgttcacaata

SEQ ID NO: 4420554 - DNA, 25 bp, Homo sapien
taggttgccatgttcacaatacaaa

SEQ ID NO: 4420555 - DNA, 25 bp, Homo sapien
tccaatccatttggtgtaggttgcc

SEQ ID NO: 4420556 - DNA, 25 bp, Homo sapien
ttccaatccatttggtgtaggttgc

SEQ ID NO: 4420557 - DNA, 25 bp, Homo sapien
caacttgtctatggccattttctct

SEQ ID NO: 4420558 - DNA, 25 bp, Homo sapien
tttctctgtgtttttgcataacctt

SEQ ID NO: 4420559 - DNA, 25 bp, Homo sapien
tcaactttccaacttgtctatggcc

SEQ ID NO: 4420560 - DNA, 25 bp, Homo sapien
tttccaacttgtctatggccatttt

SEQ ID NO: 4420561 - DNA, 25 bp, Homo sapien
cagaattcataaagtaggtcaggcc

SEQ ID NO: 4420562 - DNA, 25 bp, Homo sapien
tccatagagactgagaatgataaca

SEQ ID NO: 4420563 - DNA, 25 bp, Homo sapien
caggcctgtatataaaagagtgacc

SEQ ID NO: 4420564 - DNA, 25 bp, Homo sapien
tgccatgaatcttgactcggtaaat

SEQ ID NO: 4420565 - DNA, 25 bp, Homo sapien
atatgccaggtatccccacactgtg

SEQ ID NO: 4420566 - DNA, 25 bp, Homo sapien
tgctcactgtcttgcagtgaatatg

SEQ ID NO: 4420567 - DNA, 25 bp, Homo sapien
ttttcctggatatatgctcactgtc

SEQ ID NO: 4420568 - DNA, 25 bp, Homo sapien
ctcttcagtggtatcttctaatcct

SEQ ID NO: 4420569 - DNA, 25 bp, Homo sapien
ttgtcttttgagcggctgctgcttt

SEQ ID NO: 4420570 - DNA, 25 bp, Homo sapien
ttttgtcttttgagcggctgctgct

SEQ ID NO: 4420571 - DNA, 25 bp, Homo sapien
cccttttgtcttttgagcggctgct

SEQ ID NO: 4420572 - DNA, 25 bp, Homo sapien
cttttgtcttttgagcggctgctgc

SEQ ID NO: 4420573 - DNA, 25 bp, Homo sapien
gggtctatgtctcctacttcagcta

SEQ ID NO: 4420574 - DNA, 25 bp, Homo sapien
cttgtctactaatctggggtctatg

SEQ ID NO: 4420575 - DNA, 25 bp, Homo sapien
tgtctactaatctggggtctatgtc

SEQ ID NO: 4420576 - DNA, 25 bp, Homo sapien
aatctggggtctatgtctcctactt

SEQ ID NO: 4420577 - DNA, 25 bp, Homo sapien
ccagccacacaaggcctctgaaacc

SEQ ID NO: 4420578 - DNA, 25 bp, Homo sapien
acacaaggcctctgaaacctctcac

SEQ ID NO: 4420579 - DNA, 25 bp, Homo sapien
cccagccacacaaggcctctgaaac

SEQ ID NO: 4420580 - DNA, 25 bp, Homo sapien
gccacacaaggcctctgaaacctct

SEQ ID NO: 4420581 - DNA, 25 bp, Homo sapien
gagaaggcctgacttcatctgtttc

SEQ ID NO: 4420582 - DNA, 25 bp, Homo sapien
gatttttagggcactcggggcctga

SEQ ID NO: 4420583 - DNA, 25 bp, Homo sapien
aacctgaggagcacaggacggagaa

SEQ ID NO: 4420584 - DNA, 25 bp, Homo sapien
caggtttcagtttactccatcttcc

SEQ ID NO: 4420585 - DNA, 25 bp, Homo sapien
gccaggtgctccctgtctagggcct

SEQ ID NO: 4420586 - DNA, 25 bp, Homo sapien
caccagaagacaagtcacagctgct

SEQ ID NO: 4420587 - DNA, 25 bp, Homo sapien
taattatgtttactcaagcagcgga

SEQ ID NO: 4420588 - DNA, 25 bp, Homo sapien
gctgctattgtcttgataattatgt

SEQ ID NO: 4420589 - DNA, 25 bp, Homo sapien
aaaaaccatttgttgatgtacagag

SEQ ID NO: 4420590 - DNA, 25 bp, Homo sapien
tcccagcctgggttggagtcccttc

SEQ ID NO: 4420591 - DNA, 25 bp, Homo sapien
tgggcactcagttattcaggttttg

SEQ ID NO: 4420592 - DNA, 25 bp, Homo sapien
gaaattgactcattgtgggcactca

SEQ ID NO: 4420593 - DNA, 25 bp, Homo sapien
tgttcaccacttgagatatgcattc

SEQ ID NO: 4420594 - DNA, 25 bp, Homo sapien
tacaactcttaggtcagcaattttc

SEQ ID NO: 4420595 - DNA, 25 bp, Homo sapien
tcatttccacacatggttgttgtac

SEQ ID NO: 4420596 - DNA, 25 bp, Homo sapien
ccatcacccatgtttaatgcagaac

SEQ ID NO: 4420597 - DNA, 25 bp, Homo sapien
tctcaatcccaagctatacccatca

SEQ ID NO: 4420598 - DNA, 25 bp, Homo sapien
tatattgtctgctggcctgattcac

SEQ ID NO: 4420599 - DNA, 25 bp, Homo sapien
catggtctccagttgtaacatactc

SEQ ID NO: 4420600 - DNA, 25 bp, Homo sapien
ccttcctattccaacctggagggct

SEQ ID NO: 4420601 - DNA, 25 bp, Homo sapien
ctcatctgcttgcacttcagacact

SEQ ID NO: 4420602 - DNA, 25 bp, Homo sapien
gtggcagtatcagggtttggaagct

SEQ ID NO: 4420603 - DNA, 25 bp, Homo sapien
tcctgtggcagtatcagggtttgga

SEQ ID NO: 4420604 - DNA, 25 bp, Homo sapien
gcagtatcagggtttggaagctctt

SEQ ID NO: 4420605 - DNA, 25 bp, Homo sapien
cctgtggcagtatcagggtttggaa

SEQ ID NO: 4420606 - DNA, 25 bp, Homo sapien
accactgcctcatggaaaggtctgg

SEQ ID NO: 4420607 - DNA, 25 bp, Homo sapien
ccctggcttagccaagatttggtaa

SEQ ID NO: 4420608 - DNA, 25 bp, Homo sapien
aaaggtctggatgggagccaatagt

SEQ ID NO: 4420609 - DNA, 25 bp, Homo sapien
gtctggatgggagccaatagttaat

SEQ ID NO: 4420610 - DNA, 25 bp, Homo sapien
tggtcccgtttcctccttgaccaca

SEQ ID NO: 4420611 - DNA, 25 bp, Homo sapien
ccttgaccacaattctatatacctt

SEQ ID NO: 4420612 - DNA, 25 bp, Homo sapien
tcctccttgaccacaattctatata

SEQ ID NO: 4420613 - DNA, 25 bp, Homo sapien
cgtttcctccttgaccacaattcta

SEQ ID NO: 4420614 - DNA, 25 bp, Homo sapien
cccactggctgcctcttcagccaca

SEQ ID NO: 4420615 - DNA, 25 bp, Homo sapien
actggctgcctcttcagccacagac

SEQ ID NO: 4420616 - DNA, 25 bp, Homo sapien
ggctgcctcttcagccacagactca

SEQ ID NO: 4420617 - DNA, 25 bp, Homo sapien
gctgcctcttcagccacagactcac

SEQ ID NO: 4420618 - DNA, 25 bp, Homo sapien
ggctggaaattcaggctattgttaa

SEQ ID NO: 4420619 - DNA, 25 bp, Homo sapien
catttctaatgcaggctggaaattc

SEQ ID NO: 4420620 - DNA, 25 bp, Homo sapien
gtcaatcacttgttcccactcagag

SEQ ID NO: 4420621 - DNA, 25 bp, Homo sapien
gaatgggtccatggctaaactacag

SEQ ID NO: 4420622 - DNA, 25 bp, Homo sapien
ttaacggctcagcaccaaacatcct

SEQ ID NO: 4420623 - DNA, 25 bp, Homo sapien
ggaaagctacttattctccctgtct

SEQ ID NO: 4420624 - DNA, 25 bp, Homo sapien
tggtttctgcgtccttccacccaag

SEQ ID NO: 4420625 - DNA, 25 bp, Homo sapien
ttggtgaggaactgagaatacccat

SEQ ID NO: 4420626 - DNA, 25 bp, Homo sapien
tcttcttttgtcctgtcaatggagg

SEQ ID NO: 4420627 - DNA, 25 bp, Homo sapien
tgctgaggcccatacccttgtaaag

SEQ ID NO: 4420628 - DNA, 25 bp, Homo sapien
taacccagaaccataggaatcaagc

SEQ ID NO: 4420629 - DNA, 25 bp, Homo sapien
tgattctggcagtccgcagtaccac

SEQ ID NO: 4420630 - DNA, 25 bp, Homo sapien
gcagtaccactggagacctaaccca

SEQ ID NO: 4420631 - DNA, 25 bp, Homo sapien
tgctgatcgggaacaaactccattg

SEQ ID NO: 4420632 - DNA, 25 bp, Homo sapien
cttctctaccctgctgcttgtttat

SEQ ID NO: 4420633 - DNA, 25 bp, Homo sapien
tcagttttagactaattctcatcat

SEQ ID NO: 4420634 - DNA, 25 bp, Homo sapien
gatttccacactggaatcttgcctg

SEQ ID NO: 4420635 - DNA, 25 bp, Homo sapien
cctaggtctcctagaatggaaacac

SEQ ID NO: 4420636 - DNA, 25 bp, Homo sapien
caactgctcctaggtggcttctcag

SEQ ID NO: 4420637 - DNA, 25 bp, Homo sapien
cattcctgatgtcttaactcctcaa

SEQ ID NO: 4420638 - DNA, 25 bp, Homo sapien
catgaaatggctttagtgctcccca

SEQ ID NO: 4420639 - DNA, 25 bp, Homo sapien
gcaactattgctggaaggattcata

SEQ ID NO: 4420640 - DNA, 25 bp, Homo sapien
gataacttgagaagtacccccatgt

SEQ ID NO: 4420641 - DNA, 25 bp, Homo sapien
tattacagttgagctccctacatgc

SEQ ID NO: 4420642 - DNA, 25 bp, Homo sapien
ctgtattacagttgagctccctaca

SEQ ID NO: 4420643 - DNA, 25 bp, Homo sapien
agttgagctccctacatgcctccat

SEQ ID NO: 4420644 - DNA, 25 bp, Homo sapien
tacagttgagctccctacatgcctc

SEQ ID NO: 4420645 - DNA, 25 bp, Homo sapien
actgaaacatcaaaacggcagagga

SEQ ID NO: 4420646 - DNA, 25 bp, Homo sapien
accgatagatgaaaggtgcatggga

SEQ ID NO: 4420647 - DNA, 25 bp, Homo sapien
tcaccgatagatgaaaggtgcatgg

SEQ ID NO: 4420648 - DNA, 25 bp, Homo sapien
gaaacatcaaaacggcagaggaagt

SEQ ID NO: 4420649 - DNA, 25 bp, Homo sapien
gctccaggttgactgttctttccaa

SEQ ID NO: 4420650 - DNA, 25 bp, Homo sapien
cttgtcacagtagcctggtgtaact

SEQ ID NO: 4420651 - DNA, 25 bp, Homo sapien
aaactccatgatctggcagtcatgt

SEQ ID NO: 4420652 - DNA, 25 bp, Homo sapien
cagtagcctggtgtaactttaggag

SEQ ID NO: 4420653 - DNA, 25 bp, Homo sapien
tcataactctgtttcgttctctttc

SEQ ID NO: 4420654 - DNA, 25 bp, Homo sapien
ctgttttcataactctgtttcgttc

SEQ ID NO: 4420655 - DNA, 25 bp, Homo sapien
tcttggatacccttccttctgcaaa

SEQ ID NO: 4420656 - DNA, 25 bp, Homo sapien
ctgtccttcttggatacccttcctt

SEQ ID NO: 4420657 - DNA, 25 bp, Homo sapien
caagggcttgtatgcaatttcgaag

SEQ ID NO: 4420658 - DNA, 25 bp, Homo sapien
aacaatgctgttatatggatcacca

SEQ ID NO: 4420659 - DNA, 25 bp, Homo sapien
ttttatcaagaaaccctatgtcaag

SEQ ID NO: 4420660 - DNA, 25 bp, Homo sapien
gcaatttcgaagattaacaatgctg

SEQ ID NO: 4420661 - DNA, 25 bp, Homo sapien
tttactttgcaccttctgtagctga

SEQ ID NO: 4420662 - DNA, 25 bp, Homo sapien
agctcaaattttactttgcaccttc

SEQ ID NO: 4420663 - DNA, 25 bp, Homo sapien
ggaagagaacttccactaggtactg

SEQ ID NO: 4420664 - DNA, 25 bp, Homo sapien
gagaacttccactaggtactgttgg

SEQ ID NO: 4420665 - DNA, 25 bp, Homo sapien
aagattgttggaagtttccttgtca

SEQ ID NO: 4420666 - DNA, 25 bp, Homo sapien
cttcatcccctgtgatcaacagatg

SEQ ID NO: 4420667 - DNA, 25 bp, Homo sapien
ccttgtcatggtctggacataatgc

SEQ ID NO: 4420668 - DNA, 25 bp, Homo sapien
tgtttatctgttaaaagattgttgg

SEQ ID NO: 4420669 - DNA, 25 bp, Homo sapien
aagggactctcctgagactctgcaa

SEQ ID NO: 4420670 - DNA, 25 bp, Homo sapien
acctcctcttgctggacctgttgtc

SEQ ID NO: 4420671 - DNA, 25 bp, Homo sapien
gaggcttggtggaaagcaaactctg

SEQ ID NO: 4420672 - DNA, 25 bp, Homo sapien
catcagcacctaggaatggataagg

SEQ ID NO: 4420673 - DNA, 25 bp, Homo sapien
tgatgtgaacatgagtcccgctgtg

SEQ ID NO: 4420674 - DNA, 25 bp, Homo sapien
gagtcccgctgtgctctctgagaga

SEQ ID NO: 4420675 - DNA, 25 bp, Homo sapien
tcaggaattctgaacgtgagctgct

SEQ ID NO: 4420676 - DNA, 25 bp, Homo sapien
tccagctgagtcaaatgggctgatg

SEQ ID NO: 4420677 - DNA, 25 bp, Homo sapien
agcagtccgtgacagtcgcaagcag

SEQ ID NO: 4420678 - DNA, 25 bp, Homo sapien
agccttgcagtagggaccaggagca

SEQ ID NO: 4420679 - DNA, 25 bp, Homo sapien
gaccaggagcagtccgtgacagtcg

SEQ ID NO: 4420680 - DNA, 25 bp, Homo sapien
cgtgacagtcgcaagcagctggatg

SEQ ID NO: 4420681 - DNA, 25 bp, Homo sapien
cccttaacccgcatgcatgcattga

SEQ ID NO: 4420682 - DNA, 25 bp, Homo sapien
tacttttgtagaccacaacaatggc

SEQ ID NO: 4420683 - DNA, 25 bp, Homo sapien
cacaacaatggcgtgggaaacccct

SEQ ID NO: 4420684 - DNA, 25 bp, Homo sapien
gacactctggctatcaatttcctct

SEQ ID NO: 4420685 - DNA, 25 bp, Homo sapien
tccatccccaagatcaagccttgtg

SEQ ID NO: 4420686 - DNA, 25 bp, Homo sapien
tgtctgagaagaactctttgaaagc

SEQ ID NO: 4420687 - DNA, 25 bp, Homo sapien
gcaactcagcgtttgaataacttaa

SEQ ID NO: 4420688 - DNA, 25 bp, Homo sapien
tgtgttctgccctacgtgttctatt

SEQ ID NO: 4420689 - DNA, 25 bp, Homo sapien
cacaggttgagatggccttttttat

SEQ ID NO: 4420690 - DNA, 25 bp, Homo sapien
gtccatgtgcatgcaagttatcaga

SEQ ID NO: 4420691 - DNA, 25 bp, Homo sapien
agaaaacaagttgccattcgtggaa

SEQ ID NO: 4420692 - DNA, 25 bp, Homo sapien
cattcgtggaactgaccacaggttg

SEQ ID NO: 4420693 - DNA, 25 bp, Homo sapien
ctaccccgagccgaatcgtgcggtg

SEQ ID NO: 4420694 - DNA, 25 bp, Homo sapien
ggcggtggcgagtgggtcctgggct

SEQ ID NO: 4420695 - DNA, 25 bp, Homo sapien
tctaagtagccggagcagccggtcc

SEQ ID NO: 4420696 - DNA, 25 bp, Homo sapien
cgcgccgacgactctaagtagccgg

SEQ ID NO: 4420697 - DNA, 25 bp, Homo sapien
ctttaaagtctcctggtccccatgg

SEQ ID NO: 4420698 - DNA, 25 bp, Homo sapien
taaagtctcctggtccccatgggtg

SEQ ID NO: 4420699 - DNA, 25 bp, Homo sapien
cctttaaagtctcctggtccccatg

SEQ ID NO: 4420700 - DNA, 25 bp, Homo sapien
tgatttccctgctcccgaaacccca

SEQ ID NO: 4420701 - DNA, 25 bp, Homo sapien
caggatccaaacaatcggatgaaga

SEQ ID NO: 4420702 - DNA, 25 bp, Homo sapien
caaacaatcggatgaagaaaaaccg

SEQ ID NO: 4420703 - DNA, 25 bp, Homo sapien
ccagcacaggatccaaacaatcgga

SEQ ID NO: 4420704 - DNA, 25 bp, Homo sapien
aaggcaaagaaagccgcttctccct

SEQ ID NO: 4420705 - DNA, 25 bp, Homo sapien
acacattcgtacacaatttcagctc

SEQ ID NO: 4420706 - DNA, 25 bp, Homo sapien
ttgcacgctcgccgttgcacgtacg

SEQ ID NO: 4420707 - DNA, 25 bp, Homo sapien
tgcacgtacgcccaagcacccgggc

SEQ ID NO: 4420708 - DNA, 25 bp, Homo sapien
aatttcagctccacgcttgcacgct

SEQ ID NO: 4420709 - DNA, 25 bp, Homo sapien
tgggagtccagacactggcagcctg

SEQ ID NO: 4420710 - DNA, 25 bp, Homo sapien
ttctcaggcattcacttgacaccag

SEQ ID NO: 4420711 - DNA, 25 bp, Homo sapien
tgacaatcagacacattctcaggca

SEQ ID NO: 4420712 - DNA, 25 bp, Homo sapien
aatgacaaaccttcgcgacgacaca

SEQ ID NO: 4420713 - DNA, 25 bp, Homo sapien
gtgggagacggacacccaggaagga

SEQ ID NO: 4420714 - DNA, 25 bp, Homo sapien
gtgtgggagacggacacccaggaag

SEQ ID NO: 4420715 - DNA, 25 bp, Homo sapien
gaactcggtccaactcccagaagaa

SEQ ID NO: 4420716 - DNA, 25 bp, Homo sapien
tggagagcttgcggggtcccggtgg

SEQ ID NO: 4420717 - DNA, 25 bp, Homo sapien
gagtcaccctttccagccgagtcct

SEQ ID NO: 4420718 - DNA, 25 bp, Homo sapien
ctttccagccgagtcctccgtgcct

SEQ ID NO: 4420719 - DNA, 25 bp, Homo sapien
tcaggcgagagcagacgccaccaca

SEQ ID NO: 4420720 - DNA, 25 bp, Homo sapien
cacaggtcaggcgagagcagacgcc

SEQ ID NO: 4420721 - DNA, 25 bp, Homo sapien
ggtgtccctccccaagacgtgcagt

SEQ ID NO: 4420722 - DNA, 25 bp, Homo sapien
gggacctgccggctagcttacgtgc

SEQ ID NO: 4420723 - DNA, 25 bp, Homo sapien
aagacgtgcagtgcccctgggacct

SEQ ID NO: 4420724 - DNA, 25 bp, Homo sapien
ggacctgccggctagcttacgtgcc

SEQ ID NO: 4420725 - DNA, 25 bp, Homo sapien
aatgaggtggcgaggcgagggccag

SEQ ID NO: 4420726 - DNA, 25 bp, Homo sapien
caatgaggtggcgaggcgagggcca

SEQ ID NO: 4420727 - DNA, 25 bp, Homo sapien
cccctgtgggcaactcgctgtagtt

SEQ ID NO: 4420728 - DNA, 25 bp, Homo sapien
gtgatgcggtccagttggttgccca

SEQ ID NO: 4420729 - DNA, 25 bp, Homo sapien
cgaaaggcggaaaactgagtctcgt

SEQ ID NO: 4420730 - DNA, 25 bp, Homo sapien
ctcatcatccgagaagaagtaggca

SEQ ID NO: 4420731 - DNA, 25 bp, Homo sapien
tgaccgcgtagacgcttaggtcggc

SEQ ID NO: 4420732 - DNA, 25 bp, Homo sapien
cagagcgctggcagcgcggtgaccg

SEQ ID NO: 4420733 - DNA, 25 bp, Homo sapien
cggtgaccgcgtagacgcttaggtc

SEQ ID NO: 4420734 - DNA, 25 bp, Homo sapien
tagacgcttaggtcggcgccctgag

SEQ ID NO: 4420735 - DNA, 25 bp, Homo sapien
tgcccgccgcccacgtagacggccc

SEQ ID NO: 4420736 - DNA, 25 bp, Homo sapien
cccgccgcccacgtagacggcccag

SEQ ID NO: 4420737 - DNA, 25 bp, Homo sapien
gcccgccgcccacgtagacggccca

SEQ ID NO: 4420738 - DNA, 25 bp, Homo sapien
gggcggtagcggtaccagctattca

SEQ ID NO: 4420739 - DNA, 25 bp, Homo sapien
gtagcggtaccagctattcaccacc

SEQ ID NO: 4420740 - DNA, 25 bp, Homo sapien
tgtcctggcggatctcgccttggtg

SEQ ID NO: 4420741 - DNA, 25 bp, Homo sapien
gcccgcctcatacaggctgtcctgg

SEQ ID NO: 4420742 - DNA, 25 bp, Homo sapien
ccttgagatagtactgctgctgcgg

SEQ ID NO: 4420743 - DNA, 25 bp, Homo sapien
tcttccaggctgtgaaacctggcgg

SEQ ID NO: 4420744 - DNA, 25 bp, Homo sapien
tacggcgcttctcgcggatgaggtc

SEQ ID NO: 4420745 - DNA, 25 bp, Homo sapien
tccttgtcgtccacgaggtcggcga

SEQ ID NO: 4420746 - DNA, 25 bp, Homo sapien
cagaggttgagaaccgctgactgcg

SEQ ID NO: 4420747 - DNA, 25 bp, Homo sapien
cgcagcggcgccctttcggccctgg

SEQ ID NO: 4420748 - DNA, 25 bp, Homo sapien
accggcggcggacgcgcgtggcggg

SEQ ID NO: 4420749 - DNA, 25 bp, Homo sapien
accgctgactgcgaagtccgggtgc

SEQ ID NO: 4420750 - DNA, 25 bp, Homo sapien
caaacactgtctggcttagcccgca

SEQ ID NO: 4420751 - DNA, 25 bp, Homo sapien
tgcacaagggacaggctcgatttct

SEQ ID NO: 4420752 - DNA, 25 bp, Homo sapien
gataacccggaatcccgaagtgctg

SEQ ID NO: 4420753 - DNA, 25 bp, Homo sapien
ggagctgaactgtgccctgtagaga

SEQ ID NO: 4420754 - DNA, 25 bp, Homo sapien
gagggagcaatcaagggttcagaac

SEQ ID NO: 4420755 - DNA, 25 bp, Homo sapien
cagacaccaggtgaacgagcgagct

SEQ ID NO: 4420756 - DNA, 25 bp, Homo sapien
ttttgaaatgcagcccgaggaggga

SEQ ID NO: 4420757 - DNA, 25 bp, Homo sapien
ggttcagaacaataagcgcccttca

SEQ ID NO: 4420758 - DNA, 25 bp, Homo sapien
aactccaccattactagggctgctg

SEQ ID NO: 4420759 - DNA, 25 bp, Homo sapien
taaacatcgtggaacctgctagcaa

SEQ ID NO: 4420760 - DNA, 25 bp, Homo sapien
cagggagccaagatacagtagtagg

SEQ ID NO: 4420761 - DNA, 25 bp, Homo sapien
ttcccttgaaagagacatagatgct

SEQ ID NO: 4420762 - DNA, 25 bp, Homo sapien
tattgtcagtctagcctcagcaagt

SEQ ID NO: 4420763 - DNA, 25 bp, Homo sapien
caaaatgtcaagaaggagtcctgca

SEQ ID NO: 4420764 - DNA, 25 bp, Homo sapien
gagtgaccctcttagtgagagagaa

SEQ ID NO: 4420765 - DNA, 25 bp, Homo sapien
taacagtgccctaaaagtatacacc

SEQ ID NO: 4420766 - DNA, 25 bp, Homo sapien
tcttagggatgttgaaagcgcacca

SEQ ID NO: 4420767 - DNA, 25 bp, Homo sapien
gatgttctaatctggcacaagtgtt

SEQ ID NO: 4420768 - DNA, 25 bp, Homo sapien
tacagaccctttgtgcacgtggcaa

SEQ ID NO: 4420769 - DNA, 25 bp, Homo sapien
tacattagctatatgacctccaggg

SEQ ID NO: 4420770 - DNA, 25 bp, Homo sapien
ctttaggctcgcctttgcaggcaag

SEQ ID NO: 4420771 - DNA, 25 bp, Homo sapien
gagaagcacttgtactagacagctg

SEQ ID NO: 4420772 - DNA, 25 bp, Homo sapien
caggcaaggcaagtgacgggctttc

SEQ ID NO: 4420773 - DNA, 25 bp, Homo sapien
ttacaagtagtgtcaccatcagtga

SEQ ID NO: 4420774 - DNA, 25 bp, Homo sapien
gactctaatttagcacctactgcaa

SEQ ID NO: 4420775 - DNA, 25 bp, Homo sapien
agttcctccattgagtgaatagact

SEQ ID NO: 4420776 - DNA, 25 bp, Homo sapien
cctccattgagtgaatagactctaa

SEQ ID NO: 4420777 - DNA, 25 bp, Homo sapien
caagtgttagactttccagcagcaa

SEQ ID NO: 4420778 - DNA, 25 bp, Homo sapien
aaagtagcttgtcttagatacaggc

SEQ ID NO: 4420779 - DNA, 25 bp, Homo sapien
tggaaattgctctcagggcataagc

SEQ ID NO: 4420780 - DNA, 25 bp, Homo sapien
aattaaatgtccagaggtgctaaga

SEQ ID NO: 4420781 - DNA, 25 bp, Homo sapien
tacaggcaaccttaaccatgtccag

SEQ ID NO: 4420782 - DNA, 25 bp, Homo sapien
tgtagacttagttgcctccttgcgt

SEQ ID NO: 4420783 - DNA, 25 bp, Homo sapien
cattgtggccctataaggttggaga

SEQ ID NO: 4420784 - DNA, 25 bp, Homo sapien
taactggccactactagaactttga

SEQ ID NO: 4420785 - DNA, 25 bp, Homo sapien
taacgttttggatcagaacccctga

SEQ ID NO: 4420786 - DNA, 25 bp, Homo sapien
gtagccacgtgtttttcaagtccaa

SEQ ID NO: 4420787 - DNA, 25 bp, Homo sapien
caaagagttggatgtgtagccacgt

SEQ ID NO: 4420788 - DNA, 25 bp, Homo sapien
tctctgagactatttactgagtggg

SEQ ID NO: 4420789 - DNA, 25 bp, Homo sapien
ttcatagtctcctgttaaaaggctg

SEQ ID NO: 4420790 - DNA, 25 bp, Homo sapien
tgaatcctgtgggatcccggagact

SEQ ID NO: 4420791 - DNA, 25 bp, Homo sapien
tacttggaaagctaggcaagatctc

SEQ ID NO: 4420792 - DNA, 25 bp, Homo sapien
gcaagatctcattgcagtggttctc

SEQ ID NO: 4420793 - DNA, 25 bp, Homo sapien
cccggagactcttttacaggatgca

SEQ ID NO: 4420794 - DNA, 25 bp, Homo sapien
tcaacataggtcaaaaagtaaaaga

SEQ ID NO: 4420795 - DNA, 25 bp, Homo sapien
ttgtttctgcaacttggagcaccat

SEQ ID NO: 4420796 - DNA, 25 bp, Homo sapien
gcaacttggagcaccatagaacttt

SEQ ID NO: 4420797 - DNA, 25 bp, Homo sapien
tcaaaaagtaaaagacaggcaaagc

SEQ ID NO: 4420798 - DNA, 25 bp, Homo sapien
gatataggctacacgcaagagaaag

SEQ ID NO: 4420799 - DNA, 25 bp, Homo sapien
cctgggcataggatggagcaattct

SEQ ID NO: 4420800 - DNA, 25 bp, Homo sapien
agattcagaccacagcctacaggga

SEQ ID NO: 4420801 - DNA, 25 bp, Homo sapien
ggattagcctatgctcccgtgctgg

SEQ ID NO: 4420802 - DNA, 25 bp, Homo sapien
gagatatcactttgcaactgccaga

SEQ ID NO: 4420803 - DNA, 25 bp, Homo sapien
gaatcactctggaaagcaataaggc

SEQ ID NO: 4420804 - DNA, 25 bp, Homo sapien
tacagagactcatatgcacagctgc

SEQ ID NO: 4420805 - DNA, 25 bp, Homo sapien
gcagagctagatgcaatccacagaa

SEQ ID NO: 4420806 - DNA, 25 bp, Homo sapien
gatggcacacacaaaccgggtgact

SEQ ID NO: 4420807 - DNA, 25 bp, Homo sapien
gaattatatgcaatactccaggcca

SEQ ID NO: 4420808 - DNA, 25 bp, Homo sapien
taaaatcaggtgcaagtcaaggtcc

SEQ ID NO: 4420809 - DNA, 25 bp, Homo sapien
gacaaactgacccatggccagaagg

SEQ ID NO: 4420810 - DNA, 25 bp, Homo sapien
ggtgaccgggctgcccatcaacaca

SEQ ID NO: 4420811 - DNA, 25 bp, Homo sapien
taggtgaccgggctgcccatcaaca

SEQ ID NO: 4420812 - DNA, 25 bp, Homo sapien
gaccgggctgcccatcaacacactc

SEQ ID NO: 4420813 - DNA, 25 bp, Homo sapien
ctaggtgaccgggctgcccatcaac

SEQ ID NO: 4420814 - DNA, 25 bp, Homo sapien
cagaggggatacactacaaaaccca

SEQ ID NO: 4420815 - DNA, 25 bp, Homo sapien
gagttggcagaggggatacactaca

SEQ ID NO: 4420816 - DNA, 25 bp, Homo sapien
gaaggagttggcagaggggatacac

SEQ ID NO: 4420817 - DNA, 25 bp, Homo sapien
ttggcagaggggatacactacaaaa

SEQ ID NO: 4420818 - DNA, 25 bp, Homo sapien
gggtgccctagattctcctgaaact

SEQ ID NO: 4420819 - DNA, 25 bp, Homo sapien
ccatgggatggggtgccctagattc

SEQ ID NO: 4420820 - DNA, 25 bp, Homo sapien
gaaactctgtatgtgactaagcaag

SEQ ID NO: 4420821 - DNA, 25 bp, Homo sapien
gcttgcggggtatgtgtgtctccaa

SEQ ID NO: 4420822 - DNA, 25 bp, Homo sapien
cctggctcatgtgaaagcatccacc

SEQ ID NO: 4420823 - DNA, 25 bp, Homo sapien
ggagatggatgataggaaatcattt

SEQ ID NO: 4420824 - DNA, 25 bp, Homo sapien
ggctcatgtgaaagcatccaccatt

SEQ ID NO: 4420825 - DNA, 25 bp, Homo sapien
acctggctcatgtgaaagcatccac

SEQ ID NO: 4420826 - DNA, 25 bp, Homo sapien
tagctaatggatttaatcaaagagg

SEQ ID NO: 4420827 - DNA, 25 bp, Homo sapien
gcaacaaatactgcctcatgaagat

SEQ ID NO: 4420828 - DNA, 25 bp, Homo sapien
gctgtggctgaatagctaatggatt

SEQ ID NO: 4420829 - DNA, 25 bp, Homo sapien
ctgcttttcgaagggcagctgtggc

SEQ ID NO: 4420830 - DNA, 25 bp, Homo sapien
cattctggtaagataagaaggacat

SEQ ID NO: 4420831 - DNA, 25 bp, Homo sapien
ccactggtgctgaatccactatgca

SEQ ID NO: 4420832 - DNA, 25 bp, Homo sapien
gaattagaggtgtttgcatgctgtc

SEQ ID NO: 4420833 - DNA, 25 bp, Homo sapien
gatgtggcaactgtgtggcattctg

SEQ ID NO: 4420834 - DNA, 25 bp, Homo sapien
gacacaggtttcagaagtgcatgca

SEQ ID NO: 4420835 - DNA, 25 bp, Homo sapien
ttagaggcacccagcgaatggcagg

SEQ ID NO: 4420836 - DNA, 25 bp, Homo sapien
acacctgagaggagtgagctgacag

SEQ ID NO: 4420837 - DNA, 25 bp, Homo sapien
agatgttctgctgcccattagaggc

SEQ ID NO: 4420838 - DNA, 25 bp, Homo sapien
gcaggtttgctatcgaaaccaaaca

SEQ ID NO: 4420839 - DNA, 25 bp, Homo sapien
catcactgggaaggtgcagctgtgc

SEQ ID NO: 4420840 - DNA, 25 bp, Homo sapien
aacaggagctaacagatgtggctga

SEQ ID NO: 4420841 - DNA, 25 bp, Homo sapien
tgtgctctgcctttacttcgggtag

SEQ ID NO: 4420842 - DNA, 25 bp, Homo sapien
agggttcagagggacacactccgga

SEQ ID NO: 4420843 - DNA, 25 bp, Homo sapien
cacactcagaccttatgttgggggg

SEQ ID NO: 4420844 - DNA, 25 bp, Homo sapien
agagggacacactccggaagttcca

SEQ ID NO: 4420845 - DNA, 25 bp, Homo sapien
tcagagggacacactccggaagttc

SEQ ID NO: 4420846 - DNA, 25 bp, Homo sapien
acagattggtaaccatcactatttg

SEQ ID NO: 4420847 - DNA, 25 bp, Homo sapien
gttaacagattggtaaccatcacta

SEQ ID NO: 4420848 - DNA, 25 bp, Homo sapien
taacagattggtaaccatcactatt

SEQ ID NO: 4420849 - DNA, 25 bp, Homo sapien
tcagttaacagattggtaaccatca

SEQ ID NO: 4420850 - DNA, 25 bp, Homo sapien
tctcttcggattggtttctgtctca

SEQ ID NO: 4420851 - DNA, 25 bp, Homo sapien
ctttctcttcggattggtttctgtc

SEQ ID NO: 4420852 - DNA, 25 bp, Homo sapien
gttttcaggttgggctctcatatcc

SEQ ID NO: 4420853 - DNA, 25 bp, Homo sapien
tttcaggttgggctctcatatccat

SEQ ID NO: 4420854 - DNA, 25 bp, Homo sapien
catgctgctagagtaatggccgcaa

SEQ ID NO: 4420855 - DNA, 25 bp, Homo sapien
gtctcccatgctgctagagtaatgg

SEQ ID NO: 4420856 - DNA, 25 bp, Homo sapien
tgctagagtaatggccgcaatgcct

SEQ ID NO: 4420857 - DNA, 25 bp, Homo sapien
tatttgctaggtctctttggatctg

SEQ ID NO: 4420858 - DNA, 25 bp, Homo sapien
ctaagtctcattatctcttgaggag

SEQ ID NO: 4420859 - DNA, 25 bp, Homo sapien
tcttgacagtaatgagtgttagttt

SEQ ID NO: 4420860 - DNA, 25 bp, Homo sapien
tgacagtaatgagtgttagtttttg

SEQ ID NO: 4420861 - DNA, 25 bp, Homo sapien
cattatctcttgaggagctgtcttg

SEQ ID NO: 4420862 - DNA, 25 bp, Homo sapien
tggagacaatatggagctatggggt

SEQ ID NO: 4420863 - DNA, 25 bp, Homo sapien
ctgtggagacaatatggagctatgg

SEQ ID NO: 4420864 - DNA, 25 bp, Homo sapien
gtggagacaatatggagctatgggg

SEQ ID NO: 4420865 - DNA, 25 bp, Homo sapien
tgtggagacaatatggagctatggg

SEQ ID NO: 4420866 - DNA, 25 bp, Homo sapien
gatgtcatctattgtcttagtcaag

SEQ ID NO: 4420867 - DNA, 25 bp, Homo sapien
aacctcttctgaggttaactctggc

SEQ ID NO: 4420868 - DNA, 25 bp, Homo sapien
ggtcattctcgtctgtctccataac

SEQ ID NO: 4420869 - DNA, 25 bp, Homo sapien
aatgtctgcattgggcatgatgtca

SEQ ID NO: 4420870 - DNA, 25 bp, Homo sapien
acaaggctctggcatcagccctcac

SEQ ID NO: 4420871 - DNA, 25 bp, Homo sapien
gaggtgtgccacaaggctctggcat

SEQ ID NO: 4420872 - DNA, 25 bp, Homo sapien
ggtgtgccacaaggctctggcatca

SEQ ID NO: 4420873 - DNA, 25 bp, Homo sapien
ccacaaggctctggcatcagccctc

SEQ ID NO: 4420874 - DNA, 25 bp, Homo sapien
aatgagaggacagagaatagattct

SEQ ID NO: 4420875 - DNA, 25 bp, Homo sapien
agaatagattctgcgcagactctga

SEQ ID NO: 4420876 - DNA, 25 bp, Homo sapien
cagagaatagattctgcgcagactc

SEQ ID NO: 4420877 - DNA, 25 bp, Homo sapien
gaggacagagaatagattctgcgca

SEQ ID NO: 4420878 - DNA, 25 bp, Homo sapien
agttcgtgtagtccagatccctccc

SEQ ID NO: 4420879 - DNA, 25 bp, Homo sapien
ttcgtgtagtccagatccctccctg

SEQ ID NO: 4420880 - DNA, 25 bp, Homo sapien
tcagttcgtgtagtccagatccctc

SEQ ID NO: 4420881 - DNA, 25 bp, Homo sapien
gtgtagtccagatccctccctgagc

SEQ ID NO: 4420882 - DNA, 25 bp, Homo sapien
gacgtttcacggcaatgccttcagg

SEQ ID NO: 4420883 - DNA, 25 bp, Homo sapien
agcaagattccagcacatgtggcag

SEQ ID NO: 4420884 - DNA, 25 bp, Homo sapien
cagcacatgtggcagtgacgtttca

SEQ ID NO: 4420885 - DNA, 25 bp, Homo sapien
catgtggcagtgacgtttcacggca

SEQ ID NO: 4420886 - DNA, 25 bp, Homo sapien
taccattcccttcccaagagatgtg

SEQ ID NO: 4420887 - DNA, 25 bp, Homo sapien
tgtccaagccagatacactaccatt

SEQ ID NO: 4420888 - DNA, 25 bp, Homo sapien
tttgctctaaggctgccgatctcct

SEQ ID NO: 4420889 - DNA, 25 bp, Homo sapien
ttcccaagagatgtgggtggacaac

SEQ ID NO: 4420890 - DNA, 25 bp, Homo sapien
ctccctcgtgctagaggtgggagtt

SEQ ID NO: 4420891 - DNA, 25 bp, Homo sapien
cctggaggagatgattcttgaactg

SEQ ID NO: 4420892 - DNA, 25 bp, Homo sapien
ttgaactgggattccaaggcagctg

SEQ ID NO: 4420893 - DNA, 25 bp, Homo sapien
tgggagttgggatccctggaggaga

SEQ ID NO: 4420894 - DNA, 25 bp, Homo sapien
aggaagtttcctttgcgtgctggaa

SEQ ID NO: 4420895 - DNA, 25 bp, Homo sapien
tgcactgggtgttggcaatttcctc

SEQ ID NO: 4420896 - DNA, 25 bp, Homo sapien
tttcctttgcgtgctggaagaatcc

SEQ ID NO: 4420897 - DNA, 25 bp, Homo sapien
gaagtttcctttgcgtgctggaaga

SEQ ID NO: 4420898 - DNA, 25 bp, Homo sapien
ctagtaggataggttctccgtagcc

SEQ ID NO: 4420899 - DNA, 25 bp, Homo sapien
aggttctccgtagccattgttttga

SEQ ID NO: 4420900 - DNA, 25 bp, Homo sapien
tttgatgaggaccaggttgaaactc

SEQ ID NO: 4420901 - DNA, 25 bp, Homo sapien
cgtagccattgttttgataacgatg

SEQ ID NO: 4420902 - DNA, 25 bp, Homo sapien
agatgggtttggatgccctcctgaa

SEQ ID NO: 4420903 - DNA, 25 bp, Homo sapien
taatcgccttctgtaaacacctcaa

SEQ ID NO: 4420904 - DNA, 25 bp, Homo sapien
tggatcttactgcagccacagtggg

SEQ ID NO: 4420905 - DNA, 25 bp, Homo sapien
taaaatcccctcttggggactgtga

SEQ ID NO: 4420906 - DNA, 25 bp, Homo sapien
agtttaaatgctctacgtggaggag

SEQ ID NO: 4420907 - DNA, 25 bp, Homo sapien
ggtttgacatcagctaatagccaat

SEQ ID NO: 4420908 - DNA, 25 bp, Homo sapien
gatgaaggaattaactgagagcaga

SEQ ID NO: 4420909 - DNA, 25 bp, Homo sapien
gctctacgtggaggagaatcaggtt

SEQ ID NO: 4420910 - DNA, 25 bp, Homo sapien
ctggtctctggagaccgctgttgtc

SEQ ID NO: 4420911 - DNA, 25 bp, Homo sapien
ttcccggtcatagacttcaaagtcc

SEQ ID NO: 4420912 - DNA, 25 bp, Homo sapien
ttgtctcacggattcctgagcagcc

SEQ ID NO: 4420913 - DNA, 25 bp, Homo sapien
gtttttgcctggctggcacgactcc

SEQ ID NO: 4420914 - DNA, 25 bp, Homo sapien
tctgggatcttaagtcatcaacact

SEQ ID NO: 4420915 - DNA, 25 bp, Homo sapien
gccagggctacctgggcaaacttct

SEQ ID NO: 4420916 - DNA, 25 bp, Homo sapien
gcaaacttctgggatcttaagtcat

SEQ ID NO: 4420917 - DNA, 25 bp, Homo sapien
ctgtagcttgtgtctgatcttccaa

SEQ ID NO: 4420918 - DNA, 25 bp, Homo sapien
tagagcacataactgggaggagtca

SEQ ID NO: 4420919 - DNA, 25 bp, Homo sapien
aagaaagtagggctgttgctttgca

SEQ ID NO: 4420920 - DNA, 25 bp, Homo sapien
ctgtcccttcgaagtaaaagattct

SEQ ID NO: 4420921 - DNA, 25 bp, Homo sapien
tccccttaggaggtccctggtgcta

SEQ ID NO: 4420922 - DNA, 25 bp, Homo sapien
gcttgatggtgacggaaggagttag

SEQ ID NO: 4420923 - DNA, 25 bp, Homo sapien
tgacggaaggagttagtatggaggg

SEQ ID NO: 4420924 - DNA, 25 bp, Homo sapien
gtttttgtgcattgtagtttggctt

SEQ ID NO: 4420925 - DNA, 25 bp, Homo sapien
tttttgtgcattgtagtttggcttg

SEQ ID NO: 4420926 - DNA, 25 bp, Homo sapien
tctgaaaaagcttggcatttatatt

SEQ ID NO: 4420927 - DNA, 25 bp, Homo sapien
tagttaacctgttttgatctgaaaa

SEQ ID NO: 4420928 - DNA, 25 bp, Homo sapien
agcaaagtgaaaagtgctacacatt

SEQ ID NO: 4420929 - DNA, 25 bp, Homo sapien
gcaaagtgaaaagtgctacacattt

SEQ ID NO: 4420930 - DNA, 25 bp, Homo sapien
ctgccccgccaaatttcatatgcat

SEQ ID NO: 4420931 - DNA, 25 bp, Homo sapien
gcctccaagtcgcaatcgccgatta

SEQ ID NO: 4420932 - DNA, 25 bp, Homo sapien
gtcgcaatcgccgattactccagct

SEQ ID NO: 4420933 - DNA, 25 bp, Homo sapien
acatgaactcaggttctactgcctc

SEQ ID NO: 4420934 - DNA, 25 bp, Homo sapien
ctcatagaacatgaactcaggttct

SEQ ID NO: 4420935 - DNA, 25 bp, Homo sapien
tggtggaattctaaacatctccttc

SEQ ID NO: 4420936 - DNA, 25 bp, Homo sapien
taaacatctccttctaggagttcta

SEQ ID NO: 4420937 - DNA, 25 bp, Homo sapien
aaacatctccttctaggagttctac

SEQ ID NO: 4420938 - DNA, 25 bp, Homo sapien
gcttggtggaattctaaacatctcc

SEQ ID NO: 4420939 - DNA, 25 bp, Homo sapien
tgcttaagttgacgtatttcacgca

SEQ ID NO: 4420940 - DNA, 25 bp, Homo sapien
ttaccatgtctttcaatagaatctt

SEQ ID NO: 4420941 - DNA, 25 bp, Homo sapien
caactaagcacaaaattaccatgtc

SEQ ID NO: 4420942 - DNA, 25 bp, Homo sapien
cacatatgcacaccttgaagcttct

SEQ ID NO: 4420943 - DNA, 25 bp, Homo sapien
cctctttggagctgacagccagctg

SEQ ID NO: 4420944 - DNA, 25 bp, Homo sapien
tcctctttggagctgacagccagct

SEQ ID NO: 4420945 - DNA, 25 bp, Homo sapien
cttaaaactggctttctcactcaca

SEQ ID NO: 4420946 - DNA, 25 bp, Homo sapien
ggctttctcactcacatcttcatct

SEQ ID NO: 4420947 - DNA, 25 bp, Homo sapien
ggtgcacactccctggccaatattg

SEQ ID NO: 4420948 - DNA, 25 bp, Homo sapien
gatgtctcaacaggagatgctgcaa

SEQ ID NO: 4420949 - DNA, 25 bp, Homo sapien
ccttgctgctgatgagatgtgatgt

SEQ ID NO: 4420950 - DNA, 25 bp, Homo sapien
cctgagaatggaaagatcccttctg

SEQ ID NO: 4420951 - DNA, 25 bp, Homo sapien
aatggaggcccagacagttcctcct

SEQ ID NO: 4420952 - DNA, 25 bp, Homo sapien
ttataatggaggcccagacagttcc

SEQ ID NO: 4420953 - DNA, 25 bp, Homo sapien
ataatggaggcccagacagttcctc

SEQ ID NO: 4420954 - DNA, 25 bp, Homo sapien
taatggaggcccagacagttcctcc

SEQ ID NO: 4420955 - DNA, 25 bp, Homo sapien
gccacaaacttgtagatgtgtttct

SEQ ID NO: 4420956 - DNA, 25 bp, Homo sapien
gtgtttcttttcttaggctcctgaa

SEQ ID NO: 4420957 - DNA, 25 bp, Homo sapien
tgagagagccacaaacttgtagatg

SEQ ID NO: 4420958 - DNA, 25 bp, Homo sapien
gagagccacaaacttgtagatgtgt

SEQ ID NO: 4420959 - DNA, 25 bp, Homo sapien
cacctcgtgatcgtgtgagccagtt

SEQ ID NO: 4420960 - DNA, 25 bp, Homo sapien
tatcagcctgtcatactggaagaag

SEQ ID NO: 4420961 - DNA, 25 bp, Homo sapien
gatggcgtatggtaggacttcacct

SEQ ID NO: 4420962 - DNA, 25 bp, Homo sapien
gccagaatagcaggtgttcagttca

SEQ ID NO: 4420963 - DNA, 25 bp, Homo sapien
gagcccaagagcatcaattttggaa

SEQ ID NO: 4420964 - DNA, 25 bp, Homo sapien
gaacaacaacaatcctgccagcaat

SEQ ID NO: 4420965 - DNA, 25 bp, Homo sapien
taaccctttagtgcttcctacttca

SEQ ID NO: 4420966 - DNA, 25 bp, Homo sapien
tgccagcaatagacagagcccaaga

SEQ ID NO: 4420967 - DNA, 25 bp, Homo sapien
tacgcaaatgaacctagaactctcc

SEQ ID NO: 4420968 - DNA, 25 bp, Homo sapien
tatctgtggagatgaaagtctccag

SEQ ID NO: 4420969 - DNA, 25 bp, Homo sapien
cagggcaaccgggtctgagaaagct

SEQ ID NO: 4420970 - DNA, 25 bp, Homo sapien
gaactctccccgctaaactgattat

SEQ ID NO: 4420971 - DNA, 25 bp, Homo sapien
aacattgtgcatgtgatccactgtc

SEQ ID NO: 4420972 - DNA, 25 bp, Homo sapien
ccatatctgaatacatgaggcatct

SEQ ID NO: 4420973 - DNA, 25 bp, Homo sapien
tggaaagaagataacctcagactct

SEQ ID NO: 4420974 - DNA, 25 bp, Homo sapien
aacctcagactctgagattgtagac

SEQ ID NO: 4420975 - DNA, 25 bp, Homo sapien
gcatgtggtatgatttgttccgttt

SEQ ID NO: 4420976 - DNA, 25 bp, Homo sapien
gaggggggtcgagcatgtggtatga

SEQ ID NO: 4420977 - DNA, 25 bp, Homo sapien
catgtggtatgatttgttccgtttc

SEQ ID NO: 4420978 - DNA, 25 bp, Homo sapien
gtggtatgatttgttccgtttctgg

SEQ ID NO: 4420979 - DNA, 25 bp, Homo sapien
tcgtgccaatgccatactcaggtgg

SEQ ID NO: 4420980 - DNA, 25 bp, Homo sapien
tctccaggtataatccagacgtggg

SEQ ID NO: 4420981 - DNA, 25 bp, Homo sapien
gagtaacacttgtctcctcgtgcca

SEQ ID NO: 4420982 - DNA, 25 bp, Homo sapien
tgtgatccgcagagtgagtaacact

SEQ ID NO: 4420983 - DNA, 25 bp, Homo sapien
aagtgttttgcatgagcaaatttcc

SEQ ID NO: 4420984 - DNA, 25 bp, Homo sapien
ctgagtgggtgttaaacaagtgttt

SEQ ID NO: 4420985 - DNA, 25 bp, Homo sapien
gggtgttaaacaagtgttttgcatg

SEQ ID NO: 4420986 - DNA, 25 bp, Homo sapien
tgttttgcatgagcaaatttccaaa

SEQ ID NO: 4420987 - DNA, 25 bp, Homo sapien
tcatccctctaatataaatctcagt

SEQ ID NO: 4420988 - DNA, 25 bp, Homo sapien
agtaactgagtagcgcatttgctcc

SEQ ID NO: 4420989 - DNA, 25 bp, Homo sapien
tcctcttacaggttcccacccctca

SEQ ID NO: 4420990 - DNA, 25 bp, Homo sapien
taaatctcagtaactgagtagcgca

SEQ ID NO: 4420991 - DNA, 25 bp, Homo sapien
ctttgagcccttccttaagtctgct

SEQ ID NO: 4420992 - DNA, 25 bp, Homo sapien
aatggattagaaggaaggccaggtc

SEQ ID NO: 4420993 - DNA, 25 bp, Homo sapien
tgcctctaggtggtaacttccttct

SEQ ID NO: 4420994 - DNA, 25 bp, Homo sapien
aacaatggtgactcatcttggatcc

SEQ ID NO: 4420995 - DNA, 25 bp, Homo sapien
tgttgggagaacaatgtcttctcca

SEQ ID NO: 4420996 - DNA, 25 bp, Homo sapien
ttgggagaacaatgtcttctccatc

SEQ ID NO: 4420997 - DNA, 25 bp, Homo sapien
ctttgggtattgatggccgcctcac

SEQ ID NO: 4420998 - DNA, 25 bp, Homo sapien
tgctttgggtattgatggccgcctc

SEQ ID NO: 4420999 - DNA, 25 bp, Homo sapien
gggcagctgacagtcataccacaga

SEQ ID NO: 4421000 - DNA, 25 bp, Homo sapien
tctcctgagagctgcaagtttttat

SEQ ID NO: 4421001 - DNA, 25 bp, Homo sapien
ccttcatggaaactagggggcagct

SEQ ID NO: 4421002 - DNA, 25 bp, Homo sapien
acagagagtcaacccctccaaagaa

SEQ ID NO: 4421003 - DNA, 25 bp, Homo sapien
agtcaaattggtgatggggagaaaa

SEQ ID NO: 4421004 - DNA, 25 bp, Homo sapien
tcaaattggtgatggggagaaaatg

SEQ ID NO: 4421005 - DNA, 25 bp, Homo sapien
aattggtgatggggagaaaatgttc

SEQ ID NO: 4421006 - DNA, 25 bp, Homo sapien
caaattggtgatggggagaaaatgt

SEQ ID NO: 4421007 - DNA, 25 bp, Homo sapien
actgcccaacatcatctcagtgtgg

SEQ ID NO: 4421008 - DNA, 25 bp, Homo sapien
ggtggactgcccaacatcatctcag

SEQ ID NO: 4421009 - DNA, 25 bp, Homo sapien
tggactgcccaacatcatctcagtg

SEQ ID NO: 4421010 - DNA, 25 bp, Homo sapien
tggtggactgcccaacatcatctca

SEQ ID NO: 4421011 - DNA, 25 bp, Homo sapien
cactgacatctcagtattaccagaa

SEQ ID NO: 4421012 - DNA, 25 bp, Homo sapien
agggctgaggtgcattataactaat

SEQ ID NO: 4421013 - DNA, 25 bp, Homo sapien
tttatgttgcgatcagtcactgaca

SEQ ID NO: 4421014 - DNA, 25 bp, Homo sapien
tataactaatgcctttatgttgcga

SEQ ID NO: 4421015 - DNA, 25 bp, Homo sapien
atgaatcgcggattctgacagcaga

SEQ ID NO: 4421016 - DNA, 25 bp, Homo sapien
tttatgttcaatgaatcgcggattc

SEQ ID NO: 4421017 - DNA, 25 bp, Homo sapien
tgttcaatgaatcgcggattctgac

SEQ ID NO: 4421018 - DNA, 25 bp, Homo sapien
caatgaatcgcggattctgacagca

SEQ ID NO: 4421019 - DNA, 25 bp, Homo sapien
agtgcccataaggaggtagtgaaca

SEQ ID NO: 4421020 - DNA, 25 bp, Homo sapien
ggtctcagtgcccataaggaggtag

SEQ ID NO: 4421021 - DNA, 25 bp, Homo sapien
tctcagtgcccataaggaggtagtg

SEQ ID NO: 4421022 - DNA, 25 bp, Homo sapien
tcagtgcccataaggaggtagtgaa

SEQ ID NO: 4421023 - DNA, 25 bp, Homo sapien
taactcttctgtgatcacatcaact

SEQ ID NO: 4421024 - DNA, 25 bp, Homo sapien
tcgaattaactcttctgtgatcaca

SEQ ID NO: 4421025 - DNA, 25 bp, Homo sapien
tggatggaaaatgaccaactcgaat

SEQ ID NO: 4421026 - DNA, 25 bp, Homo sapien
tgaccaactcgaattaactcttctg

SEQ ID NO: 4421027 - DNA, 25 bp, Homo sapien
cactcagcctacacatccagccact

SEQ ID NO: 4421028 - DNA, 25 bp, Homo sapien
cccactcagcctacacatccagcca

SEQ ID NO: 4421029 - DNA, 25 bp, Homo sapien
actcagcctacacatccagccactt

SEQ ID NO: 4421030 - DNA, 25 bp, Homo sapien
ccactcagcctacacatccagccac

SEQ ID NO: 4421031 - DNA, 25 bp, Homo sapien
tctttcaagggatgctgagtgttcc

SEQ ID NO: 4421032 - DNA, 25 bp, Homo sapien
cttgattgttttggtgcatgtggcc

SEQ ID NO: 4421033 - DNA, 25 bp, Homo sapien
catagaactgaggttacttctaacc

SEQ ID NO: 4421034 - DNA, 25 bp, Homo sapien
catgtggccttattccttttttgag

SEQ ID NO: 4421035 - DNA, 25 bp, Homo sapien
tcctccgtaacctccagagcgctgt

SEQ ID NO: 4421036 - DNA, 25 bp, Homo sapien
ccctgatctccacacactatctcca

SEQ ID NO: 4421037 - DNA, 25 bp, Homo sapien
acacactatctccaccctctcagcc

SEQ ID NO: 4421038 - DNA, 25 bp, Homo sapien
tccagagcgctgtgcaccggcatgc

SEQ ID NO: 4421039 - DNA, 25 bp, Homo sapien
tgcttctaaaatgtagcattgccca

SEQ ID NO: 4421040 - DNA, 25 bp, Homo sapien
gaaaatacacagattcggggctgac

SEQ ID NO: 4421041 - DNA, 25 bp, Homo sapien
cacttcttgctaggggcagccctga

SEQ ID NO: 4421042 - DNA, 25 bp, Homo sapien
tggacacttcttgctaggggcagcc

SEQ ID NO: 4421043 - DNA, 25 bp, Homo sapien
aatacacagattcggggctgactcc

SEQ ID NO: 4421044 - DNA, 25 bp, Homo sapien
gatgaaggacactggtgtggaacat

SEQ ID NO: 4421045 - DNA, 25 bp, Homo sapien
ggacactggtgtggaacatgcagaa

SEQ ID NO: 4421046 - DNA, 25 bp, Homo sapien
gatgagggatgaaggacactggtgt

SEQ ID NO: 4421047 - DNA, 25 bp, Homo sapien
ctgcatggatgagggatgaaggaca

SEQ ID NO: 4421048 - DNA, 25 bp, Homo sapien
cagtttagaatcgatggtggttgta

SEQ ID NO: 4421049 - DNA, 25 bp, Homo sapien
caaattgcacacctgaaagcctctg

SEQ ID NO: 4421050 - DNA, 25 bp, Homo sapien
agagtgtttgttgttacctgcaaat

SEQ ID NO: 4421051 - DNA, 25 bp, Homo sapien
gcgaaggtcctttgaccagtttaga

SEQ ID NO: 4421052 - DNA, 25 bp, Homo sapien
tctcaatggttgaagcttgcacctt

SEQ ID NO: 4421053 - DNA, 25 bp, Homo sapien
gaagcttgcaccttctttcaaggta

SEQ ID NO: 4421054 - DNA, 25 bp, Homo sapien
tcaccatctctcaatggttgaagct

SEQ ID NO: 4421055 - DNA, 25 bp, Homo sapien
attcccactactggaaacaatccct

SEQ ID NO: 4421056 - DNA, 25 bp, Homo sapien
tagaagagaatcgaggagcgtcagc

SEQ ID NO: 4421057 - DNA, 25 bp, Homo sapien
gacaaggaatagcaatcagccccag

SEQ ID NO: 4421058 - DNA, 25 bp, Homo sapien
tctaggagggtgcatctggaatccc

SEQ ID NO: 4421059 - DNA, 25 bp, Homo sapien
cagggctacaggtgctagaggctct

SEQ ID NO: 4421060 - DNA, 25 bp, Homo sapien
taggcttttctgactgaaggagctt

SEQ ID NO: 4421061 - DNA, 25 bp, Homo sapien
tttctgactgaaggagcttcagcgt

SEQ ID NO: 4421062 - DNA, 25 bp, Homo sapien
ctgactgaaggagcttcagcgtgtg

SEQ ID NO: 4421063 - DNA, 25 bp, Homo sapien
gcttttctgactgaaggagcttcag

SEQ ID NO: 4421064 - DNA, 25 bp, Homo sapien
ctgttgagagtgacactttggagcc

SEQ ID NO: 4421065 - DNA, 25 bp, Homo sapien
tgacactttggagccataactgttg

SEQ ID NO: 4421066 - DNA, 25 bp, Homo sapien
gaacatctgttgcatagcaacatct

SEQ ID NO: 4421067 - DNA, 25 bp, Homo sapien
cagtgggagtccaggttggaacatc

SEQ ID NO: 4421068 - DNA, 25 bp, Homo sapien
tttggcattgccactgctgaaggct

SEQ ID NO: 4421069 - DNA, 25 bp, Homo sapien
acagttgtttggcattgccactgct

SEQ ID NO: 4421070 - DNA, 25 bp, Homo sapien
gtttggcattgccactgctgaaggc

SEQ ID NO: 4421071 - DNA, 25 bp, Homo sapien
gttgtttggcattgccactgctgaa

SEQ ID NO: 4421072 - DNA, 25 bp, Homo sapien
cccatgtcaaatttcctctgcgtct

SEQ ID NO: 4421073 - DNA, 25 bp, Homo sapien
gctctcaggagtggagttctctcac

SEQ ID NO: 4421074 - DNA, 25 bp, Homo sapien
tatcttagctgtgaggacagtctct

SEQ ID NO: 4421075 - DNA, 25 bp, Homo sapien
aatttcctctgcgtcttggtccact

SEQ ID NO: 4421076 - DNA, 25 bp, Homo sapien
gaatggagcctaccatcaaggccat

SEQ ID NO: 4421077 - DNA, 25 bp, Homo sapien
cttctttgcagtggcattgggaatg

SEQ ID NO: 4421078 - DNA, 25 bp, Homo sapien
cagtggcattgggaatggagcctac

SEQ ID NO: 4421079 - DNA, 25 bp, Homo sapien
gcattgggaatggagcctaccatca

SEQ ID NO: 4421080 - DNA, 25 bp, Homo sapien
gcaaacctcacacacacggcactgc

SEQ ID NO: 4421081 - DNA, 25 bp, Homo sapien
acatcagcagttcagaggtggagaa

SEQ ID NO: 4421082 - DNA, 25 bp, Homo sapien
acctcacacacacggcactgccact

SEQ ID NO: 4421083 - DNA, 25 bp, Homo sapien
aattcagggcatgaaccagagcaag

SEQ ID NO: 4421084 - DNA, 25 bp, Homo sapien
ggcagccttctcgattccatcctcg

SEQ ID NO: 4421085 - DNA, 25 bp, Homo sapien
cttctcgattccatcctcgcagagt

SEQ ID NO: 4421086 - DNA, 25 bp, Homo sapien
tcgattccatcctcgcagagtgctc

SEQ ID NO: 4421087 - DNA, 25 bp, Homo sapien
tgcaggggcagccttctcgattcca

SEQ ID NO: 4421088 - DNA, 25 bp, Homo sapien
gctctttgcaggtacttcaagctcc

SEQ ID NO: 4421089 - DNA, 25 bp, Homo sapien
tgctctttgcaggtacttcaagctc

SEQ ID NO: 4421090 - DNA, 25 bp, Homo sapien
tctttgcaggtacttcaagctccag

SEQ ID NO: 4421091 - DNA, 25 bp, Homo sapien
ctctttgcaggtacttcaagctcca

SEQ ID NO: 4421092 - DNA, 25 bp, Homo sapien
tcctccacatgctacagaatgggat

SEQ ID NO: 4421093 - DNA, 25 bp, Homo sapien
gccacttcatccttcaggcactccc

SEQ ID NO: 4421094 - DNA, 25 bp, Homo sapien
actcctccacatgctacagaatggg

SEQ ID NO: 4421095 - DNA, 25 bp, Homo sapien
ccttcaggcactcccaccctgcagc

SEQ ID NO: 4421096 - DNA, 25 bp, Homo sapien
aaggccagcctttacctgcatgggc

SEQ ID NO: 4421097 - DNA, 25 bp, Homo sapien
ttcacttgcacgggcccagccttta

SEQ ID NO: 4421098 - DNA, 25 bp, Homo sapien
ataagcccagcctttacctgcataa

SEQ ID NO: 4421099 - DNA, 25 bp, Homo sapien
acttgcatgggcctagcccttactg

SEQ ID NO: 4421100 - DNA, 25 bp, Homo sapien
tggcgcatgggaggggaacttcttt

SEQ ID NO: 4421101 - DNA, 25 bp, Homo sapien
ctttttggttcgagtgtgctgggat

SEQ ID NO: 4421102 - DNA, 25 bp, Homo sapien
ttcgagtgtgctgggatagcttcag

SEQ ID NO: 4421103 - DNA, 25 bp, Homo sapien
gaacttctttttggttcgagtgtgc

SEQ ID NO: 4421104 - DNA, 25 bp, Homo sapien
tttgctttaaggtttgcttatcttc

SEQ ID NO: 4421105 - DNA, 25 bp, Homo sapien
tgctttaaggtttgcttatcttcgc

SEQ ID NO: 4421106 - DNA, 25 bp, Homo sapien
gctgcttcaatgatataatgctttg

SEQ ID NO: 4421107 - DNA, 25 bp, Homo sapien
tcttgctgcttcaatgatataatgc

SEQ ID NO: 4421108 - DNA, 25 bp, Homo sapien
gaaggaggtacctattccatgtgga

SEQ ID NO: 4421109 - DNA, 25 bp, Homo sapien
ttttgcaaatggtgctgaaggaggt

SEQ ID NO: 4421110 - DNA, 25 bp, Homo sapien
tccatgtggaatagactaggacatt

SEQ ID NO: 4421111 - DNA, 25 bp, Homo sapien
gcagataatttcatcccacaacaat

SEQ ID NO: 4421112 - DNA, 25 bp, Homo sapien
ttatgttggtacaagcaggctttac

SEQ ID NO: 4421113 - DNA, 25 bp, Homo sapien
gtgattttgttgtgataattgaaaa

SEQ ID NO: 4421114 - DNA, 25 bp, Homo sapien
attatgttggtacaagcaggcttta

SEQ ID NO: 4421115 - DNA, 25 bp, Homo sapien
tcatgggagctgggtccgtgcctcc

SEQ ID NO: 4421116 - DNA, 25 bp, Homo sapien
tgggagctgggtccgtgcctccaca

SEQ ID NO: 4421117 - DNA, 25 bp, Homo sapien
catgggagctgggtccgtgcctcca

SEQ ID NO: 4421118 - DNA, 25 bp, Homo sapien
atgggagctgggtccgtgcctccac

SEQ ID NO: 4421119 - DNA, 25 bp, Homo sapien
gtcataggtgcttggtaacatggca

SEQ ID NO: 4421120 - DNA, 25 bp, Homo sapien
agcgtaagccacaaacccactgagg

SEQ ID NO: 4421121 - DNA, 25 bp, Homo sapien
tcagcgtaagccacaaacccactga

SEQ ID NO: 4421122 - DNA, 25 bp, Homo sapien
gcttggtaacatggcacctccctgt

SEQ ID NO: 4421123 - DNA, 25 bp, Homo sapien
gagcgcagaggatctgcccttatga

SEQ ID NO: 4421124 - DNA, 25 bp, Homo sapien
agagcatgagaaatggcccacaagg

SEQ ID NO: 4421125 - DNA, 25 bp, Homo sapien
gtaagagcatgagaaatggcccaca

SEQ ID NO: 4421126 - DNA, 25 bp, Homo sapien
agaggcatcccctgagagcgcagag

SEQ ID NO: 4421127 - DNA, 25 bp, Homo sapien
ctccaatatagagaaagcattgtgg

SEQ ID NO: 4421128 - DNA, 25 bp, Homo sapien
tatagagaaagcattgtggagagga

SEQ ID NO: 4421129 - DNA, 25 bp, Homo sapien
ccaatatagagaaagcattgtggag

SEQ ID NO: 4421130 - DNA, 25 bp, Homo sapien
gagaaagcattgtggagaggacatt

SEQ ID NO: 4421131 - DNA, 25 bp, Homo sapien
cttcagtccttgaatatgtgccagg

SEQ ID NO: 4421132 - DNA, 25 bp, Homo sapien
gatcagaccttatctgctcctgggc

SEQ ID NO: 4421133 - DNA, 25 bp, Homo sapien
tgatagaagtaagctacacagacca

SEQ ID NO: 4421134 - DNA, 25 bp, Homo sapien
agaaaactcttaggcgcaaaactgc

SEQ ID NO: 4421135 - DNA, 25 bp, Homo sapien
tgtaatagctatcccgttgttcaag

SEQ ID NO: 4421136 - DNA, 25 bp, Homo sapien
caaggcgaaagggaatcgtaatctc

SEQ ID NO: 4421137 - DNA, 25 bp, Homo sapien
agctcctctgcgtgcgtgccttgga

SEQ ID NO: 4421138 - DNA, 25 bp, Homo sapien
tggacagatgtagctcaaggcgaaa

SEQ ID NO: 4421139 - DNA, 25 bp, Homo sapien
ttggattgccttggtcaacaattgg

SEQ ID NO: 4421140 - DNA, 25 bp, Homo sapien
gccttggtcaacaattgggttgatc

SEQ ID NO: 4421141 - DNA, 25 bp, Homo sapien
caattgggttgatcttatatgctac

SEQ ID NO: 4421142 - DNA, 25 bp, Homo sapien
gatcttatatgctaccctagcacta

SEQ ID NO: 4421143 - DNA, 25 bp, Homo sapien
ctcacccactcccaatgtgggattc

SEQ ID NO: 4421144 - DNA, 25 bp, Homo sapien
tgttagatccaccagttgcctactg

SEQ ID NO: 4421145 - DNA, 25 bp, Homo sapien
agatcttgaactgtccctgctttgt

SEQ ID NO: 4421146 - DNA, 25 bp, Homo sapien
cctgaacttttgagtgaatacttgt

SEQ ID NO: 4421147 - DNA, 25 bp, Homo sapien
tatccccatcaacgaagagcaaacc

SEQ ID NO: 4421148 - DNA, 25 bp, Homo sapien
ggtcaatatccccatcaacgaagag

SEQ ID NO: 4421149 - DNA, 25 bp, Homo sapien
tcaatatccccatcaacgaagagca

SEQ ID NO: 4421150 - DNA, 25 bp, Homo sapien
actcttgctggggtcaatatcccca

SEQ ID NO: 4421151 - DNA, 25 bp, Homo sapien
gaaaatgtgggaccggctgagggtg

SEQ ID NO: 4421152 - DNA, 25 bp, Homo sapien
aaaatgtgggaccggctgagggtgt

SEQ ID NO: 4421153 - DNA, 25 bp, Homo sapien
aaatgtgggaccggctgagggtgtg

SEQ ID NO: 4421154 - DNA, 25 bp, Homo sapien
taaagcccattcctgataaacacag

SEQ ID NO: 4421155 - DNA, 25 bp, Homo sapien
aatgaaagggctgtgtagcctgtgt

SEQ ID NO: 4421156 - DNA, 25 bp, Homo sapien
gatgctctgataacagagctctgct

SEQ ID NO: 4421157 - DNA, 25 bp, Homo sapien
gcttaggctttctgcgtgcatggca

SEQ ID NO: 4421158 - DNA, 25 bp, Homo sapien
ctgacacggtcgagataggctttct

SEQ ID NO: 4421159 - DNA, 25 bp, Homo sapien
gacacggtcgagataggctttctgg

SEQ ID NO: 4421160 - DNA, 25 bp, Homo sapien
acggtcgagataggctttctggata

SEQ ID NO: 4421161 - DNA, 25 bp, Homo sapien
acacggtcgagataggctttctgga

SEQ ID NO: 4421162 - DNA, 25 bp, Homo sapien
tcattgataaagttgcgctagcccc

SEQ ID NO: 4421163 - DNA, 25 bp, Homo sapien
gaagacacgatgatcaatagtctct

SEQ ID NO: 4421164 - DNA, 25 bp, Homo sapien
gaaatccctgattgatgactgtcac

SEQ ID NO: 4421165 - DNA, 25 bp, Homo sapien
tgattccattcaagccctgttagag

SEQ ID NO: 4421166 - DNA, 25 bp, Homo sapien
ccttcagcaccacatttacgatcag

SEQ ID NO: 4421167 - DNA, 25 bp, Homo sapien
tcttcaagctgttcaggccattccc

SEQ ID NO: 4421168 - DNA, 25 bp, Homo sapien
tctagcatgtgatttgagcccaatc

SEQ ID NO: 4421169 - DNA, 25 bp, Homo sapien
gagtcgccctacattgctcatgtgc

SEQ ID NO: 4421170 - DNA, 25 bp, Homo sapien
ggattcctgtgactgtctcccggcc

SEQ ID NO: 4421171 - DNA, 25 bp, Homo sapien
cttctgtacaagtgagccctgatcc

SEQ ID NO: 4421172 - DNA, 25 bp, Homo sapien
tgcacaccctggataatgttcccct

SEQ ID NO: 4421173 - DNA, 25 bp, Homo sapien
aaagtcctctccaatgtgtccccag

SEQ ID NO: 4421174 - DNA, 25 bp, Homo sapien
gaagaatgttgctgatggcactgag

SEQ ID NO: 4421175 - DNA, 25 bp, Homo sapien
ttaagtattgctgggtaggctagaa

SEQ ID NO: 4421176 - DNA, 25 bp, Homo sapien
aagtattgctgggtaggctagaaga

SEQ ID NO: 4421177 - DNA, 25 bp, Homo sapien
actgaggccagacccgtggcagccg

SEQ ID NO: 4421178 - DNA, 25 bp, Homo sapien
caactgttgacaggctgggttgctg

SEQ ID NO: 4421179 - DNA, 25 bp, Homo sapien
tgctctcagttgctctattatctcc

SEQ ID NO: 4421180 - DNA, 25 bp, Homo sapien
tcccctcatttttcgtgcatttgca

SEQ ID NO: 4421181 - DNA, 25 bp, Homo sapien
ggtggttacctctgacatgcactcc

SEQ ID NO: 4421182 - DNA, 25 bp, Homo sapien
tgggacgttcttcgggcaggtcatt

SEQ ID NO: 4421183 - DNA, 25 bp, Homo sapien
tgaatgcctgggacgttcttcgggc

SEQ ID NO: 4421184 - DNA, 25 bp, Homo sapien
cttagtgaatgcctgggacgttctt

SEQ ID NO: 4421185 - DNA, 25 bp, Homo sapien
cctgggacgttcttcgggcaggtca

SEQ ID NO: 4421186 - DNA, 25 bp, Homo sapien
ttaattgctttctgactgtctcgta

SEQ ID NO: 4421187 - DNA, 25 bp, Homo sapien
tgtctcgtatgttaatctcctcctc

SEQ ID NO: 4421188 - DNA, 25 bp, Homo sapien
tcagggaacatgtttgggggttctc

SEQ ID NO: 4421189 - DNA, 25 bp, Homo sapien
ggggttctctgtatccctctttcca

SEQ ID NO: 4421190 - DNA, 25 bp, Homo sapien
tgtgccgtaaaatgcagcatccgga

SEQ ID NO: 4421191 - DNA, 25 bp, Homo sapien
gcatccggaacacaatccagcttgg

SEQ ID NO: 4421192 - DNA, 25 bp, Homo sapien
tactatgactagaagtgcagagccc

SEQ ID NO: 4421193 - DNA, 25 bp, Homo sapien
tgcagagccctgtgaatactgtgcc

SEQ ID NO: 4421194 - DNA, 25 bp, Homo sapien
agttttatgtgtgtatggcaattac

SEQ ID NO: 4421195 - DNA, 25 bp, Homo sapien
tcagttttatgtgtgtatggcaatt

SEQ ID NO: 4421196 - DNA, 25 bp, Homo sapien
ttttatgtgtgtatggcaattactt

SEQ ID NO: 4421197 - DNA, 25 bp, Homo sapien
cagttttatgtgtgtatggcaatta

SEQ ID NO: 4421198 - DNA, 25 bp, Homo sapien
cattgtgaagcataagccttctgtg

SEQ ID NO: 4421199 - DNA, 25 bp, Homo sapien
tctgtgagccttggcaccgaataac

SEQ ID NO: 4421200 - DNA, 25 bp, Homo sapien
tttcttctcatagaccatctgcgca

SEQ ID NO: 4421201 - DNA, 25 bp, Homo sapien
cacccggtgatgagttgttattgat

SEQ ID NO: 4421202 - DNA, 25 bp, Homo sapien
tcttctaccagaaggagccggagag

SEQ ID NO: 4421203 - DNA, 25 bp, Homo sapien
atcctgggccccgactctggctggg

SEQ ID NO: 4421204 - DNA, 25 bp, Homo sapien
ttcgcagctgccctgattgaatccc

SEQ ID NO: 4421205 - DNA, 25 bp, Homo sapien
gtatctggggcttcgcagctgccct

SEQ ID NO: 4421206 - DNA, 25 bp, Homo sapien
caatctgtgcgccaaaatttaatcc

SEQ ID NO: 4421207 - DNA, 25 bp, Homo sapien
tctgtgcgccaaaatttaatccttg

SEQ ID NO: 4421208 - DNA, 25 bp, Homo sapien
tgtgcgccaaaatttaatccttgca

SEQ ID NO: 4421209 - DNA, 25 bp, Homo sapien
gtgcgccaaaatttaatccttgcaa

SEQ ID NO: 4421210 - DNA, 25 bp, Homo sapien
caggcccgtggcacgagatctgttg

SEQ ID NO: 4421211 - DNA, 25 bp, Homo sapien
agatctgttgtttcccctcaccttg

SEQ ID NO: 4421212 - DNA, 25 bp, Homo sapien
tttagatctggagtggaggtcgttt

SEQ ID NO: 4421213 - DNA, 25 bp, Homo sapien
agctcccagggtctgaatagcggca

SEQ ID NO: 4421214 - DNA, 25 bp, Homo sapien
aagtgagaattcccattgcttcttg

SEQ ID NO: 4421215 - DNA, 25 bp, Homo sapien
tgagaattcccattgcttcttgaac

SEQ ID NO: 4421216 - DNA, 25 bp, Homo sapien
ttaaaagaagtgagaattcccattg

SEQ ID NO: 4421217 - DNA, 25 bp, Homo sapien
taaaagaagtgagaattcccattgc

SEQ ID NO: 4421218 - DNA, 25 bp, Homo sapien
agggtcccagggcatagcttgctgg

SEQ ID NO: 4421219 - DNA, 25 bp, Homo sapien
gtcccagggcatagcttgctggcac

SEQ ID NO: 4421220 - DNA, 25 bp, Homo sapien
aagggtcccagggcatagcttgctg

SEQ ID NO: 4421221 - DNA, 25 bp, Homo sapien
ggtcccagggcatagcttgctggca

SEQ ID NO: 4421222 - DNA, 25 bp, Homo sapien
tgaatagcaacacccttaggaaaac

SEQ ID NO: 4421223 - DNA, 25 bp, Homo sapien
tagggttcgctgatgtgcatacagc

SEQ ID NO: 4421224 - DNA, 25 bp, Homo sapien
gatgtgcatacagccaatcatagca

SEQ ID NO: 4421225 - DNA, 25 bp, Homo sapien
catagcaagggcgtgaatagcaaca

SEQ ID NO: 4421226 - DNA, 25 bp, Homo sapien
tgtatctgccgattgttctccatgg

SEQ ID NO: 4421227 - DNA, 25 bp, Homo sapien
catctggagttgaatgctgttccca

SEQ ID NO: 4421228 - DNA, 25 bp, Homo sapien
ttctccatggttccaacaaattgca

SEQ ID NO: 4421229 - DNA, 25 bp, Homo sapien
tgtggccctgctccttagcagaaaa

SEQ ID NO: 4421230 - DNA, 25 bp, Homo sapien
tcccttctatccacgtattgttgac

SEQ ID NO: 4421231 - DNA, 25 bp, Homo sapien
tagcctccagcaagggcgctgggat

SEQ ID NO: 4421232 - DNA, 25 bp, Homo sapien
cacgtattgttgaccacctcttggc

SEQ ID NO: 4421233 - DNA, 25 bp, Homo sapien
gaatgattccaattgtgaccaagaa

SEQ ID NO: 4421234 - DNA, 25 bp, Homo sapien
gctcgtgacccacacacgcttttaa

SEQ ID NO: 4421235 - DNA, 25 bp, Homo sapien
acacacgcttttaaacccaggccag

SEQ ID NO: 4421236 - DNA, 25 bp, Homo sapien
atccaagggggaggcgaacaaagca

SEQ ID NO: 4421237 - DNA, 25 bp, Homo sapien
agaggtgctcgtgacccacacacgc

SEQ ID NO: 4421238 - DNA, 25 bp, Homo sapien
caggcatcttgggagtatggaggaa

SEQ ID NO: 4421239 - DNA, 25 bp, Homo sapien
cattggaggtgatgtttacattggg

SEQ ID NO: 4421240 - DNA, 25 bp, Homo sapien
ttggccaagagagttaaagaaaatg

SEQ ID NO: 4421241 - DNA, 25 bp, Homo sapien
ccttggtcatactcccaagtattgg

SEQ ID NO: 4421242 - DNA, 25 bp, Homo sapien
acgtagacaccgtgctgctgagggc

SEQ ID NO: 4421243 - DNA, 25 bp, Homo sapien
gaggaggtgagaactgtcttgaagg

SEQ ID NO: 4421244 - DNA, 25 bp, Homo sapien
agggttctggcacgtagacaccgtg

SEQ ID NO: 4421245 - DNA, 25 bp, Homo sapien
aactgtcttgaagggatgtctgaag

SEQ ID NO: 4421246 - DNA, 25 bp, Homo sapien
tgtatcacacttgacctcactgaac

SEQ ID NO: 4421247 - DNA, 25 bp, Homo sapien
ggagcaactgtatcacacttgacct

SEQ ID NO: 4421248 - DNA, 25 bp, Homo sapien
taggccactccaccatggagcaact

SEQ ID NO: 4421249 - DNA, 25 bp, Homo sapien
ccatggagcaactgtatcacacttg

SEQ ID NO: 4421250 - DNA, 25 bp, Homo sapien
ctccagctgaacactgcagggggct

SEQ ID NO: 4421251 - DNA, 25 bp, Homo sapien
cagctgaacactgcagggggctctg

SEQ ID NO: 4421252 - DNA, 25 bp, Homo sapien
ctcccaggctccagctgaacactgc

SEQ ID NO: 4421253 - DNA, 25 bp, Homo sapien
ccaggctccagctgaacactgcagg

SEQ ID NO: 4421254 - DNA, 25 bp, Homo sapien
ttggtactgctcaatgcctctatgc

SEQ ID NO: 4421255 - DNA, 25 bp, Homo sapien
taagcagatacgtatttataacggc

SEQ ID NO: 4421256 - DNA, 25 bp, Homo sapien
gatttgtaacggctcctgctcttca

SEQ ID NO: 4421257 - DNA, 25 bp, Homo sapien
aaccgtattctctctaagatgggca

SEQ ID NO: 4421258 - DNA, 25 bp, Homo sapien
ctaagcttttccgaaattgcagacc

SEQ ID NO: 4421259 - DNA, 25 bp, Homo sapien
aagcttttccgaaattgcagacctc

SEQ ID NO: 4421260 - DNA, 25 bp, Homo sapien
ctctggtgcgtgtaaccttttataa

SEQ ID NO: 4421261 - DNA, 25 bp, Homo sapien
tgcagacctctggtgcgtgtaacct

SEQ ID NO: 4421262 - DNA, 25 bp, Homo sapien
gatgtatgttcttccaggatagtga

SEQ ID NO: 4421263 - DNA, 25 bp, Homo sapien
ttttcttggtgtacccacatactta

SEQ ID NO: 4421264 - DNA, 25 bp, Homo sapien
cttcttccacatgaactcctgctga

SEQ ID NO: 4421265 - DNA, 25 bp, Homo sapien
ggccaggcctagctcatagcgagta

SEQ ID NO: 4421266 - DNA, 25 bp, Homo sapien
cctgagatagcacatgggcatgagt

SEQ ID NO: 4421267 - DNA, 25 bp, Homo sapien
tgcaacaacatagggtagccgctgt

SEQ ID NO: 4421268 - DNA, 25 bp, Homo sapien
gccgctgttcagagtcattgcttga

SEQ ID NO: 4421269 - DNA, 25 bp, Homo sapien
tctggaaagcatccgattgtaggtc

SEQ ID NO: 4421270 - DNA, 25 bp, Homo sapien
ttactgtaattaccattcaattcca

SEQ ID NO: 4421271 - DNA, 25 bp, Homo sapien
tactgtaattaccattcaattccat

SEQ ID NO: 4421272 - DNA, 25 bp, Homo sapien
tttactgtaattaccattcaattcc

SEQ ID NO: 4421273 - DNA, 25 bp, Homo sapien
ctttactgtaattaccattcaattc

SEQ ID NO: 4421274 - DNA, 25 bp, Homo sapien
ggtcacttgagaagataactcctgg

SEQ ID NO: 4421275 - DNA, 25 bp, Homo sapien
gacatgaagcttcttcctacgccgg

SEQ ID NO: 4421276 - DNA, 25 bp, Homo sapien
caatgccagcgactactctctgagg

SEQ ID NO: 4421277 - DNA, 25 bp, Homo sapien
gccctgctggtgagccgcgattctt

SEQ ID NO: 4421278 - DNA, 25 bp, Homo sapien
gttagattgacgaggcacactggcc

SEQ ID NO: 4421279 - DNA, 25 bp, Homo sapien
cacactggccggaagtgagtaataa

SEQ ID NO: 4421280 - DNA, 25 bp, Homo sapien
tactaaacactgaagggctacctct

SEQ ID NO: 4421281 - DNA, 25 bp, Homo sapien
tcaatctagctcagaagaggcacgc

SEQ ID NO: 4421282 - DNA, 25 bp, Homo sapien
tttggagggtactattctgtttgca

SEQ ID NO: 4421283 - DNA, 25 bp, Homo sapien
ctcacccttctagtgaccaatttgg

SEQ ID NO: 4421284 - DNA, 25 bp, Homo sapien
tctagtgaccaatttggagggtact

SEQ ID NO: 4421285 - DNA, 25 bp, Homo sapien
gggtcactcacccttctagtgacca

SEQ ID NO: 4421286 - DNA, 25 bp, Homo sapien
cagcagggtgcagttttccatgttc

SEQ ID NO: 4421287 - DNA, 25 bp, Homo sapien
cacacacttggtgaactgaagtagc

SEQ ID NO: 4421288 - DNA, 25 bp, Homo sapien
tgtttgaggaatgtacatgcacacg

SEQ ID NO: 4421289 - DNA, 25 bp, Homo sapien
cacggaatccggcatggcttggttc

SEQ ID NO: 4421290 - DNA, 25 bp, Homo sapien
tcttgcaatgtcgtggtaggagctc

SEQ ID NO: 4421291 - DNA, 25 bp, Homo sapien
ctctggactagaagccgggttgttc

SEQ ID NO: 4421292 - DNA, 25 bp, Homo sapien
gccgaggtgaccagcactgtgtgtt

SEQ ID NO: 4421293 - DNA, 25 bp, Homo sapien
taaatcagccatctacagagggtga

SEQ ID NO: 4421294 - DNA, 25 bp, Homo sapien
taaagtaatggagtcttgaattggg

SEQ ID NO: 4421295 - DNA, 25 bp, Homo sapien
ctgtgatgatgatggagcgtgttta

SEQ ID NO: 4421296 - DNA, 25 bp, Homo sapien
gattagttctcgtcaacattgtgag

SEQ ID NO: 4421297 - DNA, 25 bp, Homo sapien
tggccaatcatcaccataagcctgt

SEQ ID NO: 4421298 - DNA, 25 bp, Homo sapien
tggtcaaatttgagtgagaatgtct

SEQ ID NO: 4421299 - DNA, 25 bp, Homo sapien
agcccagctcataagtgaaagcttg

SEQ ID NO: 4421300 - DNA, 25 bp, Homo sapien
caaagcccagctcataagtgaaagc

SEQ ID NO: 4421301 - DNA, 25 bp, Homo sapien
tatggtcaaatttgagtgagaatgt

SEQ ID NO: 4421302 - DNA, 25 bp, Homo sapien
ggctcttgccatcaggtccggctaa

SEQ ID NO: 4421303 - DNA, 25 bp, Homo sapien
tggaatgcaccatgttagcggttgg

SEQ ID NO: 4421304 - DNA, 25 bp, Homo sapien
gactctcttatttattgcggctagc

SEQ ID NO: 4421305 - DNA, 25 bp, Homo sapien
gaagattgatgaggtggaaagtcca

SEQ ID NO: 4421306 - DNA, 25 bp, Homo sapien
tcttccagggattgcttcaagttaa

SEQ ID NO: 4421307 - DNA, 25 bp, Homo sapien
tccagggattgcttcaagttaaatg

SEQ ID NO: 4421308 - DNA, 25 bp, Homo sapien
ggattgcttcaagttaaatgtatac

SEQ ID NO: 4421309 - DNA, 25 bp, Homo sapien
cagggattgcttcaagttaaatgta

SEQ ID NO: 4421310 - DNA, 25 bp, Homo sapien
ttcactatatagacaggctttctct

SEQ ID NO: 4421311 - DNA, 25 bp, Homo sapien
ttgtatcagatgaagtctctacctc

SEQ ID NO: 4421312 - DNA, 25 bp, Homo sapien
ttcaagcatgcttgtatcagatgaa

SEQ ID NO: 4421313 - DNA, 25 bp, Homo sapien
tctttcactatatagacaggctttc

SEQ ID NO: 4421314 - DNA, 25 bp, Homo sapien
caactggcttgaactcaacaagaac

SEQ ID NO: 4421315 - DNA, 25 bp, Homo sapien
ggtctcaactggcttgaactcaaca

SEQ ID NO: 4421316 - DNA, 25 bp, Homo sapien
gctcagttgaagggttgatggtctc

SEQ ID NO: 4421317 - DNA, 25 bp, Homo sapien
ctggcttgaactcaacaagaactgc

SEQ ID NO: 4421318 - DNA, 25 bp, Homo sapien
taattagcgggatagaaagcaggat

SEQ ID NO: 4421319 - DNA, 25 bp, Homo sapien
tgaattagcatgaaaggagggtgca

SEQ ID NO: 4421320 - DNA, 25 bp, Homo sapien
ggctcttcataggatgcatgttcag

SEQ ID NO: 4421321 - DNA, 25 bp, Homo sapien
ggtttctgcacaagcataattgagc

SEQ ID NO: 4421322 - DNA, 25 bp, Homo sapien
gattgcttaccaggctgctgagcaa

SEQ ID NO: 4421323 - DNA, 25 bp, Homo sapien
gagaacaaatcgcaaatccacctcc

SEQ ID NO: 4421324 - DNA, 25 bp, Homo sapien
gaaggagaacaaatcgcaaatccac

SEQ ID NO: 4421325 - DNA, 25 bp, Homo sapien
ttgtgagattgcttaccaggctgct

SEQ ID NO: 4421326 - DNA, 25 bp, Homo sapien
gatgaggactctaaaattcgggaaa

SEQ ID NO: 4421327 - DNA, 25 bp, Homo sapien
tctgtcaggaaggtattagaatctt

SEQ ID NO: 4421328 - DNA, 25 bp, Homo sapien
ttagatgaggactctaaaattcggg

SEQ ID NO: 4421329 - DNA, 25 bp, Homo sapien
tctttagatgaggactctaaaattc

SEQ ID NO: 4421330 - DNA, 25 bp, Homo sapien
cagccccgggagaacggttccgatg

SEQ ID NO: 4421331 - DNA, 25 bp, Homo sapien
tcgttctgggcaccatgtgttcgga

SEQ ID NO: 4421332 - DNA, 25 bp, Homo sapien
cctctgggacctagggcttctggac

SEQ ID NO: 4421333 - DNA, 25 bp, Homo sapien
acaccacgcggtatcagggtcacag

SEQ ID NO: 4421334 - DNA, 25 bp, Homo sapien
cttcaccccgtcctccgcggcttcg

SEQ ID NO: 4421335 - DNA, 25 bp, Homo sapien
ctccctcccgactgacacggcgtgg

SEQ ID NO: 4421336 - DNA, 25 bp, Homo sapien
gtcttcggcgttcggagtccgggca

SEQ ID NO: 4421337 - DNA, 25 bp, Homo sapien
tcccgactgacacggcgtggcagtg

SEQ ID NO: 4421338 - DNA, 25 bp, Homo sapien
cacccccagagtttccacaaacgca

SEQ ID NO: 4421339 - DNA, 25 bp, Homo sapien
gcaatctcaggcattacacccatct

SEQ ID NO: 4421340 - DNA, 25 bp, Homo sapien
ttgtgcaatctcaggcattacaccc

SEQ ID NO: 4421341 - DNA, 25 bp, Homo sapien
tgcaatctcaggcattacacccatc

SEQ ID NO: 4421342 - DNA, 25 bp, Homo sapien
tgtgcaatctcaggcattacaccca

SEQ ID NO: 4421343 - DNA, 25 bp, Homo sapien
taagatcaatgggatagattcagcc

SEQ ID NO: 4421344 - DNA, 25 bp, Homo sapien
gatcaatgggatagattcagcctgg

SEQ ID NO: 4421345 - DNA, 25 bp, Homo sapien
caatgggatagattcagcctggata

SEQ ID NO: 4421346 - DNA, 25 bp, Homo sapien
tgggatagattcagcctggatatca

SEQ ID NO: 4421347 - DNA, 25 bp, Homo sapien
cagttttgccacttcctgtttctgc

SEQ ID NO: 4421348 - DNA, 25 bp, Homo sapien
gttttgccacttcctgtttctgcag

SEQ ID NO: 4421349 - DNA, 25 bp, Homo sapien
accagttttgccacttcctgtttct

SEQ ID NO: 4421350 - DNA, 25 bp, Homo sapien
ttttgccacttcctgtttctgcagc

SEQ ID NO: 4421351 - DNA, 25 bp, Homo sapien
tagtattcacatattaacgacaatt

SEQ ID NO: 4421352 - DNA, 25 bp, Homo sapien
acaaaaggtatctatattagtattc

SEQ ID NO: 4421353 - DNA, 25 bp, Homo sapien
caaaaggtatctatattagtattca

SEQ ID NO: 4421354 - DNA, 25 bp, Homo sapien
tatattagtattcacatattaacga

SEQ ID NO: 4421355 - DNA, 25 bp, Homo sapien
aaactatctggataactggaatact

SEQ ID NO: 4421356 - DNA, 25 bp, Homo sapien
gttggtctttcagagtttcataaac

SEQ ID NO: 4421357 - DNA, 25 bp, Homo sapien
tggtctttcagagtttcataaacta

SEQ ID NO: 4421358 - DNA, 25 bp, Homo sapien
ctatctggataactggaatactaaa

SEQ ID NO: 4421359 - DNA, 25 bp, Homo sapien
cactattagtattttaggagggaca

SEQ ID NO: 4421360 - DNA, 25 bp, Homo sapien
tccagggttccagatcccaatacca

SEQ ID NO: 4421361 - DNA, 25 bp, Homo sapien
caaccttgcagtgtttaggctctca

SEQ ID NO: 4421362 - DNA, 25 bp, Homo sapien
actttcctaactgtcagtgatgaga

SEQ ID NO: 4421363 - DNA, 25 bp, Homo sapien
tctgtcatatgggttcatctgccat

SEQ ID NO: 4421364 - DNA, 25 bp, Homo sapien
catatgggttcatctgccatttgtt

SEQ ID NO: 4421365 - DNA, 25 bp, Homo sapien
gtcatatgggttcatctgccatttg

SEQ ID NO: 4421366 - DNA, 25 bp, Homo sapien
cctctgtcatatgggttcatctgcc

SEQ ID NO: 4421367 - DNA, 25 bp, Homo sapien
tagtagctctacacccatgccattc

SEQ ID NO: 4421368 - DNA, 25 bp, Homo sapien
atcctttagtagctctacacccatg

SEQ ID NO: 4421369 - DNA, 25 bp, Homo sapien
ctctgctttgacaacaaagaccatc

SEQ ID NO: 4421370 - DNA, 25 bp, Homo sapien
tctctgctttgacaacaaagaccat

SEQ ID NO: 4421371 - DNA, 25 bp, Homo sapien
ctaggtccaaagaggcctgcatggt

SEQ ID NO: 4421372 - DNA, 25 bp, Homo sapien
gaccctgcataacccttggtcatga

SEQ ID NO: 4421373 - DNA, 25 bp, Homo sapien
aaagaggcctgcatggtagaccacc

SEQ ID NO: 4421374 - DNA, 25 bp, Homo sapien
caggatacttcatagtagtgtttcc

SEQ ID NO: 4421375 - DNA, 25 bp, Homo sapien
ttctttcctgttccaccaaagccaa

SEQ ID NO: 4421376 - DNA, 25 bp, Homo sapien
tctccataattatcaaattgtttgt

SEQ ID NO: 4421377 - DNA, 25 bp, Homo sapien
caaattgtttgttatgggatttctt

SEQ ID NO: 4421378 - DNA, 25 bp, Homo sapien
ccaaagccaaatccaaacttgtcag

SEQ ID NO: 4421379 - DNA, 25 bp, Homo sapien
gaacttgacatgtcccttatctata

SEQ ID NO: 4421380 - DNA, 25 bp, Homo sapien
caatggtatcatgcatagtgaattc

SEQ ID NO: 4421381 - DNA, 25 bp, Homo sapien
catccaatggtatcatgcatagtga

SEQ ID NO: 4421382 - DNA, 25 bp, Homo sapien
cttatctatatccaggtaacatcca

SEQ ID NO: 4421383 - DNA, 25 bp, Homo sapien
ggtggtatttcaaatgccagaccaa

SEQ ID NO: 4421384 - DNA, 25 bp, Homo sapien
tggtggtatttcaaatgccagacca

SEQ ID NO: 4421385 - DNA, 25 bp, Homo sapien
catccggtgccttggaaagagcaac

SEQ ID NO: 4421386 - DNA, 25 bp, Homo sapien
ctgagtgctgtgatttgacaatgta

SEQ ID NO: 4421387 - DNA, 25 bp, Homo sapien
tgacaatgtaaccatccggtgcctt

SEQ ID NO: 4421388 - DNA, 25 bp, Homo sapien
taaccatccggtgccttggaaagag

SEQ ID NO: 4421389 - DNA, 25 bp, Homo sapien
tggagttctcatcaattattctcac

SEQ ID NO: 4421390 - DNA, 25 bp, Homo sapien
tattctcactattctagaaatcctt

SEQ ID NO: 4421391 - DNA, 25 bp, Homo sapien
gttctcatcaattattctcactatt

SEQ ID NO: 4421392 - DNA, 25 bp, Homo sapien
ttctcactattctagaaatccttac

SEQ ID NO: 4421393 - DNA, 25 bp, Homo sapien
caaagtttgttcagctaactcccgg

SEQ ID NO: 4421394 - DNA, 25 bp, Homo sapien
aaggttcaacaatgagagctttcgg

SEQ ID NO: 4421395 - DNA, 25 bp, Homo sapien
actcccgggaaggttcaacaatgag

SEQ ID NO: 4421396 - DNA, 25 bp, Homo sapien
aaactgcttgatgttgttcaaagtt

SEQ ID NO: 4421397 - DNA, 25 bp, Homo sapien
ccaccaccgtgatgcagtctagaat

SEQ ID NO: 4421398 - DNA, 25 bp, Homo sapien
taacatgctagaaatagagtggcac

SEQ ID NO: 4421399 - DNA, 25 bp, Homo sapien
tcaaagggattgctactgagcaagg

SEQ ID NO: 4421400 - DNA, 25 bp, Homo sapien
tataactagacagtgaccaatctga

SEQ ID NO: 4421401 - DNA, 25 bp, Homo sapien
tgatcccgggctgcaacacctccaa

SEQ ID NO: 4421402 - DNA, 25 bp, Homo sapien
ttccaaaacagagagctgatcccgg

SEQ ID NO: 4421403 - DNA, 25 bp, Homo sapien
gcaacacctccaattatcagaagct

SEQ ID NO: 4421404 - DNA, 25 bp, Homo sapien
caaaacagagagctgatcccgggct

SEQ ID NO: 4421405 - DNA, 25 bp, Homo sapien
tcccggagtacctacaactatatct

SEQ ID NO: 4421406 - DNA, 25 bp, Homo sapien
caagtcatctagtcttcccggagta

SEQ ID NO: 4421407 - DNA, 25 bp, Homo sapien
catccaggaccaggaatctaacttg

SEQ ID NO: 4421408 - DNA, 25 bp, Homo sapien
tcagctttccagttgacaccaagtc

SEQ ID NO: 4421409 - DNA, 25 bp, Homo sapien
ggtaacctgaggaatctgattgtgc

SEQ ID NO: 4421410 - DNA, 25 bp, Homo sapien
ggaatctgattgtgcatcctattta

SEQ ID NO: 4421411 - DNA, 25 bp, Homo sapien
catcagaggtaacctgaggaatctg

SEQ ID NO: 4421412 - DNA, 25 bp, Homo sapien
tctttttccatcagaggtaacctga

SEQ ID NO: 4421413 - DNA, 25 bp, Homo sapien
tctccttttaagtcaacccatgtag

SEQ ID NO: 4421414 - DNA, 25 bp, Homo sapien
gatttactgggacaacaacatggtg

SEQ ID NO: 4421415 - DNA, 25 bp, Homo sapien
caacatggtgtacagtatctggaac

SEQ ID NO: 4421416 - DNA, 25 bp, Homo sapien
tcggacagtttctttacatcgaaag

SEQ ID NO: 4421417 - DNA, 25 bp, Homo sapien
tatcttttgcatgtacatcatcagt

SEQ ID NO: 4421418 - DNA, 25 bp, Homo sapien
accaggtcttgtgttatcttttgca

SEQ ID NO: 4421419 - DNA, 25 bp, Homo sapien
tattagcaccaggtcttgtgttatc

SEQ ID NO: 4421420 - DNA, 25 bp, Homo sapien
ctggactattagcaccaggtcttgt

SEQ ID NO: 4421421 - DNA, 25 bp, Homo sapien
cacctcacatccttcatgagaatag

SEQ ID NO: 4421422 - DNA, 25 bp, Homo sapien
tcacctcacatccttcatgagaata

SEQ ID NO: 4421423 - DNA, 25 bp, Homo sapien
tcttatggaattcagggtcaatata

SEQ ID NO: 4421424 - DNA, 25 bp, Homo sapien
ttatggaattcagggtcaatataaa

SEQ ID NO: 4421425 - DNA, 25 bp, Homo sapien
ttcttatggaattcagggtcaatat

SEQ ID NO: 4421426 - DNA, 25 bp, Homo sapien
cttatggaattcagggtcaatataa

SEQ ID NO: 4421427 - DNA, 25 bp, Homo sapien
taagcaccaaccttgtatcatgatg

SEQ ID NO: 4421428 - DNA, 25 bp, Homo sapien
gagtccgaccctcaccaatgaatga

SEQ ID NO: 4421429 - DNA, 25 bp, Homo sapien
catgtcagacatgcagcctaatggg

SEQ ID NO: 4421430 - DNA, 25 bp, Homo sapien
taagactttaattctgtgacccaac

SEQ ID NO: 4421431 - DNA, 25 bp, Homo sapien
tatgttccttgattgcccggacagc

SEQ ID NO: 4421432 - DNA, 25 bp, Homo sapien
ggacagcatactcccctttcaggat

SEQ ID NO: 4421433 - DNA, 25 bp, Homo sapien
tgctccaagttatcacagtcaattt

SEQ ID NO: 4421434 - DNA, 25 bp, Homo sapien
gataattgcttgatccatcttatgt

SEQ ID NO: 4421435 - DNA, 25 bp, Homo sapien
gcatgtacaacggtattatactgtc

SEQ ID NO: 4421436 - DNA, 25 bp, Homo sapien
gataatagaatcatgtgggtggtta

SEQ ID NO: 4421437 - DNA, 25 bp, Homo sapien
caactgattgagaatttttccatgt

SEQ ID NO: 4421438 - DNA, 25 bp, Homo sapien
cagtttacattctcgaagttataag

SEQ ID NO: 4421439 - DNA, 25 bp, Homo sapien
acatagttatctagtttcatggcca

SEQ ID NO: 4421440 - DNA, 25 bp, Homo sapien
taagcaacatagttatctagtttca

SEQ ID NO: 4421441 - DNA, 25 bp, Homo sapien
gccacagaagattcaaagcagcaaa

SEQ ID NO: 4421442 - DNA, 25 bp, Homo sapien
tatctagtttcatggccacagaaga

SEQ ID NO: 4421443 - DNA, 25 bp, Homo sapien
gacaaacacatgagaactggtgtcc

SEQ ID NO: 4421444 - DNA, 25 bp, Homo sapien
cacatgagaactggtgtcctttttt

SEQ ID NO: 4421445 - DNA, 25 bp, Homo sapien
tgaagacaaacacatgagaactggt

SEQ ID NO: 4421446 - DNA, 25 bp, Homo sapien
ctgtcaccatgaagacaaacacatg

SEQ ID NO: 4421447 - DNA, 25 bp, Homo sapien
ggtagcacacattcaaacgaggcca

SEQ ID NO: 4421448 - DNA, 25 bp, Homo sapien
tatggtccagaaaaatgcctacggt

SEQ ID NO: 4421449 - DNA, 25 bp, Homo sapien
tatgcccagcatggaaacgtaagcc

SEQ ID NO: 4421450 - DNA, 25 bp, Homo sapien
catataactggaaaggtctgcccca

SEQ ID NO: 4421451 - DNA, 25 bp, Homo sapien
ataaggaacaccgtggatatcaatt

SEQ ID NO: 4421452 - DNA, 25 bp, Homo sapien
taaggaacaccgtggatatcaattc

SEQ ID NO: 4421453 - DNA, 25 bp, Homo sapien
aattcctctagcagctacatctgtg

SEQ ID NO: 4421454 - DNA, 25 bp, Homo sapien
tggatatcaattcctctagcagcta

SEQ ID NO: 4421455 - DNA, 25 bp, Homo sapien
tacaggcataaaaagttgcttttta

SEQ ID NO: 4421456 - DNA, 25 bp, Homo sapien
acactacaggcataaaaagttgctt

SEQ ID NO: 4421457 - DNA, 25 bp, Homo sapien
cactacaggcataaaaagttgcttt

SEQ ID NO: 4421458 - DNA, 25 bp, Homo sapien
actacaggcataaaaagttgctttt

SEQ ID NO: 4421459 - DNA, 25 bp, Homo sapien
aaaaaccattattaacaattgccag

SEQ ID NO: 4421460 - DNA, 25 bp, Homo sapien
accattattaacaattgccagtagt

SEQ ID NO: 4421461 - DNA, 25 bp, Homo sapien
aaaccattattaacaattgccagta

SEQ ID NO: 4421462 - DNA, 25 bp, Homo sapien
taaaaaccattattaacaattgcca

SEQ ID NO: 4421463 - DNA, 25 bp, Homo sapien
tttgcttttcatcgggcagagtgac

SEQ ID NO: 4421464 - DNA, 25 bp, Homo sapien
ccaattcgatgtacgtagttttgct

SEQ ID NO: 4421465 - DNA, 25 bp, Homo sapien
agttttgcttttcatcgggcagagt

SEQ ID NO: 4421466 - DNA, 25 bp, Homo sapien
ttcctactctgccaattcgatgtac

SEQ ID NO: 4421467 - DNA, 25 bp, Homo sapien
tattcctaaagcatacaagcttaaa

SEQ ID NO: 4421468 - DNA, 25 bp, Homo sapien
attcctaaagcatacaagcttaaaa

SEQ ID NO: 4421469 - DNA, 25 bp, Homo sapien
tctttttctgttgccaccagggaaa

SEQ ID NO: 4421470 - DNA, 25 bp, Homo sapien
ttgccaccagggaaattgccagacc

SEQ ID NO: 4421471 - DNA, 25 bp, Homo sapien
tgttgccaccagggaaattgccaga

SEQ ID NO: 4421472 - DNA, 25 bp, Homo sapien
ccaccagggaaattgccagacccat

SEQ ID NO: 4421473 - DNA, 25 bp, Homo sapien
aatgaatataatagagccctacaaa

SEQ ID NO: 4421474 - DNA, 25 bp, Homo sapien
tccaacatctaaaatcacaacacac

SEQ ID NO: 4421475 - DNA, 25 bp, Homo sapien
tataatagagccctacaaagattac

SEQ ID NO: 4421476 - DNA, 25 bp, Homo sapien
ccaacatctaaaatcacaacacaca

SEQ ID NO: 4421477 - DNA, 25 bp, Homo sapien
tccacggctgctacatacatggtac

SEQ ID NO: 4421478 - DNA, 25 bp, Homo sapien
ctgcatctcgttgtaccatatggta

SEQ ID NO: 4421479 - DNA, 25 bp, Homo sapien
tccttgagtcttgtgttataacacc

SEQ ID NO: 4421480 - DNA, 25 bp, Homo sapien
tatggtacagcctccatcttccttg

SEQ ID NO: 4421481 - DNA, 25 bp, Homo sapien
aaaatttcatttagaaagagttgca

SEQ ID NO: 4421482 - DNA, 25 bp, Homo sapien
aatttcatttagaaagagttgcatt

SEQ ID NO: 4421483 - DNA, 25 bp, Homo sapien
ttcatttagaaagagttgcatttta

SEQ ID NO: 4421484 - DNA, 25 bp, Homo sapien
ctaagtaatggagagaaaatttcca

SEQ ID NO: 4421485 - DNA, 25 bp, Homo sapien
tctgaccgtaggtaactttcccatc

SEQ ID NO: 4421486 - DNA, 25 bp, Homo sapien
accagcagcccttttctgaccgtag

SEQ ID NO: 4421487 - DNA, 25 bp, Homo sapien
ttcccatcaaattcatccactggta

SEQ ID NO: 4421488 - DNA, 25 bp, Homo sapien
tatatccggctcaacctgagaaatg

SEQ ID NO: 4421489 - DNA, 25 bp, Homo sapien
tgaaagtactgccttcccaaaccga

SEQ ID NO: 4421490 - DNA, 25 bp, Homo sapien
ttcaggaacaagctaacaaaagggc

SEQ ID NO: 4421491 - DNA, 25 bp, Homo sapien
aaaatgctacaaggcaggtatggac

SEQ ID NO: 4421492 - DNA, 25 bp, Homo sapien
tatggacaaagtactatgagggtaa

SEQ ID NO: 4421493 - DNA, 25 bp, Homo sapien
tgtaaatgacatgcttgaaataact

SEQ ID NO: 4421494 - DNA, 25 bp, Homo sapien
gtaaatgacatgcttgaaataactt

SEQ ID NO: 4421495 - DNA, 25 bp, Homo sapien
taaatgacatgcttgaaataacttg

SEQ ID NO: 4421496 - DNA, 25 bp, Homo sapien
aatgtaaatgacatgcttgaaataa

SEQ ID NO: 4421497 - DNA, 25 bp, Homo sapien
ctggttaggaaggtagccaagatgc

SEQ ID NO: 4421498 - DNA, 25 bp, Homo sapien
agatgtctgcgcctccttttcaagg

SEQ ID NO: 4421499 - DNA, 25 bp, Homo sapien
caactcttgaacagtaggtgccaaa

SEQ ID NO: 4421500 - DNA, 25 bp, Homo sapien
gaaggttctgaacagctggttagga

SEQ ID NO: 4421501 - DNA, 25 bp, Homo sapien
caagagttagcattaatagcttacg

SEQ ID NO: 4421502 - DNA, 25 bp, Homo sapien
gaagaattcctaagactaatgtttc

SEQ ID NO: 4421503 - DNA, 25 bp, Homo sapien
tagagttttaagactacagactttc

SEQ ID NO: 4421504 - DNA, 25 bp, Homo sapien
tactataaatactgctgcttggaag

SEQ ID NO: 4421505 - DNA, 25 bp, Homo sapien
tgcgtgaagactgcacagagctgtc

SEQ ID NO: 4421506 - DNA, 25 bp, Homo sapien
tgagagtcatcctccaaaggtagcc

SEQ ID NO: 4421507 - DNA, 25 bp, Homo sapien
ggtagccagcccaaagagtaaaagc

SEQ ID NO: 4421508 - DNA, 25 bp, Homo sapien
caaggtgattagaaagatcccctcc

SEQ ID NO: 4421509 - DNA, 25 bp, Homo sapien
gactcagtttaaggcagctgctccc

SEQ ID NO: 4421510 - DNA, 25 bp, Homo sapien
tgaacagaatgagttacccagctgg

SEQ ID NO: 4421511 - DNA, 25 bp, Homo sapien
caagaaacatctagggtcagactca

SEQ ID NO: 4421512 - DNA, 25 bp, Homo sapien
gacacaaggatttgcaataggacca

SEQ ID NO: 4421513 - DNA, 25 bp, Homo sapien
gggtataagcaagccaatgtctcca

SEQ ID NO: 4421514 - DNA, 25 bp, Homo sapien
tgacagacctacttgccgacctagg

SEQ ID NO: 4421515 - DNA, 25 bp, Homo sapien
tatgggcagaagcacacgatagagt

SEQ ID NO: 4421516 - DNA, 25 bp, Homo sapien
cgacctaggtagcaaacatctgaag

SEQ ID NO: 4421517 - DNA, 25 bp, Homo sapien
caatttagggtcaattccactttgg

SEQ ID NO: 4421518 - DNA, 25 bp, Homo sapien
gaacaaagctcttgccctagaaaga

SEQ ID NO: 4421519 - DNA, 25 bp, Homo sapien
tgcatataagccagggaaaaccaca

SEQ ID NO: 4421520 - DNA, 25 bp, Homo sapien
acgaatgtgaacagcacccgcgttc

SEQ ID NO: 4421521 - DNA, 25 bp, Homo sapien
ttgctccttcagaatcgctccttgg

SEQ ID NO: 4421522 - DNA, 25 bp, Homo sapien
atcatactgccttaacagcagcggg

SEQ ID NO: 4421523 - DNA, 25 bp, Homo sapien
ccaagagcatgaggagactttgctc

SEQ ID NO: 4421524 - DNA, 25 bp, Homo sapien
tgagtagatcaaaaggccaagagca

SEQ ID NO: 4421525 - DNA, 25 bp, Homo sapien
cagacaggtgtctgcaagcagcagc

SEQ ID NO: 4421526 - DNA, 25 bp, Homo sapien
gcacgtggtgacacaggctctctca

SEQ ID NO: 4421527 - DNA, 25 bp, Homo sapien
aatggactgcgccaggttggccttg

SEQ ID NO: 4421528 - DNA, 25 bp, Homo sapien
tctgagttcagggagtttagcacct

SEQ ID NO: 4421529 - DNA, 25 bp, Homo sapien
cagtcgtgcagtcatatgtggcagc

SEQ ID NO: 4421530 - DNA, 25 bp, Homo sapien
taaatccaaggtgctgatcctccga

SEQ ID NO: 4421531 - DNA, 25 bp, Homo sapien
gatcctccgatttccaccagtgatg

SEQ ID NO: 4421532 - DNA, 25 bp, Homo sapien
gactgtgcacgtcgggtaaatccaa

SEQ ID NO: 4421533 - DNA, 25 bp, Homo sapien
tcagagctgcggagatcctgatgca

SEQ ID NO: 4421534 - DNA, 25 bp, Homo sapien
cggagatcctgatgcactggaacta

SEQ ID NO: 4421535 - DNA, 25 bp, Homo sapien
cagaagaagacaattgttgttcaag

SEQ ID NO: 4421536 - DNA, 25 bp, Homo sapien
tgcactggaactagcaaggtaattt

SEQ ID NO: 4421537 - DNA, 25 bp, Homo sapien
gatgacagagtgaagagaaggaccc

SEQ ID NO: 4421538 - DNA, 25 bp, Homo sapien
acagagtgaagagaaggacccagcc

SEQ ID NO: 4421539 - DNA, 25 bp, Homo sapien
cttggagatgacagagtgaagagaa

SEQ ID NO: 4421540 - DNA, 25 bp, Homo sapien
tgacagagtgaagagaaggacccag

SEQ ID NO: 4421541 - DNA, 25 bp, Homo sapien
gatgtctctatgtccccttctatgt

SEQ ID NO: 4421542 - DNA, 25 bp, Homo sapien
gagttgctgatgtctctatgtcccc

SEQ ID NO: 4421543 - DNA, 25 bp, Homo sapien
ttcccatgagttgctgatgtctcta

SEQ ID NO: 4421544 - DNA, 25 bp, Homo sapien
ctgtgctttcccatgagttgctgat

SEQ ID NO: 4421545 - DNA, 25 bp, Homo sapien
ctccctcctcggctttcacaggata

SEQ ID NO: 4421546 - DNA, 25 bp, Homo sapien
ttcagttcccaccaagctcaggggc

SEQ ID NO: 4421547 - DNA, 25 bp, Homo sapien
tagcgggatcctgcccatggcgctg

SEQ ID NO: 4421548 - DNA, 25 bp, Homo sapien
tgagaagcaggccccggattgagga

SEQ ID NO: 4421549 - DNA, 25 bp, Homo sapien
ccatttggtggcctgatattggcca

SEQ ID NO: 4421550 - DNA, 25 bp, Homo sapien
ctgccatttggtggcctgatattgg

SEQ ID NO: 4421551 - DNA, 25 bp, Homo sapien
tggtggcctgatattggccaggcct

SEQ ID NO: 4421552 - DNA, 25 bp, Homo sapien
tttggtggcctgatattggccaggc

SEQ ID NO: 4421553 - DNA, 25 bp, Homo sapien
aagactcactgccaatgcggtttcc

SEQ ID NO: 4421554 - DNA, 25 bp, Homo sapien
tgcttcaccttcaagactcactgcc

SEQ ID NO: 4421555 - DNA, 25 bp, Homo sapien
ctcactgccaatgcggtttccatga

SEQ ID NO: 4421556 - DNA, 25 bp, Homo sapien
ctgccaatgcggtttccatgaagcc

SEQ ID NO: 4421557 - DNA, 25 bp, Homo sapien
gtggctctggcacagtctcgcattg

SEQ ID NO: 4421558 - DNA, 25 bp, Homo sapien
tcttgccacccttgcacgaggttgt

SEQ ID NO: 4421559 - DNA, 25 bp, Homo sapien
tggttctcttacacgctggcctcgt

SEQ ID NO: 4421560 - DNA, 25 bp, Homo sapien
gtctctgatacatgccggcccttag

SEQ ID NO: 4421561 - DNA, 25 bp, Homo sapien
cacgcctcccttgccagttccaagg

SEQ ID NO: 4421562 - DNA, 25 bp, Homo sapien
aagcatgcgatgttcagccactccg

SEQ ID NO: 4421563 - DNA, 25 bp, Homo sapien
caggaaatgtaagcacgggacgaac

SEQ ID NO: 4421564 - DNA, 25 bp, Homo sapien
gggagagctcacagcatggctgtct

SEQ ID NO: 4421565 - DNA, 25 bp, Homo sapien
ccagagagggctggttctcgcggag

SEQ ID NO: 4421566 - DNA, 25 bp, Homo sapien
cttctttcgaaagcctcttaactct

SEQ ID NO: 4421567 - DNA, 25 bp, Homo sapien
gttctcgcggagtctgggaaaagcc

SEQ ID NO: 4421568 - DNA, 25 bp, Homo sapien
tcttctttcgaaagcctcttaactc

SEQ ID NO: 4421569 - DNA, 25 bp, Homo sapien
ttacaagccccaattatgcctccta

SEQ ID NO: 4421570 - DNA, 25 bp, Homo sapien
tttacaagccccaattatgcctcct

SEQ ID NO: 4421571 - DNA, 25 bp, Homo sapien
tacaagccccaattatgcctcctac

SEQ ID NO: 4421572 - DNA, 25 bp, Homo sapien
agagccatcatctggtggaggaggc

SEQ ID NO: 4421573 - DNA, 25 bp, Homo sapien
caggctctttagagtctccactgaa

SEQ ID NO: 4421574 - DNA, 25 bp, Homo sapien
gacacaggtgacctccgcaggctct

SEQ ID NO: 4421575 - DNA, 25 bp, Homo sapien
acgaaggcctgggatgtagggaagg

SEQ ID NO: 4421576 - DNA, 25 bp, Homo sapien
tcatcacgctcattcccttcttggt

SEQ ID NO: 4421577 - DNA, 25 bp, Homo sapien
ccaagagtgcatcccagcacgagga

SEQ ID NO: 4421578 - DNA, 25 bp, Homo sapien
ccctcgtgcatttgcagccaggagc

SEQ ID NO: 4421579 - DNA, 25 bp, Homo sapien
cttcttggttcattgtgattttagc

SEQ ID NO: 4421580 - DNA, 25 bp, Homo sapien
taacgctcccgcatgttcttgtggc

SEQ ID NO: 4421581 - DNA, 25 bp, Homo sapien
caccagagctgtatggggaccaagg

SEQ ID NO: 4421582 - DNA, 25 bp, Homo sapien
tccatgttgccggtgactccctgct

SEQ ID NO: 4421583 - DNA, 25 bp, Homo sapien
gggctcagccgactccgtgcatgag

SEQ ID NO: 4421584 - DNA, 25 bp, Homo sapien
ctcaaacgcgaggtgggggacgagg

SEQ ID NO: 4421585 - DNA, 25 bp, Homo sapien
tgggggacgaggaagtgcagagccc

SEQ ID NO: 4421586 - DNA, 25 bp, Homo sapien
gggacgaggaagtgcagagccctcc

SEQ ID NO: 4421587 - DNA, 25 bp, Homo sapien
tcaaacgcgaggtgggggacgagga

SEQ ID NO: 4421588 - DNA, 25 bp, Homo sapien
tcagaacggacggagcttggactag

SEQ ID NO: 4421589 - DNA, 25 bp, Homo sapien
tcctaatggctgattgggtcacggg

SEQ ID NO: 4421590 - DNA, 25 bp, Homo sapien
ttggactagcaagccggaatgttcc

SEQ ID NO: 4421591 - DNA, 25 bp, Homo sapien
ggtactcactcctaggtccaaggcg

SEQ ID NO: 4421592 - DNA, 25 bp, Homo sapien
aagggtaataatgttgttagttgca

SEQ ID NO: 4421593 - DNA, 25 bp, Homo sapien
ggataagttactgttgcagggtagc

SEQ ID NO: 4421594 - DNA, 25 bp, Homo sapien
tagttgcaacaatggcgctggtaat

SEQ ID NO: 4421595 - DNA, 25 bp, Homo sapien
taagttactgttgcagggtagcaat

SEQ ID NO: 4421596 - DNA, 25 bp, Homo sapien
ggcctctggtccttctagagctcca

SEQ ID NO: 4421597 - DNA, 25 bp, Homo sapien
tcatctgccccacattgcagagggc

SEQ ID NO: 4421598 - DNA, 25 bp, Homo sapien
cacacgttctaaccagcgtaggtac

SEQ ID NO: 4421599 - DNA, 25 bp, Homo sapien
tgagccttaaagacaccctgagcag

SEQ ID NO: 4421600 - DNA, 25 bp, Homo sapien
atgacatcggcatgggcccagattt

SEQ ID NO: 4421601 - DNA, 25 bp, Homo sapien
ggttaattaagcagtttaatgacat

SEQ ID NO: 4421602 - DNA, 25 bp, Homo sapien
ggctggttaattaagcagtttaatg

SEQ ID NO: 4421603 - DNA, 25 bp, Homo sapien
tgacatcggcatgggcccagatttc

SEQ ID NO: 4421604 - DNA, 25 bp, Homo sapien
caagtacatccactgcctttcggga

SEQ ID NO: 4421605 - DNA, 25 bp, Homo sapien
cagtcaggagactggaccgggatcc

SEQ ID NO: 4421606 - DNA, 25 bp, Homo sapien
aagagggatctctacgcagtcagga

SEQ ID NO: 4421607 - DNA, 25 bp, Homo sapien
tccttgggaatgtccgtgaagtctc

SEQ ID NO: 4421608 - DNA, 25 bp, Homo sapien
tgggatctcagatcaggttactcaa

SEQ ID NO: 4421609 - DNA, 25 bp, Homo sapien
gtctcttccaatttatagtccactt

SEQ ID NO: 4421610 - DNA, 25 bp, Homo sapien
catgcgtattaggtgtgggatctca

SEQ ID NO: 4421611 - DNA, 25 bp, Homo sapien
agttgtgaggctccatgcgtattag

SEQ ID NO: 4421612 - DNA, 25 bp, Homo sapien
aggatcttctgagccaagagctcaa

SEQ ID NO: 4421613 - DNA, 25 bp, Homo sapien
ctgggcagcaaagcgagatctcatt

SEQ ID NO: 4421614 - DNA, 25 bp, Homo sapien
tgggcagcaaagcgagatctcattt

SEQ ID NO: 4421615 - DNA, 25 bp, Homo sapien
agggaggatcttctgagccaagagc

SEQ ID NO: 4421616 - DNA, 25 bp, Homo sapien
gtcataggcaatagtccatggaagg

SEQ ID NO: 4421617 - DNA, 25 bp, Homo sapien
ttctcccactggaagtttataccca

SEQ ID NO: 4421618 - DNA, 25 bp, Homo sapien
ctgggtttaataggtcataggcaat

SEQ ID NO: 4421619 - DNA, 25 bp, Homo sapien
tggaagtttatacccagaaaagctg

SEQ ID NO: 4421620 - DNA, 25 bp, Homo sapien
cctgttgtctcaatgttgttcccaa

SEQ ID NO: 4421621 - DNA, 25 bp, Homo sapien
tggaacccggatgggatgctcagct

SEQ ID NO: 4421622 - DNA, 25 bp, Homo sapien
tgctcagctggcgacagaaggcttg

SEQ ID NO: 4421623 - DNA, 25 bp, Homo sapien
tgaagacaagcaattagagtcccgt

SEQ ID NO: 4421624 - DNA, 25 bp, Homo sapien
tgctctcatcaaagattcccagggg

SEQ ID NO: 4421625 - DNA, 25 bp, Homo sapien
ggtagatctatggttgcactgggca

SEQ ID NO: 4421626 - DNA, 25 bp, Homo sapien
gcctcgggtggtcgtgagctgggta

SEQ ID NO: 4421627 - DNA, 25 bp, Homo sapien
gggcacctgtctcagcagggcatgg

SEQ ID NO: 4421628 - DNA, 25 bp, Homo sapien
gaaaagggcaactatctctcgcagc

SEQ ID NO: 4421629 - DNA, 25 bp, Homo sapien
cacacagtgtcaagcggaaaagggc

SEQ ID NO: 4421630 - DNA, 25 bp, Homo sapien
tgaagccagtctgaacctccagggt

SEQ ID NO: 4421631 - DNA, 25 bp, Homo sapien
tatagtttatcacgcgttgccctgg

SEQ ID NO: 4421632 - DNA, 25 bp, Homo sapien
gacatggacagagtcgccttgcttc

SEQ ID NO: 4421633 - DNA, 25 bp, Homo sapien
gctatcagggaggacagacatggac

SEQ ID NO: 4421634 - DNA, 25 bp, Homo sapien
tacagccacaacgtactgaccttgg

SEQ ID NO: 4421635 - DNA, 25 bp, Homo sapien
gaaggacgatgttgcttggctctgc

SEQ ID NO: 4421636 - DNA, 25 bp, Homo sapien
gcacattgcagaacacagcagccca

SEQ ID NO: 4421637 - DNA, 25 bp, Homo sapien
gcccacagccgcccgtccacggctg

SEQ ID NO: 4421638 - DNA, 25 bp, Homo sapien
ccctttccagggatgttcctggaag

SEQ ID NO: 4421639 - DNA, 25 bp, Homo sapien
tgcacattgcagaacacagcagccc

SEQ ID NO: 4421640 - DNA, 25 bp, Homo sapien
gaagtgggtgacttgactagtccaa

SEQ ID NO: 4421641 - DNA, 25 bp, Homo sapien
gtgggtgacttgactagtccaatac

SEQ ID NO: 4421642 - DNA, 25 bp, Homo sapien
ccgtgatgaagtgggtgacttgact

SEQ ID NO: 4421643 - DNA, 25 bp, Homo sapien
cgtgatgaagtgggtgacttgacta

SEQ ID NO: 4421644 - DNA, 25 bp, Homo sapien
agttatagagtacttcacccaacaa

SEQ ID NO: 4421645 - DNA, 25 bp, Homo sapien
ccgagaaataccatatactggctca

SEQ ID NO: 4421646 - DNA, 25 bp, Homo sapien
catggaacatccaccgagaaatacc

SEQ ID NO: 4421647 - DNA, 25 bp, Homo sapien
atagagtacttcacccaacaacagg

SEQ ID NO: 4421648 - DNA, 25 bp, Homo sapien
cagatggcaacaccccatgatgatg

SEQ ID NO: 4421649 - DNA, 25 bp, Homo sapien
gatggcaacaccccatgatgatgag

SEQ ID NO: 4421650 - DNA, 25 bp, Homo sapien
tggcaacaccccatgatgatgaggc

SEQ ID NO: 4421651 - DNA, 25 bp, Homo sapien
cacacccaaaaagacgaaggagcag

SEQ ID NO: 4421652 - DNA, 25 bp, Homo sapien
gcctccatggcagcgagctgggcag

SEQ ID NO: 4421653 - DNA, 25 bp, Homo sapien
caggcggttgttgacagctcctgat

SEQ ID NO: 4421654 - DNA, 25 bp, Homo sapien
cggttgttgacagctcctgattttt

SEQ ID NO: 4421655 - DNA, 25 bp, Homo sapien
tgttgacagctcctgatttttcatc

SEQ ID NO: 4421656 - DNA, 25 bp, Homo sapien
ggcggttgttgacagctcctgattt

SEQ ID NO: 4421657 - DNA, 25 bp, Homo sapien
tcacacaatccttgattgcaagcaa

SEQ ID NO: 4421658 - DNA, 25 bp, Homo sapien
ctagaaaatggtgccgacccagggt

SEQ ID NO: 4421659 - DNA, 25 bp, Homo sapien
actagaaaatggtgccgacccaggg

SEQ ID NO: 4421660 - DNA, 25 bp, Homo sapien
ccttgattgcaagcaactagaaaat

SEQ ID NO: 4421661 - DNA, 25 bp, Homo sapien
aactagaaaccaggcagaactaggt

SEQ ID NO: 4421662 - DNA, 25 bp, Homo sapien
aaactagaaaccaggcagaactagg

SEQ ID NO: 4421663 - DNA, 25 bp, Homo sapien
tcctcacctccattgccaaaaacta

SEQ ID NO: 4421664 - DNA, 25 bp, Homo sapien
cacctccattgccaaaaactagaaa

SEQ ID NO: 4421665 - DNA, 25 bp, Homo sapien
tctcccagaatagcccagcaagaag

SEQ ID NO: 4421666 - DNA, 25 bp, Homo sapien
tgccctgtgcgtttggaacagtgct

SEQ ID NO: 4421667 - DNA, 25 bp, Homo sapien
tcctcctgcagtgaaggctttttct

SEQ ID NO: 4421668 - DNA, 25 bp, Homo sapien
gctctgactgagctgaaacggtgtg

SEQ ID NO: 4421669 - DNA, 25 bp, Homo sapien
gaaccttagaaagcctcatgtgcag

SEQ ID NO: 4421670 - DNA, 25 bp, Homo sapien
tctggagccccgcaaatggtcggag

SEQ ID NO: 4421671 - DNA, 25 bp, Homo sapien
tcttctggcagtaggatggcaccca

SEQ ID NO: 4421672 - DNA, 25 bp, Homo sapien
gccatgcacgggagtgccctgtgaa

SEQ ID NO: 4421673 - DNA, 25 bp, Homo sapien
caaatcccagatgggcagccttctc

SEQ ID NO: 4421674 - DNA, 25 bp, Homo sapien
cctgttgctctgatttatgggccac

SEQ ID NO: 4421675 - DNA, 25 bp, Homo sapien
cactcagcggcatcaggagaaacca

SEQ ID NO: 4421676 - DNA, 25 bp, Homo sapien
tgaggaagaattcaccaggaccttg

SEQ ID NO: 4421677 - DNA, 25 bp, Homo sapien
ttgctctgcaccaccatgaggtaga

SEQ ID NO: 4421678 - DNA, 25 bp, Homo sapien
cttgctctgcaccaccatgaggtag

SEQ ID NO: 4421679 - DNA, 25 bp, Homo sapien
tgctctgcaccaccatgaggtagaa

SEQ ID NO: 4421680 - DNA, 25 bp, Homo sapien
tgtcacctagctctctgcacttggg

SEQ ID NO: 4421681 - DNA, 25 bp, Homo sapien
tgacatctggtgtgtcacctagctc

SEQ ID NO: 4421682 - DNA, 25 bp, Homo sapien
cagggccatcgtgagacagcatatt

SEQ ID NO: 4421683 - DNA, 25 bp, Homo sapien
acagcatattgggaaatgcctgcag

SEQ ID NO: 4421684 - DNA, 25 bp, Homo sapien
gctaaaatcccagttgccagataag

SEQ ID NO: 4421685 - DNA, 25 bp, Homo sapien
tgtttggacattcggagaccctcac

SEQ ID NO: 4421686 - DNA, 25 bp, Homo sapien
tctccaggcttaatgaagggactgc

SEQ ID NO: 4421687 - DNA, 25 bp, Homo sapien
cagcctcacactccgggtgacaggg

SEQ ID NO: 4421688 - DNA, 25 bp, Homo sapien
ccattcgtgagctccgggagggtac

SEQ ID NO: 4421689 - DNA, 25 bp, Homo sapien
ggtgctttggtgaatgcgctggatg

SEQ ID NO: 4421690 - DNA, 25 bp, Homo sapien
aattgtgcaaatggccctcaggtgt

SEQ ID NO: 4421691 - DNA, 25 bp, Homo sapien
tggagtcaggtggacgggattttta

SEQ ID NO: 4421692 - DNA, 25 bp, Homo sapien
gaagaaatgatatcaagcctcgcgc

SEQ ID NO: 4421693 - DNA, 25 bp, Homo sapien
caaatagtgtcgtggaaattccaac

SEQ ID NO: 4421694 - DNA, 25 bp, Homo sapien
cccgagtccctaaacagcagaggag

SEQ ID NO: 4421695 - DNA, 25 bp, Homo sapien
gtccccttgggtggagtcgtcctca

SEQ ID NO: 4421696 - DNA, 25 bp, Homo sapien
tcttgggaaccaatgatcctttctc

SEQ ID NO: 4421697 - DNA, 25 bp, Homo sapien
tgctctacggcctcggagcactgca

SEQ ID NO: 4421698 - DNA, 25 bp, Homo sapien
tggcatgtggtttgagtttgcaagt

SEQ ID NO: 4421699 - DNA, 25 bp, Homo sapien
cttccacggaatggctcctgttctt

SEQ ID NO: 4421700 - DNA, 25 bp, Homo sapien
ccaaggacgcatacacagggctatt

SEQ ID NO: 4421701 - DNA, 25 bp, Homo sapien
atttccagccgtggctccaagcagc

SEQ ID NO: 4421702 - DNA, 25 bp, Homo sapien
tgttgggaggccatttccagccgtg

SEQ ID NO: 4421703 - DNA, 25 bp, Homo sapien
caaattaaaggcacatctgttggga

SEQ ID NO: 4421704 - DNA, 25 bp, Homo sapien
agtggtccgattagagccagccacc

SEQ ID NO: 4421705 - DNA, 25 bp, Homo sapien
tccacaccaagtggtccgattagag

SEQ ID NO: 4421706 - DNA, 25 bp, Homo sapien
cgtctccacaccaagtggtccgatt

SEQ ID NO: 4421707 - DNA, 25 bp, Homo sapien
accaagtggtccgattagagccagc

SEQ ID NO: 4421708 - DNA, 25 bp, Homo sapien
ctctcgtgcttccttcctagaagtc

SEQ ID NO: 4421709 - DNA, 25 bp, Homo sapien
ctcttccatgtggttacaattggcc

SEQ ID NO: 4421710 - DNA, 25 bp, Homo sapien
tccatgtggttacaattggcccttt

SEQ ID NO: 4421711 - DNA, 25 bp, Homo sapien
tgtggttacaattggccctttgagg

SEQ ID NO: 4421712 - DNA, 25 bp, Homo sapien
gctcatctgtaggaacaatgcaaac

SEQ ID NO: 4421713 - DNA, 25 bp, Homo sapien
tgctcatctgtaggaacaatgcaaa

SEQ ID NO: 4421714 - DNA, 25 bp, Homo sapien
gtgctcatctgtaggaacaatgcaa

SEQ ID NO: 4421715 - DNA, 25 bp, Homo sapien
tcctcacgcagagggagcctgactt

SEQ ID NO: 4421716 - DNA, 25 bp, Homo sapien
tgagcccctccatcaaattcgctat

SEQ ID NO: 4421717 - DNA, 25 bp, Homo sapien
taagccaggaactttccacccaatc

SEQ ID NO: 4421718 - DNA, 25 bp, Homo sapien
gctgatgtgtgagtgcctcttcctc

SEQ ID NO: 4421719 - DNA, 25 bp, Homo sapien
gaacaggcacgtccgggtgatgctc

SEQ ID NO: 4421720 - DNA, 25 bp, Homo sapien
aggcacgtccgggtgatgctcactg

SEQ ID NO: 4421721 - DNA, 25 bp, Homo sapien
cacgtccgggtgatgctcactgaga

SEQ ID NO: 4421722 - DNA, 25 bp, Homo sapien
agaacaggcacgtccgggtgatgct

SEQ ID NO: 4421723 - DNA, 25 bp, Homo sapien
gagcagaagcattttcagggtaaga

SEQ ID NO: 4421724 - DNA, 25 bp, Homo sapien
ggaagctgtgctcccccggaagcgc

SEQ ID NO: 4421725 - DNA, 25 bp, Homo sapien
cagagcacaggccttgagcagaagc

SEQ ID NO: 4421726 - DNA, 25 bp, Homo sapien
cattttcagggtaagagttgggcct

SEQ ID NO: 4421727 - DNA, 25 bp, Homo sapien
gcctgctggcactgctagaggaaac

SEQ ID NO: 4421728 - DNA, 25 bp, Homo sapien
agcctgctggcactgctagaggaaa

SEQ ID NO: 4421729 - DNA, 25 bp, Homo sapien
gtcgttttctctccacatccctggg

SEQ ID NO: 4421730 - DNA, 25 bp, Homo sapien
cgttttctctccacatccctggggt

SEQ ID NO: 4421731 - DNA, 25 bp, Homo sapien
ctattgtcgttttctctccacatcc

SEQ ID NO: 4421732 - DNA, 25 bp, Homo sapien
ttgtcgttttctctccacatccctg

SEQ ID NO: 4421733 - DNA, 25 bp, Homo sapien
gagctctgggagagtagggtccctg

SEQ ID NO: 4421734 - DNA, 25 bp, Homo sapien
aggagctctgggagagtagggtccc

SEQ ID NO: 4421735 - DNA, 25 bp, Homo sapien
agctctgggagagtagggtccctgc

SEQ ID NO: 4421736 - DNA, 25 bp, Homo sapien
ggagctctgggagagtagggtccct

SEQ ID NO: 4421737 - DNA, 25 bp, Homo sapien
tgtgccgccgctcaatgtcagggtt

SEQ ID NO: 4421738 - DNA, 25 bp, Homo sapien
gcctggctcccggtcaacaggatgt

SEQ ID NO: 4421739 - DNA, 25 bp, Homo sapien
tcatccagatgttccccgctggctg

SEQ ID NO: 4421740 - DNA, 25 bp, Homo sapien
ccaggccaggtggacatattctgta

SEQ ID NO: 4421741 - DNA, 25 bp, Homo sapien
tccagaccagtaggagcaagagggt

SEQ ID NO: 4421742 - DNA, 25 bp, Homo sapien
caagagggtgacttgtgcttgtacc

SEQ ID NO: 4421743 - DNA, 25 bp, Homo sapien
tttctagggtgcttccagaccagta

SEQ ID NO: 4421744 - DNA, 25 bp, Homo sapien
tgtgcttgtacctctgaccatgaag

SEQ ID NO: 4421745 - DNA, 25 bp, Homo sapien
aggcctgggtcttgcgtcatcaaac

SEQ ID NO: 4421746 - DNA, 25 bp, Homo sapien
ttttgcttgtaccaccctgcactgg

SEQ ID NO: 4421747 - DNA, 25 bp, Homo sapien
aaggcttcctcaacactggtccgct

SEQ ID NO: 4421748 - DNA, 25 bp, Homo sapien
catcaaacattgctcacattccggg

SEQ ID NO: 4421749 - DNA, 25 bp, Homo sapien
gcccacacaatgaagtggctgtacc

SEQ ID NO: 4421750 - DNA, 25 bp, Homo sapien
cccacacaatgaagtggctgtaccc

SEQ ID NO: 4421751 - DNA, 25 bp, Homo sapien
ccacacaatgaagtggctgtaccca

SEQ ID NO: 4421752 - DNA, 25 bp, Homo sapien
cacacaatgaagtggctgtacccat

SEQ ID NO: 4421753 - DNA, 25 bp, Homo sapien
ttctagcagaccgaggatggaggct

SEQ ID NO: 4421754 - DNA, 25 bp, Homo sapien
aggctgcgtgctcagattcctgggc

SEQ ID NO: 4421755 - DNA, 25 bp, Homo sapien
gggcagccatccctaggatcttggt

SEQ ID NO: 4421756 - DNA, 25 bp, Homo sapien
cagctggctcatttgcatgtggccc

SEQ ID NO: 4421757 - DNA, 25 bp, Homo sapien
ttagtgaggagggttcatacttgcg

SEQ ID NO: 4421758 - DNA, 25 bp, Homo sapien
caagggcaggactgatacgtctggt

SEQ ID NO: 4421759 - DNA, 25 bp, Homo sapien
gtcggaaacactctcccaagggcag

SEQ ID NO: 4421760 - DNA, 25 bp, Homo sapien
gactgatacgtctggtccgacagcc

SEQ ID NO: 4421761 - DNA, 25 bp, Homo sapien
tcagttagaaaaccgcctgcccgat

SEQ ID NO: 4421762 - DNA, 25 bp, Homo sapien
gctggaatcccatcgcggcttcttg

SEQ ID NO: 4421763 - DNA, 25 bp, Homo sapien
caaccgcggtcgtgctgagcttgtg

SEQ ID NO: 4421764 - DNA, 25 bp, Homo sapien
cgatgtttcccaagcgcaccaggct

SEQ ID NO: 4421765 - DNA, 25 bp, Homo sapien
tcctggcgttccgatccccaggtta

SEQ ID NO: 4421766 - DNA, 25 bp, Homo sapien
ggcagacttcgcgtcttgctctgtc

SEQ ID NO: 4421767 - DNA, 25 bp, Homo sapien
ccccacgcatgtgttttgagggagc

SEQ ID NO: 4421768 - DNA, 25 bp, Homo sapien
atgagcctcttaggggcagacttcg

SEQ ID NO: 4421769 - DNA, 25 bp, Homo sapien
ttgctctgtctctgatgcgtcctcg

SEQ ID NO: 4421770 - DNA, 25 bp, Homo sapien
gtgacgggaccctggacaagccaaa

SEQ ID NO: 4421771 - DNA, 25 bp, Homo sapien
ctgagtttctgaggcgcctctgccg

SEQ ID NO: 4421772 - DNA, 25 bp, Homo sapien
cctggacaagccaaagcggtgagtg

SEQ ID NO: 4421773 - DNA, 25 bp, Homo sapien
gaccctggacaagccaaagcggtga

SEQ ID NO: 4421774 - DNA, 25 bp, Homo sapien
ctcctccaagacagtccgactatac

SEQ ID NO: 4421775 - DNA, 25 bp, Homo sapien
ccaagacagtccgactatacccagg

SEQ ID NO: 4421776 - DNA, 25 bp, Homo sapien
aagacagtccgactatacccaggac

SEQ ID NO: 4421777 - DNA, 25 bp, Homo sapien
gacagtccgactatacccaggactg

SEQ ID NO: 4421778 - DNA, 25 bp, Homo sapien
ttcagataaaggttacccaaatagc

SEQ ID NO: 4421779 - DNA, 25 bp, Homo sapien
gataaaggttacccaaatagctcca

SEQ ID NO: 4421780 - DNA, 25 bp, Homo sapien
cagataaaggttacccaaatagctc

SEQ ID NO: 4421781 - DNA, 25 bp, Homo sapien
ataaaggttacccaaatagctccag

SEQ ID NO: 4421782 - DNA, 25 bp, Homo sapien
taatagcgtgctgcctatccacacg

SEQ ID NO: 4421783 - DNA, 25 bp, Homo sapien
ggactctgttctctgcccgatgcct

SEQ ID NO: 4421784 - DNA, 25 bp, Homo sapien
gctcctttgggagtttgcgccatcc

SEQ ID NO: 4421785 - DNA, 25 bp, Homo sapien
tgagcatctggcctcggacgatcct

SEQ ID NO: 4421786 - DNA, 25 bp, Homo sapien
gagcagcccggcaaccaccatgctc

SEQ ID NO: 4421787 - DNA, 25 bp, Homo sapien
cactgggggaggttcaaccagcttt

SEQ ID NO: 4421788 - DNA, 25 bp, Homo sapien
gcactgggggaggttcaaccagctt

SEQ ID NO: 4421789 - DNA, 25 bp, Homo sapien
agcccggcaaccaccatgctcagac

SEQ ID NO: 4421790 - DNA, 25 bp, Homo sapien
ttcgtacaacctgcagatatcagca

SEQ ID NO: 4421791 - DNA, 25 bp, Homo sapien
acctgcagatatcagcaactggacc

SEQ ID NO: 4421792 - DNA, 25 bp, Homo sapien
cagcccttcgtacaacctgcagata

SEQ ID NO: 4421793 - DNA, 25 bp, Homo sapien
aagcagcccttcgtacaacctgcag

SEQ ID NO: 4421794 - DNA, 25 bp, Homo sapien
tgccggcaccgttcccctcttcaga

SEQ ID NO: 4421795 - DNA, 25 bp, Homo sapien
cccctcttcagatggaccagggatc

SEQ ID NO: 4421796 - DNA, 25 bp, Homo sapien
gttcccctcttcagatggaccaggg

SEQ ID NO: 4421797 - DNA, 25 bp, Homo sapien
ggcaccgttcccctcttcagatgga

SEQ ID NO: 4421798 - DNA, 25 bp, Homo sapien
gggatcaaaggtgcgctgggcctga

SEQ ID NO: 4421799 - DNA, 25 bp, Homo sapien
gaggaactctaggagacagggatca

SEQ ID NO: 4421800 - DNA, 25 bp, Homo sapien
gcctcctggaggaactctaggagac

SEQ ID NO: 4421801 - DNA, 25 bp, Homo sapien
tgggcctgacggagcctgtccacct

SEQ ID NO: 4421802 - DNA, 25 bp, Homo sapien
aaatgtccttccgtattgacttgct

SEQ ID NO: 4421803 - DNA, 25 bp, Homo sapien
tgcttgattcttgagtcctgctggg

SEQ ID NO: 4421804 - DNA, 25 bp, Homo sapien
gggacaccatctcggtcctgccaag

SEQ ID NO: 4421805 - DNA, 25 bp, Homo sapien
ggtcaagagcatatataaaaatgtc

SEQ ID NO: 4421806 - DNA, 25 bp, Homo sapien
cctgagtcagctgtgagatttggcc

SEQ ID NO: 4421807 - DNA, 25 bp, Homo sapien
acaggtagactatcaagcgggaatc

SEQ ID NO: 4421808 - DNA, 25 bp, Homo sapien
cacacccgagggttttgacaggtag

SEQ ID NO: 4421809 - DNA, 25 bp, Homo sapien
tacacgtggggtgaaaaagtgcttc

SEQ ID NO: 4421810 - DNA, 25 bp, Homo sapien
gcatcatgggcagagatcctacagc

SEQ ID NO: 4421811 - DNA, 25 bp, Homo sapien
gaaggataaacagaggatgaaggct

SEQ ID NO: 4421812 - DNA, 25 bp, Homo sapien
tgtgtgatgcatgagaaggataaac

SEQ ID NO: 4421813 - DNA, 25 bp, Homo sapien
tgaaggctcagagcatgagggtttg

SEQ ID NO: 4421814 - DNA, 25 bp, Homo sapien
cctgcgtgtctgttccacataatgg

SEQ ID NO: 4421815 - DNA, 25 bp, Homo sapien
cattgatcaatgtgttcccaggtgt

SEQ ID NO: 4421816 - DNA, 25 bp, Homo sapien
cgggtgctcattggtgtgaccgccc

SEQ ID NO: 4421817 - DNA, 25 bp, Homo sapien
accaaggtgatactccgggtgctca

SEQ ID NO: 4421818 - DNA, 25 bp, Homo sapien
cctgctaaagcgagacctcaaaaaa

SEQ ID NO: 4421819 - DNA, 25 bp, Homo sapien
agccctgctaaagcgagacctcaaa

SEQ ID NO: 4421820 - DNA, 25 bp, Homo sapien
ccctgctaaagcgagacctcaaaaa

SEQ ID NO: 4421821 - DNA, 25 bp, Homo sapien
gccctgctaaagcgagacctcaaaa

SEQ ID NO: 4421822 - DNA, 25 bp, Homo sapien
acttcatcgttgtgcagaatgaggt

SEQ ID NO: 4421823 - DNA, 25 bp, Homo sapien
tcagctggagcagcaccagctactg

SEQ ID NO: 4421824 - DNA, 25 bp, Homo sapien
tcaaaaacccaaagcccatgtcatc

SEQ ID NO: 4421825 - DNA, 25 bp, Homo sapien
agctggagcagcaccagctactgga

SEQ ID NO: 4421826 - DNA, 25 bp, Homo sapien
catgtcatcatcagatcctcggatt

SEQ ID NO: 4421827 - DNA, 25 bp, Homo sapien
gctcctgatggctgaataagtcact

SEQ ID NO: 4421828 - DNA, 25 bp, Homo sapien
tccagatgagggttagcagtaacac

SEQ ID NO: 4421829 - DNA, 25 bp, Homo sapien
tattacttccaaactagggtcttgc

SEQ ID NO: 4421830 - DNA, 25 bp, Homo sapien
cacctagatgaagggcactgggcag

SEQ ID NO: 4421831 - DNA, 25 bp, Homo sapien
cagcagcctatggtcccaacactta

SEQ ID NO: 4421832 - DNA, 25 bp, Homo sapien
tggtccgcagagctcttggaagaca

SEQ ID NO: 4421833 - DNA, 25 bp, Homo sapien
tctccctcgcctggactgcctgttc

SEQ ID NO: 4421834 - DNA, 25 bp, Homo sapien
gggcagctggtggacctttgctcct

SEQ ID NO: 4421835 - DNA, 25 bp, Homo sapien
tctggtatttatcggggtgaagccg

SEQ ID NO: 4421836 - DNA, 25 bp, Homo sapien
tatttatcggggtgaagccgtgaag

SEQ ID NO: 4421837 - DNA, 25 bp, Homo sapien
cggggtgaagccgtgaagggatcct

SEQ ID NO: 4421838 - DNA, 25 bp, Homo sapien
ctgtgtcatctggtatttatcgggg

SEQ ID NO: 4421839 - DNA, 25 bp, Homo sapien
tggttccttctgtaaaagcaaggct

SEQ ID NO: 4421840 - DNA, 25 bp, Homo sapien
cagtcataaagaatttacgagaggc

SEQ ID NO: 4421841 - DNA, 25 bp, Homo sapien
caactgttgccgaaacaaaacgtgg

SEQ ID NO: 4421842 - DNA, 25 bp, Homo sapien
ggcagttctgactatgaggtctgaa

SEQ ID NO: 4421843 - DNA, 25 bp, Homo sapien
aatttgtagggtgagcatatcaacc

SEQ ID NO: 4421844 - DNA, 25 bp, Homo sapien
tcttgataaccttcagacgatttta

SEQ ID NO: 4421845 - DNA, 25 bp, Homo sapien
cttgataaccttcagacgattttac

SEQ ID NO: 4421846 - DNA, 25 bp, Homo sapien
tcacccatgcacctgaaaactcaat

SEQ ID NO: 4421847 - DNA, 25 bp, Homo sapien
catctcacccatgcacctgaaaact

SEQ ID NO: 4421848 - DNA, 25 bp, Homo sapien
cccatgcacctgaaaactcaatcat

SEQ ID NO: 4421849 - DNA, 25 bp, Homo sapien
tctcacccatgcacctgaaaactca

SEQ ID NO: 4421850 - DNA, 25 bp, Homo sapien
ttcttttcagtcttgtcctccactt

SEQ ID NO: 4421851 - DNA, 25 bp, Homo sapien
gaatgactccttggcggtttcccag

SEQ ID NO: 4421852 - DNA, 25 bp, Homo sapien
cagcggctcccgtctctgggatttt

SEQ ID NO: 4421853 - DNA, 25 bp, Homo sapien
ttcttccaacgctgtgtgccaggaa

SEQ ID NO: 4421854 - DNA, 25 bp, Homo sapien
ttacagtagtcagcgggcaccggtt

SEQ ID NO: 4421855 - DNA, 25 bp, Homo sapien
aggagatgtttttgagagattatgt

SEQ ID NO: 4421856 - DNA, 25 bp, Homo sapien
catctaaaggggagatgttcagaaa

SEQ ID NO: 4421857 - DNA, 25 bp, Homo sapien
gagatgtttttgagagattatgtcg

SEQ ID NO: 4421858 - DNA, 25 bp, Homo sapien
taaaggggagatgttcagaaaactg

SEQ ID NO: 4421859 - DNA, 25 bp, Homo sapien
cagttactattctctgcacctgaaa

SEQ ID NO: 4421860 - DNA, 25 bp, Homo sapien
taccaacgaggagtcatcagttccc

SEQ ID NO: 4421861 - DNA, 25 bp, Homo sapien
ttggacagggcagacgaccgtacca

SEQ ID NO: 4421862 - DNA, 25 bp, Homo sapien
ctcaagaaccccacgttggacaggg

SEQ ID NO: 4421863 - DNA, 25 bp, Homo sapien
gtagagttgcggttttgggatgttg

SEQ ID NO: 4421864 - DNA, 25 bp, Homo sapien
acctctgccgccctacaggcacatg

SEQ ID NO: 4421865 - DNA, 25 bp, Homo sapien
ctctgccgccctacaggcacatgtt

SEQ ID NO: 4421866 - DNA, 25 bp, Homo sapien
agttgcggttttgggatgttggcca

SEQ ID NO: 4421867 - DNA, 25 bp, Homo sapien
ctgtggctgcaggcagcaccactgc

SEQ ID NO: 4421868 - DNA, 25 bp, Homo sapien
ggcagcaccactgcctccatgccca

SEQ ID NO: 4421869 - DNA, 25 bp, Homo sapien
gcaggcagcaccactgcctccatgc

SEQ ID NO: 4421870 - DNA, 25 bp, Homo sapien
tgtggctgcaggcagcaccactgcc

SEQ ID NO: 4421871 - DNA, 25 bp, Homo sapien
ccggtgtcatacttagacggcatac

SEQ ID NO: 4421872 - DNA, 25 bp, Homo sapien
ctgagaagcaggtccggtgtcatac

SEQ ID NO: 4421873 - DNA, 25 bp, Homo sapien
cggtgtcatacttagacggcatacc

SEQ ID NO: 4421874 - DNA, 25 bp, Homo sapien
gagaagcaggtccggtgtcatactt

SEQ ID NO: 4421875 - DNA, 25 bp, Homo sapien
agtggctctctcaagttcactgaga

SEQ ID NO: 4421876 - DNA, 25 bp, Homo sapien
gaactgcctgtcctgctagtagaaa

SEQ ID NO: 4421877 - DNA, 25 bp, Homo sapien
ggcatgaactgcctgtcctgctagt

SEQ ID NO: 4421878 - DNA, 25 bp, Homo sapien
gaaattccaaacttgggactgacag

SEQ ID NO: 4421879 - DNA, 25 bp, Homo sapien
tcctgtttctgtgcgaatgggaagc

SEQ ID NO: 4421880 - DNA, 25 bp, Homo sapien
gtttctgtgcgaatgggaagcacac

SEQ ID NO: 4421881 - DNA, 25 bp, Homo sapien
cctcctgtttctgtgcgaatgggaa

SEQ ID NO: 4421882 - DNA, 25 bp, Homo sapien
gtcctcctgtttctgtgcgaatggg

SEQ ID NO: 4421883 - DNA, 25 bp, Homo sapien
tgttacttcccactccttcgatgtg

SEQ ID NO: 4421884 - DNA, 25 bp, Homo sapien
cttcgatgtgacatagccacctgca

SEQ ID NO: 4421885 - DNA, 25 bp, Homo sapien
gcatttgtccgttctgagtctccca

SEQ ID NO: 4421886 - DNA, 25 bp, Homo sapien
ccacctttgatagtgagttccgtga

SEQ ID NO: 4421887 - DNA, 25 bp, Homo sapien
tactcatgctatccgtctcagacag

SEQ ID NO: 4421888 - DNA, 25 bp, Homo sapien
cataacaccctagagcaggctcaaa

SEQ ID NO: 4421889 - DNA, 25 bp, Homo sapien
tggcagacacatatgggaatcagtt

SEQ ID NO: 4421890 - DNA, 25 bp, Homo sapien
gacagtattgaaacgatctccttgc

SEQ ID NO: 4421891 - DNA, 25 bp, Homo sapien
gaagatcagaaacacggcggaacaa

SEQ ID NO: 4421892 - DNA, 25 bp, Homo sapien
ggaacaacaagcacgcaggacaagt

SEQ ID NO: 4421893 - DNA, 25 bp, Homo sapien
tcaagttctgcctgtacatcggctg

SEQ ID NO: 4421894 - DNA, 25 bp, Homo sapien
tctagaggacgatggatcccagatc

SEQ ID NO: 4421895 - DNA, 25 bp, Homo sapien
caggcgaccacagaactcagccaga

SEQ ID NO: 4421896 - DNA, 25 bp, Homo sapien
aggcgaccacagaactcagccagag

SEQ ID NO: 4421897 - DNA, 25 bp, Homo sapien
gcaggcgaccacagaactcagccag

SEQ ID NO: 4421898 - DNA, 25 bp, Homo sapien
cagcacgagtgagttcccagactcc

SEQ ID NO: 4421899 - DNA, 25 bp, Homo sapien
aaagagattttcattctgtgaactc

SEQ ID NO: 4421900 - DNA, 25 bp, Homo sapien
gaaaccatgaggatggatgaaagag

SEQ ID NO: 4421901 - DNA, 25 bp, Homo sapien
attctgtgaactccagcacgagtga

SEQ ID NO: 4421902 - DNA, 25 bp, Homo sapien
gactcctgacccactatagtaccag

SEQ ID NO: 4421903 - DNA, 25 bp, Homo sapien
tatagtaccagacaagggtgacagt

SEQ ID NO: 4421904 - DNA, 25 bp, Homo sapien
ggctgtcagttcctctcagcgttgc

SEQ ID NO: 4421905 - DNA, 25 bp, Homo sapien
tcctgttggtcagcgtctcccttct

SEQ ID NO: 4421906 - DNA, 25 bp, Homo sapien
cctgtcacaaaggaggtgctcaaaa

SEQ ID NO: 4421907 - DNA, 25 bp, Homo sapien
catgatgcatagttgtacctgtcac

SEQ ID NO: 4421908 - DNA, 25 bp, Homo sapien
tctgaactggctgccatggagtcac

SEQ ID NO: 4421909 - DNA, 25 bp, Homo sapien
gctacagctgatcggaatgaagtcg

SEQ ID NO: 4421910 - DNA, 25 bp, Homo sapien
cacccctttactcttcatggcttgt

SEQ ID NO: 4421911 - DNA, 25 bp, Homo sapien
tttaggcttgaaagaaggtactgca

SEQ ID NO: 4421912 - DNA, 25 bp, Homo sapien
cagagtcaaggtagtataaggtagt

SEQ ID NO: 4421913 - DNA, 25 bp, Homo sapien
catggcttgtccgtaatcaagtaac

SEQ ID NO: 4421914 - DNA, 25 bp, Homo sapien
tggcccaaagtactggccagcctgg

SEQ ID NO: 4421915 - DNA, 25 bp, Homo sapien
taacatttttgggtctagcagattg

SEQ ID NO: 4421916 - DNA, 25 bp, Homo sapien
tgctcaacttcaccggtagtcaggg

SEQ ID NO: 4421917 - DNA, 25 bp, Homo sapien
gatgctcaacttcaccggtagtcag

SEQ ID NO: 4421918 - DNA, 25 bp, Homo sapien
tccgtgacactgtggaagacaggct

SEQ ID NO: 4421919 - DNA, 25 bp, Homo sapien
catttgtaatgatccatgcctggga

SEQ ID NO: 4421920 - DNA, 25 bp, Homo sapien
gtcagttttgctccagagggaatcc

SEQ ID NO: 4421921 - DNA, 25 bp, Homo sapien
tcactaacctgtgacctgggtcagt

SEQ ID NO: 4421922 - DNA, 25 bp, Homo sapien
cgaatctgatttaccgagatggaag

SEQ ID NO: 4421923 - DNA, 25 bp, Homo sapien
gcctcggctcaaacagcttgattcc

SEQ ID NO: 4421924 - DNA, 25 bp, Homo sapien
ttctccccagttatgggcaggcgaa

SEQ ID NO: 4421925 - DNA, 25 bp, Homo sapien
tcggctcaaacagcttgattccaaa

SEQ ID NO: 4421926 - DNA, 25 bp, Homo sapien
gctgcccggccttggcgcggacctg

SEQ ID NO: 4421927 - DNA, 25 bp, Homo sapien
gcggccactccgcaggtctcccgcc

SEQ ID NO: 4421928 - DNA, 25 bp, Homo sapien
tggcgcggacctggagtgcggccac

SEQ ID NO: 4421929 - DNA, 25 bp, Homo sapien
gactgtccacgcgtcctcaccactg

SEQ ID NO: 4421930 - DNA, 25 bp, Homo sapien
gtctgtgcgcgcttgcgcctggcta

SEQ ID NO: 4421931 - DNA, 25 bp, Homo sapien
ggatccggaggcgattctgcgcggg

SEQ ID NO: 4421932 - DNA, 25 bp, Homo sapien
gcgcttgctcggctccaacacagtt

SEQ ID NO: 4421933 - DNA, 25 bp, Homo sapien
ttctgcgcgggtgtctccgggtggg

SEQ ID NO: 4421934 - DNA, 25 bp, Homo sapien
ccggtaagggctgcaaaaggattag

SEQ ID NO: 4421935 - DNA, 25 bp, Homo sapien
tgtttcggaagcagaaacagtcccc

SEQ ID NO: 4421936 - DNA, 25 bp, Homo sapien
gccgagggaatttcttttcgcagaa

SEQ ID NO: 4421937 - DNA, 25 bp, Homo sapien
attagggcgggtctcctctagccag

SEQ ID NO: 4421938 - DNA, 25 bp, Homo sapien
ggggcagaccgaggggataggcaat

SEQ ID NO: 4421939 - DNA, 25 bp, Homo sapien
gggataggcaatgggcgccccctct

SEQ ID NO: 4421940 - DNA, 25 bp, Homo sapien
cagaccgaggggataggcaatgggc

SEQ ID NO: 4421941 - DNA, 25 bp, Homo sapien
tgcccactgctcccgaaggtggagg

SEQ ID NO: 4421942 - DNA, 25 bp, Homo sapien
cggccggcgactgagggcttctttc

SEQ ID NO: 4421943 - DNA, 25 bp, Homo sapien
aactcgaggtctgggttcttgcaga

SEQ ID NO: 4421944 - DNA, 25 bp, Homo sapien
ctcgaggtctgggttcttgcagatc

SEQ ID NO: 4421945 - DNA, 25 bp, Homo sapien
cgaggtctgggttcttgcagatcat

SEQ ID NO: 4421946 - DNA, 25 bp, Homo sapien
tcaaactcgaggtctgggttcttgc

SEQ ID NO: 4421947 - DNA, 25 bp, Homo sapien
gggccgccgaagtagaagtcatctt

SEQ ID NO: 4421948 - DNA, 25 bp, Homo sapien
gctccagcttctcgcgggcggagaa

SEQ ID NO: 4421949 - DNA, 25 bp, Homo sapien
gcagctcaaacttcttccagatgtc

SEQ ID NO: 4421950 - DNA, 25 bp, Homo sapien
tcggagctgtgctccgcgaagccac

SEQ ID NO: 4421951 - DNA, 25 bp, Homo sapien
ggaagaccacggcgggatccacgca

SEQ ID NO: 4421952 - DNA, 25 bp, Homo sapien
gatccacgcactcggcggccgggtg

SEQ ID NO: 4421953 - DNA, 25 bp, Homo sapien
tggctcgcgcttgttcacgggaaag

SEQ ID NO: 4421954 - DNA, 25 bp, Homo sapien
cgctggctcgcgcttgttcacggga

SEQ ID NO: 4421955 - DNA, 25 bp, Homo sapien
tctccggaggtactgagggccttgt

SEQ ID NO: 4421956 - DNA, 25 bp, Homo sapien
gctcagggtgtcctctccggaggta

SEQ ID NO: 4421957 - DNA, 25 bp, Homo sapien
ctgaatcgctcagggtgtcctctcc

SEQ ID NO: 4421958 - DNA, 25 bp, Homo sapien
gggccttgtggtcgccgccgctggt

SEQ ID NO: 4421959 - DNA, 25 bp, Homo sapien
cgcgacccggggtccagtgccccag

SEQ ID NO: 4421960 - DNA, 25 bp, Homo sapien
gagcactaacaaaggggacgcgacc

SEQ ID NO: 4421961 - DNA, 25 bp, Homo sapien
cagaaacgtgtagcatcatgtgcgc

SEQ ID NO: 4421962 - DNA, 25 bp, Homo sapien
catgtagacttagcatagagctgag

SEQ ID NO: 4421963 - DNA, 25 bp, Homo sapien
gagctgagcctagtagacagatgct

SEQ ID NO: 4421964 - DNA, 25 bp, Homo sapien
tctcctcattgactaccacgctggg

SEQ ID NO: 4421965 - DNA, 25 bp, Homo sapien
ggcagactgctatttttatgggtcc

SEQ ID NO: 4421966 - DNA, 25 bp, Homo sapien
gatgctagttactctcatgtgagaa

SEQ ID NO: 4421967 - DNA, 25 bp, Homo sapien
tatatatccatgttaatatgtatgc

SEQ ID NO: 4421968 - DNA, 25 bp, Homo sapien
atgggtccatcaacatagatgtgga

SEQ ID NO: 4421969 - DNA, 25 bp, Homo sapien
acagtgaccacgtcgatttcttcct

SEQ ID NO: 4421970 - DNA, 25 bp, Homo sapien
gaacgccgcttctccacagtgacca

SEQ ID NO: 4421971 - DNA, 25 bp, Homo sapien
cacagtgaccacgtcgatttcttcc

SEQ ID NO: 4421972 - DNA, 25 bp, Homo sapien
gtgaccacgtcgatttcttcctctt

SEQ ID NO: 4421973 - DNA, 25 bp, Homo sapien
cttgggacgcacagtgatggtgaat

SEQ ID NO: 4421974 - DNA, 25 bp, Homo sapien
cacagtgatggtgaatgtggtgaca

SEQ ID NO: 4421975 - DNA, 25 bp, Homo sapien
gacgcacagtgatggtgaatgtggt

SEQ ID NO: 4421976 - DNA, 25 bp, Homo sapien
cgcacagtgatggtgaatgtggtga

SEQ ID NO: 4421977 - DNA, 25 bp, Homo sapien
tcgtttgaggatcagctcgctggac

SEQ ID NO: 4421978 - DNA, 25 bp, Homo sapien
gaaggcatcgtttgaggatcagctc

SEQ ID NO: 4421979 - DNA, 25 bp, Homo sapien
atgggaaggcatcgtttgaggatca

SEQ ID NO: 4421980 - DNA, 25 bp, Homo sapien
gatcagctcgctggactgagccctc

SEQ ID NO: 4421981 - DNA, 25 bp, Homo sapien
tgagaaagctggaccgaaggtcgtt

SEQ ID NO: 4421982 - DNA, 25 bp, Homo sapien
tggcggccttctcattctttaccaa

SEQ ID NO: 4421983 - DNA, 25 bp, Homo sapien
gcacgtggtccctgagcgtgagaaa

SEQ ID NO: 4421984 - DNA, 25 bp, Homo sapien
tctttaccaactccggcacgtggtc

SEQ ID NO: 4421985 - DNA, 25 bp, Homo sapien
tgctgtcttgcctgcaatttttcct

SEQ ID NO: 4421986 - DNA, 25 bp, Homo sapien
aaagctggtgctcctcggcctggag

SEQ ID NO: 4421987 - DNA, 25 bp, Homo sapien
gacatactcagtggcctttttcaaa

SEQ ID NO: 4421988 - DNA, 25 bp, Homo sapien
gctcctcggcctggagggagtggac

SEQ ID NO: 4421989 - DNA, 25 bp, Homo sapien
tccgagcgtgttcaattttctttag

SEQ ID NO: 4421990 - DNA, 25 bp, Homo sapien
tagcaagtccgagcgtgttcaattt

SEQ ID NO: 4421991 - DNA, 25 bp, Homo sapien
caagtccgagcgtgttcaattttct

SEQ ID NO: 4421992 - DNA, 25 bp, Homo sapien
ctagcaagtccgagcgtgttcaatt

SEQ ID NO: 4421993 - DNA, 25 bp, Homo sapien
cccaggatgtatacaaaaggcggat

SEQ ID NO: 4421994 - DNA, 25 bp, Homo sapien
tcaaatggcaaaccccttatgtggc

SEQ ID NO: 4421995 - DNA, 25 bp, Homo sapien
taatactggccgcaaaagccacctc

SEQ ID NO: 4421996 - DNA, 25 bp, Homo sapien
caacgtttagcgctgtcatggaggt

SEQ ID NO: 4421997 - DNA, 25 bp, Homo sapien
tgagaaggatttcaattaatggaat

SEQ ID NO: 4421998 - DNA, 25 bp, Homo sapien
gggtgcaagattgagaaggatttca

SEQ ID NO: 4421999 - DNA, 25 bp, Homo sapien
aggatttcaattaatggaatctggg

SEQ ID NO: 4422000 - DNA, 25 bp, Homo sapien
gaaggatttcaattaatggaatctg

SEQ ID NO: 4422001 - DNA, 25 bp, Homo sapien
gtaccaataggtctgtgtgcttcga

SEQ ID NO: 4422002 - DNA, 25 bp, Homo sapien
tgtgcttcgaccataaaaaggctct

SEQ ID NO: 4422003 - DNA, 25 bp, Homo sapien
tgtgtgctctccaaacgtgcattgt

SEQ ID NO: 4422004 - DNA, 25 bp, Homo sapien
tgcctcttccgagcaaatcccattg

SEQ ID NO: 4422005 - DNA, 25 bp, Homo sapien
gagtcatctgcactcctggctcttc

SEQ ID NO: 4422006 - DNA, 25 bp, Homo sapien
tcagagtcatctgcactcctggctc

SEQ ID NO: 4422007 - DNA, 25 bp, Homo sapien
ctcagagtcatctgcactcctggct

SEQ ID NO: 4422008 - DNA, 25 bp, Homo sapien
tgctggatcagcacccatgcaaagc

SEQ ID NO: 4422009 - DNA, 25 bp, Homo sapien
gagtgctggatcagcacccatgcaa

SEQ ID NO: 4422010 - DNA, 25 bp, Homo sapien
cccaggagtgctggatcagcaccca

SEQ ID NO: 4422011 - DNA, 25 bp, Homo sapien
tggatcagcacccatgcaaagcagg

SEQ ID NO: 4422012 - DNA, 25 bp, Homo sapien
tgccccggagactaagcttggtgct

SEQ ID NO: 4422013 - DNA, 25 bp, Homo sapien
cttgccccggagactaagcttggtg

SEQ ID NO: 4422014 - DNA, 25 bp, Homo sapien
tggcttgccccggagactaagcttg

SEQ ID NO: 4422015 - DNA, 25 bp, Homo sapien
ccggagactaagcttggtgctttct

SEQ ID NO: 4422016 - DNA, 25 bp, Homo sapien
taaagaaagcgattagggcctggcc

SEQ ID NO: 4422017 - DNA, 25 bp, Homo sapien
tgagaagggcgtcccaccccatcag

SEQ ID NO: 4422018 - DNA, 25 bp, Homo sapien
cacagtcgagcagtccccaaggaag

SEQ ID NO: 4422019 - DNA, 25 bp, Homo sapien
ggagcgatgagacactgtccccaga

SEQ ID NO: 4422020 - DNA, 25 bp, Homo sapien
tgtcctccacccgacaaaagacagg

SEQ ID NO: 4422021 - DNA, 25 bp, Homo sapien
aagccgggtggcataatctgtcctc

SEQ ID NO: 4422022 - DNA, 25 bp, Homo sapien
gaaatgctcagtatctaacgatggc

SEQ ID NO: 4422023 - DNA, 25 bp, Homo sapien
tctctcccgttgtgggctggtgcca

SEQ ID NO: 4422024 - DNA, 25 bp, Homo sapien
tccgtaacataaacgtgcaaggaga

SEQ ID NO: 4422025 - DNA, 25 bp, Homo sapien
atgatgatagctgtgatcccaaagc

SEQ ID NO: 4422026 - DNA, 25 bp, Homo sapien
tgtaggcaaacgaaccttctatggg

SEQ ID NO: 4422027 - DNA, 25 bp, Homo sapien
agattaaggaaaggagccgtctccg

SEQ ID NO: 4422028 - DNA, 25 bp, Homo sapien
tcactcctgtttcccgaacccactg

SEQ ID NO: 4422029 - DNA, 25 bp, Homo sapien
cactcctgtttcccgaacccactgg

SEQ ID NO: 4422030 - DNA, 25 bp, Homo sapien
tacaatgcagaatacaataagacct

SEQ ID NO: 4422031 - DNA, 25 bp, Homo sapien
attccgagcagggagtaatcactgc

SEQ ID NO: 4422032 - DNA, 25 bp, Homo sapien
ggaaatcagctgaccacatattagc

SEQ ID NO: 4422033 - DNA, 25 bp, Homo sapien
ggcctcagaacgaataattacaaga

SEQ ID NO: 4422034 - DNA, 25 bp, Homo sapien
gcatcctcctagcacggaggaaact

SEQ ID NO: 4422035 - DNA, 25 bp, Homo sapien
tggccttccccacagttaactgctg

SEQ ID NO: 4422036 - DNA, 25 bp, Homo sapien
tggggttctagtcatccccaggaac

SEQ ID NO: 4422037 - DNA, 25 bp, Homo sapien
cctagcacggaggaaactggccttc

SEQ ID NO: 4422038 - DNA, 25 bp, Homo sapien
taacatcacttggaaggtgacgttc

SEQ ID NO: 4422039 - DNA, 25 bp, Homo sapien
cttcttttgtagtcagtattggact

SEQ ID NO: 4422040 - DNA, 25 bp, Homo sapien
gtggctcaaaactgcaatcctacca

SEQ ID NO: 4422041 - DNA, 25 bp, Homo sapien
tggactagtcagtacttaacatcac

SEQ ID NO: 4422042 - DNA, 25 bp, Homo sapien
ctaaaggccatttgaaaatgacctt

SEQ ID NO: 4422043 - DNA, 25 bp, Homo sapien
aggccatttgaaaatgacctttgaa

SEQ ID NO: 4422044 - DNA, 25 bp, Homo sapien
ccatttgaaaatgacctttgaaagt

SEQ ID NO: 4422045 - DNA, 25 bp, Homo sapien
catttgaaaatgacctttgaaagtg

SEQ ID NO: 4422046 - DNA, 25 bp, Homo sapien
ggctttggaatggttgaccccgaga

SEQ ID NO: 4422047 - DNA, 25 bp, Homo sapien
aattcagatcggctatcgccaccaa

SEQ ID NO: 4422048 - DNA, 25 bp, Homo sapien
cagataccgaggcttcatacaaggc

SEQ ID NO: 4422049 - DNA, 25 bp, Homo sapien
ggtgaaatcccagataccgaggctt

SEQ ID NO: 4422050 - DNA, 25 bp, Homo sapien
aacctgaattgagcccacctgtgag

SEQ ID NO: 4422051 - DNA, 25 bp, Homo sapien
tttctctggattgggttcaacctga

SEQ ID NO: 4422052 - DNA, 25 bp, Homo sapien
gaattgagcccacctgtgagctatg

SEQ ID NO: 4422053 - DNA, 25 bp, Homo sapien
gattgggttcaacctgaattgagcc

SEQ ID NO: 4422054 - DNA, 25 bp, Homo sapien
tgggccgaagaggcgatcacttctt

SEQ ID NO: 4422055 - DNA, 25 bp, Homo sapien
ccgaagaggcgatcacttcttccca

SEQ ID NO: 4422056 - DNA, 25 bp, Homo sapien
ggccgaagaggcgatcacttcttcc

SEQ ID NO: 4422057 - DNA, 25 bp, Homo sapien
cgaagaggcgatcacttcttcccat

SEQ ID NO: 4422058 - DNA, 25 bp, Homo sapien
ccaagtgggcgagcagctctacttc

SEQ ID NO: 4422059 - DNA, 25 bp, Homo sapien
gatccaggtggaatgaaaactccga

SEQ ID NO: 4422060 - DNA, 25 bp, Homo sapien
aagctccatcgctagcccaagtggg

SEQ ID NO: 4422061 - DNA, 25 bp, Homo sapien
cagagattatctggcgcagtagact

SEQ ID NO: 4422062 - DNA, 25 bp, Homo sapien
tagctggcacgggaaattcacagtc

SEQ ID NO: 4422063 - DNA, 25 bp, Homo sapien
agtctacactccaagcagcatgcgg

SEQ ID NO: 4422064 - DNA, 25 bp, Homo sapien
taggagctggaagggacactctaag

SEQ ID NO: 4422065 - DNA, 25 bp, Homo sapien
caccactggagatcatagccagtga

SEQ ID NO: 4422066 - DNA, 25 bp, Homo sapien
cttttagcagaaaaaaatggactgc

SEQ ID NO: 4422067 - DNA, 25 bp, Homo sapien
aaaaaatggactgcctgctgattga

SEQ ID NO: 4422068 - DNA, 25 bp, Homo sapien
tttagcagaaaaaaatggactgcct

SEQ ID NO: 4422069 - DNA, 25 bp, Homo sapien
agaaaaaaatggactgcctgctgat

SEQ ID NO: 4422070 - DNA, 25 bp, Homo sapien
tgcaggaagtcgcttgatttctctt

SEQ ID NO: 4422071 - DNA, 25 bp, Homo sapien
cttgatttctcttggctttgcctgg

SEQ ID NO: 4422072 - DNA, 25 bp, Homo sapien
ttctcttggctttgcctggttcctt

SEQ ID NO: 4422073 - DNA, 25 bp, Homo sapien
ggaagtcgcttgatttctcttggct

SEQ ID NO: 4422074 - DNA, 25 bp, Homo sapien
tgagacttccaggaccactgtccaa

SEQ ID NO: 4422075 - DNA, 25 bp, Homo sapien
catcctaatttccatcaagtgctca

SEQ ID NO: 4422076 - DNA, 25 bp, Homo sapien
cactgtccaaggactggcaattccc

SEQ ID NO: 4422077 - DNA, 25 bp, Homo sapien
tctctgagacttccaggaccactgt

SEQ ID NO: 4422078 - DNA, 25 bp, Homo sapien
gctttcttgcgcccagcctggcagg

SEQ ID NO: 4422079 - DNA, 25 bp, Homo sapien
tggtgttagtaaacacgctttcttg

SEQ ID NO: 4422080 - DNA, 25 bp, Homo sapien
tgtggatggtgttagtaaacacgct

SEQ ID NO: 4422081 - DNA, 25 bp, Homo sapien
gccgtgtggatggtgttagtaaaca

SEQ ID NO: 4422082 - DNA, 25 bp, Homo sapien
ccagttcctcatgaacagatccttc

SEQ ID NO: 4422083 - DNA, 25 bp, Homo sapien
cctcaagggaccacaggcgaccaaa

SEQ ID NO: 4422084 - DNA, 25 bp, Homo sapien
cgaccaaacaggaacctggagatag

SEQ ID NO: 4422085 - DNA, 25 bp, Homo sapien
tcctcatgaacagatccttctccaa

SEQ ID NO: 4422086 - DNA, 25 bp, Homo sapien
ctctcaccttctctcattgttttcc

SEQ ID NO: 4422087 - DNA, 25 bp, Homo sapien
accttctctcattgttttcctcatt

SEQ ID NO: 4422088 - DNA, 25 bp, Homo sapien
gctctctcaccttctctcattgttt

SEQ ID NO: 4422089 - DNA, 25 bp, Homo sapien
tcaccttctctcattgttttcctca

SEQ ID NO: 4422090 - DNA, 25 bp, Homo sapien
tctgacccccagcacatctctgctt

SEQ ID NO: 4422091 - DNA, 25 bp, Homo sapien
ctgctctgacccccagcacatctct

SEQ ID NO: 4422092 - DNA, 25 bp, Homo sapien
tgctctgacccccagcacatctctg

SEQ ID NO: 4422093 - DNA, 25 bp, Homo sapien
gggctgctctgacccccagcacatc

SEQ ID NO: 4422094 - DNA, 25 bp, Homo sapien
tctcatccttgcatcacttttgagc

SEQ ID NO: 4422095 - DNA, 25 bp, Homo sapien
catcacttttgagcaccttgttttg

SEQ ID NO: 4422096 - DNA, 25 bp, Homo sapien
tacttcccaccctgtccctggtgct

SEQ ID NO: 4422097 - DNA, 25 bp, Homo sapien
tggccttgaactaccttctacagaa

SEQ ID NO: 4422098 - DNA, 25 bp, Homo sapien
tgaatgtggccaagccacaaatgga

SEQ ID NO: 4422099 - DNA, 25 bp, Homo sapien
gcctgaatgtggccaagccacaaat

SEQ ID NO: 4422100 - DNA, 25 bp, Homo sapien
cctgaatgtggccaagccacaaatg

SEQ ID NO: 4422101 - DNA, 25 bp, Homo sapien
aagtttgcctgaatgtggccaagcc

SEQ ID NO: 4422102 - DNA, 25 bp, Homo sapien
gacatttcaaagtgatggaggtgcc

SEQ ID NO: 4422103 - DNA, 25 bp, Homo sapien
atgaccaggaggagagtgcatgcca

SEQ ID NO: 4422104 - DNA, 25 bp, Homo sapien
tggtgcctcgctcacattcttgaag

SEQ ID NO: 4422105 - DNA, 25 bp, Homo sapien
ttttgttagtttcaacgcagccgca

SEQ ID NO: 4422106 - DNA, 25 bp, Homo sapien
tgccttacaatactaggggaaagtg

SEQ ID NO: 4422107 - DNA, 25 bp, Homo sapien
ctgagatcggcttggtaccaaaaaa

SEQ ID NO: 4422108 - DNA, 25 bp, Homo sapien
caatactaggggaaagtgtggaaga

SEQ ID NO: 4422109 - DNA, 25 bp, Homo sapien
tctgcttgccttacaatactagggg

SEQ ID NO: 4422110 - DNA, 25 bp, Homo sapien
ggcagggggccccataccatcctgt

SEQ ID NO: 4422111 - DNA, 25 bp, Homo sapien
cagggggccccataccatcctgttt

SEQ ID NO: 4422112 - DNA, 25 bp, Homo sapien
gcagggggccccataccatcctgtt

SEQ ID NO: 4422113 - DNA, 25 bp, Homo sapien
cggtggaaactaccatcctgtctcg

SEQ ID NO: 4422114 - DNA, 25 bp, Homo sapien
aatgtctggatccagacggtggaaa

SEQ ID NO: 4422115 - DNA, 25 bp, Homo sapien
cagggttcactagtcttgagttcat

SEQ ID NO: 4422116 - DNA, 25 bp, Homo sapien
ggttcactagtcttgagttcattgg

SEQ ID NO: 4422117 - DNA, 25 bp, Homo sapien
tcagacgataaacatatgatgaaaa

SEQ ID NO: 4422118 - DNA, 25 bp, Homo sapien
cagacgataaacatatgatgaaaat

SEQ ID NO: 4422119 - DNA, 25 bp, Homo sapien
atgatgaaaatattgacgaaaatcg

SEQ ID NO: 4422120 - DNA, 25 bp, Homo sapien
tgaaaatattgacgaaaatcgttcg

SEQ ID NO: 4422121 - DNA, 25 bp, Homo sapien
agaacactgcgaggtcagcgcggcc

SEQ ID NO: 4422122 - DNA, 25 bp, Homo sapien
aaccagatcagagcctcggctgatt

SEQ ID NO: 4422123 - DNA, 25 bp, Homo sapien
gtgcccctaattgccgtaaaattga

SEQ ID NO: 4422124 - DNA, 25 bp, Homo sapien
cagctgcggcttcggagtgagaaca

SEQ ID NO: 4422125 - DNA, 25 bp, Homo sapien
ttttccccctgagtaggcacaatgg

SEQ ID NO: 4422126 - DNA, 25 bp, Homo sapien
cgaccggtcacacaatgggagcact

SEQ ID NO: 4422127 - DNA, 25 bp, Homo sapien
tctttggcccgggagttaatgtcga

SEQ ID NO: 4422128 - DNA, 25 bp, Homo sapien
tagagtaaggaaatgaacgcaggct

SEQ ID NO: 4422129 - DNA, 25 bp, Homo sapien
ctggctgccgatgggcgagcccaaa

SEQ ID NO: 4422130 - DNA, 25 bp, Homo sapien
gactctaggtagattcctgaagggc

SEQ ID NO: 4422131 - DNA, 25 bp, Homo sapien
gggactctaggtagattcctgaagg

SEQ ID NO: 4422132 - DNA, 25 bp, Homo sapien
atgggcgagcccaaatttcctgaag

SEQ ID NO: 4422133 - DNA, 25 bp, Homo sapien
agtgttaaatctgcgctgaaaagga

SEQ ID NO: 4422134 - DNA, 25 bp, Homo sapien
ttaaatctgcgctgaaaaggagcag

SEQ ID NO: 4422135 - DNA, 25 bp, Homo sapien
gttaaatctgcgctgaaaaggagca

SEQ ID NO: 4422136 - DNA, 25 bp, Homo sapien
gacagtgttaaatctgcgctgaaaa

SEQ ID NO: 4422137 - DNA, 25 bp, Homo sapien
ccagacagtgcattcggcggcatct

SEQ ID NO: 4422138 - DNA, 25 bp, Homo sapien
gtgcattcggcggcatctgtccaca

SEQ ID NO: 4422139 - DNA, 25 bp, Homo sapien
ggcatctgtccacatatccggggag

SEQ ID NO: 4422140 - DNA, 25 bp, Homo sapien
tctgtccacatatccggggagtggg

SEQ ID NO: 4422141 - DNA, 25 bp, Homo sapien
aaccacagactttaaagccagctgg

SEQ ID NO: 4422142 - DNA, 25 bp, Homo sapien
aagcacccctgatgagacacactca

SEQ ID NO: 4422143 - DNA, 25 bp, Homo sapien
gcctccctgtctgtgttgggatggg

SEQ ID NO: 4422144 - DNA, 25 bp, Homo sapien
gccagtttgacccacttccagtatt

SEQ ID NO: 4422145 - DNA, 25 bp, Homo sapien
ggagcaattggccacctgctttatc

SEQ ID NO: 4422146 - DNA, 25 bp, Homo sapien
tgtaaaacccttcggcagcgtggag

SEQ ID NO: 4422147 - DNA, 25 bp, Homo sapien
ccttcggcagcgtggagcaattggc

SEQ ID NO: 4422148 - DNA, 25 bp, Homo sapien
caggtctcagacatgtaaaaccctt

SEQ ID NO: 4422149 - DNA, 25 bp, Homo sapien
caggctcggagtgctcgactgcatt

SEQ ID NO: 4422150 - DNA, 25 bp, Homo sapien
ggaaagctccctgcattgtgagcag

SEQ ID NO: 4422151 - DNA, 25 bp, Homo sapien
gaaatgtgactcgacttcaatccag

SEQ ID NO: 4422152 - DNA, 25 bp, Homo sapien
tactgcacacgaaagatcacagcca

SEQ ID NO: 4422153 - DNA, 25 bp, Homo sapien
taggaaggcattttccacggtgtaa

SEQ ID NO: 4422154 - DNA, 25 bp, Homo sapien
cagctgttgccccattaggaaggca

SEQ ID NO: 4422155 - DNA, 25 bp, Homo sapien
aagagagtgcctcccctgttggaag

SEQ ID NO: 4422156 - DNA, 25 bp, Homo sapien
cagcaaatcttcctttatgggtgaa

SEQ ID NO: 4422157 - DNA, 25 bp, Homo sapien
ccacttttgtgccaagcacgatgct

SEQ ID NO: 4422158 - DNA, 25 bp, Homo sapien
agggcctgtcataaatgtaaactgg

SEQ ID NO: 4422159 - DNA, 25 bp, Homo sapien
gtcataaatgtaaactggtccttcc

SEQ ID NO: 4422160 - DNA, 25 bp, Homo sapien
tgccaagcacgatgctccatccagg

SEQ ID NO: 4422161 - DNA, 25 bp, Homo sapien
ttctgcaatatctcattctggtgaa

SEQ ID NO: 4422162 - DNA, 25 bp, Homo sapien
tctgcaatatctcattctggtgaat

SEQ ID NO: 4422163 - DNA, 25 bp, Homo sapien
gttctgcaatatctcattctggtga

SEQ ID NO: 4422164 - DNA, 25 bp, Homo sapien
ggacagtatggaagattcaagggca

SEQ ID NO: 4422165 - DNA, 25 bp, Homo sapien
cttgagactgtcctatgcgctggtg

SEQ ID NO: 4422166 - DNA, 25 bp, Homo sapien
tgctccccagcaacaattgtagagg

SEQ ID NO: 4422167 - DNA, 25 bp, Homo sapien
ggaactcgcagcctcagcagatctt

SEQ ID NO: 4422168 - DNA, 25 bp, Homo sapien
gactaaacaggacccaacagagcag

SEQ ID NO: 4422169 - DNA, 25 bp, Homo sapien
atgttgggtcttaatgcatgttgac

SEQ ID NO: 4422170 - DNA, 25 bp, Homo sapien
tgttgacttagtggcctggcccctc

SEQ ID NO: 4422171 - DNA, 25 bp, Homo sapien
tgctcattcgcattatgacattttg

SEQ ID NO: 4422172 - DNA, 25 bp, Homo sapien
caggctgagtggcttggccctccgg

SEQ ID NO: 4422173 - DNA, 25 bp, Homo sapien
tggggtggtctatctacccacgcac

SEQ ID NO: 4422174 - DNA, 25 bp, Homo sapien
cctggccagctggggtggtctatct

SEQ ID NO: 4422175 - DNA, 25 bp, Homo sapien
aggctgagtggcttggccctccggg

SEQ ID NO: 4422176 - DNA, 25 bp, Homo sapien
tcgccagctgccctaagattaattg

SEQ ID NO: 4422177 - DNA, 25 bp, Homo sapien
tgctgggcgggctccccaatgccac

SEQ ID NO: 4422178 - DNA, 25 bp, Homo sapien
ctgctctcgggacaaactgctgcac

SEQ ID NO: 4422179 - DNA, 25 bp, Homo sapien
acccagtgggcgtgtcccattgaca

SEQ ID NO: 4422180 - DNA, 25 bp, Homo sapien
tggacaattcttagctcaccttcca

SEQ ID NO: 4422181 - DNA, 25 bp, Homo sapien
ggacaattcttagctcaccttccag

SEQ ID NO: 4422182 - DNA, 25 bp, Homo sapien
tgcgtcatccacgttgcctccactg

SEQ ID NO: 4422183 - DNA, 25 bp, Homo sapien
ctgcgtcatccacgttgcctccact

SEQ ID NO: 4422184 - DNA, 25 bp, Homo sapien
cttccagtatccacaccacgttgtt

SEQ ID NO: 4422185 - DNA, 25 bp, Homo sapien
tgtttatctcctccgctatctcttc

SEQ ID NO: 4422186 - DNA, 25 bp, Homo sapien
ttcctgtttatctcctccgctatct

SEQ ID NO: 4422187 - DNA, 25 bp, Homo sapien
ccacaccacgttgtttacaatgcat

SEQ ID NO: 4422188 - DNA, 25 bp, Homo sapien
cacccaaggccgaggaacagccaag

SEQ ID NO: 4422189 - DNA, 25 bp, Homo sapien
tcgaataccggtgtctaccagctgg

SEQ ID NO: 4422190 - DNA, 25 bp, Homo sapien
gtaagagctgacatcgaataccggt

SEQ ID NO: 4422191 - DNA, 25 bp, Homo sapien
aaggccgaggaacagccaagaaggc

SEQ ID NO: 4422192 - DNA, 25 bp, Homo sapien
gccaaagaggaccactcgagtgaca

SEQ ID NO: 4422193 - DNA, 25 bp, Homo sapien
tgcactcccacagaagttgggtaaa

SEQ ID NO: 4422194 - DNA, 25 bp, Homo sapien
gacatccctggtgtatacactggaa

SEQ ID NO: 4422195 - DNA, 25 bp, Homo sapien
aagcgataataagcagagcgtggac

SEQ ID NO: 4422196 - DNA, 25 bp, Homo sapien
tttagctgattgactggcctctgcc

SEQ ID NO: 4422197 - DNA, 25 bp, Homo sapien
ttttgtacccatttagctgattgac

SEQ ID NO: 4422198 - DNA, 25 bp, Homo sapien
tgaacgttggagatcacgtttgtca

SEQ ID NO: 4422199 - DNA, 25 bp, Homo sapien
gtcatgagttgatggtttctagggt

SEQ ID NO: 4422200 - DNA, 25 bp, Homo sapien
ggagatcacgtttgtcatgagttga

SEQ ID NO: 4422201 - DNA, 25 bp, Homo sapien
ttttccacaatgaacgttggagatc

SEQ ID NO: 4422202 - DNA, 25 bp, Homo sapien
catcttgcaggtgggaagtctgagc

SEQ ID NO: 4422203 - DNA, 25 bp, Homo sapien
gcacttctcatggtgatgggcaggt

SEQ ID NO: 4422204 - DNA, 25 bp, Homo sapien
acaaggagaggacccttctgcccgt

SEQ ID NO: 4422205 - DNA, 25 bp, Homo sapien
aagtctgagccatgggttgttctga

SEQ ID NO: 4422206 - DNA, 25 bp, Homo sapien
tttgccacgacagagcatgttcagc

SEQ ID NO: 4422207 - DNA, 25 bp, Homo sapien
ccacgacagagcatgttcagcttct

SEQ ID NO: 4422208 - DNA, 25 bp, Homo sapien
tgccctggctttgccacgacagagc

SEQ ID NO: 4422209 - DNA, 25 bp, Homo sapien
gagccccatactggggtctgccctg

SEQ ID NO: 4422210 - DNA, 25 bp, Homo sapien
taaggaattgctcatgactgtggat

SEQ ID NO: 4422211 - DNA, 25 bp, Homo sapien
cctgggaagtgttgatgttgcagtc

SEQ ID NO: 4422212 - DNA, 25 bp, Homo sapien
tttcttcatcttcgagggacctcag

SEQ ID NO: 4422213 - DNA, 25 bp, Homo sapien
aaatctgaaatttgcgggagaggcg

SEQ ID NO: 4422214 - DNA, 25 bp, Homo sapien
cccagcccagtgaccagctctccaa

SEQ ID NO: 4422215 - DNA, 25 bp, Homo sapien
cagcccagtgaccagctctccaaac

SEQ ID NO: 4422216 - DNA, 25 bp, Homo sapien
ccagcccagtgaccagctctccaaa

SEQ ID NO: 4422217 - DNA, 25 bp, Homo sapien
taagtttgccctatgcgtggaaaga

SEQ ID NO: 4422218 - DNA, 25 bp, Homo sapien
tgccctatgcgtggaaagaatggat

SEQ ID NO: 4422219 - DNA, 25 bp, Homo sapien
aagtccccagccagtgagttggggc

SEQ ID NO: 4422220 - DNA, 25 bp, Homo sapien
agaatggatggctagaatcaccccc

SEQ ID NO: 4422221 - DNA, 25 bp, Homo sapien
ccaccttcaagtcctaagtctttga

SEQ ID NO: 4422222 - DNA, 25 bp, Homo sapien
ggtatgaggcacatctgagcatgaa

SEQ ID NO: 4422223 - DNA, 25 bp, Homo sapien
catgaattgccttgggtttccacag

SEQ ID NO: 4422224 - DNA, 25 bp, Homo sapien
tctagacttgttgggtatgaggcac

SEQ ID NO: 4422225 - DNA, 25 bp, Homo sapien
taagcagatgcatcattgggcctcc

SEQ ID NO: 4422226 - DNA, 25 bp, Homo sapien
tagcatctatgcagggagaactctt

SEQ ID NO: 4422227 - DNA, 25 bp, Homo sapien
gactcagacctgctccggaagtaaa

SEQ ID NO: 4422228 - DNA, 25 bp, Homo sapien
gatactggccagttctctcaggcag

SEQ ID NO: 4422229 - DNA, 25 bp, Homo sapien
taggcactaggcagtcctacacaga

SEQ ID NO: 4422230 - DNA, 25 bp, Homo sapien
taaattcaggattcacccagatggg

SEQ ID NO: 4422231 - DNA, 25 bp, Homo sapien
gaacatcacaagaaggctaggcact

SEQ ID NO: 4422232 - DNA, 25 bp, Homo sapien
aaaaccgctgagctaaacagcatgc

SEQ ID NO: 4422233 - DNA, 25 bp, Homo sapien
ttattcttatatgtatcgaaactca

SEQ ID NO: 4422234 - DNA, 25 bp, Homo sapien
cagggtttatttctcgaacttatct

SEQ ID NO: 4422235 - DNA, 25 bp, Homo sapien
tttctcgaacttatctgtaagtctg

SEQ ID NO: 4422236 - DNA, 25 bp, Homo sapien
aacaatgtgctctgggttgcaaaac

SEQ ID NO: 4422237 - DNA, 25 bp, Homo sapien
ggaaaagtgacctcaccctgatcag

SEQ ID NO: 4422238 - DNA, 25 bp, Homo sapien
gatgtgacacctgtgccgtggagct

SEQ ID NO: 4422239 - DNA, 25 bp, Homo sapien
tccatgctactctgggcccaaagag

SEQ ID NO: 4422240 - DNA, 25 bp, Homo sapien
tgaaggtatttcagcgagtggcacc

SEQ ID NO: 4422241 - DNA, 25 bp, Homo sapien
ttagagatgctgtcagatctcgttg

SEQ ID NO: 4422242 - DNA, 25 bp, Homo sapien
cttagagatgctgtcagatctcgtt

SEQ ID NO: 4422243 - DNA, 25 bp, Homo sapien
acttagagatgctgtcagatctcgt

SEQ ID NO: 4422244 - DNA, 25 bp, Homo sapien
tgtgtagggtctcagcaccaaggcc

SEQ ID NO: 4422245 - DNA, 25 bp, Homo sapien
ggcagaccctcaccatcttagagag

SEQ ID NO: 4422246 - DNA, 25 bp, Homo sapien
tcttgagccgctgaaggatcctggt

SEQ ID NO: 4422247 - DNA, 25 bp, Homo sapien
gaccttgggcatcgggcctctgata

SEQ ID NO: 4422248 - DNA, 25 bp, Homo sapien
catggaattccagttttgtggacac

SEQ ID NO: 4422249 - DNA, 25 bp, Homo sapien
ttgtggacacgttctcaaggaacct

SEQ ID NO: 4422250 - DNA, 25 bp, Homo sapien
cctcaacagggccaccatggaattc

SEQ ID NO: 4422251 - DNA, 25 bp, Homo sapien
gtctctgtcattcctcagggacggg

SEQ ID NO: 4422252 - DNA, 25 bp, Homo sapien
caggtgacccgcgtacaaatcttgg

SEQ ID NO: 4422253 - DNA, 25 bp, Homo sapien
gaaccaggtgacccgcgtacaaatc

SEQ ID NO: 4422254 - DNA, 25 bp, Homo sapien
tgacccgcgtacaaatcttggctcc

SEQ ID NO: 4422255 - DNA, 25 bp, Homo sapien
gctgagcagtacagcagttgagaga

SEQ ID NO: 4422256 - DNA, 25 bp, Homo sapien
tacttcgctaggtggagtgcctgtc

SEQ ID NO: 4422257 - DNA, 25 bp, Homo sapien
tgtctatcacatgcatacgagagga

SEQ ID NO: 4422258 - DNA, 25 bp, Homo sapien
gctggactaaaaagccaggctggat

SEQ ID NO: 4422259 - DNA, 25 bp, Homo sapien
gatccgtaggtaatgggagccactg

SEQ ID NO: 4422260 - DNA, 25 bp, Homo sapien
tttggttggaatggcaaataggcca

SEQ ID NO: 4422261 - DNA, 25 bp, Homo sapien
cagaagtcaggctccgcaggcagta

SEQ ID NO: 4422262 - DNA, 25 bp, Homo sapien
aattgacatatgttgttggttcccc

SEQ ID NO: 4422263 - DNA, 25 bp, Homo sapien
gaccccctcaggctggtaggtgata

SEQ ID NO: 4422264 - DNA, 25 bp, Homo sapien
taaattggataaatggtgagggcca

SEQ ID NO: 4422265 - DNA, 25 bp, Homo sapien
tctgcccatgttttcttagccaggt

SEQ ID NO: 4422266 - DNA, 25 bp, Homo sapien
ccaatgtgggtctgatcagtgtaaa

SEQ ID NO: 4422267 - DNA, 25 bp, Homo sapien
agaagggcatgaagctcccagagtc

SEQ ID NO: 4422268 - DNA, 25 bp, Homo sapien
ctcacaatggaagggcaattatgag

SEQ ID NO: 4422269 - DNA, 25 bp, Homo sapien
aattatgagggcgagcagatgaaag

SEQ ID NO: 4422270 - DNA, 25 bp, Homo sapien
cagccccaatggtccaaaaggttct

SEQ ID NO: 4422271 - DNA, 25 bp, Homo sapien
aagaggcagccccaatggtccaaaa

SEQ ID NO: 4422272 - DNA, 25 bp, Homo sapien
cctccccatctccaggcactcgatt

SEQ ID NO: 4422273 - DNA, 25 bp, Homo sapien
tccccatctccaggcactcgattac

SEQ ID NO: 4422274 - DNA, 25 bp, Homo sapien
tccctccccatctccaggcactcga

SEQ ID NO: 4422275 - DNA, 25 bp, Homo sapien
cccatctccaggcactcgattaccc

SEQ ID NO: 4422276 - DNA, 25 bp, Homo sapien
gtggcctggcacatgggccctgctc

SEQ ID NO: 4422277 - DNA, 25 bp, Homo sapien
atcttgtactgctgtggcctggcac

SEQ ID NO: 4422278 - DNA, 25 bp, Homo sapien
tttatcttgtactgctgtggcctgg

SEQ ID NO: 4422279 - DNA, 25 bp, Homo sapien
cctgctccaggggatggtgagcacc

SEQ ID NO: 4422280 - DNA, 25 bp, Homo sapien
ggggagggagagatccctgaagacc

SEQ ID NO: 4422281 - DNA, 25 bp, Homo sapien
aggatttggcttcacagagaatttg

SEQ ID NO: 4422282 - DNA, 25 bp, Homo sapien
ggatttggcttcacagagaatttgg

SEQ ID NO: 4422283 - DNA, 25 bp, Homo sapien
gggagggagagatccctgaagacca

SEQ ID NO: 4422284 - DNA, 25 bp, Homo sapien
gagggatatgttccttgctctagag

SEQ ID NO: 4422285 - DNA, 25 bp, Homo sapien
ccactggataagactcttaaggccc

SEQ ID NO: 4422286 - DNA, 25 bp, Homo sapien
tctgcccactgtcttaggccatgtg

SEQ ID NO: 4422287 - DNA, 25 bp, Homo sapien
tgtggctgtcatcagagaaccactg

SEQ ID NO: 4422288 - DNA, 25 bp, Homo sapien
ttccactctgcaggctccgtgttat

SEQ ID NO: 4422289 - DNA, 25 bp, Homo sapien
catgagagctgcaagggcagtaggc

SEQ ID NO: 4422290 - DNA, 25 bp, Homo sapien
tatcagggtaatttaccagcaggtg

SEQ ID NO: 4422291 - DNA, 25 bp, Homo sapien
taggcgcactggtgggaattacaca

SEQ ID NO: 4422292 - DNA, 25 bp, Homo sapien
gttccaaatcctgtcgtcctggttc

SEQ ID NO: 4422293 - DNA, 25 bp, Homo sapien
tcactggtgataggccattgcagac

SEQ ID NO: 4422294 - DNA, 25 bp, Homo sapien
aatcctgtcgtcctggttcagctcc

SEQ ID NO: 4422295 - DNA, 25 bp, Homo sapien
cactggatttcactggtgataggcc

SEQ ID NO: 4422296 - DNA, 25 bp, Homo sapien
taggagcctcatctgtctctaggag

SEQ ID NO: 4422297 - DNA, 25 bp, Homo sapien
ttgactgcagctccaaagaaatggc

SEQ ID NO: 4422298 - DNA, 25 bp, Homo sapien
gaaatggcagtcacaagattgcagc

SEQ ID NO: 4422299 - DNA, 25 bp, Homo sapien
gactctgagaagactagatagccca

SEQ ID NO: 4422300 - DNA, 25 bp, Homo sapien
gatcctgatgaccacacatgggttc

SEQ ID NO: 4422301 - DNA, 25 bp, Homo sapien
tgtggaggacggtgactgtgatcct

SEQ ID NO: 4422302 - DNA, 25 bp, Homo sapien
actgtgatcctgatgaccacacatg

SEQ ID NO: 4422303 - DNA, 25 bp, Homo sapien
ccacctccaggggaattttgtggag

SEQ ID NO: 4422304 - DNA, 25 bp, Homo sapien
tgcttcgatgtagatgccatccaaa

SEQ ID NO: 4422305 - DNA, 25 bp, Homo sapien
aattcaacgggcagcccaggactca

SEQ ID NO: 4422306 - DNA, 25 bp, Homo sapien
gcagagatcaggcagaattcaacgg

SEQ ID NO: 4422307 - DNA, 25 bp, Homo sapien
agttttgtaactgtgcttcgatgta

SEQ ID NO: 4422308 - DNA, 25 bp, Homo sapien
gcctccaccgcttcaatgtcctcta

SEQ ID NO: 4422309 - DNA, 25 bp, Homo sapien
cctccaccgcttcaatgtcctctac

SEQ ID NO: 4422310 - DNA, 25 bp, Homo sapien
ccacacggcgatcaggcccatcaga

SEQ ID NO: 4422311 - DNA, 25 bp, Homo sapien
gaggaggtctgtaatgcagctgcca

SEQ ID NO: 4422312 - DNA, 25 bp, Homo sapien
ttcatgctagccatctgtccacagg

SEQ ID NO: 4422313 - DNA, 25 bp, Homo sapien
agataaacgtggcattcatgctagc

SEQ ID NO: 4422314 - DNA, 25 bp, Homo sapien
ggatcaaacattccaaactctctcc

SEQ ID NO: 4422315 - DNA, 25 bp, Homo sapien
cttggggatcaaacattccaaactc

SEQ ID NO: 4422316 - DNA, 25 bp, Homo sapien
tggggatcaaacattccaaactctc

SEQ ID NO: 4422317 - DNA, 25 bp, Homo sapien
gggatcaaacattccaaactctctc

SEQ ID NO: 4422318 - DNA, 25 bp, Homo sapien
aagcaggcagatggctggcacctgc

SEQ ID NO: 4422319 - DNA, 25 bp, Homo sapien
caggcagatggctggcacctgcttt

SEQ ID NO: 4422320 - DNA, 25 bp, Homo sapien
gcagatggctggcacctgctttgtg

SEQ ID NO: 4422321 - DNA, 25 bp, Homo sapien
agatggctggcacctgctttgtgcc

SEQ ID NO: 4422322 - DNA, 25 bp, Homo sapien
ggttatcgcctgtgacaaacacttt

SEQ ID NO: 4422323 - DNA, 25 bp, Homo sapien
gataggacgacatcacctacagagc

SEQ ID NO: 4422324 - DNA, 25 bp, Homo sapien
tcctgtggtgcttgagtgactatgt

SEQ ID NO: 4422325 - DNA, 25 bp, Homo sapien
tggtgtttcctgataggacgacatc

SEQ ID NO: 4422326 - DNA, 25 bp, Homo sapien
ctgtgcttggagcagctccatgggc

SEQ ID NO: 4422327 - DNA, 25 bp, Homo sapien
gtgcttggagcagctccatgggcat

SEQ ID NO: 4422328 - DNA, 25 bp, Homo sapien
tgtgcttggagcagctccatgggca

SEQ ID NO: 4422329 - DNA, 25 bp, Homo sapien
gagccgcgaaggtttgaccccatgg

SEQ ID NO: 4422330 - DNA, 25 bp, Homo sapien
gaccccatggcccaaaggcattggc

SEQ ID NO: 4422331 - DNA, 25 bp, Homo sapien
gcaggaagtcggctgtcatgccttg

SEQ ID NO: 4422332 - DNA, 25 bp, Homo sapien
gccttgtgccctcaacactgaggag

SEQ ID NO: 4422333 - DNA, 25 bp, Homo sapien
tgtgtggacgaggtgttgagctgct

SEQ ID NO: 4422334 - DNA, 25 bp, Homo sapien
catttaattggtagcctttgaaatg

SEQ ID NO: 4422335 - DNA, 25 bp, Homo sapien
gcactgtggttatgggcacggcagg

SEQ ID NO: 4422336 - DNA, 25 bp, Homo sapien
taactctccggctctctaaaggggc

SEQ ID NO: 4422337 - DNA, 25 bp, Homo sapien
ggacccttccggagatggagcactc

SEQ ID NO: 4422338 - DNA, 25 bp, Homo sapien
gcaccgggaaactgccagagtgttt

SEQ ID NO: 4422339 - DNA, 25 bp, Homo sapien
agtccaggagttgcttcgttctctc

SEQ ID NO: 4422340 - DNA, 25 bp, Homo sapien
tgtcatgcaatcaggctctccaaag

SEQ ID NO: 4422341 - DNA, 25 bp, Homo sapien
gatatctttctaagtcctggatgaa

SEQ ID NO: 4422342 - DNA, 25 bp, Homo sapien
cagccttaattatgagatatctttc

SEQ ID NO: 4422343 - DNA, 25 bp, Homo sapien
ggcagctgagacacttcagccttaa

SEQ ID NO: 4422344 - DNA, 25 bp, Homo sapien
taaatattgagccaggacatttcct

SEQ ID NO: 4422345 - DNA, 25 bp, Homo sapien
tcagagaacttttgccccactgagt

SEQ ID NO: 4422346 - DNA, 25 bp, Homo sapien
tcgttcttcatgacctaagtcttct

SEQ ID NO: 4422347 - DNA, 25 bp, Homo sapien
taaattggcctgatcattgacagcc

SEQ ID NO: 4422348 - DNA, 25 bp, Homo sapien
gagaatatgaagataggctctcctt

SEQ ID NO: 4422349 - DNA, 25 bp, Homo sapien
caaacaccaccttactatgaagctg

SEQ ID NO: 4422350 - DNA, 25 bp, Homo sapien
gcagaatgagtctgtggcccaaagc

SEQ ID NO: 4422351 - DNA, 25 bp, Homo sapien
aatgagaacaagacctgatggtatg

SEQ ID NO: 4422352 - DNA, 25 bp, Homo sapien
gtatgtgactatccaaccccaccag

SEQ ID NO: 4422353 - DNA, 25 bp, Homo sapien
ggacaagcctacagatgcttgcata

SEQ ID NO: 4422354 - DNA, 25 bp, Homo sapien
gccaatgttagatgacatgttattt

SEQ ID NO: 4422355 - DNA, 25 bp, Homo sapien
tactgtatgcagtaactcctggatc

SEQ ID NO: 4422356 - DNA, 25 bp, Homo sapien
cctggatctagatggtacatgccaa

SEQ ID NO: 4422357 - DNA, 25 bp, Homo sapien
tgttatttgtcatgtactggttgag

SEQ ID NO: 4422358 - DNA, 25 bp, Homo sapien
ctgggtctgtgatgttgcctgaaac

SEQ ID NO: 4422359 - DNA, 25 bp, Homo sapien
ggtctgtgatgttgcctgaaacttt

SEQ ID NO: 4422360 - DNA, 25 bp, Homo sapien
gtgatgttgcctgaaacttttccat

SEQ ID NO: 4422361 - DNA, 25 bp, Homo sapien
ctgtgatgttgcctgaaacttttcc

SEQ ID NO: 4422362 - DNA, 25 bp, Homo sapien
ggtacaaactgatagtctctcccca

SEQ ID NO: 4422363 - DNA, 25 bp, Homo sapien
cattggtacaaactgatagtctctc

SEQ ID NO: 4422364 - DNA, 25 bp, Homo sapien
cacaggttgccattggtacaaactg

SEQ ID NO: 4422365 - DNA, 25 bp, Homo sapien
ggttgccattggtacaaactgatag

SEQ ID NO: 4422366 - DNA, 25 bp, Homo sapien
agccatcttctctgtacgcacatcg

SEQ ID NO: 4422367 - DNA, 25 bp, Homo sapien
catcttctctgtacgcacatcgaga

SEQ ID NO: 4422368 - DNA, 25 bp, Homo sapien
cgcacatcgagagtgtggtgcattc

SEQ ID NO: 4422369 - DNA, 25 bp, Homo sapien
tctgtacgcacatcgagagtgtggt

SEQ ID NO: 4422370 - DNA, 25 bp, Homo sapien
ctgccgtcgaatgccaagaagtagc

SEQ ID NO: 4422371 - DNA, 25 bp, Homo sapien
gaagtagccttcagccaacgatggc

SEQ ID NO: 4422372 - DNA, 25 bp, Homo sapien
ccactggaggatgaattgctgcctt

SEQ ID NO: 4422373 - DNA, 25 bp, Homo sapien
gaggatgaattgctgccttcaaggg

SEQ ID NO: 4422374 - DNA, 25 bp, Homo sapien
atctgggtgcaaacgtttagggcgg

SEQ ID NO: 4422375 - DNA, 25 bp, Homo sapien
tatctgggtgcaaacgtttagggcg

SEQ ID NO: 4422376 - DNA, 25 bp, Homo sapien
ttaaaatgctccatgtgctcttctg

SEQ ID NO: 4422377 - DNA, 25 bp, Homo sapien
catatctgggtgcaaacgtttaggg

SEQ ID NO: 4422378 - DNA, 25 bp, Homo sapien
cctcagaagattgatggcttggaaa

SEQ ID NO: 4422379 - DNA, 25 bp, Homo sapien
ctttgatgacagcagataaaggcca

SEQ ID NO: 4422380 - DNA, 25 bp, Homo sapien
ccaaaggtacttttattctctcaga

SEQ ID NO: 4422381 - DNA, 25 bp, Homo sapien
tctcagaaattgctccaaataaaca

SEQ ID NO: 4422382 - DNA, 25 bp, Homo sapien
gtccacatccgacaggcaggggctg

SEQ ID NO: 4422383 - DNA, 25 bp, Homo sapien
agtcagggggtcctgtagtccctct

SEQ ID NO: 4422384 - DNA, 25 bp, Homo sapien
aggggtccacatccgacaggcaggg

SEQ ID NO: 4422385 - DNA, 25 bp, Homo sapien
tctgaggggtccacatccgacaggc

SEQ ID NO: 4422386 - DNA, 25 bp, Homo sapien
tgttttccagtgagcagagtgttcc

SEQ ID NO: 4422387 - DNA, 25 bp, Homo sapien
gtgttttccagtgagcagagtgttc

SEQ ID NO: 4422388 - DNA, 25 bp, Homo sapien
cgtgcacatgacgtgtccatctcat

SEQ ID NO: 4422389 - DNA, 25 bp, Homo sapien
tgtgtgcagtacgtgcacatgacgt

SEQ ID NO: 4422390 - DNA, 25 bp, Homo sapien
cagtacgtgcacatgacgtgtccat

SEQ ID NO: 4422391 - DNA, 25 bp, Homo sapien
tgcagtacgtgcacatgacgtgtcc

SEQ ID NO: 4422392 - DNA, 25 bp, Homo sapien
gatgcctctgataagccagcttgga

SEQ ID NO: 4422393 - DNA, 25 bp, Homo sapien
gatctcgagttttgcgggctccagg

SEQ ID NO: 4422394 - DNA, 25 bp, Homo sapien
cagtccagggatgcctctgataagc

SEQ ID NO: 4422395 - DNA, 25 bp, Homo sapien
tccagtgcaaacaccgactgccttt

SEQ ID NO: 4422396 - DNA, 25 bp, Homo sapien
caggagaggagtacaacctgacact

SEQ ID NO: 4422397 - DNA, 25 bp, Homo sapien
acctccaggagaggagtacaacctg

SEQ ID NO: 4422398 - DNA, 25 bp, Homo sapien
tccaggagaggagtacaacctgaca

SEQ ID NO: 4422399 - DNA, 25 bp, Homo sapien
catggggagcccttctacctccagg

SEQ ID NO: 4422400 - DNA, 25 bp, Homo sapien
aaagcctgggttgcgctctctaagg

SEQ ID NO: 4422401 - DNA, 25 bp, Homo sapien
tcaggcctggaaagcttagaaacag

SEQ ID NO: 4422402 - DNA, 25 bp, Homo sapien
gaatgcctagccacttcagagggtc

SEQ ID NO: 4422403 - DNA, 25 bp, Homo sapien
gaaccacaattagagctcctgacag

SEQ ID NO: 4422404 - DNA, 25 bp, Homo sapien
agcacggaagccgaaacatcctggg

SEQ ID NO: 4422405 - DNA, 25 bp, Homo sapien
gtcagcagcacggaagccgaaacat

SEQ ID NO: 4422406 - DNA, 25 bp, Homo sapien
tcagcagcacggaagccgaaacatc

SEQ ID NO: 4422407 - DNA, 25 bp, Homo sapien
gaagccgaaacatcctgggctgttc

SEQ ID NO: 4422408 - DNA, 25 bp, Homo sapien
agctccacttagccatgtgccctgg

SEQ ID NO: 4422409 - DNA, 25 bp, Homo sapien
gagctccacttagccatgtgccctg

SEQ ID NO: 4422410 - DNA, 25 bp, Homo sapien
tcattctgagtgttatatggaagtg

SEQ ID NO: 4422411 - DNA, 25 bp, Homo sapien
agccatatcattctgagtgttatat

SEQ ID NO: 4422412 - DNA, 25 bp, Homo sapien
catatcattctgagtgttatatgga

SEQ ID NO: 4422413 - DNA, 25 bp, Homo sapien
aatatgcataaactttagatgtttc

SEQ ID NO: 4422414 - DNA, 25 bp, Homo sapien
ggtgtaagcagattttgaatccagg

SEQ ID NO: 4422415 - DNA, 25 bp, Homo sapien
taaggaaagcaagttccaagagaaa

SEQ ID NO: 4422416 - DNA, 25 bp, Homo sapien
ttccaggagatggttgttcccatgc

SEQ ID NO: 4422417 - DNA, 25 bp, Homo sapien
gctccgtggatggtgtaagcagatt

SEQ ID NO: 4422418 - DNA, 25 bp, Homo sapien
ctctccattcaattctccacagatg

SEQ ID NO: 4422419 - DNA, 25 bp, Homo sapien
caattctccacagatgaggccacta

SEQ ID NO: 4422420 - DNA, 25 bp, Homo sapien
ttcaattctccacagatgaggccac

SEQ ID NO: 4422421 - DNA, 25 bp, Homo sapien
attctccacagatgaggccactaag

SEQ ID NO: 4422422 - DNA, 25 bp, Homo sapien
cagctgcaggcagcttttatcttca

SEQ ID NO: 4422423 - DNA, 25 bp, Homo sapien
tgcaggcagcttttatcttcagaag

SEQ ID NO: 4422424 - DNA, 25 bp, Homo sapien
ttttatcttcagaagaaaatgtcat

SEQ ID NO: 4422425 - DNA, 25 bp, Homo sapien
gctgcaggcagcttttatcttcaga

SEQ ID NO: 4422426 - DNA, 25 bp, Homo sapien
ctgggttcggtttccataagccttg

SEQ ID NO: 4422427 - DNA, 25 bp, Homo sapien
tcggtttccataagccttgggactc

SEQ ID NO: 4422428 - DNA, 25 bp, Homo sapien
ggtttccataagccttgggactcat

SEQ ID NO: 4422429 - DNA, 25 bp, Homo sapien
cggtttccataagccttgggactca

SEQ ID NO: 4422430 - DNA, 25 bp, Homo sapien
tctatgtgacacagaagtggagaca

SEQ ID NO: 4422431 - DNA, 25 bp, Homo sapien
aaggtcttgatgtttctgaggctcc

SEQ ID NO: 4422432 - DNA, 25 bp, Homo sapien
tctgagaacaaggagtgttccacgc

SEQ ID NO: 4422433 - DNA, 25 bp, Homo sapien
gcccaattctgaggacacatagata

SEQ ID NO: 4422434 - DNA, 25 bp, Homo sapien
caggttagtcatgtagacgaggttc

SEQ ID NO: 4422435 - DNA, 25 bp, Homo sapien
gccaatctttcgtagtttaacagga

SEQ ID NO: 4422436 - DNA, 25 bp, Homo sapien
gctgctagttagcttaattggcaca

SEQ ID NO: 4422437 - DNA, 25 bp, Homo sapien
ccatttctgcgtggagatttctcag

SEQ ID NO: 4422438 - DNA, 25 bp, Homo sapien
tcatggatgcgccttacaaatagtt

SEQ ID NO: 4422439 - DNA, 25 bp, Homo sapien
cactggcgtcaagaatagatgcaca

SEQ ID NO: 4422440 - DNA, 25 bp, Homo sapien
gggctcatcatggatgcgccttaca

SEQ ID NO: 4422441 - DNA, 25 bp, Homo sapien
atggaccaggatgggatgggctcat

SEQ ID NO: 4422442 - DNA, 25 bp, Homo sapien
tggccacatcaatcgacagcatggg

SEQ ID NO: 4422443 - DNA, 25 bp, Homo sapien
catcaatcgacagcatgggtggcct

SEQ ID NO: 4422444 - DNA, 25 bp, Homo sapien
cacatcaatcgacagcatgggtggc

SEQ ID NO: 4422445 - DNA, 25 bp, Homo sapien
caatcgacagcatgggtggcctcat

SEQ ID NO: 4422446 - DNA, 25 bp, Homo sapien
caggaaagaactggcatcctgggtt

SEQ ID NO: 4422447 - DNA, 25 bp, Homo sapien
ccaggaggagtgggcttgccttctc

SEQ ID NO: 4422448 - DNA, 25 bp, Homo sapien
tgaggacctggaaagcctggcaagg

SEQ ID NO: 4422449 - DNA, 25 bp, Homo sapien
aggacctggaaagcctggcaaggcc

SEQ ID NO: 4422450 - DNA, 25 bp, Homo sapien
gacgaatttccattacacctggctg

SEQ ID NO: 4422451 - DNA, 25 bp, Homo sapien
gggcccacatttacctccaacagag

SEQ ID NO: 4422452 - DNA, 25 bp, Homo sapien
ggatgtcatagagaccctggccaca

SEQ ID NO: 4422453 - DNA, 25 bp, Homo sapien
gcaatagcacatagcaggacgaatt

SEQ ID NO: 4422454 - DNA, 25 bp, Homo sapien
ttgtcaaacaccaaacaagtatagt

SEQ ID NO: 4422455 - DNA, 25 bp, Homo sapien
cattcatctggcaccttgggctttt

SEQ ID NO: 4422456 - DNA, 25 bp, Homo sapien
gataactgaagttgagcttgtcaaa

SEQ ID NO: 4422457 - DNA, 25 bp, Homo sapien
caccaaacaagtatagtaagctctt

SEQ ID NO: 4422458 - DNA, 25 bp, Homo sapien
tccgctcttcgggtaccagttctca

SEQ ID NO: 4422459 - DNA, 25 bp, Homo sapien
tttaaatgcacatactgatcccggg

SEQ ID NO: 4422460 - DNA, 25 bp, Homo sapien
gctgactctggtcttcacctttaaa

SEQ ID NO: 4422461 - DNA, 25 bp, Homo sapien
tgatcccgggcaatggttgcacacg

SEQ ID NO: 4422462 - DNA, 25 bp, Homo sapien
gatttgtacttgaattgtagaagtt

SEQ ID NO: 4422463 - DNA, 25 bp, Homo sapien
gggaaagtgctagcaacagtgtcaa

SEQ ID NO: 4422464 - DNA, 25 bp, Homo sapien
cagaaactcgttgtgcaccactagg

SEQ ID NO: 4422465 - DNA, 25 bp, Homo sapien
catgcgtccaagacttacgggtggt

SEQ ID NO: 4422466 - DNA, 25 bp, Homo sapien
cagatgcactgctactttggcgtta

SEQ ID NO: 4422467 - DNA, 25 bp, Homo sapien
cattcatatgagaacaaaggtctag

SEQ ID NO: 4422468 - DNA, 25 bp, Homo sapien
cctacagggattagggaaatggagc

SEQ ID NO: 4422469 - DNA, 25 bp, Homo sapien
gcaaccttccagttacctgcagagt

SEQ ID NO: 4422470 - DNA, 25 bp, Homo sapien
gggtgcacagccacccctcataaga

SEQ ID NO: 4422471 - DNA, 25 bp, Homo sapien
ccaaaggcaaaattcggagactttg

SEQ ID NO: 4422472 - DNA, 25 bp, Homo sapien
tgctactggagtcctttaacaacat

SEQ ID NO: 4422473 - DNA, 25 bp, Homo sapien
ttgctactggagtcctttaacaaca

SEQ ID NO: 4422474 - DNA, 25 bp, Homo sapien
caaaattcggagactttgatctttg

SEQ ID NO: 4422475 - DNA, 25 bp, Homo sapien
gcagtcatacagaatcctctagaag

SEQ ID NO: 4422476 - DNA, 25 bp, Homo sapien
aagccaggcaagtgaaatgtacaat

SEQ ID NO: 4422477 - DNA, 25 bp, Homo sapien
gcatttggctccatagtacaaggca

SEQ ID NO: 4422478 - DNA, 25 bp, Homo sapien
ctgagacatagacttggacatagac

SEQ ID NO: 4422479 - DNA, 25 bp, Homo sapien
cacttgtgatttgagtcccctgaga

SEQ ID NO: 4422480 - DNA, 25 bp, Homo sapien
gaatcttatggcactctggcccaga

SEQ ID NO: 4422481 - DNA, 25 bp, Homo sapien
tcccctgagaatcttatggcactct

SEQ ID NO: 4422482 - DNA, 25 bp, Homo sapien
accacttgtgatttgagtcccctga

SEQ ID NO: 4422483 - DNA, 25 bp, Homo sapien
tgtccatacagtcctaaacgggttg

SEQ ID NO: 4422484 - DNA, 25 bp, Homo sapien
tccattagcatcaaggagtgccgtg

SEQ ID NO: 4422485 - DNA, 25 bp, Homo sapien
tgtggcaggttcaccgaagaccttc

SEQ ID NO: 4422486 - DNA, 25 bp, Homo sapien
tatatgtgtgcaaggtcgcagggca

SEQ ID NO: 4422487 - DNA, 25 bp, Homo sapien
ggctgcagttttactgagagtaact

SEQ ID NO: 4422488 - DNA, 25 bp, Homo sapien
tcagtgcattcttctctcgccacat

SEQ ID NO: 4422489 - DNA, 25 bp, Homo sapien
tattgttggaaactatagccataga

SEQ ID NO: 4422490 - DNA, 25 bp, Homo sapien
cttgcttagaatggtgtgtttttta

SEQ ID NO: 4422491 - DNA, 25 bp, Homo sapien
gcagtttccttgcaccagttcagta

SEQ ID NO: 4422492 - DNA, 25 bp, Homo sapien
tgctggattgccgtattccctctga

SEQ ID NO: 4422493 - DNA, 25 bp, Homo sapien
gccgtattccctctgatataagctc

SEQ ID NO: 4422494 - DNA, 25 bp, Homo sapien
gattgccgtattccctctgatataa

SEQ ID NO: 4422495 - DNA, 25 bp, Homo sapien
agtgcctgctggattgccgtattcc

SEQ ID NO: 4422496 - DNA, 25 bp, Homo sapien
cgtctgttggattcttggcaataca

SEQ ID NO: 4422497 - DNA, 25 bp, Homo sapien
gaaatcgtctgttggattcttggca

SEQ ID NO: 4422498 - DNA, 25 bp, Homo sapien
cttccttcatctcggaatgaaatcg

SEQ ID NO: 4422499 - DNA, 25 bp, Homo sapien
tctcggaatgaaatcgtctgttgga

SEQ ID NO: 4422500 - DNA, 25 bp, Homo sapien
tagatgtcgagtcatcccaaggtcc

SEQ ID NO: 4422501 - DNA, 25 bp, Homo sapien
taccacctgccagagaactatggag

SEQ ID NO: 4422502 - DNA, 25 bp, Homo sapien
ccatcgaattctgcagggccttttg

SEQ ID NO: 4422503 - DNA, 25 bp, Homo sapien
gaccattttcatcaggactcgcctc

SEQ ID NO: 4422504 - DNA, 25 bp, Homo sapien
ttggcaggaaatccgcgaggagcac

SEQ ID NO: 4422505 - DNA, 25 bp, Homo sapien
tgcaaacagccttacaatgtccgct

SEQ ID NO: 4422506 - DNA, 25 bp, Homo sapien
tggcccgcagttccagagatgacca

SEQ ID NO: 4422507 - DNA, 25 bp, Homo sapien
cagagggtaccatgcaccgggtttc

SEQ ID NO: 4422508 - DNA, 25 bp, Homo sapien
gtccataaaagcaggctcgggggta

SEQ ID NO: 4422509 - DNA, 25 bp, Homo sapien
catctgtccataaaagcaggctcgg

SEQ ID NO: 4422510 - DNA, 25 bp, Homo sapien
atctcccatctgtccataaaagcag

SEQ ID NO: 4422511 - DNA, 25 bp, Homo sapien
cataaaagcaggctcgggggtacag

SEQ ID NO: 4422512 - DNA, 25 bp, Homo sapien
tggagctgtaagctggcagcacact

SEQ ID NO: 4422513 - DNA, 25 bp, Homo sapien
gacctcaacaagtgctttctctgac

SEQ ID NO: 4422514 - DNA, 25 bp, Homo sapien
gaagtagacctcaacaagtgctttc

SEQ ID NO: 4422515 - DNA, 25 bp, Homo sapien
ggagaagtagacctcaacaagtgct

SEQ ID NO: 4422516 - DNA, 25 bp, Homo sapien
ctctaaggagaagtagacctcaaca

SEQ ID NO: 4422517 - DNA, 25 bp, Homo sapien
taaatctctgatcggggaatgcact

SEQ ID NO: 4422518 - DNA, 25 bp, Homo sapien
agtgaccagtaggattggagcagaa

SEQ ID NO: 4422519 - DNA, 25 bp, Homo sapien
tcggggaatgcacttgggctttacc

SEQ ID NO: 4422520 - DNA, 25 bp, Homo sapien
tacccagtctcgagtgaccagtagg

SEQ ID NO: 4422521 - DNA, 25 bp, Homo sapien
tgtaaacctgtagcatccgtggcaa

SEQ ID NO: 4422522 - DNA, 25 bp, Homo sapien
ctcatccttgcattgtaaacctgta

SEQ ID NO: 4422523 - DNA, 25 bp, Homo sapien
tggcaatgttttacaccactgccct

SEQ ID NO: 4422524 - DNA, 25 bp, Homo sapien
gcatccgtggcaatgttttacacca

SEQ ID NO: 4422525 - DNA, 25 bp, Homo sapien
gggccttccagacagtaacagcgac

SEQ ID NO: 4422526 - DNA, 25 bp, Homo sapien
agtaacagcgacagctgcaggaagt

SEQ ID NO: 4422527 - DNA, 25 bp, Homo sapien
gggcagggccttccagacagtaaca

SEQ ID NO: 4422528 - DNA, 25 bp, Homo sapien
cagagtgcattgctgggcagggcct

SEQ ID NO: 4422529 - DNA, 25 bp, Homo sapien
tctgttgcacctgatctgatccagt

SEQ ID NO: 4422530 - DNA, 25 bp, Homo sapien
tgatcttctgttgcacctgatctga

SEQ ID NO: 4422531 - DNA, 25 bp, Homo sapien
actgtgtccacctaaaaaggtgaga

SEQ ID NO: 4422532 - DNA, 25 bp, Homo sapien
gctgacgcatccaggtcatctctgg

SEQ ID NO: 4422533 - DNA, 25 bp, Homo sapien
aggaagttacttctagagcccagtt

SEQ ID NO: 4422534 - DNA, 25 bp, Homo sapien
agagcccagttaatttctgacttaa

SEQ ID NO: 4422535 - DNA, 25 bp, Homo sapien
ggaagccccaatcatgcttctgaat

SEQ ID NO: 4422536 - DNA, 25 bp, Homo sapien
ccggaagccccaatcatgcttctga

SEQ ID NO: 4422537 - DNA, 25 bp, Homo sapien
tctgagatgtttagggttgctttgt

SEQ ID NO: 4422538 - DNA, 25 bp, Homo sapien
tttagggttgctttgtggagcctct

SEQ ID NO: 4422539 - DNA, 25 bp, Homo sapien
ttctgcatttgttctattgtaggcc

SEQ ID NO: 4422540 - DNA, 25 bp, Homo sapien
gaagcttaacggagaaggttctgca

SEQ ID NO: 4422541 - DNA, 25 bp, Homo sapien
acttcatcatggttagaatcttgtc

SEQ ID NO: 4422542 - DNA, 25 bp, Homo sapien
tgagttttgactcatcctctcgtag

SEQ ID NO: 4422543 - DNA, 25 bp, Homo sapien
ttcatcatggttagaatcttgtctc

SEQ ID NO: 4422544 - DNA, 25 bp, Homo sapien
ctctcgtagaagtctccggttccaa

SEQ ID NO: 4422545 - DNA, 25 bp, Homo sapien
ttcttggagggcaaccgtgggtgtg

SEQ ID NO: 4422546 - DNA, 25 bp, Homo sapien
cagaaaggtctggttcgggcttcct

SEQ ID NO: 4422547 - DNA, 25 bp, Homo sapien
tgaatatgcgtctagagattgcggg

SEQ ID NO: 4422548 - DNA, 25 bp, Homo sapien
tggaggaatttggtgtgcagaaaca

SEQ ID NO: 4422549 - DNA, 25 bp, Homo sapien
aaggcatttctcaagtagttacagg

SEQ ID NO: 4422550 - DNA, 25 bp, Homo sapien
taaagatagcaagtttcctccaagt

SEQ ID NO: 4422551 - DNA, 25 bp, Homo sapien
taatttggccatatgagttctgcag

SEQ ID NO: 4422552 - DNA, 25 bp, Homo sapien
ccatttatgtggctgtcgcatgtag

SEQ ID NO: 4422553 - DNA, 25 bp, Homo sapien
tcctaaaatgtcagagtcagaaggg

SEQ ID NO: 4422554 - DNA, 25 bp, Homo sapien
gaattaactctgaaaacgtgctctt

SEQ ID NO: 4422555 - DNA, 25 bp, Homo sapien
aaaatctgaataggaaacctgagcc

SEQ ID NO: 4422556 - DNA, 25 bp, Homo sapien
caatattgagtacgaggcacccatc

SEQ ID NO: 4422557 - DNA, 25 bp, Homo sapien
aatttttgatgagctgacacttcac

SEQ ID NO: 4422558 - DNA, 25 bp, Homo sapien
tggaaccctctggttgccagtaatt

SEQ ID NO: 4422559 - DNA, 25 bp, Homo sapien
gtaatttttgatgagctgacacttc

SEQ ID NO: 4422560 - DNA, 25 bp, Homo sapien
ttggggatgggcttggaaccctctg

SEQ ID NO: 4422561 - DNA, 25 bp, Homo sapien
tcaagcacgagcatcttagtgccca

SEQ ID NO: 4422562 - DNA, 25 bp, Homo sapien
gaaggtctcagtaggacaatctcct

SEQ ID NO: 4422563 - DNA, 25 bp, Homo sapien
catctttcatacagtggccacattg

SEQ ID NO: 4422564 - DNA, 25 bp, Homo sapien
tgttaaatcccattggctggcatcc

SEQ ID NO: 4422565 - DNA, 25 bp, Homo sapien
gatattcagtgatccactatctggg

SEQ ID NO: 4422566 - DNA, 25 bp, Homo sapien
gcaactctatgtcctccattctgaa

SEQ ID NO: 4422567 - DNA, 25 bp, Homo sapien
tctgggtttttgtcactcgtggctc

SEQ ID NO: 4422568 - DNA, 25 bp, Homo sapien
tcaaatcccgatattcagtgatcca

SEQ ID NO: 4422569 - DNA, 25 bp, Homo sapien
cacttgccggtttccataggtataa

SEQ ID NO: 4422570 - DNA, 25 bp, Homo sapien
tcctttgaaggctcacttgccggtt

SEQ ID NO: 4422571 - DNA, 25 bp, Homo sapien
acacttggcttaagcttcaccatga

SEQ ID NO: 4422572 - DNA, 25 bp, Homo sapien
gggtagcacttctcactgcatgcct

SEQ ID NO: 4422573 - DNA, 25 bp, Homo sapien
tattcttgtggtaaagtgaagagta

SEQ ID NO: 4422574 - DNA, 25 bp, Homo sapien
gggatgctttattcttgtggtaaag

SEQ ID NO: 4422575 - DNA, 25 bp, Homo sapien
gtgaagagtaaaagaccagcagagc

SEQ ID NO: 4422576 - DNA, 25 bp, Homo sapien
tgtggtaaagtgaagagtaaaagac

SEQ ID NO: 4422577 - DNA, 25 bp, Homo sapien
ggatccctcgtgaatgacttagtgt

SEQ ID NO: 4422578 - DNA, 25 bp, Homo sapien
gaaattattgggacacaggagctga

SEQ ID NO: 4422579 - DNA, 25 bp, Homo sapien
tgtcctccccaagtaatgagtaagt

SEQ ID NO: 4422580 - DNA, 25 bp, Homo sapien
tagaaatttttgagttgcagcccag

SEQ ID NO: 4422581 - DNA, 25 bp, Homo sapien
ccaacacaaggatgtttaagttctg

SEQ ID NO: 4422582 - DNA, 25 bp, Homo sapien
gtttaagttctgcacatagtgctcc

SEQ ID NO: 4422583 - DNA, 25 bp, Homo sapien
tgctcacgtcttctcctatcgccat

SEQ ID NO: 4422584 - DNA, 25 bp, Homo sapien
tagtgctcccatctgctcacgtctt

SEQ ID NO: 4422585 - DNA, 25 bp, Homo sapien
tgcatttgttaggtaagtgagtaga

SEQ ID NO: 4422586 - DNA, 25 bp, Homo sapien
gaatgaatggagattgtgtatcagg

SEQ ID NO: 4422587 - DNA, 25 bp, Homo sapien
tgtgtatcaggtgtcattgtgatgg

SEQ ID NO: 4422588 - DNA, 25 bp, Homo sapien
gagtaggctctgtggctccttctag

SEQ ID NO: 4422589 - DNA, 25 bp, Homo sapien
taatctggggagtaacgcaaaagaa

SEQ ID NO: 4422590 - DNA, 25 bp, Homo sapien
gcagggtttagcttcattgagatgt

SEQ ID NO: 4422591 - DNA, 25 bp, Homo sapien
cgaagggattgcatgcagtgatgaa

SEQ ID NO: 4422592 - DNA, 25 bp, Homo sapien
gtcaaggacgaagggattgcatgca

SEQ ID NO: 4422593 - DNA, 25 bp, Homo sapien
gcggctcctccaactagcagagttc

SEQ ID NO: 4422594 - DNA, 25 bp, Homo sapien
aagaccattgcataggccacagcgg

SEQ ID NO: 4422595 - DNA, 25 bp, Homo sapien
tctaaccaaagacacagctcggact

SEQ ID NO: 4422596 - DNA, 25 bp, Homo sapien
agctcggactcagggagacaagcca

SEQ ID NO: 4422597 - DNA, 25 bp, Homo sapien
ggaggcagcaaatgaggatcaccgc

SEQ ID NO: 4422598 - DNA, 25 bp, Homo sapien
tgcagcctgacttagggccgtggcc

SEQ ID NO: 4422599 - DNA, 25 bp, Homo sapien
aggtaggagctttgccggaagtcga

SEQ ID NO: 4422600 - DNA, 25 bp, Homo sapien
tgccggaagtcgatgcagcctgact

SEQ ID NO: 4422601 - DNA, 25 bp, Homo sapien
accagcaggtagacaggtccataaa

SEQ ID NO: 4422602 - DNA, 25 bp, Homo sapien
ctgaccagcaggtagacaggtccat

SEQ ID NO: 4422603 - DNA, 25 bp, Homo sapien
caggtagacaggtccataaaaaggg

SEQ ID NO: 4422604 - DNA, 25 bp, Homo sapien
cagcaggtagacaggtccataaaaa

SEQ ID NO: 4422605 - DNA, 25 bp, Homo sapien
ttgagatttgttctcgctctctgac

SEQ ID NO: 4422606 - DNA, 25 bp, Homo sapien
ggcagagctgatgccgccttctgga

SEQ ID NO: 4422607 - DNA, 25 bp, Homo sapien
cgctctctgacaaattcaacaaata

SEQ ID NO: 4422608 - DNA, 25 bp, Homo sapien
aatatccacttaacccttcatctgt

SEQ ID NO: 4422609 - DNA, 25 bp, Homo sapien
acaaggcagttgttgctctgaccca

SEQ ID NO: 4422610 - DNA, 25 bp, Homo sapien
cacagctgtgaactcgaggccacga

SEQ ID NO: 4422611 - DNA, 25 bp, Homo sapien
cgtcacctcgtgaagtttctttcca

SEQ ID NO: 4422612 - DNA, 25 bp, Homo sapien
ctgtgaactcgaggccacgaggatt

SEQ ID NO: 4422613 - DNA, 25 bp, Homo sapien
gactgcatttctccgtgggtgctca

SEQ ID NO: 4422614 - DNA, 25 bp, Homo sapien
gaaggggtcgggactgcatttctcc

SEQ ID NO: 4422615 - DNA, 25 bp, Homo sapien
cgtgggtgctcattcctgccctgtg

SEQ ID NO: 4422616 - DNA, 25 bp, Homo sapien
ccgtgggtgctcattcctgccctgt

SEQ ID NO: 4422617 - DNA, 25 bp, Homo sapien
ttaactccgagtgaccaccaggtgg

SEQ ID NO: 4422618 - DNA, 25 bp, Homo sapien
gaaggcattgctacataaccagatg

SEQ ID NO: 4422619 - DNA, 25 bp, Homo sapien
gaatgcccttggagcttgatgacac

SEQ ID NO: 4422620 - DNA, 25 bp, Homo sapien
tgatgacacgcaaataacccagacc

SEQ ID NO: 4422621 - DNA, 25 bp, Homo sapien
tgatctgagagtagccaccagaatc

SEQ ID NO: 4422622 - DNA, 25 bp, Homo sapien
gagtagccaccagaatctgcttgaa

SEQ ID NO: 4422623 - DNA, 25 bp, Homo sapien
caccagaatctgcttgaacaccatt

SEQ ID NO: 4422624 - DNA, 25 bp, Homo sapien
cttctgtgggcttagccctttggaa

SEQ ID NO: 4422625 - DNA, 25 bp, Homo sapien
gtccttggaaaggtctctcatctgt

SEQ ID NO: 4422626 - DNA, 25 bp, Homo sapien
cactggtccttggaaaggtctctca

SEQ ID NO: 4422627 - DNA, 25 bp, Homo sapien
gagtccactggtccttggaaaggtc

SEQ ID NO: 4422628 - DNA, 25 bp, Homo sapien
catgagtccactggtccttggaaag

SEQ ID NO: 4422629 - DNA, 25 bp, Homo sapien
ctgtgacctggcactgagccctcta

SEQ ID NO: 4422630 - DNA, 25 bp, Homo sapien
tgtgacctggcactgagccctctag

SEQ ID NO: 4422631 - DNA, 25 bp, Homo sapien
tggcactgagccctctagccttggc

SEQ ID NO: 4422632 - DNA, 25 bp, Homo sapien
ctgagccctctagccttggcaaaca

SEQ ID NO: 4422633 - DNA, 25 bp, Homo sapien
ggctgctatttcaggccccactagg

SEQ ID NO: 4422634 - DNA, 25 bp, Homo sapien
gctgctatttcaggccccactaggg

SEQ ID NO: 4422635 - DNA, 25 bp, Homo sapien
tacactcacatgcacttgtgtttgc

SEQ ID NO: 4422636 - DNA, 25 bp, Homo sapien
aggcctgtccctctacactcacatg

SEQ ID NO: 4422637 - DNA, 25 bp, Homo sapien
ggagagggatacagagagcaggcct

SEQ ID NO: 4422638 - DNA, 25 bp, Homo sapien
caaagcaaaagcacagggagggcca

SEQ ID NO: 4422639 - DNA, 25 bp, Homo sapien
gaagcatactgacaattcacaccaa

SEQ ID NO: 4422640 - DNA, 25 bp, Homo sapien
tgtgggggaccactttgtgaggtca

SEQ ID NO: 4422641 - DNA, 25 bp, Homo sapien
caggggaatgctgacactgtgtaac

SEQ ID NO: 4422642 - DNA, 25 bp, Homo sapien
tgggaagcatactgacaattcacac

SEQ ID NO: 4422643 - DNA, 25 bp, Homo sapien
tgactgactcatttcttgggtagga

SEQ ID NO: 4422644 - DNA, 25 bp, Homo sapien
ttcttgggtaggaacattggaatat

SEQ ID NO: 4422645 - DNA, 25 bp, Homo sapien
caagaaagtgaacactgactgactc

SEQ ID NO: 4422646 - DNA, 25 bp, Homo sapien
tgggtaggaacattggaatatgttc

SEQ ID NO: 4422647 - DNA, 25 bp, Homo sapien
cttgttagtatcacctgtgaatgtt

SEQ ID NO: 4422648 - DNA, 25 bp, Homo sapien
ttagtatcacctgtgaatgtttttg

SEQ ID NO: 4422649 - DNA, 25 bp, Homo sapien
gtttttgcattagaggaggagagcc

SEQ ID NO: 4422650 - DNA, 25 bp, Homo sapien
gtgaatgtttttgcattagaggagg

SEQ ID NO: 4422651 - DNA, 25 bp, Homo sapien
tctgtgtcctacttttcagtgtggt

SEQ ID NO: 4422652 - DNA, 25 bp, Homo sapien
gaggggctgacatccgactctgtgt

SEQ ID NO: 4422653 - DNA, 25 bp, Homo sapien
gacatccgactctgtgtcctacttt

SEQ ID NO: 4422654 - DNA, 25 bp, Homo sapien
tccgactctgtgtcctacttttcag

SEQ ID NO: 4422655 - DNA, 25 bp, Homo sapien
tcacatgtgcttagggtagttccaa

SEQ ID NO: 4422656 - DNA, 25 bp, Homo sapien
caatcgtcccttttcagggaagcaa

SEQ ID NO: 4422657 - DNA, 25 bp, Homo sapien
tgcttagggtagttccaatcgtccc

SEQ ID NO: 4422658 - DNA, 25 bp, Homo sapien
gctgctggcaccatctaccagggac

SEQ ID NO: 4422659 - DNA, 25 bp, Homo sapien
tgggctctcttaaagctttggcagt

SEQ ID NO: 4422660 - DNA, 25 bp, Homo sapien
tcttaaagctttggcagttctagga

SEQ ID NO: 4422661 - DNA, 25 bp, Homo sapien
ggcatttgggctctcttaaagcttt

SEQ ID NO: 4422662 - DNA, 25 bp, Homo sapien
gctttggcagttctaggagtcatca

SEQ ID NO: 4422663 - DNA, 25 bp, Homo sapien
catgaggcataaccaaacaggtatg

SEQ ID NO: 4422664 - DNA, 25 bp, Homo sapien
caggtatgatacttggccatttgcc

SEQ ID NO: 4422665 - DNA, 25 bp, Homo sapien
gaaagatgccccgtgaagtagagga

SEQ ID NO: 4422666 - DNA, 25 bp, Homo sapien
tgagagccaggtccacatgaggcat

SEQ ID NO: 4422667 - DNA, 25 bp, Homo sapien
aacatgatggcttcttgcaacctcc

SEQ ID NO: 4422668 - DNA, 25 bp, Homo sapien
agcagatgtttcattgccaagaaca

SEQ ID NO: 4422669 - DNA, 25 bp, Homo sapien
cagcattcttccctagcccaaggtg

SEQ ID NO: 4422670 - DNA, 25 bp, Homo sapien
gacaaatcatgaacacattcagcat

SEQ ID NO: 4422671 - DNA, 25 bp, Homo sapien
cagacaaatcatgaacacattcagc

SEQ ID NO: 4422672 - DNA, 25 bp, Homo sapien
tagcccaaggtgtcgaacacagtgg

SEQ ID NO: 4422673 - DNA, 25 bp, Homo sapien
tcatcttcggtcagagtggtgcagc

SEQ ID NO: 4422674 - DNA, 25 bp, Homo sapien
tggagcccggcatcatggactctgt

SEQ ID NO: 4422675 - DNA, 25 bp, Homo sapien
gggcgaatcttcaggccggacaact

SEQ ID NO: 4422676 - DNA, 25 bp, Homo sapien
cccgcgctgtgctcttggatctgga

SEQ ID NO: 4422677 - DNA, 25 bp, Homo sapien
cagcttgcagcaaggagacaattct

SEQ ID NO: 4422678 - DNA, 25 bp, Homo sapien
tggtggccctgcattgtggcccccg

SEQ ID NO: 4422679 - DNA, 25 bp, Homo sapien
tcatagtaaggactcctccctccgg

SEQ ID NO: 4422680 - DNA, 25 bp, Homo sapien
cacctccgctttggcagtggctgcg

SEQ ID NO: 4422681 - DNA, 25 bp, Homo sapien
tctctgaagtccttgtggttctgtt

SEQ ID NO: 4422682 - DNA, 25 bp, Homo sapien
ctctgaagtccttgtggttctgttg

SEQ ID NO: 4422683 - DNA, 25 bp, Homo sapien
gtgatatcactctttgaatacaatc

SEQ ID NO: 4422684 - DNA, 25 bp, Homo sapien
ttctctgaagtccttgtggttctgt

SEQ ID NO: 4422685 - DNA, 25 bp, Homo sapien
tttatcttcttcctgcttattgtct

SEQ ID NO: 4422686 - DNA, 25 bp, Homo sapien
tattgtcttcttcctgcttacttat

SEQ ID NO: 4422687 - DNA, 25 bp, Homo sapien
cttattgtcttcttcctgcttactt

SEQ ID NO: 4422688 - DNA, 25 bp, Homo sapien
tcatcctttatcttcttcctgctta

SEQ ID NO: 4422689 - DNA, 25 bp, Homo sapien
aaactgctttacaatgacggccaga

SEQ ID NO: 4422690 - DNA, 25 bp, Homo sapien
tacaatgacggccagagtagaagct

SEQ ID NO: 4422691 - DNA, 25 bp, Homo sapien
gacaattcaatgaagttgtaaaata

SEQ ID NO: 4422692 - DNA, 25 bp, Homo sapien
tttttagtgaaaggtcagacaattc

SEQ ID NO: 4422693 - DNA, 25 bp, Homo sapien
ggttgtaaaccatagttgatgctgt

SEQ ID NO: 4422694 - DNA, 25 bp, Homo sapien
tgttggttctatcacatccaggatc

SEQ ID NO: 4422695 - DNA, 25 bp, Homo sapien
tctggttgtaaaccatagttgatgc

SEQ ID NO: 4422696 - DNA, 25 bp, Homo sapien
tctgtcatcatgtaagatggtgcct

SEQ ID NO: 4422697 - DNA, 25 bp, Homo sapien
catccgagaacagtggaacatccct

SEQ ID NO: 4422698 - DNA, 25 bp, Homo sapien
ctaacatccgagaacagtggaacat

SEQ ID NO: 4422699 - DNA, 25 bp, Homo sapien
cgagaacagtggaacatccctgagg

SEQ ID NO: 4422700 - DNA, 25 bp, Homo sapien
acagtggaacatccctgaggatgcc

SEQ ID NO: 4422701 - DNA, 25 bp, Homo sapien
cctagagcaaccagtgttaatgaca

SEQ ID NO: 4422702 - DNA, 25 bp, Homo sapien
caaccagtgttaatgacagcagcac

SEQ ID NO: 4422703 - DNA, 25 bp, Homo sapien
agacccacgtcccagcctagagcaa

SEQ ID NO: 4422704 - DNA, 25 bp, Homo sapien
cagtgttaatgacagcagcaccagt

SEQ ID NO: 4422705 - DNA, 25 bp, Homo sapien
aaatatctgaacagcttgaaccaac

SEQ ID NO: 4422706 - DNA, 25 bp, Homo sapien
gagaaaatatctgaacagcttgaac

SEQ ID NO: 4422707 - DNA, 25 bp, Homo sapien
gctgggcaatcttccttgatggcaa

SEQ ID NO: 4422708 - DNA, 25 bp, Homo sapien
gaacagcttgaaccaacacaggcag

SEQ ID NO: 4422709 - DNA, 25 bp, Homo sapien
ctgggaggaataggctccacaaaga

SEQ ID NO: 4422710 - DNA, 25 bp, Homo sapien
gaataggctccacaaagaaaatctt

SEQ ID NO: 4422711 - DNA, 25 bp, Homo sapien
gaggaataggctccacaaagaaaat

SEQ ID NO: 4422712 - DNA, 25 bp, Homo sapien
gggaggaataggctccacaaagaaa

SEQ ID NO: 4422713 - DNA, 25 bp, Homo sapien
tctgtatgcggcaacttttggagcc

SEQ ID NO: 4422714 - DNA, 25 bp, Homo sapien
gccccttgggtgctgattcatgagg

SEQ ID NO: 4422715 - DNA, 25 bp, Homo sapien
tccacatctgtatgcggcaactttt

SEQ ID NO: 4422716 - DNA, 25 bp, Homo sapien
gattcatgaggtgacagcctctgct

SEQ ID NO: 4422717 - DNA, 25 bp, Homo sapien
tacttctcccaatatctagccccaa

SEQ ID NO: 4422718 - DNA, 25 bp, Homo sapien
cttctcccaatatctagccccaaat

SEQ ID NO: 4422719 - DNA, 25 bp, Homo sapien
acttctcccaatatctagccccaaa

SEQ ID NO: 4422720 - DNA, 25 bp, Homo sapien
ttacttctcccaatatctagcccca

SEQ ID NO: 4422721 - DNA, 25 bp, Homo sapien
gattgcagggctagaaagaccagtc

SEQ ID NO: 4422722 - DNA, 25 bp, Homo sapien
tgccaggcaatgagacttgcggaca

SEQ ID NO: 4422723 - DNA, 25 bp, Homo sapien
gagtagactcattgccttcagttca

SEQ ID NO: 4422724 - DNA, 25 bp, Homo sapien
tcagttcagggatggcctgacccac

SEQ ID NO: 4422725 - DNA, 25 bp, Homo sapien
gacacaagctcttatcatgcgagtg

SEQ ID NO: 4422726 - DNA, 25 bp, Homo sapien
agaaatagctgtaattgtggaaaaa

SEQ ID NO: 4422727 - DNA, 25 bp, Homo sapien
atatatataaagattgccccaagtc

SEQ ID NO: 4422728 - DNA, 25 bp, Homo sapien
taaagattgccccaagtcagagtct

SEQ ID NO: 4422729 - DNA, 25 bp, Homo sapien
taggtaaactcaaccatgtgtcctt

SEQ ID NO: 4422730 - DNA, 25 bp, Homo sapien
ataggtaaactcaaccatgtgtcct

SEQ ID NO: 4422731 - DNA, 25 bp, Homo sapien
ggtaaactcaaccatgtgtcctttg

SEQ ID NO: 4422732 - DNA, 25 bp, Homo sapien
tataggtaaactcaaccatgtgtcc

SEQ ID NO: 4422733 - DNA, 25 bp, Homo sapien
gataaacctgttccactttgaaata

SEQ ID NO: 4422734 - DNA, 25 bp, Homo sapien
tgataaacctgttccactttgaaat

SEQ ID NO: 4422735 - DNA, 25 bp, Homo sapien
tgtcttagcaagagggtctgcatta

SEQ ID NO: 4422736 - DNA, 25 bp, Homo sapien
tagcaagagggtctgcattattgac

SEQ ID NO: 4422737 - DNA, 25 bp, Homo sapien
agggtctgcattattgacatcttca

SEQ ID NO: 4422738 - DNA, 25 bp, Homo sapien
cagtgtcttagcaagagggtctgca

SEQ ID NO: 4422739 - DNA, 25 bp, Homo sapien
gaacagacaattgactccagtgagg

SEQ ID NO: 4422740 - DNA, 25 bp, Homo sapien
ggttttactaactgaagcctctcca

SEQ ID NO: 4422741 - DNA, 25 bp, Homo sapien
taaacctatgatgaagagggaacct

SEQ ID NO: 4422742 - DNA, 25 bp, Homo sapien
gagggaacctgtgacaggaatatcc

SEQ ID NO: 4422743 - DNA, 25 bp, Homo sapien
aaagcagtgctcaaattcataatcc

SEQ ID NO: 4422744 - DNA, 25 bp, Homo sapien
cattgcctggaccaaatgcctggat

SEQ ID NO: 4422745 - DNA, 25 bp, Homo sapien
gattcgtgactgtgtgtgaaaagca

SEQ ID NO: 4422746 - DNA, 25 bp, Homo sapien
aaagagtgggcgtttgcagcaggct

SEQ ID NO: 4422747 - DNA, 25 bp, Homo sapien
actgcaacactattctgacctgagt

SEQ ID NO: 4422748 - DNA, 25 bp, Homo sapien
cctagctgaagtggccagatagcac

SEQ ID NO: 4422749 - DNA, 25 bp, Homo sapien
ccaatgaacaatccttgaaaagtgt

SEQ ID NO: 4422750 - DNA, 25 bp, Homo sapien
tgacctgagttgacaccaatgaaca

SEQ ID NO: 4422751 - DNA, 25 bp, Homo sapien
cagggctttgtggtcagtgtgtttc

SEQ ID NO: 4422752 - DNA, 25 bp, Homo sapien
tttggaaatcatccagggctttgtg

SEQ ID NO: 4422753 - DNA, 25 bp, Homo sapien
ctttgtggtcagtgtgtttctcagc

SEQ ID NO: 4422754 - DNA, 25 bp, Homo sapien
tcatctcatacagctttggaaatca

SEQ ID NO: 4422755 - DNA, 25 bp, Homo sapien
cagaatctcaggttcatgcaccgat

SEQ ID NO: 4422756 - DNA, 25 bp, Homo sapien
tgttgcatggcccaagctctaaggg

SEQ ID NO: 4422757 - DNA, 25 bp, Homo sapien
ggctcctgggagactacatattatt

SEQ ID NO: 4422758 - DNA, 25 bp, Homo sapien
ccccttgagtatgctgagatccgac

SEQ ID NO: 4422759 - DNA, 25 bp, Homo sapien
tggccaagactgtcccttgcaaagc

SEQ ID NO: 4422760 - DNA, 25 bp, Homo sapien
ccaagactgtcccttgcaaagcagc

SEQ ID NO: 4422761 - DNA, 25 bp, Homo sapien
ggccaagactgtcccttgcaaagca

SEQ ID NO: 4422762 - DNA, 25 bp, Homo sapien
agtggccaagactgtcccttgcaaa

SEQ ID NO: 4422763 - DNA, 25 bp, Homo sapien
actcctaggcttaaacaatttgctc

SEQ ID NO: 4422764 - DNA, 25 bp, Homo sapien
caccatgtccaaccacttttaggct

SEQ ID NO: 4422765 - DNA, 25 bp, Homo sapien
tttctggtgggccaactatcctggg

SEQ ID NO: 4422766 - DNA, 25 bp, Homo sapien
gcaccagtgttgtttactatacaga

SEQ ID NO: 4422767 - DNA, 25 bp, Homo sapien
gctggcaccaagtcctatggtaaat

SEQ ID NO: 4422768 - DNA, 25 bp, Homo sapien
aaaggtcagtttcagagcccatgct

SEQ ID NO: 4422769 - DNA, 25 bp, Homo sapien
caaatactttattatgctggcacca

SEQ ID NO: 4422770 - DNA, 25 bp, Homo sapien
tactgcccaacgtagccaagaagtt

SEQ ID NO: 4422771 - DNA, 25 bp, Homo sapien
tcctttggtactgggcatatcttgc

SEQ ID NO: 4422772 - DNA, 25 bp, Homo sapien
gactgacttcagctacactaaaagt

SEQ ID NO: 4422773 - DNA, 25 bp, Homo sapien
tataaatcttggatgatggatccac

SEQ ID NO: 4422774 - DNA, 25 bp, Homo sapien
gccttgtaatgctgcctagactata

SEQ ID NO: 4422775 - DNA, 25 bp, Homo sapien
agactcagcaagtcagctccttcct

SEQ ID NO: 4422776 - DNA, 25 bp, Homo sapien
tctttgctttattctagcagcactg

SEQ ID NO: 4422777 - DNA, 25 bp, Homo sapien
catgggagaatgatgaaggtcagaa

SEQ ID NO: 4422778 - DNA, 25 bp, Homo sapien
tggtctaaggcctgagagcacctgg

SEQ ID NO: 4422779 - DNA, 25 bp, Homo sapien
tccagtatgacactgaattgatggt

SEQ ID NO: 4422780 - DNA, 25 bp, Homo sapien
attctgtgcctatgatttgtgaaca

SEQ ID NO: 4422781 - DNA, 25 bp, Homo sapien
tatgacactgaattgatggtgcact

SEQ ID NO: 4422782 - DNA, 25 bp, Homo sapien
gatctgatatacttccccagggcct

SEQ ID NO: 4422783 - DNA, 25 bp, Homo sapien
cctttgattcttcatccctggccca

SEQ ID NO: 4422784 - DNA, 25 bp, Homo sapien
gaaaacgtctgctcagagattccag

SEQ ID NO: 4422785 - DNA, 25 bp, Homo sapien
tcctcttactccagatgaaaggagg

SEQ ID NO: 4422786 - DNA, 25 bp, Homo sapien
gggtcaatgcccacataagctctct

SEQ ID NO: 4422787 - DNA, 25 bp, Homo sapien
ccctcatgtatgtgtgtggccactg

SEQ ID NO: 4422788 - DNA, 25 bp, Homo sapien
ctttttcttctctttagctctggct

SEQ ID NO: 4422789 - DNA, 25 bp, Homo sapien
tcttctctttagctctggcttatac

SEQ ID NO: 4422790 - DNA, 25 bp, Homo sapien
ttttcttctctttagctctggctta

SEQ ID NO: 4422791 - DNA, 25 bp, Homo sapien
ttcttctctttagctctggcttata

SEQ ID NO: 4422792 - DNA, 25 bp, Homo sapien
gaagaggggtagaggactcttcaca

SEQ ID NO: 4422793 - DNA, 25 bp, Homo sapien
atggagatacttatcaagttcacag

SEQ ID NO: 4422794 - DNA, 25 bp, Homo sapien
ggagatacttatcaagttcacagac

SEQ ID NO: 4422795 - DNA, 25 bp, Homo sapien
gcagggagaagagggtaactgcctg

SEQ ID NO: 4422796 - DNA, 25 bp, Homo sapien
ctgcactagactgggtctccagaaa

SEQ ID NO: 4422797 - DNA, 25 bp, Homo sapien
gtctgcactagactgggtctccaga

SEQ ID NO: 4422798 - DNA, 25 bp, Homo sapien
cactagactgggtctccagaaatgg

SEQ ID NO: 4422799 - DNA, 25 bp, Homo sapien
tccttcccaatgtctgcactagact

SEQ ID NO: 4422800 - DNA, 25 bp, Homo sapien
catagataggttggacattctgagc

SEQ ID NO: 4422801 - DNA, 25 bp, Homo sapien
attctgagcaatcccaacaccacag

SEQ ID NO: 4422802 - DNA, 25 bp, Homo sapien
tgtgacagagactagccctctgttt

SEQ ID NO: 4422803 - DNA, 25 bp, Homo sapien
tcataacccagtggacaactgcctg

SEQ ID NO: 4422804 - DNA, 25 bp, Homo sapien
tcctctaaagcaagttcaaacatgt

SEQ ID NO: 4422805 - DNA, 25 bp, Homo sapien
tttgcagtccagaaaagcgagagca

SEQ ID NO: 4422806 - DNA, 25 bp, Homo sapien
tcggagtgcccttcagaccttggat

SEQ ID NO: 4422807 - DNA, 25 bp, Homo sapien
gataatgaatccttgaattggctcc

SEQ ID NO: 4422808 - DNA, 25 bp, Homo sapien
agggagacaattccttcaaggagct

SEQ ID NO: 4422809 - DNA, 25 bp, Homo sapien
ggagttcacgtctttcacctttata

SEQ ID NO: 4422810 - DNA, 25 bp, Homo sapien
ggaaatttccatagcacaactttgc

SEQ ID NO: 4422811 - DNA, 25 bp, Homo sapien
acaactttgcactttggaacaatca

SEQ ID NO: 4422812 - DNA, 25 bp, Homo sapien
tgaccaccttgttgggtgtccaaaa

SEQ ID NO: 4422813 - DNA, 25 bp, Homo sapien
gggcacagatagtccaagctgatag

SEQ ID NO: 4422814 - DNA, 25 bp, Homo sapien
tgcaaaagctatcacgcaactgagg

SEQ ID NO: 4422815 - DNA, 25 bp, Homo sapien
caagctgatagaactcaaagacctc

SEQ ID NO: 4422816 - DNA, 25 bp, Homo sapien
catgtattttggagactagctggct

SEQ ID NO: 4422817 - DNA, 25 bp, Homo sapien
tctgagcatgcattctggttgtact

SEQ ID NO: 4422818 - DNA, 25 bp, Homo sapien
tctgtatgcaatccatgtacttcac

SEQ ID NO: 4422819 - DNA, 25 bp, Homo sapien
tgtactgtgagtgaactgagactca

SEQ ID NO: 4422820 - DNA, 25 bp, Homo sapien
tctgcccccattgactgatttcttc

SEQ ID NO: 4422821 - DNA, 25 bp, Homo sapien
tctggttctgaggaagtctctcctc

SEQ ID NO: 4422822 - DNA, 25 bp, Homo sapien
aggatcaaggccagtctcaggccct

SEQ ID NO: 4422823 - DNA, 25 bp, Homo sapien
tcctcctgactcaggatcaaggcca

SEQ ID NO: 4422824 - DNA, 25 bp, Homo sapien
gcagtgtacacagaggacatacatc

SEQ ID NO: 4422825 - DNA, 25 bp, Homo sapien
ctccagtgcagttcattatgtcctc

SEQ ID NO: 4422826 - DNA, 25 bp, Homo sapien
attatgtcctctgcagtgtacacag

SEQ ID NO: 4422827 - DNA, 25 bp, Homo sapien
cctctaacattgtggttaccctgct

SEQ ID NO: 4422828 - DNA, 25 bp, Homo sapien
gaacctggtgattggtcagtccaag

SEQ ID NO: 4422829 - DNA, 25 bp, Homo sapien
ctggtgattggtcagtccaagtcca

SEQ ID NO: 4422830 - DNA, 25 bp, Homo sapien
ttctgggaacctggtgattggtcag

SEQ ID NO: 4422831 - DNA, 25 bp, Homo sapien
tgggaacctggtgattggtcagtcc

SEQ ID NO: 4422832 - DNA, 25 bp, Homo sapien
tgctgcattggtttgatcggattta

SEQ ID NO: 4422833 - DNA, 25 bp, Homo sapien
ggttcagtcagattgggtgctgcat

SEQ ID NO: 4422834 - DNA, 25 bp, Homo sapien
ttcttgacaaggactcctcaggcac

SEQ ID NO: 4422835 - DNA, 25 bp, Homo sapien
tagttcttgtaactactccagtgtc

SEQ ID NO: 4422836 - DNA, 25 bp, Homo sapien
tgaaagtctggtaaataagatctgg

SEQ ID NO: 4422837 - DNA, 25 bp, Homo sapien
agtctggtaaataagatctggtaaa

SEQ ID NO: 4422838 - DNA, 25 bp, Homo sapien
tctggtaaataagatctggtaaaag

SEQ ID NO: 4422839 - DNA, 25 bp, Homo sapien
gtgttgaaagtctggtaaataagat

SEQ ID NO: 4422840 - DNA, 25 bp, Homo sapien
ttcagagaaaagggcttgagaagca

SEQ ID NO: 4422841 - DNA, 25 bp, Homo sapien
aattcagagaaaagggcttgagaag

SEQ ID NO: 4422842 - DNA, 25 bp, Homo sapien
ggcttgagaagcaagtattcctcca

SEQ ID NO: 4422843 - DNA, 25 bp, Homo sapien
gcttgagaagcaagtattcctccat

SEQ ID NO: 4422844 - DNA, 25 bp, Homo sapien
ggagatcagtataccacagagtaca

SEQ ID NO: 4422845 - DNA, 25 bp, Homo sapien
gttgaaccccactagcagcaaagag

SEQ ID NO: 4422846 - DNA, 25 bp, Homo sapien
tataatgccatccaatttagaagag

SEQ ID NO: 4422847 - DNA, 25 bp, Homo sapien
tagataaaatacttggcttgtaggg

SEQ ID NO: 4422848 - DNA, 25 bp, Homo sapien
aatgagcttctagaggacatttttc

SEQ ID NO: 4422849 - DNA, 25 bp, Homo sapien
atgagcttctagaggacatttttcc

SEQ ID NO: 4422850 - DNA, 25 bp, Homo sapien
tattcctatagtcttctttgtctgt

SEQ ID NO: 4422851 - DNA, 25 bp, Homo sapien
tcctatagtcttctttgtctgtgac

SEQ ID NO: 4422852 - DNA, 25 bp, Homo sapien
tactgccacgggtttcttgctgtcc

SEQ ID NO: 4422853 - DNA, 25 bp, Homo sapien
taaacacccatttcgcctatactgc

SEQ ID NO: 4422854 - DNA, 25 bp, Homo sapien
ttcatggtcataacctgaagacttg

SEQ ID NO: 4422855 - DNA, 25 bp, Homo sapien
aacctgaagacttgtctttccccag

SEQ ID NO: 4422856 - DNA, 25 bp, Homo sapien
taaaatgaaagtccgaggtctctgc

SEQ ID NO: 4422857 - DNA, 25 bp, Homo sapien
tatactgagtaattcctatgtctgc

SEQ ID NO: 4422858 - DNA, 25 bp, Homo sapien
acttgtgggtctgaaacttgctgcc

SEQ ID NO: 4422859 - DNA, 25 bp, Homo sapien
tgtctgcctgtaataacctcgatgg

SEQ ID NO: 4422860 - DNA, 25 bp, Homo sapien
gcatctctccctttatccactccca

SEQ ID NO: 4422861 - DNA, 25 bp, Homo sapien
tgcatctctccctttatccactccc

SEQ ID NO: 4422862 - DNA, 25 bp, Homo sapien
ctacctctgcatctctccctttatc

SEQ ID NO: 4422863 - DNA, 25 bp, Homo sapien
ctctgcatctctccctttatccact

SEQ ID NO: 4422864 - DNA, 25 bp, Homo sapien
agaacagccatagctccctcaacat

SEQ ID NO: 4422865 - DNA, 25 bp, Homo sapien
acatccagaacagccatagctccct

SEQ ID NO: 4422866 - DNA, 25 bp, Homo sapien
tccagaacagccatagctccctcaa

SEQ ID NO: 4422867 - DNA, 25 bp, Homo sapien
acagccatagctccctcaacatgga

SEQ ID NO: 4422868 - DNA, 25 bp, Homo sapien
tgcatgatgttgtagtcttctgtcc

SEQ ID NO: 4422869 - DNA, 25 bp, Homo sapien
tccctgctcgacttatatttcagaa

SEQ ID NO: 4422870 - DNA, 25 bp, Homo sapien
tcgtggaacttactgcatgatgttg

SEQ ID NO: 4422871 - DNA, 25 bp, Homo sapien
tcaagtccctgtgcttcgatcgtgg

SEQ ID NO: 4422872 - DNA, 25 bp, Homo sapien
cttgctctgtccaaccgtcattgct

SEQ ID NO: 4422873 - DNA, 25 bp, Homo sapien
tctgtccaaccgtcattgctcagga

SEQ ID NO: 4422874 - DNA, 25 bp, Homo sapien
ctcaggatctgccacatctgagaga

SEQ ID NO: 4422875 - DNA, 25 bp, Homo sapien
ccaaccgtcattgctcaggatctgc

SEQ ID NO: 4422876 - DNA, 25 bp, Homo sapien
tcctgaaagacaccagaactaaccc

SEQ ID NO: 4422877 - DNA, 25 bp, Homo sapien
ccaacatggggctaaacaaggaaga

SEQ ID NO: 4422878 - DNA, 25 bp, Homo sapien
tcacaggccctgcaatatagcagct

SEQ ID NO: 4422879 - DNA, 25 bp, Homo sapien
tatagcagcttctcaaccaacatgg

SEQ ID NO: 4422880 - DNA, 25 bp, Homo sapien
agaccactgactggtgccaactgtg

SEQ ID NO: 4422881 - DNA, 25 bp, Homo sapien
ttctgtattgttgggccttctgaag

SEQ ID NO: 4422882 - DNA, 25 bp, Homo sapien
ggtgccaactgtgccagtaagaaga

SEQ ID NO: 4422883 - DNA, 25 bp, Homo sapien
gccttctgaagaccgagagaaaact

SEQ ID NO: 4422884 - DNA, 25 bp, Homo sapien
tttgtatttccaggttgggtcctgc

SEQ ID NO: 4422885 - DNA, 25 bp, Homo sapien
ttgtatttccaggttgggtcctgca

SEQ ID NO: 4422886 - DNA, 25 bp, Homo sapien
ttctgcaaattggtaagaggaaaga

SEQ ID NO: 4422887 - DNA, 25 bp, Homo sapien
tattctgcaaattggtaagaggaaa

SEQ ID NO: 4422888 - DNA, 25 bp, Homo sapien
tccaatagcttagtgacatgggcct

SEQ ID NO: 4422889 - DNA, 25 bp, Homo sapien
tagcttagtgacatgggcctttcct

SEQ ID NO: 4422890 - DNA, 25 bp, Homo sapien
caatagcttagtgacatgggccttt

SEQ ID NO: 4422891 - DNA, 25 bp, Homo sapien
tgggcctttcctggcggtctctgat

SEQ ID NO: 4422892 - DNA, 25 bp, Homo sapien
cagttgttttgctctgagctcagca

SEQ ID NO: 4422893 - DNA, 25 bp, Homo sapien
cagggccttcccaattgttccgcaa

SEQ ID NO: 4422894 - DNA, 25 bp, Homo sapien
tccacttccttgtacaagctgctta

SEQ ID NO: 4422895 - DNA, 25 bp, Homo sapien
cataggcgattcattgtctcttcca

SEQ ID NO: 4422896 - DNA, 25 bp, Homo sapien
agctagatcccattcgaaaagcaga

SEQ ID NO: 4422897 - DNA, 25 bp, Homo sapien
gctagatcccattcgaaaagcagat

SEQ ID NO: 4422898 - DNA, 25 bp, Homo sapien
ctagatcccattcgaaaagcagatc

SEQ ID NO: 4422899 - DNA, 25 bp, Homo sapien
tagatcccattcgaaaagcagatct

SEQ ID NO: 4422900 - DNA, 25 bp, Homo sapien
ccatgcatcagacactggagttatt

SEQ ID NO: 4422901 - DNA, 25 bp, Homo sapien
gagttattgtcactgcaggataaac

SEQ ID NO: 4422902 - DNA, 25 bp, Homo sapien
gataaacctgccatgagcccaggac

SEQ ID NO: 4422903 - DNA, 25 bp, Homo sapien
catgcatcagacactggagttattg

SEQ ID NO: 4422904 - DNA, 25 bp, Homo sapien
accactttgcttttaaagactagag

SEQ ID NO: 4422905 - DNA, 25 bp, Homo sapien
gagtatcagagaaagttgaattcag

SEQ ID NO: 4422906 - DNA, 25 bp, Homo sapien
tttgtgtcatcattgaccactttgc

SEQ ID NO: 4422907 - DNA, 25 bp, Homo sapien
aaagactagagtatcagagaaagtt

SEQ ID NO: 4422908 - DNA, 25 bp, Homo sapien
atttctttcagggccagtgggagag

SEQ ID NO: 4422909 - DNA, 25 bp, Homo sapien
agtgggagaggtcgaagggctataa

SEQ ID NO: 4422910 - DNA, 25 bp, Homo sapien
ggagaggtcgaagggctataaatat

SEQ ID NO: 4422911 - DNA, 25 bp, Homo sapien
aggtcgaagggctataaatattcct

SEQ ID NO: 4422912 - DNA, 25 bp, Homo sapien
tcccaccacggtccatcttcatgag

SEQ ID NO: 4422913 - DNA, 25 bp, Homo sapien
ccacggtccatcttcatgagccttg

SEQ ID NO: 4422914 - DNA, 25 bp, Homo sapien
ggttgagtattgtctctcagatcca

SEQ ID NO: 4422915 - DNA, 25 bp, Homo sapien
tgtgactgtggttgagtattgtctc

SEQ ID NO: 4422916 - DNA, 25 bp, Homo sapien
gagagcacacattgatccacagctg

SEQ ID NO: 4422917 - DNA, 25 bp, Homo sapien
tgaacattctgccttgacctaatgg

SEQ ID NO: 4422918 - DNA, 25 bp, Homo sapien
tcttgtaaaaacctcatgagagcac

SEQ ID NO: 4422919 - DNA, 25 bp, Homo sapien
tcatgatattaccaagtgggaacca

SEQ ID NO: 4422920 - DNA, 25 bp, Homo sapien
catcgagatgacatggccatagaag

SEQ ID NO: 4422921 - DNA, 25 bp, Homo sapien
gtgaagtaatctatggagacccagg

SEQ ID NO: 4422922 - DNA, 25 bp, Homo sapien
cagggagacacaagctgacatcgag

SEQ ID NO: 4422923 - DNA, 25 bp, Homo sapien
gaagtaatctatggagacccaggat

SEQ ID NO: 4422924 - DNA, 25 bp, Homo sapien
cagaacaattacctttgctattgct

SEQ ID NO: 4422925 - DNA, 25 bp, Homo sapien
caattacctttgctattgcttcata

SEQ ID NO: 4422926 - DNA, 25 bp, Homo sapien
cctttgctattgcttcatatttctt

SEQ ID NO: 4422927 - DNA, 25 bp, Homo sapien
caacaaaccagaacaattacctttg

SEQ ID NO: 4422928 - DNA, 25 bp, Homo sapien
tcatgatagggacgacaaactgtcc

SEQ ID NO: 4422929 - DNA, 25 bp, Homo sapien
tatgactactccctgcaatgtacag

SEQ ID NO: 4422930 - DNA, 25 bp, Homo sapien
gaattgtagatctgccaacccactc

SEQ ID NO: 4422931 - DNA, 25 bp, Homo sapien
tccctgcacggaacaagacattttg

SEQ ID NO: 4422932 - DNA, 25 bp, Homo sapien
caaaattgtcggacctgtctttggt

SEQ ID NO: 4422933 - DNA, 25 bp, Homo sapien
gatcatgactatatattaacttcag

SEQ ID NO: 4422934 - DNA, 25 bp, Homo sapien
gacacaaacgtgtaagtagaaaagc

SEQ ID NO: 4422935 - DNA, 25 bp, Homo sapien
tatattatagtacaccatacagcat

SEQ ID NO: 4422936 - DNA, 25 bp, Homo sapien
ggtgtgaaggttacccatcaaaatg

SEQ ID NO: 4422937 - DNA, 25 bp, Homo sapien
gcaagcatttgaagcccgcattatt

SEQ ID NO: 4422938 - DNA, 25 bp, Homo sapien
gcataacagtgtacccttataacct

SEQ ID NO: 4422939 - DNA, 25 bp, Homo sapien
gaaatgttcaccgttagcataacag

SEQ ID NO: 4422940 - DNA, 25 bp, Homo sapien
ccatccctggggtgataatggacca

SEQ ID NO: 4422941 - DNA, 25 bp, Homo sapien
tggagcggtcaatactcccatttcc

SEQ ID NO: 4422942 - DNA, 25 bp, Homo sapien
ctggcaagttgttggagcggtcaat

SEQ ID NO: 4422943 - DNA, 25 bp, Homo sapien
ggagctgctggcaagttgttggagc

SEQ ID NO: 4422944 - DNA, 25 bp, Homo sapien
ggtggcaaacacacatgttgcctca

SEQ ID NO: 4422945 - DNA, 25 bp, Homo sapien
gtggcaaacacacatgttgcctcat

SEQ ID NO: 4422946 - DNA, 25 bp, Homo sapien
taagaggtcatatccatttaatggc

SEQ ID NO: 4422947 - DNA, 25 bp, Homo sapien
ttgctgccgttctggtttagtgaca

SEQ ID NO: 4422948 - DNA, 25 bp, Homo sapien
tttttcacctacaatgttgggtgcc

SEQ ID NO: 4422949 - DNA, 25 bp, Homo sapien
tgttgggtgccttctgttgctgccg

SEQ ID NO: 4422950 - DNA, 25 bp, Homo sapien
actctgatgctagcggctgctgctt

SEQ ID NO: 4422951 - DNA, 25 bp, Homo sapien
gatggactctgatgctagcggctgc

SEQ ID NO: 4422952 - DNA, 25 bp, Homo sapien
tgatggactctgatgctagcggctg

SEQ ID NO: 4422953 - DNA, 25 bp, Homo sapien
tggactctgatgctagcggctgctg

SEQ ID NO: 4422954 - DNA, 25 bp, Homo sapien
actgtctctggaatgctctttttgg

SEQ ID NO: 4422955 - DNA, 25 bp, Homo sapien
ctctggaatgctctttttggaagct

SEQ ID NO: 4422956 - DNA, 25 bp, Homo sapien
actggctgccagagactgtctctgg

SEQ ID NO: 4422957 - DNA, 25 bp, Homo sapien
ctggctgccagagactgtctctgga

SEQ ID NO: 4422958 - DNA, 25 bp, Homo sapien
catagctctgccctactgagcatag

SEQ ID NO: 4422959 - DNA, 25 bp, Homo sapien
cttggacacagagtcatagctctgc

SEQ ID NO: 4422960 - DNA, 25 bp, Homo sapien
tgagacgctggtgatcttggacaca

SEQ ID NO: 4422961 - DNA, 25 bp, Homo sapien
taaaatgagacgctggtgatcttgg

SEQ ID NO: 4422962 - DNA, 25 bp, Homo sapien
gatcctccacgtccgtcttcccaca

SEQ ID NO: 4422963 - DNA, 25 bp, Homo sapien
cctggggatcctccacgtccgtctt

SEQ ID NO: 4422964 - DNA, 25 bp, Homo sapien
gggatcctccacgtccgtcttccca

SEQ ID NO: 4422965 - DNA, 25 bp, Homo sapien
tggggatcctccacgtccgtcttcc

SEQ ID NO: 4422966 - DNA, 25 bp, Homo sapien
tttgctaaagttcttgtcgtcatcc

SEQ ID NO: 4422967 - DNA, 25 bp, Homo sapien
taggacttatgacacatttgctaaa

SEQ ID NO: 4422968 - DNA, 25 bp, Homo sapien
tggacttctcatttataggacttat

SEQ ID NO: 4422969 - DNA, 25 bp, Homo sapien
tatgacacatttgctaaagttcttg

SEQ ID NO: 4422970 - DNA, 25 bp, Homo sapien
tctgtccatctgataacttttccat

SEQ ID NO: 4422971 - DNA, 25 bp, Homo sapien
ctctgtccatctgataacttttcca

SEQ ID NO: 4422972 - DNA, 25 bp, Homo sapien
ctgataacttttccatttgctttac

SEQ ID NO: 4422973 - DNA, 25 bp, Homo sapien
gtccatctgataacttttccatttg

SEQ ID NO: 4422974 - DNA, 25 bp, Homo sapien
tgatcattttgtaggatcatttagg

SEQ ID NO: 4422975 - DNA, 25 bp, Homo sapien
tgtaggatcatttaggtgttttcta

SEQ ID NO: 4422976 - DNA, 25 bp, Homo sapien
ggatcatttaggtgttttctaggaa

SEQ ID NO: 4422977 - DNA, 25 bp, Homo sapien
cattttgtaggatcatttaggtgtt

SEQ ID NO: 4422978 - DNA, 25 bp, Homo sapien
ctaatttgatttgcaggatcatttg

SEQ ID NO: 4422979 - DNA, 25 bp, Homo sapien
gcaaaaagccttggcaacatgctta

SEQ ID NO: 4422980 - DNA, 25 bp, Homo sapien
gtgaggacagagagcaaggcaaaaa

SEQ ID NO: 4422981 - DNA, 25 bp, Homo sapien
cttcaggtgaggacagagagcaagg

SEQ ID NO: 4422982 - DNA, 25 bp, Homo sapien
agccttggcaacatgcttagtcaat

SEQ ID NO: 4422983 - DNA, 25 bp, Homo sapien
atctgagtcaagtgtcatacttagt

SEQ ID NO: 4422984 - DNA, 25 bp, Homo sapien
agtcaagtgtcatacttagtcccag

SEQ ID NO: 4422985 - DNA, 25 bp, Homo sapien
gagtcaagtgtcatacttagtccca

SEQ ID NO: 4422986 - DNA, 25 bp, Homo sapien
ctgagtcaagtgtcatacttagtcc

SEQ ID NO: 4422987 - DNA, 25 bp, Homo sapien
atgacgacagggccctcactgagct

SEQ ID NO: 4422988 - DNA, 25 bp, Homo sapien
gggatcactggcaccaaggtgctgt

SEQ ID NO: 4422989 - DNA, 25 bp, Homo sapien
tgacaggcccctccggggatcactg

SEQ ID NO: 4422990 - DNA, 25 bp, Homo sapien
tataaaagatgagttccatgacgac

SEQ ID NO: 4422991 - DNA, 25 bp, Homo sapien
ctttcatcttgatgggataaaacat

SEQ ID NO: 4422992 - DNA, 25 bp, Homo sapien
caaagctttcatcttgatgggataa

SEQ ID NO: 4422993 - DNA, 25 bp, Homo sapien
aaagctttcatcttgatgggataaa

SEQ ID NO: 4422994 - DNA, 25 bp, Homo sapien
agctttcatcttgatgggataaaac

SEQ ID NO: 4422995 - DNA, 25 bp, Homo sapien
gaaatctttcctggatcgatttcca

SEQ ID NO: 4422996 - DNA, 25 bp, Homo sapien
ttcctggatcgatttccagaaccac

SEQ ID NO: 4422997 - DNA, 25 bp, Homo sapien
ctgccatctctctaccaaagaaatc

SEQ ID NO: 4422998 - DNA, 25 bp, Homo sapien
gccatctctctaccaaagaaatctt

SEQ ID NO: 4422999 - DNA, 25 bp, Homo sapien
agcagcaggcattgccccctccgga

SEQ ID NO: 4423000 - DNA, 25 bp, Homo sapien
cctgggatccagcagcaggcattgc

SEQ ID NO: 4423001 - DNA, 25 bp, Homo sapien
ttgccccctccggagagcctgtcat

SEQ ID NO: 4423002 - DNA, 25 bp, Homo sapien
caggatcctgtgccctgggatccag

SEQ ID NO: 4423003 - DNA, 25 bp, Homo sapien
tctgaaaactcgatattgccttctt

SEQ ID NO: 4423004 - DNA, 25 bp, Homo sapien
cttaaggctaaagaccctgcccctg

SEQ ID NO: 4423005 - DNA, 25 bp, Homo sapien
aagccctactgtccgattattgaag

SEQ ID NO: 4423006 - DNA, 25 bp, Homo sapien
actgtttccgtttgcttctcaagct

SEQ ID NO: 4423007 - DNA, 25 bp, Homo sapien
agcttttcatcacttaaattggact

SEQ ID NO: 4423008 - DNA, 25 bp, Homo sapien
cattagagcatttataaagcttttc

SEQ ID NO: 4423009 - DNA, 25 bp, Homo sapien
aattccattagagcatttataaagc

SEQ ID NO: 4423010 - DNA, 25 bp, Homo sapien
tagagcatttataaagcttttcatc

SEQ ID NO: 4423011 - DNA, 25 bp, Homo sapien
ggtcagaatgccatttgtggagtac

SEQ ID NO: 4423012 - DNA, 25 bp, Homo sapien
cttgataataagactgaaggtcaga

SEQ ID NO: 4423013 - DNA, 25 bp, Homo sapien
tgctcattacttagaaaggcttttc

SEQ ID NO: 4423014 - DNA, 25 bp, Homo sapien
ttccttccccatcctattctgctca

SEQ ID NO: 4423015 - DNA, 25 bp, Homo sapien
tccgtgtcctttccctcgacaggag

SEQ ID NO: 4423016 - DNA, 25 bp, Homo sapien
cctcgacaggagctttttgtggcca

SEQ ID NO: 4423017 - DNA, 25 bp, Homo sapien
tttgtggccaatttggcatagggca

SEQ ID NO: 4423018 - DNA, 25 bp, Homo sapien
taatgacgaagtgttggtccgtgtc

SEQ ID NO: 4423019 - DNA, 25 bp, Homo sapien
gctggcgtgcagagaaccctttgca

SEQ ID NO: 4423020 - DNA, 25 bp, Homo sapien
ttcttcaatgagtggatcaagtagg

SEQ ID NO: 4423021 - DNA, 25 bp, Homo sapien
cttgtgtgctaagtgcctctgctgg

SEQ ID NO: 4423022 - DNA, 25 bp, Homo sapien
gtattttctatcaggtcctgggcta

SEQ ID NO: 4423023 - DNA, 25 bp, Homo sapien
cagtttgctgactgcatctggtccc

SEQ ID NO: 4423024 - DNA, 25 bp, Homo sapien
ttttcctcactctagttggtacaga

SEQ ID NO: 4423025 - DNA, 25 bp, Homo sapien
tcactctagttggtacagaaggttc

SEQ ID NO: 4423026 - DNA, 25 bp, Homo sapien
atgtcagtaattttaaccggcactg

SEQ ID NO: 4423027 - DNA, 25 bp, Homo sapien
tcatcaatgatctcttccgaggttc

SEQ ID NO: 4423028 - DNA, 25 bp, Homo sapien
tagacatgatggcatgattgtcatc

SEQ ID NO: 4423029 - DNA, 25 bp, Homo sapien
gacatgatggcatgattgtcatcaa

SEQ ID NO: 4423030 - DNA, 25 bp, Homo sapien
atcaatgatctcttccgaggttcct

SEQ ID NO: 4423031 - DNA, 25 bp, Homo sapien
gaatgaaagaatgttgacatagtgt

SEQ ID NO: 4423032 - DNA, 25 bp, Homo sapien
ctatgaatgaaagaatgttgacata

SEQ ID NO: 4423033 - DNA, 25 bp, Homo sapien
aaagaatgttgacatagtgttctga

SEQ ID NO: 4423034 - DNA, 25 bp, Homo sapien
agaatgttgacatagtgttctgagc

SEQ ID NO: 4423035 - DNA, 25 bp, Homo sapien
cttgtggttgagcaggaccgagcag

SEQ ID NO: 4423036 - DNA, 25 bp, Homo sapien
gaccgagcagccagtttccagaaga

SEQ ID NO: 4423037 - DNA, 25 bp, Homo sapien
tgtggttgagcaggaccgagcagcc

SEQ ID NO: 4423038 - DNA, 25 bp, Homo sapien
caggaccgagcagccagtttccaga

SEQ ID NO: 4423039 - DNA, 25 bp, Homo sapien
gagaggaaactccacagcttccttt

SEQ ID NO: 4423040 - DNA, 25 bp, Homo sapien
cagccccccaatattggcataggtc

SEQ ID NO: 4423041 - DNA, 25 bp, Homo sapien
tggttgtccagccccccaatattgg

SEQ ID NO: 4423042 - DNA, 25 bp, Homo sapien
actccacagcttcctttatttcctg

SEQ ID NO: 4423043 - DNA, 25 bp, Homo sapien
catatgaatacgagtttgggcccat

SEQ ID NO: 4423044 - DNA, 25 bp, Homo sapien
atgaatacgagtttgggcccatcac

SEQ ID NO: 4423045 - DNA, 25 bp, Homo sapien
tatgaatacgagtttgggcccatca

SEQ ID NO: 4423046 - DNA, 25 bp, Homo sapien
atatgaatacgagtttgggcccatc

SEQ ID NO: 4423047 - DNA, 25 bp, Homo sapien
aagatacgcttcttagtcctttcat

SEQ ID NO: 4423048 - DNA, 25 bp, Homo sapien
agatccacagtttctattctgtttg

SEQ ID NO: 4423049 - DNA, 25 bp, Homo sapien
gctagatccacagtttctattctgt

SEQ ID NO: 4423050 - DNA, 25 bp, Homo sapien
atccacagtttctattctgtttgtt

SEQ ID NO: 4423051 - DNA, 25 bp, Homo sapien
tcatccttttcaggggtcgaggaat

SEQ ID NO: 4423052 - DNA, 25 bp, Homo sapien
gtcgaggaatcgcccaaccattttc

SEQ ID NO: 4423053 - DNA, 25 bp, Homo sapien
aggggtcgaggaatcgcccaaccat

SEQ ID NO: 4423054 - DNA, 25 bp, Homo sapien
ttttcaggggtcgaggaatcgccca

SEQ ID NO: 4423055 - DNA, 25 bp, Homo sapien
cagggattcctctgggcaactcccc

SEQ ID NO: 4423056 - DNA, 25 bp, Homo sapien
cctaaatagccctcaggagtgtctt

SEQ ID NO: 4423057 - DNA, 25 bp, Homo sapien
taagttgtcctaaatagccctcagg

SEQ ID NO: 4423058 - DNA, 25 bp, Homo sapien
aagccagctcttccaagagttcagg

SEQ ID NO: 4423059 - DNA, 25 bp, Homo sapien
aaagagctgagtcataagttgtcct

SEQ ID NO: 4423060 - DNA, 25 bp, Homo sapien
tagtgtcttcaaaaggattgggttg

SEQ ID NO: 4423061 - DNA, 25 bp, Homo sapien
aaggattgggttggataagaacagc

SEQ ID NO: 4423062 - DNA, 25 bp, Homo sapien
tgggttggataagaacagcagccat

SEQ ID NO: 4423063 - DNA, 25 bp, Homo sapien
gattgggttggataagaacagcagc

SEQ ID NO: 4423064 - DNA, 25 bp, Homo sapien
tgccaatgtgttggtgcaggctaat

SEQ ID NO: 4423065 - DNA, 25 bp, Homo sapien
tgcaagttgagtgggaattctgcct

SEQ ID NO: 4423066 - DNA, 25 bp, Homo sapien
caagagagacgcagttctgctgctg

SEQ ID NO: 4423067 - DNA, 25 bp, Homo sapien
gaattctgcctctagtgcatccttg

SEQ ID NO: 4423068 - DNA, 25 bp, Homo sapien
ataaataaatgaatacatggacgaa

SEQ ID NO: 4423069 - DNA, 25 bp, Homo sapien
taaataaatgaatacatggacgaac

SEQ ID NO: 4423070 - DNA, 25 bp, Homo sapien
tcccaaatagaagaacgaaagagaa

SEQ ID NO: 4423071 - DNA, 25 bp, Homo sapien
aaatacagttccaaatacagtacac

SEQ ID NO: 4423072 - DNA, 25 bp, Homo sapien
gggataaaatcaggacgattttctg

SEQ ID NO: 4423073 - DNA, 25 bp, Homo sapien
aatcaggacgattttctgacagttc

SEQ ID NO: 4423074 - DNA, 25 bp, Homo sapien
atctggatagctggattcacgttac

SEQ ID NO: 4423075 - DNA, 25 bp, Homo sapien
ggatagctggattcacgttaccaaa

SEQ ID NO: 4423076 - DNA, 25 bp, Homo sapien
gattcacgttaccaaaactgaccat

SEQ ID NO: 4423077 - DNA, 25 bp, Homo sapien
gctggattcacgttaccaaaactga

SEQ ID NO: 4423078 - DNA, 25 bp, Homo sapien
ctctatggggatgtctctactttga

SEQ ID NO: 4423079 - DNA, 25 bp, Homo sapien
tccattgtgctatagctggctgctt

SEQ ID NO: 4423080 - DNA, 25 bp, Homo sapien
gcttcactccattgtgctatagctg

SEQ ID NO: 4423081 - DNA, 25 bp, Homo sapien
tctctactttgagtctgagcttcac

SEQ ID NO: 4423082 - DNA, 25 bp, Homo sapien
agcatttgccaaagaggcactgtgt

SEQ ID NO: 4423083 - DNA, 25 bp, Homo sapien
cttgtttgctggtttggcagttagc

SEQ ID NO: 4423084 - DNA, 25 bp, Homo sapien
aaagaaacaatatctctagcattcc

SEQ ID NO: 4423085 - DNA, 25 bp, Homo sapien
gcatagcctggaactacgacagcca

SEQ ID NO: 4423086 - DNA, 25 bp, Homo sapien
ttgttctggccagataaagtaagaa

SEQ ID NO: 4423087 - DNA, 25 bp, Homo sapien
taggagagcacatgattgttctggc

SEQ ID NO: 4423088 - DNA, 25 bp, Homo sapien
gtctgtaccttctacctcatgcctg

SEQ ID NO: 4423089 - DNA, 25 bp, Homo sapien
cactttgtcccgtacttgaagtcac

SEQ ID NO: 4423090 - DNA, 25 bp, Homo sapien
cagcagcttcgcagaatctgtcgca

SEQ ID NO: 4423091 - DNA, 25 bp, Homo sapien
tcgcagaatctgtcgcagtctgtac

SEQ ID NO: 4423092 - DNA, 25 bp, Homo sapien
tacaggtagtgtgcagcctcaagaa

SEQ ID NO: 4423093 - DNA, 25 bp, Homo sapien
caagaccatgaagcagtgattccca

SEQ ID NO: 4423094 - DNA, 25 bp, Homo sapien
taccattatcgttagtggcaacact

SEQ ID NO: 4423095 - DNA, 25 bp, Homo sapien
taaaagtttcataaggccctgccag

SEQ ID NO: 4423096 - DNA, 25 bp, Homo sapien
gagaaactccgccagacaagtctgt

SEQ ID NO: 4423097 - DNA, 25 bp, Homo sapien
ctgtcgacatgctaagtgagggcct

SEQ ID NO: 4423098 - DNA, 25 bp, Homo sapien
tagagttgacctacccttcggtgct

SEQ ID NO: 4423099 - DNA, 25 bp, Homo sapien
tcgaggttctccttaagcagagcgc

SEQ ID NO: 4423100 - DNA, 25 bp, Homo sapien
cctggcttactgaaggaacggttat

SEQ ID NO: 4423101 - DNA, 25 bp, Homo sapien
gaacggttatggtggtcattttgtc

SEQ ID NO: 4423102 - DNA, 25 bp, Homo sapien
gctgtgagcacgtctacctggctta

SEQ ID NO: 4423103 - DNA, 25 bp, Homo sapien
gaaatctccgaaagaagacttccca

SEQ ID NO: 4423104 - DNA, 25 bp, Homo sapien
cacgctcgggtaaatctctgctgca

SEQ ID NO: 4423105 - DNA, 25 bp, Homo sapien
ggtaaacgcttaagccgtctctgtg

SEQ ID NO: 4423106 - DNA, 25 bp, Homo sapien
taaatccctcttggatcgcgccttg

SEQ ID NO: 4423107 - DNA, 25 bp, Homo sapien
aactcgggagcctgtgaccaaaagc

SEQ ID NO: 4423108 - DNA, 25 bp, Homo sapien
gcacggtcacttaacgaaaatgata

SEQ ID NO: 4423109 - DNA, 25 bp, Homo sapien
cgctgcgcacggtcacttaacgaaa

SEQ ID NO: 4423110 - DNA, 25 bp, Homo sapien
agttacagcgctgcgcacggtcact

SEQ ID NO: 4423111 - DNA, 25 bp, Homo sapien
tcacttaacgaaaatgataaaactc

SEQ ID NO: 4423112 - DNA, 25 bp, Homo sapien
cctcatccagcaagatgagagcaga

SEQ ID NO: 4423113 - DNA, 25 bp, Homo sapien
ttgtctgctttgcagccctcatcca

SEQ ID NO: 4423114 - DNA, 25 bp, Homo sapien
cttgtctgctttgcagccctcatcc

SEQ ID NO: 4423115 - DNA, 25 bp, Homo sapien
agccctcatccagcaagatgagagc

SEQ ID NO: 4423116 - DNA, 25 bp, Homo sapien
ttgagtaccattctctgcacttggt

SEQ ID NO: 4423117 - DNA, 25 bp, Homo sapien
cttgagtaccattctctgcacttgg

SEQ ID NO: 4423118 - DNA, 25 bp, Homo sapien
ctggcctcagtggtacagctctcca

SEQ ID NO: 4423119 - DNA, 25 bp, Homo sapien
tctgctggcctcagtggtacagctc

SEQ ID NO: 4423120 - DNA, 25 bp, Homo sapien
ggcctcagtggtacagctctccaaa

SEQ ID NO: 4423121 - DNA, 25 bp, Homo sapien
tgctggcctcagtggtacagctctc

SEQ ID NO: 4423122 - DNA, 25 bp, Homo sapien
caatcctcatcctaggaaagtttgg

SEQ ID NO: 4423123 - DNA, 25 bp, Homo sapien
catagagttgtaggagcacttgggc

SEQ ID NO: 4423124 - DNA, 25 bp, Homo sapien
gcacttgggcgtatctaatgaccta

SEQ ID NO: 4423125 - DNA, 25 bp, Homo sapien
tgcttctttcatggacttgtagaag

SEQ ID NO: 4423126 - DNA, 25 bp, Homo sapien
ttcctagtcttgacatctccaaaat

SEQ ID NO: 4423127 - DNA, 25 bp, Homo sapien
tcctagtcttgacatctccaaaatt

SEQ ID NO: 4423128 - DNA, 25 bp, Homo sapien
cctagtcttgacatctccaaaattc

SEQ ID NO: 4423129 - DNA, 25 bp, Homo sapien
taacagggaagggtatgacctgacc

SEQ ID NO: 4423130 - DNA, 25 bp, Homo sapien
ttagaaagccgatatgtggctgccg

SEQ ID NO: 4423131 - DNA, 25 bp, Homo sapien
tgcaagccacctgctaaggacggct

SEQ ID NO: 4423132 - DNA, 25 bp, Homo sapien
cactagatcatgaggtgcaagccac

SEQ ID NO: 4423133 - DNA, 25 bp, Homo sapien
ttctggtggtttcttgtcaaatata

SEQ ID NO: 4423134 - DNA, 25 bp, Homo sapien
ctttctggtggtttcttgtcaaata

SEQ ID NO: 4423135 - DNA, 25 bp, Homo sapien
tggtggtttcttgtcaaatatattg

SEQ ID NO: 4423136 - DNA, 25 bp, Homo sapien
ggtttcttgtcaaatatattgagca

SEQ ID NO: 4423137 - DNA, 25 bp, Homo sapien
gcctaatcttgccatttttgacaat

SEQ ID NO: 4423138 - DNA, 25 bp, Homo sapien
taggtaataaacctaatgcagtggc

SEQ ID NO: 4423139 - DNA, 25 bp, Homo sapien
taatgtaggtaataaacctaatgca

SEQ ID NO: 4423140 - DNA, 25 bp, Homo sapien
ctagcctaatcttgccatttttgac

SEQ ID NO: 4423141 - DNA, 25 bp, Homo sapien
tacgcacttgtcgaatggccaaatg

SEQ ID NO: 4423142 - DNA, 25 bp, Homo sapien
cagttcttttgtaagacccataggg

SEQ ID NO: 4423143 - DNA, 25 bp, Homo sapien
tgatgcctgaagagaaagtcccagt

SEQ ID NO: 4423144 - DNA, 25 bp, Homo sapien
caggcctctgtcagcatagtacgca

SEQ ID NO: 4423145 - DNA, 25 bp, Homo sapien
ggcttctcggatctttactttgtcc

SEQ ID NO: 4423146 - DNA, 25 bp, Homo sapien
gagatgttaatgttccccaaggctt

SEQ ID NO: 4423147 - DNA, 25 bp, Homo sapien
gaaacgcagcagataaggttgacca

SEQ ID NO: 4423148 - DNA, 25 bp, Homo sapien
tatttcctggaaacgcagcagataa

SEQ ID NO: 4423149 - DNA, 25 bp, Homo sapien
tcactgtaatgaaactaagccactc

SEQ ID NO: 4423150 - DNA, 25 bp, Homo sapien
tcgtcagcatgagaaaagggcccag

SEQ ID NO: 4423151 - DNA, 25 bp, Homo sapien
caatctcggcagcacaaaatgcagt

SEQ ID NO: 4423152 - DNA, 25 bp, Homo sapien
tcaagtgggtactcaggtgtcaggt

SEQ ID NO: 4423153 - DNA, 25 bp, Homo sapien
cattaagcaccaggttgtgtggcca

SEQ ID NO: 4423154 - DNA, 25 bp, Homo sapien
gacagagcaggcttgagataattcc

SEQ ID NO: 4423155 - DNA, 25 bp, Homo sapien
tactacatgtgttacttagggcaac

SEQ ID NO: 4423156 - DNA, 25 bp, Homo sapien
tatggtgttgactcccaaatggaag

SEQ ID NO: 4423157 - DNA, 25 bp, Homo sapien
catttcaaacttggttaggagccaa

SEQ ID NO: 4423158 - DNA, 25 bp, Homo sapien
agcgctgtggctgtgatcatttcaa

SEQ ID NO: 4423159 - DNA, 25 bp, Homo sapien
aggagccaagctagagttctgagca

SEQ ID NO: 4423160 - DNA, 25 bp, Homo sapien
caagctagagttctgagcagtccca

SEQ ID NO: 4423161 - DNA, 25 bp, Homo sapien
ccactgcttgagttcatgctcatta

SEQ ID NO: 4423162 - DNA, 25 bp, Homo sapien
tttgtaccactgcttgagttcatgc

SEQ ID NO: 4423163 - DNA, 25 bp, Homo sapien
tagcctcccacttggacagtccttg

SEQ ID NO: 4423164 - DNA, 25 bp, Homo sapien
gctgctgaaattcctcgagatttag

SEQ ID NO: 4423165 - DNA, 25 bp, Homo sapien
gacaagccaaaacaataccactgca

SEQ ID NO: 4423166 - DNA, 25 bp, Homo sapien
tagacattgctgaccagagatacgc

SEQ ID NO: 4423167 - DNA, 25 bp, Homo sapien
gaatctgggttcttatctggataca

SEQ ID NO: 4423168 - DNA, 25 bp, Homo sapien
gaagtggaatgtcttagatcagccc

SEQ ID NO: 4423169 - DNA, 25 bp, Homo sapien
catcagaacttgttttttagcaacc

SEQ ID NO: 4423170 - DNA, 25 bp, Homo sapien
cagaacttgttttttagcaaccgag

SEQ ID NO: 4423171 - DNA, 25 bp, Homo sapien
ttttagcaaccgagttgacttcctc

SEQ ID NO: 4423172 - DNA, 25 bp, Homo sapien
tcagaacttgttttttagcaaccga

SEQ ID NO: 4423173 - DNA, 25 bp, Homo sapien
gctctaagtcattctcctgaaggca

SEQ ID NO: 4423174 - DNA, 25 bp, Homo sapien
gggctctaagtcattctcctgaagg

SEQ ID NO: 4423175 - DNA, 25 bp, Homo sapien
ctcctgaaggcacaatgcaagctcc

SEQ ID NO: 4423176 - DNA, 25 bp, Homo sapien
ggcacaatgcaagctcctgtatctt

SEQ ID NO: 4423177 - DNA, 25 bp, Homo sapien
aattcttcatgagtaacttgagtca

SEQ ID NO: 4423178 - DNA, 25 bp, Homo sapien
cagacaataaattcttcatgagtaa

SEQ ID NO: 4423179 - DNA, 25 bp, Homo sapien
aaggtacagacaataaattcttcat

SEQ ID NO: 4423180 - DNA, 25 bp, Homo sapien
ataaattcttcatgagtaacttgag

SEQ ID NO: 4423181 - DNA, 25 bp, Homo sapien
ctacacccacacttagctcttgggc

SEQ ID NO: 4423182 - DNA, 25 bp, Homo sapien
ctttgagctcccaaggccgcagctc

SEQ ID NO: 4423183 - DNA, 25 bp, Homo sapien
tcacctacacccacacttagctctt

SEQ ID NO: 4423184 - DNA, 25 bp, Homo sapien
caaggccgcagctcacctacaccca

SEQ ID NO: 4423185 - DNA, 25 bp, Homo sapien
gtcaatccactttttactcagcaag

SEQ ID NO: 4423186 - DNA, 25 bp, Homo sapien
ctcagcaagtcatcaccagcttctc

SEQ ID NO: 4423187 - DNA, 25 bp, Homo sapien
agttggtcaatccactttttactca

SEQ ID NO: 4423188 - DNA, 25 bp, Homo sapien
tactcagcaagtcatcaccagcttc

SEQ ID NO: 4423189 - DNA, 25 bp, Homo sapien
aagcagtggtgactgggtcagcctt

SEQ ID NO: 4423190 - DNA, 25 bp, Homo sapien
tttttcacatagaagcagtggtgac

SEQ ID NO: 4423191 - DNA, 25 bp, Homo sapien
catagaagcagtggtgactgggtca

SEQ ID NO: 4423192 - DNA, 25 bp, Homo sapien
tcacatagaagcagtggtgactggg

SEQ ID NO: 4423193 - DNA, 25 bp, Homo sapien
cttacccgccgagtcgctgggagga

SEQ ID NO: 4423194 - DNA, 25 bp, Homo sapien
tgcggaggggctcaaggagcagaag

SEQ ID NO: 4423195 - DNA, 25 bp, Homo sapien
tcctctgctggcttacccgccgagt

SEQ ID NO: 4423196 - DNA, 25 bp, Homo sapien
cgccgagtcgctgggaggattccct

SEQ ID NO: 4423197 - DNA, 25 bp, Homo sapien
gggaaaattgtattctccgagagcc

SEQ ID NO: 4423198 - DNA, 25 bp, Homo sapien
gttgagggaaaattgtattctccga

SEQ ID NO: 4423199 - DNA, 25 bp, Homo sapien
gagggaaaattgtattctccgagag

SEQ ID NO: 4423200 - DNA, 25 bp, Homo sapien
gaaaattgtattctccgagagcctt

SEQ ID NO: 4423201 - DNA, 25 bp, Homo sapien
atggtgggcttctccaacctcacag

SEQ ID NO: 4423202 - DNA, 25 bp, Homo sapien
tcatgaagtctgctagagagggaag

SEQ ID NO: 4423203 - DNA, 25 bp, Homo sapien
cagtttatggtcatgaagtctgcta

SEQ ID NO: 4423204 - DNA, 25 bp, Homo sapien
ggtgggcttctccaacctcacagtc

SEQ ID NO: 4423205 - DNA, 25 bp, Homo sapien
tctggctcctcagtgccaggcatga

SEQ ID NO: 4423206 - DNA, 25 bp, Homo sapien
ctctggctcctcagtgccaggcatg

SEQ ID NO: 4423207 - DNA, 25 bp, Homo sapien
tggctcctcagtgccaggcatgagg

SEQ ID NO: 4423208 - DNA, 25 bp, Homo sapien
gctcctcagtgccaggcatgaggac

SEQ ID NO: 4423209 - DNA, 25 bp, Homo sapien
gaagccacgacatattagctttaac

SEQ ID NO: 4423210 - DNA, 25 bp, Homo sapien
tattagctttaacacgatgtcatca

SEQ ID NO: 4423211 - DNA, 25 bp, Homo sapien
tagctttaacacgatgtcatcattt

SEQ ID NO: 4423212 - DNA, 25 bp, Homo sapien
ttagctttaacacgatgtcatcatt

SEQ ID NO: 4423213 - DNA, 25 bp, Homo sapien
tcatcttgaaagatgtctccgggca

SEQ ID NO: 4423214 - DNA, 25 bp, Homo sapien
gaagtctgcaagagatttgactggg

SEQ ID NO: 4423215 - DNA, 25 bp, Homo sapien
ctttgaagtctgcaagagatttgac

SEQ ID NO: 4423216 - DNA, 25 bp, Homo sapien
cagctttgaagtctgcaagagattt

SEQ ID NO: 4423217 - DNA, 25 bp, Homo sapien
cagctagagcttcatccagtgggtt

SEQ ID NO: 4423218 - DNA, 25 bp, Homo sapien
ccaaagccagctagagcttcatcca

SEQ ID NO: 4423219 - DNA, 25 bp, Homo sapien
ttcctggttggtctggtcttatgta

SEQ ID NO: 4423220 - DNA, 25 bp, Homo sapien
aggataccccttgactcttcctggt

SEQ ID NO: 4423221 - DNA, 25 bp, Homo sapien
tggtgagccaggtaaggtcatgaat

SEQ ID NO: 4423222 - DNA, 25 bp, Homo sapien
taaggtcatgaatcacagcaacacc

SEQ ID NO: 4423223 - DNA, 25 bp, Homo sapien
agcttatgtgacactgtggtgagcc

SEQ ID NO: 4423224 - DNA, 25 bp, Homo sapien
cagcttatgtgacactgtggtgagc

SEQ ID NO: 4423225 - DNA, 25 bp, Homo sapien
ccaacaggattcattatgaatgtgt

SEQ ID NO: 4423226 - DNA, 25 bp, Homo sapien
ttatgaatgtgtaatttgctgaaca

SEQ ID NO: 4423227 - DNA, 25 bp, Homo sapien
ctgccaacaggattcattatgaatg

SEQ ID NO: 4423228 - DNA, 25 bp, Homo sapien
cattgttaagccaatgtttccccca

SEQ ID NO: 4423229 - DNA, 25 bp, Homo sapien
caatcccacttcctggaagtaaacg

SEQ ID NO: 4423230 - DNA, 25 bp, Homo sapien
gacaagagctggtcctctcacactt

SEQ ID NO: 4423231 - DNA, 25 bp, Homo sapien
tttccccgggtactgctgctttctg

SEQ ID NO: 4423232 - DNA, 25 bp, Homo sapien
tttctggggtaagaaaggtgctgcc

SEQ ID NO: 4423233 - DNA, 25 bp, Homo sapien
gtgctgccatgcttgaactgtgcca

SEQ ID NO: 4423234 - DNA, 25 bp, Homo sapien
ttccacgtgggaggcgcactgaaag

SEQ ID NO: 4423235 - DNA, 25 bp, Homo sapien
catccagaagccttccacgtgggag

SEQ ID NO: 4423236 - DNA, 25 bp, Homo sapien
taattagaggcttcgtctgtgggtg

SEQ ID NO: 4423237 - DNA, 25 bp, Homo sapien
cttcgtctgtgggtgaggaatcctg

SEQ ID NO: 4423238 - DNA, 25 bp, Homo sapien
ctggaggatcagagtaccataccag

SEQ ID NO: 4423239 - DNA, 25 bp, Homo sapien
tggaggatcagagtaccataccagc

SEQ ID NO: 4423240 - DNA, 25 bp, Homo sapien
gggcactctgggctaaaattccagt

SEQ ID NO: 4423241 - DNA, 25 bp, Homo sapien
gctttggagtaagggcattgagcct

SEQ ID NO: 4423242 - DNA, 25 bp, Homo sapien
gctacattcattagggagagctggc

SEQ ID NO: 4423243 - DNA, 25 bp, Homo sapien
gaacatccacttgcttatttatgtc

SEQ ID NO: 4423244 - DNA, 25 bp, Homo sapien
tctttccagagtgcttttgcatgct

SEQ ID NO: 4423245 - DNA, 25 bp, Homo sapien
actccaagctggtgccgatccatgg

SEQ ID NO: 4423246 - DNA, 25 bp, Homo sapien
gacactccaagctggtgccgatcca

SEQ ID NO: 4423247 - DNA, 25 bp, Homo sapien
gagtgcttttgcatgctttgcccat

SEQ ID NO: 4423248 - DNA, 25 bp, Homo sapien
tccatctccgagcattcgtctagga

SEQ ID NO: 4423249 - DNA, 25 bp, Homo sapien
tccgagcattcgtctaggagacaca

SEQ ID NO: 4423250 - DNA, 25 bp, Homo sapien
agtgttccatctccgagcattcgtc

SEQ ID NO: 4423251 - DNA, 25 bp, Homo sapien
gcattcgtctaggagacacacaccc

SEQ ID NO: 4423252 - DNA, 25 bp, Homo sapien
gcttgctgtcaggattctattttct

SEQ ID NO: 4423253 - DNA, 25 bp, Homo sapien
agcttgctgtcaggattctattttc

SEQ ID NO: 4423254 - DNA, 25 bp, Homo sapien
tcccctgggccaggttcatgaataa

SEQ ID NO: 4423255 - DNA, 25 bp, Homo sapien
agccttcagacaggctctccgggct

SEQ ID NO: 4423256 - DNA, 25 bp, Homo sapien
agagcagccttcagacaggctctcc

SEQ ID NO: 4423257 - DNA, 25 bp, Homo sapien
ctcccctgggccaggttcatgaata

SEQ ID NO: 4423258 - DNA, 25 bp, Homo sapien
tcttgatggggaagctcttctcgca

SEQ ID NO: 4423259 - DNA, 25 bp, Homo sapien
cttgatggggaagctcttctcgcac

SEQ ID NO: 4423260 - DNA, 25 bp, Homo sapien
ttagtcttgatggggaagctcttct

SEQ ID NO: 4423261 - DNA, 25 bp, Homo sapien
agtcttgatggggaagctcttctcg

SEQ ID NO: 4423262 - DNA, 25 bp, Homo sapien
tgcagttttgtggtgttgtgggggc

SEQ ID NO: 4423263 - DNA, 25 bp, Homo sapien
ttgtgggggcagcgtacaggaggtg

SEQ ID NO: 4423264 - DNA, 25 bp, Homo sapien
ggtgttgtgggggcagcgtacagga

SEQ ID NO: 4423265 - DNA, 25 bp, Homo sapien
gttgtgggggcagcgtacaggaggt

SEQ ID NO: 4423266 - DNA, 25 bp, Homo sapien
gaactcgctctactttctaatcgtg

SEQ ID NO: 4423267 - DNA, 25 bp, Homo sapien
ctgtgtgggcagcttggactccagc

SEQ ID NO: 4423268 - DNA, 25 bp, Homo sapien
ggactccagcgccaggtctggaact

SEQ ID NO: 4423269 - DNA, 25 bp, Homo sapien
ccaggtctggaactcgctctacttt

SEQ ID NO: 4423270 - DNA, 25 bp, Homo sapien
ctatattcggatgggtaaaggaagc

SEQ ID NO: 4423271 - DNA, 25 bp, Homo sapien
tgctctcgaataaggctctggtatg

SEQ ID NO: 4423272 - DNA, 25 bp, Homo sapien
tcgaataaggctctggtatgctgta

SEQ ID NO: 4423273 - DNA, 25 bp, Homo sapien
gctttataagtgctactatattcgg

SEQ ID NO: 4423274 - DNA, 25 bp, Homo sapien
cttctttaaaccttgatttggtctg

SEQ ID NO: 4423275 - DNA, 25 bp, Homo sapien
ccttgatttggtctgggtcagaccc

SEQ ID NO: 4423276 - DNA, 25 bp, Homo sapien
cttggcccagtgaacccctgttcct

SEQ ID NO: 4423277 - DNA, 25 bp, Homo sapien
tggcccagtgaacccctgttccttc

SEQ ID NO: 4423278 - DNA, 25 bp, Homo sapien
tgccacagtcatgggaccattgccg

SEQ ID NO: 4423279 - DNA, 25 bp, Homo sapien
catgggaccattgccgtgctgctgc

SEQ ID NO: 4423280 - DNA, 25 bp, Homo sapien
cacagtcatgggaccattgccgtgc

SEQ ID NO: 4423281 - DNA, 25 bp, Homo sapien
cctcccctgccacagtcatgggacc

SEQ ID NO: 4423282 - DNA, 25 bp, Homo sapien
tggtcgggcctttccagcagacctc

SEQ ID NO: 4423283 - DNA, 25 bp, Homo sapien
ggggtggtcgggcctttccagcaga

SEQ ID NO: 4423284 - DNA, 25 bp, Homo sapien
gtggggtggtcgggcctttccagca

SEQ ID NO: 4423285 - DNA, 25 bp, Homo sapien
ggtggtcgggcctttccagcagacc

SEQ ID NO: 4423286 - DNA, 25 bp, Homo sapien
ttgtcctgggggctgaggccttcac

SEQ ID NO: 4423287 - DNA, 25 bp, Homo sapien
tctaactccttgtcctgggggctga

SEQ ID NO: 4423288 - DNA, 25 bp, Homo sapien
ctctaactccttgtcctgggggctg

SEQ ID NO: 4423289 - DNA, 25 bp, Homo sapien
tccttgtcctgggggctgaggcctt

SEQ ID NO: 4423290 - DNA, 25 bp, Homo sapien
caaggacaggagctgttcagatgag

SEQ ID NO: 4423291 - DNA, 25 bp, Homo sapien
ggacaggagctgttcagatgagctc

SEQ ID NO: 4423292 - DNA, 25 bp, Homo sapien
acaggagctgttcagatgagctcac

SEQ ID NO: 4423293 - DNA, 25 bp, Homo sapien
aaggacaggagctgttcagatgagc

SEQ ID NO: 4423294 - DNA, 25 bp, Homo sapien
gctttaggcctactgggcttgtcta

SEQ ID NO: 4423295 - DNA, 25 bp, Homo sapien
tgctctttgctttaggcctactggg

SEQ ID NO: 4423296 - DNA, 25 bp, Homo sapien
cctcgtgcactgtcaggctgctctt

SEQ ID NO: 4423297 - DNA, 25 bp, Homo sapien
ttggctacactgtatctcagaggct

SEQ ID NO: 4423298 - DNA, 25 bp, Homo sapien
agaatagatttctgcccattagtct

SEQ ID NO: 4423299 - DNA, 25 bp, Homo sapien
ccctcagacctcagaatagatttct

SEQ ID NO: 4423300 - DNA, 25 bp, Homo sapien
gcagcaaggctacttcggaggatgc

SEQ ID NO: 4423301 - DNA, 25 bp, Homo sapien
tacttcggaggatgcctctctccag

SEQ ID NO: 4423302 - DNA, 25 bp, Homo sapien
cataccctgtccctgaaccgaacaa

SEQ ID NO: 4423303 - DNA, 25 bp, Homo sapien
tggaagtaatattcgatggcagtaa

SEQ ID NO: 4423304 - DNA, 25 bp, Homo sapien
ggaagcctagaaaggtcaaaggcat

SEQ ID NO: 4423305 - DNA, 25 bp, Homo sapien
aaaggcatttgcctaagattcctgg

SEQ ID NO: 4423306 - DNA, 25 bp, Homo sapien
gacattgtactttccattttgtgga

SEQ ID NO: 4423307 - DNA, 25 bp, Homo sapien
tcaaaattgacttggtcatgttact

SEQ ID NO: 4423308 - DNA, 25 bp, Homo sapien
actcaaaattgacttggtcatgtta

SEQ ID NO: 4423309 - DNA, 25 bp, Homo sapien
tccgagactgcacagttaatggggg

SEQ ID NO: 4423310 - DNA, 25 bp, Homo sapien
tgcacagttaatggggggactttac

SEQ ID NO: 4423311 - DNA, 25 bp, Homo sapien
agctctgctgcccactcctcctgca

SEQ ID NO: 4423312 - DNA, 25 bp, Homo sapien
ctgggtcctgcagagctctgctgcc

SEQ ID NO: 4423313 - DNA, 25 bp, Homo sapien
gctctgctgcccactcctcctgcac

SEQ ID NO: 4423314 - DNA, 25 bp, Homo sapien
cagagctctgctgcccactcctcct

SEQ ID NO: 4423315 - DNA, 25 bp, Homo sapien
ctcggtccgtctttctcactgtgca

SEQ ID NO: 4423316 - DNA, 25 bp, Homo sapien
aggagccctcggtccgtctttctca

SEQ ID NO: 4423317 - DNA, 25 bp, Homo sapien
cgtctttctcactgtgcatcctgac

SEQ ID NO: 4423318 - DNA, 25 bp, Homo sapien
ctcgaggagccctcggtccgtcttt

SEQ ID NO: 4423319 - DNA, 25 bp, Homo sapien
ggtcatacatattgaaggcccagtt

SEQ ID NO: 4423320 - DNA, 25 bp, Homo sapien
cattcttgtcgaaggttcggaaggc

SEQ ID NO: 4423321 - DNA, 25 bp, Homo sapien
gaagtcaatggtgccgtccccattc

SEQ ID NO: 4423322 - DNA, 25 bp, Homo sapien
gtgatggacagagcgcagatgaact

SEQ ID NO: 4423323 - DNA, 25 bp, Homo sapien
taagacaggttcgtgggagatccag

SEQ ID NO: 4423324 - DNA, 25 bp, Homo sapien
gcagagcagagatacaccaagtgcc

SEQ ID NO: 4423325 - DNA, 25 bp, Homo sapien
tacgggccccatggcttggttctgg

SEQ ID NO: 4423326 - DNA, 25 bp, Homo sapien
gaaacagcccatgacatcctgtgtg

SEQ ID NO: 4423327 - DNA, 25 bp, Homo sapien
caggcgtcaggccatcctcattcat

SEQ ID NO: 4423328 - DNA, 25 bp, Homo sapien
aaatcttgtctactcgctgctcagg

SEQ ID NO: 4423329 - DNA, 25 bp, Homo sapien
aagtaatacaatggaagggtcgctc

SEQ ID NO: 4423330 - DNA, 25 bp, Homo sapien
gatgtcgcactgcagaagtaataca

SEQ ID NO: 4423331 - DNA, 25 bp, Homo sapien
tccagatcgataggatgcaaatgag

SEQ ID NO: 4423332 - DNA, 25 bp, Homo sapien
aattaaggcaaacccaaaaggcatg

SEQ ID NO: 4423333 - DNA, 25 bp, Homo sapien
caaggagatacgagcattagcaaaa

SEQ ID NO: 4423334 - DNA, 25 bp, Homo sapien
tttacaggagggtagtgacatagct

SEQ ID NO: 4423335 - DNA, 25 bp, Homo sapien
ttagtaagttgttgctagcaactgc

SEQ ID NO: 4423336 - DNA, 25 bp, Homo sapien
tgttgctagcaactgctgcaatttt

SEQ ID NO: 4423337 - DNA, 25 bp, Homo sapien
tgtccctcttttgggagcctggatg

SEQ ID NO: 4423338 - DNA, 25 bp, Homo sapien
tcacatgccatgttcgttgtccctc

SEQ ID NO: 4423339 - DNA, 25 bp, Homo sapien
agtttgggctcaacatgcacaaggg

SEQ ID NO: 4423340 - DNA, 25 bp, Homo sapien
gatgtcacctcaccagcctataggg

SEQ ID NO: 4423341 - DNA, 25 bp, Homo sapien
tggtttaaccgggtgccattctgaa

SEQ ID NO: 4423342 - DNA, 25 bp, Homo sapien
tgagatgtactgagcctccctgatc

SEQ ID NO: 4423343 - DNA, 25 bp, Homo sapien
gggcagtatattaagagcagggact

SEQ ID NO: 4423344 - DNA, 25 bp, Homo sapien
gaggtttgccaaatgagaagttcaa

SEQ ID NO: 4423345 - DNA, 25 bp, Homo sapien
gcagggactgttctctagttattga

SEQ ID NO: 4423346 - DNA, 25 bp, Homo sapien
gttgtgctctttcatacagaatggg

SEQ ID NO: 4423347 - DNA, 25 bp, Homo sapien
cagggactgttcaggcttgtcctca

SEQ ID NO: 4423348 - DNA, 25 bp, Homo sapien
gtatcagaactggataatgacgcag

SEQ ID NO: 4423349 - DNA, 25 bp, Homo sapien
gacacttgtacggaacactgaagct

SEQ ID NO: 4423350 - DNA, 25 bp, Homo sapien
tttaactgtccaccctaccaagagc

SEQ ID NO: 4423351 - DNA, 25 bp, Homo sapien
ggtgttgaatttaaatcgatcttac

SEQ ID NO: 4423352 - DNA, 25 bp, Homo sapien
aagttaaggatggtctttgccaagg

SEQ ID NO: 4423353 - DNA, 25 bp, Homo sapien
tcctctcctaaaaatgccaaaaggc

SEQ ID NO: 4423354 - DNA, 25 bp, Homo sapien
ttttgataaagatggtgacgaagac

SEQ ID NO: 4423355 - DNA, 25 bp, Homo sapien
tgttcagacctgatggccaaaagaa

SEQ ID NO: 4423356 - DNA, 25 bp, Homo sapien
tgacgaagacgaatgtaaaggtact

SEQ ID NO: 4423357 - DNA, 25 bp, Homo sapien
ccccagttagggtgttgagatgcca

SEQ ID NO: 4423358 - DNA, 25 bp, Homo sapien
tacattgagcctagaactgttcctc

SEQ ID NO: 4423359 - DNA, 25 bp, Homo sapien
gatgccaccttgtagcctcactagg

SEQ ID NO: 4423360 - DNA, 25 bp, Homo sapien
tggaagtccagactacccacttgga

SEQ ID NO: 4423361 - DNA, 25 bp, Homo sapien
tacttcccggttttgctgatcctga

SEQ ID NO: 4423362 - DNA, 25 bp, Homo sapien
aaatgctgtgctttatacttcccgg

SEQ ID NO: 4423363 - DNA, 25 bp, Homo sapien
tgaggatgtggtaaacacaggccag

SEQ ID NO: 4423364 - DNA, 25 bp, Homo sapien
taatttcgtgatatattccaagcag

SEQ ID NO: 4423365 - DNA, 25 bp, Homo sapien
gatgttaattctactcacccatttg

SEQ ID NO: 4423366 - DNA, 25 bp, Homo sapien
tatagaagcctttgtatgttagaac

SEQ ID NO: 4423367 - DNA, 25 bp, Homo sapien
gtgttcatctcaaaagctaagtatg

SEQ ID NO: 4423368 - DNA, 25 bp, Homo sapien
agtttatgccagtaggaacctgggc

SEQ ID NO: 4423369 - DNA, 25 bp, Homo sapien
ctttgggagacttcgacttgttggc

SEQ ID NO: 4423370 - DNA, 25 bp, Homo sapien
ctgcggcggtgttcatggtcgtcct

SEQ ID NO: 4423371 - DNA, 25 bp, Homo sapien
agccccgccgatcaggttcctttgg

SEQ ID NO: 4423372 - DNA, 25 bp, Homo sapien
tcgagacgcccgcagggtggcctta

SEQ ID NO: 4423373 - DNA, 25 bp, Homo sapien
ccggtcactgcggagccgcccgtgc

SEQ ID NO: 4423374 - DNA, 25 bp, Homo sapien
cgagtccggtcactgcggagccgcc

SEQ ID NO: 4423375 - DNA, 25 bp, Homo sapien
ggagccgcccgtgcctaccagcttc

SEQ ID NO: 4423376 - DNA, 25 bp, Homo sapien
ccccgagtccggtcactgcggagcc

SEQ ID NO: 4423377 - DNA, 25 bp, Homo sapien
ttggcctgaatcctaactactgtgc

SEQ ID NO: 4423378 - DNA, 25 bp, Homo sapien
ttggctctggaagaagccccttcgt

SEQ ID NO: 4423379 - DNA, 25 bp, Homo sapien
actactgtgcctccaaatttctgaa

SEQ ID NO: 4423380 - DNA, 25 bp, Homo sapien
caggaagcgtttcgaatccagcgcc

SEQ ID NO: 4423381 - DNA, 25 bp, Homo sapien
gaagggcgctgaaacctaagccaag

SEQ ID NO: 4423382 - DNA, 25 bp, Homo sapien
tgagcgaggcgtgggaattatcccc

SEQ ID NO: 4423383 - DNA, 25 bp, Homo sapien
aaagaattccattaccggaggccag

SEQ ID NO: 4423384 - DNA, 25 bp, Homo sapien
ttttcgttgatccatggcaagggcc

SEQ ID NO: 4423385 - DNA, 25 bp, Homo sapien
cataagcaatggacttcagatagga

SEQ ID NO: 4423386 - DNA, 25 bp, Homo sapien
taagaattagctgtcacacaagtct

SEQ ID NO: 4423387 - DNA, 25 bp, Homo sapien
ccactgattaggtgtatgaccttgg

SEQ ID NO: 4423388 - DNA, 25 bp, Homo sapien
gcatgaccaactggtagcatggaat

SEQ ID NO: 4423389 - DNA, 25 bp, Homo sapien
aatcaatgtgatgaggttatttgaa

SEQ ID NO: 4423390 - DNA, 25 bp, Homo sapien
gaaaatggctcagcattaagtaaaa

SEQ ID NO: 4423391 - DNA, 25 bp, Homo sapien
ttgaaaatggctcagcattaagtaa

SEQ ID NO: 4423392 - DNA, 25 bp, Homo sapien
gtcataatcaatgtgatgaggttat

SEQ ID NO: 4423393 - DNA, 25 bp, Homo sapien
cgctctgtcacgctggctggagcgc

SEQ ID NO: 4423394 - DNA, 25 bp, Homo sapien
agtggcgagatctcagctcagtgca

SEQ ID NO: 4423395 - DNA, 25 bp, Homo sapien
tgcctcccaggttcaagtgatctgc

SEQ ID NO: 4423396 - DNA, 25 bp, Homo sapien
acctctgcctcccaggttcaagtga

SEQ ID NO: 4423397 - DNA, 25 bp, Homo sapien
taaatgctggaagcgttgctgtctg

SEQ ID NO: 4423398 - DNA, 25 bp, Homo sapien
tctcaaattgcccatgggtgcaaag

SEQ ID NO: 4423399 - DNA, 25 bp, Homo sapien
cattcattccagaaacacaaggcag

SEQ ID NO: 4423400 - DNA, 25 bp, Homo sapien
taaacctttttccacgtacatgaca

SEQ ID NO: 4423401 - DNA, 25 bp, Homo sapien
ctcagatcaactgcaatggttttcc

SEQ ID NO: 4423402 - DNA, 25 bp, Homo sapien
tcacacacccagagactcagatcaa

SEQ ID NO: 4423403 - DNA, 25 bp, Homo sapien
caaggggatgtgttgcttaacaggc

SEQ ID NO: 4423404 - DNA, 25 bp, Homo sapien
caggctccaaaatttgccacaagtc

SEQ ID NO: 4423405 - DNA, 25 bp, Homo sapien
ttaaatatgagatacgaaaaaataa

SEQ ID NO: 4423406 - DNA, 25 bp, Homo sapien
gttaaatatgagatacgaaaaaata

SEQ ID NO: 4423407 - DNA, 25 bp, Homo sapien
taaatatgagatacgaaaaaataag

SEQ ID NO: 4423408 - DNA, 25 bp, Homo sapien
ccataccgagactgattcctcttgc

SEQ ID NO: 4423409 - DNA, 25 bp, Homo sapien
tccctgttttctgagaccacgattt

SEQ ID NO: 4423410 - DNA, 25 bp, Homo sapien
cagctttggtggttccccttccata

SEQ ID NO: 4423411 - DNA, 25 bp, Homo sapien
tgagaccacgattttccagaagacc

SEQ ID NO: 4423412 - DNA, 25 bp, Homo sapien
catgatggtcaacccaatacgcgta

SEQ ID NO: 4423413 - DNA, 25 bp, Homo sapien
gacgctggccccgtgattttagaga

SEQ ID NO: 4423414 - DNA, 25 bp, Homo sapien
cagctgtcagtgtcctcctaggaaa

SEQ ID NO: 4423415 - DNA, 25 bp, Homo sapien
gaaactctcgtattgtgggaaactg

SEQ ID NO: 4423416 - DNA, 25 bp, Homo sapien
catcattggtgaggcagccatcgac

SEQ ID NO: 4423417 - DNA, 25 bp, Homo sapien
gaccaccagcattgagataagcaca

SEQ ID NO: 4423418 - DNA, 25 bp, Homo sapien
tcctgtaaacagtctgggccccata

SEQ ID NO: 4423419 - DNA, 25 bp, Homo sapien
ctaagcattcgagcatatggaggca

SEQ ID NO: 4423420 - DNA, 25 bp, Homo sapien
aaggtagttcgtaaacaaatgctga

SEQ ID NO: 4423421 - DNA, 25 bp, Homo sapien
aggtagttcgtaaacaaatgctgaa

SEQ ID NO: 4423422 - DNA, 25 bp, Homo sapien
caagaagtattgctaatccaaccag

SEQ ID NO: 4423423 - DNA, 25 bp, Homo sapien
tctatccaaacctagtttactcttg

SEQ ID NO: 4423424 - DNA, 25 bp, Homo sapien
cctagtttactcttgatagatgaca

SEQ ID NO: 4423425 - DNA, 25 bp, Homo sapien
tccaaacctagtttactcttgatag

SEQ ID NO: 4423426 - DNA, 25 bp, Homo sapien
cattgagcatgtgcacaaagaatac

SEQ ID NO: 4423427 - DNA, 25 bp, Homo sapien
tgacttagcaacagtaatagcattg

SEQ ID NO: 4423428 - DNA, 25 bp, Homo sapien
gcaacagtaatagcattgagcatgt

SEQ ID NO: 4423429 - DNA, 25 bp, Homo sapien
taatagcattgagcatgtgcacaaa

SEQ ID NO: 4423430 - DNA, 25 bp, Homo sapien
tttgccctttcaaaatctgtataag

SEQ ID NO: 4423431 - DNA, 25 bp, Homo sapien
tgccctttcaaaatctgtataagtt

SEQ ID NO: 4423432 - DNA, 25 bp, Homo sapien
caaaatctgtataagttttaatgct

SEQ ID NO: 4423433 - DNA, 25 bp, Homo sapien
ttcaaaatctgtataagttttaatg

SEQ ID NO: 4423434 - DNA, 25 bp, Homo sapien
tgggaaaaccctcagtcacaagctt

SEQ ID NO: 4423435 - DNA, 25 bp, Homo sapien
aaagttgctggcctagtgtgggaaa

SEQ ID NO: 4423436 - DNA, 25 bp, Homo sapien
ttgctggcctagtgtgggaaaaccc

SEQ ID NO: 4423437 - DNA, 25 bp, Homo sapien
gaaaaccctcagtcacaagctttaa

SEQ ID NO: 4423438 - DNA, 25 bp, Homo sapien
gtggactagagttacaagatgtttc

SEQ ID NO: 4423439 - DNA, 25 bp, Homo sapien
tgggaacatacggaacaatgagcca

SEQ ID NO: 4423440 - DNA, 25 bp, Homo sapien
caagatgtttcattccaccgattaa

SEQ ID NO: 4423441 - DNA, 25 bp, Homo sapien
tttttagtgactagcagttgtggac

SEQ ID NO: 4423442 - DNA, 25 bp, Homo sapien
gcagtattcatagtcatgtggctca

SEQ ID NO: 4423443 - DNA, 25 bp, Homo sapien
tattcatagtcatgtggctcacaat

SEQ ID NO: 4423444 - DNA, 25 bp, Homo sapien
acagcagtattcatagtcatgtggc

SEQ ID NO: 4423445 - DNA, 25 bp, Homo sapien
cagtattcatagtcatgtggctcac

SEQ ID NO: 4423446 - DNA, 25 bp, Homo sapien
tcatgttctgtacggtgccactcac

SEQ ID NO: 4423447 - DNA, 25 bp, Homo sapien
ctctacttcactgagttgcctatca

SEQ ID NO: 4423448 - DNA, 25 bp, Homo sapien
gagttgcctatcatgttctgtacgg

SEQ ID NO: 4423449 - DNA, 25 bp, Homo sapien
tacttcactgagttgcctatcatgt

SEQ ID NO: 4423450 - DNA, 25 bp, Homo sapien
tggaatgggaatccctcacaacagc

SEQ ID NO: 4423451 - DNA, 25 bp, Homo sapien
ggaatgggaatccctcacaacagca

SEQ ID NO: 4423452 - DNA, 25 bp, Homo sapien
ataaccttcaccaatttatccttgt

SEQ ID NO: 4423453 - DNA, 25 bp, Homo sapien
gataaccttcaccaatttatccttg

SEQ ID NO: 4423454 - DNA, 25 bp, Homo sapien
tgataaccttcaccaatttatcctt

SEQ ID NO: 4423455 - DNA, 25 bp, Homo sapien
caataacaaatcaggtctttggtac

SEQ ID NO: 4423456 - DNA, 25 bp, Homo sapien
tcatacagtaaagaagaatttattt

SEQ ID NO: 4423457 - DNA, 25 bp, Homo sapien
acagtaaagaagaatttattttcag

SEQ ID NO: 4423458 - DNA, 25 bp, Homo sapien
tacagtaaagaagaatttattttca

SEQ ID NO: 4423459 - DNA, 25 bp, Homo sapien
taaagaagaatttattttcagatac

SEQ ID NO: 4423460 - DNA, 25 bp, Homo sapien
gtcataatgggtcaaaagtaccagc

SEQ ID NO: 4423461 - DNA, 25 bp, Homo sapien
ctatcatgtcataatgggtcaaaag

SEQ ID NO: 4423462 - DNA, 25 bp, Homo sapien
gattagagtttctgctaccaagctt

SEQ ID NO: 4423463 - DNA, 25 bp, Homo sapien
tctcacatgcatagtgattgggcca

SEQ ID NO: 4423464 - DNA, 25 bp, Homo sapien
aaaacaccaccttcaccatacagtt

SEQ ID NO: 4423465 - DNA, 25 bp, Homo sapien
accaccttcaccatacagttcttta

SEQ ID NO: 4423466 - DNA, 25 bp, Homo sapien
caccttcaccatacagttctttaca

SEQ ID NO: 4423467 - DNA, 25 bp, Homo sapien
acaccaccttcaccatacagttctt

SEQ ID NO: 4423468 - DNA, 25 bp, Homo sapien
ccaggataatagctccacagaacgt

SEQ ID NO: 4423469 - DNA, 25 bp, Homo sapien
gcaagttagttgcaaacatgtctca

SEQ ID NO: 4423470 - DNA, 25 bp, Homo sapien
tgtctcatggcacatcacccctaaa

SEQ ID NO: 4423471 - DNA, 25 bp, Homo sapien
cacagaacgtttttcacttggattc

SEQ ID NO: 4423472 - DNA, 25 bp, Homo sapien
atttctgattcgagtcttaacaatt

SEQ ID NO: 4423473 - DNA, 25 bp, Homo sapien
tccatttctgattcgagtcttaaca

SEQ ID NO: 4423474 - DNA, 25 bp, Homo sapien
ccatttctgattcgagtcttaacaa

SEQ ID NO: 4423475 - DNA, 25 bp, Homo sapien
ctccatttctgattcgagtcttaac

SEQ ID NO: 4423476 - DNA, 25 bp, Homo sapien
cagctttctttagtgatagcttctg

SEQ ID NO: 4423477 - DNA, 25 bp, Homo sapien
gaaagggccatcaaaagtattacta

SEQ ID NO: 4423478 - DNA, 25 bp, Homo sapien
tttctttagtgatagcttctgaaaa

SEQ ID NO: 4423479 - DNA, 25 bp, Homo sapien
aagaacacaattgaaagggccatca

SEQ ID NO: 4423480 - DNA, 25 bp, Homo sapien
catgttgtttatcttccatagcata

SEQ ID NO: 4423481 - DNA, 25 bp, Homo sapien
tgcttcaaacaatgattcttcctca

SEQ ID NO: 4423482 - DNA, 25 bp, Homo sapien
cgatctcaggatatgctgcttcaaa

SEQ ID NO: 4423483 - DNA, 25 bp, Homo sapien
tttggtaaacagcaacgatctcagg

SEQ ID NO: 4423484 - DNA, 25 bp, Homo sapien
tcaagtgtagatcagcaatcacgga

SEQ ID NO: 4423485 - DNA, 25 bp, Homo sapien
cagtaatgccagaaagtagatgctc

SEQ ID NO: 4423486 - DNA, 25 bp, Homo sapien
cccagtcaatagtgctcaagtgtag

SEQ ID NO: 4423487 - DNA, 25 bp, Homo sapien
tcaatgaggcagaaatagattcctg

SEQ ID NO: 4423488 - DNA, 25 bp, Homo sapien
gaactcagagaactttttgttgaat

SEQ ID NO: 4423489 - DNA, 25 bp, Homo sapien
cagctgtttcataagatctgacaca

SEQ ID NO: 4423490 - DNA, 25 bp, Homo sapien
ttctttaatatgtatcttagggcta

SEQ ID NO: 4423491 - DNA, 25 bp, Homo sapien
ttatgacattgtagagaactcagag

SEQ ID NO: 4423492 - DNA, 25 bp, Homo sapien
ttaatctctggcgtaaaggaagagg

SEQ ID NO: 4423493 - DNA, 25 bp, Homo sapien
ggaagagggctatccaaacaagtac

SEQ ID NO: 4423494 - DNA, 25 bp, Homo sapien
tttggaatcttagttttaatctctg

SEQ ID NO: 4423495 - DNA, 25 bp, Homo sapien
gtgctttggaatcttagttttaatc

SEQ ID NO: 4423496 - DNA, 25 bp, Homo sapien
tattctacgacctggatgaactcgc

SEQ ID NO: 4423497 - DNA, 25 bp, Homo sapien
tacaccccagtctcgacaagagtga

SEQ ID NO: 4423498 - DNA, 25 bp, Homo sapien
tataatggaacaccttgcatggcct

SEQ ID NO: 4423499 - DNA, 25 bp, Homo sapien
tcagtttattcagccattacgagca

SEQ ID NO: 4423500 - DNA, 25 bp, Homo sapien
tagacactttttcgcccatcctgga

SEQ ID NO: 4423501 - DNA, 25 bp, Homo sapien
tttctggcaccgaggaccactttcg

SEQ ID NO: 4423502 - DNA, 25 bp, Homo sapien
taattctcgcttgcatgccgctcaa

SEQ ID NO: 4423503 - DNA, 25 bp, Homo sapien
tgattacacaaagcccaaagcagtt

SEQ ID NO: 4423504 - DNA, 25 bp, Homo sapien
acttagtgaatttatctggcctggg

SEQ ID NO: 4423505 - DNA, 25 bp, Homo sapien
ttctgcccacagaagggtcagccta

SEQ ID NO: 4423506 - DNA, 25 bp, Homo sapien
gataactctgccctccattgccaaa

SEQ ID NO: 4423507 - DNA, 25 bp, Homo sapien
taacttatgatgacgcaaacactat

SEQ ID NO: 4423508 - DNA, 25 bp, Homo sapien
ggcatcacaactaacttataaacat

SEQ ID NO: 4423509 - DNA, 25 bp, Homo sapien
tatctcaagaataaatgagtctggc

SEQ ID NO: 4423510 - DNA, 25 bp, Homo sapien
gttttcccatgtacttggcagtatg

SEQ ID NO: 4423511 - DNA, 25 bp, Homo sapien
tacttggcagtatgcctgtcccagg

SEQ ID NO: 4423512 - DNA, 25 bp, Homo sapien
tcccttttcaatgctggtcaaactc

SEQ ID NO: 4423513 - DNA, 25 bp, Homo sapien
ctggcacctgatccagtacaggctg

SEQ ID NO: 4423514 - DNA, 25 bp, Homo sapien
aaaaacagctcatgccgtgggctcc

SEQ ID NO: 4423515 - DNA, 25 bp, Homo sapien
gctcctaggtgggtcagccatttcc

SEQ ID NO: 4423516 - DNA, 25 bp, Homo sapien
gttctttgaggagaagcactgagca

SEQ ID NO: 4423517 - DNA, 25 bp, Homo sapien
ttgtatgttctttgaggagaagcac

SEQ ID NO: 4423518 - DNA, 25 bp, Homo sapien
tcctctcataggaagcctgctctgg

SEQ ID NO: 4423519 - DNA, 25 bp, Homo sapien
cttcccactcaactcctctcatagg

SEQ ID NO: 4423520 - DNA, 25 bp, Homo sapien
cctgattggcattttctgctccccg

SEQ ID NO: 4423521 - DNA, 25 bp, Homo sapien
tgctccccgcagtgtcctgtgctga

SEQ ID NO: 4423522 - DNA, 25 bp, Homo sapien
tttaaagaacagctgcacgtggagc

SEQ ID NO: 4423523 - DNA, 25 bp, Homo sapien
tctttgttgtctagacccgagggag

SEQ ID NO: 4423524 - DNA, 25 bp, Homo sapien
gacgaaaggatcagagacaatgccc

SEQ ID NO: 4423525 - DNA, 25 bp, Homo sapien
tctcatgctgtagggactgtgcctg

SEQ ID NO: 4423526 - DNA, 25 bp, Homo sapien
gcctgattccaggataatgctacac

SEQ ID NO: 4423527 - DNA, 25 bp, Homo sapien
ttccaggataatgctacactgtcca

SEQ ID NO: 4423528 - DNA, 25 bp, Homo sapien
taccactcccgctaagccagggcca

SEQ ID NO: 4423529 - DNA, 25 bp, Homo sapien
tcccttgacctctcagattctacca

SEQ ID NO: 4423530 - DNA, 25 bp, Homo sapien
ttccacgtaacactgcttctgctct

SEQ ID NO: 4423531 - DNA, 25 bp, Homo sapien
ttcacagttttccacgtaacactgc

SEQ ID NO: 4423532 - DNA, 25 bp, Homo sapien
catggcagactctcgatccttgtgt

SEQ ID NO: 4423533 - DNA, 25 bp, Homo sapien
tgggttgtggtagaggcagatggcc

SEQ ID NO: 4423534 - DNA, 25 bp, Homo sapien
tgaggaaagtctcgcgcaggttgtc

SEQ ID NO: 4423535 - DNA, 25 bp, Homo sapien
ctgaggaaagtctcgcgcaggttgt

SEQ ID NO: 4423536 - DNA, 25 bp, Homo sapien
cgaggctgaggaaagtctcgcgcag

SEQ ID NO: 4423537 - DNA, 25 bp, Homo sapien
ggctgaggaaagtctcgcgcaggtt

SEQ ID NO: 4423538 - DNA, 25 bp, Homo sapien
tattgtagtccacctctaccaggcc

SEQ ID NO: 4423539 - DNA, 25 bp, Homo sapien
gacatcctgactttggtgcccttct

SEQ ID NO: 4423540 - DNA, 25 bp, Homo sapien
tggctttccgcctccgctggacaga

SEQ ID NO: 4423541 - DNA, 25 bp, Homo sapien
tctctgccgcggttaaggaggtctg

SEQ ID NO: 4423542 - DNA, 25 bp, Homo sapien
ttctctcaggttgagagtcagcttc

SEQ ID NO: 4423543 - DNA, 25 bp, Homo sapien
cacactcctcttgctcataaccctc

SEQ ID NO: 4423544 - DNA, 25 bp, Homo sapien
agttagccagtgagcgaggggcttc

SEQ ID NO: 4423545 - DNA, 25 bp, Homo sapien
caggttgagagtcagcttctcccca

SEQ ID NO: 4423546 - DNA, 25 bp, Homo sapien
aggtgtgttgatggggacccagact

SEQ ID NO: 4423547 - DNA, 25 bp, Homo sapien
tgtgttgatggggacccagactgag

SEQ ID NO: 4423548 - DNA, 25 bp, Homo sapien
tgttgatggggacccagactgagaa

SEQ ID NO: 4423549 - DNA, 25 bp, Homo sapien
caggtgtgttgatggggacccagac

SEQ ID NO: 4423550 - DNA, 25 bp, Homo sapien
gattcctggagttttccaagcactg

SEQ ID NO: 4423551 - DNA, 25 bp, Homo sapien
gcgccgcgtgctggcctggaaataa

SEQ ID NO: 4423552 - DNA, 25 bp, Homo sapien
ggcgtaacccatccgctctgctctt

SEQ ID NO: 4423553 - DNA, 25 bp, Homo sapien
tatccacagcccagtactaggtctg

SEQ ID NO: 4423554 - DNA, 25 bp, Homo sapien
ggatcacaaatcctattgaggccag

SEQ ID NO: 4423555 - DNA, 25 bp, Homo sapien
agcagctgtaatagattctcctgag

SEQ ID NO: 4423556 - DNA, 25 bp, Homo sapien
cctgaggatcacaaatcctattgag

SEQ ID NO: 4423557 - DNA, 25 bp, Homo sapien
cagctgtaatagattctcctgagga

SEQ ID NO: 4423558 - DNA, 25 bp, Homo sapien
taggcactcacattgccctctaaga

SEQ ID NO: 4423559 - DNA, 25 bp, Homo sapien
cagttgtctccagataggcactcac

SEQ ID NO: 4423560 - DNA, 25 bp, Homo sapien
tagatcctggaaattctccccgcag

SEQ ID NO: 4423561 - DNA, 25 bp, Homo sapien
ggccccagttggtgaaggatgttct

SEQ ID NO: 4423562 - DNA, 25 bp, Homo sapien
tggtgggcacctttcctctgctgag

SEQ ID NO: 4423563 - DNA, 25 bp, Homo sapien
tgggggacaggtgtggtctgtggct

SEQ ID NO: 4423564 - DNA, 25 bp, Homo sapien
ctggagtgggggacaggtgtggtct

SEQ ID NO: 4423565 - DNA, 25 bp, Homo sapien
gggacaggtgtggtctgtggctgag

SEQ ID NO: 4423566 - DNA, 25 bp, Homo sapien
ggagtgggggacaggtgtggtctgt

SEQ ID NO: 4423567 - DNA, 25 bp, Homo sapien
ggtctgtgcctgaggaaacctggag

SEQ ID NO: 4423568 - DNA, 25 bp, Homo sapien
tagagtagggcatgggtgtggtctg

SEQ ID NO: 4423569 - DNA, 25 bp, Homo sapien
gtggtctgtgcctgaggaaacctgg

SEQ ID NO: 4423570 - DNA, 25 bp, Homo sapien
ctagagtagggcatgggtgtggtct

SEQ ID NO: 4423571 - DNA, 25 bp, Homo sapien
gcagattaaacaacctttcaggtcg

SEQ ID NO: 4423572 - DNA, 25 bp, Homo sapien
tcccagcggtccacaactgtcactt

SEQ ID NO: 4423573 - DNA, 25 bp, Homo sapien
aattttatgttgacagtgatctccc

SEQ ID NO: 4423574 - DNA, 25 bp, Homo sapien
acttgccccgtcacttgctggtctg

SEQ ID NO: 4423575 - DNA, 25 bp, Homo sapien
cctttcggaaggacgaatggaagag

SEQ ID NO: 4423576 - DNA, 25 bp, Homo sapien
cagccgacgttgaggaacaaaccag

SEQ ID NO: 4423577 - DNA, 25 bp, Homo sapien
gacagcgtgtggtccagaaggcatc

SEQ ID NO: 4423578 - DNA, 25 bp, Homo sapien
gcagatgcgcctcatatgtagaaga

SEQ ID NO: 4423579 - DNA, 25 bp, Homo sapien
agggatcaggcctcgcggcgcggcc

SEQ ID NO: 4423580 - DNA, 25 bp, Homo sapien
atccagctagctccgctctgcgacg

SEQ ID NO: 4423581 - DNA, 25 bp, Homo sapien
gcctgcccgcgctgcagggatcagg

SEQ ID NO: 4423582 - DNA, 25 bp, Homo sapien
tgcaggagtccggacgcatccagct

SEQ ID NO: 4423583 - DNA, 25 bp, Homo sapien
gaaatgttgtcacatcagtgccacc

SEQ ID NO: 4423584 - DNA, 25 bp, Homo sapien
agtgccaccctctagactgagaaag

SEQ ID NO: 4423585 - DNA, 25 bp, Homo sapien
catattaattatcgctgtcacaggg

SEQ ID NO: 4423586 - DNA, 25 bp, Homo sapien
tccaagtgacagtgcaccgtaggtc

SEQ ID NO: 4423587 - DNA, 25 bp, Homo sapien
ttgtacaggccaaagcaatcactgg

SEQ ID NO: 4423588 - DNA, 25 bp, Homo sapien
gcacataggcatttggtggccaaaa

SEQ ID NO: 4423589 - DNA, 25 bp, Homo sapien
ccggtgggacgtccatcatcatcca

SEQ ID NO: 4423590 - DNA, 25 bp, Homo sapien
cacactggaatgtgtggtgcacata

SEQ ID NO: 4423591 - DNA, 25 bp, Homo sapien
ggaaactccagggatctctgtaatt

SEQ ID NO: 4423592 - DNA, 25 bp, Homo sapien
aactccagggatctctgtaattcac

SEQ ID NO: 4423593 - DNA, 25 bp, Homo sapien
ctccagggatctctgtaattcacac

SEQ ID NO: 4423594 - DNA, 25 bp, Homo sapien
tctggaaactccagggatctctgta

SEQ ID NO: 4423595 - DNA, 25 bp, Homo sapien
aaaacaaaaacagcatgtcctctta

SEQ ID NO: 4423596 - DNA, 25 bp, Homo sapien
acaaaaacagcatgtcctcttattc

SEQ ID NO: 4423597 - DNA, 25 bp, Homo sapien
caaaaacagcatgtcctcttattca

SEQ ID NO: 4423598 - DNA, 25 bp, Homo sapien
aaacaaaaacagcatgtcctcttat

SEQ ID NO: 4423599 - DNA, 25 bp, Homo sapien
gtccatacaatttgcagggtcccag

SEQ ID NO: 4423600 - DNA, 25 bp, Homo sapien
tgctgtaaagcgtgaatcccaccgg

SEQ ID NO: 4423601 - DNA, 25 bp, Homo sapien
tgttctgcgctggacatgttctgac

SEQ ID NO: 4423602 - DNA, 25 bp, Homo sapien
cagtagctttccaagtggtgcagcc

SEQ ID NO: 4423603 - DNA, 25 bp, Homo sapien
tctccaattgtgatgcccaagtgtc

SEQ ID NO: 4423604 - DNA, 25 bp, Homo sapien
caagtgtcaagaaagagaactggtg

SEQ ID NO: 4423605 - DNA, 25 bp, Homo sapien
gaccaatggcctgtgacatagccct

SEQ ID NO: 4423606 - DNA, 25 bp, Homo sapien
gaacatgtactcaaggttgttggcc

SEQ ID NO: 4423607 - DNA, 25 bp, Homo sapien
tgctggctggcaagggagaagagga

SEQ ID NO: 4423608 - DNA, 25 bp, Homo sapien
ggtggatacagaaggcagagtgctg

SEQ ID NO: 4423609 - DNA, 25 bp, Homo sapien
ggagaagaggaagatcaggctgcac

SEQ ID NO: 4423610 - DNA, 25 bp, Homo sapien
ggatacagaaggcagagtgctggct

SEQ ID NO: 4423611 - DNA, 25 bp, Homo sapien
tcagaatggcaagtaagcagcttcc

SEQ ID NO: 4423612 - DNA, 25 bp, Homo sapien
tcataagccgtaggatctggaccac

SEQ ID NO: 4423613 - DNA, 25 bp, Homo sapien
taagcttagcggacaggcagtacgc

SEQ ID NO: 4423614 - DNA, 25 bp, Homo sapien
tcctggcagaatgagaatacgcaca

SEQ ID NO: 4423615 - DNA, 25 bp, Homo sapien
tgtggcacctagagaccgaagtcct

SEQ ID NO: 4423616 - DNA, 25 bp, Homo sapien
tcagtgtggcacctagagaccgaag

SEQ ID NO: 4423617 - DNA, 25 bp, Homo sapien
tgtgtctcagtgtggcacctagaga

SEQ ID NO: 4423618 - DNA, 25 bp, Homo sapien
agctgtgtctcagtgtggcacctag

SEQ ID NO: 4423619 - DNA, 25 bp, Homo sapien
gaagggccaccaccaagatgccaca

SEQ ID NO: 4423620 - DNA, 25 bp, Homo sapien
acagatgatgcatgtgctggcgatg

SEQ ID NO: 4423621 - DNA, 25 bp, Homo sapien
ctggtagtacttggaaaacttgttg

SEQ ID NO: 4423622 - DNA, 25 bp, Homo sapien
gcgatgagctttcccgccaaggtga

SEQ ID NO: 4423623 - DNA, 25 bp, Homo sapien
taatgaaggtgtgcatccgctgtgc

SEQ ID NO: 4423624 - DNA, 25 bp, Homo sapien
aggtagctcatgacacttctctggt

SEQ ID NO: 4423625 - DNA, 25 bp, Homo sapien
tcaccacaatgcctacagaagagag

SEQ ID NO: 4423626 - DNA, 25 bp, Homo sapien
cctaatgttaaagtaaggtagctca

SEQ ID NO: 4423627 - DNA, 25 bp, Homo sapien
gctgtgttaacctaatgtcgggaaa

SEQ ID NO: 4423628 - DNA, 25 bp, Homo sapien
gaatgatgcataagctgtagccaca

SEQ ID NO: 4423629 - DNA, 25 bp, Homo sapien
tacatgcatgtcgtctcagtcagct

SEQ ID NO: 4423630 - DNA, 25 bp, Homo sapien
ggctgaaaggtacaccctgagaatt

SEQ ID NO: 4423631 - DNA, 25 bp, Homo sapien
cctgaagtggtcgggtctcccacaa

SEQ ID NO: 4423632 - DNA, 25 bp, Homo sapien
agcatgtcaccatgtgggaatgagg

SEQ ID NO: 4423633 - DNA, 25 bp, Homo sapien
cagcatccctgagagtgcgtgttca

SEQ ID NO: 4423634 - DNA, 25 bp, Homo sapien
gggtctcccacaaatgaaccctgat

SEQ ID NO: 4423635 - DNA, 25 bp, Homo sapien
gaaaatcgactcaggtggcacaggt

SEQ ID NO: 4423636 - DNA, 25 bp, Homo sapien
tctcagtctgctattcccggaggct

SEQ ID NO: 4423637 - DNA, 25 bp, Homo sapien
aaagaggtgagccaattgacccctg

SEQ ID NO: 4423638 - DNA, 25 bp, Homo sapien
tgctgtggacgaaaacaaatctgag

SEQ ID NO: 4423639 - DNA, 25 bp, Homo sapien
taaagttttggcttgtgcagacccc

SEQ ID NO: 4423640 - DNA, 25 bp, Homo sapien
ctttctcttgctaggcagtgaagga

SEQ ID NO: 4423641 - DNA, 25 bp, Homo sapien
gactggcccggagacaaaggttgta

SEQ ID NO: 4423642 - DNA, 25 bp, Homo sapien
ggattctgagtatgctgacttccca

SEQ ID NO: 4423643 - DNA, 25 bp, Homo sapien
cagtcaggaaaagcgctagagcagc

SEQ ID NO: 4423644 - DNA, 25 bp, Homo sapien
agtgtccaatgcagaaaccacagcg

SEQ ID NO: 4423645 - DNA, 25 bp, Homo sapien
catatggggatttgggttccatgca

SEQ ID NO: 4423646 - DNA, 25 bp, Homo sapien
cctgagaaacgctttgctgaggtca

SEQ ID NO: 4423647 - DNA, 25 bp, Homo sapien
tgtagacacactgcacactcgatca

SEQ ID NO: 4423648 - DNA, 25 bp, Homo sapien
gctggcccaactgatcacagagacc

SEQ ID NO: 4423649 - DNA, 25 bp, Homo sapien
agagaccagaaaatcgacatcgtcc

SEQ ID NO: 4423650 - DNA, 25 bp, Homo sapien
ggctgataggtcgagtgtagacaca

SEQ ID NO: 4423651 - DNA, 25 bp, Homo sapien
ttcccccacatgcaaaggaggtatc

SEQ ID NO: 4423652 - DNA, 25 bp, Homo sapien
gaggtatccattgtccactctctgc

SEQ ID NO: 4423653 - DNA, 25 bp, Homo sapien
aggaggtatccattgtccactctct

SEQ ID NO: 4423654 - DNA, 25 bp, Homo sapien
ccccacatgcaaaggaggtatccat

SEQ ID NO: 4423655 - DNA, 25 bp, Homo sapien
gaagtaaggatgtagctgtgactat

SEQ ID NO: 4423656 - DNA, 25 bp, Homo sapien
gtagctgtgactatctgtacccctc

SEQ ID NO: 4423657 - DNA, 25 bp, Homo sapien
acaatccagtgttggccagccctac

SEQ ID NO: 4423658 - DNA, 25 bp, Homo sapien
cagccctaccccattctccagaata

SEQ ID NO: 4423659 - DNA, 25 bp, Homo sapien
gtttgtcaggtgcatcctcatttgt

SEQ ID NO: 4423660 - DNA, 25 bp, Homo sapien
aagtttgtcaggtgcatcctcattt

SEQ ID NO: 4423661 - DNA, 25 bp, Homo sapien
gaagtttgtcaggtgcatcctcatt

SEQ ID NO: 4423662 - DNA, 25 bp, Homo sapien
agtttgtcaggtgcatcctcatttg

SEQ ID NO: 4423663 - DNA, 25 bp, Homo sapien
gagaaggctgcctgtaggctgaagt

SEQ ID NO: 4423664 - DNA, 25 bp, Homo sapien
ggtgaaggggctccgaatagcactc

SEQ ID NO: 4423665 - DNA, 25 bp, Homo sapien
tgcatagtgggtgaaggggctccga

SEQ ID NO: 4423666 - DNA, 25 bp, Homo sapien
gctccgaatagcactcactggcagg

SEQ ID NO: 4423667 - DNA, 25 bp, Homo sapien
gttgtaagccaccagttgatgttgg

SEQ ID NO: 4423668 - DNA, 25 bp, Homo sapien
ctgttgtaagccaccagttgatgtt

SEQ ID NO: 4423669 - DNA, 25 bp, Homo sapien
tgttgtaagccaccagttgatgttg

SEQ ID NO: 4423670 - DNA, 25 bp, Homo sapien
tatcccaattaaagggctatggcta

SEQ ID NO: 4423671 - DNA, 25 bp, Homo sapien
atcccaattaaagggctatggctac

SEQ ID NO: 4423672 - DNA, 25 bp, Homo sapien
cctatcccaattaaagggctatggc

SEQ ID NO: 4423673 - DNA, 25 bp, Homo sapien
ctcctatcccaattaaagggctatg

SEQ ID NO: 4423674 - DNA, 25 bp, Homo sapien
taaggcccttactggtctgcaaatg

SEQ ID NO: 4423675 - DNA, 25 bp, Homo sapien
tctccagacactagactataaatgg

SEQ ID NO: 4423676 - DNA, 25 bp, Homo sapien
tgccaaactttggaccagctctctc

SEQ ID NO: 4423677 - DNA, 25 bp, Homo sapien
tcctttcctagtaaagctgtaaggc

SEQ ID NO: 4423678 - DNA, 25 bp, Homo sapien
cttctctctatggtccagtgagcag

SEQ ID NO: 4423679 - DNA, 25 bp, Homo sapien
ccagtgagcagcctgtttgttgcct

SEQ ID NO: 4423680 - DNA, 25 bp, Homo sapien
tcagcaggaatgacagtcatctctc

SEQ ID NO: 4423681 - DNA, 25 bp, Homo sapien
aaggacaagaggtctccatccacca

SEQ ID NO: 4423682 - DNA, 25 bp, Homo sapien
gagggaactgtctttgggaatcaca

SEQ ID NO: 4423683 - DNA, 25 bp, Homo sapien
ggaactgtctttgggaatcacatct

SEQ ID NO: 4423684 - DNA, 25 bp, Homo sapien
agttgagggaactgtctttgggaat

SEQ ID NO: 4423685 - DNA, 25 bp, Homo sapien
ttgagggaactgtctttgggaatca

SEQ ID NO: 4423686 - DNA, 25 bp, Homo sapien
tgatgttatcaagacggtcaccagt

SEQ ID NO: 4423687 - DNA, 25 bp, Homo sapien
gacggtcaccagtctgggtcaatgg

SEQ ID NO: 4423688 - DNA, 25 bp, Homo sapien
ttatcaagacggtcaccagtctggg

SEQ ID NO: 4423689 - DNA, 25 bp, Homo sapien
cagtctgggtcaatggtttgtccca

SEQ ID NO: 4423690 - DNA, 25 bp, Homo sapien
tttttctgtactcattagttccaga

SEQ ID NO: 4423691 - DNA, 25 bp, Homo sapien
ttatttgttaagcagagtaaacttc

SEQ ID NO: 4423692 - DNA, 25 bp, Homo sapien
ttctgtactcattagttccagaatt

SEQ ID NO: 4423693 - DNA, 25 bp, Homo sapien
tgttaagcagagtaaacttccattt

SEQ ID NO: 4423694 - DNA, 25 bp, Homo sapien
tctttgtatctggattgtgggtcta

SEQ ID NO: 4423695 - DNA, 25 bp, Homo sapien
tatctggattgtgggtctacacttg

SEQ ID NO: 4423696 - DNA, 25 bp, Homo sapien
tgtatctggattgtgggtctacact

SEQ ID NO: 4423697 - DNA, 25 bp, Homo sapien
ctttgtatctggattgtgggtctac

SEQ ID NO: 4423698 - DNA, 25 bp, Homo sapien
gagagctgaaacacccagcgcttct

SEQ ID NO: 4423699 - DNA, 25 bp, Homo sapien
tggagcagagacagaatgattcttc

SEQ ID NO: 4423700 - DNA, 25 bp, Homo sapien
aaacacccagcgcttctgggtctct

SEQ ID NO: 4423701 - DNA, 25 bp, Homo sapien
gattcttccggtgttcctatcacac

SEQ ID NO: 4423702 - DNA, 25 bp, Homo sapien
gatccgaggatcctgtggttctttc

SEQ ID NO: 4423703 - DNA, 25 bp, Homo sapien
gttctttcatatccagatacccagg

SEQ ID NO: 4423704 - DNA, 25 bp, Homo sapien
ctgagatccgaggatcctgtggttc

SEQ ID NO: 4423705 - DNA, 25 bp, Homo sapien
cagctgacacaaggaaaagttgccc

SEQ ID NO: 4423706 - DNA, 25 bp, Homo sapien
gaactatgttggctgtggtagagct

SEQ ID NO: 4423707 - DNA, 25 bp, Homo sapien
tttctttgcctgataccttcagaga

SEQ ID NO: 4423708 - DNA, 25 bp, Homo sapien
tagagctagtagtttccagatgaat

SEQ ID NO: 4423709 - DNA, 25 bp, Homo sapien
aatgtcctgcaggaaccatgatgcg

SEQ ID NO: 4423710 - DNA, 25 bp, Homo sapien
gtgaagtcacgcaggtcttgtaagg

SEQ ID NO: 4423711 - DNA, 25 bp, Homo sapien
tggtacaggcattagacctaaagga

SEQ ID NO: 4423712 - DNA, 25 bp, Homo sapien
atggattgtgaagtcacgcaggtct

SEQ ID NO: 4423713 - DNA, 25 bp, Homo sapien
gggaagctatggtacaggcattaga

SEQ ID NO: 4423714 - DNA, 25 bp, Homo sapien
gacataaaatcggaataggcttgct

SEQ ID NO: 4423715 - DNA, 25 bp, Homo sapien
taaaatcggaataggcttgcttggc

SEQ ID NO: 4423716 - DNA, 25 bp, Homo sapien
tcagggagcgacataaaatcggaat

SEQ ID NO: 4423717 - DNA, 25 bp, Homo sapien
tgtctttcagggagcgacataaaat

SEQ ID NO: 4423718 - DNA, 25 bp, Homo sapien
gggcccttgtgagcggatgcaggat

SEQ ID NO: 4423719 - DNA, 25 bp, Homo sapien
tcagggcccttgtgagcggatgcag

SEQ ID NO: 4423720 - DNA, 25 bp, Homo sapien
cttgtgagcggatgcaggatctaaa

SEQ ID NO: 4423721 - DNA, 25 bp, Homo sapien
gaggcaccaggaatcactcccccta

SEQ ID NO: 4423722 - DNA, 25 bp, Homo sapien
ggggaaatgatagcttcacactgga

SEQ ID NO: 4423723 - DNA, 25 bp, Homo sapien
gatcctttggtagtggtggatgtca

SEQ ID NO: 4423724 - DNA, 25 bp, Homo sapien
gtggatgtcagcagagtctggcata

SEQ ID NO: 4423725 - DNA, 25 bp, Homo sapien
gaaaccaggttgtcttaacaggaca

SEQ ID NO: 4423726 - DNA, 25 bp, Homo sapien
ttaaagaagcgatgagtgaccaggg

SEQ ID NO: 4423727 - DNA, 25 bp, Homo sapien
ggaagggcacaggcgtcaaagaagg

SEQ ID NO: 4423728 - DNA, 25 bp, Homo sapien
ggccaggagggtaagttgagtgtcg

SEQ ID NO: 4423729 - DNA, 25 bp, Homo sapien
gttgagtgtcggtgctgtcagggaa

SEQ ID NO: 4423730 - DNA, 25 bp, Homo sapien
tctcatctacagcacaaatatttgt

SEQ ID NO: 4423731 - DNA, 25 bp, Homo sapien
tacagtgctctttattagttattgg

SEQ ID NO: 4423732 - DNA, 25 bp, Homo sapien
tgattaaatcctttcgacaaaggga

SEQ ID NO: 4423733 - DNA, 25 bp, Homo sapien
aagggaaaggactttacagtgctct

SEQ ID NO: 4423734 - DNA, 25 bp, Homo sapien
ccaaagagggcattgccagcttgga

SEQ ID NO: 4423735 - DNA, 25 bp, Homo sapien
gccaaagagggcattgccagcttgg

SEQ ID NO: 4423736 - DNA, 25 bp, Homo sapien
gagggcattgccagcttggacccct

SEQ ID NO: 4423737 - DNA, 25 bp, Homo sapien
cagcttggacccctttgtcttcctt

SEQ ID NO: 4423738 - DNA, 25 bp, Homo sapien
ttttacgatccccaacaattacagc

SEQ ID NO: 4423739 - DNA, 25 bp, Homo sapien
aattacagcatcctgtccagccttc

SEQ ID NO: 4423740 - DNA, 25 bp, Homo sapien
tcagcatgagccactcatgtagttt

SEQ ID NO: 4423741 - DNA, 25 bp, Homo sapien
gagccactcatgtagtttttacgat

SEQ ID NO: 4423742 - DNA, 25 bp, Homo sapien
tagacgcgtctatattccaggacac

SEQ ID NO: 4423743 - DNA, 25 bp, Homo sapien
tccaggacacctataagatgctcag

SEQ ID NO: 4423744 - DNA, 25 bp, Homo sapien
gctcagcgaggacacctataaagtg

SEQ ID NO: 4423745 - DNA, 25 bp, Homo sapien
gcaggaaccataggatagacgcgtc

SEQ ID NO: 4423746 - DNA, 25 bp, Homo sapien
ttctcacagcggctgatgccttctc

SEQ ID NO: 4423747 - DNA, 25 bp, Homo sapien
gcaccgcgtaggagtgagagggcaa

SEQ ID NO: 4423748 - DNA, 25 bp, Homo sapien
ggcaagatctggcatcatcgcggtt

SEQ ID NO: 4423749 - DNA, 25 bp, Homo sapien
tcatcgcggttctcacagcggctga

SEQ ID NO: 4423750 - DNA, 25 bp, Homo sapien
ttcagttaatctaagcagcctcccc

SEQ ID NO: 4423751 - DNA, 25 bp, Homo sapien
taattcagattagtcccttggccaa

SEQ ID NO: 4423752 - DNA, 25 bp, Homo sapien
tggccaacatttcaacctctggtga

SEQ ID NO: 4423753 - DNA, 25 bp, Homo sapien
tatgaacacatagtactgttgtaga

SEQ ID NO: 4423754 - DNA, 25 bp, Homo sapien
tctctacctcatcacaaaagtaaga

SEQ ID NO: 4423755 - DNA, 25 bp, Homo sapien
cagcaacatccctgtcccagaatat

SEQ ID NO: 4423756 - DNA, 25 bp, Homo sapien
gactggtcttctgatcggagtgtgc

SEQ ID NO: 4423757 - DNA, 25 bp, Homo sapien
aacagcatgtgcaatgtccagtcca

SEQ ID NO: 4423758 - DNA, 25 bp, Homo sapien
tgtgttgaatggctcagtgtgcttc

SEQ ID NO: 4423759 - DNA, 25 bp, Homo sapien
tgaggaaagttgcacccaataggcc

SEQ ID NO: 4423760 - DNA, 25 bp, Homo sapien
ttctaagggaactggctacccacat

SEQ ID NO: 4423761 - DNA, 25 bp, Homo sapien
caaaagccctgagatactgtcactg

SEQ ID NO: 4423762 - DNA, 25 bp, Homo sapien
gatcttccctgatggaactgtcatc

SEQ ID NO: 4423763 - DNA, 25 bp, Homo sapien
tcagatcttccctgatggaactgtc

SEQ ID NO: 4423764 - DNA, 25 bp, Homo sapien
tctctgtgaagttctcctctccatg

SEQ ID NO: 4423765 - DNA, 25 bp, Homo sapien
tctgtgaagttctcctctccatgga

SEQ ID NO: 4423766 - DNA, 25 bp, Homo sapien
cattcagtccatttgtgctcctccc

SEQ ID NO: 4423767 - DNA, 25 bp, Homo sapien
tgcatcctcttgtgtaaagacttcc

SEQ ID NO: 4423768 - DNA, 25 bp, Homo sapien
tctaatgcatcctcttgtgtaaaga

SEQ ID NO: 4423769 - DNA, 25 bp, Homo sapien
ttctctaatgcatcctcttgtgtaa

SEQ ID NO: 4423770 - DNA, 25 bp, Homo sapien
taatgcatcctcttgtgtaaagact

SEQ ID NO: 4423771 - DNA, 25 bp, Homo sapien
tgatgcttagcatatggactaacac

SEQ ID NO: 4423772 - DNA, 25 bp, Homo sapien
tgcttagcatatggactaacacata

SEQ ID NO: 4423773 - DNA, 25 bp, Homo sapien
gcttagcatatggactaacacataa

SEQ ID NO: 4423774 - DNA, 25 bp, Homo sapien
gatgcttagcatatggactaacaca

SEQ ID NO: 4423775 - DNA, 25 bp, Homo sapien
cctagtataaggtaatgtgcttggg

SEQ ID NO: 4423776 - DNA, 25 bp, Homo sapien
tcctagtataaggtaatgtgcttgg

SEQ ID NO: 4423777 - DNA, 25 bp, Homo sapien
gtataaggtaatgtgcttgggaaaa

SEQ ID NO: 4423778 - DNA, 25 bp, Homo sapien
tagtataaggtaatgtgcttgggaa

SEQ ID NO: 4423779 - DNA, 25 bp, Homo sapien
tgtgcttgctggactgcctttgcgc

SEQ ID NO: 4423780 - DNA, 25 bp, Homo sapien
gtttcacgcatgcaattgactcgcc

SEQ ID NO: 4423781 - DNA, 25 bp, Homo sapien
gtaatattcctcaacagtccctctg

SEQ ID NO: 4423782 - DNA, 25 bp, Homo sapien
cccttcccaaggtatactggctgct

SEQ ID NO: 4423783 - DNA, 25 bp, Homo sapien
tgtgcaatgtgggtcacaaacaatt

SEQ ID NO: 4423784 - DNA, 25 bp, Homo sapien
actgtgcaatgtgggtcacaaacaa

SEQ ID NO: 4423785 - DNA, 25 bp, Homo sapien
gactgtgcaatgtgggtcacaaaca

SEQ ID NO: 4423786 - DNA, 25 bp, Homo sapien
gtgcaatgtgggtcacaaacaattc

SEQ ID NO: 4423787 - DNA, 25 bp, Homo sapien
tttttcaggtctcaagaagtacagg

SEQ ID NO: 4423788 - DNA, 25 bp, Homo sapien
tgggtaccacaccaggtaactgata

SEQ ID NO: 4423789 - DNA, 25 bp, Homo sapien
tcttcacgcatatactgagctccta

SEQ ID NO: 4423790 - DNA, 25 bp, Homo sapien
gaagtacaggagtttgccaggtgaa

SEQ ID NO: 4423791 - DNA, 25 bp, Homo sapien
tcccactaccatgaatttgtactag

SEQ ID NO: 4423792 - DNA, 25 bp, Homo sapien
cactaccatgaatttgtactagcaa

SEQ ID NO: 4423793 - DNA, 25 bp, Homo sapien
aaggacaatatgtgcgaggtgacag

SEQ ID NO: 4423794 - DNA, 25 bp, Homo sapien
caaggacaatatgtgcgaggtgaca

SEQ ID NO: 4423795 - DNA, 25 bp, Homo sapien
tgaccataaattgaagtctttgtct

SEQ ID NO: 4423796 - DNA, 25 bp, Homo sapien
taacctgaattcctacttcggcctg

SEQ ID NO: 4423797 - DNA, 25 bp, Homo sapien
tgtgagaccctttctatatcctggg

SEQ ID NO: 4423798 - DNA, 25 bp, Homo sapien
caaaaatgctcgaacctctatcagg

SEQ ID NO: 4423799 - DNA, 25 bp, Homo sapien
cactgtcaccatgggtgtgagaccc

SEQ ID NO: 4423800 - DNA, 25 bp, Homo sapien
tagttgatgctctgtgactgccctc

SEQ ID NO: 4423801 - DNA, 25 bp, Homo sapien
gattatgcaaagcttgtctgccata

SEQ ID NO: 4423802 - DNA, 25 bp, Homo sapien
gatcctgattatgcaaagcttgtct

SEQ ID NO: 4423803 - DNA, 25 bp, Homo sapien
tatactcttgatgtaccatggcaaa

SEQ ID NO: 4423804 - DNA, 25 bp, Homo sapien
gcttgtctgccatatttatactctt

SEQ ID NO: 4423805 - DNA, 25 bp, Homo sapien
tcagccaagagcattcaggtctcca

SEQ ID NO: 4423806 - DNA, 25 bp, Homo sapien
gccaagagcattcaggtctccatgg

SEQ ID NO: 4423807 - DNA, 25 bp, Homo sapien
ccaagagcattcaggtctccatggg

SEQ ID NO: 4423808 - DNA, 25 bp, Homo sapien
attcaggtctccatggggatatggg

SEQ ID NO: 4423809 - DNA, 25 bp, Homo sapien
tgctgaaggcaactacatgtgtgga

SEQ ID NO: 4423810 - DNA, 25 bp, Homo sapien
gggagacctgctcatactagatttc

SEQ ID NO: 4423811 - DNA, 25 bp, Homo sapien
aacaacgaaggaaagctgaccaagg

SEQ ID NO: 4423812 - DNA, 25 bp, Homo sapien
tagatggcccagtatgagtttacca

SEQ ID NO: 4423813 - DNA, 25 bp, Homo sapien
tgccacctcttctatgacagtttcc

SEQ ID NO: 4423814 - DNA, 25 bp, Homo sapien
gtcattcattgtcccactcaatgcc

SEQ ID NO: 4423815 - DNA, 25 bp, Homo sapien
actcaatgccacctcttctatgaca

SEQ ID NO: 4423816 - DNA, 25 bp, Homo sapien
caatgccacctcttctatgacagtt

SEQ ID NO: 4423817 - DNA, 25 bp, Homo sapien
gaacgttagatgcaagtaagtctga

SEQ ID NO: 4423818 - DNA, 25 bp, Homo sapien
gaacttggagcagggcccttagaaa

SEQ ID NO: 4423819 - DNA, 25 bp, Homo sapien
gtgaaaaatccatccttcccatgtg

SEQ ID NO: 4423820 - DNA, 25 bp, Homo sapien
cctgattgcagtcatggtccttgat

SEQ ID NO: 4423821 - DNA, 25 bp, Homo sapien
agaaaatcagaaccgagagcagctg

SEQ ID NO: 4423822 - DNA, 25 bp, Homo sapien
gcaggaaggtactaaaatccgaggc

SEQ ID NO: 4423823 - DNA, 25 bp, Homo sapien
aacagcaggaaggtactaaaatccg

SEQ ID NO: 4423824 - DNA, 25 bp, Homo sapien
gagcagctggagtactgggaaaata

SEQ ID NO: 4423825 - DNA, 25 bp, Homo sapien
gatacgcttacccactgccatgtag

SEQ ID NO: 4423826 - DNA, 25 bp, Homo sapien
actgcactgccaacatttaggatac

SEQ ID NO: 4423827 - DNA, 25 bp, Homo sapien
gaagaattgaatagcagatgggcag

SEQ ID NO: 4423828 - DNA, 25 bp, Homo sapien
cagaaggcagtagagtgaaagtgaa

SEQ ID NO: 4423829 - DNA, 25 bp, Homo sapien
catggattggccctgcttgaaacgc

SEQ ID NO: 4423830 - DNA, 25 bp, Homo sapien
tccaaatggcccttcatccagagag

SEQ ID NO: 4423831 - DNA, 25 bp, Homo sapien
gaaacgcatgcctttttgtgcacca

SEQ ID NO: 4423832 - DNA, 25 bp, Homo sapien
gagtttgtaaaatcactgctgacag

SEQ ID NO: 4423833 - DNA, 25 bp, Homo sapien
aaagtgagagagttacaagctttct

SEQ ID NO: 4423834 - DNA, 25 bp, Homo sapien
gcaggtttactgatggatcgggttc

SEQ ID NO: 4423835 - DNA, 25 bp, Homo sapien
tgttgaaatgaaagtgagagagtta

SEQ ID NO: 4423836 - DNA, 25 bp, Homo sapien
tctttaatccatgtaaccctgtgtg

SEQ ID NO: 4423837 - DNA, 25 bp, Homo sapien
aaaatgtcaccaatggatttgctcc

SEQ ID NO: 4423838 - DNA, 25 bp, Homo sapien
tttgaaatattgctaagcattacca

SEQ ID NO: 4423839 - DNA, 25 bp, Homo sapien
gagacatgaagtgtgcacaaaccat

SEQ ID NO: 4423840 - DNA, 25 bp, Homo sapien
ggatttgctccatgcagggatgcta

SEQ ID NO: 4423841 - DNA, 25 bp, Homo sapien
gccccagaacaattactaggataac

SEQ ID NO: 4423842 - DNA, 25 bp, Homo sapien
cttctagtgccccagaacaattact

SEQ ID NO: 4423843 - DNA, 25 bp, Homo sapien
tagtgccccagaacaattactagga

SEQ ID NO: 4423844 - DNA, 25 bp, Homo sapien
attactaggataacatcaaagatta

SEQ ID NO: 4423845 - DNA, 25 bp, Homo sapien
gaagctttgtttccatgcattgact

SEQ ID NO: 4423846 - DNA, 25 bp, Homo sapien
ccttatagcacataggcagagtaga

SEQ ID NO: 4423847 - DNA, 25 bp, Homo sapien
aatccgttgcttagtgtattagtcc

SEQ ID NO: 4423848 - DNA, 25 bp, Homo sapien
tataaaagcctcagatcgcatcttc

SEQ ID NO: 4423849 - DNA, 25 bp, Homo sapien
cttaacagtggacttaaaatttcag

SEQ ID NO: 4423850 - DNA, 25 bp, Homo sapien
taagcaataggtcttaacagtggac

SEQ ID NO: 4423851 - DNA, 25 bp, Homo sapien
tttgaaaggcatcttttctaagcaa

SEQ ID NO: 4423852 - DNA, 25 bp, Homo sapien
gagttcttgggtgactatgtgcatt

SEQ ID NO: 4423853 - DNA, 25 bp, Homo sapien
tggcatatcatgcagaaggtctgtt

SEQ ID NO: 4423854 - DNA, 25 bp, Homo sapien
ttaatgactatttagcccagggata

SEQ ID NO: 4423855 - DNA, 25 bp, Homo sapien
gaaacagtgtatcatcacaggtgtg

SEQ ID NO: 4423856 - DNA, 25 bp, Homo sapien
cactatctcatatcggaaaaaggaa

SEQ ID NO: 4423857 - DNA, 25 bp, Homo sapien
gatggttggcctgctaaaataggaa

SEQ ID NO: 4423858 - DNA, 25 bp, Homo sapien
taggaacaaggagtaaaagagctgt

SEQ ID NO: 4423859 - DNA, 25 bp, Homo sapien
gaatagcctgctaagaggtacatgt

SEQ ID NO: 4423860 - DNA, 25 bp, Homo sapien
tgcccaaagctatggatgaatctgt

SEQ ID NO: 4423861 - DNA, 25 bp, Homo sapien
tcaccttgggaaccgctgaggctga

SEQ ID NO: 4423862 - DNA, 25 bp, Homo sapien
gtgtcaccttgggaaccgctgaggc

SEQ ID NO: 4423863 - DNA, 25 bp, Homo sapien
agggtgtcaccttgggaaccgctga

SEQ ID NO: 4423864 - DNA, 25 bp, Homo sapien
cttgggaaccgctgaggctgagagg

SEQ ID NO: 4423865 - DNA, 25 bp, Homo sapien
gcctgacgatggcagtggccactgc

SEQ ID NO: 4423866 - DNA, 25 bp, Homo sapien
ccggcctcatgcacgggaagactgt

SEQ ID NO: 4423867 - DNA, 25 bp, Homo sapien
atagtccgggagctggacctcgcct

SEQ ID NO: 4423868 - DNA, 25 bp, Homo sapien
cgttctccgcgtacaggtggtctct

SEQ ID NO: 4423869 - DNA, 25 bp, Homo sapien
taagcacactcttgaaaactggagc

SEQ ID NO: 4423870 - DNA, 25 bp, Homo sapien
gaattgttacccatcagcattgtag

SEQ ID NO: 4423871 - DNA, 25 bp, Homo sapien
gaatatttgcatgcttaaggcactg

SEQ ID NO: 4423872 - DNA, 25 bp, Homo sapien
gagaatttcactctacctgcatgag

SEQ ID NO: 4423873 - DNA, 25 bp, Homo sapien
catcttagcagatcttccaggtctc

SEQ ID NO: 4423874 - DNA, 25 bp, Homo sapien
tgtataagggttccacattctctac

SEQ ID NO: 4423875 - DNA, 25 bp, Homo sapien
taggcgctacattgtacagcagatc

SEQ ID NO: 4423876 - DNA, 25 bp, Homo sapien
tttacatagctctttcagatcctgc

SEQ ID NO: 4423877 - DNA, 25 bp, Homo sapien
aaaaaggtgagtgaaccgagtgtct

SEQ ID NO: 4423878 - DNA, 25 bp, Homo sapien
gagtgtcttagaatcttgccatggg

SEQ ID NO: 4423879 - DNA, 25 bp, Homo sapien
gatatcagtccatcatttgcctctg

SEQ ID NO: 4423880 - DNA, 25 bp, Homo sapien
gctagactgagcaagggaagtgaca

SEQ ID NO: 4423881 - DNA, 25 bp, Homo sapien
tattctgcatatgcaccatgagcag

SEQ ID NO: 4423882 - DNA, 25 bp, Homo sapien
gagtattctgcatatgcaccatgag

SEQ ID NO: 4423883 - DNA, 25 bp, Homo sapien
gtattctgcatatgcaccatgagca

SEQ ID NO: 4423884 - DNA, 25 bp, Homo sapien
caagagtattctgcatatgcaccat

SEQ ID NO: 4423885 - DNA, 25 bp, Homo sapien
gccagagatcctcaatgcccattat

SEQ ID NO: 4423886 - DNA, 25 bp, Homo sapien
tgtgcttagtacagttaaatgtgga

SEQ ID NO: 4423887 - DNA, 25 bp, Homo sapien
tcctatagcagttccaaagtatgtt

SEQ ID NO: 4423888 - DNA, 25 bp, Homo sapien
gaatagtcaagaatagtggttccac

SEQ ID NO: 4423889 - DNA, 25 bp, Homo sapien
gaataaatcatctgactcagagcct

SEQ ID NO: 4423890 - DNA, 25 bp, Homo sapien
tagtcgttttgataatgggtcattt

SEQ ID NO: 4423891 - DNA, 25 bp, Homo sapien
taagaataaatcatctgactcagag

SEQ ID NO: 4423892 - DNA, 25 bp, Homo sapien
cagacacaaaattagtagtcgtttt

SEQ ID NO: 4423893 - DNA, 25 bp, Homo sapien
caggtggagcagttctgagctagca

SEQ ID NO: 4423894 - DNA, 25 bp, Homo sapien
cagttctgagctagcaggtggagcc

SEQ ID NO: 4423895 - DNA, 25 bp, Homo sapien
ttctgagctagcaggtggagccaca

SEQ ID NO: 4423896 - DNA, 25 bp, Homo sapien
gcaggtggagcagttctgagctagc

SEQ ID NO: 4423897 - DNA, 25 bp, Homo sapien
tcagtggttcggaagtaaatgagtt

SEQ ID NO: 4423898 - DNA, 25 bp, Homo sapien
ggtgctgcgatttgtcatgcagcat

SEQ ID NO: 4423899 - DNA, 25 bp, Homo sapien
tggtgctgcgatttgtcatgcagca

SEQ ID NO: 4423900 - DNA, 25 bp, Homo sapien
gtattggcagcacacgaggaacagg

SEQ ID NO: 4423901 - DNA, 25 bp, Homo sapien
tgaggtgaccccaggtttaacgaga

SEQ ID NO: 4423902 - DNA, 25 bp, Homo sapien
taagagccctgtaggatcatccaaa

SEQ ID NO: 4423903 - DNA, 25 bp, Homo sapien
taacgagagttcatacctgcatgtg

SEQ ID NO: 4423904 - DNA, 25 bp, Homo sapien
gaaagtacagtgtttaagcctcctc

SEQ ID NO: 4423905 - DNA, 25 bp, Homo sapien
tatttgcttcagattcaaggctgac

SEQ ID NO: 4423906 - DNA, 25 bp, Homo sapien
gaaaaaggctctctcagtgtctcaa

SEQ ID NO: 4423907 - DNA, 25 bp, Homo sapien
gagttataacatgctcagctctgtg

SEQ ID NO: 4423908 - DNA, 25 bp, Homo sapien
ttctttggccacatgcttagaagtg

SEQ ID NO: 4423909 - DNA, 25 bp, Homo sapien
cacatgcttagaagtggtctctttc

SEQ ID NO: 4423910 - DNA, 25 bp, Homo sapien
tttcctgacccaaaatttgctatca

SEQ ID NO: 4423911 - DNA, 25 bp, Homo sapien
tttggccacatgcttagaagtggtc

SEQ ID NO: 4423912 - DNA, 25 bp, Homo sapien
aactgaaatcctagctgcattctgt

SEQ ID NO: 4423913 - DNA, 25 bp, Homo sapien
acccaactgaaatcctagctgcatt

SEQ ID NO: 4423914 - DNA, 25 bp, Homo sapien
caactgaaatcctagctgcattctg

SEQ ID NO: 4423915 - DNA, 25 bp, Homo sapien
ccaactgaaatcctagctgcattct

SEQ ID NO: 4423916 - DNA, 25 bp, Homo sapien
cagaaaatctgtgggcttatccaag

SEQ ID NO: 4423917 - DNA, 25 bp, Homo sapien
cagaggtaggtgtcaacgtgattaa

SEQ ID NO: 4423918 - DNA, 25 bp, Homo sapien
aaatctgtgggcttatccaagggca

SEQ ID NO: 4423919 - DNA, 25 bp, Homo sapien
tcaacgtgattaaatttccccagaa

SEQ ID NO: 4423920 - DNA, 25 bp, Homo sapien
gggcagtccttctcctcgaactgta

SEQ ID NO: 4423921 - DNA, 25 bp, Homo sapien
tgctgacagcgcgtgtgctgattcc

SEQ ID NO: 4423922 - DNA, 25 bp, Homo sapien
aaagccctttgactagggcagtcct

SEQ ID NO: 4423923 - DNA, 25 bp, Homo sapien
tcaatacgctttcaatatgctgcag

SEQ ID NO: 4423924 - DNA, 25 bp, Homo sapien
tgggtatacaaatgcgcacagtaag

SEQ ID NO: 4423925 - DNA, 25 bp, Homo sapien
tatacaaatgcgcacagtaagtgat

SEQ ID NO: 4423926 - DNA, 25 bp, Homo sapien
ggaagtatgaaatggacagcattac

SEQ ID NO: 4423927 - DNA, 25 bp, Homo sapien
cagcattacagccaataggtacagg

SEQ ID NO: 4423928 - DNA, 25 bp, Homo sapien
ttgaatcagaaagagagtagcctga

SEQ ID NO: 4423929 - DNA, 25 bp, Homo sapien
tcagaaagagagtagcctgagattc

SEQ ID NO: 4423930 - DNA, 25 bp, Homo sapien
gagagtagcctgagattctgaagga

SEQ ID NO: 4423931 - DNA, 25 bp, Homo sapien
aaagagagtagcctgagattctgaa

SEQ ID NO: 4423932 - DNA, 25 bp, Homo sapien
ctttagtaacccattagtctgagtg

SEQ ID NO: 4423933 - DNA, 25 bp, Homo sapien
tactgtatctgtacttagtgaagca

SEQ ID NO: 4423934 - DNA, 25 bp, Homo sapien
ttcgaaaatgtaagtcagaagaaac

SEQ ID NO: 4423935 - DNA, 25 bp, Homo sapien
ggatattcgtatttccctgtataca

SEQ ID NO: 4423936 - DNA, 25 bp, Homo sapien
tactatgactctgccctcaaaactg

SEQ ID NO: 4423937 - DNA, 25 bp, Homo sapien
cttgctcaattacgtgccattctgg

SEQ ID NO: 4423938 - DNA, 25 bp, Homo sapien
tggtggtaacaacctgcagcttgga

SEQ ID NO: 4423939 - DNA, 25 bp, Homo sapien
cagtgtcaggttgctacttgtaaag

SEQ ID NO: 4423940 - DNA, 25 bp, Homo sapien
gaggacctcagtagctgcttttcca

SEQ ID NO: 4423941 - DNA, 25 bp, Homo sapien
caccgaggacctcagtagctgcttt

SEQ ID NO: 4423942 - DNA, 25 bp, Homo sapien
ctgccagcaccgaggacctcagtag

SEQ ID NO: 4423943 - DNA, 25 bp, Homo sapien
ccttcattcagcaaaccatgttttt

SEQ ID NO: 4423944 - DNA, 25 bp, Homo sapien
tgaaaccaacctgtgtgtcctgtcc

SEQ ID NO: 4423945 - DNA, 25 bp, Homo sapien
tgtgtgtcctgtcctatctggaact

SEQ ID NO: 4423946 - DNA, 25 bp, Homo sapien
tgtcctatctggaactccccttcct

SEQ ID NO: 4423947 - DNA, 25 bp, Homo sapien
cctgaaaccaacctgtgtgtcctgt

SEQ ID NO: 4423948 - DNA, 25 bp, Homo sapien
tacaagaatttcactcaaagatgag

SEQ ID NO: 4423949 - DNA, 25 bp, Homo sapien
ctacaagaatttcactcaaagatga

SEQ ID NO: 4423950 - DNA, 25 bp, Homo sapien
agcagggtttgtgtttacagtgcac

SEQ ID NO: 4423951 - DNA, 25 bp, Homo sapien
gggtttgtgtttacagtgcacagga

SEQ ID NO: 4423952 - DNA, 25 bp, Homo sapien
tgagcagggtttgtgtttacagtgc

SEQ ID NO: 4423953 - DNA, 25 bp, Homo sapien
cagggtttgtgtttacagtgcacag

SEQ ID NO: 4423954 - DNA, 25 bp, Homo sapien
ggagcgtgattctttgcaaaatcgg

SEQ ID NO: 4423955 - DNA, 25 bp, Homo sapien
gggccaaaggtcacaggctcttcga

SEQ ID NO: 4423956 - DNA, 25 bp, Homo sapien
ttacaatcgacgtatccaagtctgg

SEQ ID NO: 4423957 - DNA, 25 bp, Homo sapien
tctttgcaaaatcggaggtgaggtg

SEQ ID NO: 4423958 - DNA, 25 bp, Homo sapien
gcaagcatctggctctacgtgtccc

SEQ ID NO: 4423959 - DNA, 25 bp, Homo sapien
aaattttgccccaacgacagcttga

SEQ ID NO: 4423960 - DNA, 25 bp, Homo sapien
tagtgagtacctctctagtgctggg

SEQ ID NO: 4423961 - DNA, 25 bp, Homo sapien
cagcttgacagctaggaatgtgact

SEQ ID NO: 4423962 - DNA, 25 bp, Homo sapien
tcaagcaggtccaaacagaaaagga

SEQ ID NO: 4423963 - DNA, 25 bp, Homo sapien
caagcaggtccaaacagaaaaggat

SEQ ID NO: 4423964 - DNA, 25 bp, Homo sapien
cccataattaacaccacaagctgat

SEQ ID NO: 4423965 - DNA, 25 bp, Homo sapien
cctgcttttaagtggtttgaggctg

SEQ ID NO: 4423966 - DNA, 25 bp, Homo sapien
cctggactttggctgatttgctgta

SEQ ID NO: 4423967 - DNA, 25 bp, Homo sapien
caggtcacttgtaaaccgatcactc

SEQ ID NO: 4423968 - DNA, 25 bp, Homo sapien
tgcacaaggcctattatatggactg

SEQ ID NO: 4423969 - DNA, 25 bp, Homo sapien
gacagtagatgtactttataccctg

SEQ ID NO: 4423970 - DNA, 25 bp, Homo sapien
gatgttggatagactaattcagggc

SEQ ID NO: 4423971 - DNA, 25 bp, Homo sapien
tacagacttgctgtgagtaaaaaac

SEQ ID NO: 4423972 - DNA, 25 bp, Homo sapien
ttgttactgttatggcccatgaggg

SEQ ID NO: 4423973 - DNA, 25 bp, Homo sapien
cacttttattcagcatcacactgga

SEQ ID NO: 4423974 - DNA, 25 bp, Homo sapien
atgaatgaatgctttatccctaaga

SEQ ID NO: 4423975 - DNA, 25 bp, Homo sapien
aagacaaatgtgttctctctcatca

SEQ ID NO: 4423976 - DNA, 25 bp, Homo sapien
atccctaagatcaggaagaagacaa

SEQ ID NO: 4423977 - DNA, 25 bp, Homo sapien
gtaagtaaggatattatgagagcac

SEQ ID NO: 4423978 - DNA, 25 bp, Homo sapien
attgtctactggaggaaatacgcac

SEQ ID NO: 4423979 - DNA, 25 bp, Homo sapien
gataaaacctgttcgtgtcacattt

SEQ ID NO: 4423980 - DNA, 25 bp, Homo sapien
tgtccttggtcttacaatgtcttca

SEQ ID NO: 4423981 - DNA, 25 bp, Homo sapien
ccctgggtctgtactgcatccacag

SEQ ID NO: 4423982 - DNA, 25 bp, Homo sapien
aacacgggatgctgctccctgggtc

SEQ ID NO: 4423983 - DNA, 25 bp, Homo sapien
aagaaacacgggatgctgctccctg

SEQ ID NO: 4423984 - DNA, 25 bp, Homo sapien
tttgggtcttagagttttgatgaag

SEQ ID NO: 4423985 - DNA, 25 bp, Homo sapien
aaataagtgcttaatgaagaattag

SEQ ID NO: 4423986 - DNA, 25 bp, Homo sapien
taagtgcttaatgaagaattagtta

SEQ ID NO: 4423987 - DNA, 25 bp, Homo sapien
aataagtgcttaatgaagaattagt

SEQ ID NO: 4423988 - DNA, 25 bp, Homo sapien
agtgcttaatgaagaattagttaat

SEQ ID NO: 4423989 - DNA, 25 bp, Homo sapien
cagcttgaatttctacctgtaatta

SEQ ID NO: 4423990 - DNA, 25 bp, Homo sapien
cacccagcttgaatttctacctgta

SEQ ID NO: 4423991 - DNA, 25 bp, Homo sapien
tgaatttctacctgtaattatgatg

SEQ ID NO: 4423992 - DNA, 25 bp, Homo sapien
cgcacccagcttgaatttctacctg

SEQ ID NO: 4423993 - DNA, 25 bp, Homo sapien
taacatagccatggagaggtagacc

SEQ ID NO: 4423994 - DNA, 25 bp, Homo sapien
tcattgcagcaaagactacgacact

SEQ ID NO: 4423995 - DNA, 25 bp, Homo sapien
gaataaacactctccaggtatttct

SEQ ID NO: 4423996 - DNA, 25 bp, Homo sapien
gaaaattagtctttcattggaataa

SEQ ID NO: 4423997 - DNA, 25 bp, Homo sapien
tggcatgattataaccctgacagcc

SEQ ID NO: 4423998 - DNA, 25 bp, Homo sapien
catgattataaccctgacagcctcc

SEQ ID NO: 4423999 - DNA, 25 bp, Homo sapien
ctgacagcctccctctaatgagctt

SEQ ID NO: 4424000 - DNA, 25 bp, Homo sapien
gcatgattataaccctgacagcctc

SEQ ID NO: 4424001 - DNA, 25 bp, Homo sapien
gaagtccttccatatagaaatagac

SEQ ID NO: 4424002 - DNA, 25 bp, Homo sapien
ccaaggaataagagtagagagcaca

SEQ ID NO: 4424003 - DNA, 25 bp, Homo sapien
tatggtcgcgcacatgtgccttggg

SEQ ID NO: 4424004 - DNA, 25 bp, Homo sapien
gtgacaatggttagaagtccttcca

SEQ ID NO: 4424005 - DNA, 25 bp, Homo sapien
tgccaagcctgctgcatcatctctg

SEQ ID NO: 4424006 - DNA, 25 bp, Homo sapien
tcactgtgccaagcctgctgcatca

SEQ ID NO: 4424007 - DNA, 25 bp, Homo sapien
ctgtgccaagcctgctgcatcatct

SEQ ID NO: 4424008 - DNA, 25 bp, Homo sapien
ctgcatcatctctgatagataagaa

SEQ ID NO: 4424009 - DNA, 25 bp, Homo sapien
gaagcatccgaagacggagacactg

SEQ ID NO: 4424010 - DNA, 25 bp, Homo sapien
caagtggtgaggaagcatccgaaga

SEQ ID NO: 4424011 - DNA, 25 bp, Homo sapien
gatcagcacggtccagaaggaactg

SEQ ID NO: 4424012 - DNA, 25 bp, Homo sapien
cggagacactgatcagcacggtcca

SEQ ID NO: 4424013 - DNA, 25 bp, Homo sapien
tgaagccacaatgtgcaaccatatg

SEQ ID NO: 4424014 - DNA, 25 bp, Homo sapien
tcaagatgactaggagtatcaggtc

SEQ ID NO: 4424015 - DNA, 25 bp, Homo sapien
gacacggtcacagttcctgattgca

SEQ ID NO: 4424016 - DNA, 25 bp, Homo sapien
caggtcctacacgtcctttcagaag

SEQ ID NO: 4424017 - DNA, 25 bp, Homo sapien
ataattattaagagctctttgcttc

SEQ ID NO: 4424018 - DNA, 25 bp, Homo sapien
tatatcttaaaggacccttcatatt

SEQ ID NO: 4424019 - DNA, 25 bp, Homo sapien
tcaccaaagaatgcatagcctctct

SEQ ID NO: 4424020 - DNA, 25 bp, Homo sapien
caagtaatgcaagccatctggtgct

SEQ ID NO: 4424021 - DNA, 25 bp, Homo sapien
ggccaaaatcagttgatggtttaag

SEQ ID NO: 4424022 - DNA, 25 bp, Homo sapien
cttctattgatagcctgagataatt

SEQ ID NO: 4424023 - DNA, 25 bp, Homo sapien
gcatttagtttggatttggattcat

SEQ ID NO: 4424024 - DNA, 25 bp, Homo sapien
cttcttcttctattgatagcctgag

SEQ ID NO: 4424025 - DNA, 25 bp, Homo sapien
gtttggacaaatgcaaaaatgtgca

SEQ ID NO: 4424026 - DNA, 25 bp, Homo sapien
tctgcgcccgcgcacaaggtactgg

SEQ ID NO: 4424027 - DNA, 25 bp, Homo sapien
gtctgtgcaggttcctaccactgct

SEQ ID NO: 4424028 - DNA, 25 bp, Homo sapien
actggggttgtctgtgcaggttcct

SEQ ID NO: 4424029 - DNA, 25 bp, Homo sapien
accacccttggcgtgtctgcgcccg

SEQ ID NO: 4424030 - DNA, 25 bp, Homo sapien
gaggatctgagctccgctgcaccag

SEQ ID NO: 4424031 - DNA, 25 bp, Homo sapien
ggatctgagctccgctgcaccagct

SEQ ID NO: 4424032 - DNA, 25 bp, Homo sapien
gatctgagctccgctgcaccagctg

SEQ ID NO: 4424033 - DNA, 25 bp, Homo sapien
aggatctgagctccgctgcaccagc

SEQ ID NO: 4424034 - DNA, 25 bp, Homo sapien
tcctcagagaatgtataatatatgt

SEQ ID NO: 4424035 - DNA, 25 bp, Homo sapien
ctttccaaccagaggtattacagag

SEQ ID NO: 4424036 - DNA, 25 bp, Homo sapien
tccaaccagaggtattacagaggaa

SEQ ID NO: 4424037 - DNA, 25 bp, Homo sapien
ggaaaatcctcagagaatgtataat

SEQ ID NO: 4424038 - DNA, 25 bp, Homo sapien
cagtcactgggcagtctgtacttgt

SEQ ID NO: 4424039 - DNA, 25 bp, Homo sapien
caaaagccatgcagggatgtctata

SEQ ID NO: 4424040 - DNA, 25 bp, Homo sapien
ggctcctgatctgctccctgttgct

SEQ ID NO: 4424041 - DNA, 25 bp, Homo sapien
tcccatgcttaatgggatggtctgg

SEQ ID NO: 4424042 - DNA, 25 bp, Homo sapien
tgatcccacttatacctgcaaaatg

SEQ ID NO: 4424043 - DNA, 25 bp, Homo sapien
tggccgtgagtgagtcatactgaat

SEQ ID NO: 4424044 - DNA, 25 bp, Homo sapien
tcagcctcccatatgtgggcaaggg

SEQ ID NO: 4424045 - DNA, 25 bp, Homo sapien
gctctctgagcaggtttgaaaacct

SEQ ID NO: 4424046 - DNA, 25 bp, Homo sapien
catttcctcgtgaatgtatcgagta

SEQ ID NO: 4424047 - DNA, 25 bp, Homo sapien
tatgtcccctggctactttgttcaa

SEQ ID NO: 4424048 - DNA, 25 bp, Homo sapien
tcaactctactttgaggtacttgga

SEQ ID NO: 4424049 - DNA, 25 bp, Homo sapien
gatgcttcgtggtccttgttaaacc

SEQ ID NO: 4424050 - DNA, 25 bp, Homo sapien
tggcacggacccaaacaacaagagg

SEQ ID NO: 4424051 - DNA, 25 bp, Homo sapien
ttaaagatggcaccgactcagcagc

SEQ ID NO: 4424052 - DNA, 25 bp, Homo sapien
caagaggtagcaaggttaacagtga

SEQ ID NO: 4424053 - DNA, 25 bp, Homo sapien
cctcagcagtcgaccttcgcagtga

SEQ ID NO: 4424054 - DNA, 25 bp, Homo sapien
caaagctattgtgattgttgtgagg

SEQ ID NO: 4424055 - DNA, 25 bp, Homo sapien
tgaggatccaatttccgtccaggcc

SEQ ID NO: 4424056 - DNA, 25 bp, Homo sapien
gaaggatcaccttcaaagctattgt

SEQ ID NO: 4424057 - DNA, 25 bp, Homo sapien
ccaatttccgtccaggccaagatga

SEQ ID NO: 4424058 - DNA, 25 bp, Homo sapien
tgcaatgcaatagacccacagcagc

SEQ ID NO: 4424059 - DNA, 25 bp, Homo sapien
gaattgcttgcgcaagaattgcttg

SEQ ID NO: 4424060 - DNA, 25 bp, Homo sapien
ggaattgtagacatctacttcctga

SEQ ID NO: 4424061 - DNA, 25 bp, Homo sapien
ccacagcagcctaaataatctcgaa

SEQ ID NO: 4424062 - DNA, 25 bp, Homo sapien
aaaggtctccttccaagctcacgtg

SEQ ID NO: 4424063 - DNA, 25 bp, Homo sapien
gtctccttccaagctcacgtgattg

SEQ ID NO: 4424064 - DNA, 25 bp, Homo sapien
tttgggtcttcagtccagatgcagg

SEQ ID NO: 4424065 - DNA, 25 bp, Homo sapien
cagtccagatgcaggtgatggccca

SEQ ID NO: 4424066 - DNA, 25 bp, Homo sapien
cacgatatgagtgtccacataatgc

SEQ ID NO: 4424067 - DNA, 25 bp, Homo sapien
tggtctcaaacaattcctgatggag

SEQ ID NO: 4424068 - DNA, 25 bp, Homo sapien
gccaattggcaatataattccacga

SEQ ID NO: 4424069 - DNA, 25 bp, Homo sapien
aagctttaggaatgccaattggcaa

SEQ ID NO: 4424070 - DNA, 25 bp, Homo sapien
ttccaagctcacatgattgcccagg

SEQ ID NO: 4424071 - DNA, 25 bp, Homo sapien
tccaagctcacatgattgcccaggt

SEQ ID NO: 4424072 - DNA, 25 bp, Homo sapien
tgagatggggatgcatcatcttcca

SEQ ID NO: 4424073 - DNA, 25 bp, Homo sapien
caagctcacatgattgcccaggttg

SEQ ID NO: 4424074 - DNA, 25 bp, Homo sapien
gctgctgtaacacttaaatgtctct

SEQ ID NO: 4424075 - DNA, 25 bp, Homo sapien
gtctctacccgccaggagtgttctt

SEQ ID NO: 4424076 - DNA, 25 bp, Homo sapien
tactttgacccatctaaacggtcgc

SEQ ID NO: 4424077 - DNA, 25 bp, Homo sapien
tgttcttgtgggctatctgatggca

SEQ ID NO: 4424078 - DNA, 25 bp, Homo sapien
ccagagaggcaattaggtccaaaac

SEQ ID NO: 4424079 - DNA, 25 bp, Homo sapien
cagagaggcaattaggtccaaaacg

SEQ ID NO: 4424080 - DNA, 25 bp, Homo sapien
ccatcgatattaggtatatctgaaa

SEQ ID NO: 4424081 - DNA, 25 bp, Homo sapien
catccttatgtccatcgatattagg

SEQ ID NO: 4424082 - DNA, 25 bp, Homo sapien
cttatgtccatcgatattaggtata

SEQ ID NO: 4424083 - DNA, 25 bp, Homo sapien
tgtccatcgatattaggtatatctg

SEQ ID NO: 4424084 - DNA, 25 bp, Homo sapien
ggcccgtgttcttgcagcttataga

SEQ ID NO: 4424085 - DNA, 25 bp, Homo sapien
ttaggaacgtggcccgtgttcttgc

SEQ ID NO: 4424086 - DNA, 25 bp, Homo sapien
ggaacgtggcccgtgttcttgcagc

SEQ ID NO: 4424087 - DNA, 25 bp, Homo sapien
acgtggcccgtgttcttgcagctta

SEQ ID NO: 4424088 - DNA, 25 bp, Homo sapien
acacctttctgcaatactttgagaa

SEQ ID NO: 4424089 - DNA, 25 bp, Homo sapien
gagcccagcatcctcgaataacctc

SEQ ID NO: 4424090 - DNA, 25 bp, Homo sapien
cctttctgcaatactttgagaaaca

SEQ ID NO: 4424091 - DNA, 25 bp, Homo sapien
gcatcctcgaataacctcctgcttt

SEQ ID NO: 4424092 - DNA, 25 bp, Homo sapien
aatactgagtctctgactgctagaa

SEQ ID NO: 4424093 - DNA, 25 bp, Homo sapien
agtgctgctttgtccattggatctg

SEQ ID NO: 4424094 - DNA, 25 bp, Homo sapien
gctagaacatctgcaatcagtcctg

SEQ ID NO: 4424095 - DNA, 25 bp, Homo sapien
ctgcactctgtgcagagagtaactg

SEQ ID NO: 4424096 - DNA, 25 bp, Homo sapien
tggtagtggtgtctggtttccacca

SEQ ID NO: 4424097 - DNA, 25 bp, Homo sapien
ctatctgatggagctcacatgcttc

SEQ ID NO: 4424098 - DNA, 25 bp, Homo sapien
caaacacagagaggataaaactggt

SEQ ID NO: 4424099 - DNA, 25 bp, Homo sapien
gggcctatctgatggagctcacatg

SEQ ID NO: 4424100 - DNA, 25 bp, Homo sapien
gctgagcttaaaatggttcctaatg

SEQ ID NO: 4424101 - DNA, 25 bp, Homo sapien
aatctatatgacaggggaccaccgt

SEQ ID NO: 4424102 - DNA, 25 bp, Homo sapien
ggaccaccgtaatcctcaaagcctg

SEQ ID NO: 4424103 - DNA, 25 bp, Homo sapien
tcaaagcctgtgtattcagctgagc

SEQ ID NO: 4424104 - DNA, 25 bp, Homo sapien
taactttctacattactatgtggga

SEQ ID NO: 4424105 - DNA, 25 bp, Homo sapien
caagtgcacgcattaattgtatatt

SEQ ID NO: 4424106 - DNA, 25 bp, Homo sapien
gtatgtatatttatccaacacaggg

SEQ ID NO: 4424107 - DNA, 25 bp, Homo sapien
catatttagatatcatgtctccttg

SEQ ID NO: 4424108 - DNA, 25 bp, Homo sapien
tttctgtccaatatgcatcagtttc

SEQ ID NO: 4424109 - DNA, 25 bp, Homo sapien
ggcttttcgagtgtgggcacaagca

SEQ ID NO: 4424110 - DNA, 25 bp, Homo sapien
cactctggcttttcgagtgtgggca

SEQ ID NO: 4424111 - DNA, 25 bp, Homo sapien
gccactgggataggataatgttcca

SEQ ID NO: 4424112 - DNA, 25 bp, Homo sapien
ttcctggccactgggataggataat

SEQ ID NO: 4424113 - DNA, 25 bp, Homo sapien
gatgttgaccactcattccccacag

SEQ ID NO: 4424114 - DNA, 25 bp, Homo sapien
catatcccaacttcaccatgcagtg

SEQ ID NO: 4424115 - DNA, 25 bp, Homo sapien
ccatgcagtgatccaaaagatgaac

SEQ ID NO: 4424116 - DNA, 25 bp, Homo sapien
ctgatgattccgtgtatgttccaca

SEQ ID NO: 4424117 - DNA, 25 bp, Homo sapien
tggacatttggtgccaaaattgaga

SEQ ID NO: 4424118 - DNA, 25 bp, Homo sapien
gacatttggtgccaaaattgagaaa

SEQ ID NO: 4424119 - DNA, 25 bp, Homo sapien
catttggtgccaaaattgagaaagt

SEQ ID NO: 4424120 - DNA, 25 bp, Homo sapien
ctggacatttggtgccaaaattgag

SEQ ID NO: 4424121 - DNA, 25 bp, Homo sapien
ttcacatattgttcagaaatgtgtc

SEQ ID NO: 4424122 - DNA, 25 bp, Homo sapien
tttcacatattgttcagaaatgtgt

SEQ ID NO: 4424123 - DNA, 25 bp, Homo sapien
tctacattcaccgtcatattcttca

SEQ ID NO: 4424124 - DNA, 25 bp, Homo sapien
tacaacaccaacagtctccaaggac

SEQ ID NO: 4424125 - DNA, 25 bp, Homo sapien
ccagtaaggagtaagcactgcttca

SEQ ID NO: 4424126 - DNA, 25 bp, Homo sapien
tgcttcatagattggtgcctgtgct

SEQ ID NO: 4424127 - DNA, 25 bp, Homo sapien
tatctatccaacattccatatacac

SEQ ID NO: 4424128 - DNA, 25 bp, Homo sapien
ttatctatccaacattccatataca

SEQ ID NO: 4424129 - DNA, 25 bp, Homo sapien
ggccggaggatggtttgaatccagg

SEQ ID NO: 4424130 - DNA, 25 bp, Homo sapien
aggccggaggatggtttgaatccag

SEQ ID NO: 4424131 - DNA, 25 bp, Homo sapien
agagtttgcggtaagctgaaatcat

SEQ ID NO: 4424132 - DNA, 25 bp, Homo sapien
ggcagagtttgcggtaagctgaaat

SEQ ID NO: 4424133 - DNA, 25 bp, Homo sapien
tcaggagtttaagaccagccttcac

SEQ ID NO: 4424134 - DNA, 25 bp, Homo sapien
aggagtttaagaccagccttcacac

SEQ ID NO: 4424135 - DNA, 25 bp, Homo sapien
aagccaagacaggtccatcacttga

SEQ ID NO: 4424136 - DNA, 25 bp, Homo sapien
ggtcaggagtttaagaccagccttc

SEQ ID NO: 4424137 - DNA, 25 bp, Homo sapien
tgctactgtaacgtggataaaaggt

SEQ ID NO: 4424138 - DNA, 25 bp, Homo sapien
tttagtagataggaacagtccagga

SEQ ID NO: 4424139 - DNA, 25 bp, Homo sapien
aaataagccttcctaagcaacttgc

SEQ ID NO: 4424140 - DNA, 25 bp, Homo sapien
tatacataaacaggtggtaagggtg

SEQ ID NO: 4424141 - DNA, 25 bp, Homo sapien
gtcatgatgacatttattctgtggt

SEQ ID NO: 4424142 - DNA, 25 bp, Homo sapien
tgatgacatttattctgtggtcttt

SEQ ID NO: 4424143 - DNA, 25 bp, Homo sapien
tgacatttattctgtggtctttgac

SEQ ID NO: 4424144 - DNA, 25 bp, Homo sapien
ctgctgtcatgatgacatttattct

SEQ ID NO: 4424145 - DNA, 25 bp, Homo sapien
accagttgtccacagattcatatgg

SEQ ID NO: 4424146 - DNA, 25 bp, Homo sapien
aaccagttgtccacagattcatatg

SEQ ID NO: 4424147 - DNA, 25 bp, Homo sapien
tgcaaaaggacggagggggcagaaa

SEQ ID NO: 4424148 - DNA, 25 bp, Homo sapien
ctgcaaaaggacggagggggcagaa

SEQ ID NO: 4424149 - DNA, 25 bp, Homo sapien
gagaggagactgcagatctgagttt

SEQ ID NO: 4424150 - DNA, 25 bp, Homo sapien
tgtgggcgccaggtggagaggagac

SEQ ID NO: 4424151 - DNA, 25 bp, Homo sapien
tttctggtccatggagcccacctac

SEQ ID NO: 4424152 - DNA, 25 bp, Homo sapien
gagactgcagatctgagttttctgg

SEQ ID NO: 4424153 - DNA, 25 bp, Homo sapien
cccttttatccttcgtatcccatga

SEQ ID NO: 4424154 - DNA, 25 bp, Homo sapien
gaatctcactgtaagcagggactgc

SEQ ID NO: 4424155 - DNA, 25 bp, Homo sapien
tgctctgaccacttgttactcttgt

SEQ ID NO: 4424156 - DNA, 25 bp, Homo sapien
gaacgatggtcatgtgaatctcact

SEQ ID NO: 4424157 - DNA, 25 bp, Homo sapien
ggttaatgttgttagcctggcaata

SEQ ID NO: 4424158 - DNA, 25 bp, Homo sapien
tacgtataaaatgtccaaagggctc

SEQ ID NO: 4424159 - DNA, 25 bp, Homo sapien
gaaaggttcactaatttctccaaga

SEQ ID NO: 4424160 - DNA, 25 bp, Homo sapien
tccctatgagaaggacatgcagcaa

SEQ ID NO: 4424161 - DNA, 25 bp, Homo sapien
tgctgcccttgtgcatggagacccc

SEQ ID NO: 4424162 - DNA, 25 bp, Homo sapien
tcccatgtggctgtgactttggtgg

SEQ ID NO: 4424163 - DNA, 25 bp, Homo sapien
acagaaaggacagggagctgctgcc

SEQ ID NO: 4424164 - DNA, 25 bp, Homo sapien
catggagaccccaaacagtgtctct

SEQ ID NO: 4424165 - DNA, 25 bp, Homo sapien
tccacttgttacttggatcaacttt

SEQ ID NO: 4424166 - DNA, 25 bp, Homo sapien
tccatacaatcttttatgctgtcca

SEQ ID NO: 4424167 - DNA, 25 bp, Homo sapien
gattagttactgcagatgtagatgc

SEQ ID NO: 4424168 - DNA, 25 bp, Homo sapien
gctgtccacttgttacttggatcaa

SEQ ID NO: 4424169 - DNA, 25 bp, Homo sapien
cagcacagcagtgtcggctccagca

SEQ ID NO: 4424170 - DNA, 25 bp, Homo sapien
tgcagcacagcagtgtcggctccag

SEQ ID NO: 4424171 - DNA, 25 bp, Homo sapien
gcagcacagcagtgtcggctccagc

SEQ ID NO: 4424172 - DNA, 25 bp, Homo sapien
agcacagcagtgtcggctccagcaa

SEQ ID NO: 4424173 - DNA, 25 bp, Homo sapien
catgatgatgcccatttggtgactt

SEQ ID NO: 4424174 - DNA, 25 bp, Homo sapien
atgatgatgcccatttggtgacttt

SEQ ID NO: 4424175 - DNA, 25 bp, Homo sapien
tcatgatgatgcccatttggtgact

SEQ ID NO: 4424176 - DNA, 25 bp, Homo sapien
tggtgactttgggattgctgatata

SEQ ID NO: 4424177 - DNA, 25 bp, Homo sapien
ccatgtggcttgtaagcaggttaat

SEQ ID NO: 4424178 - DNA, 25 bp, Homo sapien
ttccatgtggcttgtaagcaggtta

SEQ ID NO: 4424179 - DNA, 25 bp, Homo sapien
tgtggcttgtaagcaggttaatatc

SEQ ID NO: 4424180 - DNA, 25 bp, Homo sapien
ggcttgtaagcaggttaatatcacc

SEQ ID NO: 4424181 - DNA, 25 bp, Homo sapien
atttcccatctatgattacagtacc

SEQ ID NO: 4424182 - DNA, 25 bp, Homo sapien
catctatgattacagtaccactcac

SEQ ID NO: 4424183 - DNA, 25 bp, Homo sapien
tcccatctatgattacagtaccact

SEQ ID NO: 4424184 - DNA, 25 bp, Homo sapien
ccatctatgattacagtaccactca

SEQ ID NO: 4424185 - DNA, 25 bp, Homo sapien
gtgatctgcataagccccactccat

SEQ ID NO: 4424186 - DNA, 25 bp, Homo sapien
ctttagtggggatctgtccgggact

SEQ ID NO: 4424187 - DNA, 25 bp, Homo sapien
tctgcagggtgatctgcataagccc

SEQ ID NO: 4424188 - DNA, 25 bp, Homo sapien
agtctgaacctgcaactgtaaaagg

SEQ ID NO: 4424189 - DNA, 25 bp, Homo sapien
ttgctccacttggagtcagctgatt

SEQ ID NO: 4424190 - DNA, 25 bp, Homo sapien
ggctttgctccacttggagtcagct

SEQ ID NO: 4424191 - DNA, 25 bp, Homo sapien
ctttgctccacttggagtcagctga

SEQ ID NO: 4424192 - DNA, 25 bp, Homo sapien
tgggctttgctccacttggagtcag

SEQ ID NO: 4424193 - DNA, 25 bp, Homo sapien
gccactgcaccagctgccaactaca

SEQ ID NO: 4424194 - DNA, 25 bp, Homo sapien
ctgctgagatatttctgtcttgggg

SEQ ID NO: 4424195 - DNA, 25 bp, Homo sapien
cttgccactgcaccagctgccaact

SEQ ID NO: 4424196 - DNA, 25 bp, Homo sapien
tctgtcttggggaacctcctttctc

SEQ ID NO: 4424197 - DNA, 25 bp, Homo sapien
tttttctaggttgtgatgacttcac

SEQ ID NO: 4424198 - DNA, 25 bp, Homo sapien
ttcaagcgaagcatcccctgaggaa

SEQ ID NO: 4424199 - DNA, 25 bp, Homo sapien
ttttctctggatcagatgacccagg

SEQ ID NO: 4424200 - DNA, 25 bp, Homo sapien
cagctcatgttagtgttggtaggat

SEQ ID NO: 4424201 - DNA, 25 bp, Homo sapien
taaatgtcccaaatagtagcacctg

SEQ ID NO: 4424202 - DNA, 25 bp, Homo sapien
gagctatgaagctggtatggagaat

SEQ ID NO: 4424203 - DNA, 25 bp, Homo sapien
tagcacctgaattattgctacaatc

SEQ ID NO: 4424204 - DNA, 25 bp, Homo sapien
tgtatctcttactccacgtctcctg

SEQ ID NO: 4424205 - DNA, 25 bp, Homo sapien
taaacgatggtcatgtgaatctcac

SEQ ID NO: 4424206 - DNA, 25 bp, Homo sapien
gaatctcactgtaagcagtcgctgc

SEQ ID NO: 4424207 - DNA, 25 bp, Homo sapien
tgtcactcttgtcaactccacttgt

SEQ ID NO: 4424208 - DNA, 25 bp, Homo sapien
caggcacgttacagtcatcatgaaa

SEQ ID NO: 4424209 - DNA, 25 bp, Homo sapien
ggtttcacaaccttgatgaccaaaa

SEQ ID NO: 4424210 - DNA, 25 bp, Homo sapien
gaccaaaataagatctgctccagac

SEQ ID NO: 4424211 - DNA, 25 bp, Homo sapien
ttgcctcataccagaaacataattg

SEQ ID NO: 4424212 - DNA, 25 bp, Homo sapien
tcaagatttgtggtactagtgtagg

SEQ ID NO: 4424213 - DNA, 25 bp, Homo sapien
cattctttcggatgtaacatttgtg

SEQ ID NO: 4424214 - DNA, 25 bp, Homo sapien
gatcgtagaaatcacctcatgatta

SEQ ID NO: 4424215 - DNA, 25 bp, Homo sapien
tcggatgtaacatttgtgtatcttt

SEQ ID NO: 4424216 - DNA, 25 bp, Homo sapien
ggctggtgatcgtagaaatcacctc

SEQ ID NO: 4424217 - DNA, 25 bp, Homo sapien
ctgtgaacctgcctctgttgggcat

SEQ ID NO: 4424218 - DNA, 25 bp, Homo sapien
ccctgtgaacctgcctctgttgggc

SEQ ID NO: 4424219 - DNA, 25 bp, Homo sapien
cccctgtgaacctgcctctgttggg

SEQ ID NO: 4424220 - DNA, 25 bp, Homo sapien
tcccctgtgaacctgcctctgttgg

SEQ ID NO: 4424221 - DNA, 25 bp, Homo sapien
tgtgagtgtataagacctttgagtg

SEQ ID NO: 4424222 - DNA, 25 bp, Homo sapien
tcctatccttttcacttccaacttc

SEQ ID NO: 4424223 - DNA, 25 bp, Homo sapien
taagacctttgagtgtgggccctga

SEQ ID NO: 4424224 - DNA, 25 bp, Homo sapien
catttgtttgtaagtgtgagtgtat

SEQ ID NO: 4424225 - DNA, 25 bp, Homo sapien
gaaacagaggcagcgcaaaaactaa

SEQ ID NO: 4424226 - DNA, 25 bp, Homo sapien
tctgagatgctaagaaagaagattg

SEQ ID NO: 4424227 - DNA, 25 bp, Homo sapien
caagcatggtggatattcatccaac

SEQ ID NO: 4424228 - DNA, 25 bp, Homo sapien
taatcagaataccaagatacgtgtg

SEQ ID NO: 4424229 - DNA, 25 bp, Homo sapien
ctgtccacttgttacttggatcaac

SEQ ID NO: 4424230 - DNA, 25 bp, Homo sapien
tgtccacttgttacttggatcaact

SEQ ID NO: 4424231 - DNA, 25 bp, Homo sapien
tccacttgttacttggatcaacttt

SEQ ID NO: 4424232 - DNA, 25 bp, Homo sapien
gctgtccacttgttacttggatcaa

SEQ ID NO: 4424233 - DNA, 25 bp, Homo sapien
tgatcccaggaaggtgaggctacag

SEQ ID NO: 4424234 - DNA, 25 bp, Homo sapien
gctgaagaaagaggattgcttgatc

SEQ ID NO: 4424235 - DNA, 25 bp, Homo sapien
tcctctggaggctgaagaaagagga

SEQ ID NO: 4424236 - DNA, 25 bp, Homo sapien
gcttgatcccaggaaggtgaggcta

SEQ ID NO: 4424237 - DNA, 25 bp, Homo sapien
tgtgacttcttgtattctaccagga

SEQ ID NO: 4424238 - DNA, 25 bp, Homo sapien
tctgggctggctggataatattaac

SEQ ID NO: 4424239 - DNA, 25 bp, Homo sapien
agcctttgtcatgggtgaaattccc

SEQ ID NO: 4424240 - DNA, 25 bp, Homo sapien
cagattttcttagttgtcatacagg

SEQ ID NO: 4424241 - DNA, 25 bp, Homo sapien
gaagccagaatatcatccacagaat

SEQ ID NO: 4424242 - DNA, 25 bp, Homo sapien
gagtgccaatgcatctcggtgttgc

SEQ ID NO: 4424243 - DNA, 25 bp, Homo sapien
gctgtagcaatgacaagtcttcaga

SEQ ID NO: 4424244 - DNA, 25 bp, Homo sapien
gcccatcctctggattgaagagtgc

SEQ ID NO: 4424245 - DNA, 25 bp, Homo sapien
tgcagcacagcagtgtcggctccag

SEQ ID NO: 4424246 - DNA, 25 bp, Homo sapien
agcacagcagtgtcggctccagcaa

SEQ ID NO: 4424247 - DNA, 25 bp, Homo sapien
ctggcttcacggaagtcacctgctg

SEQ ID NO: 4424248 - DNA, 25 bp, Homo sapien
tgcctctggcttcacggaagtcacc

SEQ ID NO: 4424249 - DNA, 25 bp, Homo sapien
atgatgatgcccatttggtgacttg

SEQ ID NO: 4424250 - DNA, 25 bp, Homo sapien
gatgatgcccatttggtgacttggg

SEQ ID NO: 4424251 - DNA, 25 bp, Homo sapien
tgatgatgcccatttggtgacttgg

SEQ ID NO: 4424252 - DNA, 25 bp, Homo sapien
atgatgcccatttggtgacttgggg

SEQ ID NO: 4424253 - DNA, 25 bp, Homo sapien
agaggctcccctgtgaacctgcctt

SEQ ID NO: 4424254 - DNA, 25 bp, Homo sapien
ctcaacccacaaccaaggcagggag

SEQ ID NO: 4424255 - DNA, 25 bp, Homo sapien
gctcccctgtgaacctgcctttgtt

SEQ ID NO: 4424256 - DNA, 25 bp, Homo sapien
ggctcccctgtgaacctgcctttgt

SEQ ID NO: 4424257 - DNA, 25 bp, Homo sapien
tctggaggaggagacccatgtccac

SEQ ID NO: 4424258 - DNA, 25 bp, Homo sapien
cctttgatgtgcatcgtctggagga

SEQ ID NO: 4424259 - DNA, 25 bp, Homo sapien
aggcacccggggctgcatctccagg

SEQ ID NO: 4424260 - DNA, 25 bp, Homo sapien
cccttgtgcatgcagaccccacaga

SEQ ID NO: 4424261 - DNA, 25 bp, Homo sapien
gataaaagtacgttgacacagaaag

SEQ ID NO: 4424262 - DNA, 25 bp, Homo sapien
ttgacacactcagtctttccaagaa

SEQ ID NO: 4424263 - DNA, 25 bp, Homo sapien
aatgttcgtgtttcccatgaagaca

SEQ ID NO: 4424264 - DNA, 25 bp, Homo sapien
caaccaacaccagaagtagagcaag

SEQ ID NO: 4424265 - DNA, 25 bp, Homo sapien
gagcctgcagatccgagttttctcc

SEQ ID NO: 4424266 - DNA, 25 bp, Homo sapien
agcctgcagatccgagttttctcct

SEQ ID NO: 4424267 - DNA, 25 bp, Homo sapien
gcctgcagatccgagttttctcctc

SEQ ID NO: 4424268 - DNA, 25 bp, Homo sapien
ggagcctgcagatccgagttttctc

SEQ ID NO: 4424269 - DNA, 25 bp, Homo sapien
tgtgttattgagtttcagcgactca

SEQ ID NO: 4424270 - DNA, 25 bp, Homo sapien
tcacaagaggatgtgttgtcaacat

SEQ ID NO: 4424271 - DNA, 25 bp, Homo sapien
gactcattctgtatgaatgcttcac

SEQ ID NO: 4424272 - DNA, 25 bp, Homo sapien
tcttgtacagtagacatgtgttatt

SEQ ID NO: 4424273 - DNA, 25 bp, Homo sapien
gctggatcgcatctagcagttcttg

SEQ ID NO: 4424274 - DNA, 25 bp, Homo sapien
ctgtgacatgagctctaccattgcc

SEQ ID NO: 4424275 - DNA, 25 bp, Homo sapien
cctcaagataccaccttgggagatc

SEQ ID NO: 4424276 - DNA, 25 bp, Homo sapien
catgagctctaccattgcctcaaga

SEQ ID NO: 4424277 - DNA, 25 bp, Homo sapien
tctagggtctaatccaagataccac

SEQ ID NO: 4424278 - DNA, 25 bp, Homo sapien
acttcactggtgagttattcaaagc

SEQ ID NO: 4424279 - DNA, 25 bp, Homo sapien
gatttcaagggaaggctcatctggg

SEQ ID NO: 4424280 - DNA, 25 bp, Homo sapien
caggcatataactgaccgattgttg

SEQ ID NO: 4424281 - DNA, 25 bp, Homo sapien
taataaggcaagctactttgccata

SEQ ID NO: 4424282 - DNA, 25 bp, Homo sapien
gaacgggggataataaggcaagcta

SEQ ID NO: 4424283 - DNA, 25 bp, Homo sapien
gctactttgccatagtctcctatat

SEQ ID NO: 4424284 - DNA, 25 bp, Homo sapien
catagtctcctatatctccattcat

SEQ ID NO: 4424285 - DNA, 25 bp, Homo sapien
agtgtccctggagcttgatggtgtc

SEQ ID NO: 4424286 - DNA, 25 bp, Homo sapien
aatacagggccttctaacatatgtg

SEQ ID NO: 4424287 - DNA, 25 bp, Homo sapien
catatgtgagaaaggcgtctttcct

SEQ ID NO: 4424288 - DNA, 25 bp, Homo sapien
ctaacatatgtgagaaaggcgtctt

SEQ ID NO: 4424289 - DNA, 25 bp, Homo sapien
ttatccttcgtatcccatgaacgac

SEQ ID NO: 4424290 - DNA, 25 bp, Homo sapien
cttcgtatcccatgaacgacggtca

SEQ ID NO: 4424291 - DNA, 25 bp, Homo sapien
tccttcgtatcccatgaacgacggt

SEQ ID NO: 4424292 - DNA, 25 bp, Homo sapien
tcgtatcccatgaacgacggtcatg

SEQ ID NO: 4424293 - DNA, 25 bp, Homo sapien
gtggctttgactttggtgggcatgg

SEQ ID NO: 4424294 - DNA, 25 bp, Homo sapien
tggctttgactttggtgggcatggt

SEQ ID NO: 4424295 - DNA, 25 bp, Homo sapien
gcatggagaccccatacagtggctc

SEQ ID NO: 4424296 - DNA, 25 bp, Homo sapien
tatttctggatacttgagaggaaga

SEQ ID NO: 4424297 - DNA, 25 bp, Homo sapien
ccacttgttacttggagcaacttta

SEQ ID NO: 4424298 - DNA, 25 bp, Homo sapien
ctgtccacttgttacttggagcaac

SEQ ID NO: 4424299 - DNA, 25 bp, Homo sapien
tgttacttggagcaactttatttct

SEQ ID NO: 4424300 - DNA, 25 bp, Homo sapien
tatgattagttactgcagatgtaga

SEQ ID NO: 4424301 - DNA, 25 bp, Homo sapien
atgattagttactgcagatgtagat

SEQ ID NO: 4424302 - DNA, 25 bp, Homo sapien
gattagttactgcagatgtagatgc

SEQ ID NO: 4424303 - DNA, 25 bp, Homo sapien
tgattagttactgcagatgtagatg

SEQ ID NO: 4424304 - DNA, 25 bp, Homo sapien
tattcactaacacaatcatagtaca

SEQ ID NO: 4424305 - DNA, 25 bp, Homo sapien
catagtacactacatagcctcaaac

SEQ ID NO: 4424306 - DNA, 25 bp, Homo sapien
aaactcctggtatcacatgatcatc

SEQ ID NO: 4424307 - DNA, 25 bp, Homo sapien
ccacacttgcacagataaaatttta

SEQ ID NO: 4424308 - DNA, 25 bp, Homo sapien
ctttaggccatcgaccaggataaga

SEQ ID NO: 4424309 - DNA, 25 bp, Homo sapien
gcacagccagtaccaaaccctgagt

SEQ ID NO: 4424310 - DNA, 25 bp, Homo sapien
taccaaaccctgagtcgtagtgggc

SEQ ID NO: 4424311 - DNA, 25 bp, Homo sapien
aaggctataggttatagccaccatc

SEQ ID NO: 4424312 - DNA, 25 bp, Homo sapien
atcgttttatgacttgttgcttgaa

SEQ ID NO: 4424313 - DNA, 25 bp, Homo sapien
ctatttacagcttttcatgattcag

SEQ ID NO: 4424314 - DNA, 25 bp, Homo sapien
tggactgaactaatacaagaccaca

SEQ ID NO: 4424315 - DNA, 25 bp, Homo sapien
gactgaactaatacaagaccacagt

SEQ ID NO: 4424316 - DNA, 25 bp, Homo sapien
taccaccagaatgtgaaaatggaag

SEQ ID NO: 4424317 - DNA, 25 bp, Homo sapien
gctgatgccatatttgtagtgagag

SEQ ID NO: 4424318 - DNA, 25 bp, Homo sapien
tggtctattattgcgaaaacatgct

SEQ ID NO: 4424319 - DNA, 25 bp, Homo sapien
cctatgatcacatgagacagaaagt

SEQ ID NO: 4424320 - DNA, 25 bp, Homo sapien
catttaatcgtgattggtgattcta

SEQ ID NO: 4424321 - DNA, 25 bp, Homo sapien
ctttttgaatattaggtcacctgaa

SEQ ID NO: 4424322 - DNA, 25 bp, Homo sapien
gtccaacagtgacaaattagccaca

SEQ ID NO: 4424323 - DNA, 25 bp, Homo sapien
tcagcctgatattagaccttattgt

SEQ ID NO: 4424324 - DNA, 25 bp, Homo sapien
ttcagagaatttatctgcttctcag

SEQ ID NO: 4424325 - DNA, 25 bp, Homo sapien
aaaacacatttatgcaagcccagga

SEQ ID NO: 4424326 - DNA, 25 bp, Homo sapien
taacaagcatttcttaaatcgtacc

SEQ ID NO: 4424327 - DNA, 25 bp, Homo sapien
gacggaattgtagatttgtagcaga

SEQ ID NO: 4424328 - DNA, 25 bp, Homo sapien
ctttaaacacacatagtggcccaca

SEQ ID NO: 4424329 - DNA, 25 bp, Homo sapien
cagacatgtagcatatgggaacgcc

SEQ ID NO: 4424330 - DNA, 25 bp, Homo sapien
ttaaacacacatagtggcccacaga

SEQ ID NO: 4424331 - DNA, 25 bp, Homo sapien
gggaacgccacccacatggatgagg

SEQ ID NO: 4424332 - DNA, 25 bp, Homo sapien
gtcttggccctatgatagcatgcat

SEQ ID NO: 4424333 - DNA, 25 bp, Homo sapien
tgtcttggccctatgatagcatgca

SEQ ID NO: 4424334 - DNA, 25 bp, Homo sapien
agtgtcttggccctatgatagcatg

SEQ ID NO: 4424335 - DNA, 25 bp, Homo sapien
tagtgtcttggccctatgatagcat

SEQ ID NO: 4424336 - DNA, 25 bp, Homo sapien
catgatgatgcccatttggtgactt

SEQ ID NO: 4424337 - DNA, 25 bp, Homo sapien
gatataattctggtattcaacagaa

SEQ ID NO: 4424338 - DNA, 25 bp, Homo sapien
tgctgatataattctggtattcaac

SEQ ID NO: 4424339 - DNA, 25 bp, Homo sapien
tgactttggggcttggggattgctg

SEQ ID NO: 4424340 - DNA, 25 bp, Homo sapien
aacagctcccactgcggtaccgcca

SEQ ID NO: 4424341 - DNA, 25 bp, Homo sapien
catacggggcccttagcgccggcct

SEQ ID NO: 4424342 - DNA, 25 bp, Homo sapien
tcccactgcggtaccgccatacggg

SEQ ID NO: 4424343 - DNA, 25 bp, Homo sapien
cgccggcctctgcgttggcccggat

SEQ ID NO: 4424344 - DNA, 25 bp, Homo sapien
ccaagctgttttagcagctccaacc

SEQ ID NO: 4424345 - DNA, 25 bp, Homo sapien
aagctgttttagcagctccaaccac

SEQ ID NO: 4424346 - DNA, 25 bp, Homo sapien
caagctgttttagcagctccaacca

SEQ ID NO: 4424347 - DNA, 25 bp, Homo sapien
agctgttttagcagctccaaccacc

SEQ ID NO: 4424348 - DNA, 25 bp, Homo sapien
catgagggaagacgccagctgccag

SEQ ID NO: 4424349 - DNA, 25 bp, Homo sapien
ctggagggaaatagcctccactgcc

SEQ ID NO: 4424350 - DNA, 25 bp, Homo sapien
gtgatctgcataagccccactccat

SEQ ID NO: 4424351 - DNA, 25 bp, Homo sapien
ctttagtggggatctgtccgggact

SEQ ID NO: 4424352 - DNA, 25 bp, Homo sapien
tctgcagggtgatctgcataagccc

SEQ ID NO: 4424353 - DNA, 25 bp, Homo sapien
agtctgaacctgcaactgtaaaagg

SEQ ID NO: 4424354 - DNA, 25 bp, Homo sapien
tctgaaattgagaggaggtttcagg

SEQ ID NO: 4424355 - DNA, 25 bp, Homo sapien
ttgctccacttggagtcagctgatt

SEQ ID NO: 4424356 - DNA, 25 bp, Homo sapien
tgggctttgctccacttggagtcag

SEQ ID NO: 4424357 - DNA, 25 bp, Homo sapien
ctttgctccacttggagtcagctga

SEQ ID NO: 4424358 - DNA, 25 bp, Homo sapien
gttagtgggatcctgaatatactct

SEQ ID NO: 4424359 - DNA, 25 bp, Homo sapien
aggttagtgggatcctgaatatact

SEQ ID NO: 4424360 - DNA, 25 bp, Homo sapien
ggttagtgggatcctgaatatactc

SEQ ID NO: 4424361 - DNA, 25 bp, Homo sapien
gatggctttagggttggccaaaggc

SEQ ID NO: 4424362 - DNA, 25 bp, Homo sapien
tggctttagggttggccaaaggcaa

SEQ ID NO: 4424363 - DNA, 25 bp, Homo sapien
cttgatggctttagggttggccaaa

SEQ ID NO: 4424364 - DNA, 25 bp, Homo sapien
ttgatggctttagggttggccaaag

SEQ ID NO: 4424365 - DNA, 25 bp, Homo sapien
ggcgctgtccttgtgcatgcagagc

SEQ ID NO: 4424366 - DNA, 25 bp, Homo sapien
ccacaaccaaggcagggaggcgctg

SEQ ID NO: 4424367 - DNA, 25 bp, Homo sapien
cagaggctcccctgtgaacctgtct

SEQ ID NO: 4424368 - DNA, 25 bp, Homo sapien
ctcagaggctcccctgtgaacctgt

SEQ ID NO: 4424369 - DNA, 25 bp, Homo sapien
cattcagatgtgaagtctaactttc

SEQ ID NO: 4424370 - DNA, 25 bp, Homo sapien
cttttgtacaaggagaatatgaaac

SEQ ID NO: 4424371 - DNA, 25 bp, Homo sapien
gacgttgctccttgcattcagatgt

SEQ ID NO: 4424372 - DNA, 25 bp, Homo sapien
agcatggttaagaagacgttgctcc

SEQ ID NO: 4424373 - DNA, 25 bp, Homo sapien
cagactgtttatcgggactttgtta

SEQ ID NO: 4424374 - DNA, 25 bp, Homo sapien
gatctctcttctcggtagaccagac

SEQ ID NO: 4424375 - DNA, 25 bp, Homo sapien
ttgatctctcttctcggtagaccag

SEQ ID NO: 4424376 - DNA, 25 bp, Homo sapien
aaacagactgtttatcgggactttg

SEQ ID NO: 4424377 - DNA, 25 bp, Homo sapien
ctgaagtgggatgaatgctggaacc

SEQ ID NO: 4424378 - DNA, 25 bp, Homo sapien
gaagtgggatgaatgctggaaccca

SEQ ID NO: 4424379 - DNA, 25 bp, Homo sapien
tgaagtgggatgaatgctggaaccc

SEQ ID NO: 4424380 - DNA, 25 bp, Homo sapien
gctgaagtgggatgaatgctggaac

SEQ ID NO: 4424381 - DNA, 25 bp, Homo sapien
ccaatgagtgtccaaatctttttta

SEQ ID NO: 4424382 - DNA, 25 bp, Homo sapien
tgctctgttagctaacaaggcctcc

SEQ ID NO: 4424383 - DNA, 25 bp, Homo sapien
caatgtgtacaaccaatgagtgtcc

SEQ ID NO: 4424384 - DNA, 25 bp, Homo sapien
catatggagacttgtagaaatttgt

SEQ ID NO: 4424385 - DNA, 25 bp, Homo sapien
aaccagttgtccacagattcatatc

SEQ ID NO: 4424386 - DNA, 25 bp, Homo sapien
accagttgtccacagattcatatcg

SEQ ID NO: 4424387 - DNA, 25 bp, Homo sapien
agcagtgtcagctccagcaacaccg

SEQ ID NO: 4424388 - DNA, 25 bp, Homo sapien
tgccaactgtttgtttttctaagtc

SEQ ID NO: 4424389 - DNA, 25 bp, Homo sapien
aagtcacctgctgcactggtttgcc

SEQ ID NO: 4424390 - DNA, 25 bp, Homo sapien
gtgtgcctccggcttcacggaagtc

SEQ ID NO: 4424391 - DNA, 25 bp, Homo sapien
ctgctgtcataatgatgcccatccg

SEQ ID NO: 4424392 - DNA, 25 bp, Homo sapien
cataatgatgcccatccggtgactt

SEQ ID NO: 4424393 - DNA, 25 bp, Homo sapien
aatgatgcccatccggtgactttgg

SEQ ID NO: 4424394 - DNA, 25 bp, Homo sapien
tgtcataatgatgcccatccggtga

SEQ ID NO: 4424395 - DNA, 25 bp, Homo sapien
catctggctcataagcaggttaaca

SEQ ID NO: 4424396 - DNA, 25 bp, Homo sapien
gctcataagcaggttaacatcaccc

SEQ ID NO: 4424397 - DNA, 25 bp, Homo sapien
ggctcataagcaggttaacatcacc

SEQ ID NO: 4424398 - DNA, 25 bp, Homo sapien
tctggctcataagcaggttaacatc

SEQ ID NO: 4424399 - DNA, 25 bp, Homo sapien
catctatgattacagtaccactcac

SEQ ID NO: 4424400 - DNA, 25 bp, Homo sapien
tcccatctatgattacagtaccact

SEQ ID NO: 4424401 - DNA, 25 bp, Homo sapien
atttcccatctatgattacagtacc

SEQ ID NO: 4424402 - DNA, 25 bp, Homo sapien
ccatctatgattacagtaccactca

SEQ ID NO: 4424403 - DNA, 25 bp, Homo sapien
tgggctttgctccacttggagtcag

SEQ ID NO: 4424404 - DNA, 25 bp, Homo sapien
tctgaaattgagaggaggtttcagg

SEQ ID NO: 4424405 - DNA, 25 bp, Homo sapien
gtgatctgcataagccccactccat

SEQ ID NO: 4424406 - DNA, 25 bp, Homo sapien
tttgctccacttggagtcagctgat

SEQ ID NO: 4424407 - DNA, 25 bp, Homo sapien
actgatgtatgaactggtgactggg

SEQ ID NO: 4424408 - DNA, 25 bp, Homo sapien
gtccctggagcttcaggcgcctgaa

SEQ ID NO: 4424409 - DNA, 25 bp, Homo sapien
taatggagcatatgatggaaaagaa

SEQ ID NO: 4424410 - DNA, 25 bp, Homo sapien
gagagtccctggagcttcaggcgcc

SEQ ID NO: 4424411 - DNA, 25 bp, Homo sapien
agggcagctgtatctcttactccac

SEQ ID NO: 4424412 - DNA, 25 bp, Homo sapien
agctgtatctcttactccacgtctc

SEQ ID NO: 4424413 - DNA, 25 bp, Homo sapien
cagctgtatctcttactccacgtct

SEQ ID NO: 4424414 - DNA, 25 bp, Homo sapien
ataatttatcatttagaatgttgac

SEQ ID NO: 4424415 - DNA, 25 bp, Homo sapien
taatttatcatttagaatgttgacc

SEQ ID NO: 4424416 - DNA, 25 bp, Homo sapien
tataatttatcatttagaatgttga

SEQ ID NO: 4424417 - DNA, 25 bp, Homo sapien
tgcaggcacattacagttatcatga

SEQ ID NO: 4424418 - DNA, 25 bp, Homo sapien
ctgatgcaggcacattacagttatc

SEQ ID NO: 4424419 - DNA, 25 bp, Homo sapien
gctgatgcaggcacattacagttat

SEQ ID NO: 4424420 - DNA, 25 bp, Homo sapien
gatgcaggcacattacagttatcat

SEQ ID NO: 4424421 - DNA, 25 bp, Homo sapien
gtagacagggcaattcgtttagaaa

SEQ ID NO: 4424422 - DNA, 25 bp, Homo sapien
caacaagcacttgaaaattcccaga

SEQ ID NO: 4424423 - DNA, 25 bp, Homo sapien
actctgactatttgcaaaggacatg

SEQ ID NO: 4424424 - DNA, 25 bp, Homo sapien
aaaaacatgcagcaaatcaggcaga

SEQ ID NO: 4424425 - DNA, 25 bp, Homo sapien
gatcgtagaaatcaccttatgatta

SEQ ID NO: 4424426 - DNA, 25 bp, Homo sapien
ggtgatcgtagaaatcaccttatga

SEQ ID NO: 4424427 - DNA, 25 bp, Homo sapien
ggctggtgatcgtagaaatcacctt

SEQ ID NO: 4424428 - DNA, 25 bp, Homo sapien
gctggtgatcgtagaaatcacctta

SEQ ID NO: 4424429 - DNA, 25 bp, Homo sapien
actgtcctccattagggaagtccag

SEQ ID NO: 4424430 - DNA, 25 bp, Homo sapien
gtcctccattagggaagtccagtct

SEQ ID NO: 4424431 - DNA, 25 bp, Homo sapien
cttctcattaaagtgagtgtccaga

SEQ ID NO: 4424432 - DNA, 25 bp, Homo sapien
acttctcattaaagtgagtgtccag

SEQ ID NO: 4424433 - DNA, 25 bp, Homo sapien
cctgcctctgttgggcatggtctgg

SEQ ID NO: 4424434 - DNA, 25 bp, Homo sapien
tcccctgtgaacctgcctctgttgg

SEQ ID NO: 4424435 - DNA, 25 bp, Homo sapien
tgtgaacctgcctctgttgggcatg

SEQ ID NO: 4424436 - DNA, 25 bp, Homo sapien
gaacctgcctctgttgggcatggtc

SEQ ID NO: 4424437 - DNA, 25 bp, Homo sapien
tcatatcgaggtcttagtaagcaag

SEQ ID NO: 4424438 - DNA, 25 bp, Homo sapien
aagcaagcactgtcatcaaccacca

SEQ ID NO: 4424439 - DNA, 25 bp, Homo sapien
gaggtcttagtaagcaagcactgtc

SEQ ID NO: 4424440 - DNA, 25 bp, Homo sapien
tagtaagcaagcactgtcatcaacc

SEQ ID NO: 4424441 - DNA, 25 bp, Homo sapien
caaaagcactgaggtggcagaaacc

SEQ ID NO: 4424442 - DNA, 25 bp, Homo sapien
agcactgaggtggcagaaacctgcc

SEQ ID NO: 4424443 - DNA, 25 bp, Homo sapien
ctgcaaaagcactgaggtggcagaa

SEQ ID NO: 4424444 - DNA, 25 bp, Homo sapien
aagcactgaggtggcagaaacctgc

SEQ ID NO: 4424445 - DNA, 25 bp, Homo sapien
tgtgggcgccaggtggagaggagtc

SEQ ID NO: 4424446 - DNA, 25 bp, Homo sapien
tccgcagatctgagttttctcctcc

SEQ ID NO: 4424447 - DNA, 25 bp, Homo sapien
agaggagtccgcagatctgagtttt

SEQ ID NO: 4424448 - DNA, 25 bp, Homo sapien
cgccaggtggagaggagtccgcaga

SEQ ID NO: 4424449 - DNA, 25 bp, Homo sapien
gaagtccccacagatggtgtgaagg

SEQ ID NO: 4424450 - DNA, 25 bp, Homo sapien
ggcacctggatgagctccacttcca

SEQ ID NO: 4424451 - DNA, 25 bp, Homo sapien
gggtgcccaatctcgggcttggcac

SEQ ID NO: 4424452 - DNA, 25 bp, Homo sapien
gtcaggtcggttctcagtggcgttc

SEQ ID NO: 4424453 - DNA, 25 bp, Homo sapien
ttgggggaaattcgccctcttggca

SEQ ID NO: 4424454 - DNA, 25 bp, Homo sapien
tgggggaaattcgccctcttggcac

SEQ ID NO: 4424455 - DNA, 25 bp, Homo sapien
tcagaggacttgggggaaattcgcc

SEQ ID NO: 4424456 - DNA, 25 bp, Homo sapien
caagagtctgcggagcacatgctta

SEQ ID NO: 4424457 - DNA, 25 bp, Homo sapien
gcacaagagtctgcggagcacatgc

SEQ ID NO: 4424458 - DNA, 25 bp, Homo sapien
gggcacaagagtctgcggagcacat

SEQ ID NO: 4424459 - DNA, 25 bp, Homo sapien
agtctgcggagcacatgcttagaaa

SEQ ID NO: 4424460 - DNA, 25 bp, Homo sapien
cttgcagtcccacatggagggagcg

SEQ ID NO: 4424461 - DNA, 25 bp, Homo sapien
accccttgcagtcccacatggaggg

SEQ ID NO: 4424462 - DNA, 25 bp, Homo sapien
tggacccgaccccttgcagtcccac

SEQ ID NO: 4424463 - DNA, 25 bp, Homo sapien
ccgaccccttgcagtcccacatgga

SEQ ID NO: 4424464 - DNA, 25 bp, Homo sapien
gtttctctgtatcatgaatccagat

SEQ ID NO: 4424465 - DNA, 25 bp, Homo sapien
tatcatgaatccagatgtagaggat

SEQ ID NO: 4424466 - DNA, 25 bp, Homo sapien
tagaggatggccaaggacgaggtct

SEQ ID NO: 4424467 - DNA, 25 bp, Homo sapien
ccagatgtagaggatggccaaggac

SEQ ID NO: 4424468 - DNA, 25 bp, Homo sapien
cacaatggctggattgcatctatca

SEQ ID NO: 4424469 - DNA, 25 bp, Homo sapien
aactgagagtcgagaacacaatggc

SEQ ID NO: 4424470 - DNA, 25 bp, Homo sapien
gacatgagctctaccattgcatcaa

SEQ ID NO: 4424471 - DNA, 25 bp, Homo sapien
gcacactggactgctattgtcatca

SEQ ID NO: 4424472 - DNA, 25 bp, Homo sapien
gggaaggatcacctacccagctcct

SEQ ID NO: 4424473 - DNA, 25 bp, Homo sapien
ggaaggatcacctacccagctcctg

SEQ ID NO: 4424474 - DNA, 25 bp, Homo sapien
tgaattactgctacaatcttctcag

SEQ ID NO: 4424475 - DNA, 25 bp, Homo sapien
ctgaattactgctacaatcttctca

SEQ ID NO: 4424476 - DNA, 25 bp, Homo sapien
acaggctttgatgttccccaaatag

SEQ ID NO: 4424477 - DNA, 25 bp, Homo sapien
caggctttgatgttccccaaatagt

SEQ ID NO: 4424478 - DNA, 25 bp, Homo sapien
actttgtttggaaacattctatggg

SEQ ID NO: 4424479 - DNA, 25 bp, Homo sapien
gagcctgtgcccttggtatgatgtg

SEQ ID NO: 4424480 - DNA, 25 bp, Homo sapien
ccccacttcttgaatgcgtgttgtt

SEQ ID NO: 4424481 - DNA, 25 bp, Homo sapien
atgataaagcctgttgagagcctgt

SEQ ID NO: 4424482 - DNA, 25 bp, Homo sapien
caccgttggtggacgtccaaattag

SEQ ID NO: 4424483 - DNA, 25 bp, Homo sapien
tatatatgcggctaacaatcatatg

SEQ ID NO: 4424484 - DNA, 25 bp, Homo sapien
tcaacagacgatatatatgcggcta

SEQ ID NO: 4424485 - DNA, 25 bp, Homo sapien
caacctcactgatccttaaagaaat

SEQ ID NO: 4424486 - DNA, 25 bp, Homo sapien
taactgctaagtgcgtaacggagaa

SEQ ID NO: 4424487 - DNA, 25 bp, Homo sapien
tatctgaataagtggtttctgacac

SEQ ID NO: 4424488 - DNA, 25 bp, Homo sapien
tgagagtcatatctcccaaaaatgc

SEQ ID NO: 4424489 - DNA, 25 bp, Homo sapien
tacactgcgaagtgatgtctacaca

SEQ ID NO: 4424490 - DNA, 25 bp, Homo sapien
tgcaggaggttactatgggtgcatc

SEQ ID NO: 4424491 - DNA, 25 bp, Homo sapien
tacaccagtgcaggaggttactatg

SEQ ID NO: 4424492 - DNA, 25 bp, Homo sapien
atctacaccagtgcaggaggttact

SEQ ID NO: 4424493 - DNA, 25 bp, Homo sapien
ttactatgggtgcatctcaaggttt

SEQ ID NO: 4424494 - DNA, 25 bp, Homo sapien
cccatgtggctttgattttggtgga

SEQ ID NO: 4424495 - DNA, 25 bp, Homo sapien
ctgctgcccttgtgcatggagaccc

SEQ ID NO: 4424496 - DNA, 25 bp, Homo sapien
acagaaaggacagggagctgctgcc

SEQ ID NO: 4424497 - DNA, 25 bp, Homo sapien
agctcagaggctcccatgtggcttt

SEQ ID NO: 4424498 - DNA, 25 bp, Homo sapien
aggcaagggttaagtctcacattcc

SEQ ID NO: 4424499 - DNA, 25 bp, Homo sapien
gactatgtttacaaccgccacaagg

SEQ ID NO: 4424500 - DNA, 25 bp, Homo sapien
gcactagcctcaagataagctgact

SEQ ID NO: 4424501 - DNA, 25 bp, Homo sapien
tctagcagccaagcaagcactagcc

SEQ ID NO: 4424502 - DNA, 25 bp, Homo sapien
tcatatcgaggtcttagtaagcaag

SEQ ID NO: 4424503 - DNA, 25 bp, Homo sapien
aaccagttgtccacagattcatatc

SEQ ID NO: 4424504 - DNA, 25 bp, Homo sapien
atatcgaggtcttagtaagcaagca

SEQ ID NO: 4424505 - DNA, 25 bp, Homo sapien
accagttgtccacagattcatatcg

SEQ ID NO: 4424506 - DNA, 25 bp, Homo sapien
ctaacaccgcagagtgccgtgaact

SEQ ID NO: 4424507 - DNA, 25 bp, Homo sapien
gaactatgagcagggacctatgtgg

SEQ ID NO: 4424508 - DNA, 25 bp, Homo sapien
gccagaacacgtgcagagtcaccat

SEQ ID NO: 4424509 - DNA, 25 bp, Homo sapien
gagtcaccatttagcctgggtccat

SEQ ID NO: 4424510 - DNA, 25 bp, Homo sapien
gagcctgcagatccgagttttctcc

SEQ ID NO: 4424511 - DNA, 25 bp, Homo sapien
agcctgcagatccgagttttctcct

SEQ ID NO: 4424512 - DNA, 25 bp, Homo sapien
gcctgcagatccgagttttctcctc

SEQ ID NO: 4424513 - DNA, 25 bp, Homo sapien
ggagcctgcagatccgagttttctc

SEQ ID NO: 4424514 - DNA, 25 bp, Homo sapien
aggcgagagtggctggcggcctggc

SEQ ID NO: 4424515 - DNA, 25 bp, Homo sapien
caagtgtatgcagagcacatgctca

SEQ ID NO: 4424516 - DNA, 25 bp, Homo sapien
acacaagtgtatgcagagcacatgc

SEQ ID NO: 4424517 - DNA, 25 bp, Homo sapien
tggcggcctggcacacaagtgtatg

SEQ ID NO: 4424518 - DNA, 25 bp, Homo sapien
gtaagaatgggagacagcatccatg

SEQ ID NO: 4424519 - DNA, 25 bp, Homo sapien
ggtaagaatgggagacagcatccat

SEQ ID NO: 4424520 - DNA, 25 bp, Homo sapien
agtcgagtacagactggctggattg

SEQ ID NO: 4424521 - DNA, 25 bp, Homo sapien
gagtacagactggctggattgcatc

SEQ ID NO: 4424522 - DNA, 25 bp, Homo sapien
tgcaggaggttactatgggtgcatc

SEQ ID NO: 4424523 - DNA, 25 bp, Homo sapien
tacaccagtgcaggaggttactatg

SEQ ID NO: 4424524 - DNA, 25 bp, Homo sapien
atctacaccagtgcaggaggttact

SEQ ID NO: 4424525 - DNA, 25 bp, Homo sapien
ttactatgggtgcatctcaaggttt

SEQ ID NO: 4424526 - DNA, 25 bp, Homo sapien
tgggcatggtctggaggagaaacaa

SEQ ID NO: 4424527 - DNA, 25 bp, Homo sapien
gtggctttgactttggtgggcatgg

SEQ ID NO: 4424528 - DNA, 25 bp, Homo sapien
gctttgactttggtgggcatggtct

SEQ ID NO: 4424529 - DNA, 25 bp, Homo sapien
gggcatggtctggaggagaaacaac

SEQ ID NO: 4424530 - DNA, 25 bp, Homo sapien
gcatggagaccccatacagtggctc

SEQ ID NO: 4424531 - DNA, 25 bp, Homo sapien
aaataaagtcttaaggtatcactcg

SEQ ID NO: 4424532 - DNA, 25 bp, Homo sapien
tacccaagtgttaaacacatttgca

SEQ ID NO: 4424533 - DNA, 25 bp, Homo sapien
caaaaccaggataaatattacaatg

SEQ ID NO: 4424534 - DNA, 25 bp, Homo sapien
tatcactcgtcagccagcagaatca

SEQ ID NO: 4424535 - DNA, 25 bp, Homo sapien
taagttcacatgattgaccaggttg

SEQ ID NO: 4424536 - DNA, 25 bp, Homo sapien
atgtctcacctgaggatcagctggg

SEQ ID NO: 4424537 - DNA, 25 bp, Homo sapien
ggccaaggctgatgtctcacctgag

SEQ ID NO: 4424538 - DNA, 25 bp, Homo sapien
ttctaagttcacatgattgaccagg

SEQ ID NO: 4424539 - DNA, 25 bp, Homo sapien
caactttatttttggatacttgaga

SEQ ID NO: 4424540 - DNA, 25 bp, Homo sapien
tatttttggatacttgagaagaaga

SEQ ID NO: 4424541 - DNA, 25 bp, Homo sapien
gaagaagaatgggtcttagtgttcc

SEQ ID NO: 4424542 - DNA, 25 bp, Homo sapien
tggatacttgagaagaagaatgggt

SEQ ID NO: 4424543 - DNA, 25 bp, Homo sapien
agatgtagatgcattatagcttcca

SEQ ID NO: 4424544 - DNA, 25 bp, Homo sapien
gcagatgtagatgcattatagcttc

SEQ ID NO: 4424545 - DNA, 25 bp, Homo sapien
cagatgtagatgcattatagcttcc

SEQ ID NO: 4424546 - DNA, 25 bp, Homo sapien
gcacagccagtaccaaatcctgagt

SEQ ID NO: 4424547 - DNA, 25 bp, Homo sapien
aatcctgagtcatattgggcaaggc

SEQ ID NO: 4424548 - DNA, 25 bp, Homo sapien
ccatcgaccaggataagtaagcatc

SEQ ID NO: 4424549 - DNA, 25 bp, Homo sapien
aaggctataggttatagtcaccatc

SEQ ID NO: 4424550 - DNA, 25 bp, Homo sapien
aaatggctacgaccttcttcctgag

SEQ ID NO: 4424551 - DNA, 25 bp, Homo sapien
atgaaatggctacgaccttcttcct

SEQ ID NO: 4424552 - DNA, 25 bp, Homo sapien
gaaatggctacgaccttcttcctga

SEQ ID NO: 4424553 - DNA, 25 bp, Homo sapien
atggctacgaccttcttcctgaggc

SEQ ID NO: 4424554 - DNA, 25 bp, Homo sapien
tgatcccaggaaggtgaggctacag

SEQ ID NO: 4424555 - DNA, 25 bp, Homo sapien
tctggaggctgaagaaagaagattg

SEQ ID NO: 4424556 - DNA, 25 bp, Homo sapien
tgaagaaagaagattgcttgatccc

SEQ ID NO: 4424557 - DNA, 25 bp, Homo sapien
cttgatcccaggaaggtgaggctac

SEQ ID NO: 4424558 - DNA, 25 bp, Homo sapien
gctccagaagaccaacctttcagca

SEQ ID NO: 4424559 - DNA, 25 bp, Homo sapien
ctttctctgtagctggaagcttata

SEQ ID NO: 4424560 - DNA, 25 bp, Homo sapien
aactgatttctaaggggagaccagc

SEQ ID NO: 4424561 - DNA, 25 bp, Homo sapien
cagcaatactttaagaaactgattt

SEQ ID NO: 4424562 - DNA, 25 bp, Homo sapien
gacatgtagcatatgggcaacacca

SEQ ID NO: 4424563 - DNA, 25 bp, Homo sapien
gctgctacctgtgctttcgtgacca

SEQ ID NO: 4424564 - DNA, 25 bp, Homo sapien
ggctggccatttgctccgttaaagg

SEQ ID NO: 4424565 - DNA, 25 bp, Homo sapien
cacaaagtggcaaggtacaatttcc

SEQ ID NO: 4424566 - DNA, 25 bp, Homo sapien
cctgtgcccactaaagctaaggttc

SEQ ID NO: 4424567 - DNA, 25 bp, Homo sapien
gcccactaaagctaaggttctctta

SEQ ID NO: 4424568 - DNA, 25 bp, Homo sapien
tgtgcccactaaagctaaggttctc

SEQ ID NO: 4424569 - DNA, 25 bp, Homo sapien
gtgcccactaaagctaaggttctct

SEQ ID NO: 4424570 - DNA, 25 bp, Homo sapien
ggtttacagtcatatcaaaagacac

SEQ ID NO: 4424571 - DNA, 25 bp, Homo sapien
cgtgccagaggacctgttttgtccc

SEQ ID NO: 4424572 - DNA, 25 bp, Homo sapien
aagacactggtatcccagaagcggg

SEQ ID NO: 4424573 - DNA, 25 bp, Homo sapien
gctttcccatgctgaacgtgccaga

SEQ ID NO: 4424574 - DNA, 25 bp, Homo sapien
tctccctattagtgctgtcattcgt

SEQ ID NO: 4424575 - DNA, 25 bp, Homo sapien
cactgtatcactcacaggtagtgtg

SEQ ID NO: 4424576 - DNA, 25 bp, Homo sapien
gttttattccatagggcaaccacta

SEQ ID NO: 4424577 - DNA, 25 bp, Homo sapien
gcctaatcaaatagattggtgctac

SEQ ID NO: 4424578 - DNA, 25 bp, Homo sapien
gaatttaatccatatccctagtcta

SEQ ID NO: 4424579 - DNA, 25 bp, Homo sapien
cagaagggtcaaggtaacagaaaat

SEQ ID NO: 4424580 - DNA, 25 bp, Homo sapien
agaacctaagatggcacccaatgac

SEQ ID NO: 4424581 - DNA, 25 bp, Homo sapien
gaactgaccagtccttgtcagaagg

SEQ ID NO: 4424582 - DNA, 25 bp, Homo sapien
tagttgtccaattctccatgatgtg

SEQ ID NO: 4424583 - DNA, 25 bp, Homo sapien
taaatgctcatagagatagttgtcc

SEQ ID NO: 4424584 - DNA, 25 bp, Homo sapien
cgtaacagggtaactatgaaagtca

SEQ ID NO: 4424585 - DNA, 25 bp, Homo sapien
taaaacaaactgatagcgtaacagg

SEQ ID NO: 4424586 - DNA, 25 bp, Homo sapien
tgcctctggcttcacggaagtcacc

SEQ ID NO: 4424587 - DNA, 25 bp, Homo sapien
agcacagcagtgtcggctccagcaa

SEQ ID NO: 4424588 - DNA, 25 bp, Homo sapien
tgcagcacagcagtgtcggctccag

SEQ ID NO: 4424589 - DNA, 25 bp, Homo sapien
ctggcttcacggaagtcacctgctg

SEQ ID NO: 4424590 - DNA, 25 bp, Homo sapien
ttttgagtcttggtctccctctgtt

SEQ ID NO: 4424591 - DNA, 25 bp, Homo sapien
catggctcacttcagtttggaactc

SEQ ID NO: 4424592 - DNA, 25 bp, Homo sapien
atggctcacttcagtttggaactcc

SEQ ID NO: 4424593 - DNA, 25 bp, Homo sapien
tgagtcttggtctccctctgtttcc

SEQ ID NO: 4424594 - DNA, 25 bp, Homo sapien
catgatgatgcccatttggtgactt

SEQ ID NO: 4424595 - DNA, 25 bp, Homo sapien
tgctgatataattctggtattcaac

SEQ ID NO: 4424596 - DNA, 25 bp, Homo sapien
tggtgactttgggattgctgatata

SEQ ID NO: 4424597 - DNA, 25 bp, Homo sapien
gatataattctggtattcaacagaa

SEQ ID NO: 4424598 - DNA, 25 bp, Homo sapien
aacagctcccactgcggtgggagcc

SEQ ID NO: 4424599 - DNA, 25 bp, Homo sapien
cctatggggcccttagcattggcct

SEQ ID NO: 4424600 - DNA, 25 bp, Homo sapien
gcccttagcattggcctctgcattg

SEQ ID NO: 4424601 - DNA, 25 bp, Homo sapien
tcccactgcggtgggagccctatgg

SEQ ID NO: 4424602 - DNA, 25 bp, Homo sapien
taaggcaaccagaatacccctgaac

SEQ ID NO: 4424603 - DNA, 25 bp, Homo sapien
agctgggtaaggcaaccagaatacc

SEQ ID NO: 4424604 - DNA, 25 bp, Homo sapien
ggcaaccagaatacccctgaactgc

SEQ ID NO: 4424605 - DNA, 25 bp, Homo sapien
ggtaaggcaaccagaatacccctga

SEQ ID NO: 4424606 - DNA, 25 bp, Homo sapien
ccaactagctgatcccatgataggg

SEQ ID NO: 4424607 - DNA, 25 bp, Homo sapien
aaggcttaaccatcctggccactgg

SEQ ID NO: 4424608 - DNA, 25 bp, Homo sapien
gagttcctgaaaccatcggtctggt

SEQ ID NO: 4424609 - DNA, 25 bp, Homo sapien
tacaacgcagctataaagaagaacc

SEQ ID NO: 4424610 - DNA, 25 bp, Homo sapien
tttgatgctggtttctctttgagag

SEQ ID NO: 4424611 - DNA, 25 bp, Homo sapien
tgagttaataggtacagtacaccag

SEQ ID NO: 4424612 - DNA, 25 bp, Homo sapien
catcaggggactgtgtgatgccatg

SEQ ID NO: 4424613 - DNA, 25 bp, Homo sapien
ctagtgaaccttctacactatgata

SEQ ID NO: 4424614 - DNA, 25 bp, Homo sapien
gatgttatagcatcaggggactgtg

SEQ ID NO: 4424615 - DNA, 25 bp, Homo sapien
gatattgtctatgctgcagcttttg

SEQ ID NO: 4424616 - DNA, 25 bp, Homo sapien
ctaacttcgtggatgtccttgggag

SEQ ID NO: 4424617 - DNA, 25 bp, Homo sapien
gtgctctcccgtaaagtggtgtggc

SEQ ID NO: 4424618 - DNA, 25 bp, Homo sapien
ccctggtgctctcccgtaaagtggt

SEQ ID NO: 4424619 - DNA, 25 bp, Homo sapien
ggcttagtaagctttgtggacattg

SEQ ID NO: 4424620 - DNA, 25 bp, Homo sapien
gagctatgaagctggtacggagaat

SEQ ID NO: 4424621 - DNA, 25 bp, Homo sapien
cagctgtatctcttactccacatct

SEQ ID NO: 4424622 - DNA, 25 bp, Homo sapien
gctgtatctcttactccacatctcc

SEQ ID NO: 4424623 - DNA, 25 bp, Homo sapien
gagactattcgaagttgctttccaa

SEQ ID NO: 4424624 - DNA, 25 bp, Homo sapien
agttgctttccaaatccaattcttc

SEQ ID NO: 4424625 - DNA, 25 bp, Homo sapien
taagcagagactattcgaagttgct

SEQ ID NO: 4424626 - DNA, 25 bp, Homo sapien
gcagagactattcgaagttgctttc

SEQ ID NO: 4424627 - DNA, 25 bp, Homo sapien
tgtgatgaggtatcctggatgagat

SEQ ID NO: 4424628 - DNA, 25 bp, Homo sapien
gtgatgaggtatcctggatgagatt

SEQ ID NO: 4424629 - DNA, 25 bp, Homo sapien
ctgtgatgaggtatcctggatgaga

SEQ ID NO: 4424630 - DNA, 25 bp, Homo sapien
aggttgagagggaaggatccttaag

SEQ ID NO: 4424631 - DNA, 25 bp, Homo sapien
ttgagagggaaggatccttaagcac

SEQ ID NO: 4424632 - DNA, 25 bp, Homo sapien
gttgagagggaaggatccttaagca

SEQ ID NO: 4424633 - DNA, 25 bp, Homo sapien
ggttgagagggaaggatccttaagc

SEQ ID NO: 4424634 - DNA, 25 bp, Homo sapien
tgttgagtttgtactcttggtacga

SEQ ID NO: 4424635 - DNA, 25 bp, Homo sapien
catgtttatggtgaaggtttaaagg

SEQ ID NO: 4424636 - DNA, 25 bp, Homo sapien
cagtttgtacccttgttgagtttgt

SEQ ID NO: 4424637 - DNA, 25 bp, Homo sapien
ctctggttgacagtttgtacccttg

SEQ ID NO: 4424638 - DNA, 25 bp, Homo sapien
catctggaagtcatgtcttccgaaa

SEQ ID NO: 4424639 - DNA, 25 bp, Homo sapien
ccttcctgaaggagtggcacctggg

SEQ ID NO: 4424640 - DNA, 25 bp, Homo sapien
ttagtgggatcctgaatacactctg

SEQ ID NO: 4424641 - DNA, 25 bp, Homo sapien
tgagtccttggagcttgatggtacc

SEQ ID NO: 4424642 - DNA, 25 bp, Homo sapien
gttccctgtcactgaaatttcttat

SEQ ID NO: 4424643 - DNA, 25 bp, Homo sapien
ctgttccctgtcactgaaatttctt

SEQ ID NO: 4424644 - DNA, 25 bp, Homo sapien
tgttccctgtcactgaaatttctta

SEQ ID NO: 4424645 - DNA, 25 bp, Homo sapien
tctgttccctgtcactgaaatttct

SEQ ID NO: 4424646 - DNA, 25 bp, Homo sapien
aatataattccaccatgtgagtatc

SEQ ID NO: 4424647 - DNA, 25 bp, Homo sapien
tataattccaccatgtgagtatcaa

SEQ ID NO: 4424648 - DNA, 25 bp, Homo sapien
tgagtatcaacagagtgcacagtcc

SEQ ID NO: 4424649 - DNA, 25 bp, Homo sapien
atgtgagtatcaacagagtgcacag

SEQ ID NO: 4424650 - DNA, 25 bp, Homo sapien
caacaacattggctgttgtcaaaga

SEQ ID NO: 4424651 - DNA, 25 bp, Homo sapien
gactgcctaagattcacaaggacgt

SEQ ID NO: 4424652 - DNA, 25 bp, Homo sapien
ttcacaggatcatctacagcagggc

SEQ ID NO: 4424653 - DNA, 25 bp, Homo sapien
ggacgtagagatttcagagtcaatg

SEQ ID NO: 4424654 - DNA, 25 bp, Homo sapien
ggagaaatatcacaacgtaaaatct

SEQ ID NO: 4424655 - DNA, 25 bp, Homo sapien
tcatttttgaacaaactcagccttt

SEQ ID NO: 4424656 - DNA, 25 bp, Homo sapien
cattggtaagcaagcagaatcattt

SEQ ID NO: 4424657 - DNA, 25 bp, Homo sapien
tctaaagtcttaaggtgtcattggt

SEQ ID NO: 4424658 - DNA, 25 bp, Homo sapien
caggtggtggtacagtaatgataga

SEQ ID NO: 4424659 - DNA, 25 bp, Homo sapien
caacgagatccatacaggtggtggt

SEQ ID NO: 4424660 - DNA, 25 bp, Homo sapien
tctgtgagtgtgatgcacattgttc

SEQ ID NO: 4424661 - DNA, 25 bp, Homo sapien
tcagtttcatatgggcaacgagatc

SEQ ID NO: 4424662 - DNA, 25 bp, Homo sapien
tactcatagtttctccgggtcagga

SEQ ID NO: 4424663 - DNA, 25 bp, Homo sapien
tagatgatggcctgagctgaaggat

SEQ ID NO: 4424664 - DNA, 25 bp, Homo sapien
gaagacttcgacagtgaattattcc

SEQ ID NO: 4424665 - DNA, 25 bp, Homo sapien
gactgctcagctcaagaagacttcg

SEQ ID NO: 4424666 - DNA, 25 bp, Homo sapien
tgtttattgaagcatagcctattac

SEQ ID NO: 4424667 - DNA, 25 bp, Homo sapien
cacttagggtcttcaatgctgagaa

SEQ ID NO: 4424668 - DNA, 25 bp, Homo sapien
tggcctatgagtcctctggcatgcc

SEQ ID NO: 4424669 - DNA, 25 bp, Homo sapien
tgctgagaactgtgtttggcctatg

SEQ ID NO: 4424670 - DNA, 25 bp, Homo sapien
tggcatgcctgctcgatttctgtcc

SEQ ID NO: 4424671 - DNA, 25 bp, Homo sapien
caggaaccaccataatctactgagt

SEQ ID NO: 4424672 - DNA, 25 bp, Homo sapien
tcctctggatgtgggtgctttgatc

SEQ ID NO: 4424673 - DNA, 25 bp, Homo sapien
atcccagggattcaccattaaatgt

SEQ ID NO: 4424674 - DNA, 25 bp, Homo sapien
tgtgatatatgagaagaatttactt

SEQ ID NO: 4424675 - DNA, 25 bp, Homo sapien
taggtgaaagtggtatattcctggc

SEQ ID NO: 4424676 - DNA, 25 bp, Homo sapien
taatgacttcttcgacatctggtaa

SEQ ID NO: 4424677 - DNA, 25 bp, Homo sapien
atagctaccgtgatttcagaacagg

SEQ ID NO: 4424678 - DNA, 25 bp, Homo sapien
tacgattagtgtctgggcctatggt

SEQ ID NO: 4424679 - DNA, 25 bp, Homo sapien
tgctagaatacctgcaatcagttct

SEQ ID NO: 4424680 - DNA, 25 bp, Homo sapien
ttccattgggtcgggccttgggtca

SEQ ID NO: 4424681 - DNA, 25 bp, Homo sapien
gattttctgataccgagtgtctgac

SEQ ID NO: 4424682 - DNA, 25 bp, Homo sapien
tgctttgcagagagtaattgacctg

SEQ ID NO: 4424683 - DNA, 25 bp, Homo sapien
ccaagcttatagtggttgttaggag

SEQ ID NO: 4424684 - DNA, 25 bp, Homo sapien
gggagggatcatcttccaagcttat

SEQ ID NO: 4424685 - DNA, 25 bp, Homo sapien
gttgttaggagtcaattgttgccca

SEQ ID NO: 4424686 - DNA, 25 bp, Homo sapien
gaagacctcagtggtaactttctct

SEQ ID NO: 4424687 - DNA, 25 bp, Homo sapien
gaacaatgatacctaaaaattacag

SEQ ID NO: 4424688 - DNA, 25 bp, Homo sapien
caaatatggtgagataattagtcta

SEQ ID NO: 4424689 - DNA, 25 bp, Homo sapien
cagaaaaatctgtagcaggagaatt

SEQ ID NO: 4424690 - DNA, 25 bp, Homo sapien
tagcaaactatgacctcaaacagct

SEQ ID NO: 4424691 - DNA, 25 bp, Homo sapien
ctgtatccgtgaccaagggctttgt

SEQ ID NO: 4424692 - DNA, 25 bp, Homo sapien
tatccgtgaccaagggctttgtgag

SEQ ID NO: 4424693 - DNA, 25 bp, Homo sapien
tccgtgaccaagggctttgtgagag

SEQ ID NO: 4424694 - DNA, 25 bp, Homo sapien
tgtatccgtgaccaagggctttgtg

SEQ ID NO: 4424695 - DNA, 25 bp, Homo sapien
ggttacaggctatagataaatttaa

SEQ ID NO: 4424696 - DNA, 25 bp, Homo sapien
tggggttacaggctatagataaatt

SEQ ID NO: 4424697 - DNA, 25 bp, Homo sapien
ggggtggggttacaggctatagata

SEQ ID NO: 4424698 - DNA, 25 bp, Homo sapien
ggtggggttacaggctatagataaa

SEQ ID NO: 4424699 - DNA, 25 bp, Homo sapien
aaactgatagcagtgattgcagaaa

SEQ ID NO: 4424700 - DNA, 25 bp, Homo sapien
gagtttagtcaatctacattcaacg

SEQ ID NO: 4424701 - DNA, 25 bp, Homo sapien
tcaacgttattgacaagtaaagact

SEQ ID NO: 4424702 - DNA, 25 bp, Homo sapien
ttaaactgatagcagtgattgcaga

SEQ ID NO: 4424703 - DNA, 25 bp, Homo sapien
gagaacaacactgagcccacaatat

SEQ ID NO: 4424704 - DNA, 25 bp, Homo sapien
ctgaatgcccaatctggctgtagca

SEQ ID NO: 4424705 - DNA, 25 bp, Homo sapien
gaaacagacacttaccctggacata

SEQ ID NO: 4424706 - DNA, 25 bp, Homo sapien
gaatgccttatccactgtcgtagta

SEQ ID NO: 4424707 - DNA, 25 bp, Homo sapien
gaggatgataagatatctatggctc

SEQ ID NO: 4424708 - DNA, 25 bp, Homo sapien
tcaagccacagaggatgataagata

SEQ ID NO: 4424709 - DNA, 25 bp, Homo sapien
cagaggatgataagatatctatggc

SEQ ID NO: 4424710 - DNA, 25 bp, Homo sapien
gccacagaggatgataagatatcta

SEQ ID NO: 4424711 - DNA, 25 bp, Homo sapien
ttctaattgagccttgcagcccaga

SEQ ID NO: 4424712 - DNA, 25 bp, Homo sapien
ttttggtctagtttgaaggatctaa

SEQ ID NO: 4424713 - DNA, 25 bp, Homo sapien
tatgtaaagattatagtccagatcc

SEQ ID NO: 4424714 - DNA, 25 bp, Homo sapien
tgttcttctaattgagccttgcagc

SEQ ID NO: 4424715 - DNA, 25 bp, Homo sapien
aaactgactggctctacgcctgcga

SEQ ID NO: 4424716 - DNA, 25 bp, Homo sapien
tcctctggcgaccaagcacaaactg

SEQ ID NO: 4424717 - DNA, 25 bp, Homo sapien
agggtcagcagtggactcaactctc

SEQ ID NO: 4424718 - DNA, 25 bp, Homo sapien
tagccgtgcctcctaccgtaaaaca

SEQ ID NO: 4424719 - DNA, 25 bp, Homo sapien
ggcgcggggtgggtacagagtgagc

SEQ ID NO: 4424720 - DNA, 25 bp, Homo sapien
cgcggggtgggtacagagtgagccc

SEQ ID NO: 4424721 - DNA, 25 bp, Homo sapien
ctgcgacgggcgttccggcggaaca

SEQ ID NO: 4424722 - DNA, 25 bp, Homo sapien
cggaacaggccgcggaaagggcgcg

SEQ ID NO: 4424723 - DNA, 25 bp, Homo sapien
taggggcgacgaagatgctggctgc

SEQ ID NO: 4424724 - DNA, 25 bp, Homo sapien
cacggcctcttaggggcgacgaaga

SEQ ID NO: 4424725 - DNA, 25 bp, Homo sapien
cctcttaggggcgacgaagatgctg

SEQ ID NO: 4424726 - DNA, 25 bp, Homo sapien
aggacacggcctcttaggggcgacg

SEQ ID NO: 4424727 - DNA, 25 bp, Homo sapien
gctgggaggagggatccttacggaa

SEQ ID NO: 4424728 - DNA, 25 bp, Homo sapien
ggctgggaggagggatccttacgga

SEQ ID NO: 4424729 - DNA, 25 bp, Homo sapien
gatccttacggaactggggtgtcca

SEQ ID NO: 4424730 - DNA, 25 bp, Homo sapien
caaatacaggaatgttgctagcccc

SEQ ID NO: 4424731 - DNA, 25 bp, Homo sapien
taaaccaggaatgtaggcggcagca

SEQ ID NO: 4424732 - DNA, 25 bp, Homo sapien
tagactgatgtctttcccgggtgcc

SEQ ID NO: 4424733 - DNA, 25 bp, Homo sapien
ggatcaggctttccaagatgccggg

SEQ ID NO: 4424734 - DNA, 25 bp, Homo sapien
aaagtacaaccagtcacagccgttg

SEQ ID NO: 4424735 - DNA, 25 bp, Homo sapien
tgcatggtttgtgctttgtccaggt

SEQ ID NO: 4424736 - DNA, 25 bp, Homo sapien
gccgttgtgttgctgtccctcattg

SEQ ID NO: 4424737 - DNA, 25 bp, Homo sapien
tgctttgctgatacatgggcacatg

SEQ ID NO: 4424738 - DNA, 25 bp, Homo sapien
tcagtcaagtaaacaatactatttg

SEQ ID NO: 4424739 - DNA, 25 bp, Homo sapien
gggattcagtcaagtaaacaatact

SEQ ID NO: 4424740 - DNA, 25 bp, Homo sapien
ttaccactcccaaaccagtggagga

SEQ ID NO: 4424741 - DNA, 25 bp, Homo sapien
gtcttaccactcccaaaccagtgga

SEQ ID NO: 4424742 - DNA, 25 bp, Homo sapien
ctgtccttggcggacattgtctgga

SEQ ID NO: 4424743 - DNA, 25 bp, Homo sapien
tggccctgtccttggcggacattgt

SEQ ID NO: 4424744 - DNA, 25 bp, Homo sapien
tgtggccctgtccttggcggacatt

SEQ ID NO: 4424745 - DNA, 25 bp, Homo sapien
ccttggcggacattgtctggagaag

SEQ ID NO: 4424746 - DNA, 25 bp, Homo sapien
tgtacaactgagccaaccgtcccat

SEQ ID NO: 4424747 - DNA, 25 bp, Homo sapien
gtgtacaactgagccaaccgtccca

SEQ ID NO: 4424748 - DNA, 25 bp, Homo sapien
ctgagccatttgcagctcataggca

SEQ ID NO: 4424749 - DNA, 25 bp, Homo sapien
gccatttgcagctcataggcatcat

SEQ ID NO: 4424750 - DNA, 25 bp, Homo sapien
gagccatttgcagctcataggcatc

SEQ ID NO: 4424751 - DNA, 25 bp, Homo sapien
agccatttgcagctcataggcatca

SEQ ID NO: 4424752 - DNA, 25 bp, Homo sapien
gacaccacaggggaatctgtttcac

SEQ ID NO: 4424753 - DNA, 25 bp, Homo sapien
catttacataccactggcaagcagt

SEQ ID NO: 4424754 - DNA, 25 bp, Homo sapien
atagcatttacataccactggcaag

SEQ ID NO: 4424755 - DNA, 25 bp, Homo sapien
tagcatttacataccactggcaagc

SEQ ID NO: 4424756 - DNA, 25 bp, Homo sapien
gagccgtaggcacattgttccagga

SEQ ID NO: 4424757 - DNA, 25 bp, Homo sapien
tgtatttgcccatcagagccgtagg

SEQ ID NO: 4424758 - DNA, 25 bp, Homo sapien
ttccaggaattcgactcatgatacc

SEQ ID NO: 4424759 - DNA, 25 bp, Homo sapien
tttgtatttgcccatcagagccgta

SEQ ID NO: 4424760 - DNA, 25 bp, Homo sapien
ctattgtaagcacgggtctcccttt

SEQ ID NO: 4424761 - DNA, 25 bp, Homo sapien
tggtgcctgtcccctgagttcccag

SEQ ID NO: 4424762 - DNA, 25 bp, Homo sapien
gtgcctgtcccctgagttcccaggg

SEQ ID NO: 4424763 - DNA, 25 bp, Homo sapien
ggtgcctgtcccctgagttcccagg

SEQ ID NO: 4424764 - DNA, 25 bp, Homo sapien
ctcctcctcctggaggcgtcccttg

SEQ ID NO: 4424765 - DNA, 25 bp, Homo sapien
cctcctggaggcgtcccttgtccat

SEQ ID NO: 4424766 - DNA, 25 bp, Homo sapien
tcctcctggaggcgtcccttgtcca

SEQ ID NO: 4424767 - DNA, 25 bp, Homo sapien
cctcctcctggaggcgtcccttgtc

SEQ ID NO: 4424768 - DNA, 25 bp, Homo sapien
tagacaccacatggccataagccga

SEQ ID NO: 4424769 - DNA, 25 bp, Homo sapien
cctcgtaggcagcaatcagtttcag

SEQ ID NO: 4424770 - DNA, 25 bp, Homo sapien
tcagtttcagatgtttagacaccac

SEQ ID NO: 4424771 - DNA, 25 bp, Homo sapien
ggatcccacctatatctgcaaaatg

SEQ ID NO: 4424772 - DNA, 25 bp, Homo sapien
aagcaataggcatacagcctaggtg

SEQ ID NO: 4424773 - DNA, 25 bp, Homo sapien
tacagtaacacactgcaaaggtttg

SEQ ID NO: 4424774 - DNA, 25 bp, Homo sapien
tgtctaatactgtattcttaccttt

SEQ ID NO: 4424775 - DNA, 25 bp, Homo sapien
tataggaggatataccagctaggtc

SEQ ID NO: 4424776 - DNA, 25 bp, Homo sapien
ggtaataaacacatatcctgatagg

SEQ ID NO: 4424777 - DNA, 25 bp, Homo sapien
ctgtagataaaatttaccgataggt

SEQ ID NO: 4424778 - DNA, 25 bp, Homo sapien
tatgattctatacatagcaaacccc

SEQ ID NO: 4424779 - DNA, 25 bp, Homo sapien
gcagatgtgctttacctgtagataa

SEQ ID NO: 4424780 - DNA, 25 bp, Homo sapien
aaaggcaaacttcctatgttcttat

SEQ ID NO: 4424781 - DNA, 25 bp, Homo sapien
gatgactggttagttaccagaggct

SEQ ID NO: 4424782 - DNA, 25 bp, Homo sapien
tggatggagctaaagatagttatgt

SEQ ID NO: 4424783 - DNA, 25 bp, Homo sapien
ataatgagatcccattatttgcaac

SEQ ID NO: 4424784 - DNA, 25 bp, Homo sapien
tcagtggatggcaatactgccacag

SEQ ID NO: 4424785 - DNA, 25 bp, Homo sapien
gttcctgccccttctagtgaatgtg

SEQ ID NO: 4424786 - DNA, 25 bp, Homo sapien
aacctacgaatgctcctcttatggg

SEQ ID NO: 4424787 - DNA, 25 bp, Homo sapien
catctcgagttgagaaggaacctcc

SEQ ID NO: 4424788 - DNA, 25 bp, Homo sapien
tcgctgcgccgaacaatggcgcatt

SEQ ID NO: 4424789 - DNA, 25 bp, Homo sapien
gcactgcgggctgtttcgctgcgcc

SEQ ID NO: 4424790 - DNA, 25 bp, Homo sapien
gaacaatggcgcatttcctgccacc

SEQ ID NO: 4424791 - DNA, 25 bp, Homo sapien
cttcctacagcgcactgcgggctgt

SEQ ID NO: 4424792 - DNA, 25 bp, Homo sapien
tacgatgaacttttagacggatctc

SEQ ID NO: 4424793 - DNA, 25 bp, Homo sapien
tggcatataccagaagcaggactca

SEQ ID NO: 4424794 - DNA, 25 bp, Homo sapien
cataaagtttgtgtcgtggccagca

SEQ ID NO: 4424795 - DNA, 25 bp, Homo sapien
ccagcagtgttttgatacgatgaac

SEQ ID NO: 4424796 - DNA, 25 bp, Homo sapien
cctggttgcttgctccatcctcctc

SEQ ID NO: 4424797 - DNA, 25 bp, Homo sapien
ctctcatgggcctggttgcttgctc

SEQ ID NO: 4424798 - DNA, 25 bp, Homo sapien
ccctctcatgggcctggttgcttgc

SEQ ID NO: 4424799 - DNA, 25 bp, Homo sapien
ctcatgggcctggttgcttgctcca

SEQ ID NO: 4424800 - DNA, 25 bp, Homo sapien
tctccagaatctcttccaatgctcc

SEQ ID NO: 4424801 - DNA, 25 bp, Homo sapien
ctcctcactctccagaatctcttcc

SEQ ID NO: 4424802 - DNA, 25 bp, Homo sapien
tcactctccagaatctcttccaatg

SEQ ID NO: 4424803 - DNA, 25 bp, Homo sapien
actctccagaatctcttccaatgct

SEQ ID NO: 4424804 - DNA, 25 bp, Homo sapien
ctgtcttttctgattggatgacctc

SEQ ID NO: 4424805 - DNA, 25 bp, Homo sapien
acatgttctgactgtcttactgtct

SEQ ID NO: 4424806 - DNA, 25 bp, Homo sapien
tcttttctgattggatgacctcatg

SEQ ID NO: 4424807 - DNA, 25 bp, Homo sapien
cttttctgattggatgacctcatgg

SEQ ID NO: 4424808 - DNA, 25 bp, Homo sapien
tctcaagatcccaggagccgttctc

SEQ ID NO: 4424809 - DNA, 25 bp, Homo sapien
catggaagctttgaaccaggtagag

SEQ ID NO: 4424810 - DNA, 25 bp, Homo sapien
tgtctacgagagagcagtttgcagc

SEQ ID NO: 4424811 - DNA, 25 bp, Homo sapien
tgtaagtgctgtaggcacggctcct

SEQ ID NO: 4424812 - DNA, 25 bp, Homo sapien
tgtcatttgagatgggtccctcctt

SEQ ID NO: 4424813 - DNA, 25 bp, Homo sapien
cacttggagctcatcgactgtcttg

SEQ ID NO: 4424814 - DNA, 25 bp, Homo sapien
cagtcctctcctacagtgagcactt

SEQ ID NO: 4424815 - DNA, 25 bp, Homo sapien
tccttgtcctcatctatggcttgtt

SEQ ID NO: 4424816 - DNA, 25 bp, Homo sapien
tagagcacatagactaatgcaggtc

SEQ ID NO: 4424817 - DNA, 25 bp, Homo sapien
tagctaatgtgagcaaggactctgg

SEQ ID NO: 4424818 - DNA, 25 bp, Homo sapien
taggagaatagcttcatgaccatgg

SEQ ID NO: 4424819 - DNA, 25 bp, Homo sapien
tattgcctacctcttgggatgttgt

SEQ ID NO: 4424820 - DNA, 25 bp, Homo sapien
tcctgtggctgtgaaaaaagtctct

SEQ ID NO: 4424821 - DNA, 25 bp, Homo sapien
cctgtggctgtgaaaaaagtctctg

SEQ ID NO: 4424822 - DNA, 25 bp, Homo sapien
tgaaaggaatttgctgtcattagtg

SEQ ID NO: 4424823 - DNA, 25 bp, Homo sapien
cttgtgggaatggtcctttcactag

SEQ ID NO: 4424824 - DNA, 25 bp, Homo sapien
aaggaatttgctgtcattagtgccc

SEQ ID NO: 4424825 - DNA, 25 bp, Homo sapien
aatttgctgtcattagtgccctcca

SEQ ID NO: 4424826 - DNA, 25 bp, Homo sapien
ccttattatcctagcacttcgagag

SEQ ID NO: 4424827 - DNA, 25 bp, Homo sapien
aaactgagcaaagggccaggtgtag

SEQ ID NO: 4424828 - DNA, 25 bp, Homo sapien
ggtgaaccataattgtgccacggca

SEQ ID NO: 4424829 - DNA, 25 bp, Homo sapien
ccaggtgtagtgactcacccttatt

SEQ ID NO: 4424830 - DNA, 25 bp, Homo sapien
ctcctcactgaagctatgaatgttg

SEQ ID NO: 4424831 - DNA, 25 bp, Homo sapien
ctatgaatgttgtgtggaggatgat

SEQ ID NO: 4424832 - DNA, 25 bp, Homo sapien
ccagtctcctcactgaagctatgaa

SEQ ID NO: 4424833 - DNA, 25 bp, Homo sapien
aatgttgtgtggaggatgataatga

SEQ ID NO: 4424834 - DNA, 25 bp, Homo sapien
tctgtgagaggaacccctggtcatg

SEQ ID NO: 4424835 - DNA, 25 bp, Homo sapien
aataaaggcctcagctatgggcccc

SEQ ID NO: 4424836 - DNA, 25 bp, Homo sapien
tgcttgaataacacactggacccca

SEQ ID NO: 4424837 - DNA, 25 bp, Homo sapien
gcagttcagagccacaaggttgttt

SEQ ID NO: 4424838 - DNA, 25 bp, Homo sapien
ccacagttactgtagagaaaagcct

SEQ ID NO: 4424839 - DNA, 25 bp, Homo sapien
ccgcaaaccacacagaaggctctga

SEQ ID NO: 4424840 - DNA, 25 bp, Homo sapien
ggaaggtgtcattgatcagcgacca

SEQ ID NO: 4424841 - DNA, 25 bp, Homo sapien
cttatgcaaaaaggccgcattcctc

SEQ ID NO: 4424842 - DNA, 25 bp, Homo sapien
tccaaaaaagcaatatgaaatgtta

SEQ ID NO: 4424843 - DNA, 25 bp, Homo sapien
ctccaaaaaagcaatatgaaatgtt

SEQ ID NO: 4424844 - DNA, 25 bp, Homo sapien
ccaaaaaagcaatatgaaatgttac

SEQ ID NO: 4424845 - DNA, 25 bp, Homo sapien
caccctgtggtgtatctttcatcag

SEQ ID NO: 4424846 - DNA, 25 bp, Homo sapien
ggtgagctggccactgtgaattttc

SEQ ID NO: 4424847 - DNA, 25 bp, Homo sapien
tcaccctgtggtgtatctttcatca

SEQ ID NO: 4424848 - DNA, 25 bp, Homo sapien
cttctgtagcttgaaatctctattc

SEQ ID NO: 4424849 - DNA, 25 bp, Homo sapien
ccttctgtagcttgaaatctctatt

SEQ ID NO: 4424850 - DNA, 25 bp, Homo sapien
tataagcggctgataagacactccc

SEQ ID NO: 4424851 - DNA, 25 bp, Homo sapien
taatagagctcccttaggccgggtg

SEQ ID NO: 4424852 - DNA, 25 bp, Homo sapien
tctgagaggccccaactaaatctgg

SEQ ID NO: 4424853 - DNA, 25 bp, Homo sapien
gacaatgatacgaaacctagagagg

SEQ ID NO: 4424854 - DNA, 25 bp, Homo sapien
ctgtgctctcagctcccaaaagttt

SEQ ID NO: 4424855 - DNA, 25 bp, Homo sapien
ctcctgtttgccagattcactgctc

SEQ ID NO: 4424856 - DNA, 25 bp, Homo sapien
gtgctctcagctcccaaaagttttg

SEQ ID NO: 4424857 - DNA, 25 bp, Homo sapien
tctcagctcccaaaagttttgtaac

SEQ ID NO: 4424858 - DNA, 25 bp, Homo sapien
tctgagacgcacaaaataaccgagg

SEQ ID NO: 4424859 - DNA, 25 bp, Homo sapien
tactgttgcaaggaacgagactgat

SEQ ID NO: 4424860 - DNA, 25 bp, Homo sapien
aatgcattccttagtgggctggccg

SEQ ID NO: 4424861 - DNA, 25 bp, Homo sapien
caatacatgtcatcatctgagacgc

SEQ ID NO: 4424862 - DNA, 25 bp, Homo sapien
ccaaaggcttcagaaggagggaatc

SEQ ID NO: 4424863 - DNA, 25 bp, Homo sapien
tgggtagaaaatcccaaaggcttca

SEQ ID NO: 4424864 - DNA, 25 bp, Homo sapien
cccaaaggcttcagaaggagggaat

SEQ ID NO: 4424865 - DNA, 25 bp, Homo sapien
tagaaaatcccaaaggcttcagaag

SEQ ID NO: 4424866 - DNA, 25 bp, Homo sapien
cagtggatgtggccccgcccttggt

SEQ ID NO: 4424867 - DNA, 25 bp, Homo sapien
cgcttgcgcaagaaggatgtctgca

SEQ ID NO: 4424868 - DNA, 25 bp, Homo sapien
cattcatggtacaactgcgcttgcg

SEQ ID NO: 4424869 - DNA, 25 bp, Homo sapien
ctgcagcaggacgaccgcattcatg

SEQ ID NO: 4424870 - DNA, 25 bp, Homo sapien
tttcttatgcaaaagaactgcattc

SEQ ID NO: 4424871 - DNA, 25 bp, Homo sapien
ttaagtgttcttgatcagcaagcag

SEQ ID NO: 4424872 - DNA, 25 bp, Homo sapien
taagtgttcttgatcagcaagcaga

SEQ ID NO: 4424873 - DNA, 25 bp, Homo sapien
tgagaaacgtggtctgtgcagagca

SEQ ID NO: 4424874 - DNA, 25 bp, Homo sapien
gctatccacaccaaattatccgagg

SEQ ID NO: 4424875 - DNA, 25 bp, Homo sapien
gaggatgctctactctatagctgag

SEQ ID NO: 4424876 - DNA, 25 bp, Homo sapien
tcaacccatctgcacgtagacacag

SEQ ID NO: 4424877 - DNA, 25 bp, Homo sapien
tgggagtcccaattaccttcgtcaa

SEQ ID NO: 4424878 - DNA, 25 bp, Homo sapien
gtggagacttgatgggagtcccaat

SEQ ID NO: 4424879 - DNA, 25 bp, Homo sapien
tgtggagacttgatgggagtcccaa

SEQ ID NO: 4424880 - DNA, 25 bp, Homo sapien
ttctggcaacgagaaagggacagct

SEQ ID NO: 4424881 - DNA, 25 bp, Homo sapien
tctggagtctgcaggtaggattctg

SEQ ID NO: 4424882 - DNA, 25 bp, Homo sapien
tgaagactcatgttacataaaacat

SEQ ID NO: 4424883 - DNA, 25 bp, Homo sapien
gtaaatcaacttgcatgattttctc

SEQ ID NO: 4424884 - DNA, 25 bp, Homo sapien
cccactggaaggaacgaattgcaga

SEQ ID NO: 4424885 - DNA, 25 bp, Homo sapien
ttcttcctctagatagcattccctg

SEQ ID NO: 4424886 - DNA, 25 bp, Homo sapien
cagatgcctcaagtacaggaagaaa

SEQ ID NO: 4424887 - DNA, 25 bp, Homo sapien
tccccagtagaatgcatagcctaaa

SEQ ID NO: 4424888 - DNA, 25 bp, Homo sapien
tgttgagctgtggacgcgggtctct

SEQ ID NO: 4424889 - DNA, 25 bp, Homo sapien
tctgttgagctgtggacgcgggtct

SEQ ID NO: 4424890 - DNA, 25 bp, Homo sapien
tttcaagtgtaagtcgaaagtcgca

SEQ ID NO: 4424891 - DNA, 25 bp, Homo sapien
taatcccgagacaatggctctccag

SEQ ID NO: 4424892 - DNA, 25 bp, Homo sapien
tcgaaagtcgcatgtaaatatcatc

SEQ ID NO: 4424893 - DNA, 25 bp, Homo sapien
cagatataggtgatgctcaaggtac

SEQ ID NO: 4424894 - DNA, 25 bp, Homo sapien
agaatatgtccattccatcttagta

SEQ ID NO: 4424895 - DNA, 25 bp, Homo sapien
gtccattccatcttagtaactccaa

SEQ ID NO: 4424896 - DNA, 25 bp, Homo sapien
tgtccattccatcttagtaactcca

SEQ ID NO: 4424897 - DNA, 25 bp, Homo sapien
ccacaagaatatgtccattccatct

SEQ ID NO: 4424898 - DNA, 25 bp, Homo sapien
cttatttgtcgtgtttctggaggat

SEQ ID NO: 4424899 - DNA, 25 bp, Homo sapien
tccaagatcaaagcagcagaaggag

SEQ ID NO: 4424900 - DNA, 25 bp, Homo sapien
aggaggtctaaacggggctgctgtc

SEQ ID NO: 4424901 - DNA, 25 bp, Homo sapien
tgctgtctgtttccaagatgatgtc

SEQ ID NO: 4424902 - DNA, 25 bp, Homo sapien
tgttcagggaatgttgccttctgag

SEQ ID NO: 4424903 - DNA, 25 bp, Homo sapien
attctggtggaagagtatgttcagg

SEQ ID NO: 4424904 - DNA, 25 bp, Homo sapien
gccactggtaaaaggggcagcaaaa

SEQ ID NO: 4424905 - DNA, 25 bp, Homo sapien
caaaaatctgtagaggagattctgg

SEQ ID NO: 4424906 - DNA, 25 bp, Homo sapien
ctctctcaacgtgtgttcctcagac

SEQ ID NO: 4424907 - DNA, 25 bp, Homo sapien
cttgttcgaaatgcagattcttctg

SEQ ID NO: 4424908 - DNA, 25 bp, Homo sapien
tcaacgtgtgttcctcagaccagtc

SEQ ID NO: 4424909 - DNA, 25 bp, Homo sapien
ccagtcctggcacttgttcgaaatg

SEQ ID NO: 4424910 - DNA, 25 bp, Homo sapien
tcttctttaaccatggctacatctg

SEQ ID NO: 4424911 - DNA, 25 bp, Homo sapien
tgcttaatgtcaatcttctttaacc

SEQ ID NO: 4424912 - DNA, 25 bp, Homo sapien
cttctttaaccatggctacatctga

SEQ ID NO: 4424913 - DNA, 25 bp, Homo sapien
aatcttctttaaccatggctacatc

SEQ ID NO: 4424914 - DNA, 25 bp, Homo sapien
gtacgcttctccacaatagaaatca

SEQ ID NO: 4424915 - DNA, 25 bp, Homo sapien
ttctaagtacgcttctccacaatag

SEQ ID NO: 4424916 - DNA, 25 bp, Homo sapien
ttggtttctaagtacgcttctccac

SEQ ID NO: 4424917 - DNA, 25 bp, Homo sapien
agtagcaccaagaccttggtttcta

SEQ ID NO: 4424918 - DNA, 25 bp, Homo sapien
ggagactgcagtaagctgtgatggc

SEQ ID NO: 4424919 - DNA, 25 bp, Homo sapien
cactccgcctgggtgatggagcaaa

SEQ ID NO: 4424920 - DNA, 25 bp, Homo sapien
gcctgagaggtggagactgcagtaa

SEQ ID NO: 4424921 - DNA, 25 bp, Homo sapien
gcactccgcctgggtgatggagcaa

SEQ ID NO: 4424922 - DNA, 25 bp, Homo sapien
tccactctgcgccagactcgctgca

SEQ ID NO: 4424923 - DNA, 25 bp, Homo sapien
agatgcgtcaggcatctccggcggc

SEQ ID NO: 4424924 - DNA, 25 bp, Homo sapien
tctgcgccagactcgctgcagcagc

SEQ ID NO: 4424925 - DNA, 25 bp, Homo sapien
agcagcggcaggcttcgcacacatc

SEQ ID NO: 4424926 - DNA, 25 bp, Homo sapien
ctgcaccctaaagagggtacggctg

SEQ ID NO: 4424927 - DNA, 25 bp, Homo sapien
gcaccctaaagagggtacggctgaa

SEQ ID NO: 4424928 - DNA, 25 bp, Homo sapien
tgcaccctaaagagggtacggctga

SEQ ID NO: 4424929 - DNA, 25 bp, Homo sapien
cgccacaaccggaaaggaacagctg

SEQ ID NO: 4424930 - DNA, 25 bp, Homo sapien
actgcgccacaaccggaaaggaaca

SEQ ID NO: 4424931 - DNA, 25 bp, Homo sapien
ggaacagctgctgtatcagccaggt

SEQ ID NO: 4424932 - DNA, 25 bp, Homo sapien
ctctactgcgccacaaccggaaagg

SEQ ID NO: 4424933 - DNA, 25 bp, Homo sapien
aaggttaatgataggctgctaatct

SEQ ID NO: 4424934 - DNA, 25 bp, Homo sapien
atataagaaacctcattgcctccaa

SEQ ID NO: 4424935 - DNA, 25 bp, Homo sapien
aggctgctaatctgtaccccatgaa

SEQ ID NO: 4424936 - DNA, 25 bp, Homo sapien
taatgataggctgctaatctgtacc

SEQ ID NO: 4424937 - DNA, 25 bp, Homo sapien
gagtctagattgatccaggagtttg

SEQ ID NO: 4424938 - DNA, 25 bp, Homo sapien
tcaagcctgtactaacaggcacttg

SEQ ID NO: 4424939 - DNA, 25 bp, Homo sapien
tgaggcaggagtctagattgatcca

SEQ ID NO: 4424940 - DNA, 25 bp, Homo sapien
caggagtctagattgatccaggagt

SEQ ID NO: 4424941 - DNA, 25 bp, Homo sapien
cactgaaagtaataatccggaaata

SEQ ID NO: 4424942 - DNA, 25 bp, Homo sapien
tcacttacactgaaagtaataatcc

SEQ ID NO: 4424943 - DNA, 25 bp, Homo sapien
gcaaaaagcaatggaatcccaattt

SEQ ID NO: 4424944 - DNA, 25 bp, Homo sapien
gtaataatccggaaatatattgaaa

SEQ ID NO: 4424945 - DNA, 25 bp, Homo sapien
tctcaatacccaagcttgaactccc

SEQ ID NO: 4424946 - DNA, 25 bp, Homo sapien
acttccacctctggtacgtgctgtt

SEQ ID NO: 4424947 - DNA, 25 bp, Homo sapien
tctgcgtttgacttggacttccacc

SEQ ID NO: 4424948 - DNA, 25 bp, Homo sapien
ctgtagttcgtctcaggtgtaagcg

SEQ ID NO: 4424949 - DNA, 25 bp, Homo sapien
ggttgctcagtgaggcagtccttct

SEQ ID NO: 4424950 - DNA, 25 bp, Homo sapien
acttcagcgcacagtacattttgca

SEQ ID NO: 4424951 - DNA, 25 bp, Homo sapien
gagattctgacttgcatttgttccc

SEQ ID NO: 4424952 - DNA, 25 bp, Homo sapien
taaaatgcacttacccacgtatagg

SEQ ID NO: 4424953 - DNA, 25 bp, Homo sapien
tgccaaagtttcaatgtggactaaa

SEQ ID NO: 4424954 - DNA, 25 bp, Homo sapien
ggacaaggtctgatggctatttact

SEQ ID NO: 4424955 - DNA, 25 bp, Homo sapien
tattgtcaaaatacagacagcacgg

SEQ ID NO: 4424956 - DNA, 25 bp, Homo sapien
cacggtgtcgtatgcacacaaactt

SEQ ID NO: 4424957 - DNA, 25 bp, Homo sapien
ggtagatttatgtgtactgatatga

SEQ ID NO: 4424958 - DNA, 25 bp, Homo sapien
tctctgaactacctctagaaactca

SEQ ID NO: 4424959 - DNA, 25 bp, Homo sapien
aacgtcagagctgcaaaagaatgaa

SEQ ID NO: 4424960 - DNA, 25 bp, Homo sapien
aaatgaatgatcgaataacctatta

SEQ ID NO: 4424961 - DNA, 25 bp, Homo sapien
gaatgatcgaataacctattatata

SEQ ID NO: 4424962 - DNA, 25 bp, Homo sapien
tatagcaagatagaaccttcaccca

SEQ ID NO: 4424963 - DNA, 25 bp, Homo sapien
cacttaacagtcctaaacctaagag

SEQ ID NO: 4424964 - DNA, 25 bp, Homo sapien
tagcaagatagaaccttcacccact

SEQ ID NO: 4424965 - DNA, 25 bp, Homo sapien
taagagtcctaaacctcagccctac

SEQ ID NO: 4424966 - DNA, 25 bp, Homo sapien
ggttttgagcaagccctcctgggag

SEQ ID NO: 4424967 - DNA, 25 bp, Homo sapien
gaagatttgtgtgggacctgcccag

SEQ ID NO: 4424968 - DNA, 25 bp, Homo sapien
tcaagatggtgactaaccaggccac

SEQ ID NO: 4424969 - DNA, 25 bp, Homo sapien
tctggagggcatctagacaactgtg

SEQ ID NO: 4424970 - DNA, 25 bp, Homo sapien
gatgtttaggccgtccttcatattg

SEQ ID NO: 4424971 - DNA, 25 bp, Homo sapien
caaattatcctgtgtgaacaatcct

SEQ ID NO: 4424972 - DNA, 25 bp, Homo sapien
cttcatattgatcctcctgacaagt

SEQ ID NO: 4424973 - DNA, 25 bp, Homo sapien
gggagatgctgctaaagcatttgca

SEQ ID NO: 4424974 - DNA, 25 bp, Homo sapien
tacaagggactagtggatacttaag

SEQ ID NO: 4424975 - DNA, 25 bp, Homo sapien
cagaggatgacactatcttatgaga

SEQ ID NO: 4424976 - DNA, 25 bp, Homo sapien
tctacacagagattgtacaagggac

SEQ ID NO: 4424977 - DNA, 25 bp, Homo sapien
ggcagccttgaagaaacaccatcag

SEQ ID NO: 4424978 - DNA, 25 bp, Homo sapien
tacaacaagagcacaatatatataa

SEQ ID NO: 4424979 - DNA, 25 bp, Homo sapien
tataaatgataaaaatacatttgtc

SEQ ID NO: 4424980 - DNA, 25 bp, Homo sapien
tatataaatgataaaaatacatttg

SEQ ID NO: 4424981 - DNA, 25 bp, Homo sapien
aatgataaaaatacatttgtcttta

SEQ ID NO: 4424982 - DNA, 25 bp, Homo sapien
tgctgagaacgcctcgggtacaact

SEQ ID NO: 4424983 - DNA, 25 bp, Homo sapien
ctgctgagaacgcctcgggtacaac

SEQ ID NO: 4424984 - DNA, 25 bp, Homo sapien
ctgagaacgcctcgggtacaactga

SEQ ID NO: 4424985 - DNA, 25 bp, Homo sapien
agaacgcctcgggtacaactgacac

SEQ ID NO: 4424986 - DNA, 25 bp, Homo sapien
tggtgtctcagctaagaatgcctgc

SEQ ID NO: 4424987 - DNA, 25 bp, Homo sapien
tcttggtgtctcagctaagaatgcc

SEQ ID NO: 4424988 - DNA, 25 bp, Homo sapien
ctcttggtgtctcagctaagaatgc

SEQ ID NO: 4424989 - DNA, 25 bp, Homo sapien
cttggtgtctcagctaagaatgcct

SEQ ID NO: 4424990 - DNA, 25 bp, Homo sapien
gattcctcgctactccaatatggct

SEQ ID NO: 4424991 - DNA, 25 bp, Homo sapien
gaatcagattcctcgctactccaat

SEQ ID NO: 4424992 - DNA, 25 bp, Homo sapien
tgcttggaatcagattcctcgctac

SEQ ID NO: 4424993 - DNA, 25 bp, Homo sapien
ggtttttgcttggaatcagattcct

SEQ ID NO: 4424994 - DNA, 25 bp, Homo sapien
tattgtatgaagctctaaggaaaaa

SEQ ID NO: 4424995 - DNA, 25 bp, Homo sapien
cagaaacatgacgaaagtgtcaggg

SEQ ID NO: 4424996 - DNA, 25 bp, Homo sapien
aatacagaaacatgacgaaagtgtc

SEQ ID NO: 4424997 - DNA, 25 bp, Homo sapien
aaacatgacgaaagtgtcagggcag

SEQ ID NO: 4424998 - DNA, 25 bp, Homo sapien
gtaccttaagttcatattccttgat

SEQ ID NO: 4424999 - DNA, 25 bp, Homo sapien
tcagtaacagggtattcaagagcca

SEQ ID NO: 4425000 - DNA, 25 bp, Homo sapien
tgtgaaagtatgttgtaactggccc

SEQ ID NO: 4425001 - DNA, 25 bp, Homo sapien
gctttgttcaaactactggcagaaa

SEQ ID NO: 4425002 - DNA, 25 bp, Homo sapien
gaaatgagggcattctaaaacttaa

SEQ ID NO: 4425003 - DNA, 25 bp, Homo sapien
atcaaaatcgactttgtaataactt

SEQ ID NO: 4425004 - DNA, 25 bp, Homo sapien
aatgagggcattctaaaacttaaag

SEQ ID NO: 4425005 - DNA, 25 bp, Homo sapien
aacaaatcaaaatcgactttgtaat

SEQ ID NO: 4425006 - DNA, 25 bp, Homo sapien
taaaattagatggtcctacttgcag

SEQ ID NO: 4425007 - DNA, 25 bp, Homo sapien
cattatgactatattgactggcccc

SEQ ID NO: 4425008 - DNA, 25 bp, Homo sapien
tttatagacacaggtagtggtccag

SEQ ID NO: 4425009 - DNA, 25 bp, Homo sapien
caccgtagcaccaatgtggccaaag

SEQ ID NO: 4425010 - DNA, 25 bp, Homo sapien
tttttatagcactgcaacacttggg

SEQ ID NO: 4425011 - DNA, 25 bp, Homo sapien
gcactgcaacacttgggaccttcag

SEQ ID NO: 4425012 - DNA, 25 bp, Homo sapien
cacttgggaccttcagccatccaaa

SEQ ID NO: 4425013 - DNA, 25 bp, Homo sapien
tgcaacacttgggaccttcagccat

SEQ ID NO: 4425014 - DNA, 25 bp, Homo sapien
agtatctttttgagcggagatcgca

SEQ ID NO: 4425015 - DNA, 25 bp, Homo sapien
tgaccgtaatcaagcatgcataatg

SEQ ID NO: 4425016 - DNA, 25 bp, Homo sapien
tttgtaatcttaagggactgctctg

SEQ ID NO: 4425017 - DNA, 25 bp, Homo sapien
gaattgttaatgcagctcatgaccg

SEQ ID NO: 4425018 - DNA, 25 bp, Homo sapien
gcaatatggtagatcctaggctaca

SEQ ID NO: 4425019 - DNA, 25 bp, Homo sapien
caaacctagaggatacacagagtct

SEQ ID NO: 4425020 - DNA, 25 bp, Homo sapien
cacagagtctactatactcttaggc

SEQ ID NO: 4425021 - DNA, 25 bp, Homo sapien
tcatcacagtatgaacagtgtactt

SEQ ID NO: 4425022 - DNA, 25 bp, Homo sapien
catttgacacacttaggactgatga

SEQ ID NO: 4425023 - DNA, 25 bp, Homo sapien
tgaaaatcactatgacagacacgtt

SEQ ID NO: 4425024 - DNA, 25 bp, Homo sapien
aaattcgcttcaagatgatggcagg

SEQ ID NO: 4425025 - DNA, 25 bp, Homo sapien
gagccaagtgtgttataaacctgcc

SEQ ID NO: 4425026 - DNA, 25 bp, Homo sapien
gcagaagcttcaaagagtagatgga

SEQ ID NO: 4425027 - DNA, 25 bp, Homo sapien
cagaagcttcaaagagtagatggag

SEQ ID NO: 4425028 - DNA, 25 bp, Homo sapien
agaagcttcaaagagtagatggagc

SEQ ID NO: 4425029 - DNA, 25 bp, Homo sapien
ggcagaagcttcaaagagtagatgg

SEQ ID NO: 4425030 - DNA, 25 bp, Homo sapien
ctatagataaaggtatgacgcaggt

SEQ ID NO: 4425031 - DNA, 25 bp, Homo sapien
tagataaaggtatgacgcaggttct

SEQ ID NO: 4425032 - DNA, 25 bp, Homo sapien
tatagataaaggtatgacgcaggtt

SEQ ID NO: 4425033 - DNA, 25 bp, Homo sapien
agataaaggtatgacgcaggttctc

SEQ ID NO: 4425034 - DNA, 25 bp, Homo sapien
tgtccacagttaaaacttgatgctt

SEQ ID NO: 4425035 - DNA, 25 bp, Homo sapien
caaatccaatgtccacagttaaaac

SEQ ID NO: 4425036 - DNA, 25 bp, Homo sapien
acagttaaaacttgatgcttctgaa

SEQ ID NO: 4425037 - DNA, 25 bp, Homo sapien
tccaatgtccacagttaaaacttga

SEQ ID NO: 4425038 - DNA, 25 bp, Homo sapien
cactggtggaatcatgaccaaaaac

SEQ ID NO: 4425039 - DNA, 25 bp, Homo sapien
cagtaagacaagagtcatgttcagc

SEQ ID NO: 4425040 - DNA, 25 bp, Homo sapien
gacgatgcatgctctaaactgtcca

SEQ ID NO: 4425041 - DNA, 25 bp, Homo sapien
caggtgattatccttctctgtgacg

SEQ ID NO: 4425042 - DNA, 25 bp, Homo sapien
tagtatggctctttggaggaccaca

SEQ ID NO: 4425043 - DNA, 25 bp, Homo sapien
ttgcaggatacatctcattctatag

SEQ ID NO: 4425044 - DNA, 25 bp, Homo sapien
tcttgcaggatacatctcattctat

SEQ ID NO: 4425045 - DNA, 25 bp, Homo sapien
atcttgcaggatacatctcattcta

SEQ ID NO: 4425046 - DNA, 25 bp, Homo sapien
gcaggatacatctcattctatagtc

SEQ ID NO: 4425047 - DNA, 25 bp, Homo sapien
caaagagaggataccaaatggcaac

SEQ ID NO: 4425048 - DNA, 25 bp, Homo sapien
caagatttggtctaagactgctgca

SEQ ID NO: 4425049 - DNA, 25 bp, Homo sapien
cagatgcagactctgacctaattca

SEQ ID NO: 4425050 - DNA, 25 bp, Homo sapien
tgctgcagaagccaaccaattaatt

SEQ ID NO: 4425051 - DNA, 25 bp, Homo sapien
cgctctggttgcttcgcattctttg

SEQ ID NO: 4425052 - DNA, 25 bp, Homo sapien
ggtggcccctccacagtcatggata

SEQ ID NO: 4425053 - DNA, 25 bp, Homo sapien
agcaacaccagacccaaaacccgct

SEQ ID NO: 4425054 - DNA, 25 bp, Homo sapien
aaaacccgcttttcttcacgctctg

SEQ ID NO: 4425055 - DNA, 25 bp, Homo sapien
cataatatgatgtccctgcaaatta

SEQ ID NO: 4425056 - DNA, 25 bp, Homo sapien
aatatgatgtccctgcaaattaaag

SEQ ID NO: 4425057 - DNA, 25 bp, Homo sapien
atatgatgtccctgcaaattaaagt

SEQ ID NO: 4425058 - DNA, 25 bp, Homo sapien
ctcacataatatgatgtccctgcaa

SEQ ID NO: 4425059 - DNA, 25 bp, Homo sapien
caagtggtacccgagcaatgccagt

SEQ ID NO: 4425060 - DNA, 25 bp, Homo sapien
ccagcaagtggtacccgagcaatgc

SEQ ID NO: 4425061 - DNA, 25 bp, Homo sapien
agcaagtggtacccgagcaatgcca

SEQ ID NO: 4425062 - DNA, 25 bp, Homo sapien
ctgctgggatggtcccccaactcct

SEQ ID NO: 4425063 - DNA, 25 bp, Homo sapien
cagcaatactggcagtcgcagcaac

SEQ ID NO: 4425064 - DNA, 25 bp, Homo sapien
tgttggggctccagcaatactggca

SEQ ID NO: 4425065 - DNA, 25 bp, Homo sapien
aatactggcagtcgcagcaacagca

SEQ ID NO: 4425066 - DNA, 25 bp, Homo sapien
gggctccagcaatactggcagtcgc

SEQ ID NO: 4425067 - DNA, 25 bp, Homo sapien
tcccggaggcggcatgcctattggc

SEQ ID NO: 4425068 - DNA, 25 bp, Homo sapien
gcggcatgcctattggcgtccctcg

SEQ ID NO: 4425069 - DNA, 25 bp, Homo sapien
atgcctattggcgtccctcgagcag

SEQ ID NO: 4425070 - DNA, 25 bp, Homo sapien
gggggtctcattcccggaggcggca

SEQ ID NO: 4425071 - DNA, 25 bp, Homo sapien
ctaaggtcttggtggacgcattcct

SEQ ID NO: 4425072 - DNA, 25 bp, Homo sapien
ggacgcattcctgggggaggtggac

SEQ ID NO: 4425073 - DNA, 25 bp, Homo sapien
ggtggacgcattcctgggggaggtg

SEQ ID NO: 4425074 - DNA, 25 bp, Homo sapien
taaggtcttggtggacgcattcctg

SEQ ID NO: 4425075 - DNA, 25 bp, Homo sapien
actctacacaatttcacaagacgca

SEQ ID NO: 4425076 - DNA, 25 bp, Homo sapien
acactctacacaatttcacaagacg

SEQ ID NO: 4425077 - DNA, 25 bp, Homo sapien
tctacacaatttcacaagacgcatt

SEQ ID NO: 4425078 - DNA, 25 bp, Homo sapien
cactctacacaatttcacaagacgc

SEQ ID NO: 4425079 - DNA, 25 bp, Homo sapien
ggtgacattcacaaccactcctggt

SEQ ID NO: 4425080 - DNA, 25 bp, Homo sapien
catagcaacatgagaagcaggaggc

SEQ ID NO: 4425081 - DNA, 25 bp, Homo sapien
ggtgataccactggacataaccgta

SEQ ID NO: 4425082 - DNA, 25 bp, Homo sapien
cagtatataggtggccttacaaggc

SEQ ID NO: 4425083 - DNA, 25 bp, Homo sapien
ttccttttccttgagtgattaccac

SEQ ID NO: 4425084 - DNA, 25 bp, Homo sapien
agtcagtaacaggaactattgttac

SEQ ID NO: 4425085 - DNA, 25 bp, Homo sapien
ggcagagaccatatcaagtcagtaa

SEQ ID NO: 4425086 - DNA, 25 bp, Homo sapien
ttaatctgagaagctattctggcag

SEQ ID NO: 4425087 - DNA, 25 bp, Homo sapien
gccaaaatctaagggccatccatac

SEQ ID NO: 4425088 - DNA, 25 bp, Homo sapien
taccagcaaaccaatgcaaggagaa

SEQ ID NO: 4425089 - DNA, 25 bp, Homo sapien
tccataccagcaaaccaatgcaagg

SEQ ID NO: 4425090 - DNA, 25 bp, Homo sapien
tgcataatcactcatgccaaaatct

SEQ ID NO: 4425091 - DNA, 25 bp, Homo sapien
taattccaagccaagtttacctatc

SEQ ID NO: 4425092 - DNA, 25 bp, Homo sapien
cagaaagttgttgaccaaccatgtt

SEQ ID NO: 4425093 - DNA, 25 bp, Homo sapien
catggatatatttaaggagccggtt

SEQ ID NO: 4425094 - DNA, 25 bp, Homo sapien
gctacaatgaaagcatgtcaaacat

SEQ ID NO: 4425095 - DNA, 25 bp, Homo sapien
gccaaggcctctgcaatatatgctt

SEQ ID NO: 4425096 - DNA, 25 bp, Homo sapien
tttcagaggcatcaactaagtggtc

SEQ ID NO: 4425097 - DNA, 25 bp, Homo sapien
cactactgagtaggatccacactga

SEQ ID NO: 4425098 - DNA, 25 bp, Homo sapien
gattttcagcctcgttgtgacacta

SEQ ID NO: 4425099 - DNA, 25 bp, Homo sapien
ttgaaatcattatgttcagacaagg

SEQ ID NO: 4425100 - DNA, 25 bp, Homo sapien
gatttcagagtgtcatttttaagct

SEQ ID NO: 4425101 - DNA, 25 bp, Homo sapien
aatcattatgttcagacaaggtcct

SEQ ID NO: 4425102 - DNA, 25 bp, Homo sapien
tcagagtgtcatttttaagctcaaa

SEQ ID NO: 4425103 - DNA, 25 bp, Homo sapien
gctttcgacaacgtacaacatgtag

SEQ ID NO: 4425104 - DNA, 25 bp, Homo sapien
aatcgaaaagtctagtgaggcacac

SEQ ID NO: 4425105 - DNA, 25 bp, Homo sapien
gggtatctgagcaactagcaaagtg

SEQ ID NO: 4425106 - DNA, 25 bp, Homo sapien
tttaatccgagaggtggtcgtctca

SEQ ID NO: 4425107 - DNA, 25 bp, Homo sapien
gggaatggctgactacacggtataa

SEQ ID NO: 4425108 - DNA, 25 bp, Homo sapien
tcatcgcaaggtagtaaacaagtgc

SEQ ID NO: 4425109 - DNA, 25 bp, Homo sapien
tgcaagagaggacttctcactcctg

SEQ ID NO: 4425110 - DNA, 25 bp, Homo sapien
gtaactcaaatgacctctatctggg

SEQ ID NO: 4425111 - DNA, 25 bp, Homo sapien
gtatctctacccataaggacagtcc

SEQ ID NO: 4425112 - DNA, 25 bp, Homo sapien
tcccatcaactagtaaaaatacgta

SEQ ID NO: 4425113 - DNA, 25 bp, Homo sapien
cagtgtcattcaaagcacacagaat

SEQ ID NO: 4425114 - DNA, 25 bp, Homo sapien
aagagttttatgtgacaatggatat

SEQ ID NO: 4425115 - DNA, 25 bp, Homo sapien
acttcagagtaatcacgttgagctt

SEQ ID NO: 4425116 - DNA, 25 bp, Homo sapien
agagtaatcacgttgagctttactt

SEQ ID NO: 4425117 - DNA, 25 bp, Homo sapien
tcagagtaatcacgttgagctttac

SEQ ID NO: 4425118 - DNA, 25 bp, Homo sapien
cttcagagtaatcacgttgagcttt

SEQ ID NO: 4425119 - DNA, 25 bp, Homo sapien
gggtggatcacttagagaccaacct

SEQ ID NO: 4425120 - DNA, 25 bp, Homo sapien
gatgagacataccaatgcagtgaac

SEQ ID NO: 4425121 - DNA, 25 bp, Homo sapien
ttggaaccgggtgatgcaagcaaca

SEQ ID NO: 4425122 - DNA, 25 bp, Homo sapien
tactaaaggatctagaaccaacttc

SEQ ID NO: 4425123 - DNA, 25 bp, Homo sapien
tgggccagcaactaccactgcattc

SEQ ID NO: 4425124 - DNA, 25 bp, Homo sapien
tacacctcaacatatctggcactaa

SEQ ID NO: 4425125 - DNA, 25 bp, Homo sapien
caacatatcgctaactgcctggatc

SEQ ID NO: 4425126 - DNA, 25 bp, Homo sapien
cacgctccctttgcaggaatggaaa

SEQ ID NO: 4425127 - DNA, 25 bp, Homo sapien
cctaaaatgtgaagccacggtatcc

SEQ ID NO: 4425128 - DNA, 25 bp, Homo sapien
tattctccagtgagctagcctgaag

SEQ ID NO: 4425129 - DNA, 25 bp, Homo sapien
taacaaaccccgagtcagaaatctg

SEQ ID NO: 4425130 - DNA, 25 bp, Homo sapien
gggtgaaactgacggccatactttg

SEQ ID NO: 4425131 - DNA, 25 bp, Homo sapien
gcagacatctccaaggggggttaga

SEQ ID NO: 4425132 - DNA, 25 bp, Homo sapien
agacatctccaaggggggttagact

SEQ ID NO: 4425133 - DNA, 25 bp, Homo sapien
cagacatctccaaggggggttagac

SEQ ID NO: 4425134 - DNA, 25 bp, Homo sapien
ggcagacatctccaaggggggttag

SEQ ID NO: 4425135 - DNA, 25 bp, Homo sapien
tgttctgatgttgtaaggagcacac

SEQ ID NO: 4425136 - DNA, 25 bp, Homo sapien
ccggattgagagttgctgttctgat

SEQ ID NO: 4425137 - DNA, 25 bp, Homo sapien
gcacacaaatagagtagatctggac

SEQ ID NO: 4425138 - DNA, 25 bp, Homo sapien
tatggctctacagaggaccctggcc

SEQ ID NO: 4425139 - DNA, 25 bp, Homo sapien
tatatctttaaaaggtgacctgaga

SEQ ID NO: 4425140 - DNA, 25 bp, Homo sapien
ttttctaattaacgcttcccatgtc

SEQ ID NO: 4425141 - DNA, 25 bp, Homo sapien
cactgtctggcttacctaaggcaca

SEQ ID NO: 4425142 - DNA, 25 bp, Homo sapien
aggaaaccagttatttagccacagc

SEQ ID NO: 4425143 - DNA, 25 bp, Homo sapien
caaaggcagaccgacatttatgatg

SEQ ID NO: 4425144 - DNA, 25 bp, Homo sapien
gcaaaactggttctatcccctatga

SEQ ID NO: 4425145 - DNA, 25 bp, Homo sapien
aattaagcccaatgatccagtgaac

SEQ ID NO: 4425146 - DNA, 25 bp, Homo sapien
ggaggccctgcaacatatgctcatg

SEQ ID NO: 4425147 - DNA, 25 bp, Homo sapien
ggtttactggtcacaatatacgcct

SEQ ID NO: 4425148 - DNA, 25 bp, Homo sapien
ggacaagccaccgattaggttggaa

SEQ ID NO: 4425149 - DNA, 25 bp, Homo sapien
catacagcagttaaatggtctccag

SEQ ID NO: 4425150 - DNA, 25 bp, Homo sapien
caaataatctgcctatgtgagggag

SEQ ID NO: 4425151 - DNA, 25 bp, Homo sapien
gacatgacaactgtacgtcacagag

SEQ ID NO: 4425152 - DNA, 25 bp, Homo sapien
cagttgtctagtgatatccatcggg

SEQ ID NO: 4425153 - DNA, 25 bp, Homo sapien
gcaatatatgcacgtccacactgtc

SEQ ID NO: 4425154 - DNA, 25 bp, Homo sapien
ccgcagataggagggttgacatgac

SEQ ID NO: 4425155 - DNA, 25 bp, Homo sapien
tgtcatgcaaccaagggaacacata

SEQ ID NO: 4425156 - DNA, 25 bp, Homo sapien
aaaatatgtataggtcaagaagccc

SEQ ID NO: 4425157 - DNA, 25 bp, Homo sapien
ttttgtttagctccaagagcctgtg

SEQ ID NO: 4425158 - DNA, 25 bp, Homo sapien
taacaggtaaaatgtagagagtctc

SEQ ID NO: 4425159 - DNA, 25 bp, Homo sapien
tcaccacgctgaagtattaaatgtc

SEQ ID NO: 4425160 - DNA, 25 bp, Homo sapien
aaaacgttacagtcagtcccaagag

SEQ ID NO: 4425161 - DNA, 25 bp, Homo sapien
gacaagccccacgtataattcatat

SEQ ID NO: 4425162 - DNA, 25 bp, Homo sapien
cagcccattgttcctaggatgttga

SEQ ID NO: 4425163 - DNA, 25 bp, Homo sapien
tgcttctttccttaggtaatccaat

SEQ ID NO: 4425164 - DNA, 25 bp, Homo sapien
aagcacatgctctttgtgagatcaa

SEQ ID NO: 4425165 - DNA, 25 bp, Homo sapien
catgctctttgtgagatcaatcaaa

SEQ ID NO: 4425166 - DNA, 25 bp, Homo sapien
tactctgtttcatggtagtcgctgc

SEQ ID NO: 4425167 - DNA, 25 bp, Homo sapien
gaaagggatgttcctgatgattcca

SEQ ID NO: 4425168 - DNA, 25 bp, Homo sapien
aattaagggactccatgagaaaggg

SEQ ID NO: 4425169 - DNA, 25 bp, Homo sapien
ctatgtttgcagttaacttgtaaat

SEQ ID NO: 4425170 - DNA, 25 bp, Homo sapien
gatgattccatttgcaggtcagctg

SEQ ID NO: 4425171 - DNA, 25 bp, Homo sapien
tcagcacccagacccatttaaatta

SEQ ID NO: 4425172 - DNA, 25 bp, Homo sapien
tgtaactagctctaactcttcctcc

SEQ ID NO: 4425173 - DNA, 25 bp, Homo sapien
caccaagttttacctaggcctctct

SEQ ID NO: 4425174 - DNA, 25 bp, Homo sapien
gctccaaaggaaggtctcgaagact

SEQ ID NO: 4425175 - DNA, 25 bp, Homo sapien
caaagacgataaaatgttccttctt

SEQ ID NO: 4425176 - DNA, 25 bp, Homo sapien
tattgctgagggaacgaagaacact

SEQ ID NO: 4425177 - DNA, 25 bp, Homo sapien
gaaagcactgcaacaggtcattcac

SEQ ID NO: 4425178 - DNA, 25 bp, Homo sapien
ggtcattcactgatggtaggtacca

SEQ ID NO: 4425179 - DNA, 25 bp, Homo sapien
tattctaataataaaggaggtcaga

SEQ ID NO: 4425180 - DNA, 25 bp, Homo sapien
ttgtctgtaaaatgacatgcaacat

SEQ ID NO: 4425181 - DNA, 25 bp, Homo sapien
ctattatgaagaaagagcatgtgga

SEQ ID NO: 4425182 - DNA, 25 bp, Homo sapien
ggaggtcagatgttagctctttcct

SEQ ID NO: 4425183 - DNA, 25 bp, Homo sapien
gaatgtctccatacgtcataaaaag

SEQ ID NO: 4425184 - DNA, 25 bp, Homo sapien
ttttttacatctgcaaggagtgtcc

SEQ ID NO: 4425185 - DNA, 25 bp, Homo sapien
gacactctttaggtcactttccaaa

SEQ ID NO: 4425186 - DNA, 25 bp, Homo sapien
tgaaaacaatcatcgtgcctactta

SEQ ID NO: 4425187 - DNA, 25 bp, Homo sapien
caaagtaattagacacacacccaca

SEQ ID NO: 4425188 - DNA, 25 bp, Homo sapien
ttttgtataaacttggccccagcag

SEQ ID NO: 4425189 - DNA, 25 bp, Homo sapien
gtataagtaatgtatcatcccccaa

SEQ ID NO: 4425190 - DNA, 25 bp, Homo sapien
caggaatctgtccaacaaagtaatt

SEQ ID NO: 4425191 - DNA, 25 bp, Homo sapien
atatacaacttctgtataaccaaaa

SEQ ID NO: 4425192 - DNA, 25 bp, Homo sapien
tatacaacttctgtataaccaaaaa

SEQ ID NO: 4425193 - DNA, 25 bp, Homo sapien
tttcaatatacaacttctgtataac

SEQ ID NO: 4425194 - DNA, 25 bp, Homo sapien
aatatacaacttctgtataaccaaa

SEQ ID NO: 4425195 - DNA, 25 bp, Homo sapien
aaaaatgcaagtatacagagggaat

SEQ ID NO: 4425196 - DNA, 25 bp, Homo sapien
caaaaataattgtaagcgtcaattg

SEQ ID NO: 4425197 - DNA, 25 bp, Homo sapien
tgtaagcgtcaattgatagaaaaaa

SEQ ID NO: 4425198 - DNA, 25 bp, Homo sapien
tttaaagatatctattctctcctaa

SEQ ID NO: 4425199 - DNA, 25 bp, Homo sapien
ttattttgtagactgcttaagtcag

SEQ ID NO: 4425200 - DNA, 25 bp, Homo sapien
tgtagactgcttaagtcagacaaaa

SEQ ID NO: 4425201 - DNA, 25 bp, Homo sapien
gactgcttaagtcagacaaaacaga

SEQ ID NO: 4425202 - DNA, 25 bp, Homo sapien
ttttgtagactgcttaagtcagaca

SEQ ID NO: 4425203 - DNA, 25 bp, Homo sapien
gtaactttgattataactctacaag

SEQ ID NO: 4425204 - DNA, 25 bp, Homo sapien
attgtaactttgattataactctac

SEQ ID NO: 4425205 - DNA, 25 bp, Homo sapien
gacttgaattgatcaattataaaac

SEQ ID NO: 4425206 - DNA, 25 bp, Homo sapien
attataaaaccacacattaggcaaa

SEQ ID NO: 4425207 - DNA, 25 bp, Homo sapien
gagacaccatgcacaaccttgagaa

SEQ ID NO: 4425208 - DNA, 25 bp, Homo sapien
cactatttgcctacgctcatctgga

SEQ ID NO: 4425209 - DNA, 25 bp, Homo sapien
tagttgctagatatgagaaggttca

SEQ ID NO: 4425210 - DNA, 25 bp, Homo sapien
tccaaaaatgctatgattgcaggct

SEQ ID NO: 4425211 - DNA, 25 bp, Homo sapien
taaataagtacacacaactgggata

SEQ ID NO: 4425212 - DNA, 25 bp, Homo sapien
gtaaataagtacacacaactgggat

SEQ ID NO: 4425213 - DNA, 25 bp, Homo sapien
agtaaataagtacacacaactggga

SEQ ID NO: 4425214 - DNA, 25 bp, Homo sapien
aaataagtacacacaactgggataa

SEQ ID NO: 4425215 - DNA, 25 bp, Homo sapien
acaggtatggagctagaatctgagc

SEQ ID NO: 4425216 - DNA, 25 bp, Homo sapien
tatgatggatgttgtggccaactct

SEQ ID NO: 4425217 - DNA, 25 bp, Homo sapien
tctggctccctaagaacttggatta

SEQ ID NO: 4425218 - DNA, 25 bp, Homo sapien
gagcactataatcactacaatggga

SEQ ID NO: 4425219 - DNA, 25 bp, Homo sapien
tctcatgtcaacttatgggtcttcc

SEQ ID NO: 4425220 - DNA, 25 bp, Homo sapien
ctcaaaattggagagaaattcgttt

SEQ ID NO: 4425221 - DNA, 25 bp, Homo sapien
tgtaagtctgtgatacccgatcaag

SEQ ID NO: 4425222 - DNA, 25 bp, Homo sapien
tactttgcttataaatgtgccatta

SEQ ID NO: 4425223 - DNA, 25 bp, Homo sapien
cctcccgaggagtttgcaactttga

SEQ ID NO: 4425224 - DNA, 25 bp, Homo sapien
ttatttgggaactaaccgtgctctc

SEQ ID NO: 4425225 - DNA, 25 bp, Homo sapien
ggcctcctcccgaggagtttgcaac

SEQ ID NO: 4425226 - DNA, 25 bp, Homo sapien
cgtgctctcatagagaaagcttctt

SEQ ID NO: 4425227 - DNA, 25 bp, Homo sapien
cactaaatgattccactgtgcatat

SEQ ID NO: 4425228 - DNA, 25 bp, Homo sapien
ccatacatacacccaacaggttttt

SEQ ID NO: 4425229 - DNA, 25 bp, Homo sapien
catacatacacccaacaggttttta

SEQ ID NO: 4425230 - DNA, 25 bp, Homo sapien
accatacatacacccaacaggtttt

SEQ ID NO: 4425231 - DNA, 25 bp, Homo sapien
attaaactaacttgtgaacccactg

SEQ ID NO: 4425232 - DNA, 25 bp, Homo sapien
aaactaacttgtgaacccactgcag

SEQ ID NO: 4425233 - DNA, 25 bp, Homo sapien
taaactaacttgtgaacccactgca

SEQ ID NO: 4425234 - DNA, 25 bp, Homo sapien
ttaaactaacttgtgaacccactgc

SEQ ID NO: 4425235 - DNA, 25 bp, Homo sapien
gaagttctcacttcttaaactggta

SEQ ID NO: 4425236 - DNA, 25 bp, Homo sapien
gaagaatgacgtctacaaaaatagt

SEQ ID NO: 4425237 - DNA, 25 bp, Homo sapien
cacttttgaagaatgacgtctacaa

SEQ ID NO: 4425238 - DNA, 25 bp, Homo sapien
ggattgatatgcaaatttcagtcag

SEQ ID NO: 4425239 - DNA, 25 bp, Homo sapien
ctttgtcctccttgactattgaaga

SEQ ID NO: 4425240 - DNA, 25 bp, Homo sapien
gcaggaaagatgtctttgtcctcct

SEQ ID NO: 4425241 - DNA, 25 bp, Homo sapien
tgtctttgtcctccttgactattga

SEQ ID NO: 4425242 - DNA, 25 bp, Homo sapien
ttgtcctccttgactattgaagatg

SEQ ID NO: 4425243 - DNA, 25 bp, Homo sapien
aataatcacataaccacaaagtagg

SEQ ID NO: 4425244 - DNA, 25 bp, Homo sapien
gcttcaaaatcacaatatagtcttt

SEQ ID NO: 4425245 - DNA, 25 bp, Homo sapien
tcctcaacgtagcaaatagaacagc

SEQ ID NO: 4425246 - DNA, 25 bp, Homo sapien
ccttgattaaaatatcgactcaaaa

SEQ ID NO: 4425247 - DNA, 25 bp, Homo sapien
tcggtgatgctgtagatggaaccac

SEQ ID NO: 4425248 - DNA, 25 bp, Homo sapien
tatgatcctattatccacatggtca

SEQ ID NO: 4425249 - DNA, 25 bp, Homo sapien
aagcagtaacaacagcatttcggtg

SEQ ID NO: 4425250 - DNA, 25 bp, Homo sapien
tggaaccaccatttgtctatgatcc

SEQ ID NO: 4425251 - DNA, 25 bp, Homo sapien
gacttgtctaaaaactgtgggctcc

SEQ ID NO: 4425252 - DNA, 25 bp, Homo sapien
ctacagaaggtctagtccagataac

SEQ ID NO: 4425253 - DNA, 25 bp, Homo sapien
ggacagtgactaacgtatccatggg

SEQ ID NO: 4425254 - DNA, 25 bp, Homo sapien
gaaagacttgccatcatctggacag

SEQ ID NO: 4425255 - DNA, 25 bp, Homo sapien
gtttgtgtacttggaaagaggtgaa

SEQ ID NO: 4425256 - DNA, 25 bp, Homo sapien
agttgtcatgtcatccaagtttgtg

SEQ ID NO: 4425257 - DNA, 25 bp, Homo sapien
gaactatagtcaatctcagatcctg

SEQ ID NO: 4425258 - DNA, 25 bp, Homo sapien
aatggcagtgcaagggtctcgctct

SEQ ID NO: 4425259 - DNA, 25 bp, Homo sapien
cactaatggctgtacacgtatgaga

SEQ ID NO: 4425260 - DNA, 25 bp, Homo sapien
tgctaacactggtctagagaggtaa

SEQ ID NO: 4425261 - DNA, 25 bp, Homo sapien
gaagagcaccttctgtccaggtaaa

SEQ ID NO: 4425262 - DNA, 25 bp, Homo sapien
tccccaatggacagtgcagcttatg

SEQ ID NO: 4425263 - DNA, 25 bp, Homo sapien
agcttgcttcatatcactgagtgac

SEQ ID NO: 4425264 - DNA, 25 bp, Homo sapien
tatggaaggtagtagataaatgacc

SEQ ID NO: 4425265 - DNA, 25 bp, Homo sapien
tcaaaggcttaaagcagattctgcc

SEQ ID NO: 4425266 - DNA, 25 bp, Homo sapien
tagttgccaagcctaagtgaaaagg

SEQ ID NO: 4425267 - DNA, 25 bp, Homo sapien
tacaacaccgttctgtggtggcaga

SEQ ID NO: 4425268 - DNA, 25 bp, Homo sapien
ggcagaggacaccattttcaagagc

SEQ ID NO: 4425269 - DNA, 25 bp, Homo sapien
tagccacggccattaattgtttaag

SEQ ID NO: 4425270 - DNA, 25 bp, Homo sapien
tactgcgcccgacctcaaaaattct

SEQ ID NO: 4425271 - DNA, 25 bp, Homo sapien
aagtcaatataagatgctcaggctc

SEQ ID NO: 4425272 - DNA, 25 bp, Homo sapien
cactaaggaagactgagaatactga

SEQ ID NO: 4425273 - DNA, 25 bp, Homo sapien
tgtcacctgagatgattcactaagg

SEQ ID NO: 4425274 - DNA, 25 bp, Homo sapien
tacaggaagataatgtcggcaaatc

SEQ ID NO: 4425275 - DNA, 25 bp, Homo sapien
ccctgccactgaagactaagtacaa

SEQ ID NO: 4425276 - DNA, 25 bp, Homo sapien
acagggtatgttttagtcaggcaga

SEQ ID NO: 4425277 - DNA, 25 bp, Homo sapien
tacaaagttacatacagagagcagg

SEQ ID NO: 4425278 - DNA, 25 bp, Homo sapien
catattaaaatgtccctggcggcct

SEQ ID NO: 4425279 - DNA, 25 bp, Homo sapien
caaaacgtgtcctgcagcacagttt

SEQ ID NO: 4425280 - DNA, 25 bp, Homo sapien
tcttcctgaatcaaaacgtgtcctg

SEQ ID NO: 4425281 - DNA, 25 bp, Homo sapien
tgaatcaaaacgtgtcctgcagcac

SEQ ID NO: 4425282 - DNA, 25 bp, Homo sapien
ttcttcctgaatcaaaacgtgtcct

SEQ ID NO: 4425283 - DNA, 25 bp, Homo sapien
catatgggttccgttcagatttaaa

SEQ ID NO: 4425284 - DNA, 25 bp, Homo sapien
gcatcttcagggtatgggcatatgg

SEQ ID NO: 4425285 - DNA, 25 bp, Homo sapien
gaattcctctgtggagttactccac

SEQ ID NO: 4425286 - DNA, 25 bp, Homo sapien
ttagaaaggatgaattcctctgtgg

SEQ ID NO: 4425287 - DNA, 25 bp, Homo sapien
gcaatcctgccgtaatgaaaactct

SEQ ID NO: 4425288 - DNA, 25 bp, Homo sapien
gaaaactctaccgtggccaatgaat

SEQ ID NO: 4425289 - DNA, 25 bp, Homo sapien
ggttttcaccagtaactctagccac

SEQ ID NO: 4425290 - DNA, 25 bp, Homo sapien
tatgctgggctaacaatggtaacct

SEQ ID NO: 4425291 - DNA, 25 bp, Homo sapien
gaacagacatatgaaagccccagag

SEQ ID NO: 4425292 - DNA, 25 bp, Homo sapien
aataaagaactggttggcgcgggca

SEQ ID NO: 4425293 - DNA, 25 bp, Homo sapien
gggcaataaagctaccctggaagca

SEQ ID NO: 4425294 - DNA, 25 bp, Homo sapien
aaaatccctgtcaagtaggagctcg

SEQ ID NO: 4425295 - DNA, 25 bp, Homo sapien
catgtaggccagactcaaagtaacc

SEQ ID NO: 4425296 - DNA, 25 bp, Homo sapien
caatgctctggtttcccaaagggta

SEQ ID NO: 4425297 - DNA, 25 bp, Homo sapien
cacagtataacaaggccagagtgcc

SEQ ID NO: 4425298 - DNA, 25 bp, Homo sapien
gcaagttagctacagataccaaggg

SEQ ID NO: 4425299 - DNA, 25 bp, Homo sapien
caaactgctaaagttgttggatttt

SEQ ID NO: 4425300 - DNA, 25 bp, Homo sapien
caataactggtaaacaaactgctaa

SEQ ID NO: 4425301 - DNA, 25 bp, Homo sapien
aacaatgttgaacacagttggtact

SEQ ID NO: 4425302 - DNA, 25 bp, Homo sapien
acaatgttgaacacagttggtactc

SEQ ID NO: 4425303 - DNA, 25 bp, Homo sapien
aaagtggttttattgaccgtatcat

SEQ ID NO: 4425304 - DNA, 25 bp, Homo sapien
tattgaccgtatcataacacgcaca

SEQ ID NO: 4425305 - DNA, 25 bp, Homo sapien
cgtatcataacacgcacatacattt

SEQ ID NO: 4425306 - DNA, 25 bp, Homo sapien
gttttattgaccgtatcataacacg

SEQ ID NO: 4425307 - DNA, 25 bp, Homo sapien
tcaaatgcaggtatctacaaggcct

SEQ ID NO: 4425308 - DNA, 25 bp, Homo sapien
gagggactgtcttcaaattttgcca

SEQ ID NO: 4425309 - DNA, 25 bp, Homo sapien
gatgtttcctcatgggtagactcag

SEQ ID NO: 4425310 - DNA, 25 bp, Homo sapien
tatgcttgaagccatatgcccaaac

SEQ ID NO: 4425311 - DNA, 25 bp, Homo sapien
aaattctgtgacatcttctagacct

SEQ ID NO: 4425312 - DNA, 25 bp, Homo sapien
ctctcttccttgaaattctgtgaca

SEQ ID NO: 4425313 - DNA, 25 bp, Homo sapien
ttctgtgacatcttctagacctgca

SEQ ID NO: 4425314 - DNA, 25 bp, Homo sapien
tgacatcttctagacctgcagcaaa

SEQ ID NO: 4425315 - DNA, 25 bp, Homo sapien
ctcccaacaaataagcatttccaca

SEQ ID NO: 4425316 - DNA, 25 bp, Homo sapien
aagcaccctcccaacaaataagcat

SEQ ID NO: 4425317 - DNA, 25 bp, Homo sapien
aacaagcaccctcccaacaaataag

SEQ ID NO: 4425318 - DNA, 25 bp, Homo sapien
gcaccctcccaacaaataagcattt

SEQ ID NO: 4425319 - DNA, 25 bp, Homo sapien
cctcagacaattattctcatcatcg

SEQ ID NO: 4425320 - DNA, 25 bp, Homo sapien
gacaattattctcatcatcgatcca

SEQ ID NO: 4425321 - DNA, 25 bp, Homo sapien
cctcagattgacatctggaatgagt

SEQ ID NO: 4425322 - DNA, 25 bp, Homo sapien
ggacctcagattgacatctggaatg

SEQ ID NO: 4425323 - DNA, 25 bp, Homo sapien
gatctcaggatgtggcatggaacgc

SEQ ID NO: 4425324 - DNA, 25 bp, Homo sapien
gaaaaggcacgctcacagaggtact

SEQ ID NO: 4425325 - DNA, 25 bp, Homo sapien
tatgttgtcactgagggatccccaa

SEQ ID NO: 4425326 - DNA, 25 bp, Homo sapien
gatgctaatgccctcttcggagaga

SEQ ID NO: 4425327 - DNA, 25 bp, Homo sapien
gacatccgaaggtaatgtctccttt

SEQ ID NO: 4425328 - DNA, 25 bp, Homo sapien
gccctcaggacatccgaaggtaatg

SEQ ID NO: 4425329 - DNA, 25 bp, Homo sapien
tccttttattacaggatgtcctgcc

SEQ ID NO: 4425330 - DNA, 25 bp, Homo sapien
gtctccttttattacaggatgtcct

SEQ ID NO: 4425331 - DNA, 25 bp, Homo sapien
caacagccagcacgtcagtctggaa

SEQ ID NO: 4425332 - DNA, 25 bp, Homo sapien
ggaactcagcatcaagcccagagac

SEQ ID NO: 4425333 - DNA, 25 bp, Homo sapien
cactgtcccaggtgaggtgtaccta

SEQ ID NO: 4425334 - DNA, 25 bp, Homo sapien
cagtcttccccatgtagccaaagga

SEQ ID NO: 4425335 - DNA, 25 bp, Homo sapien
gatacctagggaacatgtgtggcca

SEQ ID NO: 4425336 - DNA, 25 bp, Homo sapien
tatgtttccgaacactgcaaagggc

SEQ ID NO: 4425337 - DNA, 25 bp, Homo sapien
gtggcaaccggacagctcaagaaca

SEQ ID NO: 4425338 - DNA, 25 bp, Homo sapien
tgcaaagggccacgatggtctgcag

SEQ ID NO: 4425339 - DNA, 25 bp, Homo sapien
tcctaagccatccaccagcattggg

SEQ ID NO: 4425340 - DNA, 25 bp, Homo sapien
cagcattgggtgcaccatggatgcc

SEQ ID NO: 4425341 - DNA, 25 bp, Homo sapien
ggcagaggaatgcttaccgtcctaa

SEQ ID NO: 4425342 - DNA, 25 bp, Homo sapien
gctccttgaaggtataggacatcca

SEQ ID NO: 4425343 - DNA, 25 bp, Homo sapien
gacctcagttccgatgagaatgacg

SEQ ID NO: 4425344 - DNA, 25 bp, Homo sapien
ggacctcagttccgatgagaatgac

SEQ ID NO: 4425345 - DNA, 25 bp, Homo sapien
agtggaagttgtccctcactcctac

SEQ ID NO: 4425346 - DNA, 25 bp, Homo sapien
gacttttgtctgtggatgccctggg

SEQ ID NO: 4425347 - DNA, 25 bp, Homo sapien
cctgggtggtggaacctatgggaat

SEQ ID NO: 4425348 - DNA, 25 bp, Homo sapien
tgttcctaacgtgcctgtgacacga

SEQ ID NO: 4425349 - DNA, 25 bp, Homo sapien
cgccatggatgccaggccacacaga

SEQ ID NO: 4425350 - DNA, 25 bp, Homo sapien
tgccagcacacagtgcgccatggat

SEQ ID NO: 4425351 - DNA, 25 bp, Homo sapien
cagaatccaggactccgtgtggcct

SEQ ID NO: 4425352 - DNA, 25 bp, Homo sapien
gtgtggccttcgttgctcagaagaa

SEQ ID NO: 4425353 - DNA, 25 bp, Homo sapien
tccgatgagaatgacggtatgagtt

SEQ ID NO: 4425354 - DNA, 25 bp, Homo sapien
tcagttccgatgagaatgacggtat

SEQ ID NO: 4425355 - DNA, 25 bp, Homo sapien
gacctcagttccgatgagaatgacg

SEQ ID NO: 4425356 - DNA, 25 bp, Homo sapien
tgagaatgacggtatgagttttcac

SEQ ID NO: 4425357 - DNA, 25 bp, Homo sapien
tccttgccagcatatggcgggtgtc

SEQ ID NO: 4425358 - DNA, 25 bp, Homo sapien
ggcgcaccgtggatgctaggcaaca

SEQ ID NO: 4425359 - DNA, 25 bp, Homo sapien
taggcaacaccaactccaggatgtt

SEQ ID NO: 4425360 - DNA, 25 bp, Homo sapien
ccgtggatgctaggcaacaccaact

SEQ ID NO: 4425361 - DNA, 25 bp, Homo sapien
ccgatgagaacgacggtatgagttc

SEQ ID NO: 4425362 - DNA, 25 bp, Homo sapien
gacctcagttccgatgagaacgacg

SEQ ID NO: 4425363 - DNA, 25 bp, Homo sapien
tttatgggggactcatcatcgatcc

SEQ ID NO: 4425364 - DNA, 25 bp, Homo sapien
gaacgacggtatgagttctcactca

SEQ ID NO: 4425365 - DNA, 25 bp, Homo sapien
accagcatgaggtgaaccctggaag

SEQ ID NO: 4425366 - DNA, 25 bp, Homo sapien
tgaagaggcaggacatttgacacca

SEQ ID NO: 4425367 - DNA, 25 bp, Homo sapien
tgacgaccttaaagaccttcggcac

SEQ ID NO: 4425368 - DNA, 25 bp, Homo sapien
agtaggtgagctgacgaccttaaag

SEQ ID NO: 4425369 - DNA, 25 bp, Homo sapien
gaagaggcaggacatttgacaccac

SEQ ID NO: 4425370 - DNA, 25 bp, Homo sapien
acctcagttccgctgagaacgacgg

SEQ ID NO: 4425371 - DNA, 25 bp, Homo sapien
tccgctgagaacgacggtatgagtt

SEQ ID NO: 4425372 - DNA, 25 bp, Homo sapien
tgagaacgacggtatgagttttcac

SEQ ID NO: 4425373 - DNA, 25 bp, Homo sapien
ttttggggggactcatcatcgatcc

SEQ ID NO: 4425374 - DNA, 25 bp, Homo sapien
ctcactccaacagtccctgctggag

SEQ ID NO: 4425375 - DNA, 25 bp, Homo sapien
gaacctatagggactagtggaagct

SEQ ID NO: 4425376 - DNA, 25 bp, Homo sapien
tgatgtcatgacaagacactgtctc

SEQ ID NO: 4425377 - DNA, 25 bp, Homo sapien
gtggatgccaggccacaccaaatcc

SEQ ID NO: 4425378 - DNA, 25 bp, Homo sapien
cagaagcatcgaccatcttccttga

SEQ ID NO: 4425379 - DNA, 25 bp, Homo sapien
caaatccaggaacccgcagggcctg

SEQ ID NO: 4425380 - DNA, 25 bp, Homo sapien
gcctgtttctcagaagcatcgacca

SEQ ID NO: 4425381 - DNA, 25 bp, Homo sapien
tctgatgagaacgacggtatgagtt

SEQ ID NO: 4425382 - DNA, 25 bp, Homo sapien
gtttttatgggggactcatcatcga

SEQ ID NO: 4425383 - DNA, 25 bp, Homo sapien
tttatgggggactcatcatcgatcc

SEQ ID NO: 4425384 - DNA, 25 bp, Homo sapien
gaacgacggtatgagttctcactca

SEQ ID NO: 4425385 - DNA, 25 bp, Homo sapien
ctgtggatgcgaggccacaccgact

SEQ ID NO: 4425386 - DNA, 25 bp, Homo sapien
gactccacgactccatggagattcc

SEQ ID NO: 4425387 - DNA, 25 bp, Homo sapien
cggtgggcctctcaaggcaactgcc

SEQ ID NO: 4425388 - DNA, 25 bp, Homo sapien
tgctcggaagaactgaccatctgtc

SEQ ID NO: 4425389 - DNA, 25 bp, Homo sapien
gacctcagttccgatgagaatgacg

SEQ ID NO: 4425390 - DNA, 25 bp, Homo sapien
ttttttggaggactcatcatcgatc

SEQ ID NO: 4425391 - DNA, 25 bp, Homo sapien
ttttggaggactcatcatcgatcca

SEQ ID NO: 4425392 - DNA, 25 bp, Homo sapien
tgagaatgacggtatgagttttcac

SEQ ID NO: 4425393 - DNA, 25 bp, Homo sapien
tatgactctctgacctgtgtacctg

SEQ ID NO: 4425394 - DNA, 25 bp, Homo sapien
gaacgccatgggtgttagaacctat

SEQ ID NO: 4425395 - DNA, 25 bp, Homo sapien
acagagcagccagtcaccctatgac

SEQ ID NO: 4425396 - DNA, 25 bp, Homo sapien
tggaagttgtccctcactagtaaag

SEQ ID NO: 4425397 - DNA, 25 bp, Homo sapien
tcttccttgccagcaagcggcagac

SEQ ID NO: 4425398 - DNA, 25 bp, Homo sapien
cagcattgggtgcaccatagatgcc

SEQ ID NO: 4425399 - DNA, 25 bp, Homo sapien
gatgccaggccacaccaaatcagga

SEQ ID NO: 4425400 - DNA, 25 bp, Homo sapien
aaatcaggactcaaggcagcctctg

SEQ ID NO: 4425401 - DNA, 25 bp, Homo sapien
tctgatgagaacgacggtatgagtt

SEQ ID NO: 4425402 - DNA, 25 bp, Homo sapien
tttatgggggactcatcatcgatcc

SEQ ID NO: 4425403 - DNA, 25 bp, Homo sapien
gtttttatgggggactcatcatcga

SEQ ID NO: 4425404 - DNA, 25 bp, Homo sapien
gaacgacggtatgagttctcactca

SEQ ID NO: 4425405 - DNA, 25 bp, Homo sapien
catcttcctttcagcagacggcagg

SEQ ID NO: 4425406 - DNA, 25 bp, Homo sapien
gtgcaccacggatgcaaggccacac

SEQ ID NO: 4425407 - DNA, 25 bp, Homo sapien
tcattgctcagaagcatcaaccatc

SEQ ID NO: 4425408 - DNA, 25 bp, Homo sapien
cacaccgaatccaggactccatggg

SEQ ID NO: 4425409 - DNA, 25 bp, Homo sapien
ttttttggaggactcatcatcgatc

SEQ ID NO: 4425410 - DNA, 25 bp, Homo sapien
gacctcagttccgatgagaacgacg

SEQ ID NO: 4425411 - DNA, 25 bp, Homo sapien
ttttggaggactcatcatcgatcca

SEQ ID NO: 4425412 - DNA, 25 bp, Homo sapien
gaacgacggtatgagttctcactca

SEQ ID NO: 4425413 - DNA, 25 bp, Homo sapien
caggactctacgtggcctttgttgc

SEQ ID NO: 4425414 - DNA, 25 bp, Homo sapien
actgaaaccaggactctacgtggcc

SEQ ID NO: 4425415 - DNA, 25 bp, Homo sapien
actgtggataccaggccacactgaa

SEQ ID NO: 4425416 - DNA, 25 bp, Homo sapien
gcttgggagaatcgaccatcttcct

SEQ ID NO: 4425417 - DNA, 25 bp, Homo sapien
ccgatgagaacgacggtatgagttc

SEQ ID NO: 4425418 - DNA, 25 bp, Homo sapien
gacctcagttccgatgagaacgacg

SEQ ID NO: 4425419 - DNA, 25 bp, Homo sapien
tttatgggggactcatcatcgatcc

SEQ ID NO: 4425420 - DNA, 25 bp, Homo sapien
gaacgacggtatgagttctcactca

SEQ ID NO: 4425421 - DNA, 25 bp, Homo sapien
aaagatcacacaagacgaagaccat

SEQ ID NO: 4425422 - DNA, 25 bp, Homo sapien
gatcacacaagacgaagaccatcct

SEQ ID NO: 4425423 - DNA, 25 bp, Homo sapien
tcacacaagacgaagaccatccttc

SEQ ID NO: 4425424 - DNA, 25 bp, Homo sapien
caagacgaagaccatccttcttgga

SEQ ID NO: 4425425 - DNA, 25 bp, Homo sapien
aaaacgtatatatgtaagtcatcat

SEQ ID NO: 4425426 - DNA, 25 bp, Homo sapien
aaaaacgtatatatgtaagtcatca

SEQ ID NO: 4425427 - DNA, 25 bp, Homo sapien
aaagtcatcccttgcggtcactggc

SEQ ID NO: 4425428 - DNA, 25 bp, Homo sapien
gaagcactttgccatctccaaaaat

SEQ ID NO: 4425429 - DNA, 25 bp, Homo sapien
ccaagatcaaagtcatcccttgcgg

SEQ ID NO: 4425430 - DNA, 25 bp, Homo sapien
gccaaacatgtttagaagcactttg

SEQ ID NO: 4425431 - DNA, 25 bp, Homo sapien
caactttccaaggaacccacgtatg

SEQ ID NO: 4425432 - DNA, 25 bp, Homo sapien
caaggaacccacgtatggaagtcat

SEQ ID NO: 4425433 - DNA, 25 bp, Homo sapien
aaggaacccacgtatggaagtcatc

SEQ ID NO: 4425434 - DNA, 25 bp, Homo sapien
tccaaggaacccacgtatggaagtc

SEQ ID NO: 4425435 - DNA, 25 bp, Homo sapien
gaggatgatcatccctcacagacac

SEQ ID NO: 4425436 - DNA, 25 bp, Homo sapien
cgacggatccaaaagcctctgaagg

SEQ ID NO: 4425437 - DNA, 25 bp, Homo sapien
catgccacatgtgtcaaggggcttc

SEQ ID NO: 4425438 - DNA, 25 bp, Homo sapien
tccaaggatcacatgagaggatgat

SEQ ID NO: 4425439 - DNA, 25 bp, Homo sapien
ggacctcagttcaatgaggatgatg

SEQ ID NO: 4425440 - DNA, 25 bp, Homo sapien
cagctttccaaggaatgtatatatg

SEQ ID NO: 4425441 - DNA, 25 bp, Homo sapien
gatgatggtatagagttttcattca

SEQ ID NO: 4425442 - DNA, 25 bp, Homo sapien
tatatatggaagtcatcattgatcc

SEQ ID NO: 4425443 - DNA, 25 bp, Homo sapien
gtgtccatgggttccctgccatctc

SEQ ID NO: 4425444 - DNA, 25 bp, Homo sapien
gaagtttatcccttgcagcctctgt

SEQ ID NO: 4425445 - DNA, 25 bp, Homo sapien
gcccatgccacatgtgtccatgggt

SEQ ID NO: 4425446 - DNA, 25 bp, Homo sapien
tgaagggatccaccggcacccaaag

SEQ ID NO: 4425447 - DNA, 25 bp, Homo sapien
cagttcaactaagatgatagtacag

SEQ ID NO: 4425448 - DNA, 25 bp, Homo sapien
tcaactaagatgatagtacagagtt

SEQ ID NO: 4425449 - DNA, 25 bp, Homo sapien
ggacctcagttcaactaagatgata

SEQ ID NO: 4425450 - DNA, 25 bp, Homo sapien
cctcagttcaactaagatgatagta

SEQ ID NO: 4425451 - DNA, 25 bp, Homo sapien
gcagtgtatctggttgatacccaac

SEQ ID NO: 4425452 - DNA, 25 bp, Homo sapien
tgattgtccctcaccaacatggtcc

SEQ ID NO: 4425453 - DNA, 25 bp, Homo sapien
caaggaagcctacaccatgtgtgtc

SEQ ID NO: 4425454 - DNA, 25 bp, Homo sapien
catggtcctggccaattcatcactt

SEQ ID NO: 4425455 - DNA, 25 bp, Homo sapien
gaatgacggtatagagttttcactc

SEQ ID NO: 4425456 - DNA, 25 bp, Homo sapien
tcgacgagaatgacggtatagagtt

SEQ ID NO: 4425457 - DNA, 25 bp, Homo sapien
cagttcgacgagaatgacggtatag

SEQ ID NO: 4425458 - DNA, 25 bp, Homo sapien
ggacctcagttcgacgagaatgacg

SEQ ID NO: 4425459 - DNA, 25 bp, Homo sapien
caaacttggccatcagaggcaggct

SEQ ID NO: 4425460 - DNA, 25 bp, Homo sapien
ggtgccacccatgtcaacgaatcaa

SEQ ID NO: 4425461 - DNA, 25 bp, Homo sapien
tccagacagcacatgagttatccag

SEQ ID NO: 4425462 - DNA, 25 bp, Homo sapien
tgtcctgtgcatgggagatcctact

SEQ ID NO: 4425463 - DNA, 25 bp, Homo sapien
atccaggaggatcccaacagcctct

SEQ ID NO: 4425464 - DNA, 25 bp, Homo sapien
gaccatccctcatgacacgggtttg

SEQ ID NO: 4425465 - DNA, 25 bp, Homo sapien
ggaggatcccaacagcctctggagg

SEQ ID NO: 4425466 - DNA, 25 bp, Homo sapien
aagatgatgaccatccctcatgaca

SEQ ID NO: 4425467 - DNA, 25 bp, Homo sapien
gaggatgacggtatagagttttcac

SEQ ID NO: 4425468 - DNA, 25 bp, Homo sapien
gacgaggatgacggtatagagtttt

SEQ ID NO: 4425469 - DNA, 25 bp, Homo sapien
cgaggatgacggtatagagttttca

SEQ ID NO: 4425470 - DNA, 25 bp, Homo sapien
gatgacggtatagagttttcactca

SEQ ID NO: 4425471 - DNA, 25 bp, Homo sapien
gatctgctaagaacaagatcatcca

SEQ ID NO: 4425472 - DNA, 25 bp, Homo sapien
tgccacatccagtgatctgctaaga

SEQ ID NO: 4425473 - DNA, 25 bp, Homo sapien
gaacaagatcatccattgtctccac

SEQ ID NO: 4425474 - DNA, 25 bp, Homo sapien
accacacatgtcctaggactccctg

SEQ ID NO: 4425475 - DNA, 25 bp, Homo sapien
ttccaaggaatgcatgtatgaaagt

SEQ ID NO: 4425476 - DNA, 25 bp, Homo sapien
tttccaaggaatgcatgtatgaaag

SEQ ID NO: 4425477 - DNA, 25 bp, Homo sapien
tccaaggaatgcatgtatgaaagtc

SEQ ID NO: 4425478 - DNA, 25 bp, Homo sapien
ctttccaaggaatgcatgtatgaaa

SEQ ID NO: 4425479 - DNA, 25 bp, Homo sapien
atctccaaggatcgcacaagaagaa

SEQ ID NO: 4425480 - DNA, 25 bp, Homo sapien
gatcgcacaagaagaagattgtccc

SEQ ID NO: 4425481 - DNA, 25 bp, Homo sapien
ttcagaagggatacaacagcctcca

SEQ ID NO: 4425482 - DNA, 25 bp, Homo sapien
gattgtccctcgaagatacctcctt

SEQ ID NO: 4425483 - DNA, 25 bp, Homo sapien
tcgacgaggatgacggtatagagtt

SEQ ID NO: 4425484 - DNA, 25 bp, Homo sapien
gaggatgacggtatagagttttcac

SEQ ID NO: 4425485 - DNA, 25 bp, Homo sapien
ctcagttcgacgaggatgacggtat

SEQ ID NO: 4425486 - DNA, 25 bp, Homo sapien
gatgacggtatagagttttcactca

SEQ ID NO: 4425487 - DNA, 25 bp, Homo sapien
taaggaatccactagcacctgaagg

SEQ ID NO: 4425488 - DNA, 25 bp, Homo sapien
ctgaaggagcccatgccacacatat

SEQ ID NO: 4425489 - DNA, 25 bp, Homo sapien
aagaccaagattgtccctcgtggcc

SEQ ID NO: 4425490 - DNA, 25 bp, Homo sapien
cacacatatcaagggactccctatc

SEQ ID NO: 4425491 - DNA, 25 bp, Homo sapien
tcgacgaggatgacggtatagagtt

SEQ ID NO: 4425492 - DNA, 25 bp, Homo sapien
gaggatgacggtatagagttttcac

SEQ ID NO: 4425493 - DNA, 25 bp, Homo sapien
ctcagttcgacgaggatgacggtat

SEQ ID NO: 4425494 - DNA, 25 bp, Homo sapien
gatgacggtatagagttttcactca

SEQ ID NO: 4425495 - DNA, 25 bp, Homo sapien
tcgacgaggatgacggtatagagtt

SEQ ID NO: 4425496 - DNA, 25 bp, Homo sapien
gaggatgacggtatagagttttcac

SEQ ID NO: 4425497 - DNA, 25 bp, Homo sapien
ctcagttcgacgaggatgacggtat

SEQ ID NO: 4425498 - DNA, 25 bp, Homo sapien
gatgacggtatagagttttcactca

SEQ ID NO: 4425499 - DNA, 25 bp, Homo sapien
gacaagatgacaatcattcctcatg

SEQ ID NO: 4425500 - DNA, 25 bp, Homo sapien
cctcatgatacaagcctgcctttca

SEQ ID NO: 4425501 - DNA, 25 bp, Homo sapien
atctccaagaatcagacaagatgac

SEQ ID NO: 4425502 - DNA, 25 bp, Homo sapien
tcctcatgatacaagcctgcctttc

SEQ ID NO: 4425503 - DNA, 25 bp, Homo sapien
cacaggtttcatccctgcaaatgag

SEQ ID NO: 4425504 - DNA, 25 bp, Homo sapien
ggaaactcagggtgctttggaatga

SEQ ID NO: 4425505 - DNA, 25 bp, Homo sapien
cacacaggtttcatccctgcaaatg

SEQ ID NO: 4425506 - DNA, 25 bp, Homo sapien
ggtgctttggaatgaaatcacttac

SEQ ID NO: 4425507 - DNA, 25 bp, Homo sapien
ggacctcagttcgacgaggatgaca

SEQ ID NO: 4425508 - DNA, 25 bp, Homo sapien
cgacgaggatgacagtatagagttt

SEQ ID NO: 4425509 - DNA, 25 bp, Homo sapien
cagttcgacgaggatgacagtatag

SEQ ID NO: 4425510 - DNA, 25 bp, Homo sapien
cctcagttcgacgaggatgacagta

SEQ ID NO: 4425511 - DNA, 25 bp, Homo sapien
tatcagaaccagcttggagcaggag

SEQ ID NO: 4425512 - DNA, 25 bp, Homo sapien
cacaggcgtgcttcagaaagacaga

SEQ ID NO: 4425513 - DNA, 25 bp, Homo sapien
caggagctcacctttacgtgcaaaa

SEQ ID NO: 4425514 - DNA, 25 bp, Homo sapien
taaagagcactgacattgaccatcc

SEQ ID NO: 4425515 - DNA, 25 bp, Homo sapien
tcgacgaggatgacggtatagagtt

SEQ ID NO: 4425516 - DNA, 25 bp, Homo sapien
gaggatgacggtatagagttttcac

SEQ ID NO: 4425517 - DNA, 25 bp, Homo sapien
ctcagttcgacgaggatgacggtat

SEQ ID NO: 4425518 - DNA, 25 bp, Homo sapien
gatgacggtatagagttttcactca

SEQ ID NO: 4425519 - DNA, 25 bp, Homo sapien
tcctaagcctgaacggatgccttgg

SEQ ID NO: 4425520 - DNA, 25 bp, Homo sapien
cagagtacgtcatcccactaaagag

SEQ ID NO: 4425521 - DNA, 25 bp, Homo sapien
taacggacacaaggatgctcatctg

SEQ ID NO: 4425522 - DNA, 25 bp, Homo sapien
caatgatactcacaaaagccttggg

SEQ ID NO: 4425523 - DNA, 25 bp, Homo sapien
ggttccaagggccatgtcatccagc

SEQ ID NO: 4425524 - DNA, 25 bp, Homo sapien
aaacatggacgtgcatcagaaaggc

SEQ ID NO: 4425525 - DNA, 25 bp, Homo sapien
tgagacgacaatcatcccttgctga

SEQ ID NO: 4425526 - DNA, 25 bp, Homo sapien
agggatccaacagcctccgaaagag

SEQ ID NO: 4425527 - DNA, 25 bp, Homo sapien
tcgacgaggatgacggtatagagtt

SEQ ID NO: 4425528 - DNA, 25 bp, Homo sapien
gaggatgacggtatagagttttcac

SEQ ID NO: 4425529 - DNA, 25 bp, Homo sapien
ctcagttcgacgaggatgacggtat

SEQ ID NO: 4425530 - DNA, 25 bp, Homo sapien
gatgacggtatagagttttcactca

SEQ ID NO: 4425531 - DNA, 25 bp, Homo sapien
tagccactggccttacttccatggc

SEQ ID NO: 4425532 - DNA, 25 bp, Homo sapien
cccaagatgaagactgtccctcgta

SEQ ID NO: 4425533 - DNA, 25 bp, Homo sapien
ctagggatctcccaagatgaagact

SEQ ID NO: 4425534 - DNA, 25 bp, Homo sapien
gaagactgtccctcgtagccactgg

SEQ ID NO: 4425535 - DNA, 25 bp, Homo sapien
atgtattgaggtcatcatcgatcca

SEQ ID NO: 4425536 - DNA, 25 bp, Homo sapien
catgtattgaggtcatcatcgatcc

SEQ ID NO: 4425537 - DNA, 25 bp, Homo sapien
cacgccacatatgctgcacgtgccc

SEQ ID NO: 4425538 - DNA, 25 bp, Homo sapien
agcccacgccacatatgctgcacgt

SEQ ID NO: 4425539 - DNA, 25 bp, Homo sapien
gacaaagatgatccatcgcagcctc

SEQ ID NO: 4425540 - DNA, 25 bp, Homo sapien
gcccacgccacatatgctgcacgtg

SEQ ID NO: 4425541 - DNA, 25 bp, Homo sapien
gatgacggtatagagttttcactca

SEQ ID NO: 4425542 - DNA, 25 bp, Homo sapien
tggaacctgcgtcaacaaatggaag

SEQ ID NO: 4425543 - DNA, 25 bp, Homo sapien
agttatgtgtgctaccctgctctca

SEQ ID NO: 4425544 - DNA, 25 bp, Homo sapien
aagcctggacaaacccctcaatgga

SEQ ID NO: 4425545 - DNA, 25 bp, Homo sapien
acaagtcaaacctcgctgtgcagag

SEQ ID NO: 4425546 - DNA, 25 bp, Homo sapien
gaccagtagccgagtacagctgtga

SEQ ID NO: 4425547 - DNA, 25 bp, Homo sapien
gcactggaagcatatcaaatcgaag

SEQ ID NO: 4425548 - DNA, 25 bp, Homo sapien
gaactcctccgccactgtgttaaat

SEQ ID NO: 4425549 - DNA, 25 bp, Homo sapien
tctgcagagagatgcttagggagcc

SEQ ID NO: 4425550 - DNA, 25 bp, Homo sapien
attagcataattggaaattgttctg

SEQ ID NO: 4425551 - DNA, 25 bp, Homo sapien
aataattagcataattggaaattgt

SEQ ID NO: 4425552 - DNA, 25 bp, Homo sapien
acaaataattagcataattggaaat

SEQ ID NO: 4425553 - DNA, 25 bp, Homo sapien
taattagcataattggaaattgttc

SEQ ID NO: 4425554 - DNA, 25 bp, Homo sapien
acacaaccatcctggaaatcgaagc

SEQ ID NO: 4425555 - DNA, 25 bp, Homo sapien
gactctttaacagaactcatagaaa

SEQ ID NO: 4425556 - DNA, 25 bp, Homo sapien
ttctacgctccattttcagactctt

SEQ ID NO: 4425557 - DNA, 25 bp, Homo sapien
aatcgaagcatgtcttctacgctcc

SEQ ID NO: 4425558 - DNA, 25 bp, Homo sapien
tagaagtccaagtctagatatgaaa

SEQ ID NO: 4425559 - DNA, 25 bp, Homo sapien
gatagaagtccaagtctagatatga

SEQ ID NO: 4425560 - DNA, 25 bp, Homo sapien
atagaagtccaagtctagatatgaa

SEQ ID NO: 4425561 - DNA, 25 bp, Homo sapien
gatacacggcatctcagagtacaga

SEQ ID NO: 4425562 - DNA, 25 bp, Homo sapien
gaagtaccagtcagcaccagttgga

SEQ ID NO: 4425563 - DNA, 25 bp, Homo sapien
tcagctctgatagcaagactgcctg

SEQ ID NO: 4425564 - DNA, 25 bp, Homo sapien
ccttcgccatctcaggaagtaccag

SEQ ID NO: 4425565 - DNA, 25 bp, Homo sapien
taactttcgtatgaaaatctgtgct

SEQ ID NO: 4425566 - DNA, 25 bp, Homo sapien
tcgtatgaaaatctgtgctggttcc

SEQ ID NO: 4425567 - DNA, 25 bp, Homo sapien
gaaaatctgtgctggttccacaatg

SEQ ID NO: 4425568 - DNA, 25 bp, Homo sapien
gaaataactttcgtatgaaaatctg

SEQ ID NO: 4425569 - DNA, 25 bp, Homo sapien
cagactttttcatgatacactccat

SEQ ID NO: 4425570 - DNA, 25 bp, Homo sapien
tttgaggttttgatgtcagactttt

SEQ ID NO: 4425571 - DNA, 25 bp, Homo sapien
tgaggttttgatgtcagactttttc

SEQ ID NO: 4425572 - DNA, 25 bp, Homo sapien
gtcagactttttcatgatacactcc

SEQ ID NO: 4425573 - DNA, 25 bp, Homo sapien
gcacacagctgtcacctttggaggc

SEQ ID NO: 4425574 - DNA, 25 bp, Homo sapien
tttataaaagggaccttgagcctga

SEQ ID NO: 4425575 - DNA, 25 bp, Homo sapien
tgtggcagacactgagcacacagct

SEQ ID NO: 4425576 - DNA, 25 bp, Homo sapien
tcacctttggaggcactgacccaca

SEQ ID NO: 4425577 - DNA, 25 bp, Homo sapien
tcagattccgatgagatccatttta

SEQ ID NO: 4425578 - DNA, 25 bp, Homo sapien
gattccgatgagatccattttaaag

SEQ ID NO: 4425579 - DNA, 25 bp, Homo sapien
tccgatgagatccattttaaagtca

SEQ ID NO: 4425580 - DNA, 25 bp, Homo sapien
ttccgatgagatccattttaaagtc

SEQ ID NO: 4425581 - DNA, 25 bp, Homo sapien
cctcagctcacagaagtggcacaga

SEQ ID NO: 4425582 - DNA, 25 bp, Homo sapien
gacctcagctcacagaagtggcaca

SEQ ID NO: 4425583 - DNA, 25 bp, Homo sapien
acctcagctcacagaagtggcacag

SEQ ID NO: 4425584 - DNA, 25 bp, Homo sapien
caaaattagcacttcactggtttgg

SEQ ID NO: 4425585 - DNA, 25 bp, Homo sapien
agaagtgtattggtgtgtttcttca

SEQ ID NO: 4425586 - DNA, 25 bp, Homo sapien
gcacttcactggtttggcaatgaaa

SEQ ID NO: 4425587 - DNA, 25 bp, Homo sapien
cacagctacgttagctggtacaaat

SEQ ID NO: 4425588 - DNA, 25 bp, Homo sapien
tcatccatatgaaacctagatcttg

SEQ ID NO: 4425589 - DNA, 25 bp, Homo sapien
tcttgtcttgcctcaaagggaagaa

SEQ ID NO: 4425590 - DNA, 25 bp, Homo sapien
aacctagatcttggtctatgctgtc

SEQ ID NO: 4425591 - DNA, 25 bp, Homo sapien
ttcttgtcttgcctcaaagggaaga

SEQ ID NO: 4425592 - DNA, 25 bp, Homo sapien
tcagattccgatgagatccattttt

SEQ ID NO: 4425593 - DNA, 25 bp, Homo sapien
agattccgatgagatccattttttt

SEQ ID NO: 4425594 - DNA, 25 bp, Homo sapien
tcaagagactgctcattgaccagat

SEQ ID NO: 4425595 - DNA, 25 bp, Homo sapien
gagtaggtgaaataacgtcccatga

SEQ ID NO: 4425596 - DNA, 25 bp, Homo sapien
gataattctgcgagctcaaatgtgt

SEQ ID NO: 4425597 - DNA, 25 bp, Homo sapien
catgaatctcactatgccctggttc

SEQ ID NO: 4425598 - DNA, 25 bp, Homo sapien
ggaagttatgaaacgaaatttgcca

SEQ ID NO: 4425599 - DNA, 25 bp, Homo sapien
cttacatctttgatcactatagaat

SEQ ID NO: 4425600 - DNA, 25 bp, Homo sapien
ggactatccaatgaatgacaagaaa

SEQ ID NO: 4425601 - DNA, 25 bp, Homo sapien
taagaattcacagtagacactcact

SEQ ID NO: 4425602 - DNA, 25 bp, Homo sapien
atgacaaaattagccctccactggt

SEQ ID NO: 4425603 - DNA, 25 bp, Homo sapien
tgtcaccctgggacatgctgaccca

SEQ ID NO: 4425604 - DNA, 25 bp, Homo sapien
ggagtgtcatgatctcttaacagga

SEQ ID NO: 4425605 - DNA, 25 bp, Homo sapien
ttaatcatggagaccagcatcactg

SEQ ID NO: 4425606 - DNA, 25 bp, Homo sapien
aattcctactggtccctaaggacag

SEQ ID NO: 4425607 - DNA, 25 bp, Homo sapien
gacctcagctcacagaagtggtaca

SEQ ID NO: 4425608 - DNA, 25 bp, Homo sapien
tgttgcctcccagatgcgttagctg

SEQ ID NO: 4425609 - DNA, 25 bp, Homo sapien
tcccagatgcgttagctggtacaag

SEQ ID NO: 4425610 - DNA, 25 bp, Homo sapien
cagttaaagtccatggaattctgtg

SEQ ID NO: 4425611 - DNA, 25 bp, Homo sapien
gttaaagtccatggaattctgtgaa

SEQ ID NO: 4425612 - DNA, 25 bp, Homo sapien
gcacatagctatctgtcaccaatga

SEQ ID NO: 4425613 - DNA, 25 bp, Homo sapien
gagtgtcctgattccctaagaaaaa

SEQ ID NO: 4425614 - DNA, 25 bp, Homo sapien
tatgaagcccagtttcttggtccac

SEQ ID NO: 4425615 - DNA, 25 bp, Homo sapien
gctttttaacatgtgagaattccca

SEQ ID NO: 4425616 - DNA, 25 bp, Homo sapien
gtggtttgctcactcgttttgctca

SEQ ID NO: 4425617 - DNA, 25 bp, Homo sapien
cgttttgctcagattccaacgagat

SEQ ID NO: 4425618 - DNA, 25 bp, Homo sapien
gctcagattccaacgagattcattt

SEQ ID NO: 4425619 - DNA, 25 bp, Homo sapien
gctcactcgttttgctcagattcca

SEQ ID NO: 4425620 - DNA, 25 bp, Homo sapien
gccattttggtaccagttgctgacc

SEQ ID NO: 4425621 - DNA, 25 bp, Homo sapien
tatgagagtatggacactgccagcc

SEQ ID NO: 4425622 - DNA, 25 bp, Homo sapien
tctaatgaacctgagagactgacct

SEQ ID NO: 4425623 - DNA, 25 bp, Homo sapien
ggaagtcgacaaatgaaaccctcat

SEQ ID NO: 4425624 - DNA, 25 bp, Homo sapien
ctctgaagtgtattgttctcattgc

SEQ ID NO: 4425625 - DNA, 25 bp, Homo sapien
gacaacgaatctggtacacgtgaca

SEQ ID NO: 4425626 - DNA, 25 bp, Homo sapien
gagcagcagtaggaattccatgcaa

SEQ ID NO: 4425627 - DNA, 25 bp, Homo sapien
gacaaaatcagcaggttactggagc

SEQ ID NO: 4425628 - DNA, 25 bp, Homo sapien
tattagggcctcacaccatttggat

SEQ ID NO: 4425629 - DNA, 25 bp, Homo sapien
ccatttggattaacagactgcttga

SEQ ID NO: 4425630 - DNA, 25 bp, Homo sapien
tacaacaggcttactatgcacaagt

SEQ ID NO: 4425631 - DNA, 25 bp, Homo sapien
cgaacccaggaaaaatgcacttact

SEQ ID NO: 4425632 - DNA, 25 bp, Homo sapien
actttccttcatgtcacacctcaag

SEQ ID NO: 4425633 - DNA, 25 bp, Homo sapien
ttgaattccccctggcccttgagaa

SEQ ID NO: 4425634 - DNA, 25 bp, Homo sapien
tgtcacacctcaagtagaaggaata

SEQ ID NO: 4425635 - DNA, 25 bp, Homo sapien
ttcatgtcacacctcaagtagaagg

SEQ ID NO: 4425636 - DNA, 25 bp, Homo sapien
gacctcagctcacagaagtgtcttg

SEQ ID NO: 4425637 - DNA, 25 bp, Homo sapien
acctcagctcacagaagtgtcttgg

SEQ ID NO: 4425638 - DNA, 25 bp, Homo sapien
ccccagggaatgaaacaggtaagag

SEQ ID NO: 4425639 - DNA, 25 bp, Homo sapien
gcatttctttgggatggcagtgaga

SEQ ID NO: 4425640 - DNA, 25 bp, Homo sapien
tgaaacaggtaagagtgacaagatc

SEQ ID NO: 4425641 - DNA, 25 bp, Homo sapien
gggatggcagtgagaattccatgca

SEQ ID NO: 4425642 - DNA, 25 bp, Homo sapien
ctcaatacttttctcatgtcacatc

SEQ ID NO: 4425643 - DNA, 25 bp, Homo sapien
attttatatgaaacccagttcttgg

SEQ ID NO: 4425644 - DNA, 25 bp, Homo sapien
ggagaattcctacggattcttgaag

SEQ ID NO: 4425645 - DNA, 25 bp, Homo sapien
tcctacggattcttgaagatgaggt

SEQ ID NO: 4425646 - DNA, 25 bp, Homo sapien
catcagcttggggtacactgaccca

SEQ ID NO: 4425647 - DNA, 25 bp, Homo sapien
tcatggtcattggagtgtcacgatc

SEQ ID NO: 4425648 - DNA, 25 bp, Homo sapien
cagtcaatgactggccaatggctga

SEQ ID NO: 4425649 - DNA, 25 bp, Homo sapien
ggtaccttaagcctgggatatgtga

SEQ ID NO: 4425650 - DNA, 25 bp, Homo sapien
gaaaaaagtatacttattccacaga

SEQ ID NO: 4425651 - DNA, 25 bp, Homo sapien
agtcctttttccaagacctgttcag

SEQ ID NO: 4425652 - DNA, 25 bp, Homo sapien
aggtgtatgtccagaaaaaagtata

SEQ ID NO: 4425653 - DNA, 25 bp, Homo sapien
caaggtgtatgtccagaaaaaagta

SEQ ID NO: 4425654 - DNA, 25 bp, Homo sapien
agttatgaggaattatgatacatac

SEQ ID NO: 4425655 - DNA, 25 bp, Homo sapien
ccacaggggcaattagagaagttga

SEQ ID NO: 4425656 - DNA, 25 bp, Homo sapien
tgagaaagaaatcttctacatcgaa

SEQ ID NO: 4425657 - DNA, 25 bp, Homo sapien
tctacatcgaatgtttcctgataag

SEQ ID NO: 4425658 - DNA, 25 bp, Homo sapien
ggttaaaaatctatgcaactctagt

SEQ ID NO: 4425659 - DNA, 25 bp, Homo sapien
tcagttgaggaagccggtaaaagtg

SEQ ID NO: 4425660 - DNA, 25 bp, Homo sapien
cagatcttcattggcgtaaaggtta

SEQ ID NO: 4425661 - DNA, 25 bp, Homo sapien
ggtaaaagtgacatatcagatcttc

SEQ ID NO: 4425662 - DNA, 25 bp, Homo sapien
tgccacactgctgaggatcagcctc

SEQ ID NO: 4425663 - DNA, 25 bp, Homo sapien
caggcccatagaaagatcatcagca

SEQ ID NO: 4425664 - DNA, 25 bp, Homo sapien
tctccacgcttcaggcccatagaaa

SEQ ID NO: 4425665 - DNA, 25 bp, Homo sapien
gtgggcaccgcataccccttagtcg

SEQ ID NO: 4425666 - DNA, 25 bp, Homo sapien
tccaagaagatgttggcccggtgaa

SEQ ID NO: 4425667 - DNA, 25 bp, Homo sapien
caggtatggtactgtcccgggacat

SEQ ID NO: 4425668 - DNA, 25 bp, Homo sapien
cccgggacatgtgactagaagaact

SEQ ID NO: 4425669 - DNA, 25 bp, Homo sapien
taaaagtggtcacagcaatgcaggc

SEQ ID NO: 4425670 - DNA, 25 bp, Homo sapien
tgccctcacgagagcaagcatgact

SEQ ID NO: 4425671 - DNA, 25 bp, Homo sapien
aaaatgcttagcgacctgacctggc

SEQ ID NO: 4425672 - DNA, 25 bp, Homo sapien
tgggaccacatagctgaacaaactg

SEQ ID NO: 4425673 - DNA, 25 bp, Homo sapien
tattaagtcatggagaccaagcccc

SEQ ID NO: 4425674 - DNA, 25 bp, Homo sapien
ggtgagaattccaagcggcaaaatg

SEQ ID NO: 4425675 - DNA, 25 bp, Homo sapien
aaacagtacttctttggtgtggagg

SEQ ID NO: 4425676 - DNA, 25 bp, Homo sapien
tgtcttccaccaatatcacttccaa

SEQ ID NO: 4425677 - DNA, 25 bp, Homo sapien
tgcagtgcatcgttttgatctttcc

SEQ ID NO: 4425678 - DNA, 25 bp, Homo sapien
tgaccaatgggctctgtaaagtgtg

SEQ ID NO: 4425679 - DNA, 25 bp, Homo sapien
tgcttactgtgagaattcccactgg

SEQ ID NO: 4425680 - DNA, 25 bp, Homo sapien
aaaggaggcttcactatgtatctgc

SEQ ID NO: 4425681 - DNA, 25 bp, Homo sapien
tagagaccaggatacaggaacgatg

SEQ ID NO: 4425682 - DNA, 25 bp, Homo sapien
tccccactggctacaaacatacttg

SEQ ID NO: 4425683 - DNA, 25 bp, Homo sapien
ccatagacagcgttcccagagtagc

SEQ ID NO: 4425684 - DNA, 25 bp, Homo sapien
caaaaggacacactgctcaggcctc

SEQ ID NO: 4425685 - DNA, 25 bp, Homo sapien
tacaagaggcttcccaaaatagatc

SEQ ID NO: 4425686 - DNA, 25 bp, Homo sapien
cacactgtgactgggaggtggacac

SEQ ID NO: 4425687 - DNA, 25 bp, Homo sapien
tatatggcatgcctggagtccacac

SEQ ID NO: 4425688 - DNA, 25 bp, Homo sapien
gtagattgcatcaagctgtcccatg

SEQ ID NO: 4425689 - DNA, 25 bp, Homo sapien
taaggcagctatctggaccaatcac

SEQ ID NO: 4425690 - DNA, 25 bp, Homo sapien
tatacagagcaatacgatcatggtc

SEQ ID NO: 4425691 - DNA, 25 bp, Homo sapien
tctgaaagttaaggcaagggcatgg

SEQ ID NO: 4425692 - DNA, 25 bp, Homo sapien
gagtggccagctaatgactacgtta

SEQ ID NO: 4425693 - DNA, 25 bp, Homo sapien
tccaatggacacagagagtggccag

SEQ ID NO: 4425694 - DNA, 25 bp, Homo sapien
gagtaggttgtcagctcattctctg

SEQ ID NO: 4425695 - DNA, 25 bp, Homo sapien
ctgcaagggtgtccaagagaccaca

SEQ ID NO: 4425696 - DNA, 25 bp, Homo sapien
cagggagtaggttgtcagctcattc

SEQ ID NO: 4425697 - DNA, 25 bp, Homo sapien
agggtgtccaagagaccacaggtag

SEQ ID NO: 4425698 - DNA, 25 bp, Homo sapien
gaactgtatccaccctcagctggct

SEQ ID NO: 4425699 - DNA, 25 bp, Homo sapien
tcggattgccgaggaagacctgttg

SEQ ID NO: 4425700 - DNA, 25 bp, Homo sapien
tatgacaggcaatccacaaggtgct

SEQ ID NO: 4425701 - DNA, 25 bp, Homo sapien
taaagagctgacacataatggtctt

SEQ ID NO: 4425702 - DNA, 25 bp, Homo sapien
ctttagtgggtggtctaggcaatgc

SEQ ID NO: 4425703 - DNA, 25 bp, Homo sapien
tttgctgataacattcactcccaga

SEQ ID NO: 4425704 - DNA, 25 bp, Homo sapien
tgctgataacattcactcccagaag

SEQ ID NO: 4425705 - DNA, 25 bp, Homo sapien
tagtgggtggtctaggcaatgcata

SEQ ID NO: 4425706 - DNA, 25 bp, Homo sapien
gctcaatttctactaagacatggct

SEQ ID NO: 4425707 - DNA, 25 bp, Homo sapien
tcaatttctactaagacatggcttc

SEQ ID NO: 4425708 - DNA, 25 bp, Homo sapien
acagctcaatttctactaagacatg

SEQ ID NO: 4425709 - DNA, 25 bp, Homo sapien
aagcaaggactattttaactaacat

SEQ ID NO: 4425710 - DNA, 25 bp, Homo sapien
gaaagagaagagtctccatgcggaa

SEQ ID NO: 4425711 - DNA, 25 bp, Homo sapien
ggaatggcaccaactcaacaaatcc

SEQ ID NO: 4425712 - DNA, 25 bp, Homo sapien
ggtgaagctggcagtagaaggaatg

SEQ ID NO: 4425713 - DNA, 25 bp, Homo sapien
gaagactgtgtcattgttttggtga

SEQ ID NO: 4425714 - DNA, 25 bp, Homo sapien
tatatagggaggttcattgcacaga

SEQ ID NO: 4425715 - DNA, 25 bp, Homo sapien
tacaatatggccacacacgtggatc

SEQ ID NO: 4425716 - DNA, 25 bp, Homo sapien
tatgggagcactgagcaattccacc

SEQ ID NO: 4425717 - DNA, 25 bp, Homo sapien
tatatcctctactgaggctcctggg

SEQ ID NO: 4425718 - DNA, 25 bp, Homo sapien
aaagtgtgcacatacttaatcccag

SEQ ID NO: 4425719 - DNA, 25 bp, Homo sapien
ggctgtaggaaagctggcaatctca

SEQ ID NO: 4425720 - DNA, 25 bp, Homo sapien
aagcgaacatggttatacttggaca

SEQ ID NO: 4425721 - DNA, 25 bp, Homo sapien
taaatgagctcttcgaaatcaggaa

SEQ ID NO: 4425722 - DNA, 25 bp, Homo sapien
ttatataggcaaacagctcacctag

SEQ ID NO: 4425723 - DNA, 25 bp, Homo sapien
tcccacaaggtattgcatgacaaat

SEQ ID NO: 4425724 - DNA, 25 bp, Homo sapien
cattattaaaccctatcaaggtggt

SEQ ID NO: 4425725 - DNA, 25 bp, Homo sapien
ccttgctgcaggtaagtttaacaaa

SEQ ID NO: 4425726 - DNA, 25 bp, Homo sapien
tgggaataagacctgataccacccc

SEQ ID NO: 4425727 - DNA, 25 bp, Homo sapien
ccagcagagtcctgcccagcaagat

SEQ ID NO: 4425728 - DNA, 25 bp, Homo sapien
ggaataagacctgataccaccccca

SEQ ID NO: 4425729 - DNA, 25 bp, Homo sapien
aataagacctgataccacccccagc

SEQ ID NO: 4425730 - DNA, 25 bp, Homo sapien
ggtggcagactttcctaacatggta

SEQ ID NO: 4425731 - DNA, 25 bp, Homo sapien
ccagtagggtctgttcattcaagga

SEQ ID NO: 4425732 - DNA, 25 bp, Homo sapien
ttattcattaacaaaggcacagcag

SEQ ID NO: 4425733 - DNA, 25 bp, Homo sapien
taaacactgatagtgagactagggc

SEQ ID NO: 4425734 - DNA, 25 bp, Homo sapien
tatacaagaaggataacagtgacca

SEQ ID NO: 4425735 - DNA, 25 bp, Homo sapien
cacggacataggtgaataactctta

SEQ ID NO: 4425736 - DNA, 25 bp, Homo sapien
tcaagaatgcaatgttgggctaaca

SEQ ID NO: 4425737 - DNA, 25 bp, Homo sapien
gaccaatgcagtctcccataataag

SEQ ID NO: 4425738 - DNA, 25 bp, Homo sapien
gacaggatttacaatacagccaacc

SEQ ID NO: 4425739 - DNA, 25 bp, Homo sapien
taacactatgcaagagaaccctgat

SEQ ID NO: 4425740 - DNA, 25 bp, Homo sapien
taccagacgataaggaagacgacac

SEQ ID NO: 4425741 - DNA, 25 bp, Homo sapien
gatcacagcactgaagatgccatcg

SEQ ID NO: 4425742 - DNA, 25 bp, Homo sapien
caactttgtggaggcaccttttctg

SEQ ID NO: 4425743 - DNA, 25 bp, Homo sapien
acatagccttgtggatatcatggcc

SEQ ID NO: 4425744 - DNA, 25 bp, Homo sapien
gcctataacatgtaaggagcctgaa

SEQ ID NO: 4425745 - DNA, 25 bp, Homo sapien
taccgaagtagtgcatgaacatagc

SEQ ID NO: 4425746 - DNA, 25 bp, Homo sapien
tggagactacacacagaagtagact

SEQ ID NO: 4425747 - DNA, 25 bp, Homo sapien
gaacacacttggtgctacgaaacag

SEQ ID NO: 4425748 - DNA, 25 bp, Homo sapien
catgctggtacacaaaatggtatcc

SEQ ID NO: 4425749 - DNA, 25 bp, Homo sapien
gtagagtgtgtgagaaaccaagctt

SEQ ID NO: 4425750 - DNA, 25 bp, Homo sapien
tcaaattacaccataccacttcacg

SEQ ID NO: 4425751 - DNA, 25 bp, Homo sapien
taccacttcacgcttagtgcaggtg

SEQ ID NO: 4425752 - DNA, 25 bp, Homo sapien
aatctaaacccatcttcaaattaca

SEQ ID NO: 4425753 - DNA, 25 bp, Homo sapien
gtcaccctggctacaatatacattt

SEQ ID NO: 4425754 - DNA, 25 bp, Homo sapien
catgtgctggcatttatgtggacgt

SEQ ID NO: 4425755 - DNA, 25 bp, Homo sapien
tcaacagaagttggcatgatcaggc

SEQ ID NO: 4425756 - DNA, 25 bp, Homo sapien
taccaaggagcgtagtggctagata

SEQ ID NO: 4425757 - DNA, 25 bp, Homo sapien
tggctagatatatggcaggacaaca

SEQ ID NO: 4425758 - DNA, 25 bp, Homo sapien
tgctgctgcctagcctcactagagt

SEQ ID NO: 4425759 - DNA, 25 bp, Homo sapien
catgactgctaggagctatggctca

SEQ ID NO: 4425760 - DNA, 25 bp, Homo sapien
aaaatggtggcagcacagtacgcga

SEQ ID NO: 4425761 - DNA, 25 bp, Homo sapien
tggctagcccgggaaatgaaaattc

SEQ ID NO: 4425762 - DNA, 25 bp, Homo sapien
tacttatccttcaactcctcctggg

SEQ ID NO: 4425763 - DNA, 25 bp, Homo sapien
tggcaatgaaccactaaaatcaggt

SEQ ID NO: 4425764 - DNA, 25 bp, Homo sapien
tccacgttccttgagagaatatgtg

SEQ ID NO: 4425765 - DNA, 25 bp, Homo sapien
gaatcagtcacaatactatccacgt

SEQ ID NO: 4425766 - DNA, 25 bp, Homo sapien
tcatatcttgtttagattttgattc

SEQ ID NO: 4425767 - DNA, 25 bp, Homo sapien
aattccaaatgctttcccaattcca

SEQ ID NO: 4425768 - DNA, 25 bp, Homo sapien
catatcttgtttagattttgattct

SEQ ID NO: 4425769 - DNA, 25 bp, Homo sapien
ttgtcatatcttgtttagattttga

SEQ ID NO: 4425770 - DNA, 25 bp, Homo sapien
catagacagtagtatgtccaatacc

SEQ ID NO: 4425771 - DNA, 25 bp, Homo sapien
cactaatgcaagtgaaggcttctga

SEQ ID NO: 4425772 - DNA, 25 bp, Homo sapien
cagtaccagcaagtatacattgtag

SEQ ID NO: 4425773 - DNA, 25 bp, Homo sapien
taaccagtggttgtgcactaatgca

SEQ ID NO: 4425774 - DNA, 25 bp, Homo sapien
tttgaaactgtcataccactgatgc

SEQ ID NO: 4425775 - DNA, 25 bp, Homo sapien
caggcgttggatccttaactttcaa

SEQ ID NO: 4425776 - DNA, 25 bp, Homo sapien
taggatagcatcaagtggagctgtc

SEQ ID NO: 4425777 - DNA, 25 bp, Homo sapien
tgtcaatccgtaagaacatcccatg

SEQ ID NO: 4425778 - DNA, 25 bp, Homo sapien
atgggccttagcattgccgcctggg

SEQ ID NO: 4425779 - DNA, 25 bp, Homo sapien
ccccgggtccatggaccattatgaa

SEQ ID NO: 4425780 - DNA, 25 bp, Homo sapien
atggtcatgggccttagcattgccg

SEQ ID NO: 4425781 - DNA, 25 bp, Homo sapien
gcattgccgcctggggtatcattgt

SEQ ID NO: 4425782 - DNA, 25 bp, Homo sapien
cagcagaacaccacctgttggagac

SEQ ID NO: 4425783 - DNA, 25 bp, Homo sapien
ctgttggagacctgctggagctgtc

SEQ ID NO: 4425784 - DNA, 25 bp, Homo sapien
tgttggagacctgctggagctgtca

SEQ ID NO: 4425785 - DNA, 25 bp, Homo sapien
cagaacaccacctgttggagacctg

SEQ ID NO: 4425786 - DNA, 25 bp, Homo sapien
aatggcctgagcttcagcgcaccgg

SEQ ID NO: 4425787 - DNA, 25 bp, Homo sapien
tggcctgagcttcagcgcaccgggg

SEQ ID NO: 4425788 - DNA, 25 bp, Homo sapien
atggcctgagcttcagcgcaccggg

SEQ ID NO: 4425789 - DNA, 25 bp, Homo sapien
ttttaagtcatcacctctcttcagg

SEQ ID NO: 4425790 - DNA, 25 bp, Homo sapien
ttcaggataatataaggttctcatc

SEQ ID NO: 4425791 - DNA, 25 bp, Homo sapien
gggcctcagcgtaatcctattgagc

SEQ ID NO: 4425792 - DNA, 25 bp, Homo sapien
tcagcgtaatcctattgagcatgat

SEQ ID NO: 4425793 - DNA, 25 bp, Homo sapien
atgccggtcaatgccagggggcctg

SEQ ID NO: 4425794 - DNA, 25 bp, Homo sapien
ggaggtgagtccgtggatcagaaga

SEQ ID NO: 4425795 - DNA, 25 bp, Homo sapien
aggtgagtccgtggatcagaagaag

SEQ ID NO: 4425796 - DNA, 25 bp, Homo sapien
gaggtgagtccgtggatcagaagaa

SEQ ID NO: 4425797 - DNA, 25 bp, Homo sapien
ctggaggtgagtccgtggatcagaa

SEQ ID NO: 4425798 - DNA, 25 bp, Homo sapien
tcttctcctttcctcgggcccaaga

SEQ ID NO: 4425799 - DNA, 25 bp, Homo sapien
caagccacactcagccaactgggga

SEQ ID NO: 4425800 - DNA, 25 bp, Homo sapien
cactcagccaactggggaacacagg

SEQ ID NO: 4425801 - DNA, 25 bp, Homo sapien
ggaacacagggtatcttctcctttc

SEQ ID NO: 4425802 - DNA, 25 bp, Homo sapien
ggagaccagagtgccagggagggct

SEQ ID NO: 4425803 - DNA, 25 bp, Homo sapien
ccagggagggctgagcttcagcgca

SEQ ID NO: 4425804 - DNA, 25 bp, Homo sapien
gacagtgggaccagggcaagtcttc

SEQ ID NO: 4425805 - DNA, 25 bp, Homo sapien
cttcagcgcactggggtctgggcac

SEQ ID NO: 4425806 - DNA, 25 bp, Homo sapien
gatttttaagtcatcacctctcttc

SEQ ID NO: 4425807 - DNA, 25 bp, Homo sapien
gggcctcagcataatcctattgagc

SEQ ID NO: 4425808 - DNA, 25 bp, Homo sapien
tcagcataatcctattgagcatgat

SEQ ID NO: 4425809 - DNA, 25 bp, Homo sapien
gcataatcctattgagcatgatttt

SEQ ID NO: 4425810 - DNA, 25 bp, Homo sapien
gctcaaggccagggggccctcatgg

SEQ ID NO: 4425811 - DNA, 25 bp, Homo sapien
ctcaaggccagggggccctcatggg

SEQ ID NO: 4425812 - DNA, 25 bp, Homo sapien
tgtggcctggtccatgagcccagca

SEQ ID NO: 4425813 - DNA, 25 bp, Homo sapien
catgagcccagcaggatccgctcac

SEQ ID NO: 4425814 - DNA, 25 bp, Homo sapien
agtgaccccatgtggcctggtccat

SEQ ID NO: 4425815 - DNA, 25 bp, Homo sapien
ctcagtgaccccatgtggcctggtc

SEQ ID NO: 4425816 - DNA, 25 bp, Homo sapien
ttcaggttgtctccctgaggaatcc

SEQ ID NO: 4425817 - DNA, 25 bp, Homo sapien
cagtggggattcaggttgtctccct

SEQ ID NO: 4425818 - DNA, 25 bp, Homo sapien
ctgaggaatccctcctgtcctgaag

SEQ ID NO: 4425819 - DNA, 25 bp, Homo sapien
tgtctccctgaggaatccctcctgt

SEQ ID NO: 4425820 - DNA, 25 bp, Homo sapien
atgggatccatgtgaaacagtgata

SEQ ID NO: 4425821 - DNA, 25 bp, Homo sapien
gtgaaacagtgatagtcatggacgt

SEQ ID NO: 4425822 - DNA, 25 bp, Homo sapien
gtgatagtcatggacgtgggggacc

SEQ ID NO: 4425823 - DNA, 25 bp, Homo sapien
aaacagtgatagtcatggacgtggg

SEQ ID NO: 4425824 - DNA, 25 bp, Homo sapien
acatgctctccctccatggacccac

SEQ ID NO: 4425825 - DNA, 25 bp, Homo sapien
attgggcccaacacaagtcctcctt

SEQ ID NO: 4425826 - DNA, 25 bp, Homo sapien
aacacaagtcctccttcagggtcac

SEQ ID NO: 4425827 - DNA, 25 bp, Homo sapien
caacacaagtcctccttcagggtca

SEQ ID NO: 4425828 - DNA, 25 bp, Homo sapien
ccaggccattgggcccaacacaagt

SEQ ID NO: 4425829 - DNA, 25 bp, Homo sapien
cccgatagaacagggcaccaggaag

SEQ ID NO: 4425830 - DNA, 25 bp, Homo sapien
gttcccccgatagaacagggcacca

SEQ ID NO: 4425831 - DNA, 25 bp, Homo sapien
aagggcccaaacttcagcacgccag

SEQ ID NO: 4425832 - DNA, 25 bp, Homo sapien
gggcccaaacttcagcacgccaggg

SEQ ID NO: 4425833 - DNA, 25 bp, Homo sapien
caaggctcagtggaagagaccagtg

SEQ ID NO: 4425834 - DNA, 25 bp, Homo sapien
ctcagtggaagagaccagtgttgag

SEQ ID NO: 4425835 - DNA, 25 bp, Homo sapien
aggctcagtggaagagaccagtgtt

SEQ ID NO: 4425836 - DNA, 25 bp, Homo sapien
gctcagtggaagagaccagtgttga

SEQ ID NO: 4425837 - DNA, 25 bp, Homo sapien
caggacaatataaggttctcatcat

SEQ ID NO: 4425838 - DNA, 25 bp, Homo sapien
ttttaagtcatcacctctcttcagg

SEQ ID NO: 4425839 - DNA, 25 bp, Homo sapien
gatttttaagtcatcacctctcttc

SEQ ID NO: 4425840 - DNA, 25 bp, Homo sapien
ctcttcaggacaatataaggttctc

SEQ ID NO: 4425841 - DNA, 25 bp, Homo sapien
ctatgccagtcaatgccagggggcc

SEQ ID NO: 4425842 - DNA, 25 bp, Homo sapien
tatgccagtcaatgccagggggccc

SEQ ID NO: 4425843 - DNA, 25 bp, Homo sapien
gagcaccgagactcagctgggagct

SEQ ID NO: 4425844 - DNA, 25 bp, Homo sapien
tcagggaaggcgtcctccttggttc

SEQ ID NO: 4425845 - DNA, 25 bp, Homo sapien
tgccctgggtggaattgaaggaacc

SEQ ID NO: 4425846 - DNA, 25 bp, Homo sapien
ggacaaagagcacctgtgtgacccc

SEQ ID NO: 4425847 - DNA, 25 bp, Homo sapien
gggcctcagcgtaatcctattgagc

SEQ ID NO: 4425848 - DNA, 25 bp, Homo sapien
gtcatcacctctcttcagaacaata

SEQ ID NO: 4425849 - DNA, 25 bp, Homo sapien
gatttttaagtcatcacctctcttc

SEQ ID NO: 4425850 - DNA, 25 bp, Homo sapien
gcgtaatcctattgagcatgatttt

SEQ ID NO: 4425851 - DNA, 25 bp, Homo sapien
atgctcgtcaatcccaggggtctgc

SEQ ID NO: 4425852 - DNA, 25 bp, Homo sapien
ctatgctcgtcaatcccaggggtct

SEQ ID NO: 4425853 - DNA, 25 bp, Homo sapien
tatgctcgtcaatcccaggggtctg

SEQ ID NO: 4425854 - DNA, 25 bp, Homo sapien
gctcgtcaatcccaggggtctgctg

SEQ ID NO: 4425855 - DNA, 25 bp, Homo sapien
aggaagggcttgagctcaagtgcac

SEQ ID NO: 4425856 - DNA, 25 bp, Homo sapien
gggccagcggtcccaaagcaagtct

SEQ ID NO: 4425857 - DNA, 25 bp, Homo sapien
gaagggcttgagctcaagtgcacca

SEQ ID NO: 4425858 - DNA, 25 bp, Homo sapien
ggaagggcttgagctcaagtgcacc

SEQ ID NO: 4425859 - DNA, 25 bp, Homo sapien
ttttaagtcatcacctctcttcagg

SEQ ID NO: 4425860 - DNA, 25 bp, Homo sapien
tcaggacaatataaggttctcatca

SEQ ID NO: 4425861 - DNA, 25 bp, Homo sapien
gggcctcagcgtaatcctattgagc

SEQ ID NO: 4425862 - DNA, 25 bp, Homo sapien
tcagcgtaatcctattgagcatgat

SEQ ID NO: 4425863 - DNA, 25 bp, Homo sapien
gggtccccctgggcagaagagctcg

SEQ ID NO: 4425864 - DNA, 25 bp, Homo sapien
ggggccagcggacccaatgcacgtc

SEQ ID NO: 4425865 - DNA, 25 bp, Homo sapien
ggacccaatgcacgtcttcctctgg

SEQ ID NO: 4425866 - DNA, 25 bp, Homo sapien
cttcagctcaccaggtgttgagcac

SEQ ID NO: 4425867 - DNA, 25 bp, Homo sapien
gcttcagctcaccaggtgttgagca

SEQ ID NO: 4425868 - DNA, 25 bp, Homo sapien
gtcatcacctctcttcagaacaata

SEQ ID NO: 4425869 - DNA, 25 bp, Homo sapien
gatttttaagtcatcacctctcttc

SEQ ID NO: 4425870 - DNA, 25 bp, Homo sapien
gggcctcagcgtaatcctattgagc

SEQ ID NO: 4425871 - DNA, 25 bp, Homo sapien
agaacaatataaggttctcatcatt

SEQ ID NO: 4425872 - DNA, 25 bp, Homo sapien
tggcctggatgccagatgccgctgc

SEQ ID NO: 4425873 - DNA, 25 bp, Homo sapien
ccattcagttcacggcccaccaagg

SEQ ID NO: 4425874 - DNA, 25 bp, Homo sapien
ggcacaggccagcgccaccattcag

SEQ ID NO: 4425875 - DNA, 25 bp, Homo sapien
caggccagcgccaccattcagttca

SEQ ID NO: 4425876 - DNA, 25 bp, Homo sapien
catggatccatgtgatgggatgcat

SEQ ID NO: 4425877 - DNA, 25 bp, Homo sapien
atgggatgcatgcagaacactggcc

SEQ ID NO: 4425878 - DNA, 25 bp, Homo sapien
gatccatgtgatgggatgcatgcag

SEQ ID NO: 4425879 - DNA, 25 bp, Homo sapien
tgtgatgggatgcatgcagaacact

SEQ ID NO: 4425880 - DNA, 25 bp, Homo sapien
cacagctcaatgcaggagaccaggg

SEQ ID NO: 4425881 - DNA, 25 bp, Homo sapien
gacacctggctgatggacgctgacc

SEQ ID NO: 4425882 - DNA, 25 bp, Homo sapien
gaagggcccgatcttcagtgcacca

SEQ ID NO: 4425883 - DNA, 25 bp, Homo sapien
acctggggccattgggcccagtgca

SEQ ID NO: 4425884 - DNA, 25 bp, Homo sapien
acgcatccagcaggatccggatgtg

SEQ ID NO: 4425885 - DNA, 25 bp, Homo sapien
atccagcaggatccggatgtgctca

SEQ ID NO: 4425886 - DNA, 25 bp, Homo sapien
cccttccccgcacacgcatccagca

SEQ ID NO: 4425887 - DNA, 25 bp, Homo sapien
cttccccgcacacgcatccagcagg

SEQ ID NO: 4425888 - DNA, 25 bp, Homo sapien
ctcttcaggacaatataaggttctc

SEQ ID NO: 4425889 - DNA, 25 bp, Homo sapien
cttcaggacaatataaggttctcat

SEQ ID NO: 4425890 - DNA, 25 bp, Homo sapien
tcttcaggacaatataaggttctca

SEQ ID NO: 4425891 - DNA, 25 bp, Homo sapien
gcctcagcgtaatcctattattgag

SEQ ID NO: 4425892 - DNA, 25 bp, Homo sapien
gggcctcagcgtaatcctattattg

SEQ ID NO: 4425893 - DNA, 25 bp, Homo sapien
ggcctcagcgtaatcctattattga

SEQ ID NO: 4425894 - DNA, 25 bp, Homo sapien
cctcctggggacctcggaatcccag

SEQ ID NO: 4425895 - DNA, 25 bp, Homo sapien
agagacagggttgggcacccacaag

SEQ ID NO: 4425896 - DNA, 25 bp, Homo sapien
ggagcgcagagacagggttgggcac

SEQ ID NO: 4425897 - DNA, 25 bp, Homo sapien
cccatgtgcctcaaacccagggaac

SEQ ID NO: 4425898 - DNA, 25 bp, Homo sapien
atgccagtcaatgacaggggtcttc

SEQ ID NO: 4425899 - DNA, 25 bp, Homo sapien
tatgccagtcaatgacaggggtctt

SEQ ID NO: 4425900 - DNA, 25 bp, Homo sapien
ctatgccagtcaatgacaggggtct

SEQ ID NO: 4425901 - DNA, 25 bp, Homo sapien
gaatactggcccatcacagacgtgg

SEQ ID NO: 4425902 - DNA, 25 bp, Homo sapien
agctcagggatgctcgccttccatg

SEQ ID NO: 4425903 - DNA, 25 bp, Homo sapien
tccatggacccatgtgatgagatcc

SEQ ID NO: 4425904 - DNA, 25 bp, Homo sapien
gatgagatccatgtggaatactggc

SEQ ID NO: 4425905 - DNA, 25 bp, Homo sapien
gcgtaatcctattgagcatgatttt

SEQ ID NO: 4425906 - DNA, 25 bp, Homo sapien
cctcagcgtaatcctattgagcatg

SEQ ID NO: 4425907 - DNA, 25 bp, Homo sapien
gggcctcagcgtaatcctattgagc

SEQ ID NO: 4425908 - DNA, 25 bp, Homo sapien
tcagcgtaatcctattgagcatgat

SEQ ID NO: 4425909 - DNA, 25 bp, Homo sapien
gccaaagggcctaacgcaattcttc

SEQ ID NO: 4425910 - DNA, 25 bp, Homo sapien
tggcagacactggtccggggccaaa

SEQ ID NO: 4425911 - DNA, 25 bp, Homo sapien
acctgagctttagcgcacgggaggc

SEQ ID NO: 4425912 - DNA, 25 bp, Homo sapien
cctcagtgcaggataccaggatgac

SEQ ID NO: 4425913 - DNA, 25 bp, Homo sapien
tcagcgtaatcctattgagcatgat

SEQ ID NO: 4425914 - DNA, 25 bp, Homo sapien
gggcctcagcgtaatcctattgagc

SEQ ID NO: 4425915 - DNA, 25 bp, Homo sapien
tcaggacaatataaggttctcatca

SEQ ID NO: 4425916 - DNA, 25 bp, Homo sapien
ttttaagtcatcacctctcttcagg

SEQ ID NO: 4425917 - DNA, 25 bp, Homo sapien
cacagcccatgacacgagcagtatc

SEQ ID NO: 4425918 - DNA, 25 bp, Homo sapien
acgcagcttggctcacagcccatga

SEQ ID NO: 4425919 - DNA, 25 bp, Homo sapien
gggaccccacgcagcttggctcaca

SEQ ID NO: 4425920 - DNA, 25 bp, Homo sapien
acgagcagtatccactcacctttgc

SEQ ID NO: 4425921 - DNA, 25 bp, Homo sapien
cctgagcttcagtgcaccaaggctg

SEQ ID NO: 4425922 - DNA, 25 bp, Homo sapien
tgagcttcagtgcaccaaggctggg

SEQ ID NO: 4425923 - DNA, 25 bp, Homo sapien
gcctgagcttcagtgcaccaaggct

SEQ ID NO: 4425924 - DNA, 25 bp, Homo sapien
ccagcaacccaatggcaagtcttcc

SEQ ID NO: 4425925 - DNA, 25 bp, Homo sapien
gggcctcagcgtaatcctattgagc

SEQ ID NO: 4425926 - DNA, 25 bp, Homo sapien
gcgtaatcctattgagcatgatttt

SEQ ID NO: 4425927 - DNA, 25 bp, Homo sapien
gatttttaagtcatcacctctcttc

SEQ ID NO: 4425928 - DNA, 25 bp, Homo sapien
ttaagtcatcacctctcttcagaca

SEQ ID NO: 4425929 - DNA, 25 bp, Homo sapien
cagcgggcccaatgaaagttttctt

SEQ ID NO: 4425930 - DNA, 25 bp, Homo sapien
tgatgaccactcaccccgggacagc

SEQ ID NO: 4425931 - DNA, 25 bp, Homo sapien
cccgggacagcgggcccaatgaaag

SEQ ID NO: 4425932 - DNA, 25 bp, Homo sapien
gacagcgggcccaatgaaagttttc

SEQ ID NO: 4425933 - DNA, 25 bp, Homo sapien
ttttaagtcatcacctctcttcagg

SEQ ID NO: 4425934 - DNA, 25 bp, Homo sapien
gggcctcagcgtaatcctattgagc

SEQ ID NO: 4425935 - DNA, 25 bp, Homo sapien
tcaggacaatataaggttctcatca

SEQ ID NO: 4425936 - DNA, 25 bp, Homo sapien
tcagcgtaatcctattgagcatgat

SEQ ID NO: 4425937 - DNA, 25 bp, Homo sapien
caacaccaagcctgcacaaggagcc

SEQ ID NO: 4425938 - DNA, 25 bp, Homo sapien
gaggagccgtcgatgtgctccaccc

SEQ ID NO: 4425939 - DNA, 25 bp, Homo sapien
cagggaaccagaatgccaacaccaa

SEQ ID NO: 4425940 - DNA, 25 bp, Homo sapien
gctcagggaggagccgtcgatgtgc

SEQ ID NO: 4425941 - DNA, 25 bp, Homo sapien
aggggcccgcctgggtagaagagct

SEQ ID NO: 4425942 - DNA, 25 bp, Homo sapien
gcaggggcccgcctgggtagaagag

SEQ ID NO: 4425943 - DNA, 25 bp, Homo sapien
gggcccgcctgggtagaagagctca

SEQ ID NO: 4425944 - DNA, 25 bp, Homo sapien
ctatgccgctcaagggcaggggccc

SEQ ID NO: 4425945 - DNA, 25 bp, Homo sapien
agccagtgggcccaacgcaagtctt

SEQ ID NO: 4425946 - DNA, 25 bp, Homo sapien
cagctcagtgcagcagaccagggtg

SEQ ID NO: 4425947 - DNA, 25 bp, Homo sapien
caacgcaagtcttcctctggggtca

SEQ ID NO: 4425948 - DNA, 25 bp, Homo sapien
agggcctgagcttcagctcaccagg

SEQ ID NO: 4425949 - DNA, 25 bp, Homo sapien
tcagcgtaatcctattgagcatgat

SEQ ID NO: 4425950 - DNA, 25 bp, Homo sapien
ttttaagtcatcacctctcttcagg

SEQ ID NO: 4425951 - DNA, 25 bp, Homo sapien
gggcctcagcgtaatcctattgagc

SEQ ID NO: 4425952 - DNA, 25 bp, Homo sapien
tcaggacaatataaggttctcatca

SEQ ID NO: 4425953 - DNA, 25 bp, Homo sapien
ctatgctggtcaatgccagggggtt

SEQ ID NO: 4425954 - DNA, 25 bp, Homo sapien
gctggcctgggaccattgggaccaa

SEQ ID NO: 4425955 - DNA, 25 bp, Homo sapien
agggcacgtccttcccggcgcatgc

SEQ ID NO: 4425956 - DNA, 25 bp, Homo sapien
cctgggaccattgggaccaattcaa

SEQ ID NO: 4425957 - DNA, 25 bp, Homo sapien
tgtgctcatcacagctcggtgcagc

SEQ ID NO: 4425958 - DNA, 25 bp, Homo sapien
gggcctcagcgtaatcctattgagc

SEQ ID NO: 4425959 - DNA, 25 bp, Homo sapien
ttttaagtcatcacctctcttcagg

SEQ ID NO: 4425960 - DNA, 25 bp, Homo sapien
ttcaggataatataaggttctcatc

SEQ ID NO: 4425961 - DNA, 25 bp, Homo sapien
tcagcgtaatcctattgagcatgat

SEQ ID NO: 4425962 - DNA, 25 bp, Homo sapien
gcacagagacagggttgggcctccc

SEQ ID NO: 4425963 - DNA, 25 bp, Homo sapien
aattggctctaccaggggacctcag

SEQ ID NO: 4425964 - DNA, 25 bp, Homo sapien
aaggccatcaccaagcctacatggg

SEQ ID NO: 4425965 - DNA, 25 bp, Homo sapien
cagggttgggcctcccagatgccct

SEQ ID NO: 4425966 - DNA, 25 bp, Homo sapien
ctagtcaatgccagggggcccacct

SEQ ID NO: 4425967 - DNA, 25 bp, Homo sapien
cgatgctagtcaatgccagggggcc

SEQ ID NO: 4425968 - DNA, 25 bp, Homo sapien
gctagtcaatgccagggggcccacc

SEQ ID NO: 4425969 - DNA, 25 bp, Homo sapien
atgctagtcaatgccagggggccca

SEQ ID NO: 4425970 - DNA, 25 bp, Homo sapien
gggcctcagcgtaatcctattgagc

SEQ ID NO: 4425971 - DNA, 25 bp, Homo sapien
gatttttaagtcatcacctctcttc

SEQ ID NO: 4425972 - DNA, 25 bp, Homo sapien
ttaagtcatcacctctcttcagaca

SEQ ID NO: 4425973 - DNA, 25 bp, Homo sapien
gcgtaatcctattgagcatgatttt

SEQ ID NO: 4425974 - DNA, 25 bp, Homo sapien
atgctggtcactgccagggaggctg

SEQ ID NO: 4425975 - DNA, 25 bp, Homo sapien
ctatgctggtcactgccagggaggc

SEQ ID NO: 4425976 - DNA, 25 bp, Homo sapien
gctggtcactgccagggaggctgct

SEQ ID NO: 4425977 - DNA, 25 bp, Homo sapien
ggaggctgctgggcagaagagctca

SEQ ID NO: 4425978 - DNA, 25 bp, Homo sapien
tcccaccatggactcatgagatgag

SEQ ID NO: 4425979 - DNA, 25 bp, Homo sapien
gtcatgcacacgaggaacccttggc

SEQ ID NO: 4425980 - DNA, 25 bp, Homo sapien
acagtgacagtcatgcacacgagga

SEQ ID NO: 4425981 - DNA, 25 bp, Homo sapien
accatggactcatgagatgagatcc

SEQ ID NO: 4425982 - DNA, 25 bp, Homo sapien
agggccttgtgcctccatagggcaa

SEQ ID NO: 4425983 - DNA, 25 bp, Homo sapien
ggcaaagtgggtagggtgtgctggc

SEQ ID NO: 4425984 - DNA, 25 bp, Homo sapien
catagggcaaagtgggtagggtgtg

SEQ ID NO: 4425985 - DNA, 25 bp, Homo sapien
ctccatagggcaaagtgggtagggt

SEQ ID NO: 4425986 - DNA, 25 bp, Homo sapien
tgagcttcagattaccaggggctaa

SEQ ID NO: 4425987 - DNA, 25 bp, Homo sapien
ctgagcttcagattaccaggggcta

SEQ ID NO: 4425988 - DNA, 25 bp, Homo sapien
accccacaacgcatgcatgcatcca

SEQ ID NO: 4425989 - DNA, 25 bp, Homo sapien
caccaccccacaacgcatgcatgca

SEQ ID NO: 4425990 - DNA, 25 bp, Homo sapien
atgcatgcatccattgggacccaga

SEQ ID NO: 4425991 - DNA, 25 bp, Homo sapien
catgcatccattgggacccagatgt

SEQ ID NO: 4425992 - DNA, 25 bp, Homo sapien
ctctcttcagaacatataaggttct

SEQ ID NO: 4425993 - DNA, 25 bp, Homo sapien
cagaacatataaggttctcatcatc

SEQ ID NO: 4425994 - DNA, 25 bp, Homo sapien
tcttcagaacatataaggttctcat

SEQ ID NO: 4425995 - DNA, 25 bp, Homo sapien
tcagaacatataaggttctcatcat

SEQ ID NO: 4425996 - DNA, 25 bp, Homo sapien
gggcctcagcgtaatcctattgagc

SEQ ID NO: 4425997 - DNA, 25 bp, Homo sapien
gcgtaatcctattgagcatgatttt

SEQ ID NO: 4425998 - DNA, 25 bp, Homo sapien
cctcagcgtaatcctattgagcatg

SEQ ID NO: 4425999 - DNA, 25 bp, Homo sapien
tcagcgtaatcctattgagcatgat

SEQ ID NO: 4426000 - DNA, 25 bp, Homo sapien
atgcgcatcagtgtcagggagccca

SEQ ID NO: 4426001 - DNA, 25 bp, Homo sapien
tatgcgcatcagtgtcagggagccc

SEQ ID NO: 4426002 - DNA, 25 bp, Homo sapien
ctatgcgcatcagtgtcagggagcc

SEQ ID NO: 4426003 - DNA, 25 bp, Homo sapien
tggggcacgtttggccttccctgtc

SEQ ID NO: 4426004 - DNA, 25 bp, Homo sapien
catggacgtggggcacgtttggcct

SEQ ID NO: 4426005 - DNA, 25 bp, Homo sapien
atggacgtggggcacgtttggcctt

SEQ ID NO: 4426006 - DNA, 25 bp, Homo sapien
gcatggacgtggggcacgtttggcc

SEQ ID NO: 4426007 - DNA, 25 bp, Homo sapien
cagctcagtgtaggaaaccaggaca

SEQ ID NO: 4426008 - DNA, 25 bp, Homo sapien
tgtaggaaaccaggacaacaggtag

SEQ ID NO: 4426009 - DNA, 25 bp, Homo sapien
acaacaggtaggtcccgcgcttcag

SEQ ID NO: 4426010 - DNA, 25 bp, Homo sapien
accaggacaacaggtaggtcccgcg

SEQ ID NO: 4426011 - DNA, 25 bp, Homo sapien
gggcctcagcgtaatcctattgagc

SEQ ID NO: 4426012 - DNA, 25 bp, Homo sapien
ttttaagtcatcacctctcttcagg

SEQ ID NO: 4426013 - DNA, 25 bp, Homo sapien
ttcaggataatataaggttctcatc

SEQ ID NO: 4426014 - DNA, 25 bp, Homo sapien
tcagcgtaatcctattgagcatgat

SEQ ID NO: 4426015 - DNA, 25 bp, Homo sapien
gggtgccccgcctgggttgaagagc

SEQ ID NO: 4426016 - DNA, 25 bp, Homo sapien
ggtgtggcagttcaagtatgcttgc

SEQ ID NO: 4426017 - DNA, 25 bp, Homo sapien
acggacacagggtacccagtgctct

SEQ ID NO: 4426018 - DNA, 25 bp, Homo sapien
ccatggacccatgtgatcgtttgca

SEQ ID NO: 4426019 - DNA, 25 bp, Homo sapien
gtttgcatgcggaacactggcccat

SEQ ID NO: 4426020 - DNA, 25 bp, Homo sapien
tggacaccaggctgacggatactgg

SEQ ID NO: 4426021 - DNA, 25 bp, Homo sapien
ggacaccaggctgacggatactggc

SEQ ID NO: 4426022 - DNA, 25 bp, Homo sapien
aggacaatataaggttctcatcatc

SEQ ID NO: 4426023 - DNA, 25 bp, Homo sapien
ttttaagtcatcacctctcttcagg

SEQ ID NO: 4426024 - DNA, 25 bp, Homo sapien
tccttttgagaatgatttttaagtc

SEQ ID NO: 4426025 - DNA, 25 bp, Homo sapien
ctcttcaggacaatataaggttctc

SEQ ID NO: 4426026 - DNA, 25 bp, Homo sapien
ctatgccgatcaatgccagggagtc

SEQ ID NO: 4426027 - DNA, 25 bp, Homo sapien
aatgccagggagtcttctgggcaaa

SEQ ID NO: 4426028 - DNA, 25 bp, Homo sapien
agggagtcttctgggcaaaagagct

SEQ ID NO: 4426029 - DNA, 25 bp, Homo sapien
gccgatcaatgccagggagtcttct

SEQ ID NO: 4426030 - DNA, 25 bp, Homo sapien
gaagggcctgagcttcagcacacca

SEQ ID NO: 4426031 - DNA, 25 bp, Homo sapien
aagggcctgagcttcagcacaccag

SEQ ID NO: 4426032 - DNA, 25 bp, Homo sapien
ctcccgacccatgcatccagcagta

SEQ ID NO: 4426033 - DNA, 25 bp, Homo sapien
aggacaatataaggttctcatcatc

SEQ ID NO: 4426034 - DNA, 25 bp, Homo sapien
ttcaggacaatataaggttctcatc

SEQ ID NO: 4426035 - DNA, 25 bp, Homo sapien
ctcttcaggacaatataaggttctc

SEQ ID NO: 4426036 - DNA, 25 bp, Homo sapien
tcttcaggacaatataaggttctca

SEQ ID NO: 4426037 - DNA, 25 bp, Homo sapien
tccttttgagaatgatttttaagtc

SEQ ID NO: 4426038 - DNA, 25 bp, Homo sapien
ctggtcaatgccaggggacccgcct

SEQ ID NO: 4426039 - DNA, 25 bp, Homo sapien
ggtcaatgccaggggacccgcctga

SEQ ID NO: 4426040 - DNA, 25 bp, Homo sapien
gtcaatgccaggggacccgcctgag

SEQ ID NO: 4426041 - DNA, 25 bp, Homo sapien
gctggtcaatgccaggggacccgcc

SEQ ID NO: 4426042 - DNA, 25 bp, Homo sapien
gatggagagccccactcataatccc

SEQ ID NO: 4426043 - DNA, 25 bp, Homo sapien
aaccctacaagcctgaccacatggg

SEQ ID NO: 4426044 - DNA, 25 bp, Homo sapien
gtcagacgcaggcacggaatgtcag

SEQ ID NO: 4426045 - DNA, 25 bp, Homo sapien
aggactaacacatccctccacggtg

SEQ ID NO: 4426046 - DNA, 25 bp, Homo sapien
gctgacgaacactgacgtggggcca

SEQ ID NO: 4426047 - DNA, 25 bp, Homo sapien
tgacgaacactgacgtggggccagt

SEQ ID NO: 4426048 - DNA, 25 bp, Homo sapien
ctggatgccaggctgacgaacactg

SEQ ID NO: 4426049 - DNA, 25 bp, Homo sapien
gccaggctgacgaacactgacgtgg

SEQ ID NO: 4426050 - DNA, 25 bp, Homo sapien
atccagcagtccccgaatggactca

SEQ ID NO: 4426051 - DNA, 25 bp, Homo sapien
gcatccagcagtccccgaatggact

SEQ ID NO: 4426052 - DNA, 25 bp, Homo sapien
atgcatccagcagtccccgaatgga

SEQ ID NO: 4426053 - DNA, 25 bp, Homo sapien
tccagcagtccccgaatggactcac

SEQ ID NO: 4426054 - DNA, 25 bp, Homo sapien
tccttttgagaatgatttttaagtc

SEQ ID NO: 4426055 - DNA, 25 bp, Homo sapien
aggacaatataaggttctcatcatc

SEQ ID NO: 4426056 - DNA, 25 bp, Homo sapien
ttttaagtcatcacctctcttcagg

SEQ ID NO: 4426057 - DNA, 25 bp, Homo sapien
ctcttcaggacaatataaggttctc

SEQ ID NO: 4426058 - DNA, 25 bp, Homo sapien
ctatgcccatcaagaccagggggac

SEQ ID NO: 4426059 - DNA, 25 bp, Homo sapien
caggacaccagcaggatgtactcac

SEQ ID NO: 4426060 - DNA, 25 bp, Homo sapien
cctggctcatggaccaggacaccag

SEQ ID NO: 4426061 - DNA, 25 bp, Homo sapien
gctcatggaccaggacaccagcagg

SEQ ID NO: 4426062 - DNA, 25 bp, Homo sapien
tggctcatggaccaggacaccagca

SEQ ID NO: 4426063 - DNA, 25 bp, Homo sapien
aagatgggtccaaacagggcctcac

SEQ ID NO: 4426064 - DNA, 25 bp, Homo sapien
agatgggtccaaacagggcctcacc

SEQ ID NO: 4426065 - DNA, 25 bp, Homo sapien
tgacgcacactggcccagagccacg

SEQ ID NO: 4426066 - DNA, 25 bp, Homo sapien
cctctgggctcaccatctggtgaga

SEQ ID NO: 4426067 - DNA, 25 bp, Homo sapien
tcagcataatcctattgagcatgat

SEQ ID NO: 4426068 - DNA, 25 bp, Homo sapien
ttttaagtcatcacctctcttcagg

SEQ ID NO: 4426069 - DNA, 25 bp, Homo sapien
gggcctcagcataatcctattgagc

SEQ ID NO: 4426070 - DNA, 25 bp, Homo sapien
tcaggacaatataaggttctcatca

SEQ ID NO: 4426071 - DNA, 25 bp, Homo sapien
ccggtcaatgtcagagggcccaaat

SEQ ID NO: 4426072 - DNA, 25 bp, Homo sapien
gtcaatgtcagagggcccaaatggg

SEQ ID NO: 4426073 - DNA, 25 bp, Homo sapien
tgccggtcaatgtcagagggcccaa

SEQ ID NO: 4426074 - DNA, 25 bp, Homo sapien
tatgccggtcaatgtcagagggccc

SEQ ID NO: 4426075 - DNA, 25 bp, Homo sapien
gctgacagaaactggcccagctcca

SEQ ID NO: 4426076 - DNA, 25 bp, Homo sapien
gcgtaatcctattgagcatgatttt

SEQ ID NO: 4426077 - DNA, 25 bp, Homo sapien
gatttttaagtcatcacctctcttc

SEQ ID NO: 4426078 - DNA, 25 bp, Homo sapien
gggcctcagcgtaatcctattgagc

SEQ ID NO: 4426079 - DNA, 25 bp, Homo sapien
tttaagtcatcacctctcttcagaa

SEQ ID NO: 4426080 - DNA, 25 bp, Homo sapien
cggcgcacagaaggcccagtgcaag

SEQ ID NO: 4426081 - DNA, 25 bp, Homo sapien
caggaagggcccaagcttcagtaca

SEQ ID NO: 4426082 - DNA, 25 bp, Homo sapien
tgatggcctctggccggcgcacaga

SEQ ID NO: 4426083 - DNA, 25 bp, Homo sapien
aagggcccaagcttcagtacaaaag

SEQ ID NO: 4426084 - DNA, 25 bp, Homo sapien
ttttaagtcatcacctctcttcagg

SEQ ID NO: 4426085 - DNA, 25 bp, Homo sapien
cagcgtaatcctattgagcatgatt

SEQ ID NO: 4426086 - DNA, 25 bp, Homo sapien
ctcttcaggacaatataaggttctc

SEQ ID NO: 4426087 - DNA, 25 bp, Homo sapien
tcaggacaatataaggttctcatca

SEQ ID NO: 4426088 - DNA, 25 bp, Homo sapien
acttgccagggtccattggtcctga

SEQ ID NO: 4426089 - DNA, 25 bp, Homo sapien
ctggctgacggacacttgccagggt

SEQ ID NO: 4426090 - DNA, 25 bp, Homo sapien
ttgccagggtccattggtcctgatg

SEQ ID NO: 4426091 - DNA, 25 bp, Homo sapien
ggctgacggacacttgccagggtcc

SEQ ID NO: 4426092 - DNA, 25 bp, Homo sapien
ttcaacacaatatagggttctcatc

SEQ ID NO: 4426093 - DNA, 25 bp, Homo sapien
gcctcagcgtaatcattgagcatgg

SEQ ID NO: 4426094 - DNA, 25 bp, Homo sapien
ctcagcgtaatcattgagcatggta

SEQ ID NO: 4426095 - DNA, 25 bp, Homo sapien
cttcaacacaatatagggttctcat

SEQ ID NO: 4426096 - DNA, 25 bp, Homo sapien
ctatgttggtcaatgccaggaggcc

SEQ ID NO: 4426097 - DNA, 25 bp, Homo sapien
atgttggtcaatgccaggaggcccc

SEQ ID NO: 4426098 - DNA, 25 bp, Homo sapien
aggaggcccccccttggcagaagag

SEQ ID NO: 4426099 - DNA, 25 bp, Homo sapien
gaggcccccccttggcagaagagct

SEQ ID NO: 4426100 - DNA, 25 bp, Homo sapien
caatgcaaatcttcctccaggctca

SEQ ID NO: 4426101 - DNA, 25 bp, Homo sapien
aggcctgagcttcagtgcaccaggg

SEQ ID NO: 4426102 - DNA, 25 bp, Homo sapien
tggcccagggccattgggcccaatg

SEQ ID NO: 4426103 - DNA, 25 bp, Homo sapien
tgggaaactggctgacagacactgg

SEQ ID NO: 4426104 - DNA, 25 bp, Homo sapien
cagaacaatataaggttctcgacac

SEQ ID NO: 4426105 - DNA, 25 bp, Homo sapien
ctataccggtcaatgccaagtggcc

SEQ ID NO: 4426106 - DNA, 25 bp, Homo sapien
tataccggtcaatgccaagtggcct

SEQ ID NO: 4426107 - DNA, 25 bp, Homo sapien
gatttttaagtcatcacctctcttc

SEQ ID NO: 4426108 - DNA, 25 bp, Homo sapien
ttttaagtcatcacctctcttcagg

SEQ ID NO: 4426109 - DNA, 25 bp, Homo sapien
ctcttcaggacaatataaggttctc

SEQ ID NO: 4426110 - DNA, 25 bp, Homo sapien
cttcaggacaatataaggttctcat

SEQ ID NO: 4426111 - DNA, 25 bp, Homo sapien
acctggctgagagacactggccctc

SEQ ID NO: 4426112 - DNA, 25 bp, Homo sapien
ctgagagacactggccctcggcctg

SEQ ID NO: 4426113 - DNA, 25 bp, Homo sapien
tcggcctgcgggtcccacacatctt

SEQ ID NO: 4426114 - DNA, 25 bp, Homo sapien
ccaggaagggtcagagtttcagccc

SEQ ID NO: 4426115 - DNA, 25 bp, Homo sapien
gttgggtgccagctcacgcttgctc

SEQ ID NO: 4426116 - DNA, 25 bp, Homo sapien
gaacaggtggagaacatgtgaccac

SEQ ID NO: 4426117 - DNA, 25 bp, Homo sapien
gtggagaacatgtgaccaccctcca

SEQ ID NO: 4426118 - DNA, 25 bp, Homo sapien
gtgttgggtgccagctcacgcttgc

SEQ ID NO: 4426119 - DNA, 25 bp, Homo sapien
gctggagcttcagcgcaccgatggc

SEQ ID NO: 4426120 - DNA, 25 bp, Homo sapien
aagggctggagcttcagcgcaccga

SEQ ID NO: 4426121 - DNA, 25 bp, Homo sapien
gaaaagcaagcccaacagaagtctc

SEQ ID NO: 4426122 - DNA, 25 bp, Homo sapien
agcaagcccaacagaagtctcacca

SEQ ID NO: 4426123 - DNA, 25 bp, Homo sapien
acatgcatccagtggaacccggatg

SEQ ID NO: 4426124 - DNA, 25 bp, Homo sapien
tgcatccagtggaacccggatgtac

SEQ ID NO: 4426125 - DNA, 25 bp, Homo sapien
catgcatccagtggaacccggatgt

SEQ ID NO: 4426126 - DNA, 25 bp, Homo sapien
cacatgcatccagtggaacccggat

SEQ ID NO: 4426127 - DNA, 25 bp, Homo sapien
caggacaatataaggttctcatcac

SEQ ID NO: 4426128 - DNA, 25 bp, Homo sapien
ttttaagtcatcacctctcttcagg

SEQ ID NO: 4426129 - DNA, 25 bp, Homo sapien
ctcttcaggacaatataaggttctc

SEQ ID NO: 4426130 - DNA, 25 bp, Homo sapien
gggcctcagcgtaatcctattgagc

SEQ ID NO: 4426131 - DNA, 25 bp, Homo sapien
caaaggcgagaacagggactcagga

SEQ ID NO: 4426132 - DNA, 25 bp, Homo sapien
gaaggagccatcaacattccctgcc

SEQ ID NO: 4426133 - DNA, 25 bp, Homo sapien
caggtcccaggtccaaaatacagtg

SEQ ID NO: 4426134 - DNA, 25 bp, Homo sapien
gaaactagagtgcagagacaggttg

SEQ ID NO: 4426135 - DNA, 25 bp, Homo sapien
caaggggccctcctaggtgaaagag

SEQ ID NO: 4426136 - DNA, 25 bp, Homo sapien
tgccaaggggccctcctaggtgaaa

SEQ ID NO: 4426137 - DNA, 25 bp, Homo sapien
cagtcaatgccaaggggccctccta

SEQ ID NO: 4426138 - DNA, 25 bp, Homo sapien
gggccctcctaggtgaaagagctca

SEQ ID NO: 4426139 - DNA, 25 bp, Homo sapien
gatggctcctcacacgacgccaggg

SEQ ID NO: 4426140 - DNA, 25 bp, Homo sapien
cacagatggctcctcacacgacgcc

SEQ ID NO: 4426141 - DNA, 25 bp, Homo sapien
acaccagtgggcatgggtcagggcc

SEQ ID NO: 4426142 - DNA, 25 bp, Homo sapien
tgggcatgggtcagggccatgagcc

SEQ ID NO: 4426143 - DNA, 25 bp, Homo sapien
aggacaatataaggttctcatcatc

SEQ ID NO: 4426144 - DNA, 25 bp, Homo sapien
ttcaggacaatataaggttctcatc

SEQ ID NO: 4426145 - DNA, 25 bp, Homo sapien
tttcaggacaatataaggttctcat

SEQ ID NO: 4426146 - DNA, 25 bp, Homo sapien
tcaggacaatataaggttctcatca

SEQ ID NO: 4426147 - DNA, 25 bp, Homo sapien
ggagcattcaggaaggaacaccaaa

SEQ ID NO: 4426148 - DNA, 25 bp, Homo sapien
gagcattcaggaaggaacaccaaat

SEQ ID NO: 4426149 - DNA, 25 bp, Homo sapien
gggccttcaggcccaactgaagtct

SEQ ID NO: 4426150 - DNA, 25 bp, Homo sapien
gccttcaggcccaactgaagtcttt

SEQ ID NO: 4426151 - DNA, 25 bp, Homo sapien
cttcaggcccaactgaagtctttct

SEQ ID NO: 4426152 - DNA, 25 bp, Homo sapien
tcaggcccaactgaagtctttcttc

SEQ ID NO: 4426153 - DNA, 25 bp, Homo sapien
tttttaagtcatcacctctcttcag

SEQ ID NO: 4426154 - DNA, 25 bp, Homo sapien
tttaagtcatcacctctcttcagaa

SEQ ID NO: 4426155 - DNA, 25 bp, Homo sapien
gcaggcccagtggaagtcttcctca

SEQ ID NO: 4426156 - DNA, 25 bp, Homo sapien
ttttaagtcatcacctctcttcagg

SEQ ID NO: 4426157 - DNA, 25 bp, Homo sapien
gggcctcagcgtaatcctattgagc

SEQ ID NO: 4426158 - DNA, 25 bp, Homo sapien
tcaggacaatataaggttctcatca

SEQ ID NO: 4426159 - DNA, 25 bp, Homo sapien
tcagcgtaatcctattgagcatgat

SEQ ID NO: 4426160 - DNA, 25 bp, Homo sapien
ccaggggaaccgcttggcagaagag

SEQ ID NO: 4426161 - DNA, 25 bp, Homo sapien
caggggaaccgcttggcagaagagc

SEQ ID NO: 4426162 - DNA, 25 bp, Homo sapien
gaacctggctgacagacactggtct

SEQ ID NO: 4426163 - DNA, 25 bp, Homo sapien
gcttgagcttcagcgcatcgggggt

SEQ ID NO: 4426164 - DNA, 25 bp, Homo sapien
gcttcagcgcatcgggggttgggaa

SEQ ID NO: 4426165 - DNA, 25 bp, Homo sapien
acctggctgacagacactggtctag

SEQ ID NO: 4426166 - DNA, 25 bp, Homo sapien
gggcctcagcgtaatcctattgagc

SEQ ID NO: 4426167 - DNA, 25 bp, Homo sapien
gcgtaatcctattgagcatgatttt

SEQ ID NO: 4426168 - DNA, 25 bp, Homo sapien
tcagcgtaatcctattgagcatgat

SEQ ID NO: 4426169 - DNA, 25 bp, Homo sapien
agaacaatataaggttctcatcatt

SEQ ID NO: 4426170 - DNA, 25 bp, Homo sapien
cccatcaattccagggggcccgcct

SEQ ID NO: 4426171 - DNA, 25 bp, Homo sapien
catcaattccagggggcccgcctgg

SEQ ID NO: 4426172 - DNA, 25 bp, Homo sapien
ctatacccatcaattccagggggcc

SEQ ID NO: 4426173 - DNA, 25 bp, Homo sapien
atacccatcaattccagggggcccg

SEQ ID NO: 4426174 - DNA, 25 bp, Homo sapien
cagggatagtgggcccaacacaaat

SEQ ID NO: 4426175 - DNA, 25 bp, Homo sapien
ggctgggtgcctagctgactgacat

SEQ ID NO: 4426176 - DNA, 25 bp, Homo sapien
gcctagctgactgacattggcccag

SEQ ID NO: 4426177 - DNA, 25 bp, Homo sapien
gctgactgacattggcccagggata

SEQ ID NO: 4426178 - DNA, 25 bp, Homo sapien
caggacaatataaggttctcatcac

SEQ ID NO: 4426179 - DNA, 25 bp, Homo sapien
gcctcagtgtaatcctattgagcat

SEQ ID NO: 4426180 - DNA, 25 bp, Homo sapien
cagtgtaatcctattgagcatgatt

SEQ ID NO: 4426181 - DNA, 25 bp, Homo sapien
tcttcaggacaatataaggttctca

SEQ ID NO: 4426182 - DNA, 25 bp, Homo sapien
agagtttcagcgcaccagaggctga

SEQ ID NO: 4426183 - DNA, 25 bp, Homo sapien
gagtttcagcgcaccagaggctgag

SEQ ID NO: 4426184 - DNA, 25 bp, Homo sapien
aagggtcagagtttcagcgcaccag

SEQ ID NO: 4426185 - DNA, 25 bp, Homo sapien
ggtcagagtttcagcgcaccagagg

SEQ ID NO: 4426186 - DNA, 25 bp, Homo sapien
cagcgtaatcctattgaacatgatt

SEQ ID NO: 4426187 - DNA, 25 bp, Homo sapien
ggcctcagcgtaatcctattgaaca

SEQ ID NO: 4426188 - DNA, 25 bp, Homo sapien
tcttcagggcaatatcaggttctca

SEQ ID NO: 4426189 - DNA, 25 bp, Homo sapien
catcatctctcttcagggcaatatc

SEQ ID NO: 4426190 - DNA, 25 bp, Homo sapien
caggtggacctcctaggtggaaaat

SEQ ID NO: 4426191 - DNA, 25 bp, Homo sapien
agtcaatgccaggtggacctcctag

SEQ ID NO: 4426192 - DNA, 25 bp, Homo sapien
ctatgtcagtcaatgccaggtggac

SEQ ID NO: 4426193 - DNA, 25 bp, Homo sapien
tgtcagtcaatgccaggtggacctc

SEQ ID NO: 4426194 - DNA, 25 bp, Homo sapien
caggaaaagcgaggccgacagaagt

SEQ ID NO: 4426195 - DNA, 25 bp, Homo sapien
aaaagcgaggccgacagaagtctca

SEQ ID NO: 4426196 - DNA, 25 bp, Homo sapien
cccaggaaaagcgaggccgacagaa

SEQ ID NO: 4426197 - DNA, 25 bp, Homo sapien
agcgaggccgacagaagtctcacca

SEQ ID NO: 4426198 - DNA, 25 bp, Homo sapien
ggcctcagcgtaatcctattgagca

SEQ ID NO: 4426199 - DNA, 25 bp, Homo sapien
gggcctcagcgtaatcctattgagc

SEQ ID NO: 4426200 - DNA, 25 bp, Homo sapien
gcctcagcgtaatcctattgagcat

SEQ ID NO: 4426201 - DNA, 25 bp, Homo sapien
tgttggtcaatgccaggaggacccc

SEQ ID NO: 4426202 - DNA, 25 bp, Homo sapien
atgttggtcaatgccaggaggaccc

SEQ ID NO: 4426203 - DNA, 25 bp, Homo sapien
gagatccttgaacctctgcgactca

SEQ ID NO: 4426204 - DNA, 25 bp, Homo sapien
tgggccccattcagggttacaggtg

SEQ ID NO: 4426205 - DNA, 25 bp, Homo sapien
caggctcaatatgtgccactgggat

SEQ ID NO: 4426206 - DNA, 25 bp, Homo sapien
ctgggatggccagttgctcaacagg

SEQ ID NO: 4426207 - DNA, 25 bp, Homo sapien
ggaacctggctgacagacactggtc

SEQ ID NO: 4426208 - DNA, 25 bp, Homo sapien
ccaggaaaggcttgagcttcagcgc

SEQ ID NO: 4426209 - DNA, 25 bp, Homo sapien
aaggcttgagcttcagcgcatcggg

SEQ ID NO: 4426210 - DNA, 25 bp, Homo sapien
tgggaacctggctgacagacactgg

SEQ ID NO: 4426211 - DNA, 25 bp, Homo sapien
taagtcatcacctctcttcagaaca

SEQ ID NO: 4426212 - DNA, 25 bp, Homo sapien
gatttttaagtcatcacctctcttc

SEQ ID NO: 4426213 - DNA, 25 bp, Homo sapien
gcgtaatcctattgagcatgatttt

SEQ ID NO: 4426214 - DNA, 25 bp, Homo sapien
gggcctcagcgtaatcctattgagc

SEQ ID NO: 4426215 - DNA, 25 bp, Homo sapien
ggggaccacttgggccgaagagctc

SEQ ID NO: 4426216 - DNA, 25 bp, Homo sapien
gggaccacttgggccgaagagctca

SEQ ID NO: 4426217 - DNA, 25 bp, Homo sapien
agtcaggaagggtcagagcttcagc

SEQ ID NO: 4426218 - DNA, 25 bp, Homo sapien
ggcctgtgggcccaacacgagtctt

SEQ ID NO: 4426219 - DNA, 25 bp, Homo sapien
gcctgtgggcccaacacgagtcttc

SEQ ID NO: 4426220 - DNA, 25 bp, Homo sapien
agctcagtgcaggagaccacggagt

SEQ ID NO: 4426221 - DNA, 25 bp, Homo sapien
gatttttaagtcatcacctctcttc

SEQ ID NO: 4426222 - DNA, 25 bp, Homo sapien
cagtgtaatcctattgagcatgatt

SEQ ID NO: 4426223 - DNA, 25 bp, Homo sapien
cctcagtgtaatcctattgagcatg

SEQ ID NO: 4426224 - DNA, 25 bp, Homo sapien
gcctcagtgtaatcctattgagcat

SEQ ID NO: 4426225 - DNA, 25 bp, Homo sapien
gtcaatgctagggagcccacctgtt

SEQ ID NO: 4426226 - DNA, 25 bp, Homo sapien
gagcccacctgtttggaagagctca

SEQ ID NO: 4426227 - DNA, 25 bp, Homo sapien
ctgtcggtcaatgctagggagccca

SEQ ID NO: 4426228 - DNA, 25 bp, Homo sapien
gctagggagcccacctgtttggaag

SEQ ID NO: 4426229 - DNA, 25 bp, Homo sapien
ttttaagtcatcacctctcttcagg

SEQ ID NO: 4426230 - DNA, 25 bp, Homo sapien
gggcctcagcgtaatcctattgagc

SEQ ID NO: 4426231 - DNA, 25 bp, Homo sapien
tcaggacaatataaggttctcatca

SEQ ID NO: 4426232 - DNA, 25 bp, Homo sapien
tcagcgtaatcctattgagcatgat

SEQ ID NO: 4426233 - DNA, 25 bp, Homo sapien
tatgccagtcaatgccagggggatg

SEQ ID NO: 4426234 - DNA, 25 bp, Homo sapien
gccagtcaatgccagggggatgtcc

SEQ ID NO: 4426235 - DNA, 25 bp, Homo sapien
atgccagtcaatgccagggggatgt

SEQ ID NO: 4426236 - DNA, 25 bp, Homo sapien
cagtcaatgccagggggatgtcctg

SEQ ID NO: 4426237 - DNA, 25 bp, Homo sapien
aggacaatataaggttctcatcatc

SEQ ID NO: 4426238 - DNA, 25 bp, Homo sapien
ttcaggacaatataaggttctcatc

SEQ ID NO: 4426239 - DNA, 25 bp, Homo sapien
tttcaggacaatataaggttctcat

SEQ ID NO: 4426240 - DNA, 25 bp, Homo sapien
tcaggacaatataaggttctcatca

SEQ ID NO: 4426241 - DNA, 25 bp, Homo sapien
tcagtgctggacaccagggtgccag

SEQ ID NO: 4426242 - DNA, 25 bp, Homo sapien
catgcatccagcaggacccggatgg

SEQ ID NO: 4426243 - DNA, 25 bp, Homo sapien
tgggggcccgacacaagtcttcctc

SEQ ID NO: 4426244 - DNA, 25 bp, Homo sapien
gaagggtctgagcttcagcgcactg

SEQ ID NO: 4426245 - DNA, 25 bp, Homo sapien
gggcctcagcgtaatcctattgagc

SEQ ID NO: 4426246 - DNA, 25 bp, Homo sapien
gcgtaatcctattgagcatgatttt

SEQ ID NO: 4426247 - DNA, 25 bp, Homo sapien
cctcagcgtaatcctattgagcatg

SEQ ID NO: 4426248 - DNA, 25 bp, Homo sapien
tcagcgtaatcctattgagcatgat

SEQ ID NO: 4426249 - DNA, 25 bp, Homo sapien
ctatgtcggtcaatgccagggggcc

SEQ ID NO: 4426250 - DNA, 25 bp, Homo sapien
atgtcggtcaatgccagggggccca

SEQ ID NO: 4426251 - DNA, 25 bp, Homo sapien
gggcccacctgggtggaaaagctca

SEQ ID NO: 4426252 - DNA, 25 bp, Homo sapien
tcggtcaatgccagggggcccacct

SEQ ID NO: 4426253 - DNA, 25 bp, Homo sapien
acagcttagtgcagaagactggggc

SEQ ID NO: 4426254 - DNA, 25 bp, Homo sapien
aagtgggcccaatggaagtcttcct

SEQ ID NO: 4426255 - DNA, 25 bp, Homo sapien
gcgtaatcctattgagcatgatttt

SEQ ID NO: 4426256 - DNA, 25 bp, Homo sapien
ttttaagtcatcacctctcttcagg

SEQ ID NO: 4426257 - DNA, 25 bp, Homo sapien
gatttttaagtcatcacctctcttc

SEQ ID NO: 4426258 - DNA, 25 bp, Homo sapien
gggcctcagcgtaatcctattgagc

SEQ ID NO: 4426259 - DNA, 25 bp, Homo sapien
caaggggccctcctgggtggaagag

SEQ ID NO: 4426260 - DNA, 25 bp, Homo sapien
atgccagtcaatgccaaggggccct

SEQ ID NO: 4426261 - DNA, 25 bp, Homo sapien
caatgccaaggggccctcctgggtg

SEQ ID NO: 4426262 - DNA, 25 bp, Homo sapien
gggccctcctgggtggaagagctca

SEQ ID NO: 4426263 - DNA, 25 bp, Homo sapien
gctgggcaacaggctgatggccact

SEQ ID NO: 4426264 - DNA, 25 bp, Homo sapien
aggaagggcctgagcttcagcgcct

SEQ ID NO: 4426265 - DNA, 25 bp, Homo sapien
acaagtcttcctcccgtctcaccat

SEQ ID NO: 4426266 - DNA, 25 bp, Homo sapien
aggaacagcaggcccaacacaagtc

SEQ ID NO: 4426267 - DNA, 25 bp, Homo sapien
gcgtaatcctattgagcatgatttt

SEQ ID NO: 4426268 - DNA, 25 bp, Homo sapien
ttttaagtcatcacctctcttcagg

SEQ ID NO: 4426269 - DNA, 25 bp, Homo sapien
gatttttaagtcatcacctctcttc

SEQ ID NO: 4426270 - DNA, 25 bp, Homo sapien
gggcctcagcgtaatcctattgagc

SEQ ID NO: 4426271 - DNA, 25 bp, Homo sapien
ctatgtcgtgtaaggccatgggccc

SEQ ID NO: 4426272 - DNA, 25 bp, Homo sapien
ggccccacctgggcagaagagctca

SEQ ID NO: 4426273 - DNA, 25 bp, Homo sapien
gggccccacctgggcagaagagctc

SEQ ID NO: 4426274 - DNA, 25 bp, Homo sapien
tcgtgtaaggccatgggccccacct

SEQ ID NO: 4426275 - DNA, 25 bp, Homo sapien
cctgaccagccttccgagtttcagc

SEQ ID NO: 4426276 - DNA, 25 bp, Homo sapien
ctgaccagccttccgagtttcagct

SEQ ID NO: 4426277 - DNA, 25 bp, Homo sapien
agacgcagagcatcattggccctcc

SEQ ID NO: 4426278 - DNA, 25 bp, Homo sapien
aacactgatccaacacagacgcaga

SEQ ID NO: 4426279 - DNA, 25 bp, Homo sapien
gatccaacacagacgcagagcatca

SEQ ID NO: 4426280 - DNA, 25 bp, Homo sapien
aacacagacgcagagcatcattggc

SEQ ID NO: 4426281 - DNA, 25 bp, Homo sapien
gggggcccaatacaagtcttcctca

SEQ ID NO: 4426282 - DNA, 25 bp, Homo sapien
ggggcccaatacaagtcttcctcaa

SEQ ID NO: 4426283 - DNA, 25 bp, Homo sapien
ttcagcacactgggggtgagcacca

SEQ ID NO: 4426284 - DNA, 25 bp, Homo sapien
cttcagcacactgggggtgagcacc

SEQ ID NO: 4426285 - DNA, 25 bp, Homo sapien
ttttaagtcatcacctctcttcagg

SEQ ID NO: 4426286 - DNA, 25 bp, Homo sapien
gatttttaagtcatcacctctcttc

SEQ ID NO: 4426287 - DNA, 25 bp, Homo sapien
gggcctcagcgtaatcctattgagc

SEQ ID NO: 4426288 - DNA, 25 bp, Homo sapien
gcgtaatcctattgagcatgatttt

SEQ ID NO: 4426289 - DNA, 25 bp, Homo sapien
ctatgccagtcaatgccagggggcc

SEQ ID NO: 4426290 - DNA, 25 bp, Homo sapien
tatgccagtcaatgccagggggccc

SEQ ID NO: 4426291 - DNA, 25 bp, Homo sapien
gcccaggaacaacaggcccaatgca

SEQ ID NO: 4426292 - DNA, 25 bp, Homo sapien
tggccactggcccaggaacaacagg

SEQ ID NO: 4426293 - DNA, 25 bp, Homo sapien
aggaagggcccgagcttcagcgcat

SEQ ID NO: 4426294 - DNA, 25 bp, Homo sapien
aatgcaagtcttcctccggtctcac

SEQ ID NO: 4426295 - DNA, 25 bp, Homo sapien
gggcctcagcgtaatcctattgagc

SEQ ID NO: 4426296 - DNA, 25 bp, Homo sapien
gtcatcacctctcttcagaacaata

SEQ ID NO: 4426297 - DNA, 25 bp, Homo sapien
gcgtaatcctattgagcatgatttt

SEQ ID NO: 4426298 - DNA, 25 bp, Homo sapien
gatttttaagtcatcacctctcttc

SEQ ID NO: 4426299 - DNA, 25 bp, Homo sapien
ccgcttaaggccatgggcctcacct

SEQ ID NO: 4426300 - DNA, 25 bp, Homo sapien
tatgccgcttaaggccatgggcctc

SEQ ID NO: 4426301 - DNA, 25 bp, Homo sapien
ctatgccgcttaaggccatgggcct

SEQ ID NO: 4426302 - DNA, 25 bp, Homo sapien
tgccgcttaaggccatgggcctcac

SEQ ID NO: 4426303 - DNA, 25 bp, Homo sapien
cctttgcagggcttcacgaaatgca

SEQ ID NO: 4426304 - DNA, 25 bp, Homo sapien
ccagcccgctgagtttcagctggga

SEQ ID NO: 4426305 - DNA, 25 bp, Homo sapien
tcgaggcctgaccagcccgctgagt

SEQ ID NO: 4426306 - DNA, 25 bp, Homo sapien
tttcctgccgggaccaccatcacct

SEQ ID NO: 4426307 - DNA, 25 bp, Homo sapien
ttttaagtcatcacctctcttcagg

SEQ ID NO: 4426308 - DNA, 25 bp, Homo sapien
gggcctcagcgtaatcctattgagc

SEQ ID NO: 4426309 - DNA, 25 bp, Homo sapien
tcaggacaatataaggttctcatca

SEQ ID NO: 4426310 - DNA, 25 bp, Homo sapien
tcagcgtaatcctattgagcatgat

SEQ ID NO: 4426311 - DNA, 25 bp, Homo sapien
gggagggtccaaactccagagcact

SEQ ID NO: 4426312 - DNA, 25 bp, Homo sapien
gagggtccaaactccagagcactgg

SEQ ID NO: 4426313 - DNA, 25 bp, Homo sapien
cagggagggtccaaactccagagca

SEQ ID NO: 4426314 - DNA, 25 bp, Homo sapien
ctccagagcactgggggattagcac

SEQ ID NO: 4426315 - DNA, 25 bp, Homo sapien
caggacaatataaggttctcatcat

SEQ ID NO: 4426316 - DNA, 25 bp, Homo sapien
gcgtaatcctattgagcatgatttt

SEQ ID NO: 4426317 - DNA, 25 bp, Homo sapien
ctcttcaggacaatataaggttctc

SEQ ID NO: 4426318 - DNA, 25 bp, Homo sapien
gggcctcagcgtaatcctattgagc

SEQ ID NO: 4426319 - DNA, 25 bp, Homo sapien
tgccagtcaatgccgggggcccgcc

SEQ ID NO: 4426320 - DNA, 25 bp, Homo sapien
tatgccagtcaatgccgggggcccg

SEQ ID NO: 4426321 - DNA, 25 bp, Homo sapien
atgccagtcaatgccgggggcccgc

SEQ ID NO: 4426322 - DNA, 25 bp, Homo sapien
gccagtcaatgccgggggcccgccc

SEQ ID NO: 4426323 - DNA, 25 bp, Homo sapien
ccatcacggatgcagggcacccttg

SEQ ID NO: 4426324 - DNA, 25 bp, Homo sapien
ggacccacgtaatgggatccacgtg

SEQ ID NO: 4426325 - DNA, 25 bp, Homo sapien
tgctcatcctctatggacccacgta

SEQ ID NO: 4426326 - DNA, 25 bp, Homo sapien
cacgtggaacactgacccatcacgg

SEQ ID NO: 4426327 - DNA, 25 bp, Homo sapien
acacactgggaccagcgggccgaac

SEQ ID NO: 4426328 - DNA, 25 bp, Homo sapien
cgggccgaacgcaagtcctcctccg

SEQ ID NO: 4426329 - DNA, 25 bp, Homo sapien
acactgggaccagcgggccgaacgc

SEQ ID NO: 4426330 - DNA, 25 bp, Homo sapien
gaccagcgggccgaacgcaagtcct

SEQ ID NO: 4426331 - DNA, 25 bp, Homo sapien
cagctgtatgaggtatcagtcagcc

SEQ ID NO: 4426332 - DNA, 25 bp, Homo sapien
agctgtatgaggtatcagtcagccc

SEQ ID NO: 4426333 - DNA, 25 bp, Homo sapien
atcttggaaccggatgacttataat

SEQ ID NO: 4426334 - DNA, 25 bp, Homo sapien
gaacttgaatgttggcttgccttcc

SEQ ID NO: 4426335 - DNA, 25 bp, Homo sapien
ttctgaacttgaatgttggcttgcc

SEQ ID NO: 4426336 - DNA, 25 bp, Homo sapien
tgctgagagatttgctgttagtttg

SEQ ID NO: 4426337 - DNA, 25 bp, Homo sapien
tggcttgccttcctaggttggggga

SEQ ID NO: 4426338 - DNA, 25 bp, Homo sapien
gattgatcatgttatgcccttactg

SEQ ID NO: 4426339 - DNA, 25 bp, Homo sapien
ttctgatagagggatgccaatgcct

SEQ ID NO: 4426340 - DNA, 25 bp, Homo sapien
tgttgaggtgcattttctagcccag

SEQ ID NO: 4426341 - DNA, 25 bp, Homo sapien
aaagtggtccatagatgtcagttac

SEQ ID NO: 4426342 - DNA, 25 bp, Homo sapien
gcaaagcaagttcgccacaatggtg

SEQ ID NO: 4426343 - DNA, 25 bp, Homo sapien
gcatacacagggtttggcaaagcaa

SEQ ID NO: 4426344 - DNA, 25 bp, Homo sapien
tctcacctaagaagagagtaggcca

SEQ ID NO: 4426345 - DNA, 25 bp, Homo sapien
gatggtataaattgccctgggtgca

SEQ ID NO: 4426346 - DNA, 25 bp, Homo sapien
tgtcccagtcacaacaggccaaaga

SEQ ID NO: 4426347 - DNA, 25 bp, Homo sapien
tttcattaaaggacacctgggtgct

SEQ ID NO: 4426348 - DNA, 25 bp, Homo sapien
aaagagtgcttttcttccatatcat

SEQ ID NO: 4426349 - DNA, 25 bp, Homo sapien
cacctgggtgctgtcaactgtccca

SEQ ID NO: 4426350 - DNA, 25 bp, Homo sapien
tattgatgaaagacatagtactccc

SEQ ID NO: 4426351 - DNA, 25 bp, Homo sapien
tccccatgcacacttgagaaggctt

SEQ ID NO: 4426352 - DNA, 25 bp, Homo sapien
tgtgatgctaggatgcattggtgtc

SEQ ID NO: 4426353 - DNA, 25 bp, Homo sapien
gaagctgtgatgctaggatgcattg

SEQ ID NO: 4426354 - DNA, 25 bp, Homo sapien
ccatagctcaatgttctagatagaa

SEQ ID NO: 4426355 - DNA, 25 bp, Homo sapien
ttataatagaatggcacatctcttg

SEQ ID NO: 4426356 - DNA, 25 bp, Homo sapien
tcccttaggtgggagtcttccatag

SEQ ID NO: 4426357 - DNA, 25 bp, Homo sapien
tacacgtcggtaaaggaagctactg

SEQ ID NO: 4426358 - DNA, 25 bp, Homo sapien
caccagagggtgctcttctcagcag

SEQ ID NO: 4426359 - DNA, 25 bp, Homo sapien
accagagggtgctcttctcagcagt

SEQ ID NO: 4426360 - DNA, 25 bp, Homo sapien
acaccagagggtgctcttctcagca

SEQ ID NO: 4426361 - DNA, 25 bp, Homo sapien
gaatagcatccttaaacaacggttg

SEQ ID NO: 4426362 - DNA, 25 bp, Homo sapien
cagggacagaggatcagttaaattc

SEQ ID NO: 4426363 - DNA, 25 bp, Homo sapien
aaattcactgcagcatgcctgtgcg

SEQ ID NO: 4426364 - DNA, 25 bp, Homo sapien
taaacaacggttgcagggacagagg

SEQ ID NO: 4426365 - DNA, 25 bp, Homo sapien
gagatggtttccttaaacactgatg

SEQ ID NO: 4426366 - DNA, 25 bp, Homo sapien
caggcagttgagtggtgtcagtttc

SEQ ID NO: 4426367 - DNA, 25 bp, Homo sapien
atggtaaagtggactggatgccaca

SEQ ID NO: 4426368 - DNA, 25 bp, Homo sapien
ttttcagtgccaggcagttgagtgg

SEQ ID NO: 4426369 - DNA, 25 bp, Homo sapien
agcccatggcactcatgtgcatatg

SEQ ID NO: 4426370 - DNA, 25 bp, Homo sapien
ggcactcatgtgcatatgcacactt

SEQ ID NO: 4426371 - DNA, 25 bp, Homo sapien
gtaacatctcatcattgacccagcc

SEQ ID NO: 4426372 - DNA, 25 bp, Homo sapien
catcattgacccagcccatggcact

SEQ ID NO: 4426373 - DNA, 25 bp, Homo sapien
ccaaagagtactcttcctcagtcat

SEQ ID NO: 4426374 - DNA, 25 bp, Homo sapien
aaagttcacaggagaccaaacagat

SEQ ID NO: 4426375 - DNA, 25 bp, Homo sapien
aagttcacaggagaccaaacagata

SEQ ID NO: 4426376 - DNA, 25 bp, Homo sapien
agttcacaggagaccaaacagatat

SEQ ID NO: 4426377 - DNA, 25 bp, Homo sapien
ctgaagtttccttgaagttgtttca

SEQ ID NO: 4426378 - DNA, 25 bp, Homo sapien
gaagtttccttgaagttgtttcagc

SEQ ID NO: 4426379 - DNA, 25 bp, Homo sapien
tccttgaagttgtttcagcttttaa

SEQ ID NO: 4426380 - DNA, 25 bp, Homo sapien
tgaagtttccttgaagttgtttcag

SEQ ID NO: 4426381 - DNA, 25 bp, Homo sapien
cctcagacaattattctcatcatcg

SEQ ID NO: 4426382 - DNA, 25 bp, Homo sapien
ggacctcagattgacatctggaatg

SEQ ID NO: 4426383 - DNA, 25 bp, Homo sapien
cctcagattgacatctggaatgagt

SEQ ID NO: 4426384 - DNA, 25 bp, Homo sapien
gacaattattctcatcatcgatcca

SEQ ID NO: 4426385 - DNA, 25 bp, Homo sapien
agtggaggatcagattccaggcctt

SEQ ID NO: 4426386 - DNA, 25 bp, Homo sapien
aagtggaggatcagattccaggcct

SEQ ID NO: 4426387 - DNA, 25 bp, Homo sapien
aagacctagcaaagagcacatgaca

SEQ ID NO: 4426388 - DNA, 25 bp, Homo sapien
gattatctcagacatgccatcaaga

SEQ ID NO: 4426389 - DNA, 25 bp, Homo sapien
ccagccaggtgtcttatatctatga

SEQ ID NO: 4426390 - DNA, 25 bp, Homo sapien
gaaaatgtcctccaataagcttctg

SEQ ID NO: 4426391 - DNA, 25 bp, Homo sapien
ggcatatgttttgtaaaagggctgc

SEQ ID NO: 4426392 - DNA, 25 bp, Homo sapien
cactgtactaactataacctatttt

SEQ ID NO: 4426393 - DNA, 25 bp, Homo sapien
gactatcctggtatgactgtcagtg

SEQ ID NO: 4426394 - DNA, 25 bp, Homo sapien
gggctgccaattttcactgtactaa

SEQ ID NO: 4426395 - DNA, 25 bp, Homo sapien
ccatacaacgtttatagggtggttg

SEQ ID NO: 4426396 - DNA, 25 bp, Homo sapien
tcatctaaataagccatacaacgtt

SEQ ID NO: 4426397 - DNA, 25 bp, Homo sapien
taaaagcatgtatttcagtacgtat

SEQ ID NO: 4426398 - DNA, 25 bp, Homo sapien
cagtacgtattggacctttcaatga

SEQ ID NO: 4426399 - DNA, 25 bp, Homo sapien
tctatggcagttccaagtatgggct

SEQ ID NO: 4426400 - DNA, 25 bp, Homo sapien
tgatacttatgtgggaaacacctac

SEQ ID NO: 4426401 - DNA, 25 bp, Homo sapien
ttccagttctacagagtggagccag

SEQ ID NO: 4426402 - DNA, 25 bp, Homo sapien
gatgcatcccctgtggcttataggt

SEQ ID NO: 4426403 - DNA, 25 bp, Homo sapien
catgaattgtttgcctgacttcaca

SEQ ID NO: 4426404 - DNA, 25 bp, Homo sapien
gttcatgaattgtttgcctgacttc

SEQ ID NO: 4426405 - DNA, 25 bp, Homo sapien
gacttcacagagtagtctattggtg

SEQ ID NO: 4426406 - DNA, 25 bp, Homo sapien
tgcctgacttcacagagtagtctat

SEQ ID NO: 4426407 - DNA, 25 bp, Homo sapien
tcaataaacataatccatcatataa

SEQ ID NO: 4426408 - DNA, 25 bp, Homo sapien
aaaggccttcgacaaaattcagcag

SEQ ID NO: 4426409 - DNA, 25 bp, Homo sapien
ggccttcgacaaaattcagcagccc

SEQ ID NO: 4426410 - DNA, 25 bp, Homo sapien
acagaaccaaagacaaaaaccatat

SEQ ID NO: 4426411 - DNA, 25 bp, Homo sapien
tccactacatgggattaacagcaga

SEQ ID NO: 4426412 - DNA, 25 bp, Homo sapien
aaatggaaatgcactactgtaaggg

SEQ ID NO: 4426413 - DNA, 25 bp, Homo sapien
gaaatacggatctacacaaagggat

SEQ ID NO: 4426414 - DNA, 25 bp, Homo sapien
gagacgtggaacaacttcaatcaga

SEQ ID NO: 4426415 - DNA, 25 bp, Homo sapien
gaggagacatttactactgatatca

SEQ ID NO: 4426416 - DNA, 25 bp, Homo sapien
ttatgcaccatcaaattggatgacc

SEQ ID NO: 4426417 - DNA, 25 bp, Homo sapien
caggattaggcagcttcactactga

SEQ ID NO: 4426418 - DNA, 25 bp, Homo sapien
tatattagcaaactggattcacgaa

SEQ ID NO: 4426419 - DNA, 25 bp, Homo sapien
tgcaatactataatacgggacctca

SEQ ID NO: 4426420 - DNA, 25 bp, Homo sapien
gaccaaacggacttaacaggcatat

SEQ ID NO: 4426421 - DNA, 25 bp, Homo sapien
gggcagattgatcacctagacagaa

SEQ ID NO: 4426422 - DNA, 25 bp, Homo sapien
tgaagagggagataggctgcaatac

SEQ ID NO: 4426423 - DNA, 25 bp, Homo sapien
gcaagagattcacttttctactaaa

SEQ ID NO: 4426424 - DNA, 25 bp, Homo sapien
gagattcacttttctactaaacata

SEQ ID NO: 4426425 - DNA, 25 bp, Homo sapien
ctgcgcccggcaagagattcacttt

SEQ ID NO: 4426426 - DNA, 25 bp, Homo sapien
gcccggcaagagattcacttttcta

SEQ ID NO: 4426427 - DNA, 25 bp, Homo sapien
gacactgtgtttgctcttgaaagat

SEQ ID NO: 4426428 - DNA, 25 bp, Homo sapien
caacgagtgataattcactgaagct

SEQ ID NO: 4426429 - DNA, 25 bp, Homo sapien
gctctgctgctctgaaattgtggaa

SEQ ID NO: 4426430 - DNA, 25 bp, Homo sapien
taacaaaatgcttgaagcttccctc

SEQ ID NO: 4426431 - DNA, 25 bp, Homo sapien
ggagaccagccttgagatgatgcag

SEQ ID NO: 4426432 - DNA, 25 bp, Homo sapien
tcatgaattcaggttgccccaaaga

SEQ ID NO: 4426433 - DNA, 25 bp, Homo sapien
catgcagtttggatggttgacctca

SEQ ID NO: 4426434 - DNA, 25 bp, Homo sapien
ggtaatgctatcttccatgccacag

SEQ ID NO: 4426435 - DNA, 25 bp, Homo sapien
gctagcacctccagtacaatattgg

SEQ ID NO: 4426436 - DNA, 25 bp, Homo sapien
caaaacagctgggatcttgataggg

SEQ ID NO: 4426437 - DNA, 25 bp, Homo sapien
gatttcagtgtgcaagtcttgacgt

SEQ ID NO: 4426438 - DNA, 25 bp, Homo sapien
cttgccttagtgtgctggctagcac

SEQ ID NO: 4426439 - DNA, 25 bp, Homo sapien
catacgctaccttgatgaaagggac

SEQ ID NO: 4426440 - DNA, 25 bp, Homo sapien
gaaagggaccttcgtgcaactgtag

SEQ ID NO: 4426441 - DNA, 25 bp, Homo sapien
tagaacactgttagggtacatacgc

SEQ ID NO: 4426442 - DNA, 25 bp, Homo sapien
gagtcagaatgaacctacccttaaa

SEQ ID NO: 4426443 - DNA, 25 bp, Homo sapien
acaagctatagctaatgtgctgagc

SEQ ID NO: 4426444 - DNA, 25 bp, Homo sapien
aactaaggtgagacattgatatatc

SEQ ID NO: 4426445 - DNA, 25 bp, Homo sapien
tgatatatccttttgctacaagcta

SEQ ID NO: 4426446 - DNA, 25 bp, Homo sapien
gaattacattgtatagccccacaga

SEQ ID NO: 4426447 - DNA, 25 bp, Homo sapien
gaatcagccattttatcgaggcacg

SEQ ID NO: 4426448 - DNA, 25 bp, Homo sapien
gacaatccaaagtctccccttcgtg

SEQ ID NO: 4426449 - DNA, 25 bp, Homo sapien
cgaggcacgtgatcagtgttgcaac

SEQ ID NO: 4426450 - DNA, 25 bp, Homo sapien
tcgtgttgccatcatcttgttgaat

SEQ ID NO: 4426451 - DNA, 25 bp, Homo sapien
ggtagtcaagcctattgcaacaaag

SEQ ID NO: 4426452 - DNA, 25 bp, Homo sapien
gatgcaattactgctgttctagccc

SEQ ID NO: 4426453 - DNA, 25 bp, Homo sapien
caacagaactactctcccaaggaaa

SEQ ID NO: 4426454 - DNA, 25 bp, Homo sapien
gtagaccacgtaaccttcaagtatg

SEQ ID NO: 4426455 - DNA, 25 bp, Homo sapien
aagagagattgttgaaggccatcac

SEQ ID NO: 4426456 - DNA, 25 bp, Homo sapien
ggtggtgatagtgtcccagtacaaa

SEQ ID NO: 4426457 - DNA, 25 bp, Homo sapien
taatgtgcttttacttccggaatac

SEQ ID NO: 4426458 - DNA, 25 bp, Homo sapien
aggccatcacgtatgccaaaggatt

SEQ ID NO: 4426459 - DNA, 25 bp, Homo sapien
tcttcttgcagtttacaacgggcac

SEQ ID NO: 4426460 - DNA, 25 bp, Homo sapien
aattaaagatgattatagccaaaaa

SEQ ID NO: 4426461 - DNA, 25 bp, Homo sapien
tttacaacgggcacagacagagcac

SEQ ID NO: 4426462 - DNA, 25 bp, Homo sapien
atgattatagccaaaaatggcccag

SEQ ID NO: 4426463 - DNA, 25 bp, Homo sapien
tcagataaatggtgttgcagcacca

SEQ ID NO: 4426464 - DNA, 25 bp, Homo sapien
tggagggttctgtgctacagcagac

SEQ ID NO: 4426465 - DNA, 25 bp, Homo sapien
ggctttattaccacccactgcaggg

SEQ ID NO: 4426466 - DNA, 25 bp, Homo sapien
tccccaaaaggagtatcatgaactg

SEQ ID NO: 4426467 - DNA, 25 bp, Homo sapien
gttaccctcattcagaaatttccca

SEQ ID NO: 4426468 - DNA, 25 bp, Homo sapien
taataattacactgtttcactctgt

SEQ ID NO: 4426469 - DNA, 25 bp, Homo sapien
catttctaattactccttagttgtg

SEQ ID NO: 4426470 - DNA, 25 bp, Homo sapien
ttactccttagttgtgtcatgtctt

SEQ ID NO: 4426471 - DNA, 25 bp, Homo sapien
taaggtatagcatgtaggtactagc

SEQ ID NO: 4426472 - DNA, 25 bp, Homo sapien
gttgcttttatctcagtccactggg

SEQ ID NO: 4426473 - DNA, 25 bp, Homo sapien
tactcatcccagtgttggcgttttc

SEQ ID NO: 4426474 - DNA, 25 bp, Homo sapien
catatatttgtgagctgtggttcca

SEQ ID NO: 4426475 - DNA, 25 bp, Homo sapien
tacagaatatgacggtggctatacc

SEQ ID NO: 4426476 - DNA, 25 bp, Homo sapien
gaaactacagaatatgacggtggct

SEQ ID NO: 4426477 - DNA, 25 bp, Homo sapien
tgacggtggctataccagggactct

SEQ ID NO: 4426478 - DNA, 25 bp, Homo sapien
gaatatgacggtggctataccaggg

SEQ ID NO: 4426479 - DNA, 25 bp, Homo sapien
catgaagcaggagatagttaatagc

SEQ ID NO: 4426480 - DNA, 25 bp, Homo sapien
aagcacacagttgggcactaaagcc

SEQ ID NO: 4426481 - DNA, 25 bp, Homo sapien
tattaagctgtaagcaggaacctca

SEQ ID NO: 4426482 - DNA, 25 bp, Homo sapien
tataagttggtatgaaagcacacag

SEQ ID NO: 4426483 - DNA, 25 bp, Homo sapien
attggcatagtactgggtctggcta

SEQ ID NO: 4426484 - DNA, 25 bp, Homo sapien
tggacattgttttctcaagtgctaa

SEQ ID NO: 4426485 - DNA, 25 bp, Homo sapien
cattcaccccaatttatagcagata

SEQ ID NO: 4426486 - DNA, 25 bp, Homo sapien
aatcaatgttgcatgcctaattaca

SEQ ID NO: 4426487 - DNA, 25 bp, Homo sapien
tcatagatgatgcacttgtccgggt

SEQ ID NO: 4426488 - DNA, 25 bp, Homo sapien
gactcaaagttagacgtgaccatat

SEQ ID NO: 4426489 - DNA, 25 bp, Homo sapien
tagaattcgcatgtacagtgaacga

SEQ ID NO: 4426490 - DNA, 25 bp, Homo sapien
gacagcagttgaatccatatttgag

SEQ ID NO: 4426491 - DNA, 25 bp, Homo sapien
gatgccattagaagggtctacacca

SEQ ID NO: 4426492 - DNA, 25 bp, Homo sapien
cacctaacgtggaatgtgacttgac

SEQ ID NO: 4426493 - DNA, 25 bp, Homo sapien
tttgcaaagcgatgagcaagctacc

SEQ ID NO: 4426494 - DNA, 25 bp, Homo sapien
tacaatgcagaccagattcggagaa

SEQ ID NO: 4426495 - DNA, 25 bp, Homo sapien
tagatgtgacttacttaacagaaga

SEQ ID NO: 4426496 - DNA, 25 bp, Homo sapien
catgtgagtctagaatggtgatccc

SEQ ID NO: 4426497 - DNA, 25 bp, Homo sapien
cctaggacaggccatattactgcat

SEQ ID NO: 4426498 - DNA, 25 bp, Homo sapien
gatgttccgaaagcatgacatatca

SEQ ID NO: 4426499 - DNA, 25 bp, Homo sapien
taaccttatgacttgctcaggaagc

SEQ ID NO: 4426500 - DNA, 25 bp, Homo sapien
tgtgcaccagagagtaccagtaact

SEQ ID NO: 4426501 - DNA, 25 bp, Homo sapien
ggtacagtcatgctgccaaggatca

SEQ ID NO: 4426502 - DNA, 25 bp, Homo sapien
cagttctccagtaagtgtgcaccag

SEQ ID NO: 4426503 - DNA, 25 bp, Homo sapien
tgaatgactaccagggcttagcgcc

SEQ ID NO: 4426504 - DNA, 25 bp, Homo sapien
caccagttaactgagggctgtggaa

SEQ ID NO: 4426505 - DNA, 25 bp, Homo sapien
tcagcttaccttgagaactcgaaag

SEQ ID NO: 4426506 - DNA, 25 bp, Homo sapien
tgcagcagctattaaagccctcgag

SEQ ID NO: 4426507 - DNA, 25 bp, Homo sapien
tcgtatggataataatgcagcagct

SEQ ID NO: 4426508 - DNA, 25 bp, Homo sapien
acttgggtatgttccagtacacttg

SEQ ID NO: 4426509 - DNA, 25 bp, Homo sapien
acagagccaaagcattatcatatat

SEQ ID NO: 4426510 - DNA, 25 bp, Homo sapien
cagtacacttgatggatactggaac

SEQ ID NO: 4426511 - DNA, 25 bp, Homo sapien
gagccaaagcattatcatatatagt

SEQ ID NO: 4426512 - DNA, 25 bp, Homo sapien
ggccacagtgcagtggctctgtctc

SEQ ID NO: 4426513 - DNA, 25 bp, Homo sapien
caggccacagtgcagtggctctgtc

SEQ ID NO: 4426514 - DNA, 25 bp, Homo sapien
cccaggccacagtgcagtggctctg

SEQ ID NO: 4426515 - DNA, 25 bp, Homo sapien
ccacagtgcagtggctctgtctcgg

SEQ ID NO: 4426516 - DNA, 25 bp, Homo sapien
ttagattccaagtttgataattcca

SEQ ID NO: 4426517 - DNA, 25 bp, Homo sapien
tacaacgttttatgcccagatgtag

SEQ ID NO: 4426518 - DNA, 25 bp, Homo sapien
tcttgatagcttggacatgatgtac

SEQ ID NO: 4426519 - DNA, 25 bp, Homo sapien
tgtgttttatctctagcacttcctt

SEQ ID NO: 4426520 - DNA, 25 bp, Homo sapien
tgggacacgctaatgtaaaatggta

SEQ ID NO: 4426521 - DNA, 25 bp, Homo sapien
tcacgggtcatggaatagctcttca

SEQ ID NO: 4426522 - DNA, 25 bp, Homo sapien
gctcctttgactatgtgggtccatt

SEQ ID NO: 4426523 - DNA, 25 bp, Homo sapien
tcttcatggttggtacctttggtgc

SEQ ID NO: 4426524 - DNA, 25 bp, Homo sapien
cattttagttaatagttctttatca

SEQ ID NO: 4426525 - DNA, 25 bp, Homo sapien
tttaagagttccttacactgtctct

SEQ ID NO: 4426526 - DNA, 25 bp, Homo sapien
gttccttacactgtctctgtctgtc

SEQ ID NO: 4426527 - DNA, 25 bp, Homo sapien
agttaatagttctttatcagatgtg

SEQ ID NO: 4426528 - DNA, 25 bp, Homo sapien
tatggctcttctactgtcttccagc

SEQ ID NO: 4426529 - DNA, 25 bp, Homo sapien
gtcttccagctacaattccctcttg

SEQ ID NO: 4426530 - DNA, 25 bp, Homo sapien
tgaatgcttttctactatcttaaac

SEQ ID NO: 4426531 - DNA, 25 bp, Homo sapien
ccttctcttagagacttgtcctatg

SEQ ID NO: 4426532 - DNA, 25 bp, Homo sapien
cgtttctaccactagtgcacaaggg

SEQ ID NO: 4426533 - DNA, 25 bp, Homo sapien
gagcgctcaggttgcttccatgttg

SEQ ID NO: 4426534 - DNA, 25 bp, Homo sapien
tgtgaatctgcaagaaacgactata

SEQ ID NO: 4426535 - DNA, 25 bp, Homo sapien
caaatttatgtgacccaaccatgtg

SEQ ID NO: 4426536 - DNA, 25 bp, Homo sapien
tctgacgacattgaagctagccgaa

SEQ ID NO: 4426537 - DNA, 25 bp, Homo sapien
tgttgtatggccacctgatctgacc

SEQ ID NO: 4426538 - DNA, 25 bp, Homo sapien
tcaggcagctagaagcatgagcggc

SEQ ID NO: 4426539 - DNA, 25 bp, Homo sapien
catgagcggcttattccaggcagaa

SEQ ID NO: 4426540 - DNA, 25 bp, Homo sapien
tctgtctgcctagggagtagtttac

SEQ ID NO: 4426541 - DNA, 25 bp, Homo sapien
aagtttaatactgtgagtgaatacc

SEQ ID NO: 4426542 - DNA, 25 bp, Homo sapien
cagctctgttcttttagtgtgaaag

SEQ ID NO: 4426543 - DNA, 25 bp, Homo sapien
tacaaaactacatggctggcctaag

SEQ ID NO: 4426544 - DNA, 25 bp, Homo sapien
taataatgacagatgtgttcagcaa

SEQ ID NO: 4426545 - DNA, 25 bp, Homo sapien
tggaattcgtattgcatgtgtatct

SEQ ID NO: 4426546 - DNA, 25 bp, Homo sapien
aaagcattgtgtcaggtgctcacta

SEQ ID NO: 4426547 - DNA, 25 bp, Homo sapien
acttccaagactgtatgagggaccc

SEQ ID NO: 4426548 - DNA, 25 bp, Homo sapien
gaacaagtatcaacctacacagtgg

SEQ ID NO: 4426549 - DNA, 25 bp, Homo sapien
tatgtagttgcaggcataccatgcc

SEQ ID NO: 4426550 - DNA, 25 bp, Homo sapien
tacacagtggttagggcaaataaaa

SEQ ID NO: 4426551 - DNA, 25 bp, Homo sapien
caaatggatgtgtaccgttggtaat

SEQ ID NO: 4426552 - DNA, 25 bp, Homo sapien
tctttagaatcagacaaattagggt

SEQ ID NO: 4426553 - DNA, 25 bp, Homo sapien
caagtacaagggaataagcgtggtc

SEQ ID NO: 4426554 - DNA, 25 bp, Homo sapien
taaggaaattcatagggtttgagta

SEQ ID NO: 4426555 - DNA, 25 bp, Homo sapien
gaagataattctagtggcaaagttg

SEQ ID NO: 4426556 - DNA, 25 bp, Homo sapien
aaaatacagttgaccacatatacca

SEQ ID NO: 4426557 - DNA, 25 bp, Homo sapien
gtgttacattgttaagagcatgtgg

SEQ ID NO: 4426558 - DNA, 25 bp, Homo sapien
gagcatgtggaatggcttctattgt

SEQ ID NO: 4426559 - DNA, 25 bp, Homo sapien
agttgaccacatataccatttcatg

SEQ ID NO: 4426560 - DNA, 25 bp, Homo sapien
attttgggatccatgggagtcctgg

SEQ ID NO: 4426561 - DNA, 25 bp, Homo sapien
ggagaagggccatagactccaccac

SEQ ID NO: 4426562 - DNA, 25 bp, Homo sapien
tctctcatttggtcagggattggca

SEQ ID NO: 4426563 - DNA, 25 bp, Homo sapien
tataagggattcgaagcatccttgg

SEQ ID NO: 4426564 - DNA, 25 bp, Homo sapien
cttgagcatgtatgttaactaaaac

SEQ ID NO: 4426565 - DNA, 25 bp, Homo sapien
tgcagttgttagtataccacaccct

SEQ ID NO: 4426566 - DNA, 25 bp, Homo sapien
ttcactcttcattttatcgtacaat

SEQ ID NO: 4426567 - DNA, 25 bp, Homo sapien
tagaatttactatgctgttccagtt

SEQ ID NO: 4426568 - DNA, 25 bp, Homo sapien
gtaacatgtactcttccatgcctgg

SEQ ID NO: 4426569 - DNA, 25 bp, Homo sapien
tactctagaattgcatatccatgga

SEQ ID NO: 4426570 - DNA, 25 bp, Homo sapien
ctttaattgcacacgttctgagagg

SEQ ID NO: 4426571 - DNA, 25 bp, Homo sapien
tccacttgggtagctgattgtcttg

SEQ ID NO: 4426572 - DNA, 25 bp, Homo sapien
gctccctgcatccttgaaccccctg

SEQ ID NO: 4426573 - DNA, 25 bp, Homo sapien
agctccctgcatccttgaaccccct

SEQ ID NO: 4426574 - DNA, 25 bp, Homo sapien
ggctggcgacgaacgccgggatttc

SEQ ID NO: 4426575 - DNA, 25 bp, Homo sapien
ttcggctcctcctcggaatagctcg

SEQ ID NO: 4426576 - DNA, 25 bp, Homo sapien
atagctcgcggcctgtagcccctgg

SEQ ID NO: 4426577 - DNA, 25 bp, Homo sapien
ctcggaatagctcgcggcctgtagc

SEQ ID NO: 4426578 - DNA, 25 bp, Homo sapien
tagtagatacaaagttgtttttctg

SEQ ID NO: 4426579 - DNA, 25 bp, Homo sapien
tagatacaaagttgtttttctggga

SEQ ID NO: 4426580 - DNA, 25 bp, Homo sapien
agtagatacaaagttgtttttctgg

SEQ ID NO: 4426581 - DNA, 25 bp, Homo sapien
ttattctgctaaacgatcgcgtagc

SEQ ID NO: 4426582 - DNA, 25 bp, Homo sapien
ctgctaaacgatcgcgtagctcctt

SEQ ID NO: 4426583 - DNA, 25 bp, Homo sapien
taaacgatcgcgtagctccttcagg

SEQ ID NO: 4426584 - DNA, 25 bp, Homo sapien
acgatcgcgtagctccttcaggagg

SEQ ID NO: 4426585 - DNA, 25 bp, Homo sapien
gaactgccaagagtagctgtgcccc

SEQ ID NO: 4426586 - DNA, 25 bp, Homo sapien
cagagaatttcaggctctgagagaa

SEQ ID NO: 4426587 - DNA, 25 bp, Homo sapien
tgccaagagtagctgtgccccagtt

SEQ ID NO: 4426588 - DNA, 25 bp, Homo sapien
tgagagaactgccaagagtagctgt

SEQ ID NO: 4426589 - DNA, 25 bp, Homo sapien
tttaagtgcccaacagcagtgtgtg

SEQ ID NO: 4426590 - DNA, 25 bp, Homo sapien
caatgctgctctagacacagtggat

SEQ ID NO: 4426591 - DNA, 25 bp, Homo sapien
tacatggatctagagctgcctacag

SEQ ID NO: 4426592 - DNA, 25 bp, Homo sapien
gatgtggtctcgtggcttcacccag

SEQ ID NO: 4426593 - DNA, 25 bp, Homo sapien
aaggaagaacactgcgcgttcagcc

SEQ ID NO: 4426594 - DNA, 25 bp, Homo sapien
ctgaagccaatgctgcacacggcaa

SEQ ID NO: 4426595 - DNA, 25 bp, Homo sapien
tcattaggagcgttaacaccacagc

SEQ ID NO: 4426596 - DNA, 25 bp, Homo sapien
cacgggtcgtttagaggccactggc

SEQ ID NO: 4426597 - DNA, 25 bp, Homo sapien
agaagagatggtttttctaagaccg

SEQ ID NO: 4426598 - DNA, 25 bp, Homo sapien
cttggaattttgtaatgcggaatcg

SEQ ID NO: 4426599 - DNA, 25 bp, Homo sapien
gaatcggcaggtgcgcagagacatc

SEQ ID NO: 4426600 - DNA, 25 bp, Homo sapien
ggtgcgcagagacatccgagactga

SEQ ID NO: 4426601 - DNA, 25 bp, Homo sapien
ttgcaggagtcgctgttctcgcagc

SEQ ID NO: 4426602 - DNA, 25 bp, Homo sapien
tgcaggagtcgctgttctcgcagct

SEQ ID NO: 4426603 - DNA, 25 bp, Homo sapien
gagtcgctgttctcgcagctggatt

SEQ ID NO: 4426604 - DNA, 25 bp, Homo sapien
cgctgttctcgcagctggattttgt

SEQ ID NO: 4426605 - DNA, 25 bp, Homo sapien
ccatgtgtcaatgcttgtattttga

SEQ ID NO: 4426606 - DNA, 25 bp, Homo sapien
actctctcctccgtatatttgcagc

SEQ ID NO: 4426607 - DNA, 25 bp, Homo sapien
tatatttgcagcatccatatgtcct

SEQ ID NO: 4426608 - DNA, 25 bp, Homo sapien
ttttagtgtctgaccatgtgtcaat

SEQ ID NO: 4426609 - DNA, 25 bp, Homo sapien
gatgtctcattactaacggtgtgcc

SEQ ID NO: 4426610 - DNA, 25 bp, Homo sapien
tgacacctgcccaatgtgaaaagca

SEQ ID NO: 4426611 - DNA, 25 bp, Homo sapien
taatcagagctgcagcattcatgcc

SEQ ID NO: 4426612 - DNA, 25 bp, Homo sapien
tgcagtctggtcctatgaccccagg

SEQ ID NO: 4426613 - DNA, 25 bp, Homo sapien
caatgccaattcaagcatgtcctcc

SEQ ID NO: 4426614 - DNA, 25 bp, Homo sapien
atgccaattcaagcatgtcctccat

SEQ ID NO: 4426615 - DNA, 25 bp, Homo sapien
aatgccaattcaagcatgtcctcca

SEQ ID NO: 4426616 - DNA, 25 bp, Homo sapien
acatacctctgtctggcaacagtcc

SEQ ID NO: 4426617 - DNA, 25 bp, Homo sapien
tggcaatgcctaggtgcccacatac

SEQ ID NO: 4426618 - DNA, 25 bp, Homo sapien
gttcccacgtgccagtgtagccaga

SEQ ID NO: 4426619 - DNA, 25 bp, Homo sapien
gccagagggcgagaacttgtcttca

SEQ ID NO: 4426620 - DNA, 25 bp, Homo sapien
tcacaggcgccgcaacaagggctca

SEQ ID NO: 4426621 - DNA, 25 bp, Homo sapien
ctccagggtgggagcagcgataatg

SEQ ID NO: 4426622 - DNA, 25 bp, Homo sapien
agcagcgataatgacccactccact

SEQ ID NO: 4426623 - DNA, 25 bp, Homo sapien
caggcgccgcaacaagggctcagga

SEQ ID NO: 4426624 - DNA, 25 bp, Homo sapien
ttaatggagcatggctttcaactgc

SEQ ID NO: 4426625 - DNA, 25 bp, Homo sapien
taatggagcatggctttcaactgca

SEQ ID NO: 4426626 - DNA, 25 bp, Homo sapien
cacagtttgtttagtcggccacaca

SEQ ID NO: 4426627 - DNA, 25 bp, Homo sapien
ccaaagtccataattcacataaggg

SEQ ID NO: 4426628 - DNA, 25 bp, Homo sapien
tgtacagagatcctatagagcccct

SEQ ID NO: 4426629 - DNA, 25 bp, Homo sapien
gaacctccattgacatgtcacagtc

SEQ ID NO: 4426630 - DNA, 25 bp, Homo sapien
tgtgctcagcagttagttagcctca

SEQ ID NO: 4426631 - DNA, 25 bp, Homo sapien
taagtgtgtttcaaccatcagaggg

SEQ ID NO: 4426632 - DNA, 25 bp, Homo sapien
tagtgcttggaagaccaccagctgc

SEQ ID NO: 4426633 - DNA, 25 bp, Homo sapien
gttgctgatcagctatagtgcttgg

SEQ ID NO: 4426634 - DNA, 25 bp, Homo sapien
tggccagtccaggatcactcagaac

SEQ ID NO: 4426635 - DNA, 25 bp, Homo sapien
aaggccagtggagctcccatggaaa

SEQ ID NO: 4426636 - DNA, 25 bp, Homo sapien
tcccaaatactgtgcacccgtagtc

SEQ ID NO: 4426637 - DNA, 25 bp, Homo sapien
tcagccactggcgaagtgcttcttg

SEQ ID NO: 4426638 - DNA, 25 bp, Homo sapien
acagagctgaaggtccctaatccca

SEQ ID NO: 4426639 - DNA, 25 bp, Homo sapien
cagagctgaaggtccctaatcccat

SEQ ID NO: 4426640 - DNA, 25 bp, Homo sapien
tcctgcgcccctcacagagctgaag

SEQ ID NO: 4426641 - DNA, 25 bp, Homo sapien
gcccctcgcactgtacgtgcctggc

SEQ ID NO: 4426642 - DNA, 25 bp, Homo sapien
tgcagcccctcgcactgtacgtgcc

SEQ ID NO: 4426643 - DNA, 25 bp, Homo sapien
cctcgcactgtacgtgcctggccat

SEQ ID NO: 4426644 - DNA, 25 bp, Homo sapien
tcgcactgtacgtgcctggccatgc

SEQ ID NO: 4426645 - DNA, 25 bp, Homo sapien
aataaaatgtcatgactgtcaccac

SEQ ID NO: 4426646 - DNA, 25 bp, Homo sapien
ggagcacggcataagcggacttatc

SEQ ID NO: 4426647 - DNA, 25 bp, Homo sapien
gcggacttatcttgttccaggagtt

SEQ ID NO: 4426648 - DNA, 25 bp, Homo sapien
caggaagtatgcaacggagcacggc

SEQ ID NO: 4426649 - DNA, 25 bp, Homo sapien
attcatgcctgatgccttgttgttc

SEQ ID NO: 4426650 - DNA, 25 bp, Homo sapien
catgcctgatgccttgttgttcctt

SEQ ID NO: 4426651 - DNA, 25 bp, Homo sapien
tgcctgatgccttgttgttcctttc

SEQ ID NO: 4426652 - DNA, 25 bp, Homo sapien
cctgatgccttgttgttcctttcca

SEQ ID NO: 4426653 - DNA, 25 bp, Homo sapien
gttcgagggtagtatcaaagtagca

SEQ ID NO: 4426654 - DNA, 25 bp, Homo sapien
gaagctaccaattgttgagttcgag

SEQ ID NO: 4426655 - DNA, 25 bp, Homo sapien
tcagcagcatgaatatctcaagtca

SEQ ID NO: 4426656 - DNA, 25 bp, Homo sapien
tatatgcaactggattttagtcatc

SEQ ID NO: 4426657 - DNA, 25 bp, Homo sapien
ataaagctaggactccaaaggccaa

SEQ ID NO: 4426658 - DNA, 25 bp, Homo sapien
gattttatgatctggaggtacagca

SEQ ID NO: 4426659 - DNA, 25 bp, Homo sapien
ctgattttatgatctggaggtacag

SEQ ID NO: 4426660 - DNA, 25 bp, Homo sapien
attttatgatctggaggtacagcat

SEQ ID NO: 4426661 - DNA, 25 bp, Homo sapien
tgattttatgatctggaggtacagc

SEQ ID NO: 4426662 - DNA, 25 bp, Homo sapien
atggcccggccacggacagcagctg

SEQ ID NO: 4426663 - DNA, 25 bp, Homo sapien
ccatcgcatggcccggccacggaca

SEQ ID NO: 4426664 - DNA, 25 bp, Homo sapien
gtttccatttccatcgcatggcccg

SEQ ID NO: 4426665 - DNA, 25 bp, Homo sapien
tttccatcgcatggcccggccacgg

SEQ ID NO: 4426666 - DNA, 25 bp, Homo sapien
aataagcccactcagaccgctgtct

SEQ ID NO: 4426667 - DNA, 25 bp, Homo sapien
aggaatgcctccaaagtcgctgctg

SEQ ID NO: 4426668 - DNA, 25 bp, Homo sapien
cactcgttcggagaggccggctgaa

SEQ ID NO: 4426669 - DNA, 25 bp, Homo sapien
caggacagccgggaaaagccaaagg

SEQ ID NO: 4426670 - DNA, 25 bp, Homo sapien
agcaggaaccgggatccagcgacca

SEQ ID NO: 4426671 - DNA, 25 bp, Homo sapien
gttttggtgagggcatgcaatgtaa

SEQ ID NO: 4426672 - DNA, 25 bp, Homo sapien
ttgttgcatgtatttatggaatata

SEQ ID NO: 4426673 - DNA, 25 bp, Homo sapien
cgtccacaatgccaggctctattgg

SEQ ID NO: 4426674 - DNA, 25 bp, Homo sapien
tccacaatgccaggctctattggct

SEQ ID NO: 4426675 - DNA, 25 bp, Homo sapien
atgccaggctctattggcttttgcc

SEQ ID NO: 4426676 - DNA, 25 bp, Homo sapien
gccaggctctattggcttttgcctc

SEQ ID NO: 4426677 - DNA, 25 bp, Homo sapien
gggaagggactgatcgtgtgtctgc

SEQ ID NO: 4426678 - DNA, 25 bp, Homo sapien
agggactgatcgtgtgtctgccttt

SEQ ID NO: 4426679 - DNA, 25 bp, Homo sapien
gaagggactgatcgtgtgtctgcct

SEQ ID NO: 4426680 - DNA, 25 bp, Homo sapien
tggggaagggactgatcgtgtgtct

SEQ ID NO: 4426681 - DNA, 25 bp, Homo sapien
gtttacattcacaattgccgctggt

SEQ ID NO: 4426682 - DNA, 25 bp, Homo sapien
tctggtagatgtcaggaaaaacact

SEQ ID NO: 4426683 - DNA, 25 bp, Homo sapien
cggagcctgcggcacaaagcagaga

SEQ ID NO: 4426684 - DNA, 25 bp, Homo sapien
gtatttggaccaggcaggctttcgg

SEQ ID NO: 4426685 - DNA, 25 bp, Homo sapien
tccttaggacatccgcctcttgctg

SEQ ID NO: 4426686 - DNA, 25 bp, Homo sapien
atttccttaggacatccgcctcttg

SEQ ID NO: 4426687 - DNA, 25 bp, Homo sapien
tttccttaggacatccgcctcttgc

SEQ ID NO: 4426688 - DNA, 25 bp, Homo sapien
ttccttaggacatccgcctcttgct

SEQ ID NO: 4426689 - DNA, 25 bp, Homo sapien
caggaagattcggttctgaaatccg

SEQ ID NO: 4426690 - DNA, 25 bp, Homo sapien
atgggcacacgtaaaaccagaaggg

SEQ ID NO: 4426691 - DNA, 25 bp, Homo sapien
gttctgaaatccgagaggagtgcag

SEQ ID NO: 4426692 - DNA, 25 bp, Homo sapien
aagagcctggagcatggaatgagcc

SEQ ID NO: 4426693 - DNA, 25 bp, Homo sapien
ggccgtgatatctaaatcctttcat

SEQ ID NO: 4426694 - DNA, 25 bp, Homo sapien
tgctatggtccttatggccgtgata

SEQ ID NO: 4426695 - DNA, 25 bp, Homo sapien
tcatttccgcttgctatggtcctta

SEQ ID NO: 4426696 - DNA, 25 bp, Homo sapien
ttcatttctttcagtaaggagctgg

SEQ ID NO: 4426697 - DNA, 25 bp, Homo sapien
ttaaagcagcaatttaacgccaaga

SEQ ID NO: 4426698 - DNA, 25 bp, Homo sapien
gcagcaatttaacgccaagagtgcc

SEQ ID NO: 4426699 - DNA, 25 bp, Homo sapien
tttaacgccaagagtgcctcaaaat

SEQ ID NO: 4426700 - DNA, 25 bp, Homo sapien
caatttaacgccaagagtgcctcaa

SEQ ID NO: 4426701 - DNA, 25 bp, Homo sapien
ctaactactcaatctcctagccaca

SEQ ID NO: 4426702 - DNA, 25 bp, Homo sapien
taactactcaatctcctagccacat

SEQ ID NO: 4426703 - DNA, 25 bp, Homo sapien
taaaagaacactcctcggctagggc

SEQ ID NO: 4426704 - DNA, 25 bp, Homo sapien
tagcatcaccatttcgcagagtgtg

SEQ ID NO: 4426705 - DNA, 25 bp, Homo sapien
ggctgcgaattccaggaaagggcca

SEQ ID NO: 4426706 - DNA, 25 bp, Homo sapien
caattttagggactccatgggcaac

SEQ ID NO: 4426707 - DNA, 25 bp, Homo sapien
tgtgtatcaaaccaaagctcaagaa

SEQ ID NO: 4426708 - DNA, 25 bp, Homo sapien
ggcccagtctgtgtatcaaaccaaa

SEQ ID NO: 4426709 - DNA, 25 bp, Homo sapien
cagcggctctattgggcccagtctg

SEQ ID NO: 4426710 - DNA, 25 bp, Homo sapien
atgcccagcggctctattgggccca

SEQ ID NO: 4426711 - DNA, 25 bp, Homo sapien
cactcatccaatggcataaacctgt

SEQ ID NO: 4426712 - DNA, 25 bp, Homo sapien
cttgctgaagcaccactcatcaatg

SEQ ID NO: 4426713 - DNA, 25 bp, Homo sapien
catcaatgtatctgctcatccacag

SEQ ID NO: 4426714 - DNA, 25 bp, Homo sapien
cactcatggtcagaggaattagtaa

SEQ ID NO: 4426715 - DNA, 25 bp, Homo sapien
ggtgtacttcttcgtaaacctcatc

SEQ ID NO: 4426716 - DNA, 25 bp, Homo sapien
gtgacctcttgcaggtgtacttctt

SEQ ID NO: 4426717 - DNA, 25 bp, Homo sapien
cttgcaggtgtacttcttcgtaaac

SEQ ID NO: 4426718 - DNA, 25 bp, Homo sapien
acttcttcgtaaacctcatcactga

SEQ ID NO: 4426719 - DNA, 25 bp, Homo sapien
gcaagagaagatgaagtattgtgat

SEQ ID NO: 4426720 - DNA, 25 bp, Homo sapien
aaaagctaatggcaagagaagatga

SEQ ID NO: 4426721 - DNA, 25 bp, Homo sapien
cttggtcaaggatttagactagggt

SEQ ID NO: 4426722 - DNA, 25 bp, Homo sapien
caaggatttagactagggtaggaag

SEQ ID NO: 4426723 - DNA, 25 bp, Homo sapien
gatcaccccacctgttctactaggc

SEQ ID NO: 4426724 - DNA, 25 bp, Homo sapien
cctgttctactaggctcaagctttt

SEQ ID NO: 4426725 - DNA, 25 bp, Homo sapien
ccacctgttctactaggctcaagct

SEQ ID NO: 4426726 - DNA, 25 bp, Homo sapien
gttctactaggctcaagcttttctc

SEQ ID NO: 4426727 - DNA, 25 bp, Homo sapien
ccgtgacctcctgcatatggagggg

SEQ ID NO: 4426728 - DNA, 25 bp, Homo sapien
tcctgcatatggaggggcacactcc

SEQ ID NO: 4426729 - DNA, 25 bp, Homo sapien
gctcccagcaaagggggccagatct

SEQ ID NO: 4426730 - DNA, 25 bp, Homo sapien
gacctcctgcatatggaggggcaca

SEQ ID NO: 4426731 - DNA, 25 bp, Homo sapien
taggactgtcatccacgtgtacagg

SEQ ID NO: 4426732 - DNA, 25 bp, Homo sapien
catcagggctgtcaacatgtgggct

SEQ ID NO: 4426733 - DNA, 25 bp, Homo sapien
tgctaccttgactgccgacatcagg

SEQ ID NO: 4426734 - DNA, 25 bp, Homo sapien
cactggaaggtgtgctaggactgtc

SEQ ID NO: 4426735 - DNA, 25 bp, Homo sapien
cctgtcctgggtacgtttggtgcgt

SEQ ID NO: 4426736 - DNA, 25 bp, Homo sapien
tgcgttactggagacacgagctttg

SEQ ID NO: 4426737 - DNA, 25 bp, Homo sapien
gagctttgtgtcaggtgtgtcaaca

SEQ ID NO: 4426738 - DNA, 25 bp, Homo sapien
tcacggcttcacacttgggccctgt

SEQ ID NO: 4426739 - DNA, 25 bp, Homo sapien
tcatcctgacggctgaccactggag

SEQ ID NO: 4426740 - DNA, 25 bp, Homo sapien
cctccacgttggaatgagattccag

SEQ ID NO: 4426741 - DNA, 25 bp, Homo sapien
ctgacggctgaccactggagtggca

SEQ ID NO: 4426742 - DNA, 25 bp, Homo sapien
cacgttggaatgagattccagttca

SEQ ID NO: 4426743 - DNA, 25 bp, Homo sapien
tgacagtgggtagcaggggcctcct

SEQ ID NO: 4426744 - DNA, 25 bp, Homo sapien
gacagtgggtagcaggggcctcctc

SEQ ID NO: 4426745 - DNA, 25 bp, Homo sapien
ctgccaaggagtgtccatgacagtg

SEQ ID NO: 4426746 - DNA, 25 bp, Homo sapien
caaggagtgtccatgacagtgggta

SEQ ID NO: 4426747 - DNA, 25 bp, Homo sapien
ctcttttgcagctgatgtagctgaa

SEQ ID NO: 4426748 - DNA, 25 bp, Homo sapien
ttgtataagaccgacacccaggaag

SEQ ID NO: 4426749 - DNA, 25 bp, Homo sapien
cacctctcctcgacgcttgtttgaa

SEQ ID NO: 4426750 - DNA, 25 bp, Homo sapien
tgcacgggagcagcagttgtataag

SEQ ID NO: 4426751 - DNA, 25 bp, Homo sapien
tgtccagggacacgcaacctccttg

SEQ ID NO: 4426752 - DNA, 25 bp, Homo sapien
ttcatcagtgtaacagcggtaactg

SEQ ID NO: 4426753 - DNA, 25 bp, Homo sapien
tccactaggtgaatgcccatcactg

SEQ ID NO: 4426754 - DNA, 25 bp, Homo sapien
gctggagccgggaaatatccactag

SEQ ID NO: 4426755 - DNA, 25 bp, Homo sapien
gggacctgggtgagcttcttctttg

SEQ ID NO: 4426756 - DNA, 25 bp, Homo sapien
caagcctgaggggacctgggtgagc

SEQ ID NO: 4426757 - DNA, 25 bp, Homo sapien
ctgaggggacctgggtgagcttctt

SEQ ID NO: 4426758 - DNA, 25 bp, Homo sapien
acccagcaagcctgaggggacctgg

SEQ ID NO: 4426759 - DNA, 25 bp, Homo sapien
tggacgtcagaagaatctctatgcc

SEQ ID NO: 4426760 - DNA, 25 bp, Homo sapien
catgagtggacgtcagaagaatctc

SEQ ID NO: 4426761 - DNA, 25 bp, Homo sapien
gctgcatgagtggacgtcagaagaa

SEQ ID NO: 4426762 - DNA, 25 bp, Homo sapien
agctgctgcatgagtggacgtcaga

SEQ ID NO: 4426763 - DNA, 25 bp, Homo sapien
aacgtgctgactgggactcccagct

SEQ ID NO: 4426764 - DNA, 25 bp, Homo sapien
gggaacgtgctgactgggactccca

SEQ ID NO: 4426765 - DNA, 25 bp, Homo sapien
gtgctgactgggactcccagctgga

SEQ ID NO: 4426766 - DNA, 25 bp, Homo sapien
cactggcaaatggaggggaacgtgc

SEQ ID NO: 4426767 - DNA, 25 bp, Homo sapien
tcaacatgtgtgactgcgcactgag

SEQ ID NO: 4426768 - DNA, 25 bp, Homo sapien
gaacaagcagtacgatttgttttct

SEQ ID NO: 4426769 - DNA, 25 bp, Homo sapien
gctaatacaggaaacaagaggtacc

SEQ ID NO: 4426770 - DNA, 25 bp, Homo sapien
gagtacaaatgtgtgactgctcatg

SEQ ID NO: 4426771 - DNA, 25 bp, Homo sapien
gactcgggaaccgagcactcatcag

SEQ ID NO: 4426772 - DNA, 25 bp, Homo sapien
tcagggacgcctcccgaaggactcg

SEQ ID NO: 4426773 - DNA, 25 bp, Homo sapien
cacgtcagttgaccaggaagtcccc

SEQ ID NO: 4426774 - DNA, 25 bp, Homo sapien
gcagtgctcccaaagagacctttgc

SEQ ID NO: 4426775 - DNA, 25 bp, Homo sapien
gaatcctggcattggcaagtactca

SEQ ID NO: 4426776 - DNA, 25 bp, Homo sapien
tctattaagagatgcgcagtggtcc

SEQ ID NO: 4426777 - DNA, 25 bp, Homo sapien
catccacggtgaaacaagctgtcct

SEQ ID NO: 4426778 - DNA, 25 bp, Homo sapien
gagccatgggttagcaagaagccac

SEQ ID NO: 4426779 - DNA, 25 bp, Homo sapien
gcctggctgcactccccccgggtgc

SEQ ID NO: 4426780 - DNA, 25 bp, Homo sapien
ggcctggctgcactccccccgggtg

SEQ ID NO: 4426781 - DNA, 25 bp, Homo sapien
ccagccaggcccaccggggcttctc

SEQ ID NO: 4426782 - DNA, 25 bp, Homo sapien
aagatgcctcttgagtgggtgtcat

SEQ ID NO: 4426783 - DNA, 25 bp, Homo sapien
catgaggcccttgcctggctgtgta

SEQ ID NO: 4426784 - DNA, 25 bp, Homo sapien
cacatgaggcccttgcctggctgtg

SEQ ID NO: 4426785 - DNA, 25 bp, Homo sapien
tcccacatgaggcccttgcctggct

SEQ ID NO: 4426786 - DNA, 25 bp, Homo sapien
tgcctcccacatgaggcccttgcct

SEQ ID NO: 4426787 - DNA, 25 bp, Homo sapien
cgaatgcgagaagccaaacaacgac

SEQ ID NO: 4426788 - DNA, 25 bp, Homo sapien
taggtctccgaattcaatcctttga

SEQ ID NO: 4426789 - DNA, 25 bp, Homo sapien
ttcaatcctttgacgttcaccagcg

SEQ ID NO: 4426790 - DNA, 25 bp, Homo sapien
gttcaccagcgtgatcgaatgcgag

SEQ ID NO: 4426791 - DNA, 25 bp, Homo sapien
cgagaccaaagccaggtagacagag

SEQ ID NO: 4426792 - DNA, 25 bp, Homo sapien
gagaccaaagccaggtagacagagg

SEQ ID NO: 4426793 - DNA, 25 bp, Homo sapien
gacagaggtgttgtgtttgtcactg

SEQ ID NO: 4426794 - DNA, 25 bp, Homo sapien
gtagacagaggtgttgtgtttgtca

SEQ ID NO: 4426795 - DNA, 25 bp, Homo sapien
cacgggatgaggattgcattctgta

SEQ ID NO: 4426796 - DNA, 25 bp, Homo sapien
tcagacggggatcattcagtccagg

SEQ ID NO: 4426797 - DNA, 25 bp, Homo sapien
tggaaaacttctgtgatcagacggg

SEQ ID NO: 4426798 - DNA, 25 bp, Homo sapien
ctgttgcacgggatgaggattgcat

SEQ ID NO: 4426799 - DNA, 25 bp, Homo sapien
tgcagaaaggtttgggcttcctcag

SEQ ID NO: 4426800 - DNA, 25 bp, Homo sapien
gccatgcagaaaggtttgggcttcc

SEQ ID NO: 4426801 - DNA, 25 bp, Homo sapien
cctgaaatgctaaatgaagggcact

SEQ ID NO: 4426802 - DNA, 25 bp, Homo sapien
cctgatgctgtaggatggcaagaca

SEQ ID NO: 4426803 - DNA, 25 bp, Homo sapien
taattgtatcagtttatgaattgcc

SEQ ID NO: 4426804 - DNA, 25 bp, Homo sapien
gccagtaacaagttttatcaatttc

SEQ ID NO: 4426805 - DNA, 25 bp, Homo sapien
taatacagtcaacatgcttttatat

SEQ ID NO: 4426806 - DNA, 25 bp, Homo sapien
tcttcctgcatcttagtcctttcat

SEQ ID NO: 4426807 - DNA, 25 bp, Homo sapien
cattagaggctctacacgggcagaa

SEQ ID NO: 4426808 - DNA, 25 bp, Homo sapien
tgggtgggaacgctaagtctctgac

SEQ ID NO: 4426809 - DNA, 25 bp, Homo sapien
tgcacatgagagcaggacagctgta

SEQ ID NO: 4426810 - DNA, 25 bp, Homo sapien
ccagagcaagttggacacgctgaat

SEQ ID NO: 4426811 - DNA, 25 bp, Homo sapien
ccaattacaatagaggctggtggag

SEQ ID NO: 4426812 - DNA, 25 bp, Homo sapien
ctgctggctcagagggaagccctat

SEQ ID NO: 4426813 - DNA, 25 bp, Homo sapien
cagagggaagccctatttcaggagg

SEQ ID NO: 4426814 - DNA, 25 bp, Homo sapien
ttcttgtcaccgagaactgccagca

SEQ ID NO: 4426815 - DNA, 25 bp, Homo sapien
tacagcacagtacttcagcgaggtg

SEQ ID NO: 4426816 - DNA, 25 bp, Homo sapien
tacttcagcgaggtgacagcggctg

SEQ ID NO: 4426817 - DNA, 25 bp, Homo sapien
tgtctacagcacagtacttcagcga

SEQ ID NO: 4426818 - DNA, 25 bp, Homo sapien
cacagtacttcagcgaggtgacagc

SEQ ID NO: 4426819 - DNA, 25 bp, Homo sapien
tctgcacgtgcaagtccaggaacca

SEQ ID NO: 4426820 - DNA, 25 bp, Homo sapien
tcctgtgaagggtccagcggtttcc

SEQ ID NO: 4426821 - DNA, 25 bp, Homo sapien
agctgctcgcgtgctgtgtcctgtg

SEQ ID NO: 4426822 - DNA, 25 bp, Homo sapien
gcacttggggttccctctgacctgg

SEQ ID NO: 4426823 - DNA, 25 bp, Homo sapien
tcagaaggccttatgttccccgcct

SEQ ID NO: 4426824 - DNA, 25 bp, Homo sapien
cagaaggccttatgttccccgcctc

SEQ ID NO: 4426825 - DNA, 25 bp, Homo sapien
gaaatacgtgaaccgattctggaaa

SEQ ID NO: 4426826 - DNA, 25 bp, Homo sapien
gctgcaacgaaatcttccctgcgga

SEQ ID NO: 4426827 - DNA, 25 bp, Homo sapien
tggaaagaaatccacgtgggagact

SEQ ID NO: 4426828 - DNA, 25 bp, Homo sapien
gactttgtgcgtcttcgctgcaacg

SEQ ID NO: 4426829 - DNA, 25 bp, Homo sapien
tgaacggaggcttcttttccaactc

SEQ ID NO: 4426830 - DNA, 25 bp, Homo sapien
cgtttgtgcatgaacggaggcttct

SEQ ID NO: 4426831 - DNA, 25 bp, Homo sapien
tttgtgcatgaacggaggcttcttt

SEQ ID NO: 4426832 - DNA, 25 bp, Homo sapien
tgcatgaacggaggcttcttttcca

SEQ ID NO: 4426833 - DNA, 25 bp, Homo sapien
gttggacatccacgtagaggctgca

SEQ ID NO: 4426834 - DNA, 25 bp, Homo sapien
gccgccctggccatttggttggaca

SEQ ID NO: 4426835 - DNA, 25 bp, Homo sapien
tgtttcaccagatgggagtccggca

SEQ ID NO: 4426836 - DNA, 25 bp, Homo sapien
tgcccgcaggaaaagagcgtgcctt

SEQ ID NO: 4426837 - DNA, 25 bp, Homo sapien
tgaaggagcgtggtcagctcccagc

SEQ ID NO: 4426838 - DNA, 25 bp, Homo sapien
gaaggtgcacggtggaacagtgcca

SEQ ID NO: 4426839 - DNA, 25 bp, Homo sapien
cagcaggcacgcgtggagtgaagga

SEQ ID NO: 4426840 - DNA, 25 bp, Homo sapien
cttcttccgggaaggtgcacggtgg

SEQ ID NO: 4426841 - DNA, 25 bp, Homo sapien
agcggctcccggttacactcagaga

SEQ ID NO: 4426842 - DNA, 25 bp, Homo sapien
ccacggaggtttgcgagttgtccat

SEQ ID NO: 4426843 - DNA, 25 bp, Homo sapien
ctcagagaagccgaggcccacggag

SEQ ID NO: 4426844 - DNA, 25 bp, Homo sapien
cagcagcagcacgtgcgtgccagga

SEQ ID NO: 4426845 - DNA, 25 bp, Homo sapien
tcttggggtgaagcaatacacaggc

SEQ ID NO: 4426846 - DNA, 25 bp, Homo sapien
gtcttggggtgaagcaatacacagg

SEQ ID NO: 4426847 - DNA, 25 bp, Homo sapien
cttggggtgaagcaatacacaggca

SEQ ID NO: 4426848 - DNA, 25 bp, Homo sapien
tggggtgaagcaatacacaggcaga

SEQ ID NO: 4426849 - DNA, 25 bp, Homo sapien
agagaaaaatacattcccttcagtt

SEQ ID NO: 4426850 - DNA, 25 bp, Homo sapien
tagagaaaaatacattcccttcagt

SEQ ID NO: 4426851 - DNA, 25 bp, Homo sapien
ctagagaaaaatacattcccttcag

SEQ ID NO: 4426852 - DNA, 25 bp, Homo sapien
ggtggatgcccctccgtttgatgga

SEQ ID NO: 4426853 - DNA, 25 bp, Homo sapien
tgtgctctgttattgctcctccaaa

SEQ ID NO: 4426854 - DNA, 25 bp, Homo sapien
ctgctctttccagcccggtggatgc

SEQ ID NO: 4426855 - DNA, 25 bp, Homo sapien
agtggaagcgtaagctgaggtcaca

SEQ ID NO: 4426856 - DNA, 25 bp, Homo sapien
acccaggcagcagcggtccaaggtg

SEQ ID NO: 4426857 - DNA, 25 bp, Homo sapien
gtgacccaggcagcagcggtccaag

SEQ ID NO: 4426858 - DNA, 25 bp, Homo sapien
gacccaggcagcagcggtccaaggt

SEQ ID NO: 4426859 - DNA, 25 bp, Homo sapien
caggcagcagcggtccaaggtggaa

SEQ ID NO: 4426860 - DNA, 25 bp, Homo sapien
aacctgtgactaccagggcaggcca

SEQ ID NO: 4426861 - DNA, 25 bp, Homo sapien
tcttcccgtttggatggttcaccat

SEQ ID NO: 4426862 - DNA, 25 bp, Homo sapien
cagattttctggaagtgcttgtagc

SEQ ID NO: 4426863 - DNA, 25 bp, Homo sapien
agcttgggcgacttggaacctgtga

SEQ ID NO: 4426864 - DNA, 25 bp, Homo sapien
agcttggacaggtgcgtgatgggag

SEQ ID NO: 4426865 - DNA, 25 bp, Homo sapien
acaggtgcgtgatgggaggacaagc

SEQ ID NO: 4426866 - DNA, 25 bp, Homo sapien
ccatgcaggtgcagccagcttggac

SEQ ID NO: 4426867 - DNA, 25 bp, Homo sapien
cagagtggagagcagtccatgcagg

SEQ ID NO: 4426868 - DNA, 25 bp, Homo sapien
tctccgtgatgcttctgcaccagct

SEQ ID NO: 4426869 - DNA, 25 bp, Homo sapien
tggcagcttccagccgtgtgcctcg

SEQ ID NO: 4426870 - DNA, 25 bp, Homo sapien
tgtttgcgccatgtagggtggaacg

SEQ ID NO: 4426871 - DNA, 25 bp, Homo sapien
cattttaggggagcgtgtttgcgcc

SEQ ID NO: 4426872 - DNA, 25 bp, Homo sapien
gattgtatagtgacagcaatgttaa

SEQ ID NO: 4426873 - DNA, 25 bp, Homo sapien
cagtggggggattgtatagtgacag

SEQ ID NO: 4426874 - DNA, 25 bp, Homo sapien
tgtatagtgacagcaatgttaataa

SEQ ID NO: 4426875 - DNA, 25 bp, Homo sapien
gggattgtatagtgacagcaatgtt

SEQ ID NO: 4426876 - DNA, 25 bp, Homo sapien
actttcggctttgatcttcaggtca

SEQ ID NO: 4426877 - DNA, 25 bp, Homo sapien
gacactttcggctttgatcttcagg

SEQ ID NO: 4426878 - DNA, 25 bp, Homo sapien
gctgaaagacactttcggctttgat

SEQ ID NO: 4426879 - DNA, 25 bp, Homo sapien
tcggctttgatcttcaggtcagcag

SEQ ID NO: 4426880 - DNA, 25 bp, Homo sapien
catgccctcgagctgtttcccagga

SEQ ID NO: 4426881 - DNA, 25 bp, Homo sapien
cagcgcaaagcaggaaggtgccttt

SEQ ID NO: 4426882 - DNA, 25 bp, Homo sapien
ggtccattacccagtggcgctcgtt

SEQ ID NO: 4426883 - DNA, 25 bp, Homo sapien
tgctgtttgtggacgtgcttgcctt

SEQ ID NO: 4426884 - DNA, 25 bp, Homo sapien
aatgcgcccttgggacttggagaag

SEQ ID NO: 4426885 - DNA, 25 bp, Homo sapien
gtgctcctccttgatcacggttaaa

SEQ ID NO: 4426886 - DNA, 25 bp, Homo sapien
gccagagttgagctcagtcctgcag

SEQ ID NO: 4426887 - DNA, 25 bp, Homo sapien
taattcctctgtaaagcgtctggcc

SEQ ID NO: 4426888 - DNA, 25 bp, Homo sapien
tctggccagacttaatgggaattcc

SEQ ID NO: 4426889 - DNA, 25 bp, Homo sapien
gaacctgttcgagcagttccaccgc

SEQ ID NO: 4426890 - DNA, 25 bp, Homo sapien
tgctcaacttcgtgccggcggtgaa

SEQ ID NO: 4426891 - DNA, 25 bp, Homo sapien
tactttgtcttcatcgcgctgctca

SEQ ID NO: 4426892 - DNA, 25 bp, Homo sapien
gacaaccggctcaagactaccaagt

SEQ ID NO: 4426893 - DNA, 25 bp, Homo sapien
cgcggtctccgtgcgtcccgcaggc

SEQ ID NO: 4426894 - DNA, 25 bp, Homo sapien
gtctccgtgcgtcccgcaggcgggg

SEQ ID NO: 4426895 - DNA, 25 bp, Homo sapien
cgcccgggccgcgagtgatgataac

SEQ ID NO: 4426896 - DNA, 25 bp, Homo sapien
aggcggggagctcgcaccgccgcgc

SEQ ID NO: 4426897 - DNA, 25 bp, Homo sapien
cgttttgggaccgaactgatgcttc

SEQ ID NO: 4426898 - DNA, 25 bp, Homo sapien
tagttcgcccaacaacggaatctga

SEQ ID NO: 4426899 - DNA, 25 bp, Homo sapien
tcgtttcgccgtccaggatggagca

SEQ ID NO: 4426900 - DNA, 25 bp, Homo sapien
ttcttagaggcaacgcggaatcgcc

SEQ ID NO: 4426901 - DNA, 25 bp, Homo sapien
tggcgaagacgtgatttgagtccat

SEQ ID NO: 4426902 - DNA, 25 bp, Homo sapien
agccgggtaagccagggtgctggag

SEQ ID NO: 4426903 - DNA, 25 bp, Homo sapien
ccccaagccagggtcctggcgaaga

SEQ ID NO: 4426904 - DNA, 25 bp, Homo sapien
tgggcagagatgtaagaatgtcata

SEQ ID NO: 4426905 - DNA, 25 bp, Homo sapien
ctggagactttgggcgaagggtcca

SEQ ID NO: 4426906 - DNA, 25 bp, Homo sapien
cgaagtgtagggaggccgaaggcct

SEQ ID NO: 4426907 - DNA, 25 bp, Homo sapien
ctgaagctgggagtctggtaggcgc

SEQ ID NO: 4426908 - DNA, 25 bp, Homo sapien
tctggtaggcgcggacacccctgga

SEQ ID NO: 4426909 - DNA, 25 bp, Homo sapien
cttggggctgggcctgaaccaggga

SEQ ID NO: 4426910 - DNA, 25 bp, Homo sapien
tggggctgggcctgaaccagggagg

SEQ ID NO: 4426911 - DNA, 25 bp, Homo sapien
ttggggctgggcctgaaccagggag

SEQ ID NO: 4426912 - DNA, 25 bp, Homo sapien
gcaggcccttgttagagccctgtgg

SEQ ID NO: 4426913 - DNA, 25 bp, Homo sapien
ggttctcatggcctatagcaggccc

SEQ ID NO: 4426914 - DNA, 25 bp, Homo sapien
agccctgtggtgcagatggccaacc

SEQ ID NO: 4426915 - DNA, 25 bp, Homo sapien
gccaacccagagttgaccagaccac

SEQ ID NO: 4426916 - DNA, 25 bp, Homo sapien
ttctacttccaagaatttttggctg

SEQ ID NO: 4426917 - DNA, 25 bp, Homo sapien
ttagatatgatgctgagccttctca

SEQ ID NO: 4426918 - DNA, 25 bp, Homo sapien
gggcaacggcccagaacgcatctct

SEQ ID NO: 4426919 - DNA, 25 bp, Homo sapien
tggtagacattctttcccgggcaac

SEQ ID NO: 4426920 - DNA, 25 bp, Homo sapien
ggcccagaacgcatctctgtctttc

SEQ ID NO: 4426921 - DNA, 25 bp, Homo sapien
gctggaattggctggagcctcaaat

SEQ ID NO: 4426922 - DNA, 25 bp, Homo sapien
tagcttcgccctacgtagctcctgg

SEQ ID NO: 4426923 - DNA, 25 bp, Homo sapien
tttgccttggcttgctacccacagt

SEQ ID NO: 4426924 - DNA, 25 bp, Homo sapien
agggagagtgagaccaccgaagacc

SEQ ID NO: 4426925 - DNA, 25 bp, Homo sapien
ctgaaaagaccttgtccttccatct

SEQ ID NO: 4426926 - DNA, 25 bp, Homo sapien
gacagcagccccttaaagcaatggg

SEQ ID NO: 4426927 - DNA, 25 bp, Homo sapien
ctgataacaggagttgcaggaacaa

SEQ ID NO: 4426928 - DNA, 25 bp, Homo sapien
atgacagacccggaactgataacag

SEQ ID NO: 4426929 - DNA, 25 bp, Homo sapien
gaggatgctccacggaaatcatgca

SEQ ID NO: 4426930 - DNA, 25 bp, Homo sapien
aggatgctccacggaaatcatgcat

SEQ ID NO: 4426931 - DNA, 25 bp, Homo sapien
ctgaggatgctccacggaaatcatg

SEQ ID NO: 4426932 - DNA, 25 bp, Homo sapien
tgaggatgctccacggaaatcatgc

SEQ ID NO: 4426933 - DNA, 25 bp, Homo sapien
cctcaggctcatgttccaggactcc

SEQ ID NO: 4426934 - DNA, 25 bp, Homo sapien
tcaggctcatgttccaggactccca

SEQ ID NO: 4426935 - DNA, 25 bp, Homo sapien
tcatgttccaggactcccatctggg

SEQ ID NO: 4426936 - DNA, 25 bp, Homo sapien
gctcatgttccaggactcccatctg

SEQ ID NO: 4426937 - DNA, 25 bp, Homo sapien
tcttcaacgccaatcgcaaatgcca

SEQ ID NO: 4426938 - DNA, 25 bp, Homo sapien
ctccttgtcaaaagctttgaattcc

SEQ ID NO: 4426939 - DNA, 25 bp, Homo sapien
agctactagaatccgataactcttc

SEQ ID NO: 4426940 - DNA, 25 bp, Homo sapien
aatgccacctccttgtcaaaagctt

SEQ ID NO: 4426941 - DNA, 25 bp, Homo sapien
tctagtattgcagaccatgggcacc

SEQ ID NO: 4426942 - DNA, 25 bp, Homo sapien
cctggctaccaaacactcctcccca

SEQ ID NO: 4426943 - DNA, 25 bp, Homo sapien
atgggcaccctggctaccaaacact

SEQ ID NO: 4426944 - DNA, 25 bp, Homo sapien
agtattgcagaccatgggcaccctg

SEQ ID NO: 4426945 - DNA, 25 bp, Homo sapien
cactgagggcttagacaccctcttg

SEQ ID NO: 4426946 - DNA, 25 bp, Homo sapien
tagacaccctcttgcattcaatgga

SEQ ID NO: 4426947 - DNA, 25 bp, Homo sapien
attcaatggatggaaaccccatgcc

SEQ ID NO: 4426948 - DNA, 25 bp, Homo sapien
aatggatggaaaccccatgccttcc

SEQ ID NO: 4426949 - DNA, 25 bp, Homo sapien
ccatccatgagagtggttgcccact

SEQ ID NO: 4426950 - DNA, 25 bp, Homo sapien
aggtatgagccatccatgagagtgg

SEQ ID NO: 4426951 - DNA, 25 bp, Homo sapien
catccatgagagtggttgcccactc

SEQ ID NO: 4426952 - DNA, 25 bp, Homo sapien
gtaataggtatgagccatccatgag

SEQ ID NO: 4426953 - DNA, 25 bp, Homo sapien
ctagggcaaaggaaaggcaggcctt

SEQ ID NO: 4426954 - DNA, 25 bp, Homo sapien
caacaccttggctccaaccatgtca

SEQ ID NO: 4426955 - DNA, 25 bp, Homo sapien
gactgaagtttgtccagacagatga

SEQ ID NO: 4426956 - DNA, 25 bp, Homo sapien
aaagcattgcacataagcttgggca

SEQ ID NO: 4426957 - DNA, 25 bp, Homo sapien
tggctgaattccaaatgcctcacaa

SEQ ID NO: 4426958 - DNA, 25 bp, Homo sapien
cctccctgcatatgtggacactgcg

SEQ ID NO: 4426959 - DNA, 25 bp, Homo sapien
tctggctccagagcgaggcagcgcc

SEQ ID NO: 4426960 - DNA, 25 bp, Homo sapien
gaggcagcgccttgcagcacattcc

SEQ ID NO: 4426961 - DNA, 25 bp, Homo sapien
ggatgctccggcctctcgtctggct

SEQ ID NO: 4426962 - DNA, 25 bp, Homo sapien
cacggagttggagctgacaagcacg

SEQ ID NO: 4426963 - DNA, 25 bp, Homo sapien
agctgacaagcacggcggtgggtgg

SEQ ID NO: 4426964 - DNA, 25 bp, Homo sapien
ccaaggtccagcacggagttggagc

SEQ ID NO: 4426965 - DNA, 25 bp, Homo sapien
tccagcacggagttggagctgacaa

SEQ ID NO: 4426966 - DNA, 25 bp, Homo sapien
tcctgaagacgtgcagaggtggaat

SEQ ID NO: 4426967 - DNA, 25 bp, Homo sapien
cccagagagactgttagagatcaca

SEQ ID NO: 4426968 - DNA, 25 bp, Homo sapien
tggaataagatctcccgttgggctt

SEQ ID NO: 4426969 - DNA, 25 bp, Homo sapien
gagaaggcctaacattggtgtggaa

SEQ ID NO: 4426970 - DNA, 25 bp, Homo sapien
taaatgaactcgagtttaaggagag

SEQ ID NO: 4426971 - DNA, 25 bp, Homo sapien
aaatgaactcgagtttaaggagagt

SEQ ID NO: 4426972 - DNA, 25 bp, Homo sapien
aatgaactcgagtttaaggagagta

SEQ ID NO: 4426973 - DNA, 25 bp, Homo sapien
acatgtattcacaactacagtgttg

SEQ ID NO: 4426974 - DNA, 25 bp, Homo sapien
tattcacaactacagtgttggcatt

SEQ ID NO: 4426975 - DNA, 25 bp, Homo sapien
tgtattcacaactacagtgttggca

SEQ ID NO: 4426976 - DNA, 25 bp, Homo sapien
ttcacaactacagtgttggcatttg

SEQ ID NO: 4426977 - DNA, 25 bp, Homo sapien
gccgagggctgaggcatggtgctca

SEQ ID NO: 4426978 - DNA, 25 bp, Homo sapien
tgcagccgagggctgaggcatggtg

SEQ ID NO: 4426979 - DNA, 25 bp, Homo sapien
ctgaggcatggtgctcagcaagcca

SEQ ID NO: 4426980 - DNA, 25 bp, Homo sapien
agggctgaggcatggtgctcagcaa

SEQ ID NO: 4426981 - DNA, 25 bp, Homo sapien
gaatccttgagggtaaatgagtcct

SEQ ID NO: 4426982 - DNA, 25 bp, Homo sapien
agagaatccttgagggtaaatgagt

SEQ ID NO: 4426983 - DNA, 25 bp, Homo sapien
agggtaaatgagtcctcaggagcca

SEQ ID NO: 4426984 - DNA, 25 bp, Homo sapien
tccttgagggtaaatgagtcctcag

SEQ ID NO: 4426985 - DNA, 25 bp, Homo sapien
aggaggctcgattcacccacattgg

SEQ ID NO: 4426986 - DNA, 25 bp, Homo sapien
gagccttcacctgaactgactttgg

SEQ ID NO: 4426987 - DNA, 25 bp, Homo sapien
cacattggcctcttcgtcctctaga

SEQ ID NO: 4426988 - DNA, 25 bp, Homo sapien
tggcctcttcgtcctctagagcctt

SEQ ID NO: 4426989 - DNA, 25 bp, Homo sapien
tgttcccactgaagtattgagtcaa

SEQ ID NO: 4426990 - DNA, 25 bp, Homo sapien
tgcttaaagtggaggtcccaacctg

SEQ ID NO: 4426991 - DNA, 25 bp, Homo sapien
gacctcacattgaagtgccttggca

SEQ ID NO: 4426992 - DNA, 25 bp, Homo sapien
ttgaggaaaccgagttgaaagccac

SEQ ID NO: 4426993 - DNA, 25 bp, Homo sapien
caagtgtatgaataagtgcacccat

SEQ ID NO: 4426994 - DNA, 25 bp, Homo sapien
cattaagggaatttgagtgtgccgc

SEQ ID NO: 4426995 - DNA, 25 bp, Homo sapien
aactcatatcttgttttacttccag

SEQ ID NO: 4426996 - DNA, 25 bp, Homo sapien
tccagtgtgacactttacaccaaca

SEQ ID NO: 4426997 - DNA, 25 bp, Homo sapien
tgtgggctccaatggccggaagccc

SEQ ID NO: 4426998 - DNA, 25 bp, Homo sapien
ggccgtgtgggctccaatggccgga

SEQ ID NO: 4426999 - DNA, 25 bp, Homo sapien
caagcttctcaagcacctgtgcgat

SEQ ID NO: 4427000 - DNA, 25 bp, Homo sapien
aggcaggcaagcttctcaagcacct

SEQ ID NO: 4427001 - DNA, 25 bp, Homo sapien
tcagcaacagcaattctcagaagtt

SEQ ID NO: 4427002 - DNA, 25 bp, Homo sapien
ggttcatggatgctcttgttttgat

SEQ ID NO: 4427003 - DNA, 25 bp, Homo sapien
agaagttggttcatggatgctcttg

SEQ ID NO: 4427004 - DNA, 25 bp, Homo sapien
agttggttcatggatgctcttgttt

SEQ ID NO: 4427005 - DNA, 25 bp, Homo sapien
gctttgggcgtgtagaagcagccta

SEQ ID NO: 4427006 - DNA, 25 bp, Homo sapien
tatcttgagctacctatgccgaggc

SEQ ID NO: 4427007 - DNA, 25 bp, Homo sapien
gcgctgtagcccctttgtcagagag

SEQ ID NO: 4427008 - DNA, 25 bp, Homo sapien
cacagggttagtcagccatgaggct

SEQ ID NO: 4427009 - DNA, 25 bp, Homo sapien
cagagaagtggactgtgacggaggt

SEQ ID NO: 4427010 - DNA, 25 bp, Homo sapien
agaagtggactgtgacggaggtggg

SEQ ID NO: 4427011 - DNA, 25 bp, Homo sapien
ggcagagaagtggactgtgacggag

SEQ ID NO: 4427012 - DNA, 25 bp, Homo sapien
ttagcttcagtttgggccaggggca

SEQ ID NO: 4427013 - DNA, 25 bp, Homo sapien
gattgtgccagttcactccagtctg

SEQ ID NO: 4427014 - DNA, 25 bp, Homo sapien
agattgtgccagttcactccagtct

SEQ ID NO: 4427015 - DNA, 25 bp, Homo sapien
ttgtgccagttcactccagtctggg

SEQ ID NO: 4427016 - DNA, 25 bp, Homo sapien
gtgccagttcactccagtctgggta

SEQ ID NO: 4427017 - DNA, 25 bp, Homo sapien
gctctggcctgtgccaacagatagg

SEQ ID NO: 4427018 - DNA, 25 bp, Homo sapien
ctgtgccaacagatagggcacctca

SEQ ID NO: 4427019 - DNA, 25 bp, Homo sapien
tctggcctgtgccaacagatagggc

SEQ ID NO: 4427020 - DNA, 25 bp, Homo sapien
tggcctgtgccaacagatagggcac

SEQ ID NO: 4427021 - DNA, 25 bp, Homo sapien
gcaaagagccggaggggaggagaag

SEQ ID NO: 4427022 - DNA, 25 bp, Homo sapien
cacgtagcacaggtaccatcagaga

SEQ ID NO: 4427023 - DNA, 25 bp, Homo sapien
gatgtggcacgtagcacaggtacca

SEQ ID NO: 4427024 - DNA, 25 bp, Homo sapien
tagcacaggtaccatcagagaaggc

SEQ ID NO: 4427025 - DNA, 25 bp, Homo sapien
agggaaaggatgtggcacgtagcac

SEQ ID NO: 4427026 - DNA, 25 bp, Homo sapien
gaatgcctcgcctcatgagtcaagg

SEQ ID NO: 4427027 - DNA, 25 bp, Homo sapien
tgagtcaaggaacttctgcggcccc

SEQ ID NO: 4427028 - DNA, 25 bp, Homo sapien
ttccctagaatgcagatggctcctt

SEQ ID NO: 4427029 - DNA, 25 bp, Homo sapien
tctggccatcatagcagtctgcaag

SEQ ID NO: 4427030 - DNA, 25 bp, Homo sapien
ccaagctaataccttgagaggagtc

SEQ ID NO: 4427031 - DNA, 25 bp, Homo sapien
gtgacttcaaggtggcactcattcg

SEQ ID NO: 4427032 - DNA, 25 bp, Homo sapien
ttctcagggctccaacaatttcctc

SEQ ID NO: 4427033 - DNA, 25 bp, Homo sapien
tcttggttagtgaagccactcttgc

SEQ ID NO: 4427034 - DNA, 25 bp, Homo sapien
ctctgttatagcgtgtttcccctga

SEQ ID NO: 4427035 - DNA, 25 bp, Homo sapien
cctgacgtcttgtggtactgattgc

SEQ ID NO: 4427036 - DNA, 25 bp, Homo sapien
gcgtgtttcccctgacgtcttgtgg

SEQ ID NO: 4427037 - DNA, 25 bp, Homo sapien
ttcccctgacgtcttgtggtactga

SEQ ID NO: 4427038 - DNA, 25 bp, Homo sapien
tacacagtcgtcagccttctggatg

SEQ ID NO: 4427039 - DNA, 25 bp, Homo sapien
ttccactgctgtgtctacgaagact

SEQ ID NO: 4427040 - DNA, 25 bp, Homo sapien
aaaacatcccacctacacagtcgtc

SEQ ID NO: 4427041 - DNA, 25 bp, Homo sapien
ggcagcccctgacgcatcctctctg

SEQ ID NO: 4427042 - DNA, 25 bp, Homo sapien
tgtggattttctcaccaacctggct

SEQ ID NO: 4427043 - DNA, 25 bp, Homo sapien
tagaccctgccactctgagattccg

SEQ ID NO: 4427044 - DNA, 25 bp, Homo sapien
tgagattccgtgattcccattgaac

SEQ ID NO: 4427045 - DNA, 25 bp, Homo sapien
caaacaatcattcggtagaccaccc

SEQ ID NO: 4427046 - DNA, 25 bp, Homo sapien
ccggcaaaacgggctgtgtaatcag

SEQ ID NO: 4427047 - DNA, 25 bp, Homo sapien
cacaaccccggcaaaacgggctgtg

SEQ ID NO: 4427048 - DNA, 25 bp, Homo sapien
cccggcaaaacgggctgtgtaatca

SEQ ID NO: 4427049 - DNA, 25 bp, Homo sapien
cggcaaaacgggctgtgtaatcagc

SEQ ID NO: 4427050 - DNA, 25 bp, Homo sapien
tcctttgaaggagcgcttcaacagc

SEQ ID NO: 4427051 - DNA, 25 bp, Homo sapien
ttcctttgaaggagcgcttcaacag

SEQ ID NO: 4427052 - DNA, 25 bp, Homo sapien
ttagaaagtcgcctgtgtgttgttg

SEQ ID NO: 4427053 - DNA, 25 bp, Homo sapien
acaggatttaatcttaggatgcagg

SEQ ID NO: 4427054 - DNA, 25 bp, Homo sapien
gaccatgtcaagcttctcattgtca

SEQ ID NO: 4427055 - DNA, 25 bp, Homo sapien
gataaagaccatgtcaagcttctca

SEQ ID NO: 4427056 - DNA, 25 bp, Homo sapien
ggagccgaacgtttccacatccctg

SEQ ID NO: 4427057 - DNA, 25 bp, Homo sapien
ccaggagccgaacgtttccacatcc

SEQ ID NO: 4427058 - DNA, 25 bp, Homo sapien
gagccgaacgtttccacatccctgt

SEQ ID NO: 4427059 - DNA, 25 bp, Homo sapien
aggagccgaacgtttccacatccct

SEQ ID NO: 4427060 - DNA, 25 bp, Homo sapien
tcagtgtgtgacaaggaagacgatg

SEQ ID NO: 4427061 - DNA, 25 bp, Homo sapien
tcatctcagtgtgtgacaaggaaga

SEQ ID NO: 4427062 - DNA, 25 bp, Homo sapien
catctcagtgtgtgacaaggaagac

SEQ ID NO: 4427063 - DNA, 25 bp, Homo sapien
tctcagtgtgtgacaaggaagacga

SEQ ID NO: 4427064 - DNA, 25 bp, Homo sapien
gcttgtttcaaattggctgtatttt

SEQ ID NO: 4427065 - DNA, 25 bp, Homo sapien
cacctctaagccacggcgagagggt

SEQ ID NO: 4427066 - DNA, 25 bp, Homo sapien
tgtattggtagcaggaaagaaggcc

SEQ ID NO: 4427067 - DNA, 25 bp, Homo sapien
ttcccagtgtgccacgttgtcagag

SEQ ID NO: 4427068 - DNA, 25 bp, Homo sapien
cctctcccaaattctgtctgcaggg

SEQ ID NO: 4427069 - DNA, 25 bp, Homo sapien
aggagctggcttgcataggctcaca

SEQ ID NO: 4427070 - DNA, 25 bp, Homo sapien
ctcccaaattctgtctgcagggaca

SEQ ID NO: 4427071 - DNA, 25 bp, Homo sapien
tgcaggagctggcttgcataggctc

SEQ ID NO: 4427072 - DNA, 25 bp, Homo sapien
tatacaagggttcatgctaagttcc

SEQ ID NO: 4427073 - DNA, 25 bp, Homo sapien
taagttccctctccccgatgggtca

SEQ ID NO: 4427074 - DNA, 25 bp, Homo sapien
catattcaaacacctgggcgggcct

SEQ ID NO: 4427075 - DNA, 25 bp, Homo sapien
cctaggtcttgggagactagcccag

SEQ ID NO: 4427076 - DNA, 25 bp, Homo sapien
tgtactctgacgcttcgacatctgg

SEQ ID NO: 4427077 - DNA, 25 bp, Homo sapien
acacacactgcaccaaacatctttg

SEQ ID NO: 4427078 - DNA, 25 bp, Homo sapien
atttctgtactctgacgcttcgaca

SEQ ID NO: 4427079 - DNA, 25 bp, Homo sapien
cacacactgcaccaaacatctttga

SEQ ID NO: 4427080 - DNA, 25 bp, Homo sapien
cacctggagcattacgcaaaaccat

SEQ ID NO: 4427081 - DNA, 25 bp, Homo sapien
agtcacctggagcattacgcaaaac

SEQ ID NO: 4427082 - DNA, 25 bp, Homo sapien
gtcacctggagcattacgcaaaacc

SEQ ID NO: 4427083 - DNA, 25 bp, Homo sapien
cagtcacctggagcattacgcaaaa

SEQ ID NO: 4427084 - DNA, 25 bp, Homo sapien
atgttgccccaagtacctcagtctg

SEQ ID NO: 4427085 - DNA, 25 bp, Homo sapien
tgctaacaacctattcttcatcctg

SEQ ID NO: 4427086 - DNA, 25 bp, Homo sapien
tccctcctgttgtgtacgaaatgtt

SEQ ID NO: 4427087 - DNA, 25 bp, Homo sapien
tctgctaacaacctattcttcatcc

SEQ ID NO: 4427088 - DNA, 25 bp, Homo sapien
ggtatcctccacagatctcaaaggc

SEQ ID NO: 4427089 - DNA, 25 bp, Homo sapien
cctctgcagtgtggcgtagaaaagc

SEQ ID NO: 4427090 - DNA, 25 bp, Homo sapien
gcaattgccctcatgtcttccagtg

SEQ ID NO: 4427091 - DNA, 25 bp, Homo sapien
tgtgtgcttcaagaccatccgttgc

SEQ ID NO: 4427092 - DNA, 25 bp, Homo sapien
ccccaagtgactgggtgctgttggt

SEQ ID NO: 4427093 - DNA, 25 bp, Homo sapien
gttggtgatagatccatgaggccat

SEQ ID NO: 4427094 - DNA, 25 bp, Homo sapien
tgggtgctgttggtgatagatccat

SEQ ID NO: 4427095 - DNA, 25 bp, Homo sapien
tccccaagtgactgggtgctgttgg

SEQ ID NO: 4427096 - DNA, 25 bp, Homo sapien
gagtggatggctcccgtctttgcct

SEQ ID NO: 4427097 - DNA, 25 bp, Homo sapien
ctctgggactgatgcccagaactgg

SEQ ID NO: 4427098 - DNA, 25 bp, Homo sapien
tcaggaagccctgcactaaaatgca

SEQ ID NO: 4427099 - DNA, 25 bp, Homo sapien
tgccttcgggaagaacggtgttagc

SEQ ID NO: 4427100 - DNA, 25 bp, Homo sapien
cacgtagcataagtatgtaaaattg

SEQ ID NO: 4427101 - DNA, 25 bp, Homo sapien
gtaaaattgcaaggcaaaatctcct

SEQ ID NO: 4427102 - DNA, 25 bp, Homo sapien
agccttccacgtagcataagtatgt

SEQ ID NO: 4427103 - DNA, 25 bp, Homo sapien
gcaaggcaaaatctcctctaccaca

SEQ ID NO: 4427104 - DNA, 25 bp, Homo sapien
tctctctctctctgtgtgtctcttt

SEQ ID NO: 4427105 - DNA, 25 bp, Homo sapien
tttctctctctctctgtgtgtctct

SEQ ID NO: 4427106 - DNA, 25 bp, Homo sapien
gtaggtgggttctctctttctctct

SEQ ID NO: 4427107 - DNA, 25 bp, Homo sapien
aggtaggtgggttctctctttctct

SEQ ID NO: 4427108 - DNA, 25 bp, Homo sapien
agaagtagcccactgtgagcggtga

SEQ ID NO: 4427109 - DNA, 25 bp, Homo sapien
ttagaagtagcccactgtgagcggt

SEQ ID NO: 4427110 - DNA, 25 bp, Homo sapien
tagaagtagcccactgtgagcggtg

SEQ ID NO: 4427111 - DNA, 25 bp, Homo sapien
attaagactatgctctcagtgaccc

SEQ ID NO: 4427112 - DNA, 25 bp, Homo sapien
tattaagactatgctctcagtgacc

SEQ ID NO: 4427113 - DNA, 25 bp, Homo sapien
gttttattaagactatgctctcagt

SEQ ID NO: 4427114 - DNA, 25 bp, Homo sapien
tttattaagactatgctctcagtga

SEQ ID NO: 4427115 - DNA, 25 bp, Homo sapien
tgatatttgggatgctatgttaagc

SEQ ID NO: 4427116 - DNA, 25 bp, Homo sapien
gagcatagtgtatgtctccatgtaa

SEQ ID NO: 4427117 - DNA, 25 bp, Homo sapien
tccatgtaatgagatcttcgctaat

SEQ ID NO: 4427118 - DNA, 25 bp, Homo sapien
tctgagatgtgaattggcatcttcc

SEQ ID NO: 4427119 - DNA, 25 bp, Homo sapien
tatgtcaaacatgccaccgaagatt

SEQ ID NO: 4427120 - DNA, 25 bp, Homo sapien
tgagcttgtatatgtaatggtgccc

SEQ ID NO: 4427121 - DNA, 25 bp, Homo sapien
gtcacggaggaactgctgtgccata

SEQ ID NO: 4427122 - DNA, 25 bp, Homo sapien
tctgtgagtacacacgtcacggagg

SEQ ID NO: 4427123 - DNA, 25 bp, Homo sapien
ggtgagtattttctgcaggctgaaa

SEQ ID NO: 4427124 - DNA, 25 bp, Homo sapien
gctcggtgagtattttctgcaggct

SEQ ID NO: 4427125 - DNA, 25 bp, Homo sapien
cttggtcacaggtgtttcctgtcct

SEQ ID NO: 4427126 - DNA, 25 bp, Homo sapien
gtttcctgtcctagcgtcgtgaggg

SEQ ID NO: 4427127 - DNA, 25 bp, Homo sapien
tagcctttttctgaaagtttcagga

SEQ ID NO: 4427128 - DNA, 25 bp, Homo sapien
agcctttttctgaaagtttcaggag

SEQ ID NO: 4427129 - DNA, 25 bp, Homo sapien
ctagcctttttctgaaagtttcagg

SEQ ID NO: 4427130 - DNA, 25 bp, Homo sapien
tccagccatcacaaccgccctagca

SEQ ID NO: 4427131 - DNA, 25 bp, Homo sapien
agtccagccatcacaaccgccctag

SEQ ID NO: 4427132 - DNA, 25 bp, Homo sapien
atcacaaccgccctagcacccaggg

SEQ ID NO: 4427133 - DNA, 25 bp, Homo sapien
ctgagtccagccatcacaaccgccc

SEQ ID NO: 4427134 - DNA, 25 bp, Homo sapien
ctctcatcgccatagtcactaatgt

SEQ ID NO: 4427135 - DNA, 25 bp, Homo sapien
actctcatcgccatagtcactaatg

SEQ ID NO: 4427136 - DNA, 25 bp, Homo sapien
acactctcatcgccatagtcactaa

SEQ ID NO: 4427137 - DNA, 25 bp, Homo sapien
tctcatcgccatagtcactaatgta

SEQ ID NO: 4427138 - DNA, 25 bp, Homo sapien
tccagcccagcgtgctgcacaaatg

SEQ ID NO: 4427139 - DNA, 25 bp, Homo sapien
ctcctctaccattagacacaagcag

SEQ ID NO: 4427140 - DNA, 25 bp, Homo sapien
atccagcccagcgtgctgcacaaat

SEQ ID NO: 4427141 - DNA, 25 bp, Homo sapien
cattagacacaagcagcctcgtcca

SEQ ID NO: 4427142 - DNA, 25 bp, Homo sapien
cacaccaaccactttgggttactgg

SEQ ID NO: 4427143 - DNA, 25 bp, Homo sapien
gaagatggttagaacgcaggcaaaa

SEQ ID NO: 4427144 - DNA, 25 bp, Homo sapien
gcagctgtaatcaggccccagaaat

SEQ ID NO: 4427145 - DNA, 25 bp, Homo sapien
taggctatgggatatccttccttgg

SEQ ID NO: 4427146 - DNA, 25 bp, Homo sapien
cacagctggacattcagggagagct

SEQ ID NO: 4427147 - DNA, 25 bp, Homo sapien
actgaaggacagcaggcatttagcc

SEQ ID NO: 4427148 - DNA, 25 bp, Homo sapien
tcacagctggacattcagggagagc

SEQ ID NO: 4427149 - DNA, 25 bp, Homo sapien
cagggagagctgcactgaaggacag

SEQ ID NO: 4427150 - DNA, 25 bp, Homo sapien
gattccacggcatttagtgagtgct

SEQ ID NO: 4427151 - DNA, 25 bp, Homo sapien
tggtgcagacaactgcttcgcagct

SEQ ID NO: 4427152 - DNA, 25 bp, Homo sapien
cattcatccatgcaaaaaacagtcc

SEQ ID NO: 4427153 - DNA, 25 bp, Homo sapien
cctgggtgtgacttaacttcgtgca

SEQ ID NO: 4427154 - DNA, 25 bp, Homo sapien
ccacactgtatgaatggtgtagtag

SEQ ID NO: 4427155 - DNA, 25 bp, Homo sapien
gcaaacaatgcaaaatccaaacagc

SEQ ID NO: 4427156 - DNA, 25 bp, Homo sapien
gccttgacagattatgatgctccac

SEQ ID NO: 4427157 - DNA, 25 bp, Homo sapien
gtagtcaagacaggcaagtccatgc

SEQ ID NO: 4427158 - DNA, 25 bp, Homo sapien
ggattgcacctctaaaatctttttg

SEQ ID NO: 4427159 - DNA, 25 bp, Homo sapien
tgttcaaatccagggttagtttgtg

SEQ ID NO: 4427160 - DNA, 25 bp, Homo sapien
ttcctctcgggtcagactctgcttt

SEQ ID NO: 4427161 - DNA, 25 bp, Homo sapien
tctgaggggtgtaagttcctctcgg

SEQ ID NO: 4427162 - DNA, 25 bp, Homo sapien
gcataacccgtgtgtccactaacct

SEQ ID NO: 4427163 - DNA, 25 bp, Homo sapien
ccctggaagagctcgaagtcttgtg

SEQ ID NO: 4427164 - DNA, 25 bp, Homo sapien
gaagagctcgaagtcttgtgaagaa

SEQ ID NO: 4427165 - DNA, 25 bp, Homo sapien
acatgggaagcaatgcctgtagcat

SEQ ID NO: 4427166 - DNA, 25 bp, Homo sapien
cctataaaggtctgtctcttgaggg

SEQ ID NO: 4427167 - DNA, 25 bp, Homo sapien
tgcctataaaggtctgtctcttgag

SEQ ID NO: 4427168 - DNA, 25 bp, Homo sapien
gcttgcctataaaggtctgtctctt

SEQ ID NO: 4427169 - DNA, 25 bp, Homo sapien
cttgcctataaaggtctgtctcttg

SEQ ID NO: 4427170 - DNA, 25 bp, Homo sapien
tagttgtcctctttttgtaagtgac

SEQ ID NO: 4427171 - DNA, 25 bp, Homo sapien
cagaaatagttgtcctctttttgta

SEQ ID NO: 4427172 - DNA, 25 bp, Homo sapien
tgtcctctttttgtaagtgacctac

SEQ ID NO: 4427173 - DNA, 25 bp, Homo sapien
aatagttgtcctctttttgtaagtg

SEQ ID NO: 4427174 - DNA, 25 bp, Homo sapien
tgatttcaggtgaacccaatccccc

SEQ ID NO: 4427175 - DNA, 25 bp, Homo sapien
atttcaggtgaacccaatccccctg

SEQ ID NO: 4427176 - DNA, 25 bp, Homo sapien
atgatttcaggtgaacccaatcccc

SEQ ID NO: 4427177 - DNA, 25 bp, Homo sapien
atcatgagagcccagtttaattggg

SEQ ID NO: 4427178 - DNA, 25 bp, Homo sapien
tatgagaaatcatgagagcccagtt

SEQ ID NO: 4427179 - DNA, 25 bp, Homo sapien
catccatgacaggaatgtggtccat

SEQ ID NO: 4427180 - DNA, 25 bp, Homo sapien
tccgcatatggcgatgacatccatg

SEQ ID NO: 4427181 - DNA, 25 bp, Homo sapien
aataggagactcgattacaagaagc

SEQ ID NO: 4427182 - DNA, 25 bp, Homo sapien
cacacagtgaaacagcgtcaccaag

SEQ ID NO: 4427183 - DNA, 25 bp, Homo sapien
cgtcaccaagtagctcggccagttg

SEQ ID NO: 4427184 - DNA, 25 bp, Homo sapien
gctggttttcctcagcaaatgcgga

SEQ ID NO: 4427185 - DNA, 25 bp, Homo sapien
caagaagcgggacttgaaatactca

SEQ ID NO: 4427186 - DNA, 25 bp, Homo sapien
gctcaagaagcgggacttgaaatac

SEQ ID NO: 4427187 - DNA, 25 bp, Homo sapien
agaagctcaagaagcgggacttgaa

SEQ ID NO: 4427188 - DNA, 25 bp, Homo sapien
gaagctcaagaagcgggacttgaaa

SEQ ID NO: 4427189 - DNA, 25 bp, Homo sapien
ctagatgtacacgatgagtaagaca

SEQ ID NO: 4427190 - DNA, 25 bp, Homo sapien
tgggtgatgtccaatcagagtgttc

SEQ ID NO: 4427191 - DNA, 25 bp, Homo sapien
tgtaaatagattcgcacactgtgac

SEQ ID NO: 4427192 - DNA, 25 bp, Homo sapien
taagacatggtgtttgtggccaaga

SEQ ID NO: 4427193 - DNA, 25 bp, Homo sapien
ttcaccagggtggagacagtgtctg

SEQ ID NO: 4427194 - DNA, 25 bp, Homo sapien
tcgggagagaatgccacagagggag

SEQ ID NO: 4427195 - DNA, 25 bp, Homo sapien
gcctgcaggagtcagtaggagtcgg

SEQ ID NO: 4427196 - DNA, 25 bp, Homo sapien
cacagagggagggattcaccagggt

SEQ ID NO: 4427197 - DNA, 25 bp, Homo sapien
cttccagcaccaacctcatggcacc

SEQ ID NO: 4427198 - DNA, 25 bp, Homo sapien
ggtgcttccagcaccaacctcatgg

SEQ ID NO: 4427199 - DNA, 25 bp, Homo sapien
tccagcaccaacctcatggcacctg

SEQ ID NO: 4427200 - DNA, 25 bp, Homo sapien
ttggtgcttccagcaccaacctcat

SEQ ID NO: 4427201 - DNA, 25 bp, Homo sapien
acggcctctgctatgaccaccattg

SEQ ID NO: 4427202 - DNA, 25 bp, Homo sapien
ctgggtgcccgagtcaggagggact

SEQ ID NO: 4427203 - DNA, 25 bp, Homo sapien
accaccattgagtacacagggagca

SEQ ID NO: 4427204 - DNA, 25 bp, Homo sapien
tctgctatgaccaccattgagtaca

SEQ ID NO: 4427205 - DNA, 25 bp, Homo sapien
cagaccacagtcactaaggaattct

SEQ ID NO: 4427206 - DNA, 25 bp, Homo sapien
ggaaagcatgcttgaacttcacgag

SEQ ID NO: 4427207 - DNA, 25 bp, Homo sapien
cacagtctgagttgattgtcaccca

SEQ ID NO: 4427208 - DNA, 25 bp, Homo sapien
ttcacgagaagaaggcatccattct

SEQ ID NO: 4427209 - DNA, 25 bp, Homo sapien
ccagggcccagcatgcaatgagaag

SEQ ID NO: 4427210 - DNA, 25 bp, Homo sapien
gactctccagtgttgacagggagtt

SEQ ID NO: 4427211 - DNA, 25 bp, Homo sapien
cagaccttgactctccagtgttgac

SEQ ID NO: 4427212 - DNA, 25 bp, Homo sapien
ccagtgttgacagggagttgatagt

SEQ ID NO: 4427213 - DNA, 25 bp, Homo sapien
gcttgctgagctcccgcagaccttg

SEQ ID NO: 4427214 - DNA, 25 bp, Homo sapien
agtgccctcggttctcacttgatgg

SEQ ID NO: 4427215 - DNA, 25 bp, Homo sapien
taagaggagtcctaggattcaggag

SEQ ID NO: 4427216 - DNA, 25 bp, Homo sapien
ggttctcacttgatgggccgtccac

SEQ ID NO: 4427217 - DNA, 25 bp, Homo sapien
agctgcttcccaccacggctgtgtt

SEQ ID NO: 4427218 - DNA, 25 bp, Homo sapien
agacaacatgcttcgcagcagagag

SEQ ID NO: 4427219 - DNA, 25 bp, Homo sapien
tctgcacagctaagcttcactaggc

SEQ ID NO: 4427220 - DNA, 25 bp, Homo sapien
aatagcttctccagcattgccaacg

SEQ ID NO: 4427221 - DNA, 25 bp, Homo sapien
tgtgtcttaaacaagcccagttgga

SEQ ID NO: 4427222 - DNA, 25 bp, Homo sapien
caggtcgtgtttgttcaagcatttc

SEQ ID NO: 4427223 - DNA, 25 bp, Homo sapien
tgtttgttcaagcatttcacctgct

SEQ ID NO: 4427224 - DNA, 25 bp, Homo sapien
cttctttagcaggtcgtgtttgttc

SEQ ID NO: 4427225 - DNA, 25 bp, Homo sapien
tttagcaggtcgtgtttgttcaagc

SEQ ID NO: 4427226 - DNA, 25 bp, Homo sapien
gtagctgaagcttccgcttgcaggc

SEQ ID NO: 4427227 - DNA, 25 bp, Homo sapien
ctgaagcttccgcttgcaggcattt

SEQ ID NO: 4427228 - DNA, 25 bp, Homo sapien
tgaagcttccgcttgcaggcatttg

SEQ ID NO: 4427229 - DNA, 25 bp, Homo sapien
ttcgagactcttgtcggctcctggt

SEQ ID NO: 4427230 - DNA, 25 bp, Homo sapien
accttcaagccccacagagaactga

SEQ ID NO: 4427231 - DNA, 25 bp, Homo sapien
accattgtccgtgagtttccctctg

SEQ ID NO: 4427232 - DNA, 25 bp, Homo sapien
ggtggcactgatcccctcactgtca

SEQ ID NO: 4427233 - DNA, 25 bp, Homo sapien
acatgactggctctgctattaattg

SEQ ID NO: 4427234 - DNA, 25 bp, Homo sapien
tatatccagcctgtataaaaggaat

SEQ ID NO: 4427235 - DNA, 25 bp, Homo sapien
tgtaccccaagtagagacaagacac

SEQ ID NO: 4427236 - DNA, 25 bp, Homo sapien
gctctgctattaattgtaccccaag

SEQ ID NO: 4427237 - DNA, 25 bp, Homo sapien
ggttaattaggtcactgttcctgtg

SEQ ID NO: 4427238 - DNA, 25 bp, Homo sapien
cacatgaatgcgtagatctctagga

SEQ ID NO: 4427239 - DNA, 25 bp, Homo sapien
ttttgaggcaaaaatgaacgatgct

SEQ ID NO: 4427240 - DNA, 25 bp, Homo sapien
gacatgtgggcattgttttgaggca

SEQ ID NO: 4427241 - DNA, 25 bp, Homo sapien
ctgtccaaattgacagcacatctgc

SEQ ID NO: 4427242 - DNA, 25 bp, Homo sapien
acatctgcagatgttccgtggagca

SEQ ID NO: 4427243 - DNA, 25 bp, Homo sapien
ccaaaaatgcacacgaaactgccac

SEQ ID NO: 4427244 - DNA, 25 bp, Homo sapien
cgaaactgccactagaagcaaatgg

SEQ ID NO: 4427245 - DNA, 25 bp, Homo sapien
cctggaaatgtgcactgtggtctct

SEQ ID NO: 4427246 - DNA, 25 bp, Homo sapien
cagggctactctccagttccatagc

SEQ ID NO: 4427247 - DNA, 25 bp, Homo sapien
tggaaatgtgcactgtggtctctct

SEQ ID NO: 4427248 - DNA, 25 bp, Homo sapien
tcagggctactctccagttccatag

SEQ ID NO: 4427249 - DNA, 25 bp, Homo sapien
cttcacccttcctacaggaatcgta

SEQ ID NO: 4427250 - DNA, 25 bp, Homo sapien
caggtggtggaaggataagaatact

SEQ ID NO: 4427251 - DNA, 25 bp, Homo sapien
tttctggagtataatgcactctcac

SEQ ID NO: 4427252 - DNA, 25 bp, Homo sapien
acccttcctacaggaatcgtatttg

SEQ ID NO: 4427253 - DNA, 25 bp, Homo sapien
cttctactgcattgaaaggcgccat

SEQ ID NO: 4427254 - DNA, 25 bp, Homo sapien
caaaggtgatgccaaacgagtctgg

SEQ ID NO: 4427255 - DNA, 25 bp, Homo sapien
catttttactgaggagatcatctca

SEQ ID NO: 4427256 - DNA, 25 bp, Homo sapien
ccctgaaaggcacttctctcttgtc

SEQ ID NO: 4427257 - DNA, 25 bp, Homo sapien
tttactgaggagatcatctcaaagg

SEQ ID NO: 4427258 - DNA, 25 bp, Homo sapien
aaacagtcaatggtctatttaagtg

SEQ ID NO: 4427259 - DNA, 25 bp, Homo sapien
aaaccttgttaagtggccttatcat

SEQ ID NO: 4427260 - DNA, 25 bp, Homo sapien
gaccccaaaatgtaaatggatgtgg

SEQ ID NO: 4427261 - DNA, 25 bp, Homo sapien
aactgtgacattaattctttctggg

SEQ ID NO: 4427262 - DNA, 25 bp, Homo sapien
ggagactagccagggatttctttgg

SEQ ID NO: 4427263 - DNA, 25 bp, Homo sapien
taatcgctgctctctggttttattt

SEQ ID NO: 4427264 - DNA, 25 bp, Homo sapien
tttccatgggtaacaatgggggatc

SEQ ID NO: 4427265 - DNA, 25 bp, Homo sapien
ctaatcgctgctctctggttttatt

SEQ ID NO: 4427266 - DNA, 25 bp, Homo sapien
gacccatgaccgttctctgaggcaa

SEQ ID NO: 4427267 - DNA, 25 bp, Homo sapien
ggagggcaacctgacagcaaacaca

SEQ ID NO: 4427268 - DNA, 25 bp, Homo sapien
ggtgcaccggtttcatagacgcaac

SEQ ID NO: 4427269 - DNA, 25 bp, Homo sapien
tctgcaggaacatgacccgtacaca

SEQ ID NO: 4427270 - DNA, 25 bp, Homo sapien
gttgtctgaaacatagatagatccc

SEQ ID NO: 4427271 - DNA, 25 bp, Homo sapien
aaaactcatcgggagtgaatggcat

SEQ ID NO: 4427272 - DNA, 25 bp, Homo sapien
aacatagatagatcccacgttgatg

SEQ ID NO: 4427273 - DNA, 25 bp, Homo sapien
cacgttgatgtctgaacgaccgtct

SEQ ID NO: 4427274 - DNA, 25 bp, Homo sapien
gaacacggggtaggctttccacagc

SEQ ID NO: 4427275 - DNA, 25 bp, Homo sapien
tctgatatcgtaattcccaaaccat

SEQ ID NO: 4427276 - DNA, 25 bp, Homo sapien
gccccttcgtggaagtgcattctcc

SEQ ID NO: 4427277 - DNA, 25 bp, Homo sapien
aagaacaaattctgcgttactacgc

SEQ ID NO: 4427278 - DNA, 25 bp, Homo sapien
tgaggcatcgcacgtcctgaagtgg

SEQ ID NO: 4427279 - DNA, 25 bp, Homo sapien
tgaacccatggaagcacattaagtg

SEQ ID NO: 4427280 - DNA, 25 bp, Homo sapien
ctgtggtgctgcagaaataccttta

SEQ ID NO: 4427281 - DNA, 25 bp, Homo sapien
tgtttccatcacagaggcacacgta

SEQ ID NO: 4427282 - DNA, 25 bp, Homo sapien
cagcacagcataaatagagttggtc

SEQ ID NO: 4427283 - DNA, 25 bp, Homo sapien
tagttgatgctttaaccagtgccat

SEQ ID NO: 4427284 - DNA, 25 bp, Homo sapien
caattaacttgatagttgatgcttt

SEQ ID NO: 4427285 - DNA, 25 bp, Homo sapien
atagttgatgctttaaccagtgcca

SEQ ID NO: 4427286 - DNA, 25 bp, Homo sapien
tgatggaaatgaccagaggcagatg

SEQ ID NO: 4427287 - DNA, 25 bp, Homo sapien
gatggaaatgaccagaggcagatgt

SEQ ID NO: 4427288 - DNA, 25 bp, Homo sapien
ctgatggaaatgaccagaggcagat

SEQ ID NO: 4427289 - DNA, 25 bp, Homo sapien
tgtcggcatggtaagtgtggcccac

SEQ ID NO: 4427290 - DNA, 25 bp, Homo sapien
ggcccagccatgaactggtagagta

SEQ ID NO: 4427291 - DNA, 25 bp, Homo sapien
tcggcatggtaagtgtggcccacag

SEQ ID NO: 4427292 - DNA, 25 bp, Homo sapien
tgaactggtagagtagtgtcggcat

SEQ ID NO: 4427293 - DNA, 25 bp, Homo sapien
tcaggcggtctacaaagaccattgg

SEQ ID NO: 4427294 - DNA, 25 bp, Homo sapien
tgccacgagactccatcaggcggtc

SEQ ID NO: 4427295 - DNA, 25 bp, Homo sapien
tgttttaatcttcttgtgccacgag

SEQ ID NO: 4427296 - DNA, 25 bp, Homo sapien
gctgtagtaagcttcaaaggccact

SEQ ID NO: 4427297 - DNA, 25 bp, Homo sapien
gatcataaggttctcactgtacacc

SEQ ID NO: 4427298 - DNA, 25 bp, Homo sapien
tcttcgggatcataaggttctcact

SEQ ID NO: 4427299 - DNA, 25 bp, Homo sapien
taaggttctcactgtacaccctctc

SEQ ID NO: 4427300 - DNA, 25 bp, Homo sapien
cctttcttcgggatcataaggttct

SEQ ID NO: 4427301 - DNA, 25 bp, Homo sapien
tcattcattttcaatttcctgtatt

SEQ ID NO: 4427302 - DNA, 25 bp, Homo sapien
caagttgtccgtatcctgggtgctt

SEQ ID NO: 4427303 - DNA, 25 bp, Homo sapien
aacagatctttgtggtgtacctagc

SEQ ID NO: 4427304 - DNA, 25 bp, Homo sapien
aactgaggctcacaagagtcgtgac

SEQ ID NO: 4427305 - DNA, 25 bp, Homo sapien
gataaacaggcctggactttcgcca

SEQ ID NO: 4427306 - DNA, 25 bp, Homo sapien
gtgggcaccagttcttgtgctggct

SEQ ID NO: 4427307 - DNA, 25 bp, Homo sapien
ttgtgctggctgaggtcattttcag

SEQ ID NO: 4427308 - DNA, 25 bp, Homo sapien
aagggatggataactccttgcctcc

SEQ ID NO: 4427309 - DNA, 25 bp, Homo sapien
tcattttcagaagggatggataact

SEQ ID NO: 4427310 - DNA, 25 bp, Homo sapien
ctggttcttctggtgcactccatcc

SEQ ID NO: 4427311 - DNA, 25 bp, Homo sapien
ggttcttctggtgcactccatccgg

SEQ ID NO: 4427312 - DNA, 25 bp, Homo sapien
aactggttcttctggtgcactccat

SEQ ID NO: 4427313 - DNA, 25 bp, Homo sapien
ttcttctggtgcactccatccggtg

SEQ ID NO: 4427314 - DNA, 25 bp, Homo sapien
tttaaaacagccagcgctagcaccc

SEQ ID NO: 4427315 - DNA, 25 bp, Homo sapien
actgtgtcacacaagagtttaccat

SEQ ID NO: 4427316 - DNA, 25 bp, Homo sapien
accccgcctttggagttcacatgct

SEQ ID NO: 4427317 - DNA, 25 bp, Homo sapien
acatgctccaggtagaactgtgtca

SEQ ID NO: 4427318 - DNA, 25 bp, Homo sapien
cagcatgaggggtgcattggaagat

SEQ ID NO: 4427319 - DNA, 25 bp, Homo sapien
agcatgaggggtgcattggaagatg

SEQ ID NO: 4427320 - DNA, 25 bp, Homo sapien
gtgcccgtgaccgtgactgtgacct

SEQ ID NO: 4427321 - DNA, 25 bp, Homo sapien
ccgctgggcttgagcccgcgttggg

SEQ ID NO: 4427322 - DNA, 25 bp, Homo sapien
gccctgtaggctcccgcaccgggag

SEQ ID NO: 4427323 - DNA, 25 bp, Homo sapien
cttcttgcgtctcctcccaggtgag

SEQ ID NO: 4427324 - DNA, 25 bp, Homo sapien
cacgtagttgtctgatttgctctga

SEQ ID NO: 4427325 - DNA, 25 bp, Homo sapien
tctgaatgagggagcttctggtggc

SEQ ID NO: 4427326 - DNA, 25 bp, Homo sapien
ttgtcttgtgatgcacgtagttgtc

SEQ ID NO: 4427327 - DNA, 25 bp, Homo sapien
gctggatagggtctttgctccatgg

SEQ ID NO: 4427328 - DNA, 25 bp, Homo sapien
ttaataatctgatttcgagggaaag

SEQ ID NO: 4427329 - DNA, 25 bp, Homo sapien
atctgatttcgagggaaagtaatag

SEQ ID NO: 4427330 - DNA, 25 bp, Homo sapien
taatctgatttcgagggaaagtaat

SEQ ID NO: 4427331 - DNA, 25 bp, Homo sapien
aataatctgatttcgagggaaagta

SEQ ID NO: 4427332 - DNA, 25 bp, Homo sapien
aacatccagcgttggcagccagcag

SEQ ID NO: 4427333 - DNA, 25 bp, Homo sapien
gcagccttgttgatggaagagtttt

SEQ ID NO: 4427334 - DNA, 25 bp, Homo sapien
cagccttgttgatggaagagttttt

SEQ ID NO: 4427335 - DNA, 25 bp, Homo sapien
caacatccagcgttggcagccagca

SEQ ID NO: 4427336 - DNA, 25 bp, Homo sapien
cttccagttccaggagacgagggtg

SEQ ID NO: 4427337 - DNA, 25 bp, Homo sapien
gacgagggtggcagaacatctgaca

SEQ ID NO: 4427338 - DNA, 25 bp, Homo sapien
tgtggtggaaaagccatgaaagcgt

SEQ ID NO: 4427339 - DNA, 25 bp, Homo sapien
acatctgacatagatcaggttcacg

SEQ ID NO: 4427340 - DNA, 25 bp, Homo sapien
tagattgaccgccttcagctgcatt

SEQ ID NO: 4427341 - DNA, 25 bp, Homo sapien
ctagattgaccgccttcagctgcat

SEQ ID NO: 4427342 - DNA, 25 bp, Homo sapien
gattgaccgccttcagctgcatttc

SEQ ID NO: 4427343 - DNA, 25 bp, Homo sapien
ttgaccgccttcagctgcatttccg

SEQ ID NO: 4427344 - DNA, 25 bp, Homo sapien
tctgctctacgtcatcgggcctcag

SEQ ID NO: 4427345 - DNA, 25 bp, Homo sapien
gctctacgtcatcgggcctcagttt

SEQ ID NO: 4427346 - DNA, 25 bp, Homo sapien
acgtcatcgggcctcagtttattca

SEQ ID NO: 4427347 - DNA, 25 bp, Homo sapien
tttctgctctacgtcatcgggcctc

SEQ ID NO: 4427348 - DNA, 25 bp, Homo sapien
ttgcaggtcccaaagtttggagtgc

SEQ ID NO: 4427349 - DNA, 25 bp, Homo sapien
attgcaggtcccaaagtttggagtg

SEQ ID NO: 4427350 - DNA, 25 bp, Homo sapien
ctgtatatgggaggtaagattgcag

SEQ ID NO: 4427351 - DNA, 25 bp, Homo sapien
ccagcctaagtgtggtgaatgggtc

SEQ ID NO: 4427352 - DNA, 25 bp, Homo sapien
gcaggttccagcctaagtgtggtga

SEQ ID NO: 4427353 - DNA, 25 bp, Homo sapien
cattggtgttcaggtactctcgatt

SEQ ID NO: 4427354 - DNA, 25 bp, Homo sapien
tctcgattgtactgtgggtccctga

SEQ ID NO: 4427355 - DNA, 25 bp, Homo sapien
aagaggtttatgactgggtgtggtg

SEQ ID NO: 4427356 - DNA, 25 bp, Homo sapien
agaaaagaggtttatgactgggtgt

SEQ ID NO: 4427357 - DNA, 25 bp, Homo sapien
gctcacgcctgtaatcccagcactt

SEQ ID NO: 4427358 - DNA, 25 bp, Homo sapien
aaaagaggtttatgactgggtgtgg

SEQ ID NO: 4427359 - DNA, 25 bp, Homo sapien
tatggaaacagcgtgttgcggccac

SEQ ID NO: 4427360 - DNA, 25 bp, Homo sapien
cataagctcatgcaaccagtgccca

SEQ ID NO: 4427361 - DNA, 25 bp, Homo sapien
gagtgtgctgcctgatgaatgctca

SEQ ID NO: 4427362 - DNA, 25 bp, Homo sapien
ctgatggcaccaggcgactgagctg

SEQ ID NO: 4427363 - DNA, 25 bp, Homo sapien
ggtgtgtggtttgctgaggtacagc

SEQ ID NO: 4427364 - DNA, 25 bp, Homo sapien
acatgtggccgttcaacctccacca

SEQ ID NO: 4427365 - DNA, 25 bp, Homo sapien
tcaacctccaccagccgtctctgat

SEQ ID NO: 4427366 - DNA, 25 bp, Homo sapien
tgtggtttgctgaggtacagcacac

SEQ ID NO: 4427367 - DNA, 25 bp, Homo sapien
tattattgttctcgttgctggcacg

SEQ ID NO: 4427368 - DNA, 25 bp, Homo sapien
gccccgccatggcaagtgtgcctgg

SEQ ID NO: 4427369 - DNA, 25 bp, Homo sapien
tccttccgggtcagagtctctgcca

SEQ ID NO: 4427370 - DNA, 25 bp, Homo sapien
cgttgctggcacgtgttgagtttcc

SEQ ID NO: 4427371 - DNA, 25 bp, Homo sapien
ctctttgttggatgtgcttccacct

SEQ ID NO: 4427372 - DNA, 25 bp, Homo sapien
ctttgttggatgtgcttccacctcc

SEQ ID NO: 4427373 - DNA, 25 bp, Homo sapien
cacacagccacgttcagtgggaaga

SEQ ID NO: 4427374 - DNA, 25 bp, Homo sapien
ctgagagctgttttgcagtttgtac

SEQ ID NO: 4427375 - DNA, 25 bp, Homo sapien
taacgccaaataccagactgacaag

SEQ ID NO: 4427376 - DNA, 25 bp, Homo sapien
agaggcaaatggctttggaatgctt

SEQ ID NO: 4427377 - DNA, 25 bp, Homo sapien
gacaagacgaagatccagctcagct

SEQ ID NO: 4427378 - DNA, 25 bp, Homo sapien
gagttctcttggttaacgccaaata

SEQ ID NO: 4427379 - DNA, 25 bp, Homo sapien
ggtgcctgtgcaccgggaaactgtt

SEQ ID NO: 4427380 - DNA, 25 bp, Homo sapien
acgtgaccgcattcatccgcacggg

SEQ ID NO: 4427381 - DNA, 25 bp, Homo sapien
ctttctctccacaatgggacgtgac

SEQ ID NO: 4427382 - DNA, 25 bp, Homo sapien
cctgtgcaccgggaaactgttgttt

SEQ ID NO: 4427383 - DNA, 25 bp, Homo sapien
ttgcgacagcactttagagggcggt

SEQ ID NO: 4427384 - DNA, 25 bp, Homo sapien
tttagagggcggtggtgtccctgga

SEQ ID NO: 4427385 - DNA, 25 bp, Homo sapien
tcattgcgacagcactttagagggc

SEQ ID NO: 4427386 - DNA, 25 bp, Homo sapien
cactttagagggcggtggtgtccct

SEQ ID NO: 4427387 - DNA, 25 bp, Homo sapien
tcatttatatagtcaaagaaacaaa

SEQ ID NO: 4427388 - DNA, 25 bp, Homo sapien
actttggtggttgactgtgcagtcc

SEQ ID NO: 4427389 - DNA, 25 bp, Homo sapien
aatcactttggtggttgactgtgca

SEQ ID NO: 4427390 - DNA, 25 bp, Homo sapien
acaaaacgcacctgatttcaaatca

SEQ ID NO: 4427391 - DNA, 25 bp, Homo sapien
tgtctgcggtgacgggacactaaga

SEQ ID NO: 4427392 - DNA, 25 bp, Homo sapien
taggtagccctcacggctctacagt

SEQ ID NO: 4427393 - DNA, 25 bp, Homo sapien
gaatctcctgtggtctggttcctct

SEQ ID NO: 4427394 - DNA, 25 bp, Homo sapien
tacagtgcccgcttgatgtgtgtcg

SEQ ID NO: 4427395 - DNA, 25 bp, Homo sapien
tagtgcaggatccccagtaggagga

SEQ ID NO: 4427396 - DNA, 25 bp, Homo sapien
tagtacaaggctccttgtcaatctt

SEQ ID NO: 4427397 - DNA, 25 bp, Homo sapien
agtacaaggctccttgtcaatcttc

SEQ ID NO: 4427398 - DNA, 25 bp, Homo sapien
ctagtgcaggatccccagtaggagg

SEQ ID NO: 4427399 - DNA, 25 bp, Homo sapien
tcagaggccaccgggcaacaggcaa

SEQ ID NO: 4427400 - DNA, 25 bp, Homo sapien
agaggccaccgggcaacaggcaagc

SEQ ID NO: 4427401 - DNA, 25 bp, Homo sapien
tgtcagaggccaccgggcaacaggc

SEQ ID NO: 4427402 - DNA, 25 bp, Homo sapien
gaggccaccgggcaacaggcaagca

SEQ ID NO: 4427403 - DNA, 25 bp, Homo sapien
caggggtgcagaagtggagagtttc

SEQ ID NO: 4427404 - DNA, 25 bp, Homo sapien
tgcagaagtggagagtttctgtgga

SEQ ID NO: 4427405 - DNA, 25 bp, Homo sapien
ggggtgcagaagtggagagtttctg

SEQ ID NO: 4427406 - DNA, 25 bp, Homo sapien
ggtgcagaagtggagagtttctgtg

SEQ ID NO: 4427407 - DNA, 25 bp, Homo sapien
catgctctgtgcacaattctatcag

SEQ ID NO: 4427408 - DNA, 25 bp, Homo sapien
aactgtcaatgtacatcgtctctcg

SEQ ID NO: 4427409 - DNA, 25 bp, Homo sapien
gttttaccactgattgacaactgtc

SEQ ID NO: 4427410 - DNA, 25 bp, Homo sapien
gttggtgtcagttctcgtgctctct

SEQ ID NO: 4427411 - DNA, 25 bp, Homo sapien
tctctctctttgctattcctaactc

SEQ ID NO: 4427412 - DNA, 25 bp, Homo sapien
caggccactcacttgttcttcagtc

SEQ ID NO: 4427413 - DNA, 25 bp, Homo sapien
gactccagtatgatcttccaggcca

SEQ ID NO: 4427414 - DNA, 25 bp, Homo sapien
gattcttcggtgctgcttttgagac

SEQ ID NO: 4427415 - DNA, 25 bp, Homo sapien
cccaagaactccttaagtaccagca

SEQ ID NO: 4427416 - DNA, 25 bp, Homo sapien
tgcagagtgacccaagaactcctta

SEQ ID NO: 4427417 - DNA, 25 bp, Homo sapien
gagtgacccaagaactccttaagta

SEQ ID NO: 4427418 - DNA, 25 bp, Homo sapien
cctgcagagtgacccaagaactcct

SEQ ID NO: 4427419 - DNA, 25 bp, Homo sapien
gtggccatgaggagaactgtccgat

SEQ ID NO: 4427420 - DNA, 25 bp, Homo sapien
ttccacgaaggtagagtcgcagttt

SEQ ID NO: 4427421 - DNA, 25 bp, Homo sapien
cgatcgtggccaagacgccgcagtg

SEQ ID NO: 4427422 - DNA, 25 bp, Homo sapien
cagtgggtgatggaaggacgccaga

SEQ ID NO: 4427423 - DNA, 25 bp, Homo sapien
ccctgtctccactccgtcctccgtg

SEQ ID NO: 4427424 - DNA, 25 bp, Homo sapien
actccgtcctccgtgctctcccgct

SEQ ID NO: 4427425 - DNA, 25 bp, Homo sapien
tcctccgtgctctcccgctccatct

SEQ ID NO: 4427426 - DNA, 25 bp, Homo sapien
acagtgacacctgagagccccacag

SEQ ID NO: 4427427 - DNA, 25 bp, Homo sapien
ctaaggcggacccagtgtctctagg

SEQ ID NO: 4427428 - DNA, 25 bp, Homo sapien
gacccagtgtctctagggacgcagc

SEQ ID NO: 4427429 - DNA, 25 bp, Homo sapien
gacgccaggagtgggctggcatgcc

SEQ ID NO: 4427430 - DNA, 25 bp, Homo sapien
aaatgccccggcaatgccgagcaga

SEQ ID NO: 4427431 - DNA, 25 bp, Homo sapien
ccaccactgggggaggggcgctcca

SEQ ID NO: 4427432 - DNA, 25 bp, Homo sapien
ctaggtgctcagcagcccccaccac

SEQ ID NO: 4427433 - DNA, 25 bp, Homo sapien
agcagcccccaccactgggggaggg

SEQ ID NO: 4427434 - DNA, 25 bp, Homo sapien
ccactgggggaggggcgctccagga

SEQ ID NO: 4427435 - DNA, 25 bp, Homo sapien
tgcagggggcgagtgtgtgattgtc

SEQ ID NO: 4427436 - DNA, 25 bp, Homo sapien
cgagtgtgtgattgtcttgggttgg

SEQ ID NO: 4427437 - DNA, 25 bp, Homo sapien
gggcgagtgtgtgattgtcttgggt

SEQ ID NO: 4427438 - DNA, 25 bp, Homo sapien
tgtgtgattgtcttgggttggacat

SEQ ID NO: 4427439 - DNA, 25 bp, Homo sapien
tcaccttcccaacaaagttatcatt

SEQ ID NO: 4427440 - DNA, 25 bp, Homo sapien
caggtgtcctgctgacattcacaac

SEQ ID NO: 4427441 - DNA, 25 bp, Homo sapien
ttcaggagaccaggtgtcctgctga

SEQ ID NO: 4427442 - DNA, 25 bp, Homo sapien
gacattcacaactttttggataaaa

SEQ ID NO: 4427443 - DNA, 25 bp, Homo sapien
agtcctgcagaggaacctcaatcac

SEQ ID NO: 4427444 - DNA, 25 bp, Homo sapien
tagaagggacatccacattttatga

SEQ ID NO: 4427445 - DNA, 25 bp, Homo sapien
cacattttatgaaggaccccagaag

SEQ ID NO: 4427446 - DNA, 25 bp, Homo sapien
cagaggaacctcaatcacatcaatg

SEQ ID NO: 4427447 - DNA, 25 bp, Homo sapien
gcttccgagccacgtcgggtcactg

SEQ ID NO: 4427448 - DNA, 25 bp, Homo sapien
gggtcactgcctcattagccacgta

SEQ ID NO: 4427449 - DNA, 25 bp, Homo sapien
gtgacggggcgggatctccccagca

SEQ ID NO: 4427450 - DNA, 25 bp, Homo sapien
cagggcttccgagccacgtcgggtc

SEQ ID NO: 4427451 - DNA, 25 bp, Homo sapien
gcagtgtatatctgggggttttctg

SEQ ID NO: 4427452 - DNA, 25 bp, Homo sapien
ctaacgcagtgtatatctgggggtt

SEQ ID NO: 4427453 - DNA, 25 bp, Homo sapien
tttcttgacaacaagccgcagtggc

SEQ ID NO: 4427454 - DNA, 25 bp, Homo sapien
ttcttgacaacaagccgcagtggca

SEQ ID NO: 4427455 - DNA, 25 bp, Homo sapien
ccccggctcggcctgcaaggggaga

SEQ ID NO: 4427456 - DNA, 25 bp, Homo sapien
ggagaggccctgttctgctgaagtt

SEQ ID NO: 4427457 - DNA, 25 bp, Homo sapien
tgctgaagtttctccagggccctca

SEQ ID NO: 4427458 - DNA, 25 bp, Homo sapien
ctccagggccctcaacagcatcttc

SEQ ID NO: 4427459 - DNA, 25 bp, Homo sapien
tggaggatcggccctctgcagaggt

SEQ ID NO: 4427460 - DNA, 25 bp, Homo sapien
ctgcagaggtgctccggtagaggcc

SEQ ID NO: 4427461 - DNA, 25 bp, Homo sapien
cgccacatgtcgtctctgggctgga

SEQ ID NO: 4427462 - DNA, 25 bp, Homo sapien
gtgctccggtagaggccgccagacg

SEQ ID NO: 4427463 - DNA, 25 bp, Homo sapien
caggtacttccacctcggaagcgaa

SEQ ID NO: 4427464 - DNA, 25 bp, Homo sapien
ccgcaaactccggaattgggagaca

SEQ ID NO: 4427465 - DNA, 25 bp, Homo sapien
cctcggaagcgaaggccttctgcga

SEQ ID NO: 4427466 - DNA, 25 bp, Homo sapien
aggcatccgaacagtatgcttcgaa

SEQ ID NO: 4427467 - DNA, 25 bp, Homo sapien
gtatgcgcataacgcaaataggtgc

SEQ ID NO: 4427468 - DNA, 25 bp, Homo sapien
tctcagtatgcgcataacgcaaata

SEQ ID NO: 4427469 - DNA, 25 bp, Homo sapien
catttctcagtatgcgcataacgca

SEQ ID NO: 4427470 - DNA, 25 bp, Homo sapien
gcgcataacgcaaataggtgctcac

SEQ ID NO: 4427471 - DNA, 25 bp, Homo sapien
aaatatctgccacgccacgcgttca

SEQ ID NO: 4427472 - DNA, 25 bp, Homo sapien
cacgccacgcgttcaaagccagcaa

SEQ ID NO: 4427473 - DNA, 25 bp, Homo sapien
tatctgccacgccacgcgttcaaag

SEQ ID NO: 4427474 - DNA, 25 bp, Homo sapien
ctgaaatatctgccacgccacgcgt

SEQ ID NO: 4427475 - DNA, 25 bp, Homo sapien
tggaggaataactcttcccttctcc

SEQ ID NO: 4427476 - DNA, 25 bp, Homo sapien
gaatagtagttgaagcaggtgaata

SEQ ID NO: 4427477 - DNA, 25 bp, Homo sapien
ggtgaatatggaggaataactcttc

SEQ ID NO: 4427478 - DNA, 25 bp, Homo sapien
tcccaataagaatagtagttgaagc

SEQ ID NO: 4427479 - DNA, 25 bp, Homo sapien
aggaggtttttgatcatgataaaac

SEQ ID NO: 4427480 - DNA, 25 bp, Homo sapien
gaaggaggtttttgatcatgataaa

SEQ ID NO: 4427481 - DNA, 25 bp, Homo sapien
agagaaggaggtttttgatcatgat

SEQ ID NO: 4427482 - DNA, 25 bp, Homo sapien
gagaaggaggtttttgatcatgata

SEQ ID NO: 4427483 - DNA, 25 bp, Homo sapien
gttccctcttgtctagactggtttg

SEQ ID NO: 4427484 - DNA, 25 bp, Homo sapien
tctagactggtttgatccagggcta

SEQ ID NO: 4427485 - DNA, 25 bp, Homo sapien
tcttgtctagactggtttgatccag

SEQ ID NO: 4427486 - DNA, 25 bp, Homo sapien
tagactggtttgatccagggctacc

SEQ ID NO: 4427487 - DNA, 25 bp, Homo sapien
accaccacttgtgttcctgctccct

SEQ ID NO: 4427488 - DNA, 25 bp, Homo sapien
ttttttgccacgtgcaagaactgcc

SEQ ID NO: 4427489 - DNA, 25 bp, Homo sapien
tcccagggtcgctgaagcctttagg

SEQ ID NO: 4427490 - DNA, 25 bp, Homo sapien
ccacgtgcaagaactgccttttggc

SEQ ID NO: 4427491 - DNA, 25 bp, Homo sapien
tgccagacagtcttggcggagagct

SEQ ID NO: 4427492 - DNA, 25 bp, Homo sapien
tgactgccagacagtcttggcggag

SEQ ID NO: 4427493 - DNA, 25 bp, Homo sapien
actgccagacagtcttggcggagag

SEQ ID NO: 4427494 - DNA, 25 bp, Homo sapien
ctgactgccagacagtcttggcgga

SEQ ID NO: 4427495 - DNA, 25 bp, Homo sapien
gtcataagaaatagatgagacatca

SEQ ID NO: 4427496 - DNA, 25 bp, Homo sapien
cataagaaatagatgagacatcaag

SEQ ID NO: 4427497 - DNA, 25 bp, Homo sapien
gaaatagatgagacatcaagtcctg

SEQ ID NO: 4427498 - DNA, 25 bp, Homo sapien
aagaaatagatgagacatcaagtcc

SEQ ID NO: 4427499 - DNA, 25 bp, Homo sapien
gccccatcggaaagcctgcagggtt

SEQ ID NO: 4427500 - DNA, 25 bp, Homo sapien
ctggcatgacggcaggcaatattct

SEQ ID NO: 4427501 - DNA, 25 bp, Homo sapien
agagttgtgccccatcggaaagcct

SEQ ID NO: 4427502 - DNA, 25 bp, Homo sapien
gacacagcgtttggcattctgcagc

SEQ ID NO: 4427503 - DNA, 25 bp, Homo sapien
tattggaaacatgacctccctgtga

SEQ ID NO: 4427504 - DNA, 25 bp, Homo sapien
gagcagccccatgcatattttgaaa

SEQ ID NO: 4427505 - DNA, 25 bp, Homo sapien
catgtgaggcatcctagctgggtca

SEQ ID NO: 4427506 - DNA, 25 bp, Homo sapien
gatgctacccgtgactctcaggcaa

SEQ ID NO: 4427507 - DNA, 25 bp, Homo sapien
ggggcactctgcagagatggtcaag

SEQ ID NO: 4427508 - DNA, 25 bp, Homo sapien
ccatcgggaagtcctcaagctgcat

SEQ ID NO: 4427509 - DNA, 25 bp, Homo sapien
aatttcagagggcaagcgtgcgcat

SEQ ID NO: 4427510 - DNA, 25 bp, Homo sapien
gtgcgcatccatcgggaagtcctca

SEQ ID NO: 4427511 - DNA, 25 bp, Homo sapien
ggcaagcgtgcgcatccatcgggaa

SEQ ID NO: 4427512 - DNA, 25 bp, Homo sapien
tctccagcaccacactcctcagcca

SEQ ID NO: 4427513 - DNA, 25 bp, Homo sapien
ctgctctccagcaccacactcctca

SEQ ID NO: 4427514 - DNA, 25 bp, Homo sapien
cagcaccacactcctcagccacccc

SEQ ID NO: 4427515 - DNA, 25 bp, Homo sapien
gcaccacactcctcagccaccccag

SEQ ID NO: 4427516 - DNA, 25 bp, Homo sapien
gagccaggcaagaaggtctgaaaca

SEQ ID NO: 4427517 - DNA, 25 bp, Homo sapien
cttcaggcttcttcccctgagttga

SEQ ID NO: 4427518 - DNA, 25 bp, Homo sapien
cattttcactcgcatcgggcttgga

SEQ ID NO: 4427519 - DNA, 25 bp, Homo sapien
ggcttggaaattcatcaccgttttc

SEQ ID NO: 4427520 - DNA, 25 bp, Homo sapien
tctgccccatcaggtggtactggtt

SEQ ID NO: 4427521 - DNA, 25 bp, Homo sapien
gagccgttggtccagacgtagacga

SEQ ID NO: 4427522 - DNA, 25 bp, Homo sapien
caccgacttggtggagccgttggtc

SEQ ID NO: 4427523 - DNA, 25 bp, Homo sapien
tagacgacttcagaattagggtacg

SEQ ID NO: 4427524 - DNA, 25 bp, Homo sapien
tgatgccgtcctcacggtgaactgg

SEQ ID NO: 4427525 - DNA, 25 bp, Homo sapien
gaatgatgccgtcctcacggtgaac

SEQ ID NO: 4427526 - DNA, 25 bp, Homo sapien
cgtcctcacggtgaactggtaagga

SEQ ID NO: 4427527 - DNA, 25 bp, Homo sapien
tgctgagaatgatgccgtcctcacg

SEQ ID NO: 4427528 - DNA, 25 bp, Homo sapien
ttcattggcgatgccccagtgcctt

SEQ ID NO: 4427529 - DNA, 25 bp, Homo sapien
gggcatttcattggcgatgccccag

SEQ ID NO: 4427530 - DNA, 25 bp, Homo sapien
aaatcgggggcatttcattggcgat

SEQ ID NO: 4427531 - DNA, 25 bp, Homo sapien
cctgttctttgaaatcgggggcatt

SEQ ID NO: 4427532 - DNA, 25 bp, Homo sapien
gattcccggttcagccaaaaggaca

SEQ ID NO: 4427533 - DNA, 25 bp, Homo sapien
tgagctgtcatgattgtgtattcgc

SEQ ID NO: 4427534 - DNA, 25 bp, Homo sapien
aggacacctgtgataagatcacggt

SEQ ID NO: 4427535 - DNA, 25 bp, Homo sapien
taagatcacggtcattatgcaggga

SEQ ID NO: 4427536 - DNA, 25 bp, Homo sapien
catcaggcacattaacttggggagc

SEQ ID NO: 4427537 - DNA, 25 bp, Homo sapien
ggcacattaacttggggagcactgc

SEQ ID NO: 4427538 - DNA, 25 bp, Homo sapien
cctgatgctcgctcaggcttggtaa

SEQ ID NO: 4427539 - DNA, 25 bp, Homo sapien
tgaaacaatcctgatgctcgctcag

SEQ ID NO: 4427540 - DNA, 25 bp, Homo sapien
ctgatgctgagggtcgtcatggtca

SEQ ID NO: 4427541 - DNA, 25 bp, Homo sapien
cagagagttcctggcgctgatgctg

SEQ ID NO: 4427542 - DNA, 25 bp, Homo sapien
ttgaccgtggcaaactctatcagcg

SEQ ID NO: 4427543 - DNA, 25 bp, Homo sapien
tctatcagcgccgagaagacgaagg

SEQ ID NO: 4427544 - DNA, 25 bp, Homo sapien
agaaaggaggagaaatagtcagtac

SEQ ID NO: 4427545 - DNA, 25 bp, Homo sapien
gaagaaaggaggagaaatagtcagt

SEQ ID NO: 4427546 - DNA, 25 bp, Homo sapien
tggaagaaaggaggagaaatagtca

SEQ ID NO: 4427547 - DNA, 25 bp, Homo sapien
ctggaagaaaggaggagaaatagtc

SEQ ID NO: 4427548 - DNA, 25 bp, Homo sapien
tcatgtttggatagaatcaggcaca

SEQ ID NO: 4427549 - DNA, 25 bp, Homo sapien
cccatcgccttttgctggagtgaaa

SEQ ID NO: 4427550 - DNA, 25 bp, Homo sapien
cttgaatatgaggaaaggagcattc

SEQ ID NO: 4427551 - DNA, 25 bp, Homo sapien
tggacctgttgtcagtaagacttgg

SEQ ID NO: 4427552 - DNA, 25 bp, Homo sapien
cagactccattctcgttcctcccca

SEQ ID NO: 4427553 - DNA, 25 bp, Homo sapien
agactccattctcgttcctccccac

SEQ ID NO: 4427554 - DNA, 25 bp, Homo sapien
gtgcagggtgttgggaagccccgtc

SEQ ID NO: 4427555 - DNA, 25 bp, Homo sapien
ccccagactccattctcgttcctcc

SEQ ID NO: 4427556 - DNA, 25 bp, Homo sapien
catggcttccagcacgcagagcctt

SEQ ID NO: 4427557 - DNA, 25 bp, Homo sapien
tctcctcggattagacagtgcaggt

SEQ ID NO: 4427558 - DNA, 25 bp, Homo sapien
gaggcacgcggcttattctagaaga

SEQ ID NO: 4427559 - DNA, 25 bp, Homo sapien
tgaacattccacaagccagcttgag

SEQ ID NO: 4427560 - DNA, 25 bp, Homo sapien
caagactgggaatacgattcgggac

SEQ ID NO: 4427561 - DNA, 25 bp, Homo sapien
ggttgtattcgacgtccctgctggg

SEQ ID NO: 4427562 - DNA, 25 bp, Homo sapien
tcaccggctccctattcaaatacgt

SEQ ID NO: 4427563 - DNA, 25 bp, Homo sapien
gagaggcggctccttttatcaccgg

SEQ ID NO: 4427564 - DNA, 25 bp, Homo sapien
aagacctctccttggtaccatttcg

SEQ ID NO: 4427565 - DNA, 25 bp, Homo sapien
tatagaaacatcaaggcaatattat

SEQ ID NO: 4427566 - DNA, 25 bp, Homo sapien
gtaccatttcgctggaagtatggct

SEQ ID NO: 4427567 - DNA, 25 bp, Homo sapien
gatagtgctcacatatggagagtcc

SEQ ID NO: 4427568 - DNA, 25 bp, Homo sapien
gaaaacgtgctctttatgatctctg

SEQ ID NO: 4427569 - DNA, 25 bp, Homo sapien
ttcagagacagcgatcacatgggcc

SEQ ID NO: 4427570 - DNA, 25 bp, Homo sapien
gagcagtaagtccagtcatgaaata

SEQ ID NO: 4427571 - DNA, 25 bp, Homo sapien
cactgaagcactacacgctggctgt

SEQ ID NO: 4427572 - DNA, 25 bp, Homo sapien
tgaaagaatagctggaaacgtgagg

SEQ ID NO: 4427573 - DNA, 25 bp, Homo sapien
gctggaaacgtgaggccactggata

SEQ ID NO: 4427574 - DNA, 25 bp, Homo sapien
cgtgaggccactggatatctgattt

SEQ ID NO: 4427575 - DNA, 25 bp, Homo sapien
caaagaaggtagaccacaattgcac

SEQ ID NO: 4427576 - DNA, 25 bp, Homo sapien
aggttggcaccttgtagcaccacac

SEQ ID NO: 4427577 - DNA, 25 bp, Homo sapien
gcgggacaggtatctactctggcgc

SEQ ID NO: 4427578 - DNA, 25 bp, Homo sapien
gcggcgggcgggacaggtatctact

SEQ ID NO: 4427579 - DNA, 25 bp, Homo sapien
ctccggcgcggacctggtctccgcc

SEQ ID NO: 4427580 - DNA, 25 bp, Homo sapien
ggtatctactctggcgctggccgcg

SEQ ID NO: 4427581 - DNA, 25 bp, Homo sapien
gcgcgtgcaagcccgagaacaggca

SEQ ID NO: 4427582 - DNA, 25 bp, Homo sapien
cgcgtgcaagcccgagaacaggcag

SEQ ID NO: 4427583 - DNA, 25 bp, Homo sapien
cgcgcgtgcaagcccgagaacaggc

SEQ ID NO: 4427584 - DNA, 25 bp, Homo sapien
cacgtcggtgtcttgggattttgga

SEQ ID NO: 4427585 - DNA, 25 bp, Homo sapien
cccacttttggtttgatgatgaatc

SEQ ID NO: 4427586 - DNA, 25 bp, Homo sapien
gttgagaataagagtcacgtcggtg

SEQ ID NO: 4427587 - DNA, 25 bp, Homo sapien
gacccacttttggtttgatgatgaa

SEQ ID NO: 4427588 - DNA, 25 bp, Homo sapien
ctcctgccttagcctcccaaagtgc

SEQ ID NO: 4427589 - DNA, 25 bp, Homo sapien
tcctgccttagcctcccaaagtgct

SEQ ID NO: 4427590 - DNA, 25 bp, Homo sapien
gacagaggagtcttgctctgtggcc

SEQ ID NO: 4427591 - DNA, 25 bp, Homo sapien
agacagaggagtcttgctctgtggc

SEQ ID NO: 4427592 - DNA, 25 bp, Homo sapien
gcctctatagttaggaattggaaac

SEQ ID NO: 4427593 - DNA, 25 bp, Homo sapien
ggatgcctctatagttaggaattgg

SEQ ID NO: 4427594 - DNA, 25 bp, Homo sapien
gatgcctctatagttaggaattgga

SEQ ID NO: 4427595 - DNA, 25 bp, Homo sapien
atggatgcctctatagttaggaatt

SEQ ID NO: 4427596 - DNA, 25 bp, Homo sapien
caagcacagcaattaagaatgtctg

SEQ ID NO: 4427597 - DNA, 25 bp, Homo sapien
tcaagcacagcaattaagaatgtct

SEQ ID NO: 4427598 - DNA, 25 bp, Homo sapien
tgaggacaatgagagcctgtggcct

SEQ ID NO: 4427599 - DNA, 25 bp, Homo sapien
gccaggcatggtccagagaactgat

SEQ ID NO: 4427600 - DNA, 25 bp, Homo sapien
tatgctgggtaagttaggtcaacac

SEQ ID NO: 4427601 - DNA, 25 bp, Homo sapien
cagaagttctattccagccaggcat

SEQ ID NO: 4427602 - DNA, 25 bp, Homo sapien
tctccactctccatggccgtcttca

SEQ ID NO: 4427603 - DNA, 25 bp, Homo sapien
ctccactctccatggccgtcttcat

SEQ ID NO: 4427604 - DNA, 25 bp, Homo sapien
tccactctccatggccgtcttcatc

SEQ ID NO: 4427605 - DNA, 25 bp, Homo sapien
tttattgatgacacaggaccaatgc

SEQ ID NO: 4427606 - DNA, 25 bp, Homo sapien
ccaatgctgttaacataaatgtcaa

SEQ ID NO: 4427607 - DNA, 25 bp, Homo sapien
gacacaggaccaatgctgttaacat

SEQ ID NO: 4427608 - DNA, 25 bp, Homo sapien
taaatgtcaacgtcaattacggtcg

SEQ ID NO: 4427609 - DNA, 25 bp, Homo sapien
ctgcatggaacccttatatcaccag

SEQ ID NO: 4427610 - DNA, 25 bp, Homo sapien
aatataactttacccctgcatggaa

SEQ ID NO: 4427611 - DNA, 25 bp, Homo sapien
acttctttgctccagtttagggatg

SEQ ID NO: 4427612 - DNA, 25 bp, Homo sapien
gaataaacggttgtggaacaaatgc

SEQ ID NO: 4427613 - DNA, 25 bp, Homo sapien
gcccggcctggatttgaacaaatct

SEQ ID NO: 4427614 - DNA, 25 bp, Homo sapien
tcacagtttccaaacgcagggatct

SEQ ID NO: 4427615 - DNA, 25 bp, Homo sapien
gcctggatttgaacaaatctcatga

SEQ ID NO: 4427616 - DNA, 25 bp, Homo sapien
cacagtttccaaacgcagggatctg

SEQ ID NO: 4427617 - DNA, 25 bp, Homo sapien
ttccaggccctcagttgggacctct

SEQ ID NO: 4427618 - DNA, 25 bp, Homo sapien
ggaaccagagtccagtggagcctct

SEQ ID NO: 4427619 - DNA, 25 bp, Homo sapien
caatactggttatctcctcgacaca

SEQ ID NO: 4427620 - DNA, 25 bp, Homo sapien
tgtttgcatcatagacatggatccc

SEQ ID NO: 4427621 - DNA, 25 bp, Homo sapien
ggaaagatatcgacacagtctgtgc

SEQ ID NO: 4427622 - DNA, 25 bp, Homo sapien
caagagcttggttggtcctggagaa

SEQ ID NO: 4427623 - DNA, 25 bp, Homo sapien
taagaccttggtacagaatgacatg

SEQ ID NO: 4427624 - DNA, 25 bp, Homo sapien
ttgatgcctcaaaagaatgcctggg

SEQ ID NO: 4427625 - DNA, 25 bp, Homo sapien
gccccctccagactccctgagccat

SEQ ID NO: 4427626 - DNA, 25 bp, Homo sapien
ccccctgcagcaccccttgctgggg

SEQ ID NO: 4427627 - DNA, 25 bp, Homo sapien
gaagaggatggagccccctccagac

SEQ ID NO: 4427628 - DNA, 25 bp, Homo sapien
tgcagcaccccttgctggggcctct

SEQ ID NO: 4427629 - DNA, 25 bp, Homo sapien
tctggacgttctggatcagagggtg

SEQ ID NO: 4427630 - DNA, 25 bp, Homo sapien
gacgttctggatcagagggtgggct

SEQ ID NO: 4427631 - DNA, 25 bp, Homo sapien
tgtctggacgttctggatcagaggg

SEQ ID NO: 4427632 - DNA, 25 bp, Homo sapien
tggacgttctggatcagagggtggg

SEQ ID NO: 4427633 - DNA, 25 bp, Homo sapien
agctctgcgttgtcctggccagttt

SEQ ID NO: 4427634 - DNA, 25 bp, Homo sapien
cccggatctgctgagtgtcctttca

SEQ ID NO: 4427635 - DNA, 25 bp, Homo sapien
tgcttttgaagcaccgtccctggca

SEQ ID NO: 4427636 - DNA, 25 bp, Homo sapien
ccatctgacggatctgcagctctgc

SEQ ID NO: 4427637 - DNA, 25 bp, Homo sapien
tcttaccagcatagacaacacctgt

SEQ ID NO: 4427638 - DNA, 25 bp, Homo sapien
tggcaattgcctcattcttcataga

SEQ ID NO: 4427639 - DNA, 25 bp, Homo sapien
tgtgctacttatggtgtcactcagg

SEQ ID NO: 4427640 - DNA, 25 bp, Homo sapien
gactcctgttttgtatgatgacctt

SEQ ID NO: 4427641 - DNA, 25 bp, Homo sapien
gagcagacgcctgatgaacacggcc

SEQ ID NO: 4427642 - DNA, 25 bp, Homo sapien
agcagacgcctgatgaacacggcca

SEQ ID NO: 4427643 - DNA, 25 bp, Homo sapien
gcagacgcctgatgaacacggccat

SEQ ID NO: 4427644 - DNA, 25 bp, Homo sapien
cagcgatgtaagagcagacgcctga

SEQ ID NO: 4427645 - DNA, 25 bp, Homo sapien
tgttctcacaccgttagccactggg

SEQ ID NO: 4427646 - DNA, 25 bp, Homo sapien
taagtcagggtcaaagctggcactg

SEQ ID NO: 4427647 - DNA, 25 bp, Homo sapien
taggagatagggagacttgccccat

SEQ ID NO: 4427648 - DNA, 25 bp, Homo sapien
cagccccgtatacagtgtgagagca

SEQ ID NO: 4427649 - DNA, 25 bp, Homo sapien
gggagtccccgtttgcacagccaat

SEQ ID NO: 4427650 - DNA, 25 bp, Homo sapien
agactctggctccaaaggggagtcc

SEQ ID NO: 4427651 - DNA, 25 bp, Homo sapien
cagactctggctccaaaggggagtc

SEQ ID NO: 4427652 - DNA, 25 bp, Homo sapien
caaaggggagtccccgtttgcacag

SEQ ID NO: 4427653 - DNA, 25 bp, Homo sapien
aaacgaatctactgcgtctccaaaa

SEQ ID NO: 4427654 - DNA, 25 bp, Homo sapien
taaacacattaaacgaatctactgc

SEQ ID NO: 4427655 - DNA, 25 bp, Homo sapien
cattaaacgaatctactgcgtctcc

SEQ ID NO: 4427656 - DNA, 25 bp, Homo sapien
gagataaacacattaaacgaatcta

SEQ ID NO: 4427657 - DNA, 25 bp, Homo sapien
gaccatggacaagaaagaccttgca

SEQ ID NO: 4427658 - DNA, 25 bp, Homo sapien
caagaaagaccttgcagaagtacag

SEQ ID NO: 4427659 - DNA, 25 bp, Homo sapien
aggtcctggaggaccatggacaaga

SEQ ID NO: 4427660 - DNA, 25 bp, Homo sapien
tggaggaccatggacaagaaagacc

SEQ ID NO: 4427661 - DNA, 25 bp, Homo sapien
aagcaggcaagggaatcttgaccac

SEQ ID NO: 4427662 - DNA, 25 bp, Homo sapien
agaagcaggcaagggaatcttgacc

SEQ ID NO: 4427663 - DNA, 25 bp, Homo sapien
caggcaagggaatcttgaccacaga

SEQ ID NO: 4427664 - DNA, 25 bp, Homo sapien
gcaggcaagggaatcttgaccacag

SEQ ID NO: 4427665 - DNA, 25 bp, Homo sapien
tattcttgccacgtgcaggtgctag

SEQ ID NO: 4427666 - DNA, 25 bp, Homo sapien
tactcttgccaatctacttgcctaa

SEQ ID NO: 4427667 - DNA, 25 bp, Homo sapien
tctggtagattccttgtgactttca

SEQ ID NO: 4427668 - DNA, 25 bp, Homo sapien
gacttccagtgcgacattgaaaatg

SEQ ID NO: 4427669 - DNA, 25 bp, Homo sapien
cttgtccaactggtggcccataggc

SEQ ID NO: 4427670 - DNA, 25 bp, Homo sapien
ttgtccaactggtggcccataggcc

SEQ ID NO: 4427671 - DNA, 25 bp, Homo sapien
tgtccaactggtggcccataggcca

SEQ ID NO: 4427672 - DNA, 25 bp, Homo sapien
taatagaaaatcctctcacccagtg

SEQ ID NO: 4427673 - DNA, 25 bp, Homo sapien
agcacagagttgtcaccaagcatga

SEQ ID NO: 4427674 - DNA, 25 bp, Homo sapien
gcatcgtattcctgaagcacctagt

SEQ ID NO: 4427675 - DNA, 25 bp, Homo sapien
aagtaacaaatgcagtccccacgac

SEQ ID NO: 4427676 - DNA, 25 bp, Homo sapien
gagtagcaatgcaactgctcagagc

SEQ ID NO: 4427677 - DNA, 25 bp, Homo sapien
gcacctagatgtgtgaaaagcacct

SEQ ID NO: 4427678 - DNA, 25 bp, Homo sapien
ggttaatccccacctcttgagtatg

SEQ ID NO: 4427679 - DNA, 25 bp, Homo sapien
tattgtcaccgacgaactcaaagga

SEQ ID NO: 4427680 - DNA, 25 bp, Homo sapien
gcatggaaaaaaggctctgctccag

SEQ ID NO: 4427681 - DNA, 25 bp, Homo sapien
tctgctccagatgctaggaggagag

SEQ ID NO: 4427682 - DNA, 25 bp, Homo sapien
aaaaggctctgctccagatgctagg

SEQ ID NO: 4427683 - DNA, 25 bp, Homo sapien
aggctctgctccagatgctaggagg

SEQ ID NO: 4427684 - DNA, 25 bp, Homo sapien
ggcgcaccacagtgcagccacagcc

SEQ ID NO: 4427685 - DNA, 25 bp, Homo sapien
acagccacagccaggaagtgccctc

SEQ ID NO: 4427686 - DNA, 25 bp, Homo sapien
cacagccacagccaggaagtgccct

SEQ ID NO: 4427687 - DNA, 25 bp, Homo sapien
agccacagccacagccaggaagtgc

SEQ ID NO: 4427688 - DNA, 25 bp, Homo sapien
gcttccatggaaaacccatggcctc

SEQ ID NO: 4427689 - DNA, 25 bp, Homo sapien
gggagctcggaaaggcctcgcccca

SEQ ID NO: 4427690 - DNA, 25 bp, Homo sapien
gaagtgacacccatcgcttccatgg

SEQ ID NO: 4427691 - DNA, 25 bp, Homo sapien
aggcctcgccccagcattcaatgct

SEQ ID NO: 4427692 - DNA, 25 bp, Homo sapien
ctctgtggagggcaagaccaacatg

SEQ ID NO: 4427693 - DNA, 25 bp, Homo sapien
gacaacgtgcacctgggtctttctg

SEQ ID NO: 4427694 - DNA, 25 bp, Homo sapien
caaaaccatgacaacgtgcacctgg

SEQ ID NO: 4427695 - DNA, 25 bp, Homo sapien
aggtgactttagcgacaccttcaaa

SEQ ID NO: 4427696 - DNA, 25 bp, Homo sapien
aaagctattaatgagttctgcttga

SEQ ID NO: 4427697 - DNA, 25 bp, Homo sapien
cttgattaagatcagttcctagttc

SEQ ID NO: 4427698 - DNA, 25 bp, Homo sapien
tgagttctgcttgattaagatcagt

SEQ ID NO: 4427699 - DNA, 25 bp, Homo sapien
tattctcaaagctattaatgagttc

SEQ ID NO: 4427700 - DNA, 25 bp, Homo sapien
gataacagggaaccttttataggca

SEQ ID NO: 4427701 - DNA, 25 bp, Homo sapien
ccttttataggcaggtacgagtcag

SEQ ID NO: 4427702 - DNA, 25 bp, Homo sapien
ggcaagtgggagttgttacagtatt

SEQ ID NO: 4427703 - DNA, 25 bp, Homo sapien
ggcaggtacgagtcaggcagctcct

SEQ ID NO: 4427704 - DNA, 25 bp, Homo sapien
ttcagctcatcagctatatctaggg

SEQ ID NO: 4427705 - DNA, 25 bp, Homo sapien
cttcagctcatcagctatatctagg

SEQ ID NO: 4427706 - DNA, 25 bp, Homo sapien
tcttcagctcatcagctatatctag

SEQ ID NO: 4427707 - DNA, 25 bp, Homo sapien
ttcttcagctcatcagctatatcta

SEQ ID NO: 4427708 - DNA, 25 bp, Homo sapien
cagaggctttgtcatggaggtcatt

SEQ ID NO: 4427709 - DNA, 25 bp, Homo sapien
aaagatgccctgacacagaggcttt

SEQ ID NO: 4427710 - DNA, 25 bp, Homo sapien
agaggctttgtcatggaggtcattg

SEQ ID NO: 4427711 - DNA, 25 bp, Homo sapien
ctggacactgcaggaggcgatgacc

SEQ ID NO: 4427712 - DNA, 25 bp, Homo sapien
gaggcgatgaccaggtcttttcctg

SEQ ID NO: 4427713 - DNA, 25 bp, Homo sapien
tgcaggaggcgatgaccaggtcttt

SEQ ID NO: 4427714 - DNA, 25 bp, Homo sapien
caggaggcgatgaccaggtcttttc

SEQ ID NO: 4427715 - DNA, 25 bp, Homo sapien
ctgtctatggagtgggggcccttct

SEQ ID NO: 4427716 - DNA, 25 bp, Homo sapien
ctggacgatgacgctgtctatggag

SEQ ID NO: 4427717 - DNA, 25 bp, Homo sapien
tatggagtgggggcccttctcaaaa

SEQ ID NO: 4427718 - DNA, 25 bp, Homo sapien
gaataccaagaataaccctggatac

SEQ ID NO: 4427719 - DNA, 25 bp, Homo sapien
agcagctcatctcggccaaatggac

SEQ ID NO: 4427720 - DNA, 25 bp, Homo sapien
actggtttcccattagcggcctgca

SEQ ID NO: 4427721 - DNA, 25 bp, Homo sapien
tgattttgcaggtttcccgtaaaca

SEQ ID NO: 4427722 - DNA, 25 bp, Homo sapien
cctcagctatcaaaggatgattttg

SEQ ID NO: 4427723 - DNA, 25 bp, Homo sapien
agcagccagtggtctcccgggaaca

SEQ ID NO: 4427724 - DNA, 25 bp, Homo sapien
cagtggtctcccgggaacactgcag

SEQ ID NO: 4427725 - DNA, 25 bp, Homo sapien
agccagtggtctcccgggaacactg

SEQ ID NO: 4427726 - DNA, 25 bp, Homo sapien
cagccagtggtctcccgggaacact

SEQ ID NO: 4427727 - DNA, 25 bp, Homo sapien
tgtaaagtgtggctgaagatccagt

SEQ ID NO: 4427728 - DNA, 25 bp, Homo sapien
ctgcactgtgatggcgagcagtttg

SEQ ID NO: 4427729 - DNA, 25 bp, Homo sapien
aaatcagtggtgtgttctctgcgac

SEQ ID NO: 4427730 - DNA, 25 bp, Homo sapien
tcagagctatcagcgtgggaaaatc

SEQ ID NO: 4427731 - DNA, 25 bp, Homo sapien
tcaggtgtctgttgcttgggatctg

SEQ ID NO: 4427732 - DNA, 25 bp, Homo sapien
ttgcttgggatctgttgtgaaggaa

SEQ ID NO: 4427733 - DNA, 25 bp, Homo sapien
tgaaggaaggatctggaagcagaag

SEQ ID NO: 4427734 - DNA, 25 bp, Homo sapien
gaccgtcaccttggaaatcaggtgt

SEQ ID NO: 4427735 - DNA, 25 bp, Homo sapien
cttatgtcccccgatttcacaaaca

SEQ ID NO: 4427736 - DNA, 25 bp, Homo sapien
tgtcccccgatttcacaaaaagctg

SEQ ID NO: 4427737 - DNA, 25 bp, Homo sapien
ccccgatttcacaaaaagctgagtc

SEQ ID NO: 4427738 - DNA, 25 bp, Homo sapien
ttcacaaacaatcaccctcgtgtcc

SEQ ID NO: 4427739 - DNA, 25 bp, Homo sapien
tcatccgttgaatttcctctactgt

SEQ ID NO: 4427740 - DNA, 25 bp, Homo sapien
aattcatccgttgaatttcctctac

SEQ ID NO: 4427741 - DNA, 25 bp, Homo sapien
ttgaattcatccgttgaatttcctc

SEQ ID NO: 4427742 - DNA, 25 bp, Homo sapien
ccttgaattcatccgttgaatttcc

SEQ ID NO: 4427743 - DNA, 25 bp, Homo sapien
ggtactccttgttgtctgcaggacc

SEQ ID NO: 4427744 - DNA, 25 bp, Homo sapien
tcgggtactccttgttgtctgcagg

SEQ ID NO: 4427745 - DNA, 25 bp, Homo sapien
ttgtggaacagcctttctcccttgt

SEQ ID NO: 4427746 - DNA, 25 bp, Homo sapien
ctctcgggtactccttgttgtctgc

SEQ ID NO: 4427747 - DNA, 25 bp, Homo sapien
acctggcataccagcttgcgcagct

SEQ ID NO: 4427748 - DNA, 25 bp, Homo sapien
cacctggcataccagcttgcgcagc

SEQ ID NO: 4427749 - DNA, 25 bp, Homo sapien
actgactgactgactctaggttgca

SEQ ID NO: 4427750 - DNA, 25 bp, Homo sapien
attttcctgccatgtttgtgactga

SEQ ID NO: 4427751 - DNA, 25 bp, Homo sapien
tctaggttgcatacccagcagccat

SEQ ID NO: 4427752 - DNA, 25 bp, Homo sapien
tattttcctgccatgtttgtgactg

SEQ ID NO: 4427753 - DNA, 25 bp, Homo sapien
tattacacgcccagttctagaccga

SEQ ID NO: 4427754 - DNA, 25 bp, Homo sapien
taacaaccgcagcatacagtgccat

SEQ ID NO: 4427755 - DNA, 25 bp, Homo sapien
gagctttatatcatggagccacgga

SEQ ID NO: 4427756 - DNA, 25 bp, Homo sapien
gaactaagacttgcagggacacgtc

SEQ ID NO: 4427757 - DNA, 25 bp, Homo sapien
caacaggggtgcaaaatatacacag

SEQ ID NO: 4427758 - DNA, 25 bp, Homo sapien
tatgtaagcaacaggggtgcaaaat

SEQ ID NO: 4427759 - DNA, 25 bp, Homo sapien
gtacattttatgtaagcaacagggg

SEQ ID NO: 4427760 - DNA, 25 bp, Homo sapien
cattttatgtaagcaacaggggtgc

SEQ ID NO: 4427761 - DNA, 25 bp, Homo sapien
gctatggaaatagtcctgatttctt

SEQ ID NO: 4427762 - DNA, 25 bp, Homo sapien
tctgtttgctgctgtgatagaaata

SEQ ID NO: 4427763 - DNA, 25 bp, Homo sapien
tgatagaaatagtctgcatcctggt

SEQ ID NO: 4427764 - DNA, 25 bp, Homo sapien
ggtagctatagtaacaacttcggaa

SEQ ID NO: 4427765 - DNA, 25 bp, Homo sapien
gtcccttgttctgatctccctcgtt

SEQ ID NO: 4427766 - DNA, 25 bp, Homo sapien
ttgttctgatctccctcgttcgcca

SEQ ID NO: 4427767 - DNA, 25 bp, Homo sapien
gggtcccttgttctgatctccctcg

SEQ ID NO: 4427768 - DNA, 25 bp, Homo sapien
cactgggtcccttgttctgatctcc

SEQ ID NO: 4427769 - DNA, 25 bp, Homo sapien
catccatttatattgtgcacccata

SEQ ID NO: 4427770 - DNA, 25 bp, Homo sapien
tgatataaaggtagccacccctgct

SEQ ID NO: 4427771 - DNA, 25 bp, Homo sapien
tatggccatctttgtgtcttgcagc

SEQ ID NO: 4427772 - DNA, 25 bp, Homo sapien
tataaagtgagaccattacatccat

SEQ ID NO: 4427773 - DNA, 25 bp, Homo sapien
aagaccctcatttcaatgcttctgg

SEQ ID NO: 4427774 - DNA, 25 bp, Homo sapien
tactggtgcaacaaccactggagtg

SEQ ID NO: 4427775 - DNA, 25 bp, Homo sapien
tggataaatacccaaagctggaatt

SEQ ID NO: 4427776 - DNA, 25 bp, Homo sapien
tatcttggttattcctactggtgca

SEQ ID NO: 4427777 - DNA, 25 bp, Homo sapien
agtttgtcagaggagcccgtccaga

SEQ ID NO: 4427778 - DNA, 25 bp, Homo sapien
atccagagcagtttgtcagaggagc

SEQ ID NO: 4427779 - DNA, 25 bp, Homo sapien
ccctgggtgagaagcatccagagca

SEQ ID NO: 4427780 - DNA, 25 bp, Homo sapien
agagcagtttgtcagaggagcccgt

SEQ ID NO: 4427781 - DNA, 25 bp, Homo sapien
gtaagagtgaaaacatacctcaggg

SEQ ID NO: 4427782 - DNA, 25 bp, Homo sapien
tgaaaacatacctcaggggccccac

SEQ ID NO: 4427783 - DNA, 25 bp, Homo sapien
catggcaaaaatggttaatggaaaa

SEQ ID NO: 4427784 - DNA, 25 bp, Homo sapien
aatggaggcaagagtaagagtgaaa

SEQ ID NO: 4427785 - DNA, 25 bp, Homo sapien
cattgtgctgttgaatcgaaggcga

SEQ ID NO: 4427786 - DNA, 25 bp, Homo sapien
gagcctctgcggttttagaattgcg

SEQ ID NO: 4427787 - DNA, 25 bp, Homo sapien
tccaaatccggaggagctgattggg

SEQ ID NO: 4427788 - DNA, 25 bp, Homo sapien
gaaggcgactatctgtccaggtctg

SEQ ID NO: 4427789 - DNA, 25 bp, Homo sapien
taggacaccaacatagatgggaggg

SEQ ID NO: 4427790 - DNA, 25 bp, Homo sapien
ggacgtgctgagagtcaagagggca

SEQ ID NO: 4427791 - DNA, 25 bp, Homo sapien
gcttgccctgacaaaatgactccca

SEQ ID NO: 4427792 - DNA, 25 bp, Homo sapien
gcagacaatgtgcaccccagtgctc

SEQ ID NO: 4427793 - DNA, 25 bp, Homo sapien
tgagtttcgaaagagcatcttagta

SEQ ID NO: 4427794 - DNA, 25 bp, Homo sapien
taaaatgcgggtatttaacttctga

SEQ ID NO: 4427795 - DNA, 25 bp, Homo sapien
tcatctgctctggacttgagtttcg

SEQ ID NO: 4427796 - DNA, 25 bp, Homo sapien
taacttctgattcaacgccgatctt

SEQ ID NO: 4427797 - DNA, 25 bp, Homo sapien
cagctgaatcagtgacatcctcaga

SEQ ID NO: 4427798 - DNA, 25 bp, Homo sapien
atcagtgacatcctcagagtcaggg

SEQ ID NO: 4427799 - DNA, 25 bp, Homo sapien
gaatcagtgacatcctcagagtcag

SEQ ID NO: 4427800 - DNA, 25 bp, Homo sapien
cggtgggggccattggaatgtgcct

SEQ ID NO: 4427801 - DNA, 25 bp, Homo sapien
tcccatggatgtcttagagtactca

SEQ ID NO: 4427802 - DNA, 25 bp, Homo sapien
tattggtggatacgcagtccactcg

SEQ ID NO: 4427803 - DNA, 25 bp, Homo sapien
agtccactcgcatggatgcctcaga

SEQ ID NO: 4427804 - DNA, 25 bp, Homo sapien
ccatcgataccttagaacacccagt

SEQ ID NO: 4427805 - DNA, 25 bp, Homo sapien
gctctgatatccttagttccttgca

SEQ ID NO: 4427806 - DNA, 25 bp, Homo sapien
gaggaggcacttggtgatagactct

SEQ ID NO: 4427807 - DNA, 25 bp, Homo sapien
tcttggaccagagctctgatatcct

SEQ ID NO: 4427808 - DNA, 25 bp, Homo sapien
tgatagactcttcatcttggaccag

SEQ ID NO: 4427809 - DNA, 25 bp, Homo sapien
ttttcacacttagtgggaactgtgc

SEQ ID NO: 4427810 - DNA, 25 bp, Homo sapien
taatcacattccctggtaacagttt

SEQ ID NO: 4427811 - DNA, 25 bp, Homo sapien
ctttaaaattgcacagtccaggagc

SEQ ID NO: 4427812 - DNA, 25 bp, Homo sapien
tttcaaattgaagccctacccacca

SEQ ID NO: 4427813 - DNA, 25 bp, Homo sapien
tgtactgatttattcagcagcctct

SEQ ID NO: 4427814 - DNA, 25 bp, Homo sapien
gacacacatacaatactagccctaa

SEQ ID NO: 4427815 - DNA, 25 bp, Homo sapien
gagcaattgtttgccatatgaacca

SEQ ID NO: 4427816 - DNA, 25 bp, Homo sapien
gcctctttccatagcgatagagcaa

SEQ ID NO: 4427817 - DNA, 25 bp, Homo sapien
gtcctcatgagaatgtgggcgctct

SEQ ID NO: 4427818 - DNA, 25 bp, Homo sapien
tgtcctcatgagaatgtgggcgctc

SEQ ID NO: 4427819 - DNA, 25 bp, Homo sapien
tcctcatgagaatgtgggcgctctc

SEQ ID NO: 4427820 - DNA, 25 bp, Homo sapien
ctcatgagaatgtgggcgctctctc

SEQ ID NO: 4427821 - DNA, 25 bp, Homo sapien
gaaggatcacaatggctcaggaata

SEQ ID NO: 4427822 - DNA, 25 bp, Homo sapien
ggtttgttcccatgtacaacgcgga

SEQ ID NO: 4427823 - DNA, 25 bp, Homo sapien
ctatgagttaagacggtgcattgcc

SEQ ID NO: 4427824 - DNA, 25 bp, Homo sapien
ctcaggaatatcctccgcagctggt

SEQ ID NO: 4427825 - DNA, 25 bp, Homo sapien
tataaaggggtcagattgtagaaaa

SEQ ID NO: 4427826 - DNA, 25 bp, Homo sapien
tcagattgtagaaaaagtcgaaaaa

SEQ ID NO: 4427827 - DNA, 25 bp, Homo sapien
tctctgtataaaggggtcagattgt

SEQ ID NO: 4427828 - DNA, 25 bp, Homo sapien
gggtcagattgtagaaaaagtcgaa

SEQ ID NO: 4427829 - DNA, 25 bp, Homo sapien
tacccatcataatacagtagctgct

SEQ ID NO: 4427830 - DNA, 25 bp, Homo sapien
tggaatacccatcataatacagtag

SEQ ID NO: 4427831 - DNA, 25 bp, Homo sapien
tgcatgaatggaatacccatcataa

SEQ ID NO: 4427832 - DNA, 25 bp, Homo sapien
gaatggaatacccatcataatacag

SEQ ID NO: 4427833 - DNA, 25 bp, Homo sapien
gcgaatgatgcctatgtttattgaa

SEQ ID NO: 4427834 - DNA, 25 bp, Homo sapien
gccacagtaaatgcgaatgatgcct

SEQ ID NO: 4427835 - DNA, 25 bp, Homo sapien
tttattgaagtcaaacgaatgcacg

SEQ ID NO: 4427836 - DNA, 25 bp, Homo sapien
aacgaatgcacgtagagctaactgc

SEQ ID NO: 4427837 - DNA, 25 bp, Homo sapien
aacaatcggcttttgaggttcacaa

SEQ ID NO: 4427838 - DNA, 25 bp, Homo sapien
tctaaggtatcacacatcacatcga

SEQ ID NO: 4427839 - DNA, 25 bp, Homo sapien
aggttcacaaacacatgctgacggg

SEQ ID NO: 4427840 - DNA, 25 bp, Homo sapien
gaaaccttgttgagacagagggcag

SEQ ID NO: 4427841 - DNA, 25 bp, Homo sapien
tggggtcccttcctcttccctctgc

SEQ ID NO: 4427842 - DNA, 25 bp, Homo sapien
ctttcctcctctctctgtgcttcca

SEQ ID NO: 4427843 - DNA, 25 bp, Homo sapien
tttcctcctctctctgtgcttccaa

SEQ ID NO: 4427844 - DNA, 25 bp, Homo sapien
cttccctctgccactttcctcctct

SEQ ID NO: 4427845 - DNA, 25 bp, Homo sapien
cacatttataaatcattaaagtgaa

SEQ ID NO: 4427846 - DNA, 25 bp, Homo sapien
tacacatttataaatcattaaagtg

SEQ ID NO: 4427847 - DNA, 25 bp, Homo sapien
catttataaatcattaaagtgaaaa

SEQ ID NO: 4427848 - DNA, 25 bp, Homo sapien
ggtacacatttataaatcattaaag

SEQ ID NO: 4427849 - DNA, 25 bp, Homo sapien
taaaaacacagagcaaacattagca

SEQ ID NO: 4427850 - DNA, 25 bp, Homo sapien
ctaaaaacacagagcaaacattagc

SEQ ID NO: 4427851 - DNA, 25 bp, Homo sapien
gacgttgtcacgatttctgtggtgt

SEQ ID NO: 4427852 - DNA, 25 bp, Homo sapien
gccatgatttctggtcagctgcctc

SEQ ID NO: 4427853 - DNA, 25 bp, Homo sapien
ctgcagacgttgtcacgatttctgt

SEQ ID NO: 4427854 - DNA, 25 bp, Homo sapien
gtcaaactgataaagccgccatgat

SEQ ID NO: 4427855 - DNA, 25 bp, Homo sapien
cctctctggcttttgagagctgtgc

SEQ ID NO: 4427856 - DNA, 25 bp, Homo sapien
gcttttgagagctgtgcctctttca

SEQ ID NO: 4427857 - DNA, 25 bp, Homo sapien
ctctggcttttgagagctgtgcctc

SEQ ID NO: 4427858 - DNA, 25 bp, Homo sapien
gagagctgtgcctctttcagtaaat

SEQ ID NO: 4427859 - DNA, 25 bp, Homo sapien
tatgtatcatggttgcccaaaaggc

SEQ ID NO: 4427860 - DNA, 25 bp, Homo sapien
acacagcctggattcaaaaatatga

SEQ ID NO: 4427861 - DNA, 25 bp, Homo sapien
tcaaaggacatatcacaccagcttc

SEQ ID NO: 4427862 - DNA, 25 bp, Homo sapien
tatagacattatgcaaacacagcct

SEQ ID NO: 4427863 - DNA, 25 bp, Homo sapien
agattcacccagagggggaacgctg

SEQ ID NO: 4427864 - DNA, 25 bp, Homo sapien
cagattcacccagagggggaacgct

SEQ ID NO: 4427865 - DNA, 25 bp, Homo sapien
ttccaccaggtccgaggcagccttt

SEQ ID NO: 4427866 - DNA, 25 bp, Homo sapien
gcagcctttgcctggcaagctcctc

SEQ ID NO: 4427867 - DNA, 25 bp, Homo sapien
caccaggtccgaggcagcctttgcc

SEQ ID NO: 4427868 - DNA, 25 bp, Homo sapien
tccaccaggtccgaggcagcctttg

SEQ ID NO: 4427869 - DNA, 25 bp, Homo sapien
aaggttgacaggtgcggctgtttct

SEQ ID NO: 4427870 - DNA, 25 bp, Homo sapien
ttcgaaggttgacaggtgcggctgt

SEQ ID NO: 4427871 - DNA, 25 bp, Homo sapien
cgaaggttgacaggtgcggctgttt

SEQ ID NO: 4427872 - DNA, 25 bp, Homo sapien
ctttcgaaggttgacaggtgcggct

SEQ ID NO: 4427873 - DNA, 25 bp, Homo sapien
tatatagtcatgacaacataatcac

SEQ ID NO: 4427874 - DNA, 25 bp, Homo sapien
aaaatatatagtcatgacaacataa

SEQ ID NO: 4427875 - DNA, 25 bp, Homo sapien
cttctactcaattcaaaatatatag

SEQ ID NO: 4427876 - DNA, 25 bp, Homo sapien
aatatatagtcatgacaacataatc

SEQ ID NO: 4427877 - DNA, 25 bp, Homo sapien
taaaaccacagtcagtatacaggga

SEQ ID NO: 4427878 - DNA, 25 bp, Homo sapien
ctaatgctgttcttgctggcgtagc

SEQ ID NO: 4427879 - DNA, 25 bp, Homo sapien
tttttgatccaaaatgacacccagg

SEQ ID NO: 4427880 - DNA, 25 bp, Homo sapien
gtatgtctgaatggtgaagtatccc

SEQ ID NO: 4427881 - DNA, 25 bp, Homo sapien
tgagggtggcatactccatcagcgc

SEQ ID NO: 4427882 - DNA, 25 bp, Homo sapien
caaggacttcctggcgatggtgctc

SEQ ID NO: 4427883 - DNA, 25 bp, Homo sapien
caaaaaggtccatggcggtcacgta

SEQ ID NO: 4427884 - DNA, 25 bp, Homo sapien
cgtaggacacgcgtggcaaggactt

SEQ ID NO: 4427885 - DNA, 25 bp, Homo sapien
gggcttgtaggcttattcgctcagg

SEQ ID NO: 4427886 - DNA, 25 bp, Homo sapien
gaaggggcttgtaggcttattcgct

SEQ ID NO: 4427887 - DNA, 25 bp, Homo sapien
ggcttattcgctcaggaatccatct

SEQ ID NO: 4427888 - DNA, 25 bp, Homo sapien
tgtaggcttattcgctcaggaatcc

SEQ ID NO: 4427889 - DNA, 25 bp, Homo sapien
gtggcctcatgtccaggagggaata

SEQ ID NO: 4427890 - DNA, 25 bp, Homo sapien
tgatcatcgcagttggtggtggcct

SEQ ID NO: 4427891 - DNA, 25 bp, Homo sapien
gcctcatgtccaggagggaatagtt

SEQ ID NO: 4427892 - DNA, 25 bp, Homo sapien
taaacggaattgtttaaagtgatca

SEQ ID NO: 4427893 - DNA, 25 bp, Homo sapien
aagacccgggagtacgagtccagct

SEQ ID NO: 4427894 - DNA, 25 bp, Homo sapien
gagatacaggtatccaacccagtag

SEQ ID NO: 4427895 - DNA, 25 bp, Homo sapien
ccaagatgtctatgtgaatacgccc

SEQ ID NO: 4427896 - DNA, 25 bp, Homo sapien
gacactcatagacacaggtatcttc

SEQ ID NO: 4427897 - DNA, 25 bp, Homo sapien
cgacagaaggtcaagtgtgtaccaa

SEQ ID NO: 4427898 - DNA, 25 bp, Homo sapien
tcccgattggtcactactggtctgg

SEQ ID NO: 4427899 - DNA, 25 bp, Homo sapien
tctttgcaagggtaatcagcggctg

SEQ ID NO: 4427900 - DNA, 25 bp, Homo sapien
tgctgggtacttcctgtgttgctga

SEQ ID NO: 4427901 - DNA, 25 bp, Homo sapien
ggctcattgcttcctagtcataggg

SEQ ID NO: 4427902 - DNA, 25 bp, Homo sapien
tgcagaacaacgaagcaacatgcct

SEQ ID NO: 4427903 - DNA, 25 bp, Homo sapien
gccttgagagcactgaaccgatacg

SEQ ID NO: 4427904 - DNA, 25 bp, Homo sapien
catagggagctggagtcaatgcaga

SEQ ID NO: 4427905 - DNA, 25 bp, Homo sapien
cagcactgatttatttaagttcgcc

SEQ ID NO: 4427906 - DNA, 25 bp, Homo sapien
tagctcatgctcttgaataacctaa

SEQ ID NO: 4427907 - DNA, 25 bp, Homo sapien
caaagcattattcagctaggtggca

SEQ ID NO: 4427908 - DNA, 25 bp, Homo sapien
cccacttggttaactcaaaacattg

SEQ ID NO: 4427909 - DNA, 25 bp, Homo sapien
tggcatcagtcctgattatcaccat

SEQ ID NO: 4427910 - DNA, 25 bp, Homo sapien
tcagtaccggagctgcacgtaaagg

SEQ ID NO: 4427911 - DNA, 25 bp, Homo sapien
caggtaaacttggttcactagcaca

SEQ ID NO: 4427912 - DNA, 25 bp, Homo sapien
ctcctgatcaggtagtgaagctgga

SEQ ID NO: 4427913 - DNA, 25 bp, Homo sapien
tacgctatcgctagaaaactgcgct

SEQ ID NO: 4427914 - DNA, 25 bp, Homo sapien
cacgaatgatcaaggagtcgcccag

SEQ ID NO: 4427915 - DNA, 25 bp, Homo sapien
tccacaccggtgctctaagatgatt

SEQ ID NO: 4427916 - DNA, 25 bp, Homo sapien
gaatacgacttcctagacaagggtg

SEQ ID NO: 4427917 - DNA, 25 bp, Homo sapien
gccttcctgtgacctgcgaatacga

SEQ ID NO: 4427918 - DNA, 25 bp, Homo sapien
aatccctcgcgggacgacagggaca

SEQ ID NO: 4427919 - DNA, 25 bp, Homo sapien
gggagccacgtcctctgcgcagggg

SEQ ID NO: 4427920 - DNA, 25 bp, Homo sapien
tcatttcactaggacaccacgagcc

SEQ ID NO: 4427921 - DNA, 25 bp, Homo sapien
gaggccacttggtgagggcgggtcc

SEQ ID NO: 4427922 - DNA, 25 bp, Homo sapien
aaatacaaatacagagggcggccca

SEQ ID NO: 4427923 - DNA, 25 bp, Homo sapien
tcgccaaggcacgtcgggcgccagt

SEQ ID NO: 4427924 - DNA, 25 bp, Homo sapien
cggcgccgcccgtgtcgccaaggca

SEQ ID NO: 4427925 - DNA, 25 bp, Homo sapien
ttagaagtacaaacgtaggaatcca

SEQ ID NO: 4427926 - DNA, 25 bp, Homo sapien
agatcccaggttcacggtggcacct

SEQ ID NO: 4427927 - DNA, 25 bp, Homo sapien
tcagatttgatgattcctgctggaa

SEQ ID NO: 4427928 - DNA, 25 bp, Homo sapien
cacagatcccaggttcacggtggca

SEQ ID NO: 4427929 - DNA, 25 bp, Homo sapien
ctggccctgcgactctcagatttga

SEQ ID NO: 4427930 - DNA, 25 bp, Homo sapien
tttaattggcaatgtgatgtggtct

SEQ ID NO: 4427931 - DNA, 25 bp, Homo sapien
tctggtttaattggcaatgtgatgt

SEQ ID NO: 4427932 - DNA, 25 bp, Homo sapien
aacacctgaaattctggtttaattg

SEQ ID NO: 4427933 - DNA, 25 bp, Homo sapien
gtgatgtggtctgccatggcaatga

SEQ ID NO: 4427934 - DNA, 25 bp, Homo sapien
tcagattcacacctcccttgggctt

SEQ ID NO: 4427935 - DNA, 25 bp, Homo sapien
ttcctcccagtccagttaggcccat

SEQ ID NO: 4427936 - DNA, 25 bp, Homo sapien
ccttgggcttcctcttcacttcctc

SEQ ID NO: 4427937 - DNA, 25 bp, Homo sapien
tcactcagattcacacctcccttgg

SEQ ID NO: 4427938 - DNA, 25 bp, Homo sapien
caatgacctgacatgactgggctta

SEQ ID NO: 4427939 - DNA, 25 bp, Homo sapien
tctagtagataaagcccttggcctc

SEQ ID NO: 4427940 - DNA, 25 bp, Homo sapien
tctcctgttacctgatgttgcctgc

SEQ ID NO: 4427941 - DNA, 25 bp, Homo sapien
taatgagacgggtatggagaacact

SEQ ID NO: 4427942 - DNA, 25 bp, Homo sapien
cgctctccaggattacaatacgtgt

SEQ ID NO: 4427943 - DNA, 25 bp, Homo sapien
tgtgagtttctaggacgctctccag

SEQ ID NO: 4427944 - DNA, 25 bp, Homo sapien
tatggttaactaatcaagggtgcac

SEQ ID NO: 4427945 - DNA, 25 bp, Homo sapien
ggtgcacctaccctattcatgaaaa

SEQ ID NO: 4427946 - DNA, 25 bp, Homo sapien
cttcctggagaaagaagtgggccat

SEQ ID NO: 4427947 - DNA, 25 bp, Homo sapien
tctaattgccactccaccatggcct

SEQ ID NO: 4427948 - DNA, 25 bp, Homo sapien
tttccaattaacactgtaccgttgc

SEQ ID NO: 4427949 - DNA, 25 bp, Homo sapien
aatgacattcaaggcggcggcagca

SEQ ID NO: 4427950 - DNA, 25 bp, Homo sapien
tgccaatggggaagaaatactgcat

SEQ ID NO: 4427951 - DNA, 25 bp, Homo sapien
gggtcttatatctctctgtgtcagt

SEQ ID NO: 4427952 - DNA, 25 bp, Homo sapien
ggcaggacttcagggtcttatatct

SEQ ID NO: 4427953 - DNA, 25 bp, Homo sapien
ggacagtggcatcttgctgatctcc

SEQ ID NO: 4427954 - DNA, 25 bp, Homo sapien
cttggacagtggcatcttgctgatc

SEQ ID NO: 4427955 - DNA, 25 bp, Homo sapien
catggtctcgacttcatagcctggg

SEQ ID NO: 4427956 - DNA, 25 bp, Homo sapien
cacggagtgtagaatggtgatcttc

SEQ ID NO: 4427957 - DNA, 25 bp, Homo sapien
tagtggaggcattgcttgcatacca

SEQ ID NO: 4427958 - DNA, 25 bp, Homo sapien
gacattcccattctagagcctgaaa

SEQ ID NO: 4427959 - DNA, 25 bp, Homo sapien
tgataaaacagttcacaggtttaat

SEQ ID NO: 4427960 - DNA, 25 bp, Homo sapien
tagctgaagggttgtgataaaacag

SEQ ID NO: 4427961 - DNA, 25 bp, Homo sapien
ctttcatagctgaagggttgtgata

SEQ ID NO: 4427962 - DNA, 25 bp, Homo sapien
gaagggttgtgataaaacagttcac

SEQ ID NO: 4427963 - DNA, 25 bp, Homo sapien
tatattttatgccttgacaaaggtt

SEQ ID NO: 4427964 - DNA, 25 bp, Homo sapien
ggttaatgctccacgtacacatgaa

SEQ ID NO: 4427965 - DNA, 25 bp, Homo sapien
tggttaatgctccacgtacacatga

SEQ ID NO: 4427966 - DNA, 25 bp, Homo sapien
attttatgccttgacaaaggttggt

SEQ ID NO: 4427967 - DNA, 25 bp, Homo sapien
ggagtcgtcctggatgaagccgtcc

SEQ ID NO: 4427968 - DNA, 25 bp, Homo sapien
gggagtcgtcctggatgaagccgtc

SEQ ID NO: 4427969 - DNA, 25 bp, Homo sapien
gagtcgtcctggatgaagccgtcca

SEQ ID NO: 4427970 - DNA, 25 bp, Homo sapien
gagggagtcgtcctggatgaagccg

SEQ ID NO: 4427971 - DNA, 25 bp, Homo sapien
ggcggatgtggccggcagcttgctg

SEQ ID NO: 4427972 - DNA, 25 bp, Homo sapien
gcggatgtggccggcagcttgctga

SEQ ID NO: 4427973 - DNA, 25 bp, Homo sapien
ggcagcttgctgatgcttatgtttt

SEQ ID NO: 4427974 - DNA, 25 bp, Homo sapien
caggcggatgtggccggcagcttgc

SEQ ID NO: 4427975 - DNA, 25 bp, Homo sapien
taggatcatcctaaattggaggctg

SEQ ID NO: 4427976 - DNA, 25 bp, Homo sapien
tggtcacactgatcagggtgctcca

SEQ ID NO: 4427977 - DNA, 25 bp, Homo sapien
agccagcccaatcacagtcttgata

SEQ ID NO: 4427978 - DNA, 25 bp, Homo sapien
tttctatggccaacacgacccaagc

SEQ ID NO: 4427979 - DNA, 25 bp, Homo sapien
ccttgattacgctggggctgcccac

SEQ ID NO: 4427980 - DNA, 25 bp, Homo sapien
ttccttgattacgctggggctgccc

SEQ ID NO: 4427981 - DNA, 25 bp, Homo sapien
tccttgattacgctggggctgccca

SEQ ID NO: 4427982 - DNA, 25 bp, Homo sapien
tttccttgattacgctggggctgcc

SEQ ID NO: 4427983 - DNA, 25 bp, Homo sapien
tcagaggacaatggggacctgctcg

SEQ ID NO: 4427984 - DNA, 25 bp, Homo sapien
tgctcgtgtaaatcccattgttggg

SEQ ID NO: 4427985 - DNA, 25 bp, Homo sapien
gttcctcagtgtcgagagcagctcc

SEQ ID NO: 4427986 - DNA, 25 bp, Homo sapien
gggttcctcagtgtcgagagcagct

SEQ ID NO: 4427987 - DNA, 25 bp, Homo sapien
ggaaaacactggcatgctctgggca

SEQ ID NO: 4427988 - DNA, 25 bp, Homo sapien
cctgaggagccacgtaagtctggaa

SEQ ID NO: 4427989 - DNA, 25 bp, Homo sapien
tcctcacagtccgtgtatgctggca

SEQ ID NO: 4427990 - DNA, 25 bp, Homo sapien
gggtcacttgtctgtgtcctgagga

SEQ ID NO: 4427991 - DNA, 25 bp, Homo sapien
gctgggatatcctcctattcaaggt

SEQ ID NO: 4427992 - DNA, 25 bp, Homo sapien
gctgttggtcaagcgtgctgatccc

SEQ ID NO: 4427993 - DNA, 25 bp, Homo sapien
caggtctgtttgaagctgtcacttt

SEQ ID NO: 4427994 - DNA, 25 bp, Homo sapien
tggtcaagcgtgctgatccccagtc

SEQ ID NO: 4427995 - DNA, 25 bp, Homo sapien
agctagcagggcgatgtgagaaagc

SEQ ID NO: 4427996 - DNA, 25 bp, Homo sapien
gcagggcgatgtgagaaagcactat

SEQ ID NO: 4427997 - DNA, 25 bp, Homo sapien
ctagcagggcgatgtgagaaagcac

SEQ ID NO: 4427998 - DNA, 25 bp, Homo sapien
cgagagctagcagggcgatgtgaga

SEQ ID NO: 4427999 - DNA, 25 bp, Homo sapien
tgtggggactctccgcagtcttgag

SEQ ID NO: 4428000 - DNA, 25 bp, Homo sapien
gctaagtgtgctaggtagggtcttt

SEQ ID NO: 4428001 - DNA, 25 bp, Homo sapien
tgcagggtgtcatacgacacagggc

SEQ ID NO: 4428002 - DNA, 25 bp, Homo sapien
aggccgggagttccatggttgaggg

SEQ ID NO: 4428003 - DNA, 25 bp, Homo sapien
tgaagaactttgcagtctttctcct

SEQ ID NO: 4428004 - DNA, 25 bp, Homo sapien
tgcacccagcaataagctggcagag

SEQ ID NO: 4428005 - DNA, 25 bp, Homo sapien
gagtctgcatttccggaagtttaag

SEQ ID NO: 4428006 - DNA, 25 bp, Homo sapien
gggctgcccagaaagtctccttgca

SEQ ID NO: 4428007 - DNA, 25 bp, Homo sapien
gagtgccccagattcccacgctggg

SEQ ID NO: 4428008 - DNA, 25 bp, Homo sapien
caatgaaggtagtggagcctggtcc

SEQ ID NO: 4428009 - DNA, 25 bp, Homo sapien
gtaacaatgaaggtagtggagcctg

SEQ ID NO: 4428010 - DNA, 25 bp, Homo sapien
ctaagaagtggttgtgggtgccacc

SEQ ID NO: 4428011 - DNA, 25 bp, Homo sapien
taaaagtgtcacgtccagagttcgc

SEQ ID NO: 4428012 - DNA, 25 bp, Homo sapien
tctctctgacgttaggaatgaagcc

SEQ ID NO: 4428013 - DNA, 25 bp, Homo sapien
gaataagaaagtctagccgtgggcc

SEQ ID NO: 4428014 - DNA, 25 bp, Homo sapien
ttacttcggaagtgaagccgcagac

SEQ ID NO: 4428015 - DNA, 25 bp, Homo sapien
ccctggtgtggccttcatggcaggc

SEQ ID NO: 4428016 - DNA, 25 bp, Homo sapien
ggtgcctgcaggacactgccctggt

SEQ ID NO: 4428017 - DNA, 25 bp, Homo sapien
tggtgtggccttcatggcaggccat

SEQ ID NO: 4428018 - DNA, 25 bp, Homo sapien
ctctcccctgtggtggtgcctgcag

SEQ ID NO: 4428019 - DNA, 25 bp, Homo sapien
ctccaggtctggtgtacaacaggtg

SEQ ID NO: 4428020 - DNA, 25 bp, Homo sapien
accccacgggccaccttagatggtg

SEQ ID NO: 4428021 - DNA, 25 bp, Homo sapien
tgggtcttccatcgtggctttgcga

SEQ ID NO: 4428022 - DNA, 25 bp, Homo sapien
cgggccaccttagatggtgccttct

SEQ ID NO: 4428023 - DNA, 25 bp, Homo sapien
gctttgcgagcactgtgcctgctgt

SEQ ID NO: 4428024 - DNA, 25 bp, Homo sapien
tgtaattatcctttgccgcaatttt

SEQ ID NO: 4428025 - DNA, 25 bp, Homo sapien
caaagttgtaattatcctttgccgc

SEQ ID NO: 4428026 - DNA, 25 bp, Homo sapien
aagttgtaattatcctttgccgcaa

SEQ ID NO: 4428027 - DNA, 25 bp, Homo sapien
tacaaagttgtaattatcctttgcc

SEQ ID NO: 4428028 - DNA, 25 bp, Homo sapien
ccatctgtgatatggacagaggtgt

SEQ ID NO: 4428029 - DNA, 25 bp, Homo sapien
tgggcagaccatctgtgatatggac

SEQ ID NO: 4428030 - DNA, 25 bp, Homo sapien
cagaccatctgtgatatggacagag

SEQ ID NO: 4428031 - DNA, 25 bp, Homo sapien
gacagaggtgtgctgttgcattgct

SEQ ID NO: 4428032 - DNA, 25 bp, Homo sapien
gcaggcatttagttgctgaattcac

SEQ ID NO: 4428033 - DNA, 25 bp, Homo sapien
cactaattcatggcctccctgggcc

SEQ ID NO: 4428034 - DNA, 25 bp, Homo sapien
caggcatttagttgctgaattcact

SEQ ID NO: 4428035 - DNA, 25 bp, Homo sapien
gactgtaggccaaagagggactctg

SEQ ID NO: 4428036 - DNA, 25 bp, Homo sapien
agggtggaaccagggtctgatccca

SEQ ID NO: 4428037 - DNA, 25 bp, Homo sapien
attgggagggaacatctgaatggat

SEQ ID NO: 4428038 - DNA, 25 bp, Homo sapien
agccaggaggtctgtagcatgagca

SEQ ID NO: 4428039 - DNA, 25 bp, Homo sapien
ccacagggacggtgaggacacactt

SEQ ID NO: 4428040 - DNA, 25 bp, Homo sapien
gacaacctcgaagaaaccagctgtg

SEQ ID NO: 4428041 - DNA, 25 bp, Homo sapien
tataaatgttggactgccacaggca

SEQ ID NO: 4428042 - DNA, 25 bp, Homo sapien
tagagtttgcccgacatcacgtgca

SEQ ID NO: 4428043 - DNA, 25 bp, Homo sapien
ggaacgaaggctttgtgcttccatg

SEQ ID NO: 4428044 - DNA, 25 bp, Homo sapien
tggagttgaccagacactgtcgtgg

SEQ ID NO: 4428045 - DNA, 25 bp, Homo sapien
tccatgaaggcttgcagtgatgtct

SEQ ID NO: 4428046 - DNA, 25 bp, Homo sapien
tacacaatctgtcacagaggaacga

SEQ ID NO: 4428047 - DNA, 25 bp, Homo sapien
acctctgcagtaggtgtgatgatgc

SEQ ID NO: 4428048 - DNA, 25 bp, Homo sapien
cacctctgcagtaggtgtgatgatg

SEQ ID NO: 4428049 - DNA, 25 bp, Homo sapien
cctctgcagtaggtgtgatgatgcc

SEQ ID NO: 4428050 - DNA, 25 bp, Homo sapien
gagataagggctctttcagggatct

SEQ ID NO: 4428051 - DNA, 25 bp, Homo sapien
agtgtgagtgttattctttgctggc

SEQ ID NO: 4428052 - DNA, 25 bp, Homo sapien
gcaaaatgcctttcagtgtgagtgt

SEQ ID NO: 4428053 - DNA, 25 bp, Homo sapien
agggatcttgtggcatgtgcaaaat

SEQ ID NO: 4428054 - DNA, 25 bp, Homo sapien
taccatctccataggtgtgggatct

SEQ ID NO: 4428055 - DNA, 25 bp, Homo sapien
agtaattcctgagtgatgggtctcc

SEQ ID NO: 4428056 - DNA, 25 bp, Homo sapien
catctgagaactgggcgtctgggca

SEQ ID NO: 4428057 - DNA, 25 bp, Homo sapien
tccaagggatgcagtacggagtacg

SEQ ID NO: 4428058 - DNA, 25 bp, Homo sapien
ttgatgggaaaccatggcctgcagt

SEQ ID NO: 4428059 - DNA, 25 bp, Homo sapien
caggcttttgatgggaaaccatggc

SEQ ID NO: 4428060 - DNA, 25 bp, Homo sapien
gagaacaggcttttgatgggaaacc

SEQ ID NO: 4428061 - DNA, 25 bp, Homo sapien
ctttagaactgagagagaacaggct

SEQ ID NO: 4428062 - DNA, 25 bp, Homo sapien
gccggtgtgggctggccgtgtcgag

SEQ ID NO: 4428063 - DNA, 25 bp, Homo sapien
atgtaactcaacacatcctgggctg

SEQ ID NO: 4428064 - DNA, 25 bp, Homo sapien
catgggctgtgcagtcgatgtaact

SEQ ID NO: 4428065 - DNA, 25 bp, Homo sapien
gggagatcacgctgaacagccaagt

SEQ ID NO: 4428066 - DNA, 25 bp, Homo sapien
tgccaagtgcaatcgtcagctggag

SEQ ID NO: 4428067 - DNA, 25 bp, Homo sapien
tactccttgagtagggcggagcgac

SEQ ID NO: 4428068 - DNA, 25 bp, Homo sapien
acaccaggttgtcgcacggaggata

SEQ ID NO: 4428069 - DNA, 25 bp, Homo sapien
tgagctctgaggaacgctgctggat

SEQ ID NO: 4428070 - DNA, 25 bp, Homo sapien
cttcacaggtgctttaagaatgact

SEQ ID NO: 4428071 - DNA, 25 bp, Homo sapien
accttcacaggtgctttaagaatga

SEQ ID NO: 4428072 - DNA, 25 bp, Homo sapien
ctttgcctataatgttccagtaatt

SEQ ID NO: 4428073 - DNA, 25 bp, Homo sapien
tcacaggtgctttaagaatgacttt

SEQ ID NO: 4428074 - DNA, 25 bp, Homo sapien
cttcacggaggatgtctcagtcttc

SEQ ID NO: 4428075 - DNA, 25 bp, Homo sapien
tcttccttcacggaggatgtctcag

SEQ ID NO: 4428076 - DNA, 25 bp, Homo sapien
gggtcagagcgaggaagcaggagaa

SEQ ID NO: 4428077 - DNA, 25 bp, Homo sapien
cccttcttccttcacggaggatgtc

SEQ ID NO: 4428078 - DNA, 25 bp, Homo sapien
acaaaaacaaatgccttcgatttca

SEQ ID NO: 4428079 - DNA, 25 bp, Homo sapien
tgtataatctgtagtactgccacct

SEQ ID NO: 4428080 - DNA, 25 bp, Homo sapien
cttgggtgaactttgataacttgta

SEQ ID NO: 4428081 - DNA, 25 bp, Homo sapien
acttcttaaatagtaacagggctat

SEQ ID NO: 4428082 - DNA, 25 bp, Homo sapien
cagtggtgtccgggctcggccattc

SEQ ID NO: 4428083 - DNA, 25 bp, Homo sapien
actgtaactccgcagtggtgtccgg

SEQ ID NO: 4428084 - DNA, 25 bp, Homo sapien
tggtgtccgggctcggccattcggc

SEQ ID NO: 4428085 - DNA, 25 bp, Homo sapien
ctgcactgtaactccgcagtggtgt

SEQ ID NO: 4428086 - DNA, 25 bp, Homo sapien
caggcactggcatcttctaaagttc

SEQ ID NO: 4428087 - DNA, 25 bp, Homo sapien
gctggtgccattagccaggcactgg

SEQ ID NO: 4428088 - DNA, 25 bp, Homo sapien
ggcactggcatcttctaaagttcat

SEQ ID NO: 4428089 - DNA, 25 bp, Homo sapien
gcggctggtgccattagccaggcac

SEQ ID NO: 4428090 - DNA, 25 bp, Homo sapien
gagggcggagcatcagagccctcgc

SEQ ID NO: 4428091 - DNA, 25 bp, Homo sapien
gcggagggcggagcatcagagccct

SEQ ID NO: 4428092 - DNA, 25 bp, Homo sapien
cgcggagggcggagcatcagagccc

SEQ ID NO: 4428093 - DNA, 25 bp, Homo sapien
ggcggagcatcagagccctcgcctt

SEQ ID NO: 4428094 - DNA, 25 bp, Homo sapien
gagtggtcagcaaagactcccccag

SEQ ID NO: 4428095 - DNA, 25 bp, Homo sapien
gtggtcagcaaagactcccccagct

SEQ ID NO: 4428096 - DNA, 25 bp, Homo sapien
accacagcaccggcatcaggagtgg

SEQ ID NO: 4428097 - DNA, 25 bp, Homo sapien
cacagcaccggcatcaggagtggtc

SEQ ID NO: 4428098 - DNA, 25 bp, Homo sapien
gattctgcgtgaacattctgagttt

SEQ ID NO: 4428099 - DNA, 25 bp, Homo sapien
tacacttcccgatgattctgcgtga

SEQ ID NO: 4428100 - DNA, 25 bp, Homo sapien
ggagaaagacgtagccttacacttc

SEQ ID NO: 4428101 - DNA, 25 bp, Homo sapien
gacgtagccttacacttcccgatga

SEQ ID NO: 4428102 - DNA, 25 bp, Homo sapien
ttccttggctactgcctccccaagt

SEQ ID NO: 4428103 - DNA, 25 bp, Homo sapien
cgttcacatccgaatcctggttttt

SEQ ID NO: 4428104 - DNA, 25 bp, Homo sapien
tggaagctgtccgttcacatccgaa

SEQ ID NO: 4428105 - DNA, 25 bp, Homo sapien
ttcaagtcagtggaagctgtccgtt

SEQ ID NO: 4428106 - DNA, 25 bp, Homo sapien
catgagggacgttggattggcaggc

SEQ ID NO: 4428107 - DNA, 25 bp, Homo sapien
gtatgttccagtccgcagttggtga

SEQ ID NO: 4428108 - DNA, 25 bp, Homo sapien
cagagtttggtcttgagtatgttcc

SEQ ID NO: 4428109 - DNA, 25 bp, Homo sapien
agtgtgcaagcatagaggtctggca

SEQ ID NO: 4428110 - DNA, 25 bp, Homo sapien
tttgcagggtggcctaccacacact

SEQ ID NO: 4428111 - DNA, 25 bp, Homo sapien
tgccagacttattatattggccatt

SEQ ID NO: 4428112 - DNA, 25 bp, Homo sapien
ggattttgccagacttattatattg

SEQ ID NO: 4428113 - DNA, 25 bp, Homo sapien
aacactagcacgttggattttgcca

SEQ ID NO: 4428114 - DNA, 25 bp, Homo sapien
gctctttgaacactagcacgttgga

SEQ ID NO: 4428115 - DNA, 25 bp, Homo sapien
cctcctgagcagttcaccttggcaa

SEQ ID NO: 4428116 - DNA, 25 bp, Homo sapien
aggccccaggcggtatgcagcccct

SEQ ID NO: 4428117 - DNA, 25 bp, Homo sapien
cctccagatccttcaacatcctttc

SEQ ID NO: 4428118 - DNA, 25 bp, Homo sapien
agtccagagtgctcaggaccaaaat

SEQ ID NO: 4428119 - DNA, 25 bp, Homo sapien
tgtgtaggagcctatgccatagcct

SEQ ID NO: 4428120 - DNA, 25 bp, Homo sapien
tctctgctttggtatcagccttgct

SEQ ID NO: 4428121 - DNA, 25 bp, Homo sapien
cctcctgtcttagatgtggctggga

SEQ ID NO: 4428122 - DNA, 25 bp, Homo sapien
tcattttgctgaccaataagacagg

SEQ ID NO: 4428123 - DNA, 25 bp, Homo sapien
tatttccaatacatctgtgcagaac

SEQ ID NO: 4428124 - DNA, 25 bp, Homo sapien
tttatttccaatacatctgtgcaga

SEQ ID NO: 4428125 - DNA, 25 bp, Homo sapien
ttatttccaatacatctgtgcagaa

SEQ ID NO: 4428126 - DNA, 25 bp, Homo sapien
tcctctggccatggtcatgtctgga

SEQ ID NO: 4428127 - DNA, 25 bp, Homo sapien
tgaggagatgcctgcggcatctgca

SEQ ID NO: 4428128 - DNA, 25 bp, Homo sapien
ctggacttgtgccacctgggactgc

SEQ ID NO: 4428129 - DNA, 25 bp, Homo sapien
tgacggcgccacagagctctgctgt

SEQ ID NO: 4428130 - DNA, 25 bp, Homo sapien
gcgctttctgtccatgaggacttga

SEQ ID NO: 4428131 - DNA, 25 bp, Homo sapien
tctgtgaggacgtaaaagcaaccat

SEQ ID NO: 4428132 - DNA, 25 bp, Homo sapien
gaccacgctttctgtgaggacttga

SEQ ID NO: 4428133 - DNA, 25 bp, Homo sapien
ggacttgaggctgacgatcacgctt

SEQ ID NO: 4428134 - DNA, 25 bp, Homo sapien
tgtacacctttaccaggggatccgc

SEQ ID NO: 4428135 - DNA, 25 bp, Homo sapien
acacagccaggagccgactgcagca

SEQ ID NO: 4428136 - DNA, 25 bp, Homo sapien
ccacacagccaggagccgactgcag

SEQ ID NO: 4428137 - DNA, 25 bp, Homo sapien
ccaggagccgactgcagcatccctc

SEQ ID NO: 4428138 - DNA, 25 bp, Homo sapien
tctggctggcgtcattggccaggtc

SEQ ID NO: 4428139 - DNA, 25 bp, Homo sapien
ctctggctggcgtcattggccaggt

SEQ ID NO: 4428140 - DNA, 25 bp, Homo sapien
tccagccgtttgtgtttgtagcctc

SEQ ID NO: 4428141 - DNA, 25 bp, Homo sapien
aattccagccgtttgtgtttgtagc

SEQ ID NO: 4428142 - DNA, 25 bp, Homo sapien
cagccgtttgtgtttgtagcctcat

SEQ ID NO: 4428143 - DNA, 25 bp, Homo sapien
attccagccgtttgtgtttgtagcc

SEQ ID NO: 4428144 - DNA, 25 bp, Homo sapien
acaagcggattgtcaagagtgtctg

SEQ ID NO: 4428145 - DNA, 25 bp, Homo sapien
aagcggattgtcaagagtgtctgca

SEQ ID NO: 4428146 - DNA, 25 bp, Homo sapien
ctggacaagcggattgtcaagagtg

SEQ ID NO: 4428147 - DNA, 25 bp, Homo sapien
gcggattgtcaagagtgtctgcagc

SEQ ID NO: 4428148 - DNA, 25 bp, Homo sapien
tcagcgctttctcctcgatgcttct

SEQ ID NO: 4428149 - DNA, 25 bp, Homo sapien
ctcagcgctttctcctcgatgcttc

SEQ ID NO: 4428150 - DNA, 25 bp, Homo sapien
tactgtgcacctacatccaccaagt

SEQ ID NO: 4428151 - DNA, 25 bp, Homo sapien
acagtactgtgcacctacatccacc

SEQ ID NO: 4428152 - DNA, 25 bp, Homo sapien
ggctgctgcataggtggttacgact

SEQ ID NO: 4428153 - DNA, 25 bp, Homo sapien
cataggtggttacgacttgaattca

SEQ ID NO: 4428154 - DNA, 25 bp, Homo sapien
tcggtcactccgtgtttggcttctg

SEQ ID NO: 4428155 - DNA, 25 bp, Homo sapien
ctgcggctgcttcggtcactccgtg

SEQ ID NO: 4428156 - DNA, 25 bp, Homo sapien
ttccaagcataatactcagtttcac

SEQ ID NO: 4428157 - DNA, 25 bp, Homo sapien
tgccgtcttctaaatttcgcttgat

SEQ ID NO: 4428158 - DNA, 25 bp, Homo sapien
gcataatactcagtttcaccctctt

SEQ ID NO: 4428159 - DNA, 25 bp, Homo sapien
ttgccgtcttctaaatttcgcttga

SEQ ID NO: 4428160 - DNA, 25 bp, Homo sapien
tctatctacagctctcttcagggca

SEQ ID NO: 4428161 - DNA, 25 bp, Homo sapien
tatctacagctctcttcagggcacc

SEQ ID NO: 4428162 - DNA, 25 bp, Homo sapien
ctctatctacagctctcttcagggc

SEQ ID NO: 4428163 - DNA, 25 bp, Homo sapien
ctatctacagctctcttcagggcac

SEQ ID NO: 4428164 - DNA, 25 bp, Homo sapien
tcttcctgtattgaacgaactgttt

SEQ ID NO: 4428165 - DNA, 25 bp, Homo sapien
gtattgaacgaactgtttctggtaa

SEQ ID NO: 4428166 - DNA, 25 bp, Homo sapien
ctgttcttcctgtattgaacgaact

SEQ ID NO: 4428167 - DNA, 25 bp, Homo sapien
cctgtattgaacgaactgtttctgg

SEQ ID NO: 4428168 - DNA, 25 bp, Homo sapien
cagcgtacgttttgggtcaaatcct

SEQ ID NO: 4428169 - DNA, 25 bp, Homo sapien
tccagcgtacgttttgggtcaaatc

SEQ ID NO: 4428170 - DNA, 25 bp, Homo sapien
gttctccagcgtacgttttgggtca

SEQ ID NO: 4428171 - DNA, 25 bp, Homo sapien
ctgagttctccagcgtacgttttgg

SEQ ID NO: 4428172 - DNA, 25 bp, Homo sapien
aagacctcttccacattttgagggc

SEQ ID NO: 4428173 - DNA, 25 bp, Homo sapien
tgagggcttcctggcccttttcctg

SEQ ID NO: 4428174 - DNA, 25 bp, Homo sapien
tcttccacattttgagggcttcctg

SEQ ID NO: 4428175 - DNA, 25 bp, Homo sapien
acattttgagggcttcctggccctt

SEQ ID NO: 4428176 - DNA, 25 bp, Homo sapien
tcaagcttacagacctcattgcagc

SEQ ID NO: 4428177 - DNA, 25 bp, Homo sapien
ttacagacctcattgcagctggatg

SEQ ID NO: 4428178 - DNA, 25 bp, Homo sapien
ccctctatgagcagtctgaccatca

SEQ ID NO: 4428179 - DNA, 25 bp, Homo sapien
ccatcatcatcaagcttacagacct

SEQ ID NO: 4428180 - DNA, 25 bp, Homo sapien
tattttatcctcagatgttcctgtt

SEQ ID NO: 4428181 - DNA, 25 bp, Homo sapien
ttattttatcctcagatgttcctgt

SEQ ID NO: 4428182 - DNA, 25 bp, Homo sapien
agcctggagcattgctcacagggac

SEQ ID NO: 4428183 - DNA, 25 bp, Homo sapien
gcagcctggagcattgctcacaggg

SEQ ID NO: 4428184 - DNA, 25 bp, Homo sapien
gagcagcctggagcattgctcacag

SEQ ID NO: 4428185 - DNA, 25 bp, Homo sapien
ctggagcattgctcacagggaccgg

SEQ ID NO: 4428186 - DNA, 25 bp, Homo sapien
tggcaggcagggtggtttgtactgt

SEQ ID NO: 4428187 - DNA, 25 bp, Homo sapien
gtatatggtatgcacagtccatctg

SEQ ID NO: 4428188 - DNA, 25 bp, Homo sapien
cagggtggtttgtactgtatatggt

SEQ ID NO: 4428189 - DNA, 25 bp, Homo sapien
ggtttgtactgtatatggtatgcac

SEQ ID NO: 4428190 - DNA, 25 bp, Homo sapien
tggtctatttcaggcagttgatggc

SEQ ID NO: 4428191 - DNA, 25 bp, Homo sapien
tatttcaggcagttgatggccagta

SEQ ID NO: 4428192 - DNA, 25 bp, Homo sapien
ggccagtactcatgtagtacttcat

SEQ ID NO: 4428193 - DNA, 25 bp, Homo sapien
caggcagttgatggccagtactcat

SEQ ID NO: 4428194 - DNA, 25 bp, Homo sapien
tccaggtgttgaatggaagccatta

SEQ ID NO: 4428195 - DNA, 25 bp, Homo sapien
ggtgttgcagctacagcgggtatct

SEQ ID NO: 4428196 - DNA, 25 bp, Homo sapien
cattagcttcactccgagctttggt

SEQ ID NO: 4428197 - DNA, 25 bp, Homo sapien
tacagcgggtatcttgggcagtcac

SEQ ID NO: 4428198 - DNA, 25 bp, Homo sapien
ttactggctggtgcgcatggcccat

SEQ ID NO: 4428199 - DNA, 25 bp, Homo sapien
cacccatccggtaaagaggtggctc

SEQ ID NO: 4428200 - DNA, 25 bp, Homo sapien
attggtcatagctccttcccgtggg

SEQ ID NO: 4428201 - DNA, 25 bp, Homo sapien
ttcccgtgggatgccagagtgcatg

SEQ ID NO: 4428202 - DNA, 25 bp, Homo sapien
cgtccaccattggtttctcttctcc

SEQ ID NO: 4428203 - DNA, 25 bp, Homo sapien
cttctcccacgttcaccacacccat

SEQ ID NO: 4428204 - DNA, 25 bp, Homo sapien
tctcttctcccacgttcaccacacc

SEQ ID NO: 4428205 - DNA, 25 bp, Homo sapien
ttctcttctcccacgttcaccacac

SEQ ID NO: 4428206 - DNA, 25 bp, Homo sapien
tgacagtctgttcgggagagccctg

SEQ ID NO: 4428207 - DNA, 25 bp, Homo sapien
catgccagttaggtgacagtctgtt

SEQ ID NO: 4428208 - DNA, 25 bp, Homo sapien
catctggcgcatgaaactgttctcc

SEQ ID NO: 4428209 - DNA, 25 bp, Homo sapien
agccctggcgaatggccggtgctct

SEQ ID NO: 4428210 - DNA, 25 bp, Homo sapien
tgccctgggaagaagggcgcctttc

SEQ ID NO: 4428211 - DNA, 25 bp, Homo sapien
cctgccctgggaagaagggcgcctt

SEQ ID NO: 4428212 - DNA, 25 bp, Homo sapien
ctgagatggagggtgggcagcctgc

SEQ ID NO: 4428213 - DNA, 25 bp, Homo sapien
ctggtggaaggccagagagggctga

SEQ ID NO: 4428214 - DNA, 25 bp, Homo sapien
tagctttggttcataggctttgtca

SEQ ID NO: 4428215 - DNA, 25 bp, Homo sapien
tggatgggaaggtttcagagcctgt

SEQ ID NO: 4428216 - DNA, 25 bp, Homo sapien
ctttggttcataggctttgtcacat

SEQ ID NO: 4428217 - DNA, 25 bp, Homo sapien
tttagctttggttcataggctttgt

SEQ ID NO: 4428218 - DNA, 25 bp, Homo sapien
agcgtgcccctatgcttctgaatag

SEQ ID NO: 4428219 - DNA, 25 bp, Homo sapien
tcatgccccacgttgtgtacttgga

SEQ ID NO: 4428220 - DNA, 25 bp, Homo sapien
ccactatactgtgcgctgggcttgc

SEQ ID NO: 4428221 - DNA, 25 bp, Homo sapien
aaagtctcttgagggaagcgtgccc

SEQ ID NO: 4428222 - DNA, 25 bp, Homo sapien
tccacgtagaagatttggtgcagtc

SEQ ID NO: 4428223 - DNA, 25 bp, Homo sapien
tctttatttgcggatgacacaatcg

SEQ ID NO: 4428224 - DNA, 25 bp, Homo sapien
tatttgcggatgacacaatcgtcca

SEQ ID NO: 4428225 - DNA, 25 bp, Homo sapien
caatcgtccacgtagaagatttggt

SEQ ID NO: 4428226 - DNA, 25 bp, Homo sapien
tgtcttcgccttgttctctgtaggg

SEQ ID NO: 4428227 - DNA, 25 bp, Homo sapien
atgtccagcgggtgaccctccactc

SEQ ID NO: 4428228 - DNA, 25 bp, Homo sapien
caaagtgggaagtgtcttcgccttg

SEQ ID NO: 4428229 - DNA, 25 bp, Homo sapien
ctctgtagggcggataggacagcct

SEQ ID NO: 4428230 - DNA, 25 bp, Homo sapien
aatccaatggcagagccgatgctgc

SEQ ID NO: 4428231 - DNA, 25 bp, Homo sapien
ttatggtgcagagtgccgtgagccc

SEQ ID NO: 4428232 - DNA, 25 bp, Homo sapien
cgatgctgcagagaaccaggtgcct

SEQ ID NO: 4428233 - DNA, 25 bp, Homo sapien
tgaacatcttggtgcacacagccca

SEQ ID NO: 4428234 - DNA, 25 bp, Homo sapien
gaagcacagtccgtgcgtggctgac

SEQ ID NO: 4428235 - DNA, 25 bp, Homo sapien
gccttcgagctctgggatctattgt

SEQ ID NO: 4428236 - DNA, 25 bp, Homo sapien
actgatttcctgtggtgccttcgag

SEQ ID NO: 4428237 - DNA, 25 bp, Homo sapien
tcacagccaggaggtttcggatgct

SEQ ID NO: 4428238 - DNA, 25 bp, Homo sapien
cttgtgggagacgaacgcggcagcg

SEQ ID NO: 4428239 - DNA, 25 bp, Homo sapien
gggaccgccagcttctagagccatc

SEQ ID NO: 4428240 - DNA, 25 bp, Homo sapien
gaccgccagcttctagagccatctt

SEQ ID NO: 4428241 - DNA, 25 bp, Homo sapien
agacgaacgcggcagcgcgcgtggg

SEQ ID NO: 4428242 - DNA, 25 bp, Homo sapien
aaaacagagtaacatctcctggctt

SEQ ID NO: 4428243 - DNA, 25 bp, Homo sapien
gccagcgtgtagcagccagaatgca

SEQ ID NO: 4428244 - DNA, 25 bp, Homo sapien
ccacattttactcccctcacccaca

SEQ ID NO: 4428245 - DNA, 25 bp, Homo sapien
gtcgttccccgcagccagcgtgtag

SEQ ID NO: 4428246 - DNA, 25 bp, Homo sapien
gacgatggactgatgttcttctgtg

SEQ ID NO: 4428247 - DNA, 25 bp, Homo sapien
cagcttctgctgtctattgtgcaca

SEQ ID NO: 4428248 - DNA, 25 bp, Homo sapien
tgtgcacaggtctttcgatgtcgta

SEQ ID NO: 4428249 - DNA, 25 bp, Homo sapien
tttcgatgtcgtaggctgcttttcc

SEQ ID NO: 4428250 - DNA, 25 bp, Homo sapien
gccacagggcgcctagcaggggggc

SEQ ID NO: 4428251 - DNA, 25 bp, Homo sapien
tgccacagggcgcctagcagggggg

SEQ ID NO: 4428252 - DNA, 25 bp, Homo sapien
acagggcgcctagcaggggggctga

SEQ ID NO: 4428253 - DNA, 25 bp, Homo sapien
agggcgcctagcaggggggctgaga

SEQ ID NO: 4428254 - DNA, 25 bp, Homo sapien
ctgaaggaggtgttgtgctccggtt

SEQ ID NO: 4428255 - DNA, 25 bp, Homo sapien
cagcagcccgggaaactcatacaga

SEQ ID NO: 4428256 - DNA, 25 bp, Homo sapien
agcagcccgggaaactcatacagaa

SEQ ID NO: 4428257 - DNA, 25 bp, Homo sapien
gcagcccgggaaactcatacagaag

SEQ ID NO: 4428258 - DNA, 25 bp, Homo sapien
tgtttctgtgacttctgtgtgtcca

SEQ ID NO: 4428259 - DNA, 25 bp, Homo sapien
gtgacttctgtgtgtccataactcc

SEQ ID NO: 4428260 - DNA, 25 bp, Homo sapien
ctgtgacttctgtgtgtccataact

SEQ ID NO: 4428261 - DNA, 25 bp, Homo sapien
ttatgtttctgtgacttctgtgtgt

SEQ ID NO: 4428262 - DNA, 25 bp, Homo sapien
tctcacaagagggtcacgacgatct

SEQ ID NO: 4428263 - DNA, 25 bp, Homo sapien
gttgcttgacaagaaacagctgagc

SEQ ID NO: 4428264 - DNA, 25 bp, Homo sapien
ataggacgagagcacatgagcaagc

SEQ ID NO: 4428265 - DNA, 25 bp, Homo sapien
agggccctgcagattagacacgaag

SEQ ID NO: 4428266 - DNA, 25 bp, Homo sapien
tgaggaatcatagtctccttccaag

SEQ ID NO: 4428267 - DNA, 25 bp, Homo sapien
gctctgactgtacacgggtgaggaa

SEQ ID NO: 4428268 - DNA, 25 bp, Homo sapien
acacgggtgaggaatcatagtctcc

SEQ ID NO: 4428269 - DNA, 25 bp, Homo sapien
acagaatgatgccagactcccagag

SEQ ID NO: 4428270 - DNA, 25 bp, Homo sapien
ggcagcgcagtcattgccatcgcca

SEQ ID NO: 4428271 - DNA, 25 bp, Homo sapien
ctggcagcgcagtcattgccatcgc

SEQ ID NO: 4428272 - DNA, 25 bp, Homo sapien
gcagcgcagtcattgccatcgccat

SEQ ID NO: 4428273 - DNA, 25 bp, Homo sapien
tggcagcgcagtcattgccatcgcc

SEQ ID NO: 4428274 - DNA, 25 bp, Homo sapien
acttgtacagcaaggtggccagagc

SEQ ID NO: 4428275 - DNA, 25 bp, Homo sapien
ttgcaggcacttgtacagcaaggtg

SEQ ID NO: 4428276 - DNA, 25 bp, Homo sapien
gagcccagggccacgaggctccagg

SEQ ID NO: 4428277 - DNA, 25 bp, Homo sapien
cagcgttgcaggcacttgtacagca

SEQ ID NO: 4428278 - DNA, 25 bp, Homo sapien
gcagacggaagaggcggtagaggca

SEQ ID NO: 4428279 - DNA, 25 bp, Homo sapien
caccacagaggaaggccaattccca

SEQ ID NO: 4428280 - DNA, 25 bp, Homo sapien
aggcggtagaggcaagggtggcagc

SEQ ID NO: 4428281 - DNA, 25 bp, Homo sapien
cagatgaaagagggagcgctcagaa

SEQ ID NO: 4428282 - DNA, 25 bp, Homo sapien
acagtagctgggctaatttgcattc

SEQ ID NO: 4428283 - DNA, 25 bp, Homo sapien
agtagctgggctaatttgcattccc

SEQ ID NO: 4428284 - DNA, 25 bp, Homo sapien
ttccacagtagctgggctaatttgc

SEQ ID NO: 4428285 - DNA, 25 bp, Homo sapien
tatgagtgcatgaatttttggtaga

SEQ ID NO: 4428286 - DNA, 25 bp, Homo sapien
gcttgtcgcgggctgtggctcttgc

SEQ ID NO: 4428287 - DNA, 25 bp, Homo sapien
gggttctgtcactgacctgcaggca

SEQ ID NO: 4428288 - DNA, 25 bp, Homo sapien
tcgctggttgttgggtttccgcagt

SEQ ID NO: 4428289 - DNA, 25 bp, Homo sapien
cgggacccgcgcagtttcggcggag

SEQ ID NO: 4428290 - DNA, 25 bp, Homo sapien
ggacacagtggtttgagctgcagaa

SEQ ID NO: 4428291 - DNA, 25 bp, Homo sapien
cacaaagaggtagatggacacagtg

SEQ ID NO: 4428292 - DNA, 25 bp, Homo sapien
gttgggcggccacctgtccacaggt

SEQ ID NO: 4428293 - DNA, 25 bp, Homo sapien
ctttatgtctagggacacaaagagg

SEQ ID NO: 4428294 - DNA, 25 bp, Homo sapien
taaagtgcacgtgctccgcggtcgg

SEQ ID NO: 4428295 - DNA, 25 bp, Homo sapien
gagaaagatctgcaagtgcgcaggt

SEQ ID NO: 4428296 - DNA, 25 bp, Homo sapien
ggaccttaaactcactcctggagaa

SEQ ID NO: 4428297 - DNA, 25 bp, Homo sapien
ccagagcggaggtgcggaccttaaa

SEQ ID NO: 4428298 - DNA, 25 bp, Homo sapien
tgggccgcctctttagaggtaaagc

SEQ ID NO: 4428299 - DNA, 25 bp, Homo sapien
gcatttccccgttcttgttcatagg

SEQ ID NO: 4428300 - DNA, 25 bp, Homo sapien
tgttcatagggaaaagcctgtccgc

SEQ ID NO: 4428301 - DNA, 25 bp, Homo sapien
gctggaaactatccccgcggagagc

SEQ ID NO: 4428302 - DNA, 25 bp, Homo sapien
ctagaatgcgcgttcatgcagccgt

SEQ ID NO: 4428303 - DNA, 25 bp, Homo sapien
ttttactagaatgcgcgttcatgca

SEQ ID NO: 4428304 - DNA, 25 bp, Homo sapien
tcttcggtagttttactagaatgcg

SEQ ID NO: 4428305 - DNA, 25 bp, Homo sapien
gtagttttactagaatgcgcgttca

SEQ ID NO: 4428306 - DNA, 25 bp, Homo sapien
tgtgcgttcgtgtggccattcttgg

SEQ ID NO: 4428307 - DNA, 25 bp, Homo sapien
tactagaacacgtgttcgtgtggcc

SEQ ID NO: 4428308 - DNA, 25 bp, Homo sapien
cagttaggagctgcgtgtatttttc

SEQ ID NO: 4428309 - DNA, 25 bp, Homo sapien
gtgtggccattttcggtgatgtttt

SEQ ID NO: 4428310 - DNA, 25 bp, Homo sapien
tctcggttaggagccgcgtgtgttt

SEQ ID NO: 4428311 - DNA, 25 bp, Homo sapien
gttctcggttaggagccgcgtgtgt

SEQ ID NO: 4428312 - DNA, 25 bp, Homo sapien
ttctcggttaggagccgcgtgtgtt

SEQ ID NO: 4428313 - DNA, 25 bp, Homo sapien
ctcggttaggagccgcgtgtgtttt

SEQ ID NO: 4428314 - DNA, 25 bp, Homo sapien
atgtatgttggtgtggccgttctcg

SEQ ID NO: 4428315 - DNA, 25 bp, Homo sapien
ctagaatgtatgttggtgtggccgt

SEQ ID NO: 4428316 - DNA, 25 bp, Homo sapien
agaatgtatgttggtgtggccgttc

SEQ ID NO: 4428317 - DNA, 25 bp, Homo sapien
aatgtatgttggtgtggccgttctc

SEQ ID NO: 4428318 - DNA, 25 bp, Homo sapien
ggaatgtatgttggtgtggccgttc

SEQ ID NO: 4428319 - DNA, 25 bp, Homo sapien
ctggaatgtatgttggtgtggccgt

SEQ ID NO: 4428320 - DNA, 25 bp, Homo sapien
atgtatgttggtgtggccgttctcg

SEQ ID NO: 4428321 - DNA, 25 bp, Homo sapien
aatgtatgttggtgtggccgttctc

SEQ ID NO: 4428322 - DNA, 25 bp, Homo sapien
tggccattctcggtgacgttctcgg

SEQ ID NO: 4428323 - DNA, 25 bp, Homo sapien
agaacgtatgttggtgtggccattc

SEQ ID NO: 4428324 - DNA, 25 bp, Homo sapien
cgtgcagccgttctcggtgatgttc

SEQ ID NO: 4428325 - DNA, 25 bp, Homo sapien
ttttactagaacgtatgttggtgtg

SEQ ID NO: 4428326 - DNA, 25 bp, Homo sapien
ttttactagaacgtacgttcatgtg

SEQ ID NO: 4428327 - DNA, 25 bp, Homo sapien
gaacgtacgttcatgtggccattct

SEQ ID NO: 4428328 - DNA, 25 bp, Homo sapien
cagccgcgtgcgtttttttcgtgat

SEQ ID NO: 4428329 - DNA, 25 bp, Homo sapien
cgtacgttcatgtggccattctcgg

SEQ ID NO: 4428330 - DNA, 25 bp, Homo sapien
ccagctccttagtggttgtgactca

SEQ ID NO: 4428331 - DNA, 25 bp, Homo sapien
gaggcttattagcacccgaggctat

SEQ ID NO: 4428332 - DNA, 25 bp, Homo sapien
tcaggcccgtccttctgcaaggtgc

SEQ ID NO: 4428333 - DNA, 25 bp, Homo sapien
gattcggaggcccataagttccgcc

SEQ ID NO: 4428334 - DNA, 25 bp, Homo sapien
agtgtatcccctgatgttcctctga

SEQ ID NO: 4428335 - DNA, 25 bp, Homo sapien
caccagtggcacagtgaagatacca

SEQ ID NO: 4428336 - DNA, 25 bp, Homo sapien
ggacagcttctgttacccacgtgta

SEQ ID NO: 4428337 - DNA, 25 bp, Homo sapien
gatgctgtcctgatattgatccatc

SEQ ID NO: 4428338 - DNA, 25 bp, Homo sapien
ctgtacaaatagtttgttatgggaa

SEQ ID NO: 4428339 - DNA, 25 bp, Homo sapien
actgcatcttaagcatggcctttgc

SEQ ID NO: 4428340 - DNA, 25 bp, Homo sapien
gccactgcatcttaagcatggcctt

SEQ ID NO: 4428341 - DNA, 25 bp, Homo sapien
gctgtacaaatagtttgttatggga

SEQ ID NO: 4428342 - DNA, 25 bp, Homo sapien
aaaccattcatcctgtgatacttag

SEQ ID NO: 4428343 - DNA, 25 bp, Homo sapien
catgtacatgagaaatacgaagcat

SEQ ID NO: 4428344 - DNA, 25 bp, Homo sapien
gaatacagcctgtagagtgccttag

SEQ ID NO: 4428345 - DNA, 25 bp, Homo sapien
tattgcaatgtaaccgaatacagcc

SEQ ID NO: 4428346 - DNA, 25 bp, Homo sapien
tttttgttcgatgtctgaaccttga

SEQ ID NO: 4428347 - DNA, 25 bp, Homo sapien
tagtttttgttcgatgtctgaacct

SEQ ID NO: 4428348 - DNA, 25 bp, Homo sapien
ttttgttcgatgtctgaaccttgaa

SEQ ID NO: 4428349 - DNA, 25 bp, Homo sapien
gtttttgttcgatgtctgaaccttg

SEQ ID NO: 4428350 - DNA, 25 bp, Homo sapien
ccattcagggagtagtggagtcctg

SEQ ID NO: 4428351 - DNA, 25 bp, Homo sapien
aggtgggcccactggtgctagaatc

SEQ ID NO: 4428352 - DNA, 25 bp, Homo sapien
gcagatgtattaaacttggattgga

SEQ ID NO: 4428353 - DNA, 25 bp, Homo sapien
tgctagaatccagtggtgtaaacct

SEQ ID NO: 4428354 - DNA, 25 bp, Homo sapien
gtttcaataccacttgttgaggact

SEQ ID NO: 4428355 - DNA, 25 bp, Homo sapien
gggtcccttgcattttcacatgaac

SEQ ID NO: 4428356 - DNA, 25 bp, Homo sapien
tctgggtacccttggcaaaaatcag

SEQ ID NO: 4428357 - DNA, 25 bp, Homo sapien
tatgttgataattgtgcaggtaccc

SEQ ID NO: 4428358 - DNA, 25 bp, Homo sapien
tacatgtctgtgtcttgtcatgttc

SEQ ID NO: 4428359 - DNA, 25 bp, Homo sapien
ttaggagcaaagatttccatcttcc

SEQ ID NO: 4428360 - DNA, 25 bp, Homo sapien
cctaaagtgactggcccacctcctc

SEQ ID NO: 4428361 - DNA, 25 bp, Homo sapien
tgagctcccggtgcattattcaggc

SEQ ID NO: 4428362 - DNA, 25 bp, Homo sapien
actatggatcgaaaatattggaaga

SEQ ID NO: 4428363 - DNA, 25 bp, Homo sapien
ccaactatggatcgaaaatattgga

SEQ ID NO: 4428364 - DNA, 25 bp, Homo sapien
caactatggatcgaaaatattggaa

SEQ ID NO: 4428365 - DNA, 25 bp, Homo sapien
aactatggatcgaaaatattggaag

SEQ ID NO: 4428366 - DNA, 25 bp, Homo sapien
gactgtgaagtcatatactgcatac

SEQ ID NO: 4428367 - DNA, 25 bp, Homo sapien
cattgttccgagctgacatctgctg

SEQ ID NO: 4428368 - DNA, 25 bp, Homo sapien
taagaatggctcctacataggcaga

SEQ ID NO: 4428369 - DNA, 25 bp, Homo sapien
gcataccgttgcttcattgatctcc

SEQ ID NO: 4428370 - DNA, 25 bp, Homo sapien
gtttccaagaaaatggcgctaacgc

SEQ ID NO: 4428371 - DNA, 25 bp, Homo sapien
cagaggtttccaagaaaatggcgct

SEQ ID NO: 4428372 - DNA, 25 bp, Homo sapien
gaggtttccaagaaaatggcgctaa

SEQ ID NO: 4428373 - DNA, 25 bp, Homo sapien
tccaagaaaatggcgctaacgccga

SEQ ID NO: 4428374 - DNA, 25 bp, Homo sapien
ttgcgcttcagcctgcgcattcgct

SEQ ID NO: 4428375 - DNA, 25 bp, Homo sapien
tgcgcttcagcctgcgcattcgctt

SEQ ID NO: 4428376 - DNA, 25 bp, Homo sapien
tcttcttttgcgcttcagcctgcgc

SEQ ID NO: 4428377 - DNA, 25 bp, Homo sapien
tcttttgcgcttcagcctgcgcatt

SEQ ID NO: 4428378 - DNA, 25 bp, Homo sapien
tatatggttgttacactcggccaca

SEQ ID NO: 4428379 - DNA, 25 bp, Homo sapien
attatatggttgttacactcggcca

SEQ ID NO: 4428380 - DNA, 25 bp, Homo sapien
ttatatggttgttacactcggccac

SEQ ID NO: 4428381 - DNA, 25 bp, Homo sapien
tattatatggttgttacactcggcc

SEQ ID NO: 4428382 - DNA, 25 bp, Homo sapien
ggttgaaaacagatatacaggtggg

SEQ ID NO: 4428383 - DNA, 25 bp, Homo sapien
gcctcgactccaaatggttgaaaac

SEQ ID NO: 4428384 - DNA, 25 bp, Homo sapien
tacaggtggggtttgacatgtcttt

SEQ ID NO: 4428385 - DNA, 25 bp, Homo sapien
caggctcgcctcgactccaaatggt

SEQ ID NO: 4428386 - DNA, 25 bp, Homo sapien
gatagctatagttagtgtgagcgcc

SEQ ID NO: 4428387 - DNA, 25 bp, Homo sapien
tcgacccgcgccctggatagctata

SEQ ID NO: 4428388 - DNA, 25 bp, Homo sapien
cgcgccctggatagctatagttagt

SEQ ID NO: 4428389 - DNA, 25 bp, Homo sapien
gctatagttagtgtgagcgccacca

SEQ ID NO: 4428390 - DNA, 25 bp, Homo sapien
ctgcagtcccagctagtggcaaggc

SEQ ID NO: 4428391 - DNA, 25 bp, Homo sapien
cacctgaacccggtaagtcaaggct

SEQ ID NO: 4428392 - DNA, 25 bp, Homo sapien
gctgaggtggagaaccacctgaacc

SEQ ID NO: 4428393 - DNA, 25 bp, Homo sapien
caggtgtggttccatgtgcctgcag

SEQ ID NO: 4428394 - DNA, 25 bp, Homo sapien
ctggagcgctatggtgcgatctcag

SEQ ID NO: 4428395 - DNA, 25 bp, Homo sapien
gctggagcgctatggtgcgatctca

SEQ ID NO: 4428396 - DNA, 25 bp, Homo sapien
cacagcaactagtgaataatagcct

SEQ ID NO: 4428397 - DNA, 25 bp, Homo sapien
tctaactgcacccagaaatactgat

SEQ ID NO: 4428398 - DNA, 25 bp, Homo sapien
tacacaaactagaggcaccgtggtg

SEQ ID NO: 4428399 - DNA, 25 bp, Homo sapien
gtcttgggcatcaactctaataatt

SEQ ID NO: 4428400 - DNA, 25 bp, Homo sapien
tgagcaaatatccaccccaaaaggg

SEQ ID NO: 4428401 - DNA, 25 bp, Homo sapien
tcaaaagtcactgagcaaatatcca

SEQ ID NO: 4428402 - DNA, 25 bp, Homo sapien
acggccacgcactctttctcctggg

SEQ ID NO: 4428403 - DNA, 25 bp, Homo sapien
ggggccagtccgcggagccatccat

SEQ ID NO: 4428404 - DNA, 25 bp, Homo sapien
aagtcggggaagattcagcgttgcc

SEQ ID NO: 4428405 - DNA, 25 bp, Homo sapien
aagattcagcgttgccacggccacg

SEQ ID NO: 4428406 - DNA, 25 bp, Homo sapien
gcacgtctgcgctgcttgccagggt

SEQ ID NO: 4428407 - DNA, 25 bp, Homo sapien
gtgctcagcacgtctgcgctgcttg

SEQ ID NO: 4428408 - DNA, 25 bp, Homo sapien
tcagcacgtctgcgctgcttgccag

SEQ ID NO: 4428409 - DNA, 25 bp, Homo sapien
acgtctgcgctgcttgccagggtca

SEQ ID NO: 4428410 - DNA, 25 bp, Homo sapien
ctgcttctcagcggtgggcaacagc

SEQ ID NO: 4428411 - DNA, 25 bp, Homo sapien
gcttctcagcggtgggcaacagcat

SEQ ID NO: 4428412 - DNA, 25 bp, Homo sapien
ggcctgcttctcagcggtgggcaac

SEQ ID NO: 4428413 - DNA, 25 bp, Homo sapien
cttctcagcggtgggcaacagcatg

SEQ ID NO: 4428414 - DNA, 25 bp, Homo sapien
atttgagtgaaacgccatcccctcc

SEQ ID NO: 4428415 - DNA, 25 bp, Homo sapien
tgtgccaatttgagtgaaacgccat

SEQ ID NO: 4428416 - DNA, 25 bp, Homo sapien
caatttgagtgaaacgccatcccct

SEQ ID NO: 4428417 - DNA, 25 bp, Homo sapien
gccaatttgagtgaaacgccatccc

SEQ ID NO: 4428418 - DNA, 25 bp, Homo sapien
aagatcaatcaccaatcgatgacct

SEQ ID NO: 4428419 - DNA, 25 bp, Homo sapien
gatcaatcaccaatcgatgacctgg

SEQ ID NO: 4428420 - DNA, 25 bp, Homo sapien
tcaatcaccaatcgatgacctggac

SEQ ID NO: 4428421 - DNA, 25 bp, Homo sapien
atcaatcaccaatcgatgacctgga

SEQ ID NO: 4428422 - DNA, 25 bp, Homo sapien
gtgtaaggctgactccaaccctcca

SEQ ID NO: 4428423 - DNA, 25 bp, Homo sapien
tctctgcagtaatggctgcgtgtaa

SEQ ID NO: 4428424 - DNA, 25 bp, Homo sapien
ggctgcgtgtaaggctgactccaac

SEQ ID NO: 4428425 - DNA, 25 bp, Homo sapien
agtaatggctgcgtgtaaggctgac

SEQ ID NO: 4428426 - DNA, 25 bp, Homo sapien
cctccttctatgaaatgttgaggca

SEQ ID NO: 4428427 - DNA, 25 bp, Homo sapien
tatccaatggagtcctccttctatg

SEQ ID NO: 4428428 - DNA, 25 bp, Homo sapien
cgtattaataaggtctttatccaat

SEQ ID NO: 4428429 - DNA, 25 bp, Homo sapien
taataaggtctttatccaatggagt

SEQ ID NO: 4428430 - DNA, 25 bp, Homo sapien
agaagctgttgtatgagctgaacca

SEQ ID NO: 4428431 - DNA, 25 bp, Homo sapien
tgtatgagctgaaccagaggcaaac

SEQ ID NO: 4428432 - DNA, 25 bp, Homo sapien
tgttgtatgagctgaaccagaggca

SEQ ID NO: 4428433 - DNA, 25 bp, Homo sapien
ccagaggcaaacactgtttgccaga

SEQ ID NO: 4428434 - DNA, 25 bp, Homo sapien
acgcagcgaagacgaagacacagga

SEQ ID NO: 4428435 - DNA, 25 bp, Homo sapien
gtcacacgcagcgaagacgaagaca

SEQ ID NO: 4428436 - DNA, 25 bp, Homo sapien
aaccaaaaagtcacacgcagcgaag

SEQ ID NO: 4428437 - DNA, 25 bp, Homo sapien
aaagtcacacgcagcgaagacgaag

SEQ ID NO: 4428438 - DNA, 25 bp, Homo sapien
atgataccctgcctggataacacca

SEQ ID NO: 4428439 - DNA, 25 bp, Homo sapien
cttcactacatgataccctgcctgg

SEQ ID NO: 4428440 - DNA, 25 bp, Homo sapien
atcaccttcactacatgataccctg

SEQ ID NO: 4428441 - DNA, 25 bp, Homo sapien
cactacatgataccctgcctggata

SEQ ID NO: 4428442 - DNA, 25 bp, Homo sapien
agaagttaggtttgagggcatcctc

SEQ ID NO: 4428443 - DNA, 25 bp, Homo sapien
gcaacaatgctgttgacgtggagca

SEQ ID NO: 4428444 - DNA, 25 bp, Homo sapien
tggagcagacttcccatttgggatg

SEQ ID NO: 4428445 - DNA, 25 bp, Homo sapien
gggtctgaggaaggaaccaccttca

SEQ ID NO: 4428446 - DNA, 25 bp, Homo sapien
gcccgtggaggagctccaacagcaa

SEQ ID NO: 4428447 - DNA, 25 bp, Homo sapien
ctcttcgcccgtggaggagctccaa

SEQ ID NO: 4428448 - DNA, 25 bp, Homo sapien
ttcgcccgtggaggagctccaacag

SEQ ID NO: 4428449 - DNA, 25 bp, Homo sapien
cgtggaggagctccaacagcaaatc

SEQ ID NO: 4428450 - DNA, 25 bp, Homo sapien
tgcagctgacagctatgaagcagga

SEQ ID NO: 4428451 - DNA, 25 bp, Homo sapien
ctgcagctgacagctatgaagcagg

SEQ ID NO: 4428452 - DNA, 25 bp, Homo sapien
gcagctgacagctatgaagcaggag

SEQ ID NO: 4428453 - DNA, 25 bp, Homo sapien
ctgggtaaacacacagacatgctgg

SEQ ID NO: 4428454 - DNA, 25 bp, Homo sapien
gagagcgccgtctggatggagatga

SEQ ID NO: 4428455 - DNA, 25 bp, Homo sapien
ggccagggagagcgccgtctggatg

SEQ ID NO: 4428456 - DNA, 25 bp, Homo sapien
atcagtttctgctcggcatgggcca

SEQ ID NO: 4428457 - DNA, 25 bp, Homo sapien
tcagtttctgctcggcatgggccat

SEQ ID NO: 4428458 - DNA, 25 bp, Homo sapien
tgagcctgagccacaggtaccctct

SEQ ID NO: 4428459 - DNA, 25 bp, Homo sapien
ctgagcctgagccacaggtaccctc

SEQ ID NO: 4428460 - DNA, 25 bp, Homo sapien
cctgagccacaggtaccctctgcac

SEQ ID NO: 4428461 - DNA, 25 bp, Homo sapien
agcctgagccacaggtaccctctgc

SEQ ID NO: 4428462 - DNA, 25 bp, Homo sapien
agcctataaggtcacctgttgagca

SEQ ID NO: 4428463 - DNA, 25 bp, Homo sapien
cctataaggtcacctgttgagcaag

SEQ ID NO: 4428464 - DNA, 25 bp, Homo sapien
caaagagtagggagcctataaggtc

SEQ ID NO: 4428465 - DNA, 25 bp, Homo sapien
ctgcaaagagtagggagcctataag

SEQ ID NO: 4428466 - DNA, 25 bp, Homo sapien
tgggcctctgtacccgtcagttccc

SEQ ID NO: 4428467 - DNA, 25 bp, Homo sapien
cgtcagttcccccagtctggttctt

SEQ ID NO: 4428468 - DNA, 25 bp, Homo sapien
ctacacctgggcctctgtacccgtc

SEQ ID NO: 4428469 - DNA, 25 bp, Homo sapien
tcagttcccccagtctggttcttat

SEQ ID NO: 4428470 - DNA, 25 bp, Homo sapien
atgggccctgggagtgccgccatct

SEQ ID NO: 4428471 - DNA, 25 bp, Homo sapien
tgggagtgccgccatctgtgcctgc

SEQ ID NO: 4428472 - DNA, 25 bp, Homo sapien
gtccacatgtggagaccctgacaat

SEQ ID NO: 4428473 - DNA, 25 bp, Homo sapien
tggagaccctgacaatgggccctgg

SEQ ID NO: 4428474 - DNA, 25 bp, Homo sapien
aagccttcttgagggctgtaggttt

SEQ ID NO: 4428475 - DNA, 25 bp, Homo sapien
ctgggagagggagccgctcattaat

SEQ ID NO: 4428476 - DNA, 25 bp, Homo sapien
taatttggccaaagccttcttgagg

SEQ ID NO: 4428477 - DNA, 25 bp, Homo sapien
gagccgctcattaatttggccaaag

SEQ ID NO: 4428478 - DNA, 25 bp, Homo sapien
ttcaccctcactagggcggcagctg

SEQ ID NO: 4428479 - DNA, 25 bp, Homo sapien
gctgggctcacccattaagcaagaa

SEQ ID NO: 4428480 - DNA, 25 bp, Homo sapien
aatgtaactcgcctgccggttcacc

SEQ ID NO: 4428481 - DNA, 25 bp, Homo sapien
tttcagaaatgtaactcgcctgccg

SEQ ID NO: 4428482 - DNA, 25 bp, Homo sapien
gtgggaatctggcaccccatcatcc

SEQ ID NO: 4428483 - DNA, 25 bp, Homo sapien
gattcatggaagtttgcaggagagt

SEQ ID NO: 4428484 - DNA, 25 bp, Homo sapien
gcctgcatgattcatggaagtttgc

SEQ ID NO: 4428485 - DNA, 25 bp, Homo sapien
gcatgattcatggaagtttgcagga

SEQ ID NO: 4428486 - DNA, 25 bp, Homo sapien
cagcaaaatcccaccaagcactgat

SEQ ID NO: 4428487 - DNA, 25 bp, Homo sapien
tcagcaaaatcccaccaagcactga

SEQ ID NO: 4428488 - DNA, 25 bp, Homo sapien
accagaagtggctgtctcatggatg

SEQ ID NO: 4428489 - DNA, 25 bp, Homo sapien
acaccagggctgtttctctgccaat

SEQ ID NO: 4428490 - DNA, 25 bp, Homo sapien
agaagtggctgtctcatggatgctg

SEQ ID NO: 4428491 - DNA, 25 bp, Homo sapien
aacaccagggctgtttctctgccaa

SEQ ID NO: 4428492 - DNA, 25 bp, Homo sapien
atgatgtagggctctccccgtggat

SEQ ID NO: 4428493 - DNA, 25 bp, Homo sapien
agggctctccccgtggatacctgtt

SEQ ID NO: 4428494 - DNA, 25 bp, Homo sapien
tagggctctccccgtggatacctgt

SEQ ID NO: 4428495 - DNA, 25 bp, Homo sapien
atgtagggctctccccgtggatacc

SEQ ID NO: 4428496 - DNA, 25 bp, Homo sapien
gagggctggcctgcagggtcactgc

SEQ ID NO: 4428497 - DNA, 25 bp, Homo sapien
ggctggcctgcagggtcactgcacc

SEQ ID NO: 4428498 - DNA, 25 bp, Homo sapien
gaggaggttggagggctggcctgca

SEQ ID NO: 4428499 - DNA, 25 bp, Homo sapien
aggaggttggagggctggcctgcag

SEQ ID NO: 4428500 - DNA, 25 bp, Homo sapien
ggctggggtgtgtgtggactgtctc

SEQ ID NO: 4428501 - DNA, 25 bp, Homo sapien
ggaggagtggggggagaggtagaga

SEQ ID NO: 4428502 - DNA, 25 bp, Homo sapien
ctggcagaggggcaccccgtcccac

SEQ ID NO: 4428503 - DNA, 25 bp, Homo sapien
tagagagagcaatcattagggctgg

SEQ ID NO: 4428504 - DNA, 25 bp, Homo sapien
tgactgacttttacggacctcgagt

SEQ ID NO: 4428505 - DNA, 25 bp, Homo sapien
gactgacttttacggacctcgagtc

SEQ ID NO: 4428506 - DNA, 25 bp, Homo sapien
ctgacttttacggacctcgagtctg

SEQ ID NO: 4428507 - DNA, 25 bp, Homo sapien
tgacttttacggacctcgagtctgg

SEQ ID NO: 4428508 - DNA, 25 bp, Homo sapien
ggttcttcacagaagatttagggcg

SEQ ID NO: 4428509 - DNA, 25 bp, Homo sapien
acatttactgagcacgtacgggcca

SEQ ID NO: 4428510 - DNA, 25 bp, Homo sapien
cacagaagatttagggcggaaaagg

SEQ ID NO: 4428511 - DNA, 25 bp, Homo sapien
tactgagcacgtacgggccaagtac

SEQ ID NO: 4428512 - DNA, 25 bp, Homo sapien
tgttccacttgtttattctgttgtt

SEQ ID NO: 4428513 - DNA, 25 bp, Homo sapien
ccagctgatgttccacttgtttatt

SEQ ID NO: 4428514 - DNA, 25 bp, Homo sapien
ctgatgttccacttgtttattctgt

SEQ ID NO: 4428515 - DNA, 25 bp, Homo sapien
cagctgatgttccacttgtttattc

SEQ ID NO: 4428516 - DNA, 25 bp, Homo sapien
gagacgagactcggggcctctacat

SEQ ID NO: 4428517 - DNA, 25 bp, Homo sapien
ctctagctccctttcggctttctgt

SEQ ID NO: 4428518 - DNA, 25 bp, Homo sapien
ctccctttcggctttctgtttctcg

SEQ ID NO: 4428519 - DNA, 25 bp, Homo sapien
ctagctccctttcggctttctgttt

SEQ ID NO: 4428520 - DNA, 25 bp, Homo sapien
ctgtttctcgttgtttgctttcttt

SEQ ID NO: 4428521 - DNA, 25 bp, Homo sapien
tcaaagtatctgagagaacgtttcg

SEQ ID NO: 4428522 - DNA, 25 bp, Homo sapien
ccctttctgtatgttcaatctctgg

SEQ ID NO: 4428523 - DNA, 25 bp, Homo sapien
cctttctgtatgttcaatctctgga

SEQ ID NO: 4428524 - DNA, 25 bp, Homo sapien
cgtttcgtgtggtacaggtccgtat

SEQ ID NO: 4428525 - DNA, 25 bp, Homo sapien
tgagatggggcccaaaggactcccc

SEQ ID NO: 4428526 - DNA, 25 bp, Homo sapien
agttgagatggggcccaaaggactc

SEQ ID NO: 4428527 - DNA, 25 bp, Homo sapien
gagagagttgagatggggcccaaag

SEQ ID NO: 4428528 - DNA, 25 bp, Homo sapien
atgagagagttgagatggggcccaa

SEQ ID NO: 4428529 - DNA, 25 bp, Homo sapien
tgttgcagacggacggccagatcct

SEQ ID NO: 4428530 - DNA, 25 bp, Homo sapien
caatgaatgttgcagacggacggcc

SEQ ID NO: 4428531 - DNA, 25 bp, Homo sapien
aatgaatgttgcagacggacggcca

SEQ ID NO: 4428532 - DNA, 25 bp, Homo sapien
gaatgttgcagacggacggccagat

SEQ ID NO: 4428533 - DNA, 25 bp, Homo sapien
tctgtgtggcggtgacagcagagag

SEQ ID NO: 4428534 - DNA, 25 bp, Homo sapien
gagcccgctctaactctcctttacg

SEQ ID NO: 4428535 - DNA, 25 bp, Homo sapien
ttcttctgtgtggcggtgacagcag

SEQ ID NO: 4428536 - DNA, 25 bp, Homo sapien
tcttctgtgtggcggtgacagcaga

SEQ ID NO: 4428537 - DNA, 25 bp, Homo sapien
gaggccgggccattccacacagtgc

SEQ ID NO: 4428538 - DNA, 25 bp, Homo sapien
gtttcaatctggtgaggccgggcca

SEQ ID NO: 4428539 - DNA, 25 bp, Homo sapien
gaagtttcaatctggtgaggccggg

SEQ ID NO: 4428540 - DNA, 25 bp, Homo sapien
gtgaggccgggccattccacacagt

SEQ ID NO: 4428541 - DNA, 25 bp, Homo sapien
cagctgcgctttcagcagtgcctgc

SEQ ID NO: 4428542 - DNA, 25 bp, Homo sapien
ttccactccatacgtgctttactgc

SEQ ID NO: 4428543 - DNA, 25 bp, Homo sapien
tccatacgtgctttactgcggctgg

SEQ ID NO: 4428544 - DNA, 25 bp, Homo sapien
atacgtgctttactgcggctggaga

SEQ ID NO: 4428545 - DNA, 25 bp, Homo sapien
tttagatgttcagcatattcatccc

SEQ ID NO: 4428546 - DNA, 25 bp, Homo sapien
ccctctctagctggacttctttaag

SEQ ID NO: 4428547 - DNA, 25 bp, Homo sapien
ggacttctttaagtgactccttcaa

SEQ ID NO: 4428548 - DNA, 25 bp, Homo sapien
tagatgttcagcatattcatccctc

SEQ ID NO: 4428549 - DNA, 25 bp, Homo sapien
tgacctatctaatgtgggggggctg

SEQ ID NO: 4428550 - DNA, 25 bp, Homo sapien
acctatctaatgtgggggggctgaa

SEQ ID NO: 4428551 - DNA, 25 bp, Homo sapien
agtgacctatctaatgtgggggggc

SEQ ID NO: 4428552 - DNA, 25 bp, Homo sapien
tccagtgacctatctaatgtggggg

SEQ ID NO: 4428553 - DNA, 25 bp, Homo sapien
tctctacccgatatttatcatgctt

SEQ ID NO: 4428554 - DNA, 25 bp, Homo sapien
ctctacccgatatttatcatgcttc

SEQ ID NO: 4428555 - DNA, 25 bp, Homo sapien
ctgggcctggagctctcctgccact

SEQ ID NO: 4428556 - DNA, 25 bp, Homo sapien
tgggggctccgggggcagaggttca

SEQ ID NO: 4428557 - DNA, 25 bp, Homo sapien
ctctagttccttcctcaggtgctgc

SEQ ID NO: 4428558 - DNA, 25 bp, Homo sapien
gagctctcctgccactctctctagt

SEQ ID NO: 4428559 - DNA, 25 bp, Homo sapien
ttgaagctgttctgtggctcggcca

SEQ ID NO: 4428560 - DNA, 25 bp, Homo sapien
tgctccaactgtagtacgctcttgt

SEQ ID NO: 4428561 - DNA, 25 bp, Homo sapien
aactgtagtacgctcttgttctcat

SEQ ID NO: 4428562 - DNA, 25 bp, Homo sapien
ccaactgtagtacgctcttgttctc

SEQ ID NO: 4428563 - DNA, 25 bp, Homo sapien
ctccaactgtagtacgctcttgttc

SEQ ID NO: 4428564 - DNA, 25 bp, Homo sapien
cccagaccttcttggatggggtgga

SEQ ID NO: 4428565 - DNA, 25 bp, Homo sapien
ccagaccttcttggatggggtggag

SEQ ID NO: 4428566 - DNA, 25 bp, Homo sapien
agaccttcttggatggggtggaggt

SEQ ID NO: 4428567 - DNA, 25 bp, Homo sapien
ctcccagaccttcttggatggggtg

SEQ ID NO: 4428568 - DNA, 25 bp, Homo sapien
gtgacccaggtaatggtctggctgc

SEQ ID NO: 4428569 - DNA, 25 bp, Homo sapien
tgacccaggtaatggtctggctgct

SEQ ID NO: 4428570 - DNA, 25 bp, Homo sapien
caggtgacccaggtaatggtctggc

SEQ ID NO: 4428571 - DNA, 25 bp, Homo sapien
tgcaggtgacccaggtaatggtctg

SEQ ID NO: 4428572 - DNA, 25 bp, Homo sapien
ctgctgctgataggtggccacgtac

SEQ ID NO: 4428573 - DNA, 25 bp, Homo sapien
tgcctgtacagcgcctccttctcac

SEQ ID NO: 4428574 - DNA, 25 bp, Homo sapien
actgcctgtacagcgcctccttctc

SEQ ID NO: 4428575 - DNA, 25 bp, Homo sapien
tcactgcctgtacagcgcctccttc

SEQ ID NO: 4428576 - DNA, 25 bp, Homo sapien
cactgcctgtacagcgcctccttct

SEQ ID NO: 4428577 - DNA, 25 bp, Homo sapien
tgtttctgctggctcgcagcttcca

SEQ ID NO: 4428578 - DNA, 25 bp, Homo sapien
tctgctggctcgcagcttccagacg

SEQ ID NO: 4428579 - DNA, 25 bp, Homo sapien
tgctggctcgcagcttccagacgct

SEQ ID NO: 4428580 - DNA, 25 bp, Homo sapien
tttctgctggctcgcagcttccaga

SEQ ID NO: 4428581 - DNA, 25 bp, Homo sapien
tagtgcaggcacccggttagtataa

SEQ ID NO: 4428582 - DNA, 25 bp, Homo sapien
gcacattcccactactggtcggtgc

SEQ ID NO: 4428583 - DNA, 25 bp, Homo sapien
cattcccactactggtcggtgcggg

SEQ ID NO: 4428584 - DNA, 25 bp, Homo sapien
ttagtgcaggcacccggttagtata

SEQ ID NO: 4428585 - DNA, 25 bp, Homo sapien
ggatgctaggaatgggccgaggtgc

SEQ ID NO: 4428586 - DNA, 25 bp, Homo sapien
tttcacctgctcttgtaactgtgcc

SEQ ID NO: 4428587 - DNA, 25 bp, Homo sapien
cctgctcttgtaactgtgcctgctt

SEQ ID NO: 4428588 - DNA, 25 bp, Homo sapien
gctctttcacctgctcttgtaactg

SEQ ID NO: 4428589 - DNA, 25 bp, Homo sapien
gcctgcttctcctgggcactagctc

SEQ ID NO: 4428590 - DNA, 25 bp, Homo sapien
ggcatctctctctgtagtactggaa

SEQ ID NO: 4428591 - DNA, 25 bp, Homo sapien
tctctctctgtagtactggaagaat

SEQ ID NO: 4428592 - DNA, 25 bp, Homo sapien
catctctctctgtagtactggaaga

SEQ ID NO: 4428593 - DNA, 25 bp, Homo sapien
tctctctgtagtactggaagaatcc

SEQ ID NO: 4428594 - DNA, 25 bp, Homo sapien
ctggctttgttatagggtgataaac

SEQ ID NO: 4428595 - DNA, 25 bp, Homo sapien
gccccctggctttgttatagggtga

SEQ ID NO: 4428596 - DNA, 25 bp, Homo sapien
cccctggctttgttatagggtgata

SEQ ID NO: 4428597 - DNA, 25 bp, Homo sapien
ctgccccctggctttgttatagggt

SEQ ID NO: 4428598 - DNA, 25 bp, Homo sapien
ctgtccagggccagcctgatggtgt

SEQ ID NO: 4428599 - DNA, 25 bp, Homo sapien
tcatctcctccctgtccagggccag

SEQ ID NO: 4428600 - DNA, 25 bp, Homo sapien
catctcctccctgtccagggccagc

SEQ ID NO: 4428601 - DNA, 25 bp, Homo sapien
tccctgtccagggccagcctgatgg

SEQ ID NO: 4428602 - DNA, 25 bp, Homo sapien
tgctgccagcgctcaccgtcacagc

SEQ ID NO: 4428603 - DNA, 25 bp, Homo sapien
ctgtcacgctgctgccagcgctcac

SEQ ID NO: 4428604 - DNA, 25 bp, Homo sapien
gggtgctcagctgtcacgctgctgc

SEQ ID NO: 4428605 - DNA, 25 bp, Homo sapien
ccccgcagagatgttgcacactcta

SEQ ID NO: 4428606 - DNA, 25 bp, Homo sapien
tctcctgcagctccagcagcttcac

SEQ ID NO: 4428607 - DNA, 25 bp, Homo sapien
catctcctgcagctccagcagcttc

SEQ ID NO: 4428608 - DNA, 25 bp, Homo sapien
cagctgcaacaccatctcctgcagc

SEQ ID NO: 4428609 - DNA, 25 bp, Homo sapien
accatctcctgcagctccagcagct

SEQ ID NO: 4428610 - DNA, 25 bp, Homo sapien
aatttgctgtgtcccttgtagtcgc

SEQ ID NO: 4428611 - DNA, 25 bp, Homo sapien
agaatttgctgtgtcccttgtagtc

SEQ ID NO: 4428612 - DNA, 25 bp, Homo sapien
caagaatttgctgtgtcccttgtag

SEQ ID NO: 4428613 - DNA, 25 bp, Homo sapien
ttgctgtgtcccttgtagtcgccac

SEQ ID NO: 4428614 - DNA, 25 bp, Homo sapien
ggactgggctcatgagcagggttct

SEQ ID NO: 4428615 - DNA, 25 bp, Homo sapien
tcctggactgggctcatgagcaggg

SEQ ID NO: 4428616 - DNA, 25 bp, Homo sapien
atgcttgtgggcagccccaagctcc

SEQ ID NO: 4428617 - DNA, 25 bp, Homo sapien
ggctcctggactgggctcatgagca

SEQ ID NO: 4428618 - DNA, 25 bp, Homo sapien
ctccttgcacaggctccacgctgtc

SEQ ID NO: 4428619 - DNA, 25 bp, Homo sapien
tccttgcacaggctccacgctgtca

SEQ ID NO: 4428620 - DNA, 25 bp, Homo sapien
agaaaattgcgaaagtatgccagag

SEQ ID NO: 4428621 - DNA, 25 bp, Homo sapien
aaagaaaattgcgaaagtatgccag

SEQ ID NO: 4428622 - DNA, 25 bp, Homo sapien
gaaaattgcgaaagtatgccagagt

SEQ ID NO: 4428623 - DNA, 25 bp, Homo sapien
aaattgcgaaagtatgccagagtga

SEQ ID NO: 4428624 - DNA, 25 bp, Homo sapien
taaaagtatcatgaggatgccaaat

SEQ ID NO: 4428625 - DNA, 25 bp, Homo sapien
tgttaatgtcgtatttataaaagta

SEQ ID NO: 4428626 - DNA, 25 bp, Homo sapien
ttataaaagtatcatgaggatgcca

SEQ ID NO: 4428627 - DNA, 25 bp, Homo sapien
ctgttaatgtcgtatttataaaagt

SEQ ID NO: 4428628 - DNA, 25 bp, Homo sapien
aatttggaagagtccgttgaagtca

SEQ ID NO: 4428629 - DNA, 25 bp, Homo sapien
acaaggacccgatgtttgcactctt

SEQ ID NO: 4428630 - DNA, 25 bp, Homo sapien
tattccatcggcaaaatcgtactgc

SEQ ID NO: 4428631 - DNA, 25 bp, Homo sapien
ccgttgaagtcacaaggacccgatg

SEQ ID NO: 4428632 - DNA, 25 bp, Homo sapien
gctccaacgccccagagcagcgccg

SEQ ID NO: 4428633 - DNA, 25 bp, Homo sapien
gcgtggccccccgagccgcccagac

SEQ ID NO: 4428634 - DNA, 25 bp, Homo sapien
agctgccgggcccaagcccacagcc

SEQ ID NO: 4428635 - DNA, 25 bp, Homo sapien
ccacagccccgggagccgtccgagg

SEQ ID NO: 4428636 - DNA, 25 bp, Homo sapien
ggcgccatgggtcgtagccgctggt

SEQ ID NO: 4428637 - DNA, 25 bp, Homo sapien
ccatgggtcgtagccgctggtcgtc

SEQ ID NO: 4428638 - DNA, 25 bp, Homo sapien
tcccggcctccgagagtccgggcgc

SEQ ID NO: 4428639 - DNA, 25 bp, Homo sapien
gtccgggcgccatgggtcgtagccg

SEQ ID NO: 4428640 - DNA, 25 bp, Homo sapien
gaaatccaaccgcagctgccagcct

SEQ ID NO: 4428641 - DNA, 25 bp, Homo sapien
ggagaaatccaaccgcagctgccag

SEQ ID NO: 4428642 - DNA, 25 bp, Homo sapien
cggagaaatccaaccgcagctgcca

SEQ ID NO: 4428643 - DNA, 25 bp, Homo sapien
gagaaatccaaccgcagctgccagc

SEQ ID NO: 4428644 - DNA, 25 bp, Homo sapien
tccccagaaagaaaggggcagacat

SEQ ID NO: 4428645 - DNA, 25 bp, Homo sapien
ttccccagaaagaaaggggcagaca

SEQ ID NO: 4428646 - DNA, 25 bp, Homo sapien
acgaatggcattggcggcagcacca

SEQ ID NO: 4428647 - DNA, 25 bp, Homo sapien
tgaagtttgcatgaggtagacacga

SEQ ID NO: 4428648 - DNA, 25 bp, Homo sapien
cagaggcgggtcaggttgtcgctgt

SEQ ID NO: 4428649 - DNA, 25 bp, Homo sapien
tgaggtagacacgaatggcattggc

SEQ ID NO: 4428650 - DNA, 25 bp, Homo sapien
ggttaatcaattcccctgtgccagc

SEQ ID NO: 4428651 - DNA, 25 bp, Homo sapien
cccgattaggtgagacacaaaacat

SEQ ID NO: 4428652 - DNA, 25 bp, Homo sapien
ctttggtcagtttccgtagatatcg

SEQ ID NO: 4428653 - DNA, 25 bp, Homo sapien
caatcaggtttccggacagcctagt

SEQ ID NO: 4428654 - DNA, 25 bp, Homo sapien
ttccggacagcctagttctccaaag

SEQ ID NO: 4428655 - DNA, 25 bp, Homo sapien
ttgctgactacatcacatggtccac

SEQ ID NO: 4428656 - DNA, 25 bp, Homo sapien
tgactacatcacatggtccactttg

SEQ ID NO: 4428657 - DNA, 25 bp, Homo sapien
gaagcttttctcatttaagataacc

SEQ ID NO: 4428658 - DNA, 25 bp, Homo sapien
ggaagcttttctcatttaagataac

SEQ ID NO: 4428659 - DNA, 25 bp, Homo sapien
agcttttctcatttaagataaccct

SEQ ID NO: 4428660 - DNA, 25 bp, Homo sapien
ctggaagcttttctcatttaagata

SEQ ID NO: 4428661 - DNA, 25 bp, Homo sapien
gggcaagcgggatcggcaaaatgca

SEQ ID NO: 4428662 - DNA, 25 bp, Homo sapien
caagcgggatcggcaaaatgcacgt

SEQ ID NO: 4428663 - DNA, 25 bp, Homo sapien
ggcaagcgggatcggcaaaatgcac

SEQ ID NO: 4428664 - DNA, 25 bp, Homo sapien
aagcgggatcggcaaaatgcacgtt

SEQ ID NO: 4428665 - DNA, 25 bp, Homo sapien
gtttagctgacggatgtcatggcca

SEQ ID NO: 4428666 - DNA, 25 bp, Homo sapien
gacggatgtcatggccatcaagact

SEQ ID NO: 4428667 - DNA, 25 bp, Homo sapien
gctgacggatgtcatggccatcaag

SEQ ID NO: 4428668 - DNA, 25 bp, Homo sapien
tagctgacggatgtcatggccatca

SEQ ID NO: 4428669 - DNA, 25 bp, Homo sapien
catcagcaccataagcaatgttctc

SEQ ID NO: 4428670 - DNA, 25 bp, Homo sapien
atcagcaccataagcaatgttctca

SEQ ID NO: 4428671 - DNA, 25 bp, Homo sapien
aattccggatcaagaccactgcatt

SEQ ID NO: 4428672 - DNA, 25 bp, Homo sapien
tccggatcaagaccactgcattggc

SEQ ID NO: 4428673 - DNA, 25 bp, Homo sapien
gggaaattccggatcaagaccactg

SEQ ID NO: 4428674 - DNA, 25 bp, Homo sapien
cggatcaagaccactgcattggcca

SEQ ID NO: 4428675 - DNA, 25 bp, Homo sapien
ctgagaggagaacacccttttctcc

SEQ ID NO: 4428676 - DNA, 25 bp, Homo sapien
ttcatctaggagaagaattttggga

SEQ ID NO: 4428677 - DNA, 25 bp, Homo sapien
cttcatctaggagaagaattttggg

SEQ ID NO: 4428678 - DNA, 25 bp, Homo sapien
gagcttcttgaacaaggtactcatt

SEQ ID NO: 4428679 - DNA, 25 bp, Homo sapien
tcattagttttctgtatatcccatt

SEQ ID NO: 4428680 - DNA, 25 bp, Homo sapien
caagaacagcaaccatattagcatt

SEQ ID NO: 4428681 - DNA, 25 bp, Homo sapien
ctgtatatcccatttggttttgaaa

SEQ ID NO: 4428682 - DNA, 25 bp, Homo sapien
aactacatgatgttaaattccctgc

SEQ ID NO: 4428683 - DNA, 25 bp, Homo sapien
aaagctgcccgcatgatggtatttt

SEQ ID NO: 4428684 - DNA, 25 bp, Homo sapien
tgtaacctttgagaacttagaagag

SEQ ID NO: 4428685 - DNA, 25 bp, Homo sapien
gatcttttcttacaggatgcttagt

SEQ ID NO: 4428686 - DNA, 25 bp, Homo sapien
tatcaataatctgatttatcacagg

SEQ ID NO: 4428687 - DNA, 25 bp, Homo sapien
ttatcaataatctgatttatcacag

SEQ ID NO: 4428688 - DNA, 25 bp, Homo sapien
aggactgttcgtctctctggaatat

SEQ ID NO: 4428689 - DNA, 25 bp, Homo sapien
tctctggaatattagtatcgtaagc

SEQ ID NO: 4428690 - DNA, 25 bp, Homo sapien
attcaaaatcaaggactgttcgtct

SEQ ID NO: 4428691 - DNA, 25 bp, Homo sapien
aatcaaggactgttcgtctctctgg

SEQ ID NO: 4428692 - DNA, 25 bp, Homo sapien
ccctcccgcagaatccagaaggtgt

SEQ ID NO: 4428693 - DNA, 25 bp, Homo sapien
tgctcattatccacggcacgaaaga

SEQ ID NO: 4428694 - DNA, 25 bp, Homo sapien
attatccacggcacgaaagacgagg

SEQ ID NO: 4428695 - DNA, 25 bp, Homo sapien
cgcagaatccagaaggtgtccaaga

SEQ ID NO: 4428696 - DNA, 25 bp, Homo sapien
ttggacctgagcgtcgccttcccga

SEQ ID NO: 4428697 - DNA, 25 bp, Homo sapien
accttggacctgagcgtcgccttcc

SEQ ID NO: 4428698 - DNA, 25 bp, Homo sapien
tcaccttggacctgagcgtcgcctt

SEQ ID NO: 4428699 - DNA, 25 bp, Homo sapien
ccttggacctgagcgtcgccttccc

SEQ ID NO: 4428700 - DNA, 25 bp, Homo sapien
ccagtgcaccaggaacggctttcta

SEQ ID NO: 4428701 - DNA, 25 bp, Homo sapien
ggccagtgcaccaggaacggctttc

SEQ ID NO: 4428702 - DNA, 25 bp, Homo sapien
cagtgcaccaggaacggctttctaa

SEQ ID NO: 4428703 - DNA, 25 bp, Homo sapien
agtgcaccaggaacggctttctaac

SEQ ID NO: 4428704 - DNA, 25 bp, Homo sapien
agagttctggggttgcggcatcgac

SEQ ID NO: 4428705 - DNA, 25 bp, Homo sapien
ttgcggcatcgacagggtggcaggt

SEQ ID NO: 4428706 - DNA, 25 bp, Homo sapien
gaggagagttctggggttgcggcat

SEQ ID NO: 4428707 - DNA, 25 bp, Homo sapien
gggttgcggcatcgacagggtggca

SEQ ID NO: 4428708 - DNA, 25 bp, Homo sapien
ctccgagacgaacctctacgccgac

SEQ ID NO: 4428709 - DNA, 25 bp, Homo sapien
aggccctccgagacgaacctctacg

SEQ ID NO: 4428710 - DNA, 25 bp, Homo sapien
atgaacaaggaaggcaacgcgtgga

SEQ ID NO: 4428711 - DNA, 25 bp, Homo sapien
acaaggaaggcaacgcgtggacctg

SEQ ID NO: 4428712 - DNA, 25 bp, Homo sapien
ttatcaataatctgatttatcacag

SEQ ID NO: 4428713 - DNA, 25 bp, Homo sapien
tatcaataatctgatttatcacagg

SEQ ID NO: 4428714 - DNA, 25 bp, Homo sapien
gccatcccttgatactgacagcaca

SEQ ID NO: 4428715 - DNA, 25 bp, Homo sapien
agccatcccttgatactgacagcac

SEQ ID NO: 4428716 - DNA, 25 bp, Homo sapien
ttagccatcccttgatactgacagc

SEQ ID NO: 4428717 - DNA, 25 bp, Homo sapien
tagccatcccttgatactgacagca

SEQ ID NO: 4428718 - DNA, 25 bp, Homo sapien
catatactttaacacaggtatgtcc

SEQ ID NO: 4428719 - DNA, 25 bp, Homo sapien
gagtccatgcaggcaatgtttgcta

SEQ ID NO: 4428720 - DNA, 25 bp, Homo sapien
gtggctgatttacttccatatactt

SEQ ID NO: 4428721 - DNA, 25 bp, Homo sapien
caatggcaggccgagaaaggcattt

SEQ ID NO: 4428722 - DNA, 25 bp, Homo sapien
gattttcaaggggacaaatattgcc

SEQ ID NO: 4428723 - DNA, 25 bp, Homo sapien
cacaggtgattttcaaggggacaaa

SEQ ID NO: 4428724 - DNA, 25 bp, Homo sapien
cactggccgtgggctataccacatt

SEQ ID NO: 4428725 - DNA, 25 bp, Homo sapien
tatcacaggtgattttcaaggggac

SEQ ID NO: 4428726 - DNA, 25 bp, Homo sapien
tccacgcgttgccttccttgttcat

SEQ ID NO: 4428727 - DNA, 25 bp, Homo sapien
ggtccacgcgttgccttccttgttc

SEQ ID NO: 4428728 - DNA, 25 bp, Homo sapien
aggtccacgcgttgccttccttgtt

SEQ ID NO: 4428729 - DNA, 25 bp, Homo sapien
gtccacgcgttgccttccttgttca

SEQ ID NO: 4428730 - DNA, 25 bp, Homo sapien
gtagaggttcgtctcggagggcctg

SEQ ID NO: 4428731 - DNA, 25 bp, Homo sapien
gtcggcgtagaggttcgtctcggag

SEQ ID NO: 4428732 - DNA, 25 bp, Homo sapien
cgtagaggttcgtctcggagggcct

SEQ ID NO: 4428733 - DNA, 25 bp, Homo sapien
ggcgtagaggttcgtctcggagggc

SEQ ID NO: 4428734 - DNA, 25 bp, Homo sapien
cgcggcggactcgtagcgcgaggcc

SEQ ID NO: 4428735 - DNA, 25 bp, Homo sapien
tctgccggtacaggatgatgctgtc

SEQ ID NO: 4428736 - DNA, 25 bp, Homo sapien
gactcgtagcgcgaggccaggtcca

SEQ ID NO: 4428737 - DNA, 25 bp, Homo sapien
ggcaccgtgccgatgctctgccggt

SEQ ID NO: 4428738 - DNA, 25 bp, Homo sapien
ctcaggtccaaggtgagcggcgagt

SEQ ID NO: 4428739 - DNA, 25 bp, Homo sapien
ggaaggcgtcgaagcagtaggtctt

SEQ ID NO: 4428740 - DNA, 25 bp, Homo sapien
tggggaaggcgtcgaagcagtaggt

SEQ ID NO: 4428741 - DNA, 25 bp, Homo sapien
ttggggaaggcgtcgaagcagtagg

SEQ ID NO: 4428742 - DNA, 25 bp, Homo sapien
gggaaggcgtcgaagcagtaggtct

SEQ ID NO: 4428743 - DNA, 25 bp, Homo sapien
ctcgtctttcgtgccgtggataatg

SEQ ID NO: 4428744 - DNA, 25 bp, Homo sapien
gtctttcgtgccgtggataatgagc

SEQ ID NO: 4428745 - DNA, 25 bp, Homo sapien
taatgagcacgggcgacgtgatctt

SEQ ID NO: 4428746 - DNA, 25 bp, Homo sapien
tctttcgtgccgtggataatgagca

SEQ ID NO: 4428747 - DNA, 25 bp, Homo sapien
ctagagcgccagcccctgcgagaag

SEQ ID NO: 4428748 - DNA, 25 bp, Homo sapien
gagcgccagcccctgcgagaagtcg

SEQ ID NO: 4428749 - DNA, 25 bp, Homo sapien
ccagcccctgcgagaagtcgatcac

SEQ ID NO: 4428750 - DNA, 25 bp, Homo sapien
gcgccagcccctgcgagaagtcgat

SEQ ID NO: 4428751 - DNA, 25 bp, Homo sapien
gctggatgtctttgtgcccggcgcc

SEQ ID NO: 4428752 - DNA, 25 bp, Homo sapien
ccaggtactggctgtagagctggat

SEQ ID NO: 4428753 - DNA, 25 bp, Homo sapien
ggatgtctttgtgcccggcgccctc

SEQ ID NO: 4428754 - DNA, 25 bp, Homo sapien
tgtagagctggatgtctttgtgccc

SEQ ID NO: 4428755 - DNA, 25 bp, Homo sapien
gggggccgccttattgctgaagtcc

SEQ ID NO: 4428756 - DNA, 25 bp, Homo sapien
atgcagcccccgggaggccggtgcg

SEQ ID NO: 4428757 - DNA, 25 bp, Homo sapien
tgcagcccccgggaggccggtgcgg

SEQ ID NO: 4428758 - DNA, 25 bp, Homo sapien
cgccttattgctgaagtccggccgg

SEQ ID NO: 4428759 - DNA, 25 bp, Homo sapien
tgcttatggcaaagttatcagcaaa

SEQ ID NO: 4428760 - DNA, 25 bp, Homo sapien
cactgttatgcagcaatttatcttt

SEQ ID NO: 4428761 - DNA, 25 bp, Homo sapien
tatgtttgcttatggcaaagttatc

SEQ ID NO: 4428762 - DNA, 25 bp, Homo sapien
gttatcagcaaaaaagtcactgtta

SEQ ID NO: 4428763 - DNA, 25 bp, Homo sapien
ctcacagttactttctggcagtttc

SEQ ID NO: 4428764 - DNA, 25 bp, Homo sapien
cctccgcaaacccttctgaattgag

SEQ ID NO: 4428765 - DNA, 25 bp, Homo sapien
gcttggtccttaaggaatatctcag

SEQ ID NO: 4428766 - DNA, 25 bp, Homo sapien
cttggcaacagaggggagtcatgca

SEQ ID NO: 4428767 - DNA, 25 bp, Homo sapien
ctgaattgagaatgggaaccttggc

SEQ ID NO: 4428768 - DNA, 25 bp, Homo sapien
tgtttgctcgcgacatgactgctcg

SEQ ID NO: 4428769 - DNA, 25 bp, Homo sapien
ccagttcgagttcccactgggtctg

SEQ ID NO: 4428770 - DNA, 25 bp, Homo sapien
gttactgtcctgtcaagagattcca

SEQ ID NO: 4428771 - DNA, 25 bp, Homo sapien
tacttggcccgtacgtgctcagtaa

SEQ ID NO: 4428772 - DNA, 25 bp, Homo sapien
tgaggatgctctcgggccagccagt

SEQ ID NO: 4428773 - DNA, 25 bp, Homo sapien
atgctctcgggccagccagtggctt

SEQ ID NO: 4428774 - DNA, 25 bp, Homo sapien
gtgaggatgctctcgggccagccag

SEQ ID NO: 4428775 - DNA, 25 bp, Homo sapien
tctcgggccagccagtggctttgcc

SEQ ID NO: 4428776 - DNA, 25 bp, Homo sapien
gtgtccacgtgcgaccgcagtcgca

SEQ ID NO: 4428777 - DNA, 25 bp, Homo sapien
acccgtgtccacgtgcgaccgcagt

SEQ ID NO: 4428778 - DNA, 25 bp, Homo sapien
ccgtgtccacgtgcgaccgcagtcg

SEQ ID NO: 4428779 - DNA, 25 bp, Homo sapien
tgcaacccgtgtccacgtgcgaccg

SEQ ID NO: 4428780 - DNA, 25 bp, Homo sapien
agagctgccatggattctaccattc

SEQ ID NO: 4428781 - DNA, 25 bp, Homo sapien
gtaaagagctgccatggattctacc

SEQ ID NO: 4428782 - DNA, 25 bp, Homo sapien
attctggaagcacggtaaaattgct

SEQ ID NO: 4428783 - DNA, 25 bp, Homo sapien
ctttggttccaatccatcttgaaac

SEQ ID NO: 4428784 - DNA, 25 bp, Homo sapien
tctgggagaagactgatatcttcat

SEQ ID NO: 4428785 - DNA, 25 bp, Homo sapien
ctctgggagaagactgatatcttca

SEQ ID NO: 4428786 - DNA, 25 bp, Homo sapien
ggagaagactgatatcttcatcttt

SEQ ID NO: 4428787 - DNA, 25 bp, Homo sapien
tgggagaagactgatatcttcatct

SEQ ID NO: 4428788 - DNA, 25 bp, Homo sapien
gccatcagcctctgtttctgaacca

SEQ ID NO: 4428789 - DNA, 25 bp, Homo sapien
catttcaggattgtcaccacccata

SEQ ID NO: 4428790 - DNA, 25 bp, Homo sapien
gaaccagcctcttcatgctcctgtt

SEQ ID NO: 4428791 - DNA, 25 bp, Homo sapien
cctctaaatcttctaggtcctcctg

SEQ ID NO: 4428792 - DNA, 25 bp, Homo sapien
gcagccaaggcttttttctaacaac

SEQ ID NO: 4428793 - DNA, 25 bp, Homo sapien
cagccaaggcttttttctaacaact

SEQ ID NO: 4428794 - DNA, 25 bp, Homo sapien
tctaacaactctttttctaaagatg

SEQ ID NO: 4428795 - DNA, 25 bp, Homo sapien
taacaactctttttctaaagatgta

SEQ ID NO: 4428796 - DNA, 25 bp, Homo sapien
ccatccggacagcatggtcaaagtg

SEQ ID NO: 4428797 - DNA, 25 bp, Homo sapien
ccaggaggctcttctctggtctctt

SEQ ID NO: 4428798 - DNA, 25 bp, Homo sapien
tggtcaaagtgcaggctctcctcca

SEQ ID NO: 4428799 - DNA, 25 bp, Homo sapien
cggacagcatggtcaaagtgcaggc

SEQ ID NO: 4428800 - DNA, 25 bp, Homo sapien
tctcttatcctctgtttaatgatac

SEQ ID NO: 4428801 - DNA, 25 bp, Homo sapien
atcctctgtttaatgataccttcca

SEQ ID NO: 4428802 - DNA, 25 bp, Homo sapien
tcttatcctctgtttaatgatacct

SEQ ID NO: 4428803 - DNA, 25 bp, Homo sapien
tgataccttccagttgaaaggtgtt

SEQ ID NO: 4428804 - DNA, 25 bp, Homo sapien
taggggtgtggccttcatgcttgaa

SEQ ID NO: 4428805 - DNA, 25 bp, Homo sapien
gcgtaaccagggctgcactagaatg

SEQ ID NO: 4428806 - DNA, 25 bp, Homo sapien
gtaaccagggctgcactagaatgca

SEQ ID NO: 4428807 - DNA, 25 bp, Homo sapien
gtgtggccttcatgcttgaagccca

SEQ ID NO: 4428808 - DNA, 25 bp, Homo sapien
ctttggacatcataggatgggtagg

SEQ ID NO: 4428809 - DNA, 25 bp, Homo sapien
cacactgtcaaggtctgtggtaagg

SEQ ID NO: 4428810 - DNA, 25 bp, Homo sapien
tcacactgtcaaggtctgtggtaag

SEQ ID NO: 4428811 - DNA, 25 bp, Homo sapien
cactagggttggtctggggatgatg

SEQ ID NO: 4428812 - DNA, 25 bp, Homo sapien
ttgctgctgtaccaacactagggtt

SEQ ID NO: 4428813 - DNA, 25 bp, Homo sapien
tctttttggtgtcgcttgctgctgt

SEQ ID NO: 4428814 - DNA, 25 bp, Homo sapien
ttctttttggtgtcgcttgctgctg

SEQ ID NO: 4428815 - DNA, 25 bp, Homo sapien
tctagctccctccttagggcttcct

SEQ ID NO: 4428816 - DNA, 25 bp, Homo sapien
tccctccttagggcttcctgatgtt

SEQ ID NO: 4428817 - DNA, 25 bp, Homo sapien
gatgttggtggcttgccttctgttc

SEQ ID NO: 4428818 - DNA, 25 bp, Homo sapien
ctccttagggcttcctgatgttggt

SEQ ID NO: 4428819 - DNA, 25 bp, Homo sapien
tggctgtagtagagtgccatctgaa

SEQ ID NO: 4428820 - DNA, 25 bp, Homo sapien
catgctggctgtagtagagtgccat

SEQ ID NO: 4428821 - DNA, 25 bp, Homo sapien
tgacagcatgctggctgtagtagag

SEQ ID NO: 4428822 - DNA, 25 bp, Homo sapien
tgctggctgtagtagagtgccatct

SEQ ID NO: 4428823 - DNA, 25 bp, Homo sapien
ctgcaaacttccatgaatcatgcag

SEQ ID NO: 4428824 - DNA, 25 bp, Homo sapien
cctctcctttgttaactcctcaatg

SEQ ID NO: 4428825 - DNA, 25 bp, Homo sapien
acagttccagactcagggcgtccct

SEQ ID NO: 4428826 - DNA, 25 bp, Homo sapien
gtgttcctgtacagttccagactca

SEQ ID NO: 4428827 - DNA, 25 bp, Homo sapien
tctcctttgttaactcctcaatgta

SEQ ID NO: 4428828 - DNA, 25 bp, Homo sapien
cagattctacaagttgaagtttttc

SEQ ID NO: 4428829 - DNA, 25 bp, Homo sapien
tagctcctttacgttgagctggatc

SEQ ID NO: 4428830 - DNA, 25 bp, Homo sapien
ttttagctcctttacgttgagctgg

SEQ ID NO: 4428831 - DNA, 25 bp, Homo sapien
aggagcttggccctctccagtttcc

SEQ ID NO: 4428832 - DNA, 25 bp, Homo sapien
ctgttgctggttcaggcggttccac

SEQ ID NO: 4428833 - DNA, 25 bp, Homo sapien
tgttgctggttcaggcggttccaca

SEQ ID NO: 4428834 - DNA, 25 bp, Homo sapien
tggttcaggcggttccacaactcgt

SEQ ID NO: 4428835 - DNA, 25 bp, Homo sapien
ggcggttccacaactcgttctcttc

SEQ ID NO: 4428836 - DNA, 25 bp, Homo sapien
ctgctctcgtatcttctcctcctgc

SEQ ID NO: 4428837 - DNA, 25 bp, Homo sapien
ctgttcttgcatcttctcttcctgc

SEQ ID NO: 4428838 - DNA, 25 bp, Homo sapien
tgctcccacatcttctcttcctgtt

SEQ ID NO: 4428839 - DNA, 25 bp, Homo sapien
gcctcacttcctgctcccgcatctt

SEQ ID NO: 4428840 - DNA, 25 bp, Homo sapien
cagcctcttggctcttcagctccac

SEQ ID NO: 4428841 - DNA, 25 bp, Homo sapien
tcagcctcttggctcttcagctcca

SEQ ID NO: 4428842 - DNA, 25 bp, Homo sapien
ctgcagactcagcctcttggctctt

SEQ ID NO: 4428843 - DNA, 25 bp, Homo sapien
cagactcagcctcttggctcttcag

SEQ ID NO: 4428844 - DNA, 25 bp, Homo sapien
gacccaggtaatggtctcgctgctg

SEQ ID NO: 4428845 - DNA, 25 bp, Homo sapien
ggtgacccaggtaatggtctcgctg

SEQ ID NO: 4428846 - DNA, 25 bp, Homo sapien
tgacccaggtaatggtctcgctgct

SEQ ID NO: 4428847 - DNA, 25 bp, Homo sapien
caggtgacccaggtaatggtctcgc

SEQ ID NO: 4428848 - DNA, 25 bp, Homo sapien
cagaggccagctgctgataggcggc

SEQ ID NO: 4428849 - DNA, 25 bp, Homo sapien
tcagaggccagctgctgataggcgg

SEQ ID NO: 4428850 - DNA, 25 bp, Homo sapien
ccagctgctgataggcggccacgta

SEQ ID NO: 4428851 - DNA, 25 bp, Homo sapien
aggccagctgctgataggcggccac

SEQ ID NO: 4428852 - DNA, 25 bp, Homo sapien
tgggtaagcctggtcaaagcggctc

SEQ ID NO: 4428853 - DNA, 25 bp, Homo sapien
gagtgcgggacagcatgaaagcaca

SEQ ID NO: 4428854 - DNA, 25 bp, Homo sapien
gatggaaattttgagagagcaggca

SEQ ID NO: 4428855 - DNA, 25 bp, Homo sapien
tatcttcaaaggaggtgggttccat

SEQ ID NO: 4428856 - DNA, 25 bp, Homo sapien
actgtcttgtctttcagcaacccca

SEQ ID NO: 4428857 - DNA, 25 bp, Homo sapien
gcactgtcttgtctttcagcaaccc

SEQ ID NO: 4428858 - DNA, 25 bp, Homo sapien
cctgcactgtcttgtctttcagcaa

SEQ ID NO: 4428859 - DNA, 25 bp, Homo sapien
tgcactgtcttgtctttcagcaacc

SEQ ID NO: 4428860 - DNA, 25 bp, Homo sapien
agctcctccacgggcgaagaggtga

SEQ ID NO: 4428861 - DNA, 25 bp, Homo sapien
ggagctcctccacgggcgaagaggt

SEQ ID NO: 4428862 - DNA, 25 bp, Homo sapien
gagctcctccacgggcgaagaggtg

SEQ ID NO: 4428863 - DNA, 25 bp, Homo sapien
gctgtccacacaggttgtctcctgt

SEQ ID NO: 4428864 - DNA, 25 bp, Homo sapien
tatgggacattggttctacagcaga

SEQ ID NO: 4428865 - DNA, 25 bp, Homo sapien
tgtgtcttcgtcttcgctgcgtgtg

SEQ ID NO: 4428866 - DNA, 25 bp, Homo sapien
gctgcgtgtgactttttggttcctg

SEQ ID NO: 4428867 - DNA, 25 bp, Homo sapien
tgcagctgtgtagcctgcgctggcc

SEQ ID NO: 4428868 - DNA, 25 bp, Homo sapien
gactgttcccgtgcgcagagagact

SEQ ID NO: 4428869 - DNA, 25 bp, Homo sapien
agagactggcctgtttgacctgcag

SEQ ID NO: 4428870 - DNA, 25 bp, Homo sapien
tcctgttgtgggtcctttgttctca

SEQ ID NO: 4428871 - DNA, 25 bp, Homo sapien
ctgacgcgcagggcccggccgcctc

SEQ ID NO: 4428872 - DNA, 25 bp, Homo sapien
ccggccgcctcgcctcgccggcgcg

SEQ ID NO: 4428873 - DNA, 25 bp, Homo sapien
cgcagggcccggccgcctcgcctcg

SEQ ID NO: 4428874 - DNA, 25 bp, Homo sapien
cccggccgcctcgcctcgccggcgc

SEQ ID NO: 4428875 - DNA, 25 bp, Homo sapien
cttttctccagcttcctcccaggtc

SEQ ID NO: 4428876 - DNA, 25 bp, Homo sapien
tccagcttcctcccaggtctcaggc

SEQ ID NO: 4428877 - DNA, 25 bp, Homo sapien
ttttctccagcttcctcccaggtct

SEQ ID NO: 4428878 - DNA, 25 bp, Homo sapien
ttctccagcttcctcccaggtctca

SEQ ID NO: 4428879 - DNA, 25 bp, Homo sapien
ttttcaaccatttggagtcgaggcg

SEQ ID NO: 4428880 - DNA, 25 bp, Homo sapien
tcaaccatttggagtcgaggcgagc

SEQ ID NO: 4428881 - DNA, 25 bp, Homo sapien
accatttggagtcgaggcgagcctg

SEQ ID NO: 4428882 - DNA, 25 bp, Homo sapien
ctgttttcaaccatttggagtcgag

SEQ ID NO: 4428883 - DNA, 25 bp, Homo sapien
gatagaatggcacagaactacgcac

SEQ ID NO: 4428884 - DNA, 25 bp, Homo sapien
caacaaaccttgacggacctgaggg

SEQ ID NO: 4428885 - DNA, 25 bp, Homo sapien
tacaacaaaactggcgaacaggcat

SEQ ID NO: 4428886 - DNA, 25 bp, Homo sapien
cgcccagccgaagtgactatttata

SEQ ID NO: 4428887 - DNA, 25 bp, Homo sapien
gagattacagaattcacagacaagg

SEQ ID NO: 4428888 - DNA, 25 bp, Homo sapien
gtggatcagcctaacaaacctcaga

SEQ ID NO: 4428889 - DNA, 25 bp, Homo sapien
tacaccaagcatcaggtggagtcct

SEQ ID NO: 4428890 - DNA, 25 bp, Homo sapien
gatggatgagattaacagaactgca

SEQ ID NO: 4428891 - DNA, 25 bp, Homo sapien
tagacactggactcctggaaggaca

SEQ ID NO: 4428892 - DNA, 25 bp, Homo sapien
cacatcagtgttctgcggtacagcc

SEQ ID NO: 4428893 - DNA, 25 bp, Homo sapien
gaagcctcctaggaactgatgaccc

SEQ ID NO: 4428894 - DNA, 25 bp, Homo sapien
cggtacagcctagattgagaaacat

SEQ ID NO: 4428895 - DNA, 25 bp, Homo sapien
actatgttgaataacggtggccaca

SEQ ID NO: 4428896 - DNA, 25 bp, Homo sapien
cacaggtttcgtatgctgtgctgcc

SEQ ID NO: 4428897 - DNA, 25 bp, Homo sapien
tttttctcttagcctgcctgaaagc

SEQ ID NO: 4428898 - DNA, 25 bp, Homo sapien
caggtttcgtatgctgtgctgccat

SEQ ID NO: 4428899 - DNA, 25 bp, Homo sapien
gcctgaaagcttgtcaatttatctt

SEQ ID NO: 4428900 - DNA, 25 bp, Homo sapien
ttactcaagaaatcattacccagtg

SEQ ID NO: 4428901 - DNA, 25 bp, Homo sapien
ttatcaatgaggctatcctttccct

SEQ ID NO: 4428902 - DNA, 25 bp, Homo sapien
tgcctgtgtttacgaagtattactc

SEQ ID NO: 4428903 - DNA, 25 bp, Homo sapien
taaactttgcacttgatctaagcca

SEQ ID NO: 4428904 - DNA, 25 bp, Homo sapien
cggggcacatcacgggggatcagga

SEQ ID NO: 4428905 - DNA, 25 bp, Homo sapien
cacatcacgggggatcaggaatttg

SEQ ID NO: 4428906 - DNA, 25 bp, Homo sapien
cgagcggggcacatcacgggggatc

SEQ ID NO: 4428907 - DNA, 25 bp, Homo sapien
ggaggccgagcggggcacatcacgg

SEQ ID NO: 4428908 - DNA, 25 bp, Homo sapien
tcattccacagaccacagagcccat

SEQ ID NO: 4428909 - DNA, 25 bp, Homo sapien
atttcattccacagaccacagagcc

SEQ ID NO: 4428910 - DNA, 25 bp, Homo sapien
accatttcattccacagaccacaga

SEQ ID NO: 4428911 - DNA, 25 bp, Homo sapien
ctttaaccatttcattccacagacc

SEQ ID NO: 4428912 - DNA, 25 bp, Homo sapien
gttccagtgtatacaatttctccat

SEQ ID NO: 4428913 - DNA, 25 bp, Homo sapien
tccgttctgggttgattctgttcca

SEQ ID NO: 4428914 - DNA, 25 bp, Homo sapien
ttgattctgttccagtgtatacaat

SEQ ID NO: 4428915 - DNA, 25 bp, Homo sapien
tctgttccagtgtatacaatttctc

SEQ ID NO: 4428916 - DNA, 25 bp, Homo sapien
aagaaaccaatatattggccgggcg

SEQ ID NO: 4428917 - DNA, 25 bp, Homo sapien
gtaacagatccagtataattttcat

SEQ ID NO: 4428918 - DNA, 25 bp, Homo sapien
tcataaagaaaccaatatattggcc

SEQ ID NO: 4428919 - DNA, 25 bp, Homo sapien
ctgtaacagatccagtataattttc

SEQ ID NO: 4428920 - DNA, 25 bp, Homo sapien
cgttagcctctgcaaatgtccctcc

SEQ ID NO: 4428921 - DNA, 25 bp, Homo sapien
ctccccgaaaagttacaacacacat

SEQ ID NO: 4428922 - DNA, 25 bp, Homo sapien
ctctgcaaatgtccctccccgaaaa

SEQ ID NO: 4428923 - DNA, 25 bp, Homo sapien
ctgcaaatgtccctccccgaaaagt

SEQ ID NO: 4428924 - DNA, 25 bp, Homo sapien
taggtgcaggagtttcttcttcatc

SEQ ID NO: 4428925 - DNA, 25 bp, Homo sapien
cattcagatctttctttgtcccact

SEQ ID NO: 4428926 - DNA, 25 bp, Homo sapien
tcagatctttctttgtcccacttgg

SEQ ID NO: 4428927 - DNA, 25 bp, Homo sapien
ctctttgtcattcagatctttcttt

SEQ ID NO: 4428928 - DNA, 25 bp, Homo sapien
cacattcttattacatgtgcatgaa

SEQ ID NO: 4428929 - DNA, 25 bp, Homo sapien
gggcttcagacaagcctcagcattg

SEQ ID NO: 4428930 - DNA, 25 bp, Homo sapien
tccacagaatgcaccatattctggg

SEQ ID NO: 4428931 - DNA, 25 bp, Homo sapien
caggggtgcaatcgagattacaggc

SEQ ID NO: 4428932 - DNA, 25 bp, Homo sapien
gagattcatgtcaaactaatgtggt

SEQ ID NO: 4428933 - DNA, 25 bp, Homo sapien
gtgtgttagttcaactcctctccta

SEQ ID NO: 4428934 - DNA, 25 bp, Homo sapien
tggtaagccaaccttgtgtgttagt

SEQ ID NO: 4428935 - DNA, 25 bp, Homo sapien
tactaagtaatcagctacgggtaac

SEQ ID NO: 4428936 - DNA, 25 bp, Homo sapien
ctggtatttgctaggagaagtgtcc

SEQ ID NO: 4428937 - DNA, 25 bp, Homo sapien
tagcaagatgtggttagtttaggat

SEQ ID NO: 4428938 - DNA, 25 bp, Homo sapien
ttccctaaggtgtataaactatctg

SEQ ID NO: 4428939 - DNA, 25 bp, Homo sapien
aatgtttttagcaagatgtggttag

SEQ ID NO: 4428940 - DNA, 25 bp, Homo sapien
gctcaggcagtgtaataccatttga

SEQ ID NO: 4428941 - DNA, 25 bp, Homo sapien
gatgtaactgaaaacgccagagatg

SEQ ID NO: 4428942 - DNA, 25 bp, Homo sapien
catgtttcacttggacatgacacag

SEQ ID NO: 4428943 - DNA, 25 bp, Homo sapien
cccaagtagtctaaagattccaaat

SEQ ID NO: 4428944 - DNA, 25 bp, Homo sapien
agccagacggtctaaatgggccatg

SEQ ID NO: 4428945 - DNA, 25 bp, Homo sapien
agacgtcggagagctacacagagga

SEQ ID NO: 4428946 - DNA, 25 bp, Homo sapien
atgagacgtcggagagctacacaga

SEQ ID NO: 4428947 - DNA, 25 bp, Homo sapien
cttatgagacgtcggagagctacac

SEQ ID NO: 4428948 - DNA, 25 bp, Homo sapien
tatgagacgtcggagagctacacag

SEQ ID NO: 4428949 - DNA, 25 bp, Homo sapien
gcctgcgttcagagtatgaagaagg

SEQ ID NO: 4428950 - DNA, 25 bp, Homo sapien
gacagcctgcgttcagagtatgaag

SEQ ID NO: 4428951 - DNA, 25 bp, Homo sapien
acagcctgcgttcagagtatgaaga

SEQ ID NO: 4428952 - DNA, 25 bp, Homo sapien
cagcctgcgttcagagtatgaagaa

SEQ ID NO: 4428953 - DNA, 25 bp, Homo sapien
ctgttaacgactgtgtctggaagtc

SEQ ID NO: 4428954 - DNA, 25 bp, Homo sapien
tcccgggtgtcttcaaactgcaaag

SEQ ID NO: 4428955 - DNA, 25 bp, Homo sapien
attcccgggtgtcttcaaactgcaa

SEQ ID NO: 4428956 - DNA, 25 bp, Homo sapien
cgggtgtcttcaaactgcaaagcag

SEQ ID NO: 4428957 - DNA, 25 bp, Homo sapien
cccgggtgtcttcaaactgcaaagc

SEQ ID NO: 4428958 - DNA, 25 bp, Homo sapien
tggcacattcaatctcgacaggaga

SEQ ID NO: 4428959 - DNA, 25 bp, Homo sapien
caggagacagcggtgtgctcattgc

SEQ ID NO: 4428960 - DNA, 25 bp, Homo sapien
tctcgacaggagacagcggtgtgct

SEQ ID NO: 4428961 - DNA, 25 bp, Homo sapien
tcctctctgtgtctatcagaggtga

SEQ ID NO: 4428962 - DNA, 25 bp, Homo sapien
tactgctccaagataagcctctgat

SEQ ID NO: 4428963 - DNA, 25 bp, Homo sapien
ctgtggatcggacccacctgccagg

SEQ ID NO: 4428964 - DNA, 25 bp, Homo sapien
cctctgatcctcctgtggatcggac

SEQ ID NO: 4428965 - DNA, 25 bp, Homo sapien
taatccaatgccgactctctctggc

SEQ ID NO: 4428966 - DNA, 25 bp, Homo sapien
agcagagtcgagatttgctggcagg

SEQ ID NO: 4428967 - DNA, 25 bp, Homo sapien
gcagagtcgagatttgctggcaggt

SEQ ID NO: 4428968 - DNA, 25 bp, Homo sapien
ccgtctgtgggagcagagtcgagat

SEQ ID NO: 4428969 - DNA, 25 bp, Homo sapien
agggcccgtctgtgggagcagagtc

SEQ ID NO: 4428970 - DNA, 25 bp, Homo sapien
gggaaacatgatcggtgtggtcaaa

SEQ ID NO: 4428971 - DNA, 25 bp, Homo sapien
tgcctacagtacctttctatttgac

SEQ ID NO: 4428972 - DNA, 25 bp, Homo sapien
tcggtgtggtcaaatggcactgcct

SEQ ID NO: 4428973 - DNA, 25 bp, Homo sapien
aatggcactgcctacagtacctttc

SEQ ID NO: 4428974 - DNA, 25 bp, Homo sapien
catgttttaagaggcaacataacag

SEQ ID NO: 4428975 - DNA, 25 bp, Homo sapien
taagaggcaacataacagcaagcga

SEQ ID NO: 4428976 - DNA, 25 bp, Homo sapien
cttcatgttttaagaggcaacataa

SEQ ID NO: 4428977 - DNA, 25 bp, Homo sapien
ggcaacataacagcaagcgaccgac

SEQ ID NO: 4428978 - DNA, 25 bp, Homo sapien
tgcatgaactaaagataatgccaca

SEQ ID NO: 4428979 - DNA, 25 bp, Homo sapien
cactgacttaggcaacgttctgtgc

SEQ ID NO: 4428980 - DNA, 25 bp, Homo sapien
actgacttaggcaacgttctgtgct

SEQ ID NO: 4428981 - DNA, 25 bp, Homo sapien
tgacttaggcaacgttctgtgcttt

SEQ ID NO: 4428982 - DNA, 25 bp, Homo sapien
acattttgcttggtagacaactcta

SEQ ID NO: 4428983 - DNA, 25 bp, Homo sapien
taacaacaaatatttcagcaactgt

SEQ ID NO: 4428984 - DNA, 25 bp, Homo sapien
gacaactttaacaacaaatatttca

SEQ ID NO: 4428985 - DNA, 25 bp, Homo sapien
ctgcaaagttaaccaggaaaagaca

SEQ ID NO: 4428986 - DNA, 25 bp, Homo sapien
tgcaaagttaaccaggaaaagacaa

SEQ ID NO: 4428987 - DNA, 25 bp, Homo sapien
ccttggttctcgaattatcttctga

SEQ ID NO: 4428988 - DNA, 25 bp, Homo sapien
tttccttggttctcgaattatcttc

SEQ ID NO: 4428989 - DNA, 25 bp, Homo sapien
caaacgttcgatgacaggagcgcag

SEQ ID NO: 4428990 - DNA, 25 bp, Homo sapien
gcgcagacctccttgtaagaacggt

SEQ ID NO: 4428991 - DNA, 25 bp, Homo sapien
gagagacaccaaagcgtgtgcctag

SEQ ID NO: 4428992 - DNA, 25 bp, Homo sapien
caattcttcacacatgatgtgacac

SEQ ID NO: 4428993 - DNA, 25 bp, Homo sapien
ctagactcgaggctcaggtgcgctg

SEQ ID NO: 4428994 - DNA, 25 bp, Homo sapien
cactgcctgcgtatgtgactggccc

SEQ ID NO: 4428995 - DNA, 25 bp, Homo sapien
tgggtctcttgtccacatttattgg

SEQ ID NO: 4428996 - DNA, 25 bp, Homo sapien
taattgcaatgggtctcttgtccac

SEQ ID NO: 4428997 - DNA, 25 bp, Homo sapien
cacatttattggactatgaggcaaa

SEQ ID NO: 4428998 - DNA, 25 bp, Homo sapien
tgtccacatttattggactatgagg

SEQ ID NO: 4428999 - DNA, 25 bp, Homo sapien
gggcaaattcagcaattgtactgag

SEQ ID NO: 4429000 - DNA, 25 bp, Homo sapien
gaggagtggagactgcggataaaga

SEQ ID NO: 4429001 - DNA, 25 bp, Homo sapien
ttaagggcaaattcagcaattgtac

SEQ ID NO: 4429002 - DNA, 25 bp, Homo sapien
caaattcagcaattgtactgaggag

SEQ ID NO: 4429003 - DNA, 25 bp, Homo sapien
agtgttatgtatattacccaatgca

SEQ ID NO: 4429004 - DNA, 25 bp, Homo sapien
tgtatattacccaatgcagagaagc

SEQ ID NO: 4429005 - DNA, 25 bp, Homo sapien
caaaatatcaatgcatacagttaag

SEQ ID NO: 4429006 - DNA, 25 bp, Homo sapien
aatatcaatgcatacagttaagtgt

SEQ ID NO: 4429007 - DNA, 25 bp, Homo sapien
gtatctatcccttccaggcgaacct

SEQ ID NO: 4429008 - DNA, 25 bp, Homo sapien
ctatcccttccaggcgaacctctgc

SEQ ID NO: 4429009 - DNA, 25 bp, Homo sapien
tcccttccaggcgaacctctgctct

SEQ ID NO: 4429010 - DNA, 25 bp, Homo sapien
atctatcccttccaggcgaacctct

SEQ ID NO: 4429011 - DNA, 25 bp, Homo sapien
cacaaaacattgcatatggcacaga

SEQ ID NO: 4429012 - DNA, 25 bp, Homo sapien
ccatccacaaaacattgcatatggc

SEQ ID NO: 4429013 - DNA, 25 bp, Homo sapien
tccacaaaacattgcatatggcaca

SEQ ID NO: 4429014 - DNA, 25 bp, Homo sapien
tttgccatccacaaaacattgcata

SEQ ID NO: 4429015 - DNA, 25 bp, Homo sapien
attctgttgccacagcttccttaat

SEQ ID NO: 4429016 - DNA, 25 bp, Homo sapien
aaaacattctgttgccacagcttcc

SEQ ID NO: 4429017 - DNA, 25 bp, Homo sapien
gttgccacagcttccttaattaaga

SEQ ID NO: 4429018 - DNA, 25 bp, Homo sapien
ttacagaaaaacattctgttgccac

SEQ ID NO: 4429019 - DNA, 25 bp, Homo sapien
aagataaagaatttgacttgggaca

SEQ ID NO: 4429020 - DNA, 25 bp, Homo sapien
ataaagaatttgacttgggacactg

SEQ ID NO: 4429021 - DNA, 25 bp, Homo sapien
ataaagataaagaatttgacttggg

SEQ ID NO: 4429022 - DNA, 25 bp, Homo sapien
aaagaatttgacttgggacactgcc

SEQ ID NO: 4429023 - DNA, 25 bp, Homo sapien
tacagcttgccaaaggtgacttcca

SEQ ID NO: 4429024 - DNA, 25 bp, Homo sapien
cttccagcagcatccgattaaaagg

SEQ ID NO: 4429025 - DNA, 25 bp, Homo sapien
aatcaggcgcagtgccgtctgagcg

SEQ ID NO: 4429026 - DNA, 25 bp, Homo sapien
gaggtcaaggttgtttgcgctgtgc

SEQ ID NO: 4429027 - DNA, 25 bp, Homo sapien
cccaggctcggtcccgatgggttct

SEQ ID NO: 4429028 - DNA, 25 bp, Homo sapien
gagcgagggccagcgtgccggaatt

SEQ ID NO: 4429029 - DNA, 25 bp, Homo sapien
agggagctgcacaggagccgtttcc

SEQ ID NO: 4429030 - DNA, 25 bp, Homo sapien
ttctggccctgaaacagggagctgc

SEQ ID NO: 4429031 - DNA, 25 bp, Homo sapien
tcttccaaaactgtggcagaagcac

SEQ ID NO: 4429032 - DNA, 25 bp, Homo sapien
agcattcatatcttcctcaacgttg

SEQ ID NO: 4429033 - DNA, 25 bp, Homo sapien
caatcactcggcctaggcctggagg

SEQ ID NO: 4429034 - DNA, 25 bp, Homo sapien
tgccagcttgaggtcgtattttcct

SEQ ID NO: 4429035 - DNA, 25 bp, Homo sapien
tgtgtccgaatcctctgctgagggc

SEQ ID NO: 4429036 - DNA, 25 bp, Homo sapien
tgtgtcccactggactcttatccac

SEQ ID NO: 4429037 - DNA, 25 bp, Homo sapien
gccttggactaaacaccttcctgag

SEQ ID NO: 4429038 - DNA, 25 bp, Homo sapien
tgacatcccattctaaggcccagat

SEQ ID NO: 4429039 - DNA, 25 bp, Homo sapien
caactggacagtttgtaggctgcct

SEQ ID NO: 4429040 - DNA, 25 bp, Homo sapien
tgcaggtgtgtcctgacatcccatt

SEQ ID NO: 4429041 - DNA, 25 bp, Homo sapien
gcagcagtccgcataaagtcttggt

SEQ ID NO: 4429042 - DNA, 25 bp, Homo sapien
ttaatagtgctggtaaacatcattg

SEQ ID NO: 4429043 - DNA, 25 bp, Homo sapien
cagtccgcataaagtcttggtggct

SEQ ID NO: 4429044 - DNA, 25 bp, Homo sapien
cagacaaagagtctgcagtaagtta

SEQ ID NO: 4429045 - DNA, 25 bp, Homo sapien
accttcatgagcagcgtgatccact

SEQ ID NO: 4429046 - DNA, 25 bp, Homo sapien
agctccggtgttgctccctgtacac

SEQ ID NO: 4429047 - DNA, 25 bp, Homo sapien
accagctccggtgttgctccctgta

SEQ ID NO: 4429048 - DNA, 25 bp, Homo sapien
ccttcatgagcagcgtgatccactg

SEQ ID NO: 4429049 - DNA, 25 bp, Homo sapien
ggaacttcagtacatggaggcctct

SEQ ID NO: 4429050 - DNA, 25 bp, Homo sapien
ttaccaattatcaaggacctctgcc

SEQ ID NO: 4429051 - DNA, 25 bp, Homo sapien
gaaaatctaccctgtcacttctaga

SEQ ID NO: 4429052 - DNA, 25 bp, Homo sapien
ggatttaccacttaagagaaaagca

SEQ ID NO: 4429053 - DNA, 25 bp, Homo sapien
agtagctgggattataggcactcac

SEQ ID NO: 4429054 - DNA, 25 bp, Homo sapien
caagcccggctcattttttttggat

SEQ ID NO: 4429055 - DNA, 25 bp, Homo sapien
cgattctccttgcttcagcttcctg

SEQ ID NO: 4429056 - DNA, 25 bp, Homo sapien
ttataggcactcaccaccaagcccg

SEQ ID NO: 4429057 - DNA, 25 bp, Homo sapien
cttgcaacaaatgcacagctaagat

SEQ ID NO: 4429058 - DNA, 25 bp, Homo sapien
gcttgcaacaaatgcacagctaaga

SEQ ID NO: 4429059 - DNA, 25 bp, Homo sapien
gatgtacttgttgatgagcccattc

SEQ ID NO: 4429060 - DNA, 25 bp, Homo sapien
agcggagctgggagttgatgtactt

SEQ ID NO: 4429061 - DNA, 25 bp, Homo sapien
gtacttgttgatgagcccattccac

SEQ ID NO: 4429062 - DNA, 25 bp, Homo sapien
ttgatgtacttgttgatgagcccat

SEQ ID NO: 4429063 - DNA, 25 bp, Homo sapien
ccccacttcagggttctcggagtcg

SEQ ID NO: 4429064 - DNA, 25 bp, Homo sapien
ccacttcagggttctcggagtcggg

SEQ ID NO: 4429065 - DNA, 25 bp, Homo sapien
ctcggagtcggggaagtagtcctct

SEQ ID NO: 4429066 - DNA, 25 bp, Homo sapien
agtcggggaagtagtcctctaactg

SEQ ID NO: 4429067 - DNA, 25 bp, Homo sapien
cgagtcatggtgacttctccaaagt

SEQ ID NO: 4429068 - DNA, 25 bp, Homo sapien
ccttcagggtgatgcgagtcatggt

SEQ ID NO: 4429069 - DNA, 25 bp, Homo sapien
ggtgatgcgagtcatggtgacttct

SEQ ID NO: 4429070 - DNA, 25 bp, Homo sapien
gcccttcagggtgatgcgagtcatg

SEQ ID NO: 4429071 - DNA, 25 bp, Homo sapien
taaaggcaggatagagatttacaca

SEQ ID NO: 4429072 - DNA, 25 bp, Homo sapien
catgggcttaatcctgaaatgccac

SEQ ID NO: 4429073 - DNA, 25 bp, Homo sapien
catcagtgtggtggttactatcttc

SEQ ID NO: 4429074 - DNA, 25 bp, Homo sapien
cagagtgtggccaatatgactaaca

SEQ ID NO: 4429075 - DNA, 25 bp, Homo sapien
tgcaaaggcctgtttagtcgatttc

SEQ ID NO: 4429076 - DNA, 25 bp, Homo sapien
tgagcccagacagacagcatgggct

SEQ ID NO: 4429077 - DNA, 25 bp, Homo sapien
ttccagcgaggttcaccaactgagc

SEQ ID NO: 4429078 - DNA, 25 bp, Homo sapien
gttcacattaaaggccacggcaggg

SEQ ID NO: 4429079 - DNA, 25 bp, Homo sapien
gagtaacgctctgcccttcaggaat

SEQ ID NO: 4429080 - DNA, 25 bp, Homo sapien
tcggacactggctcaactaactggc

SEQ ID NO: 4429081 - DNA, 25 bp, Homo sapien
tgaagatcgcagcaatgcccaaggc

SEQ ID NO: 4429082 - DNA, 25 bp, Homo sapien
gacaggtttattcaccacgatggga

SEQ ID NO: 4429083 - DNA, 25 bp, Homo sapien
gctggctgagacaggatctgccgca

SEQ ID NO: 4429084 - DNA, 25 bp, Homo sapien
cagcgcccgacctgctttcaggatg

SEQ ID NO: 4429085 - DNA, 25 bp, Homo sapien
tgctttcaggatgtatagcttcaac

SEQ ID NO: 4429086 - DNA, 25 bp, Homo sapien
aggatgtatagcttcaactgctggc

SEQ ID NO: 4429087 - DNA, 25 bp, Homo sapien
gtgtgaacacttccagtctcctgaa

SEQ ID NO: 4429088 - DNA, 25 bp, Homo sapien
tgtgtgaacacttccagtctcctga

SEQ ID NO: 4429089 - DNA, 25 bp, Homo sapien
ctgtgtgaacacttccagtctcctg

SEQ ID NO: 4429090 - DNA, 25 bp, Homo sapien
tgtgaacacttccagtctcctgaac

SEQ ID NO: 4429091 - DNA, 25 bp, Homo sapien
gcaggccacgtgtctgttttgtaca

SEQ ID NO: 4429092 - DNA, 25 bp, Homo sapien
tggttgctgggcaggccacgtgtct

SEQ ID NO: 4429093 - DNA, 25 bp, Homo sapien
tttctactgcccttcttataaagat

SEQ ID NO: 4429094 - DNA, 25 bp, Homo sapien
atgaactgattattcacttcctttg

SEQ ID NO: 4429095 - DNA, 25 bp, Homo sapien
aaagtatttcggaggatgtgcatag

SEQ ID NO: 4429096 - DNA, 25 bp, Homo sapien
gcaaatactacaccattttatagaa

SEQ ID NO: 4429097 - DNA, 25 bp, Homo sapien
aatactacaccattttatagaaggg

SEQ ID NO: 4429098 - DNA, 25 bp, Homo sapien
ttttaaagtatttcggaggatgtgc

SEQ ID NO: 4429099 - DNA, 25 bp, Homo sapien
aaaaccctgagctccaagaagagga

SEQ ID NO: 4429100 - DNA, 25 bp, Homo sapien
accactcatcgaaaaaccctgagct

SEQ ID NO: 4429101 - DNA, 25 bp, Homo sapien
gaggagagctgctcaacgtgcttcc

SEQ ID NO: 4429102 - DNA, 25 bp, Homo sapien
aaagactcaccacgttcactcctct

SEQ ID NO: 4429103 - DNA, 25 bp, Homo sapien
aaggtcaggtgataccactgctcca

SEQ ID NO: 4429104 - DNA, 25 bp, Homo sapien
ggtcaggtgataccactgctccatc

SEQ ID NO: 4429105 - DNA, 25 bp, Homo sapien
caaggtcaggtgataccactgctcc

SEQ ID NO: 4429106 - DNA, 25 bp, Homo sapien
aggtcaggtgataccactgctccat

SEQ ID NO: 4429107 - DNA, 25 bp, Homo sapien
ttcacaggagacggctgggtggccg

SEQ ID NO: 4429108 - DNA, 25 bp, Homo sapien
cagctgctgcaagaggatcatgggg

SEQ ID NO: 4429109 - DNA, 25 bp, Homo sapien
ggggctgcggcccttcaggagacat

SEQ ID NO: 4429110 - DNA, 25 bp, Homo sapien
caggagacggctgggtggccgaggc

SEQ ID NO: 4429111 - DNA, 25 bp, Homo sapien
gagcgtttaacccatgctgcatcta

SEQ ID NO: 4429112 - DNA, 25 bp, Homo sapien
taaaaactgtcaaggctgcatggct

SEQ ID NO: 4429113 - DNA, 25 bp, Homo sapien
gcagactatgcacaaacatggttaa

SEQ ID NO: 4429114 - DNA, 25 bp, Homo sapien
aaaaagatcccttcatgaagatgtg

SEQ ID NO: 4429115 - DNA, 25 bp, Homo sapien
gagtcctgacgagcctctttgaata

SEQ ID NO: 4429116 - DNA, 25 bp, Homo sapien
cctgacgagcctctttgaataattc

SEQ ID NO: 4429117 - DNA, 25 bp, Homo sapien
tggagagagcggagaggctggcggc

SEQ ID NO: 4429118 - DNA, 25 bp, Homo sapien
tgccagagtcctgacgagcctcttt

SEQ ID NO: 4429119 - DNA, 25 bp, Homo sapien
gaaagattttggaatgaacatctct

SEQ ID NO: 4429120 - DNA, 25 bp, Homo sapien
taatcctctatgttgccagccatga

SEQ ID NO: 4429121 - DNA, 25 bp, Homo sapien
tctatgcgaacgtcccgtagccctg

SEQ ID NO: 4429122 - DNA, 25 bp, Homo sapien
aatcacgtcgcctcctctatgcgaa

SEQ ID NO: 4429123 - DNA, 25 bp, Homo sapien
gctcggcacaaagggaccgctggaa

SEQ ID NO: 4429124 - DNA, 25 bp, Homo sapien
ggactacccgcaaatctacagctga

SEQ ID NO: 4429125 - DNA, 25 bp, Homo sapien
gagggaaaaccacgaaatatgcgga

SEQ ID NO: 4429126 - DNA, 25 bp, Homo sapien
taaactgaagcaccactgaagagcc

SEQ ID NO: 4429127 - DNA, 25 bp, Homo sapien
tcctgcactgcaggggctggggtcc

SEQ ID NO: 4429128 - DNA, 25 bp, Homo sapien
cttcctgcactgcaggggctggggt

SEQ ID NO: 4429129 - DNA, 25 bp, Homo sapien
gcactgcaggggctggggtcccggc

SEQ ID NO: 4429130 - DNA, 25 bp, Homo sapien
cctgcactgcaggggctggggtccc

SEQ ID NO: 4429131 - DNA, 25 bp, Homo sapien
atcctgggctcgaagggtgagtgga

SEQ ID NO: 4429132 - DNA, 25 bp, Homo sapien
caaatcctgggctcgaagggtgagt

SEQ ID NO: 4429133 - DNA, 25 bp, Homo sapien
tgggctcgaagggtgagtggactcc

SEQ ID NO: 4429134 - DNA, 25 bp, Homo sapien
tcaaatcctgggctcgaagggtgag

SEQ ID NO: 4429135 - DNA, 25 bp, Homo sapien
cacggcgacaggcgtggtggcctca

SEQ ID NO: 4429136 - DNA, 25 bp, Homo sapien
acggcgacaggcgtggtggcctcac

SEQ ID NO: 4429137 - DNA, 25 bp, Homo sapien
ctgcacggcgacaggcgtggtggcc

SEQ ID NO: 4429138 - DNA, 25 bp, Homo sapien
tgcacggcgacaggcgtggtggcct

SEQ ID NO: 4429139 - DNA, 25 bp, Homo sapien
agctgcaccacgatcggcagagcgg

SEQ ID NO: 4429140 - DNA, 25 bp, Homo sapien
gacttcagggcaaactcgatgttcc

SEQ ID NO: 4429141 - DNA, 25 bp, Homo sapien
tcttcactctggcagggcggatgtg

SEQ ID NO: 4429142 - DNA, 25 bp, Homo sapien
gtgagagacttcagggcaaactcga

SEQ ID NO: 4429143 - DNA, 25 bp, Homo sapien
tcctcgtcagaatactcgtcggaca

SEQ ID NO: 4429144 - DNA, 25 bp, Homo sapien
tctgagagctccgtgacctgtatgt

SEQ ID NO: 4429145 - DNA, 25 bp, Homo sapien
gaatactcgtcggacaccgtgtctg

SEQ ID NO: 4429146 - DNA, 25 bp, Homo sapien
acctgtatgtcggagtggtccagca

SEQ ID NO: 4429147 - DNA, 25 bp, Homo sapien
cattacccaagaaaccagctcggtt

SEQ ID NO: 4429148 - DNA, 25 bp, Homo sapien
atcattacccaagaaaccagctcgg

SEQ ID NO: 4429149 - DNA, 25 bp, Homo sapien
tcattacccaagaaaccagctcggt

SEQ ID NO: 4429150 - DNA, 25 bp, Homo sapien
ggctccagcttaagacaattactca

SEQ ID NO: 4429151 - DNA, 25 bp, Homo sapien
gaggctccagcttaagacaattact

SEQ ID NO: 4429152 - DNA, 25 bp, Homo sapien
tgaaaaacggatcgaggctccagct

SEQ ID NO: 4429153 - DNA, 25 bp, Homo sapien
ttgctgagtgaaaaacggatcgagg

SEQ ID NO: 4429154 - DNA, 25 bp, Homo sapien
tagtgtaccatgagctcactggtca

SEQ ID NO: 4429155 - DNA, 25 bp, Homo sapien
ggtcaggtatgtcttccagcaccag

SEQ ID NO: 4429156 - DNA, 25 bp, Homo sapien
cctttactgtagtctgctctctctc

SEQ ID NO: 4429157 - DNA, 25 bp, Homo sapien
caccttctagtgtaccatgagctca

SEQ ID NO: 4429158 - DNA, 25 bp, Homo sapien
tgacatatatacaggtgaaatgaga

SEQ ID NO: 4429159 - DNA, 25 bp, Homo sapien
gacatatatacaggtgaaatgagat

SEQ ID NO: 4429160 - DNA, 25 bp, Homo sapien
tctgacacaacaggattagggtctt

SEQ ID NO: 4429161 - DNA, 25 bp, Homo sapien
gaaggagggttactatgaaatgaat

SEQ ID NO: 4429162 - DNA, 25 bp, Homo sapien
gaagtcccgactcctaatgtggcag

SEQ ID NO: 4429163 - DNA, 25 bp, Homo sapien
gagaggaagatgttagccacaagga

SEQ ID NO: 4429164 - DNA, 25 bp, Homo sapien
agatggggccggagggagtacatgc

SEQ ID NO: 4429165 - DNA, 25 bp, Homo sapien
cctatgaagcttcctgcctgagatt

SEQ ID NO: 4429166 - DNA, 25 bp, Homo sapien
tgcctatgaagcttcctgcctgaga

SEQ ID NO: 4429167 - DNA, 25 bp, Homo sapien
gccggagggagtacatgcctatgaa

SEQ ID NO: 4429168 - DNA, 25 bp, Homo sapien
gctgacaagacctaacccacccaaa

SEQ ID NO: 4429169 - DNA, 25 bp, Homo sapien
agcaggctgacaagacctaacccac

SEQ ID NO: 4429170 - DNA, 25 bp, Homo sapien
aggctgacaagacctaacccaccca

SEQ ID NO: 4429171 - DNA, 25 bp, Homo sapien
caggctgacaagacctaacccaccc

SEQ ID NO: 4429172 - DNA, 25 bp, Homo sapien
cacttcttcgtatgttcggcagcat

SEQ ID NO: 4429173 - DNA, 25 bp, Homo sapien
cacacttcttcgtatgttcggcagc

SEQ ID NO: 4429174 - DNA, 25 bp, Homo sapien
tcttcgtatgttcggcagcatctaa

SEQ ID NO: 4429175 - DNA, 25 bp, Homo sapien
ttcgcacacttcttcgtatgttcgg

SEQ ID NO: 4429176 - DNA, 25 bp, Homo sapien
gatcatgcaatccatctctgtccag

SEQ ID NO: 4429177 - DNA, 25 bp, Homo sapien
ttgagatcatgcaatccatctctgt

SEQ ID NO: 4429178 - DNA, 25 bp, Homo sapien
cacactgcacattgagatcatgcaa

SEQ ID NO: 4429179 - DNA, 25 bp, Homo sapien
agtcacactgcacattgagatcatg

SEQ ID NO: 4429180 - DNA, 25 bp, Homo sapien
tgacagaggctttgacccgcacttt

SEQ ID NO: 4429181 - DNA, 25 bp, Homo sapien
ttcacaacccccacactctgatgag

SEQ ID NO: 4429182 - DNA, 25 bp, Homo sapien
cagaggctttgacccgcactttatc

SEQ ID NO: 4429183 - DNA, 25 bp, Homo sapien
aacccccacactctgatgagtcaca

SEQ ID NO: 4429184 - DNA, 25 bp, Homo sapien
caaaaatcacctgatccatcttcct

SEQ ID NO: 4429185 - DNA, 25 bp, Homo sapien
gccaggacacaacaaaaatcacctg

SEQ ID NO: 4429186 - DNA, 25 bp, Homo sapien
aacaaaaatcacctgatccatcttc

SEQ ID NO: 4429187 - DNA, 25 bp, Homo sapien
gaaagccaggacacaacaaaaatca

SEQ ID NO: 4429188 - DNA, 25 bp, Homo sapien
accaactccatttctgatagcaacc

SEQ ID NO: 4429189 - DNA, 25 bp, Homo sapien
ttttggtcttgaaacacgtttcaca

SEQ ID NO: 4429190 - DNA, 25 bp, Homo sapien
aatctggatccattgataggaaaca

SEQ ID NO: 4429191 - DNA, 25 bp, Homo sapien
tgcctggtattgtgttttttggtct

SEQ ID NO: 4429192 - DNA, 25 bp, Homo sapien
aaatgtatgcctggtattgtgtttt

SEQ ID NO: 4429193 - DNA, 25 bp, Homo sapien
cactgtggtccacaataagtatttc

SEQ ID NO: 4429194 - DNA, 25 bp, Homo sapien
gatggttgtgcaacactgtacttaa

SEQ ID NO: 4429195 - DNA, 25 bp, Homo sapien
cagagtttctgatcggagtggtgaa

SEQ ID NO: 4429196 - DNA, 25 bp, Homo sapien
gtcatcagcgggtaggaccgtcact

SEQ ID NO: 4429197 - DNA, 25 bp, Homo sapien
tatataacacatacactccttatag

SEQ ID NO: 4429198 - DNA, 25 bp, Homo sapien
tactgacagatgtatagtggtatct

SEQ ID NO: 4429199 - DNA, 25 bp, Homo sapien
tgtcaacccttgatacattcagtct

SEQ ID NO: 4429200 - DNA, 25 bp, Homo sapien
gtatgtctagcttcttaagatcgct

SEQ ID NO: 4429201 - DNA, 25 bp, Homo sapien
gatcgctacatactgttttgcaaag

SEQ ID NO: 4429202 - DNA, 25 bp, Homo sapien
tataattctataaggccaaggagct

SEQ ID NO: 4429203 - DNA, 25 bp, Homo sapien
gaaaagaggcgttcccactctgaag

SEQ ID NO: 4429204 - DNA, 25 bp, Homo sapien
ttactgcttgaagaaccatgaggcc

SEQ ID NO: 4429205 - DNA, 25 bp, Homo sapien
caatggcacgaccacggttaacagg

SEQ ID NO: 4429206 - DNA, 25 bp, Homo sapien
gattacttcaggttgcgccagggct

SEQ ID NO: 4429207 - DNA, 25 bp, Homo sapien
tacaagttcgaagaccttgggtgct

SEQ ID NO: 4429208 - DNA, 25 bp, Homo sapien
tatattgtaacactccaccacgggc

SEQ ID NO: 4429209 - DNA, 25 bp, Homo sapien
gaaccactgctactggccgacattg

SEQ ID NO: 4429210 - DNA, 25 bp, Homo sapien
tgtttgggcgagatttataggaagt

SEQ ID NO: 4429211 - DNA, 25 bp, Homo sapien
ctttcctgtttgggcgagatttata

SEQ ID NO: 4429212 - DNA, 25 bp, Homo sapien
tcctgtttgggcgagatttatagga

SEQ ID NO: 4429213 - DNA, 25 bp, Homo sapien
tttgggcgagatttataggaagtgt

SEQ ID NO: 4429214 - DNA, 25 bp, Homo sapien
cacacgcattgtttatgacccagga

SEQ ID NO: 4429215 - DNA, 25 bp, Homo sapien
cctgggaaccaacaacaacgcatat

SEQ ID NO: 4429216 - DNA, 25 bp, Homo sapien
tgccaaggaccatatgtgctcaaga

SEQ ID NO: 4429217 - DNA, 25 bp, Homo sapien
cccggcgtgattgtgacctgtcata

SEQ ID NO: 4429218 - DNA, 25 bp, Homo sapien
ccaatgagaatctctgaacatcatc

SEQ ID NO: 4429219 - DNA, 25 bp, Homo sapien
ttccacaacaacagagtcatgcaag

SEQ ID NO: 4429220 - DNA, 25 bp, Homo sapien
tgagtagatctcaatataattctga

SEQ ID NO: 4429221 - DNA, 25 bp, Homo sapien
tgaggaattgccaaggacccagagc

SEQ ID NO: 4429222 - DNA, 25 bp, Homo sapien
tgagtctgatagtaatgaaaaagga

SEQ ID NO: 4429223 - DNA, 25 bp, Homo sapien
tgtgcccacaggagtagcagtgctg

SEQ ID NO: 4429224 - DNA, 25 bp, Homo sapien
gttcccatgtattaaacaaggtggc

SEQ ID NO: 4429225 - DNA, 25 bp, Homo sapien
gctatgaaacccacgtagtcggaca

SEQ ID NO: 4429226 - DNA, 25 bp, Homo sapien
tattacttgtaaacaaaattctgtc

SEQ ID NO: 4429227 - DNA, 25 bp, Homo sapien
tacttgtaaacaaaattctgtcaaa

SEQ ID NO: 4429228 - DNA, 25 bp, Homo sapien
acaaaattctgtcaaaaacctgaca

SEQ ID NO: 4429229 - DNA, 25 bp, Homo sapien
tctgtcaaaaacctgacaaattaaa

SEQ ID NO: 4429230 - DNA, 25 bp, Homo sapien
aactacagagttacacaagatggtg

SEQ ID NO: 4429231 - DNA, 25 bp, Homo sapien
aaataacgtgctccaagtcatgaaa

SEQ ID NO: 4429232 - DNA, 25 bp, Homo sapien
catagatagaatggaagctcttggc

SEQ ID NO: 4429233 - DNA, 25 bp, Homo sapien
gaaaagcctcagttcagcactcgtc

SEQ ID NO: 4429234 - DNA, 25 bp, Homo sapien
agcgcaaccggtgcctctggggatc

SEQ ID NO: 4429235 - DNA, 25 bp, Homo sapien
accggtgcctctggggatcggcgaa

SEQ ID NO: 4429236 - DNA, 25 bp, Homo sapien
gaagcgcaaccggtgcctctgggga

SEQ ID NO: 4429237 - DNA, 25 bp, Homo sapien
gatcggcgaagaggccctcccggag

SEQ ID NO: 4429238 - DNA, 25 bp, Homo sapien
ggcggcctcgggcttgtgctccagc

SEQ ID NO: 4429239 - DNA, 25 bp, Homo sapien
gcggcctcgggcttgtgctccagcc

SEQ ID NO: 4429240 - DNA, 25 bp, Homo sapien
acggcggcctcgggcttgtgctcca

SEQ ID NO: 4429241 - DNA, 25 bp, Homo sapien
ggcctcgggcttgtgctccagcccc

SEQ ID NO: 4429242 - DNA, 25 bp, Homo sapien
cggcagccgtgggaagcagtgttcc

SEQ ID NO: 4429243 - DNA, 25 bp, Homo sapien
agctccggcggcagccgtgggaagc

SEQ ID NO: 4429244 - DNA, 25 bp, Homo sapien
cagccgtgggaagcagtgttccaga

SEQ ID NO: 4429245 - DNA, 25 bp, Homo sapien
ggcggcagccgtgggaagcagtgtt

SEQ ID NO: 4429246 - DNA, 25 bp, Homo sapien
gcccacgcgcgccggccagagcagc

SEQ ID NO: 4429247 - DNA, 25 bp, Homo sapien
cgcgccggccagagcagcgcccacc

SEQ ID NO: 4429248 - DNA, 25 bp, Homo sapien
gccggccagagcagcgcccaccgcc

SEQ ID NO: 4429249 - DNA, 25 bp, Homo sapien
acgcgcgccggccagagcagcgccc

SEQ ID NO: 4429250 - DNA, 25 bp, Homo sapien
agctgcccgcaaagctcctgcagcg

SEQ ID NO: 4429251 - DNA, 25 bp, Homo sapien
gcccgcaaagctcctgcagcgccgc

SEQ ID NO: 4429252 - DNA, 25 bp, Homo sapien
ccagctgcccgcaaagctcctgcag

SEQ ID NO: 4429253 - DNA, 25 bp, Homo sapien
gctgcccgcaaagctcctgcagcgc

SEQ ID NO: 4429254 - DNA, 25 bp, Homo sapien
cgaagagagcgtcgcgcacggtggc

SEQ ID NO: 4429255 - DNA, 25 bp, Homo sapien
ttagccgcgaagagagcgtcgcgca

SEQ ID NO: 4429256 - DNA, 25 bp, Homo sapien
gccgcgaagagagcgtcgcgcacgg

SEQ ID NO: 4429257 - DNA, 25 bp, Homo sapien
cgcgaagagagcgtcgcgcacggtg

SEQ ID NO: 4429258 - DNA, 25 bp, Homo sapien
gtcagccagggctctcggcgccggg

SEQ ID NO: 4429259 - DNA, 25 bp, Homo sapien
cccagcggcaagtacactaggctct

SEQ ID NO: 4429260 - DNA, 25 bp, Homo sapien
gatcccgcgcaggtgagggtactgg

SEQ ID NO: 4429261 - DNA, 25 bp, Homo sapien
tttcccgttacaacatcctgctctg

SEQ ID NO: 4429262 - DNA, 25 bp, Homo sapien
tggcttttccgtgtccttgaataac

SEQ ID NO: 4429263 - DNA, 25 bp, Homo sapien
gttggcttttccgtgtccttgaata

SEQ ID NO: 4429264 - DNA, 25 bp, Homo sapien
ggtgttggcttttccgtgtccttga

SEQ ID NO: 4429265 - DNA, 25 bp, Homo sapien
gtgttggcttttccgtgtccttgaa

SEQ ID NO: 4429266 - DNA, 25 bp, Homo sapien
aaatggccgcaataagtactggaag

SEQ ID NO: 4429267 - DNA, 25 bp, Homo sapien
ataagtactggaagaacgtggttgc

SEQ ID NO: 4429268 - DNA, 25 bp, Homo sapien
tggccgcaataagtactggaagaac

SEQ ID NO: 4429269 - DNA, 25 bp, Homo sapien
tggaagaacgtggttgccacggtaa

SEQ ID NO: 4429270 - DNA, 25 bp, Homo sapien
aggctctaagctgagcaccacctgg

SEQ ID NO: 4429271 - DNA, 25 bp, Homo sapien
taagctgagcaccacctggaagaca

SEQ ID NO: 4429272 - DNA, 25 bp, Homo sapien
taaggctctaagctgagcaccacct

SEQ ID NO: 4429273 - DNA, 25 bp, Homo sapien
gagcaccacctggaagacaaaagga

SEQ ID NO: 4429274 - DNA, 25 bp, Homo sapien
acccttctaggacctaggtcatcct

SEQ ID NO: 4429275 - DNA, 25 bp, Homo sapien
actacccttctaggacctaggtcat

SEQ ID NO: 4429276 - DNA, 25 bp, Homo sapien
tacccttctaggacctaggtcatcc

SEQ ID NO: 4429277 - DNA, 25 bp, Homo sapien
ccttctaggacctaggtcatcctca

SEQ ID NO: 4429278 - DNA, 25 bp, Homo sapien
ttatattttggcacacttgcttcca

SEQ ID NO: 4429279 - DNA, 25 bp, Homo sapien
catatggatagtttgaccaaaaaac

SEQ ID NO: 4429280 - DNA, 25 bp, Homo sapien
agacaggctcatatggatagtttga

SEQ ID NO: 4429281 - DNA, 25 bp, Homo sapien
gtttctatgactagctagacagaca

SEQ ID NO: 4429282 - DNA, 25 bp, Homo sapien
tccaacctgggaattgctgtggccc

SEQ ID NO: 4429283 - DNA, 25 bp, Homo sapien
ccaacctgggaattgctgtggccca

SEQ ID NO: 4429284 - DNA, 25 bp, Homo sapien
taatattgttatagcagccttagcc

SEQ ID NO: 4429285 - DNA, 25 bp, Homo sapien
agccttagccaactaagacaggtgt

SEQ ID NO: 4429286 - DNA, 25 bp, Homo sapien
aatacatgtccgttgttgaagccac

SEQ ID NO: 4429287 - DNA, 25 bp, Homo sapien
agaggatccgcaccagacagtgaat

SEQ ID NO: 4429288 - DNA, 25 bp, Homo sapien
ccaactgtgtagtaagcagtatttc

SEQ ID NO: 4429289 - DNA, 25 bp, Homo sapien
caactgtgtagtaagcagtatttct

SEQ ID NO: 4429290 - DNA, 25 bp, Homo sapien
aactgtgtagtaagcagtatttctt

SEQ ID NO: 4429291 - DNA, 25 bp, Homo sapien
attgagcatctctagatgatgggat

SEQ ID NO: 4429292 - DNA, 25 bp, Homo sapien
tttctttgttttgctatgtgctaac

SEQ ID NO: 4429293 - DNA, 25 bp, Homo sapien
gtgcccagccaaccattgagcatct

SEQ ID NO: 4429294 - DNA, 25 bp, Homo sapien
cacgtgccaccacattggactttgt

SEQ ID NO: 4429295 - DNA, 25 bp, Homo sapien
tggaaatcacggtatatccatataa

SEQ ID NO: 4429296 - DNA, 25 bp, Homo sapien
tcaaaacagcggaaatttggaaatc

SEQ ID NO: 4429297 - DNA, 25 bp, Homo sapien
taaaggaaagttcactacactactg

SEQ ID NO: 4429298 - DNA, 25 bp, Homo sapien
tgtgtaaaggaaagttcactacact

SEQ ID NO: 4429299 - DNA, 25 bp, Homo sapien
tgcctccaagacagtcgtgggaaca

SEQ ID NO: 4429300 - DNA, 25 bp, Homo sapien
gcagaagccactcacgaaccaatgg

SEQ ID NO: 4429301 - DNA, 25 bp, Homo sapien
cagacccaagtcaatctaaggttta

SEQ ID NO: 4429302 - DNA, 25 bp, Homo sapien
gaacagtatggagccagcagcagaa

SEQ ID NO: 4429303 - DNA, 25 bp, Homo sapien
atggatcgtaatagacaacttcatc

SEQ ID NO: 4429304 - DNA, 25 bp, Homo sapien
tccgaattcttatcgtcctgcagcc

SEQ ID NO: 4429305 - DNA, 25 bp, Homo sapien
tcacttccgaattcttatcgtcctg

SEQ ID NO: 4429306 - DNA, 25 bp, Homo sapien
tgactaagttcctctggactttcac

SEQ ID NO: 4429307 - DNA, 25 bp, Homo sapien
ccccaccacagtcaatgactaagtt

SEQ ID NO: 4429308 - DNA, 25 bp, Homo sapien
gatcctgccccgtttaatagactcc

SEQ ID NO: 4429309 - DNA, 25 bp, Homo sapien
cacagatcctgccccgtttaataga

SEQ ID NO: 4429310 - DNA, 25 bp, Homo sapien
cagatcctgccccgtttaatagact

SEQ ID NO: 4429311 - DNA, 25 bp, Homo sapien
acacagatcctgccccgtttaatag

SEQ ID NO: 4429312 - DNA, 25 bp, Homo sapien
caatctgagccaatgattttctttg

SEQ ID NO: 4429313 - DNA, 25 bp, Homo sapien
gcctgttgcaatctgagccaatgat

SEQ ID NO: 4429314 - DNA, 25 bp, Homo sapien
gctgacgagaatatcttatgctttc

SEQ ID NO: 4429315 - DNA, 25 bp, Homo sapien
ctgaatactgtgatgctgacgagaa

SEQ ID NO: 4429316 - DNA, 25 bp, Homo sapien
aaaaatgtgtggcatacaataaaaa

SEQ ID NO: 4429317 - DNA, 25 bp, Homo sapien
tatttaagcagatgtatatttgtaa

SEQ ID NO: 4429318 - DNA, 25 bp, Homo sapien
tgtaaattgctcaacattacaaaaa

SEQ ID NO: 4429319 - DNA, 25 bp, Homo sapien
tacaaaaatgtgtggcatacaataa

SEQ ID NO: 4429320 - DNA, 25 bp, Homo sapien
tttgctcctttttatcttgtctctt

SEQ ID NO: 4429321 - DNA, 25 bp, Homo sapien
tgctcctttttatcttgtctctttt

SEQ ID NO: 4429322 - DNA, 25 bp, Homo sapien
ttttgctcctttttatcttgtctct

SEQ ID NO: 4429323 - DNA, 25 bp, Homo sapien
cttttgctcctttttatcttgtctc

SEQ ID NO: 4429324 - DNA, 25 bp, Homo sapien
atctttaaatgctctcaatcgttgg

SEQ ID NO: 4429325 - DNA, 25 bp, Homo sapien
tgacgttcttggttgacccattctt

SEQ ID NO: 4429326 - DNA, 25 bp, Homo sapien
tgtttgacgttcttggttgacccat

SEQ ID NO: 4429327 - DNA, 25 bp, Homo sapien
caatcgttggagtgtttgacgttct

SEQ ID NO: 4429328 - DNA, 25 bp, Homo sapien
tgttctgaatgacctgttcttaata

SEQ ID NO: 4429329 - DNA, 25 bp, Homo sapien
catgttctgaatgacctgttcttaa

SEQ ID NO: 4429330 - DNA, 25 bp, Homo sapien
tgacctgttcttaatactttcctct

SEQ ID NO: 4429331 - DNA, 25 bp, Homo sapien
ctgaatgacctgttcttaatacttt

SEQ ID NO: 4429332 - DNA, 25 bp, Homo sapien
gggtacagacacttatgagaaaaca

SEQ ID NO: 4429333 - DNA, 25 bp, Homo sapien
gcacaattggtatttttcctcccaa

SEQ ID NO: 4429334 - DNA, 25 bp, Homo sapien
gtgccagactccctatttactttat

SEQ ID NO: 4429335 - DNA, 25 bp, Homo sapien
tctatatattaccaaacaacgtttg

SEQ ID NO: 4429336 - DNA, 25 bp, Homo sapien
tatatggttatgcagagataacaca

SEQ ID NO: 4429337 - DNA, 25 bp, Homo sapien
tatgcagagataacacactgtcaat

SEQ ID NO: 4429338 - DNA, 25 bp, Homo sapien
atacatatatggttatgcagagata

SEQ ID NO: 4429339 - DNA, 25 bp, Homo sapien
ggttatgcagagataacacactgtc

SEQ ID NO: 4429340 - DNA, 25 bp, Homo sapien
catatgcagatctacaacgtgtgaa

SEQ ID NO: 4429341 - DNA, 25 bp, Homo sapien
gattatatcatgaccactcccagtg

SEQ ID NO: 4429342 - DNA, 25 bp, Homo sapien
taaattggcagatggaataatgact

SEQ ID NO: 4429343 - DNA, 25 bp, Homo sapien
cttttaaagggtatcttacagtctg

SEQ ID NO: 4429344 - DNA, 25 bp, Homo sapien
aactagataaaatttcacatcgcaa

SEQ ID NO: 4429345 - DNA, 25 bp, Homo sapien
gggaaaggactatagattaactaga

SEQ ID NO: 4429346 - DNA, 25 bp, Homo sapien
tatttacataatctggagtgaggca

SEQ ID NO: 4429347 - DNA, 25 bp, Homo sapien
ttcacatcgcaattttccaaacaaa

SEQ ID NO: 4429348 - DNA, 25 bp, Homo sapien
caatgtagtggcagtttttccaaaa

SEQ ID NO: 4429349 - DNA, 25 bp, Homo sapien
ccaaaaatcactatggatgataaga

SEQ ID NO: 4429350 - DNA, 25 bp, Homo sapien
aatgccaatgtagtggcagtttttc

SEQ ID NO: 4429351 - DNA, 25 bp, Homo sapien
tccaaaaatcactatggatgataag

SEQ ID NO: 4429352 - DNA, 25 bp, Homo sapien
gatccccaggagcgcatgcacatcc

SEQ ID NO: 4429353 - DNA, 25 bp, Homo sapien
aggcagacgcggaggatccccagga

SEQ ID NO: 4429354 - DNA, 25 bp, Homo sapien
ctgtgggaaggcagacgcggaggat

SEQ ID NO: 4429355 - DNA, 25 bp, Homo sapien
tgggaaggcagacgcggaggatccc

SEQ ID NO: 4429356 - DNA, 25 bp, Homo sapien
gcgaggatttttcagtactactgta

SEQ ID NO: 4429357 - DNA, 25 bp, Homo sapien
gcagtttttttgtgttcggtggcgc

SEQ ID NO: 4429358 - DNA, 25 bp, Homo sapien
aacctaaattgcgaggatttttcag

SEQ ID NO: 4429359 - DNA, 25 bp, Homo sapien
ttttgtgttcggtggcgctctgaaa

SEQ ID NO: 4429360 - DNA, 25 bp, Homo sapien
ttatatgtacctttgagatttcaat

SEQ ID NO: 4429361 - DNA, 25 bp, Homo sapien
tgacaagctcgtttgcatacatgtt

SEQ ID NO: 4429362 - DNA, 25 bp, Homo sapien
gacaagctcgtttgcatacatgttt

SEQ ID NO: 4429363 - DNA, 25 bp, Homo sapien
caagctcgtttgcatacatgtttat

SEQ ID NO: 4429364 - DNA, 25 bp, Homo sapien
tctgacaagctcgtttgcatacatg

SEQ ID NO: 4429365 - DNA, 25 bp, Homo sapien
gcagccggtggcaagggcggcggcg

SEQ ID NO: 4429366 - DNA, 25 bp, Homo sapien
caagggcggcggcggcccggcgatc

SEQ ID NO: 4429367 - DNA, 25 bp, Homo sapien
gcggcggcccggcgatcccggcgaa

SEQ ID NO: 4429368 - DNA, 25 bp, Homo sapien
gcggcggcggcccggcgatcccggc

SEQ ID NO: 4429369 - DNA, 25 bp, Homo sapien
gaacaggcccacgtagaacatagag

SEQ ID NO: 4429370 - DNA, 25 bp, Homo sapien
tcagcacattgacgaagaacaggcc

SEQ ID NO: 4429371 - DNA, 25 bp, Homo sapien
tcaaagacgtcgagctccgagtcag

SEQ ID NO: 4429372 - DNA, 25 bp, Homo sapien
tccgagtcagcatcgtaaaggcccg

SEQ ID NO: 4429373 - DNA, 25 bp, Homo sapien
acaggaacctctctgttggcacgaa

SEQ ID NO: 4429374 - DNA, 25 bp, Homo sapien
ctgggtccaaacaggaacctctctg

SEQ ID NO: 4429375 - DNA, 25 bp, Homo sapien
caggaacctctctgttggcacgaag

SEQ ID NO: 4429376 - DNA, 25 bp, Homo sapien
gtccaaacaggaacctctctgttgg

SEQ ID NO: 4429377 - DNA, 25 bp, Homo sapien
gccaggccatcggtgtgacgctgca

SEQ ID NO: 4429378 - DNA, 25 bp, Homo sapien
gccatcggtgtgacgctgcaggcag

SEQ ID NO: 4429379 - DNA, 25 bp, Homo sapien
aggccatcggtgtgacgctgcaggc

SEQ ID NO: 4429380 - DNA, 25 bp, Homo sapien
aggccaggccatcggtgtgacgctg

SEQ ID NO: 4429381 - DNA, 25 bp, Homo sapien
taagaccagcctcgggctaaaccca

SEQ ID NO: 4429382 - DNA, 25 bp, Homo sapien
ctgaaacagtcgctgcatctaagac

SEQ ID NO: 4429383 - DNA, 25 bp, Homo sapien
aaacagtcgctgcatctaagaccag

SEQ ID NO: 4429384 - DNA, 25 bp, Homo sapien
tctaagaccagcctcgggctaaacc

SEQ ID NO: 4429385 - DNA, 25 bp, Homo sapien
agcatgatatctgttttgccaactt

SEQ ID NO: 4429386 - DNA, 25 bp, Homo sapien
gcatgatatctgttttgccaacttg

SEQ ID NO: 4429387 - DNA, 25 bp, Homo sapien
cagcatgatatctgttttgccaact

SEQ ID NO: 4429388 - DNA, 25 bp, Homo sapien
cagccaggggagtaacgtggcactc

SEQ ID NO: 4429389 - DNA, 25 bp, Homo sapien
gccaggggagtaacgtggcactcac

SEQ ID NO: 4429390 - DNA, 25 bp, Homo sapien
agccaggggagtaacgtggcactca

SEQ ID NO: 4429391 - DNA, 25 bp, Homo sapien
gtgactgcgtcagttgcaagagcac

SEQ ID NO: 4429392 - DNA, 25 bp, Homo sapien
gtgctgcagtgactgcgtcagttgc

SEQ ID NO: 4429393 - DNA, 25 bp, Homo sapien
tgcagtgactgcgtcagttgcaaga

SEQ ID NO: 4429394 - DNA, 25 bp, Homo sapien
cagtgactgcgtcagttgcaagagc

SEQ ID NO: 4429395 - DNA, 25 bp, Homo sapien
ctccatgaccactaggcatttcaag

SEQ ID NO: 4429396 - DNA, 25 bp, Homo sapien
catttcaaggactggcaggccgtag

SEQ ID NO: 4429397 - DNA, 25 bp, Homo sapien
catctccatgaccactaggcatttc

SEQ ID NO: 4429398 - DNA, 25 bp, Homo sapien
ctggcaggccgtagaagtttcttct

SEQ ID NO: 4429399 - DNA, 25 bp, Homo sapien
taaatgtgagctaaatgcatcaagc

SEQ ID NO: 4429400 - DNA, 25 bp, Homo sapien
caagctgtcgttccagtgtggtcag

SEQ ID NO: 4429401 - DNA, 25 bp, Homo sapien
gtaaatgtgagctaaatgcatcaag

SEQ ID NO: 4429402 - DNA, 25 bp, Homo sapien
aatgcatcaagctgtcgttccagtg

SEQ ID NO: 4429403 - DNA, 25 bp, Homo sapien
atttagtcaatatagactgaggtac

SEQ ID NO: 4429404 - DNA, 25 bp, Homo sapien
gatttagtcaatatagactgaggta

SEQ ID NO: 4429405 - DNA, 25 bp, Homo sapien
tagactgaggtacagtgtctccaga

SEQ ID NO: 4429406 - DNA, 25 bp, Homo sapien
tcattgcagtaattcaggcagttct

SEQ ID NO: 4429407 - DNA, 25 bp, Homo sapien
gcagttctttagtcaactgatcaac

SEQ ID NO: 4429408 - DNA, 25 bp, Homo sapien
cattgcagtaattcaggcagttctt

SEQ ID NO: 4429409 - DNA, 25 bp, Homo sapien
caggcagttctttagtcaactgatc

SEQ ID NO: 4429410 - DNA, 25 bp, Homo sapien
cccttaagataagaatgaaacccat

SEQ ID NO: 4429411 - DNA, 25 bp, Homo sapien
ggtctttgctggattagcagaaggg

SEQ ID NO: 4429412 - DNA, 25 bp, Homo sapien
agaagggatggcagcattcagctca

SEQ ID NO: 4429413 - DNA, 25 bp, Homo sapien
gaagggatggcagcattcagctcag

SEQ ID NO: 4429414 - DNA, 25 bp, Homo sapien
gtctttgctggattagcagaaggga

SEQ ID NO: 4429415 - DNA, 25 bp, Homo sapien
ccacagtcttagttaactccttgat

SEQ ID NO: 4429416 - DNA, 25 bp, Homo sapien
accagagactcgaggtttctgctaa

SEQ ID NO: 4429417 - DNA, 25 bp, Homo sapien
cacagtcttagttaactccttgata

SEQ ID NO: 4429418 - DNA, 25 bp, Homo sapien
tctgctaaatgtaggcgaatttcct

SEQ ID NO: 4429419 - DNA, 25 bp, Homo sapien
ttgcttgtcatgtcaaaattcacag

SEQ ID NO: 4429420 - DNA, 25 bp, Homo sapien
tagactcgatctagttcagtaacag

SEQ ID NO: 4429421 - DNA, 25 bp, Homo sapien
tgagccagggctgtcaaaaacttgc

SEQ ID NO: 4429422 - DNA, 25 bp, Homo sapien
gttgtaagacctccatagactcgat

SEQ ID NO: 4429423 - DNA, 25 bp, Homo sapien
agttcaacaaagttgtcacatgcag

SEQ ID NO: 4429424 - DNA, 25 bp, Homo sapien
tagattgcttcattttcgaaaattc

SEQ ID NO: 4429425 - DNA, 25 bp, Homo sapien
aaagttgtcacatgcagtagctaaa

SEQ ID NO: 4429426 - DNA, 25 bp, Homo sapien
ctcttaagttagcttcattattaga

SEQ ID NO: 4429427 - DNA, 25 bp, Homo sapien
acatctgtacttgctagctatggtt

SEQ ID NO: 4429428 - DNA, 25 bp, Homo sapien
gaacctgaccaggatttcagtcaac

SEQ ID NO: 4429429 - DNA, 25 bp, Homo sapien
cctgaccaggatttcagtcaactca

SEQ ID NO: 4429430 - DNA, 25 bp, Homo sapien
tgaccaggatttcagtcaactcatt

SEQ ID NO: 4429431 - DNA, 25 bp, Homo sapien
gaccaggatttcagtcaactcattg

SEQ ID NO: 4429432 - DNA, 25 bp, Homo sapien
catagactgcatgatataacactca

SEQ ID NO: 4429433 - DNA, 25 bp, Homo sapien
tctcttctatgaccatgtgatcaca

SEQ ID NO: 4429434 - DNA, 25 bp, Homo sapien
cagcagttatccatgattcagtaaa

SEQ ID NO: 4429435 - DNA, 25 bp, Homo sapien
taatgaaacttctaccaggtatcac

SEQ ID NO: 4429436 - DNA, 25 bp, Homo sapien
caaaggcatttcgacaaataatata

SEQ ID NO: 4429437 - DNA, 25 bp, Homo sapien
gcatttcgacaaataatataatcca

SEQ ID NO: 4429438 - DNA, 25 bp, Homo sapien
ggcatttcgacaaataatataatcc

SEQ ID NO: 4429439 - DNA, 25 bp, Homo sapien
atgcaaaggcatttcgacaaataat

SEQ ID NO: 4429440 - DNA, 25 bp, Homo sapien
aagatatgattcacaggacaagaaa

SEQ ID NO: 4429441 - DNA, 25 bp, Homo sapien
tatgattcacaggacaagaaagctg

SEQ ID NO: 4429442 - DNA, 25 bp, Homo sapien
gaaaagatatgattcacaggacaag

SEQ ID NO: 4429443 - DNA, 25 bp, Homo sapien
tacagaaaagatatgattcacagga

SEQ ID NO: 4429444 - DNA, 25 bp, Homo sapien
ctcttatggagaacgagcggtgact

SEQ ID NO: 4429445 - DNA, 25 bp, Homo sapien
aaatgggcagctacacacaaagaac

SEQ ID NO: 4429446 - DNA, 25 bp, Homo sapien
gtaatagggtcagtcagttagcaca

SEQ ID NO: 4429447 - DNA, 25 bp, Homo sapien
gaaggttgcttccatatgtgctatg

SEQ ID NO: 4429448 - DNA, 25 bp, Homo sapien
tggccgtgagtggtgtggcactgcc

SEQ ID NO: 4429449 - DNA, 25 bp, Homo sapien
cgtgagtggtgtggcactgccgtga

SEQ ID NO: 4429450 - DNA, 25 bp, Homo sapien
gccgtgagtggtgtggcactgccgt

SEQ ID NO: 4429451 - DNA, 25 bp, Homo sapien
ccagcttctgggtcaggcatcttcg

SEQ ID NO: 4429452 - DNA, 25 bp, Homo sapien
gaagaggagcgcttcgccgctcctc

SEQ ID NO: 4429453 - DNA, 25 bp, Homo sapien
tcgccccgctggcttgcggacacag

SEQ ID NO: 4429454 - DNA, 25 bp, Homo sapien
ctcctccgacgctggcagccccggt

SEQ ID NO: 4429455 - DNA, 25 bp, Homo sapien
ccccgctggcttgcggacacagcct

SEQ ID NO: 4429456 - DNA, 25 bp, Homo sapien
cttttctccagcttcctcccaggtc

SEQ ID NO: 4429457 - DNA, 25 bp, Homo sapien
tccagcttcctcccaggtctcaggc

SEQ ID NO: 4429458 - DNA, 25 bp, Homo sapien
ttttctccagcttcctcccaggtct

SEQ ID NO: 4429459 - DNA, 25 bp, Homo sapien
ttctccagcttcctcccaggtctca

SEQ ID NO: 4429460 - DNA, 25 bp, Homo sapien
gttttcaaccattcggtgtcaaggc

SEQ ID NO: 4429461 - DNA, 25 bp, Homo sapien
ccattcggtgtcaaggcgagcctgg

SEQ ID NO: 4429462 - DNA, 25 bp, Homo sapien
caaccattcggtgtcaaggcgagcc

SEQ ID NO: 4429463 - DNA, 25 bp, Homo sapien
ttcaaccattcggtgtcaaggcgag

SEQ ID NO: 4429464 - DNA, 25 bp, Homo sapien
tttaaacatggaagcagaaatacac

SEQ ID NO: 4429465 - DNA, 25 bp, Homo sapien
aagaaagagacatgtcaaaccccac

SEQ ID NO: 4429466 - DNA, 25 bp, Homo sapien
aatacaccaagaaagagacatgtca

SEQ ID NO: 4429467 - DNA, 25 bp, Homo sapien
ttacacgagaaatttaaacatggaa

SEQ ID NO: 4429468 - DNA, 25 bp, Homo sapien
aaacgtgacagattgccagtgggaa

SEQ ID NO: 4429469 - DNA, 25 bp, Homo sapien
tgcaaactaaaacagccacttcgga

SEQ ID NO: 4429470 - DNA, 25 bp, Homo sapien
gaaaacagttcagcacatgacccaa

SEQ ID NO: 4429471 - DNA, 25 bp, Homo sapien
agcaacagaaacgtgacagattgcc

SEQ ID NO: 4429472 - DNA, 25 bp, Homo sapien
tgtgagcatgcgtgactaataaact

SEQ ID NO: 4429473 - DNA, 25 bp, Homo sapien
cagtgtcggtgtcctacgttcagcc

SEQ ID NO: 4429474 - DNA, 25 bp, Homo sapien
acttcacagaggatacaagagtggc

SEQ ID NO: 4429475 - DNA, 25 bp, Homo sapien
cattcttagccattacggaagtgca

SEQ ID NO: 4429476 - DNA, 25 bp, Homo sapien
ctgcagaattaaaaaatttcttaat

SEQ ID NO: 4429477 - DNA, 25 bp, Homo sapien
caggtgcaggagtttcgtcttcatt

SEQ ID NO: 4429478 - DNA, 25 bp, Homo sapien
ctggttgcttgacccacacccaggt

SEQ ID NO: 4429479 - DNA, 25 bp, Homo sapien
tgcaggagtttcgtcttcatttttt

SEQ ID NO: 4429480 - DNA, 25 bp, Homo sapien
ggtgcaggagtttcgtcttcatttt

SEQ ID NO: 4429481 - DNA, 25 bp, Homo sapien
ttccaaagtgccaaaactcagatta

SEQ ID NO: 4429482 - DNA, 25 bp, Homo sapien
tccaaagtgccaaaactcagattac

SEQ ID NO: 4429483 - DNA, 25 bp, Homo sapien
tgtatattttaccacgatatttaaa

SEQ ID NO: 4429484 - DNA, 25 bp, Homo sapien
gctgccaccagaagaggggttctaa

SEQ ID NO: 4429485 - DNA, 25 bp, Homo sapien
tgccaccagaagaggggttctaacc

SEQ ID NO: 4429486 - DNA, 25 bp, Homo sapien
gagctgccaccagaagaggggttct

SEQ ID NO: 4429487 - DNA, 25 bp, Homo sapien
agagctgccaccagaagaggggttc

SEQ ID NO: 4429488 - DNA, 25 bp, Homo sapien
acaggaccttcatgacccgcagctg

SEQ ID NO: 4429489 - DNA, 25 bp, Homo sapien
gccccttttccgcattctagtgcag

SEQ ID NO: 4429490 - DNA, 25 bp, Homo sapien
ttgtgacatcacaggaccttcatga

SEQ ID NO: 4429491 - DNA, 25 bp, Homo sapien
gccacgccccttttccgcattctag

SEQ ID NO: 4429492 - DNA, 25 bp, Homo sapien
ttcttcaaaacccagctggtgcagg

SEQ ID NO: 4429493 - DNA, 25 bp, Homo sapien
gctgttgttcctctagaatcttcct

SEQ ID NO: 4429494 - DNA, 25 bp, Homo sapien
ttgctgttgttcctctagaatcttc

SEQ ID NO: 4429495 - DNA, 25 bp, Homo sapien
tgttgctgttgttcctctagaatct

SEQ ID NO: 4429496 - DNA, 25 bp, Homo sapien
gaagccatcagattagccagtgaca

SEQ ID NO: 4429497 - DNA, 25 bp, Homo sapien
gaagcgtcaaccagctgagaaagga

SEQ ID NO: 4429498 - DNA, 25 bp, Homo sapien
caactaatgatttcgggccacaggt

SEQ ID NO: 4429499 - DNA, 25 bp, Homo sapien
cgatgggccacacgctcatatggga

SEQ ID NO: 4429500 - DNA, 25 bp, Homo sapien
gacagtcctggcctattggtggttt

SEQ ID NO: 4429501 - DNA, 25 bp, Homo sapien
ggcctattggtggtttgtccacagg

SEQ ID NO: 4429502 - DNA, 25 bp, Homo sapien
cagcaacgcgtaaatattcaggaga

SEQ ID NO: 4429503 - DNA, 25 bp, Homo sapien
cacaggagattcagcaacgcgtaaa

SEQ ID NO: 4429504 - DNA, 25 bp, Homo sapien
tcagaatctccagacacaagaagag

SEQ ID NO: 4429505 - DNA, 25 bp, Homo sapien
atctccagacacaagaagaggctca

SEQ ID NO: 4429506 - DNA, 25 bp, Homo sapien
cagaatctccagacacaagaagagg

SEQ ID NO: 4429507 - DNA, 25 bp, Homo sapien
gaatctccagacacaagaagaggct

SEQ ID NO: 4429508 - DNA, 25 bp, Homo sapien
ttacggcccccaattagcacatcag

SEQ ID NO: 4429509 - DNA, 25 bp, Homo sapien
ggccatcgtggctataactcttctt

SEQ ID NO: 4429510 - DNA, 25 bp, Homo sapien
tgaatgccacattaagtgcagtggg

SEQ ID NO: 4429511 - DNA, 25 bp, Homo sapien
tcagcccagactcattcatgaatgc

SEQ ID NO: 4429512 - DNA, 25 bp, Homo sapien
tgcccacactggtggtgcctgggac

SEQ ID NO: 4429513 - DNA, 25 bp, Homo sapien
ccctgcccacactggtggtgcctgg

SEQ ID NO: 4429514 - DNA, 25 bp, Homo sapien
ctgcccacactggtggtgcctggga

SEQ ID NO: 4429515 - DNA, 25 bp, Homo sapien
cccacactggtggtgcctgggactg

SEQ ID NO: 4429516 - DNA, 25 bp, Homo sapien
atgtcctgcacaatcgccttgtggg

SEQ ID NO: 4429517 - DNA, 25 bp, Homo sapien
cctgcaggcagctcgagaacatgtc

SEQ ID NO: 4429518 - DNA, 25 bp, Homo sapien
cagctcgagaacatgtcctgcacaa

SEQ ID NO: 4429519 - DNA, 25 bp, Homo sapien
tcgccttgtggggactaactgtggt

SEQ ID NO: 4429520 - DNA, 25 bp, Homo sapien
cagcagcgggatgagatgttcatgt

SEQ ID NO: 4429521 - DNA, 25 bp, Homo sapien
gcgggatgagatgttcatgtaagct

SEQ ID NO: 4429522 - DNA, 25 bp, Homo sapien
accagcagcgggatgagatgttcat

SEQ ID NO: 4429523 - DNA, 25 bp, Homo sapien
gcagcgggatgagatgttcatgtaa

SEQ ID NO: 4429524 - DNA, 25 bp, Homo sapien
cagggggaccgactggagtagtctc

SEQ ID NO: 4429525 - DNA, 25 bp, Homo sapien
gggggaccgactggagtagtctctc

SEQ ID NO: 4429526 - DNA, 25 bp, Homo sapien
tacagggggaccgactggagtagtc

SEQ ID NO: 4429527 - DNA, 25 bp, Homo sapien
gggaccgactggagtagtctctcac

SEQ ID NO: 4429528 - DNA, 25 bp, Homo sapien
ctaggcaactgtggcctgtgtggcc

SEQ ID NO: 4429529 - DNA, 25 bp, Homo sapien
ggcaactgtggcctgtgtggccgta

SEQ ID NO: 4429530 - DNA, 25 bp, Homo sapien
caactgtggcctgtgtggccgtatc

SEQ ID NO: 4429531 - DNA, 25 bp, Homo sapien
actgtggcctgtgtggccgtatccc

SEQ ID NO: 4429532 - DNA, 25 bp, Homo sapien
tgagactctcactacccacaggatt

SEQ ID NO: 4429533 - DNA, 25 bp, Homo sapien
taggaataacaatgctgagactctc

SEQ ID NO: 4429534 - DNA, 25 bp, Homo sapien
gaggctttcttaacccgcagcacct

SEQ ID NO: 4429535 - DNA, 25 bp, Homo sapien
gaaaatcctggtcaaggtcctcaga

SEQ ID NO: 4429536 - DNA, 25 bp, Homo sapien
gatctggaagtcgaatgagatccct

SEQ ID NO: 4429537 - DNA, 25 bp, Homo sapien
ttcccatggtttggcttttgatggc

SEQ ID NO: 4429538 - DNA, 25 bp, Homo sapien
tgaagagtcgttggtcacacagcat

SEQ ID NO: 4429539 - DNA, 25 bp, Homo sapien
tcctttccgttcctgcaaatcagtg

SEQ ID NO: 4429540 - DNA, 25 bp, Homo sapien
cctgagatagaacttgggccccaca

SEQ ID NO: 4429541 - DNA, 25 bp, Homo sapien
cgtcagcacggaggacttctagtga

SEQ ID NO: 4429542 - DNA, 25 bp, Homo sapien
tctagtgaatgtcgcagtggctcag

SEQ ID NO: 4429543 - DNA, 25 bp, Homo sapien
ggctcaggcacacgacgcactttta

SEQ ID NO: 4429544 - DNA, 25 bp, Homo sapien
ctccaactccggacaccttgccaaa

SEQ ID NO: 4429545 - DNA, 25 bp, Homo sapien
cgaggggtcgggaactgacagtcac

SEQ ID NO: 4429546 - DNA, 25 bp, Homo sapien
agtcctggcggcaacaggaccctcg

SEQ ID NO: 4429547 - DNA, 25 bp, Homo sapien
aagccctttctgctcggccgagggg

SEQ ID NO: 4429548 - DNA, 25 bp, Homo sapien
gggtgtgtgctgcactatttggttt

SEQ ID NO: 4429549 - DNA, 25 bp, Homo sapien
ctgcagttgtttcgggctgtggggt

SEQ ID NO: 4429550 - DNA, 25 bp, Homo sapien
ggggtgtgtgctgcactatttggtt

SEQ ID NO: 4429551 - DNA, 25 bp, Homo sapien
tgtttcgggctgtggggtgtgtgct

SEQ ID NO: 4429552 - DNA, 25 bp, Homo sapien
aagggcatcttctcatagtcatctg

SEQ ID NO: 4429553 - DNA, 25 bp, Homo sapien
tctgtgacaatgaaggcaaacgctg

SEQ ID NO: 4429554 - DNA, 25 bp, Homo sapien
catagtcatctgtgacaatgaaggc

SEQ ID NO: 4429555 - DNA, 25 bp, Homo sapien
catcttctcatagtcatctgtgaca

SEQ ID NO: 4429556 - DNA, 25 bp, Homo sapien
tgggatttcgttttccgttcaggca

SEQ ID NO: 4429557 - DNA, 25 bp, Homo sapien
ggatttcgttttccgttcaggcagc

SEQ ID NO: 4429558 - DNA, 25 bp, Homo sapien
tttcgttttccgttcaggcagctca

SEQ ID NO: 4429559 - DNA, 25 bp, Homo sapien
cgttttccgttcaggcagctcaggg

SEQ ID NO: 4429560 - DNA, 25 bp, Homo sapien
tactgacgggccacatgtgatgagt

SEQ ID NO: 4429561 - DNA, 25 bp, Homo sapien
cttgaagtctagtactgacgggcca

SEQ ID NO: 4429562 - DNA, 25 bp, Homo sapien
gtctagtactgacgggccacatgtg

SEQ ID NO: 4429563 - DNA, 25 bp, Homo sapien
gacgggccacatgtgatgagtaaca

SEQ ID NO: 4429564 - DNA, 25 bp, Homo sapien
ctggctgggctgccagtgaactcac

SEQ ID NO: 4429565 - DNA, 25 bp, Homo sapien
ggctggctgggctgccagtgaactc

SEQ ID NO: 4429566 - DNA, 25 bp, Homo sapien
tgggctggctgggctgccagtgaac

SEQ ID NO: 4429567 - DNA, 25 bp, Homo sapien
atggccttcgtgggctggctgggct

SEQ ID NO: 4429568 - DNA, 25 bp, Homo sapien
tactgaaaggcaggtatcccccaga

SEQ ID NO: 4429569 - DNA, 25 bp, Homo sapien
gaggcatcagggtgcatcaaagaca

SEQ ID NO: 4429570 - DNA, 25 bp, Homo sapien
atcaaagacagagcgtcgccccagt

SEQ ID NO: 4429571 - DNA, 25 bp, Homo sapien
gcctaatggctgcagcccatactga

SEQ ID NO: 4429572 - DNA, 25 bp, Homo sapien
ttattatgtcacaggagttggtgag

SEQ ID NO: 4429573 - DNA, 25 bp, Homo sapien
tgattattatgtcacaggagttggt

SEQ ID NO: 4429574 - DNA, 25 bp, Homo sapien
ccaagatccagaagcgatcctcagg

SEQ ID NO: 4429575 - DNA, 25 bp, Homo sapien
gaagcgatcctcagggacccaaggt

SEQ ID NO: 4429576 - DNA, 25 bp, Homo sapien
cagtcgtagggaagagccccattca

SEQ ID NO: 4429577 - DNA, 25 bp, Homo sapien
gtctgcagtcgtagggaagagcccc

SEQ ID NO: 4429578 - DNA, 25 bp, Homo sapien
tgcagtcgtagggaagagccccatt

SEQ ID NO: 4429579 - DNA, 25 bp, Homo sapien
gggtctgcagtcgtagggaagagcc

SEQ ID NO: 4429580 - DNA, 25 bp, Homo sapien
cccttcacgaatggctgcgctgctg

SEQ ID NO: 4429581 - DNA, 25 bp, Homo sapien
cgagcccttcacgaatggctgcgct

SEQ ID NO: 4429582 - DNA, 25 bp, Homo sapien
aggctgcgagcccttcacgaatggc

SEQ ID NO: 4429583 - DNA, 25 bp, Homo sapien
gctgcgagcccttcacgaatggctg

SEQ ID NO: 4429584 - DNA, 25 bp, Homo sapien
tgagtggtttggtaatgtcccgaaa

SEQ ID NO: 4429585 - DNA, 25 bp, Homo sapien
cagccaattcatctgcagtgcagaa

SEQ ID NO: 4429586 - DNA, 25 bp, Homo sapien
ccttgcaagtctcccctgtgtggaa

SEQ ID NO: 4429587 - DNA, 25 bp, Homo sapien
agtttccctacaaagccgctgcctt

SEQ ID NO: 4429588 - DNA, 25 bp, Homo sapien
tgtgtggaacactcggctggcacca

SEQ ID NO: 4429589 - DNA, 25 bp, Homo sapien
tgtcattacggctgaagtatgttta

SEQ ID NO: 4429590 - DNA, 25 bp, Homo sapien
aatgtcattacggctgaagtatgtt

SEQ ID NO: 4429591 - DNA, 25 bp, Homo sapien
ctaatgtcattacggctgaagtatg

SEQ ID NO: 4429592 - DNA, 25 bp, Homo sapien
atctaatgtcattacggctgaagta

SEQ ID NO: 4429593 - DNA, 25 bp, Homo sapien
gctggtgcccgaactcacaccgcag

SEQ ID NO: 4429594 - DNA, 25 bp, Homo sapien
tccggcacctctggacgtgctggtg

SEQ ID NO: 4429595 - DNA, 25 bp, Homo sapien
gcccgaactcacaccgcaggcccag

SEQ ID NO: 4429596 - DNA, 25 bp, Homo sapien
gtccggcacctctggacgtgctggt

SEQ ID NO: 4429597 - DNA, 25 bp, Homo sapien
tctggactccctcgacaaaccccat

SEQ ID NO: 4429598 - DNA, 25 bp, Homo sapien
tagcccgcgtggtctggagagtcct

SEQ ID NO: 4429599 - DNA, 25 bp, Homo sapien
tcctgcgttgagcaatcgttccttc

SEQ ID NO: 4429600 - DNA, 25 bp, Homo sapien
aaaccccatgtagcccgcgtggtct

SEQ ID NO: 4429601 - DNA, 25 bp, Homo sapien
tctgcaaccctgcagccttgttggg

SEQ ID NO: 4429602 - DNA, 25 bp, Homo sapien
acagaggcacctagttcttctgcaa

SEQ ID NO: 4429603 - DNA, 25 bp, Homo sapien
gccacagaggcacctagttcttctg

SEQ ID NO: 4429604 - DNA, 25 bp, Homo sapien
tagttcttctgcaaccctgcagcct

SEQ ID NO: 4429605 - DNA, 25 bp, Homo sapien
gtctccatgtccagactcaattaat

SEQ ID NO: 4429606 - DNA, 25 bp, Homo sapien
aaaatgagtctccatgtccagactc

SEQ ID NO: 4429607 - DNA, 25 bp, Homo sapien
ccatgtccagactcaattaattcta

SEQ ID NO: 4429608 - DNA, 25 bp, Homo sapien
gagtctccatgtccagactcaatta

SEQ ID NO: 4429609 - DNA, 25 bp, Homo sapien
ttagtgcctgaaggaaggtcccaca

SEQ ID NO: 4429610 - DNA, 25 bp, Homo sapien
tgtaagcaactttttcaggaagccc

SEQ ID NO: 4429611 - DNA, 25 bp, Homo sapien
aggaagccctttagtgcctgaagga

SEQ ID NO: 4429612 - DNA, 25 bp, Homo sapien
gccctttagtgcctgaaggaaggtc

SEQ ID NO: 4429613 - DNA, 25 bp, Homo sapien
cagtaactacattcctcaaaacggt

SEQ ID NO: 4429614 - DNA, 25 bp, Homo sapien
tcaaaacggtctctcagaagcatgt

SEQ ID NO: 4429615 - DNA, 25 bp, Homo sapien
gggacttagcaaccacaactctcag

SEQ ID NO: 4429616 - DNA, 25 bp, Homo sapien
tgctaacatgcaaccagacgtccat

SEQ ID NO: 4429617 - DNA, 25 bp, Homo sapien
caggacaattcgaaagagctgttcc

SEQ ID NO: 4429618 - DNA, 25 bp, Homo sapien
gtcactgagatggaccctgcagggc

SEQ ID NO: 4429619 - DNA, 25 bp, Homo sapien
ccccattcgcaaaccctgaaactgg

SEQ ID NO: 4429620 - DNA, 25 bp, Homo sapien
ccctgaaactggcaggacaattcga

SEQ ID NO: 4429621 - DNA, 25 bp, Homo sapien
ggcagtcgttcacacagccatcatc

SEQ ID NO: 4429622 - DNA, 25 bp, Homo sapien
tcctgttcctctggcgcggggctct

SEQ ID NO: 4429623 - DNA, 25 bp, Homo sapien
ggtctcaccctatggtccaacatgc

SEQ ID NO: 4429624 - DNA, 25 bp, Homo sapien
cgctctcaagcttccggtgggccat

SEQ ID NO: 4429625 - DNA, 25 bp, Homo sapien
atgccgctccccacgctctcaagct

SEQ ID NO: 4429626 - DNA, 25 bp, Homo sapien
tctaggtagctgtcgtcctcagggc

SEQ ID NO: 4429627 - DNA, 25 bp, Homo sapien
ccgtctgggtagtcctggctgcctt

SEQ ID NO: 4429628 - DNA, 25 bp, Homo sapien
gagggctcatcctccggaatgggca

SEQ ID NO: 4429629 - DNA, 25 bp, Homo sapien
gctgccttcagcctcgtggccgtgg

SEQ ID NO: 4429630 - DNA, 25 bp, Homo sapien
cattagaactgtgaggcacccagca

SEQ ID NO: 4429631 - DNA, 25 bp, Homo sapien
accgcctcgcttcagcatctgcaag

SEQ ID NO: 4429632 - DNA, 25 bp, Homo sapien
tctgcaaggcctgtaccctgaggtc

SEQ ID NO: 4429633 - DNA, 25 bp, Homo sapien
cctgtaccctgaggtcccttgctct

SEQ ID NO: 4429634 - DNA, 25 bp, Homo sapien
ttcaccactgttgtgggacaagccc

SEQ ID NO: 4429635 - DNA, 25 bp, Homo sapien
acagcccacgtcaatccctgaggtg

SEQ ID NO: 4429636 - DNA, 25 bp, Homo sapien
acgcagcatgtcacacgctctgcac

SEQ ID NO: 4429637 - DNA, 25 bp, Homo sapien
cactgttgtgggacaagcccaggcc

SEQ ID NO: 4429638 - DNA, 25 bp, Homo sapien
ttcttcaaaaagcaagcctctactg

SEQ ID NO: 4429639 - DNA, 25 bp, Homo sapien
ctatcacactctcagaaggttcttc

SEQ ID NO: 4429640 - DNA, 25 bp, Homo sapien
tactgaatgccaagtcacggccaaa

SEQ ID NO: 4429641 - DNA, 25 bp, Homo sapien
cagactcctatcacactctcagaag

SEQ ID NO: 4429642 - DNA, 25 bp, Homo sapien
cagtgtggccctgaccagtcctggt

SEQ ID NO: 4429643 - DNA, 25 bp, Homo sapien
tgtggccctgaccagtcctggtcct

SEQ ID NO: 4429644 - DNA, 25 bp, Homo sapien
ccagtgtggccctgaccagtcctgg

SEQ ID NO: 4429645 - DNA, 25 bp, Homo sapien
gtggccctgaccagtcctggtcctc

SEQ ID NO: 4429646 - DNA, 25 bp, Homo sapien
tccactcctgccaaggcgggatcat

SEQ ID NO: 4429647 - DNA, 25 bp, Homo sapien
accataagccacagcctgtgggatc

SEQ ID NO: 4429648 - DNA, 25 bp, Homo sapien
ttccactcctgccaaggcgggatca

SEQ ID NO: 4429649 - DNA, 25 bp, Homo sapien
gcatgaccacaatcactttaccata

SEQ ID NO: 4429650 - DNA, 25 bp, Homo sapien
ttattctccgtgcttggtctgctga

SEQ ID NO: 4429651 - DNA, 25 bp, Homo sapien
ctctcctccatcaccgaccactggg

SEQ ID NO: 4429652 - DNA, 25 bp, Homo sapien
ccgtgcttggtctgctgaaatctct

SEQ ID NO: 4429653 - DNA, 25 bp, Homo sapien
tctccgtgcttggtctgctgaaatc

SEQ ID NO: 4429654 - DNA, 25 bp, Homo sapien
cagaggaaggtctcactcagcagcg

SEQ ID NO: 4429655 - DNA, 25 bp, Homo sapien
tcctgggcggacgaatgactccgtt

SEQ ID NO: 4429656 - DNA, 25 bp, Homo sapien
tgttttcaaaagaggcgatcatccc

SEQ ID NO: 4429657 - DNA, 25 bp, Homo sapien
aaggtctcactcagcagcacagagg

SEQ ID NO: 4429658 - DNA, 25 bp, Homo sapien
ccatcgtcaacatagtcaggatgct

SEQ ID NO: 4429659 - DNA, 25 bp, Homo sapien
tccgctcaggccatcgtcaacatag

SEQ ID NO: 4429660 - DNA, 25 bp, Homo sapien
caggccatcgtcaacatagtcagga

SEQ ID NO: 4429661 - DNA, 25 bp, Homo sapien
gtcaacatagtcaggatgcttccaa

SEQ ID NO: 4429662 - DNA, 25 bp, Homo sapien
tcaacaggtccattgagatcagagc

SEQ ID NO: 4429663 - DNA, 25 bp, Homo sapien
ttggctgctccagaccattgcaaac

SEQ ID NO: 4429664 - DNA, 25 bp, Homo sapien
caggtccattgagatcagagcgctg

SEQ ID NO: 4429665 - DNA, 25 bp, Homo sapien
aacaggtccattgagatcagagcgc

SEQ ID NO: 4429666 - DNA, 25 bp, Homo sapien
cttggaaatgatgccaccttctttg

SEQ ID NO: 4429667 - DNA, 25 bp, Homo sapien
ttggaaatgatgccaccttctttgt

SEQ ID NO: 4429668 - DNA, 25 bp, Homo sapien
aacttggaaatgatgccaccttctt

SEQ ID NO: 4429669 - DNA, 25 bp, Homo sapien
aaacttggaaatgatgccaccttct

SEQ ID NO: 4429670 - DNA, 25 bp, Homo sapien
gcagggaaccaagtcttctgggatg

SEQ ID NO: 4429671 - DNA, 25 bp, Homo sapien
aggagctagagtccgaggtacccca

SEQ ID NO: 4429672 - DNA, 25 bp, Homo sapien
tggaacagtctgagtggtgcaggga

SEQ ID NO: 4429673 - DNA, 25 bp, Homo sapien
gtcttctgggatgccaggagctaga

SEQ ID NO: 4429674 - DNA, 25 bp, Homo sapien
acagacaacaaccgaacataccctt

SEQ ID NO: 4429675 - DNA, 25 bp, Homo sapien
gcctccggtgcgtataacccgtata

SEQ ID NO: 4429676 - DNA, 25 bp, Homo sapien
atgaactattatggaaaaggaaaag

SEQ ID NO: 4429677 - DNA, 25 bp, Homo sapien
agcagaatttggacaagaacgcaga

SEQ ID NO: 4429678 - DNA, 25 bp, Homo sapien
gaggggaatgcgttttagatacaaa

SEQ ID NO: 4429679 - DNA, 25 bp, Homo sapien
tatatagagataattgaacaaccca

SEQ ID NO: 4429680 - DNA, 25 bp, Homo sapien
aaggaaaagtgagaattacattagt

SEQ ID NO: 4429681 - DNA, 25 bp, Homo sapien
ttgggtattcgatgtgtgaagaaaa

SEQ ID NO: 4429682 - DNA, 25 bp, Homo sapien
atttagttggaaaagactgcagaga

SEQ ID NO: 4429683 - DNA, 25 bp, Homo sapien
gagacggctactatgaagcagaatt

SEQ ID NO: 4429684 - DNA, 25 bp, Homo sapien
gaataaaggcaggaatcaatccatt

SEQ ID NO: 4429685 - DNA, 25 bp, Homo sapien
cgctgcctttcaggttacccaggga

SEQ ID NO: 4429686 - DNA, 25 bp, Homo sapien
cctttcaggttacccagggagcaca

SEQ ID NO: 4429687 - DNA, 25 bp, Homo sapien
acacagctgacacgctgcctttcag

SEQ ID NO: 4429688 - DNA, 25 bp, Homo sapien
gacacgctgcctttcaggttaccca

SEQ ID NO: 4429689 - DNA, 25 bp, Homo sapien
gcagtgaccctctaagcagcttggg

SEQ ID NO: 4429690 - DNA, 25 bp, Homo sapien
tcatccagaggcagtgaccctctaa

SEQ ID NO: 4429691 - DNA, 25 bp, Homo sapien
tcacatatactcatccagaggcagt

SEQ ID NO: 4429692 - DNA, 25 bp, Homo sapien
gaggcagtgaccctctaagcagctt

SEQ ID NO: 4429693 - DNA, 25 bp, Homo sapien
aacaatcgagtccaaggtggcccca

SEQ ID NO: 4429694 - DNA, 25 bp, Homo sapien
gaaacaatcgagtccaaggtggccc

SEQ ID NO: 4429695 - DNA, 25 bp, Homo sapien
tgctcttttgttcagcgagaaacaa

SEQ ID NO: 4429696 - DNA, 25 bp, Homo sapien
ttgttcagcgagaaacaatcgagtc

SEQ ID NO: 4429697 - DNA, 25 bp, Homo sapien
ctgaccccagtcctgtgtatctgcc

SEQ ID NO: 4429698 - DNA, 25 bp, Homo sapien
ccaccacttcaataacatccgccca

SEQ ID NO: 4429699 - DNA, 25 bp, Homo sapien
acttcaataacatccgcccagtatc

SEQ ID NO: 4429700 - DNA, 25 bp, Homo sapien
tgaccccagtcctgtgtatctgccc

SEQ ID NO: 4429701 - DNA, 25 bp, Homo sapien
aaatcatcaactggcccagcttggg

SEQ ID NO: 4429702 - DNA, 25 bp, Homo sapien
ctaaaatcatcaactggcccagctt

SEQ ID NO: 4429703 - DNA, 25 bp, Homo sapien
taacccattctgttgctaaaatcat

SEQ ID NO: 4429704 - DNA, 25 bp, Homo sapien
acccattctgttgctaaaatcatca

SEQ ID NO: 4429705 - DNA, 25 bp, Homo sapien
cagcaaagatgatcccgtcgatgag

SEQ ID NO: 4429706 - DNA, 25 bp, Homo sapien
atgaggtcttctggttcgcagggcc

SEQ ID NO: 4429707 - DNA, 25 bp, Homo sapien
tcctgcgcttgcatcattctgatgt

SEQ ID NO: 4429708 - DNA, 25 bp, Homo sapien
ccaggtaattggcagcaaagatgat

SEQ ID NO: 4429709 - DNA, 25 bp, Homo sapien
tgcccaccccggatggcctcatggt

SEQ ID NO: 4429710 - DNA, 25 bp, Homo sapien
ggtgtccctggagcgctagaaatga

SEQ ID NO: 4429711 - DNA, 25 bp, Homo sapien
tggagcgctagaaatgactgccaac

SEQ ID NO: 4429712 - DNA, 25 bp, Homo sapien
gagaagcccacacaggtgtccctgg

SEQ ID NO: 4429713 - DNA, 25 bp, Homo sapien
gaagcccacacaggtgtccctggag

SEQ ID NO: 4429714 - DNA, 25 bp, Homo sapien
tttcttgatcttagcagccttttgc

SEQ ID NO: 4429715 - DNA, 25 bp, Homo sapien
ttcttgatcttagcagccttttgca

SEQ ID NO: 4429716 - DNA, 25 bp, Homo sapien
tcttgatcttagcagccttttgcat

SEQ ID NO: 4429717 - DNA, 25 bp, Homo sapien
atgaagaggtccacttccgtcagcg

SEQ ID NO: 4429718 - DNA, 25 bp, Homo sapien
ggaaatgaagaggtccacttccgtc

SEQ ID NO: 4429719 - DNA, 25 bp, Homo sapien
tgggttgatgggcgcagagagcaca

SEQ ID NO: 4429720 - DNA, 25 bp, Homo sapien
ggttgatgggcgcagagagcacagg

SEQ ID NO: 4429721 - DNA, 25 bp, Homo sapien
gggcgcagagagcacaggagagaag

SEQ ID NO: 4429722 - DNA, 25 bp, Homo sapien
cttgggttgatgggcgcagagagca

SEQ ID NO: 4429723 - DNA, 25 bp, Homo sapien
ctgctacctgctgtgcgctccttgc

SEQ ID NO: 4429724 - DNA, 25 bp, Homo sapien
ctgctgtgcgctccttgctcctccc

SEQ ID NO: 4429725 - DNA, 25 bp, Homo sapien
gtgacgccagcacgactgctacctg

SEQ ID NO: 4429726 - DNA, 25 bp, Homo sapien
gggtgacgccagcacgactgctacc

SEQ ID NO: 4429727 - DNA, 25 bp, Homo sapien
tgccccaacagctttaatttgcatg

SEQ ID NO: 4429728 - DNA, 25 bp, Homo sapien
tctgccccaacagctttaatttgca

SEQ ID NO: 4429729 - DNA, 25 bp, Homo sapien
ccccaacagctttaatttgcatgcc

SEQ ID NO: 4429730 - DNA, 25 bp, Homo sapien
ctcctctgccccaacagctttaatt

SEQ ID NO: 4429731 - DNA, 25 bp, Homo sapien
cccaatgtcggcgatgtaggagatg

SEQ ID NO: 4429732 - DNA, 25 bp, Homo sapien
atcctccgactcgaacacatggcag

SEQ ID NO: 4429733 - DNA, 25 bp, Homo sapien
catggcagatcatcttatactgctt

SEQ ID NO: 4429734 - DNA, 25 bp, Homo sapien
gcgtggtctcgatgcagtcctgaga

SEQ ID NO: 4429735 - DNA, 25 bp, Homo sapien
tggtctgtgagtaagatcagcctcc

SEQ ID NO: 4429736 - DNA, 25 bp, Homo sapien
gaagaccacacgcaaaggcagaact

SEQ ID NO: 4429737 - DNA, 25 bp, Homo sapien
tgccagggccatgcgaaaatttgca

SEQ ID NO: 4429738 - DNA, 25 bp, Homo sapien
gctttctttatacagcatgccaggg

SEQ ID NO: 4429739 - DNA, 25 bp, Homo sapien
catccaggtttcgaagggtctccgt

SEQ ID NO: 4429740 - DNA, 25 bp, Homo sapien
taaatctgccattgcgccgaagcac

SEQ ID NO: 4429741 - DNA, 25 bp, Homo sapien
agtcacacagaaatacccatccagg

SEQ ID NO: 4429742 - DNA, 25 bp, Homo sapien
agtgcgctgttgaaatgctctctcc

SEQ ID NO: 4429743 - DNA, 25 bp, Homo sapien
tcatctgggccgctggtgtgccgcc

SEQ ID NO: 4429744 - DNA, 25 bp, Homo sapien
gctccctcgggccaccgccattctt

SEQ ID NO: 4429745 - DNA, 25 bp, Homo sapien
tcggactccacttgggctccctcgg

SEQ ID NO: 4429746 - DNA, 25 bp, Homo sapien
ttcctccccttggacgacatcctcc

SEQ ID NO: 4429747 - DNA, 25 bp, Homo sapien
caggacttgccggttcccacgccca

SEQ ID NO: 4429748 - DNA, 25 bp, Homo sapien
gcgcccgcgcaggagagggtcgggc

SEQ ID NO: 4429749 - DNA, 25 bp, Homo sapien
gcctgcggagttggcgagctgatgg

SEQ ID NO: 4429750 - DNA, 25 bp, Homo sapien
ggctggcctgcggagttggcgagct

SEQ ID NO: 4429751 - DNA, 25 bp, Homo sapien
taagagcagcagatgaatgtatgca

SEQ ID NO: 4429752 - DNA, 25 bp, Homo sapien
gggccggattagaagcgcgcagcag

SEQ ID NO: 4429753 - DNA, 25 bp, Homo sapien
gaaagacaagctgggccggattaga

SEQ ID NO: 4429754 - DNA, 25 bp, Homo sapien
tctccacgtggcaggatgtaagagc

SEQ ID NO: 4429755 - DNA, 25 bp, Homo sapien
cctgggtgttgatgatgtcgctgta

SEQ ID NO: 4429756 - DNA, 25 bp, Homo sapien
cattggctcgcaggaactcctggta

SEQ ID NO: 4429757 - DNA, 25 bp, Homo sapien
tcgtcgttgtacatctcctgggtgt

SEQ ID NO: 4429758 - DNA, 25 bp, Homo sapien
gtcgctgtattccttctggctcaag

SEQ ID NO: 4429759 - DNA, 25 bp, Homo sapien
aaagggatcagcagtgtgagagggg

SEQ ID NO: 4429760 - DNA, 25 bp, Homo sapien
gggatcagcagtgtgagaggggctg

SEQ ID NO: 4429761 - DNA, 25 bp, Homo sapien
agggatcagcagtgtgagaggggct

SEQ ID NO: 4429762 - DNA, 25 bp, Homo sapien
aagggatcagcagtgtgagaggggc

SEQ ID NO: 4429763 - DNA, 25 bp, Homo sapien
catgatctggtccccgatgctcagc

SEQ ID NO: 4429764 - DNA, 25 bp, Homo sapien
tgttggccaggatcaccgtgggcag

SEQ ID NO: 4429765 - DNA, 25 bp, Homo sapien
gatgctcagcttccccgagcgggca

SEQ ID NO: 4429766 - DNA, 25 bp, Homo sapien
cagccgggccgccattcatcatgtt

SEQ ID NO: 4429767 - DNA, 25 bp, Homo sapien
ggcagggagtgaccacacagcaaat

SEQ ID NO: 4429768 - DNA, 25 bp, Homo sapien
agggcagggagtgaccacacagcaa

SEQ ID NO: 4429769 - DNA, 25 bp, Homo sapien
gcagggcagggagtgaccacacagc

SEQ ID NO: 4429770 - DNA, 25 bp, Homo sapien
cagggagtgaccacacagcaaatct

SEQ ID NO: 4429771 - DNA, 25 bp, Homo sapien
gagacaccttcctcaaaacccaatg

SEQ ID NO: 4429772 - DNA, 25 bp, Homo sapien
cttcctacggaaggatgtggagaca

SEQ ID NO: 4429773 - DNA, 25 bp, Homo sapien
gggccatcatcatgccgaattcggg

SEQ ID NO: 4429774 - DNA, 25 bp, Homo sapien
tcaaaacccaatgccctccaaggac

SEQ ID NO: 4429775 - DNA, 25 bp, Homo sapien
ccaccatgcgcagggtgcctctgcc

SEQ ID NO: 4429776 - DNA, 25 bp, Homo sapien
tctgtcccaccatgcgcagggtgcc

SEQ ID NO: 4429777 - DNA, 25 bp, Homo sapien
gtttccagggcagcactgcgccctc

SEQ ID NO: 4429778 - DNA, 25 bp, Homo sapien
agcactgcgccctctgtcccaccat

SEQ ID NO: 4429779 - DNA, 25 bp, Homo sapien
ggggacagctgacaatgttgagctt

SEQ ID NO: 4429780 - DNA, 25 bp, Homo sapien
tgaccgggggacagctgacaatgtt

SEQ ID NO: 4429781 - DNA, 25 bp, Homo sapien
gtgaccgggggacagctgacaatgt

SEQ ID NO: 4429782 - DNA, 25 bp, Homo sapien
gacagctgacaatgttgagcttcac

SEQ ID NO: 4429783 - DNA, 25 bp, Homo sapien
gaggtctggccgcttgataaggacc

SEQ ID NO: 4429784 - DNA, 25 bp, Homo sapien
gtctggccgcttgataaggaccgtg

SEQ ID NO: 4429785 - DNA, 25 bp, Homo sapien
ggtacttgaggtctggccgcttgat

SEQ ID NO: 4429786 - DNA, 25 bp, Homo sapien
attccattctgcacgctgaagccca

SEQ ID NO: 4429787 - DNA, 25 bp, Homo sapien
tcaggccagtcaaatgcaggtcagt

SEQ ID NO: 4429788 - DNA, 25 bp, Homo sapien
gaaactctgggctaaagaactctgg

SEQ ID NO: 4429789 - DNA, 25 bp, Homo sapien
gggtgtaaccctccatgctgcttca

SEQ ID NO: 4429790 - DNA, 25 bp, Homo sapien
gctccttcatactcagggctggttt

SEQ ID NO: 4429791 - DNA, 25 bp, Homo sapien
gatctcgatgatgcggtggcccaca

SEQ ID NO: 4429792 - DNA, 25 bp, Homo sapien
tctccgaccgagttggacagagctt

SEQ ID NO: 4429793 - DNA, 25 bp, Homo sapien
cacgctctgcccgttgatctcgatg

SEQ ID NO: 4429794 - DNA, 25 bp, Homo sapien
tggactatcttctcgtgggctgtgg

SEQ ID NO: 4429795 - DNA, 25 bp, Homo sapien
ccctggctccagaggagtcaataca

SEQ ID NO: 4429796 - DNA, 25 bp, Homo sapien
cacttatgatgccttccagatgcag

SEQ ID NO: 4429797 - DNA, 25 bp, Homo sapien
gcagaaactgcgagggatgcactct

SEQ ID NO: 4429798 - DNA, 25 bp, Homo sapien
ttctagtggtgacaacagtttgccc

SEQ ID NO: 4429799 - DNA, 25 bp, Homo sapien
gcggcgggcatggtcttcatgtgga

SEQ ID NO: 4429800 - DNA, 25 bp, Homo sapien
gacccgtgaggagcctgaacatggc

SEQ ID NO: 4429801 - DNA, 25 bp, Homo sapien
gggtctcctgacccgtgaggagcct

SEQ ID NO: 4429802 - DNA, 25 bp, Homo sapien
aacatggcggcgggcatggtcttca

SEQ ID NO: 4429803 - DNA, 25 bp, Homo sapien
cccgtgtccctgcagtcagtggcag

SEQ ID NO: 4429804 - DNA, 25 bp, Homo sapien
agaagacagtccagaacgtggcaaa

SEQ ID NO: 4429805 - DNA, 25 bp, Homo sapien
taccgagacacaccctggcttgtgc

SEQ ID NO: 4429806 - DNA, 25 bp, Homo sapien
cattacaagtcgtgtcctgggagcc

SEQ ID NO: 4429807 - DNA, 25 bp, Homo sapien
cattggaaaaccctagagtctggaa

SEQ ID NO: 4429808 - DNA, 25 bp, Homo sapien
tacatggatcgctaatgaaccgagc

SEQ ID NO: 4429809 - DNA, 25 bp, Homo sapien
tgaaccgagctggactagatccgac

SEQ ID NO: 4429810 - DNA, 25 bp, Homo sapien
tcctacgggtagctgcatgcaacac

SEQ ID NO: 4429811 - DNA, 25 bp, Homo sapien
tccagaagccttccggagagggtca

SEQ ID NO: 4429812 - DNA, 25 bp, Homo sapien
tctgaggtctaactgggacagaggc

SEQ ID NO: 4429813 - DNA, 25 bp, Homo sapien
tgcatgtcctcagctagccagggct

SEQ ID NO: 4429814 - DNA, 25 bp, Homo sapien
ctgagaggaccttgcagtagccagc

SEQ ID NO: 4429815 - DNA, 25 bp, Homo sapien
cttggctatttctcccgtcacttct

SEQ ID NO: 4429816 - DNA, 25 bp, Homo sapien
tcttggctatttctcccgtcacttc

SEQ ID NO: 4429817 - DNA, 25 bp, Homo sapien
tcccgcctcccactattctccccat

SEQ ID NO: 4429818 - DNA, 25 bp, Homo sapien
cactattctccccattgtatcattc

SEQ ID NO: 4429819 - DNA, 25 bp, Homo sapien
ctcccactattctccccattgtatc

SEQ ID NO: 4429820 - DNA, 25 bp, Homo sapien
ttcccgcctcccactattctcccca

SEQ ID NO: 4429821 - DNA, 25 bp, Homo sapien
ctcctgcagctgtagacactgcagc

SEQ ID NO: 4429822 - DNA, 25 bp, Homo sapien
aggagggagacaggacctcctgcag

SEQ ID NO: 4429823 - DNA, 25 bp, Homo sapien
gcagctgtgcctgagttgggatcat

SEQ ID NO: 4429824 - DNA, 25 bp, Homo sapien
gtagacactgcagctgtgcctgagt

SEQ ID NO: 4429825 - DNA, 25 bp, Homo sapien
tctgctggacacattgagacaaatg

SEQ ID NO: 4429826 - DNA, 25 bp, Homo sapien
cacgttcagctcttctatgtcctta

SEQ ID NO: 4429827 - DNA, 25 bp, Homo sapien
cactcctatggtgggtttgtccatg

SEQ ID NO: 4429828 - DNA, 25 bp, Homo sapien
tcctgattctgggtccttatccaaa

SEQ ID NO: 4429829 - DNA, 25 bp, Homo sapien
ccttccagattgcagtcccagagtt

SEQ ID NO: 4429830 - DNA, 25 bp, Homo sapien
tgtggcaggatttagggcagcttct

SEQ ID NO: 4429831 - DNA, 25 bp, Homo sapien
gaatcacctatggtgccggtggtaa

SEQ ID NO: 4429832 - DNA, 25 bp, Homo sapien
ttctggagccaccactaagggaggt

SEQ ID NO: 4429833 - DNA, 25 bp, Homo sapien
tgagcaacaagaccagtggagcata

SEQ ID NO: 4429834 - DNA, 25 bp, Homo sapien
gagcaacaagaccagtggagcatac

SEQ ID NO: 4429835 - DNA, 25 bp, Homo sapien
ctgagcaacaagaccagtggagcat

SEQ ID NO: 4429836 - DNA, 25 bp, Homo sapien
agcaacaagaccagtggagcatacc

SEQ ID NO: 4429837 - DNA, 25 bp, Homo sapien
atccctggatgagcccaaatatctg

SEQ ID NO: 4429838 - DNA, 25 bp, Homo sapien
ccctggctagcaggcatccctggat

SEQ ID NO: 4429839 - DNA, 25 bp, Homo sapien
gagagctccttctcatactgctttt

SEQ ID NO: 4429840 - DNA, 25 bp, Homo sapien
catccctggaccagtatgtgagagc

SEQ ID NO: 4429841 - DNA, 25 bp, Homo sapien
ttacaggtgcatagcaccacgccga

SEQ ID NO: 4429842 - DNA, 25 bp, Homo sapien
acaggtgcatagcaccacgccgagc

SEQ ID NO: 4429843 - DNA, 25 bp, Homo sapien
tacaggtgcatagcaccacgccgag

SEQ ID NO: 4429844 - DNA, 25 bp, Homo sapien
gctcgggctccaaagaaagacgtgg

SEQ ID NO: 4429845 - DNA, 25 bp, Homo sapien
caagtcctggagacaagccaaatcc

SEQ ID NO: 4429846 - DNA, 25 bp, Homo sapien
tcccttctggtgagcagctcgggct

SEQ ID NO: 4429847 - DNA, 25 bp, Homo sapien
gacgtggccaatacctctctgagca

SEQ ID NO: 4429848 - DNA, 25 bp, Homo sapien
tttttctccaagccctgacatttcc

SEQ ID NO: 4429849 - DNA, 25 bp, Homo sapien
ggacatcgatgcaagggccttccct

SEQ ID NO: 4429850 - DNA, 25 bp, Homo sapien
ccttctggacctctagattccagag

SEQ ID NO: 4429851 - DNA, 25 bp, Homo sapien
ccatcattcgctacatggcaaagca

SEQ ID NO: 4429852 - DNA, 25 bp, Homo sapien
ccaagcaatgagtgtaatgtatttt

SEQ ID NO: 4429853 - DNA, 25 bp, Homo sapien
gctagcttagtaaaacgaattggaa

SEQ ID NO: 4429854 - DNA, 25 bp, Homo sapien
taagtaagttgctttggtgccaaga

SEQ ID NO: 4429855 - DNA, 25 bp, Homo sapien
tattcatggttccaagcaatgagtg

SEQ ID NO: 4429856 - DNA, 25 bp, Homo sapien
tctttcttgcgggaaacatcccatt

SEQ ID NO: 4429857 - DNA, 25 bp, Homo sapien
cgttcttctttcttgcgggaaacat

SEQ ID NO: 4429858 - DNA, 25 bp, Homo sapien
tcttgcgggaaacatcccatttgca

SEQ ID NO: 4429859 - DNA, 25 bp, Homo sapien
tgcgggaaacatcccatttgcacca

SEQ ID NO: 4429860 - DNA, 25 bp, Homo sapien
ctgtgctcacataggtgagggctgg

SEQ ID NO: 4429861 - DNA, 25 bp, Homo sapien
tgtgctcacataggtgagggctggg

SEQ ID NO: 4429862 - DNA, 25 bp, Homo sapien
gtgctcacataggtgagggctgggg

SEQ ID NO: 4429863 - DNA, 25 bp, Homo sapien
ggatgttgcctttggccttgactgt

SEQ ID NO: 4429864 - DNA, 25 bp, Homo sapien
gttgcctttggccttgactgtctaa

SEQ ID NO: 4429865 - DNA, 25 bp, Homo sapien
tgttgcctttggccttgactgtcta

SEQ ID NO: 4429866 - DNA, 25 bp, Homo sapien
gatgttgcctttggccttgactgtc

SEQ ID NO: 4429867 - DNA, 25 bp, Homo sapien
gcttggcccggacaattcttccctg

SEQ ID NO: 4429868 - DNA, 25 bp, Homo sapien
ccaaataagctgtggtgtgcttcca

SEQ ID NO: 4429869 - DNA, 25 bp, Homo sapien
ttctgtttgccaaataagctgtggt

SEQ ID NO: 4429870 - DNA, 25 bp, Homo sapien
tcttctcctgtcagaggctccattt

SEQ ID NO: 4429871 - DNA, 25 bp, Homo sapien
agccataagttcaattctgcatgag

SEQ ID NO: 4429872 - DNA, 25 bp, Homo sapien
agttcaattctgcatgagcctgtag

SEQ ID NO: 4429873 - DNA, 25 bp, Homo sapien
ggttggcctcaacagccataagttc

SEQ ID NO: 4429874 - DNA, 25 bp, Homo sapien
aattctgcatgagcctgtagcagca

SEQ ID NO: 4429875 - DNA, 25 bp, Homo sapien
gtgggtcagtgctgagaattcttct

SEQ ID NO: 4429876 - DNA, 25 bp, Homo sapien
ggtcagtgctgagaattcttctctt

SEQ ID NO: 4429877 - DNA, 25 bp, Homo sapien
agcctcccgcctccttctgtgggtc

SEQ ID NO: 4429878 - DNA, 25 bp, Homo sapien
ccgcctccttctgtgggtcagtgct

SEQ ID NO: 4429879 - DNA, 25 bp, Homo sapien
ctagccagagtgggcgctagtctgt

SEQ ID NO: 4429880 - DNA, 25 bp, Homo sapien
gccagagtgggcgctagtctgttca

SEQ ID NO: 4429881 - DNA, 25 bp, Homo sapien
tagccagagtgggcgctagtctgtt

SEQ ID NO: 4429882 - DNA, 25 bp, Homo sapien
cagagtgggcgctagtctgttcatc

SEQ ID NO: 4429883 - DNA, 25 bp, Homo sapien
acattgccaccgtgcaaaagccaca

SEQ ID NO: 4429884 - DNA, 25 bp, Homo sapien
tgaggtttcaaaatcatcgacattg

SEQ ID NO: 4429885 - DNA, 25 bp, Homo sapien
tcaaaatcatcgacattgccaccgt

SEQ ID NO: 4429886 - DNA, 25 bp, Homo sapien
aaatcatcgacattgccaccgtgca

SEQ ID NO: 4429887 - DNA, 25 bp, Homo sapien
tgcacatagatagatgagtccctcc

SEQ ID NO: 4429888 - DNA, 25 bp, Homo sapien
tcattgctgaatatcggtgcaccag

SEQ ID NO: 4429889 - DNA, 25 bp, Homo sapien
tcatacagtatgctcagttcatggg

SEQ ID NO: 4429890 - DNA, 25 bp, Homo sapien
gtttagatgtcacaagggaaccctc

SEQ ID NO: 4429891 - DNA, 25 bp, Homo sapien
tctctccgtgcttgtaaggtgcttc

SEQ ID NO: 4429892 - DNA, 25 bp, Homo sapien
gacaatatcctgtagtccagcgcca

SEQ ID NO: 4429893 - DNA, 25 bp, Homo sapien
ccttccacggcgcttgacacaagat

SEQ ID NO: 4429894 - DNA, 25 bp, Homo sapien
ccaagacccgggagtacttcactat

SEQ ID NO: 4429895 - DNA, 25 bp, Homo sapien
tcccctcatcgccatctgtatggcc

SEQ ID NO: 4429896 - DNA, 25 bp, Homo sapien
catctgtatggccacctctttggtt

SEQ ID NO: 4429897 - DNA, 25 bp, Homo sapien
cgccatctgtatggccacctctttg

SEQ ID NO: 4429898 - DNA, 25 bp, Homo sapien
tcatcgccatctgtatggccacctc

SEQ ID NO: 4429899 - DNA, 25 bp, Homo sapien
gaaatgtcatcaggtgccagctcag

SEQ ID NO: 4429900 - DNA, 25 bp, Homo sapien
ttgaagaaatgtcatcaggtgccag

SEQ ID NO: 4429901 - DNA, 25 bp, Homo sapien
aatgtcatcaggtgccagctcagca

SEQ ID NO: 4429902 - DNA, 25 bp, Homo sapien
gaagaaatgtcatcaggtgccagct

SEQ ID NO: 4429903 - DNA, 25 bp, Homo sapien
cgggcacttgtagccttagtggtca

SEQ ID NO: 4429904 - DNA, 25 bp, Homo sapien
tacggtacgggcacttgtagcctta

SEQ ID NO: 4429905 - DNA, 25 bp, Homo sapien
tacctacggtacgggcacttgtagc

SEQ ID NO: 4429906 - DNA, 25 bp, Homo sapien
ggtacgggcacttgtagccttagtg

SEQ ID NO: 4429907 - DNA, 25 bp, Homo sapien
gacgtgcttttgatgggcagtgtgg

SEQ ID NO: 4429908 - DNA, 25 bp, Homo sapien
tcacggggacgtgcttttgatgggc

SEQ ID NO: 4429909 - DNA, 25 bp, Homo sapien
gggacgtgcttttgatgggcagtgt

SEQ ID NO: 4429910 - DNA, 25 bp, Homo sapien
cggggacgtgcttttgatgggcagt

SEQ ID NO: 4429911 - DNA, 25 bp, Homo sapien
gagcccacatgtttcctgatgggag

SEQ ID NO: 4429912 - DNA, 25 bp, Homo sapien
ggccacgggagttgtgtgcatgtgt

SEQ ID NO: 4429913 - DNA, 25 bp, Homo sapien
tgggagctggttttgcagggccacg

SEQ ID NO: 4429914 - DNA, 25 bp, Homo sapien
agcccacatgtttcctgatgggagc

SEQ ID NO: 4429915 - DNA, 25 bp, Homo sapien
ggtatgtcagagtgagcggcagcca

SEQ ID NO: 4429916 - DNA, 25 bp, Homo sapien
gacaggctcatcagtgtctgcatga

SEQ ID NO: 4429917 - DNA, 25 bp, Homo sapien
taagaaaagtatcggtttggctggc

SEQ ID NO: 4429918 - DNA, 25 bp, Homo sapien
tttggctggcaaacagtgacaggcg

SEQ ID NO: 4429919 - DNA, 25 bp, Homo sapien
tactctggtcagctggagttgtcca

SEQ ID NO: 4429920 - DNA, 25 bp, Homo sapien
tgttccacgtggtataagcaggtac

SEQ ID NO: 4429921 - DNA, 25 bp, Homo sapien
agggtgagaggatcctcggtctcct

SEQ ID NO: 4429922 - DNA, 25 bp, Homo sapien
ggatcctcggtctcctgttccacgt

SEQ ID NO: 4429923 - DNA, 25 bp, Homo sapien
tgtaagtgtctaaccctgggctgat

SEQ ID NO: 4429924 - DNA, 25 bp, Homo sapien
gcttccccattggacctgtaagtgt

SEQ ID NO: 4429925 - DNA, 25 bp, Homo sapien
cagctgctgctaatggaggctttgt

SEQ ID NO: 4429926 - DNA, 25 bp, Homo sapien
gattctgtaacctgcctggtcagca

SEQ ID NO: 4429927 - DNA, 25 bp, Homo sapien
taaaagttgatgtgagtctgtgaat

SEQ ID NO: 4429928 - DNA, 25 bp, Homo sapien
ggaattaatgttctgtatcaacaaa

SEQ ID NO: 4429929 - DNA, 25 bp, Homo sapien
tactctgatagcttttcattacaca

SEQ ID NO: 4429930 - DNA, 25 bp, Homo sapien
gtttttattattgtgccatgaggag

SEQ ID NO: 4429931 - DNA, 25 bp, Homo sapien
tccgtcatgtttccatcaggccagt

SEQ ID NO: 4429932 - DNA, 25 bp, Homo sapien
catgtttccatcaggccagtgggtg

SEQ ID NO: 4429933 - DNA, 25 bp, Homo sapien
tccatcaggccagtgggtggacaca

SEQ ID NO: 4429934 - DNA, 25 bp, Homo sapien
gggaggcatccgtcatgtttccatc

SEQ ID NO: 4429935 - DNA, 25 bp, Homo sapien
ccttgctccggtgggcactgtgcag

SEQ ID NO: 4429936 - DNA, 25 bp, Homo sapien
gccgtagccccgtggtcctgtagct

SEQ ID NO: 4429937 - DNA, 25 bp, Homo sapien
tgtgcagatgaaacaagcgtgctct

SEQ ID NO: 4429938 - DNA, 25 bp, Homo sapien
gacagccttcactctcatgtgtgcc

SEQ ID NO: 4429939 - DNA, 25 bp, Homo sapien
tccatggagtacaagttccatcccc

SEQ ID NO: 4429940 - DNA, 25 bp, Homo sapien
gagtacaagttccatccccctggat

SEQ ID NO: 4429941 - DNA, 25 bp, Homo sapien
ttctaattccatggagtacaagttc

SEQ ID NO: 4429942 - DNA, 25 bp, Homo sapien
aattccatggagtacaagttccatc

SEQ ID NO: 4429943 - DNA, 25 bp, Homo sapien
attatacattggattctgcatctca

SEQ ID NO: 4429944 - DNA, 25 bp, Homo sapien
ctatcccgaaattatacattggatt

SEQ ID NO: 4429945 - DNA, 25 bp, Homo sapien
aattatacattggattctgcatctc

SEQ ID NO: 4429946 - DNA, 25 bp, Homo sapien
cccgaaattatacattggattctgc

SEQ ID NO: 4429947 - DNA, 25 bp, Homo sapien
cactttcttgtttccgcttcctcca

SEQ ID NO: 4429948 - DNA, 25 bp, Homo sapien
ttctccttagagacaatgtgtatgt

SEQ ID NO: 4429949 - DNA, 25 bp, Homo sapien
cggaattgatttctccttagagaca

SEQ ID NO: 4429950 - DNA, 25 bp, Homo sapien
cccacggaattgatttctccttaga

SEQ ID NO: 4429951 - DNA, 25 bp, Homo sapien
cggagccgtgtcagtaagaccagga

SEQ ID NO: 4429952 - DNA, 25 bp, Homo sapien
ggagccgtgtcagtaagaccaggaa

SEQ ID NO: 4429953 - DNA, 25 bp, Homo sapien
gagccgtgtcagtaagaccaggaac

SEQ ID NO: 4429954 - DNA, 25 bp, Homo sapien
taattacttaatcctgctccttggc

SEQ ID NO: 4429955 - DNA, 25 bp, Homo sapien
tggtgttttggaacgccgggcatct

SEQ ID NO: 4429956 - DNA, 25 bp, Homo sapien
taatgtactcatccccaaggtaggg

SEQ ID NO: 4429957 - DNA, 25 bp, Homo sapien
tcctggtgggctagtgtataattac

SEQ ID NO: 4429958 - DNA, 25 bp, Homo sapien
gtggagcctctctagccatcttcat

SEQ ID NO: 4429959 - DNA, 25 bp, Homo sapien
ctcagcctgagtggccgtggaccgc

SEQ ID NO: 4429960 - DNA, 25 bp, Homo sapien
ctgagtggccgtggaccgcctgcca

SEQ ID NO: 4429961 - DNA, 25 bp, Homo sapien
gactgtggagcctctctagccatct

SEQ ID NO: 4429962 - DNA, 25 bp, Homo sapien
ctgaaaactttcctccaagtagcca

SEQ ID NO: 4429963 - DNA, 25 bp, Homo sapien
gagcacctgtctctcgtgatgcccc

SEQ ID NO: 4429964 - DNA, 25 bp, Homo sapien
tgtctctcgtgatgcccctttccag

SEQ ID NO: 4429965 - DNA, 25 bp, Homo sapien
cagccccttcccaccatggaagact

SEQ ID NO: 4429966 - DNA, 25 bp, Homo sapien
tgccccgagcacctgtctctcgtga

SEQ ID NO: 4429967 - DNA, 25 bp, Homo sapien
ctttaggcagcggtttgtttggcat

SEQ ID NO: 4429968 - DNA, 25 bp, Homo sapien
ccttgtgctgtggtgcaaggtcttt

SEQ ID NO: 4429969 - DNA, 25 bp, Homo sapien
gtgcaaggtctttaggcagcggttt

SEQ ID NO: 4429970 - DNA, 25 bp, Homo sapien
aggtctttaggcagcggtttgtttg

SEQ ID NO: 4429971 - DNA, 25 bp, Homo sapien
gtaggagacctgtcaccatgggtca

SEQ ID NO: 4429972 - DNA, 25 bp, Homo sapien
catgggtcagctcgcccttccgtag

SEQ ID NO: 4429973 - DNA, 25 bp, Homo sapien
gaagtaggagacctgtcaccatggg

SEQ ID NO: 4429974 - DNA, 25 bp, Homo sapien
ctggaggtctctcctctcgggaagg

SEQ ID NO: 4429975 - DNA, 25 bp, Homo sapien
ggtgtctgcagcagcagccactgag

SEQ ID NO: 4429976 - DNA, 25 bp, Homo sapien
gctgacctccttggtgtctgcagca

SEQ ID NO: 4429977 - DNA, 25 bp, Homo sapien
gtctgcagcagcagccactgagtag

SEQ ID NO: 4429978 - DNA, 25 bp, Homo sapien
ctgacctccttggtgtctgcagcag

SEQ ID NO: 4429979 - DNA, 25 bp, Homo sapien
aaaccttggtggctggaccacgaag

SEQ ID NO: 4429980 - DNA, 25 bp, Homo sapien
cacgaagagggatgtgtcctttctc

SEQ ID NO: 4429981 - DNA, 25 bp, Homo sapien
cctgcctggtggtggtaaaaccttg

SEQ ID NO: 4429982 - DNA, 25 bp, Homo sapien
tgcagtcgagggaaatgtctgtcct

SEQ ID NO: 4429983 - DNA, 25 bp, Homo sapien
tggcttctactctagggaagtgtga

SEQ ID NO: 4429984 - DNA, 25 bp, Homo sapien
tacctctgtggcttctactctaggg

SEQ ID NO: 4429985 - DNA, 25 bp, Homo sapien
tctgtggcttctactctagggaagt

SEQ ID NO: 4429986 - DNA, 25 bp, Homo sapien
tttggtacctctgtggcttctactc

SEQ ID NO: 4429987 - DNA, 25 bp, Homo sapien
caatgggaaaaggatcattgttttc

SEQ ID NO: 4429988 - DNA, 25 bp, Homo sapien
aagaccccgaatagcccaagcaatt

SEQ ID NO: 4429989 - DNA, 25 bp, Homo sapien
aaactgaagtcatcacatctcctga

SEQ ID NO: 4429990 - DNA, 25 bp, Homo sapien
tggagagttatctgacactgtacac

SEQ ID NO: 4429991 - DNA, 25 bp, Homo sapien
gggagcatgggtgacattgtcctgt

SEQ ID NO: 4429992 - DNA, 25 bp, Homo sapien
tgggagcatgggtgacattgtcctg

SEQ ID NO: 4429993 - DNA, 25 bp, Homo sapien
tggtaggttttcatgcagacagaga

SEQ ID NO: 4429994 - DNA, 25 bp, Homo sapien
agagattccatcaaggggccgttct

SEQ ID NO: 4429995 - DNA, 25 bp, Homo sapien
gagattccatcaaggggccgttctt

SEQ ID NO: 4429996 - DNA, 25 bp, Homo sapien
gattccatcaaggggccgttctttc

SEQ ID NO: 4429997 - DNA, 25 bp, Homo sapien
ttttcttccatagagcaagggtctg

SEQ ID NO: 4429998 - DNA, 25 bp, Homo sapien
gcttttgtgtcgcagtagtgcacac

SEQ ID NO: 4429999 - DNA, 25 bp, Homo sapien
ttgaaacgcccttgatctctgttgt

SEQ ID NO: 4430000 - DNA, 25 bp, Homo sapien
cagttcctcttgaaacgcccttgat

SEQ ID NO: 4430001 - DNA, 25 bp, Homo sapien
ttatccctttctcttgaatgctcca

SEQ ID NO: 4430002 - DNA, 25 bp, Homo sapien
cttctttatccctttctcttgaatg

SEQ ID NO: 4430003 - DNA, 25 bp, Homo sapien
ctgtcttctttatccctttctcttg

SEQ ID NO: 4430004 - DNA, 25 bp, Homo sapien
tttatccctttctcttgaatgctcc

SEQ ID NO: 4430005 - DNA, 25 bp, Homo sapien
tgtgccgttcttttcaggagttact

SEQ ID NO: 4430006 - DNA, 25 bp, Homo sapien
ttgcctcattggagaactttccagt

SEQ ID NO: 4430007 - DNA, 25 bp, Homo sapien
cacatctagttcagatgtgccgttc

SEQ ID NO: 4430008 - DNA, 25 bp, Homo sapien
catgtaggttctgcccacatctagt

SEQ ID NO: 4430009 - DNA, 25 bp, Homo sapien
cgtggaagggctgcatttacagaga

SEQ ID NO: 4430010 - DNA, 25 bp, Homo sapien
catttacagagagtgctgctcgtca

SEQ ID NO: 4430011 - DNA, 25 bp, Homo sapien
atttacagagagtgctgctcgtcat

SEQ ID NO: 4430012 - DNA, 25 bp, Homo sapien
agcagcgtggaagggctgcatttac

SEQ ID NO: 4430013 - DNA, 25 bp, Homo sapien
gggacacgacctcgccatccgagcg

SEQ ID NO: 4430014 - DNA, 25 bp, Homo sapien
cacgacctcgccatccgagcggccg

SEQ ID NO: 4430015 - DNA, 25 bp, Homo sapien
gcgcgccggggacacgacctcgcca

SEQ ID NO: 4430016 - DNA, 25 bp, Homo sapien
cggggacacgacctcgccatccgag

SEQ ID NO: 4430017 - DNA, 25 bp, Homo sapien
gggcgcagttcgaaactccgagcag

SEQ ID NO: 4430018 - DNA, 25 bp, Homo sapien
gaaactccgagcagaataactccag

SEQ ID NO: 4430019 - DNA, 25 bp, Homo sapien
caggcttctcggtgagtgtccgcga

SEQ ID NO: 4430020 - DNA, 25 bp, Homo sapien
cctattgcgctgattcccggagtta

SEQ ID NO: 4430021 - DNA, 25 bp, Homo sapien
ctctgaaggctcggctggcccgctg

SEQ ID NO: 4430022 - DNA, 25 bp, Homo sapien
gcgctcggaatttccctcctgtctg

SEQ ID NO: 4430023 - DNA, 25 bp, Homo sapien
ctccgccgcggaggctgatgccgtt

SEQ ID NO: 4430024 - DNA, 25 bp, Homo sapien
atgccgttgcccttgatgcgctgcc

SEQ ID NO: 4430025 - DNA, 25 bp, Homo sapien
gccagaggcttagtcctgttaaaga

SEQ ID NO: 4430026 - DNA, 25 bp, Homo sapien
aatgccggccagaggcttagtcctg

SEQ ID NO: 4430027 - DNA, 25 bp, Homo sapien
ggcttagtcctgttaaagataagaa

SEQ ID NO: 4430028 - DNA, 25 bp, Homo sapien
ttaaacaatgccggccagaggctta

SEQ ID NO: 4430029 - DNA, 25 bp, Homo sapien
tgacgaatgaagacacgcagaggca

SEQ ID NO: 4430030 - DNA, 25 bp, Homo sapien
tctggaagatgatatgcagcccctt

SEQ ID NO: 4430031 - DNA, 25 bp, Homo sapien
cgaatagctgtaaatccgcagcggg

SEQ ID NO: 4430032 - DNA, 25 bp, Homo sapien
gcttgtcaagcaccatctggaagat

SEQ ID NO: 4430033 - DNA, 25 bp, Homo sapien
gcactgatctgactgccacagtgtc

SEQ ID NO: 4430034 - DNA, 25 bp, Homo sapien
tgctatgaccatcactgataacttc

SEQ ID NO: 4430035 - DNA, 25 bp, Homo sapien
cactgatctgactgccacagtgtcc

SEQ ID NO: 4430036 - DNA, 25 bp, Homo sapien
gctatgaccatcactgataacttcc

SEQ ID NO: 4430037 - DNA, 25 bp, Homo sapien
caagatgtggtccagctacagatcg

SEQ ID NO: 4430038 - DNA, 25 bp, Homo sapien
gtccagctacagatcgtggtccctg

SEQ ID NO: 4430039 - DNA, 25 bp, Homo sapien
gctacagatcgtggtccctgggcag

SEQ ID NO: 4430040 - DNA, 25 bp, Homo sapien
tgtggtccagctacagatcgtggtc

SEQ ID NO: 4430041 - DNA, 25 bp, Homo sapien
aggttctggatccaccaggatagtg

SEQ ID NO: 4430042 - DNA, 25 bp, Homo sapien
actgaccgaaaacaaagtggtctgg

SEQ ID NO: 4430043 - DNA, 25 bp, Homo sapien
ctgaccgaaaacaaagtggtctggt

SEQ ID NO: 4430044 - DNA, 25 bp, Homo sapien
aactgaccgaaaacaaagtggtctg

SEQ ID NO: 4430045 - DNA, 25 bp, Homo sapien
gagggcattacactggaggtgttca

SEQ ID NO: 4430046 - DNA, 25 bp, Homo sapien
agtgagggcattacactggaggtgt

SEQ ID NO: 4430047 - DNA, 25 bp, Homo sapien
ggcattacactggaggtgttcatga

SEQ ID NO: 4430048 - DNA, 25 bp, Homo sapien
cattacactggaggtgttcatgatg

SEQ ID NO: 4430049 - DNA, 25 bp, Homo sapien
ggggagggggcactgcagggctcag

SEQ ID NO: 4430050 - DNA, 25 bp, Homo sapien
ctaccagtggatggatggggagggg

SEQ ID NO: 4430051 - DNA, 25 bp, Homo sapien
agggggcactgcagggctcagccac

SEQ ID NO: 4430052 - DNA, 25 bp, Homo sapien
ggagggggcactgcagggctcagcc

SEQ ID NO: 4430053 - DNA, 25 bp, Homo sapien
ctcgagggtgcggaagcgaatatta

SEQ ID NO: 4430054 - DNA, 25 bp, Homo sapien
ggtgcggaagcgaatattataagga

SEQ ID NO: 4430055 - DNA, 25 bp, Homo sapien
atagttttgtgtggtcagctcgagg

SEQ ID NO: 4430056 - DNA, 25 bp, Homo sapien
agacaggtgggtcaggtcctcatag

SEQ ID NO: 4430057 - DNA, 25 bp, Homo sapien
ctggtgagggaagcagaggaaggtg

SEQ ID NO: 4430058 - DNA, 25 bp, Homo sapien
gaagcagaggaaggtggtgacccca

SEQ ID NO: 4430059 - DNA, 25 bp, Homo sapien
gtgagggaagcagaggaaggtggtg

SEQ ID NO: 4430060 - DNA, 25 bp, Homo sapien
gggaagcagaggaaggtggtgaccc

SEQ ID NO: 4430061 - DNA, 25 bp, Homo sapien
tgggaaggacactgtattgactgct

SEQ ID NO: 4430062 - DNA, 25 bp, Homo sapien
gctagcttgcagaggtccgaattga

SEQ ID NO: 4430063 - DNA, 25 bp, Homo sapien
ggcatggtgagagccctatacagct

SEQ ID NO: 4430064 - DNA, 25 bp, Homo sapien
ggtgagagccctatacagctggctt

SEQ ID NO: 4430065 - DNA, 25 bp, Homo sapien
agccttcccgcacaatacagcaggg

SEQ ID NO: 4430066 - DNA, 25 bp, Homo sapien
ataccagtggaggacagccttcccg

SEQ ID NO: 4430067 - DNA, 25 bp, Homo sapien
gaacgtgaccgccatcttgtggcca

SEQ ID NO: 4430068 - DNA, 25 bp, Homo sapien
gaccgttgttagcatccattccatg

SEQ ID NO: 4430069 - DNA, 25 bp, Homo sapien
tccaggttagcctgggcgatggcag

SEQ ID NO: 4430070 - DNA, 25 bp, Homo sapien
gctgctctgtgaaccggggtggggg

SEQ ID NO: 4430071 - DNA, 25 bp, Homo sapien
ctctgtgaaccggggtgggggctgc

SEQ ID NO: 4430072 - DNA, 25 bp, Homo sapien
ccaggttagcctgggcgatggcagc

SEQ ID NO: 4430073 - DNA, 25 bp, Homo sapien
ccacatcctggtaaaaagaagtctg

SEQ ID NO: 4430074 - DNA, 25 bp, Homo sapien
cccttcaagtggtgtcagaggactt

SEQ ID NO: 4430075 - DNA, 25 bp, Homo sapien
tataaagggtaagggaaatgctctg

SEQ ID NO: 4430076 - DNA, 25 bp, Homo sapien
gtggtgagccctctgacagccatca

SEQ ID NO: 4430077 - DNA, 25 bp, Homo sapien
cagaactaatgagaacagtgaatgc

SEQ ID NO: 4430078 - DNA, 25 bp, Homo sapien
gccatctggaaggactcgttcatct

SEQ ID NO: 4430079 - DNA, 25 bp, Homo sapien
tgccatctggaaggactcgttcatc

SEQ ID NO: 4430080 - DNA, 25 bp, Homo sapien
ctgccatctggaaggactcgttcat

SEQ ID NO: 4430081 - DNA, 25 bp, Homo sapien
ttgcatatcactatgacaagcctca

SEQ ID NO: 4430082 - DNA, 25 bp, Homo sapien
catatcactatgacaagcctcagcc

SEQ ID NO: 4430083 - DNA, 25 bp, Homo sapien
tatcactatgacaagcctcagcctc

SEQ ID NO: 4430084 - DNA, 25 bp, Homo sapien
gggcattgcatatcactatgacaag

SEQ ID NO: 4430085 - DNA, 25 bp, Homo sapien
atctggtgcacatgaaggggcatct

SEQ ID NO: 4430086 - DNA, 25 bp, Homo sapien
catctggtgcacatgaaggggcatc

SEQ ID NO: 4430087 - DNA, 25 bp, Homo sapien
tggcatctggtgcacatgaaggggc

SEQ ID NO: 4430088 - DNA, 25 bp, Homo sapien
ccagtggaaagtaacagccccacca

SEQ ID NO: 4430089 - DNA, 25 bp, Homo sapien
gatcaacgggtgctgttttaagctg

SEQ ID NO: 4430090 - DNA, 25 bp, Homo sapien
tccagaatggtgaggtgatcaacgg

SEQ ID NO: 4430091 - DNA, 25 bp, Homo sapien
gaaatatggtaatcacggccaggcg

SEQ ID NO: 4430092 - DNA, 25 bp, Homo sapien
aaatctgacatttgccctgcttcca

SEQ ID NO: 4430093 - DNA, 25 bp, Homo sapien
ttccgagtctcccagcgtcggcatc

SEQ ID NO: 4430094 - DNA, 25 bp, Homo sapien
ttccacacgcggcttccgagtctcc

SEQ ID NO: 4430095 - DNA, 25 bp, Homo sapien
tcccagcgtcggcatccagcccagg

SEQ ID NO: 4430096 - DNA, 25 bp, Homo sapien
tgccatcttccacacgcggcttccg

SEQ ID NO: 4430097 - DNA, 25 bp, Homo sapien
ttggagcaagttcccaaccgatgac

SEQ ID NO: 4430098 - DNA, 25 bp, Homo sapien
gctgcatcccagacagtgtaacatc

SEQ ID NO: 4430099 - DNA, 25 bp, Homo sapien
aggacttcagaaaaccggagacttg

SEQ ID NO: 4430100 - DNA, 25 bp, Homo sapien
gattgctgggcgcagctgcatccca

SEQ ID NO: 4430101 - DNA, 25 bp, Homo sapien
gggagccgctggaaaaccctccaca

SEQ ID NO: 4430102 - DNA, 25 bp, Homo sapien
acaaataagatgcactgaggaagta

SEQ ID NO: 4430103 - DNA, 25 bp, Homo sapien
atgaatggggtggtggacagtgtcc

SEQ ID NO: 4430104 - DNA, 25 bp, Homo sapien
ccctgcatccaatgaatggggtggt

SEQ ID NO: 4430105 - DNA, 25 bp, Homo sapien
gacagccactgccacgtacagctaa

SEQ ID NO: 4430106 - DNA, 25 bp, Homo sapien
gccacgtacagctaatgcttcgtta

SEQ ID NO: 4430107 - DNA, 25 bp, Homo sapien
tatggtaatagggaccgggatgaca

SEQ ID NO: 4430108 - DNA, 25 bp, Homo sapien
gctaatgcttcgttatttatggtaa

SEQ ID NO: 4430109 - DNA, 25 bp, Homo sapien
gggagcgaagggcaggcgcgcccag

SEQ ID NO: 4430110 - DNA, 25 bp, Homo sapien
aggtcggggagcgaagggcaggcgc

SEQ ID NO: 4430111 - DNA, 25 bp, Homo sapien
gggcggcgtgctggagatccgcggc

SEQ ID NO: 4430112 - DNA, 25 bp, Homo sapien
cgcggccaaccgtggggtgagcaag

SEQ ID NO: 4430113 - DNA, 25 bp, Homo sapien
cctcgctgcgggtggacatgctcgt

SEQ ID NO: 4430114 - DNA, 25 bp, Homo sapien
acatgctcgtgcgagtcgcgcgggc

SEQ ID NO: 4430115 - DNA, 25 bp, Homo sapien
gacgctgcgtgggagttcccatccc

SEQ ID NO: 4430116 - DNA, 25 bp, Homo sapien
ttctggcgggctccgtagcagtgac

SEQ ID NO: 4430117 - DNA, 25 bp, Homo sapien
ggcctccctgggtgccagccgcctc

SEQ ID NO: 4430118 - DNA, 25 bp, Homo sapien
cgcctcggcctccctgggtgccagc

SEQ ID NO: 4430119 - DNA, 25 bp, Homo sapien
ctcggcctccctgggtgccagccgc

SEQ ID NO: 4430120 - DNA, 25 bp, Homo sapien
gcctccctgggtgccagccgcctcc

SEQ ID NO: 4430121 - DNA, 25 bp, Homo sapien
cattagcagcatttggcacgctgga

SEQ ID NO: 4430122 - DNA, 25 bp, Homo sapien
tatctctgaaatgccacgcagcttc

SEQ ID NO: 4430123 - DNA, 25 bp, Homo sapien
tctgatatgaaaagaagacatggcc

SEQ ID NO: 4430124 - DNA, 25 bp, Homo sapien
tgaggaggtctagcaacatcagagc

SEQ ID NO: 4430125 - DNA, 25 bp, Homo sapien
ggagagccaggtgactatccccatg

SEQ ID NO: 4430126 - DNA, 25 bp, Homo sapien
cgtgtttttgctacagggaccctgg

SEQ ID NO: 4430127 - DNA, 25 bp, Homo sapien
cagagctctgctgaccttataggat

SEQ ID NO: 4430128 - DNA, 25 bp, Homo sapien
caagcaatgctcaagtcaacggact

SEQ ID NO: 4430129 - DNA, 25 bp, Homo sapien
tagcaacacacttcgggtgtcatcg

SEQ ID NO: 4430130 - DNA, 25 bp, Homo sapien
aaaacgagattacagagcagactgg

SEQ ID NO: 4430131 - DNA, 25 bp, Homo sapien
tgcaatatcatcgaccaaaacgaga

SEQ ID NO: 4430132 - DNA, 25 bp, Homo sapien
cagagcagactggacattagcaaca

SEQ ID NO: 4430133 - DNA, 25 bp, Homo sapien
atctccatacgttctggattacagc

SEQ ID NO: 4430134 - DNA, 25 bp, Homo sapien
gcatctggtggccttcaaagtatgt

SEQ ID NO: 4430135 - DNA, 25 bp, Homo sapien
tacgttctggattacagccaaggca

SEQ ID NO: 4430136 - DNA, 25 bp, Homo sapien
catctggtggccttcaaagtatgtt

SEQ ID NO: 4430137 - DNA, 25 bp, Homo sapien
agtggcaggctttattgaggcaagt

SEQ ID NO: 4430138 - DNA, 25 bp, Homo sapien
gtggcaggctttattgaggcaagtg

SEQ ID NO: 4430139 - DNA, 25 bp, Homo sapien
gcagctgtaacacagccatgagtat

SEQ ID NO: 4430140 - DNA, 25 bp, Homo sapien
taggctacatacgtgtacagcatgg

SEQ ID NO: 4430141 - DNA, 25 bp, Homo sapien
gaccactgttatatacgatctgttg

SEQ ID NO: 4430142 - DNA, 25 bp, Homo sapien
cagtcgaagaaatgcgttgttagat

SEQ ID NO: 4430143 - DNA, 25 bp, Homo sapien
cagatagatacagaacccgtgggta

SEQ ID NO: 4430144 - DNA, 25 bp, Homo sapien
gaattatattgggacagctgtcccg

SEQ ID NO: 4430145 - DNA, 25 bp, Homo sapien
agctgtcccgcctcttcagggaaaa

SEQ ID NO: 4430146 - DNA, 25 bp, Homo sapien
aaagttggcattgcagattggcaga

SEQ ID NO: 4430147 - DNA, 25 bp, Homo sapien
aaagaaccctacaggttgctgctgc

SEQ ID NO: 4430148 - DNA, 25 bp, Homo sapien
ctgctggctggctaagtgctgaaga

SEQ ID NO: 4430149 - DNA, 25 bp, Homo sapien
tagaaaagaaccctacaggttgctg

SEQ ID NO: 4430150 - DNA, 25 bp, Homo sapien
gctaagtgctgaagaccgggccagc

SEQ ID NO: 4430151 - DNA, 25 bp, Homo sapien
agcccatgctcgcagatacccaagg

SEQ ID NO: 4430152 - DNA, 25 bp, Homo sapien
tgctcgcagatacccaagggcctcg

SEQ ID NO: 4430153 - DNA, 25 bp, Homo sapien
gcagatacccaagggcctcgggcac

SEQ ID NO: 4430154 - DNA, 25 bp, Homo sapien
catgctcgcagatacccaagggcct

SEQ ID NO: 4430155 - DNA, 25 bp, Homo sapien
ctagacagggagcagttggctagga

SEQ ID NO: 4430156 - DNA, 25 bp, Homo sapien
gagcagttggctaggaagggatgtg

SEQ ID NO: 4430157 - DNA, 25 bp, Homo sapien
gcagttggctaggaagggatgtggc

SEQ ID NO: 4430158 - DNA, 25 bp, Homo sapien
ggagcagttggctaggaagggatgt

SEQ ID NO: 4430159 - DNA, 25 bp, Homo sapien
taatgcagtacacaaggcactgagc

SEQ ID NO: 4430160 - DNA, 25 bp, Homo sapien
tccactaatgctgcgtgagtcagtt

SEQ ID NO: 4430161 - DNA, 25 bp, Homo sapien
cacagacgttgacactgggtggctt

SEQ ID NO: 4430162 - DNA, 25 bp, Homo sapien
gtgaggagacacagacgttgacact

SEQ ID NO: 4430163 - DNA, 25 bp, Homo sapien
cagcgtttctatgacacatgcaagg

SEQ ID NO: 4430164 - DNA, 25 bp, Homo sapien
taatttgtgatacaatgctgtgccc

SEQ ID NO: 4430165 - DNA, 25 bp, Homo sapien
tatggcacatcagcacgatttctgt

SEQ ID NO: 4430166 - DNA, 25 bp, Homo sapien
tctgcagcaataaagcagcgtttct

SEQ ID NO: 4430167 - DNA, 25 bp, Homo sapien
tggtcggaaaacatgctacacactg

SEQ ID NO: 4430168 - DNA, 25 bp, Homo sapien
actgcatgtttgtgattgacgggac

SEQ ID NO: 4430169 - DNA, 25 bp, Homo sapien
agatgagtgagcatgcccctgaacc

SEQ ID NO: 4430170 - DNA, 25 bp, Homo sapien
gccctggcctagcatacgtacacat

SEQ ID NO: 4430171 - DNA, 25 bp, Homo sapien
gactttcctgaaccaactactttga

SEQ ID NO: 4430172 - DNA, 25 bp, Homo sapien
acaacttacagcttatcttcctgtc

SEQ ID NO: 4430173 - DNA, 25 bp, Homo sapien
taggttatttattatcaggctagac

SEQ ID NO: 4430174 - DNA, 25 bp, Homo sapien
gatgcattttgtaagccagaaaagg

SEQ ID NO: 4430175 - DNA, 25 bp, Homo sapien
tggcggtggcgacaggacgtaggtg

SEQ ID NO: 4430176 - DNA, 25 bp, Homo sapien
gtggcggtggcgacaggacgtaggt

SEQ ID NO: 4430177 - DNA, 25 bp, Homo sapien
ggcggtggcgacaggacgtaggtgc

SEQ ID NO: 4430178 - DNA, 25 bp, Homo sapien
ggtggcggtggcgacaggacgtagg

SEQ ID NO: 4430179 - DNA, 25 bp, Homo sapien
ttcaccttggctttatctcccttag

SEQ ID NO: 4430180 - DNA, 25 bp, Homo sapien
cttcaccttggctttatctccctta

SEQ ID NO: 4430181 - DNA, 25 bp, Homo sapien
ggtttagcagacaacctcgcggatc

SEQ ID NO: 4430182 - DNA, 25 bp, Homo sapien
ttagcagacaacctcgcggatcttc

SEQ ID NO: 4430183 - DNA, 25 bp, Homo sapien
aagtctatgctgaaacgtggaaagg

SEQ ID NO: 4430184 - DNA, 25 bp, Homo sapien
gttttctccacatcaatccagtttt

SEQ ID NO: 4430185 - DNA, 25 bp, Homo sapien
ttctgtgtgcgaacaacatagctta

SEQ ID NO: 4430186 - DNA, 25 bp, Homo sapien
tctatgctgaaacgtggaaagggag

SEQ ID NO: 4430187 - DNA, 25 bp, Homo sapien
aaaagtagctcatccttgtttgagc

SEQ ID NO: 4430188 - DNA, 25 bp, Homo sapien
ttctacttcagtgcagctcattaag

SEQ ID NO: 4430189 - DNA, 25 bp, Homo sapien
catttgcatatttaaccggccaatc

SEQ ID NO: 4430190 - DNA, 25 bp, Homo sapien
gaatacacctccacagaatggttaa

SEQ ID NO: 4430191 - DNA, 25 bp, Homo sapien
tattaatcggctacactggtcacac

SEQ ID NO: 4430192 - DNA, 25 bp, Homo sapien
cactgagtggccgagaatttgctgt

SEQ ID NO: 4430193 - DNA, 25 bp, Homo sapien
tcttggaaagggaacaacggtgctc

SEQ ID NO: 4430194 - DNA, 25 bp, Homo sapien
tgctggccaccgagtactttaggat

SEQ ID NO: 4430195 - DNA, 25 bp, Homo sapien
cagaaggaaggtactaatccatctc

SEQ ID NO: 4430196 - DNA, 25 bp, Homo sapien
agcagaaggaaggtactaatccatc

SEQ ID NO: 4430197 - DNA, 25 bp, Homo sapien
gaaggaaggtactaatccatctcca

SEQ ID NO: 4430198 - DNA, 25 bp, Homo sapien
aggaaggtactaatccatctccagg

SEQ ID NO: 4430199 - DNA, 25 bp, Homo sapien
ttgtaaacatttgcgagtaaagggc

SEQ ID NO: 4430200 - DNA, 25 bp, Homo sapien
gatgctgtattatggagccacttca

SEQ ID NO: 4430201 - DNA, 25 bp, Homo sapien
gcatattgaaaagcatcactcgtta

SEQ ID NO: 4430202 - DNA, 25 bp, Homo sapien
tacatatgatgcgtttgttttcccc

SEQ ID NO: 4430203 - DNA, 25 bp, Homo sapien
agttacgtggcgaagccggcttccg

SEQ ID NO: 4430204 - DNA, 25 bp, Homo sapien
ggctgcgaaagctgcgggaggccga

SEQ ID NO: 4430205 - DNA, 25 bp, Homo sapien
tcggagggaggtgccggtcgggcgc

SEQ ID NO: 4430206 - DNA, 25 bp, Homo sapien
ggaggccacgggtgctgctgacggg

SEQ ID NO: 4430207 - DNA, 25 bp, Homo sapien
tcgggtatcggctctgccggccttt

SEQ ID NO: 4430208 - DNA, 25 bp, Homo sapien
gaaacaactgtcgggtatcggctct

SEQ ID NO: 4430209 - DNA, 25 bp, Homo sapien
actgtcgggtatcggctctgccggc

SEQ ID NO: 4430210 - DNA, 25 bp, Homo sapien
tgccggcctttccagccgcactcat

SEQ ID NO: 4430211 - DNA, 25 bp, Homo sapien
acaacgccgaggcacgcggtgacag

SEQ ID NO: 4430212 - DNA, 25 bp, Homo sapien
cagaaaatgcattccgccttccgtg

SEQ ID NO: 4430213 - DNA, 25 bp, Homo sapien
ttccgtgggaacaacgccgaggcac

SEQ ID NO: 4430214 - DNA, 25 bp, Homo sapien
tgcattccgccttccgtgggaacaa

SEQ ID NO: 4430215 - DNA, 25 bp, Homo sapien
agcaacgcttctgaccctgccggag

SEQ ID NO: 4430216 - DNA, 25 bp, Homo sapien
gggtgcccatgacctcatcaccagt

SEQ ID NO: 4430217 - DNA, 25 bp, Homo sapien
tttcagccttggcagtcggcgccgg

SEQ ID NO: 4430218 - DNA, 25 bp, Homo sapien
gcgccggtgaacgagagcaacgctt

SEQ ID NO: 4430219 - DNA, 25 bp, Homo sapien
gaaaaccattgtctaaagcctgatg

SEQ ID NO: 4430220 - DNA, 25 bp, Homo sapien
cggttgtggcactataccagatact

SEQ ID NO: 4430221 - DNA, 25 bp, Homo sapien
gatgttactaaggatttctggcatt

SEQ ID NO: 4430222 - DNA, 25 bp, Homo sapien
gatgtgtggcacttcgaagccttaa

SEQ ID NO: 4430223 - DNA, 25 bp, Homo sapien
gatagtgtctctagatttaggtgct

SEQ ID NO: 4430224 - DNA, 25 bp, Homo sapien
ttctaggcagcttatgcaattgcac

SEQ ID NO: 4430225 - DNA, 25 bp, Homo sapien
cattgggcaacttgtaaaagtgaca

SEQ ID NO: 4430226 - DNA, 25 bp, Homo sapien
aataaactgcaggaataaagctttg

SEQ ID NO: 4430227 - DNA, 25 bp, Homo sapien
gcagcctggtgtttggctccaagtc

SEQ ID NO: 4430228 - DNA, 25 bp, Homo sapien
aagggcaaatgcagcctggtgtttg

SEQ ID NO: 4430229 - DNA, 25 bp, Homo sapien
ctcccaagggcaaatgcagcctggt

SEQ ID NO: 4430230 - DNA, 25 bp, Homo sapien
aaatgcagcctggtgtttggctcca

SEQ ID NO: 4430231 - DNA, 25 bp, Homo sapien
ttaggctttaaattggtgctgtttg

SEQ ID NO: 4430232 - DNA, 25 bp, Homo sapien
cgtggcatttgctactgtcggtaac

SEQ ID NO: 4430233 - DNA, 25 bp, Homo sapien
gagtaattctcgtcttatcagaagg

SEQ ID NO: 4430234 - DNA, 25 bp, Homo sapien
gctgtttgttaatatcttcgtggca

SEQ ID NO: 4430235 - DNA, 25 bp, Homo sapien
tgaatgaaactggaactgagtgaag

SEQ ID NO: 4430236 - DNA, 25 bp, Homo sapien
tctgagtgctcagggtgacggtggc

SEQ ID NO: 4430237 - DNA, 25 bp, Homo sapien
caggctcagtctgagtatctttctg

SEQ ID NO: 4430238 - DNA, 25 bp, Homo sapien
gggtgacggtggctcttgtgggtcc

SEQ ID NO: 4430239 - DNA, 25 bp, Homo sapien
gtggtgacagccttaaatgggaaac

SEQ ID NO: 4430240 - DNA, 25 bp, Homo sapien
ggtggtgacagccttaaatgggaaa

SEQ ID NO: 4430241 - DNA, 25 bp, Homo sapien
ggttgatgatgccagccccaatcat

SEQ ID NO: 4430242 - DNA, 25 bp, Homo sapien
tgctgtctgttgtaggctcatctca

SEQ ID NO: 4430243 - DNA, 25 bp, Homo sapien
gtcctccaactaagatgtgtcgttt

SEQ ID NO: 4430244 - DNA, 25 bp, Homo sapien
gggtattgtctctgactgctgtctg

SEQ ID NO: 4430245 - DNA, 25 bp, Homo sapien
gtgccacaacgcccggctaatcttt

SEQ ID NO: 4430246 - DNA, 25 bp, Homo sapien
caccatgttggccagcacagtctcg

SEQ ID NO: 4430247 - DNA, 25 bp, Homo sapien
tgccacaacgcccggctaatctttg

SEQ ID NO: 4430248 - DNA, 25 bp, Homo sapien
tggccagcacagtctcgatctcttg

SEQ ID NO: 4430249 - DNA, 25 bp, Homo sapien
tagaatacccagacttagctttaaa

SEQ ID NO: 4430250 - DNA, 25 bp, Homo sapien
tagatggttcctagaatacccagac

SEQ ID NO: 4430251 - DNA, 25 bp, Homo sapien
gctgtcgctagggtagatggttcct

SEQ ID NO: 4430252 - DNA, 25 bp, Homo sapien
gtggtgaccacaggattgctgtcgc

SEQ ID NO: 4430253 - DNA, 25 bp, Homo sapien
gctgacacgtactcattttctgacc

SEQ ID NO: 4430254 - DNA, 25 bp, Homo sapien
gaccctggtagctgacacgtactca

SEQ ID NO: 4430255 - DNA, 25 bp, Homo sapien
gtggctgcatgaccctggtagctga

SEQ ID NO: 4430256 - DNA, 25 bp, Homo sapien
tcagggtggctgcatgaccctggta

SEQ ID NO: 4430257 - DNA, 25 bp, Homo sapien
tgttttgctgatcggggcatgccat

SEQ ID NO: 4430258 - DNA, 25 bp, Homo sapien
tcaaggtcggggtggatggccactc

SEQ ID NO: 4430259 - DNA, 25 bp, Homo sapien
ggtcggggtggatggccactctctg

SEQ ID NO: 4430260 - DNA, 25 bp, Homo sapien
ttgttttgctgatcggggcatgcca

SEQ ID NO: 4430261 - DNA, 25 bp, Homo sapien
ccagctgtgccattctcatcgattt

SEQ ID NO: 4430262 - DNA, 25 bp, Homo sapien
aatgcccttctctatcacctttttc

SEQ ID NO: 4430263 - DNA, 25 bp, Homo sapien
ttcttgagaagtctagccactactg

SEQ ID NO: 4430264 - DNA, 25 bp, Homo sapien
tcagtagcgggtaagcgttccgtca

SEQ ID NO: 4430265 - DNA, 25 bp, Homo sapien
cctgtgttcctcttccctgacagtg

SEQ ID NO: 4430266 - DNA, 25 bp, Homo sapien
ttcctcttccctgacagtggctggc

SEQ ID NO: 4430267 - DNA, 25 bp, Homo sapien
ggctgtgaggttgtttcctgcccct

SEQ ID NO: 4430268 - DNA, 25 bp, Homo sapien
cagtggctggccctgcaggtttgca

SEQ ID NO: 4430269 - DNA, 25 bp, Homo sapien
gaacacggtagaaagaaagtccatg

SEQ ID NO: 4430270 - DNA, 25 bp, Homo sapien
catcaccagtacgagagcctggaag

SEQ ID NO: 4430271 - DNA, 25 bp, Homo sapien
cagggagcatcgtgggctcctctgc

SEQ ID NO: 4430272 - DNA, 25 bp, Homo sapien
cagttctgtggaagggactggcccc

SEQ ID NO: 4430273 - DNA, 25 bp, Homo sapien
ataaagggctgcttgtgccggctgt

SEQ ID NO: 4430274 - DNA, 25 bp, Homo sapien
agggctgcttgtgccggctgtgctc

SEQ ID NO: 4430275 - DNA, 25 bp, Homo sapien
cagcataaagggctgcttgtgccgg

SEQ ID NO: 4430276 - DNA, 25 bp, Homo sapien
gcataaagggctgcttgtgccggct

SEQ ID NO: 4430277 - DNA, 25 bp, Homo sapien
ggttcttgaactaacgtaggcatca

SEQ ID NO: 4430278 - DNA, 25 bp, Homo sapien
cttgaactaacgtaggcatcagcac

SEQ ID NO: 4430279 - DNA, 25 bp, Homo sapien
tgaactaacgtaggcatcagcacag

SEQ ID NO: 4430280 - DNA, 25 bp, Homo sapien
ttcttgaactaacgtaggcatcagc

SEQ ID NO: 4430281 - DNA, 25 bp, Homo sapien
gccagaactgcctgtattctcacat

SEQ ID NO: 4430282 - DNA, 25 bp, Homo sapien
atcctgaagtcgtgaaagcgccaga

SEQ ID NO: 4430283 - DNA, 25 bp, Homo sapien
gaagtcgtgaaagcgccagaactgc

SEQ ID NO: 4430284 - DNA, 25 bp, Homo sapien
tgaaagcgccagaactgcctgtatt

SEQ ID NO: 4430285 - DNA, 25 bp, Homo sapien
tcaatcattttcgatcaaagtagca

SEQ ID NO: 4430286 - DNA, 25 bp, Homo sapien
attttcgatcaaagtagcatatgca

SEQ ID NO: 4430287 - DNA, 25 bp, Homo sapien
atcattttcgatcaaagtagcatat

SEQ ID NO: 4430288 - DNA, 25 bp, Homo sapien
ttttcgatcaaagtagcatatgcat

SEQ ID NO: 4430289 - DNA, 25 bp, Homo sapien
gctaacaccggataagccagctttc

SEQ ID NO: 4430290 - DNA, 25 bp, Homo sapien
accttttcagctaacaccggataag

SEQ ID NO: 4430291 - DNA, 25 bp, Homo sapien
agctaacaccggataagccagcttt

SEQ ID NO: 4430292 - DNA, 25 bp, Homo sapien
ccttttcagctaacaccggataagc

SEQ ID NO: 4430293 - DNA, 25 bp, Homo sapien
tccaactgctgaagccactcgaaga

SEQ ID NO: 4430294 - DNA, 25 bp, Homo sapien
tacatccaactgctgaagccactcg

SEQ ID NO: 4430295 - DNA, 25 bp, Homo sapien
aactgctgaagccactcgaagatat

SEQ ID NO: 4430296 - DNA, 25 bp, Homo sapien
gctgaagccactcgaagatatttcc

SEQ ID NO: 4430297 - DNA, 25 bp, Homo sapien
gcgaaatccgctctaaaaattcttc

SEQ ID NO: 4430298 - DNA, 25 bp, Homo sapien
tagtctatatatactacaggctctg

SEQ ID NO: 4430299 - DNA, 25 bp, Homo sapien
gagttaacgtttccactagaatcaa

SEQ ID NO: 4430300 - DNA, 25 bp, Homo sapien
caaagcaatttcaggagttaacgtt

SEQ ID NO: 4430301 - DNA, 25 bp, Homo sapien
gtcccagcatgaaaggggtggctga

SEQ ID NO: 4430302 - DNA, 25 bp, Homo sapien
aaagtcccagcatgaaaggggtggc

SEQ ID NO: 4430303 - DNA, 25 bp, Homo sapien
cccagcatgaaaggggtggctgaga

SEQ ID NO: 4430304 - DNA, 25 bp, Homo sapien
aagtcccagcatgaaaggggtggct

SEQ ID NO: 4430305 - DNA, 25 bp, Homo sapien
agctgctatttgaatggtctaggta

SEQ ID NO: 4430306 - DNA, 25 bp, Homo sapien
cttacagtggagatgaagagagtcc

SEQ ID NO: 4430307 - DNA, 25 bp, Homo sapien
tatgccttgcagcttaaaccatttc

SEQ ID NO: 4430308 - DNA, 25 bp, Homo sapien
gaatggtctaggtatgccttgcagc

SEQ ID NO: 4430309 - DNA, 25 bp, Homo sapien
tagatctagggcagcaaatcccttc

SEQ ID NO: 4430310 - DNA, 25 bp, Homo sapien
ttctgatagatctagggcagcaaat

SEQ ID NO: 4430311 - DNA, 25 bp, Homo sapien
tatttagtgttagatttttgtgcta

SEQ ID NO: 4430312 - DNA, 25 bp, Homo sapien
gcagcaaatcccttctggatatgtt

SEQ ID NO: 4430313 - DNA, 25 bp, Homo sapien
gactgctaatagtgacatcacccat

SEQ ID NO: 4430314 - DNA, 25 bp, Homo sapien
ctagactgctaatagtgacatcacc

SEQ ID NO: 4430315 - DNA, 25 bp, Homo sapien
tagactgctaatagtgacatcaccc

SEQ ID NO: 4430316 - DNA, 25 bp, Homo sapien
agactgctaatagtgacatcaccca

SEQ ID NO: 4430317 - DNA, 25 bp, Homo sapien
aatgacatagaggttgttgatgctc

SEQ ID NO: 4430318 - DNA, 25 bp, Homo sapien
ttcaataacccactcataatgtagt

SEQ ID NO: 4430319 - DNA, 25 bp, Homo sapien
ggttgttgatgctcagagattcaat

SEQ ID NO: 4430320 - DNA, 25 bp, Homo sapien
actttccccagccgcctgttatttg

SEQ ID NO: 4430321 - DNA, 25 bp, Homo sapien
cagatctgggttgtaatagtaatta

SEQ ID NO: 4430322 - DNA, 25 bp, Homo sapien
tccagatctgggttgtaatagtaat

SEQ ID NO: 4430323 - DNA, 25 bp, Homo sapien
cctccagatctgggttgtaatagta

SEQ ID NO: 4430324 - DNA, 25 bp, Homo sapien
ttttcaaagcctgagctacaaggcc

SEQ ID NO: 4430325 - DNA, 25 bp, Homo sapien
agcaagtctcttcacgtccataaat

SEQ ID NO: 4430326 - DNA, 25 bp, Homo sapien
ggctatgtcatgttccctgatgtga

SEQ ID NO: 4430327 - DNA, 25 bp, Homo sapien
aggaagaggttttaatgagccatga

SEQ ID NO: 4430328 - DNA, 25 bp, Homo sapien
catctgtagtgtggattgctttgaa

SEQ ID NO: 4430329 - DNA, 25 bp, Homo sapien
tcagagctcaggttgtgggtgatca

SEQ ID NO: 4430330 - DNA, 25 bp, Homo sapien
atccagatgggtcatagtgctcaga

SEQ ID NO: 4430331 - DNA, 25 bp, Homo sapien
tgggtgctcagagctcaggttgtgg

SEQ ID NO: 4430332 - DNA, 25 bp, Homo sapien
catccagatgggtcatagtgctcag

SEQ ID NO: 4430333 - DNA, 25 bp, Homo sapien
cgcaggtcgaaggagccgcccgcct

SEQ ID NO: 4430334 - DNA, 25 bp, Homo sapien
ccgcaggtcgaaggagccgcccgcc

SEQ ID NO: 4430335 - DNA, 25 bp, Homo sapien
gccgcaggtcgaaggagccgcccgc

SEQ ID NO: 4430336 - DNA, 25 bp, Homo sapien
cgctcgccgccagggcccggacgcg

SEQ ID NO: 4430337 - DNA, 25 bp, Homo sapien
ctaaatgcccgccccgctcgccgcc

SEQ ID NO: 4430338 - DNA, 25 bp, Homo sapien
ccgccccgctcgccgccagggcccg

SEQ ID NO: 4430339 - DNA, 25 bp, Homo sapien
cccgctcgccgccagggcccggacg

SEQ ID NO: 4430340 - DNA, 25 bp, Homo sapien
tagacttatgggtgttgctgtagcc

SEQ ID NO: 4430341 - DNA, 25 bp, Homo sapien
tctgcttagacttatgggtgttgct

SEQ ID NO: 4430342 - DNA, 25 bp, Homo sapien
gcttagacttatgggtgttgctgta

SEQ ID NO: 4430343 - DNA, 25 bp, Homo sapien
acatctgcttagacttatgggtgtt

SEQ ID NO: 4430344 - DNA, 25 bp, Homo sapien
cagaaaccaacaaaccacaggaagg

SEQ ID NO: 4430345 - DNA, 25 bp, Homo sapien
aagggtggctgttggtagttgtcca

SEQ ID NO: 4430346 - DNA, 25 bp, Homo sapien
gaagggtggctgttggtagttgtcc

SEQ ID NO: 4430347 - DNA, 25 bp, Homo sapien
tgaagggtggctgttggtagttgtc

SEQ ID NO: 4430348 - DNA, 25 bp, Homo sapien
ttctagccactccaggcggggatgg

SEQ ID NO: 4430349 - DNA, 25 bp, Homo sapien
cccgccgggctgtaaggctccttag

SEQ ID NO: 4430350 - DNA, 25 bp, Homo sapien
gccgggctgtaaggctccttagctg

SEQ ID NO: 4430351 - DNA, 25 bp, Homo sapien
agagggggtttggcagttccaggag

SEQ ID NO: 4430352 - DNA, 25 bp, Homo sapien
ggccaccggcacagggtggtggccc

SEQ ID NO: 4430353 - DNA, 25 bp, Homo sapien
acaagagcctggtccggctccgctg

SEQ ID NO: 4430354 - DNA, 25 bp, Homo sapien
aagctgggtgttgtcaggcaaagcc

SEQ ID NO: 4430355 - DNA, 25 bp, Homo sapien
tttacataaagctgggtgttgtcag

SEQ ID NO: 4430356 - DNA, 25 bp, Homo sapien
taagcaatcccctgttgactactgt

SEQ ID NO: 4430357 - DNA, 25 bp, Homo sapien
gttgtcaaattgtgccctgtaaggg

SEQ ID NO: 4430358 - DNA, 25 bp, Homo sapien
tgtcaccatgaagagacttgtgcac

SEQ ID NO: 4430359 - DNA, 25 bp, Homo sapien
cgtctttgctgttacagtgtcacca

SEQ ID NO: 4430360 - DNA, 25 bp, Homo sapien
tgcagccaatttgttgtgttgagtt

SEQ ID NO: 4430361 - DNA, 25 bp, Homo sapien
gcagccaatttgttgtgttgagttt

SEQ ID NO: 4430362 - DNA, 25 bp, Homo sapien
tcctgttcgctcctgctggaactct

SEQ ID NO: 4430363 - DNA, 25 bp, Homo sapien
accagaagtggctttctcagggata

SEQ ID NO: 4430364 - DNA, 25 bp, Homo sapien
tccctaggtggctggcaaccaccag

SEQ ID NO: 4430365 - DNA, 25 bp, Homo sapien
ctgctggaactctagggctgttttt

SEQ ID NO: 4430366 - DNA, 25 bp, Homo sapien
gatgtagggccttccctgtggaaac

SEQ ID NO: 4430367 - DNA, 25 bp, Homo sapien
ggccttccctgtggaaacctgttgc

SEQ ID NO: 4430368 - DNA, 25 bp, Homo sapien
atgatgtagggccttccctgtggaa

SEQ ID NO: 4430369 - DNA, 25 bp, Homo sapien
agatgatgtagggccttccctgtgg

SEQ ID NO: 4430370 - DNA, 25 bp, Homo sapien
agggttgacccgaagggtcactgca

SEQ ID NO: 4430371 - DNA, 25 bp, Homo sapien
gggttgacccgaagggtcactgcac

SEQ ID NO: 4430372 - DNA, 25 bp, Homo sapien
ggttgacccgaagggtcactgcacc

SEQ ID NO: 4430373 - DNA, 25 bp, Homo sapien
gagggttgacccgaagggtcactgc

SEQ ID NO: 4430374 - DNA, 25 bp, Homo sapien
tgactgatttctacggaccttgaat

SEQ ID NO: 4430375 - DNA, 25 bp, Homo sapien
ttgactgatttctacggaccttgaa

SEQ ID NO: 4430376 - DNA, 25 bp, Homo sapien
agttgactgatttctacggaccttg

SEQ ID NO: 4430377 - DNA, 25 bp, Homo sapien
gttgactgatttctacggaccttga

SEQ ID NO: 4430378 - DNA, 25 bp, Homo sapien
ttcttccagctgatgttccacttgt

SEQ ID NO: 4430379 - DNA, 25 bp, Homo sapien
cttccagctgatgttccacttgttt

SEQ ID NO: 4430380 - DNA, 25 bp, Homo sapien
tcttccagctgatgttccacttgtt

SEQ ID NO: 4430381 - DNA, 25 bp, Homo sapien
ttccagctgatgttccacttgtttc

SEQ ID NO: 4430382 - DNA, 25 bp, Homo sapien
agaatgccaccaatgccccaggaca

SEQ ID NO: 4430383 - DNA, 25 bp, Homo sapien
cagaatgccaccaatgccccaggac

SEQ ID NO: 4430384 - DNA, 25 bp, Homo sapien
aatgccaccaatgccccaggacagg

SEQ ID NO: 4430385 - DNA, 25 bp, Homo sapien
gaatgccaccaatgccccaggacag

SEQ ID NO: 4430386 - DNA, 25 bp, Homo sapien
taggaagaggaagacagagctctta

SEQ ID NO: 4430387 - DNA, 25 bp, Homo sapien
ctgtaggaagaggaagacagagctc

SEQ ID NO: 4430388 - DNA, 25 bp, Homo sapien
aggaagaggaagacagagctcttac

SEQ ID NO: 4430389 - DNA, 25 bp, Homo sapien
tgtaggaagaggaagacagagctct

SEQ ID NO: 4430390 - DNA, 25 bp, Homo sapien
tctgtttcttgttgtttgctttctt

SEQ ID NO: 4430391 - DNA, 25 bp, Homo sapien
ctagcacccttttggctttctgttt

SEQ ID NO: 4430392 - DNA, 25 bp, Homo sapien
ttctgtttcttgttgtttgctttct

SEQ ID NO: 4430393 - DNA, 25 bp, Homo sapien
ctttctgtttcttgttgtttgcttt

SEQ ID NO: 4430394 - DNA, 25 bp, Homo sapien
ctttgggagaaaagccaagcaagtg

SEQ ID NO: 4430395 - DNA, 25 bp, Homo sapien
tgagagaacgtttcatgtggtacag

SEQ ID NO: 4430396 - DNA, 25 bp, Homo sapien
cctctttctgtatgttcaatgtctg

SEQ ID NO: 4430397 - DNA, 25 bp, Homo sapien
tcaaagtatctgagagaacgtttca

SEQ ID NO: 4430398 - DNA, 25 bp, Homo sapien
tgtggtacaggtccgtatttagttc

SEQ ID NO: 4430399 - DNA, 25 bp, Homo sapien
ttctgtgtggccatgacattagaga

SEQ ID NO: 4430400 - DNA, 25 bp, Homo sapien
ccatgacattagagagaacactctc

SEQ ID NO: 4430401 - DNA, 25 bp, Homo sapien
tggccatgacattagagagaacact

SEQ ID NO: 4430402 - DNA, 25 bp, Homo sapien
ctgtgtggccatgacattagagaga

SEQ ID NO: 4430403 - DNA, 25 bp, Homo sapien
tcctccatctgcaaagccaggctcc

SEQ ID NO: 4430404 - DNA, 25 bp, Homo sapien
caggggatggggcaggtggttggac

SEQ ID NO: 4430405 - DNA, 25 bp, Homo sapien
ctccatctgcaaagccaggctccca

SEQ ID NO: 4430406 - DNA, 25 bp, Homo sapien
gggatggggcaggtggttggactca

SEQ ID NO: 4430407 - DNA, 25 bp, Homo sapien
tcagctgcactttcagtagtgcctc

SEQ ID NO: 4430408 - DNA, 25 bp, Homo sapien
gctgcactttcagtagtgcctcctc

SEQ ID NO: 4430409 - DNA, 25 bp, Homo sapien
agctgcactttcagtagtgcctcct

SEQ ID NO: 4430410 - DNA, 25 bp, Homo sapien
cagctgcactttcagtagtgcctcc

SEQ ID NO: 4430411 - DNA, 25 bp, Homo sapien
ttttagatgttcagaatactcatct

SEQ ID NO: 4430412 - DNA, 25 bp, Homo sapien
ttggacttgttgaaatgactccttg

SEQ ID NO: 4430413 - DNA, 25 bp, Homo sapien
tggacttgttgaaatgactccttga

SEQ ID NO: 4430414 - DNA, 25 bp, Homo sapien
tagatgttcagaatactcatctctt

SEQ ID NO: 4430415 - DNA, 25 bp, Homo sapien
ctctacccgacgcatatcttgctgc

SEQ ID NO: 4430416 - DNA, 25 bp, Homo sapien
tctacccgacgcatatcttgctgct

SEQ ID NO: 4430417 - DNA, 25 bp, Homo sapien
ctacccgacgcatatcttgctgctt

SEQ ID NO: 4430418 - DNA, 25 bp, Homo sapien
ctgggcctggagctctcctgccact

SEQ ID NO: 4430419 - DNA, 25 bp, Homo sapien
tctctctagttccttcctcaggtgc

SEQ ID NO: 4430420 - DNA, 25 bp, Homo sapien
ctctagttccttcctcaggtgctgc

SEQ ID NO: 4430421 - DNA, 25 bp, Homo sapien
gagctctcctgccactctctctagt

SEQ ID NO: 4430422 - DNA, 25 bp, Homo sapien
ctgctgaaggctcttgtgctgctcc

SEQ ID NO: 4430423 - DNA, 25 bp, Homo sapien
ctcgccaagcttctcctgtagctcc

SEQ ID NO: 4430424 - DNA, 25 bp, Homo sapien
actgcagtgcgttcttgttctcatt

SEQ ID NO: 4430425 - DNA, 25 bp, Homo sapien
tgcagtgcgttcttgttctcattgt

SEQ ID NO: 4430426 - DNA, 25 bp, Homo sapien
caactgcagtgcgttcttgttctca

SEQ ID NO: 4430427 - DNA, 25 bp, Homo sapien
cccagcccttcttggatggggtgga

SEQ ID NO: 4430428 - DNA, 25 bp, Homo sapien
cctcccagcccttcttggatggggt

SEQ ID NO: 4430429 - DNA, 25 bp, Homo sapien
tcccctcccaagaggctgctgcccg

SEQ ID NO: 4430430 - DNA, 25 bp, Homo sapien
tggatggggtggaggtttccgtctc

SEQ ID NO: 4430431 - DNA, 25 bp, Homo sapien
tgcaggtgacccaggtaatggtctg

SEQ ID NO: 4430432 - DNA, 25 bp, Homo sapien
tgacccaggtaatggtctggctgct

SEQ ID NO: 4430433 - DNA, 25 bp, Homo sapien
gtgacccaggtaatggtctggctgc

SEQ ID NO: 4430434 - DNA, 25 bp, Homo sapien
caggtgacccaggtaatggtctggc

SEQ ID NO: 4430435 - DNA, 25 bp, Homo sapien
ctgctgctgataggtggccacgtac

SEQ ID NO: 4430436 - DNA, 25 bp, Homo sapien
tcactgcctgtacagcgcctccttc

SEQ ID NO: 4430437 - DNA, 25 bp, Homo sapien
cactgcctgtacagcgcctccttct

SEQ ID NO: 4430438 - DNA, 25 bp, Homo sapien
tgcctgtacagcgcctccttctcac

SEQ ID NO: 4430439 - DNA, 25 bp, Homo sapien
actgcctgtacagcgcctccttctc

SEQ ID NO: 4430440 - DNA, 25 bp, Homo sapien
aggctcagctgggccgttagctgct

SEQ ID NO: 4430441 - DNA, 25 bp, Homo sapien
agctgggccgttagctgctggttct

SEQ ID NO: 4430442 - DNA, 25 bp, Homo sapien
atgaggctcagctgggccgttagct

SEQ ID NO: 4430443 - DNA, 25 bp, Homo sapien
ctcagctgggccgttagctgctggt

SEQ ID NO: 4430444 - DNA, 25 bp, Homo sapien
cacactcccactactggtcgatgtg

SEQ ID NO: 4430445 - DNA, 25 bp, Homo sapien
cactcccactactggtcgatgtggg

SEQ ID NO: 4430446 - DNA, 25 bp, Homo sapien
ttgctattccgcccaggcacactcc

SEQ ID NO: 4430447 - DNA, 25 bp, Homo sapien
gctattccgcccaggcacactccca

SEQ ID NO: 4430448 - DNA, 25 bp, Homo sapien
cgggtcctctgggacactcggcatg

SEQ ID NO: 4430449 - DNA, 25 bp, Homo sapien
tctccgggtcctctgggacactcgg

SEQ ID NO: 4430450 - DNA, 25 bp, Homo sapien
ctctgggacactcggcatgggccga

SEQ ID NO: 4430451 - DNA, 25 bp, Homo sapien
cctgctctccgggtcctctgggaca

SEQ ID NO: 4430452 - DNA, 25 bp, Homo sapien
ctgagggcaagatgtgagcattctt

SEQ ID NO: 4430453 - DNA, 25 bp, Homo sapien
caggcgctggcaggacaccctctgc

SEQ ID NO: 4430454 - DNA, 25 bp, Homo sapien
cctgctcttgtaactgtgcctgctt

SEQ ID NO: 4430455 - DNA, 25 bp, Homo sapien
gctggcaggacaccctctgctcttt

SEQ ID NO: 4430456 - DNA, 25 bp, Homo sapien
gctctttcacctgctcttgtaactg

SEQ ID NO: 4430457 - DNA, 25 bp, Homo sapien
ctgccctcaggtggcattttcaagt

SEQ ID NO: 4430458 - DNA, 25 bp, Homo sapien
tcaggtctgccttctcctccaggtg

SEQ ID NO: 4430459 - DNA, 25 bp, Homo sapien
cctccaggtggtccataaagctgct

SEQ ID NO: 4430460 - DNA, 25 bp, Homo sapien
ggtctgccttctcctccaggtggtc

SEQ ID NO: 4430461 - DNA, 25 bp, Homo sapien
tctcctccaggtggtccataaagct

SEQ ID NO: 4430462 - DNA, 25 bp, Homo sapien
tctctctcgccagtggtggatgaag

SEQ ID NO: 4430463 - DNA, 25 bp, Homo sapien
catctctctcgccagtggtggatga

SEQ ID NO: 4430464 - DNA, 25 bp, Homo sapien
ctctcgccagtggtggatgaagcag

SEQ ID NO: 4430465 - DNA, 25 bp, Homo sapien
tggatgaagcagagttcttttttct

SEQ ID NO: 4430466 - DNA, 25 bp, Homo sapien
agtgccgcatctttggcacggcccc

SEQ ID NO: 4430467 - DNA, 25 bp, Homo sapien
tcccagtgccgcatctttggcacgg

SEQ ID NO: 4430468 - DNA, 25 bp, Homo sapien
cctggttctgataaaaggtgatggg

SEQ ID NO: 4430469 - DNA, 25 bp, Homo sapien
ttctgataaaaggtgatgggttttc

SEQ ID NO: 4430470 - DNA, 25 bp, Homo sapien
atctgctgcagctccagcagcttca

SEQ ID NO: 4430471 - DNA, 25 bp, Homo sapien
catctgctgcagctccagcagcttc

SEQ ID NO: 4430472 - DNA, 25 bp, Homo sapien
tctgctgcagctccagcagcttcac

SEQ ID NO: 4430473 - DNA, 25 bp, Homo sapien
gaccgggctcatcagcagagttgtg

SEQ ID NO: 4430474 - DNA, 25 bp, Homo sapien
tcctggaccgggctcatcagcagag

SEQ ID NO: 4430475 - DNA, 25 bp, Homo sapien
accgggctcatcagcagagttgtgg

SEQ ID NO: 4430476 - DNA, 25 bp, Homo sapien
tggaccgggctcatcagcagagttg

SEQ ID NO: 4430477 - DNA, 25 bp, Homo sapien
tcaaggagaggatcctccctggcct

SEQ ID NO: 4430478 - DNA, 25 bp, Homo sapien
ggcagaggaggtgaggctcacctca

SEQ ID NO: 4430479 - DNA, 25 bp, Homo sapien
cttgtcaaggagaggatcctccctg

SEQ ID NO: 4430480 - DNA, 25 bp, Homo sapien
tgtcaaggagaggatcctccctggc

SEQ ID NO: 4430481 - DNA, 25 bp, Homo sapien
ggcagccaagcccagcacaagaatg

SEQ ID NO: 4430482 - DNA, 25 bp, Homo sapien
ccaagcccagcacaagaatggcaca

SEQ ID NO: 4430483 - DNA, 25 bp, Homo sapien
gcccagcacaagaatggcacacagc

SEQ ID NO: 4430484 - DNA, 25 bp, Homo sapien
agccaagcccagcacaagaatggca

SEQ ID NO: 4430485 - DNA, 25 bp, Homo sapien
ggtcattcctagtcactgatattta

SEQ ID NO: 4430486 - DNA, 25 bp, Homo sapien
cgtgcccacgctggtagacatgggt

SEQ ID NO: 4430487 - DNA, 25 bp, Homo sapien
tgctccctggagccgtcacagagct

SEQ ID NO: 4430488 - DNA, 25 bp, Homo sapien
gtgcagagcgtccttgccggatgca

SEQ ID NO: 4430489 - DNA, 25 bp, Homo sapien
ggatgcaggtaccaaggctggctcc

SEQ ID NO: 4430490 - DNA, 25 bp, Homo sapien
tcaacaagaccgtgtgggacctcat

SEQ ID NO: 4430491 - DNA, 25 bp, Homo sapien
tccatggacccatagctggagcggc

SEQ ID NO: 4430492 - DNA, 25 bp, Homo sapien
gaatggctccgacagcttcatgcac

SEQ ID NO: 4430493 - DNA, 25 bp, Homo sapien
gacctcatggttggtgtcatgccca

SEQ ID NO: 4430494 - DNA, 25 bp, Homo sapien
agctctcgcggctccacctctcccc

SEQ ID NO: 4430495 - DNA, 25 bp, Homo sapien
ccggccgagctctcgcggctccacc

SEQ ID NO: 4430496 - DNA, 25 bp, Homo sapien
ctctccccgccgccgtgaccctcgt

SEQ ID NO: 4430497 - DNA, 25 bp, Homo sapien
ctccccgccgccgtgaccctcgtgg

SEQ ID NO: 4430498 - DNA, 25 bp, Homo sapien
ggagccagtcccgagccgctgtcat

SEQ ID NO: 4430499 - DNA, 25 bp, Homo sapien
gaaaaggagccagtcccgagccgct

SEQ ID NO: 4430500 - DNA, 25 bp, Homo sapien
cgcggaaaaggagccagtcccgagc

SEQ ID NO: 4430501 - DNA, 25 bp, Homo sapien
gaggggcgcggaaaaggagccagtc

SEQ ID NO: 4430502 - DNA, 25 bp, Homo sapien
gaagatagaggccagtaacttcggt

SEQ ID NO: 4430503 - DNA, 25 bp, Homo sapien
cccttgaacccggacatggacatct

SEQ ID NO: 4430504 - DNA, 25 bp, Homo sapien
tagaggccagtaacttcggtttgcc

SEQ ID NO: 4430505 - DNA, 25 bp, Homo sapien
cggtttgcccttgaacccggacatg

SEQ ID NO: 4430506 - DNA, 25 bp, Homo sapien
ggtcctgctgactcaggtgtccact

SEQ ID NO: 4430507 - DNA, 25 bp, Homo sapien
tgggattccaggtcctgctgactca

SEQ ID NO: 4430508 - DNA, 25 bp, Homo sapien
tccaggtcctgctgactcaggtgtc

SEQ ID NO: 4430509 - DNA, 25 bp, Homo sapien
gggattccaggtcctgctgactcag

SEQ ID NO: 4430510 - DNA, 25 bp, Homo sapien
gcagtcagggtattgcatgccatca

SEQ ID NO: 4430511 - DNA, 25 bp, Homo sapien
agcagtcagggtattgcatgccatc

SEQ ID NO: 4430512 - DNA, 25 bp, Homo sapien
cagtcagggtattgcatgccatcat

SEQ ID NO: 4430513 - DNA, 25 bp, Homo sapien
gagcagtcagggtattgcatgccat

SEQ ID NO: 4430514 - DNA, 25 bp, Homo sapien
catcaaatttaaccgatggtggttg

SEQ ID NO: 4430515 - DNA, 25 bp, Homo sapien
atgctggtagatgcaatatttttgc

SEQ ID NO: 4430516 - DNA, 25 bp, Homo sapien
ctgaaaatgctggtagatgcaatat

SEQ ID NO: 4430517 - DNA, 25 bp, Homo sapien
tgcatcaaatttaaccgatggtggt

SEQ ID NO: 4430518 - DNA, 25 bp, Homo sapien
gaaaaggtctgtcttatgatatcac

SEQ ID NO: 4430519 - DNA, 25 bp, Homo sapien
cacaacccgttccacatgggcagtt

SEQ ID NO: 4430520 - DNA, 25 bp, Homo sapien
gatgacccagtaaaggaaccaacac

SEQ ID NO: 4430521 - DNA, 25 bp, Homo sapien
ttccagtcactgatgagaagggaaa

SEQ ID NO: 4430522 - DNA, 25 bp, Homo sapien
atatcgcagtttgcagctatccaca

SEQ ID NO: 4430523 - DNA, 25 bp, Homo sapien
tccacaaatgctggattagcaattg

SEQ ID NO: 4430524 - DNA, 25 bp, Homo sapien
tatcgcagtttgcagctatccacaa

SEQ ID NO: 4430525 - DNA, 25 bp, Homo sapien
cgcagtttgcagctatccacaaatg

SEQ ID NO: 4430526 - DNA, 25 bp, Homo sapien
agtagccgggactgtaggtgtgtgt

SEQ ID NO: 4430527 - DNA, 25 bp, Homo sapien
aagtagccgggactgtaggtgtgtg

SEQ ID NO: 4430528 - DNA, 25 bp, Homo sapien
gtagccgggactgtaggtgtgtgtc

SEQ ID NO: 4430529 - DNA, 25 bp, Homo sapien
tagccgggactgtaggtgtgtgtca

SEQ ID NO: 4430530 - DNA, 25 bp, Homo sapien
agtaaaccaatcacccgagcaacct

SEQ ID NO: 4430531 - DNA, 25 bp, Homo sapien
agccagtaaaccaatcacccgagca

SEQ ID NO: 4430532 - DNA, 25 bp, Homo sapien
cctggagatcagttttgtgcgaagc

SEQ ID NO: 4430533 - DNA, 25 bp, Homo sapien
agatcagttttgtgcgaagccagta

SEQ ID NO: 4430534 - DNA, 25 bp, Homo sapien
cctaaaggtctgttgaggtgataag

SEQ ID NO: 4430535 - DNA, 25 bp, Homo sapien
gagccttgttaactctgctgtgcca

SEQ ID NO: 4430536 - DNA, 25 bp, Homo sapien
gatgagtagggttcacgagccttgt

SEQ ID NO: 4430537 - DNA, 25 bp, Homo sapien
gaaaagtcaagtgaaggtcaaggaa

SEQ ID NO: 4430538 - DNA, 25 bp, Homo sapien
ttacccatcgtagcagctttgaagg

SEQ ID NO: 4430539 - DNA, 25 bp, Homo sapien
ggctttaggtcagcacaccaggcaa

SEQ ID NO: 4430540 - DNA, 25 bp, Homo sapien
ggacacgccatggttccagaatgtg

SEQ ID NO: 4430541 - DNA, 25 bp, Homo sapien
tactggtcttaatgagggctttagg

SEQ ID NO: 4430542 - DNA, 25 bp, Homo sapien
cttaaggcaaagggccttttgaatg

SEQ ID NO: 4430543 - DNA, 25 bp, Homo sapien
tcgagatggatgcttgctgatgttc

SEQ ID NO: 4430544 - DNA, 25 bp, Homo sapien
gctgatgttccaaaacctctttagg

SEQ ID NO: 4430545 - DNA, 25 bp, Homo sapien
ggcaaagggccttttgaatgcaaaa

SEQ ID NO: 4430546 - DNA, 25 bp, Homo sapien
gacgcggtttcctcgtgttagccaa

SEQ ID NO: 4430547 - DNA, 25 bp, Homo sapien
tattagccagtgaatccatgtgagc

SEQ ID NO: 4430548 - DNA, 25 bp, Homo sapien
gcgtccggctccatgcattcttatg

SEQ ID NO: 4430549 - DNA, 25 bp, Homo sapien
taacagctcagtctataatggaggg

SEQ ID NO: 4430550 - DNA, 25 bp, Homo sapien
tgcagccaatttgttgtgttgagtt

SEQ ID NO: 4430551 - DNA, 25 bp, Homo sapien
gcagccaatttgttgtgttgagttt

SEQ ID NO: 4430552 - DNA, 25 bp, Homo sapien
accagaagtggctttctcagggata

SEQ ID NO: 4430553 - DNA, 25 bp, Homo sapien
tccctaggtggctggcaaccaccag

SEQ ID NO: 4430554 - DNA, 25 bp, Homo sapien
ctgctggaactctagggctgttttt

SEQ ID NO: 4430555 - DNA, 25 bp, Homo sapien
tcctgttcgctcctgctggaactct

SEQ ID NO: 4430556 - DNA, 25 bp, Homo sapien
gatgtagggccttccctgtggaaac

SEQ ID NO: 4430557 - DNA, 25 bp, Homo sapien
ggccttccctgtggaaacctgttgc

SEQ ID NO: 4430558 - DNA, 25 bp, Homo sapien
agatgatgtagggccttccctgtgg

SEQ ID NO: 4430559 - DNA, 25 bp, Homo sapien
atgatgtagggccttccctgtggaa

SEQ ID NO: 4430560 - DNA, 25 bp, Homo sapien
agggttgacccgaagggtcactgca

SEQ ID NO: 4430561 - DNA, 25 bp, Homo sapien
gggttgacccgaagggtcactgcac

SEQ ID NO: 4430562 - DNA, 25 bp, Homo sapien
ggttgacccgaagggtcactgcacc

SEQ ID NO: 4430563 - DNA, 25 bp, Homo sapien
gagggttgacccgaagggtcactgc

SEQ ID NO: 4430564 - DNA, 25 bp, Homo sapien
ctggcagaggggcacccagtcccac

SEQ ID NO: 4430565 - DNA, 25 bp, Homo sapien
gagcaggagtggggggagaggtaga

SEQ ID NO: 4430566 - DNA, 25 bp, Homo sapien
gaggaggtggagcaggagtgggggg

SEQ ID NO: 4430567 - DNA, 25 bp, Homo sapien
gctggcagaggggcacccagtccca

SEQ ID NO: 4430568 - DNA, 25 bp, Homo sapien
tgactgatttctacggaccttgaat

SEQ ID NO: 4430569 - DNA, 25 bp, Homo sapien
ttgactgatttctacggaccttgaa

SEQ ID NO: 4430570 - DNA, 25 bp, Homo sapien
agttgactgatttctacggaccttg

SEQ ID NO: 4430571 - DNA, 25 bp, Homo sapien
gttgactgatttctacggaccttga

SEQ ID NO: 4430572 - DNA, 25 bp, Homo sapien
ttccagctgatgttccacttgtttc

SEQ ID NO: 4430573 - DNA, 25 bp, Homo sapien
cttccagctgatgttccacttgttt

SEQ ID NO: 4430574 - DNA, 25 bp, Homo sapien
ttcttccagctgatgttccacttgt

SEQ ID NO: 4430575 - DNA, 25 bp, Homo sapien
tcttccagctgatgttccacttgtt

SEQ ID NO: 4430576 - DNA, 25 bp, Homo sapien
agaatgccaccaatgccccaggaca

SEQ ID NO: 4430577 - DNA, 25 bp, Homo sapien
gaatgccaccaatgccccaggacag

SEQ ID NO: 4430578 - DNA, 25 bp, Homo sapien
cagaatgccaccaatgccccaggac

SEQ ID NO: 4430579 - DNA, 25 bp, Homo sapien
aatgccaccaatgccccaggacagg

SEQ ID NO: 4430580 - DNA, 25 bp, Homo sapien
taggaagaggaagacagagctctta

SEQ ID NO: 4430581 - DNA, 25 bp, Homo sapien
ctgtaggaagaggaagacagagctc

SEQ ID NO: 4430582 - DNA, 25 bp, Homo sapien
aggaagaggaagacagagctcttac

SEQ ID NO: 4430583 - DNA, 25 bp, Homo sapien
tgtaggaagaggaagacagagctct

SEQ ID NO: 4430584 - DNA, 25 bp, Homo sapien
ctagcacccttttggctttctgttt

SEQ ID NO: 4430585 - DNA, 25 bp, Homo sapien
ctttctgtttcttgttgtttgcttt

SEQ ID NO: 4430586 - DNA, 25 bp, Homo sapien
tctgtttcttgttgtttgctttctt

SEQ ID NO: 4430587 - DNA, 25 bp, Homo sapien
ttctgtttcttgttgtttgctttct

SEQ ID NO: 4430588 - DNA, 25 bp, Homo sapien
ctttgggagaaaagccaagcaagtg

SEQ ID NO: 4430589 - DNA, 25 bp, Homo sapien
tgggagaaaagccaagcaagtgctg

SEQ ID NO: 4430590 - DNA, 25 bp, Homo sapien
tttgggagaaaagccaagcaagtgc

SEQ ID NO: 4430591 - DNA, 25 bp, Homo sapien
ggagaaaagccaagcaagtgctgaa

SEQ ID NO: 4430592 - DNA, 25 bp, Homo sapien
cctctttctgtatgttcaatgtctg

SEQ ID NO: 4430593 - DNA, 25 bp, Homo sapien
tgagagaacgtttcatgtggtacag

SEQ ID NO: 4430594 - DNA, 25 bp, Homo sapien
tcaaagtatctgagagaacgtttca

SEQ ID NO: 4430595 - DNA, 25 bp, Homo sapien
tgtggtacaggtccgtatttagttc

SEQ ID NO: 4430596 - DNA, 25 bp, Homo sapien
cccctgaagacctgtcaaagtgcca

SEQ ID NO: 4430597 - DNA, 25 bp, Homo sapien
tccccctgaagacctgtcaaagtgc

SEQ ID NO: 4430598 - DNA, 25 bp, Homo sapien
ggatgacagggtgcccagattccca

SEQ ID NO: 4430599 - DNA, 25 bp, Homo sapien
ttgaaggatgacagggtgcccagat

SEQ ID NO: 4430600 - DNA, 25 bp, Homo sapien
ttctgtgtggccatgacattagaga

SEQ ID NO: 4430601 - DNA, 25 bp, Homo sapien
tggccatgacattagagagaacact

SEQ ID NO: 4430602 - DNA, 25 bp, Homo sapien
ccatgacattagagagaacactctc

SEQ ID NO: 4430603 - DNA, 25 bp, Homo sapien
ctgtgtggccatgacattagagaga

SEQ ID NO: 4430604 - DNA, 25 bp, Homo sapien
tcctgcagaagggacctttaggctc

SEQ ID NO: 4430605 - DNA, 25 bp, Homo sapien
atcctgcagaagggacctttaggct

SEQ ID NO: 4430606 - DNA, 25 bp, Homo sapien
cctgcagaagggacctttaggctca

SEQ ID NO: 4430607 - DNA, 25 bp, Homo sapien
tcagctgcactttcagtagtgtctc

SEQ ID NO: 4430608 - DNA, 25 bp, Homo sapien
gtgtcagctgcactttcagtagtgt

SEQ ID NO: 4430609 - DNA, 25 bp, Homo sapien
gctgcactttcagtagtgtctcctc

SEQ ID NO: 4430610 - DNA, 25 bp, Homo sapien
gtagtgtctcctcccgcatggactg

SEQ ID NO: 4430611 - DNA, 25 bp, Homo sapien
ttttagatgttcagaatactcatct

SEQ ID NO: 4430612 - DNA, 25 bp, Homo sapien
ttggacttgttgaaatgactccttc

SEQ ID NO: 4430613 - DNA, 25 bp, Homo sapien
tagatgttcagaatactcatctctt

SEQ ID NO: 4430614 - DNA, 25 bp, Homo sapien
ctaattggacttgttgaaatgactc

SEQ ID NO: 4430615 - DNA, 25 bp, Homo sapien
ctctacccgacgcatatcttgctgc

SEQ ID NO: 4430616 - DNA, 25 bp, Homo sapien
ctacccgacgcatatcttgctgctt

SEQ ID NO: 4430617 - DNA, 25 bp, Homo sapien
tctacccgacgcatatcttgctgct

SEQ ID NO: 4430618 - DNA, 25 bp, Homo sapien
ctgggcctggagctctcctgccact

SEQ ID NO: 4430619 - DNA, 25 bp, Homo sapien
gagctctcctgccactctctctagt

SEQ ID NO: 4430620 - DNA, 25 bp, Homo sapien
tctctctagttccttcctcaggtgc

SEQ ID NO: 4430621 - DNA, 25 bp, Homo sapien
ctctagttccttcctcaggtgctgc

SEQ ID NO: 4430622 - DNA, 25 bp, Homo sapien
ctgctgaaggctcttgtgctgctcc

SEQ ID NO: 4430623 - DNA, 25 bp, Homo sapien
actgcagtgcgttcttgttctcatt

SEQ ID NO: 4430624 - DNA, 25 bp, Homo sapien
tgcagtgcgttcttgttctcattgt

SEQ ID NO: 4430625 - DNA, 25 bp, Homo sapien
caactgcagtgcgttcttgttctca

SEQ ID NO: 4430626 - DNA, 25 bp, Homo sapien
ctcgccaagcttctcctgtagctcc

SEQ ID NO: 4430627 - DNA, 25 bp, Homo sapien
tccccagagtctgctgcccgcctcc

SEQ ID NO: 4430628 - DNA, 25 bp, Homo sapien
tggatggggtggaggtttccgtctc

SEQ ID NO: 4430629 - DNA, 25 bp, Homo sapien
ccagagtctgctgcccgcctcccag

SEQ ID NO: 4430630 - DNA, 25 bp, Homo sapien
cctccccagagtctgctgcccgcct

SEQ ID NO: 4430631 - DNA, 25 bp, Homo sapien
ctggaagctgcctctggcctcgtac

SEQ ID NO: 4430632 - DNA, 25 bp, Homo sapien
gcaggaagcaagaaacaggactgcc

SEQ ID NO: 4430633 - DNA, 25 bp, Homo sapien
aagcaagaaacaggactgccctggg

SEQ ID NO: 4430634 - DNA, 25 bp, Homo sapien
aggaagcaagaaacaggactgccct

SEQ ID NO: 4430635 - DNA, 25 bp, Homo sapien
gggctccatgcctctagctaggatg

SEQ ID NO: 4430636 - DNA, 25 bp, Homo sapien
gatgtccagacctgagaggatccca

SEQ ID NO: 4430637 - DNA, 25 bp, Homo sapien
tcttcccctgtgattgggggctcca

SEQ ID NO: 4430638 - DNA, 25 bp, Homo sapien
ccatgcctctagctaggatgatgat

SEQ ID NO: 4430639 - DNA, 25 bp, Homo sapien
gtgacccaggtaatggtctggctgc

SEQ ID NO: 4430640 - DNA, 25 bp, Homo sapien
tgacccaggtaatggtctggctgct

SEQ ID NO: 4430641 - DNA, 25 bp, Homo sapien
tgcaggtgacccaggtaatggtctg

SEQ ID NO: 4430642 - DNA, 25 bp, Homo sapien
caggtgacccaggtaatggtctggc

SEQ ID NO: 4430643 - DNA, 25 bp, Homo sapien
ggtctgttgcagtcactgcctgtac

SEQ ID NO: 4430644 - DNA, 25 bp, Homo sapien
tagctgggtctgttgcagtcactgc

SEQ ID NO: 4430645 - DNA, 25 bp, Homo sapien
tggttcattagctgggtctgttgca

SEQ ID NO: 4430646 - DNA, 25 bp, Homo sapien
tctgttgcagtcactgcctgtacag

SEQ ID NO: 4430647 - DNA, 25 bp, Homo sapien
gggtctcctgcaacttttggcaggc

SEQ ID NO: 4430648 - DNA, 25 bp, Homo sapien
agccccatcctcggcagctccctcc

SEQ ID NO: 4430649 - DNA, 25 bp, Homo sapien
ctgcaacttttggcaggccatctca

SEQ ID NO: 4430650 - DNA, 25 bp, Homo sapien
caacttttggcaggccatctcagcc

SEQ ID NO: 4430651 - DNA, 25 bp, Homo sapien
aggctcagctgggccgttagctgct

SEQ ID NO: 4430652 - DNA, 25 bp, Homo sapien
agctgggccgttagctgctggttct

SEQ ID NO: 4430653 - DNA, 25 bp, Homo sapien
atgaggctcagctgggccgttagct

SEQ ID NO: 4430654 - DNA, 25 bp, Homo sapien
ctcagctgggccgttagctgctggt

SEQ ID NO: 4430655 - DNA, 25 bp, Homo sapien
cacactcccactactggtcgatgtg

SEQ ID NO: 4430656 - DNA, 25 bp, Homo sapien
cactcccactactggtcgatgtggg

SEQ ID NO: 4430657 - DNA, 25 bp, Homo sapien
gctattccgcccaggcacactccca

SEQ ID NO: 4430658 - DNA, 25 bp, Homo sapien
ttgctattccgcccaggcacactcc

SEQ ID NO: 4430659 - DNA, 25 bp, Homo sapien
tcctctgggacactcggcatgggct

SEQ ID NO: 4430660 - DNA, 25 bp, Homo sapien
ccaggtcctctgggacactcggcat

SEQ ID NO: 4430661 - DNA, 25 bp, Homo sapien
aggtcctctgggacactcggcatgg

SEQ ID NO: 4430662 - DNA, 25 bp, Homo sapien
ctctgggacactcggcatgggctga

SEQ ID NO: 4430663 - DNA, 25 bp, Homo sapien
tggcagcacaccctctgctctttca

SEQ ID NO: 4430664 - DNA, 25 bp, Homo sapien
gctctttcacctgctcttgtaactg

SEQ ID NO: 4430665 - DNA, 25 bp, Homo sapien
cctgctcttgtaactgtgcctgctt

SEQ ID NO: 4430666 - DNA, 25 bp, Homo sapien
gcctgcttctcctgggcactagctc

SEQ ID NO: 4430667 - DNA, 25 bp, Homo sapien
ctgccctcaggtggcattttcaagt

SEQ ID NO: 4430668 - DNA, 25 bp, Homo sapien
caaaatattgcagtcacatctcggc

SEQ ID NO: 4430669 - DNA, 25 bp, Homo sapien
aaatattgcagtcacatctcggcag

SEQ ID NO: 4430670 - DNA, 25 bp, Homo sapien
gagccaaaatattgcagtcacatct

SEQ ID NO: 4430671 - DNA, 25 bp, Homo sapien
ctggagccaaaatattgcagtcaca

SEQ ID NO: 4430672 - DNA, 25 bp, Homo sapien
ccttcaggtggtccataaagctgct

SEQ ID NO: 4430673 - DNA, 25 bp, Homo sapien
caggtctgccttctccttcaggtgg

SEQ ID NO: 4430674 - DNA, 25 bp, Homo sapien
ctgccttctccttcaggtggtccat

SEQ ID NO: 4430675 - DNA, 25 bp, Homo sapien
ctccttcaggtggtccataaagctg

SEQ ID NO: 4430676 - DNA, 25 bp, Homo sapien
gtctgtctcgccagtggtggatgaa

SEQ ID NO: 4430677 - DNA, 25 bp, Homo sapien
gtggatgaagcagagttcttttttc

SEQ ID NO: 4430678 - DNA, 25 bp, Homo sapien
tgatggcgtctgtctcgccagtggt

SEQ ID NO: 4430679 - DNA, 25 bp, Homo sapien
tggatgaagcagagttcttttttca

SEQ ID NO: 4430680 - DNA, 25 bp, Homo sapien
tgcgggaggacagggctcagacgct

SEQ ID NO: 4430681 - DNA, 25 bp, Homo sapien
ggacagggctcagacgctggggccc

SEQ ID NO: 4430682 - DNA, 25 bp, Homo sapien
gctcagacgctggggcccctccgac

SEQ ID NO: 4430683 - DNA, 25 bp, Homo sapien
ctgcgggaggacagggctcagacgc

SEQ ID NO: 4430684 - DNA, 25 bp, Homo sapien
agccccctggttctgataaaaggtg

SEQ ID NO: 4430685 - DNA, 25 bp, Homo sapien
atctttggcacagccccctggttct

SEQ ID NO: 4430686 - DNA, 25 bp, Homo sapien
gcacagccccctggttctgataaaa

SEQ ID NO: 4430687 - DNA, 25 bp, Homo sapien
tcccagtgccgcatctttggcacag

SEQ ID NO: 4430688 - DNA, 25 bp, Homo sapien
atctgctgcagctccagcagcttca

SEQ ID NO: 4430689 - DNA, 25 bp, Homo sapien
catctgctgcagctccagcagcttc

SEQ ID NO: 4430690 - DNA, 25 bp, Homo sapien
tctgctgcagctccagcagcttcac

SEQ ID NO: 4430691 - DNA, 25 bp, Homo sapien
gcccattgttgtagttgctgtaagc

SEQ ID NO: 4430692 - DNA, 25 bp, Homo sapien
ttgtagttgctgtaagccgcaatac

SEQ ID NO: 4430693 - DNA, 25 bp, Homo sapien
ggaattttctgtgcccattgttgta

SEQ ID NO: 4430694 - DNA, 25 bp, Homo sapien
gggttgtgggcagcggccaggaatt

SEQ ID NO: 4430695 - DNA, 25 bp, Homo sapien
accatgcttgtctgcagccccaagc

SEQ ID NO: 4430696 - DNA, 25 bp, Homo sapien
catgcttgtctgcagccccaagctc

SEQ ID NO: 4430697 - DNA, 25 bp, Homo sapien
ccatgcttgtctgcagccccaagct

SEQ ID NO: 4430698 - DNA, 25 bp, Homo sapien
caccatgcttgtctgcagccccaag

SEQ ID NO: 4430699 - DNA, 25 bp, Homo sapien
tcaaggagaggatcctccctggcct

SEQ ID NO: 4430700 - DNA, 25 bp, Homo sapien
tgtcaaggagaggatcctccctggc

SEQ ID NO: 4430701 - DNA, 25 bp, Homo sapien
ggcagaggaggtgaggctcacctca

SEQ ID NO: 4430702 - DNA, 25 bp, Homo sapien
cttgtcaaggagaggatcctccctg

SEQ ID NO: 4430703 - DNA, 25 bp, Homo sapien
ggcagccaagcccagcacaagaatg

SEQ ID NO: 4430704 - DNA, 25 bp, Homo sapien
ccaagcccagcacaagaatggcaca

SEQ ID NO: 4430705 - DNA, 25 bp, Homo sapien
agccaagcccagcacaagaatggca

SEQ ID NO: 4430706 - DNA, 25 bp, Homo sapien
gcccagcacaagaatggcacacagc

SEQ ID NO: 4430707 - DNA, 25 bp, Homo sapien
gaagtgatttcaacgataaaagtac

SEQ ID NO: 4430708 - DNA, 25 bp, Homo sapien
gtgaagtgatttcaacgataaaagt

SEQ ID NO: 4430709 - DNA, 25 bp, Homo sapien
tgaagtgatttcaacgataaaagta

SEQ ID NO: 4430710 - DNA, 25 bp, Homo sapien
caataaggccactctagggaaaaat

SEQ ID NO: 4430711 - DNA, 25 bp, Homo sapien
ataaggccactctagggaaaaatct

SEQ ID NO: 4430712 - DNA, 25 bp, Homo sapien
tgctgtcacccatttcagctgggcc

SEQ ID NO: 4430713 - DNA, 25 bp, Homo sapien
cggtgctgccggctagcagatgcca

SEQ ID NO: 4430714 - DNA, 25 bp, Homo sapien
ccggctagcagatgccacagtgctg

SEQ ID NO: 4430715 - DNA, 25 bp, Homo sapien
ctgtcacccatttcagctgggcctg

SEQ ID NO: 4430716 - DNA, 25 bp, Homo sapien
tttgacaccaggaagaagtgacgca

SEQ ID NO: 4430717 - DNA, 25 bp, Homo sapien
acaccaggaagaagtgacgcagtct

SEQ ID NO: 4430718 - DNA, 25 bp, Homo sapien
tgacaccaggaagaagtgacgcagt

SEQ ID NO: 4430719 - DNA, 25 bp, Homo sapien
ctttgacaccaggaagaagtgacgc

SEQ ID NO: 4430720 - DNA, 25 bp, Homo sapien
tgggacagaggttgccagagttggg

SEQ ID NO: 4430721 - DNA, 25 bp, Homo sapien
tgatgggacagaggttgccagagtt

SEQ ID NO: 4430722 - DNA, 25 bp, Homo sapien
cttgatgggacagaggttgccagag

SEQ ID NO: 4430723 - DNA, 25 bp, Homo sapien
gcagtgcctgctgagatcccccacc

SEQ ID NO: 4430724 - DNA, 25 bp, Homo sapien
gccctgggtgtcagggtctgaacta

SEQ ID NO: 4430725 - DNA, 25 bp, Homo sapien
ctatagtggagcaccgcaaggcagt

SEQ ID NO: 4430726 - DNA, 25 bp, Homo sapien
cagggtctgaactagacagggtgcc

SEQ ID NO: 4430727 - DNA, 25 bp, Homo sapien
tctgaactagacagggtgcctcttt

SEQ ID NO: 4430728 - DNA, 25 bp, Homo sapien
tgggtacatctctgtccctggcgcc

SEQ ID NO: 4430729 - DNA, 25 bp, Homo sapien
gtgataatgggcatctctgtctgaa

SEQ ID NO: 4430730 - DNA, 25 bp, Homo sapien
tagtttctggagaccacgagctgtc

SEQ ID NO: 4430731 - DNA, 25 bp, Homo sapien
gcttctttggagcacctaattgtgc

SEQ ID NO: 4430732 - DNA, 25 bp, Homo sapien
tatgctctctctacccatggtgtcc

SEQ ID NO: 4430733 - DNA, 25 bp, Homo sapien
cgatgggatgcacggcgctctatta

SEQ ID NO: 4430734 - DNA, 25 bp, Homo sapien
cagcagaagcgcctgtgcatcatgg

SEQ ID NO: 4430735 - DNA, 25 bp, Homo sapien
catcatgggaaagccggttggcgat

SEQ ID NO: 4430736 - DNA, 25 bp, Homo sapien
atccggtgatggctacacagccttt

SEQ ID NO: 4430737 - DNA, 25 bp, Homo sapien
ccagagatccggtgatggctacaca

SEQ ID NO: 4430738 - DNA, 25 bp, Homo sapien
agatccggtgatggctacacagcct

SEQ ID NO: 4430739 - DNA, 25 bp, Homo sapien
agagatccggtgatggctacacagc

SEQ ID NO: 4430740 - DNA, 25 bp, Homo sapien
tagaagaggaagcacatccagaaca

SEQ ID NO: 4430741 - DNA, 25 bp, Homo sapien
tccaaggccaccaagctggtagata

SEQ ID NO: 4430742 - DNA, 25 bp, Homo sapien
ctcgactgaaaggaaagatggcata

SEQ ID NO: 4430743 - DNA, 25 bp, Homo sapien
gagcaaaggctgtctggtcccaaat

SEQ ID NO: 4430744 - DNA, 25 bp, Homo sapien
agcagccggcaggagagtgtctcaa

SEQ ID NO: 4430745 - DNA, 25 bp, Homo sapien
caggagagtgtctcaaagctgctgc

SEQ ID NO: 4430746 - DNA, 25 bp, Homo sapien
ggcagacggagcctgccagctccaa

SEQ ID NO: 4430747 - DNA, 25 bp, Homo sapien
gcagacggagcctgccagctccaag

SEQ ID NO: 4430748 - DNA, 25 bp, Homo sapien
aattaatcatcagggccggcagtcc

SEQ ID NO: 4430749 - DNA, 25 bp, Homo sapien
gccaccaaattaatcatcagggccg

SEQ ID NO: 4430750 - DNA, 25 bp, Homo sapien
tggagaccagaaagccagagtagct

SEQ ID NO: 4430751 - DNA, 25 bp, Homo sapien
aagactaaacctagtcccacagcca

SEQ ID NO: 4430752 - DNA, 25 bp, Homo sapien
ttcttctccgcatgttgctcctctt

SEQ ID NO: 4430753 - DNA, 25 bp, Homo sapien
ttttcttctccgcatgttgctcctc

SEQ ID NO: 4430754 - DNA, 25 bp, Homo sapien
atttttcttctccgcatgttgctcc

SEQ ID NO: 4430755 - DNA, 25 bp, Homo sapien
ccatttttcttctccgcatgttgct

SEQ ID NO: 4430756 - DNA, 25 bp, Homo sapien
gccctgctcccgctgttgaggctga

SEQ ID NO: 4430757 - DNA, 25 bp, Homo sapien
ccctgctcccgctgttgaggctgac

SEQ ID NO: 4430758 - DNA, 25 bp, Homo sapien
tgtgtcgtcctcctgctgtgcactg

SEQ ID NO: 4430759 - DNA, 25 bp, Homo sapien
agagcagggatacagttcacagtcc

SEQ ID NO: 4430760 - DNA, 25 bp, Homo sapien
aatgccccaatgtcctgtgtcgtcc

SEQ ID NO: 4430761 - DNA, 25 bp, Homo sapien
ggctccaggagtttgcatgctctgg

SEQ ID NO: 4430762 - DNA, 25 bp, Homo sapien
ggatcgccttcggaggggccgcacg

SEQ ID NO: 4430763 - DNA, 25 bp, Homo sapien
tcggccggcagtacggactgcagaa

SEQ ID NO: 4430764 - DNA, 25 bp, Homo sapien
ggcggaggacctgcgtcgcggtttg

SEQ ID NO: 4430765 - DNA, 25 bp, Homo sapien
gaggacctgcgtcgcggtttgcggg

SEQ ID NO: 4430766 - DNA, 25 bp, Homo sapien
ggccgagctcttgtgagcctaaaga

SEQ ID NO: 4430767 - DNA, 25 bp, Homo sapien
ggagccgtctggagccgctgtcatg

SEQ ID NO: 4430768 - DNA, 25 bp, Homo sapien
ttgtgagcctaaagacccgcctctt

SEQ ID NO: 4430769 - DNA, 25 bp, Homo sapien
gccgcctggccgagctcttgtgagc

SEQ ID NO: 4430770 - DNA, 25 bp, Homo sapien
ggagcgtgagccgcagctgagcctc

SEQ ID NO: 4430771 - DNA, 25 bp, Homo sapien
tggagcgtgagccgcagctgagcct

SEQ ID NO: 4430772 - DNA, 25 bp, Homo sapien
gcaacttcagtttggccttgaatct

SEQ ID NO: 4430773 - DNA, 25 bp, Homo sapien
atgggtcccgagagggctcccgcca

SEQ ID NO: 4430774 - DNA, 25 bp, Homo sapien
gccctgtcgcggtccccggagcagg

SEQ ID NO: 4430775 - DNA, 25 bp, Homo sapien
cctcttcctctgaagtcacttcttc

SEQ ID NO: 4430776 - DNA, 25 bp, Homo sapien
aagtcacttcttctgttgtcccatt

SEQ ID NO: 4430777 - DNA, 25 bp, Homo sapien
cttcctctgaagtcacttcttctgt

SEQ ID NO: 4430778 - DNA, 25 bp, Homo sapien
tctgaagtcacttcttctgttgtcc

SEQ ID NO: 4430779 - DNA, 25 bp, Homo sapien
ttcttgcactttattctacctgagc

SEQ ID NO: 4430780 - DNA, 25 bp, Homo sapien
ctttattctacctgagctaaactgc

SEQ ID NO: 4430781 - DNA, 25 bp, Homo sapien
gcctaaactctcattctaattggac

SEQ ID NO: 4430782 - DNA, 25 bp, Homo sapien
tacaactgaaggtttttggcacctc

SEQ ID NO: 4430783 - DNA, 25 bp, Homo sapien
tcaagacttgcaggaggtaagggct

SEQ ID NO: 4430784 - DNA, 25 bp, Homo sapien
tatcgaaagcccaccggaaaatgac

SEQ ID NO: 4430785 - DNA, 25 bp, Homo sapien
gaaggagcagcactcacaaaggtcc

SEQ ID NO: 4430786 - DNA, 25 bp, Homo sapien
tggcagtggcggatacagaagaacc

SEQ ID NO: 4430787 - DNA, 25 bp, Homo sapien
tgggattcgaaatgtagactgaagt

SEQ ID NO: 4430788 - DNA, 25 bp, Homo sapien
tttcaattttgccaagcttcgaggc

SEQ ID NO: 4430789 - DNA, 25 bp, Homo sapien
gcttcgaggcaaaaatggacacttt

SEQ ID NO: 4430790 - DNA, 25 bp, Homo sapien
ggaacttcaggatcaattttcttca

SEQ ID NO: 4430791 - DNA, 25 bp, Homo sapien
gtaagcttgagacccctgattgcca

SEQ ID NO: 4430792 - DNA, 25 bp, Homo sapien
tcatgagttctagtgccaggacaac

SEQ ID NO: 4430793 - DNA, 25 bp, Homo sapien
agttattgctttgctactgagcccg

SEQ ID NO: 4430794 - DNA, 25 bp, Homo sapien
caaacccatgcatcctgcgaaggca

SEQ ID NO: 4430795 - DNA, 25 bp, Homo sapien
ggccctcgggccccgcggggctgca

SEQ ID NO: 4430796 - DNA, 25 bp, Homo sapien
acttctggtattggcgccgcgagga

SEQ ID NO: 4430797 - DNA, 25 bp, Homo sapien
aaaggaggcggcaataggtgttggc

SEQ ID NO: 4430798 - DNA, 25 bp, Homo sapien
cggcaataggtgttggcccgcacgc

SEQ ID NO: 4430799 - DNA, 25 bp, Homo sapien
tcagcgaaaggaggcggcaataggt

SEQ ID NO: 4430800 - DNA, 25 bp, Homo sapien
ggtgttggcccgcacgctcgccatg

SEQ ID NO: 4430801 - DNA, 25 bp, Homo sapien
gcagaagctcatgaccacggcctgc

SEQ ID NO: 4430802 - DNA, 25 bp, Homo sapien
gggcagaagctcatgaccacggcct

SEQ ID NO: 4430803 - DNA, 25 bp, Homo sapien
agctcatgaccacggcctgctgcag

SEQ ID NO: 4430804 - DNA, 25 bp, Homo sapien
agaagctcatgaccacggcctgctg

SEQ ID NO: 4430805 - DNA, 25 bp, Homo sapien
gcggccccacgagcggccgcgccac

SEQ ID NO: 4430806 - DNA, 25 bp, Homo sapien
ccagcggccccacgagcggccgcgc

SEQ ID NO: 4430807 - DNA, 25 bp, Homo sapien
agcgccagcggccccacgagcggcc

SEQ ID NO: 4430808 - DNA, 25 bp, Homo sapien
gaggcgcggcgagccgagcgccagc

SEQ ID NO: 4430809 - DNA, 25 bp, Homo sapien
ggcgggcaagctgccgtagggcgag

SEQ ID NO: 4430810 - DNA, 25 bp, Homo sapien
tcaggcggcgcgagggcagggcggt

SEQ ID NO: 4430811 - DNA, 25 bp, Homo sapien
gcagggcggtcccagcaaggggggc

SEQ ID NO: 4430812 - DNA, 25 bp, Homo sapien
ctgcgaggcggacagtgggcgcaac

SEQ ID NO: 4430813 - DNA, 25 bp, Homo sapien
tcacaagttggacgagaggcgcgag

SEQ ID NO: 4430814 - DNA, 25 bp, Homo sapien
tgctggccgggcgtgtggaggccgc

SEQ ID NO: 4430815 - DNA, 25 bp, Homo sapien
agttggacgagaggcgcgagcgcgc

SEQ ID NO: 4430816 - DNA, 25 bp, Homo sapien
gcgagcgcgcggagtcctgggggtc

SEQ ID NO: 4430817 - DNA, 25 bp, Homo sapien
gctccatctgagctactggccagct

SEQ ID NO: 4430818 - DNA, 25 bp, Homo sapien
ccatctgagctactggccagctggc

SEQ ID NO: 4430819 - DNA, 25 bp, Homo sapien
tgctccatctgagctactggccagc

SEQ ID NO: 4430820 - DNA, 25 bp, Homo sapien
ctccatctgagctactggccagctg

SEQ ID NO: 4430821 - DNA, 25 bp, Homo sapien
tccagaggaggatatctgatcagcc

SEQ ID NO: 4430822 - DNA, 25 bp, Homo sapien
gtcatccggctctgttgaggcatca

SEQ ID NO: 4430823 - DNA, 25 bp, Homo sapien
ggcatggccatcgagagtcatccgg

SEQ ID NO: 4430824 - DNA, 25 bp, Homo sapien
cacgctttgttaagtggcatggcca

SEQ ID NO: 4430825 - DNA, 25 bp, Homo sapien
cttcatctttgatcccattggtggg

SEQ ID NO: 4430826 - DNA, 25 bp, Homo sapien
gtgtgcaggatggaacctgagttcc

SEQ ID NO: 4430827 - DNA, 25 bp, Homo sapien
caattacagtagttgcttaccagca

SEQ ID NO: 4430828 - DNA, 25 bp, Homo sapien
gagttccagccccttacgctgacaa

SEQ ID NO: 4430829 - DNA, 25 bp, Homo sapien
tctggcatcttgaatcttcttatcc

SEQ ID NO: 4430830 - DNA, 25 bp, Homo sapien
gcatcttgaatcttcttatcctgac

SEQ ID NO: 4430831 - DNA, 25 bp, Homo sapien
ttgcagatttctggcatcttgaatc

SEQ ID NO: 4430832 - DNA, 25 bp, Homo sapien
tcatgttgcagatttctggcatctt

SEQ ID NO: 4430833 - DNA, 25 bp, Homo sapien
tggacacctctacacgatctggcac

SEQ ID NO: 4430834 - DNA, 25 bp, Homo sapien
cttaggatggattctgagcctcctc

SEQ ID NO: 4430835 - DNA, 25 bp, Homo sapien
cacaggtgcgggaagatctggacac

SEQ ID NO: 4430836 - DNA, 25 bp, Homo sapien
gcaaaggcgctcttcgctggacctg

SEQ ID NO: 4430837 - DNA, 25 bp, Homo sapien
gagcgagcttctcaatcatagcaag

SEQ ID NO: 4430838 - DNA, 25 bp, Homo sapien
atagtactagggcaaacctcccagg

SEQ ID NO: 4430839 - DNA, 25 bp, Homo sapien
tcccgtgcccctatgaaatgtaatg

SEQ ID NO: 4430840 - DNA, 25 bp, Homo sapien
tcgaaatggaggaacgtgagtctct

SEQ ID NO: 4430841 - DNA, 25 bp, Homo sapien
gtaggctttagctttcaggccaatg

SEQ ID NO: 4430842 - DNA, 25 bp, Homo sapien
tcctggctttagaacaacttggtgg

SEQ ID NO: 4430843 - DNA, 25 bp, Homo sapien
gactgtccagcaaagtatcctttgt

SEQ ID NO: 4430844 - DNA, 25 bp, Homo sapien
tcctttgtccaatttgtacccacag

SEQ ID NO: 4430845 - DNA, 25 bp, Homo sapien
tggtgctgcctatgtggcgtgcctg

SEQ ID NO: 4430846 - DNA, 25 bp, Homo sapien
tatgtggcgtgcctgagggcagagc

SEQ ID NO: 4430847 - DNA, 25 bp, Homo sapien
tgctgcctatgtggcgtgcctgagg

SEQ ID NO: 4430848 - DNA, 25 bp, Homo sapien
tgcctatgtggcgtgcctgagggca

SEQ ID NO: 4430849 - DNA, 25 bp, Homo sapien
tggtaaaccacataaactcttcagg

SEQ ID NO: 4430850 - DNA, 25 bp, Homo sapien
agtccaaggcacagacacaatggta

SEQ ID NO: 4430851 - DNA, 25 bp, Homo sapien
tcttacgtgggatagatcaaacctt

SEQ ID NO: 4430852 - DNA, 25 bp, Homo sapien
tgccagttccagacatcagtttttc

SEQ ID NO: 4430853 - DNA, 25 bp, Homo sapien
tgtaagcctaaaagttctgcctaac

SEQ ID NO: 4430854 - DNA, 25 bp, Homo sapien
aatgtatactgtgtccaatgtctgg

SEQ ID NO: 4430855 - DNA, 25 bp, Homo sapien
gggttgtagcgtttagatacctaga

SEQ ID NO: 4430856 - DNA, 25 bp, Homo sapien
gactacttgatgctatgtaagccta

SEQ ID NO: 4430857 - DNA, 25 bp, Homo sapien
tccacttaagagaattcggctgctg

SEQ ID NO: 4430858 - DNA, 25 bp, Homo sapien
tccctccacttaagagaattcggct

SEQ ID NO: 4430859 - DNA, 25 bp, Homo sapien
ctccaggacacctatgcgatccctc

SEQ ID NO: 4430860 - DNA, 25 bp, Homo sapien
cacctatgcgatccctccacttaag

SEQ ID NO: 4430861 - DNA, 25 bp, Homo sapien
gggacagtcagtagccccattggct

SEQ ID NO: 4430862 - DNA, 25 bp, Homo sapien
agtcagtagccccattggctgagct

SEQ ID NO: 4430863 - DNA, 25 bp, Homo sapien
gagaagggacagtcagtagccccat

SEQ ID NO: 4430864 - DNA, 25 bp, Homo sapien
agtagccccattggctgagctagta

SEQ ID NO: 4430865 - DNA, 25 bp, Homo sapien
gatatctgccccgatgtgcctctgt

SEQ ID NO: 4430866 - DNA, 25 bp, Homo sapien
gaatatcctgactcttccgtgacag

SEQ ID NO: 4430867 - DNA, 25 bp, Homo sapien
tttcaggtgcagaaaatgctgcctg

SEQ ID NO: 4430868 - DNA, 25 bp, Homo sapien
ggcccaggccgttcttctcaatatg

SEQ ID NO: 4430869 - DNA, 25 bp, Homo sapien
gactctgacagctctgttcacatcc

SEQ ID NO: 4430870 - DNA, 25 bp, Homo sapien
ctaatggactctgacagctctgttc

SEQ ID NO: 4430871 - DNA, 25 bp, Homo sapien
gctctgttcacatcctctcccactg

SEQ ID NO: 4430872 - DNA, 25 bp, Homo sapien
ctcccactgtcacacggcctcttac

SEQ ID NO: 4430873 - DNA, 25 bp, Homo sapien
ttttattgattaatgctaaaatgga

SEQ ID NO: 4430874 - DNA, 25 bp, Homo sapien
tttattgattaatgctaaaatggaa

SEQ ID NO: 4430875 - DNA, 25 bp, Homo sapien
ttattgattaatgctaaaatggaaa

SEQ ID NO: 4430876 - DNA, 25 bp, Homo sapien
tattgattaatgctaaaatggaaac

SEQ ID NO: 4430877 - DNA, 25 bp, Homo sapien
aattgatcaaagatggtcgtatacc

SEQ ID NO: 4430878 - DNA, 25 bp, Homo sapien
cattgaggggtgagcagtagcagtt

SEQ ID NO: 4430879 - DNA, 25 bp, Homo sapien
gatcaaagatggtcgtatacccatt

SEQ ID NO: 4430880 - DNA, 25 bp, Homo sapien
aagatggtcgtatacccattgtggg

SEQ ID NO: 4430881 - DNA, 25 bp, Homo sapien
tctgcttcttcgcatccctgcctct

SEQ ID NO: 4430882 - DNA, 25 bp, Homo sapien
tcctctgcttcttcgcatccctgcc

SEQ ID NO: 4430883 - DNA, 25 bp, Homo sapien
gcttcttcgcatccctgcctcttcc

SEQ ID NO: 4430884 - DNA, 25 bp, Homo sapien
tgcttcttcgcatccctgcctcttc

SEQ ID NO: 4430885 - DNA, 25 bp, Homo sapien
tgcgtgagcggcctcactggctctc

SEQ ID NO: 4430886 - DNA, 25 bp, Homo sapien
gccgggtgccctgcgtgagcggcct

SEQ ID NO: 4430887 - DNA, 25 bp, Homo sapien
gtgagcggcctcactggctctcact

SEQ ID NO: 4430888 - DNA, 25 bp, Homo sapien
ggtgccctgcgtgagcggcctcact

SEQ ID NO: 4430889 - DNA, 25 bp, Homo sapien
ctgttgtgccatcggatgctaggct

SEQ ID NO: 4430890 - DNA, 25 bp, Homo sapien
taaataacaattgcatcatggggaa

SEQ ID NO: 4430891 - DNA, 25 bp, Homo sapien
accctgttgtgccatcggatgctag

SEQ ID NO: 4430892 - DNA, 25 bp, Homo sapien
gtgccatcggatgctaggctttatt

SEQ ID NO: 4430893 - DNA, 25 bp, Homo sapien
ctttccacagtctctccagatatgt

SEQ ID NO: 4430894 - DNA, 25 bp, Homo sapien
acagtctctccagatatgtcttcct

SEQ ID NO: 4430895 - DNA, 25 bp, Homo sapien
tccacagtctctccagatatgtctt

SEQ ID NO: 4430896 - DNA, 25 bp, Homo sapien
cacagtctctccagatatgtcttcc

SEQ ID NO: 4430897 - DNA, 25 bp, Homo sapien
tgatatgcgtggatacatgctcatg

SEQ ID NO: 4430898 - DNA, 25 bp, Homo sapien
agtgagaccggagcttcagccaaaa

SEQ ID NO: 4430899 - DNA, 25 bp, Homo sapien
tgtcactatgaaggccagacgaggg

SEQ ID NO: 4430900 - DNA, 25 bp, Homo sapien
gaaagcactgactcacgcaaaggtc

SEQ ID NO: 4430901 - DNA, 25 bp, Homo sapien
tgatataatggcacaatggcctgag

SEQ ID NO: 4430902 - DNA, 25 bp, Homo sapien
gagaatactcagttacagcgcccat

SEQ ID NO: 4430903 - DNA, 25 bp, Homo sapien
gcctgagaatactcagttacagcgc

SEQ ID NO: 4430904 - DNA, 25 bp, Homo sapien
ctgccttgtcctgatataatggcac

SEQ ID NO: 4430905 - DNA, 25 bp, Homo sapien
gaccccatccatgtgagagcactta

SEQ ID NO: 4430906 - DNA, 25 bp, Homo sapien
gagcacttacagagattctagctga

SEQ ID NO: 4430907 - DNA, 25 bp, Homo sapien
ttcaacactgaataaggctgacccc

SEQ ID NO: 4430908 - DNA, 25 bp, Homo sapien
gctctctgtgatggacttgttcagg

SEQ ID NO: 4430909 - DNA, 25 bp, Homo sapien
agcaaggcttgcgtcatgttcagag

SEQ ID NO: 4430910 - DNA, 25 bp, Homo sapien
ggcttgcgtcatgttcagagaatca

SEQ ID NO: 4430911 - DNA, 25 bp, Homo sapien
ttgcgtcatgttcagagaatcagac

SEQ ID NO: 4430912 - DNA, 25 bp, Homo sapien
tgacagcaaggcttgcgtcatgttc

SEQ ID NO: 4430913 - DNA, 25 bp, Homo sapien
ctgaagcagtgctctggtctgctgc

SEQ ID NO: 4430914 - DNA, 25 bp, Homo sapien
ccaggatatgtacttctcacagcgg

SEQ ID NO: 4430915 - DNA, 25 bp, Homo sapien
tgtacttctcacagcggtggcagag

SEQ ID NO: 4430916 - DNA, 25 bp, Homo sapien
tctggtctgctgcacctgattctca

SEQ ID NO: 4430917 - DNA, 25 bp, Homo sapien
tctcggaagagtcaaacatagtaag

SEQ ID NO: 4430918 - DNA, 25 bp, Homo sapien
gctgtattggttgggtatggccaca

SEQ ID NO: 4430919 - DNA, 25 bp, Homo sapien
cactggtcttgaggaaaataactta

SEQ ID NO: 4430920 - DNA, 25 bp, Homo sapien
taaccttggaggatccctaagacat

SEQ ID NO: 4430921 - DNA, 25 bp, Homo sapien
ctggctctgatgtacgatgaacctg

SEQ ID NO: 4430922 - DNA, 25 bp, Homo sapien
tacgatgaacctgcttgagtggcat

SEQ ID NO: 4430923 - DNA, 25 bp, Homo sapien
cctgccttgtctggatttgcacact

SEQ ID NO: 4430924 - DNA, 25 bp, Homo sapien
ttggaacacagagacgtgatgcact

SEQ ID NO: 4430925 - DNA, 25 bp, Homo sapien
caccaggtgcccagacatctggttg

SEQ ID NO: 4430926 - DNA, 25 bp, Homo sapien
ccttgaggttaactgctgcttggaa

SEQ ID NO: 4430927 - DNA, 25 bp, Homo sapien
agacccatgggtgtgcctttggggt

SEQ ID NO: 4430928 - DNA, 25 bp, Homo sapien
gtgcctttggggtgtgcattgacag

SEQ ID NO: 4430929 - DNA, 25 bp, Homo sapien
gcctttggggtgtgcattgacagtt

SEQ ID NO: 4430930 - DNA, 25 bp, Homo sapien
gacccatgggtgtgcctttggggtg

SEQ ID NO: 4430931 - DNA, 25 bp, Homo sapien
tggaacattgacacaagccaggtgg

SEQ ID NO: 4430932 - DNA, 25 bp, Homo sapien
tgaacagtaatggaacattgacaca

SEQ ID NO: 4430933 - DNA, 25 bp, Homo sapien
cgtgggcagccggtgaacagtaatg

SEQ ID NO: 4430934 - DNA, 25 bp, Homo sapien
ccaggtgggacgagtgtggtgggat

SEQ ID NO: 4430935 - DNA, 25 bp, Homo sapien
tgaagtttaacaaattcctcctgcc

SEQ ID NO: 4430936 - DNA, 25 bp, Homo sapien
gcaggatcaaacctcactcctccca

SEQ ID NO: 4430937 - DNA, 25 bp, Homo sapien
ttaaaggctttatgacaaacaggca

SEQ ID NO: 4430938 - DNA, 25 bp, Homo sapien
accatgacaatgacgtctagcaaca

SEQ ID NO: 4430939 - DNA, 25 bp, Homo sapien
cagactcctggaaataactgggcag

SEQ ID NO: 4430940 - DNA, 25 bp, Homo sapien
acctgagacatgtgagaccccgttg

SEQ ID NO: 4430941 - DNA, 25 bp, Homo sapien
gggctcatccgcgtgtctgtgactg

SEQ ID NO: 4430942 - DNA, 25 bp, Homo sapien
aagccaactggctgaggtcaaccca

SEQ ID NO: 4430943 - DNA, 25 bp, Homo sapien
gcttttttgggcagcgatatctctg

SEQ ID NO: 4430944 - DNA, 25 bp, Homo sapien
tttgggcagcgatatctctgatcct

SEQ ID NO: 4430945 - DNA, 25 bp, Homo sapien
ctgcagcgctttgaagagtgtggca

SEQ ID NO: 4430946 - DNA, 25 bp, Homo sapien
ttcctccactcgcaacgcgttgata

SEQ ID NO: 4430947 - DNA, 25 bp, Homo sapien
caacctccagtcaggacagataaaa

SEQ ID NO: 4430948 - DNA, 25 bp, Homo sapien
tcaacctccagtcaggacagataaa

SEQ ID NO: 4430949 - DNA, 25 bp, Homo sapien
atggatttggctgttagggctggta

SEQ ID NO: 4430950 - DNA, 25 bp, Homo sapien
gcttgtaatcaattccttgtacacc

SEQ ID NO: 4430951 - DNA, 25 bp, Homo sapien
tgtaatcaattccttgtacacccca

SEQ ID NO: 4430952 - DNA, 25 bp, Homo sapien
taactgcttgtaatcaattccttgt

SEQ ID NO: 4430953 - DNA, 25 bp, Homo sapien
aatcaattccttgtacaccccactg

SEQ ID NO: 4430954 - DNA, 25 bp, Homo sapien
tgctgggcccaacacacggttcagc

SEQ ID NO: 4430955 - DNA, 25 bp, Homo sapien
ttagactttgcagtccgaggacctg

SEQ ID NO: 4430956 - DNA, 25 bp, Homo sapien
cagtccgaggacctgtctgcagggt

SEQ ID NO: 4430957 - DNA, 25 bp, Homo sapien
ttgggggtccctgcgttgacccagc

SEQ ID NO: 4430958 - DNA, 25 bp, Homo sapien
cgtttgtaattgtgtgcatttctcc

SEQ ID NO: 4430959 - DNA, 25 bp, Homo sapien
tagcttgccatgagttttaccggtt

SEQ ID NO: 4430960 - DNA, 25 bp, Homo sapien
tttctcccgtgcctattgatttagc

SEQ ID NO: 4430961 - DNA, 25 bp, Homo sapien
cacttttcaacatagttgcgtagtt

SEQ ID NO: 4430962 - DNA, 25 bp, Homo sapien
tataacgctgacccacacttaagaa

SEQ ID NO: 4430963 - DNA, 25 bp, Homo sapien
taacgctgacccacacttaagaaaa

SEQ ID NO: 4430964 - DNA, 25 bp, Homo sapien
ataacgctgacccacacttaagaaa

SEQ ID NO: 4430965 - DNA, 25 bp, Homo sapien
ttataacgctgacccacacttaaga

SEQ ID NO: 4430966 - DNA, 25 bp, Homo sapien
tatggtggtgtcattgccctccagc

SEQ ID NO: 4430967 - DNA, 25 bp, Homo sapien
gtgagctatggtggtgtcattgccc

SEQ ID NO: 4430968 - DNA, 25 bp, Homo sapien
gctatggtggtgtcattgccctcca

SEQ ID NO: 4430969 - DNA, 25 bp, Homo sapien
ctgtgagcccaccacagtggtgtgt

SEQ ID NO: 4430970 - DNA, 25 bp, Homo sapien
ccagctgggcgtcctacagtgagtt

SEQ ID NO: 4430971 - DNA, 25 bp, Homo sapien
tttctcccacatcgaccaattcttg

SEQ ID NO: 4430972 - DNA, 25 bp, Homo sapien
ctacagtgagttcacttcagtcctg

SEQ ID NO: 4430973 - DNA, 25 bp, Homo sapien
ccacatcgaccaattcttggaaacc

SEQ ID NO: 4430974 - DNA, 25 bp, Homo sapien
cagtgagttccttcctggcgtgagg

SEQ ID NO: 4430975 - DNA, 25 bp, Homo sapien
gttcagccccttgagtggacagcca

SEQ ID NO: 4430976 - DNA, 25 bp, Homo sapien
gatgctttccgcttagagttcagcc

SEQ ID NO: 4430977 - DNA, 25 bp, Homo sapien
taattcagctcataagggtcacggt

SEQ ID NO: 4430978 - DNA, 25 bp, Homo sapien
gaaaacagttaggatatgccatgct

SEQ ID NO: 4430979 - DNA, 25 bp, Homo sapien
cagcaaatttcagttgatgggaacc

SEQ ID NO: 4430980 - DNA, 25 bp, Homo sapien
caaaccagtgtgaggatagatctct

SEQ ID NO: 4430981 - DNA, 25 bp, Homo sapien
gctttccaagaggaactggcaactg

SEQ ID NO: 4430982 - DNA, 25 bp, Homo sapien
gagactaaccgcctggaagaaagct

SEQ ID NO: 4430983 - DNA, 25 bp, Homo sapien
tagtgggtaagccatgagactaacc

SEQ ID NO: 4430984 - DNA, 25 bp, Homo sapien
cagtggctatatccccaatggagaa

SEQ ID NO: 4430985 - DNA, 25 bp, Homo sapien
tgcaggaggcagatatcagtggcta

SEQ ID NO: 4430986 - DNA, 25 bp, Homo sapien
tctgtctcgggccattatttcgtag

SEQ ID NO: 4430987 - DNA, 25 bp, Homo sapien
tttcgtagaaatgggctcatgaagt

SEQ ID NO: 4430988 - DNA, 25 bp, Homo sapien
agtacatgattcaacaacttttagt

SEQ ID NO: 4430989 - DNA, 25 bp, Homo sapien
aaccattaccacagtctagttttag

SEQ ID NO: 4430990 - DNA, 25 bp, Homo sapien
tggtggtttcaagggagagctctct

SEQ ID NO: 4430991 - DNA, 25 bp, Homo sapien
cctaaaggtgcatgcagagtgcgca

SEQ ID NO: 4430992 - DNA, 25 bp, Homo sapien
aaagagcacacgcaggttacaggca

SEQ ID NO: 4430993 - DNA, 25 bp, Homo sapien
ttttcagtcgattcacagggcaagg

SEQ ID NO: 4430994 - DNA, 25 bp, Homo sapien
catatgtctggcagtgtaactttat

SEQ ID NO: 4430995 - DNA, 25 bp, Homo sapien
tcttgtctcattgggaacattagtg

SEQ ID NO: 4430996 - DNA, 25 bp, Homo sapien
tagaacaatttgtgatatctttccc

SEQ ID NO: 4430997 - DNA, 25 bp, Homo sapien
gctaagtttgatgtgcattggcgca

SEQ ID NO: 4430998 - DNA, 25 bp, Homo sapien
attccattgattgagtgattgattg

SEQ ID NO: 4430999 - DNA, 25 bp, Homo sapien
catctagcaggtgtgaaattccatt

SEQ ID NO: 4431000 - DNA, 25 bp, Homo sapien
tgtgaatagttttgcattgcctgtc

SEQ ID NO: 4431001 - DNA, 25 bp, Homo sapien
gatcgccatcctatttcacatctag

SEQ ID NO: 4431002 - DNA, 25 bp, Homo sapien
cagttgctgaccactagtgatcctt

SEQ ID NO: 4431003 - DNA, 25 bp, Homo sapien
gcacacagttgctgaccactagtga

SEQ ID NO: 4431004 - DNA, 25 bp, Homo sapien
ttgcacacagttgctgaccactagt

SEQ ID NO: 4431005 - DNA, 25 bp, Homo sapien
tgaccactagtgatcctttgaggtt

SEQ ID NO: 4431006 - DNA, 25 bp, Homo sapien
gtaggagtccacaaggttctgggtg

SEQ ID NO: 4431007 - DNA, 25 bp, Homo sapien
gggtggtttccatttgccgctccag

SEQ ID NO: 4431008 - DNA, 25 bp, Homo sapien
tctgggtggtttccatttgccgctc

SEQ ID NO: 4431009 - DNA, 25 bp, Homo sapien
tccacaaggttctgggtggtttcca

SEQ ID NO: 4431010 - DNA, 25 bp, Homo sapien
catgatggtcttgggcatgacacca

SEQ ID NO: 4431011 - DNA, 25 bp, Homo sapien
tggtcttgggcatgacaccaaccat

SEQ ID NO: 4431012 - DNA, 25 bp, Homo sapien
tgatggtcttgggcatgacaccaac

SEQ ID NO: 4431013 - DNA, 25 bp, Homo sapien
gatggtcttgggcatgacaccaacc

SEQ ID NO: 4431014 - DNA, 25 bp, Homo sapien
tcagcgttttctggtccccacgtga

SEQ ID NO: 4431015 - DNA, 25 bp, Homo sapien
cgactcttccatcagcgttttctgg

SEQ ID NO: 4431016 - DNA, 25 bp, Homo sapien
gcgttttctggtccccacgtgagta

SEQ ID NO: 4431017 - DNA, 25 bp, Homo sapien
tctgccgactcttccatcagcgttt

SEQ ID NO: 4431018 - DNA, 25 bp, Homo sapien
gcccccatgtgcgtgctgatggtgg

SEQ ID NO: 4431019 - DNA, 25 bp, Homo sapien
cccccatgtgcgtgctgatggtggt

SEQ ID NO: 4431020 - DNA, 25 bp, Homo sapien
tgcatccggcaaggacgctctgcac

SEQ ID NO: 4431021 - DNA, 25 bp, Homo sapien
ctgcatccggcaaggacgctctgca

SEQ ID NO: 4431022 - DNA, 25 bp, Homo sapien
ctttggggccgtgggagccagcctt

SEQ ID NO: 4431023 - DNA, 25 bp, Homo sapien
gggccgtgggagccagccttggtac

SEQ ID NO: 4431024 - DNA, 25 bp, Homo sapien
tggggccgtgggagccagccttggt

SEQ ID NO: 4431025 - DNA, 25 bp, Homo sapien
gggctttggggccgtgggagccagc

SEQ ID NO: 4431026 - DNA, 25 bp, Homo sapien
cacacgctagcagctatgatggtac

SEQ ID NO: 4431027 - DNA, 25 bp, Homo sapien
tcacacgctagcagctatgatggta

SEQ ID NO: 4431028 - DNA, 25 bp, Homo sapien
cgtgtcttccaacccacttgtccag

SEQ ID NO: 4431029 - DNA, 25 bp, Homo sapien
gccttggggagcccaaaacaacagc

SEQ ID NO: 4431030 - DNA, 25 bp, Homo sapien
cgccttggggagcccaaaacaacag

SEQ ID NO: 4431031 - DNA, 25 bp, Homo sapien
gtccagggccacctctcgccttggg

SEQ ID NO: 4431032 - DNA, 25 bp, Homo sapien
gactgatgctcagcccctttgggct

SEQ ID NO: 4431033 - DNA, 25 bp, Homo sapien
ttaagactgatgctcagcccctttg

SEQ ID NO: 4431034 - DNA, 25 bp, Homo sapien
ttgggcttccctcttctctggtcac

SEQ ID NO: 4431035 - DNA, 25 bp, Homo sapien
taagactgatgctcagcccctttgg

SEQ ID NO: 4431036 - DNA, 25 bp, Homo sapien
tgggatggacttgcctgagccgatt

SEQ ID NO: 4431037 - DNA, 25 bp, Homo sapien
agaggaggaatctgtttagaggtca

SEQ ID NO: 4431038 - DNA, 25 bp, Homo sapien
ggaggaatctgtttagaggtcaaag

SEQ ID NO: 4431039 - DNA, 25 bp, Homo sapien
gaggaatctgtttagaggtcaaagg

SEQ ID NO: 4431040 - DNA, 25 bp, Homo sapien
caacaatagacgaagtcacagatga

SEQ ID NO: 4431041 - DNA, 25 bp, Homo sapien
gcaacaatagacgaagtcacagatg

SEQ ID NO: 4431042 - DNA, 25 bp, Homo sapien
aacaatagacgaagtcacagatgaa

SEQ ID NO: 4431043 - DNA, 25 bp, Homo sapien
cgcaacaatagacgaagtcacagat

SEQ ID NO: 4431044 - DNA, 25 bp, Homo sapien
gggcacaagttttcagcaacggtca

SEQ ID NO: 4431045 - DNA, 25 bp, Homo sapien
tttcagcaacggtcacacctggatg

SEQ ID NO: 4431046 - DNA, 25 bp, Homo sapien
caggggcataccacagaggggggca

SEQ ID NO: 4431047 - DNA, 25 bp, Homo sapien
ctagaacagggcaggggcataccac

SEQ ID NO: 4431048 - DNA, 25 bp, Homo sapien
tccaaaaggacagcacggtgactga

SEQ ID NO: 4431049 - DNA, 25 bp, Homo sapien
tcaggggttagctttctcttgtttg

SEQ ID NO: 4431050 - DNA, 25 bp, Homo sapien
gttagctttctcttgtttggccaca

SEQ ID NO: 4431051 - DNA, 25 bp, Homo sapien
gggttagctttctcttgtttggcca

SEQ ID NO: 4431052 - DNA, 25 bp, Homo sapien
gtgtaaggttttgtatattccagag

SEQ ID NO: 4431053 - DNA, 25 bp, Homo sapien
aggttttgtatattccagagggtag

SEQ ID NO: 4431054 - DNA, 25 bp, Homo sapien
tgtaaggttttgtatattccagagg

SEQ ID NO: 4431055 - DNA, 25 bp, Homo sapien
tgtgtaaggttttgtatattccaga

SEQ ID NO: 4431056 - DNA, 25 bp, Homo sapien
gactatgtgaatgtatcatcctgtc

SEQ ID NO: 4431057 - DNA, 25 bp, Homo sapien
tgtgaatgtatcatcctgtcaaaaa

SEQ ID NO: 4431058 - DNA, 25 bp, Homo sapien
aaagaggaaacgcgtgcatgtgtgt

SEQ ID NO: 4431059 - DNA, 25 bp, Homo sapien
tatgtgaatgtatcatcctgtcaaa

SEQ ID NO: 4431060 - DNA, 25 bp, Homo sapien
cacaactggtcatggtcgggaggtc

SEQ ID NO: 4431061 - DNA, 25 bp, Homo sapien
tttcagtatcaagggtatgcagggc

SEQ ID NO: 4431062 - DNA, 25 bp, Homo sapien
tctcattggcattctgtgggtagag

SEQ ID NO: 4431063 - DNA, 25 bp, Homo sapien
gcctcctatgggacgtttggaaata

SEQ ID NO: 4431064 - DNA, 25 bp, Homo sapien
gccaggagttcttaaggcttagacc

SEQ ID NO: 4431065 - DNA, 25 bp, Homo sapien
ccagattgactatgggatgggcctg

SEQ ID NO: 4431066 - DNA, 25 bp, Homo sapien
tgagacggcttctttacccacaggt

SEQ ID NO: 4431067 - DNA, 25 bp, Homo sapien
ctgcagtggaatgtctgagacggct

SEQ ID NO: 4431068 - DNA, 25 bp, Homo sapien
gtgctgttgtcttctaaccagtcgt

SEQ ID NO: 4431069 - DNA, 25 bp, Homo sapien
ctaaccagtcgtggtggcgaagcct

SEQ ID NO: 4431070 - DNA, 25 bp, Homo sapien
gtttcacttgtttatgcatgacttt

SEQ ID NO: 4431071 - DNA, 25 bp, Homo sapien
atgccatcctgagtttcacttgttt

SEQ ID NO: 4431072 - DNA, 25 bp, Homo sapien
tactttgcgagccttcttcctgtct

SEQ ID NO: 4431073 - DNA, 25 bp, Homo sapien
atattttatattactttgcgagcct

SEQ ID NO: 4431074 - DNA, 25 bp, Homo sapien
tattactttgcgagccttcttcctg

SEQ ID NO: 4431075 - DNA, 25 bp, Homo sapien
ttatattactttgcgagccttcttc

SEQ ID NO: 4431076 - DNA, 25 bp, Homo sapien
tatacttgaatgaggcccagagcag

SEQ ID NO: 4431077 - DNA, 25 bp, Homo sapien
acttttggaggccagataatggcat

SEQ ID NO: 4431078 - DNA, 25 bp, Homo sapien
aactgcacgcttcgcctctcaggtt

SEQ ID NO: 4431079 - DNA, 25 bp, Homo sapien
aattgctaaacattaggtggcagta

SEQ ID NO: 4431080 - DNA, 25 bp, Homo sapien
cagtaaatatcaaatgaaggtgtga

SEQ ID NO: 4431081 - DNA, 25 bp, Homo sapien
tcaagtaccaagtaggaacatacct

SEQ ID NO: 4431082 - DNA, 25 bp, Homo sapien
aataaacagccatttggaatggttc

SEQ ID NO: 4431083 - DNA, 25 bp, Homo sapien
tttactagttaatttgcagtgctct

SEQ ID NO: 4431084 - DNA, 25 bp, Homo sapien
agaggccttgccggaccggcgccca

SEQ ID NO: 4431085 - DNA, 25 bp, Homo sapien
tcggcatcggcgaagaggccttgcc

SEQ ID NO: 4431086 - DNA, 25 bp, Homo sapien
tctcggcatcggcgaagaggccttg

SEQ ID NO: 4431087 - DNA, 25 bp, Homo sapien
aggccttgccggaccggcgcccagc

SEQ ID NO: 4431088 - DNA, 25 bp, Homo sapien
acacagcggccttgggtttgggctc

SEQ ID NO: 4431089 - DNA, 25 bp, Homo sapien
cacagcggccttgggtttgggctcc

SEQ ID NO: 4431090 - DNA, 25 bp, Homo sapien
ggacacagcggccttgggtttgggc

SEQ ID NO: 4431091 - DNA, 25 bp, Homo sapien
cggggacacagcggccttgggtttg

SEQ ID NO: 4431092 - DNA, 25 bp, Homo sapien
ccgcgcgcgcctgccagagcagcgc

SEQ ID NO: 4431093 - DNA, 25 bp, Homo sapien
ggtagcgctccagctgcccgcaaag

SEQ ID NO: 4431094 - DNA, 25 bp, Homo sapien
cgcccacgtccagctgcggggagca

SEQ ID NO: 4431095 - DNA, 25 bp, Homo sapien
ctgcggggagcagcgttccagaggc

SEQ ID NO: 4431096 - DNA, 25 bp, Homo sapien
cctttagccgcgaaaacagcgtggc

SEQ ID NO: 4431097 - DNA, 25 bp, Homo sapien
ggcctttagccgcgaaaacagcgtg

SEQ ID NO: 4431098 - DNA, 25 bp, Homo sapien
agccgcgcggcctttagccgcgaaa

SEQ ID NO: 4431099 - DNA, 25 bp, Homo sapien
gcgcggcctttagccgcgaaaacag

SEQ ID NO: 4431100 - DNA, 25 bp, Homo sapien
ggcgcgcagggcccgctctcgaaac

SEQ ID NO: 4431101 - DNA, 25 bp, Homo sapien
aggcgcgcagggcccgctctcgaaa

SEQ ID NO: 4431102 - DNA, 25 bp, Homo sapien
caggcgcgcagggcccgctctcgaa

SEQ ID NO: 4431103 - DNA, 25 bp, Homo sapien
tcaggcgcgcagggcccgctctcga

SEQ ID NO: 4431104 - DNA, 25 bp, Homo sapien
gctcaagtcagacagtgtaatacat

SEQ ID NO: 4431105 - DNA, 25 bp, Homo sapien
tattattactgtagtcattcagcac

SEQ ID NO: 4431106 - DNA, 25 bp, Homo sapien
attatgatatatccatggcagaata

SEQ ID NO: 4431107 - DNA, 25 bp, Homo sapien
ataaagctcaagtcagacagtgtaa

SEQ ID NO: 4431108 - DNA, 25 bp, Homo sapien
taaagttgcaacttctcgcatagcc

SEQ ID NO: 4431109 - DNA, 25 bp, Homo sapien
tcattaatgctaccatggtgttggc

SEQ ID NO: 4431110 - DNA, 25 bp, Homo sapien
aatgctaccatggtgttggcttttc

SEQ ID NO: 4431111 - DNA, 25 bp, Homo sapien
aacttctcgcatagccctaaatggc

SEQ ID NO: 4431112 - DNA, 25 bp, Homo sapien
cagcagtcccttactgcatatgaat

SEQ ID NO: 4431113 - DNA, 25 bp, Homo sapien
tcattcagcagtcccttactgcata

SEQ ID NO: 4431114 - DNA, 25 bp, Homo sapien
ttcagcagtcccttactgcatatga

SEQ ID NO: 4431115 - DNA, 25 bp, Homo sapien
cagtcccttactgcatatgaataag

SEQ ID NO: 4431116 - DNA, 25 bp, Homo sapien
gacgtaggacctacgtcatcctcat

SEQ ID NO: 4431117 - DNA, 25 bp, Homo sapien
caactatcctggagacgtaggacct

SEQ ID NO: 4431118 - DNA, 25 bp, Homo sapien
tatcctggagacgtaggacctacgt

SEQ ID NO: 4431119 - DNA, 25 bp, Homo sapien
gggcaactatcctggagacgtagga

SEQ ID NO: 4431120 - DNA, 25 bp, Homo sapien
ccaacctgggaattgctgtggccca

SEQ ID NO: 4431121 - DNA, 25 bp, Homo sapien
tccaacctgggaattgctgtggccc

SEQ ID NO: 4431122 - DNA, 25 bp, Homo sapien
agaagatagtgttagaataagtgaa

SEQ ID NO: 4431123 - DNA, 25 bp, Homo sapien
gaagatagtgttagaataagtgaag

SEQ ID NO: 4431124 - DNA, 25 bp, Homo sapien
tagaagatagtgttagaataagtga

SEQ ID NO: 4431125 - DNA, 25 bp, Homo sapien
aagatagtgttagaataagtgaaga

SEQ ID NO: 4431126 - DNA, 25 bp, Homo sapien
aagctgtactgaaaacattgctgga

SEQ ID NO: 4431127 - DNA, 25 bp, Homo sapien
taaagctgtactgaaaacattgctg

SEQ ID NO: 4431128 - DNA, 25 bp, Homo sapien
tgtactgaaaacattgctggattga

SEQ ID NO: 4431129 - DNA, 25 bp, Homo sapien
gctgtactgaaaacattgctggatt

SEQ ID NO: 4431130 - DNA, 25 bp, Homo sapien
aattgcatttctaattcatctacaa

SEQ ID NO: 4431131 - DNA, 25 bp, Homo sapien
tgcatttctaattcatctacaacat

SEQ ID NO: 4431132 - DNA, 25 bp, Homo sapien
ttgcatttctaattcatctacaaca

SEQ ID NO: 4431133 - DNA, 25 bp, Homo sapien
taaaattgcatttctaattcatcta

SEQ ID NO: 4431134 - DNA, 25 bp, Homo sapien
ccaactgtgtagtaagcagtatttc

SEQ ID NO: 4431135 - DNA, 25 bp, Homo sapien
caactgtgtagtaagcagtatttct

SEQ ID NO: 4431136 - DNA, 25 bp, Homo sapien
aactgtgtagtaagcagtatttctt

SEQ ID NO: 4431137 - DNA, 25 bp, Homo sapien
gataatatggtctgtatttccttaa

SEQ ID NO: 4431138 - DNA, 25 bp, Homo sapien
tttcagatgttacagtttacaaaaa

SEQ ID NO: 4431139 - DNA, 25 bp, Homo sapien
aattgataatatggtctgtatttcc

SEQ ID NO: 4431140 - DNA, 25 bp, Homo sapien
cagatgttacagtttacaaaaagta

SEQ ID NO: 4431141 - DNA, 25 bp, Homo sapien
aaattgcaaagaccactattctccc

SEQ ID NO: 4431142 - DNA, 25 bp, Homo sapien
tgcaaagaccactattctccccaaa

SEQ ID NO: 4431143 - DNA, 25 bp, Homo sapien
gttttgaacttgattctaaatttca

SEQ ID NO: 4431144 - DNA, 25 bp, Homo sapien
caaagaccactattctccccaaagt

SEQ ID NO: 4431145 - DNA, 25 bp, Homo sapien
atggatcgtaatagacaacttcatc

SEQ ID NO: 4431146 - DNA, 25 bp, Homo sapien
caatgactaagttcctctggacttt

SEQ ID NO: 4431147 - DNA, 25 bp, Homo sapien
tgactaagttcctctggactttcac

SEQ ID NO: 4431148 - DNA, 25 bp, Homo sapien
aatgactaagttcctctggactttc

SEQ ID NO: 4431149 - DNA, 25 bp, Homo sapien
tcaatgactaagttcctctggactt

SEQ ID NO: 4431150 - DNA, 25 bp, Homo sapien
tcttttgacacagactgctccgttt

SEQ ID NO: 4431151 - DNA, 25 bp, Homo sapien
cagactgctccgtttaacagactcc

SEQ ID NO: 4431152 - DNA, 25 bp, Homo sapien
gactgctccgtttaacagactccag

SEQ ID NO: 4431153 - DNA, 25 bp, Homo sapien
gacacagactgctccgtttaacaga

SEQ ID NO: 4431154 - DNA, 25 bp, Homo sapien
taagtagacgtgtgatgcaaatttc

SEQ ID NO: 4431155 - DNA, 25 bp, Homo sapien
gattcagaagatcaatgacaggagt

SEQ ID NO: 4431156 - DNA, 25 bp, Homo sapien
taagttcgccggaaagattcagaag

SEQ ID NO: 4431157 - DNA, 25 bp, Homo sapien
tgtgagtaggaacgtataatgaccc

SEQ ID NO: 4431158 - DNA, 25 bp, Homo sapien
catgttatgttaagttgaccagaca

SEQ ID NO: 4431159 - DNA, 25 bp, Homo sapien
ggcctttggtttatgcaatgcagtc

SEQ ID NO: 4431160 - DNA, 25 bp, Homo sapien
catgcagtctaagtgaaacccataa

SEQ ID NO: 4431161 - DNA, 25 bp, Homo sapien
ccagtaatttgaaaggtcacctctc

SEQ ID NO: 4431162 - DNA, 25 bp, Homo sapien
cacaggtgagcaagataatcagtga

SEQ ID NO: 4431163 - DNA, 25 bp, Homo sapien
ctcgggatggaaagttatgaagtct

SEQ ID NO: 4431164 - DNA, 25 bp, Homo sapien
agagagaagtaaaagcatgctagga

SEQ ID NO: 4431165 - DNA, 25 bp, Homo sapien
taaaatctgaaataactcgggatgg

SEQ ID NO: 4431166 - DNA, 25 bp, Homo sapien
ggttgcttagtgtccttgaccatca

SEQ ID NO: 4431167 - DNA, 25 bp, Homo sapien
tccttcgttgtgtaagattgatcca

SEQ ID NO: 4431168 - DNA, 25 bp, Homo sapien
tttctcaacagggtaccattggcat

SEQ ID NO: 4431169 - DNA, 25 bp, Homo sapien
gatccacacattgcaggttgcttag

SEQ ID NO: 4431170 - DNA, 25 bp, Homo sapien
taatattgtttaaccagccaaagtg

SEQ ID NO: 4431171 - DNA, 25 bp, Homo sapien
aatattgtttaaccagccaaagtgc

SEQ ID NO: 4431172 - DNA, 25 bp, Homo sapien
gctcctttccctggctgccgagctc

SEQ ID NO: 4431173 - DNA, 25 bp, Homo sapien
ctttccctggctgccgagctcccag

SEQ ID NO: 4431174 - DNA, 25 bp, Homo sapien
ctggctgccgagctcccagtatatc

SEQ ID NO: 4431175 - DNA, 25 bp, Homo sapien
tgccgagctcccagtatatctccat

SEQ ID NO: 4431176 - DNA, 25 bp, Homo sapien
ctttgatgccaatccatcttgaatc

SEQ ID NO: 4431177 - DNA, 25 bp, Homo sapien
tgtaaagggcttccatggatcctac

SEQ ID NO: 4431178 - DNA, 25 bp, Homo sapien
ctggaagctttgtaaaattgggtca

SEQ ID NO: 4431179 - DNA, 25 bp, Homo sapien
catggatcctaccattctctaatat

SEQ ID NO: 4431180 - DNA, 25 bp, Homo sapien
actctctgggatactgatatcttca

SEQ ID NO: 4431181 - DNA, 25 bp, Homo sapien
ttcttcactctctgggatactgata

SEQ ID NO: 4431182 - DNA, 25 bp, Homo sapien
cctgttcttcactctctgggatact

SEQ ID NO: 4431183 - DNA, 25 bp, Homo sapien
tgaaccatcctcttcatgctcctgt

SEQ ID NO: 4431184 - DNA, 25 bp, Homo sapien
tcctcctctaaatcttctaggtcct

SEQ ID NO: 4431185 - DNA, 25 bp, Homo sapien
cctcctctaaatcttctaggtcctc

SEQ ID NO: 4431186 - DNA, 25 bp, Homo sapien
cctcctcctctaaatcttctaggtc

SEQ ID NO: 4431187 - DNA, 25 bp, Homo sapien
ctcctcctcctctaaatcttctagg

SEQ ID NO: 4431188 - DNA, 25 bp, Homo sapien
ggcttttcgtcggatcgaatttgct

SEQ ID NO: 4431189 - DNA, 25 bp, Homo sapien
tcgtcggatcgaatttgcttgagtt

SEQ ID NO: 4431190 - DNA, 25 bp, Homo sapien
agaactgggcttttcgtcggatcga

SEQ ID NO: 4431191 - DNA, 25 bp, Homo sapien
aactgggcttttcgtcggatcgaat

SEQ ID NO: 4431192 - DNA, 25 bp, Homo sapien
ggaagaatttctcatctgctatgga

SEQ ID NO: 4431193 - DNA, 25 bp, Homo sapien
tctcatctgctatggacttttctct

SEQ ID NO: 4431194 - DNA, 25 bp, Homo sapien
gagagttggaagaatttctcatctg

SEQ ID NO: 4431195 - DNA, 25 bp, Homo sapien
ttctcatctgctatggacttttctc

SEQ ID NO: 4431196 - DNA, 25 bp, Homo sapien
gtatcttctacgtcatcatcattac

SEQ ID NO: 4431197 - DNA, 25 bp, Homo sapien
cttctaaacagtgccccttcatctt

SEQ ID NO: 4431198 - DNA, 25 bp, Homo sapien
tttacttctaaacagtgccccttca

SEQ ID NO: 4431199 - DNA, 25 bp, Homo sapien
aaaatcagtatcttctacgtcatca

SEQ ID NO: 4431200 - DNA, 25 bp, Homo sapien
tcatcatctggcaaagtgaaggtca

SEQ ID NO: 4431201 - DNA, 25 bp, Homo sapien
tggcaaagtgaaggtcactcttttc

SEQ ID NO: 4431202 - DNA, 25 bp, Homo sapien
caattgcctcatcatctggcaaagt

SEQ ID NO: 4431203 - DNA, 25 bp, Homo sapien
aaacacctgcatcttcaattgcctc

SEQ ID NO: 4431204 - DNA, 25 bp, Homo sapien
gcggcatcctccggagcagtcaaaa

SEQ ID NO: 4431205 - DNA, 25 bp, Homo sapien
taggcggcatcctccggagcagtca

SEQ ID NO: 4431206 - DNA, 25 bp, Homo sapien
ggcatcctccggagcagtcaaaaca

SEQ ID NO: 4431207 - DNA, 25 bp, Homo sapien
gcatcctccggagcagtcaaaacag

SEQ ID NO: 4431208 - DNA, 25 bp, Homo sapien
ccagacgcaaccaaggcttttttat

SEQ ID NO: 4431209 - DNA, 25 bp, Homo sapien
cttcccccagacgcaaccaaggctt

SEQ ID NO: 4431210 - DNA, 25 bp, Homo sapien
cagacgcaaccaaggcttttttata

SEQ ID NO: 4431211 - DNA, 25 bp, Homo sapien
agggtctcctccagcaggctattct

SEQ ID NO: 4431212 - DNA, 25 bp, Homo sapien
catggtcaaagtgcagggtctcctc

SEQ ID NO: 4431213 - DNA, 25 bp, Homo sapien
acagcatggtcaaagtgcagggtct

SEQ ID NO: 4431214 - DNA, 25 bp, Homo sapien
gtctcctccagcaggctattctctg

SEQ ID NO: 4431215 - DNA, 25 bp, Homo sapien
ttttcctgtgtttaatgatatcttc

SEQ ID NO: 4431216 - DNA, 25 bp, Homo sapien
aaggtatttcctctgtaatcacagg

SEQ ID NO: 4431217 - DNA, 25 bp, Homo sapien
gttgaaaggtatttcctctgtaatc

SEQ ID NO: 4431218 - DNA, 25 bp, Homo sapien
ttcctgtgtttaatgatatcttcca

SEQ ID NO: 4431219 - DNA, 25 bp, Homo sapien
tgacaaatggtaaaagctgctagtt

SEQ ID NO: 4431220 - DNA, 25 bp, Homo sapien
ctggaatgtgatactggtagaggcc

SEQ ID NO: 4431221 - DNA, 25 bp, Homo sapien
gccatttgcaatggacccagcattt

SEQ ID NO: 4431222 - DNA, 25 bp, Homo sapien
cccatggtggtagggccttagatgt

SEQ ID NO: 4431223 - DNA, 25 bp, Homo sapien
gttcctgtacagttccagactcaga

SEQ ID NO: 4431224 - DNA, 25 bp, Homo sapien
tctcctttgttaatttctcgatgta

SEQ ID NO: 4431225 - DNA, 25 bp, Homo sapien
cctctcctttgttaatttctcgatg

SEQ ID NO: 4431226 - DNA, 25 bp, Homo sapien
agttccagactcagagcgtccctct

SEQ ID NO: 4431227 - DNA, 25 bp, Homo sapien
ctcccattccaccttcccccatcct

SEQ ID NO: 4431228 - DNA, 25 bp, Homo sapien
tcccattccaccttcccccatccta

SEQ ID NO: 4431229 - DNA, 25 bp, Homo sapien
cagaacggtggcattggaaaggacc

SEQ ID NO: 4431230 - DNA, 25 bp, Homo sapien
gcacacatgaaaacctgtagaagcc

SEQ ID NO: 4431231 - DNA, 25 bp, Homo sapien
aaacctgtagaagcctctcaccatg

SEQ ID NO: 4431232 - DNA, 25 bp, Homo sapien
accctctactttcaccacacaacca

SEQ ID NO: 4431233 - DNA, 25 bp, Homo sapien
ttttcagattctacaagtcgaagtt

SEQ ID NO: 4431234 - DNA, 25 bp, Homo sapien
ctccttcaactcctcatcggttatg

SEQ ID NO: 4431235 - DNA, 25 bp, Homo sapien
cagattctacaagtcgaagtttttc

SEQ ID NO: 4431236 - DNA, 25 bp, Homo sapien
cagacttttcagattctacaagtcg

SEQ ID NO: 4431237 - DNA, 25 bp, Homo sapien
gcaggagctgggccctttccagctt

SEQ ID NO: 4431238 - DNA, 25 bp, Homo sapien
cagcaggagctgggccctttccagc

SEQ ID NO: 4431239 - DNA, 25 bp, Homo sapien
ggagctgggccctttccagcttcct

SEQ ID NO: 4431240 - DNA, 25 bp, Homo sapien
aggagctgggccctttccagcttcc

SEQ ID NO: 4431241 - DNA, 25 bp, Homo sapien
tccctagaccatggccccagccgga

SEQ ID NO: 4431242 - DNA, 25 bp, Homo sapien
accatggccccagccggatggggct

SEQ ID NO: 4431243 - DNA, 25 bp, Homo sapien
ggctcccacaacccccggggctgca

SEQ ID NO: 4431244 - DNA, 25 bp, Homo sapien
atgatccctagaccatggccccagc

SEQ ID NO: 4431245 - DNA, 25 bp, Homo sapien
tgctgacacactctgtagctcctta

SEQ ID NO: 4431246 - DNA, 25 bp, Homo sapien
ctctgtagctccttacccaggcggt

SEQ ID NO: 4431247 - DNA, 25 bp, Homo sapien
tgtagctccttacccaggcggtcag

SEQ ID NO: 4431248 - DNA, 25 bp, Homo sapien
tggagctttgctgacacactctgta

SEQ ID NO: 4431249 - DNA, 25 bp, Homo sapien
ataggcgtcagggtaggtagtcgct

SEQ ID NO: 4431250 - DNA, 25 bp, Homo sapien
cgtcagggtaggtagtcgctggctt

SEQ ID NO: 4431251 - DNA, 25 bp, Homo sapien
tgcaggataggcgtcagggtaggta

SEQ ID NO: 4431252 - DNA, 25 bp, Homo sapien
cagggtaggtagtcgctggcttcca

SEQ ID NO: 4431253 - DNA, 25 bp, Homo sapien
aggtgaccccggtagtggtcttgct

SEQ ID NO: 4431254 - DNA, 25 bp, Homo sapien
tgcaggtgaccccggtagtggtctt

SEQ ID NO: 4431255 - DNA, 25 bp, Homo sapien
gtgaccccggtagtggtcttgctgc

SEQ ID NO: 4431256 - DNA, 25 bp, Homo sapien
caggtgaccccggtagtggtcttgc

SEQ ID NO: 4431257 - DNA, 25 bp, Homo sapien
gcagctgggcagtgcctccttccca

SEQ ID NO: 4431258 - DNA, 25 bp, Homo sapien
cgcttcgccctgagcttcctgctgc

SEQ ID NO: 4431259 - DNA, 25 bp, Homo sapien
tgggcagtgcctccttcccagaggc

SEQ ID NO: 4431260 - DNA, 25 bp, Homo sapien
gctgctgcagctgggcagtgcctcc

SEQ ID NO: 4431261 - DNA, 25 bp, Homo sapien
gtctcctgcaactattggtgggcca

SEQ ID NO: 4431262 - DNA, 25 bp, Homo sapien
tgcaactattggtgggccatctcag

SEQ ID NO: 4431263 - DNA, 25 bp, Homo sapien
tcctgcaactattggtgggccatct

SEQ ID NO: 4431264 - DNA, 25 bp, Homo sapien
gggtctcctgcaactattggtgggc

SEQ ID NO: 4431265 - DNA, 25 bp, Homo sapien
tgtcatctgcttggtagatggcagc

SEQ ID NO: 4431266 - DNA, 25 bp, Homo sapien
gtttattatatttgtgttcttgtca

SEQ ID NO: 4431267 - DNA, 25 bp, Homo sapien
atctgcttggtagatggcagcttcc

SEQ ID NO: 4431268 - DNA, 25 bp, Homo sapien
tatttgtgttcttgtcatctgcttg

SEQ ID NO: 4431269 - DNA, 25 bp, Homo sapien
tcttcactagccgatgcatctgtgc

SEQ ID NO: 4431270 - DNA, 25 bp, Homo sapien
cttcactagccgatgcatctgtgcc

SEQ ID NO: 4431271 - DNA, 25 bp, Homo sapien
ggcagaacggattgcagatttgcat

SEQ ID NO: 4431272 - DNA, 25 bp, Homo sapien
ctggcagaacggattgcagatttgc

SEQ ID NO: 4431273 - DNA, 25 bp, Homo sapien
tggcagaacggattgcagatttgca

SEQ ID NO: 4431274 - DNA, 25 bp, Homo sapien
gcttcaccccggcttctaggtggca

SEQ ID NO: 4431275 - DNA, 25 bp, Homo sapien
ccgggtgtggtgggccgcgcaggta

SEQ ID NO: 4431276 - DNA, 25 bp, Homo sapien
ctgcgcccgacggaaacccagaacg

SEQ ID NO: 4431277 - DNA, 25 bp, Homo sapien
aggctggtctccgacctcgggtgat

SEQ ID NO: 4431278 - DNA, 25 bp, Homo sapien
gagagaagggatcttggaggcacag

SEQ ID NO: 4431279 - DNA, 25 bp, Homo sapien
aagccataagcaataacatgggttg

SEQ ID NO: 4431280 - DNA, 25 bp, Homo sapien
caataacatgggttgccaaaaagag

SEQ ID NO: 4431281 - DNA, 25 bp, Homo sapien
gcctacagcgtccagcacccagtag

SEQ ID NO: 4431282 - DNA, 25 bp, Homo sapien
tcttattgggctccgtgtgcttgat

SEQ ID NO: 4431283 - DNA, 25 bp, Homo sapien
taaagtgacatggagacatgccact

SEQ ID NO: 4431284 - DNA, 25 bp, Homo sapien
ccttgtaaccttgtaggcagacact

SEQ ID NO: 4431285 - DNA, 25 bp, Homo sapien
tgcttgatgcttaaagtgacatgga

SEQ ID NO: 4431286 - DNA, 25 bp, Homo sapien
gcaagttctagaaactcgttactca

SEQ ID NO: 4431287 - DNA, 25 bp, Homo sapien
tatagtggctatagtttcagttctc

SEQ ID NO: 4431288 - DNA, 25 bp, Homo sapien
aatagagcggttgtttccataagcc

SEQ ID NO: 4431289 - DNA, 25 bp, Homo sapien
tgtttcccttcgttgtgatcaccca

SEQ ID NO: 4431290 - DNA, 25 bp, Homo sapien
atgctgacggtagacagggacttgt

SEQ ID NO: 4431291 - DNA, 25 bp, Homo sapien
acattgttacccatgacccaaccac

SEQ ID NO: 4431292 - DNA, 25 bp, Homo sapien
gaaatgctgacggtagacagggact

SEQ ID NO: 4431293 - DNA, 25 bp, Homo sapien
ttcctttaaggttgcagagtctcag

SEQ ID NO: 4431294 - DNA, 25 bp, Homo sapien
aaacggcatttgagtattcttcaca

SEQ ID NO: 4431295 - DNA, 25 bp, Homo sapien
gagaacatgcaagcgtgaacatact

SEQ ID NO: 4431296 - DNA, 25 bp, Homo sapien
aacatacttgttagggatataggac

SEQ ID NO: 4431297 - DNA, 25 bp, Homo sapien
gtttttcctctgacgacggcactga

SEQ ID NO: 4431298 - DNA, 25 bp, Homo sapien
cgatgactggttttattgagtaggc

SEQ ID NO: 4431299 - DNA, 25 bp, Homo sapien
catttctttgcacgatgactggttt

SEQ ID NO: 4431300 - DNA, 25 bp, Homo sapien
gcacgatgactggttttattgagta

SEQ ID NO: 4431301 - DNA, 25 bp, Homo sapien
ctttgcacgatgactggttttattg

SEQ ID NO: 4431302 - DNA, 25 bp, Homo sapien
ttcttccgtcaacaagtccattttc

SEQ ID NO: 4431303 - DNA, 25 bp, Homo sapien
cattcctacttttcttccgtcaaca

SEQ ID NO: 4431304 - DNA, 25 bp, Homo sapien
tacttttcttccgtcaacaagtcca

SEQ ID NO: 4431305 - DNA, 25 bp, Homo sapien
cagcgagggcacaatgcgcctttcc

SEQ ID NO: 4431306 - DNA, 25 bp, Homo sapien
acagcgagggcacaatgcgcctttc

SEQ ID NO: 4431307 - DNA, 25 bp, Homo sapien
tgagatgctatgcagagagaaaggc

SEQ ID NO: 4431308 - DNA, 25 bp, Homo sapien
ataagaattggctaccttcttggag

SEQ ID NO: 4431309 - DNA, 25 bp, Homo sapien
atgaagagatccgagaggatgagat

SEQ ID NO: 4431310 - DNA, 25 bp, Homo sapien
ggccacatcaagaatcaccaaggca

SEQ ID NO: 4431311 - DNA, 25 bp, Homo sapien
gaatcagcatacattccccttaaag

SEQ ID NO: 4431312 - DNA, 25 bp, Homo sapien
gattgcaacaggagataagatagag

SEQ ID NO: 4431313 - DNA, 25 bp, Homo sapien
gctatcagttgacaagtcttggcca

SEQ ID NO: 4431314 - DNA, 25 bp, Homo sapien
gaatggagtagtcatccagccatca

SEQ ID NO: 4431315 - DNA, 25 bp, Homo sapien
gcagccaatttgttgtgttgagttt

SEQ ID NO: 4431316 - DNA, 25 bp, Homo sapien
tgcagccaatttgttgtgttgagtt

SEQ ID NO: 4431317 - DNA, 25 bp, Homo sapien
agagcccacggagatcaagcttggg

SEQ ID NO: 4431318 - DNA, 25 bp, Homo sapien
gcccaaagagcccacggagatcaag

SEQ ID NO: 4431319 - DNA, 25 bp, Homo sapien
gcccagtaatggagcgggaagcccc

SEQ ID NO: 4431320 - DNA, 25 bp, Homo sapien
tcacccaaggatgactggcgagggt

SEQ ID NO: 4431321 - DNA, 25 bp, Homo sapien
atattcatgagaaccgtcagcccct

SEQ ID NO: 4431322 - DNA, 25 bp, Homo sapien
gaagagcagtaatattcatgagaac

SEQ ID NO: 4431323 - DNA, 25 bp, Homo sapien
ggaaagaagagcagtaatattcatg

SEQ ID NO: 4431324 - DNA, 25 bp, Homo sapien
ttggaaagaagagcagtaatattca

SEQ ID NO: 4431325 - DNA, 25 bp, Homo sapien
caggtggctggcaaccaccggaagt

SEQ ID NO: 4431326 - DNA, 25 bp, Homo sapien
ccaggtggctggcaaccaccggaag

SEQ ID NO: 4431327 - DNA, 25 bp, Homo sapien
ttctgttcactcctgctggaactct

SEQ ID NO: 4431328 - DNA, 25 bp, Homo sapien
ggaactctaggtctgtttttctgcc

SEQ ID NO: 4431329 - DNA, 25 bp, Homo sapien
ttcttaaccagtacccagcagtcca

SEQ ID NO: 4431330 - DNA, 25 bp, Homo sapien
cagcagtccatccacaatcttaaga

SEQ ID NO: 4431331 - DNA, 25 bp, Homo sapien
agaagcctggtcagccaagactcac

SEQ ID NO: 4431332 - DNA, 25 bp, Homo sapien
cacccggctaaagccagaattctta

SEQ ID NO: 4431333 - DNA, 25 bp, Homo sapien
gatgtagggccttccctgtggaaac

SEQ ID NO: 4431334 - DNA, 25 bp, Homo sapien
atgatgtagggccttccctgtggaa

SEQ ID NO: 4431335 - DNA, 25 bp, Homo sapien
agatgatgtagggccttccctgtgg

SEQ ID NO: 4431336 - DNA, 25 bp, Homo sapien
ggccttccctgtggaaacctgttgc

SEQ ID NO: 4431337 - DNA, 25 bp, Homo sapien
agggttgacccgaagggtcactgca

SEQ ID NO: 4431338 - DNA, 25 bp, Homo sapien
gggttgacccgaagggtcactgcac

SEQ ID NO: 4431339 - DNA, 25 bp, Homo sapien
ggttgacccgaagggtcactgcacc

SEQ ID NO: 4431340 - DNA, 25 bp, Homo sapien
gagggttgacccgaagggtcactgc

SEQ ID NO: 4431341 - DNA, 25 bp, Homo sapien
cagtcgactgatttttacggacgtt

SEQ ID NO: 4431342 - DNA, 25 bp, Homo sapien
gtcgactgatttttacggacgttga

SEQ ID NO: 4431343 - DNA, 25 bp, Homo sapien
ttcagtcgactgatttttacggacg

SEQ ID NO: 4431344 - DNA, 25 bp, Homo sapien
cgactgatttttacggacgttgaat

SEQ ID NO: 4431345 - DNA, 25 bp, Homo sapien
tcttccagctgatgttccacttgtt

SEQ ID NO: 4431346 - DNA, 25 bp, Homo sapien
ttcttccagctgatgttccacttgt

SEQ ID NO: 4431347 - DNA, 25 bp, Homo sapien
cttccagctgatgttccacttgttt

SEQ ID NO: 4431348 - DNA, 25 bp, Homo sapien
ttccagctgatgttccacttgtttc

SEQ ID NO: 4431349 - DNA, 25 bp, Homo sapien
agaatgccaccaatgccccaggaca

SEQ ID NO: 4431350 - DNA, 25 bp, Homo sapien
aatgccaccaatgccccaggacagg

SEQ ID NO: 4431351 - DNA, 25 bp, Homo sapien
gaatgccaccaatgccccaggacag

SEQ ID NO: 4431352 - DNA, 25 bp, Homo sapien
cagaatgccaccaatgccccaggac

SEQ ID NO: 4431353 - DNA, 25 bp, Homo sapien
tctagctccctttcggctttctgtc

SEQ ID NO: 4431354 - DNA, 25 bp, Homo sapien
tttcggctttctgtctctcgttgtt

SEQ ID NO: 4431355 - DNA, 25 bp, Homo sapien
cggctttctgtctctcgttgtttgc

SEQ ID NO: 4431356 - DNA, 25 bp, Homo sapien
ctctagctccctttcggctttctgt

SEQ ID NO: 4431357 - DNA, 25 bp, Homo sapien
cctctttctgtatgatcaatgtctg

SEQ ID NO: 4431358 - DNA, 25 bp, Homo sapien
ttcctctttctgtatgatcaatgtc

SEQ ID NO: 4431359 - DNA, 25 bp, Homo sapien
gtatttagttcctctttctgtatga

SEQ ID NO: 4431360 - DNA, 25 bp, Homo sapien
tagttcctctttctgtatgatcaat

SEQ ID NO: 4431361 - DNA, 25 bp, Homo sapien
agttgagatggggcccaaaggactc

SEQ ID NO: 4431362 - DNA, 25 bp, Homo sapien
tgagatggggcccaaaggactcccc

SEQ ID NO: 4431363 - DNA, 25 bp, Homo sapien
gagagagttgagatggggcccaaag

SEQ ID NO: 4431364 - DNA, 25 bp, Homo sapien
atgagagagttgagatggggcccaa

SEQ ID NO: 4431365 - DNA, 25 bp, Homo sapien
atgttgcaggcggacagccaggtcc

SEQ ID NO: 4431366 - DNA, 25 bp, Homo sapien
gttgcaggcggacagccaggtcctt

SEQ ID NO: 4431367 - DNA, 25 bp, Homo sapien
aatgttgcaggcggacagccaggtc

SEQ ID NO: 4431368 - DNA, 25 bp, Homo sapien
tgaatgttgcaggcggacagccagg

SEQ ID NO: 4431369 - DNA, 25 bp, Homo sapien
ttctctgtggcgatgacagcagaca

SEQ ID NO: 4431370 - DNA, 25 bp, Homo sapien
tctgtggcgatgacagcagacagag

SEQ ID NO: 4431371 - DNA, 25 bp, Homo sapien
cagtgcctggtcctgtagggactgc

SEQ ID NO: 4431372 - DNA, 25 bp, Homo sapien
aacattttactcatcctctgatgcc

SEQ ID NO: 4431373 - DNA, 25 bp, Homo sapien
tctctccttctatatgttcagcaca

SEQ ID NO: 4431374 - DNA, 25 bp, Homo sapien
tgcaacattttactcatcctctgat

SEQ ID NO: 4431375 - DNA, 25 bp, Homo sapien
cttctatatgttcagcacactcatc

SEQ ID NO: 4431376 - DNA, 25 bp, Homo sapien
ctacccgacgcatatcttgctgctt

SEQ ID NO: 4431377 - DNA, 25 bp, Homo sapien
tctacccgacgcatatcttgctgct

SEQ ID NO: 4431378 - DNA, 25 bp, Homo sapien
ctctacccgacgcatatcttgctgc

SEQ ID NO: 4431379 - DNA, 25 bp, Homo sapien
ctgggactggagctctcctgccact

SEQ ID NO: 4431380 - DNA, 25 bp, Homo sapien
gggactggagctctcctgccactct

SEQ ID NO: 4431381 - DNA, 25 bp, Homo sapien
ctctagttccttcctcaggtgctgc

SEQ ID NO: 4431382 - DNA, 25 bp, Homo sapien
tctctctagttccttcctcaggtgc

SEQ ID NO: 4431383 - DNA, 25 bp, Homo sapien
gccagctgccgaagcttctcgtgct

SEQ ID NO: 4431384 - DNA, 25 bp, Homo sapien
cagctgccgaagcttctcgtgctgc

SEQ ID NO: 4431385 - DNA, 25 bp, Homo sapien
gctgccgaagcttctcgtgctgctc

SEQ ID NO: 4431386 - DNA, 25 bp, Homo sapien
tgccgaagcttctcgtgctgctcct

SEQ ID NO: 4431387 - DNA, 25 bp, Homo sapien
ctcgccaagcttctcctgtagctcc

SEQ ID NO: 4431388 - DNA, 25 bp, Homo sapien
caactgcagtgtgctcttgttctca

SEQ ID NO: 4431389 - DNA, 25 bp, Homo sapien
ctgctccaactgcagtgtgctcttg

SEQ ID NO: 4431390 - DNA, 25 bp, Homo sapien
actgcagtgtgctcttgttctcatt

SEQ ID NO: 4431391 - DNA, 25 bp, Homo sapien
cccagcccttcttggatggggtgga

SEQ ID NO: 4431392 - DNA, 25 bp, Homo sapien
tggatggggtggaggtttccgtctc

SEQ ID NO: 4431393 - DNA, 25 bp, Homo sapien
cctcccagcccttcttggatggggt

SEQ ID NO: 4431394 - DNA, 25 bp, Homo sapien
tcccctcccaagaggctgctgcccg

SEQ ID NO: 4431395 - DNA, 25 bp, Homo sapien
gagcctgttatagcactgtctcttc

SEQ ID NO: 4431396 - DNA, 25 bp, Homo sapien
aacagtcgcaggactgccctgcggg

SEQ ID NO: 4431397 - DNA, 25 bp, Homo sapien
aggcaggaagcgagaaacagtcgca

SEQ ID NO: 4431398 - DNA, 25 bp, Homo sapien
cactgcacctggtataaggagcctg

SEQ ID NO: 4431399 - DNA, 25 bp, Homo sapien
gtgacccaggtaatggtctggctgc

SEQ ID NO: 4431400 - DNA, 25 bp, Homo sapien
tgacccaggtaatggtctggctgct

SEQ ID NO: 4431401 - DNA, 25 bp, Homo sapien
caggtgacccaggtaatggtctggc

SEQ ID NO: 4431402 - DNA, 25 bp, Homo sapien
gctgctgcagactctgaacctcttg

SEQ ID NO: 4431403 - DNA, 25 bp, Homo sapien
actgcctgtacagcgcctccttctc

SEQ ID NO: 4431404 - DNA, 25 bp, Homo sapien
tcactgcctgtacagcgcctccttc

SEQ ID NO: 4431405 - DNA, 25 bp, Homo sapien
cactgcctgtacagcgcctccttct

SEQ ID NO: 4431406 - DNA, 25 bp, Homo sapien
tgcctgtacagcgcctccttctcac

SEQ ID NO: 4431407 - DNA, 25 bp, Homo sapien
gctggctggccgcttccaggtgctc

SEQ ID NO: 4431408 - DNA, 25 bp, Homo sapien
atgaggttcagctgggccgttagct

SEQ ID NO: 4431409 - DNA, 25 bp, Homo sapien
ttcagctgggccgttagctgctggt

SEQ ID NO: 4431410 - DNA, 25 bp, Homo sapien
agccatgaggttcagctgggccgtt

SEQ ID NO: 4431411 - DNA, 25 bp, Homo sapien
taggcaacttggtgactgcccgctc

SEQ ID NO: 4431412 - DNA, 25 bp, Homo sapien
gctattccgcccaggcacactccca

SEQ ID NO: 4431413 - DNA, 25 bp, Homo sapien
caacttggtgactgcccgctcacag

SEQ ID NO: 4431414 - DNA, 25 bp, Homo sapien
ttggtgactgcccgctcacaggagg

SEQ ID NO: 4431415 - DNA, 25 bp, Homo sapien
aggtcctctgggacactcggcatgg

SEQ ID NO: 4431416 - DNA, 25 bp, Homo sapien
tcctctgggacactcggcatgggct

SEQ ID NO: 4431417 - DNA, 25 bp, Homo sapien
ccaggtcctctgggacactcggcat

SEQ ID NO: 4431418 - DNA, 25 bp, Homo sapien
ctctgggacactcggcatgggctga

SEQ ID NO: 4431419 - DNA, 25 bp, Homo sapien
gctctttcacctgctcttgtaactg

SEQ ID NO: 4431420 - DNA, 25 bp, Homo sapien
cctgctcttgtaactgtgcctgctt

SEQ ID NO: 4431421 - DNA, 25 bp, Homo sapien
tttcacctgctcttgtaactgtgcc

SEQ ID NO: 4431422 - DNA, 25 bp, Homo sapien
gcctgcttctcctgggcactagctc

SEQ ID NO: 4431423 - DNA, 25 bp, Homo sapien
ctgccctcaggtggcattttcaagt

SEQ ID NO: 4431424 - DNA, 25 bp, Homo sapien
gtctgccttctccttcaggtggtcc

SEQ ID NO: 4431425 - DNA, 25 bp, Homo sapien
ctgccttctccttcaggtggtccat

SEQ ID NO: 4431426 - DNA, 25 bp, Homo sapien
ccttcaggtggtccataaagctgct

SEQ ID NO: 4431427 - DNA, 25 bp, Homo sapien
ctccttcaggtggtccataaagctg

SEQ ID NO: 4431428 - DNA, 25 bp, Homo sapien
tctctcttgccagtattgaatgaag

SEQ ID NO: 4431429 - DNA, 25 bp, Homo sapien
ctcttgccagtattgaatgaagcga

SEQ ID NO: 4431430 - DNA, 25 bp, Homo sapien
catctctcttgccagtattgaatga

SEQ ID NO: 4431431 - DNA, 25 bp, Homo sapien
attgaatgaagcgaagttcttgttt

SEQ ID NO: 4431432 - DNA, 25 bp, Homo sapien
atctttggcacggccccctggttct

SEQ ID NO: 4431433 - DNA, 25 bp, Homo sapien
tctttggcacggccccctggttctg

SEQ ID NO: 4431434 - DNA, 25 bp, Homo sapien
atctgctgcagctccagcagcttca

SEQ ID NO: 4431435 - DNA, 25 bp, Homo sapien
catctgctgcagctccagcagcttc

SEQ ID NO: 4431436 - DNA, 25 bp, Homo sapien
tctgctgcagctccagcagcttcac

SEQ ID NO: 4431437 - DNA, 25 bp, Homo sapien
ctggaccgggctcatcagcagagtt

SEQ ID NO: 4431438 - DNA, 25 bp, Homo sapien
ttgtagttgctgtaagccgcaatac

SEQ ID NO: 4431439 - DNA, 25 bp, Homo sapien
accgggctcatcagcagagttgtgg

SEQ ID NO: 4431440 - DNA, 25 bp, Homo sapien
tggaccgggctcatcagcagagttg

SEQ ID NO: 4431441 - DNA, 25 bp, Homo sapien
tcaaggagaggatcctccctggcct

SEQ ID NO: 4431442 - DNA, 25 bp, Homo sapien
ctgtgcagtaggcttgtcaaggaga

SEQ ID NO: 4431443 - DNA, 25 bp, Homo sapien
cagtaggcttgtcaaggagaggatc

SEQ ID NO: 4431444 - DNA, 25 bp, Homo sapien
gaggtgagggtcacctcacgaagat

SEQ ID NO: 4431445 - DNA, 25 bp, Homo sapien
ggcagccaagcccaacaaaataatg

SEQ ID NO: 4431446 - DNA, 25 bp, Homo sapien
aagcccaacaaaataatggcacaca

SEQ ID NO: 4431447 - DNA, 25 bp, Homo sapien
tggcagccaagcccaacaaaataat

SEQ ID NO: 4431448 - DNA, 25 bp, Homo sapien
gccaagcccaacaaaataatggcac

SEQ ID NO: 4431449 - DNA, 25 bp, Homo sapien
tgtaggagattaaccccataacttg

SEQ ID NO: 4431450 - DNA, 25 bp, Homo sapien
ttgagcagctgtttgatgatggtga

SEQ ID NO: 4431451 - DNA, 25 bp, Homo sapien
tcttgagcagctgtttgatgatggt

SEQ ID NO: 4431452 - DNA, 25 bp, Homo sapien
aaatttcttgagcagctgtttgatg

SEQ ID NO: 4431453 - DNA, 25 bp, Homo sapien
tgtctgaatgctgtagtgaatatac

SEQ ID NO: 4431454 - DNA, 25 bp, Homo sapien
caaagagaacagttttgggcaaaga

SEQ ID NO: 4431455 - DNA, 25 bp, Homo sapien
taataaacagtgcacacttgggggc

SEQ ID NO: 4431456 - DNA, 25 bp, Homo sapien
tcaaacaacagcagaacataggcaa

SEQ ID NO: 4431457 - DNA, 25 bp, Homo sapien
tggaagtcacaaggaccgaatattt

SEQ ID NO: 4431458 - DNA, 25 bp, Homo sapien
ggaagtcacaaggaccgaatatttg

SEQ ID NO: 4431459 - DNA, 25 bp, Homo sapien
ggagcctgtcccgagccgctgtcat

SEQ ID NO: 4431460 - DNA, 25 bp, Homo sapien
cgcggaaaaggagcctgtcccgagc

SEQ ID NO: 4431461 - DNA, 25 bp, Homo sapien
gaggggcgcggaaaaggagcctgtc

SEQ ID NO: 4431462 - DNA, 25 bp, Homo sapien
aaaggagcctgtcccgagccgctgt

SEQ ID NO: 4431463 - DNA, 25 bp, Homo sapien
cttaatgttgcggtggggcgtgagc

SEQ ID NO: 4431464 - DNA, 25 bp, Homo sapien
taatgttgcggtggggcgtgagccg

SEQ ID NO: 4431465 - DNA, 25 bp, Homo sapien
ttaatgttgcggtggggcgtgagcc

SEQ ID NO: 4431466 - DNA, 25 bp, Homo sapien
tgggattccaggtcctgctgactca

SEQ ID NO: 4431467 - DNA, 25 bp, Homo sapien
ggtcctgctgactcaggtgtccact

SEQ ID NO: 4431468 - DNA, 25 bp, Homo sapien
tccaggtcctgctgactcaggtgtc

SEQ ID NO: 4431469 - DNA, 25 bp, Homo sapien
gggattccaggtcctgctgactcag

SEQ ID NO: 4431470 - DNA, 25 bp, Homo sapien
agcagtcagggtattgcatgccatc

SEQ ID NO: 4431471 - DNA, 25 bp, Homo sapien
cagtcagggtattgcatgccatcat

SEQ ID NO: 4431472 - DNA, 25 bp, Homo sapien
gagcagtcagggtattgcatgccat

SEQ ID NO: 4431473 - DNA, 25 bp, Homo sapien
gcagtcagggtattgcatgccatca

SEQ ID NO: 4431474 - DNA, 25 bp, Homo sapien
atatcacagtttgcagctatccaca

SEQ ID NO: 4431475 - DNA, 25 bp, Homo sapien
tcacagtttgcagctatccacaaat

SEQ ID NO: 4431476 - DNA, 25 bp, Homo sapien
tatcacagtttgcagctatccacaa

SEQ ID NO: 4431477 - DNA, 25 bp, Homo sapien
cacagtttgcagctatccacaaatg

SEQ ID NO: 4431478 - DNA, 25 bp, Homo sapien
aagtagccgggactgtaggtgtgtg

SEQ ID NO: 4431479 - DNA, 25 bp, Homo sapien
gtagccgggactgtaggtgtgtgtc

SEQ ID NO: 4431480 - DNA, 25 bp, Homo sapien
agtagccgggactgtaggtgtgtgt

SEQ ID NO: 4431481 - DNA, 25 bp, Homo sapien
tagccgggactgtaggtgtgtgtca

SEQ ID NO: 4431482 - DNA, 25 bp, Homo sapien
aattgaatgtgacaggtcaggccca

SEQ ID NO: 4431483 - DNA, 25 bp, Homo sapien
gactgaggaaactaaccccagctag

SEQ ID NO: 4431484 - DNA, 25 bp, Homo sapien
ccccagctagttacattatgcaatg

SEQ ID NO: 4431485 - DNA, 25 bp, Homo sapien
tctgaagagaagagtcagggactga

SEQ ID NO: 4431486 - DNA, 25 bp, Homo sapien
ggagatcagttttgtgcgaagccag

SEQ ID NO: 4431487 - DNA, 25 bp, Homo sapien
agtaaaccaatcacccgagcaacct

SEQ ID NO: 4431488 - DNA, 25 bp, Homo sapien
agatcagttttgtgcgaagccagta

SEQ ID NO: 4431489 - DNA, 25 bp, Homo sapien
cctggagatcagttttgtgcgaagc

SEQ ID NO: 4431490 - DNA, 25 bp, Homo sapien
gttgtcagttgataagataggcttg

SEQ ID NO: 4431491 - DNA, 25 bp, Homo sapien
gataggcttgatttgttactggtct

SEQ ID NO: 4431492 - DNA, 25 bp, Homo sapien
ttaggtcagcacaccaggcaatgta

SEQ ID NO: 4431493 - DNA, 25 bp, Homo sapien
tactggtcttaatgagggctttagg

SEQ ID NO: 4431494 - DNA, 25 bp, Homo sapien
accaagtcttgaaagaaggacttca

SEQ ID NO: 4431495 - DNA, 25 bp, Homo sapien
catgtcttatccatggacacgccat

SEQ ID NO: 4431496 - DNA, 25 bp, Homo sapien
gtcttgaaagaaggacttcatgtct

SEQ ID NO: 4431497 - DNA, 25 bp, Homo sapien
gctttgaaggtcttttatccatatt

SEQ ID NO: 4431498 - DNA, 25 bp, Homo sapien
tctactctgttatgtcagagaagga

SEQ ID NO: 4431499 - DNA, 25 bp, Homo sapien
tctttgccttaatggtatactgtgt

SEQ ID NO: 4431500 - DNA, 25 bp, Homo sapien
tggcatttcatacaggattaagact

SEQ ID NO: 4431501 - DNA, 25 bp, Homo sapien
tcagttttgtgttcttactagagag

SEQ ID NO: 4431502 - DNA, 25 bp, Homo sapien
cttaaggcaaagggccttttgaatg

SEQ ID NO: 4431503 - DNA, 25 bp, Homo sapien
ggcaaagggccttttgaatgcaaaa

SEQ ID NO: 4431504 - DNA, 25 bp, Homo sapien
tcgagatggatgcttgctgatgttc

SEQ ID NO: 4431505 - DNA, 25 bp, Homo sapien
gctgatgttccaaaacctctttagg

SEQ ID NO: 4431506 - DNA, 25 bp, Homo sapien
tattagccagtgaatccatgtgagc

SEQ ID NO: 4431507 - DNA, 25 bp, Homo sapien
gacgcggtttcctcgtgttagccaa

SEQ ID NO: 4431508 - DNA, 25 bp, Homo sapien
taacagctcagtctataatggaggg

SEQ ID NO: 4431509 - DNA, 25 bp, Homo sapien
gcgtccggctccatgcattcttatg

SEQ ID NO: 4431510 - DNA, 25 bp, Homo sapien
tgcagccaatttgttgtgttgagtt

SEQ ID NO: 4431511 - DNA, 25 bp, Homo sapien
gcagccaatttgttgtgttgagttt

SEQ ID NO: 4431512 - DNA, 25 bp, Homo sapien
caggagtcgtatagactctggcagg

SEQ ID NO: 4431513 - DNA, 25 bp, Homo sapien
agtgtgcctcaggagtcgtatagac

SEQ ID NO: 4431514 - DNA, 25 bp, Homo sapien
ggaccagtccagtgtgcctcaggag

SEQ ID NO: 4431515 - DNA, 25 bp, Homo sapien
ggtaggggggaccagtccagtgtgc

SEQ ID NO: 4431516 - DNA, 25 bp, Homo sapien
agaagtggctttctcagggacactg

SEQ ID NO: 4431517 - DNA, 25 bp, Homo sapien
ctgctggaactctagggctgttttt

SEQ ID NO: 4431518 - DNA, 25 bp, Homo sapien
tcctgttcgctcctgctggaactct

SEQ ID NO: 4431519 - DNA, 25 bp, Homo sapien
accagaagtggctttctcagggaca

SEQ ID NO: 4431520 - DNA, 25 bp, Homo sapien
ggccttccctgtggaaacctgttgc

SEQ ID NO: 4431521 - DNA, 25 bp, Homo sapien
gatgtagggccttccctgtggaaac

SEQ ID NO: 4431522 - DNA, 25 bp, Homo sapien
atgatgtagggccttccctgtggaa

SEQ ID NO: 4431523 - DNA, 25 bp, Homo sapien
agatgatgtagggccttccctgtgg

SEQ ID NO: 4431524 - DNA, 25 bp, Homo sapien
agggttgacccgaagggtcactgca

SEQ ID NO: 4431525 - DNA, 25 bp, Homo sapien
gggttgacccgaagggtcactgcac

SEQ ID NO: 4431526 - DNA, 25 bp, Homo sapien
ggttgacccgaagggtcactgcacc

SEQ ID NO: 4431527 - DNA, 25 bp, Homo sapien
gagggttgacccgaagggtcactgc

SEQ ID NO: 4431528 - DNA, 25 bp, Homo sapien
tgactgatttctacggaccttgaat

SEQ ID NO: 4431529 - DNA, 25 bp, Homo sapien
ttgactgatttctacggaccttgaa

SEQ ID NO: 4431530 - DNA, 25 bp, Homo sapien
cttccagctgatgttccacttgttt

SEQ ID NO: 4431531 - DNA, 25 bp, Homo sapien
ttccagctgatgttccacttgtttc

SEQ ID NO: 4431532 - DNA, 25 bp, Homo sapien
ttcttccagctgatgttccacttgt

SEQ ID NO: 4431533 - DNA, 25 bp, Homo sapien
tcttccagctgatgttccacttgtt

SEQ ID NO: 4431534 - DNA, 25 bp, Homo sapien
agaatgccaccaatgccccaggaca

SEQ ID NO: 4431535 - DNA, 25 bp, Homo sapien
gaatgccaccaatgccccaggacag

SEQ ID NO: 4431536 - DNA, 25 bp, Homo sapien
cagaatgccaccaatgccccaggac

SEQ ID NO: 4431537 - DNA, 25 bp, Homo sapien
aatgccaccaatgccccaggacagg

SEQ ID NO: 4431538 - DNA, 25 bp, Homo sapien
gctttctgtttcttgttgtttgctt

SEQ ID NO: 4431539 - DNA, 25 bp, Homo sapien
ctctagcacccttttggctttctgt

SEQ ID NO: 4431540 - DNA, 25 bp, Homo sapien
tctgtttcttgttgtttgctttctt

SEQ ID NO: 4431541 - DNA, 25 bp, Homo sapien
tctagcacccttttggctttctgtt

SEQ ID NO: 4431542 - DNA, 25 bp, Homo sapien
tgagagaacgtttcatgtggtacag

SEQ ID NO: 4431543 - DNA, 25 bp, Homo sapien
tcatgtggtacaggtccgtatttag

SEQ ID NO: 4431544 - DNA, 25 bp, Homo sapien
ttccctttctgtatgttcaatgtct

SEQ ID NO: 4431545 - DNA, 25 bp, Homo sapien
tcaaagtatctgagagaacgtttca

SEQ ID NO: 4431546 - DNA, 25 bp, Homo sapien
ttctgtgtggccatgacattagaga

SEQ ID NO: 4431547 - DNA, 25 bp, Homo sapien
ccatgacattagagagaacactctc

SEQ ID NO: 4431548 - DNA, 25 bp, Homo sapien
tggccatgacattagagagaacact

SEQ ID NO: 4431549 - DNA, 25 bp, Homo sapien
ctgtgtggccatgacattagagaga

SEQ ID NO: 4431550 - DNA, 25 bp, Homo sapien
tcagctgcactttcagtagtgcctc

SEQ ID NO: 4431551 - DNA, 25 bp, Homo sapien
gctgcactttcagtagtgcctcctc

SEQ ID NO: 4431552 - DNA, 25 bp, Homo sapien
agctgcactttcagtagtgcctcct

SEQ ID NO: 4431553 - DNA, 25 bp, Homo sapien
cagctgcactttcagtagtgcctcc

SEQ ID NO: 4431554 - DNA, 25 bp, Homo sapien
gcacactcatctctttctaattgga

SEQ ID NO: 4431555 - DNA, 25 bp, Homo sapien
taattggacttgttgaaatgactcc

SEQ ID NO: 4431556 - DNA, 25 bp, Homo sapien
tttagatgttcagcacactcatctc

SEQ ID NO: 4431557 - DNA, 25 bp, Homo sapien
cactcatctctttctaattggactt

SEQ ID NO: 4431558 - DNA, 25 bp, Homo sapien
ctctacccgacgcatatcttgctgc

SEQ ID NO: 4431559 - DNA, 25 bp, Homo sapien
ctacccgacgcatatcttgctgctt

SEQ ID NO: 4431560 - DNA, 25 bp, Homo sapien
tctacccgacgcatatcttgctgct

SEQ ID NO: 4431561 - DNA, 25 bp, Homo sapien
ctgggcctggagctctcctgccact

SEQ ID NO: 4431562 - DNA, 25 bp, Homo sapien
agctctcctgccactctctctagtt

SEQ ID NO: 4431563 - DNA, 25 bp, Homo sapien
cctggagctctcctgccactctctc

SEQ ID NO: 4431564 - DNA, 25 bp, Homo sapien
ctctagttccttcctcaggtgctgc

SEQ ID NO: 4431565 - DNA, 25 bp, Homo sapien
ctgctgaaggctcttgtgctgctcc

SEQ ID NO: 4431566 - DNA, 25 bp, Homo sapien
tgcagtgcgttcttgttctcattgt

SEQ ID NO: 4431567 - DNA, 25 bp, Homo sapien
ctcgccaagcttctcctgtagctcc

SEQ ID NO: 4431568 - DNA, 25 bp, Homo sapien
actgcagtgcgttcttgttctcatt

SEQ ID NO: 4431569 - DNA, 25 bp, Homo sapien
caactgcagtgcgttcttgttctca

SEQ ID NO: 4431570 - DNA, 25 bp, Homo sapien
cctcccagcccttcttggatggggt

SEQ ID NO: 4431571 - DNA, 25 bp, Homo sapien
cccagcccttcttggatggggtgga

SEQ ID NO: 4431572 - DNA, 25 bp, Homo sapien
tcccctcccaagaggctgctgcccg

SEQ ID NO: 4431573 - DNA, 25 bp, Homo sapien
tggatggggtggaggtttccgtctc

SEQ ID NO: 4431574 - DNA, 25 bp, Homo sapien
tgacccaggtaatggtctggctgct

SEQ ID NO: 4431575 - DNA, 25 bp, Homo sapien
gtgacccaggtaatggtctggctgc

SEQ ID NO: 4431576 - DNA, 25 bp, Homo sapien
tgcaggtgacccaggtaatggtctg

SEQ ID NO: 4431577 - DNA, 25 bp, Homo sapien
caggtgacccaggtaatggtctggc

SEQ ID NO: 4431578 - DNA, 25 bp, Homo sapien
ctgctgctgataggtggccacgtac

SEQ ID NO: 4431579 - DNA, 25 bp, Homo sapien
actgcctgtacagcgcctccttctc

SEQ ID NO: 4431580 - DNA, 25 bp, Homo sapien
tcactgcctgtacagcgcctccttc

SEQ ID NO: 4431581 - DNA, 25 bp, Homo sapien
tgcctgtacagcgcctccttctcac

SEQ ID NO: 4431582 - DNA, 25 bp, Homo sapien
cactgcctgtacagcgcctccttct

SEQ ID NO: 4431583 - DNA, 25 bp, Homo sapien
agctgggccgttagctgctggttct

SEQ ID NO: 4431584 - DNA, 25 bp, Homo sapien
atgaggctcagctgggccgttagct

SEQ ID NO: 4431585 - DNA, 25 bp, Homo sapien
aggctcagctgggccgttagctgct

SEQ ID NO: 4431586 - DNA, 25 bp, Homo sapien
ctcagctgggccgttagctgctggt

SEQ ID NO: 4431587 - DNA, 25 bp, Homo sapien
cacactcccactactggtcgatgtg

SEQ ID NO: 4431588 - DNA, 25 bp, Homo sapien
gctattccgcccaggcacactccca

SEQ ID NO: 4431589 - DNA, 25 bp, Homo sapien
cactcccactactggtcgatgtggg

SEQ ID NO: 4431590 - DNA, 25 bp, Homo sapien
ttgctattccgcccaggcacactcc

SEQ ID NO: 4431591 - DNA, 25 bp, Homo sapien
cgggtcctctgggacactcggcatg

SEQ ID NO: 4431592 - DNA, 25 bp, Homo sapien
tgctctccgggtcctctgggacact

SEQ ID NO: 4431593 - DNA, 25 bp, Homo sapien
cctgctctccgggtcctctgggaca

SEQ ID NO: 4431594 - DNA, 25 bp, Homo sapien
tctccgggtcctctgggacactcgg

SEQ ID NO: 4431595 - DNA, 25 bp, Homo sapien
ctgagggcaagatgtgagcattctt

SEQ ID NO: 4431596 - DNA, 25 bp, Homo sapien
gctctttcacctgctcttgtaactg

SEQ ID NO: 4431597 - DNA, 25 bp, Homo sapien
tttcacctgctcttgtaactgtgcc

SEQ ID NO: 4431598 - DNA, 25 bp, Homo sapien
cctgctcttgtaactgtgcctgctt

SEQ ID NO: 4431599 - DNA, 25 bp, Homo sapien
gcctgcttctcctgggcactagctc

SEQ ID NO: 4431600 - DNA, 25 bp, Homo sapien
ctgccctcaggtggcattttcaagt

SEQ ID NO: 4431601 - DNA, 25 bp, Homo sapien
aggtctgccttctcctccaggtggt

SEQ ID NO: 4431602 - DNA, 25 bp, Homo sapien
tctcctccaggtggtccataaagct

SEQ ID NO: 4431603 - DNA, 25 bp, Homo sapien
ggtctgccttctcctccaggtggtc

SEQ ID NO: 4431604 - DNA, 25 bp, Homo sapien
cctccaggtggtccataaagctgct

SEQ ID NO: 4431605 - DNA, 25 bp, Homo sapien
gatggcatctgtctcgccagtggtg

SEQ ID NO: 4431606 - DNA, 25 bp, Homo sapien
tggatgaagcagagttcttttttct

SEQ ID NO: 4431607 - DNA, 25 bp, Homo sapien
atctgtctcgccagtggtggatgaa

SEQ ID NO: 4431608 - DNA, 25 bp, Homo sapien
tctcgccagtggtggatgaagcaga

SEQ ID NO: 4431609 - DNA, 25 bp, Homo sapien
atctttggcacggccccctggttct

SEQ ID NO: 4431610 - DNA, 25 bp, Homo sapien
tctttggcacggccccctggttctg

SEQ ID NO: 4431611 - DNA, 25 bp, Homo sapien
ctggagggaggggtgctcagctgcc

SEQ ID NO: 4431612 - DNA, 25 bp, Homo sapien
tggagggaggggtgctcagctgcca

SEQ ID NO: 4431613 - DNA, 25 bp, Homo sapien
ggagggaggggtgctcagctgccat

SEQ ID NO: 4431614 - DNA, 25 bp, Homo sapien
atctgctgcagctccagcagcttca

SEQ ID NO: 4431615 - DNA, 25 bp, Homo sapien
catctgctgcagctccagcagcttc

SEQ ID NO: 4431616 - DNA, 25 bp, Homo sapien
tctgctgcagctccagcagcttcac

SEQ ID NO: 4431617 - DNA, 25 bp, Homo sapien
ctggaccgggctcatcagcagagtt

SEQ ID NO: 4431618 - DNA, 25 bp, Homo sapien
ttgtagttgctgtaagccgcaatac

SEQ ID NO: 4431619 - DNA, 25 bp, Homo sapien
gcccattgttgtagttgctgtaagc

SEQ ID NO: 4431620 - DNA, 25 bp, Homo sapien
cagcagagttgtgggcagcggccag

SEQ ID NO: 4431621 - DNA, 25 bp, Homo sapien
accatgcttgtctgcagccccaagc

SEQ ID NO: 4431622 - DNA, 25 bp, Homo sapien
caccatgcttgtctgcagccccaag

SEQ ID NO: 4431623 - DNA, 25 bp, Homo sapien
ccatgcttgtctgcagccccaagct

SEQ ID NO: 4431624 - DNA, 25 bp, Homo sapien
catgcttgtctgcagccccaagctc

SEQ ID NO: 4431625 - DNA, 25 bp, Homo sapien
tcaaggagaggatcctccctggcct

SEQ ID NO: 4431626 - DNA, 25 bp, Homo sapien
cttgtcaaggagaggatcctccctg

SEQ ID NO: 4431627 - DNA, 25 bp, Homo sapien
ggcagaggaggtgaggctcacctca

SEQ ID NO: 4431628 - DNA, 25 bp, Homo sapien
tgtcaaggagaggatcctccctggc

SEQ ID NO: 4431629 - DNA, 25 bp, Homo sapien
tggcagccaagcccagcacaacaat

SEQ ID NO: 4431630 - DNA, 25 bp, Homo sapien
gcagccaagcccagcacaacaatgg

SEQ ID NO: 4431631 - DNA, 25 bp, Homo sapien
aatttcttgagcagctctttgagga

SEQ ID NO: 4431632 - DNA, 25 bp, Homo sapien
agccaagcccagcacaacaatggca

SEQ ID NO: 4431633 - DNA, 25 bp, Homo sapien
caataaggccactctagggaaaaat

SEQ ID NO: 4431634 - DNA, 25 bp, Homo sapien
ataaggccactctagggaaaaatct

SEQ ID NO: 4431635 - DNA, 25 bp, Homo sapien
cagcgatcccatcaaaatattctgt

SEQ ID NO: 4431636 - DNA, 25 bp, Homo sapien
tgaaacatcagcgatcccatcaaaa

SEQ ID NO: 4431637 - DNA, 25 bp, Homo sapien
aacatcagcgatcccatcaaaatat

SEQ ID NO: 4431638 - DNA, 25 bp, Homo sapien
catcagcgatcccatcaaaatattc

SEQ ID NO: 4431639 - DNA, 25 bp, Homo sapien
tgttgacttgcacgactgcaaacgc

SEQ ID NO: 4431640 - DNA, 25 bp, Homo sapien
cagcttccggtccagacggttatct

SEQ ID NO: 4431641 - DNA, 25 bp, Homo sapien
aaacgccctgagctgcttttgcagt

SEQ ID NO: 4431642 - DNA, 25 bp, Homo sapien
aagaaatgcgaagtctacgggaggt

SEQ ID NO: 4431643 - DNA, 25 bp, Homo sapien
tatttgaggaaatgtaagagacaac

SEQ ID NO: 4431644 - DNA, 25 bp, Homo sapien
cgctgaaggccctcttacgaagaaa

SEQ ID NO: 4431645 - DNA, 25 bp, Homo sapien
cagaccattcacagtatttgaggaa

SEQ ID NO: 4431646 - DNA, 25 bp, Homo sapien
tcttttccgagctcggctgtcgctg

SEQ ID NO: 4431647 - DNA, 25 bp, Homo sapien
cgccaaacagcgctccacatctgat

SEQ ID NO: 4431648 - DNA, 25 bp, Homo sapien
atcaggaccccggagggtggccgag

SEQ ID NO: 4431649 - DNA, 25 bp, Homo sapien
agtttcagcccaggctcaaatggca

SEQ ID NO: 4431650 - DNA, 25 bp, Homo sapien
cacatctgattggtccactcctctt

SEQ ID NO: 4431651 - DNA, 25 bp, Homo sapien
gcacatcccggtgcgttcactgaag

SEQ ID NO: 4431652 - DNA, 25 bp, Homo sapien
ctgcacatcccggtgcgttcactga

SEQ ID NO: 4431653 - DNA, 25 bp, Homo sapien
gcgttcactgaagccaagccgttag

SEQ ID NO: 4431654 - DNA, 25 bp, Homo sapien
gaagccaagccgttagcctcatgct

SEQ ID NO: 4431655 - DNA, 25 bp, Homo sapien
gcaggctcaactgggcgctcgcccc

SEQ ID NO: 4431656 - DNA, 25 bp, Homo sapien
ctggccgccggaccagccggctgct

SEQ ID NO: 4431657 - DNA, 25 bp, Homo sapien
tggtagccgccgtcaccccgtctca

SEQ ID NO: 4431658 - DNA, 25 bp, Homo sapien
ccgtctcacaggctgctcgttccct

SEQ ID NO: 4431659 - DNA, 25 bp, Homo sapien
ctccaaaccttactgtccgtctggt

SEQ ID NO: 4431660 - DNA, 25 bp, Homo sapien
ctgattctttcggtttctcgcctat

SEQ ID NO: 4431661 - DNA, 25 bp, Homo sapien
tcggtttctcgcctattgccagatt

SEQ ID NO: 4431662 - DNA, 25 bp, Homo sapien
ttctcgcctattgccagattctctc

SEQ ID NO: 4431663 - DNA, 25 bp, Homo sapien
tcaaatttgaactccgctcggctgc

SEQ ID NO: 4431664 - DNA, 25 bp, Homo sapien
tggtcacccaatgctttcagctact

SEQ ID NO: 4431665 - DNA, 25 bp, Homo sapien
ggcttttccttgatcctcactcaca

SEQ ID NO: 4431666 - DNA, 25 bp, Homo sapien
cagacccgcttctcttagccctttg

SEQ ID NO: 4431667 - DNA, 25 bp, Homo sapien
tgcaacagggccaacttcaccagcc

SEQ ID NO: 4431668 - DNA, 25 bp, Homo sapien
ctgcaacagggccaacttcaccagc

SEQ ID NO: 4431669 - DNA, 25 bp, Homo sapien
gcaacagggccaacttcaccagcct

SEQ ID NO: 4431670 - DNA, 25 bp, Homo sapien
tttcatgtctcctgcgatcgcactg

SEQ ID NO: 4431671 - DNA, 25 bp, Homo sapien
gacacccttcaccttaataccatag

SEQ ID NO: 4431672 - DNA, 25 bp, Homo sapien
cttaataccatagaaggcccgcaga

SEQ ID NO: 4431673 - DNA, 25 bp, Homo sapien
gatcgcactgcccacggacaccctt

SEQ ID NO: 4431674 - DNA, 25 bp, Homo sapien
tgcattaaaaggtactccaaatatt

SEQ ID NO: 4431675 - DNA, 25 bp, Homo sapien
tggggcagtgcattaaaaggtactc

SEQ ID NO: 4431676 - DNA, 25 bp, Homo sapien
aatggggcagtgcattaaaaggtac

SEQ ID NO: 4431677 - DNA, 25 bp, Homo sapien
cagaatggggcagtgcattaaaagg

SEQ ID NO: 4431678 - DNA, 25 bp, Homo sapien
cagatcctgatttccgaaaaagccc

SEQ ID NO: 4431679 - DNA, 25 bp, Homo sapien
ctttagtgcttttaggcgaatcaca

SEQ ID NO: 4431680 - DNA, 25 bp, Homo sapien
tcttctaaagatgtgcaagcatcga

SEQ ID NO: 4431681 - DNA, 25 bp, Homo sapien
agatgtgcaagcatcgacaagaaag

SEQ ID NO: 4431682 - DNA, 25 bp, Homo sapien
tataataatcttgagtattttggca

SEQ ID NO: 4431683 - DNA, 25 bp, Homo sapien
ataataatcttgagtattttggcaa

SEQ ID NO: 4431684 - DNA, 25 bp, Homo sapien
gataggcaaccttcaccatgatcca

SEQ ID NO: 4431685 - DNA, 25 bp, Homo sapien
tgcttaagaagtcccgcaatatcac

SEQ ID NO: 4431686 - DNA, 25 bp, Homo sapien
gcttcatgcaaatcagctgggagaa

SEQ ID NO: 4431687 - DNA, 25 bp, Homo sapien
caaggaggtgcagaagataggcaac

SEQ ID NO: 4431688 - DNA, 25 bp, Homo sapien
gatttggtgcaaatattactgcaag

SEQ ID NO: 4431689 - DNA, 25 bp, Homo sapien
actgcaagattgctgctatccatct

SEQ ID NO: 4431690 - DNA, 25 bp, Homo sapien
gaagatttggtgcaaatattactgc

SEQ ID NO: 4431691 - DNA, 25 bp, Homo sapien
tattactgcaagattgctgctatcc

SEQ ID NO: 4431692 - DNA, 25 bp, Homo sapien
tttctgcgttagaagacatcttttc

SEQ ID NO: 4431693 - DNA, 25 bp, Homo sapien
tcttttctgcgttagaagacatctt

SEQ ID NO: 4431694 - DNA, 25 bp, Homo sapien
cttcttttctgcgttagaagacatc

SEQ ID NO: 4431695 - DNA, 25 bp, Homo sapien
tctgcgttagaagacatcttttcat

SEQ ID NO: 4431696 - DNA, 25 bp, Homo sapien
tatctgatgcataatcgataagagt

SEQ ID NO: 4431697 - DNA, 25 bp, Homo sapien
cataatcgataagagtctgtactac

SEQ ID NO: 4431698 - DNA, 25 bp, Homo sapien
tgtactactgcagcctgtaatcgta

SEQ ID NO: 4431699 - DNA, 25 bp, Homo sapien
gagtctgtactactgcagcctgtaa

SEQ ID NO: 4431700 - DNA, 25 bp, Homo sapien
aaattctgttaataatgcaactaca

SEQ ID NO: 4431701 - DNA, 25 bp, Homo sapien
caaattctgttaataatgcaactac

SEQ ID NO: 4431702 - DNA, 25 bp, Homo sapien
tgaggtcagtaatataccaactttc

SEQ ID NO: 4431703 - DNA, 25 bp, Homo sapien
tgggggtgaggtcagtaatatacca

SEQ ID NO: 4431704 - DNA, 25 bp, Homo sapien
gggtgaggtcagtaatataccaact

SEQ ID NO: 4431705 - DNA, 25 bp, Homo sapien
cagtaatataccaactttctaacag

SEQ ID NO: 4431706 - DNA, 25 bp, Homo sapien
tcaaagccttccagtgatggagtag

SEQ ID NO: 4431707 - DNA, 25 bp, Homo sapien
cagagaccatcaatacccaacatgg

SEQ ID NO: 4431708 - DNA, 25 bp, Homo sapien
cccaacatggctggtatcttttcca

SEQ ID NO: 4431709 - DNA, 25 bp, Homo sapien
tcttatattcaccaggagtttcata

SEQ ID NO: 4431710 - DNA, 25 bp, Homo sapien
attccattccccacttatacttcca

SEQ ID NO: 4431711 - DNA, 25 bp, Homo sapien
ttattccattccccacttatacttc

SEQ ID NO: 4431712 - DNA, 25 bp, Homo sapien
tccattccccacttatacttccata

SEQ ID NO: 4431713 - DNA, 25 bp, Homo sapien
cattccccacttatacttccatatc

SEQ ID NO: 4431714 - DNA, 25 bp, Homo sapien
tttatttagtgctccactaacaaaa

SEQ ID NO: 4431715 - DNA, 25 bp, Homo sapien
tttaaatttatttagtgctccacta

SEQ ID NO: 4431716 - DNA, 25 bp, Homo sapien
aatttatttagtgctccactaacaa

SEQ ID NO: 4431717 - DNA, 25 bp, Homo sapien
taaatttatttagtgctccactaac

SEQ ID NO: 4431718 - DNA, 25 bp, Homo sapien
atggcaatttacacttagcatttgg

SEQ ID NO: 4431719 - DNA, 25 bp, Homo sapien
gcatggcaatttacacttagcattt

SEQ ID NO: 4431720 - DNA, 25 bp, Homo sapien
ggcatggcaatttacacttagcatt

SEQ ID NO: 4431721 - DNA, 25 bp, Homo sapien
tggcatggcaatttacacttagcat

SEQ ID NO: 4431722 - DNA, 25 bp, Homo sapien
aatcagggtactgcacaccatcatt

SEQ ID NO: 4431723 - DNA, 25 bp, Homo sapien
ggtactgcacaccatcattacacag

SEQ ID NO: 4431724 - DNA, 25 bp, Homo sapien
atgtaaaaggagcaatcagggtact

SEQ ID NO: 4431725 - DNA, 25 bp, Homo sapien
gtaaaaggagcaatcagggtactgc

SEQ ID NO: 4431726 - DNA, 25 bp, Homo sapien
ctaagggggcataacaacaaactgt

SEQ ID NO: 4431727 - DNA, 25 bp, Homo sapien
aaaaagaatattagaggcaactggt

SEQ ID NO: 4431728 - DNA, 25 bp, Homo sapien
caaaaccatgaaagactaggacaga

SEQ ID NO: 4431729 - DNA, 25 bp, Homo sapien
aggacagattatatgagactaaggg

SEQ ID NO: 4431730 - DNA, 25 bp, Homo sapien
tttactgcagtattcttactaaaat

SEQ ID NO: 4431731 - DNA, 25 bp, Homo sapien
ttctaatctcataatccaaattcat

SEQ ID NO: 4431732 - DNA, 25 bp, Homo sapien
tcccattctaatctcataatccaaa

SEQ ID NO: 4431733 - DNA, 25 bp, Homo sapien
tgcatattcccattctaatctcata

SEQ ID NO: 4431734 - DNA, 25 bp, Homo sapien
atgctggtagatgcaatatttttgg

SEQ ID NO: 4431735 - DNA, 25 bp, Homo sapien
gctggtagatgcaatatttttggat

SEQ ID NO: 4431736 - DNA, 25 bp, Homo sapien
atttttggatcaaatttaaccgatg

SEQ ID NO: 4431737 - DNA, 25 bp, Homo sapien
gatcaaatttaaccgatggtggttg

SEQ ID NO: 4431738 - DNA, 25 bp, Homo sapien
gtccccgagctcttctcactggagt

SEQ ID NO: 4431739 - DNA, 25 bp, Homo sapien
gaaaggagaagcctggtggccacct

SEQ ID NO: 4431740 - DNA, 25 bp, Homo sapien
tgcacaaatagcaaaggagattaaa

SEQ ID NO: 4431741 - DNA, 25 bp, Homo sapien
ctggtgaccagccaccatgcacaaa

SEQ ID NO: 4431742 - DNA, 25 bp, Homo sapien
gaccagccaccatgcacaaatagca

SEQ ID NO: 4431743 - DNA, 25 bp, Homo sapien
taagcagacgataatttgcataaac

SEQ ID NO: 4431744 - DNA, 25 bp, Homo sapien
tgcataaacctaaaatcatgataaa

SEQ ID NO: 4431745 - DNA, 25 bp, Homo sapien
tactttaagacctaaggattaagca

SEQ ID NO: 4431746 - DNA, 25 bp, Homo sapien
ggaaatctaagtattacaaacaaca

SEQ ID NO: 4431747 - DNA, 25 bp, Homo sapien
tatcccagtttggagctatccgcaa

SEQ ID NO: 4431748 - DNA, 25 bp, Homo sapien
atatcccagtttggagctatccgca

SEQ ID NO: 4431749 - DNA, 25 bp, Homo sapien
tcccagtttggagctatccgcaaat

SEQ ID NO: 4431750 - DNA, 25 bp, Homo sapien
atcccagtttggagctatccgcaaa

SEQ ID NO: 4431751 - DNA, 25 bp, Homo sapien
gggcacgccattcaagggtataaca

SEQ ID NO: 4431752 - DNA, 25 bp, Homo sapien
taagcaagcttcatgataataactg

SEQ ID NO: 4431753 - DNA, 25 bp, Homo sapien
cacccatattttaccagcatcgaag

SEQ ID NO: 4431754 - DNA, 25 bp, Homo sapien
tcctaacagtcatgagataagcaag

SEQ ID NO: 4431755 - DNA, 25 bp, Homo sapien
tcaaggtaatataacctgagatcag

SEQ ID NO: 4431756 - DNA, 25 bp, Homo sapien
taaggaccctttatcatatgctatc

SEQ ID NO: 4431757 - DNA, 25 bp, Homo sapien
tcagagaaaacctcactagaagtgg

SEQ ID NO: 4431758 - DNA, 25 bp, Homo sapien
tctcacagactacgttaaggaccct

SEQ ID NO: 4431759 - DNA, 25 bp, Homo sapien
caaccacccaagcaacgttggccca

SEQ ID NO: 4431760 - DNA, 25 bp, Homo sapien
aaccacccaagcaacgttggcccat

SEQ ID NO: 4431761 - DNA, 25 bp, Homo sapien
tcacatttcagtcataaaagacatt

SEQ ID NO: 4431762 - DNA, 25 bp, Homo sapien
cacatttcagtcataaaagacatta

SEQ ID NO: 4431763 - DNA, 25 bp, Homo sapien
acatttcagtcataaaagacattac

SEQ ID NO: 4431764 - DNA, 25 bp, Homo sapien
caagtaccagtagaacgagggcagc

SEQ ID NO: 4431765 - DNA, 25 bp, Homo sapien
ggcactgctacagggagtcccaagc

SEQ ID NO: 4431766 - DNA, 25 bp, Homo sapien
taaaatacaacgttgacaaagtaca

SEQ ID NO: 4431767 - DNA, 25 bp, Homo sapien
gcatactgatacactttcattcact

SEQ ID NO: 4431768 - DNA, 25 bp, Homo sapien
aatcgccaatggaatggagccacac

SEQ ID NO: 4431769 - DNA, 25 bp, Homo sapien
tctcaaatagtaaaaatcgccaatg

SEQ ID NO: 4431770 - DNA, 25 bp, Homo sapien
tctctggagaggctataatggtttt

SEQ ID NO: 4431771 - DNA, 25 bp, Homo sapien
gagaggctataatggttttcattca

SEQ ID NO: 4431772 - DNA, 25 bp, Homo sapien
tacacatacccaacagagagcttgc

SEQ ID NO: 4431773 - DNA, 25 bp, Homo sapien
gagcttgcgcaagtgcatcaaaatg

SEQ ID NO: 4431774 - DNA, 25 bp, Homo sapien
tccaaatgcccatcgccagtgatgt

SEQ ID NO: 4431775 - DNA, 25 bp, Homo sapien
gaattatagagagcaccaagttgtt

SEQ ID NO: 4431776 - DNA, 25 bp, Homo sapien
tcccacgtgtattccaaagtcttct

SEQ ID NO: 4431777 - DNA, 25 bp, Homo sapien
ttcttgttcattcccacgtgtattc

SEQ ID NO: 4431778 - DNA, 25 bp, Homo sapien
tcttgtcccaggcagccttaaagtg

SEQ ID NO: 4431779 - DNA, 25 bp, Homo sapien
agtgttaccagttcaggattttagt

SEQ ID NO: 4431780 - DNA, 25 bp, Homo sapien
tattattggcaagagggtaagccca

SEQ ID NO: 4431781 - DNA, 25 bp, Homo sapien
agttaaatgtacagctcagccaggt

SEQ ID NO: 4431782 - DNA, 25 bp, Homo sapien
tattcccttggtgtgaacctagcac

SEQ ID NO: 4431783 - DNA, 25 bp, Homo sapien
gatagccaatgactgtagaggaact

SEQ ID NO: 4431784 - DNA, 25 bp, Homo sapien
tgaggtttgagacatactccagata

SEQ ID NO: 4431785 - DNA, 25 bp, Homo sapien
tgaacataagatttcatacctctga

SEQ ID NO: 4431786 - DNA, 25 bp, Homo sapien
gagctagtttttcagcatccttgac

SEQ ID NO: 4431787 - DNA, 25 bp, Homo sapien
cccattagcaatgtacagagctagt

SEQ ID NO: 4431788 - DNA, 25 bp, Homo sapien
tgaagatctccctcatgtaatcctt

SEQ ID NO: 4431789 - DNA, 25 bp, Homo sapien
gaaccaatcaatcatgatgaagatc

SEQ ID NO: 4431790 - DNA, 25 bp, Homo sapien
tacatcactttaccacatgtgtaga

SEQ ID NO: 4431791 - DNA, 25 bp, Homo sapien
atccttatgcactcaaactctccct

SEQ ID NO: 4431792 - DNA, 25 bp, Homo sapien
tacatacacagtattagctcataat

SEQ ID NO: 4431793 - DNA, 25 bp, Homo sapien
tattatgggctatacagggcatggt

SEQ ID NO: 4431794 - DNA, 25 bp, Homo sapien
actcactatttagtaattactcttg

SEQ ID NO: 4431795 - DNA, 25 bp, Homo sapien
tccaattataatagtatgcataaat

SEQ ID NO: 4431796 - DNA, 25 bp, Homo sapien
aacaccaccgcactatgattagcca

SEQ ID NO: 4431797 - DNA, 25 bp, Homo sapien
tgcaatcaggtgtaaacaccaccgc

SEQ ID NO: 4431798 - DNA, 25 bp, Homo sapien
taactagttgcaatcaggtgtaaac

SEQ ID NO: 4431799 - DNA, 25 bp, Homo sapien
atctgtaactagttgcaatcaggtg

SEQ ID NO: 4431800 - DNA, 25 bp, Homo sapien
ctttattcctcctttcctgacttat

SEQ ID NO: 4431801 - DNA, 25 bp, Homo sapien
tcctcctttcctgacttattcctga

SEQ ID NO: 4431802 - DNA, 25 bp, Homo sapien
tcctttcctgacttattcctgatta

SEQ ID NO: 4431803 - DNA, 25 bp, Homo sapien
ctttcctgacttattcctgattaaa

SEQ ID NO: 4431804 - DNA, 25 bp, Homo sapien
tctcagctcacctgcctccagggtt

SEQ ID NO: 4431805 - DNA, 25 bp, Homo sapien
tctcggctcacctgcctctagggtt

SEQ ID NO: 4431806 - DNA, 25 bp, Homo sapien
ggatctcggctcacctgcctctagg

SEQ ID NO: 4431807 - DNA, 25 bp, Homo sapien
accatgaccacctaattttttcttg

SEQ ID NO: 4431808 - DNA, 25 bp, Homo sapien
gaacactcttgttttggatggctgg

SEQ ID NO: 4431809 - DNA, 25 bp, Homo sapien
gcttgtcctgtctccatacctgtag

SEQ ID NO: 4431810 - DNA, 25 bp, Homo sapien
tccccgttatgtggctaagacttga

SEQ ID NO: 4431811 - DNA, 25 bp, Homo sapien
gacaaacttgccatctgagagcact

SEQ ID NO: 4431812 - DNA, 25 bp, Homo sapien
tgttagatgcacagtttgctgaaat

SEQ ID NO: 4431813 - DNA, 25 bp, Homo sapien
catacgtgtaagcacatatacaata

SEQ ID NO: 4431814 - DNA, 25 bp, Homo sapien
gcacatatacaatattagctcataa

SEQ ID NO: 4431815 - DNA, 25 bp, Homo sapien
atttcacatacgtgtaagcacatat

SEQ ID NO: 4431816 - DNA, 25 bp, Homo sapien
agggggacagcaagatctcagggca

SEQ ID NO: 4431817 - DNA, 25 bp, Homo sapien
tgcagagggggacagcaagatctca

SEQ ID NO: 4431818 - DNA, 25 bp, Homo sapien
ccagccctgcatagaggtgcagagg

SEQ ID NO: 4431819 - DNA, 25 bp, Homo sapien
tcagacatccagaatggcctccagc

SEQ ID NO: 4431820 - DNA, 25 bp, Homo sapien
ttgtagtctatactcactgtcccat

SEQ ID NO: 4431821 - DNA, 25 bp, Homo sapien
gcttttatcttgtagtctatactca

SEQ ID NO: 4431822 - DNA, 25 bp, Homo sapien
gtcccatttccgtcagtactgactt

SEQ ID NO: 4431823 - DNA, 25 bp, Homo sapien
ccatttccgtcagtactgactttca

SEQ ID NO: 4431824 - DNA, 25 bp, Homo sapien
gaacaagggacaggcataggcacaa

SEQ ID NO: 4431825 - DNA, 25 bp, Homo sapien
aaaagaccagctactgattgggaga

SEQ ID NO: 4431826 - DNA, 25 bp, Homo sapien
gaagtcgttactaggcttcatacca

SEQ ID NO: 4431827 - DNA, 25 bp, Homo sapien
gagaacccggaactgatttttgaca

SEQ ID NO: 4431828 - DNA, 25 bp, Homo sapien
cagattttctccagtgcagacatgg

SEQ ID NO: 4431829 - DNA, 25 bp, Homo sapien
gcagattttctccagtgcagacatg

SEQ ID NO: 4431830 - DNA, 25 bp, Homo sapien
cgcagattttctccagtgcagacat

SEQ ID NO: 4431831 - DNA, 25 bp, Homo sapien
ccgcagattttctccagtgcagaca

SEQ ID NO: 4431832 - DNA, 25 bp, Homo sapien
cagtgatcactcggtctgtctctca

SEQ ID NO: 4431833 - DNA, 25 bp, Homo sapien
agtgatcactcggtctgtctctcag

SEQ ID NO: 4431834 - DNA, 25 bp, Homo sapien
acagtgatcactcggtctgtctctc

SEQ ID NO: 4431835 - DNA, 25 bp, Homo sapien
caaatgccatgtttgtcacgaagct

SEQ ID NO: 4431836 - DNA, 25 bp, Homo sapien
cagctcaaatgccatgtttgtcacg

SEQ ID NO: 4431837 - DNA, 25 bp, Homo sapien
gctcaaatgccatgtttgtcacgaa

SEQ ID NO: 4431838 - DNA, 25 bp, Homo sapien
atgccatgtttgtcacgaagcttac

SEQ ID NO: 4431839 - DNA, 25 bp, Homo sapien
cattaaggccccacgaacacaggac

SEQ ID NO: 4431840 - DNA, 25 bp, Homo sapien
cgaacacaggacttacttttcagac

SEQ ID NO: 4431841 - DNA, 25 bp, Homo sapien
tttggcctgccattaaggccccacg

SEQ ID NO: 4431842 - DNA, 25 bp, Homo sapien
gaggcggtgactgcacttgcccctt

SEQ ID NO: 4431843 - DNA, 25 bp, Homo sapien
tgaagtgatgtgatacgagaagctg

SEQ ID NO: 4431844 - DNA, 25 bp, Homo sapien
agtgatgtgatacgagaagctgtgc

SEQ ID NO: 4431845 - DNA, 25 bp, Homo sapien
atgtgatacgagaagctgtgctggc

SEQ ID NO: 4431846 - DNA, 25 bp, Homo sapien
cttgaagtgatgtgatacgagaagc

SEQ ID NO: 4431847 - DNA, 25 bp, Homo sapien
ctgtgattcaccaatctgcatgtgc

SEQ ID NO: 4431848 - DNA, 25 bp, Homo sapien
tgtgccatgctggacgacgatccag

SEQ ID NO: 4431849 - DNA, 25 bp, Homo sapien
ctggttgggtttagaggaaagcact

SEQ ID NO: 4431850 - DNA, 25 bp, Homo sapien
gatccagtctacctgatggaaatgg

SEQ ID NO: 4431851 - DNA, 25 bp, Homo sapien
tgggaatagcagtaagtgtaggacc

SEQ ID NO: 4431852 - DNA, 25 bp, Homo sapien
tgatatactcatcaatggcatatag

SEQ ID NO: 4431853 - DNA, 25 bp, Homo sapien
tgtaggacctactgaagccttctcc

SEQ ID NO: 4431854 - DNA, 25 bp, Homo sapien
cctgtgtgcactgaaatgatatact

SEQ ID NO: 4431855 - DNA, 25 bp, Homo sapien
tactagtatcccctttgctgtatcc

SEQ ID NO: 4431856 - DNA, 25 bp, Homo sapien
atagaatgtgtattccgtgattgtt

SEQ ID NO: 4431857 - DNA, 25 bp, Homo sapien
tatgaactttcctactagtatcccc

SEQ ID NO: 4431858 - DNA, 25 bp, Homo sapien
gatttactgaggctcgttttgtggc

SEQ ID NO: 4431859 - DNA, 25 bp, Homo sapien
ggacacccaatgggcttaatgggag

SEQ ID NO: 4431860 - DNA, 25 bp, Homo sapien
tgggcttaatgggagggagacatgc

SEQ ID NO: 4431861 - DNA, 25 bp, Homo sapien
cacccaatgggcttaatgggaggga

SEQ ID NO: 4431862 - DNA, 25 bp, Homo sapien
gggcttaatgggagggagacatgcc

SEQ ID NO: 4431863 - DNA, 25 bp, Homo sapien
acaacaccagctaaagatgagtcta

SEQ ID NO: 4431864 - DNA, 25 bp, Homo sapien
caacaccagctaaagatgagtctaa

SEQ ID NO: 4431865 - DNA, 25 bp, Homo sapien
cacaacaccagctaaagatgagtct

SEQ ID NO: 4431866 - DNA, 25 bp, Homo sapien
ccacaacaccagctaaagatgagtc

SEQ ID NO: 4431867 - DNA, 25 bp, Homo sapien
tcagccgctttgaacagcatgaggc

SEQ ID NO: 4431868 - DNA, 25 bp, Homo sapien
ctctgggtggccgtgccctggccct

SEQ ID NO: 4431869 - DNA, 25 bp, Homo sapien
ccgctttgaacagcatgaggctctg

SEQ ID NO: 4431870 - DNA, 25 bp, Homo sapien
ctttgaacagcatgaggctctgggt

SEQ ID NO: 4431871 - DNA, 25 bp, Homo sapien
acaagagcatgtgatctccttaccc

SEQ ID NO: 4431872 - DNA, 25 bp, Homo sapien
ccctcagactgaggccgaaggcttg

SEQ ID NO: 4431873 - DNA, 25 bp, Homo sapien
tgcctgaggcatgtactctgtcttc

SEQ ID NO: 4431874 - DNA, 25 bp, Homo sapien
tggccttggccaattgcctgaggca

SEQ ID NO: 4431875 - DNA, 25 bp, Homo sapien
aacggatatgcagcaggttgaccca

SEQ ID NO: 4431876 - DNA, 25 bp, Homo sapien
tcccagccagagaaatacaacggat

SEQ ID NO: 4431877 - DNA, 25 bp, Homo sapien
tatctaccatccctctaagagctgc

SEQ ID NO: 4431878 - DNA, 25 bp, Homo sapien
ggttgacccaggctgactgtagcag

SEQ ID NO: 4431879 - DNA, 25 bp, Homo sapien
caggtctctggccagaccaggttct

SEQ ID NO: 4431880 - DNA, 25 bp, Homo sapien
ggatcatgtagaagtgctgcccaac

SEQ ID NO: 4431881 - DNA, 25 bp, Homo sapien
ctgcgtccatatcaagagtcatagg

SEQ ID NO: 4431882 - DNA, 25 bp, Homo sapien
cccgtggaccgaacaaagtctgaca

SEQ ID NO: 4431883 - DNA, 25 bp, Homo sapien
gcaatcagtttaatctagtatagca

SEQ ID NO: 4431884 - DNA, 25 bp, Homo sapien
atctagtatagcaacagtttaaagc

SEQ ID NO: 4431885 - DNA, 25 bp, Homo sapien
ctagtatagcaacagtttaaagcaa

SEQ ID NO: 4431886 - DNA, 25 bp, Homo sapien
aggcaatcagtttaatctagtatag

SEQ ID NO: 4431887 - DNA, 25 bp, Homo sapien
aaccagagagtctgaggtccccaga

SEQ ID NO: 4431888 - DNA, 25 bp, Homo sapien
tcagtcaagtgcaccagagagtagg

SEQ ID NO: 4431889 - DNA, 25 bp, Homo sapien
tttgtggccctagtgagaaatggca

SEQ ID NO: 4431890 - DNA, 25 bp, Homo sapien
ggatagattaccaccagagtcccag

SEQ ID NO: 4431891 - DNA, 25 bp, Homo sapien
gaatggcatggaattcctggacctc

SEQ ID NO: 4431892 - DNA, 25 bp, Homo sapien
ctggggctctcagccatgtgaaagg

SEQ ID NO: 4431893 - DNA, 25 bp, Homo sapien
ccatgtgaaagggaatggcatggaa

SEQ ID NO: 4431894 - DNA, 25 bp, Homo sapien
gcatggaattcctggacctcaggga

SEQ ID NO: 4431895 - DNA, 25 bp, Homo sapien
tgcctgcttggagattggaaacatg

SEQ ID NO: 4431896 - DNA, 25 bp, Homo sapien
gaacacagctgcctatagattgctt

SEQ ID NO: 4431897 - DNA, 25 bp, Homo sapien
tcttttaatctacagcacaggttgg

SEQ ID NO: 4431898 - DNA, 25 bp, Homo sapien
tgggagttcttaatatgtagcagcc

SEQ ID NO: 4431899 - DNA, 25 bp, Homo sapien
ataaggaagctggagtttgcatcgg

SEQ ID NO: 4431900 - DNA, 25 bp, Homo sapien
caccctatgtaggtaagataacacc

SEQ ID NO: 4431901 - DNA, 25 bp, Homo sapien
tcatgctctacgcagatggcacacc

SEQ ID NO: 4431902 - DNA, 25 bp, Homo sapien
cagtaggaaagcaacgtggagtagc

SEQ ID NO: 4431903 - DNA, 25 bp, Homo sapien
gttttatatttagggataccatcca

SEQ ID NO: 4431904 - DNA, 25 bp, Homo sapien
tataaatccaattatcccacaattt

SEQ ID NO: 4431905 - DNA, 25 bp, Homo sapien
taaatccaattatcccacaatttgt

SEQ ID NO: 4431906 - DNA, 25 bp, Homo sapien
tagggataccatccattttaaggta

SEQ ID NO: 4431907 - DNA, 25 bp, Homo sapien
aattaatggcatttgagcgacctgg

SEQ ID NO: 4431908 - DNA, 25 bp, Homo sapien
cctgtatgccaataatctaaggaaa

SEQ ID NO: 4431909 - DNA, 25 bp, Homo sapien
caaacaccacctgtatgccaataat

SEQ ID NO: 4431910 - DNA, 25 bp, Homo sapien
ttgtctctagaaaatcttttcctaa

SEQ ID NO: 4431911 - DNA, 25 bp, Homo sapien
gattgagagccgagtagcattccag

SEQ ID NO: 4431912 - DNA, 25 bp, Homo sapien
aaaatttgctggattgtacactagg

SEQ ID NO: 4431913 - DNA, 25 bp, Homo sapien
catcactgttgttgcacgttatcaa

SEQ ID NO: 4431914 - DNA, 25 bp, Homo sapien
aaccagcagcgtacaaatttaccag

SEQ ID NO: 4431915 - DNA, 25 bp, Homo sapien
caggaggttgtaagaagtggattcc

SEQ ID NO: 4431916 - DNA, 25 bp, Homo sapien
cagcacatctgttgataccttggtt

SEQ ID NO: 4431917 - DNA, 25 bp, Homo sapien
taactgcagatgtcgtggaagagaa

SEQ ID NO: 4431918 - DNA, 25 bp, Homo sapien
caaattatcgacattaacaggaggt

SEQ ID NO: 4431919 - DNA, 25 bp, Homo sapien
tgaccagtgattctccggtctccct

SEQ ID NO: 4431920 - DNA, 25 bp, Homo sapien
agttaacatcgctgattaaggtggc

SEQ ID NO: 4431921 - DNA, 25 bp, Homo sapien
gaagctgacacgtgtccatacagac

SEQ ID NO: 4431922 - DNA, 25 bp, Homo sapien
tttgttatagtgacctgtgctcagt

SEQ ID NO: 4431923 - DNA, 25 bp, Homo sapien
gcagcatgaaaacagggggcgtggc

SEQ ID NO: 4431924 - DNA, 25 bp, Homo sapien
cagcatgaaaacagggggcgtggca

SEQ ID NO: 4431925 - DNA, 25 bp, Homo sapien
aaaatggtcgatccagagatgtgcc

SEQ ID NO: 4431926 - DNA, 25 bp, Homo sapien
tctctctggacctgcgaggaactca

SEQ ID NO: 4431927 - DNA, 25 bp, Homo sapien
tgatggcctggaccccataaaggct

SEQ ID NO: 4431928 - DNA, 25 bp, Homo sapien
tggactgcccagatatgctgccatg

SEQ ID NO: 4431929 - DNA, 25 bp, Homo sapien
taagtcttgtgcatttcactgaaca

SEQ ID NO: 4431930 - DNA, 25 bp, Homo sapien
tcaaaacctattaatggcataccta

SEQ ID NO: 4431931 - DNA, 25 bp, Homo sapien
agtttcagacacaaggtttgtctat

SEQ ID NO: 4431932 - DNA, 25 bp, Homo sapien
cactgaacatagattttaccataaa

SEQ ID NO: 4431933 - DNA, 25 bp, Homo sapien
tgactagttaggcagaggacacata

SEQ ID NO: 4431934 - DNA, 25 bp, Homo sapien
gaatactatccaaggagtcaccatg

SEQ ID NO: 4431935 - DNA, 25 bp, Homo sapien
tctcagtggtgtactgggttggccc

SEQ ID NO: 4431936 - DNA, 25 bp, Homo sapien
ttggcaaatctagtcctcaaaagta

SEQ ID NO: 4431937 - DNA, 25 bp, Homo sapien
agaggcagtccggtgtgcctcagga

SEQ ID NO: 4431938 - DNA, 25 bp, Homo sapien
cccagaggcagtccggtgtgcctca

SEQ ID NO: 4431939 - DNA, 25 bp, Homo sapien
ccagaggcagtccggtgtgcctcag

SEQ ID NO: 4431940 - DNA, 25 bp, Homo sapien
cagaggcagtccggtgtgcctcagg

SEQ ID NO: 4431941 - DNA, 25 bp, Homo sapien
gctccttctggaactctagggctgt

SEQ ID NO: 4431942 - DNA, 25 bp, Homo sapien
ggctccttctggaactctagggctg

SEQ ID NO: 4431943 - DNA, 25 bp, Homo sapien
tttcctgttcctcttggctccttct

SEQ ID NO: 4431944 - DNA, 25 bp, Homo sapien
cctgttcctcttggctccttctgga

SEQ ID NO: 4431945 - DNA, 25 bp, Homo sapien
cagaagcctggccagccaagactca

SEQ ID NO: 4431946 - DNA, 25 bp, Homo sapien
cttctattgccccttgggccccctg

SEQ ID NO: 4431947 - DNA, 25 bp, Homo sapien
ccccagaagcctggccagccaagac

SEQ ID NO: 4431948 - DNA, 25 bp, Homo sapien
ctgtccccagaagcctggccagcca

SEQ ID NO: 4431949 - DNA, 25 bp, Homo sapien
atgatgtagggccctccccgtggat

SEQ ID NO: 4431950 - DNA, 25 bp, Homo sapien
agatgatgtagggccctccccgtgg

SEQ ID NO: 4431951 - DNA, 25 bp, Homo sapien
ggtagcagatgatgtagggccctcc

SEQ ID NO: 4431952 - DNA, 25 bp, Homo sapien
gatgtagggccctccccgtggatac

SEQ ID NO: 4431953 - DNA, 25 bp, Homo sapien
gggagaggtagagaaaacgatcatc

SEQ ID NO: 4431954 - DNA, 25 bp, Homo sapien
ggtagagaaaacgatcatcagggct

SEQ ID NO: 4431955 - DNA, 25 bp, Homo sapien
agagaaaacgatcatcagggctggg

SEQ ID NO: 4431956 - DNA, 25 bp, Homo sapien
aaaacgatcatcagggctggggtgt

SEQ ID NO: 4431957 - DNA, 25 bp, Homo sapien
ttgggttcaggactactgctggctc

SEQ ID NO: 4431958 - DNA, 25 bp, Homo sapien
ttcaggactactgctggctcttggc

SEQ ID NO: 4431959 - DNA, 25 bp, Homo sapien
cttgggttcaggactactgctggct

SEQ ID NO: 4431960 - DNA, 25 bp, Homo sapien
ggttcaggactactgctggctcttg

SEQ ID NO: 4431961 - DNA, 25 bp, Homo sapien
cttcagttgactgatttttacggac

SEQ ID NO: 4431962 - DNA, 25 bp, Homo sapien
tggtgttcttcagttgactgatttt

SEQ ID NO: 4431963 - DNA, 25 bp, Homo sapien
gttcttcagttgactgatttttacg

SEQ ID NO: 4431964 - DNA, 25 bp, Homo sapien
ggtgttcttcagttgactgattttt

SEQ ID NO: 4431965 - DNA, 25 bp, Homo sapien
tacttcttccagctgatgttccact

SEQ ID NO: 4431966 - DNA, 25 bp, Homo sapien
ttcttccagctgatgttccacttgt

SEQ ID NO: 4431967 - DNA, 25 bp, Homo sapien
gttacttcttccagctgatgttcca

SEQ ID NO: 4431968 - DNA, 25 bp, Homo sapien
ttccagctgatgttccacttgtttc

SEQ ID NO: 4431969 - DNA, 25 bp, Homo sapien
agacgcagagacggcacagcaagag

SEQ ID NO: 4431970 - DNA, 25 bp, Homo sapien
gagacgcagagacggcacagcaaga

SEQ ID NO: 4431971 - DNA, 25 bp, Homo sapien
taggaagaggaagacagagctctta

SEQ ID NO: 4431972 - DNA, 25 bp, Homo sapien
tataggaagaggaagacagagctct

SEQ ID NO: 4431973 - DNA, 25 bp, Homo sapien
ctataggaagaggaagacagagctc

SEQ ID NO: 4431974 - DNA, 25 bp, Homo sapien
aggaagaggaagacagagctcttac

SEQ ID NO: 4431975 - DNA, 25 bp, Homo sapien
ctctagctcccttttggctttttgt

SEQ ID NO: 4431976 - DNA, 25 bp, Homo sapien
caatgaatattgcaggcagcccgcc

SEQ ID NO: 4431977 - DNA, 25 bp, Homo sapien
atgaatattgcaggcagcccgccag

SEQ ID NO: 4431978 - DNA, 25 bp, Homo sapien
gcaatgaatattgcaggcagcccgc

SEQ ID NO: 4431979 - DNA, 25 bp, Homo sapien
ctgcaatgaatattgcaggcagccc

SEQ ID NO: 4431980 - DNA, 25 bp, Homo sapien
cttctcctctgtggtggtgacagca

SEQ ID NO: 4431981 - DNA, 25 bp, Homo sapien
gatctccttctcctctgtggtggtg

SEQ ID NO: 4431982 - DNA, 25 bp, Homo sapien
actgatctccttctcctctgtggtg

SEQ ID NO: 4431983 - DNA, 25 bp, Homo sapien
ctccttctcctctgtggtggtgaca

SEQ ID NO: 4431984 - DNA, 25 bp, Homo sapien
tagctatgccttcagccgtgccttc

SEQ ID NO: 4431985 - DNA, 25 bp, Homo sapien
ctcacctgtgttagctatgccttca

SEQ ID NO: 4431986 - DNA, 25 bp, Homo sapien
aaacctcacctgtgttagctatgcc

SEQ ID NO: 4431987 - DNA, 25 bp, Homo sapien
agctatgccttcagccgtgccttct

SEQ ID NO: 4431988 - DNA, 25 bp, Homo sapien
tgttgagcatagttatctctctgta

SEQ ID NO: 4431989 - DNA, 25 bp, Homo sapien
ttgttgagcatagttatctctctgt

SEQ ID NO: 4431990 - DNA, 25 bp, Homo sapien
tatctctctgtaattggacttgttg

SEQ ID NO: 4431991 - DNA, 25 bp, Homo sapien
ttgagcatagttatctctctgtaat

SEQ ID NO: 4431992 - DNA, 25 bp, Homo sapien
tacccgatgtgtataatgctccttc

SEQ ID NO: 4431993 - DNA, 25 bp, Homo sapien
cgatgtgtataatgctccttctctg

SEQ ID NO: 4431994 - DNA, 25 bp, Homo sapien
cctctacccgatgtgtataatgctc

SEQ ID NO: 4431995 - DNA, 25 bp, Homo sapien
ccagcccctctacccgatgtgtata

SEQ ID NO: 4431996 - DNA, 25 bp, Homo sapien
tggagctctcctgccactctatcta

SEQ ID NO: 4431997 - DNA, 25 bp, Homo sapien
tagttccttcctcaggtgctgcggc

SEQ ID NO: 4431998 - DNA, 25 bp, Homo sapien
gagctctcctgccactctatctagt

SEQ ID NO: 4431999 - DNA, 25 bp, Homo sapien
cactctatctagttccttcctcagg

SEQ ID NO: 4432000 - DNA, 25 bp, Homo sapien
ctctcgtcttgtccccagttcagga

SEQ ID NO: 4432001 - DNA, 25 bp, Homo sapien
gctctcgaatcctctcgtcttgtcc

SEQ ID NO: 4432002 - DNA, 25 bp, Homo sapien
gtcttgtccccagttcaggagactt

SEQ ID NO: 4432003 - DNA, 25 bp, Homo sapien
ctcgaatcctctcgtcttgtcccca

SEQ ID NO: 4432004 - DNA, 25 bp, Homo sapien
caagcttctcctgtagctcctttac

SEQ ID NO: 4432005 - DNA, 25 bp, Homo sapien
ctgctccaactgcagtgcgctcttg

SEQ ID NO: 4432006 - DNA, 25 bp, Homo sapien
gcagtgcgctcttgttctcattgtt

SEQ ID NO: 4432007 - DNA, 25 bp, Homo sapien
cttctcctgtagctcctttacttgc

SEQ ID NO: 4432008 - DNA, 25 bp, Homo sapien
tgcctcccagccctttttggatggg

SEQ ID NO: 4432009 - DNA, 25 bp, Homo sapien
tggatggggtggaggtttccgtgtc

SEQ ID NO: 4432010 - DNA, 25 bp, Homo sapien
ccagccctttttggatggggtggag

SEQ ID NO: 4432011 - DNA, 25 bp, Homo sapien
gcctgcctcccagccctttttggat

SEQ ID NO: 4432012 - DNA, 25 bp, Homo sapien
ctgttgcaggcactgcctgtacagc

SEQ ID NO: 4432013 - DNA, 25 bp, Homo sapien
gctgggtctgttgcaggcactgcct

SEQ ID NO: 4432014 - DNA, 25 bp, Homo sapien
tgtttcattagctgggtctgttgca

SEQ ID NO: 4432015 - DNA, 25 bp, Homo sapien
gctgcagctgtttcattagctgggt

SEQ ID NO: 4432016 - DNA, 25 bp, Homo sapien
ctcagctgggccgttagctgctggt

SEQ ID NO: 4432017 - DNA, 25 bp, Homo sapien
tgctggctggccgcttccaggtgct

SEQ ID NO: 4432018 - DNA, 25 bp, Homo sapien
gctggctggccgcttccaggtgctc

SEQ ID NO: 4432019 - DNA, 25 bp, Homo sapien
agctgggccgttagctgctggttct

SEQ ID NO: 4432020 - DNA, 25 bp, Homo sapien
ttgctattccgcccaggcacactcc

SEQ ID NO: 4432021 - DNA, 25 bp, Homo sapien
cacactcccactactggtcgatgtg

SEQ ID NO: 4432022 - DNA, 25 bp, Homo sapien
cactcccactactggtcgatgtggg

SEQ ID NO: 4432023 - DNA, 25 bp, Homo sapien
gctattccgcccaggcacactccca

SEQ ID NO: 4432024 - DNA, 25 bp, Homo sapien
aggtcctctgggacactcggcatgg

SEQ ID NO: 4432025 - DNA, 25 bp, Homo sapien
ctctgggacactcggcatgggccga

SEQ ID NO: 4432026 - DNA, 25 bp, Homo sapien
ccaggtcctctgggacactcggcat

SEQ ID NO: 4432027 - DNA, 25 bp, Homo sapien
cgaggtgcctcctccccgtcactgt

SEQ ID NO: 4432028 - DNA, 25 bp, Homo sapien
tttcacctgctcttgtaactgtgcc

SEQ ID NO: 4432029 - DNA, 25 bp, Homo sapien
cctgctcttgtaactgtgcctgctt

SEQ ID NO: 4432030 - DNA, 25 bp, Homo sapien
gctctttcacctgctcttgtaactg

SEQ ID NO: 4432031 - DNA, 25 bp, Homo sapien
gcctgcttctcctgggcactagctc

SEQ ID NO: 4432032 - DNA, 25 bp, Homo sapien
ctgccctcaggtggcattttcaagt

SEQ ID NO: 4432033 - DNA, 25 bp, Homo sapien
caaaatattgcagtcacatctcggc

SEQ ID NO: 4432034 - DNA, 25 bp, Homo sapien
aaatattgcagtcacatctcggcag

SEQ ID NO: 4432035 - DNA, 25 bp, Homo sapien
gagccaaaatattgcagtcacatct

SEQ ID NO: 4432036 - DNA, 25 bp, Homo sapien
ctggagccaaaatattgcagtcaca

SEQ ID NO: 4432037 - DNA, 25 bp, Homo sapien
caggtctgccttctcctccagttgg

SEQ ID NO: 4432038 - DNA, 25 bp, Homo sapien
ttctcctccagttggtccataaagc

SEQ ID NO: 4432039 - DNA, 25 bp, Homo sapien
tcctccagttggtccataaagctgc

SEQ ID NO: 4432040 - DNA, 25 bp, Homo sapien
ggtctgccttctcctccagttggtc

SEQ ID NO: 4432041 - DNA, 25 bp, Homo sapien
tggcatctatctcgccagtggtgga

SEQ ID NO: 4432042 - DNA, 25 bp, Homo sapien
tctcgccagtggtggatgaagcaaa

SEQ ID NO: 4432043 - DNA, 25 bp, Homo sapien
tgatggcatctatctcgccagtggt

SEQ ID NO: 4432044 - DNA, 25 bp, Homo sapien
atctatctcgccagtggtggatgaa

SEQ ID NO: 4432045 - DNA, 25 bp, Homo sapien
atctttggcacggccccctggttct

SEQ ID NO: 4432046 - DNA, 25 bp, Homo sapien
tctttggcacggccccctggttctg

SEQ ID NO: 4432047 - DNA, 25 bp, Homo sapien
tctcctccctgagctccagcctgat

SEQ ID NO: 4432048 - DNA, 25 bp, Homo sapien
tccctgagctccagcctgatggtgt

SEQ ID NO: 4432049 - DNA, 25 bp, Homo sapien
gctccagcctgatggtgtcctccta

SEQ ID NO: 4432050 - DNA, 25 bp, Homo sapien
ttcatctcctccctgagctccagcc

SEQ ID NO: 4432051 - DNA, 25 bp, Homo sapien
atctgctgcagctccagcagcttca

SEQ ID NO: 4432052 - DNA, 25 bp, Homo sapien
catctgctgcagctccagcagcttc

SEQ ID NO: 4432053 - DNA, 25 bp, Homo sapien
tctgctgcagctccagcagcttcac

SEQ ID NO: 4432054 - DNA, 25 bp, Homo sapien
ccattgttgtagttgctataagccg

SEQ ID NO: 4432055 - DNA, 25 bp, Homo sapien
tgtgcccattgttgtagttgctata

SEQ ID NO: 4432056 - DNA, 25 bp, Homo sapien
gcccattgttgtagttgctataagc

SEQ ID NO: 4432057 - DNA, 25 bp, Homo sapien
agtggccaggaattttctgtgccca

SEQ ID NO: 4432058 - DNA, 25 bp, Homo sapien
ggccatatctctaataagcgccagt

SEQ ID NO: 4432059 - DNA, 25 bp, Homo sapien
cattaaagctgattaaaaggttcca

SEQ ID NO: 4432060 - DNA, 25 bp, Homo sapien
aaatggcaaaatggccatatctcta

SEQ ID NO: 4432061 - DNA, 25 bp, Homo sapien
gacagcattaaagctgattaaaagg

SEQ ID NO: 4432062 - DNA, 25 bp, Homo sapien
gctctgggtccttggcaattcctca

SEQ ID NO: 4432063 - DNA, 25 bp, Homo sapien
actccaaagccaagctcacctcctc

SEQ ID NO: 4432064 - DNA, 25 bp, Homo sapien
ttggcaattcctcaggttcccagca

SEQ ID NO: 4432065 - DNA, 25 bp, Homo sapien
tgtgttttgggctctctgggtggtc

SEQ ID NO: 4432066 - DNA, 25 bp, Homo sapien
gctgcggcggtcttgcatgactctg

SEQ ID NO: 4432067 - DNA, 25 bp, Homo sapien
ggaaggaaaatgcacacgctgcggc

SEQ ID NO: 4432068 - DNA, 25 bp, Homo sapien
tatgatgatgttcagagattcatca

SEQ ID NO: 4432069 - DNA, 25 bp, Homo sapien
ggtcttgcatgactctgttgtggaa

SEQ ID NO: 4432070 - DNA, 25 bp, Homo sapien
gaatgttgcagccttcacttccgcc

SEQ ID NO: 4432071 - DNA, 25 bp, Homo sapien
ttttccaaagtcaccatcaccccag

SEQ ID NO: 4432072 - DNA, 25 bp, Homo sapien
ctggggaatgttgcagccttcactt

SEQ ID NO: 4432073 - DNA, 25 bp, Homo sapien
gttgcagccttcacttccgccccgg

SEQ ID NO: 4432074 - DNA, 25 bp, Homo sapien
cttggtgagcgccagtaggaactga

SEQ ID NO: 4432075 - DNA, 25 bp, Homo sapien
gtgagcgccagtaggaactgagctc

SEQ ID NO: 4432076 - DNA, 25 bp, Homo sapien
cggcttccgaacgtgcacgtcagag

SEQ ID NO: 4432077 - DNA, 25 bp, Homo sapien
ctgcggcttccgaacgtgcacgtca

SEQ ID NO: 4432078 - DNA, 25 bp, Homo sapien
acctgcggcttccgaacgtgcacgt

SEQ ID NO: 4432079 - DNA, 25 bp, Homo sapien
accacctgcggcttccgaacgtgca

SEQ ID NO: 4432080 - DNA, 25 bp, Homo sapien
ggcttcctgttaaccgtggtcgtgc

SEQ ID NO: 4432081 - DNA, 25 bp, Homo sapien
tggtcgtgccattgccctgctggcc

SEQ ID NO: 4432082 - DNA, 25 bp, Homo sapien
tctggccttctaagccttgcacgag

SEQ ID NO: 4432083 - DNA, 25 bp, Homo sapien
aagaggacgggctcgtggacagagg

SEQ ID NO: 4432084 - DNA, 25 bp, Homo sapien
gaagaattgacatctgaaggcacgc

SEQ ID NO: 4432085 - DNA, 25 bp, Homo sapien
agcagaagaattgacatctgaaggc

SEQ ID NO: 4432086 - DNA, 25 bp, Homo sapien
tagccatcgcaaatgcgtccgaagc

SEQ ID NO: 4432087 - DNA, 25 bp, Homo sapien
catcgcaaatgcgtccgaagcagcc

SEQ ID NO: 4432088 - DNA, 25 bp, Homo sapien
gccatcgcaaatgcgtccgaagcag

SEQ ID NO: 4432089 - DNA, 25 bp, Homo sapien
agccatcgcaaatgcgtccgaagca

SEQ ID NO: 4432090 - DNA, 25 bp, Homo sapien
cgggtcatccgtcactgtgataaat

SEQ ID NO: 4432091 - DNA, 25 bp, Homo sapien
tgtgataaatggcccagcggaggct

SEQ ID NO: 4432092 - DNA, 25 bp, Homo sapien
aagatgcttgcagctcccgggtcat

SEQ ID NO: 4432093 - DNA, 25 bp, Homo sapien
agatgcttgcagctcccgggtcatc

SEQ ID NO: 4432094 - DNA, 25 bp, Homo sapien
acaaagcgaaaaaagaatgcctctt

SEQ ID NO: 4432095 - DNA, 25 bp, Homo sapien
tacaaagcgaaaaaagaatgcctct

SEQ ID NO: 4432096 - DNA, 25 bp, Homo sapien
caaagcgaaaaaagaatgcctcttt

SEQ ID NO: 4432097 - DNA, 25 bp, Homo sapien
cctcaaggttgctgttggggtcatc

SEQ ID NO: 4432098 - DNA, 25 bp, Homo sapien
tcctcaaggttgctgttggggtcat

SEQ ID NO: 4432099 - DNA, 25 bp, Homo sapien
ctcaaggttgctgttggggtcatcg

SEQ ID NO: 4432100 - DNA, 25 bp, Homo sapien
ggtaatcagaatcaaggtaatctgt

SEQ ID NO: 4432101 - DNA, 25 bp, Homo sapien
ctttggtaatcagaatcaaggtaat

SEQ ID NO: 4432102 - DNA, 25 bp, Homo sapien
taatcagaatcaaggtaatctgtat

SEQ ID NO: 4432103 - DNA, 25 bp, Homo sapien
ttggtaatcagaatcaaggtaatct

SEQ ID NO: 4432104 - DNA, 25 bp, Homo sapien
tgaatttgtgagaataaacgcggcc

SEQ ID NO: 4432105 - DNA, 25 bp, Homo sapien
gctgaatttgtgagaataaacgcgg

SEQ ID NO: 4432106 - DNA, 25 bp, Homo sapien
aatttgtgagaataaacgcggccac

SEQ ID NO: 4432107 - DNA, 25 bp, Homo sapien
cgggctgaatttgtgagaataaacg

SEQ ID NO: 4432108 - DNA, 25 bp, Homo sapien
tgagattcacgtaccaccattcctg

SEQ ID NO: 4432109 - DNA, 25 bp, Homo sapien
ggctgttgagattcacgtaccacca

SEQ ID NO: 4432110 - DNA, 25 bp, Homo sapien
tgttgagattcacgtaccaccattc

SEQ ID NO: 4432111 - DNA, 25 bp, Homo sapien
gctgttgagattcacgtaccaccat

SEQ ID NO: 4432112 - DNA, 25 bp, Homo sapien
caagtagccacccagagaaatggat

SEQ ID NO: 4432113 - DNA, 25 bp, Homo sapien
ccaggaaggacatctcatgcccagc

SEQ ID NO: 4432114 - DNA, 25 bp, Homo sapien
gtagccacccagagaaatggatgaa

SEQ ID NO: 4432115 - DNA, 25 bp, Homo sapien
aatggatgaagtgtctgcagccagg

SEQ ID NO: 4432116 - DNA, 25 bp, Homo sapien
tcctccaactcggtgacacagagct

SEQ ID NO: 4432117 - DNA, 25 bp, Homo sapien
atcctccaactcggtgacacagagc

SEQ ID NO: 4432118 - DNA, 25 bp, Homo sapien
tcggtgtaagggtggctactctcca

SEQ ID NO: 4432119 - DNA, 25 bp, Homo sapien
ggtatcttcactgtgccactggtgg

SEQ ID NO: 4432120 - DNA, 25 bp, Homo sapien
tcgtcggtgtaagggtggctactct

SEQ ID NO: 4432121 - DNA, 25 bp, Homo sapien
ccactggtggaggtgtcgtcggtgt

SEQ ID NO: 4432122 - DNA, 25 bp, Homo sapien
caacttctggcgtgtccagagaact

SEQ ID NO: 4432123 - DNA, 25 bp, Homo sapien
gagcggcattggaggtgaggagcac

SEQ ID NO: 4432124 - DNA, 25 bp, Homo sapien
agagaactggagaaccgcttggtgt

SEQ ID NO: 4432125 - DNA, 25 bp, Homo sapien
cgcttggtgtggagaacccgcacat

SEQ ID NO: 4432126 - DNA, 25 bp, Homo sapien
gtgtgcagccaagtcagatggcagc

SEQ ID NO: 4432127 - DNA, 25 bp, Homo sapien
ccatccatgattgtgagagggtcgt

SEQ ID NO: 4432128 - DNA, 25 bp, Homo sapien
tgaccacacggagacgatcctgttg

SEQ ID NO: 4432129 - DNA, 25 bp, Homo sapien
ggagcactgccggtcaaattccacc

SEQ ID NO: 4432130 - DNA, 25 bp, Homo sapien
tcgtggtgccactctgaggagcact

SEQ ID NO: 4432131 - DNA, 25 bp, Homo sapien
ctgaccgcatggagacaatcctggc

SEQ ID NO: 4432132 - DNA, 25 bp, Homo sapien
tcctggctcaacctcctgtccttac

SEQ ID NO: 4432133 - DNA, 25 bp, Homo sapien
catggagacaatcctggctcaacct

SEQ ID NO: 4432134 - DNA, 25 bp, Homo sapien
ccgcatggagacaatcctggctcaa

SEQ ID NO: 4432135 - DNA, 25 bp, Homo sapien
gaaccctagctctcccatcaaaagg

SEQ ID NO: 4432136 - DNA, 25 bp, Homo sapien
cccatgtgtgtggttcagcacagcc

SEQ ID NO: 4432137 - DNA, 25 bp, Homo sapien
gatgtttcccgggaatgctctgata

SEQ ID NO: 4432138 - DNA, 25 bp, Homo sapien
aatgctctgatacaaccaggtggcc

SEQ ID NO: 4432139 - DNA, 25 bp, Homo sapien
ccagccgttcacaggcccgtcgctg

SEQ ID NO: 4432140 - DNA, 25 bp, Homo sapien
agccccagccgttcacaggcccgtc

SEQ ID NO: 4432141 - DNA, 25 bp, Homo sapien
ccgttcacaggcccgtcgctgatga

SEQ ID NO: 4432142 - DNA, 25 bp, Homo sapien
gttcacaggcccgtcgctgatgaac

SEQ ID NO: 4432143 - DNA, 25 bp, Homo sapien
aaagcctaagaatgacaccagcaac

SEQ ID NO: 4432144 - DNA, 25 bp, Homo sapien
accagcaacaactccttccacacca

SEQ ID NO: 4432145 - DNA, 25 bp, Homo sapien
ttggacggctgggacagttctctgt

SEQ ID NO: 4432146 - DNA, 25 bp, Homo sapien
ggagtgtgagcctgatagttggacg

SEQ ID NO: 4432147 - DNA, 25 bp, Homo sapien
ggcaagggacgacacttctgttaga

SEQ ID NO: 4432148 - DNA, 25 bp, Homo sapien
ccagcaaggccacaaggcaagggac

SEQ ID NO: 4432149 - DNA, 25 bp, Homo sapien
tgccagcaaggccacaaggcaaggg

SEQ ID NO: 4432150 - DNA, 25 bp, Homo sapien
gccagcaaggccacaaggcaaggga

SEQ ID NO: 4432151 - DNA, 25 bp, Homo sapien
ttctccaagcagcctatttatgtta

SEQ ID NO: 4432152 - DNA, 25 bp, Homo sapien
ctccaagcagcctatttatgttaat

SEQ ID NO: 4432153 - DNA, 25 bp, Homo sapien
ccaagcagcctatttatgttaattg

SEQ ID NO: 4432154 - DNA, 25 bp, Homo sapien
caagcagcctatttatgttaattga

SEQ ID NO: 4432155 - DNA, 25 bp, Homo sapien
tttcaccaaagcagcaagagcacta

SEQ ID NO: 4432156 - DNA, 25 bp, Homo sapien
ctttcaccaaagcagcaagagcact

SEQ ID NO: 4432157 - DNA, 25 bp, Homo sapien
ttcaccaaagcagcaagagcactac

SEQ ID NO: 4432158 - DNA, 25 bp, Homo sapien
tcacaataggatcttcatattcaaa

SEQ ID NO: 4432159 - DNA, 25 bp, Homo sapien
cacaataggatcttcatattcaaac

SEQ ID NO: 4432160 - DNA, 25 bp, Homo sapien
gagcagctgtttgccacccctcaca

SEQ ID NO: 4432161 - DNA, 25 bp, Homo sapien
ttgccacccctcacaataggatctt

SEQ ID NO: 4432162 - DNA, 25 bp, Homo sapien
aggcagagtgtccagctccaggtca

SEQ ID NO: 4432163 - DNA, 25 bp, Homo sapien
ccaggcccacttgtgcgtctcggca

SEQ ID NO: 4432164 - DNA, 25 bp, Homo sapien
aggcccacttgtgcgtctcggcaca

SEQ ID NO: 4432165 - DNA, 25 bp, Homo sapien
ccacttgtgcgtctcggcacagcaa

SEQ ID NO: 4432166 - DNA, 25 bp, Homo sapien
gtgttcttttgtcaagggccacagc

SEQ ID NO: 4432167 - DNA, 25 bp, Homo sapien
ggtgttcttttgtcaagggccacag

SEQ ID NO: 4432168 - DNA, 25 bp, Homo sapien
aagtgattccaaaatatcatgcaat

SEQ ID NO: 4432169 - DNA, 25 bp, Homo sapien
aaagtgattccaaaatatcatgcaa

SEQ ID NO: 4432170 - DNA, 25 bp, Homo sapien
caaaagtgattccaaaatatcatgc

SEQ ID NO: 4432171 - DNA, 25 bp, Homo sapien
aaaagtgattccaaaatatcatgca

SEQ ID NO: 4432172 - DNA, 25 bp, Homo sapien
gccattaattcacgaattttcttag

SEQ ID NO: 4432173 - DNA, 25 bp, Homo sapien
aacatcccatgttttcgctgtctgc

SEQ ID NO: 4432174 - DNA, 25 bp, Homo sapien
cgctgtctgccattaattcacgaat

SEQ ID NO: 4432175 - DNA, 25 bp, Homo sapien
tttaaaaatgtcttggctctcaggc

SEQ ID NO: 4432176 - DNA, 25 bp, Homo sapien
gcagacagattccaatcatctggtc

SEQ ID NO: 4432177 - DNA, 25 bp, Homo sapien
cagacagattccaatcatctggtcg

SEQ ID NO: 4432178 - DNA, 25 bp, Homo sapien
agacagattccaatcatctggtcgc

SEQ ID NO: 4432179 - DNA, 25 bp, Homo sapien
ttcacagggagagggaattttgact

SEQ ID NO: 4432180 - DNA, 25 bp, Homo sapien
tctgagagttgtgagggcttcacag

SEQ ID NO: 4432181 - DNA, 25 bp, Homo sapien
tgcatgggtctgagagttgtgaggg

SEQ ID NO: 4432182 - DNA, 25 bp, Homo sapien
ggagagggaattttgacttttgcac

SEQ ID NO: 4432183 - DNA, 25 bp, Homo sapien
tgtcacagcagagggtctgttcccc

SEQ ID NO: 4432184 - DNA, 25 bp, Homo sapien
acagcagagggtctgttcccctccg

SEQ ID NO: 4432185 - DNA, 25 bp, Homo sapien
cagagggtctgttcccctccgatta

SEQ ID NO: 4432186 - DNA, 25 bp, Homo sapien
cagctgtcacagcagagggtctgtt

SEQ ID NO: 4432187 - DNA, 25 bp, Homo sapien
tgccacctgcaccatacccagtggc

SEQ ID NO: 4432188 - DNA, 25 bp, Homo sapien
ctgcaccatacccagtggcatacag

SEQ ID NO: 4432189 - DNA, 25 bp, Homo sapien
caatgcctagtctgccacctgcacc

SEQ ID NO: 4432190 - DNA, 25 bp, Homo sapien
acctgcaccatacccagtggcatac

SEQ ID NO: 4432191 - DNA, 25 bp, Homo sapien
ttctgcctcaccccaagagtaaact

SEQ ID NO: 4432192 - DNA, 25 bp, Homo sapien
tgaagacagggcaaggcagtgcttt

SEQ ID NO: 4432193 - DNA, 25 bp, Homo sapien
gaagacagggcaaggcagtgctttc

SEQ ID NO: 4432194 - DNA, 25 bp, Homo sapien
taagtcatctccagcagtgaattcc

SEQ ID NO: 4432195 - DNA, 25 bp, Homo sapien
gcgtacaaggtaaagtaatctccag

SEQ ID NO: 4432196 - DNA, 25 bp, Homo sapien
taatctccagtgcaggaggtgaagt

SEQ ID NO: 4432197 - DNA, 25 bp, Homo sapien
catatttgttagtgccttaggaggg

SEQ ID NO: 4432198 - DNA, 25 bp, Homo sapien
gcctgagataacaatactggttggg

SEQ ID NO: 4432199 - DNA, 25 bp, Homo sapien
ttcctggctggatctgaggccttac

SEQ ID NO: 4432200 - DNA, 25 bp, Homo sapien
caatccaggaaatgagacagccaga

SEQ ID NO: 4432201 - DNA, 25 bp, Homo sapien
cacagagggctctagcaaagggact

SEQ ID NO: 4432202 - DNA, 25 bp, Homo sapien
ggcattctagcctggagctattccc

SEQ ID NO: 4432203 - DNA, 25 bp, Homo sapien
ccaaaacaacaagttgagacacatt

SEQ ID NO: 4432204 - DNA, 25 bp, Homo sapien
taagcacttcggagattaaccaaaa

SEQ ID NO: 4432205 - DNA, 25 bp, Homo sapien
tctcagttagggcacttggatttgt

SEQ ID NO: 4432206 - DNA, 25 bp, Homo sapien
tgatcaagtagctcattcaatggtc

SEQ ID NO: 4432207 - DNA, 25 bp, Homo sapien
gactatatatgctctgaatttgtga

SEQ ID NO: 4432208 - DNA, 25 bp, Homo sapien
caaagaagtgtggtaatgggctcat

SEQ ID NO: 4432209 - DNA, 25 bp, Homo sapien
tcagagactcagttatagtggcagc

SEQ ID NO: 4432210 - DNA, 25 bp, Homo sapien
atatctcctacccacctatacatga

SEQ ID NO: 4432211 - DNA, 25 bp, Homo sapien
acctatacatgattagcctccttca

SEQ ID NO: 4432212 - DNA, 25 bp, Homo sapien
cctttgctacaagagtggtgcattt

SEQ ID NO: 4432213 - DNA, 25 bp, Homo sapien
acccagccccatgaaagactgtttt

SEQ ID NO: 4432214 - DNA, 25 bp, Homo sapien
tgagttcccaagctacggtgcaggc

SEQ ID NO: 4432215 - DNA, 25 bp, Homo sapien
gaaaaagcacctaggagagcgtcca

SEQ ID NO: 4432216 - DNA, 25 bp, Homo sapien
tcaagaggccaagctgataccagtt

SEQ ID NO: 4432217 - DNA, 25 bp, Homo sapien
tgtattcgagggttgccaagaccac

SEQ ID NO: 4432218 - DNA, 25 bp, Homo sapien
caggtgccatctagctgtgtccaca

SEQ ID NO: 4432219 - DNA, 25 bp, Homo sapien
gggctcttttctcataacctaatca

SEQ ID NO: 4432220 - DNA, 25 bp, Homo sapien
aaagcattagtcctgagggctcttt

SEQ ID NO: 4432221 - DNA, 25 bp, Homo sapien
gacacaaacgttcggacaataggac

SEQ ID NO: 4432222 - DNA, 25 bp, Homo sapien
gttgtatccaattgcccttctgtca

SEQ ID NO: 4432223 - DNA, 25 bp, Homo sapien
caaggaagtcttatccctgaatctc

SEQ ID NO: 4432224 - DNA, 25 bp, Homo sapien
actttggaatcctcatgagttttca

SEQ ID NO: 4432225 - DNA, 25 bp, Homo sapien
gactgggagcatcctggtcttccat

SEQ ID NO: 4432226 - DNA, 25 bp, Homo sapien
gttggatgtcgggttccaggaaggc

SEQ ID NO: 4432227 - DNA, 25 bp, Homo sapien
atagttggatgtcgggttccaggaa

SEQ ID NO: 4432228 - DNA, 25 bp, Homo sapien
tggatgtcgggttccaggaaggctt

SEQ ID NO: 4432229 - DNA, 25 bp, Homo sapien
agatagttggatgtcgggttccagg

SEQ ID NO: 4432230 - DNA, 25 bp, Homo sapien
caaaaaaatctttgtacttcacatt

SEQ ID NO: 4432231 - DNA, 25 bp, Homo sapien
ggatcaaaaaaatctttgtacttca

SEQ ID NO: 4432232 - DNA, 25 bp, Homo sapien
ttcaactggatcaaaaaaatctttg

SEQ ID NO: 4432233 - DNA, 25 bp, Homo sapien
gatcaaaaaaatctttgtacttcac

SEQ ID NO: 4432234 - DNA, 25 bp, Homo sapien
catcatgatcacttgctatgtcttc

SEQ ID NO: 4432235 - DNA, 25 bp, Homo sapien
caatttcatccacttgtttgaaccc

SEQ ID NO: 4432236 - DNA, 25 bp, Homo sapien
ccacttgtttgaacccagatcatca

SEQ ID NO: 4432237 - DNA, 25 bp, Homo sapien
tcatcatcatgatcacttgctatgt

SEQ ID NO: 4432238 - DNA, 25 bp, Homo sapien
caagtggaggctcgagtgatcgatc

SEQ ID NO: 4432239 - DNA, 25 bp, Homo sapien
cgcttccaggcattcccagccgatc

SEQ ID NO: 4432240 - DNA, 25 bp, Homo sapien
gcgtctcgcttccacaggcttggca

SEQ ID NO: 4432241 - DNA, 25 bp, Homo sapien
cgagtgatcgatctcctttcctttc

SEQ ID NO: 4432242 - DNA, 25 bp, Homo sapien
gcctggctgccctcgcgtcctcctt

SEQ ID NO: 4432243 - DNA, 25 bp, Homo sapien
tgtcacccaagatccccgcgcggcc

SEQ ID NO: 4432244 - DNA, 25 bp, Homo sapien
ccttccctcggtgccctgtcaccca

SEQ ID NO: 4432245 - DNA, 25 bp, Homo sapien
gggccacgcgactgagcccgagcca

SEQ ID NO: 4432246 - DNA, 25 bp, Homo sapien
cataggccggcgcagatgaaacgcc

SEQ ID NO: 4432247 - DNA, 25 bp, Homo sapien
agggcgatgcccgcaccataggccg

SEQ ID NO: 4432248 - DNA, 25 bp, Homo sapien
tctgagtgagatggagacgatcagc

SEQ ID NO: 4432249 - DNA, 25 bp, Homo sapien
cactgtatgagtaactttttctgag

SEQ ID NO: 4432250 - DNA, 25 bp, Homo sapien
ctcatgttattcgtctcgacaattt

SEQ ID NO: 4432251 - DNA, 25 bp, Homo sapien
tgttattcgtctcgacaatttcttc

SEQ ID NO: 4432252 - DNA, 25 bp, Homo sapien
catgttattcgtctcgacaatttct

SEQ ID NO: 4432253 - DNA, 25 bp, Homo sapien
tattcgtctcgacaatttcttcttc

SEQ ID NO: 4432254 - DNA, 25 bp, Homo sapien
atcaccaaaagtgggattctatatg

SEQ ID NO: 4432255 - DNA, 25 bp, Homo sapien
gaaatcaccaaaagtgggattctat

SEQ ID NO: 4432256 - DNA, 25 bp, Homo sapien
caccaaaagtgggattctatatgac

SEQ ID NO: 4432257 - DNA, 25 bp, Homo sapien
tgaaatcaccaaaagtgggattcta

SEQ ID NO: 4432258 - DNA, 25 bp, Homo sapien
ctggatgttctgagcaataaaacac

SEQ ID NO: 4432259 - DNA, 25 bp, Homo sapien
gatgttctgagcaataaaacacagg

SEQ ID NO: 4432260 - DNA, 25 bp, Homo sapien
aaactggatgttctgagcaataaaa

SEQ ID NO: 4432261 - DNA, 25 bp, Homo sapien
ggatgttctgagcaataaaacacag

SEQ ID NO: 4432262 - DNA, 25 bp, Homo sapien
tattcttgctgattgataagcttct

SEQ ID NO: 4432263 - DNA, 25 bp, Homo sapien
caggcaagtttagcaggtggtgcat

SEQ ID NO: 4432264 - DNA, 25 bp, Homo sapien
ggtggtgcattgttaaaacacgaaa

SEQ ID NO: 4432265 - DNA, 25 bp, Homo sapien
tgataagcttctacgaggccttttt

SEQ ID NO: 4432266 - DNA, 25 bp, Homo sapien
ggaactctgtggactagaaccggca

SEQ ID NO: 4432267 - DNA, 25 bp, Homo sapien
gacaatttagatgctaggcttccca

SEQ ID NO: 4432268 - DNA, 25 bp, Homo sapien
aatttattaagccaacctgccctgg

SEQ ID NO: 4432269 - DNA, 25 bp, Homo sapien
tgccctggatccacttgaacgaagt

SEQ ID NO: 4432270 - DNA, 25 bp, Homo sapien
gctcatcaaagagcaacatatcatc

SEQ ID NO: 4432271 - DNA, 25 bp, Homo sapien
caagtacggttttcagcaccacaag

SEQ ID NO: 4432272 - DNA, 25 bp, Homo sapien
actccgaaggtagtaaggatgaccg

SEQ ID NO: 4432273 - DNA, 25 bp, Homo sapien
ggttgtttgaccaggaccattgcag

SEQ ID NO: 4432274 - DNA, 25 bp, Homo sapien
tcatgccccaatcagagcagcaaaa

SEQ ID NO: 4432275 - DNA, 25 bp, Homo sapien
acttgaaaacaaacacgtgcgtaag

SEQ ID NO: 4432276 - DNA, 25 bp, Homo sapien
gaaaacaaacacgtgcgtaagatac

SEQ ID NO: 4432277 - DNA, 25 bp, Homo sapien
tgccccaatcagagcagcaaaaggg

SEQ ID NO: 4432278 - DNA, 25 bp, Homo sapien
gacttcaggcatagactagtatttt

SEQ ID NO: 4432279 - DNA, 25 bp, Homo sapien
actgctggcttggagccacccctgg

SEQ ID NO: 4432280 - DNA, 25 bp, Homo sapien
tgctggcttggagccacccctggct

SEQ ID NO: 4432281 - DNA, 25 bp, Homo sapien
caaggacttcaggcatagactagta

SEQ ID NO: 4432282 - DNA, 25 bp, Homo sapien
cattcgtcaattcttcaatcacagg

SEQ ID NO: 4432283 - DNA, 25 bp, Homo sapien
gagccttacatataacttctgacca

SEQ ID NO: 4432284 - DNA, 25 bp, Homo sapien
gcaatctcttcatactctaatttgg

SEQ ID NO: 4432285 - DNA, 25 bp, Homo sapien
taatttacgttgaaagagccttaca

SEQ ID NO: 4432286 - DNA, 25 bp, Homo sapien
tcaaggcttcacaagtttagggcag

SEQ ID NO: 4432287 - DNA, 25 bp, Homo sapien
gaattcggctcagtcagacctcgct

SEQ ID NO: 4432288 - DNA, 25 bp, Homo sapien
tggtaatgttctaaggccccgggca

SEQ ID NO: 4432289 - DNA, 25 bp, Homo sapien
tatggtttgggcatctcaacacctg

SEQ ID NO: 4432290 - DNA, 25 bp, Homo sapien
gcagaaaggagttcaagcacttcag

SEQ ID NO: 4432291 - DNA, 25 bp, Homo sapien
gagcagaaaggagttcaagcacttc

SEQ ID NO: 4432292 - DNA, 25 bp, Homo sapien
cagaaaggagttcaagcacttcaga

SEQ ID NO: 4432293 - DNA, 25 bp, Homo sapien
caatttgagaaaggcgtccaccagc

SEQ ID NO: 4432294 - DNA, 25 bp, Homo sapien
gactgaacgctgtttggccaatttg

SEQ ID NO: 4432295 - DNA, 25 bp, Homo sapien
taaaatcactgcaccaattccaggc

SEQ ID NO: 4432296 - DNA, 25 bp, Homo sapien
caggcttattcttgccccaagtgca

SEQ ID NO: 4432297 - DNA, 25 bp, Homo sapien
ttactgtaacaatagccaacaaaac

SEQ ID NO: 4432298 - DNA, 25 bp, Homo sapien
ttttcaactgaaacaggtcaagggc

SEQ ID NO: 4432299 - DNA, 25 bp, Homo sapien
cacagtagtgaattcccaggctaga

SEQ ID NO: 4432300 - DNA, 25 bp, Homo sapien
gaaaacttgcacattaagactgcct

SEQ ID NO: 4432301 - DNA, 25 bp, Homo sapien
tctcaaggacaaaagaagccactca

SEQ ID NO: 4432302 - DNA, 25 bp, Homo sapien
taaggttaacatcaaatacttaaga

SEQ ID NO: 4432303 - DNA, 25 bp, Homo sapien
acaattagataaagaaaggacttag

SEQ ID NO: 4432304 - DNA, 25 bp, Homo sapien
tccattcggccgaggttgaccaaca

SEQ ID NO: 4432305 - DNA, 25 bp, Homo sapien
gtcggtcaacgaaaacagtagcaag

SEQ ID NO: 4432306 - DNA, 25 bp, Homo sapien
cagtagcaagatgcgggaaaacaca

SEQ ID NO: 4432307 - DNA, 25 bp, Homo sapien
cagattcgtactgactgtccagcca

SEQ ID NO: 4432308 - DNA, 25 bp, Homo sapien
aatgtcactcagcatgtgcgtggct

SEQ ID NO: 4432309 - DNA, 25 bp, Homo sapien
ctttttgcacactgagcgagctcct

SEQ ID NO: 4432310 - DNA, 25 bp, Homo sapien
gcgagctccttagcttcttcccagt

SEQ ID NO: 4432311 - DNA, 25 bp, Homo sapien
tggccattgcggaagaaatgtcact

SEQ ID NO: 4432312 - DNA, 25 bp, Homo sapien
taagtgttgggaacaacttggtcaa

SEQ ID NO: 4432313 - DNA, 25 bp, Homo sapien
cagcactttcattctaggcaaagca

SEQ ID NO: 4432314 - DNA, 25 bp, Homo sapien
tataaattttggcaggtacctagaa

SEQ ID NO: 4432315 - DNA, 25 bp, Homo sapien
cagggatctgagttatatcaaattc

SEQ ID NO: 4432316 - DNA, 25 bp, Homo sapien
gccaccgtaccagcccccttatgat

SEQ ID NO: 4432317 - DNA, 25 bp, Homo sapien
cttgtataaatccacccaacagtga

SEQ ID NO: 4432318 - DNA, 25 bp, Homo sapien
gaagagtggtaaatcttcgtggcat

SEQ ID NO: 4432319 - DNA, 25 bp, Homo sapien
caacagtgaaacaccgcaggaagag

SEQ ID NO: 4432320 - DNA, 25 bp, Homo sapien
tgcagtatttccacaaaccgagaca

SEQ ID NO: 4432321 - DNA, 25 bp, Homo sapien
gacacagattcatcaacacacaggc

SEQ ID NO: 4432322 - DNA, 25 bp, Homo sapien
gggaacacagcaggtcacaggacca

SEQ ID NO: 4432323 - DNA, 25 bp, Homo sapien
tgggaacacagcaggtcacaggacc

SEQ ID NO: 4432324 - DNA, 25 bp, Homo sapien
ggaacacagcaggtcacaggaccaa

SEQ ID NO: 4432325 - DNA, 25 bp, Homo sapien
ctgggaacacagcaggtcacaggac

SEQ ID NO: 4432326 - DNA, 25 bp, Homo sapien
ctgagcactggtcacagttggcaaa

SEQ ID NO: 4432327 - DNA, 25 bp, Homo sapien
tgagcactggtcacagttggcaaac

SEQ ID NO: 4432328 - DNA, 25 bp, Homo sapien
gggtacagacatctgtgagtgctgc

SEQ ID NO: 4432329 - DNA, 25 bp, Homo sapien
ttatctgcaaaccagtcaaccagtg

SEQ ID NO: 4432330 - DNA, 25 bp, Homo sapien
tcaaccagtgcagagtcgcacaggg

SEQ ID NO: 4432331 - DNA, 25 bp, Homo sapien
acagacatctgtgagtgctgcagag

SEQ ID NO: 4432332 - DNA, 25 bp, Homo sapien
tccaggcgcttcaagtgctggtgta

SEQ ID NO: 4432333 - DNA, 25 bp, Homo sapien
caagtgctggtgtaaattaagggcc

SEQ ID NO: 4432334 - DNA, 25 bp, Homo sapien
aattaagggccagtcgatcccacca

SEQ ID NO: 4432335 - DNA, 25 bp, Homo sapien
aaattctctgagacaaaaggctttc

SEQ ID NO: 4432336 - DNA, 25 bp, Homo sapien
gcagagagcatggtcacacatcagg

SEQ ID NO: 4432337 - DNA, 25 bp, Homo sapien
cagagagcatggtcacacatcaggc

SEQ ID NO: 4432338 - DNA, 25 bp, Homo sapien
gagagcatggtcacacatcaggctc

SEQ ID NO: 4432339 - DNA, 25 bp, Homo sapien
tggcagagagcatggtcacacatca

SEQ ID NO: 4432340 - DNA, 25 bp, Homo sapien
gcgcacggctcgctgatacagtgaa

SEQ ID NO: 4432341 - DNA, 25 bp, Homo sapien
tcttgcacagccatttctgggagct

SEQ ID NO: 4432342 - DNA, 25 bp, Homo sapien
gaactttttacagctcggagactct

SEQ ID NO: 4432343 - DNA, 25 bp, Homo sapien
ctgctggaagaggtgcttgaacttt

SEQ ID NO: 4432344 - DNA, 25 bp, Homo sapien
tgggcacagcctgcctgtgatggtc

SEQ ID NO: 4432345 - DNA, 25 bp, Homo sapien
ctgtgggcacagcctgcctgtgatg

SEQ ID NO: 4432346 - DNA, 25 bp, Homo sapien
ggcacagcctgcctgtgatggtcac

SEQ ID NO: 4432347 - DNA, 25 bp, Homo sapien
tgtgggcacagcctgcctgtgatgg

SEQ ID NO: 4432348 - DNA, 25 bp, Homo sapien
aaaaccgctgcgtctgtaatgggcc

SEQ ID NO: 4432349 - DNA, 25 bp, Homo sapien
tggtcaaaaccgctgcgtctgtaat

SEQ ID NO: 4432350 - DNA, 25 bp, Homo sapien
accgctgcgtctgtaatgggccagt

SEQ ID NO: 4432351 - DNA, 25 bp, Homo sapien
tccatcacaaacacagacttgcaca

SEQ ID NO: 4432352 - DNA, 25 bp, Homo sapien
catgtcctgattttcacacatctga

SEQ ID NO: 4432353 - DNA, 25 bp, Homo sapien
gtagatgaatctcaacactcatcag

SEQ ID NO: 4432354 - DNA, 25 bp, Homo sapien
acctgggctttgtaaactcctatct

SEQ ID NO: 4432355 - DNA, 25 bp, Homo sapien
cttgttaatcttccgaacactcggg

SEQ ID NO: 4432356 - DNA, 25 bp, Homo sapien
tcggggccttgaatgtgcattctat

SEQ ID NO: 4432357 - DNA, 25 bp, Homo sapien
tccagcgagtgtccagtttccacgt

SEQ ID NO: 4432358 - DNA, 25 bp, Homo sapien
tctaaccatttcaggcctactgtat

SEQ ID NO: 4432359 - DNA, 25 bp, Homo sapien
cacgtcttccccaataacatcaccc

SEQ ID NO: 4432360 - DNA, 25 bp, Homo sapien
tagcccagtgcttccgatagtcaag

SEQ ID NO: 4432361 - DNA, 25 bp, Homo sapien
tttactgactgggagatgacctgag

SEQ ID NO: 4432362 - DNA, 25 bp, Homo sapien
aattccctgtggcataaagcctggc

SEQ ID NO: 4432363 - DNA, 25 bp, Homo sapien
cagggattcaaaaggacagcggttc

SEQ ID NO: 4432364 - DNA, 25 bp, Homo sapien
ctgacaggcgtttctgaagacatcc

SEQ ID NO: 4432365 - DNA, 25 bp, Homo sapien
cccacaggaggaggccatacagggt

SEQ ID NO: 4432366 - DNA, 25 bp, Homo sapien
atcccatccatgaagatgatgtccc

SEQ ID NO: 4432367 - DNA, 25 bp, Homo sapien
aaggtggacccttcgccatgaatcc

SEQ ID NO: 4432368 - DNA, 25 bp, Homo sapien
gctgacaagggaagccactctgcct

SEQ ID NO: 4432369 - DNA, 25 bp, Homo sapien
tcctcgggggcatcatgaatcagct

SEQ ID NO: 4432370 - DNA, 25 bp, Homo sapien
tggcctcaagggctgggcgtctgct

SEQ ID NO: 4432371 - DNA, 25 bp, Homo sapien
cttgctgaagagacgtgaagcgatc

SEQ ID NO: 4432372 - DNA, 25 bp, Homo sapien
cgacagtgtcgaaagtcagcagcca

SEQ ID NO: 4432373 - DNA, 25 bp, Homo sapien
cctcgacagtgtcgaaagtcagcag

SEQ ID NO: 4432374 - DNA, 25 bp, Homo sapien
ggccccctcgacagtgtcgaaagtc

SEQ ID NO: 4432375 - DNA, 25 bp, Homo sapien
cttaaagtgacggctctgggagttc

SEQ ID NO: 4432376 - DNA, 25 bp, Homo sapien
tctacaccaactattccatcccact

SEQ ID NO: 4432377 - DNA, 25 bp, Homo sapien
ctattccatcccactctgatgctgg

SEQ ID NO: 4432378 - DNA, 25 bp, Homo sapien
caaaatctccaggcccatactgctt

SEQ ID NO: 4432379 - DNA, 25 bp, Homo sapien
gggaataatactaattctacaccaa

SEQ ID NO: 4432380 - DNA, 25 bp, Homo sapien
gcttatgtgaaagacgatcattggg

SEQ ID NO: 4432381 - DNA, 25 bp, Homo sapien
acatggcagacttctacttcagccc

SEQ ID NO: 4432382 - DNA, 25 bp, Homo sapien
gatcattggggcctttaacttccac

SEQ ID NO: 4432383 - DNA, 25 bp, Homo sapien
tcttagctccaactgcaaccacatg

SEQ ID NO: 4432384 - DNA, 25 bp, Homo sapien
agcccgtgctgagggaatgccgcac

SEQ ID NO: 4432385 - DNA, 25 bp, Homo sapien
tgaagctgcttataccacctctgcc

SEQ ID NO: 4432386 - DNA, 25 bp, Homo sapien
aactatgacagccttcagtcgggcc

SEQ ID NO: 4432387 - DNA, 25 bp, Homo sapien
tgcacagggcgcactagagagagct

SEQ ID NO: 4432388 - DNA, 25 bp, Homo sapien
cagtttacagcaaaggatcgcaccc

SEQ ID NO: 4432389 - DNA, 25 bp, Homo sapien
tcctggctgatgaagtcgacgtact

SEQ ID NO: 4432390 - DNA, 25 bp, Homo sapien
gcaggatgtacttcaacgccagcgg

SEQ ID NO: 4432391 - DNA, 25 bp, Homo sapien
ccttgtatacagaatggctccgtga

SEQ ID NO: 4432392 - DNA, 25 bp, Homo sapien
ctgtcttataccaggaattaatgaa

SEQ ID NO: 4432393 - DNA, 25 bp, Homo sapien
atgttcatgggacgttggagggtag

SEQ ID NO: 4432394 - DNA, 25 bp, Homo sapien
catgggacgttggagggtagtgcat

SEQ ID NO: 4432395 - DNA, 25 bp, Homo sapien
gtcttataccaggaattaatgaata

SEQ ID NO: 4432396 - DNA, 25 bp, Homo sapien
actgtgttggtccagcccctcatag

SEQ ID NO: 4432397 - DNA, 25 bp, Homo sapien
tctggactataaaaccagattgagt

SEQ ID NO: 4432398 - DNA, 25 bp, Homo sapien
ggccactggtatcaggtcttttgaa

SEQ ID NO: 4432399 - DNA, 25 bp, Homo sapien
gatccactcatagagcaggccactg

SEQ ID NO: 4432400 - DNA, 25 bp, Homo sapien
aggtagcggtcagcggagccaggtc

SEQ ID NO: 4432401 - DNA, 25 bp, Homo sapien
gtagcggtcagcggagccaggtctc

SEQ ID NO: 4432402 - DNA, 25 bp, Homo sapien
ggtagcggtcagcggagccaggtct

SEQ ID NO: 4432403 - DNA, 25 bp, Homo sapien
cattggctggattaaagaagtcctt

SEQ ID NO: 4432404 - DNA, 25 bp, Homo sapien
gatccaaagttggaggagctcccct

SEQ ID NO: 4432405 - DNA, 25 bp, Homo sapien
caggtaggtgacaaagctgtttcca

SEQ ID NO: 4432406 - DNA, 25 bp, Homo sapien
tttgcaggcaggtaggtgacaaagc

SEQ ID NO: 4432407 - DNA, 25 bp, Homo sapien
tgacacatgcttactggttaatgaa

SEQ ID NO: 4432408 - DNA, 25 bp, Homo sapien
taatgaaatgtgcatcaacccactc

SEQ ID NO: 4432409 - DNA, 25 bp, Homo sapien
caccactaatttgacatgaactaac

SEQ ID NO: 4432410 - DNA, 25 bp, Homo sapien
taacttagtgagacaggaaacattt

SEQ ID NO: 4432411 - DNA, 25 bp, Homo sapien
ttttattgcattggcggccaaatca

SEQ ID NO: 4432412 - DNA, 25 bp, Homo sapien
tgcattggcggccaaatcatagctg

SEQ ID NO: 4432413 - DNA, 25 bp, Homo sapien
atcatagctgaaatctgtacatgca

SEQ ID NO: 4432414 - DNA, 25 bp, Homo sapien
catagctgaaatctgtacatgcata

SEQ ID NO: 4432415 - DNA, 25 bp, Homo sapien
agcttcaaaacaatgctcgcccagg

SEQ ID NO: 4432416 - DNA, 25 bp, Homo sapien
ccagaggccgcgctcttgagatggc

SEQ ID NO: 4432417 - DNA, 25 bp, Homo sapien
ttgagatggccgtcgggctccgctc

SEQ ID NO: 4432418 - DNA, 25 bp, Homo sapien
gaagtcggcccatgtgtaagtcaag

SEQ ID NO: 4432419 - DNA, 25 bp, Homo sapien
gaagtaagcaactagctgggcacag

SEQ ID NO: 4432420 - DNA, 25 bp, Homo sapien
attactgagggccaccaaatagcct

SEQ ID NO: 4432421 - DNA, 25 bp, Homo sapien
tgccctcgagcactgaagtcaccat

SEQ ID NO: 4432422 - DNA, 25 bp, Homo sapien
caaatagcctaggaagtgccctcga

SEQ ID NO: 4432423 - DNA, 25 bp, Homo sapien
gattgagtatgtgcagggctcttca

SEQ ID NO: 4432424 - DNA, 25 bp, Homo sapien
tcaactacttgctcgtgtgaaaagc

SEQ ID NO: 4432425 - DNA, 25 bp, Homo sapien
tgtgaaaagcaccacactcagtcca

SEQ ID NO: 4432426 - DNA, 25 bp, Homo sapien
ggaaagccagctcatagagaccaga

SEQ ID NO: 4432427 - DNA, 25 bp, Homo sapien
tgtagaaaatgaaaagtcagggccc

SEQ ID NO: 4432428 - DNA, 25 bp, Homo sapien
gaagtataaaatgcctcccgtcctg

SEQ ID NO: 4432429 - DNA, 25 bp, Homo sapien
ggcccatatcgtgctgaagtataaa

SEQ ID NO: 4432430 - DNA, 25 bp, Homo sapien
aggtcttctgtctgcactggtgagg

SEQ ID NO: 4432431 - DNA, 25 bp, Homo sapien
gggaaacaaatcaaggcgtctcatt

SEQ ID NO: 4432432 - DNA, 25 bp, Homo sapien
ttgtgcaaccacgtcagtcgggagg

SEQ ID NO: 4432433 - DNA, 25 bp, Homo sapien
caagggcatggctaaatccagatgg

SEQ ID NO: 4432434 - DNA, 25 bp, Homo sapien
tgaaatcccaagcatcaagccacag

SEQ ID NO: 4432435 - DNA, 25 bp, Homo sapien
aggaagagatcgacattgatgtgga

SEQ ID NO: 4432436 - DNA, 25 bp, Homo sapien
gaccctgccgtgagtcggttccagt

SEQ ID NO: 4432437 - DNA, 25 bp, Homo sapien
tccagtatcccttccacgagctgat

SEQ ID NO: 4432438 - DNA, 25 bp, Homo sapien
gcagtgctgatgaaacgccagaaaa

SEQ ID NO: 4432439 - DNA, 25 bp, Homo sapien
ctttgttgcatacttttatggcaaa

SEQ ID NO: 4432440 - DNA, 25 bp, Homo sapien
ttctcccctcaggatgatgagcctc

SEQ ID NO: 4432441 - DNA, 25 bp, Homo sapien
gaactctttgttgcatacttttatg

SEQ ID NO: 4432442 - DNA, 25 bp, Homo sapien
ctctttgttgcatacttttatggca

SEQ ID NO: 4432443 - DNA, 25 bp, Homo sapien
caaattcattgctaagtaaggtgtg

SEQ ID NO: 4432444 - DNA, 25 bp, Homo sapien
cattgatttgtgacaggcctttgca

SEQ ID NO: 4432445 - DNA, 25 bp, Homo sapien
tattagatgttattgaaaggtaggc

SEQ ID NO: 4432446 - DNA, 25 bp, Homo sapien
ggtgtgttacttactcaactatggt

SEQ ID NO: 4432447 - DNA, 25 bp, Homo sapien
tgaagccacataccgtacagtcagt

SEQ ID NO: 4432448 - DNA, 25 bp, Homo sapien
cacataccgtacagtcagtgttaca

SEQ ID NO: 4432449 - DNA, 25 bp, Homo sapien
aggagtgaagccacataccgtacag

SEQ ID NO: 4432450 - DNA, 25 bp, Homo sapien
gccacataccgtacagtcagtgtta

SEQ ID NO: 4432451 - DNA, 25 bp, Homo sapien
aggcgccagcagcttccacgcaatt

SEQ ID NO: 4432452 - DNA, 25 bp, Homo sapien
ccctaaatctagaactgcccatcag

SEQ ID NO: 4432453 - DNA, 25 bp, Homo sapien
aatgttacttatcctaattactgga

SEQ ID NO: 4432454 - DNA, 25 bp, Homo sapien
gtaggcaaacactgatctcccgctc

SEQ ID NO: 4432455 - DNA, 25 bp, Homo sapien
tgacatcgtccacaaagggcagagt

SEQ ID NO: 4432456 - DNA, 25 bp, Homo sapien
gtctcattgtgtccgatctccagca

SEQ ID NO: 4432457 - DNA, 25 bp, Homo sapien
aaaccaagatttacgtccagcactg

SEQ ID NO: 4432458 - DNA, 25 bp, Homo sapien
gacttaacatgtgcacgctggtccc

SEQ ID NO: 4432459 - DNA, 25 bp, Homo sapien
ccaaaaccctaactcatccacagcc

SEQ ID NO: 4432460 - DNA, 25 bp, Homo sapien
ggtggtctctgcagacttacaacgc

SEQ ID NO: 4432461 - DNA, 25 bp, Homo sapien
tcttcgttcgtaaaaccaggagagc

SEQ ID NO: 4432462 - DNA, 25 bp, Homo sapien
aacgcaccgacaccacacctttatt

SEQ ID NO: 4432463 - DNA, 25 bp, Homo sapien
tcctcatggggactgctcctcttaa

SEQ ID NO: 4432464 - DNA, 25 bp, Homo sapien
tgctcctcttaaagggtgggccctc

SEQ ID NO: 4432465 - DNA, 25 bp, Homo sapien
ctcatggggactgctcctcttaaag

SEQ ID NO: 4432466 - DNA, 25 bp, Homo sapien
ggactgctcctcttaaagggtgggc

SEQ ID NO: 4432467 - DNA, 25 bp, Homo sapien
caactgtgaccgccagccggcctct

SEQ ID NO: 4432468 - DNA, 25 bp, Homo sapien
actgtgaccgccagccggcctctta

SEQ ID NO: 4432469 - DNA, 25 bp, Homo sapien
ctgtgaccgccagccggcctcttat

SEQ ID NO: 4432470 - DNA, 25 bp, Homo sapien
tgtgaccgccagccggcctcttatt

SEQ ID NO: 4432471 - DNA, 25 bp, Homo sapien
gacagatctgcgcagtaagcacaag

SEQ ID NO: 4432472 - DNA, 25 bp, Homo sapien
gtggcactggcaccatcagtacttg

SEQ ID NO: 4432473 - DNA, 25 bp, Homo sapien
tgcgcagtaagcacaagtcagcact

SEQ ID NO: 4432474 - DNA, 25 bp, Homo sapien
catcagtacttgacctaggatcacc

SEQ ID NO: 4432475 - DNA, 25 bp, Homo sapien
cagtgggctttcactcactgtccag

SEQ ID NO: 4432476 - DNA, 25 bp, Homo sapien
gtccacagtgggctttcactcactg

SEQ ID NO: 4432477 - DNA, 25 bp, Homo sapien
gccattggtccacagtgggctttca

SEQ ID NO: 4432478 - DNA, 25 bp, Homo sapien
atggccattggtccacagtgggctt

SEQ ID NO: 4432479 - DNA, 25 bp, Homo sapien
tacttcccgatctgtatggaacacc

SEQ ID NO: 4432480 - DNA, 25 bp, Homo sapien
cagtggctacttcccgatctgtatg

SEQ ID NO: 4432481 - DNA, 25 bp, Homo sapien
tggctacttcccgatctgtatggaa

SEQ ID NO: 4432482 - DNA, 25 bp, Homo sapien
ccgatctgtatggaacaccctgatg

SEQ ID NO: 4432483 - DNA, 25 bp, Homo sapien
cctctacttttagcgggatggcaaa

SEQ ID NO: 4432484 - DNA, 25 bp, Homo sapien
ggatggcaaaaagggcacttgcctg

SEQ ID NO: 4432485 - DNA, 25 bp, Homo sapien
ttttagcgggatggcaaaaagggca

SEQ ID NO: 4432486 - DNA, 25 bp, Homo sapien
ctgtatcctctacttttagcgggat

SEQ ID NO: 4432487 - DNA, 25 bp, Homo sapien
gagacatgcctgattcaccagcctc

SEQ ID NO: 4432488 - DNA, 25 bp, Homo sapien
gaagcggagacatgcctgattcacc

SEQ ID NO: 4432489 - DNA, 25 bp, Homo sapien
gcggagacatgcctgattcaccagc

SEQ ID NO: 4432490 - DNA, 25 bp, Homo sapien
ctgaagcggagacatgcctgattca

SEQ ID NO: 4432491 - DNA, 25 bp, Homo sapien
tgaagacaccttttgaacccagtcc

SEQ ID NO: 4432492 - DNA, 25 bp, Homo sapien
agacaccttttgaacccagtcctgg

SEQ ID NO: 4432493 - DNA, 25 bp, Homo sapien
tgctgaagacaccttttgaacccag

SEQ ID NO: 4432494 - DNA, 25 bp, Homo sapien
gctgaagacaccttttgaacccagt

SEQ ID NO: 4432495 - DNA, 25 bp, Homo sapien
cacaaactgcactatgtacgagtct

SEQ ID NO: 4432496 - DNA, 25 bp, Homo sapien
cactatgtacgagtcttccagggtc

SEQ ID NO: 4432497 - DNA, 25 bp, Homo sapien
aactgcactatgtacgagtcttcca

SEQ ID NO: 4432498 - DNA, 25 bp, Homo sapien
aaacacaaactgcactatgtacgag

SEQ ID NO: 4432499 - DNA, 25 bp, Homo sapien
cattctatctcgttgcacactaggc

SEQ ID NO: 4432500 - DNA, 25 bp, Homo sapien
ggtttcctaatcgaaagcagcaccc

SEQ ID NO: 4432501 - DNA, 25 bp, Homo sapien
agcagctcagtgtcggttcccggtt

SEQ ID NO: 4432502 - DNA, 25 bp, Homo sapien
cacactaggcccttcattgacgcag

SEQ ID NO: 4432503 - DNA, 25 bp, Homo sapien
ggtgccttgaaattgcaatgggtag

SEQ ID NO: 4432504 - DNA, 25 bp, Homo sapien
tgcccagtgtactgctgtatgtttg

SEQ ID NO: 4432505 - DNA, 25 bp, Homo sapien
gataagctctgaaaaggaacaggct

SEQ ID NO: 4432506 - DNA, 25 bp, Homo sapien
cacctgttcacctgtgcccagtgta

SEQ ID NO: 4432507 - DNA, 25 bp, Homo sapien
agcctctggacaccacttgcatgcc

SEQ ID NO: 4432508 - DNA, 25 bp, Homo sapien
cctctggacaccacttgcatgccct

SEQ ID NO: 4432509 - DNA, 25 bp, Homo sapien
tctggacaccacttgcatgccctga

SEQ ID NO: 4432510 - DNA, 25 bp, Homo sapien
ctctggacaccacttgcatgccctg

SEQ ID NO: 4432511 - DNA, 25 bp, Homo sapien
accttcgagtggctgtggcaaaccc

SEQ ID NO: 4432512 - DNA, 25 bp, Homo sapien
tgttcagagctctcacgtcagggtc

SEQ ID NO: 4432513 - DNA, 25 bp, Homo sapien
cacggtgtccaacgcctgtggtctc

SEQ ID NO: 4432514 - DNA, 25 bp, Homo sapien
caccattccagagtcagcagttgcg

SEQ ID NO: 4432515 - DNA, 25 bp, Homo sapien
gggctcgctcaagagctccacatca

SEQ ID NO: 4432516 - DNA, 25 bp, Homo sapien
ctcactgagagagatgagctccttc

SEQ ID NO: 4432517 - DNA, 25 bp, Homo sapien
tgagctccttcaagcggggctcgct

SEQ ID NO: 4432518 - DNA, 25 bp, Homo sapien
tcaagcggggctcgctcaagagctc

SEQ ID NO: 4432519 - DNA, 25 bp, Homo sapien
catggagtcccagagcatgaaggct

SEQ ID NO: 4432520 - DNA, 25 bp, Homo sapien
ggagtcccagagcatgaaggcttcc

SEQ ID NO: 4432521 - DNA, 25 bp, Homo sapien
cacagtacagaggtggctaggacat

SEQ ID NO: 4432522 - DNA, 25 bp, Homo sapien
gctgatggggtagccatcactgaga

SEQ ID NO: 4432523 - DNA, 25 bp, Homo sapien
tacccttttttgcataggtgtagac

SEQ ID NO: 4432524 - DNA, 25 bp, Homo sapien
ccttttttgcataggtgtagacagc

SEQ ID NO: 4432525 - DNA, 25 bp, Homo sapien
tttttgcataggtgtagacagctgt

SEQ ID NO: 4432526 - DNA, 25 bp, Homo sapien
ttttttgcataggtgtagacagctg

SEQ ID NO: 4432527 - DNA, 25 bp, Homo sapien
gaggatctgagtcagtcctgagctc

SEQ ID NO: 4432528 - DNA, 25 bp, Homo sapien
aggatctgagtcagtcctgagctct

SEQ ID NO: 4432529 - DNA, 25 bp, Homo sapien
gaacgctgtgctgcccaaggagcat

SEQ ID NO: 4432530 - DNA, 25 bp, Homo sapien
gaaatgatagaactggtgagcccaa

SEQ ID NO: 4432531 - DNA, 25 bp, Homo sapien
gtaacgttacacacacatgccatgg

SEQ ID NO: 4432532 - DNA, 25 bp, Homo sapien
ccagagataggaggcacaggttagc

SEQ ID NO: 4432533 - DNA, 25 bp, Homo sapien
caggtgagttggtgaaaaggcccca

SEQ ID NO: 4432534 - DNA, 25 bp, Homo sapien
cacctcttgtgccatgggctgggcc

SEQ ID NO: 4432535 - DNA, 25 bp, Homo sapien
gtcacccagagctgatacctcccgc

SEQ ID NO: 4432536 - DNA, 25 bp, Homo sapien
tctgagcacctcttgtgccatgggc

SEQ ID NO: 4432537 - DNA, 25 bp, Homo sapien
gagcacctcttgtgccatgggctgg

SEQ ID NO: 4432538 - DNA, 25 bp, Homo sapien
ctagcgggcacagattttgtgcttg

SEQ ID NO: 4432539 - DNA, 25 bp, Homo sapien
tagcgggcacagattttgtgcttgg

SEQ ID NO: 4432540 - DNA, 25 bp, Homo sapien
ttagtatagacgtagagcatagaca

SEQ ID NO: 4432541 - DNA, 25 bp, Homo sapien
tatacacattaacgcaggtcatagg

SEQ ID NO: 4432542 - DNA, 25 bp, Homo sapien
gacattaggacacaggtagtaggca

SEQ ID NO: 4432543 - DNA, 25 bp, Homo sapien
gtagtaggcatagaaagtatacaca

SEQ ID NO: 4432544 - DNA, 25 bp, Homo sapien
caccaggagtgtaggagagtccccc

SEQ ID NO: 4432545 - DNA, 25 bp, Homo sapien
aggcaggaaaggaagacggagaggg

SEQ ID NO: 4432546 - DNA, 25 bp, Homo sapien
agagggaagtaacaaggaggatgaa

SEQ ID NO: 4432547 - DNA, 25 bp, Homo sapien
accaggagtgtaggagagtccccca

SEQ ID NO: 4432548 - DNA, 25 bp, Homo sapien
acgtgctggtaacggtggctccact

SEQ ID NO: 4432549 - DNA, 25 bp, Homo sapien
tcctcctgaccacgtgctggtaacg

SEQ ID NO: 4432550 - DNA, 25 bp, Homo sapien
tcctgaccacgtgctggtaacggtg

SEQ ID NO: 4432551 - DNA, 25 bp, Homo sapien
tgaccacgtgctggtaacggtggct

SEQ ID NO: 4432552 - DNA, 25 bp, Homo sapien
tctgtcaaccgctgaaaaatcttcc

SEQ ID NO: 4432553 - DNA, 25 bp, Homo sapien
tcatcccggatcctggcgagcaggt

SEQ ID NO: 4432554 - DNA, 25 bp, Homo sapien
tggagggatggatcccatctgtcaa

SEQ ID NO: 4432555 - DNA, 25 bp, Homo sapien
gatcctggcgagcaggtcccagagt

SEQ ID NO: 4432556 - DNA, 25 bp, Homo sapien
ctgctggtgacggcgtgggtggatg

SEQ ID NO: 4432557 - DNA, 25 bp, Homo sapien
gccctccgtgattcaggagcaccag

SEQ ID NO: 4432558 - DNA, 25 bp, Homo sapien
gacggcgtgggtggatgggaggccc

SEQ ID NO: 4432559 - DNA, 25 bp, Homo sapien
accagccggctccttgacaagctgg

SEQ ID NO: 4432560 - DNA, 25 bp, Homo sapien
aaggctggggagaacccgggcatgt

SEQ ID NO: 4432561 - DNA, 25 bp, Homo sapien
ggcatgtcaaaggtttgggagaacc

SEQ ID NO: 4432562 - DNA, 25 bp, Homo sapien
agaacccgggcatgtcaaaggtttg

SEQ ID NO: 4432563 - DNA, 25 bp, Homo sapien
caaaggtttgggagaacccaggcat

SEQ ID NO: 4432564 - DNA, 25 bp, Homo sapien
ttgcccagcagatccctcgagtctg

SEQ ID NO: 4432565 - DNA, 25 bp, Homo sapien
gaaaagctcattgcccagcagatcc

SEQ ID NO: 4432566 - DNA, 25 bp, Homo sapien
aggcagaaaagctcattgcccagca

SEQ ID NO: 4432567 - DNA, 25 bp, Homo sapien
tccctcgagtctgctgatcttccat

SEQ ID NO: 4432568 - DNA, 25 bp, Homo sapien
ttagggtgacgctgagacaataggc

SEQ ID NO: 4432569 - DNA, 25 bp, Homo sapien
tgagtgccctctccgctgtgttagg

SEQ ID NO: 4432570 - DNA, 25 bp, Homo sapien
ctcggtttgaatggcaccatagggc

SEQ ID NO: 4432571 - DNA, 25 bp, Homo sapien
caataggcagggaagcctacatccc

SEQ ID NO: 4432572 - DNA, 25 bp, Homo sapien
aagtctttgcaagcaagttaaattg

SEQ ID NO: 4432573 - DNA, 25 bp, Homo sapien
taaggcttcgctgacttttattctc

SEQ ID NO: 4432574 - DNA, 25 bp, Homo sapien
aaattgagatacaccaatttcttgc

SEQ ID NO: 4432575 - DNA, 25 bp, Homo sapien
cttgcatgcagtataggaattattc

SEQ ID NO: 4432576 - DNA, 25 bp, Homo sapien
gtgttacagtgagagcttttccagg

SEQ ID NO: 4432577 - DNA, 25 bp, Homo sapien
tgtttccacaccattgcctttttct

SEQ ID NO: 4432578 - DNA, 25 bp, Homo sapien
aatcgggattggcttggtgttgggc

SEQ ID NO: 4432579 - DNA, 25 bp, Homo sapien
tgatgtgtgcccaggacgcccgggg

SEQ ID NO: 4432580 - DNA, 25 bp, Homo sapien
ccagctgagtggagctcgattgaca

SEQ ID NO: 4432581 - DNA, 25 bp, Homo sapien
caaggctatagtcggcactgctgag

SEQ ID NO: 4432582 - DNA, 25 bp, Homo sapien
gaagggccgatgttagctcctgaga

SEQ ID NO: 4432583 - DNA, 25 bp, Homo sapien
catgtgtctactgcgaaaggacagc

SEQ ID NO: 4432584 - DNA, 25 bp, Homo sapien
cttgtgtcaaatgcgtacccttcct

SEQ ID NO: 4432585 - DNA, 25 bp, Homo sapien
tgtcaaatgcgtacccttcctgtgt

SEQ ID NO: 4432586 - DNA, 25 bp, Homo sapien
tccatgggaagcttgtgtcaaatgc

SEQ ID NO: 4432587 - DNA, 25 bp, Homo sapien
aaatgcgtacccttcctgtgtgtcc

SEQ ID NO: 4432588 - DNA, 25 bp, Homo sapien
gtcactgtcctagagcaaggactgg

SEQ ID NO: 4432589 - DNA, 25 bp, Homo sapien
catgggtcactgtcctagagcaagg

SEQ ID NO: 4432590 - DNA, 25 bp, Homo sapien
gggtcactgtcctagagcaaggact

SEQ ID NO: 4432591 - DNA, 25 bp, Homo sapien
atgggtcactgtcctagagcaagga

SEQ ID NO: 4432592 - DNA, 25 bp, Homo sapien
gagcgatgtccccaaggcctaacac

SEQ ID NO: 4432593 - DNA, 25 bp, Homo sapien
ggcgccgcacgcatggactgtgttc

SEQ ID NO: 4432594 - DNA, 25 bp, Homo sapien
ctaacaccgcgagccggagctagca

SEQ ID NO: 4432595 - DNA, 25 bp, Homo sapien
gggctctcctgtccccgagcgatgt

SEQ ID NO: 4432596 - DNA, 25 bp, Homo sapien
tgcttggcggcggccgctggattct

SEQ ID NO: 4432597 - DNA, 25 bp, Homo sapien
gcttggcggcggccgctggattctc

SEQ ID NO: 4432598 - DNA, 25 bp, Homo sapien
gagggttttactaatgtctctagga

SEQ ID NO: 4432599 - DNA, 25 bp, Homo sapien
agcttgaaccggcaggctggtgtaa

SEQ ID NO: 4432600 - DNA, 25 bp, Homo sapien
ctggtgtaaggtccccactcttttg

SEQ ID NO: 4432601 - DNA, 25 bp, Homo sapien
taatgtctctaggaatctcaaacac

SEQ ID NO: 4432602 - DNA, 25 bp, Homo sapien
tcaaatatctgagcgatgtagccag

SEQ ID NO: 4432603 - DNA, 25 bp, Homo sapien
gccgaggtacagaagaggctcctat

SEQ ID NO: 4432604 - DNA, 25 bp, Homo sapien
cagccagattctaggcagcttggag

SEQ ID NO: 4432605 - DNA, 25 bp, Homo sapien
ggtcctgtggacaagcctaactgta

SEQ ID NO: 4432606 - DNA, 25 bp, Homo sapien
tgagactgtctcaatcaatcaatca

SEQ ID NO: 4432607 - DNA, 25 bp, Homo sapien
gtgagactgtctcaatcaatcaatc

SEQ ID NO: 4432608 - DNA, 25 bp, Homo sapien
taagccggtaggctggagaccgata

SEQ ID NO: 4432609 - DNA, 25 bp, Homo sapien
gaattggcttctgcggttgtggagg

SEQ ID NO: 4432610 - DNA, 25 bp, Homo sapien
gaactgttgtaagggattcatttta

SEQ ID NO: 4432611 - DNA, 25 bp, Homo sapien
accgatattacaagttggagttcac

SEQ ID NO: 4432612 - DNA, 25 bp, Homo sapien
tagttagggtaaagctcacctgctc

SEQ ID NO: 4432613 - DNA, 25 bp, Homo sapien
tgctctaggttgaaagccgctccaa

SEQ ID NO: 4432614 - DNA, 25 bp, Homo sapien
cctgctctaacaaagaggcctgatg

SEQ ID NO: 4432615 - DNA, 25 bp, Homo sapien
tgcatgaaaacgaatcaacctctga

SEQ ID NO: 4432616 - DNA, 25 bp, Homo sapien
gatttctgtcaagagtatgcaccaa

SEQ ID NO: 4432617 - DNA, 25 bp, Homo sapien
acaaccagttagatggcaagtgggc

SEQ ID NO: 4432618 - DNA, 25 bp, Homo sapien
aatatatcttgtaggtcagcagtcc

SEQ ID NO: 4432619 - DNA, 25 bp, Homo sapien
gagttgctccgtgaactgtcctctg

SEQ ID NO: 4432620 - DNA, 25 bp, Homo sapien
actctgacacccaggctgcaatgca

SEQ ID NO: 4432621 - DNA, 25 bp, Homo sapien
tatgcatttaatttttatgtattca

SEQ ID NO: 4432622 - DNA, 25 bp, Homo sapien
tctgacacccaggctgcaatgcagt

SEQ ID NO: 4432623 - DNA, 25 bp, Homo sapien
tgacacccaggctgcaatgcagtgg

SEQ ID NO: 4432624 - DNA, 25 bp, Homo sapien
cacgcttggtcaggcgctctggaga

SEQ ID NO: 4432625 - DNA, 25 bp, Homo sapien
gctacatcccgccttctcacgcttg

SEQ ID NO: 4432626 - DNA, 25 bp, Homo sapien
ggagatgtcggagatccaggctttt

SEQ ID NO: 4432627 - DNA, 25 bp, Homo sapien
gagatgtcggagatccaggcttttc

SEQ ID NO: 4432628 - DNA, 25 bp, Homo sapien
cagcaccccccacgcgccgctctcc

SEQ ID NO: 4432629 - DNA, 25 bp, Homo sapien
gccgctctccgcctctggggagcat

SEQ ID NO: 4432630 - DNA, 25 bp, Homo sapien
ctctccgcctctggggagcatcctg

SEQ ID NO: 4432631 - DNA, 25 bp, Homo sapien
cgctctccgcctctggggagcatcc

SEQ ID NO: 4432632 - DNA, 25 bp, Homo sapien
tcttacagggctgccttcaattatt

SEQ ID NO: 4432633 - DNA, 25 bp, Homo sapien
gctccgaggtatttcaaagtcagac

SEQ ID NO: 4432634 - DNA, 25 bp, Homo sapien
tcaattatttcagctgctccgaggt

SEQ ID NO: 4432635 - DNA, 25 bp, Homo sapien
tcccagcagagggtttgcccgtgag

SEQ ID NO: 4432636 - DNA, 25 bp, Homo sapien
gatgacttccctcgagaagtgccag

SEQ ID NO: 4432637 - DNA, 25 bp, Homo sapien
gagaagtgccagtccgcagggcaat

SEQ ID NO: 4432638 - DNA, 25 bp, Homo sapien
tctcgaggtcctcgtgcgggtgacc

SEQ ID NO: 4432639 - DNA, 25 bp, Homo sapien
ggtccccgacaaatgctggctccat

SEQ ID NO: 4432640 - DNA, 25 bp, Homo sapien
ctaatccctgaaacgtgagccccac

SEQ ID NO: 4432641 - DNA, 25 bp, Homo sapien
ccggcccctattcgaaatggagttg

SEQ ID NO: 4432642 - DNA, 25 bp, Homo sapien
gacacatcttgttgccattttgggt

SEQ ID NO: 4432643 - DNA, 25 bp, Homo sapien
gaggaccaccagaggacacatcttg

SEQ ID NO: 4432644 - DNA, 25 bp, Homo sapien
agcttatttactgcagcctgtttca

SEQ ID NO: 4432645 - DNA, 25 bp, Homo sapien
cagcacagacttggtgctgaagggg

SEQ ID NO: 4432646 - DNA, 25 bp, Homo sapien
cccttccagtgacgtggcctcgaac

SEQ ID NO: 4432647 - DNA, 25 bp, Homo sapien
ctggccccttccagtgacgtggcct

SEQ ID NO: 4432648 - DNA, 25 bp, Homo sapien
cttccagtgacgtggcctcgaacat

SEQ ID NO: 4432649 - DNA, 25 bp, Homo sapien
gccccttccagtgacgtggcctcga

SEQ ID NO: 4432650 - DNA, 25 bp, Homo sapien
gctccacattccaagccaacaccat

SEQ ID NO: 4432651 - DNA, 25 bp, Homo sapien
gatggcctgtatctgctccacattc

SEQ ID NO: 4432652 - DNA, 25 bp, Homo sapien
tgctccacattccaagccaacacca

SEQ ID NO: 4432653 - DNA, 25 bp, Homo sapien
gaagtccctggggatggcctgtatc

SEQ ID NO: 4432654 - DNA, 25 bp, Homo sapien
caaaaggcaagtggtcgtggaagcc

SEQ ID NO: 4432655 - DNA, 25 bp, Homo sapien
cacagagggtagatacgaaggcagc

SEQ ID NO: 4432656 - DNA, 25 bp, Homo sapien
cacacatcgatgagaacacagaggg

SEQ ID NO: 4432657 - DNA, 25 bp, Homo sapien
gacaagcactgatctgtcacgtgaa

SEQ ID NO: 4432658 - DNA, 25 bp, Homo sapien
aataacggccctctggccctgcaaa

SEQ ID NO: 4432659 - DNA, 25 bp, Homo sapien
ataacggccctctggccctgcaaag

SEQ ID NO: 4432660 - DNA, 25 bp, Homo sapien
cctgcaaagcgctgagcttctggtg

SEQ ID NO: 4432661 - DNA, 25 bp, Homo sapien
ctctggccctgcaaagcgctgagct

SEQ ID NO: 4432662 - DNA, 25 bp, Homo sapien
attgcgctgagcaagtcctccaagg

SEQ ID NO: 4432663 - DNA, 25 bp, Homo sapien
tgtttgacagaagggctgcttgtcc

SEQ ID NO: 4432664 - DNA, 25 bp, Homo sapien
cttcctatggggagtgtttgacaga

SEQ ID NO: 4432665 - DNA, 25 bp, Homo sapien
aagggctgcttgtccattgcgctga

SEQ ID NO: 4432666 - DNA, 25 bp, Homo sapien
gccagaggcaccagtaccctgggca

SEQ ID NO: 4432667 - DNA, 25 bp, Homo sapien
caagccagaggcaccagtaccctgg

SEQ ID NO: 4432668 - DNA, 25 bp, Homo sapien
ccagaggcaccagtaccctgggcat

SEQ ID NO: 4432669 - DNA, 25 bp, Homo sapien
aacaagccagaggcaccagtaccct

SEQ ID NO: 4432670 - DNA, 25 bp, Homo sapien
tggcacataggccatttctggaaga

SEQ ID NO: 4432671 - DNA, 25 bp, Homo sapien
gcacatcttcctcactagaggtgag

SEQ ID NO: 4432672 - DNA, 25 bp, Homo sapien
gcacataggccatttctggaagagg

SEQ ID NO: 4432673 - DNA, 25 bp, Homo sapien
tgcacatcttcctcactagaggtga

SEQ ID NO: 4432674 - DNA, 25 bp, Homo sapien
tgctcttggctccttgaagccccgg

SEQ ID NO: 4432675 - DNA, 25 bp, Homo sapien
cagctggcacgccctccacacttct

SEQ ID NO: 4432676 - DNA, 25 bp, Homo sapien
tctcccctgggctgagtgcagctca

SEQ ID NO: 4432677 - DNA, 25 bp, Homo sapien
cagggcagctggcacgccctccaca

SEQ ID NO: 4432678 - DNA, 25 bp, Homo sapien
ttcggcaatatagcagtgtcccacg

SEQ ID NO: 4432679 - DNA, 25 bp, Homo sapien
accctgagatcccttcggcaatata

SEQ ID NO: 4432680 - DNA, 25 bp, Homo sapien
gagcaggtcccagtgtaccctgaga

SEQ ID NO: 4432681 - DNA, 25 bp, Homo sapien
cagttctgctctgacgcctgaggga

SEQ ID NO: 4432682 - DNA, 25 bp, Homo sapien
cagctggactcaaacgctaccctta

SEQ ID NO: 4432683 - DNA, 25 bp, Homo sapien
ggtggacggactgccgctgtctcca

SEQ ID NO: 4432684 - DNA, 25 bp, Homo sapien
ccttatctgggtggacggactgccg

SEQ ID NO: 4432685 - DNA, 25 bp, Homo sapien
tgttccccaggtctgcaactggcgg

SEQ ID NO: 4432686 - DNA, 25 bp, Homo sapien
tgcgcctgcacgaggcgcccagcca

SEQ ID NO: 4432687 - DNA, 25 bp, Homo sapien
gggtcgatgtttgggggcttcagga

SEQ ID NO: 4432688 - DNA, 25 bp, Homo sapien
gcgcctgcacgaggcgcccagccag

SEQ ID NO: 4432689 - DNA, 25 bp, Homo sapien
gaggggtcgatgtttgggggcttca

SEQ ID NO: 4432690 - DNA, 25 bp, Homo sapien
atttctggcgacgtccccagtggtc

SEQ ID NO: 4432691 - DNA, 25 bp, Homo sapien
ggttctcaggcggtgccctcccact

SEQ ID NO: 4432692 - DNA, 25 bp, Homo sapien
catggctgccaatttctggcgacgt

SEQ ID NO: 4432693 - DNA, 25 bp, Homo sapien
tgtctccatggctgccaatttctgg

SEQ ID NO: 4432694 - DNA, 25 bp, Homo sapien
ccgtggcatgaagccagcgtcactc

SEQ ID NO: 4432695 - DNA, 25 bp, Homo sapien
ctggctgagctggttggactatgac

SEQ ID NO: 4432696 - DNA, 25 bp, Homo sapien
cttgtcccgtggcatgaagccagcg

SEQ ID NO: 4432697 - DNA, 25 bp, Homo sapien
gttggactatgactgtggtggccag

SEQ ID NO: 4432698 - DNA, 25 bp, Homo sapien
tgccgtcagccccacaatgtggctt

SEQ ID NO: 4432699 - DNA, 25 bp, Homo sapien
atgtggcttttgtcggccggggtag

SEQ ID NO: 4432700 - DNA, 25 bp, Homo sapien
cgtcagccccacaatgtggcttttg

SEQ ID NO: 4432701 - DNA, 25 bp, Homo sapien
agagcctcgaggcagccgcggtgca

SEQ ID NO: 4432702 - DNA, 25 bp, Homo sapien
ggcgccgctgctgagggaacgcggg

SEQ ID NO: 4432703 - DNA, 25 bp, Homo sapien
ggcctcccggaggaaatgctcggct

SEQ ID NO: 4432704 - DNA, 25 bp, Homo sapien
ttcaaacgccaccagctgcgaggac

SEQ ID NO: 4432705 - DNA, 25 bp, Homo sapien
tgtgcctccagaagcgaactacgtg

SEQ ID NO: 4432706 - DNA, 25 bp, Homo sapien
agcttcgccgcgcattgtggcaggc

SEQ ID NO: 4432707 - DNA, 25 bp, Homo sapien
gcaacgttagggaccacctcgccaa

SEQ ID NO: 4432708 - DNA, 25 bp, Homo sapien
tggcaggcgggacagctgccgtgcg

SEQ ID NO: 4432709 - DNA, 25 bp, Homo sapien
ctaaggatgccgagcggcaacgtta

SEQ ID NO: 4432710 - DNA, 25 bp, Homo sapien
ttgctgcgagtcgtcagccgcgcat

SEQ ID NO: 4432711 - DNA, 25 bp, Homo sapien
cgggcaccgaagagtgagcgcatgg

SEQ ID NO: 4432712 - DNA, 25 bp, Homo sapien
ccacggcctcgggagagcgggcggg

SEQ ID NO: 4432713 - DNA, 25 bp, Homo sapien
gcctgtgccgtcacccgcgcggctc

SEQ ID NO: 4432714 - DNA, 25 bp, Homo sapien
ctcggcggcgaagtggtccacatag

SEQ ID NO: 4432715 - DNA, 25 bp, Homo sapien
gcggctcgacatggacacgaggcac

SEQ ID NO: 4432716 - DNA, 25 bp, Homo sapien
actcggcggcgaagtggtccacata

SEQ ID NO: 4432717 - DNA, 25 bp, Homo sapien
acgaccgcgcggctcgacatggaca

SEQ ID NO: 4432718 - DNA, 25 bp, Homo sapien
cacgaagagcgaggcgctgtcctta

SEQ ID NO: 4432719 - DNA, 25 bp, Homo sapien
acgaagagcgaggcgctgtccttac

SEQ ID NO: 4432720 - DNA, 25 bp, Homo sapien
gggactcgaggtcggcgcgacttcg

SEQ ID NO: 4432721 - DNA, 25 bp, Homo sapien
cgccggcgcttgctggttgaggtcc

SEQ ID NO: 4432722 - DNA, 25 bp, Homo sapien
cgccggaccctttgtctgaggccgg

SEQ ID NO: 4432723 - DNA, 25 bp, Homo sapien
gttgaggtccgctaggatccgcgcc

SEQ ID NO: 4432724 - DNA, 25 bp, Homo sapien
ccttgaggtgcgaagatttcccgta

SEQ ID NO: 4432725 - DNA, 25 bp, Homo sapien
gatttcccgtaaactttctcgcagc

SEQ ID NO: 4432726 - DNA, 25 bp, Homo sapien
aactttctcgcagcccgcgtagtgg

SEQ ID NO: 4432727 - DNA, 25 bp, Homo sapien
cagcccgcgtagtggcacttgtgct

SEQ ID NO: 4432728 - DNA, 25 bp, Homo sapien
cagaggaagcatacaattctttaca

SEQ ID NO: 4432729 - DNA, 25 bp, Homo sapien
gaaggattgccgtccattaaaatat

SEQ ID NO: 4432730 - DNA, 25 bp, Homo sapien
gctcagaggaagcatacaattcttt

SEQ ID NO: 4432731 - DNA, 25 bp, Homo sapien
aaatggggaaggattgccgtccatt

SEQ ID NO: 4432732 - DNA, 25 bp, Homo sapien
ggttgtgatattcaccctctgccat

SEQ ID NO: 4432733 - DNA, 25 bp, Homo sapien
ctggttgtgatattcaccctctgcc

SEQ ID NO: 4432734 - DNA, 25 bp, Homo sapien
tggttgtgatattcaccctctgcca

SEQ ID NO: 4432735 - DNA, 25 bp, Homo sapien
cctggttgtgatattcaccctctgc

SEQ ID NO: 4432736 - DNA, 25 bp, Homo sapien
tgcagggagatctgggaaccggtcc

SEQ ID NO: 4432737 - DNA, 25 bp, Homo sapien
aagttgcagggagatctgggaaccg

SEQ ID NO: 4432738 - DNA, 25 bp, Homo sapien
tcaccaagttgcagggagatctggg

SEQ ID NO: 4432739 - DNA, 25 bp, Homo sapien
gttgcagggagatctgggaaccggt

SEQ ID NO: 4432740 - DNA, 25 bp, Homo sapien
gacctcatgtccctgaagactttgc

SEQ ID NO: 4432741 - DNA, 25 bp, Homo sapien
tcaaagggtcttcacatacttgacc

SEQ ID NO: 4432742 - DNA, 25 bp, Homo sapien
ccctgaagactttgcaggtggtcag

SEQ ID NO: 4432743 - DNA, 25 bp, Homo sapien
catacttgacctcatgtccctgaag

SEQ ID NO: 4432744 - DNA, 25 bp, Homo sapien
acttagagagtgtcacccgccgtag

SEQ ID NO: 4432745 - DNA, 25 bp, Homo sapien
caggacttagagagtgtcacccgcc

SEQ ID NO: 4432746 - DNA, 25 bp, Homo sapien
ttagagagtgtcacccgccgtaggc

SEQ ID NO: 4432747 - DNA, 25 bp, Homo sapien
ggacttagagagtgtcacccgccgt

SEQ ID NO: 4432748 - DNA, 25 bp, Homo sapien
gctcgccaacacagcagctctacac

SEQ ID NO: 4432749 - DNA, 25 bp, Homo sapien
ctgctcgccaacacagcagctctac

SEQ ID NO: 4432750 - DNA, 25 bp, Homo sapien
tgctcgccaacacagcagctctaca

SEQ ID NO: 4432751 - DNA, 25 bp, Homo sapien
ccatggggcaggtgactctttacaa

SEQ ID NO: 4432752 - DNA, 25 bp, Homo sapien
ctccatggggcaggtgactctttac

SEQ ID NO: 4432753 - DNA, 25 bp, Homo sapien
tccatggggcaggtgactctttaca

SEQ ID NO: 4432754 - DNA, 25 bp, Homo sapien
catggggcaggtgactctttacaag

SEQ ID NO: 4432755 - DNA, 25 bp, Homo sapien
cccgtgtcgcccaggtttgagtgta

SEQ ID NO: 4432756 - DNA, 25 bp, Homo sapien
aaattctgcatacatctttgaaggg

SEQ ID NO: 4432757 - DNA, 25 bp, Homo sapien
tgaagggggtgatgttagcaggact

SEQ ID NO: 4432758 - DNA, 25 bp, Homo sapien
ctccccgtgtcgcccaggtttgagt

SEQ ID NO: 4432759 - DNA, 25 bp, Homo sapien
cagctctgggttcccgtcagggttc

SEQ ID NO: 4432760 - DNA, 25 bp, Homo sapien
ctggtgttctgtgcggaacagctct

SEQ ID NO: 4432761 - DNA, 25 bp, Homo sapien
ccgtcagggttctcgggggctcctg

SEQ ID NO: 4432762 - DNA, 25 bp, Homo sapien
tgttctgtgcggaacagctctgggt

SEQ ID NO: 4432763 - DNA, 25 bp, Homo sapien
accagcgctgcagccactacaacag

SEQ ID NO: 4432764 - DNA, 25 bp, Homo sapien
tgcagcctatatgctgccccagggc

SEQ ID NO: 4432765 - DNA, 25 bp, Homo sapien
aacccctgcagcctatatgctgccc

SEQ ID NO: 4432766 - DNA, 25 bp, Homo sapien
ccccaacccctgcagcctatatgct

SEQ ID NO: 4432767 - DNA, 25 bp, Homo sapien
tcaataaaaagcatgtggtgcggcg

SEQ ID NO: 4432768 - DNA, 25 bp, Homo sapien
tcctgacaagagtggcaagctgcct

SEQ ID NO: 4432769 - DNA, 25 bp, Homo sapien
tgtgtgcctacgtaccacgcgtggt

SEQ ID NO: 4432770 - DNA, 25 bp, Homo sapien
ggaggagtggcgtcctttcttccca

SEQ ID NO: 4432771 - DNA, 25 bp, Homo sapien
gagctaaggcgaggttccgaacaac

SEQ ID NO: 4432772 - DNA, 25 bp, Homo sapien
caaagagccagtgcttgtgcaagtc

SEQ ID NO: 4432773 - DNA, 25 bp, Homo sapien
caaattcggcaaaggctaggctact

SEQ ID NO: 4432774 - DNA, 25 bp, Homo sapien
caatgtggtcggcatccaggtgccc

SEQ ID NO: 4432775 - DNA, 25 bp, Homo sapien
cattttacaaagcaagtggttcctg

SEQ ID NO: 4432776 - DNA, 25 bp, Homo sapien
aactcagaatctgcgccaggtccag

SEQ ID NO: 4432777 - DNA, 25 bp, Homo sapien
gggaactcttactcggatgtccatc

SEQ ID NO: 4432778 - DNA, 25 bp, Homo sapien
catgatacgggctgagaaaagactt

SEQ ID NO: 4432779 - DNA, 25 bp, Homo sapien
gctggccgacgtcatggcccatgga

SEQ ID NO: 4432780 - DNA, 25 bp, Homo sapien
ggccgacgtcatggcccatggagaa

SEQ ID NO: 4432781 - DNA, 25 bp, Homo sapien
ctgctggccgacgtcatggcccatg

SEQ ID NO: 4432782 - DNA, 25 bp, Homo sapien
gcatggagcccgtggccagcccaca

SEQ ID NO: 4432783 - DNA, 25 bp, Homo sapien
gacattcctatgcacctcttcagat

SEQ ID NO: 4432784 - DNA, 25 bp, Homo sapien
gtgacattcctatgcacctcttcag

SEQ ID NO: 4432785 - DNA, 25 bp, Homo sapien
ccaggggtgacattcctatgcacct

SEQ ID NO: 4432786 - DNA, 25 bp, Homo sapien
gggtgacattcctatgcacctcttc

SEQ ID NO: 4432787 - DNA, 25 bp, Homo sapien
tagtttgcatgaaccagtacactgc

SEQ ID NO: 4432788 - DNA, 25 bp, Homo sapien
gaagggaatagcactagtttgcatg

SEQ ID NO: 4432789 - DNA, 25 bp, Homo sapien
cagcaccccaatccctaagaaggga

SEQ ID NO: 4432790 - DNA, 25 bp, Homo sapien
tgggactgcttccacagaacccagc

SEQ ID NO: 4432791 - DNA, 25 bp, Homo sapien
ggtagacgagggagagtaagcacac

SEQ ID NO: 4432792 - DNA, 25 bp, Homo sapien
ctctcgaatgttcttctgaaccacc

SEQ ID NO: 4432793 - DNA, 25 bp, Homo sapien
ccaaggttactggaaccaggcttca

SEQ ID NO: 4432794 - DNA, 25 bp, Homo sapien
ccagctgtctctctcgaatgttctt

SEQ ID NO: 4432795 - DNA, 25 bp, Homo sapien
ttgtgagaagacttggtgagaggaa

SEQ ID NO: 4432796 - DNA, 25 bp, Homo sapien
ggagctccctctagctccaaaatga

SEQ ID NO: 4432797 - DNA, 25 bp, Homo sapien
gattccagactcctgcagaggagct

SEQ ID NO: 4432798 - DNA, 25 bp, Homo sapien
gaaccagtaggagattccagactcc

SEQ ID NO: 4432799 - DNA, 25 bp, Homo sapien
gctgctccatgggagccacactctg

SEQ ID NO: 4432800 - DNA, 25 bp, Homo sapien
catgctgctccatgggagccacact

SEQ ID NO: 4432801 - DNA, 25 bp, Homo sapien
gccgcccatgctgctccatgggagc

SEQ ID NO: 4432802 - DNA, 25 bp, Homo sapien
cccatgctgctccatgggagccaca

SEQ ID NO: 4432803 - DNA, 25 bp, Homo sapien
gccgggccagtggtctccaacgcct

SEQ ID NO: 4432804 - DNA, 25 bp, Homo sapien
tctccaacgcctgggggttgcaggc

SEQ ID NO: 4432805 - DNA, 25 bp, Homo sapien
ggtctccaacgcctgggggttgcag

SEQ ID NO: 4432806 - DNA, 25 bp, Homo sapien
caacgcctgggggttgcaggcccat

SEQ ID NO: 4432807 - DNA, 25 bp, Homo sapien
tcctggcagtggaccccctaagtac

SEQ ID NO: 4432808 - DNA, 25 bp, Homo sapien
atcagtatccgcacctggccccgcc

SEQ ID NO: 4432809 - DNA, 25 bp, Homo sapien
tcccgcccacgcctgggatggaggc

SEQ ID NO: 4432810 - DNA, 25 bp, Homo sapien
gataaaacagcatttcaggtgctga

SEQ ID NO: 4432811 - DNA, 25 bp, Homo sapien
gagcggctgtagtcgctgagggagc

SEQ ID NO: 4432812 - DNA, 25 bp, Homo sapien
gagcgcgcgaacttcttgttgcagt

SEQ ID NO: 4432813 - DNA, 25 bp, Homo sapien
gtagtgccgcgccagctcgtcggag

SEQ ID NO: 4432814 - DNA, 25 bp, Homo sapien
cagcattcccgggtggaagttggcg

SEQ ID NO: 4432815 - DNA, 25 bp, Homo sapien
cactttgggaatgaagacacgctct

SEQ ID NO: 4432816 - DNA, 25 bp, Homo sapien
tttgctggaccacggcttgactgac

SEQ ID NO: 4432817 - DNA, 25 bp, Homo sapien
tgtttccaacaaaagtgcccgtgcg

SEQ ID NO: 4432818 - DNA, 25 bp, Homo sapien
cacacagtggtaagaagcgggcacc

SEQ ID NO: 4432819 - DNA, 25 bp, Homo sapien
taggagtgaggcgatcttgcactcg

SEQ ID NO: 4432820 - DNA, 25 bp, Homo sapien
agtcagggttaggagtgaggcgatc

SEQ ID NO: 4432821 - DNA, 25 bp, Homo sapien
gatcttgcactcgagtgtcgtgggt

SEQ ID NO: 4432822 - DNA, 25 bp, Homo sapien
gaggcgatcttgcactcgagtgtcg

SEQ ID NO: 4432823 - DNA, 25 bp, Homo sapien
tgggatcgccagtgcctcagatgtt

SEQ ID NO: 4432824 - DNA, 25 bp, Homo sapien
caaccagaagcggagaaacaaggcc

SEQ ID NO: 4432825 - DNA, 25 bp, Homo sapien
tgtcagaagtcaaaataggtagccc

SEQ ID NO: 4432826 - DNA, 25 bp, Homo sapien
cagatgtttgtacccggaggctgca

SEQ ID NO: 4432827 - DNA, 25 bp, Homo sapien
taagaaagctgttcccgtgctccca

SEQ ID NO: 4432828 - DNA, 25 bp, Homo sapien
taaagggtgctcaggcgtgtatcag

SEQ ID NO: 4432829 - DNA, 25 bp, Homo sapien
caagttctggtacaaaggtctccgg

SEQ ID NO: 4432830 - DNA, 25 bp, Homo sapien
ggtggccgcactgcaagtctgaaat

SEQ ID NO: 4432831 - DNA, 25 bp, Homo sapien
gtttccaaataagcacgcactgcga

SEQ ID NO: 4432832 - DNA, 25 bp, Homo sapien
ataagcacgcactgcgacctgtcca

SEQ ID NO: 4432833 - DNA, 25 bp, Homo sapien
caaataagcacgcactgcgacctgt

SEQ ID NO: 4432834 - DNA, 25 bp, Homo sapien
tccaaataagcacgcactgcgacct

SEQ ID NO: 4432835 - DNA, 25 bp, Homo sapien
cacatgggaggtggcctcttgctcc

SEQ ID NO: 4432836 - DNA, 25 bp, Homo sapien
gccaggtacaagggctcctctgctg

SEQ ID NO: 4432837 - DNA, 25 bp, Homo sapien
acctggagccggcacagacgctggg

SEQ ID NO: 4432838 - DNA, 25 bp, Homo sapien
tgagcccacgtggtgtctagagcca

SEQ ID NO: 4432839 - DNA, 25 bp, Homo sapien
cccaaacccgacaatgacaatgcat

SEQ ID NO: 4432840 - DNA, 25 bp, Homo sapien
cagtcaccaaggaaccaccgaaagc

SEQ ID NO: 4432841 - DNA, 25 bp, Homo sapien
atgcacacaagcaattcccagtcac

SEQ ID NO: 4432842 - DNA, 25 bp, Homo sapien
cggaagcatgcacccaacacatgca

SEQ ID NO: 4432843 - DNA, 25 bp, Homo sapien
tggtcttggacccttggattctgcc

SEQ ID NO: 4432844 - DNA, 25 bp, Homo sapien
gattccagagaagctccaccaatgg

SEQ ID NO: 4432845 - DNA, 25 bp, Homo sapien
gccagactgggaactgtacaactgt

SEQ ID NO: 4432846 - DNA, 25 bp, Homo sapien
caggaaagatgaaacgtggccttcg

SEQ ID NO: 4432847 - DNA, 25 bp, Homo sapien
cgtcctcgctggagcacactttggg

SEQ ID NO: 4432848 - DNA, 25 bp, Homo sapien
agtgtcctgggactcgtcctcgctg

SEQ ID NO: 4432849 - DNA, 25 bp, Homo sapien
cagtgcccgtggtaggttgtaggaa

SEQ ID NO: 4432850 - DNA, 25 bp, Homo sapien
tgggactcgtcctcgctggagcaca

SEQ ID NO: 4432851 - DNA, 25 bp, Homo sapien
tcctccactagctgccagcttccca

SEQ ID NO: 4432852 - DNA, 25 bp, Homo sapien
ctagaacagggttcgggccagacct

SEQ ID NO: 4432853 - DNA, 25 bp, Homo sapien
ccactgcctccgatgaggacatcat

SEQ ID NO: 4432854 - DNA, 25 bp, Homo sapien
agcttcccactgcctccgatgagga

SEQ ID NO: 4432855 - DNA, 25 bp, Homo sapien
tgttattcaagaccttctgcagcca

SEQ ID NO: 4432856 - DNA, 25 bp, Homo sapien
tcatggaattcctggcaagcagtgt

SEQ ID NO: 4432857 - DNA, 25 bp, Homo sapien
gaattttagcatggcctagatgagg

SEQ ID NO: 4432858 - DNA, 25 bp, Homo sapien
gattacaccccagtgagtccacttg

SEQ ID NO: 4432859 - DNA, 25 bp, Homo sapien
aatgctggtctctgatgcgtaacgg

SEQ ID NO: 4432860 - DNA, 25 bp, Homo sapien
gagatagcagccctgccaggagtag

SEQ ID NO: 4432861 - DNA, 25 bp, Homo sapien
tgtcttctgtacaaacctgcctgtc

SEQ ID NO: 4432862 - DNA, 25 bp, Homo sapien
cagcaactggcaattaatacaggcc

SEQ ID NO: 4432863 - DNA, 25 bp, Homo sapien
ccctttgcaccaacgtgtggacagc

SEQ ID NO: 4432864 - DNA, 25 bp, Homo sapien
gggtatgtccaaaagtacgctcatg

SEQ ID NO: 4432865 - DNA, 25 bp, Homo sapien
caacgtgtggacagcctttgggcgt

SEQ ID NO: 4432866 - DNA, 25 bp, Homo sapien
ctttgggcgtgtctgtccttgtgtg

SEQ ID NO: 4432867 - DNA, 25 bp, Homo sapien
gggcgggacagtcgcgcgcgtagag

SEQ ID NO: 4432868 - DNA, 25 bp, Homo sapien
gtagaggacccaggatgcgccgtca

SEQ ID NO: 4432869 - DNA, 25 bp, Homo sapien
ccaggatgcgccgtcagggtcctga

SEQ ID NO: 4432870 - DNA, 25 bp, Homo sapien
aaaaggacgcgggtgagagctggga

SEQ ID NO: 4432871 - DNA, 25 bp, Homo sapien
acagtgcacctagagccgtttcgga

SEQ ID NO: 4432872 - DNA, 25 bp, Homo sapien
gtttcggaccggctcacggcagccg

SEQ ID NO: 4432873 - DNA, 25 bp, Homo sapien
tgctctccaggcgtagcggacctgg

SEQ ID NO: 4432874 - DNA, 25 bp, Homo sapien
aggtggagccggcagaacttgcctc

SEQ ID NO: 4432875 - DNA, 25 bp, Homo sapien
ctaggaggtcccagtagccccagca

SEQ ID NO: 4432876 - DNA, 25 bp, Homo sapien
catatctggaccgggaaatgcaaag

SEQ ID NO: 4432877 - DNA, 25 bp, Homo sapien
tctggaccgggaaatgcaaaggccg

SEQ ID NO: 4432878 - DNA, 25 bp, Homo sapien
tatctggaccgggaaatgcaaaggc

SEQ ID NO: 4432879 - DNA, 25 bp, Homo sapien
tggaccgggaaatgcaaaggccgaa

SEQ ID NO: 4432880 - DNA, 25 bp, Homo sapien
gaccgcagagcacagcgggggttga

SEQ ID NO: 4432881 - DNA, 25 bp, Homo sapien
accgcagagcacagcgggggttgag

SEQ ID NO: 4432882 - DNA, 25 bp, Homo sapien
gcgaccgcagagcacagcgggggtt

SEQ ID NO: 4432883 - DNA, 25 bp, Homo sapien
ctgcgaccgcagagcacagcggggg

SEQ ID NO: 4432884 - DNA, 25 bp, Homo sapien
cttcaaggccaaagcagcgatgcct

SEQ ID NO: 4432885 - DNA, 25 bp, Homo sapien
ctggtcttggagcaccgaagcggct

SEQ ID NO: 4432886 - DNA, 25 bp, Homo sapien
ctctctggtcttggagcaccgaagc

SEQ ID NO: 4432887 - DNA, 25 bp, Homo sapien
aaggccaaagcagcgatgcctggct

SEQ ID NO: 4432888 - DNA, 25 bp, Homo sapien
ctctgtggagatgttagcctcatgg

SEQ ID NO: 4432889 - DNA, 25 bp, Homo sapien
ctctttggccagtgcacagcgcttc

SEQ ID NO: 4432890 - DNA, 25 bp, Homo sapien
ctttggccagtgcacagcgcttctc

SEQ ID NO: 4432891 - DNA, 25 bp, Homo sapien
gagatgttagcctcatggaccgcgc

SEQ ID NO: 4432892 - DNA, 25 bp, Homo sapien
caaacgtgctcttctgacatggaga

SEQ ID NO: 4432893 - DNA, 25 bp, Homo sapien
catccatgtaggcaagggagcagca

SEQ ID NO: 4432894 - DNA, 25 bp, Homo sapien
gaggatcaaattcccacatgaaggg

SEQ ID NO: 4432895 - DNA, 25 bp, Homo sapien
caatatagtctttcccgctgagtgt

SEQ ID NO: 4432896 - DNA, 25 bp, Homo sapien
gtggacttcctgagtgtcttctcca

SEQ ID NO: 4432897 - DNA, 25 bp, Homo sapien
ctgcaccagagcggggacattcagg

SEQ ID NO: 4432898 - DNA, 25 bp, Homo sapien
tgtggacttcctgagtgtcttctcc

SEQ ID NO: 4432899 - DNA, 25 bp, Homo sapien
cagagcggggacattcaggctctgt

SEQ ID NO: 4432900 - DNA, 25 bp, Homo sapien
ctcctccgctcctggcggtgggatg

SEQ ID NO: 4432901 - DNA, 25 bp, Homo sapien
ccgctgacagccaggtcggacctga

SEQ ID NO: 4432902 - DNA, 25 bp, Homo sapien
ccaggtcggacctgagcacgagacc

SEQ ID NO: 4432903 - DNA, 25 bp, Homo sapien
agccctgggtcccagtgccgctgac

SEQ ID NO: 4432904 - DNA, 25 bp, Homo sapien
tattccgataagacccatatactgc

SEQ ID NO: 4432905 - DNA, 25 bp, Homo sapien
tctagactaatgagccgcagaactg

SEQ ID NO: 4432906 - DNA, 25 bp, Homo sapien
cccatatactgctgttggctgagcc

SEQ ID NO: 4432907 - DNA, 25 bp, Homo sapien
ggtgataagctgagaacactgagcc

SEQ ID NO: 4432908 - DNA, 25 bp, Homo sapien
gaagaaaacagttcacgagtcccat

SEQ ID NO: 4432909 - DNA, 25 bp, Homo sapien
gaaaacagttcacgagtcccattgc

SEQ ID NO: 4432910 - DNA, 25 bp, Homo sapien
acagttcacgagtcccattgcccat

SEQ ID NO: 4432911 - DNA, 25 bp, Homo sapien
aaacagttcacgagtcccattgccc

SEQ ID NO: 4432912 - DNA, 25 bp, Homo sapien
caatcgagccgtagagagagagcaa

SEQ ID NO: 4432913 - DNA, 25 bp, Homo sapien
aaatgggaagcagcttgtgttcccc

SEQ ID NO: 4432914 - DNA, 25 bp, Homo sapien
gacagttggaactggcaatcgagcc

SEQ ID NO: 4432915 - DNA, 25 bp, Homo sapien
gacctggccctgtgcgtcagttctg

SEQ ID NO: 4432916 - DNA, 25 bp, Homo sapien
cagccgacagcatatctcgtttgtg

SEQ ID NO: 4432917 - DNA, 25 bp, Homo sapien
ttgacttggagtatattgcccagag

SEQ ID NO: 4432918 - DNA, 25 bp, Homo sapien
gattcatcgattatttgccagtcac

SEQ ID NO: 4432919 - DNA, 25 bp, Homo sapien
tatccggaccagagcaaaagatctt

SEQ ID NO: 4432920 - DNA, 25 bp, Homo sapien
gaattggtccaggtagccacacgct

SEQ ID NO: 4432921 - DNA, 25 bp, Homo sapien
cactggctaacctttttcatgagaa

SEQ ID NO: 4432922 - DNA, 25 bp, Homo sapien
cagtttactcaatgtgggaggcagg

SEQ ID NO: 4432923 - DNA, 25 bp, Homo sapien
gggatcacttacaaccactggctaa

SEQ ID NO: 4432924 - DNA, 25 bp, Homo sapien
tcccacagacgaactgccttagtgc

SEQ ID NO: 4432925 - DNA, 25 bp, Homo sapien
catcccacagacgaactgccttagt

SEQ ID NO: 4432926 - DNA, 25 bp, Homo sapien
acagagccatcccacagacgaactg

SEQ ID NO: 4432927 - DNA, 25 bp, Homo sapien
ccacagacgaactgccttagtgcag

SEQ ID NO: 4432928 - DNA, 25 bp, Homo sapien
ctggaagtccatgatagccgcgggc

SEQ ID NO: 4432929 - DNA, 25 bp, Homo sapien
tgttcagtctgctctgtgggcacct

SEQ ID NO: 4432930 - DNA, 25 bp, Homo sapien
tgccgacctgcttagttaccactgt

SEQ ID NO: 4432931 - DNA, 25 bp, Homo sapien
gcttatgctacttggccatgtccag

SEQ ID NO: 4432932 - DNA, 25 bp, Homo sapien
ttttatgggtggcgacgacactagt

SEQ ID NO: 4432933 - DNA, 25 bp, Homo sapien
tttatgggtggcgacgacactagtg

SEQ ID NO: 4432934 - DNA, 25 bp, Homo sapien
ttatgggtggcgacgacactagtgg

SEQ ID NO: 4432935 - DNA, 25 bp, Homo sapien
cttttatgggtggcgacgacactag

SEQ ID NO: 4432936 - DNA, 25 bp, Homo sapien
tttgcccacaggattctgggcagca

SEQ ID NO: 4432937 - DNA, 25 bp, Homo sapien
gattctgggcagcacccccactcag

SEQ ID NO: 4432938 - DNA, 25 bp, Homo sapien
ggcagcacccccactcagctcggct

SEQ ID NO: 4432939 - DNA, 25 bp, Homo sapien
ctgtagtcttttgcccacaggattc

SEQ ID NO: 4432940 - DNA, 25 bp, Homo sapien
caaggaaagcagaaatccctttgtc

SEQ ID NO: 4432941 - DNA, 25 bp, Homo sapien
gaaatccctttgtcaccagatatca

SEQ ID NO: 4432942 - DNA, 25 bp, Homo sapien
aagcagaaatccctttgtcaccaga

SEQ ID NO: 4432943 - DNA, 25 bp, Homo sapien
ttcaaggaaagcagaaatccctttg

SEQ ID NO: 4432944 - DNA, 25 bp, Homo sapien
ctcaggtcttcatacactgtgccag

SEQ ID NO: 4432945 - DNA, 25 bp, Homo sapien
tggatggtccctacccatttgaaaa

SEQ ID NO: 4432946 - DNA, 25 bp, Homo sapien
tcttcatacactgtgccagctgctc

SEQ ID NO: 4432947 - DNA, 25 bp, Homo sapien
cagctgctccatggatggtccctac

SEQ ID NO: 4432948 - DNA, 25 bp, Homo sapien
gatgtgaggaacttcactgtgggct

SEQ ID NO: 4432949 - DNA, 25 bp, Homo sapien
tggtagcaggatgtgaggaacttca

SEQ ID NO: 4432950 - DNA, 25 bp, Homo sapien
actggggaactctagcaagagctta

SEQ ID NO: 4432951 - DNA, 25 bp, Homo sapien
tcactgtgggctcattgtaagggta

SEQ ID NO: 4432952 - DNA, 25 bp, Homo sapien
ttccagatatccaggcatatgttac

SEQ ID NO: 4432953 - DNA, 25 bp, Homo sapien
tttccagatatccaggcatatgtta

SEQ ID NO: 4432954 - DNA, 25 bp, Homo sapien
ctttccagatatccaggcatatgtt

SEQ ID NO: 4432955 - DNA, 25 bp, Homo sapien
gaatggtcctgatgccatacagtac

SEQ ID NO: 4432956 - DNA, 25 bp, Homo sapien
agaatggtcctgatgccatacagta

SEQ ID NO: 4432957 - DNA, 25 bp, Homo sapien
aatggtcctgatgccatacagtaca

SEQ ID NO: 4432958 - DNA, 25 bp, Homo sapien
tctgtgaccttgacaagctctccag

SEQ ID NO: 4432959 - DNA, 25 bp, Homo sapien
cagcctcccggatcaccttccttgt

SEQ ID NO: 4432960 - DNA, 25 bp, Homo sapien
gaaaaccgtgggtctgtgaccttga

SEQ ID NO: 4432961 - DNA, 25 bp, Homo sapien
tcccggatcaccttccttgtcttcc

SEQ ID NO: 4432962 - DNA, 25 bp, Homo sapien
tttcagcacaggatcggaaggtctg

SEQ ID NO: 4432963 - DNA, 25 bp, Homo sapien
ggtggagacacatcctttgcccgcc

SEQ ID NO: 4432964 - DNA, 25 bp, Homo sapien
tttgcccgccacagacactggaggg

SEQ ID NO: 4432965 - DNA, 25 bp, Homo sapien
gggcgtgtcgacattgcctgcagat

SEQ ID NO: 4432966 - DNA, 25 bp, Homo sapien
tattctgtttacttcaagagaaaga

SEQ ID NO: 4432967 - DNA, 25 bp, Homo sapien
tttattctgtttacttcaagagaaa

SEQ ID NO: 4432968 - DNA, 25 bp, Homo sapien
cttttattctgtttacttcaagaga

SEQ ID NO: 4432969 - DNA, 25 bp, Homo sapien
tctgagcaactctcttttattctgt

SEQ ID NO: 4432970 - DNA, 25 bp, Homo sapien
gattcaggagtgtcatctcccaggg

SEQ ID NO: 4432971 - DNA, 25 bp, Homo sapien
gtgagggattcaggagtgtcatctc

SEQ ID NO: 4432972 - DNA, 25 bp, Homo sapien
ttcaggagtgtcatctcccaggggt

SEQ ID NO: 4432973 - DNA, 25 bp, Homo sapien
ctgtgagggattcaggagtgtcatc

SEQ ID NO: 4432974 - DNA, 25 bp, Homo sapien
cagattggcgggtaaatgcctcccc

SEQ ID NO: 4432975 - DNA, 25 bp, Homo sapien
ttcatccatgacatgacctcgctcc

SEQ ID NO: 4432976 - DNA, 25 bp, Homo sapien
tcagattggcgggtaaatgcctccc

SEQ ID NO: 4432977 - DNA, 25 bp, Homo sapien
tggaggtgacatagccttcatccat

SEQ ID NO: 4432978 - DNA, 25 bp, Homo sapien
cagtcgccctggtggcaggtctcca

SEQ ID NO: 4432979 - DNA, 25 bp, Homo sapien
ttgaaggagcagtcgccctggtggc

SEQ ID NO: 4432980 - DNA, 25 bp, Homo sapien
tcacataaagtgcacttcagacatg

SEQ ID NO: 4432981 - DNA, 25 bp, Homo sapien
ggtggcaggtctccacccgaggcct

SEQ ID NO: 4432982 - DNA, 25 bp, Homo sapien
gccttgaaggatggccgtagtgcac

SEQ ID NO: 4432983 - DNA, 25 bp, Homo sapien
gaagcgattccaagagacctgcaag

SEQ ID NO: 4432984 - DNA, 25 bp, Homo sapien
gaggaatttgatcctgccttgaagg

SEQ ID NO: 4432985 - DNA, 25 bp, Homo sapien
tctggacgctgggaaagtccacgag

SEQ ID NO: 4432986 - DNA, 25 bp, Homo sapien
taacagcattattcgtatcagcccc

SEQ ID NO: 4432987 - DNA, 25 bp, Homo sapien
gacatgcgtttcgaactcaaataag

SEQ ID NO: 4432988 - DNA, 25 bp, Homo sapien
tgaggcatccagcatagacaaatct

SEQ ID NO: 4432989 - DNA, 25 bp, Homo sapien
ggcgtgactgctaattgacatgcgt

SEQ ID NO: 4432990 - DNA, 25 bp, Homo sapien
aaagtcagatgacaagtgtcagcaa

SEQ ID NO: 4432991 - DNA, 25 bp, Homo sapien
aagtcagatgacaagtgtcagcaaa

SEQ ID NO: 4432992 - DNA, 25 bp, Homo sapien
ttccaattcaatgcaaatatccttt

SEQ ID NO: 4432993 - DNA, 25 bp, Homo sapien
ggtgttaattccaattcaatgcaaa

SEQ ID NO: 4432994 - DNA, 25 bp, Homo sapien
aaatatccttttcaatccggtccat

SEQ ID NO: 4432995 - DNA, 25 bp, Homo sapien
ctgcaggtgttaattccaattcaat

SEQ ID NO: 4432996 - DNA, 25 bp, Homo sapien
taatgaagtcagtgaatgttcctct

SEQ ID NO: 4432997 - DNA, 25 bp, Homo sapien
tatatgttgctttatttctcccatt

SEQ ID NO: 4432998 - DNA, 25 bp, Homo sapien
gcgtttggcctaatgaagtcagtga

SEQ ID NO: 4432999 - DNA, 25 bp, Homo sapien
tgctttgttccattaaacgtgcgtt

SEQ ID NO: 4433000 - DNA, 25 bp, Homo sapien
catattttcaggtccctcgtgggag

SEQ ID NO: 4433001 - DNA, 25 bp, Homo sapien
tactgttacaagcttcttatgggac

SEQ ID NO: 4433002 - DNA, 25 bp, Homo sapien
taaacagtgtccctttcattgctgc

SEQ ID NO: 4433003 - DNA, 25 bp, Homo sapien
cataaggtctccatcgtgatgccct

SEQ ID NO: 4433004 - DNA, 25 bp, Homo sapien
tccacctgaccattagaaggactca

SEQ ID NO: 4433005 - DNA, 25 bp, Homo sapien
agttcaacacgggtggcagcagatg

SEQ ID NO: 4433006 - DNA, 25 bp, Homo sapien
catgaggtcactgtagacctggacc

SEQ ID NO: 4433007 - DNA, 25 bp, Homo sapien
taatcagtctttaggtgtctcccag

SEQ ID NO: 4433008 - DNA, 25 bp, Homo sapien
gagtcctgcgtctcaaaggcctgga

SEQ ID NO: 4433009 - DNA, 25 bp, Homo sapien
gaatagctctgcctgcaattgccag

SEQ ID NO: 4433010 - DNA, 25 bp, Homo sapien
gcctcggtgccttcatgttagatgc

SEQ ID NO: 4433011 - DNA, 25 bp, Homo sapien
tgcagggctctcagcagacaactgt

SEQ ID NO: 4433012 - DNA, 25 bp, Homo sapien
gctaaagaggtatccaatttttctg

SEQ ID NO: 4433013 - DNA, 25 bp, Homo sapien
tataaaatagtgcttaactttctca

SEQ ID NO: 4433014 - DNA, 25 bp, Homo sapien
taatagcacattaatgttaaaaaac

SEQ ID NO: 4433015 - DNA, 25 bp, Homo sapien
tgcttaactttctcaaagcccgagg

SEQ ID NO: 4433016 - DNA, 25 bp, Homo sapien
caaacaattttggtgacccgtatgg

SEQ ID NO: 4433017 - DNA, 25 bp, Homo sapien
tattcaatatactctcataacaaaa

SEQ ID NO: 4433018 - DNA, 25 bp, Homo sapien
tcaagtaatattgctttacgacacc

SEQ ID NO: 4433019 - DNA, 25 bp, Homo sapien
tattgctttacgacaccaggaaaca

SEQ ID NO: 4433020 - DNA, 25 bp, Homo sapien
tagttgccttaatgggaagcctcag

SEQ ID NO: 4433021 - DNA, 25 bp, Homo sapien
tctctataccatgatgaggacggga

SEQ ID NO: 4433022 - DNA, 25 bp, Homo sapien
gacctggtgttacggaaagctctct

SEQ ID NO: 4433023 - DNA, 25 bp, Homo sapien
ttgagaatgggttgccaagggcacc

SEQ ID NO: 4433024 - DNA, 25 bp, Homo sapien
tgtctccattcacgccacagcagat

SEQ ID NO: 4433025 - DNA, 25 bp, Homo sapien
tcccagcacctagaatgagtgagtg

SEQ ID NO: 4433026 - DNA, 25 bp, Homo sapien
tcaacatcgtacactctgtgccagc

SEQ ID NO: 4433027 - DNA, 25 bp, Homo sapien
tgtgccagcctcgtggctatcctca

SEQ ID NO: 4433028 - DNA, 25 bp, Homo sapien
caagtctcaagatccctagttagtc

SEQ ID NO: 4433029 - DNA, 25 bp, Homo sapien
tccagggaacccaccattatgtcgt

SEQ ID NO: 4433030 - DNA, 25 bp, Homo sapien
tctaatctgggatatgtgaggcaaa

SEQ ID NO: 4433031 - DNA, 25 bp, Homo sapien
gaaaaagtacatctgatctatcttc

SEQ ID NO: 4433032 - DNA, 25 bp, Homo sapien
tattggttgttgttaggtatacctc

SEQ ID NO: 4433033 - DNA, 25 bp, Homo sapien
tctggaggagcttgtgtaatattgg

SEQ ID NO: 4433034 - DNA, 25 bp, Homo sapien
catgagagatgttactctgcacttt

SEQ ID NO: 4433035 - DNA, 25 bp, Homo sapien
gtgaagcatataaaccttacctgcc

SEQ ID NO: 4433036 - DNA, 25 bp, Homo sapien
ctggatgttagaatagcactgggcc

SEQ ID NO: 4433037 - DNA, 25 bp, Homo sapien
cgggcaccacattctaggttctgct

SEQ ID NO: 4433038 - DNA, 25 bp, Homo sapien
ggatgttagaatagcactgggccat

SEQ ID NO: 4433039 - DNA, 25 bp, Homo sapien
gggcaccacattctaggttctgctg

SEQ ID NO: 4433040 - DNA, 25 bp, Homo sapien
gttttcaagctattcacaatgccag

SEQ ID NO: 4433041 - DNA, 25 bp, Homo sapien
tcctgttctgtggttatgtcatggg

SEQ ID NO: 4433042 - DNA, 25 bp, Homo sapien
tcacaatgccagtgcccgtgtcttg

SEQ ID NO: 4433043 - DNA, 25 bp, Homo sapien
gccagtgcccgtgtcttgttcctgt

SEQ ID NO: 4433044 - DNA, 25 bp, Homo sapien
gtctacactcgcaggaggccttgag

SEQ ID NO: 4433045 - DNA, 25 bp, Homo sapien
tagctcattgtttatgttgggcacc

SEQ ID NO: 4433046 - DNA, 25 bp, Homo sapien
tgggtctcactcttcagggagtggt

SEQ ID NO: 4433047 - DNA, 25 bp, Homo sapien
gtggagaagccatctggtctacact

SEQ ID NO: 4433048 - DNA, 25 bp, Homo sapien
agcacccaaggatgcctgcacgtac

SEQ ID NO: 4433049 - DNA, 25 bp, Homo sapien
attcatatccatgctatcagcaccc

SEQ ID NO: 4433050 - DNA, 25 bp, Homo sapien
tcgtgggggtatgctcagtgaatcc

SEQ ID NO: 4433051 - DNA, 25 bp, Homo sapien
aaggatgcctgcacgtacagggagc

SEQ ID NO: 4433052 - DNA, 25 bp, Homo sapien
tgttagcctcttaagaagcacatac

SEQ ID NO: 4433053 - DNA, 25 bp, Homo sapien
ctgttagcctcttaagaagcacata

SEQ ID NO: 4433054 - DNA, 25 bp, Homo sapien
tctgttagcctcttaagaagcacat

SEQ ID NO: 4433055 - DNA, 25 bp, Homo sapien
tggtgaatgaagttaacggtgttgc

SEQ ID NO: 4433056 - DNA, 25 bp, Homo sapien
tctagaaagatgattgggctcagtg

SEQ ID NO: 4433057 - DNA, 25 bp, Homo sapien
ggctcagtgagaagattgacttgca

SEQ ID NO: 4433058 - DNA, 25 bp, Homo sapien
gattgacttgcaagttaactctggc

SEQ ID NO: 4433059 - DNA, 25 bp, Homo sapien
ctggctgactgcgagcggagagcca

SEQ ID NO: 4433060 - DNA, 25 bp, Homo sapien
gaacttcgctggctgactgcgagcg

SEQ ID NO: 4433061 - DNA, 25 bp, Homo sapien
acttcgctggctgactgcgagcgga

SEQ ID NO: 4433062 - DNA, 25 bp, Homo sapien
ggctgactgcgagcggagagccaga

SEQ ID NO: 4433063 - DNA, 25 bp, Homo sapien
gggcacagtggcacagtctccccgg

SEQ ID NO: 4433064 - DNA, 25 bp, Homo sapien
tcactccctgtccacgggcacagtg

SEQ ID NO: 4433065 - DNA, 25 bp, Homo sapien
cacagtggcacagtctccccggtgg

SEQ ID NO: 4433066 - DNA, 25 bp, Homo sapien
cactccctgtccacgggcacagtgg

SEQ ID NO: 4433067 - DNA, 25 bp, Homo sapien
caggaacattgcctgctgtatacag

SEQ ID NO: 4433068 - DNA, 25 bp, Homo sapien
ggaacattgcctgctgtatacaggg

SEQ ID NO: 4433069 - DNA, 25 bp, Homo sapien
ctgcaggaacattgcctgctgtata

SEQ ID NO: 4433070 - DNA, 25 bp, Homo sapien
aacattgcctgctgtatacagggca

SEQ ID NO: 4433071 - DNA, 25 bp, Homo sapien
aattcgacgctattccacaagacag

SEQ ID NO: 4433072 - DNA, 25 bp, Homo sapien
cagaattcgacgctattccacaaga

SEQ ID NO: 4433073 - DNA, 25 bp, Homo sapien
cagcagaattcgacgctattccaca

SEQ ID NO: 4433074 - DNA, 25 bp, Homo sapien
ttcacagcagaattcgacgctattc

SEQ ID NO: 4433075 - DNA, 25 bp, Homo sapien
gcttcgttggagatgtttaatttca

SEQ ID NO: 4433076 - DNA, 25 bp, Homo sapien
agagttgggagccagtgcaccattg

SEQ ID NO: 4433077 - DNA, 25 bp, Homo sapien
tcagttagcgatgctttcagcttcg

SEQ ID NO: 4433078 - DNA, 25 bp, Homo sapien
tgcaccattgggttgactgctcagt

SEQ ID NO: 4433079 - DNA, 25 bp, Homo sapien
gaccctgagctaaggtgcactctga

SEQ ID NO: 4433080 - DNA, 25 bp, Homo sapien
tatatgcttctcagcagagctgtgt

SEQ ID NO: 4433081 - DNA, 25 bp, Homo sapien
caataggtaactgatgcagcatcca

SEQ ID NO: 4433082 - DNA, 25 bp, Homo sapien
cctaaatctgggagttgtcgtttca

SEQ ID NO: 4433083 - DNA, 25 bp, Homo sapien
gagaagaccgctctgtgtcctgcat

SEQ ID NO: 4433084 - DNA, 25 bp, Homo sapien
ggttattttagaagctacacacgaa

SEQ ID NO: 4433085 - DNA, 25 bp, Homo sapien
tgaattagactgagtcttcaaaaac

SEQ ID NO: 4433086 - DNA, 25 bp, Homo sapien
ctctgaaaaggttacttgcctcatt

SEQ ID NO: 4433087 - DNA, 25 bp, Homo sapien
ccatttccagcagggacggcgcagt

SEQ ID NO: 4433088 - DNA, 25 bp, Homo sapien
gccatttccagcagggacggcgcag

SEQ ID NO: 4433089 - DNA, 25 bp, Homo sapien
cttccactggggcaacaatgggcca

SEQ ID NO: 4433090 - DNA, 25 bp, Homo sapien
gggcaacaatgggccatttccagca

SEQ ID NO: 4433091 - DNA, 25 bp, Homo sapien
gtctgttaagtccacacggatgaga

SEQ ID NO: 4433092 - DNA, 25 bp, Homo sapien
agtccacacggatgagacttttccc

SEQ ID NO: 4433093 - DNA, 25 bp, Homo sapien
gagcccaccctcacgtctgttaagt

SEQ ID NO: 4433094 - DNA, 25 bp, Homo sapien
tctgagcccaccctcacgtctgtta

SEQ ID NO: 4433095 - DNA, 25 bp, Homo sapien
cagtgaatccttcgggtccctggag

SEQ ID NO: 4433096 - DNA, 25 bp, Homo sapien
tcagcttagagcagtgaatccttcg

SEQ ID NO: 4433097 - DNA, 25 bp, Homo sapien
tagagcagtgaatccttcgggtccc

SEQ ID NO: 4433098 - DNA, 25 bp, Homo sapien
gaatccttcgggtccctggagcatc

SEQ ID NO: 4433099 - DNA, 25 bp, Homo sapien
tgcttctgagtctgccagtcctgct

SEQ ID NO: 4433100 - DNA, 25 bp, Homo sapien
gagtctgccagtcctgcttttccag

SEQ ID NO: 4433101 - DNA, 25 bp, Homo sapien
cctgggtccctcagctctctgcttc

SEQ ID NO: 4433102 - DNA, 25 bp, Homo sapien
tgcttttccagccctgagtcttggg

SEQ ID NO: 4433103 - DNA, 25 bp, Homo sapien
cactggagccacaagtgtatccggg

SEQ ID NO: 4433104 - DNA, 25 bp, Homo sapien
gcggctgtaaatcctctttggtgaa

SEQ ID NO: 4433105 - DNA, 25 bp, Homo sapien
cccacgtgtgtgcaggctggtgtcc

SEQ ID NO: 4433106 - DNA, 25 bp, Homo sapien
tagctgtccctatgcaggttcccag

SEQ ID NO: 4433107 - DNA, 25 bp, Homo sapien
ttggttttctctagatgggagctgt

SEQ ID NO: 4433108 - DNA, 25 bp, Homo sapien
tggttttctctagatgggagctgtg

SEQ ID NO: 4433109 - DNA, 25 bp, Homo sapien
ttttctctagatgggagctgtggca

SEQ ID NO: 4433110 - DNA, 25 bp, Homo sapien
gttttctctagatgggagctgtggc

SEQ ID NO: 4433111 - DNA, 25 bp, Homo sapien
tggatggtcctttcacattggtttc

SEQ ID NO: 4433112 - DNA, 25 bp, Homo sapien
gaagcaggccgcatgtgtttttctg

SEQ ID NO: 4433113 - DNA, 25 bp, Homo sapien
tatcgtaataggacatagtgaagca

SEQ ID NO: 4433114 - DNA, 25 bp, Homo sapien
ttcagacgtttccatgtatcgtaat

SEQ ID NO: 4433115 - DNA, 25 bp, Homo sapien
tgatgaggagtcaaaatagggagat

SEQ ID NO: 4433116 - DNA, 25 bp, Homo sapien
gctttttggcatccacgctgtcaga

SEQ ID NO: 4433117 - DNA, 25 bp, Homo sapien
tcaacaggctgcacttgcggagaga

SEQ ID NO: 4433118 - DNA, 25 bp, Homo sapien
tgcgtactatcccaagaaacaatca

SEQ ID NO: 4433119 - DNA, 25 bp, Homo sapien
cagatcagcagtgtgcctttgcgta

SEQ ID NO: 4433120 - DNA, 25 bp, Homo sapien
tctagctcgccctcagatatatgaa

SEQ ID NO: 4433121 - DNA, 25 bp, Homo sapien
ctgtagcattctagctcgccctcag

SEQ ID NO: 4433122 - DNA, 25 bp, Homo sapien
tgtagcattctagctcgccctcaga

SEQ ID NO: 4433123 - DNA, 25 bp, Homo sapien
tcgccctcagatatatgaagaagtt

SEQ ID NO: 4433124 - DNA, 25 bp, Homo sapien
tcttcaagtaccctcttacttgcag

SEQ ID NO: 4433125 - DNA, 25 bp, Homo sapien
gctgaagaagtggaccttgatgagc

SEQ ID NO: 4433126 - DNA, 25 bp, Homo sapien
tctttcttaatggatcatgatcagg

SEQ ID NO: 4433127 - DNA, 25 bp, Homo sapien
caatgtgtgttatgctgtgctgaag

SEQ ID NO: 4433128 - DNA, 25 bp, Homo sapien
caagctgtggaatgaagttaccaca

SEQ ID NO: 4433129 - DNA, 25 bp, Homo sapien
cacatcttttcgagcaggaatgcct

SEQ ID NO: 4433130 - DNA, 25 bp, Homo sapien
taccacatcttttcgagcaggaatg

SEQ ID NO: 4433131 - DNA, 25 bp, Homo sapien
aagttaccacatcttttcgagcagg

SEQ ID NO: 4433132 - DNA, 25 bp, Homo sapien
cctgtgaagattattgctacaaagt

SEQ ID NO: 4433133 - DNA, 25 bp, Homo sapien
gattattgctacaaagtgaccagtc

SEQ ID NO: 4433134 - DNA, 25 bp, Homo sapien
tgaagattattgctacaaagtgacc

SEQ ID NO: 4433135 - DNA, 25 bp, Homo sapien
ttgctacaaagtgaccagtcagagc

SEQ ID NO: 4433136 - DNA, 25 bp, Homo sapien
tttaccccaagaattcatgtctgca

SEQ ID NO: 4433137 - DNA, 25 bp, Homo sapien
cattaaacggaatagtgaagacatt

SEQ ID NO: 4433138 - DNA, 25 bp, Homo sapien
gctgtttccccaagcttccatttct

SEQ ID NO: 4433139 - DNA, 25 bp, Homo sapien
catgtctgcattgatctgcattcca

SEQ ID NO: 4433140 - DNA, 25 bp, Homo sapien
gaatactcgtcagtgccagagctgc

SEQ ID NO: 4433141 - DNA, 25 bp, Homo sapien
tcagaatactcgtcagtgccagagc

SEQ ID NO: 4433142 - DNA, 25 bp, Homo sapien
cagaatactcgtcagtgccagagct

SEQ ID NO: 4433143 - DNA, 25 bp, Homo sapien
agaatactcgtcagtgccagagctg

SEQ ID NO: 4433144 - DNA, 25 bp, Homo sapien
gagccctttcacaggtgtgaaacac

SEQ ID NO: 4433145 - DNA, 25 bp, Homo sapien
tgagccctttcacaggtgtgaaaca

SEQ ID NO: 4433146 - DNA, 25 bp, Homo sapien
ctttcacaggtgtgaaacacatgca

SEQ ID NO: 4433147 - DNA, 25 bp, Homo sapien
ccctttcacaggtgtgaaacacatg

SEQ ID NO: 4433148 - DNA, 25 bp, Homo sapien
tagaactatgagtgtgctgggctgc

SEQ ID NO: 4433149 - DNA, 25 bp, Homo sapien
gcaccttctctgtaagtagacccag

SEQ ID NO: 4433150 - DNA, 25 bp, Homo sapien
gctgcctgaagaactgcaccatctg

SEQ ID NO: 4433151 - DNA, 25 bp, Homo sapien
tgtgtggaggaacccctctggcctc

SEQ ID NO: 4433152 - DNA, 25 bp, Homo sapien
cagctggggcattctggttagtatg

SEQ ID NO: 4433153 - DNA, 25 bp, Homo sapien
ctggggcattctggttagtatggca

SEQ ID NO: 4433154 - DNA, 25 bp, Homo sapien
ggcattctggttagtatggcagtgg

SEQ ID NO: 4433155 - DNA, 25 bp, Homo sapien
attctggttagtatggcagtgggtc

SEQ ID NO: 4433156 - DNA, 25 bp, Homo sapien
tcctgcacgtctgtgtggtgagctg

SEQ ID NO: 4433157 - DNA, 25 bp, Homo sapien
gttgatgccgtaactgcctgattcc

SEQ ID NO: 4433158 - DNA, 25 bp, Homo sapien
tagctgaagggcagttgatgccgta

SEQ ID NO: 4433159 - DNA, 25 bp, Homo sapien
ggctaatgtggccacccttggaagg

SEQ ID NO: 4433160 - DNA, 25 bp, Homo sapien
ggaagggcctggccttgagaatcca

SEQ ID NO: 4433161 - DNA, 25 bp, Homo sapien
agggaagggcctggccttgagaatc

SEQ ID NO: 4433162 - DNA, 25 bp, Homo sapien
ccgaaagtggccagggaagggcctg

SEQ ID NO: 4433163 - DNA, 25 bp, Homo sapien
aagggcctggccttgagaatccatc

SEQ ID NO: 4433164 - DNA, 25 bp, Homo sapien
gggctccccggcgtttgacagctgc

SEQ ID NO: 4433165 - DNA, 25 bp, Homo sapien
ctgccgcatcaggtgtcttgcttct

SEQ ID NO: 4433166 - DNA, 25 bp, Homo sapien
agctgccgcatcaggtgtcttgctt

SEQ ID NO: 4433167 - DNA, 25 bp, Homo sapien
cggcgtttgacagctgccgcatcag

SEQ ID NO: 4433168 - DNA, 25 bp, Homo sapien
ggagccctctgattcagtgtccact

SEQ ID NO: 4433169 - DNA, 25 bp, Homo sapien
ggagttgacagtggctctggtttct

SEQ ID NO: 4433170 - DNA, 25 bp, Homo sapien
gccctctgattcagtgtccacttgg

SEQ ID NO: 4433171 - DNA, 25 bp, Homo sapien
ctttgggactgaggagttgacagtg

SEQ ID NO: 4433172 - DNA, 25 bp, Homo sapien
ggcaatgcttcactcgttcagtggt

SEQ ID NO: 4433173 - DNA, 25 bp, Homo sapien
tcagtggcccaaactggggcatgtg

SEQ ID NO: 4433174 - DNA, 25 bp, Homo sapien
gcctcctctggtcggtcactgttgg

SEQ ID NO: 4433175 - DNA, 25 bp, Homo sapien
cagaatctcctcatgcatcagtggc

SEQ ID NO: 4433176 - DNA, 25 bp, Homo sapien
ctgcctggtgaatttctcgatttct

SEQ ID NO: 4433177 - DNA, 25 bp, Homo sapien
cagcaccggctttgtgtgcgaaaga

SEQ ID NO: 4433178 - DNA, 25 bp, Homo sapien
ggtgaatttctcgatttctgctggg

SEQ ID NO: 4433179 - DNA, 25 bp, Homo sapien
gagtttgaatcacagtccctccaca

SEQ ID NO: 4433180 - DNA, 25 bp, Homo sapien
ctgcaaaagaacaagcatgcagaaa

SEQ ID NO: 4433181 - DNA, 25 bp, Homo sapien
gcaaaagaacaagcatgcagaaaaa

SEQ ID NO: 4433182 - DNA, 25 bp, Homo sapien
caaaagaacaagcatgcagaaaaac

SEQ ID NO: 4433183 - DNA, 25 bp, Homo sapien
tgcaaaagaacaagcatgcagaaaa

SEQ ID NO: 4433184 - DNA, 25 bp, Homo sapien
cttccatgagtagctgatctcaaag

SEQ ID NO: 4433185 - DNA, 25 bp, Homo sapien
ccttccatgagtagctgatctcaaa

SEQ ID NO: 4433186 - DNA, 25 bp, Homo sapien
gactaagagtgtttacagacttaaa

SEQ ID NO: 4433187 - DNA, 25 bp, Homo sapien
agctgttgccttcttgaaggttttg

SEQ ID NO: 4433188 - DNA, 25 bp, Homo sapien
tgactaagagtgtttacagacttaa

SEQ ID NO: 4433189 - DNA, 25 bp, Homo sapien
ggccagccactctgctggttctccc

SEQ ID NO: 4433190 - DNA, 25 bp, Homo sapien
tctgctggttctcccaccagctgtc

SEQ ID NO: 4433191 - DNA, 25 bp, Homo sapien
ctggccagccactctgctggttctc

SEQ ID NO: 4433192 - DNA, 25 bp, Homo sapien
actctgctggttctcccaccagctg

SEQ ID NO: 4433193 - DNA, 25 bp, Homo sapien
caacagtatcttctggtcctgggtt

SEQ ID NO: 4433194 - DNA, 25 bp, Homo sapien
ctgggttgaagtccaagttgagtgc

SEQ ID NO: 4433195 - DNA, 25 bp, Homo sapien
gtccaagttgagtgccttgccaagg

SEQ ID NO: 4433196 - DNA, 25 bp, Homo sapien
gccaacagtatcttctggtcctggg

SEQ ID NO: 4433197 - DNA, 25 bp, Homo sapien
caggaaaatctgcaggtgtccttca

SEQ ID NO: 4433198 - DNA, 25 bp, Homo sapien
tacaggtcttaattgcttcaggaaa

SEQ ID NO: 4433199 - DNA, 25 bp, Homo sapien
cctccagggtgtgcccggagaagcc

SEQ ID NO: 4433200 - DNA, 25 bp, Homo sapien
aaatctttacaggtcttaattgctt

SEQ ID NO: 4433201 - DNA, 25 bp, Homo sapien
ctctgctgggtctcgctggacagca

SEQ ID NO: 4433202 - DNA, 25 bp, Homo sapien
aggatatccttatggacagtctcca

SEQ ID NO: 4433203 - DNA, 25 bp, Homo sapien
ttgacatcgacccaggatatcctta

SEQ ID NO: 4433204 - DNA, 25 bp, Homo sapien
cccagggcttttgacatcgacccag

SEQ ID NO: 4433205 - DNA, 25 bp, Homo sapien
gacccaggatatccttatggacagt

SEQ ID NO: 4433206 - DNA, 25 bp, Homo sapien
caatctggttgttatacagcactcc

SEQ ID NO: 4433207 - DNA, 25 bp, Homo sapien
cagtcttgagggatttcccttggtt

SEQ ID NO: 4433208 - DNA, 25 bp, Homo sapien
tggttgttatacagcactccacccc

SEQ ID NO: 4433209 - DNA, 25 bp, Homo sapien
caattcagtcttgagggatttccct

SEQ ID NO: 4433210 - DNA, 25 bp, Homo sapien
tctcaatggtgaaaatcaccgagct

SEQ ID NO: 4433211 - DNA, 25 bp, Homo sapien
ggctctcaatggtgaaaatcaccga

SEQ ID NO: 4433212 - DNA, 25 bp, Homo sapien
tcaatggtgaaaatcaccgagcttc

SEQ ID NO: 4433213 - DNA, 25 bp, Homo sapien
atggtgaaaatcaccgagcttctcc

SEQ ID NO: 4433214 - DNA, 25 bp, Homo sapien
gaagccaggtcacaggccgtgaact

SEQ ID NO: 4433215 - DNA, 25 bp, Homo sapien
cccagaagccaggtcacaggccgtg

SEQ ID NO: 4433216 - DNA, 25 bp, Homo sapien
cagaagccaggtcacaggccgtgaa

SEQ ID NO: 4433217 - DNA, 25 bp, Homo sapien
aggccgtgaactgggctaggtccat

SEQ ID NO: 4433218 - DNA, 25 bp, Homo sapien
ttgtggttccttcccacagatgtaa

SEQ ID NO: 4433219 - DNA, 25 bp, Homo sapien
caggctacaggaaaagacctatcgg

SEQ ID NO: 4433220 - DNA, 25 bp, Homo sapien
gcatttccaacaacgtgcaggctac

SEQ ID NO: 4433221 - DNA, 25 bp, Homo sapien
cagatgtaacaatagtcctgtaagt

SEQ ID NO: 4433222 - DNA, 25 bp, Homo sapien
catctgtgatctgactattcaagtc

SEQ ID NO: 4433223 - DNA, 25 bp, Homo sapien
caaaataaagaagtctgctggagtt

SEQ ID NO: 4433224 - DNA, 25 bp, Homo sapien
ggatggtattgcaatattgtctcca

SEQ ID NO: 4433225 - DNA, 25 bp, Homo sapien
tctgctatataaaggcaaatacttt

SEQ ID NO: 4433226 - DNA, 25 bp, Homo sapien
cgtgattgctttgaggggcataagc

SEQ ID NO: 4433227 - DNA, 25 bp, Homo sapien
tgattgctttgaggggcataagcag

SEQ ID NO: 4433228 - DNA, 25 bp, Homo sapien
ttgctttgaggggcataagcagaat

SEQ ID NO: 4433229 - DNA, 25 bp, Homo sapien
tcgtgattgctttgaggggcataag

SEQ ID NO: 4433230 - DNA, 25 bp, Homo sapien
aagaaggcttgcctcaacattggtc

SEQ ID NO: 4433231 - DNA, 25 bp, Homo sapien
ttagcacccctgactgtgagcaaga

SEQ ID NO: 4433232 - DNA, 25 bp, Homo sapien
caacattggtcctgaggaagggctc

SEQ ID NO: 4433233 - DNA, 25 bp, Homo sapien
cacccctgactgtgagcaagaaggc

SEQ ID NO: 4433234 - DNA, 25 bp, Homo sapien
cgtgtcaaacccatcctaaaaatgg

SEQ ID NO: 4433235 - DNA, 25 bp, Homo sapien
cagaataacatacatgcggaaaggc

SEQ ID NO: 4433236 - DNA, 25 bp, Homo sapien
atatacatcatactcttgcgtctgg

SEQ ID NO: 4433237 - DNA, 25 bp, Homo sapien
tatccactgctataacatctatcga

SEQ ID NO: 4433238 - DNA, 25 bp, Homo sapien
cagccaggtcttctttgcagataga

SEQ ID NO: 4433239 - DNA, 25 bp, Homo sapien
cagagaccgtcctgattcgctgtag

SEQ ID NO: 4433240 - DNA, 25 bp, Homo sapien
gatagattgtagaagagcatgggtc

SEQ ID NO: 4433241 - DNA, 25 bp, Homo sapien
gtcctgattggcttttatactctcc

SEQ ID NO: 4433242 - DNA, 25 bp, Homo sapien
tgtagacatatgcagatcttgatgg

SEQ ID NO: 4433243 - DNA, 25 bp, Homo sapien
gacctcaggccaaagcaaccttgct

SEQ ID NO: 4433244 - DNA, 25 bp, Homo sapien
tggtttgacctcaggccaaagcaac

SEQ ID NO: 4433245 - DNA, 25 bp, Homo sapien
aatagaaggatcaataactgtagac

SEQ ID NO: 4433246 - DNA, 25 bp, Homo sapien
cgaggtttgcttccatcagtgccct

SEQ ID NO: 4433247 - DNA, 25 bp, Homo sapien
aggtttgcttccatcagtgccctct

SEQ ID NO: 4433248 - DNA, 25 bp, Homo sapien
acgaggtttgcttccatcagtgccc

SEQ ID NO: 4433249 - DNA, 25 bp, Homo sapien
ctgtgggatgcacgaggtttgcttc

SEQ ID NO: 4433250 - DNA, 25 bp, Homo sapien
cagatcttggatgaaggcgacatgg

SEQ ID NO: 4433251 - DNA, 25 bp, Homo sapien
cgtggccagccgtgctccagatggc

SEQ ID NO: 4433252 - DNA, 25 bp, Homo sapien
cgccccgcggcgcagatcttggatg

SEQ ID NO: 4433253 - DNA, 25 bp, Homo sapien
ggcacttgcggcagccacacagcct

SEQ ID NO: 4433254 - DNA, 25 bp, Homo sapien
agtgtgcgcagacgcagtgtcaccc

SEQ ID NO: 4433255 - DNA, 25 bp, Homo sapien
gcaacgaagtgtgcgcagacgcagt

SEQ ID NO: 4433256 - DNA, 25 bp, Homo sapien
tgagcaacgaagtgtgcgcagacgc

SEQ ID NO: 4433257 - DNA, 25 bp, Homo sapien
ttggctttgagcaacgaagtgtgcg

SEQ ID NO: 4433258 - DNA, 25 bp, Homo sapien
tggcaaacaacacagggcatacgct

SEQ ID NO: 4433259 - DNA, 25 bp, Homo sapien
gctacgcgacactgggcaaacaaag

SEQ ID NO: 4433260 - DNA, 25 bp, Homo sapien
tacaatgcggagtatgcacagccag

SEQ ID NO: 4433261 - DNA, 25 bp, Homo sapien
cactgggcgcacaaaggaagtatgc

SEQ ID NO: 4433262 - DNA, 25 bp, Homo sapien
ggaacacaacatcgggcacacacca

SEQ ID NO: 4433263 - DNA, 25 bp, Homo sapien
acaccaggcacagatgctacacaca

SEQ ID NO: 4433264 - DNA, 25 bp, Homo sapien
tgaccgacaagctggcacacccact

SEQ ID NO: 4433265 - DNA, 25 bp, Homo sapien
aacacaacatcgggcacacaccagg

SEQ ID NO: 4433266 - DNA, 25 bp, Homo sapien
tgtcctccccaacaacgaggcagtg

SEQ ID NO: 4433267 - DNA, 25 bp, Homo sapien
caattcgaggtacacgtgccagtca

SEQ ID NO: 4433268 - DNA, 25 bp, Homo sapien
gagatgagctctcagggcacttccc

SEQ ID NO: 4433269 - DNA, 25 bp, Homo sapien
aactctgggcatacaaggtcaggca

SEQ ID NO: 4433270 - DNA, 25 bp, Homo sapien
actgctgtggatttcgttgtgctcc

SEQ ID NO: 4433271 - DNA, 25 bp, Homo sapien
tgtggatttcgttgtgctccataaa

SEQ ID NO: 4433272 - DNA, 25 bp, Homo sapien
ctgtgactgctgtggatttcgttgt

SEQ ID NO: 4433273 - DNA, 25 bp, Homo sapien
gctgtggatttcgttgtgctccata

SEQ ID NO: 4433274 - DNA, 25 bp, Homo sapien
tgagattctcacagcatccaatttc

SEQ ID NO: 4433275 - DNA, 25 bp, Homo sapien
ttctcacagcatccaatttcatctc

SEQ ID NO: 4433276 - DNA, 25 bp, Homo sapien
gagattctcacagcatccaatttca

SEQ ID NO: 4433277 - DNA, 25 bp, Homo sapien
gattctcacagcatccaatttcatc

SEQ ID NO: 4433278 - DNA, 25 bp, Homo sapien
ggtacaaccccaatcacgctgttca

SEQ ID NO: 4433279 - DNA, 25 bp, Homo sapien
cgctgttcaacagcccatgcagtat

SEQ ID NO: 4433280 - DNA, 25 bp, Homo sapien
ttggcagactggatggaatgtgcat

SEQ ID NO: 4433281 - DNA, 25 bp, Homo sapien
gttcaacagcccatgcagtattcat

SEQ ID NO: 4433282 - DNA, 25 bp, Homo sapien
gaaggcgcagtggaggtaagtggat

SEQ ID NO: 4433283 - DNA, 25 bp, Homo sapien
ggcgcagtggaggtaagtggattga

SEQ ID NO: 4433284 - DNA, 25 bp, Homo sapien
aaggcgcagtggaggtaagtggatt

SEQ ID NO: 4433285 - DNA, 25 bp, Homo sapien
ggaaggcgcagtggaggtaagtgga

SEQ ID NO: 4433286 - DNA, 25 bp, Homo sapien
caactgctggtaaggtgaaaagact

SEQ ID NO: 4433287 - DNA, 25 bp, Homo sapien
tgcacatgacagttaggagcagcgc

SEQ ID NO: 4433288 - DNA, 25 bp, Homo sapien
tagtaccgcactagcacataggacg

SEQ ID NO: 4433289 - DNA, 25 bp, Homo sapien
gatcagctcccggatcccagtgtgt

SEQ ID NO: 4433290 - DNA, 25 bp, Homo sapien
cataactgagtctgcctggtacatg

SEQ ID NO: 4433291 - DNA, 25 bp, Homo sapien
ggttcccataactgagtctgcctgg

SEQ ID NO: 4433292 - DNA, 25 bp, Homo sapien
tcccataactgagtctgcctggtac

SEQ ID NO: 4433293 - DNA, 25 bp, Homo sapien
gggttcccataactgagtctgcctg

SEQ ID NO: 4433294 - DNA, 25 bp, Homo sapien
gttcttgtgaagacctaccccatgg

SEQ ID NO: 4433295 - DNA, 25 bp, Homo sapien
tttctctgagttcttgtgaagacct

SEQ ID NO: 4433296 - DNA, 25 bp, Homo sapien
tgtgaagacctaccccatggttaag

SEQ ID NO: 4433297 - DNA, 25 bp, Homo sapien
gaagcttggttgttcagttttctct

SEQ ID NO: 4433298 - DNA, 25 bp, Homo sapien
gaagtttggtagcaatgagctcctt

SEQ ID NO: 4433299 - DNA, 25 bp, Homo sapien
gacagacagcatagagctgagtgat

SEQ ID NO: 4433300 - DNA, 25 bp, Homo sapien
tggctccgcacagggaggaatggac

SEQ ID NO: 4433301 - DNA, 25 bp, Homo sapien
aacagaaggtggctccgcacaggga

SEQ ID NO: 4433302 - DNA, 25 bp, Homo sapien
gagagttgattgaagagcccttgtt

SEQ ID NO: 4433303 - DNA, 25 bp, Homo sapien
aagagactggagattgatggagggc

SEQ ID NO: 4433304 - DNA, 25 bp, Homo sapien
gattgaagagcccttgttgtgctgt

SEQ ID NO: 4433305 - DNA, 25 bp, Homo sapien
agcttgcgttccatccaaagtagaa

SEQ ID NO: 4433306 - DNA, 25 bp, Homo sapien
ctctgtgaacctgggggcattgcat

SEQ ID NO: 4433307 - DNA, 25 bp, Homo sapien
ggcattgcatataccatccccaggt

SEQ ID NO: 4433308 - DNA, 25 bp, Homo sapien
tccatgtcacggttcagtgctccca

SEQ ID NO: 4433309 - DNA, 25 bp, Homo sapien
aattggggttcacacttcccagctg

SEQ ID NO: 4433310 - DNA, 25 bp, Homo sapien
ggcgcgctccacgtctcggctgtcg

SEQ ID NO: 4433311 - DNA, 25 bp, Homo sapien
cggagctgcagcgagccggcgcgct

SEQ ID NO: 4433312 - DNA, 25 bp, Homo sapien
agccggcgcgctccacgtctcggct

SEQ ID NO: 4433313 - DNA, 25 bp, Homo sapien
acgtctcggctgtcgcccgggcctg

SEQ ID NO: 4433314 - DNA, 25 bp, Homo sapien
agccagacgcctcccggcgagcagc

SEQ ID NO: 4433315 - DNA, 25 bp, Homo sapien
cgtgcaggagcgacgcggccagcgc

SEQ ID NO: 4433316 - DNA, 25 bp, Homo sapien
gcaggagcgacgcggccagcgccag

SEQ ID NO: 4433317 - DNA, 25 bp, Homo sapien
cagccagacgcctcccggcgagcag

SEQ ID NO: 4433318 - DNA, 25 bp, Homo sapien
acgggcctctccaagggattgtagt

SEQ ID NO: 4433319 - DNA, 25 bp, Homo sapien
caagggattgtagttcttgaccagc

SEQ ID NO: 4433320 - DNA, 25 bp, Homo sapien
ttgcgagtcattggccacgggcctc

SEQ ID NO: 4433321 - DNA, 25 bp, Homo sapien
tcctctggaactcgccttgcaggga

SEQ ID NO: 4433322 - DNA, 25 bp, Homo sapien
gtgatggaataagctttaccaggtc

SEQ ID NO: 4433323 - DNA, 25 bp, Homo sapien
acctgagagaaaggtgggacccaag

SEQ ID NO: 4433324 - DNA, 25 bp, Homo sapien
ggccagggtgatggaataagcttta

SEQ ID NO: 4433325 - DNA, 25 bp, Homo sapien
caagtaaccatgcacaggtggccag

SEQ ID NO: 4433326 - DNA, 25 bp, Homo sapien
aggcaagagacccacggaactgatg

SEQ ID NO: 4433327 - DNA, 25 bp, Homo sapien
gcaagagacccacggaactgatggc

SEQ ID NO: 4433328 - DNA, 25 bp, Homo sapien
taactgaagtgggcactagcaaggc

SEQ ID NO: 4433329 - DNA, 25 bp, Homo sapien
agagacccacggaactgatggcagc

SEQ ID NO: 4433330 - DNA, 25 bp, Homo sapien
gggtcacccactccaagagagacag

SEQ ID NO: 4433331 - DNA, 25 bp, Homo sapien
ccatccaggcaatacagggtcaccc

SEQ ID NO: 4433332 - DNA, 25 bp, Homo sapien
ctgaggggctactacaccatcaccc

SEQ ID NO: 4433333 - DNA, 25 bp, Homo sapien
acccccatccaggcaatacagggtc

SEQ ID NO: 4433334 - DNA, 25 bp, Homo sapien
caaaggattgtcttggaccacggaa

SEQ ID NO: 4433335 - DNA, 25 bp, Homo sapien
gaaacaatgaaggtaccatctgtac

SEQ ID NO: 4433336 - DNA, 25 bp, Homo sapien
taatgcatgactgatggttactgtc

SEQ ID NO: 4433337 - DNA, 25 bp, Homo sapien
aatccaatgcccataactgtccctg

SEQ ID NO: 4433338 - DNA, 25 bp, Homo sapien
tttaatgagcaaataaacagaaata

SEQ ID NO: 4433339 - DNA, 25 bp, Homo sapien
taatgagcaaataaacagaaatatc

SEQ ID NO: 4433340 - DNA, 25 bp, Homo sapien
tcatttaatgagcaaataaacagaa

SEQ ID NO: 4433341 - DNA, 25 bp, Homo sapien
catttaatgagcaaataaacagaaa

SEQ ID NO: 4433342 - DNA, 25 bp, Homo sapien
tcatcggagcttgggcgttatagcc

SEQ ID NO: 4433343 - DNA, 25 bp, Homo sapien
caatacctcctgtcagtctgtggct

SEQ ID NO: 4433344 - DNA, 25 bp, Homo sapien
cttagcaaaggcagattccagtctg

SEQ ID NO: 4433345 - DNA, 25 bp, Homo sapien
gatactaatcagtttctcatcggag

SEQ ID NO: 4433346 - DNA, 25 bp, Homo sapien
atccatatgatcagatcaccctcct

SEQ ID NO: 4433347 - DNA, 25 bp, Homo sapien
aagtcaagaatcttgagtgaagtgc

SEQ ID NO: 4433348 - DNA, 25 bp, Homo sapien
cccaaaggatcaagtcaagaatctt

SEQ ID NO: 4433349 - DNA, 25 bp, Homo sapien
tgcacaagccattgctacaagccat

SEQ ID NO: 4433350 - DNA, 25 bp, Homo sapien
catttgcagccaaatgttggtggtt

SEQ ID NO: 4433351 - DNA, 25 bp, Homo sapien
atttgcagccaaatgttggtggtta

SEQ ID NO: 4433352 - DNA, 25 bp, Homo sapien
ttgcagccaaatgttggtggttaaa

SEQ ID NO: 4433353 - DNA, 25 bp, Homo sapien
tttgcagccaaatgttggtggttaa

SEQ ID NO: 4433354 - DNA, 25 bp, Homo sapien
agggccccaagattccacgaactgc

SEQ ID NO: 4433355 - DNA, 25 bp, Homo sapien
gtcggtcactaattatcacagagcc

SEQ ID NO: 4433356 - DNA, 25 bp, Homo sapien
cacagagccagtcacgttcaccatt

SEQ ID NO: 4433357 - DNA, 25 bp, Homo sapien
accattattaccacacaggtcaggg

SEQ ID NO: 4433358 - DNA, 25 bp, Homo sapien
ggccatctgggaaacgaacagtctt

SEQ ID NO: 4433359 - DNA, 25 bp, Homo sapien
cttcacccctggatattctgacaca

SEQ ID NO: 4433360 - DNA, 25 bp, Homo sapien
gaaacgaacagtcttcacccctgga

SEQ ID NO: 4433361 - DNA, 25 bp, Homo sapien
cattccactgtaaatagtgatctgt

SEQ ID NO: 4433362 - DNA, 25 bp, Homo sapien
tctgggatcacctacaatctggccc

SEQ ID NO: 4433363 - DNA, 25 bp, Homo sapien
cagcaagagcgaccatgatgagacc

SEQ ID NO: 4433364 - DNA, 25 bp, Homo sapien
gggtctggctggatcactgctgaat

SEQ ID NO: 4433365 - DNA, 25 bp, Homo sapien
ggacagttcggaggatgactttgaa

SEQ ID NO: 4433366 - DNA, 25 bp, Homo sapien
gcaactcttcaaacagctaaaggtg

SEQ ID NO: 4433367 - DNA, 25 bp, Homo sapien
gacttttatgcctacatgggcacag

SEQ ID NO: 4433368 - DNA, 25 bp, Homo sapien
agatttatgccaggctcgctcccag

SEQ ID NO: 4433369 - DNA, 25 bp, Homo sapien
gagattatatactgcacagcggaga

SEQ ID NO: 4433370 - DNA, 25 bp, Homo sapien
gttaatttctcctttgactttcatc

SEQ ID NO: 4433371 - DNA, 25 bp, Homo sapien
tttcttgagatcctggtttttgtta

SEQ ID NO: 4433372 - DNA, 25 bp, Homo sapien
aatttctcctttgactttcatcagc

SEQ ID NO: 4433373 - DNA, 25 bp, Homo sapien
cctttcttgagatcctggtttttgt

SEQ ID NO: 4433374 - DNA, 25 bp, Homo sapien
gagataagccagaacgaaggaggct

SEQ ID NO: 4433375 - DNA, 25 bp, Homo sapien
ggaaggtctggcttgcctggatcat

SEQ ID NO: 4433376 - DNA, 25 bp, Homo sapien
aggaaggtctggcttgcctggatca

SEQ ID NO: 4433377 - DNA, 25 bp, Homo sapien
taagccagaacgaaggaggctccag

SEQ ID NO: 4433378 - DNA, 25 bp, Homo sapien
ctggcaaacacccataaccgtggaa

SEQ ID NO: 4433379 - DNA, 25 bp, Homo sapien
ccgtggaaacaggggtagggctgca

SEQ ID NO: 4433380 - DNA, 25 bp, Homo sapien
gtggaaacaggggtagggctgcagg

SEQ ID NO: 4433381 - DNA, 25 bp, Homo sapien
caaacacccataaccgtggaaacag

SEQ ID NO: 4433382 - DNA, 25 bp, Homo sapien
ctgtgactcagtgatttgtgactca

SEQ ID NO: 4433383 - DNA, 25 bp, Homo sapien
gtgactcagtgatttctgaatgttt

SEQ ID NO: 4433384 - DNA, 25 bp, Homo sapien
gaatgtttttcatccaaacagaata

SEQ ID NO: 4433385 - DNA, 25 bp, Homo sapien
gtgactcagtgatttgtgactcagt

SEQ ID NO: 4433386 - DNA, 25 bp, Homo sapien
acacgctgcctgagagcaccactgg

SEQ ID NO: 4433387 - DNA, 25 bp, Homo sapien
gtcttccccgggcacagcttggaag

SEQ ID NO: 4433388 - DNA, 25 bp, Homo sapien
ctgcctgagagcaccactgggactg

SEQ ID NO: 4433389 - DNA, 25 bp, Homo sapien
gcttggaagggccagtgtctacccc

SEQ ID NO: 4433390 - DNA, 25 bp, Homo sapien
tgtggcgtcaaagcgctcatcagca

SEQ ID NO: 4433391 - DNA, 25 bp, Homo sapien
tggcaatgcccagaagaattcacca

SEQ ID NO: 4433392 - DNA, 25 bp, Homo sapien
caggtactggcaatgcccagaagaa

SEQ ID NO: 4433393 - DNA, 25 bp, Homo sapien
gaattcaccaacacgttagtgtgga

SEQ ID NO: 4433394 - DNA, 25 bp, Homo sapien
cagaagactgaaacggaagctgact

SEQ ID NO: 4433395 - DNA, 25 bp, Homo sapien
tgaaacggaagctgactgagatgtg

SEQ ID NO: 4433396 - DNA, 25 bp, Homo sapien
gactgaaacggaagctgactgagat

SEQ ID NO: 4433397 - DNA, 25 bp, Homo sapien
aaacagaagactgaaacggaagctg

SEQ ID NO: 4433398 - DNA, 25 bp, Homo sapien
tacatcgatgtagcaggaactcttg

SEQ ID NO: 4433399 - DNA, 25 bp, Homo sapien
cgtaagaccaggacccaaacttcag

SEQ ID NO: 4433400 - DNA, 25 bp, Homo sapien
gcagtgctgcacatcaaagggaaac

SEQ ID NO: 4433401 - DNA, 25 bp, Homo sapien
aaagggaaaccagcgtacatcgatg

SEQ ID NO: 4433402 - DNA, 25 bp, Homo sapien
tatagccactgatatctgcctcctg

SEQ ID NO: 4433403 - DNA, 25 bp, Homo sapien
tagccactgatatctgcctcctgca

SEQ ID NO: 4433404 - DNA, 25 bp, Homo sapien
gggatatagccactgatatctgcct

SEQ ID NO: 4433405 - DNA, 25 bp, Homo sapien
tctccattggggatatagccactga

SEQ ID NO: 4433406 - DNA, 25 bp, Homo sapien
tcttctccccggaatctgcaggaag

SEQ ID NO: 4433407 - DNA, 25 bp, Homo sapien
tttgcagcactcatagaacctttca

SEQ ID NO: 4433408 - DNA, 25 bp, Homo sapien
gatcagcaggttgaggccatagtag

SEQ ID NO: 4433409 - DNA, 25 bp, Homo sapien
aggccatagtagagcgtcctgcggc

SEQ ID NO: 4433410 - DNA, 25 bp, Homo sapien
gaaagcacaggcctctcaaggcaga

SEQ ID NO: 4433411 - DNA, 25 bp, Homo sapien
ggatgagccagggaatccccaggaa

SEQ ID NO: 4433412 - DNA, 25 bp, Homo sapien
tgagggtcctccagtattctcagga

SEQ ID NO: 4433413 - DNA, 25 bp, Homo sapien
cctgatggagtcctgcgctgtctgc

SEQ ID NO: 4433414 - DNA, 25 bp, Homo sapien
ggatgttgcgggcatgatctcagcc

SEQ ID NO: 4433415 - DNA, 25 bp, Homo sapien
gatctcagccacgagcagcatgaag

SEQ ID NO: 4433416 - DNA, 25 bp, Homo sapien
agcagcatgaagacggtaagagaga

SEQ ID NO: 4433417 - DNA, 25 bp, Homo sapien
ctatcaatggtaccgaatcggatgt

SEQ ID NO: 4433418 - DNA, 25 bp, Homo sapien
tggtggtggtactgcagcacgatca

SEQ ID NO: 4433419 - DNA, 25 bp, Homo sapien
accgagaggcccacgatgatcatgg

SEQ ID NO: 4433420 - DNA, 25 bp, Homo sapien
acttgggcatcttgcccccgtcggg

SEQ ID NO: 4433421 - DNA, 25 bp, Homo sapien
tgatcatggtgctggcgaagtactg

SEQ ID NO: 4433422 - DNA, 25 bp, Homo sapien
cctgcttcaaactgatggatggaca

SEQ ID NO: 4433423 - DNA, 25 bp, Homo sapien
tgttctagagcagtagagtgctcca

SEQ ID NO: 4433424 - DNA, 25 bp, Homo sapien
gagtgctccaggtcgttaaaaatgg

SEQ ID NO: 4433425 - DNA, 25 bp, Homo sapien
cagtattgacggtagatgcagggta

SEQ ID NO: 4433426 - DNA, 25 bp, Homo sapien
aagttgggagccgacatcaggatgc

SEQ ID NO: 4433427 - DNA, 25 bp, Homo sapien
tttcgtcctggcagcggaagcggtt

SEQ ID NO: 4433428 - DNA, 25 bp, Homo sapien
gcaaagtctttggacacggcctcca

SEQ ID NO: 4433429 - DNA, 25 bp, Homo sapien
cacgcgcaccagttcagaaggatga

SEQ ID NO: 4433430 - DNA, 25 bp, Homo sapien
taagcaacacgactgacagccagaa

SEQ ID NO: 4433431 - DNA, 25 bp, Homo sapien
tcaggtagaccttcatgcagacatg

SEQ ID NO: 4433432 - DNA, 25 bp, Homo sapien
tgctgaccgatggtacggatgtgcc

SEQ ID NO: 4433433 - DNA, 25 bp, Homo sapien
ccaactgtctcggtggtgaggagcc

SEQ ID NO: 4433434 - DNA, 25 bp, Homo sapien
tcaggcaggctggtaaaaacatcct

SEQ ID NO: 4433435 - DNA, 25 bp, Homo sapien
tctaagggaagagctgtatcatcac

SEQ ID NO: 4433436 - DNA, 25 bp, Homo sapien
cctaggagttatctgggatccacca

SEQ ID NO: 4433437 - DNA, 25 bp, Homo sapien
cccacctcagggattagaagcaaat

SEQ ID NO: 4433438 - DNA, 25 bp, Homo sapien
catccatagcatgtggaaggaatgc

SEQ ID NO: 4433439 - DNA, 25 bp, Homo sapien
aaaatcttgtgcatggttcatccat

SEQ ID NO: 4433440 - DNA, 25 bp, Homo sapien
caactttctcgtaagtgaggtctct

SEQ ID NO: 4433441 - DNA, 25 bp, Homo sapien
tgaggtctcttgtcacacacaaggt

SEQ ID NO: 4433442 - DNA, 25 bp, Homo sapien
tttaaactctatgccaataaataag

SEQ ID NO: 4433443 - DNA, 25 bp, Homo sapien
aaactggaaacaaatcccacgatcg

SEQ ID NO: 4433444 - DNA, 25 bp, Homo sapien
tactcacaaattgacaacataaaaa

SEQ ID NO: 4433445 - DNA, 25 bp, Homo sapien
ccacgatcgacaaagaaaaatactc

SEQ ID NO: 4433446 - DNA, 25 bp, Homo sapien
tcattctattgaaaatgatagccaa

SEQ ID NO: 4433447 - DNA, 25 bp, Homo sapien
taagtcagcataaagttaaatctgg

SEQ ID NO: 4433448 - DNA, 25 bp, Homo sapien
aaagaccttctgataatccctctgg

SEQ ID NO: 4433449 - DNA, 25 bp, Homo sapien
taaacatactactagagcaaaggaa

SEQ ID NO: 4433450 - DNA, 25 bp, Homo sapien
gaacatctcaggaatacactaatga

SEQ ID NO: 4433451 - DNA, 25 bp, Homo sapien
tctgcaccgattgagtgactgaggg

SEQ ID NO: 4433452 - DNA, 25 bp, Homo sapien
tcataggaaagtgtccccattcaca

SEQ ID NO: 4433453 - DNA, 25 bp, Homo sapien
agtggtttctgccacccgtctgcac

SEQ ID NO: 4433454 - DNA, 25 bp, Homo sapien
cattcacatgactccagtggtttct

SEQ ID NO: 4433455 - DNA, 25 bp, Homo sapien
gggggcttgggatgctaaattcttc

SEQ ID NO: 4433456 - DNA, 25 bp, Homo sapien
gggcttgggatgctaaattcttctc

SEQ ID NO: 4433457 - DNA, 25 bp, Homo sapien
gtgggggcttgggatgctaaattct

SEQ ID NO: 4433458 - DNA, 25 bp, Homo sapien
cttgggatgctaaattcttctccat

SEQ ID NO: 4433459 - DNA, 25 bp, Homo sapien
tgagagagactctctatggatgacg

SEQ ID NO: 4433460 - DNA, 25 bp, Homo sapien
gatcaccttagatgtatatgagaga

SEQ ID NO: 4433461 - DNA, 25 bp, Homo sapien
tatggatgacgtcgtgaagagcaga

SEQ ID NO: 4433462 - DNA, 25 bp, Homo sapien
aatgatccctggttcgtgggttatt

SEQ ID NO: 4433463 - DNA, 25 bp, Homo sapien
atggtgaatgataaggagttaaaca

SEQ ID NO: 4433464 - DNA, 25 bp, Homo sapien
aaaatgccttgctaaatgcccacag

SEQ ID NO: 4433465 - DNA, 25 bp, Homo sapien
taaacatagctgtttgctccaagtc

SEQ ID NO: 4433466 - DNA, 25 bp, Homo sapien
catagctgtttgctccaagtccaga

SEQ ID NO: 4433467 - DNA, 25 bp, Homo sapien
cgtgtgaaaacatgatgcgctccac

SEQ ID NO: 4433468 - DNA, 25 bp, Homo sapien
acatgatgcgctccacatctttcat

SEQ ID NO: 4433469 - DNA, 25 bp, Homo sapien
tccatgctaattcgtgtgaaaacat

SEQ ID NO: 4433470 - DNA, 25 bp, Homo sapien
ctttccatgctaattcgtgtgaaaa

SEQ ID NO: 4433471 - DNA, 25 bp, Homo sapien
ctgggaggagtaaaggatataaata

SEQ ID NO: 4433472 - DNA, 25 bp, Homo sapien
cctcatggaaagattcatggtcctc

SEQ ID NO: 4433473 - DNA, 25 bp, Homo sapien
ggtcctcacgggtaaaatgtgatga

SEQ ID NO: 4433474 - DNA, 25 bp, Homo sapien
cattccatgcctggtacgtagttgg

SEQ ID NO: 4433475 - DNA, 25 bp, Homo sapien
gcggggccgtcatccagaccaaagc

SEQ ID NO: 4433476 - DNA, 25 bp, Homo sapien
tgaccctcgccaaccgccctgcggg

SEQ ID NO: 4433477 - DNA, 25 bp, Homo sapien
gcgctcgcgcctctcgtccaacttg

SEQ ID NO: 4433478 - DNA, 25 bp, Homo sapien
caacttgtgaccctcgccaaccgcc

SEQ ID NO: 4433479 - DNA, 25 bp, Homo sapien
taccagggcaagatgttcgacgagg

SEQ ID NO: 4433480 - DNA, 25 bp, Homo sapien
gaagatcaagaagtacgtgcgcacg

SEQ ID NO: 4433481 - DNA, 25 bp, Homo sapien
tactagacgtacaagcaggtggagc

SEQ ID NO: 4433482 - DNA, 25 bp, Homo sapien
gatgtacttcatccagcacggcgtg

SEQ ID NO: 4433483 - DNA, 25 bp, Homo sapien
ttcgcacttgagaaggaggaacgac

SEQ ID NO: 4433484 - DNA, 25 bp, Homo sapien
cattgatgagttcgtggtcccagga

SEQ ID NO: 4433485 - DNA, 25 bp, Homo sapien
tcatgaagagtgacttgcggctcct

SEQ ID NO: 4433486 - DNA, 25 bp, Homo sapien
catcatcgggagcattcaagctgag

SEQ ID NO: 4433487 - DNA, 25 bp, Homo sapien
caagctggcttggaatccagtgctc

SEQ ID NO: 4433488 - DNA, 25 bp, Homo sapien
ccaagcttggaatccagtgctcttc

SEQ ID NO: 4433489 - DNA, 25 bp, Homo sapien
tgctcttccaaatcatccagtgctc

SEQ ID NO: 4433490 - DNA, 25 bp, Homo sapien
tgctcttccaagtgctcttccaagc

SEQ ID NO: 4433491 - DNA, 25 bp, Homo sapien
tgcagtgctcgccaagtcagggact

SEQ ID NO: 4433492 - DNA, 25 bp, Homo sapien
tgctgaccatggactcaaggacgga

SEQ ID NO: 4433493 - DNA, 25 bp, Homo sapien
ctcctggaggatcactaaggctgtg

SEQ ID NO: 4433494 - DNA, 25 bp, Homo sapien
gagactgcgtcacttcttcctggtg

SEQ ID NO: 4433495 - DNA, 25 bp, Homo sapien
gcatgcggcctagatagcctctcag

SEQ ID NO: 4433496 - DNA, 25 bp, Homo sapien
ggtcatgagagaacttgggctttag

SEQ ID NO: 4433497 - DNA, 25 bp, Homo sapien
gagttctacctctgaaggcgagcgg

SEQ ID NO: 4433498 - DNA, 25 bp, Homo sapien
ttttagaaccgagccttccgagatg

SEQ ID NO: 4433499 - DNA, 25 bp, Homo sapien
gaagctaacaactcccaggttcctg

SEQ ID NO: 4433500 - DNA, 25 bp, Homo sapien
tcctgagagttggaacgtccttcta

SEQ ID NO: 4433501 - DNA, 25 bp, Homo sapien
cgtccttctagtgtctaacttcaat

SEQ ID NO: 4433502 - DNA, 25 bp, Homo sapien
agagtctgttcttgactggccctgg

SEQ ID NO: 4433503 - DNA, 25 bp, Homo sapien
gagccttcttggtcagtccacgcac

SEQ ID NO: 4433504 - DNA, 25 bp, Homo sapien
agccttcttggtcagtccacgcaca

SEQ ID NO: 4433505 - DNA, 25 bp, Homo sapien
acgcacacctccactttggagcaag

SEQ ID NO: 4433506 - DNA, 25 bp, Homo sapien
cacacctccactttggagcaaggtt

SEQ ID NO: 4433507 - DNA, 25 bp, Homo sapien
tacccatttctttgagttccttgtg

SEQ ID NO: 4433508 - DNA, 25 bp, Homo sapien
cattctgaaaataaattacccattt

SEQ ID NO: 4433509 - DNA, 25 bp, Homo sapien
aattttctagctcattctgaaaata

SEQ ID NO: 4433510 - DNA, 25 bp, Homo sapien
gctcattctgaaaataaattaccca

SEQ ID NO: 4433511 - DNA, 25 bp, Homo sapien
tgttttgcaccagtgcttcagtcca

SEQ ID NO: 4433512 - DNA, 25 bp, Homo sapien
atgttttgcaccagtgcttcagtcc

SEQ ID NO: 4433513 - DNA, 25 bp, Homo sapien
tatgttttgcaccagtgcttcagtc

SEQ ID NO: 4433514 - DNA, 25 bp, Homo sapien
ttatgttttgcaccagtgcttcagt

SEQ ID NO: 4433515 - DNA, 25 bp, Homo sapien
ctgctttgagggtctttactctgcc

SEQ ID NO: 4433516 - DNA, 25 bp, Homo sapien
tgctttgagggtctttactctgccc

SEQ ID NO: 4433517 - DNA, 25 bp, Homo sapien
ctttgagggtctttactctgcccat

SEQ ID NO: 4433518 - DNA, 25 bp, Homo sapien
gctttgagggtctttactctgccca

SEQ ID NO: 4433519 - DNA, 25 bp, Homo sapien
ctcagaaagccatgcccaaaggacc

SEQ ID NO: 4433520 - DNA, 25 bp, Homo sapien
ggtgagcatcccagaggtcgtcttc

SEQ ID NO: 4433521 - DNA, 25 bp, Homo sapien
tagacatcatccaattagtacacag

SEQ ID NO: 4433522 - DNA, 25 bp, Homo sapien
tgaggttacatgaactatgggtgac

SEQ ID NO: 4433523 - DNA, 25 bp, Homo sapien
tcagtttggcaaacatgtcctcctg

SEQ ID NO: 4433524 - DNA, 25 bp, Homo sapien
gtggagttgtccacgggtccaatgg

SEQ ID NO: 4433525 - DNA, 25 bp, Homo sapien
tggagttgtccacgggtccaatggg

SEQ ID NO: 4433526 - DNA, 25 bp, Homo sapien
aaccaactatgaggtcccacacagt

SEQ ID NO: 4433527 - DNA, 25 bp, Homo sapien
cggtcttgggcatgaaaccaactat

SEQ ID NO: 4433528 - DNA, 25 bp, Homo sapien
gaaaccaactatgaggtcccacaca

SEQ ID NO: 4433529 - DNA, 25 bp, Homo sapien
gacggtcttgggcatgaaaccaact

SEQ ID NO: 4433530 - DNA, 25 bp, Homo sapien
ggttggacagcaactctgataatat

SEQ ID NO: 4433531 - DNA, 25 bp, Homo sapien
ttggacagcaactctgataatatga

SEQ ID NO: 4433532 - DNA, 25 bp, Homo sapien
gttggacagcaactctgataatatg

SEQ ID NO: 4433533 - DNA, 25 bp, Homo sapien
aggttggacagcaactctgataata

SEQ ID NO: 4433534 - DNA, 25 bp, Homo sapien
gcccccatgtgcgtgctgatggtgg

SEQ ID NO: 4433535 - DNA, 25 bp, Homo sapien
cccccatgtgcgtgctgatggtggt

SEQ ID NO: 4433536 - DNA, 25 bp, Homo sapien
tgcgtctggcaaggacgctctgcac

SEQ ID NO: 4433537 - DNA, 25 bp, Homo sapien
ctgcgtctggcaaggacgctctgca

SEQ ID NO: 4433538 - DNA, 25 bp, Homo sapien
gggagacttggggccataggggcca

SEQ ID NO: 4433539 - DNA, 25 bp, Homo sapien
ggctggggagacttggggccatagg

SEQ ID NO: 4433540 - DNA, 25 bp, Homo sapien
tggggagacttggggccataggggc

SEQ ID NO: 4433541 - DNA, 25 bp, Homo sapien
gagacttggggccataggggccagc

SEQ ID NO: 4433542 - DNA, 25 bp, Homo sapien
ataaaccacgagctccctgatggct

SEQ ID NO: 4433543 - DNA, 25 bp, Homo sapien
cagtcacatgctagcagctgtgatg

SEQ ID NO: 4433544 - DNA, 25 bp, Homo sapien
gtcacatgctagcagctgtgatggt

SEQ ID NO: 4433545 - DNA, 25 bp, Homo sapien
tcagtcacatgctagcagctgtgat

SEQ ID NO: 4433546 - DNA, 25 bp, Homo sapien
cacatgctagcagctgtgatggtac

SEQ ID NO: 4433547 - DNA, 25 bp, Homo sapien
gcctgacagaaggaaaattgctcga

SEQ ID NO: 4433548 - DNA, 25 bp, Homo sapien
atggttggagtgatcgccggagccc

SEQ ID NO: 4433549 - DNA, 25 bp, Homo sapien
attgctcgaacaaggatgatgaagc

SEQ ID NO: 4433550 - DNA, 25 bp, Homo sapien
gaaggaaaattgctcgaacaaggat

SEQ ID NO: 4433551 - DNA, 25 bp, Homo sapien
tgggatggacttgcgtgacctgatc

SEQ ID NO: 4433552 - DNA, 25 bp, Homo sapien
cgcaggtgcggctgtggcaaggttc

SEQ ID NO: 4433553 - DNA, 25 bp, Homo sapien
atgggatggacttgcgtgacctgat

SEQ ID NO: 4433554 - DNA, 25 bp, Homo sapien
ggagggcgcaggtgcggctgtggca

SEQ ID NO: 4433555 - DNA, 25 bp, Homo sapien
ggggcaatgtcgggacagctttctc

SEQ ID NO: 4433556 - DNA, 25 bp, Homo sapien
tggaggggcaatgtcgggacagctt

SEQ ID NO: 4433557 - DNA, 25 bp, Homo sapien
gaggggcaatgtcgggacagctttc

SEQ ID NO: 4433558 - DNA, 25 bp, Homo sapien
aggggcaatgtcgggacagctttct

SEQ ID NO: 4433559 - DNA, 25 bp, Homo sapien
ccgttccccggtgtacacattgtgt

SEQ ID NO: 4433560 - DNA, 25 bp, Homo sapien
cccgttccccggtgtacacattgtg

SEQ ID NO: 4433561 - DNA, 25 bp, Homo sapien
tttaccctgataaatatcagtgact

SEQ ID NO: 4433562 - DNA, 25 bp, Homo sapien
caataatgtgttcatgaggtgccta

SEQ ID NO: 4433563 - DNA, 25 bp, Homo sapien
gtgttcatgaggtgcctatggatta

SEQ ID NO: 4433564 - DNA, 25 bp, Homo sapien
acttttatcgttgaaatcacttcac

SEQ ID NO: 4433565 - DNA, 25 bp, Homo sapien
gcccttgttctactggtacttgctg

SEQ ID NO: 4433566 - DNA, 25 bp, Homo sapien
tgcccttgttctactggtacttgct

SEQ ID NO: 4433567 - DNA, 25 bp, Homo sapien
cactaagcttggtaaggaccaattg

SEQ ID NO: 4433568 - DNA, 25 bp, Homo sapien
ggcactaagcttggtaaggaccaat

SEQ ID NO: 4433569 - DNA, 25 bp, Homo sapien
ctaagcttggtaaggaccaattgtt

SEQ ID NO: 4433570 - DNA, 25 bp, Homo sapien
agcttggtaaggaccaattgttatt

SEQ ID NO: 4433571 - DNA, 25 bp, Homo sapien
attccattgattgagtgattgattg

SEQ ID NO: 4433572 - DNA, 25 bp, Homo sapien
catctagcaggtgtgaaattccatt

SEQ ID NO: 4433573 - DNA, 25 bp, Homo sapien
tgtgaatagttttgcattgcctgtc

SEQ ID NO: 4433574 - DNA, 25 bp, Homo sapien
gatcgccatcctatttcacatctag

SEQ ID NO: 4433575 - DNA, 25 bp, Homo sapien
tttaaactgcggcttgacgggagcc

SEQ ID NO: 4433576 - DNA, 25 bp, Homo sapien
cggctcgggacaggctccttttccg

SEQ ID NO: 4433577 - DNA, 25 bp, Homo sapien
ctcccacgagggtcacggcggcggg

SEQ ID NO: 4433578 - DNA, 25 bp, Homo sapien
atagctcccgccaagtcctcggtgc

SEQ ID NO: 4433579 - DNA, 25 bp, Homo sapien
tggtcttgggcatgacaccaaccat

SEQ ID NO: 4433580 - DNA, 25 bp, Homo sapien
gccatgtaggagtccacaaggttct

SEQ ID NO: 4433581 - DNA, 25 bp, Homo sapien
tccacaaggttctgggtggtttcca

SEQ ID NO: 4433582 - DNA, 25 bp, Homo sapien
atgatggtcttgggcatgacaccaa

SEQ ID NO: 4433583 - DNA, 25 bp, Homo sapien
cgactcttccatcagcgttttctgg

SEQ ID NO: 4433584 - DNA, 25 bp, Homo sapien
tcagcgttttctggtccccacgtga

SEQ ID NO: 4433585 - DNA, 25 bp, Homo sapien
gcgttttctggtccccacgtgagta

SEQ ID NO: 4433586 - DNA, 25 bp, Homo sapien
tctgccgactcttccatcagcgttt

SEQ ID NO: 4433587 - DNA, 25 bp, Homo sapien
tgatgttgccgatgatgccgagtgc

SEQ ID NO: 4433588 - DNA, 25 bp, Homo sapien
gttgatgttgccgatgatgccgagt

SEQ ID NO: 4433589 - DNA, 25 bp, Homo sapien
gtcgtgttgatgttgccgatgatgc

SEQ ID NO: 4433590 - DNA, 25 bp, Homo sapien
gttgccgatgatgccgagtgcctcc

SEQ ID NO: 4433591 - DNA, 25 bp, Homo sapien
ctgcatccggcaaggacgctctgca

SEQ ID NO: 4433592 - DNA, 25 bp, Homo sapien
tgcatccggcaaggacgctctgcac

SEQ ID NO: 4433593 - DNA, 25 bp, Homo sapien
ctttggggccgtgggagccagcctt

SEQ ID NO: 4433594 - DNA, 25 bp, Homo sapien
gggccgtgggagccagccttggtac

SEQ ID NO: 4433595 - DNA, 25 bp, Homo sapien
tggggccgtgggagccagccttggt

SEQ ID NO: 4433596 - DNA, 25 bp, Homo sapien
gggctttggggccgtgggagccagc

SEQ ID NO: 4433597 - DNA, 25 bp, Homo sapien
cacacgctagcagctatgatggtac

SEQ ID NO: 4433598 - DNA, 25 bp, Homo sapien
tcacacgctagcagctatgatggta

SEQ ID NO: 4433599 - DNA, 25 bp, Homo sapien
gtccagggccacctctcgccttggg

SEQ ID NO: 4433600 - DNA, 25 bp, Homo sapien
gactgatgctcagcccctttgggct

SEQ ID NO: 4433601 - DNA, 25 bp, Homo sapien
taagactgatgctcagcccctttgg

SEQ ID NO: 4433602 - DNA, 25 bp, Homo sapien
ttaagactgatgctcagcccctttg

SEQ ID NO: 4433603 - DNA, 25 bp, Homo sapien
aggagtaaagggtgcacgtgcgggt

SEQ ID NO: 4433604 - DNA, 25 bp, Homo sapien
agtaaagggtgcacgtgcgggtgtg

SEQ ID NO: 4433605 - DNA, 25 bp, Homo sapien
ataaaaaaaaagcgagcagagagct

SEQ ID NO: 4433606 - DNA, 25 bp, Homo sapien
gagtaaagggtgcacgtgcgggtgt

SEQ ID NO: 4433607 - DNA, 25 bp, Homo sapien
ttgagagaggtactaaaagactggg

SEQ ID NO: 4433608 - DNA, 25 bp, Homo sapien
gagaggtactaaaagactgggagcc

SEQ ID NO: 4433609 - DNA, 25 bp, Homo sapien
tactaaaagactgggagccgaggtg

SEQ ID NO: 4433610 - DNA, 25 bp, Homo sapien
aggtactaaaagactgggagccgag

SEQ ID NO: 4433611 - DNA, 25 bp, Homo sapien
tttcctctgtgcctatgcttaccaa

SEQ ID NO: 4433612 - DNA, 25 bp, Homo sapien
cctgttcagttaacaggaaacgcag

SEQ ID NO: 4433613 - DNA, 25 bp, Homo sapien
ctgtgcctatgcttaccaagtcttt

SEQ ID NO: 4433614 - DNA, 25 bp, Homo sapien
caggcttaaccttaattctaggacg

SEQ ID NO: 4433615 - DNA, 25 bp, Homo sapien
aatcacctaaatccgggaggccgag

SEQ ID NO: 4433616 - DNA, 25 bp, Homo sapien
gaatcacctaaatccgggaggccga

SEQ ID NO: 4433617 - DNA, 25 bp, Homo sapien
attgcttcctcgacatccttttgct

SEQ ID NO: 4433618 - DNA, 25 bp, Homo sapien
gaggcttgctttcatattgcttcct

SEQ ID NO: 4433619 - DNA, 25 bp, Homo sapien
tgcttcctcgacatccttttgctat

SEQ ID NO: 4433620 - DNA, 25 bp, Homo sapien
tctgaggcttgctttcatattgctt

SEQ ID NO: 4433621 - DNA, 25 bp, Homo sapien
tgagggccccaacagcaaatctgac

SEQ ID NO: 4433622 - DNA, 25 bp, Homo sapien
atgagggccccaacagcaaatctga

SEQ ID NO: 4433623 - DNA, 25 bp, Homo sapien
catgagggccccaacagcaaatctg

SEQ ID NO: 4433624 - DNA, 25 bp, Homo sapien
ggcaggaagggcagaatctgaggga

SEQ ID NO: 4433625 - DNA, 25 bp, Homo sapien
tgttgcccctatgctgggtctctgt

SEQ ID NO: 4433626 - DNA, 25 bp, Homo sapien
gagttagaagggtccttggaattca

SEQ ID NO: 4433627 - DNA, 25 bp, Homo sapien
agttagaagggtccttggaattcag

SEQ ID NO: 4433628 - DNA, 25 bp, Homo sapien
tgcccctatgctgggtctctgtcca

SEQ ID NO: 4433629 - DNA, 25 bp, Homo sapien
ctcctggccgtagggagcagctgcc

SEQ ID NO: 4433630 - DNA, 25 bp, Homo sapien
ggactcctggccgtagggagcagct

SEQ ID NO: 4433631 - DNA, 25 bp, Homo sapien
ctggactcctggccgtagggagcag

SEQ ID NO: 4433632 - DNA, 25 bp, Homo sapien
ggctggactcctggccgtagggagc

SEQ ID NO: 4433633 - DNA, 25 bp, Homo sapien
agggcccagagcacggatgacccag

SEQ ID NO: 4433634 - DNA, 25 bp, Homo sapien
cagagcacggatgacccagttgagc

SEQ ID NO: 4433635 - DNA, 25 bp, Homo sapien
ccagagcacggatgacccagttgag

SEQ ID NO: 4433636 - DNA, 25 bp, Homo sapien
gcccagagcacggatgacccagttg

SEQ ID NO: 4433637 - DNA, 25 bp, Homo sapien
tgcctggctcgccaggctcaggagt

SEQ ID NO: 4433638 - DNA, 25 bp, Homo sapien
gtgaaggacacatgaccaggcgagc

SEQ ID NO: 4433639 - DNA, 25 bp, Homo sapien
acatgaccaggcgagcctgggagca

SEQ ID NO: 4433640 - DNA, 25 bp, Homo sapien
gagagtgaaggacacatgaccaggc

SEQ ID NO: 4433641 - DNA, 25 bp, Homo sapien
acagacctgcttggtccttgtgcag

SEQ ID NO: 4433642 - DNA, 25 bp, Homo sapien
ctcggcagggccatgcggcagaacc

SEQ ID NO: 4433643 - DNA, 25 bp, Homo sapien
gggccagggagagctccatctcgat

SEQ ID NO: 4433644 - DNA, 25 bp, Homo sapien
gagagctccatctcgatggagatga

SEQ ID NO: 4433645 - DNA, 25 bp, Homo sapien
cagggagagctccatctcgatggag

SEQ ID NO: 4433646 - DNA, 25 bp, Homo sapien
gccagggagagctccatctcgatgg

SEQ ID NO: 4433647 - DNA, 25 bp, Homo sapien
tcggttctcgcagtctggttcttat

SEQ ID NO: 4433648 - DNA, 25 bp, Homo sapien
tacccatcggttctcgcagtctggt

SEQ ID NO: 4433649 - DNA, 25 bp, Homo sapien
tgggcctctgtacccatcggttctc

SEQ ID NO: 4433650 - DNA, 25 bp, Homo sapien
ctctgtacccatcggttctcgcagt

SEQ ID NO: 4433651 - DNA, 25 bp, Homo sapien
gagctgcttccagaggagaggttct

SEQ ID NO: 4433652 - DNA, 25 bp, Homo sapien
tgcttccagaggagaggttctaacc

SEQ ID NO: 4433653 - DNA, 25 bp, Homo sapien
agagctgcttccagaggagaggttc

SEQ ID NO: 4433654 - DNA, 25 bp, Homo sapien
gctgcttccagaggagaggttctaa

SEQ ID NO: 4433655 - DNA, 25 bp, Homo sapien
aatctttccggcgaacttaacatgg

SEQ ID NO: 4433656 - DNA, 25 bp, Homo sapien
tagagcccagagagtgataagcctc

SEQ ID NO: 4433657 - DNA, 25 bp, Homo sapien
gaattgagaacatttggcgtgcact

SEQ ID NO: 4433658 - DNA, 25 bp, Homo sapien
gaactctcctgcgaggtctaatgta

SEQ ID NO: 4433659 - DNA, 25 bp, Homo sapien
caccgcaagctccacctccggggtc

SEQ ID NO: 4433660 - DNA, 25 bp, Homo sapien
ccgcaagctccacctccggggtcca

SEQ ID NO: 4433661 - DNA, 25 bp, Homo sapien
cgcaagctccacctccggggtccat

SEQ ID NO: 4433662 - DNA, 25 bp, Homo sapien
tgtagaattgtctaaaatccagcca

SEQ ID NO: 4433663 - DNA, 25 bp, Homo sapien
gctgggcgccggtccggcaaggcct

SEQ ID NO: 4433664 - DNA, 25 bp, Homo sapien
gcaaggcctcttcgccgatgccgag

SEQ ID NO: 4433665 - DNA, 25 bp, Homo sapien
ccgccgagtcctagggccgctgccg

SEQ ID NO: 4433666 - DNA, 25 bp, Homo sapien
gcgcccgccgagtcctagggccgct

SEQ ID NO: 4433667 - DNA, 25 bp, Homo sapien
ggaagatgattcctaggcacgtttg

SEQ ID NO: 4433668 - DNA, 25 bp, Homo sapien
gagaagggtgtccttatgtatcaac

SEQ ID NO: 4433669 - DNA, 25 bp, Homo sapien
ctcctctcccttcaaggaagatgat

SEQ ID NO: 4433670 - DNA, 25 bp, Homo sapien
caatagtggagcgaaaaatgcttca

SEQ ID NO: 4433671 - DNA, 25 bp, Homo sapien
gccaaaatgttcattagatactgtt

SEQ ID NO: 4433672 - DNA, 25 bp, Homo sapien
tcagttttaattaatattggggcca

SEQ ID NO: 4433673 - DNA, 25 bp, Homo sapien
tttaatgatcagtttttatgcaaat

SEQ ID NO: 4433674 - DNA, 25 bp, Homo sapien
tatgcaaatgatttatataagtcag

SEQ ID NO: 4433675 - DNA, 25 bp, Homo sapien
gattctgcaatgtgatgtattcttt

SEQ ID NO: 4433676 - DNA, 25 bp, Homo sapien
taggaatgtctgaaatactgccacc

SEQ ID NO: 4433677 - DNA, 25 bp, Homo sapien
catgccattatctggcctccaaaag

SEQ ID NO: 4433678 - DNA, 25 bp, Homo sapien
tcatttctgagcagtagaatttgag

SEQ ID NO: 4433679 - DNA, 25 bp, Homo sapien
catctaagtggattagttaccctac

SEQ ID NO: 4433680 - DNA, 25 bp, Homo sapien
gtatcacctaccattatgtagccag

SEQ ID NO: 4433681 - DNA, 25 bp, Homo sapien
ttttcacttgtagaattgatctagc

SEQ ID NO: 4433682 - DNA, 25 bp, Homo sapien
tataaacttacctataattgggtga

SEQ ID NO: 4433683 - DNA, 25 bp, Homo sapien
cttgaactggagattggtcctgctt

SEQ ID NO: 4433684 - DNA, 25 bp, Homo sapien
gaactggagattggtcctgcttcat

SEQ ID NO: 4433685 - DNA, 25 bp, Homo sapien
ttgaactggagattggtcctgcttc

SEQ ID NO: 4433686 - DNA, 25 bp, Homo sapien
tgaactggagattggtcctgcttca

SEQ ID NO: 4433687 - DNA, 25 bp, Homo sapien
catggctgcatcgttttgcgttccc

SEQ ID NO: 4433688 - DNA, 25 bp, Homo sapien
tgcgttcccaccagcgatttatgtg

SEQ ID NO: 4433689 - DNA, 25 bp, Homo sapien
tcccaaagtgcaactgcaaaattgt

SEQ ID NO: 4433690 - DNA, 25 bp, Homo sapien
caaaattgttcctaccatggctgca

SEQ ID NO: 4433691 - DNA, 25 bp, Homo sapien
agctactgcgaaggctgaggcaaga

SEQ ID NO: 4433692 - DNA, 25 bp, Homo sapien
gtcgcagtgagccgagatcatgcca

SEQ ID NO: 4433693 - DNA, 25 bp, Homo sapien
tgagccgagatcatgccattgcact

SEQ ID NO: 4433694 - DNA, 25 bp, Homo sapien
aatcgcttgaacccaagaggcagag

SEQ ID NO: 4433695 - DNA, 25 bp, Homo sapien
tcttcactagccgatgcatctgtgc

SEQ ID NO: 4433696 - DNA, 25 bp, Homo sapien
cttcactagccgatgcatctgtgcc

SEQ ID NO: 4433697 - DNA, 25 bp, Homo sapien
gctgcctctgctagcctgagtcagc

SEQ ID NO: 4433698 - DNA, 25 bp, Homo sapien
cagaacggattgcagatttgcatgt

SEQ ID NO: 4433699 - DNA, 25 bp, Homo sapien
gagtcagcagcccactccaattcat

SEQ ID NO: 4433700 - DNA, 25 bp, Homo sapien
agatttgcatgtttcctggctgcct

SEQ ID NO: 4433701 - DNA, 25 bp, Homo sapien
tcggcctcccggatttaggtgattc

SEQ ID NO: 4433702 - DNA, 25 bp, Homo sapien
tgaaacccggtctctgttttgagac

SEQ ID NO: 4433703 - DNA, 25 bp, Homo sapien
tcccccttgtgatcccaggactttg

SEQ ID NO: 4433704 - DNA, 25 bp, Homo sapien
aatagatctgcctggcgtggtgcct

SEQ ID NO: 4433705 - DNA, 25 bp, Homo sapien
tgacttgcgcagcttctgatggctg

SEQ ID NO: 4433706 - DNA, 25 bp, Homo sapien
cactgggctgaaatctaggtctcag

SEQ ID NO: 4433707 - DNA, 25 bp, Homo sapien
gctgaaatctaggtctcagcagagc

SEQ ID NO: 4433708 - DNA, 25 bp, Homo sapien
gggaaaatccatcctttgacttgcg

SEQ ID NO: 4433709 - DNA, 25 bp, Homo sapien
gctttcctggcatcgatgaaggcag

SEQ ID NO: 4433710 - DNA, 25 bp, Homo sapien
cagttaccggctcagaatgtctcca

SEQ ID NO: 4433711 - DNA, 25 bp, Homo sapien
tcctgtagcggttttactgagccct

SEQ ID NO: 4433712 - DNA, 25 bp, Homo sapien
ggagacatgccacttgctgagaagc

SEQ ID NO: 4433713 - DNA, 25 bp, Homo sapien
ccgtttcttcactgttactcccctg

SEQ ID NO: 4433714 - DNA, 25 bp, Homo sapien
ttcttcactgttactcccctgtttc

SEQ ID NO: 4433715 - DNA, 25 bp, Homo sapien
ttcactgttactcccctgtttctca

SEQ ID NO: 4433716 - DNA, 25 bp, Homo sapien
gatttattctaagaccgtttcttca

SEQ ID NO: 4433717 - DNA, 25 bp, Homo sapien
ctaccaaaccagtgcaggttctcct

SEQ ID NO: 4433718 - DNA, 25 bp, Homo sapien
accaaaccagtgcaggttctcctca

SEQ ID NO: 4433719 - DNA, 25 bp, Homo sapien
gactaccaaaccagtgcaggttctc

SEQ ID NO: 4433720 - DNA, 25 bp, Homo sapien
caaaccagtgcaggttctcctcact

SEQ ID NO: 4433721 - DNA, 25 bp, Homo sapien
tctcacttaatcgttgactacaaag

SEQ ID NO: 4433722 - DNA, 25 bp, Homo sapien
ccttctcacttaatcgttgactaca

SEQ ID NO: 4433723 - DNA, 25 bp, Homo sapien
cacttaatcgttgactacaaagacc

SEQ ID NO: 4433724 - DNA, 25 bp, Homo sapien
tcacttaatcgttgactacaaagac

SEQ ID NO: 4433725 - DNA, 25 bp, Homo sapien
aacaaagaaatagggtcatagctag

SEQ ID NO: 4433726 - DNA, 25 bp, Homo sapien
cgctgactaaaatcacgagatttgt

SEQ ID NO: 4433727 - DNA, 25 bp, Homo sapien
gtatcacaataaagctcttagttta

SEQ ID NO: 4433728 - DNA, 25 bp, Homo sapien
atcacacaatgcttagtctttacgc

SEQ ID NO: 4433729 - DNA, 25 bp, Homo sapien
cacacttgaccttcaaattttggaa

SEQ ID NO: 4433730 - DNA, 25 bp, Homo sapien
gaatatgcactcactgacttaacag

SEQ ID NO: 4433731 - DNA, 25 bp, Homo sapien
caaccgctcaaagtctagtcattag

SEQ ID NO: 4433732 - DNA, 25 bp, Homo sapien
ccactgggctaagagagtattgtac

SEQ ID NO: 4433733 - DNA, 25 bp, Homo sapien
ttgcgagaagttgcaaatataatgc

SEQ ID NO: 4433734 - DNA, 25 bp, Homo sapien
actgtattgagggtgaaaattgaat

SEQ ID NO: 4433735 - DNA, 25 bp, Homo sapien
aaaataatcacgtgttttgcgagaa

SEQ ID NO: 4433736 - DNA, 25 bp, Homo sapien
cacgtgttttgcgagaagttgcaaa

SEQ ID NO: 4433737 - DNA, 25 bp, Homo sapien
tggcatgtctttgcacgatgactgg

SEQ ID NO: 4433738 - DNA, 25 bp, Homo sapien
gtctttgcacgatgactggttctat

SEQ ID NO: 4433739 - DNA, 25 bp, Homo sapien
cgatgactggttctattgagtaggc

SEQ ID NO: 4433740 - DNA, 25 bp, Homo sapien
tgagtcaggtggcatgtctttgcac

SEQ ID NO: 4433741 - DNA, 25 bp, Homo sapien
tcacaacggtagacatgtttgccta

SEQ ID NO: 4433742 - DNA, 25 bp, Homo sapien
ctcctcttcgttgggccttgggcag

SEQ ID NO: 4433743 - DNA, 25 bp, Homo sapien
aaaaagacttggtaagcataggcac

SEQ ID NO: 4433744 - DNA, 25 bp, Homo sapien
tcctagaattaaggttaagcctgcg

SEQ ID NO: 4433745 - DNA, 25 bp, Homo sapien
cagcgagggcacaatgcgcctttcc

SEQ ID NO: 4433746 - DNA, 25 bp, Homo sapien
acagcgagggcacaatgcgcctttc

SEQ ID NO: 4433747 - DNA, 25 bp, Homo sapien
atttctacatataattgaaggcaca

SEQ ID NO: 4433748 - DNA, 25 bp, Homo sapien
gaaggcacaatcatgaaaaacaaag

SEQ ID NO: 4433749 - DNA, 25 bp, Homo sapien
tcatcaggcaattcacaaattatat

SEQ ID NO: 4433750 - DNA, 25 bp, Homo sapien
gctctatatgcattaagtccatgat

SEQ ID NO: 4433751 - DNA, 25 bp, Homo sapien
agatgaaagggaaagggcgtggcca

SEQ ID NO: 4433752 - DNA, 25 bp, Homo sapien
gcgtggccttaatgctccaagccca

SEQ ID NO: 4433753 - DNA, 25 bp, Homo sapien
agagggccctgtggctcacaaggaa

SEQ ID NO: 4433754 - DNA, 25 bp, Homo sapien
taaccagggccccagtagaatgcgg

SEQ ID NO: 4433755 - DNA, 25 bp, Homo sapien
ccatcgcagggtggggagggaggaa

SEQ ID NO: 4433756 - DNA, 25 bp, Homo sapien
ctgccatcgcagggtggggagggag

SEQ ID NO: 4433757 - DNA, 25 bp, Homo sapien
atcgcagggtggggagggaggaagg

SEQ ID NO: 4433758 - DNA, 25 bp, Homo sapien
gccatcgcagggtggggagggagga

SEQ ID NO: 4433759 - DNA, 25 bp, Homo sapien
tgcagccaatttgttgtgttgagtt

SEQ ID NO: 4433760 - DNA, 25 bp, Homo sapien
gcagccaatttgttgtgttgagttt

SEQ ID NO: 4433761 - DNA, 25 bp, Homo sapien
gaggggctatgacctagtgcgtttt

SEQ ID NO: 4433762 - DNA, 25 bp, Homo sapien
ttgaggggctatgacctagtgcgtt

SEQ ID NO: 4433763 - DNA, 25 bp, Homo sapien
gggctatgacctagtgcgtttttac

SEQ ID NO: 4433764 - DNA, 25 bp, Homo sapien
tggctgggttgaggggctatgacct

SEQ ID NO: 4433765 - DNA, 25 bp, Homo sapien
agagcccacggagatcaagcttggg

SEQ ID NO: 4433766 - DNA, 25 bp, Homo sapien
gcccagtaatggagcgggaagcccc

SEQ ID NO: 4433767 - DNA, 25 bp, Homo sapien
gcccaaagagcccacggagatcaag

SEQ ID NO: 4433768 - DNA, 25 bp, Homo sapien
tcacccaaggatgactggcgagggt

SEQ ID NO: 4433769 - DNA, 25 bp, Homo sapien
tggtcggggggagggaccatgtcag

SEQ ID NO: 4433770 - DNA, 25 bp, Homo sapien
taggtggactgtgacatcacaacat

SEQ ID NO: 4433771 - DNA, 25 bp, Homo sapien
ggtggactgtgacatcacaacattc

SEQ ID NO: 4433772 - DNA, 25 bp, Homo sapien
ctaggtggactgtgacatcacaaca

SEQ ID NO: 4433773 - DNA, 25 bp, Homo sapien
tggactgtgacatcacaacattcca

SEQ ID NO: 4433774 - DNA, 25 bp, Homo sapien
caacatctgtaagggagtgaggcag

SEQ ID NO: 4433775 - DNA, 25 bp, Homo sapien
gccagtcttgcagtaacggcagtta

SEQ ID NO: 4433776 - DNA, 25 bp, Homo sapien
cgtcaacatctgtaagggagtgagg

SEQ ID NO: 4433777 - DNA, 25 bp, Homo sapien
tcaaaggccagtcttgcagtaacgg

SEQ ID NO: 4433778 - DNA, 25 bp, Homo sapien
atattcatgagaaccgtcagcccct

SEQ ID NO: 4433779 - DNA, 25 bp, Homo sapien
ggaaagaagagcagtaatattcatg

SEQ ID NO: 4433780 - DNA, 25 bp, Homo sapien
gaagagcagtaatattcatgagaac

SEQ ID NO: 4433781 - DNA, 25 bp, Homo sapien
ttggaaagaagagcagtaatattca

SEQ ID NO: 4433782 - DNA, 25 bp, Homo sapien
caggtggctggcaaccaccggaagt

SEQ ID NO: 4433783 - DNA, 25 bp, Homo sapien
cactcctgctggaactctaggtctg

SEQ ID NO: 4433784 - DNA, 25 bp, Homo sapien
ggaactctaggtctgtttttctgcc

SEQ ID NO: 4433785 - DNA, 25 bp, Homo sapien
gttttcctgttcctgttcactcctg

SEQ ID NO: 4433786 - DNA, 25 bp, Homo sapien
ttcttaaccagtacccagcagtcca

SEQ ID NO: 4433787 - DNA, 25 bp, Homo sapien
cagcagtccatccacaatcttaaga

SEQ ID NO: 4433788 - DNA, 25 bp, Homo sapien
cacccggctaaagccagaattctta

SEQ ID NO: 4433789 - DNA, 25 bp, Homo sapien
agaagcctggtcagccaagactcac

SEQ ID NO: 4433790 - DNA, 25 bp, Homo sapien
ggggccccttcagtgactcctgatg

SEQ ID NO: 4433791 - DNA, 25 bp, Homo sapien
tctttgtcctggtttccccttgaga

SEQ ID NO: 4433792 - DNA, 25 bp, Homo sapien
tggcaagtggctgttctctttgtcc

SEQ ID NO: 4433793 - DNA, 25 bp, Homo sapien
ttcagtgactcctgatggcaagtgg

SEQ ID NO: 4433794 - DNA, 25 bp, Homo sapien
gtctgagccctctgacttcctttct

SEQ ID NO: 4433795 - DNA, 25 bp, Homo sapien
cttccccatcaactgcaacattttc

SEQ ID NO: 4433796 - DNA, 25 bp, Homo sapien
tgttctgtcccccacagtgtctgag

SEQ ID NO: 4433797 - DNA, 25 bp, Homo sapien
cccatcaactgcaacattttctttt

SEQ ID NO: 4433798 - DNA, 25 bp, Homo sapien
atgatgtagggccttccctgtggaa

SEQ ID NO: 4433799 - DNA, 25 bp, Homo sapien
gatgtagggccttccctgtggaaac

SEQ ID NO: 4433800 - DNA, 25 bp, Homo sapien
ggccttccctgtggaaacctgttgc

SEQ ID NO: 4433801 - DNA, 25 bp, Homo sapien
agatgatgtagggccttccctgtgg

SEQ ID NO: 4433802 - DNA, 25 bp, Homo sapien
aggtagagagaacgatcgttagggc

SEQ ID NO: 4433803 - DNA, 25 bp, Homo sapien
agaggtagagagaacgatcgttagg

SEQ ID NO: 4433804 - DNA, 25 bp, Homo sapien
agagagaacgatcgttagggctggg

SEQ ID NO: 4433805 - DNA, 25 bp, Homo sapien
agagaggtagagagaacgatcgtta

SEQ ID NO: 4433806 - DNA, 25 bp, Homo sapien
cagtcgactgatttttacggacgtt

SEQ ID NO: 4433807 - DNA, 25 bp, Homo sapien
gtcgactgatttttacggacgttga

SEQ ID NO: 4433808 - DNA, 25 bp, Homo sapien
ttcagtcgactgatttttacggacg

SEQ ID NO: 4433809 - DNA, 25 bp, Homo sapien
cgactgatttttacggacgttgaat

SEQ ID NO: 4433810 - DNA, 25 bp, Homo sapien
ttcttccagctgatgttccacttgt

SEQ ID NO: 4433811 - DNA, 25 bp, Homo sapien
cttccagctgatgttccacttgttt

SEQ ID NO: 4433812 - DNA, 25 bp, Homo sapien
tcttccagctgatgttccacttgtt

SEQ ID NO: 4433813 - DNA, 25 bp, Homo sapien
ttccagctgatgttccacttgtttc

SEQ ID NO: 4433814 - DNA, 25 bp, Homo sapien
ccagcagtcatgtcgcgaggaaacg

SEQ ID NO: 4433815 - DNA, 25 bp, Homo sapien
tcatgtcgcgaggaaacgaaatcac

SEQ ID NO: 4433816 - DNA, 25 bp, Homo sapien
cagtcatgtcgcgaggaaacgaaat

SEQ ID NO: 4433817 - DNA, 25 bp, Homo sapien
cagcagtcatgtcgcgaggaaacga

SEQ ID NO: 4433818 - DNA, 25 bp, Homo sapien
gagacgagactggggcctctatgtc

SEQ ID NO: 4433819 - DNA, 25 bp, Homo sapien
actggggcctctatgtctgagtgcc

SEQ ID NO: 4433820 - DNA, 25 bp, Homo sapien
cgagactggggcctctatgtctgag

SEQ ID NO: 4433821 - DNA, 25 bp, Homo sapien
gactggggcctctatgtctgagtgc

SEQ ID NO: 4433822 - DNA, 25 bp, Homo sapien
gaatgccaccaatgccccaggacag

SEQ ID NO: 4433823 - DNA, 25 bp, Homo sapien
agaatgccaccaatgccccaggaca

SEQ ID NO: 4433824 - DNA, 25 bp, Homo sapien
aatgccaccaatgccccaggacagg

SEQ ID NO: 4433825 - DNA, 25 bp, Homo sapien
cagaatgccaccaatgccccaggac

SEQ ID NO: 4433826 - DNA, 25 bp, Homo sapien
taggaagaggaagacagagctctta

SEQ ID NO: 4433827 - DNA, 25 bp, Homo sapien
ctgtaggaagaggaagacagagctc

SEQ ID NO: 4433828 - DNA, 25 bp, Homo sapien
aggaagaggaagacagagctcttac

SEQ ID NO: 4433829 - DNA, 25 bp, Homo sapien
tgtaggaagaggaagacagagctct

SEQ ID NO: 4433830 - DNA, 25 bp, Homo sapien
ctctagctccctttcggctttctgt

SEQ ID NO: 4433831 - DNA, 25 bp, Homo sapien
tctagctccctttcggctttctgtc

SEQ ID NO: 4433832 - DNA, 25 bp, Homo sapien
cggctttctgtctctcgttgtttgc

SEQ ID NO: 4433833 - DNA, 25 bp, Homo sapien
tttcggctttctgtctctcgttgtt

SEQ ID NO: 4433834 - DNA, 25 bp, Homo sapien
ctttgggagaaaagccaagcaagtg

SEQ ID NO: 4433835 - DNA, 25 bp, Homo sapien
ttcctctttctgtatgatcaatgtc

SEQ ID NO: 4433836 - DNA, 25 bp, Homo sapien
tagttcctctttctgtatgatcaat

SEQ ID NO: 4433837 - DNA, 25 bp, Homo sapien
gtatttagttcctctttctgtatga

SEQ ID NO: 4433838 - DNA, 25 bp, Homo sapien
cctctttctgtatgatcaatgtctg

SEQ ID NO: 4433839 - DNA, 25 bp, Homo sapien
gagagagttgagatggggcccaaag

SEQ ID NO: 4433840 - DNA, 25 bp, Homo sapien
atgagagagttgagatggggcccaa

SEQ ID NO: 4433841 - DNA, 25 bp, Homo sapien
tgagatggggcccaaaggactcccc

SEQ ID NO: 4433842 - DNA, 25 bp, Homo sapien
agttgagatggggcccaaaggactc

SEQ ID NO: 4433843 - DNA, 25 bp, Homo sapien
atgttgcagacggacagccaggtcc

SEQ ID NO: 4433844 - DNA, 25 bp, Homo sapien
cagacggacagccaggtccttggac

SEQ ID NO: 4433845 - DNA, 25 bp, Homo sapien
acggacagccaggtccttggactct

SEQ ID NO: 4433846 - DNA, 25 bp, Homo sapien
caatgaatgttgcagacggacagcc

SEQ ID NO: 4433847 - DNA, 25 bp, Homo sapien
ttctctgtggcgatgacagcagaca

SEQ ID NO: 4433848 - DNA, 25 bp, Homo sapien
tctgtggcgatgacagcagacagag

SEQ ID NO: 4433849 - DNA, 25 bp, Homo sapien
aggctcccaggggatggggcaggtg

SEQ ID NO: 4433850 - DNA, 25 bp, Homo sapien
ggatggggcaggtggctggactcac

SEQ ID NO: 4433851 - DNA, 25 bp, Homo sapien
tcctccatctgcaaaaccaggctcc

SEQ ID NO: 4433852 - DNA, 25 bp, Homo sapien
ctccatctgcaaaaccaggctccca

SEQ ID NO: 4433853 - DNA, 25 bp, Homo sapien
gagtgagaagtttcaatctggagag

SEQ ID NO: 4433854 - DNA, 25 bp, Homo sapien
gaagtttcaatctggagagcctggg

SEQ ID NO: 4433855 - DNA, 25 bp, Homo sapien
aagagtgagaagtttcaatctggag

SEQ ID NO: 4433856 - DNA, 25 bp, Homo sapien
tgagaagtttcaatctggagagcct

SEQ ID NO: 4433857 - DNA, 25 bp, Homo sapien
cagtgcctggtcctgtagggactgc

SEQ ID NO: 4433858 - DNA, 25 bp, Homo sapien
tctccttctatatgttcagcacact

SEQ ID NO: 4433859 - DNA, 25 bp, Homo sapien
ctctctccttctatatgttcagcac

SEQ ID NO: 4433860 - DNA, 25 bp, Homo sapien
cttctatatgttcagcacactcatc

SEQ ID NO: 4433861 - DNA, 25 bp, Homo sapien
tccttctatatgttcagcacactca

SEQ ID NO: 4433862 - DNA, 25 bp, Homo sapien
ctctacccgacgcatatcttgctgc

SEQ ID NO: 4433863 - DNA, 25 bp, Homo sapien
ctacccgacgcatatcttgctgctt

SEQ ID NO: 4433864 - DNA, 25 bp, Homo sapien
tctacccgacgcatatcttgctgct

SEQ ID NO: 4433865 - DNA, 25 bp, Homo sapien
ctgggactggagctctcctgccact

SEQ ID NO: 4433866 - DNA, 25 bp, Homo sapien
gggactggagctctcctgccactct

SEQ ID NO: 4433867 - DNA, 25 bp, Homo sapien
tctctctagttccttcctcaggtgc

SEQ ID NO: 4433868 - DNA, 25 bp, Homo sapien
ctctagttccttcctcaggtgctgc

SEQ ID NO: 4433869 - DNA, 25 bp, Homo sapien
gctgccgaagcttctcgtgctgctc

SEQ ID NO: 4433870 - DNA, 25 bp, Homo sapien
tgccgaagcttctcgtgctgctcct

SEQ ID NO: 4433871 - DNA, 25 bp, Homo sapien
cagctgccgaagcttctcgtgctgc

SEQ ID NO: 4433872 - DNA, 25 bp, Homo sapien
gccagctgccgaagcttctcgtgct

SEQ ID NO: 4433873 - DNA, 25 bp, Homo sapien
ctcgccaagcttctcctgtagctcc

SEQ ID NO: 4433874 - DNA, 25 bp, Homo sapien
ctgctccaactgcagtgtgctcttg

SEQ ID NO: 4433875 - DNA, 25 bp, Homo sapien
caactgcagtgtgctcttgttctca

SEQ ID NO: 4433876 - DNA, 25 bp, Homo sapien
actgcagtgtgctcttgttctcatt

SEQ ID NO: 4433877 - DNA, 25 bp, Homo sapien
cccagcccttcttggatggggtgga

SEQ ID NO: 4433878 - DNA, 25 bp, Homo sapien
tcccctcccaagaggctgctgcccg

SEQ ID NO: 4433879 - DNA, 25 bp, Homo sapien
tggatggggtggaggtttccgtctc

SEQ ID NO: 4433880 - DNA, 25 bp, Homo sapien
cctcccagcccttcttggatggggt

SEQ ID NO: 4433881 - DNA, 25 bp, Homo sapien
aacagtcgcaggactgccctgcggg

SEQ ID NO: 4433882 - DNA, 25 bp, Homo sapien
aggcaggaagcgagaaacagtcgca

SEQ ID NO: 4433883 - DNA, 25 bp, Homo sapien
cactgcacctggtataaggagcctg

SEQ ID NO: 4433884 - DNA, 25 bp, Homo sapien
gagcctgttatagcactgtctcttc

SEQ ID NO: 4433885 - DNA, 25 bp, Homo sapien
gtgacccaggtaatggtctggctgc

SEQ ID NO: 4433886 - DNA, 25 bp, Homo sapien
tgcaggtgacccaggtaatggtctg

SEQ ID NO: 4433887 - DNA, 25 bp, Homo sapien
tgacccaggtaatggtctggctgct

SEQ ID NO: 4433888 - DNA, 25 bp, Homo sapien
caggtgacccaggtaatggtctggc

SEQ ID NO: 4433889 - DNA, 25 bp, Homo sapien
ctgctgctgataggtggccacgtac

SEQ ID NO: 4433890 - DNA, 25 bp, Homo sapien
actgcctgtacagcgcctccttctc

SEQ ID NO: 4433891 - DNA, 25 bp, Homo sapien
tcactgcctgtacagcgcctccttc

SEQ ID NO: 4433892 - DNA, 25 bp, Homo sapien
tgcctgtacagcgcctccttctcac

SEQ ID NO: 4433893 - DNA, 25 bp, Homo sapien
cactgcctgtacagcgcctccttct

SEQ ID NO: 4433894 - DNA, 25 bp, Homo sapien
ctcagctgggccgttagctgctggt

SEQ ID NO: 4433895 - DNA, 25 bp, Homo sapien
agctgggccgttagctgctggttct

SEQ ID NO: 4433896 - DNA, 25 bp, Homo sapien
tgctggctggccgcttccaggtgct

SEQ ID NO: 4433897 - DNA, 25 bp, Homo sapien
gctggctggccgcttccaggtgctc

SEQ ID NO: 4433898 - DNA, 25 bp, Homo sapien
cactcccactactggtcgatgtggg

SEQ ID NO: 4433899 - DNA, 25 bp, Homo sapien
aggcaacttggtgaccgcccgctca

SEQ ID NO: 4433900 - DNA, 25 bp, Homo sapien
gtgaccgcccgctcacaggaggtca

SEQ ID NO: 4433901 - DNA, 25 bp, Homo sapien
gctattccgcccaggcacactccca

SEQ ID NO: 4433902 - DNA, 25 bp, Homo sapien
ctgggacactcggcatgggctgagg

SEQ ID NO: 4433903 - DNA, 25 bp, Homo sapien
actcggcatgggctgaggtgcctcc

SEQ ID NO: 4433904 - DNA, 25 bp, Homo sapien
cactgtccagatgttctcctccgtg

SEQ ID NO: 4433905 - DNA, 25 bp, Homo sapien
actgtccagatgttctcctccgtgt

SEQ ID NO: 4433906 - DNA, 25 bp, Homo sapien
catggcctccctgctctccaggtcc

SEQ ID NO: 4433907 - DNA, 25 bp, Homo sapien
atggcctccctgctctccaggtcct

SEQ ID NO: 4433908 - DNA, 25 bp, Homo sapien
ctgagggcaagatgtgagcattctt

SEQ ID NO: 4433909 - DNA, 25 bp, Homo sapien
tcttgtaactgtgcctgcttctcct

SEQ ID NO: 4433910 - DNA, 25 bp, Homo sapien
ctgctcttgtaactgtgcctgcttc

SEQ ID NO: 4433911 - DNA, 25 bp, Homo sapien
gcctgcttctcctgggcactagctc

SEQ ID NO: 4433912 - DNA, 25 bp, Homo sapien
gcactagctccagcggacttgaaaa

SEQ ID NO: 4433913 - DNA, 25 bp, Homo sapien
ctgccctcaggtggcattttcaagt

SEQ ID NO: 4433914 - DNA, 25 bp, Homo sapien
ctgccttctccttcaggtggtccat

SEQ ID NO: 4433915 - DNA, 25 bp, Homo sapien
gtctgccttctccttcaggtggtcc

SEQ ID NO: 4433916 - DNA, 25 bp, Homo sapien
ccttcaggtggtccataaagctgct

SEQ ID NO: 4433917 - DNA, 25 bp, Homo sapien
ctccttcaggtggtccataaagctg

SEQ ID NO: 4433918 - DNA, 25 bp, Homo sapien
attgaatgaagcgaagttcttgttt

SEQ ID NO: 4433919 - DNA, 25 bp, Homo sapien
tctctcttgccagtattgaatgaag

SEQ ID NO: 4433920 - DNA, 25 bp, Homo sapien
ctcttgccagtattgaatgaagcga

SEQ ID NO: 4433921 - DNA, 25 bp, Homo sapien
catctctcttgccagtattgaatga

SEQ ID NO: 4433922 - DNA, 25 bp, Homo sapien
atctttggcacggccccctggttct

SEQ ID NO: 4433923 - DNA, 25 bp, Homo sapien
tctttggcacggccccctggttctg

SEQ ID NO: 4433924 - DNA, 25 bp, Homo sapien
ctggagggaggggtgctcagctgcc

SEQ ID NO: 4433925 - DNA, 25 bp, Homo sapien
ggagggaggggtgctcagctgccat

SEQ ID NO: 4433926 - DNA, 25 bp, Homo sapien
tggagggaggggtgctcagctgcca

SEQ ID NO: 4433927 - DNA, 25 bp, Homo sapien
atctgctgcagctccagcagcttca

SEQ ID NO: 4433928 - DNA, 25 bp, Homo sapien
tctgctgcagctccagcagcttcac

SEQ ID NO: 4433929 - DNA, 25 bp, Homo sapien
catctgctgcagctccagcagcttc

SEQ ID NO: 4433930 - DNA, 25 bp, Homo sapien
ctggaccgggctcatcagcagagtt

SEQ ID NO: 4433931 - DNA, 25 bp, Homo sapien
ttgtagttgctgtaagccgcaatac

SEQ ID NO: 4433932 - DNA, 25 bp, Homo sapien
accgggctcatcagcagagttgtgg

SEQ ID NO: 4433933 - DNA, 25 bp, Homo sapien
tggaccgggctcatcagcagagttg

SEQ ID NO: 4433934 - DNA, 25 bp, Homo sapien
caccatgcttgtctgcagccccaag

SEQ ID NO: 4433935 - DNA, 25 bp, Homo sapien
accatgcttgtctgcagccccaagc

SEQ ID NO: 4433936 - DNA, 25 bp, Homo sapien
ccatgcttgtctgcagccccaagct

SEQ ID NO: 4433937 - DNA, 25 bp, Homo sapien
catgcttgtctgcagccccaagctc

SEQ ID NO: 4433938 - DNA, 25 bp, Homo sapien
tcaaggagaggatcctccctggcct

SEQ ID NO: 4433939 - DNA, 25 bp, Homo sapien
tgtcaaggagaggatcctccctggc

SEQ ID NO: 4433940 - DNA, 25 bp, Homo sapien
gaggtgagggtcacctcacgaagat

SEQ ID NO: 4433941 - DNA, 25 bp, Homo sapien
cttgtcaaggagaggatcctccctg

SEQ ID NO: 4433942 - DNA, 25 bp, Homo sapien
gctcctggtggtcctgcacgatcgg

SEQ ID NO: 4433943 - DNA, 25 bp, Homo sapien
tgctcctggtggtcctgcacgatcg

SEQ ID NO: 4433944 - DNA, 25 bp, Homo sapien
ggtgctcctggtggtcctgcacgat

SEQ ID NO: 4433945 - DNA, 25 bp, Homo sapien
tgggtgctcctggtggtcctgcacg

SEQ ID NO: 4433946 - DNA, 25 bp, Homo sapien
ggcagccaagcccaacaaaataatg

SEQ ID NO: 4433947 - DNA, 25 bp, Homo sapien
gccaagcccaacaaaataatggcac

SEQ ID NO: 4433948 - DNA, 25 bp, Homo sapien
tcttggcagccaagcccaacaaaat

SEQ ID NO: 4433949 - DNA, 25 bp, Homo sapien
caagcccaacaaaataatggcacac

SEQ ID NO: 4433950 - DNA, 25 bp, Homo sapien
tgtaggagattaaccccataacttg

SEQ ID NO: 4433951 - DNA, 25 bp, Homo sapien
ttgagcagctgtttgatgatggtga

SEQ ID NO: 4433952 - DNA, 25 bp, Homo sapien
tcttgagcagctgtttgatgatggt

SEQ ID NO: 4433953 - DNA, 25 bp, Homo sapien
aaatttcttgagcagctgtttgatg

SEQ ID NO: 4433954 - DNA, 25 bp, Homo sapien
aattagaaacacaaataatcatgag

SEQ ID NO: 4433955 - DNA, 25 bp, Homo sapien
ttagaaacacaaataatcatgagtg

SEQ ID NO: 4433956 - DNA, 25 bp, Homo sapien
gaaacacaaataatcatgagtgagt

SEQ ID NO: 4433957 - DNA, 25 bp, Homo sapien
agaaacacaaataatcatgagtgag

SEQ ID NO: 4433958 - DNA, 25 bp, Homo sapien
caaaaggttatcactcccatcacca

SEQ ID NO: 4433959 - DNA, 25 bp, Homo sapien
tgtctgaatgctgtagtgaatatac

SEQ ID NO: 4433960 - DNA, 25 bp, Homo sapien
caaagagaacagttttgggcaaaga

SEQ ID NO: 4433961 - DNA, 25 bp, Homo sapien
caattcttggcctttaaacaactct

SEQ ID NO: 4433962 - DNA, 25 bp, Homo sapien
ctcaaagaatctccgtgaacagaga

SEQ ID NO: 4433963 - DNA, 25 bp, Homo sapien
gaataggtattagccaaagaggtct

SEQ ID NO: 4433964 - DNA, 25 bp, Homo sapien
aagaatctccgtgaacagagaggaa

SEQ ID NO: 4433965 - DNA, 25 bp, Homo sapien
cgtaaaggatttcttatgatcttca

SEQ ID NO: 4433966 - DNA, 25 bp, Homo sapien
gtgaagtgatttcaacgataaaagt

SEQ ID NO: 4433967 - DNA, 25 bp, Homo sapien
gaagtgatttcaacgataaaagtac

SEQ ID NO: 4433968 - DNA, 25 bp, Homo sapien
tgaagtgatttcaacgataaaagta

SEQ ID NO: 4433969 - DNA, 25 bp, Homo sapien
tgaacacattattgtcagattggtt

SEQ ID NO: 4433970 - DNA, 25 bp, Homo sapien
atgaacacattattgtcagattggt

SEQ ID NO: 4433971 - DNA, 25 bp, Homo sapien
caataaggccactctagggaaaaat

SEQ ID NO: 4433972 - DNA, 25 bp, Homo sapien
ataaggccactctagggaaaaatct

SEQ ID NO: 4433973 - DNA, 25 bp, Homo sapien
tactatagttttcaagaaacgcaaa

SEQ ID NO: 4433974 - DNA, 25 bp, Homo sapien
ctatagttttcaagaaacgcaaaat

SEQ ID NO: 4433975 - DNA, 25 bp, Homo sapien
tatagttttcaagaaacgcaaaata

SEQ ID NO: 4433976 - DNA, 25 bp, Homo sapien
aatactatagttttcaagaaacgca

SEQ ID NO: 4433977 - DNA, 25 bp, Homo sapien
cagtataaattgactttgtagaaag

SEQ ID NO: 4433978 - DNA, 25 bp, Homo sapien
gactttgtagaaagtataggtggat

SEQ ID NO: 4433979 - DNA, 25 bp, Homo sapien
tcagtataaattgactttgtagaaa

SEQ ID NO: 4433980 - DNA, 25 bp, Homo sapien
aaattgactttgtagaaagtatagg

SEQ ID NO: 4433981 - DNA, 25 bp, Homo sapien
cttgggatataagaaacatcccaag

SEQ ID NO: 4433982 - DNA, 25 bp, Homo sapien
gatataagaaacatcccaaggcggg

SEQ ID NO: 4433983 - DNA, 25 bp, Homo sapien
tgggatataagaaacatcccaaggc

SEQ ID NO: 4433984 - DNA, 25 bp, Homo sapien
ggatataagaaacatcccaaggcgg

SEQ ID NO: 4433985 - DNA, 25 bp, Homo sapien
tgaaacatcagcgatcccatcaaaa

SEQ ID NO: 4433986 - DNA, 25 bp, Homo sapien
cagcgatcccatcaaaatattctgt

SEQ ID NO: 4433987 - DNA, 25 bp, Homo sapien
aacatcagcgatcccatcaaaatat

SEQ ID NO: 4433988 - DNA, 25 bp, Homo sapien
catcagcgatcccatcaaaatattc

SEQ ID NO: 4433989 - DNA, 25 bp, Homo sapien
tgttgacttgcacgactgcaaacgc

SEQ ID NO: 4433990 - DNA, 25 bp, Homo sapien
cagcttccggtccagacggttatct

SEQ ID NO: 4433991 - DNA, 25 bp, Homo sapien
aaacgccctgagctgcttttgcagt

SEQ ID NO: 4433992 - DNA, 25 bp, Homo sapien
ccagacggttatcttgttgacttgc

SEQ ID NO: 4433993 - DNA, 25 bp, Homo sapien
gggactgatggtcatgctgaaatct

SEQ ID NO: 4433994 - DNA, 25 bp, Homo sapien
caggattcagaaacgctgattttag

SEQ ID NO: 4433995 - DNA, 25 bp, Homo sapien
gctgaaatcttattgcgtaggaaat

SEQ ID NO: 4433996 - DNA, 25 bp, Homo sapien
ccttggtgggaacttcggctctgtg

SEQ ID NO: 4433997 - DNA, 25 bp, Homo sapien
ttcttttccgagcttggctgtcgct

SEQ ID NO: 4433998 - DNA, 25 bp, Homo sapien
tgaaggccctcttatgaagaaaccg

SEQ ID NO: 4433999 - DNA, 25 bp, Homo sapien
cagaccattcacagtatttgaggaa

SEQ ID NO: 4434000 - DNA, 25 bp, Homo sapien
gctgtcgctgaaggccctcttatga

SEQ ID NO: 4434001 - DNA, 25 bp, Homo sapien
cagcaaacatgaaaagcaggatgag

SEQ ID NO: 4434002 - DNA, 25 bp, Homo sapien
gtgtaacgggcaaacccagcaaaca

SEQ ID NO: 4434003 - DNA, 25 bp, Homo sapien
gcaggatgagtttcacttgttcctt

SEQ ID NO: 4434004 - DNA, 25 bp, Homo sapien
cttgttccttcaaggccagtttttg

SEQ ID NO: 4434005 - DNA, 25 bp, Homo sapien
cgcgaaacagcgctccacatctgat

SEQ ID NO: 4434006 - DNA, 25 bp, Homo sapien
ttcagcccaggctcaaatggcagcg

SEQ ID NO: 4434007 - DNA, 25 bp, Homo sapien
cacatctgattggtccactcctctt

SEQ ID NO: 4434008 - DNA, 25 bp, Homo sapien
ggctcaaatggcagcgcgaaacagc

SEQ ID NO: 4434009 - DNA, 25 bp, Homo sapien
gcgttcactgaagccaagccgttag

SEQ ID NO: 4434010 - DNA, 25 bp, Homo sapien
ctgcacatcccggtgcgttcactga

SEQ ID NO: 4434011 - DNA, 25 bp, Homo sapien
gcacatcccggtgcgttcactgaag

SEQ ID NO: 4434012 - DNA, 25 bp, Homo sapien
gaagccaagccgttagcctcatgct

SEQ ID NO: 4434013 - DNA, 25 bp, Homo sapien
ccgtctcacaggctgctcgttccct

SEQ ID NO: 4434014 - DNA, 25 bp, Homo sapien
gcaggctcaactgggcgctcgcccc

SEQ ID NO: 4434015 - DNA, 25 bp, Homo sapien
ctggccgccggaccagccggctgct

SEQ ID NO: 4434016 - DNA, 25 bp, Homo sapien
tggtagccgccgtcaccccgtctca

SEQ ID NO: 4434017 - DNA, 25 bp, Homo sapien
tcaaatttgaactccgctcggctgc

SEQ ID NO: 4434018 - DNA, 25 bp, Homo sapien
ggcttttccttgatcctcactcaca

SEQ ID NO: 4434019 - DNA, 25 bp, Homo sapien
tggtcacccaatgctttcagctact

SEQ ID NO: 4434020 - DNA, 25 bp, Homo sapien
cagacccgcttctcttagccctttg

SEQ ID NO: 4434021 - DNA, 25 bp, Homo sapien
tttcatgtctcctgcgatcgcactg

SEQ ID NO: 4434022 - DNA, 25 bp, Homo sapien
gacacccttcaccttaataccatag

SEQ ID NO: 4434023 - DNA, 25 bp, Homo sapien
gatcgcactgcccacggacaccctt

SEQ ID NO: 4434024 - DNA, 25 bp, Homo sapien
tagaaggcccgcagatgctgcaaca

SEQ ID NO: 4434025 - DNA, 25 bp, Homo sapien
gtccatattctggtacagcagaatg

SEQ ID NO: 4434026 - DNA, 25 bp, Homo sapien
tgtccatattctggtacagcagaat

SEQ ID NO: 4434027 - DNA, 25 bp, Homo sapien
ctttagtgcttttaggcgaatcaca

SEQ ID NO: 4434028 - DNA, 25 bp, Homo sapien
cagatcctgatttccgaaaaagccc

SEQ ID NO: 4434029 - DNA, 25 bp, Homo sapien
tcttctaaagatgtgcaagcatcga

SEQ ID NO: 4434030 - DNA, 25 bp, Homo sapien
agatgtgcaagcatcgacaagaaag

SEQ ID NO: 4434031 - DNA, 25 bp, Homo sapien
tataataatcttgagtattttggca

SEQ ID NO: 4434032 - DNA, 25 bp, Homo sapien
ataataatcttgagtattttggcaa

SEQ ID NO: 4434033 - DNA, 25 bp, Homo sapien
tgcttaagaagtcccgcaatatcac

SEQ ID NO: 4434034 - DNA, 25 bp, Homo sapien
gataggcaaccttcaccatgatcca

SEQ ID NO: 4434035 - DNA, 25 bp, Homo sapien
gcttcatgcaaatcagctgggagaa

SEQ ID NO: 4434036 - DNA, 25 bp, Homo sapien
caaggaggtgcagaagataggcaac

SEQ ID NO: 4434037 - DNA, 25 bp, Homo sapien
aataaacgctttattagatggagcc

SEQ ID NO: 4434038 - DNA, 25 bp, Homo sapien
cttaagtgaataaacgctttattag

SEQ ID NO: 4434039 - DNA, 25 bp, Homo sapien
gctttattagatggagccaaacgtg

SEQ ID NO: 4434040 - DNA, 25 bp, Homo sapien
gagccaaacgtgaaaatacagaaga

SEQ ID NO: 4434041 - DNA, 25 bp, Homo sapien
tatctgatgcataatcgataagagt

SEQ ID NO: 4434042 - DNA, 25 bp, Homo sapien
cataatcgataagagtctgtactac

SEQ ID NO: 4434043 - DNA, 25 bp, Homo sapien
tgtactactgcagcctgtaatcgta

SEQ ID NO: 4434044 - DNA, 25 bp, Homo sapien
gagtctgtactactgcagcctgtaa

SEQ ID NO: 4434045 - DNA, 25 bp, Homo sapien
tgggggtgaggtcagtaatatacca

SEQ ID NO: 4434046 - DNA, 25 bp, Homo sapien
caaattctgttaataatgcaactac

SEQ ID NO: 4434047 - DNA, 25 bp, Homo sapien
tgaggtcagtaatataccaactttc

SEQ ID NO: 4434048 - DNA, 25 bp, Homo sapien
cagtaatataccaactttctaacag

SEQ ID NO: 4434049 - DNA, 25 bp, Homo sapien
tcaaagccttccagtgatggagtag

SEQ ID NO: 4434050 - DNA, 25 bp, Homo sapien
cagagaccatcaatacccaacatgg

SEQ ID NO: 4434051 - DNA, 25 bp, Homo sapien
cccaacatggctggtatcttttcca

SEQ ID NO: 4434052 - DNA, 25 bp, Homo sapien
tcttatattcaccaggagtttcata

SEQ ID NO: 4434053 - DNA, 25 bp, Homo sapien
tttaaatttatttagtgctccacta

SEQ ID NO: 4434054 - DNA, 25 bp, Homo sapien
tttatttagtgctccactaacaaaa

SEQ ID NO: 4434055 - DNA, 25 bp, Homo sapien
aatttatttagtgctccactaacaa

SEQ ID NO: 4434056 - DNA, 25 bp, Homo sapien
taaatttatttagtgctccactaac

SEQ ID NO: 4434057 - DNA, 25 bp, Homo sapien
cagagttgacaacatataaaagctt

SEQ ID NO: 4434058 - DNA, 25 bp, Homo sapien
agagttgacaacatataaaagcttt

SEQ ID NO: 4434059 - DNA, 25 bp, Homo sapien
gagttgacaacatataaaagcttta

SEQ ID NO: 4434060 - DNA, 25 bp, Homo sapien
agaatctactggcaatgtacgctta

SEQ ID NO: 4434061 - DNA, 25 bp, Homo sapien
actggcaatgtacgcttagcatttg

SEQ ID NO: 4434062 - DNA, 25 bp, Homo sapien
tctactggcaatgtacgcttagcat

SEQ ID NO: 4434063 - DNA, 25 bp, Homo sapien
aatctactggcaatgtacgcttagc

SEQ ID NO: 4434064 - DNA, 25 bp, Homo sapien
ctgataccggtgtagaactgctatt

SEQ ID NO: 4434065 - DNA, 25 bp, Homo sapien
gagagtgaactctgagatgaccctt

SEQ ID NO: 4434066 - DNA, 25 bp, Homo sapien
caggagagagtgaactctgagatga

SEQ ID NO: 4434067 - DNA, 25 bp, Homo sapien
tggtttccaccaatgagtacaggag

SEQ ID NO: 4434068 - DNA, 25 bp, Homo sapien
gacccttctgagcttgtatcgatgt

SEQ ID NO: 4434069 - DNA, 25 bp, Homo sapien
gcaattcttttacttcgccttggca

SEQ ID NO: 4434070 - DNA, 25 bp, Homo sapien
gcctgcaattcttttacttcgcctt

SEQ ID NO: 4434071 - DNA, 25 bp, Homo sapien
ctgcaattcttttacttcgccttgg

SEQ ID NO: 4434072 - DNA, 25 bp, Homo sapien
aattcttttacttcgccttggcaca

SEQ ID NO: 4434073 - DNA, 25 bp, Homo sapien
tccctagattgaatttcaaacgcag

SEQ ID NO: 4434074 - DNA, 25 bp, Homo sapien
gattgaatttcaaacgcagagatct

SEQ ID NO: 4434075 - DNA, 25 bp, Homo sapien
gatcttcgaaccttttctttatggc

SEQ ID NO: 4434076 - DNA, 25 bp, Homo sapien
tcaaacgcagagatcttcgaacctt

SEQ ID NO: 4434077 - DNA, 25 bp, Homo sapien
cagattcaattcgattttttaaact

SEQ ID NO: 4434078 - DNA, 25 bp, Homo sapien
tgttgatttgcaagtcgccaaccaa

SEQ ID NO: 4434079 - DNA, 25 bp, Homo sapien
ttgcaagtcgccaaccaacactttc

SEQ ID NO: 4434080 - DNA, 25 bp, Homo sapien
tatctattgacaccagaacatccat

SEQ ID NO: 4434081 - DNA, 25 bp, Homo sapien
tcagtgcttaatcctttgtatttaa

SEQ ID NO: 4434082 - DNA, 25 bp, Homo sapien
tctctagaacagtaaattaattaat

SEQ ID NO: 4434083 - DNA, 25 bp, Homo sapien
gaaaaatacattgccaattctaata

SEQ ID NO: 4434084 - DNA, 25 bp, Homo sapien
tcccaattgttgatagaaaaataca

SEQ ID NO: 4434085 - DNA, 25 bp, Homo sapien
ttttcatccccgctaagagggctac

SEQ ID NO: 4434086 - DNA, 25 bp, Homo sapien
tgagaaagaggatctagcctcgtcc

SEQ ID NO: 4434087 - DNA, 25 bp, Homo sapien
tattaggtcctgtccaagacatccg

SEQ ID NO: 4434088 - DNA, 25 bp, Homo sapien
aatttgttccaactagtcgctctgg

SEQ ID NO: 4434089 - DNA, 25 bp, Homo sapien
taattcttctgacggactgacgaac

SEQ ID NO: 4434090 - DNA, 25 bp, Homo sapien
tacgctgaaacttaagaggtgactt

SEQ ID NO: 4434091 - DNA, 25 bp, Homo sapien
gaagctgtatcaccaagactcgcca

SEQ ID NO: 4434092 - DNA, 25 bp, Homo sapien
gactcgccaacttatgccctgtagg

SEQ ID NO: 4434093 - DNA, 25 bp, Homo sapien
gaaagatttcgagggtaactccatg

SEQ ID NO: 4434094 - DNA, 25 bp, Homo sapien
tttctgatggtctcctaaggaccct

SEQ ID NO: 4434095 - DNA, 25 bp, Homo sapien
gattagtcagatcatccaagggaac

SEQ ID NO: 4434096 - DNA, 25 bp, Homo sapien
taggacctgatttgatacatgaaac

SEQ ID NO: 4434097 - DNA, 25 bp, Homo sapien
cattaatgacaagtataacatttac

SEQ ID NO: 4434098 - DNA, 25 bp, Homo sapien
cataccaattactcactttatttac

SEQ ID NO: 4434099 - DNA, 25 bp, Homo sapien
tatttacattaatgacaagtataac

SEQ ID NO: 4434100 - DNA, 25 bp, Homo sapien
taatgacaagtataacatttaccaa

SEQ ID NO: 4434101 - DNA, 25 bp, Homo sapien
ggtacacctactggcactataaatg

SEQ ID NO: 4434102 - DNA, 25 bp, Homo sapien
tctatattggacagaacagacacaa

SEQ ID NO: 4434103 - DNA, 25 bp, Homo sapien
cttggaggaaataggcacaacttgc

SEQ ID NO: 4434104 - DNA, 25 bp, Homo sapien
gttcgagtgaacacaaggtacacct

SEQ ID NO: 4434105 - DNA, 25 bp, Homo sapien
tgaggttactgcacgtccagacact

SEQ ID NO: 4434106 - DNA, 25 bp, Homo sapien
tagaacctagccaagcaaacatctg

SEQ ID NO: 4434107 - DNA, 25 bp, Homo sapien
gctgtaagtctggttgctccgagtg

SEQ ID NO: 4434108 - DNA, 25 bp, Homo sapien
gaatgctgctctaatctgctccaac

SEQ ID NO: 4434109 - DNA, 25 bp, Homo sapien
gcagcccgaggagcctactgcggta

SEQ ID NO: 4434110 - DNA, 25 bp, Homo sapien
gcgaactggagagctagtgcgtcac

SEQ ID NO: 4434111 - DNA, 25 bp, Homo sapien
agcctactgcggtatgggccttggt

SEQ ID NO: 4434112 - DNA, 25 bp, Homo sapien
tcaggccaggaacgggcgaactgga

SEQ ID NO: 4434113 - DNA, 25 bp, Homo sapien
aaacagtaggccagatagcatggta

SEQ ID NO: 4434114 - DNA, 25 bp, Homo sapien
taggccagatagcatggtagagacc

SEQ ID NO: 4434115 - DNA, 25 bp, Homo sapien
ggccagatagcatggtagagaccat

SEQ ID NO: 4434116 - DNA, 25 bp, Homo sapien
cagtaggccagatagcatggtagag

SEQ ID NO: 4434117 - DNA, 25 bp, Homo sapien
tggtgagctggatattccactcggg

SEQ ID NO: 4434118 - DNA, 25 bp, Homo sapien
gcagcctctggatatctgcttctga

SEQ ID NO: 4434119 - DNA, 25 bp, Homo sapien
gggcccacaagattcatggcctggt

SEQ ID NO: 4434120 - DNA, 25 bp, Homo sapien
tgcccaattgctccataacaccatg

SEQ ID NO: 4434121 - DNA, 25 bp, Homo sapien
caaaccatcagaacacagtaaatac

SEQ ID NO: 4434122 - DNA, 25 bp, Homo sapien
tcaaaccatcagaacacagtaaata

SEQ ID NO: 4434123 - DNA, 25 bp, Homo sapien
tactggctggcattgactcaaaagg

SEQ ID NO: 4434124 - DNA, 25 bp, Homo sapien
cattcctaggaatcaagtcagatcc

SEQ ID NO: 4434125 - DNA, 25 bp, Homo sapien
gatgacacaatttcctgaagatcag

SEQ ID NO: 4434126 - DNA, 25 bp, Homo sapien
cctcttgggtatactggagtcattc

SEQ ID NO: 4434127 - DNA, 25 bp, Homo sapien
aacaatattcatggcattcacagaa

SEQ ID NO: 4434128 - DNA, 25 bp, Homo sapien
tcaacaatattcatggcattcacag

SEQ ID NO: 4434129 - DNA, 25 bp, Homo sapien
caacaatattcatggcattcacaga

SEQ ID NO: 4434130 - DNA, 25 bp, Homo sapien
caatattcatggcattcacagaacc

SEQ ID NO: 4434131 - DNA, 25 bp, Homo sapien
gactgtgaatctttagggcagagct

SEQ ID NO: 4434132 - DNA, 25 bp, Homo sapien
gctgggatgcactgtcataactttt

SEQ ID NO: 4434133 - DNA, 25 bp, Homo sapien
actcctgtttgcttccacggcggca

SEQ ID NO: 4434134 - DNA, 25 bp, Homo sapien
cctttacacttatggttccctgatg

SEQ ID NO: 4434135 - DNA, 25 bp, Homo sapien
ttggttcctccagggtgaggataac

SEQ ID NO: 4434136 - DNA, 25 bp, Homo sapien
gttctcattggttcctccagggtga

SEQ ID NO: 4434137 - DNA, 25 bp, Homo sapien
aagcccaatgttctcattggttcct

SEQ ID NO: 4434138 - DNA, 25 bp, Homo sapien
gcccaatgttctcattggttcctcc

SEQ ID NO: 4434139 - DNA, 25 bp, Homo sapien
tctgagaggacatctgccagaagcc

SEQ ID NO: 4434140 - DNA, 25 bp, Homo sapien
ccctctttttccagatgacgtgaaa

SEQ ID NO: 4434141 - DNA, 25 bp, Homo sapien
gaaattgttgattgtggcttccctg

SEQ ID NO: 4434142 - DNA, 25 bp, Homo sapien
catgaggaacttagaaacctccagg

SEQ ID NO: 4434143 - DNA, 25 bp, Homo sapien
ggaagtctagctcaagtttgatctg

SEQ ID NO: 4434144 - DNA, 25 bp, Homo sapien
gaactccagtagtgactgcctgatc

SEQ ID NO: 4434145 - DNA, 25 bp, Homo sapien
tacatcctacccgtcctcaaggaag

SEQ ID NO: 4434146 - DNA, 25 bp, Homo sapien
gatccacatatagggttctcagctt

SEQ ID NO: 4434147 - DNA, 25 bp, Homo sapien
ccagagatccccgtggtgttggtgc

SEQ ID NO: 4434148 - DNA, 25 bp, Homo sapien
ctccagagatccccgtggtgttggt

SEQ ID NO: 4434149 - DNA, 25 bp, Homo sapien
gagatccccgtggtgttggtgccat

SEQ ID NO: 4434150 - DNA, 25 bp, Homo sapien
cagagatccccgtggtgttggtgcc

SEQ ID NO: 4434151 - DNA, 25 bp, Homo sapien
gcacctgggatcgtctaacttgcca

SEQ ID NO: 4434152 - DNA, 25 bp, Homo sapien
ccgtgtctgacactctgggagctta

SEQ ID NO: 4434153 - DNA, 25 bp, Homo sapien
gacactctgggagcttataatcaaa

SEQ ID NO: 4434154 - DNA, 25 bp, Homo sapien
taacttgccatgagaagtccgtgtc

SEQ ID NO: 4434155 - DNA, 25 bp, Homo sapien
gaactgaccagtagtgccaggagcc

SEQ ID NO: 4434156 - DNA, 25 bp, Homo sapien
ttggtcagaccaaaagccagcagga

SEQ ID NO: 4434157 - DNA, 25 bp, Homo sapien
ggccctggataagtatcactctgtc

SEQ ID NO: 4434158 - DNA, 25 bp, Homo sapien
cagaaagatggcatcaggaaggtcc

SEQ ID NO: 4434159 - DNA, 25 bp, Homo sapien
gggcttgttgacacaggcctgctga

SEQ ID NO: 4434160 - DNA, 25 bp, Homo sapien
ggcttgttgacacaggcctgctgag

SEQ ID NO: 4434161 - DNA, 25 bp, Homo sapien
gggacctgctggttcaattcaggag

SEQ ID NO: 4434162 - DNA, 25 bp, Homo sapien
tttttgcacacttcagtgaccaagg

SEQ ID NO: 4434163 - DNA, 25 bp, Homo sapien
gagccaggcgtcttaggtagctcac

SEQ ID NO: 4434164 - DNA, 25 bp, Homo sapien
gaccatagcacctgcattgttgcca

SEQ ID NO: 4434165 - DNA, 25 bp, Homo sapien
ctaggggtaatcgaggtgaaaagct

SEQ ID NO: 4434166 - DNA, 25 bp, Homo sapien
ggacttatgacttattcacagctct

SEQ ID NO: 4434167 - DNA, 25 bp, Homo sapien
gggacttatgacttattcacagctc

SEQ ID NO: 4434168 - DNA, 25 bp, Homo sapien
atagggacttatgacttattcacag

SEQ ID NO: 4434169 - DNA, 25 bp, Homo sapien
ctatagggacttatgacttattcac

SEQ ID NO: 4434170 - DNA, 25 bp, Homo sapien
cagccagtgtgagaatgcccagtag

SEQ ID NO: 4434171 - DNA, 25 bp, Homo sapien
cagtgtgagaatgcccagtagatgt

SEQ ID NO: 4434172 - DNA, 25 bp, Homo sapien
ctcagccagtgtgagaatgcccagt

SEQ ID NO: 4434173 - DNA, 25 bp, Homo sapien
gagaatgcccagtagatgtgtttct

SEQ ID NO: 4434174 - DNA, 25 bp, Homo sapien
taccatccttaagccgttggtatga

SEQ ID NO: 4434175 - DNA, 25 bp, Homo sapien
aagtaataccatccttaagccgttg

SEQ ID NO: 4434176 - DNA, 25 bp, Homo sapien
caagaatacttaagtaataccatcc

SEQ ID NO: 4434177 - DNA, 25 bp, Homo sapien
ccttaagccgttggtatgaggataa

SEQ ID NO: 4434178 - DNA, 25 bp, Homo sapien
aatattggcctcatcaccttagctg

SEQ ID NO: 4434179 - DNA, 25 bp, Homo sapien
tagacatggcgatcaaaagtgcagc

SEQ ID NO: 4434180 - DNA, 25 bp, Homo sapien
aataccaaatcggtcagagcaggtg

SEQ ID NO: 4434181 - DNA, 25 bp, Homo sapien
cctcttgggcgtggtgaataccaaa

SEQ ID NO: 4434182 - DNA, 25 bp, Homo sapien
actggggactatggttgaggaggtg

SEQ ID NO: 4434183 - DNA, 25 bp, Homo sapien
tgacctggttccgcactggccaggg

SEQ ID NO: 4434184 - DNA, 25 bp, Homo sapien
tggataagggttagcaggaactgtg

SEQ ID NO: 4434185 - DNA, 25 bp, Homo sapien
attcagagccccttccaccagctga

SEQ ID NO: 4434186 - DNA, 25 bp, Homo sapien
gctttcacatctacatgtggtccca

SEQ ID NO: 4434187 - DNA, 25 bp, Homo sapien
aattctgagtgcactgcatttgtag

SEQ ID NO: 4434188 - DNA, 25 bp, Homo sapien
tgaaggcagagacgcaaattctgag

SEQ ID NO: 4434189 - DNA, 25 bp, Homo sapien
tctactcagaggcacgcaaacagtg

SEQ ID NO: 4434190 - DNA, 25 bp, Homo sapien
aacccattcggatattttgtcttga

SEQ ID NO: 4434191 - DNA, 25 bp, Homo sapien
tcggatattttgtcttgaaaggcat

SEQ ID NO: 4434192 - DNA, 25 bp, Homo sapien
aatgaaacccattcggatattttgt

SEQ ID NO: 4434193 - DNA, 25 bp, Homo sapien
cattcggatattttgtcttgaaagg

SEQ ID NO: 4434194 - DNA, 25 bp, Homo sapien
agggactgccccacatagccggcaa

SEQ ID NO: 4434195 - DNA, 25 bp, Homo sapien
aggagagatctaaattgggttgagc

SEQ ID NO: 4434196 - DNA, 25 bp, Homo sapien
ccacatagccggcaagggcagacac

SEQ ID NO: 4434197 - DNA, 25 bp, Homo sapien
tatcctgtccttgtaggagagatct

SEQ ID NO: 4434198 - DNA, 25 bp, Homo sapien
aattcattgacttgcctcagggcag

SEQ ID NO: 4434199 - DNA, 25 bp, Homo sapien
cacacactgtgggattctcataacc

SEQ ID NO: 4434200 - DNA, 25 bp, Homo sapien
ggagaaacagattggcccctaggaa

SEQ ID NO: 4434201 - DNA, 25 bp, Homo sapien
gaagagatcatgagcactagcggag

SEQ ID NO: 4434202 - DNA, 25 bp, Homo sapien
agctgaaggtgccagcgcgagagcg

SEQ ID NO: 4434203 - DNA, 25 bp, Homo sapien
tcggatggggcattccagacaccgc

SEQ ID NO: 4434204 - DNA, 25 bp, Homo sapien
gtggagaggcggcaaggctccccag

SEQ ID NO: 4434205 - DNA, 25 bp, Homo sapien
tttggtttcccctcagactctgaca

SEQ ID NO: 4434206 - DNA, 25 bp, Homo sapien
gaacgggtccagcagttttcactta

SEQ ID NO: 4434207 - DNA, 25 bp, Homo sapien
gatgctaaaaatacactgcggtctc

SEQ ID NO: 4434208 - DNA, 25 bp, Homo sapien
tgtgaggagcgtctggcagggagcg

SEQ ID NO: 4434209 - DNA, 25 bp, Homo sapien
ggagcgggcacaggcccctgaatac

SEQ ID NO: 4434210 - DNA, 25 bp, Homo sapien
aggggatctccggtgtcagtgacta

SEQ ID NO: 4434211 - DNA, 25 bp, Homo sapien
caggtcactcaggggatctccggtg

SEQ ID NO: 4434212 - DNA, 25 bp, Homo sapien
tagtttccaggtcactcaggggatc

SEQ ID NO: 4434213 - DNA, 25 bp, Homo sapien
gggtctctcatagtttccaggtcac

SEQ ID NO: 4434214 - DNA, 25 bp, Homo sapien
atgatgtcccaccacgatgcaacgg

SEQ ID NO: 4434215 - DNA, 25 bp, Homo sapien
taagcgatgtccgttggagagcctg

SEQ ID NO: 4434216 - DNA, 25 bp, Homo sapien
tctgtgggaattagaggtaaacacc

SEQ ID NO: 4434217 - DNA, 25 bp, Homo sapien
cacctcccttgaacgtgagttctca

SEQ ID NO: 4434218 - DNA, 25 bp, Homo sapien
ctaagggacaatcatggtgtacgca

SEQ ID NO: 4434219 - DNA, 25 bp, Homo sapien
caaaaggtgcctggtgtgcatgaca

SEQ ID NO: 4434220 - DNA, 25 bp, Homo sapien
gtgcatgacatttgagcaaaaccag

SEQ ID NO: 4434221 - DNA, 25 bp, Homo sapien
tgtacgcagaccaatacaggaaagg

SEQ ID NO: 4434222 - DNA, 25 bp, Homo sapien
gaggagccccacactcacagttccc

SEQ ID NO: 4434223 - DNA, 25 bp, Homo sapien
tccatgaggacagaggagccccaca

SEQ ID NO: 4434224 - DNA, 25 bp, Homo sapien
gacagaggagccccacactcacagt

SEQ ID NO: 4434225 - DNA, 25 bp, Homo sapien
acagaggagccccacactcacagtt

SEQ ID NO: 4434226 - DNA, 25 bp, Homo sapien
tttcttagaaggatttcatacttac

SEQ ID NO: 4434227 - DNA, 25 bp, Homo sapien
ttctataaggctcatgaagcttcct

SEQ ID NO: 4434228 - DNA, 25 bp, Homo sapien
cattctataaggctcatgaagcttc

SEQ ID NO: 4434229 - DNA, 25 bp, Homo sapien
atcatttcttagaaggatttcatac

SEQ ID NO: 4434230 - DNA, 25 bp, Homo sapien
tctgggtacccctgatcctcactaa

SEQ ID NO: 4434231 - DNA, 25 bp, Homo sapien
ccagtcaactctgccacgatgttgg

SEQ ID NO: 4434232 - DNA, 25 bp, Homo sapien
tggagggtctgggtacccctgatcc

SEQ ID NO: 4434233 - DNA, 25 bp, Homo sapien
ctcactaaagtccttaggaatgttg

SEQ ID NO: 4434234 - DNA, 25 bp, Homo sapien
gcagccaaaggtcagaatctgttca

SEQ ID NO: 4434235 - DNA, 25 bp, Homo sapien
ggccaagacattcatcattattcta

SEQ ID NO: 4434236 - DNA, 25 bp, Homo sapien
gaatctgttcacatcagtagtaact

SEQ ID NO: 4434237 - DNA, 25 bp, Homo sapien
ttatcaaaaacaactaggcagccaa

SEQ ID NO: 4434238 - DNA, 25 bp, Homo sapien
tgttccggatcaaagagatgctggt

SEQ ID NO: 4434239 - DNA, 25 bp, Homo sapien
gctggtgcaactggaactctcgact

SEQ ID NO: 4434240 - DNA, 25 bp, Homo sapien
gaactctcgactgaactctgcagtg

SEQ ID NO: 4434241 - DNA, 25 bp, Homo sapien
ttgcccaagcctggatagtcatgtt

SEQ ID NO: 4434242 - DNA, 25 bp, Homo sapien
gttcacagtcatcataactgaaatg

SEQ ID NO: 4434243 - DNA, 25 bp, Homo sapien
ttcttcctgtctagggttagtctct

SEQ ID NO: 4434244 - DNA, 25 bp, Homo sapien
ccttcttcacggtgttcacagtcat

SEQ ID NO: 4434245 - DNA, 25 bp, Homo sapien
cctgtctagggttagtctcttctcc

SEQ ID NO: 4434246 - DNA, 25 bp, Homo sapien
gctctagaatatcagacacatgctc

SEQ ID NO: 4434247 - DNA, 25 bp, Homo sapien
acagtttgtgtaagtgtttccacac

SEQ ID NO: 4434248 - DNA, 25 bp, Homo sapien
cagacacatgctcaacagatttccc

SEQ ID NO: 4434249 - DNA, 25 bp, Homo sapien
tgtaagtgtttccacacattgctgt

SEQ ID NO: 4434250 - DNA, 25 bp, Homo sapien
aaactgccaaaaaacttcttggcag

SEQ ID NO: 4434251 - DNA, 25 bp, Homo sapien
gcagaaaggaaagttatgttgggtc

SEQ ID NO: 4434252 - DNA, 25 bp, Homo sapien
aactgccaaaaaacttcttggcaga

SEQ ID NO: 4434253 - DNA, 25 bp, Homo sapien
atgttgggtcggggggcagggctct

SEQ ID NO: 4434254 - DNA, 25 bp, Homo sapien
ccttcatcttctcgtaaaggagttt

SEQ ID NO: 4434255 - DNA, 25 bp, Homo sapien
catcttctcgtaaaggagtttcttg

SEQ ID NO: 4434256 - DNA, 25 bp, Homo sapien
atcttctcgtaaaggagtttcttgt

SEQ ID NO: 4434257 - DNA, 25 bp, Homo sapien
ttcatcttctcgtaaaggagtttct

SEQ ID NO: 4434258 - DNA, 25 bp, Homo sapien
cccaacaagcgagggtttcagcctg

SEQ ID NO: 4434259 - DNA, 25 bp, Homo sapien
tctgtgacttcccaacaagcgaggg

SEQ ID NO: 4434260 - DNA, 25 bp, Homo sapien
caacaatccagccaggcacgtgtta

SEQ ID NO: 4434261 - DNA, 25 bp, Homo sapien
gacttcccaacaagcgagggtttca

SEQ ID NO: 4434262 - DNA, 25 bp, Homo sapien
gaatggagttgctagaattgctaca

SEQ ID NO: 4434263 - DNA, 25 bp, Homo sapien
ggaagccatcgcagaaaccaaggac

SEQ ID NO: 4434264 - DNA, 25 bp, Homo sapien
tacagactgcgcgttccactaaaaa

SEQ ID NO: 4434265 - DNA, 25 bp, Homo sapien
tatttcctggagcatgcagttcagc

SEQ ID NO: 4434266 - DNA, 25 bp, Homo sapien
tagggagatattcaagccgtgttac

SEQ ID NO: 4434267 - DNA, 25 bp, Homo sapien
aacgtgcttccttatcaatccagag

SEQ ID NO: 4434268 - DNA, 25 bp, Homo sapien
tgaagctctctctgaccggatttgg

SEQ ID NO: 4434269 - DNA, 25 bp, Homo sapien
gaccatggtcattcactgagtcagg

SEQ ID NO: 4434270 - DNA, 25 bp, Homo sapien
ttttgactcaagactccatactctg

SEQ ID NO: 4434271 - DNA, 25 bp, Homo sapien
ggccaagtgggaattaacatctgaa

SEQ ID NO: 4434272 - DNA, 25 bp, Homo sapien
tgggattgattcttcctcgccagta

SEQ ID NO: 4434273 - DNA, 25 bp, Homo sapien
tgcaaagaagtgcagtaaaccacct

SEQ ID NO: 4434274 - DNA, 25 bp, Homo sapien
atgggggacagacttctttgcaaca

SEQ ID NO: 4434275 - DNA, 25 bp, Homo sapien
gacagacttctttgcaacaacatta

SEQ ID NO: 4434276 - DNA, 25 bp, Homo sapien
gggacagacttctttgcaacaacat

SEQ ID NO: 4434277 - DNA, 25 bp, Homo sapien
tctggatccttatcctcatctgaaa

SEQ ID NO: 4434278 - DNA, 25 bp, Homo sapien
cataagccatgctgaggcctaacag

SEQ ID NO: 4434279 - DNA, 25 bp, Homo sapien
gcaaaaagcagaatcatcggtgtga

SEQ ID NO: 4434280 - DNA, 25 bp, Homo sapien
gggactccatttacacgtgcacata

SEQ ID NO: 4434281 - DNA, 25 bp, Homo sapien
tcggtgtgaagacaatacactatct

SEQ ID NO: 4434282 - DNA, 25 bp, Homo sapien
gacagctttctacagacttggccaa

SEQ ID NO: 4434283 - DNA, 25 bp, Homo sapien
catgtttattaagacgcagccaagt

SEQ ID NO: 4434284 - DNA, 25 bp, Homo sapien
ggtgtataacaatgcccaagggctg

SEQ ID NO: 4434285 - DNA, 25 bp, Homo sapien
ccaagtgaaatgtgtcagctcctcc

SEQ ID NO: 4434286 - DNA, 25 bp, Homo sapien
tgtagagactcttcatgctggattt

SEQ ID NO: 4434287 - DNA, 25 bp, Homo sapien
taccagacccattaagttcacagca

SEQ ID NO: 4434288 - DNA, 25 bp, Homo sapien
gaatgcatctcagttctaccatctg

SEQ ID NO: 4434289 - DNA, 25 bp, Homo sapien
caatggtgtgttgaacgtatctcag

SEQ ID NO: 4434290 - DNA, 25 bp, Homo sapien
tgcatttccaactgctctgttttcc

SEQ ID NO: 4434291 - DNA, 25 bp, Homo sapien
ttgcatttccaactgctctgttttc

SEQ ID NO: 4434292 - DNA, 25 bp, Homo sapien
atttccaactgctctgttttccttc

SEQ ID NO: 4434293 - DNA, 25 bp, Homo sapien
atagacatgtctggatccagttctt

SEQ ID NO: 4434294 - DNA, 25 bp, Homo sapien
gttttgtcgtggaatcagagagcac

SEQ ID NO: 4434295 - DNA, 25 bp, Homo sapien
tgaaactcaagagcctcaaaatcta

SEQ ID NO: 4434296 - DNA, 25 bp, Homo sapien
ctggaactcattggagaactgaaac

SEQ ID NO: 4434297 - DNA, 25 bp, Homo sapien
gagcctaggggagcctcagtcctta

SEQ ID NO: 4434298 - DNA, 25 bp, Homo sapien
tatcccgtcacctgtaggaactgtg

SEQ ID NO: 4434299 - DNA, 25 bp, Homo sapien
cagtccagtagctgtcttgagtcca

SEQ ID NO: 4434300 - DNA, 25 bp, Homo sapien
gaactgtgtcggaagaactaactgc

SEQ ID NO: 4434301 - DNA, 25 bp, Homo sapien
ttctccaaagtgtcgcggccagtgg

SEQ ID NO: 4434302 - DNA, 25 bp, Homo sapien
aagagcgagatctccgtgggatcgt

SEQ ID NO: 4434303 - DNA, 25 bp, Homo sapien
tcgtgccagattcggccattcttcc

SEQ ID NO: 4434304 - DNA, 25 bp, Homo sapien
gcaggagcctgtcgccaacatgaca

SEQ ID NO: 4434305 - DNA, 25 bp, Homo sapien
ttggtcccgcgctcagtagcggaga

SEQ ID NO: 4434306 - DNA, 25 bp, Homo sapien
ccgtgcactgggtcgcccggtccgc

SEQ ID NO: 4434307 - DNA, 25 bp, Homo sapien
gtcagcgggaccgagagtgacgcgg

SEQ ID NO: 4434308 - DNA, 25 bp, Homo sapien
gtggcgctgagtgcggccgcggcca

SEQ ID NO: 4434309 - DNA, 25 bp, Homo sapien
ggaaggcgcaccgagtgccaggcat

SEQ ID NO: 4434310 - DNA, 25 bp, Homo sapien
ctgtcagtgcggcgggtcctcgggg

SEQ ID NO: 4434311 - DNA, 25 bp, Homo sapien
gcgtggaactgagcgggtcctgggt

SEQ ID NO: 4434312 - DNA, 25 bp, Homo sapien
aaggaccccgcgatggttcttcaca

SEQ ID NO: 4434313 - DNA, 25 bp, Homo sapien
actcacatccctgccgggtgcgtcc

SEQ ID NO: 4434314 - DNA, 25 bp, Homo sapien
atgtgggggtcatcctgcccgctcc

SEQ ID NO: 4434315 - DNA, 25 bp, Homo sapien
gcggactccaatgggcgccccaaga

SEQ ID NO: 4434316 - DNA, 25 bp, Homo sapien
ccgactagcaggtccggatgctcct

SEQ ID NO: 4434317 - DNA, 25 bp, Homo sapien
ggacttcgcgccctcgctaagcggg

SEQ ID NO: 4434318 - DNA, 25 bp, Homo sapien
taagcgggcgcgtctgccaggcgct

SEQ ID NO: 4434319 - DNA, 25 bp, Homo sapien
cacctcggggatcggcaaatgcaca

SEQ ID NO: 4434320 - DNA, 25 bp, Homo sapien
tccatctcacctcggggatcggcaa

SEQ ID NO: 4434321 - DNA, 25 bp, Homo sapien
tctcacctcggggatcggcaaatgc

SEQ ID NO: 4434322 - DNA, 25 bp, Homo sapien
gtctccatctcacctcggggatcgg

SEQ ID NO: 4434323 - DNA, 25 bp, Homo sapien
ggctggagtagagaagcgagcgccc

SEQ ID NO: 4434324 - DNA, 25 bp, Homo sapien
gtggtgtctgccttgtgagcactgc

SEQ ID NO: 4434325 - DNA, 25 bp, Homo sapien
cggcgccagaacgtctaccattcag

SEQ ID NO: 4434326 - DNA, 25 bp, Homo sapien
ctcaggagctagtgaggcgctgcaa

SEQ ID NO: 4434327 - DNA, 25 bp, Homo sapien
tccgggcgcgcaggaatttcttcac

SEQ ID NO: 4434328 - DNA, 25 bp, Homo sapien
gaatgcattagggacagctccgggc

SEQ ID NO: 4434329 - DNA, 25 bp, Homo sapien
ccctagggatgaaagaggactcctc

SEQ ID NO: 4434330 - DNA, 25 bp, Homo sapien
cagtagacggattcgacccgggaat

SEQ ID NO: 4434331 - DNA, 25 bp, Homo sapien
gatttcctacagagcgtgggttacc

SEQ ID NO: 4434332 - DNA, 25 bp, Homo sapien
ttcaaagacagggtaggcagccctc

SEQ ID NO: 4434333 - DNA, 25 bp, Homo sapien
tccttgcagatcgaagacacgggct

SEQ ID NO: 4434334 - DNA, 25 bp, Homo sapien
taaagaccgcattagccaacctgga

SEQ ID NO: 4434335 - DNA, 25 bp, Homo sapien
tcacacagctcataagtgggaaagc

SEQ ID NO: 4434336 - DNA, 25 bp, Homo sapien
ggtcacacagctcataagtgggaaa

SEQ ID NO: 4434337 - DNA, 25 bp, Homo sapien
cacagctcataagtgggaaagccag

SEQ ID NO: 4434338 - DNA, 25 bp, Homo sapien
cacacagctcataagtgggaaagcc

SEQ ID NO: 4434339 - DNA, 25 bp, Homo sapien
caggcattatgctgatttctgaccc

SEQ ID NO: 4434340 - DNA, 25 bp, Homo sapien
aaatatgaggtagataatatcatct

SEQ ID NO: 4434341 - DNA, 25 bp, Homo sapien
ttatgctgatttctgacccaatttt

SEQ ID NO: 4434342 - DNA, 25 bp, Homo sapien
gcattatgctgatttctgacccaat

SEQ ID NO: 4434343 - DNA, 25 bp, Homo sapien
ttcaggatttaatttcagaactgcc

SEQ ID NO: 4434344 - DNA, 25 bp, Homo sapien
cagaactgccctgtgatatatcctg

SEQ ID NO: 4434345 - DNA, 25 bp, Homo sapien
taatttcagaactgccctgtgatat

SEQ ID NO: 4434346 - DNA, 25 bp, Homo sapien
atttaatttcagaactgccctgtga

SEQ ID NO: 4434347 - DNA, 25 bp, Homo sapien
ctgagcagcactgctgagagacggc

SEQ ID NO: 4434348 - DNA, 25 bp, Homo sapien
gagacggccaagttacaggttctgt

SEQ ID NO: 4434349 - DNA, 25 bp, Homo sapien
caggttctgttctgtagtgaaagat

SEQ ID NO: 4434350 - DNA, 25 bp, Homo sapien
ttgaggtcaacaagaaacgagttag

SEQ ID NO: 4434351 - DNA, 25 bp, Homo sapien
gaagacacaaaacatggcaaagtta

SEQ ID NO: 4434352 - DNA, 25 bp, Homo sapien
gacacaaaacatggcaaagttaatt

SEQ ID NO: 4434353 - DNA, 25 bp, Homo sapien
gggaagacacaaaacatggcaaagt

SEQ ID NO: 4434354 - DNA, 25 bp, Homo sapien
cagagaggggaagacacaaaacatg

SEQ ID NO: 4434355 - DNA, 25 bp, Homo sapien
ccaccgtgtaggctgtgcggctcat

SEQ ID NO: 4434356 - DNA, 25 bp, Homo sapien
cccaccgtgtaggctgtgcggctca

SEQ ID NO: 4434357 - DNA, 25 bp, Homo sapien
tcccaccgtgtaggctgtgcggctc

SEQ ID NO: 4434358 - DNA, 25 bp, Homo sapien
gccggcagcagggtccccaagagga

SEQ ID NO: 4434359 - DNA, 25 bp, Homo sapien
gtctggcggggggatggcaccttgg

SEQ ID NO: 4434360 - DNA, 25 bp, Homo sapien
tttttcccttcagcagccggcagca

SEQ ID NO: 4434361 - DNA, 25 bp, Homo sapien
tggcggggggatggcaccttgggac

SEQ ID NO: 4434362 - DNA, 25 bp, Homo sapien
tctgctctgagtcattgtgctgggc

SEQ ID NO: 4434363 - DNA, 25 bp, Homo sapien
gagtctgctctgagtcattgtgctg

SEQ ID NO: 4434364 - DNA, 25 bp, Homo sapien
gtctgctctgagtcattgtgctggg

SEQ ID NO: 4434365 - DNA, 25 bp, Homo sapien
tgagtctgctctgagtcattgtgct

SEQ ID NO: 4434366 - DNA, 25 bp, Homo sapien
acctcctccccgggcatggcagtgc

SEQ ID NO: 4434367 - DNA, 25 bp, Homo sapien
ggcatggcagtgccccgcccttggc

SEQ ID NO: 4434368 - DNA, 25 bp, Homo sapien
ccgggcatggcagtgccccgccctt

SEQ ID NO: 4434369 - DNA, 25 bp, Homo sapien
cgcccccggttcctggagccaggct

SEQ ID NO: 4434370 - DNA, 25 bp, Homo sapien
tctcttcttcttggtaggtggctgt

SEQ ID NO: 4434371 - DNA, 25 bp, Homo sapien
ggttttgcaccagtctcgcttcagg

SEQ ID NO: 4434372 - DNA, 25 bp, Homo sapien
tatttgcgctccgtcacatgcaggg

SEQ ID NO: 4434373 - DNA, 25 bp, Homo sapien
gatgatggtgcgactgttgcagcct

SEQ ID NO: 4434374 - DNA, 25 bp, Homo sapien
ttaatccaaatcgatggatatgcaa

SEQ ID NO: 4434375 - DNA, 25 bp, Homo sapien
aaatcgatggatatgcaacgacact

SEQ ID NO: 4434376 - DNA, 25 bp, Homo sapien
aatccaaatcgatggatatgcaacg

SEQ ID NO: 4434377 - DNA, 25 bp, Homo sapien
tccaaatcgatggatatgcaacgac

SEQ ID NO: 4434378 - DNA, 25 bp, Homo sapien
gatgctatgctctcctaacagggtc

SEQ ID NO: 4434379 - DNA, 25 bp, Homo sapien
tccgaaaggagattctggtccccag

SEQ ID NO: 4434380 - DNA, 25 bp, Homo sapien
tagctaacttgcttgggtccgaaca

SEQ ID NO: 4434381 - DNA, 25 bp, Homo sapien
gattaattcccacccctatgcagag

SEQ ID NO: 4434382 - DNA, 25 bp, Homo sapien
tccactctgtgctttattgttggag

SEQ ID NO: 4434383 - DNA, 25 bp, Homo sapien
atccactctgtgctttattgttgga

SEQ ID NO: 4434384 - DNA, 25 bp, Homo sapien
gcaagactgtggtacaagctcctaa

SEQ ID NO: 4434385 - DNA, 25 bp, Homo sapien
tacgctgctgattatcccagtgaag

SEQ ID NO: 4434386 - DNA, 25 bp, Homo sapien
tcctaaaagaagattactgctgcca

SEQ ID NO: 4434387 - DNA, 25 bp, Homo sapien
tgctgccaacttaagtcatctccgt

SEQ ID NO: 4434388 - DNA, 25 bp, Homo sapien
gaagacatgttcagctgggtcaaga

SEQ ID NO: 4434389 - DNA, 25 bp, Homo sapien
tcaggcactgactcaggaagacatg

SEQ ID NO: 4434390 - DNA, 25 bp, Homo sapien
tcctacacagcaaggtacctcatag

SEQ ID NO: 4434391 - DNA, 25 bp, Homo sapien
taaaagactctaacaacatacggtg

SEQ ID NO: 4434392 - DNA, 25 bp, Homo sapien
tgaaatgctcttccgtgtcaagtcc

SEQ ID NO: 4434393 - DNA, 25 bp, Homo sapien
cataatgtttaaggacccagtgcca

SEQ ID NO: 4434394 - DNA, 25 bp, Homo sapien
cagctataatctcagggtggcctta

SEQ ID NO: 4434395 - DNA, 25 bp, Homo sapien
gttcacaattgcacaccaagggcag

SEQ ID NO: 4434396 - DNA, 25 bp, Homo sapien
cagtcctgggcatggatggagtcct

SEQ ID NO: 4434397 - DNA, 25 bp, Homo sapien
caggcagccacaaagagaatcaatt

SEQ ID NO: 4434398 - DNA, 25 bp, Homo sapien
tgttatacattaccccaggcagcca

SEQ ID NO: 4434399 - DNA, 25 bp, Homo sapien
tatgacttggatgaggattcccaca

SEQ ID NO: 4434400 - DNA, 25 bp, Homo sapien
ctagtgtgttgagtgattttattac

SEQ ID NO: 4434401 - DNA, 25 bp, Homo sapien
aatcctttccatatgttgttggacc

SEQ ID NO: 4434402 - DNA, 25 bp, Homo sapien
tctgcgtgtatcgagatgattgtgt

SEQ ID NO: 4434403 - DNA, 25 bp, Homo sapien
gtggtttctgtctttattctattaa

SEQ ID NO: 4434404 - DNA, 25 bp, Homo sapien
accagtttgggtgcttgattgtaca

SEQ ID NO: 4434405 - DNA, 25 bp, Homo sapien
tctgctatatgctaaggtcctgcct

SEQ ID NO: 4434406 - DNA, 25 bp, Homo sapien
caaaatggagctccggatctgctgg

SEQ ID NO: 4434407 - DNA, 25 bp, Homo sapien
tcctgcctctacagaaccagtttgg

SEQ ID NO: 4434408 - DNA, 25 bp, Homo sapien
ggcctgaagtacgaagctgagccat

SEQ ID NO: 4434409 - DNA, 25 bp, Homo sapien
catgtggatcaagtgaacagattga

SEQ ID NO: 4434410 - DNA, 25 bp, Homo sapien
caagtgaacagattgaacagtgtgg

SEQ ID NO: 4434411 - DNA, 25 bp, Homo sapien
acagtgtggcctgaagtacgaagct

SEQ ID NO: 4434412 - DNA, 25 bp, Homo sapien
aactcttggcctcgtcatctgattg

SEQ ID NO: 4434413 - DNA, 25 bp, Homo sapien
ggcctcgtcatctgattgcccgaca

SEQ ID NO: 4434414 - DNA, 25 bp, Homo sapien
tctgtcaatgggatgagattgggtt

SEQ ID NO: 4434415 - DNA, 25 bp, Homo sapien
tgggttcagatatttgcatcttcac

SEQ ID NO: 4434416 - DNA, 25 bp, Homo sapien
tcaatgactgctttcatggcttgtc

SEQ ID NO: 4434417 - DNA, 25 bp, Homo sapien
gtctttccactagaagttcataggg

SEQ ID NO: 4434418 - DNA, 25 bp, Homo sapien
ctcaatgactgctttcatggcttgt

SEQ ID NO: 4434419 - DNA, 25 bp, Homo sapien
tccactagaagttcataggggattc

SEQ ID NO: 4434420 - DNA, 25 bp, Homo sapien
gcctttgctgtttgttttttcagtc

SEQ ID NO: 4434421 - DNA, 25 bp, Homo sapien
tgctgtttgttttttcagtcctcac

SEQ ID NO: 4434422 - DNA, 25 bp, Homo sapien
ctttgctgtttgttttttcagtcct

SEQ ID NO: 4434423 - DNA, 25 bp, Homo sapien
tcagcctttgctgtttgttttttca

SEQ ID NO: 4434424 - DNA, 25 bp, Homo sapien
ccacatattgaaagtcttcattcag

SEQ ID NO: 4434425 - DNA, 25 bp, Homo sapien
ttccacatattgaaagtcttcattc

SEQ ID NO: 4434426 - DNA, 25 bp, Homo sapien
cattccacatattgaaagtcttcat

SEQ ID NO: 4434427 - DNA, 25 bp, Homo sapien
tcttcattcagataggatgaatttt

SEQ ID NO: 4434428 - DNA, 25 bp, Homo sapien
tatacgatctattacacaaatgcca

SEQ ID NO: 4434429 - DNA, 25 bp, Homo sapien
gaaatgtgttctaccagatatcatg

SEQ ID NO: 4434430 - DNA, 25 bp, Homo sapien
gtgtcaagagtagccaagatgatct

SEQ ID NO: 4434431 - DNA, 25 bp, Homo sapien
taataaatagattcgatgcagttgc

SEQ ID NO: 4434432 - DNA, 25 bp, Homo sapien
caacacctatgtgagggtagaggcc

SEQ ID NO: 4434433 - DNA, 25 bp, Homo sapien
gaagaatccaaaggccgctaacatt

SEQ ID NO: 4434434 - DNA, 25 bp, Homo sapien
gaggcctggatgtcataaggaccca

SEQ ID NO: 4434435 - DNA, 25 bp, Homo sapien
gaatgccgtacgctacagttctaga

SEQ ID NO: 4434436 - DNA, 25 bp, Homo sapien
gggctgcttgaccatagaccctgtt

SEQ ID NO: 4434437 - DNA, 25 bp, Homo sapien
cctgtttactccatgcctgttcaaa

SEQ ID NO: 4434438 - DNA, 25 bp, Homo sapien
taacagctccaacaatttcagatcc

SEQ ID NO: 4434439 - DNA, 25 bp, Homo sapien
ctgtgcttggtttaacagctccaac

SEQ ID NO: 4434440 - DNA, 25 bp, Homo sapien
tcccttggccagtgtcattgatgca

SEQ ID NO: 4434441 - DNA, 25 bp, Homo sapien
gaaccaggctgtaacattgaccggg

SEQ ID NO: 4434442 - DNA, 25 bp, Homo sapien
caaattgcgccaagtcagtgtgtga

SEQ ID NO: 4434443 - DNA, 25 bp, Homo sapien
atgggaattagcaatgcacgcttgc

SEQ ID NO: 4434444 - DNA, 25 bp, Homo sapien
gctatgctgcatctaaccagacaca

SEQ ID NO: 4434445 - DNA, 25 bp, Homo sapien
ctagaaaggagagtaaccagtttgc

SEQ ID NO: 4434446 - DNA, 25 bp, Homo sapien
ggacacagtttgacagtagttcaga

SEQ ID NO: 4434447 - DNA, 25 bp, Homo sapien
tgaaaatgatccctctaaaatgctg

SEQ ID NO: 4434448 - DNA, 25 bp, Homo sapien
tgaccacagggttgcaggacgttct

SEQ ID NO: 4434449 - DNA, 25 bp, Homo sapien
gaagtccctcattaagccgcaggaa

SEQ ID NO: 4434450 - DNA, 25 bp, Homo sapien
tgtttcttgtggaagcccaaagtcc

SEQ ID NO: 4434451 - DNA, 25 bp, Homo sapien
gcacgcatactctttgtgaccacag

SEQ ID NO: 4434452 - DNA, 25 bp, Homo sapien
gaaatgcctcgttgctctgataata

SEQ ID NO: 4434453 - DNA, 25 bp, Homo sapien
ttccccaaggtaaatctcagtgttc

SEQ ID NO: 4434454 - DNA, 25 bp, Homo sapien
cactgctagtttttgacaccaatgg

SEQ ID NO: 4434455 - DNA, 25 bp, Homo sapien
tatattgggtctctctgcgaaggtg

SEQ ID NO: 4434456 - DNA, 25 bp, Homo sapien
taaaaatgtcctaagttcttgtgcc

SEQ ID NO: 4434457 - DNA, 25 bp, Homo sapien
tcttattaaactggtgtcagggcac

SEQ ID NO: 4434458 - DNA, 25 bp, Homo sapien
taacatcattaacaagggcatccta

SEQ ID NO: 4434459 - DNA, 25 bp, Homo sapien
tatcccaacaacactaaacatcagg

SEQ ID NO: 4434460 - DNA, 25 bp, Homo sapien
ggacatcaaactgcgtgccgctcag

SEQ ID NO: 4434461 - DNA, 25 bp, Homo sapien
gatttacagcgccacttctgactcc

SEQ ID NO: 4434462 - DNA, 25 bp, Homo sapien
agcctcgttgcagcccccgatttta

SEQ ID NO: 4434463 - DNA, 25 bp, Homo sapien
tcacacagcgtggaagccccgcatt

SEQ ID NO: 4434464 - DNA, 25 bp, Homo sapien
tcataaagtctgaaggccaagtgtt

SEQ ID NO: 4434465 - DNA, 25 bp, Homo sapien
ctgtatcactcgaagccaagatgtt

SEQ ID NO: 4434466 - DNA, 25 bp, Homo sapien
gagggacttcactggactacacaga

SEQ ID NO: 4434467 - DNA, 25 bp, Homo sapien
ccaagatgtttctgcatacaggtag

SEQ ID NO: 4434468 - DNA, 25 bp, Homo sapien
gaaactatacaccttcagactagtg

SEQ ID NO: 4434469 - DNA, 25 bp, Homo sapien
ccactttgctcatgaacctgctaca

SEQ ID NO: 4434470 - DNA, 25 bp, Homo sapien
aaacatgcagcctattaccactttg

SEQ ID NO: 4434471 - DNA, 25 bp, Homo sapien
ggccgtagtccatgcctttcagaaa

SEQ ID NO: 4434472 - DNA, 25 bp, Homo sapien
gctcagcctcagttgaacatgtggg

SEQ ID NO: 4434473 - DNA, 25 bp, Homo sapien
cgcagatcatgtgaaaccaatctcc

SEQ ID NO: 4434474 - DNA, 25 bp, Homo sapien
tgcctgccttcgcagatcatgtgaa

SEQ ID NO: 4434475 - DNA, 25 bp, Homo sapien
gagctctggaatccccttgaagagg

SEQ ID NO: 4434476 - DNA, 25 bp, Homo sapien
taagatgctatctggaagccgcctg

SEQ ID NO: 4434477 - DNA, 25 bp, Homo sapien
caaactcctaggtgggtatgactta

SEQ ID NO: 4434478 - DNA, 25 bp, Homo sapien
gctttggaaagagccagcgctagga

SEQ ID NO: 4434479 - DNA, 25 bp, Homo sapien
ttcctagatggacggtaaagctgct

SEQ ID NO: 4434480 - DNA, 25 bp, Homo sapien
ccaggagacaattggaatgaaattg

SEQ ID NO: 4434481 - DNA, 25 bp, Homo sapien
tgtgtctcccaggagacaattggaa

SEQ ID NO: 4434482 - DNA, 25 bp, Homo sapien
gtctcccaggagacaattggaatga

SEQ ID NO: 4434483 - DNA, 25 bp, Homo sapien
gacaattggaatgaaattgtcagtg

SEQ ID NO: 4434484 - DNA, 25 bp, Homo sapien
aaagcaatgttccttgtactggacc

SEQ ID NO: 4434485 - DNA, 25 bp, Homo sapien
ttcctcctggcggtgaacagacaca

SEQ ID NO: 4434486 - DNA, 25 bp, Homo sapien
tggtagtaacagaacgatacaaggc

SEQ ID NO: 4434487 - DNA, 25 bp, Homo sapien
gacacagcattgtagcagagtgaga

SEQ ID NO: 4434488 - DNA, 25 bp, Homo sapien
tcagagaagaccttcaggccacacc

SEQ ID NO: 4434489 - DNA, 25 bp, Homo sapien
cagagaagaccttcaggccacacca

SEQ ID NO: 4434490 - DNA, 25 bp, Homo sapien
agagaagaccttcaggccacaccac

SEQ ID NO: 4434491 - DNA, 25 bp, Homo sapien
agaagaccttcaggccacaccacac

SEQ ID NO: 4434492 - DNA, 25 bp, Homo sapien
tggagactcatcactcatcttttgg

SEQ ID NO: 4434493 - DNA, 25 bp, Homo sapien
ctgctgtgcttgcacaaatggagac

SEQ ID NO: 4434494 - DNA, 25 bp, Homo sapien
catcttttggactatcgtcgtgcaa

SEQ ID NO: 4434495 - DNA, 25 bp, Homo sapien
tgtgtcagggccttggactgctgct

SEQ ID NO: 4434496 - DNA, 25 bp, Homo sapien
ggttcaaaatgtcctgtcctcaggg

SEQ ID NO: 4434497 - DNA, 25 bp, Homo sapien
ccttgctgccaacgcctgaagggtg

SEQ ID NO: 4434498 - DNA, 25 bp, Homo sapien
tgcagaaagcggtagacccgaagct

SEQ ID NO: 4434499 - DNA, 25 bp, Homo sapien
agttgtttacagtccagtctacgag

SEQ ID NO: 4434500 - DNA, 25 bp, Homo sapien
cgatgccagagcttgcagtatgtgc

SEQ ID NO: 4434501 - DNA, 25 bp, Homo sapien
tgggctgcctgcctaggacccctgc

SEQ ID NO: 4434502 - DNA, 25 bp, Homo sapien
tgccagagcttgcagtatgtgcctt

SEQ ID NO: 4434503 - DNA, 25 bp, Homo sapien
gagcttgcagtatgtgcctttttct

SEQ ID NO: 4434504 - DNA, 25 bp, Homo sapien
ctcctcccgaagatgagttcccttc

SEQ ID NO: 4434505 - DNA, 25 bp, Homo sapien
tttttagaagttagtcgctgctctc

SEQ ID NO: 4434506 - DNA, 25 bp, Homo sapien
ttagaagttagtcgctgctctcctc

SEQ ID NO: 4434507 - DNA, 25 bp, Homo sapien
tcctcccgaagatgagttcccttcc

SEQ ID NO: 4434508 - DNA, 25 bp, Homo sapien
aggatgcagactaccaggggctgct

SEQ ID NO: 4434509 - DNA, 25 bp, Homo sapien
taggatgcagactaccaggggctgc

SEQ ID NO: 4434510 - DNA, 25 bp, Homo sapien
cacgtaatagcctcctgttaaaggc

SEQ ID NO: 4434511 - DNA, 25 bp, Homo sapien
gtataaccacgtaatagcctcctgt

SEQ ID NO: 4434512 - DNA, 25 bp, Homo sapien
ttacgtataaccacgtaatagcctc

SEQ ID NO: 4434513 - DNA, 25 bp, Homo sapien
taaccacgtaatagcctcctgttaa

SEQ ID NO: 4434514 - DNA, 25 bp, Homo sapien
tcctatagtctttgagccgaaacct

SEQ ID NO: 4434515 - DNA, 25 bp, Homo sapien
tctccactggtagaattagggccca

SEQ ID NO: 4434516 - DNA, 25 bp, Homo sapien
tctgtctcctgaagaattggcggtt

SEQ ID NO: 4434517 - DNA, 25 bp, Homo sapien
ttgtgaaacccttggcctgacctct

SEQ ID NO: 4434518 - DNA, 25 bp, Homo sapien
atgcatacgaacacccaatccatca

SEQ ID NO: 4434519 - DNA, 25 bp, Homo sapien
tgtgtccatatcttaacaaggttca

SEQ ID NO: 4434520 - DNA, 25 bp, Homo sapien
caggtaatgtgtccatatcttaaca

SEQ ID NO: 4434521 - DNA, 25 bp, Homo sapien
ttaacaaggttcaatggtggcgcat

SEQ ID NO: 4434522 - DNA, 25 bp, Homo sapien
catgttgtgcgtgagcatcacaggg

SEQ ID NO: 4434523 - DNA, 25 bp, Homo sapien
gggctctcccggcagtttctcacat

SEQ ID NO: 4434524 - DNA, 25 bp, Homo sapien
gggaccctagctgacaatgttcccc

SEQ ID NO: 4434525 - DNA, 25 bp, Homo sapien
acagataccattcagcctatctggg

SEQ ID NO: 4434526 - DNA, 25 bp, Homo sapien
aagccattgcccacagaggtgtcat

SEQ ID NO: 4434527 - DNA, 25 bp, Homo sapien
gatttagaaagccattgcccacaga

SEQ ID NO: 4434528 - DNA, 25 bp, Homo sapien
tcatcaactctcttacactccagtg

SEQ ID NO: 4434529 - DNA, 25 bp, Homo sapien
cactccagtgccagatttagaaagc

SEQ ID NO: 4434530 - DNA, 25 bp, Homo sapien
taaattgagaaagtaagtgactcaa

SEQ ID NO: 4434531 - DNA, 25 bp, Homo sapien
aataagtggtacagacaatgagtgc

SEQ ID NO: 4434532 - DNA, 25 bp, Homo sapien
caatgagtgcttacgaaatttggaa

SEQ ID NO: 4434533 - DNA, 25 bp, Homo sapien
caatgccaaaataagtggtacagac

SEQ ID NO: 4434534 - DNA, 25 bp, Homo sapien
tgccgcttgttagctcacagtagag

SEQ ID NO: 4434535 - DNA, 25 bp, Homo sapien
tcaggactaagcacatggttgccgc

SEQ ID NO: 4434536 - DNA, 25 bp, Homo sapien
cagatgctttgtgttgttaccatga

SEQ ID NO: 4434537 - DNA, 25 bp, Homo sapien
ttgtgttgttaccatgagctcagga

SEQ ID NO: 4434538 - DNA, 25 bp, Homo sapien
ggttcactgactgttaggctacaaa

SEQ ID NO: 4434539 - DNA, 25 bp, Homo sapien
gctctatagtgtactgtggtcacca

SEQ ID NO: 4434540 - DNA, 25 bp, Homo sapien
caggaagctgtctagggctctatag

SEQ ID NO: 4434541 - DNA, 25 bp, Homo sapien
gtctaatagtctaggcttggtggca

SEQ ID NO: 4434542 - DNA, 25 bp, Homo sapien
tcttctacctgagaaatgactgagc

SEQ ID NO: 4434543 - DNA, 25 bp, Homo sapien
atatttatcttctacctgagaaatg

SEQ ID NO: 4434544 - DNA, 25 bp, Homo sapien
aaatgactgagctgttcatgttctt

SEQ ID NO: 4434545 - DNA, 25 bp, Homo sapien
tgttcatgttctttggtagtaaggg

SEQ ID NO: 4434546 - DNA, 25 bp, Homo sapien
gtttcctagtaaccgcgatcagaaa

SEQ ID NO: 4434547 - DNA, 25 bp, Homo sapien
agggtttcctagtaaccgcgatcag

SEQ ID NO: 4434548 - DNA, 25 bp, Homo sapien
tagagttctgtgtcatagacctttc

SEQ ID NO: 4434549 - DNA, 25 bp, Homo sapien
gtcatagacctttcctgttaataat

SEQ ID NO: 4434550 - DNA, 25 bp, Homo sapien
ctgtcccatttgtagtcactgccat

SEQ ID NO: 4434551 - DNA, 25 bp, Homo sapien
taatatggcactacacagccagcca

SEQ ID NO: 4434552 - DNA, 25 bp, Homo sapien
tcggatgacattgcataatatggca

SEQ ID NO: 4434553 - DNA, 25 bp, Homo sapien
ggccatactggccattagcagcaag

SEQ ID NO: 4434554 - DNA, 25 bp, Homo sapien
caagagctgttttgcaccacgtcgg

SEQ ID NO: 4434555 - DNA, 25 bp, Homo sapien
gtggcctccgcattagccttctgag

SEQ ID NO: 4434556 - DNA, 25 bp, Homo sapien
tgctgtggcctccgcattagccttc

SEQ ID NO: 4434557 - DNA, 25 bp, Homo sapien
acactgtcatagccttcacctgctg

SEQ ID NO: 4434558 - DNA, 25 bp, Homo sapien
tagccttctgagtggaattcatcag

SEQ ID NO: 4434559 - DNA, 25 bp, Homo sapien
tggtagatctcttcataattcaatc

SEQ ID NO: 4434560 - DNA, 25 bp, Homo sapien
acaccagacaaatggtagatctctt

SEQ ID NO: 4434561 - DNA, 25 bp, Homo sapien
gacaaatggtagatctcttcataat

SEQ ID NO: 4434562 - DNA, 25 bp, Homo sapien
gtagatctcttcataattcaatctg

SEQ ID NO: 4434563 - DNA, 25 bp, Homo sapien
ggaaagtttcaccatgcagtatgtc

SEQ ID NO: 4434564 - DNA, 25 bp, Homo sapien
ttgttgtgacagaaccgaactagtc

SEQ ID NO: 4434565 - DNA, 25 bp, Homo sapien
taactgcccgatttgtgttctgccc

SEQ ID NO: 4434566 - DNA, 25 bp, Homo sapien
gaagatcgttgacagagtggtagaa

SEQ ID NO: 4434567 - DNA, 25 bp, Homo sapien
cagtcaactcttaacaaatgtggca

SEQ ID NO: 4434568 - DNA, 25 bp, Homo sapien
gccaagagaaccacacttaaggatg

SEQ ID NO: 4434569 - DNA, 25 bp, Homo sapien
tgtggcagagaggtcaaaatcactg

SEQ ID NO: 4434570 - DNA, 25 bp, Homo sapien
tcaatgcttgtgcaacagtcaactc

SEQ ID NO: 4434571 - DNA, 25 bp, Homo sapien
gatatctctgagcagtggtaatggg

SEQ ID NO: 4434572 - DNA, 25 bp, Homo sapien
cctctgttgcttgggttttagtaca

SEQ ID NO: 4434573 - DNA, 25 bp, Homo sapien
accagacaagcaaaagtctcctctg

SEQ ID NO: 4434574 - DNA, 25 bp, Homo sapien
tacagtgtgttccttcgatgatatc

SEQ ID NO: 4434575 - DNA, 25 bp, Homo sapien
gcagcaccacctagagagaatgttt

SEQ ID NO: 4434576 - DNA, 25 bp, Homo sapien
tccctggaaaagactgactgactta

SEQ ID NO: 4434577 - DNA, 25 bp, Homo sapien
tgcttggcaccaacacgatgtcttt

SEQ ID NO: 4434578 - DNA, 25 bp, Homo sapien
tgattttttattggccctggcagca

SEQ ID NO: 4434579 - DNA, 25 bp, Homo sapien
cattggccatgggatagtatccgtt

SEQ ID NO: 4434580 - DNA, 25 bp, Homo sapien
ctaaatgttgggagtatgtaaggca

SEQ ID NO: 4434581 - DNA, 25 bp, Homo sapien
caaaatgatactgttgtgcaggtgg

SEQ ID NO: 4434582 - DNA, 25 bp, Homo sapien
caaacctgactgaggaatccgcatc

SEQ ID NO: 4434583 - DNA, 25 bp, Homo sapien
cactcaaattctagcagaaaatatt

SEQ ID NO: 4434584 - DNA, 25 bp, Homo sapien
caattttgtgatccctttctggcat

SEQ ID NO: 4434585 - DNA, 25 bp, Homo sapien
ggcatcttatgtcttgtataacgag

SEQ ID NO: 4434586 - DNA, 25 bp, Homo sapien
tctctttgggtccatttcttaagga

SEQ ID NO: 4434587 - DNA, 25 bp, Homo sapien
tcttgaccagcatcaagagacagcc

SEQ ID NO: 4434588 - DNA, 25 bp, Homo sapien
taaattacggtgtctgacggaagga

SEQ ID NO: 4434589 - DNA, 25 bp, Homo sapien
tagatagaaacagtctactgcctgc

SEQ ID NO: 4434590 - DNA, 25 bp, Homo sapien
tgtctgacagcaagccaagtcgttt

SEQ ID NO: 4434591 - DNA, 25 bp, Homo sapien
aaactggaaccatgaaaactgtcat

SEQ ID NO: 4434592 - DNA, 25 bp, Homo sapien
gctgagggttgcttctgctgaaact

SEQ ID NO: 4434593 - DNA, 25 bp, Homo sapien
ctaccggtgctgagggttgcttctg

SEQ ID NO: 4434594 - DNA, 25 bp, Homo sapien
gtgctgagggttgcttctgctgaaa

SEQ ID NO: 4434595 - DNA, 25 bp, Homo sapien
tatcaaaaggtgtagcatgctgcat

SEQ ID NO: 4434596 - DNA, 25 bp, Homo sapien
agccagcattcgttgagtggtgcag

SEQ ID NO: 4434597 - DNA, 25 bp, Homo sapien
cagcattcgttgagtggtgcagtat

SEQ ID NO: 4434598 - DNA, 25 bp, Homo sapien
gctgctcctgctactagcttatcaa

SEQ ID NO: 4434599 - DNA, 25 bp, Homo sapien
ttcctcaggcacttatcggtggttt

SEQ ID NO: 4434600 - DNA, 25 bp, Homo sapien
cacttatcggtggtttcaaagccca

SEQ ID NO: 4434601 - DNA, 25 bp, Homo sapien
tgattcctcaggcacttatcggtgg

SEQ ID NO: 4434602 - DNA, 25 bp, Homo sapien
ggcacttatcggtggtttcaaagcc

SEQ ID NO: 4434603 - DNA, 25 bp, Homo sapien
gcctcctccacggtggcatatgaga

SEQ ID NO: 4434604 - DNA, 25 bp, Homo sapien
tgcatctgcctcctccacggtggca

SEQ ID NO: 4434605 - DNA, 25 bp, Homo sapien
ctgcctcctccacggtggcatatga

SEQ ID NO: 4434606 - DNA, 25 bp, Homo sapien
atctgcctcctccacggtggcatat

SEQ ID NO: 4434607 - DNA, 25 bp, Homo sapien
ctttggttccacaactcttcatcca

SEQ ID NO: 4434608 - DNA, 25 bp, Homo sapien
tttggttccacaactcttcatccac

SEQ ID NO: 4434609 - DNA, 25 bp, Homo sapien
ctttgagaatcttcttagacagctc

SEQ ID NO: 4434610 - DNA, 25 bp, Homo sapien
ggtctttgagaatcttcttagacag

SEQ ID NO: 4434611 - DNA, 25 bp, Homo sapien
ctggtctttgagaatcttcttagac

SEQ ID NO: 4434612 - DNA, 25 bp, Homo sapien
tctttgagaatcttcttagacagct

SEQ ID NO: 4434613 - DNA, 25 bp, Homo sapien
ttttccatactgttgaaaataatct

SEQ ID NO: 4434614 - DNA, 25 bp, Homo sapien
tgtgtcttctttaatgccagcaaca

SEQ ID NO: 4434615 - DNA, 25 bp, Homo sapien
tccatactgttgaaaataatctctt

SEQ ID NO: 4434616 - DNA, 25 bp, Homo sapien
ttctgtgtcttctttaatgccagca

SEQ ID NO: 4434617 - DNA, 25 bp, Homo sapien
tggtcatttgcagtgtggtatttct

SEQ ID NO: 4434618 - DNA, 25 bp, Homo sapien
cagaactactatgtcctctttggct

SEQ ID NO: 4434619 - DNA, 25 bp, Homo sapien
gaaagtttccagaactactatgtcc

SEQ ID NO: 4434620 - DNA, 25 bp, Homo sapien
gccaccacgaaagtttccagaacta

SEQ ID NO: 4434621 - DNA, 25 bp, Homo sapien
gtttccagaactactatgtcctctt

SEQ ID NO: 4434622 - DNA, 25 bp, Homo sapien
acccccactgctaccatatcctcca

SEQ ID NO: 4434623 - DNA, 25 bp, Homo sapien
gtgttgctcccatcattaccaaatt

SEQ ID NO: 4434624 - DNA, 25 bp, Homo sapien
tctccataaccaaagatgtcgttcc

SEQ ID NO: 4434625 - DNA, 25 bp, Homo sapien
gaagttttctccataaccaaagatg

SEQ ID NO: 4434626 - DNA, 25 bp, Homo sapien
tagctagtgctacccctatagcctc

SEQ ID NO: 4434627 - DNA, 25 bp, Homo sapien
ctagtgctacccctatagcctcctt

SEQ ID NO: 4434628 - DNA, 25 bp, Homo sapien
tgctacccctatagcctccttggtt

SEQ ID NO: 4434629 - DNA, 25 bp, Homo sapien
agtgctacccctatagcctccttgg

SEQ ID NO: 4434630 - DNA, 25 bp, Homo sapien
gaacttgtcggtgccagccattgaa

SEQ ID NO: 4434631 - DNA, 25 bp, Homo sapien
cggtgccagccattgaaattcacac

SEQ ID NO: 4434632 - DNA, 25 bp, Homo sapien
ttgtcggtgccagccattgaaattc

SEQ ID NO: 4434633 - DNA, 25 bp, Homo sapien
tcacagaacttgtcggtgccagcca

SEQ ID NO: 4434634 - DNA, 25 bp, Homo sapien
agtaccaaagtatccagtgactctg

SEQ ID NO: 4434635 - DNA, 25 bp, Homo sapien
agagcacatattctatctggtggtg

SEQ ID NO: 4434636 - DNA, 25 bp, Homo sapien
tcaagataaggcgaactaaaggaaa

SEQ ID NO: 4434637 - DNA, 25 bp, Homo sapien
tatgttgagctacatagcatggcta

SEQ ID NO: 4434638 - DNA, 25 bp, Homo sapien
tactgaggtgatttctggactgaaa

SEQ ID NO: 4434639 - DNA, 25 bp, Homo sapien
caaccagtctgaagtatgtgtaaat

SEQ ID NO: 4434640 - DNA, 25 bp, Homo sapien
gctgtgcccggctacctatgctttc

SEQ ID NO: 4434641 - DNA, 25 bp, Homo sapien
ccagtgacctatgggacattatcaa

SEQ ID NO: 4434642 - DNA, 25 bp, Homo sapien
ctgtaactgtctattggtggaatat

SEQ ID NO: 4434643 - DNA, 25 bp, Homo sapien
gggaacacgaagcttatttggatct

SEQ ID NO: 4434644 - DNA, 25 bp, Homo sapien
tgaggttccatctgaagtactgtaa

SEQ ID NO: 4434645 - DNA, 25 bp, Homo sapien
aatatgccggatcttctgacttgaa

SEQ ID NO: 4434646 - DNA, 25 bp, Homo sapien
catggaacactctagagggttgagg

SEQ ID NO: 4434647 - DNA, 25 bp, Homo sapien
gccctggtctaaagccttcttctga

SEQ ID NO: 4434648 - DNA, 25 bp, Homo sapien
gaagagtttgccctggtctaaagcc

SEQ ID NO: 4434649 - DNA, 25 bp, Homo sapien
actttctaatgggttgtcacagaga

SEQ ID NO: 4434650 - DNA, 25 bp, Homo sapien
cctctggtttcttggatgaaaaata

SEQ ID NO: 4434651 - DNA, 25 bp, Homo sapien
tcctctggtttcttggatgaaaaat

SEQ ID NO: 4434652 - DNA, 25 bp, Homo sapien
tatgtgtgatgattccatactgcat

SEQ ID NO: 4434653 - DNA, 25 bp, Homo sapien
gaaaaatatgtgtgatgattccata

SEQ ID NO: 4434654 - DNA, 25 bp, Homo sapien
aatgacgacaactaattcttgaatc

SEQ ID NO: 4434655 - DNA, 25 bp, Homo sapien
cttatttttagcattggtgaaatat

SEQ ID NO: 4434656 - DNA, 25 bp, Homo sapien
gcagacagaatgacgacaactaatt

SEQ ID NO: 4434657 - DNA, 25 bp, Homo sapien
ggatgtctgccgtcagcagacagaa

SEQ ID NO: 4434658 - DNA, 25 bp, Homo sapien
tttagcgagatgctgtgctgtcacc

SEQ ID NO: 4434659 - DNA, 25 bp, Homo sapien
tagcgagatgctgtgctgtcaccat

SEQ ID NO: 4434660 - DNA, 25 bp, Homo sapien
ttagcgagatgctgtgctgtcacca

SEQ ID NO: 4434661 - DNA, 25 bp, Homo sapien
ctttagcgagatgctgtgctgtcac

SEQ ID NO: 4434662 - DNA, 25 bp, Homo sapien
tgagagtaccatcaaagcaccctgc

SEQ ID NO: 4434663 - DNA, 25 bp, Homo sapien
gctgtactgtgtggcagacctttaa

SEQ ID NO: 4434664 - DNA, 25 bp, Homo sapien
tcctccttgagagctgtactgtgtg

SEQ ID NO: 4434665 - DNA, 25 bp, Homo sapien
gcctgcatcctcaatcctctataaa

SEQ ID NO: 4434666 - DNA, 25 bp, Homo sapien
cctgcagccttgtgccaaagttggg

SEQ ID NO: 4434667 - DNA, 25 bp, Homo sapien
gggttggtttaaatgcttgagcaga

SEQ ID NO: 4434668 - DNA, 25 bp, Homo sapien
taatcacaaagaggaccacgtcaaa

SEQ ID NO: 4434669 - DNA, 25 bp, Homo sapien
cgtcaaactttgacactttgaccct

SEQ ID NO: 4434670 - DNA, 25 bp, Homo sapien
tagggaaatgttgtatcctacctcc

SEQ ID NO: 4434671 - DNA, 25 bp, Homo sapien
ttataggatacatggtgacattttg

SEQ ID NO: 4434672 - DNA, 25 bp, Homo sapien
taactgtagctgcagtaatgagatt

SEQ ID NO: 4434673 - DNA, 25 bp, Homo sapien
cagctgtctccttgagcaattacca

SEQ ID NO: 4434674 - DNA, 25 bp, Homo sapien
tccagataactgagtataccaatgg

SEQ ID NO: 4434675 - DNA, 25 bp, Homo sapien
tcctccagataactgagtataccaa

SEQ ID NO: 4434676 - DNA, 25 bp, Homo sapien
tgagtataccaatggtctctgctta

SEQ ID NO: 4434677 - DNA, 25 bp, Homo sapien
gataactgagtataccaatggtctc

SEQ ID NO: 4434678 - DNA, 25 bp, Homo sapien
cctcatccaccttactgacaacttt

SEQ ID NO: 4434679 - DNA, 25 bp, Homo sapien
cttctgtctgagccagatactgttt

SEQ ID NO: 4434680 - DNA, 25 bp, Homo sapien
tgtaaccaattatgtcctcctcctt

SEQ ID NO: 4434681 - DNA, 25 bp, Homo sapien
cttgtacttccaatctcaaaactgt

SEQ ID NO: 4434682 - DNA, 25 bp, Homo sapien
ttgtgctcaccaattggaccaatca

SEQ ID NO: 4434683 - DNA, 25 bp, Homo sapien
tttgtgctcaccaattggaccaatc

SEQ ID NO: 4434684 - DNA, 25 bp, Homo sapien
tcatttgtgctcaccaattggacca

SEQ ID NO: 4434685 - DNA, 25 bp, Homo sapien
catttgtgctcaccaattggaccaa

SEQ ID NO: 4434686 - DNA, 25 bp, Homo sapien
cacagggatcttgtcgttggtaata

SEQ ID NO: 4434687 - DNA, 25 bp, Homo sapien
cgttggtaatattcacagtatggga

SEQ ID NO: 4434688 - DNA, 25 bp, Homo sapien
ttacacagggatcttgtcgttggta

SEQ ID NO: 4434689 - DNA, 25 bp, Homo sapien
gatcttgtcgttggtaatattcaca

SEQ ID NO: 4434690 - DNA, 25 bp, Homo sapien
aaataacgaacagtgctcttgcccc

SEQ ID NO: 4434691 - DNA, 25 bp, Homo sapien
gcagcttcatgactatggttggcaa

SEQ ID NO: 4434692 - DNA, 25 bp, Homo sapien
gccaagccctcatttaactcaagaa

SEQ ID NO: 4434693 - DNA, 25 bp, Homo sapien
ggcatgtaagtgctgacggatcccc

SEQ ID NO: 4434694 - DNA, 25 bp, Homo sapien
taagcagacaaactccctcgtgagg

SEQ ID NO: 4434695 - DNA, 25 bp, Homo sapien
tctgaacaagtccagagcgtgcgcc

SEQ ID NO: 4434696 - DNA, 25 bp, Homo sapien
gaaacggcctctccggatctggagg

SEQ ID NO: 4434697 - DNA, 25 bp, Homo sapien
tacgatcaagaacggctaggctgag

SEQ ID NO: 4434698 - DNA, 25 bp, Homo sapien
tgcaagggtcccaagcgtaggagct

SEQ ID NO: 4434699 - DNA, 25 bp, Homo sapien
aaatatatagggtgtgggtctgcaa

SEQ ID NO: 4434700 - DNA, 25 bp, Homo sapien
tctgtccccaggagttgagcggtgc

SEQ ID NO: 4434701 - DNA, 25 bp, Homo sapien
cagcacatgcgagttcttcttcacc

SEQ ID NO: 4434702 - DNA, 25 bp, Homo sapien
aagtcacacgacctctggcaaggag

SEQ ID NO: 4434703 - DNA, 25 bp, Homo sapien
taaattcagatgacttgcagagaca

SEQ ID NO: 4434704 - DNA, 25 bp, Homo sapien
gcagagacatctggtaacctcaggc

SEQ ID NO: 4434705 - DNA, 25 bp, Homo sapien
ccaactggcttatggagggaaatta

SEQ ID NO: 4434706 - DNA, 25 bp, Homo sapien
ctgtcccgtcagctccccctgctcc

SEQ ID NO: 4434707 - DNA, 25 bp, Homo sapien
gtcccgtcagctccccctgctccat

SEQ ID NO: 4434708 - DNA, 25 bp, Homo sapien
tgtcccgtcagctccccctgctcca

SEQ ID NO: 4434709 - DNA, 25 bp, Homo sapien
actgcaggcttaacaaaggcgtcct

SEQ ID NO: 4434710 - DNA, 25 bp, Homo sapien
acaaaggcgtccttctcactcatgt

SEQ ID NO: 4434711 - DNA, 25 bp, Homo sapien
catctagtgctagaggcaacagggt

SEQ ID NO: 4434712 - DNA, 25 bp, Homo sapien
tcttcacatatacttgtgcttccca

SEQ ID NO: 4434713 - DNA, 25 bp, Homo sapien
caaaggcaggtagcacgtcagttga

SEQ ID NO: 4434714 - DNA, 25 bp, Homo sapien
ccccaaaggcaggtagcacgtcagt

SEQ ID NO: 4434715 - DNA, 25 bp, Homo sapien
aaggcaggtagcacgtcagttgaat

SEQ ID NO: 4434716 - DNA, 25 bp, Homo sapien
caggtagcacgtcagttgaatgcat

SEQ ID NO: 4434717 - DNA, 25 bp, Homo sapien
tgcttcccccggcagccgctcggcg

SEQ ID NO: 4434718 - DNA, 25 bp, Homo sapien
ggcagccgctcggcgtgcgctgact

SEQ ID NO: 4434719 - DNA, 25 bp, Homo sapien
ccccggcagccgctcggcgtgcgct

SEQ ID NO: 4434720 - DNA, 25 bp, Homo sapien
cttcccccggcagccgctcggcgtg

SEQ ID NO: 4434721 - DNA, 25 bp, Homo sapien
ctcccgaggcgtcggcggtgcccca

SEQ ID NO: 4434722 - DNA, 25 bp, Homo sapien
gctcccgaggcgtcggcggtgcccc

SEQ ID NO: 4434723 - DNA, 25 bp, Homo sapien
cccgaggcgtcggcggtgccccagc

SEQ ID NO: 4434724 - DNA, 25 bp, Homo sapien
ggctcccgaggcgtcggcggtgccc

SEQ ID NO: 4434725 - DNA, 25 bp, Homo sapien
actggatctcgtcctcgcctccttc

SEQ ID NO: 4434726 - DNA, 25 bp, Homo sapien
ggatctcgtcctcgcctccttctcc

SEQ ID NO: 4434727 - DNA, 25 bp, Homo sapien
atctcgtcctcgcctccttctcccc

SEQ ID NO: 4434728 - DNA, 25 bp, Homo sapien
ctggatctcgtcctcgcctccttct

SEQ ID NO: 4434729 - DNA, 25 bp, Homo sapien
cggcctcgcccccgccgcggagact

SEQ ID NO: 4434730 - DNA, 25 bp, Homo sapien
ctgcccacggcctcgcccccgccgc

SEQ ID NO: 4434731 - DNA, 25 bp, Homo sapien
cctcgcccccgccgcggagactcac

SEQ ID NO: 4434732 - DNA, 25 bp, Homo sapien
tgcccacggcctcgcccccgccgcg

SEQ ID NO: 4434733 - DNA, 25 bp, Homo sapien
gctcggctgatatgggtctttaatc

SEQ ID NO: 4434734 - DNA, 25 bp, Homo sapien
tccagctcggctgatatgggtcttt

SEQ ID NO: 4434735 - DNA, 25 bp, Homo sapien
gggatattgtgtgtccagctcggct

SEQ ID NO: 4434736 - DNA, 25 bp, Homo sapien
gatattgtgtgtccagctcggctga

SEQ ID NO: 4434737 - DNA, 25 bp, Homo sapien
caggatatgaacaagtggcatgcac

SEQ ID NO: 4434738 - DNA, 25 bp, Homo sapien
gacagtcaaagttaccacctcccaa

SEQ ID NO: 4434739 - DNA, 25 bp, Homo sapien
caaagcccaggggacagtcaaagtt

SEQ ID NO: 4434740 - DNA, 25 bp, Homo sapien
gaacaagtggcatgcacttagcaca

SEQ ID NO: 4434741 - DNA, 25 bp, Homo sapien
ccctaaggcttatcaagtacagtat

SEQ ID NO: 4434742 - DNA, 25 bp, Homo sapien
tacgatcatccttctgtctcaagtg

SEQ ID NO: 4434743 - DNA, 25 bp, Homo sapien
gatagcatctcagttccctaacaca

SEQ ID NO: 4434744 - DNA, 25 bp, Homo sapien
caaagaacctcaacagactcgtgta

SEQ ID NO: 4434745 - DNA, 25 bp, Homo sapien
aggaaactgtccctcggcttgcaga

SEQ ID NO: 4434746 - DNA, 25 bp, Homo sapien
tggaatcgctctacacactgaaacg

SEQ ID NO: 4434747 - DNA, 25 bp, Homo sapien
gaaagaatcaccagcccatgtgcct

SEQ ID NO: 4434748 - DNA, 25 bp, Homo sapien
tgctgaccactcgtagaaactcagg

SEQ ID NO: 4434749 - DNA, 25 bp, Homo sapien
ttaaaatacaactatctgggagcat

SEQ ID NO: 4434750 - DNA, 25 bp, Homo sapien
gaataacgacattgaagactgattt

SEQ ID NO: 4434751 - DNA, 25 bp, Homo sapien
ttttaaaatacaactatctgggagc

SEQ ID NO: 4434752 - DNA, 25 bp, Homo sapien
atgaataacgacattgaagactgat

SEQ ID NO: 4434753 - DNA, 25 bp, Homo sapien
ctctactttcaaacgcagatgaaag

SEQ ID NO: 4434754 - DNA, 25 bp, Homo sapien
aggagaagcaggcagtaggatcagg

SEQ ID NO: 4434755 - DNA, 25 bp, Homo sapien
taacacaaagtacatggcgtttgtc

SEQ ID NO: 4434756 - DNA, 25 bp, Homo sapien
gggagccactaagttggaagaagct

SEQ ID NO: 4434757 - DNA, 25 bp, Homo sapien
tgatgtgagagctgtggtccttcct

SEQ ID NO: 4434758 - DNA, 25 bp, Homo sapien
caatgtgtgcaatggttgtgtcatg

SEQ ID NO: 4434759 - DNA, 25 bp, Homo sapien
ctgtgagttaataagaaatgtcttt

SEQ ID NO: 4434760 - DNA, 25 bp, Homo sapien
tcgaataaaacttctgggctgtgag

SEQ ID NO: 4434761 - DNA, 25 bp, Homo sapien
tctgggctgtgagttaataagaaat

SEQ ID NO: 4434762 - DNA, 25 bp, Homo sapien
ggacacagttcgaataaaacttctg

SEQ ID NO: 4434763 - DNA, 25 bp, Homo sapien
atatgtcatatgtcgctgtttgtcc

SEQ ID NO: 4434764 - DNA, 25 bp, Homo sapien
tatatgtcatatgtcgctgtttgtc

SEQ ID NO: 4434765 - DNA, 25 bp, Homo sapien
catatgtcgctgtttgtcctccaac

SEQ ID NO: 4434766 - DNA, 25 bp, Homo sapien
tgtcatatgtcgctgtttgtcctcc

SEQ ID NO: 4434767 - DNA, 25 bp, Homo sapien
ccaggccacgtggtaggaaagcaaa

SEQ ID NO: 4434768 - DNA, 25 bp, Homo sapien
aatggtattgctcaactatggcccc

SEQ ID NO: 4434769 - DNA, 25 bp, Homo sapien
gagcatgagtcaccagccataagga

SEQ ID NO: 4434770 - DNA, 25 bp, Homo sapien
caagtgaaggatgggacacgacacc

SEQ ID NO: 4434771 - DNA, 25 bp, Homo sapien
ttttctcttgtccaatgtggaaatt

SEQ ID NO: 4434772 - DNA, 25 bp, Homo sapien
tccaatgtggaaattaagttttcca

SEQ ID NO: 4434773 - DNA, 25 bp, Homo sapien
tcttgtccaatgtggaaattaagtt

SEQ ID NO: 4434774 - DNA, 25 bp, Homo sapien
cttttctcttgtccaatgtggaaat

SEQ ID NO: 4434775 - DNA, 25 bp, Homo sapien
taagagggtattgacaggtgagggt

SEQ ID NO: 4434776 - DNA, 25 bp, Homo sapien
tttgaaggttttgaatgccagaaaa

SEQ ID NO: 4434777 - DNA, 25 bp, Homo sapien
gggtgacccttgtgtcactagagag

SEQ ID NO: 4434778 - DNA, 25 bp, Homo sapien
ctagagaggagagtgatacccaggt

SEQ ID NO: 4434779 - DNA, 25 bp, Homo sapien
tgattaggctcgctggtgactgctg

SEQ ID NO: 4434780 - DNA, 25 bp, Homo sapien
gtttttccatctgatccaacgtaag

SEQ ID NO: 4434781 - DNA, 25 bp, Homo sapien
tgtaagagtttggacacagccctcc

SEQ ID NO: 4434782 - DNA, 25 bp, Homo sapien
ccaacgtaagtttgccattcatgta

SEQ ID NO: 4434783 - DNA, 25 bp, Homo sapien
ggctcagaggagatatacaacttgt

SEQ ID NO: 4434784 - DNA, 25 bp, Homo sapien
tagaggttaagagcgtgccctgaca

SEQ ID NO: 4434785 - DNA, 25 bp, Homo sapien
gtcactcagccaggattggacccaa

SEQ ID NO: 4434786 - DNA, 25 bp, Homo sapien
tgatgtatgcttttgcccctggcaa

SEQ ID NO: 4434787 - DNA, 25 bp, Homo sapien
ggaaaataagtccatgaagtcggca

SEQ ID NO: 4434788 - DNA, 25 bp, Homo sapien
tttatgggccagacagatatactgt

SEQ ID NO: 4434789 - DNA, 25 bp, Homo sapien
gcagcagtgcctcagtaggtagagt

SEQ ID NO: 4434790 - DNA, 25 bp, Homo sapien
aaattccaagtaagccaaacagagg

SEQ ID NO: 4434791 - DNA, 25 bp, Homo sapien
tcaatacagccattactgctcggtg

SEQ ID NO: 4434792 - DNA, 25 bp, Homo sapien
ttttccctcaatacagccattactg

SEQ ID NO: 4434793 - DNA, 25 bp, Homo sapien
atctgcttttccctcaatacagcca

SEQ ID NO: 4434794 - DNA, 25 bp, Homo sapien
cctcaatacagccattactgctcgg

SEQ ID NO: 4434795 - DNA, 25 bp, Homo sapien
cagctgtatgcaggctgagaagcct

SEQ ID NO: 4434796 - DNA, 25 bp, Homo sapien
aggccatgagaaatgtgggccccag

SEQ ID NO: 4434797 - DNA, 25 bp, Homo sapien
tggatccaggccatgagaaatgtgg

SEQ ID NO: 4434798 - DNA, 25 bp, Homo sapien
gccccagctgtatgcaggctgagaa

SEQ ID NO: 4434799 - DNA, 25 bp, Homo sapien
tgctgactgggtggaacgctgccaa

SEQ ID NO: 4434800 - DNA, 25 bp, Homo sapien
gctgactgggtggaacgctgccaag

SEQ ID NO: 4434801 - DNA, 25 bp, Homo sapien
ctgctgactgggtggaacgctgcca

SEQ ID NO: 4434802 - DNA, 25 bp, Homo sapien
ctgactgggtggaacgctgccaaga

SEQ ID NO: 4434803 - DNA, 25 bp, Homo sapien
tctttatggccagctgtgtcctatc

SEQ ID NO: 4434804 - DNA, 25 bp, Homo sapien
tatggccagctgtgtcctatctgta

SEQ ID NO: 4434805 - DNA, 25 bp, Homo sapien
ccagctgtgtcctatctgtaagcag

SEQ ID NO: 4434806 - DNA, 25 bp, Homo sapien
catctggctgtagagctctgaactt

SEQ ID NO: 4434807 - DNA, 25 bp, Homo sapien
ttggtgctcataagggttccagcag

SEQ ID NO: 4434808 - DNA, 25 bp, Homo sapien
tgggcttggacttgtaggcagctat

SEQ ID NO: 4434809 - DNA, 25 bp, Homo sapien
ccctgggcttggacttgtaggcagc

SEQ ID NO: 4434810 - DNA, 25 bp, Homo sapien
aatgccagataaacaagttggttgg

SEQ ID NO: 4434811 - DNA, 25 bp, Homo sapien
gtgcaaatgcgactggctgtacttt

SEQ ID NO: 4434812 - DNA, 25 bp, Homo sapien
tacccagggcatggcttagcgccat

SEQ ID NO: 4434813 - DNA, 25 bp, Homo sapien
tcagaagaaccgaggagagctttgc

SEQ ID NO: 4434814 - DNA, 25 bp, Homo sapien
ggtctccgtgtaaggcttggctgaa

SEQ ID NO: 4434815 - DNA, 25 bp, Homo sapien
tacgtacgtgtgctgcttcgtgggc

SEQ ID NO: 4434816 - DNA, 25 bp, Homo sapien
cgtgggctctgaacgaatgtcctgt

SEQ ID NO: 4434817 - DNA, 25 bp, Homo sapien
gaaatttcacaggaaactgtttagc

SEQ ID NO: 4434818 - DNA, 25 bp, Homo sapien
aaatttcacaggaaactgtttagct

SEQ ID NO: 4434819 - DNA, 25 bp, Homo sapien
aatttcacaggaaactgtttagctt

SEQ ID NO: 4434820 - DNA, 25 bp, Homo sapien
caaagagaacatatttctccacctt

SEQ ID NO: 4434821 - DNA, 25 bp, Homo sapien
gcatgaatccgaagtgtctgtgtcc

SEQ ID NO: 4434822 - DNA, 25 bp, Homo sapien
tatggaaaagtcaccggcatgaatc

SEQ ID NO: 4434823 - DNA, 25 bp, Homo sapien
tcataatcactcaagtgggccggcc

SEQ ID NO: 4434824 - DNA, 25 bp, Homo sapien
tgggccggcccctgaatgtaagatc

SEQ ID NO: 4434825 - DNA, 25 bp, Homo sapien
tcagaaacgaagtctttaagattcc

SEQ ID NO: 4434826 - DNA, 25 bp, Homo sapien
gaaacgaagtctttaagattcctca

SEQ ID NO: 4434827 - DNA, 25 bp, Homo sapien
tcctggttcagaaacgaagtcttta

SEQ ID NO: 4434828 - DNA, 25 bp, Homo sapien
tggttcagaaacgaagtctttaaga

SEQ ID NO: 4434829 - DNA, 25 bp, Homo sapien
tattctgagctgaagcatacgctgc

SEQ ID NO: 4434830 - DNA, 25 bp, Homo sapien
tcttagaggcatcataacagtctta

SEQ ID NO: 4434831 - DNA, 25 bp, Homo sapien
caaaatgtccttgtactgcagatgc

SEQ ID NO: 4434832 - DNA, 25 bp, Homo sapien
cagctgcaaaatacgaaagttctca

SEQ ID NO: 4434833 - DNA, 25 bp, Homo sapien
aatgaatccatgatcaagccttccc

SEQ ID NO: 4434834 - DNA, 25 bp, Homo sapien
tcatctagcctaatgaatccatgat

SEQ ID NO: 4434835 - DNA, 25 bp, Homo sapien
tgaatccatgatcaagccttcccca

SEQ ID NO: 4434836 - DNA, 25 bp, Homo sapien
aatccatgatcaagccttccccaca

SEQ ID NO: 4434837 - DNA, 25 bp, Homo sapien
cggtggagatcaacactagcacaca

SEQ ID NO: 4434838 - DNA, 25 bp, Homo sapien
gagttgctgaataagtaaaacgcgg

SEQ ID NO: 4434839 - DNA, 25 bp, Homo sapien
actgggtattcaacagagttgctga

SEQ ID NO: 4434840 - DNA, 25 bp, Homo sapien
accaactgggtattcaacagagttg

SEQ ID NO: 4434841 - DNA, 25 bp, Homo sapien
tgagtcaggactacatgtggcccca

SEQ ID NO: 4434842 - DNA, 25 bp, Homo sapien
aattcagaagctgagtcaggactac

SEQ ID NO: 4434843 - DNA, 25 bp, Homo sapien
gatttcaccagaaattcagaagctg

SEQ ID NO: 4434844 - DNA, 25 bp, Homo sapien
tccctcttgaatcctttgcaaacag

SEQ ID NO: 4434845 - DNA, 25 bp, Homo sapien
cattgtgataccactgactgctcgg

SEQ ID NO: 4434846 - DNA, 25 bp, Homo sapien
aaacttccagtgatgtaatacaaca

SEQ ID NO: 4434847 - DNA, 25 bp, Homo sapien
gcacaggtgcataaatattcatttc

SEQ ID NO: 4434848 - DNA, 25 bp, Homo sapien
ccactgactgctcggagatgtgagg

SEQ ID NO: 4434849 - DNA, 25 bp, Homo sapien
tctccaaaaaactattcagccatga

SEQ ID NO: 4434850 - DNA, 25 bp, Homo sapien
aaaaactattcagccatgaggggaa

SEQ ID NO: 4434851 - DNA, 25 bp, Homo sapien
gaaatcatcgttaccaccacaagaa

SEQ ID NO: 4434852 - DNA, 25 bp, Homo sapien
tgggtaagaaactgctgtcacacaa

SEQ ID NO: 4434853 - DNA, 25 bp, Homo sapien
gctgtgctgtgtacgtaactgggta

SEQ ID NO: 4434854 - DNA, 25 bp, Homo sapien
gtcacacaacaccaagcgactcaag

SEQ ID NO: 4434855 - DNA, 25 bp, Homo sapien
tgtggaagacgaggataatcagtga

SEQ ID NO: 4434856 - DNA, 25 bp, Homo sapien
ataatcagtgaccacgttctctccc

SEQ ID NO: 4434857 - DNA, 25 bp, Homo sapien
ctgtggaagacgaggataatcagtg

SEQ ID NO: 4434858 - DNA, 25 bp, Homo sapien
cagtgaccacgttctctcccccaca

SEQ ID NO: 4434859 - DNA, 25 bp, Homo sapien
aagctcccctttttctcggcacatg

SEQ ID NO: 4434860 - DNA, 25 bp, Homo sapien
tttgcgcacatgttttagaagctcc

SEQ ID NO: 4434861 - DNA, 25 bp, Homo sapien
gcacatgttttagaagctccccttt

SEQ ID NO: 4434862 - DNA, 25 bp, Homo sapien
ttagaagctcccctttttctcggca

SEQ ID NO: 4434863 - DNA, 25 bp, Homo sapien
cttggccctcatagaccctatgtct

SEQ ID NO: 4434864 - DNA, 25 bp, Homo sapien
ttggccctcatagaccctatgtctt

SEQ ID NO: 4434865 - DNA, 25 bp, Homo sapien
gcaggtgtctaccacttcatcacca

SEQ ID NO: 4434866 - DNA, 25 bp, Homo sapien
agcctgcatggtccatgtgctggca

SEQ ID NO: 4434867 - DNA, 25 bp, Homo sapien
tcaccattttcagccgcagactgtg

SEQ ID NO: 4434868 - DNA, 25 bp, Homo sapien
tgtgatacccaaagtcttggtggct

SEQ ID NO: 4434869 - DNA, 25 bp, Homo sapien
ctctgctccttatgaatggtggcga

SEQ ID NO: 4434870 - DNA, 25 bp, Homo sapien
ggcgatgcactggagtaccacttca

SEQ ID NO: 4434871 - DNA, 25 bp, Homo sapien
agaagcacaggcgattcccaagtcc

SEQ ID NO: 4434872 - DNA, 25 bp, Homo sapien
gggttccaagaagcacaggcgattc

SEQ ID NO: 4434873 - DNA, 25 bp, Homo sapien
tttgtcagacgccaaggtggaagaa

SEQ ID NO: 4434874 - DNA, 25 bp, Homo sapien
aggtgtagggcggacagccaatctc

SEQ ID NO: 4434875 - DNA, 25 bp, Homo sapien
tgactttgtcagacgccaaggtgga

SEQ ID NO: 4434876 - DNA, 25 bp, Homo sapien
gtgtagggcggacagccaatctcac

SEQ ID NO: 4434877 - DNA, 25 bp, Homo sapien
catcaacgattcctaggcttgtgga

SEQ ID NO: 4434878 - DNA, 25 bp, Homo sapien
caacagcagggagtaaagaacacac

SEQ ID NO: 4434879 - DNA, 25 bp, Homo sapien
accatgcaggcggagaccagtgcaa

SEQ ID NO: 4434880 - DNA, 25 bp, Homo sapien
gacagttacaacaatctcagcgcag

SEQ ID NO: 4434881 - DNA, 25 bp, Homo sapien
aatctgtgccctcatcacctatctt

SEQ ID NO: 4434882 - DNA, 25 bp, Homo sapien
tttaattccctctctagtagtgcca

SEQ ID NO: 4434883 - DNA, 25 bp, Homo sapien
tctgtgccctcatcacctatctttt

SEQ ID NO: 4434884 - DNA, 25 bp, Homo sapien
aaatctgtgccctcatcacctatct

SEQ ID NO: 4434885 - DNA, 25 bp, Homo sapien
tatcctgccctagagactttggaag

SEQ ID NO: 4434886 - DNA, 25 bp, Homo sapien
aaataactcaggctcacaaggtggg

SEQ ID NO: 4434887 - DNA, 25 bp, Homo sapien
gctggaatgcctactccgggatcaa

SEQ ID NO: 4434888 - DNA, 25 bp, Homo sapien
tgtgacaggtagcaaaattcaggcc

SEQ ID NO: 4434889 - DNA, 25 bp, Homo sapien
gagagaagggctctgttgacatctg

SEQ ID NO: 4434890 - DNA, 25 bp, Homo sapien
catctgttctgaaatagctcctcat

SEQ ID NO: 4434891 - DNA, 25 bp, Homo sapien
tgatgactctcagcatggagagaag

SEQ ID NO: 4434892 - DNA, 25 bp, Homo sapien
acggggcaagtgtttgatgactctc

SEQ ID NO: 4434893 - DNA, 25 bp, Homo sapien
ttcacctgtgttggcaagcatttcc

SEQ ID NO: 4434894 - DNA, 25 bp, Homo sapien
ttcgccgccattttcacctgtgttg

SEQ ID NO: 4434895 - DNA, 25 bp, Homo sapien
cagacgcagagatctggaggaatgt

SEQ ID NO: 4434896 - DNA, 25 bp, Homo sapien
agcacaaaattgcagacgcagagat

SEQ ID NO: 4434897 - DNA, 25 bp, Homo sapien
gcctctccacattcgctggtgaatt

SEQ ID NO: 4434898 - DNA, 25 bp, Homo sapien
agcctctccacattcgctggtgaat

SEQ ID NO: 4434899 - DNA, 25 bp, Homo sapien
aacttctcagaagcgttcagagtga

SEQ ID NO: 4434900 - DNA, 25 bp, Homo sapien
cttctcagaagcgttcagagtgaga

SEQ ID NO: 4434901 - DNA, 25 bp, Homo sapien
gaaacttctcagaagcgttcagagt

SEQ ID NO: 4434902 - DNA, 25 bp, Homo sapien
tctcagaagcgttcagagtgagaga

SEQ ID NO: 4434903 - DNA, 25 bp, Homo sapien
catggccgtataacagggtcctgtg

SEQ ID NO: 4434904 - DNA, 25 bp, Homo sapien
agtgcctcaggagaactgcatggcc

SEQ ID NO: 4434905 - DNA, 25 bp, Homo sapien
aactgcatggccgtataacagggtc

SEQ ID NO: 4434906 - DNA, 25 bp, Homo sapien
cattccgctgaaagagtgcctcagg

SEQ ID NO: 4434907 - DNA, 25 bp, Homo sapien
aatgatgaaagtgggcaccagagct

SEQ ID NO: 4434908 - DNA, 25 bp, Homo sapien
atgatgaaagtgggcaccagagctg

SEQ ID NO: 4434909 - DNA, 25 bp, Homo sapien
gaatgatgaaagtgggcaccagagc

SEQ ID NO: 4434910 - DNA, 25 bp, Homo sapien
ttgaatgatgaaagtgggcaccaga

SEQ ID NO: 4434911 - DNA, 25 bp, Homo sapien
taaagcgctctgttactccataagc

SEQ ID NO: 4434912 - DNA, 25 bp, Homo sapien
aaggtcagcctcttaccagtgctca

SEQ ID NO: 4434913 - DNA, 25 bp, Homo sapien
ccatgaaggactacagcagacgaat

SEQ ID NO: 4434914 - DNA, 25 bp, Homo sapien
gatgaactttgcatcatgctgctgg

SEQ ID NO: 4434915 - DNA, 25 bp, Homo sapien
tcccgtagacctacatcaaaggcaa

SEQ ID NO: 4434916 - DNA, 25 bp, Homo sapien
gtctgtctgggatcttgatgtagtc

SEQ ID NO: 4434917 - DNA, 25 bp, Homo sapien
ttcccgtagacctacatcaaaggca

SEQ ID NO: 4434918 - DNA, 25 bp, Homo sapien
gttcccgtagacctacatcaaaggc

SEQ ID NO: 4434919 - DNA, 25 bp, Homo sapien
tgtaatttccagcaaggtcgacaac

SEQ ID NO: 4434920 - DNA, 25 bp, Homo sapien
taatttccagcaaggtcgacaacac

SEQ ID NO: 4434921 - DNA, 25 bp, Homo sapien
gtaatttccagcaaggtcgacaaca

SEQ ID NO: 4434922 - DNA, 25 bp, Homo sapien
tttgtaatttccagcaaggtcgaca

SEQ ID NO: 4434923 - DNA, 25 bp, Homo sapien
ctgttggattccgtgtgaacctcct

SEQ ID NO: 4434924 - DNA, 25 bp, Homo sapien
tgttggattccgtgtgaacctcctc

SEQ ID NO: 4434925 - DNA, 25 bp, Homo sapien
agaagtgcattcagagaactagcca

SEQ ID NO: 4434926 - DNA, 25 bp, Homo sapien
tgcattcagagaactagccagacag

SEQ ID NO: 4434927 - DNA, 25 bp, Homo sapien
tagtttcaactccactactgggcag

SEQ ID NO: 4434928 - DNA, 25 bp, Homo sapien
ctatagtttcaactccactactggg

SEQ ID NO: 4434929 - DNA, 25 bp, Homo sapien
gtttcaactccactactgggcagtt

SEQ ID NO: 4434930 - DNA, 25 bp, Homo sapien
tatagtttcaactccactactgggc

SEQ ID NO: 4434931 - DNA, 25 bp, Homo sapien
catgaaggctccttgagttagtcat

SEQ ID NO: 4434932 - DNA, 25 bp, Homo sapien
tacatgaaggctccttgagttagtc

SEQ ID NO: 4434933 - DNA, 25 bp, Homo sapien
acatgaaggctccttgagttagtca

SEQ ID NO: 4434934 - DNA, 25 bp, Homo sapien
gaagcaggatgtatagtccaccaac

SEQ ID NO: 4434935 - DNA, 25 bp, Homo sapien
caggatgtatagtccaccaacaggc

SEQ ID NO: 4434936 - DNA, 25 bp, Homo sapien
aagcaggatgtatagtccaccaaca

SEQ ID NO: 4434937 - DNA, 25 bp, Homo sapien
gcaggatgtatagtccaccaacagg

SEQ ID NO: 4434938 - DNA, 25 bp, Homo sapien
tcgccaattcgaactttctctcctt

SEQ ID NO: 4434939 - DNA, 25 bp, Homo sapien
ggtcatcgccaattcgaactttctc

SEQ ID NO: 4434940 - DNA, 25 bp, Homo sapien
tgaggtcatcgccaattcgaacttt

SEQ ID NO: 4434941 - DNA, 25 bp, Homo sapien
tcatcgccaattcgaactttctctc

SEQ ID NO: 4434942 - DNA, 25 bp, Homo sapien
gatttctccacctgatctagaagca

SEQ ID NO: 4434943 - DNA, 25 bp, Homo sapien
gaagcagcttcaaagtgggacactt

SEQ ID NO: 4434944 - DNA, 25 bp, Homo sapien
gggagatttctccacctgatctaga

SEQ ID NO: 4434945 - DNA, 25 bp, Homo sapien
tatacagcctgtgggagatttctcc

SEQ ID NO: 4434946 - DNA, 25 bp, Homo sapien
agctcacctagaacttcaaggatta

SEQ ID NO: 4434947 - DNA, 25 bp, Homo sapien
tcaaggattaaattaaacagcctta

SEQ ID NO: 4434948 - DNA, 25 bp, Homo sapien
gtgccgacagaaacagctcacctag

SEQ ID NO: 4434949 - DNA, 25 bp, Homo sapien
cagtccagtgccgacagaaacagct

SEQ ID NO: 4434950 - DNA, 25 bp, Homo sapien
ggaggcatccacttgtatgttacca

SEQ ID NO: 4434951 - DNA, 25 bp, Homo sapien
gagcacgtaggatgtacattccaga

SEQ ID NO: 4434952 - DNA, 25 bp, Homo sapien
tgttaccatttgatactgagagatg

SEQ ID NO: 4434953 - DNA, 25 bp, Homo sapien
tcttcgatgctacttcctgagcacg

SEQ ID NO: 4434954 - DNA, 25 bp, Homo sapien
agggctgaagtgggtttctcaccag

SEQ ID NO: 4434955 - DNA, 25 bp, Homo sapien
gggctgaagtgggtttctcaccagt

SEQ ID NO: 4434956 - DNA, 25 bp, Homo sapien
ttaactgaaatctatcagggccata

SEQ ID NO: 4434957 - DNA, 25 bp, Homo sapien
taactgaaatctatcagggccatag

SEQ ID NO: 4434958 - DNA, 25 bp, Homo sapien
ctgaaatctatcagggccatagtca

SEQ ID NO: 4434959 - DNA, 25 bp, Homo sapien
actgaaatctatcagggccatagtc

SEQ ID NO: 4434960 - DNA, 25 bp, Homo sapien
aaagacgtactacatgcccaccaag

SEQ ID NO: 4434961 - DNA, 25 bp, Homo sapien
atcatgaccatggaaaagacgtact

SEQ ID NO: 4434962 - DNA, 25 bp, Homo sapien
tgtgctgggaatcattctggtctgt

SEQ ID NO: 4434963 - DNA, 25 bp, Homo sapien
tctggtctgtagatggtatcgtcaa

SEQ ID NO: 4434964 - DNA, 25 bp, Homo sapien
aagtataaggacaagaacacatcgt

SEQ ID NO: 4434965 - DNA, 25 bp, Homo sapien
agaacacatcgtccttggcacagcg

SEQ ID NO: 4434966 - DNA, 25 bp, Homo sapien
tctaaatgcacccttggcactaccc

SEQ ID NO: 4434967 - DNA, 25 bp, Homo sapien
ttggcacagcgccctctaaatgcac

SEQ ID NO: 4434968 - DNA, 25 bp, Homo sapien
aaatgatggcatgcatgtctgctcc

SEQ ID NO: 4434969 - DNA, 25 bp, Homo sapien
gctgagcctttccttgtaagcagaa

SEQ ID NO: 4434970 - DNA, 25 bp, Homo sapien
ctgggctaaagaaaggtcaccttca

SEQ ID NO: 4434971 - DNA, 25 bp, Homo sapien
ccagtgtgcctattgtgaaaatccc

SEQ ID NO: 4434972 - DNA, 25 bp, Homo sapien
caaagattcaagttccagtgtgctg

SEQ ID NO: 4434973 - DNA, 25 bp, Homo sapien
tgagactagttgacacaaagattca

SEQ ID NO: 4434974 - DNA, 25 bp, Homo sapien
gacaaggcttatcactcacttcacc

SEQ ID NO: 4434975 - DNA, 25 bp, Homo sapien
taacaccaaggcatcctgttttgat

SEQ ID NO: 4434976 - DNA, 25 bp, Homo sapien
tcccccagcttcgtagaatatcctc

SEQ ID NO: 4434977 - DNA, 25 bp, Homo sapien
ttatccgaaggggttccactctcca

SEQ ID NO: 4434978 - DNA, 25 bp, Homo sapien
aagagacctggctcgagtcccagct

SEQ ID NO: 4434979 - DNA, 25 bp, Homo sapien
tatccgaaggggttccactctccaa

SEQ ID NO: 4434980 - DNA, 25 bp, Homo sapien
caggctgctggcttgctgtaggatt

SEQ ID NO: 4434981 - DNA, 25 bp, Homo sapien
ggctgctggcttgctgtaggatttc

SEQ ID NO: 4434982 - DNA, 25 bp, Homo sapien
gctgctggcttgctgtaggatttca

SEQ ID NO: 4434983 - DNA, 25 bp, Homo sapien
ctgctggcttgctgtaggatttcat

SEQ ID NO: 4434984 - DNA, 25 bp, Homo sapien
tttgatgcccggaaagagaaagctg

SEQ ID NO: 4434985 - DNA, 25 bp, Homo sapien
tgcccggtcttgcagtataaggcct

SEQ ID NO: 4434986 - DNA, 25 bp, Homo sapien
tataaggccttggtcttctgtcaag

SEQ ID NO: 4434987 - DNA, 25 bp, Homo sapien
ggccccatctgatgttactgccact

SEQ ID NO: 4434988 - DNA, 25 bp, Homo sapien
catgcaattctgaccgttcagctag

SEQ ID NO: 4434989 - DNA, 25 bp, Homo sapien
gaagcttggctgaaccttaaaggag

SEQ ID NO: 4434990 - DNA, 25 bp, Homo sapien
gatccagcactgagttagacagagt

SEQ ID NO: 4434991 - DNA, 25 bp, Homo sapien
gaacactcataaagtgacagaccat

SEQ ID NO: 4434992 - DNA, 25 bp, Homo sapien
tgcttgcttctccatacgtggaaat

SEQ ID NO: 4434993 - DNA, 25 bp, Homo sapien
cacattgccaagtgcacaggacaat

SEQ ID NO: 4434994 - DNA, 25 bp, Homo sapien
acaggacaatgtgactcatgggtga

SEQ ID NO: 4434995 - DNA, 25 bp, Homo sapien
atgacgactttccacccatgcgctg

SEQ ID NO: 4434996 - DNA, 25 bp, Homo sapien
cctttactgacattacactttctgt

SEQ ID NO: 4434997 - DNA, 25 bp, Homo sapien
aaaatagagctaatccaatcattct

SEQ ID NO: 4434998 - DNA, 25 bp, Homo sapien
taactcccaagttcctatggaatac

SEQ ID NO: 4434999 - DNA, 25 bp, Homo sapien
caaaattggactaagagtacttcta

SEQ ID NO: 4435000 - DNA, 25 bp, Homo sapien
ctatgtctcgcttgtgactggagtc

SEQ ID NO: 4435001 - DNA, 25 bp, Homo sapien
ttgtgactggagtctaatttctcct

SEQ ID NO: 4435002 - DNA, 25 bp, Homo sapien
tcgcttgtgactggagtctaatttc

SEQ ID NO: 4435003 - DNA, 25 bp, Homo sapien
gccttctatgtctcgcttgtgactg

SEQ ID NO: 4435004 - DNA, 25 bp, Homo sapien
agaatctccatacttgatttctgga

SEQ ID NO: 4435005 - DNA, 25 bp, Homo sapien
ggaagttttggcgtcttgtgctttg

SEQ ID NO: 4435006 - DNA, 25 bp, Homo sapien
gaccactggctatatgctgcacaaa

SEQ ID NO: 4435007 - DNA, 25 bp, Homo sapien
tcttgtgctttgtaggtcacccaca

SEQ ID NO: 4435008 - DNA, 25 bp, Homo sapien
cagtgtaagcatcagcaaaggatac

SEQ ID NO: 4435009 - DNA, 25 bp, Homo sapien
aaggatactgttaccattggaatca

SEQ ID NO: 4435010 - DNA, 25 bp, Homo sapien
gatgaaatagaataccggcttgttc

SEQ ID NO: 4435011 - DNA, 25 bp, Homo sapien
cccatctatatactgcagtgtaagc

SEQ ID NO: 4435012 - DNA, 25 bp, Homo sapien
aactggctgaataaggctgtagtgt

SEQ ID NO: 4435013 - DNA, 25 bp, Homo sapien
agcctgggactcctcacgctggcat

SEQ ID NO: 4435014 - DNA, 25 bp, Homo sapien
gtagtgttccggatgatccgagcag

SEQ ID NO: 4435015 - DNA, 25 bp, Homo sapien
taaggctgtagtgttccggatgatc

SEQ ID NO: 4435016 - DNA, 25 bp, Homo sapien
tattgtgcctagagcttcagcgaac

SEQ ID NO: 4435017 - DNA, 25 bp, Homo sapien
ccttgaggagtacacctgggagcct

SEQ ID NO: 4435018 - DNA, 25 bp, Homo sapien
gacctaagtattaggcccggcatgc

SEQ ID NO: 4435019 - DNA, 25 bp, Homo sapien
tgttgtgttcctcctattccgcaag

SEQ ID NO: 4435020 - DNA, 25 bp, Homo sapien
acttcttctataggcagggtgatgg

SEQ ID NO: 4435021 - DNA, 25 bp, Homo sapien
ttgtctgtttttgagtgagcggagc

SEQ ID NO: 4435022 - DNA, 25 bp, Homo sapien
tgtagggtctgcaggacttcttcta

SEQ ID NO: 4435023 - DNA, 25 bp, Homo sapien
taggcgatcaagtcctgtagggtct

SEQ ID NO: 4435024 - DNA, 25 bp, Homo sapien
tcttcccttgcaatccctgcaaagt

SEQ ID NO: 4435025 - DNA, 25 bp, Homo sapien
catttaagcggtcaatgcaatttaa

SEQ ID NO: 4435026 - DNA, 25 bp, Homo sapien
caaagtgtgctacgctattgtagac

SEQ ID NO: 4435027 - DNA, 25 bp, Homo sapien
gtagaggaggttcagaatttctttc

SEQ ID NO: 4435028 - DNA, 25 bp, Homo sapien
aaaggaaggcatcccagtgaacaca

SEQ ID NO: 4435029 - DNA, 25 bp, Homo sapien
taatcttcagcgctaaaggaaggca

SEQ ID NO: 4435030 - DNA, 25 bp, Homo sapien
tcagcgctaaaggaaggcatcccag

SEQ ID NO: 4435031 - DNA, 25 bp, Homo sapien
tttattaatcttcagcgctaaagga

SEQ ID NO: 4435032 - DNA, 25 bp, Homo sapien
ttgagcgcaattgtttctgtttccg

SEQ ID NO: 4435033 - DNA, 25 bp, Homo sapien
agattctagtctgtccaatttactg

SEQ ID NO: 4435034 - DNA, 25 bp, Homo sapien
atttactgatgagccaatcaaggtt

SEQ ID NO: 4435035 - DNA, 25 bp, Homo sapien
caatcaaggttattggagaattgag

SEQ ID NO: 4435036 - DNA, 25 bp, Homo sapien
tgccacaaacatcaaatttggacat

SEQ ID NO: 4435037 - DNA, 25 bp, Homo sapien
cacaaacatcaaatttggacattaa

SEQ ID NO: 4435038 - DNA, 25 bp, Homo sapien
gccacaaacatcaaatttggacatt

SEQ ID NO: 4435039 - DNA, 25 bp, Homo sapien
atgccacaaacatcaaatttggaca

SEQ ID NO: 4435040 - DNA, 25 bp, Homo sapien
gatgatcgacttgatgtggccctcc

SEQ ID NO: 4435041 - DNA, 25 bp, Homo sapien
gtggccctccgctatcagatttaag

SEQ ID NO: 4435042 - DNA, 25 bp, Homo sapien
ccaacagggagatgatcgacttgat

SEQ ID NO: 4435043 - DNA, 25 bp, Homo sapien
tgattccgcccgtgcttatccaaca

SEQ ID NO: 4435044 - DNA, 25 bp, Homo sapien
ttcgcagacaggaaggaacatgttg

SEQ ID NO: 4435045 - DNA, 25 bp, Homo sapien
gaacatgttggaacgcagagaatct

SEQ ID NO: 4435046 - DNA, 25 bp, Homo sapien
gaatctggactgaagcggaagcttc

SEQ ID NO: 4435047 - DNA, 25 bp, Homo sapien
ctgaagcggaagcttcatgtttgcc

SEQ ID NO: 4435048 - DNA, 25 bp, Homo sapien
tctgttttgccttggagtgatggct

SEQ ID NO: 4435049 - DNA, 25 bp, Homo sapien
tccacatacagtaggaacagcaaag

SEQ ID NO: 4435050 - DNA, 25 bp, Homo sapien
tcggcctattacacatttcatctgt

SEQ ID NO: 4435051 - DNA, 25 bp, Homo sapien
gaaatacttttcagtcggcctatta

SEQ ID NO: 4435052 - DNA, 25 bp, Homo sapien
cattagcactctatgaaagacatca

SEQ ID NO: 4435053 - DNA, 25 bp, Homo sapien
ggaaacttgaaatccagaggctaat

SEQ ID NO: 4435054 - DNA, 25 bp, Homo sapien
ttgaaatccagaggctaatttctca

SEQ ID NO: 4435055 - DNA, 25 bp, Homo sapien
aaagacatcaactgtggaaacttga

SEQ ID NO: 4435056 - DNA, 25 bp, Homo sapien
cagagcctactgcttcttgggaaaa

SEQ ID NO: 4435057 - DNA, 25 bp, Homo sapien
tctggacttctttctagcccctctg

SEQ ID NO: 4435058 - DNA, 25 bp, Homo sapien
tgttgtagtcttatgccccttccct

SEQ ID NO: 4435059 - DNA, 25 bp, Homo sapien
aaggagcgagtgatgcctcagagcc

SEQ ID NO: 4435060 - DNA, 25 bp, Homo sapien
ctgcagcaggacacacccaccaaac

SEQ ID NO: 4435061 - DNA, 25 bp, Homo sapien
agatcagattctggttggctctcac

SEQ ID NO: 4435062 - DNA, 25 bp, Homo sapien
agtcgtgtctgcaggagtaggtttc

SEQ ID NO: 4435063 - DNA, 25 bp, Homo sapien
ctggttacatcgttaatcagtcgtg

SEQ ID NO: 4435064 - DNA, 25 bp, Homo sapien
tgcaaccccattgcagagacagagg

SEQ ID NO: 4435065 - DNA, 25 bp, Homo sapien
ccaaaggtgaagtccatcaaagcca

SEQ ID NO: 4435066 - DNA, 25 bp, Homo sapien
gggtccacctggtcgataatcagct

SEQ ID NO: 4435067 - DNA, 25 bp, Homo sapien
gccataggagtacaggtcgtcacca

SEQ ID NO: 4435068 - DNA, 25 bp, Homo sapien
cacccgcagatgtgtgggctctgct

SEQ ID NO: 4435069 - DNA, 25 bp, Homo sapien
gcttgaataatttgagcctccatca

SEQ ID NO: 4435070 - DNA, 25 bp, Homo sapien
tcagcttgaataatttgagcctcca

SEQ ID NO: 4435071 - DNA, 25 bp, Homo sapien
tcatttccagtgagattatgagcca

SEQ ID NO: 4435072 - DNA, 25 bp, Homo sapien
gtgagattatgagccaaagctttag

SEQ ID NO: 4435073 - DNA, 25 bp, Homo sapien
taagggatttctataagggacgcga

SEQ ID NO: 4435074 - DNA, 25 bp, Homo sapien
ggacgcgacgtctccaattgcagtt

SEQ ID NO: 4435075 - DNA, 25 bp, Homo sapien
ggagaggtagggctcttcttcttga

SEQ ID NO: 4435076 - DNA, 25 bp, Homo sapien
ctttggacaacagacaggagaggta

SEQ ID NO: 4435077 - DNA, 25 bp, Homo sapien
gatattcctggggtagccctaactg

SEQ ID NO: 4435078 - DNA, 25 bp, Homo sapien
aactgggctattctcatggtcttga

SEQ ID NO: 4435079 - DNA, 25 bp, Homo sapien
ttctttattcccttagatattcctg

SEQ ID NO: 4435080 - DNA, 25 bp, Homo sapien
caaggactctggatttggtctttat

SEQ ID NO: 4435081 - DNA, 25 bp, Homo sapien
gatcacagtgtctgagttgaccctg

SEQ ID NO: 4435082 - DNA, 25 bp, Homo sapien
gagaccatcacgaaaaagagccatt

SEQ ID NO: 4435083 - DNA, 25 bp, Homo sapien
ggcttccatggctaaaaaggcctat

SEQ ID NO: 4435084 - DNA, 25 bp, Homo sapien
tgctatcctgaaagccccattgagt

SEQ ID NO: 4435085 - DNA, 25 bp, Homo sapien
tgcagctactcctcggatctcgtcc

SEQ ID NO: 4435086 - DNA, 25 bp, Homo sapien
agctactcctcggatctcgtccaca

SEQ ID NO: 4435087 - DNA, 25 bp, Homo sapien
tttggaatgacaggggatccaaaga

SEQ ID NO: 4435088 - DNA, 25 bp, Homo sapien
ctcctcggatctcgtccacatagga

SEQ ID NO: 4435089 - DNA, 25 bp, Homo sapien
aatctccacccctgtgagggctttc

SEQ ID NO: 4435090 - DNA, 25 bp, Homo sapien
taatctccacccctgtgagggcttt

SEQ ID NO: 4435091 - DNA, 25 bp, Homo sapien
cccattgatgcggaatgagatgctg

SEQ ID NO: 4435092 - DNA, 25 bp, Homo sapien
gcagcagcttaccacgtcatccgat

SEQ ID NO: 4435093 - DNA, 25 bp, Homo sapien
gaagagcccgtctgtgttgaagttc

SEQ ID NO: 4435094 - DNA, 25 bp, Homo sapien
cacgtcatccgatctcaggaggtgc

SEQ ID NO: 4435095 - DNA, 25 bp, Homo sapien
cgctaagactggagaacaatctgag

SEQ ID NO: 4435096 - DNA, 25 bp, Homo sapien
caatctgagttatggacattcccac

SEQ ID NO: 4435097 - DNA, 25 bp, Homo sapien
cgtaagtcacgattcataattgcat

SEQ ID NO: 4435098 - DNA, 25 bp, Homo sapien
tctggctagtgtttgatgaaagctc

SEQ ID NO: 4435099 - DNA, 25 bp, Homo sapien
cctggtgatagagctgacagtgtga

SEQ ID NO: 4435100 - DNA, 25 bp, Homo sapien
ttttcctggtgatagagctgacagt

SEQ ID NO: 4435101 - DNA, 25 bp, Homo sapien
acattttcctggtgatagagctgac

SEQ ID NO: 4435102 - DNA, 25 bp, Homo sapien
tcctggtgatagagctgacagtgtg

SEQ ID NO: 4435103 - DNA, 25 bp, Homo sapien
agaaaccacgtggaagcttgacaac

SEQ ID NO: 4435104 - DNA, 25 bp, Homo sapien
tcaagaaaccacgtggaagcttgac

SEQ ID NO: 4435105 - DNA, 25 bp, Homo sapien
agcttgacaactgtcctctggagtt

SEQ ID NO: 4435106 - DNA, 25 bp, Homo sapien
aaccacgtggaagcttgacaactgt

SEQ ID NO: 4435107 - DNA, 25 bp, Homo sapien
tgttggctgcataattgtgatcgtg

SEQ ID NO: 4435108 - DNA, 25 bp, Homo sapien
gccttacaagatattctcagtgttg

SEQ ID NO: 4435109 - DNA, 25 bp, Homo sapien
tcctttcactggaacgttctggtag

SEQ ID NO: 4435110 - DNA, 25 bp, Homo sapien
aacgttctggtagggcagccttaca

SEQ ID NO: 4435111 - DNA, 25 bp, Homo sapien
caaacatcatccagtatgtaacaaa

SEQ ID NO: 4435112 - DNA, 25 bp, Homo sapien
catcaaggctgatcctcagctgacc

SEQ ID NO: 4435113 - DNA, 25 bp, Homo sapien
taaacgacttcaggttaaccacagc

SEQ ID NO: 4435114 - DNA, 25 bp, Homo sapien
tttgttgagaagtaaacgacttcag

SEQ ID NO: 4435115 - DNA, 25 bp, Homo sapien
tgacgtccacccatcaggaaacgta

SEQ ID NO: 4435116 - DNA, 25 bp, Homo sapien
ggtacccaagagatctctaatgcca

SEQ ID NO: 4435117 - DNA, 25 bp, Homo sapien
tctcttttggaagtaaggcttcata

SEQ ID NO: 4435118 - DNA, 25 bp, Homo sapien
gagggaggcaggaacttaaactctc

SEQ ID NO: 4435119 - DNA, 25 bp, Homo sapien
tgtctcggatcttttctaggtgagg

SEQ ID NO: 4435120 - DNA, 25 bp, Homo sapien
gatgttttcagctagtctgtctcgg

SEQ ID NO: 4435121 - DNA, 25 bp, Homo sapien
gccgaaagtccagccaagttctatt

SEQ ID NO: 4435122 - DNA, 25 bp, Homo sapien
cccaaagctcatggatgttttcagc

SEQ ID NO: 4435123 - DNA, 25 bp, Homo sapien
aggttatagttcttctcagtttctg

SEQ ID NO: 4435124 - DNA, 25 bp, Homo sapien
aaaactccacaaggcaagggtgttg

SEQ ID NO: 4435125 - DNA, 25 bp, Homo sapien
tgacatttgcaggttatagttcttc

SEQ ID NO: 4435126 - DNA, 25 bp, Homo sapien
catttgcaggttatagttcttctca

SEQ ID NO: 4435127 - DNA, 25 bp, Homo sapien
tcctcagcagctgggttaacatgag

SEQ ID NO: 4435128 - DNA, 25 bp, Homo sapien
gttaacatgagcaatgtggcacccc

SEQ ID NO: 4435129 - DNA, 25 bp, Homo sapien
gcagctgggttaacatgagcaatgt

SEQ ID NO: 4435130 - DNA, 25 bp, Homo sapien
tgggttaacatgagcaatgtggcac

SEQ ID NO: 4435131 - DNA, 25 bp, Homo sapien
gtcttttgcccaaacattgtgtgca

SEQ ID NO: 4435132 - DNA, 25 bp, Homo sapien
gccataggtccatccttgttttatt

SEQ ID NO: 4435133 - DNA, 25 bp, Homo sapien
tgaggaggtaacagcttcacatcag

SEQ ID NO: 4435134 - DNA, 25 bp, Homo sapien
ggcttatagccgttggacatcatat

SEQ ID NO: 4435135 - DNA, 25 bp, Homo sapien
aaaagtgcgcacagcttcccgcagg

SEQ ID NO: 4435136 - DNA, 25 bp, Homo sapien
tacccgtaaccaacaaaagtgcgca

SEQ ID NO: 4435137 - DNA, 25 bp, Homo sapien
gatggctcaatgttatacccgtaac

SEQ ID NO: 4435138 - DNA, 25 bp, Homo sapien
tacgctcatccagtaatgcatatgg

SEQ ID NO: 4435139 - DNA, 25 bp, Homo sapien
cgacatcaggtcgacagcctggcct

SEQ ID NO: 4435140 - DNA, 25 bp, Homo sapien
acacaaaggcttggtcatcggcccc

SEQ ID NO: 4435141 - DNA, 25 bp, Homo sapien
aaaatcggatcttgtctatgctgac

SEQ ID NO: 4435142 - DNA, 25 bp, Homo sapien
gcataagatcgctctacccggaaaa

SEQ ID NO: 4435143 - DNA, 25 bp, Homo sapien
agtcagcgaaggcaagttcagagcc

SEQ ID NO: 4435144 - DNA, 25 bp, Homo sapien
ttcagagcctttgttggtgatcagc

SEQ ID NO: 4435145 - DNA, 25 bp, Homo sapien
tggctgccaggtacgcccaaaatac

SEQ ID NO: 4435146 - DNA, 25 bp, Homo sapien
gaagatcattgaagcatcatccagg

SEQ ID NO: 4435147 - DNA, 25 bp, Homo sapien
tggggttggcagagggtgttagatt

SEQ ID NO: 4435148 - DNA, 25 bp, Homo sapien
gggttggcagagggtgttagattta

SEQ ID NO: 4435149 - DNA, 25 bp, Homo sapien
ggttggcagagggtgttagatttac

SEQ ID NO: 4435150 - DNA, 25 bp, Homo sapien
taggtgacaacactgagagctgtga

SEQ ID NO: 4435151 - DNA, 25 bp, Homo sapien
aggtgacaacactgagagctgtgat

SEQ ID NO: 4435152 - DNA, 25 bp, Homo sapien
ggtgacaacactgagagctgtgatg

SEQ ID NO: 4435153 - DNA, 25 bp, Homo sapien
ctactatgcttctgtatttttgtga

SEQ ID NO: 4435154 - DNA, 25 bp, Homo sapien
tatttttgtgataggggctgcgatg

SEQ ID NO: 4435155 - DNA, 25 bp, Homo sapien
atgcttctgtatttttgtgataggg

SEQ ID NO: 4435156 - DNA, 25 bp, Homo sapien
agcactactatgcttctgtattttt

SEQ ID NO: 4435157 - DNA, 25 bp, Homo sapien
ctctcaggacagtcaacggactggt

SEQ ID NO: 4435158 - DNA, 25 bp, Homo sapien
ggtcccttggacaagcacctgtgca

SEQ ID NO: 4435159 - DNA, 25 bp, Homo sapien
acggactggtcccttggacaagcac

SEQ ID NO: 4435160 - DNA, 25 bp, Homo sapien
tcaggacagtcaacggactggtccc

SEQ ID NO: 4435161 - DNA, 25 bp, Homo sapien
cagtaggaaagatgtgacacaaccc

SEQ ID NO: 4435162 - DNA, 25 bp, Homo sapien
ctcccagtaggaaagatgtgacaca

SEQ ID NO: 4435163 - DNA, 25 bp, Homo sapien
ggaaagatgtgacacaacccgttct

SEQ ID NO: 4435164 - DNA, 25 bp, Homo sapien
taggaaagatgtgacacaacccgtt

SEQ ID NO: 4435165 - DNA, 25 bp, Homo sapien
ttagcccgaaggcaccatcccagga

SEQ ID NO: 4435166 - DNA, 25 bp, Homo sapien
agagttagagagacctgctttagcc

SEQ ID NO: 4435167 - DNA, 25 bp, Homo sapien
ctgcagaagagttagagagacctgc

SEQ ID NO: 4435168 - DNA, 25 bp, Homo sapien
gaaactccgaggcagctgaatcttt

SEQ ID NO: 4435169 - DNA, 25 bp, Homo sapien
tgaaggtactggcatctgtcccgag

SEQ ID NO: 4435170 - DNA, 25 bp, Homo sapien
tgagatagacccagacagcagatgg

SEQ ID NO: 4435171 - DNA, 25 bp, Homo sapien
tggatgatcctttggcacgttgaca

SEQ ID NO: 4435172 - DNA, 25 bp, Homo sapien
cgttgacaaacgtcgggaggcgctt

SEQ ID NO: 4435173 - DNA, 25 bp, Homo sapien
ggcaaggcattctgtgaactacaga

SEQ ID NO: 4435174 - DNA, 25 bp, Homo sapien
gccttgtcccgtaggaagaaacaga

SEQ ID NO: 4435175 - DNA, 25 bp, Homo sapien
tgacataccaaagggcctgaccttg

SEQ ID NO: 4435176 - DNA, 25 bp, Homo sapien
catgcacatggcaaggcattctgtg

SEQ ID NO: 4435177 - DNA, 25 bp, Homo sapien
caagcggcaatagatcatgtcggca

SEQ ID NO: 4435178 - DNA, 25 bp, Homo sapien
tatgcgtcaccttgagacacggagg

SEQ ID NO: 4435179 - DNA, 25 bp, Homo sapien
ggaaagcttcactgtccagacaggg

SEQ ID NO: 4435180 - DNA, 25 bp, Homo sapien
gggctgtccatggtgccatcaatcc

SEQ ID NO: 4435181 - DNA, 25 bp, Homo sapien
atgagagagtatttcttgcatctgt

SEQ ID NO: 4435182 - DNA, 25 bp, Homo sapien
tatgagagagtatttcttgcatctg

SEQ ID NO: 4435183 - DNA, 25 bp, Homo sapien
ttgtatgagagagtatttcttgcat

SEQ ID NO: 4435184 - DNA, 25 bp, Homo sapien
tgttgttgtatgagagagtatttct

SEQ ID NO: 4435185 - DNA, 25 bp, Homo sapien
cctgtccagcaaagatgcggatggc

SEQ ID NO: 4435186 - DNA, 25 bp, Homo sapien
tgatagtctggagtcacccatccga

SEQ ID NO: 4435187 - DNA, 25 bp, Homo sapien
tcatcccctagggtgacagtcactg

SEQ ID NO: 4435188 - DNA, 25 bp, Homo sapien
cagacacaggatggatcctgtccag

SEQ ID NO: 4435189 - DNA, 25 bp, Homo sapien
ctaggagccaagacaggaaaaggca

SEQ ID NO: 4435190 - DNA, 25 bp, Homo sapien
ccaagacaggaaaaggcacagaatc

SEQ ID NO: 4435191 - DNA, 25 bp, Homo sapien
gacaggaaaaggcacagaatctgga

SEQ ID NO: 4435192 - DNA, 25 bp, Homo sapien
aagacaggaaaaggcacagaatctg

SEQ ID NO: 4435193 - DNA, 25 bp, Homo sapien
gctgagaaggacaacatgcccatgg

SEQ ID NO: 4435194 - DNA, 25 bp, Homo sapien
tggccagatccacgagacagccgat

SEQ ID NO: 4435195 - DNA, 25 bp, Homo sapien
cacgttgctccgatttgatctctgg

SEQ ID NO: 4435196 - DNA, 25 bp, Homo sapien
tctctgggaactggctacaatgtct

SEQ ID NO: 4435197 - DNA, 25 bp, Homo sapien
tttagcactgccgtggtatgccact

SEQ ID NO: 4435198 - DNA, 25 bp, Homo sapien
ggattgcgcaaccagcccagattta

SEQ ID NO: 4435199 - DNA, 25 bp, Homo sapien
atgcccatggattgcgcaaccagcc

SEQ ID NO: 4435200 - DNA, 25 bp, Homo sapien
tatttgaggcacctttcatcactgg

SEQ ID NO: 4435201 - DNA, 25 bp, Homo sapien
tggaccagtaggaagcccatgcgtt

SEQ ID NO: 4435202 - DNA, 25 bp, Homo sapien
tcatctggaccagtaggaagcccat

SEQ ID NO: 4435203 - DNA, 25 bp, Homo sapien
gaccagtaggaagcccatgcgtttc

SEQ ID NO: 4435204 - DNA, 25 bp, Homo sapien
tctggaccagtaggaagcccatgcg

SEQ ID NO: 4435205 - DNA, 25 bp, Homo sapien
caaaccaacattagtcaagcaagcc

SEQ ID NO: 4435206 - DNA, 25 bp, Homo sapien
gactcaggcaaaccaacattagtca

SEQ ID NO: 4435207 - DNA, 25 bp, Homo sapien
ttagtcaagcaagcccatggagatc

SEQ ID NO: 4435208 - DNA, 25 bp, Homo sapien
caacattagtcaagcaagcccatgg

SEQ ID NO: 4435209 - DNA, 25 bp, Homo sapien
ggcacatggcagcaccatcattctc

SEQ ID NO: 4435210 - DNA, 25 bp, Homo sapien
ctgaacagtgtgatgtgcttgctct

SEQ ID NO: 4435211 - DNA, 25 bp, Homo sapien
agagcccaaagacacgtggcacatg

SEQ ID NO: 4435212 - DNA, 25 bp, Homo sapien
cacacctgcccataggagatgataa

SEQ ID NO: 4435213 - DNA, 25 bp, Homo sapien
aatcaaaacaaatcgaaagctttgc

SEQ ID NO: 4435214 - DNA, 25 bp, Homo sapien
tcaaaacaaatcgaaagctttgccc

SEQ ID NO: 4435215 - DNA, 25 bp, Homo sapien
aaacaaatcgaaagctttgcccaga

SEQ ID NO: 4435216 - DNA, 25 bp, Homo sapien
ctggaaatcaaaacaaatcgaaagc

SEQ ID NO: 4435217 - DNA, 25 bp, Homo sapien
aactgaaacaaagaagtacttgtag

SEQ ID NO: 4435218 - DNA, 25 bp, Homo sapien
aacaaagaagtacttgtaggctgca

SEQ ID NO: 4435219 - DNA, 25 bp, Homo sapien
ctgaaacaaagaagtacttgtaggc

SEQ ID NO: 4435220 - DNA, 25 bp, Homo sapien
gaaacaaagaagtacttgtaggctg

SEQ ID NO: 4435221 - DNA, 25 bp, Homo sapien
tttggacgtccagccgaggtggaca

SEQ ID NO: 4435222 - DNA, 25 bp, Homo sapien
tcaggaagctgttgggcatgcggct

SEQ ID NO: 4435223 - DNA, 25 bp, Homo sapien
tgcggctccagagcacgggctggat

SEQ ID NO: 4435224 - DNA, 25 bp, Homo sapien
cactcctgaatatggccgctgacag

SEQ ID NO: 4435225 - DNA, 25 bp, Homo sapien
ccacccagccgtggcgctcgctcac

SEQ ID NO: 4435226 - DNA, 25 bp, Homo sapien
accacccagccgtggcgctcgctca

SEQ ID NO: 4435227 - DNA, 25 bp, Homo sapien
ctgcaccacccagccgtggcgctcg

SEQ ID NO: 4435228 - DNA, 25 bp, Homo sapien
gcaccacccagccgtggcgctcgct

SEQ ID NO: 4435229 - DNA, 25 bp, Homo sapien
gggatgtggagcgccatcatctgca

SEQ ID NO: 4435230 - DNA, 25 bp, Homo sapien
tcggggatgtggagcgccatcatct

SEQ ID NO: 4435231 - DNA, 25 bp, Homo sapien
cggggatgtggagcgccatcatctg

SEQ ID NO: 4435232 - DNA, 25 bp, Homo sapien
gatgtggagcgccatcatctgcagg

SEQ ID NO: 4435233 - DNA, 25 bp, Homo sapien
atccatggggtgttcctccaacgac

SEQ ID NO: 4435234 - DNA, 25 bp, Homo sapien
ctatccatggggtgttcctccaacg

SEQ ID NO: 4435235 - DNA, 25 bp, Homo sapien
cactatccatggggtgttcctccaa

SEQ ID NO: 4435236 - DNA, 25 bp, Homo sapien
tatccatggggtgttcctccaacga

SEQ ID NO: 4435237 - DNA, 25 bp, Homo sapien
ctgaggacaggacgagcaatcagcc

SEQ ID NO: 4435238 - DNA, 25 bp, Homo sapien
acaggacgagcaatcagccacacca

SEQ ID NO: 4435239 - DNA, 25 bp, Homo sapien
aggacaggacgagcaatcagccaca

SEQ ID NO: 4435240 - DNA, 25 bp, Homo sapien
ggacgagcaatcagccacaccaggg

SEQ ID NO: 4435241 - DNA, 25 bp, Homo sapien
caatcaggaggaggatctgccgaac

SEQ ID NO: 4435242 - DNA, 25 bp, Homo sapien
caatgagtttcagcacaggcacaaa

SEQ ID NO: 4435243 - DNA, 25 bp, Homo sapien
tagaaaccagatcgaaggaggccgg

SEQ ID NO: 4435244 - DNA, 25 bp, Homo sapien
ggtaatcgagtctgcaacaagcctt

SEQ ID NO: 4435245 - DNA, 25 bp, Homo sapien
gcatgagctcattgtagcggaactt

SEQ ID NO: 4435246 - DNA, 25 bp, Homo sapien
aactccttggtcttccgggcagtca

SEQ ID NO: 4435247 - DNA, 25 bp, Homo sapien
tgcagctcacagtcgcagagatagc

SEQ ID NO: 4435248 - DNA, 25 bp, Homo sapien
cagtcagggccgcagacatgttcag

SEQ ID NO: 4435249 - DNA, 25 bp, Homo sapien
cttccataggaactggacagaggct

SEQ ID NO: 4435250 - DNA, 25 bp, Homo sapien
tccataggaactggacagaggctca

SEQ ID NO: 4435251 - DNA, 25 bp, Homo sapien
tcttccataggaactggacagaggc

SEQ ID NO: 4435252 - DNA, 25 bp, Homo sapien
ttccataggaactggacagaggctc

SEQ ID NO: 4435253 - DNA, 25 bp, Homo sapien
tcctcccgaatctcctctgggcagg

SEQ ID NO: 4435254 - DNA, 25 bp, Homo sapien
ctcccagttgaaagttaagcagcat

SEQ ID NO: 4435255 - DNA, 25 bp, Homo sapien
cctcatggaaatcatacagctcctc

SEQ ID NO: 4435256 - DNA, 25 bp, Homo sapien
ggaaatcatacagctcctcccgaat

SEQ ID NO: 4435257 - DNA, 25 bp, Homo sapien
gtccaggaggtgtcctcctcctcct

SEQ ID NO: 4435258 - DNA, 25 bp, Homo sapien
ctgtccaggaggtgtcctcctcctc

SEQ ID NO: 4435259 - DNA, 25 bp, Homo sapien
ccaggaggtgtcctcctcctcctct

SEQ ID NO: 4435260 - DNA, 25 bp, Homo sapien
tgtccaggaggtgtcctcctcctcc

SEQ ID NO: 4435261 - DNA, 25 bp, Homo sapien
cttctctggcttgggtgggcctttg

SEQ ID NO: 4435262 - DNA, 25 bp, Homo sapien
ttgattttgtaaaccaaggcacaga

SEQ ID NO: 4435263 - DNA, 25 bp, Homo sapien
ctcctccgtcggctgctccttctct

SEQ ID NO: 4435264 - DNA, 25 bp, Homo sapien
gcttgggtgggcctttgattttgta

SEQ ID NO: 4435265 - DNA, 25 bp, Homo sapien
cacgaaacgtgaacctctcataact

SEQ ID NO: 4435266 - DNA, 25 bp, Homo sapien
gacacgaaacgtgaacctctcataa

SEQ ID NO: 4435267 - DNA, 25 bp, Homo sapien
gaaacgtgaacctctcataactcct

SEQ ID NO: 4435268 - DNA, 25 bp, Homo sapien
ttatgacacgaaacgtgaacctctc

SEQ ID NO: 4435269 - DNA, 25 bp, Homo sapien
gatttgtgccatagagctgagtgtg

SEQ ID NO: 4435270 - DNA, 25 bp, Homo sapien
accaatattcagttggaggtcaaaa

SEQ ID NO: 4435271 - DNA, 25 bp, Homo sapien
tcaaaaagatttgtgccatagagct

SEQ ID NO: 4435272 - DNA, 25 bp, Homo sapien
gaaacaagtacgacatgttccctgc

SEQ ID NO: 4435273 - DNA, 25 bp, Homo sapien
agcctccacatctctaaggatggag

SEQ ID NO: 4435274 - DNA, 25 bp, Homo sapien
gcttccctagccagacagatacaga

SEQ ID NO: 4435275 - DNA, 25 bp, Homo sapien
gaactgcttccctagccagacagat

SEQ ID NO: 4435276 - DNA, 25 bp, Homo sapien
cctccacatctctaaggatggagac

SEQ ID NO: 4435277 - DNA, 25 bp, Homo sapien
catttacagcgaggagatgagctgt

SEQ ID NO: 4435278 - DNA, 25 bp, Homo sapien
tgagtaagtggccattatcaaagca

SEQ ID NO: 4435279 - DNA, 25 bp, Homo sapien
tatggtgagtaagtggccattatca

SEQ ID NO: 4435280 - DNA, 25 bp, Homo sapien
tatcaaagcatcactgcacatcact

SEQ ID NO: 4435281 - DNA, 25 bp, Homo sapien
gctattctacctgagttgggcttcc

SEQ ID NO: 4435282 - DNA, 25 bp, Homo sapien
catcgctaaactcacagatgtcagc

SEQ ID NO: 4435283 - DNA, 25 bp, Homo sapien
cttggctggctccatcgctaaactc

SEQ ID NO: 4435284 - DNA, 25 bp, Homo sapien
tcctgttgctcgtttgctgaacgca

SEQ ID NO: 4435285 - DNA, 25 bp, Homo sapien
aagcgcagtatttgggcggaagttt

SEQ ID NO: 4435286 - DNA, 25 bp, Homo sapien
aaagcgcagtatttgggcggaagtt

SEQ ID NO: 4435287 - DNA, 25 bp, Homo sapien
ttttcctggataatcatctttgtgg

SEQ ID NO: 4435288 - DNA, 25 bp, Homo sapien
cccagaggggcaccctgcctatatg

SEQ ID NO: 4435289 - DNA, 25 bp, Homo sapien
aattctccttctaagagtcaggtcc

SEQ ID NO: 4435290 - DNA, 25 bp, Homo sapien
atatgaggtgtgtgttgccccctac

SEQ ID NO: 4435291 - DNA, 25 bp, Homo sapien
caaggtgcagtaagtgagagaaaca

SEQ ID NO: 4435292 - DNA, 25 bp, Homo sapien
aatgtttcaaattgtgagaccaagg

SEQ ID NO: 4435293 - DNA, 25 bp, Homo sapien
gctgacaggcagatgtaattccatg

SEQ ID NO: 4435294 - DNA, 25 bp, Homo sapien
gccatatgtactggaaaatgtttca

SEQ ID NO: 4435295 - DNA, 25 bp, Homo sapien
cacagggcgtaggagggcctaggag

SEQ ID NO: 4435296 - DNA, 25 bp, Homo sapien
cacatgcacactgagcagcgcaaag

SEQ ID NO: 4435297 - DNA, 25 bp, Homo sapien
gacctcttagggagggaatgcctct

SEQ ID NO: 4435298 - DNA, 25 bp, Homo sapien
tgtctcctttggtgtgcagtgcaca

SEQ ID NO: 4435299 - DNA, 25 bp, Homo sapien
ctgttccatttaaattctagctccc

SEQ ID NO: 4435300 - DNA, 25 bp, Homo sapien
ttccatttaaattctagctcccaac

SEQ ID NO: 4435301 - DNA, 25 bp, Homo sapien
gcttctgttccatttaaattctagc

SEQ ID NO: 4435302 - DNA, 25 bp, Homo sapien
ttagcttctgttccatttaaattct

SEQ ID NO: 4435303 - DNA, 25 bp, Homo sapien
gagggagcaggactgtggctgtcat

SEQ ID NO: 4435304 - DNA, 25 bp, Homo sapien
ctggaaggacaacaggagggagcag

SEQ ID NO: 4435305 - DNA, 25 bp, Homo sapien
tggaaggacaacaggagggagcagg

SEQ ID NO: 4435306 - DNA, 25 bp, Homo sapien
aaggacaacaggagggagcaggact

SEQ ID NO: 4435307 - DNA, 25 bp, Homo sapien
gaacatcattcggaccagctctgaa

SEQ ID NO: 4435308 - DNA, 25 bp, Homo sapien
tgggcccagcagatcatcgtctgtg

SEQ ID NO: 4435309 - DNA, 25 bp, Homo sapien
tgctgtcatactgcctccggaggag

SEQ ID NO: 4435310 - DNA, 25 bp, Homo sapien
gatggtgtaggtcttccgcagcgcc

SEQ ID NO: 4435311 - DNA, 25 bp, Homo sapien
cagagtaaagctgcatgcaaatcaa

SEQ ID NO: 4435312 - DNA, 25 bp, Homo sapien
tggtaatttgctgtgtactcccttg

SEQ ID NO: 4435313 - DNA, 25 bp, Homo sapien
caccacctccaattgccagttttta

SEQ ID NO: 4435314 - DNA, 25 bp, Homo sapien
tccccttctcttgagggttgcagga

SEQ ID NO: 4435315 - DNA, 25 bp, Homo sapien
gtgcatgcccaggactctcatgagg

SEQ ID NO: 4435316 - DNA, 25 bp, Homo sapien
gatgctggtaaaacaccttgttgtt

SEQ ID NO: 4435317 - DNA, 25 bp, Homo sapien
catgaggttgggatgctggtaaaac

SEQ ID NO: 4435318 - DNA, 25 bp, Homo sapien
tcgtgcatgcccaggactctcatga

SEQ ID NO: 4435319 - DNA, 25 bp, Homo sapien
gatttctctgtacccaacacgttca

SEQ ID NO: 4435320 - DNA, 25 bp, Homo sapien
ctgagatttctctgtacccaacacg

SEQ ID NO: 4435321 - DNA, 25 bp, Homo sapien
gagatttctctgtacccaacacgtt

SEQ ID NO: 4435322 - DNA, 25 bp, Homo sapien
atttctctgtacccaacacgttcac

SEQ ID NO: 4435323 - DNA, 25 bp, Homo sapien
aactcagatgctcaaacatggcctt

SEQ ID NO: 4435324 - DNA, 25 bp, Homo sapien
ggctaattcgacagaaatagcaaag

SEQ ID NO: 4435325 - DNA, 25 bp, Homo sapien
ccttctgattttgccggctaattcg

SEQ ID NO: 4435326 - DNA, 25 bp, Homo sapien
gatgctcaaacatggccttctgatt

SEQ ID NO: 4435327 - DNA, 25 bp, Homo sapien
tgaggcccccatatcagatgccact

SEQ ID NO: 4435328 - DNA, 25 bp, Homo sapien
atcagatgccactcgaccaactaag

SEQ ID NO: 4435329 - DNA, 25 bp, Homo sapien
tcgaccaactaagcccagtggaacc

SEQ ID NO: 4435330 - DNA, 25 bp, Homo sapien
acacaaaacttcttgaggcccccat

SEQ ID NO: 4435331 - DNA, 25 bp, Homo sapien
acatccagcggggtggatcccctca

SEQ ID NO: 4435332 - DNA, 25 bp, Homo sapien
cagcgctaactcattgttgtccatc

SEQ ID NO: 4435333 - DNA, 25 bp, Homo sapien
ggtctggttcctctaagctcagcgc

SEQ ID NO: 4435334 - DNA, 25 bp, Homo sapien
taagctcagcgctaactcattgttg

SEQ ID NO: 4435335 - DNA, 25 bp, Homo sapien
taagcctagctagcgtacatctggg

SEQ ID NO: 4435336 - DNA, 25 bp, Homo sapien
ggatggccagaaaaagagatcccca

SEQ ID NO: 4435337 - DNA, 25 bp, Homo sapien
ccagagtgggcccttgagtaatcag

SEQ ID NO: 4435338 - DNA, 25 bp, Homo sapien
tgtaggaacacaccatgtactgtca

SEQ ID NO: 4435339 - DNA, 25 bp, Homo sapien
tcaggaaggacaggtagcgttcccc

SEQ ID NO: 4435340 - DNA, 25 bp, Homo sapien
cagggtatcctttggccagaagcat

SEQ ID NO: 4435341 - DNA, 25 bp, Homo sapien
cacagcctgccaagtaggtcaccac

SEQ ID NO: 4435342 - DNA, 25 bp, Homo sapien
gggttccagccgacatcagggtatc

SEQ ID NO: 4435343 - DNA, 25 bp, Homo sapien
attggttctgccttgatcagatttg

SEQ ID NO: 4435344 - DNA, 25 bp, Homo sapien
ttcacgatccaggtagatggtctca

SEQ ID NO: 4435345 - DNA, 25 bp, Homo sapien
gactgtgaaggtgaccaagatgaat

SEQ ID NO: 4435346 - DNA, 25 bp, Homo sapien
ctatttacataatttggcgagctgt

SEQ ID NO: 4435347 - DNA, 25 bp, Homo sapien
ttagaatttagcaatccgggtagaa

SEQ ID NO: 4435348 - DNA, 25 bp, Homo sapien
gaatttagcaatccgggtagaagaa

SEQ ID NO: 4435349 - DNA, 25 bp, Homo sapien
tagaagaagagccagtcgattcctt

SEQ ID NO: 4435350 - DNA, 25 bp, Homo sapien
tagcaatccgggtagaagaagagcc

SEQ ID NO: 4435351 - DNA, 25 bp, Homo sapien
tgcccaagggcttgcaacaatgctt

SEQ ID NO: 4435352 - DNA, 25 bp, Homo sapien
gagacttgaggtaaactagttttgc

SEQ ID NO: 4435353 - DNA, 25 bp, Homo sapien
tctgcttgagttctaatatgaataa

SEQ ID NO: 4435354 - DNA, 25 bp, Homo sapien
gaatgttcacagtgcctttcttcaa

SEQ ID NO: 4435355 - DNA, 25 bp, Homo sapien
gcttgtgggtcagccaccgatttta

SEQ ID NO: 4435356 - DNA, 25 bp, Homo sapien
aaatgcttgtgggtcagccaccgat

SEQ ID NO: 4435357 - DNA, 25 bp, Homo sapien
gtggaaatgcttgtgggtcagccac

SEQ ID NO: 4435358 - DNA, 25 bp, Homo sapien
ggtcagccaccgattttaccagcat

SEQ ID NO: 4435359 - DNA, 25 bp, Homo sapien
ttataaaccccactcactgcacttg

SEQ ID NO: 4435360 - DNA, 25 bp, Homo sapien
gtcagttagttataaaccccactca

SEQ ID NO: 4435361 - DNA, 25 bp, Homo sapien
tgtggtcagttagttataaacccca

SEQ ID NO: 4435362 - DNA, 25 bp, Homo sapien
gttagttataaaccccactcactgc

SEQ ID NO: 4435363 - DNA, 25 bp, Homo sapien
aggtcgagcgctgggttctcagaga

SEQ ID NO: 4435364 - DNA, 25 bp, Homo sapien
cttctcttttgtatccttgagaggg

SEQ ID NO: 4435365 - DNA, 25 bp, Homo sapien
tgagcagcttgaccacaacgctggc

SEQ ID NO: 4435366 - DNA, 25 bp, Homo sapien
gcactctgggcgtctgatgagcagc

SEQ ID NO: 4435367 - DNA, 25 bp, Homo sapien
ctataagggccgaataaaatgacat

SEQ ID NO: 4435368 - DNA, 25 bp, Homo sapien
gcccatatgcacgatttcttcttcc

SEQ ID NO: 4435369 - DNA, 25 bp, Homo sapien
agcacagcggcccagtagatctata

SEQ ID NO: 4435370 - DNA, 25 bp, Homo sapien
cataattgcattgcccatatgcacg

SEQ ID NO: 4435371 - DNA, 25 bp, Homo sapien
gaccagggagcgcaggatggacctg

SEQ ID NO: 4435372 - DNA, 25 bp, Homo sapien
gatggacctgatgcggatggcttcc

SEQ ID NO: 4435373 - DNA, 25 bp, Homo sapien
gagcgcaggatggacctgatgcgga

SEQ ID NO: 4435374 - DNA, 25 bp, Homo sapien
tcaaggggatgctgatgatcccaac

SEQ ID NO: 4435375 - DNA, 25 bp, Homo sapien
taatgccataaacgcggtccaagaa

SEQ ID NO: 4435376 - DNA, 25 bp, Homo sapien
agctcttaggtcaggtaaaaatcca

SEQ ID NO: 4435377 - DNA, 25 bp, Homo sapien
tggtcagggcagaaattggccgcca

SEQ ID NO: 4435378 - DNA, 25 bp, Homo sapien
cagcaagtggagcagaaaagtttga

SEQ ID NO: 4435379 - DNA, 25 bp, Homo sapien
gaatccatccaagttaaggtatttg

SEQ ID NO: 4435380 - DNA, 25 bp, Homo sapien
taacccatgcaggtggaatccatcc

SEQ ID NO: 4435381 - DNA, 25 bp, Homo sapien
tccatttctggataacccatgcagg

SEQ ID NO: 4435382 - DNA, 25 bp, Homo sapien
ttgccgctgacaacccatcacagag

SEQ ID NO: 4435383 - DNA, 25 bp, Homo sapien
cctaatactgtcatatataccattt

SEQ ID NO: 4435384 - DNA, 25 bp, Homo sapien
aatactgtcatatataccatttatc

SEQ ID NO: 4435385 - DNA, 25 bp, Homo sapien
ctgtcatatataccatttatcatca

SEQ ID NO: 4435386 - DNA, 25 bp, Homo sapien
tactgtcatatataccatttatcat

SEQ ID NO: 4435387 - DNA, 25 bp, Homo sapien
ttgtgctttggtgagggaacgtccc

SEQ ID NO: 4435388 - DNA, 25 bp, Homo sapien
tagtgcaagcgcagcctctgtggtg

SEQ ID NO: 4435389 - DNA, 25 bp, Homo sapien
cacatcttgtgaggagcgggagcac

SEQ ID NO: 4435390 - DNA, 25 bp, Homo sapien
cttggatagcctgtatattgtctgc

SEQ ID NO: 4435391 - DNA, 25 bp, Homo sapien
gaagacagcccttaatctgaacagt

SEQ ID NO: 4435392 - DNA, 25 bp, Homo sapien
aaatagtcttctggtccatcaaccg

SEQ ID NO: 4435393 - DNA, 25 bp, Homo sapien
tcagagtctggcttctatgtaagat

SEQ ID NO: 4435394 - DNA, 25 bp, Homo sapien
caaccgtaatgggtaaagcctgagc

SEQ ID NO: 4435395 - DNA, 25 bp, Homo sapien
gagttgcggcacatcaaaaacgagg

SEQ ID NO: 4435396 - DNA, 25 bp, Homo sapien
aaaaacgaggcgtcgcaggagttgc

SEQ ID NO: 4435397 - DNA, 25 bp, Homo sapien
cattttgcagtattcattgagttgc

SEQ ID NO: 4435398 - DNA, 25 bp, Homo sapien
cgcaggagttgctgtaacatggaag

SEQ ID NO: 4435399 - DNA, 25 bp, Homo sapien
gggcagaagttaccagtaatgtttc

SEQ ID NO: 4435400 - DNA, 25 bp, Homo sapien
gcagaagttaccagtaatgtttcca

SEQ ID NO: 4435401 - DNA, 25 bp, Homo sapien
agagggcagaagttaccagtaatgt

SEQ ID NO: 4435402 - DNA, 25 bp, Homo sapien
agtagagggcagaagttaccagtaa

SEQ ID NO: 4435403 - DNA, 25 bp, Homo sapien
tctctcgtcaattactacccgttgt

SEQ ID NO: 4435404 - DNA, 25 bp, Homo sapien
gctgcaagtcgtgggtctgaagatt

SEQ ID NO: 4435405 - DNA, 25 bp, Homo sapien
tgtaattctggaagatctttggggg

SEQ ID NO: 4435406 - DNA, 25 bp, Homo sapien
cacaccccagtgactttacagcagt

SEQ ID NO: 4435407 - DNA, 25 bp, Homo sapien
cctgaaggcaggcagtaatacttcc

SEQ ID NO: 4435408 - DNA, 25 bp, Homo sapien
tatgggagagcgagtcaaaaatccc

SEQ ID NO: 4435409 - DNA, 25 bp, Homo sapien
tctccgttaggtgcagctcttcttc

SEQ ID NO: 4435410 - DNA, 25 bp, Homo sapien
ccagaaaagcttctccgttaggtgc

SEQ ID NO: 4435411 - DNA, 25 bp, Homo sapien
ggccattcggaaaagatctgggtca

SEQ ID NO: 4435412 - DNA, 25 bp, Homo sapien
tagcactgagacaaggcagggccat

SEQ ID NO: 4435413 - DNA, 25 bp, Homo sapien
ccaacgtggctgtgattctggtatc

SEQ ID NO: 4435414 - DNA, 25 bp, Homo sapien
gcaaggccccagctatagcactgag

SEQ ID NO: 4435415 - DNA, 25 bp, Homo sapien
ccatttatcatgtgaatgctcagca

SEQ ID NO: 4435416 - DNA, 25 bp, Homo sapien
tcatgtgaatgctcagcatacttgg

SEQ ID NO: 4435417 - DNA, 25 bp, Homo sapien
catacttggtgacgatgtattccaa

SEQ ID NO: 4435418 - DNA, 25 bp, Homo sapien
gaatgctcagcatacttggtgacga

SEQ ID NO: 4435419 - DNA, 25 bp, Homo sapien
ttgtcagttggatgataatccctac

SEQ ID NO: 4435420 - DNA, 25 bp, Homo sapien
attgtcagttggatgataatcccta

SEQ ID NO: 4435421 - DNA, 25 bp, Homo sapien
ttagacaaatcaggcagatttccag

SEQ ID NO: 4435422 - DNA, 25 bp, Homo sapien
gtagaaatgttctcagttcaaatat

SEQ ID NO: 4435423 - DNA, 25 bp, Homo sapien
tgtagaaatgttctcagttcaaata

SEQ ID NO: 4435424 - DNA, 25 bp, Homo sapien
tagaaatgttctcagttcaaatatc

SEQ ID NO: 4435425 - DNA, 25 bp, Homo sapien
ctgtagaaatgttctcagttcaaat

SEQ ID NO: 4435426 - DNA, 25 bp, Homo sapien
ttaatgtcttgaaaggccttatcag

SEQ ID NO: 4435427 - DNA, 25 bp, Homo sapien
cttctccgttaatgtcttgaaaggc

SEQ ID NO: 4435428 - DNA, 25 bp, Homo sapien
tccgttaatgtcttgaaaggcctta

SEQ ID NO: 4435429 - DNA, 25 bp, Homo sapien
aaggccttatcagtgggtgggtctt

SEQ ID NO: 4435430 - DNA, 25 bp, Homo sapien
atggttttcagggactctcgcgcag

SEQ ID NO: 4435431 - DNA, 25 bp, Homo sapien
tggcctgggacacacttcgaagctt

SEQ ID NO: 4435432 - DNA, 25 bp, Homo sapien
tcattttcccgctgttgaaccaaag

SEQ ID NO: 4435433 - DNA, 25 bp, Homo sapien
tgttgaaccaaagcttctccctctt

SEQ ID NO: 4435434 - DNA, 25 bp, Homo sapien
agagcacaacgtttgagaggtcgag

SEQ ID NO: 4435435 - DNA, 25 bp, Homo sapien
agcacaacgtttgagaggtcgaggg

SEQ ID NO: 4435436 - DNA, 25 bp, Homo sapien
ggagagcacaacgtttgagaggtcg

SEQ ID NO: 4435437 - DNA, 25 bp, Homo sapien
ctggagagcacaacgtttgagaggt

SEQ ID NO: 4435438 - DNA, 25 bp, Homo sapien
gatagttctcagccacgacctccac

SEQ ID NO: 4435439 - DNA, 25 bp, Homo sapien
tgatagttctcagccacgacctcca

SEQ ID NO: 4435440 - DNA, 25 bp, Homo sapien
tgtgatagttctcagccacgacctc

SEQ ID NO: 4435441 - DNA, 25 bp, Homo sapien
gtgatagttctcagccacgacctcc

SEQ ID NO: 4435442 - DNA, 25 bp, Homo sapien
tcacttggaggaacttaaacaggtc

SEQ ID NO: 4435443 - DNA, 25 bp, Homo sapien
cagtcaaggtgtcatatggtaccag

SEQ ID NO: 4435444 - DNA, 25 bp, Homo sapien
gaaactatgatgccattcacttgga

SEQ ID NO: 4435445 - DNA, 25 bp, Homo sapien
catatggtaccagaagagggtggct

SEQ ID NO: 4435446 - DNA, 25 bp, Homo sapien
atcaatgctcaacgaaataagagag

SEQ ID NO: 4435447 - DNA, 25 bp, Homo sapien
tcaatgctcaacgaaataagagagg

SEQ ID NO: 4435448 - DNA, 25 bp, Homo sapien
caaatcaatgctcaacgaaataaga

SEQ ID NO: 4435449 - DNA, 25 bp, Homo sapien
acaaatcaatgctcaacgaaataag

SEQ ID NO: 4435450 - DNA, 25 bp, Homo sapien
gaacttataggcaaacctcttctcc

SEQ ID NO: 4435451 - DNA, 25 bp, Homo sapien
cttgagcagaatcaacgtatttcag

SEQ ID NO: 4435452 - DNA, 25 bp, Homo sapien
cttcttcaagaacttataggcaaac

SEQ ID NO: 4435453 - DNA, 25 bp, Homo sapien
taaattcttgagcagaatcaacgta

SEQ ID NO: 4435454 - DNA, 25 bp, Homo sapien
gcaaagaatttgatctcctggtcac

SEQ ID NO: 4435455 - DNA, 25 bp, Homo sapien
cctggtcacggggagacttttcagt

SEQ ID NO: 4435456 - DNA, 25 bp, Homo sapien
gacttttcagttttcccactgctga

SEQ ID NO: 4435457 - DNA, 25 bp, Homo sapien
gttttcccactgctgacaatggctt

SEQ ID NO: 4435458 - DNA, 25 bp, Homo sapien
actggtcaaccagcgggaggagaac

SEQ ID NO: 4435459 - DNA, 25 bp, Homo sapien
tccgctgctgctaaggggcttcaga

SEQ ID NO: 4435460 - DNA, 25 bp, Homo sapien
aagtagaggcaatgactggtgaagt

SEQ ID NO: 4435461 - DNA, 25 bp, Homo sapien
ttatgggaggcatatccgctgctgc

SEQ ID NO: 4435462 - DNA, 25 bp, Homo sapien
cagccgtgacaaatggtgcctggtt

SEQ ID NO: 4435463 - DNA, 25 bp, Homo sapien
gacaaatggtgcctggttgaacaaa

SEQ ID NO: 4435464 - DNA, 25 bp, Homo sapien
gtattccagccgtgacaaatggtgc

SEQ ID NO: 4435465 - DNA, 25 bp, Homo sapien
ctaggttgtattccagccgtgacaa

SEQ ID NO: 4435466 - DNA, 25 bp, Homo sapien
agggcgaagattgcaaagaagagaa

SEQ ID NO: 4435467 - DNA, 25 bp, Homo sapien
gcgcaagggcgaagattgcaaagaa

SEQ ID NO: 4435468 - DNA, 25 bp, Homo sapien
gaaaaggtggcgcaagggcgaagat

SEQ ID NO: 4435469 - DNA, 25 bp, Homo sapien
aaggtggcgcaagggcgaagattgc

SEQ ID NO: 4435470 - DNA, 25 bp, Homo sapien
ttagcccagagttatgagggccccg

SEQ ID NO: 4435471 - DNA, 25 bp, Homo sapien
ccagagttatgagggccccgagtcc

SEQ ID NO: 4435472 - DNA, 25 bp, Homo sapien
tagcccagagttatgagggccccga

SEQ ID NO: 4435473 - DNA, 25 bp, Homo sapien
gcccagagttatgagggccccgagt

SEQ ID NO: 4435474 - DNA, 25 bp, Homo sapien
tgtctaacgagagcggcaagtttgc

SEQ ID NO: 4435475 - DNA, 25 bp, Homo sapien
aattctgtgtctaacgagagcggca

SEQ ID NO: 4435476 - DNA, 25 bp, Homo sapien
tctgtgtctaacgagagcggcaagt

SEQ ID NO: 4435477 - DNA, 25 bp, Homo sapien
agagggaaattctgtgtctaacgag

SEQ ID NO: 4435478 - DNA, 25 bp, Homo sapien
cttgtgtcaagtgtctgagctaaga

SEQ ID NO: 4435479 - DNA, 25 bp, Homo sapien
tctgagctaagatgtgaagacagct

SEQ ID NO: 4435480 - DNA, 25 bp, Homo sapien
gctaagatgtgaagacagctcacca

SEQ ID NO: 4435481 - DNA, 25 bp, Homo sapien
caagtgtctgagctaagatgtgaag

SEQ ID NO: 4435482 - DNA, 25 bp, Homo sapien
cctttaatctgcgttcgggaatggg

SEQ ID NO: 4435483 - DNA, 25 bp, Homo sapien
tgctcaaagatggacgtcaggatgg

SEQ ID NO: 4435484 - DNA, 25 bp, Homo sapien
gagtagatccattccaaactgatgc

SEQ ID NO: 4435485 - DNA, 25 bp, Homo sapien
tcaaagaatgctcgtaacccagcct

SEQ ID NO: 4435486 - DNA, 25 bp, Homo sapien
ccacgacaaataccagtagaactca

SEQ ID NO: 4435487 - DNA, 25 bp, Homo sapien
atccacgacaaataccagtagaact

SEQ ID NO: 4435488 - DNA, 25 bp, Homo sapien
cacgacaaataccagtagaactcac

SEQ ID NO: 4435489 - DNA, 25 bp, Homo sapien
tccacgacaaataccagtagaactc

SEQ ID NO: 4435490 - DNA, 25 bp, Homo sapien
cctatctggggccatgtgcacatac

SEQ ID NO: 4435491 - DNA, 25 bp, Homo sapien
ctcctatctggggccatgtgcacat

SEQ ID NO: 4435492 - DNA, 25 bp, Homo sapien
tcctatctggggccatgtgcacata

SEQ ID NO: 4435493 - DNA, 25 bp, Homo sapien
aagggagtagaggctgcacagtatg

SEQ ID NO: 4435494 - DNA, 25 bp, Homo sapien
caagggagtagaggctgcacagtat

SEQ ID NO: 4435495 - DNA, 25 bp, Homo sapien
ccaagggagtagaggctgcacagta

SEQ ID NO: 4435496 - DNA, 25 bp, Homo sapien
agacgccagcaaaaggtggtagaga

SEQ ID NO: 4435497 - DNA, 25 bp, Homo sapien
caaaaggtggtagagaaatggtggg

SEQ ID NO: 4435498 - DNA, 25 bp, Homo sapien
aggagacgccagcaaaaggtggtag

SEQ ID NO: 4435499 - DNA, 25 bp, Homo sapien
cagcaaaaggtggtagagaaatggt

SEQ ID NO: 4435500 - DNA, 25 bp, Homo sapien
tgccagcgaggccagacattctcca

SEQ ID NO: 4435501 - DNA, 25 bp, Homo sapien
ttgtagcgattaagggtgggctcca

SEQ ID NO: 4435502 - DNA, 25 bp, Homo sapien
ccactggtatggcagctgccagcga

SEQ ID NO: 4435503 - DNA, 25 bp, Homo sapien
tgttgaagaccgagagtggattgta

SEQ ID NO: 4435504 - DNA, 25 bp, Homo sapien
catggacttgaagagtataactggg

SEQ ID NO: 4435505 - DNA, 25 bp, Homo sapien
gcgtgtcaatatgtttgctaagaaa

SEQ ID NO: 4435506 - DNA, 25 bp, Homo sapien
tctttagaagcacgcctctccatgg

SEQ ID NO: 4435507 - DNA, 25 bp, Homo sapien
catgaggacaaaaatgtgtcatcag

SEQ ID NO: 4435508 - DNA, 25 bp, Homo sapien
tctctatgctatggaataggcccag

SEQ ID NO: 4435509 - DNA, 25 bp, Homo sapien
tgaagcactattagcctttccgtag

SEQ ID NO: 4435510 - DNA, 25 bp, Homo sapien
tgcaaagcaatggatcccagcagtc

SEQ ID NO: 4435511 - DNA, 25 bp, Homo sapien
gacaggatgtgcagttgcaaagcaa

SEQ ID NO: 4435512 - DNA, 25 bp, Homo sapien
ttctaccgtgtctggcatccccaga

SEQ ID NO: 4435513 - DNA, 25 bp, Homo sapien
tcaggacacatgtcttctaccgtgt

SEQ ID NO: 4435514 - DNA, 25 bp, Homo sapien
acatgtcttctaccgtgtctggcat

SEQ ID NO: 4435515 - DNA, 25 bp, Homo sapien
gggatgtcaggacacatgtcttcta

SEQ ID NO: 4435516 - DNA, 25 bp, Homo sapien
ggtaagatcacctcgatgacatggg

SEQ ID NO: 4435517 - DNA, 25 bp, Homo sapien
agactgaggtgttcagaggtgacct

SEQ ID NO: 4435518 - DNA, 25 bp, Homo sapien
aggtgaccttggtgcagcatggccc

SEQ ID NO: 4435519 - DNA, 25 bp, Homo sapien
caccagtaggacaagtagttgcaga

SEQ ID NO: 4435520 - DNA, 25 bp, Homo sapien
cctttgccatcggctttcaactgct

SEQ ID NO: 4435521 - DNA, 25 bp, Homo sapien
gaggaccgcgaactcgtccaggatg

SEQ ID NO: 4435522 - DNA, 25 bp, Homo sapien
tcctgcaccgtcttgacagcctttt

SEQ ID NO: 4435523 - DNA, 25 bp, Homo sapien
tttgctgatgatgggctgtgcatac

SEQ ID NO: 4435524 - DNA, 25 bp, Homo sapien
gtgggtctcttttatcatctgcagt

SEQ ID NO: 4435525 - DNA, 25 bp, Homo sapien
cttttatcatctgcagtgcttgctg

SEQ ID NO: 4435526 - DNA, 25 bp, Homo sapien
caaaaggcagttggaaaactcaagg

SEQ ID NO: 4435527 - DNA, 25 bp, Homo sapien
tgcttgctgccaaaaggcagttgga

SEQ ID NO: 4435528 - DNA, 25 bp, Homo sapien
ggaagagctggtcagaatcagcatc

SEQ ID NO: 4435529 - DNA, 25 bp, Homo sapien
catcaggacttttcagccagttaga

SEQ ID NO: 4435530 - DNA, 25 bp, Homo sapien
agcatcaggacttttcagccagtta

SEQ ID NO: 4435531 - DNA, 25 bp, Homo sapien
gaagacttctgccaccatgcggaag

SEQ ID NO: 4435532 - DNA, 25 bp, Homo sapien
ttttgctgtctccagttaaaaatgc

SEQ ID NO: 4435533 - DNA, 25 bp, Homo sapien
tattaatttcattctgaatcacaaa

SEQ ID NO: 4435534 - DNA, 25 bp, Homo sapien
ttcattctgaatcacaaaattttgc

SEQ ID NO: 4435535 - DNA, 25 bp, Homo sapien
tcttgcttttgctgtctccagttaa

SEQ ID NO: 4435536 - DNA, 25 bp, Homo sapien
ggtcgcctggagtacacatattcaa

SEQ ID NO: 4435537 - DNA, 25 bp, Homo sapien
gtctggatggaatacaagtctcccc

SEQ ID NO: 4435538 - DNA, 25 bp, Homo sapien
tcgcgattttgcgagggagatcagc

SEQ ID NO: 4435539 - DNA, 25 bp, Homo sapien
tttcttgagtgcagccacgatgagg

SEQ ID NO: 4435540 - DNA, 25 bp, Homo sapien
caagttgttccgcagatgttctctg

SEQ ID NO: 4435541 - DNA, 25 bp, Homo sapien
gtgcaagttgttccgcagatgttct

SEQ ID NO: 4435542 - DNA, 25 bp, Homo sapien
tgttccgcagatgttctctgacctc

SEQ ID NO: 4435543 - DNA, 25 bp, Homo sapien
caagtgcaagttgttccgcagatgt

SEQ ID NO: 4435544 - DNA, 25 bp, Homo sapien
tccactgtcttttccggattgaaag

SEQ ID NO: 4435545 - DNA, 25 bp, Homo sapien
agaggttcagttgccattttacagc

SEQ ID NO: 4435546 - DNA, 25 bp, Homo sapien
tgctgaaattctctgcacacgctcc

SEQ ID NO: 4435547 - DNA, 25 bp, Homo sapien
gaacatccttgtagaggttcagttg

SEQ ID NO: 4435548 - DNA, 25 bp, Homo sapien
cttccccattcctcagggcagatgc

SEQ ID NO: 4435549 - DNA, 25 bp, Homo sapien
ttccccattcctcagggcagatgct

SEQ ID NO: 4435550 - DNA, 25 bp, Homo sapien
ggaggggagctttgtatggtccagg

SEQ ID NO: 4435551 - DNA, 25 bp, Homo sapien
cttctggtggcagaagctagtcacc

SEQ ID NO: 4435552 - DNA, 25 bp, Homo sapien
tctggtggcagaagctagtcacctg

SEQ ID NO: 4435553 - DNA, 25 bp, Homo sapien
gaagctagtcacctgtagcccagac

SEQ ID NO: 4435554 - DNA, 25 bp, Homo sapien
gcagaagctagtcacctgtagccca

SEQ ID NO: 4435555 - DNA, 25 bp, Homo sapien
catcggttggtgcacattaggctga

SEQ ID NO: 4435556 - DNA, 25 bp, Homo sapien
agaagagatcacatcggttggtgca

SEQ ID NO: 4435557 - DNA, 25 bp, Homo sapien
gagatcacatcggttggtgcacatt

SEQ ID NO: 4435558 - DNA, 25 bp, Homo sapien
tcacatcggttggtgcacattaggc

SEQ ID NO: 4435559 - DNA, 25 bp, Homo sapien
gcccgtttccgttgctttgataaca

SEQ ID NO: 4435560 - DNA, 25 bp, Homo sapien
cagtttgtgccagacggccttcttg

SEQ ID NO: 4435561 - DNA, 25 bp, Homo sapien
gtagagaggggccatcctgaaacag

SEQ ID NO: 4435562 - DNA, 25 bp, Homo sapien
tttgataacagtttgtgccagacgg

SEQ ID NO: 4435563 - DNA, 25 bp, Homo sapien
cttgattgtcttagccaggccctta

SEQ ID NO: 4435564 - DNA, 25 bp, Homo sapien
ggcccttatactatgcagactgcaa

SEQ ID NO: 4435565 - DNA, 25 bp, Homo sapien
aatagctccataggccaaggattcc

SEQ ID NO: 4435566 - DNA, 25 bp, Homo sapien
ggattaagagtgagagagcacagct

SEQ ID NO: 4435567 - DNA, 25 bp, Homo sapien
cctgagcagagaaatactattggaa

SEQ ID NO: 4435568 - DNA, 25 bp, Homo sapien
cccacctcagcaaaagtagtgtact

SEQ ID NO: 4435569 - DNA, 25 bp, Homo sapien
gatatgtcccagacttttcagcaaa

SEQ ID NO: 4435570 - DNA, 25 bp, Homo sapien
tgaaacacccgaaggcatcgtgcct

SEQ ID NO: 4435571 - DNA, 25 bp, Homo sapien
tcaccacatcaccaaagacactgaa

SEQ ID NO: 4435572 - DNA, 25 bp, Homo sapien
cactgaatcggtctgggtggtcaac

SEQ ID NO: 4435573 - DNA, 25 bp, Homo sapien
tctgcaataagtctgaggacaggaa

SEQ ID NO: 4435574 - DNA, 25 bp, Homo sapien
tctgggtggtcaactctgggccagt

SEQ ID NO: 4435575 - DNA, 25 bp, Homo sapien
tgtttattgacccaagacctgacca

SEQ ID NO: 4435576 - DNA, 25 bp, Homo sapien
agcagaggctgatattcaattacca

SEQ ID NO: 4435577 - DNA, 25 bp, Homo sapien
tccctgagcaagtgagaatattcct

SEQ ID NO: 4435578 - DNA, 25 bp, Homo sapien
tctaagtcagtttaatttccctgag

SEQ ID NO: 4435579 - DNA, 25 bp, Homo sapien
tcccagagacatgtgctttcgagct

SEQ ID NO: 4435580 - DNA, 25 bp, Homo sapien
gagatgtaatttctgcctagctgtc

SEQ ID NO: 4435581 - DNA, 25 bp, Homo sapien
taaaactactgaaggtgcagcccag

SEQ ID NO: 4435582 - DNA, 25 bp, Homo sapien
cagcccagatatgtaaggatggtac

SEQ ID NO: 4435583 - DNA, 25 bp, Homo sapien
cattaaaatgggtataagcctgtca

SEQ ID NO: 4435584 - DNA, 25 bp, Homo sapien
tataagcctgtcatactgagttttt

SEQ ID NO: 4435585 - DNA, 25 bp, Homo sapien
tgggtataagcctgtcatactgagt

SEQ ID NO: 4435586 - DNA, 25 bp, Homo sapien
taaaatgggtataagcctgtcatac

SEQ ID NO: 4435587 - DNA, 25 bp, Homo sapien
caaatcctgtactagtttctcttca

SEQ ID NO: 4435588 - DNA, 25 bp, Homo sapien
gccaaatcctgtactagtttctctt

SEQ ID NO: 4435589 - DNA, 25 bp, Homo sapien
tccaaaatctctgatagccatggag

SEQ ID NO: 4435590 - DNA, 25 bp, Homo sapien
atcctgtactagtttctcttcaaag

SEQ ID NO: 4435591 - DNA, 25 bp, Homo sapien
gagaatgatctgatgtagtgggtca

SEQ ID NO: 4435592 - DNA, 25 bp, Homo sapien
gcgttgcggctaaaatagagaatga

SEQ ID NO: 4435593 - DNA, 25 bp, Homo sapien
atctgatgtagtgggtcaggttgtt

SEQ ID NO: 4435594 - DNA, 25 bp, Homo sapien
cctctccgtgagagcgttgcggcta

SEQ ID NO: 4435595 - DNA, 25 bp, Homo sapien
gccatcatgctggaataggaggtgt

SEQ ID NO: 4435596 - DNA, 25 bp, Homo sapien
gaggtgtacaaagggtcgtcttcca

SEQ ID NO: 4435597 - DNA, 25 bp, Homo sapien
ttggccatcatgctggaataggagg

SEQ ID NO: 4435598 - DNA, 25 bp, Homo sapien
tcatgctggaataggaggtgtacaa

SEQ ID NO: 4435599 - DNA, 25 bp, Homo sapien
caatggtgacctagctggtttaacc

SEQ ID NO: 4435600 - DNA, 25 bp, Homo sapien
ctcttctaccttagtaaggttctgg

SEQ ID NO: 4435601 - DNA, 25 bp, Homo sapien
ttctggtgtaaatgggagacaggaa

SEQ ID NO: 4435602 - DNA, 25 bp, Homo sapien
gtttaaccacagacttgaactcttc

SEQ ID NO: 4435603 - DNA, 25 bp, Homo sapien
caatcaaattaaagggaaatctaat

SEQ ID NO: 4435604 - DNA, 25 bp, Homo sapien
cagacaatcaaattaaagggaaatc

SEQ ID NO: 4435605 - DNA, 25 bp, Homo sapien
aagacagacaatcaaattaaaggga

SEQ ID NO: 4435606 - DNA, 25 bp, Homo sapien
gacagacaatcaaattaaagggaaa

SEQ ID NO: 4435607 - DNA, 25 bp, Homo sapien
cttcatcctcaccactttgacaact

SEQ ID NO: 4435608 - DNA, 25 bp, Homo sapien
ttcttcttcatcctcaccactttga

SEQ ID NO: 4435609 - DNA, 25 bp, Homo sapien
ttcttcatcctcaccactttgacaa

SEQ ID NO: 4435610 - DNA, 25 bp, Homo sapien
tcttcttcatcctcaccactttgac

SEQ ID NO: 4435611 - DNA, 25 bp, Homo sapien
tatcatctgaaggaccatctctgca

SEQ ID NO: 4435612 - DNA, 25 bp, Homo sapien
tcatgcagccgagcttgctgataga

SEQ ID NO: 4435613 - DNA, 25 bp, Homo sapien
tttgctagcgcttatcatctgaagg

SEQ ID NO: 4435614 - DNA, 25 bp, Homo sapien
gctgatagagggttttttgcttctc

SEQ ID NO: 4435615 - DNA, 25 bp, Homo sapien
tgttgcacaccagcattgcctccgt

SEQ ID NO: 4435616 - DNA, 25 bp, Homo sapien
gcattgcctccgttcagaatggcga

SEQ ID NO: 4435617 - DNA, 25 bp, Homo sapien
ctccgttcagaatggcgatccccag

SEQ ID NO: 4435618 - DNA, 25 bp, Homo sapien
agcttcagcgtctcaaccaccatgg

SEQ ID NO: 4435619 - DNA, 25 bp, Homo sapien
gcctgcccagccgctgcaagttccc

SEQ ID NO: 4435620 - DNA, 25 bp, Homo sapien
ctgcccagccgctgcaagttcccgt

SEQ ID NO: 4435621 - DNA, 25 bp, Homo sapien
cccagccgctgcaagttcccgttac

SEQ ID NO: 4435622 - DNA, 25 bp, Homo sapien
tgcccagccgctgcaagttcccgtt

SEQ ID NO: 4435623 - DNA, 25 bp, Homo sapien
gggaaaagcgatgaaaactatacca

SEQ ID NO: 4435624 - DNA, 25 bp, Homo sapien
tgaaaactataccacagagctgacc

SEQ ID NO: 4435625 - DNA, 25 bp, Homo sapien
aagcgatgaaaactataccacagag

SEQ ID NO: 4435626 - DNA, 25 bp, Homo sapien
ctgcaagggagacacgttgtaaggg

SEQ ID NO: 4435627 - DNA, 25 bp, Homo sapien
agactgcataagaccagaaaggctt

SEQ ID NO: 4435628 - DNA, 25 bp, Homo sapien
ctgcaagactgcataagaccagaaa

SEQ ID NO: 4435629 - DNA, 25 bp, Homo sapien
tctcctttaggtaatctagcatttt

SEQ ID NO: 4435630 - DNA, 25 bp, Homo sapien
ttttctcctttaggtaatctagcat

SEQ ID NO: 4435631 - DNA, 25 bp, Homo sapien
gaaacaaggttcagggctacgcacg

SEQ ID NO: 4435632 - DNA, 25 bp, Homo sapien
gcctctcaaatgcattcaaatcaag

SEQ ID NO: 4435633 - DNA, 25 bp, Homo sapien
ttctgcctctcaaatgcattcaaat

SEQ ID NO: 4435634 - DNA, 25 bp, Homo sapien
ctctcaaatgcattcaaatcaagga

SEQ ID NO: 4435635 - DNA, 25 bp, Homo sapien
ttcttcagtcaccatccccaggcct

SEQ ID NO: 4435636 - DNA, 25 bp, Homo sapien
gagcgaaactctgtatggggaaaaa

SEQ ID NO: 4435637 - DNA, 25 bp, Homo sapien
agagcgaaactctgtatggggaaaa

SEQ ID NO: 4435638 - DNA, 25 bp, Homo sapien
gattttaatcaggaagagaatggcc

SEQ ID NO: 4435639 - DNA, 25 bp, Homo sapien
gccttcacattcattagttacttac

SEQ ID NO: 4435640 - DNA, 25 bp, Homo sapien
tgtcagaatggtttggaaaaggaac

SEQ ID NO: 4435641 - DNA, 25 bp, Homo sapien
cacagaacgttgatgagcattggtt

SEQ ID NO: 4435642 - DNA, 25 bp, Homo sapien
tttggatgaatggtgaaaagcccaa

SEQ ID NO: 4435643 - DNA, 25 bp, Homo sapien
ggctgcaaggcacaatgcccaataa

SEQ ID NO: 4435644 - DNA, 25 bp, Homo sapien
gagatcacgcgtgaactcgtcattc

SEQ ID NO: 4435645 - DNA, 25 bp, Homo sapien
actgttatgtccctcacaaagtaac

SEQ ID NO: 4435646 - DNA, 25 bp, Homo sapien
cacaaagtaactgtaggaatctaaa

SEQ ID NO: 4435647 - DNA, 25 bp, Homo sapien
tgtaggaatctaaagagatcacgcg

SEQ ID NO: 4435648 - DNA, 25 bp, Homo sapien
ttggtggcactaaatatcactagcc

SEQ ID NO: 4435649 - DNA, 25 bp, Homo sapien
aattctagttttgcccgagtgctgt

SEQ ID NO: 4435650 - DNA, 25 bp, Homo sapien
tggaagcagcttagccttggtggca

SEQ ID NO: 4435651 - DNA, 25 bp, Homo sapien
ttgaggaacgcattaactgatgtcc

SEQ ID NO: 4435652 - DNA, 25 bp, Homo sapien
cattcacggtggtggtgttgcccat

SEQ ID NO: 4435653 - DNA, 25 bp, Homo sapien
cacggtggtggtgttgcccatctga

SEQ ID NO: 4435654 - DNA, 25 bp, Homo sapien
atgacattcacggtggtggtgttgc

SEQ ID NO: 4435655 - DNA, 25 bp, Homo sapien
cagtgctgatgatgacattcacggt

SEQ ID NO: 4435656 - DNA, 25 bp, Homo sapien
taggatctttcatgcacaaatatcc

SEQ ID NO: 4435657 - DNA, 25 bp, Homo sapien
ggtctctaggatctttcatgcacaa

SEQ ID NO: 4435658 - DNA, 25 bp, Homo sapien
caggtctctaggatctttcatgcac

SEQ ID NO: 4435659 - DNA, 25 bp, Homo sapien
tctctaggatctttcatgcacaaat

SEQ ID NO: 4435660 - DNA, 25 bp, Homo sapien
gtccttccctgaataataccagtag

SEQ ID NO: 4435661 - DNA, 25 bp, Homo sapien
tctgtaagagaattgaaaatctgct

SEQ ID NO: 4435662 - DNA, 25 bp, Homo sapien
agagctttggaaaaattgtgctgtc

SEQ ID NO: 4435663 - DNA, 25 bp, Homo sapien
cctgaataataccagtagaaatcac

SEQ ID NO: 4435664 - DNA, 25 bp, Homo sapien
gtagcgggtactacacgcgcacgac

SEQ ID NO: 4435665 - DNA, 25 bp, Homo sapien
accgcatctggctgtatgatcatct

SEQ ID NO: 4435666 - DNA, 25 bp, Homo sapien
tattttctcaattgcactgtaagct

SEQ ID NO: 4435667 - DNA, 25 bp, Homo sapien
cgcatctggctgtatgatcatctta

SEQ ID NO: 4435668 - DNA, 25 bp, Homo sapien
gagtttcatctgcatattagcaaag

SEQ ID NO: 4435669 - DNA, 25 bp, Homo sapien
tgagccaggctctgttgattaccaa

SEQ ID NO: 4435670 - DNA, 25 bp, Homo sapien
tctgttgattaccaatgcaagggcc

SEQ ID NO: 4435671 - DNA, 25 bp, Homo sapien
gaagccaaccactgcgtcccacagc

SEQ ID NO: 4435672 - DNA, 25 bp, Homo sapien
gagatacccctgagctatctgatcc

SEQ ID NO: 4435673 - DNA, 25 bp, Homo sapien
agaacagaaacaggagatacccctg

SEQ ID NO: 4435674 - DNA, 25 bp, Homo sapien
agatacccctgagctatctgatccc

SEQ ID NO: 4435675 - DNA, 25 bp, Homo sapien
gaacagaaacaggagatacccctga

SEQ ID NO: 4435676 - DNA, 25 bp, Homo sapien
cttcagcagctcgatctgactggaa

SEQ ID NO: 4435677 - DNA, 25 bp, Homo sapien
gagatccaagagttccttcagcagc

SEQ ID NO: 4435678 - DNA, 25 bp, Homo sapien
cctgaaggagatccaagagttcctt

SEQ ID NO: 4435679 - DNA, 25 bp, Homo sapien
aaggagatccaagagttccttcagc

SEQ ID NO: 4435680 - DNA, 25 bp, Homo sapien
cttccaggagggacagaagcatcac

SEQ ID NO: 4435681 - DNA, 25 bp, Homo sapien
cacttcaggcgggaatcgtttggca

SEQ ID NO: 4435682 - DNA, 25 bp, Homo sapien
gaggcacaggccatagcaaatgcag

SEQ ID NO: 4435683 - DNA, 25 bp, Homo sapien
aattgggttgggtcaggcatgtcac

SEQ ID NO: 4435684 - DNA, 25 bp, Homo sapien
gctggctcatggaaccggtctacaa

SEQ ID NO: 4435685 - DNA, 25 bp, Homo sapien
tgccttctcggattctacttttcct

SEQ ID NO: 4435686 - DNA, 25 bp, Homo sapien
cagtaacttggtctgatagatttcc

SEQ ID NO: 4435687 - DNA, 25 bp, Homo sapien
caggtactcagcttgctcctcttct

SEQ ID NO: 4435688 - DNA, 25 bp, Homo sapien
tctgtccacaggtactcagcttgct

SEQ ID NO: 4435689 - DNA, 25 bp, Homo sapien
gccctttaaagaaattggctgtgaa

SEQ ID NO: 4435690 - DNA, 25 bp, Homo sapien
tcattcctttccaagttacagttcc

SEQ ID NO: 4435691 - DNA, 25 bp, Homo sapien
ccaagttacagttccaggagcctct

SEQ ID NO: 4435692 - DNA, 25 bp, Homo sapien
ggatgtagccattctgtggcctcag

SEQ ID NO: 4435693 - DNA, 25 bp, Homo sapien
ctggatgtagccattctgtggcctc

SEQ ID NO: 4435694 - DNA, 25 bp, Homo sapien
gccttgaagtgctgtgtgactgcat

SEQ ID NO: 4435695 - DNA, 25 bp, Homo sapien
aactgtaagtggtctaggctcgcag

SEQ ID NO: 4435696 - DNA, 25 bp, Homo sapien
cacgcagcaagcagtctattaggaa

SEQ ID NO: 4435697 - DNA, 25 bp, Homo sapien
gactgcattttcgtgatcactccac

SEQ ID NO: 4435698 - DNA, 25 bp, Homo sapien
gagcaaggaacctcaggttgtagaa

SEQ ID NO: 4435699 - DNA, 25 bp, Homo sapien
tgtagaaattcctggccaggtaatg

SEQ ID NO: 4435700 - DNA, 25 bp, Homo sapien
tagcgaaggctacaaacagagcaag

SEQ ID NO: 4435701 - DNA, 25 bp, Homo sapien
caggatgaagttgatagcgaaggct

SEQ ID NO: 4435702 - DNA, 25 bp, Homo sapien
aaaagaacctcagccattgggctct

SEQ ID NO: 4435703 - DNA, 25 bp, Homo sapien
aaagaacctcagccattgggctctc

SEQ ID NO: 4435704 - DNA, 25 bp, Homo sapien
ctcaaaatacacactcgcttattaa

SEQ ID NO: 4435705 - DNA, 25 bp, Homo sapien
aaatacacactcgcttattaaacat

SEQ ID NO: 4435706 - DNA, 25 bp, Homo sapien
aaagaataccatcgcttcttcctct

SEQ ID NO: 4435707 - DNA, 25 bp, Homo sapien
aggacaaagaataccatcgcttctt

SEQ ID NO: 4435708 - DNA, 25 bp, Homo sapien
cctcttcctcgtcattaaaggaatt

SEQ ID NO: 4435709 - DNA, 25 bp, Homo sapien
aaaggaattccataggtttgcaaca

SEQ ID NO: 4435710 - DNA, 25 bp, Homo sapien
actagagagatgatggtatggatga

SEQ ID NO: 4435711 - DNA, 25 bp, Homo sapien
ggcagtagtagcccaccacacagac

SEQ ID NO: 4435712 - DNA, 25 bp, Homo sapien
gttggtgccatatacccggtgctct

SEQ ID NO: 4435713 - DNA, 25 bp, Homo sapien
gggttggtgccatatacccggtgct

SEQ ID NO: 4435714 - DNA, 25 bp, Homo sapien
gagcagcaatctccttatagtggaa

SEQ ID NO: 4435715 - DNA, 25 bp, Homo sapien
gactccttgacccatgctagtgtgc

SEQ ID NO: 4435716 - DNA, 25 bp, Homo sapien
gaggatggttactcagagcaggctt

SEQ ID NO: 4435717 - DNA, 25 bp, Homo sapien
gagtgcctagttgtgggatcaaagc

SEQ ID NO: 4435718 - DNA, 25 bp, Homo sapien
tgttgatcaccaagcggtcccactg

SEQ ID NO: 4435719 - DNA, 25 bp, Homo sapien
cggtgatatataggccatcaaactc

SEQ ID NO: 4435720 - DNA, 25 bp, Homo sapien
cttcagatggctgttcggtgatata

SEQ ID NO: 4435721 - DNA, 25 bp, Homo sapien
ggtgtgttgatcaccaagcggtccc

SEQ ID NO: 4435722 - DNA, 25 bp, Homo sapien
ccagagaccacccaagttggtgata

SEQ ID NO: 4435723 - DNA, 25 bp, Homo sapien
tctagaacacaacagttccctattc

SEQ ID NO: 4435724 - DNA, 25 bp, Homo sapien
aacagttccctattctccagagacc

SEQ ID NO: 4435725 - DNA, 25 bp, Homo sapien
ggagacctcctactattcactgacc

SEQ ID NO: 4435726 - DNA, 25 bp, Homo sapien
cacatcaagaaacgtttcagtttga

SEQ ID NO: 4435727 - DNA, 25 bp, Homo sapien
cattcttaacatcaaggaaaacaca

SEQ ID NO: 4435728 - DNA, 25 bp, Homo sapien
caaagaattttaagatctgattgaa

SEQ ID NO: 4435729 - DNA, 25 bp, Homo sapien
gtttgtgtcctgctcaccaaagaat

SEQ ID NO: 4435730 - DNA, 25 bp, Homo sapien
ctttctctttacaaacttgtcccag

SEQ ID NO: 4435731 - DNA, 25 bp, Homo sapien
aacccagaagttcagcaatgcgttc

SEQ ID NO: 4435732 - DNA, 25 bp, Homo sapien
gagaagccgcttctgctttggtctc

SEQ ID NO: 4435733 - DNA, 25 bp, Homo sapien
tggtctcttctactgggctaaagtc

SEQ ID NO: 4435734 - DNA, 25 bp, Homo sapien
caatgcgttctgctccgtagagatc

SEQ ID NO: 4435735 - DNA, 25 bp, Homo sapien
tcagtaaaaacaactccaagcttcc

SEQ ID NO: 4435736 - DNA, 25 bp, Homo sapien
gttgtcagtaaaaacaactccaagc

SEQ ID NO: 4435737 - DNA, 25 bp, Homo sapien
ttccagatatggtacttcatgtcta

SEQ ID NO: 4435738 - DNA, 25 bp, Homo sapien
ggtacttcatgtctatggaacttag

SEQ ID NO: 4435739 - DNA, 25 bp, Homo sapien
gttcccccagcacgtataaggctct

SEQ ID NO: 4435740 - DNA, 25 bp, Homo sapien
cacgtataaggctcttggtctttga

SEQ ID NO: 4435741 - DNA, 25 bp, Homo sapien
tcttggtctttgataagcaatccct

SEQ ID NO: 4435742 - DNA, 25 bp, Homo sapien
catccctgaactggggtatagaatt

SEQ ID NO: 4435743 - DNA, 25 bp, Homo sapien
aatggtcctcagtgtcttgaagccc

SEQ ID NO: 4435744 - DNA, 25 bp, Homo sapien
gactgacatggttgtataccaggca

SEQ ID NO: 4435745 - DNA, 25 bp, Homo sapien
gccattgtgagttacagatgacaga

SEQ ID NO: 4435746 - DNA, 25 bp, Homo sapien
cattgcgatgtccaataggtgagca

SEQ ID NO: 4435747 - DNA, 25 bp, Homo sapien
catatcgggctcgtcatcgtcttcg

SEQ ID NO: 4435748 - DNA, 25 bp, Homo sapien
tcatgtcgtcgcacttcatatcggg

SEQ ID NO: 4435749 - DNA, 25 bp, Homo sapien
gaagttgaaagccaccacagtatag

SEQ ID NO: 4435750 - DNA, 25 bp, Homo sapien
tatagagataaaccaccacggccag

SEQ ID NO: 4435751 - DNA, 25 bp, Homo sapien
gctggctgtccgcaaagaacctccg

SEQ ID NO: 4435752 - DNA, 25 bp, Homo sapien
tggctgtccgcaaagaacctccgac

SEQ ID NO: 4435753 - DNA, 25 bp, Homo sapien
tgtccgcaaagaacctccgactggc

SEQ ID NO: 4435754 - DNA, 25 bp, Homo sapien
gctgctggctgtccgcaaagaacct

SEQ ID NO: 4435755 - DNA, 25 bp, Homo sapien
ggtcaaaggtaatggacttttctgc

SEQ ID NO: 4435756 - DNA, 25 bp, Homo sapien
gttctgcaggtttgagccaatctag

SEQ ID NO: 4435757 - DNA, 25 bp, Homo sapien
agccaatctaggcacgggctccctg

SEQ ID NO: 4435758 - DNA, 25 bp, Homo sapien
aggtaatggacttttctgctcctcc

SEQ ID NO: 4435759 - DNA, 25 bp, Homo sapien
tggccagcaagatgacaatgacgaa

SEQ ID NO: 4435760 - DNA, 25 bp, Homo sapien
tcataaggatcaccagcagggtctt

SEQ ID NO: 4435761 - DNA, 25 bp, Homo sapien
gatacatttcataaggatcaccagc

SEQ ID NO: 4435762 - DNA, 25 bp, Homo sapien
tcccacgtacatgtggaaaaggtaa

SEQ ID NO: 4435763 - DNA, 25 bp, Homo sapien
tagtggttcaggggtagaggaatga

SEQ ID NO: 4435764 - DNA, 25 bp, Homo sapien
ggttcaggggtagaggaatgataaa

SEQ ID NO: 4435765 - DNA, 25 bp, Homo sapien
tggttcaggggtagaggaatgataa

SEQ ID NO: 4435766 - DNA, 25 bp, Homo sapien
gtggttcaggggtagaggaatgata

SEQ ID NO: 4435767 - DNA, 25 bp, Homo sapien
atgttaaatacaaagacaaagcaat

SEQ ID NO: 4435768 - DNA, 25 bp, Homo sapien
ctggaatgttaaatacaaagacaaa

SEQ ID NO: 4435769 - DNA, 25 bp, Homo sapien
ggaatgttaaatacaaagacaaagc

SEQ ID NO: 4435770 - DNA, 25 bp, Homo sapien
gaatgttaaatacaaagacaaagca

SEQ ID NO: 4435771 - DNA, 25 bp, Homo sapien
tagctctccgaaagcatcaataata

SEQ ID NO: 4435772 - DNA, 25 bp, Homo sapien
tctcgtacttgttcctgctggtctc

SEQ ID NO: 4435773 - DNA, 25 bp, Homo sapien
tgctggtctcttagctctccgaaag

SEQ ID NO: 4435774 - DNA, 25 bp, Homo sapien
tatcttctcgtacttgttcctgctg

SEQ ID NO: 4435775 - DNA, 25 bp, Homo sapien
cttgtaatgtatgtgtttcaaaacc

SEQ ID NO: 4435776 - DNA, 25 bp, Homo sapien
aagtagttggctaagttgtgctctt

SEQ ID NO: 4435777 - DNA, 25 bp, Homo sapien
tcaaaaccatgaggggttgtgtcaa

SEQ ID NO: 4435778 - DNA, 25 bp, Homo sapien
gtcaaagtagtcattgccaatccca

SEQ ID NO: 4435779 - DNA, 25 bp, Homo sapien
ctgacccgtgtgctctgtttcatct

SEQ ID NO: 4435780 - DNA, 25 bp, Homo sapien
tgacccgtgtgctctgtttcatctt

SEQ ID NO: 4435781 - DNA, 25 bp, Homo sapien
gacccgtgtgctctgtttcatcttt

SEQ ID NO: 4435782 - DNA, 25 bp, Homo sapien
aatcccaacacctttcttggtacat

SEQ ID NO: 4435783 - DNA, 25 bp, Homo sapien
gcagtcaccggctgggaagaaatcc

SEQ ID NO: 4435784 - DNA, 25 bp, Homo sapien
cccaacacctttcttggtacatctt

SEQ ID NO: 4435785 - DNA, 25 bp, Homo sapien
ttggtacatcttccagacataagat

SEQ ID NO: 4435786 - DNA, 25 bp, Homo sapien
aagctgatcttcatattgtttacga

SEQ ID NO: 4435787 - DNA, 25 bp, Homo sapien
caagctgatcttcatattgtttacg

SEQ ID NO: 4435788 - DNA, 25 bp, Homo sapien
gctgatcttcatattgtttacgaaa

SEQ ID NO: 4435789 - DNA, 25 bp, Homo sapien
ccaagctgatcttcatattgtttac

SEQ ID NO: 4435790 - DNA, 25 bp, Homo sapien
taccatgggaaaaattagactgcag

SEQ ID NO: 4435791 - DNA, 25 bp, Homo sapien
gacaggttctctcccacagtgtatg

SEQ ID NO: 4435792 - DNA, 25 bp, Homo sapien
agagcagctccactacttacaaggg

SEQ ID NO: 4435793 - DNA, 25 bp, Homo sapien
gagttcagaccctatgagtcacaag

SEQ ID NO: 4435794 - DNA, 25 bp, Homo sapien
tgaactctagtttttgtcctcccag

SEQ ID NO: 4435795 - DNA, 25 bp, Homo sapien
taagcagccctaaatgttaccctga

SEQ ID NO: 4435796 - DNA, 25 bp, Homo sapien
ggttcctcgttctcagcaagactgg

SEQ ID NO: 4435797 - DNA, 25 bp, Homo sapien
tcactgccttgggaactctcatgtc

SEQ ID NO: 4435798 - DNA, 25 bp, Homo sapien
tgaaagccttggttttccaagactc

SEQ ID NO: 4435799 - DNA, 25 bp, Homo sapien
aggatgcagtcatcagggggtcccg

SEQ ID NO: 4435800 - DNA, 25 bp, Homo sapien
cgcctgaaagccttggttttccaag

SEQ ID NO: 4435801 - DNA, 25 bp, Homo sapien
gatgcagtcatcagggggtcccgcc

SEQ ID NO: 4435802 - DNA, 25 bp, Homo sapien
tggttgaggacatgttctgcagggg

SEQ ID NO: 4435803 - DNA, 25 bp, Homo sapien
tcctggttgaggacatgttctgcag

SEQ ID NO: 4435804 - DNA, 25 bp, Homo sapien
cctggttgaggacatgttctgcagg

SEQ ID NO: 4435805 - DNA, 25 bp, Homo sapien
tttcagtaacttggtgtcctggttg

SEQ ID NO: 4435806 - DNA, 25 bp, Homo sapien
taatctgttcgtcaagacactggtg

SEQ ID NO: 4435807 - DNA, 25 bp, Homo sapien
taagcggcggttataccagttataa

SEQ ID NO: 4435808 - DNA, 25 bp, Homo sapien
gacactggtgcttttatagggcccc

SEQ ID NO: 4435809 - DNA, 25 bp, Homo sapien
gaatgatttgtagcacttatgaaga

SEQ ID NO: 4435810 - DNA, 25 bp, Homo sapien
gccgtatccatcgttggtagtcatt

SEQ ID NO: 4435811 - DNA, 25 bp, Homo sapien
tcctcattgtttgtgccgtatccat

SEQ ID NO: 4435812 - DNA, 25 bp, Homo sapien
tcattgtttgtgccgtatccatcgt

SEQ ID NO: 4435813 - DNA, 25 bp, Homo sapien
ctcattgtttgtgccgtatccatcg

SEQ ID NO: 4435814 - DNA, 25 bp, Homo sapien
tgtgatactggagctgccagcgtgt

SEQ ID NO: 4435815 - DNA, 25 bp, Homo sapien
gaggagggacattctttcaggtgtc

SEQ ID NO: 4435816 - DNA, 25 bp, Homo sapien
agctgccagcgtgtgaggagggaca

SEQ ID NO: 4435817 - DNA, 25 bp, Homo sapien
ataacctttgtgatactggagctgc

SEQ ID NO: 4435818 - DNA, 25 bp, Homo sapien
tgagatgcctcgaattttccacgtc

SEQ ID NO: 4435819 - DNA, 25 bp, Homo sapien
ggcctgagatgcctcgaattttcca

SEQ ID NO: 4435820 - DNA, 25 bp, Homo sapien
cctgagatgcctcgaattttccacg

SEQ ID NO: 4435821 - DNA, 25 bp, Homo sapien
gagatgcctcgaattttccacgtct

SEQ ID NO: 4435822 - DNA, 25 bp, Homo sapien
tcttttttcttcgagcatcttgtag

SEQ ID NO: 4435823 - DNA, 25 bp, Homo sapien
gataacctgtagtgtttctgaaaca

SEQ ID NO: 4435824 - DNA, 25 bp, Homo sapien
tcttcgagcatcttgtagaactaat

SEQ ID NO: 4435825 - DNA, 25 bp, Homo sapien
ttaggaatgagggataacctgtagt

SEQ ID NO: 4435826 - DNA, 25 bp, Homo sapien
aacactaggagcaccccgtttggct

SEQ ID NO: 4435827 - DNA, 25 bp, Homo sapien
tcttgcgcttgactttggacaccct

SEQ ID NO: 4435828 - DNA, 25 bp, Homo sapien
taattatgcgtccatcctgaggtat

SEQ ID NO: 4435829 - DNA, 25 bp, Homo sapien
gaggcatatgagtctgtctggaagc

SEQ ID NO: 4435830 - DNA, 25 bp, Homo sapien
gacagattacaggaatatacagagg

SEQ ID NO: 4435831 - DNA, 25 bp, Homo sapien
gatccagggaaaatatgatgattcc

SEQ ID NO: 4435832 - DNA, 25 bp, Homo sapien
acatgtatgtgccttcatgcctggc

SEQ ID NO: 4435833 - DNA, 25 bp, Homo sapien
tagcaagaggttatgatgatgatcc

SEQ ID NO: 4435834 - DNA, 25 bp, Homo sapien
gcctttatctggtaacagcagttga

SEQ ID NO: 4435835 - DNA, 25 bp, Homo sapien
tagtatgcggtagatgaagactcca

SEQ ID NO: 4435836 - DNA, 25 bp, Homo sapien
cattatctggactagaagcatggat

SEQ ID NO: 4435837 - DNA, 25 bp, Homo sapien
tagtaagcttcgagacccaaaatgc

SEQ ID NO: 4435838 - DNA, 25 bp, Homo sapien
ttgaaaggtgtgctgctgacaaaaa

SEQ ID NO: 4435839 - DNA, 25 bp, Homo sapien
tgaaaggtgtgctgctgacaaaaag

SEQ ID NO: 4435840 - DNA, 25 bp, Homo sapien
tgttattaaatctagtctgtgtggg

SEQ ID NO: 4435841 - DNA, 25 bp, Homo sapien
ttaaatctagtctgtgtgggagtgt

SEQ ID NO: 4435842 - DNA, 25 bp, Homo sapien
tgttcactagcagcgagtcactaag

SEQ ID NO: 4435843 - DNA, 25 bp, Homo sapien
tcaagacgatgcgagtaagcttcat

SEQ ID NO: 4435844 - DNA, 25 bp, Homo sapien
gggaactagttctctctgaagccaa

SEQ ID NO: 4435845 - DNA, 25 bp, Homo sapien
taagtcctgctcacactcaagacga

SEQ ID NO: 4435846 - DNA, 25 bp, Homo sapien
ggaggagagtggagcgtaatctgag

SEQ ID NO: 4435847 - DNA, 25 bp, Homo sapien
tgtgggtttattccatcctaacact

SEQ ID NO: 4435848 - DNA, 25 bp, Homo sapien
tgggtttattccatcctaacactgt

SEQ ID NO: 4435849 - DNA, 25 bp, Homo sapien
cgtaatctgaggctggagtagggaa

SEQ ID NO: 4435850 - DNA, 25 bp, Homo sapien
gaagaaggggatgggcaaagagatg

SEQ ID NO: 4435851 - DNA, 25 bp, Homo sapien
gggccacactgttgcagttgaaaca

SEQ ID NO: 4435852 - DNA, 25 bp, Homo sapien
gccacactgttgcagttgaaacaaa

SEQ ID NO: 4435853 - DNA, 25 bp, Homo sapien
tgcagatgcaggtggaccaagcagc

SEQ ID NO: 4435854 - DNA, 25 bp, Homo sapien
cagatgcaggtggaccaagcagctg

SEQ ID NO: 4435855 - DNA, 25 bp, Homo sapien
aaattaggtcattaacacggggctg

SEQ ID NO: 4435856 - DNA, 25 bp, Homo sapien
ttgggttagaatatactgtgggtca

SEQ ID NO: 4435857 - DNA, 25 bp, Homo sapien
gaaaatatccaagcatggtactaac

SEQ ID NO: 4435858 - DNA, 25 bp, Homo sapien
tagttgtgacgatcatgtggaatta

SEQ ID NO: 4435859 - DNA, 25 bp, Homo sapien
tgtaacacaccgcgacggtctgcgg

SEQ ID NO: 4435860 - DNA, 25 bp, Homo sapien
gaactgtaacacaccgcgacggtct

SEQ ID NO: 4435861 - DNA, 25 bp, Homo sapien
tgcgaaggtatgtggcttcacttct

SEQ ID NO: 4435862 - DNA, 25 bp, Homo sapien
taacacaccgcgacggtctgcggct

SEQ ID NO: 4435863 - DNA, 25 bp, Homo sapien
tacccgatggcgttgacattttcat

SEQ ID NO: 4435864 - DNA, 25 bp, Homo sapien
caaagcctgagtagtaattaatacc

SEQ ID NO: 4435865 - DNA, 25 bp, Homo sapien
gagtagtaattaatacccgatggcg

SEQ ID NO: 4435866 - DNA, 25 bp, Homo sapien
tgtaaacaaagcctgagtagtaatt

SEQ ID NO: 4435867 - DNA, 25 bp, Homo sapien
tttccaaggctgttacctcactgca

SEQ ID NO: 4435868 - DNA, 25 bp, Homo sapien
gactttgacgccctttctagccatc

SEQ ID NO: 4435869 - DNA, 25 bp, Homo sapien
gttctctctcccacgtgctgcagtc

SEQ ID NO: 4435870 - DNA, 25 bp, Homo sapien
gctgtagtagtcatttctacagaaa

SEQ ID NO: 4435871 - DNA, 25 bp, Homo sapien
tcaggaagaggtactttccccacaa

SEQ ID NO: 4435872 - DNA, 25 bp, Homo sapien
ccctcagtagtagatggagctgttc

SEQ ID NO: 4435873 - DNA, 25 bp, Homo sapien
tatatattaagcacgagaaactagc

SEQ ID NO: 4435874 - DNA, 25 bp, Homo sapien
caaacagtgaaagcctatgagatcc

SEQ ID NO: 4435875 - DNA, 25 bp, Homo sapien
gagacccctctatactaacaggaag

SEQ ID NO: 4435876 - DNA, 25 bp, Homo sapien
tagaaggtaccaactgatgtgcagg

SEQ ID NO: 4435877 - DNA, 25 bp, Homo sapien
gaaagacgtccccaagtaggtgatc

SEQ ID NO: 4435878 - DNA, 25 bp, Homo sapien
agtgcagtaatagaggccttggcct

SEQ ID NO: 4435879 - DNA, 25 bp, Homo sapien
tcttgatgctactgatccatgtacc

SEQ ID NO: 4435880 - DNA, 25 bp, Homo sapien
aattagtcccaaagcgagaacctgg

SEQ ID NO: 4435881 - DNA, 25 bp, Homo sapien
tcctttgcatgagagctgcgggctg

SEQ ID NO: 4435882 - DNA, 25 bp, Homo sapien
ccatattttaagttgcaaggctgag

SEQ ID NO: 4435883 - DNA, 25 bp, Homo sapien
ttacagtaaatagtgttaggttcta

SEQ ID NO: 4435884 - DNA, 25 bp, Homo sapien
gtgttaggttctaggctgttttcta

SEQ ID NO: 4435885 - DNA, 25 bp, Homo sapien
aatagtgttaggttctaggctgttt

SEQ ID NO: 4435886 - DNA, 25 bp, Homo sapien
gtaaatagtgttaggttctaggctg

SEQ ID NO: 4435887 - DNA, 25 bp, Homo sapien
catcctctgaggaagggtagctgct

SEQ ID NO: 4435888 - DNA, 25 bp, Homo sapien
gatgccagcccttttcggagtacgc

SEQ ID NO: 4435889 - DNA, 25 bp, Homo sapien
tgacagaagcgttgctggccacgta

SEQ ID NO: 4435890 - DNA, 25 bp, Homo sapien
cctgtggcgttccaaaggctggtga

SEQ ID NO: 4435891 - DNA, 25 bp, Homo sapien
tcagcaattgctgcagctatggccc

SEQ ID NO: 4435892 - DNA, 25 bp, Homo sapien
tcagcatgggttcagtgagtacaag

SEQ ID NO: 4435893 - DNA, 25 bp, Homo sapien
aaattctatgacaggtttccacagg

SEQ ID NO: 4435894 - DNA, 25 bp, Homo sapien
ggttctcactggcacaagacagctt

SEQ ID NO: 4435895 - DNA, 25 bp, Homo sapien
aagcctccgtgggacatcctgtgag

SEQ ID NO: 4435896 - DNA, 25 bp, Homo sapien
gactcaactgtttatctggcgctgg

SEQ ID NO: 4435897 - DNA, 25 bp, Homo sapien
tgagccaattactgttcccaccgaa

SEQ ID NO: 4435898 - DNA, 25 bp, Homo sapien
aagtcacacccagttggcatcacgg

SEQ ID NO: 4435899 - DNA, 25 bp, Homo sapien
tcatctggcaaatctagcagcggca

SEQ ID NO: 4435900 - DNA, 25 bp, Homo sapien
tggaaaaccgtgtgaagcaactact

SEQ ID NO: 4435901 - DNA, 25 bp, Homo sapien
cagcggcagcagtaaaacaggcaaa

SEQ ID NO: 4435902 - DNA, 25 bp, Homo sapien
tacttggtacacgagaaaacccagc

SEQ ID NO: 4435903 - DNA, 25 bp, Homo sapien
gatcttatgtagtggaagttgtatc

SEQ ID NO: 4435904 - DNA, 25 bp, Homo sapien
tgtggttcatgatataccttctgga

SEQ ID NO: 4435905 - DNA, 25 bp, Homo sapien
gttgtatctccagcttacagatttg

SEQ ID NO: 4435906 - DNA, 25 bp, Homo sapien
tacagatttgatcccgttcgagtgg

SEQ ID NO: 4435907 - DNA, 25 bp, Homo sapien
tttgaaatgtctaggcacgcgtatg

SEQ ID NO: 4435908 - DNA, 25 bp, Homo sapien
tgggttcgtacaccagcaaatggta

SEQ ID NO: 4435909 - DNA, 25 bp, Homo sapien
ttagcactagttttgcagcagcctg

SEQ ID NO: 4435910 - DNA, 25 bp, Homo sapien
catttatgtgagactagggttcctc

SEQ ID NO: 4435911 - DNA, 25 bp, Homo sapien
gacggagaagagcacgtcggtttcc

SEQ ID NO: 4435912 - DNA, 25 bp, Homo sapien
gctgctgagggatcgggagggagtg

SEQ ID NO: 4435913 - DNA, 25 bp, Homo sapien
agcctcaggactggatctcggcggc

SEQ ID NO: 4435914 - DNA, 25 bp, Homo sapien
gggtcggcataggagatcgcttcaa

SEQ ID NO: 4435915 - DNA, 25 bp, Homo sapien
taacagaagcgagatatttcgtggc

SEQ ID NO: 4435916 - DNA, 25 bp, Homo sapien
tgagttaaacgcacacagacagaag

SEQ ID NO: 4435917 - DNA, 25 bp, Homo sapien
tctggatggtgtttctcccgaagcc

SEQ ID NO: 4435918 - DNA, 25 bp, Homo sapien
tcggcgtaaacgctgcagtcgcagg

SEQ ID NO: 4435919 - DNA, 25 bp, Homo sapien
tcacattcggcacaaaaatagcgcg

SEQ ID NO: 4435920 - DNA, 25 bp, Homo sapien
taagcatttgatcagccgagtccac

SEQ ID NO: 4435921 - DNA, 25 bp, Homo sapien
tgaccatttcatggagcgccctgag

SEQ ID NO: 4435922 - DNA, 25 bp, Homo sapien
tctgccaggtgtgccggtaaagtca

SEQ ID NO: 4435923 - DNA, 25 bp, Homo sapien
tctctaatcctaatggaacagatgt

SEQ ID NO: 4435924 - DNA, 25 bp, Homo sapien
caggtcggcctcccaatcttggagt

SEQ ID NO: 4435925 - DNA, 25 bp, Homo sapien
gagacagcgatgtttagggccaaca

SEQ ID NO: 4435926 - DNA, 25 bp, Homo sapien
aaaaaagtgtagctcgctgcctgca

SEQ ID NO: 4435927 - DNA, 25 bp, Homo sapien
gcaatgctgctccttccgatgatca

SEQ ID NO: 4435928 - DNA, 25 bp, Homo sapien
gactctaagagtgcacaaggctaaa

SEQ ID NO: 4435929 - DNA, 25 bp, Homo sapien
taaaaagagcaaagtgcggaagtgc

SEQ ID NO: 4435930 - DNA, 25 bp, Homo sapien
aaggcacatactctttgatctagca

SEQ ID NO: 4435931 - DNA, 25 bp, Homo sapien
gctcgatagagaatcagtccatcca

SEQ ID NO: 4435932 - DNA, 25 bp, Homo sapien
cataagctggaacattttgcagcca

SEQ ID NO: 4435933 - DNA, 25 bp, Homo sapien
tcgggtctggttcctaggcaccagg

SEQ ID NO: 4435934 - DNA, 25 bp, Homo sapien
ggcaagttttacaatgtctttctgt

SEQ ID NO: 4435935 - DNA, 25 bp, Homo sapien
gataacatcggttgctaggtcaggg

SEQ ID NO: 4435936 - DNA, 25 bp, Homo sapien
gaacagaccggcaagttttacaatg

SEQ ID NO: 4435937 - DNA, 25 bp, Homo sapien
agtagggagctgaccgactctatca

SEQ ID NO: 4435938 - DNA, 25 bp, Homo sapien
ggcaaaagtagggagctgaccgact

SEQ ID NO: 4435939 - DNA, 25 bp, Homo sapien
tgaccgactctatcatcagcactgt

SEQ ID NO: 4435940 - DNA, 25 bp, Homo sapien
catattggttatgcctctgaccagc

SEQ ID NO: 4435941 - DNA, 25 bp, Homo sapien
tattctgtatgggtacctagcacag

SEQ ID NO: 4435942 - DNA, 25 bp, Homo sapien
gcccatcaggatctctgccagtaga

SEQ ID NO: 4435943 - DNA, 25 bp, Homo sapien
tagcacagtacgctttacagttgca

SEQ ID NO: 4435944 - DNA, 25 bp, Homo sapien
ccagtagatcttgcatgaaagccat

SEQ ID NO: 4435945 - DNA, 25 bp, Homo sapien
aagagaagattcattccgtaataga

SEQ ID NO: 4435946 - DNA, 25 bp, Homo sapien
tggctgtagccaccaaccagcacct

SEQ ID NO: 4435947 - DNA, 25 bp, Homo sapien
gaagattcattccgtaatagaactc

SEQ ID NO: 4435948 - DNA, 25 bp, Homo sapien
gagaagattcattccgtaatagaac

SEQ ID NO: 4435949 - DNA, 25 bp, Homo sapien
tcagatgggagatgcctggagtcca

SEQ ID NO: 4435950 - DNA, 25 bp, Homo sapien
taagaaagagttgtcatgggagtcc

SEQ ID NO: 4435951 - DNA, 25 bp, Homo sapien
gtccagataaggattcactccccag

SEQ ID NO: 4435952 - DNA, 25 bp, Homo sapien
caaaacctgcaatgtggagcctgga

SEQ ID NO: 4435953 - DNA, 25 bp, Homo sapien
tttgtgtcactacctcctctaatgg

SEQ ID NO: 4435954 - DNA, 25 bp, Homo sapien
gactactgatacgaatctcaagcag

SEQ ID NO: 4435955 - DNA, 25 bp, Homo sapien
tgcagtagtccttcaagcacttgaa

SEQ ID NO: 4435956 - DNA, 25 bp, Homo sapien
tagtgtcagtgaaccaaattctgga

SEQ ID NO: 4435957 - DNA, 25 bp, Homo sapien
tttggtaacattaagaactactgga

SEQ ID NO: 4435958 - DNA, 25 bp, Homo sapien
ttcaatttcattgaggtgaaagtgc

SEQ ID NO: 4435959 - DNA, 25 bp, Homo sapien
tacagttacattgagagatttcatc

SEQ ID NO: 4435960 - DNA, 25 bp, Homo sapien
gaactgtgaactgtggaagaaatca

SEQ ID NO: 4435961 - DNA, 25 bp, Homo sapien
ggattatgggaacaggaaaaccatc

SEQ ID NO: 4435962 - DNA, 25 bp, Homo sapien
attatgggaacaggaaaaccatctt

SEQ ID NO: 4435963 - DNA, 25 bp, Homo sapien
ttatgggaacaggaaaaccatctta

SEQ ID NO: 4435964 - DNA, 25 bp, Homo sapien
gattatgggaacaggaaaaccatct

SEQ ID NO: 4435965 - DNA, 25 bp, Homo sapien
gagctcaggtgaaccttcttcatta

SEQ ID NO: 4435966 - DNA, 25 bp, Homo sapien
tatttgttgaggtaagtgtgacctt

SEQ ID NO: 4435967 - DNA, 25 bp, Homo sapien
catgaggtcttatgtttcccgggct

SEQ ID NO: 4435968 - DNA, 25 bp, Homo sapien
cctatatgtagcttcagtagagaca

SEQ ID NO: 4435969 - DNA, 25 bp, Homo sapien
ctgtgaaaagcccagataaacttcg

SEQ ID NO: 4435970 - DNA, 25 bp, Homo sapien
gcccagataaacttcgtaaagtgat

SEQ ID NO: 4435971 - DNA, 25 bp, Homo sapien
taaacttcgtaaagtgatctatcgc

SEQ ID NO: 4435972 - DNA, 25 bp, Homo sapien
tcgtaaagtgatctatcgcagaaag

SEQ ID NO: 4435973 - DNA, 25 bp, Homo sapien
caaacaaaaccggtagagctggcct

SEQ ID NO: 4435974 - DNA, 25 bp, Homo sapien
tggccttggtagtcgccagtcaaaa

SEQ ID NO: 4435975 - DNA, 25 bp, Homo sapien
tacaaagggtactgagggcatcccc

SEQ ID NO: 4435976 - DNA, 25 bp, Homo sapien
tgtttctggcacctccaggattgaa

SEQ ID NO: 4435977 - DNA, 25 bp, Homo sapien
gctggctccacgcttttaactctgt

SEQ ID NO: 4435978 - DNA, 25 bp, Homo sapien
taaacttcggagacctgagtgtgct

SEQ ID NO: 4435979 - DNA, 25 bp, Homo sapien
tatacttaaggtttgtgcctgagca

SEQ ID NO: 4435980 - DNA, 25 bp, Homo sapien
atataattaacacccgagcaggctg

SEQ ID NO: 4435981 - DNA, 25 bp, Homo sapien
ggcgagcatttttgaggacaggttt

SEQ ID NO: 4435982 - DNA, 25 bp, Homo sapien
tcctcggattcctgacggatgagct

SEQ ID NO: 4435983 - DNA, 25 bp, Homo sapien
tttatcttcgggtggagtcgacagc

SEQ ID NO: 4435984 - DNA, 25 bp, Homo sapien
tgagcttttgtttcgcaggacaaaa

SEQ ID NO: 4435985 - DNA, 25 bp, Homo sapien
agtccaaagcgtactccacaacagg

SEQ ID NO: 4435986 - DNA, 25 bp, Homo sapien
tatagcctcgatgcttctcagtcca

SEQ ID NO: 4435987 - DNA, 25 bp, Homo sapien
gcaacagctgcgtcctatagcctcg

SEQ ID NO: 4435988 - DNA, 25 bp, Homo sapien
gcgttctccgctttgtctcactctg

SEQ ID NO: 4435989 - DNA, 25 bp, Homo sapien
gcgccggcctcggttagccaccagg

SEQ ID NO: 4435990 - DNA, 25 bp, Homo sapien
ccgcttagctcaatggcccacttga

SEQ ID NO: 4435991 - DNA, 25 bp, Homo sapien
tccaggcccgcttagctcaatggcc

SEQ ID NO: 4435992 - DNA, 25 bp, Homo sapien
aatggcccacttgaagcgccggcct

SEQ ID NO: 4435993 - DNA, 25 bp, Homo sapien
gccactgccccggtcacttcgaccc

SEQ ID NO: 4435994 - DNA, 25 bp, Homo sapien
ggccactgccccggtcacttcgacc

SEQ ID NO: 4435995 - DNA, 25 bp, Homo sapien
tggccactgccccggtcacttcgac

SEQ ID NO: 4435996 - DNA, 25 bp, Homo sapien
taaccgactgggtagagcgagtctc

SEQ ID NO: 4435997 - DNA, 25 bp, Homo sapien
tgcttgtccaagtaaccgactgggt

SEQ ID NO: 4435998 - DNA, 25 bp, Homo sapien
ggcacttgcttgtccaagtaaccga

SEQ ID NO: 4435999 - DNA, 25 bp, Homo sapien
gctggtatcaggcacttgcttgtcc

SEQ ID NO: 4436000 - DNA, 25 bp, Homo sapien
caccaggatccggtctgtctcttgc

SEQ ID NO: 4436001 - DNA, 25 bp, Homo sapien
accaggatccggtctgtctcttgca

SEQ ID NO: 4436002 - DNA, 25 bp, Homo sapien
ccaggatccggtctgtctcttgcac

SEQ ID NO: 4436003 - DNA, 25 bp, Homo sapien
tccaccaggatccggtctgtctctt

SEQ ID NO: 4436004 - DNA, 25 bp, Homo sapien
taagagctatctacgttaactccac

SEQ ID NO: 4436005 - DNA, 25 bp, Homo sapien
taccgaaataccagcctcaagcagt

SEQ ID NO: 4436006 - DNA, 25 bp, Homo sapien
ccatgggctacggtaacatctatac

SEQ ID NO: 4436007 - DNA, 25 bp, Homo sapien
ttaactccacctaggagaagaggat

SEQ ID NO: 4436008 - DNA, 25 bp, Homo sapien
ttagccgggctactgcagaaatcta

SEQ ID NO: 4436009 - DNA, 25 bp, Homo sapien
gatgttgccaccaaaagatagtttt

SEQ ID NO: 4436010 - DNA, 25 bp, Homo sapien
taaagccaacagagtatcctgacag

SEQ ID NO: 4436011 - DNA, 25 bp, Homo sapien
ccagagtagaaaaaggatcacttca

SEQ ID NO: 4436012 - DNA, 25 bp, Homo sapien
cacaaaaactgaccactcgctgagc

SEQ ID NO: 4436013 - DNA, 25 bp, Homo sapien
cattttaaaactcgtgggacacagc

SEQ ID NO: 4436014 - DNA, 25 bp, Homo sapien
ggaaggctctcctactcaagataaa

SEQ ID NO: 4436015 - DNA, 25 bp, Homo sapien
taatgggagattagcacacctcagt

SEQ ID NO: 4436016 - DNA, 25 bp, Homo sapien
tgaggggacccaaggcgatgtccca

SEQ ID NO: 4436017 - DNA, 25 bp, Homo sapien
tttgaggggacccaaggcgatgtcc

SEQ ID NO: 4436018 - DNA, 25 bp, Homo sapien
tctgtttgaggggacccaaggcgat

SEQ ID NO: 4436019 - DNA, 25 bp, Homo sapien
gaatctgtttgaggggacccaaggc

SEQ ID NO: 4436020 - DNA, 25 bp, Homo sapien
catcatagtagggaagatggagata

SEQ ID NO: 4436021 - DNA, 25 bp, Homo sapien
ggagatagtattgcctgccatgtac

SEQ ID NO: 4436022 - DNA, 25 bp, Homo sapien
aagatggagatagtattgcctgcca

SEQ ID NO: 4436023 - DNA, 25 bp, Homo sapien
catagtagggaagatggagatagta

SEQ ID NO: 4436024 - DNA, 25 bp, Homo sapien
tgaatgggtcgccaggccatcatac

SEQ ID NO: 4436025 - DNA, 25 bp, Homo sapien
gaatgggtcgccaggccatcataca

SEQ ID NO: 4436026 - DNA, 25 bp, Homo sapien
ctgaatgggtcgccaggccatcata

SEQ ID NO: 4436027 - DNA, 25 bp, Homo sapien
aatgggtcgccaggccatcatacac

SEQ ID NO: 4436028 - DNA, 25 bp, Homo sapien
tagacagacccatagtaagacagca

SEQ ID NO: 4436029 - DNA, 25 bp, Homo sapien
gacagcaaataggaccattaaaggc

SEQ ID NO: 4436030 - DNA, 25 bp, Homo sapien
tatggaagggttattgtttcaagaa

SEQ ID NO: 4436031 - DNA, 25 bp, Homo sapien
cggcctgcctttaattcttcaaact

SEQ ID NO: 4436032 - DNA, 25 bp, Homo sapien
ctgttgcggtaacagaagttgtcaa

SEQ ID NO: 4436033 - DNA, 25 bp, Homo sapien
tgttgcggtaacagaagttgtcaaa

SEQ ID NO: 4436034 - DNA, 25 bp, Homo sapien
gctcaatgaaggctaaccaatccga

SEQ ID NO: 4436035 - DNA, 25 bp, Homo sapien
caatgagatagaccaaaccctgaag

SEQ ID NO: 4436036 - DNA, 25 bp, Homo sapien
tggactggcacttgtaaacagccaa

SEQ ID NO: 4436037 - DNA, 25 bp, Homo sapien
caatccgatgcatgtgtaggtaaca

SEQ ID NO: 4436038 - DNA, 25 bp, Homo sapien
cttaaaaactcctaatggctcttat

SEQ ID NO: 4436039 - DNA, 25 bp, Homo sapien
caagctctattttgcctatccttaa

SEQ ID NO: 4436040 - DNA, 25 bp, Homo sapien
aagaaagaataaataggtgagtggc

SEQ ID NO: 4436041 - DNA, 25 bp, Homo sapien
ggtgagtggcaaatgagtgttaaaa

SEQ ID NO: 4436042 - DNA, 25 bp, Homo sapien
gctaatcttagctaaacactttggg

SEQ ID NO: 4436043 - DNA, 25 bp, Homo sapien
gtcctccaccactgaactccattct

SEQ ID NO: 4436044 - DNA, 25 bp, Homo sapien
aaaagcagtcctccaccactgaact

SEQ ID NO: 4436045 - DNA, 25 bp, Homo sapien
agcagtcctccaccactgaactcca

SEQ ID NO: 4436046 - DNA, 25 bp, Homo sapien
tcacaaaagcagtcctccaccactg

SEQ ID NO: 4436047 - DNA, 25 bp, Homo sapien
gacccaaatacatagggaccaggcg

SEQ ID NO: 4436048 - DNA, 25 bp, Homo sapien
acccaaatacatagggaccaggcgc

SEQ ID NO: 4436049 - DNA, 25 bp, Homo sapien
cagccttgggttatggtatagtttc

SEQ ID NO: 4436050 - DNA, 25 bp, Homo sapien
aatatgcacattgtccttctaggac

SEQ ID NO: 4436051 - DNA, 25 bp, Homo sapien
gatgctgcaacagttcttgatttag

SEQ ID NO: 4436052 - DNA, 25 bp, Homo sapien
taggacctgtcaccccaccatggag

SEQ ID NO: 4436053 - DNA, 25 bp, Homo sapien
aaacttgagagaatgcaccttaggg

SEQ ID NO: 4436054 - DNA, 25 bp, Homo sapien
tctgcttgacaggtgccaggttcct

SEQ ID NO: 4436055 - DNA, 25 bp, Homo sapien
tacctatgactttaccagggtagat

SEQ ID NO: 4436056 - DNA, 25 bp, Homo sapien
tcccgcttttgagtcttacctatga

SEQ ID NO: 4436057 - DNA, 25 bp, Homo sapien
aaagcaagtcaagtacgtattcagc

SEQ ID NO: 4436058 - DNA, 25 bp, Homo sapien
gagacagcttcatcttactaaagaa

SEQ ID NO: 4436059 - DNA, 25 bp, Homo sapien
tgaggataacaactagagacagctt

SEQ ID NO: 4436060 - DNA, 25 bp, Homo sapien
tgaattggtaaaagggatgctagaa

SEQ ID NO: 4436061 - DNA, 25 bp, Homo sapien
tagctctatgatcagataacctcag

SEQ ID NO: 4436062 - DNA, 25 bp, Homo sapien
tgtatgcaaaaggactggatctctg

SEQ ID NO: 4436063 - DNA, 25 bp, Homo sapien
tctctaggaatcttgttagctgccc

SEQ ID NO: 4436064 - DNA, 25 bp, Homo sapien
gatctctggttacttcacagggtta

SEQ ID NO: 4436065 - DNA, 25 bp, Homo sapien
ggtctgcatgctgggtaaccgcacc

SEQ ID NO: 4436066 - DNA, 25 bp, Homo sapien
tgacgtttgctctaagaccaaggaa

SEQ ID NO: 4436067 - DNA, 25 bp, Homo sapien
gggattcttctgtaactcgagtcaa

SEQ ID NO: 4436068 - DNA, 25 bp, Homo sapien
aataacgtcacttcaatccagggca

SEQ ID NO: 4436069 - DNA, 25 bp, Homo sapien
tgttttgtcttttagctgggggctc

SEQ ID NO: 4436070 - DNA, 25 bp, Homo sapien
atactttatgatttcccgggcactg

SEQ ID NO: 4436071 - DNA, 25 bp, Homo sapien
ctctgcttttatcttggtaccacat

SEQ ID NO: 4436072 - DNA, 25 bp, Homo sapien
ttgtcttttagctgggggctcatac

SEQ ID NO: 4436073 - DNA, 25 bp, Homo sapien
ccaaatgggtaccttcatgggtgtc

SEQ ID NO: 4436074 - DNA, 25 bp, Homo sapien
cacctgaacgttgcaagttctcaag

SEQ ID NO: 4436075 - DNA, 25 bp, Homo sapien
cactggctcctagagatcacctgaa

SEQ ID NO: 4436076 - DNA, 25 bp, Homo sapien
gctgtgtaagtactgcactggctcc

SEQ ID NO: 4436077 - DNA, 25 bp, Homo sapien
aacgcatcgatatggccatctgtgg

SEQ ID NO: 4436078 - DNA, 25 bp, Homo sapien
gctgcattagcaacgcatcgatatg

SEQ ID NO: 4436079 - DNA, 25 bp, Homo sapien
gtgaactctgctgcattagcaacgc

SEQ ID NO: 4436080 - DNA, 25 bp, Homo sapien
ctgggtcggcaatgtttgtgaactc

SEQ ID NO: 4436081 - DNA, 25 bp, Homo sapien
gttctgccatgctcttggcaaaaag

SEQ ID NO: 4436082 - DNA, 25 bp, Homo sapien
ttctgccatgctcttggcaaaaagg

SEQ ID NO: 4436083 - DNA, 25 bp, Homo sapien
tgatcaatgttgcacgtctccctgt

SEQ ID NO: 4436084 - DNA, 25 bp, Homo sapien
acactgccttgatcaatgttgcacg

SEQ ID NO: 4436085 - DNA, 25 bp, Homo sapien
agttcacactgccttgatcaatgtt

SEQ ID NO: 4436086 - DNA, 25 bp, Homo sapien
aatgttgcacgtctccctgtggacc

SEQ ID NO: 4436087 - DNA, 25 bp, Homo sapien
taagcataagaatggcaaatccagg

SEQ ID NO: 4436088 - DNA, 25 bp, Homo sapien
ctagacaagagcctggaaaatctca

SEQ ID NO: 4436089 - DNA, 25 bp, Homo sapien
aagaacttggtttggtagatatcca

SEQ ID NO: 4436090 - DNA, 25 bp, Homo sapien
ggaaaatctcaggataagcataaga

SEQ ID NO: 4436091 - DNA, 25 bp, Homo sapien
tcaagtgaaggagtaggagtgagag

SEQ ID NO: 4436092 - DNA, 25 bp, Homo sapien
tggtcaagtgaaggagtaggagtga

SEQ ID NO: 4436093 - DNA, 25 bp, Homo sapien
tgtaaataccattgcactcaccagc

SEQ ID NO: 4436094 - DNA, 25 bp, Homo sapien
gtgaaggagtaggagtgagagaagg

SEQ ID NO: 4436095 - DNA, 25 bp, Homo sapien
tcccgttatgcatgtgcacctttcc

SEQ ID NO: 4436096 - DNA, 25 bp, Homo sapien
tgtgggttatttttcccgttatgca

SEQ ID NO: 4436097 - DNA, 25 bp, Homo sapien
ccagacccaagtggattgtcgacat

SEQ ID NO: 4436098 - DNA, 25 bp, Homo sapien
cccaccagacccaagtggattgtcg

SEQ ID NO: 4436099 - DNA, 25 bp, Homo sapien
aacgcttcaaggtgctcatgaccca

SEQ ID NO: 4436100 - DNA, 25 bp, Homo sapien
gatgacaaatactctcgacaccgaa

SEQ ID NO: 4436101 - DNA, 25 bp, Homo sapien
tctgagggtcccttaaactgatgtc

SEQ ID NO: 4436102 - DNA, 25 bp, Homo sapien
aaactcttcggactgtgagccctga

SEQ ID NO: 4436103 - DNA, 25 bp, Homo sapien
gaaatttgacccgatgggacaacag

SEQ ID NO: 4436104 - DNA, 25 bp, Homo sapien
tcctggagcagaaatttgacccgat

SEQ ID NO: 4436105 - DNA, 25 bp, Homo sapien
aatttgacccgatgggacaacagac

SEQ ID NO: 4436106 - DNA, 25 bp, Homo sapien
agcagaaatttgacccgatgggaca

SEQ ID NO: 4436107 - DNA, 25 bp, Homo sapien
tccagtattacctcaacgagcaggg

SEQ ID NO: 4436108 - DNA, 25 bp, Homo sapien
ttacctcaacgagcagggagatcga

SEQ ID NO: 4436109 - DNA, 25 bp, Homo sapien
tcaacgagcagggagatcgagtcta

SEQ ID NO: 4436110 - DNA, 25 bp, Homo sapien
cgagcagggagatcgagtctatacg

SEQ ID NO: 4436111 - DNA, 25 bp, Homo sapien
cagatcacacagaactagaatacgg

SEQ ID NO: 4436112 - DNA, 25 bp, Homo sapien
gatcagatcacacagaactagaata

SEQ ID NO: 4436113 - DNA, 25 bp, Homo sapien
cacacagaactagaatacggaactc

SEQ ID NO: 4436114 - DNA, 25 bp, Homo sapien
gatcacacagaactagaatacggaa

SEQ ID NO: 4436115 - DNA, 25 bp, Homo sapien
tcaggtttgggcactaactgtggct

SEQ ID NO: 4436116 - DNA, 25 bp, Homo sapien
aggtccaggacccagagtaacctgg

SEQ ID NO: 4436117 - DNA, 25 bp, Homo sapien
gcctccagaatgaggcagtcaggtc

SEQ ID NO: 4436118 - DNA, 25 bp, Homo sapien
cagtaggtgcacagggatccaagga

SEQ ID NO: 4436119 - DNA, 25 bp, Homo sapien
gtttcatgctcatatccggtcccgg

SEQ ID NO: 4436120 - DNA, 25 bp, Homo sapien
gctcatatccggtcccggcaatgca

SEQ ID NO: 4436121 - DNA, 25 bp, Homo sapien
gtcagaagttggtgggagaaaggga

SEQ ID NO: 4436122 - DNA, 25 bp, Homo sapien
gggcggcactaggtttcatgctcat

SEQ ID NO: 4436123 - DNA, 25 bp, Homo sapien
gagcatcagagggttgtctggagag

SEQ ID NO: 4436124 - DNA, 25 bp, Homo sapien
atcagagggttgtctggagagaata

SEQ ID NO: 4436125 - DNA, 25 bp, Homo sapien
gagagcatcagagggttgtctggag

SEQ ID NO: 4436126 - DNA, 25 bp, Homo sapien
cagagggttgtctggagagaatact

SEQ ID NO: 4436127 - DNA, 25 bp, Homo sapien
ccttagagggcagaatggtcttcac

SEQ ID NO: 4436128 - DNA, 25 bp, Homo sapien
tagatgctgtcacaaatggaggtgc

SEQ ID NO: 4436129 - DNA, 25 bp, Homo sapien
ccgggccaaggctttgtaacgctgc

SEQ ID NO: 4436130 - DNA, 25 bp, Homo sapien
taacgctgccactgacggaagttct

SEQ ID NO: 4436131 - DNA, 25 bp, Homo sapien
ttcagccgggccagggaacgaagca

SEQ ID NO: 4436132 - DNA, 25 bp, Homo sapien
ccactcctgcacagccaatggcagt

SEQ ID NO: 4436133 - DNA, 25 bp, Homo sapien
gtcaaagttgctggtgtgctcccac

SEQ ID NO: 4436134 - DNA, 25 bp, Homo sapien
tttctgccatctcataaaagatcat

SEQ ID NO: 4436135 - DNA, 25 bp, Homo sapien
agtttcaaaggggttgcaggagaca

SEQ ID NO: 4436136 - DNA, 25 bp, Homo sapien
gagacaggccctgagacccattcat

SEQ ID NO: 4436137 - DNA, 25 bp, Homo sapien
gggccctagaggatcaagtttcaaa

SEQ ID NO: 4436138 - DNA, 25 bp, Homo sapien
ccctgagacccattcatcagctgtg

SEQ ID NO: 4436139 - DNA, 25 bp, Homo sapien
gcccgtgtcttggaggctgccttct

SEQ ID NO: 4436140 - DNA, 25 bp, Homo sapien
ctccttgggtgcctcaggagcagga

SEQ ID NO: 4436141 - DNA, 25 bp, Homo sapien
ggtctctgggctttacgctgacgcc

SEQ ID NO: 4436142 - DNA, 25 bp, Homo sapien
cttctggtgggatctccttgggtgc

SEQ ID NO: 4436143 - DNA, 25 bp, Homo sapien
cagccattccatgatgtcaacatac

SEQ ID NO: 4436144 - DNA, 25 bp, Homo sapien
ttccatgatgtcaacatactccttc

SEQ ID NO: 4436145 - DNA, 25 bp, Homo sapien
gtggccaagtgagtccccaccagcc

SEQ ID NO: 4436146 - DNA, 25 bp, Homo sapien
cccaccagccattccatgatgtcaa

SEQ ID NO: 4436147 - DNA, 25 bp, Homo sapien
caaagaccttctgagaacacagctc

SEQ ID NO: 4436148 - DNA, 25 bp, Homo sapien
tgagaacacagctcattgatgtagc

SEQ ID NO: 4436149 - DNA, 25 bp, Homo sapien
ctcattgatgtagctcaggagacct

SEQ ID NO: 4436150 - DNA, 25 bp, Homo sapien
tcaggagacctggatctggatacat

SEQ ID NO: 4436151 - DNA, 25 bp, Homo sapien
gataacagaaggaaaagcgatgtaa

SEQ ID NO: 4436152 - DNA, 25 bp, Homo sapien
ctggataacagaaggaaaagcgatg

SEQ ID NO: 4436153 - DNA, 25 bp, Homo sapien
tggataacagaaggaaaagcgatgt

SEQ ID NO: 4436154 - DNA, 25 bp, Homo sapien
taacagaaggaaaagcgatgtaagt

SEQ ID NO: 4436155 - DNA, 25 bp, Homo sapien
gctctagctcctcaattaaggccaa

SEQ ID NO: 4436156 - DNA, 25 bp, Homo sapien
tctagctcctcaattaaggccaagg

SEQ ID NO: 4436157 - DNA, 25 bp, Homo sapien
ttgctctagctcctcaattaaggcc

SEQ ID NO: 4436158 - DNA, 25 bp, Homo sapien
ctagctcctcaattaaggccaaggg

SEQ ID NO: 4436159 - DNA, 25 bp, Homo sapien
acttgagtccaactgagcgccactg

SEQ ID NO: 4436160 - DNA, 25 bp, Homo sapien
ggatggcagagtgttcccatccctg

SEQ ID NO: 4436161 - DNA, 25 bp, Homo sapien
caggtgagggccgaagccgcccatc

SEQ ID NO: 4436162 - DNA, 25 bp, Homo sapien
cactgaaacttggaggcgcctctgc

SEQ ID NO: 4436163 - DNA, 25 bp, Homo sapien
tataaccttcccagaccctctcctc

SEQ ID NO: 4436164 - DNA, 25 bp, Homo sapien
ttcccagaccctctcctctccacac

SEQ ID NO: 4436165 - DNA, 25 bp, Homo sapien
accttcccagaccctctcctctcca

SEQ ID NO: 4436166 - DNA, 25 bp, Homo sapien
ataaccttcccagaccctctcctct

SEQ ID NO: 4436167 - DNA, 25 bp, Homo sapien
agcgcctcctagatggccatcctga

SEQ ID NO: 4436168 - DNA, 25 bp, Homo sapien
ccagcgcctcctagatggccatcct

SEQ ID NO: 4436169 - DNA, 25 bp, Homo sapien
ggcccagcgcctcctagatggccat

SEQ ID NO: 4436170 - DNA, 25 bp, Homo sapien
cgcctcctagatggccatcctgatg

SEQ ID NO: 4436171 - DNA, 25 bp, Homo sapien
tgccaacaaaggggcagagcctctg

SEQ ID NO: 4436172 - DNA, 25 bp, Homo sapien
ctgaagtcctatcagccaccaggca

SEQ ID NO: 4436173 - DNA, 25 bp, Homo sapien
agagcctctgaagtcctatcagcca

SEQ ID NO: 4436174 - DNA, 25 bp, Homo sapien
gcctctgaagtcctatcagccacca

SEQ ID NO: 4436175 - DNA, 25 bp, Homo sapien
tctatttgtacaggcagctccaagc

SEQ ID NO: 4436176 - DNA, 25 bp, Homo sapien
tctccaggacccagggaaatgttgc

SEQ ID NO: 4436177 - DNA, 25 bp, Homo sapien
gctgacccttagttggaggccacag

SEQ ID NO: 4436178 - DNA, 25 bp, Homo sapien
tgggatgccctacggtttcacagct

SEQ ID NO: 4436179 - DNA, 25 bp, Homo sapien
gctagagctcgcttcccagacttgg

SEQ ID NO: 4436180 - DNA, 25 bp, Homo sapien
tagaggccaagaggtaagcaaagtt

SEQ ID NO: 4436181 - DNA, 25 bp, Homo sapien
cagacttggcaacaggatatggaag

SEQ ID NO: 4436182 - DNA, 25 bp, Homo sapien
tgagggtcgaactactcccagagct

SEQ ID NO: 4436183 - DNA, 25 bp, Homo sapien
caaaactgtcacaccgccttttacg

SEQ ID NO: 4436184 - DNA, 25 bp, Homo sapien
tggctacgacgtcgtttcttccttc

SEQ ID NO: 4436185 - DNA, 25 bp, Homo sapien
ctactggctacgacgtcgtttcttc

SEQ ID NO: 4436186 - DNA, 25 bp, Homo sapien
ttccttctgcccgtgacaaaactgt

SEQ ID NO: 4436187 - DNA, 25 bp, Homo sapien
caacaaaacaacattgggatgagat

SEQ ID NO: 4436188 - DNA, 25 bp, Homo sapien
ggcacccacctttagggactggcaa

SEQ ID NO: 4436189 - DNA, 25 bp, Homo sapien
ttccaaaggtaattccccctgcagc

SEQ ID NO: 4436190 - DNA, 25 bp, Homo sapien
cattgggattctccattggtgggca

SEQ ID NO: 4436191 - DNA, 25 bp, Homo sapien
cttgggcgatagacaagctcgaaga

SEQ ID NO: 4436192 - DNA, 25 bp, Homo sapien
ttcctccgaggcatgacttagaggg

SEQ ID NO: 4436193 - DNA, 25 bp, Homo sapien
atggagttagagtctacgggaagcc

SEQ ID NO: 4436194 - DNA, 25 bp, Homo sapien
ggcgtgccgagtattcctccgaggc

SEQ ID NO: 4436195 - DNA, 25 bp, Homo sapien
atctgcaacaagtagttccactgcc

SEQ ID NO: 4436196 - DNA, 25 bp, Homo sapien
cagagccaggtcatcgacatctgca

SEQ ID NO: 4436197 - DNA, 25 bp, Homo sapien
ctgggcatggaacccgtgacatcca

SEQ ID NO: 4436198 - DNA, 25 bp, Homo sapien
caagaagaagctgcgctacattgcc

SEQ ID NO: 4436199 - DNA, 25 bp, Homo sapien
gacctgactgactacttcacgaaga

SEQ ID NO: 4436200 - DNA, 25 bp, Homo sapien
gctgggacctgactgactacttcac

SEQ ID NO: 4436201 - DNA, 25 bp, Homo sapien
tgactgactacttcacgaagatcct

SEQ ID NO: 4436202 - DNA, 25 bp, Homo sapien
ctgactacttcacgaagatcctcac

SEQ ID NO: 4436203 - DNA, 25 bp, Homo sapien
gggtgcccacggaaccagtacatga

SEQ ID NO: 4436204 - DNA, 25 bp, Homo sapien
agggtatcttgccttccatcacggg

SEQ ID NO: 4436205 - DNA, 25 bp, Homo sapien
taggacgacatggagatctggaacc

SEQ ID NO: 4436206 - DNA, 25 bp, Homo sapien
tattagaccaagactgtatctgccc

SEQ ID NO: 4436207 - DNA, 25 bp, Homo sapien
taggcgggctgagtccaaaaaagta

SEQ ID NO: 4436208 - DNA, 25 bp, Homo sapien
ttgtacctctcattttcagtcaggg

SEQ ID NO: 4436209 - DNA, 25 bp, Homo sapien
gattgtgcctatgcatgatgaatga

SEQ ID NO: 4436210 - DNA, 25 bp, Homo sapien
gatgcttgggaaagaatcaacagtt

SEQ ID NO: 4436211 - DNA, 25 bp, Homo sapien
ttacacactgtggtgcaatctactg

SEQ ID NO: 4436212 - DNA, 25 bp, Homo sapien
ctctggcaggtatgtgcaggataca

SEQ ID NO: 4436213 - DNA, 25 bp, Homo sapien
tgtactgtggcagttccctttggat

SEQ ID NO: 4436214 - DNA, 25 bp, Homo sapien
gagctgtttaaaggccgagaactgg

SEQ ID NO: 4436215 - DNA, 25 bp, Homo sapien
taatatgccactgtgagtactgaca

SEQ ID NO: 4436216 - DNA, 25 bp, Homo sapien
agccactgcccccggatgccccagc

SEQ ID NO: 4436217 - DNA, 25 bp, Homo sapien
ccactgcccccggatgccccagcag

SEQ ID NO: 4436218 - DNA, 25 bp, Homo sapien
actgcccccggatgccccagcagtg

SEQ ID NO: 4436219 - DNA, 25 bp, Homo sapien
ctgcccccggatgccccagcagtgt

SEQ ID NO: 4436220 - DNA, 25 bp, Homo sapien
aagcatgatacgcatcgggtagagg

SEQ ID NO: 4436221 - DNA, 25 bp, Homo sapien
ggagaagaagcatgatacgcatcgg

SEQ ID NO: 4436222 - DNA, 25 bp, Homo sapien
catgatacgcatcgggtagaggagc

SEQ ID NO: 4436223 - DNA, 25 bp, Homo sapien
gaagaagcatgatacgcatcgggta

SEQ ID NO: 4436224 - DNA, 25 bp, Homo sapien
tgaacaaataaaaggagagagggcc

SEQ ID NO: 4436225 - DNA, 25 bp, Homo sapien
gcagcagaggatgaggaaaatgtcg

SEQ ID NO: 4436226 - DNA, 25 bp, Homo sapien
aaggagagagggcccagtggcagca

SEQ ID NO: 4436227 - DNA, 25 bp, Homo sapien
tggagagagatcaatatgctgaaca

SEQ ID NO: 4436228 - DNA, 25 bp, Homo sapien
tcataaaattgagcgagcaggagca

SEQ ID NO: 4436229 - DNA, 25 bp, Homo sapien
tctcatcagaagcacgcacagatac

SEQ ID NO: 4436230 - DNA, 25 bp, Homo sapien
ggaaaccatctctaacttaagcctg

SEQ ID NO: 4436231 - DNA, 25 bp, Homo sapien
ggagcagtaagaccaccaggaatga

SEQ ID NO: 4436232 - DNA, 25 bp, Homo sapien
gccttggtgacgagagaaactccgt

SEQ ID NO: 4436233 - DNA, 25 bp, Homo sapien
tagtgtcgggattcacagactttgg

SEQ ID NO: 4436234 - DNA, 25 bp, Homo sapien
tgtgatgccttgagctaactgacct

SEQ ID NO: 4436235 - DNA, 25 bp, Homo sapien
gaaatacgaaatcttggccaggaaa

SEQ ID NO: 4436236 - DNA, 25 bp, Homo sapien
tcagtgtccataggatgcgcgccgt

SEQ ID NO: 4436237 - DNA, 25 bp, Homo sapien
cagaagcgctggtgttcccgttagc

SEQ ID NO: 4436238 - DNA, 25 bp, Homo sapien
gcgctctgacgcttctggtgggcca

SEQ ID NO: 4436239 - DNA, 25 bp, Homo sapien
gaggacacatcctccgtgatgggca

SEQ ID NO: 4436240 - DNA, 25 bp, Homo sapien
tggggtctggtcttggacttgaagc

SEQ ID NO: 4436241 - DNA, 25 bp, Homo sapien
ggggtctggtcttggacttgaagcc

SEQ ID NO: 4436242 - DNA, 25 bp, Homo sapien
gggtctggtcttggacttgaagcct

SEQ ID NO: 4436243 - DNA, 25 bp, Homo sapien
gagttgggggcagacgtgggtgtgg

SEQ ID NO: 4436244 - DNA, 25 bp, Homo sapien
cagacgtgggtgtggcaggtcttgg

SEQ ID NO: 4436245 - DNA, 25 bp, Homo sapien
ttctcttctctgaaggttgactggg

SEQ ID NO: 4436246 - DNA, 25 bp, Homo sapien
ggccagggggctccatttcattcca

SEQ ID NO: 4436247 - DNA, 25 bp, Homo sapien
acagtcactttactataagccacaa

SEQ ID NO: 4436248 - DNA, 25 bp, Homo sapien
gccacaacctgtaggatctgtgttc

SEQ ID NO: 4436249 - DNA, 25 bp, Homo sapien
tccttccactcctgccaaggtggga

SEQ ID NO: 4436250 - DNA, 25 bp, Homo sapien
tcctgccaaggtgggatcatgaccc

SEQ ID NO: 4436251 - DNA, 25 bp, Homo sapien
cagtgacccgtgagtgcaggcctgt

SEQ ID NO: 4436252 - DNA, 25 bp, Homo sapien
gcctgtgcccgtgacctggctggac

SEQ ID NO: 4436253 - DNA, 25 bp, Homo sapien
catcctcactgcagtgacccgtgag

SEQ ID NO: 4436254 - DNA, 25 bp, Homo sapien
ctggggttttcctgcgccgctggcc

SEQ ID NO: 4436255 - DNA, 25 bp, Homo sapien
catgttgccgggtgtttctcaggga

SEQ ID NO: 4436256 - DNA, 25 bp, Homo sapien
tgaaatctttaactgtctactgggt

SEQ ID NO: 4436257 - DNA, 25 bp, Homo sapien
tgggtgtatttgtctggaaccttgc

SEQ ID NO: 4436258 - DNA, 25 bp, Homo sapien
tggttctgcatgttgccgggtgttt

SEQ ID NO: 4436259 - DNA, 25 bp, Homo sapien
tatgtggaaccctgcgtactggtgg

SEQ ID NO: 4436260 - DNA, 25 bp, Homo sapien
gttaggtgacctcaagatcatgcag

SEQ ID NO: 4436261 - DNA, 25 bp, Homo sapien
ttcagtggctttccagtgctccctc

SEQ ID NO: 4436262 - DNA, 25 bp, Homo sapien
ggtgccattgctgtgtgctttatga

SEQ ID NO: 4436263 - DNA, 25 bp, Homo sapien
tcctttgccggaattctacagaaac

SEQ ID NO: 4436264 - DNA, 25 bp, Homo sapien
ttccatatggcccaaatatttagga

SEQ ID NO: 4436265 - DNA, 25 bp, Homo sapien
gctatgatacattgcatgaggtcag

SEQ ID NO: 4436266 - DNA, 25 bp, Homo sapien
tacttgaggcatcatatgggcaccc

SEQ ID NO: 4436267 - DNA, 25 bp, Homo sapien
catatgcaacccacgtacacaaggg

SEQ ID NO: 4436268 - DNA, 25 bp, Homo sapien
tggtgagaaacttgatgcattctca

SEQ ID NO: 4436269 - DNA, 25 bp, Homo sapien
acacaagggaacacgtgcacacata

SEQ ID NO: 4436270 - DNA, 25 bp, Homo sapien
gtgtgtctcctattacagccattag

SEQ ID NO: 4436271 - DNA, 25 bp, Homo sapien
gatgtggaaaagctaccttcttaga

SEQ ID NO: 4436272 - DNA, 25 bp, Homo sapien
tcatatacaagctgtggttccttgg

SEQ ID NO: 4436273 - DNA, 25 bp, Homo sapien
aacatcagccccaccagatgtggaa

SEQ ID NO: 4436274 - DNA, 25 bp, Homo sapien
gggttttgcacatgcttgtttccat

SEQ ID NO: 4436275 - DNA, 25 bp, Homo sapien
aacaccagtttgtaaagcatcaggg

SEQ ID NO: 4436276 - DNA, 25 bp, Homo sapien
tccacgtattgagcctagcacccat

SEQ ID NO: 4436277 - DNA, 25 bp, Homo sapien
tcatcatccacgtattgagcctagc

SEQ ID NO: 4436278 - DNA, 25 bp, Homo sapien
tcttgttaactacaacattgttgtt

SEQ ID NO: 4436279 - DNA, 25 bp, Homo sapien
ggcggtggacgggaggccgcggcgc

SEQ ID NO: 4436280 - DNA, 25 bp, Homo sapien
cgcctcggctgtgccgttggcggtc

SEQ ID NO: 4436281 - DNA, 25 bp, Homo sapien
cctcggctgtgccgttggcggtcat

SEQ ID NO: 4436282 - DNA, 25 bp, Homo sapien
ttgttgccgcagttgatgaggccga

SEQ ID NO: 4436283 - DNA, 25 bp, Homo sapien
gttgccgcagttgatgaggccgaac

SEQ ID NO: 4436284 - DNA, 25 bp, Homo sapien
tgaacccgaacgcctccgccctcag

SEQ ID NO: 4436285 - DNA, 25 bp, Homo sapien
ttgaacccgaacgcctccgccctca

SEQ ID NO: 4436286 - DNA, 25 bp, Homo sapien
cttcaggctgctggccgacgcgtta

SEQ ID NO: 4436287 - DNA, 25 bp, Homo sapien
ttcttcaggctgctggccgacgcgt

SEQ ID NO: 4436288 - DNA, 25 bp, Homo sapien
gctgcttcttcaggctgctggccga

SEQ ID NO: 4436289 - DNA, 25 bp, Homo sapien
tcaggctgctggccgacgcgttaac

SEQ ID NO: 4436290 - DNA, 25 bp, Homo sapien
tgcgcaggcacacggccgcgctgcc

SEQ ID NO: 4436291 - DNA, 25 bp, Homo sapien
gcaggcacacggccgcgctgcccgc

SEQ ID NO: 4436292 - DNA, 25 bp, Homo sapien
ctgcgcaggcacacggccgcgctgc

SEQ ID NO: 4436293 - DNA, 25 bp, Homo sapien
gcgcaggcacacggccgcgctgccc

SEQ ID NO: 4436294 - DNA, 25 bp, Homo sapien
gtgcgcctcggactgcagcgaccag

SEQ ID NO: 4436295 - DNA, 25 bp, Homo sapien
ttgtccgccgccaggtagcggccca

SEQ ID NO: 4436296 - DNA, 25 bp, Homo sapien
acgctccacttctcggcgggggaca

SEQ ID NO: 4436297 - DNA, 25 bp, Homo sapien
tgcatggcgatgtgcacgctccact

SEQ ID NO: 4436298 - DNA, 25 bp, Homo sapien
ctcgtcggccggcggcgcgctcagg

SEQ ID NO: 4436299 - DNA, 25 bp, Homo sapien
tcgtcggccggcggcgcgctcaggt

SEQ ID NO: 4436300 - DNA, 25 bp, Homo sapien
cggccggcggcgcgctcaggtgcgc

SEQ ID NO: 4436301 - DNA, 25 bp, Homo sapien
gtcggccggcggcgcgctcaggtgc

SEQ ID NO: 4436302 - DNA, 25 bp, Homo sapien
gagcgagtcgacgccccagggcacg

SEQ ID NO: 4436303 - DNA, 25 bp, Homo sapien
agcgagtcgacgccccagggcacgt

SEQ ID NO: 4436304 - DNA, 25 bp, Homo sapien
cagctggaaggtctcctggtcggtc

SEQ ID NO: 4436305 - DNA, 25 bp, Homo sapien
tgtcgcggtcgatctccagctggaa

SEQ ID NO: 4436306 - DNA, 25 bp, Homo sapien
ttgcccgccttgagcgtgccgctgg

SEQ ID NO: 4436307 - DNA, 25 bp, Homo sapien
taacggccctcgcagtcgcggaagg

SEQ ID NO: 4436308 - DNA, 25 bp, Homo sapien
gctcaatgtcgaagtagcagctggc

SEQ ID NO: 4436309 - DNA, 25 bp, Homo sapien
cacgccgctcaatgtcgaagtagca

SEQ ID NO: 4436310 - DNA, 25 bp, Homo sapien
ccggtcacgccgctcaatgtcgaag

SEQ ID NO: 4436311 - DNA, 25 bp, Homo sapien
gtgctccccgcgcaacacggtgatg

SEQ ID NO: 4436312 - DNA, 25 bp, Homo sapien
ctggaagacgtcatagctgcagcgg

SEQ ID NO: 4436313 - DNA, 25 bp, Homo sapien
gctgcagcggttggcgtccagggtg

SEQ ID NO: 4436314 - DNA, 25 bp, Homo sapien
gaagacgtcatagctgcagcggttg

SEQ ID NO: 4436315 - DNA, 25 bp, Homo sapien
gcggttggcgtccagggtgccccga

SEQ ID NO: 4436316 - DNA, 25 bp, Homo sapien
tagcgcccgtccatcttgatggcct

SEQ ID NO: 4436317 - DNA, 25 bp, Homo sapien
tgtaggtaccattgttgaactccag

SEQ ID NO: 4436318 - DNA, 25 bp, Homo sapien
gatgttgtaggtaccattgttgaac

SEQ ID NO: 4436319 - DNA, 25 bp, Homo sapien
ctttgatgttgtaggtaccattgtt

SEQ ID NO: 4436320 - DNA, 25 bp, Homo sapien
cacggtctccgcggaggcccttagg

SEQ ID NO: 4436321 - DNA, 25 bp, Homo sapien
gggtgcacggtctccgcggaggccc

SEQ ID NO: 4436322 - DNA, 25 bp, Homo sapien
tagtactcccagagcgaggcggggt

SEQ ID NO: 4436323 - DNA, 25 bp, Homo sapien
aggcggggtgcacggtctccgcgga

SEQ ID NO: 4436324 - DNA, 25 bp, Homo sapien
tctggggtttccagtttgaaaggca

SEQ ID NO: 4436325 - DNA, 25 bp, Homo sapien
ttagccgcttccagagaaataaggc

SEQ ID NO: 4436326 - DNA, 25 bp, Homo sapien
aaataaggctcagagccgtctgagg

SEQ ID NO: 4436327 - DNA, 25 bp, Homo sapien
gactcgccccgtggcagacaagagg

SEQ ID NO: 4436328 - DNA, 25 bp, Homo sapien
tttgaagctactatcatgggcgttt

SEQ ID NO: 4436329 - DNA, 25 bp, Homo sapien
gtttgaagctactatcatgggcgtt

SEQ ID NO: 4436330 - DNA, 25 bp, Homo sapien
caactcgtctttacacgtctgacca

SEQ ID NO: 4436331 - DNA, 25 bp, Homo sapien
tcgtctttacacgtctgaccatcaa

SEQ ID NO: 4436332 - DNA, 25 bp, Homo sapien
tttacacgtctgaccatcaaggctc

SEQ ID NO: 4436333 - DNA, 25 bp, Homo sapien
cacgtctgaccatcaaggctcttct

SEQ ID NO: 4436334 - DNA, 25 bp, Homo sapien
aagtttctgggactatcttccacaa

SEQ ID NO: 4436335 - DNA, 25 bp, Homo sapien
gactcctcgcgtggcgtaagcttgg

SEQ ID NO: 4436336 - DNA, 25 bp, Homo sapien
cgccgtagatgagtggaagatgtcc

SEQ ID NO: 4436337 - DNA, 25 bp, Homo sapien
ggcagtggttatgttgccctttgaa

SEQ ID NO: 4436338 - DNA, 25 bp, Homo sapien
ttagtggctgtgccgccctgagctt

SEQ ID NO: 4436339 - DNA, 25 bp, Homo sapien
aaggaaccagatgggtcgggcagaa

SEQ ID NO: 4436340 - DNA, 25 bp, Homo sapien
tcggcgagtgtgaggaaggaaccag

SEQ ID NO: 4436341 - DNA, 25 bp, Homo sapien
agatgggtcgggcagaaaggtgctg

SEQ ID NO: 4436342 - DNA, 25 bp, Homo sapien
aactgacgcatgcttttcttgacag

SEQ ID NO: 4436343 - DNA, 25 bp, Homo sapien
tatgtttctcgtctcaacgctaaca

SEQ ID NO: 4436344 - DNA, 25 bp, Homo sapien
gacagttagcttgaggcacacggtt

SEQ ID NO: 4436345 - DNA, 25 bp, Homo sapien
cttttcttgacagttagcttgaggc

SEQ ID NO: 4436346 - DNA, 25 bp, Homo sapien
taaacacaggctcaagctatgtccc

SEQ ID NO: 4436347 - DNA, 25 bp, Homo sapien
gcctaactcattactggatgtcagt

SEQ ID NO: 4436348 - DNA, 25 bp, Homo sapien
tcccttaggatctgtgccctcaggc

SEQ ID NO: 4436349 - DNA, 25 bp, Homo sapien
atctgtagggccagagcccggcaaa

SEQ ID NO: 4436350 - DNA, 25 bp, Homo sapien
ttcaaatgcttttgtcaccgggctg

SEQ ID NO: 4436351 - DNA, 25 bp, Homo sapien
gccatcatacacatcagtcttttca

SEQ ID NO: 4436352 - DNA, 25 bp, Homo sapien
tttgtcaccgggctgagtccaaagg

SEQ ID NO: 4436353 - DNA, 25 bp, Homo sapien
aggaaatagccatcatacacatcag

SEQ ID NO: 4436354 - DNA, 25 bp, Homo sapien
agccattctcctcggccttgctgtc

SEQ ID NO: 4436355 - DNA, 25 bp, Homo sapien
ggccgcgtaggagtccaccaggttc

SEQ ID NO: 4436356 - DNA, 25 bp, Homo sapien
gagtgcatgaagctgtcggagccat

SEQ ID NO: 4436357 - DNA, 25 bp, Homo sapien
aatggccgcgtaggagtccaccagg

SEQ ID NO: 4436358 - DNA, 25 bp, Homo sapien
gtgcatgatggtcttgggcgtgaca

SEQ ID NO: 4436359 - DNA, 25 bp, Homo sapien
catgatggtcttgggcgtgacacca

SEQ ID NO: 4436360 - DNA, 25 bp, Homo sapien
gcatgatggtcttgggcgtgacacc

SEQ ID NO: 4436361 - DNA, 25 bp, Homo sapien
tgatggtcttgggcgtgacaccaac

SEQ ID NO: 4436362 - DNA, 25 bp, Homo sapien
ggttggacagcaactctgataatat

SEQ ID NO: 4436363 - DNA, 25 bp, Homo sapien
aggttggacagcaactctgataata

SEQ ID NO: 4436364 - DNA, 25 bp, Homo sapien
ttggacagcaactctgataatatga

SEQ ID NO: 4436365 - DNA, 25 bp, Homo sapien
gttggacagcaactctgataatatg

SEQ ID NO: 4436366 - DNA, 25 bp, Homo sapien
gcccccatgtgcgtgctgatggtgg

SEQ ID NO: 4436367 - DNA, 25 bp, Homo sapien
cccccatgtgcgtgctgatggtggt

SEQ ID NO: 4436368 - DNA, 25 bp, Homo sapien
tgcgtctggcaaggacgctctgcac

SEQ ID NO: 4436369 - DNA, 25 bp, Homo sapien
ctgcgtctggcaaggacgctctgca

SEQ ID NO: 4436370 - DNA, 25 bp, Homo sapien
gggagccttggggccatgggggcca

SEQ ID NO: 4436371 - DNA, 25 bp, Homo sapien
ggctggggagccttggggccatggg

SEQ ID NO: 4436372 - DNA, 25 bp, Homo sapien
ggggctggggagccttggggccatg

SEQ ID NO: 4436373 - DNA, 25 bp, Homo sapien
gagccttggggccatgggggccagc

SEQ ID NO: 4436374 - DNA, 25 bp, Homo sapien
tcacatgctagcagctatgatggta

SEQ ID NO: 4436375 - DNA, 25 bp, Homo sapien
cacatgctagcagctatgatggtac

SEQ ID NO: 4436376 - DNA, 25 bp, Homo sapien
ctgacagaaggaacatcgctcgaac

SEQ ID NO: 4436377 - DNA, 25 bp, Homo sapien
gaaggaacatcgctcgaacaaggat

SEQ ID NO: 4436378 - DNA, 25 bp, Homo sapien
atcgctcgaacaaggatgatgaagc

SEQ ID NO: 4436379 - DNA, 25 bp, Homo sapien
ggggagcccaacgtaacagccacca

SEQ ID NO: 4436380 - DNA, 25 bp, Homo sapien
ggccagtgcggagcacaggtgtgcc

SEQ ID NO: 4436381 - DNA, 25 bp, Homo sapien
ggtgaggccagtgcggagcacaggt

SEQ ID NO: 4436382 - DNA, 25 bp, Homo sapien
cagtgcggagcacaggtgtgccaca

SEQ ID NO: 4436383 - DNA, 25 bp, Homo sapien
ctggtgaggccagtgcggagcacag

SEQ ID NO: 4436384 - DNA, 25 bp, Homo sapien
tgcgtgacccgatcggctggcagtt

SEQ ID NO: 4436385 - DNA, 25 bp, Homo sapien
aagaggagagacaaaagggagcaga

SEQ ID NO: 4436386 - DNA, 25 bp, Homo sapien
aggagagacaaaagggagcagagag

SEQ ID NO: 4436387 - DNA, 25 bp, Homo sapien
ttgcgtgacccgatcggctggcagt

SEQ ID NO: 4436388 - DNA, 25 bp, Homo sapien
ccaagtcacagaacagccgcccagg

SEQ ID NO: 4436389 - DNA, 25 bp, Homo sapien
gagccactgccaagtcacagaacag

SEQ ID NO: 4436390 - DNA, 25 bp, Homo sapien
ggaggcctccgagaagaggagggat

SEQ ID NO: 4436391 - DNA, 25 bp, Homo sapien
tacaacagactaagtcacagatgaa

SEQ ID NO: 4436392 - DNA, 25 bp, Homo sapien
caagtttcacaacagtcacacctgg

SEQ ID NO: 4436393 - DNA, 25 bp, Homo sapien
ggggcacaagtttcacaacagtcac

SEQ ID NO: 4436394 - DNA, 25 bp, Homo sapien
gggcacaagtttcacaacagtcaca

SEQ ID NO: 4436395 - DNA, 25 bp, Homo sapien
tttcacaacagtcacacctggacgt

SEQ ID NO: 4436396 - DNA, 25 bp, Homo sapien
ggggcaatgtcgggacagctttctc

SEQ ID NO: 4436397 - DNA, 25 bp, Homo sapien
tggaggggcaatgtcgggacagctt

SEQ ID NO: 4436398 - DNA, 25 bp, Homo sapien
gaggggcaatgtcgggacagctttc

SEQ ID NO: 4436399 - DNA, 25 bp, Homo sapien
aggggcaatgtcgggacagctttct

SEQ ID NO: 4436400 - DNA, 25 bp, Homo sapien
aggctgagttcgtggccctgccccc

SEQ ID NO: 4436401 - DNA, 25 bp, Homo sapien
aagcctgttgtagcggtggccggga

SEQ ID NO: 4436402 - DNA, 25 bp, Homo sapien
agaggacacacttccccgtcatcca

SEQ ID NO: 4436403 - DNA, 25 bp, Homo sapien
gctcggaagcctgttgtagcggtgg

SEQ ID NO: 4436404 - DNA, 25 bp, Homo sapien
tagcacttggcagcctcatgatcct

SEQ ID NO: 4436405 - DNA, 25 bp, Homo sapien
tgatactgtgcaaatactgggcatg

SEQ ID NO: 4436406 - DNA, 25 bp, Homo sapien
gaataacagatttgccggcattcac

SEQ ID NO: 4436407 - DNA, 25 bp, Homo sapien
taaataggagattaacaggagagca

SEQ ID NO: 4436408 - DNA, 25 bp, Homo sapien
gaaacatgtctatacgatcgcagag

SEQ ID NO: 4436409 - DNA, 25 bp, Homo sapien
tgtctatacgatcgcagagttgtat

SEQ ID NO: 4436410 - DNA, 25 bp, Homo sapien
caggaaacatgtctatacgatcgca

SEQ ID NO: 4436411 - DNA, 25 bp, Homo sapien
acatgtctatacgatcgcagagttg

SEQ ID NO: 4436412 - DNA, 25 bp, Homo sapien
tccttgagtggaaaacactttagaa

SEQ ID NO: 4436413 - DNA, 25 bp, Homo sapien
attttactatctagacctctctggc

SEQ ID NO: 4436414 - DNA, 25 bp, Homo sapien
cttctttgaggcttgaagtttgatt

SEQ ID NO: 4436415 - DNA, 25 bp, Homo sapien
cacctcggttactctgacataggaa

SEQ ID NO: 4436416 - DNA, 25 bp, Homo sapien
agctcaatatgcggtttgccctcaa

SEQ ID NO: 4436417 - DNA, 25 bp, Homo sapien
tttcatttcataattgtaggtcatt

SEQ ID NO: 4436418 - DNA, 25 bp, Homo sapien
ttcatttgaatgttagagctactca

SEQ ID NO: 4436419 - DNA, 25 bp, Homo sapien
tgtgcctctcactgatgttcactct

SEQ ID NO: 4436420 - DNA, 25 bp, Homo sapien
tgtgtgccatgcttttgctgggctt

SEQ ID NO: 4436421 - DNA, 25 bp, Homo sapien
ccactgcccccggatgccccagcag

SEQ ID NO: 4436422 - DNA, 25 bp, Homo sapien
actgcccccggatgccccagcagtg

SEQ ID NO: 4436423 - DNA, 25 bp, Homo sapien
ctgcccccggatgccccagcagtgt

SEQ ID NO: 4436424 - DNA, 25 bp, Homo sapien
agccactgcccccggatgccccagc

SEQ ID NO: 4436425 - DNA, 25 bp, Homo sapien
ggagaagaagcatgatacgcatcgg

SEQ ID NO: 4436426 - DNA, 25 bp, Homo sapien
aagcatgatacgcatcgggtagagg

SEQ ID NO: 4436427 - DNA, 25 bp, Homo sapien
gaagaagcatgatacgcatcgggta

SEQ ID NO: 4436428 - DNA, 25 bp, Homo sapien
catgatacgcatcgggtagaggagc

SEQ ID NO: 4436429 - DNA, 25 bp, Homo sapien
gcagcagaggatgaggaaaatgtcg

SEQ ID NO: 4436430 - DNA, 25 bp, Homo sapien
tgaacaaataaaaggagagagggcc

SEQ ID NO: 4436431 - DNA, 25 bp, Homo sapien
aaggagagagggcccagtggcagca

SEQ ID NO: 4436432 - DNA, 25 bp, Homo sapien
tggagagagatcaatatgctgaaca

SEQ ID NO: 4436433 - DNA, 25 bp, Homo sapien
tcagtgtccataggatgcgcgccgt

SEQ ID NO: 4436434 - DNA, 25 bp, Homo sapien
cagaagcgctggtgttcccgttagc

SEQ ID NO: 4436435 - DNA, 25 bp, Homo sapien
gaggacacatcctccgtgatgggca

SEQ ID NO: 4436436 - DNA, 25 bp, Homo sapien
gcgctctgacgcttctggtgggcca

SEQ ID NO: 4436437 - DNA, 25 bp, Homo sapien
ggggtctggtcttggacttgaagcc

SEQ ID NO: 4436438 - DNA, 25 bp, Homo sapien
gggtctggtcttggacttgaagcct

SEQ ID NO: 4436439 - DNA, 25 bp, Homo sapien
tggggtctggtcttggacttgaagc

SEQ ID NO: 4436440 - DNA, 25 bp, Homo sapien
cagacgtgggtgtggcaggtcttgg

SEQ ID NO: 4436441 - DNA, 25 bp, Homo sapien
gagttgggggcagacgtgggtgtgg

SEQ ID NO: 4436442 - DNA, 25 bp, Homo sapien
ttctcttctctgaaggttgactggg

SEQ ID NO: 4436443 - DNA, 25 bp, Homo sapien
ggccagggggctccatttcattcca

SEQ ID NO: 4436444 - DNA, 25 bp, Homo sapien
tgaccacagtcactttactataagc

SEQ ID NO: 4436445 - DNA, 25 bp, Homo sapien
tccttccactcctgccaaggtggga

SEQ ID NO: 4436446 - DNA, 25 bp, Homo sapien
tcctgccaaggtgggatcatgaccc

SEQ ID NO: 4436447 - DNA, 25 bp, Homo sapien
cagcctgtaggatctgtgttccttc

SEQ ID NO: 4436448 - DNA, 25 bp, Homo sapien
catgttgccgggtgtttctcaggga

SEQ ID NO: 4436449 - DNA, 25 bp, Homo sapien
tgaaatctttaactgtctactgggt

SEQ ID NO: 4436450 - DNA, 25 bp, Homo sapien
tgggtgtatttgtctggaaccttgc

SEQ ID NO: 4436451 - DNA, 25 bp, Homo sapien
tggttctgcatgttgccgggtgttt

SEQ ID NO: 4436452 - DNA, 25 bp, Homo sapien
gattccaacctaatttcctagtcag

SEQ ID NO: 4436453 - DNA, 25 bp, Homo sapien
tattgttgtgccactatctaccgtg

SEQ ID NO: 4436454 - DNA, 25 bp, Homo sapien
caggtttgtcatgggttaagtagct

SEQ ID NO: 4436455 - DNA, 25 bp, Homo sapien
actttgacctctctgttttggcagg

SEQ ID NO: 4436456 - DNA, 25 bp, Homo sapien
ctgtccaaatctcatctccaattgt

SEQ ID NO: 4436457 - DNA, 25 bp, Homo sapien
tgtccctgtccaaatctcatctcca

SEQ ID NO: 4436458 - DNA, 25 bp, Homo sapien
tccctgtccaaatctcatctccaat

SEQ ID NO: 4436459 - DNA, 25 bp, Homo sapien
cctgtccaaatctcatctccaattg

SEQ ID NO: 4436460 - DNA, 25 bp, Homo sapien
tggaaggatggcgggatggacttta

SEQ ID NO: 4436461 - DNA, 25 bp, Homo sapien
atggcgggatggactttaatttgct

SEQ ID NO: 4436462 - DNA, 25 bp, Homo sapien
gaaggatggcgggatggactttaat

SEQ ID NO: 4436463 - DNA, 25 bp, Homo sapien
aggatggcgggatggactttaattt

SEQ ID NO: 4436464 - DNA, 25 bp, Homo sapien
tctgtagtaaccagtcctcctgtca

SEQ ID NO: 4436465 - DNA, 25 bp, Homo sapien
ctgctctggtatcacatgttgttcg

SEQ ID NO: 4436466 - DNA, 25 bp, Homo sapien
cctccctgcagtagctctgtagtaa

SEQ ID NO: 4436467 - DNA, 25 bp, Homo sapien
tgctctggtatcacatgttgttcgt

SEQ ID NO: 4436468 - DNA, 25 bp, Homo sapien
aatactgtggggcattctcagtctc

SEQ ID NO: 4436469 - DNA, 25 bp, Homo sapien
caaatactgtggggcattctcagtc

SEQ ID NO: 4436470 - DNA, 25 bp, Homo sapien
atactgtggggcattctcagtctca

SEQ ID NO: 4436471 - DNA, 25 bp, Homo sapien
tactgtggggcattctcagtctcac

SEQ ID NO: 4436472 - DNA, 25 bp, Homo sapien
gcctacagcttgtcatatcaaatgc

SEQ ID NO: 4436473 - DNA, 25 bp, Homo sapien
ttttaagcctacagcttgtcatatc

SEQ ID NO: 4436474 - DNA, 25 bp, Homo sapien
tcatttttaagcctacagcttgtca

SEQ ID NO: 4436475 - DNA, 25 bp, Homo sapien
gcttgtcatatcaaatgctgttgcc

SEQ ID NO: 4436476 - DNA, 25 bp, Homo sapien
gaatagcagctactagggtagtgcc

SEQ ID NO: 4436477 - DNA, 25 bp, Homo sapien
tgtttcagaacttggttaccagtga

SEQ ID NO: 4436478 - DNA, 25 bp, Homo sapien
ttaataaaccccacagcctgaatag

SEQ ID NO: 4436479 - DNA, 25 bp, Homo sapien
cactgggaactgaggtaagtagaag

SEQ ID NO: 4436480 - DNA, 25 bp, Homo sapien
gtttttctgtcatgagcttggtttc

SEQ ID NO: 4436481 - DNA, 25 bp, Homo sapien
tgtgcctgaaaaccggtgacttgtt

SEQ ID NO: 4436482 - DNA, 25 bp, Homo sapien
aaggcgtttgaaatctctgtgtgcc

SEQ ID NO: 4436483 - DNA, 25 bp, Homo sapien
tctgtgtgcctgaaaaccggtgact

SEQ ID NO: 4436484 - DNA, 25 bp, Homo sapien
tggtattccctaactcgaatcttac

SEQ ID NO: 4436485 - DNA, 25 bp, Homo sapien
ggactgaacatggtattccctaact

SEQ ID NO: 4436486 - DNA, 25 bp, Homo sapien
tgaacatggtattccctaactcgaa

SEQ ID NO: 4436487 - DNA, 25 bp, Homo sapien
caggactgaacatggtattccctaa

SEQ ID NO: 4436488 - DNA, 25 bp, Homo sapien
cattggatgggcgttgcttcccgtc

SEQ ID NO: 4436489 - DNA, 25 bp, Homo sapien
tctttggataaagggcctgaatctg

SEQ ID NO: 4436490 - DNA, 25 bp, Homo sapien
ggtagttgtcaacagaggcaaagga

SEQ ID NO: 4436491 - DNA, 25 bp, Homo sapien
tctgagatgcagacttttcaggctc

SEQ ID NO: 4436492 - DNA, 25 bp, Homo sapien
gcagcgggcatatttgggaatccat

SEQ ID NO: 4436493 - DNA, 25 bp, Homo sapien
catgtaaatcatggccttcaaatcc

SEQ ID NO: 4436494 - DNA, 25 bp, Homo sapien
gggaatccattgttgctgcacatgt

SEQ ID NO: 4436495 - DNA, 25 bp, Homo sapien
ggagctaagtctcttgcagcgggca

SEQ ID NO: 4436496 - DNA, 25 bp, Homo sapien
tctgctcttccgcagcacccagagg

SEQ ID NO: 4436497 - DNA, 25 bp, Homo sapien
ctgctcttccgcagcacccagagga

SEQ ID NO: 4436498 - DNA, 25 bp, Homo sapien
gcacccagaggagacacctgcatac

SEQ ID NO: 4436499 - DNA, 25 bp, Homo sapien
gcagcacccagaggagacacctgca

SEQ ID NO: 4436500 - DNA, 25 bp, Homo sapien
cacattacagttaaatagaacacaa

SEQ ID NO: 4436501 - DNA, 25 bp, Homo sapien
tgtttggcaaaacgccgatgtctgc

SEQ ID NO: 4436502 - DNA, 25 bp, Homo sapien
tagaacacaatgcttctgatgatgc

SEQ ID NO: 4436503 - DNA, 25 bp, Homo sapien
gacctgctccaagttgcctatagaa

SEQ ID NO: 4436504 - DNA, 25 bp, Homo sapien
gttgcaaagcatgtggtttccgtca

SEQ ID NO: 4436505 - DNA, 25 bp, Homo sapien
ttgcaaagcatgtggtttccgtcat

SEQ ID NO: 4436506 - DNA, 25 bp, Homo sapien
tccagttgcaaagcatgtggtttcc

SEQ ID NO: 4436507 - DNA, 25 bp, Homo sapien
cagttgcaaagcatgtggtttccgt

SEQ ID NO: 4436508 - DNA, 25 bp, Homo sapien
caggttcctgtgacatcatgcccca

SEQ ID NO: 4436509 - DNA, 25 bp, Homo sapien
catttcaatctggatgaacagatca

SEQ ID NO: 4436510 - DNA, 25 bp, Homo sapien
gacatcatgccccattctcatactg

SEQ ID NO: 4436511 - DNA, 25 bp, Homo sapien
actccacgtgggaatgtatgccagc

SEQ ID NO: 4436512 - DNA, 25 bp, Homo sapien
ggtactgtcccttactgttctgctg

SEQ ID NO: 4436513 - DNA, 25 bp, Homo sapien
gatgttcacctatcacaagcagggt

SEQ ID NO: 4436514 - DNA, 25 bp, Homo sapien
caagcagggtgccaaggtactgtcc

SEQ ID NO: 4436515 - DNA, 25 bp, Homo sapien
gaaaaggacagcaattcctctggga

SEQ ID NO: 4436516 - DNA, 25 bp, Homo sapien
gagcctgttgttaactgcattggca

SEQ ID NO: 4436517 - DNA, 25 bp, Homo sapien
cctgttgttaactgcattggcattg

SEQ ID NO: 4436518 - DNA, 25 bp, Homo sapien
tcagagcctgttgttaactgcattg

SEQ ID NO: 4436519 - DNA, 25 bp, Homo sapien
tgttaactgcattggcattgcatta

SEQ ID NO: 4436520 - DNA, 25 bp, Homo sapien
ggaggatggaattgcctgccagaaa

SEQ ID NO: 4436521 - DNA, 25 bp, Homo sapien
ctgaggtacaaaatccatgtgcact

SEQ ID NO: 4436522 - DNA, 25 bp, Homo sapien
gcaatggggctgaggtacaaaatcc

SEQ ID NO: 4436523 - DNA, 25 bp, Homo sapien
gaggatggaattgcctgccagaaat

SEQ ID NO: 4436524 - DNA, 25 bp, Homo sapien
tatgtaagagcttggaacgtgaccc

SEQ ID NO: 4436525 - DNA, 25 bp, Homo sapien
caagggcagagcagtatgtaagagc

SEQ ID NO: 4436526 - DNA, 25 bp, Homo sapien
ggaacgtgacccttatctgagctgc

SEQ ID NO: 4436527 - DNA, 25 bp, Homo sapien
gcagagcagtatgtaagagcttgga

SEQ ID NO: 4436528 - DNA, 25 bp, Homo sapien
ctcccctttgaagacaccccatggg

SEQ ID NO: 4436529 - DNA, 25 bp, Homo sapien
cctttgaagacaccccatggggcct

SEQ ID NO: 4436530 - DNA, 25 bp, Homo sapien
aggctcccctttgaagacaccccat

SEQ ID NO: 4436531 - DNA, 25 bp, Homo sapien
ttgtcagccaaaggctcccctttga

SEQ ID NO: 4436532 - DNA, 25 bp, Homo sapien
gtaggcccaaatgcagcaggtgaca

SEQ ID NO: 4436533 - DNA, 25 bp, Homo sapien
ccaaatgcagcaggtgacaagtcac

SEQ ID NO: 4436534 - DNA, 25 bp, Homo sapien
cccaaatgcagcaggtgacaagtca

SEQ ID NO: 4436535 - DNA, 25 bp, Homo sapien
ggcccaaatgcagcaggtgacaagt

SEQ ID NO: 4436536 - DNA, 25 bp, Homo sapien
agttgcgcggcccttgtatagaagc

SEQ ID NO: 4436537 - DNA, 25 bp, Homo sapien
gcgcggcccttgtatagaagcagag

SEQ ID NO: 4436538 - DNA, 25 bp, Homo sapien
tggcggcgcctccaacaaggggact

SEQ ID NO: 4436539 - DNA, 25 bp, Homo sapien
tgcagaagggccctctccagttgcg

SEQ ID NO: 4436540 - DNA, 25 bp, Homo sapien
cagggagcggctgtctgggttcagc

SEQ ID NO: 4436541 - DNA, 25 bp, Homo sapien
agctcctctcttctcattagggagc

SEQ ID NO: 4436542 - DNA, 25 bp, Homo sapien
tgtctgggttcagctcctctcttct

SEQ ID NO: 4436543 - DNA, 25 bp, Homo sapien
ctaaggcgtcaacagggagcggctg

SEQ ID NO: 4436544 - DNA, 25 bp, Homo sapien
gtctataagagaagccgaggctcag

SEQ ID NO: 4436545 - DNA, 25 bp, Homo sapien
cactttggcccagatagactcatga

SEQ ID NO: 4436546 - DNA, 25 bp, Homo sapien
tattcttggcaataacccactttgg

SEQ ID NO: 4436547 - DNA, 25 bp, Homo sapien
taatgtaggcatggagatctcacct

SEQ ID NO: 4436548 - DNA, 25 bp, Homo sapien
tgaaatgagggtggctgctacttac

SEQ ID NO: 4436549 - DNA, 25 bp, Homo sapien
aatgagggtggctgctacttacgga

SEQ ID NO: 4436550 - DNA, 25 bp, Homo sapien
cccagggtgttgaaatgagggtggc

SEQ ID NO: 4436551 - DNA, 25 bp, Homo sapien
gttgaaatgagggtggctgctactt

SEQ ID NO: 4436552 - DNA, 25 bp, Homo sapien
cttttttccgcttagtaatagatgg

SEQ ID NO: 4436553 - DNA, 25 bp, Homo sapien
cccaagaccagtcgggctaacatgg

SEQ ID NO: 4436554 - DNA, 25 bp, Homo sapien
ggagcccaagaccagtcgggctaac

SEQ ID NO: 4436555 - DNA, 25 bp, Homo sapien
tagtaatagatggttaaggctgggt

SEQ ID NO: 4436556 - DNA, 25 bp, Homo sapien
tctagaagcaccttgggtggctctc

SEQ ID NO: 4436557 - DNA, 25 bp, Homo sapien
tgggtgtgtgtttatctctagaagc

SEQ ID NO: 4436558 - DNA, 25 bp, Homo sapien
tgggtggctctccctttgtcaccac

SEQ ID NO: 4436559 - DNA, 25 bp, Homo sapien
tgtttatctctagaagcaccttggg

SEQ ID NO: 4436560 - DNA, 25 bp, Homo sapien
gcagatcagcagaagctggatagac

SEQ ID NO: 4436561 - DNA, 25 bp, Homo sapien
gaagctggatagactcctggaagct

SEQ ID NO: 4436562 - DNA, 25 bp, Homo sapien
tatgaaaagtctgggtgttgatcag

SEQ ID NO: 4436563 - DNA, 25 bp, Homo sapien
cagatgttgtgggccagtcagtcct

SEQ ID NO: 4436564 - DNA, 25 bp, Homo sapien
ctgcagccaacctgagaaaaataag

SEQ ID NO: 4436565 - DNA, 25 bp, Homo sapien
gccaacctgagaaaaataagacaac

SEQ ID NO: 4436566 - DNA, 25 bp, Homo sapien
gcagccaacctgagaaaaataagac

SEQ ID NO: 4436567 - DNA, 25 bp, Homo sapien
cagccaacctgagaaaaataagaca

SEQ ID NO: 4436568 - DNA, 25 bp, Homo sapien
aagctgtggatggaagactgcccac

SEQ ID NO: 4436569 - DNA, 25 bp, Homo sapien
cccacaattttcagggcttgagcag

SEQ ID NO: 4436570 - DNA, 25 bp, Homo sapien
atggtggcaagacgggctgaccaca

SEQ ID NO: 4436571 - DNA, 25 bp, Homo sapien
gcagtggccatggatgagactttca

SEQ ID NO: 4436572 - DNA, 25 bp, Homo sapien
aaagatctaaactcaagacagcggg

SEQ ID NO: 4436573 - DNA, 25 bp, Homo sapien
tattagttcgctaaagctggtgcca

SEQ ID NO: 4436574 - DNA, 25 bp, Homo sapien
taagcattcatcttggaaggctgga

SEQ ID NO: 4436575 - DNA, 25 bp, Homo sapien
tgcaggtgatcgtcttctcaagatg

SEQ ID NO: 4436576 - DNA, 25 bp, Homo sapien
gagtaaagaaacagatcctcctccg

SEQ ID NO: 4436577 - DNA, 25 bp, Homo sapien
tagcatatgcttgggtgtgaaagaa

SEQ ID NO: 4436578 - DNA, 25 bp, Homo sapien
tttaagacgtctcccagagatggag

SEQ ID NO: 4436579 - DNA, 25 bp, Homo sapien
gcagttgaagatgattatccttgag

SEQ ID NO: 4436580 - DNA, 25 bp, Homo sapien
caacgtggggtttcctggacgattg

SEQ ID NO: 4436581 - DNA, 25 bp, Homo sapien
tcaccttctaattccaatgagcact

SEQ ID NO: 4436582 - DNA, 25 bp, Homo sapien
cttgaacattgcgaagcaacgtggg

SEQ ID NO: 4436583 - DNA, 25 bp, Homo sapien
gattgattttcaaacacgattgttg

SEQ ID NO: 4436584 - DNA, 25 bp, Homo sapien
tgcaaacttagagggaattacatgg

SEQ ID NO: 4436585 - DNA, 25 bp, Homo sapien
tgcttattggagaacggccatggca

SEQ ID NO: 4436586 - DNA, 25 bp, Homo sapien
gaaaaccttaggaatgtctcaatat

SEQ ID NO: 4436587 - DNA, 25 bp, Homo sapien
gcccttagtcgtgatgaaaacctta

SEQ ID NO: 4436588 - DNA, 25 bp, Homo sapien
tgtcccggccaactgagaagactgt

SEQ ID NO: 4436589 - DNA, 25 bp, Homo sapien
tatgagattcgtaacaaggacctgc

SEQ ID NO: 4436590 - DNA, 25 bp, Homo sapien
tgtatgagtgtaaccgctacccctg

SEQ ID NO: 4436591 - DNA, 25 bp, Homo sapien
tatccaagtggtgttccgaaatgcc

SEQ ID NO: 4436592 - DNA, 25 bp, Homo sapien
agcgacagccgcacggcgcgctctg

SEQ ID NO: 4436593 - DNA, 25 bp, Homo sapien
agggcggattagaggcggcggccgc

SEQ ID NO: 4436594 - DNA, 25 bp, Homo sapien
gtgacgcaggcggagactacttaag

SEQ ID NO: 4436595 - DNA, 25 bp, Homo sapien
ctccgccgacctggcgtgacgcagg

SEQ ID NO: 4436596 - DNA, 25 bp, Homo sapien
ccgagaagccccgaggggcgctgca

SEQ ID NO: 4436597 - DNA, 25 bp, Homo sapien
ccccgagaagccccgaggggcgctg

SEQ ID NO: 4436598 - DNA, 25 bp, Homo sapien
cgggcctccaggactcttgcccctc

SEQ ID NO: 4436599 - DNA, 25 bp, Homo sapien
gcagtccttcctttcgaaatcgccc

SEQ ID NO: 4436600 - DNA, 25 bp, Homo sapien
ccaaccacctcggttgttccagaag

SEQ ID NO: 4436601 - DNA, 25 bp, Homo sapien
cacctcggttgttccagaagtgaag

SEQ ID NO: 4436602 - DNA, 25 bp, Homo sapien
aaccacctcggttgttccagaagtg

SEQ ID NO: 4436603 - DNA, 25 bp, Homo sapien
ctcggttgttccagaagtgaaggct

SEQ ID NO: 4436604 - DNA, 25 bp, Homo sapien
gcaggaagccctgctatagcctgcc

SEQ ID NO: 4436605 - DNA, 25 bp, Homo sapien
agccctgctatagcctgccttgctg

SEQ ID NO: 4436606 - DNA, 25 bp, Homo sapien
catctctttcatacagactagaaag

SEQ ID NO: 4436607 - DNA, 25 bp, Homo sapien
tacagactagaaaggcactcagcag

SEQ ID NO: 4436608 - DNA, 25 bp, Homo sapien
actgtagagctcaggcaaaacctgg

SEQ ID NO: 4436609 - DNA, 25 bp, Homo sapien
gccctggccatgactgaactgtaga

SEQ ID NO: 4436610 - DNA, 25 bp, Homo sapien
gactgaactgtagagctcaggcaaa

SEQ ID NO: 4436611 - DNA, 25 bp, Homo sapien
gccatgactgaactgtagagctcag

SEQ ID NO: 4436612 - DNA, 25 bp, Homo sapien
tggcggcttttgtcttcgattgcaa

SEQ ID NO: 4436613 - DNA, 25 bp, Homo sapien
agagcctttgcctatgtgattccgc

SEQ ID NO: 4436614 - DNA, 25 bp, Homo sapien
gggatggtctggttgcacatacttc

SEQ ID NO: 4436615 - DNA, 25 bp, Homo sapien
tcattttaataaacatggcggcttt

SEQ ID NO: 4436616 - DNA, 25 bp, Homo sapien
gttcagtaccacaaggttcatccag

SEQ ID NO: 4436617 - DNA, 25 bp, Homo sapien
gaattaatatgacagttagctggga

SEQ ID NO: 4436618 - DNA, 25 bp, Homo sapien
tagctgggagttataatgctaactt

SEQ ID NO: 4436619 - DNA, 25 bp, Homo sapien
gcagattaaggtttagttccatata

SEQ ID NO: 4436620 - DNA, 25 bp, Homo sapien
gggctaggctccactacacatttag

SEQ ID NO: 4436621 - DNA, 25 bp, Homo sapien
cactctaggtaagtggagaaattcc

SEQ ID NO: 4436622 - DNA, 25 bp, Homo sapien
tgctcccttgcttggaacttcagag

SEQ ID NO: 4436623 - DNA, 25 bp, Homo sapien
ttagcaagcaagagtacgatgaggc

SEQ ID NO: 4436624 - DNA, 25 bp, Homo sapien
ccgaccccaccacacagctgcccat

SEQ ID NO: 4436625 - DNA, 25 bp, Homo sapien
tcagaaactctagggatggaatcag

SEQ ID NO: 4436626 - DNA, 25 bp, Homo sapien
cagttgcagatctgaaccagggcag

SEQ ID NO: 4436627 - DNA, 25 bp, Homo sapien
caagttcatgtagctggaatgcagc

SEQ ID NO: 4436628 - DNA, 25 bp, Homo sapien
gaccaacttgtgagtagctgccata

SEQ ID NO: 4436629 - DNA, 25 bp, Homo sapien
gaatctttgcctttagataatcaaa

SEQ ID NO: 4436630 - DNA, 25 bp, Homo sapien
tctttgcctttagataatcaaattg

SEQ ID NO: 4436631 - DNA, 25 bp, Homo sapien
tttagataatcaaattgcacaaaac

SEQ ID NO: 4436632 - DNA, 25 bp, Homo sapien
tgcctttagataatcaaattgcaca

SEQ ID NO: 4436633 - DNA, 25 bp, Homo sapien
atgctgaagcgggatggattgggtt

SEQ ID NO: 4436634 - DNA, 25 bp, Homo sapien
gcgggatggattgggtttacccaca

SEQ ID NO: 4436635 - DNA, 25 bp, Homo sapien
tgaagcgggatggattgggtttacc

SEQ ID NO: 4436636 - DNA, 25 bp, Homo sapien
ctgaagcgggatggattgggtttac

SEQ ID NO: 4436637 - DNA, 25 bp, Homo sapien
ctttccagagtgttcctgcagctcc

SEQ ID NO: 4436638 - DNA, 25 bp, Homo sapien
tctatccagtgcctgcatgaggctg

SEQ ID NO: 4436639 - DNA, 25 bp, Homo sapien
gacatcctgggaccattgctcctgg

SEQ ID NO: 4436640 - DNA, 25 bp, Homo sapien
gagtaatgcccactgttgaaactga

SEQ ID NO: 4436641 - DNA, 25 bp, Homo sapien
tgctcctggtggagtgcacttctcc

SEQ ID NO: 4436642 - DNA, 25 bp, Homo sapien
tgtaagccctgcaagattctgtgag

SEQ ID NO: 4436643 - DNA, 25 bp, Homo sapien
tgcaagcggtcctgagacatctgcc

SEQ ID NO: 4436644 - DNA, 25 bp, Homo sapien
ttgggaaaggccgtcacgtgcaagc

SEQ ID NO: 4436645 - DNA, 25 bp, Homo sapien
gacatctgcctggacacataagcat

SEQ ID NO: 4436646 - DNA, 25 bp, Homo sapien
gaaggatgctggccgtcctgcagct

SEQ ID NO: 4436647 - DNA, 25 bp, Homo sapien
catgtatccatttgtgtggagcttc

SEQ ID NO: 4436648 - DNA, 25 bp, Homo sapien
tgttgcttggggtcggcattaatca

SEQ ID NO: 4436649 - DNA, 25 bp, Homo sapien
cagctgtatatgttgcttggggtcg

SEQ ID NO: 4436650 - DNA, 25 bp, Homo sapien
gcttttggcacacattggtttagca

SEQ ID NO: 4436651 - DNA, 25 bp, Homo sapien
tcctctgcttttggcacacattggt

SEQ ID NO: 4436652 - DNA, 25 bp, Homo sapien
ggcacacattggtttagcagaccag

SEQ ID NO: 4436653 - DNA, 25 bp, Homo sapien
tccaaatcctctgcttttggcacac

SEQ ID NO: 4436654 - DNA, 25 bp, Homo sapien
gatgaacacgtgtcactgatactga

SEQ ID NO: 4436655 - DNA, 25 bp, Homo sapien
agtctgcccttcttcgatgaacacg

SEQ ID NO: 4436656 - DNA, 25 bp, Homo sapien
tgagacagcagcgttgcctgtttcc

SEQ ID NO: 4436657 - DNA, 25 bp, Homo sapien
gcctgtttcccaagtctgctccggg

SEQ ID NO: 4436658 - DNA, 25 bp, Homo sapien
tttgttcactggtacattcgtgagg

SEQ ID NO: 4436659 - DNA, 25 bp, Homo sapien
ctggtacattcgtgaggggggcata

SEQ ID NO: 4436660 - DNA, 25 bp, Homo sapien
catagaagaagggttttctgaggcc

SEQ ID NO: 4436661 - DNA, 25 bp, Homo sapien
tcactggtacattcgtgaggggggc

SEQ ID NO: 4436662 - DNA, 25 bp, Homo sapien
cctgttgcactgtggtgacaccata

SEQ ID NO: 4436663 - DNA, 25 bp, Homo sapien
tcgccatggcaaatgatggcttcct

SEQ ID NO: 4436664 - DNA, 25 bp, Homo sapien
taccaccataaagaccaagcacaat

SEQ ID NO: 4436665 - DNA, 25 bp, Homo sapien
gcattagttacgagcttcccatggt

SEQ ID NO: 4436666 - DNA, 25 bp, Homo sapien
tactattggcgaggagatcactggc

SEQ ID NO: 4436667 - DNA, 25 bp, Homo sapien
tcaagctggccaaccagtgcacaag

SEQ ID NO: 4436668 - DNA, 25 bp, Homo sapien
tgcccaagggcactatactattggc

SEQ ID NO: 4436669 - DNA, 25 bp, Homo sapien
catcttcggtgagacaggtgctggc

SEQ ID NO: 4436670 - DNA, 25 bp, Homo sapien
gaccttatgtacaaagatggccgat

SEQ ID NO: 4436671 - DNA, 25 bp, Homo sapien
gaatgcagcatggtactccggactg

SEQ ID NO: 4436672 - DNA, 25 bp, Homo sapien
tttccttagaacacgagccgggtgc

SEQ ID NO: 4436673 - DNA, 25 bp, Homo sapien
tgtcccactggaaagaatcatgttt

SEQ ID NO: 4436674 - DNA, 25 bp, Homo sapien
tcagcatttggttagaccttagaca

SEQ ID NO: 4436675 - DNA, 25 bp, Homo sapien
ggctcagagttgtacctaatttgct

SEQ ID NO: 4436676 - DNA, 25 bp, Homo sapien
catcatcaagactcccaaagttggt

SEQ ID NO: 4436677 - DNA, 25 bp, Homo sapien
tggactcatcgagacctggctcaga

SEQ ID NO: 4436678 - DNA, 25 bp, Homo sapien
gaagaggccatgactgttcaagctg

SEQ ID NO: 4436679 - DNA, 25 bp, Homo sapien
ggcagaagctaacacacctcaggat

SEQ ID NO: 4436680 - DNA, 25 bp, Homo sapien
ttatctgagaccacccctactgtgg

SEQ ID NO: 4436681 - DNA, 25 bp, Homo sapien
ccggaagagaccaagtagccaaact

SEQ ID NO: 4436682 - DNA, 25 bp, Homo sapien
gaagagctagttcgaattgactcaa

SEQ ID NO: 4436683 - DNA, 25 bp, Homo sapien
attttaccttaatggagcctgggat

SEQ ID NO: 4436684 - DNA, 25 bp, Homo sapien
tattgccagggcttaacaggactat

SEQ ID NO: 4436685 - DNA, 25 bp, Homo sapien
gactcaatgacagtgatacagtaag

SEQ ID NO: 4436686 - DNA, 25 bp, Homo sapien
tgctccagaaaccatgttggcctgg

SEQ ID NO: 4436687 - DNA, 25 bp, Homo sapien
tataaagggaactagcacaagctca

SEQ ID NO: 4436688 - DNA, 25 bp, Homo sapien
gttatgaaaaccgtccagccttcag

SEQ ID NO: 4436689 - DNA, 25 bp, Homo sapien
catagataggatacatgctccagaa

SEQ ID NO: 4436690 - DNA, 25 bp, Homo sapien
acctcaagttatctgctcgcctctg

SEQ ID NO: 4436691 - DNA, 25 bp, Homo sapien
tcaagttatctgctcgcctctgcct

SEQ ID NO: 4436692 - DNA, 25 bp, Homo sapien
cctcaagttatctgctcgcctctgc

SEQ ID NO: 4436693 - DNA, 25 bp, Homo sapien
gacctcaagttatctgctcgcctct

SEQ ID NO: 4436694 - DNA, 25 bp, Homo sapien
cttgtactgtgtcactttatggggt

SEQ ID NO: 4436695 - DNA, 25 bp, Homo sapien
gtactgtgtcactttatggggttgg

SEQ ID NO: 4436696 - DNA, 25 bp, Homo sapien
cccttcttgtactgtgtcactttat

SEQ ID NO: 4436697 - DNA, 25 bp, Homo sapien
ttcttgtactgtgtcactttatggg

SEQ ID NO: 4436698 - DNA, 25 bp, Homo sapien
tcaagccttagcacaatctttgtag

SEQ ID NO: 4436699 - DNA, 25 bp, Homo sapien
ttgggctcaatgcactcaagcctta

SEQ ID NO: 4436700 - DNA, 25 bp, Homo sapien
tttccagaaaattggcttagtttgc

SEQ ID NO: 4436701 - DNA, 25 bp, Homo sapien
ccagaaaattggcttagtttgccca

SEQ ID NO: 4436702 - DNA, 25 bp, Homo sapien
acagctccagacctcgtatttcaca

SEQ ID NO: 4436703 - DNA, 25 bp, Homo sapien
tcagaagttaataatgtcaaggccc

SEQ ID NO: 4436704 - DNA, 25 bp, Homo sapien
cagacctcgtatttcacatagtcgt

SEQ ID NO: 4436705 - DNA, 25 bp, Homo sapien
ggcccttgtcaatcttgtcaaaagg

SEQ ID NO: 4436706 - DNA, 25 bp, Homo sapien
gccacgtgaggtggtgacacacacc

SEQ ID NO: 4436707 - DNA, 25 bp, Homo sapien
gagtttgagatagtcaacaaagcaa

SEQ ID NO: 4436708 - DNA, 25 bp, Homo sapien
caaagcaagaccaccgtcatttaaa

SEQ ID NO: 4436709 - DNA, 25 bp, Homo sapien
tgagcccaagaattggaagttgaag

SEQ ID NO: 4436710 - DNA, 25 bp, Homo sapien
gacagtctgagtaaaatacccagtg

SEQ ID NO: 4436711 - DNA, 25 bp, Homo sapien
gaagtagtttgattggctggctaac

SEQ ID NO: 4436712 - DNA, 25 bp, Homo sapien
agggagagtcctaacagtgttgtgc

SEQ ID NO: 4436713 - DNA, 25 bp, Homo sapien
cagtgcaagcaagataatggtttac

SEQ ID NO: 4436714 - DNA, 25 bp, Homo sapien
ggaaaatcctctattgagaatgtgg

SEQ ID NO: 4436715 - DNA, 25 bp, Homo sapien
aatcctctattgagaatgtggataa

SEQ ID NO: 4436716 - DNA, 25 bp, Homo sapien
tagtaggtgggggtgatctgcttgc

SEQ ID NO: 4436717 - DNA, 25 bp, Homo sapien
tgtggataaatgaacaattgtaagt

SEQ ID NO: 4436718 - DNA, 25 bp, Homo sapien
tgcaggagtctattgctaaagaatt

SEQ ID NO: 4436719 - DNA, 25 bp, Homo sapien
cctgtagagggataagatgcttgta

SEQ ID NO: 4436720 - DNA, 25 bp, Homo sapien
cttgtagagttgtgggtatcattcc

SEQ ID NO: 4436721 - DNA, 25 bp, Homo sapien
ggaatgaaccgttatgtttctaagc

SEQ ID NO: 4436722 - DNA, 25 bp, Homo sapien
tttctcccagctagtgctatctttc

SEQ ID NO: 4436723 - DNA, 25 bp, Homo sapien
taggatgtacctatatttaccatgt

SEQ ID NO: 4436724 - DNA, 25 bp, Homo sapien
catgtttacttaccaggaatatttt

SEQ ID NO: 4436725 - DNA, 25 bp, Homo sapien
ttaaaagtaggcgagaggctaggat

SEQ ID NO: 4436726 - DNA, 25 bp, Homo sapien
caactagttcatctggagaggcatc

SEQ ID NO: 4436727 - DNA, 25 bp, Homo sapien
tatctcattcatactggtcaaaagc

SEQ ID NO: 4436728 - DNA, 25 bp, Homo sapien
tagtatttgtcagcgtcactttaaa

SEQ ID NO: 4436729 - DNA, 25 bp, Homo sapien
caaactacctagaaacaggccatat

SEQ ID NO: 4436730 - DNA, 25 bp, Homo sapien
ggagataggatcaccacttgccact

SEQ ID NO: 4436731 - DNA, 25 bp, Homo sapien
ggttctaacaatctagggctcccag

SEQ ID NO: 4436732 - DNA, 25 bp, Homo sapien
tgaggtgaggatccctaacctgact

SEQ ID NO: 4436733 - DNA, 25 bp, Homo sapien
ggagctgtaggtagccaatccctgt

SEQ ID NO: 4436734 - DNA, 25 bp, Homo sapien
cagcgttttcctaaccgaggttcag

SEQ ID NO: 4436735 - DNA, 25 bp, Homo sapien
gaatcggctttgaacgctgactcgc

SEQ ID NO: 4436736 - DNA, 25 bp, Homo sapien
ggagggcccctaacacattgtcgtc

SEQ ID NO: 4436737 - DNA, 25 bp, Homo sapien
gctggcacgccattagaggagtcgc

SEQ ID NO: 4436738 - DNA, 25 bp, Homo sapien
tgtgccagaccctgtaagtgattta

SEQ ID NO: 4436739 - DNA, 25 bp, Homo sapien
cacgctgtactcctctaagagcagg

SEQ ID NO: 4436740 - DNA, 25 bp, Homo sapien
aagttcttagcttaaggcccacagc

SEQ ID NO: 4436741 - DNA, 25 bp, Homo sapien
ggatttctggctgccgagtccacac

SEQ ID NO: 4436742 - DNA, 25 bp, Homo sapien
aggaggacccctctgtctgaagcga

SEQ ID NO: 4436743 - DNA, 25 bp, Homo sapien
ggccacataggaggacccctctgtc

SEQ ID NO: 4436744 - DNA, 25 bp, Homo sapien
tctgtctgaagcgagtgcgcagtaa

SEQ ID NO: 4436745 - DNA, 25 bp, Homo sapien
cgagtgcgcagtaaaaagaggatga

SEQ ID NO: 4436746 - DNA, 25 bp, Homo sapien
aaccttttttcatcttataagcagc

SEQ ID NO: 4436747 - DNA, 25 bp, Homo sapien
taaccttttttcatcttataagcag

SEQ ID NO: 4436748 - DNA, 25 bp, Homo sapien
ttaaccttttttcatcttataagca

SEQ ID NO: 4436749 - DNA, 25 bp, Homo sapien
ccttttttcatcttataagcagctt

SEQ ID NO: 4436750 - DNA, 25 bp, Homo sapien
ttcactagggatacaaatgaagtcc

SEQ ID NO: 4436751 - DNA, 25 bp, Homo sapien
taaatattcagtaagagacttcaaa

SEQ ID NO: 4436752 - DNA, 25 bp, Homo sapien
gaagtccacatgtaattgattggta

SEQ ID NO: 4436753 - DNA, 25 bp, Homo sapien
gaatttcccatagtctagatactcc

SEQ ID NO: 4436754 - DNA, 25 bp, Homo sapien
gggagattcgcaaaagcggctggag

SEQ ID NO: 4436755 - DNA, 25 bp, Homo sapien
cttgaccatggggagattcgcaaaa

SEQ ID NO: 4436756 - DNA, 25 bp, Homo sapien
ccatggggagattcgcaaaagcggc

SEQ ID NO: 4436757 - DNA, 25 bp, Homo sapien
agattcgcaaaagcggctggaggca

SEQ ID NO: 4436758 - DNA, 25 bp, Homo sapien
caaggataatagaacacacagacac

SEQ ID NO: 4436759 - DNA, 25 bp, Homo sapien
aatagcctccactcgtgtctccaag

SEQ ID NO: 4436760 - DNA, 25 bp, Homo sapien
tgtctccaagggaaagagatcgtcc

SEQ ID NO: 4436761 - DNA, 25 bp, Homo sapien
taaactgctgcatgatcactgctgt

SEQ ID NO: 4436762 - DNA, 25 bp, Homo sapien
acagcctcagtgcagtcaaataagg

SEQ ID NO: 4436763 - DNA, 25 bp, Homo sapien
tgcagtcaaataaggcttgttgctt

SEQ ID NO: 4436764 - DNA, 25 bp, Homo sapien
ctcagtgcagtcaaataaggcttgt

SEQ ID NO: 4436765 - DNA, 25 bp, Homo sapien
tcaaataaggcttgttgcttttcct

SEQ ID NO: 4436766 - DNA, 25 bp, Homo sapien
accaacctggtgaaagctcatctct

SEQ ID NO: 4436767 - DNA, 25 bp, Homo sapien
tgaccaacctggtgaaagctcatct

SEQ ID NO: 4436768 - DNA, 25 bp, Homo sapien
aaaaaaaaaagctgaaggatcagtg

SEQ ID NO: 4436769 - DNA, 25 bp, Homo sapien
cctgaccaacctggtgaaagctcat

SEQ ID NO: 4436770 - DNA, 25 bp, Homo sapien
atttcctctgctcccgcagagttgc

SEQ ID NO: 4436771 - DNA, 25 bp, Homo sapien
tgggttccacgctcctctgctagtt

SEQ ID NO: 4436772 - DNA, 25 bp, Homo sapien
cgcagagttgctgagttgggttcca

SEQ ID NO: 4436773 - DNA, 25 bp, Homo sapien
tgagttgggttccacgctcctctgc

SEQ ID NO: 4436774 - DNA, 25 bp, Homo sapien
gaacagttgactttctcggtgccaa

SEQ ID NO: 4436775 - DNA, 25 bp, Homo sapien
catgaagacatgctccaattttgaa

SEQ ID NO: 4436776 - DNA, 25 bp, Homo sapien
agatggaggctggacactccgccat

SEQ ID NO: 4436777 - DNA, 25 bp, Homo sapien
taaacgtcggtttatggtgcaacca

SEQ ID NO: 4436778 - DNA, 25 bp, Homo sapien
gagtgttcctgcacctcaacatcgc

SEQ ID NO: 4436779 - DNA, 25 bp, Homo sapien
caacatcgctcagggcacagcgcaa

SEQ ID NO: 4436780 - DNA, 25 bp, Homo sapien
atcagagtgttcctgcacctcaaca

SEQ ID NO: 4436781 - DNA, 25 bp, Homo sapien
gggcacagcgcaaaccgtcggccga

SEQ ID NO: 4436782 - DNA, 25 bp, Homo sapien
caggttgtcacagacattcatctcc

SEQ ID NO: 4436783 - DNA, 25 bp, Homo sapien
aggtggtctcccaggttgtcacaga

SEQ ID NO: 4436784 - DNA, 25 bp, Homo sapien
gtctcccaggttgtcacagacattc

SEQ ID NO: 4436785 - DNA, 25 bp, Homo sapien
tcacagacattcatctcctcaactt

SEQ ID NO: 4436786 - DNA, 25 bp, Homo sapien
cccctgaagtccgtcacaggtgaca

SEQ ID NO: 4436787 - DNA, 25 bp, Homo sapien
atgcttcttgcgacgctgcccacac

SEQ ID NO: 4436788 - DNA, 25 bp, Homo sapien
gaatcgcccagatctttcacgatct

SEQ ID NO: 4436789 - DNA, 25 bp, Homo sapien
actggtttggtcaatcaactacaac

SEQ ID NO: 4436790 - DNA, 25 bp, Homo sapien
tcaactacaacactttctagcagac

SEQ ID NO: 4436791 - DNA, 25 bp, Homo sapien
tcagaatcgcccagatctttcacga

SEQ ID NO: 4436792 - DNA, 25 bp, Homo sapien
tcagaaaccgatctttgtgtttttg

SEQ ID NO: 4436793 - DNA, 25 bp, Homo sapien
catctagtgccccttccagagctaa

SEQ ID NO: 4436794 - DNA, 25 bp, Homo sapien
cattggtccaagttaaatcataggc

SEQ ID NO: 4436795 - DNA, 25 bp, Homo sapien
cagtttactaggcacattggcactt

SEQ ID NO: 4436796 - DNA, 25 bp, Homo sapien
tttaataacttaagcctggcaggag

SEQ ID NO: 4436797 - DNA, 25 bp, Homo sapien
taagtaaagggtgaatgtgactttc

SEQ ID NO: 4436798 - DNA, 25 bp, Homo sapien
tgttttaagtaaagggtgaatgtga

SEQ ID NO: 4436799 - DNA, 25 bp, Homo sapien
taagtagatgtgatgagggtttgtt

SEQ ID NO: 4436800 - DNA, 25 bp, Homo sapien
aatgttctgtagagctatttaagta

SEQ ID NO: 4436801 - DNA, 25 bp, Homo sapien
aatggaaactgaaagtacatggctt

SEQ ID NO: 4436802 - DNA, 25 bp, Homo sapien
ctgactgatcaatgcccacttctgt

SEQ ID NO: 4436803 - DNA, 25 bp, Homo sapien
atggaaactgaaagtacatggcttc

SEQ ID NO: 4436804 - DNA, 25 bp, Homo sapien
atggcttcttccctgactgatcaat

SEQ ID NO: 4436805 - DNA, 25 bp, Homo sapien
gccagggatttagcagcatcaataa

SEQ ID NO: 4436806 - DNA, 25 bp, Homo sapien
tagtcatgttggtactggtcgaagg

SEQ ID NO: 4436807 - DNA, 25 bp, Homo sapien
ggtcgaagggttaagtgctctgcac

SEQ ID NO: 4436808 - DNA, 25 bp, Homo sapien
caagaactgtctgcaatctgccagg

SEQ ID NO: 4436809 - DNA, 25 bp, Homo sapien
tctatcactgagacattctgccaag

SEQ ID NO: 4436810 - DNA, 25 bp, Homo sapien
tcactgagacattctgccaagctgg

SEQ ID NO: 4436811 - DNA, 25 bp, Homo sapien
actgagacattctgccaagctggct

SEQ ID NO: 4436812 - DNA, 25 bp, Homo sapien
gacctctatcactgagacattctgc

SEQ ID NO: 4436813 - DNA, 25 bp, Homo sapien
tgatcccacagcaaagatacttgaa

SEQ ID NO: 4436814 - DNA, 25 bp, Homo sapien
taactagtaccaaagccaccaattc

SEQ ID NO: 4436815 - DNA, 25 bp, Homo sapien
ttaagtagccacagatgtatggata

SEQ ID NO: 4436816 - DNA, 25 bp, Homo sapien
cacagcaaagatacttgaaattaag

SEQ ID NO: 4436817 - DNA, 25 bp, Homo sapien
ggcacttgagggcttaccaactcta

SEQ ID NO: 4436818 - DNA, 25 bp, Homo sapien
tacgtggtaaatcgaatcacccagg

SEQ ID NO: 4436819 - DNA, 25 bp, Homo sapien
gcagcaagctggacatattctcact

SEQ ID NO: 4436820 - DNA, 25 bp, Homo sapien
taaatcaggcactcttacttgatgc

SEQ ID NO: 4436821 - DNA, 25 bp, Homo sapien
gcttgacaggcattgatatcaaaat

SEQ ID NO: 4436822 - DNA, 25 bp, Homo sapien
gacaggcattgatatcaaaattaat

SEQ ID NO: 4436823 - DNA, 25 bp, Homo sapien
tgacaggcattgatatcaaaattaa

SEQ ID NO: 4436824 - DNA, 25 bp, Homo sapien
acagcttgacaggcattgatatcaa

SEQ ID NO: 4436825 - DNA, 25 bp, Homo sapien
ttcatacccattgcctgactttttc

SEQ ID NO: 4436826 - DNA, 25 bp, Homo sapien
ttctttattgcacttcatacccatt

SEQ ID NO: 4436827 - DNA, 25 bp, Homo sapien
acttcatacccattgcctgactttt

SEQ ID NO: 4436828 - DNA, 25 bp, Homo sapien
atacccattgcctgactttttccta

SEQ ID NO: 4436829 - DNA, 25 bp, Homo sapien
tctcctctagcttatgcggtgtctc

SEQ ID NO: 4436830 - DNA, 25 bp, Homo sapien
cctctagcttatgcggtgtctccag

SEQ ID NO: 4436831 - DNA, 25 bp, Homo sapien
cgccgggaagcgtgggtctcctcta

SEQ ID NO: 4436832 - DNA, 25 bp, Homo sapien
tgacaacagtggctggaccgaaatc

SEQ ID NO: 4436833 - DNA, 25 bp, Homo sapien
ttgcttcatgtccaccccaacagtg

SEQ ID NO: 4436834 - DNA, 25 bp, Homo sapien
cagcttccacatccgtaagagattg

SEQ ID NO: 4436835 - DNA, 25 bp, Homo sapien
gaaaactggatgatcataaagttgc

SEQ ID NO: 4436836 - DNA, 25 bp, Homo sapien
taaagttgctatgaaaggctgactg

SEQ ID NO: 4436837 - DNA, 25 bp, Homo sapien
tgcaatacggcagatcaacatgatt

SEQ ID NO: 4436838 - DNA, 25 bp, Homo sapien
tgctacttctgcaatacggcagatc

SEQ ID NO: 4436839 - DNA, 25 bp, Homo sapien
tgcccagacacaatgataataaatg

SEQ ID NO: 4436840 - DNA, 25 bp, Homo sapien
cctttagtagtaccattactgctac

SEQ ID NO: 4436841 - DNA, 25 bp, Homo sapien
cattatgatgttctgcagaaccaga

SEQ ID NO: 4436842 - DNA, 25 bp, Homo sapien
tgttctgcagaaccagagatcttcc

SEQ ID NO: 4436843 - DNA, 25 bp, Homo sapien
tgatgttctgcagaaccagagatct

SEQ ID NO: 4436844 - DNA, 25 bp, Homo sapien
ttctgcagaaccagagatcttccat

SEQ ID NO: 4436845 - DNA, 25 bp, Homo sapien
agaagcagccagttgtaaaacgtta

SEQ ID NO: 4436846 - DNA, 25 bp, Homo sapien
aagaagcagccagttgtaaaacgtt

SEQ ID NO: 4436847 - DNA, 25 bp, Homo sapien
gaagcagccagttgtaaaacgttac

SEQ ID NO: 4436848 - DNA, 25 bp, Homo sapien
ttagatagaatcagatgccgtacgc

SEQ ID NO: 4436849 - DNA, 25 bp, Homo sapien
cattaaaagaccttacaggccaggc

SEQ ID NO: 4436850 - DNA, 25 bp, Homo sapien
ttttcagattaccagaatgcaaggg

SEQ ID NO: 4436851 - DNA, 25 bp, Homo sapien
tagccatagtaagcatttacaggcc

SEQ ID NO: 4436852 - DNA, 25 bp, Homo sapien
tttctgagagcttgtttgaaccatg

SEQ ID NO: 4436853 - DNA, 25 bp, Homo sapien
gagcttgtttgaaccatgtctattt

SEQ ID NO: 4436854 - DNA, 25 bp, Homo sapien
gagagcttgtttgaaccatgtctat

SEQ ID NO: 4436855 - DNA, 25 bp, Homo sapien
gcttgtttgaaccatgtctatttgt

SEQ ID NO: 4436856 - DNA, 25 bp, Homo sapien
ttcccatggaagctgaaattcccgt

SEQ ID NO: 4436857 - DNA, 25 bp, Homo sapien
tcccatggaagctgaaattcccgta

SEQ ID NO: 4436858 - DNA, 25 bp, Homo sapien
caaattcccatggaagctgaaattc

SEQ ID NO: 4436859 - DNA, 25 bp, Homo sapien
aattcccatggaagctgaaattccc

SEQ ID NO: 4436860 - DNA, 25 bp, Homo sapien
tcaggataggatctcagaagtgaca

SEQ ID NO: 4436861 - DNA, 25 bp, Homo sapien
atttcccctgcattatcacctttgt

SEQ ID NO: 4436862 - DNA, 25 bp, Homo sapien
tttcccctgcattatcacctttgtc

SEQ ID NO: 4436863 - DNA, 25 bp, Homo sapien
ttaattgattaggttctcattaagg

SEQ ID NO: 4436864 - DNA, 25 bp, Homo sapien
cattaaggtcaaaagtacacttgac

SEQ ID NO: 4436865 - DNA, 25 bp, Homo sapien
gcagccaattagcaaattgtcagcc

SEQ ID NO: 4436866 - DNA, 25 bp, Homo sapien
gtacacttgactgaccacaggcagc

SEQ ID NO: 4436867 - DNA, 25 bp, Homo sapien
tgtccaggacaagttctttcacatc

SEQ ID NO: 4436868 - DNA, 25 bp, Homo sapien
agagggcgtcctgttccgcagctct

SEQ ID NO: 4436869 - DNA, 25 bp, Homo sapien
gttctttcacatcagagggcgtcct

SEQ ID NO: 4436870 - DNA, 25 bp, Homo sapien
gctctaaatgaatccgtctgcccat

SEQ ID NO: 4436871 - DNA, 25 bp, Homo sapien
tgaagaattccagttattcagattc

SEQ ID NO: 4436872 - DNA, 25 bp, Homo sapien
gaagaattccagttattcagattca

SEQ ID NO: 4436873 - DNA, 25 bp, Homo sapien
aacttcggtaagtttgcagttgagg

SEQ ID NO: 4436874 - DNA, 25 bp, Homo sapien
ttaacttcggtaagtttgcagttga

SEQ ID NO: 4436875 - DNA, 25 bp, Homo sapien
acttcggtaagtttgcagttgaggt

SEQ ID NO: 4436876 - DNA, 25 bp, Homo sapien
taacttcggtaagtttgcagttgag

SEQ ID NO: 4436877 - DNA, 25 bp, Homo sapien
gagactctgttatcgcttagttcaa

SEQ ID NO: 4436878 - DNA, 25 bp, Homo sapien
cacattttctcggtagtcgttcagg

SEQ ID NO: 4436879 - DNA, 25 bp, Homo sapien
aacacattttctcggtagtcgttca

SEQ ID NO: 4436880 - DNA, 25 bp, Homo sapien
cattttctcggtagtcgttcaggtt

SEQ ID NO: 4436881 - DNA, 25 bp, Homo sapien
cttgaacacattttctcggtagtcg

SEQ ID NO: 4436882 - DNA, 25 bp, Homo sapien
gggcctccttgtcgtcccggtcata

SEQ ID NO: 4436883 - DNA, 25 bp, Homo sapien
gtagccctcagcatccaagttaggg

SEQ ID NO: 4436884 - DNA, 25 bp, Homo sapien
cgtcccggtcatagccgtcaagata

SEQ ID NO: 4436885 - DNA, 25 bp, Homo sapien
atagccgtcaagatatgtgagttgc

SEQ ID NO: 4436886 - DNA, 25 bp, Homo sapien
tccactacctgagcatcttcgtcat

SEQ ID NO: 4436887 - DNA, 25 bp, Homo sapien
tgagcatcttcgtcatactcctcct

SEQ ID NO: 4436888 - DNA, 25 bp, Homo sapien
tacctgagcatcttcgtcatactcc

SEQ ID NO: 4436889 - DNA, 25 bp, Homo sapien
tcctcgtcctccactacctgagcat

SEQ ID NO: 4436890 - DNA, 25 bp, Homo sapien
atcttcaggttctccttttcgcttc

SEQ ID NO: 4436891 - DNA, 25 bp, Homo sapien
ttctgacccctttcttcttcacgga

SEQ ID NO: 4436892 - DNA, 25 bp, Homo sapien
ttcttcacggagctcttcttcatct

SEQ ID NO: 4436893 - DNA, 25 bp, Homo sapien
tcatcaacctctccatcgttataac

SEQ ID NO: 4436894 - DNA, 25 bp, Homo sapien
ttcccctctcgttcccacagcaacg

SEQ ID NO: 4436895 - DNA, 25 bp, Homo sapien
tcccctctcgttcccacagcaacgt

SEQ ID NO: 4436896 - DNA, 25 bp, Homo sapien
gaacatcctgtattatattccttaa

SEQ ID NO: 4436897 - DNA, 25 bp, Homo sapien
cttgagaacatcctgtattatattc

SEQ ID NO: 4436898 - DNA, 25 bp, Homo sapien
catcctgtattatattccttaagcc

SEQ ID NO: 4436899 - DNA, 25 bp, Homo sapien
cctgtattatattccttaagccttc

SEQ ID NO: 4436900 - DNA, 25 bp, Homo sapien
gctttggaataaggttgtgagttca

SEQ ID NO: 4436901 - DNA, 25 bp, Homo sapien
taaatgtattattcccgaatggtgc

SEQ ID NO: 4436902 - DNA, 25 bp, Homo sapien
tgagacattaaatgtattattcccg

SEQ ID NO: 4436903 - DNA, 25 bp, Homo sapien
tattattcccgaatggtgctttgga

SEQ ID NO: 4436904 - DNA, 25 bp, Homo sapien
gttttgtctgtatgcacaggtttac

SEQ ID NO: 4436905 - DNA, 25 bp, Homo sapien
tttgttatggttgttttgtctgtat

SEQ ID NO: 4436906 - DNA, 25 bp, Homo sapien
ttgtctgtatgcacaggtttactct

SEQ ID NO: 4436907 - DNA, 25 bp, Homo sapien
tctgtatgcacaggtttactctcac

SEQ ID NO: 4436908 - DNA, 25 bp, Homo sapien
gatgtgccgctttagcttcaccaaa

SEQ ID NO: 4436909 - DNA, 25 bp, Homo sapien
aatttgttgttgacgttctgccgcc

SEQ ID NO: 4436910 - DNA, 25 bp, Homo sapien
cagatgctgctggttgatgtgccgc

SEQ ID NO: 4436911 - DNA, 25 bp, Homo sapien
cccatggaaaagatctgatgccgtt

SEQ ID NO: 4436912 - DNA, 25 bp, Homo sapien
taagaaatattcagctctagtctga

SEQ ID NO: 4436913 - DNA, 25 bp, Homo sapien
aagaaatattcagctctagtctgac

SEQ ID NO: 4436914 - DNA, 25 bp, Homo sapien
ttaagaaatattcagctctagtctg

SEQ ID NO: 4436915 - DNA, 25 bp, Homo sapien
tgactgcattctgtgtagtaaacat

SEQ ID NO: 4436916 - DNA, 25 bp, Homo sapien
ggtccttgactgcattctgtgtagt

SEQ ID NO: 4436917 - DNA, 25 bp, Homo sapien
aggtccttgactgcattctgtgtag

SEQ ID NO: 4436918 - DNA, 25 bp, Homo sapien
ccttgactgcattctgtgtagtaaa

SEQ ID NO: 4436919 - DNA, 25 bp, Homo sapien
taatactggacttcagatcagctga

SEQ ID NO: 4436920 - DNA, 25 bp, Homo sapien
gtaatactggacttcagatcagctg

SEQ ID NO: 4436921 - DNA, 25 bp, Homo sapien
ggtaatactggacttcagatcagct

SEQ ID NO: 4436922 - DNA, 25 bp, Homo sapien
gctcccagattggctcatctcccat

SEQ ID NO: 4436923 - DNA, 25 bp, Homo sapien
tgctggattttttggaagggatgac

SEQ ID NO: 4436924 - DNA, 25 bp, Homo sapien
tgctcccagattggctcatctccca

SEQ ID NO: 4436925 - DNA, 25 bp, Homo sapien
tgtgctggattttttggaagggatg

SEQ ID NO: 4436926 - DNA, 25 bp, Homo sapien
ctatatggtggaaccccccgatggg

SEQ ID NO: 4436927 - DNA, 25 bp, Homo sapien
acccaagtattgttgatgttcttca

SEQ ID NO: 4436928 - DNA, 25 bp, Homo sapien
acatgtcattggtgcaaacccaagt

SEQ ID NO: 4436929 - DNA, 25 bp, Homo sapien
ttgttgatgttcttcaacaggaaca

SEQ ID NO: 4436930 - DNA, 25 bp, Homo sapien
gtattgttgatgttcttcaacagga

SEQ ID NO: 4436931 - DNA, 25 bp, Homo sapien
aaaatgcgggttgatagagcgatgc

SEQ ID NO: 4436932 - DNA, 25 bp, Homo sapien
gatatgtgcatcagttgcaaatgct

SEQ ID NO: 4436933 - DNA, 25 bp, Homo sapien
tcttggagcatgtcatgtcccacgg

SEQ ID NO: 4436934 - DNA, 25 bp, Homo sapien
taggaagcggttaggaaggtagaga

SEQ ID NO: 4436935 - DNA, 25 bp, Homo sapien
catgaagcacataatgcaggatgat

SEQ ID NO: 4436936 - DNA, 25 bp, Homo sapien
aattagtgagattagcatgaagcac

SEQ ID NO: 4436937 - DNA, 25 bp, Homo sapien
gcagaacaacaagctctcctgattc

SEQ ID NO: 4436938 - DNA, 25 bp, Homo sapien
tcaatcagacagtatgcccttcagc

SEQ ID NO: 4436939 - DNA, 25 bp, Homo sapien
tgttctttcattaatggcctggcct

SEQ ID NO: 4436940 - DNA, 25 bp, Homo sapien
ggcctggccttgacaactgatccta

SEQ ID NO: 4436941 - DNA, 25 bp, Homo sapien
taccactgaggacattggaaggact

SEQ ID NO: 4436942 - DNA, 25 bp, Homo sapien
ggaaggactcgatctgtcacactaa

SEQ ID NO: 4436943 - DNA, 25 bp, Homo sapien
tgcgagcagggtggttccagcaact

SEQ ID NO: 4436944 - DNA, 25 bp, Homo sapien
ttagctagttcgtagaggtgagatc

SEQ ID NO: 4436945 - DNA, 25 bp, Homo sapien
agcaactgcccttcaactctgaatg

SEQ ID NO: 4436946 - DNA, 25 bp, Homo sapien
cgttgtgtgttagttaaggaagagc

SEQ ID NO: 4436947 - DNA, 25 bp, Homo sapien
gcacggtggcgcacaagatcataca

SEQ ID NO: 4436948 - DNA, 25 bp, Homo sapien
tgtacgaggaacaagacagaccgag

SEQ ID NO: 4436949 - DNA, 25 bp, Homo sapien
gaaagtagtgaaacgccagagagga

SEQ ID NO: 4436950 - DNA, 25 bp, Homo sapien
gatcatacagaagtacggcttccgg

SEQ ID NO: 4436951 - DNA, 25 bp, Homo sapien
gatagattggcccataaaatcttca

SEQ ID NO: 4436952 - DNA, 25 bp, Homo sapien
gtattcttgttcacgtattcgcatg

SEQ ID NO: 4436953 - DNA, 25 bp, Homo sapien
tcacatttggcttgtgcagctgagt

SEQ ID NO: 4436954 - DNA, 25 bp, Homo sapien
ccttagcgtctgcatgagtaggctt

SEQ ID NO: 4436955 - DNA, 25 bp, Homo sapien
tgtgtatggataactgctcatttga

SEQ ID NO: 4436956 - DNA, 25 bp, Homo sapien
atttgacatcctcacacaagctgtg

SEQ ID NO: 4436957 - DNA, 25 bp, Homo sapien
tgaagtgaactgtatgaggataaca

SEQ ID NO: 4436958 - DNA, 25 bp, Homo sapien
ttttccttcttatttgacatcctca

SEQ ID NO: 4436959 - DNA, 25 bp, Homo sapien
tctctatagtcagtttcactgccat

SEQ ID NO: 4436960 - DNA, 25 bp, Homo sapien
attctctatagtcagtttcactgcc

SEQ ID NO: 4436961 - DNA, 25 bp, Homo sapien
ttctctatagtcagtttcactgcca

SEQ ID NO: 4436962 - DNA, 25 bp, Homo sapien
tcttggacaagatacaactaattcg

SEQ ID NO: 4436963 - DNA, 25 bp, Homo sapien
ccaactcttggacaagatacaacta

SEQ ID NO: 4436964 - DNA, 25 bp, Homo sapien
gacaagatacaactaattcgaatcc

SEQ ID NO: 4436965 - DNA, 25 bp, Homo sapien
caactaattcgaatccttgctttca

SEQ ID NO: 4436966 - DNA, 25 bp, Homo sapien
gttagttgatatgcctctcagtcac

SEQ ID NO: 4436967 - DNA, 25 bp, Homo sapien
tcatataacaggctttaaggtggta

SEQ ID NO: 4436968 - DNA, 25 bp, Homo sapien
tggtattcttggtgtgaattcagag

SEQ ID NO: 4436969 - DNA, 25 bp, Homo sapien
ggctcaattaggactatttgggatt

SEQ ID NO: 4436970 - DNA, 25 bp, Homo sapien
aggagggcctcctctgtactttctc

SEQ ID NO: 4436971 - DNA, 25 bp, Homo sapien
gagggcctcctctgtactttctctt

SEQ ID NO: 4436972 - DNA, 25 bp, Homo sapien
ggagggcctcctctgtactttctct

SEQ ID NO: 4436973 - DNA, 25 bp, Homo sapien
ataaatgcgaagatgtgagtgaaca

SEQ ID NO: 4436974 - DNA, 25 bp, Homo sapien
tatacaataaatgcgaagatgtgag

SEQ ID NO: 4436975 - DNA, 25 bp, Homo sapien
taaatgcgaagatgtgagtgaacat

SEQ ID NO: 4436976 - DNA, 25 bp, Homo sapien
gatatacaataaatgcgaagatgtg

SEQ ID NO: 4436977 - DNA, 25 bp, Homo sapien
tcagtgcaaagtgtgagtagaactc

SEQ ID NO: 4436978 - DNA, 25 bp, Homo sapien
caaagtgtgagtagaactctgcaag

SEQ ID NO: 4436979 - DNA, 25 bp, Homo sapien
gtgtgagtagaactctgcaagttgc

SEQ ID NO: 4436980 - DNA, 25 bp, Homo sapien
tgcaaagtgtgagtagaactctgca

SEQ ID NO: 4436981 - DNA, 25 bp, Homo sapien
ctcagctgttcaggcccttttggag

SEQ ID NO: 4436982 - DNA, 25 bp, Homo sapien
ctgttcaggcccttttggagactct

SEQ ID NO: 4436983 - DNA, 25 bp, Homo sapien
cattgctcagaatggatcctcgggc

SEQ ID NO: 4436984 - DNA, 25 bp, Homo sapien
agaatggatcctcgggctctcatcg

SEQ ID NO: 4436985 - DNA, 25 bp, Homo sapien
ttctgtactgttgaaaataatctct

SEQ ID NO: 4436986 - DNA, 25 bp, Homo sapien
caatttttctgtactgttgaaaata

SEQ ID NO: 4436987 - DNA, 25 bp, Homo sapien
ttcttcaatttttctgtactgttga

SEQ ID NO: 4436988 - DNA, 25 bp, Homo sapien
tttctgtactgttgaaaataatctc

SEQ ID NO: 4436989 - DNA, 25 bp, Homo sapien
cagaaccactttgtcctctttggct

SEQ ID NO: 4436990 - DNA, 25 bp, Homo sapien
agtttccagaaccactttgtcctct

SEQ ID NO: 4436991 - DNA, 25 bp, Homo sapien
ctctttggctggatgaagcactagc

SEQ ID NO: 4436992 - DNA, 25 bp, Homo sapien
tttggctggatgaagcactagccat

SEQ ID NO: 4436993 - DNA, 25 bp, Homo sapien
actgccgccatacccatcagcacca

SEQ ID NO: 4436994 - DNA, 25 bp, Homo sapien
tgccgccatacccatcagcaccaca

SEQ ID NO: 4436995 - DNA, 25 bp, Homo sapien
tcccactgccgccatacccatcagc

SEQ ID NO: 4436996 - DNA, 25 bp, Homo sapien
attcccactgccgccatacccatca

SEQ ID NO: 4436997 - DNA, 25 bp, Homo sapien
atagctgtcactcctgccatagcca

SEQ ID NO: 4436998 - DNA, 25 bp, Homo sapien
cacctctgcctccattgttatagct

SEQ ID NO: 4436999 - DNA, 25 bp, Homo sapien
ccattgttatagctgtcatagctgt

SEQ ID NO: 4437000 - DNA, 25 bp, Homo sapien
attgttatagctgtcatagctgtca

SEQ ID NO: 4437001 - DNA, 25 bp, Homo sapien
tggttccaaaattcgaagatgattg

SEQ ID NO: 4437002 - DNA, 25 bp, Homo sapien
ttccaaaattcgaagatgattgttg

SEQ ID NO: 4437003 - DNA, 25 bp, Homo sapien
catggttccaaaattcgaagatgat

SEQ ID NO: 4437004 - DNA, 25 bp, Homo sapien
ccaaaattcgaagatgattgttgta

SEQ ID NO: 4437005 - DNA, 25 bp, Homo sapien
tccaacaccataggagccagagttt

SEQ ID NO: 4437006 - DNA, 25 bp, Homo sapien
ctccaacaccataggagccagagtt

SEQ ID NO: 4437007 - DNA, 25 bp, Homo sapien
tggcctccaacaccataggagccag

SEQ ID NO: 4437008 - DNA, 25 bp, Homo sapien
gcctccaacaccataggagccagag

SEQ ID NO: 4437009 - DNA, 25 bp, Homo sapien
ttataacctgtagtttcgctgtcaa

SEQ ID NO: 4437010 - DNA, 25 bp, Homo sapien
tataacctgtagtttcgctgtcaac

SEQ ID NO: 4437011 - DNA, 25 bp, Homo sapien
ctgtagtttcgctgtcaacttctct

SEQ ID NO: 4437012 - DNA, 25 bp, Homo sapien
aacctgtagtttcgctgtcaacttc

SEQ ID NO: 4437013 - DNA, 25 bp, Homo sapien
cgctccgagggaccagaaatctgac

SEQ ID NO: 4437014 - DNA, 25 bp, Homo sapien
tcagacctgagggtgtaattcactg

SEQ ID NO: 4437015 - DNA, 25 bp, Homo sapien
agacctgagggtgtaattcactgga

SEQ ID NO: 4437016 - DNA, 25 bp, Homo sapien
atccccacaaatttccgctccgagg

SEQ ID NO: 4437017 - DNA, 25 bp, Homo sapien
aagtagtgaacaggactgaagttgt

SEQ ID NO: 4437018 - DNA, 25 bp, Homo sapien
acaaaaagtagtgaacaggactgaa

SEQ ID NO: 4437019 - DNA, 25 bp, Homo sapien
aaaagtagtgaacaggactgaagtt

SEQ ID NO: 4437020 - DNA, 25 bp, Homo sapien
acaggactgaagttgtgtgctgtaa

SEQ ID NO: 4437021 - DNA, 25 bp, Homo sapien
tgagctagacccctcggccagggaa

SEQ ID NO: 4437022 - DNA, 25 bp, Homo sapien
agctagacccctcggccagggaatg

SEQ ID NO: 4437023 - DNA, 25 bp, Homo sapien
ctttcaattgctgtcggactgagct

SEQ ID NO: 4437024 - DNA, 25 bp, Homo sapien
tgctgtcggactgagctagacccct

SEQ ID NO: 4437025 - DNA, 25 bp, Homo sapien
catcaacttcttgacctctttgcac

SEQ ID NO: 4437026 - DNA, 25 bp, Homo sapien
atcaacttcttgacctctttgcact

SEQ ID NO: 4437027 - DNA, 25 bp, Homo sapien
tcatcaacttcttgacctctttgca

SEQ ID NO: 4437028 - DNA, 25 bp, Homo sapien
gatcaaaggagagcccatcactatt

SEQ ID NO: 4437029 - DNA, 25 bp, Homo sapien
gactgtatcagcgtgattccgcttg

SEQ ID NO: 4437030 - DNA, 25 bp, Homo sapien
acttagaacaggaagcttctgatca

SEQ ID NO: 4437031 - DNA, 25 bp, Homo sapien
gcaaggcgagagtatagtcatcaac

SEQ ID NO: 4437032 - DNA, 25 bp, Homo sapien
tcagaagttgatcccatgtcggcag

SEQ ID NO: 4437033 - DNA, 25 bp, Homo sapien
taagctaaactcatctaacaagagg

SEQ ID NO: 4437034 - DNA, 25 bp, Homo sapien
cagtctggggaactacttgaatgtc

SEQ ID NO: 4437035 - DNA, 25 bp, Homo sapien
taacaagaggactgctctggtattc

SEQ ID NO: 4437036 - DNA, 25 bp, Homo sapien
tgtctccgtctgagtcgcgcgttgg

SEQ ID NO: 4437037 - DNA, 25 bp, Homo sapien
cggctcctccgagccacaggaagag

SEQ ID NO: 4437038 - DNA, 25 bp, Homo sapien
gcggagccttcgctgttgccggccc

SEQ ID NO: 4437039 - DNA, 25 bp, Homo sapien
cagccgccgctagcgccgaaagagt

SEQ ID NO: 4437040 - DNA, 25 bp, Homo sapien
ttgggctctgcaacgcggaccttgc

SEQ ID NO: 4437041 - DNA, 25 bp, Homo sapien
taggccgtgcctaaacctcattctt

SEQ ID NO: 4437042 - DNA, 25 bp, Homo sapien
ccctcacttaggtggttaggccgtg

SEQ ID NO: 4437043 - DNA, 25 bp, Homo sapien
tcattctttcctgggccgagatgtc

SEQ ID NO: 4437044 - DNA, 25 bp, Homo sapien
taataacccactggagaactctgtg

SEQ ID NO: 4437045 - DNA, 25 bp, Homo sapien
ccaactctgggttgagtagaattac

SEQ ID NO: 4437046 - DNA, 25 bp, Homo sapien
ggtagagcgggaatccattgaacta

SEQ ID NO: 4437047 - DNA, 25 bp, Homo sapien
tatgtatagcacgacacttttggct

SEQ ID NO: 4437048 - DNA, 25 bp, Homo sapien
gattatctgagtctttatcaatcag

SEQ ID NO: 4437049 - DNA, 25 bp, Homo sapien
cagtatatcgagatgtgctgccaag

SEQ ID NO: 4437050 - DNA, 25 bp, Homo sapien
gtaaccacctgtagcattcttgatt

SEQ ID NO: 4437051 - DNA, 25 bp, Homo sapien
ccacctgtagcattcttgatttgat

SEQ ID NO: 4437052 - DNA, 25 bp, Homo sapien
cttctgatggcttcctgtatggcat

SEQ ID NO: 4437053 - DNA, 25 bp, Homo sapien
caggcaacttctgatggcttcctgt

SEQ ID NO: 4437054 - DNA, 25 bp, Homo sapien
gcaacttctgatggcttcctgtatg

SEQ ID NO: 4437055 - DNA, 25 bp, Homo sapien
acttctgatggcttcctgtatggca

SEQ ID NO: 4437056 - DNA, 25 bp, Homo sapien
gacgagtgagtagtggtttgccaca

SEQ ID NO: 4437057 - DNA, 25 bp, Homo sapien
ggtactggcacttactagctttagg

SEQ ID NO: 4437058 - DNA, 25 bp, Homo sapien
tggatccacatttgcacagagcagc

SEQ ID NO: 4437059 - DNA, 25 bp, Homo sapien
gactggcccatggtaagctgtaatt

SEQ ID NO: 4437060 - DNA, 25 bp, Homo sapien
gaggtataagtaaccctattgtaca

SEQ ID NO: 4437061 - DNA, 25 bp, Homo sapien
gtcaattgtctgtaaaaaggacaca

SEQ ID NO: 4437062 - DNA, 25 bp, Homo sapien
tactagggatatactggaaaagccc

SEQ ID NO: 4437063 - DNA, 25 bp, Homo sapien
gaatagagtaaaacagacgatgaag

SEQ ID NO: 4437064 - DNA, 25 bp, Homo sapien
ttgtgtgagatattaatgatcatac

SEQ ID NO: 4437065 - DNA, 25 bp, Homo sapien
agataactgaagaaagtttgttgtg

SEQ ID NO: 4437066 - DNA, 25 bp, Homo sapien
tgtgtgagatattaatgatcataca

SEQ ID NO: 4437067 - DNA, 25 bp, Homo sapien
gagataactgaagaaagtttgttgt

SEQ ID NO: 4437068 - DNA, 25 bp, Homo sapien
ggttattctgtttgccctcccaaga

SEQ ID NO: 4437069 - DNA, 25 bp, Homo sapien
gaaatgcagcctaatcttgcttaca

SEQ ID NO: 4437070 - DNA, 25 bp, Homo sapien
tatgtaccaggtaaacaaacaagaa

SEQ ID NO: 4437071 - DNA, 25 bp, Homo sapien
caaacatgttcaaatgagccacctc

SEQ ID NO: 4437072 - DNA, 25 bp, Homo sapien
gctgagtcatcgtgttgtaactgca

SEQ ID NO: 4437073 - DNA, 25 bp, Homo sapien
cccaatacctatgccagtgataagc

SEQ ID NO: 4437074 - DNA, 25 bp, Homo sapien
tcatcatcgccatcgtaatcaatac

SEQ ID NO: 4437075 - DNA, 25 bp, Homo sapien
gccacatgatctcctactgttttgc

SEQ ID NO: 4437076 - DNA, 25 bp, Homo sapien
ttaaataagttttacaacacagaga

SEQ ID NO: 4437077 - DNA, 25 bp, Homo sapien
aataagttttacaacacagagatgg

SEQ ID NO: 4437078 - DNA, 25 bp, Homo sapien
aaataagttttacaacacagagatg

SEQ ID NO: 4437079 - DNA, 25 bp, Homo sapien
taaataagttttacaacacagagat

SEQ ID NO: 4437080 - DNA, 25 bp, Homo sapien
cttatttcagcttgcaggaaggcac

SEQ ID NO: 4437081 - DNA, 25 bp, Homo sapien
gcagatgatattgagagccagtaaa

SEQ ID NO: 4437082 - DNA, 25 bp, Homo sapien
gccagtaaagtcaacagatccatga

SEQ ID NO: 4437083 - DNA, 25 bp, Homo sapien
ggaagcaggttcctcaagtgacata

SEQ ID NO: 4437084 - DNA, 25 bp, Homo sapien
tcattcctctaccagtaatgatagt

SEQ ID NO: 4437085 - DNA, 25 bp, Homo sapien
ttcctctaccagtaatgatagtcct

SEQ ID NO: 4437086 - DNA, 25 bp, Homo sapien
cctctaccagtaatgatagtcctaa

SEQ ID NO: 4437087 - DNA, 25 bp, Homo sapien
ctaccagtaatgatagtcctaattt

SEQ ID NO: 4437088 - DNA, 25 bp, Homo sapien
ttataaagccttttgtctatggttg

SEQ ID NO: 4437089 - DNA, 25 bp, Homo sapien
tataaagccttttgtctatggttgt

SEQ ID NO: 4437090 - DNA, 25 bp, Homo sapien
ataaagccttttgtctatggttgtt

SEQ ID NO: 4437091 - DNA, 25 bp, Homo sapien
gcttctacagccttacagatcataa

SEQ ID NO: 4437092 - DNA, 25 bp, Homo sapien
tatgccccttttacaaaaatcatag

SEQ ID NO: 4437093 - DNA, 25 bp, Homo sapien
gctgaagagtgacaatagtgaggtc

SEQ ID NO: 4437094 - DNA, 25 bp, Homo sapien
gctggtttcctcttgggtgtgttcc

SEQ ID NO: 4437095 - DNA, 25 bp, Homo sapien
gaatacagacttcggcggtgaattc

SEQ ID NO: 4437096 - DNA, 25 bp, Homo sapien
cactcttcagataagtgtctataga

SEQ ID NO: 4437097 - DNA, 25 bp, Homo sapien
gaaatgatgaatacagacttcggcg

SEQ ID NO: 4437098 - DNA, 25 bp, Homo sapien
tcagccacttaatatcactcttcag

SEQ ID NO: 4437099 - DNA, 25 bp, Homo sapien
aatgcaaattagactgtaggtctgc

SEQ ID NO: 4437100 - DNA, 25 bp, Homo sapien
tgtggtcaagcaacagcagatgcac

SEQ ID NO: 4437101 - DNA, 25 bp, Homo sapien
ggtctgctcaatgtacatttctgtg

SEQ ID NO: 4437102 - DNA, 25 bp, Homo sapien
ggctgttcaataattaggaggacca

SEQ ID NO: 4437103 - DNA, 25 bp, Homo sapien
ctgggaagggctgcgtagataccac

SEQ ID NO: 4437104 - DNA, 25 bp, Homo sapien
tctgtgagaccaataacagggatgg

SEQ ID NO: 4437105 - DNA, 25 bp, Homo sapien
aagacctttaaaggcagggtgtgtg

SEQ ID NO: 4437106 - DNA, 25 bp, Homo sapien
gataccaccaatgtcagatctgata

SEQ ID NO: 4437107 - DNA, 25 bp, Homo sapien
tcaagcagtatttccgcattcatat

SEQ ID NO: 4437108 - DNA, 25 bp, Homo sapien
tatttccgcattcatatgggcactg

SEQ ID NO: 4437109 - DNA, 25 bp, Homo sapien
catatgggcactgtcccaaaaccat

SEQ ID NO: 4437110 - DNA, 25 bp, Homo sapien
tccgcattcatatgggcactgtccc

SEQ ID NO: 4437111 - DNA, 25 bp, Homo sapien
gctttgtgatgtactattggattcg

SEQ ID NO: 4437112 - DNA, 25 bp, Homo sapien
tcactctggtgggacttccaatgtt

SEQ ID NO: 4437113 - DNA, 25 bp, Homo sapien
cagttttcaagggaaatacttcctg

SEQ ID NO: 4437114 - DNA, 25 bp, Homo sapien
gaatttttgtatcgaagttcatcaa

SEQ ID NO: 4437115 - DNA, 25 bp, Homo sapien
tttatggatttgggtactcctgtgt

SEQ ID NO: 4437116 - DNA, 25 bp, Homo sapien
ttttatggatttgggtactcctgtg

SEQ ID NO: 4437117 - DNA, 25 bp, Homo sapien
tagaattattctgtggccagttggg

SEQ ID NO: 4437118 - DNA, 25 bp, Homo sapien
tttgcttagaattattctgtggcca

SEQ ID NO: 4437119 - DNA, 25 bp, Homo sapien
aaagtcactcaggttgcttaatttc

SEQ ID NO: 4437120 - DNA, 25 bp, Homo sapien
tagtggagagttgcatatatgtctg

SEQ ID NO: 4437121 - DNA, 25 bp, Homo sapien
cttgtggactgaaccaccaacatcc

SEQ ID NO: 4437122 - DNA, 25 bp, Homo sapien
tcttgtggactgaaccaccaacatc

SEQ ID NO: 4437123 - DNA, 25 bp, Homo sapien
ctcttgtggactgaaccaccaacat

SEQ ID NO: 4437124 - DNA, 25 bp, Homo sapien
gatacagaaggtgtcggaaggttga

SEQ ID NO: 4437125 - DNA, 25 bp, Homo sapien
tttcaaacgtggctgatgaatgaag

SEQ ID NO: 4437126 - DNA, 25 bp, Homo sapien
gattattcatcatatcaattattga

SEQ ID NO: 4437127 - DNA, 25 bp, Homo sapien
tcaaacgtggctgatgaatgaagtt

SEQ ID NO: 4437128 - DNA, 25 bp, Homo sapien
tgattaatttgtggctgacacagtt

SEQ ID NO: 4437129 - DNA, 25 bp, Homo sapien
aattagtagagtcttcaccagtgac

SEQ ID NO: 4437130 - DNA, 25 bp, Homo sapien
tgtagtttctaagctttcatgcatg

SEQ ID NO: 4437131 - DNA, 25 bp, Homo sapien
taagcttcttttaatctgtcattag

SEQ ID NO: 4437132 - DNA, 25 bp, Homo sapien
gttcaaataacattcaaggtctact

SEQ ID NO: 4437133 - DNA, 25 bp, Homo sapien
taatagatatttcactgggactttt

SEQ ID NO: 4437134 - DNA, 25 bp, Homo sapien
tgagcacaaattcagccaatataaa

SEQ ID NO: 4437135 - DNA, 25 bp, Homo sapien
caagtgtttagattgtccaaatgtg

SEQ ID NO: 4437136 - DNA, 25 bp, Homo sapien
tcatccagaaacattctccttggac

SEQ ID NO: 4437137 - DNA, 25 bp, Homo sapien
tggttttactcttattttctcatcc

SEQ ID NO: 4437138 - DNA, 25 bp, Homo sapien
tcttggttttactcttattttctca

SEQ ID NO: 4437139 - DNA, 25 bp, Homo sapien
ccagaaacattctccttggacccat

SEQ ID NO: 4437140 - DNA, 25 bp, Homo sapien
caggtgtcagataggttcataggta

SEQ ID NO: 4437141 - DNA, 25 bp, Homo sapien
agtgtgaaggaaatagatggcgacc

SEQ ID NO: 4437142 - DNA, 25 bp, Homo sapien
tcataggtactatcttgccaaatct

SEQ ID NO: 4437143 - DNA, 25 bp, Homo sapien
gatggcgaccttatgacatttggca

SEQ ID NO: 4437144 - DNA, 25 bp, Homo sapien
cagcggaaatatctagctagcaaat

SEQ ID NO: 4437145 - DNA, 25 bp, Homo sapien
tgtccggcacaggaaactaaggatt

SEQ ID NO: 4437146 - DNA, 25 bp, Homo sapien
gctagcaaatactgaccctcgcatg

SEQ ID NO: 4437147 - DNA, 25 bp, Homo sapien
taaggattttcttgtcgtgtggaca

SEQ ID NO: 4437148 - DNA, 25 bp, Homo sapien
catacacaatctgttgggcaaataa

SEQ ID NO: 4437149 - DNA, 25 bp, Homo sapien
catctttgacctgaggaccattgta

SEQ ID NO: 4437150 - DNA, 25 bp, Homo sapien
tgtgggacttcaaccgaagtgcttt

SEQ ID NO: 4437151 - DNA, 25 bp, Homo sapien
gacttaactagggtcatacattaga

SEQ ID NO: 4437152 - DNA, 25 bp, Homo sapien
atataacatagaacatcaaagccca

SEQ ID NO: 4437153 - DNA, 25 bp, Homo sapien
gctgtatgtactcaaaaggcaatat

SEQ ID NO: 4437154 - DNA, 25 bp, Homo sapien
tataacatagaacatcaaagcccaa

SEQ ID NO: 4437155 - DNA, 25 bp, Homo sapien
ctcaaaaggcaatataacatagaac

SEQ ID NO: 4437156 - DNA, 25 bp, Homo sapien
ttctaaacaccatttgtcaatcaag

SEQ ID NO: 4437157 - DNA, 25 bp, Homo sapien
ttgtgtagcatccaaccccgaatcc

SEQ ID NO: 4437158 - DNA, 25 bp, Homo sapien
caggaaagaaaacttcccgatagat

SEQ ID NO: 4437159 - DNA, 25 bp, Homo sapien
tcaatcaagtttgggcatgcagagg

SEQ ID NO: 4437160 - DNA, 25 bp, Homo sapien
cactgttttagaattggtaggatga

SEQ ID NO: 4437161 - DNA, 25 bp, Homo sapien
gcaattctaaggctattaatggtgt

SEQ ID NO: 4437162 - DNA, 25 bp, Homo sapien
cgttgatatcgctattcatgttgaa

SEQ ID NO: 4437163 - DNA, 25 bp, Homo sapien
aattaaactgacagcgttgatatcg

SEQ ID NO: 4437164 - DNA, 25 bp, Homo sapien
tttcatgatcacataggaaaccatc

SEQ ID NO: 4437165 - DNA, 25 bp, Homo sapien
catctccattccagagatgaagcaa

SEQ ID NO: 4437166 - DNA, 25 bp, Homo sapien
tcatgatcacataggaaaccatctc

SEQ ID NO: 4437167 - DNA, 25 bp, Homo sapien
aaaccatctccattccagagatgaa

SEQ ID NO: 4437168 - DNA, 25 bp, Homo sapien
acctcacagccctcttcaattcttt

SEQ ID NO: 4437169 - DNA, 25 bp, Homo sapien
tctttccattcatttgccaagccca

SEQ ID NO: 4437170 - DNA, 25 bp, Homo sapien
cctctcccattgctcatctttccat

SEQ ID NO: 4437171 - DNA, 25 bp, Homo sapien
ttcaaacctcacagccctcttcaat

SEQ ID NO: 4437172 - DNA, 25 bp, Homo sapien
ttaggaatcacaagttcaaagtcca

SEQ ID NO: 4437173 - DNA, 25 bp, Homo sapien
agctggctccgcagatctccctcca

SEQ ID NO: 4437174 - DNA, 25 bp, Homo sapien
gctggctccgcagatctccctccag

SEQ ID NO: 4437175 - DNA, 25 bp, Homo sapien
cttcccttaggaatcacaagttcaa

SEQ ID NO: 4437176 - DNA, 25 bp, Homo sapien
ctgttcctgatagttttaggtcagc

SEQ ID NO: 4437177 - DNA, 25 bp, Homo sapien
ggctgttcctgatagttttaggtca

SEQ ID NO: 4437178 - DNA, 25 bp, Homo sapien
ttcctgatagttttaggtcagccat

SEQ ID NO: 4437179 - DNA, 25 bp, Homo sapien
tgtggctgttcctgatagttttagg

SEQ ID NO: 4437180 - DNA, 25 bp, Homo sapien
cggttcaggtttttgtttatgcttg

SEQ ID NO: 4437181 - DNA, 25 bp, Homo sapien
tcaggtttttgtttatgcttggctg

SEQ ID NO: 4437182 - DNA, 25 bp, Homo sapien
ggtttttgtttatgcttggctgcca

SEQ ID NO: 4437183 - DNA, 25 bp, Homo sapien
gttcaggtttttgtttatgcttggc

SEQ ID NO: 4437184 - DNA, 25 bp, Homo sapien
ttatctgtggaatggcagtccctct

SEQ ID NO: 4437185 - DNA, 25 bp, Homo sapien
cagcaatagatcttatctgtggaat

SEQ ID NO: 4437186 - DNA, 25 bp, Homo sapien
tatctgtggaatggcagtccctctg

SEQ ID NO: 4437187 - DNA, 25 bp, Homo sapien
tctgtggaatggcagtccctctgca

SEQ ID NO: 4437188 - DNA, 25 bp, Homo sapien
tgacttgtgacccacttctttagca

SEQ ID NO: 4437189 - DNA, 25 bp, Homo sapien
tagaacgcctgggtgctttcagttc

SEQ ID NO: 4437190 - DNA, 25 bp, Homo sapien
ctcaatattagaacgcctgggtgct

SEQ ID NO: 4437191 - DNA, 25 bp, Homo sapien
cagagggagtctcaatattagaacg

SEQ ID NO: 4437192 - DNA, 25 bp, Homo sapien
ccacataggcctgttatcattatac

SEQ ID NO: 4437193 - DNA, 25 bp, Homo sapien
cacttcatacactgtagaccctctg

SEQ ID NO: 4437194 - DNA, 25 bp, Homo sapien
ttccagatgcttggcatctgatcca

SEQ ID NO: 4437195 - DNA, 25 bp, Homo sapien
gcttgccaggccaaagattcacctt

SEQ ID NO: 4437196 - DNA, 25 bp, Homo sapien
tgaataactgaatataactccacat

SEQ ID NO: 4437197 - DNA, 25 bp, Homo sapien
ctgaataactgaatataactccaca

SEQ ID NO: 4437198 - DNA, 25 bp, Homo sapien
cttccacactactgggcccactggg

SEQ ID NO: 4437199 - DNA, 25 bp, Homo sapien
gggcccattagggattctaagtctc

SEQ ID NO: 4437200 - DNA, 25 bp, Homo sapien
gcccactgggcccattagggattct

SEQ ID NO: 4437201 - DNA, 25 bp, Homo sapien
tccaggtgtaaagcacagggacagg

SEQ ID NO: 4437202 - DNA, 25 bp, Homo sapien
ctgagggtatgaaccatggtactgg

SEQ ID NO: 4437203 - DNA, 25 bp, Homo sapien
gagggtatgaaccatggtactggag

SEQ ID NO: 4437204 - DNA, 25 bp, Homo sapien
tgagggtatgaaccatggtactgga

SEQ ID NO: 4437205 - DNA, 25 bp, Homo sapien
gctgatgtcactagcagctgtgtgt

SEQ ID NO: 4437206 - DNA, 25 bp, Homo sapien
ctgtgtgttagtcactgttgctgag

SEQ ID NO: 4437207 - DNA, 25 bp, Homo sapien
ccatttctacttcacagttcctgtg

SEQ ID NO: 4437208 - DNA, 25 bp, Homo sapien
cagagaggaggagtagagctcagct

SEQ ID NO: 4437209 - DNA, 25 bp, Homo sapien
tgtcgttcaaacaccagtaagagtt

SEQ ID NO: 4437210 - DNA, 25 bp, Homo sapien
tcctgtcatgaaagttcccactgag

SEQ ID NO: 4437211 - DNA, 25 bp, Homo sapien
gcagtttctttcgtatcaggagaca

SEQ ID NO: 4437212 - DNA, 25 bp, Homo sapien
ctgcataacataggaagaccatctg

SEQ ID NO: 4437213 - DNA, 25 bp, Homo sapien
tgagggccgtcaaaataagttctgt

SEQ ID NO: 4437214 - DNA, 25 bp, Homo sapien
caaaataagttctgttagtttatcg

SEQ ID NO: 4437215 - DNA, 25 bp, Homo sapien
ctatgagggccgtcaaaataagttc

SEQ ID NO: 4437216 - DNA, 25 bp, Homo sapien
aaataagttctgttagtttatcgag

SEQ ID NO: 4437217 - DNA, 25 bp, Homo sapien
gaacagggagatgaacaaagttctg

SEQ ID NO: 4437218 - DNA, 25 bp, Homo sapien
ggaaactctttcctcttaatcttca

SEQ ID NO: 4437219 - DNA, 25 bp, Homo sapien
tgatgacggtctggggagaacaggg

SEQ ID NO: 4437220 - DNA, 25 bp, Homo sapien
catgctgcattatttacaatgatga

SEQ ID NO: 4437221 - DNA, 25 bp, Homo sapien
gccacccttgcgattggccaccatg

SEQ ID NO: 4437222 - DNA, 25 bp, Homo sapien
caggccacccttgcgattggccacc

SEQ ID NO: 4437223 - DNA, 25 bp, Homo sapien
acccttgcgattggccaccatggcg

SEQ ID NO: 4437224 - DNA, 25 bp, Homo sapien
caggtgggtctgtgcgccgggtgcc

SEQ ID NO: 4437225 - DNA, 25 bp, Homo sapien
tgcatccttgcgaacatctgctctg

SEQ ID NO: 4437226 - DNA, 25 bp, Homo sapien
ggtgccctcgccttcggtttatatc

SEQ ID NO: 4437227 - DNA, 25 bp, Homo sapien
tcgtggctgcctgtaagctgatgct

SEQ ID NO: 4437228 - DNA, 25 bp, Homo sapien
tctgctctgcaagccatgcatcggg

SEQ ID NO: 4437229 - DNA, 25 bp, Homo sapien
gctggtcaagccaaagacattattc

SEQ ID NO: 4437230 - DNA, 25 bp, Homo sapien
ctagcgctgctatgaagtgggagtt

SEQ ID NO: 4437231 - DNA, 25 bp, Homo sapien
ccctgctgtgggttaacttccagaa

SEQ ID NO: 4437232 - DNA, 25 bp, Homo sapien
aaataagaagtgtcactagcgctgc

SEQ ID NO: 4437233 - DNA, 25 bp, Homo sapien
caatgtgaccaatccttgataatgc

SEQ ID NO: 4437234 - DNA, 25 bp, Homo sapien
ataatgctggtaggcctctatctcc

SEQ ID NO: 4437235 - DNA, 25 bp, Homo sapien
gcctgctcttttgaccagttcaacg

SEQ ID NO: 4437236 - DNA, 25 bp, Homo sapien
tctatctccaccagataagccaggc

SEQ ID NO: 4437237 - DNA, 25 bp, Homo sapien
tgtagataccaattgaaactgcatc

SEQ ID NO: 4437238 - DNA, 25 bp, Homo sapien
ccaggaatgccctgtagataccaat

SEQ ID NO: 4437239 - DNA, 25 bp, Homo sapien
tgccctgtagataccaattgaaact

SEQ ID NO: 4437240 - DNA, 25 bp, Homo sapien
taccaattgaaactgcatcatccat

SEQ ID NO: 4437241 - DNA, 25 bp, Homo sapien
ctccttccttcagtatccaatccca

SEQ ID NO: 4437242 - DNA, 25 bp, Homo sapien
gtatccaatcccatttcccttctca

SEQ ID NO: 4437243 - DNA, 25 bp, Homo sapien
cttccttcagtatccaatcccattt

SEQ ID NO: 4437244 - DNA, 25 bp, Homo sapien
tatccaatcccatttcccttctcat

SEQ ID NO: 4437245 - DNA, 25 bp, Homo sapien
aacactgtctccaagcgtgcaatga

SEQ ID NO: 4437246 - DNA, 25 bp, Homo sapien
tggacatcacactgcacttgccaag

SEQ ID NO: 4437247 - DNA, 25 bp, Homo sapien
caaaagaaacgttagcgccctgctg

SEQ ID NO: 4437248 - DNA, 25 bp, Homo sapien
gaacaatagagcatatggacatcac

SEQ ID NO: 4437249 - DNA, 25 bp, Homo sapien
ttctgcagctccagaataagtgcta

SEQ ID NO: 4437250 - DNA, 25 bp, Homo sapien
tatgtgttggcaacattgaaaaggg

SEQ ID NO: 4437251 - DNA, 25 bp, Homo sapien
tctgcagctccagaataagtgctat

SEQ ID NO: 4437252 - DNA, 25 bp, Homo sapien
ctgcagctccagaataagtgctatg

SEQ ID NO: 4437253 - DNA, 25 bp, Homo sapien
attttccccagctaaaagtccagca

SEQ ID NO: 4437254 - DNA, 25 bp, Homo sapien
gagggaatcagctggaaccactaaa

SEQ ID NO: 4437255 - DNA, 25 bp, Homo sapien
cactaaagaagcaattgcttcctta

SEQ ID NO: 4437256 - DNA, 25 bp, Homo sapien
caccacaggaaatccaggtactggc

SEQ ID NO: 4437257 - DNA, 25 bp, Homo sapien
cattgagtggcagcacgaggcttcc

SEQ ID NO: 4437258 - DNA, 25 bp, Homo sapien
taaaacggcattgagtggcagcacg

SEQ ID NO: 4437259 - DNA, 25 bp, Homo sapien
aaacggcattgagtggcagcacgag

SEQ ID NO: 4437260 - DNA, 25 bp, Homo sapien
ccactaaaacggcattgagtggcag

SEQ ID NO: 4437261 - DNA, 25 bp, Homo sapien
aggtggccacaaatgccttactcat

SEQ ID NO: 4437262 - DNA, 25 bp, Homo sapien
ggagtgagaccaagggaggtggcca

SEQ ID NO: 4437263 - DNA, 25 bp, Homo sapien
ctgcaggagtgagaccaagggaggt

SEQ ID NO: 4437264 - DNA, 25 bp, Homo sapien
agggaggtggccacaaatgccttac

SEQ ID NO: 4437265 - DNA, 25 bp, Homo sapien
tgcttctctactgtgacccagagca

SEQ ID NO: 4437266 - DNA, 25 bp, Homo sapien
gcttctctactgtgacccagagcag

SEQ ID NO: 4437267 - DNA, 25 bp, Homo sapien
gctgccttacgagcctgctgcttct

SEQ ID NO: 4437268 - DNA, 25 bp, Homo sapien
tcattttgctgccttacgagcctgc

SEQ ID NO: 4437269 - DNA, 25 bp, Homo sapien
gaatttccaattaaactcgcatgtt

SEQ ID NO: 4437270 - DNA, 25 bp, Homo sapien
caggtctgtataatctgccctcaat

SEQ ID NO: 4437271 - DNA, 25 bp, Homo sapien
gccagcttgcattaggaaacaatta

SEQ ID NO: 4437272 - DNA, 25 bp, Homo sapien
gtttatgactagtaaagtaggcacc

SEQ ID NO: 4437273 - DNA, 25 bp, Homo sapien
aaagtgtctgcaagtcaggacctca

SEQ ID NO: 4437274 - DNA, 25 bp, Homo sapien
ttttcccataaatatctacttctag

SEQ ID NO: 4437275 - DNA, 25 bp, Homo sapien
cactgcttagtcaaatccaatttca

SEQ ID NO: 4437276 - DNA, 25 bp, Homo sapien
gatctacaccttaagttatagccag

SEQ ID NO: 4437277 - DNA, 25 bp, Homo sapien
aattcatttctagtagctgcagagc

SEQ ID NO: 4437278 - DNA, 25 bp, Homo sapien
tgactcataaagagccctgcttccg

SEQ ID NO: 4437279 - DNA, 25 bp, Homo sapien
tgcttccgagaacaatagcaaaggg

SEQ ID NO: 4437280 - DNA, 25 bp, Homo sapien
tgctatcgtgatctttcagcgccac

SEQ ID NO: 4437281 - DNA, 25 bp, Homo sapien
caaacaactggtaattggcatttct

SEQ ID NO: 4437282 - DNA, 25 bp, Homo sapien
tctctgctagatatgaagtagggca

SEQ ID NO: 4437283 - DNA, 25 bp, Homo sapien
tattccattccgtaaattcagaaca

SEQ ID NO: 4437284 - DNA, 25 bp, Homo sapien
ctgagcataattaaactgttagtga

SEQ ID NO: 4437285 - DNA, 25 bp, Homo sapien
taaatcctaaatcccttaggtcaca

SEQ ID NO: 4437286 - DNA, 25 bp, Homo sapien
tcttctgttaccccttctgtgtccc

SEQ ID NO: 4437287 - DNA, 25 bp, Homo sapien
ccctcatttgagagtttcctaaatc

SEQ ID NO: 4437288 - DNA, 25 bp, Homo sapien
tcacatgtgctttgctgttcgacag

SEQ ID NO: 4437289 - DNA, 25 bp, Homo sapien
gaatcatgcccttgagaaaaagcct

SEQ ID NO: 4437290 - DNA, 25 bp, Homo sapien
tacagtggttgaaagagcaataccc

SEQ ID NO: 4437291 - DNA, 25 bp, Homo sapien
gcctgaaatcttgacatgtccgtga

SEQ ID NO: 4437292 - DNA, 25 bp, Homo sapien
gcagttcttcatagtccgtcaagga

SEQ ID NO: 4437293 - DNA, 25 bp, Homo sapien
tgtggatcttgatctggcatatggg

SEQ ID NO: 4437294 - DNA, 25 bp, Homo sapien
gaagcatccaagaccggggcatgtg

SEQ ID NO: 4437295 - DNA, 25 bp, Homo sapien
gatgagaactgtgtctccagagcag

SEQ ID NO: 4437296 - DNA, 25 bp, Homo sapien
ccagagcaggcggtaaattcaaagg

SEQ ID NO: 4437297 - DNA, 25 bp, Homo sapien
ttgtagaaagcattctgtaatggga

SEQ ID NO: 4437298 - DNA, 25 bp, Homo sapien
gtaatgggagcaaccgcagattcta

SEQ ID NO: 4437299 - DNA, 25 bp, Homo sapien
cagctagagtccagtcggctattca

SEQ ID NO: 4437300 - DNA, 25 bp, Homo sapien
gagcaaccgcagattctaagaacag

SEQ ID NO: 4437301 - DNA, 25 bp, Homo sapien
cttccacgggcataagggccacatt

SEQ ID NO: 4437302 - DNA, 25 bp, Homo sapien
tcactttcgttcttaattatgacac

SEQ ID NO: 4437303 - DNA, 25 bp, Homo sapien
gaatcaaataacttcactctctaaa

SEQ ID NO: 4437304 - DNA, 25 bp, Homo sapien
caataacacctagcaattaggaagc

SEQ ID NO: 4437305 - DNA, 25 bp, Homo sapien
tatgacactctaggaatttctgtat

SEQ ID NO: 4437306 - DNA, 25 bp, Homo sapien
gtgtctgatttattaggccatccat

SEQ ID NO: 4437307 - DNA, 25 bp, Homo sapien
gatttattaggccatccatttacca

SEQ ID NO: 4437308 - DNA, 25 bp, Homo sapien
tattgacaataatttggaaatagca

SEQ ID NO: 4437309 - DNA, 25 bp, Homo sapien
gaaatagcaaacattgtgtctgatt

SEQ ID NO: 4437310 - DNA, 25 bp, Homo sapien
catcttggtatattgactggtgcca

SEQ ID NO: 4437311 - DNA, 25 bp, Homo sapien
cacatgtgcattgccccatggcagt

SEQ ID NO: 4437312 - DNA, 25 bp, Homo sapien
tacctacagcactaggagaccaggc

SEQ ID NO: 4437313 - DNA, 25 bp, Homo sapien
tgtagaccgtccttcctgctgataa

SEQ ID NO: 4437314 - DNA, 25 bp, Homo sapien
cactattctaatgggtattgccaat

SEQ ID NO: 4437315 - DNA, 25 bp, Homo sapien
gaaggtcaacatgttagtcaagagg

SEQ ID NO: 4437316 - DNA, 25 bp, Homo sapien
gcccaaagtagagcctgagatgaag

SEQ ID NO: 4437317 - DNA, 25 bp, Homo sapien
cttcagagagtgagataggcaagga

SEQ ID NO: 4437318 - DNA, 25 bp, Homo sapien
ggctcattaaagaaatctggctgtc

SEQ ID NO: 4437319 - DNA, 25 bp, Homo sapien
tctggctgtctcctaatagtttccc

SEQ ID NO: 4437320 - DNA, 25 bp, Homo sapien
ttaaagaaatctggctgtctcctaa

SEQ ID NO: 4437321 - DNA, 25 bp, Homo sapien
gaaatctggctgtctcctaatagtt

SEQ ID NO: 4437322 - DNA, 25 bp, Homo sapien
aaatctgatgcttgagtcgctccca

SEQ ID NO: 4437323 - DNA, 25 bp, Homo sapien
tgagtaatcacttaggacaagccct

SEQ ID NO: 4437324 - DNA, 25 bp, Homo sapien
taattgcctcttcagacaaagctgg

SEQ ID NO: 4437325 - DNA, 25 bp, Homo sapien
gctggatttgcgctcctattagaga

SEQ ID NO: 4437326 - DNA, 25 bp, Homo sapien
tcttcacaccctatactaaccctcc

SEQ ID NO: 4437327 - DNA, 25 bp, Homo sapien
tactaaccctcctgaaagctttata

SEQ ID NO: 4437328 - DNA, 25 bp, Homo sapien
tctctcttcacaccctatactaacc

SEQ ID NO: 4437329 - DNA, 25 bp, Homo sapien
caccctatactaaccctcctgaaag

SEQ ID NO: 4437330 - DNA, 25 bp, Homo sapien
gcagccagtcatgtgctcatggcag

SEQ ID NO: 4437331 - DNA, 25 bp, Homo sapien
cctggcttcaaaatggctgccagct

SEQ ID NO: 4437332 - DNA, 25 bp, Homo sapien
ttaatcaaaattggtggactgctgg

SEQ ID NO: 4437333 - DNA, 25 bp, Homo sapien
aacggttagtcttacaggcctgagc

SEQ ID NO: 4437334 - DNA, 25 bp, Homo sapien
tctatctttgaagcccctgacagta

SEQ ID NO: 4437335 - DNA, 25 bp, Homo sapien
taacattgtcataggtaagtctgcc

SEQ ID NO: 4437336 - DNA, 25 bp, Homo sapien
acggaggaccagtattgaaaataca

SEQ ID NO: 4437337 - DNA, 25 bp, Homo sapien
caaggaaaggctctatctttgaagc

SEQ ID NO: 4437338 - DNA, 25 bp, Homo sapien
tgaatcctgttgtgttcggagtcct

SEQ ID NO: 4437339 - DNA, 25 bp, Homo sapien
ctggtgtttgccagccatctgggtg

SEQ ID NO: 4437340 - DNA, 25 bp, Homo sapien
tctactaccctgcatctgtttcagg

SEQ ID NO: 4437341 - DNA, 25 bp, Homo sapien
ccctggagtgagcaacgcaccctta

SEQ ID NO: 4437342 - DNA, 25 bp, Homo sapien
ttttgttagctttactggaaaggca

SEQ ID NO: 4437343 - DNA, 25 bp, Homo sapien
gatgccttctgatcttggagacagc

SEQ ID NO: 4437344 - DNA, 25 bp, Homo sapien
tgggattagacaactcttgagggtc

SEQ ID NO: 4437345 - DNA, 25 bp, Homo sapien
gctgtgagcacatccccacttaaga

SEQ ID NO: 4437346 - DNA, 25 bp, Homo sapien
tgttggtaatttttatttaatgctc

SEQ ID NO: 4437347 - DNA, 25 bp, Homo sapien
tggtaatttttatttaatgctccca

SEQ ID NO: 4437348 - DNA, 25 bp, Homo sapien
taatttttatttaatgctcccagga

SEQ ID NO: 4437349 - DNA, 25 bp, Homo sapien
atggcagcccgtcaaacttcacagg

SEQ ID NO: 4437350 - DNA, 25 bp, Homo sapien
tatcttaggtagtctagcacatggc

SEQ ID NO: 4437351 - DNA, 25 bp, Homo sapien
ttgactgatgtacaagagctccttg

SEQ ID NO: 4437352 - DNA, 25 bp, Homo sapien
tcagtggagtgcacacaggtaagac

SEQ ID NO: 4437353 - DNA, 25 bp, Homo sapien
catttacatggccagatccatctgc

SEQ ID NO: 4437354 - DNA, 25 bp, Homo sapien
tgtgtgcgctgtgtatgtccaacct

SEQ ID NO: 4437355 - DNA, 25 bp, Homo sapien
caactccttgtgtgcgctgtgtatg

SEQ ID NO: 4437356 - DNA, 25 bp, Homo sapien
gctgtgtatgtccaacctctgtgcc

SEQ ID NO: 4437357 - DNA, 25 bp, Homo sapien
ccgcagacttatgtggaatgagagt

SEQ ID NO: 4437358 - DNA, 25 bp, Homo sapien
ttcaaagtttgggaagcccgcagac

SEQ ID NO: 4437359 - DNA, 25 bp, Homo sapien
gacttatgtggaatgagagttcatc

SEQ ID NO: 4437360 - DNA, 25 bp, Homo sapien
tgggaagcccgcagacttatgtgga

SEQ ID NO: 4437361 - DNA, 25 bp, Homo sapien
ttagcatagtgtttatccagcctta

SEQ ID NO: 4437362 - DNA, 25 bp, Homo sapien
agagcatacaatgaccttcccgggc

SEQ ID NO: 4437363 - DNA, 25 bp, Homo sapien
ctttgttatctcgttttatgtatga

SEQ ID NO: 4437364 - DNA, 25 bp, Homo sapien
tatccagccttaaggtcccgaatcc

SEQ ID NO: 4437365 - DNA, 25 bp, Homo sapien
ccttccagtcctatcaattattaat

SEQ ID NO: 4437366 - DNA, 25 bp, Homo sapien
gagtccttccagtcctatcaattat

SEQ ID NO: 4437367 - DNA, 25 bp, Homo sapien
tccagtcctatcaattattaattcc

SEQ ID NO: 4437368 - DNA, 25 bp, Homo sapien
aagagtccttccagtcctatcaatt

SEQ ID NO: 4437369 - DNA, 25 bp, Homo sapien
ctgggcactctcaagaataacgctc

SEQ ID NO: 4437370 - DNA, 25 bp, Homo sapien
ggagcagtttgaaccttccctgggc

SEQ ID NO: 4437371 - DNA, 25 bp, Homo sapien
taccagggagcagtttgaaccttcc

SEQ ID NO: 4437372 - DNA, 25 bp, Homo sapien
aattatagagcccttcccaatggca

SEQ ID NO: 4437373 - DNA, 25 bp, Homo sapien
tccccgtcgttcactagacagcaat

SEQ ID NO: 4437374 - DNA, 25 bp, Homo sapien
tatccatctctattgcatttcgtgt

SEQ ID NO: 4437375 - DNA, 25 bp, Homo sapien
tactctgaatcgaaaggaattagtc

SEQ ID NO: 4437376 - DNA, 25 bp, Homo sapien
tctgtgacttgaaatatgatactct

SEQ ID NO: 4437377 - DNA, 25 bp, Homo sapien
cctagctaccagacagagtatttcc

SEQ ID NO: 4437378 - DNA, 25 bp, Homo sapien
tgatgaacaaggctctctgacagat

SEQ ID NO: 4437379 - DNA, 25 bp, Homo sapien
tttggctatatgcatgtaactcccc

SEQ ID NO: 4437380 - DNA, 25 bp, Homo sapien
gacttccttgaatatatctacgcag

SEQ ID NO: 4437381 - DNA, 25 bp, Homo sapien
cccaggtgagcagccttcaaagtaa

SEQ ID NO: 4437382 - DNA, 25 bp, Homo sapien
gaggtctccaggagaagctttttct

SEQ ID NO: 4437383 - DNA, 25 bp, Homo sapien
tcaaagtaagtgtgaggtctccagg

SEQ ID NO: 4437384 - DNA, 25 bp, Homo sapien
gagcagccttcaaagtaagtgtgag

SEQ ID NO: 4437385 - DNA, 25 bp, Homo sapien
ttcttttgctgccttgcctgcataa

SEQ ID NO: 4437386 - DNA, 25 bp, Homo sapien
tgtttctcgtccctgcactctaaat

SEQ ID NO: 4437387 - DNA, 25 bp, Homo sapien
ttcccatatgtttctcgtccctgca

SEQ ID NO: 4437388 - DNA, 25 bp, Homo sapien
cagccttcccatatgtttctcgtcc

SEQ ID NO: 4437389 - DNA, 25 bp, Homo sapien
ggtgccatgtagtatactgcttgtg

SEQ ID NO: 4437390 - DNA, 25 bp, Homo sapien
tccagatggtgccatgtagtatact

SEQ ID NO: 4437391 - DNA, 25 bp, Homo sapien
catcagagatggctcgccaccccac

SEQ ID NO: 4437392 - DNA, 25 bp, Homo sapien
cctttttccagatggtgccatgtag

SEQ ID NO: 4437393 - DNA, 25 bp, Homo sapien
catagcagttttgatcacacaatag

SEQ ID NO: 4437394 - DNA, 25 bp, Homo sapien
gatcacacaatagttaatcttaagc

SEQ ID NO: 4437395 - DNA, 25 bp, Homo sapien
tgatcatctgaactttagttgtaga

SEQ ID NO: 4437396 - DNA, 25 bp, Homo sapien
aagcatgtaactttccatgatcatc

SEQ ID NO: 4437397 - DNA, 25 bp, Homo sapien
ctaagtagaaagacaatccagagcc

SEQ ID NO: 4437398 - DNA, 25 bp, Homo sapien
agccactctgttctgttgaagtcat

SEQ ID NO: 4437399 - DNA, 25 bp, Homo sapien
tttcaagtaaggaagagccactctg

SEQ ID NO: 4437400 - DNA, 25 bp, Homo sapien
gagccaaagccacaggtacaatgga

SEQ ID NO: 4437401 - DNA, 25 bp, Homo sapien
ttagcccaatgtaagaggcatgtct

SEQ ID NO: 4437402 - DNA, 25 bp, Homo sapien
tgtgatagtctgtgatgtcttccgc

SEQ ID NO: 4437403 - DNA, 25 bp, Homo sapien
gaggcatgtcttcaaacctattaaa

SEQ ID NO: 4437404 - DNA, 25 bp, Homo sapien
cctattaaagatggtgcttatgtga

SEQ ID NO: 4437405 - DNA, 25 bp, Homo sapien
gtgatgatgaagttgagactaactt

SEQ ID NO: 4437406 - DNA, 25 bp, Homo sapien
gctcttctacgtcagtgatgatgaa

SEQ ID NO: 4437407 - DNA, 25 bp, Homo sapien
gatgaagttgagactaacttcagta

SEQ ID NO: 4437408 - DNA, 25 bp, Homo sapien
tgctcttctacgtcagtgatgatga

SEQ ID NO: 4437409 - DNA, 25 bp, Homo sapien
ttagccattctgcgcagatgcacac

SEQ ID NO: 4437410 - DNA, 25 bp, Homo sapien
tcgtaaatccccagcgatagctgag

SEQ ID NO: 4437411 - DNA, 25 bp, Homo sapien
gctcatgcttctcaaataaatctcg

SEQ ID NO: 4437412 - DNA, 25 bp, Homo sapien
gatagctgagtttttaagagtgtca

SEQ ID NO: 4437413 - DNA, 25 bp, Homo sapien
tttggagtaatcgtaaacctgctac

SEQ ID NO: 4437414 - DNA, 25 bp, Homo sapien
cattgtcctgctgcaccaaactctg

SEQ ID NO: 4437415 - DNA, 25 bp, Homo sapien
tgcaaagtccaagagaaccaaagtc

SEQ ID NO: 4437416 - DNA, 25 bp, Homo sapien
cctgtggctgttactttcatgcaaa

SEQ ID NO: 4437417 - DNA, 25 bp, Homo sapien
ttgttggattcacattgtcctgtgg

SEQ ID NO: 4437418 - DNA, 25 bp, Homo sapien
tgtcccgttcatcatccaaggctct

SEQ ID NO: 4437419 - DNA, 25 bp, Homo sapien
gtcccgttcatcatccaaggctctc

SEQ ID NO: 4437420 - DNA, 25 bp, Homo sapien
ttgtcccgttcatcatccaaggctc

SEQ ID NO: 4437421 - DNA, 25 bp, Homo sapien
gagaggagaaggtatgggaactagt

SEQ ID NO: 4437422 - DNA, 25 bp, Homo sapien
aggagaaggtatgggaactagtggc

SEQ ID NO: 4437423 - DNA, 25 bp, Homo sapien
gaggagaaggtatgggaactagtgg

SEQ ID NO: 4437424 - DNA, 25 bp, Homo sapien
caggagaggagaaggtatgggaact

SEQ ID NO: 4437425 - DNA, 25 bp, Homo sapien
aaagcaagttgcctaggttgagaaa

SEQ ID NO: 4437426 - DNA, 25 bp, Homo sapien
gaaaggatcggcaacagtcaacttc

SEQ ID NO: 4437427 - DNA, 25 bp, Homo sapien
tcctgaaaaagcaagttgcctaggt

SEQ ID NO: 4437428 - DNA, 25 bp, Homo sapien
ttgcctaggttgagaaaggatcggc

SEQ ID NO: 4437429 - DNA, 25 bp, Homo sapien
tagagcagcaaaccaatactgccat

SEQ ID NO: 4437430 - DNA, 25 bp, Homo sapien
gagcagcaaaccaatactgccatcc

SEQ ID NO: 4437431 - DNA, 25 bp, Homo sapien
agagcagcaaaccaatactgccatc

SEQ ID NO: 4437432 - DNA, 25 bp, Homo sapien
cttgtgggagggatgttggcatctc

SEQ ID NO: 4437433 - DNA, 25 bp, Homo sapien
ctgtgtaaagggagttccaaaagat

SEQ ID NO: 4437434 - DNA, 25 bp, Homo sapien
tgcttgtgggagggatgttggcatc

SEQ ID NO: 4437435 - DNA, 25 bp, Homo sapien
tgtgggagggatgttggcatctctt

SEQ ID NO: 4437436 - DNA, 25 bp, Homo sapien
ccctcacttccagagatgtaaactt

SEQ ID NO: 4437437 - DNA, 25 bp, Homo sapien
tcatcttccaatgggtcagcatccc

SEQ ID NO: 4437438 - DNA, 25 bp, Homo sapien
cacagccttggcttgtacattccca

SEQ ID NO: 4437439 - DNA, 25 bp, Homo sapien
catttcaattcatatccttccctca

SEQ ID NO: 4437440 - DNA, 25 bp, Homo sapien
gtgagtaataagaccctcatttcag

SEQ ID NO: 4437441 - DNA, 25 bp, Homo sapien
gatgtccactaccttatgtccagaa

SEQ ID NO: 4437442 - DNA, 25 bp, Homo sapien
ggccttcgaaaacataacctctctc

SEQ ID NO: 4437443 - DNA, 25 bp, Homo sapien
tccatagcccttgttgcagtctgtt

SEQ ID NO: 4437444 - DNA, 25 bp, Homo sapien
tgtatatatacacccaaagatattt

SEQ ID NO: 4437445 - DNA, 25 bp, Homo sapien
ttattattaggaactggctcatgtg

SEQ ID NO: 4437446 - DNA, 25 bp, Homo sapien
tgaatgcattagctcagagagcaaa

SEQ ID NO: 4437447 - DNA, 25 bp, Homo sapien
cccaggaaagtggatggtagagttt

SEQ ID NO: 4437448 - DNA, 25 bp, Homo sapien
aaaaagatggatgatttacaccaga

SEQ ID NO: 4437449 - DNA, 25 bp, Homo sapien
cagatgtccataagggccattctgg

SEQ ID NO: 4437450 - DNA, 25 bp, Homo sapien
aagatggatgatttacaccagatgt

SEQ ID NO: 4437451 - DNA, 25 bp, Homo sapien
agatgtccataagggccattctggg

SEQ ID NO: 4437452 - DNA, 25 bp, Homo sapien
gatcatatttaaacgagtgtgcaaa

SEQ ID NO: 4437453 - DNA, 25 bp, Homo sapien
cttgatcatatttaaacgagtgtgc

SEQ ID NO: 4437454 - DNA, 25 bp, Homo sapien
ttcttgatcatatttaaacgagtgt

SEQ ID NO: 4437455 - DNA, 25 bp, Homo sapien
catatttaaacgagtgtgcaaacat

SEQ ID NO: 4437456 - DNA, 25 bp, Homo sapien
tcctgtttatcaccaatcagagttg

SEQ ID NO: 4437457 - DNA, 25 bp, Homo sapien
ctttcttggaatcctgtttatcacc

SEQ ID NO: 4437458 - DNA, 25 bp, Homo sapien
caatcagagttgtgtctggatttgc

SEQ ID NO: 4437459 - DNA, 25 bp, Homo sapien
gtgtctggatttgcgataggttctg

SEQ ID NO: 4437460 - DNA, 25 bp, Homo sapien
tatatgagggaccatttgcagctct

SEQ ID NO: 4437461 - DNA, 25 bp, Homo sapien
gaacctcattattgccgggtggaag

SEQ ID NO: 4437462 - DNA, 25 bp, Homo sapien
gggacggacttctgccttgctgttc

SEQ ID NO: 4437463 - DNA, 25 bp, Homo sapien
cccactggttgcactcactgtaaga

SEQ ID NO: 4437464 - DNA, 25 bp, Homo sapien
gtttatatgcatctgtgttgaccat

SEQ ID NO: 4437465 - DNA, 25 bp, Homo sapien
tggtactgctgatgtcaagatattc

SEQ ID NO: 4437466 - DNA, 25 bp, Homo sapien
ttttggtactgctgatgtcaagata

SEQ ID NO: 4437467 - DNA, 25 bp, Homo sapien
ttggtactgctgatgtcaagatatt

SEQ ID NO: 4437468 - DNA, 25 bp, Homo sapien
ttacgactagtttttggtactgctg

SEQ ID NO: 4437469 - DNA, 25 bp, Homo sapien
ccaatgtaggatattcttgtctgga

SEQ ID NO: 4437470 - DNA, 25 bp, Homo sapien
gcatcctttagaagaatctctctca

SEQ ID NO: 4437471 - DNA, 25 bp, Homo sapien
ggatcataaacttgtaccaaatcca

SEQ ID NO: 4437472 - DNA, 25 bp, Homo sapien
gccgtgatctttacagggatattca

SEQ ID NO: 4437473 - DNA, 25 bp, Homo sapien
tctctgtcacttggtattagatgta

SEQ ID NO: 4437474 - DNA, 25 bp, Homo sapien
tcagatttcagccagccggcagtta

SEQ ID NO: 4437475 - DNA, 25 bp, Homo sapien
gccggtagactactttctctgtcac

SEQ ID NO: 4437476 - DNA, 25 bp, Homo sapien
gcagttactcttgtctgccggtaga

SEQ ID NO: 4437477 - DNA, 25 bp, Homo sapien
ctccctttgttccagcagtgttgtg

SEQ ID NO: 4437478 - DNA, 25 bp, Homo sapien
ttcttctaagtttctggcctctcct

SEQ ID NO: 4437479 - DNA, 25 bp, Homo sapien
tcttctaagtttctggcctctcctt

SEQ ID NO: 4437480 - DNA, 25 bp, Homo sapien
cttctaagtttctggcctctccttc

SEQ ID NO: 4437481 - DNA, 25 bp, Homo sapien
tttctgaatcctataaggtgccgtc

SEQ ID NO: 4437482 - DNA, 25 bp, Homo sapien
ttccagataaaaccccagaagttga

SEQ ID NO: 4437483 - DNA, 25 bp, Homo sapien
tacacttgttgacccttcacaggaa

SEQ ID NO: 4437484 - DNA, 25 bp, Homo sapien
tgaagacaggcagtaatacacttgt

SEQ ID NO: 4437485 - DNA, 25 bp, Homo sapien
catctagtttacttagccagtggtg

SEQ ID NO: 4437486 - DNA, 25 bp, Homo sapien
ctgcatctagtttacttagccagtg

SEQ ID NO: 4437487 - DNA, 25 bp, Homo sapien
ctagtttacttagccagtggtgccc

SEQ ID NO: 4437488 - DNA, 25 bp, Homo sapien
tctagtttacttagccagtggtgcc

SEQ ID NO: 4437489 - DNA, 25 bp, Homo sapien
tattgtgaagttcatgtcttttgag

SEQ ID NO: 4437490 - DNA, 25 bp, Homo sapien
aggaaaatgtccactccagggtgta

SEQ ID NO: 4437491 - DNA, 25 bp, Homo sapien
caaggaaaatgtccactccagggtg

SEQ ID NO: 4437492 - DNA, 25 bp, Homo sapien
atgtccactccagggtgtagtaaag

SEQ ID NO: 4437493 - DNA, 25 bp, Homo sapien
cccaaattaggcagctcttgttcat

SEQ ID NO: 4437494 - DNA, 25 bp, Homo sapien
tgcctgaagctcacctaatgaaatc

SEQ ID NO: 4437495 - DNA, 25 bp, Homo sapien
tacagcaagagaatttatagaccat

SEQ ID NO: 4437496 - DNA, 25 bp, Homo sapien
aataaaaccttgcatacttacaggg

SEQ ID NO: 4437497 - DNA, 25 bp, Homo sapien
agggtccccagtttagttgaagatg

SEQ ID NO: 4437498 - DNA, 25 bp, Homo sapien
ggtccccagtttagttgaagatgca

SEQ ID NO: 4437499 - DNA, 25 bp, Homo sapien
cagtttagttgaagatgcaatacgg

SEQ ID NO: 4437500 - DNA, 25 bp, Homo sapien
ccccagtttagttgaagatgcaata

SEQ ID NO: 4437501 - DNA, 25 bp, Homo sapien
ggtattctgatgaatgtatttgaat

SEQ ID NO: 4437502 - DNA, 25 bp, Homo sapien
tttgaatttttctttaaaggcatca

SEQ ID NO: 4437503 - DNA, 25 bp, Homo sapien
ctttggtattctgatgaatgtattt

SEQ ID NO: 4437504 - DNA, 25 bp, Homo sapien
ttggtattctgatgaatgtatttga

SEQ ID NO: 4437505 - DNA, 25 bp, Homo sapien
tttgcaatgcttcagcacacaaatt

SEQ ID NO: 4437506 - DNA, 25 bp, Homo sapien
ttagctttgcaatgcttcagcacac

SEQ ID NO: 4437507 - DNA, 25 bp, Homo sapien
gctttgcaatgcttcagcacacaaa

SEQ ID NO: 4437508 - DNA, 25 bp, Homo sapien
tgcaatgcttcagcacacaaattag

SEQ ID NO: 4437509 - DNA, 25 bp, Homo sapien
gcattggtgatgagctttcctaggg

SEQ ID NO: 4437510 - DNA, 25 bp, Homo sapien
gaagattcccatgttctacaccctg

SEQ ID NO: 4437511 - DNA, 25 bp, Homo sapien
gatgataccccttctgttgaatgca

SEQ ID NO: 4437512 - DNA, 25 bp, Homo sapien
gaaagcggcttgtatactcttagag

SEQ ID NO: 4437513 - DNA, 25 bp, Homo sapien
ggctctagtcctggagtcattcaga

SEQ ID NO: 4437514 - DNA, 25 bp, Homo sapien
ggttcggaggatcatgtacacttgt

SEQ ID NO: 4437515 - DNA, 25 bp, Homo sapien
tgagcgctgccctagcctattgtgc

SEQ ID NO: 4437516 - DNA, 25 bp, Homo sapien
ccacgattgatcatttgagcgctgc

SEQ ID NO: 4437517 - DNA, 25 bp, Homo sapien
tttagtagggggtgacggcgatatc

SEQ ID NO: 4437518 - DNA, 25 bp, Homo sapien
ggggtgacggcgatatcatagccat

SEQ ID NO: 4437519 - DNA, 25 bp, Homo sapien
agggggtgacggcgatatcatagcc

SEQ ID NO: 4437520 - DNA, 25 bp, Homo sapien
agtagggggtgacggcgatatcata

SEQ ID NO: 4437521 - DNA, 25 bp, Homo sapien
ctagggacggtgcagttgaatctac

SEQ ID NO: 4437522 - DNA, 25 bp, Homo sapien
gatctagggacggtgcagttgaatc

SEQ ID NO: 4437523 - DNA, 25 bp, Homo sapien
gaatctacaaagagcctataggtca

SEQ ID NO: 4437524 - DNA, 25 bp, Homo sapien
agttgaatctacaaagagcctatag

SEQ ID NO: 4437525 - DNA, 25 bp, Homo sapien
taagggagaattcctctcccacttc

SEQ ID NO: 4437526 - DNA, 25 bp, Homo sapien
gatttttctggcattaagggagaat

SEQ ID NO: 4437527 - DNA, 25 bp, Homo sapien
cttgatttttctggcattaagggag

SEQ ID NO: 4437528 - DNA, 25 bp, Homo sapien
attcctctcccacttcctgttgtcc

SEQ ID NO: 4437529 - DNA, 25 bp, Homo sapien
ccataatgtttccatcctgagttgc

SEQ ID NO: 4437530 - DNA, 25 bp, Homo sapien
ggtggtttcagtcccagttgatcta

SEQ ID NO: 4437531 - DNA, 25 bp, Homo sapien
tgagttgcttatcaacaatgcgggc

SEQ ID NO: 4437532 - DNA, 25 bp, Homo sapien
cctgtttagtgatctttttccataa

SEQ ID NO: 4437533 - DNA, 25 bp, Homo sapien
attccatgcagacgcttaatgcccc

SEQ ID NO: 4437534 - DNA, 25 bp, Homo sapien
cagcagctgcgttatgagaatggaa

SEQ ID NO: 4437535 - DNA, 25 bp, Homo sapien
gttcccgttagagggattccatgca

SEQ ID NO: 4437536 - DNA, 25 bp, Homo sapien
ctaagggcgagtggcaccgaagcaa

SEQ ID NO: 4437537 - DNA, 25 bp, Homo sapien
ttttgtaatccttcacaagtagtaa

SEQ ID NO: 4437538 - DNA, 25 bp, Homo sapien
ggagatgaatccacaaataagacat

SEQ ID NO: 4437539 - DNA, 25 bp, Homo sapien
cagcagggacctcttgtaaatcctc

SEQ ID NO: 4437540 - DNA, 25 bp, Homo sapien
agataaatacagcagggacctcttg

SEQ ID NO: 4437541 - DNA, 25 bp, Homo sapien
gctgctgctagtatttgaggacaca

SEQ ID NO: 4437542 - DNA, 25 bp, Homo sapien
ttgatcatgtacttgacatgggacg

SEQ ID NO: 4437543 - DNA, 25 bp, Homo sapien
gaagaagctgtagagctttgctgct

SEQ ID NO: 4437544 - DNA, 25 bp, Homo sapien
tgacatgggacgtgcctctcatttc

SEQ ID NO: 4437545 - DNA, 25 bp, Homo sapien
gtggacttgactagctcccaatacg

SEQ ID NO: 4437546 - DNA, 25 bp, Homo sapien
tgactagctcccaagtggacttgac

SEQ ID NO: 4437547 - DNA, 25 bp, Homo sapien
ctacatccaagatctcaagtggact

SEQ ID NO: 4437548 - DNA, 25 bp, Homo sapien
caagtggacttgactagctcccaag

SEQ ID NO: 4437549 - DNA, 25 bp, Homo sapien
tatgtgcaccacaatacgaaaattt

SEQ ID NO: 4437550 - DNA, 25 bp, Homo sapien
ccttgcagcatttttcgtaagtgag

SEQ ID NO: 4437551 - DNA, 25 bp, Homo sapien
ttgcaaagcattaaaggagcgtaga

SEQ ID NO: 4437552 - DNA, 25 bp, Homo sapien
taagtgagcagctttccaacagatc

SEQ ID NO: 4437553 - DNA, 25 bp, Homo sapien
ttagggcagattggaatcgacggtc

SEQ ID NO: 4437554 - DNA, 25 bp, Homo sapien
taataagtctcatttcgattggatc

SEQ ID NO: 4437555 - DNA, 25 bp, Homo sapien
gatcatattcatgagttagggcaga

SEQ ID NO: 4437556 - DNA, 25 bp, Homo sapien
taattgaccattgtaataagtctca

SEQ ID NO: 4437557 - DNA, 25 bp, Homo sapien
caatttacattacttggaaagcaca

SEQ ID NO: 4437558 - DNA, 25 bp, Homo sapien
ctgaatccaccttagtttatgctat

SEQ ID NO: 4437559 - DNA, 25 bp, Homo sapien
aattctaggagatcattgtttcagt

SEQ ID NO: 4437560 - DNA, 25 bp, Homo sapien
tattcctccgttgtggtgctctggc

SEQ ID NO: 4437561 - DNA, 25 bp, Homo sapien
tctttgcctctacagccaattgcca

SEQ ID NO: 4437562 - DNA, 25 bp, Homo sapien
ctttgcctctacagccaattgccat

SEQ ID NO: 4437563 - DNA, 25 bp, Homo sapien
catctttgcctctacagccaattgc

SEQ ID NO: 4437564 - DNA, 25 bp, Homo sapien
ctcatctttgcctctacagccaatt

SEQ ID NO: 4437565 - DNA, 25 bp, Homo sapien
agaaggccatacacctgaggtttcg

SEQ ID NO: 4437566 - DNA, 25 bp, Homo sapien
ctagaaggccatacacctgaggttt

SEQ ID NO: 4437567 - DNA, 25 bp, Homo sapien
aaggccatacacctgaggtttcgtc

SEQ ID NO: 4437568 - DNA, 25 bp, Homo sapien
ggccatacacctgaggtttcgtcaa

SEQ ID NO: 4437569 - DNA, 25 bp, Homo sapien
agccacagcaatttgatagagagct

SEQ ID NO: 4437570 - DNA, 25 bp, Homo sapien
acagcaatttgatagagagctgcca

SEQ ID NO: 4437571 - DNA, 25 bp, Homo sapien
gcaatttgatagagagctgccacca

SEQ ID NO: 4437572 - DNA, 25 bp, Homo sapien
gccacagcaatttgatagagagctg

SEQ ID NO: 4437573 - DNA, 25 bp, Homo sapien
caaacagccggcagtaaagaatgtc

SEQ ID NO: 4437574 - DNA, 25 bp, Homo sapien
aaacagccggcagtaaagaatgtca

SEQ ID NO: 4437575 - DNA, 25 bp, Homo sapien
tagggtcgctgtaaacataatttgg

SEQ ID NO: 4437576 - DNA, 25 bp, Homo sapien
gtacatcgcgtggaaggcagttttg

SEQ ID NO: 4437577 - DNA, 25 bp, Homo sapien
cttgtgttgaggaagccctacaact

SEQ ID NO: 4437578 - DNA, 25 bp, Homo sapien
caacttctgtacatcgcgtggaagg

SEQ ID NO: 4437579 - DNA, 25 bp, Homo sapien
ctgcaaaagcggggcggagactcgc

SEQ ID NO: 4437580 - DNA, 25 bp, Homo sapien
gcggagactcgcccggtcccaggct

SEQ ID NO: 4437581 - DNA, 25 bp, Homo sapien
agactcgcccggtcccaggctccac

SEQ ID NO: 4437582 - DNA, 25 bp, Homo sapien
tgcaaaagcggggcggagactcgcc

SEQ ID NO: 4437583 - DNA, 25 bp, Homo sapien
ggtaggcaaagcggcacaggcccgg

SEQ ID NO: 4437584 - DNA, 25 bp, Homo sapien
tcgcctgcttggcttgccccaatcc

SEQ ID NO: 4437585 - DNA, 25 bp, Homo sapien
ctggggctcaagtagccttggtgcc

SEQ ID NO: 4437586 - DNA, 25 bp, Homo sapien
tgccgagggatgaggggtaggcaaa

SEQ ID NO: 4437587 - DNA, 25 bp, Homo sapien
cagggaccaggaggtggcgggaaca

SEQ ID NO: 4437588 - DNA, 25 bp, Homo sapien
gttgggccagggaccaggaggtggc

SEQ ID NO: 4437589 - DNA, 25 bp, Homo sapien
gaccaggaggtggcgggaacaagga

SEQ ID NO: 4437590 - DNA, 25 bp, Homo sapien
gccagggaccaggaggtggcgggaa

SEQ ID NO: 4437591 - DNA, 25 bp, Homo sapien
taggcactgggctatctcgtcgtac

SEQ ID NO: 4437592 - DNA, 25 bp, Homo sapien
cctggtaggcggcacagacactagg

SEQ ID NO: 4437593 - DNA, 25 bp, Homo sapien
cactgggctatctcgtcgtactgag

SEQ ID NO: 4437594 - DNA, 25 bp, Homo sapien
ggcactgggctatctcgtcgtactg

SEQ ID NO: 4437595 - DNA, 25 bp, Homo sapien
tcctaacgcctgacactggtgttcc

SEQ ID NO: 4437596 - DNA, 25 bp, Homo sapien
taagagttttgtgtggaaggcgagt

SEQ ID NO: 4437597 - DNA, 25 bp, Homo sapien
acgtggttcctaagcgctgcctggg

SEQ ID NO: 4437598 - DNA, 25 bp, Homo sapien
tccccactcatgtgtgacacgtggt

SEQ ID NO: 4437599 - DNA, 25 bp, Homo sapien
ttgaatttaattgcaaggccttgga

SEQ ID NO: 4437600 - DNA, 25 bp, Homo sapien
ggccttggaaggctgccatgaactc

SEQ ID NO: 4437601 - DNA, 25 bp, Homo sapien
ccttggaaggctgccatgaactcac

SEQ ID NO: 4437602 - DNA, 25 bp, Homo sapien
gacttgaatttaattgcaaggcctt

SEQ ID NO: 4437603 - DNA, 25 bp, Homo sapien
tacagtgcagaatacaatcgtccaa

SEQ ID NO: 4437604 - DNA, 25 bp, Homo sapien
tattcagcagacagtatattcagca

SEQ ID NO: 4437605 - DNA, 25 bp, Homo sapien
cccttgtcagaaaaggttgatatat

SEQ ID NO: 4437606 - DNA, 25 bp, Homo sapien
catggtaaagtcatattcagcagac

SEQ ID NO: 4437607 - DNA, 25 bp, Homo sapien
tactgatgatatgccgtcagatggc

SEQ ID NO: 4437608 - DNA, 25 bp, Homo sapien
cagtgctcggagtatggaaactaaa

SEQ ID NO: 4437609 - DNA, 25 bp, Homo sapien
tatactggcaatggtcggtgggcac

SEQ ID NO: 4437610 - DNA, 25 bp, Homo sapien
cagatggccttctcagcaggcgcct

SEQ ID NO: 4437611 - DNA, 25 bp, Homo sapien
caaaccataatattccccctctaat

SEQ ID NO: 4437612 - DNA, 25 bp, Homo sapien
attatgccaaaccataatattcccc

SEQ ID NO: 4437613 - DNA, 25 bp, Homo sapien
ggcaaattatgccaaaccataatat

SEQ ID NO: 4437614 - DNA, 25 bp, Homo sapien
atttggcaaattatgccaaaccata

SEQ ID NO: 4437615 - DNA, 25 bp, Homo sapien
agcaataaatcataggtcttgccaa

SEQ ID NO: 4437616 - DNA, 25 bp, Homo sapien
ttagtgatgtaataagcttaggggc

SEQ ID NO: 4437617 - DNA, 25 bp, Homo sapien
gcttaggggcatatatcaggtccaa

SEQ ID NO: 4437618 - DNA, 25 bp, Homo sapien
tgccaacaatgacggcaaacagatg

SEQ ID NO: 4437619 - DNA, 25 bp, Homo sapien
tctctctagggatgtatgcaaaatg

SEQ ID NO: 4437620 - DNA, 25 bp, Homo sapien
tactgatgaaaactgcatattggcc

SEQ ID NO: 4437621 - DNA, 25 bp, Homo sapien
tattccctcgtgaactacaggcacc

SEQ ID NO: 4437622 - DNA, 25 bp, Homo sapien
aatgttctgggactccacacagggc

SEQ ID NO: 4437623 - DNA, 25 bp, Homo sapien
taatcaccatatcaatgacacatgc

SEQ ID NO: 4437624 - DNA, 25 bp, Homo sapien
caacatccattattctgacactgct

SEQ ID NO: 4437625 - DNA, 25 bp, Homo sapien
tactcgtttataatctgttacctgg

SEQ ID NO: 4437626 - DNA, 25 bp, Homo sapien
gaaggtctctctagccacctaatca

SEQ ID NO: 4437627 - DNA, 25 bp, Homo sapien
ccacctagctactgctcacgctcca

SEQ ID NO: 4437628 - DNA, 25 bp, Homo sapien
tccctcaacttcttgctggaggcgc

SEQ ID NO: 4437629 - DNA, 25 bp, Homo sapien
tcaacttcttgctggaggcgctcag

SEQ ID NO: 4437630 - DNA, 25 bp, Homo sapien
cttcttgctggaggcgctcagctca

SEQ ID NO: 4437631 - DNA, 25 bp, Homo sapien
cctcaacttcttgctggaggcgctc

SEQ ID NO: 4437632 - DNA, 25 bp, Homo sapien
tcctgagcacggtccagctcctctt

SEQ ID NO: 4437633 - DNA, 25 bp, Homo sapien
cagcagctttttccgcttcttctag

SEQ ID NO: 4437634 - DNA, 25 bp, Homo sapien
cagctcctcttcaaccagcttgatc

SEQ ID NO: 4437635 - DNA, 25 bp, Homo sapien
cttttgcagggcagtagccaggcgc

SEQ ID NO: 4437636 - DNA, 25 bp, Homo sapien
ggttggatttcctggagttctatct

SEQ ID NO: 4437637 - DNA, 25 bp, Homo sapien
gatttcctggagttctatcttttct

SEQ ID NO: 4437638 - DNA, 25 bp, Homo sapien
gcttctttgggttggatttcctgga

SEQ ID NO: 4437639 - DNA, 25 bp, Homo sapien
ttgggttggatttcctggagttcta

SEQ ID NO: 4437640 - DNA, 25 bp, Homo sapien
tctctcggcaatggggctctgccag

SEQ ID NO: 4437641 - DNA, 25 bp, Homo sapien
tccatctctcggcaatggggctctg

SEQ ID NO: 4437642 - DNA, 25 bp, Homo sapien
tccaagtctccttcagtgatcaccc

SEQ ID NO: 4437643 - DNA, 25 bp, Homo sapien
tcagctcattctctgtgcgttccaa

SEQ ID NO: 4437644 - DNA, 25 bp, Homo sapien
gtccagcaacctctgtgtacagaat

SEQ ID NO: 4437645 - DNA, 25 bp, Homo sapien
ctgtgtacagaatactcctctttgg

SEQ ID NO: 4437646 - DNA, 25 bp, Homo sapien
gtacagaatactcctctttggtgca

SEQ ID NO: 4437647 - DNA, 25 bp, Homo sapien
ggtccagcaacctctgtgtacagaa

SEQ ID NO: 4437648 - DNA, 25 bp, Homo sapien
aggcttcccatagtacagtctttcc

SEQ ID NO: 4437649 - DNA, 25 bp, Homo sapien
ggcttcccatagtacagtctttccc

SEQ ID NO: 4437650 - DNA, 25 bp, Homo sapien
gcttcccatagtacagtctttccct

SEQ ID NO: 4437651 - DNA, 25 bp, Homo sapien
gaggcttcccatagtacagtctttc

SEQ ID NO: 4437652 - DNA, 25 bp, Homo sapien
tgcaggatgtacacctaacagacct

SEQ ID NO: 4437653 - DNA, 25 bp, Homo sapien
caataagctgcaggatgtacaccta

SEQ ID NO: 4437654 - DNA, 25 bp, Homo sapien
taagctgcaggatgtacacctaaca

SEQ ID NO: 4437655 - DNA, 25 bp, Homo sapien
agccaataagctgcaggatgtacac

SEQ ID NO: 4437656 - DNA, 25 bp, Homo sapien
caggcccgtgccccaacagaataaa

SEQ ID NO: 4437657 - DNA, 25 bp, Homo sapien
aggcccgtgccccaacagaataaat

SEQ ID NO: 4437658 - DNA, 25 bp, Homo sapien
tgctcggcccaatcgttcccacagc

SEQ ID NO: 4437659 - DNA, 25 bp, Homo sapien
atcgttcccacagctgcaactctaa

SEQ ID NO: 4437660 - DNA, 25 bp, Homo sapien
gatgagcacccgatgtggctgctgt

SEQ ID NO: 4437661 - DNA, 25 bp, Homo sapien
ggatgagcacccgatgtggctgctg

SEQ ID NO: 4437662 - DNA, 25 bp, Homo sapien
ctattggtgttgtttcaggaatctc

SEQ ID NO: 4437663 - DNA, 25 bp, Homo sapien
ctctattggtgttgtttcaggaatc

SEQ ID NO: 4437664 - DNA, 25 bp, Homo sapien
tctattggtgttgtttcaggaatct

SEQ ID NO: 4437665 - DNA, 25 bp, Homo sapien
cataattggcttgccctgaaatgtt

SEQ ID NO: 4437666 - DNA, 25 bp, Homo sapien
aattggcttgccctgaaatgtttta

SEQ ID NO: 4437667 - DNA, 25 bp, Homo sapien
gcaaaaaatgtattgatggctttta

SEQ ID NO: 4437668 - DNA, 25 bp, Homo sapien
taattggcttgccctgaaatgtttt

SEQ ID NO: 4437669 - DNA, 25 bp, Homo sapien
ccgagaactgctggtgaagattata

SEQ ID NO: 4437670 - DNA, 25 bp, Homo sapien
accgagaactgctggtgaagattat

SEQ ID NO: 4437671 - DNA, 25 bp, Homo sapien
cgagaactgctggtgaagattatat

SEQ ID NO: 4437672 - DNA, 25 bp, Homo sapien
tcttgagattgacatcttgtcgtca

SEQ ID NO: 4437673 - DNA, 25 bp, Homo sapien
gacatcttgtcgtcatcttcgacct

SEQ ID NO: 4437674 - DNA, 25 bp, Homo sapien
gattgacatcttgtcgtcatcttcg

SEQ ID NO: 4437675 - DNA, 25 bp, Homo sapien
gtcgtcatcttcgacctctgaaaag

SEQ ID NO: 4437676 - DNA, 25 bp, Homo sapien
aacaacatcagacatcctattctcc

SEQ ID NO: 4437677 - DNA, 25 bp, Homo sapien
ttaacaacatcagacatcctattct

SEQ ID NO: 4437678 - DNA, 25 bp, Homo sapien
tttaacaacatcagacatcctattc

SEQ ID NO: 4437679 - DNA, 25 bp, Homo sapien
taacaacatcagacatcctattctc

SEQ ID NO: 4437680 - DNA, 25 bp, Homo sapien
gaggagaaactggtatagttgtctg

SEQ ID NO: 4437681 - DNA, 25 bp, Homo sapien
tcatctgcaggcactgggcaactaa

SEQ ID NO: 4437682 - DNA, 25 bp, Homo sapien
tgctcatctgcaggcactgggcaac

SEQ ID NO: 4437683 - DNA, 25 bp, Homo sapien
atggctttgtagtacttggaggaga

SEQ ID NO: 4437684 - DNA, 25 bp, Homo sapien
cattgtctttgtttgtcgtgggaga

SEQ ID NO: 4437685 - DNA, 25 bp, Homo sapien
catttggtttctcaagggacttcta

SEQ ID NO: 4437686 - DNA, 25 bp, Homo sapien
ccctgggaatggtatggcctcagaa

SEQ ID NO: 4437687 - DNA, 25 bp, Homo sapien
gtatagccctacgactaaactggca

SEQ ID NO: 4437688 - DNA, 25 bp, Homo sapien
gcccctgaggtgaaatacagtctgc

SEQ ID NO: 4437689 - DNA, 25 bp, Homo sapien
gaaccagtccccaaggatatcctga

SEQ ID NO: 4437690 - DNA, 25 bp, Homo sapien
gaatttgctcatgccaggaaccagt

SEQ ID NO: 4437691 - DNA, 25 bp, Homo sapien
caatggcatgccaatgagacacctg

SEQ ID NO: 4437692 - DNA, 25 bp, Homo sapien
gccaaatactctggcatccaaggat

SEQ ID NO: 4437693 - DNA, 25 bp, Homo sapien
cagaccagtgagtagcactggccaa

SEQ ID NO: 4437694 - DNA, 25 bp, Homo sapien
gcactggccaaatactctggcatcc

SEQ ID NO: 4437695 - DNA, 25 bp, Homo sapien
ctctggcatccaaggataagtccca

SEQ ID NO: 4437696 - DNA, 25 bp, Homo sapien
cagctccatacatttgtgtgtctca

SEQ ID NO: 4437697 - DNA, 25 bp, Homo sapien
tagattatgttagattctccccaaa

SEQ ID NO: 4437698 - DNA, 25 bp, Homo sapien
aaaattcacatcctgtgaaagcccc

SEQ ID NO: 4437699 - DNA, 25 bp, Homo sapien
gaaccacagcttacattgcattaga

SEQ ID NO: 4437700 - DNA, 25 bp, Homo sapien
aatatatgttctgcccccactaatc

SEQ ID NO: 4437701 - DNA, 25 bp, Homo sapien
cacaaaaatatatgttctgccccca

SEQ ID NO: 4437702 - DNA, 25 bp, Homo sapien
tctgcccccactaatctttcttaat

SEQ ID NO: 4437703 - DNA, 25 bp, Homo sapien
tctttcttaatttaataggtcacag

SEQ ID NO: 4437704 - DNA, 25 bp, Homo sapien
gcatctccctgtctaagatccagtg

SEQ ID NO: 4437705 - DNA, 25 bp, Homo sapien
gatgaggtcatcaagcctgtgaacc

SEQ ID NO: 4437706 - DNA, 25 bp, Homo sapien
catctcggcatcacctggagcaaca

SEQ ID NO: 4437707 - DNA, 25 bp, Homo sapien
tcgtgtactacaaggaactggtgct

SEQ ID NO: 4437708 - DNA, 25 bp, Homo sapien
gaccctgtagatcggatggaccacg

SEQ ID NO: 4437709 - DNA, 25 bp, Homo sapien
acagtccctgaagtgagtccccagg

SEQ ID NO: 4437710 - DNA, 25 bp, Homo sapien
catgctgatactcactgggctggat

SEQ ID NO: 4437711 - DNA, 25 bp, Homo sapien
tggagtaccactacagcaaggccat

SEQ ID NO: 4437712 - DNA, 25 bp, Homo sapien
taagagaagacatcacgtattttat

SEQ ID NO: 4437713 - DNA, 25 bp, Homo sapien
cttaagagaagacatcacgtatttt

SEQ ID NO: 4437714 - DNA, 25 bp, Homo sapien
gaagacatcacgtattttatgttcc

SEQ ID NO: 4437715 - DNA, 25 bp, Homo sapien
catcacgtattttatgttcctcctc

SEQ ID NO: 4437716 - DNA, 25 bp, Homo sapien
gggagaagatgctcagcagagtggc

SEQ ID NO: 4437717 - DNA, 25 bp, Homo sapien
ggagaagatgctcagcagagtggcc

SEQ ID NO: 4437718 - DNA, 25 bp, Homo sapien
gagaagatgctcagcagagtggcct

SEQ ID NO: 4437719 - DNA, 25 bp, Homo sapien
tctggtaataactttcaattgcttc

SEQ ID NO: 4437720 - DNA, 25 bp, Homo sapien
ataactttcaattgcttccgaagta

SEQ ID NO: 4437721 - DNA, 25 bp, Homo sapien
caattgcttccgaagtatgatgttt

SEQ ID NO: 4437722 - DNA, 25 bp, Homo sapien
aactttcaattgcttccgaagtatg

SEQ ID NO: 4437723 - DNA, 25 bp, Homo sapien
caattaataggtactatgataccct

SEQ ID NO: 4437724 - DNA, 25 bp, Homo sapien
ttattacaattaataggtactatga

SEQ ID NO: 4437725 - DNA, 25 bp, Homo sapien
taataggtactatgataccctctag

SEQ ID NO: 4437726 - DNA, 25 bp, Homo sapien
aggtactatgataccctctagtggg

SEQ ID NO: 4437727 - DNA, 25 bp, Homo sapien
tactgaggtcaatccatctgaaagg

SEQ ID NO: 4437728 - DNA, 25 bp, Homo sapien
tccaacaaaaggctactgaggtcaa

SEQ ID NO: 4437729 - DNA, 25 bp, Homo sapien
tgaaaggtaacaacatggcctgtcc

SEQ ID NO: 4437730 - DNA, 25 bp, Homo sapien
cttagcacagacaggaacatttgac

SEQ ID NO: 4437731 - DNA, 25 bp, Homo sapien
tggttcacacctataatcccagcac

SEQ ID NO: 4437732 - DNA, 25 bp, Homo sapien
tttgggaggccgaggcaggcggatc

SEQ ID NO: 4437733 - DNA, 25 bp, Homo sapien
tcctggcaagcacggtgaaacctgt

SEQ ID NO: 4437734 - DNA, 25 bp, Homo sapien
atagaacattggaggccaggtgcag

SEQ ID NO: 4437735 - DNA, 25 bp, Homo sapien
gaggaataccctgtacatctttcta

SEQ ID NO: 4437736 - DNA, 25 bp, Homo sapien
tcgatccactaccatataagttaag

SEQ ID NO: 4437737 - DNA, 25 bp, Homo sapien
catatgcaatcgaggaataccctgt

SEQ ID NO: 4437738 - DNA, 25 bp, Homo sapien
catctttctatcatgtaacgtagca

SEQ ID NO: 4437739 - DNA, 25 bp, Homo sapien
gaacagacatgtcatcagtgggtca

SEQ ID NO: 4437740 - DNA, 25 bp, Homo sapien
tcacagggctgcttgacaccttatt

SEQ ID NO: 4437741 - DNA, 25 bp, Homo sapien
ccttattaagaaaacgatggaacag

SEQ ID NO: 4437742 - DNA, 25 bp, Homo sapien
tggaacagacatgtcatcagtgggt

SEQ ID NO: 4437743 - DNA, 25 bp, Homo sapien
agctccatttttcaccactccattc

SEQ ID NO: 4437744 - DNA, 25 bp, Homo sapien
gctccatttttcaccactccattca

SEQ ID NO: 4437745 - DNA, 25 bp, Homo sapien
caggtacttgcatctccctaatttt

SEQ ID NO: 4437746 - DNA, 25 bp, Homo sapien
ctctgaaatagggccatcatgcttc

SEQ ID NO: 4437747 - DNA, 25 bp, Homo sapien
gcttcatgtcagaatttagcatgta

SEQ ID NO: 4437748 - DNA, 25 bp, Homo sapien
cttattagttcaggtacttgcatct

SEQ ID NO: 4437749 - DNA, 25 bp, Homo sapien
gcgagcagtggatactccagtattt

SEQ ID NO: 4437750 - DNA, 25 bp, Homo sapien
caagttgtgcgagcagtggatactc

SEQ ID NO: 4437751 - DNA, 25 bp, Homo sapien
aaattaaaactatcaagttgtgcga

SEQ ID NO: 4437752 - DNA, 25 bp, Homo sapien
aactatcaagttgtgcgagcagtgg

SEQ ID NO: 4437753 - DNA, 25 bp, Homo sapien
gagtttcctcgtgttcctgtagaaa

SEQ ID NO: 4437754 - DNA, 25 bp, Homo sapien
gtggagtttcctcgtgttcctgtag

SEQ ID NO: 4437755 - DNA, 25 bp, Homo sapien
acctctccagtataagccgagccat

SEQ ID NO: 4437756 - DNA, 25 bp, Homo sapien
tggagtttcctcgtgttcctgtaga

SEQ ID NO: 4437757 - DNA, 25 bp, Homo sapien
tgaagagtatttaagttgtgggtgg

SEQ ID NO: 4437758 - DNA, 25 bp, Homo sapien
ctgaagagtatttaagttgtgggtg

SEQ ID NO: 4437759 - DNA, 25 bp, Homo sapien
agagtatttaagttgtgggtggtct

SEQ ID NO: 4437760 - DNA, 25 bp, Homo sapien
gtaggaagaccagtggaattcacct

SEQ ID NO: 4437761 - DNA, 25 bp, Homo sapien
ggaattcacctttgcatttggaagt

SEQ ID NO: 4437762 - DNA, 25 bp, Homo sapien
tagcagtaggtccaaagcaatcaga

SEQ ID NO: 4437763 - DNA, 25 bp, Homo sapien
tgactttgacaaatggcggtgctgc

SEQ ID NO: 4437764 - DNA, 25 bp, Homo sapien
gattaaatcgaaaccataccattct

SEQ ID NO: 4437765 - DNA, 25 bp, Homo sapien
tattttgacaagacctggatagcag

SEQ ID NO: 4437766 - DNA, 25 bp, Homo sapien
ttgccaaaggccagccaggcccatg

SEQ ID NO: 4437767 - DNA, 25 bp, Homo sapien
tcattgccaaaggccagccaggccc

SEQ ID NO: 4437768 - DNA, 25 bp, Homo sapien
gccaaaggccagccaggcccatgct

SEQ ID NO: 4437769 - DNA, 25 bp, Homo sapien
attgccaaaggccagccaggcccat

SEQ ID NO: 4437770 - DNA, 25 bp, Homo sapien
agagccgggaccttctaatgccttt

SEQ ID NO: 4437771 - DNA, 25 bp, Homo sapien
tgacagagccgggaccttctaatgc

SEQ ID NO: 4437772 - DNA, 25 bp, Homo sapien
acagagccgggaccttctaatgcct

SEQ ID NO: 4437773 - DNA, 25 bp, Homo sapien
cttctaatgccttttcgtctgatca

SEQ ID NO: 4437774 - DNA, 25 bp, Homo sapien
cttgtaggacatgatgaatgggcct

SEQ ID NO: 4437775 - DNA, 25 bp, Homo sapien
acagctctgcaaatctccccggctg

SEQ ID NO: 4437776 - DNA, 25 bp, Homo sapien
ccggctgctaaagccctcatttgat

SEQ ID NO: 4437777 - DNA, 25 bp, Homo sapien
gcctttcaaacacccggagacagct

SEQ ID NO: 4437778 - DNA, 25 bp, Homo sapien
cttctagagggaactctctctggcc

SEQ ID NO: 4437779 - DNA, 25 bp, Homo sapien
tcaccacatggtaatggcagacaca

SEQ ID NO: 4437780 - DNA, 25 bp, Homo sapien
catggtaatggcagacacattcttt

SEQ ID NO: 4437781 - DNA, 25 bp, Homo sapien
ctgccactcgagtcaccacatggta

SEQ ID NO: 4437782 - DNA, 25 bp, Homo sapien
aagagatgaactgttagcagatagt

SEQ ID NO: 4437783 - DNA, 25 bp, Homo sapien
tgaactgttagcagatagtcaacat

SEQ ID NO: 4437784 - DNA, 25 bp, Homo sapien
gagatgaactgttagcagatagtca

SEQ ID NO: 4437785 - DNA, 25 bp, Homo sapien
gatgaactgttagcagatagtcaac

SEQ ID NO: 4437786 - DNA, 25 bp, Homo sapien
aagggtcccgtagcatactatttat

SEQ ID NO: 4437787 - DNA, 25 bp, Homo sapien
ggaatctgagaagggtcccgtagca

SEQ ID NO: 4437788 - DNA, 25 bp, Homo sapien
tctgagaagggtcccgtagcatact

SEQ ID NO: 4437789 - DNA, 25 bp, Homo sapien
gaagggtcccgtagcatactattta

SEQ ID NO: 4437790 - DNA, 25 bp, Homo sapien
ggtccgtaacagcagtcgttcacaa

SEQ ID NO: 4437791 - DNA, 25 bp, Homo sapien
tgcttgatgcagtccactagtggtc

SEQ ID NO: 4437792 - DNA, 25 bp, Homo sapien
gtccactagtggtccgtaacagcag

SEQ ID NO: 4437793 - DNA, 25 bp, Homo sapien
gatgcagtccactagtggtccgtaa

SEQ ID NO: 4437794 - DNA, 25 bp, Homo sapien
cactggcaagccaaacaagtaactt

SEQ ID NO: 4437795 - DNA, 25 bp, Homo sapien
gaattcacatttgtcatcaggccaa

SEQ ID NO: 4437796 - DNA, 25 bp, Homo sapien
cagggcatacagttaatgagtggca

SEQ ID NO: 4437797 - DNA, 25 bp, Homo sapien
tagaaggaacctgcacagggcatac

SEQ ID NO: 4437798 - DNA, 25 bp, Homo sapien
taaaatccctcaactcaatttagca

SEQ ID NO: 4437799 - DNA, 25 bp, Homo sapien
ggtagcaaggctcccgctcttaaaa

SEQ ID NO: 4437800 - DNA, 25 bp, Homo sapien
ttgaggccagttgggtaaggtagca

SEQ ID NO: 4437801 - DNA, 25 bp, Homo sapien
agcacttaataggtacagtaaagaa

SEQ ID NO: 4437802 - DNA, 25 bp, Homo sapien
caggggtgtaccacccaccacgcct

SEQ ID NO: 4437803 - DNA, 25 bp, Homo sapien
tacaggggtgtaccacccaccacgc

SEQ ID NO: 4437804 - DNA, 25 bp, Homo sapien
ctacaggggtgtaccacccaccacg

SEQ ID NO: 4437805 - DNA, 25 bp, Homo sapien
gactacaggggtgtaccacccacca

SEQ ID NO: 4437806 - DNA, 25 bp, Homo sapien
ggacctcatgctcatgaccaatggc

SEQ ID NO: 4437807 - DNA, 25 bp, Homo sapien
ctcagcaggacctcatgctcatgac

SEQ ID NO: 4437808 - DNA, 25 bp, Homo sapien
gcaggacctcatgctcatgaccaat

SEQ ID NO: 4437809 - DNA, 25 bp, Homo sapien
cagcaggacctcatgctcatgacca

SEQ ID NO: 4437810 - DNA, 25 bp, Homo sapien
cccagaccacatttttacattgctt

SEQ ID NO: 4437811 - DNA, 25 bp, Homo sapien
gagacccatcaatttcaagttccct

SEQ ID NO: 4437812 - DNA, 25 bp, Homo sapien
cttgtttgcaagtagagatgatccc

SEQ ID NO: 4437813 - DNA, 25 bp, Homo sapien
caagtagagatgatccccagaccac

SEQ ID NO: 4437814 - DNA, 25 bp, Homo sapien
ctgccactgacatctgcgtgtacac

SEQ ID NO: 4437815 - DNA, 25 bp, Homo sapien
ggtattctaaatctcatctgctcct

SEQ ID NO: 4437816 - DNA, 25 bp, Homo sapien
gtacacacagtcttggtattctaaa

SEQ ID NO: 4437817 - DNA, 25 bp, Homo sapien
gccactgacatctgcgtgtacacac

SEQ ID NO: 4437818 - DNA, 25 bp, Homo sapien
gggctggacacagactagctgatca

SEQ ID NO: 4437819 - DNA, 25 bp, Homo sapien
tatggtgagcaaaaccctagcctgt

SEQ ID NO: 4437820 - DNA, 25 bp, Homo sapien
tcatgagtgggcagtaatgtgaccc

SEQ ID NO: 4437821 - DNA, 25 bp, Homo sapien
gctgtcctgtatgttatcctgtccg

SEQ ID NO: 4437822 - DNA, 25 bp, Homo sapien
gcagcatttcgaaacaggtggcctt

SEQ ID NO: 4437823 - DNA, 25 bp, Homo sapien
tagtatgacttccacaaatggttgg

SEQ ID NO: 4437824 - DNA, 25 bp, Homo sapien
tagacaacacctgcctgaaaaggag

SEQ ID NO: 4437825 - DNA, 25 bp, Homo sapien
tgaggtccaccaagaaaaggtttga

SEQ ID NO: 4437826 - DNA, 25 bp, Homo sapien
gacaaggacaatgagatcgccataa

SEQ ID NO: 4437827 - DNA, 25 bp, Homo sapien
taatggcccgaccaagtaacaagga

SEQ ID NO: 4437828 - DNA, 25 bp, Homo sapien
tggtctcttaacacctactgggctg

SEQ ID NO: 4437829 - DNA, 25 bp, Homo sapien
taaacatcacgagttcaagctgtca

SEQ ID NO: 4437830 - DNA, 25 bp, Homo sapien
ccctttgcacgaagctgatcttcat

SEQ ID NO: 4437831 - DNA, 25 bp, Homo sapien
tcataaccctttgcacgaagctgat

SEQ ID NO: 4437832 - DNA, 25 bp, Homo sapien
cataaccctttgcacgaagctgatc

SEQ ID NO: 4437833 - DNA, 25 bp, Homo sapien
taaccctttgcacgaagctgatctt

SEQ ID NO: 4437834 - DNA, 25 bp, Homo sapien
cagtgaattatgtgcccttctacag

SEQ ID NO: 4437835 - DNA, 25 bp, Homo sapien
gctccagaactggtcatgcaggtag

SEQ ID NO: 4437836 - DNA, 25 bp, Homo sapien
taggcgtggtggctacattcatcac

SEQ ID NO: 4437837 - DNA, 25 bp, Homo sapien
tttcaatccagtgaattatgtgccc

SEQ ID NO: 4437838 - DNA, 25 bp, Homo sapien
agtaagggtttcagcttgatggtaa

SEQ ID NO: 4437839 - DNA, 25 bp, Homo sapien
tccaagtaagggtttcagcttgatg

SEQ ID NO: 4437840 - DNA, 25 bp, Homo sapien
atagttccaagtaagggtttcagct

SEQ ID NO: 4437841 - DNA, 25 bp, Homo sapien
agttccaagtaagggtttcagcttg

SEQ ID NO: 4437842 - DNA, 25 bp, Homo sapien
tggaatcaaggtgcaacaaacagga

SEQ ID NO: 4437843 - DNA, 25 bp, Homo sapien
ggaagtcctgggacatttctgccta

SEQ ID NO: 4437844 - DNA, 25 bp, Homo sapien
cagcattgggctgacaaagtgaaac

SEQ ID NO: 4437845 - DNA, 25 bp, Homo sapien
tctgaaagatctccatgaagccctt

SEQ ID NO: 4437846 - DNA, 25 bp, Homo sapien
tgtgaatcaaaaagagtaggccttt

SEQ ID NO: 4437847 - DNA, 25 bp, Homo sapien
taagctccactgttgtatgaatcaa

SEQ ID NO: 4437848 - DNA, 25 bp, Homo sapien
tctaggataagaagacaatacccct

SEQ ID NO: 4437849 - DNA, 25 bp, Homo sapien
tagatgttcctactttacgggtgag

SEQ ID NO: 4437850 - DNA, 25 bp, Homo sapien
tatgtcccctcattgcagaattcct

SEQ ID NO: 4437851 - DNA, 25 bp, Homo sapien
gagcctgcaaggaaagtgggccttt

SEQ ID NO: 4437852 - DNA, 25 bp, Homo sapien
ggctgtgggtatggaccagaggcct

SEQ ID NO: 4437853 - DNA, 25 bp, Homo sapien
tatggagaaaccaggataacagggc

SEQ ID NO: 4437854 - DNA, 25 bp, Homo sapien
tatttagagagataatataacaaac

SEQ ID NO: 4437855 - DNA, 25 bp, Homo sapien
ttttccaaacattgctacttattgt

SEQ ID NO: 4437856 - DNA, 25 bp, Homo sapien
gaaaatgtttcctcgctcctgtaat

SEQ ID NO: 4437857 - DNA, 25 bp, Homo sapien
ttttttaatgcactaactgctgaga

SEQ ID NO: 4437858 - DNA, 25 bp, Homo sapien
gacacttacctttatgaatgaaagt

SEQ ID NO: 4437859 - DNA, 25 bp, Homo sapien
aaatgaaaactctaggccaactgaa

SEQ ID NO: 4437860 - DNA, 25 bp, Homo sapien
ataaatttacttgggaatgacctga

SEQ ID NO: 4437861 - DNA, 25 bp, Homo sapien
aggccaactgaagccgtccaacagc

SEQ ID NO: 4437862 - DNA, 25 bp, Homo sapien
cccacacatcagagactgtaagcac

SEQ ID NO: 4437863 - DNA, 25 bp, Homo sapien
ctggatcaaaacaggtctcctccca

SEQ ID NO: 4437864 - DNA, 25 bp, Homo sapien
gctccttcctgctgtacgttaagta

SEQ ID NO: 4437865 - DNA, 25 bp, Homo sapien
tattgagctatcagcaacgtcaccc

SEQ ID NO: 4437866 - DNA, 25 bp, Homo sapien
tacgttaagtattgagctatcagca

SEQ ID NO: 4437867 - DNA, 25 bp, Homo sapien
agcctcatctactttatcttctgaa

SEQ ID NO: 4437868 - DNA, 25 bp, Homo sapien
gacagatgcagcctcatctacttta

SEQ ID NO: 4437869 - DNA, 25 bp, Homo sapien
aacagatagcgttctttgtcattgg

SEQ ID NO: 4437870 - DNA, 25 bp, Homo sapien
ttcaaaacagatagcgttctttgtc

SEQ ID NO: 4437871 - DNA, 25 bp, Homo sapien
taacttgggatcacttagcagactg

SEQ ID NO: 4437872 - DNA, 25 bp, Homo sapien
gcgtttttagatacataccctcaga

SEQ ID NO: 4437873 - DNA, 25 bp, Homo sapien
catgtttaagctgggaatagtgaca

SEQ ID NO: 4437874 - DNA, 25 bp, Homo sapien
acattgaatcatgcgaaaggcttgc

SEQ ID NO: 4437875 - DNA, 25 bp, Homo sapien
gtctgtacaaaacggcaggatattc

SEQ ID NO: 4437876 - DNA, 25 bp, Homo sapien
catacccacgcataagtctgtacaa

SEQ ID NO: 4437877 - DNA, 25 bp, Homo sapien
ttttattcactataagcatgctttc

SEQ ID NO: 4437878 - DNA, 25 bp, Homo sapien
aacaagttgctttcagggtccagca

SEQ ID NO: 4437879 - DNA, 25 bp, Homo sapien
ttttggacagaaatgtagcatgccc

SEQ ID NO: 4437880 - DNA, 25 bp, Homo sapien
tctacagtttaggtcagggctcaag

SEQ ID NO: 4437881 - DNA, 25 bp, Homo sapien
gaaccacatccactaaatgacaggg

SEQ ID NO: 4437882 - DNA, 25 bp, Homo sapien
ggttattggccacttgtctgccaga

SEQ ID NO: 4437883 - DNA, 25 bp, Homo sapien
taaagacctggtaagtgtggcacac

SEQ ID NO: 4437884 - DNA, 25 bp, Homo sapien
tgaataaaggcatcaacgcttctcc

SEQ ID NO: 4437885 - DNA, 25 bp, Homo sapien
tatctactccagtcctcataggaat

SEQ ID NO: 4437886 - DNA, 25 bp, Homo sapien
cacagaggtgataaagacctggtaa

SEQ ID NO: 4437887 - DNA, 25 bp, Homo sapien
catgtcaaattagccagggccccta

SEQ ID NO: 4437888 - DNA, 25 bp, Homo sapien
tctcccctcctgacaagtcatttag

SEQ ID NO: 4437889 - DNA, 25 bp, Homo sapien
cttattaccactcgaaaagccatca

SEQ ID NO: 4437890 - DNA, 25 bp, Homo sapien
gccagggcccctattgtccttatta

SEQ ID NO: 4437891 - DNA, 25 bp, Homo sapien
gcacccctcgatgtatcttggtggg

SEQ ID NO: 4437892 - DNA, 25 bp, Homo sapien
tctgtgactcctcaattgctcctga

SEQ ID NO: 4437893 - DNA, 25 bp, Homo sapien
tgtccctgagcctactgctggggtc

SEQ ID NO: 4437894 - DNA, 25 bp, Homo sapien
ggtcctgcacccctcgatgtatctt

SEQ ID NO: 4437895 - DNA, 25 bp, Homo sapien
gatgaatgggagaacattatgccaa

SEQ ID NO: 4437896 - DNA, 25 bp, Homo sapien
gagatctgctgtctaccatagtacc

SEQ ID NO: 4437897 - DNA, 25 bp, Homo sapien
tgactggataaagaatacgtagtac

SEQ ID NO: 4437898 - DNA, 25 bp, Homo sapien
gagcagctggtagttgccagggacc

SEQ ID NO: 4437899 - DNA, 25 bp, Homo sapien
cctgactttggtcttgacaatgatt

SEQ ID NO: 4437900 - DNA, 25 bp, Homo sapien
cacaaaaatcaactcgaagtgaatt

SEQ ID NO: 4437901 - DNA, 25 bp, Homo sapien
accatccacaaaaatcaactcgaag

SEQ ID NO: 4437902 - DNA, 25 bp, Homo sapien
ttcctgactttggtcttgacaatga

SEQ ID NO: 4437903 - DNA, 25 bp, Homo sapien
gatggcctgaataacctactgtgca

SEQ ID NO: 4437904 - DNA, 25 bp, Homo sapien
cagtcctaggagtgtaagatggcct

SEQ ID NO: 4437905 - DNA, 25 bp, Homo sapien
tactgtgcacctgaggaagtctact

SEQ ID NO: 4437906 - DNA, 25 bp, Homo sapien
cacacggtcatatgtttgacttgta

SEQ ID NO: 4437907 - DNA, 25 bp, Homo sapien
tggcactggcatagaacaaggattc

SEQ ID NO: 4437908 - DNA, 25 bp, Homo sapien
ccaatacagatttaggaggacacag

SEQ ID NO: 4437909 - DNA, 25 bp, Homo sapien
ttagtttcaagaggccagggagtgt

SEQ ID NO: 4437910 - DNA, 25 bp, Homo sapien
taaatctgtgaggtaagactgccca

SEQ ID NO: 4437911 - DNA, 25 bp, Homo sapien
caattatagcttcatgacttttacc

SEQ ID NO: 4437912 - DNA, 25 bp, Homo sapien
tgttttcaattatagcttcatgact

SEQ ID NO: 4437913 - DNA, 25 bp, Homo sapien
attcctcaagtgcaaatactttctt

SEQ ID NO: 4437914 - DNA, 25 bp, Homo sapien
ttcaattatagcttcatgactttta

SEQ ID NO: 4437915 - DNA, 25 bp, Homo sapien
taacaaacgtagatcaatcacccac

SEQ ID NO: 4437916 - DNA, 25 bp, Homo sapien
tttaccaccacgatttccacaggga

SEQ ID NO: 4437917 - DNA, 25 bp, Homo sapien
ggacacatatggcaatttaccacca

SEQ ID NO: 4437918 - DNA, 25 bp, Homo sapien
cctttaggcttatttatggaccaag

SEQ ID NO: 4437919 - DNA, 25 bp, Homo sapien
tttcccggttgcagtccagctcctg

SEQ ID NO: 4437920 - DNA, 25 bp, Homo sapien
tggcataaggtgacaatgttcgtgg

SEQ ID NO: 4437921 - DNA, 25 bp, Homo sapien
ggataaatccataccaatagatgac

SEQ ID NO: 4437922 - DNA, 25 bp, Homo sapien
acaggctttgagcaggatgcccctt

SEQ ID NO: 4437923 - DNA, 25 bp, Homo sapien
cccagcttctcttccaggatcttca

SEQ ID NO: 4437924 - DNA, 25 bp, Homo sapien
agcttctcttccaggatcttcaggg

SEQ ID NO: 4437925 - DNA, 25 bp, Homo sapien
cttttcctcccagcttctcttccag

SEQ ID NO: 4437926 - DNA, 25 bp, Homo sapien
ctcccagcttctcttccaggatctt

SEQ ID NO: 4437927 - DNA, 25 bp, Homo sapien
ggcagatgttgccaggatcttacag

SEQ ID NO: 4437928 - DNA, 25 bp, Homo sapien
tgtagttcttggctgttcacatcag

SEQ ID NO: 4437929 - DNA, 25 bp, Homo sapien
actgggaggagaattgaaaaatcac

SEQ ID NO: 4437930 - DNA, 25 bp, Homo sapien
caaggataaaccatccggaagaaag

SEQ ID NO: 4437931 - DNA, 25 bp, Homo sapien
tgatttaatgcaccccactcagagt

SEQ ID NO: 4437932 - DNA, 25 bp, Homo sapien
cacgatggtaatgcaatgctgggtc

SEQ ID NO: 4437933 - DNA, 25 bp, Homo sapien
ctgcaggtgagtacaaaggtggctt

SEQ ID NO: 4437934 - DNA, 25 bp, Homo sapien
caatgttgggttgtcgcctctcggc

SEQ ID NO: 4437935 - DNA, 25 bp, Homo sapien
tgggacctagcctcgaagaccaatt

SEQ ID NO: 4437936 - DNA, 25 bp, Homo sapien
tattagctgaccagatgatcagtag

SEQ ID NO: 4437937 - DNA, 25 bp, Homo sapien
actagtcatggatttttctgggacc

SEQ ID NO: 4437938 - DNA, 25 bp, Homo sapien
caggtaacttcctaatgggtattgg

SEQ ID NO: 4437939 - DNA, 25 bp, Homo sapien
aatcagtgaacgttggtggagtgaa

SEQ ID NO: 4437940 - DNA, 25 bp, Homo sapien
tagttaatcagtgaacgttggtgga

SEQ ID NO: 4437941 - DNA, 25 bp, Homo sapien
agttaatcagtgaacgttggtggag

SEQ ID NO: 4437942 - DNA, 25 bp, Homo sapien
ttaatcagtgaacgttggtggagtg

SEQ ID NO: 4437943 - DNA, 25 bp, Homo sapien
gcaatgtcgcaaacttttgctgcta

SEQ ID NO: 4437944 - DNA, 25 bp, Homo sapien
attctgaggtttcttagggtgagaa

SEQ ID NO: 4437945 - DNA, 25 bp, Homo sapien
tgtgcatggggcaatgtcgcaaact

SEQ ID NO: 4437946 - DNA, 25 bp, Homo sapien
tgtagcaacggggaccctgggctta

SEQ ID NO: 4437947 - DNA, 25 bp, Homo sapien
tgctgtcaagagttgggcacatgtg

SEQ ID NO: 4437948 - DNA, 25 bp, Homo sapien
actcagatgtctcctcaaaatatag

SEQ ID NO: 4437949 - DNA, 25 bp, Homo sapien
ggcttcttccctattgagagctaac

SEQ ID NO: 4437950 - DNA, 25 bp, Homo sapien
cagatgtctcctcaaaatatagcag

SEQ ID NO: 4437951 - DNA, 25 bp, Homo sapien
gagcatggcttcttccctattgaga

SEQ ID NO: 4437952 - DNA, 25 bp, Homo sapien
taggagtggtaccactctgactctc

SEQ ID NO: 4437953 - DNA, 25 bp, Homo sapien
ccatgcaaattgaggtgttagaatc

SEQ ID NO: 4437954 - DNA, 25 bp, Homo sapien
gaaatgtgctttctactgctaatga

SEQ ID NO: 4437955 - DNA, 25 bp, Homo sapien
tttgggaaaacacgacctagtgaca

SEQ ID NO: 4437956 - DNA, 25 bp, Homo sapien
accagaagggtgagtgcgtgtagtc

SEQ ID NO: 4437957 - DNA, 25 bp, Homo sapien
cagtctcctgagatgcttgttgaac

SEQ ID NO: 4437958 - DNA, 25 bp, Homo sapien
tcctgagatgcttgttgaactgctg

SEQ ID NO: 4437959 - DNA, 25 bp, Homo sapien
tgagtgcgtgtagtcagtctcctga

SEQ ID NO: 4437960 - DNA, 25 bp, Homo sapien
cataggaagtcccagtgatgtaagc

SEQ ID NO: 4437961 - DNA, 25 bp, Homo sapien
tcccagtgatgtaagcagtagacat

SEQ ID NO: 4437962 - DNA, 25 bp, Homo sapien
gtaagcagtagacatctcttggatg

SEQ ID NO: 4437963 - DNA, 25 bp, Homo sapien
catagaataggcataggaagtccca

SEQ ID NO: 4437964 - DNA, 25 bp, Homo sapien
gattacacaaattgaccatattgcc

SEQ ID NO: 4437965 - DNA, 25 bp, Homo sapien
ggtctttgcattggctgattacaca

SEQ ID NO: 4437966 - DNA, 25 bp, Homo sapien
ccttcggcgttgactggtctttgca

SEQ ID NO: 4437967 - DNA, 25 bp, Homo sapien
taaattgggcataataagcttccca

SEQ ID NO: 4437968 - DNA, 25 bp, Homo sapien
aggcaacaacactgagactcctcct

SEQ ID NO: 4437969 - DNA, 25 bp, Homo sapien
catcaatggtacatggtggttgcag

SEQ ID NO: 4437970 - DNA, 25 bp, Homo sapien
gagtctgcttcatgctcaggcaaca

SEQ ID NO: 4437971 - DNA, 25 bp, Homo sapien
tcatggcttccagcgctctacatgt

SEQ ID NO: 4437972 - DNA, 25 bp, Homo sapien
cacttaggaacttagagggactcgg

SEQ ID NO: 4437973 - DNA, 25 bp, Homo sapien
tctgaagggtcacctccaagttggg

SEQ ID NO: 4437974 - DNA, 25 bp, Homo sapien
catcctgttcggaatggaccttgga

SEQ ID NO: 4437975 - DNA, 25 bp, Homo sapien
taaaccatctggtggccagctacac

SEQ ID NO: 4437976 - DNA, 25 bp, Homo sapien
cttccgatcttgattcgttttttga

SEQ ID NO: 4437977 - DNA, 25 bp, Homo sapien
gatgccatcggcatctctaaggtta

SEQ ID NO: 4437978 - DNA, 25 bp, Homo sapien
gatcttgattcgttttttgatgcca

SEQ ID NO: 4437979 - DNA, 25 bp, Homo sapien
ggcatctctaaggttacaatttggt

SEQ ID NO: 4437980 - DNA, 25 bp, Homo sapien
cctgtgagcaggatctttaagatga

SEQ ID NO: 4437981 - DNA, 25 bp, Homo sapien
tagttgaatcggtgactaaatcagc

SEQ ID NO: 4437982 - DNA, 25 bp, Homo sapien
caaacttacagaatgtagccacagc

SEQ ID NO: 4437983 - DNA, 25 bp, Homo sapien
gatacatcgtgaacacattgaagga

SEQ ID NO: 4437984 - DNA, 25 bp, Homo sapien
ctttagggacagacaaatgatcagc

SEQ ID NO: 4437985 - DNA, 25 bp, Homo sapien
gtataattaatagaagcaccagttt

SEQ ID NO: 4437986 - DNA, 25 bp, Homo sapien
cagctgagtggtataattaatagaa

SEQ ID NO: 4437987 - DNA, 25 bp, Homo sapien
ggacagacaaatgatcagctgagtg

SEQ ID NO: 4437988 - DNA, 25 bp, Homo sapien
tactgcctcatcaccggcttctttt

SEQ ID NO: 4437989 - DNA, 25 bp, Homo sapien
gggtttgagatttaacgagctcaaa

SEQ ID NO: 4437990 - DNA, 25 bp, Homo sapien
tgtagtgctttggaaaagacgctgg

SEQ ID NO: 4437991 - DNA, 25 bp, Homo sapien
cttcttttcctcctcgtgattatac

SEQ ID NO: 4437992 - DNA, 25 bp, Homo sapien
ggtgtgagactgctactatttgaga

SEQ ID NO: 4437993 - DNA, 25 bp, Homo sapien
tatagtgtttcacgtccaatgcaag

SEQ ID NO: 4437994 - DNA, 25 bp, Homo sapien
ctactatttgagagaattttggttc

SEQ ID NO: 4437995 - DNA, 25 bp, Homo sapien
ccaatgcaaggtgtgagactgctac

SEQ ID NO: 4437996 - DNA, 25 bp, Homo sapien
caagttctccattagctagcaggcc

SEQ ID NO: 4437997 - DNA, 25 bp, Homo sapien
gcagctgtcaaaggagggaccttcc

SEQ ID NO: 4437998 - DNA, 25 bp, Homo sapien
ctcagttagaaagtccggtgtccgg

SEQ ID NO: 4437999 - DNA, 25 bp, Homo sapien
gagcctggacctccgctacaagttg

SEQ ID NO: 4438000 - DNA, 25 bp, Homo sapien
tctgtagatcccaatgttggcggac

SEQ ID NO: 4438001 - DNA, 25 bp, Homo sapien
gatcacgccgttatgttgcctcaaa

SEQ ID NO: 4438002 - DNA, 25 bp, Homo sapien
gacaggttatggacattcatgccca

SEQ ID NO: 4438003 - DNA, 25 bp, Homo sapien
cagcacgtgttcctcactagaagaa

SEQ ID NO: 4438004 - DNA, 25 bp, Homo sapien
tagcctatttactgtggccccaatg

SEQ ID NO: 4438005 - DNA, 25 bp, Homo sapien
aaaaggccaactgacaagcctgcgt

SEQ ID NO: 4438006 - DNA, 25 bp, Homo sapien
tgttttaagcaggtgggactgcctt

SEQ ID NO: 4438007 - DNA, 25 bp, Homo sapien
gtggccccaatgtgcacaaacacag

SEQ ID NO: 4438008 - DNA, 25 bp, Homo sapien
ggtgggtttaacatttgcctgctgc

SEQ ID NO: 4438009 - DNA, 25 bp, Homo sapien
tggtgggtttaacatttgcctgctg

SEQ ID NO: 4438010 - DNA, 25 bp, Homo sapien
catggtgggtttaacatttgcctgc

SEQ ID NO: 4438011 - DNA, 25 bp, Homo sapien
atggtgggtttaacatttgcctgct

SEQ ID NO: 4438012 - DNA, 25 bp, Homo sapien
atatagtccagagggtcagcccatg

SEQ ID NO: 4438013 - DNA, 25 bp, Homo sapien
cctgcaggtaggttggctcatcccg

SEQ ID NO: 4438014 - DNA, 25 bp, Homo sapien
tgtcctcgaatgaccacaatcaggt

SEQ ID NO: 4438015 - DNA, 25 bp, Homo sapien
tgagccaaggagcagcatatagtcc

SEQ ID NO: 4438016 - DNA, 25 bp, Homo sapien
acagtagggaagcagggccttttca

SEQ ID NO: 4438017 - DNA, 25 bp, Homo sapien
tgcctccaaaaggagttggttacca

SEQ ID NO: 4438018 - DNA, 25 bp, Homo sapien
cggtcactgagctacctacgccttt

SEQ ID NO: 4438019 - DNA, 25 bp, Homo sapien
caggtaactccatggaggcctgcac

SEQ ID NO: 4438020 - DNA, 25 bp, Homo sapien
tgagagatagcctctgttaacagtc

SEQ ID NO: 4438021 - DNA, 25 bp, Homo sapien
gatagcctctgttaacagtcttcac

SEQ ID NO: 4438022 - DNA, 25 bp, Homo sapien
taccattctcctatccatgcctgag

SEQ ID NO: 4438023 - DNA, 25 bp, Homo sapien
cctatccatgcctgagagatagcct

SEQ ID NO: 4438024 - DNA, 25 bp, Homo sapien
gcaccttccctccaagtggctttag

SEQ ID NO: 4438025 - DNA, 25 bp, Homo sapien
tccaaacacttctggcatgccaatc

SEQ ID NO: 4438026 - DNA, 25 bp, Homo sapien
gaatagagacttgagaaccatttgt

SEQ ID NO: 4438027 - DNA, 25 bp, Homo sapien
catgccaatctggtcttctgaagta

SEQ ID NO: 4438028 - DNA, 25 bp, Homo sapien
cacttttgtgtgcacctaaaatgta

SEQ ID NO: 4438029 - DNA, 25 bp, Homo sapien
tgtggtctttgcaggactgttgtcc

SEQ ID NO: 4438030 - DNA, 25 bp, Homo sapien
ccacccaaggagaggttacccatga

SEQ ID NO: 4438031 - DNA, 25 bp, Homo sapien
gaggttacccatgaaaatggaacca

SEQ ID NO: 4438032 - DNA, 25 bp, Homo sapien
taaataattgagaagataactctgt

SEQ ID NO: 4438033 - DNA, 25 bp, Homo sapien
ttgagaagataactctgtagggaaa

SEQ ID NO: 4438034 - DNA, 25 bp, Homo sapien
gccattatgtgaaagtgttgcaagt

SEQ ID NO: 4438035 - DNA, 25 bp, Homo sapien
ccttcctttattgtacagtttgctt

SEQ ID NO: 4438036 - DNA, 25 bp, Homo sapien
tgtcgcctcattgcaaggcccctga

SEQ ID NO: 4438037 - DNA, 25 bp, Homo sapien
cattgactttatgtggcttgcccat

SEQ ID NO: 4438038 - DNA, 25 bp, Homo sapien
caaggtggcaatctccaaatgcttt

SEQ ID NO: 4438039 - DNA, 25 bp, Homo sapien
tctccaaatgctttgatgtcgcctc

SEQ ID NO: 4438040 - DNA, 25 bp, Homo sapien
caagtcttctgattaggaattttca

SEQ ID NO: 4438041 - DNA, 25 bp, Homo sapien
gggtgagtagcaagtcttctgatta

SEQ ID NO: 4438042 - DNA, 25 bp, Homo sapien
tgagtagcaagtcttctgattagga

SEQ ID NO: 4438043 - DNA, 25 bp, Homo sapien
gtagcaagtcttctgattaggaatt

SEQ ID NO: 4438044 - DNA, 25 bp, Homo sapien
cgtgataccaccattcataaatggg

SEQ ID NO: 4438045 - DNA, 25 bp, Homo sapien
atgggaatgggccaacccctgctgg

SEQ ID NO: 4438046 - DNA, 25 bp, Homo sapien
cactgagcagctgacgattctcctt

SEQ ID NO: 4438047 - DNA, 25 bp, Homo sapien
cctgctggcataatgatcagtggga

SEQ ID NO: 4438048 - DNA, 25 bp, Homo sapien
ctatctgactgggaaatagcggata

SEQ ID NO: 4438049 - DNA, 25 bp, Homo sapien
ttaagatagcttgtgatccggttgc

SEQ ID NO: 4438050 - DNA, 25 bp, Homo sapien
gataaagagtctgttgggtttaaga

SEQ ID NO: 4438051 - DNA, 25 bp, Homo sapien
tgatccggttgctgttggttcccag

SEQ ID NO: 4438052 - DNA, 25 bp, Homo sapien
ggtcactagcgtatcaggctccaca

SEQ ID NO: 4438053 - DNA, 25 bp, Homo sapien
cactttggatcaggagaagacagac

SEQ ID NO: 4438054 - DNA, 25 bp, Homo sapien
tcaacaatgccaagaggtcactagc

SEQ ID NO: 4438055 - DNA, 25 bp, Homo sapien
aagacagaccgacagtgaggcagaa

SEQ ID NO: 4438056 - DNA, 25 bp, Homo sapien
gccatttgttaaacgcatagctgcc

SEQ ID NO: 4438057 - DNA, 25 bp, Homo sapien
catttgaatctcaagtcagatttgc

SEQ ID NO: 4438058 - DNA, 25 bp, Homo sapien
tgccaggtgctagattcattgtcag

SEQ ID NO: 4438059 - DNA, 25 bp, Homo sapien
cggccatttgttaaacgcatagctg

SEQ ID NO: 4438060 - DNA, 25 bp, Homo sapien
cagtaaccaaagcttagctgcagtc

SEQ ID NO: 4438061 - DNA, 25 bp, Homo sapien
cttttcatgcctagtgctgtacaga

SEQ ID NO: 4438062 - DNA, 25 bp, Homo sapien
gtgatgtgcctacctacagaagcag

SEQ ID NO: 4438063 - DNA, 25 bp, Homo sapien
gtgcctacctacagaagcagaaaat

SEQ ID NO: 4438064 - DNA, 25 bp, Homo sapien
taggatcacaatgagagacatgctt

SEQ ID NO: 4438065 - DNA, 25 bp, Homo sapien
aggatcacaatgagagacatgcttg

SEQ ID NO: 4438066 - DNA, 25 bp, Homo sapien
ctaggatcacaatgagagacatgct

SEQ ID NO: 4438067 - DNA, 25 bp, Homo sapien
cttttaggtttatcaggctcgctgc

SEQ ID NO: 4438068 - DNA, 25 bp, Homo sapien
aaagtatttgcacggatttcaggcc

SEQ ID NO: 4438069 - DNA, 25 bp, Homo sapien
tatctgtgggatacaggcaggcaga

SEQ ID NO: 4438070 - DNA, 25 bp, Homo sapien
gcctgatgagctacccgagggtcaa

SEQ ID NO: 4438071 - DNA, 25 bp, Homo sapien
tctgtgtttctacctcgaggtgtga

SEQ ID NO: 4438072 - DNA, 25 bp, Homo sapien
cctattgaaagtagtcactccgcgg

SEQ ID NO: 4438073 - DNA, 25 bp, Homo sapien
tttgagcggtgatgtagatacaggc

SEQ ID NO: 4438074 - DNA, 25 bp, Homo sapien
ggtttttgcacagtcctcatacgga

SEQ ID NO: 4438075 - DNA, 25 bp, Homo sapien
gtttttgaagcagtgaaggggtcat

SEQ ID NO: 4438076 - DNA, 25 bp, Homo sapien
tgaagaccattagtggtttttgaag

SEQ ID NO: 4438077 - DNA, 25 bp, Homo sapien
tttttcttgcccgtgctgaagacca

SEQ ID NO: 4438078 - DNA, 25 bp, Homo sapien
gcccgtgctgaagaccattagtggt

SEQ ID NO: 4438079 - DNA, 25 bp, Homo sapien
attacattgtttggacgaatcagag

SEQ ID NO: 4438080 - DNA, 25 bp, Homo sapien
atttgtcatggtggcagagtgcagc

SEQ ID NO: 4438081 - DNA, 25 bp, Homo sapien
cagagtgttaggaggagtatttgtc

SEQ ID NO: 4438082 - DNA, 25 bp, Homo sapien
cattcattatctccattaccaaaag

SEQ ID NO: 4438083 - DNA, 25 bp, Homo sapien
tcgcctcttaactttaatcgcctct

SEQ ID NO: 4438084 - DNA, 25 bp, Homo sapien
actttaatcgcctctccacctcttc

SEQ ID NO: 4438085 - DNA, 25 bp, Homo sapien
ctcttcccaggcctcgcctcttaac

SEQ ID NO: 4438086 - DNA, 25 bp, Homo sapien
ccaggcctcgcctcttaactttaat

SEQ ID NO: 4438087 - DNA, 25 bp, Homo sapien
tgtacaaaaataactgcttccaggc

SEQ ID NO: 4438088 - DNA, 25 bp, Homo sapien
tgcagattcaacaaagtgtggattc

SEQ ID NO: 4438089 - DNA, 25 bp, Homo sapien
gtgtggattcacttactcattgaat

SEQ ID NO: 4438090 - DNA, 25 bp, Homo sapien
cacttactcattgaatcaatacatt

SEQ ID NO: 4438091 - DNA, 25 bp, Homo sapien
tggtgagggcatgcgttaatgaaca

SEQ ID NO: 4438092 - DNA, 25 bp, Homo sapien
acatcatggtgagggcatgcgttaa

SEQ ID NO: 4438093 - DNA, 25 bp, Homo sapien
aacatcatggtgagggcatgcgtta

SEQ ID NO: 4438094 - DNA, 25 bp, Homo sapien
tcatggtgagggcatgcgttaatga

SEQ ID NO: 4438095 - DNA, 25 bp, Homo sapien
taaacatatggcaatgaatcaagcc

SEQ ID NO: 4438096 - DNA, 25 bp, Homo sapien
gccacaaaactgcatcaatgagtag

SEQ ID NO: 4438097 - DNA, 25 bp, Homo sapien
tctttattcacatagggatctatgg

SEQ ID NO: 4438098 - DNA, 25 bp, Homo sapien
caatgagtagatccctctgtcagga

SEQ ID NO: 4438099 - DNA, 25 bp, Homo sapien
tgagtgccgtcatcagccattgaaa

SEQ ID NO: 4438100 - DNA, 25 bp, Homo sapien
ctagtgacagttggagacgataatt

SEQ ID NO: 4438101 - DNA, 25 bp, Homo sapien
ggatggtccaggaaacctgcctgag

SEQ ID NO: 4438102 - DNA, 25 bp, Homo sapien
gttaccaaacttgagaggacttctg

SEQ ID NO: 4438103 - DNA, 25 bp, Homo sapien
gagcagttggaatgaacctggcagc

SEQ ID NO: 4438104 - DNA, 25 bp, Homo sapien
gctgttgggccctgcgtttcaccat

SEQ ID NO: 4438105 - DNA, 25 bp, Homo sapien
ctggcagcacctaagaccagggcct

SEQ ID NO: 4438106 - DNA, 25 bp, Homo sapien
gaaagccagtgcttgctcctgtggt

SEQ ID NO: 4438107 - DNA, 25 bp, Homo sapien
tattttaataaagaaccatgttggc

SEQ ID NO: 4438108 - DNA, 25 bp, Homo sapien
gtgtggtaacacactgggaacactg

SEQ ID NO: 4438109 - DNA, 25 bp, Homo sapien
gagacaggcaagatattagacaggc

SEQ ID NO: 4438110 - DNA, 25 bp, Homo sapien
ttggaggtgcaacatctctgtttga

SEQ ID NO: 4438111 - DNA, 25 bp, Homo sapien
gaggatctcttgagttcaggatttc

SEQ ID NO: 4438112 - DNA, 25 bp, Homo sapien
aggatctcttgagttcaggatttca

SEQ ID NO: 4438113 - DNA, 25 bp, Homo sapien
gggaggatctcttgagttcaggatt

SEQ ID NO: 4438114 - DNA, 25 bp, Homo sapien
gtgggaggatctcttgagttcagga

SEQ ID NO: 4438115 - DNA, 25 bp, Homo sapien
aagagttttttgaagtagacatgac

SEQ ID NO: 4438116 - DNA, 25 bp, Homo sapien
tctctttccttcgtttaatgaaatg

SEQ ID NO: 4438117 - DNA, 25 bp, Homo sapien
acaggcaaaggattagtgtccctaa

SEQ ID NO: 4438118 - DNA, 25 bp, Homo sapien
aattttaaaggcatcacttcaagtc

SEQ ID NO: 4438119 - DNA, 25 bp, Homo sapien
gaaaagtatattcccatgactcagg

SEQ ID NO: 4438120 - DNA, 25 bp, Homo sapien
caggcagctcatgagttgctatact

SEQ ID NO: 4438121 - DNA, 25 bp, Homo sapien
ggtgtgatcccatcgtacgctgaca

SEQ ID NO: 4438122 - DNA, 25 bp, Homo sapien
tccctgtagatttggtgacacattg

SEQ ID NO: 4438123 - DNA, 25 bp, Homo sapien
cagtaaagaatagaggacataagtc

SEQ ID NO: 4438124 - DNA, 25 bp, Homo sapien
taatgtcgtgttggatcctagaagc

SEQ ID NO: 4438125 - DNA, 25 bp, Homo sapien
gacataagtcaattctgtgtgccat

SEQ ID NO: 4438126 - DNA, 25 bp, Homo sapien
tgtagcttctgcctttatcaaagtt

SEQ ID NO: 4438127 - DNA, 25 bp, Homo sapien
cttttgcaatgtttccaattaactg

SEQ ID NO: 4438128 - DNA, 25 bp, Homo sapien
tggacatgctgtcctaagcattcct

SEQ ID NO: 4438129 - DNA, 25 bp, Homo sapien
atttattttcccgtggacatgctgt

SEQ ID NO: 4438130 - DNA, 25 bp, Homo sapien
caattaactgtaagcttgagtgttc

SEQ ID NO: 4438131 - DNA, 25 bp, Homo sapien
gagcaccctctagaaagtagcaggt

SEQ ID NO: 4438132 - DNA, 25 bp, Homo sapien
tatgagagcaacttcggatactgca

SEQ ID NO: 4438133 - DNA, 25 bp, Homo sapien
gagctcacaaatccataaacgttgc

SEQ ID NO: 4438134 - DNA, 25 bp, Homo sapien
gatctaagaccctaaacagcatata

SEQ ID NO: 4438135 - DNA, 25 bp, Homo sapien
gtgaccctttgaaaagaagcaccat

SEQ ID NO: 4438136 - DNA, 25 bp, Homo sapien
cggtacatgtgaccctttgaaaaga

SEQ ID NO: 4438137 - DNA, 25 bp, Homo sapien
cattgatccccggtacatgtgaccc

SEQ ID NO: 4438138 - DNA, 25 bp, Homo sapien
gatccccggtacatgtgaccctttg

SEQ ID NO: 4438139 - DNA, 25 bp, Homo sapien
gctcaagttctaggacaatgtcgat

SEQ ID NO: 4438140 - DNA, 25 bp, Homo sapien
taaagacaatggcttttgatactcc

SEQ ID NO: 4438141 - DNA, 25 bp, Homo sapien
ccattttcccatgcgtaagtgttct

SEQ ID NO: 4438142 - DNA, 25 bp, Homo sapien
tgttcttataaccttcctttgctca

SEQ ID NO: 4438143 - DNA, 25 bp, Homo sapien
tgcttttccaaggtgcagattatca

SEQ ID NO: 4438144 - DNA, 25 bp, Homo sapien
caaggtgcagattatcacttcttcg

SEQ ID NO: 4438145 - DNA, 25 bp, Homo sapien
cgattatctggcattagtatgtcca

SEQ ID NO: 4438146 - DNA, 25 bp, Homo sapien
ttcacactgcgttgtaattatttga

SEQ ID NO: 4438147 - DNA, 25 bp, Homo sapien
gccgttcaatgcagaagccatgtta

SEQ ID NO: 4438148 - DNA, 25 bp, Homo sapien
catttacgggaaagctctggtggcg

SEQ ID NO: 4438149 - DNA, 25 bp, Homo sapien
tgtcaggtacgagtcagccgttcaa

SEQ ID NO: 4438150 - DNA, 25 bp, Homo sapien
catgatcccattagcataagagtgg

SEQ ID NO: 4438151 - DNA, 25 bp, Homo sapien
tagagtagtaattaaacttgaatac

SEQ ID NO: 4438152 - DNA, 25 bp, Homo sapien
gataaacaataaaccagccacgttc

SEQ ID NO: 4438153 - DNA, 25 bp, Homo sapien
taactgagtcatgtaaagggatgtc

SEQ ID NO: 4438154 - DNA, 25 bp, Homo sapien
cctgatgccagttagagtttaattt

SEQ ID NO: 4438155 - DNA, 25 bp, Homo sapien
cacacgcacgttaaccatactgttg

SEQ ID NO: 4438156 - DNA, 25 bp, Homo sapien
actgtgaataggcaggattcccaga

SEQ ID NO: 4438157 - DNA, 25 bp, Homo sapien
taccgagacagttggcccagtaact

SEQ ID NO: 4438158 - DNA, 25 bp, Homo sapien
gcacgttaaccatactgttgccaga

SEQ ID NO: 4438159 - DNA, 25 bp, Homo sapien
cctggtttgaacaatggtatgggtt

SEQ ID NO: 4438160 - DNA, 25 bp, Homo sapien
cattttttccagtgctgtaattgag

SEQ ID NO: 4438161 - DNA, 25 bp, Homo sapien
ggttcagccgcaatgaataaaaagg

SEQ ID NO: 4438162 - DNA, 25 bp, Homo sapien
caaattggagaatattgatgagcct

SEQ ID NO: 4438163 - DNA, 25 bp, Homo sapien
ccccttgttcctagagcactttgag

SEQ ID NO: 4438164 - DNA, 25 bp, Homo sapien
taacgactaggaagcagccccttgt

SEQ ID NO: 4438165 - DNA, 25 bp, Homo sapien
gtattttgccagagtaacgactagg

SEQ ID NO: 4438166 - DNA, 25 bp, Homo sapien
gaagcagccccttgttcctagagca

SEQ ID NO: 4438167 - DNA, 25 bp, Homo sapien
gaggacagtttaacagctcgagctg

SEQ ID NO: 4438168 - DNA, 25 bp, Homo sapien
tcagacggcaaattatggaagaact

SEQ ID NO: 4438169 - DNA, 25 bp, Homo sapien
cagcgatgaatcatatcagacggca

SEQ ID NO: 4438170 - DNA, 25 bp, Homo sapien
catagggtcaatggatctgcaagca

SEQ ID NO: 4438171 - DNA, 25 bp, Homo sapien
gctttcgcctcgctccagcttttac

SEQ ID NO: 4438172 - DNA, 25 bp, Homo sapien
acgctttcgcctcgctccagctttt

SEQ ID NO: 4438173 - DNA, 25 bp, Homo sapien
tcgctccagcttttaccccagcagc

SEQ ID NO: 4438174 - DNA, 25 bp, Homo sapien
agcttttaccccagcagcgcgattc

SEQ ID NO: 4438175 - DNA, 25 bp, Homo sapien
cctaagaggggcctgtcccgatgcc

SEQ ID NO: 4438176 - DNA, 25 bp, Homo sapien
aagaggggcctgtcccgatgcctcc

SEQ ID NO: 4438177 - DNA, 25 bp, Homo sapien
ggggcctgtcccgatgcctcctctc

SEQ ID NO: 4438178 - DNA, 25 bp, Homo sapien
aggggcctgtcccgatgcctcctct

SEQ ID NO: 4438179 - DNA, 25 bp, Homo sapien
ttcggttacatgtgggctgctgacg

SEQ ID NO: 4438180 - DNA, 25 bp, Homo sapien
tcattcactaccttgacattccggg

SEQ ID NO: 4438181 - DNA, 25 bp, Homo sapien
cgggccgctcgtaaccttcagttcg

SEQ ID NO: 4438182 - DNA, 25 bp, Homo sapien
gccatgaaacacgacagttcggtta

SEQ ID NO: 4438183 - DNA, 25 bp, Homo sapien
ttccgtcatttcgttctcccgccgc

SEQ ID NO: 4438184 - DNA, 25 bp, Homo sapien
tgtgtctccgccgtacgacgggcta

SEQ ID NO: 4438185 - DNA, 25 bp, Homo sapien
gtacgacgggctatggccaccacga

SEQ ID NO: 4438186 - DNA, 25 bp, Homo sapien
tcgttgcatatcagaggctcggcgc

SEQ ID NO: 4438187 - DNA, 25 bp, Homo sapien
cagtggtaccgtctgcagagcttgc

SEQ ID NO: 4438188 - DNA, 25 bp, Homo sapien
ggatctgcgcagaaaagaaagtgcc

SEQ ID NO: 4438189 - DNA, 25 bp, Homo sapien
aaaaaatgagtattgacaaggttgc

SEQ ID NO: 4438190 - DNA, 25 bp, Homo sapien
ttggacgttagcaggaagccttcgg

SEQ ID NO: 4438191 - DNA, 25 bp, Homo sapien
gcccctgtgtaattaacacagccat

SEQ ID NO: 4438192 - DNA, 25 bp, Homo sapien
cacagccattagcaggcgttaccgc

SEQ ID NO: 4438193 - DNA, 25 bp, Homo sapien
attagcaggcgttaccgcggcccgc

SEQ ID NO: 4438194 - DNA, 25 bp, Homo sapien
gcgaaatcgcccctgtgtaattaac

SEQ ID NO: 4438195 - DNA, 25 bp, Homo sapien
aggtgaagcctggtgcagctcgggc

SEQ ID NO: 4438196 - DNA, 25 bp, Homo sapien
cagggcaccggccacaactagtttc

SEQ ID NO: 4438197 - DNA, 25 bp, Homo sapien
aaagttctttcggagctggccccat

SEQ ID NO: 4438198 - DNA, 25 bp, Homo sapien
ccaactccgggctcgtagtgattga

SEQ ID NO: 4438199 - DNA, 25 bp, Homo sapien
cggccgcgccacaaggggccgaggg

SEQ ID NO: 4438200 - DNA, 25 bp, Homo sapien
agaggacgcgcttccagcgcctgtc

SEQ ID NO: 4438201 - DNA, 25 bp, Homo sapien
ggcggcaaggcttgcgcggggtgac

SEQ ID NO: 4438202 - DNA, 25 bp, Homo sapien
ctgggagggcgagagcgagaagttg

SEQ ID NO: 4438203 - DNA, 25 bp, Homo sapien
gctgttggagaacaacagtccgctt

SEQ ID NO: 4438204 - DNA, 25 bp, Homo sapien
ggagaacaacagtccgctttccact

SEQ ID NO: 4438205 - DNA, 25 bp, Homo sapien
gatgcggctgttggagaacaacagt

SEQ ID NO: 4438206 - DNA, 25 bp, Homo sapien
aacagtccgctttccactctctggg

SEQ ID NO: 4438207 - DNA, 25 bp, Homo sapien
ctactctccacttctcagaatgggt

SEQ ID NO: 4438208 - DNA, 25 bp, Homo sapien
tttgacaccgcaagatgaaatttta

SEQ ID NO: 4438209 - DNA, 25 bp, Homo sapien
tgggagtgccaacgctgacaatggg

SEQ ID NO: 4438210 - DNA, 25 bp, Homo sapien
cagaaggagctgactgttgacggag

SEQ ID NO: 4438211 - DNA, 25 bp, Homo sapien
accccaatttgacaccgcaagatga

SEQ ID NO: 4438212 - DNA, 25 bp, Homo sapien
tcttaaatttgagaggcccgattcc

SEQ ID NO: 4438213 - DNA, 25 bp, Homo sapien
gctaagtagctgatttgggattctg

SEQ ID NO: 4438214 - DNA, 25 bp, Homo sapien
tgcgatttgtagagggtctttagcc

SEQ ID NO: 4438215 - DNA, 25 bp, Homo sapien
ttttgcagttaatgagtccccacgc

SEQ ID NO: 4438216 - DNA, 25 bp, Homo sapien
tgggtattgcatcccaggcgtgcct

SEQ ID NO: 4438217 - DNA, 25 bp, Homo sapien
cgttcgattgtttaccggctactga

SEQ ID NO: 4438218 - DNA, 25 bp, Homo sapien
gaaagacaatgacctgcaaattgca

SEQ ID NO: 4438219 - DNA, 25 bp, Homo sapien
aaagcacctagcctgagtagaatct

SEQ ID NO: 4438220 - DNA, 25 bp, Homo sapien
ggtagtgcacactttagcttaggca

SEQ ID NO: 4438221 - DNA, 25 bp, Homo sapien
gaaactgacacggattttccagaga

SEQ ID NO: 4438222 - DNA, 25 bp, Homo sapien
gaagctttccaagtgcctcagtact

SEQ ID NO: 4438223 - DNA, 25 bp, Homo sapien
tgcggccaagtacactcaagtccag

SEQ ID NO: 4438224 - DNA, 25 bp, Homo sapien
agtggattctagctttctatccgct

SEQ ID NO: 4438225 - DNA, 25 bp, Homo sapien
taggacagggacttcagtggattct

SEQ ID NO: 4438226 - DNA, 25 bp, Homo sapien
gctttctatccgctttctatccctt

SEQ ID NO: 4438227 - DNA, 25 bp, Homo sapien
tctgatgtgccaggtgaaaatgggt

SEQ ID NO: 4438228 - DNA, 25 bp, Homo sapien
aaacaagctaagtaaacacagctct

SEQ ID NO: 4438229 - DNA, 25 bp, Homo sapien
aaaacaagctaagtaaacacagctc

SEQ ID NO: 4438230 - DNA, 25 bp, Homo sapien
taaaacaagctaagtaaacacagct

SEQ ID NO: 4438231 - DNA, 25 bp, Homo sapien
ttaaaacaagctaagtaaacacagc

SEQ ID NO: 4438232 - DNA, 25 bp, Homo sapien
ctggaagtatctgtagaaggctgat

SEQ ID NO: 4438233 - DNA, 25 bp, Homo sapien
actggaagtatctgtagaaggctga

SEQ ID NO: 4438234 - DNA, 25 bp, Homo sapien
gatgtgagaaagtgatggcagttct

SEQ ID NO: 4438235 - DNA, 25 bp, Homo sapien
tgggatgtgagaaagtgatggcagt

SEQ ID NO: 4438236 - DNA, 25 bp, Homo sapien
ggatgtgagaaagtgatggcagttc

SEQ ID NO: 4438237 - DNA, 25 bp, Homo sapien
cttgggatgtgagaaagtgatggca

SEQ ID NO: 4438238 - DNA, 25 bp, Homo sapien
aaatatagcagagaagcgattcaaa

SEQ ID NO: 4438239 - DNA, 25 bp, Homo sapien
ctccggtaattaagcgtttcagcca

SEQ ID NO: 4438240 - DNA, 25 bp, Homo sapien
ctccttcgcctccggtaattaagcg

SEQ ID NO: 4438241 - DNA, 25 bp, Homo sapien
tcgcctccggtaattaagcgtttca

SEQ ID NO: 4438242 - DNA, 25 bp, Homo sapien
gggtatcactttgccctaaaggcat

SEQ ID NO: 4438243 - DNA, 25 bp, Homo sapien
gtatcactttgccctaaaggcattt

SEQ ID NO: 4438244 - DNA, 25 bp, Homo sapien
caagggtatcactttgccctaaagg

SEQ ID NO: 4438245 - DNA, 25 bp, Homo sapien
atcactttgccctaaaggcattttt

SEQ ID NO: 4438246 - DNA, 25 bp, Homo sapien
gtaacgtggaaggacgtctctttga

SEQ ID NO: 4438247 - DNA, 25 bp, Homo sapien
tggaaaagcaccatttgtgactcac

SEQ ID NO: 4438248 - DNA, 25 bp, Homo sapien
cacattcagactgattaaggaataa

SEQ ID NO: 4438249 - DNA, 25 bp, Homo sapien
cgtggaaggacgtctctttgatgtg

SEQ ID NO: 4438250 - DNA, 25 bp, Homo sapien
taaatctcgaatctaactcagtgtg

SEQ ID NO: 4438251 - DNA, 25 bp, Homo sapien
tctaactcagtgtgagttgcaaaac

SEQ ID NO: 4438252 - DNA, 25 bp, Homo sapien
tcagtgtgagttgcaaaactacttc

SEQ ID NO: 4438253 - DNA, 25 bp, Homo sapien
tcgacaaccgtttaaatctcgaatc

SEQ ID NO: 4438254 - DNA, 25 bp, Homo sapien
tataaattgtgactcagggctggac

SEQ ID NO: 4438255 - DNA, 25 bp, Homo sapien
ttataaattgtgactcagggctgga

SEQ ID NO: 4438256 - DNA, 25 bp, Homo sapien
taaattgtgactcagggctggacca

SEQ ID NO: 4438257 - DNA, 25 bp, Homo sapien
ataaattgtgactcagggctggacc

SEQ ID NO: 4438258 - DNA, 25 bp, Homo sapien
tttgatttgtaaccctgaatgagac

SEQ ID NO: 4438259 - DNA, 25 bp, Homo sapien
attcttcctgttccaatactgtggc

SEQ ID NO: 4438260 - DNA, 25 bp, Homo sapien
caatactgtggcttgtatcctgaca

SEQ ID NO: 4438261 - DNA, 25 bp, Homo sapien
aattttgatttgtaaccctgaatga

SEQ ID NO: 4438262 - DNA, 25 bp, Homo sapien
gctcaattgtagataatccgtcagg

SEQ ID NO: 4438263 - DNA, 25 bp, Homo sapien
tccattgcatgataaagttgtccca

SEQ ID NO: 4438264 - DNA, 25 bp, Homo sapien
gctgtagagaaatcactggtcacct

SEQ ID NO: 4438265 - DNA, 25 bp, Homo sapien
acaggtcccagttcatcccatctag

SEQ ID NO: 4438266 - DNA, 25 bp, Homo sapien
ttcaaatatttatgtttcatgccag

SEQ ID NO: 4438267 - DNA, 25 bp, Homo sapien
caaatatttatgtttcatgccagca

SEQ ID NO: 4438268 - DNA, 25 bp, Homo sapien
ttttcaaatatttatgtttcatgcc

SEQ ID NO: 4438269 - DNA, 25 bp, Homo sapien
aaatatttatgtttcatgccagcag

SEQ ID NO: 4438270 - DNA, 25 bp, Homo sapien
gcacaccacttttgtaattgatttc

SEQ ID NO: 4438271 - DNA, 25 bp, Homo sapien
ggagcaaagcacaccacttttgtaa

SEQ ID NO: 4438272 - DNA, 25 bp, Homo sapien
ggactcaactgtgatttccaagaaa

SEQ ID NO: 4438273 - DNA, 25 bp, Homo sapien
aaatggagcaaagcacaccactttt

SEQ ID NO: 4438274 - DNA, 25 bp, Homo sapien
cagtgggacggatttagtttgctca

SEQ ID NO: 4438275 - DNA, 25 bp, Homo sapien
aattgagcccttcatgtcagtgtgg

SEQ ID NO: 4438276 - DNA, 25 bp, Homo sapien
cccaggactttgtggattgcaggca

SEQ ID NO: 4438277 - DNA, 25 bp, Homo sapien
aaaaagttcatgcagaattgagccc

SEQ ID NO: 4438278 - DNA, 25 bp, Homo sapien
gcaaataactgcaagtatgtacctg

SEQ ID NO: 4438279 - DNA, 25 bp, Homo sapien
ctgcattccaaagtggccggcagcc

SEQ ID NO: 4438280 - DNA, 25 bp, Homo sapien
tgtatcttgtaccaacactgttgac

SEQ ID NO: 4438281 - DNA, 25 bp, Homo sapien
tccaggacatctccccgtgacagat

SEQ ID NO: 4438282 - DNA, 25 bp, Homo sapien
cagaagtggctcaagagtaagaggc

SEQ ID NO: 4438283 - DNA, 25 bp, Homo sapien
tcttttggcctcatgagcactgcgc

SEQ ID NO: 4438284 - DNA, 25 bp, Homo sapien
tactgatgccagactacagaagtgg

SEQ ID NO: 4438285 - DNA, 25 bp, Homo sapien
tctgtgctatgattaggcctgggac

SEQ ID NO: 4438286 - DNA, 25 bp, Homo sapien
gcaaagggaagctacaagaatcaat

SEQ ID NO: 4438287 - DNA, 25 bp, Homo sapien
caatagcataatagacagactttct

SEQ ID NO: 4438288 - DNA, 25 bp, Homo sapien
gggaagctacaagaatcaatagcat

SEQ ID NO: 4438289 - DNA, 25 bp, Homo sapien
tctgtagggttttgtgacctctaaa

SEQ ID NO: 4438290 - DNA, 25 bp, Homo sapien
cattgctgcatcactacaccgtaga

SEQ ID NO: 4438291 - DNA, 25 bp, Homo sapien
gatgccaatgcatgtaatatcagcc

SEQ ID NO: 4438292 - DNA, 25 bp, Homo sapien
gagagctcattgtctgatccactgt

SEQ ID NO: 4438293 - DNA, 25 bp, Homo sapien
gcagtctaatctcggtgatgccaat

SEQ ID NO: 4438294 - DNA, 25 bp, Homo sapien
tttcaaaaatggtccagcgaggagc

SEQ ID NO: 4438295 - DNA, 25 bp, Homo sapien
gagcttttgtggcactctgggatct

SEQ ID NO: 4438296 - DNA, 25 bp, Homo sapien
tctataaattggacttgctttgagg

SEQ ID NO: 4438297 - DNA, 25 bp, Homo sapien
gctttgaggaattccaggctctaga

SEQ ID NO: 4438298 - DNA, 25 bp, Homo sapien
tctggctcgacagcatttaactctg

SEQ ID NO: 4438299 - DNA, 25 bp, Homo sapien
gacaatgttaccacgctcttcttca

SEQ ID NO: 4438300 - DNA, 25 bp, Homo sapien
gaagtcaaccgaatcatcatccaac

SEQ ID NO: 4438301 - DNA, 25 bp, Homo sapien
tctaaagcaaaggatgaagtcaacc

SEQ ID NO: 4438302 - DNA, 25 bp, Homo sapien
gcgttgcggcttttgtgctatggaa

SEQ ID NO: 4438303 - DNA, 25 bp, Homo sapien
cttttgtccgctcgaggcgttgcgg

SEQ ID NO: 4438304 - DNA, 25 bp, Homo sapien
aaagcaccatggaccaatagcatca

SEQ ID NO: 4438305 - DNA, 25 bp, Homo sapien
caaagatactgtgtatggggtccca

SEQ ID NO: 4438306 - DNA, 25 bp, Homo sapien
tcctccagatttatgaaaacattgg

SEQ ID NO: 4438307 - DNA, 25 bp, Homo sapien
ttcctccagatttatgaaaacattg

SEQ ID NO: 4438308 - DNA, 25 bp, Homo sapien
cagtttctgggctatgatttgtgac

SEQ ID NO: 4438309 - DNA, 25 bp, Homo sapien
gatttgtgacattcagactggatag

SEQ ID NO: 4438310 - DNA, 25 bp, Homo sapien
gacatcccacttcaaggaataggcc

SEQ ID NO: 4438311 - DNA, 25 bp, Homo sapien
gaaatgccttgaagatagcacttta

SEQ ID NO: 4438312 - DNA, 25 bp, Homo sapien
tgacacactaaaggtagtcctttcc

SEQ ID NO: 4438313 - DNA, 25 bp, Homo sapien
gttgatgagaaagggcccatctttc

SEQ ID NO: 4438314 - DNA, 25 bp, Homo sapien
tccaaagcctgcatgcctaaatggt

SEQ ID NO: 4438315 - DNA, 25 bp, Homo sapien
aatggtggataaatagctgtcctcc

SEQ ID NO: 4438316 - DNA, 25 bp, Homo sapien
ttctgtggtaccagactgttccata

SEQ ID NO: 4438317 - DNA, 25 bp, Homo sapien
agcaaataccacttgttaccacagt

SEQ ID NO: 4438318 - DNA, 25 bp, Homo sapien
tggaacctaaggctgcctaagcaaa

SEQ ID NO: 4438319 - DNA, 25 bp, Homo sapien
cagactgttccataaggtggttgaa

SEQ ID NO: 4438320 - DNA, 25 bp, Homo sapien
ctgggtgccctcagacaaaccaaca

SEQ ID NO: 4438321 - DNA, 25 bp, Homo sapien
ctgagagctccagaagtagatgttt

SEQ ID NO: 4438322 - DNA, 25 bp, Homo sapien
ttctgagagctccagaagtagatgt

SEQ ID NO: 4438323 - DNA, 25 bp, Homo sapien
ctgaaagatacccagcttacttctg

SEQ ID NO: 4438324 - DNA, 25 bp, Homo sapien
gatacccagcttacttctgagagct

SEQ ID NO: 4438325 - DNA, 25 bp, Homo sapien
caaacgctgattcgaacatctggta

SEQ ID NO: 4438326 - DNA, 25 bp, Homo sapien
tagatggatcataattacagcagag

SEQ ID NO: 4438327 - DNA, 25 bp, Homo sapien
ttctctgcaggtaaagtggagtcag

SEQ ID NO: 4438328 - DNA, 25 bp, Homo sapien
cagataaggctgaagacacgtagaa

SEQ ID NO: 4438329 - DNA, 25 bp, Homo sapien
aaaagaacaaatggcaaggacatca

SEQ ID NO: 4438330 - DNA, 25 bp, Homo sapien
catgcacgctgatggcgaatatacc

SEQ ID NO: 4438331 - DNA, 25 bp, Homo sapien
ggacatcaaaatagtgaagtctaat

SEQ ID NO: 4438332 - DNA, 25 bp, Homo sapien
ttagatgatccataagcctgcacag

SEQ ID NO: 4438333 - DNA, 25 bp, Homo sapien
catcatgttggcgatttcttagcct

SEQ ID NO: 4438334 - DNA, 25 bp, Homo sapien
aatatgcctgcaaggcacagagtca

SEQ ID NO: 4438335 - DNA, 25 bp, Homo sapien
tcttagcctaatatgcctgcaaggc

SEQ ID NO: 4438336 - DNA, 25 bp, Homo sapien
tggcgatttcttagcctaatatgcc

SEQ ID NO: 4438337 - DNA, 25 bp, Homo sapien
caggagccctgacaatggctgatta

SEQ ID NO: 4438338 - DNA, 25 bp, Homo sapien
gagaaggatctggagcgtgtttacc

SEQ ID NO: 4438339 - DNA, 25 bp, Homo sapien
taaagataagagtagcactgcagtc

SEQ ID NO: 4438340 - DNA, 25 bp, Homo sapien
atttaatgtcttagtcaggagccct

SEQ ID NO: 4438341 - DNA, 25 bp, Homo sapien
tacttccagcagttgaagtgaatca

SEQ ID NO: 4438342 - DNA, 25 bp, Homo sapien
acttccagcagttgaagtgaatcaa

SEQ ID NO: 4438343 - DNA, 25 bp, Homo sapien
cagaatatcgattgtacttccagca

SEQ ID NO: 4438344 - DNA, 25 bp, Homo sapien
gaatatcgattgtacttccagcagt

SEQ ID NO: 4438345 - DNA, 25 bp, Homo sapien
ttacaggaccaacagcaaggctgtt

SEQ ID NO: 4438346 - DNA, 25 bp, Homo sapien
ggctgttcgtggaggtggtatcaat

SEQ ID NO: 4438347 - DNA, 25 bp, Homo sapien
caaggctgttcgtggaggtggtatc

SEQ ID NO: 4438348 - DNA, 25 bp, Homo sapien
acagcaaggctgttcgtggaggtgg

SEQ ID NO: 4438349 - DNA, 25 bp, Homo sapien
ctgccagctgagatcgtactgttaa

SEQ ID NO: 4438350 - DNA, 25 bp, Homo sapien
tggatccaagagactttctgtgctg

SEQ ID NO: 4438351 - DNA, 25 bp, Homo sapien
tcgtactgttaacagctgaaactga

SEQ ID NO: 4438352 - DNA, 25 bp, Homo sapien
tgtctggaatcccttggatccaaga

SEQ ID NO: 4438353 - DNA, 25 bp, Homo sapien
aactgtccgcgtccatgtcacattc

SEQ ID NO: 4438354 - DNA, 25 bp, Homo sapien
aaaactgtccgcgtccatgtcacat

SEQ ID NO: 4438355 - DNA, 25 bp, Homo sapien
agccaaaactgtccgcgtccatgtc

SEQ ID NO: 4438356 - DNA, 25 bp, Homo sapien
acatcagccaaaactgtccgcgtcc

SEQ ID NO: 4438357 - DNA, 25 bp, Homo sapien
atattgccataaaccttggaaggag

SEQ ID NO: 4438358 - DNA, 25 bp, Homo sapien
gatctgctgatctgctagccacagc

SEQ ID NO: 4438359 - DNA, 25 bp, Homo sapien
cgatctgctgatctgctagccacag

SEQ ID NO: 4438360 - DNA, 25 bp, Homo sapien
tgccataaaccttggaaggaggatt

SEQ ID NO: 4438361 - DNA, 25 bp, Homo sapien
gacggtatttttcaaatgctgtctc

SEQ ID NO: 4438362 - DNA, 25 bp, Homo sapien
aagacggtatttttcaaatgctgtc

SEQ ID NO: 4438363 - DNA, 25 bp, Homo sapien
gacaaagacggtatttttcaaatgc

SEQ ID NO: 4438364 - DNA, 25 bp, Homo sapien
cggtatttttcaaatgctgtctcat

SEQ ID NO: 4438365 - DNA, 25 bp, Homo sapien
atgacaaacattgtaagtaggcttg

SEQ ID NO: 4438366 - DNA, 25 bp, Homo sapien
gtaagtaggcttgctattgtaagta

SEQ ID NO: 4438367 - DNA, 25 bp, Homo sapien
caaacattgtaagtaggcttgctat

SEQ ID NO: 4438368 - DNA, 25 bp, Homo sapien
gtaggcttgctattgtaagtaacag

SEQ ID NO: 4438369 - DNA, 25 bp, Homo sapien
cctgggatatatgcttctttgggcc

SEQ ID NO: 4438370 - DNA, 25 bp, Homo sapien
tagacttgagtacatgaaccatgtg

SEQ ID NO: 4438371 - DNA, 25 bp, Homo sapien
tagccagcaaccttggtccatgtgg

SEQ ID NO: 4438372 - DNA, 25 bp, Homo sapien
tgcgtgaaatactcccatagccagc

SEQ ID NO: 4438373 - DNA, 25 bp, Homo sapien
gctgagaggcgaatgtaaataatga

SEQ ID NO: 4438374 - DNA, 25 bp, Homo sapien
tccctgctgagaggcgaatgtaaat

SEQ ID NO: 4438375 - DNA, 25 bp, Homo sapien
tgagaggcgaatgtaaataatgaat

SEQ ID NO: 4438376 - DNA, 25 bp, Homo sapien
ccctgctgagaggcgaatgtaaata

SEQ ID NO: 4438377 - DNA, 25 bp, Homo sapien
gccgctggtactctggtctgtagct

SEQ ID NO: 4438378 - DNA, 25 bp, Homo sapien
tggtggtttgcagtttgtttccttc

SEQ ID NO: 4438379 - DNA, 25 bp, Homo sapien
catgggccgctggtactctggtctg

SEQ ID NO: 4438380 - DNA, 25 bp, Homo sapien
tactctggtctgtagctttggtggt

SEQ ID NO: 4438381 - DNA, 25 bp, Homo sapien
ggatctggggcatatcatactgaag

SEQ ID NO: 4438382 - DNA, 25 bp, Homo sapien
atatcatactgaagattgttaacgc

SEQ ID NO: 4438383 - DNA, 25 bp, Homo sapien
gataaagtactcaggccataaagca

SEQ ID NO: 4438384 - DNA, 25 bp, Homo sapien
gaaattaagaagtgtatccttgcat

SEQ ID NO: 4438385 - DNA, 25 bp, Homo sapien
attctggctaatgagataactgtct

SEQ ID NO: 4438386 - DNA, 25 bp, Homo sapien
agaagtgtatccttgcatttcatta

SEQ ID NO: 4438387 - DNA, 25 bp, Homo sapien
aatcctgcttatattcagctgtgtc

SEQ ID NO: 4438388 - DNA, 25 bp, Homo sapien
cataatcctgcttatattcagctgt

SEQ ID NO: 4438389 - DNA, 25 bp, Homo sapien
cagtcatgtccataatcctgcttat

SEQ ID NO: 4438390 - DNA, 25 bp, Homo sapien
gtcatgtccataatcctgcttatat

SEQ ID NO: 4438391 - DNA, 25 bp, Homo sapien
gagattgaggtaaggattcctggta

SEQ ID NO: 4438392 - DNA, 25 bp, Homo sapien
tggtgctgtctaaatgagattgagg

SEQ ID NO: 4438393 - DNA, 25 bp, Homo sapien
ccatgaagaaggtactggtgacctt

SEQ ID NO: 4438394 - DNA, 25 bp, Homo sapien
ggtgaccttacacagttccgttctg

SEQ ID NO: 4438395 - DNA, 25 bp, Homo sapien
agtagggccagaaatcctacccaca

SEQ ID NO: 4438396 - DNA, 25 bp, Homo sapien
cagtagggccagaaatcctacccac

SEQ ID NO: 4438397 - DNA, 25 bp, Homo sapien
cttgctggacatggttggaagtctc

SEQ ID NO: 4438398 - DNA, 25 bp, Homo sapien
cgtaatgctgtctggtatgacttgc

SEQ ID NO: 4438399 - DNA, 25 bp, Homo sapien
taaacccacgaatgtcctcctaata

SEQ ID NO: 4438400 - DNA, 25 bp, Homo sapien
gtaaatgtcaccaatttccactacg

SEQ ID NO: 4438401 - DNA, 25 bp, Homo sapien
tcagtcggcaaaggctgcactcagc

SEQ ID NO: 4438402 - DNA, 25 bp, Homo sapien
cgatcccaccatggcgcctttgggt

SEQ ID NO: 4438403 - DNA, 25 bp, Homo sapien
aacacagcagccgatcccaccatgg

SEQ ID NO: 4438404 - DNA, 25 bp, Homo sapien
catggcgcctttgggtccgtaataa

SEQ ID NO: 4438405 - DNA, 25 bp, Homo sapien
cgtaataaaagaagcgacagatcct

SEQ ID NO: 4438406 - DNA, 25 bp, Homo sapien
gaaagtgaaatagcagagcgtttat

SEQ ID NO: 4438407 - DNA, 25 bp, Homo sapien
tcatggccccggcaaaaagtacaag

SEQ ID NO: 4438408 - DNA, 25 bp, Homo sapien
tcctgtgagatgcatggatctattg

SEQ ID NO: 4438409 - DNA, 25 bp, Homo sapien
taataagtactttccagctgataca

SEQ ID NO: 4438410 - DNA, 25 bp, Homo sapien
tcagcgacattgttttaccactgtc

SEQ ID NO: 4438411 - DNA, 25 bp, Homo sapien
tgtaaaatggtctctccagacttac

SEQ ID NO: 4438412 - DNA, 25 bp, Homo sapien
tccaaagacttgcatatcagcccca

SEQ ID NO: 4438413 - DNA, 25 bp, Homo sapien
gacttacattttgccatcgccttga

SEQ ID NO: 4438414 - DNA, 25 bp, Homo sapien
tcctcttgcagcttgctctagtctc

SEQ ID NO: 4438415 - DNA, 25 bp, Homo sapien
tgcagcttgctctagtctcacttcc

SEQ ID NO: 4438416 - DNA, 25 bp, Homo sapien
aatgttttataaggcctaggcaagg

SEQ ID NO: 4438417 - DNA, 25 bp, Homo sapien
gataggactgatcattaatcaatcc

SEQ ID NO: 4438418 - DNA, 25 bp, Homo sapien
atgctgatacacaggcacagcagcc

SEQ ID NO: 4438419 - DNA, 25 bp, Homo sapien
aagcagctgcatctaattctttcct

SEQ ID NO: 4438420 - DNA, 25 bp, Homo sapien
cacagcagccattttgcaaagcagc

SEQ ID NO: 4438421 - DNA, 25 bp, Homo sapien
ttaaaatgctgatacacaggcacag

SEQ ID NO: 4438422 - DNA, 25 bp, Homo sapien
gtagggcacgtccagcatctggtcc

SEQ ID NO: 4438423 - DNA, 25 bp, Homo sapien
gcataagctgctcgtagggcacgtc

SEQ ID NO: 4438424 - DNA, 25 bp, Homo sapien
gacgcgcactgtatagctgcataag

SEQ ID NO: 4438425 - DNA, 25 bp, Homo sapien
aacgctgctgccgacgcgcactgta

SEQ ID NO: 4438426 - DNA, 25 bp, Homo sapien
ttgcgcaggcgcttcagcggcgagt

SEQ ID NO: 4438427 - DNA, 25 bp, Homo sapien
ctccatgggcggtacctccttcttg

SEQ ID NO: 4438428 - DNA, 25 bp, Homo sapien
acttccggcttctccatgggcggta

SEQ ID NO: 4438429 - DNA, 25 bp, Homo sapien
ggcttctccatgggcggtacctcct

SEQ ID NO: 4438430 - DNA, 25 bp, Homo sapien
tgcccatcatctcaggcaagatgat

SEQ ID NO: 4438431 - DNA, 25 bp, Homo sapien
catgctgcccatcatctcaggcaag

SEQ ID NO: 4438432 - DNA, 25 bp, Homo sapien
atgctgcccatcatctcaggcaaga

SEQ ID NO: 4438433 - DNA, 25 bp, Homo sapien
caatgcggggccagcagtgcttcac

SEQ ID NO: 4438434 - DNA, 25 bp, Homo sapien
tgaagaaggggtggccccaatgcgg

SEQ ID NO: 4438435 - DNA, 25 bp, Homo sapien
gggtggccccaatgcggggccagca

SEQ ID NO: 4438436 - DNA, 25 bp, Homo sapien
aggatgaagaaggggtggccccaat

SEQ ID NO: 4438437 - DNA, 25 bp, Homo sapien
gttgccatggtaagcggttttttga

SEQ ID NO: 4438438 - DNA, 25 bp, Homo sapien
gagcatgtgtaaagctcgtgggaaa

SEQ ID NO: 4438439 - DNA, 25 bp, Homo sapien
catggtaagcggttttttgaatagg

SEQ ID NO: 4438440 - DNA, 25 bp, Homo sapien
agcatgtgtaaagctcgtgggaaag

SEQ ID NO: 4438441 - DNA, 25 bp, Homo sapien
gcattatagcaacattgtaggagct

SEQ ID NO: 4438442 - DNA, 25 bp, Homo sapien
gctttaattaacaacacctgcatta

SEQ ID NO: 4438443 - DNA, 25 bp, Homo sapien
taggagctttttgtgacatcatgta

SEQ ID NO: 4438444 - DNA, 25 bp, Homo sapien
cctgcattatagcaacattgtagga

SEQ ID NO: 4438445 - DNA, 25 bp, Homo sapien
gataacgaatgaaagcaacctccaa

SEQ ID NO: 4438446 - DNA, 25 bp, Homo sapien
ggattgctcttcgtacagccacctt

SEQ ID NO: 4438447 - DNA, 25 bp, Homo sapien
accttctccttatcatcacattgtg

SEQ ID NO: 4438448 - DNA, 25 bp, Homo sapien
actggtgattgggattgctcttcgt

SEQ ID NO: 4438449 - DNA, 25 bp, Homo sapien
ccatacaaactctttcatattggtg

SEQ ID NO: 4438450 - DNA, 25 bp, Homo sapien
ctgtccttggaatttcaacctctcc

SEQ ID NO: 4438451 - DNA, 25 bp, Homo sapien
tcaacctctccaagccggatgtctt

SEQ ID NO: 4438452 - DNA, 25 bp, Homo sapien
tcctgtccttggaatttcaacctct

SEQ ID NO: 4438453 - DNA, 25 bp, Homo sapien
tccttggaatttcaacctctccaag

SEQ ID NO: 4438454 - DNA, 25 bp, Homo sapien
gacaactaaatgcatgtcacacttt

SEQ ID NO: 4438455 - DNA, 25 bp, Homo sapien
tgataggaactgacaactaaatgca

SEQ ID NO: 4438456 - DNA, 25 bp, Homo sapien
gcataaaatggtgtgtcttgctgct

SEQ ID NO: 4438457 - DNA, 25 bp, Homo sapien
aaatcagccgtggtgacaggataac

SEQ ID NO: 4438458 - DNA, 25 bp, Homo sapien
gcttccgtggtgactaattgcaggg

SEQ ID NO: 4438459 - DNA, 25 bp, Homo sapien
aatgaatgcagtgtttagtccgacg

SEQ ID NO: 4438460 - DNA, 25 bp, Homo sapien
tttagtccgacgtccgacatggttg

SEQ ID NO: 4438461 - DNA, 25 bp, Homo sapien
gacgtccttgcggtgtttagtccga

SEQ ID NO: 4438462 - DNA, 25 bp, Homo sapien
tcagagccacgctaataatgccatc

SEQ ID NO: 4438463 - DNA, 25 bp, Homo sapien
tcagcttccacgcttttgataaaca

SEQ ID NO: 4438464 - DNA, 25 bp, Homo sapien
catcctgtcagcttccacgcttttg

SEQ ID NO: 4438465 - DNA, 25 bp, Homo sapien
cacgctaataatgccatcctgtcag

SEQ ID NO: 4438466 - DNA, 25 bp, Homo sapien
agatttttgtgaatttcggctggga

SEQ ID NO: 4438467 - DNA, 25 bp, Homo sapien
gccagtggtcctcacccaatttaaa

SEQ ID NO: 4438468 - DNA, 25 bp, Homo sapien
ttagaaattcctattattgctttgt

SEQ ID NO: 4438469 - DNA, 25 bp, Homo sapien
tctttgtgtgcgtttttgtctgtgt

SEQ ID NO: 4438470 - DNA, 25 bp, Homo sapien
tagcttcccccgaagacataaatgt

SEQ ID NO: 4438471 - DNA, 25 bp, Homo sapien
gcttcccccgaagacataaatgtta

SEQ ID NO: 4438472 - DNA, 25 bp, Homo sapien
tgtatatagcttcccccgaagacat

SEQ ID NO: 4438473 - DNA, 25 bp, Homo sapien
aacaaatgtatatagcttcccccga

SEQ ID NO: 4438474 - DNA, 25 bp, Homo sapien
actataaagcacacttttctctttt

SEQ ID NO: 4438475 - DNA, 25 bp, Homo sapien
tataaagcacacttttctcttttaa

SEQ ID NO: 4438476 - DNA, 25 bp, Homo sapien
gcacacttttctcttttaacggcat

SEQ ID NO: 4438477 - DNA, 25 bp, Homo sapien
cttccataggactataaagcacact

SEQ ID NO: 4438478 - DNA, 25 bp, Homo sapien
cagggagctttcaggtattccagaa

SEQ ID NO: 4438479 - DNA, 25 bp, Homo sapien
cttcttgaactgattcttggcaagt

SEQ ID NO: 4438480 - DNA, 25 bp, Homo sapien
aggtattccagaacacttcttgaac

SEQ ID NO: 4438481 - DNA, 25 bp, Homo sapien
gctttcaggtattccagaacacttc

SEQ ID NO: 4438482 - DNA, 25 bp, Homo sapien
ttattgcagatgtagtctatgaggt

SEQ ID NO: 4438483 - DNA, 25 bp, Homo sapien
gcagatgtagtctatgaggtcttgt

SEQ ID NO: 4438484 - DNA, 25 bp, Homo sapien
cagatgtagtctatgaggtcttgtt

SEQ ID NO: 4438485 - DNA, 25 bp, Homo sapien
atgtagtctatgaggtcttgttttt

SEQ ID NO: 4438486 - DNA, 25 bp, Homo sapien
ttcttctctcgaatccagcatttgt

SEQ ID NO: 4438487 - DNA, 25 bp, Homo sapien
tctcgaatccagcatttgttgatgt

SEQ ID NO: 4438488 - DNA, 25 bp, Homo sapien
ttctctcgaatccagcatttgttga

SEQ ID NO: 4438489 - DNA, 25 bp, Homo sapien
tctttcttctctcgaatccagcatt

SEQ ID NO: 4438490 - DNA, 25 bp, Homo sapien
ctatctgggctttaagaacaatata

SEQ ID NO: 4438491 - DNA, 25 bp, Homo sapien
tagtccctcaactggggaaagtcat

SEQ ID NO: 4438492 - DNA, 25 bp, Homo sapien
ccctcaactggggaaagtcatcagt

SEQ ID NO: 4438493 - DNA, 25 bp, Homo sapien
cctcgccaaccccaatagtccctca

SEQ ID NO: 4438494 - DNA, 25 bp, Homo sapien
cctcaacttcaactattcttgacat

SEQ ID NO: 4438495 - DNA, 25 bp, Homo sapien
tccccttttgcaggcctcagtagag

SEQ ID NO: 4438496 - DNA, 25 bp, Homo sapien
taattagtccagtggctaacagccc

SEQ ID NO: 4438497 - DNA, 25 bp, Homo sapien
taacagcccagtgctgatttgagca

SEQ ID NO: 4438498 - DNA, 25 bp, Homo sapien
taaactgaaaaagctggtatgccac

SEQ ID NO: 4438499 - DNA, 25 bp, Homo sapien
catgcaagactcttagaacctttgg

SEQ ID NO: 4438500 - DNA, 25 bp, Homo sapien
actgtccggctacccatgcaagact

SEQ ID NO: 4438501 - DNA, 25 bp, Homo sapien
gatacagatgagcactcttctgagg

SEQ ID NO: 4438502 - DNA, 25 bp, Homo sapien
ggctacccatgcaagactcttagaa

SEQ ID NO: 4438503 - DNA, 25 bp, Homo sapien
cggttgtgaatgcttctgttgatca

SEQ ID NO: 4438504 - DNA, 25 bp, Homo sapien
ttatcggttgtgaatgcttctgttg

SEQ ID NO: 4438505 - DNA, 25 bp, Homo sapien
gagctcaatacagggaagggtaaac

SEQ ID NO: 4438506 - DNA, 25 bp, Homo sapien
taacatcttccatagagctcaatac

SEQ ID NO: 4438507 - DNA, 25 bp, Homo sapien
ctttcagagcatctgctgacctcat

SEQ ID NO: 4438508 - DNA, 25 bp, Homo sapien
tggatcctttcagagcatctgctga

SEQ ID NO: 4438509 - DNA, 25 bp, Homo sapien
tcctttcagagcatctgctgacctc

SEQ ID NO: 4438510 - DNA, 25 bp, Homo sapien
ggatcctttcagagcatctgctgac

SEQ ID NO: 4438511 - DNA, 25 bp, Homo sapien
tgtgtactgttacagattattttcc

SEQ ID NO: 4438512 - DNA, 25 bp, Homo sapien
ggttcattatcatatattggttgtg

SEQ ID NO: 4438513 - DNA, 25 bp, Homo sapien
ggttgtgtactgttacagattattt

SEQ ID NO: 4438514 - DNA, 25 bp, Homo sapien
tattggttgtgtactgttacagatt

SEQ ID NO: 4438515 - DNA, 25 bp, Homo sapien
tatttggcggtgttgcctgttttaa

SEQ ID NO: 4438516 - DNA, 25 bp, Homo sapien
taattttgagcaccacttcatgcac

SEQ ID NO: 4438517 - DNA, 25 bp, Homo sapien
ctaacctgtcccctgcattggttgg

SEQ ID NO: 4438518 - DNA, 25 bp, Homo sapien
catgcactaccagtatgagtgaagt

SEQ ID NO: 4438519 - DNA, 25 bp, Homo sapien
tttctttcccttctgtgatattctt

SEQ ID NO: 4438520 - DNA, 25 bp, Homo sapien
gttttctttcccttctgtgatattc

SEQ ID NO: 4438521 - DNA, 25 bp, Homo sapien
ccgttttctttcccttctgtgatat

SEQ ID NO: 4438522 - DNA, 25 bp, Homo sapien
tgccagcgcccctccgttttctttc

SEQ ID NO: 4438523 - DNA, 25 bp, Homo sapien
atgatgcccttcagatactgaccat

SEQ ID NO: 4438524 - DNA, 25 bp, Homo sapien
tctggggacagttctatagcttggt

SEQ ID NO: 4438525 - DNA, 25 bp, Homo sapien
ccttcagatactgaccatgcctttc

SEQ ID NO: 4438526 - DNA, 25 bp, Homo sapien
cagttctatagcttggttagttttc

SEQ ID NO: 4438527 - DNA, 25 bp, Homo sapien
ggcttgcagccatttgcccgttgaa

SEQ ID NO: 4438528 - DNA, 25 bp, Homo sapien
tttgctgtgccatcttaaatcgatc

SEQ ID NO: 4438529 - DNA, 25 bp, Homo sapien
atcgatcccttggtccccaagggct

SEQ ID NO: 4438530 - DNA, 25 bp, Homo sapien
caggttgaaagctggttcatttcct

SEQ ID NO: 4438531 - DNA, 25 bp, Homo sapien
gggtttgatgtactgaacagtatca

SEQ ID NO: 4438532 - DNA, 25 bp, Homo sapien
tatcatctgctctaatgatctgtag

SEQ ID NO: 4438533 - DNA, 25 bp, Homo sapien
taatgatctgtagactggaacagca

SEQ ID NO: 4438534 - DNA, 25 bp, Homo sapien
tcatttagaagttggcatgaagggt

SEQ ID NO: 4438535 - DNA, 25 bp, Homo sapien
ccataacactcactgtcccaactcc

SEQ ID NO: 4438536 - DNA, 25 bp, Homo sapien
ataacactcactgtcccaactccta

SEQ ID NO: 4438537 - DNA, 25 bp, Homo sapien
ctccataacactcactgtcccaact

SEQ ID NO: 4438538 - DNA, 25 bp, Homo sapien
cataacactcactgtcccaactcct

SEQ ID NO: 4438539 - DNA, 25 bp, Homo sapien
catggtcatggctttcttatgccag

SEQ ID NO: 4438540 - DNA, 25 bp, Homo sapien
catgttgaccagtgagagtaaagca

SEQ ID NO: 4438541 - DNA, 25 bp, Homo sapien
cacagaaattgcacataagccatgg

SEQ ID NO: 4438542 - DNA, 25 bp, Homo sapien
gaagtcttggcagcacatgttgacc

SEQ ID NO: 4438543 - DNA, 25 bp, Homo sapien
ccatttgctttattacatgtctttt

SEQ ID NO: 4438544 - DNA, 25 bp, Homo sapien
gatctgatccttcgccctattattc

SEQ ID NO: 4438545 - DNA, 25 bp, Homo sapien
tttggccttcgatctgatccttcgc

SEQ ID NO: 4438546 - DNA, 25 bp, Homo sapien
cgccctattattcctcccttcacac

SEQ ID NO: 4438547 - DNA, 25 bp, Homo sapien
ttctgaatttttggccttcgatctg

SEQ ID NO: 4438548 - DNA, 25 bp, Homo sapien
gattctttccgtgatgacatggcag

SEQ ID NO: 4438549 - DNA, 25 bp, Homo sapien
taactccaagcccactgaaatagtc

SEQ ID NO: 4438550 - DNA, 25 bp, Homo sapien
agtcacatcaattgaacttcctgag

SEQ ID NO: 4438551 - DNA, 25 bp, Homo sapien
gacatggcagctacagtactcttgt

SEQ ID NO: 4438552 - DNA, 25 bp, Homo sapien
tagttatatcccactttctgtgttt

SEQ ID NO: 4438553 - DNA, 25 bp, Homo sapien
gctttgaaagtgtttggaacatagt

SEQ ID NO: 4438554 - DNA, 25 bp, Homo sapien
acatagttatatcccactttctgtg

SEQ ID NO: 4438555 - DNA, 25 bp, Homo sapien
ggaacatagttatatcccactttct

SEQ ID NO: 4438556 - DNA, 25 bp, Homo sapien
gacctgggtcctgagaatagagaaa

SEQ ID NO: 4438557 - DNA, 25 bp, Homo sapien
tgaactgacccatgatgacatctcc

SEQ ID NO: 4438558 - DNA, 25 bp, Homo sapien
tcttcagcgtgacatgtcagccctt

SEQ ID NO: 4438559 - DNA, 25 bp, Homo sapien
gatgacatctccaggttgacctgtc

SEQ ID NO: 4438560 - DNA, 25 bp, Homo sapien
gaaaggccaaacgtgcttttgctgc

SEQ ID NO: 4438561 - DNA, 25 bp, Homo sapien
ggctcagaagcccagtaagagtctg

SEQ ID NO: 4438562 - DNA, 25 bp, Homo sapien
ggaggtatgaacgtccccactcaaa

SEQ ID NO: 4438563 - DNA, 25 bp, Homo sapien
taagagtctgaacaacctttggagg

SEQ ID NO: 4438564 - DNA, 25 bp, Homo sapien
cagcttgatatgatagtaactctgg

SEQ ID NO: 4438565 - DNA, 25 bp, Homo sapien
agtttctggtcacaattttataccg

SEQ ID NO: 4438566 - DNA, 25 bp, Homo sapien
ttccacaaggttacagcttgatatg

SEQ ID NO: 4438567 - DNA, 25 bp, Homo sapien
tctggtcacaattttataccggtac

SEQ ID NO: 4438568 - DNA, 25 bp, Homo sapien
tgacagcagctgtggtatccaattc

SEQ ID NO: 4438569 - DNA, 25 bp, Homo sapien
taattgtgagctacagggtaggaga

SEQ ID NO: 4438570 - DNA, 25 bp, Homo sapien
acttgtgtttggatctgacagcagc

SEQ ID NO: 4438571 - DNA, 25 bp, Homo sapien
gggcagattttgcctggcgttcttg

SEQ ID NO: 4438572 - DNA, 25 bp, Homo sapien
tgattttccttttccagtgaaaata

SEQ ID NO: 4438573 - DNA, 25 bp, Homo sapien
ctatacttctggtttcctttgattt

SEQ ID NO: 4438574 - DNA, 25 bp, Homo sapien
tcctttgattttccttttccagtga

SEQ ID NO: 4438575 - DNA, 25 bp, Homo sapien
taggggttggatagtctctgttctg

SEQ ID NO: 4438576 - DNA, 25 bp, Homo sapien
cactgaatttgtaggggttggatag

SEQ ID NO: 4438577 - DNA, 25 bp, Homo sapien
cagtgtaaagacaggacattttgca

SEQ ID NO: 4438578 - DNA, 25 bp, Homo sapien
tcaagggtggttaaattcactgaat

SEQ ID NO: 4438579 - DNA, 25 bp, Homo sapien
acttttgcttgtacagggctggctt

SEQ ID NO: 4438580 - DNA, 25 bp, Homo sapien
ttcttttccctgctccctagacgat

SEQ ID NO: 4438581 - DNA, 25 bp, Homo sapien
tgctccctagacgattttggcccat

SEQ ID NO: 4438582 - DNA, 25 bp, Homo sapien
ttcttatctagacacacttttgctt

SEQ ID NO: 4438583 - DNA, 25 bp, Homo sapien
ctttctgggcctagagttggcaaac

SEQ ID NO: 4438584 - DNA, 25 bp, Homo sapien
ttctgggcctagagttggcaaactc

SEQ ID NO: 4438585 - DNA, 25 bp, Homo sapien
tctgggcctagagttggcaaactcc

SEQ ID NO: 4438586 - DNA, 25 bp, Homo sapien
ctctttctgggcctagagttggcaa

SEQ ID NO: 4438587 - DNA, 25 bp, Homo sapien
agaccggaatgttccttcaagccca

SEQ ID NO: 4438588 - DNA, 25 bp, Homo sapien
tagaccggaatgttccttcaagccc

SEQ ID NO: 4438589 - DNA, 25 bp, Homo sapien
ttagaccggaatgttccttcaagcc

SEQ ID NO: 4438590 - DNA, 25 bp, Homo sapien
gaccggaatgttccttcaagcccat

SEQ ID NO: 4438591 - DNA, 25 bp, Homo sapien
ccattttgcattcctcctattacag

SEQ ID NO: 4438592 - DNA, 25 bp, Homo sapien
tggaaacccgtagcccaaatctgct

SEQ ID NO: 4438593 - DNA, 25 bp, Homo sapien
tccaagtggctgtaataacgaagcc

SEQ ID NO: 4438594 - DNA, 25 bp, Homo sapien
tcctagcaatggttatgggatccca

SEQ ID NO: 4438595 - DNA, 25 bp, Homo sapien
catgagacatgctggatacttttaa

SEQ ID NO: 4438596 - DNA, 25 bp, Homo sapien
gacttttgtctgcatggtgtctccg

SEQ ID NO: 4438597 - DNA, 25 bp, Homo sapien
tagtgcgggctgatacgcattgtca

SEQ ID NO: 4438598 - DNA, 25 bp, Homo sapien
ggtgtctccgttccaaagaagatgg

SEQ ID NO: 4438599 - DNA, 25 bp, Homo sapien
taggagattggcaccacaatgagca

SEQ ID NO: 4438600 - DNA, 25 bp, Homo sapien
ccttaatggtaccagcacggatctc

SEQ ID NO: 4438601 - DNA, 25 bp, Homo sapien
aacaaaggcatacaatgctgaagca

SEQ ID NO: 4438602 - DNA, 25 bp, Homo sapien
agtgattttgcatgactgtccttaa

SEQ ID NO: 4438603 - DNA, 25 bp, Homo sapien
aggcatatctattctgtaacagaga

SEQ ID NO: 4438604 - DNA, 25 bp, Homo sapien
ctctaaatgtgtgagtatctctcat

SEQ ID NO: 4438605 - DNA, 25 bp, Homo sapien
actctaaatgtgtgagtatctctca

SEQ ID NO: 4438606 - DNA, 25 bp, Homo sapien
cagtttcacattcgtctactctaaa

SEQ ID NO: 4438607 - DNA, 25 bp, Homo sapien
ctactctaaatgtgtgagtatctct

SEQ ID NO: 4438608 - DNA, 25 bp, Homo sapien
gagaatattatggtaagctgagcct

SEQ ID NO: 4438609 - DNA, 25 bp, Homo sapien
aagatgggcgcagttgattccaatt

SEQ ID NO: 4438610 - DNA, 25 bp, Homo sapien
cacattccggtgtgttcctgtaaag

SEQ ID NO: 4438611 - DNA, 25 bp, Homo sapien
gctgagcctgaatggtacacattcc

SEQ ID NO: 4438612 - DNA, 25 bp, Homo sapien
ggtgatttgtttggacgtttgaata

SEQ ID NO: 4438613 - DNA, 25 bp, Homo sapien
ctttgtagactctttgccaaaggtc

SEQ ID NO: 4438614 - DNA, 25 bp, Homo sapien
aatatggaagacttccctccttcct

SEQ ID NO: 4438615 - DNA, 25 bp, Homo sapien
ctctttgccaaaggtctgttcagtg

SEQ ID NO: 4438616 - DNA, 25 bp, Homo sapien
gggatgttttcctactcccatagaa

SEQ ID NO: 4438617 - DNA, 25 bp, Homo sapien
ggcatttggctcagattgtagggat

SEQ ID NO: 4438618 - DNA, 25 bp, Homo sapien
ccaaaagagggcacttggagctctc

SEQ ID NO: 4438619 - DNA, 25 bp, Homo sapien
aattctccctgtaggccaaaagagg

SEQ ID NO: 4438620 - DNA, 25 bp, Homo sapien
cttctcctcgaccataaaaggcaat

SEQ ID NO: 4438621 - DNA, 25 bp, Homo sapien
caataactcctgcaagccttgcaca

SEQ ID NO: 4438622 - DNA, 25 bp, Homo sapien
ctgcaagccttgcacatttggactc

SEQ ID NO: 4438623 - DNA, 25 bp, Homo sapien
ttctcctcgaccataaaaggcaata

SEQ ID NO: 4438624 - DNA, 25 bp, Homo sapien
ttttgtcccataaactctggcagtg

SEQ ID NO: 4438625 - DNA, 25 bp, Homo sapien
gtcccataaactctggcagtgctgt

SEQ ID NO: 4438626 - DNA, 25 bp, Homo sapien
ggctcttttgtcccataaactctgg

SEQ ID NO: 4438627 - DNA, 25 bp, Homo sapien
tttggctcttttgtcccataaactc

SEQ ID NO: 4438628 - DNA, 25 bp, Homo sapien
ccctttgatggcaactcgagttctg

SEQ ID NO: 4438629 - DNA, 25 bp, Homo sapien
gagtcatcatactctgaaggatggc

SEQ ID NO: 4438630 - DNA, 25 bp, Homo sapien
gaggacctgattctttctgttggag

SEQ ID NO: 4438631 - DNA, 25 bp, Homo sapien
aaggatggccactcgggcatggccc

SEQ ID NO: 4438632 - DNA, 25 bp, Homo sapien
ttatagtctcgttccctggcagagg

SEQ ID NO: 4438633 - DNA, 25 bp, Homo sapien
cccctattatagtctcgttccctgg

SEQ ID NO: 4438634 - DNA, 25 bp, Homo sapien
ccttggagacccctattatagtctc

SEQ ID NO: 4438635 - DNA, 25 bp, Homo sapien
tggagacccctattatagtctcgtt

SEQ ID NO: 4438636 - DNA, 25 bp, Homo sapien
tatgatatcatagccttctgggtgg

SEQ ID NO: 4438637 - DNA, 25 bp, Homo sapien
tgatatcatagccttctgggtggca

SEQ ID NO: 4438638 - DNA, 25 bp, Homo sapien
catatgatatcatagccttctgggt

SEQ ID NO: 4438639 - DNA, 25 bp, Homo sapien
tcatatgatatcatagccttctggg

SEQ ID NO: 4438640 - DNA, 25 bp, Homo sapien
gagtaatagtcttaattagtagtag

SEQ ID NO: 4438641 - DNA, 25 bp, Homo sapien
aatagtcttaattagtagtagtcat

SEQ ID NO: 4438642 - DNA, 25 bp, Homo sapien
ggagtaatagtcttaattagtagta

SEQ ID NO: 4438643 - DNA, 25 bp, Homo sapien
gtaatagtcttaattagtagtagtc

SEQ ID NO: 4438644 - DNA, 25 bp, Homo sapien
caggcgcctgccaatgtttatttgg

SEQ ID NO: 4438645 - DNA, 25 bp, Homo sapien
cccagatggcaacacgatgttccac

SEQ ID NO: 4438646 - DNA, 25 bp, Homo sapien
ggcaacacgatgttccacgataaaa

SEQ ID NO: 4438647 - DNA, 25 bp, Homo sapien
gcaggcgcctgccaatgtttatttg

SEQ ID NO: 4438648 - DNA, 25 bp, Homo sapien
gatgttccaatggtgagggctcgtt

SEQ ID NO: 4438649 - DNA, 25 bp, Homo sapien
gagggaaggcccgacacctgacact

SEQ ID NO: 4438650 - DNA, 25 bp, Homo sapien
tcagccaggattttacagatctatc

SEQ ID NO: 4438651 - DNA, 25 bp, Homo sapien
gacacttggagagcttaagcctcag

SEQ ID NO: 4438652 - DNA, 25 bp, Homo sapien
tatctgaagggcgactccatttcca

SEQ ID NO: 4438653 - DNA, 25 bp, Homo sapien
tagccagcgaatctccctgaatccg

SEQ ID NO: 4438654 - DNA, 25 bp, Homo sapien
cctgaggtgtagttgagggccatta

SEQ ID NO: 4438655 - DNA, 25 bp, Homo sapien
caactgatgcgtctttgtgctgaaa

SEQ ID NO: 4438656 - DNA, 25 bp, Homo sapien
tgcagaatccataaagcttttaagg

SEQ ID NO: 4438657 - DNA, 25 bp, Homo sapien
gcttttaaggtatagttggtattga

SEQ ID NO: 4438658 - DNA, 25 bp, Homo sapien
agttggtattgaaacaataatgacc

SEQ ID NO: 4438659 - DNA, 25 bp, Homo sapien
taacctctattggtgagagatctgt

SEQ ID NO: 4438660 - DNA, 25 bp, Homo sapien
ccctttgctgccgaatcggaatcta

SEQ ID NO: 4438661 - DNA, 25 bp, Homo sapien
atctaatagcatccctgtccaaaag

SEQ ID NO: 4438662 - DNA, 25 bp, Homo sapien
gatgttttcctggacaaccatcatt

SEQ ID NO: 4438663 - DNA, 25 bp, Homo sapien
ctacattgcgatgttttcctggaca

SEQ ID NO: 4438664 - DNA, 25 bp, Homo sapien
aatgccacagggagagcaaaacctc

SEQ ID NO: 4438665 - DNA, 25 bp, Homo sapien
atgtagagagctgaacacaatacag

SEQ ID NO: 4438666 - DNA, 25 bp, Homo sapien
agagctgaacacaatacagggatag

SEQ ID NO: 4438667 - DNA, 25 bp, Homo sapien
cactacagggatccttctggagggt

SEQ ID NO: 4438668 - DNA, 25 bp, Homo sapien
cctgatgatataatcattggctgaa

SEQ ID NO: 4438669 - DNA, 25 bp, Homo sapien
actgcctgactttgacctgatgata

SEQ ID NO: 4438670 - DNA, 25 bp, Homo sapien
cgtccatagattgtttggtctccca

SEQ ID NO: 4438671 - DNA, 25 bp, Homo sapien
cattggctgaacaagtgctcgtcca

SEQ ID NO: 4438672 - DNA, 25 bp, Homo sapien
ttcggtgccatgctttgccccattc

SEQ ID NO: 4438673 - DNA, 25 bp, Homo sapien
cagcgcagctttagagcagctgttt

SEQ ID NO: 4438674 - DNA, 25 bp, Homo sapien
gccttgttaacttttcggtgccatg

SEQ ID NO: 4438675 - DNA, 25 bp, Homo sapien
ggagatggtttgattaacacccagc

SEQ ID NO: 4438676 - DNA, 25 bp, Homo sapien
tataattagggtggcgcagaagaag

SEQ ID NO: 4438677 - DNA, 25 bp, Homo sapien
gagcattctcagacccgttaagtgg

SEQ ID NO: 4438678 - DNA, 25 bp, Homo sapien
cagcagatctaggagcatgaaggga

SEQ ID NO: 4438679 - DNA, 25 bp, Homo sapien
gaagccctccagttgtgctgagatg

SEQ ID NO: 4438680 - DNA, 25 bp, Homo sapien
ccctagtcaattagcttctgaggag

SEQ ID NO: 4438681 - DNA, 25 bp, Homo sapien
tccctagtcaattagcttctgagga

SEQ ID NO: 4438682 - DNA, 25 bp, Homo sapien
cttccctagtcaattagcttctgag

SEQ ID NO: 4438683 - DNA, 25 bp, Homo sapien
tccttccctagtcaattagcttctg

SEQ ID NO: 4438684 - DNA, 25 bp, Homo sapien
cataatcatgactacttaatccagc

SEQ ID NO: 4438685 - DNA, 25 bp, Homo sapien
ataatcatgactacttaatccagct

SEQ ID NO: 4438686 - DNA, 25 bp, Homo sapien
taatcatgactacttaatccagctg

SEQ ID NO: 4438687 - DNA, 25 bp, Homo sapien
tctttttgactgagccaatcttgag

SEQ ID NO: 4438688 - DNA, 25 bp, Homo sapien
tccctttcaaggtccatgttcaaac

SEQ ID NO: 4438689 - DNA, 25 bp, Homo sapien
ggtccatgttcaaactgataatgtt

SEQ ID NO: 4438690 - DNA, 25 bp, Homo sapien
ttcatctattctctgcgtatccctt

SEQ ID NO: 4438691 - DNA, 25 bp, Homo sapien
acatgccatgaggacccatgcttgg

SEQ ID NO: 4438692 - DNA, 25 bp, Homo sapien
gccatgaggacccatgcttggcagt

SEQ ID NO: 4438693 - DNA, 25 bp, Homo sapien
tgaggacccatgcttggcagtttca

SEQ ID NO: 4438694 - DNA, 25 bp, Homo sapien
catgaggacccatgcttggcagttt

SEQ ID NO: 4438695 - DNA, 25 bp, Homo sapien
ctttccatcgtggtgcggttctcct

SEQ ID NO: 4438696 - DNA, 25 bp, Homo sapien
tccctttccatcgtggtgcggttct

SEQ ID NO: 4438697 - DNA, 25 bp, Homo sapien
tttccatcgtggtgcggttctcctt

SEQ ID NO: 4438698 - DNA, 25 bp, Homo sapien
cctttccatcgtggtgcggttctcc

SEQ ID NO: 4438699 - DNA, 25 bp, Homo sapien
tgttatactgtggaccaacgtctta

SEQ ID NO: 4438700 - DNA, 25 bp, Homo sapien
tatactgtggaccaacgtcttattc

SEQ ID NO: 4438701 - DNA, 25 bp, Homo sapien
gttatactgtggaccaacgtcttat

SEQ ID NO: 4438702 - DNA, 25 bp, Homo sapien
tctgttatactgtggaccaacgtct

SEQ ID NO: 4438703 - DNA, 25 bp, Homo sapien
tcctgaacccctaattcgcactggg

SEQ ID NO: 4438704 - DNA, 25 bp, Homo sapien
tcttggccactgatgctagagtcca

SEQ ID NO: 4438705 - DNA, 25 bp, Homo sapien
tagagtccactcaaagcaggagtac

SEQ ID NO: 4438706 - DNA, 25 bp, Homo sapien
tcgcactgggttactcaaggataca

SEQ ID NO: 4438707 - DNA, 25 bp, Homo sapien
ctttgttcacaattggttatctttt

SEQ ID NO: 4438708 - DNA, 25 bp, Homo sapien
tcacaattggttatcttttgtgatt

SEQ ID NO: 4438709 - DNA, 25 bp, Homo sapien
tgttcacaattggttatcttttgtg

SEQ ID NO: 4438710 - DNA, 25 bp, Homo sapien
tttgttcacaattggttatcttttg

SEQ ID NO: 4438711 - DNA, 25 bp, Homo sapien
cataggaagcttccagctgttgtaa

SEQ ID NO: 4438712 - DNA, 25 bp, Homo sapien
ttggcatgcataggaagcttccagc

SEQ ID NO: 4438713 - DNA, 25 bp, Homo sapien
ccttctcttggcatgcataggaagc

SEQ ID NO: 4438714 - DNA, 25 bp, Homo sapien
tgcataggaagcttccagctgttgt

SEQ ID NO: 4438715 - DNA, 25 bp, Homo sapien
gctgggtcacaaatgcatactcctt

SEQ ID NO: 4438716 - DNA, 25 bp, Homo sapien
atcttcacagagctgggtcacaaat

SEQ ID NO: 4438717 - DNA, 25 bp, Homo sapien
ttatgtagagggcttgatcttcaca

SEQ ID NO: 4438718 - DNA, 25 bp, Homo sapien
tcacagagctgggtcacaaatgcat

SEQ ID NO: 4438719 - DNA, 25 bp, Homo sapien
tgctatccctttaccaagaagctct

SEQ ID NO: 4438720 - DNA, 25 bp, Homo sapien
cctttgctatccctttaccaagaag

SEQ ID NO: 4438721 - DNA, 25 bp, Homo sapien
gctatccctttaccaagaagctcta

SEQ ID NO: 4438722 - DNA, 25 bp, Homo sapien
tttgctatccctttaccaagaagct

SEQ ID NO: 4438723 - DNA, 25 bp, Homo sapien
cactggacaggtttctgggcatcat

SEQ ID NO: 4438724 - DNA, 25 bp, Homo sapien
taaatagcagaagtgtgaattatta

SEQ ID NO: 4438725 - DNA, 25 bp, Homo sapien
aaatagcagaagtgtgaattattaa

SEQ ID NO: 4438726 - DNA, 25 bp, Homo sapien
tctcaaggaacagagcctctagttc

SEQ ID NO: 4438727 - DNA, 25 bp, Homo sapien
cttctattttcttcaacgtttcctg

SEQ ID NO: 4438728 - DNA, 25 bp, Homo sapien
acttctctctcaaggaacagagcct

SEQ ID NO: 4438729 - DNA, 25 bp, Homo sapien
tctctctcaaggaacagagcctcta

SEQ ID NO: 4438730 - DNA, 25 bp, Homo sapien
cacagggttcatgctcacgagtttt

SEQ ID NO: 4438731 - DNA, 25 bp, Homo sapien
ttgctgtcttttgggtaggagtacc

SEQ ID NO: 4438732 - DNA, 25 bp, Homo sapien
cactgtcacataccaaagtttgcta

SEQ ID NO: 4438733 - DNA, 25 bp, Homo sapien
tagcgtcatagtaagtcctgatatc

SEQ ID NO: 4438734 - DNA, 25 bp, Homo sapien
tatttagtgatccaatctcatacag

SEQ ID NO: 4438735 - DNA, 25 bp, Homo sapien
gaagggcatgttccccactccgtgc

SEQ ID NO: 4438736 - DNA, 25 bp, Homo sapien
ggtaacatgtcctctgtctcaagtg

SEQ ID NO: 4438737 - DNA, 25 bp, Homo sapien
tgggcagtacattgacgaggagatc

SEQ ID NO: 4438738 - DNA, 25 bp, Homo sapien
ccacaaggtgctcctgcccagtacc

SEQ ID NO: 4438739 - DNA, 25 bp, Homo sapien
aaacatgtagctcagcagtctgatg

SEQ ID NO: 4438740 - DNA, 25 bp, Homo sapien
tcaagtactattcagccgatccaca

SEQ ID NO: 4438741 - DNA, 25 bp, Homo sapien
caaggttaatcctggaaagatgacg

SEQ ID NO: 4438742 - DNA, 25 bp, Homo sapien
agtcaagcaggcaaacggtgaggaa

SEQ ID NO: 4438743 - DNA, 25 bp, Homo sapien
tacagagctttttactggtcaaggt

SEQ ID NO: 4438744 - DNA, 25 bp, Homo sapien
tagtacgagatctggattgttggca

SEQ ID NO: 4438745 - DNA, 25 bp, Homo sapien
tcttgccactaaaaggaggaggccc

SEQ ID NO: 4438746 - DNA, 25 bp, Homo sapien
cagccatcttgccactaaaaggagg

SEQ ID NO: 4438747 - DNA, 25 bp, Homo sapien
tctgcaaaggttgccaatctggtag

SEQ ID NO: 4438748 - DNA, 25 bp, Homo sapien
tgggacagggtaggcaattgacctc

SEQ ID NO: 4438749 - DNA, 25 bp, Homo sapien
cctcagataggccagtttatgacct

SEQ ID NO: 4438750 - DNA, 25 bp, Homo sapien
taagcttgaccaatcagagtactcc

SEQ ID NO: 4438751 - DNA, 25 bp, Homo sapien
gacctctgcttttgcgtgtccagca

SEQ ID NO: 4438752 - DNA, 25 bp, Homo sapien
tcatcttgatcctctaggagcttga

SEQ ID NO: 4438753 - DNA, 25 bp, Homo sapien
tctgacctccaaaggggtggatctc

SEQ ID NO: 4438754 - DNA, 25 bp, Homo sapien
gagctttccttggagtgtatctttg

SEQ ID NO: 4438755 - DNA, 25 bp, Homo sapien
tccttggagtgtatctttgagctgt

SEQ ID NO: 4438756 - DNA, 25 bp, Homo sapien
gctgtttgcgtttgggtggtgagtc

SEQ ID NO: 4438757 - DNA, 25 bp, Homo sapien
ggcttttagtgaactgtttctcttc

SEQ ID NO: 4438758 - DNA, 25 bp, Homo sapien
tggcttttagtgaactgtttctctt

SEQ ID NO: 4438759 - DNA, 25 bp, Homo sapien
actggcttttagtgaactgtttctc

SEQ ID NO: 4438760 - DNA, 25 bp, Homo sapien
ttgaccgtagaaacgaatggtgtct

SEQ ID NO: 4438761 - DNA, 25 bp, Homo sapien
tttgaccgtagaaacgaatggtgtc

SEQ ID NO: 4438762 - DNA, 25 bp, Homo sapien
tcaggtttgaccgtagaaacgaatg

SEQ ID NO: 4438763 - DNA, 25 bp, Homo sapien
caggtttgaccgtagaaacgaatgg

SEQ ID NO: 4438764 - DNA, 25 bp, Homo sapien
ttgcattatcatgtggcagggtgct

SEQ ID NO: 4438765 - DNA, 25 bp, Homo sapien
gggagcctaccacattttgacaaga

SEQ ID NO: 4438766 - DNA, 25 bp, Homo sapien
tcagattcatgggtttagagggtgt

SEQ ID NO: 4438767 - DNA, 25 bp, Homo sapien
tctgggtatgattccaaagaatgca

SEQ ID NO: 4438768 - DNA, 25 bp, Homo sapien
tgtcatggaatagtggcctctactg

SEQ ID NO: 4438769 - DNA, 25 bp, Homo sapien
gtgtcatggaatagtggcctctact

SEQ ID NO: 4438770 - DNA, 25 bp, Homo sapien
cttgggctgtgccccaacatctccc

SEQ ID NO: 4438771 - DNA, 25 bp, Homo sapien
tgggctgtgccccaacatctccctg

SEQ ID NO: 4438772 - DNA, 25 bp, Homo sapien
ctgtgccccaacatctccctggcca

SEQ ID NO: 4438773 - DNA, 25 bp, Homo sapien
ggctgtgccccaacatctccctggc

SEQ ID NO: 4438774 - DNA, 25 bp, Homo sapien
gatcaatgtgctggcagatttgatg

SEQ ID NO: 4438775 - DNA, 25 bp, Homo sapien
caaggtggaagagtggaaaggcaaa

SEQ ID NO: 4438776 - DNA, 25 bp, Homo sapien
tgtcctcacaaggtggaagagtgga

SEQ ID NO: 4438777 - DNA, 25 bp, Homo sapien
ctcacaaggtggaagagtggaaagg

SEQ ID NO: 4438778 - DNA, 25 bp, Homo sapien
gaagatgctgacacctcaggctcat

SEQ ID NO: 4438779 - DNA, 25 bp, Homo sapien
agatgctgacacctcaggctcatcc

SEQ ID NO: 4438780 - DNA, 25 bp, Homo sapien
ggacagtagacccttttgtgcatgc

SEQ ID NO: 4438781 - DNA, 25 bp, Homo sapien
ccagggacagtagacccttttgtgc

SEQ ID NO: 4438782 - DNA, 25 bp, Homo sapien
ccacagggacaccaacagtggatcc

SEQ ID NO: 4438783 - DNA, 25 bp, Homo sapien
agggacaccaacagtggatcctctg

SEQ ID NO: 4438784 - DNA, 25 bp, Homo sapien
cacagggacaccaacagtggatcct

SEQ ID NO: 4438785 - DNA, 25 bp, Homo sapien
cagggacaccaacagtggatcctct

SEQ ID NO: 4438786 - DNA, 25 bp, Homo sapien
tctgtcactgtattacttccctcac

SEQ ID NO: 4438787 - DNA, 25 bp, Homo sapien
tctgtaggcagccatttatggaact

SEQ ID NO: 4438788 - DNA, 25 bp, Homo sapien
ccagctgacatggtaagtgcagatg

SEQ ID NO: 4438789 - DNA, 25 bp, Homo sapien
caggatcccagagattatcaagcag

SEQ ID NO: 4438790 - DNA, 25 bp, Homo sapien
gtgtgataggaagctgggtggacca

SEQ ID NO: 4438791 - DNA, 25 bp, Homo sapien
tggctgaatacgggctgatgacgat

SEQ ID NO: 4438792 - DNA, 25 bp, Homo sapien
ctccttgtggctgaatacgggctga

SEQ ID NO: 4438793 - DNA, 25 bp, Homo sapien
ccttgtggctgaatacgggctgatg

SEQ ID NO: 4438794 - DNA, 25 bp, Homo sapien
ttgtggctgaatacgggctgatgac

SEQ ID NO: 4438795 - DNA, 25 bp, Homo sapien
gctggcttgtacagcgatagatatt

SEQ ID NO: 4438796 - DNA, 25 bp, Homo sapien
tctctggagtttcagattgaaagac

SEQ ID NO: 4438797 - DNA, 25 bp, Homo sapien
gatattaatatctctggagtttcag

SEQ ID NO: 4438798 - DNA, 25 bp, Homo sapien
ggcttgtacagcgatagatattaat

SEQ ID NO: 4438799 - DNA, 25 bp, Homo sapien
ctttgcacagttccctagccccaag

SEQ ID NO: 4438800 - DNA, 25 bp, Homo sapien
agctactaaagtgataggaacatgc

SEQ ID NO: 4438801 - DNA, 25 bp, Homo sapien
aaaaccaaatcaagaggtgctgacg

SEQ ID NO: 4438802 - DNA, 25 bp, Homo sapien
ggtgctgacgtttgctctctttgat

SEQ ID NO: 4438803 - DNA, 25 bp, Homo sapien
gggtaggaaagacagcttcgaatcg

SEQ ID NO: 4438804 - DNA, 25 bp, Homo sapien
ggtaggaaagacagcttcgaatcgc

SEQ ID NO: 4438805 - DNA, 25 bp, Homo sapien
gtaggaaagacagcttcgaatcgcc

SEQ ID NO: 4438806 - DNA, 25 bp, Homo sapien
taggaaagacagcttcgaatcgcct

SEQ ID NO: 4438807 - DNA, 25 bp, Homo sapien
aactgaagctctcaagaccagactg

SEQ ID NO: 4438808 - DNA, 25 bp, Homo sapien
tgcagataacttcagccggcttgct

SEQ ID NO: 4438809 - DNA, 25 bp, Homo sapien
ggcttgcttcttttcaggactggct

SEQ ID NO: 4438810 - DNA, 25 bp, Homo sapien
ggactggcttctatgtgcagttaca

SEQ ID NO: 4438811 - DNA, 25 bp, Homo sapien
tgctatcttttgcaagtccaggtgt

SEQ ID NO: 4438812 - DNA, 25 bp, Homo sapien
gcttggcttattacgtatccattgc

SEQ ID NO: 4438813 - DNA, 25 bp, Homo sapien
gctttgatacacatataaattgtgc

SEQ ID NO: 4438814 - DNA, 25 bp, Homo sapien
caggtgtctgtagtggtctcaatca

SEQ ID NO: 4438815 - DNA, 25 bp, Homo sapien
ctctctatgtgaggccttcggctga

SEQ ID NO: 4438816 - DNA, 25 bp, Homo sapien
tcccatactaggcttggtgcacagc

SEQ ID NO: 4438817 - DNA, 25 bp, Homo sapien
catattcacattcctagtccaggtg

SEQ ID NO: 4438818 - DNA, 25 bp, Homo sapien
tagtccaggtgccttcattcttagg

SEQ ID NO: 4438819 - DNA, 25 bp, Homo sapien
ttttctacccgtgataagccacagc

SEQ ID NO: 4438820 - DNA, 25 bp, Homo sapien
ttttttctacccgtgataagccaca

SEQ ID NO: 4438821 - DNA, 25 bp, Homo sapien
ttaaacatttcctcagacttatgaa

SEQ ID NO: 4438822 - DNA, 25 bp, Homo sapien
tattttttctacccgtgataagcca

SEQ ID NO: 4438823 - DNA, 25 bp, Homo sapien
taagagaccaaatttcggaggccga

SEQ ID NO: 4438824 - DNA, 25 bp, Homo sapien
gaattatggacatggcctctgctgt

SEQ ID NO: 4438825 - DNA, 25 bp, Homo sapien
tcctaacagtgctacccttggtttg

SEQ ID NO: 4438826 - DNA, 25 bp, Homo sapien
tcatgacaaagatcagccaacacag

SEQ ID NO: 4438827 - DNA, 25 bp, Homo sapien
aatcataattccaaatgcttcacag

SEQ ID NO: 4438828 - DNA, 25 bp, Homo sapien
ttccaaatgcttcacagagcccttt

SEQ ID NO: 4438829 - DNA, 25 bp, Homo sapien
ccttggttctacaatcataattcca

SEQ ID NO: 4438830 - DNA, 25 bp, Homo sapien
caaatgcttcacagagccctttcat

SEQ ID NO: 4438831 - DNA, 25 bp, Homo sapien
caattgaatatgaatgggacgtcac

SEQ ID NO: 4438832 - DNA, 25 bp, Homo sapien
tatggcgactccgtttgcctgcaga

SEQ ID NO: 4438833 - DNA, 25 bp, Homo sapien
tacatagggctctggtagactggag

SEQ ID NO: 4438834 - DNA, 25 bp, Homo sapien
tggagccctcatggtcaagacgcca

SEQ ID NO: 4438835 - DNA, 25 bp, Homo sapien
tttttgcacggacatatatttttat

SEQ ID NO: 4438836 - DNA, 25 bp, Homo sapien
ttttgcacggacatatatttttatt

SEQ ID NO: 4438837 - DNA, 25 bp, Homo sapien
catgccataatagtcgcccattaaa

SEQ ID NO: 4438838 - DNA, 25 bp, Homo sapien
agaaagctcttacccattagcattg

SEQ ID NO: 4438839 - DNA, 25 bp, Homo sapien
gaataacactgctacgaacactcac

SEQ ID NO: 4438840 - DNA, 25 bp, Homo sapien
tacttccagtctgtagatctgccta

SEQ ID NO: 4438841 - DNA, 25 bp, Homo sapien
tagccagagtagtagtgtcttgagg

SEQ ID NO: 4438842 - DNA, 25 bp, Homo sapien
tcttgaggtccaaatgaattggaga

SEQ ID NO: 4438843 - DNA, 25 bp, Homo sapien
tgaggtccaaatgaattggagaata

SEQ ID NO: 4438844 - DNA, 25 bp, Homo sapien
catccagaaagccaagcaagaccag

SEQ ID NO: 4438845 - DNA, 25 bp, Homo sapien
atatgctgactctgtaatttttctg

SEQ ID NO: 4438846 - DNA, 25 bp, Homo sapien
catcctcttcccttttatccagtat

SEQ ID NO: 4438847 - DNA, 25 bp, Homo sapien
tccagtattcaaatatatgctgact

SEQ ID NO: 4438848 - DNA, 25 bp, Homo sapien
tctttagaagctttgaaaaatccat

SEQ ID NO: 4438849 - DNA, 25 bp, Homo sapien
agagattttcctgtagagatccccc

SEQ ID NO: 4438850 - DNA, 25 bp, Homo sapien
gagatccccctgattgctggtttcc

SEQ ID NO: 4438851 - DNA, 25 bp, Homo sapien
agaacttcgcagaggtttataagag

SEQ ID NO: 4438852 - DNA, 25 bp, Homo sapien
gcttttcaagtagaacttcgcagag

SEQ ID NO: 4438853 - DNA, 25 bp, Homo sapien
taccaggatgtaaactccgtgaggg

SEQ ID NO: 4438854 - DNA, 25 bp, Homo sapien
tttgcagatacgtcaggaaaacccc

SEQ ID NO: 4438855 - DNA, 25 bp, Homo sapien
tccagggctgataggaatgcctttc

SEQ ID NO: 4438856 - DNA, 25 bp, Homo sapien
tactcacgattgcatctccagggct

SEQ ID NO: 4438857 - DNA, 25 bp, Homo sapien
tgatccaaactccaagggctcttta

SEQ ID NO: 4438858 - DNA, 25 bp, Homo sapien
tattcccgatggctattgttccaag

SEQ ID NO: 4438859 - DNA, 25 bp, Homo sapien
tataaaatccccagcttcacaacag

SEQ ID NO: 4438860 - DNA, 25 bp, Homo sapien
catccttagcgaatagatacccttc

SEQ ID NO: 4438861 - DNA, 25 bp, Homo sapien
tctcagagattctgaaagcggacac

SEQ ID NO: 4438862 - DNA, 25 bp, Homo sapien
ccagggaaggcttgaggcagatcca

SEQ ID NO: 4438863 - DNA, 25 bp, Homo sapien
cttgttacttgcctctcagaggttt

SEQ ID NO: 4438864 - DNA, 25 bp, Homo sapien
actggtgtaagtttgcagggcagcc

SEQ ID NO: 4438865 - DNA, 25 bp, Homo sapien
tcgcatatccagaagtgatgtcaca

SEQ ID NO: 4438866 - DNA, 25 bp, Homo sapien
ggtgggccgtgtcgcatatccagaa

SEQ ID NO: 4438867 - DNA, 25 bp, Homo sapien
gcggaaaagaaattgcgtttgcagg

SEQ ID NO: 4438868 - DNA, 25 bp, Homo sapien
tgcgtttgcaggaggaagttgtttc

SEQ ID NO: 4438869 - DNA, 25 bp, Homo sapien
tacttagagaccaggcgggaacttg

SEQ ID NO: 4438870 - DNA, 25 bp, Homo sapien
aatttggacacgatccaggctgacc

SEQ ID NO: 4438871 - DNA, 25 bp, Homo sapien
ctgaaaccccattgagaagaaccct

SEQ ID NO: 4438872 - DNA, 25 bp, Homo sapien
caacagaggctgtatgcgagaggaa

SEQ ID NO: 4438873 - DNA, 25 bp, Homo sapien
aaaactggtctttgttgtgaagcca

SEQ ID NO: 4438874 - DNA, 25 bp, Homo sapien
gaagaagtgtgctcgaaatctgtga

SEQ ID NO: 4438875 - DNA, 25 bp, Homo sapien
tgaagccacggtcccaaacttgaac

SEQ ID NO: 4438876 - DNA, 25 bp, Homo sapien
tgaacatggttgctgaacaaacgcg

SEQ ID NO: 4438877 - DNA, 25 bp, Homo sapien
ttggcttagccgcccgggtggttgc

SEQ ID NO: 4438878 - DNA, 25 bp, Homo sapien
cctgcgagtttagtccgctctctcg

SEQ ID NO: 4438879 - DNA, 25 bp, Homo sapien
tctggtgatgaagcacgacatcgca

SEQ ID NO: 4438880 - DNA, 25 bp, Homo sapien
cagtcaggtctggtgatgaagcacg

SEQ ID NO: 4438881 - DNA, 25 bp, Homo sapien
gagtttagtccgctctctcggagga

SEQ ID NO: 4438882 - DNA, 25 bp, Homo sapien
ttgaaaccattttgctctgaaacac

SEQ ID NO: 4438883 - DNA, 25 bp, Homo sapien
tgctttgaaaccattttgctctgaa

SEQ ID NO: 4438884 - DNA, 25 bp, Homo sapien
gtttcttgctttgaaaccattttgc

SEQ ID NO: 4438885 - DNA, 25 bp, Homo sapien
gctttgaaaccattttgctctgaaa

SEQ ID NO: 4438886 - DNA, 25 bp, Homo sapien
tggtgctaccccaaggatgtcccat

SEQ ID NO: 4438887 - DNA, 25 bp, Homo sapien
ttgaatgcacgtatattctggagca

SEQ ID NO: 4438888 - DNA, 25 bp, Homo sapien
ctggtcctggtagactggtgctacc

SEQ ID NO: 4438889 - DNA, 25 bp, Homo sapien
tggtgcaatgaatttgagaagcttc

SEQ ID NO: 4438890 - DNA, 25 bp, Homo sapien
ctgctgctgaatcaatgtggggaac

SEQ ID NO: 4438891 - DNA, 25 bp, Homo sapien
gctgctgaatcaatgtggggaactg

SEQ ID NO: 4438892 - DNA, 25 bp, Homo sapien
ctgaatcaatgtggggaactgtgga

SEQ ID NO: 4438893 - DNA, 25 bp, Homo sapien
tcttcctggatctggccacactgct

SEQ ID NO: 4438894 - DNA, 25 bp, Homo sapien
ttgattctgggtacacgggttaatg

SEQ ID NO: 4438895 - DNA, 25 bp, Homo sapien
acacgggttaatgtatgctgctgcc

SEQ ID NO: 4438896 - DNA, 25 bp, Homo sapien
ctgggtacacgggttaatgtatgct

SEQ ID NO: 4438897 - DNA, 25 bp, Homo sapien
ggtacacgggttaatgtatgctgct

SEQ ID NO: 4438898 - DNA, 25 bp, Homo sapien
caatgggtcatacaaatagctttgc

SEQ ID NO: 4438899 - DNA, 25 bp, Homo sapien
ggacaatgggtcatacaaatagctt

SEQ ID NO: 4438900 - DNA, 25 bp, Homo sapien
tttggacaatgggtcatacaaatag

SEQ ID NO: 4438901 - DNA, 25 bp, Homo sapien
aggaggcatttggacaatgggtcat

SEQ ID NO: 4438902 - DNA, 25 bp, Homo sapien
gagcttttcattcaggtggaaataa

SEQ ID NO: 4438903 - DNA, 25 bp, Homo sapien
cagactgagcttttcattcaggtgg

SEQ ID NO: 4438904 - DNA, 25 bp, Homo sapien
tgttgttgcggccaaagcctctttc

SEQ ID NO: 4438905 - DNA, 25 bp, Homo sapien
gactctcggtgtctttagaactgac

SEQ ID NO: 4438906 - DNA, 25 bp, Homo sapien
ctacttatgcaaaggctttggttcc

SEQ ID NO: 4438907 - DNA, 25 bp, Homo sapien
ttgcggagaacttgcacacgctttc

SEQ ID NO: 4438908 - DNA, 25 bp, Homo sapien
gattcgtacattcccctgaggagca

SEQ ID NO: 4438909 - DNA, 25 bp, Homo sapien
cagagattcatcattttgcggagaa

SEQ ID NO: 4438910 - DNA, 25 bp, Homo sapien
ctccttgattgttggtgcctgtacc

SEQ ID NO: 4438911 - DNA, 25 bp, Homo sapien
tttctccttgattgttggtgcctgt

SEQ ID NO: 4438912 - DNA, 25 bp, Homo sapien
caattttctccttgattgttggtgc

SEQ ID NO: 4438913 - DNA, 25 bp, Homo sapien
gcaattttctccttgattgttggtg

SEQ ID NO: 4438914 - DNA, 25 bp, Homo sapien
ttccaggtgagcaggactcgcccac

SEQ ID NO: 4438915 - DNA, 25 bp, Homo sapien
tgttccaggtgagcaggactcgccc

SEQ ID NO: 4438916 - DNA, 25 bp, Homo sapien
tccaggtgagcaggactcgcccacc

SEQ ID NO: 4438917 - DNA, 25 bp, Homo sapien
gttccaggtgagcaggactcgccca

SEQ ID NO: 4438918 - DNA, 25 bp, Homo sapien
gacttagcgctaatgaaagttttct

SEQ ID NO: 4438919 - DNA, 25 bp, Homo sapien
gccattgacgacttagcgctaatga

SEQ ID NO: 4438920 - DNA, 25 bp, Homo sapien
aaaagccattgacgacttagcgcta

SEQ ID NO: 4438921 - DNA, 25 bp, Homo sapien
gacgacttagcgctaatgaaagttt

SEQ ID NO: 4438922 - DNA, 25 bp, Homo sapien
tgcagaaatagccatagctgcgcaa

SEQ ID NO: 4438923 - DNA, 25 bp, Homo sapien
ccagaacactggaaacggtctgctg

SEQ ID NO: 4438924 - DNA, 25 bp, Homo sapien
gctggaatgcagaaatagccatagc

SEQ ID NO: 4438925 - DNA, 25 bp, Homo sapien
tacccagaacactggaaacggtctg

SEQ ID NO: 4438926 - DNA, 25 bp, Homo sapien
taggtgcctgaagttcttcagttag

SEQ ID NO: 4438927 - DNA, 25 bp, Homo sapien
gcacctcgtaatactgggagacagt

SEQ ID NO: 4438928 - DNA, 25 bp, Homo sapien
gctgacagcaccagctaagttggag

SEQ ID NO: 4438929 - DNA, 25 bp, Homo sapien
gagacagtgtttaatcttaggtgcc

SEQ ID NO: 4438930 - DNA, 25 bp, Homo sapien
tctcaagtgctgaattatagcgtcc

SEQ ID NO: 4438931 - DNA, 25 bp, Homo sapien
tgaattatagcgtccattaaggagt

SEQ ID NO: 4438932 - DNA, 25 bp, Homo sapien
tggtctgaggctctattctcaagtg

SEQ ID NO: 4438933 - DNA, 25 bp, Homo sapien
gcgtccattaaggagttcagaagat

SEQ ID NO: 4438934 - DNA, 25 bp, Homo sapien
gcgcaacatctacttctgccttttt

SEQ ID NO: 4438935 - DNA, 25 bp, Homo sapien
gctgggcaaggtagcagcgcaacat

SEQ ID NO: 4438936 - DNA, 25 bp, Homo sapien
taggcactctgggaatcgaaggcct

SEQ ID NO: 4438937 - DNA, 25 bp, Homo sapien
ggcactctgggaatcgaaggcctga

SEQ ID NO: 4438938 - DNA, 25 bp, Homo sapien
gcaactcgaagtcatgtgcagcata

SEQ ID NO: 4438939 - DNA, 25 bp, Homo sapien
ggcctccgggcgaatcactgcaact

SEQ ID NO: 4438940 - DNA, 25 bp, Homo sapien
tgtgggtaggactaaaagccgcggc

SEQ ID NO: 4438941 - DNA, 25 bp, Homo sapien
gaggcgaagtagtccctcgcgactt

SEQ ID NO: 4438942 - DNA, 25 bp, Homo sapien
tccgccgtggcgaccccagcctctt

SEQ ID NO: 4438943 - DNA, 25 bp, Homo sapien
gtggatgcctcacccagaacggtac

SEQ ID NO: 4438944 - DNA, 25 bp, Homo sapien
ggtggcggcagcaacctccgccgtg

SEQ ID NO: 4438945 - DNA, 25 bp, Homo sapien
ggtggatgcctcacccagaacggta

SEQ ID NO: 4438946 - DNA, 25 bp, Homo sapien
gggggcagcggcacaggggcctcac

SEQ ID NO: 4438947 - DNA, 25 bp, Homo sapien
cagcagcaccgaggggcaggaggca

SEQ ID NO: 4438948 - DNA, 25 bp, Homo sapien
ggcagcggcacaggggcctcaccat

SEQ ID NO: 4438949 - DNA, 25 bp, Homo sapien
cgcgggggcagcggcacaggggcct

SEQ ID NO: 4438950 - DNA, 25 bp, Homo sapien
cgtgatccgatctggagatggagga

SEQ ID NO: 4438951 - DNA, 25 bp, Homo sapien
tccgatctggagatggaggagcaac

SEQ ID NO: 4438952 - DNA, 25 bp, Homo sapien
tgatccgatctggagatggaggagc

SEQ ID NO: 4438953 - DNA, 25 bp, Homo sapien
ggagcaacagcaggcgggggagcaa

SEQ ID NO: 4438954 - DNA, 25 bp, Homo sapien
gttgtcagaagtcgccgtctcctcg

SEQ ID NO: 4438955 - DNA, 25 bp, Homo sapien
cagaagtcgccgtctcctcgctcat

SEQ ID NO: 4438956 - DNA, 25 bp, Homo sapien
tgtcagaagtcgccgtctcctcgct

SEQ ID NO: 4438957 - DNA, 25 bp, Homo sapien
tcgttgtcagaagtcgccgtctcct

SEQ ID NO: 4438958 - DNA, 25 bp, Homo sapien
ggctaaagaaatcagctatctccag

SEQ ID NO: 4438959 - DNA, 25 bp, Homo sapien
tctccagggtcgcaagctttccggc

SEQ ID NO: 4438960 - DNA, 25 bp, Homo sapien
ctttccggcacccaagtttcggatg

SEQ ID NO: 4438961 - DNA, 25 bp, Homo sapien
gaagatgcaccgaactctccagggt

SEQ ID NO: 4438962 - DNA, 25 bp, Homo sapien
tacacccgctcagcagaagcgtgtg

SEQ ID NO: 4438963 - DNA, 25 bp, Homo sapien
cattatttctccacgcagctgtcac

SEQ ID NO: 4438964 - DNA, 25 bp, Homo sapien
ggtaaactctagctcaacatcgccc

SEQ ID NO: 4438965 - DNA, 25 bp, Homo sapien
tgagggcgattcacaaaaagagaca

SEQ ID NO: 4438966 - DNA, 25 bp, Homo sapien
aaccacatttgtagagcatttgcca

SEQ ID NO: 4438967 - DNA, 25 bp, Homo sapien
tatcaaaaataactcaccactgggt

SEQ ID NO: 4438968 - DNA, 25 bp, Homo sapien
ggaagtgtttctggctaacgtgaac

SEQ ID NO: 4438969 - DNA, 25 bp, Homo sapien
gctgatttttacacaggccaactga

SEQ ID NO: 4438970 - DNA, 25 bp, Homo sapien
caaacatcccaacagcactttagga

SEQ ID NO: 4438971 - DNA, 25 bp, Homo sapien
taccttcttgtggatataacacggg

SEQ ID NO: 4438972 - DNA, 25 bp, Homo sapien
cactttaggacagtttttaagcctg

SEQ ID NO: 4438973 - DNA, 25 bp, Homo sapien
tcagatacaccacataactcagagg

SEQ ID NO: 4438974 - DNA, 25 bp, Homo sapien
cagagaaaaggctaaattgttacac

SEQ ID NO: 4438975 - DNA, 25 bp, Homo sapien
tcaagttcaagttatacaacaccag

SEQ ID NO: 4438976 - DNA, 25 bp, Homo sapien
cacccttggcactaatgtggaacca

SEQ ID NO: 4438977 - DNA, 25 bp, Homo sapien
tataaaatcacggaatctgctgctg

SEQ ID NO: 4438978 - DNA, 25 bp, Homo sapien
tactactcttacatggggtgaagca

SEQ ID NO: 4438979 - DNA, 25 bp, Homo sapien
aaactactactcttacatggggtga

SEQ ID NO: 4438980 - DNA, 25 bp, Homo sapien
ttacatggggtgaagcattttttaa

SEQ ID NO: 4438981 - DNA, 25 bp, Homo sapien
ctactcttacatggggtgaagcatt

SEQ ID NO: 4438982 - DNA, 25 bp, Homo sapien
cattcttagactatctcaagggaaa

SEQ ID NO: 4438983 - DNA, 25 bp, Homo sapien
catacactgaacataatgtagccac

SEQ ID NO: 4438984 - DNA, 25 bp, Homo sapien
caggatggtatgcaacattgtttaa

SEQ ID NO: 4438985 - DNA, 25 bp, Homo sapien
gctacaattgtacccactgtgcaat

SEQ ID NO: 4438986 - DNA, 25 bp, Homo sapien
tgtatccaaaaaggtattgcctttc

SEQ ID NO: 4438987 - DNA, 25 bp, Homo sapien
actgtatccaaaaaggtattgcctt

SEQ ID NO: 4438988 - DNA, 25 bp, Homo sapien
acaactgtatccaaaaaggtattgc

SEQ ID NO: 4438989 - DNA, 25 bp, Homo sapien
caaacaactgtatccaaaaaggtat

SEQ ID NO: 4438990 - DNA, 25 bp, Homo sapien
acaattcttccaaagtagaccaggg

SEQ ID NO: 4438991 - DNA, 25 bp, Homo sapien
gatagactgtcctaggccttgctcc

SEQ ID NO: 4438992 - DNA, 25 bp, Homo sapien
gcgcatccgctacctttagtgttag

SEQ ID NO: 4438993 - DNA, 25 bp, Homo sapien
actttactctcttgcgtggccatgg

SEQ ID NO: 4438994 - DNA, 25 bp, Homo sapien
aattggatgatctgctattagccag

SEQ ID NO: 4438995 - DNA, 25 bp, Homo sapien
cacagttcggactcaaaagcagtag

SEQ ID NO: 4438996 - DNA, 25 bp, Homo sapien
gctagaagccagtctgtctcatcca

SEQ ID NO: 4438997 - DNA, 25 bp, Homo sapien
tgctagggcctagtacacaaaacac

SEQ ID NO: 4438998 - DNA, 25 bp, Homo sapien
cagttccccccagtacaccttccag

SEQ ID NO: 4438999 - DNA, 25 bp, Homo sapien
ttccgactctggtgctgcaagatac

SEQ ID NO: 4439000 - DNA, 25 bp, Homo sapien
aatgttagcagctttcattatcatt

SEQ ID NO: 4439001 - DNA, 25 bp, Homo sapien
tatcatttccgactctggtgctgca

SEQ ID NO: 4439002 - DNA, 25 bp, Homo sapien
ctttcattatcatttccgactctgg

SEQ ID NO: 4439003 - DNA, 25 bp, Homo sapien
tatgtatctagggaaaaagagccac

SEQ ID NO: 4439004 - DNA, 25 bp, Homo sapien
taagaaggtccaagtttacatccca

SEQ ID NO: 4439005 - DNA, 25 bp, Homo sapien
tatgataccagaaaggacgtgctga

SEQ ID NO: 4439006 - DNA, 25 bp, Homo sapien
agggttaataacaccaccagcggcg

SEQ ID NO: 4439007 - DNA, 25 bp, Homo sapien
tagcaataaaatcggctttaccctg

SEQ ID NO: 4439008 - DNA, 25 bp, Homo sapien
gaactaggtatcgactttacatcta

SEQ ID NO: 4439009 - DNA, 25 bp, Homo sapien
tgacatgcataaaaatcaaaaggcc

SEQ ID NO: 4439010 - DNA, 25 bp, Homo sapien
tgtaagagctcatactgaactaggt

SEQ ID NO: 4439011 - DNA, 25 bp, Homo sapien
atgtaaaccaaccaacactcattcc

SEQ ID NO: 4439012 - DNA, 25 bp, Homo sapien
catgcatggagtattatggacagta

SEQ ID NO: 4439013 - DNA, 25 bp, Homo sapien
ttatggaacatgcatggagtattat

SEQ ID NO: 4439014 - DNA, 25 bp, Homo sapien
ggaacatgcatggagtattatggac

SEQ ID NO: 4439015 - DNA, 25 bp, Homo sapien
tcacgcacggaaagagtccaaactc

SEQ ID NO: 4439016 - DNA, 25 bp, Homo sapien
tcagtaggcgtgaccataggcacct

SEQ ID NO: 4439017 - DNA, 25 bp, Homo sapien
aatcaggtcatgtgagtcttgctca

SEQ ID NO: 4439018 - DNA, 25 bp, Homo sapien
caagagccacatatttcacgcacgg

SEQ ID NO: 4439019 - DNA, 25 bp, Homo sapien
cccaactgctagacaagtagaaggc

SEQ ID NO: 4439020 - DNA, 25 bp, Homo sapien
tagctcattggctgacacatgtatg

SEQ ID NO: 4439021 - DNA, 25 bp, Homo sapien
taaagactctaaccatacactgcac

SEQ ID NO: 4439022 - DNA, 25 bp, Homo sapien
tgtttgatagtcaagctccttagag

SEQ ID NO: 4439023 - DNA, 25 bp, Homo sapien
tatatagtggtatcccacagcgttt

SEQ ID NO: 4439024 - DNA, 25 bp, Homo sapien
aaaaatccttatgccgaacacagag

SEQ ID NO: 4439025 - DNA, 25 bp, Homo sapien
tagtccaaagagaataagacacatg

SEQ ID NO: 4439026 - DNA, 25 bp, Homo sapien
taacgggtcacaggataggtacatg

SEQ ID NO: 4439027 - DNA, 25 bp, Homo sapien
aatagatgcaaagatcaggaattag

SEQ ID NO: 4439028 - DNA, 25 bp, Homo sapien
aaaatagatgcaaagatcaggaatt

SEQ ID NO: 4439029 - DNA, 25 bp, Homo sapien
aaatagatgcaaagatcaggaatta

SEQ ID NO: 4439030 - DNA, 25 bp, Homo sapien
cctgatgagggactttgaagacagt

SEQ ID NO: 4439031 - DNA, 25 bp, Homo sapien
ggtaaccatccaccacttgagtcat

SEQ ID NO: 4439032 - DNA, 25 bp, Homo sapien
cctgagtcgctctccacggataaaa

SEQ ID NO: 4439033 - DNA, 25 bp, Homo sapien
tgaagacagtgacgctgcttagtcc

SEQ ID NO: 4439034 - DNA, 25 bp, Homo sapien
ggaaggctttcgagatgatttagga

SEQ ID NO: 4439035 - DNA, 25 bp, Homo sapien
tgtagcatgggtgaatcataaactc

SEQ ID NO: 4439036 - DNA, 25 bp, Homo sapien
aagcattagtatatggcagatccca

SEQ ID NO: 4439037 - DNA, 25 bp, Homo sapien
cagatcccattttatccaaggccag

SEQ ID NO: 4439038 - DNA, 25 bp, Homo sapien
tctcctcaggcacatatagaacagt

SEQ ID NO: 4439039 - DNA, 25 bp, Homo sapien
ggtaagcaacataggatcactgaat

SEQ ID NO: 4439040 - DNA, 25 bp, Homo sapien
tgaaagccaattatgcagagcagtg

SEQ ID NO: 4439041 - DNA, 25 bp, Homo sapien
gtaacataaggcaaccagtctggag

SEQ ID NO: 4439042 - DNA, 25 bp, Homo sapien
aataatttacatgtatccagagctt

SEQ ID NO: 4439043 - DNA, 25 bp, Homo sapien
ggtagtgtcataaattactgcaaca

SEQ ID NO: 4439044 - DNA, 25 bp, Homo sapien
tgagtcggcactttgctaaagcatt

SEQ ID NO: 4439045 - DNA, 25 bp, Homo sapien
cacgattaagttctagaattcaagg

SEQ ID NO: 4439046 - DNA, 25 bp, Homo sapien
cggatacctctatcaaaagccctag

SEQ ID NO: 4439047 - DNA, 25 bp, Homo sapien
gaaatatcctctatagctcttcgga

SEQ ID NO: 4439048 - DNA, 25 bp, Homo sapien
caatcttccagtggtgaaatgttgg

SEQ ID NO: 4439049 - DNA, 25 bp, Homo sapien
cagcaggactttgaaacgtaagacc

SEQ ID NO: 4439050 - DNA, 25 bp, Homo sapien
gcttcattttttgattcggggcatc

SEQ ID NO: 4439051 - DNA, 25 bp, Homo sapien
ttgtaagtcatctgccccttcagct

SEQ ID NO: 4439052 - DNA, 25 bp, Homo sapien
caagcttccagtaagtctcttcgga

SEQ ID NO: 4439053 - DNA, 25 bp, Homo sapien
gacattgttgctaagctttcagcca

SEQ ID NO: 4439054 - DNA, 25 bp, Homo sapien
cataagcagtaagaagaaatcaggc

SEQ ID NO: 4439055 - DNA, 25 bp, Homo sapien
gaaatcaggcaaacagcttcaacct

SEQ ID NO: 4439056 - DNA, 25 bp, Homo sapien
gctggttgttggcagatgacctcaa

SEQ ID NO: 4439057 - DNA, 25 bp, Homo sapien
taggaacagcctacactcaggaaga

SEQ ID NO: 4439058 - DNA, 25 bp, Homo sapien
cattccgtgtggtagaagtgagtcc

SEQ ID NO: 4439059 - DNA, 25 bp, Homo sapien
catgtggttgttgctagaaggctcc

SEQ ID NO: 4439060 - DNA, 25 bp, Homo sapien
ggtacatgtcaattcctctgcccaa

SEQ ID NO: 4439061 - DNA, 25 bp, Homo sapien
tctgagactcaagaatggtgacaaa

SEQ ID NO: 4439062 - DNA, 25 bp, Homo sapien
ttcaattaggaaggtagagccctca

SEQ ID NO: 4439063 - DNA, 25 bp, Homo sapien
tgaaccagtgctatactccgaatgt

SEQ ID NO: 4439064 - DNA, 25 bp, Homo sapien
taaatgttactaggcggcagagtct

SEQ ID NO: 4439065 - DNA, 25 bp, Homo sapien
caaagaatagaaatactgggtcaca

SEQ ID NO: 4439066 - DNA, 25 bp, Homo sapien
gacctctgtgtaccaatgatagcta

SEQ ID NO: 4439067 - DNA, 25 bp, Homo sapien
tatcaacctactccgtatgaagaga

SEQ ID NO: 4439068 - DNA, 25 bp, Homo sapien
aaaaaggtgatccttcactagagaa

SEQ ID NO: 4439069 - DNA, 25 bp, Homo sapien
taaggctcactggtaacaactgtct

SEQ ID NO: 4439070 - DNA, 25 bp, Homo sapien
catgtagactcttctggcattcaga

SEQ ID NO: 4439071 - DNA, 25 bp, Homo sapien
aagggagaaggtcttatatttgagc

SEQ ID NO: 4439072 - DNA, 25 bp, Homo sapien
caagttagcttttagtgatgatctc

SEQ ID NO: 4439073 - DNA, 25 bp, Homo sapien
tagcttttagtgatgatctcataaa

SEQ ID NO: 4439074 - DNA, 25 bp, Homo sapien
gttagcttttagtgatgatctcata

SEQ ID NO: 4439075 - DNA, 25 bp, Homo sapien
cttttagtgatgatctcataaagac

SEQ ID NO: 4439076 - DNA, 25 bp, Homo sapien
actgtacagtgtatgttccaaaacc

SEQ ID NO: 4439077 - DNA, 25 bp, Homo sapien
aaaatgtagtaaatccatagagtgg

SEQ ID NO: 4439078 - DNA, 25 bp, Homo sapien
ccaaaacctcataatttattagcag

SEQ ID NO: 4439079 - DNA, 25 bp, Homo sapien
caaatattcatcaactaatgaacgg

SEQ ID NO: 4439080 - DNA, 25 bp, Homo sapien
tgggactttaggcttccacattcct

SEQ ID NO: 4439081 - DNA, 25 bp, Homo sapien
tttgccgctgtacgtattccatact

SEQ ID NO: 4439082 - DNA, 25 bp, Homo sapien
tccttggatatttgccgctgtacgt

SEQ ID NO: 4439083 - DNA, 25 bp, Homo sapien
tattttgggactttaggcttccaca

SEQ ID NO: 4439084 - DNA, 25 bp, Homo sapien
cagctctggcaatcttttagactca

SEQ ID NO: 4439085 - DNA, 25 bp, Homo sapien
aattctaggtctgagctaaaggtgg

SEQ ID NO: 4439086 - DNA, 25 bp, Homo sapien
tctagtacaattcaactatatggag

SEQ ID NO: 4439087 - DNA, 25 bp, Homo sapien
cagcgtttaagcacataggcagcaa

SEQ ID NO: 4439088 - DNA, 25 bp, Homo sapien
gatgtctgtagtctgcatagcgacg

SEQ ID NO: 4439089 - DNA, 25 bp, Homo sapien
taccacagagtctttgggtgaactt

SEQ ID NO: 4439090 - DNA, 25 bp, Homo sapien
catagcgacgtattaagatatctcg

SEQ ID NO: 4439091 - DNA, 25 bp, Homo sapien
tcatcttgaaagctgacatgtctga

SEQ ID NO: 4439092 - DNA, 25 bp, Homo sapien
tatacgcagcgagaacgttcaccat

SEQ ID NO: 4439093 - DNA, 25 bp, Homo sapien
gctagtgtcacacgaacagggatca

SEQ ID NO: 4439094 - DNA, 25 bp, Homo sapien
taaacctttcctggcagtatacgca

SEQ ID NO: 4439095 - DNA, 25 bp, Homo sapien
ccagggctaaccatcgcaagcagaa

SEQ ID NO: 4439096 - DNA, 25 bp, Homo sapien
tctcaaagggacgtagcagcacata

SEQ ID NO: 4439097 - DNA, 25 bp, Homo sapien
cacattctcaaagggacgtagcagc

SEQ ID NO: 4439098 - DNA, 25 bp, Homo sapien
cattctcaaagggacgtagcagcac

SEQ ID NO: 4439099 - DNA, 25 bp, Homo sapien
atggcacattctcaaagggacgtag

SEQ ID NO: 4439100 - DNA, 25 bp, Homo sapien
tccagcagctttatgtttcccacca

SEQ ID NO: 4439101 - DNA, 25 bp, Homo sapien
catccagcagctttatgtttcccac

SEQ ID NO: 4439102 - DNA, 25 bp, Homo sapien
tcatccagcagctttatgtttccca

SEQ ID NO: 4439103 - DNA, 25 bp, Homo sapien
ccagcagctttatgtttcccaccac

SEQ ID NO: 4439104 - DNA, 25 bp, Homo sapien
aaataagtgttacgttcccatcaga

SEQ ID NO: 4439105 - DNA, 25 bp, Homo sapien
gattgaaatcaactgtcccctagtg

SEQ ID NO: 4439106 - DNA, 25 bp, Homo sapien
aaagttaggcatggcgtgaaacgcc

SEQ ID NO: 4439107 - DNA, 25 bp, Homo sapien
tccatgtgtgggctcaatgatacca

SEQ ID NO: 4439108 - DNA, 25 bp, Homo sapien
tacgtgaagatctcaacatgaagct

SEQ ID NO: 4439109 - DNA, 25 bp, Homo sapien
gaaccaggagttgcactatactgat

SEQ ID NO: 4439110 - DNA, 25 bp, Homo sapien
tacacaatgttgtcagttcaagctg

SEQ ID NO: 4439111 - DNA, 25 bp, Homo sapien
gaatgggacggcaaaatcttagcag

SEQ ID NO: 4439112 - DNA, 25 bp, Homo sapien
gaaagcaaacgacactacacactgg

SEQ ID NO: 4439113 - DNA, 25 bp, Homo sapien
gaatcttttataaccacctggctgc

SEQ ID NO: 4439114 - DNA, 25 bp, Homo sapien
ccattaagtttgattgccagtccca

SEQ ID NO: 4439115 - DNA, 25 bp, Homo sapien
aaattctccctgactggcggaagga

SEQ ID NO: 4439116 - DNA, 25 bp, Homo sapien
ggtattaacttgatgtgaagaatgt

SEQ ID NO: 4439117 - DNA, 25 bp, Homo sapien
ttgtgggtattaacttgatgtgaag

SEQ ID NO: 4439118 - DNA, 25 bp, Homo sapien
tattaacttgatgtgaagaatgtaa

SEQ ID NO: 4439119 - DNA, 25 bp, Homo sapien
tgggtattaacttgatgtgaagaat

SEQ ID NO: 4439120 - DNA, 25 bp, Homo sapien
tgatagccaagctagaaccctagtt

SEQ ID NO: 4439121 - DNA, 25 bp, Homo sapien
ctttaaggagcactatgtgcatgac

SEQ ID NO: 4439122 - DNA, 25 bp, Homo sapien
gactacagctttcataccattgatg

SEQ ID NO: 4439123 - DNA, 25 bp, Homo sapien
catttcagatctcactaaaactgca

SEQ ID NO: 4439124 - DNA, 25 bp, Homo sapien
tatttccaggttaacagaaccagta

SEQ ID NO: 4439125 - DNA, 25 bp, Homo sapien
aacatgtttcagtagtagtcctggc

SEQ ID NO: 4439126 - DNA, 25 bp, Homo sapien
ttcctaattgcacatagcatcttgg

SEQ ID NO: 4439127 - DNA, 25 bp, Homo sapien
tactaatctcattgtgggaaacatg

SEQ ID NO: 4439128 - DNA, 25 bp, Homo sapien
ttcccagtactcagggttaaagtca

SEQ ID NO: 4439129 - DNA, 25 bp, Homo sapien
tcccagtactcagggttaaagtcat

SEQ ID NO: 4439130 - DNA, 25 bp, Homo sapien
tgtttggggatacagtagtgtagaa

SEQ ID NO: 4439131 - DNA, 25 bp, Homo sapien
aatggttattaaatctgagaataag

SEQ ID NO: 4439132 - DNA, 25 bp, Homo sapien
gactgtgtggaatttaatggttatt

SEQ ID NO: 4439133 - DNA, 25 bp, Homo sapien
agttctttcaaggtgtgcaaatggg

SEQ ID NO: 4439134 - DNA, 25 bp, Homo sapien
gggtgactgtgtggaatttaatggt

SEQ ID NO: 4439135 - DNA, 25 bp, Homo sapien
gatctgatcatcactaggcattccc

SEQ ID NO: 4439136 - DNA, 25 bp, Homo sapien
gggatctgatcatcactaggcattc

SEQ ID NO: 4439137 - DNA, 25 bp, Homo sapien
atcactaggcattcccctgaactgc

SEQ ID NO: 4439138 - DNA, 25 bp, Homo sapien
tgatcatcactaggcattcccctga

SEQ ID NO: 4439139 - DNA, 25 bp, Homo sapien
tgtgtgaacctgtgtattcccaagc

SEQ ID NO: 4439140 - DNA, 25 bp, Homo sapien
ggccattcactgattctatccagtt

SEQ ID NO: 4439141 - DNA, 25 bp, Homo sapien
aggatgctggttaatatcccacaag

SEQ ID NO: 4439142 - DNA, 25 bp, Homo sapien
cactgattctatccagttgtgtgaa

SEQ ID NO: 4439143 - DNA, 25 bp, Homo sapien
aggtcagttggaaacatctctggct

SEQ ID NO: 4439144 - DNA, 25 bp, Homo sapien
acagagagtcccagaatagatggag

SEQ ID NO: 4439145 - DNA, 25 bp, Homo sapien
caggggtagggaatatctggaccct

SEQ ID NO: 4439146 - DNA, 25 bp, Homo sapien
gagagtcccagaatagatggagaga

SEQ ID NO: 4439147 - DNA, 25 bp, Homo sapien
gagtcccagaatagatggagagaca

SEQ ID NO: 4439148 - DNA, 25 bp, Homo sapien
tgttccattctttcaggcccagatg

SEQ ID NO: 4439149 - DNA, 25 bp, Homo sapien
gcccagatgtggcctgaaaatccat

SEQ ID NO: 4439150 - DNA, 25 bp, Homo sapien
tgtccataccattcattcctgttcc

SEQ ID NO: 4439151 - DNA, 25 bp, Homo sapien
cagcccacataagcttctgtccata

SEQ ID NO: 4439152 - DNA, 25 bp, Homo sapien
aactccaccaggtatcctgtgtcag

SEQ ID NO: 4439153 - DNA, 25 bp, Homo sapien
gatttctgaaactccaccaggtatc

SEQ ID NO: 4439154 - DNA, 25 bp, Homo sapien
tccaccaggtatcctgtgtcagctc

SEQ ID NO: 4439155 - DNA, 25 bp, Homo sapien
tctgaaactccaccaggtatcctgt

SEQ ID NO: 4439156 - DNA, 25 bp, Homo sapien
ccaccatttagagtgcagatcttca

SEQ ID NO: 4439157 - DNA, 25 bp, Homo sapien
caatgagtcatcacaagtacctttt

SEQ ID NO: 4439158 - DNA, 25 bp, Homo sapien
gagtcatcacaagtaccttttatgg

SEQ ID NO: 4439159 - DNA, 25 bp, Homo sapien
actgtgccaccgagccaccatttag

SEQ ID NO: 4439160 - DNA, 25 bp, Homo sapien
tgaagtaggattaggaaagtgggga

SEQ ID NO: 4439161 - DNA, 25 bp, Homo sapien
ctgaagtaggattaggaaagtgggg

SEQ ID NO: 4439162 - DNA, 25 bp, Homo sapien
caggaactgaacatcggttctggat

SEQ ID NO: 4439163 - DNA, 25 bp, Homo sapien
gagcaggaaacgtcttctgtacagt

SEQ ID NO: 4439164 - DNA, 25 bp, Homo sapien
catcggttctggattggaggctgct

SEQ ID NO: 4439165 - DNA, 25 bp, Homo sapien
gaaacgtcttctgtacagtgtgtgt

SEQ ID NO: 4439166 - DNA, 25 bp, Homo sapien
ccagccccgaggcaataaacacttc

SEQ ID NO: 4439167 - DNA, 25 bp, Homo sapien
gaagaagggcgcaaaggttcccagc

SEQ ID NO: 4439168 - DNA, 25 bp, Homo sapien
ctgaagaagggcgcaaaggttccca

SEQ ID NO: 4439169 - DNA, 25 bp, Homo sapien
gttcccagccccgaggcaataaaca

SEQ ID NO: 4439170 - DNA, 25 bp, Homo sapien
cgggtctggccggtaactgcctgag

SEQ ID NO: 4439171 - DNA, 25 bp, Homo sapien
aaactagcgtcaccgcgccaaggtt

SEQ ID NO: 4439172 - DNA, 25 bp, Homo sapien
ggtcctttggcccagagctgttcgg

SEQ ID NO: 4439173 - DNA, 25 bp, Homo sapien
agctgttcggcgctctaagtagccc

SEQ ID NO: 4439174 - DNA, 25 bp, Homo sapien
cagcacgtctccctccatcgtcggt

SEQ ID NO: 4439175 - DNA, 25 bp, Homo sapien
ctccagtgtgtccagcacgtctccc

SEQ ID NO: 4439176 - DNA, 25 bp, Homo sapien
agcacgtctccctccatcgtcggtt

SEQ ID NO: 4439177 - DNA, 25 bp, Homo sapien
acgtctccctccatcgtcggttggg

SEQ ID NO: 4439178 - DNA, 25 bp, Homo sapien
ctgtaaataccagccggcagcagac

SEQ ID NO: 4439179 - DNA, 25 bp, Homo sapien
cattctgcactgtaaataccagccg

SEQ ID NO: 4439180 - DNA, 25 bp, Homo sapien
ataccagccggcagcagacttgcag

SEQ ID NO: 4439181 - DNA, 25 bp, Homo sapien
ggcagcagacttgcagcctgcgcga

SEQ ID NO: 4439182 - DNA, 25 bp, Homo sapien
tttccaaaatctttctccagccagc

SEQ ID NO: 4439183 - DNA, 25 bp, Homo sapien
tccaaaatctttctccagccagctg

SEQ ID NO: 4439184 - DNA, 25 bp, Homo sapien
ttccaaaatctttctccagccagct

SEQ ID NO: 4439185 - DNA, 25 bp, Homo sapien
ctttccaaaatctttctccagccag

SEQ ID NO: 4439186 - DNA, 25 bp, Homo sapien
cagtggtcatcccagtaagggtctt

SEQ ID NO: 4439187 - DNA, 25 bp, Homo sapien
gtcatcccagtaagggtctttccta

SEQ ID NO: 4439188 - DNA, 25 bp, Homo sapien
agcagtggtcatcccagtaagggtc

SEQ ID NO: 4439189 - DNA, 25 bp, Homo sapien
gtaggggcaggcctcttagccttcc

SEQ ID NO: 4439190 - DNA, 25 bp, Homo sapien
ctttgagaagcagagcagaggacat

SEQ ID NO: 4439191 - DNA, 25 bp, Homo sapien
gatactgagttgctgaacctgttcc

SEQ ID NO: 4439192 - DNA, 25 bp, Homo sapien
gtggttccaccagggctgctaagtc

SEQ ID NO: 4439193 - DNA, 25 bp, Homo sapien
gaggaacctgaggaaaaccctcatc

SEQ ID NO: 4439194 - DNA, 25 bp, Homo sapien
cctgtggttccaccagggctgctaa

SEQ ID NO: 4439195 - DNA, 25 bp, Homo sapien
ctattccatgagtcctgtggttcca

SEQ ID NO: 4439196 - DNA, 25 bp, Homo sapien
gtaagggcttgctcttctaacaatg

SEQ ID NO: 4439197 - DNA, 25 bp, Homo sapien
cttccaagttgcataatgattttat

SEQ ID NO: 4439198 - DNA, 25 bp, Homo sapien
ttcaggtgaagataatccaccctct

SEQ ID NO: 4439199 - DNA, 25 bp, Homo sapien
accctctgccgcctttgtaagggct

SEQ ID NO: 4439200 - DNA, 25 bp, Homo sapien
atatggacatgccatttcttttaaa

SEQ ID NO: 4439201 - DNA, 25 bp, Homo sapien
taaacgatctttaatatctcctgat

SEQ ID NO: 4439202 - DNA, 25 bp, Homo sapien
taatatctcctgatatgagtacaga

SEQ ID NO: 4439203 - DNA, 25 bp, Homo sapien
gatatgagtacagaatatggacatg

SEQ ID NO: 4439204 - DNA, 25 bp, Homo sapien
gcatatgcggaatgtcagaagttgt

SEQ ID NO: 4439205 - DNA, 25 bp, Homo sapien
gattccacttggtttagcatatgcg

SEQ ID NO: 4439206 - DNA, 25 bp, Homo sapien
caaacatagcttgaacttcctgata

SEQ ID NO: 4439207 - DNA, 25 bp, Homo sapien
cagaagttgttgacttgggtatacc

SEQ ID NO: 4439208 - DNA, 25 bp, Homo sapien
agtctgaatccaaaactgggtttat

SEQ ID NO: 4439209 - DNA, 25 bp, Homo sapien
taagatttgattcctgaatatcagc

SEQ ID NO: 4439210 - DNA, 25 bp, Homo sapien
ggcaaagctgaaggccagtaactca

SEQ ID NO: 4439211 - DNA, 25 bp, Homo sapien
tcagctactgacagattaggtcaca

SEQ ID NO: 4439212 - DNA, 25 bp, Homo sapien
tttttctggacctttgagagaatat

SEQ ID NO: 4439213 - DNA, 25 bp, Homo sapien
ggcggcactcatattcacaggaaag

SEQ ID NO: 4439214 - DNA, 25 bp, Homo sapien
gactgtacagtcacatctaatcgtt

SEQ ID NO: 4439215 - DNA, 25 bp, Homo sapien
tgctctatcagaccatccaaaggac

SEQ ID NO: 4439216 - DNA, 25 bp, Homo sapien
cgtttcattaacattcgtcggcggc

SEQ ID NO: 4439217 - DNA, 25 bp, Homo sapien
ggctggtgccactacttgtcctaat

SEQ ID NO: 4439218 - DNA, 25 bp, Homo sapien
cattgtaatcgttgtcttgggtgac

SEQ ID NO: 4439219 - DNA, 25 bp, Homo sapien
tggatagatcttcacgagcagcaag

SEQ ID NO: 4439220 - DNA, 25 bp, Homo sapien
ttaatggcacatgcggtcttctccc

SEQ ID NO: 4439221 - DNA, 25 bp, Homo sapien
aattcattttccactgtactgaaag

SEQ ID NO: 4439222 - DNA, 25 bp, Homo sapien
catgaaagaaaaatagactaaaatc

SEQ ID NO: 4439223 - DNA, 25 bp, Homo sapien
aatctgtaaaaacattaagtaagat

SEQ ID NO: 4439224 - DNA, 25 bp, Homo sapien
gatatcatcaattcattttccactg

SEQ ID NO: 4439225 - DNA, 25 bp, Homo sapien
cactttcagaacataggattgagcc

SEQ ID NO: 4439226 - DNA, 25 bp, Homo sapien
aaacactggtgatgcctaacttagc

SEQ ID NO: 4439227 - DNA, 25 bp, Homo sapien
tacactgagtgagaagcgatgcttt

SEQ ID NO: 4439228 - DNA, 25 bp, Homo sapien
aaagtttgccatggagtgctctacc

SEQ ID NO: 4439229 - DNA, 25 bp, Homo sapien
ctcttttgccaagggggcatttctg

SEQ ID NO: 4439230 - DNA, 25 bp, Homo sapien
tgtctcttttgccaagggggcattt

SEQ ID NO: 4439231 - DNA, 25 bp, Homo sapien
gttcaatttcattcggccggcctcc

SEQ ID NO: 4439232 - DNA, 25 bp, Homo sapien
ggttcaatttcattcggccggcctc

SEQ ID NO: 4439233 - DNA, 25 bp, Homo sapien
tcttccaccataatctcccctgcct

SEQ ID NO: 4439234 - DNA, 25 bp, Homo sapien
ctccatatggatctccatagcctct

SEQ ID NO: 4439235 - DNA, 25 bp, Homo sapien
cataatctcccctgccttggaaacc

SEQ ID NO: 4439236 - DNA, 25 bp, Homo sapien
catatggatctccatagcctcttcc

SEQ ID NO: 4439237 - DNA, 25 bp, Homo sapien
tatgtataggtattgaccagaagcc

SEQ ID NO: 4439238 - DNA, 25 bp, Homo sapien
cacaacatgctcaagggtacacaga

SEQ ID NO: 4439239 - DNA, 25 bp, Homo sapien
taaagcattcaaaataggccctctg

SEQ ID NO: 4439240 - DNA, 25 bp, Homo sapien
gaaacatggctagagaggaatctcc

SEQ ID NO: 4439241 - DNA, 25 bp, Homo sapien
cagagttcatagctactgataaagg

SEQ ID NO: 4439242 - DNA, 25 bp, Homo sapien
ttttcagagttcatagctactgata

SEQ ID NO: 4439243 - DNA, 25 bp, Homo sapien
gttcatagctactgataaaggtatt

SEQ ID NO: 4439244 - DNA, 25 bp, Homo sapien
tatttttcagagttcatagctactg

SEQ ID NO: 4439245 - DNA, 25 bp, Homo sapien
cttcctgctattccagatactgctc

SEQ ID NO: 4439246 - DNA, 25 bp, Homo sapien
cacactatggcctttcccattaagg

SEQ ID NO: 4439247 - DNA, 25 bp, Homo sapien
gtcgtattgcactcaatttataaaa

SEQ ID NO: 4439248 - DNA, 25 bp, Homo sapien
actccatgtcgtattgcactcaatt

SEQ ID NO: 4439249 - DNA, 25 bp, Homo sapien
taccaggctggacaaaaagagaaga

SEQ ID NO: 4439250 - DNA, 25 bp, Homo sapien
ggtaccaggctggacaaaaagagaa

SEQ ID NO: 4439251 - DNA, 25 bp, Homo sapien
taggtaccaggctggacaaaaagag

SEQ ID NO: 4439252 - DNA, 25 bp, Homo sapien
gtaccaggctggacaaaaagagaag

SEQ ID NO: 4439253 - DNA, 25 bp, Homo sapien
gaggcaaggtttccctgatctgcaa

SEQ ID NO: 4439254 - DNA, 25 bp, Homo sapien
tgatcagacatagccacaattttcc

SEQ ID NO: 4439255 - DNA, 25 bp, Homo sapien
tcctgaaggcaagattaaactgcct

SEQ ID NO: 4439256 - DNA, 25 bp, Homo sapien
tatagatagtatcactgctcaggac

SEQ ID NO: 4439257 - DNA, 25 bp, Homo sapien
tgtattaacagcagggtcacttctc

SEQ ID NO: 4439258 - DNA, 25 bp, Homo sapien
cacacgactttagtttggccaggta

SEQ ID NO: 4439259 - DNA, 25 bp, Homo sapien
caagggccaaagaggtatagtatac

SEQ ID NO: 4439260 - DNA, 25 bp, Homo sapien
tagtcacaggtttttacagtccagc

SEQ ID NO: 4439261 - DNA, 25 bp, Homo sapien
taatagctgactgtgtgtacatatg

SEQ ID NO: 4439262 - DNA, 25 bp, Homo sapien
cacaagattaaattgctcacaaggt

SEQ ID NO: 4439263 - DNA, 25 bp, Homo sapien
ttggcaaaatcacaagtaacaatcc

SEQ ID NO: 4439264 - DNA, 25 bp, Homo sapien
caagtaacaatcctgtgagttttct

SEQ ID NO: 4439265 - DNA, 25 bp, Homo sapien
cttcggctgaagagggctgttgccc

SEQ ID NO: 4439266 - DNA, 25 bp, Homo sapien
cctaaactgggtgcctgaaaatggg

SEQ ID NO: 4439267 - DNA, 25 bp, Homo sapien
taaggatcggaccatcatgctgatg

SEQ ID NO: 4439268 - DNA, 25 bp, Homo sapien
ggatgtagcttgacaccagtggcca

SEQ ID NO: 4439269 - DNA, 25 bp, Homo sapien
caaacacgtccagaggatggtggat

SEQ ID NO: 4439270 - DNA, 25 bp, Homo sapien
tatacagtaatgttaggcctccaca

SEQ ID NO: 4439271 - DNA, 25 bp, Homo sapien
tctggaaaccgtaagcacaatgcct

SEQ ID NO: 4439272 - DNA, 25 bp, Homo sapien
gagagggaattgcaactcaggcaga

SEQ ID NO: 4439273 - DNA, 25 bp, Homo sapien
ggaagaccagtcctgtcccagttaa

SEQ ID NO: 4439274 - DNA, 25 bp, Homo sapien
gaaatggcaggacctattcgggctc

SEQ ID NO: 4439275 - DNA, 25 bp, Homo sapien
tttgctgggttgttcactggattcc

SEQ ID NO: 4439276 - DNA, 25 bp, Homo sapien
cacatagcctgatgcctcagtctgt

SEQ ID NO: 4439277 - DNA, 25 bp, Homo sapien
gcaagtcatgctgaccatgcaccga

SEQ ID NO: 4439278 - DNA, 25 bp, Homo sapien
ctgtgtcgaagtaaccaactgttgc

SEQ ID NO: 4439279 - DNA, 25 bp, Homo sapien
gaccatgcaccgaattgtcatctcc

SEQ ID NO: 4439280 - DNA, 25 bp, Homo sapien
gtgtcgaagtaaccaactgttgcaa

SEQ ID NO: 4439281 - DNA, 25 bp, Homo sapien
tagatggtattttagccaagagact

SEQ ID NO: 4439282 - DNA, 25 bp, Homo sapien
tgagttcatctagaaaatagtagtg

SEQ ID NO: 4439283 - DNA, 25 bp, Homo sapien
ggctgctggacatactaattgggta

SEQ ID NO: 4439284 - DNA, 25 bp, Homo sapien
tagcgaaggctgaagataccagttg

SEQ ID NO: 4439285 - DNA, 25 bp, Homo sapien
tgtggccttggttgtggcaccagct

SEQ ID NO: 4439286 - DNA, 25 bp, Homo sapien
tctgtggccttggttgtggcaccag

SEQ ID NO: 4439287 - DNA, 25 bp, Homo sapien
tggccttggttgtggcaccagctgt

SEQ ID NO: 4439288 - DNA, 25 bp, Homo sapien
tgtctgtggccttggttgtggcacc

SEQ ID NO: 4439289 - DNA, 25 bp, Homo sapien
aattccagtgagaagggctgggtgg

SEQ ID NO: 4439290 - DNA, 25 bp, Homo sapien
agtgagaagggctgggtgggtctgt

SEQ ID NO: 4439291 - DNA, 25 bp, Homo sapien
gctgggtgggtctgttgggggtgta

SEQ ID NO: 4439292 - DNA, 25 bp, Homo sapien
agaagggctgggtgggtctgttggg

SEQ ID NO: 4439293 - DNA, 25 bp, Homo sapien
aaactcttgagggttctggcgttgg

SEQ ID NO: 4439294 - DNA, 25 bp, Homo sapien
ctagcacctctgtaaactcttgagg

SEQ ID NO: 4439295 - DNA, 25 bp, Homo sapien
tgtaaactcttgagggttctggcgt

SEQ ID NO: 4439296 - DNA, 25 bp, Homo sapien
cctctgtaaactcttgagggttctg

SEQ ID NO: 4439297 - DNA, 25 bp, Homo sapien
tggagaagaaacaaagaaacctgta

SEQ ID NO: 4439298 - DNA, 25 bp, Homo sapien
actggttgtgatcaattagttgtaa

SEQ ID NO: 4439299 - DNA, 25 bp, Homo sapien
aggccagtcaatgaagcagtgagag

SEQ ID NO: 4439300 - DNA, 25 bp, Homo sapien
taaacaccacttcagtcagaccagt

SEQ ID NO: 4439301 - DNA, 25 bp, Homo sapien
gatctgaccaaacactagagtgcag

SEQ ID NO: 4439302 - DNA, 25 bp, Homo sapien
tagagtgcagcatgctattagattc

SEQ ID NO: 4439303 - DNA, 25 bp, Homo sapien
ctaaaaccacatgacggaatctggg

SEQ ID NO: 4439304 - DNA, 25 bp, Homo sapien
ctaaaggaaggctattgtgctgggc

SEQ ID NO: 4439305 - DNA, 25 bp, Homo sapien
gggtccacctgactgtttggcttgc

SEQ ID NO: 4439306 - DNA, 25 bp, Homo sapien
cagtaactaccagtgtctacctgag

SEQ ID NO: 4439307 - DNA, 25 bp, Homo sapien
tcttcgtttattgccaaggatgagc

SEQ ID NO: 4439308 - DNA, 25 bp, Homo sapien
tcccagatgggagccataggaccct

SEQ ID NO: 4439309 - DNA, 25 bp, Homo sapien
gaatgcagtcaccagaaaagtaagg

SEQ ID NO: 4439310 - DNA, 25 bp, Homo sapien
tcaggaagccaagaaatgtccctgt

SEQ ID NO: 4439311 - DNA, 25 bp, Homo sapien
gaagcagggattgccggttttgtaa

SEQ ID NO: 4439312 - DNA, 25 bp, Homo sapien
aaggcagtttgggatgaagccatcc

SEQ ID NO: 4439313 - DNA, 25 bp, Homo sapien
tggtctgccttctcatgagcatggg

SEQ ID NO: 4439314 - DNA, 25 bp, Homo sapien
gatgagcaggcatcaccagttctcc

SEQ ID NO: 4439315 - DNA, 25 bp, Homo sapien
ttccaaggaggcctttgctgcatct

SEQ ID NO: 4439316 - DNA, 25 bp, Homo sapien
gaggagatgggaaatccccttcatt

SEQ ID NO: 4439317 - DNA, 25 bp, Homo sapien
tccttgactgcacacgtttacatcc

SEQ ID NO: 4439318 - DNA, 25 bp, Homo sapien
ttttgactctccttgactgcacacg

SEQ ID NO: 4439319 - DNA, 25 bp, Homo sapien
ttcatcagaccaaactgccaattta

SEQ ID NO: 4439320 - DNA, 25 bp, Homo sapien
caaactgccaatttattgcacatgt

SEQ ID NO: 4439321 - DNA, 25 bp, Homo sapien
ctcatctcttgtgaggggccttcac

SEQ ID NO: 4439322 - DNA, 25 bp, Homo sapien
gacatgaaagaggtcctcgaagctg

SEQ ID NO: 4439323 - DNA, 25 bp, Homo sapien
ggggaaacacttgtggcatccttgc

SEQ ID NO: 4439324 - DNA, 25 bp, Homo sapien
tgaaagaggtcctcgaagctgtttc

SEQ ID NO: 4439325 - DNA, 25 bp, Homo sapien
ttttggtggcttcttgcaactcttt

SEQ ID NO: 4439326 - DNA, 25 bp, Homo sapien
gcagcacccgttgacctggtgaata

SEQ ID NO: 4439327 - DNA, 25 bp, Homo sapien
gaatatatcgctatttttggtggct

SEQ ID NO: 4439328 - DNA, 25 bp, Homo sapien
tgtcctgcagcacccgttgacctgg

SEQ ID NO: 4439329 - DNA, 25 bp, Homo sapien
aggaatgccctgtgataagactgga

SEQ ID NO: 4439330 - DNA, 25 bp, Homo sapien
ggcttctactaagggttggtccaca

SEQ ID NO: 4439331 - DNA, 25 bp, Homo sapien
tgcagaagtgtccagtccattgcct

SEQ ID NO: 4439332 - DNA, 25 bp, Homo sapien
actgaactgcgagccaaagagcttc

SEQ ID NO: 4439333 - DNA, 25 bp, Homo sapien
ttagtttggaactcctctcagtctc

SEQ ID NO: 4439334 - DNA, 25 bp, Homo sapien
agtttggaactcctctcagtctcag

SEQ ID NO: 4439335 - DNA, 25 bp, Homo sapien
ctttaaagctgttgtgtgggatgca

SEQ ID NO: 4439336 - DNA, 25 bp, Homo sapien
tttggaactcctctcagtctcagtt

SEQ ID NO: 4439337 - DNA, 25 bp, Homo sapien
gagtgggtggacttccagagacaca

SEQ ID NO: 4439338 - DNA, 25 bp, Homo sapien
tctgaagcttctcagcggtaccagg

SEQ ID NO: 4439339 - DNA, 25 bp, Homo sapien
taccaggaaaaagatttggtgtgaa

SEQ ID NO: 4439340 - DNA, 25 bp, Homo sapien
tgaagcttctcagcggtaccaggaa

SEQ ID NO: 4439341 - DNA, 25 bp, Homo sapien
tcccaatcagcttttccgggctgca

SEQ ID NO: 4439342 - DNA, 25 bp, Homo sapien
ggcaagccaggataggacacgggct

SEQ ID NO: 4439343 - DNA, 25 bp, Homo sapien
gcagctctgatgacaaggaggcgac

SEQ ID NO: 4439344 - DNA, 25 bp, Homo sapien
ttgagaaagctgcactgttggccct

SEQ ID NO: 4439345 - DNA, 25 bp, Homo sapien
tcaatcagataacaggtatcctaac

SEQ ID NO: 4439346 - DNA, 25 bp, Homo sapien
gcatgtgagtgtaaagccccctctg

SEQ ID NO: 4439347 - DNA, 25 bp, Homo sapien
ctgcattttgaaagggtgtcatgtc

SEQ ID NO: 4439348 - DNA, 25 bp, Homo sapien
tgctgagaatgtgaggtttcccatt

SEQ ID NO: 4439349 - DNA, 25 bp, Homo sapien
gccttggagcactctctctcatcta

SEQ ID NO: 4439350 - DNA, 25 bp, Homo sapien
ctatggaaatggttcggtagggcat

SEQ ID NO: 4439351 - DNA, 25 bp, Homo sapien
ggaaagccttggagcactctctctc

SEQ ID NO: 4439352 - DNA, 25 bp, Homo sapien
cttgactgactgctctttttgtgcc

SEQ ID NO: 4439353 - DNA, 25 bp, Homo sapien
cccggttccttaccatgaggctaat

SEQ ID NO: 4439354 - DNA, 25 bp, Homo sapien
catccaacagtaatagaccccggtt

SEQ ID NO: 4439355 - DNA, 25 bp, Homo sapien
taaatcccaagtctcaatgtctaac

SEQ ID NO: 4439356 - DNA, 25 bp, Homo sapien
gaaatgctgtgtttgccgctgagag

SEQ ID NO: 4439357 - DNA, 25 bp, Homo sapien
cttccaatggctttagttgcctctt

SEQ ID NO: 4439358 - DNA, 25 bp, Homo sapien
gctttagttgcctctttaccatctg

SEQ ID NO: 4439359 - DNA, 25 bp, Homo sapien
tctttaccatctgactgagcaagga

SEQ ID NO: 4439360 - DNA, 25 bp, Homo sapien
tagttgcctctttaccatctgactg

SEQ ID NO: 4439361 - DNA, 25 bp, Homo sapien
ttagtgctcttcgtaacctgatttc

SEQ ID NO: 4439362 - DNA, 25 bp, Homo sapien
ccgaagctgcagcctgttctctcag

SEQ ID NO: 4439363 - DNA, 25 bp, Homo sapien
aggacttccccttcaaagctgcctt

SEQ ID NO: 4439364 - DNA, 25 bp, Homo sapien
cccttcaaagctgccttagtgctct

SEQ ID NO: 4439365 - DNA, 25 bp, Homo sapien
tcttttgttgcaactcagccagcct

SEQ ID NO: 4439366 - DNA, 25 bp, Homo sapien
taaagacaaagagggcagaaggcat

SEQ ID NO: 4439367 - DNA, 25 bp, Homo sapien
ctgctgcctattgacattcactatt

SEQ ID NO: 4439368 - DNA, 25 bp, Homo sapien
gccagcctctagcattcatttcagg

SEQ ID NO: 4439369 - DNA, 25 bp, Homo sapien
tgaggagtaccggtcaggtgtatca

SEQ ID NO: 4439370 - DNA, 25 bp, Homo sapien
ctgaggagtaccggtcaggtgtatc

SEQ ID NO: 4439371 - DNA, 25 bp, Homo sapien
tctgaggagtaccggtcaggtgtat

SEQ ID NO: 4439372 - DNA, 25 bp, Homo sapien
gaggagtaccggtcaggtgtatcaa

SEQ ID NO: 4439373 - DNA, 25 bp, Homo sapien
ggctacttcttagatgcatgggaaa

SEQ ID NO: 4439374 - DNA, 25 bp, Homo sapien
gatttgaacattctggcaaggaccc

SEQ ID NO: 4439375 - DNA, 25 bp, Homo sapien
cacaggaaagccataagcagtacag

SEQ ID NO: 4439376 - DNA, 25 bp, Homo sapien
gagtagatctaccacgtgaggccag

SEQ ID NO: 4439377 - DNA, 25 bp, Homo sapien
acaaaagccatttgaacacgggtct

SEQ ID NO: 4439378 - DNA, 25 bp, Homo sapien
agccatttgaacacgggtctggaaa

SEQ ID NO: 4439379 - DNA, 25 bp, Homo sapien
caaaagccatttgaacacgggtctg

SEQ ID NO: 4439380 - DNA, 25 bp, Homo sapien
aaagccatttgaacacgggtctgga

SEQ ID NO: 4439381 - DNA, 25 bp, Homo sapien
tggtgtggcaattacatcagaagca

SEQ ID NO: 4439382 - DNA, 25 bp, Homo sapien
aatcctcgtatcagctggtgtggca

SEQ ID NO: 4439383 - DNA, 25 bp, Homo sapien
ggtgtggcaattacatcagaagcat

SEQ ID NO: 4439384 - DNA, 25 bp, Homo sapien
ttaaatcctcgtatcagctggtgtg

SEQ ID NO: 4439385 - DNA, 25 bp, Homo sapien
gagcaccaatctgaggttttacaat

SEQ ID NO: 4439386 - DNA, 25 bp, Homo sapien
cacaagaccaggtgagccagtgtgt

SEQ ID NO: 4439387 - DNA, 25 bp, Homo sapien
gggccaagtagtagggagagctgac

SEQ ID NO: 4439388 - DNA, 25 bp, Homo sapien
caagtagtagggagagctgactggt

SEQ ID NO: 4439389 - DNA, 25 bp, Homo sapien
gcccttagccttgcttcctggcctg

SEQ ID NO: 4439390 - DNA, 25 bp, Homo sapien
ttcatggttcctccggggactagag

SEQ ID NO: 4439391 - DNA, 25 bp, Homo sapien
ggactagagagggaaatgcccaggt

SEQ ID NO: 4439392 - DNA, 25 bp, Homo sapien
caaacagacgcctggagacagatgc

SEQ ID NO: 4439393 - DNA, 25 bp, Homo sapien
actttgtaatgcaggagatccatgc

SEQ ID NO: 4439394 - DNA, 25 bp, Homo sapien
cttgccagccccaaaaggactcttg

SEQ ID NO: 4439395 - DNA, 25 bp, Homo sapien
tggagcttgtatcaacttgccagcc

SEQ ID NO: 4439396 - DNA, 25 bp, Homo sapien
cctgagctcttgttggtggccctgg

SEQ ID NO: 4439397 - DNA, 25 bp, Homo sapien
gagcccctggtaatgtgccgagtga

SEQ ID NO: 4439398 - DNA, 25 bp, Homo sapien
caagagagctcatgaaaaggcaggc

SEQ ID NO: 4439399 - DNA, 25 bp, Homo sapien
tattaaccttaaggaggctgcaggc

SEQ ID NO: 4439400 - DNA, 25 bp, Homo sapien
gatgtttccggtaaccagcagcaag

SEQ ID NO: 4439401 - DNA, 25 bp, Homo sapien
taggaatgccctatccgacaacaag

SEQ ID NO: 4439402 - DNA, 25 bp, Homo sapien
caactcgtggtatgaattgagagca

SEQ ID NO: 4439403 - DNA, 25 bp, Homo sapien
tgattcgattccaaagggcctttac

SEQ ID NO: 4439404 - DNA, 25 bp, Homo sapien
caaacttcctgtgtgatgcagtcaa

SEQ ID NO: 4439405 - DNA, 25 bp, Homo sapien
gggggtccacggctcttccttcagc

SEQ ID NO: 4439406 - DNA, 25 bp, Homo sapien
ctgcaatgactgggggtccacggct

SEQ ID NO: 4439407 - DNA, 25 bp, Homo sapien
ctgttcataaatgatagcatctttc

SEQ ID NO: 4439408 - DNA, 25 bp, Homo sapien
tgttcataaatgatagcatctttct

SEQ ID NO: 4439409 - DNA, 25 bp, Homo sapien
ggcagccagaccttccatcttaggt

SEQ ID NO: 4439410 - DNA, 25 bp, Homo sapien
tgaggactgaatgaagagatggccc

SEQ ID NO: 4439411 - DNA, 25 bp, Homo sapien
atttctctcccctgatgtatgagga

SEQ ID NO: 4439412 - DNA, 25 bp, Homo sapien
gaccccagtgtttaggccgtctgcc

SEQ ID NO: 4439413 - DNA, 25 bp, Homo sapien
tacagatggtttatgctgcagtgcc

SEQ ID NO: 4439414 - DNA, 25 bp, Homo sapien
catactgagtgtgctggactccgct

SEQ ID NO: 4439415 - DNA, 25 bp, Homo sapien
taaactcttcgaataacccatactg

SEQ ID NO: 4439416 - DNA, 25 bp, Homo sapien
tgctgcagtgccattctgtccctac

SEQ ID NO: 4439417 - DNA, 25 bp, Homo sapien
tacctttagtaagaatgagcttgcc

SEQ ID NO: 4439418 - DNA, 25 bp, Homo sapien
acctttagtaagaatgagcttgccc

SEQ ID NO: 4439419 - DNA, 25 bp, Homo sapien
ctttagtaagaatgagcttgcccac

SEQ ID NO: 4439420 - DNA, 25 bp, Homo sapien
cctttagtaagaatgagcttgccca

SEQ ID NO: 4439421 - DNA, 25 bp, Homo sapien
agaaaggaattcctgtgcctgagcc

SEQ ID NO: 4439422 - DNA, 25 bp, Homo sapien
tgaaaccgagaaaggaattcctgtg

SEQ ID NO: 4439423 - DNA, 25 bp, Homo sapien
ccgagaaaggaattcctgtgcctga

SEQ ID NO: 4439424 - DNA, 25 bp, Homo sapien
agctgaaaccgagaaaggaattcct

SEQ ID NO: 4439425 - DNA, 25 bp, Homo sapien
tcatggacatgctgagccttcaggc

SEQ ID NO: 4439426 - DNA, 25 bp, Homo sapien
tcacgtctttatgtttggtggccgg

SEQ ID NO: 4439427 - DNA, 25 bp, Homo sapien
tcaacaatcgatggaagctgtagct

SEQ ID NO: 4439428 - DNA, 25 bp, Homo sapien
ccaattttggctgcactgctagggc

SEQ ID NO: 4439429 - DNA, 25 bp, Homo sapien
gatgggttgagcatccactcatgag

SEQ ID NO: 4439430 - DNA, 25 bp, Homo sapien
tatgaaagaacagaacaccatcaac

SEQ ID NO: 4439431 - DNA, 25 bp, Homo sapien
tatctgttatcaagttcccaatgga

SEQ ID NO: 4439432 - DNA, 25 bp, Homo sapien
tgttcaggaagctcatgttgtttcc

SEQ ID NO: 4439433 - DNA, 25 bp, Homo sapien
tgacgctcagtcttctctctggtag

SEQ ID NO: 4439434 - DNA, 25 bp, Homo sapien
ttctctctggtagtaatcgccttta

SEQ ID NO: 4439435 - DNA, 25 bp, Homo sapien
tctctggtagtaatcgcctttacca

SEQ ID NO: 4439436 - DNA, 25 bp, Homo sapien
tcagtcttctctctggtagtaatcg

SEQ ID NO: 4439437 - DNA, 25 bp, Homo sapien
taaggcaataacctcaactatttct

SEQ ID NO: 4439438 - DNA, 25 bp, Homo sapien
gctccataaggcaataacctcaact

SEQ ID NO: 4439439 - DNA, 25 bp, Homo sapien
aggccatacccccagcagccatttc

SEQ ID NO: 4439440 - DNA, 25 bp, Homo sapien
tccataaggcaataacctcaactat

SEQ ID NO: 4439441 - DNA, 25 bp, Homo sapien
tcactctttcgaaccattctggccg

SEQ ID NO: 4439442 - DNA, 25 bp, Homo sapien
cctggtccactcacaaacctggtag

SEQ ID NO: 4439443 - DNA, 25 bp, Homo sapien
gccggctgtacctgtgggctttcac

SEQ ID NO: 4439444 - DNA, 25 bp, Homo sapien
gggctttcactgtgcgtggccgccc

SEQ ID NO: 4439445 - DNA, 25 bp, Homo sapien
gcagcggagccagcaaattaccaga

SEQ ID NO: 4439446 - DNA, 25 bp, Homo sapien
taatctgcggcatcccgattgggag

SEQ ID NO: 4439447 - DNA, 25 bp, Homo sapien
acacagcacaaggaaacgccatgca

SEQ ID NO: 4439448 - DNA, 25 bp, Homo sapien
ggaggtgctgttagacttgcccact

SEQ ID NO: 4439449 - DNA, 25 bp, Homo sapien
ctgcctactgcctgactggtaaatc

SEQ ID NO: 4439450 - DNA, 25 bp, Homo sapien
actgcctactgcctgactggtaaat

SEQ ID NO: 4439451 - DNA, 25 bp, Homo sapien
ctgactggtaaatctcatcccagca

SEQ ID NO: 4439452 - DNA, 25 bp, Homo sapien
tgactggtaaatctcatcccagcac

SEQ ID NO: 4439453 - DNA, 25 bp, Homo sapien
agaggggtgaatctaaaacaaggag

SEQ ID NO: 4439454 - DNA, 25 bp, Homo sapien
tttttagaaccagatctaatgggac

SEQ ID NO: 4439455 - DNA, 25 bp, Homo sapien
ctcctggattctggcccgccaatgg

SEQ ID NO: 4439456 - DNA, 25 bp, Homo sapien
attctggcccgccaatggcagaggt

SEQ ID NO: 4439457 - DNA, 25 bp, Homo sapien
agagagacctgcattgcgttccaag

SEQ ID NO: 4439458 - DNA, 25 bp, Homo sapien
gacctgcattgcgttccaagttccg

SEQ ID NO: 4439459 - DNA, 25 bp, Homo sapien
cattgcgttccaagttccggactcc

SEQ ID NO: 4439460 - DNA, 25 bp, Homo sapien
ggctggcttgggccaaactcatcca

SEQ ID NO: 4439461 - DNA, 25 bp, Homo sapien
gggcatccaagctcatccagagttt

SEQ ID NO: 4439462 - DNA, 25 bp, Homo sapien
caagctcatccagagtttatcaaga

SEQ ID NO: 4439463 - DNA, 25 bp, Homo sapien
tccagagtttatcaagatccatcag

SEQ ID NO: 4439464 - DNA, 25 bp, Homo sapien
agagtttatcaagatccatcaggga

SEQ ID NO: 4439465 - DNA, 25 bp, Homo sapien
aaatgccatgtatgactgccatgcc

SEQ ID NO: 4439466 - DNA, 25 bp, Homo sapien
aatgccatgtatgactgccatgcca

SEQ ID NO: 4439467 - DNA, 25 bp, Homo sapien
cggtgttcacggttgtgtttcacaa

SEQ ID NO: 4439468 - DNA, 25 bp, Homo sapien
ccagctggctcggtgttcacggttg

SEQ ID NO: 4439469 - DNA, 25 bp, Homo sapien
ttcacaacgcttttcacatttgtca

SEQ ID NO: 4439470 - DNA, 25 bp, Homo sapien
gttgtgtttcacaacgcttttcaca

SEQ ID NO: 4439471 - DNA, 25 bp, Homo sapien
gattacaaggcacttcactctcaga

SEQ ID NO: 4439472 - DNA, 25 bp, Homo sapien
aaatccaggattacaaggcacttca

SEQ ID NO: 4439473 - DNA, 25 bp, Homo sapien
tccaggattacaaggcacttcactc

SEQ ID NO: 4439474 - DNA, 25 bp, Homo sapien
aggattacaaggcacttcactctca

SEQ ID NO: 4439475 - DNA, 25 bp, Homo sapien
tcaacacccctgctggggattgtgg

SEQ ID NO: 4439476 - DNA, 25 bp, Homo sapien
ccattggcagttgtttggagtgatt

SEQ ID NO: 4439477 - DNA, 25 bp, Homo sapien
agagatgcaaacaccattggcagtt

SEQ ID NO: 4439478 - DNA, 25 bp, Homo sapien
ggattgtgggaacttgggataggaa

SEQ ID NO: 4439479 - DNA, 25 bp, Homo sapien
tcaggccaaccataagggcaggctg

SEQ ID NO: 4439480 - DNA, 25 bp, Homo sapien
tgctgcaagagattggcttaggcaa

SEQ ID NO: 4439481 - DNA, 25 bp, Homo sapien
caaattgacacatcagaaagaccac

SEQ ID NO: 4439482 - DNA, 25 bp, Homo sapien
tccaaaatccataggtcaggccaac

SEQ ID NO: 4439483 - DNA, 25 bp, Homo sapien
gagccctcatctggggcagcgtaca

SEQ ID NO: 4439484 - DNA, 25 bp, Homo sapien
tcatctggggcagcgtacaccttta

SEQ ID NO: 4439485 - DNA, 25 bp, Homo sapien
cctcatctggggcagcgtacacctt

SEQ ID NO: 4439486 - DNA, 25 bp, Homo sapien
ccgagccctcatctggggcagcgta

SEQ ID NO: 4439487 - DNA, 25 bp, Homo sapien
tgctaaacgtgactccggtagcctc

SEQ ID NO: 4439488 - DNA, 25 bp, Homo sapien
ctaaacgtgactccggtagcctcca

SEQ ID NO: 4439489 - DNA, 25 bp, Homo sapien
gctaaacgtgactccggtagcctcc

SEQ ID NO: 4439490 - DNA, 25 bp, Homo sapien
taaacgtgactccggtagcctccat

SEQ ID NO: 4439491 - DNA, 25 bp, Homo sapien
gaattgatgtgcatcagacagaaaa

SEQ ID NO: 4439492 - DNA, 25 bp, Homo sapien
tcaaggatgaattgatgtgcatcag

SEQ ID NO: 4439493 - DNA, 25 bp, Homo sapien
acctgtgccgtgtgggcccgtaggg

SEQ ID NO: 4439494 - DNA, 25 bp, Homo sapien
cagaaaagggaccagatttggaaag

SEQ ID NO: 4439495 - DNA, 25 bp, Homo sapien
tgagcccctaaaagccttcctaata

SEQ ID NO: 4439496 - DNA, 25 bp, Homo sapien
ccgagcaaacacagacgagctctct

SEQ ID NO: 4439497 - DNA, 25 bp, Homo sapien
cgagctctctgttgccgtgtgagcc

SEQ ID NO: 4439498 - DNA, 25 bp, Homo sapien
tgttgccgtgtgagcccctaaaagc

SEQ ID NO: 4439499 - DNA, 25 bp, Homo sapien
tttagaaaacaaagtcaatgccacg

SEQ ID NO: 4439500 - DNA, 25 bp, Homo sapien
gaaaacaaagtcaatgccacgactg

SEQ ID NO: 4439501 - DNA, 25 bp, Homo sapien
ctttagaaaacaaagtcaatgccac

SEQ ID NO: 4439502 - DNA, 25 bp, Homo sapien
tagaaaacaaagtcaatgccacgac

SEQ ID NO: 4439503 - DNA, 25 bp, Homo sapien
taatcagtattgtgagccacctaac

SEQ ID NO: 4439504 - DNA, 25 bp, Homo sapien
gaatttcttaagagggccgaccatg

SEQ ID NO: 4439505 - DNA, 25 bp, Homo sapien
tgttgttcagacttcgacccttccc

SEQ ID NO: 4439506 - DNA, 25 bp, Homo sapien
gacctaagtaaatagcatatcccag

SEQ ID NO: 4439507 - DNA, 25 bp, Homo sapien
agcgccacggccattcgcgtgctaa

SEQ ID NO: 4439508 - DNA, 25 bp, Homo sapien
cattcgcgtgctaaacctttgcaac

SEQ ID NO: 4439509 - DNA, 25 bp, Homo sapien
cctgagcccagtaacaggaacacag

SEQ ID NO: 4439510 - DNA, 25 bp, Homo sapien
aacctttgcaacctgagcccagtaa

SEQ ID NO: 4439511 - DNA, 25 bp, Homo sapien
aaacccagcatggatactagagaag

SEQ ID NO: 4439512 - DNA, 25 bp, Homo sapien
cccagcatggatactagagaagaca

SEQ ID NO: 4439513 - DNA, 25 bp, Homo sapien
cagcatggatactagagaagacatc

SEQ ID NO: 4439514 - DNA, 25 bp, Homo sapien
tttcaaataagcctccaggatgagg

SEQ ID NO: 4439515 - DNA, 25 bp, Homo sapien
cctgcactctcacgagaagattcca

SEQ ID NO: 4439516 - DNA, 25 bp, Homo sapien
tgcactctcacgagaagattccagc

SEQ ID NO: 4439517 - DNA, 25 bp, Homo sapien
actctcacgagaagattccagccca

SEQ ID NO: 4439518 - DNA, 25 bp, Homo sapien
tccctgcactctcacgagaagattc

SEQ ID NO: 4439519 - DNA, 25 bp, Homo sapien
ctttgaagacaactagaatttcacg

SEQ ID NO: 4439520 - DNA, 25 bp, Homo sapien
ggaaggaatggccacgtatctttga

SEQ ID NO: 4439521 - DNA, 25 bp, Homo sapien
tattattccgggagcaaaatcaacc

SEQ ID NO: 4439522 - DNA, 25 bp, Homo sapien
gaatggccacgtatctttgactttg

SEQ ID NO: 4439523 - DNA, 25 bp, Homo sapien
gctttggttgttgaacatacgaaca

SEQ ID NO: 4439524 - DNA, 25 bp, Homo sapien
tgttgaacatacgaacacactatca

SEQ ID NO: 4439525 - DNA, 25 bp, Homo sapien
gaacatacgaacacactatcatcat

SEQ ID NO: 4439526 - DNA, 25 bp, Homo sapien
ggttgttgaacatacgaacacacta

SEQ ID NO: 4439527 - DNA, 25 bp, Homo sapien
gatagctgtgccttctttgcaaggc

SEQ ID NO: 4439528 - DNA, 25 bp, Homo sapien
gacacagttacttgttcttgggata

SEQ ID NO: 4439529 - DNA, 25 bp, Homo sapien
tatagacacagttacttgttcttgg

SEQ ID NO: 4439530 - DNA, 25 bp, Homo sapien
tgttcttgggatagctgtgccttct

SEQ ID NO: 4439531 - DNA, 25 bp, Homo sapien
gctcctgtggtagttcaatttctcc

SEQ ID NO: 4439532 - DNA, 25 bp, Homo sapien
caccaaacacatcgcaatgctcctg

SEQ ID NO: 4439533 - DNA, 25 bp, Homo sapien
tgctcctgtggtagttcaatttctc

SEQ ID NO: 4439534 - DNA, 25 bp, Homo sapien
aacacatcgcaatgctcctgtggta

SEQ ID NO: 4439535 - DNA, 25 bp, Homo sapien
tctttggcttgcaggtaattggggc

SEQ ID NO: 4439536 - DNA, 25 bp, Homo sapien
gaagtccaaaccccgtgaggaatgc

SEQ ID NO: 4439537 - DNA, 25 bp, Homo sapien
ttgcaggtaattggggccatgaaac

SEQ ID NO: 4439538 - DNA, 25 bp, Homo sapien
agaagtccaaaccccgtgaggaatg

SEQ ID NO: 4439539 - DNA, 25 bp, Homo sapien
acataacagaccattgtctgattgg

SEQ ID NO: 4439540 - DNA, 25 bp, Homo sapien
gatgacataacagaccattgtctga

SEQ ID NO: 4439541 - DNA, 25 bp, Homo sapien
gccaagatgacataacagaccattg

SEQ ID NO: 4439542 - DNA, 25 bp, Homo sapien
ctgtgccaagatgacataacagacc

SEQ ID NO: 4439543 - DNA, 25 bp, Homo sapien
tccattctccacctgaaatcacatt

SEQ ID NO: 4439544 - DNA, 25 bp, Homo sapien
gatatcttcagtctaagtgtagcac

SEQ ID NO: 4439545 - DNA, 25 bp, Homo sapien
caagggaatactcaggtctagcaga

SEQ ID NO: 4439546 - DNA, 25 bp, Homo sapien
ttttgaatatgcttacgtaacaatg

SEQ ID NO: 4439547 - DNA, 25 bp, Homo sapien
tgttcgatttattacttggatgcct

SEQ ID NO: 4439548 - DNA, 25 bp, Homo sapien
ctccggattccagcaaaaattactt

SEQ ID NO: 4439549 - DNA, 25 bp, Homo sapien
acattttaaactccggattccagca

SEQ ID NO: 4439550 - DNA, 25 bp, Homo sapien
gccccagttcattaatagtacttga

SEQ ID NO: 4439551 - DNA, 25 bp, Homo sapien
aaaggaattctgactaccgctgagc

SEQ ID NO: 4439552 - DNA, 25 bp, Homo sapien
gagctcatgctgaatatccagaagc

SEQ ID NO: 4439553 - DNA, 25 bp, Homo sapien
tgactaccgctgagctcatgctgaa

SEQ ID NO: 4439554 - DNA, 25 bp, Homo sapien
atgcataaaggaattctgactaccg

SEQ ID NO: 4439555 - DNA, 25 bp, Homo sapien
gaggccatatttaagtccaacacaa

SEQ ID NO: 4439556 - DNA, 25 bp, Homo sapien
aagaggccatatttaagtccaacac

SEQ ID NO: 4439557 - DNA, 25 bp, Homo sapien
agaggccatatttaagtccaacaca

SEQ ID NO: 4439558 - DNA, 25 bp, Homo sapien
aaagaggccatatttaagtccaaca

SEQ ID NO: 4439559 - DNA, 25 bp, Homo sapien
cagctgctttgtactgtacacggca

SEQ ID NO: 4439560 - DNA, 25 bp, Homo sapien
ctgctttgtactgtacacggcattc

SEQ ID NO: 4439561 - DNA, 25 bp, Homo sapien
gctgctttgtactgtacacggcatt

SEQ ID NO: 4439562 - DNA, 25 bp, Homo sapien
ataaagtgcctagataaagtgtcac

SEQ ID NO: 4439563 - DNA, 25 bp, Homo sapien
gacaccagggaagggtggaacagtc

SEQ ID NO: 4439564 - DNA, 25 bp, Homo sapien
ggaacagtcccccagaaggtgcctc

SEQ ID NO: 4439565 - DNA, 25 bp, Homo sapien
ttgcctctcttgattatccccactc

SEQ ID NO: 4439566 - DNA, 25 bp, Homo sapien
ccaccttcatcagataagcgttatt

SEQ ID NO: 4439567 - DNA, 25 bp, Homo sapien
tttctgatttatagtgatggcttga

SEQ ID NO: 4439568 - DNA, 25 bp, Homo sapien
ttaaatctatgggtgtcaggactgc

SEQ ID NO: 4439569 - DNA, 25 bp, Homo sapien
aagacactccaaagtatctactgtg

SEQ ID NO: 4439570 - DNA, 25 bp, Homo sapien
cagcccatattgcatctctaccaag

SEQ ID NO: 4439571 - DNA, 25 bp, Homo sapien
agaaaattgatgtccgagttatcag

SEQ ID NO: 4439572 - DNA, 25 bp, Homo sapien
tcaccctgtcatggaccagtcccat

SEQ ID NO: 4439573 - DNA, 25 bp, Homo sapien
aaattgatgtccgagttatcagccc

SEQ ID NO: 4439574 - DNA, 25 bp, Homo sapien
gatgtccgagttatcagccctcacc

SEQ ID NO: 4439575 - DNA, 25 bp, Homo sapien
tgatttacgggcaatggccagctca

SEQ ID NO: 4439576 - DNA, 25 bp, Homo sapien
cagctcattaggcacactggcctga

SEQ ID NO: 4439577 - DNA, 25 bp, Homo sapien
gcctgaactgtgcatgcttgacttg

SEQ ID NO: 4439578 - DNA, 25 bp, Homo sapien
gacaaatgttttcggagctctgtgg

SEQ ID NO: 4439579 - DNA, 25 bp, Homo sapien
ttcctcccactaacgacaagcctgt

SEQ ID NO: 4439580 - DNA, 25 bp, Homo sapien
caagcctgtctgcaaaacagaacaa

SEQ ID NO: 4439581 - DNA, 25 bp, Homo sapien
ccttcaaaggcattgctgaacaggg

SEQ ID NO: 4439582 - DNA, 25 bp, Homo sapien
tggtacttggcaacccagcacgctt

SEQ ID NO: 4439583 - DNA, 25 bp, Homo sapien
tatgtgtccccactccggttttcac

SEQ ID NO: 4439584 - DNA, 25 bp, Homo sapien
aagagcctatgtgtccccactccgg

SEQ ID NO: 4439585 - DNA, 25 bp, Homo sapien
tcacattccttagagggcttgaggg

SEQ ID NO: 4439586 - DNA, 25 bp, Homo sapien
gttttcacattccttagagggcttg

SEQ ID NO: 4439587 - DNA, 25 bp, Homo sapien
gttctcaacctgaggtcacggatgc

SEQ ID NO: 4439588 - DNA, 25 bp, Homo sapien
tttcctttgtagagctactgtctcc

SEQ ID NO: 4439589 - DNA, 25 bp, Homo sapien
ttgtagagctactgtctcctcagag

SEQ ID NO: 4439590 - DNA, 25 bp, Homo sapien
gtggttctcaacctgaggtcacgga

SEQ ID NO: 4439591 - DNA, 25 bp, Homo sapien
gcttccggatgaaccgaatatactt

SEQ ID NO: 4439592 - DNA, 25 bp, Homo sapien
ttcaccaaccctgatcccaaaccat

SEQ ID NO: 4439593 - DNA, 25 bp, Homo sapien
agtcaccagacacatgaactcagcc

SEQ ID NO: 4439594 - DNA, 25 bp, Homo sapien
ccgaatatactttagcagtcaccag

SEQ ID NO: 4439595 - DNA, 25 bp, Homo sapien
aattcttcccgtcccaatgcctatt

SEQ ID NO: 4439596 - DNA, 25 bp, Homo sapien
ggcccatttgccagcttctcttttc

SEQ ID NO: 4439597 - DNA, 25 bp, Homo sapien
cccaatgcctattgttggagataat

SEQ ID NO: 4439598 - DNA, 25 bp, Homo sapien
ctcttttccataaagccttctgaaa

SEQ ID NO: 4439599 - DNA, 25 bp, Homo sapien
cacagaggccaggtgctaagcaaac

SEQ ID NO: 4439600 - DNA, 25 bp, Homo sapien
taggacaggttgtacaagcaccagg

SEQ ID NO: 4439601 - DNA, 25 bp, Homo sapien
cacgataaatattccgagaccctag

SEQ ID NO: 4439602 - DNA, 25 bp, Homo sapien
tacacacacgttagcatatgcatgg

SEQ ID NO: 4439603 - DNA, 25 bp, Homo sapien
tagggttggagacgccactcttttc

SEQ ID NO: 4439604 - DNA, 25 bp, Homo sapien
gagcttagccattactagggttgga

SEQ ID NO: 4439605 - DNA, 25 bp, Homo sapien
ggaagagatgggagcttagccatta

SEQ ID NO: 4439606 - DNA, 25 bp, Homo sapien
gccagctcttcctgagacactttta

SEQ ID NO: 4439607 - DNA, 25 bp, Homo sapien
gagggatttggacaacacaatgttt

SEQ ID NO: 4439608 - DNA, 25 bp, Homo sapien
agactgctgagggatttggacaaca

SEQ ID NO: 4439609 - DNA, 25 bp, Homo sapien
tatccgtagatttcaccgtctgaga

SEQ ID NO: 4439610 - DNA, 25 bp, Homo sapien
aatgttttaagacagcaaccaatct

SEQ ID NO: 4439611 - DNA, 25 bp, Homo sapien
ggccttcagtagaaaaggatgcttt

SEQ ID NO: 4439612 - DNA, 25 bp, Homo sapien
tgagtctatgtgctcatgcagtatg

SEQ ID NO: 4439613 - DNA, 25 bp, Homo sapien
catacaattctttcagaggctctct

SEQ ID NO: 4439614 - DNA, 25 bp, Homo sapien
agtcataactgcattcgctaaattg

SEQ ID NO: 4439615 - DNA, 25 bp, Homo sapien
tcaaggaaggctattgggtgctgag

SEQ ID NO: 4439616 - DNA, 25 bp, Homo sapien
ctaggctttcactctcagtagtaat

SEQ ID NO: 4439617 - DNA, 25 bp, Homo sapien
cagtagtaattgacttctcaagttc

SEQ ID NO: 4439618 - DNA, 25 bp, Homo sapien
gaaggctattgggtgctgagttctt

SEQ ID NO: 4439619 - DNA, 25 bp, Homo sapien
gctgtgaactgtgactgagattgga

SEQ ID NO: 4439620 - DNA, 25 bp, Homo sapien
caaatgggggccttaaatcaaatag

SEQ ID NO: 4439621 - DNA, 25 bp, Homo sapien
ctctggaaacgaagggccaagctgt

SEQ ID NO: 4439622 - DNA, 25 bp, Homo sapien
tgggggccttaaatcaaatagaaca

SEQ ID NO: 4439623 - DNA, 25 bp, Homo sapien
tgcttatattatgttcgctccaaag

SEQ ID NO: 4439624 - DNA, 25 bp, Homo sapien
acttgggccaaataataaaggtcat

SEQ ID NO: 4439625 - DNA, 25 bp, Homo sapien
tttgtgcttatattatgttcgctcc

SEQ ID NO: 4439626 - DNA, 25 bp, Homo sapien
tgggccaaataataaaggtcataaa

SEQ ID NO: 4439627 - DNA, 25 bp, Homo sapien
aaatgtcagtgatttaggtccacac

SEQ ID NO: 4439628 - DNA, 25 bp, Homo sapien
tagctgaaatacaatctggatgccc

SEQ ID NO: 4439629 - DNA, 25 bp, Homo sapien
ggatgccctcatgagttggattcat

SEQ ID NO: 4439630 - DNA, 25 bp, Homo sapien
ggtccacactgatagagtacaaaat

SEQ ID NO: 4439631 - DNA, 25 bp, Homo sapien
attcggagaaacttctctagaaaca

SEQ ID NO: 4439632 - DNA, 25 bp, Homo sapien
aatgatccctgaaagtatagtcttt

SEQ ID NO: 4439633 - DNA, 25 bp, Homo sapien
aactatagaaatgatccctgaaagt

SEQ ID NO: 4439634 - DNA, 25 bp, Homo sapien
cagtgctctacacattcggagaaac

SEQ ID NO: 4439635 - DNA, 25 bp, Homo sapien
atcatcaatattgtcacttaacctc

SEQ ID NO: 4439636 - DNA, 25 bp, Homo sapien
tcatcaatattgtcacttaacctct

SEQ ID NO: 4439637 - DNA, 25 bp, Homo sapien
tcatcatcaatattgtcacttaacc

SEQ ID NO: 4439638 - DNA, 25 bp, Homo sapien
catcatcaatattgtcacttaacct

SEQ ID NO: 4439639 - DNA, 25 bp, Homo sapien
aggattatatcttatgtccttcata

SEQ ID NO: 4439640 - DNA, 25 bp, Homo sapien
gattatatcttatgtccttcataga

SEQ ID NO: 4439641 - DNA, 25 bp, Homo sapien
ccttcatagacctgtaagatctttc

SEQ ID NO: 4439642 - DNA, 25 bp, Homo sapien
cttcatagacctgtaagatctttca

SEQ ID NO: 4439643 - DNA, 25 bp, Homo sapien
gaggaaaaccaactgtctgagtctt

SEQ ID NO: 4439644 - DNA, 25 bp, Homo sapien
gaaaaccaactgtctgagtcttttc

SEQ ID NO: 4439645 - DNA, 25 bp, Homo sapien
aggaaaaccaactgtctgagtcttt

SEQ ID NO: 4439646 - DNA, 25 bp, Homo sapien
aaccaactgtctgagtcttttcttt

SEQ ID NO: 4439647 - DNA, 25 bp, Homo sapien
tagtggtgattccaaacgcacatca

SEQ ID NO: 4439648 - DNA, 25 bp, Homo sapien
tctcctttgctcactatcaatggca

SEQ ID NO: 4439649 - DNA, 25 bp, Homo sapien
tctctggctaacctggaagattgcc

SEQ ID NO: 4439650 - DNA, 25 bp, Homo sapien
tgtgcattttcaggaccaagacttt

SEQ ID NO: 4439651 - DNA, 25 bp, Homo sapien
tctgcaagacagttggattaagttc

SEQ ID NO: 4439652 - DNA, 25 bp, Homo sapien
ttctgcaagacagttggattaagtt

SEQ ID NO: 4439653 - DNA, 25 bp, Homo sapien
gaaatcactgcttgacatggaatag

SEQ ID NO: 4439654 - DNA, 25 bp, Homo sapien
tgcagacaatagacacagaatgcct

SEQ ID NO: 4439655 - DNA, 25 bp, Homo sapien
gaagggaccttcactctcagcgtga

SEQ ID NO: 4439656 - DNA, 25 bp, Homo sapien
tgatcttgagccctaagcccaggag

SEQ ID NO: 4439657 - DNA, 25 bp, Homo sapien
gaagagtagatctgatcaaagagca

SEQ ID NO: 4439658 - DNA, 25 bp, Homo sapien
ctctcatagggtatagctgggcatc

SEQ ID NO: 4439659 - DNA, 25 bp, Homo sapien
gctgggcatctctgttttagcaaag

SEQ ID NO: 4439660 - DNA, 25 bp, Homo sapien
cctttgccatgaatgtccatggctg

SEQ ID NO: 4439661 - DNA, 25 bp, Homo sapien
cggtcagtacttctgctgaagtcat

SEQ ID NO: 4439662 - DNA, 25 bp, Homo sapien
gtcatatggaatgtgtactttagtt

SEQ ID NO: 4439663 - DNA, 25 bp, Homo sapien
ctgttgtaccagctgtagggtggac

SEQ ID NO: 4439664 - DNA, 25 bp, Homo sapien
accagctgtagggtggacagtgaca

SEQ ID NO: 4439665 - DNA, 25 bp, Homo sapien
gggcccaagcataggctccactctt

SEQ ID NO: 4439666 - DNA, 25 bp, Homo sapien
aggctccactcttgtgaccatggct

SEQ ID NO: 4439667 - DNA, 25 bp, Homo sapien
gctgtaatagcgtttccatggtact

SEQ ID NO: 4439668 - DNA, 25 bp, Homo sapien
ctggggctgctcctatgccagccat

SEQ ID NO: 4439669 - DNA, 25 bp, Homo sapien
ttagaggggctgtaatagcgtttcc

SEQ ID NO: 4439670 - DNA, 25 bp, Homo sapien
gggctgctcctatgccagccattcc

SEQ ID NO: 4439671 - DNA, 25 bp, Homo sapien
tcgttcaccatacaccaactcttcc

SEQ ID NO: 4439672 - DNA, 25 bp, Homo sapien
actcttcccatacataaaacacact

SEQ ID NO: 4439673 - DNA, 25 bp, Homo sapien
tagtctgctcttctcgttcaccata

SEQ ID NO: 4439674 - DNA, 25 bp, Homo sapien
accaactcttcccatacataaaaca

SEQ ID NO: 4439675 - DNA, 25 bp, Homo sapien
tttagcttcatttccgatgatggaa

SEQ ID NO: 4439676 - DNA, 25 bp, Homo sapien
tccgatgatggaataataagctttt

SEQ ID NO: 4439677 - DNA, 25 bp, Homo sapien
ggtcaatgttatagcttccgatact

SEQ ID NO: 4439678 - DNA, 25 bp, Homo sapien
ctaattctgaggtcaatgttatagc

SEQ ID NO: 4439679 - DNA, 25 bp, Homo sapien
ggctgtaccttgtatgtggcccaca

SEQ ID NO: 4439680 - DNA, 25 bp, Homo sapien
cttgtgagtgctggactctgacagc

SEQ ID NO: 4439681 - DNA, 25 bp, Homo sapien
caagtgggtaaccattgtaaacttg

SEQ ID NO: 4439682 - DNA, 25 bp, Homo sapien
gtgtggctgtaccttgtatgtggcc

SEQ ID NO: 4439683 - DNA, 25 bp, Homo sapien
cagaccccatattatcctagacagg

SEQ ID NO: 4439684 - DNA, 25 bp, Homo sapien
ttgaacattccagccaaggacattg

SEQ ID NO: 4439685 - DNA, 25 bp, Homo sapien
taaaaagtcgaaggtcacacacctg

SEQ ID NO: 4439686 - DNA, 25 bp, Homo sapien
gacaattttgatgatccagacccca

SEQ ID NO: 4439687 - DNA, 25 bp, Homo sapien
ggacagtgatccattgagtctagac

SEQ ID NO: 4439688 - DNA, 25 bp, Homo sapien
tcatgtcctaatagggaagcctccc

SEQ ID NO: 4439689 - DNA, 25 bp, Homo sapien
gagtctagactagagcaacactaga

SEQ ID NO: 4439690 - DNA, 25 bp, Homo sapien
gatttatgtgcacacagagctgata

SEQ ID NO: 4439691 - DNA, 25 bp, Homo sapien
gagccccatcagcagaacaacagag

SEQ ID NO: 4439692 - DNA, 25 bp, Homo sapien
ctttcctggaaataagtgtgattgt

SEQ ID NO: 4439693 - DNA, 25 bp, Homo sapien
gaaataagtgtgattgttggaaaag

SEQ ID NO: 4439694 - DNA, 25 bp, Homo sapien
gaggaagaacagactgagccccatc

SEQ ID NO: 4439695 - DNA, 25 bp, Homo sapien
gatgaacagcatctgctcaccaaag

SEQ ID NO: 4439696 - DNA, 25 bp, Homo sapien
aagatgaacagcatctgctcaccaa

SEQ ID NO: 4439697 - DNA, 25 bp, Homo sapien
ctcaccaaagcaacacaacaggtgt

SEQ ID NO: 4439698 - DNA, 25 bp, Homo sapien
gaagatgaacagcatctgctcacca

SEQ ID NO: 4439699 - DNA, 25 bp, Homo sapien
tctgagaagtactctggctgagctc

SEQ ID NO: 4439700 - DNA, 25 bp, Homo sapien
gaactaaagttagggcctgtggaca

SEQ ID NO: 4439701 - DNA, 25 bp, Homo sapien
tcctgtggtggagcgatcgaaagcc

SEQ ID NO: 4439702 - DNA, 25 bp, Homo sapien
gcaaggaccattgtaactactcggt

SEQ ID NO: 4439703 - DNA, 25 bp, Homo sapien
ctttctccgctccatggtactgtta

SEQ ID NO: 4439704 - DNA, 25 bp, Homo sapien
gcactctggtaaacgctttctccgc

SEQ ID NO: 4439705 - DNA, 25 bp, Homo sapien
catggtactgttaacccagggttgc

SEQ ID NO: 4439706 - DNA, 25 bp, Homo sapien
gaaagctcccattgtacaacaccca

SEQ ID NO: 4439707 - DNA, 25 bp, Homo sapien
catactagcagtcattgtcgtcttc

SEQ ID NO: 4439708 - DNA, 25 bp, Homo sapien
tgctggtgcctgagcggaaatcaag

SEQ ID NO: 4439709 - DNA, 25 bp, Homo sapien
ccaaagcaatggtgggtaagactgc

SEQ ID NO: 4439710 - DNA, 25 bp, Homo sapien
gatccattgatatctccaccaactg

SEQ ID NO: 4439711 - DNA, 25 bp, Homo sapien
gcagccgaagctcattactgtagtg

SEQ ID NO: 4439712 - DNA, 25 bp, Homo sapien
aaatattaacagttgggcagctttg

SEQ ID NO: 4439713 - DNA, 25 bp, Homo sapien
taaaatattaacagttgggcagctt

SEQ ID NO: 4439714 - DNA, 25 bp, Homo sapien
agccgaagctcattactgtagtggc

SEQ ID NO: 4439715 - DNA, 25 bp, Homo sapien
tcacactggcttctaagaactagca

SEQ ID NO: 4439716 - DNA, 25 bp, Homo sapien
cattttgcctacgaaggtttgacca

SEQ ID NO: 4439717 - DNA, 25 bp, Homo sapien
tatttactgggcatagggagccgag

SEQ ID NO: 4439718 - DNA, 25 bp, Homo sapien
tggagagtgatgcttcatgacatcc

SEQ ID NO: 4439719 - DNA, 25 bp, Homo sapien
atcaactaacaaacagggcggcggc

SEQ ID NO: 4439720 - DNA, 25 bp, Homo sapien
ggaagtcatcaactaacaaacaggg

SEQ ID NO: 4439721 - DNA, 25 bp, Homo sapien
cacaagctgacttttcttaactgag

SEQ ID NO: 4439722 - DNA, 25 bp, Homo sapien
gaagatccatagcagcacaagctga

SEQ ID NO: 4439723 - DNA, 25 bp, Homo sapien
ggcctaggtggatctttgatgatga

SEQ ID NO: 4439724 - DNA, 25 bp, Homo sapien
tgatgaagtccgtgcttgtcactcc

SEQ ID NO: 4439725 - DNA, 25 bp, Homo sapien
caacttgatgatccactctcttcca

SEQ ID NO: 4439726 - DNA, 25 bp, Homo sapien
tttgatagagcactgagcaaaggcc

SEQ ID NO: 4439727 - DNA, 25 bp, Homo sapien
tctctggatctgcagacaagcaggg

SEQ ID NO: 4439728 - DNA, 25 bp, Homo sapien
tcaggaataggcacagttgaatctg

SEQ ID NO: 4439729 - DNA, 25 bp, Homo sapien
gggctagtacttgacagaaactgtc

SEQ ID NO: 4439730 - DNA, 25 bp, Homo sapien
tctgtcaattaaggctctctggatc

SEQ ID NO: 4439731 - DNA, 25 bp, Homo sapien
acagctggatctcccttgctaactg

SEQ ID NO: 4439732 - DNA, 25 bp, Homo sapien
tttttgaacggctgaaaatgatccc

SEQ ID NO: 4439733 - DNA, 25 bp, Homo sapien
tcagaggccccacacttcaaaagtt

SEQ ID NO: 4439734 - DNA, 25 bp, Homo sapien
aagcaagtaaagtccccatcgaggt

SEQ ID NO: 4439735 - DNA, 25 bp, Homo sapien
tgtgaattcctttaacttggtatct

SEQ ID NO: 4439736 - DNA, 25 bp, Homo sapien
gtcctctgggagatataatgatgtg

SEQ ID NO: 4439737 - DNA, 25 bp, Homo sapien
aatgaattcatggattccccactcc

SEQ ID NO: 4439738 - DNA, 25 bp, Homo sapien
tagaaagttctaggctttgtcctct

SEQ ID NO: 4439739 - DNA, 25 bp, Homo sapien
gaaactaagcagttgtagagagcct

SEQ ID NO: 4439740 - DNA, 25 bp, Homo sapien
taccttttaactgaagtgtgcttca

SEQ ID NO: 4439741 - DNA, 25 bp, Homo sapien
gcaatactaagtactgtagctacac

SEQ ID NO: 4439742 - DNA, 25 bp, Homo sapien
catggttgtgtttaagtctaacagc

SEQ ID NO: 4439743 - DNA, 25 bp, Homo sapien
tttacaggcgaggaaggaccaagtc

SEQ ID NO: 4439744 - DNA, 25 bp, Homo sapien
gagagttaatcatcgcaggcacatg

SEQ ID NO: 4439745 - DNA, 25 bp, Homo sapien
catacgtggatggatgtcagtgtcc

SEQ ID NO: 4439746 - DNA, 25 bp, Homo sapien
tgtggagtctgtcttacccaaggcc

SEQ ID NO: 4439747 - DNA, 25 bp, Homo sapien
acttacagcagtaactaatcctcat

SEQ ID NO: 4439748 - DNA, 25 bp, Homo sapien
tttaaacttacagcagtaactaatc

SEQ ID NO: 4439749 - DNA, 25 bp, Homo sapien
aacttacagcagtaactaatcctca

SEQ ID NO: 4439750 - DNA, 25 bp, Homo sapien
taaacttacagcagtaactaatcct

SEQ ID NO: 4439751 - DNA, 25 bp, Homo sapien
aatcctctttttcttattgtccttg

SEQ ID NO: 4439752 - DNA, 25 bp, Homo sapien
ctgtctgttgggcagaaaggccaca

SEQ ID NO: 4439753 - DNA, 25 bp, Homo sapien
aaatcatgtctgctttaagttctaa

SEQ ID NO: 4439754 - DNA, 25 bp, Homo sapien
ctaaaatgttctcctgtctgttggg

SEQ ID NO: 4439755 - DNA, 25 bp, Homo sapien
agggtgttgacatttgacgagacga

SEQ ID NO: 4439756 - DNA, 25 bp, Homo sapien
agccttggtgggcagtataaccagg

SEQ ID NO: 4439757 - DNA, 25 bp, Homo sapien
aagaatccagatgtcatgggcctca

SEQ ID NO: 4439758 - DNA, 25 bp, Homo sapien
gggatgcagctccggatctctctgc

SEQ ID NO: 4439759 - DNA, 25 bp, Homo sapien
aatcaagaaaaatgaaaagaattgg

SEQ ID NO: 4439760 - DNA, 25 bp, Homo sapien
ctgcaatcaagaaaaatgaaaagaa

SEQ ID NO: 4439761 - DNA, 25 bp, Homo sapien
tgcaatcaagaaaaatgaaaagaat

SEQ ID NO: 4439762 - DNA, 25 bp, Homo sapien
caagaaaaatgaaaagaattggagt

SEQ ID NO: 4439763 - DNA, 25 bp, Homo sapien
cactgcatatttcgaagagcctggg

SEQ ID NO: 4439764 - DNA, 25 bp, Homo sapien
tgcatatttcgaagagcctgggttt

SEQ ID NO: 4439765 - DNA, 25 bp, Homo sapien
tttaagacctttctcagtcttaatc

SEQ ID NO: 4439766 - DNA, 25 bp, Homo sapien
atttttcactgcatatttcgaagag

SEQ ID NO: 4439767 - DNA, 25 bp, Homo sapien
atgagagaatccagcacgtgtactc

SEQ ID NO: 4439768 - DNA, 25 bp, Homo sapien
ctgcagtggatgctgtagaaagtta

SEQ ID NO: 4439769 - DNA, 25 bp, Homo sapien
cagcacgtgtactcctaagtattat

SEQ ID NO: 4439770 - DNA, 25 bp, Homo sapien
aagtattattctctacagtttctcc

SEQ ID NO: 4439771 - DNA, 25 bp, Homo sapien
tgctctttaacttgaagaacagtct

SEQ ID NO: 4439772 - DNA, 25 bp, Homo sapien
gaacagtctaagtcagtgaggtttg

SEQ ID NO: 4439773 - DNA, 25 bp, Homo sapien
gtttgccatggcatcaaatctcctt

SEQ ID NO: 4439774 - DNA, 25 bp, Homo sapien
ccacaccgcttgaataataactatg

SEQ ID NO: 4439775 - DNA, 25 bp, Homo sapien
caaagagtaatgtcaatccgctgga

SEQ ID NO: 4439776 - DNA, 25 bp, Homo sapien
gccaccgtgcttgccagtaatgaat

SEQ ID NO: 4439777 - DNA, 25 bp, Homo sapien
tctgacagggcgatgtaaaggaacc

SEQ ID NO: 4439778 - DNA, 25 bp, Homo sapien
caagagtcagccaatatagtgcaca

SEQ ID NO: 4439779 - DNA, 25 bp, Homo sapien
tattctgattgcaacagtaggcagc

SEQ ID NO: 4439780 - DNA, 25 bp, Homo sapien
tcccaatgtctagcgtagtgcccag

SEQ ID NO: 4439781 - DNA, 25 bp, Homo sapien
ccaatacgaggagagtgtcactgac

SEQ ID NO: 4439782 - DNA, 25 bp, Homo sapien
tgaacctcttggtgacccggaatga

SEQ ID NO: 4439783 - DNA, 25 bp, Homo sapien
aagactggtcagatgttgtgctcaa

SEQ ID NO: 4439784 - DNA, 25 bp, Homo sapien
tagacacgagtgagccctgctagga

SEQ ID NO: 4439785 - DNA, 25 bp, Homo sapien
caagaataccatggaggcccaaagt

SEQ ID NO: 4439786 - DNA, 25 bp, Homo sapien
gcatcttgtagtttagtggtcaccc

SEQ ID NO: 4439787 - DNA, 25 bp, Homo sapien
ttcctgaattacttcgcttagatgc

SEQ ID NO: 4439788 - DNA, 25 bp, Homo sapien
tgaattacttcgcttagatgctctc

SEQ ID NO: 4439789 - DNA, 25 bp, Homo sapien
cctgaattacttcgcttagatgctc

SEQ ID NO: 4439790 - DNA, 25 bp, Homo sapien
aattacttcgcttagatgctctcca

SEQ ID NO: 4439791 - DNA, 25 bp, Homo sapien
aatgtccaagacaaccacaaaaatg

SEQ ID NO: 4439792 - DNA, 25 bp, Homo sapien
cattcagagcctccgtgactgtgcc

SEQ ID NO: 4439793 - DNA, 25 bp, Homo sapien
ccggtccatttggatccttatgaat

SEQ ID NO: 4439794 - DNA, 25 bp, Homo sapien
gctttgcattcagagcctccgtgac

SEQ ID NO: 4439795 - DNA, 25 bp, Homo sapien
ggcaatacccagattgattttggct

SEQ ID NO: 4439796 - DNA, 25 bp, Homo sapien
ccgactgtagaccaattgaccagca

SEQ ID NO: 4439797 - DNA, 25 bp, Homo sapien
gcaataactggtgcttctcgctgaa

SEQ ID NO: 4439798 - DNA, 25 bp, Homo sapien
taagattccacgaggcacgagttgg

SEQ ID NO: 4439799 - DNA, 25 bp, Homo sapien
ctctgtagttttccaagccgttctc

SEQ ID NO: 4439800 - DNA, 25 bp, Homo sapien
tctgtagttttccaagccgttctcc

SEQ ID NO: 4439801 - DNA, 25 bp, Homo sapien
tcacggtttctcagctcaattcttt

SEQ ID NO: 4439802 - DNA, 25 bp, Homo sapien
gctcaattctttcgactgcttgcat

SEQ ID NO: 4439803 - DNA, 25 bp, Homo sapien
aggatctcacggtttctcagctcaa

SEQ ID NO: 4439804 - DNA, 25 bp, Homo sapien
caagctgaggatctcacggtttctc

SEQ ID NO: 4439805 - DNA, 25 bp, Homo sapien
gcaggacagggattcctccgagggc

SEQ ID NO: 4439806 - DNA, 25 bp, Homo sapien
tcccagccagcaggacagggattcc

SEQ ID NO: 4439807 - DNA, 25 bp, Homo sapien
ttagtacacttctgtggggagtaca

SEQ ID NO: 4439808 - DNA, 25 bp, Homo sapien
gggagtacactctggtcctggcagc

SEQ ID NO: 4439809 - DNA, 25 bp, Homo sapien
gaagtgcagagcgtcacatgtgaat

SEQ ID NO: 4439810 - DNA, 25 bp, Homo sapien
agcgtcacatgtgaattgtggctca

SEQ ID NO: 4439811 - DNA, 25 bp, Homo sapien
tcacatgtgaattgtggctcagcag

SEQ ID NO: 4439812 - DNA, 25 bp, Homo sapien
tgcagagcgtcacatgtgaattgtg

SEQ ID NO: 4439813 - DNA, 25 bp, Homo sapien
tatcacatgggtggtaaacaaaggc

SEQ ID NO: 4439814 - DNA, 25 bp, Homo sapien
tgaagaactttagggcaggtggaaa

SEQ ID NO: 4439815 - DNA, 25 bp, Homo sapien
tatgggctttttatcacatgggtgg

SEQ ID NO: 4439816 - DNA, 25 bp, Homo sapien
tcatgaagaactttagggcaggtgg

SEQ ID NO: 4439817 - DNA, 25 bp, Homo sapien
aagttcaccttttgaatgtgcagag

SEQ ID NO: 4439818 - DNA, 25 bp, Homo sapien
agacttgtccttgaaagttcacctt

SEQ ID NO: 4439819 - DNA, 25 bp, Homo sapien
ttcaccttttgaatgtgcagagact

SEQ ID NO: 4439820 - DNA, 25 bp, Homo sapien
tcaccttttgaatgtgcagagactc

SEQ ID NO: 4439821 - DNA, 25 bp, Homo sapien
cttcatgccgatgttcgtgctgttc

SEQ ID NO: 4439822 - DNA, 25 bp, Homo sapien
ttgccttcatgccgatgttcgtgct

SEQ ID NO: 4439823 - DNA, 25 bp, Homo sapien
gccttcatgccgatgttcgtgctgt

SEQ ID NO: 4439824 - DNA, 25 bp, Homo sapien
tgttcgtgctgttcccactatttgg

SEQ ID NO: 4439825 - DNA, 25 bp, Homo sapien
atgagcaggctgcttcgggcctatt

SEQ ID NO: 4439826 - DNA, 25 bp, Homo sapien
gagcaggctgcttcgggcctatttc

SEQ ID NO: 4439827 - DNA, 25 bp, Homo sapien
agggcttccctccagagattgcgtt

SEQ ID NO: 4439828 - DNA, 25 bp, Homo sapien
agagattgcgttcaccctcttcctc

SEQ ID NO: 4439829 - DNA, 25 bp, Homo sapien
gcttgtctagcctaaaccagtggga

SEQ ID NO: 4439830 - DNA, 25 bp, Homo sapien
gatatacagtacatccagggagctg

SEQ ID NO: 4439831 - DNA, 25 bp, Homo sapien
taggaaatagctccgtactagggac

SEQ ID NO: 4439832 - DNA, 25 bp, Homo sapien
tacatacaggtccaagcagtccctg

SEQ ID NO: 4439833 - DNA, 25 bp, Homo sapien
taagacgatgctctctgatctgatc

SEQ ID NO: 4439834 - DNA, 25 bp, Homo sapien
gagcttgccaagtccatgagggaac

SEQ ID NO: 4439835 - DNA, 25 bp, Homo sapien
ggaacataagttgcctttggacagc

SEQ ID NO: 4439836 - DNA, 25 bp, Homo sapien
gtcccaggccctggtaagacgatgc

SEQ ID NO: 4439837 - DNA, 25 bp, Homo sapien
tgttgagattcacgcagtcacatcc

SEQ ID NO: 4439838 - DNA, 25 bp, Homo sapien
ggttttggctactccacaggtgctg

SEQ ID NO: 4439839 - DNA, 25 bp, Homo sapien
taacatgaaaggcactgcacgcgca

SEQ ID NO: 4439840 - DNA, 25 bp, Homo sapien
gaatgtgtagcacccactcaggaag

SEQ ID NO: 4439841 - DNA, 25 bp, Homo sapien
gtttaggtagcagcactcgtaggag

SEQ ID NO: 4439842 - DNA, 25 bp, Homo sapien
tgttgccactccaggccatcagaga

SEQ ID NO: 4439843 - DNA, 25 bp, Homo sapien
gcactcgtaggagagtttctcggaa

SEQ ID NO: 4439844 - DNA, 25 bp, Homo sapien
ttctcggaaggtaatctccagacca

SEQ ID NO: 4439845 - DNA, 25 bp, Homo sapien
aagaagctgattaccggctctccca

SEQ ID NO: 4439846 - DNA, 25 bp, Homo sapien
tgggtcctggcttgttggaatctac

SEQ ID NO: 4439847 - DNA, 25 bp, Homo sapien
gactttgaaattgggagcattccaa

SEQ ID NO: 4439848 - DNA, 25 bp, Homo sapien
gaaagcactctgtacagctctgtaa

SEQ ID NO: 4439849 - DNA, 25 bp, Homo sapien
ctgtcatggccgtgttcatgccgtc

SEQ ID NO: 4439850 - DNA, 25 bp, Homo sapien
ggccgtgttcatgccgtcttcgagg

SEQ ID NO: 4439851 - DNA, 25 bp, Homo sapien
ttcgaggctcgcatttggagcctgc

SEQ ID NO: 4439852 - DNA, 25 bp, Homo sapien
ccgtcttcgaggctcgcatttggag

SEQ ID NO: 4439853 - DNA, 25 bp, Homo sapien
ggttgtgcaatcaccacttggcagg

SEQ ID NO: 4439854 - DNA, 25 bp, Homo sapien
gacgctctgccaataggatcccagt

SEQ ID NO: 4439855 - DNA, 25 bp, Homo sapien
tgtctcagcgtgaaagcccaaggct

SEQ ID NO: 4439856 - DNA, 25 bp, Homo sapien
taaccagtgctaggagagtgacgac

SEQ ID NO: 4439857 - DNA, 25 bp, Homo sapien
taaacggcagattctgttccccgaa

SEQ ID NO: 4439858 - DNA, 25 bp, Homo sapien
aagcaaatgaggagaagccttcctg

SEQ ID NO: 4439859 - DNA, 25 bp, Homo sapien
atggcactgtgtctaatgaagcaag

SEQ ID NO: 4439860 - DNA, 25 bp, Homo sapien
aagacccagctgttagcaggcagcc

SEQ ID NO: 4439861 - DNA, 25 bp, Homo sapien
ggttctgttgttcagtagcattttc

SEQ ID NO: 4439862 - DNA, 25 bp, Homo sapien
tcaggttctgttgttcagtagcatt

SEQ ID NO: 4439863 - DNA, 25 bp, Homo sapien
caggttctgttgttcagtagcattt

SEQ ID NO: 4439864 - DNA, 25 bp, Homo sapien
attcaggttctgttgttcagtagca

SEQ ID NO: 4439865 - DNA, 25 bp, Homo sapien
taaaagtagcatggaaagcaccaga

SEQ ID NO: 4439866 - DNA, 25 bp, Homo sapien
tgactggctgtgatacaagttctgg

SEQ ID NO: 4439867 - DNA, 25 bp, Homo sapien
ggtctgcacttccacgtacaagatg

SEQ ID NO: 4439868 - DNA, 25 bp, Homo sapien
caagatgtccatgcttgccttgatc

SEQ ID NO: 4439869 - DNA, 25 bp, Homo sapien
taggtgacaactggctggttatctg

SEQ ID NO: 4439870 - DNA, 25 bp, Homo sapien
caagtttagtgagcatgcatggaca

SEQ ID NO: 4439871 - DNA, 25 bp, Homo sapien
gactgtcctagatggtaggtgacaa

SEQ ID NO: 4439872 - DNA, 25 bp, Homo sapien
ggttatctggctgtgtcatgggtac

SEQ ID NO: 4439873 - DNA, 25 bp, Homo sapien
ttctgagtgatcactcatcagctca

SEQ ID NO: 4439874 - DNA, 25 bp, Homo sapien
cctcagttccttctccagagcccac

SEQ ID NO: 4439875 - DNA, 25 bp, Homo sapien
ctcgccctcagttccttctccagag

SEQ ID NO: 4439876 - DNA, 25 bp, Homo sapien
tcgccctcagttccttctccagagc

SEQ ID NO: 4439877 - DNA, 25 bp, Homo sapien
gccctcagttccttctccagagccc

SEQ ID NO: 4439878 - DNA, 25 bp, Homo sapien
ggatggagctatctccagcccagct

SEQ ID NO: 4439879 - DNA, 25 bp, Homo sapien
taggacacattgatggtgccttggg

SEQ ID NO: 4439880 - DNA, 25 bp, Homo sapien
ggcgagtatgttccatggcttttgg

SEQ ID NO: 4439881 - DNA, 25 bp, Homo sapien
tgccttggggcgagtatgttccatg

SEQ ID NO: 4439882 - DNA, 25 bp, Homo sapien
atgtaattttaccaatgaagacact

SEQ ID NO: 4439883 - DNA, 25 bp, Homo sapien
gtaattttaccaatgaagacactgg

SEQ ID NO: 4439884 - DNA, 25 bp, Homo sapien
agggctgtccacaccaatttgtgtg

SEQ ID NO: 4439885 - DNA, 25 bp, Homo sapien
aggaagccaagcatgtcaggagccc

SEQ ID NO: 4439886 - DNA, 25 bp, Homo sapien
aatttgtgtgagcagccaagtccag

SEQ ID NO: 4439887 - DNA, 25 bp, Homo sapien
agccaagcatgtcaggagccctcct

SEQ ID NO: 4439888 - DNA, 25 bp, Homo sapien
gaggcctgttgacagaaatcctggt

SEQ ID NO: 4439889 - DNA, 25 bp, Homo sapien
gggtggttatcagatccaaaagtgt

SEQ ID NO: 4439890 - DNA, 25 bp, Homo sapien
aacccatccaaaggcgatagctttg

SEQ ID NO: 4439891 - DNA, 25 bp, Homo sapien
ggcttcattagggtggttatcagat

SEQ ID NO: 4439892 - DNA, 25 bp, Homo sapien
cagggggtgaattatcatcatggtt

SEQ ID NO: 4439893 - DNA, 25 bp, Homo sapien
cctgcagggggtgaattatcatcat

SEQ ID NO: 4439894 - DNA, 25 bp, Homo sapien
ggttcctcttcagtggtccacacat

SEQ ID NO: 4439895 - DNA, 25 bp, Homo sapien
tgcagggggtgaattatcatcatgg

SEQ ID NO: 4439896 - DNA, 25 bp, Homo sapien
tcagcacaccttgatgacccctgag

SEQ ID NO: 4439897 - DNA, 25 bp, Homo sapien
cacatccatggccaggctaggacat

SEQ ID NO: 4439898 - DNA, 25 bp, Homo sapien
catggactctatttgctctgaggaa

SEQ ID NO: 4439899 - DNA, 25 bp, Homo sapien
acacaaaatcatggactctatttgc

SEQ ID NO: 4439900 - DNA, 25 bp, Homo sapien
gaattctacgtgaagcatttccaag

SEQ ID NO: 4439901 - DNA, 25 bp, Homo sapien
cagtgagattggtggagactgccac

SEQ ID NO: 4439902 - DNA, 25 bp, Homo sapien
catttccaaggagtaggatcacacc

SEQ ID NO: 4439903 - DNA, 25 bp, Homo sapien
acagggagctagtgggacagtgaga

SEQ ID NO: 4439904 - DNA, 25 bp, Homo sapien
tttgatgatagttttcaaatgccgt

SEQ ID NO: 4439905 - DNA, 25 bp, Homo sapien
caaatgccgttcatcaatgatgatg

SEQ ID NO: 4439906 - DNA, 25 bp, Homo sapien
gatagttttcaaatgccgttcatca

SEQ ID NO: 4439907 - DNA, 25 bp, Homo sapien
caatgatgatggataactttggttt

SEQ ID NO: 4439908 - DNA, 25 bp, Homo sapien
tttgcagaaccatctggctccagag

SEQ ID NO: 4439909 - DNA, 25 bp, Homo sapien
aacagtttttgtgcccactcgtgct

SEQ ID NO: 4439910 - DNA, 25 bp, Homo sapien
tatccagtttccacaagccaaattg

SEQ ID NO: 4439911 - DNA, 25 bp, Homo sapien
tcgtgcttcttaacgtgactcctgt

SEQ ID NO: 4439912 - DNA, 25 bp, Homo sapien
ctgccgcggcgctccctcggccggc

SEQ ID NO: 4439913 - DNA, 25 bp, Homo sapien
ggcccacagagacgcctctcccgct

SEQ ID NO: 4439914 - DNA, 25 bp, Homo sapien
ttgggggcggtgtgcgtattctcat

SEQ ID NO: 4439915 - DNA, 25 bp, Homo sapien
ctcggccggccgcttgggggcggtg

SEQ ID NO: 4439916 - DNA, 25 bp, Homo sapien
ttggtgcgccgcgttcgccttcgct

SEQ ID NO: 4439917 - DNA, 25 bp, Homo sapien
tccccgtggggtgaggacacgcgtc

SEQ ID NO: 4439918 - DNA, 25 bp, Homo sapien
gtgaggacacgcgtcccccgagcgc

SEQ ID NO: 4439919 - DNA, 25 bp, Homo sapien
gggccggcaggttggtgcgccgcgt

SEQ ID NO: 4439920 - DNA, 25 bp, Homo sapien
ctgtgtgtaccggagcgcggcggcc

SEQ ID NO: 4439921 - DNA, 25 bp, Homo sapien
ggagccctgaactcgcaggccagct

SEQ ID NO: 4439922 - DNA, 25 bp, Homo sapien
tagaggttgctcctggagagcgaca

SEQ ID NO: 4439923 - DNA, 25 bp, Homo sapien
gggaatgcctgtgcgtccggagtag

SEQ ID NO: 4439924 - DNA, 25 bp, Homo sapien
ggagctgttggtgcccagcagggat

SEQ ID NO: 4439925 - DNA, 25 bp, Homo sapien
tggagctgttggtgcccagcaggga

SEQ ID NO: 4439926 - DNA, 25 bp, Homo sapien
gagctgttggtgcccagcagggatc

SEQ ID NO: 4439927 - DNA, 25 bp, Homo sapien
ggtggagctgttggtgcccagcagg

SEQ ID NO: 4439928 - DNA, 25 bp, Homo sapien
ggaacaggacgcctagtccccaggc

SEQ ID NO: 4439929 - DNA, 25 bp, Homo sapien
acacacatgcatcaggaacaggacg

SEQ ID NO: 4439930 - DNA, 25 bp, Homo sapien
tgcatcaggaacaggacgcctagtc

SEQ ID NO: 4439931 - DNA, 25 bp, Homo sapien
gaatgcggttggtgccacacacatg

SEQ ID NO: 4439932 - DNA, 25 bp, Homo sapien
tcagggatgccagaaggaggaaacc

SEQ ID NO: 4439933 - DNA, 25 bp, Homo sapien
tcaggttggcatcctcgatgcggaa

SEQ ID NO: 4439934 - DNA, 25 bp, Homo sapien
ggtgatgctcttccactggccggtt

SEQ ID NO: 4439935 - DNA, 25 bp, Homo sapien
tcacagtcgatgtacagctgggccc

SEQ ID NO: 4439936 - DNA, 25 bp, Homo sapien
gctgactgctaaaggaaaaccattt

SEQ ID NO: 4439937 - DNA, 25 bp, Homo sapien
catgaggaatccaatagcaaagtgg

SEQ ID NO: 4439938 - DNA, 25 bp, Homo sapien
gcaaagtggtactgattctgcccat

SEQ ID NO: 4439939 - DNA, 25 bp, Homo sapien
tctaaggcttgaacaggctgactgc

SEQ ID NO: 4439940 - DNA, 25 bp, Homo sapien
caaagacaaacctcacattctgcag

SEQ ID NO: 4439941 - DNA, 25 bp, Homo sapien
tctggtgtggttccaaagacaaacc

SEQ ID NO: 4439942 - DNA, 25 bp, Homo sapien
agctggagcagcctttgttcctgag

SEQ ID NO: 4439943 - DNA, 25 bp, Homo sapien
tgttcctgaggatgtcttctggtgt

SEQ ID NO: 4439944 - DNA, 25 bp, Homo sapien
ccaatgtagttagtgcggatggcag

SEQ ID NO: 4439945 - DNA, 25 bp, Homo sapien
ctgcagcgtggtcacaatggtgcgc

SEQ ID NO: 4439946 - DNA, 25 bp, Homo sapien
cattcaccacgttgttgtcaagggt

SEQ ID NO: 4439947 - DNA, 25 bp, Homo sapien
cactttgcggatgctgtcctgcagc

SEQ ID NO: 4439948 - DNA, 25 bp, Homo sapien
tgaactccgttgtgatagcataggg

SEQ ID NO: 4439949 - DNA, 25 bp, Homo sapien
tgacactcagtgcagctatcaacag

SEQ ID NO: 4439950 - DNA, 25 bp, Homo sapien
ggaggccgcctcagctcattggcca

SEQ ID NO: 4439951 - DNA, 25 bp, Homo sapien
cagtccattcctcgttatttctgta

SEQ ID NO: 4439952 - DNA, 25 bp, Homo sapien
catcaggaactgtggcattggagca

SEQ ID NO: 4439953 - DNA, 25 bp, Homo sapien
gatggggcaggacacctttttgcag

SEQ ID NO: 4439954 - DNA, 25 bp, Homo sapien
catgatggggcaggacacctttttg

SEQ ID NO: 4439955 - DNA, 25 bp, Homo sapien
ttctccatcaggaactgtggcattg

SEQ ID NO: 4439956 - DNA, 25 bp, Homo sapien
tagagctgttgctgccacgtcttca

SEQ ID NO: 4439957 - DNA, 25 bp, Homo sapien
tgagctataccaagatcttcactgc

SEQ ID NO: 4439958 - DNA, 25 bp, Homo sapien
ccagatgggtaattacgatgtactc

SEQ ID NO: 4439959 - DNA, 25 bp, Homo sapien
gatcaggccaatgcttacacagtaa

SEQ ID NO: 4439960 - DNA, 25 bp, Homo sapien
acatatttcttaggccaacggccca

SEQ ID NO: 4439961 - DNA, 25 bp, Homo sapien
tatgagccggcacaaagttgcagtt

SEQ ID NO: 4439962 - DNA, 25 bp, Homo sapien
gttctggctccaactcggccgtgag

SEQ ID NO: 4439963 - DNA, 25 bp, Homo sapien
caagaatgcgcgagtatgaggaagc

SEQ ID NO: 4439964 - DNA, 25 bp, Homo sapien
caggtacgtgatgattaggacaagc

SEQ ID NO: 4439965 - DNA, 25 bp, Homo sapien
aaacagaggttcatcaggtacgtga

SEQ ID NO: 4439966 - DNA, 25 bp, Homo sapien
gagggctctgttcagggccctccac

SEQ ID NO: 4439967 - DNA, 25 bp, Homo sapien
ttctttagagggctctgttcagggc

SEQ ID NO: 4439968 - DNA, 25 bp, Homo sapien
gaacaggaggtccactcggaccatg

SEQ ID NO: 4439969 - DNA, 25 bp, Homo sapien
cattgccacagctcgtagaacagga

SEQ ID NO: 4439970 - DNA, 25 bp, Homo sapien
cacactcctgaatgtggcaggtccg

SEQ ID NO: 4439971 - DNA, 25 bp, Homo sapien
cacatcggttgttgaggctatcgca

SEQ ID NO: 4439972 - DNA, 25 bp, Homo sapien
tcaagggtgcacagctaagcagtgg

SEQ ID NO: 4439973 - DNA, 25 bp, Homo sapien
tccagagatcctagaacccgtgttc

SEQ ID NO: 4439974 - DNA, 25 bp, Homo sapien
tacagggtgcttaccataaaccaaa

SEQ ID NO: 4439975 - DNA, 25 bp, Homo sapien
taatatacatgctgtggagctgccc

SEQ ID NO: 4439976 - DNA, 25 bp, Homo sapien
taaagtacagagttgatggtcacaa

SEQ ID NO: 4439977 - DNA, 25 bp, Homo sapien
ctaaagtacagagttgatggtcaca

SEQ ID NO: 4439978 - DNA, 25 bp, Homo sapien
cgccttcacagggtttcccgttcat

SEQ ID NO: 4439979 - DNA, 25 bp, Homo sapien
cccgcgcttcgccttcacagggttt

SEQ ID NO: 4439980 - DNA, 25 bp, Homo sapien
gccggatccttgtgatcacaccatc

SEQ ID NO: 4439981 - DNA, 25 bp, Homo sapien
gagagttgcagagccggatccttgt

SEQ ID NO: 4439982 - DNA, 25 bp, Homo sapien
tgctctatgacccactgaactgcag

SEQ ID NO: 4439983 - DNA, 25 bp, Homo sapien
tctctagtaggtaaccttcctgctc

SEQ ID NO: 4439984 - DNA, 25 bp, Homo sapien
tttcattaaaagaagttgctgagcc

SEQ ID NO: 4439985 - DNA, 25 bp, Homo sapien
ctgcagatgccaggcaaccagctgg

SEQ ID NO: 4439986 - DNA, 25 bp, Homo sapien
acagaacagatgtcccatggtgacc

SEQ ID NO: 4439987 - DNA, 25 bp, Homo sapien
gggttgttgcagagacgactacgtt

SEQ ID NO: 4439988 - DNA, 25 bp, Homo sapien
tggacagtcctgcttgttgcagatc

SEQ ID NO: 4439989 - DNA, 25 bp, Homo sapien
tgttacatcaccaacgcagtccttg

SEQ ID NO: 4439990 - DNA, 25 bp, Homo sapien
cctgggtcgtttcatcctgggctgc

SEQ ID NO: 4439991 - DNA, 25 bp, Homo sapien
gtcgtttcatcctgggctgcgtggc

SEQ ID NO: 4439992 - DNA, 25 bp, Homo sapien
tgggtcgtttcatcctgggctgcgt

SEQ ID NO: 4439993 - DNA, 25 bp, Homo sapien
ggtcgtttcatcctgggctgcgtgg

SEQ ID NO: 4439994 - DNA, 25 bp, Homo sapien
tagtacacttcacgccggcaaagca

SEQ ID NO: 4439995 - DNA, 25 bp, Homo sapien
catctgtgcactggatgccatttcc

SEQ ID NO: 4439996 - DNA, 25 bp, Homo sapien
catttccagctgccatcagggtagc

SEQ ID NO: 4439997 - DNA, 25 bp, Homo sapien
tccactgtaaccagggggacaagca

SEQ ID NO: 4439998 - DNA, 25 bp, Homo sapien
acaccctggccgaagggctgtgagc

SEQ ID NO: 4439999 - DNA, 25 bp, Homo sapien
caccggtgctctccattgtggttga

SEQ ID NO: 4440000 - DNA, 25 bp, Homo sapien
tgtttgttggccgtggcatgttcga

SEQ ID NO: 4440001 - DNA, 25 bp, Homo sapien
gggtccgtgttctcacaccggtgct

SEQ ID NO: 4440002 - DNA, 25 bp, Homo sapien
ctgtcctctggtttactcgtctagt

SEQ ID NO: 4440003 - DNA, 25 bp, Homo sapien
tcccgctcccagttattttggtcaa

SEQ ID NO: 4440004 - DNA, 25 bp, Homo sapien
ggtttactcgtctagttgactgtac

SEQ ID NO: 4440005 - DNA, 25 bp, Homo sapien
ccgctcccagttattttggtcaagg

SEQ ID NO: 4440006 - DNA, 25 bp, Homo sapien
gatgatgccattgccagcgtagcca

SEQ ID NO: 4440007 - DNA, 25 bp, Homo sapien
caccaggttctcattgggccagcca

SEQ ID NO: 4440008 - DNA, 25 bp, Homo sapien
tggtaagtcgcattggccacgcaca

SEQ ID NO: 4440009 - DNA, 25 bp, Homo sapien
tcttgttgcagtcgtgggtcccatc

SEQ ID NO: 4440010 - DNA, 25 bp, Homo sapien
ggagtgtacctggaattccaaatag

SEQ ID NO: 4440011 - DNA, 25 bp, Homo sapien
ggacagaagagttgactatggaaca

SEQ ID NO: 4440012 - DNA, 25 bp, Homo sapien
gcttcagttgccttcctcatgctga

SEQ ID NO: 4440013 - DNA, 25 bp, Homo sapien
tgagctcatgcacgagggagtgtac

SEQ ID NO: 4440014 - DNA, 25 bp, Homo sapien
acaggcatcaccaattccatccttg

SEQ ID NO: 4440015 - DNA, 25 bp, Homo sapien
cctgagttgggaaggttggggcaat

SEQ ID NO: 4440016 - DNA, 25 bp, Homo sapien
tccatccttgtcatagtcttcctgc

SEQ ID NO: 4440017 - DNA, 25 bp, Homo sapien
ttcctgccctgagttgggaaggttg

SEQ ID NO: 4440018 - DNA, 25 bp, Homo sapien
tcccaaagtgtttcaggctgttgct

SEQ ID NO: 4440019 - DNA, 25 bp, Homo sapien
ggataggctaattgatcactcagtg

SEQ ID NO: 4440020 - DNA, 25 bp, Homo sapien
gaatctagggaacaaagtggcattt

SEQ ID NO: 4440021 - DNA, 25 bp, Homo sapien
tcagttcatagtgtgcccaaagtca

SEQ ID NO: 4440022 - DNA, 25 bp, Homo sapien
tgtggttgtagggacagttgtcaca

SEQ ID NO: 4440023 - DNA, 25 bp, Homo sapien
ctctgtcatagtcatactgagctgg

SEQ ID NO: 4440024 - DNA, 25 bp, Homo sapien
ttgtcacagcggtctcccacatcat

SEQ ID NO: 4440025 - DNA, 25 bp, Homo sapien
tactgagctgggttgtaatggaatg

SEQ ID NO: 4440026 - DNA, 25 bp, Homo sapien
tactaatagccaggactagacagaa

SEQ ID NO: 4440027 - DNA, 25 bp, Homo sapien
cagaagtacgtttggaaagctgtgc

SEQ ID NO: 4440028 - DNA, 25 bp, Homo sapien
tccaccaaagtgcatactaatagcc

SEQ ID NO: 4440029 - DNA, 25 bp, Homo sapien
cagccttggatgtttccaccaaagt

SEQ ID NO: 4440030 - DNA, 25 bp, Homo sapien
cacattgtagacgtactggcagttg

SEQ ID NO: 4440031 - DNA, 25 bp, Homo sapien
ctctggtccacattgtagacgtact

SEQ ID NO: 4440032 - DNA, 25 bp, Homo sapien
gcagttgtcccgttcattgaggata

SEQ ID NO: 4440033 - DNA, 25 bp, Homo sapien
gatccggattgtgttccaaggggca

SEQ ID NO: 4440034 - DNA, 25 bp, Homo sapien
tgttgacacgtcgacttctctgaaa

SEQ ID NO: 4440035 - DNA, 25 bp, Homo sapien
caaaggccatgaaagggatattcca

SEQ ID NO: 4440036 - DNA, 25 bp, Homo sapien
tgctgagcaagtccagtagcccttc

SEQ ID NO: 4440037 - DNA, 25 bp, Homo sapien
gcaaggagctcacatcaggcaaatt

SEQ ID NO: 4440038 - DNA, 25 bp, Homo sapien
tgtcatcaggaatgccatcgttgtc

SEQ ID NO: 4440039 - DNA, 25 bp, Homo sapien
cattgggcacatagggacagttgtc

SEQ ID NO: 4440040 - DNA, 25 bp, Homo sapien
tcatcatcgtggtcacaggcatctc

SEQ ID NO: 4440041 - DNA, 25 bp, Homo sapien
tccaatgcggtctgagtcagagtcc

SEQ ID NO: 4440042 - DNA, 25 bp, Homo sapien
tgatggcgtacaacccagttagggt

SEQ ID NO: 4440043 - DNA, 25 bp, Homo sapien
gcggaaatcggtctcactgatgtca

SEQ ID NO: 4440044 - DNA, 25 bp, Homo sapien
cacagttgacagtctggacgagttc

SEQ ID NO: 4440045 - DNA, 25 bp, Homo sapien
gaatcatctggaatcggcggaaatc

SEQ ID NO: 4440046 - DNA, 25 bp, Homo sapien
tggaagaagagcccagagccaggtt

SEQ ID NO: 4440047 - DNA, 25 bp, Homo sapien
aagaagagcccagagccaggttaaa

SEQ ID NO: 4440048 - DNA, 25 bp, Homo sapien
gaagagcccagagccaggttaaaac

SEQ ID NO: 4440049 - DNA, 25 bp, Homo sapien
gaagaagagcccagagccaggttaa

SEQ ID NO: 4440050 - DNA, 25 bp, Homo sapien
agtccacagcattaaactcatcata

SEQ ID NO: 4440051 - DNA, 25 bp, Homo sapien
tgaagtccacagcattaaactcatc

SEQ ID NO: 4440052 - DNA, 25 bp, Homo sapien
ctgaagtccacagcattaaactcat

SEQ ID NO: 4440053 - DNA, 25 bp, Homo sapien
gaagtccacagcattaaactcatca

SEQ ID NO: 4440054 - DNA, 25 bp, Homo sapien
acagaaaggcccgagtatccctgag

SEQ ID NO: 4440055 - DNA, 25 bp, Homo sapien
catcacaacataaaagcggctgctg

SEQ ID NO: 4440056 - DNA, 25 bp, Homo sapien
gctgctggactggtagccaaagaca

SEQ ID NO: 4440057 - DNA, 25 bp, Homo sapien
cagcatagtcatcgtccctttcggt

SEQ ID NO: 4440058 - DNA, 25 bp, Homo sapien
ccataagctctctctctgttccagg

SEQ ID NO: 4440059 - DNA, 25 bp, Homo sapien
tctgttccagggctttgcttcttac

SEQ ID NO: 4440060 - DNA, 25 bp, Homo sapien
taagctctctctctgttccagggct

SEQ ID NO: 4440061 - DNA, 25 bp, Homo sapien
tctctctgttccagggctttgcttc

SEQ ID NO: 4440062 - DNA, 25 bp, Homo sapien
gaaacaatgcttgaaaggtactgag

SEQ ID NO: 4440063 - DNA, 25 bp, Homo sapien
gaactttctaagactccctggtcag

SEQ ID NO: 4440064 - DNA, 25 bp, Homo sapien
tggtcagagtcttggtcaaagcaca

SEQ ID NO: 4440065 - DNA, 25 bp, Homo sapien
gccactgagcacacatataaagcag

SEQ ID NO: 4440066 - DNA, 25 bp, Homo sapien
taatgaaacccgtctttggcctgtg

SEQ ID NO: 4440067 - DNA, 25 bp, Homo sapien
tgaaatctttccagcctatgtgacg

SEQ ID NO: 4440068 - DNA, 25 bp, Homo sapien
tatgtgacgagggtcatgccacagg

SEQ ID NO: 4440069 - DNA, 25 bp, Homo sapien
gagacgccatctgtaggcggtgaaa

SEQ ID NO: 4440070 - DNA, 25 bp, Homo sapien
cctagtctaccaccagcataggttt

SEQ ID NO: 4440071 - DNA, 25 bp, Homo sapien
ttgagagaagacaaacaaccctagt

SEQ ID NO: 4440072 - DNA, 25 bp, Homo sapien
tatcatagatgggtcctgagtcagc

SEQ ID NO: 4440073 - DNA, 25 bp, Homo sapien
ttttatcatagatgggtcctgagtc

SEQ ID NO: 4440074 - DNA, 25 bp, Homo sapien
cgtcatccttgatattagtctgaaa

SEQ ID NO: 4440075 - DNA, 25 bp, Homo sapien
ccccataaccgtcatccttgatatt

SEQ ID NO: 4440076 - DNA, 25 bp, Homo sapien
taaccgtcatccttgatattagtct

SEQ ID NO: 4440077 - DNA, 25 bp, Homo sapien
gtctttacactggactcccccataa

SEQ ID NO: 4440078 - DNA, 25 bp, Homo sapien
ccatttttgtccttgtgtcctcaaa

SEQ ID NO: 4440079 - DNA, 25 bp, Homo sapien
tgtccttgtgtcctcaaaagcaaaa

SEQ ID NO: 4440080 - DNA, 25 bp, Homo sapien
ctaggcattattccatttttgtcct

SEQ ID NO: 4440081 - DNA, 25 bp, Homo sapien
ttttgtccttgtgtcctcaaaagca

SEQ ID NO: 4440082 - DNA, 25 bp, Homo sapien
ggagaccgacacagcgtgaaccttc

SEQ ID NO: 4440083 - DNA, 25 bp, Homo sapien
ctgacattgatgctaggagaccgac

SEQ ID NO: 4440084 - DNA, 25 bp, Homo sapien
tagagccagtgttggactcagcgag

SEQ ID NO: 4440085 - DNA, 25 bp, Homo sapien
cttttaggtatctggccttggccca

SEQ ID NO: 4440086 - DNA, 25 bp, Homo sapien
aggtcgcacgttctaggagtccaca

SEQ ID NO: 4440087 - DNA, 25 bp, Homo sapien
tcagggaggaagtccagaagccagt

SEQ ID NO: 4440088 - DNA, 25 bp, Homo sapien
tagttccagaaggtgcaataccagc

SEQ ID NO: 4440089 - DNA, 25 bp, Homo sapien
gcattttcttgaggcaggtcgcacg

SEQ ID NO: 4440090 - DNA, 25 bp, Homo sapien
tgccttacactggtttgattctgat

SEQ ID NO: 4440091 - DNA, 25 bp, Homo sapien
tttgattctgattccctaattctgg

SEQ ID NO: 4440092 - DNA, 25 bp, Homo sapien
gattctgattccctaattctggcca

SEQ ID NO: 4440093 - DNA, 25 bp, Homo sapien
agccagcactgccttacactggttt

SEQ ID NO: 4440094 - DNA, 25 bp, Homo sapien
ttcagccagatcttccagaataagt

SEQ ID NO: 4440095 - DNA, 25 bp, Homo sapien
taaaaatataagcacggctgcccct

SEQ ID NO: 4440096 - DNA, 25 bp, Homo sapien
aaaacagtattgaagacctcatggc

SEQ ID NO: 4440097 - DNA, 25 bp, Homo sapien
caaacactttccgtatgaagcctaa

SEQ ID NO: 4440098 - DNA, 25 bp, Homo sapien
tcatgacataaagccagtagagaac

SEQ ID NO: 4440099 - DNA, 25 bp, Homo sapien
tacaaactgtgaatgttgctatgac

SEQ ID NO: 4440100 - DNA, 25 bp, Homo sapien
aacgcagcaaattctaagcctaggc

SEQ ID NO: 4440101 - DNA, 25 bp, Homo sapien
tgttcttttattccacaaacgcagc

SEQ ID NO: 4440102 - DNA, 25 bp, Homo sapien
atgtttttgatatggcaggctaatg

SEQ ID NO: 4440103 - DNA, 25 bp, Homo sapien
tattcttatgggggcccttgactta

SEQ ID NO: 4440104 - DNA, 25 bp, Homo sapien
tatgtttttgatatggcaggctaat

SEQ ID NO: 4440105 - DNA, 25 bp, Homo sapien
cttgacttagggataatttctcttt

SEQ ID NO: 4440106 - DNA, 25 bp, Homo sapien
ttgaaaaggattcaatgacatctaa

SEQ ID NO: 4440107 - DNA, 25 bp, Homo sapien
ggtgaaactggaacatgcctggaag

SEQ ID NO: 4440108 - DNA, 25 bp, Homo sapien
cattcgtgggtcagaaaatgtcgct

SEQ ID NO: 4440109 - DNA, 25 bp, Homo sapien
tctgcttattggtacacttgggcct

SEQ ID NO: 4440110 - DNA, 25 bp, Homo sapien
tagcccatccaaaaatcaaggtctg

SEQ ID NO: 4440111 - DNA, 25 bp, Homo sapien
cacatgacaataaactgttggagga

SEQ ID NO: 4440112 - DNA, 25 bp, Homo sapien
gctggcaccacctttattgtatgta

SEQ ID NO: 4440113 - DNA, 25 bp, Homo sapien
ggaaaaaagctatcatctcgatgac

SEQ ID NO: 4440114 - DNA, 25 bp, Homo sapien
tcaggagcttaatactggaggcttt

SEQ ID NO: 4440115 - DNA, 25 bp, Homo sapien
tctttttaacgaagatactgctgca

SEQ ID NO: 4440116 - DNA, 25 bp, Homo sapien
gccctttgaagacataactaatgag

SEQ ID NO: 4440117 - DNA, 25 bp, Homo sapien
gagttgctgcgtgtttggctgttac

SEQ ID NO: 4440118 - DNA, 25 bp, Homo sapien
ccttctcaggaaatagatacacaag

SEQ ID NO: 4440119 - DNA, 25 bp, Homo sapien
cacaagagtgtgattcggattagat

SEQ ID NO: 4440120 - DNA, 25 bp, Homo sapien
catggagtgagataaggatcaaatt

SEQ ID NO: 4440121 - DNA, 25 bp, Homo sapien
cattccccattgtgcattcttgaca

SEQ ID NO: 4440122 - DNA, 25 bp, Homo sapien
tcctgttctgttgattgacttatct

SEQ ID NO: 4440123 - DNA, 25 bp, Homo sapien
tgccagtagcatgttgttgcaatta

SEQ ID NO: 4440124 - DNA, 25 bp, Homo sapien
taacaggtgtgatgtagcatctcgt

SEQ ID NO: 4440125 - DNA, 25 bp, Homo sapien
tgttataacaggtgtgatgtagcat

SEQ ID NO: 4440126 - DNA, 25 bp, Homo sapien
gatgtagcatctcgttttgatttta

SEQ ID NO: 4440127 - DNA, 25 bp, Homo sapien
ttgataatagttgttataacaggtg

SEQ ID NO: 4440128 - DNA, 25 bp, Homo sapien
tgagcagtgtaatgtcagtgcagcc

SEQ ID NO: 4440129 - DNA, 25 bp, Homo sapien
cagtggcatcagaagtgacatccag

SEQ ID NO: 4440130 - DNA, 25 bp, Homo sapien
cagcaggcaagtgcacaggtctgga

SEQ ID NO: 4440131 - DNA, 25 bp, Homo sapien
gcagcctggccgtttgacttgtgta

SEQ ID NO: 4440132 - DNA, 25 bp, Homo sapien
gatcgtccataaagctccattcctg

SEQ ID NO: 4440133 - DNA, 25 bp, Homo sapien
agcattgattgagctcctgcctcgt

SEQ ID NO: 4440134 - DNA, 25 bp, Homo sapien
gagatttgctattgatgttccagca

SEQ ID NO: 4440135 - DNA, 25 bp, Homo sapien
cagttgaacttggaaagtacaggct

SEQ ID NO: 4440136 - DNA, 25 bp, Homo sapien
ttagttctcaaccactgactcttct

SEQ ID NO: 4440137 - DNA, 25 bp, Homo sapien
ttctcaaccactgactcttctatct

SEQ ID NO: 4440138 - DNA, 25 bp, Homo sapien
agttctcaaccactgactcttctat

SEQ ID NO: 4440139 - DNA, 25 bp, Homo sapien
tagttctcaaccactgactcttcta

SEQ ID NO: 4440140 - DNA, 25 bp, Homo sapien
atttattttcgtagtgaaaatagct

SEQ ID NO: 4440141 - DNA, 25 bp, Homo sapien
attttcgtagtgaaaatagcttttg

SEQ ID NO: 4440142 - DNA, 25 bp, Homo sapien
gtagtgaaaatagcttttgggggca

SEQ ID NO: 4440143 - DNA, 25 bp, Homo sapien
gaaaatagcttttgggggcattcag

SEQ ID NO: 4440144 - DNA, 25 bp, Homo sapien
aggtggcgggagagacccctctcct

SEQ ID NO: 4440145 - DNA, 25 bp, Homo sapien
ttgccagggaaacagcggtcccaca

SEQ ID NO: 4440146 - DNA, 25 bp, Homo sapien
catttccggatggtacagccctttc

SEQ ID NO: 4440147 - DNA, 25 bp, Homo sapien
gaccggaagcatcgcgcatctggtt

SEQ ID NO: 4440148 - DNA, 25 bp, Homo sapien
tcggcagcgaagacggaaggacaca

SEQ ID NO: 4440149 - DNA, 25 bp, Homo sapien
cgtcggcagcgaagacggaaggaca

SEQ ID NO: 4440150 - DNA, 25 bp, Homo sapien
gtcggcagcgaagacggaaggacac

SEQ ID NO: 4440151 - DNA, 25 bp, Homo sapien
cggcagcgaagacggaaggacacac

SEQ ID NO: 4440152 - DNA, 25 bp, Homo sapien
actcagcctacgactatttgcttcg

SEQ ID NO: 4440153 - DNA, 25 bp, Homo sapien
gcagctgtgttctttcggcaactca

SEQ ID NO: 4440154 - DNA, 25 bp, Homo sapien
tttcggcaactcagcctacgactat

SEQ ID NO: 4440155 - DNA, 25 bp, Homo sapien
tgttctttcggcaactcagcctacg

SEQ ID NO: 4440156 - DNA, 25 bp, Homo sapien
tgtatgagaaccgtgcaggcacttg

SEQ ID NO: 4440157 - DNA, 25 bp, Homo sapien
tcatctaggagcctgttagtctcag

SEQ ID NO: 4440158 - DNA, 25 bp, Homo sapien
gattcctcggtgatttgtctgcaca

SEQ ID NO: 4440159 - DNA, 25 bp, Homo sapien
catttgatctcaggtacacccctgg

SEQ ID NO: 4440160 - DNA, 25 bp, Homo sapien
tatatccccgtgctgttttgagggt

SEQ ID NO: 4440161 - DNA, 25 bp, Homo sapien
gactttgaagggcacaacactttcc

SEQ ID NO: 4440162 - DNA, 25 bp, Homo sapien
tggtgctctcggacttatatccccg

SEQ ID NO: 4440163 - DNA, 25 bp, Homo sapien
tgagggtgtcacctgcaatagctga

SEQ ID NO: 4440164 - DNA, 25 bp, Homo sapien
tccaggtaatactagtgccgactca

SEQ ID NO: 4440165 - DNA, 25 bp, Homo sapien
cctaggttggaatcccggtgccagt

SEQ ID NO: 4440166 - DNA, 25 bp, Homo sapien
tctagaattcggacccctgaggaga

SEQ ID NO: 4440167 - DNA, 25 bp, Homo sapien
taagcatagattcacaggacatggg

SEQ ID NO: 4440168 - DNA, 25 bp, Homo sapien
tacagacagggcaacatgtacctga

SEQ ID NO: 4440169 - DNA, 25 bp, Homo sapien
aagaggacagcacagtacagacagg

SEQ ID NO: 4440170 - DNA, 25 bp, Homo sapien
ggaagcttccttggattagttacca

SEQ ID NO: 4440171 - DNA, 25 bp, Homo sapien
cagtaaatcatgacgacagttaggg

SEQ ID NO: 4440172 - DNA, 25 bp, Homo sapien
tgtccactttaggagaatctgtcaa

SEQ ID NO: 4440173 - DNA, 25 bp, Homo sapien
cgtgcatggcatctatagctccttg

SEQ ID NO: 4440174 - DNA, 25 bp, Homo sapien
cttgccctgatagtcaatgctgtgg

SEQ ID NO: 4440175 - DNA, 25 bp, Homo sapien
actgtttgctcacagcagaaacggg

SEQ ID NO: 4440176 - DNA, 25 bp, Homo sapien
tccctgtcgttgtagagccagactg

SEQ ID NO: 4440177 - DNA, 25 bp, Homo sapien
cctgatttggaaaggtgactctgcc

SEQ ID NO: 4440178 - DNA, 25 bp, Homo sapien
tgttagtgaggacaaaccaagcgcc

SEQ ID NO: 4440179 - DNA, 25 bp, Homo sapien
aggaagactccggaactcaggtgtg

SEQ ID NO: 4440180 - DNA, 25 bp, Homo sapien
cttctgagctgtccccttctgtctc

SEQ ID NO: 4440181 - DNA, 25 bp, Homo sapien
ccttctgagctgtccccttctgtct

SEQ ID NO: 4440182 - DNA, 25 bp, Homo sapien
ttctgagctgtccccttctgtctcc

SEQ ID NO: 4440183 - DNA, 25 bp, Homo sapien
gtctcccttctgagctgtccccttc

SEQ ID NO: 4440184 - DNA, 25 bp, Homo sapien
tgtagatcaggaatttaggaacagc

SEQ ID NO: 4440185 - DNA, 25 bp, Homo sapien
gcttgggtttcctcaagacgtgtca

SEQ ID NO: 4440186 - DNA, 25 bp, Homo sapien
taagagtctatgcaaagtgtctaag

SEQ ID NO: 4440187 - DNA, 25 bp, Homo sapien
caaggtgtctcataaggttgcatca

SEQ ID NO: 4440188 - DNA, 25 bp, Homo sapien
atccattctgatgcccgagtccaag

SEQ ID NO: 4440189 - DNA, 25 bp, Homo sapien
ctgatgcccgagtccaagtggcttt

SEQ ID NO: 4440190 - DNA, 25 bp, Homo sapien
attctgatgcccgagtccaagtggc

SEQ ID NO: 4440191 - DNA, 25 bp, Homo sapien
gatccattctgatgcccgagtccaa

SEQ ID NO: 4440192 - DNA, 25 bp, Homo sapien
gacatttaagtggttcacgatcagt

SEQ ID NO: 4440193 - DNA, 25 bp, Homo sapien
gttgaggccttgttagaacgtgtgc

SEQ ID NO: 4440194 - DNA, 25 bp, Homo sapien
tcaaagccttgtactgttgaggcct

SEQ ID NO: 4440195 - DNA, 25 bp, Homo sapien
tcacgatcagtgttgggctgcccag

SEQ ID NO: 4440196 - DNA, 25 bp, Homo sapien
gacttacccatcatacatagttgtt

SEQ ID NO: 4440197 - DNA, 25 bp, Homo sapien
tgaaaaggttcacctggcaggaact

SEQ ID NO: 4440198 - DNA, 25 bp, Homo sapien
tagcttgaccatagtctcctgagag

SEQ ID NO: 4440199 - DNA, 25 bp, Homo sapien
tactcttgtattcctgacttaccca

SEQ ID NO: 4440200 - DNA, 25 bp, Homo sapien
gagattttggtctgtcccccacatt

SEQ ID NO: 4440201 - DNA, 25 bp, Homo sapien
gattttggtctgtcccccacatttc

SEQ ID NO: 4440202 - DNA, 25 bp, Homo sapien
agattttggtctgtcccccacattt

SEQ ID NO: 4440203 - DNA, 25 bp, Homo sapien
ctcatcggacaggtcattcaggtga

SEQ ID NO: 4440204 - DNA, 25 bp, Homo sapien
ttcaggtgaatttcaggtatctgca

SEQ ID NO: 4440205 - DNA, 25 bp, Homo sapien
tggctcctgccccttcgtatgggca

SEQ ID NO: 4440206 - DNA, 25 bp, Homo sapien
tcggacaggtcattcaggtgaattt

SEQ ID NO: 4440207 - DNA, 25 bp, Homo sapien
gatgtcatgagcaccttgccattgc

SEQ ID NO: 4440208 - DNA, 25 bp, Homo sapien
tcttctccacagctcggtagcgatg

SEQ ID NO: 4440209 - DNA, 25 bp, Homo sapien
gtctgggactccagatccaagaatc

SEQ ID NO: 4440210 - DNA, 25 bp, Homo sapien
tcttgtggcttcaactgctgtgtct

SEQ ID NO: 4440211 - DNA, 25 bp, Homo sapien
cattttgagttcttcatgtcattag

SEQ ID NO: 4440212 - DNA, 25 bp, Homo sapien
agacatcttctcaatacctaacctt

SEQ ID NO: 4440213 - DNA, 25 bp, Homo sapien
caatacctaaccttcgtgcaataca

SEQ ID NO: 4440214 - DNA, 25 bp, Homo sapien
cctaaccttcgtgcaatacattttg

SEQ ID NO: 4440215 - DNA, 25 bp, Homo sapien
tcaggaaggaccgtgtcctcagtgc

SEQ ID NO: 4440216 - DNA, 25 bp, Homo sapien
ttcaggaaggaccgtgtcctcagtg

SEQ ID NO: 4440217 - DNA, 25 bp, Homo sapien
tcattaatcagcaaataaccatatt

SEQ ID NO: 4440218 - DNA, 25 bp, Homo sapien
tgagcaggctttcttgaatacattc

SEQ ID NO: 4440219 - DNA, 25 bp, Homo sapien
gcaggctttcttgaatacattcatt

SEQ ID NO: 4440220 - DNA, 25 bp, Homo sapien
cttgaatacattcattaatcagcaa

SEQ ID NO: 4440221 - DNA, 25 bp, Homo sapien
ctgttttacacagcggcattccagc

SEQ ID NO: 4440222 - DNA, 25 bp, Homo sapien
tgctgctgttttacacagcggcatt

SEQ ID NO: 4440223 - DNA, 25 bp, Homo sapien
gggccattcacctctttgtgttgat

SEQ ID NO: 4440224 - DNA, 25 bp, Homo sapien
tgctgttttacacagcggcattcca

SEQ ID NO: 4440225 - DNA, 25 bp, Homo sapien
aaaggagtcccttcagttttcagtg

SEQ ID NO: 4440226 - DNA, 25 bp, Homo sapien
aaggagtcccttcagttttcagtgc

SEQ ID NO: 4440227 - DNA, 25 bp, Homo sapien
gtcccttcagttttcagtgcaatct

SEQ ID NO: 4440228 - DNA, 25 bp, Homo sapien
ggagtcccttcagttttcagtgcaa

SEQ ID NO: 4440229 - DNA, 25 bp, Homo sapien
ctgtgcaggtgactgtcttggacaa

SEQ ID NO: 4440230 - DNA, 25 bp, Homo sapien
tgcaggtgactgtcttggacaagcc

SEQ ID NO: 4440231 - DNA, 25 bp, Homo sapien
tgactgtcttggacaagccctgacg

SEQ ID NO: 4440232 - DNA, 25 bp, Homo sapien
tgtcttggacaagccctgacgtgac

SEQ ID NO: 4440233 - DNA, 25 bp, Homo sapien
ggcagaaggtttcacctgatttaaa

SEQ ID NO: 4440234 - DNA, 25 bp, Homo sapien
tatccggagggacaacaggtctctt

SEQ ID NO: 4440235 - DNA, 25 bp, Homo sapien
gccagatatccggagggacaacagg

SEQ ID NO: 4440236 - DNA, 25 bp, Homo sapien
agggacaacaggtctcttgatagga

SEQ ID NO: 4440237 - DNA, 25 bp, Homo sapien
tattggcactgttcgatgtagcccc

SEQ ID NO: 4440238 - DNA, 25 bp, Homo sapien
ctctaggtcataaaccggcttcagt

SEQ ID NO: 4440239 - DNA, 25 bp, Homo sapien
gatgaactcaatagcctctaggtca

SEQ ID NO: 4440240 - DNA, 25 bp, Homo sapien
aaaagggaaatattggcactgttcg

SEQ ID NO: 4440241 - DNA, 25 bp, Homo sapien
caacacgtgcacttccactggtgat

SEQ ID NO: 4440242 - DNA, 25 bp, Homo sapien
tcagcgttcttagttgcagacaaca

SEQ ID NO: 4440243 - DNA, 25 bp, Homo sapien
aaccttgtgaaacaatgtagggagc

SEQ ID NO: 4440244 - DNA, 25 bp, Homo sapien
acatcccttcctcctagcaatattg

SEQ ID NO: 4440245 - DNA, 25 bp, Homo sapien
gagtttccataaagtcgaccacgca

SEQ ID NO: 4440246 - DNA, 25 bp, Homo sapien
tgtcccggaatccactaagcctggg

SEQ ID NO: 4440247 - DNA, 25 bp, Homo sapien
tgtaattctaacaccgcaggcagcc

SEQ ID NO: 4440248 - DNA, 25 bp, Homo sapien
taaatgctccagctacacccaagga

SEQ ID NO: 4440249 - DNA, 25 bp, Homo sapien
tggggcaaccaaggaataactgtag

SEQ ID NO: 4440250 - DNA, 25 bp, Homo sapien
caattctcgagttgttgtccttggt

SEQ ID NO: 4440251 - DNA, 25 bp, Homo sapien
atcaattctcgagttgttgtccttg

SEQ ID NO: 4440252 - DNA, 25 bp, Homo sapien
tcatccttggggcaaccaaggaata

SEQ ID NO: 4440253 - DNA, 25 bp, Homo sapien
tatagatgttccagctgagttccca

SEQ ID NO: 4440254 - DNA, 25 bp, Homo sapien
tgccagacatagagtgaacaagcct

SEQ ID NO: 4440255 - DNA, 25 bp, Homo sapien
tcctggaactaatgttaaccgctgg

SEQ ID NO: 4440256 - DNA, 25 bp, Homo sapien
gcaacgctgagctacacttctggag

SEQ ID NO: 4440257 - DNA, 25 bp, Homo sapien
ggtagtcaggcagagggaatcccct

SEQ ID NO: 4440258 - DNA, 25 bp, Homo sapien
tggaagtgacgctgtacaacctctg

SEQ ID NO: 4440259 - DNA, 25 bp, Homo sapien
gaaacacaaggtgcctctacgttgg

SEQ ID NO: 4440260 - DNA, 25 bp, Homo sapien
tgtgaaccaaaaagcagtccctcga

SEQ ID NO: 4440261 - DNA, 25 bp, Homo sapien
gaaatatagtcttcagtatgcctgg

SEQ ID NO: 4440262 - DNA, 25 bp, Homo sapien
gtttattccagatgggtagccaggg

SEQ ID NO: 4440263 - DNA, 25 bp, Homo sapien
tggtgactgagacatagactacttc

SEQ ID NO: 4440264 - DNA, 25 bp, Homo sapien
gggcatttgccctcccatatggtga

SEQ ID NO: 4440265 - DNA, 25 bp, Homo sapien
ttgtcttctctattttcttcctcat

SEQ ID NO: 4440266 - DNA, 25 bp, Homo sapien
aatgctgctacattgttttgtcttc

SEQ ID NO: 4440267 - DNA, 25 bp, Homo sapien
ttttgtcttctctattttcttcctc

SEQ ID NO: 4440268 - DNA, 25 bp, Homo sapien
cgtgaatgctgctacattgttttgt

SEQ ID NO: 4440269 - DNA, 25 bp, Homo sapien
tgcgcccaaggcagggcggccttgc

SEQ ID NO: 4440270 - DNA, 25 bp, Homo sapien
ctgcgcccaaggcagggcggccttg

SEQ ID NO: 4440271 - DNA, 25 bp, Homo sapien
agcgctgcgcccaaggcagggcggc

SEQ ID NO: 4440272 - DNA, 25 bp, Homo sapien
ggcagcgctgcgcccaaggcagggc

SEQ ID NO: 4440273 - DNA, 25 bp, Homo sapien
tcgttgcgggtagctctccggaggc

SEQ ID NO: 4440274 - DNA, 25 bp, Homo sapien
cgttgcgggtagctctccggaggct

SEQ ID NO: 4440275 - DNA, 25 bp, Homo sapien
ctgtcgttgcgggtagctctccgga

SEQ ID NO: 4440276 - DNA, 25 bp, Homo sapien
gtagctctccggaggctcgtcccgg

SEQ ID NO: 4440277 - DNA, 25 bp, Homo sapien
tccgcgccgtaaatggcctccaggg

SEQ ID NO: 4440278 - DNA, 25 bp, Homo sapien
ggtccgcaagcgtccggccgcaggt

SEQ ID NO: 4440279 - DNA, 25 bp, Homo sapien
caggtcttggaagtccgcgccgtaa

SEQ ID NO: 4440280 - DNA, 25 bp, Homo sapien
cgtccggccgcaggtcttggaagtc

SEQ ID NO: 4440281 - DNA, 25 bp, Homo sapien
caaatagcaggtgataataagtgct

SEQ ID NO: 4440282 - DNA, 25 bp, Homo sapien
tgcatcacttttccctggcaaatag

SEQ ID NO: 4440283 - DNA, 25 bp, Homo sapien
cctggcaaatagcaggtgataataa

SEQ ID NO: 4440284 - DNA, 25 bp, Homo sapien
catcacttttccctggcaaatagca

SEQ ID NO: 4440285 - DNA, 25 bp, Homo sapien
tggataggtaggtgggcatttaacc

SEQ ID NO: 4440286 - DNA, 25 bp, Homo sapien
cttgagggtacaaaactaaattgat

SEQ ID NO: 4440287 - DNA, 25 bp, Homo sapien
tctggataggtaggtgggcatttaa

SEQ ID NO: 4440288 - DNA, 25 bp, Homo sapien
acatctggataggtaggtgggcatt

SEQ ID NO: 4440289 - DNA, 25 bp, Homo sapien
gacactcgccagagtgccccattga

SEQ ID NO: 4440290 - DNA, 25 bp, Homo sapien
gccagggatgctaaacgtactgcag

SEQ ID NO: 4440291 - DNA, 25 bp, Homo sapien
cctggaggacactcgtggcattggt

SEQ ID NO: 4440292 - DNA, 25 bp, Homo sapien
gctgatggctaacactttggctcta

SEQ ID NO: 4440293 - DNA, 25 bp, Homo sapien
gaagtactgggacttgccactagca

SEQ ID NO: 4440294 - DNA, 25 bp, Homo sapien
tgaactgaactactggacacccaca

SEQ ID NO: 4440295 - DNA, 25 bp, Homo sapien
tagcaattatcgcaacttaggaggg

SEQ ID NO: 4440296 - DNA, 25 bp, Homo sapien
aaatggaggcaatcttgtggaactg

SEQ ID NO: 4440297 - DNA, 25 bp, Homo sapien
tcttctaggcgagattttaacaaat

SEQ ID NO: 4440298 - DNA, 25 bp, Homo sapien
ctaggcgagattttaacaaattgac

SEQ ID NO: 4440299 - DNA, 25 bp, Homo sapien
ccagttcttctaggcgagattttaa

SEQ ID NO: 4440300 - DNA, 25 bp, Homo sapien
tcttggccagttcttctaggcgaga

SEQ ID NO: 4440301 - DNA, 25 bp, Homo sapien
ataggtgctcgccattttgctcagg

SEQ ID NO: 4440302 - DNA, 25 bp, Homo sapien
gataggtgctcgccattttgctcag

SEQ ID NO: 4440303 - DNA, 25 bp, Homo sapien
tagagataggtgctcgccattttgc

SEQ ID NO: 4440304 - DNA, 25 bp, Homo sapien
gagataggtgctcgccattttgctc

SEQ ID NO: 4440305 - DNA, 25 bp, Homo sapien
cctaatctataagaggcaactaatc

SEQ ID NO: 4440306 - DNA, 25 bp, Homo sapien
gaaatatcctaaatgctcgattgtc

SEQ ID NO: 4440307 - DNA, 25 bp, Homo sapien
tccatgagggtcagaatcatattcc

SEQ ID NO: 4440308 - DNA, 25 bp, Homo sapien
ctaattctagtaatagacttcttga

SEQ ID NO: 4440309 - DNA, 25 bp, Homo sapien
accttcaggacgtcataatcttttt

SEQ ID NO: 4440310 - DNA, 25 bp, Homo sapien
aatctttttgcagacagagggtttt

SEQ ID NO: 4440311 - DNA, 25 bp, Homo sapien
gaaccttcaggacgtcataatcttt

SEQ ID NO: 4440312 - DNA, 25 bp, Homo sapien
ttcaaagttggggtcaatcctctcc

SEQ ID NO: 4440313 - DNA, 25 bp, Homo sapien
tgcacgtggtaagccagttcaaaga

SEQ ID NO: 4440314 - DNA, 25 bp, Homo sapien
tgagaaatgactgcacgtggtaagc

SEQ ID NO: 4440315 - DNA, 25 bp, Homo sapien
ttctttccgcttggcctccaacagc

SEQ ID NO: 4440316 - DNA, 25 bp, Homo sapien
gggcttgttatgctcgctgagaaat

SEQ ID NO: 4440317 - DNA, 25 bp, Homo sapien
caagcttatgaactatatagaagga

SEQ ID NO: 4440318 - DNA, 25 bp, Homo sapien
cacaggtggcgtatctcacatgtgt

SEQ ID NO: 4440319 - DNA, 25 bp, Homo sapien
tgtcctaacaaggttcacaggtggc

SEQ ID NO: 4440320 - DNA, 25 bp, Homo sapien
ttcacaggtggcgtatctcacatgt

SEQ ID NO: 4440321 - DNA, 25 bp, Homo sapien
tgaatctcatgcaggatttcacgtt

SEQ ID NO: 4440322 - DNA, 25 bp, Homo sapien
gaatctcatgcaggatttcacgttg

SEQ ID NO: 4440323 - DNA, 25 bp, Homo sapien
ttttacgcaggtttagtttcacata

SEQ ID NO: 4440324 - DNA, 25 bp, Homo sapien
tacgcaggtttagtttcacataggg

SEQ ID NO: 4440325 - DNA, 25 bp, Homo sapien
caggtttagtttcacatagggcagt

SEQ ID NO: 4440326 - DNA, 25 bp, Homo sapien
tagtttcacatagggcagtacactt

SEQ ID NO: 4440327 - DNA, 25 bp, Homo sapien
taagctgaatgtttacaagtgaaat

SEQ ID NO: 4440328 - DNA, 25 bp, Homo sapien
gaatgcaaattttaagctgaatgtt

SEQ ID NO: 4440329 - DNA, 25 bp, Homo sapien
acttactttagatgtaagtcataca

SEQ ID NO: 4440330 - DNA, 25 bp, Homo sapien
tagatgtaagtcatacatggaagaa

SEQ ID NO: 4440331 - DNA, 25 bp, Homo sapien
ggagagcctccatgtagaatggcag

SEQ ID NO: 4440332 - DNA, 25 bp, Homo sapien
tgcccgatgtttaccatttcctaca

SEQ ID NO: 4440333 - DNA, 25 bp, Homo sapien
tcctgggtccttcttagaggtatga

SEQ ID NO: 4440334 - DNA, 25 bp, Homo sapien
gaatggcagccgttctgtgtcctcc

SEQ ID NO: 4440335 - DNA, 25 bp, Homo sapien
tctaaagttatgtgtgcaactaggg

SEQ ID NO: 4440336 - DNA, 25 bp, Homo sapien
tagggacacactgagatttatggag

SEQ ID NO: 4440337 - DNA, 25 bp, Homo sapien
tgtccacatattctaaacatcagaa

SEQ ID NO: 4440338 - DNA, 25 bp, Homo sapien
cctggcccatgtccacatattctaa

SEQ ID NO: 4440339 - DNA, 25 bp, Homo sapien
ggttggagctgccacaaattcctgg

SEQ ID NO: 4440340 - DNA, 25 bp, Homo sapien
taaaaagttctactggtcagcagtg

SEQ ID NO: 4440341 - DNA, 25 bp, Homo sapien
taggcggtgctaatgggaaagccat

SEQ ID NO: 4440342 - DNA, 25 bp, Homo sapien
aacccctaactcgaggtctgtgctg

SEQ ID NO: 4440343 - DNA, 25 bp, Homo sapien
tattacatacagaatactgacgttc

SEQ ID NO: 4440344 - DNA, 25 bp, Homo sapien
acagaatttcacaagagccaggaga

SEQ ID NO: 4440345 - DNA, 25 bp, Homo sapien
actccccatattgaaatacagaatt

SEQ ID NO: 4440346 - DNA, 25 bp, Homo sapien
tacatttccctttgtgcaccatgag

SEQ ID NO: 4440347 - DNA, 25 bp, Homo sapien
ggacccactcatacaacaagacaaa

SEQ ID NO: 4440348 - DNA, 25 bp, Homo sapien
ccaccagtggctgtttccaaagcat

SEQ ID NO: 4440349 - DNA, 25 bp, Homo sapien
cactgaaggacccactcatacaaca

SEQ ID NO: 4440350 - DNA, 25 bp, Homo sapien
aagcattgtagactaattttccaag

SEQ ID NO: 4440351 - DNA, 25 bp, Homo sapien
gaaagtcagctggtaagtcactagg

SEQ ID NO: 4440352 - DNA, 25 bp, Homo sapien
gcattgtcactaaaacgaactcggg

SEQ ID NO: 4440353 - DNA, 25 bp, Homo sapien
tccttgcaaatgtctgcgaggcgct

SEQ ID NO: 4440354 - DNA, 25 bp, Homo sapien
cactagggatggtcacagggtactc

SEQ ID NO: 4440355 - DNA, 25 bp, Homo sapien
cttcaggactttgttccactagagg

SEQ ID NO: 4440356 - DNA, 25 bp, Homo sapien
tgttccactagaggcatttttggct

SEQ ID NO: 4440357 - DNA, 25 bp, Homo sapien
tccactagaggcatttttggctggg

SEQ ID NO: 4440358 - DNA, 25 bp, Homo sapien
gactttgttccactagaggcatttt

SEQ ID NO: 4440359 - DNA, 25 bp, Homo sapien
caaaagctcctttaccaagaagttg

SEQ ID NO: 4440360 - DNA, 25 bp, Homo sapien
gccggttgctaggaataacagtctc

SEQ ID NO: 4440361 - DNA, 25 bp, Homo sapien
taacagtctcaacataatcttgtcc

SEQ ID NO: 4440362 - DNA, 25 bp, Homo sapien
tgaagtatcgggaaaactgtctctg

SEQ ID NO: 4440363 - DNA, 25 bp, Homo sapien
gccatctcccagtttgaagtccatc

SEQ ID NO: 4440364 - DNA, 25 bp, Homo sapien
aataaaagccatcgagacctgctgg

SEQ ID NO: 4440365 - DNA, 25 bp, Homo sapien
tgttaatgctccacatgaagcaagg

SEQ ID NO: 4440366 - DNA, 25 bp, Homo sapien
gagtgggacaattctcaactgtgtc

SEQ ID NO: 4440367 - DNA, 25 bp, Homo sapien
caatgttctcatggtgcagccgtga

SEQ ID NO: 4440368 - DNA, 25 bp, Homo sapien
tccaggcgttgtagtagcgcacaat

SEQ ID NO: 4440369 - DNA, 25 bp, Homo sapien
gtgcagctcggtcatccttggccag

SEQ ID NO: 4440370 - DNA, 25 bp, Homo sapien
ttgatcctgcggaactgccggctgg

SEQ ID NO: 4440371 - DNA, 25 bp, Homo sapien
agtccctggtgcctaaaaacgctgg

SEQ ID NO: 4440372 - DNA, 25 bp, Homo sapien
ccggaggtgagcaagcattaaggcc

SEQ ID NO: 4440373 - DNA, 25 bp, Homo sapien
ttttaaacatggtcaacacgtctgg

SEQ ID NO: 4440374 - DNA, 25 bp, Homo sapien
gatccaggttgtgcgctttttcagc

SEQ ID NO: 4440375 - DNA, 25 bp, Homo sapien
tctacactgtgctgatttgtacttg

SEQ ID NO: 4440376 - DNA, 25 bp, Homo sapien
ggcatcaatgtatactctacactgt

SEQ ID NO: 4440377 - DNA, 25 bp, Homo sapien
aaggaacagaaatccctattatcat

SEQ ID NO: 4440378 - DNA, 25 bp, Homo sapien
ttgtacttgctattatgcaaaacac

SEQ ID NO: 4440379 - DNA, 25 bp, Homo sapien
gataatatcactttcagaatctgaa

SEQ ID NO: 4440380 - DNA, 25 bp, Homo sapien
tgattctgacttttactgttctcat

SEQ ID NO: 4440381 - DNA, 25 bp, Homo sapien
catcttcattgtcaaagataatatc

SEQ ID NO: 4440382 - DNA, 25 bp, Homo sapien
ctgattctgacttttactgttctca

SEQ ID NO: 4440383 - DNA, 25 bp, Homo sapien
tctgaatatcagattaaagccttaa

SEQ ID NO: 4440384 - DNA, 25 bp, Homo sapien
aaatttatggtttctatatctgaat

SEQ ID NO: 4440385 - DNA, 25 bp, Homo sapien
cagacgtcaattatatcacgaataa

SEQ ID NO: 4440386 - DNA, 25 bp, Homo sapien
tacctaaggtttatgacatcagacg

SEQ ID NO: 4440387 - DNA, 25 bp, Homo sapien
gcattataggatcacgatacacagt

SEQ ID NO: 4440388 - DNA, 25 bp, Homo sapien
gacagaccaaggtaactccatgatg

SEQ ID NO: 4440389 - DNA, 25 bp, Homo sapien
caagattaattgacgtgggacagac

SEQ ID NO: 4440390 - DNA, 25 bp, Homo sapien
tgtagccaagggaagacaaaagctt

SEQ ID NO: 4440391 - DNA, 25 bp, Homo sapien
tttgttttatagtatctgtactcgt

SEQ ID NO: 4440392 - DNA, 25 bp, Homo sapien
ctttgttttatagtatctgtactcg

SEQ ID NO: 4440393 - DNA, 25 bp, Homo sapien
tgttttatagtatctgtactcgtat

SEQ ID NO: 4440394 - DNA, 25 bp, Homo sapien
gctttgttttatagtatctgtactc

SEQ ID NO: 4440395 - DNA, 25 bp, Homo sapien
ctcagtcgtcactgatggctcactt

SEQ ID NO: 4440396 - DNA, 25 bp, Homo sapien
tataggtagtgcacagcctcagtcg

SEQ ID NO: 4440397 - DNA, 25 bp, Homo sapien
tagtgcacagcctcagtcgtcactg

SEQ ID NO: 4440398 - DNA, 25 bp, Homo sapien
ctggatgtataggtagtgcacagcc

SEQ ID NO: 4440399 - DNA, 25 bp, Homo sapien
tatatgcttcaactagtgccagagt

SEQ ID NO: 4440400 - DNA, 25 bp, Homo sapien
tcaccccttcttgagtgtattcaca

SEQ ID NO: 4440401 - DNA, 25 bp, Homo sapien
aaacattcaagtcttcttgggacag

SEQ ID NO: 4440402 - DNA, 25 bp, Homo sapien
tttacaagatcgcttccaaacccaa

SEQ ID NO: 4440403 - DNA, 25 bp, Homo sapien
gatacagtccctggtcaatggtgtc

SEQ ID NO: 4440404 - DNA, 25 bp, Homo sapien
ccagaatctctcgaaaaagcctcca

SEQ ID NO: 4440405 - DNA, 25 bp, Homo sapien
tataagctaatccatccagaatctc

SEQ ID NO: 4440406 - DNA, 25 bp, Homo sapien
tccagagtctgacggtgtctcgata

SEQ ID NO: 4440407 - DNA, 25 bp, Homo sapien
catgcataaagttatacctacttcc

SEQ ID NO: 4440408 - DNA, 25 bp, Homo sapien
aaaaggccaacctagcgatgaaaat

SEQ ID NO: 4440409 - DNA, 25 bp, Homo sapien
atgaaaatcgtatgaggtcttctcc

SEQ ID NO: 4440410 - DNA, 25 bp, Homo sapien
caaacaatggttttccatgcataaa

SEQ ID NO: 4440411 - DNA, 25 bp, Homo sapien
aaaaatgttgacaggcttcaaatcc

SEQ ID NO: 4440412 - DNA, 25 bp, Homo sapien
aaaggctagatggtctgtcgccaaa

SEQ ID NO: 4440413 - DNA, 25 bp, Homo sapien
caggcttcaaatcccggtgaatcat

SEQ ID NO: 4440414 - DNA, 25 bp, Homo sapien
tattttcacatggtcatcagaatcc

SEQ ID NO: 4440415 - DNA, 25 bp, Homo sapien
gctcagcaaatatgttccaccctcg

SEQ ID NO: 4440416 - DNA, 25 bp, Homo sapien
caagcatcaccatcagtaacaccgg

SEQ ID NO: 4440417 - DNA, 25 bp, Homo sapien
gcttcaacattcttagtgctgggca

SEQ ID NO: 4440418 - DNA, 25 bp, Homo sapien
gataactttttcagctaggcactag

SEQ ID NO: 4440419 - DNA, 25 bp, Homo sapien
taatcaagtctcctgtctgatcgtc

SEQ ID NO: 4440420 - DNA, 25 bp, Homo sapien
cctgtctgatcgtcttgtttgctgt

SEQ ID NO: 4440421 - DNA, 25 bp, Homo sapien
ctgacttaatcaagtctcctgtctg

SEQ ID NO: 4440422 - DNA, 25 bp, Homo sapien
aagtctcctgtctgatcgtcttgtt

SEQ ID NO: 4440423 - DNA, 25 bp, Homo sapien
taagtcacgtatggccacacattcg

SEQ ID NO: 4440424 - DNA, 25 bp, Homo sapien
cattcggttctacacaaggatgtct

SEQ ID NO: 4440425 - DNA, 25 bp, Homo sapien
aggagggacagtgccagataagacc

SEQ ID NO: 4440426 - DNA, 25 bp, Homo sapien
cccagatggatcaggtcatgaggta

SEQ ID NO: 4440427 - DNA, 25 bp, Homo sapien
ggacctctgggcttacatagagagc

SEQ ID NO: 4440428 - DNA, 25 bp, Homo sapien
tacatagagagcagtgccaaccatc

SEQ ID NO: 4440429 - DNA, 25 bp, Homo sapien
agtgccaaccatcccagttaagtga

SEQ ID NO: 4440430 - DNA, 25 bp, Homo sapien
tctgggcttacatagagagcagtgc

SEQ ID NO: 4440431 - DNA, 25 bp, Homo sapien
aagataggggttggtttgcacattc

SEQ ID NO: 4440432 - DNA, 25 bp, Homo sapien
atctgttcctggcaccttgcccaag

SEQ ID NO: 4440433 - DNA, 25 bp, Homo sapien
atccaccagtggacaagctccctga

SEQ ID NO: 4440434 - DNA, 25 bp, Homo sapien
tcctggcaccttgcccaagataggg

SEQ ID NO: 4440435 - DNA, 25 bp, Homo sapien
aactttatgttgttgtccaatgctc

SEQ ID NO: 4440436 - DNA, 25 bp, Homo sapien
gatcctttctgaagccgtgaccatg

SEQ ID NO: 4440437 - DNA, 25 bp, Homo sapien
gtgaccatggggtgataggacatct

SEQ ID NO: 4440438 - DNA, 25 bp, Homo sapien
atcctttctgaagccgtgaccatgg

SEQ ID NO: 4440439 - DNA, 25 bp, Homo sapien
ctgaagccgtgaccatggggtgata

SEQ ID NO: 4440440 - DNA, 25 bp, Homo sapien
gctctccatcgtcaaagtcttctgg

SEQ ID NO: 4440441 - DNA, 25 bp, Homo sapien
tcttctggaaacttaggcgaagtgg

SEQ ID NO: 4440442 - DNA, 25 bp, Homo sapien
ctgctttgcatgctctccatcgtca

SEQ ID NO: 4440443 - DNA, 25 bp, Homo sapien
tgcatgctctccatcgtcaaagtct

SEQ ID NO: 4440444 - DNA, 25 bp, Homo sapien
gccaagggtccaaatagcacttcaa

SEQ ID NO: 4440445 - DNA, 25 bp, Homo sapien
gaagacatagtaattgacgcatcag

SEQ ID NO: 4440446 - DNA, 25 bp, Homo sapien
cccaggacacaagagaatgagtggc

SEQ ID NO: 4440447 - DNA, 25 bp, Homo sapien
ttgcacaaaagaaccctgcagtttg

SEQ ID NO: 4440448 - DNA, 25 bp, Homo sapien
tcaacagccaggagatgactgattt

SEQ ID NO: 4440449 - DNA, 25 bp, Homo sapien
gccgttttgctggatcgtggttcaa

SEQ ID NO: 4440450 - DNA, 25 bp, Homo sapien
tgtcataggtgtaatcgatggcagg

SEQ ID NO: 4440451 - DNA, 25 bp, Homo sapien
tcatggtgcggtaggccttcccatc

SEQ ID NO: 4440452 - DNA, 25 bp, Homo sapien
cattgaagccttatcaaagggatcc

SEQ ID NO: 4440453 - DNA, 25 bp, Homo sapien
taaaacaggaccgattaaaacatca

SEQ ID NO: 4440454 - DNA, 25 bp, Homo sapien
aaacatcatcattgaagccttatca

SEQ ID NO: 4440455 - DNA, 25 bp, Homo sapien
aacaggaccgattaaaacatcatca

SEQ ID NO: 4440456 - DNA, 25 bp, Homo sapien
gatgatggtttcacacacatgctgc

SEQ ID NO: 4440457 - DNA, 25 bp, Homo sapien
gcatcttggctgtacggattgagaa

SEQ ID NO: 4440458 - DNA, 25 bp, Homo sapien
tggctgtacggattgagaagttgcc

SEQ ID NO: 4440459 - DNA, 25 bp, Homo sapien
gtcttttaaagatgcggatgatggt

SEQ ID NO: 4440460 - DNA, 25 bp, Homo sapien
ggtcaaaaggaagcatcaccagcat

SEQ ID NO: 4440461 - DNA, 25 bp, Homo sapien
tgctcatatatttgtctgtttcggg

SEQ ID NO: 4440462 - DNA, 25 bp, Homo sapien
tgaatagggcagcttcgttgtgctc

SEQ ID NO: 4440463 - DNA, 25 bp, Homo sapien
gggaagcagtagtggagtacacaac

SEQ ID NO: 4440464 - DNA, 25 bp, Homo sapien
caagaatacatttcccaaaggtgac

SEQ ID NO: 4440465 - DNA, 25 bp, Homo sapien
ctgacaacttcctcaagaatacatt

SEQ ID NO: 4440466 - DNA, 25 bp, Homo sapien
gtaacactctcactctgacaacttc

SEQ ID NO: 4440467 - DNA, 25 bp, Homo sapien
tccaccccagtaacactctcactct

SEQ ID NO: 4440468 - DNA, 25 bp, Homo sapien
agaaagcaggcacgggcaaaactca

SEQ ID NO: 4440469 - DNA, 25 bp, Homo sapien
gatgtttactgaagatctagccagg

SEQ ID NO: 4440470 - DNA, 25 bp, Homo sapien
gcatacccaattaggagagacactt

SEQ ID NO: 4440471 - DNA, 25 bp, Homo sapien
actagttaagactgctgctgtcgac

SEQ ID NO: 4440472 - DNA, 25 bp, Homo sapien
ctaaaggtttagcagtccacattcc

SEQ ID NO: 4440473 - DNA, 25 bp, Homo sapien
taaaggtttagcagtccacattccc

SEQ ID NO: 4440474 - DNA, 25 bp, Homo sapien
tcttgccacatatcttgcaaaaggg

SEQ ID NO: 4440475 - DNA, 25 bp, Homo sapien
tttcttgccacatatcttgcaaaag

SEQ ID NO: 4440476 - DNA, 25 bp, Homo sapien
ttgccacatatcttgcaaaagggat

SEQ ID NO: 4440477 - DNA, 25 bp, Homo sapien
cttgccacatatcttgcaaaaggga

SEQ ID NO: 4440478 - DNA, 25 bp, Homo sapien
tgcgcggcctgaacacacgttctat

SEQ ID NO: 4440479 - DNA, 25 bp, Homo sapien
gaaatcgatctaacttgcgcggcct

SEQ ID NO: 4440480 - DNA, 25 bp, Homo sapien
gtagataatttcagcagtgggcaga

SEQ ID NO: 4440481 - DNA, 25 bp, Homo sapien
gaagttctttgggatgaaatcgatc

SEQ ID NO: 4440482 - DNA, 25 bp, Homo sapien
tatagtggggaatcttggaatgtta

SEQ ID NO: 4440483 - DNA, 25 bp, Homo sapien
tagtaaagatgtgattcatctgcag

SEQ ID NO: 4440484 - DNA, 25 bp, Homo sapien
aaatatagtggggaatcttggaatg

SEQ ID NO: 4440485 - DNA, 25 bp, Homo sapien
agaagcaggtctgtagctgtggttt

SEQ ID NO: 4440486 - DNA, 25 bp, Homo sapien
tagtacatgggtgtctcagatcaag

SEQ ID NO: 4440487 - DNA, 25 bp, Homo sapien
gtcttcagctatgttaaaaagcccg

SEQ ID NO: 4440488 - DNA, 25 bp, Homo sapien
tatggcaaagcggactcgtaggctc

SEQ ID NO: 4440489 - DNA, 25 bp, Homo sapien
tcaccgagtggtgagccatgtgccg

SEQ ID NO: 4440490 - DNA, 25 bp, Homo sapien
ctgggatcccacagtgtaagagtat

SEQ ID NO: 4440491 - DNA, 25 bp, Homo sapien
tcccacagtgtaagagtattgcttt

SEQ ID NO: 4440492 - DNA, 25 bp, Homo sapien
cagaataatgtagacttgactgagt

SEQ ID NO: 4440493 - DNA, 25 bp, Homo sapien
gctttcaataacatggtatggttca

SEQ ID NO: 4440494 - DNA, 25 bp, Homo sapien
acttctctcctcgtcagcttctctg

SEQ ID NO: 4440495 - DNA, 25 bp, Homo sapien
caataaacttgtagagtcgacacag

SEQ ID NO: 4440496 - DNA, 25 bp, Homo sapien
tggcataagatcttgcaaatctccc

SEQ ID NO: 4440497 - DNA, 25 bp, Homo sapien
gccgagtttcttcaacagtccaaca

SEQ ID NO: 4440498 - DNA, 25 bp, Homo sapien
caccaactgtgcaatacctgttttc

SEQ ID NO: 4440499 - DNA, 25 bp, Homo sapien
ctgcgaggatttcaggtacagccct

SEQ ID NO: 4440500 - DNA, 25 bp, Homo sapien
gtaaaccaagcccaaattgatcaag

SEQ ID NO: 4440501 - DNA, 25 bp, Homo sapien
agcaggtcatatctgcctccagctg

SEQ ID NO: 4440502 - DNA, 25 bp, Homo sapien
tgaaagccacaaactggaagatgat

SEQ ID NO: 4440503 - DNA, 25 bp, Homo sapien
gatatcttgtctatagctatgctga

SEQ ID NO: 4440504 - DNA, 25 bp, Homo sapien
gtctatagctatgctgaccccaatg

SEQ ID NO: 4440505 - DNA, 25 bp, Homo sapien
gcagcagatatcttgtctatagcta

SEQ ID NO: 4440506 - DNA, 25 bp, Homo sapien
agagcttgtggccctctaaactggg

SEQ ID NO: 4440507 - DNA, 25 bp, Homo sapien
tggatcagaaacagaccggttacag

SEQ ID NO: 4440508 - DNA, 25 bp, Homo sapien
ttagaggagcaagactgcaggcatg

SEQ ID NO: 4440509 - DNA, 25 bp, Homo sapien
tcctgcatagaaacacagcgtgcca

SEQ ID NO: 4440510 - DNA, 25 bp, Homo sapien
tgggcattcttgaaatcctgcatag

SEQ ID NO: 4440511 - DNA, 25 bp, Homo sapien
tgtgatgcctgctgtccagagtttc

SEQ ID NO: 4440512 - DNA, 25 bp, Homo sapien
ccaggaggtcacaagagcttattgt

SEQ ID NO: 4440513 - DNA, 25 bp, Homo sapien
tgtgaccagtcgtacatgatttctg

SEQ ID NO: 4440514 - DNA, 25 bp, Homo sapien
tggccaacacttacaaccaggaggt

SEQ ID NO: 4440515 - DNA, 25 bp, Homo sapien
cattccaaagggcaggcatgtgtcc

SEQ ID NO: 4440516 - DNA, 25 bp, Homo sapien
caagaagccgcatagaattcaaggg

SEQ ID NO: 4440517 - DNA, 25 bp, Homo sapien
cacagagcacctggaacagcttcaa

SEQ ID NO: 4440518 - DNA, 25 bp, Homo sapien
cgaggcttggattttactgcaggac

SEQ ID NO: 4440519 - DNA, 25 bp, Homo sapien
agtactcttgtaattcctcttggga

SEQ ID NO: 4440520 - DNA, 25 bp, Homo sapien
gacaagggccacataggtgatttca

SEQ ID NO: 4440521 - DNA, 25 bp, Homo sapien
ggcttccttctttatccgagacaag

SEQ ID NO: 4440522 - DNA, 25 bp, Homo sapien
catgatgtctgcagtactcttgtaa

SEQ ID NO: 4440523 - DNA, 25 bp, Homo sapien
tagctcagagcaccacagtaagact

SEQ ID NO: 4440524 - DNA, 25 bp, Homo sapien
tcttcagcaagaaacccaacaacgg

SEQ ID NO: 4440525 - DNA, 25 bp, Homo sapien
tgaaggcaggtgctccacaggtaac

SEQ ID NO: 4440526 - DNA, 25 bp, Homo sapien
tatcaggtctgaaggagggagcatc

SEQ ID NO: 4440527 - DNA, 25 bp, Homo sapien
cctcagtttctgcagtacatggtcc

SEQ ID NO: 4440528 - DNA, 25 bp, Homo sapien
cagtacatggtccacaagttcagtc

SEQ ID NO: 4440529 - DNA, 25 bp, Homo sapien
tcagtgactttagtcctcagtttct

SEQ ID NO: 4440530 - DNA, 25 bp, Homo sapien
ttcatcagtgactttagtcctcagt

SEQ ID NO: 4440531 - DNA, 25 bp, Homo sapien
tgtgcaaccgagttttccagagact

SEQ ID NO: 4440532 - DNA, 25 bp, Homo sapien
tcagctgggcgtgaaatcctggatc

SEQ ID NO: 4440533 - DNA, 25 bp, Homo sapien
gaagtgagatcttttcccagaacgt

SEQ ID NO: 4440534 - DNA, 25 bp, Homo sapien
gcactctatcttgggaaaacaggga

SEQ ID NO: 4440535 - DNA, 25 bp, Homo sapien
cactgcaagattatcggaagcttct

SEQ ID NO: 4440536 - DNA, 25 bp, Homo sapien
tgcactgcaagattatcggaagctt

SEQ ID NO: 4440537 - DNA, 25 bp, Homo sapien
tttgcactgcaagattatcggaagc

SEQ ID NO: 4440538 - DNA, 25 bp, Homo sapien
attttgcactgcaagattatcggaa

SEQ ID NO: 4440539 - DNA, 25 bp, Homo sapien
tacaaccatctgcaccggataggtg

SEQ ID NO: 4440540 - DNA, 25 bp, Homo sapien
tctaagggctagatcacgactgggc

SEQ ID NO: 4440541 - DNA, 25 bp, Homo sapien
gaatttatggccttatctggtccca

SEQ ID NO: 4440542 - DNA, 25 bp, Homo sapien
gacatcctgtcgtgattctaagggc

SEQ ID NO: 4440543 - DNA, 25 bp, Homo sapien
gggctagcacactcacaatgggaac

SEQ ID NO: 4440544 - DNA, 25 bp, Homo sapien
tggctgacagcttctccggggctag

SEQ ID NO: 4440545 - DNA, 25 bp, Homo sapien
tagcacactcacaatgggaaccact

SEQ ID NO: 4440546 - DNA, 25 bp, Homo sapien
gtttcatagcgcctcctagtgctgg

SEQ ID NO: 4440547 - DNA, 25 bp, Homo sapien
gattccttataaaggcgtagcgcag

SEQ ID NO: 4440548 - DNA, 25 bp, Homo sapien
gaagccacccagttaggcaagttgg

SEQ ID NO: 4440549 - DNA, 25 bp, Homo sapien
ggtgtctagcaatatgatctcaggg

SEQ ID NO: 4440550 - DNA, 25 bp, Homo sapien
ggtggccggcgcttataatactagc

SEQ ID NO: 4440551 - DNA, 25 bp, Homo sapien
tttctgatgtaagttggcaagggag

SEQ ID NO: 4440552 - DNA, 25 bp, Homo sapien
gggaggtctgaagtcgagtttgtac

SEQ ID NO: 4440553 - DNA, 25 bp, Homo sapien
tgcttttctgatgtaagttggcaag

SEQ ID NO: 4440554 - DNA, 25 bp, Homo sapien
aagggaggtctgaagtcgagtttgt

SEQ ID NO: 4440555 - DNA, 25 bp, Homo sapien
tgtaagcttagcaaggcaaaggcct

SEQ ID NO: 4440556 - DNA, 25 bp, Homo sapien
gacagtatggacagaagccaccttc

SEQ ID NO: 4440557 - DNA, 25 bp, Homo sapien
tgaaccctgaggcaactactttgac

SEQ ID NO: 4440558 - DNA, 25 bp, Homo sapien
tacaccacacccgaaaggtctgacg

SEQ ID NO: 4440559 - DNA, 25 bp, Homo sapien
taatattgtttctttgggtagatcc

SEQ ID NO: 4440560 - DNA, 25 bp, Homo sapien
aatattgtttctttgggtagatcca

SEQ ID NO: 4440561 - DNA, 25 bp, Homo sapien
gtaatattgtttctttgggtagatc

SEQ ID NO: 4440562 - DNA, 25 bp, Homo sapien
tgagtccttcaacataggatttagg

SEQ ID NO: 4440563 - DNA, 25 bp, Homo sapien
caaagatttgggatcttaaaggcca

SEQ ID NO: 4440564 - DNA, 25 bp, Homo sapien
taaagtcactagaaaagtatgagtc

SEQ ID NO: 4440565 - DNA, 25 bp, Homo sapien
tatcactaatgaatgccgtcttcag

SEQ ID NO: 4440566 - DNA, 25 bp, Homo sapien
cagactaatttgaggtatctttgct

SEQ ID NO: 4440567 - DNA, 25 bp, Homo sapien
gctgcttcacagttgtgttaaatgc

SEQ ID NO: 4440568 - DNA, 25 bp, Homo sapien
tatctttgctttggcaggcgtgaca

SEQ ID NO: 4440569 - DNA, 25 bp, Homo sapien
tgtgttaaatgcctgttcatcagca

SEQ ID NO: 4440570 - DNA, 25 bp, Homo sapien
gtagtagtcatctctatagctgtac

SEQ ID NO: 4440571 - DNA, 25 bp, Homo sapien
tgtagtagtcatctctatagctgta

SEQ ID NO: 4440572 - DNA, 25 bp, Homo sapien
tagtagtcatctctatagctgtaca

SEQ ID NO: 4440573 - DNA, 25 bp, Homo sapien
ctgtagtagtcatctctatagctgt

SEQ ID NO: 4440574 - DNA, 25 bp, Homo sapien
caactttgtaggacagcttcttaga

SEQ ID NO: 4440575 - DNA, 25 bp, Homo sapien
atgaggttaacgacagttctttagg

SEQ ID NO: 4440576 - DNA, 25 bp, Homo sapien
tattccagtataagcctctgtctgt

SEQ ID NO: 4440577 - DNA, 25 bp, Homo sapien
ctgtctgtttgaatgaggttaacga

SEQ ID NO: 4440578 - DNA, 25 bp, Homo sapien
cagtttcgatgagttctcacagtca

SEQ ID NO: 4440579 - DNA, 25 bp, Homo sapien
cagtcaaatgagagtttgtttaacc

SEQ ID NO: 4440580 - DNA, 25 bp, Homo sapien
atcatggttccccagtttcgatgag

SEQ ID NO: 4440581 - DNA, 25 bp, Homo sapien
tgagttctcacagtcaaatgagagt

SEQ ID NO: 4440582 - DNA, 25 bp, Homo sapien
tcttcccatcggtagctcttaacag

SEQ ID NO: 4440583 - DNA, 25 bp, Homo sapien
gctgatcttcttcttcccatcggta

SEQ ID NO: 4440584 - DNA, 25 bp, Homo sapien
tagctcttaacagacacttgttgtc

SEQ ID NO: 4440585 - DNA, 25 bp, Homo sapien
gatcttcttcttcccatcggtagct

SEQ ID NO: 4440586 - DNA, 25 bp, Homo sapien
cacagtgctgatcttcttcttccca

SEQ ID NO: 4440587 - DNA, 25 bp, Homo sapien
catcggtagctcttaacagacactt

SEQ ID NO: 4440588 - DNA, 25 bp, Homo sapien
gaagaagaagatcagcactgtggtg

SEQ ID NO: 4440589 - DNA, 25 bp, Homo sapien
gacaacaagtgtctgttaagagcta

SEQ ID NO: 4440590 - DNA, 25 bp, Homo sapien
taagagctaccgatgggaagaagaa

SEQ ID NO: 4440591 - DNA, 25 bp, Homo sapien
caagtgtctgttaagagctaccgat

SEQ ID NO: 4440592 - DNA, 25 bp, Homo sapien
tctgttaagagctaccgatgggaag

SEQ ID NO: 4440593 - DNA, 25 bp, Homo sapien
taccgatgggaagaagaagatcagc

SEQ ID NO: 4440594 - DNA, 25 bp, Homo sapien
tcttcaaggtgatatagacgctgcc

SEQ ID NO: 4440595 - DNA, 25 bp, Homo sapien
tcaaggtgatatagacgctgcccga

SEQ ID NO: 4440596 - DNA, 25 bp, Homo sapien
aaggtgatatagacgctgcccgacg

SEQ ID NO: 4440597 - DNA, 25 bp, Homo sapien
gatatagacgctgcccgacgtccgg

SEQ ID NO: 4440598 - DNA, 25 bp, Homo sapien
gtgatatagacgctgcccgacgtcc

SEQ ID NO: 4440599 - DNA, 25 bp, Homo sapien
ccgacgtccggcacttctggaaaag

SEQ ID NO: 4440600 - DNA, 25 bp, Homo sapien
ggaaaagtctggtcagctccgtcag

SEQ ID NO: 4440601 - DNA, 25 bp, Homo sapien
tggaaaagtctggtcagctccgtca

SEQ ID NO: 4440602 - DNA, 25 bp, Homo sapien
aaaagtctggtcagctccgtcagga

SEQ ID NO: 4440603 - DNA, 25 bp, Homo sapien
gaaaagtctggtcagctccgtcagg

SEQ ID NO: 4440604 - DNA, 25 bp, Homo sapien
tgacggagctgaccagacttttcca

SEQ ID NO: 4440605 - DNA, 25 bp, Homo sapien
ctgacggagctgaccagacttttcc

SEQ ID NO: 4440606 - DNA, 25 bp, Homo sapien
cctgacggagctgaccagacttttc

SEQ ID NO: 4440607 - DNA, 25 bp, Homo sapien
tcctgacggagctgaccagactttt

SEQ ID NO: 4440608 - DNA, 25 bp, Homo sapien
cgggcagcgtctatatcaccttgaa

SEQ ID NO: 4440609 - DNA, 25 bp, Homo sapien
ccggacgtcgggcagcgtctatatc

SEQ ID NO: 4440610 - DNA, 25 bp, Homo sapien
cgtcgggcagcgtctatatcacctt

SEQ ID NO: 4440611 - DNA, 25 bp, Homo sapien
ggcagcgtctatatcaccttgaaga

SEQ ID NO: 4440612 - DNA, 25 bp, Homo sapien
cttttccagaagtgccggacgtcgg

SEQ ID NO: 4440613 - DNA, 25 bp, Homo sapien
ggacgtcgggcagcgtctatatcac

SEQ ID NO: 4440614 - DNA, 25 bp, Homo sapien
caacaacaccatcgcggcgacgctg

SEQ ID NO: 4440615 - DNA, 25 bp, Homo sapien
tccaacaacaccatcgcggcgacgc

SEQ ID NO: 4440616 - DNA, 25 bp, Homo sapien
aacaacaccatcgcggcgacgctgg

SEQ ID NO: 4440617 - DNA, 25 bp, Homo sapien
ctccaacaacaccatcgcggcgacg

SEQ ID NO: 4440618 - DNA, 25 bp, Homo sapien
tcgctctccaacaacaccatcgcgg

SEQ ID NO: 4440619 - DNA, 25 bp, Homo sapien
ccaacaacaccatcgcggcgacgct

SEQ ID NO: 4440620 - DNA, 25 bp, Homo sapien
gcgatggtgttgttggagagcgagc

SEQ ID NO: 4440621 - DNA, 25 bp, Homo sapien
gcgtcgccgcgatggtgttgttgga

SEQ ID NO: 4440622 - DNA, 25 bp, Homo sapien
agcgtcgccgcgatggtgttgttgg

SEQ ID NO: 4440623 - DNA, 25 bp, Homo sapien
cagcgtcgccgcgatggtgttgttg

SEQ ID NO: 4440624 - DNA, 25 bp, Homo sapien
cgtcgccgcgatggtgttgttggag

SEQ ID NO: 4440625 - DNA, 25 bp, Homo sapien
ccagcgtcgccgcgatggtgttgtt

SEQ ID NO: 4440626 - DNA, 25 bp, Homo sapien
gacgatttctcgcatgtgacgaccc

SEQ ID NO: 4440627 - DNA, 25 bp, Homo sapien
tcgtacgctgctatcaaaactttct

SEQ ID NO: 4440628 - DNA, 25 bp, Homo sapien
gctgaatataaatcgtacgctgcta

SEQ ID NO: 4440629 - DNA, 25 bp, Homo sapien
ttttgctctcactccgtcacactgg

SEQ ID NO: 4440630 - DNA, 25 bp, Homo sapien
gagatgctcattacacatccaggtg

SEQ ID NO: 4440631 - DNA, 25 bp, Homo sapien
tatgcaagtttggagctcaatacag

SEQ ID NO: 4440632 - DNA, 25 bp, Homo sapien
caggtggaactaccaagtggacagc

SEQ ID NO: 4440633 - DNA, 25 bp, Homo sapien
gggagtcatcttcgcacacctcaag

SEQ ID NO: 4440634 - DNA, 25 bp, Homo sapien
tgcccagggccttcgttttgctctt

SEQ ID NO: 4440635 - DNA, 25 bp, Homo sapien
tgctgcctaggcctttgatgaagcc

SEQ ID NO: 4440636 - DNA, 25 bp, Homo sapien
tgacttagagacagtgacccagcgc

SEQ ID NO: 4440637 - DNA, 25 bp, Homo sapien
aagctggtacggtgttttgtgccca

SEQ ID NO: 4440638 - DNA, 25 bp, Homo sapien
tttaagcattatactttccaggcac

SEQ ID NO: 4440639 - DNA, 25 bp, Homo sapien
gaacaagatccttgaccctaattca

SEQ ID NO: 4440640 - DNA, 25 bp, Homo sapien
taattgcattagagtaactgcagct

SEQ ID NO: 4440641 - DNA, 25 bp, Homo sapien
actgcagctgcaaattaatcaaccc

SEQ ID NO: 4440642 - DNA, 25 bp, Homo sapien
cccatggctgcgctcgtctggtgag

SEQ ID NO: 4440643 - DNA, 25 bp, Homo sapien
ctactggcccaagacgagtcacagg

SEQ ID NO: 4440644 - DNA, 25 bp, Homo sapien
taaggtaaacgacagggcaagatct

SEQ ID NO: 4440645 - DNA, 25 bp, Homo sapien
tcacaggcaggtcgaggccactcct

SEQ ID NO: 4440646 - DNA, 25 bp, Homo sapien
ttcagagatacagccaagaaatgcc

SEQ ID NO: 4440647 - DNA, 25 bp, Homo sapien
gactttccttcagagatacagccaa

SEQ ID NO: 4440648 - DNA, 25 bp, Homo sapien
aatggaggctcatagagattaagat

SEQ ID NO: 4440649 - DNA, 25 bp, Homo sapien
gcagtgtgaggaagatcttcccatt

SEQ ID NO: 4440650 - DNA, 25 bp, Homo sapien
attcacattgtcacactgaactcac

SEQ ID NO: 4440651 - DNA, 25 bp, Homo sapien
tatattcacattgtcacactgaact

SEQ ID NO: 4440652 - DNA, 25 bp, Homo sapien
ttttatattcacattgtcacactga

SEQ ID NO: 4440653 - DNA, 25 bp, Homo sapien
taagcttttatattcacattgtcac

SEQ ID NO: 4440654 - DNA, 25 bp, Homo sapien
ccctctgtccccagaacttcttgaa

SEQ ID NO: 4440655 - DNA, 25 bp, Homo sapien
gaacacctggttcagagggcagctg

SEQ ID NO: 4440656 - DNA, 25 bp, Homo sapien
gctaatgctcctgaaggtgtgtccc

SEQ ID NO: 4440657 - DNA, 25 bp, Homo sapien
ggatgtgagcacttgcccggtagcc

SEQ ID NO: 4440658 - DNA, 25 bp, Homo sapien
ccagagttgtagcaccgtggcttca

SEQ ID NO: 4440659 - DNA, 25 bp, Homo sapien
gagtaaatgccaaacatagtgtcat

SEQ ID NO: 4440660 - DNA, 25 bp, Homo sapien
tgagtaaatgccaaacatagtgtca

SEQ ID NO: 4440661 - DNA, 25 bp, Homo sapien
agtaaatgccaaacatagtgtcatc

SEQ ID NO: 4440662 - DNA, 25 bp, Homo sapien
taagtcccagatcagaaagtggcac

SEQ ID NO: 4440663 - DNA, 25 bp, Homo sapien
atgggtgctgccgctctcccaacgg

SEQ ID NO: 4440664 - DNA, 25 bp, Homo sapien
caacggcagatttcctgtacttttc

SEQ ID NO: 4440665 - DNA, 25 bp, Homo sapien
ttgtttaagtcccagatcagaaagt

SEQ ID NO: 4440666 - DNA, 25 bp, Homo sapien
ctgtggaatgaaatactaaataaat

SEQ ID NO: 4440667 - DNA, 25 bp, Homo sapien
aatgcattaatagaaagattcccac

SEQ ID NO: 4440668 - DNA, 25 bp, Homo sapien
aataaatgcattaatagaaagattc

SEQ ID NO: 4440669 - DNA, 25 bp, Homo sapien
taaatgcattaatagaaagattccc

SEQ ID NO: 4440670 - DNA, 25 bp, Homo sapien
ctgtcacaatggatgacacacagca

SEQ ID NO: 4440671 - DNA, 25 bp, Homo sapien
tgacacacagcaggcactcactaaa

SEQ ID NO: 4440672 - DNA, 25 bp, Homo sapien
cacacagcaggcactcactaaatgt

SEQ ID NO: 4440673 - DNA, 25 bp, Homo sapien
atgacacacagcaggcactcactaa

SEQ ID NO: 4440674 - DNA, 25 bp, Homo sapien
gtgtcctccctaagatgtcagctga

SEQ ID NO: 4440675 - DNA, 25 bp, Homo sapien
gttttattcatctccgtgttcccaa

SEQ ID NO: 4440676 - DNA, 25 bp, Homo sapien
tttggaggagttctcatttctgaag

SEQ ID NO: 4440677 - DNA, 25 bp, Homo sapien
aactggaagtgttcagtagtcaggg

SEQ ID NO: 4440678 - DNA, 25 bp, Homo sapien
cagtgcatggagcattttggagcca

SEQ ID NO: 4440679 - DNA, 25 bp, Homo sapien
tttgcacagctaagagagacctcct

SEQ ID NO: 4440680 - DNA, 25 bp, Homo sapien
ccagggcttagctacaagtcgggag

SEQ ID NO: 4440681 - DNA, 25 bp, Homo sapien
tgttcacttccacgcccaaaggagt

SEQ ID NO: 4440682 - DNA, 25 bp, Homo sapien
ggaatgtaaatagccgctcagctgg

SEQ ID NO: 4440683 - DNA, 25 bp, Homo sapien
tgtgtcaacaagatgcttcctgtgg

SEQ ID NO: 4440684 - DNA, 25 bp, Homo sapien
catatgcgtcagaaaatccgcttcc

SEQ ID NO: 4440685 - DNA, 25 bp, Homo sapien
tccgcttcctctgggtgagtttcag

SEQ ID NO: 4440686 - DNA, 25 bp, Homo sapien
caggagatgcagatcaccacatgct

SEQ ID NO: 4440687 - DNA, 25 bp, Homo sapien
gagttgtctgatctcatctcccacg

SEQ ID NO: 4440688 - DNA, 25 bp, Homo sapien
catagtgcaccacgtgccctgctca

SEQ ID NO: 4440689 - DNA, 25 bp, Homo sapien
gtcaaggtgtagagaacaggagatg

SEQ ID NO: 4440690 - DNA, 25 bp, Homo sapien
gcagctggtgccactatagaggaca

SEQ ID NO: 4440691 - DNA, 25 bp, Homo sapien
ggagcttactgtccatggccagcag

SEQ ID NO: 4440692 - DNA, 25 bp, Homo sapien
cagctcttagcgtggtcagtgtgca

SEQ ID NO: 4440693 - DNA, 25 bp, Homo sapien
gacagcacagctagagaaggtttcc

SEQ ID NO: 4440694 - DNA, 25 bp, Homo sapien
caaatacatagatgcctgtggccaa

SEQ ID NO: 4440695 - DNA, 25 bp, Homo sapien
tggagatttctacccctagggcagt

SEQ ID NO: 4440696 - DNA, 25 bp, Homo sapien
tctcagggtcctagacaagtgatct

SEQ ID NO: 4440697 - DNA, 25 bp, Homo sapien
gagctggaaaccacttgacttgcag

SEQ ID NO: 4440698 - DNA, 25 bp, Homo sapien
ggttccatctagcttgtcactctgc

SEQ ID NO: 4440699 - DNA, 25 bp, Homo sapien
tagccatttcgggttttgtccattg

SEQ ID NO: 4440700 - DNA, 25 bp, Homo sapien
gctataatacataaggccccaaacc

SEQ ID NO: 4440701 - DNA, 25 bp, Homo sapien
gggtcacagtaagcaacacaaattg

SEQ ID NO: 4440702 - DNA, 25 bp, Homo sapien
gagaagagtgattccgaccaccacg

SEQ ID NO: 4440703 - DNA, 25 bp, Homo sapien
ccagcttgagtgacctgaaggcgct

SEQ ID NO: 4440704 - DNA, 25 bp, Homo sapien
tcctttcccctcttggagttgagaa

SEQ ID NO: 4440705 - DNA, 25 bp, Homo sapien
tgaaggcgctcagctttcgccgtga

SEQ ID NO: 4440706 - DNA, 25 bp, Homo sapien
cgaggagacccagtgagaatgtagc

SEQ ID NO: 4440707 - DNA, 25 bp, Homo sapien
tcccagctaaaggtgctcagagccc

SEQ ID NO: 4440708 - DNA, 25 bp, Homo sapien
gcagaagcgggaagactttggtcac

SEQ ID NO: 4440709 - DNA, 25 bp, Homo sapien
aagctgagctcataggtgcccagcc

SEQ ID NO: 4440710 - DNA, 25 bp, Homo sapien
tcccaagggctctgacaagtagatt

SEQ ID NO: 4440711 - DNA, 25 bp, Homo sapien
tgaggaatctaccagttgtcgaaga

SEQ ID NO: 4440712 - DNA, 25 bp, Homo sapien
gaaatcgagagtggattagactccc

SEQ ID NO: 4440713 - DNA, 25 bp, Homo sapien
aaacctatgagccttccactgtgga

SEQ ID NO: 4440714 - DNA, 25 bp, Homo sapien
tccagttgcgttagaggaagccttg

SEQ ID NO: 4440715 - DNA, 25 bp, Homo sapien
agagctggctggcttcggactgctc

SEQ ID NO: 4440716 - DNA, 25 bp, Homo sapien
ccttagagaagcaatgggcgtggcc

SEQ ID NO: 4440717 - DNA, 25 bp, Homo sapien
tggcttcggactgctcttttttcct

SEQ ID NO: 4440718 - DNA, 25 bp, Homo sapien
tcttgaaccgaaggaatgctcaggg

SEQ ID NO: 4440719 - DNA, 25 bp, Homo sapien
ggtcaggagagctacgatggcccca

SEQ ID NO: 4440720 - DNA, 25 bp, Homo sapien
ctttagcatctcaggtgggtcagga

SEQ ID NO: 4440721 - DNA, 25 bp, Homo sapien
cccaattttaccatgcagggctgtg

SEQ ID NO: 4440722 - DNA, 25 bp, Homo sapien
gttttgagcccagggcgggcatcca

SEQ ID NO: 4440723 - DNA, 25 bp, Homo sapien
ccttcagttttgagcccagggcggg

SEQ ID NO: 4440724 - DNA, 25 bp, Homo sapien
agcaggtggggagcaaacccagccc

SEQ ID NO: 4440725 - DNA, 25 bp, Homo sapien
caaacccagccccttcagttttgag

SEQ ID NO: 4440726 - DNA, 25 bp, Homo sapien
tgacattaaactgtttgttgcaatt

SEQ ID NO: 4440727 - DNA, 25 bp, Homo sapien
ctagccttgactgacattaaactgt

SEQ ID NO: 4440728 - DNA, 25 bp, Homo sapien
tccccttcaggggactagccttgac

SEQ ID NO: 4440729 - DNA, 25 bp, Homo sapien
gggactagccttgactgacattaaa

SEQ ID NO: 4440730 - DNA, 25 bp, Homo sapien
ctacagaagcgaccaaggcacgtac

SEQ ID NO: 4440731 - DNA, 25 bp, Homo sapien
ggcacgtacacgactccctaacaaa

SEQ ID NO: 4440732 - DNA, 25 bp, Homo sapien
aagcgaccaaggcacgtacacgact

SEQ ID NO: 4440733 - DNA, 25 bp, Homo sapien
agcccacacccctagccgccaagtt

SEQ ID NO: 4440734 - DNA, 25 bp, Homo sapien
ggctttcttccgcaacctgccctcg

SEQ ID NO: 4440735 - DNA, 25 bp, Homo sapien
agaccgcctgggctttcttccgcaa

SEQ ID NO: 4440736 - DNA, 25 bp, Homo sapien
tgggccacagaccgcctgggctttc

SEQ ID NO: 4440737 - DNA, 25 bp, Homo sapien
tttcttccgcaacctgccctcggag

SEQ ID NO: 4440738 - DNA, 25 bp, Homo sapien
ctcagagcacccccttccttcttca

SEQ ID NO: 4440739 - DNA, 25 bp, Homo sapien
agagcacccccttccttcttcaccg

SEQ ID NO: 4440740 - DNA, 25 bp, Homo sapien
ccccttccttcttcaccgccgccat

SEQ ID NO: 4440741 - DNA, 25 bp, Homo sapien
gagcacccccttccttcttcaccgc

SEQ ID NO: 4440742 - DNA, 25 bp, Homo sapien
tgccagaacttaagcttcatgaggg

SEQ ID NO: 4440743 - DNA, 25 bp, Homo sapien
gcccatgacatagcacttatctagg

SEQ ID NO: 4440744 - DNA, 25 bp, Homo sapien
gatctctatgatattggctaaaggc

SEQ ID NO: 4440745 - DNA, 25 bp, Homo sapien
tatctaggtattgcgggcaccacag

SEQ ID NO: 4440746 - DNA, 25 bp, Homo sapien
cagtgctccctgaagcgtggacatg

SEQ ID NO: 4440747 - DNA, 25 bp, Homo sapien
tattgttacaggcagattcttgtgc

SEQ ID NO: 4440748 - DNA, 25 bp, Homo sapien
acatgatccgcccttgccttaaagg

SEQ ID NO: 4440749 - DNA, 25 bp, Homo sapien
gctgctgaagagtattgttacaggc

SEQ ID NO: 4440750 - DNA, 25 bp, Homo sapien
tttgcaaaggcaaaggaccaagaat

SEQ ID NO: 4440751 - DNA, 25 bp, Homo sapien
cactctgctggacttgctatgtaaa

SEQ ID NO: 4440752 - DNA, 25 bp, Homo sapien
gaaagataacccatatgagaggaaa

SEQ ID NO: 4440753 - DNA, 25 bp, Homo sapien
ggccccaacgcaattcagtgaggaa

SEQ ID NO: 4440754 - DNA, 25 bp, Homo sapien
ctatcccaaacatccagagggtcat

SEQ ID NO: 4440755 - DNA, 25 bp, Homo sapien
tttccagtgtaaaatcgaatttcat

SEQ ID NO: 4440756 - DNA, 25 bp, Homo sapien
ccaaacatccagagggtcatttcca

SEQ ID NO: 4440757 - DNA, 25 bp, Homo sapien
tccagtgtaaaatcgaatttcatat

SEQ ID NO: 4440758 - DNA, 25 bp, Homo sapien
tcgaggatcactataatatcgtttt

SEQ ID NO: 4440759 - DNA, 25 bp, Homo sapien
cgtttttctccttgtagtgcttcta

SEQ ID NO: 4440760 - DNA, 25 bp, Homo sapien
ccagagattgagaaatcgaggatca

SEQ ID NO: 4440761 - DNA, 25 bp, Homo sapien
tcccaccttgaggatagttctgctc

SEQ ID NO: 4440762 - DNA, 25 bp, Homo sapien
tgcatcatgtttcatctaatagagc

SEQ ID NO: 4440763 - DNA, 25 bp, Homo sapien
gaaaaaggctgtgataggtcttgaa

SEQ ID NO: 4440764 - DNA, 25 bp, Homo sapien
gataattctattagcaagagggagg

SEQ ID NO: 4440765 - DNA, 25 bp, Homo sapien
ggtgagcgataagcaaaggaatgac

SEQ ID NO: 4440766 - DNA, 25 bp, Homo sapien
gtattgaatgcctattagttgccaa

SEQ ID NO: 4440767 - DNA, 25 bp, Homo sapien
tagttgccaaacaatcactggagat

SEQ ID NO: 4440768 - DNA, 25 bp, Homo sapien
gaatgcctattagttgccaaacaat

SEQ ID NO: 4440769 - DNA, 25 bp, Homo sapien
tcactggagatactacatgcaattc

SEQ ID NO: 4440770 - DNA, 25 bp, Homo sapien
caatcccttggttgtgcaagtaact

SEQ ID NO: 4440771 - DNA, 25 bp, Homo sapien
caagtaactgtacatatccaaaggc

SEQ ID NO: 4440772 - DNA, 25 bp, Homo sapien
tccaaaggctcattgcataaacgcc

SEQ ID NO: 4440773 - DNA, 25 bp, Homo sapien
tctgcccatgagatatagaactgag

SEQ ID NO: 4440774 - DNA, 25 bp, Homo sapien
ggttccctcttgagctatgcatgca

SEQ ID NO: 4440775 - DNA, 25 bp, Homo sapien
tattggccaacaggatcagagtctt

SEQ ID NO: 4440776 - DNA, 25 bp, Homo sapien
gaatgagctgaacaagaggatctcc

SEQ ID NO: 4440777 - DNA, 25 bp, Homo sapien
taagcaggacatgcatgggacagac

SEQ ID NO: 4440778 - DNA, 25 bp, Homo sapien
tcttctttctcaagtgccaacagag

SEQ ID NO: 4440779 - DNA, 25 bp, Homo sapien
tgtggtacagaagactcaaaaactt

SEQ ID NO: 4440780 - DNA, 25 bp, Homo sapien
tcctacacggatgattggagctctt

SEQ ID NO: 4440781 - DNA, 25 bp, Homo sapien
agctagtgtgcttcgttgtggtaca

SEQ ID NO: 4440782 - DNA, 25 bp, Homo sapien
ggaaatggattttggagtcctctgt

SEQ ID NO: 4440783 - DNA, 25 bp, Homo sapien
atggattttggagtcctctgttctg

SEQ ID NO: 4440784 - DNA, 25 bp, Homo sapien
aaatggattttggagtcctctgttc

SEQ ID NO: 4440785 - DNA, 25 bp, Homo sapien
tttgcatctgttgaggaaatggatt

SEQ ID NO: 4440786 - DNA, 25 bp, Homo sapien
gactgtaggcttagacaactctgct

SEQ ID NO: 4440787 - DNA, 25 bp, Homo sapien
tggctggactgtaggcttagacaac

SEQ ID NO: 4440788 - DNA, 25 bp, Homo sapien
ttagacaactctgctgtagaagcct

SEQ ID NO: 4440789 - DNA, 25 bp, Homo sapien
gggtgctatccatggctggactgta

SEQ ID NO: 4440790 - DNA, 25 bp, Homo sapien
cagacagcatatatagaccatggct

SEQ ID NO: 4440791 - DNA, 25 bp, Homo sapien
cagcatatatagaccatggctaaat

SEQ ID NO: 4440792 - DNA, 25 bp, Homo sapien
gcatatatagaccatggctaaatat

SEQ ID NO: 4440793 - DNA, 25 bp, Homo sapien
tatatagaccatggctaaatattca

SEQ ID NO: 4440794 - DNA, 25 bp, Homo sapien
catatggagtgaaactgggaagcac

SEQ ID NO: 4440795 - DNA, 25 bp, Homo sapien
cacagcgggtacagctatcagtgaa

SEQ ID NO: 4440796 - DNA, 25 bp, Homo sapien
gtctcttccacatatggagtgaaac

SEQ ID NO: 4440797 - DNA, 25 bp, Homo sapien
taactggctgtcgtgcagtctcttc

SEQ ID NO: 4440798 - DNA, 25 bp, Homo sapien
ctgcctttgggaagtagaataggtg

SEQ ID NO: 4440799 - DNA, 25 bp, Homo sapien
ctttgggaagtagaataggtgcctc

SEQ ID NO: 4440800 - DNA, 25 bp, Homo sapien
gcctttgggaagtagaataggtgcc

SEQ ID NO: 4440801 - DNA, 25 bp, Homo sapien
tttgggaagtagaataggtgcctct

SEQ ID NO: 4440802 - DNA, 25 bp, Homo sapien
acttcagcccgaatttcttcaaagg

SEQ ID NO: 4440803 - DNA, 25 bp, Homo sapien
gctgatggctctgaaccctttgtag

SEQ ID NO: 4440804 - DNA, 25 bp, Homo sapien
tctcctcagacgcttgctgatggct

SEQ ID NO: 4440805 - DNA, 25 bp, Homo sapien
aggatgtggtttatactaggttcaa

SEQ ID NO: 4440806 - DNA, 25 bp, Homo sapien
tatatatctggtacagactaagctt

SEQ ID NO: 4440807 - DNA, 25 bp, Homo sapien
tggtacagactaagcttttccctta

SEQ ID NO: 4440808 - DNA, 25 bp, Homo sapien
tctatatatctggtacagactaagc

SEQ ID NO: 4440809 - DNA, 25 bp, Homo sapien
tatctggtacagactaagcttttcc

SEQ ID NO: 4440810 - DNA, 25 bp, Homo sapien
cttatacacagatgggaatttatac

SEQ ID NO: 4440811 - DNA, 25 bp, Homo sapien
cttagaaataagcattaaggtctgc

SEQ ID NO: 4440812 - DNA, 25 bp, Homo sapien
gaaatgaggatttatgtaagggtac

SEQ ID NO: 4440813 - DNA, 25 bp, Homo sapien
catgaaatagattcagagaccagct

SEQ ID NO: 4440814 - DNA, 25 bp, Homo sapien
ttcttgctgagtagtttggatttct

SEQ ID NO: 4440815 - DNA, 25 bp, Homo sapien
ttctctgcactggtcaatagctcgg

SEQ ID NO: 4440816 - DNA, 25 bp, Homo sapien
tccatctcttcaatctgtttctgca

SEQ ID NO: 4440817 - DNA, 25 bp, Homo sapien
gttctttcttgctgagtagtttgga

SEQ ID NO: 4440818 - DNA, 25 bp, Homo sapien
cagaactggatagagtcattcctgg

SEQ ID NO: 4440819 - DNA, 25 bp, Homo sapien
tggcacaacagtttacttgacaaac

SEQ ID NO: 4440820 - DNA, 25 bp, Homo sapien
ttctgagactcggaagcaatttgca

SEQ ID NO: 4440821 - DNA, 25 bp, Homo sapien
gcaatttgcagtttagttgtctcct

SEQ ID NO: 4440822 - DNA, 25 bp, Homo sapien
tgccaaatgttctccgcaagtgaag

SEQ ID NO: 4440823 - DNA, 25 bp, Homo sapien
ctgccaaatgttctccgcaagtgaa

SEQ ID NO: 4440824 - DNA, 25 bp, Homo sapien
caaatgttctccgcaagtgaagttt

SEQ ID NO: 4440825 - DNA, 25 bp, Homo sapien
gccaaatgttctccgcaagtgaagt

SEQ ID NO: 4440826 - DNA, 25 bp, Homo sapien
caaaaatggagaaaggtacactggg

SEQ ID NO: 4440827 - DNA, 25 bp, Homo sapien
aagaagaaactcatcaaaaatggag

SEQ ID NO: 4440828 - DNA, 25 bp, Homo sapien
atcaaaaatggagaaaggtacactg

SEQ ID NO: 4440829 - DNA, 25 bp, Homo sapien
gaaactcatcaaaaatggagaaagg

SEQ ID NO: 4440830 - DNA, 25 bp, Homo sapien
tggagacacatcttcatttgaggtg

SEQ ID NO: 4440831 - DNA, 25 bp, Homo sapien
ggtgatgctttctgaggttttgaga

SEQ ID NO: 4440832 - DNA, 25 bp, Homo sapien
tcttcgttgagctaaaactcgtggg

SEQ ID NO: 4440833 - DNA, 25 bp, Homo sapien
ttttgagaactgcaaggggtcttcg

SEQ ID NO: 4440834 - DNA, 25 bp, Homo sapien
tacaaccagtgaaactgtagcattc

SEQ ID NO: 4440835 - DNA, 25 bp, Homo sapien
gccacattgtgggtctataagaaat

SEQ ID NO: 4440836 - DNA, 25 bp, Homo sapien
caattcatgtatgtctggtaggata

SEQ ID NO: 4440837 - DNA, 25 bp, Homo sapien
ggtcttcttcctctatgctacatac

SEQ ID NO: 4440838 - DNA, 25 bp, Homo sapien
caagggttcaattcctgtaaattca

SEQ ID NO: 4440839 - DNA, 25 bp, Homo sapien
tctgggttaggacaaattgttacat

SEQ ID NO: 4440840 - DNA, 25 bp, Homo sapien
ctgtgataatggcatcctcgctcaa

SEQ ID NO: 4440841 - DNA, 25 bp, Homo sapien
tgttacatttctgaagcctgtgata

SEQ ID NO: 4440842 - DNA, 25 bp, Homo sapien
tgactgtagatagtgccacaagctg

SEQ ID NO: 4440843 - DNA, 25 bp, Homo sapien
tcttccggtaacagtctctcaggat

SEQ ID NO: 4440844 - DNA, 25 bp, Homo sapien
cagaggtctttacatctagatcttc

SEQ ID NO: 4440845 - DNA, 25 bp, Homo sapien
tcatgaaaaggagtggatacaaaac

SEQ ID NO: 4440846 - DNA, 25 bp, Homo sapien
catttccacctctctatcaaaagat

SEQ ID NO: 4440847 - DNA, 25 bp, Homo sapien
taaaaaacacatctctagttgccta

SEQ ID NO: 4440848 - DNA, 25 bp, Homo sapien
ctaaaacaagtgtcagaccctggcc

SEQ ID NO: 4440849 - DNA, 25 bp, Homo sapien
ctggaattagttaaattagctgacc

SEQ ID NO: 4440850 - DNA, 25 bp, Homo sapien
ggaggtgcttgcaaccgaggcagaa

SEQ ID NO: 4440851 - DNA, 25 bp, Homo sapien
gtggcttcacgactgtcttcaataa

SEQ ID NO: 4440852 - DNA, 25 bp, Homo sapien
aggagtgtgtggcttcacgactgtc

SEQ ID NO: 4440853 - DNA, 25 bp, Homo sapien
tggaggaggtgcttgcaaccgaggc

SEQ ID NO: 4440854 - DNA, 25 bp, Homo sapien
tgtctgcgatactgtgaacaccatg

SEQ ID NO: 4440855 - DNA, 25 bp, Homo sapien
tagggacttcagtagctgtctgcga

SEQ ID NO: 4440856 - DNA, 25 bp, Homo sapien
gaacaccatggtgactgagtagggt

SEQ ID NO: 4440857 - DNA, 25 bp, Homo sapien
tctgcagaggcacttaactctggta

SEQ ID NO: 4440858 - DNA, 25 bp, Homo sapien
ctttattactgttaattctgcagag

SEQ ID NO: 4440859 - DNA, 25 bp, Homo sapien
ggtattctcgtttaatgcagtaatc

SEQ ID NO: 4440860 - DNA, 25 bp, Homo sapien
gcagagtttcttggcgccacccaga

SEQ ID NO: 4440861 - DNA, 25 bp, Homo sapien
tggcgccacccagaataacttgtaa

SEQ ID NO: 4440862 - DNA, 25 bp, Homo sapien
gaagcagtttatatattggtgccaa

SEQ ID NO: 4440863 - DNA, 25 bp, Homo sapien
cccatgggacaggttgagaagatac

SEQ ID NO: 4440864 - DNA, 25 bp, Homo sapien
gccatcttgatattgataacagctg

SEQ ID NO: 4440865 - DNA, 25 bp, Homo sapien
ggtgccaaacaatacagccatcttg

SEQ ID NO: 4440866 - DNA, 25 bp, Homo sapien
ggactcaagtcaccatggactattt

SEQ ID NO: 4440867 - DNA, 25 bp, Homo sapien
ctccactattgtcaaaaggttataa

SEQ ID NO: 4440868 - DNA, 25 bp, Homo sapien
caagtcaccatggactatttctgct

SEQ ID NO: 4440869 - DNA, 25 bp, Homo sapien
gcatctccactattgtcaaaaggtt

SEQ ID NO: 4440870 - DNA, 25 bp, Homo sapien
gagcccagatttaagagaaggagat

SEQ ID NO: 4440871 - DNA, 25 bp, Homo sapien
tgagcccagatttaagagaaggaga

SEQ ID NO: 4440872 - DNA, 25 bp, Homo sapien
gcccagatttaagagaaggagataa

SEQ ID NO: 4440873 - DNA, 25 bp, Homo sapien
ctgagcccagatttaagagaaggag

SEQ ID NO: 4440874 - DNA, 25 bp, Homo sapien
ggtcaacactgtaggaaaagtccac

SEQ ID NO: 4440875 - DNA, 25 bp, Homo sapien
aacatccagctgcaccctaaggtca

SEQ ID NO: 4440876 - DNA, 25 bp, Homo sapien
gatctgtacagtccgaaagccgctg

SEQ ID NO: 4440877 - DNA, 25 bp, Homo sapien
aagccgctgagggtaaaaacatcca

SEQ ID NO: 4440878 - DNA, 25 bp, Homo sapien
aaatgtgctaaatctgctataccaa

SEQ ID NO: 4440879 - DNA, 25 bp, Homo sapien
tccttgaacaatagtaaatgtgcta

SEQ ID NO: 4440880 - DNA, 25 bp, Homo sapien
aatctgctataccaaacaggtctac

SEQ ID NO: 4440881 - DNA, 25 bp, Homo sapien
taagtttccagaaggacccatccca

SEQ ID NO: 4440882 - DNA, 25 bp, Homo sapien
tgcctggaccatagccaagtggaca

SEQ ID NO: 4440883 - DNA, 25 bp, Homo sapien
aggtcattaaaaaggctacagctcc

SEQ ID NO: 4440884 - DNA, 25 bp, Homo sapien
taagcttgactaaactaactactgc

SEQ ID NO: 4440885 - DNA, 25 bp, Homo sapien
cagggctgttaggaaaccccaactg

SEQ ID NO: 4440886 - DNA, 25 bp, Homo sapien
atttattccacaattcaccatcttt

SEQ ID NO: 4440887 - DNA, 25 bp, Homo sapien
tattccacaattcaccatcttttag

SEQ ID NO: 4440888 - DNA, 25 bp, Homo sapien
attcagaatccgcacaaagaattta

SEQ ID NO: 4440889 - DNA, 25 bp, Homo sapien
aatccgcacaaagaatttattccac

SEQ ID NO: 4440890 - DNA, 25 bp, Homo sapien
cccaagaacagacactgtggcctca

SEQ ID NO: 4440891 - DNA, 25 bp, Homo sapien
ttggaatgtagtgtcaaaaacccca

SEQ ID NO: 4440892 - DNA, 25 bp, Homo sapien
gactttggaatgtagtgtcaaaaac

SEQ ID NO: 4440893 - DNA, 25 bp, Homo sapien
tgtagtgtcaaaaaccccattcatt

SEQ ID NO: 4440894 - DNA, 25 bp, Homo sapien
tcactgaaagagcaaagccccagga

SEQ ID NO: 4440895 - DNA, 25 bp, Homo sapien
gagcaaagccccaggactagttaac

SEQ ID NO: 4440896 - DNA, 25 bp, Homo sapien
tgaaagagcaaagccccaggactag

SEQ ID NO: 4440897 - DNA, 25 bp, Homo sapien
agagcaaagccccaggactagttaa

SEQ ID NO: 4440898 - DNA, 25 bp, Homo sapien
tatcagtgacgtcaaaatatacctg

SEQ ID NO: 4440899 - DNA, 25 bp, Homo sapien
ttcttcacaaaagttagacaaggcc

SEQ ID NO: 4440900 - DNA, 25 bp, Homo sapien
aatctgtgagacttgattgcctagc

SEQ ID NO: 4440901 - DNA, 25 bp, Homo sapien
aatggtagtgcatctaaatgtgtcc

SEQ ID NO: 4440902 - DNA, 25 bp, Homo sapien
tatgtgatgtggtctcttttcaaac

SEQ ID NO: 4440903 - DNA, 25 bp, Homo sapien
ggttttatgcttaggcaaactgaaa

SEQ ID NO: 4440904 - DNA, 25 bp, Homo sapien
ggtccatcactatgctattactgcc

SEQ ID NO: 4440905 - DNA, 25 bp, Homo sapien
taagaaccatttgaaacttctgcca

SEQ ID NO: 4440906 - DNA, 25 bp, Homo sapien
caaccaacagtctgaagtcttactg

SEQ ID NO: 4440907 - DNA, 25 bp, Homo sapien
tcttatactactgccataggaggac

SEQ ID NO: 4440908 - DNA, 25 bp, Homo sapien
ggacgaaggctctaacagtggagta

SEQ ID NO: 4440909 - DNA, 25 bp, Homo sapien
cactctgacttggtggaaggtttct

SEQ ID NO: 4440910 - DNA, 25 bp, Homo sapien
aaccttgtgctcaccttctgaaagg

SEQ ID NO: 4440911 - DNA, 25 bp, Homo sapien
actggtgcagttggaagaattcctc

SEQ ID NO: 4440912 - DNA, 25 bp, Homo sapien
attttggcacattagaaagaactgg

SEQ ID NO: 4440913 - DNA, 25 bp, Homo sapien
tgagttatttcaaagaaccttgtgc

SEQ ID NO: 4440914 - DNA, 25 bp, Homo sapien
ggtttgccgcacaagcctctaagga

SEQ ID NO: 4440915 - DNA, 25 bp, Homo sapien
tagcagtttgacaggacaaccacaa

SEQ ID NO: 4440916 - DNA, 25 bp, Homo sapien
tattcataagtcaaaggtttgccgc

SEQ ID NO: 4440917 - DNA, 25 bp, Homo sapien
gaaagtgagattacaccttcagcta

SEQ ID NO: 4440918 - DNA, 25 bp, Homo sapien
tagtgcaaaggagccagaagacacc

SEQ ID NO: 4440919 - DNA, 25 bp, Homo sapien
caaactgtagagtcccaagtcctgg

SEQ ID NO: 4440920 - DNA, 25 bp, Homo sapien
gagtcagctctcaatcgccaaaggc

SEQ ID NO: 4440921 - DNA, 25 bp, Homo sapien
gaagtctccaacgagtcaggcatag

SEQ ID NO: 4440922 - DNA, 25 bp, Homo sapien
cacaatgctacacaagatatgaggg

SEQ ID NO: 4440923 - DNA, 25 bp, Homo sapien
gactcaagtggccaacgtcagcaga

SEQ ID NO: 4440924 - DNA, 25 bp, Homo sapien
tcaatattagaagtggccctggcaa

SEQ ID NO: 4440925 - DNA, 25 bp, Homo sapien
tttcagggccttgtcagataggtcc

SEQ ID NO: 4440926 - DNA, 25 bp, Homo sapien
ggcggcactcgtcagccctgcgcct

SEQ ID NO: 4440927 - DNA, 25 bp, Homo sapien
ttggcggcactcgtcagccctgcgc

SEQ ID NO: 4440928 - DNA, 25 bp, Homo sapien
cttggcggcactcgtcagccctgcg

SEQ ID NO: 4440929 - DNA, 25 bp, Homo sapien
cggcactcgtcagccctgcgcctcc

SEQ ID NO: 4440930 - DNA, 25 bp, Homo sapien
gcatgaatcagtcaagccagtgtcc

SEQ ID NO: 4440931 - DNA, 25 bp, Homo sapien
tcccagggatttgcagccgcatgaa

SEQ ID NO: 4440932 - DNA, 25 bp, Homo sapien
tagaatgcgtgaatcccagagctga

SEQ ID NO: 4440933 - DNA, 25 bp, Homo sapien
gaaaggcactctagggatatcagcc

SEQ ID NO: 4440934 - DNA, 25 bp, Homo sapien
gagctgctccaacgttgcttggcaa

SEQ ID NO: 4440935 - DNA, 25 bp, Homo sapien
tcaggcatcgacctgctcgtttggg

SEQ ID NO: 4440936 - DNA, 25 bp, Homo sapien
ccattaaatcctcaggcatcgacct

SEQ ID NO: 4440937 - DNA, 25 bp, Homo sapien
caattttgatatcgtcgggggttgc

SEQ ID NO: 4440938 - DNA, 25 bp, Homo sapien
acaggcagcctgaccaccatatctg

SEQ ID NO: 4440939 - DNA, 25 bp, Homo sapien
agctcggacaagactgcccttctgt

SEQ ID NO: 4440940 - DNA, 25 bp, Homo sapien
cgaaacatccccgtgggagatgagt

SEQ ID NO: 4440941 - DNA, 25 bp, Homo sapien
ttctgtcccaacacctccagaggac

SEQ ID NO: 4440942 - DNA, 25 bp, Homo sapien
aggccgtgtgtctggcgtcccctct

SEQ ID NO: 4440943 - DNA, 25 bp, Homo sapien
ttaggataaactcctgtcaagcccc

SEQ ID NO: 4440944 - DNA, 25 bp, Homo sapien
cctgctcaggccgtgtgtctggcgt

SEQ ID NO: 4440945 - DNA, 25 bp, Homo sapien
gcgcccacccagcatcagttaggat

SEQ ID NO: 4440946 - DNA, 25 bp, Homo sapien
ccactgcaggctggtgcttgtctct

SEQ ID NO: 4440947 - DNA, 25 bp, Homo sapien
tgcaggctggtgcttgtctctagcc

SEQ ID NO: 4440948 - DNA, 25 bp, Homo sapien
caggctggtgcttgtctctagccca

SEQ ID NO: 4440949 - DNA, 25 bp, Homo sapien
ctggtgcttgtctctagcccaggaa

SEQ ID NO: 4440950 - DNA, 25 bp, Homo sapien
tgtgcaaagtttatcctcgggaagc

SEQ ID NO: 4440951 - DNA, 25 bp, Homo sapien
ggaggcacccaaatagcacaatagg

SEQ ID NO: 4440952 - DNA, 25 bp, Homo sapien
cacttgactgacaagcgtgggctgg

SEQ ID NO: 4440953 - DNA, 25 bp, Homo sapien
tcttcaacagagagtggcctggtcc

SEQ ID NO: 4440954 - DNA, 25 bp, Homo sapien
cggacagaaccccttgactgctgca

SEQ ID NO: 4440955 - DNA, 25 bp, Homo sapien
caccctcgtcagtggctggtacaac

SEQ ID NO: 4440956 - DNA, 25 bp, Homo sapien
tatttgaacgctgacatagcagggt

SEQ ID NO: 4440957 - DNA, 25 bp, Homo sapien
ggttggcctgctgggacatgtattt

SEQ ID NO: 4440958 - DNA, 25 bp, Homo sapien
tttgggcagaacaccttagctccag

SEQ ID NO: 4440959 - DNA, 25 bp, Homo sapien
ggatgcctccttgaatgggaaactt

SEQ ID NO: 4440960 - DNA, 25 bp, Homo sapien
tttgctggcagaactaacagctgga

SEQ ID NO: 4440961 - DNA, 25 bp, Homo sapien
gtgcctgctcttaatggcctccaaa

SEQ ID NO: 4440962 - DNA, 25 bp, Homo sapien
caggcactcccattctacaaattgg

SEQ ID NO: 4440963 - DNA, 25 bp, Homo sapien
ccttctggttgaaggaattgtccag

SEQ ID NO: 4440964 - DNA, 25 bp, Homo sapien
tctggccttgttcccaggttgccgt

SEQ ID NO: 4440965 - DNA, 25 bp, Homo sapien
tggccttgttcccaggttgccgtgc

SEQ ID NO: 4440966 - DNA, 25 bp, Homo sapien
gctgagcgccggctgtgtgtaatca

SEQ ID NO: 4440967 - DNA, 25 bp, Homo sapien
taatcacctcgttcactggcatcgc

SEQ ID NO: 4440968 - DNA, 25 bp, Homo sapien
gagtcggaaaacctgtcaccttgga

SEQ ID NO: 4440969 - DNA, 25 bp, Homo sapien
tggcatcgcagatgcacgctccaga

SEQ ID NO: 4440970 - DNA, 25 bp, Homo sapien
cccagtggccgcctcgcggagaccc

SEQ ID NO: 4440971 - DNA, 25 bp, Homo sapien
gcccagtggccgcctcgcggagacc

SEQ ID NO: 4440972 - DNA, 25 bp, Homo sapien
ccttcgcctccgggccctggcctgg

SEQ ID NO: 4440973 - DNA, 25 bp, Homo sapien
ctggcctggccacagccgcggggac

SEQ ID NO: 4440974 - DNA, 25 bp, Homo sapien
tgcttggccccagttcccgcccgcc

SEQ ID NO: 4440975 - DNA, 25 bp, Homo sapien
ctgcttggccccagttcccgcccgc

SEQ ID NO: 4440976 - DNA, 25 bp, Homo sapien
acctcggcgcgggaacgccgaggag

SEQ ID NO: 4440977 - DNA, 25 bp, Homo sapien
gaagcccaggaacgctcgaagaggt

SEQ ID NO: 4440978 - DNA, 25 bp, Homo sapien
tcgaagaggtcgtgggagccgggcc

SEQ ID NO: 4440979 - DNA, 25 bp, Homo sapien
cgcttacacgttggtgcagcgccgg

SEQ ID NO: 4440980 - DNA, 25 bp, Homo sapien
ctgcgcggaaacagatcagaaatgc

SEQ ID NO: 4440981 - DNA, 25 bp, Homo sapien
tgcgactggctgacgtccaggcgct

SEQ ID NO: 4440982 - DNA, 25 bp, Homo sapien
gcgggtgttgcgactggctgacgtc

SEQ ID NO: 4440983 - DNA, 25 bp, Homo sapien
tgtagcaagtgttcccgcgggtgtt

SEQ ID NO: 4440984 - DNA, 25 bp, Homo sapien
gcctctctcttaggcgctgaggaga

SEQ ID NO: 4440985 - DNA, 25 bp, Homo sapien
tcgcgactcctcacccgcactgggc

SEQ ID NO: 4440986 - DNA, 25 bp, Homo sapien
gcactgggcctctctcttaggcgct

SEQ ID NO: 4440987 - DNA, 25 bp, Homo sapien
tgggcctctctcttaggcgctgagg

SEQ ID NO: 4440988 - DNA, 25 bp, Homo sapien
actcacaacaccattgtgagttggg

SEQ ID NO: 4440989 - DNA, 25 bp, Homo sapien
gtgagttgggctgaacctgctttcc

SEQ ID NO: 4440990 - DNA, 25 bp, Homo sapien
tcacaacaccattgtgagttgggct

SEQ ID NO: 4440991 - DNA, 25 bp, Homo sapien
cacaacaccattgtgagttgggctg

SEQ ID NO: 4440992 - DNA, 25 bp, Homo sapien
tcatctgcttttctgctcagctgtc

SEQ ID NO: 4440993 - DNA, 25 bp, Homo sapien
catctgcttttctgctcagctgtca

SEQ ID NO: 4440994 - DNA, 25 bp, Homo sapien
atctgcttttctgctcagctgtcac

SEQ ID NO: 4440995 - DNA, 25 bp, Homo sapien
tgaggcttggctggtctagtgtcca

SEQ ID NO: 4440996 - DNA, 25 bp, Homo sapien
tgagtaagttttgtggcggatgcta

SEQ ID NO: 4440997 - DNA, 25 bp, Homo sapien
tggcggatgctactgttccacagag

SEQ ID NO: 4440998 - DNA, 25 bp, Homo sapien
actgaggcttggctggtctagtgtc

SEQ ID NO: 4440999 - DNA, 25 bp, Homo sapien
gaggctgagtgcctaagagacgttc

SEQ ID NO: 4441000 - DNA, 25 bp, Homo sapien
tgttgccccagtcatcgcgagtgaa

SEQ ID NO: 4441001 - DNA, 25 bp, Homo sapien
tcatccacctgaacgggaccagtgt

SEQ ID NO: 4441002 - DNA, 25 bp, Homo sapien
cagagaagagtgatccatggaggct

SEQ ID NO: 4441003 - DNA, 25 bp, Homo sapien
ccattccggaacaagttcttcccag

SEQ ID NO: 4441004 - DNA, 25 bp, Homo sapien
cattctaatagtgagccattccgga

SEQ ID NO: 4441005 - DNA, 25 bp, Homo sapien
gccattccggaacaagttcttccca

SEQ ID NO: 4441006 - DNA, 25 bp, Homo sapien
ttctaatagtgagccattccggaac

SEQ ID NO: 4441007 - DNA, 25 bp, Homo sapien
agatctcagggcgtttcttcttttt

SEQ ID NO: 4441008 - DNA, 25 bp, Homo sapien
ttggggcgccgcagtgtgtccagga

SEQ ID NO: 4441009 - DNA, 25 bp, Homo sapien
cacggtgctggaagttctgtggcgc

SEQ ID NO: 4441010 - DNA, 25 bp, Homo sapien
cgtgtgattcgcgaagggtccacca

SEQ ID NO: 4441011 - DNA, 25 bp, Homo sapien
cagtggacaggaacatgcttcggaa

SEQ ID NO: 4441012 - DNA, 25 bp, Homo sapien
ttctggatgtcgttgagcagccccg

SEQ ID NO: 4441013 - DNA, 25 bp, Homo sapien
tgcttcggaatagcctgcgcttcag

SEQ ID NO: 4441014 - DNA, 25 bp, Homo sapien
ttccatgcctattggtgcccgtggg

SEQ ID NO: 4441015 - DNA, 25 bp, Homo sapien
cctagtaggggactagagtgcacaa

SEQ ID NO: 4441016 - DNA, 25 bp, Homo sapien
gcagctcacagatgctcgtgttcct

SEQ ID NO: 4441017 - DNA, 25 bp, Homo sapien
tgttcctctcacagatacatcaagc

SEQ ID NO: 4441018 - DNA, 25 bp, Homo sapien
ggttttctggctgagtctccccagg

SEQ ID NO: 4441019 - DNA, 25 bp, Homo sapien
tcagggcggagcctgcgtctggagg

SEQ ID NO: 4441020 - DNA, 25 bp, Homo sapien
ctcagggcggagcctgcgtctggag

SEQ ID NO: 4441021 - DNA, 25 bp, Homo sapien
ttgaactgctcatgtgtcacaacac

SEQ ID NO: 4441022 - DNA, 25 bp, Homo sapien
tatccgaagtggtcagagggctgaa

SEQ ID NO: 4441023 - DNA, 25 bp, Homo sapien
ccaagcagacgatgccggtggagcc

SEQ ID NO: 4441024 - DNA, 25 bp, Homo sapien
gtccatcatcttgacggccacctgg

SEQ ID NO: 4441025 - DNA, 25 bp, Homo sapien
gtgcccagacgcatggccacccact

SEQ ID NO: 4441026 - DNA, 25 bp, Homo sapien
cagtgcccagacgcatggccaccca

SEQ ID NO: 4441027 - DNA, 25 bp, Homo sapien
agtgcccagacgcatggccacccac

SEQ ID NO: 4441028 - DNA, 25 bp, Homo sapien
gtacatctccaccacgttgaagtgc

SEQ ID NO: 4441029 - DNA, 25 bp, Homo sapien
aagtgctggtagtcccgcatgatca

SEQ ID NO: 4441030 - DNA, 25 bp, Homo sapien
agtgctggtagtcccgcatgatcac

SEQ ID NO: 4441031 - DNA, 25 bp, Homo sapien
ggccacccgatgaaagagaacgtta

SEQ ID NO: 4441032 - DNA, 25 bp, Homo sapien
gagaacgttagctctggcaggtcgt

SEQ ID NO: 4441033 - DNA, 25 bp, Homo sapien
cacaggcagaagaccacattgccct

SEQ ID NO: 4441034 - DNA, 25 bp, Homo sapien
ggccatagccctggtgaaaactggg

SEQ ID NO: 4441035 - DNA, 25 bp, Homo sapien
cggtggatgacaccctgagcatgca

SEQ ID NO: 4441036 - DNA, 25 bp, Homo sapien
gagcatgcaggtaggccagggcctg

SEQ ID NO: 4441037 - DNA, 25 bp, Homo sapien
tcccggtggatgacaccctgagcat

SEQ ID NO: 4441038 - DNA, 25 bp, Homo sapien
gtcccggtggatgacaccctgagca

SEQ ID NO: 4441039 - DNA, 25 bp, Homo sapien
gtgagtggtggatcaggaggaagtg

SEQ ID NO: 4441040 - DNA, 25 bp, Homo sapien
gggagtgagtggtggatcaggagga

SEQ ID NO: 4441041 - DNA, 25 bp, Homo sapien
gagtgagtggtggatcaggaggaag

SEQ ID NO: 4441042 - DNA, 25 bp, Homo sapien
ggagtgagtggtggatcaggaggaa

SEQ ID NO: 4441043 - DNA, 25 bp, Homo sapien
tcctcttagggacgtctttgctgat

SEQ ID NO: 4441044 - DNA, 25 bp, Homo sapien
tgctgatctgagcacagaatccgaa

SEQ ID NO: 4441045 - DNA, 25 bp, Homo sapien
cagaatccgaagtccgagagcttca

SEQ ID NO: 4441046 - DNA, 25 bp, Homo sapien
gacgtctttgctgatctgagcacag

SEQ ID NO: 4441047 - DNA, 25 bp, Homo sapien
gccctgtggccagttactgcctgca

SEQ ID NO: 4441048 - DNA, 25 bp, Homo sapien
ttactgcctgcatgagtgaccactg

SEQ ID NO: 4441049 - DNA, 25 bp, Homo sapien
ctggcccattggtagctgcgttctg

SEQ ID NO: 4441050 - DNA, 25 bp, Homo sapien
cagaccctggcccattggtagctgc

SEQ ID NO: 4441051 - DNA, 25 bp, Homo sapien
ggagtcactgaagtacggtggctcc

SEQ ID NO: 4441052 - DNA, 25 bp, Homo sapien
agtacggtggctccccatctaccat

SEQ ID NO: 4441053 - DNA, 25 bp, Homo sapien
ctgaagtacggtggctccccatcta

SEQ ID NO: 4441054 - DNA, 25 bp, Homo sapien
gggctgtcccggagcctcttcatgg

SEQ ID NO: 4441055 - DNA, 25 bp, Homo sapien
tcggtagagctggatcaggggcacc

SEQ ID NO: 4441056 - DNA, 25 bp, Homo sapien
caggaaggggtggtctaggagctcc

SEQ ID NO: 4441057 - DNA, 25 bp, Homo sapien
agcaggtggaggtctgctttcggta

SEQ ID NO: 4441058 - DNA, 25 bp, Homo sapien
ggcactcaggtagccctgtctgcag

SEQ ID NO: 4441059 - DNA, 25 bp, Homo sapien
ggacactagtggacaactgccttta

SEQ ID NO: 4441060 - DNA, 25 bp, Homo sapien
cagcaggtatctgtggagaccagca

SEQ ID NO: 4441061 - DNA, 25 bp, Homo sapien
tgcacagtacaggagaagctcagaa

SEQ ID NO: 4441062 - DNA, 25 bp, Homo sapien
gacttagcatggaccactccactgg

SEQ ID NO: 4441063 - DNA, 25 bp, Homo sapien
gcagatggtttgcacacatggatgc

SEQ ID NO: 4441064 - DNA, 25 bp, Homo sapien
ccaggtaggtcactagggagcagaa

SEQ ID NO: 4441065 - DNA, 25 bp, Homo sapien
tctagatagaaagggtccagacacc

SEQ ID NO: 4441066 - DNA, 25 bp, Homo sapien
cttgacatgatggaaacccggaggt

SEQ ID NO: 4441067 - DNA, 25 bp, Homo sapien
gtgcggggctcaccgcgctgcaact

SEQ ID NO: 4441068 - DNA, 25 bp, Homo sapien
tctgcgggcaacagcccggtgatgt

SEQ ID NO: 4441069 - DNA, 25 bp, Homo sapien
tgctcgagttcctggtgcggtcctt

SEQ ID NO: 4441070 - DNA, 25 bp, Homo sapien
tgtgtgcaggccctcaccgggccct

SEQ ID NO: 4441071 - DNA, 25 bp, Homo sapien
cactgggacatttagcaaggaggtt

SEQ ID NO: 4441072 - DNA, 25 bp, Homo sapien
ggacccactcatagcaaaggcagat

SEQ ID NO: 4441073 - DNA, 25 bp, Homo sapien
caaaagactatggactggaaggcag

SEQ ID NO: 4441074 - DNA, 25 bp, Homo sapien
gcagaaagtgggatcctggccccac

SEQ ID NO: 4441075 - DNA, 25 bp, Homo sapien
tagcctggcaagcagcatcatttct

SEQ ID NO: 4441076 - DNA, 25 bp, Homo sapien
aaaaaagatagcctactagcctggc

SEQ ID NO: 4441077 - DNA, 25 bp, Homo sapien
gcaataaggttactatgcccctaga

SEQ ID NO: 4441078 - DNA, 25 bp, Homo sapien
actgtacaaaatcagggtcagagca

SEQ ID NO: 4441079 - DNA, 25 bp, Homo sapien
ggtgattggttaccccgacaggcaa

SEQ ID NO: 4441080 - DNA, 25 bp, Homo sapien
gaaagaatatgtttggcacccaggt

SEQ ID NO: 4441081 - DNA, 25 bp, Homo sapien
gaatccaggaggagctattcccagg

SEQ ID NO: 4441082 - DNA, 25 bp, Homo sapien
tagagatgatgggacaccgtgctcc

SEQ ID NO: 4441083 - DNA, 25 bp, Homo sapien
gtccggaagtgccgcgaggggaggc

SEQ ID NO: 4441084 - DNA, 25 bp, Homo sapien
cgccggggtccggaagtgccgcgag

SEQ ID NO: 4441085 - DNA, 25 bp, Homo sapien
gccggcccgtcagctgcttccccgc

SEQ ID NO: 4441086 - DNA, 25 bp, Homo sapien
ccgccggcccgtcagctgcttcccc

SEQ ID NO: 4441087 - DNA, 25 bp, Homo sapien
gccgccggcccgtcagctgcttccc

SEQ ID NO: 4441088 - DNA, 25 bp, Homo sapien
cgccggcccgtcagctgcttccccg

SEQ ID NO: 4441089 - DNA, 25 bp, Homo sapien
cctggcggcctgcaaggactgggca

SEQ ID NO: 4441090 - DNA, 25 bp, Homo sapien
cgccaccgcgttgctgcagccgccg

SEQ ID NO: 4441091 - DNA, 25 bp, Homo sapien
gggcctggcggcctgcaaggactgg

SEQ ID NO: 4441092 - DNA, 25 bp, Homo sapien
cccggtgctccacggccccggctgg

SEQ ID NO: 4441093 - DNA, 25 bp, Homo sapien
acgtaggcgaacacggtggcgagcc

SEQ ID NO: 4441094 - DNA, 25 bp, Homo sapien
cgagccggacccacttcttgttggt

SEQ ID NO: 4441095 - DNA, 25 bp, Homo sapien
ccagcgacacggagagcacgtaggc

SEQ ID NO: 4441096 - DNA, 25 bp, Homo sapien
gtagtagacggcgagcacgatggcg

SEQ ID NO: 4441097 - DNA, 25 bp, Homo sapien
gggccagtggcgttggagccgccgg

SEQ ID NO: 4441098 - DNA, 25 bp, Homo sapien
gccagtggcgttggagccgccgggg

SEQ ID NO: 4441099 - DNA, 25 bp, Homo sapien
tggagccgccggggggcgggccagc

SEQ ID NO: 4441100 - DNA, 25 bp, Homo sapien
cagtggcgttggagccgccgggggg

SEQ ID NO: 4441101 - DNA, 25 bp, Homo sapien
gcgggacgacccagtggtgttgggc

SEQ ID NO: 4441102 - DNA, 25 bp, Homo sapien
cggcgggacgacccagtggtgttgg

SEQ ID NO: 4441103 - DNA, 25 bp, Homo sapien
cgcggcgggacgacccagtggtgtt

SEQ ID NO: 4441104 - DNA, 25 bp, Homo sapien
ctcgcggcgggacgacccagtggtg

SEQ ID NO: 4441105 - DNA, 25 bp, Homo sapien
ctgcagtgggggaacgtcgcgcggc

SEQ ID NO: 4441106 - DNA, 25 bp, Homo sapien
tgcagtgggggaacgtcgcgcggcg

SEQ ID NO: 4441107 - DNA, 25 bp, Homo sapien
gcagtgggggaacgtcgcgcggcgc

SEQ ID NO: 4441108 - DNA, 25 bp, Homo sapien
cgaggccgctcgagcggcccggccg

SEQ ID NO: 4441109 - DNA, 25 bp, Homo sapien
cgccgccgtttcctcttcgtcctcg

SEQ ID NO: 4441110 - DNA, 25 bp, Homo sapien
ggcccccgaggccgctcgagcggcc

SEQ ID NO: 4441111 - DNA, 25 bp, Homo sapien
cccgaggccgctcgagcggcccggc

SEQ ID NO: 4441112 - DNA, 25 bp, Homo sapien
actctcgtgggggtcactcccgcgg

SEQ ID NO: 4441113 - DNA, 25 bp, Homo sapien
cagccggcgatggtgggagtgtgag

SEQ ID NO: 4441114 - DNA, 25 bp, Homo sapien
cggcgaatcgtggtcccttggctga

SEQ ID NO: 4441115 - DNA, 25 bp, Homo sapien
ggcgttcactctcgtgggggtcact

SEQ ID NO: 4441116 - DNA, 25 bp, Homo sapien
tgagggctgcaacaagaagcctctt

SEQ ID NO: 4441117 - DNA, 25 bp, Homo sapien
ttcagtcagtagctacccagggtgt

SEQ ID NO: 4441118 - DNA, 25 bp, Homo sapien
tctctggccactgcaactaggttga

SEQ ID NO: 4441119 - DNA, 25 bp, Homo sapien
catgtaggatacaccagagcgagcg

SEQ ID NO: 4441120 - DNA, 25 bp, Homo sapien
aaatcgccgggctttgtcactacag

SEQ ID NO: 4441121 - DNA, 25 bp, Homo sapien
ggaagtctagttcttgctaccccag

SEQ ID NO: 4441122 - DNA, 25 bp, Homo sapien
agctcagttgctattatcgtgccca

SEQ ID NO: 4441123 - DNA, 25 bp, Homo sapien
ttatcgggaaaagtaaagacagcca

SEQ ID NO: 4441124 - DNA, 25 bp, Homo sapien
tggagcaaatgtcccaattccagtg

SEQ ID NO: 4441125 - DNA, 25 bp, Homo sapien
tcccagatgttctacaagttcaaag

SEQ ID NO: 4441126 - DNA, 25 bp, Homo sapien
tctggtcatgttcacagctagggct

SEQ ID NO: 4441127 - DNA, 25 bp, Homo sapien
gcagctggacctatgagtggcctct

SEQ ID NO: 4441128 - DNA, 25 bp, Homo sapien
gccctctctcagaaagccattgtgt

SEQ ID NO: 4441129 - DNA, 25 bp, Homo sapien
caagccctctctcagaaagccattg

SEQ ID NO: 4441130 - DNA, 25 bp, Homo sapien
ctctctcagaaagccattgtgtagg

SEQ ID NO: 4441131 - DNA, 25 bp, Homo sapien
cctctctcagaaagccattgtgtag

SEQ ID NO: 4441132 - DNA, 25 bp, Homo sapien
ccaacatgtgaagccgccgtgggca

SEQ ID NO: 4441133 - DNA, 25 bp, Homo sapien
ggctcccactgtacatattgctgta

SEQ ID NO: 4441134 - DNA, 25 bp, Homo sapien
tgtatgtgcccaacatgtgaagccg

SEQ ID NO: 4441135 - DNA, 25 bp, Homo sapien
caggccctgtctcgtcggctagcag

SEQ ID NO: 4441136 - DNA, 25 bp, Homo sapien
tccacgaaagaacacgctatctcag

SEQ ID NO: 4441137 - DNA, 25 bp, Homo sapien
cgaaagaacacgctatctcagaatt

SEQ ID NO: 4441138 - DNA, 25 bp, Homo sapien
aagaacacgctatctcagaattccc

SEQ ID NO: 4441139 - DNA, 25 bp, Homo sapien
cacgaaagaacacgctatctcagaa

SEQ ID NO: 4441140 - DNA, 25 bp, Homo sapien
gaagtgaaatagcacagacctggca

SEQ ID NO: 4441141 - DNA, 25 bp, Homo sapien
tcacagctgctcattaagcacccac

SEQ ID NO: 4441142 - DNA, 25 bp, Homo sapien
cattaagcacccacttgacgccggg

SEQ ID NO: 4441143 - DNA, 25 bp, Homo sapien
ggcacccactgctccttttaaggac

SEQ ID NO: 4441144 - DNA, 25 bp, Homo sapien
tagggtcctgctgttatcacctagg

SEQ ID NO: 4441145 - DNA, 25 bp, Homo sapien
ggtcctgctgttatcacctaggctg

SEQ ID NO: 4441146 - DNA, 25 bp, Homo sapien
cctcgaaccctccaggctcaggcga

SEQ ID NO: 4441147 - DNA, 25 bp, Homo sapien
ggcgatcctctcacatcaacctctt

SEQ ID NO: 4441148 - DNA, 25 bp, Homo sapien
gagccaggacaggagttttcttgag

SEQ ID NO: 4441149 - DNA, 25 bp, Homo sapien
agccaggacaggagttttcttgaga

SEQ ID NO: 4441150 - DNA, 25 bp, Homo sapien
ggagccaggacaggagttttcttga

SEQ ID NO: 4441151 - DNA, 25 bp, Homo sapien
acccttcccggagacatcaggccag

SEQ ID NO: 4441152 - DNA, 25 bp, Homo sapien
gggcacccttcccggagacatcagg

SEQ ID NO: 4441153 - DNA, 25 bp, Homo sapien
gtgggcacccttcccggagacatca

SEQ ID NO: 4441154 - DNA, 25 bp, Homo sapien
gcacccttcccggagacatcaggcc

SEQ ID NO: 4441155 - DNA, 25 bp, Homo sapien
tgtggcggcacttccctgctagaaa

SEQ ID NO: 4441156 - DNA, 25 bp, Homo sapien
ggcacttccctgctagaaagccaca

SEQ ID NO: 4441157 - DNA, 25 bp, Homo sapien
cacgtgcttgggcatattgcctggc

SEQ ID NO: 4441158 - DNA, 25 bp, Homo sapien
tattgcctggctgagtgtggcggca

SEQ ID NO: 4441159 - DNA, 25 bp, Homo sapien
ggtccatctttttggagtaagagca

SEQ ID NO: 4441160 - DNA, 25 bp, Homo sapien
tttttggagtaagagcagggaatac

SEQ ID NO: 4441161 - DNA, 25 bp, Homo sapien
gggtccatctttttggagtaagagc

SEQ ID NO: 4441162 - DNA, 25 bp, Homo sapien
ctgggtccatctttttggagtaaga

SEQ ID NO: 4441163 - DNA, 25 bp, Homo sapien
cacctgagtggtcctgcatgttctg

SEQ ID NO: 4441164 - DNA, 25 bp, Homo sapien
catgcaggaaatccacatgggagcc

SEQ ID NO: 4441165 - DNA, 25 bp, Homo sapien
ggagcagctgcgtgttgccctcatg

SEQ ID NO: 4441166 - DNA, 25 bp, Homo sapien
tgtttatgaccttctgttctcagct

SEQ ID NO: 4441167 - DNA, 25 bp, Homo sapien
cagggctaagcttacctgagatcag

SEQ ID NO: 4441168 - DNA, 25 bp, Homo sapien
cagaggtcagggctaagcttacctg

SEQ ID NO: 4441169 - DNA, 25 bp, Homo sapien
atgaacaatgtcagagtcagaggtc

SEQ ID NO: 4441170 - DNA, 25 bp, Homo sapien
gtggaaagtcaaatgaacaatgtca

SEQ ID NO: 4441171 - DNA, 25 bp, Homo sapien
tgtggtttaggcctcattccaggtc

SEQ ID NO: 4441172 - DNA, 25 bp, Homo sapien
tggtttaggcctcattccaggtcag

SEQ ID NO: 4441173 - DNA, 25 bp, Homo sapien
caggcttgccatcttgtgtcctgtt

SEQ ID NO: 4441174 - DNA, 25 bp, Homo sapien
aattctctcaggcttgccatcttgt

SEQ ID NO: 4441175 - DNA, 25 bp, Homo sapien
gcggcggcggggtgctcgtgcgcat

SEQ ID NO: 4441176 - DNA, 25 bp, Homo sapien
agcggcggcggggtgctcgtgcgca

SEQ ID NO: 4441177 - DNA, 25 bp, Homo sapien
gcaccgctgtccgggcgctggtgct

SEQ ID NO: 4441178 - DNA, 25 bp, Homo sapien
ccgctgtccgggcgctggtgctgaa

SEQ ID NO: 4441179 - DNA, 25 bp, Homo sapien
gagccgccgtctggggccaagggct

SEQ ID NO: 4441180 - DNA, 25 bp, Homo sapien
gccgggagccggaccgctgccgccg

SEQ ID NO: 4441181 - DNA, 25 bp, Homo sapien
ggccgggagccggaccgctgccgcc

SEQ ID NO: 4441182 - DNA, 25 bp, Homo sapien
ctgtccggggagccgccgtctgggg

SEQ ID NO: 4441183 - DNA, 25 bp, Homo sapien
gtctgtgatacggatctgcggagct

SEQ ID NO: 4441184 - DNA, 25 bp, Homo sapien
gtgatacggatctgcggagctgtcc

SEQ ID NO: 4441185 - DNA, 25 bp, Homo sapien
tctgggagggtctgtgatacggatc

SEQ ID NO: 4441186 - DNA, 25 bp, Homo sapien
gggtctgggagggtctgtgatacgg

SEQ ID NO: 4441187 - DNA, 25 bp, Homo sapien
tgcccaccattatcaatgtggcaga

SEQ ID NO: 4441188 - DNA, 25 bp, Homo sapien
gtgcccaccattatcaatgtggcag

SEQ ID NO: 4441189 - DNA, 25 bp, Homo sapien
accacatggtgctgcacagcgggtg

SEQ ID NO: 4441190 - DNA, 25 bp, Homo sapien
tggcagggaactgcccccctggtat

SEQ ID NO: 4441191 - DNA, 25 bp, Homo sapien
ggagcagagagctgcccgatcccca

SEQ ID NO: 4441192 - DNA, 25 bp, Homo sapien
ttccaggtcccatcgcgctgtgagg

SEQ ID NO: 4441193 - DNA, 25 bp, Homo sapien
aaaggagtctagagccccggcagtc

SEQ ID NO: 4441194 - DNA, 25 bp, Homo sapien
ctaagaaaggagtctagagccccgg

SEQ ID NO: 4441195 - DNA, 25 bp, Homo sapien
ccccactcttaagccccaccgcatt

SEQ ID NO: 4441196 - DNA, 25 bp, Homo sapien
aagaaaggagtctagagccccggca

SEQ ID NO: 4441197 - DNA, 25 bp, Homo sapien
ccatggtattaacccttttagcgct

SEQ ID NO: 4441198 - DNA, 25 bp, Homo sapien
gttccaacccttacttcctgttgca

SEQ ID NO: 4441199 - DNA, 25 bp, Homo sapien
gagtgggtaggtgagggataaccca

SEQ ID NO: 4441200 - DNA, 25 bp, Homo sapien
ttttagcgctttgccactcccaagt

SEQ ID NO: 4441201 - DNA, 25 bp, Homo sapien
tggcatctggaaggctcgttcctgc

SEQ ID NO: 4441202 - DNA, 25 bp, Homo sapien
gggcaccagcctggtcacccctaga

SEQ ID NO: 4441203 - DNA, 25 bp, Homo sapien
tggtcacccctagaggtccagggaa

SEQ ID NO: 4441204 - DNA, 25 bp, Homo sapien
ggtagcaacgggtgctgagctcagg

SEQ ID NO: 4441205 - DNA, 25 bp, Homo sapien
ggtgctagatagagcagagagcacg

SEQ ID NO: 4441206 - DNA, 25 bp, Homo sapien
acagcatcagcacggccactggcca

SEQ ID NO: 4441207 - DNA, 25 bp, Homo sapien
gagaagtcgggcagccgggccccca

SEQ ID NO: 4441208 - DNA, 25 bp, Homo sapien
acacagcatcagcacggccactggc

SEQ ID NO: 4441209 - DNA, 25 bp, Homo sapien
agacacagcatcagcacggccactg

SEQ ID NO: 4441210 - DNA, 25 bp, Homo sapien
gctaccatggctaccctacctccaa

SEQ ID NO: 4441211 - DNA, 25 bp, Homo sapien
taccctatccccaggctaccatggc

SEQ ID NO: 4441212 - DNA, 25 bp, Homo sapien
aagagcctaccatggctaccctatc

SEQ ID NO: 4441213 - DNA, 25 bp, Homo sapien
ctctggaggtcaagagcctaccatg

SEQ ID NO: 4441214 - DNA, 25 bp, Homo sapien
ggagaagaacaggtgggcagggtag

SEQ ID NO: 4441215 - DNA, 25 bp, Homo sapien
cagggtaggagttctccatttgggt

SEQ ID NO: 4441216 - DNA, 25 bp, Homo sapien
gcagggtaggagttctccatttggg

SEQ ID NO: 4441217 - DNA, 25 bp, Homo sapien
ctcccaatgtctgtgtcccgtggct

SEQ ID NO: 4441218 - DNA, 25 bp, Homo sapien
aatgtctgtgtcccgtggctcaaag

SEQ ID NO: 4441219 - DNA, 25 bp, Homo sapien
cccaatgtctgtgtcccgtggctca

SEQ ID NO: 4441220 - DNA, 25 bp, Homo sapien
caatgtctgtgtcccgtggctcaaa

SEQ ID NO: 4441221 - DNA, 25 bp, Homo sapien
tgtgagggcttgtagtgctctccag

SEQ ID NO: 4441222 - DNA, 25 bp, Homo sapien
ctggggcctgtgagggcttgtagtg

SEQ ID NO: 4441223 - DNA, 25 bp, Homo sapien
cctgtgagggcttgtagtgctctcc

SEQ ID NO: 4441224 - DNA, 25 bp, Homo sapien
ggcctgtgagggcttgtagtgctct

SEQ ID NO: 4441225 - DNA, 25 bp, Homo sapien
caggggctccaccattctccgaggc

SEQ ID NO: 4441226 - DNA, 25 bp, Homo sapien
attctccgaggccggacagcgctct

SEQ ID NO: 4441227 - DNA, 25 bp, Homo sapien
ctccaccattctccgaggccggaca

SEQ ID NO: 4441228 - DNA, 25 bp, Homo sapien
caggggggccacagaagaagttctc

SEQ ID NO: 4441229 - DNA, 25 bp, Homo sapien
aacatacccccgcaacctggagctc

SEQ ID NO: 4441230 - DNA, 25 bp, Homo sapien
ccgcaacctggagctcagtcctttg

SEQ ID NO: 4441231 - DNA, 25 bp, Homo sapien
caacctggagctcagtcctttggcc

SEQ ID NO: 4441232 - DNA, 25 bp, Homo sapien
atacccccgcaacctggagctcagt

SEQ ID NO: 4441233 - DNA, 25 bp, Homo sapien
gaacaccagctttgcatagctcttc

SEQ ID NO: 4441234 - DNA, 25 bp, Homo sapien
catgaacaccagctttgcatagctc

SEQ ID NO: 4441235 - DNA, 25 bp, Homo sapien
gacatgaacaccagctttgcatagc

SEQ ID NO: 4441236 - DNA, 25 bp, Homo sapien
tgaacaccagctttgcatagctctt

SEQ ID NO: 4441237 - DNA, 25 bp, Homo sapien
aatggatggcatgcaggttccatag

SEQ ID NO: 4441238 - DNA, 25 bp, Homo sapien
ggtcctgttccatgcgacacatgga

SEQ ID NO: 4441239 - DNA, 25 bp, Homo sapien
acatggaatggatggcatgcaggtt

SEQ ID NO: 4441240 - DNA, 25 bp, Homo sapien
ctggtcctgttccatgcgacacatg

SEQ ID NO: 4441241 - DNA, 25 bp, Homo sapien
tggagcctctcagcagggttggaat

SEQ ID NO: 4441242 - DNA, 25 bp, Homo sapien
ttggaaacccgcagtccctgcatgg

SEQ ID NO: 4441243 - DNA, 25 bp, Homo sapien
tgggctcgcttccagcacttctatc

SEQ ID NO: 4441244 - DNA, 25 bp, Homo sapien
gaataattttctaagcagggaatgc

SEQ ID NO: 4441245 - DNA, 25 bp, Homo sapien
ttgggatatcctcgtgtgaagtggg

SEQ ID NO: 4441246 - DNA, 25 bp, Homo sapien
gattctccagttagcataactggat

SEQ ID NO: 4441247 - DNA, 25 bp, Homo sapien
tggattggcactgctcaggttgatg

SEQ ID NO: 4441248 - DNA, 25 bp, Homo sapien
tgcgtggttttcacaccattttcag

SEQ ID NO: 4441249 - DNA, 25 bp, Homo sapien
attcagacatctgactctataatgc

SEQ ID NO: 4441250 - DNA, 25 bp, Homo sapien
aattcagacatctgactctataatg

SEQ ID NO: 4441251 - DNA, 25 bp, Homo sapien
tgagatcatggtggcaacacagtac

SEQ ID NO: 4441252 - DNA, 25 bp, Homo sapien
gacgtagtacagagagcactgacct

SEQ ID NO: 4441253 - DNA, 25 bp, Homo sapien
ggtagcagccacagatagaacaggg

SEQ ID NO: 4441254 - DNA, 25 bp, Homo sapien
gaccctgctgtaagggcccctgtag

SEQ ID NO: 4441255 - DNA, 25 bp, Homo sapien
gctgcgtcagcttgggtagtgtcca

SEQ ID NO: 4441256 - DNA, 25 bp, Homo sapien
gagcacagccagatagttgcccagg

SEQ ID NO: 4441257 - DNA, 25 bp, Homo sapien
aagtccctgtcaagcagaaagtgca

SEQ ID NO: 4441258 - DNA, 25 bp, Homo sapien
gatggcactactctgggagcacttg

SEQ ID NO: 4441259 - DNA, 25 bp, Homo sapien
acagaggtgtagttgtcagcaagcc

SEQ ID NO: 4441260 - DNA, 25 bp, Homo sapien
agaggtgtagttgtcagcaagcccc

SEQ ID NO: 4441261 - DNA, 25 bp, Homo sapien
caagcccccagggggtggccagccg

SEQ ID NO: 4441262 - DNA, 25 bp, Homo sapien
agcaagcccccagggggtggccagc

SEQ ID NO: 4441263 - DNA, 25 bp, Homo sapien
gccatgccgaagaagatggcaacca

SEQ ID NO: 4441264 - DNA, 25 bp, Homo sapien
agcagcaccatgagcgtgaggaaga

SEQ ID NO: 4441265 - DNA, 25 bp, Homo sapien
taaggcgccacaggtcgaagaagat

SEQ ID NO: 4441266 - DNA, 25 bp, Homo sapien
acagccgtgcccatgaagagggcga

SEQ ID NO: 4441267 - DNA, 25 bp, Homo sapien
tcgtggagcacggcggaggcgggca

SEQ ID NO: 4441268 - DNA, 25 bp, Homo sapien
tggaagagcagacgcgaggtgccag

SEQ ID NO: 4441269 - DNA, 25 bp, Homo sapien
cagccgcgcgccaggtagcgctcgt

SEQ ID NO: 4441270 - DNA, 25 bp, Homo sapien
agcgccagcagtagccgccggggcg

SEQ ID NO: 4441271 - DNA, 25 bp, Homo sapien
tgaagtctactgagaggcccactga

SEQ ID NO: 4441272 - DNA, 25 bp, Homo sapien
accaggagtcctacagtgagcagca

SEQ ID NO: 4441273 - DNA, 25 bp, Homo sapien
tgccatgggcatcaaagcggagtcc

SEQ ID NO: 4441274 - DNA, 25 bp, Homo sapien
tcctgcagggtgtcgaagaagctct

SEQ ID NO: 4441275 - DNA, 25 bp, Homo sapien
gagaaataccttcgggctccagcct

SEQ ID NO: 4441276 - DNA, 25 bp, Homo sapien
ctgtcccgtaattgagagatgctcc

SEQ ID NO: 4441277 - DNA, 25 bp, Homo sapien
caaaccggtgagtatgaggagagca

SEQ ID NO: 4441278 - DNA, 25 bp, Homo sapien
tggagaatttctggtcaaaccggtg

SEQ ID NO: 4441279 - DNA, 25 bp, Homo sapien
ccctgtagtgaagtagtgagataga

SEQ ID NO: 4441280 - DNA, 25 bp, Homo sapien
agtgaagtagtgagatagattccaa

SEQ ID NO: 4441281 - DNA, 25 bp, Homo sapien
tgtcaggctaccctgtagtgaagta

SEQ ID NO: 4441282 - DNA, 25 bp, Homo sapien
gctaccctgtagtgaagtagtgaga

SEQ ID NO: 4441283 - DNA, 25 bp, Homo sapien
gactcatacacttcccaaagggcag

SEQ ID NO: 4441284 - DNA, 25 bp, Homo sapien
tgccacctggtgtcatgagctctca

SEQ ID NO: 4441285 - DNA, 25 bp, Homo sapien
tagtggtggaatgaaaccgctctgc

SEQ ID NO: 4441286 - DNA, 25 bp, Homo sapien
caaagagggtggctggattcagtca

SEQ ID NO: 4441287 - DNA, 25 bp, Homo sapien
gagacgcttggtcttctgaagccca

SEQ ID NO: 4441288 - DNA, 25 bp, Homo sapien
tggaataaacgatcgccaaggcccc

SEQ ID NO: 4441289 - DNA, 25 bp, Homo sapien
catatggtgccgtccgtgagccatc

SEQ ID NO: 4441290 - DNA, 25 bp, Homo sapien
gagtcctgaggctacaaaatttgaa

SEQ ID NO: 4441291 - DNA, 25 bp, Homo sapien
tatttggccctagaacaatcccttc

SEQ ID NO: 4441292 - DNA, 25 bp, Homo sapien
tcatattacattctgtgaagctgcc

SEQ ID NO: 4441293 - DNA, 25 bp, Homo sapien
ctgcagtggaaagacaggctaagct

SEQ ID NO: 4441294 - DNA, 25 bp, Homo sapien
tccagctctgccacagactatttgg

SEQ ID NO: 4441295 - DNA, 25 bp, Homo sapien
cccatgtctcttttcggtttctgct

SEQ ID NO: 4441296 - DNA, 25 bp, Homo sapien
tgtctcttttcggtttctgctccac

SEQ ID NO: 4441297 - DNA, 25 bp, Homo sapien
taggaagtaggtctcaataataaaa

SEQ ID NO: 4441298 - DNA, 25 bp, Homo sapien
tccacttctcatgggctacttggag

SEQ ID NO: 4441299 - DNA, 25 bp, Homo sapien
cctgaagtgttgtgtggccacagcc

SEQ ID NO: 4441300 - DNA, 25 bp, Homo sapien
taatcaatgcatcagctgctatggc

SEQ ID NO: 4441301 - DNA, 25 bp, Homo sapien
taatagcatacaggatacatactcg

SEQ ID NO: 4441302 - DNA, 25 bp, Homo sapien
tctgggcctggcaacataaagaaca

SEQ ID NO: 4441303 - DNA, 25 bp, Homo sapien
cagtgttcctctgcataaggtggct

SEQ ID NO: 4441304 - DNA, 25 bp, Homo sapien
tgccaccgtcaaagaaaagatcagg

SEQ ID NO: 4441305 - DNA, 25 bp, Homo sapien
gaaggcggctctggaaactgattac

SEQ ID NO: 4441306 - DNA, 25 bp, Homo sapien
gaaactctctggacgataggcaaag

SEQ ID NO: 4441307 - DNA, 25 bp, Homo sapien
agggaagttgtatctgtactttcag

SEQ ID NO: 4441308 - DNA, 25 bp, Homo sapien
agttgtatctgtactttcagtcaaa

SEQ ID NO: 4441309 - DNA, 25 bp, Homo sapien
gaagttgtatctgtactttcagtca

SEQ ID NO: 4441310 - DNA, 25 bp, Homo sapien
ggaagttgtatctgtactttcagtc

SEQ ID NO: 4441311 - DNA, 25 bp, Homo sapien
tctccttatgatgggttatagtttg

SEQ ID NO: 4441312 - DNA, 25 bp, Homo sapien
tacttagaaacagcttgattcctga

SEQ ID NO: 4441313 - DNA, 25 bp, Homo sapien
gagatttgttaggtaggttccagca

SEQ ID NO: 4441314 - DNA, 25 bp, Homo sapien
tgggatacacttcagttacttagaa

SEQ ID NO: 4441315 - DNA, 25 bp, Homo sapien
ttacaatgatagtatagggaggtcc

SEQ ID NO: 4441316 - DNA, 25 bp, Homo sapien
tctctacttagtacatatggaatac

SEQ ID NO: 4441317 - DNA, 25 bp, Homo sapien
taaaaatatcttcctagtctctact

SEQ ID NO: 4441318 - DNA, 25 bp, Homo sapien
ttttggaatcgttataattgacagg

SEQ ID NO: 4441319 - DNA, 25 bp, Homo sapien
agacctagcgaaaggtgttggagcc

SEQ ID NO: 4441320 - DNA, 25 bp, Homo sapien
gcaatttgtaggcttgaatggagct

SEQ ID NO: 4441321 - DNA, 25 bp, Homo sapien
gccagagccagacctagcgaaaggt

SEQ ID NO: 4441322 - DNA, 25 bp, Homo sapien
tgtacggaaggttcgctcagaggcc

SEQ ID NO: 4441323 - DNA, 25 bp, Homo sapien
aagtgggtgggaatcgcactctgta

SEQ ID NO: 4441324 - DNA, 25 bp, Homo sapien
gggtgggaatcgcactctgtagaca

SEQ ID NO: 4441325 - DNA, 25 bp, Homo sapien
gcactctgtagacagccatgttgta

SEQ ID NO: 4441326 - DNA, 25 bp, Homo sapien
ccatgttgtacggaaaactctgtcc

SEQ ID NO: 4441327 - DNA, 25 bp, Homo sapien
tcgctctcgtttaaaagattccctg

SEQ ID NO: 4441328 - DNA, 25 bp, Homo sapien
cgcagtccttctcgctctcgtttaa

SEQ ID NO: 4441329 - DNA, 25 bp, Homo sapien
caccggctaagtcggccgcctgggt

SEQ ID NO: 4441330 - DNA, 25 bp, Homo sapien
tgcagcaactgtcgtgccaccggct

SEQ ID NO: 4441331 - DNA, 25 bp, Homo sapien
tttcccagctcattccgtccttcct

SEQ ID NO: 4441332 - DNA, 25 bp, Homo sapien
ctggaaggtacaggatgaatgttac

SEQ ID NO: 4441333 - DNA, 25 bp, Homo sapien
gggatagcgcgacccgacaggcccc

SEQ ID NO: 4441334 - DNA, 25 bp, Homo sapien
cactgggcccgagagagtggagggc

SEQ ID NO: 4441335 - DNA, 25 bp, Homo sapien
cgtaacgaggcggcacggctgaacc

SEQ ID NO: 4441336 - DNA, 25 bp, Homo sapien
gggggctgcaggctatacactgtct

SEQ ID NO: 4441337 - DNA, 25 bp, Homo sapien
cgccgctcagcgcagaggggggctg

SEQ ID NO: 4441338 - DNA, 25 bp, Homo sapien
tatacactgtcttaaccacactggt

SEQ ID NO: 4441339 - DNA, 25 bp, Homo sapien
tggccgccgctcagcgcagaggggg

SEQ ID NO: 4441340 - DNA, 25 bp, Homo sapien
tatattacttatccagcccacgctc

SEQ ID NO: 4441341 - DNA, 25 bp, Homo sapien
taacttatctggagttaagcacccc

SEQ ID NO: 4441342 - DNA, 25 bp, Homo sapien
ccgcatctaagggaaagacacagca

SEQ ID NO: 4441343 - DNA, 25 bp, Homo sapien
tggctgagagagctagtcactgccc

SEQ ID NO: 4441344 - DNA, 25 bp, Homo sapien
tacagcatgtttgagggtagccaaa

SEQ ID NO: 4441345 - DNA, 25 bp, Homo sapien
tatttaaacgtgacagtacagcatg

SEQ ID NO: 4441346 - DNA, 25 bp, Homo sapien
acagttccatgggttgtttcacaga

SEQ ID NO: 4441347 - DNA, 25 bp, Homo sapien
tgtgtccccatcacctaggaaagta

SEQ ID NO: 4441348 - DNA, 25 bp, Homo sapien
ctaacaggtaagagactcttagaag

SEQ ID NO: 4441349 - DNA, 25 bp, Homo sapien
caggtaagagactcttagaagtggc

SEQ ID NO: 4441350 - DNA, 25 bp, Homo sapien
taagagactcttagaagtggcccga

SEQ ID NO: 4441351 - DNA, 25 bp, Homo sapien
gactcttagaagtggcccgagtttg

SEQ ID NO: 4441352 - DNA, 25 bp, Homo sapien
tttggaaacatcgacttctttggac

SEQ ID NO: 4441353 - DNA, 25 bp, Homo sapien
acatcattctctggacctcctgaat

SEQ ID NO: 4441354 - DNA, 25 bp, Homo sapien
ttctctcgtctcagtttggtgattt

SEQ ID NO: 4441355 - DNA, 25 bp, Homo sapien
cctgaatgaagctgtttggaaacat

SEQ ID NO: 4441356 - DNA, 25 bp, Homo sapien
cagtgctgccacttgtatgctcaga

SEQ ID NO: 4441357 - DNA, 25 bp, Homo sapien
tacacacacactagggctggactgt

SEQ ID NO: 4441358 - DNA, 25 bp, Homo sapien
gatggcgtggctatctcatgtcaac

SEQ ID NO: 4441359 - DNA, 25 bp, Homo sapien
ccctcagggttgctgtatgactaca

SEQ ID NO: 4441360 - DNA, 25 bp, Homo sapien
agtactgttaagtgtgctgtgaaca

SEQ ID NO: 4441361 - DNA, 25 bp, Homo sapien
gtactgttaagtgtgctgtgaacag

SEQ ID NO: 4441362 - DNA, 25 bp, Homo sapien
cttctggtggcagtgtcagtagctt

SEQ ID NO: 4441363 - DNA, 25 bp, Homo sapien
ctggtggcagtgtcagtagctttca

SEQ ID NO: 4441364 - DNA, 25 bp, Homo sapien
ggcagtgtcagtagctttcatttgc

SEQ ID NO: 4441365 - DNA, 25 bp, Homo sapien
ggtggcagtgtcagtagctttcatt

SEQ ID NO: 4441366 - DNA, 25 bp, Homo sapien
tgcgccggcccttaaaggcattctt

SEQ ID NO: 4441367 - DNA, 25 bp, Homo sapien
actgcgccggcccttaaaggcattc

SEQ ID NO: 4441368 - DNA, 25 bp, Homo sapien
gtagagacggtgaaacaccatagtt

SEQ ID NO: 4441369 - DNA, 25 bp, Homo sapien
ttagtagagacggtgaaacaccata

SEQ ID NO: 4441370 - DNA, 25 bp, Homo sapien
tgcaactgcttgttgacggcttcta

SEQ ID NO: 4441371 - DNA, 25 bp, Homo sapien
agtttcagtcaacttctggtgcaac

SEQ ID NO: 4441372 - DNA, 25 bp, Homo sapien
gatttttgcttactcagtggtttgt

SEQ ID NO: 4441373 - DNA, 25 bp, Homo sapien
cttcctctgatttttgcttactcag

SEQ ID NO: 4441374 - DNA, 25 bp, Homo sapien
cagttgtcccgaaacttctccagca

SEQ ID NO: 4441375 - DNA, 25 bp, Homo sapien
aacagttgtcccgaaacttctccag

SEQ ID NO: 4441376 - DNA, 25 bp, Homo sapien
acagttgtcccgaaacttctccagc

SEQ ID NO: 4441377 - DNA, 25 bp, Homo sapien
tagtggattcttgtcgtgatgccag

SEQ ID NO: 4441378 - DNA, 25 bp, Homo sapien
gattcttgtcgtgatgccagggtct

SEQ ID NO: 4441379 - DNA, 25 bp, Homo sapien
gtccatgtgatcagtagtggattct

SEQ ID NO: 4441380 - DNA, 25 bp, Homo sapien
gatcagtagtggattcttgtcgtga

SEQ ID NO: 4441381 - DNA, 25 bp, Homo sapien
tccacacagttctcaacaaaggagt

SEQ ID NO: 4441382 - DNA, 25 bp, Homo sapien
agaacgagaaagctctctctacagg

SEQ ID NO: 4441383 - DNA, 25 bp, Homo sapien
gatggctaacatcctttccacacag

SEQ ID NO: 4441384 - DNA, 25 bp, Homo sapien
ccagacttgcattagatgatggcta

SEQ ID NO: 4441385 - DNA, 25 bp, Homo sapien
ggctgtttcgttaaaaagcttcagc

SEQ ID NO: 4441386 - DNA, 25 bp, Homo sapien
tgtttcgttaaaaagcttcagctcc

SEQ ID NO: 4441387 - DNA, 25 bp, Homo sapien
tttcgttaaaaagcttcagctcctc

SEQ ID NO: 4441388 - DNA, 25 bp, Homo sapien
ttggctgtttcgttaaaaagcttca

SEQ ID NO: 4441389 - DNA, 25 bp, Homo sapien
gactcctgtatctaaactggaacga

SEQ ID NO: 4441390 - DNA, 25 bp, Homo sapien
taggaattgtccctctagtagtaga

SEQ ID NO: 4441391 - DNA, 25 bp, Homo sapien
tagtagtagagagggactagactcc

SEQ ID NO: 4441392 - DNA, 25 bp, Homo sapien
cactggagtatcaacagactgtatc

SEQ ID NO: 4441393 - DNA, 25 bp, Homo sapien
taagggctgttgttaaatcatttac

SEQ ID NO: 4441394 - DNA, 25 bp, Homo sapien
gattgttacataaggtttgctgttc

SEQ ID NO: 4441395 - DNA, 25 bp, Homo sapien
gctgttctaggaatcggactctttc

SEQ ID NO: 4441396 - DNA, 25 bp, Homo sapien
ttccttaagggctgttgttaaatca

SEQ ID NO: 4441397 - DNA, 25 bp, Homo sapien
ctgagattttatgcccaagagggag

SEQ ID NO: 4441398 - DNA, 25 bp, Homo sapien
tagaaggtcaatccaagctcctagg

SEQ ID NO: 4441399 - DNA, 25 bp, Homo sapien
ggtacagaagcccaaccaggatggg

SEQ ID NO: 4441400 - DNA, 25 bp, Homo sapien
ggtgagtcccagaagatcatggcca

SEQ ID NO: 4441401 - DNA, 25 bp, Homo sapien
gactagccacaggactcttaaagag

SEQ ID NO: 4441402 - DNA, 25 bp, Homo sapien
aactgacatatctaggttaaaaggc

SEQ ID NO: 4441403 - DNA, 25 bp, Homo sapien
cagacctggtgaaaccactgctaca

SEQ ID NO: 4441404 - DNA, 25 bp, Homo sapien
caccctcaggagactagccaatgct

SEQ ID NO: 4441405 - DNA, 25 bp, Homo sapien
ggatttgcctactgtagctacatca

SEQ ID NO: 4441406 - DNA, 25 bp, Homo sapien
tttgaagccagattggcagagaaag

SEQ ID NO: 4441407 - DNA, 25 bp, Homo sapien
tggctttatgttttaagatggttgc

SEQ ID NO: 4441408 - DNA, 25 bp, Homo sapien
tagctacatcacattagtgtttctg

SEQ ID NO: 4441409 - DNA, 25 bp, Homo sapien
ctaaagctatactctggccttggtc

SEQ ID NO: 4441410 - DNA, 25 bp, Homo sapien
gaggcaggcggatcgtatgagctga

SEQ ID NO: 4441411 - DNA, 25 bp, Homo sapien
gctgaggtgttggagaacagcttgg

SEQ ID NO: 4441412 - DNA, 25 bp, Homo sapien
aagctatactctggccttggtccgt

SEQ ID NO: 4441413 - DNA, 25 bp, Homo sapien
tagtgtgtgctcatccagaagacct

SEQ ID NO: 4441414 - DNA, 25 bp, Homo sapien
aacaacacagtggagctttcacagc

SEQ ID NO: 4441415 - DNA, 25 bp, Homo sapien
tctctggcccagctatcaagagtgt

SEQ ID NO: 4441416 - DNA, 25 bp, Homo sapien
caccccaggatggagaattacaatg

SEQ ID NO: 4441417 - DNA, 25 bp, Homo sapien
tcttaagaggtaatgtgggccaggc

SEQ ID NO: 4441418 - DNA, 25 bp, Homo sapien
ggttcactggaaaagaatcaggtct

SEQ ID NO: 4441419 - DNA, 25 bp, Homo sapien
aagactttgagcttgttttgggcac

SEQ ID NO: 4441420 - DNA, 25 bp, Homo sapien
tgggcacaattatgtttgaagcgct

SEQ ID NO: 4441421 - DNA, 25 bp, Homo sapien
tactgccatgactggactcaagcaa

SEQ ID NO: 4441422 - DNA, 25 bp, Homo sapien
tgccaccggcctaatatatacatct

SEQ ID NO: 4441423 - DNA, 25 bp, Homo sapien
atggcttactgccatgactggactc

SEQ ID NO: 4441424 - DNA, 25 bp, Homo sapien
catgccaccggcctaatatatacat

SEQ ID NO: 4441425 - DNA, 25 bp, Homo sapien
aaatagcagcccctaactgcggaaa

SEQ ID NO: 4441426 - DNA, 25 bp, Homo sapien
ctgccccgaacgctgcaaatgctgg

SEQ ID NO: 4441427 - DNA, 25 bp, Homo sapien
tatctccctgcgttgaaatagcagc

SEQ ID NO: 4441428 - DNA, 25 bp, Homo sapien
tgcacgaagagccagcgctgaaact

SEQ ID NO: 4441429 - DNA, 25 bp, Homo sapien
tcgccacacgccaccccagcagccg

SEQ ID NO: 4441430 - DNA, 25 bp, Homo sapien
ccagcagccgagtcgcagtcgccat

SEQ ID NO: 4441431 - DNA, 25 bp, Homo sapien
cggcaagcggcggccgcagcctcca

SEQ ID NO: 4441432 - DNA, 25 bp, Homo sapien
ctgggaaacgaagccggcaagcggc

SEQ ID NO: 4441433 - DNA, 25 bp, Homo sapien
tgattgcatcgtccacgggcaaaag

SEQ ID NO: 4441434 - DNA, 25 bp, Homo sapien
gctcctcgcttagcccattgattgc

SEQ ID NO: 4441435 - DNA, 25 bp, Homo sapien
tccacgggcaaaagcgagtgggccc

SEQ ID NO: 4441436 - DNA, 25 bp, Homo sapien
tagcccattgattgcatcgtccacg

SEQ ID NO: 4441437 - DNA, 25 bp, Homo sapien
aaatcttcactccacagacgtgagg

SEQ ID NO: 4441438 - DNA, 25 bp, Homo sapien
gcagtactgtcccacggtctcaaat

SEQ ID NO: 4441439 - DNA, 25 bp, Homo sapien
tgaactacatacagattgagggccc

SEQ ID NO: 4441440 - DNA, 25 bp, Homo sapien
ccttgtgccacaagcggtaggtagc

SEQ ID NO: 4441441 - DNA, 25 bp, Homo sapien
tgctgcgatcgatctcctgggcctt

SEQ ID NO: 4441442 - DNA, 25 bp, Homo sapien
caggttcttgaactcattgctgcga

SEQ ID NO: 4441443 - DNA, 25 bp, Homo sapien
ggaacttagccatggtctgacgaag

SEQ ID NO: 4441444 - DNA, 25 bp, Homo sapien
tgctcctgaaggaacttagccatgg

SEQ ID NO: 4441445 - DNA, 25 bp, Homo sapien
cactccctgactgcccccgactgcc

SEQ ID NO: 4441446 - DNA, 25 bp, Homo sapien
aactgtgtgagctcttccaggcagc

SEQ ID NO: 4441447 - DNA, 25 bp, Homo sapien
gccccactccctgactgcccccgac

SEQ ID NO: 4441448 - DNA, 25 bp, Homo sapien
caggcagcagtgcagctcagcccca

SEQ ID NO: 4441449 - DNA, 25 bp, Homo sapien
ggctgtgatgcccaatacgcccagg

SEQ ID NO: 4441450 - DNA, 25 bp, Homo sapien
ctgtgatgcccaatacgcccaggtt

SEQ ID NO: 4441451 - DNA, 25 bp, Homo sapien
tgtgatgcccaatacgcccaggttc

SEQ ID NO: 4441452 - DNA, 25 bp, Homo sapien
tgatgcccaatacgcccaggttccc

SEQ ID NO: 4441453 - DNA, 25 bp, Homo sapien
cgagtcactcggattataggagccc

SEQ ID NO: 4441454 - DNA, 25 bp, Homo sapien
tggcctcccgagtcactcggattat

SEQ ID NO: 4441455 - DNA, 25 bp, Homo sapien
tgcagggagtggggtacataaaccc

SEQ ID NO: 4441456 - DNA, 25 bp, Homo sapien
ctttcttccgtaaaatacaatctga

SEQ ID NO: 4441457 - DNA, 25 bp, Homo sapien
gaataagctgatgccacagacctgc

SEQ ID NO: 4441458 - DNA, 25 bp, Homo sapien
gattttatagcatagggctgaaccc

SEQ ID NO: 4441459 - DNA, 25 bp, Homo sapien
tcttgatgaagatacgtgaacaacc

SEQ ID NO: 4441460 - DNA, 25 bp, Homo sapien
tctgatgtgtctgcaaaaggcctga

SEQ ID NO: 4441461 - DNA, 25 bp, Homo sapien
gggcctcattcccattgcgtacaag

SEQ ID NO: 4441462 - DNA, 25 bp, Homo sapien
gaagctcgggatatctcctccatca

SEQ ID NO: 4441463 - DNA, 25 bp, Homo sapien
cattgcgtacaagctggttgatgca

SEQ ID NO: 4441464 - DNA, 25 bp, Homo sapien
ttggagtgggcaccgtaactgagcc

SEQ ID NO: 4441465 - DNA, 25 bp, Homo sapien
atggccagggctccgatgtactcac

SEQ ID NO: 4441466 - DNA, 25 bp, Homo sapien
cttttccgctttgagcttcatagag

SEQ ID NO: 4441467 - DNA, 25 bp, Homo sapien
tcatagagacaacatcagagcctgc

SEQ ID NO: 4441468 - DNA, 25 bp, Homo sapien
ctttcttttccgctttgagcttcat

SEQ ID NO: 4441469 - DNA, 25 bp, Homo sapien
ggctcccaagttgagagtggcctca

SEQ ID NO: 4441470 - DNA, 25 bp, Homo sapien
ctctgcccattttggctcccaagtt

SEQ ID NO: 4441471 - DNA, 25 bp, Homo sapien
cattttggctcccaagttgagagtg

SEQ ID NO: 4441472 - DNA, 25 bp, Homo sapien
gctcccaagttgagagtggcctcac

SEQ ID NO: 4441473 - DNA, 25 bp, Homo sapien
ttgccattcaggatgtagtgatttc

SEQ ID NO: 4441474 - DNA, 25 bp, Homo sapien
tgttgccattcaggatgtagtgatt

SEQ ID NO: 4441475 - DNA, 25 bp, Homo sapien
tcttggcatagacaatcaggacgtc

SEQ ID NO: 4441476 - DNA, 25 bp, Homo sapien
gcagccagatctgtcttggcataga

SEQ ID NO: 4441477 - DNA, 25 bp, Homo sapien
catcagggccattagtgatccagaa

SEQ ID NO: 4441478 - DNA, 25 bp, Homo sapien
tctccacaatgaaggctgtgatgcc

SEQ ID NO: 4441479 - DNA, 25 bp, Homo sapien
ggtaccctgaccgtcatgtcctgac

SEQ ID NO: 4441480 - DNA, 25 bp, Homo sapien
ggacttttggtcaccctccttgcag

SEQ ID NO: 4441481 - DNA, 25 bp, Homo sapien
agtgaacgggctatctctggtacca

SEQ ID NO: 4441482 - DNA, 25 bp, Homo sapien
acggctccaccgtcttcagaagtga

SEQ ID NO: 4441483 - DNA, 25 bp, Homo sapien
tcacaggtgttagagcccctcatcc

SEQ ID NO: 4441484 - DNA, 25 bp, Homo sapien
cttgcagtcttcaaagattagctca

SEQ ID NO: 4441485 - DNA, 25 bp, Homo sapien
ccagcttcttagaggtgctaaagcc

SEQ ID NO: 4441486 - DNA, 25 bp, Homo sapien
tagaggtgctaaagccaggcatacc

SEQ ID NO: 4441487 - DNA, 25 bp, Homo sapien
acttgagaacagccagatcagcctg

SEQ ID NO: 4441488 - DNA, 25 bp, Homo sapien
gctccccgattcccggtgctactta

SEQ ID NO: 4441489 - DNA, 25 bp, Homo sapien
agaacagccagatcagcctggaagg

SEQ ID NO: 4441490 - DNA, 25 bp, Homo sapien
gaacagccagatcagcctggaaggg

SEQ ID NO: 4441491 - DNA, 25 bp, Homo sapien
tactagatttggaaacatggctctc

SEQ ID NO: 4441492 - DNA, 25 bp, Homo sapien
ggatcaagtgaaccccttccagtca

SEQ ID NO: 4441493 - DNA, 25 bp, Homo sapien
tgaaagcttctttgtccaggagaca

SEQ ID NO: 4441494 - DNA, 25 bp, Homo sapien
tccctgcagagtagtccgtgaaagc

SEQ ID NO: 4441495 - DNA, 25 bp, Homo sapien
agcccactcatcagcacgtagacac

SEQ ID NO: 4441496 - DNA, 25 bp, Homo sapien
gcccactcatcagcacgtagacacc

SEQ ID NO: 4441497 - DNA, 25 bp, Homo sapien
ctcaggccttttgtctgttacttaa

SEQ ID NO: 4441498 - DNA, 25 bp, Homo sapien
tgtcgtttcacagccgagtaagcca

SEQ ID NO: 4441499 - DNA, 25 bp, Homo sapien
ttacggcactgactggccagaggtg

SEQ ID NO: 4441500 - DNA, 25 bp, Homo sapien
caaaatgctagcgtgggaaggccag

SEQ ID NO: 4441501 - DNA, 25 bp, Homo sapien
tgtggtccaggaccgcttgcatgag

SEQ ID NO: 4441502 - DNA, 25 bp, Homo sapien
aaaggcttccctcacgtgcaggtag

SEQ ID NO: 4441503 - DNA, 25 bp, Homo sapien
ggcttccctcacgtgcaggtaggga

SEQ ID NO: 4441504 - DNA, 25 bp, Homo sapien
cttccctcacgtgcaggtagggaat

SEQ ID NO: 4441505 - DNA, 25 bp, Homo sapien
gcaggccttggcgacattgtagaca

SEQ ID NO: 4441506 - DNA, 25 bp, Homo sapien
catgaggcgggtgtacatgtcagcc

SEQ ID NO: 4441507 - DNA, 25 bp, Homo sapien
atactgccgacacgccatgaggcgg

SEQ ID NO: 4441508 - DNA, 25 bp, Homo sapien
agtgcaatggccctcatcgcaggcc

SEQ ID NO: 4441509 - DNA, 25 bp, Homo sapien
actcagctgagtaaagaatcacacc

SEQ ID NO: 4441510 - DNA, 25 bp, Homo sapien
gagtaaagaatcacacctgcacagt

SEQ ID NO: 4441511 - DNA, 25 bp, Homo sapien
tgccgtccagggctacctgtgtggc

SEQ ID NO: 4441512 - DNA, 25 bp, Homo sapien
aaaacactgaatgccgtccagggct

SEQ ID NO: 4441513 - DNA, 25 bp, Homo sapien
cagctgattggataccctaggtgac

SEQ ID NO: 4441514 - DNA, 25 bp, Homo sapien
ccacatagcatagataggctgcaca

SEQ ID NO: 4441515 - DNA, 25 bp, Homo sapien
tgaacacaggcactctgatatcagg

SEQ ID NO: 4441516 - DNA, 25 bp, Homo sapien
ctaggtgactactaacgggcaggta

SEQ ID NO: 4441517 - DNA, 25 bp, Homo sapien
aagtcattgatgtagccattgccac

SEQ ID NO: 4441518 - DNA, 25 bp, Homo sapien
gaaagtctgcattgaaggctctgcc

SEQ ID NO: 4441519 - DNA, 25 bp, Homo sapien
aaagcggcccatgggaaagtcattg

SEQ ID NO: 4441520 - DNA, 25 bp, Homo sapien
cttggcatctcgaagaaagcggccc

SEQ ID NO: 4441521 - DNA, 25 bp, Homo sapien
taaatcacacaacactagccgtggc

SEQ ID NO: 4441522 - DNA, 25 bp, Homo sapien
caagggcacagagtcaccaaaacct

SEQ ID NO: 4441523 - DNA, 25 bp, Homo sapien
tgggaaagccgccacatctctactt

SEQ ID NO: 4441524 - DNA, 25 bp, Homo sapien
ggagaactcaacctcatccagaggc

SEQ ID NO: 4441525 - DNA, 25 bp, Homo sapien
catgcccccaggtgcctaccctggg

SEQ ID NO: 4441526 - DNA, 25 bp, Homo sapien
acctgcatgcccccaggtgcctacc

SEQ ID NO: 4441527 - DNA, 25 bp, Homo sapien
ctgcatgcccccaggtgcctaccct

SEQ ID NO: 4441528 - DNA, 25 bp, Homo sapien
gcatgcccccaggtgcctaccctgg

SEQ ID NO: 4441529 - DNA, 25 bp, Homo sapien
gatacttaacctgtaccaagttcca

SEQ ID NO: 4441530 - DNA, 25 bp, Homo sapien
gctgtgcttgagcagagagatctcc

SEQ ID NO: 4441531 - DNA, 25 bp, Homo sapien
gagcagagagatctccttgccagag

SEQ ID NO: 4441532 - DNA, 25 bp, Homo sapien
gaaagttgaatttgccttatccaaa

SEQ ID NO: 4441533 - DNA, 25 bp, Homo sapien
tagttgaggcgaggtttccacatgt

SEQ ID NO: 4441534 - DNA, 25 bp, Homo sapien
taggagctgatacctctagaaactg

SEQ ID NO: 4441535 - DNA, 25 bp, Homo sapien
tggagaaatgtacacaggcagcctc

SEQ ID NO: 4441536 - DNA, 25 bp, Homo sapien
cagctggagtcatgcgagccaactc

SEQ ID NO: 4441537 - DNA, 25 bp, Homo sapien
gaaagggactgcctatgagcccagg

SEQ ID NO: 4441538 - DNA, 25 bp, Homo sapien
cttagacagactggatgaagcgccc

SEQ ID NO: 4441539 - DNA, 25 bp, Homo sapien
gatcttgccctcaggatgggacgga

SEQ ID NO: 4441540 - DNA, 25 bp, Homo sapien
tacagtgcggcccaaagctggaatt

SEQ ID NO: 4441541 - DNA, 25 bp, Homo sapien
tcagacttgagagggttacatgggc

SEQ ID NO: 4441542 - DNA, 25 bp, Homo sapien
ggaagcctgctttaggactcagatg

SEQ ID NO: 4441543 - DNA, 25 bp, Homo sapien
cactcggttgtgcaaagatcaagga

SEQ ID NO: 4441544 - DNA, 25 bp, Homo sapien
gaagattgccttgcagactcaccct

SEQ ID NO: 4441545 - DNA, 25 bp, Homo sapien
aatttgcggggagcttgatagttca

SEQ ID NO: 4441546 - DNA, 25 bp, Homo sapien
gggagcttgatagttcactggttca

SEQ ID NO: 4441547 - DNA, 25 bp, Homo sapien
actgaagaatttgcggggagcttga

SEQ ID NO: 4441548 - DNA, 25 bp, Homo sapien
gccactgaagaatttgcggggagct

SEQ ID NO: 4441549 - DNA, 25 bp, Homo sapien
agtgaggactccttgcaacaagaac

SEQ ID NO: 4441550 - DNA, 25 bp, Homo sapien
agagaaagtttgaagggctggaagg

SEQ ID NO: 4441551 - DNA, 25 bp, Homo sapien
caagaacacgaacattcagcaggga

SEQ ID NO: 4441552 - DNA, 25 bp, Homo sapien
gatgagaaacatggcagtgaggact

SEQ ID NO: 4441553 - DNA, 25 bp, Homo sapien
cctggcagtccagtcttaattagca

SEQ ID NO: 4441554 - DNA, 25 bp, Homo sapien
tcttaattagcaaccttggactggt

SEQ ID NO: 4441555 - DNA, 25 bp, Homo sapien
tggcagtccagtcttaattagcaac

SEQ ID NO: 4441556 - DNA, 25 bp, Homo sapien
agcaaccttggactggtctgactcc

SEQ ID NO: 4441557 - DNA, 25 bp, Homo sapien
ccaagaagacttgggaggccatgca

SEQ ID NO: 4441558 - DNA, 25 bp, Homo sapien
tagtacctgatgtagccacaagtgc

SEQ ID NO: 4441559 - DNA, 25 bp, Homo sapien
tcacataggcttggagtggctccaa

SEQ ID NO: 4441560 - DNA, 25 bp, Homo sapien
gacagcattgcttctgacctaggaa

SEQ ID NO: 4441561 - DNA, 25 bp, Homo sapien
gttgcctaataatgcttggtgaact

SEQ ID NO: 4441562 - DNA, 25 bp, Homo sapien
agaacatggcatgatacctggcaaa

SEQ ID NO: 4441563 - DNA, 25 bp, Homo sapien
gcttggtgaactgaatagtaaacaa

SEQ ID NO: 4441564 - DNA, 25 bp, Homo sapien
tgtgggctcttctaggtgactcctg

SEQ ID NO: 4441565 - DNA, 25 bp, Homo sapien
tactgaacacactccaagatccatg

SEQ ID NO: 4441566 - DNA, 25 bp, Homo sapien
ggcatttacgggacctgaaccctga

SEQ ID NO: 4441567 - DNA, 25 bp, Homo sapien
ggtatcgtggtgcagccctttgcag

SEQ ID NO: 4441568 - DNA, 25 bp, Homo sapien
tacccctggcgcacattttcacttg

SEQ ID NO: 4441569 - DNA, 25 bp, Homo sapien
ctgtccacaaccccagcggctcctg

SEQ ID NO: 4441570 - DNA, 25 bp, Homo sapien
caaccaggagctctaccatctcttt

SEQ ID NO: 4441571 - DNA, 25 bp, Homo sapien
cctcttttagcgctgtccacaaccc

SEQ ID NO: 4441572 - DNA, 25 bp, Homo sapien
agagacccccatgctccactcctcc

SEQ ID NO: 4441573 - DNA, 25 bp, Homo sapien
tgggtagggccacctaagctttgta

SEQ ID NO: 4441574 - DNA, 25 bp, Homo sapien
gcaacacgtaatggctgctgaggac

SEQ ID NO: 4441575 - DNA, 25 bp, Homo sapien
tcccaaagacgttggagaacataga

SEQ ID NO: 4441576 - DNA, 25 bp, Homo sapien
aagcgccgagtaccagtttcagcaa

SEQ ID NO: 4441577 - DNA, 25 bp, Homo sapien
tcctggtgttggcattagagggccc

SEQ ID NO: 4441578 - DNA, 25 bp, Homo sapien
cacgggctggctaaaggcactaagt

SEQ ID NO: 4441579 - DNA, 25 bp, Homo sapien
catgctacaggccaagacagaagag

SEQ ID NO: 4441580 - DNA, 25 bp, Homo sapien
cacgttcagccgaggaaatggcagc

SEQ ID NO: 4441581 - DNA, 25 bp, Homo sapien
aggctaagggcacagagagagatgg

SEQ ID NO: 4441582 - DNA, 25 bp, Homo sapien
tccctgttaggtgcgggaaggagct

SEQ ID NO: 4441583 - DNA, 25 bp, Homo sapien
tccccctagtcaccaaatgctgtgg

SEQ ID NO: 4441584 - DNA, 25 bp, Homo sapien
agagcccgcctaggacttcactaag

SEQ ID NO: 4441585 - DNA, 25 bp, Homo sapien
gggggcgctcaattcccgggctcca

SEQ ID NO: 4441586 - DNA, 25 bp, Homo sapien
aattcccgggctccacgctgctgcg

SEQ ID NO: 4441587 - DNA, 25 bp, Homo sapien
gggcgctcaattcccgggctccacg

SEQ ID NO: 4441588 - DNA, 25 bp, Homo sapien
ctcaattcccgggctccacgctgct

SEQ ID NO: 4441589 - DNA, 25 bp, Homo sapien
gtggcgcggcgcgctcggtggggcg

SEQ ID NO: 4441590 - DNA, 25 bp, Homo sapien
ctgcttcgcgtcgtccgtccgtccg

SEQ ID NO: 4441591 - DNA, 25 bp, Homo sapien
cgggggcggtggcgcggcgcgctcg

SEQ ID NO: 4441592 - DNA, 25 bp, Homo sapien
ggcggtggcgcggcgcgctcggtgg

SEQ ID NO: 4441593 - DNA, 25 bp, Homo sapien
ggcggagcgagcagggcaagaccag

SEQ ID NO: 4441594 - DNA, 25 bp, Homo sapien
aggcggtctgacaacttcgattccc

SEQ ID NO: 4441595 - DNA, 25 bp, Homo sapien
ctttgtccggcgcttcaccgccaag

SEQ ID NO: 4441596 - DNA, 25 bp, Homo sapien
ccgctgtcacttggaggcggtctga

SEQ ID NO: 4441597 - DNA, 25 bp, Homo sapien
gaaactcaggcaatccccagaaaga

SEQ ID NO: 4441598 - DNA, 25 bp, Homo sapien
gaaggactgtgttctaggacacaca

SEQ ID NO: 4441599 - DNA, 25 bp, Homo sapien
ccttcccgcgtagaagggaaatgct

SEQ ID NO: 4441600 - DNA, 25 bp, Homo sapien
ggcacaatttgctcagagtgaagaa

SEQ ID NO: 4441601 - DNA, 25 bp, Homo sapien
cggggctgttcgtataatgctccat

SEQ ID NO: 4441602 - DNA, 25 bp, Homo sapien
aggaggccctttaatgtcggggctg

SEQ ID NO: 4441603 - DNA, 25 bp, Homo sapien
tgtcggggctgttcgtataatgctc

SEQ ID NO: 4441604 - DNA, 25 bp, Homo sapien
ttaatgtcggggctgttcgtataat

SEQ ID NO: 4441605 - DNA, 25 bp, Homo sapien
taagcaagtgaatgtagtactacag

SEQ ID NO: 4441606 - DNA, 25 bp, Homo sapien
caaagaatgtcacagataggtgaaa

SEQ ID NO: 4441607 - DNA, 25 bp, Homo sapien
aaatcaggagcaaagaactaaagtt

SEQ ID NO: 4441608 - DNA, 25 bp, Homo sapien
tgtggctgcccctaaaccattaagc

SEQ ID NO: 4441609 - DNA, 25 bp, Homo sapien
gatcgtatcagagttatgggcaccc

SEQ ID NO: 4441610 - DNA, 25 bp, Homo sapien
caggagcagaatcgcaaggcagatc

SEQ ID NO: 4441611 - DNA, 25 bp, Homo sapien
cctagacttagagcaccacttggag

SEQ ID NO: 4441612 - DNA, 25 bp, Homo sapien
taacctcctgaatgaaccagctgtg

SEQ ID NO: 4441613 - DNA, 25 bp, Homo sapien
cactgctattgctgttcacactcat

SEQ ID NO: 4441614 - DNA, 25 bp, Homo sapien
ccagcgggcccaggtttttcagctt

SEQ ID NO: 4441615 - DNA, 25 bp, Homo sapien
tccccactgctattgctgttcacac

SEQ ID NO: 4441616 - DNA, 25 bp, Homo sapien
tttttcagcttaatttccccactgc

SEQ ID NO: 4441617 - DNA, 25 bp, Homo sapien
aggtactcctgcaacccatccccac

SEQ ID NO: 4441618 - DNA, 25 bp, Homo sapien
caggtactcctgcaacccatcccca

SEQ ID NO: 4441619 - DNA, 25 bp, Homo sapien
aggccaggatcagcatattcctggg

SEQ ID NO: 4441620 - DNA, 25 bp, Homo sapien
cagggcaagggtaacagtaaggcca

SEQ ID NO: 4441621 - DNA, 25 bp, Homo sapien
tagacctgccatacagctttaaacc

SEQ ID NO: 4441622 - DNA, 25 bp, Homo sapien
aacccagggacggtgcgtagacctg

SEQ ID NO: 4441623 - DNA, 25 bp, Homo sapien
ggcattttgtatgggcagccgccac

SEQ ID NO: 4441624 - DNA, 25 bp, Homo sapien
gacggatggcccacaaggagttgca

SEQ ID NO: 4441625 - DNA, 25 bp, Homo sapien
cacaggtagtgccagcgtgggtaac

SEQ ID NO: 4441626 - DNA, 25 bp, Homo sapien
aaagcagctgcgttcaggctagcca

SEQ ID NO: 4441627 - DNA, 25 bp, Homo sapien
ctgctggccagcatgtctcatttcc

SEQ ID NO: 4441628 - DNA, 25 bp, Homo sapien
agagagtggtcaggacaggacaagc

SEQ ID NO: 4441629 - DNA, 25 bp, Homo sapien
gagtggtcaggacaggacaagcagt

SEQ ID NO: 4441630 - DNA, 25 bp, Homo sapien
tggtcaggacaggacaagcagtgac

SEQ ID NO: 4441631 - DNA, 25 bp, Homo sapien
gtcaggacaggacaagcagtgaccc

SEQ ID NO: 4441632 - DNA, 25 bp, Homo sapien
gccagcttccgggagaggaaattcc

SEQ ID NO: 4441633 - DNA, 25 bp, Homo sapien
gcacactgggtacagggcaccccag

SEQ ID NO: 4441634 - DNA, 25 bp, Homo sapien
gctgggtggccagcttccgggagag

SEQ ID NO: 4441635 - DNA, 25 bp, Homo sapien
agaggaaattccaactggcccaggg

SEQ ID NO: 4441636 - DNA, 25 bp, Homo sapien
agacctgacttagaaccgctgggag

SEQ ID NO: 4441637 - DNA, 25 bp, Homo sapien
agcctgtgcgcagacctgacttaga

SEQ ID NO: 4441638 - DNA, 25 bp, Homo sapien
caacaggtacccagccattagtgcg

SEQ ID NO: 4441639 - DNA, 25 bp, Homo sapien
aggtttggcgctctgagggcacgca

SEQ ID NO: 4441640 - DNA, 25 bp, Homo sapien
acaatcctctagcatcagcctctga

SEQ ID NO: 4441641 - DNA, 25 bp, Homo sapien
aattttaaaagccagggtctctctg

SEQ ID NO: 4441642 - DNA, 25 bp, Homo sapien
tggcctcatgcgatcttaccacttc

SEQ ID NO: 4441643 - DNA, 25 bp, Homo sapien
cacttccaccacctaaagtactggg

SEQ ID NO: 4441644 - DNA, 25 bp, Homo sapien
tagctctttcggatggctggctccg

SEQ ID NO: 4441645 - DNA, 25 bp, Homo sapien
ttgagaaggacggtgtcccggactc

SEQ ID NO: 4441646 - DNA, 25 bp, Homo sapien
cacataaggtgtggaggtctttcgt

SEQ ID NO: 4441647 - DNA, 25 bp, Homo sapien
ggactcggattgtctccccatgccg

SEQ ID NO: 4441648 - DNA, 25 bp, Homo sapien
gttcatccaacctcaatcctgcagg

SEQ ID NO: 4441649 - DNA, 25 bp, Homo sapien
ggcttgaactggcaacctgagttac

SEQ ID NO: 4441650 - DNA, 25 bp, Homo sapien
caacacagtggttatggcttgaact

SEQ ID NO: 4441651 - DNA, 25 bp, Homo sapien
tgccctggaggttcatccaacctca

SEQ ID NO: 4441652 - DNA, 25 bp, Homo sapien
tcaggtctgtaataccacaggaggc

SEQ ID NO: 4441653 - DNA, 25 bp, Homo sapien
tccctgtaagtgctcaggtctgtaa

SEQ ID NO: 4441654 - DNA, 25 bp, Homo sapien
tgtaagtgctcaggtctgtaatacc

SEQ ID NO: 4441655 - DNA, 25 bp, Homo sapien
gtgctcaggtctgtaataccacagg

SEQ ID NO: 4441656 - DNA, 25 bp, Homo sapien
caaaagtgaccaggtatgcagctcc

SEQ ID NO: 4441657 - DNA, 25 bp, Homo sapien
caagcgcagggatttgactacagcc

SEQ ID NO: 4441658 - DNA, 25 bp, Homo sapien
gaatagccaggtatctgctctagcc

SEQ ID NO: 4441659 - DNA, 25 bp, Homo sapien
ggcagtcacctcttttagcacacag

SEQ ID NO: 4441660 - DNA, 25 bp, Homo sapien
gatgtcgcgatgcaaacacttcatt

SEQ ID NO: 4441661 - DNA, 25 bp, Homo sapien
tgcagtactcggcaaaagtcagcac

SEQ ID NO: 4441662 - DNA, 25 bp, Homo sapien
actgttctggtcctgatgtcgcgat

SEQ ID NO: 4441663 - DNA, 25 bp, Homo sapien
ctcggcaaaagtcagcacatagcac

SEQ ID NO: 4441664 - DNA, 25 bp, Homo sapien
ttcacctcggcgcttggccatggca

SEQ ID NO: 4441665 - DNA, 25 bp, Homo sapien
ccgtggcggaagtcatagacatggc

SEQ ID NO: 4441666 - DNA, 25 bp, Homo sapien
ggtccgtgtcctctggcactgtgcg

SEQ ID NO: 4441667 - DNA, 25 bp, Homo sapien
tagacatggcggcaaaggaacacca

SEQ ID NO: 4441668 - DNA, 25 bp, Homo sapien
taggaaataaccaggctgctccagc

SEQ ID NO: 4441669 - DNA, 25 bp, Homo sapien
tttctgggaagccagacccgctggg

SEQ ID NO: 4441670 - DNA, 25 bp, Homo sapien
aactcatctactaagggacagggca

SEQ ID NO: 4441671 - DNA, 25 bp, Homo sapien
cacagaaggtaccttgggccaagct

SEQ ID NO: 4441672 - DNA, 25 bp, Homo sapien
ccgggctgcggcgccgaagcgggcg

SEQ ID NO: 4441673 - DNA, 25 bp, Homo sapien
acagccctggcgcgtgtaggggtgg

SEQ ID NO: 4441674 - DNA, 25 bp, Homo sapien
ggggacagccctggcgcgtgtaggg

SEQ ID NO: 4441675 - DNA, 25 bp, Homo sapien
tcccgggctgcggcgccgaagcggg

SEQ ID NO: 4441676 - DNA, 25 bp, Homo sapien
ggccgccagcggggtcagcgggcgg

SEQ ID NO: 4441677 - DNA, 25 bp, Homo sapien
ggggctcggcgccatttggggccgc

SEQ ID NO: 4441678 - DNA, 25 bp, Homo sapien
aggggctcggcgccatttggggccg

SEQ ID NO: 4441679 - DNA, 25 bp, Homo sapien
catagcgttgctggtactctcggat

SEQ ID NO: 4441680 - DNA, 25 bp, Homo sapien
aatgtgacatcgtcgcctgcagggc

SEQ ID NO: 4441681 - DNA, 25 bp, Homo sapien
tccaggatatacttaggcagcacat

SEQ ID NO: 4441682 - DNA, 25 bp, Homo sapien
ggatgccccgctcgatcatgagcag

SEQ ID NO: 4441683 - DNA, 25 bp, Homo sapien
aaaatggcagccagatataccagcc

SEQ ID NO: 4441684 - DNA, 25 bp, Homo sapien
tcattggcaaactggtgtctgcccc

SEQ ID NO: 4441685 - DNA, 25 bp, Homo sapien
gaccaagtggactgcataatcctgg

SEQ ID NO: 4441686 - DNA, 25 bp, Homo sapien
cagagtttctccgaatgacaggcag

SEQ ID NO: 4441687 - DNA, 25 bp, Homo sapien
cacagcgcgctggactgttaggtct

SEQ ID NO: 4441688 - DNA, 25 bp, Homo sapien
gaagtgagatcacatcgaatagtaa

SEQ ID NO: 4441689 - DNA, 25 bp, Homo sapien
agtgattttgttggaagctgcttac

SEQ ID NO: 4441690 - DNA, 25 bp, Homo sapien
ccctcttggccttggcgggagtgtt

SEQ ID NO: 4441691 - DNA, 25 bp, Homo sapien
gggaaacgcgaggccagaacagaaa

SEQ ID NO: 4441692 - DNA, 25 bp, Homo sapien
cgggaaacgcgaggccagaacagaa

SEQ ID NO: 4441693 - DNA, 25 bp, Homo sapien
ccgggaaacgcgaggccagaacaga

SEQ ID NO: 4441694 - DNA, 25 bp, Homo sapien
ggcagccagtctccgccctggaggc

SEQ ID NO: 4441695 - DNA, 25 bp, Homo sapien
cgcaggctctgcgccaaggggcggt

SEQ ID NO: 4441696 - DNA, 25 bp, Homo sapien
ccggctgcgcgaggtcggcgctggg

SEQ ID NO: 4441697 - DNA, 25 bp, Homo sapien
cggcagaaccggctgcgcgaggtcg

SEQ ID NO: 4441698 - DNA, 25 bp, Homo sapien
gagttgtgaaactgccttgctatgg

SEQ ID NO: 4441699 - DNA, 25 bp, Homo sapien
cgtctgcactctcagtgggaaagaa

SEQ ID NO: 4441700 - DNA, 25 bp, Homo sapien
tgttctggaaggacagtaaccactg

SEQ ID NO: 4441701 - DNA, 25 bp, Homo sapien
tgtttatccctagtgcatgagcagc

SEQ ID NO: 4441702 - DNA, 25 bp, Homo sapien
gaaagggccttcttgtacactagta

SEQ ID NO: 4441703 - DNA, 25 bp, Homo sapien
gaagtttcccattcgcttgtggaca

SEQ ID NO: 4441704 - DNA, 25 bp, Homo sapien
gactgaccgtgcaagtgttagccaa

SEQ ID NO: 4441705 - DNA, 25 bp, Homo sapien
ggctccacgcaagctccagggttaa

SEQ ID NO: 4441706 - DNA, 25 bp, Homo sapien
tatatgcactgcgggaagagagtac

SEQ ID NO: 4441707 - DNA, 25 bp, Homo sapien
gtatatgcactgcgggaagagagta

SEQ ID NO: 4441708 - DNA, 25 bp, Homo sapien
gtgggtaacttaacacagcagcacc

SEQ ID NO: 4441709 - DNA, 25 bp, Homo sapien
taaaagtggtcagcattactgaagc

SEQ ID NO: 4441710 - DNA, 25 bp, Homo sapien
gggaccgcagaccttgtagtcataa

SEQ ID NO: 4441711 - DNA, 25 bp, Homo sapien
tcttttatacaggagtacagtcccc

SEQ ID NO: 4441712 - DNA, 25 bp, Homo sapien
actgtctcggatgaagtgactgacc

SEQ ID NO: 4441713 - DNA, 25 bp, Homo sapien
agtgcacactggatcaaaatgctgc

SEQ ID NO: 4441714 - DNA, 25 bp, Homo sapien
tgtagtaagtatacggactccaggg

SEQ ID NO: 4441715 - DNA, 25 bp, Homo sapien
gaagtctgctccttgaatccaagcc

SEQ ID NO: 4441716 - DNA, 25 bp, Homo sapien
cagctgtctcgggtccagagcgagc

SEQ ID NO: 4441717 - DNA, 25 bp, Homo sapien
ctgtctcgggtccagagcgagcagc

SEQ ID NO: 4441718 - DNA, 25 bp, Homo sapien
ccgagcagctgtctcgggtccagag

SEQ ID NO: 4441719 - DNA, 25 bp, Homo sapien
ccagagcgagcagcgtggagctcag

SEQ ID NO: 4441720 - DNA, 25 bp, Homo sapien
gcacagaggaggtccagtatctgat

SEQ ID NO: 4441721 - DNA, 25 bp, Homo sapien
gaacatttcaagaggtggctccagc

SEQ ID NO: 4441722 - DNA, 25 bp, Homo sapien
tgccctttcatagcaccttggaaca

SEQ ID NO: 4441723 - DNA, 25 bp, Homo sapien
tggctccagccagataaagtagccg

SEQ ID NO: 4441724 - DNA, 25 bp, Homo sapien
aagggccagttgagtagaagtgaca

SEQ ID NO: 4441725 - DNA, 25 bp, Homo sapien
tagccactcaatgaatttacgcaga

SEQ ID NO: 4441726 - DNA, 25 bp, Homo sapien
cactgtgtgatagcactgtgcttgg

SEQ ID NO: 4441727 - DNA, 25 bp, Homo sapien
gaatttttgtcagattgtagccact

SEQ ID NO: 4441728 - DNA, 25 bp, Homo sapien
tctgatgagaggtaatcgattcccc

SEQ ID NO: 4441729 - DNA, 25 bp, Homo sapien
aatactgcagctacgtgttggtcac

SEQ ID NO: 4441730 - DNA, 25 bp, Homo sapien
aaggacatgcttcgaactctggccc

SEQ ID NO: 4441731 - DNA, 25 bp, Homo sapien
tggcccaagccaagaaggaatgctg

SEQ ID NO: 4441732 - DNA, 25 bp, Homo sapien
aaaggtctcttattgagttctcatc

SEQ ID NO: 4441733 - DNA, 25 bp, Homo sapien
taatatctaatgaaccgttggatct

SEQ ID NO: 4441734 - DNA, 25 bp, Homo sapien
tagactccaacatctaggccacaag

SEQ ID NO: 4441735 - DNA, 25 bp, Homo sapien
aaaccacttcatgttactgtaacaa

SEQ ID NO: 4441736 - DNA, 25 bp, Homo sapien
aaccacgctgcccccactccactcc

SEQ ID NO: 4441737 - DNA, 25 bp, Homo sapien
ccacgctgcccccactccactccca

SEQ ID NO: 4441738 - DNA, 25 bp, Homo sapien
acgctgcccccactccactcccagg

SEQ ID NO: 4441739 - DNA, 25 bp, Homo sapien
ctgcccccactccactcccagggtc

SEQ ID NO: 4441740 - DNA, 25 bp, Homo sapien
tcctggtaaagctagggcgcctaag

SEQ ID NO: 4441741 - DNA, 25 bp, Homo sapien
cgccactccaagtcctggtaaagct

SEQ ID NO: 4441742 - DNA, 25 bp, Homo sapien
agaaccctgagccatccgcggcggt

SEQ ID NO: 4441743 - DNA, 25 bp, Homo sapien
gcctaaggtcgtagcgccaatgtcc

SEQ ID NO: 4441744 - DNA, 25 bp, Homo sapien
gccaccagcgtcaccgttttgctga

SEQ ID NO: 4441745 - DNA, 25 bp, Homo sapien
ttgctgatgcgaagccctcagcccg

SEQ ID NO: 4441746 - DNA, 25 bp, Homo sapien
gggggacagctcaaccttcgcgtcg

SEQ ID NO: 4441747 - DNA, 25 bp, Homo sapien
caacctgggtagacactgtttctgc

SEQ ID NO: 4441748 - DNA, 25 bp, Homo sapien
gcaggccgccctcgaagtaataact

SEQ ID NO: 4441749 - DNA, 25 bp, Homo sapien
gaagtcaaagtaatagggccgcacc

SEQ ID NO: 4441750 - DNA, 25 bp, Homo sapien
tcggaactcggtactgaagacgtgc

SEQ ID NO: 4441751 - DNA, 25 bp, Homo sapien
cttctcgttgagttgcaggcggccc

SEQ ID NO: 4441752 - DNA, 25 bp, Homo sapien
tacctatgctttactaagactaaaa

SEQ ID NO: 4441753 - DNA, 25 bp, Homo sapien
tttcctcgcccgcttctggccagcc

SEQ ID NO: 4441754 - DNA, 25 bp, Homo sapien
cctcgcccgcttctggccagcccca

SEQ ID NO: 4441755 - DNA, 25 bp, Homo sapien
cagtacctatgctttactaagacta

SEQ ID NO: 4441756 - DNA, 25 bp, Homo sapien
aatgtttaactttgtgcccagcaca

SEQ ID NO: 4441757 - DNA, 25 bp, Homo sapien
tgttccaaatgaaagcgagaacgct

SEQ ID NO: 4441758 - DNA, 25 bp, Homo sapien
aaagtgatcagtgcccttgccacaa

SEQ ID NO: 4441759 - DNA, 25 bp, Homo sapien
cagagatctacaacgcagggtaaag

SEQ ID NO: 4441760 - DNA, 25 bp, Homo sapien
taagcacccctgaggtaaggcggtc

SEQ ID NO: 4441761 - DNA, 25 bp, Homo sapien
gaggaaggcttgtctacaaccacca

SEQ ID NO: 4441762 - DNA, 25 bp, Homo sapien
taactgtgttgtgtcggaagcggcc

SEQ ID NO: 4441763 - DNA, 25 bp, Homo sapien
gcctgtgcactgtgttccgcaagaa

SEQ ID NO: 4441764 - DNA, 25 bp, Homo sapien
gacacagagcattcgtgagcccaag

SEQ ID NO: 4441765 - DNA, 25 bp, Homo sapien
ttcgtgagcccaagaagtggcctgt

SEQ ID NO: 4441766 - DNA, 25 bp, Homo sapien
cctgtaggagacaaaagcctgactc

SEQ ID NO: 4441767 - DNA, 25 bp, Homo sapien
caagaagtggcctgtaggagacaaa

SEQ ID NO: 4441768 - DNA, 25 bp, Homo sapien
tgaaaagtactcaaagcctggccct

SEQ ID NO: 4441769 - DNA, 25 bp, Homo sapien
gactcgaatctggtgtgtgcggcct

SEQ ID NO: 4441770 - DNA, 25 bp, Homo sapien
ggtgctctgctaccaggtcccgtag

SEQ ID NO: 4441771 - DNA, 25 bp, Homo sapien
gatgggttctttacaggtcacttcc

SEQ ID NO: 4441772 - DNA, 25 bp, Homo sapien
tatagaaaccccaagtactagccca

SEQ ID NO: 4441773 - DNA, 25 bp, Homo sapien
tgtcacaacccaagaagcaatccct

SEQ ID NO: 4441774 - DNA, 25 bp, Homo sapien
ccaaattcccactggaaggaggtag

SEQ ID NO: 4441775 - DNA, 25 bp, Homo sapien
atgagcaggtctctttagaagcccg

SEQ ID NO: 4441776 - DNA, 25 bp, Homo sapien
ccaactaaaaactggtcacattcca

SEQ ID NO: 4441777 - DNA, 25 bp, Homo sapien
caactaaaaactggtcacattccat

SEQ ID NO: 4441778 - DNA, 25 bp, Homo sapien
attaggttctcccactggagaacca

SEQ ID NO: 4441779 - DNA, 25 bp, Homo sapien
cattaggttctcccactggagaacc

SEQ ID NO: 4441780 - DNA, 25 bp, Homo sapien
ttaggttctcccactggagaaccat

SEQ ID NO: 4441781 - DNA, 25 bp, Homo sapien
tggagtgttaggcaatgcgtcttca

SEQ ID NO: 4441782 - DNA, 25 bp, Homo sapien
taggcaatgcgtcttcattatctgg

SEQ ID NO: 4441783 - DNA, 25 bp, Homo sapien
tattccagctcttttactattggag

SEQ ID NO: 4441784 - DNA, 25 bp, Homo sapien
tcttttactattggagtgttaggca

SEQ ID NO: 4441785 - DNA, 25 bp, Homo sapien
cagctttatctctttttcgaccgaa

SEQ ID NO: 4441786 - DNA, 25 bp, Homo sapien
ggagcggccatcttctttcgattgc

SEQ ID NO: 4441787 - DNA, 25 bp, Homo sapien
cccagactccgtgccaattttattt

SEQ ID NO: 4441788 - DNA, 25 bp, Homo sapien
ggagacctcccccacaatcgtggga

SEQ ID NO: 4441789 - DNA, 25 bp, Homo sapien
cagaccaaccctatttctaagactc

SEQ ID NO: 4441790 - DNA, 25 bp, Homo sapien
aaagcggctctacgcgtcggctccg

SEQ ID NO: 4441791 - DNA, 25 bp, Homo sapien
cagtgaagtattcaaatctaaccgc

SEQ ID NO: 4441792 - DNA, 25 bp, Homo sapien
tctaaccgcctaggtgatgcgcacg

SEQ ID NO: 4441793 - DNA, 25 bp, Homo sapien
cttagagcggaaacagacagccgcc

SEQ ID NO: 4441794 - DNA, 25 bp, Homo sapien
tagagcggaaacagacagccgcctc

SEQ ID NO: 4441795 - DNA, 25 bp, Homo sapien
agcagtccgctcacaacgcccggct

SEQ ID NO: 4441796 - DNA, 25 bp, Homo sapien
agccgcctctagcagtccgctcaca

SEQ ID NO: 4441797 - DNA, 25 bp, Homo sapien
cgcggcaaacctcctcgacaaattt

SEQ ID NO: 4441798 - DNA, 25 bp, Homo sapien
aaacctcctcgacaaattttgcgca

SEQ ID NO: 4441799 - DNA, 25 bp, Homo sapien
ttggggtccacacgctctgagtttc

SEQ ID NO: 4441800 - DNA, 25 bp, Homo sapien
acaaattttgcgcagacttgtttgg

SEQ ID NO: 4441801 - DNA, 25 bp, Homo sapien
gaagcccagaacgaaagagtcattc

SEQ ID NO: 4441802 - DNA, 25 bp, Homo sapien
tgaagcccagaacgaaagagtcatt

SEQ ID NO: 4441803 - DNA, 25 bp, Homo sapien
aagcccagaacgaaagagtcattct

SEQ ID NO: 4441804 - DNA, 25 bp, Homo sapien
agcccagaacgaaagagtcattctc

SEQ ID NO: 4441805 - DNA, 25 bp, Homo sapien
cagggcgcccagacaaaacccgaag

SEQ ID NO: 4441806 - DNA, 25 bp, Homo sapien
tcagggcgcccagacaaaacccgaa

SEQ ID NO: 4441807 - DNA, 25 bp, Homo sapien
cttcagggcgcccagacaaaacccg

SEQ ID NO: 4441808 - DNA, 25 bp, Homo sapien
ttcagggcgcccagacaaaacccga

SEQ ID NO: 4441809 - DNA, 25 bp, Homo sapien
gccaggctgagggagcgtaccctac

SEQ ID NO: 4441810 - DNA, 25 bp, Homo sapien
aagagagcgacggacaagcaacccg

SEQ ID NO: 4441811 - DNA, 25 bp, Homo sapien
agtccgcgagccctgacagaggacg

SEQ ID NO: 4441812 - DNA, 25 bp, Homo sapien
aaaagggcacagtgtgcccggcccg

SEQ ID NO: 4441813 - DNA, 25 bp, Homo sapien
ttcattagcctctgaagacacccca

SEQ ID NO: 4441814 - DNA, 25 bp, Homo sapien
ttcttcattagcctctgaagacacc

SEQ ID NO: 4441815 - DNA, 25 bp, Homo sapien
attagcctctgaagacaccccatcc

SEQ ID NO: 4441816 - DNA, 25 bp, Homo sapien
tagcctctgaagacaccccatccat

SEQ ID NO: 4441817 - DNA, 25 bp, Homo sapien
tctcaagttactgggcctaagcctc

SEQ ID NO: 4441818 - DNA, 25 bp, Homo sapien
atggcaaggaaagctatgagtctgt

SEQ ID NO: 4441819 - DNA, 25 bp, Homo sapien
tggcaatggcaaggaaagctatgag

SEQ ID NO: 4441820 - DNA, 25 bp, Homo sapien
ttatggcaatggcaaggaaagctat

SEQ ID NO: 4441821 - DNA, 25 bp, Homo sapien
gaagaatgccgtcttctaacaggtc

SEQ ID NO: 4441822 - DNA, 25 bp, Homo sapien
tgaagaatgccgtcttctaacaggt

SEQ ID NO: 4441823 - DNA, 25 bp, Homo sapien
agaatgccgtcttctaacaggtctc

SEQ ID NO: 4441824 - DNA, 25 bp, Homo sapien
aatgccgtcttctaacaggtctctc

SEQ ID NO: 4441825 - DNA, 25 bp, Homo sapien
acctctgaggtcctgaagaggactc

SEQ ID NO: 4441826 - DNA, 25 bp, Homo sapien
tttcattcccacctctgaggtcctg

SEQ ID NO: 4441827 - DNA, 25 bp, Homo sapien
attcccacctctgaggtcctgaaga

SEQ ID NO: 4441828 - DNA, 25 bp, Homo sapien
ctctgaggtcctgaagaggactcct

SEQ ID NO: 4441829 - DNA, 25 bp, Homo sapien
aagctgactcgacgagagtttttct

SEQ ID NO: 4441830 - DNA, 25 bp, Homo sapien
gcaaagctgactcgacgagagtttt

SEQ ID NO: 4441831 - DNA, 25 bp, Homo sapien
tgactcgacgagagtttttcttatt

SEQ ID NO: 4441832 - DNA, 25 bp, Homo sapien
ctgcaaagctgactcgacgagagtt

SEQ ID NO: 4441833 - DNA, 25 bp, Homo sapien
actattttcatatgagactccgtct

SEQ ID NO: 4441834 - DNA, 25 bp, Homo sapien
ctattttcatatgagactccgtctg

SEQ ID NO: 4441835 - DNA, 25 bp, Homo sapien
tattttcatatgagactccgtctgg

SEQ ID NO: 4441836 - DNA, 25 bp, Homo sapien
aacccaggaggcagaagttgcagct

SEQ ID NO: 4441837 - DNA, 25 bp, Homo sapien
cttaaacccaggaggcagaagttgc

SEQ ID NO: 4441838 - DNA, 25 bp, Homo sapien
taaacccaggaggcagaagttgcag

SEQ ID NO: 4441839 - DNA, 25 bp, Homo sapien
cagaagttgcagctgagatggcacc

SEQ ID NO: 4441840 - DNA, 25 bp, Homo sapien
tgtatcaaaagaagattttctcctg

SEQ ID NO: 4441841 - DNA, 25 bp, Homo sapien
tatcaaaagaagattttctcctgtt

SEQ ID NO: 4441842 - DNA, 25 bp, Homo sapien
gtatcaaaagaagattttctcctgt

SEQ ID NO: 4441843 - DNA, 25 bp, Homo sapien
atcaaaagaagattttctcctgttt

SEQ ID NO: 4441844 - DNA, 25 bp, Homo sapien
ttcacagtaattatcttctaatttc

SEQ ID NO: 4441845 - DNA, 25 bp, Homo sapien
cagtaatttcacagtaattatcttc

SEQ ID NO: 4441846 - DNA, 25 bp, Homo sapien
aatttcacagtaattatcttctaat

SEQ ID NO: 4441847 - DNA, 25 bp, Homo sapien
gtaatttcacagtaattatcttcta

SEQ ID NO: 4441848 - DNA, 25 bp, Homo sapien
tgccagagagggttccatttaagcc

SEQ ID NO: 4441849 - DNA, 25 bp, Homo sapien
gctacttgaagtatggtgccagact

SEQ ID NO: 4441850 - DNA, 25 bp, Homo sapien
actggacactttggatagcactgaa

SEQ ID NO: 4441851 - DNA, 25 bp, Homo sapien
cataacgagataaggagctggcggc

SEQ ID NO: 4441852 - DNA, 25 bp, Homo sapien
gactctcagagatggtagttcaggc

SEQ ID NO: 4441853 - DNA, 25 bp, Homo sapien
aaggaggagtatctcccaccgcctg

SEQ ID NO: 4441854 - DNA, 25 bp, Homo sapien
caacaaatgttggttcagaacctat

SEQ ID NO: 4441855 - DNA, 25 bp, Homo sapien
caaacaaacgaacacacctcaaatg

SEQ ID NO: 4441856 - DNA, 25 bp, Homo sapien
ttgcatctgggtatgaatgggagca

SEQ ID NO: 4441857 - DNA, 25 bp, Homo sapien
ggtatgaatgggagcagaaagcaat

SEQ ID NO: 4441858 - DNA, 25 bp, Homo sapien
ccttctgttgcatctgggtatgaat

SEQ ID NO: 4441859 - DNA, 25 bp, Homo sapien
ctccttctgttgcatctgggtatga

SEQ ID NO: 4441860 - DNA, 25 bp, Homo sapien
tttatcaggcacatcaggaaaagca

SEQ ID NO: 4441861 - DNA, 25 bp, Homo sapien
cattcttgagtcctcggtgtgaagc

SEQ ID NO: 4441862 - DNA, 25 bp, Homo sapien
gaagaggcactgttcggttccttgg

SEQ ID NO: 4441863 - DNA, 25 bp, Homo sapien
gaagaagtgttttgatccacggaaa

SEQ ID NO: 4441864 - DNA, 25 bp, Homo sapien
aaagtcattgccataaattgtaata

SEQ ID NO: 4441865 - DNA, 25 bp, Homo sapien
gttgcaggtaagatctgcaaagtgt

SEQ ID NO: 4441866 - DNA, 25 bp, Homo sapien
gtggttaaatgtcaagtccataaag

SEQ ID NO: 4441867 - DNA, 25 bp, Homo sapien
tgcaggtaagatctgcaaagtgtgg

SEQ ID NO: 4441868 - DNA, 25 bp, Homo sapien
tgttacatccatggcattctgagtt

SEQ ID NO: 4441869 - DNA, 25 bp, Homo sapien
ctgttgttacatccatggcattctg

SEQ ID NO: 4441870 - DNA, 25 bp, Homo sapien
tacatccatggcattctgagtttga

SEQ ID NO: 4441871 - DNA, 25 bp, Homo sapien
ccatggcattctgagtttgattttc

SEQ ID NO: 4441872 - DNA, 25 bp, Homo sapien
gagacatttggtcatttccatggca

SEQ ID NO: 4441873 - DNA, 25 bp, Homo sapien
gggtcatggctaatattctggcatc

SEQ ID NO: 4441874 - DNA, 25 bp, Homo sapien
tgtatgactcttggtaatgtccatg

SEQ ID NO: 4441875 - DNA, 25 bp, Homo sapien
tgtgagagaagacatagcatctgga

SEQ ID NO: 4441876 - DNA, 25 bp, Homo sapien
ttctttttcgggtgttggtgcagct

SEQ ID NO: 4441877 - DNA, 25 bp, Homo sapien
gacaggctctgctgtattctttcct

SEQ ID NO: 4441878 - DNA, 25 bp, Homo sapien
cagctgctatttgcacatttgattg

SEQ ID NO: 4441879 - DNA, 25 bp, Homo sapien
tcccatcttctgatgtggtcataag

SEQ ID NO: 4441880 - DNA, 25 bp, Homo sapien
tgacttcctaagttacttgtgtgac

SEQ ID NO: 4441881 - DNA, 25 bp, Homo sapien
tatgtctgatcgctgaaatggttca

SEQ ID NO: 4441882 - DNA, 25 bp, Homo sapien
gattcactggtactctccggtgcta

SEQ ID NO: 4441883 - DNA, 25 bp, Homo sapien
tatcaagaactccaccacagtagac

SEQ ID NO: 4441884 - DNA, 25 bp, Homo sapien
tcatcttgtcatggcaatagtcagg

SEQ ID NO: 4441885 - DNA, 25 bp, Homo sapien
caatgacgacagtgtggctctttgt

SEQ ID NO: 4441886 - DNA, 25 bp, Homo sapien
tctttgttagatccatattttgctc

SEQ ID NO: 4441887 - DNA, 25 bp, Homo sapien
cagtgtggctctttgttagatccat

SEQ ID NO: 4441888 - DNA, 25 bp, Homo sapien
cgacagtgtggctctttgttagatc

SEQ ID NO: 4441889 - DNA, 25 bp, Homo sapien
tattattagaccattcctccagagg

SEQ ID NO: 4441890 - DNA, 25 bp, Homo sapien
tgttatcagctacctctacagggcc

SEQ ID NO: 4441891 - DNA, 25 bp, Homo sapien
caatggcaccaaatgacaatcacgt

SEQ ID NO: 4441892 - DNA, 25 bp, Homo sapien
cacatatgggtgcagaggaattttc

SEQ ID NO: 4441893 - DNA, 25 bp, Homo sapien
ctctttttggtatgtctcaatcaag

SEQ ID NO: 4441894 - DNA, 25 bp, Homo sapien
ttatgaatatcttcttcttcttgta

SEQ ID NO: 4441895 - DNA, 25 bp, Homo sapien
atgaatatcttcttcttcttgtacc

SEQ ID NO: 4441896 - DNA, 25 bp, Homo sapien
gaatatcttcttcttcttgtaccca

SEQ ID NO: 4441897 - DNA, 25 bp, Homo sapien
atatcttcttcttcttgtacccacg

SEQ ID NO: 4441898 - DNA, 25 bp, Homo sapien
tgtgtcgtatcactaaacttaatct

SEQ ID NO: 4441899 - DNA, 25 bp, Homo sapien
ctcccgatcttgtgtcgtatcacta

SEQ ID NO: 4441900 - DNA, 25 bp, Homo sapien
tgtcgtatcactaaacttaatctca

SEQ ID NO: 4441901 - DNA, 25 bp, Homo sapien
cgatcttgtgtcgtatcactaaact

SEQ ID NO: 4441902 - DNA, 25 bp, Homo sapien
attattttctgcctacccgagacta

SEQ ID NO: 4441903 - DNA, 25 bp, Homo sapien
tgcctacccgagactaagattaaaa

SEQ ID NO: 4441904 - DNA, 25 bp, Homo sapien
attttctgcctacccgagactaaga

SEQ ID NO: 4441905 - DNA, 25 bp, Homo sapien
ttctgcctacccgagactaagatta

SEQ ID NO: 4441906 - DNA, 25 bp, Homo sapien
taacaacactgaagatgacttttca

SEQ ID NO: 4441907 - DNA, 25 bp, Homo sapien
ttgacaaatcactagaggtgacagt

SEQ ID NO: 4441908 - DNA, 25 bp, Homo sapien
gctttgaagtctagctgttagtcaa

SEQ ID NO: 4441909 - DNA, 25 bp, Homo sapien
gctatatataacctccctagagatt

SEQ ID NO: 4441910 - DNA, 25 bp, Homo sapien
ggttttttatcaatacactgttagc

SEQ ID NO: 4441911 - DNA, 25 bp, Homo sapien
gctgctgcaactagatggggtcctg

SEQ ID NO: 4441912 - DNA, 25 bp, Homo sapien
tatctatatcctcttcagtatggtg

SEQ ID NO: 4441913 - DNA, 25 bp, Homo sapien
cccatcagccttgattgaatccaga

SEQ ID NO: 4441914 - DNA, 25 bp, Homo sapien
tatttagccttcatgaagctcttac

SEQ ID NO: 4441915 - DNA, 25 bp, Homo sapien
ttatttagccttcatgaagctctta

SEQ ID NO: 4441916 - DNA, 25 bp, Homo sapien
aagctctcttcacaaatagtatctc

SEQ ID NO: 4441917 - DNA, 25 bp, Homo sapien
gattccatttgactactgcggtaag

SEQ ID NO: 4441918 - DNA, 25 bp, Homo sapien
tgattccatttgactactgcggtaa

SEQ ID NO: 4441919 - DNA, 25 bp, Homo sapien
tgtgattccatttgactactgcggt

SEQ ID NO: 4441920 - DNA, 25 bp, Homo sapien
attgcctgggagattgctctgtcgg

SEQ ID NO: 4441921 - DNA, 25 bp, Homo sapien
tattgttattctcccatcttggagt

SEQ ID NO: 4441922 - DNA, 25 bp, Homo sapien
gtggacctggagaagtataaagaac

SEQ ID NO: 4441923 - DNA, 25 bp, Homo sapien
gctctgtcggggtttctgtatcaag

SEQ ID NO: 4441924 - DNA, 25 bp, Homo sapien
tgataggtttgttcccagatatatt

SEQ ID NO: 4441925 - DNA, 25 bp, Homo sapien
catataatccatctctttggccttt

SEQ ID NO: 4441926 - DNA, 25 bp, Homo sapien
attttcctatcactacccctcctga

SEQ ID NO: 4441927 - DNA, 25 bp, Homo sapien
tcattttccatggtccacatataat

SEQ ID NO: 4441928 - DNA, 25 bp, Homo sapien
ggtgtcacgtcagcactcaaacatt

SEQ ID NO: 4441929 - DNA, 25 bp, Homo sapien
tatcttatactcatagcctgacagt

SEQ ID NO: 4441930 - DNA, 25 bp, Homo sapien
tggccacccatgtggactatctgtg

SEQ ID NO: 4441931 - DNA, 25 bp, Homo sapien
taacagcaacccattacatgaggtc

SEQ ID NO: 4441932 - DNA, 25 bp, Homo sapien
tggagtaggtggtgtgtttacagta

SEQ ID NO: 4441933 - DNA, 25 bp, Homo sapien
ggagtaggtggtgtgtttacagtaa

SEQ ID NO: 4441934 - DNA, 25 bp, Homo sapien
ctggagtaggtggtgtgtttacagt

SEQ ID NO: 4441935 - DNA, 25 bp, Homo sapien
gagtaggtggtgtgtttacagtaaa

SEQ ID NO: 4441936 - DNA, 25 bp, Homo sapien
ttttggcgacgagcctcacaatctt

SEQ ID NO: 4441937 - DNA, 25 bp, Homo sapien
cttcaatcttttggcgacgagcctc

SEQ ID NO: 4441938 - DNA, 25 bp, Homo sapien
taaatctgtatcttgggtcggtaaa

SEQ ID NO: 4441939 - DNA, 25 bp, Homo sapien
acatattgacttaacatcaggtctt

SEQ ID NO: 4441940 - DNA, 25 bp, Homo sapien
caacagcttatcttggttcgatgca

SEQ ID NO: 4441941 - DNA, 25 bp, Homo sapien
cttggttcgatgcagaaagctttaa

SEQ ID NO: 4441942 - DNA, 25 bp, Homo sapien
cttatttatatcaaccaacagctta

SEQ ID NO: 4441943 - DNA, 25 bp, Homo sapien
cagcttatcttggttcgatgcagaa

SEQ ID NO: 4441944 - DNA, 25 bp, Homo sapien
gagctgactgcaccagcttgccata

SEQ ID NO: 4441945 - DNA, 25 bp, Homo sapien
gagtgaagactttagtcatcttggt

SEQ ID NO: 4441946 - DNA, 25 bp, Homo sapien
gactgcaccagcttgccatacagag

SEQ ID NO: 4441947 - DNA, 25 bp, Homo sapien
gaagactttagtcatcttggtaaaa

SEQ ID NO: 4441948 - DNA, 25 bp, Homo sapien
tgaaggtcaaagctttaggttggaa

SEQ ID NO: 4441949 - DNA, 25 bp, Homo sapien
gcatattgacataaaactaattctg

SEQ ID NO: 4441950 - DNA, 25 bp, Homo sapien
gcatttctataggtgttccatggaa

SEQ ID NO: 4441951 - DNA, 25 bp, Homo sapien
ataagttttagccaaaagaactctg

SEQ ID NO: 4441952 - DNA, 25 bp, Homo sapien
ttatttgaagtttctccctctcatt

SEQ ID NO: 4441953 - DNA, 25 bp, Homo sapien
tctttatttgaagtttctccctctc

SEQ ID NO: 4441954 - DNA, 25 bp, Homo sapien
tctatctttatttgaagtttctccc

SEQ ID NO: 4441955 - DNA, 25 bp, Homo sapien
ctcatctatctttatttgaagtttc

SEQ ID NO: 4441956 - DNA, 25 bp, Homo sapien
ccatctcagtgaggcagttatcgat

SEQ ID NO: 4441957 - DNA, 25 bp, Homo sapien
tcagtgaggcagttatcgatcttct

SEQ ID NO: 4441958 - DNA, 25 bp, Homo sapien
tgtttccatctcagtgaggcagtta

SEQ ID NO: 4441959 - DNA, 25 bp, Homo sapien
ggcagttatcgatcttcttaagtat

SEQ ID NO: 4441960 - DNA, 25 bp, Homo sapien
tcagtgcaaaaaacatgtactaggc

SEQ ID NO: 4441961 - DNA, 25 bp, Homo sapien
tagtcctagggactctgaaggagat

SEQ ID NO: 4441962 - DNA, 25 bp, Homo sapien
tgtactaggcacttactctgtatga

SEQ ID NO: 4441963 - DNA, 25 bp, Homo sapien
catgtactcatggtcaattcagtgc

SEQ ID NO: 4441964 - DNA, 25 bp, Homo sapien
ctttttctgcagctctcatttcaga

SEQ ID NO: 4441965 - DNA, 25 bp, Homo sapien
gcagctctcatttcagaatcccatt

SEQ ID NO: 4441966 - DNA, 25 bp, Homo sapien
cccattcttccacaggattgttttt

SEQ ID NO: 4441967 - DNA, 25 bp, Homo sapien
tcttcatcctccaaattcttagttt

SEQ ID NO: 4441968 - DNA, 25 bp, Homo sapien
tcttcagttttcagctgttccaatt

SEQ ID NO: 4441969 - DNA, 25 bp, Homo sapien
cttcttcagttttcagctgttccaa

SEQ ID NO: 4441970 - DNA, 25 bp, Homo sapien
ctttgaagctcctcttcttcagttt

SEQ ID NO: 4441971 - DNA, 25 bp, Homo sapien
ctcttcttcagttttcagctgttcc

SEQ ID NO: 4441972 - DNA, 25 bp, Homo sapien
gtttttgcataaagtctatttgagc

SEQ ID NO: 4441973 - DNA, 25 bp, Homo sapien
tttgagcaagggtctgctctttttg

SEQ ID NO: 4441974 - DNA, 25 bp, Homo sapien
aaagtctatttgagcaagggtctgc

SEQ ID NO: 4441975 - DNA, 25 bp, Homo sapien
tcaactgatccagtagctcttcagt

SEQ ID NO: 4441976 - DNA, 25 bp, Homo sapien
tgatcatcactccactcaacgacat

SEQ ID NO: 4441977 - DNA, 25 bp, Homo sapien
gatggtgagttgtatcgtgtcataa

SEQ ID NO: 4441978 - DNA, 25 bp, Homo sapien
aaaggtgaatacagcttgatcatca

SEQ ID NO: 4441979 - DNA, 25 bp, Homo sapien
tgtatcgtgtcataaacaaaggtga

SEQ ID NO: 4441980 - DNA, 25 bp, Homo sapien
tgtatctagtaaaggctcccctgag

SEQ ID NO: 4441981 - DNA, 25 bp, Homo sapien
gctatatttgttaaggcctcctctt

SEQ ID NO: 4441982 - DNA, 25 bp, Homo sapien
gaagttgaagggttatccttgaatc

SEQ ID NO: 4441983 - DNA, 25 bp, Homo sapien
gagactgttcaactacattgattgg

SEQ ID NO: 4441984 - DNA, 25 bp, Homo sapien
catctaacagagattgaaaattgac

SEQ ID NO: 4441985 - DNA, 25 bp, Homo sapien
caacaatcttcctataacgcttgtc

SEQ ID NO: 4441986 - DNA, 25 bp, Homo sapien
tgaaaattgacatcaacaatcttcc

SEQ ID NO: 4441987 - DNA, 25 bp, Homo sapien
tcctataacgcttgtccaggaaagg

SEQ ID NO: 4441988 - DNA, 25 bp, Homo sapien
tcttcaacgtactggaaaataagct

SEQ ID NO: 4441989 - DNA, 25 bp, Homo sapien
tgggtaactgatgctgggttgtaca

SEQ ID NO: 4441990 - DNA, 25 bp, Homo sapien
ataagcttatgaactaaaagggagg

SEQ ID NO: 4441991 - DNA, 25 bp, Homo sapien
gatgctgggttgtacatgtcttctt

SEQ ID NO: 4441992 - DNA, 25 bp, Homo sapien
aaaatccagtgaaattatgaaaaca

SEQ ID NO: 4441993 - DNA, 25 bp, Homo sapien
ccagtgaaattatgaaaacatttca

SEQ ID NO: 4441994 - DNA, 25 bp, Homo sapien
gtgaaattatgaaaacatttcaatg

SEQ ID NO: 4441995 - DNA, 25 bp, Homo sapien
gaaaaaaaatccagtgaaattatga

SEQ ID NO: 4441996 - DNA, 25 bp, Homo sapien
taaatactcaatctcctctccaagg

SEQ ID NO: 4441997 - DNA, 25 bp, Homo sapien
tgttcattaggttataatttggtcc

SEQ ID NO: 4441998 - DNA, 25 bp, Homo sapien
taggttataatttggtccccatctc

SEQ ID NO: 4441999 - DNA, 25 bp, Homo sapien
gcaatggtgcactaccagtgagaat

SEQ ID NO: 4442000 - DNA, 25 bp, Homo sapien
ttgcaaatgctgcggagctagagaa

SEQ ID NO: 4442001 - DNA, 25 bp, Homo sapien
aatgctgcggagctagagaataaaa

SEQ ID NO: 4442002 - DNA, 25 bp, Homo sapien
gcaaatgctgcggagctagagaata

SEQ ID NO: 4442003 - DNA, 25 bp, Homo sapien
caaatgctgcggagctagagaataa

SEQ ID NO: 4442004 - DNA, 25 bp, Homo sapien
caacgtgattctgaatggtggaagg

SEQ ID NO: 4442005 - DNA, 25 bp, Homo sapien
tcccaacgtgattctgaatggtgga

SEQ ID NO: 4442006 - DNA, 25 bp, Homo sapien
cccaacgtgattctgaatggtggaa

SEQ ID NO: 4442007 - DNA, 25 bp, Homo sapien
cgtgattctgaatggtggaaggtaa

SEQ ID NO: 4442008 - DNA, 25 bp, Homo sapien
tagaatggtagcaatatcatcttgg

SEQ ID NO: 4442009 - DNA, 25 bp, Homo sapien
ctttagatagaatggtagcaatatc

SEQ ID NO: 4442010 - DNA, 25 bp, Homo sapien
tagatagaatggtagcaatatcatc

SEQ ID NO: 4442011 - DNA, 25 bp, Homo sapien
gatagaatggtagcaatatcatctt

SEQ ID NO: 4442012 - DNA, 25 bp, Homo sapien
tggtaaatttgcttgactacattct

SEQ ID NO: 4442013 - DNA, 25 bp, Homo sapien
ctagtggtagaaatggcagtcctga

SEQ ID NO: 4442014 - DNA, 25 bp, Homo sapien
ctgaaacagatcttggtaaatttgc

SEQ ID NO: 4442015 - DNA, 25 bp, Homo sapien
ggtagaaatggcagtcctgaaacag

SEQ ID NO: 4442016 - DNA, 25 bp, Homo sapien
tatgaggcctaccatccagacttca

SEQ ID NO: 4442017 - DNA, 25 bp, Homo sapien
tggttgttccaatggtggtccaagg

SEQ ID NO: 4442018 - DNA, 25 bp, Homo sapien
taatccttagggcttgtactaaagc

SEQ ID NO: 4442019 - DNA, 25 bp, Homo sapien
tgtaatgacgtaaaaacaaaggctg

SEQ ID NO: 4442020 - DNA, 25 bp, Homo sapien
tcctggactcaggctattcacccat

SEQ ID NO: 4442021 - DNA, 25 bp, Homo sapien
cctggactcaggctattcacccatt

SEQ ID NO: 4442022 - DNA, 25 bp, Homo sapien
gactcaggctattcacccattttgg

SEQ ID NO: 4442023 - DNA, 25 bp, Homo sapien
tggactcaggctattcacccatttt

SEQ ID NO: 4442024 - DNA, 25 bp, Homo sapien
cagagaccgtcattacaagccaaat

SEQ ID NO: 4442025 - DNA, 25 bp, Homo sapien
gaaaattgggaactgcctagacaga

SEQ ID NO: 4442026 - DNA, 25 bp, Homo sapien
tatgacaagggtatggcatcagaaa

SEQ ID NO: 4442027 - DNA, 25 bp, Homo sapien
tcaaggagtttacggaacagaacat

SEQ ID NO: 4442028 - DNA, 25 bp, Homo sapien
gcattacaccagtccattcaagcgg

SEQ ID NO: 4442029 - DNA, 25 bp, Homo sapien
gaattctcaacaaggcatcgatcga

SEQ ID NO: 4442030 - DNA, 25 bp, Homo sapien
gatcaggtagtgagtctcgagcatc

SEQ ID NO: 4442031 - DNA, 25 bp, Homo sapien
caaatgcagtacgattggaacactt

SEQ ID NO: 4442032 - DNA, 25 bp, Homo sapien
tcagctacagaggaaccgggacatt

SEQ ID NO: 4442033 - DNA, 25 bp, Homo sapien
tatcttcccgagagatcagctacag

SEQ ID NO: 4442034 - DNA, 25 bp, Homo sapien
tcccttccaccagaggagcaattgt

SEQ ID NO: 4442035 - DNA, 25 bp, Homo sapien
caagtctgggctgcttatcttcccg

SEQ ID NO: 4442036 - DNA, 25 bp, Homo sapien
tagccaggtgcggtgatgcacactt

SEQ ID NO: 4442037 - DNA, 25 bp, Homo sapien
cttgtagtcctagctgtctgggaag

SEQ ID NO: 4442038 - DNA, 25 bp, Homo sapien
caggtgcggtgatgcacacttgtag

SEQ ID NO: 4442039 - DNA, 25 bp, Homo sapien
gctatgattgcaccttgcaccactg

SEQ ID NO: 4442040 - DNA, 25 bp, Homo sapien
gagttgccgtcttctgtttaccaga

SEQ ID NO: 4442041 - DNA, 25 bp, Homo sapien
aggagttcgaggctaaccacggcaa

SEQ ID NO: 4442042 - DNA, 25 bp, Homo sapien
actcccaagaggtaatgcgtcggcc

SEQ ID NO: 4442043 - DNA, 25 bp, Homo sapien
gagttctcaccatcgcagctggact

SEQ ID NO: 4442044 - DNA, 25 bp, Homo sapien
ggcttacgctccacttctctactcg

SEQ ID NO: 4442045 - DNA, 25 bp, Homo sapien
cccagatgagttgcagttcccagct

SEQ ID NO: 4442046 - DNA, 25 bp, Homo sapien
agccttctgcgcacaacccagatga

SEQ ID NO: 4442047 - DNA, 25 bp, Homo sapien
gttcccagctgcacgcctcgggaag

SEQ ID NO: 4442048 - DNA, 25 bp, Homo sapien
aatacaaatgcttatcagtataaac

SEQ ID NO: 4442049 - DNA, 25 bp, Homo sapien
atacaaatgcttatcagtataaaca

SEQ ID NO: 4442050 - DNA, 25 bp, Homo sapien
taaccgtgaaatgggttgtgggcca

SEQ ID NO: 4442051 - DNA, 25 bp, Homo sapien
ctctaaccgtgaaatgggttgtggg

SEQ ID NO: 4442052 - DNA, 25 bp, Homo sapien
tctaaccgtgaaatgggttgtgggc

SEQ ID NO: 4442053 - DNA, 25 bp, Homo sapien
tcttcacatcgttggcatttatgcc

SEQ ID NO: 4442054 - DNA, 25 bp, Homo sapien
tattagctccttctttggcgcatag

SEQ ID NO: 4442055 - DNA, 25 bp, Homo sapien
tcagctttggcttcactaattccct

SEQ ID NO: 4442056 - DNA, 25 bp, Homo sapien
taggcaacagcctccacagtatgga

SEQ ID NO: 4442057 - DNA, 25 bp, Homo sapien
gtgcagtagaccaagatcacgctat

SEQ ID NO: 4442058 - DNA, 25 bp, Homo sapien
gagggtgcagtagaccaagatcacg

SEQ ID NO: 4442059 - DNA, 25 bp, Homo sapien
ggcggagggtgcagtagaccaagat

SEQ ID NO: 4442060 - DNA, 25 bp, Homo sapien
gggtgcagtagaccaagatcacgct

SEQ ID NO: 4442061 - DNA, 25 bp, Homo sapien
tcaagctctttggagccagtagtaa

SEQ ID NO: 4442062 - DNA, 25 bp, Homo sapien
ttggaactaatttagctgcctcagc

SEQ ID NO: 4442063 - DNA, 25 bp, Homo sapien
aattcagttgcagtggtgaaaccca

SEQ ID NO: 4442064 - DNA, 25 bp, Homo sapien
tatgatctctgaccgcctttggtgg

SEQ ID NO: 4442065 - DNA, 25 bp, Homo sapien
gctagcgtatgacagatctgggtct

SEQ ID NO: 4442066 - DNA, 25 bp, Homo sapien
ggcaggtgacagctagcgtatgaca

SEQ ID NO: 4442067 - DNA, 25 bp, Homo sapien
tgggtcttcccagttcggaattctc

SEQ ID NO: 4442068 - DNA, 25 bp, Homo sapien
catttctgtgatagatccagtctca

SEQ ID NO: 4442069 - DNA, 25 bp, Homo sapien
taacgtatctgataggagatcaatg

SEQ ID NO: 4442070 - DNA, 25 bp, Homo sapien
aaggcctggtagcaaaagtatttga

SEQ ID NO: 4442071 - DNA, 25 bp, Homo sapien
gaggacagagaaagtaccttttatg

SEQ ID NO: 4442072 - DNA, 25 bp, Homo sapien
taacagctataagattcttgaggac

SEQ ID NO: 4442073 - DNA, 25 bp, Homo sapien
ctggaatgcaatggtgcgatctcag

SEQ ID NO: 4442074 - DNA, 25 bp, Homo sapien
gctggaatgcaatggtgcgatctca

SEQ ID NO: 4442075 - DNA, 25 bp, Homo sapien
gacagagtctcgcttctttgaccag

SEQ ID NO: 4442076 - DNA, 25 bp, Homo sapien
tctcgcttctttgaccaggctggaa

SEQ ID NO: 4442077 - DNA, 25 bp, Homo sapien
aaggtaccctcagtgtcaatgtaca

SEQ ID NO: 4442078 - DNA, 25 bp, Homo sapien
cagtgtcaatgtacatggcctttcc

SEQ ID NO: 4442079 - DNA, 25 bp, Homo sapien
taccctcagtgtcaatgtacatggc

SEQ ID NO: 4442080 - DNA, 25 bp, Homo sapien
ccttcacctccaccccggtcaatgg

SEQ ID NO: 4442081 - DNA, 25 bp, Homo sapien
cgagcatatgctacattatccagga

SEQ ID NO: 4442082 - DNA, 25 bp, Homo sapien
gttgaacgctcgagcatatgctaca

SEQ ID NO: 4442083 - DNA, 25 bp, Homo sapien
gatgcttgataaaggagctgggtct

SEQ ID NO: 4442084 - DNA, 25 bp, Homo sapien
tctggtggtctgtgttgaacgctcg

SEQ ID NO: 4442085 - DNA, 25 bp, Homo sapien
atcagcgagtcgcagaagcatccgc

SEQ ID NO: 4442086 - DNA, 25 bp, Homo sapien
tgaaagctcacctcgacccgagtag

SEQ ID NO: 4442087 - DNA, 25 bp, Homo sapien
gaaacctggccaagtgcatctgcct

SEQ ID NO: 4442088 - DNA, 25 bp, Homo sapien
ccgagtagtctgttctgtaaagggc

SEQ ID NO: 4442089 - DNA, 25 bp, Homo sapien
tagtgattaccactgctacaccaaa

SEQ ID NO: 4442090 - DNA, 25 bp, Homo sapien
ccacttgagctaccacctgattagt

SEQ ID NO: 4442091 - DNA, 25 bp, Homo sapien
gttgttgatgcatgggcgatgatat

SEQ ID NO: 4442092 - DNA, 25 bp, Homo sapien
ggcgatgatatttcctccaataggt

SEQ ID NO: 4442093 - DNA, 25 bp, Homo sapien
gaagacagggagagtcgtagatttt

SEQ ID NO: 4442094 - DNA, 25 bp, Homo sapien
cagggagagtcgtagattttgcaga

SEQ ID NO: 4442095 - DNA, 25 bp, Homo sapien
tccatctgcattaatggcgaacata

SEQ ID NO: 4442096 - DNA, 25 bp, Homo sapien
ttaatggcgaacatagcttcagctt

SEQ ID NO: 4442097 - DNA, 25 bp, Homo sapien
gatataatagctgttttcccggaag

SEQ ID NO: 4442098 - DNA, 25 bp, Homo sapien
ggagcagtgcactctcattaggctg

SEQ ID NO: 4442099 - DNA, 25 bp, Homo sapien
aggaagaggcctgtagagaacccca

SEQ ID NO: 4442100 - DNA, 25 bp, Homo sapien
taggctgcagcacttaaggttttta

SEQ ID NO: 4442101 - DNA, 25 bp, Homo sapien
ccttggccaagctggacttaaaact

SEQ ID NO: 4442102 - DNA, 25 bp, Homo sapien
tcttagcaatgaaagaccaagcagg

SEQ ID NO: 4442103 - DNA, 25 bp, Homo sapien
gacaacttaaaaacctgcttgagag

SEQ ID NO: 4442104 - DNA, 25 bp, Homo sapien
tacaggcacgtgtaacagtgtgtcc

SEQ ID NO: 4442105 - DNA, 25 bp, Homo sapien
gagatatactcaattctaataataa

SEQ ID NO: 4442106 - DNA, 25 bp, Homo sapien
aatgaaagaggacctgagatatact

SEQ ID NO: 4442107 - DNA, 25 bp, Homo sapien
ttattttgtgttgtagtaatgaaag

SEQ ID NO: 4442108 - DNA, 25 bp, Homo sapien
gaaagaggacctgagatatactcaa

SEQ ID NO: 4442109 - DNA, 25 bp, Homo sapien
gctttcttatcacctatcatgtgaa

SEQ ID NO: 4442110 - DNA, 25 bp, Homo sapien
gtctgaaaagttgcctagaatatat

SEQ ID NO: 4442111 - DNA, 25 bp, Homo sapien
tgtgaattctacctgtattcctggg

SEQ ID NO: 4442112 - DNA, 25 bp, Homo sapien
tcctgggctggaccacttgataact

SEQ ID NO: 4442113 - DNA, 25 bp, Homo sapien
aaagtctgtaaaggaaccgcgcgct

SEQ ID NO: 4442114 - DNA, 25 bp, Homo sapien
tcgccaagacatgcgctccagagat

SEQ ID NO: 4442115 - DNA, 25 bp, Homo sapien
tctgtggacccgcaggaaagtctgt

SEQ ID NO: 4442116 - DNA, 25 bp, Homo sapien
tccagagattccttaagcgctgagg

SEQ ID NO: 4442117 - DNA, 25 bp, Homo sapien
tctgggtgctgatgagcaggtaggg

SEQ ID NO: 4442118 - DNA, 25 bp, Homo sapien
gggtgctgatgagcaggtagggcat

SEQ ID NO: 4442119 - DNA, 25 bp, Homo sapien
catgcggatctgggtgctgatgagc

SEQ ID NO: 4442120 - DNA, 25 bp, Homo sapien
atgcggatctgggtgctgatgagca

SEQ ID NO: 4442121 - DNA, 25 bp, Homo sapien
tcaggccggccagagctcgctgagt

SEQ ID NO: 4442122 - DNA, 25 bp, Homo sapien
aggcatgaaggtgcagtcgcagccc

SEQ ID NO: 4442123 - DNA, 25 bp, Homo sapien
cccttcgcggcaataaaggcttcag

SEQ ID NO: 4442124 - DNA, 25 bp, Homo sapien
tgagtcccggaagccgagctgagcc

SEQ ID NO: 4442125 - DNA, 25 bp, Homo sapien
ggcactaggtgctgcgcgtgaggcc

SEQ ID NO: 4442126 - DNA, 25 bp, Homo sapien
tctttctctcaggttattcgccctt

SEQ ID NO: 4442127 - DNA, 25 bp, Homo sapien
aggtcgccctgttgccgggacgcac

SEQ ID NO: 4442128 - DNA, 25 bp, Homo sapien
ctctcccgccgacaggtaggacagg

SEQ ID NO: 4442129 - DNA, 25 bp, Homo sapien
ccctgcctgctagccctgagtaagg

SEQ ID NO: 4442130 - DNA, 25 bp, Homo sapien
ggttcaggtaaaggctacagagagt

SEQ ID NO: 4442131 - DNA, 25 bp, Homo sapien
cagagagtagcaaggattcttaggg

SEQ ID NO: 4442132 - DNA, 25 bp, Homo sapien
tggagcccatcaatgatcaggagga

SEQ ID NO: 4442133 - DNA, 25 bp, Homo sapien
ctgcaaggtaagccacagtggctgc

SEQ ID NO: 4442134 - DNA, 25 bp, Homo sapien
tgcaaggtaagccacagtggctgct

SEQ ID NO: 4442135 - DNA, 25 bp, Homo sapien
aaggtaagccacagtggctgcttgg

SEQ ID NO: 4442136 - DNA, 25 bp, Homo sapien
gcaaggtaagccacagtggctgctt

SEQ ID NO: 4442137 - DNA, 25 bp, Homo sapien
catcagctctggatccgactgttca

SEQ ID NO: 4442138 - DNA, 25 bp, Homo sapien
gctctggatccgactgttcatcgcc

SEQ ID NO: 4442139 - DNA, 25 bp, Homo sapien
tgcatcagctctggatccgactgtt

SEQ ID NO: 4442140 - DNA, 25 bp, Homo sapien
tctggatccgactgttcatcgccca

SEQ ID NO: 4442141 - DNA, 25 bp, Homo sapien
ctcagcacacggaagcccctgcgtt

SEQ ID NO: 4442142 - DNA, 25 bp, Homo sapien
gggagggtcatcgacgtagtattca

SEQ ID NO: 4442143 - DNA, 25 bp, Homo sapien
ggaagcccctgcgttccagcttgtc

SEQ ID NO: 4442144 - DNA, 25 bp, Homo sapien
tgtccaggactatgcggggagggtc

SEQ ID NO: 4442145 - DNA, 25 bp, Homo sapien
tattggcttgggctagctatgcagg

SEQ ID NO: 4442146 - DNA, 25 bp, Homo sapien
gaggaacatggcctacacaaggccc

SEQ ID NO: 4442147 - DNA, 25 bp, Homo sapien
ggtgccccgtctgcaaatcagcatg

SEQ ID NO: 4442148 - DNA, 25 bp, Homo sapien
cactgcttgacgcagggtttcagag

SEQ ID NO: 4442149 - DNA, 25 bp, Homo sapien
gaaacgctccgcagggtgagagtcc

SEQ ID NO: 4442150 - DNA, 25 bp, Homo sapien
agagtcccagagtccgtgcacaagc

SEQ ID NO: 4442151 - DNA, 25 bp, Homo sapien
tccgtgcacaagcagagcacaggcg

SEQ ID NO: 4442152 - DNA, 25 bp, Homo sapien
tacataggtataaggtgctgggctc

SEQ ID NO: 4442153 - DNA, 25 bp, Homo sapien
acagctctctgctacgggcaggcca

SEQ ID NO: 4442154 - DNA, 25 bp, Homo sapien
ccaggcttagcagtccggcctagct

SEQ ID NO: 4442155 - DNA, 25 bp, Homo sapien
gccgtgaattgtcagccgtgctctg

SEQ ID NO: 4442156 - DNA, 25 bp, Homo sapien
gggtaccgcggatcagggccccaca

SEQ ID NO: 4442157 - DNA, 25 bp, Homo sapien
gctcactcgccctggtgtttgcctg

SEQ ID NO: 4442158 - DNA, 25 bp, Homo sapien
caggagtggcctggttactgaatag

SEQ ID NO: 4442159 - DNA, 25 bp, Homo sapien
tttgcctggctcctatatgtctctg

SEQ ID NO: 4442160 - DNA, 25 bp, Homo sapien
gtgaggctggcgagcgctccttcca

SEQ ID NO: 4442161 - DNA, 25 bp, Homo sapien
ggggagccagcagacaggtgttcag

SEQ ID NO: 4442162 - DNA, 25 bp, Homo sapien
ggagcagccagggtgcatgtggtcc

SEQ ID NO: 4442163 - DNA, 25 bp, Homo sapien
tcaggagcagccagggtgcatgtgg

SEQ ID NO: 4442164 - DNA, 25 bp, Homo sapien
agccagcagacaggtgttcaggagc

SEQ ID NO: 4442165 - DNA, 25 bp, Homo sapien
gatgacttctcggttgctgtactcc

SEQ ID NO: 4442166 - DNA, 25 bp, Homo sapien
tcaagaagtgaaatccccaggtcca

SEQ ID NO: 4442167 - DNA, 25 bp, Homo sapien
tagaagctgggctcgctaggaaact

SEQ ID NO: 4442168 - DNA, 25 bp, Homo sapien
taagcacactactctgtcgccggag

SEQ ID NO: 4442169 - DNA, 25 bp, Homo sapien
gaaatggtgtgtgtcagagcttccc

SEQ ID NO: 4442170 - DNA, 25 bp, Homo sapien
tgagtggccaccagattagacaggg

SEQ ID NO: 4442171 - DNA, 25 bp, Homo sapien
catgtgtggccaccgggcatttgga

SEQ ID NO: 4442172 - DNA, 25 bp, Homo sapien
ggcagaactgtctaatcccgggaga

SEQ ID NO: 4442173 - DNA, 25 bp, Homo sapien
tactggcaccaattcctagatgtgg

SEQ ID NO: 4442174 - DNA, 25 bp, Homo sapien
agtgattcgcccagcataaggtggc

SEQ ID NO: 4442175 - DNA, 25 bp, Homo sapien
catttgatgagaccttgaaagcaag

SEQ ID NO: 4442176 - DNA, 25 bp, Homo sapien
tgaggtggtcaaggactactggcac

SEQ ID NO: 4442177 - DNA, 25 bp, Homo sapien
tacagagggctcttcgcgccgggtg

SEQ ID NO: 4442178 - DNA, 25 bp, Homo sapien
tccaggttcattcgggtcctgggcg

SEQ ID NO: 4442179 - DNA, 25 bp, Homo sapien
cagacatttcctggacggtccgagg

SEQ ID NO: 4442180 - DNA, 25 bp, Homo sapien
gagggtcggcgctatgccctccgca

SEQ ID NO: 4442181 - DNA, 25 bp, Homo sapien
ctgatcttgagaggtctggcggtcc

SEQ ID NO: 4442182 - DNA, 25 bp, Homo sapien
cattgaggagaaggcagcggacaaa

SEQ ID NO: 4442183 - DNA, 25 bp, Homo sapien
ctgtacgcgctgctaggcattgagg

SEQ ID NO: 4442184 - DNA, 25 bp, Homo sapien
ggtgagaacggtggcgaggaaggct

SEQ ID NO: 4442185 - DNA, 25 bp, Homo sapien
tcacgcgcgcttagactcttgggag

SEQ ID NO: 4442186 - DNA, 25 bp, Homo sapien
gtagttcattcacgactgccggcct

SEQ ID NO: 4442187 - DNA, 25 bp, Homo sapien
ttgtagtacgaatccgtcaggccgg

SEQ ID NO: 4442188 - DNA, 25 bp, Homo sapien
gaccaaggagctcttacagatggac

SEQ ID NO: 4442189 - DNA, 25 bp, Homo sapien
gtggctcccagcaccgcagggtctg

SEQ ID NO: 4442190 - DNA, 25 bp, Homo sapien
gctgagatcacgccggccaagtcct

SEQ ID NO: 4442191 - DNA, 25 bp, Homo sapien
gcccactggcactgtcccgccgcga

SEQ ID NO: 4442192 - DNA, 25 bp, Homo sapien
atcacgccggccaagtcctgggccc

SEQ ID NO: 4442193 - DNA, 25 bp, Homo sapien
tcttgaagagggtgaacttgacagc

SEQ ID NO: 4442194 - DNA, 25 bp, Homo sapien
agagggtgaacttgacagcgcagcc

SEQ ID NO: 4442195 - DNA, 25 bp, Homo sapien
cttgacagcgcagccgtagcaccta

SEQ ID NO: 4442196 - DNA, 25 bp, Homo sapien
gtgaacttgacagcgcagccgtagc

SEQ ID NO: 4442197 - DNA, 25 bp, Homo sapien
gaaaaccgccagatgctacactggg

SEQ ID NO: 4442198 - DNA, 25 bp, Homo sapien
tagctttgcaaaaacgacggcagcg

SEQ ID NO: 4442199 - DNA, 25 bp, Homo sapien
tgaaagcgagagaatgttagcccca

SEQ ID NO: 4442200 - DNA, 25 bp, Homo sapien
tggaaaggagccgtaagaccaagtc

SEQ ID NO: 4442201 - DNA, 25 bp, Homo sapien
caggaggaagtgtggtaatctaact

SEQ ID NO: 4442202 - DNA, 25 bp, Homo sapien
gaagtgtggtaatctaactccagcg

SEQ ID NO: 4442203 - DNA, 25 bp, Homo sapien
tctaactccagcgacctggagaagg

SEQ ID NO: 4442204 - DNA, 25 bp, Homo sapien
ggtaatctaactccagcgacctgga

SEQ ID NO: 4442205 - DNA, 25 bp, Homo sapien
aatctggcaggtctgtgatagggac

SEQ ID NO: 4442206 - DNA, 25 bp, Homo sapien
aggtctgtgatagggacaggacagt

SEQ ID NO: 4442207 - DNA, 25 bp, Homo sapien
gcaggtctgtgatagggacaggaca

SEQ ID NO: 4442208 - DNA, 25 bp, Homo sapien
agaggaatctggcaggtctgtgata

SEQ ID NO: 4442209 - DNA, 25 bp, Homo sapien
caggttggtgaatgctgcacggtcc

SEQ ID NO: 4442210 - DNA, 25 bp, Homo sapien
ggtcaccgcctcaataagacagcag

SEQ ID NO: 4442211 - DNA, 25 bp, Homo sapien
tacttaatcttgatgccaaccgtga

SEQ ID NO: 4442212 - DNA, 25 bp, Homo sapien
gctcagatttgaacgctgactccaa

SEQ ID NO: 4442213 - DNA, 25 bp, Homo sapien
taaagcaattcctcggtttccagta

SEQ ID NO: 4442214 - DNA, 25 bp, Homo sapien
tcaggatgggctaacaatagcctcc

SEQ ID NO: 4442215 - DNA, 25 bp, Homo sapien
gacccagggatgtagaagacagata

SEQ ID NO: 4442216 - DNA, 25 bp, Homo sapien
aagaaacatgaagcgggagatcccc

SEQ ID NO: 4442217 - DNA, 25 bp, Homo sapien
ccctgccacaattcttacagccgta

SEQ ID NO: 4442218 - DNA, 25 bp, Homo sapien
gccctgccacaattcttacagccgt

SEQ ID NO: 4442219 - DNA, 25 bp, Homo sapien
ggccctgccacaattcttacagccg

SEQ ID NO: 4442220 - DNA, 25 bp, Homo sapien
ttgggtgttcccagtccgaggcact

SEQ ID NO: 4442221 - DNA, 25 bp, Homo sapien
gttgggtgttcccagtccgaggcac

SEQ ID NO: 4442222 - DNA, 25 bp, Homo sapien
tgggtgttcccagtccgaggcactg

SEQ ID NO: 4442223 - DNA, 25 bp, Homo sapien
ttcttatagttctgaggtggtgacc

SEQ ID NO: 4442224 - DNA, 25 bp, Homo sapien
tatagttctgaggtggtgaccactt

SEQ ID NO: 4442225 - DNA, 25 bp, Homo sapien
agttctgaggtggtgaccacttgga

SEQ ID NO: 4442226 - DNA, 25 bp, Homo sapien
cttatagttctgaggtggtgaccac

SEQ ID NO: 4442227 - DNA, 25 bp, Homo sapien
gcaatcatctggtcttgtcgtgtca

SEQ ID NO: 4442228 - DNA, 25 bp, Homo sapien
tcgtgctaggcgctcagcaatcatc

SEQ ID NO: 4442229 - DNA, 25 bp, Homo sapien
gcttgttctcctggcggagtcgtgc

SEQ ID NO: 4442230 - DNA, 25 bp, Homo sapien
tggtcttgtcgtgtcagtccctggc

SEQ ID NO: 4442231 - DNA, 25 bp, Homo sapien
tctgccctgcaacgctgcaagtcgt

SEQ ID NO: 4442232 - DNA, 25 bp, Homo sapien
agggatggaaccctgacgttcatcc

SEQ ID NO: 4442233 - DNA, 25 bp, Homo sapien
ggtttgagaaggtagaactctgccc

SEQ ID NO: 4442234 - DNA, 25 bp, Homo sapien
ctgacgttcatcctttagggcagcc

SEQ ID NO: 4442235 - DNA, 25 bp, Homo sapien
ccccgggtctggtagcaggcctgag

SEQ ID NO: 4442236 - DNA, 25 bp, Homo sapien
cccgggtctggtagcaggcctgagg

SEQ ID NO: 4442237 - DNA, 25 bp, Homo sapien
tcctttccagctttcatcgatagcc

SEQ ID NO: 4442238 - DNA, 25 bp, Homo sapien
cagctgccagctgcgttagcagatc

SEQ ID NO: 4442239 - DNA, 25 bp, Homo sapien
ctttcatcgatagccacctcagctg

SEQ ID NO: 4442240 - DNA, 25 bp, Homo sapien
tcctggtgtccggtgtgtgatgtgc

SEQ ID NO: 4442241 - DNA, 25 bp, Homo sapien
taaacactaggcttacactggctcc

SEQ ID NO: 4442242 - DNA, 25 bp, Homo sapien
tcttataacgttgatcactctccga

SEQ ID NO: 4442243 - DNA, 25 bp, Homo sapien
taatacgtggtagaaatgggaatca

SEQ ID NO: 4442244 - DNA, 25 bp, Homo sapien
actgtctgattctaaagcccgtgca

SEQ ID NO: 4442245 - DNA, 25 bp, Homo sapien
taaatgttgccacaagtagcctggg

SEQ ID NO: 4442246 - DNA, 25 bp, Homo sapien
tgagattgtgcctctaaagcaggac

SEQ ID NO: 4442247 - DNA, 25 bp, Homo sapien
tcatcatgatgtgctgtcctgtgac

SEQ ID NO: 4442248 - DNA, 25 bp, Homo sapien
tctcttgacactttggaccgggtaa

SEQ ID NO: 4442249 - DNA, 25 bp, Homo sapien
ttggaattagtgctccctgggccac

SEQ ID NO: 4442250 - DNA, 25 bp, Homo sapien
tggaattagtgctccctgggccacc

SEQ ID NO: 4442251 - DNA, 25 bp, Homo sapien
cttggaattagtgctccctgggcca

SEQ ID NO: 4442252 - DNA, 25 bp, Homo sapien
gtcctgtccccgcagcatggctagt

SEQ ID NO: 4442253 - DNA, 25 bp, Homo sapien
catggctagtcgcttggccagggcc

SEQ ID NO: 4442254 - DNA, 25 bp, Homo sapien
gaatccgttcctgcctcgtgttctc

SEQ ID NO: 4442255 - DNA, 25 bp, Homo sapien
gtgttctcctcccgcaactcaagtg

SEQ ID NO: 4442256 - DNA, 25 bp, Homo sapien
tcgtcgtcatcactgtctgggaggc

SEQ ID NO: 4442257 - DNA, 25 bp, Homo sapien
tgcaggactctttggatggctgtct

SEQ ID NO: 4442258 - DNA, 25 bp, Homo sapien
gggaggcgatagtcctggagggtca

SEQ ID NO: 4442259 - DNA, 25 bp, Homo sapien
tcactgtctgggaggcgatagtcct

SEQ ID NO: 4442260 - DNA, 25 bp, Homo sapien
gacagggtgaagatgtactactccc

SEQ ID NO: 4442261 - DNA, 25 bp, Homo sapien
aaagccacttgcctcatccagggaa

SEQ ID NO: 4442262 - DNA, 25 bp, Homo sapien
ttgcgtccagggtcgagaagcctgc

SEQ ID NO: 4442263 - DNA, 25 bp, Homo sapien
ggatgttaaagccacttgcctcatc

SEQ ID NO: 4442264 - DNA, 25 bp, Homo sapien
tccagggtcgagaagcctgctctgc

SEQ ID NO: 4442265 - DNA, 25 bp, Homo sapien
tcaggcctggggtccacatcctggg

SEQ ID NO: 4442266 - DNA, 25 bp, Homo sapien
ctcaggcctggggtccacatcctgg

SEQ ID NO: 4442267 - DNA, 25 bp, Homo sapien
caggcctggggtccacatcctgggc

SEQ ID NO: 4442268 - DNA, 25 bp, Homo sapien
agaagaggtccccatcgcagccagc

SEQ ID NO: 4442269 - DNA, 25 bp, Homo sapien
ccatcgcagccagcgcagcgtaggg

SEQ ID NO: 4442270 - DNA, 25 bp, Homo sapien
gcacagaagaggtccccatcgcagc

SEQ ID NO: 4442271 - DNA, 25 bp, Homo sapien
cgggcacagaagaggtccccatcgc

SEQ ID NO: 4442272 - DNA, 25 bp, Homo sapien
gagctctcgcacagaacattccacc

SEQ ID NO: 4442273 - DNA, 25 bp, Homo sapien
aacaaagggatacaagtcagggatc

SEQ ID NO: 4442274 - DNA, 25 bp, Homo sapien
tgagctctcgcacagaacattccac

SEQ ID NO: 4442275 - DNA, 25 bp, Homo sapien
tctggtgctctttaagctcaaaggc

SEQ ID NO: 4442276 - DNA, 25 bp, Homo sapien
ctggtgctctttaagctcaaaggca

SEQ ID NO: 4442277 - DNA, 25 bp, Homo sapien
agatgtctggtgctctttaagctca

SEQ ID NO: 4442278 - DNA, 25 bp, Homo sapien
tgtctggtgctctttaagctcaaag

SEQ ID NO: 4442279 - DNA, 25 bp, Homo sapien
aagctctcccatcggacgtcctgtg

SEQ ID NO: 4442280 - DNA, 25 bp, Homo sapien
tccatcatcagtagagccagacaag

SEQ ID NO: 4442281 - DNA, 25 bp, Homo sapien
ccagtctgggcttctaataggaggg

SEQ ID NO: 4442282 - DNA, 25 bp, Homo sapien
agggctcacccgtagattcagtctg

SEQ ID NO: 4442283 - DNA, 25 bp, Homo sapien
caacatactttattagacccactaa

SEQ ID NO: 4442284 - DNA, 25 bp, Homo sapien
ctttattagacccactaagtgccag

SEQ ID NO: 4442285 - DNA, 25 bp, Homo sapien
catactttattagacccactaagtg

SEQ ID NO: 4442286 - DNA, 25 bp, Homo sapien
ttattagacccactaagtgccaggg

SEQ ID NO: 4442287 - DNA, 25 bp, Homo sapien
tgcctggagaagttcataggatggc

SEQ ID NO: 4442288 - DNA, 25 bp, Homo sapien
cataggatggctcaaccttttcccc

SEQ ID NO: 4442289 - DNA, 25 bp, Homo sapien
ccccacaactgtgcttacagcctgc

SEQ ID NO: 4442290 - DNA, 25 bp, Homo sapien
tcacagggcccaggctcatagggtt

SEQ ID NO: 4442291 - DNA, 25 bp, Homo sapien
cctgcgtgcattgtgtgagtagtag

SEQ ID NO: 4442292 - DNA, 25 bp, Homo sapien
ccggttagggcgcattactggaaga

SEQ ID NO: 4442293 - DNA, 25 bp, Homo sapien
taaagggtacatgccgagaggtcag

SEQ ID NO: 4442294 - DNA, 25 bp, Homo sapien
caatgcagaggcatgtaaagggtac

SEQ ID NO: 4442295 - DNA, 25 bp, Homo sapien
taggatcaagcaaccccttctgagc

SEQ ID NO: 4442296 - DNA, 25 bp, Homo sapien
ggcccctctgagacccatgtgattt

SEQ ID NO: 4442297 - DNA, 25 bp, Homo sapien
tatctaggccattcttgggaactgc

SEQ ID NO: 4442298 - DNA, 25 bp, Homo sapien
ggagtgcagagaaccaatccagagg

SEQ ID NO: 4442299 - DNA, 25 bp, Homo sapien
gatgacagtcttccttggtaatcac

SEQ ID NO: 4442300 - DNA, 25 bp, Homo sapien
tttgatgacagtcttccttggtaat

SEQ ID NO: 4442301 - DNA, 25 bp, Homo sapien
tatttgatgacagtcttccttggta

SEQ ID NO: 4442302 - DNA, 25 bp, Homo sapien
catatttgatgacagtcttccttgg

SEQ ID NO: 4442303 - DNA, 25 bp, Homo sapien
aatcatttccatttcgtggcgggaa

SEQ ID NO: 4442304 - DNA, 25 bp, Homo sapien
ggatccgggatgtctgcctcactgt

SEQ ID NO: 4442305 - DNA, 25 bp, Homo sapien
taacccaaaagttgcgtggctgcac

SEQ ID NO: 4442306 - DNA, 25 bp, Homo sapien
gcaaatgatctttccggccctcagg

SEQ ID NO: 4442307 - DNA, 25 bp, Homo sapien
tgcgcggctcgggtcgcggcttccg

SEQ ID NO: 4442308 - DNA, 25 bp, Homo sapien
ccgaggttccggtcccagcttcctg

SEQ ID NO: 4442309 - DNA, 25 bp, Homo sapien
tcccagcttcctgcgcggctcgggt

SEQ ID NO: 4442310 - DNA, 25 bp, Homo sapien
ttccgacccggtgctcggagagctg

SEQ ID NO: 4442311 - DNA, 25 bp, Homo sapien
cggacacacgcacgagcgcagaaca

SEQ ID NO: 4442312 - DNA, 25 bp, Homo sapien
acacacgcacgagcgcagaacaaag

SEQ ID NO: 4442313 - DNA, 25 bp, Homo sapien
aaagggccggacatgctccagcccg

SEQ ID NO: 4442314 - DNA, 25 bp, Homo sapien
agcgcagaacaaagggccggacatg

SEQ ID NO: 4442315 - DNA, 25 bp, Homo sapien
ctgagaagaagggaggggacagagg

SEQ ID NO: 4442316 - DNA, 25 bp, Homo sapien
gtcaccttcagagcgcgggcctctg

SEQ ID NO: 4442317 - DNA, 25 bp, Homo sapien
ttcagagcgcgggcctctgggttcc

SEQ ID NO: 4442318 - DNA, 25 bp, Homo sapien
ccttcagagcgcgggcctctgggtt

SEQ ID NO: 4442319 - DNA, 25 bp, Homo sapien
caccttcagagcgcgggcctctggg

SEQ ID NO: 4442320 - DNA, 25 bp, Homo sapien
ggcgcgggccatcgtcctcgcaggg

SEQ ID NO: 4442321 - DNA, 25 bp, Homo sapien
gagcgtgcacagaagccacaaggcg

SEQ ID NO: 4442322 - DNA, 25 bp, Homo sapien
aaggcgacggcagggatgccggccg

SEQ ID NO: 4442323 - DNA, 25 bp, Homo sapien
gaggccgagcgtgcacagaagccac

SEQ ID NO: 4442324 - DNA, 25 bp, Homo sapien
ccccggcggtaaagctgttcaggca

SEQ ID NO: 4442325 - DNA, 25 bp, Homo sapien
gagcggtacacttccctcgtgaggt

SEQ ID NO: 4442326 - DNA, 25 bp, Homo sapien
cacgaagttctgctcgtagaggcag

SEQ ID NO: 4442327 - DNA, 25 bp, Homo sapien
gaaggtagctccgttgctgaccgag

SEQ ID NO: 4442328 - DNA, 25 bp, Homo sapien
acgcccttccttgacttgacagtgc

SEQ ID NO: 4442329 - DNA, 25 bp, Homo sapien
aaatacctcagacagactcggcctc

SEQ ID NO: 4442330 - DNA, 25 bp, Homo sapien
tactgaacaaactgccatctgatct

SEQ ID NO: 4442331 - DNA, 25 bp, Homo sapien
tattcacagactctatcatggccag

SEQ ID NO: 4442332 - DNA, 25 bp, Homo sapien
cgcagtaggcgccaatctgtgtttt

SEQ ID NO: 4442333 - DNA, 25 bp, Homo sapien
tcctggggttgtaccttcaagtcta

SEQ ID NO: 4442334 - DNA, 25 bp, Homo sapien
acatccgtgtcaccccgcagtaggc

SEQ ID NO: 4442335 - DNA, 25 bp, Homo sapien
tcaagtctatgcctgcccaggcctt

SEQ ID NO: 4442336 - DNA, 25 bp, Homo sapien
ttgagtccccacagttccacctggt

SEQ ID NO: 4442337 - DNA, 25 bp, Homo sapien
agtccccacagttccacctggtttg

SEQ ID NO: 4442338 - DNA, 25 bp, Homo sapien
cttgagtccccacagttccacctgg

SEQ ID NO: 4442339 - DNA, 25 bp, Homo sapien
tgagtccccacagttccacctggtt

SEQ ID NO: 4442340 - DNA, 25 bp, Homo sapien
ttctgtctgcttggtggacagcaca

SEQ ID NO: 4442341 - DNA, 25 bp, Homo sapien
cgttggccgtgtcctctgggtggtc

SEQ ID NO: 4442342 - DNA, 25 bp, Homo sapien
actgtgacgttggccgtgtcctctg

SEQ ID NO: 4442343 - DNA, 25 bp, Homo sapien
ggtggtctgagctagtcactgtcag

SEQ ID NO: 4442344 - DNA, 25 bp, Homo sapien
ccaccttgttggatgcgaggcagta

SEQ ID NO: 4442345 - DNA, 25 bp, Homo sapien
gcagcctccataaacgaaactcttg

SEQ ID NO: 4442346 - DNA, 25 bp, Homo sapien
aatgcactcttcttcccgaaggtag

SEQ ID NO: 4442347 - DNA, 25 bp, Homo sapien
ttgcacaccccgacaggctagaatg

SEQ ID NO: 4442348 - DNA, 25 bp, Homo sapien
ctgggggaaagtcgcctgagcccca

SEQ ID NO: 4442349 - DNA, 25 bp, Homo sapien
gggggaaagtcgcctgagccccaga

SEQ ID NO: 4442350 - DNA, 25 bp, Homo sapien
tgggggaaagtcgcctgagccccag

SEQ ID NO: 4442351 - DNA, 25 bp, Homo sapien
tggatggcgcctttccatggagggg

SEQ ID NO: 4442352 - DNA, 25 bp, Homo sapien
ggatggcgcctttccatggaggggc

SEQ ID NO: 4442353 - DNA, 25 bp, Homo sapien
ctggatggcgcctttccatggaggg

SEQ ID NO: 4442354 - DNA, 25 bp, Homo sapien
gaagggaggtcaggctcaagcaaag

SEQ ID NO: 4442355 - DNA, 25 bp, Homo sapien
gaggtcaggctcaagcaaagaacaa

SEQ ID NO: 4442356 - DNA, 25 bp, Homo sapien
agggaggtcaggctcaagcaaagaa

SEQ ID NO: 4442357 - DNA, 25 bp, Homo sapien
tcctgccccacgcaaactgggcaga

SEQ ID NO: 4442358 - DNA, 25 bp, Homo sapien
cagttgggggtgtcgtcacactcca

SEQ ID NO: 4442359 - DNA, 25 bp, Homo sapien
ggtgtcgtcacactccaggaaactg

SEQ ID NO: 4442360 - DNA, 25 bp, Homo sapien
tgcagcggaactgggtgggctgaca

SEQ ID NO: 4442361 - DNA, 25 bp, Homo sapien
tcacaggcagcctcgtcggaggcgt

SEQ ID NO: 4442362 - DNA, 25 bp, Homo sapien
ggtcagagtctcagacccaacaagg

SEQ ID NO: 4442363 - DNA, 25 bp, Homo sapien
ggaaaggtcagagtctcagacccaa

SEQ ID NO: 4442364 - DNA, 25 bp, Homo sapien
tcagacccaacaagggtctcccagg

SEQ ID NO: 4442365 - DNA, 25 bp, Homo sapien
gagtctcagacccaacaagggtctc

SEQ ID NO: 4442366 - DNA, 25 bp, Homo sapien
tgcgctggagctcgtcaaagccact

SEQ ID NO: 4442367 - DNA, 25 bp, Homo sapien
gaaatggatgcgctggagctcgtca

SEQ ID NO: 4442368 - DNA, 25 bp, Homo sapien
tggagctcgtcaaagccactcgtgt

SEQ ID NO: 4442369 - DNA, 25 bp, Homo sapien
tggatgcgctggagctcgtcaaagc

SEQ ID NO: 4442370 - DNA, 25 bp, Homo sapien
gctatggtgagcgagtccatggcct

SEQ ID NO: 4442371 - DNA, 25 bp, Homo sapien
gggtaggctatggtgagcgagtcca

SEQ ID NO: 4442372 - DNA, 25 bp, Homo sapien
ggtgagcgagtccatggcctccctg

SEQ ID NO: 4442373 - DNA, 25 bp, Homo sapien
tatggtgagcgagtccatggcctcc

SEQ ID NO: 4442374 - DNA, 25 bp, Homo sapien
tgttgccgtaacaaccaccataggt

SEQ ID NO: 4442375 - DNA, 25 bp, Homo sapien
gttgtagtaccagcgcgggatgctc

SEQ ID NO: 4442376 - DNA, 25 bp, Homo sapien
taaagcgggcgcagtgttcgctgaa

SEQ ID NO: 4442377 - DNA, 25 bp, Homo sapien
gacaagactcgaggcactgctgctc

SEQ ID NO: 4442378 - DNA, 25 bp, Homo sapien
gaatggggatttcccgcctcaggcc

SEQ ID NO: 4442379 - DNA, 25 bp, Homo sapien
tgggaatggggatttcccgcctcag

SEQ ID NO: 4442380 - DNA, 25 bp, Homo sapien
ccgcctcaggccaaacacatccttc

SEQ ID NO: 4442381 - DNA, 25 bp, Homo sapien
gggatttcccgcctcaggccaaaca

SEQ ID NO: 4442382 - DNA, 25 bp, Homo sapien
tggtggtgtccgtggaagtcctttc

SEQ ID NO: 4442383 - DNA, 25 bp, Homo sapien
cacaatgcagatgaccaggaacact

SEQ ID NO: 4442384 - DNA, 25 bp, Homo sapien
tccgtgtcctcggtagtggagacag

SEQ ID NO: 4442385 - DNA, 25 bp, Homo sapien
tggttatagaccaggtgctccgtgt

SEQ ID NO: 4442386 - DNA, 25 bp, Homo sapien
tagtctggtacttctggcccaaggg

SEQ ID NO: 4442387 - DNA, 25 bp, Homo sapien
tccaaactcctatgcaggcaggtcc

SEQ ID NO: 4442388 - DNA, 25 bp, Homo sapien
tctttacagcacaaactacacaggg

SEQ ID NO: 4442389 - DNA, 25 bp, Homo sapien
gatcaagggcagagagctcaatctt

SEQ ID NO: 4442390 - DNA, 25 bp, Homo sapien
caccgggaggtagcttgaacaaatg

SEQ ID NO: 4442391 - DNA, 25 bp, Homo sapien
cagcgccagcaactcgagatacgta

SEQ ID NO: 4442392 - DNA, 25 bp, Homo sapien
tctggtggtcaaacatggcactgct

SEQ ID NO: 4442393 - DNA, 25 bp, Homo sapien
cgagagagacgatgggaaaacctgc

SEQ ID NO: 4442394 - DNA, 25 bp, Homo sapien
tattaaccttaatctcctccacttg

SEQ ID NO: 4442395 - DNA, 25 bp, Homo sapien
tccacttgaccggcctctgttttgt

SEQ ID NO: 4442396 - DNA, 25 bp, Homo sapien
tgatgttagactttctccacgaagt

SEQ ID NO: 4442397 - DNA, 25 bp, Homo sapien
ttcagatacctggtacgcacaagca

SEQ ID NO: 4442398 - DNA, 25 bp, Homo sapien
tcagatgagtagaatcatacttgtc

SEQ ID NO: 4442399 - DNA, 25 bp, Homo sapien
tctgtgttgtagcatatgttagaac

SEQ ID NO: 4442400 - DNA, 25 bp, Homo sapien
catcattctactgtctctttgattt

SEQ ID NO: 4442401 - DNA, 25 bp, Homo sapien
caccgtgtatattgtgtgtactcca

SEQ ID NO: 4442402 - DNA, 25 bp, Homo sapien
acctggtatcctgacaacttcctga

SEQ ID NO: 4442403 - DNA, 25 bp, Homo sapien
tcacctggtatcctgacaacttcct

SEQ ID NO: 4442404 - DNA, 25 bp, Homo sapien
gcagcaggggcgtctttgggtcccg

SEQ ID NO: 4442405 - DNA, 25 bp, Homo sapien
gacaacttcctgacttcttagcagt

SEQ ID NO: 4442406 - DNA, 25 bp, Homo sapien
cttccctgagctccccattctcctg

SEQ ID NO: 4442407 - DNA, 25 bp, Homo sapien
agctccccattctcctgggaacgag

SEQ ID NO: 4442408 - DNA, 25 bp, Homo sapien
tgagctccccattctcctgggaacg

SEQ ID NO: 4442409 - DNA, 25 bp, Homo sapien
ccctgagctccccattctcctggga

SEQ ID NO: 4442410 - DNA, 25 bp, Homo sapien
cactgggcgttctgcgactgactca

SEQ ID NO: 4442411 - DNA, 25 bp, Homo sapien
ggcgttctgcgactgactcagcctg

SEQ ID NO: 4442412 - DNA, 25 bp, Homo sapien
gtcttcactgctcccttggcacact

SEQ ID NO: 4442413 - DNA, 25 bp, Homo sapien
tgggcgttctgcgactgactcagcc

SEQ ID NO: 4442414 - DNA, 25 bp, Homo sapien
gctatttccgacttcctgactccca

SEQ ID NO: 4442415 - DNA, 25 bp, Homo sapien
tctggtgatccccagctatttccga

SEQ ID NO: 4442416 - DNA, 25 bp, Homo sapien
tcgctctggtgatccccagctattt

SEQ ID NO: 4442417 - DNA, 25 bp, Homo sapien
ggtgatccccagctatttccgactt

SEQ ID NO: 4442418 - DNA, 25 bp, Homo sapien
gggcaggtgacaagtatgctgtcca

SEQ ID NO: 4442419 - DNA, 25 bp, Homo sapien
cagccccactgagggctatctgggc

SEQ ID NO: 4442420 - DNA, 25 bp, Homo sapien
cccactgagggctatctgggctctc

SEQ ID NO: 4442421 - DNA, 25 bp, Homo sapien
tgacaagtatgctgtccaggctcat

SEQ ID NO: 4442422 - DNA, 25 bp, Homo sapien
gaatctggcgcagtcttgcacctta

SEQ ID NO: 4442423 - DNA, 25 bp, Homo sapien
tcccttcagccggtgccaggtgatc

SEQ ID NO: 4442424 - DNA, 25 bp, Homo sapien
tgcagccgtcgcctcctctttaaaa

SEQ ID NO: 4442425 - DNA, 25 bp, Homo sapien
tatgcagcgagataatcgggcagcc

SEQ ID NO: 4442426 - DNA, 25 bp, Homo sapien
ccggcctctgggctctttgtccggg

SEQ ID NO: 4442427 - DNA, 25 bp, Homo sapien
ggcctctgggctctttgtccggggc

SEQ ID NO: 4442428 - DNA, 25 bp, Homo sapien
ggtgcccggcctctgggctctttgt

SEQ ID NO: 4442429 - DNA, 25 bp, Homo sapien
gcccggcctctgggctctttgtccg

SEQ ID NO: 4442430 - DNA, 25 bp, Homo sapien
ccgagcgggacagcgagttctcgta

SEQ ID NO: 4442431 - DNA, 25 bp, Homo sapien
ccacgctagggcagccgggctgcaa

SEQ ID NO: 4442432 - DNA, 25 bp, Homo sapien
cgggctgcaagacggccgagcggga

SEQ ID NO: 4442433 - DNA, 25 bp, Homo sapien
acagcgagttctcgtactcatccag

SEQ ID NO: 4442434 - DNA, 25 bp, Homo sapien
aaacttcgactatccaccagctggg

SEQ ID NO: 4442435 - DNA, 25 bp, Homo sapien
gagtaattccttatctgggccccaa

SEQ ID NO: 4442436 - DNA, 25 bp, Homo sapien
tcaaaaggaccctagcggtagagcc

SEQ ID NO: 4442437 - DNA, 25 bp, Homo sapien
ccaactgcgccctgtaggtgagtaa

SEQ ID NO: 4442438 - DNA, 25 bp, Homo sapien
aggtaaggaatgacaagaagattag

SEQ ID NO: 4442439 - DNA, 25 bp, Homo sapien
tacaggtaaggaatgacaagaagat

SEQ ID NO: 4442440 - DNA, 25 bp, Homo sapien
taaggaatgacaagaagattagctg

SEQ ID NO: 4442441 - DNA, 25 bp, Homo sapien
ctacaggtaaggaatgacaagaaga

SEQ ID NO: 4442442 - DNA, 25 bp, Homo sapien
gggtgaagtcaatgcgctgctttgt

SEQ ID NO: 4442443 - DNA, 25 bp, Homo sapien
gctgattgctggagacgacaagact

SEQ ID NO: 4442444 - DNA, 25 bp, Homo sapien
caagactggtaatgcgctcggaagg

SEQ ID NO: 4442445 - DNA, 25 bp, Homo sapien
ggagcagtgtatccttgcccaggct

SEQ ID NO: 4442446 - DNA, 25 bp, Homo sapien
atatacatctatgcataaaatgctg

SEQ ID NO: 4442447 - DNA, 25 bp, Homo sapien
aaatatacatctatgcataaaatgc

SEQ ID NO: 4442448 - DNA, 25 bp, Homo sapien
aatatacatctatgcataaaatgct

SEQ ID NO: 4442449 - DNA, 25 bp, Homo sapien
gaaatatacatctatgcataaaatg

SEQ ID NO: 4442450 - DNA, 25 bp, Homo sapien
gaacatcttgtgaacttttgcgtca

SEQ ID NO: 4442451 - DNA, 25 bp, Homo sapien
cagtatggtcaaggaacatcttgtg

SEQ ID NO: 4442452 - DNA, 25 bp, Homo sapien
tttgcgtcatccttacgtcccagct

SEQ ID NO: 4442453 - DNA, 25 bp, Homo sapien
cacgtggttgggctcatttgccttg

SEQ ID NO: 4442454 - DNA, 25 bp, Homo sapien
cccttccagcgtgctagtggccgta

SEQ ID NO: 4442455 - DNA, 25 bp, Homo sapien
catttcggttcacgtagaggacctc

SEQ ID NO: 4442456 - DNA, 25 bp, Homo sapien
acctccgtgctgctcagggcaatca

SEQ ID NO: 4442457 - DNA, 25 bp, Homo sapien
gctagtggccgtaccttctgtccat

SEQ ID NO: 4442458 - DNA, 25 bp, Homo sapien
cctgtgctgctctccgtgcccagtg

SEQ ID NO: 4442459 - DNA, 25 bp, Homo sapien
gggcctgtgctgctctccgtgccca

SEQ ID NO: 4442460 - DNA, 25 bp, Homo sapien
atggggcctgtgctgctctccgtgc

SEQ ID NO: 4442461 - DNA, 25 bp, Homo sapien
tggggcctgtgctgctctccgtgcc

SEQ ID NO: 4442462 - DNA, 25 bp, Homo sapien
ttgcacgtggtagcggaagacagcc

SEQ ID NO: 4442463 - DNA, 25 bp, Homo sapien
gttcatgtccagataggtgcgccag

SEQ ID NO: 4442464 - DNA, 25 bp, Homo sapien
gcaatctcctcaaagtagctctggg

SEQ ID NO: 4442465 - DNA, 25 bp, Homo sapien
tctttggccagatcgaagcggttca

SEQ ID NO: 4442466 - DNA, 25 bp, Homo sapien
gagccgcagcgcatacttgaggtcg

SEQ ID NO: 4442467 - DNA, 25 bp, Homo sapien
aatgagctgacgagcatccagccgg

SEQ ID NO: 4442468 - DNA, 25 bp, Homo sapien
tccagataggccagtagtgagtccg

SEQ ID NO: 4442469 - DNA, 25 bp, Homo sapien
tagacatggacacaagcgcggtggt

SEQ ID NO: 4442470 - DNA, 25 bp, Homo sapien
aacggccggtcgatagagcggatca

SEQ ID NO: 4442471 - DNA, 25 bp, Homo sapien
tgcagatcgcctccttgaagtggtc

SEQ ID NO: 4442472 - DNA, 25 bp, Homo sapien
taggccttaagtgagctgcagatcg

SEQ ID NO: 4442473 - DNA, 25 bp, Homo sapien
gcagtcagcatggaacatatggcca

SEQ ID NO: 4442474 - DNA, 25 bp, Homo sapien
cgtcaacgtggtcacagtgtggcaa

SEQ ID NO: 4442475 - DNA, 25 bp, Homo sapien
tgtggcaattgcaagatgactgagc

SEQ ID NO: 4442476 - DNA, 25 bp, Homo sapien
aggctgatggtctggcataactgca

SEQ ID NO: 4442477 - DNA, 25 bp, Homo sapien
atgactgagcagagcctaggaggca

SEQ ID NO: 4442478 - DNA, 25 bp, Homo sapien
tctctcgaggtgaacaggacgtgtg

SEQ ID NO: 4442479 - DNA, 25 bp, Homo sapien
ttccagaggccgcagagtgaacaga

SEQ ID NO: 4442480 - DNA, 25 bp, Homo sapien
gacagaagaggtgctagaggcaggg

SEQ ID NO: 4442481 - DNA, 25 bp, Homo sapien
gaacagacggaagaaaggtgctctc

SEQ ID NO: 4442482 - DNA, 25 bp, Homo sapien
gtgcacaaaagcatgccccaactag

SEQ ID NO: 4442483 - DNA, 25 bp, Homo sapien
catcactttctcacccaatgcccag

SEQ ID NO: 4442484 - DNA, 25 bp, Homo sapien
cccaggacttcgaaggctgccttct

SEQ ID NO: 4442485 - DNA, 25 bp, Homo sapien
agcatgccccaactagcatcacttt

SEQ ID NO: 4442486 - DNA, 25 bp, Homo sapien
agaggcagagttggcggacaaggtg

SEQ ID NO: 4442487 - DNA, 25 bp, Homo sapien
gcccagcatcgacacaaagccacca

SEQ ID NO: 4442488 - DNA, 25 bp, Homo sapien
acaaggtgaaggactgcgtgccaag

SEQ ID NO: 4442489 - DNA, 25 bp, Homo sapien
tccagccccgcctggagatcactca

SEQ ID NO: 4442490 - DNA, 25 bp, Homo sapien
caagtgcggcctggagcctgatggc

SEQ ID NO: 4442491 - DNA, 25 bp, Homo sapien
ggggcagcgccaagtgcggcctgga

SEQ ID NO: 4442492 - DNA, 25 bp, Homo sapien
gggcagcgccaagtgcggcctggag

SEQ ID NO: 4442493 - DNA, 25 bp, Homo sapien
caacagatggacctatggtctctcc

SEQ ID NO: 4442494 - DNA, 25 bp, Homo sapien
cccacataagcaaagctgccagcag

SEQ ID NO: 4442495 - DNA, 25 bp, Homo sapien
caccatggggcaacagatggaccta

SEQ ID NO: 4442496 - DNA, 25 bp, Homo sapien
cagcgtcctttgtggtgctgctccc

SEQ ID NO: 4442497 - DNA, 25 bp, Homo sapien
tcctggtggcttcagcacgtatggc

SEQ ID NO: 4442498 - DNA, 25 bp, Homo sapien
gacctcacggtatggtttctgactg

SEQ ID NO: 4442499 - DNA, 25 bp, Homo sapien
tgtgaacggtttaggtcctggcctg

SEQ ID NO: 4442500 - DNA, 25 bp, Homo sapien
cagtggacatgggttgctggccacc

SEQ ID NO: 4442501 - DNA, 25 bp, Homo sapien
gtcctacgcctacagaaaggaggtg

SEQ ID NO: 4442502 - DNA, 25 bp, Homo sapien
gaaggacctaggatggtgccctgct

SEQ ID NO: 4442503 - DNA, 25 bp, Homo sapien
gctcacgaccagcatgggaacacag

SEQ ID NO: 4442504 - DNA, 25 bp, Homo sapien
caggccctgggctaccttgacagat

SEQ ID NO: 4442505 - DNA, 25 bp, Homo sapien
tccagccttagagggaaagaccagg

SEQ ID NO: 4442506 - DNA, 25 bp, Homo sapien
actgttgtgcaagttctgggctggc

SEQ ID NO: 4442507 - DNA, 25 bp, Homo sapien
tgatcagcggccagcatggtgtctg

SEQ ID NO: 4442508 - DNA, 25 bp, Homo sapien
ctttgactgttcagaggatgccggg

SEQ ID NO: 4442509 - DNA, 25 bp, Homo sapien
tctttccaccaaggcgggtaggaga

SEQ ID NO: 4442510 - DNA, 25 bp, Homo sapien
gattgccgggaacagaacccatctg

SEQ ID NO: 4442511 - DNA, 25 bp, Homo sapien
ccaggcttctggtgttagtcaaaga

SEQ ID NO: 4442512 - DNA, 25 bp, Homo sapien
tagctggtgaaactctgagcccctc

SEQ ID NO: 4442513 - DNA, 25 bp, Homo sapien
agccctggaagaccccaacaggcat

SEQ ID NO: 4442514 - DNA, 25 bp, Homo sapien
gagacccagccctggaagaccccaa

SEQ ID NO: 4442515 - DNA, 25 bp, Homo sapien
aaccaacagagacccagccctggaa

SEQ ID NO: 4442516 - DNA, 25 bp, Homo sapien
ccaacagagacccagccctggaaga

SEQ ID NO: 4442517 - DNA, 25 bp, Homo sapien
aaacggcctcattaggcagctcgga

SEQ ID NO: 4442518 - DNA, 25 bp, Homo sapien
accagagcagttggtgtcccaccca

SEQ ID NO: 4442519 - DNA, 25 bp, Homo sapien
tcggagctcagcacagtaattagtg

SEQ ID NO: 4442520 - DNA, 25 bp, Homo sapien
gatcacactcttagttccatgctgg

SEQ ID NO: 4442521 - DNA, 25 bp, Homo sapien
cacattgaaatgaggccggcgcgtg

SEQ ID NO: 4442522 - DNA, 25 bp, Homo sapien
cagaaggcgtggagatttgcaaact

SEQ ID NO: 4442523 - DNA, 25 bp, Homo sapien
cgccgctgcggtcgctgcggagaag

SEQ ID NO: 4442524 - DNA, 25 bp, Homo sapien
ggctgctccattcgatccattcaca

SEQ ID NO: 4442525 - DNA, 25 bp, Homo sapien
cactcgggactttcggacttgcggg

SEQ ID NO: 4442526 - DNA, 25 bp, Homo sapien
acttgcgggcggaagaacgctacac

SEQ ID NO: 4442527 - DNA, 25 bp, Homo sapien
gtgtttctgtcagcccaaaactggg

SEQ ID NO: 4442528 - DNA, 25 bp, Homo sapien
gcccagtgcgaaggccgcaagtgtt

SEQ ID NO: 4442529 - DNA, 25 bp, Homo sapien
tggcccaggagttaataaaaacatc

SEQ ID NO: 4442530 - DNA, 25 bp, Homo sapien
tggtcctgcttacctgaccctcaag

SEQ ID NO: 4442531 - DNA, 25 bp, Homo sapien
gcctataccctatggatccctggac

SEQ ID NO: 4442532 - DNA, 25 bp, Homo sapien
ctcaagggagacatctagtcccaca

SEQ ID NO: 4442533 - DNA, 25 bp, Homo sapien
gtccggggcgtgcctcccggcgatc

SEQ ID NO: 4442534 - DNA, 25 bp, Homo sapien
agtccggggcgtgcctcccggcgat

SEQ ID NO: 4442535 - DNA, 25 bp, Homo sapien
gcccaggctgcgctcgggagttaat

SEQ ID NO: 4442536 - DNA, 25 bp, Homo sapien
cagccaccatctggcgcgagcgggt

SEQ ID NO: 4442537 - DNA, 25 bp, Homo sapien
catctggcgcgagcgggttggcgtg

SEQ ID NO: 4442538 - DNA, 25 bp, Homo sapien
ccaggctgcgctcgggagttaatgt

SEQ ID NO: 4442539 - DNA, 25 bp, Homo sapien
ccggtgtacgctgcaccaaggcggc

SEQ ID NO: 4442540 - DNA, 25 bp, Homo sapien
ccgctactgaaacctgcgcgctggg

SEQ ID NO: 4442541 - DNA, 25 bp, Homo sapien
ctaatcctggggctgcaagcgggct

SEQ ID NO: 4442542 - DNA, 25 bp, Homo sapien
tcttggcctcgtgttcccggcctgc

SEQ ID NO: 4442543 - DNA, 25 bp, Homo sapien
tcaatctggctctgttcgcgacgcc

SEQ ID NO: 4442544 - DNA, 25 bp, Homo sapien
gggtccctgaaaagaggcgctcctc

SEQ ID NO: 4442545 - DNA, 25 bp, Homo sapien
gcagctgccgctgtaggtaatccag

SEQ ID NO: 4442546 - DNA, 25 bp, Homo sapien
taatccaggtgactacggctgggcg

SEQ ID NO: 4442547 - DNA, 25 bp, Homo sapien
agcagtagcgcccagccagaggcgc

SEQ ID NO: 4442548 - DNA, 25 bp, Homo sapien
cagtagcgcccagccagaggcgctc

SEQ ID NO: 4442549 - DNA, 25 bp, Homo sapien
gcagtagcgcccagccagaggcgct

SEQ ID NO: 4442550 - DNA, 25 bp, Homo sapien
agtagcgcccagccagaggcgctcc

SEQ ID NO: 4442551 - DNA, 25 bp, Homo sapien
tgtcgtcccggacagcgaaggagtt

SEQ ID NO: 4442552 - DNA, 25 bp, Homo sapien
gagacgaccgcctggaagtgcttaa

SEQ ID NO: 4442553 - DNA, 25 bp, Homo sapien
cagtacgccgcgctcgttgatgaac

SEQ ID NO: 4442554 - DNA, 25 bp, Homo sapien
agttggtgcccaataccggcgtgga

SEQ ID NO: 4442555 - DNA, 25 bp, Homo sapien
tggcgcgtgccaagcttcgatgatg

SEQ ID NO: 4442556 - DNA, 25 bp, Homo sapien
gcaggtcgtctcctggcgcgtgcca

SEQ ID NO: 4442557 - DNA, 25 bp, Homo sapien
gtctcctggcgcgtgccaagcttcg

SEQ ID NO: 4442558 - DNA, 25 bp, Homo sapien
cttcgatgatgagcgagaaggtacc

SEQ ID NO: 4442559 - DNA, 25 bp, Homo sapien
ttaactctttcggcgctgcgccgtg

SEQ ID NO: 4442560 - DNA, 25 bp, Homo sapien
tctttcggcgctgcgccgtgtcgcc

SEQ ID NO: 4442561 - DNA, 25 bp, Homo sapien
taactctttcggcgctgcgccgtgt

SEQ ID NO: 4442562 - DNA, 25 bp, Homo sapien
actctttcggcgctgcgccgtgtcg

SEQ ID NO: 4442563 - DNA, 25 bp, Homo sapien
accaatcagcccagttatccagatg

SEQ ID NO: 4442564 - DNA, 25 bp, Homo sapien
cgcctgccagcaagaacaggccaga

SEQ ID NO: 4442565 - DNA, 25 bp, Homo sapien
ctccagaggtgggtaatggttttct

SEQ ID NO: 4442566 - DNA, 25 bp, Homo sapien
tgccagtgacggctggccaatgtcc

SEQ ID NO: 4442567 - DNA, 25 bp, Homo sapien
tgatgagtgcatctggtggcaaggc

SEQ ID NO: 4442568 - DNA, 25 bp, Homo sapien
ctgatgagtgcatctggtggcaagg

SEQ ID NO: 4442569 - DNA, 25 bp, Homo sapien
tggtcattgcgcttcttgcacaggc

SEQ ID NO: 4442570 - DNA, 25 bp, Homo sapien
tctggctggcacacatagtggccga

SEQ ID NO: 4442571 - DNA, 25 bp, Homo sapien
agatgacccggtaagagtagcgcag

SEQ ID NO: 4442572 - DNA, 25 bp, Homo sapien
caaccgggcaggcaggacaagttgc

SEQ ID NO: 4442573 - DNA, 25 bp, Homo sapien
tctgttcatgacagcccgaaagaca

SEQ ID NO: 4442574 - DNA, 25 bp, Homo sapien
gcagtagccattctgttcatgacag

SEQ ID NO: 4442575 - DNA, 25 bp, Homo sapien
gctggcttgctgcagtagccattct

SEQ ID NO: 4442576 - DNA, 25 bp, Homo sapien
gggatgcattcgttacacagccggc

SEQ ID NO: 4442577 - DNA, 25 bp, Homo sapien
agccctcatcacaagtacattgcca

SEQ ID NO: 4442578 - DNA, 25 bp, Homo sapien
cacaagtacattgccagggagtgct

SEQ ID NO: 4442579 - DNA, 25 bp, Homo sapien
tgcaggtgccgtggcgacagccatt

SEQ ID NO: 4442580 - DNA, 25 bp, Homo sapien
aggacccaccgcctcattctgggcc

SEQ ID NO: 4442581 - DNA, 25 bp, Homo sapien
gagaaggacccaccgcctcattctg

SEQ ID NO: 4442582 - DNA, 25 bp, Homo sapien
gaaggacccaccgcctcattctggg

SEQ ID NO: 4442583 - DNA, 25 bp, Homo sapien
tggagaaggacccaccgcctcattc

SEQ ID NO: 4442584 - DNA, 25 bp, Homo sapien
cggacagctgtttaggggagagctg

SEQ ID NO: 4442585 - DNA, 25 bp, Homo sapien
acagctgtttaggggagagctgctc

SEQ ID NO: 4442586 - DNA, 25 bp, Homo sapien
caggtggccggtgggcacaccccac

SEQ ID NO: 4442587 - DNA, 25 bp, Homo sapien
tcaggtggccggtgggcacacccca

SEQ ID NO: 4442588 - DNA, 25 bp, Homo sapien
gtgtagcttcgctgcccactgttgg

SEQ ID NO: 4442589 - DNA, 25 bp, Homo sapien
ccactgttggagcacgttgccccat

SEQ ID NO: 4442590 - DNA, 25 bp, Homo sapien
cagctcacagtccacaccagtgtag

SEQ ID NO: 4442591 - DNA, 25 bp, Homo sapien
gggttgctgtcacactcgctgagct

SEQ ID NO: 4442592 - DNA, 25 bp, Homo sapien
ggcagtggtagccatcctcctggtc

SEQ ID NO: 4442593 - DNA, 25 bp, Homo sapien
cacaatgcaggccatagtagcccgg

SEQ ID NO: 4442594 - DNA, 25 bp, Homo sapien
gacattcacaagcatagttggcccc

SEQ ID NO: 4442595 - DNA, 25 bp, Homo sapien
tctcgcagttggagccggtgaagtt

SEQ ID NO: 4442596 - DNA, 25 bp, Homo sapien
cacagtcgctgacgtggagttcaca

SEQ ID NO: 4442597 - DNA, 25 bp, Homo sapien
agtaggtgcccgtgaatccaggacg

SEQ ID NO: 4442598 - DNA, 25 bp, Homo sapien
ttctccaggtcatggcaagtgccac

SEQ ID NO: 4442599 - DNA, 25 bp, Homo sapien
gcttggacctcggttcaggcactgt

SEQ ID NO: 4442600 - DNA, 25 bp, Homo sapien
cagactggtacatggagtccctggg

SEQ ID NO: 4442601 - DNA, 25 bp, Homo sapien
tgatatccgacactctggcttttca

SEQ ID NO: 4442602 - DNA, 25 bp, Homo sapien
gggagcatatcgctgatatccgaca

SEQ ID NO: 4442603 - DNA, 25 bp, Homo sapien
tgatatcaaacacacagactggtac

SEQ ID NO: 4442604 - DNA, 25 bp, Homo sapien
cccatgggtcaagagtgaccaggcc

SEQ ID NO: 4442605 - DNA, 25 bp, Homo sapien
agaaggaaaggcgagcccagcactc

SEQ ID NO: 4442606 - DNA, 25 bp, Homo sapien
tgaccaggccactttccctcccaca

SEQ ID NO: 4442607 - DNA, 25 bp, Homo sapien
ccttcaggaatggcccatgggtcaa

SEQ ID NO: 4442608 - DNA, 25 bp, Homo sapien
cccatccaggatgcaatgtaaacaa

SEQ ID NO: 4442609 - DNA, 25 bp, Homo sapien
tcttggcaagttcacagtctgtccg

SEQ ID NO: 4442610 - DNA, 25 bp, Homo sapien
tctgatgccagacagacacccaaag

SEQ ID NO: 4442611 - DNA, 25 bp, Homo sapien
tggtgcagctgccaatctgatgcca

SEQ ID NO: 4442612 - DNA, 25 bp, Homo sapien
gggcccaactgtcgccgtggagcct

SEQ ID NO: 4442613 - DNA, 25 bp, Homo sapien
gcaagagacgcacccagtggttttc

SEQ ID NO: 4442614 - DNA, 25 bp, Homo sapien
ctcctttctgatttgggcccaactg

SEQ ID NO: 4442615 - DNA, 25 bp, Homo sapien
ggagcctgggccaaaggcacttttg

SEQ ID NO: 4442616 - DNA, 25 bp, Homo sapien
gctcggctcctcaacgaatggaaga

SEQ ID NO: 4442617 - DNA, 25 bp, Homo sapien
gccaaatccaagtgtctgcacgggt

SEQ ID NO: 4442618 - DNA, 25 bp, Homo sapien
tagacggacattcttgcccaaaggg

SEQ ID NO: 4442619 - DNA, 25 bp, Homo sapien
gccaggcctgcatacagtagttgga

SEQ ID NO: 4442620 - DNA, 25 bp, Homo sapien
ggagccccataagctttttcaggct

SEQ ID NO: 4442621 - DNA, 25 bp, Homo sapien
gggggcactgtaccaactcaaagtc

SEQ ID NO: 4442622 - DNA, 25 bp, Homo sapien
ggcactgtaccaactcaaagtcagc

SEQ ID NO: 4442623 - DNA, 25 bp, Homo sapien
actcaaagtcagcaggcaaggaagg

SEQ ID NO: 4442624 - DNA, 25 bp, Homo sapien
gagtgaggtcgtgttgttcttcccc

SEQ ID NO: 4442625 - DNA, 25 bp, Homo sapien
caggctgtgggaacggttccctgaa

SEQ ID NO: 4442626 - DNA, 25 bp, Homo sapien
catgggagcctcgtcatcttgcctt

SEQ ID NO: 4442627 - DNA, 25 bp, Homo sapien
gataccctgtgtgtacagtgaaggg

SEQ ID NO: 4442628 - DNA, 25 bp, Homo sapien
gtgcagcccgtcacagcctggtgtt

SEQ ID NO: 4442629 - DNA, 25 bp, Homo sapien
acgtgcagggctgcgggtgtcctac

SEQ ID NO: 4442630 - DNA, 25 bp, Homo sapien
tctctgcgagtctggcagcctgtgc

SEQ ID NO: 4442631 - DNA, 25 bp, Homo sapien
gctttgccagccaactcctctccgg

SEQ ID NO: 4442632 - DNA, 25 bp, Homo sapien
ccgaggaagggacagtcacagttcc

SEQ ID NO: 4442633 - DNA, 25 bp, Homo sapien
agttcccccagtgaatcatttccac

SEQ ID NO: 4442634 - DNA, 25 bp, Homo sapien
cttcccggaatgcagcaagccacgt

SEQ ID NO: 4442635 - DNA, 25 bp, Homo sapien
gggccgctgatcctgtggatccaga

SEQ ID NO: 4442636 - DNA, 25 bp, Homo sapien
tcggggcgccctgggcgcgagggag

SEQ ID NO: 4442637 - DNA, 25 bp, Homo sapien
gaaggccgctgggacctcgcaggcg

SEQ ID NO: 4442638 - DNA, 25 bp, Homo sapien
cgcgagggagggcgcagccgcccag

SEQ ID NO: 4442639 - DNA, 25 bp, Homo sapien
ggccgctgggacctcgcaggcgcat

SEQ ID NO: 4442640 - DNA, 25 bp, Homo sapien
aagtcgggctgtaacaaagagcgcg

SEQ ID NO: 4442641 - DNA, 25 bp, Homo sapien
gaagctcgcggccttcggcggcttc

SEQ ID NO: 4442642 - DNA, 25 bp, Homo sapien
gtcggctgccgcaaacaggaagtcg

SEQ ID NO: 4442643 - DNA, 25 bp, Homo sapien
gagcctccgagaagctcgcggcctt

SEQ ID NO: 4442644 - DNA, 25 bp, Homo sapien
ctgcgacggcgggggcaggggaaag

SEQ ID NO: 4442645 - DNA, 25 bp, Homo sapien
cctcctcgaccccattctcttccct

SEQ ID NO: 4442646 - DNA, 25 bp, Homo sapien
gcctgttgggtggcgagggggactg

SEQ ID NO: 4442647 - DNA, 25 bp, Homo sapien
tgtctctggaccaggatggccggag

SEQ ID NO: 4442648 - DNA, 25 bp, Homo sapien
gaggcctgttgggtggcgaggggga

SEQ ID NO: 4442649 - DNA, 25 bp, Homo sapien
gacgacaaagaggtcggcttcctta

SEQ ID NO: 4442650 - DNA, 25 bp, Homo sapien
gaagcacctggaccagacgacaaag

SEQ ID NO: 4442651 - DNA, 25 bp, Homo sapien
gatgaagttgccttataaagctgct

SEQ ID NO: 4442652 - DNA, 25 bp, Homo sapien
tcacctcctggtgttagtcagcatg

SEQ ID NO: 4442653 - DNA, 25 bp, Homo sapien
aggaatctccacagaagctggccca

SEQ ID NO: 4442654 - DNA, 25 bp, Homo sapien
gatctgcaatgtctccctgggaaca

SEQ ID NO: 4442655 - DNA, 25 bp, Homo sapien
tatcccatgtcctgtgtaacacaag

SEQ ID NO: 4442656 - DNA, 25 bp, Homo sapien
tatggttcatggttgaaggcccaag

SEQ ID NO: 4442657 - DNA, 25 bp, Homo sapien
ccgaccggcagtcactttggaggtg

SEQ ID NO: 4442658 - DNA, 25 bp, Homo sapien
atgggctacgccccggaccaggtgt

SEQ ID NO: 4442659 - DNA, 25 bp, Homo sapien
agagcctgttagagcgcttggaccg

SEQ ID NO: 4442660 - DNA, 25 bp, Homo sapien
gaccaggtgtgggacccctcgagcc

SEQ ID NO: 4442661 - DNA, 25 bp, Homo sapien
agcaagggcgcctcggattgcgtca

SEQ ID NO: 4442662 - DNA, 25 bp, Homo sapien
ttgccgctagtgcatctggccgagt

SEQ ID NO: 4442663 - DNA, 25 bp, Homo sapien
actcagtcccaagtcgagtccaggg

SEQ ID NO: 4442664 - DNA, 25 bp, Homo sapien
caaacctggcaggagtgatgcaacg

SEQ ID NO: 4442665 - DNA, 25 bp, Homo sapien
cctggcacagggataggcccaggcg

SEQ ID NO: 4442666 - DNA, 25 bp, Homo sapien
gcctggcaccgctcggtagctccag

SEQ ID NO: 4442667 - DNA, 25 bp, Homo sapien
acggaaagaccgacggacgcacaca

SEQ ID NO: 4442668 - DNA, 25 bp, Homo sapien
ctggtctccggcgtgggcacggaaa

SEQ ID NO: 4442669 - DNA, 25 bp, Homo sapien
ctgcgaggtgggcggggtgttcggg

SEQ ID NO: 4442670 - DNA, 25 bp, Homo sapien
tacccgaaaatccacagcgcttgag

SEQ ID NO: 4442671 - DNA, 25 bp, Homo sapien
ccacacggctgtcgctgtaggcgaa

SEQ ID NO: 4442672 - DNA, 25 bp, Homo sapien
tgccccgatggaaggtgtctccctg

SEQ ID NO: 4442673 - DNA, 25 bp, Homo sapien
tccctgccagaaacggcggctgtag

SEQ ID NO: 4442674 - DNA, 25 bp, Homo sapien
ttcaaggagcgtcaccacacggcca

SEQ ID NO: 4442675 - DNA, 25 bp, Homo sapien
ctcatgatcttcaaggagcgtcacc

SEQ ID NO: 4442676 - DNA, 25 bp, Homo sapien
tgatcttcaaggagcgtcaccacac

SEQ ID NO: 4442677 - DNA, 25 bp, Homo sapien
catgatcttcaaggagcgtcaccac

SEQ ID NO: 4442678 - DNA, 25 bp, Homo sapien
gaaggtgacctccttggtatcgtag

SEQ ID NO: 4442679 - DNA, 25 bp, Homo sapien
tattcaaggttgtggccggagaagc

SEQ ID NO: 4442680 - DNA, 25 bp, Homo sapien
gccagacgcagcaagtattcaaggt

SEQ ID NO: 4442681 - DNA, 25 bp, Homo sapien
caggatctgcgtggcaatggcctct

SEQ ID NO: 4442682 - DNA, 25 bp, Homo sapien
gaattcccagggctatggatggctg

SEQ ID NO: 4442683 - DNA, 25 bp, Homo sapien
gagaaagaaccacattccggcacag

SEQ ID NO: 4442684 - DNA, 25 bp, Homo sapien
gatcgaggctcttggagactccctg

SEQ ID NO: 4442685 - DNA, 25 bp, Homo sapien
ccagggcctgtagtgatgagcttcc

SEQ ID NO: 4442686 - DNA, 25 bp, Homo sapien
cgcaatcaggcacccaccaggggcg

SEQ ID NO: 4442687 - DNA, 25 bp, Homo sapien
gtggtctgcgctgccgcaatcaggc

SEQ ID NO: 4442688 - DNA, 25 bp, Homo sapien
gccagcagcgtggtctgcgctgccg

SEQ ID NO: 4442689 - DNA, 25 bp, Homo sapien
cagcgtggtctgcgctgccgcaatc

SEQ ID NO: 4442690 - DNA, 25 bp, Homo sapien
aacaccattaggctgtacccaggaa

SEQ ID NO: 4442691 - DNA, 25 bp, Homo sapien
caccattaggctgtacccaggaaag

SEQ ID NO: 4442692 - DNA, 25 bp, Homo sapien
accaacaccattaggctgtacccag

SEQ ID NO: 4442693 - DNA, 25 bp, Homo sapien
accattaggctgtacccaggaaagc

SEQ ID NO: 4442694 - DNA, 25 bp, Homo sapien
ctgcagctggcctgtgagcaggaac

SEQ ID NO: 4442695 - DNA, 25 bp, Homo sapien
gaaacccccataggcgagggcctgc

SEQ ID NO: 4442696 - DNA, 25 bp, Homo sapien
gtgagcaggaactgggtctccctct

SEQ ID NO: 4442697 - DNA, 25 bp, Homo sapien
tctccctctggaaacccccataggc

SEQ ID NO: 4442698 - DNA, 25 bp, Homo sapien
acccctcaatgatcggcacggtggg

SEQ ID NO: 4442699 - DNA, 25 bp, Homo sapien
atgatctggaccaccacaaccccag

SEQ ID NO: 4442700 - DNA, 25 bp, Homo sapien
ccaatgaacccctcaatgatcggca

SEQ ID NO: 4442701 - DNA, 25 bp, Homo sapien
ttattgccaatgaacccctcaatga

SEQ ID NO: 4442702 - DNA, 25 bp, Homo sapien
cagactctctggtccggaaacaggg

SEQ ID NO: 4442703 - DNA, 25 bp, Homo sapien
tggaggacggtaaccatctgggccc

SEQ ID NO: 4442704 - DNA, 25 bp, Homo sapien
agccaagtcttaaacctctcacggg

SEQ ID NO: 4442705 - DNA, 25 bp, Homo sapien
cagtggtctttggatggcttgcccc

SEQ ID NO: 4442706 - DNA, 25 bp, Homo sapien
tctggcccgacttactggagagtag

SEQ ID NO: 4442707 - DNA, 25 bp, Homo sapien
ttgccagcgcaaggagaactgtatg

SEQ ID NO: 4442708 - DNA, 25 bp, Homo sapien
tgcccttgaagtgacacaggccttg

SEQ ID NO: 4442709 - DNA, 25 bp, Homo sapien
gagtgggcagccttgtaccctctgg

SEQ ID NO: 4442710 - DNA, 25 bp, Homo sapien
gtgcctcattctcctaaactacaaa

SEQ ID NO: 4442711 - DNA, 25 bp, Homo sapien
caaaatatgtgagtcttaacagcat

SEQ ID NO: 4442712 - DNA, 25 bp, Homo sapien
cttagttaagcaatgtgatcttgga

SEQ ID NO: 4442713 - DNA, 25 bp, Homo sapien
cagtggtgcttagttaagcaatgtg

SEQ ID NO: 4442714 - DNA, 25 bp, Homo sapien
ggagactgttaggtcactccccacc

SEQ ID NO: 4442715 - DNA, 25 bp, Homo sapien
gatatatgcatactagtcctgggct

SEQ ID NO: 4442716 - DNA, 25 bp, Homo sapien
gaccaaggtaggtaggcaatgccaa

SEQ ID NO: 4442717 - DNA, 25 bp, Homo sapien
gaaaacagggcgagcttcctagaag

SEQ ID NO: 4442718 - DNA, 25 bp, Homo sapien
tcaccgatacttatgtttgacattg

SEQ ID NO: 4442719 - DNA, 25 bp, Homo sapien
cattgatacgtcatcagttagtcac

SEQ ID NO: 4442720 - DNA, 25 bp, Homo sapien
aatagttctttcaccgatacttatg

SEQ ID NO: 4442721 - DNA, 25 bp, Homo sapien
cagttagtcacttcagcagtattca

SEQ ID NO: 4442722 - DNA, 25 bp, Homo sapien
tgaatgctgatggtttaccgagcca

SEQ ID NO: 4442723 - DNA, 25 bp, Homo sapien
tagtgacgggtctgttgaacttcgt

SEQ ID NO: 4442724 - DNA, 25 bp, Homo sapien
aaagccaggctccactagtgacggg

SEQ ID NO: 4442725 - DNA, 25 bp, Homo sapien
gagccataattatcctgagtgcagc

SEQ ID NO: 4442726 - DNA, 25 bp, Homo sapien
taggagggacaataataacacctac

SEQ ID NO: 4442727 - DNA, 25 bp, Homo sapien
gaggtgattggaagctgttacagaa

SEQ ID NO: 4442728 - DNA, 25 bp, Homo sapien
ctgtgtcactttagggaccttaaca

SEQ ID NO: 4442729 - DNA, 25 bp, Homo sapien
ggtctgccacctactgcctgtgtca

SEQ ID NO: 4442730 - DNA, 25 bp, Homo sapien
gaaaatgccccatggaatgaaaagc

SEQ ID NO: 4442731 - DNA, 25 bp, Homo sapien
gcaaattggattggcacacttgata

SEQ ID NO: 4442732 - DNA, 25 bp, Homo sapien
gaaaagcaaattggattggcacact

SEQ ID NO: 4442733 - DNA, 25 bp, Homo sapien
tactgggaagctgggtattctgaaa

SEQ ID NO: 4442734 - DNA, 25 bp, Homo sapien
gttatgtgccttagccatggctggc

SEQ ID NO: 4442735 - DNA, 25 bp, Homo sapien
ggagtatgtgagcaactctctttca

SEQ ID NO: 4442736 - DNA, 25 bp, Homo sapien
gttagaaactcacattgcgggtatc

SEQ ID NO: 4442737 - DNA, 25 bp, Homo sapien
tgcgggtatcaaagctctgtgttgc

SEQ ID NO: 4442738 - DNA, 25 bp, Homo sapien
ggagtatgtgaaggacttctgcccc

SEQ ID NO: 4442739 - DNA, 25 bp, Homo sapien
taaagtaggtcacagcctaggaatc

SEQ ID NO: 4442740 - DNA, 25 bp, Homo sapien
tctataaagggagcagagttagctc

SEQ ID NO: 4442741 - DNA, 25 bp, Homo sapien
gcagagaacagctattcaacctgag

SEQ ID NO: 4442742 - DNA, 25 bp, Homo sapien
agtgttttaaggctgttgctgaagt

SEQ ID NO: 4442743 - DNA, 25 bp, Homo sapien
ggttctggctcctaagttcccatta

SEQ ID NO: 4442744 - DNA, 25 bp, Homo sapien
ttcccattacaggagtagatggctt

SEQ ID NO: 4442745 - DNA, 25 bp, Homo sapien
cgttgtgggaatctcttgtggcttt

SEQ ID NO: 4442746 - DNA, 25 bp, Homo sapien
tagatggcttattgctggcgttgtg

SEQ ID NO: 4442747 - DNA, 25 bp, Homo sapien
gagcggttacgcttccttcagctag

SEQ ID NO: 4442748 - DNA, 25 bp, Homo sapien
gctagagcaggaacatacgtgtcct

SEQ ID NO: 4442749 - DNA, 25 bp, Homo sapien
caaaatactgcagcgcttggagcgg

SEQ ID NO: 4442750 - DNA, 25 bp, Homo sapien
ggcagcccctgaaggtactgtagtt

SEQ ID NO: 4442751 - DNA, 25 bp, Homo sapien
aattatagttggcattcatttgcat

SEQ ID NO: 4442752 - DNA, 25 bp, Homo sapien
gcctgctcactgagctgccatcttt

SEQ ID NO: 4442753 - DNA, 25 bp, Homo sapien
agtggctactcagaccaggttgtcc

SEQ ID NO: 4442754 - DNA, 25 bp, Homo sapien
caggttgtccatcagcggagatcag

SEQ ID NO: 4442755 - DNA, 25 bp, Homo sapien
gatttgggtcagaactttcgcacac

SEQ ID NO: 4442756 - DNA, 25 bp, Homo sapien
tgtggtacctctggccagagttatt

SEQ ID NO: 4442757 - DNA, 25 bp, Homo sapien
ggtttctactctagcgttagccagg

SEQ ID NO: 4442758 - DNA, 25 bp, Homo sapien
tcttgtgttctaccctgcattgcta

SEQ ID NO: 4442759 - DNA, 25 bp, Homo sapien
ttctctgccacaaagaatgttttaa

SEQ ID NO: 4442760 - DNA, 25 bp, Homo sapien
tactggcaggctgtataattaacag

SEQ ID NO: 4442761 - DNA, 25 bp, Homo sapien
ttaacagaaagctatttctctgcca

SEQ ID NO: 4442762 - DNA, 25 bp, Homo sapien
cagcccaactatactttttaatagg

SEQ ID NO: 4442763 - DNA, 25 bp, Homo sapien
attacaagtgctcaccaccatgtcc

SEQ ID NO: 4442764 - DNA, 25 bp, Homo sapien
gttatccacctgcctctgcctccca

SEQ ID NO: 4442765 - DNA, 25 bp, Homo sapien
ttacaagtgctcaccaccatgtccg

SEQ ID NO: 4442766 - DNA, 25 bp, Homo sapien
ttatccacctgcctctgcctcccaa

SEQ ID NO: 4442767 - DNA, 25 bp, Homo sapien
tgattttgggtctctgtaatagtga

SEQ ID NO: 4442768 - DNA, 25 bp, Homo sapien
taatgaagttgcacagttaagatag

SEQ ID NO: 4442769 - DNA, 25 bp, Homo sapien
gacatgatctctgtgattttgggtc

SEQ ID NO: 4442770 - DNA, 25 bp, Homo sapien
tgatgggtttcctgtagttggagct

SEQ ID NO: 4442771 - DNA, 25 bp, Homo sapien
tgccttgatctcctaccgtcagaaa

SEQ ID NO: 4442772 - DNA, 25 bp, Homo sapien
gacagtggacaatgagcccagtttt

SEQ ID NO: 4442773 - DNA, 25 bp, Homo sapien
gacttacccttcacctactgtactg

SEQ ID NO: 4442774 - DNA, 25 bp, Homo sapien
tttggacagtaagaaatagatgcca

SEQ ID NO: 4442775 - DNA, 25 bp, Homo sapien
tgctaagtgatgaatccagcgaggc

SEQ ID NO: 4442776 - DNA, 25 bp, Homo sapien
ccagcgaggctgattctcagagtga

SEQ ID NO: 4442777 - DNA, 25 bp, Homo sapien
tgaatattcaccctctgctttatag

SEQ ID NO: 4442778 - DNA, 25 bp, Homo sapien
catgcttcgactacacaaatataag

SEQ ID NO: 4442779 - DNA, 25 bp, Homo sapien
gcgacgagcagtgagtgtgggcggg

SEQ ID NO: 4442780 - DNA, 25 bp, Homo sapien
gtaagccacccgtgtagcggctcga

SEQ ID NO: 4442781 - DNA, 25 bp, Homo sapien
acggcagcggcactacgggtggcca

SEQ ID NO: 4442782 - DNA, 25 bp, Homo sapien
gatggcatggatcagggtctcccct

SEQ ID NO: 4442783 - DNA, 25 bp, Homo sapien
attttctcctgcgagatctgcttgc

SEQ ID NO: 4442784 - DNA, 25 bp, Homo sapien
ctcactgtagcgatgacatcctcct

SEQ ID NO: 4442785 - DNA, 25 bp, Homo sapien
gccgcctttcggcaatcttcgccag

SEQ ID NO: 4442786 - DNA, 25 bp, Homo sapien
tttcggcaatcttcgccagtcccag

SEQ ID NO: 4442787 - DNA, 25 bp, Homo sapien
tcaggattgctgctaagtgagccat

SEQ ID NO: 4442788 - DNA, 25 bp, Homo sapien
ggcaagaaatcgtgtaatctcactg

SEQ ID NO: 4442789 - DNA, 25 bp, Homo sapien
catgaactggctgcgttttcaacct

SEQ ID NO: 4442790 - DNA, 25 bp, Homo sapien
ggtggtttcttcaggttcgtcataa

SEQ ID NO: 4442791 - DNA, 25 bp, Homo sapien
tcgcgcacggcaggggaccttgcgg

SEQ ID NO: 4442792 - DNA, 25 bp, Homo sapien
cctcgcgcacggcaggggaccttgc

SEQ ID NO: 4442793 - DNA, 25 bp, Homo sapien
gctgcctcgcgcacggcaggggacc

SEQ ID NO: 4442794 - DNA, 25 bp, Homo sapien
tgcctcgcgcacggcaggggacctt

SEQ ID NO: 4442795 - DNA, 25 bp, Homo sapien
tccgattttccagggtgcacctcat

SEQ ID NO: 4442796 - DNA, 25 bp, Homo sapien
cgttccgattttccagggtgcacct

SEQ ID NO: 4442797 - DNA, 25 bp, Homo sapien
ttccgattttccagggtgcacctca

SEQ ID NO: 4442798 - DNA, 25 bp, Homo sapien
gttccgattttccagggtgcacctc

SEQ ID NO: 4442799 - DNA, 25 bp, Homo sapien
gtctctgtagcagcatacgcattga

SEQ ID NO: 4442800 - DNA, 25 bp, Homo sapien
catcaggcccagctttaaatgtggg

SEQ ID NO: 4442801 - DNA, 25 bp, Homo sapien
aggtggtctgctttgtctctcagcc

SEQ ID NO: 4442802 - DNA, 25 bp, Homo sapien
acgcattgatttcattcaccaggtg

SEQ ID NO: 4442803 - DNA, 25 bp, Homo sapien
ttcgctgacgtgttctttctaactg

SEQ ID NO: 4442804 - DNA, 25 bp, Homo sapien
gatgggtttcgctgacgtgttcttt

SEQ ID NO: 4442805 - DNA, 25 bp, Homo sapien
tcagatgggtttcgctgacgtgttc

SEQ ID NO: 4442806 - DNA, 25 bp, Homo sapien
tttcattttcacaatggtcccataa

SEQ ID NO: 4442807 - DNA, 25 bp, Homo sapien
cgacttgttcggctagcatccattg

SEQ ID NO: 4442808 - DNA, 25 bp, Homo sapien
tgacgacttgttcggctagcatcca

SEQ ID NO: 4442809 - DNA, 25 bp, Homo sapien
ctccagatgacgacttgttcggcta

SEQ ID NO: 4442810 - DNA, 25 bp, Homo sapien
cagatgacgacttgttcggctagca

SEQ ID NO: 4442811 - DNA, 25 bp, Homo sapien
aattcgctcttacagtatctaaaca

SEQ ID NO: 4442812 - DNA, 25 bp, Homo sapien
attcgctcttacagtatctaaacaa

SEQ ID NO: 4442813 - DNA, 25 bp, Homo sapien
ttacagctgaaatttatgccttatg

SEQ ID NO: 4442814 - DNA, 25 bp, Homo sapien
ggtgttctatgatgaggcaacattc

SEQ ID NO: 4442815 - DNA, 25 bp, Homo sapien
tctatgatgaggcaacattccacca

SEQ ID NO: 4442816 - DNA, 25 bp, Homo sapien
gctgaaatttatgccttatgtgtat

SEQ ID NO: 4442817 - DNA, 25 bp, Homo sapien
ataactttgatatgcctgcctggga

SEQ ID NO: 4442818 - DNA, 25 bp, Homo sapien
aattccttaccaaaagagaagcatc

SEQ ID NO: 4442819 - DNA, 25 bp, Homo sapien
tgaattttctaattatcccaaatga

SEQ ID NO: 4442820 - DNA, 25 bp, Homo sapien
gagaagcatcatatacactgaaagt

SEQ ID NO: 4442821 - DNA, 25 bp, Homo sapien
tggtgtcttcgagggtgtgcttcag

SEQ ID NO: 4442822 - DNA, 25 bp, Homo sapien
tgtcttcgagggtgtgcttcagcat

SEQ ID NO: 4442823 - DNA, 25 bp, Homo sapien
gtctgtggtgtcttcgagggtgtgc

SEQ ID NO: 4442824 - DNA, 25 bp, Homo sapien
attggtctgtggtgtcttcgagggt

SEQ ID NO: 4442825 - DNA, 25 bp, Homo sapien
ctaaatgttctgcttcttccattta

SEQ ID NO: 4442826 - DNA, 25 bp, Homo sapien
taaatgttctgcttcttccatttag

SEQ ID NO: 4442827 - DNA, 25 bp, Homo sapien
gctcaggagccaacgtcagcgttcg

SEQ ID NO: 4442828 - DNA, 25 bp, Homo sapien
ggcgatgccactcggtcgctaacga

SEQ ID NO: 4442829 - DNA, 25 bp, Homo sapien
agttccagccccgaatgaatcagcc

SEQ ID NO: 4442830 - DNA, 25 bp, Homo sapien
taaaagggcaacgtcattgaccaac

SEQ ID NO: 4442831 - DNA, 25 bp, Homo sapien
tcttgatctcctcgagctcttcgtc

SEQ ID NO: 4442832 - DNA, 25 bp, Homo sapien
cttcttgatctcctcgagctcttcg

SEQ ID NO: 4442833 - DNA, 25 bp, Homo sapien
tcgagctcttcgtcccgcagtaacg

SEQ ID NO: 4442834 - DNA, 25 bp, Homo sapien
tcttcgtcccgcagtaacgtggagg

SEQ ID NO: 4442835 - DNA, 25 bp, Homo sapien
ccagcctgaggcgcccggcgttccc

SEQ ID NO: 4442836 - DNA, 25 bp, Homo sapien
cagcctgaggcgcccggcgttccca

SEQ ID NO: 4442837 - DNA, 25 bp, Homo sapien
gcctgaggcgcccggcgttcccacc

SEQ ID NO: 4442838 - DNA, 25 bp, Homo sapien
agcctgaggcgcccggcgttcccac

SEQ ID NO: 4442839 - DNA, 25 bp, Homo sapien
cagagcctcaactttgtcgcccagg

SEQ ID NO: 4442840 - DNA, 25 bp, Homo sapien
gggacagagcctcaactttgtcgcc

SEQ ID NO: 4442841 - DNA, 25 bp, Homo sapien
tttgggggacagagcctcaactttg

SEQ ID NO: 4442842 - DNA, 25 bp, Homo sapien
ttgggggacagagcctcaactttgt

SEQ ID NO: 4442843 - DNA, 25 bp, Homo sapien
ggactgggatgtcgaaactcttatc

SEQ ID NO: 4442844 - DNA, 25 bp, Homo sapien
gactgggatgtcgaaactcttatct

SEQ ID NO: 4442845 - DNA, 25 bp, Homo sapien
taggactgggatgtcgaaactctta

SEQ ID NO: 4442846 - DNA, 25 bp, Homo sapien
cagtaggactgggatgtcgaaactc

SEQ ID NO: 4442847 - DNA, 25 bp, Homo sapien
gaaccggctgtagaggcgagtgatt

SEQ ID NO: 4442848 - DNA, 25 bp, Homo sapien
caaattataccaaataactgcaaag

SEQ ID NO: 4442849 - DNA, 25 bp, Homo sapien
tacttctgtggcaaattataccaaa

SEQ ID NO: 4442850 - DNA, 25 bp, Homo sapien
tgcaccaactcagaagtggaaggag

SEQ ID NO: 4442851 - DNA, 25 bp, Homo sapien
cactttaatagctgccaagtgtttc

SEQ ID NO: 4442852 - DNA, 25 bp, Homo sapien
agaaggcattgatgatccggtcccc

SEQ ID NO: 4442853 - DNA, 25 bp, Homo sapien
gtcccccagtgggttgatggcaagt

SEQ ID NO: 4442854 - DNA, 25 bp, Homo sapien
tggaatcctctggaaatcttcccgg

SEQ ID NO: 4442855 - DNA, 25 bp, Homo sapien
tgggttgatggcaagttctggaatc

SEQ ID NO: 4442856 - DNA, 25 bp, Homo sapien
tggtgcattcagaggtaaagggtca

SEQ ID NO: 4442857 - DNA, 25 bp, Homo sapien
tacaagctgcgctgttcaatactgc

SEQ ID NO: 4442858 - DNA, 25 bp, Homo sapien
attcttagcaaacacacactggtgc

SEQ ID NO: 4442859 - DNA, 25 bp, Homo sapien
catctggttatgtgcactgaaaaca

SEQ ID NO: 4442860 - DNA, 25 bp, Homo sapien
tggtacttaagcttggagaaaatct

SEQ ID NO: 4442861 - DNA, 25 bp, Homo sapien
ttaaaaaagaatgccccatgtaaca

SEQ ID NO: 4442862 - DNA, 25 bp, Homo sapien
ttatttatctaaggcagatggcctg

SEQ ID NO: 4442863 - DNA, 25 bp, Homo sapien
tgtgccacaggctaatcaataaccc

SEQ ID NO: 4442864 - DNA, 25 bp, Homo sapien
cggaaatgagccaaagttcgcatga

SEQ ID NO: 4442865 - DNA, 25 bp, Homo sapien
tgagccaaagttcgcatgaatccac

SEQ ID NO: 4442866 - DNA, 25 bp, Homo sapien
caaagttcgcatgaatccacggaag

SEQ ID NO: 4442867 - DNA, 25 bp, Homo sapien
tcaatggggcggaaatgagccaaag

SEQ ID NO: 4442868 - DNA, 25 bp, Homo sapien
tgtaacagctcatcacgggagatct

SEQ ID NO: 4442869 - DNA, 25 bp, Homo sapien
ctgtaacagctcatcacgggagatc

SEQ ID NO: 4442870 - DNA, 25 bp, Homo sapien
cccatatgtggcaactttcaagaaa

SEQ ID NO: 4442871 - DNA, 25 bp, Homo sapien
catgcaactatagagtgactgctac

SEQ ID NO: 4442872 - DNA, 25 bp, Homo sapien
tgggccagagcataaacacatgcaa

SEQ ID NO: 4442873 - DNA, 25 bp, Homo sapien
cgcttctcgctgaagaaattcccaa

SEQ ID NO: 4442874 - DNA, 25 bp, Homo sapien
taatatacaataagctgtacatatt

SEQ ID NO: 4442875 - DNA, 25 bp, Homo sapien
ggagaagagtaactatctttattga

SEQ ID NO: 4442876 - DNA, 25 bp, Homo sapien
gagaagagtaactatctttattgaa

SEQ ID NO: 4442877 - DNA, 25 bp, Homo sapien
gaagagtaactatctttattgaagt

SEQ ID NO: 4442878 - DNA, 25 bp, Homo sapien
attgcaccttggctataatacatcc

SEQ ID NO: 4442879 - DNA, 25 bp, Homo sapien
ttggtgtgggtgaaatatattggtt

SEQ ID NO: 4442880 - DNA, 25 bp, Homo sapien
ttctagtataattgcaccttggcta

SEQ ID NO: 4442881 - DNA, 25 bp, Homo sapien
ttttctatggaaaagaccactcagt

SEQ ID NO: 4442882 - DNA, 25 bp, Homo sapien
gagcgaaattacaagccaggtgtgg

SEQ ID NO: 4442883 - DNA, 25 bp, Homo sapien
acaagagcgaaattacaagccaggt

SEQ ID NO: 4442884 - DNA, 25 bp, Homo sapien
tgaatagttgctgcactccagagta

SEQ ID NO: 4442885 - DNA, 25 bp, Homo sapien
taaaaatcgatttcatgggccgggc

SEQ ID NO: 4442886 - DNA, 25 bp, Homo sapien
taatatgagctatggatgccagggc

SEQ ID NO: 4442887 - DNA, 25 bp, Homo sapien
gactgtcaggcaatatggaaaggct

SEQ ID NO: 4442888 - DNA, 25 bp, Homo sapien
aacattcttgttgcgtgagcctaac

SEQ ID NO: 4442889 - DNA, 25 bp, Homo sapien
tatgaaatgggagacagggtacctt

SEQ ID NO: 4442890 - DNA, 25 bp, Homo sapien
tgagatatttactccgaccatcatg

SEQ ID NO: 4442891 - DNA, 25 bp, Homo sapien
ttactccgaccatcatgcgtagcac

SEQ ID NO: 4442892 - DNA, 25 bp, Homo sapien
gatatttactccgaccatcatgcgt

SEQ ID NO: 4442893 - DNA, 25 bp, Homo sapien
tatttactccgaccatcatgcgtag

SEQ ID NO: 4442894 - DNA, 25 bp, Homo sapien
agaaatcggatgctcattttctgtt

SEQ ID NO: 4442895 - DNA, 25 bp, Homo sapien
ttagtgaagaaatcggatgctcatt

SEQ ID NO: 4442896 - DNA, 25 bp, Homo sapien
gtgaagaaatcggatgctcattttc

SEQ ID NO: 4442897 - DNA, 25 bp, Homo sapien
aaatcggatgctcattttctgttct

SEQ ID NO: 4442898 - DNA, 25 bp, Homo sapien
tgcatgaggctttatagggtgccca

SEQ ID NO: 4442899 - DNA, 25 bp, Homo sapien
gccattctggtggtaacggtgtccc

SEQ ID NO: 4442900 - DNA, 25 bp, Homo sapien
tatataggacatagcttgtggtgcc

SEQ ID NO: 4442901 - DNA, 25 bp, Homo sapien
gattaccaaaaagctcctgaagagg

SEQ ID NO: 4442902 - DNA, 25 bp, Homo sapien
tgtgcaaaacttcaagacactaagg

SEQ ID NO: 4442903 - DNA, 25 bp, Homo sapien
aaatattttggactggggccaggcg

SEQ ID NO: 4442904 - DNA, 25 bp, Homo sapien
caagacactaaggaaacaatcttta

SEQ ID NO: 4442905 - DNA, 25 bp, Homo sapien
aaagaattttgtgcaaaacttcaag

SEQ ID NO: 4442906 - DNA, 25 bp, Homo sapien
ttacccaggtatggtggcacacgtc

SEQ ID NO: 4442907 - DNA, 25 bp, Homo sapien
actccctctccactaaaaatgcaaa

SEQ ID NO: 4442908 - DNA, 25 bp, Homo sapien
tgaaactccctctccactaaaaatg

SEQ ID NO: 4442909 - DNA, 25 bp, Homo sapien
gaaactccctctccactaaaaatgc

SEQ ID NO: 4442910 - DNA, 25 bp, Homo sapien
gagtcagaaagtcaaccaagggcag

SEQ ID NO: 4442911 - DNA, 25 bp, Homo sapien
cagggagctaatgtaaccaggcagc

SEQ ID NO: 4442912 - DNA, 25 bp, Homo sapien
tattaggagcagactatggcttccg

SEQ ID NO: 4442913 - DNA, 25 bp, Homo sapien
gaaaagttgctgtggctcgctcaaa

SEQ ID NO: 4442914 - DNA, 25 bp, Homo sapien
cttcgcagcttctcaaggtggccaa

SEQ ID NO: 4442915 - DNA, 25 bp, Homo sapien
tgcggtgggccgttcccacaagccc

SEQ ID NO: 4442916 - DNA, 25 bp, Homo sapien
tctcaaggtggccaaccctgcggtg

SEQ ID NO: 4442917 - DNA, 25 bp, Homo sapien
tggccaaccctgcggtgggccgttc

SEQ ID NO: 4442918 - DNA, 25 bp, Homo sapien
ccagaggccagtttgcagcggcacg

SEQ ID NO: 4442919 - DNA, 25 bp, Homo sapien
cagaggccagtttgcagcggcacgc

SEQ ID NO: 4442920 - DNA, 25 bp, Homo sapien
gaggccagtttgcagcggcacgcct

SEQ ID NO: 4442921 - DNA, 25 bp, Homo sapien
ggccagtttgcagcggcacgcctta

SEQ ID NO: 4442922 - DNA, 25 bp, Homo sapien
caactgataccgctgacgggcaaag

SEQ ID NO: 4442923 - DNA, 25 bp, Homo sapien
cccgtgtgggtgcaagcagaaagca

SEQ ID NO: 4442924 - DNA, 25 bp, Homo sapien
gctgccagatacagccccgtgtggg

SEQ ID NO: 4442925 - DNA, 25 bp, Homo sapien
taaatcgatggcagaagcagcggct

SEQ ID NO: 4442926 - DNA, 25 bp, Homo sapien
tggtctcttcgcacggacgcgccta

SEQ ID NO: 4442927 - DNA, 25 bp, Homo sapien
cacggacgcgcctaacactttgctt

SEQ ID NO: 4442928 - DNA, 25 bp, Homo sapien
ctctataaggtagggaggaagaatg

SEQ ID NO: 4442929 - DNA, 25 bp, Homo sapien
cctctataaggtagggaggaagaat

SEQ ID NO: 4442930 - DNA, 25 bp, Homo sapien
gccaagtcctgagttcagaattttg

SEQ ID NO: 4442931 - DNA, 25 bp, Homo sapien
caagtcctgagttcagaattttgtt

SEQ ID NO: 4442932 - DNA, 25 bp, Homo sapien
atataaaagcacctaaaggtcaagg

SEQ ID NO: 4442933 - DNA, 25 bp, Homo sapien
tttttgagatgaatataaaagcacc

SEQ ID NO: 4442934 - DNA, 25 bp, Homo sapien
agctaacggcttattgttccacttc

SEQ ID NO: 4442935 - DNA, 25 bp, Homo sapien
cagtatttggaacgattagcccaca

SEQ ID NO: 4442936 - DNA, 25 bp, Homo sapien
ttcgtcttctgctgaagctaacggc

SEQ ID NO: 4442937 - DNA, 25 bp, Homo sapien
tgagcaaatgatcaagattactcct

SEQ ID NO: 4442938 - DNA, 25 bp, Homo sapien
cacagcatagatgagtcaggaggac

SEQ ID NO: 4442939 - DNA, 25 bp, Homo sapien
cgtaggctgaacaagtctaacgatc

SEQ ID NO: 4442940 - DNA, 25 bp, Homo sapien
tatgatggcatatgttactcagccc

SEQ ID NO: 4442941 - DNA, 25 bp, Homo sapien
tataaaggaacaggtacgtaggctg

SEQ ID NO: 4442942 - DNA, 25 bp, Homo sapien
tgccacaagttaaggaaccacaaga

SEQ ID NO: 4442943 - DNA, 25 bp, Homo sapien
gaactgtgtcctcccaatattcgta

SEQ ID NO: 4442944 - DNA, 25 bp, Homo sapien
cattaacagagcaggatggacccca

SEQ ID NO: 4442945 - DNA, 25 bp, Homo sapien
tattcgtatgttaaaagtcctagcc

SEQ ID NO: 4442946 - DNA, 25 bp, Homo sapien
gtgataaaatacacataaaattcac

SEQ ID NO: 4442947 - DNA, 25 bp, Homo sapien
ttgtgataaaatacacataaaattc

SEQ ID NO: 4442948 - DNA, 25 bp, Homo sapien
tgtttttattgtgataaaatacaca

SEQ ID NO: 4442949 - DNA, 25 bp, Homo sapien
ttattgtgataaaatacacataaaa

SEQ ID NO: 4442950 - DNA, 25 bp, Homo sapien
ttccctttcttactactgatatata

SEQ ID NO: 4442951 - DNA, 25 bp, Homo sapien
taaagggcattttgcctcatcagtt

SEQ ID NO: 4442952 - DNA, 25 bp, Homo sapien
tgtaaatccaagtggtaaggccttc

SEQ ID NO: 4442953 - DNA, 25 bp, Homo sapien
tggtaaggccttcttcactctaaag

SEQ ID NO: 4442954 - DNA, 25 bp, Homo sapien
tatactgttccattatcaccaaatg

SEQ ID NO: 4442955 - DNA, 25 bp, Homo sapien
cttcaactaccagcaataaacggta

SEQ ID NO: 4442956 - DNA, 25 bp, Homo sapien
acatgtaaatactaaatcaaggcca

SEQ ID NO: 4442957 - DNA, 25 bp, Homo sapien
gtagcactgtactccaaatttgata

SEQ ID NO: 4442958 - DNA, 25 bp, Homo sapien
tagcactgcatcttcgcttgcacct

SEQ ID NO: 4442959 - DNA, 25 bp, Homo sapien
aaataaggtagcactgcatcttcgc

SEQ ID NO: 4442960 - DNA, 25 bp, Homo sapien
gttttaaagtagcactgagccaggt

SEQ ID NO: 4442961 - DNA, 25 bp, Homo sapien
taaggtagcactgcatcttcgcttg

SEQ ID NO: 4442962 - DNA, 25 bp, Homo sapien
agaagcaggactacccactctagga

SEQ ID NO: 4442963 - DNA, 25 bp, Homo sapien
gcaggactacccactctaggagaca

SEQ ID NO: 4442964 - DNA, 25 bp, Homo sapien
agcaggactacccactctaggagac

SEQ ID NO: 4442965 - DNA, 25 bp, Homo sapien
gaagcaggactacccactctaggag

SEQ ID NO: 4442966 - DNA, 25 bp, Homo sapien
tccaccttgggttgcaggaagagtt

SEQ ID NO: 4442967 - DNA, 25 bp, Homo sapien
ggaacattgcttctgaggcccattc

SEQ ID NO: 4442968 - DNA, 25 bp, Homo sapien
cagatggcactgcatgagggatttt

SEQ ID NO: 4442969 - DNA, 25 bp, Homo sapien
aaagacctgacaatacatacaatgg

SEQ ID NO: 4442970 - DNA, 25 bp, Homo sapien
tacactatgagaacctaaacttggg

SEQ ID NO: 4442971 - DNA, 25 bp, Homo sapien
tagctattcaaacaagtgggccaga

SEQ ID NO: 4442972 - DNA, 25 bp, Homo sapien
cagagctggtttcaatggtgccaaa

SEQ ID NO: 4442973 - DNA, 25 bp, Homo sapien
tgttaagacatgaaaagagcaggcc

SEQ ID NO: 4442974 - DNA, 25 bp, Homo sapien
aaattttaagctactacaggccagg

SEQ ID NO: 4442975 - DNA, 25 bp, Homo sapien
tacgggacataacaaggatccatgc

SEQ ID NO: 4442976 - DNA, 25 bp, Homo sapien
tcttaacgttatacaccaatggtgc

SEQ ID NO: 4442977 - DNA, 25 bp, Homo sapien
tacgccctagtcctgacagtttgaa

SEQ ID NO: 4442978 - DNA, 25 bp, Homo sapien
ttttcagaatgtcactgtggttgtc

SEQ ID NO: 4442979 - DNA, 25 bp, Homo sapien
tttttcagaatgtcactgtggttgt

SEQ ID NO: 4442980 - DNA, 25 bp, Homo sapien
aaagaaagcctctgtgtagaagtga

SEQ ID NO: 4442981 - DNA, 25 bp, Homo sapien
tgtgtagaagtgaagtttcagcggt

SEQ ID NO: 4442982 - DNA, 25 bp, Homo sapien
gcctctgtgtagaagtgaagtttca

SEQ ID NO: 4442983 - DNA, 25 bp, Homo sapien
gaaagcctctgtgtagaagtgaagt

SEQ ID NO: 4442984 - DNA, 25 bp, Homo sapien
cagagagggacattcaaataatcac

SEQ ID NO: 4442985 - DNA, 25 bp, Homo sapien
tgtaaagtgttagactaggtgctgg

SEQ ID NO: 4442986 - DNA, 25 bp, Homo sapien
taagatgcagagtcccatgtgtcct

SEQ ID NO: 4442987 - DNA, 25 bp, Homo sapien
tgtcctctgatctaaagttgcatgg

SEQ ID NO: 4442988 - DNA, 25 bp, Homo sapien
cagtttctatttacctttaggctga

SEQ ID NO: 4442989 - DNA, 25 bp, Homo sapien
tcttcaacaacaggtgctgcttagt

SEQ ID NO: 4442990 - DNA, 25 bp, Homo sapien
gagtgtcaggttcaggctttattgc

SEQ ID NO: 4442991 - DNA, 25 bp, Homo sapien
aaagattggcttcaagaatggaggg

SEQ ID NO: 4442992 - DNA, 25 bp, Homo sapien
gcacaatcgcttaaaatcactaatg

SEQ ID NO: 4442993 - DNA, 25 bp, Homo sapien
gaagtgactcctgaccagtccaagc

SEQ ID NO: 4442994 - DNA, 25 bp, Homo sapien
aagccagaaaactgatcctgtacca

SEQ ID NO: 4442995 - DNA, 25 bp, Homo sapien
tgaagattctgagtgaagtgactcc

SEQ ID NO: 4442996 - DNA, 25 bp, Homo sapien
ccacactgtaaggtatagttcagga

SEQ ID NO: 4442997 - DNA, 25 bp, Homo sapien
atcatcttgccatagaggtgtcttc

SEQ ID NO: 4442998 - DNA, 25 bp, Homo sapien
gataacttctaccaatgaacttggg

SEQ ID NO: 4442999 - DNA, 25 bp, Homo sapien
tgtaattgctcaactgtctcagaca

SEQ ID NO: 4443000 - DNA, 25 bp, Homo sapien
cctccatggagtgggatacgcaggt

SEQ ID NO: 4443001 - DNA, 25 bp, Homo sapien
agcctgagaggtgcgctgtgttcca

SEQ ID NO: 4443002 - DNA, 25 bp, Homo sapien
tgttccagtgcgcacagtgtcacgc

SEQ ID NO: 4443003 - DNA, 25 bp, Homo sapien
cactgagagggcgattgaccaagct

SEQ ID NO: 4443004 - DNA, 25 bp, Homo sapien
ttcgtcagcgcggttcaaatccctg

SEQ ID NO: 4443005 - DNA, 25 bp, Homo sapien
cggcgatactcggaagatggatcac

SEQ ID NO: 4443006 - DNA, 25 bp, Homo sapien
cgcgattcgaaatcccggcgatact

SEQ ID NO: 4443007 - DNA, 25 bp, Homo sapien
gatggatcaccaaacttcgtcagcg

SEQ ID NO: 4443008 - DNA, 25 bp, Homo sapien
ctgcaggtcactgtacttgagggag

SEQ ID NO: 4443009 - DNA, 25 bp, Homo sapien
gagacccagactcttggctaagttc

SEQ ID NO: 4443010 - DNA, 25 bp, Homo sapien
ggtcactgtacttgagggagtccag

SEQ ID NO: 4443011 - DNA, 25 bp, Homo sapien
gactcttggctaagttctgcaggtc

SEQ ID NO: 4443012 - DNA, 25 bp, Homo sapien
cttttcttgcctcatgtttaatgta

SEQ ID NO: 4443013 - DNA, 25 bp, Homo sapien
catgtttaatgtagcctttcaaggc

SEQ ID NO: 4443014 - DNA, 25 bp, Homo sapien
taatgtagcctttcaaggcttttaa

SEQ ID NO: 4443015 - DNA, 25 bp, Homo sapien
tgcctcatgtttaatgtagcctttc

SEQ ID NO: 4443016 - DNA, 25 bp, Homo sapien
taggagtcatgccttatcaaaaatc

SEQ ID NO: 4443017 - DNA, 25 bp, Homo sapien
tttgctgtgggtctgaagcggccat

SEQ ID NO: 4443018 - DNA, 25 bp, Homo sapien
gggcactcattcatccgtttaggag

SEQ ID NO: 4443019 - DNA, 25 bp, Homo sapien
ataaaagaatcttggctctaatggg

SEQ ID NO: 4443020 - DNA, 25 bp, Homo sapien
actacatctgcctcacggattcaag

SEQ ID NO: 4443021 - DNA, 25 bp, Homo sapien
ctctgctcactacatctgcctcacg

SEQ ID NO: 4443022 - DNA, 25 bp, Homo sapien
gctcactacatctgcctcacggatt

SEQ ID NO: 4443023 - DNA, 25 bp, Homo sapien
tgctcactacatctgcctcacggat

SEQ ID NO: 4443024 - DNA, 25 bp, Homo sapien
ctgtgagtcagggtccacacggaca

SEQ ID NO: 4443025 - DNA, 25 bp, Homo sapien
gtccacacggacagtcttgcacctt

SEQ ID NO: 4443026 - DNA, 25 bp, Homo sapien
tctgtatctcagtctcatcacaaga

SEQ ID NO: 4443027 - DNA, 25 bp, Homo sapien
ctggttgctgatctgtatctcagtc

SEQ ID NO: 4443028 - DNA, 25 bp, Homo sapien
ccataaaagtatgccaattttggca

SEQ ID NO: 4443029 - DNA, 25 bp, Homo sapien
tggcataggtggtttattttcagtt

SEQ ID NO: 4443030 - DNA, 25 bp, Homo sapien
gccaattttggcataggtggtttat

SEQ ID NO: 4443031 - DNA, 25 bp, Homo sapien
aaaagaaatctccataaaagtatgc

SEQ ID NO: 4443032 - DNA, 25 bp, Homo sapien
ctggaattcagtgggattacttatt

SEQ ID NO: 4443033 - DNA, 25 bp, Homo sapien
tggaattcagtgggattacttattt

SEQ ID NO: 4443034 - DNA, 25 bp, Homo sapien
gagaaggaacttttgcagtagctct

SEQ ID NO: 4443035 - DNA, 25 bp, Homo sapien
agcttcttggtgctcgtctggtgga

SEQ ID NO: 4443036 - DNA, 25 bp, Homo sapien
gaaggaacttttgcagtagctctga

SEQ ID NO: 4443037 - DNA, 25 bp, Homo sapien
ggagaaggaacttttgcagtagctc

SEQ ID NO: 4443038 - DNA, 25 bp, Homo sapien
ccaatgtatccgtaaaacaaggcag

SEQ ID NO: 4443039 - DNA, 25 bp, Homo sapien
gatttacaagcaagtgggtttccaa

SEQ ID NO: 4443040 - DNA, 25 bp, Homo sapien
accactgatttacaagcaagtgggt

SEQ ID NO: 4443041 - DNA, 25 bp, Homo sapien
ggggcttctgcttagactttggcta

SEQ ID NO: 4443042 - DNA, 25 bp, Homo sapien
tctgaaggtacctttgaatctctgt

SEQ ID NO: 4443043 - DNA, 25 bp, Homo sapien
ttctgaaggtacctttgaatctctg

SEQ ID NO: 4443044 - DNA, 25 bp, Homo sapien
tttctctcaatatattgatcaatgg

SEQ ID NO: 4443045 - DNA, 25 bp, Homo sapien
aatacagcgaatagaaataaatata

SEQ ID NO: 4443046 - DNA, 25 bp, Homo sapien
ggttaagaattaaatacagcgaata

SEQ ID NO: 4443047 - DNA, 25 bp, Homo sapien
ggcactgccttaacaccagatacca

SEQ ID NO: 4443048 - DNA, 25 bp, Homo sapien
cattattttgagaataggccttaaa

SEQ ID NO: 4443049 - DNA, 25 bp, Homo sapien
ctgacccctcccttattgatgggct

SEQ ID NO: 4443050 - DNA, 25 bp, Homo sapien
tgacccctcccttattgatgggctg

SEQ ID NO: 4443051 - DNA, 25 bp, Homo sapien
cagacccaaggtactctgacttgca

SEQ ID NO: 4443052 - DNA, 25 bp, Homo sapien
ttgcagggccacaagaccggccttg

SEQ ID NO: 4443053 - DNA, 25 bp, Homo sapien
accggccttgcgagcgtcgttggct

SEQ ID NO: 4443054 - DNA, 25 bp, Homo sapien
ttggctgatgggagtagaagccaca

SEQ ID NO: 4443055 - DNA, 25 bp, Homo sapien
catgcctggtctaatttgtcttaat

SEQ ID NO: 4443056 - DNA, 25 bp, Homo sapien
ctggtctaatttgtcttaatggttc

SEQ ID NO: 4443057 - DNA, 25 bp, Homo sapien
tgcctggtctaatttgtcttaatgg

SEQ ID NO: 4443058 - DNA, 25 bp, Homo sapien
tctaatttgtcttaatggttcataa

SEQ ID NO: 4443059 - DNA, 25 bp, Homo sapien
gactttctggctggagtcttggtca

SEQ ID NO: 4443060 - DNA, 25 bp, Homo sapien
acggtcacatgtgcagactttctgg

SEQ ID NO: 4443061 - DNA, 25 bp, Homo sapien
gaacgcttatgctcattatctttag

SEQ ID NO: 4443062 - DNA, 25 bp, Homo sapien
cagacacggtcacatgtgcagactt

SEQ ID NO: 4443063 - DNA, 25 bp, Homo sapien
gatggtctttaatttgtgtgtccca

SEQ ID NO: 4443064 - DNA, 25 bp, Homo sapien
tccccgtgatggtctttaatttgtg

SEQ ID NO: 4443065 - DNA, 25 bp, Homo sapien
gtctttaatttgtgtgtcccaagca

SEQ ID NO: 4443066 - DNA, 25 bp, Homo sapien
gcagaattccccgtgatggtcttta

SEQ ID NO: 4443067 - DNA, 25 bp, Homo sapien
tgctttaagatcaaacactggtttc

SEQ ID NO: 4443068 - DNA, 25 bp, Homo sapien
gggacgagacaaacttgctttaaga

SEQ ID NO: 4443069 - DNA, 25 bp, Homo sapien
tggtttcttattggagactggagtc

SEQ ID NO: 4443070 - DNA, 25 bp, Homo sapien
tgcctcagttgtcaacttgaatggg

SEQ ID NO: 4443071 - DNA, 25 bp, Homo sapien
tattttctttagattgcccccatgg

SEQ ID NO: 4443072 - DNA, 25 bp, Homo sapien
attttctttagattgcccccatggt

SEQ ID NO: 4443073 - DNA, 25 bp, Homo sapien
ctgttgacatgttgatttagataat

SEQ ID NO: 4443074 - DNA, 25 bp, Homo sapien
taattctgttgacatgttgatttag

SEQ ID NO: 4443075 - DNA, 25 bp, Homo sapien
tgggcccaaccatgacttgctgcaa

SEQ ID NO: 4443076 - DNA, 25 bp, Homo sapien
tgaaggaagcctctaaggaccgtcc

SEQ ID NO: 4443077 - DNA, 25 bp, Homo sapien
tatctggatatgtaggtgccctggg

SEQ ID NO: 4443078 - DNA, 25 bp, Homo sapien
tatagggccttgacgccttgtaagc

SEQ ID NO: 4443079 - DNA, 25 bp, Homo sapien
tcttgctcgcgtttcttccgttgct

SEQ ID NO: 4443080 - DNA, 25 bp, Homo sapien
cagccaaaatgaggccccttcgcat

SEQ ID NO: 4443081 - DNA, 25 bp, Homo sapien
tcttctcctttcgttcttgctcgcg

SEQ ID NO: 4443082 - DNA, 25 bp, Homo sapien
atcttcagccaaaatgaggcccctt

SEQ ID NO: 4443083 - DNA, 25 bp, Homo sapien
aaaaagatctcgtgactaaagtggg

SEQ ID NO: 4443084 - DNA, 25 bp, Homo sapien
ggatgggtctcgttagaaacctgaa

SEQ ID NO: 4443085 - DNA, 25 bp, Homo sapien
tatttgaacgaaggtacataagcct

SEQ ID NO: 4443086 - DNA, 25 bp, Homo sapien
tacacagactatgaacagttagcag

SEQ ID NO: 4443087 - DNA, 25 bp, Homo sapien
taaaactcagaagctccactgaggt

SEQ ID NO: 4443088 - DNA, 25 bp, Homo sapien
cctcgcatttcgatagggctatgta

SEQ ID NO: 4443089 - DNA, 25 bp, Homo sapien
catggacatgatactaagcaaagcc

SEQ ID NO: 4443090 - DNA, 25 bp, Homo sapien
actgaggtgaaggaaacatggacat

SEQ ID NO: 4443091 - DNA, 25 bp, Homo sapien
cgctttgcagagtattccagtagtc

SEQ ID NO: 4443092 - DNA, 25 bp, Homo sapien
ccatttttgggtattcgctttgcag

SEQ ID NO: 4443093 - DNA, 25 bp, Homo sapien
ggagatcaccagaaagaagttgctt

SEQ ID NO: 4443094 - DNA, 25 bp, Homo sapien
atcattggagaggaccggaaggcca

SEQ ID NO: 4443095 - DNA, 25 bp, Homo sapien
gaaaagtccagaagcaggtctggcc

SEQ ID NO: 4443096 - DNA, 25 bp, Homo sapien
ttggctctgccttaatccttggtgt

SEQ ID NO: 4443097 - DNA, 25 bp, Homo sapien
tctgccttaatccttggtgtcccaa

SEQ ID NO: 4443098 - DNA, 25 bp, Homo sapien
tctaggttctgtccacatggttaca

SEQ ID NO: 4443099 - DNA, 25 bp, Homo sapien
gccgccgctgctcgacccacacaaa

SEQ ID NO: 4443100 - DNA, 25 bp, Homo sapien
gccgctgctcgacccacacaaaggc

SEQ ID NO: 4443101 - DNA, 25 bp, Homo sapien
tgctcgacccacacaaaggcgaccg

SEQ ID NO: 4443102 - DNA, 25 bp, Homo sapien
gacccacacaaaggcgaccgcgcat

SEQ ID NO: 4443103 - DNA, 25 bp, Homo sapien
tttccgcttctttaccatggtggtc

SEQ ID NO: 4443104 - DNA, 25 bp, Homo sapien
ctgtcctctgtgtccgagtcgatca

SEQ ID NO: 4443105 - DNA, 25 bp, Homo sapien
tcttgcccgcctgccagtgggaccg

SEQ ID NO: 4443106 - DNA, 25 bp, Homo sapien
agtcgatcacgacgcggcctttccg

SEQ ID NO: 4443107 - DNA, 25 bp, Homo sapien
taacataccaacttcctgaaagact

SEQ ID NO: 4443108 - DNA, 25 bp, Homo sapien
ttcactagacagagttaacatacca

SEQ ID NO: 4443109 - DNA, 25 bp, Homo sapien
aacctgaggtaaactgggcacggtg

SEQ ID NO: 4443110 - DNA, 25 bp, Homo sapien
caaaatgttaactctatggaccaaa

SEQ ID NO: 4443111 - DNA, 25 bp, Homo sapien
cagctggtacatgatagagccagga

SEQ ID NO: 4443112 - DNA, 25 bp, Homo sapien
taacttacctagtaacacagctggt

SEQ ID NO: 4443113 - DNA, 25 bp, Homo sapien
caggattcaaacctcggcagacaga

SEQ ID NO: 4443114 - DNA, 25 bp, Homo sapien
ggattcaaacctcggcagacagaat

SEQ ID NO: 4443115 - DNA, 25 bp, Homo sapien
cgtctccgagtctgacgaggctgca

SEQ ID NO: 4443116 - DNA, 25 bp, Homo sapien
catcgtcactgtcagacgtctccga

SEQ ID NO: 4443117 - DNA, 25 bp, Homo sapien
ggctgactcacaggcggctccttct

SEQ ID NO: 4443118 - DNA, 25 bp, Homo sapien
tgcgctttcgctttgccagggacaa

SEQ ID NO: 4443119 - DNA, 25 bp, Homo sapien
tgaaccaagtacagaggccagagga

SEQ ID NO: 4443120 - DNA, 25 bp, Homo sapien
tatagaatgttataagcaggtcccc

SEQ ID NO: 4443121 - DNA, 25 bp, Homo sapien
tgagaaaatgagcacccaccggtgt

SEQ ID NO: 4443122 - DNA, 25 bp, Homo sapien
ggtgtacatgtatgcaaccccacag

SEQ ID NO: 4443123 - DNA, 25 bp, Homo sapien
ctcgggctcttagcagccttgacct

SEQ ID NO: 4443124 - DNA, 25 bp, Homo sapien
gatctcgggctcttagcagccttga

SEQ ID NO: 4443125 - DNA, 25 bp, Homo sapien
tctcgggctcttagcagccttgacc

SEQ ID NO: 4443126 - DNA, 25 bp, Homo sapien
gcgatctcgggctcttagcagcctt

SEQ ID NO: 4443127 - DNA, 25 bp, Homo sapien
caagagttaagagtctctggcattc

SEQ ID NO: 4443128 - DNA, 25 bp, Homo sapien
agagttaagagtctctggcattcat

SEQ ID NO: 4443129 - DNA, 25 bp, Homo sapien
aagagttaagagtctctggcattca

SEQ ID NO: 4443130 - DNA, 25 bp, Homo sapien
tcaagagttaagagtctctggcatt

SEQ ID NO: 4443131 - DNA, 25 bp, Homo sapien
tatttttattgctcccaaatgtcca

SEQ ID NO: 4443132 - DNA, 25 bp, Homo sapien
tgtctgaactgcctgaggaggcagt

SEQ ID NO: 4443133 - DNA, 25 bp, Homo sapien
cagctgaactgtctttgtctgaact

SEQ ID NO: 4443134 - DNA, 25 bp, Homo sapien
gcagttttgttggcctgtttcttca

SEQ ID NO: 4443135 - DNA, 25 bp, Homo sapien
ggctgagctctcagctgaactgtct

SEQ ID NO: 4443136 - DNA, 25 bp, Homo sapien
tctctatgcgattgaacagttcttg

SEQ ID NO: 4443137 - DNA, 25 bp, Homo sapien
ttgctgtcagagtctgacacttcac

SEQ ID NO: 4443138 - DNA, 25 bp, Homo sapien
ctgtcatctgttccagacgggccct

SEQ ID NO: 4443139 - DNA, 25 bp, Homo sapien
ggagctgttgctgtcagagtctgac

SEQ ID NO: 4443140 - DNA, 25 bp, Homo sapien
gattcttgaatctgtgtcagttttt

SEQ ID NO: 4443141 - DNA, 25 bp, Homo sapien
tttcttgctcctcttcttgcttttt

SEQ ID NO: 4443142 - DNA, 25 bp, Homo sapien
cttgaatctgtgtcagttttttctt

SEQ ID NO: 4443143 - DNA, 25 bp, Homo sapien
ctgagattcttgaatctgtgtcagt

SEQ ID NO: 4443144 - DNA, 25 bp, Homo sapien
ctagtttctcatcccgcttggaacg

SEQ ID NO: 4443145 - DNA, 25 bp, Homo sapien
tctttcgtttttctcgctctgcttt

SEQ ID NO: 4443146 - DNA, 25 bp, Homo sapien
gaacgccgttccttgttgtgggatg

SEQ ID NO: 4443147 - DNA, 25 bp, Homo sapien
ttctcatcccgcttggaacgccgtt

SEQ ID NO: 4443148 - DNA, 25 bp, Homo sapien
cgatgatgttcgtgatgagcggtct

SEQ ID NO: 4443149 - DNA, 25 bp, Homo sapien
tcatcagacgatgatgttcgtgatg

SEQ ID NO: 4443150 - DNA, 25 bp, Homo sapien
cagacgatgatgttcgtgatgagcg

SEQ ID NO: 4443151 - DNA, 25 bp, Homo sapien
tgatgttcgtgatgagcggtctgac

SEQ ID NO: 4443152 - DNA, 25 bp, Homo sapien
gttgtggtttccgatgccaatccgc

SEQ ID NO: 4443153 - DNA, 25 bp, Homo sapien
gcttatgccgtgataatcgaacccg

SEQ ID NO: 4443154 - DNA, 25 bp, Homo sapien
gacaccagcgttctagcttatgccg

SEQ ID NO: 4443155 - DNA, 25 bp, Homo sapien
gaacccgattcaattcttcaggtaa

SEQ ID NO: 4443156 - DNA, 25 bp, Homo sapien
agtttccacaacacccgtaatctca

SEQ ID NO: 4443157 - DNA, 25 bp, Homo sapien
ccacctagttggtaaactttggcag

SEQ ID NO: 4443158 - DNA, 25 bp, Homo sapien
ttgttctggtgccacctagttggta

SEQ ID NO: 4443159 - DNA, 25 bp, Homo sapien
actttggcagtttccacaacacccg

SEQ ID NO: 4443160 - DNA, 25 bp, Homo sapien
agacaaactctaaacggaacacgcg

SEQ ID NO: 4443161 - DNA, 25 bp, Homo sapien
tcataaactcactttcggtgaattc

SEQ ID NO: 4443162 - DNA, 25 bp, Homo sapien
gaacacgcgttggtcattgccatgc

SEQ ID NO: 4443163 - DNA, 25 bp, Homo sapien
tcactttcggtgaattcttggtttg

SEQ ID NO: 4443164 - DNA, 25 bp, Homo sapien
cacgatacgagattattagtaaggg

SEQ ID NO: 4443165 - DNA, 25 bp, Homo sapien
cgagattattagtaagggattttgg

SEQ ID NO: 4443166 - DNA, 25 bp, Homo sapien
caaaaacacgatacgagattattag

SEQ ID NO: 4443167 - DNA, 25 bp, Homo sapien
ctggatcaaaaacacgatacgagat

SEQ ID NO: 4443168 - DNA, 25 bp, Homo sapien
ttattgatttcatctagagtgggca

SEQ ID NO: 4443169 - DNA, 25 bp, Homo sapien
ttaagagcttctttaatagataatt

SEQ ID NO: 4443170 - DNA, 25 bp, Homo sapien
tctagagtgggcaactgcatgccag

SEQ ID NO: 4443171 - DNA, 25 bp, Homo sapien
ctcttcaatgtcctgatcattgaat

SEQ ID NO: 4443172 - DNA, 25 bp, Homo sapien
gcagaatacagacccctgaacccta

SEQ ID NO: 4443173 - DNA, 25 bp, Homo sapien
tcttgatgaacctccgggttctggg

SEQ ID NO: 4443174 - DNA, 25 bp, Homo sapien
gaatacacttcagtctatgttagcc

SEQ ID NO: 4443175 - DNA, 25 bp, Homo sapien
tatgttagcctcatccggacatgag

SEQ ID NO: 4443176 - DNA, 25 bp, Homo sapien
ttcatagcgtagttgggtggagctt

SEQ ID NO: 4443177 - DNA, 25 bp, Homo sapien
cttcatagcgtagttgggtggagct

SEQ ID NO: 4443178 - DNA, 25 bp, Homo sapien
tgatagcggatatgttcttggtccg

SEQ ID NO: 4443179 - DNA, 25 bp, Homo sapien
gatagcggatatgttcttggtccgc

SEQ ID NO: 4443180 - DNA, 25 bp, Homo sapien
ctgatagcggatatgttcttggtcc

SEQ ID NO: 4443181 - DNA, 25 bp, Homo sapien
tccactcccggttccgctggttgat

SEQ ID NO: 4443182 - DNA, 25 bp, Homo sapien
ctcccggttccgctggttgatgtaa

SEQ ID NO: 4443183 - DNA, 25 bp, Homo sapien
tcagactctacaatgttccactccc

SEQ ID NO: 4443184 - DNA, 25 bp, Homo sapien
gactctacaatgttccactcccggt

SEQ ID NO: 4443185 - DNA, 25 bp, Homo sapien
tttagtgattcagataaagttttct

SEQ ID NO: 4443186 - DNA, 25 bp, Homo sapien
ccttttcccttcaagaataccagag

SEQ ID NO: 4443187 - DNA, 25 bp, Homo sapien
tcaagaataccagagtagatatggg

SEQ ID NO: 4443188 - DNA, 25 bp, Homo sapien
ccgcgcccggcatattatccttttc

SEQ ID NO: 4443189 - DNA, 25 bp, Homo sapien
agtagaatctaagggtgggaagagg

SEQ ID NO: 4443190 - DNA, 25 bp, Homo sapien
ctgaaacagaaagcatgcaccacag

SEQ ID NO: 4443191 - DNA, 25 bp, Homo sapien
atgcaccacagaactgcacctccag

SEQ ID NO: 4443192 - DNA, 25 bp, Homo sapien
caccacagaactgcacctccagccc

SEQ ID NO: 4443193 - DNA, 25 bp, Homo sapien
aacagaaagcatgcaccacagaact

SEQ ID NO: 4443194 - DNA, 25 bp, Homo sapien
ccgccgagtaaagggatccatctgt

SEQ ID NO: 4443195 - DNA, 25 bp, Homo sapien
gaaacgatggtaggcttgcactgcc

SEQ ID NO: 4443196 - DNA, 25 bp, Homo sapien
gatccatctgttggtttttcatgtt

SEQ ID NO: 4443197 - DNA, 25 bp, Homo sapien
gtaggcttgcactgccgccgagtaa

SEQ ID NO: 4443198 - DNA, 25 bp, Homo sapien
tccagaaccgtattttgcattcagc

SEQ ID NO: 4443199 - DNA, 25 bp, Homo sapien
ccagaaccgtattttgcattcagct

SEQ ID NO: 4443200 - DNA, 25 bp, Homo sapien
taacactccagaaccgtattttgca

SEQ ID NO: 4443201 - DNA, 25 bp, Homo sapien
tctggtaacactccagaaccgtatt

SEQ ID NO: 4443202 - DNA, 25 bp, Homo sapien
tgtactttgaacagatcttctgaga

SEQ ID NO: 4443203 - DNA, 25 bp, Homo sapien
caatcttcacatcaaaatcgtgtac

SEQ ID NO: 4443204 - DNA, 25 bp, Homo sapien
gaggtcactggctgacttagaattc

SEQ ID NO: 4443205 - DNA, 25 bp, Homo sapien
ggtcactggctgacttagaattcaa

SEQ ID NO: 4443206 - DNA, 25 bp, Homo sapien
ggaggtgatggctaaagcctttgac

SEQ ID NO: 4443207 - DNA, 25 bp, Homo sapien
gccccatccttggctggcggagcct

SEQ ID NO: 4443208 - DNA, 25 bp, Homo sapien
tggaggtgatggctaaagcctttga

SEQ ID NO: 4443209 - DNA, 25 bp, Homo sapien
ggagccccatccttggctggcggag

SEQ ID NO: 4443210 - DNA, 25 bp, Homo sapien
cacaaggtcacgtgccgaatgttca

SEQ ID NO: 4443211 - DNA, 25 bp, Homo sapien
tctgtagaggagaccgcctggtgct

SEQ ID NO: 4443212 - DNA, 25 bp, Homo sapien
gaaacagctatagacccatgacaga

SEQ ID NO: 4443213 - DNA, 25 bp, Homo sapien
tactgaatgcgtgcagagtggccaa

SEQ ID NO: 4443214 - DNA, 25 bp, Homo sapien
tcgccctagctgcacaatatatatg

SEQ ID NO: 4443215 - DNA, 25 bp, Homo sapien
gggaagttacacagctacagcagtc

SEQ ID NO: 4443216 - DNA, 25 bp, Homo sapien
tacgttcagccaagaagctgtgggc

SEQ ID NO: 4443217 - DNA, 25 bp, Homo sapien
aaagcagcaaaacagaatcaccagg

SEQ ID NO: 4443218 - DNA, 25 bp, Homo sapien
tcttggtatatatagtcagctgtac

SEQ ID NO: 4443219 - DNA, 25 bp, Homo sapien
gctgttcctttagcttagctcttgg

SEQ ID NO: 4443220 - DNA, 25 bp, Homo sapien
tagtctctcgtggagatcggagctc

SEQ ID NO: 4443221 - DNA, 25 bp, Homo sapien
cagggtgaggaagtacaaagcagag

SEQ ID NO: 4443222 - DNA, 25 bp, Homo sapien
gaagtccaggcaatgttaacagtct

SEQ ID NO: 4443223 - DNA, 25 bp, Homo sapien
gaggctctactaaacccagaagtta

SEQ ID NO: 4443224 - DNA, 25 bp, Homo sapien
taagttaaagcgacactgaggctct

SEQ ID NO: 4443225 - DNA, 25 bp, Homo sapien
tcatcatgataggagaggtcccagc

SEQ ID NO: 4443226 - DNA, 25 bp, Homo sapien
gggaattccccagcacaagaaatag

SEQ ID NO: 4443227 - DNA, 25 bp, Homo sapien
tgaactaggcagatggacactggcc

SEQ ID NO: 4443228 - DNA, 25 bp, Homo sapien
cactacagaggctactcgggtggaa

SEQ ID NO: 4443229 - DNA, 25 bp, Homo sapien
caaagccagtgtcttaatgcctgac

SEQ ID NO: 4443230 - DNA, 25 bp, Homo sapien
aaccaggctgctaaagagttgacga

SEQ ID NO: 4443231 - DNA, 25 bp, Homo sapien
caggctgctaaagagttgacgatgg

SEQ ID NO: 4443232 - DNA, 25 bp, Homo sapien
ggaaccaggctgctaaagagttgac

SEQ ID NO: 4443233 - DNA, 25 bp, Homo sapien
gctgctaaagagttgacgatggcca

SEQ ID NO: 4443234 - DNA, 25 bp, Homo sapien
gggctctcccggcaaaactgatgga

SEQ ID NO: 4443235 - DNA, 25 bp, Homo sapien
actgatggagtcaacctgaggcttc

SEQ ID NO: 4443236 - DNA, 25 bp, Homo sapien
tgtgctgcatcgcacgcgcttagcg

SEQ ID NO: 4443237 - DNA, 25 bp, Homo sapien
gcgcttagcgaagcagggctatcca

SEQ ID NO: 4443238 - DNA, 25 bp, Homo sapien
gggatccacggctggagacgcatgc

SEQ ID NO: 4443239 - DNA, 25 bp, Homo sapien
cacacctcgggtgtgcctggggacc

SEQ ID NO: 4443240 - DNA, 25 bp, Homo sapien
ggggaccgagtccacagagcatgca

SEQ ID NO: 4443241 - DNA, 25 bp, Homo sapien
tagtgcccatgcgtctccgcgtggg

SEQ ID NO: 4443242 - DNA, 25 bp, Homo sapien
ctctggtgggttcgatgtccttctc

SEQ ID NO: 4443243 - DNA, 25 bp, Homo sapien
tctggtgggttcgatgtccttctcc

SEQ ID NO: 4443244 - DNA, 25 bp, Homo sapien
agacacacttccatggagcagctgc

SEQ ID NO: 4443245 - DNA, 25 bp, Homo sapien
actcatgcattcacagagcagacac

SEQ ID NO: 4443246 - DNA, 25 bp, Homo sapien
gagcagacacacttccatggagcag

SEQ ID NO: 4443247 - DNA, 25 bp, Homo sapien
tgcattcacagagcagacacacttc

SEQ ID NO: 4443248 - DNA, 25 bp, Homo sapien
gcgtcaggatgtgggaaggtgctgc

SEQ ID NO: 4443249 - DNA, 25 bp, Homo sapien
ctgcgtcaggatgtgggaaggtgct

SEQ ID NO: 4443250 - DNA, 25 bp, Homo sapien
gaaggtgctgccctcagagacgggg

SEQ ID NO: 4443251 - DNA, 25 bp, Homo sapien
gatgtgggaaggtgctgccctcaga

SEQ ID NO: 4443252 - DNA, 25 bp, Homo sapien
agtgccacaggagtgagggtccccc

SEQ ID NO: 4443253 - DNA, 25 bp, Homo sapien
tgccacaggagtgagggtcccccct

SEQ ID NO: 4443254 - DNA, 25 bp, Homo sapien
acaggagtgagggtcccccctcagg

SEQ ID NO: 4443255 - DNA, 25 bp, Homo sapien
aggagtgagggtcccccctcaggca

SEQ ID NO: 4443256 - DNA, 25 bp, Homo sapien
agagaaggctctcggtgactcctcg

SEQ ID NO: 4443257 - DNA, 25 bp, Homo sapien
gagaagctggtcctactcttggtcc

SEQ ID NO: 4443258 - DNA, 25 bp, Homo sapien
cactttcagagaaagcgcgggcctc

SEQ ID NO: 4443259 - DNA, 25 bp, Homo sapien
cttcgcggctgggagagattcctcc

SEQ ID NO: 4443260 - DNA, 25 bp, Homo sapien
gctggagacggccccggggcggagc

SEQ ID NO: 4443261 - DNA, 25 bp, Homo sapien
ccatgcccgttgggcccccgggcag

SEQ ID NO: 4443262 - DNA, 25 bp, Homo sapien
ggccgcgccatgcccgttgggcccc

SEQ ID NO: 4443263 - DNA, 25 bp, Homo sapien
cgcgccatgcccgttgggcccccgg

SEQ ID NO: 4443264 - DNA, 25 bp, Homo sapien
gccatgcccgttgggcccccgggca

SEQ ID NO: 4443265 - DNA, 25 bp, Homo sapien
cagctccccgacactccggcgcggg

SEQ ID NO: 4443266 - DNA, 25 bp, Homo sapien
cgcacagcgcgcctcgaagagcagg

SEQ ID NO: 4443267 - DNA, 25 bp, Homo sapien
gcaggcgcagctccccgacactccg

SEQ ID NO: 4443268 - DNA, 25 bp, Homo sapien
cagcgcgcctcgaagagcaggcgca

SEQ ID NO: 4443269 - DNA, 25 bp, Homo sapien
ctgcaggtgcgaagagcccgctgcc

SEQ ID NO: 4443270 - DNA, 25 bp, Homo sapien
cagcgacgaggagccagtggaggag

SEQ ID NO: 4443271 - DNA, 25 bp, Homo sapien
aggagaccgacgaggtggaaaggcg

SEQ ID NO: 4443272 - DNA, 25 bp, Homo sapien
tggtcgggggcacgtcgggctcctc

SEQ ID NO: 4443273 - DNA, 25 bp, Homo sapien
ctgacccacgtcctcgcccgcttcc

SEQ ID NO: 4443274 - DNA, 25 bp, Homo sapien
tccctgcctccagtcatccaggctc

SEQ ID NO: 4443275 - DNA, 25 bp, Homo sapien
accagcccaataccctccccatgtt

SEQ ID NO: 4443276 - DNA, 25 bp, Homo sapien
ctggttgaagctctctaccagccca

SEQ ID NO: 4443277 - DNA, 25 bp, Homo sapien
gttccaattgccctatcaaactagc

SEQ ID NO: 4443278 - DNA, 25 bp, Homo sapien
ctttaaatacacaccaggtttgcat

SEQ ID NO: 4443279 - DNA, 25 bp, Homo sapien
tctgggggtgtagccagaagcagcc

SEQ ID NO: 4443280 - DNA, 25 bp, Homo sapien
gatcacgtgcccaatccccagggat

SEQ ID NO: 4443281 - DNA, 25 bp, Homo sapien
ctagggtgtgatcacgtgcccaatc

SEQ ID NO: 4443282 - DNA, 25 bp, Homo sapien
gcagcccactagaagcatgacatca

SEQ ID NO: 4443283 - DNA, 25 bp, Homo sapien
aggtttatttgtgcgcctgtgtggc

SEQ ID NO: 4443284 - DNA, 25 bp, Homo sapien
tctccagtgagctgtcaagagcctg

SEQ ID NO: 4443285 - DNA, 25 bp, Homo sapien
agagcctggacttagcatctgaagc

SEQ ID NO: 4443286 - DNA, 25 bp, Homo sapien
ggtgctgatacaggcgcagtgaagg

SEQ ID NO: 4443287 - DNA, 25 bp, Homo sapien
tgcacccaggcgtagcgcttcttga

SEQ ID NO: 4443288 - DNA, 25 bp, Homo sapien
ggtccggatcttctgccagtggttt

SEQ ID NO: 4443289 - DNA, 25 bp, Homo sapien
gaccatggtccggatcttctgccag

SEQ ID NO: 4443290 - DNA, 25 bp, Homo sapien
gcttatgaccggcagattgaccatg

SEQ ID NO: 4443291 - DNA, 25 bp, Homo sapien
ctgaggaccggcatccgtcagcgcc

SEQ ID NO: 4443292 - DNA, 25 bp, Homo sapien
cggcatccgtcagcgccgcccagcc

SEQ ID NO: 4443293 - DNA, 25 bp, Homo sapien
gcccagccccttcccgtcgcgggca

SEQ ID NO: 4443294 - DNA, 25 bp, Homo sapien
accggcatccgtcagcgccgcccag

SEQ ID NO: 4443295 - DNA, 25 bp, Homo sapien
ctccgagcagcgcttcaggatcagc

SEQ ID NO: 4443296 - DNA, 25 bp, Homo sapien
gtcgaagccatcgagcaggtcctgc

SEQ ID NO: 4443297 - DNA, 25 bp, Homo sapien
gacgcccattttgcagtcgagcaca

SEQ ID NO: 4443298 - DNA, 25 bp, Homo sapien
cacaaggtccgtcgaagccatcgag

SEQ ID NO: 4443299 - DNA, 25 bp, Homo sapien
ctcctccgtgggagcttcaggatcc

SEQ ID NO: 4443300 - DNA, 25 bp, Homo sapien
catgtagcgcggcttggtgacggcg

SEQ ID NO: 4443301 - DNA, 25 bp, Homo sapien
tgcggaagccgagggtggtgctgga

SEQ ID NO: 4443302 - DNA, 25 bp, Homo sapien
gtgacggcgcgctgcgcgtgctcct

SEQ ID NO: 4443303 - DNA, 25 bp, Homo sapien
tgctctcggcttcgcgtagtcttga

SEQ ID NO: 4443304 - DNA, 25 bp, Homo sapien
gtcggtgctgcaggagccgtccgct

SEQ ID NO: 4443305 - DNA, 25 bp, Homo sapien
cttcaaagacgcgaagcacctgctc

SEQ ID NO: 4443306 - DNA, 25 bp, Homo sapien
aaactcttcaaagacgcgaagcacc

SEQ ID NO: 4443307 - DNA, 25 bp, Homo sapien
tgctgcaggcggttcagataccgcc

SEQ ID NO: 4443308 - DNA, 25 bp, Homo sapien
tcgtgcctcctgaagaactcggata

SEQ ID NO: 4443309 - DNA, 25 bp, Homo sapien
tcctgaagaactcggatacctccag

SEQ ID NO: 4443310 - DNA, 25 bp, Homo sapien
gaagaactcggatacctccagggtg

SEQ ID NO: 4443311 - DNA, 25 bp, Homo sapien
ctgcgagccccgcaccgtcaggccg

SEQ ID NO: 4443312 - DNA, 25 bp, Homo sapien
gcgagccccgcaccgtcaggccgcg

SEQ ID NO: 4443313 - DNA, 25 bp, Homo sapien
agccccgcaccgtcaggccgcggcc

SEQ ID NO: 4443314 - DNA, 25 bp, Homo sapien
gagccccgcaccgtcaggccgcggc

SEQ ID NO: 4443315 - DNA, 25 bp, Homo sapien
ccgaagtcgatgagccacacgccgg

SEQ ID NO: 4443316 - DNA, 25 bp, Homo sapien
gatggcagtgatcgtgcacaaagag

SEQ ID NO: 4443317 - DNA, 25 bp, Homo sapien
acaaagaggagcgagctgccgatca

SEQ ID NO: 4443318 - DNA, 25 bp, Homo sapien
cagcaaatagccgtcctcgcggttg

SEQ ID NO: 4443319 - DNA, 25 bp, Homo sapien
gctaaataaaatccgcggtctggca

SEQ ID NO: 4443320 - DNA, 25 bp, Homo sapien
caggtccacatgtcaggtgagcggc

SEQ ID NO: 4443321 - DNA, 25 bp, Homo sapien
gtctcaagccggcatgcacagtggg

SEQ ID NO: 4443322 - DNA, 25 bp, Homo sapien
gaccggaaggtctgggcttgctaaa

SEQ ID NO: 4443323 - DNA, 25 bp, Homo sapien
ctaaaaggcacaagtaatggcaggt

SEQ ID NO: 4443324 - DNA, 25 bp, Homo sapien
aggccttacttggagcagtttagag

SEQ ID NO: 4443325 - DNA, 25 bp, Homo sapien
tagagtacttcccacgtgtggtgac

SEQ ID NO: 4443326 - DNA, 25 bp, Homo sapien
ctgacggctggaaactagaacccct

SEQ ID NO: 4443327 - DNA, 25 bp, Homo sapien
tctgctctgtagtctttaaccctga

SEQ ID NO: 4443328 - DNA, 25 bp, Homo sapien
taaccctgatccttgtgctagaagg

SEQ ID NO: 4443329 - DNA, 25 bp, Homo sapien
aattcctaatttcgtgtgatccgcc

SEQ ID NO: 4443330 - DNA, 25 bp, Homo sapien
tgtttgtctaggacctgatctctgc

SEQ ID NO: 4443331 - DNA, 25 bp, Homo sapien
gatgccaaggtaggcgtatcacgaa

SEQ ID NO: 4443332 - DNA, 25 bp, Homo sapien
tcaaaatcattagccgggcactgtg

SEQ ID NO: 4443333 - DNA, 25 bp, Homo sapien
tgctcaaggtcccaagcttggagga

SEQ ID NO: 4443334 - DNA, 25 bp, Homo sapien
gtgaaaaggcttaggagtcaggccc

SEQ ID NO: 4443335 - DNA, 25 bp, Homo sapien
tgcggggcggaagctggaatctggc

SEQ ID NO: 4443336 - DNA, 25 bp, Homo sapien
agaatgctccgagataagaccggga

SEQ ID NO: 4443337 - DNA, 25 bp, Homo sapien
gaaacgcgatctctgcggggcaaga

SEQ ID NO: 4443338 - DNA, 25 bp, Homo sapien
aatgctccgagataagaccgggaga

SEQ ID NO: 4443339 - DNA, 25 bp, Homo sapien
tgtgcctgctgtacatcagaagcat

SEQ ID NO: 4443340 - DNA, 25 bp, Homo sapien
gggctgtgcctgctgtacatcagaa

SEQ ID NO: 4443341 - DNA, 25 bp, Homo sapien
tgtcgtaagtgcagaaggggctgtg

SEQ ID NO: 4443342 - DNA, 25 bp, Homo sapien
ctgccaggggtgtcgtaagtgcaga

SEQ ID NO: 4443343 - DNA, 25 bp, Homo sapien
ctggtgagtgcagagggacgtctga

SEQ ID NO: 4443344 - DNA, 25 bp, Homo sapien
ccataaacacattcgtcacgttggg

SEQ ID NO: 4443345 - DNA, 25 bp, Homo sapien
tgggatgtggtaacactggctggtg

SEQ ID NO: 4443346 - DNA, 25 bp, Homo sapien
agggacgtctgaggaacgctgtgtc

SEQ ID NO: 4443347 - DNA, 25 bp, Homo sapien
accactatttctgcagtgcacactg

SEQ ID NO: 4443348 - DNA, 25 bp, Homo sapien
caccactatttctgcagtgcacact

SEQ ID NO: 4443349 - DNA, 25 bp, Homo sapien
tgcacactggcagtgttctttcctt

SEQ ID NO: 4443350 - DNA, 25 bp, Homo sapien
tgcagtgcacactggcagtgttctt

SEQ ID NO: 4443351 - DNA, 25 bp, Homo sapien
accaacttccggcactctgaagaag

SEQ ID NO: 4443352 - DNA, 25 bp, Homo sapien
agggcactctgctaccaacttccgg

SEQ ID NO: 4443353 - DNA, 25 bp, Homo sapien
acagaagcagggcactctgctacca

SEQ ID NO: 4443354 - DNA, 25 bp, Homo sapien
tcagagttaaggccttctgccccac

SEQ ID NO: 4443355 - DNA, 25 bp, Homo sapien
cacagtttctgagtttgggctgagt

SEQ ID NO: 4443356 - DNA, 25 bp, Homo sapien
gtttctgagtttgggctgagtcagg

SEQ ID NO: 4443357 - DNA, 25 bp, Homo sapien
cagtttctgagtttgggctgagtca

SEQ ID NO: 4443358 - DNA, 25 bp, Homo sapien
ccacagtttctgagtttgggctgag

SEQ ID NO: 4443359 - DNA, 25 bp, Homo sapien
attctactttgcttccccaggaact

SEQ ID NO: 4443360 - DNA, 25 bp, Homo sapien
actcaacatggcttttatcgtgcct

SEQ ID NO: 4443361 - DNA, 25 bp, Homo sapien
cctgatgttaatgcatgttctcttt

SEQ ID NO: 4443362 - DNA, 25 bp, Homo sapien
catggcttttatcgtgcctgatgtt

SEQ ID NO: 4443363 - DNA, 25 bp, Homo sapien
aattcatggccatcagatgatatca

SEQ ID NO: 4443364 - DNA, 25 bp, Homo sapien
gaatctcgatggagctgttagtgta

SEQ ID NO: 4443365 - DNA, 25 bp, Homo sapien
gcaattgggaattcaggaatctcga

SEQ ID NO: 4443366 - DNA, 25 bp, Homo sapien
tgttagtgtagcgaaccttgtaggt

SEQ ID NO: 4443367 - DNA, 25 bp, Homo sapien
ttcgcagccatcagcagttctagta

SEQ ID NO: 4443368 - DNA, 25 bp, Homo sapien
gaaaaagttactaactgatctacag

SEQ ID NO: 4443369 - DNA, 25 bp, Homo sapien
gttaaactgcatacaggcaacatgc

SEQ ID NO: 4443370 - DNA, 25 bp, Homo sapien
aaagttactaactgatctacaggta

SEQ ID NO: 4443371 - DNA, 25 bp, Homo sapien
ctttatatagttaaactgcatacag

SEQ ID NO: 4443372 - DNA, 25 bp, Homo sapien
caaccagtaatcacgagggtggcct

SEQ ID NO: 4443373 - DNA, 25 bp, Homo sapien
ctaatgataacaacagcagtgctgg

SEQ ID NO: 4443374 - DNA, 25 bp, Homo sapien
tattagtagaccaccttgcacacag

SEQ ID NO: 4443375 - DNA, 25 bp, Homo sapien
gagagactcatgaggcactgtcaag

SEQ ID NO: 4443376 - DNA, 25 bp, Homo sapien
gccccaattgccgtatgttttccaa

SEQ ID NO: 4443377 - DNA, 25 bp, Homo sapien
caagatcttggtaatccccaggttt

SEQ ID NO: 4443378 - DNA, 25 bp, Homo sapien
ggtcctgagtttcccaagatcttgg

SEQ ID NO: 4443379 - DNA, 25 bp, Homo sapien
ccaaagcctaattgcccgtatcttt

SEQ ID NO: 4443380 - DNA, 25 bp, Homo sapien
gcggtcgccgccgtcagcagcgcgg

SEQ ID NO: 4443381 - DNA, 25 bp, Homo sapien
gcccgtggggcggtgctgaggcgac

SEQ ID NO: 4443382 - DNA, 25 bp, Homo sapien
cccggcccgcgagcgaggagggagg

SEQ ID NO: 4443383 - DNA, 25 bp, Homo sapien
gtgctgaggcgaccgcctccgagac

SEQ ID NO: 4443384 - DNA, 25 bp, Homo sapien
agcagcccgagccgcggtggcggcg

SEQ ID NO: 4443385 - DNA, 25 bp, Homo sapien
ccagcagcagcccgagccgcggtgg

SEQ ID NO: 4443386 - DNA, 25 bp, Homo sapien
agcagcagcccgagccgcggtggcg

SEQ ID NO: 4443387 - DNA, 25 bp, Homo sapien
gcagcagcccgagccgcggtggcgg

SEQ ID NO: 4443388 - DNA, 25 bp, Homo sapien
gggtgctcccctgaagtggagaaca

SEQ ID NO: 4443389 - DNA, 25 bp, Homo sapien
gctcccctgaagtggagaacatatg

SEQ ID NO: 4443390 - DNA, 25 bp, Homo sapien
gcaaaaccacgtcagatcaaacaca

SEQ ID NO: 4443391 - DNA, 25 bp, Homo sapien
ccctgaagtggagaacatatggctg

SEQ ID NO: 4443392 - DNA, 25 bp, Homo sapien
tcgctgactgggatgtacaactggt

SEQ ID NO: 4443393 - DNA, 25 bp, Homo sapien
agttgagcttcaccggctgcccctg

SEQ ID NO: 4443394 - DNA, 25 bp, Homo sapien
gactgggatgtacaactggtccaag

SEQ ID NO: 4443395 - DNA, 25 bp, Homo sapien
gggatgtacaactggtccaagttct

SEQ ID NO: 4443396 - DNA, 25 bp, Homo sapien
ctgtggaaacaggatacgaggcttg

SEQ ID NO: 4443397 - DNA, 25 bp, Homo sapien
tgtggaaacaggatacgaggcttgc

SEQ ID NO: 4443398 - DNA, 25 bp, Homo sapien
aggcttgcttccgagggcaagggcg

SEQ ID NO: 4443399 - DNA, 25 bp, Homo sapien
tacgaggcttgcttccgagggcaag

SEQ ID NO: 4443400 - DNA, 25 bp, Homo sapien
accagtaccggccggcgtcagagcg

SEQ ID NO: 4443401 - DNA, 25 bp, Homo sapien
gagatctcggtttcacccccatcct

SEQ ID NO: 4443402 - DNA, 25 bp, Homo sapien
cacctggcaccagtaccggccggcg

SEQ ID NO: 4443403 - DNA, 25 bp, Homo sapien
tggcaccagtaccggccggcgtcag

SEQ ID NO: 4443404 - DNA, 25 bp, Homo sapien
acacgcccatatggctctgcctcct

SEQ ID NO: 4443405 - DNA, 25 bp, Homo sapien
ccaacacgcccatatggctctgcct

SEQ ID NO: 4443406 - DNA, 25 bp, Homo sapien
gctccaggccaacacgcccatatgg

SEQ ID NO: 4443407 - DNA, 25 bp, Homo sapien
aggccaacacgcccatatggctctg

SEQ ID NO: 4443408 - DNA, 25 bp, Homo sapien
ttgctcaagcaacggaaacagactg

SEQ ID NO: 4443409 - DNA, 25 bp, Homo sapien
ttctactgagttctccgctgcagag

SEQ ID NO: 4443410 - DNA, 25 bp, Homo sapien
tagggtcttccgacatctggagtgg

SEQ ID NO: 4443411 - DNA, 25 bp, Homo sapien
ccccttaggcatggcagatttggac

SEQ ID NO: 4443412 - DNA, 25 bp, Homo sapien
cagatcttttggctccactgtgaaa

SEQ ID NO: 4443413 - DNA, 25 bp, Homo sapien
gtagttcctctccaccagacaatgg

SEQ ID NO: 4443414 - DNA, 25 bp, Homo sapien
gatcttcgtagttcctctccaccag

SEQ ID NO: 4443415 - DNA, 25 bp, Homo sapien
ccagacaatggtaacaggttcaggg

SEQ ID NO: 4443416 - DNA, 25 bp, Homo sapien
ggccttttaggttgtgagcttcaca

SEQ ID NO: 4443417 - DNA, 25 bp, Homo sapien
ccaggccttttaggttgtgagcttc

SEQ ID NO: 4443418 - DNA, 25 bp, Homo sapien
cttttaggttgtgagcttcacagga

SEQ ID NO: 4443419 - DNA, 25 bp, Homo sapien
aggccaggccttttaggttgtgagc

SEQ ID NO: 4443420 - DNA, 25 bp, Homo sapien
cactagcgttgctgctggaaagctt

SEQ ID NO: 4443421 - DNA, 25 bp, Homo sapien
actgtagcagagctcggccatcagc

SEQ ID NO: 4443422 - DNA, 25 bp, Homo sapien
gaactgtacaggactgtagcagagc

SEQ ID NO: 4443423 - DNA, 25 bp, Homo sapien
tggcatccaggccacactagcgttg

SEQ ID NO: 4443424 - DNA, 25 bp, Homo sapien
aatagttagaagtacaggcgcatgc

SEQ ID NO: 4443425 - DNA, 25 bp, Homo sapien
taaacggatgaaaatgagcaagcct

SEQ ID NO: 4443426 - DNA, 25 bp, Homo sapien
tttgaaaggtactcattaaatggcc

SEQ ID NO: 4443427 - DNA, 25 bp, Homo sapien
actgtgcccaacctcagtagggttc

SEQ ID NO: 4443428 - DNA, 25 bp, Homo sapien
taatacacagggttccacatcttca

SEQ ID NO: 4443429 - DNA, 25 bp, Homo sapien
tgcctgtttacatgccactccaaag

SEQ ID NO: 4443430 - DNA, 25 bp, Homo sapien
tcagagaaaactgggagcctagggc

SEQ ID NO: 4443431 - DNA, 25 bp, Homo sapien
tatgggtgcttgaatgaatgcttcc

SEQ ID NO: 4443432 - DNA, 25 bp, Homo sapien
ggtctgaaagggcacccagtcagca

SEQ ID NO: 4443433 - DNA, 25 bp, Homo sapien
cccttggtctgaaagggcacccagt

SEQ ID NO: 4443434 - DNA, 25 bp, Homo sapien
ttggtctgaaagggcacccagtcag

SEQ ID NO: 4443435 - DNA, 25 bp, Homo sapien
cttggtctgaaagggcacccagtca

SEQ ID NO: 4443436 - DNA, 25 bp, Homo sapien
cttcccactccaagatgaggcctga

SEQ ID NO: 4443437 - DNA, 25 bp, Homo sapien
catggaggttttggggagcgctggc

SEQ ID NO: 4443438 - DNA, 25 bp, Homo sapien
cttcttcccactccaagatgaggcc

SEQ ID NO: 4443439 - DNA, 25 bp, Homo sapien
actccaagatgaggcctgaatctgt

SEQ ID NO: 4443440 - DNA, 25 bp, Homo sapien
ctgggagtaatcacattcctgttcc

SEQ ID NO: 4443441 - DNA, 25 bp, Homo sapien
gctcagtcccggaatgcacaggtgg

SEQ ID NO: 4443442 - DNA, 25 bp, Homo sapien
aaacaaggctcagtcccggaatgca

SEQ ID NO: 4443443 - DNA, 25 bp, Homo sapien
aaccttctgggagtaatcacattcc

SEQ ID NO: 4443444 - DNA, 25 bp, Homo sapien
gggatcccagcctgtcaaattggcc

SEQ ID NO: 4443445 - DNA, 25 bp, Homo sapien
gatcccagcctgtcaaattggccct

SEQ ID NO: 4443446 - DNA, 25 bp, Homo sapien
ttttggggatcccagcctgtcaaat

SEQ ID NO: 4443447 - DNA, 25 bp, Homo sapien
tcccagcctgtcaaattggccctgg

SEQ ID NO: 4443448 - DNA, 25 bp, Homo sapien
ggagatgctactaggctcctcccat

SEQ ID NO: 4443449 - DNA, 25 bp, Homo sapien
caagatagtttaaacagccctggcc

SEQ ID NO: 4443450 - DNA, 25 bp, Homo sapien
ttgaaaaccttgatcccctgagcct

SEQ ID NO: 4443451 - DNA, 25 bp, Homo sapien
cccatcagtctaggttgcccttgaa

SEQ ID NO: 4443452 - DNA, 25 bp, Homo sapien
tttccgtctctttcgaagcaggatg

SEQ ID NO: 4443453 - DNA, 25 bp, Homo sapien
cgtctctttcgaagcaggatgaggg

SEQ ID NO: 4443454 - DNA, 25 bp, Homo sapien
tccgtctctttcgaagcaggatgag

SEQ ID NO: 4443455 - DNA, 25 bp, Homo sapien
tctttccgtctctttcgaagcagga

SEQ ID NO: 4443456 - DNA, 25 bp, Homo sapien
cgctcgggcctttctcgattgaagg

SEQ ID NO: 4443457 - DNA, 25 bp, Homo sapien
gctcgggcctttctcgattgaagga

SEQ ID NO: 4443458 - DNA, 25 bp, Homo sapien
tgcgctcgggcctttctcgattgaa

SEQ ID NO: 4443459 - DNA, 25 bp, Homo sapien
cgatgcgctcgggcctttctcgatt

SEQ ID NO: 4443460 - DNA, 25 bp, Homo sapien
tagttcatcgctgatgcccaagctg

SEQ ID NO: 4443461 - DNA, 25 bp, Homo sapien
caacatccggcccagggtgaactgc

SEQ ID NO: 4443462 - DNA, 25 bp, Homo sapien
tttgcccaacatccggcccagggtg

SEQ ID NO: 4443463 - DNA, 25 bp, Homo sapien
tttcctttagttcatcgctgatgcc

SEQ ID NO: 4443464 - DNA, 25 bp, Homo sapien
agccactttcacaaaggagccatcc

SEQ ID NO: 4443465 - DNA, 25 bp, Homo sapien
atgtcgcttgaggcaatgatgtcag

SEQ ID NO: 4443466 - DNA, 25 bp, Homo sapien
aatgtcgcttgaggcaatgatgtca

SEQ ID NO: 4443467 - DNA, 25 bp, Homo sapien
caatgtcgcttgaggcaatgatgtc

SEQ ID NO: 4443468 - DNA, 25 bp, Homo sapien
tggggatggggagacggcctttagc

SEQ ID NO: 4443469 - DNA, 25 bp, Homo sapien
tttagccctgctccggaggcttacc

SEQ ID NO: 4443470 - DNA, 25 bp, Homo sapien
tccccaatccgggaggcgagcagga

SEQ ID NO: 4443471 - DNA, 25 bp, Homo sapien
gttctccccaatccgggaggcgagc

SEQ ID NO: 4443472 - DNA, 25 bp, Homo sapien
cggtggatgaagttccgagagctca

SEQ ID NO: 4443473 - DNA, 25 bp, Homo sapien
tggatgaagttccgagagctcaggt

SEQ ID NO: 4443474 - DNA, 25 bp, Homo sapien
gatgaagttccgagagctcaggtac

SEQ ID NO: 4443475 - DNA, 25 bp, Homo sapien
ctcggtggatgaagttccgagagct

SEQ ID NO: 4443476 - DNA, 25 bp, Homo sapien
agtccccactgtagatcttccggga

SEQ ID NO: 4443477 - DNA, 25 bp, Homo sapien
gccttgacgatagtagtccccactg

SEQ ID NO: 4443478 - DNA, 25 bp, Homo sapien
agtttggaggcacagccttgacgat

SEQ ID NO: 4443479 - DNA, 25 bp, Homo sapien
tccccactgtagatcttccgggaga

SEQ ID NO: 4443480 - DNA, 25 bp, Homo sapien
agcgttttcgatgccagcatatggc

SEQ ID NO: 4443481 - DNA, 25 bp, Homo sapien
cgttttcgatgccagcatatggcgt

SEQ ID NO: 4443482 - DNA, 25 bp, Homo sapien
gcgttttcgatgccagcatatggcg

SEQ ID NO: 4443483 - DNA, 25 bp, Homo sapien
tggagagaagcgtgagaaaaggcag

SEQ ID NO: 4443484 - DNA, 25 bp, Homo sapien
ttttattccctggtggggcacagcg

SEQ ID NO: 4443485 - DNA, 25 bp, Homo sapien
aggagcccttccctcaaaagcaggg

SEQ ID NO: 4443486 - DNA, 25 bp, Homo sapien
catcatatggcactagggttttaaa

SEQ ID NO: 4443487 - DNA, 25 bp, Homo sapien
gttccattcgcagacaagtaaagct

SEQ ID NO: 4443488 - DNA, 25 bp, Homo sapien
gctctctcgatgttgatgtataagg

SEQ ID NO: 4443489 - DNA, 25 bp, Homo sapien
gttctccagttccattcgcagacaa

SEQ ID NO: 4443490 - DNA, 25 bp, Homo sapien
ctctctcgatgttgatgtataaggg

SEQ ID NO: 4443491 - DNA, 25 bp, Homo sapien
agtatgtaccgacagtcactgggag

SEQ ID NO: 4443492 - DNA, 25 bp, Homo sapien
tctgtgtctcattgaggggactctc

SEQ ID NO: 4443493 - DNA, 25 bp, Homo sapien
ctccgggggtgagtatgtaccgaca

SEQ ID NO: 4443494 - DNA, 25 bp, Homo sapien
gggtgagtatgtaccgacagtcact

SEQ ID NO: 4443495 - DNA, 25 bp, Homo sapien
cagcatgcctttgtgtgacccggtc

SEQ ID NO: 4443496 - DNA, 25 bp, Homo sapien
caccgtttagaagggttgggctcag

SEQ ID NO: 4443497 - DNA, 25 bp, Homo sapien
tcaagccaaggcctaaactgatgcc

SEQ ID NO: 4443498 - DNA, 25 bp, Homo sapien
gcacagcttgggaggactaccacag

SEQ ID NO: 4443499 - DNA, 25 bp, Homo sapien
ccaaccgatagtgaaggtcttttca

SEQ ID NO: 4443500 - DNA, 25 bp, Homo sapien
agaagcagcacaatacctgtgggcc

SEQ ID NO: 4443501 - DNA, 25 bp, Homo sapien
tgaaagctaatcacagcaggaaaga

SEQ ID NO: 4443502 - DNA, 25 bp, Homo sapien
cagaatttggagtaccagcaacagg

SEQ ID NO: 4443503 - DNA, 25 bp, Homo sapien
ttaagaggtcaggatagaggttacc

SEQ ID NO: 4443504 - DNA, 25 bp, Homo sapien
aggcagagattgaggcaggtcccaa

SEQ ID NO: 4443505 - DNA, 25 bp, Homo sapien
cactgatccatggtgttaagaggtc

SEQ ID NO: 4443506 - DNA, 25 bp, Homo sapien
taaaaggagcttcactgatccatgg

SEQ ID NO: 4443507 - DNA, 25 bp, Homo sapien
tgacactggcacatgtaattgggat

SEQ ID NO: 4443508 - DNA, 25 bp, Homo sapien
tcaatgaggctatatagagaaatgg

SEQ ID NO: 4443509 - DNA, 25 bp, Homo sapien
taattcaattagtgtagcagtgaca

SEQ ID NO: 4443510 - DNA, 25 bp, Homo sapien
tgggatgaacagtctagcaaccaaa

SEQ ID NO: 4443511 - DNA, 25 bp, Homo sapien
cgtcaggaaggtttgcacagctgtt

SEQ ID NO: 4443512 - DNA, 25 bp, Homo sapien
ctggtcttcgtcaggaaggtttgca

SEQ ID NO: 4443513 - DNA, 25 bp, Homo sapien
tcttcgtcaggaaggtttgcacagc

SEQ ID NO: 4443514 - DNA, 25 bp, Homo sapien
ttcgtcaggaaggtttgcacagctg

SEQ ID NO: 4443515 - DNA, 25 bp, Homo sapien
caggagctccttgagataatgctga

SEQ ID NO: 4443516 - DNA, 25 bp, Homo sapien
ggcctcacccaaggatcactgggca

SEQ ID NO: 4443517 - DNA, 25 bp, Homo sapien
atgaagactcggagagacatagacc

SEQ ID NO: 4443518 - DNA, 25 bp, Homo sapien
ggaatatccatactgggaatgaaga

SEQ ID NO: 4443519 - DNA, 25 bp, Homo sapien
ctattggcagcaactcagagagtcc

SEQ ID NO: 4443520 - DNA, 25 bp, Homo sapien
cacattgatatgttggggccggtta

SEQ ID NO: 4443521 - DNA, 25 bp, Homo sapien
cagcaactcagagagtccagatggc

SEQ ID NO: 4443522 - DNA, 25 bp, Homo sapien
ctttccctgctgtcctattggcagc

SEQ ID NO: 4443523 - DNA, 25 bp, Homo sapien
ctagtaacaaactatagaaatgatt

SEQ ID NO: 4443524 - DNA, 25 bp, Homo sapien
agaaatgattcctgaaagtgtagtc

SEQ ID NO: 4443525 - DNA, 25 bp, Homo sapien
gctctacgtattcagagaaacttct

SEQ ID NO: 4443526 - DNA, 25 bp, Homo sapien
aatgattcctgaaagtgtagtcttg

SEQ ID NO: 4443527 - DNA, 25 bp, Homo sapien
ctggaagggaagctaggtatatgaa

SEQ ID NO: 4443528 - DNA, 25 bp, Homo sapien
gtaaatatactatactaacataaga

SEQ ID NO: 4443529 - DNA, 25 bp, Homo sapien
gacacgagaatcacctgttattcca

SEQ ID NO: 4443530 - DNA, 25 bp, Homo sapien
gaaaactctctttgtagtctgcaat

SEQ ID NO: 4443531 - DNA, 25 bp, Homo sapien
cctcaggctcccgaacagctaggac

SEQ ID NO: 4443532 - DNA, 25 bp, Homo sapien
gatattctcatgcctcaggctcccg

SEQ ID NO: 4443533 - DNA, 25 bp, Homo sapien
caagatattctcatgcctcaggctc

SEQ ID NO: 4443534 - DNA, 25 bp, Homo sapien
ctcaggctcccgaacagctaggact

SEQ ID NO: 4443535 - DNA, 25 bp, Homo sapien
gattataggccacgccaccacaact

SEQ ID NO: 4443536 - DNA, 25 bp, Homo sapien
ggattataggccacgccaccacaac

SEQ ID NO: 4443537 - DNA, 25 bp, Homo sapien
tctgaaaccccaagtcaggcacggt

SEQ ID NO: 4443538 - DNA, 25 bp, Homo sapien
tacaagctgccctgtcagaatctcc

SEQ ID NO: 4443539 - DNA, 25 bp, Homo sapien
caagagcattcaagatcctaggcaa

SEQ ID NO: 4443540 - DNA, 25 bp, Homo sapien
gtctgaactagaaaacgtgtaggct

SEQ ID NO: 4443541 - DNA, 25 bp, Homo sapien
accgcgcacgcgctcctacccgctc

SEQ ID NO: 4443542 - DNA, 25 bp, Homo sapien
gcacgcgctcctacccgctcggagc

SEQ ID NO: 4443543 - DNA, 25 bp, Homo sapien
ggacgtccacgtcaccgcgcacgcg

SEQ ID NO: 4443544 - DNA, 25 bp, Homo sapien
cggacgtccacgtcaccgcgcacgc

SEQ ID NO: 4443545 - DNA, 25 bp, Homo sapien
ggcctcacccggagtccttcacatc

SEQ ID NO: 4443546 - DNA, 25 bp, Homo sapien
ggcgggttattctgttcggttcgca

SEQ ID NO: 4443547 - DNA, 25 bp, Homo sapien
ccgtgtgtccgctccagctgaagag

SEQ ID NO: 4443548 - DNA, 25 bp, Homo sapien
tgttcggttcgcacaccgtgtgtcc

SEQ ID NO: 4443549 - DNA, 25 bp, Homo sapien
gccggggacgcgcgcgaggtgacat

SEQ ID NO: 4443550 - DNA, 25 bp, Homo sapien
agtgaggccggggacgcgcgcgagg

SEQ ID NO: 4443551 - DNA, 25 bp, Homo sapien
gaagtgaggccggggacgcgcgcga

SEQ ID NO: 4443552 - DNA, 25 bp, Homo sapien
tgaggccggggacgcgcgcgaggtg

SEQ ID NO: 4443553 - DNA, 25 bp, Homo sapien
tgttggtctgccatcagtaacccct

SEQ ID NO: 4443554 - DNA, 25 bp, Homo sapien
gaaagaaggcattcccagggttcga

SEQ ID NO: 4443555 - DNA, 25 bp, Homo sapien
aatgtcccagataccttgcactgag

SEQ ID NO: 4443556 - DNA, 25 bp, Homo sapien
gttcgaaaggcaaggcaaaaatctg

SEQ ID NO: 4443557 - DNA, 25 bp, Homo sapien
ctctgaaatgtcacaccagaagaca

SEQ ID NO: 4443558 - DNA, 25 bp, Homo sapien
caccagtgacctctttgggaaatgt

SEQ ID NO: 4443559 - DNA, 25 bp, Homo sapien
gattaatgtactgtgctcaacccca

SEQ ID NO: 4443560 - DNA, 25 bp, Homo sapien
taggtaagtaatctaacaagttcca

SEQ ID NO: 4443561 - DNA, 25 bp, Homo sapien
cagtagtaagacaactgtaatcacc

SEQ ID NO: 4443562 - DNA, 25 bp, Homo sapien
cacatagtcacaatggccttcccat

SEQ ID NO: 4443563 - DNA, 25 bp, Homo sapien
gacaactgtaatcaccacatagtca

SEQ ID NO: 4443564 - DNA, 25 bp, Homo sapien
ggaaactcagtagtaagacaactgt

SEQ ID NO: 4443565 - DNA, 25 bp, Homo sapien
gaccttctgtaagacggacccgatg

SEQ ID NO: 4443566 - DNA, 25 bp, Homo sapien
taacgacagtaaggaaacatgcgtc

SEQ ID NO: 4443567 - DNA, 25 bp, Homo sapien
tactggtgatgacacactactagcc

SEQ ID NO: 4443568 - DNA, 25 bp, Homo sapien
gaagcctcggcaggtaacgatgcat

SEQ ID NO: 4443569 - DNA, 25 bp, Homo sapien
tactttaccgccaatcatgaagtgt

SEQ ID NO: 4443570 - DNA, 25 bp, Homo sapien
gctgagatcattcagattgcataaa

SEQ ID NO: 4443571 - DNA, 25 bp, Homo sapien
cagacattacactggaggaacaaca

SEQ ID NO: 4443572 - DNA, 25 bp, Homo sapien
cagactgactagtgactcaatggaa

SEQ ID NO: 4443573 - DNA, 25 bp, Homo sapien
taacggtgaggctacacgggagtca

SEQ ID NO: 4443574 - DNA, 25 bp, Homo sapien
tctgggcactcaccaagttcgtagt

SEQ ID NO: 4443575 - DNA, 25 bp, Homo sapien
taggtggtcgtcctgccttacagag

SEQ ID NO: 4443576 - DNA, 25 bp, Homo sapien
ttagctttagcaacacctgatgggc

SEQ ID NO: 4443577 - DNA, 25 bp, Homo sapien
cttctgttgtcccatcaactgcatg

SEQ ID NO: 4443578 - DNA, 25 bp, Homo sapien
gtcatttgtggttgatgcctggaga

SEQ ID NO: 4443579 - DNA, 25 bp, Homo sapien
tcatttgtggttgatgcctggagac

SEQ ID NO: 4443580 - DNA, 25 bp, Homo sapien
agtcatttgtggttgatgcctggag

SEQ ID NO: 4443581 - DNA, 25 bp, Homo sapien
tcttgaagaccaggatgtatcacct

SEQ ID NO: 4443582 - DNA, 25 bp, Homo sapien
ttgtgccgcaaagtcttcaaatctt

SEQ ID NO: 4443583 - DNA, 25 bp, Homo sapien
ctgcttgtgccgcaaagtcttcaaa

SEQ ID NO: 4443584 - DNA, 25 bp, Homo sapien
tatcacctgcttgtgccgcaaagtc

SEQ ID NO: 4443585 - DNA, 25 bp, Homo sapien
caaccagagcctacttagaacctaa

SEQ ID NO: 4443586 - DNA, 25 bp, Homo sapien
gggcataaaaactttagcttgcaga

SEQ ID NO: 4443587 - DNA, 25 bp, Homo sapien
gacaactgagacctagactcagctg

SEQ ID NO: 4443588 - DNA, 25 bp, Homo sapien
tgccaactgctagctaaaaccactg

SEQ ID NO: 4443589 - DNA, 25 bp, Homo sapien
aaaaggaaagctagtagctggagcc

SEQ ID NO: 4443590 - DNA, 25 bp, Homo sapien
tgttggatccactgaattcaatttt

SEQ ID NO: 4443591 - DNA, 25 bp, Homo sapien
cccaagtatttaagatcaatgctca

SEQ ID NO: 4443592 - DNA, 25 bp, Homo sapien
gctggagccaaaggtaactgtactc

SEQ ID NO: 4443593 - DNA, 25 bp, Homo sapien
ccatcccttgatcttagtgaaatca

SEQ ID NO: 4443594 - DNA, 25 bp, Homo sapien
tcccttgatcttagtgaaatcattg

SEQ ID NO: 4443595 - DNA, 25 bp, Homo sapien
agatgcagaagcactatgaaatttt

SEQ ID NO: 4443596 - DNA, 25 bp, Homo sapien
agaagcactatgaaattttcccctc

SEQ ID NO: 4443597 - DNA, 25 bp, Homo sapien
ttcacctgagatttagacaagcctg

SEQ ID NO: 4443598 - DNA, 25 bp, Homo sapien
tttagttcggccactgaaagttgcc

SEQ ID NO: 4443599 - DNA, 25 bp, Homo sapien
tgagactttgcctttcgagagacag

SEQ ID NO: 4443600 - DNA, 25 bp, Homo sapien
tgtgcctgccgcaaactaatctgct

SEQ ID NO: 4443601 - DNA, 25 bp, Homo sapien
tccaaagctagactggaacatacac

SEQ ID NO: 4443602 - DNA, 25 bp, Homo sapien
caaacatgcagtctggtcggcggca

SEQ ID NO: 4443603 - DNA, 25 bp, Homo sapien
ccagtcgacagaagtcattgttgca

SEQ ID NO: 4443604 - DNA, 25 bp, Homo sapien
gcaggttggcgcttctccaaagcta

SEQ ID NO: 4443605 - DNA, 25 bp, Homo sapien
cgatgagcagccttcctctgaaaat

SEQ ID NO: 4443606 - DNA, 25 bp, Homo sapien
cctctcccagagtatcataaaatac

SEQ ID NO: 4443607 - DNA, 25 bp, Homo sapien
taaggataataagaagtctcaaagc

SEQ ID NO: 4443608 - DNA, 25 bp, Homo sapien
gctcttattggataattgatcggga

SEQ ID NO: 4443609 - DNA, 25 bp, Homo sapien
ttgtgtgcatctcagatagccagtc

SEQ ID NO: 4443610 - DNA, 25 bp, Homo sapien
agccagtcagaaagagcatgtaagg

SEQ ID NO: 4443611 - DNA, 25 bp, Homo sapien
gtgcacatgcgcacaatccagaaaa

SEQ ID NO: 4443612 - DNA, 25 bp, Homo sapien
tatatggatcatctatagtctttcc

SEQ ID NO: 4443613 - DNA, 25 bp, Homo sapien
caaggaacgtacgtgtgtctacctg

SEQ ID NO: 4443614 - DNA, 25 bp, Homo sapien
tctatagtctttccaaggaacgtac

SEQ ID NO: 4443615 - DNA, 25 bp, Homo sapien
agaaaactaattgggtacagtggct

SEQ ID NO: 4443616 - DNA, 25 bp, Homo sapien
cagaaaactaattgggtacagtggc

SEQ ID NO: 4443617 - DNA, 25 bp, Homo sapien
atggtcaataaatctatcatagaag

SEQ ID NO: 4443618 - DNA, 25 bp, Homo sapien
acagaaaactaattgggtacagtgg

SEQ ID NO: 4443619 - DNA, 25 bp, Homo sapien
tgcacagccagcagtattttttgac

SEQ ID NO: 4443620 - DNA, 25 bp, Homo sapien
ttttgacaaaccaaaggataagcag

SEQ ID NO: 4443621 - DNA, 25 bp, Homo sapien
caggtgataaaagtaaaggccactg

SEQ ID NO: 4443622 - DNA, 25 bp, Homo sapien
gataagcaggtgataaaagtaaagg

SEQ ID NO: 4443623 - DNA, 25 bp, Homo sapien
gaagcagttgcagaagcccagacac

SEQ ID NO: 4443624 - DNA, 25 bp, Homo sapien
aagcagttgcagaagcccagacacc

SEQ ID NO: 4443625 - DNA, 25 bp, Homo sapien
aagcagcatttttccgaggttcact

SEQ ID NO: 4443626 - DNA, 25 bp, Homo sapien
tgttcttcaagattgacctggttat

SEQ ID NO: 4443627 - DNA, 25 bp, Homo sapien
ctatcagagttttgattaggactga

SEQ ID NO: 4443628 - DNA, 25 bp, Homo sapien
gctcagatgattcactagtctcggc

SEQ ID NO: 4443629 - DNA, 25 bp, Homo sapien
gaggacatgtagctggttcaaagcc

SEQ ID NO: 4443630 - DNA, 25 bp, Homo sapien
acatgtagctggttcaaagccaaag

SEQ ID NO: 4443631 - DNA, 25 bp, Homo sapien
agaggacatgtagctggttcaaagc

SEQ ID NO: 4443632 - DNA, 25 bp, Homo sapien
ggacatgtagctggttcaaagccaa

SEQ ID NO: 4443633 - DNA, 25 bp, Homo sapien
tcccataaagcagccgtagtgaagt

SEQ ID NO: 4443634 - DNA, 25 bp, Homo sapien
taaagcagccgtagtgaagtaaatg

SEQ ID NO: 4443635 - DNA, 25 bp, Homo sapien
cataaagcagccgtagtgaagtaaa

SEQ ID NO: 4443636 - DNA, 25 bp, Homo sapien
cccataaagcagccgtagtgaagta

SEQ ID NO: 4443637 - DNA, 25 bp, Homo sapien
tgttcaggctctgtctcacatatag

SEQ ID NO: 4443638 - DNA, 25 bp, Homo sapien
caataacaatggtttcataggctca

SEQ ID NO: 4443639 - DNA, 25 bp, Homo sapien
cataatgggtaatgtcgaacaggct

SEQ ID NO: 4443640 - DNA, 25 bp, Homo sapien
cataggctcaatgacagaaggcgtg

SEQ ID NO: 4443641 - DNA, 25 bp, Homo sapien
attgggtttgggagtatatgaccgt

SEQ ID NO: 4443642 - DNA, 25 bp, Homo sapien
ttaattccagtgagcagtttgccct

SEQ ID NO: 4443643 - DNA, 25 bp, Homo sapien
tatgaccgtggagatttaattccag

SEQ ID NO: 4443644 - DNA, 25 bp, Homo sapien
agtttgcccttcacagtaggagata

SEQ ID NO: 4443645 - DNA, 25 bp, Homo sapien
gcattattatggttctcagggctag

SEQ ID NO: 4443646 - DNA, 25 bp, Homo sapien
gaactcgagcacaagtcatcatact

SEQ ID NO: 4443647 - DNA, 25 bp, Homo sapien
caagtagactggatctttgtcctct

SEQ ID NO: 4443648 - DNA, 25 bp, Homo sapien
tttcgctcatatactcgaactcgag

SEQ ID NO: 4443649 - DNA, 25 bp, Homo sapien
cccgtctcaactaaagcatagaaat

SEQ ID NO: 4443650 - DNA, 25 bp, Homo sapien
atggtggcacccgcccgtaatgcca

SEQ ID NO: 4443651 - DNA, 25 bp, Homo sapien
caactaaagcatagaaattagccgg

SEQ ID NO: 4443652 - DNA, 25 bp, Homo sapien
tctcaactaaagcatagaaattagc

SEQ ID NO: 4443653 - DNA, 25 bp, Homo sapien
tgatgttgaggtggcagtacaagcg

SEQ ID NO: 4443654 - DNA, 25 bp, Homo sapien
tccggggagtcaccactgatgttga

SEQ ID NO: 4443655 - DNA, 25 bp, Homo sapien
tggttttccggggagtcaccactga

SEQ ID NO: 4443656 - DNA, 25 bp, Homo sapien
gcagtacaagcgaaggtggagcccc

SEQ ID NO: 4443657 - DNA, 25 bp, Homo sapien
gaaaattcaccagttgaggccagtc

SEQ ID NO: 4443658 - DNA, 25 bp, Homo sapien
tgtcaacagcttcaatccacatgca

SEQ ID NO: 4443659 - DNA, 25 bp, Homo sapien
gctacctaatgtccttgatagtgac

SEQ ID NO: 4443660 - DNA, 25 bp, Homo sapien
cgttactatcatataaaaccctggg

SEQ ID NO: 4443661 - DNA, 25 bp, Homo sapien
cctccaagtcacaggtgagttgttt

SEQ ID NO: 4443662 - DNA, 25 bp, Homo sapien
gcagtgatggaggaccaaaggctaa

SEQ ID NO: 4443663 - DNA, 25 bp, Homo sapien
tatttttgagagcaggagtgttaac

SEQ ID NO: 4443664 - DNA, 25 bp, Homo sapien
ggctaatgatgccaatattactggg

SEQ ID NO: 4443665 - DNA, 25 bp, Homo sapien
gagtgttaacagaccaaataatggg

SEQ ID NO: 4443666 - DNA, 25 bp, Homo sapien
gatcttcctcccagttgcagtctga

SEQ ID NO: 4443667 - DNA, 25 bp, Homo sapien
gatggcatagagattttcacacgag

SEQ ID NO: 4443668 - DNA, 25 bp, Homo sapien
gatgaagctgcccaccttaagtgat

SEQ ID NO: 4443669 - DNA, 25 bp, Homo sapien
tctcaatcagtttggtgggaccacc

SEQ ID NO: 4443670 - DNA, 25 bp, Homo sapien
ttataggccacaagcttccctgcag

SEQ ID NO: 4443671 - DNA, 25 bp, Homo sapien
tttataggccacaagcttccctgca

SEQ ID NO: 4443672 - DNA, 25 bp, Homo sapien
cagatgtacttgaactgggtttacg

SEQ ID NO: 4443673 - DNA, 25 bp, Homo sapien
gacctttgcctccatgtaatctctc

SEQ ID NO: 4443674 - DNA, 25 bp, Homo sapien
tgccttaggtgatccaccacctcgg

SEQ ID NO: 4443675 - DNA, 25 bp, Homo sapien
aggctagtctcaaactccttgcctt

SEQ ID NO: 4443676 - DNA, 25 bp, Homo sapien
tagtctcaaactccttgccttaggt

SEQ ID NO: 4443677 - DNA, 25 bp, Homo sapien
gctagtctcaaactccttgccttag

SEQ ID NO: 4443678 - DNA, 25 bp, Homo sapien
tggagtgaggtagaatctactctct

SEQ ID NO: 4443679 - DNA, 25 bp, Homo sapien
gcaactctagagaagataacctttt

SEQ ID NO: 4443680 - DNA, 25 bp, Homo sapien
tctctaggtcatattgccaggcaac

SEQ ID NO: 4443681 - DNA, 25 bp, Homo sapien
aacttcccaagtctctacccatgtt

SEQ ID NO: 4443682 - DNA, 25 bp, Homo sapien
caaactgaatgttggtacgaactca

SEQ ID NO: 4443683 - DNA, 25 bp, Homo sapien
cattgttgcaataacctaagccaca

SEQ ID NO: 4443684 - DNA, 25 bp, Homo sapien
ctaaatagtcagaagaaagtgaacc

SEQ ID NO: 4443685 - DNA, 25 bp, Homo sapien
catctcttggataaaacatgggttc

SEQ ID NO: 4443686 - DNA, 25 bp, Homo sapien
tagcaacttagcctgcgggtaactc

SEQ ID NO: 4443687 - DNA, 25 bp, Homo sapien
caggactgagggtcgcaacctgcct

SEQ ID NO: 4443688 - DNA, 25 bp, Homo sapien
tataagcagctagcctattggctgg

SEQ ID NO: 4443689 - DNA, 25 bp, Homo sapien
gcaacctgcctgtgatataagcagc

SEQ ID NO: 4443690 - DNA, 25 bp, Homo sapien
tgggacaaacgccttcagattcttc

SEQ ID NO: 4443691 - DNA, 25 bp, Homo sapien
tttggaattggatgttgaaggcaac

SEQ ID NO: 4443692 - DNA, 25 bp, Homo sapien
caattggccgttttgctgggacaaa

SEQ ID NO: 4443693 - DNA, 25 bp, Homo sapien
cccagggcgatttgttgcagtgcca

SEQ ID NO: 4443694 - DNA, 25 bp, Homo sapien
catctaatattgcaggttatcagac

SEQ ID NO: 4443695 - DNA, 25 bp, Homo sapien
tcctcacaggaaaatagtaaactat

SEQ ID NO: 4443696 - DNA, 25 bp, Homo sapien
tatcagacgttaaccccaaacaatc

SEQ ID NO: 4443697 - DNA, 25 bp, Homo sapien
atttacatagcaccagcaagagttc

SEQ ID NO: 4443698 - DNA, 25 bp, Homo sapien
tgagagtataataggaacagagccc

SEQ ID NO: 4443699 - DNA, 25 bp, Homo sapien
caggtgtgacgaccattactggaga

SEQ ID NO: 4443700 - DNA, 25 bp, Homo sapien
ggtggactcccattaattcctgaga

SEQ ID NO: 4443701 - DNA, 25 bp, Homo sapien
aacaacccctgtagtggtggcacca

SEQ ID NO: 4443702 - DNA, 25 bp, Homo sapien
cacagatatcaaagtgccaacaggg

SEQ ID NO: 4443703 - DNA, 25 bp, Homo sapien
gtgcccagccatattaatcttacgt

SEQ ID NO: 4443704 - DNA, 25 bp, Homo sapien
gatggtttacttaactgtgtgcaag

SEQ ID NO: 4443705 - DNA, 25 bp, Homo sapien
acttttagagagtgattcaaaaaca

SEQ ID NO: 4443706 - DNA, 25 bp, Homo sapien
gacaatctgcccattagggtgcctg

SEQ ID NO: 4443707 - DNA, 25 bp, Homo sapien
cacttggactcctaacaggctgcaa

SEQ ID NO: 4443708 - DNA, 25 bp, Homo sapien
ggtctaagagtaggagaaccctgct

SEQ ID NO: 4443709 - DNA, 25 bp, Homo sapien
tcaacaacaatcgaggtccagcacg

SEQ ID NO: 4443710 - DNA, 25 bp, Homo sapien
taagactggctgtaccaacaggctg

SEQ ID NO: 4443711 - DNA, 25 bp, Homo sapien
tgtcctgggagctgtaacaaggcaa

SEQ ID NO: 4443712 - DNA, 25 bp, Homo sapien
gaaggagcaggtaaccggattccca

SEQ ID NO: 4443713 - DNA, 25 bp, Homo sapien
agggtcaatgtaccagcctgagaca

SEQ ID NO: 4443714 - DNA, 25 bp, Homo sapien
taagtcagagatgccttgttcttgc

SEQ ID NO: 4443715 - DNA, 25 bp, Homo sapien
ggctgtagattagattgctgctcca

SEQ ID NO: 4443716 - DNA, 25 bp, Homo sapien
ggaactcttacgattcctagcccca

SEQ ID NO: 4443717 - DNA, 25 bp, Homo sapien
tctggtagtcagaaacaacatccac

SEQ ID NO: 4443718 - DNA, 25 bp, Homo sapien
tagtcgcaacagagagccatctagc

SEQ ID NO: 4443719 - DNA, 25 bp, Homo sapien
tgtatgacaatcagtgcagacggct

SEQ ID NO: 4443720 - DNA, 25 bp, Homo sapien
taactcggtagggactctcaagcac

SEQ ID NO: 4443721 - DNA, 25 bp, Homo sapien
gaaaaggaccagataacacagaggc

SEQ ID NO: 4443722 - DNA, 25 bp, Homo sapien
tcctcaatgtattctacacagttat

SEQ ID NO: 4443723 - DNA, 25 bp, Homo sapien
ctcatcatcctcaatgtattctaca

SEQ ID NO: 4443724 - DNA, 25 bp, Homo sapien
cctctgagagctcttctacagtctc

SEQ ID NO: 4443725 - DNA, 25 bp, Homo sapien
agtctcaatgtccacgtgctcctca

SEQ ID NO: 4443726 - DNA, 25 bp, Homo sapien
ggataaagacaggatttttcagtgt

SEQ ID NO: 4443727 - DNA, 25 bp, Homo sapien
tggataaagacaggatttttcagtg

SEQ ID NO: 4443728 - DNA, 25 bp, Homo sapien
gctttttcatctgcagagatgtgag

SEQ ID NO: 4443729 - DNA, 25 bp, Homo sapien
tgctttttcatctgcagagatgtga

SEQ ID NO: 4443730 - DNA, 25 bp, Homo sapien
tttcatctgcagagatgtgagtaca

SEQ ID NO: 4443731 - DNA, 25 bp, Homo sapien
atctgcagagatgtgagtacaggac

SEQ ID NO: 4443732 - DNA, 25 bp, Homo sapien
gaatggcaccttgttttacatcaga

SEQ ID NO: 4443733 - DNA, 25 bp, Homo sapien
tacattagtctatcctctgaggaga

SEQ ID NO: 4443734 - DNA, 25 bp, Homo sapien
tcatgagcccaagcaagaaagaatg

SEQ ID NO: 4443735 - DNA, 25 bp, Homo sapien
tttcatggatccctaactgctagcc

SEQ ID NO: 4443736 - DNA, 25 bp, Homo sapien
tttgtcactccagtaatcaggcttc

SEQ ID NO: 4443737 - DNA, 25 bp, Homo sapien
tgtagtttgtcactccagtaatcag

SEQ ID NO: 4443738 - DNA, 25 bp, Homo sapien
tagtttgtcactccagtaatcaggc

SEQ ID NO: 4443739 - DNA, 25 bp, Homo sapien
tttctgtagtttgtcactccagtaa

SEQ ID NO: 4443740 - DNA, 25 bp, Homo sapien
tgtccggcgataataagcaaacgct

SEQ ID NO: 4443741 - DNA, 25 bp, Homo sapien
gccgccgccgctcattggcagtgtg

SEQ ID NO: 4443742 - DNA, 25 bp, Homo sapien
gaatgaagtaatcccaatgtgatct

SEQ ID NO: 4443743 - DNA, 25 bp, Homo sapien
aaagagatccctcatttcaccacgc

SEQ ID NO: 4443744 - DNA, 25 bp, Homo sapien
tccgtatcagaatattccgttttcg

SEQ ID NO: 4443745 - DNA, 25 bp, Homo sapien
cctatcaatttgtctgcctgatctg

SEQ ID NO: 4443746 - DNA, 25 bp, Homo sapien
cgttttcgagtcaggagatttttct

SEQ ID NO: 4443747 - DNA, 25 bp, Homo sapien
aaagagacgatactttccgtatcag

SEQ ID NO: 4443748 - DNA, 25 bp, Homo sapien
gggagatatgtcaaactcatctgat

SEQ ID NO: 4443749 - DNA, 25 bp, Homo sapien
gatgatgcagaagatccttcctgct

SEQ ID NO: 4443750 - DNA, 25 bp, Homo sapien
cttcctgctgtttgctaattctggg

SEQ ID NO: 4443751 - DNA, 25 bp, Homo sapien
tctgtccaagatctacagatgatgc

SEQ ID NO: 4443752 - DNA, 25 bp, Homo sapien
tggagtgttcaagggtgaggtattt

SEQ ID NO: 4443753 - DNA, 25 bp, Homo sapien
gaccttttagggtgagcaattgccc

SEQ ID NO: 4443754 - DNA, 25 bp, Homo sapien
cggagtcatcacaaggttggcagag

SEQ ID NO: 4443755 - DNA, 25 bp, Homo sapien
tagggtgagcaattgcccttgcgga

SEQ ID NO: 4443756 - DNA, 25 bp, Homo sapien
tggtagagccacagcactaccggca

SEQ ID NO: 4443757 - DNA, 25 bp, Homo sapien
cactaccggcaacttgaggcttaag

SEQ ID NO: 4443758 - DNA, 25 bp, Homo sapien
taagatcagattctaagagatcagg

SEQ ID NO: 4443759 - DNA, 25 bp, Homo sapien
tgaggcttaagatcagattctaaga

SEQ ID NO: 4443760 - DNA, 25 bp, Homo sapien
cattaacaattcgtggcatcataaa

SEQ ID NO: 4443761 - DNA, 25 bp, Homo sapien
tgatgtcacattaacaattcgtggc

SEQ ID NO: 4443762 - DNA, 25 bp, Homo sapien
cgtggcatcataaataagtcgtcat

SEQ ID NO: 4443763 - DNA, 25 bp, Homo sapien
ctgtggccaatgatgtcacattaac

SEQ ID NO: 4443764 - DNA, 25 bp, Homo sapien
ttcatgaggatatttgctgccaccc

SEQ ID NO: 4443765 - DNA, 25 bp, Homo sapien
tgcagggaggccagaagtattcttc

SEQ ID NO: 4443766 - DNA, 25 bp, Homo sapien
ttactaataaaagcccgccgagcat

SEQ ID NO: 4443767 - DNA, 25 bp, Homo sapien
gaaaagtcatcgtcttccaagtgca

SEQ ID NO: 4443768 - DNA, 25 bp, Homo sapien
gagtacttcttataccagggtcagc

SEQ ID NO: 4443769 - DNA, 25 bp, Homo sapien
taacgggaaactgctatacctggat

SEQ ID NO: 4443770 - DNA, 25 bp, Homo sapien
gagtttccaagagacccctcaagtg

SEQ ID NO: 4443771 - DNA, 25 bp, Homo sapien
gaagaactagaaaccactgtggagc

SEQ ID NO: 4443772 - DNA, 25 bp, Homo sapien
atatataaaagaaaatgctaaatct

SEQ ID NO: 4443773 - DNA, 25 bp, Homo sapien
taaaagaaaatgctaaatctgacat

SEQ ID NO: 4443774 - DNA, 25 bp, Homo sapien
aaagaaaatgctaaatctgacataa

SEQ ID NO: 4443775 - DNA, 25 bp, Homo sapien
tataaaagaaaatgctaaatctgac

SEQ ID NO: 4443776 - DNA, 25 bp, Homo sapien
ttatatattctacctttcaatcacc

SEQ ID NO: 4443777 - DNA, 25 bp, Homo sapien
atatattctacctttcaatcaccaa

SEQ ID NO: 4443778 - DNA, 25 bp, Homo sapien
tatatattctacctttcaatcacca

SEQ ID NO: 4443779 - DNA, 25 bp, Homo sapien
tccccaaggttaacaggtgaactgc

SEQ ID NO: 4443780 - DNA, 25 bp, Homo sapien
caaatacttgccatcaggttgcaca

SEQ ID NO: 4443781 - DNA, 25 bp, Homo sapien
tgttatagaagagcctagcatcagg

SEQ ID NO: 4443782 - DNA, 25 bp, Homo sapien
tgaagtactgatgcctttacagcac

SEQ ID NO: 4443783 - DNA, 25 bp, Homo sapien
tgtggttaagcaacaccatctaggt

SEQ ID NO: 4443784 - DNA, 25 bp, Homo sapien
taagtgacgcatgactctacttgcc

SEQ ID NO: 4443785 - DNA, 25 bp, Homo sapien
taaaattcaccctaggcataacatg

SEQ ID NO: 4443786 - DNA, 25 bp, Homo sapien
catctatacatagtgtttgccagct

SEQ ID NO: 4443787 - DNA, 25 bp, Homo sapien
tctggaatctgggtacttccagtct

SEQ ID NO: 4443788 - DNA, 25 bp, Homo sapien
ggtttacaaagtatcactggtcatt

SEQ ID NO: 4443789 - DNA, 25 bp, Homo sapien
gaggatttcttaagtctggaatctg

SEQ ID NO: 4443790 - DNA, 25 bp, Homo sapien
cagtcttaggccaaagccacgcttt

SEQ ID NO: 4443791 - DNA, 25 bp, Homo sapien
taaaaatgtgcccacaagagccgtc

SEQ ID NO: 4443792 - DNA, 25 bp, Homo sapien
tcattctggtgtccgctaacggttt

SEQ ID NO: 4443793 - DNA, 25 bp, Homo sapien
gagccgtccctaatcctctccagat

SEQ ID NO: 4443794 - DNA, 25 bp, Homo sapien
tccacccatgaaactagagtaaaaa

SEQ ID NO: 4443795 - DNA, 25 bp, Homo sapien
ttgcatgctgcagaccacggcagat

SEQ ID NO: 4443796 - DNA, 25 bp, Homo sapien
tgctgcagaccacggcagatgccat

SEQ ID NO: 4443797 - DNA, 25 bp, Homo sapien
ctggtgtctttacttgcatgctgca

SEQ ID NO: 4443798 - DNA, 25 bp, Homo sapien
ggtgtctttacttgcatgctgcaga

SEQ ID NO: 4443799 - DNA, 25 bp, Homo sapien
gattgaaagctaataaatggtgcca

SEQ ID NO: 4443800 - DNA, 25 bp, Homo sapien
ggacctctccatgggattgaaagct

SEQ ID NO: 4443801 - DNA, 25 bp, Homo sapien
ctcttggtagttacatgatgggacc

SEQ ID NO: 4443802 - DNA, 25 bp, Homo sapien
caatatgcaagaggtagttggttcc

SEQ ID NO: 4443803 - DNA, 25 bp, Homo sapien
gccctcgggcatcgcgttcggcaat

SEQ ID NO: 4443804 - DNA, 25 bp, Homo sapien
ttcggcaatttcagctccgccgcgg

SEQ ID NO: 4443805 - DNA, 25 bp, Homo sapien
ggcaatttcagctccgccgcggtag

SEQ ID NO: 4443806 - DNA, 25 bp, Homo sapien
catcgcgttcggcaatttcagctcc

SEQ ID NO: 4443807 - DNA, 25 bp, Homo sapien
gcctcggcgagctaaggccaccccg

SEQ ID NO: 4443808 - DNA, 25 bp, Homo sapien
ctcggcgagctaaggccaccccgct

SEQ ID NO: 4443809 - DNA, 25 bp, Homo sapien
tcggcgagctaaggccaccccgctc

SEQ ID NO: 4443810 - DNA, 25 bp, Homo sapien
cagcctcggcgagctaaggccaccc

SEQ ID NO: 4443811 - DNA, 25 bp, Homo sapien
cagggatttccgcaggcctggacac

SEQ ID NO: 4443812 - DNA, 25 bp, Homo sapien
ggccccagttggtctcgtggacgat

SEQ ID NO: 4443813 - DNA, 25 bp, Homo sapien
gacgatctggttcccgttaatgccc

SEQ ID NO: 4443814 - DNA, 25 bp, Homo sapien
cccatggcaactgtagtgtccaagg

SEQ ID NO: 4443815 - DNA, 25 bp, Homo sapien
gatggcagaagccaccttagtatca

SEQ ID NO: 4443816 - DNA, 25 bp, Homo sapien
atggcagaagccaccttagtatcac

SEQ ID NO: 4443817 - DNA, 25 bp, Homo sapien
agatggcagaagccaccttagtatc

SEQ ID NO: 4443818 - DNA, 25 bp, Homo sapien
cctgggtcttgtctcaacagcggca

SEQ ID NO: 4443819 - DNA, 25 bp, Homo sapien
cagcggcactgtcttcccactccag

SEQ ID NO: 4443820 - DNA, 25 bp, Homo sapien
ggcttcccagtatgccctctcactg

SEQ ID NO: 4443821 - DNA, 25 bp, Homo sapien
tcttgtctcaacagcggcactgtct

SEQ ID NO: 4443822 - DNA, 25 bp, Homo sapien
cgcagtttgatggatggagatctca

SEQ ID NO: 4443823 - DNA, 25 bp, Homo sapien
taatggttgacccttccacagccat

SEQ ID NO: 4443824 - DNA, 25 bp, Homo sapien
tactcctgcgcagtttgatggatgg

SEQ ID NO: 4443825 - DNA, 25 bp, Homo sapien
acagattcttgatccggctggtaat

SEQ ID NO: 4443826 - DNA, 25 bp, Homo sapien
gaggtcctctcgtcggtttcctgcc

SEQ ID NO: 4443827 - DNA, 25 bp, Homo sapien
gagctgaggtcctctcgtcggtttc

SEQ ID NO: 4443828 - DNA, 25 bp, Homo sapien
tgaggtcctctcgtcggtttcctgc

SEQ ID NO: 4443829 - DNA, 25 bp, Homo sapien
gctgaggtcctctcgtcggtttcct

SEQ ID NO: 4443830 - DNA, 25 bp, Homo sapien
caaaaccttgtagcaaactgtgatt

SEQ ID NO: 4443831 - DNA, 25 bp, Homo sapien
tgatgaataagagaccttggaaggg

SEQ ID NO: 4443832 - DNA, 25 bp, Homo sapien
cttggaagggtcacaatgtccacca

SEQ ID NO: 4443833 - DNA, 25 bp, Homo sapien
ctgcctcaggagaatagaaacaatg

SEQ ID NO: 4443834 - DNA, 25 bp, Homo sapien
tacagcagcacttaccacaccgtgt

SEQ ID NO: 4443835 - DNA, 25 bp, Homo sapien
taattcctctgaactgacttaggtc

SEQ ID NO: 4443836 - DNA, 25 bp, Homo sapien
taattgtttacatgtctgactagcc

SEQ ID NO: 4443837 - DNA, 25 bp, Homo sapien
catgcctggcctgtgaagcctttcc

SEQ ID NO: 4443838 - DNA, 25 bp, Homo sapien
gaactcagagcgtgtgtattgaaca

SEQ ID NO: 4443839 - DNA, 25 bp, Homo sapien
tgaacactaagaaatgactggagcc

SEQ ID NO: 4443840 - DNA, 25 bp, Homo sapien
cattgtataccacctgttgtgagga

SEQ ID NO: 4443841 - DNA, 25 bp, Homo sapien
tggccacagggacatccactcttag

SEQ ID NO: 4443842 - DNA, 25 bp, Homo sapien
tcaagcccaacttcagactcagagg

SEQ ID NO: 4443843 - DNA, 25 bp, Homo sapien
cagaggagacgcttagcctggagca

SEQ ID NO: 4443844 - DNA, 25 bp, Homo sapien
taaaaccaacggatactctgaggat

SEQ ID NO: 4443845 - DNA, 25 bp, Homo sapien
ggtaggcaggtctcattctatacct

SEQ ID NO: 4443846 - DNA, 25 bp, Homo sapien
gaatttactcccttgaaatctagga

SEQ ID NO: 4443847 - DNA, 25 bp, Homo sapien
tgaccaatgaagaagcactggacct

SEQ ID NO: 4443848 - DNA, 25 bp, Homo sapien
ttaagtgtccttcaaaaccagagga

SEQ ID NO: 4443849 - DNA, 25 bp, Homo sapien
taaaaatccacactacccagtctgg

SEQ ID NO: 4443850 - DNA, 25 bp, Homo sapien
tgcacatgaaggctccctgggagga

SEQ ID NO: 4443851 - DNA, 25 bp, Homo sapien
aataaagattaagtgtgggccctgg

SEQ ID NO: 4443852 - DNA, 25 bp, Homo sapien
tatggcaatactaggcacacttctg

SEQ ID NO: 4443853 - DNA, 25 bp, Homo sapien
tctaagctgagtgcatgatgtgccc

SEQ ID NO: 4443854 - DNA, 25 bp, Homo sapien
catccaatccatctggcttggggct

SEQ ID NO: 4443855 - DNA, 25 bp, Homo sapien
taggcgtgaggccaagaatcagttt

SEQ ID NO: 4443856 - DNA, 25 bp, Homo sapien
ttctgagcatgctcccagctacgcg

SEQ ID NO: 4443857 - DNA, 25 bp, Homo sapien
cgtgaggccaagaatcagtttctga

SEQ ID NO: 4443858 - DNA, 25 bp, Homo sapien
aactctgggactcaaacgatctgct

SEQ ID NO: 4443859 - DNA, 25 bp, Homo sapien
tggtctcccaaagtcccagctaatt

SEQ ID NO: 4443860 - DNA, 25 bp, Homo sapien
ctctgggactcaaacgatctgctcg

SEQ ID NO: 4443861 - DNA, 25 bp, Homo sapien
ctgggactcaaacgatctgctcgcc

SEQ ID NO: 4443862 - DNA, 25 bp, Homo sapien
tactcataggtacctggataacttc

SEQ ID NO: 4443863 - DNA, 25 bp, Homo sapien
tgcacagaataagatgccagaatta

SEQ ID NO: 4443864 - DNA, 25 bp, Homo sapien
gatacaccttcgtgcagtatgagtg

SEQ ID NO: 4443865 - DNA, 25 bp, Homo sapien
cataatctactatccctccctgaga

SEQ ID NO: 4443866 - DNA, 25 bp, Homo sapien
gtaacctgacaaagccgctagccac

SEQ ID NO: 4443867 - DNA, 25 bp, Homo sapien
gaatctgcatattaaagctctccag

SEQ ID NO: 4443868 - DNA, 25 bp, Homo sapien
ggagctgagtcaattctccagacta

SEQ ID NO: 4443869 - DNA, 25 bp, Homo sapien
taatgattaccagattgggaactac

SEQ ID NO: 4443870 - DNA, 25 bp, Homo sapien
aaatgccgatgaaatacagcccagg

SEQ ID NO: 4443871 - DNA, 25 bp, Homo sapien
gaaagaggccctgcgagaaaattac

SEQ ID NO: 4443872 - DNA, 25 bp, Homo sapien
gagttctggcctcaaggatcgcttg

SEQ ID NO: 4443873 - DNA, 25 bp, Homo sapien
gtccataaagtctgggattcagccc

SEQ ID NO: 4443874 - DNA, 25 bp, Homo sapien
gagcttctgtttatgcgggttatgt

SEQ ID NO: 4443875 - DNA, 25 bp, Homo sapien
ttagagcttatcaaggacaacagag

SEQ ID NO: 4443876 - DNA, 25 bp, Homo sapien
attctcagaccttttggtcttggga

SEQ ID NO: 4443877 - DNA, 25 bp, Homo sapien
tttgttatcaagcaggacctagccc

SEQ ID NO: 4443878 - DNA, 25 bp, Homo sapien
aaagcaattatcctgcctcagcctc

SEQ ID NO: 4443879 - DNA, 25 bp, Homo sapien
agacagggtttcacttgtcacccag

SEQ ID NO: 4443880 - DNA, 25 bp, Homo sapien
caacctctgcctcccaggttaaagc

SEQ ID NO: 4443881 - DNA, 25 bp, Homo sapien
ccaggcagctgagattacaggtgcc

SEQ ID NO: 4443882 - DNA, 25 bp, Homo sapien
ctgcaaggcctccaacatctatgct

SEQ ID NO: 4443883 - DNA, 25 bp, Homo sapien
aagaaggtggtagagcttccacctg

SEQ ID NO: 4443884 - DNA, 25 bp, Homo sapien
catctatgcttattttgcaaggctt

SEQ ID NO: 4443885 - DNA, 25 bp, Homo sapien
cataaactgactctccctctgataa

SEQ ID NO: 4443886 - DNA, 25 bp, Homo sapien
aagaatgtccctgatctcccctggc

SEQ ID NO: 4443887 - DNA, 25 bp, Homo sapien
gcactggctctgctcaagaatgtcc

SEQ ID NO: 4443888 - DNA, 25 bp, Homo sapien
gggcttcagaatgcaggacggacat

SEQ ID NO: 4443889 - DNA, 25 bp, Homo sapien
tccaggactgtgcactccctgcact

SEQ ID NO: 4443890 - DNA, 25 bp, Homo sapien
tctgcctccagacactgtaattccc

SEQ ID NO: 4443891 - DNA, 25 bp, Homo sapien
tgcctccagacactgtaattcccag

SEQ ID NO: 4443892 - DNA, 25 bp, Homo sapien
gcctccagacactgtaattcccagc

SEQ ID NO: 4443893 - DNA, 25 bp, Homo sapien
cctccagacactgtaattcccagca

SEQ ID NO: 4443894 - DNA, 25 bp, Homo sapien
ggtcctgcgtctctttacaaaaatg

SEQ ID NO: 4443895 - DNA, 25 bp, Homo sapien
gataactgaaaagcagcacaggatg

SEQ ID NO: 4443896 - DNA, 25 bp, Homo sapien
tgacagcacccgacaaagaaccttt

SEQ ID NO: 4443897 - DNA, 25 bp, Homo sapien
caagatctcttccaaggcgcttact

SEQ ID NO: 4443898 - DNA, 25 bp, Homo sapien
accattgtcttaggattatgtacag

SEQ ID NO: 4443899 - DNA, 25 bp, Homo sapien
gccttatacaggtgtgcctttttaa

SEQ ID NO: 4443900 - DNA, 25 bp, Homo sapien
tttagtatggccaagtgtacagtgt

SEQ ID NO: 4443901 - DNA, 25 bp, Homo sapien
aggcgcaaccggctacaccatgtag

SEQ ID NO: 4443902 - DNA, 25 bp, Homo sapien
ggagtgcaatggcacgatcatagtt

SEQ ID NO: 4443903 - DNA, 25 bp, Homo sapien
atgttacctcaagcaaactccttaa

SEQ ID NO: 4443904 - DNA, 25 bp, Homo sapien
agggtttcactgtgtcacccaagct

SEQ ID NO: 4443905 - DNA, 25 bp, Homo sapien
tgcaatggcacgatcatagttcact

SEQ ID NO: 4443906 - DNA, 25 bp, Homo sapien
aaaaagtacgacaaaagcaagatgg

SEQ ID NO: 4443907 - DNA, 25 bp, Homo sapien
aactctgcaccccatcgctcttgag

SEQ ID NO: 4443908 - DNA, 25 bp, Homo sapien
tgagcaggcaaacgaaaattataac

SEQ ID NO: 4443909 - DNA, 25 bp, Homo sapien
caaacgaaaattataacagagccgg

SEQ ID NO: 4443910 - DNA, 25 bp, Homo sapien
tagatatgcccagaactgccaggct

SEQ ID NO: 4443911 - DNA, 25 bp, Homo sapien
gatgtaaggcctctcacgtgtgcac

SEQ ID NO: 4443912 - DNA, 25 bp, Homo sapien
tatctgaacgccactactggctgga

SEQ ID NO: 4443913 - DNA, 25 bp, Homo sapien
gacctccgatgtgactagatatgcc

SEQ ID NO: 4443914 - DNA, 25 bp, Homo sapien
agatgagcagacaacaggctcagca

SEQ ID NO: 4443915 - DNA, 25 bp, Homo sapien
agggagctgggtagaaagagctcag

SEQ ID NO: 4443916 - DNA, 25 bp, Homo sapien
gagatgagcagacaacaggctcagc

SEQ ID NO: 4443917 - DNA, 25 bp, Homo sapien
agagggagctgggtagaaagagctc

SEQ ID NO: 4443918 - DNA, 25 bp, Homo sapien
tgtttccggggattgaacaacacaa

SEQ ID NO: 4443919 - DNA, 25 bp, Homo sapien
tccggggattgaacaacacaaccac

SEQ ID NO: 4443920 - DNA, 25 bp, Homo sapien
gctgtttgtgtttccggggattgaa

SEQ ID NO: 4443921 - DNA, 25 bp, Homo sapien
tgtgtttccggggattgaacaacac

SEQ ID NO: 4443922 - DNA, 25 bp, Homo sapien
ctctccagtgaccaagtacttgcca

SEQ ID NO: 4443923 - DNA, 25 bp, Homo sapien
cagtgaccaagtacttgccatcagg

SEQ ID NO: 4443924 - DNA, 25 bp, Homo sapien
tccagtgaccaagtacttgccatca

SEQ ID NO: 4443925 - DNA, 25 bp, Homo sapien
agtgaccaagtacttgccatcaggg

SEQ ID NO: 4443926 - DNA, 25 bp, Homo sapien
caggacacctgccctctttacagta

SEQ ID NO: 4443927 - DNA, 25 bp, Homo sapien
aggacacctgccctctttacagtac

SEQ ID NO: 4443928 - DNA, 25 bp, Homo sapien
ccaggacacctgccctctttacagt

SEQ ID NO: 4443929 - DNA, 25 bp, Homo sapien
ggacacctgccctctttacagtact

SEQ ID NO: 4443930 - DNA, 25 bp, Homo sapien
tgacgatcatgtcatgctggtagcc

SEQ ID NO: 4443931 - DNA, 25 bp, Homo sapien
tccaggcccacacgttgacgatcat

SEQ ID NO: 4443932 - DNA, 25 bp, Homo sapien
gtagcccacagagacaatgtacttg

SEQ ID NO: 4443933 - DNA, 25 bp, Homo sapien
acttggcgctaggagagaaggccac

SEQ ID NO: 4443934 - DNA, 25 bp, Homo sapien
gacaaagtagctgcaatcctcagag

SEQ ID NO: 4443935 - DNA, 25 bp, Homo sapien
tcacccgactggacaccttgttgga

SEQ ID NO: 4443936 - DNA, 25 bp, Homo sapien
gaggtcttgctgtcatcgagatacc

SEQ ID NO: 4443937 - DNA, 25 bp, Homo sapien
gaatttgatgtgtcggttgcctgca

SEQ ID NO: 4443938 - DNA, 25 bp, Homo sapien
agagtacaggggacgcctccagcac

SEQ ID NO: 4443939 - DNA, 25 bp, Homo sapien
ccctaggagagtacaggggacgcct

SEQ ID NO: 4443940 - DNA, 25 bp, Homo sapien
tctttgggcctactcctcagcccag

SEQ ID NO: 4443941 - DNA, 25 bp, Homo sapien
tgggcctactcctcagcccagacag

SEQ ID NO: 4443942 - DNA, 25 bp, Homo sapien
tgtccaaaagccttcgatcactgaa

SEQ ID NO: 4443943 - DNA, 25 bp, Homo sapien
ggttgttccgtagctctcccagcag

SEQ ID NO: 4443944 - DNA, 25 bp, Homo sapien
caggccacatcagtgaataggttgt

SEQ ID NO: 4443945 - DNA, 25 bp, Homo sapien
ttcgatcactgaactcgcacagcag

SEQ ID NO: 4443946 - DNA, 25 bp, Homo sapien
ggaaatgggccaagctctagctccc

SEQ ID NO: 4443947 - DNA, 25 bp, Homo sapien
gaggcagttatacagatcaccaagg

SEQ ID NO: 4443948 - DNA, 25 bp, Homo sapien
gggcactagttctcccctgagctga

SEQ ID NO: 4443949 - DNA, 25 bp, Homo sapien
tgggatctcccgtatgcacaaggga

SEQ ID NO: 4443950 - DNA, 25 bp, Homo sapien
ggcaagggaaaagccgcccagctgc

SEQ ID NO: 4443951 - DNA, 25 bp, Homo sapien
ccagaggatccagtaggaaaagccc

SEQ ID NO: 4443952 - DNA, 25 bp, Homo sapien
gccaagaggagggaccggccaaggc

SEQ ID NO: 4443953 - DNA, 25 bp, Homo sapien
ggaaccgaggattcttctaggcacc

SEQ ID NO: 4443954 - DNA, 25 bp, Homo sapien
gttgaaaaggcgcacggtgccatca

SEQ ID NO: 4443955 - DNA, 25 bp, Homo sapien
tcggtgacgctagcaatgtctgtcc

SEQ ID NO: 4443956 - DNA, 25 bp, Homo sapien
caaggtgctaaggaagtgcaggtta

SEQ ID NO: 4443957 - DNA, 25 bp, Homo sapien
ctggcctcggtgacgctagcaatgt

SEQ ID NO: 4443958 - DNA, 25 bp, Homo sapien
ttgtacacacaagacagccactgat

SEQ ID NO: 4443959 - DNA, 25 bp, Homo sapien
tgatacagagccgagtacaccttgc

SEQ ID NO: 4443960 - DNA, 25 bp, Homo sapien
tccagacgcaggaagaatgatacag

SEQ ID NO: 4443961 - DNA, 25 bp, Homo sapien
tggtgtctggatacctggcattcgc

SEQ ID NO: 4443962 - DNA, 25 bp, Homo sapien
tggccagtctccagccagccagcca

SEQ ID NO: 4443963 - DNA, 25 bp, Homo sapien
ctggccagtctccagccagccagcc

SEQ ID NO: 4443964 - DNA, 25 bp, Homo sapien
catgcaccccggagctctctgtgtt

SEQ ID NO: 4443965 - DNA, 25 bp, Homo sapien
ctgctgaggatgtttcggtggaggg

SEQ ID NO: 4443966 - DNA, 25 bp, Homo sapien
gagggtggagccatgcaccccggag

SEQ ID NO: 4443967 - DNA, 25 bp, Homo sapien
cacaggcggatggtgttgtctgagg

SEQ ID NO: 4443968 - DNA, 25 bp, Homo sapien
gaaagctgagcaaaacaaacccttg

SEQ ID NO: 4443969 - DNA, 25 bp, Homo sapien
ttagaaaaggtggatgaggcaggcc

SEQ ID NO: 4443970 - DNA, 25 bp, Homo sapien
cagtaacaaggtgcaatagctgtgg

SEQ ID NO: 4443971 - DNA, 25 bp, Homo sapien
caaggcctagggaccagttcccagt

SEQ ID NO: 4443972 - DNA, 25 bp, Homo sapien
acagggatgcatcagctttgtctcc

SEQ ID NO: 4443973 - DNA, 25 bp, Homo sapien
ggtcccctgatgctagatgctgtcc

SEQ ID NO: 4443974 - DNA, 25 bp, Homo sapien
tgggtgttcccatccacatagatga

SEQ ID NO: 4443975 - DNA, 25 bp, Homo sapien
gggctgacacacaccgagcggatgc

SEQ ID NO: 4443976 - DNA, 25 bp, Homo sapien
cttacataacgatagtgcaattatc

SEQ ID NO: 4443977 - DNA, 25 bp, Homo sapien
gaacagagagcgtctatatttccct

SEQ ID NO: 4443978 - DNA, 25 bp, Homo sapien
ccatggccaggccgcaggaaggact

SEQ ID NO: 4443979 - DNA, 25 bp, Homo sapien
tctatatttcccttacccagctttc

SEQ ID NO: 4443980 - DNA, 25 bp, Homo sapien
tctcactcagggactgaagttcgtg

SEQ ID NO: 4443981 - DNA, 25 bp, Homo sapien
actcagggactgaagttcgtgcacc

SEQ ID NO: 4443982 - DNA, 25 bp, Homo sapien
tcactcagggactgaagttcgtgca

SEQ ID NO: 4443983 - DNA, 25 bp, Homo sapien
atctcactcagggactgaagttcgt

SEQ ID NO: 4443984 - DNA, 25 bp, Homo sapien
tagaatactccaggcacagaatctc

SEQ ID NO: 4443985 - DNA, 25 bp, Homo sapien
tggcttagaatactccaggcacaga

SEQ ID NO: 4443986 - DNA, 25 bp, Homo sapien
gcttagaatactccaggcacagaat

SEQ ID NO: 4443987 - DNA, 25 bp, Homo sapien
gtgtctggcttagaatactccaggc

SEQ ID NO: 4443988 - DNA, 25 bp, Homo sapien
tgagtgttcgtccagcgtctgctgt

SEQ ID NO: 4443989 - DNA, 25 bp, Homo sapien
ggctcgccgatgctagcagtttcag

SEQ ID NO: 4443990 - DNA, 25 bp, Homo sapien
gaggatgagtgttcgtccagcgtct

SEQ ID NO: 4443991 - DNA, 25 bp, Homo sapien
tgctgtaggctgtactcccgcccgg

SEQ ID NO: 4443992 - DNA, 25 bp, Homo sapien
cgcagtgcggaagtagatgctcttg

SEQ ID NO: 4443993 - DNA, 25 bp, Homo sapien
tctgctccacagctgatcatgcgga

SEQ ID NO: 4443994 - DNA, 25 bp, Homo sapien
cttctgcgcagtgcggaagtagatg

SEQ ID NO: 4443995 - DNA, 25 bp, Homo sapien
gatcatgcggacttgcccatcactg

SEQ ID NO: 4443996 - DNA, 25 bp, Homo sapien
tccatgtcatagagggtcgtcttcc

SEQ ID NO: 4443997 - DNA, 25 bp, Homo sapien
tggtgtgtccgtgtgaactgcactc

SEQ ID NO: 4443998 - DNA, 25 bp, Homo sapien
cgaatatttcggtcctggcagccga

SEQ ID NO: 4443999 - DNA, 25 bp, Homo sapien
tggcagccgatagccgtgtacttcc

SEQ ID NO: 4444000 - DNA, 25 bp, Homo sapien
cttaatgagtgtgccgtcctcaccc

SEQ ID NO: 4444001 - DNA, 25 bp, Homo sapien
gctttccactgctgatgttaaatat

SEQ ID NO: 4444002 - DNA, 25 bp, Homo sapien
aatgagtgtgccgtcctcaccctgt

SEQ ID NO: 4444003 - DNA, 25 bp, Homo sapien
caccctgtgaccctttaaacagctt

SEQ ID NO: 4444004 - DNA, 25 bp, Homo sapien
cagctggtggcaatgtagatccctg

SEQ ID NO: 4444005 - DNA, 25 bp, Homo sapien
cactcgcctgaggagaagtcaaaaa

SEQ ID NO: 4444006 - DNA, 25 bp, Homo sapien
gagagattcttgtcagaacagctgg

SEQ ID NO: 4444007 - DNA, 25 bp, Homo sapien
atggtggccacgcactcgcctgagg

SEQ ID NO: 4444008 - DNA, 25 bp, Homo sapien
tttacgcaggtatcagcttctactc

SEQ ID NO: 4444009 - DNA, 25 bp, Homo sapien
acgcaggtatcagcttctactcggg

SEQ ID NO: 4444010 - DNA, 25 bp, Homo sapien
aggtttacgcaggtatcagcttcta

SEQ ID NO: 4444011 - DNA, 25 bp, Homo sapien
tacgcaggtatcagcttctactcgg

SEQ ID NO: 4444012 - DNA, 25 bp, Homo sapien
caatcattactaaatttcatgccag

SEQ ID NO: 4444013 - DNA, 25 bp, Homo sapien
ctaaatttcatgccagtgacaatct

SEQ ID NO: 4444014 - DNA, 25 bp, Homo sapien
tgtccccagacacagagatgagatg

SEQ ID NO: 4444015 - DNA, 25 bp, Homo sapien
cacagagatgagatgtttacaatca

SEQ ID NO: 4444016 - DNA, 25 bp, Homo sapien
ctgacgctggcgcaactcggccaga

SEQ ID NO: 4444017 - DNA, 25 bp, Homo sapien
gacgctgcctcatgctgatggtcat

SEQ ID NO: 4444018 - DNA, 25 bp, Homo sapien
gctggcgcaactcggccagacgctg

SEQ ID NO: 4444019 - DNA, 25 bp, Homo sapien
gctcaggcgccacacaaatatgcag

SEQ ID NO: 4444020 - DNA, 25 bp, Homo sapien
tctgatgagagagccggtccaggag

SEQ ID NO: 4444021 - DNA, 25 bp, Homo sapien
actcttggcaaggacgggcagtgct

SEQ ID NO: 4444022 - DNA, 25 bp, Homo sapien
gacgggcagtgctggaagttcttct

SEQ ID NO: 4444023 - DNA, 25 bp, Homo sapien
ccagtgccttcttggtactcttggc

SEQ ID NO: 4444024 - DNA, 25 bp, Homo sapien
catatctagccattataccaactag

SEQ ID NO: 4444025 - DNA, 25 bp, Homo sapien
tctagccattataccaactagggcc

SEQ ID NO: 4444026 - DNA, 25 bp, Homo sapien
cattataccaactagggcctgtctg

SEQ ID NO: 4444027 - DNA, 25 bp, Homo sapien
tagccattataccaactagggcctg

SEQ ID NO: 4444028 - DNA, 25 bp, Homo sapien
agtgggacaggcttcggggcaaagc

SEQ ID NO: 4444029 - DNA, 25 bp, Homo sapien
gtgggacaggcttcggggcaaagct

SEQ ID NO: 4444030 - DNA, 25 bp, Homo sapien
gggacaggcttcggggcaaagctgg

SEQ ID NO: 4444031 - DNA, 25 bp, Homo sapien
tgggacaggcttcggggcaaagctg

SEQ ID NO: 4444032 - DNA, 25 bp, Homo sapien
tgcctcctctaaccttggaagaaca

SEQ ID NO: 4444033 - DNA, 25 bp, Homo sapien
cctttgcctcctctaaccttggaag

SEQ ID NO: 4444034 - DNA, 25 bp, Homo sapien
cccagtaccctaccaggcccagaga

SEQ ID NO: 4444035 - DNA, 25 bp, Homo sapien
ggcagaccccatgccccagtaccct

SEQ ID NO: 4444036 - DNA, 25 bp, Homo sapien
gcagtcgctgagttatgggtcccct

SEQ ID NO: 4444037 - DNA, 25 bp, Homo sapien
tggtatcatggatgcctcagagctg

SEQ ID NO: 4444038 - DNA, 25 bp, Homo sapien
ggacaaacctatagcccaggcctga

SEQ ID NO: 4444039 - DNA, 25 bp, Homo sapien
tgctgacaacggaaggtactggtgc

SEQ ID NO: 4444040 - DNA, 25 bp, Homo sapien
gccagcgagtcctggctagggtcct

SEQ ID NO: 4444041 - DNA, 25 bp, Homo sapien
tagtgagtgaagtctcaagggcctc

SEQ ID NO: 4444042 - DNA, 25 bp, Homo sapien
cagtgtttccagctgccgcagatcc

SEQ ID NO: 4444043 - DNA, 25 bp, Homo sapien
gatccagcatggatctaacgctcag

SEQ ID NO: 4444044 - DNA, 25 bp, Homo sapien
ggttccagatcttgggcaaagaccc

SEQ ID NO: 4444045 - DNA, 25 bp, Homo sapien
ggtgcaggttccagatcttgggcaa

SEQ ID NO: 4444046 - DNA, 25 bp, Homo sapien
tcctcttgtgacaataatcggataa

SEQ ID NO: 4444047 - DNA, 25 bp, Homo sapien
ataggaacaaggttgggaagcctga

SEQ ID NO: 4444048 - DNA, 25 bp, Homo sapien
ctggtatccatggtggggttgtcac

SEQ ID NO: 4444049 - DNA, 25 bp, Homo sapien
ggggtctggctagggcaggatcctt

SEQ ID NO: 4444050 - DNA, 25 bp, Homo sapien
aggattccagcagggagaagaaaag

SEQ ID NO: 4444051 - DNA, 25 bp, Homo sapien
ctgtcaggattccagcagggagaag

SEQ ID NO: 4444052 - DNA, 25 bp, Homo sapien
aaaaggcagtgagcaggggtaggca

SEQ ID NO: 4444053 - DNA, 25 bp, Homo sapien
tcaggattccagcagggagaagaaa

SEQ ID NO: 4444054 - DNA, 25 bp, Homo sapien
tcttcccagagttccccgggctgga

SEQ ID NO: 4444055 - DNA, 25 bp, Homo sapien
tgctgctgtaatccacagagcaggc

SEQ ID NO: 4444056 - DNA, 25 bp, Homo sapien
agtctcaaagtgctgttttagaaac

SEQ ID NO: 4444057 - DNA, 25 bp, Homo sapien
ctgaggggctccgtgctctcagagt

SEQ ID NO: 4444058 - DNA, 25 bp, Homo sapien
cacactgaggggctccgtgctctca

SEQ ID NO: 4444059 - DNA, 25 bp, Homo sapien
ctcctgtagcccataggggcccatg

SEQ ID NO: 4444060 - DNA, 25 bp, Homo sapien
caggaatcgtgaagagatactccga

SEQ ID NO: 4444061 - DNA, 25 bp, Homo sapien
agtgggcgggtctgtacttgcaaca

SEQ ID NO: 4444062 - DNA, 25 bp, Homo sapien
gagatactccgagactctgacctct

SEQ ID NO: 4444063 - DNA, 25 bp, Homo sapien
tgtacttgcaacaggaatcgtgaag

SEQ ID NO: 4444064 - DNA, 25 bp, Homo sapien
ctccagggggattggcaccattgcc

SEQ ID NO: 4444065 - DNA, 25 bp, Homo sapien
attgcctctcggctgctcaccagat

SEQ ID NO: 4444066 - DNA, 25 bp, Homo sapien
gattggcaccattgcctctcggctg

SEQ ID NO: 4444067 - DNA, 25 bp, Homo sapien
ttgcctctcggctgctcaccagatg

SEQ ID NO: 4444068 - DNA, 25 bp, Homo sapien
tgctgtcagggttgagacggcatcg

SEQ ID NO: 4444069 - DNA, 25 bp, Homo sapien
cctgtggcaccagactgtgcacaga

SEQ ID NO: 4444070 - DNA, 25 bp, Homo sapien
tggcaccagactgtgcacagactgg

SEQ ID NO: 4444071 - DNA, 25 bp, Homo sapien
agacggcatcgtggcaacagcacag

SEQ ID NO: 4444072 - DNA, 25 bp, Homo sapien
gaaggggcctgcagactggcctcat

SEQ ID NO: 4444073 - DNA, 25 bp, Homo sapien
ttcgatctcccgagacagcagtgcg

SEQ ID NO: 4444074 - DNA, 25 bp, Homo sapien
tgagcttcgatctcccgagacagca

SEQ ID NO: 4444075 - DNA, 25 bp, Homo sapien
acagcagtgcgcctggtgaaggggc

SEQ ID NO: 4444076 - DNA, 25 bp, Homo sapien
catgagcttgaggttcagccaccag

SEQ ID NO: 4444077 - DNA, 25 bp, Homo sapien
tactgcgggatatcttggccatgga

SEQ ID NO: 4444078 - DNA, 25 bp, Homo sapien
gttctccccaacagagatactgcgg

SEQ ID NO: 4444079 - DNA, 25 bp, Homo sapien
caaacaggcccatctctcagttgta

SEQ ID NO: 4444080 - DNA, 25 bp, Homo sapien
gtggtagagccgcactgcctggcgc

SEQ ID NO: 4444081 - DNA, 25 bp, Homo sapien
tgccgcggagctctgccaccagctg

SEQ ID NO: 4444082 - DNA, 25 bp, Homo sapien
gtagagccgcactgcctggcgcacg

SEQ ID NO: 4444083 - DNA, 25 bp, Homo sapien
ctggcgcacgctgccgcggagctct

SEQ ID NO: 4444084 - DNA, 25 bp, Homo sapien
tgcccaagatgttcttgagtgtgcc

SEQ ID NO: 4444085 - DNA, 25 bp, Homo sapien
tgctgcccaagatgttcttgagtgt

SEQ ID NO: 4444086 - DNA, 25 bp, Homo sapien
tatgctgcccaagatgttcttgagt

SEQ ID NO: 4444087 - DNA, 25 bp, Homo sapien
ccaagatgttcttgagtgtgccatc

SEQ ID NO: 4444088 - DNA, 25 bp, Homo sapien
tgcccggtacaagaggctagcctgg

SEQ ID NO: 4444089 - DNA, 25 bp, Homo sapien
gaaatgaccgcaggtgcccggtaca

SEQ ID NO: 4444090 - DNA, 25 bp, Homo sapien
aggtgcccggtacaagaggctagcc

SEQ ID NO: 4444091 - DNA, 25 bp, Homo sapien
ttaaccagaaatgaccgcaggtgcc

SEQ ID NO: 4444092 - DNA, 25 bp, Homo sapien
gcacccccagaagtgaggtggagga

SEQ ID NO: 4444093 - DNA, 25 bp, Homo sapien
tcagagtttgcgttccatacgccgt

SEQ ID NO: 4444094 - DNA, 25 bp, Homo sapien
caatccgactttgctctgctgaggg

SEQ ID NO: 4444095 - DNA, 25 bp, Homo sapien
tccagctcctgtcgcactgaagaga

SEQ ID NO: 4444096 - DNA, 25 bp, Homo sapien
tctgagtattgctccagcagggcct

SEQ ID NO: 4444097 - DNA, 25 bp, Homo sapien
ggaaatacaatgctgggcccctctt

SEQ ID NO: 4444098 - DNA, 25 bp, Homo sapien
gagtaccctgtgtatgctccaccac

SEQ ID NO: 4444099 - DNA, 25 bp, Homo sapien
tggcttctaagagagggccagccct

SEQ ID NO: 4444100 - DNA, 25 bp, Homo sapien
gaatgtgcgggctcaggtccaaata

SEQ ID NO: 4444101 - DNA, 25 bp, Homo sapien
gataggtgttccacataagccaggg

SEQ ID NO: 4444102 - DNA, 25 bp, Homo sapien
gctatctcgtatcagctaggctgtg

SEQ ID NO: 4444103 - DNA, 25 bp, Homo sapien
tttataagcctctgcctatggcgca

SEQ ID NO: 4444104 - DNA, 25 bp, Homo sapien
taaaccaggtgtcctatgggctatc

SEQ ID NO: 4444105 - DNA, 25 bp, Homo sapien
caaacttctggcgaagggtagctcc

SEQ ID NO: 4444106 - DNA, 25 bp, Homo sapien
aaaagggcggccacattctcacaaa

SEQ ID NO: 4444107 - DNA, 25 bp, Homo sapien
gatggcgtgtagctttgtcacctag

SEQ ID NO: 4444108 - DNA, 25 bp, Homo sapien
tgatgccccggagctgggaaccttt

SEQ ID NO: 4444109 - DNA, 25 bp, Homo sapien
agcgccgcgacctgcacaaagtata

SEQ ID NO: 4444110 - DNA, 25 bp, Homo sapien
catacatcagtacaaacgggcacgt

SEQ ID NO: 4444111 - DNA, 25 bp, Homo sapien
ttgccggtggcctcagacatgcaga

SEQ ID NO: 4444112 - DNA, 25 bp, Homo sapien
ccgccccatgcagccgaggatgagg

SEQ ID NO: 4444113 - DNA, 25 bp, Homo sapien
cgggaattctcgtaactcgctccgc

SEQ ID NO: 4444114 - DNA, 25 bp, Homo sapien
aattctcgtaactcgctccgcacgg

SEQ ID NO: 4444115 - DNA, 25 bp, Homo sapien
tgcagcggccgggaattctcgtaac

SEQ ID NO: 4444116 - DNA, 25 bp, Homo sapien
cggccgggaattctcgtaactcgct

SEQ ID NO: 4444117 - DNA, 25 bp, Homo sapien
gggcttcgccgcgaccacggtcaag

SEQ ID NO: 4444118 - DNA, 25 bp, Homo sapien
gagctttcaacaagggtaacagcaa

SEQ ID NO: 4444119 - DNA, 25 bp, Homo sapien
caccagctgtgtgccttcgatgagc

SEQ ID NO: 4444120 - DNA, 25 bp, Homo sapien
gcgaccacggtcaagacggcaccgg

SEQ ID NO: 4444121 - DNA, 25 bp, Homo sapien
cagtacacctgtggttgattgtcca

SEQ ID NO: 4444122 - DNA, 25 bp, Homo sapien
atactcccaaagagggctttgcctg

SEQ ID NO: 4444123 - DNA, 25 bp, Homo sapien
gctttgcctgcacttaccttctaac

SEQ ID NO: 4444124 - DNA, 25 bp, Homo sapien
tgattgtccacgttctcacttagaa

SEQ ID NO: 4444125 - DNA, 25 bp, Homo sapien
tgttgtactcgctgagattaagaga

SEQ ID NO: 4444126 - DNA, 25 bp, Homo sapien
catcttcctgttgtactcgctgaga

SEQ ID NO: 4444127 - DNA, 25 bp, Homo sapien
cttcctgttgtactcgctgagatta

SEQ ID NO: 4444128 - DNA, 25 bp, Homo sapien
cagtacatcttcctgttgtactcgc

SEQ ID NO: 4444129 - DNA, 25 bp, Homo sapien
cccggtagaagtggagcggagttgg

SEQ ID NO: 4444130 - DNA, 25 bp, Homo sapien
tgggggtttgtccaggtagggcaca

SEQ ID NO: 4444131 - DNA, 25 bp, Homo sapien
ccggtagaagtggagcggagttggg

SEQ ID NO: 4444132 - DNA, 25 bp, Homo sapien
cagagcgttgcggataatgcacggc

SEQ ID NO: 4444133 - DNA, 25 bp, Homo sapien
ctgcagagcgttgcggataatgcac

SEQ ID NO: 4444134 - DNA, 25 bp, Homo sapien
ttgcggataatgcacggcctgttgg

SEQ ID NO: 4444135 - DNA, 25 bp, Homo sapien
gcgttgcggataatgcacggcctgt

SEQ ID NO: 4444136 - DNA, 25 bp, Homo sapien
gagggaccacttctggagggccggc

SEQ ID NO: 4444137 - DNA, 25 bp, Homo sapien
gaccacttctggagggccggccagt

SEQ ID NO: 4444138 - DNA, 25 bp, Homo sapien
tgaaataggggagggaccacttctg

SEQ ID NO: 4444139 - DNA, 25 bp, Homo sapien
ctgaaataggggagggaccacttct

SEQ ID NO: 4444140 - DNA, 25 bp, Homo sapien
ctagaggaatggacactcagcccat

SEQ ID NO: 4444141 - DNA, 25 bp, Homo sapien
gccagtaatcactgctcacacctga

SEQ ID NO: 4444142 - DNA, 25 bp, Homo sapien
gaggaatggacactcagcccatgcc

SEQ ID NO: 4444143 - DNA, 25 bp, Homo sapien
cagcccatgcccagatgccagtaat

SEQ ID NO: 4444144 - DNA, 25 bp, Homo sapien
ttctgcacatagaggactccagggt

SEQ ID NO: 4444145 - DNA, 25 bp, Homo sapien
cacatgggattccagatcaggcagc

SEQ ID NO: 4444146 - DNA, 25 bp, Homo sapien
tcagctggcatcatgaagcgatccc

SEQ ID NO: 4444147 - DNA, 25 bp, Homo sapien
cacggcatccgcgtaaccatctggg

SEQ ID NO: 4444148 - DNA, 25 bp, Homo sapien
aagttcacagcatcgggcatctttc

SEQ ID NO: 4444149 - DNA, 25 bp, Homo sapien
cagaagttcacagcatcgggcatct

SEQ ID NO: 4444150 - DNA, 25 bp, Homo sapien
agccagaagttcacagcatcgggca

SEQ ID NO: 4444151 - DNA, 25 bp, Homo sapien
cccagccagaagttcacagcatcgg

SEQ ID NO: 4444152 - DNA, 25 bp, Homo sapien
ggcacgggaggaggcaaaccatcat

SEQ ID NO: 4444153 - DNA, 25 bp, Homo sapien
acgggaggaggcaaaccatcatgct

SEQ ID NO: 4444154 - DNA, 25 bp, Homo sapien
ggaggcaaaccatcatgctgagagc

SEQ ID NO: 4444155 - DNA, 25 bp, Homo sapien
gaggaggcaaaccatcatgctgaga

SEQ ID NO: 4444156 - DNA, 25 bp, Homo sapien
atgaagggccggtcgctgggcggat

SEQ ID NO: 4444157 - DNA, 25 bp, Homo sapien
tctcctgagaccacgcagtagaggt

SEQ ID NO: 4444158 - DNA, 25 bp, Homo sapien
gagaccacgcagtagaggttctcat

SEQ ID NO: 4444159 - DNA, 25 bp, Homo sapien
ggcggatggaacaggaaatgcttct

SEQ ID NO: 4444160 - DNA, 25 bp, Homo sapien
agctggtaggttgccggcgtgtaca

SEQ ID NO: 4444161 - DNA, 25 bp, Homo sapien
tcagttagctggtaggttgccggcg

SEQ ID NO: 4444162 - DNA, 25 bp, Homo sapien
accaccttaaaggtgccctcttcag

SEQ ID NO: 4444163 - DNA, 25 bp, Homo sapien
taaaggtgccctcttcagttagctg

SEQ ID NO: 4444164 - DNA, 25 bp, Homo sapien
tgggaacacatcagatgccagggag

SEQ ID NO: 4444165 - DNA, 25 bp, Homo sapien
ttcaggctctgtcccttccaaaggt

SEQ ID NO: 4444166 - DNA, 25 bp, Homo sapien
gcctcagacttagagacttttcaga

SEQ ID NO: 4444167 - DNA, 25 bp, Homo sapien
gcttggctcagcagtgaaaggcctc

SEQ ID NO: 4444168 - DNA, 25 bp, Homo sapien
gcctgggcctgactgtaactagggt

SEQ ID NO: 4444169 - DNA, 25 bp, Homo sapien
ctgactgtaactagggtaccgtgct

SEQ ID NO: 4444170 - DNA, 25 bp, Homo sapien
taccgtgctaggtctggcgccaagg

SEQ ID NO: 4444171 - DNA, 25 bp, Homo sapien
actagggtaccgtgctaggtctggc

SEQ ID NO: 4444172 - DNA, 25 bp, Homo sapien
gactgctggacgtggtggaaccaca

SEQ ID NO: 4444173 - DNA, 25 bp, Homo sapien
ctgctggacgtggtggaaccacaga

SEQ ID NO: 4444174 - DNA, 25 bp, Homo sapien
cctgggactgctggacgtggtggaa

SEQ ID NO: 4444175 - DNA, 25 bp, Homo sapien
tgggactgctggacgtggtggaacc

SEQ ID NO: 4444176 - DNA, 25 bp, Homo sapien
ccaggcggcctgggcaactcttcac

SEQ ID NO: 4444177 - DNA, 25 bp, Homo sapien
ttgaggtcgtattccatgtcatacc

SEQ ID NO: 4444178 - DNA, 25 bp, Homo sapien
gaggtcgtattccatgtcataccag

SEQ ID NO: 4444179 - DNA, 25 bp, Homo sapien
tgaggtcgtattccatgtcatacca

SEQ ID NO: 4444180 - DNA, 25 bp, Homo sapien
aggtcgtattccatgtcataccaga

SEQ ID NO: 4444181 - DNA, 25 bp, Homo sapien
ggtgagggagtcgagcagctggaag

SEQ ID NO: 4444182 - DNA, 25 bp, Homo sapien
ttggtgagggagtcgagcagctgga

SEQ ID NO: 4444183 - DNA, 25 bp, Homo sapien
gagggagtcgagcagctggaagtaa

SEQ ID NO: 4444184 - DNA, 25 bp, Homo sapien
cttggtgagggagtcgagcagctgg

SEQ ID NO: 4444185 - DNA, 25 bp, Homo sapien
tgagtccttatgaccacattccaag

SEQ ID NO: 4444186 - DNA, 25 bp, Homo sapien
cccgaggcgtgcttggtggtgttca

SEQ ID NO: 4444187 - DNA, 25 bp, Homo sapien
cacattccaagatcctccaaagctg

SEQ ID NO: 4444188 - DNA, 25 bp, Homo sapien
cactccaggctctctcgagaattga

SEQ ID NO: 4444189 - DNA, 25 bp, Homo sapien
ctttactgacaggacaccaatgccc

SEQ ID NO: 4444190 - DNA, 25 bp, Homo sapien
ccaatgcccgagacgcagtgactcg

SEQ ID NO: 4444191 - DNA, 25 bp, Homo sapien
gccccgcgaggtacagccattatta

SEQ ID NO: 4444192 - DNA, 25 bp, Homo sapien
agacgcagtgactcgcccaacatca

SEQ ID NO: 4444193 - DNA, 25 bp, Homo sapien
tcagaacatacgactcataagccag

SEQ ID NO: 4444194 - DNA, 25 bp, Homo sapien
ggatcagaacatacgactcataagc

SEQ ID NO: 4444195 - DNA, 25 bp, Homo sapien
tacgactcataagccaggcgcagca

SEQ ID NO: 4444196 - DNA, 25 bp, Homo sapien
gaacatacgactcataagccaggcg

SEQ ID NO: 4444197 - DNA, 25 bp, Homo sapien
gccctccttagaccacagaaggcaa

SEQ ID NO: 4444198 - DNA, 25 bp, Homo sapien
caggccctccttagaccacagaagg

SEQ ID NO: 4444199 - DNA, 25 bp, Homo sapien
ggccctccttagaccacagaaggca

SEQ ID NO: 4444200 - DNA, 25 bp, Homo sapien
ttcaggccctccttagaccacagaa

SEQ ID NO: 4444201 - DNA, 25 bp, Homo sapien
tgactctcatggacagcgggacttg

SEQ ID NO: 4444202 - DNA, 25 bp, Homo sapien
gacttgggcagctgacggctctttg

SEQ ID NO: 4444203 - DNA, 25 bp, Homo sapien
taaaacagcccttcaaagctaggtg

SEQ ID NO: 4444204 - DNA, 25 bp, Homo sapien
catcaatctgagatgaacacccggg

SEQ ID NO: 4444205 - DNA, 25 bp, Homo sapien
cctgcaatcccagcctggagagctt

SEQ ID NO: 4444206 - DNA, 25 bp, Homo sapien
cagccctgcaatcccagcctggaga

SEQ ID NO: 4444207 - DNA, 25 bp, Homo sapien
tgcaatcccagcctggagagcttgc

SEQ ID NO: 4444208 - DNA, 25 bp, Homo sapien
ccacccagccctgcaatcccagcct

SEQ ID NO: 4444209 - DNA, 25 bp, Homo sapien
gatgtgatgtcccaattggtcccaa

SEQ ID NO: 4444210 - DNA, 25 bp, Homo sapien
gcctctgctccacctaagctccaca

SEQ ID NO: 4444211 - DNA, 25 bp, Homo sapien
gactgtcagctttctaacccagagc

SEQ ID NO: 4444212 - DNA, 25 bp, Homo sapien
gtggccacaggatcaaggactgtca

SEQ ID NO: 4444213 - DNA, 25 bp, Homo sapien
cctaacaggtcaagtccagggagca

SEQ ID NO: 4444214 - DNA, 25 bp, Homo sapien
caccctggtcagaagagcatcctgg

SEQ ID NO: 4444215 - DNA, 25 bp, Homo sapien
agaaacatattaactaggccccagg

SEQ ID NO: 4444216 - DNA, 25 bp, Homo sapien
gaagtagcacatcagggccttgggc

SEQ ID NO: 4444217 - DNA, 25 bp, Homo sapien
cgggccgatgaagccaagggtgaca

SEQ ID NO: 4444218 - DNA, 25 bp, Homo sapien
ctacgggccgatgaagccaagggtg

SEQ ID NO: 4444219 - DNA, 25 bp, Homo sapien
agtgcctcaaggcctaatcctgaac

SEQ ID NO: 4444220 - DNA, 25 bp, Homo sapien
tcaaggcctaatcctgaaccccagg

SEQ ID NO: 4444221 - DNA, 25 bp, Homo sapien
tgcagaggtgggagaggggagacct

SEQ ID NO: 4444222 - DNA, 25 bp, Homo sapien
gcagaggtgggagaggggagacctg

SEQ ID NO: 4444223 - DNA, 25 bp, Homo sapien
ctgcagaggtgggagaggggagacc

SEQ ID NO: 4444224 - DNA, 25 bp, Homo sapien
cacgaaccgtgagcaggcaggtcct

SEQ ID NO: 4444225 - DNA, 25 bp, Homo sapien
ctaggtccttagagggtaggcgatg

SEQ ID NO: 4444226 - DNA, 25 bp, Homo sapien
caggacacgaaccgtgagcaggcag

SEQ ID NO: 4444227 - DNA, 25 bp, Homo sapien
gagggtaggcgatgggcctgcagga

SEQ ID NO: 4444228 - DNA, 25 bp, Homo sapien
ttgaccgtgcgtgtctggagcctgt

SEQ ID NO: 4444229 - DNA, 25 bp, Homo sapien
cagagagtcacgtagcagtcagagg

SEQ ID NO: 4444230 - DNA, 25 bp, Homo sapien
tccagacagggctactgctgttctt

SEQ ID NO: 4444231 - DNA, 25 bp, Homo sapien
tgctgttcttgaccgtgcgtgtctg

SEQ ID NO: 4444232 - DNA, 25 bp, Homo sapien
agcggcagtggctggcgaggatgtg

SEQ ID NO: 4444233 - DNA, 25 bp, Homo sapien
aggtcctggtcaaagactttcagtt

SEQ ID NO: 4444234 - DNA, 25 bp, Homo sapien
tggtcaaagactttcagttccatga

SEQ ID NO: 4444235 - DNA, 25 bp, Homo sapien
ggtcaaagactttcagttccatgac

SEQ ID NO: 4444236 - DNA, 25 bp, Homo sapien
tcctggtcaaagactttcagttcca

SEQ ID NO: 4444237 - DNA, 25 bp, Homo sapien
agcccgcagagtccccgcatcaaac

SEQ ID NO: 4444238 - DNA, 25 bp, Homo sapien
agtgagaagctctcgcgccggaact

SEQ ID NO: 4444239 - DNA, 25 bp, Homo sapien
tcagtgagaagctctcgcgccggaa

SEQ ID NO: 4444240 - DNA, 25 bp, Homo sapien
ggctcagtgagaagctctcgcgccg

SEQ ID NO: 4444241 - DNA, 25 bp, Homo sapien
agactctgcaggcgaaattcaactt

SEQ ID NO: 4444242 - DNA, 25 bp, Homo sapien
actctgcaggcgaaattcaacttcc

SEQ ID NO: 4444243 - DNA, 25 bp, Homo sapien
attcaacttccaggcgcccctcacc

SEQ ID NO: 4444244 - DNA, 25 bp, Homo sapien
tctgcaggcgaaattcaacttccag

SEQ ID NO: 4444245 - DNA, 25 bp, Homo sapien
caccagaacgccattgctgacgagc

SEQ ID NO: 4444246 - DNA, 25 bp, Homo sapien
aacgccattgctgacgagccactcg

SEQ ID NO: 4444247 - DNA, 25 bp, Homo sapien
ttgctgacgagccactcgccacggt

SEQ ID NO: 4444248 - DNA, 25 bp, Homo sapien
agaacgccattgctgacgagccact

SEQ ID NO: 4444249 - DNA, 25 bp, Homo sapien
tgtctcctccagttgaacgtgcaag

SEQ ID NO: 4444250 - DNA, 25 bp, Homo sapien
tccagttgaacgtgcaagcaggaga

SEQ ID NO: 4444251 - DNA, 25 bp, Homo sapien
cagttgaacgtgcaagcaggagagc

SEQ ID NO: 4444252 - DNA, 25 bp, Homo sapien
tcctccagttgaacgtgcaagcagg

SEQ ID NO: 4444253 - DNA, 25 bp, Homo sapien
tgcaggcgaatactcagctcctgct

SEQ ID NO: 4444254 - DNA, 25 bp, Homo sapien
gctgggcagtggaagcggaaggtgc

SEQ ID NO: 4444255 - DNA, 25 bp, Homo sapien
gcagtggaagcggaaggtgccagtg

SEQ ID NO: 4444256 - DNA, 25 bp, Homo sapien
gcaggcgaatactcagctcctgctc

SEQ ID NO: 4444257 - DNA, 25 bp, Homo sapien
ggcagggcactcagtggcgccttta

SEQ ID NO: 4444258 - DNA, 25 bp, Homo sapien
gtggcgcctttagttgctcctcggg

SEQ ID NO: 4444259 - DNA, 25 bp, Homo sapien
actcagtggcgcctttagttgctcc

SEQ ID NO: 4444260 - DNA, 25 bp, Homo sapien
gaccagagggcagggcactcagtgg

SEQ ID NO: 4444261 - DNA, 25 bp, Homo sapien
gggacgtggggaagacaagcctcac

SEQ ID NO: 4444262 - DNA, 25 bp, Homo sapien
tgggacgtggggaagacaagcctca

SEQ ID NO: 4444263 - DNA, 25 bp, Homo sapien
ctgggacgtggggaagacaagcctc

SEQ ID NO: 4444264 - DNA, 25 bp, Homo sapien
tccacaggcgccaggcctgaagcag

SEQ ID NO: 4444265 - DNA, 25 bp, Homo sapien
cagctctggtcctcttaccctgatc

SEQ ID NO: 4444266 - DNA, 25 bp, Homo sapien
ctgaaaaccgtgaaggccccagtca

SEQ ID NO: 4444267 - DNA, 25 bp, Homo sapien
ccatccaggcgccttgcttccttcc

SEQ ID NO: 4444268 - DNA, 25 bp, Homo sapien
cttttttcagctccactctcatcag

SEQ ID NO: 4444269 - DNA, 25 bp, Homo sapien
tcagctccactctcatcaggggctc

SEQ ID NO: 4444270 - DNA, 25 bp, Homo sapien
gcttcttttttcagctccactctca

SEQ ID NO: 4444271 - DNA, 25 bp, Homo sapien
ctgcttcttttttcagctccactct

SEQ ID NO: 4444272 - DNA, 25 bp, Homo sapien
ataacagcttccacccaaaagggcg

SEQ ID NO: 4444273 - DNA, 25 bp, Homo sapien
tgaccataggtgctaagactcctcc

SEQ ID NO: 4444274 - DNA, 25 bp, Homo sapien
atttatcaagtgctccccgggtgcc

SEQ ID NO: 4444275 - DNA, 25 bp, Homo sapien
ggtgggcgacaactctacgaagatc

SEQ ID NO: 4444276 - DNA, 25 bp, Homo sapien
tgaggcaggcatataacttgaggcc

SEQ ID NO: 4444277 - DNA, 25 bp, Homo sapien
catataacttgaggccaggaccagc

SEQ ID NO: 4444278 - DNA, 25 bp, Homo sapien
ggcatataacttgaggccaggacca

SEQ ID NO: 4444279 - DNA, 25 bp, Homo sapien
caggcatataacttgaggccaggac

SEQ ID NO: 4444280 - DNA, 25 bp, Homo sapien
tacccacggagttcaaagcactttg

SEQ ID NO: 4444281 - DNA, 25 bp, Homo sapien
aaagctgggtctgcctcacctgtaa

SEQ ID NO: 4444282 - DNA, 25 bp, Homo sapien
acaagactgaagtttgacacctggg

SEQ ID NO: 4444283 - DNA, 25 bp, Homo sapien
ggaagagactgtgagacagctctca

SEQ ID NO: 4444284 - DNA, 25 bp, Homo sapien
tgcctcaaggccgcggccaccacct

SEQ ID NO: 4444285 - DNA, 25 bp, Homo sapien
gggcccgaagcccagtcgcacggcc

SEQ ID NO: 4444286 - DNA, 25 bp, Homo sapien
ctctgcacagggcccgaagcccagt

SEQ ID NO: 4444287 - DNA, 25 bp, Homo sapien
agcccagtcgcacggccagctccct

SEQ ID NO: 4444288 - DNA, 25 bp, Homo sapien
tcagacaggctaggctgagaaccaa

SEQ ID NO: 4444289 - DNA, 25 bp, Homo sapien
gctacgagctctggtctagatcggg

SEQ ID NO: 4444290 - DNA, 25 bp, Homo sapien
gggccaacaggcctcataccagata

SEQ ID NO: 4444291 - DNA, 25 bp, Homo sapien
agaggtagcaggtcaagtggccacc

SEQ ID NO: 4444292 - DNA, 25 bp, Homo sapien
tggaaaagaagagagccaggcctgt

SEQ ID NO: 4444293 - DNA, 25 bp, Homo sapien
aaagaagagagccaggcctgtagag

SEQ ID NO: 4444294 - DNA, 25 bp, Homo sapien
gaaaagaagagagccaggcctgtag

SEQ ID NO: 4444295 - DNA, 25 bp, Homo sapien
ctggaaaagaagagagccaggcctg

SEQ ID NO: 4444296 - DNA, 25 bp, Homo sapien
taggagacgcaatccaagaggccca

SEQ ID NO: 4444297 - DNA, 25 bp, Homo sapien
gccccggtgatgtaggagacgcaat

SEQ ID NO: 4444298 - DNA, 25 bp, Homo sapien
gctgcccatacagggaagtcattgc

SEQ ID NO: 4444299 - DNA, 25 bp, Homo sapien
ccaccagtggccataatagctacca

SEQ ID NO: 4444300 - DNA, 25 bp, Homo sapien
gtcctcataaaggttggccaaggcc

SEQ ID NO: 4444301 - DNA, 25 bp, Homo sapien
ggtcctcataaaggttggccaaggc

SEQ ID NO: 4444302 - DNA, 25 bp, Homo sapien
ccagcacacccagcttgttcttggt

SEQ ID NO: 4444303 - DNA, 25 bp, Homo sapien
cggccagctcctgccggtaccgctg

SEQ ID NO: 4444304 - DNA, 25 bp, Homo sapien
agcacacccagcttgttcttggtca

SEQ ID NO: 4444305 - DNA, 25 bp, Homo sapien
ctgccggtaccgctgcagctggctg

SEQ ID NO: 4444306 - DNA, 25 bp, Homo sapien
cagcttgggtagcccaagcgggcac

SEQ ID NO: 4444307 - DNA, 25 bp, Homo sapien
gtgaagcagcttgggtagcccaagc

SEQ ID NO: 4444308 - DNA, 25 bp, Homo sapien
tggtgaagcagcttgggtagcccaa

SEQ ID NO: 4444309 - DNA, 25 bp, Homo sapien
aggttggtgaagcagcttgggtagc

SEQ ID NO: 4444310 - DNA, 25 bp, Homo sapien
catcatgcagcagcgcctcgttgat

SEQ ID NO: 4444311 - DNA, 25 bp, Homo sapien
cagcgcctcgttgatgagggcccac

SEQ ID NO: 4444312 - DNA, 25 bp, Homo sapien
ctcatcatgcagcagcgcctcgttg

SEQ ID NO: 4444313 - DNA, 25 bp, Homo sapien
cagcagcgcctcgttgatgagggcc

SEQ ID NO: 4444314 - DNA, 25 bp, Homo sapien
gcggcctgggtgcccagggcctttc

SEQ ID NO: 4444315 - DNA, 25 bp, Homo sapien
gcctgggtgcccagggcctttccca

SEQ ID NO: 4444316 - DNA, 25 bp, Homo sapien
agcggcctgggtgcccagggccttt

SEQ ID NO: 4444317 - DNA, 25 bp, Homo sapien
ggcctcccgttgatctgagagcttg

SEQ ID NO: 4444318 - DNA, 25 bp, Homo sapien
gactcagggcctcccgttgatctga

SEQ ID NO: 4444319 - DNA, 25 bp, Homo sapien
tgatctgagagcttgtgatcatggg

SEQ ID NO: 4444320 - DNA, 25 bp, Homo sapien
caaattcaaaagtggtcaggctctg

SEQ ID NO: 4444321 - DNA, 25 bp, Homo sapien
ttctccccttattccaccaactgca

SEQ ID NO: 4444322 - DNA, 25 bp, Homo sapien
gaccctggtagggtgccggtctcca

SEQ ID NO: 4444323 - DNA, 25 bp, Homo sapien
agaaagcacgggacctggctcagga

SEQ ID NO: 4444324 - DNA, 25 bp, Homo sapien
tgcacacagtcctcgttctcccctt

SEQ ID NO: 4444325 - DNA, 25 bp, Homo sapien
aagcagatgcgggactcaggaagcc

SEQ ID NO: 4444326 - DNA, 25 bp, Homo sapien
tgccccataaagaactcggagccaa

SEQ ID NO: 4444327 - DNA, 25 bp, Homo sapien
gggaagccgacctcgtagggagaga

SEQ ID NO: 4444328 - DNA, 25 bp, Homo sapien
ctaagaagcagatgcgggactcagg

SEQ ID NO: 4444329 - DNA, 25 bp, Homo sapien
gaaagagcggccgtgagggaagagg

SEQ ID NO: 4444330 - DNA, 25 bp, Homo sapien
gagcggccgtgagggaagagggccc

SEQ ID NO: 4444331 - DNA, 25 bp, Homo sapien
ctgaaagagcggccgtgagggaaga

SEQ ID NO: 4444332 - DNA, 25 bp, Homo sapien
aagagcggccgtgagggaagagggc

SEQ ID NO: 4444333 - DNA, 25 bp, Homo sapien
ctgtcctggaggttggctgcataca

SEQ ID NO: 4444334 - DNA, 25 bp, Homo sapien
tgtcctggaggttggctgcatacag

SEQ ID NO: 4444335 - DNA, 25 bp, Homo sapien
gctgcatacaggttgctccagatac

SEQ ID NO: 4444336 - DNA, 25 bp, Homo sapien
gaggttggctgcatacaggttgctc

SEQ ID NO: 4444337 - DNA, 25 bp, Homo sapien
tgccccttggcacccttatgaaggg

SEQ ID NO: 4444338 - DNA, 25 bp, Homo sapien
ttggcacccttatgaagggcccgga

SEQ ID NO: 4444339 - DNA, 25 bp, Homo sapien
cacccttatgaagggcccggagcac

SEQ ID NO: 4444340 - DNA, 25 bp, Homo sapien
ccttggcacccttatgaagggcccg

SEQ ID NO: 4444341 - DNA, 25 bp, Homo sapien
ccacgcaggaaattatgtgtggcct

SEQ ID NO: 4444342 - DNA, 25 bp, Homo sapien
actcagctatcctgccggctgttga

SEQ ID NO: 4444343 - DNA, 25 bp, Homo sapien
tcagaagatcggtgaaaaactcagc

SEQ ID NO: 4444344 - DNA, 25 bp, Homo sapien
gccagtggacgccacgtcagaagat

SEQ ID NO: 4444345 - DNA, 25 bp, Homo sapien
gctccgagggtgtcagctggttggg

SEQ ID NO: 4444346 - DNA, 25 bp, Homo sapien
cgagggtgtcagctggttggggagc

SEQ ID NO: 4444347 - DNA, 25 bp, Homo sapien
ggggctccgagggtgtcagctggtt

SEQ ID NO: 4444348 - DNA, 25 bp, Homo sapien
ccgagggtgtcagctggttggggag

SEQ ID NO: 4444349 - DNA, 25 bp, Homo sapien
gctccgtggaggttgtagtccaatg

SEQ ID NO: 4444350 - DNA, 25 bp, Homo sapien
ccgtggaggttgtagtccaatgaca

SEQ ID NO: 4444351 - DNA, 25 bp, Homo sapien
gaggttgtagtccaatgacaggatg

SEQ ID NO: 4444352 - DNA, 25 bp, Homo sapien
gttgtagtccaatgacaggatgagg

SEQ ID NO: 4444353 - DNA, 25 bp, Homo sapien
tggtgggctgcccacccttcccaac

SEQ ID NO: 4444354 - DNA, 25 bp, Homo sapien
tccctggtgggctgcccacccttcc

SEQ ID NO: 4444355 - DNA, 25 bp, Homo sapien
cgcctccctggtgggctgcccaccc

SEQ ID NO: 4444356 - DNA, 25 bp, Homo sapien
ctccctggtgggctgcccacccttc

SEQ ID NO: 4444357 - DNA, 25 bp, Homo sapien
gggtcggagaaggtgtggcactccc

SEQ ID NO: 4444358 - DNA, 25 bp, Homo sapien
tggcactcccgaggctggagctgct

SEQ ID NO: 4444359 - DNA, 25 bp, Homo sapien
agatgggtgggaacgggatcccctg

SEQ ID NO: 4444360 - DNA, 25 bp, Homo sapien
gagtcgctgaccagaggaaagtgca

SEQ ID NO: 4444361 - DNA, 25 bp, Homo sapien
ggctgtaggtcaccttcgtgtagtg

SEQ ID NO: 4444362 - DNA, 25 bp, Homo sapien
tcaccttcgtgtagtggtagggaga

SEQ ID NO: 4444363 - DNA, 25 bp, Homo sapien
gagagtccgatgaagacaggttcac

SEQ ID NO: 4444364 - DNA, 25 bp, Homo sapien
tgctcctggttgttgcagacattgt

SEQ ID NO: 4444365 - DNA, 25 bp, Homo sapien
ctgccgcctccgctgcactgcctgg

SEQ ID NO: 4444366 - DNA, 25 bp, Homo sapien
gcctccgctgcactgcctggcgcag

SEQ ID NO: 4444367 - DNA, 25 bp, Homo sapien
cactgcctggcgcagagcctccagc

SEQ ID NO: 4444368 - DNA, 25 bp, Homo sapien
tcagtggggcctgcgctgccgcctc

SEQ ID NO: 4444369 - DNA, 25 bp, Homo sapien
caagtgctccaactactcaaggtag

SEQ ID NO: 4444370 - DNA, 25 bp, Homo sapien
tcaaggtagcgcagaagggaaaaca

SEQ ID NO: 4444371 - DNA, 25 bp, Homo sapien
taataacagatggtctcagcgcctc

SEQ ID NO: 4444372 - DNA, 25 bp, Homo sapien
ctgcaaactgctgaggcgcaaggga

SEQ ID NO: 4444373 - DNA, 25 bp, Homo sapien
tctggtctagttggtagtattacac

SEQ ID NO: 4444374 - DNA, 25 bp, Homo sapien
taggacatatgcctggatgtggcag

SEQ ID NO: 4444375 - DNA, 25 bp, Homo sapien
ataatcagcgcccaccttcagtgtg

SEQ ID NO: 4444376 - DNA, 25 bp, Homo sapien
gtgactatttcagcgtctcagcgtc

SEQ ID NO: 4444377 - DNA, 25 bp, Homo sapien
taccctgagtttagccagaggcggg

SEQ ID NO: 4444378 - DNA, 25 bp, Homo sapien
catggactctcagtacgagacgggc

SEQ ID NO: 4444379 - DNA, 25 bp, Homo sapien
cagtctcagattgggaagtgcgtcc

SEQ ID NO: 4444380 - DNA, 25 bp, Homo sapien
ataacgtcttccagtgcggccaggt

SEQ ID NO: 4444381 - DNA, 25 bp, Homo sapien
gctcaggaaatggtgagtggcccat

SEQ ID NO: 4444382 - DNA, 25 bp, Homo sapien
aaagctgaaagagcagctgaagccc

SEQ ID NO: 4444383 - DNA, 25 bp, Homo sapien
gaatgggaaaggacgttcaaagctg

SEQ ID NO: 4444384 - DNA, 25 bp, Homo sapien
tgagggacttcctagaagaaacagg

SEQ ID NO: 4444385 - DNA, 25 bp, Homo sapien
cacaggactccacgggccgagcagt

SEQ ID NO: 4444386 - DNA, 25 bp, Homo sapien
tccacgggccgagcagttcagtctg

SEQ ID NO: 4444387 - DNA, 25 bp, Homo sapien
tcacacaggactccacgggccgagc

SEQ ID NO: 4444388 - DNA, 25 bp, Homo sapien
actccacgggccgagcagttcagtc

SEQ ID NO: 4444389 - DNA, 25 bp, Homo sapien
ttcaaaatgccaatccctgttgagg

SEQ ID NO: 4444390 - DNA, 25 bp, Homo sapien
tatgtgcgaagcaccacgcagttca

SEQ ID NO: 4444391 - DNA, 25 bp, Homo sapien
ccctgttgaggtctatgtgcgaagc

SEQ ID NO: 4444392 - DNA, 25 bp, Homo sapien
gcttcaaaatgccaatccctgttga

SEQ ID NO: 4444393 - DNA, 25 bp, Homo sapien
tttgttccgacccacagggttctca

SEQ ID NO: 4444394 - DNA, 25 bp, Homo sapien
agtccttgcattgtatgcagtggct

SEQ ID NO: 4444395 - DNA, 25 bp, Homo sapien
gcaatcagtcgtggccaaacaggag

SEQ ID NO: 4444396 - DNA, 25 bp, Homo sapien
tatgcagtggctttagctgccgttg

SEQ ID NO: 4444397 - DNA, 25 bp, Homo sapien
gactcatggaggtgaccgcttcaca

SEQ ID NO: 4444398 - DNA, 25 bp, Homo sapien
ggacaaaagccccacttcagagtgg

SEQ ID NO: 4444399 - DNA, 25 bp, Homo sapien
gatgagattgaccacatccccttgg

SEQ ID NO: 4444400 - DNA, 25 bp, Homo sapien
tgttcaagcctatgagagccaggac

SEQ ID NO: 4444401 - DNA, 25 bp, Homo sapien
gaagagatcagtccacccagagtta

SEQ ID NO: 4444402 - DNA, 25 bp, Homo sapien
taccaaagagaaggcgacagatgcc

SEQ ID NO: 4444403 - DNA, 25 bp, Homo sapien
taaatatcccgaggtctccttggtg

SEQ ID NO: 4444404 - DNA, 25 bp, Homo sapien
cagtgatcgtttagtgtggccctca

SEQ ID NO: 4444405 - DNA, 25 bp, Homo sapien
tgtgcacacgtctgtctcaaatggc

SEQ ID NO: 4444406 - DNA, 25 bp, Homo sapien
tctgatcactaggaagaccacgtgg

SEQ ID NO: 4444407 - DNA, 25 bp, Homo sapien
ctggaaaagcaagtccccatgcagg

SEQ ID NO: 4444408 - DNA, 25 bp, Homo sapien
caggtccatctatgggtggctccaa

SEQ ID NO: 4444409 - DNA, 25 bp, Homo sapien
cagcgggtgaaagcacaggctctag

SEQ ID NO: 4444410 - DNA, 25 bp, Homo sapien
aggctctaggatccgagtccctggg

SEQ ID NO: 4444411 - DNA, 25 bp, Homo sapien
acacatatggtgcagcgcagcgggt

SEQ ID NO: 4444412 - DNA, 25 bp, Homo sapien
tttgaatccgggctcccctgagaaa

SEQ ID NO: 4444413 - DNA, 25 bp, Homo sapien
ccattaccagctgaaaggttcgagg

SEQ ID NO: 4444414 - DNA, 25 bp, Homo sapien
ttttggtaggttctgtggccacacc

SEQ ID NO: 4444415 - DNA, 25 bp, Homo sapien
cagaccgggtttggtatcagcccct

SEQ ID NO: 4444416 - DNA, 25 bp, Homo sapien
ccagttacattctccaagaggtggc

SEQ ID NO: 4444417 - DNA, 25 bp, Homo sapien
gttgacttacggagaggaaatgcct

SEQ ID NO: 4444418 - DNA, 25 bp, Homo sapien
agaggacagagttgacttacggaga

SEQ ID NO: 4444419 - DNA, 25 bp, Homo sapien
caaaaaaccggtgggcctgctatct

SEQ ID NO: 4444420 - DNA, 25 bp, Homo sapien
aaaccggtgggcctgctatctccct

SEQ ID NO: 4444421 - DNA, 25 bp, Homo sapien
gaggcctgaatgagtaaacgttcca

SEQ ID NO: 4444422 - DNA, 25 bp, Homo sapien
cagatttacccggaagccgatgcca

SEQ ID NO: 4444423 - DNA, 25 bp, Homo sapien
cagtatcgacgtccagaggcctgaa

SEQ ID NO: 4444424 - DNA, 25 bp, Homo sapien
gagaacaagcccatgatcctgctgg

SEQ ID NO: 4444425 - DNA, 25 bp, Homo sapien
cctagggcatctgttgagctccatc

SEQ ID NO: 4444426 - DNA, 25 bp, Homo sapien
tctcctcaatattttaactcagtag

SEQ ID NO: 4444427 - DNA, 25 bp, Homo sapien
gaatccgcatttctgttaggttgga

SEQ ID NO: 4444428 - DNA, 25 bp, Homo sapien
cagacttaggccacatcagagtcac

SEQ ID NO: 4444429 - DNA, 25 bp, Homo sapien
taaatggcactcagggttccaagag

SEQ ID NO: 4444430 - DNA, 25 bp, Homo sapien
caagagtgtctgttacagtggcagc

SEQ ID NO: 4444431 - DNA, 25 bp, Homo sapien
cagcatgatggactcaggatggtca

SEQ ID NO: 4444432 - DNA, 25 bp, Homo sapien
tcccagctaggagtgtcaatcagag

SEQ ID NO: 4444433 - DNA, 25 bp, Homo sapien
gggcaccagctcgtacagatccatg

SEQ ID NO: 4444434 - DNA, 25 bp, Homo sapien
tacagatccatgctgttccaagctc

SEQ ID NO: 4444435 - DNA, 25 bp, Homo sapien
tctcttctagtggtgaggtgctcct

SEQ ID NO: 4444436 - DNA, 25 bp, Homo sapien
catgtcatcaactagtggggcacca

SEQ ID NO: 4444437 - DNA, 25 bp, Homo sapien
ggggagtgagtaggccgtttccatc

SEQ ID NO: 4444438 - DNA, 25 bp, Homo sapien
gggagtgagtaggccgtttccatcc

SEQ ID NO: 4444439 - DNA, 25 bp, Homo sapien
tgatggaaatctcctaggcccagcc

SEQ ID NO: 4444440 - DNA, 25 bp, Homo sapien
gacagcacgtgcgaagtactcagta

SEQ ID NO: 4444441 - DNA, 25 bp, Homo sapien
tgaagaacgtgagctccataggaac

SEQ ID NO: 4444442 - DNA, 25 bp, Homo sapien
tctgaggatccagctagacagcacg

SEQ ID NO: 4444443 - DNA, 25 bp, Homo sapien
gacagaggtcaagccccttgttctg

SEQ ID NO: 4444444 - DNA, 25 bp, Homo sapien
ctccttgctaggacagaggtcaagc

SEQ ID NO: 4444445 - DNA, 25 bp, Homo sapien
ggaaggggtcaatgcaaccgtggta

SEQ ID NO: 4444446 - DNA, 25 bp, Homo sapien
cttgttctgggaaggggtcaatgca

SEQ ID NO: 4444447 - DNA, 25 bp, Homo sapien
aattccaattcactggatgatgagg

SEQ ID NO: 4444448 - DNA, 25 bp, Homo sapien
tcaaagattaaccagacttcaggga

SEQ ID NO: 4444449 - DNA, 25 bp, Homo sapien
ctttcttcaataggaggagggctgt

SEQ ID NO: 4444450 - DNA, 25 bp, Homo sapien
ggatgatgaggcctcaaagattaac

SEQ ID NO: 4444451 - DNA, 25 bp, Homo sapien
gatgagtccacctgttgttgcagag

SEQ ID NO: 4444452 - DNA, 25 bp, Homo sapien
gcgccaagtgcattacagaaccagt

SEQ ID NO: 4444453 - DNA, 25 bp, Homo sapien
taggtatagagctggcaccctgcct

SEQ ID NO: 4444454 - DNA, 25 bp, Homo sapien
tacagggtccatcaaatcatgcgcg

SEQ ID NO: 4444455 - DNA, 25 bp, Homo sapien
tagagctttcccaaattatggcggg

SEQ ID NO: 4444456 - DNA, 25 bp, Homo sapien
gagccatgacctctataagctgaag

SEQ ID NO: 4444457 - DNA, 25 bp, Homo sapien
ttatggcgggctagtcctacagtca

SEQ ID NO: 4444458 - DNA, 25 bp, Homo sapien
ggtaccaagccatgaaactgaagtg

SEQ ID NO: 4444459 - DNA, 25 bp, Homo sapien
gcgttttgcaggctaccacttgctc

SEQ ID NO: 4444460 - DNA, 25 bp, Homo sapien
ctggtggctgttcctcgcagataaa

SEQ ID NO: 4444461 - DNA, 25 bp, Homo sapien
taaagagggataggcattgatctgg

SEQ ID NO: 4444462 - DNA, 25 bp, Homo sapien
tgatctggggcgttttgcaggctac

SEQ ID NO: 4444463 - DNA, 25 bp, Homo sapien
aaagcggcaccgctcccactttcag

SEQ ID NO: 4444464 - DNA, 25 bp, Homo sapien
ggcatcctcggcgatggcagcaatg

SEQ ID NO: 4444465 - DNA, 25 bp, Homo sapien
gggacgcggccctgagcagcgccga

SEQ ID NO: 4444466 - DNA, 25 bp, Homo sapien
tcacccagatgcagggtggacctgg

SEQ ID NO: 4444467 - DNA, 25 bp, Homo sapien
cacaggtaactgagggctgcttggg

SEQ ID NO: 4444468 - DNA, 25 bp, Homo sapien
cacacaggtaactgagggctgcttg

SEQ ID NO: 4444469 - DNA, 25 bp, Homo sapien
acacaggtaactgagggctgcttgg

SEQ ID NO: 4444470 - DNA, 25 bp, Homo sapien
caggtaactgagggctgcttgggga

SEQ ID NO: 4444471 - DNA, 25 bp, Homo sapien
tgtctggatccagaaggtcccactt

SEQ ID NO: 4444472 - DNA, 25 bp, Homo sapien
aacacacgtttcaagagcagacatc

SEQ ID NO: 4444473 - DNA, 25 bp, Homo sapien
ctctattgcattaattggtttttgg

SEQ ID NO: 4444474 - DNA, 25 bp, Homo sapien
tgttttatgatgaaacggtgttagg

SEQ ID NO: 4444475 - DNA, 25 bp, Homo sapien
cataagtctctcaccatttagtgtg

SEQ ID NO: 4444476 - DNA, 25 bp, Homo sapien
gcaccattagctctcctgcgtcttc

SEQ ID NO: 4444477 - DNA, 25 bp, Homo sapien
caccattagctctcctgcgtcttca

SEQ ID NO: 4444478 - DNA, 25 bp, Homo sapien
ctgcaccattagctctcctgcgtct

SEQ ID NO: 4444479 - DNA, 25 bp, Homo sapien
tgcaccattagctctcctgcgtctt

SEQ ID NO: 4444480 - DNA, 25 bp, Homo sapien
gtacaggcttaagggactgccagcc

SEQ ID NO: 4444481 - DNA, 25 bp, Homo sapien
ccaggagtgccttcacatggaaaca

SEQ ID NO: 4444482 - DNA, 25 bp, Homo sapien
cacatggaaacaggtgggaagtaca

SEQ ID NO: 4444483 - DNA, 25 bp, Homo sapien
gaagtacaggcttaagggactgcca

SEQ ID NO: 4444484 - DNA, 25 bp, Homo sapien
ctgcagacttgtatgtttaccccag

SEQ ID NO: 4444485 - DNA, 25 bp, Homo sapien
tgcagacttgtatgtttaccccagt

SEQ ID NO: 4444486 - DNA, 25 bp, Homo sapien
tctgagagagttccttgcatgccct

SEQ ID NO: 4444487 - DNA, 25 bp, Homo sapien
tctgattgttctgtgactggattcc

SEQ ID NO: 4444488 - DNA, 25 bp, Homo sapien
gtccttggccatgccgtggtaatga

SEQ ID NO: 4444489 - DNA, 25 bp, Homo sapien
tgttgcctctctttcatggatgctg

SEQ ID NO: 4444490 - DNA, 25 bp, Homo sapien
tgtcacatagggctgcacaggttgt

SEQ ID NO: 4444491 - DNA, 25 bp, Homo sapien
tcccttgaagctgggtagaaacaca

SEQ ID NO: 4444492 - DNA, 25 bp, Homo sapien
tggagttgtgtgacctagcagccct

SEQ ID NO: 4444493 - DNA, 25 bp, Homo sapien
cattccttggatggtgcagcactgg

SEQ ID NO: 4444494 - DNA, 25 bp, Homo sapien
tctctggtgatgtgtgtagtggcca

SEQ ID NO: 4444495 - DNA, 25 bp, Homo sapien
ttcctaggagctaaatgggtgtgtc

SEQ ID NO: 4444496 - DNA, 25 bp, Homo sapien
ttcccagcgccctaaagcctgtggg

SEQ ID NO: 4444497 - DNA, 25 bp, Homo sapien
ggcttcactcttcgaacctggacca

SEQ ID NO: 4444498 - DNA, 25 bp, Homo sapien
gattgtcgcatgtcaaccttgtgaa

SEQ ID NO: 4444499 - DNA, 25 bp, Homo sapien
ccattcccatgtgggtgctggtggt

SEQ ID NO: 4444500 - DNA, 25 bp, Homo sapien
gcctcttctgacgtggaccttctgt

SEQ ID NO: 4444501 - DNA, 25 bp, Homo sapien
ggtaacaacagagccatgagggtcc

SEQ ID NO: 4444502 - DNA, 25 bp, Homo sapien
cagggagttcgtggcctggaaaggt

SEQ ID NO: 4444503 - DNA, 25 bp, Homo sapien
ttcacttccgcccagagctttaact

SEQ ID NO: 4444504 - DNA, 25 bp, Homo sapien
ttgcacaaggactatgtggctggca

SEQ ID NO: 4444505 - DNA, 25 bp, Homo sapien
tgtgctggacatattcacctcccgc

SEQ ID NO: 4444506 - DNA, 25 bp, Homo sapien
ttatttagtaaatgctgtaggcagt

SEQ ID NO: 4444507 - DNA, 25 bp, Homo sapien
gaagctgtagactcaaactttattt

SEQ ID NO: 4444508 - DNA, 25 bp, Homo sapien
caatgaagcattggtcagaggcttg

SEQ ID NO: 4444509 - DNA, 25 bp, Homo sapien
agtcgtttcaaagtggttcaatgaa

SEQ ID NO: 4444510 - DNA, 25 bp, Homo sapien
caatggcgtgctgccaagtgttcct

SEQ ID NO: 4444511 - DNA, 25 bp, Homo sapien
tcctgagaggtgtttaggcacagca

SEQ ID NO: 4444512 - DNA, 25 bp, Homo sapien
taactcaccgccaaacctgtggagc

SEQ ID NO: 4444513 - DNA, 25 bp, Homo sapien
gatccctagatacatgttcccacag

SEQ ID NO: 4444514 - DNA, 25 bp, Homo sapien
cagttagactgtaagggcaggctgc

SEQ ID NO: 4444515 - DNA, 25 bp, Homo sapien
ggcatcttgtagaaaccctgttgtg

SEQ ID NO: 4444516 - DNA, 25 bp, Homo sapien
ctggaccccggactcagactggatt

SEQ ID NO: 4444517 - DNA, 25 bp, Homo sapien
gataccatgtggctgtcttgtacac

SEQ ID NO: 4444518 - DNA, 25 bp, Homo sapien
tctcactaagatgcctaggtcggtc

SEQ ID NO: 4444519 - DNA, 25 bp, Homo sapien
atcacagtgtaagatcctggcttga

SEQ ID NO: 4444520 - DNA, 25 bp, Homo sapien
ggtctcaaacttccggcctacgtga

SEQ ID NO: 4444521 - DNA, 25 bp, Homo sapien
gatcctggcttgatatttgactagg

SEQ ID NO: 4444522 - DNA, 25 bp, Homo sapien
gagtgaagaaaaggagtataaccca

SEQ ID NO: 4444523 - DNA, 25 bp, Homo sapien
cactgaggattaagtgtccaatgca

SEQ ID NO: 4444524 - DNA, 25 bp, Homo sapien
attaatctattgatgaggctggagc

SEQ ID NO: 4444525 - DNA, 25 bp, Homo sapien
caattttaagactcgacagcaagta

SEQ ID NO: 4444526 - DNA, 25 bp, Homo sapien
tcttgatatagcacagaatatagtc

SEQ ID NO: 4444527 - DNA, 25 bp, Homo sapien
tgtggaattgttctgcttcatccag

SEQ ID NO: 4444528 - DNA, 25 bp, Homo sapien
tcctaaaggcgtatgaggtgatatc

SEQ ID NO: 4444529 - DNA, 25 bp, Homo sapien
taaagcagatccttattcagtcttg

SEQ ID NO: 4444530 - DNA, 25 bp, Homo sapien
gataattaaactagtgcagcgactc

SEQ ID NO: 4444531 - DNA, 25 bp, Homo sapien
gctgtacgcatatattcccaggact

SEQ ID NO: 4444532 - DNA, 25 bp, Homo sapien
tctgagttccctcatagctttgaaa

SEQ ID NO: 4444533 - DNA, 25 bp, Homo sapien
tatcagtataatagcagtagcgttc

SEQ ID NO: 4444534 - DNA, 25 bp, Homo sapien
tgaggtcgacgccaaaggccgagtt

SEQ ID NO: 4444535 - DNA, 25 bp, Homo sapien
taagcgctcacgacactaggtcaca

SEQ ID NO: 4444536 - DNA, 25 bp, Homo sapien
ggtgtcaggtgttgctaagcgctca

SEQ ID NO: 4444537 - DNA, 25 bp, Homo sapien
gagtttttaaccatcacgcccactg

SEQ ID NO: 4444538 - DNA, 25 bp, Homo sapien
gaatgggcctgaaactttgcatttc

SEQ ID NO: 4444539 - DNA, 25 bp, Homo sapien
tattaaaacataggttgctgttccc

SEQ ID NO: 4444540 - DNA, 25 bp, Homo sapien
tgttcccttcgagtttcagattcag

SEQ ID NO: 4444541 - DNA, 25 bp, Homo sapien
actggaatgggcctgaaactttgca

SEQ ID NO: 4444542 - DNA, 25 bp, Homo sapien
gacatctgctattgtgacacatccc

SEQ ID NO: 4444543 - DNA, 25 bp, Homo sapien
tgcagggtccttaggcaatgttttg

SEQ ID NO: 4444544 - DNA, 25 bp, Homo sapien
agagaggtgctccaagtgctgtgat

SEQ ID NO: 4444545 - DNA, 25 bp, Homo sapien
taactactgttttgtaagcctccaa

SEQ ID NO: 4444546 - DNA, 25 bp, Homo sapien
gcccttctgagttaaggagccatag

SEQ ID NO: 4444547 - DNA, 25 bp, Homo sapien
gacatggatgttcatgcaacttaag

SEQ ID NO: 4444548 - DNA, 25 bp, Homo sapien
gatgagaaaaatctacgagcttctt

SEQ ID NO: 4444549 - DNA, 25 bp, Homo sapien
tcaaggttacatcttgcagaggttg

SEQ ID NO: 4444550 - DNA, 25 bp, Homo sapien
tgttcttgggtgaggtctggacatc

SEQ ID NO: 4444551 - DNA, 25 bp, Homo sapien
taaagtactcgtggaagatgtttgc

SEQ ID NO: 4444552 - DNA, 25 bp, Homo sapien
taactaggtgcacgtctttgccctc

SEQ ID NO: 4444553 - DNA, 25 bp, Homo sapien
tcactgggtcttcaagtgaaattcc

SEQ ID NO: 4444554 - DNA, 25 bp, Homo sapien
tccaggattcatgtcactgggtata

SEQ ID NO: 4444555 - DNA, 25 bp, Homo sapien
cttatgatccaggattcatgtcact

SEQ ID NO: 4444556 - DNA, 25 bp, Homo sapien
tgatccaggattcatgtcactgggt

SEQ ID NO: 4444557 - DNA, 25 bp, Homo sapien
ttatgatccaggattcatgtcactg

SEQ ID NO: 4444558 - DNA, 25 bp, Homo sapien
ctttcctggtgttcggtctctcttc

SEQ ID NO: 4444559 - DNA, 25 bp, Homo sapien
ctgaggaagtacatcaagtcagttc

SEQ ID NO: 4444560 - DNA, 25 bp, Homo sapien
ggtgttcggtctctcttctgaggaa

SEQ ID NO: 4444561 - DNA, 25 bp, Homo sapien
caaaatggtgatagcaggtagagtc

SEQ ID NO: 4444562 - DNA, 25 bp, Homo sapien
ctgcaaacaaccagaggttcttgga

SEQ ID NO: 4444563 - DNA, 25 bp, Homo sapien
aatgttgtacttctcccctgtattg

SEQ ID NO: 4444564 - DNA, 25 bp, Homo sapien
tgccatctggcgcttgctgttctcc

SEQ ID NO: 4444565 - DNA, 25 bp, Homo sapien
tggcgggagctgtgggtagacgatg

SEQ ID NO: 4444566 - DNA, 25 bp, Homo sapien
gtataaatgttgtacttctcccctg

SEQ ID NO: 4444567 - DNA, 25 bp, Homo sapien
gaccggcaaccgtagctgctgccga

SEQ ID NO: 4444568 - DNA, 25 bp, Homo sapien
tcgtttttcagtgcgggaccggcaa

SEQ ID NO: 4444569 - DNA, 25 bp, Homo sapien
tgctgccgaccggtccaaatggcac

SEQ ID NO: 4444570 - DNA, 25 bp, Homo sapien
aaatggcacattccgataccgtcgg

SEQ ID NO: 4444571 - DNA, 25 bp, Homo sapien
caggtgttgcctgtcattcttctgc

SEQ ID NO: 4444572 - DNA, 25 bp, Homo sapien
ctgcgtggcttcaggtgttgcctgt

SEQ ID NO: 4444573 - DNA, 25 bp, Homo sapien
ggtgaaatgctttcggtaggcactc

SEQ ID NO: 4444574 - DNA, 25 bp, Homo sapien
tttcggtaggcactccacggctgtg

SEQ ID NO: 4444575 - DNA, 25 bp, Homo sapien
ataatcccgcccttagagcagagcc

SEQ ID NO: 4444576 - DNA, 25 bp, Homo sapien
gcagtaggtccaaagtctcacggcg

SEQ ID NO: 4444577 - DNA, 25 bp, Homo sapien
ggctggcatgtagcgatctctctaa

SEQ ID NO: 4444578 - DNA, 25 bp, Homo sapien
aacaagctccgcgacgtttccagga

SEQ ID NO: 4444579 - DNA, 25 bp, Homo sapien
cagcctttgcttaaataccacccaa

SEQ ID NO: 4444580 - DNA, 25 bp, Homo sapien
tctaggaatcgcgtgtactccacca

SEQ ID NO: 4444581 - DNA, 25 bp, Homo sapien
gaaggttgttacactacccagtcta

SEQ ID NO: 4444582 - DNA, 25 bp, Homo sapien
cagcatcgtactcttcagggctaga

SEQ ID NO: 4444583 - DNA, 25 bp, Homo sapien
ctggaaatgccgagacggcctccct

SEQ ID NO: 4444584 - DNA, 25 bp, Homo sapien
gactgggacgaagcatctgcagatc

SEQ ID NO: 4444585 - DNA, 25 bp, Homo sapien
tctgcagatctatctcagtggcggg

SEQ ID NO: 4444586 - DNA, 25 bp, Homo sapien
aaaatcaagagcgttaagaacctgg

SEQ ID NO: 4444587 - DNA, 25 bp, Homo sapien
tgggaagggagtcccctccagattc

SEQ ID NO: 4444588 - DNA, 25 bp, Homo sapien
tgaggaacgtgcttttgttaggaac

SEQ ID NO: 4444589 - DNA, 25 bp, Homo sapien
tctcatggagtgacaaatcttgact

SEQ ID NO: 4444590 - DNA, 25 bp, Homo sapien
tcatcgtcaagtttctgggaaggga

SEQ ID NO: 4444591 - DNA, 25 bp, Homo sapien
cttatttcctctttcactgctgctt

SEQ ID NO: 4444592 - DNA, 25 bp, Homo sapien
atttcctctttcactgctgcttcca

SEQ ID NO: 4444593 - DNA, 25 bp, Homo sapien
tatttcctctttcactgctgcttcc

SEQ ID NO: 4444594 - DNA, 25 bp, Homo sapien
tttcctctttcactgctgcttccat

SEQ ID NO: 4444595 - DNA, 25 bp, Homo sapien
tctctaacgacagtatgaacatgca

SEQ ID NO: 4444596 - DNA, 25 bp, Homo sapien
tcacacagggcttgtgaatccaact

SEQ ID NO: 4444597 - DNA, 25 bp, Homo sapien
gcaaaattgtgtcacggccacagta

SEQ ID NO: 4444598 - DNA, 25 bp, Homo sapien
taaacctttggagtctattctgcaa

SEQ ID NO: 4444599 - DNA, 25 bp, Homo sapien
gtaaaatgcgatcttgttacagtct

SEQ ID NO: 4444600 - DNA, 25 bp, Homo sapien
ctgtaaaatgcgatcttgttacagt

SEQ ID NO: 4444601 - DNA, 25 bp, Homo sapien
tgtaaaatgcgatcttgttacagtc

SEQ ID NO: 4444602 - DNA, 25 bp, Homo sapien
ggtatcctataaatacacctgcatg

SEQ ID NO: 4444603 - DNA, 25 bp, Homo sapien
taatagtatatctaccccatggaat

SEQ ID NO: 4444604 - DNA, 25 bp, Homo sapien
tcggttattcgggacaagatgagga

SEQ ID NO: 4444605 - DNA, 25 bp, Homo sapien
caacccaagggtctagcaataagag

SEQ ID NO: 4444606 - DNA, 25 bp, Homo sapien
agacttccctctagatacctgttca

SEQ ID NO: 4444607 - DNA, 25 bp, Homo sapien
gaattaacataatacgcttttcttc

SEQ ID NO: 4444608 - DNA, 25 bp, Homo sapien
tcagaattaacataatacgcttttc

SEQ ID NO: 4444609 - DNA, 25 bp, Homo sapien
caggcattcactgtagacttccctc

SEQ ID NO: 4444610 - DNA, 25 bp, Homo sapien
tcattgatgatttggaacctggtgc

SEQ ID NO: 4444611 - DNA, 25 bp, Homo sapien
gataggtggacttcttggaaagcca

SEQ ID NO: 4444612 - DNA, 25 bp, Homo sapien
gcttcattgatgatttggaacctgg

SEQ ID NO: 4444613 - DNA, 25 bp, Homo sapien
tgaatccaataatgcctgataggtg

SEQ ID NO: 4444614 - DNA, 25 bp, Homo sapien
tgaagagcattgttcctcacttttt

SEQ ID NO: 4444615 - DNA, 25 bp, Homo sapien
ttcctcactttttcaggatccaaaa

SEQ ID NO: 4444616 - DNA, 25 bp, Homo sapien
gagcattgttcctcactttttcagg

SEQ ID NO: 4444617 - DNA, 25 bp, Homo sapien
ttgttcctcactttttcaggatcca

SEQ ID NO: 4444618 - DNA, 25 bp, Homo sapien
ctgtcttgtgctgagatcctgtgtc

SEQ ID NO: 4444619 - DNA, 25 bp, Homo sapien
tgatgtcccaggtaatttgtccttg

SEQ ID NO: 4444620 - DNA, 25 bp, Homo sapien
gcatggagtttgttccaagaggtcc

SEQ ID NO: 4444621 - DNA, 25 bp, Homo sapien
tctcagtcttgggagctacgttgct

SEQ ID NO: 4444622 - DNA, 25 bp, Homo sapien
tagaggctctttcactatgcaatga

SEQ ID NO: 4444623 - DNA, 25 bp, Homo sapien
tgcaggcaacattagtgatcaccat

SEQ ID NO: 4444624 - DNA, 25 bp, Homo sapien
tctcaacaccacatgacaaggagga

SEQ ID NO: 4444625 - DNA, 25 bp, Homo sapien
cagactgacagagggcatgaaacct

SEQ ID NO: 4444626 - DNA, 25 bp, Homo sapien
tctctggtgaaaccttgcaaacagg

SEQ ID NO: 4444627 - DNA, 25 bp, Homo sapien
tattcctgcatcctcggagaagctg

SEQ ID NO: 4444628 - DNA, 25 bp, Homo sapien
cacagtactggctaataagcggtag

SEQ ID NO: 4444629 - DNA, 25 bp, Homo sapien
gtctggccagttcccaaattagctg

SEQ ID NO: 4444630 - DNA, 25 bp, Homo sapien
ggtttattgcaagcactgattttct

SEQ ID NO: 4444631 - DNA, 25 bp, Homo sapien
attttctacaaagaatactggcaac

SEQ ID NO: 4444632 - DNA, 25 bp, Homo sapien
tgattttctacaaagaatactggca

SEQ ID NO: 4444633 - DNA, 25 bp, Homo sapien
agttgcagccagttggtttattgca

SEQ ID NO: 4444634 - DNA, 25 bp, Homo sapien
aagacctcccgggatccagaggatg

SEQ ID NO: 4444635 - DNA, 25 bp, Homo sapien
ctgggaatcacaattagtaaagacc

SEQ ID NO: 4444636 - DNA, 25 bp, Homo sapien
tatgactccatcaactcttccttgg

SEQ ID NO: 4444637 - DNA, 25 bp, Homo sapien
gaggcaccaggactcttcactgtta

SEQ ID NO: 4444638 - DNA, 25 bp, Homo sapien
ggaggttcattttagtactacaagc

SEQ ID NO: 4444639 - DNA, 25 bp, Homo sapien
gtactacaagcctctactcagtttt

SEQ ID NO: 4444640 - DNA, 25 bp, Homo sapien
catcatggtggtagaaatagctttg

SEQ ID NO: 4444641 - DNA, 25 bp, Homo sapien
ggccatataggcgaaaataccagat

SEQ ID NO: 4444642 - DNA, 25 bp, Homo sapien
tccctgaggcttaactgccagttct

SEQ ID NO: 4444643 - DNA, 25 bp, Homo sapien
agtccaataagtaaagccacttggg

SEQ ID NO: 4444644 - DNA, 25 bp, Homo sapien
tttcctatttgctaggacctgctgg

SEQ ID NO: 4444645 - DNA, 25 bp, Homo sapien
cctctgtcgaaaccttagggctctg

SEQ ID NO: 4444646 - DNA, 25 bp, Homo sapien
tacagtgcttggcttgcttgtgagg

SEQ ID NO: 4444647 - DNA, 25 bp, Homo sapien
cttgcttgtgaggacatccggaact

SEQ ID NO: 4444648 - DNA, 25 bp, Homo sapien
gaggacatccggaacttcaaatctg

SEQ ID NO: 4444649 - DNA, 25 bp, Homo sapien
gttttagaggagtctcttcattaat

SEQ ID NO: 4444650 - DNA, 25 bp, Homo sapien
tgtgtccccagagcatgaaatcagc

SEQ ID NO: 4444651 - DNA, 25 bp, Homo sapien
ctgtgtccccagagcatgaaatcag

SEQ ID NO: 4444652 - DNA, 25 bp, Homo sapien
tgtgatatggcacttcaggtctcct

SEQ ID NO: 4444653 - DNA, 25 bp, Homo sapien
gctgtgatatggcacttcaggtctc

SEQ ID NO: 4444654 - DNA, 25 bp, Homo sapien
ggcacttcaggtctccttttccatc

SEQ ID NO: 4444655 - DNA, 25 bp, Homo sapien
gatatggcacttcaggtctcctttt

SEQ ID NO: 4444656 - DNA, 25 bp, Homo sapien
cagggaatttatgctaatcacaacc

SEQ ID NO: 4444657 - DNA, 25 bp, Homo sapien
tctgtagatgctcaaagtataattg

SEQ ID NO: 4444658 - DNA, 25 bp, Homo sapien
tgtagatgctcaaagtataattggc

SEQ ID NO: 4444659 - DNA, 25 bp, Homo sapien
gaatttatgctaatcacaacctctt

SEQ ID NO: 4444660 - DNA, 25 bp, Homo sapien
ctcctcctcattttctttagcagct

SEQ ID NO: 4444661 - DNA, 25 bp, Homo sapien
gagaggtgtccactgatgtctcctc

SEQ ID NO: 4444662 - DNA, 25 bp, Homo sapien
gaggtgtccactgatgtctcctcct

SEQ ID NO: 4444663 - DNA, 25 bp, Homo sapien
ctgagaggtgtccactgatgtctcc

SEQ ID NO: 4444664 - DNA, 25 bp, Homo sapien
tgatgatggtgaaaaagataacaat

SEQ ID NO: 4444665 - DNA, 25 bp, Homo sapien
cgatcatttaacaagcacccttctg

SEQ ID NO: 4444666 - DNA, 25 bp, Homo sapien
gtcctatttatatgcagtcgatcat

SEQ ID NO: 4444667 - DNA, 25 bp, Homo sapien
gaaagagaattccttatatgcccta

SEQ ID NO: 4444668 - DNA, 25 bp, Homo sapien
tcccacaggcccagatcttcttgat

SEQ ID NO: 4444669 - DNA, 25 bp, Homo sapien
cccacaggcccagatcttcttgatt

SEQ ID NO: 4444670 - DNA, 25 bp, Homo sapien
aaggagaaatccaaaccaatagaag

SEQ ID NO: 4444671 - DNA, 25 bp, Homo sapien
tgctcaaatccatgcaaggagaaat

SEQ ID NO: 4444672 - DNA, 25 bp, Homo sapien
ctgcatgttgtgggatcccataaag

SEQ ID NO: 4444673 - DNA, 25 bp, Homo sapien
agttggtgtgattctgcatgttgtg

SEQ ID NO: 4444674 - DNA, 25 bp, Homo sapien
gcaggctctgtattgatctccacca

SEQ ID NO: 4444675 - DNA, 25 bp, Homo sapien
tatttggtatccatagacatccagg

SEQ ID NO: 4444676 - DNA, 25 bp, Homo sapien
gtgtttccgaggcattcagccagaa

SEQ ID NO: 4444677 - DNA, 25 bp, Homo sapien
gaaaatacctatagttctgcccagt

SEQ ID NO: 4444678 - DNA, 25 bp, Homo sapien
ggtgtgagtactgtttgaagacatc

SEQ ID NO: 4444679 - DNA, 25 bp, Homo sapien
tgaagacatcagaaggtgtaggtcc

SEQ ID NO: 4444680 - DNA, 25 bp, Homo sapien
catgagtgcgagatctgaccttttg

SEQ ID NO: 4444681 - DNA, 25 bp, Homo sapien
gaaggtgtaggtcctgtcagcagaa

SEQ ID NO: 4444682 - DNA, 25 bp, Homo sapien
agaacaagaaactggcacttcttcg

SEQ ID NO: 4444683 - DNA, 25 bp, Homo sapien
atgacacatgggacattggatatgt

SEQ ID NO: 4444684 - DNA, 25 bp, Homo sapien
aactggcacttcttcgtgcaaatac

SEQ ID NO: 4444685 - DNA, 25 bp, Homo sapien
ttggatatgtaacagaacaagaaac

SEQ ID NO: 4444686 - DNA, 25 bp, Homo sapien
ttttccatgtcactattacattaat

SEQ ID NO: 4444687 - DNA, 25 bp, Homo sapien
cttttggagctactctgtccaaatt

SEQ ID NO: 4444688 - DNA, 25 bp, Homo sapien
tttttccatgtcactattacattaa

SEQ ID NO: 4444689 - DNA, 25 bp, Homo sapien
gaacttttggagctactctgtccaa

SEQ ID NO: 4444690 - DNA, 25 bp, Homo sapien
ccatgctgggtagctacgtgcttca

SEQ ID NO: 4444691 - DNA, 25 bp, Homo sapien
gaaatccccactatacgcacaaagc

SEQ ID NO: 4444692 - DNA, 25 bp, Homo sapien
gtgtcacaagctcagatagaaatcc

SEQ ID NO: 4444693 - DNA, 25 bp, Homo sapien
gctcctgagttagctgtgtcacaag

SEQ ID NO: 4444694 - DNA, 25 bp, Homo sapien
aaattaaacataatattttccacag

SEQ ID NO: 4444695 - DNA, 25 bp, Homo sapien
ttaaacataatattttccacagtag

SEQ ID NO: 4444696 - DNA, 25 bp, Homo sapien
aattaaacataatattttccacagt

SEQ ID NO: 4444697 - DNA, 25 bp, Homo sapien
aaacataatattttccacagtagtg

SEQ ID NO: 4444698 - DNA, 25 bp, Homo sapien
ggaatgtcatgctcatcaaaccctg

SEQ ID NO: 4444699 - DNA, 25 bp, Homo sapien
cctcagtgtgctctatgtccagcca

SEQ ID NO: 4444700 - DNA, 25 bp, Homo sapien
tcttcatagttccagcggcactggt

SEQ ID NO: 4444701 - DNA, 25 bp, Homo sapien
tttgtcccaggtgaagtacctcttg

SEQ ID NO: 4444702 - DNA, 25 bp, Homo sapien
cacatatactgagtagtcaggatca

SEQ ID NO: 4444703 - DNA, 25 bp, Homo sapien
tagtcaggatcaatcttgatgtggg

SEQ ID NO: 4444704 - DNA, 25 bp, Homo sapien
tgatgtggggatcactgatgaccac

SEQ ID NO: 4444705 - DNA, 25 bp, Homo sapien
gatctttggccttcacatatactga

SEQ ID NO: 4444706 - DNA, 25 bp, Homo sapien
gtgaaatccaggtaagaggagagac

SEQ ID NO: 4444707 - DNA, 25 bp, Homo sapien
cttgggattggtgaaatccaggtaa

SEQ ID NO: 4444708 - DNA, 25 bp, Homo sapien
ttggtgaaatccaggtaagaggaga

SEQ ID NO: 4444709 - DNA, 25 bp, Homo sapien
gattggtgaaatccaggtaagagga

SEQ ID NO: 4444710 - DNA, 25 bp, Homo sapien
tgataaacagggaaagcaaaaagac

SEQ ID NO: 4444711 - DNA, 25 bp, Homo sapien
ttttccacttctttcactctttcag

SEQ ID NO: 4444712 - DNA, 25 bp, Homo sapien
tttccacttctttcactctttcagg

SEQ ID NO: 4444713 - DNA, 25 bp, Homo sapien
ccacttctttcactctttcaggtaa

SEQ ID NO: 4444714 - DNA, 25 bp, Homo sapien
ttattcaatcactttttccacttct

SEQ ID NO: 4444715 - DNA, 25 bp, Homo sapien
gataaaaaccgtagatgttgtggag

SEQ ID NO: 4444716 - DNA, 25 bp, Homo sapien
aaagacagaaggctcattcatgtca

SEQ ID NO: 4444717 - DNA, 25 bp, Homo sapien
ggtttgctctggccctctaaagaca

SEQ ID NO: 4444718 - DNA, 25 bp, Homo sapien
tctgtgctcccaattgccatgatga

SEQ ID NO: 4444719 - DNA, 25 bp, Homo sapien
tcacacaagcccagtttaattcttt

SEQ ID NO: 4444720 - DNA, 25 bp, Homo sapien
cagccaaaaggtgggtcacacaagc

SEQ ID NO: 4444721 - DNA, 25 bp, Homo sapien
tcagccaaaaggtgggtcacacaag

SEQ ID NO: 4444722 - DNA, 25 bp, Homo sapien
gggtcacacaagcccagtttaattc

SEQ ID NO: 4444723 - DNA, 25 bp, Homo sapien
ttttgtgatccagcaaagaaagaac

SEQ ID NO: 4444724 - DNA, 25 bp, Homo sapien
tgagagtgagtaacattgggataga

SEQ ID NO: 4444725 - DNA, 25 bp, Homo sapien
ggtaccaacgcactagcagctctgt

SEQ ID NO: 4444726 - DNA, 25 bp, Homo sapien
ggattcccaatgaacccgcctatgt

SEQ ID NO: 4444727 - DNA, 25 bp, Homo sapien
gccacggaagaagggctggtaggct

SEQ ID NO: 4444728 - DNA, 25 bp, Homo sapien
gctggtaggctccagcctggtacca

SEQ ID NO: 4444729 - DNA, 25 bp, Homo sapien
gatgagtcgggtgtgttcctcccca

SEQ ID NO: 4444730 - DNA, 25 bp, Homo sapien
gagaataccaatatggcaggaggcc

SEQ ID NO: 4444731 - DNA, 25 bp, Homo sapien
cagggctctcgtcgcttggtgttca

SEQ ID NO: 4444732 - DNA, 25 bp, Homo sapien
ccacgtgtgcatggtagaacagaga

SEQ ID NO: 4444733 - DNA, 25 bp, Homo sapien
tcaaaagtctttagttcatcaggga

SEQ ID NO: 4444734 - DNA, 25 bp, Homo sapien
gttcatcagggaactctacccacag

SEQ ID NO: 4444735 - DNA, 25 bp, Homo sapien
tctttagttcatcagggaactctac

SEQ ID NO: 4444736 - DNA, 25 bp, Homo sapien
atcagggaactctacccacagaggc

SEQ ID NO: 4444737 - DNA, 25 bp, Homo sapien
ctcatttgatcctggaagaaacaca

SEQ ID NO: 4444738 - DNA, 25 bp, Homo sapien
tgtgactggatgaaccaataatgca

SEQ ID NO: 4444739 - DNA, 25 bp, Homo sapien
gactggatgaaccaataatgcactc

SEQ ID NO: 4444740 - DNA, 25 bp, Homo sapien
catcaactgtggtggcttttggttc

SEQ ID NO: 4444741 - DNA, 25 bp, Homo sapien
ttgctatagtcatctggggtgtgtt

SEQ ID NO: 4444742 - DNA, 25 bp, Homo sapien
tgctatagtcatctggggtgtgttc

SEQ ID NO: 4444743 - DNA, 25 bp, Homo sapien
tcttaatgggaacccaccactttgc

SEQ ID NO: 4444744 - DNA, 25 bp, Homo sapien
gggcatttactcagcagttgttgca

SEQ ID NO: 4444745 - DNA, 25 bp, Homo sapien
tggaatgatgatagatcacgaataa

SEQ ID NO: 4444746 - DNA, 25 bp, Homo sapien
taaaactctgtgactaagtcggaaa

SEQ ID NO: 4444747 - DNA, 25 bp, Homo sapien
tagttgctgaagtaccaataaggtc

SEQ ID NO: 4444748 - DNA, 25 bp, Homo sapien
ctattttgcaagttcacctccaggg

SEQ ID NO: 4444749 - DNA, 25 bp, Homo sapien
gattaccacatcctttatacggcag

SEQ ID NO: 4444750 - DNA, 25 bp, Homo sapien
tatacggcaggtttgtgaagcaaga

SEQ ID NO: 4444751 - DNA, 25 bp, Homo sapien
agtgtccaaggctactgggatcttt

SEQ ID NO: 4444752 - DNA, 25 bp, Homo sapien
ttcccaatgagcaaatgtcttatag

SEQ ID NO: 4444753 - DNA, 25 bp, Homo sapien
tgggatctttacagtacaccctcct

SEQ ID NO: 4444754 - DNA, 25 bp, Homo sapien
accctccttcccaatgagcaaatgt

SEQ ID NO: 4444755 - DNA, 25 bp, Homo sapien
tttaacatcataactgatgcattcc

SEQ ID NO: 4444756 - DNA, 25 bp, Homo sapien
taacatcataactgatgcattcccc

SEQ ID NO: 4444757 - DNA, 25 bp, Homo sapien
ataactgatgcattcccctgggccc

SEQ ID NO: 4444758 - DNA, 25 bp, Homo sapien
catcataactgatgcattcccctgg

SEQ ID NO: 4444759 - DNA, 25 bp, Homo sapien
tgggttccagaatgggagtccagcc

SEQ ID NO: 4444760 - DNA, 25 bp, Homo sapien
gctgtgttcctggacaaataattta

SEQ ID NO: 4444761 - DNA, 25 bp, Homo sapien
tctcttctagatctgaaagttggta

SEQ ID NO: 4444762 - DNA, 25 bp, Homo sapien
cctgtgtgagggattagagtagata

SEQ ID NO: 4444763 - DNA, 25 bp, Homo sapien
cttagtgcttagagcaacccggagt

SEQ ID NO: 4444764 - DNA, 25 bp, Homo sapien
tgtctttattggtatcacacttcca

SEQ ID NO: 4444765 - DNA, 25 bp, Homo sapien
ggtatcacacttccacctcgctgaa

SEQ ID NO: 4444766 - DNA, 25 bp, Homo sapien
gcaacccggagtccataggaggatt

SEQ ID NO: 4444767 - DNA, 25 bp, Homo sapien
tcaagatataactcacccactgaag

SEQ ID NO: 4444768 - DNA, 25 bp, Homo sapien
catcaagatataactcacccactga

SEQ ID NO: 4444769 - DNA, 25 bp, Homo sapien
agatataactcacccactgaagaac

SEQ ID NO: 4444770 - DNA, 25 bp, Homo sapien
caagatataactcacccactgaaga

SEQ ID NO: 4444771 - DNA, 25 bp, Homo sapien
ctccttcctgaagcctaagaccaag

SEQ ID NO: 4444772 - DNA, 25 bp, Homo sapien
cacacttgctgggataatgacccct

SEQ ID NO: 4444773 - DNA, 25 bp, Homo sapien
gtgggtagtcacagaagatggctcc

SEQ ID NO: 4444774 - DNA, 25 bp, Homo sapien
cacacacttgctgggataatgaccc

SEQ ID NO: 4444775 - DNA, 25 bp, Homo sapien
atgttgagtgagagcttctccaggc

SEQ ID NO: 4444776 - DNA, 25 bp, Homo sapien
tggcacaatacgtaaaagccacagg

SEQ ID NO: 4444777 - DNA, 25 bp, Homo sapien
tgttttggcacaatacgtaaaagcc

SEQ ID NO: 4444778 - DNA, 25 bp, Homo sapien
tcagtggcaatgttgagtgagagct

SEQ ID NO: 4444779 - DNA, 25 bp, Homo sapien
gaaaagaatccttcgtgctgccaag

SEQ ID NO: 4444780 - DNA, 25 bp, Homo sapien
gaacgctataaatgtctcagggcta

SEQ ID NO: 4444781 - DNA, 25 bp, Homo sapien
tgcagcgtatgcagtgcacacagaa

SEQ ID NO: 4444782 - DNA, 25 bp, Homo sapien
ccacttggacactggccttgagcaa

SEQ ID NO: 4444783 - DNA, 25 bp, Homo sapien
cagaggtggccgttagcaagttgct

SEQ ID NO: 4444784 - DNA, 25 bp, Homo sapien
ccttgggcaccatgacacgactggt

SEQ ID NO: 4444785 - DNA, 25 bp, Homo sapien
cacgcagttaggcttcatgggaaag

SEQ ID NO: 4444786 - DNA, 25 bp, Homo sapien
tattggcgcccagggatcagaaggc

SEQ ID NO: 4444787 - DNA, 25 bp, Homo sapien
catttacatcttgaaggaaagacac

SEQ ID NO: 4444788 - DNA, 25 bp, Homo sapien
atttacatcttgaaggaaagacaca

SEQ ID NO: 4444789 - DNA, 25 bp, Homo sapien
gacatttacatcttgaaggaaagac

SEQ ID NO: 4444790 - DNA, 25 bp, Homo sapien
tttacatcttgaaggaaagacacac

SEQ ID NO: 4444791 - DNA, 25 bp, Homo sapien
tttgtgtttttaaactgatttgcca

SEQ ID NO: 4444792 - DNA, 25 bp, Homo sapien
tttttaaactgatttgccaactcat

SEQ ID NO: 4444793 - DNA, 25 bp, Homo sapien
tgtttttaaactgatttgccaactc

SEQ ID NO: 4444794 - DNA, 25 bp, Homo sapien
tgtgtttttaaactgatttgccaac

SEQ ID NO: 4444795 - DNA, 25 bp, Homo sapien
cctgaactcaagtgaaccccctgcc

SEQ ID NO: 4444796 - DNA, 25 bp, Homo sapien
aactcaagtgaaccccctgcctcgg

SEQ ID NO: 4444797 - DNA, 25 bp, Homo sapien
ctcctgaactcaagtgaaccccctg

SEQ ID NO: 4444798 - DNA, 25 bp, Homo sapien
gaactcctgaactcaagtgaacccc

SEQ ID NO: 4444799 - DNA, 25 bp, Homo sapien
ggagaagtccaactcgagcccatga

SEQ ID NO: 4444800 - DNA, 25 bp, Homo sapien
tgcctactgggagctagccacttca

SEQ ID NO: 4444801 - DNA, 25 bp, Homo sapien
aaccaatgctatcagggagaagtcc

SEQ ID NO: 4444802 - DNA, 25 bp, Homo sapien
caaggtttattcaatggcacagctg

SEQ ID NO: 4444803 - DNA, 25 bp, Homo sapien
tgtccatcttaaaaaccgagctgtg

SEQ ID NO: 4444804 - DNA, 25 bp, Homo sapien
aagttgaaagcccatcagaaggtcg

SEQ ID NO: 4444805 - DNA, 25 bp, Homo sapien
cagaaggtcgtacaggttatgtcca

SEQ ID NO: 4444806 - DNA, 25 bp, Homo sapien
gattctgaagccataagttctcctg

SEQ ID NO: 4444807 - DNA, 25 bp, Homo sapien
tccgataataggaaaattgcggctg

SEQ ID NO: 4444808 - DNA, 25 bp, Homo sapien
cacagatgcgctaatgacggtcggc

SEQ ID NO: 4444809 - DNA, 25 bp, Homo sapien
aggtctcatccggtgggaactcagg

SEQ ID NO: 4444810 - DNA, 25 bp, Homo sapien
gaactcagggtccacataaagaact

SEQ ID NO: 4444811 - DNA, 25 bp, Homo sapien
tggattttgctgagatttggtgaaa

SEQ ID NO: 4444812 - DNA, 25 bp, Homo sapien
tgctgagtgagaggactcctccgtg

SEQ ID NO: 4444813 - DNA, 25 bp, Homo sapien
tttgctgagatttggtgaaatatct

SEQ ID NO: 4444814 - DNA, 25 bp, Homo sapien
agagcataagaatcagccccacctc

SEQ ID NO: 4444815 - DNA, 25 bp, Homo sapien
gggcacaatttagaacagacaagtc

SEQ ID NO: 4444816 - DNA, 25 bp, Homo sapien
gcacaatttagaacagacaagtctt

SEQ ID NO: 4444817 - DNA, 25 bp, Homo sapien
gggggcacaatttagaacagacaag

SEQ ID NO: 4444818 - DNA, 25 bp, Homo sapien
acaatttagaacagacaagtcttct

SEQ ID NO: 4444819 - DNA, 25 bp, Homo sapien
atagggctggcaaaggtcactacat

SEQ ID NO: 4444820 - DNA, 25 bp, Homo sapien
tttcagactgcatagggctggcaaa

SEQ ID NO: 4444821 - DNA, 25 bp, Homo sapien
tcttttcagactgcatagggctggc

SEQ ID NO: 4444822 - DNA, 25 bp, Homo sapien
cttttcagactgcatagggctggca

SEQ ID NO: 4444823 - DNA, 25 bp, Homo sapien
tcttaatagagcattgtttcaagct

SEQ ID NO: 4444824 - DNA, 25 bp, Homo sapien
attgtttcaagctgtaatatttaag

SEQ ID NO: 4444825 - DNA, 25 bp, Homo sapien
gaaaatgaagtatagtcaatactca

SEQ ID NO: 4444826 - DNA, 25 bp, Homo sapien
gagaaaatgaagtatagtcaatact

SEQ ID NO: 4444827 - DNA, 25 bp, Homo sapien
gcctctttcccactgcaccctcagt

SEQ ID NO: 4444828 - DNA, 25 bp, Homo sapien
tgcctctttcccactgcaccctcag

SEQ ID NO: 4444829 - DNA, 25 bp, Homo sapien
gtccctctcttggatcacacagtca

SEQ ID NO: 4444830 - DNA, 25 bp, Homo sapien
tctgggccagacatctttgagaacg

SEQ ID NO: 4444831 - DNA, 25 bp, Homo sapien
ggctgtgcgatggtgccctctccat

SEQ ID NO: 4444832 - DNA, 25 bp, Homo sapien
aagaatcctgacagcaggtagggca

SEQ ID NO: 4444833 - DNA, 25 bp, Homo sapien
gcctgaacacctgctaggaacacac

SEQ ID NO: 4444834 - DNA, 25 bp, Homo sapien
ggcctgaacacctgctaggaacaca

SEQ ID NO: 4444835 - DNA, 25 bp, Homo sapien
gggcttctcggttgcgccataaggt

SEQ ID NO: 4444836 - DNA, 25 bp, Homo sapien
tgcgccataaggtagcctgacacaa

SEQ ID NO: 4444837 - DNA, 25 bp, Homo sapien
ggtagcctgacacaaactgcttcat

SEQ ID NO: 4444838 - DNA, 25 bp, Homo sapien
gcttcatcccgtaaggagtctggct

SEQ ID NO: 4444839 - DNA, 25 bp, Homo sapien
tgaccaggtaagaataacagtagat

SEQ ID NO: 4444840 - DNA, 25 bp, Homo sapien
caggtaagaataacagtagatagac

SEQ ID NO: 4444841 - DNA, 25 bp, Homo sapien
gtaagaataacagtagatagacaga

SEQ ID NO: 4444842 - DNA, 25 bp, Homo sapien
aaatgaccaggtaagaataacagta

SEQ ID NO: 4444843 - DNA, 25 bp, Homo sapien
ttggctccatcaatgataaatcggg

SEQ ID NO: 4444844 - DNA, 25 bp, Homo sapien
agttctgttggctccatcaatgata

SEQ ID NO: 4444845 - DNA, 25 bp, Homo sapien
ctagctctccttgacagatgtcagt

SEQ ID NO: 4444846 - DNA, 25 bp, Homo sapien
taaatcggggattctcgcaaatttc

SEQ ID NO: 4444847 - DNA, 25 bp, Homo sapien
gttggaggtaacactttgctctctt

SEQ ID NO: 4444848 - DNA, 25 bp, Homo sapien
gcaacggaatgagctcgggacgttt

SEQ ID NO: 4444849 - DNA, 25 bp, Homo sapien
tgccttctaaggaggatgggttaag

SEQ ID NO: 4444850 - DNA, 25 bp, Homo sapien
gggcagtaagacattgctggcaacg

SEQ ID NO: 4444851 - DNA, 25 bp, Homo sapien
aacacctgtaggaaatctgccctgc

SEQ ID NO: 4444852 - DNA, 25 bp, Homo sapien
gcctttgcaatgtgagtccaattcc

SEQ ID NO: 4444853 - DNA, 25 bp, Homo sapien
ttcagcgaagactgagcctcagaga

SEQ ID NO: 4444854 - DNA, 25 bp, Homo sapien
cagagcagtaggtgatcataactgg

SEQ ID NO: 4444855 - DNA, 25 bp, Homo sapien
caactgcagtataaactcacttcct

SEQ ID NO: 4444856 - DNA, 25 bp, Homo sapien
aactgcagtataaactcacttcctt

SEQ ID NO: 4444857 - DNA, 25 bp, Homo sapien
tgaccttacagaggtgtcaacccag

SEQ ID NO: 4444858 - DNA, 25 bp, Homo sapien
cttgacaatatgatcaacaggtaac

SEQ ID NO: 4444859 - DNA, 25 bp, Homo sapien
gacacagggcacagatcgtgagcac

SEQ ID NO: 4444860 - DNA, 25 bp, Homo sapien
ggaaggagaattggacaggaattcc

SEQ ID NO: 4444861 - DNA, 25 bp, Homo sapien
caggcaggcaatggctgcgagaaac

SEQ ID NO: 4444862 - DNA, 25 bp, Homo sapien
ggtatgactcggaaaagaaggtgct

SEQ ID NO: 4444863 - DNA, 25 bp, Homo sapien
gatccctgcgtagttttcgatgaaa

SEQ ID NO: 4444864 - DNA, 25 bp, Homo sapien
caatggctgcgagaaaccagcagtc

SEQ ID NO: 4444865 - DNA, 25 bp, Homo sapien
gagaagggctgcaggcaataaaagc

SEQ ID NO: 4444866 - DNA, 25 bp, Homo sapien
aagggctgcaggcaataaaagcagc

SEQ ID NO: 4444867 - DNA, 25 bp, Homo sapien
ggctgcaggcaataaaagcagccag

SEQ ID NO: 4444868 - DNA, 25 bp, Homo sapien
ttgagaagggctgcaggcaataaaa

SEQ ID NO: 4444869 - DNA, 25 bp, Homo sapien
agagcactccagaactcattgcggt

SEQ ID NO: 4444870 - DNA, 25 bp, Homo sapien
ggtgaaaaccagttgattgttgtac

SEQ ID NO: 4444871 - DNA, 25 bp, Homo sapien
aggcagtcatctataaccacgtcca

SEQ ID NO: 4444872 - DNA, 25 bp, Homo sapien
tgattgttgtacgttggcaggcagt

SEQ ID NO: 4444873 - DNA, 25 bp, Homo sapien
ctaggagcatccctgatctcaaaaa

SEQ ID NO: 4444874 - DNA, 25 bp, Homo sapien
tcatgatcttgtacatgtcactagg

SEQ ID NO: 4444875 - DNA, 25 bp, Homo sapien
cacctttcagagcttcgtaggaacc

SEQ ID NO: 4444876 - DNA, 25 bp, Homo sapien
tgagggagcctctctcgatggcttt

SEQ ID NO: 4444877 - DNA, 25 bp, Homo sapien
ccgggtcggtctttcatctgagcct

SEQ ID NO: 4444878 - DNA, 25 bp, Homo sapien
ggagcagtgagttatccatattcct

SEQ ID NO: 4444879 - DNA, 25 bp, Homo sapien
ttcagaccagaaggagaggttccat

SEQ ID NO: 4444880 - DNA, 25 bp, Homo sapien
ggttccataggtcatgttcgtgcca

SEQ ID NO: 4444881 - DNA, 25 bp, Homo sapien
tgtatggctcagtattctccagtga

SEQ ID NO: 4444882 - DNA, 25 bp, Homo sapien
tctccagtgagcaggtataacttat

SEQ ID NO: 4444883 - DNA, 25 bp, Homo sapien
gctttgtttgctagaggagtgcctg

SEQ ID NO: 4444884 - DNA, 25 bp, Homo sapien
ggctgcaaagaggtacatacaatat

SEQ ID NO: 4444885 - DNA, 25 bp, Homo sapien
gccatccagggttgactattcctgg

SEQ ID NO: 4444886 - DNA, 25 bp, Homo sapien
gggttgactattcctggaagagaaa

SEQ ID NO: 4444887 - DNA, 25 bp, Homo sapien
gaaggggtagagttggaggctgccc

SEQ ID NO: 4444888 - DNA, 25 bp, Homo sapien
tttctggaccccttagtatccttca

SEQ ID NO: 4444889 - DNA, 25 bp, Homo sapien
agagtaggcgtgacctctgaccagc

SEQ ID NO: 4444890 - DNA, 25 bp, Homo sapien
cagccccgtgacagagtaggcgtga

SEQ ID NO: 4444891 - DNA, 25 bp, Homo sapien
ccgcaggccattcttgtctcatact

SEQ ID NO: 4444892 - DNA, 25 bp, Homo sapien
tctcatactgaaccggaatgattgt

SEQ ID NO: 4444893 - DNA, 25 bp, Homo sapien
cctcctgagtctgcctaacttaggg

SEQ ID NO: 4444894 - DNA, 25 bp, Homo sapien
taacttagggcttggccatctcctc

SEQ ID NO: 4444895 - DNA, 25 bp, Homo sapien
tacgcgagggtgttctgcctggctc

SEQ ID NO: 4444896 - DNA, 25 bp, Homo sapien
ggagattaatcacaagtgtgctggg

SEQ ID NO: 4444897 - DNA, 25 bp, Homo sapien
ctccaagaaccgttccactccacct

SEQ ID NO: 4444898 - DNA, 25 bp, Homo sapien
tccgcagccgcaccagcttcacttt

SEQ ID NO: 4444899 - DNA, 25 bp, Homo sapien
caagaaccgttccactccacctggc

SEQ ID NO: 4444900 - DNA, 25 bp, Homo sapien
tccacctggccccacggattccgca

SEQ ID NO: 4444901 - DNA, 25 bp, Homo sapien
tcatctttgtccacaaagctccagt

SEQ ID NO: 4444902 - DNA, 25 bp, Homo sapien
catcctcagtgacctggtgctgcag

SEQ ID NO: 4444903 - DNA, 25 bp, Homo sapien
gaactctccatcctcagtgacctgg

SEQ ID NO: 4444904 - DNA, 25 bp, Homo sapien
tgctgcagacgggccttctcatctt

SEQ ID NO: 4444905 - DNA, 25 bp, Homo sapien
ggaagttgcggcagcctccggcaga

SEQ ID NO: 4444906 - DNA, 25 bp, Homo sapien
tccggcagagcaaccccgtacccag

SEQ ID NO: 4444907 - DNA, 25 bp, Homo sapien
cttgtcagactgcagagcatcggcc

SEQ ID NO: 4444908 - DNA, 25 bp, Homo sapien
agcggccctcgttcacagacactgt

SEQ ID NO: 4444909 - DNA, 25 bp, Homo sapien
cctcaaatattttttgagttcttat

SEQ ID NO: 4444910 - DNA, 25 bp, Homo sapien
cacgtctggcctcttctttccttta

SEQ ID NO: 4444911 - DNA, 25 bp, Homo sapien
caccacgtctggcctcttctttcct

SEQ ID NO: 4444912 - DNA, 25 bp, Homo sapien
ctttattcctcaaatattttttgag

SEQ ID NO: 4444913 - DNA, 25 bp, Homo sapien
tcagatggagctgtactgattgtat

SEQ ID NO: 4444914 - DNA, 25 bp, Homo sapien
gggcgctacctttattcagatggag

SEQ ID NO: 4444915 - DNA, 25 bp, Homo sapien
ttctattccctacatctaggtgctt

SEQ ID NO: 4444916 - DNA, 25 bp, Homo sapien
gccatttatttctattccctacatc

SEQ ID NO: 4444917 - DNA, 25 bp, Homo sapien
ccagaaaggaagcacgcattcacag

SEQ ID NO: 4444918 - DNA, 25 bp, Homo sapien
cagaaaggaagcacgcattcacagc

SEQ ID NO: 4444919 - DNA, 25 bp, Homo sapien
cccagaaaggaagcacgcattcaca

SEQ ID NO: 4444920 - DNA, 25 bp, Homo sapien
tccaggagcttcagacggtactgag

SEQ ID NO: 4444921 - DNA, 25 bp, Homo sapien
tggtgaagagactggcccctagctt

SEQ ID NO: 4444922 - DNA, 25 bp, Homo sapien
tccgagtcatcagggtcatcgtcct

SEQ ID NO: 4444923 - DNA, 25 bp, Homo sapien
cttccgccggttcttctgcatcagg

SEQ ID NO: 4444924 - DNA, 25 bp, Homo sapien
tctcgacgagccacagacagactcg

SEQ ID NO: 4444925 - DNA, 25 bp, Homo sapien
tgggtagtgctgcacacaactgctg

SEQ ID NO: 4444926 - DNA, 25 bp, Homo sapien
cctcagaacgcgtctgtgtgactgt

SEQ ID NO: 4444927 - DNA, 25 bp, Homo sapien
tagtcatgggtcatgcaatgccctg

SEQ ID NO: 4444928 - DNA, 25 bp, Homo sapien
ttcagagtgaatggcaaatgtgtca

SEQ ID NO: 4444929 - DNA, 25 bp, Homo sapien
ttccgactcccaaggcttaaatagc

SEQ ID NO: 4444930 - DNA, 25 bp, Homo sapien
gagcccctcgggaggaacatcctgt

SEQ ID NO: 4444931 - DNA, 25 bp, Homo sapien
tggtcacccatgtcacagtttcaac

SEQ ID NO: 4444932 - DNA, 25 bp, Homo sapien
ccttggaggcgttgtacaggaagaa

SEQ ID NO: 4444933 - DNA, 25 bp, Homo sapien
gctgggacacctcccgcatgttgat

SEQ ID NO: 4444934 - DNA, 25 bp, Homo sapien
tcttttcagagaagacccggaggat

SEQ ID NO: 4444935 - DNA, 25 bp, Homo sapien
acgatgacgtactcgctgggaggca

SEQ ID NO: 4444936 - DNA, 25 bp, Homo sapien
ggccgatccacggagatggtatttt

SEQ ID NO: 4444937 - DNA, 25 bp, Homo sapien
gccgatccacggagatggtattttc

SEQ ID NO: 4444938 - DNA, 25 bp, Homo sapien
actggccgatccacggagatggtat

SEQ ID NO: 4444939 - DNA, 25 bp, Homo sapien
ctggccgatccacggagatggtatt

SEQ ID NO: 4444940 - DNA, 25 bp, Homo sapien
ggaccctctggacttttcgcacaga

SEQ ID NO: 4444941 - DNA, 25 bp, Homo sapien
ccaaagtaggatttgcagtgccaag

SEQ ID NO: 4444942 - DNA, 25 bp, Homo sapien
tcagaatccagtgttcgctgcggct

SEQ ID NO: 4444943 - DNA, 25 bp, Homo sapien
caggtcaccccgctggtaagtggag

SEQ ID NO: 4444944 - DNA, 25 bp, Homo sapien
cactaaaaccaatcgcctgtggtca

SEQ ID NO: 4444945 - DNA, 25 bp, Homo sapien
agaaggcacttggagacctggcact

SEQ ID NO: 4444946 - DNA, 25 bp, Homo sapien
caatcgcctgtggtcattcagaagg

SEQ ID NO: 4444947 - DNA, 25 bp, Homo sapien
ggtcattcagaaggcacttggagac

SEQ ID NO: 4444948 - DNA, 25 bp, Homo sapien
gtgacgtgccagctcccataagctt

SEQ ID NO: 4444949 - DNA, 25 bp, Homo sapien
tcaatactgcacaccgatgaccagc

SEQ ID NO: 4444950 - DNA, 25 bp, Homo sapien
cagcatccagatgaccagaacagat

SEQ ID NO: 4444951 - DNA, 25 bp, Homo sapien
gcttttgggtttgcaggtcctgatc

SEQ ID NO: 4444952 - DNA, 25 bp, Homo sapien
catggctctctcaaactgacctaac

SEQ ID NO: 4444953 - DNA, 25 bp, Homo sapien
taatccctgcggcaactatcagctg

SEQ ID NO: 4444954 - DNA, 25 bp, Homo sapien
caattgagaactgcagacaactgtg

SEQ ID NO: 4444955 - DNA, 25 bp, Homo sapien
tgttgaccctcgacactggagcgaa

SEQ ID NO: 4444956 - DNA, 25 bp, Homo sapien
aggacccctgtgatggatccatcac

SEQ ID NO: 4444957 - DNA, 25 bp, Homo sapien
gacccctgtgatggatccatcacca

SEQ ID NO: 4444958 - DNA, 25 bp, Homo sapien
ggaggacccctgtgatggatccatc

SEQ ID NO: 4444959 - DNA, 25 bp, Homo sapien
acccctgtgatggatccatcaccac

SEQ ID NO: 4444960 - DNA, 25 bp, Homo sapien
gcaggaaggaagggaggattacagt

SEQ ID NO: 4444961 - DNA, 25 bp, Homo sapien
gaggcaggaaggaagggaggattac

SEQ ID NO: 4444962 - DNA, 25 bp, Homo sapien
aggaggcaggaaggaagggaggatt

SEQ ID NO: 4444963 - DNA, 25 bp, Homo sapien
aggcaggaaggaagggaggattaca

SEQ ID NO: 4444964 - DNA, 25 bp, Homo sapien
ttttgcttatcagggcttgttttgc

SEQ ID NO: 4444965 - DNA, 25 bp, Homo sapien
gggactgcttttgcttatcagggct

SEQ ID NO: 4444966 - DNA, 25 bp, Homo sapien
gctgtttgctctgtccgaaacgaag

SEQ ID NO: 4444967 - DNA, 25 bp, Homo sapien
ctctgtccgaaacgaagatgatggg

SEQ ID NO: 4444968 - DNA, 25 bp, Homo sapien
atgttcaagacaaactcctgggaag

SEQ ID NO: 4444969 - DNA, 25 bp, Homo sapien
tgtgtatcccaagcgcataggaagc

SEQ ID NO: 4444970 - DNA, 25 bp, Homo sapien
ctccagcccctgtgtatcccaagcg

SEQ ID NO: 4444971 - DNA, 25 bp, Homo sapien
agcccctgtgtatcccaagcgcata

SEQ ID NO: 4444972 - DNA, 25 bp, Homo sapien
taaaggtgcccgcaggtcaaagaag

SEQ ID NO: 4444973 - DNA, 25 bp, Homo sapien
gatcagctccatgggaggctcagcc

SEQ ID NO: 4444974 - DNA, 25 bp, Homo sapien
cagccaaaggagatatggcggccat

SEQ ID NO: 4444975 - DNA, 25 bp, Homo sapien
tgagatgcatcgaggcctcagggac

SEQ ID NO: 4444976 - DNA, 25 bp, Homo sapien
aggaaaactggttcacaggggtcag

SEQ ID NO: 4444977 - DNA, 25 bp, Homo sapien
caggcctgtgaggcaagctcctctg

SEQ ID NO: 4444978 - DNA, 25 bp, Homo sapien
aaaatgttccggaattgttgctgtt

SEQ ID NO: 4444979 - DNA, 25 bp, Homo sapien
cttgaaaatgttccggaattgttgc

SEQ ID NO: 4444980 - DNA, 25 bp, Homo sapien
tctgcttgaaaatgttccggaattg

SEQ ID NO: 4444981 - DNA, 25 bp, Homo sapien
ctatctgcttgaaaatgttccggaa

SEQ ID NO: 4444982 - DNA, 25 bp, Homo sapien
gactgtgttaaggaccttcttgagc

SEQ ID NO: 4444983 - DNA, 25 bp, Homo sapien
tcacgactgtgttaaggaccttctt

SEQ ID NO: 4444984 - DNA, 25 bp, Homo sapien
gtttgttcacgactgtgttaaggac

SEQ ID NO: 4444985 - DNA, 25 bp, Homo sapien
ttaaggaccttcttgagctcatctg

SEQ ID NO: 4444986 - DNA, 25 bp, Homo sapien
acccccatttggtttgagcaactca

SEQ ID NO: 4444987 - DNA, 25 bp, Homo sapien
ccacccccatttggtttgagcaact

SEQ ID NO: 4444988 - DNA, 25 bp, Homo sapien
cacccccatttggtttgagcaactc

SEQ ID NO: 4444989 - DNA, 25 bp, Homo sapien
cccccatttggtttgagcaactcac

SEQ ID NO: 4444990 - DNA, 25 bp, Homo sapien
tgctttgagacaacgggactcccca

SEQ ID NO: 4444991 - DNA, 25 bp, Homo sapien
ctgctttgagacaacgggactcccc

SEQ ID NO: 4444992 - DNA, 25 bp, Homo sapien
tcatgctacggcaggactccagtgt

SEQ ID NO: 4444993 - DNA, 25 bp, Homo sapien
tacggcaggactccagtgtgaaccc

SEQ ID NO: 4444994 - DNA, 25 bp, Homo sapien
atccatgagcgcaatcatgctacgg

SEQ ID NO: 4444995 - DNA, 25 bp, Homo sapien
actccagtgtgaacccgtgtgtctt

SEQ ID NO: 4444996 - DNA, 25 bp, Homo sapien
cttggcccccgtgggctgatgacag

SEQ ID NO: 4444997 - DNA, 25 bp, Homo sapien
gccttggcccccgtgggctgatgac

SEQ ID NO: 4444998 - DNA, 25 bp, Homo sapien
ctgtatgttgccttggcccccgtgg

SEQ ID NO: 4444999 - DNA, 25 bp, Homo sapien
gtatgttgccttggcccccgtgggc

SEQ ID NO: 4445000 - DNA, 25 bp, Homo sapien
ctacacagcacacagcaaaatcccc

SEQ ID NO: 4445001 - DNA, 25 bp, Homo sapien
ttaatcttgttccagaggtggtgga

SEQ ID NO: 4445002 - DNA, 25 bp, Homo sapien
tcttgttccagaggtggtggaactc

SEQ ID NO: 4445003 - DNA, 25 bp, Homo sapien
taatcttgttccagaggtggtggaa

SEQ ID NO: 4445004 - DNA, 25 bp, Homo sapien
gttccagaggtggtggaactcctgc

SEQ ID NO: 4445005 - DNA, 25 bp, Homo sapien
gctgttgatggtgccggactggtct

SEQ ID NO: 4445006 - DNA, 25 bp, Homo sapien
ctggtctgtgtcatagtgtttgaaa

SEQ ID NO: 4445007 - DNA, 25 bp, Homo sapien
ccggactggtctgtgtcatagtgtt

SEQ ID NO: 4445008 - DNA, 25 bp, Homo sapien
atggtgccggactggtctgtgtcat

SEQ ID NO: 4445009 - DNA, 25 bp, Homo sapien
ctgcgtcgttgactgcatttcgcat

SEQ ID NO: 4445010 - DNA, 25 bp, Homo sapien
ctcgggtccacatccctgccacccc

SEQ ID NO: 4445011 - DNA, 25 bp, Homo sapien
gtctcgggtccacatccctgccacc

SEQ ID NO: 4445012 - DNA, 25 bp, Homo sapien
tctcgggtccacatccctgccaccc

SEQ ID NO: 4445013 - DNA, 25 bp, Homo sapien
cgtctcgggtccacatccctgccac

SEQ ID NO: 4445014 - DNA, 25 bp, Homo sapien
ccagcctaacgaagcagcagatgaa

SEQ ID NO: 4445015 - DNA, 25 bp, Homo sapien
aatgatgtcatagagctggttgttg

SEQ ID NO: 4445016 - DNA, 25 bp, Homo sapien
tgcgtaccgcatggtaatgatgtca

SEQ ID NO: 4445017 - DNA, 25 bp, Homo sapien
gaaactgtcaaagtcgatgttcatg

SEQ ID NO: 4445018 - DNA, 25 bp, Homo sapien
gaacgttgagcttgatgataccatc

SEQ ID NO: 4445019 - DNA, 25 bp, Homo sapien
ctccagaacgttgagcttgatgata

SEQ ID NO: 4445020 - DNA, 25 bp, Homo sapien
gttgagcttgatgataccatctcca

SEQ ID NO: 4445021 - DNA, 25 bp, Homo sapien
ccagaacgttgagcttgatgatacc

SEQ ID NO: 4445022 - DNA, 25 bp, Homo sapien
tgtagggggaatgtgctgtgcctat

SEQ ID NO: 4445023 - DNA, 25 bp, Homo sapien
cctccaccttgagttttaatgtgta

SEQ ID NO: 4445024 - DNA, 25 bp, Homo sapien
ttttaatgtgtagggggaatgtgct

SEQ ID NO: 4445025 - DNA, 25 bp, Homo sapien
cccctccaccttgagttttaatgtg

SEQ ID NO: 4445026 - DNA, 25 bp, Homo sapien
gaaatcctgagtgatcctgcatggc

SEQ ID NO: 4445027 - DNA, 25 bp, Homo sapien
ctttactaaagggtcaggctaggca

SEQ ID NO: 4445028 - DNA, 25 bp, Homo sapien
taggcatgaccgatcaaggatgggt

SEQ ID NO: 4445029 - DNA, 25 bp, Homo sapien
cctgcatggctttggatgaggccag

SEQ ID NO: 4445030 - DNA, 25 bp, Homo sapien
ctccacatggcaaagggacaagggt

SEQ ID NO: 4445031 - DNA, 25 bp, Homo sapien
cttcagaaccgaggcggctcggacc

SEQ ID NO: 4445032 - DNA, 25 bp, Homo sapien
catggcaaagggacaagggtttgtt

SEQ ID NO: 4445033 - DNA, 25 bp, Homo sapien
cggctcggaccagaggcaggcactt

SEQ ID NO: 4445034 - DNA, 25 bp, Homo sapien
agagcaaggtaagcaggagcactcg

SEQ ID NO: 4445035 - DNA, 25 bp, Homo sapien
ctagagcaaggtaagcaggagcact

SEQ ID NO: 4445036 - DNA, 25 bp, Homo sapien
tagagcaaggtaagcaggagcactc

SEQ ID NO: 4445037 - DNA, 25 bp, Homo sapien
gttagtttaccccacagcagtagaa

SEQ ID NO: 4445038 - DNA, 25 bp, Homo sapien
aagtaaccagccctattccactgag

SEQ ID NO: 4445039 - DNA, 25 bp, Homo sapien
caaacttatgagttggacagcccaa

SEQ ID NO: 4445040 - DNA, 25 bp, Homo sapien
agtgccaccggcaggtgcttctgca

SEQ ID NO: 4445041 - DNA, 25 bp, Homo sapien
tagatatgccgcaggccatggtcca

SEQ ID NO: 4445042 - DNA, 25 bp, Homo sapien
taccttgtctgcatattcacggcca

SEQ ID NO: 4445043 - DNA, 25 bp, Homo sapien
cagggttttgtccacggtcatgcga

SEQ ID NO: 4445044 - DNA, 25 bp, Homo sapien
catgcgacaggtcagttagtgagca

SEQ ID NO: 4445045 - DNA, 25 bp, Homo sapien
ttatgcaagtggatatgagctcctc

SEQ ID NO: 4445046 - DNA, 25 bp, Homo sapien
tagaattacgaaggccatacctgcc

SEQ ID NO: 4445047 - DNA, 25 bp, Homo sapien
tctgttacctaaacgggagcttcta

SEQ ID NO: 4445048 - DNA, 25 bp, Homo sapien
aatatatgccctagagctgctccag

SEQ ID NO: 4445049 - DNA, 25 bp, Homo sapien
taaatggcagttcgttgtgataaag

SEQ ID NO: 4445050 - DNA, 25 bp, Homo sapien
ggatctgtgttgactctggcattta

SEQ ID NO: 4445051 - DNA, 25 bp, Homo sapien
aattttggcatacgtctctactcag

SEQ ID NO: 4445052 - DNA, 25 bp, Homo sapien
taaatgacctgacaaaaactgactc

SEQ ID NO: 4445053 - DNA, 25 bp, Homo sapien
caccagattagtgtgttaccccaaa

SEQ ID NO: 4445054 - DNA, 25 bp, Homo sapien
aagaaataaagggaccataagcatt

SEQ ID NO: 4445055 - DNA, 25 bp, Homo sapien
ttttttgaagcagtggcagtatgcc

SEQ ID NO: 4445056 - DNA, 25 bp, Homo sapien
tgaacggttctagccctctattaag

SEQ ID NO: 4445057 - DNA, 25 bp, Homo sapien
tctgatttggacttcgctttggtgg

SEQ ID NO: 4445058 - DNA, 25 bp, Homo sapien
tgatttggacttcgctttggtggaa

SEQ ID NO: 4445059 - DNA, 25 bp, Homo sapien
ctgagagtattacagagtggtagaa

SEQ ID NO: 4445060 - DNA, 25 bp, Homo sapien
tggtagaatcggtaagaactctgat

SEQ ID NO: 4445061 - DNA, 25 bp, Homo sapien
tcgaaaagatgagagtgaaggagac

SEQ ID NO: 4445062 - DNA, 25 bp, Homo sapien
ctgacgatgtatcgaaaagatgaga

SEQ ID NO: 4445063 - DNA, 25 bp, Homo sapien
aacgggtaggtgaggtgttgggcag

SEQ ID NO: 4445064 - DNA, 25 bp, Homo sapien
tgaaggagactttgtgcagcaggaa

SEQ ID NO: 4445065 - DNA, 25 bp, Homo sapien
gtgaagccgcattttcacgctggct

SEQ ID NO: 4445066 - DNA, 25 bp, Homo sapien
tgctctgcggcgtagtgcccttctg

SEQ ID NO: 4445067 - DNA, 25 bp, Homo sapien
ggctgtagtgaagccgcattttcac

SEQ ID NO: 4445068 - DNA, 25 bp, Homo sapien
agtgtgctgagagcctcgaatgctc

SEQ ID NO: 4445069 - DNA, 25 bp, Homo sapien
tatttcctataaggatatccagaga

SEQ ID NO: 4445070 - DNA, 25 bp, Homo sapien
gaatggtcatttcccgggaaaatgc

SEQ ID NO: 4445071 - DNA, 25 bp, Homo sapien
taaggatatccagagaagccaaact

SEQ ID NO: 4445072 - DNA, 25 bp, Homo sapien
gtcatttcccgggaaaatgcatctg

SEQ ID NO: 4445073 - DNA, 25 bp, Homo sapien
cagggccacataccaagctttggga

SEQ ID NO: 4445074 - DNA, 25 bp, Homo sapien
tctgggattgcagaccatccaggtc

SEQ ID NO: 4445075 - DNA, 25 bp, Homo sapien
caagaattaatctaggaggccgggc

SEQ ID NO: 4445076 - DNA, 25 bp, Homo sapien
tatggataggcttcaagagggtctg

SEQ ID NO: 4445077 - DNA, 25 bp, Homo sapien
tttttggattttctccggactcatc

SEQ ID NO: 4445078 - DNA, 25 bp, Homo sapien
caaaactcagaacgtggccgggcgt

SEQ ID NO: 4445079 - DNA, 25 bp, Homo sapien
ctcaaaactcagaacgtggccgggc

SEQ ID NO: 4445080 - DNA, 25 bp, Homo sapien
cagtaaacctgtagaagtgtcgctt

SEQ ID NO: 4445081 - DNA, 25 bp, Homo sapien
tttcaggacctcaagcagacttcct

SEQ ID NO: 4445082 - DNA, 25 bp, Homo sapien
ggacctcaagcagacttcctagaga

SEQ ID NO: 4445083 - DNA, 25 bp, Homo sapien
cctcaagcagacttcctagagactt

SEQ ID NO: 4445084 - DNA, 25 bp, Homo sapien
ccacccccctgcagcaactaagatg

SEQ ID NO: 4445085 - DNA, 25 bp, Homo sapien
gccaagtgatttggtctgttcgata

SEQ ID NO: 4445086 - DNA, 25 bp, Homo sapien
tcgatatgatacatcacagaagggc

SEQ ID NO: 4445087 - DNA, 25 bp, Homo sapien
cacgtatataatcaagtgccaagtg

SEQ ID NO: 4445088 - DNA, 25 bp, Homo sapien
cattcataggctgcatgctagctgg

SEQ ID NO: 4445089 - DNA, 25 bp, Homo sapien
tggccctgtgtgctttgttaaggta

SEQ ID NO: 4445090 - DNA, 25 bp, Homo sapien
gataaattcatttgttgacctagcc

SEQ ID NO: 4445091 - DNA, 25 bp, Homo sapien
cactggagttgataagattgggaaa

SEQ ID NO: 4445092 - DNA, 25 bp, Homo sapien
gaaagattggtattagcaaaggcag

SEQ ID NO: 4445093 - DNA, 25 bp, Homo sapien
gaaagtttccatgagcctagccaag

SEQ ID NO: 4445094 - DNA, 25 bp, Homo sapien
tgctagattgtccttaccagagtca

SEQ ID NO: 4445095 - DNA, 25 bp, Homo sapien
gggtgagataccagctgaaacagtc

SEQ ID NO: 4445096 - DNA, 25 bp, Homo sapien
tgagattcacgcaaggcagagggta

SEQ ID NO: 4445097 - DNA, 25 bp, Homo sapien
catagaaatggtaccccttgttcaa

SEQ ID NO: 4445098 - DNA, 25 bp, Homo sapien
aaaatgaacaagaagccttagattt

SEQ ID NO: 4445099 - DNA, 25 bp, Homo sapien
tggtaccccttgttcaaaatgaaca

SEQ ID NO: 4445100 - DNA, 25 bp, Homo sapien
tttggcatagaaatggtaccccttg

SEQ ID NO: 4445101 - DNA, 25 bp, Homo sapien
aaaagcaagagctgggcaaaggctt

SEQ ID NO: 4445102 - DNA, 25 bp, Homo sapien
agcaagagctgggcaaaggcttacc

SEQ ID NO: 4445103 - DNA, 25 bp, Homo sapien
ccaagaaaaagcaagagctgggcaa

SEQ ID NO: 4445104 - DNA, 25 bp, Homo sapien
taaccaagaaaaagcaagagctggg

SEQ ID NO: 4445105 - DNA, 25 bp, Homo sapien
acaggcttttccctgaatgatggcc

SEQ ID NO: 4445106 - DNA, 25 bp, Homo sapien
tttccctgaatgatggcccagagtt

SEQ ID NO: 4445107 - DNA, 25 bp, Homo sapien
tatctgactgtggtcttctacaggc

SEQ ID NO: 4445108 - DNA, 25 bp, Homo sapien
gactgtggtcttctacaggcttttc

SEQ ID NO: 4445109 - DNA, 25 bp, Homo sapien
gacctggcgctgcaccctagtcgcg

SEQ ID NO: 4445110 - DNA, 25 bp, Homo sapien
ggcgaggccactcctctccggcggc

SEQ ID NO: 4445111 - DNA, 25 bp, Homo sapien
gcaactcggacaccccaacaccgga

SEQ ID NO: 4445112 - DNA, 25 bp, Homo sapien
aacaccggacctggcgctgcaccct

SEQ ID NO: 4445113 - DNA, 25 bp, Homo sapien
tccctccgtcccactcctggagact

SEQ ID NO: 4445114 - DNA, 25 bp, Homo sapien
aagagcactttaaatcaccatcagg

SEQ ID NO: 4445115 - DNA, 25 bp, Homo sapien
catttgtaaaactggtgagctactc

SEQ ID NO: 4445116 - DNA, 25 bp, Homo sapien
agtgcacgtctgtggcttgagcctg

SEQ ID NO: 4445117 - DNA, 25 bp, Homo sapien
taaggccttggaagatccatgtggc

SEQ ID NO: 4445118 - DNA, 25 bp, Homo sapien
tcaactgtatatgaaagtaacagag

SEQ ID NO: 4445119 - DNA, 25 bp, Homo sapien
tactcctcaagttcttattggtctt

SEQ ID NO: 4445120 - DNA, 25 bp, Homo sapien
taagtttgctgagacgagtcagaga

SEQ ID NO: 4445121 - DNA, 25 bp, Homo sapien
cagagagaatgtaacctataattag

SEQ ID NO: 4445122 - DNA, 25 bp, Homo sapien
agtggatcctctacttagagaagca

SEQ ID NO: 4445123 - DNA, 25 bp, Homo sapien
gaagcaaggcattactggaagacaa

SEQ ID NO: 4445124 - DNA, 25 bp, Homo sapien
taagagtgccaagggtgaacctaaa

SEQ ID NO: 4445125 - DNA, 25 bp, Homo sapien
taaagaaatcaagaccgagagaggc

SEQ ID NO: 4445126 - DNA, 25 bp, Homo sapien
taggcacagaaatggaaatgtggat

SEQ ID NO: 4445127 - DNA, 25 bp, Homo sapien
ctattaggcacagaaatggaaatgt

SEQ ID NO: 4445128 - DNA, 25 bp, Homo sapien
tattaggcacagaaatggaaatgtg

SEQ ID NO: 4445129 - DNA, 25 bp, Homo sapien
ggcacagaaatggaaatgtggatat

SEQ ID NO: 4445130 - DNA, 25 bp, Homo sapien
ctcatcagtaatctggtgagctctc

SEQ ID NO: 4445131 - DNA, 25 bp, Homo sapien
caggattctcctcgtactttccaga

SEQ ID NO: 4445132 - DNA, 25 bp, Homo sapien
ggattctcctcgtactttccagaga

SEQ ID NO: 4445133 - DNA, 25 bp, Homo sapien
tcaatggctaaacccaggattctcc

SEQ ID NO: 4445134 - DNA, 25 bp, Homo sapien
cccaggattctcctcgtactttcca

SEQ ID NO: 4445135 - DNA, 25 bp, Homo sapien
cagccagaagtattaggatcgctcc

SEQ ID NO: 4445136 - DNA, 25 bp, Homo sapien
taaagcatattgatacattaccctt

SEQ ID NO: 4445137 - DNA, 25 bp, Homo sapien
cagaaaattcccattagtgcatggt

SEQ ID NO: 4445138 - DNA, 25 bp, Homo sapien
ggatcgctcctataaatttctatac

SEQ ID NO: 4445139 - DNA, 25 bp, Homo sapien
gagctacagacagaactagtattct

SEQ ID NO: 4445140 - DNA, 25 bp, Homo sapien
cagaataatttagaaacccaagctc

SEQ ID NO: 4445141 - DNA, 25 bp, Homo sapien
tctcagaggattagagctacagaca

SEQ ID NO: 4445142 - DNA, 25 bp, Homo sapien
aagtcacaaactcatagtgaattca

SEQ ID NO: 4445143 - DNA, 25 bp, Homo sapien
gggaaaagctgatagtacaacaaaa

SEQ ID NO: 4445144 - DNA, 25 bp, Homo sapien
aaagctgatagtacaacaaaacaaa

SEQ ID NO: 4445145 - DNA, 25 bp, Homo sapien
agctgatagtacaacaaaacaaacc

SEQ ID NO: 4445146 - DNA, 25 bp, Homo sapien
gaaaagctgatagtacaacaaaaca

SEQ ID NO: 4445147 - DNA, 25 bp, Homo sapien
gttcatccagcatagtgatggtctt

SEQ ID NO: 4445148 - DNA, 25 bp, Homo sapien
tgttcatccagcatagtgatggtct

SEQ ID NO: 4445149 - DNA, 25 bp, Homo sapien
gccttcttctatgcggtttagttgt

SEQ ID NO: 4445150 - DNA, 25 bp, Homo sapien
agccttcttctatgcggtttagttg

SEQ ID NO: 4445151 - DNA, 25 bp, Homo sapien
ccttcttctatgcggtttagttgtt

SEQ ID NO: 4445152 - DNA, 25 bp, Homo sapien
atattaatgtctaagaacctcttta

SEQ ID NO: 4445153 - DNA, 25 bp, Homo sapien
aaatattaatgtctaagaacctctt

SEQ ID NO: 4445154 - DNA, 25 bp, Homo sapien
tgaaatattaatgtctaagaacctc

SEQ ID NO: 4445155 - DNA, 25 bp, Homo sapien
gaaatattaatgtctaagaacctct

SEQ ID NO: 4445156 - DNA, 25 bp, Homo sapien
cattagttagcaaggtgttggtgca

SEQ ID NO: 4445157 - DNA, 25 bp, Homo sapien
tctgggtgacaacgtaaaactctgt

SEQ ID NO: 4445158 - DNA, 25 bp, Homo sapien
ttagttagcaaggtgttggtgcatg

SEQ ID NO: 4445159 - DNA, 25 bp, Homo sapien
acattagttagcaaggtgttggtgc

SEQ ID NO: 4445160 - DNA, 25 bp, Homo sapien
tgagcccggcttctgatgttaaatc

SEQ ID NO: 4445161 - DNA, 25 bp, Homo sapien
ccagtgagcaggatggaagaagcac

SEQ ID NO: 4445162 - DNA, 25 bp, Homo sapien
ctttagatagcaggttagcagccca

SEQ ID NO: 4445163 - DNA, 25 bp, Homo sapien
taagatcggaatagcagtaaacctg

SEQ ID NO: 4445164 - DNA, 25 bp, Homo sapien
tgagacgactagactggcaattgat

SEQ ID NO: 4445165 - DNA, 25 bp, Homo sapien
tggcctaaatcatgggtaatcctaa

SEQ ID NO: 4445166 - DNA, 25 bp, Homo sapien
gctgacaaaacttacctcccatgaa

SEQ ID NO: 4445167 - DNA, 25 bp, Homo sapien
ttaaggtccttttgtcaagtccatc

SEQ ID NO: 4445168 - DNA, 25 bp, Homo sapien
ggtatcaagcataaaactgtaaata

SEQ ID NO: 4445169 - DNA, 25 bp, Homo sapien
aatggcaagttttcgggtgtgtggc

SEQ ID NO: 4445170 - DNA, 25 bp, Homo sapien
aactgtaaatatcaaggtatgagca

SEQ ID NO: 4445171 - DNA, 25 bp, Homo sapien
aagaatctgaaatatcccttagtca

SEQ ID NO: 4445172 - DNA, 25 bp, Homo sapien
tagaatttcggattgtggaacaggt

SEQ ID NO: 4445173 - DNA, 25 bp, Homo sapien
taataataagaaaggtcccaggcaa

SEQ ID NO: 4445174 - DNA, 25 bp, Homo sapien
ccaggcaaaattctagagcagagta

SEQ ID NO: 4445175 - DNA, 25 bp, Homo sapien
tgaacactgaagagctagttctcca

SEQ ID NO: 4445176 - DNA, 25 bp, Homo sapien
ggttgctgaagctgaccatttgtca

SEQ ID NO: 4445177 - DNA, 25 bp, Homo sapien
tttagatactacattgcaaggtgag

SEQ ID NO: 4445178 - DNA, 25 bp, Homo sapien
ggctgctcccgttgttggttgctga

SEQ ID NO: 4445179 - DNA, 25 bp, Homo sapien
gccttgccagactcaaagttctttg

SEQ ID NO: 4445180 - DNA, 25 bp, Homo sapien
tcagggccatgtcttttagatttcc

SEQ ID NO: 4445181 - DNA, 25 bp, Homo sapien
gatttcccaggatactgcccacttg

SEQ ID NO: 4445182 - DNA, 25 bp, Homo sapien
gtctgtgattcgttttatttgtgga

SEQ ID NO: 4445183 - DNA, 25 bp, Homo sapien
gattttgagcatcaatctcattgcc

SEQ ID NO: 4445184 - DNA, 25 bp, Homo sapien
tgagctaccacggttggccaaggta

SEQ ID NO: 4445185 - DNA, 25 bp, Homo sapien
cactcacatgactctatttcgtgtg

SEQ ID NO: 4445186 - DNA, 25 bp, Homo sapien
tatttatatcatgtaaagttaaggg

SEQ ID NO: 4445187 - DNA, 25 bp, Homo sapien
cacggttggccaaggtatgacttta

SEQ ID NO: 4445188 - DNA, 25 bp, Homo sapien
aatatagcctaaacccagactgcag

SEQ ID NO: 4445189 - DNA, 25 bp, Homo sapien
gtgatttaacagagagccaagctta

SEQ ID NO: 4445190 - DNA, 25 bp, Homo sapien
gacaccctaagtctaacctggagag

SEQ ID NO: 4445191 - DNA, 25 bp, Homo sapien
tgggatgcatcctgtaatcaatggc

SEQ ID NO: 4445192 - DNA, 25 bp, Homo sapien
gcaatatcaatacgatctctgttgg

SEQ ID NO: 4445193 - DNA, 25 bp, Homo sapien
gtttctttgctctggcattggcaat

SEQ ID NO: 4445194 - DNA, 25 bp, Homo sapien
tatcaatacgatctctgttggtgtc

SEQ ID NO: 4445195 - DNA, 25 bp, Homo sapien
attggcaatatcaatacgatctctg

SEQ ID NO: 4445196 - DNA, 25 bp, Homo sapien
ctagatcttcgttgtggctatgcaa

SEQ ID NO: 4445197 - DNA, 25 bp, Homo sapien
agcagtcggccctcaacagaaaaca

SEQ ID NO: 4445198 - DNA, 25 bp, Homo sapien
tgtgatgcctaacaaaaacgttgtg

SEQ ID NO: 4445199 - DNA, 25 bp, Homo sapien
tcccaattagaagagcgtggaaccg

SEQ ID NO: 4445200 - DNA, 25 bp, Homo sapien
gatcaagcagtggttattggtgaaa

SEQ ID NO: 4445201 - DNA, 25 bp, Homo sapien
agagtgtgtaatcaccaataattaa

SEQ ID NO: 4445202 - DNA, 25 bp, Homo sapien
gattatggacatagttcaatacaca

SEQ ID NO: 4445203 - DNA, 25 bp, Homo sapien
cagatgttcataacacttttcagga

SEQ ID NO: 4445204 - DNA, 25 bp, Homo sapien
tagcaaggtaagtttaagtcccatc

SEQ ID NO: 4445205 - DNA, 25 bp, Homo sapien
gctcaagtgagtaagactagtaatg

SEQ ID NO: 4445206 - DNA, 25 bp, Homo sapien
tactggaaagatgctaaaggcagct

SEQ ID NO: 4445207 - DNA, 25 bp, Homo sapien
cccaaataacagtcatagaaacatg

SEQ ID NO: 4445208 - DNA, 25 bp, Homo sapien
cttgtaaatatagggaatagctcct

SEQ ID NO: 4445209 - DNA, 25 bp, Homo sapien
tacagcttggtttggaaggcaatgt

SEQ ID NO: 4445210 - DNA, 25 bp, Homo sapien
gaaggcttggagtggacactacatt

SEQ ID NO: 4445211 - DNA, 25 bp, Homo sapien
cagagtccgtcatttattagcttta

SEQ ID NO: 4445212 - DNA, 25 bp, Homo sapien
gtgcctcattctcctgagtaattgg

SEQ ID NO: 4445213 - DNA, 25 bp, Homo sapien
cttgtgcctcattctcctgagtaat

SEQ ID NO: 4445214 - DNA, 25 bp, Homo sapien
cttcaggtgatccacccacctcagc

SEQ ID NO: 4445215 - DNA, 25 bp, Homo sapien
ttcaggtgatccacccacctcagcc

SEQ ID NO: 4445216 - DNA, 25 bp, Homo sapien
gaaaccttacaggatactgacttag

SEQ ID NO: 4445217 - DNA, 25 bp, Homo sapien
cttagaacctctgttggaatgtggc

SEQ ID NO: 4445218 - DNA, 25 bp, Homo sapien
aagaagtttgcgtgaagttctccag

SEQ ID NO: 4445219 - DNA, 25 bp, Homo sapien
tggagaggttcacagccaccaagaa

SEQ ID NO: 4445220 - DNA, 25 bp, Homo sapien
gaagtagattcaaagcattggctga

SEQ ID NO: 4445221 - DNA, 25 bp, Homo sapien
cagtcgtgtgccagtatgccttgct

SEQ ID NO: 4445222 - DNA, 25 bp, Homo sapien
ccttgctaacttttgcagggatggg

SEQ ID NO: 4445223 - DNA, 25 bp, Homo sapien
tatagctcatgtcaacaggatttgt

SEQ ID NO: 4445224 - DNA, 25 bp, Homo sapien
atcctcagtgattcccagatctgtc

SEQ ID NO: 4445225 - DNA, 25 bp, Homo sapien
tcttgctgtccacgccttaaaattc

SEQ ID NO: 4445226 - DNA, 25 bp, Homo sapien
tgtactaaaagtaaccagtatagtg

SEQ ID NO: 4445227 - DNA, 25 bp, Homo sapien
atagatatctcagatctcagtgaag

SEQ ID NO: 4445228 - DNA, 25 bp, Homo sapien
aagtaaccagtatagtgcttatgct

SEQ ID NO: 4445229 - DNA, 25 bp, Homo sapien
gcttctggagtgagtaggcagtgag

SEQ ID NO: 4445230 - DNA, 25 bp, Homo sapien
cttctggagtgagtaggcagtgaga

SEQ ID NO: 4445231 - DNA, 25 bp, Homo sapien
ttctggagtgagtaggcagtgagaa

SEQ ID NO: 4445232 - DNA, 25 bp, Homo sapien
tgtccaacaacaagatcgaaagcct

SEQ ID NO: 4445233 - DNA, 25 bp, Homo sapien
aacaaactgagtatggctctcgcca

SEQ ID NO: 4445234 - DNA, 25 bp, Homo sapien
ttatgaaaccgtgcaggagggctca

SEQ ID NO: 4445235 - DNA, 25 bp, Homo sapien
gctcaagttgcgaatgccggaatcc

SEQ ID NO: 4445236 - DNA, 25 bp, Homo sapien
ggctcggacgcaccttccgcgaagg

SEQ ID NO: 4445237 - DNA, 25 bp, Homo sapien
accttccgcgaaggcgccaagagtg

SEQ ID NO: 4445238 - DNA, 25 bp, Homo sapien
gcaccttccgcgaaggcgccaagag

SEQ ID NO: 4445239 - DNA, 25 bp, Homo sapien
acgcaccttccgcgaaggcgccaag

SEQ ID NO: 4445240 - DNA, 25 bp, Homo sapien
gggtcccacgggttggcagcggcca

SEQ ID NO: 4445241 - DNA, 25 bp, Homo sapien
ctgattgaccatccccgaagctatg

SEQ ID NO: 4445242 - DNA, 25 bp, Homo sapien
agcactagcccagcgccgttaggcg

SEQ ID NO: 4445243 - DNA, 25 bp, Homo sapien
tatgaagtggcctagcactagccca

SEQ ID NO: 4445244 - DNA, 25 bp, Homo sapien
caaccaggaccctcaccactcccac

SEQ ID NO: 4445245 - DNA, 25 bp, Homo sapien
cagaccccaaccaggaccctcacca

SEQ ID NO: 4445246 - DNA, 25 bp, Homo sapien
accctcaccactcccacagccagca

SEQ ID NO: 4445247 - DNA, 25 bp, Homo sapien
caggaccctcaccactcccacagcc

SEQ ID NO: 4445248 - DNA, 25 bp, Homo sapien
gaatgtaaggccactaaagcagtcc

SEQ ID NO: 4445249 - DNA, 25 bp, Homo sapien
tgatcaagctttggtcaagactcca

SEQ ID NO: 4445250 - DNA, 25 bp, Homo sapien
cagaccctgatcttattaattgcca

SEQ ID NO: 4445251 - DNA, 25 bp, Homo sapien
catactgaattctagctgagggaca

SEQ ID NO: 4445252 - DNA, 25 bp, Homo sapien
ttgtgatctgctgtagtctggtgaa

SEQ ID NO: 4445253 - DNA, 25 bp, Homo sapien
aatatttgtgatctgctgtagtctg

SEQ ID NO: 4445254 - DNA, 25 bp, Homo sapien
ttgaatatttgtgatctgctgtagt

SEQ ID NO: 4445255 - DNA, 25 bp, Homo sapien
tatttgtgatctgctgtagtctggt

SEQ ID NO: 4445256 - DNA, 25 bp, Homo sapien
ctttttctagtttcaggagttcaat

SEQ ID NO: 4445257 - DNA, 25 bp, Homo sapien
tgggagactgaaacgggagaattga

SEQ ID NO: 4445258 - DNA, 25 bp, Homo sapien
gagactgaaacgggagaattgaggc

SEQ ID NO: 4445259 - DNA, 25 bp, Homo sapien
gggagactgaaacgggagaattgag

SEQ ID NO: 4445260 - DNA, 25 bp, Homo sapien
gactgaaacgggagaattgaggcca

SEQ ID NO: 4445261 - DNA, 25 bp, Homo sapien
gctttgcagagtatgacacttctga

SEQ ID NO: 4445262 - DNA, 25 bp, Homo sapien
ctttgcagagtatgacacttctgag

SEQ ID NO: 4445263 - DNA, 25 bp, Homo sapien
ttcaataggtaagttttcctggcac

SEQ ID NO: 4445264 - DNA, 25 bp, Homo sapien
ctttgcctaagggatctcttctctt

SEQ ID NO: 4445265 - DNA, 25 bp, Homo sapien
tgcctaagggatctcttctctttca

SEQ ID NO: 4445266 - DNA, 25 bp, Homo sapien
acagcttcaataggtaagttttcct

SEQ ID NO: 4445267 - DNA, 25 bp, Homo sapien
cagaaaacaggtgtaactgttaatt

SEQ ID NO: 4445268 - DNA, 25 bp, Homo sapien
acaggtgtaactgttaatttctact

SEQ ID NO: 4445269 - DNA, 25 bp, Homo sapien
tataattcccaaaacacgatggcca

SEQ ID NO: 4445270 - DNA, 25 bp, Homo sapien
aaacacgatggccaagttcttcctt

SEQ ID NO: 4445271 - DNA, 25 bp, Homo sapien
tcccaaaacacgatggccaagttct

SEQ ID NO: 4445272 - DNA, 25 bp, Homo sapien
tacaatcactaattgttttatgaat

SEQ ID NO: 4445273 - DNA, 25 bp, Homo sapien
cacagccaactccagcaaatgtacc

SEQ ID NO: 4445274 - DNA, 25 bp, Homo sapien
aagtcacagccaactccagcaaatg

SEQ ID NO: 4445275 - DNA, 25 bp, Homo sapien
cagccaactccagcaaatgtaccat

SEQ ID NO: 4445276 - DNA, 25 bp, Homo sapien
gccaactccagcaaatgtaccatat

SEQ ID NO: 4445277 - DNA, 25 bp, Homo sapien
taaatgaggaatatttctaattgtt

SEQ ID NO: 4445278 - DNA, 25 bp, Homo sapien
tctttagatttgcagctaaatgagg

SEQ ID NO: 4445279 - DNA, 25 bp, Homo sapien
tgtttcaaggtgggtttctaatctc

SEQ ID NO: 4445280 - DNA, 25 bp, Homo sapien
ctttagatttgcagctaaatgagga

SEQ ID NO: 4445281 - DNA, 25 bp, Homo sapien
ttctgtctcagtcaccaatatatcc

SEQ ID NO: 4445282 - DNA, 25 bp, Homo sapien
tggcattaatagtttggacatgaac

SEQ ID NO: 4445283 - DNA, 25 bp, Homo sapien
aggtaaaggaggcattataatatca

SEQ ID NO: 4445284 - DNA, 25 bp, Homo sapien
cgttttgttgtttacgccacttgag

SEQ ID NO: 4445285 - DNA, 25 bp, Homo sapien
taccagcagcaaagactattaatac

SEQ ID NO: 4445286 - DNA, 25 bp, Homo sapien
gaaatagacttcatatgactacaca

SEQ ID NO: 4445287 - DNA, 25 bp, Homo sapien
ctattaatacccatgttacagtcaa

SEQ ID NO: 4445288 - DNA, 25 bp, Homo sapien
tcttgatactccaatataaagcagg

SEQ ID NO: 4445289 - DNA, 25 bp, Homo sapien
cacaccagacgataaacacacattt

SEQ ID NO: 4445290 - DNA, 25 bp, Homo sapien
aaattgtcatggctattttttagct

SEQ ID NO: 4445291 - DNA, 25 bp, Homo sapien
tatattaataaattgtcatggctat

SEQ ID NO: 4445292 - DNA, 25 bp, Homo sapien
cctgagaaatggttaattcacttat

SEQ ID NO: 4445293 - DNA, 25 bp, Homo sapien
ctcctgggtttaagtgatctgcccg

SEQ ID NO: 4445294 - DNA, 25 bp, Homo sapien
ccgcctcagcctccccaagtgttag

SEQ ID NO: 4445295 - DNA, 25 bp, Homo sapien
tcctgggtttaagtgatctgcccgc

SEQ ID NO: 4445296 - DNA, 25 bp, Homo sapien
catgacctcacaggcttaggtgatc

SEQ ID NO: 4445297 - DNA, 25 bp, Homo sapien
atgactcattgcaaccatgacctca

SEQ ID NO: 4445298 - DNA, 25 bp, Homo sapien
attgcaaccatgacctcacaggctt

SEQ ID NO: 4445299 - DNA, 25 bp, Homo sapien
accatgacctcacaggcttaggtga

SEQ ID NO: 4445300 - DNA, 25 bp, Homo sapien
ggttagctaccatgaacgactcttt

SEQ ID NO: 4445301 - DNA, 25 bp, Homo sapien
taagttcccagatgcaacagctgag

SEQ ID NO: 4445302 - DNA, 25 bp, Homo sapien
ttgttagagatacagtgcccagggt

SEQ ID NO: 4445303 - DNA, 25 bp, Homo sapien
caagaccctcactagatgctggcac

SEQ ID NO: 4445304 - DNA, 25 bp, Homo sapien
taaaaagagtatatcctgaggcagt

SEQ ID NO: 4445305 - DNA, 25 bp, Homo sapien
gagcattttgcaaggtaaacctcca

SEQ ID NO: 4445306 - DNA, 25 bp, Homo sapien
taggaactgctttgtatgccagggt

SEQ ID NO: 4445307 - DNA, 25 bp, Homo sapien
tgaggtcaagattgggccacaccac

SEQ ID NO: 4445308 - DNA, 25 bp, Homo sapien
ctgtctctacagaaaatacaaaaat

SEQ ID NO: 4445309 - DNA, 25 bp, Homo sapien
ccagcctcaacaacatggcaaaact

SEQ ID NO: 4445310 - DNA, 25 bp, Homo sapien
tacagaaaatacaaaaattagccag

SEQ ID NO: 4445311 - DNA, 25 bp, Homo sapien
ctctacagaaaatacaaaaattagc

SEQ ID NO: 4445312 - DNA, 25 bp, Homo sapien
gatcactcttatcctactagcaaaa

SEQ ID NO: 4445313 - DNA, 25 bp, Homo sapien
taagtgtctatgtaatgttcgagat

SEQ ID NO: 4445314 - DNA, 25 bp, Homo sapien
catgattcctgttgttttagcagga

SEQ ID NO: 4445315 - DNA, 25 bp, Homo sapien
tgttcgagatattacgatcactctt

SEQ ID NO: 4445316 - DNA, 25 bp, Homo sapien
gcaaacacattggatattgtgcact

SEQ ID NO: 4445317 - DNA, 25 bp, Homo sapien
cacattggatattgtgcactgaggg

SEQ ID NO: 4445318 - DNA, 25 bp, Homo sapien
aacacattggatattgtgcactgag

SEQ ID NO: 4445319 - DNA, 25 bp, Homo sapien
cattggatattgtgcactgagggca

SEQ ID NO: 4445320 - DNA, 25 bp, Homo sapien
aagcatatcatgcaaatcttccttg

SEQ ID NO: 4445321 - DNA, 25 bp, Homo sapien
tatcatgcaaatcttccttgttgat

SEQ ID NO: 4445322 - DNA, 25 bp, Homo sapien
ctagagaagcaagcatatcatgcaa

SEQ ID NO: 4445323 - DNA, 25 bp, Homo sapien
gcatatcatgcaaatcttccttgtt

SEQ ID NO: 4445324 - DNA, 25 bp, Homo sapien
aaacatagtgaaattaatgggccct

SEQ ID NO: 4445325 - DNA, 25 bp, Homo sapien
ccaaacatagtgaaattaatgggcc

SEQ ID NO: 4445326 - DNA, 25 bp, Homo sapien
tcatcgtggcatcaaggtatgcatc

SEQ ID NO: 4445327 - DNA, 25 bp, Homo sapien
tcaccaaacatagtgaaattaatgg

SEQ ID NO: 4445328 - DNA, 25 bp, Homo sapien
tactccatgtttcaggatgcttgtg

SEQ ID NO: 4445329 - DNA, 25 bp, Homo sapien
agtcatctttgtcttttactccatg

SEQ ID NO: 4445330 - DNA, 25 bp, Homo sapien
tccatgtttcaggatgcttgtgaac

SEQ ID NO: 4445331 - DNA, 25 bp, Homo sapien
tttactccatgtttcaggatgcttg

SEQ ID NO: 4445332 - DNA, 25 bp, Homo sapien
tgagcggccggacccgcacggcgac

SEQ ID NO: 4445333 - DNA, 25 bp, Homo sapien
gctgagcggccggacccgcacggcg

SEQ ID NO: 4445334 - DNA, 25 bp, Homo sapien
acccgcacggcgacctgcacgttcg

SEQ ID NO: 4445335 - DNA, 25 bp, Homo sapien
gcacggcgacctgcacgttcgccat

SEQ ID NO: 4445336 - DNA, 25 bp, Homo sapien
cgagaaaacgggcactgagggctct

SEQ ID NO: 4445337 - DNA, 25 bp, Homo sapien
gagaaaaaagttcgtggctgcacac

SEQ ID NO: 4445338 - DNA, 25 bp, Homo sapien
gctgcacactggatgtctcaagggc

SEQ ID NO: 4445339 - DNA, 25 bp, Homo sapien
tgcggaatcaaaataagccacgaga

SEQ ID NO: 4445340 - DNA, 25 bp, Homo sapien
gagcgtcaactctagtcctactgaa

SEQ ID NO: 4445341 - DNA, 25 bp, Homo sapien
aagtgatccggacctcttggctggg

SEQ ID NO: 4445342 - DNA, 25 bp, Homo sapien
aatgactgtcaactgagtgtgtgcc

SEQ ID NO: 4445343 - DNA, 25 bp, Homo sapien
tgctacaatctgttcacacctgggt

SEQ ID NO: 4445344 - DNA, 25 bp, Homo sapien
ccttccccacccacaccgtggccat

SEQ ID NO: 4445345 - DNA, 25 bp, Homo sapien
agagcccgcgtccacagccatgtcc

SEQ ID NO: 4445346 - DNA, 25 bp, Homo sapien
tgtcctcctccgctggcagcggcca

SEQ ID NO: 4445347 - DNA, 25 bp, Homo sapien
agcccagccagagccgcgccttccc

SEQ ID NO: 4445348 - DNA, 25 bp, Homo sapien
gagctcgcttttccacccgccctag

SEQ ID NO: 4445349 - DNA, 25 bp, Homo sapien
agtgcgcagagctcgcttttccacc

SEQ ID NO: 4445350 - DNA, 25 bp, Homo sapien
cagagctcgcttttccacccgccct

SEQ ID NO: 4445351 - DNA, 25 bp, Homo sapien
ggagtgcgcagagctcgcttttcca

SEQ ID NO: 4445352 - DNA, 25 bp, Homo sapien
ctggcgaggcccgaggatcggctgg

SEQ ID NO: 4445353 - DNA, 25 bp, Homo sapien
ggctgctggcgaggcccgaggatcg

SEQ ID NO: 4445354 - DNA, 25 bp, Homo sapien
gaggcccgaggatcggctggcggca

SEQ ID NO: 4445355 - DNA, 25 bp, Homo sapien
tcctgtcatcgtggtcgtcgccgcc

SEQ ID NO: 4445356 - DNA, 25 bp, Homo sapien
taatgggcttaatccagatgaccca

SEQ ID NO: 4445357 - DNA, 25 bp, Homo sapien
acatacctgatacctatcctttttc

SEQ ID NO: 4445358 - DNA, 25 bp, Homo sapien
ttaatgggcttaatccagatgaccc

SEQ ID NO: 4445359 - DNA, 25 bp, Homo sapien
ccacatacctgatacctatcctttt

SEQ ID NO: 4445360 - DNA, 25 bp, Homo sapien
gagcctaaaaccagtgctagtggga

SEQ ID NO: 4445361 - DNA, 25 bp, Homo sapien
gaaacaagacccaagctcagaagaa

SEQ ID NO: 4445362 - DNA, 25 bp, Homo sapien
cccttaagagaagcgtctgtctcca

SEQ ID NO: 4445363 - DNA, 25 bp, Homo sapien
aaatatttccctactgctgtaccct

SEQ ID NO: 4445364 - DNA, 25 bp, Homo sapien
gccatcaacttccacaataattctt

SEQ ID NO: 4445365 - DNA, 25 bp, Homo sapien
tcaacttccacaataattcttcccc

SEQ ID NO: 4445366 - DNA, 25 bp, Homo sapien
tgccatcaacttccacaataattct

SEQ ID NO: 4445367 - DNA, 25 bp, Homo sapien
catcaacttccacaataattcttcc

SEQ ID NO: 4445368 - DNA, 25 bp, Homo sapien
aaagccaaatgccataaccttctcc

SEQ ID NO: 4445369 - DNA, 25 bp, Homo sapien
tgggttgactgaccagtagcagtaa

SEQ ID NO: 4445370 - DNA, 25 bp, Homo sapien
gttgactgaccagtagcagtaatca

SEQ ID NO: 4445371 - DNA, 25 bp, Homo sapien
ctggggatcctctgggttgactgac

SEQ ID NO: 4445372 - DNA, 25 bp, Homo sapien
caggctggctgactagctgtctagc

SEQ ID NO: 4445373 - DNA, 25 bp, Homo sapien
cttgcaggctggctgactagctgtc

SEQ ID NO: 4445374 - DNA, 25 bp, Homo sapien
gctggctgactagctgtctagccct

SEQ ID NO: 4445375 - DNA, 25 bp, Homo sapien
tgactagctgtctagcccttttcca

SEQ ID NO: 4445376 - DNA, 25 bp, Homo sapien
tctgtgttaaagcaatgagggcctc

SEQ ID NO: 4445377 - DNA, 25 bp, Homo sapien
agcaatgagggcctctgattgtatc

SEQ ID NO: 4445378 - DNA, 25 bp, Homo sapien
ccatagtgattagggttaaacctga

SEQ ID NO: 4445379 - DNA, 25 bp, Homo sapien
gagccatagtgattagggttaaacc

SEQ ID NO: 4445380 - DNA, 25 bp, Homo sapien
cttctctcccttcgacttctgtctc

SEQ ID NO: 4445381 - DNA, 25 bp, Homo sapien
aacttctctcccttcgacttctgtc

SEQ ID NO: 4445382 - DNA, 25 bp, Homo sapien
aaacttctctcccttcgacttctgt

SEQ ID NO: 4445383 - DNA, 25 bp, Homo sapien
taaacttctctcccttcgacttctg

SEQ ID NO: 4445384 - DNA, 25 bp, Homo sapien
cagatgtttctacgagtctgaaaat

SEQ ID NO: 4445385 - DNA, 25 bp, Homo sapien
tttctacgagtctgaaaattactct

SEQ ID NO: 4445386 - DNA, 25 bp, Homo sapien
tcagatgtttctacgagtctgaaaa

SEQ ID NO: 4445387 - DNA, 25 bp, Homo sapien
tgtttctacgagtctgaaaattact

SEQ ID NO: 4445388 - DNA, 25 bp, Homo sapien
taacatgttaacatcaggcatcctt

SEQ ID NO: 4445389 - DNA, 25 bp, Homo sapien
gggatgctgtcatattctttttcag

SEQ ID NO: 4445390 - DNA, 25 bp, Homo sapien
aaactgattcaactattacgagcaa

SEQ ID NO: 4445391 - DNA, 25 bp, Homo sapien
catcctatgaatataccaaaactga

SEQ ID NO: 4445392 - DNA, 25 bp, Homo sapien
tggcaggatagtgtgaatacaaagg

SEQ ID NO: 4445393 - DNA, 25 bp, Homo sapien
gagttgttcaaatcattctgtgtcc

SEQ ID NO: 4445394 - DNA, 25 bp, Homo sapien
ctgtgtcctgtctgtggtgattaca

SEQ ID NO: 4445395 - DNA, 25 bp, Homo sapien
caggctgaaaatcccgtcttaaaag

SEQ ID NO: 4445396 - DNA, 25 bp, Homo sapien
ctcccaggttgcaatgctcaagttg

SEQ ID NO: 4445397 - DNA, 25 bp, Homo sapien
gcaatgctcaagttggcccaaacaa

SEQ ID NO: 4445398 - DNA, 25 bp, Homo sapien
ttggcccaaacaaactttctgctta

SEQ ID NO: 4445399 - DNA, 25 bp, Homo sapien
caagttggcccaaacaaactttctg

SEQ ID NO: 4445400 - DNA, 25 bp, Homo sapien
tgaagccccacataatgtccccaga

SEQ ID NO: 4445401 - DNA, 25 bp, Homo sapien
ttgaagccccacataatgtccccag

SEQ ID NO: 4445402 - DNA, 25 bp, Homo sapien
cttgaagccccacataatgtcccca

SEQ ID NO: 4445403 - DNA, 25 bp, Homo sapien
agatcatttatcgtgaccaagtgga

SEQ ID NO: 4445404 - DNA, 25 bp, Homo sapien
atcatttaaactattgttgaaaaag

SEQ ID NO: 4445405 - DNA, 25 bp, Homo sapien
aaaaaaagatcatttatcgtgacca

SEQ ID NO: 4445406 - DNA, 25 bp, Homo sapien
gatcatttatcgtgaccaagtggaa

SEQ ID NO: 4445407 - DNA, 25 bp, Homo sapien
atagcctttggcaactccagacagt

SEQ ID NO: 4445408 - DNA, 25 bp, Homo sapien
gtccataagcaaaaaggcatatgtt

SEQ ID NO: 4445409 - DNA, 25 bp, Homo sapien
gggtccccagcatggtatatgtctt

SEQ ID NO: 4445410 - DNA, 25 bp, Homo sapien
cagacagtacttccatccctaaatc

SEQ ID NO: 4445411 - DNA, 25 bp, Homo sapien
gaatatatatcattgtaatactcac

SEQ ID NO: 4445412 - DNA, 25 bp, Homo sapien
aatgcaaggttcaggcttgctgtgg

SEQ ID NO: 4445413 - DNA, 25 bp, Homo sapien
agtagtaaggacaatgcaaggttca

SEQ ID NO: 4445414 - DNA, 25 bp, Homo sapien
gtaaggacaatgcaaggttcaggct

SEQ ID NO: 4445415 - DNA, 25 bp, Homo sapien
tatccgtggtgtcaacccaacagag

SEQ ID NO: 4445416 - DNA, 25 bp, Homo sapien
ctcacatatccgtggtgtcaaccca

SEQ ID NO: 4445417 - DNA, 25 bp, Homo sapien
catatccgtggtgtcaacccaacag

SEQ ID NO: 4445418 - DNA, 25 bp, Homo sapien
tccgtggtgtcaacccaacagaggc

SEQ ID NO: 4445419 - DNA, 25 bp, Homo sapien
agtctttctccctgacgaagagacc

SEQ ID NO: 4445420 - DNA, 25 bp, Homo sapien
ctgacccgcagggtataggactttt

SEQ ID NO: 4445421 - DNA, 25 bp, Homo sapien
ttttttgaccagattgcttcaacag

SEQ ID NO: 4445422 - DNA, 25 bp, Homo sapien
aacagatcccgcacccgttcattat

SEQ ID NO: 4445423 - DNA, 25 bp, Homo sapien
tggatgctccctgacccgcagggta

SEQ ID NO: 4445424 - DNA, 25 bp, Homo sapien
ttcagtgtctagtacagtagctggc

SEQ ID NO: 4445425 - DNA, 25 bp, Homo sapien
tgagggcaggaccacgtcttctcta

SEQ ID NO: 4445426 - DNA, 25 bp, Homo sapien
gtagctggcacacgataagtgttca

SEQ ID NO: 4445427 - DNA, 25 bp, Homo sapien
cacactggccccttgaaaacatcaa

SEQ ID NO: 4445428 - DNA, 25 bp, Homo sapien
tataattggtaactacatgttgaga

SEQ ID NO: 4445429 - DNA, 25 bp, Homo sapien
ttggattacttgcttataattggta

SEQ ID NO: 4445430 - DNA, 25 bp, Homo sapien
cttataattggtaactacatgttga

SEQ ID NO: 4445431 - DNA, 25 bp, Homo sapien
ccaagagttggattacttgcttata

SEQ ID NO: 4445432 - DNA, 25 bp, Homo sapien
tgtgaacactattgttctgggaaga

SEQ ID NO: 4445433 - DNA, 25 bp, Homo sapien
ctgtgaacactattgttctgggaag

SEQ ID NO: 4445434 - DNA, 25 bp, Homo sapien
cctgtgaacactattgttctgggaa

SEQ ID NO: 4445435 - DNA, 25 bp, Homo sapien
ctgcgtgtagtggatcgtgaaaatg

SEQ ID NO: 4445436 - DNA, 25 bp, Homo sapien
tggcctcatgaacatgggtggctgc

SEQ ID NO: 4445437 - DNA, 25 bp, Homo sapien
tgctgctggcctcatgaacatgggt

SEQ ID NO: 4445438 - DNA, 25 bp, Homo sapien
tagtggatcgtgaaaatggcgtggg

SEQ ID NO: 4445439 - DNA, 25 bp, Homo sapien
taagggttcaatgcttctgatgaga

SEQ ID NO: 4445440 - DNA, 25 bp, Homo sapien
tcagccattcatcacgtaattgttc

SEQ ID NO: 4445441 - DNA, 25 bp, Homo sapien
taagtctgctggcaataaattctac

SEQ ID NO: 4445442 - DNA, 25 bp, Homo sapien
tagtacttgctctacagattacaat

SEQ ID NO: 4445443 - DNA, 25 bp, Homo sapien
gtctgctgctggtgtatagcacagc

SEQ ID NO: 4445444 - DNA, 25 bp, Homo sapien
tacaatcatgttgtcagcgaacagc

SEQ ID NO: 4445445 - DNA, 25 bp, Homo sapien
tagcacagctactgattcatgtaca

SEQ ID NO: 4445446 - DNA, 25 bp, Homo sapien
atgtgctcagaaccatccatgtctg

SEQ ID NO: 4445447 - DNA, 25 bp, Homo sapien
tcagaagggaggttgttctccagga

SEQ ID NO: 4445448 - DNA, 25 bp, Homo sapien
aagggaggttgttctccaggattgc

SEQ ID NO: 4445449 - DNA, 25 bp, Homo sapien
agaagggaggttgttctccaggatt

SEQ ID NO: 4445450 - DNA, 25 bp, Homo sapien
ttcagaagggaggttgttctccagg

SEQ ID NO: 4445451 - DNA, 25 bp, Homo sapien
ccacaaggttgatcttgctagccat

SEQ ID NO: 4445452 - DNA, 25 bp, Homo sapien
ctgcctgctaggtccacaaggttga

SEQ ID NO: 4445453 - DNA, 25 bp, Homo sapien
ggtccacaaggttgatcttgctagc

SEQ ID NO: 4445454 - DNA, 25 bp, Homo sapien
ctgctaggtccacaaggttgatctt

SEQ ID NO: 4445455 - DNA, 25 bp, Homo sapien
gagatgacaattcctagagtcacaa

SEQ ID NO: 4445456 - DNA, 25 bp, Homo sapien
tccttcagcaatgcggtccttacag

SEQ ID NO: 4445457 - DNA, 25 bp, Homo sapien
gacaattcctagagtcacaagggac

SEQ ID NO: 4445458 - DNA, 25 bp, Homo sapien
tacagtaactgggatctgctctttc

SEQ ID NO: 4445459 - DNA, 25 bp, Homo sapien
agctgctgaaaacttgggagttctg

SEQ ID NO: 4445460 - DNA, 25 bp, Homo sapien
ttgaggctctggcagctgctgaaaa

SEQ ID NO: 4445461 - DNA, 25 bp, Homo sapien
ctgctgaaaacttgggagttctggg

SEQ ID NO: 4445462 - DNA, 25 bp, Homo sapien
ctgagctgttgaggctctggcagct

SEQ ID NO: 4445463 - DNA, 25 bp, Homo sapien
gagagctaaggatcccactgtcacc

SEQ ID NO: 4445464 - DNA, 25 bp, Homo sapien
ccatgatggttttagagttgcctcc

SEQ ID NO: 4445465 - DNA, 25 bp, Homo sapien
tataagactgccttcgggagggtgc

SEQ ID NO: 4445466 - DNA, 25 bp, Homo sapien
cacagagtctcggtatgggatataa

SEQ ID NO: 4445467 - DNA, 25 bp, Homo sapien
gagtaccagtcccaacacaggtcca

SEQ ID NO: 4445468 - DNA, 25 bp, Homo sapien
agtaccagtcccaacacaggtccag

SEQ ID NO: 4445469 - DNA, 25 bp, Homo sapien
tgccttgttactactgcccatgctg

SEQ ID NO: 4445470 - DNA, 25 bp, Homo sapien
aatgagaaacctaggtggtcatggc

SEQ ID NO: 4445471 - DNA, 25 bp, Homo sapien
tgcccatgctgtataagacccctga

SEQ ID NO: 4445472 - DNA, 25 bp, Homo sapien
tgtataagacccctgatgaaatgag

SEQ ID NO: 4445473 - DNA, 25 bp, Homo sapien
gttgataatgtttttggcactggat

SEQ ID NO: 4445474 - DNA, 25 bp, Homo sapien
ttgataatgtttttggcactggatg

SEQ ID NO: 4445475 - DNA, 25 bp, Homo sapien
atgcatatctcagtgtgctcatggt

SEQ ID NO: 4445476 - DNA, 25 bp, Homo sapien
catatctcagtgtgctcatggtctc

SEQ ID NO: 4445477 - DNA, 25 bp, Homo sapien
agcagcagggctttcagtctttcaa

SEQ ID NO: 4445478 - DNA, 25 bp, Homo sapien
agttctctaatcagttttaagtttg

SEQ ID NO: 4445479 - DNA, 25 bp, Homo sapien
cagtctttcaatctcttctctgagt

SEQ ID NO: 4445480 - DNA, 25 bp, Homo sapien
ctgagttctctaatcagttttaagt

SEQ ID NO: 4445481 - DNA, 25 bp, Homo sapien
cttcaattcattttggagaaccagc

SEQ ID NO: 4445482 - DNA, 25 bp, Homo sapien
ttcatcactcaatgaactgaagttt

SEQ ID NO: 4445483 - DNA, 25 bp, Homo sapien
attttggagaaccagctccttcagg

SEQ ID NO: 4445484 - DNA, 25 bp, Homo sapien
ccttcaggttttcatcactcaatga

SEQ ID NO: 4445485 - DNA, 25 bp, Homo sapien
ggtttaggtacaagtgctttatgta

SEQ ID NO: 4445486 - DNA, 25 bp, Homo sapien
tagatttagctaagtgcttctctca

SEQ ID NO: 4445487 - DNA, 25 bp, Homo sapien
aataatcattgagttgaagtttgga

SEQ ID NO: 4445488 - DNA, 25 bp, Homo sapien
gctttatgtaccctagaaacattat

SEQ ID NO: 4445489 - DNA, 25 bp, Homo sapien
ctattcctatttccccagggtactg

SEQ ID NO: 4445490 - DNA, 25 bp, Homo sapien
gatactattcaaagccccacagaag

SEQ ID NO: 4445491 - DNA, 25 bp, Homo sapien
gggaacagactaaaggtcagaagtc

SEQ ID NO: 4445492 - DNA, 25 bp, Homo sapien
cccagggtactgctttcttatgatc

SEQ ID NO: 4445493 - DNA, 25 bp, Homo sapien
cactgtaatgctccatgagggcctg

SEQ ID NO: 4445494 - DNA, 25 bp, Homo sapien
cctgttgatgtccacactgtaatgc

SEQ ID NO: 4445495 - DNA, 25 bp, Homo sapien
gatgtccacactgtaatgctccatg

SEQ ID NO: 4445496 - DNA, 25 bp, Homo sapien
tgagggcctgccaatcattccactt

SEQ ID NO: 4445497 - DNA, 25 bp, Homo sapien
gaagtcaacagatgctagcctccac

SEQ ID NO: 4445498 - DNA, 25 bp, Homo sapien
tttcatgtgcgttcagggacagccc

SEQ ID NO: 4445499 - DNA, 25 bp, Homo sapien
tcagaaatgaggactggcctccagg

SEQ ID NO: 4445500 - DNA, 25 bp, Homo sapien
gactaatgggaggatctatacagcc

SEQ ID NO: 4445501 - DNA, 25 bp, Homo sapien
cttcttggtccgcagatgaagttta

SEQ ID NO: 4445502 - DNA, 25 bp, Homo sapien
ttcttggtccgcagatgaagtttaa

SEQ ID NO: 4445503 - DNA, 25 bp, Homo sapien
ctggtctgagtcaatccttcctatt

SEQ ID NO: 4445504 - DNA, 25 bp, Homo sapien
ggtctgagtcaatccttcctatttt

SEQ ID NO: 4445505 - DNA, 25 bp, Homo sapien
tggtctgagtcaatccttcctattt

SEQ ID NO: 4445506 - DNA, 25 bp, Homo sapien
tctgagtcaatccttcctatttttg

SEQ ID NO: 4445507 - DNA, 25 bp, Homo sapien
aggaggcagtgacctcccggccatt

SEQ ID NO: 4445508 - DNA, 25 bp, Homo sapien
cccacgggcaggtcgtagaacaact

SEQ ID NO: 4445509 - DNA, 25 bp, Homo sapien
attgactgtacagcgggccccacgg

SEQ ID NO: 4445510 - DNA, 25 bp, Homo sapien
ccacaggcactggtgatagtgcagt

SEQ ID NO: 4445511 - DNA, 25 bp, Homo sapien
tgcatagattaataacagtagcggt

SEQ ID NO: 4445512 - DNA, 25 bp, Homo sapien
aaaatcttcagacttcagggtgcag

SEQ ID NO: 4445513 - DNA, 25 bp, Homo sapien
gctcagagactttcctagggagaca

SEQ ID NO: 4445514 - DNA, 25 bp, Homo sapien
ggagacagagctaattaacacaggt

SEQ ID NO: 4445515 - DNA, 25 bp, Homo sapien
tgccttcgctgccgcaggacagcag

SEQ ID NO: 4445516 - DNA, 25 bp, Homo sapien
gtgccttccccagggttatgacagc

SEQ ID NO: 4445517 - DNA, 25 bp, Homo sapien
ctctgctgggtggttgaatcggaac

SEQ ID NO: 4445518 - DNA, 25 bp, Homo sapien
tggttgaatcggaacttctgtgcct

SEQ ID NO: 4445519 - DNA, 25 bp, Homo sapien
actccaacgagccacgaccagcagc

SEQ ID NO: 4445520 - DNA, 25 bp, Homo sapien
gggaggcagcgagatctccatccaa

SEQ ID NO: 4445521 - DNA, 25 bp, Homo sapien
agccactccaacgagccacgaccag

SEQ ID NO: 4445522 - DNA, 25 bp, Homo sapien
aatccagccactccaacgagccacg

SEQ ID NO: 4445523 - DNA, 25 bp, Homo sapien
tcatctctgatggctccagtatccc

SEQ ID NO: 4445524 - DNA, 25 bp, Homo sapien
caagggacctctgtctttatcaggt

SEQ ID NO: 4445525 - DNA, 25 bp, Homo sapien
tatcaggtaattgcccttcatctct

SEQ ID NO: 4445526 - DNA, 25 bp, Homo sapien
tgctgcctagacacctgcttgtgag

SEQ ID NO: 4445527 - DNA, 25 bp, Homo sapien
ctgcaaggagaggctgtctgctgcc

SEQ ID NO: 4445528 - DNA, 25 bp, Homo sapien
tgcaaggagaggctgtctgctgcca

SEQ ID NO: 4445529 - DNA, 25 bp, Homo sapien
gcaaggagaggctgtctgctgccat

SEQ ID NO: 4445530 - DNA, 25 bp, Homo sapien
attgtttcctgcatagccataggac

SEQ ID NO: 4445531 - DNA, 25 bp, Homo sapien
tatgatattgtttcctgcatagcca

SEQ ID NO: 4445532 - DNA, 25 bp, Homo sapien
cctaagaaagtgacagctatgatat

SEQ ID NO: 4445533 - DNA, 25 bp, Homo sapien
aagtgacagctatgatattgtttcc

SEQ ID NO: 4445534 - DNA, 25 bp, Homo sapien
cagcctttggaggatagtaaaagat

SEQ ID NO: 4445535 - DNA, 25 bp, Homo sapien
taagatttcataacgcagcctttgg

SEQ ID NO: 4445536 - DNA, 25 bp, Homo sapien
tatttacgtactgtctagggctgct

SEQ ID NO: 4445537 - DNA, 25 bp, Homo sapien
gttgcagcacagaccatatggccca

SEQ ID NO: 4445538 - DNA, 25 bp, Homo sapien
aggacaaactgatagcagtgtaagg

SEQ ID NO: 4445539 - DNA, 25 bp, Homo sapien
tcacagaagcggctgaggttaccca

SEQ ID NO: 4445540 - DNA, 25 bp, Homo sapien
cagaagcggctgaggttacccaagg

SEQ ID NO: 4445541 - DNA, 25 bp, Homo sapien
gatagcagtgtaaggccttccaaga

SEQ ID NO: 4445542 - DNA, 25 bp, Homo sapien
aaattccagttccttcgcagctcga

SEQ ID NO: 4445543 - DNA, 25 bp, Homo sapien
tctgggccctgtgggatgtctctcc

SEQ ID NO: 4445544 - DNA, 25 bp, Homo sapien
tgatgcctcaaatcctctacgtagc

SEQ ID NO: 4445545 - DNA, 25 bp, Homo sapien
tctgctggctaatccaagcttggtc

SEQ ID NO: 4445546 - DNA, 25 bp, Homo sapien
tgtctgaagccaagcatcaagtgcc

SEQ ID NO: 4445547 - DNA, 25 bp, Homo sapien
ggctcctgggtgctgtcatcctgga

SEQ ID NO: 4445548 - DNA, 25 bp, Homo sapien
tctgctgcccgaagagtgtgtctcc

SEQ ID NO: 4445549 - DNA, 25 bp, Homo sapien
tcctggagccagcacaatgtcgtga

SEQ ID NO: 4445550 - DNA, 25 bp, Homo sapien
tggaggccgtgggactgtggcatca

SEQ ID NO: 4445551 - DNA, 25 bp, Homo sapien
gtgggactgtggcatcagggctgag

SEQ ID NO: 4445552 - DNA, 25 bp, Homo sapien
gccgtgggactgtggcatcagggct

SEQ ID NO: 4445553 - DNA, 25 bp, Homo sapien
tacatggaggccgtgggactgtggc

SEQ ID NO: 4445554 - DNA, 25 bp, Homo sapien
agaactgcaactcgtcaatttgctt

SEQ ID NO: 4445555 - DNA, 25 bp, Homo sapien
caaagaactgcaactcgtcaatttg

SEQ ID NO: 4445556 - DNA, 25 bp, Homo sapien
aaagaactgcaactcgtcaatttgc

SEQ ID NO: 4445557 - DNA, 25 bp, Homo sapien
gctggggcatgtgcttgctgcagag

SEQ ID NO: 4445558 - DNA, 25 bp, Homo sapien
aactttaaccgagtgcttcccagtg

SEQ ID NO: 4445559 - DNA, 25 bp, Homo sapien
actttaaccgagtgcttcccagtga

SEQ ID NO: 4445560 - DNA, 25 bp, Homo sapien
taaggaagatgggaaaggcctgaat

SEQ ID NO: 4445561 - DNA, 25 bp, Homo sapien
gtaaggaagatgggaaaggcctgaa

SEQ ID NO: 4445562 - DNA, 25 bp, Homo sapien
ggtaaggaagatgggaaaggcctga

SEQ ID NO: 4445563 - DNA, 25 bp, Homo sapien
ccttagcagccttgtgggtcccaag

SEQ ID NO: 4445564 - DNA, 25 bp, Homo sapien
taagccctggctcaccatctgatgg

SEQ ID NO: 4445565 - DNA, 25 bp, Homo sapien
agtcttgactgcctttccgtgccca

SEQ ID NO: 4445566 - DNA, 25 bp, Homo sapien
aatgcaggccgttcttgcggaggca

SEQ ID NO: 4445567 - DNA, 25 bp, Homo sapien
tgtctgggtcccttgtattttgttg

SEQ ID NO: 4445568 - DNA, 25 bp, Homo sapien
ccttgtattttgttgtctcttcaaa

SEQ ID NO: 4445569 - DNA, 25 bp, Homo sapien
tgtattttgttgtctcttcaaagga

SEQ ID NO: 4445570 - DNA, 25 bp, Homo sapien
tctgggtcccttgtattttgttgtc

SEQ ID NO: 4445571 - DNA, 25 bp, Homo sapien
gttctctggctctgggaaatcccat

SEQ ID NO: 4445572 - DNA, 25 bp, Homo sapien
tcagtggctctatcagggctttggc

SEQ ID NO: 4445573 - DNA, 25 bp, Homo sapien
ggctttggcatagacacatgagaga

SEQ ID NO: 4445574 - DNA, 25 bp, Homo sapien
cagtgagtcctcagatagttggctg

SEQ ID NO: 4445575 - DNA, 25 bp, Homo sapien
aagtaggtcactgtctgaggctgca

SEQ ID NO: 4445576 - DNA, 25 bp, Homo sapien
cgattgccccctagcctgtttttgg

SEQ ID NO: 4445577 - DNA, 25 bp, Homo sapien
cacggttgttggtgggacgattgcc

SEQ ID NO: 4445578 - DNA, 25 bp, Homo sapien
agaagctctagttctggtcctgggt

SEQ ID NO: 4445579 - DNA, 25 bp, Homo sapien
cagggaaaggttcttcttgctgatc

SEQ ID NO: 4445580 - DNA, 25 bp, Homo sapien
tgcatcaatcaggctatccaaggag

SEQ ID NO: 4445581 - DNA, 25 bp, Homo sapien
tctgcatcaatcaggctatccaagg

SEQ ID NO: 4445582 - DNA, 25 bp, Homo sapien
ctctgcatcaatcaggctatccaag

SEQ ID NO: 4445583 - DNA, 25 bp, Homo sapien
tctgtgggtatctcgtcagctgaac

SEQ ID NO: 4445584 - DNA, 25 bp, Homo sapien
tccattacaggcagactagagtcct

SEQ ID NO: 4445585 - DNA, 25 bp, Homo sapien
caggtgccaaaaagtctctgtgggt

SEQ ID NO: 4445586 - DNA, 25 bp, Homo sapien
tgatgggaccaagcctgcatattgc

SEQ ID NO: 4445587 - DNA, 25 bp, Homo sapien
gaactgaggatcaaggtaaaacgaa

SEQ ID NO: 4445588 - DNA, 25 bp, Homo sapien
agagagtcggcttgttcagagtagc

SEQ ID NO: 4445589 - DNA, 25 bp, Homo sapien
gcctgctcacaatggggctggagct

SEQ ID NO: 4445590 - DNA, 25 bp, Homo sapien
agcttggctctacctgtgattcagc

SEQ ID NO: 4445591 - DNA, 25 bp, Homo sapien
gacatcagtgggctctctcttgaaa

SEQ ID NO: 4445592 - DNA, 25 bp, Homo sapien
gatacatctgccctgaaaggtgcca

SEQ ID NO: 4445593 - DNA, 25 bp, Homo sapien
taagcctttgaattccccagagaga

SEQ ID NO: 4445594 - DNA, 25 bp, Homo sapien
gacagcctagacgtatcagcagcag

SEQ ID NO: 4445595 - DNA, 25 bp, Homo sapien
tctgcaagctggaatctctaaggca

SEQ ID NO: 4445596 - DNA, 25 bp, Homo sapien
ttctgtcagggcatccctgcttttg

SEQ ID NO: 4445597 - DNA, 25 bp, Homo sapien
cagggcatccctgcttttggtcaca

SEQ ID NO: 4445598 - DNA, 25 bp, Homo sapien
ggcatccctgcttttggtcacatag

SEQ ID NO: 4445599 - DNA, 25 bp, Homo sapien
gatgaggcaatcttagaattctggt

SEQ ID NO: 4445600 - DNA, 25 bp, Homo sapien
tattcagatcaactggtatctcagc

SEQ ID NO: 4445601 - DNA, 25 bp, Homo sapien
gagcttggtggttgtgaccaaagcc

SEQ ID NO: 4445602 - DNA, 25 bp, Homo sapien
tgattctctgatgacttccctggta

SEQ ID NO: 4445603 - DNA, 25 bp, Homo sapien
ggagaaaatgtctgttctgagtaac

SEQ ID NO: 4445604 - DNA, 25 bp, Homo sapien
cacatacttttgtgctggtagaggg

SEQ ID NO: 4445605 - DNA, 25 bp, Homo sapien
cagaagaataaactgaatcatggct

SEQ ID NO: 4445606 - DNA, 25 bp, Homo sapien
ttctgtaatatttccagggcattta

SEQ ID NO: 4445607 - DNA, 25 bp, Homo sapien
gcaccgcaacaggactgagcagtga

SEQ ID NO: 4445608 - DNA, 25 bp, Homo sapien
agcaccgcaacaggactgagcagtg

SEQ ID NO: 4445609 - DNA, 25 bp, Homo sapien
accgcaacaggactgagcagtgacc

SEQ ID NO: 4445610 - DNA, 25 bp, Homo sapien
caccgcaacaggactgagcagtgac

SEQ ID NO: 4445611 - DNA, 25 bp, Homo sapien
cactgggctgcttactctacgatct

SEQ ID NO: 4445612 - DNA, 25 bp, Homo sapien
tttcccctggcatgtctttctcaag

SEQ ID NO: 4445613 - DNA, 25 bp, Homo sapien
cattgatggtctgcctcagaaccgt

SEQ ID NO: 4445614 - DNA, 25 bp, Homo sapien
tcgtgcctcagattcacgaaagagg

SEQ ID NO: 4445615 - DNA, 25 bp, Homo sapien
aaggctgccctttgagacttgctga

SEQ ID NO: 4445616 - DNA, 25 bp, Homo sapien
tgagggcatgcaactaactggaacc

SEQ ID NO: 4445617 - DNA, 25 bp, Homo sapien
gaagatggctgatccttagagggca

SEQ ID NO: 4445618 - DNA, 25 bp, Homo sapien
gaatcacaaatatccctggcaggtc

SEQ ID NO: 4445619 - DNA, 25 bp, Homo sapien
gattgactatgagatcccatggcca

SEQ ID NO: 4445620 - DNA, 25 bp, Homo sapien
catggatgcatggtcagagggctcc

SEQ ID NO: 4445621 - DNA, 25 bp, Homo sapien
tataaatggttcacttgctcccgcg

SEQ ID NO: 4445622 - DNA, 25 bp, Homo sapien
tagagatgccacatgaaatcccggt

SEQ ID NO: 4445623 - DNA, 25 bp, Homo sapien
tggacatggtcttgcttaggccctg

SEQ ID NO: 4445624 - DNA, 25 bp, Homo sapien
ttagctcatgcagagtcactctagg

SEQ ID NO: 4445625 - DNA, 25 bp, Homo sapien
gccctgaggcacttgtagaattctg

SEQ ID NO: 4445626 - DNA, 25 bp, Homo sapien
tctcctgcggaactgactgacttag

SEQ ID NO: 4445627 - DNA, 25 bp, Homo sapien
ggcagaatggtatcttgtttgggac

SEQ ID NO: 4445628 - DNA, 25 bp, Homo sapien
ggtatcttgtttgggacttgcccta

SEQ ID NO: 4445629 - DNA, 25 bp, Homo sapien
cagtgcaacccttgtcagagctcca

SEQ ID NO: 4445630 - DNA, 25 bp, Homo sapien
tccaggcagaatggtatcttgtttg

SEQ ID NO: 4445631 - DNA, 25 bp, Homo sapien
ttgagctcgagataggacagcagcc

SEQ ID NO: 4445632 - DNA, 25 bp, Homo sapien
ggccatctaaagcttcccttgggtg

SEQ ID NO: 4445633 - DNA, 25 bp, Homo sapien
tgtgtcaagtgcacatcaggtcccc

SEQ ID NO: 4445634 - DNA, 25 bp, Homo sapien
gaactgcatggctgtcggcaaggaa

SEQ ID NO: 4445635 - DNA, 25 bp, Homo sapien
caagcgattgtgatccctcaactca

SEQ ID NO: 4445636 - DNA, 25 bp, Homo sapien
tctggattggtttgacacacctgtg

SEQ ID NO: 4445637 - DNA, 25 bp, Homo sapien
aaacattcatgctgtggctctacca

SEQ ID NO: 4445638 - DNA, 25 bp, Homo sapien
tgtgcattctggtcacctacagagc

SEQ ID NO: 4445639 - DNA, 25 bp, Homo sapien
ttctggctgcaggaaacatcgactg

SEQ ID NO: 4445640 - DNA, 25 bp, Homo sapien
ggagcaccgggccacatttgatagt

SEQ ID NO: 4445641 - DNA, 25 bp, Homo sapien
tactcggaagtactgggaaagagcc

SEQ ID NO: 4445642 - DNA, 25 bp, Homo sapien
caggtgcctgtgatcggtagtccca

SEQ ID NO: 4445643 - DNA, 25 bp, Homo sapien
gcagcagtctgctttggaccccgat

SEQ ID NO: 4445644 - DNA, 25 bp, Homo sapien
gaggcctccccatgaagaaggtcgg

SEQ ID NO: 4445645 - DNA, 25 bp, Homo sapien
cagagtgcgttgtggttcccctgga

SEQ ID NO: 4445646 - DNA, 25 bp, Homo sapien
tcaggcacaaagctgttgcccagcc

SEQ ID NO: 4445647 - DNA, 25 bp, Homo sapien
gaagcacagtaactcctcaggttgg

SEQ ID NO: 4445648 - DNA, 25 bp, Homo sapien
taaatttgttatgcaccgggaggtc

SEQ ID NO: 4445649 - DNA, 25 bp, Homo sapien
ttcagagctgagatcaccgctggcc

SEQ ID NO: 4445650 - DNA, 25 bp, Homo sapien
tcttggaccactcagaatcctggct

SEQ ID NO: 4445651 - DNA, 25 bp, Homo sapien
catcagcagcaagcgcctcccctgt

SEQ ID NO: 4445652 - DNA, 25 bp, Homo sapien
cagggcatcggcctccccaaagcca

SEQ ID NO: 4445653 - DNA, 25 bp, Homo sapien
gtggatgtcacaggttcatcagcag

SEQ ID NO: 4445654 - DNA, 25 bp, Homo sapien
aagccatggtgcagtttcgcttctg

SEQ ID NO: 4445655 - DNA, 25 bp, Homo sapien
cttcgcgtccggcagaagttcccaa

SEQ ID NO: 4445656 - DNA, 25 bp, Homo sapien
tcagttgctgcaggtattctcggcg

SEQ ID NO: 4445657 - DNA, 25 bp, Homo sapien
tctcggcgtctgctgggcaagtcaa

SEQ ID NO: 4445658 - DNA, 25 bp, Homo sapien
ttctgagggctaaggcttcgcgtcc

SEQ ID NO: 4445659 - DNA, 25 bp, Homo sapien
ctgaccttgacactgactctgggct

SEQ ID NO: 4445660 - DNA, 25 bp, Homo sapien
tgaccttgacactgactctgggctc

SEQ ID NO: 4445661 - DNA, 25 bp, Homo sapien
atagctgggaaatgatcttctggtg

SEQ ID NO: 4445662 - DNA, 25 bp, Homo sapien
agttggtctcgggcccgggcaatct

SEQ ID NO: 4445663 - DNA, 25 bp, Homo sapien
caactctatgtcagagggtgtgtga

SEQ ID NO: 4445664 - DNA, 25 bp, Homo sapien
tgttcagtccgctcccgcagttggt

SEQ ID NO: 4445665 - DNA, 25 bp, Homo sapien
attggccaaggtatgtagtttatcc

SEQ ID NO: 4445666 - DNA, 25 bp, Homo sapien
gcttccattagagctggtgcacagg

SEQ ID NO: 4445667 - DNA, 25 bp, Homo sapien
ggtcatgccagacgagaggcttcca

SEQ ID NO: 4445668 - DNA, 25 bp, Homo sapien
gctgctattatagccagaggtcatg

SEQ ID NO: 4445669 - DNA, 25 bp, Homo sapien
cccaggtactcggagtgctgagcca

SEQ ID NO: 4445670 - DNA, 25 bp, Homo sapien
tcggagtgctgagccaggaagaatc

SEQ ID NO: 4445671 - DNA, 25 bp, Homo sapien
actttgttcagctgaggtgggcaaa

SEQ ID NO: 4445672 - DNA, 25 bp, Homo sapien
tactcggagtgctgagccaggaaga

SEQ ID NO: 4445673 - DNA, 25 bp, Homo sapien
cctcctcgctcatcccctatccata

SEQ ID NO: 4445674 - DNA, 25 bp, Homo sapien
ccctggaatcaggcaagtttgtatg

SEQ ID NO: 4445675 - DNA, 25 bp, Homo sapien
ctcgctcatcccctatccatacatc

SEQ ID NO: 4445676 - DNA, 25 bp, Homo sapien
tggaatcaggcaagtttgtatgccc

SEQ ID NO: 4445677 - DNA, 25 bp, Homo sapien
gctggctatgcccaacactccccgc

SEQ ID NO: 4445678 - DNA, 25 bp, Homo sapien
tggctatgcccaacactccccgcaa

SEQ ID NO: 4445679 - DNA, 25 bp, Homo sapien
tatgcccaacactccccgcaactca

SEQ ID NO: 4445680 - DNA, 25 bp, Homo sapien
gctatgcccaacactccccgcaact

SEQ ID NO: 4445681 - DNA, 25 bp, Homo sapien
agctggacagactggatggtgaaca

SEQ ID NO: 4445682 - DNA, 25 bp, Homo sapien
tggtgaacagcagcaactgcccagg

SEQ ID NO: 4445683 - DNA, 25 bp, Homo sapien
gaaaagcaggtccccaagctggaca

SEQ ID NO: 4445684 - DNA, 25 bp, Homo sapien
ggaggaaaagcaggtccccaagctg

SEQ ID NO: 4445685 - DNA, 25 bp, Homo sapien
agccatagaagtgtccacgacatgc

SEQ ID NO: 4445686 - DNA, 25 bp, Homo sapien
tcagccatagaagtgtccacgacat

SEQ ID NO: 4445687 - DNA, 25 bp, Homo sapien
atcagccatagaagtgtccacgaca

SEQ ID NO: 4445688 - DNA, 25 bp, Homo sapien
tgtccacgacatgcttggccaaatc

SEQ ID NO: 4445689 - DNA, 25 bp, Homo sapien
tgcaaattatccgaacaagcagcca

SEQ ID NO: 4445690 - DNA, 25 bp, Homo sapien
ttgtgcaaattatccgaacaagcag

SEQ ID NO: 4445691 - DNA, 25 bp, Homo sapien
agctgaagaggttgtgcaaattatc

SEQ ID NO: 4445692 - DNA, 25 bp, Homo sapien
aattatccgaacaagcagccattac

SEQ ID NO: 4445693 - DNA, 25 bp, Homo sapien
tggtcactcgctgatgcagccttgc

SEQ ID NO: 4445694 - DNA, 25 bp, Homo sapien
cttgtagtaaagctgcaccgcctgc

SEQ ID NO: 4445695 - DNA, 25 bp, Homo sapien
cacacacgagacagcggctgggaca

SEQ ID NO: 4445696 - DNA, 25 bp, Homo sapien
agccatgccgagtgggagaaaacac

SEQ ID NO: 4445697 - DNA, 25 bp, Homo sapien
tgcgcacagggtggtgttgcacacc

SEQ ID NO: 4445698 - DNA, 25 bp, Homo sapien
aatcccgtggctgcttcagtgcgca

SEQ ID NO: 4445699 - DNA, 25 bp, Homo sapien
cagggtggtgttgcacaccaagtac

SEQ ID NO: 4445700 - DNA, 25 bp, Homo sapien
ttggcttccacgcagacacaacaga

SEQ ID NO: 4445701 - DNA, 25 bp, Homo sapien
gctccagccccaatttgccctcctt

SEQ ID NO: 4445702 - DNA, 25 bp, Homo sapien
tccttcccctagaggacctgaggcc

SEQ ID NO: 4445703 - DNA, 25 bp, Homo sapien
gtttctcacgacacttcagcccaag

SEQ ID NO: 4445704 - DNA, 25 bp, Homo sapien
ggcccacatagattgtttctcacga

SEQ ID NO: 4445705 - DNA, 25 bp, Homo sapien
tccccgcgaaccatttttctgctgg

SEQ ID NO: 4445706 - DNA, 25 bp, Homo sapien
gggtcttggcatggatgtatcatac

SEQ ID NO: 4445707 - DNA, 25 bp, Homo sapien
cagtgatgggctgcaagatccaggc

SEQ ID NO: 4445708 - DNA, 25 bp, Homo sapien
tggatgtatcatacacagactgggc

SEQ ID NO: 4445709 - DNA, 25 bp, Homo sapien
tctgccatccagatctaagtattgg

SEQ ID NO: 4445710 - DNA, 25 bp, Homo sapien
aggaagccagtctggctataaccag

SEQ ID NO: 4445711 - DNA, 25 bp, Homo sapien
gctataaccagtggctgccgtttga

SEQ ID NO: 4445712 - DNA, 25 bp, Homo sapien
ccagtggctgccgtttgatgaaaga

SEQ ID NO: 4445713 - DNA, 25 bp, Homo sapien
agtctggctataaccagtggctgcc

SEQ ID NO: 4445714 - DNA, 25 bp, Homo sapien
aatccaaaaggtgagcggagctgca

SEQ ID NO: 4445715 - DNA, 25 bp, Homo sapien
cattcactctggatagtctgggcca

SEQ ID NO: 4445716 - DNA, 25 bp, Homo sapien
ctttgctagcatccctgggccagtg

SEQ ID NO: 4445717 - DNA, 25 bp, Homo sapien
taacgtcccatcacacagtagagct

SEQ ID NO: 4445718 - DNA, 25 bp, Homo sapien
catctgaccgagctctagagtgaca

SEQ ID NO: 4445719 - DNA, 25 bp, Homo sapien
cccaagtgcactgaggtaagttctg

SEQ ID NO: 4445720 - DNA, 25 bp, Homo sapien
tagagtgacagctccatatcagagc

SEQ ID NO: 4445721 - DNA, 25 bp, Homo sapien
gaaatcatggaatgctcaggactcc

SEQ ID NO: 4445722 - DNA, 25 bp, Homo sapien
tggcttctctattaaggcgggcagg

SEQ ID NO: 4445723 - DNA, 25 bp, Homo sapien
tattaaggcgggcagggtcacctcc

SEQ ID NO: 4445724 - DNA, 25 bp, Homo sapien
gggtcacctcctggttatcccctga

SEQ ID NO: 4445725 - DNA, 25 bp, Homo sapien
cttctctattaaggcgggcagggtc

SEQ ID NO: 4445726 - DNA, 25 bp, Homo sapien
cctgtgcaggtagtaacctcttgag

SEQ ID NO: 4445727 - DNA, 25 bp, Homo sapien
acaaacagataaggtaggactcaac

SEQ ID NO: 4445728 - DNA, 25 bp, Homo sapien
ttcagcccctgtgcaggtagtaacc

SEQ ID NO: 4445729 - DNA, 25 bp, Homo sapien
gtaggactcaaccaactgaaacctg

SEQ ID NO: 4445730 - DNA, 25 bp, Homo sapien
catgacagaggcaaatgactcctgc

SEQ ID NO: 4445731 - DNA, 25 bp, Homo sapien
tataaatgcctaacacaggccgggt

SEQ ID NO: 4445732 - DNA, 25 bp, Homo sapien
cagacttcctgctctaagggtgtca

SEQ ID NO: 4445733 - DNA, 25 bp, Homo sapien
cttgggcattgcaccagaaccctgg

SEQ ID NO: 4445734 - DNA, 25 bp, Homo sapien
tactaagacggtatctgataggccg

SEQ ID NO: 4445735 - DNA, 25 bp, Homo sapien
caagttgagtgacgtttcccatgct

SEQ ID NO: 4445736 - DNA, 25 bp, Homo sapien
taatttgtgtacgagctgcctatgg

SEQ ID NO: 4445737 - DNA, 25 bp, Homo sapien
gaaacagcccatggactgaagcgag

SEQ ID NO: 4445738 - DNA, 25 bp, Homo sapien
cagccactttgttcggcttttccaa

SEQ ID NO: 4445739 - DNA, 25 bp, Homo sapien
tgggtcagctctccgcagcctgcag

SEQ ID NO: 4445740 - DNA, 25 bp, Homo sapien
gggccatgatgggtcagctctccgc

SEQ ID NO: 4445741 - DNA, 25 bp, Homo sapien
tcaagtccctggtaaacggctggga

SEQ ID NO: 4445742 - DNA, 25 bp, Homo sapien
tccacgattgtgtcttctttgcagt

SEQ ID NO: 4445743 - DNA, 25 bp, Homo sapien
gatatatgctggtgcttaacacagg

SEQ ID NO: 4445744 - DNA, 25 bp, Homo sapien
ggttttggagtgtcactttcagtga

SEQ ID NO: 4445745 - DNA, 25 bp, Homo sapien
tccaaagcatccacgattgtgtctt

SEQ ID NO: 4445746 - DNA, 25 bp, Homo sapien
tgtagcccttgtttactcctcgtgc

SEQ ID NO: 4445747 - DNA, 25 bp, Homo sapien
agagaattggtaaggcacttggaac

SEQ ID NO: 4445748 - DNA, 25 bp, Homo sapien
tatctatctagagaacctggtacca

SEQ ID NO: 4445749 - DNA, 25 bp, Homo sapien
tggagacacttgtagaacttatggg

SEQ ID NO: 4445750 - DNA, 25 bp, Homo sapien
gatcaacccaactccggtgagcgaa

SEQ ID NO: 4445751 - DNA, 25 bp, Homo sapien
ttcggaggtaacagcggtgacacgc

SEQ ID NO: 4445752 - DNA, 25 bp, Homo sapien
gctgaaaagccgatgggtactgctc

SEQ ID NO: 4445753 - DNA, 25 bp, Homo sapien
ggacgaagccttctcgcaggatcaa

SEQ ID NO: 4445754 - DNA, 25 bp, Homo sapien
tataggccacctgtacataaaagtg

SEQ ID NO: 4445755 - DNA, 25 bp, Homo sapien
catggagtgcttttgtataggccac

SEQ ID NO: 4445756 - DNA, 25 bp, Homo sapien
taagtgtccctgcagttaggagatg

SEQ ID NO: 4445757 - DNA, 25 bp, Homo sapien
caaccaaggacagagtatcggcaga

SEQ ID NO: 4445758 - DNA, 25 bp, Homo sapien
cactaggccatttacttacaagttc

SEQ ID NO: 4445759 - DNA, 25 bp, Homo sapien
tagccagtgtctatttcactaggcc

SEQ ID NO: 4445760 - DNA, 25 bp, Homo sapien
ttgttgaacaagaccaatgagttag

SEQ ID NO: 4445761 - DNA, 25 bp, Homo sapien
taaatcagattcagccacaaaccag

SEQ ID NO: 4445762 - DNA, 25 bp, Homo sapien
gaagataaaggtaacactggcccac

SEQ ID NO: 4445763 - DNA, 25 bp, Homo sapien
tatatgtacactggcgatgctgacc

SEQ ID NO: 4445764 - DNA, 25 bp, Homo sapien
taatgcatgaaaaccctcagagggt

SEQ ID NO: 4445765 - DNA, 25 bp, Homo sapien
taaacacagcctaggtggcctgggc

SEQ ID NO: 4445766 - DNA, 25 bp, Homo sapien
agatggagtggttgacaagtactgt

SEQ ID NO: 4445767 - DNA, 25 bp, Homo sapien
cagatgtgtcgggactttgcctcag

SEQ ID NO: 4445768 - DNA, 25 bp, Homo sapien
ggtactttagcacctgtgtcactga

SEQ ID NO: 4445769 - DNA, 25 bp, Homo sapien
gtactgttgcgctgtgtaacttggg

SEQ ID NO: 4445770 - DNA, 25 bp, Homo sapien
tcagagattccttccaggccacata

SEQ ID NO: 4445771 - DNA, 25 bp, Homo sapien
ttggctcctagcaatgtagggaact

SEQ ID NO: 4445772 - DNA, 25 bp, Homo sapien
gctaatacttctatagttgcattca

SEQ ID NO: 4445773 - DNA, 25 bp, Homo sapien
agggaacttgaggttcttcagtatc

SEQ ID NO: 4445774 - DNA, 25 bp, Homo sapien
ggttacctagtcagtcacagttgcc

SEQ ID NO: 4445775 - DNA, 25 bp, Homo sapien
tgatttcttgcacagcgtagaggcg

SEQ ID NO: 4445776 - DNA, 25 bp, Homo sapien
ctttgaatgttaagccctaggcaga

SEQ ID NO: 4445777 - DNA, 25 bp, Homo sapien
ttaactctggtatgcaagctggcct

SEQ ID NO: 4445778 - DNA, 25 bp, Homo sapien
gaaaactgaccagagtagactgctt

SEQ ID NO: 4445779 - DNA, 25 bp, Homo sapien
ccttaagtcttctgggttccaactg

SEQ ID NO: 4445780 - DNA, 25 bp, Homo sapien
gcatccaagatgatacgagggaagc

SEQ ID NO: 4445781 - DNA, 25 bp, Homo sapien
tagccttcaagatagaagatgccct

SEQ ID NO: 4445782 - DNA, 25 bp, Homo sapien
tgagctggaaaaacgtctgaccctg

SEQ ID NO: 4445783 - DNA, 25 bp, Homo sapien
tccactggtgcgaaagttacgttcc

SEQ ID NO: 4445784 - DNA, 25 bp, Homo sapien
caccaattcgtgtccgctcagagat

SEQ ID NO: 4445785 - DNA, 25 bp, Homo sapien
tcagagattactcagccagacagag

SEQ ID NO: 4445786 - DNA, 25 bp, Homo sapien
ggactccagttagacatatgttatg

SEQ ID NO: 4445787 - DNA, 25 bp, Homo sapien
tctgtggtgttctgcgttttcacta

SEQ ID NO: 4445788 - DNA, 25 bp, Homo sapien
tcttgcttaggatatcttgtgtccc

SEQ ID NO: 4445789 - DNA, 25 bp, Homo sapien
cgttttcactatgatgtttctaagc

SEQ ID NO: 4445790 - DNA, 25 bp, Homo sapien
aagtctttactttggatcaacagtc

SEQ ID NO: 4445791 - DNA, 25 bp, Homo sapien
ttttaaccccatattacacctggca

SEQ ID NO: 4445792 - DNA, 25 bp, Homo sapien
ccaggaatctttcatgtgtctctca

SEQ ID NO: 4445793 - DNA, 25 bp, Homo sapien
gacatcagttgtggacctagagaga

SEQ ID NO: 4445794 - DNA, 25 bp, Homo sapien
caattacagtataatgtacacacca

SEQ ID NO: 4445795 - DNA, 25 bp, Homo sapien
tctaaatgagggacagacctgtggt

SEQ ID NO: 4445796 - DNA, 25 bp, Homo sapien
gaccacatgggtatatatttaaccc

SEQ ID NO: 4445797 - DNA, 25 bp, Homo sapien
cacaccaaatactgcactacggatg

SEQ ID NO: 4445798 - DNA, 25 bp, Homo sapien
ttggccaggcgagtaactccagact

SEQ ID NO: 4445799 - DNA, 25 bp, Homo sapien
gtattcctaataagtatagccctaa

SEQ ID NO: 4445800 - DNA, 25 bp, Homo sapien
ggccaagactcttgaattttacttg

SEQ ID NO: 4445801 - DNA, 25 bp, Homo sapien
catttatgtgtgtctcttcgccctc

SEQ ID NO: 4445802 - DNA, 25 bp, Homo sapien
tgttctgtcaccacactggagtaca

SEQ ID NO: 4445803 - DNA, 25 bp, Homo sapien
cttgttctgtcaccacactggagta

SEQ ID NO: 4445804 - DNA, 25 bp, Homo sapien
cagcctccacctctggggttcaagc

SEQ ID NO: 4445805 - DNA, 25 bp, Homo sapien
acagtggcatgatctcggctcactg

SEQ ID NO: 4445806 - DNA, 25 bp, Homo sapien
ctttgtgcctcttatcattcttatt

SEQ ID NO: 4445807 - DNA, 25 bp, Homo sapien
attatatacagtttggggccaagtg

SEQ ID NO: 4445808 - DNA, 25 bp, Homo sapien
tttactctatttgtatatgtgaatc

SEQ ID NO: 4445809 - DNA, 25 bp, Homo sapien
tatgtgaatctatatgacttaaatt

SEQ ID NO: 4445810 - DNA, 25 bp, Homo sapien
tatctcagataatactcttttaggg

SEQ ID NO: 4445811 - DNA, 25 bp, Homo sapien
agtcttgtttggtctggcttatgtt

SEQ ID NO: 4445812 - DNA, 25 bp, Homo sapien
aatatctcagataatactcttttag

SEQ ID NO: 4445813 - DNA, 25 bp, Homo sapien
ttcattaagtcttgtttggtctggc

SEQ ID NO: 4445814 - DNA, 25 bp, Homo sapien
tcagcaaatggggttctttacaaat

SEQ ID NO: 4445815 - DNA, 25 bp, Homo sapien
ttctcttcttttgccatcagcaaat

SEQ ID NO: 4445816 - DNA, 25 bp, Homo sapien
aatggggttctttacaaatcttcat

SEQ ID NO: 4445817 - DNA, 25 bp, Homo sapien
ctcttcttttgccatcagcaaatgg

SEQ ID NO: 4445818 - DNA, 25 bp, Homo sapien
agtgggaagatcatagacataatgc

SEQ ID NO: 4445819 - DNA, 25 bp, Homo sapien
cgaggaatgattttgtttacccaag

SEQ ID NO: 4445820 - DNA, 25 bp, Homo sapien
tatagtagattttacccgaggaatg

SEQ ID NO: 4445821 - DNA, 25 bp, Homo sapien
caatctggtcatgtaagttatactg

SEQ ID NO: 4445822 - DNA, 25 bp, Homo sapien
cgtcctaggtgcaacagagctgaac

SEQ ID NO: 4445823 - DNA, 25 bp, Homo sapien
gcacagacggtgcagatacatgctg

SEQ ID NO: 4445824 - DNA, 25 bp, Homo sapien
cagtgatctaacaaccaagatggct

SEQ ID NO: 4445825 - DNA, 25 bp, Homo sapien
gaacagttatcgtaatatgccagca

SEQ ID NO: 4445826 - DNA, 25 bp, Homo sapien
gatactttattctacagcgaagtta

SEQ ID NO: 4445827 - DNA, 25 bp, Homo sapien
aggatactttattctacagcgaagt

SEQ ID NO: 4445828 - DNA, 25 bp, Homo sapien
caggatactttattctacagcgaag

SEQ ID NO: 4445829 - DNA, 25 bp, Homo sapien
gccaggatactttattctacagcga

SEQ ID NO: 4445830 - DNA, 25 bp, Homo sapien
gatgttgacaccctgggatgctgtg

SEQ ID NO: 4445831 - DNA, 25 bp, Homo sapien
gattcctaggaaatctgagcgctta

SEQ ID NO: 4445832 - DNA, 25 bp, Homo sapien
gaaggccgcgactttcttgtactta

SEQ ID NO: 4445833 - DNA, 25 bp, Homo sapien
taccagcaccgaacacgaaggattc

SEQ ID NO: 4445834 - DNA, 25 bp, Homo sapien
gaagcttcgttctgcgtctctctct

SEQ ID NO: 4445835 - DNA, 25 bp, Homo sapien
cactgaacttggagggtcacgaagc

SEQ ID NO: 4445836 - DNA, 25 bp, Homo sapien
cggagatcgttctggttctgcccga

SEQ ID NO: 4445837 - DNA, 25 bp, Homo sapien
ccaggctttgggtgtcttcactgaa

SEQ ID NO: 4445838 - DNA, 25 bp, Homo sapien
tgcaagcccggggctcgtgccagac

SEQ ID NO: 4445839 - DNA, 25 bp, Homo sapien
cggggactttcagttcgctgcaagc

SEQ ID NO: 4445840 - DNA, 25 bp, Homo sapien
actttcagttcgctgcaagcccggg

SEQ ID NO: 4445841 - DNA, 25 bp, Homo sapien
ggactttcagttcgctgcaagcccg

SEQ ID NO: 4445842 - DNA, 25 bp, Homo sapien
ctcgggtcccgccgcagtcggcggt

SEQ ID NO: 4445843 - DNA, 25 bp, Homo sapien
tcccgccgcagtcggcggtggggga

SEQ ID NO: 4445844 - DNA, 25 bp, Homo sapien
cgggtcccgccgcagtcggcggtgg

SEQ ID NO: 4445845 - DNA, 25 bp, Homo sapien
cgccgcagtcggcggtgggggatgg

SEQ ID NO: 4445846 - DNA, 25 bp, Homo sapien
tgtagcggagaggtgggcgtgcgcg

SEQ ID NO: 4445847 - DNA, 25 bp, Homo sapien
gagaataacgtcgggtcgggtcagc

SEQ ID NO: 4445848 - DNA, 25 bp, Homo sapien
gggcgtgcgcgctggcagggcaggt

SEQ ID NO: 4445849 - DNA, 25 bp, Homo sapien
gctaggctgtgtcgggttacgaggg

SEQ ID NO: 4445850 - DNA, 25 bp, Homo sapien
gcggagacggtttctgcccgactct

SEQ ID NO: 4445851 - DNA, 25 bp, Homo sapien
aaccgacgctgcgagttcggaacgc

SEQ ID NO: 4445852 - DNA, 25 bp, Homo sapien
tgaagatagcggcaattctccggtg

SEQ ID NO: 4445853 - DNA, 25 bp, Homo sapien
taggcaatgggactagccaaccgac

SEQ ID NO: 4445854 - DNA, 25 bp, Homo sapien
gcgcatgcgcgctgccattgtgatg

SEQ ID NO: 4445855 - DNA, 25 bp, Homo sapien
gctggaactacgaggcccagaattc

SEQ ID NO: 4445856 - DNA, 25 bp, Homo sapien
gagttgcggctatggctggaactac

SEQ ID NO: 4445857 - DNA, 25 bp, Homo sapien
tgtgatgctcctttcccggtaactc

SEQ ID NO: 4445858 - DNA, 25 bp, Homo sapien
ggagaacacctatgtgcgcaaacta

SEQ ID NO: 4445859 - DNA, 25 bp, Homo sapien
tatgtgcgcaaactacttgtctcgg

SEQ ID NO: 4445860 - DNA, 25 bp, Homo sapien
gcgcaaactacttgtctcggaagcc

SEQ ID NO: 4445861 - DNA, 25 bp, Homo sapien
cacctatgtgcgcaaactacttgtc

SEQ ID NO: 4445862 - DNA, 25 bp, Homo sapien
ttcgtatcgtgacaaagcatttccg

SEQ ID NO: 4445863 - DNA, 25 bp, Homo sapien
tttgggcccttcatcgcgactgcct

SEQ ID NO: 4445864 - DNA, 25 bp, Homo sapien
gactgcctcagtgtgtaatttcgta

SEQ ID NO: 4445865 - DNA, 25 bp, Homo sapien
gaggatggatccttaaggcttgcag

SEQ ID NO: 4445866 - DNA, 25 bp, Homo sapien
caatttgcgggatgctgtcagcgct

SEQ ID NO: 4445867 - DNA, 25 bp, Homo sapien
tccccagtcccccaaagatgattag

SEQ ID NO: 4445868 - DNA, 25 bp, Homo sapien
tagcttcacgttaggcggttctggg

SEQ ID NO: 4445869 - DNA, 25 bp, Homo sapien
ttatggaagtgcccatctcctttcc

SEQ ID NO: 4445870 - DNA, 25 bp, Homo sapien
gacactccggtctccaagttgacat

SEQ ID NO: 4445871 - DNA, 25 bp, Homo sapien
acttgctcagcatcgcatactggtg

SEQ ID NO: 4445872 - DNA, 25 bp, Homo sapien
tctctactgtacactggtgggcaaa

SEQ ID NO: 4445873 - DNA, 25 bp, Homo sapien
gcgactgacacaacactaaatagaa

SEQ ID NO: 4445874 - DNA, 25 bp, Homo sapien
cccagtgtgaccagcaaagttggca

SEQ ID NO: 4445875 - DNA, 25 bp, Homo sapien
tgcaacgggccactccggaacacta

SEQ ID NO: 4445876 - DNA, 25 bp, Homo sapien
gctgctggttcagtgtctgcaacgg

SEQ ID NO: 4445877 - DNA, 25 bp, Homo sapien
ggaccccagtgtgaccagcaaagtt

SEQ ID NO: 4445878 - DNA, 25 bp, Homo sapien
acagtgctagtagcgttctgggagc

SEQ ID NO: 4445879 - DNA, 25 bp, Homo sapien
tacatggcaggcattgatggcgaga

SEQ ID NO: 4445880 - DNA, 25 bp, Homo sapien
tgggagcagccctattgccagaacc

SEQ ID NO: 4445881 - DNA, 25 bp, Homo sapien
tcagtgatgctatccttgtggaagc

SEQ ID NO: 4445882 - DNA, 25 bp, Homo sapien
gatctatatttagtgactgcaacat

SEQ ID NO: 4445883 - DNA, 25 bp, Homo sapien
taaaacttgtataatgttcttgtgc

SEQ ID NO: 4445884 - DNA, 25 bp, Homo sapien
cataacaactatgcattttggttca

SEQ ID NO: 4445885 - DNA, 25 bp, Homo sapien
ccactgattcaaattccatccatga

SEQ ID NO: 4445886 - DNA, 25 bp, Homo sapien
tttttaagctagcacatacctgtca

SEQ ID NO: 4445887 - DNA, 25 bp, Homo sapien
ttggctccacatacaggtggtgtgc

SEQ ID NO: 4445888 - DNA, 25 bp, Homo sapien
gatcctgccttactaaactgtttga

SEQ ID NO: 4445889 - DNA, 25 bp, Homo sapien
cctcttagattattagaagccagca

SEQ ID NO: 4445890 - DNA, 25 bp, Homo sapien
aagaccacaccattggactccactc

SEQ ID NO: 4445891 - DNA, 25 bp, Homo sapien
gaccacaccattggactccactctg

SEQ ID NO: 4445892 - DNA, 25 bp, Homo sapien
accacaccattggactccactctgg

SEQ ID NO: 4445893 - DNA, 25 bp, Homo sapien
gtatagaaagaggaacacagagcca

SEQ ID NO: 4445894 - DNA, 25 bp, Homo sapien
tatacaagtgggtgagtaacaatcc

SEQ ID NO: 4445895 - DNA, 25 bp, Homo sapien
tgaagaggctcattccgcatcttct

SEQ ID NO: 4445896 - DNA, 25 bp, Homo sapien
ttgctcaggttcaagaagacagtga

SEQ ID NO: 4445897 - DNA, 25 bp, Homo sapien
aaggaaagaacctcagttgaatgaa

SEQ ID NO: 4445898 - DNA, 25 bp, Homo sapien
aaaattcagcatcaactacttagat

SEQ ID NO: 4445899 - DNA, 25 bp, Homo sapien
aattcagcatcaactacttagatta

SEQ ID NO: 4445900 - DNA, 25 bp, Homo sapien
cagcatcaactacttagattaaaaa

SEQ ID NO: 4445901 - DNA, 25 bp, Homo sapien
ttcagcatcaactacttagattaaa

SEQ ID NO: 4445902 - DNA, 25 bp, Homo sapien
tatacctcacagcaaactacaaggt

SEQ ID NO: 4445903 - DNA, 25 bp, Homo sapien
tgataaaattactgagggcaacttg

SEQ ID NO: 4445904 - DNA, 25 bp, Homo sapien
ggcaacttgaatcttgaccttccag

SEQ ID NO: 4445905 - DNA, 25 bp, Homo sapien
aacttatgtagcttatccagagcct

SEQ ID NO: 4445906 - DNA, 25 bp, Homo sapien
gcaccgagaagcaattcagtacaag

SEQ ID NO: 4445907 - DNA, 25 bp, Homo sapien
tggaggtctcaaacatggcattaag

SEQ ID NO: 4445908 - DNA, 25 bp, Homo sapien
tcactttattagcagtaggacctct

SEQ ID NO: 4445909 - DNA, 25 bp, Homo sapien
cagcctttgctacttgttttaagca

SEQ ID NO: 4445910 - DNA, 25 bp, Homo sapien
taggaaaggagaacgaatcagagga

SEQ ID NO: 4445911 - DNA, 25 bp, Homo sapien
ccagatttggtcagatgtcaatacc

SEQ ID NO: 4445912 - DNA, 25 bp, Homo sapien
ccctgtctcattcagaaaacgttag

SEQ ID NO: 4445913 - DNA, 25 bp, Homo sapien
aaaacgttaggtggctgtaatcaca

SEQ ID NO: 4445914 - DNA, 25 bp, Homo sapien
ttgtgaagagtgtaactgaacttta

SEQ ID NO: 4445915 - DNA, 25 bp, Homo sapien
ttttgtgaagagtgtaactgaactt

SEQ ID NO: 4445916 - DNA, 25 bp, Homo sapien
acacaaagttatagaaggcttaatg

SEQ ID NO: 4445917 - DNA, 25 bp, Homo sapien
tatagaaggcttaatgttatcaaaa

SEQ ID NO: 4445918 - DNA, 25 bp, Homo sapien
gtacacatgtgcaagtgcccacggg

SEQ ID NO: 4445919 - DNA, 25 bp, Homo sapien
ccggccagctaggacaggttcttgc

SEQ ID NO: 4445920 - DNA, 25 bp, Homo sapien
ctactgcagggaggttgggatacaa

SEQ ID NO: 4445921 - DNA, 25 bp, Homo sapien
tctataaatcaaggtggaccacagc

SEQ ID NO: 4445922 - DNA, 25 bp, Homo sapien
aagaaacaggagattgtacagatgg

SEQ ID NO: 4445923 - DNA, 25 bp, Homo sapien
agaaacaggagattgtacagatggt

SEQ ID NO: 4445924 - DNA, 25 bp, Homo sapien
tgccaaatatcatcaggatccattc

SEQ ID NO: 4445925 - DNA, 25 bp, Homo sapien
gccaaatatcatcaggatccattcc

SEQ ID NO: 4445926 - DNA, 25 bp, Homo sapien
ccaaatatcatcaggatccattcct

SEQ ID NO: 4445927 - DNA, 25 bp, Homo sapien
gcttggatatttcaggctcatgtgc

SEQ ID NO: 4445928 - DNA, 25 bp, Homo sapien
atggagcttggatatttcaggctca

SEQ ID NO: 4445929 - DNA, 25 bp, Homo sapien
gagcttggatatttcaggctcatgt

SEQ ID NO: 4445930 - DNA, 25 bp, Homo sapien
tgtcatggagcttggatatttcagg

SEQ ID NO: 4445931 - DNA, 25 bp, Homo sapien
tgtgtcaggtggcttcctctggccc

SEQ ID NO: 4445932 - DNA, 25 bp, Homo sapien
tgattattaacgtacctccataggt

SEQ ID NO: 4445933 - DNA, 25 bp, Homo sapien
agttaataacaccttccgtgcgcac

SEQ ID NO: 4445934 - DNA, 25 bp, Homo sapien
gagaatgtatgagaacgccttttaa

SEQ ID NO: 4445935 - DNA, 25 bp, Homo sapien
ctctattgtcgcagggccagagctg

SEQ ID NO: 4445936 - DNA, 25 bp, Homo sapien
gactgggctcgttttgcataagtaa

SEQ ID NO: 4445937 - DNA, 25 bp, Homo sapien
tctggccgcgcaagtgactgggctc

SEQ ID NO: 4445938 - DNA, 25 bp, Homo sapien
ccaggccgtagtgctccaagagcat

SEQ ID NO: 4445939 - DNA, 25 bp, Homo sapien
ctgagccaggaagaggcagcatggg

SEQ ID NO: 4445940 - DNA, 25 bp, Homo sapien
tgagccaggaagaggcagcatgggg

SEQ ID NO: 4445941 - DNA, 25 bp, Homo sapien
gaaaacaggtattgaacagagagat

SEQ ID NO: 4445942 - DNA, 25 bp, Homo sapien
tgccgaaaacaggtattgaacagag

SEQ ID NO: 4445943 - DNA, 25 bp, Homo sapien
ctgccgaaaacaggtattgaacaga

SEQ ID NO: 4445944 - DNA, 25 bp, Homo sapien
ccgaaaacaggtattgaacagagag

SEQ ID NO: 4445945 - DNA, 25 bp, Homo sapien
ttgctaggacgagagctggttgaat

SEQ ID NO: 4445946 - DNA, 25 bp, Homo sapien
tgcctggatctcgaaacctgctcag

SEQ ID NO: 4445947 - DNA, 25 bp, Homo sapien
gaatgatgtcaatagtttcagaaca

SEQ ID NO: 4445948 - DNA, 25 bp, Homo sapien
cagaatttctctaagtctaccgctc

SEQ ID NO: 4445949 - DNA, 25 bp, Homo sapien
taccctggtaggtttgccattctac

SEQ ID NO: 4445950 - DNA, 25 bp, Homo sapien
gaataccctggtaggtttgccattc

SEQ ID NO: 4445951 - DNA, 25 bp, Homo sapien
ttcagaataccctggtaggtttgcc

SEQ ID NO: 4445952 - DNA, 25 bp, Homo sapien
tttcctttgatatccagccacttgg

SEQ ID NO: 4445953 - DNA, 25 bp, Homo sapien
ctcttgtctttattgtatctggctc

SEQ ID NO: 4445954 - DNA, 25 bp, Homo sapien
cttgtctttattgtatctggctctt

SEQ ID NO: 4445955 - DNA, 25 bp, Homo sapien
tcttgtctttattgtatctggctct

SEQ ID NO: 4445956 - DNA, 25 bp, Homo sapien
ttgtctttattgtatctggctcttg

SEQ ID NO: 4445957 - DNA, 25 bp, Homo sapien
gcagtggtaccttttcaggataggg

SEQ ID NO: 4445958 - DNA, 25 bp, Homo sapien
ttcttgggcagtggtaccttttcag

SEQ ID NO: 4445959 - DNA, 25 bp, Homo sapien
tgccttcatggctaggtttcttggg

SEQ ID NO: 4445960 - DNA, 25 bp, Homo sapien
gtcccaagctccaggctaagccagg

SEQ ID NO: 4445961 - DNA, 25 bp, Homo sapien
gctgtccagacttggaatattgaat

SEQ ID NO: 4445962 - DNA, 25 bp, Homo sapien
tgtccagacttggaatattgaatgc

SEQ ID NO: 4445963 - DNA, 25 bp, Homo sapien
tgctgtccagacttggaatattgaa

SEQ ID NO: 4445964 - DNA, 25 bp, Homo sapien
atgctgtccagacttggaatattga

SEQ ID NO: 4445965 - DNA, 25 bp, Homo sapien
tgggtctcattgaacagtacgcagc

SEQ ID NO: 4445966 - DNA, 25 bp, Homo sapien
cattgaacagtacgcagctcccctg

SEQ ID NO: 4445967 - DNA, 25 bp, Homo sapien
caataataggaagacagttacagcc

SEQ ID NO: 4445968 - DNA, 25 bp, Homo sapien
atctttctggggttggcgcgcaaaa

SEQ ID NO: 4445969 - DNA, 25 bp, Homo sapien
atgtgaccgccaaagttggcactga

SEQ ID NO: 4445970 - DNA, 25 bp, Homo sapien
ggccccggtgaaggcagtatatgag

SEQ ID NO: 4445971 - DNA, 25 bp, Homo sapien
ccccggtgaaggcagtatatgagga

SEQ ID NO: 4445972 - DNA, 25 bp, Homo sapien
gaccccaatgtgaccgccaaagttg

SEQ ID NO: 4445973 - DNA, 25 bp, Homo sapien
tattgatagagagaaggagaatacc

SEQ ID NO: 4445974 - DNA, 25 bp, Homo sapien
ggtattgatagagagaaggagaata

SEQ ID NO: 4445975 - DNA, 25 bp, Homo sapien
gtattgatagagagaaggagaatac

SEQ ID NO: 4445976 - DNA, 25 bp, Homo sapien
attgatagagagaaggagaatacca

SEQ ID NO: 4445977 - DNA, 25 bp, Homo sapien
gaaaagaggtacaaatctagtgtca

SEQ ID NO: 4445978 - DNA, 25 bp, Homo sapien
tagtgtcacgtacaaggcagtttct

SEQ ID NO: 4445979 - DNA, 25 bp, Homo sapien
aaatctagtgtcacgtacaaggcag

SEQ ID NO: 4445980 - DNA, 25 bp, Homo sapien
tacaaggcagtttctactccttcta

SEQ ID NO: 4445981 - DNA, 25 bp, Homo sapien
ttccggcagagtttctatcagactg

SEQ ID NO: 4445982 - DNA, 25 bp, Homo sapien
ccggcagagtttctatcagactgag

SEQ ID NO: 4445983 - DNA, 25 bp, Homo sapien
ggcagagtttctatcagactgagat

SEQ ID NO: 4445984 - DNA, 25 bp, Homo sapien
ctcttccggcagagtttctatcaga

SEQ ID NO: 4445985 - DNA, 25 bp, Homo sapien
cctgctgaagctctattgccatgag

SEQ ID NO: 4445986 - DNA, 25 bp, Homo sapien
tgctgaagctctattgccatgagca

SEQ ID NO: 4445987 - DNA, 25 bp, Homo sapien
cgcctgctgaagctctattgccatg

SEQ ID NO: 4445988 - DNA, 25 bp, Homo sapien
ctgaagctctattgccatgagcagc

SEQ ID NO: 4445989 - DNA, 25 bp, Homo sapien
ggatgccatcaatgttgctatgctt

SEQ ID NO: 4445990 - DNA, 25 bp, Homo sapien
tttggatgccatcaatgttgctatg

SEQ ID NO: 4445991 - DNA, 25 bp, Homo sapien
gggcgcgggtttggatgccatcaat

SEQ ID NO: 4445992 - DNA, 25 bp, Homo sapien
ctgatatcagaagccgggcgcgggt

SEQ ID NO: 4445993 - DNA, 25 bp, Homo sapien
gaggaaacaggatactgagagtctc

SEQ ID NO: 4445994 - DNA, 25 bp, Homo sapien
cgaggaaacaggatactgagagtct

SEQ ID NO: 4445995 - DNA, 25 bp, Homo sapien
ccgaggaaacaggatactgagagtc

SEQ ID NO: 4445996 - DNA, 25 bp, Homo sapien
gccgaggaaacaggatactgagagt

SEQ ID NO: 4445997 - DNA, 25 bp, Homo sapien
ttgcctccttaagaacctatgctga

SEQ ID NO: 4445998 - DNA, 25 bp, Homo sapien
taagacctccataaattagccctag

SEQ ID NO: 4445999 - DNA, 25 bp, Homo sapien
ttagccctaggctgcctatccagtg

SEQ ID NO: 4446000 - DNA, 25 bp, Homo sapien
tatccagtgtcatactagtcctcag

SEQ ID NO: 4446001 - DNA, 25 bp, Homo sapien
cctttgaaaacgagatttgctgatc

SEQ ID NO: 4446002 - DNA, 25 bp, Homo sapien
tccagtggaacagtatttatcaatc

SEQ ID NO: 4446003 - DNA, 25 bp, Homo sapien
ccaagttcagaagtaagacggctct

SEQ ID NO: 4446004 - DNA, 25 bp, Homo sapien
tagtgagggcatactaagtacctag

SEQ ID NO: 4446005 - DNA, 25 bp, Homo sapien
tgaacgaatagttgccaaagggagt

SEQ ID NO: 4446006 - DNA, 25 bp, Homo sapien
aattatagggtctcttaggccctgg

SEQ ID NO: 4446007 - DNA, 25 bp, Homo sapien
gagccatctctacgtacagcagaat

SEQ ID NO: 4446008 - DNA, 25 bp, Homo sapien
ctggatttacagtggcatctacaca

SEQ ID NO: 4446009 - DNA, 25 bp, Homo sapien
accggattcctggtgatggagaaag

SEQ ID NO: 4446010 - DNA, 25 bp, Homo sapien
caaattgtatggttgctccgactgc

SEQ ID NO: 4446011 - DNA, 25 bp, Homo sapien
tccttggccagtaataagagctcct

SEQ ID NO: 4446012 - DNA, 25 bp, Homo sapien
gatgttgtaaagtgtccaaaccaaa

SEQ ID NO: 4446013 - DNA, 25 bp, Homo sapien
ctggaagtgacgagtgtgcaaaaca

SEQ ID NO: 4446014 - DNA, 25 bp, Homo sapien
tgtccacacaaataagctatagccg

SEQ ID NO: 4446015 - DNA, 25 bp, Homo sapien
tgcaaaacaggcatcagtccaccaa

SEQ ID NO: 4446016 - DNA, 25 bp, Homo sapien
ccaagtgtatggagatgtccacaca

SEQ ID NO: 4446017 - DNA, 25 bp, Homo sapien
ttccagtctcccacctcaagttcca

SEQ ID NO: 4446018 - DNA, 25 bp, Homo sapien
tccttccagtctcccacctcaagtt

SEQ ID NO: 4446019 - DNA, 25 bp, Homo sapien
ccagtctcccacctcaagttccaaa

SEQ ID NO: 4446020 - DNA, 25 bp, Homo sapien
cttccagtctcccacctcaagttcc

SEQ ID NO: 4446021 - DNA, 25 bp, Homo sapien
gatttaggattggtgataagaacca

SEQ ID NO: 4446022 - DNA, 25 bp, Homo sapien
tgttcaccacaactataaaggagtg

SEQ ID NO: 4446023 - DNA, 25 bp, Homo sapien
tttctagtggttcatgttcaccaca

SEQ ID NO: 4446024 - DNA, 25 bp, Homo sapien
taaagaggtcgtgatcaaaagcaaa

SEQ ID NO: 4446025 - DNA, 25 bp, Homo sapien
tagcaatgtaaaagcgtccaaataa

SEQ ID NO: 4446026 - DNA, 25 bp, Homo sapien
ttcacatgggaatgcaatcacaatg

SEQ ID NO: 4446027 - DNA, 25 bp, Homo sapien
gtacattatgcttatagcaatgtaa

SEQ ID NO: 4446028 - DNA, 25 bp, Homo sapien
caaaacagtaagcaatctatcttta

SEQ ID NO: 4446029 - DNA, 25 bp, Homo sapien
tgaactccatcaatcttaactgtga

SEQ ID NO: 4446030 - DNA, 25 bp, Homo sapien
tatgttatgtgtcccactactgtag

SEQ ID NO: 4446031 - DNA, 25 bp, Homo sapien
tctaggattccacttcagtacgaaa

SEQ ID NO: 4446032 - DNA, 25 bp, Homo sapien
gaaaatgggaccagacacatgaaca

SEQ ID NO: 4446033 - DNA, 25 bp, Homo sapien
tcctgatacagctgcaggactatag

SEQ ID NO: 4446034 - DNA, 25 bp, Homo sapien
ttcctgatacagctgcaggactata

SEQ ID NO: 4446035 - DNA, 25 bp, Homo sapien
tgatacagctgcaggactataggca

SEQ ID NO: 4446036 - DNA, 25 bp, Homo sapien
ctgatacagctgcaggactataggc

SEQ ID NO: 4446037 - DNA, 25 bp, Homo sapien
cagtacggagaataaatgatgccag

SEQ ID NO: 4446038 - DNA, 25 bp, Homo sapien
aacagaaaatatgtggtgaacactc

SEQ ID NO: 4446039 - DNA, 25 bp, Homo sapien
tgccaggggatcaaaactgagatga

SEQ ID NO: 4446040 - DNA, 25 bp, Homo sapien
tgagatgattattctcttgaacaga

SEQ ID NO: 4446041 - DNA, 25 bp, Homo sapien
attcccaaagggcaatgataaggaa

SEQ ID NO: 4446042 - DNA, 25 bp, Homo sapien
taagactacctaacggcatttatta

SEQ ID NO: 4446043 - DNA, 25 bp, Homo sapien
ttatcttagaatattatgttcagca

SEQ ID NO: 4446044 - DNA, 25 bp, Homo sapien
gggaaatagatgttaacgtgaaata

SEQ ID NO: 4446045 - DNA, 25 bp, Homo sapien
gatgttaacgtgaaatagatacatg

SEQ ID NO: 4446046 - DNA, 25 bp, Homo sapien
atagatgttaacgtgaaatagatac

SEQ ID NO: 4446047 - DNA, 25 bp, Homo sapien
tgttaacgtgaaatagatacatggg

SEQ ID NO: 4446048 - DNA, 25 bp, Homo sapien
ggtatcctcgatatctaaaaataat

SEQ ID NO: 4446049 - DNA, 25 bp, Homo sapien
aataatgagaatggtgagctggctc

SEQ ID NO: 4446050 - DNA, 25 bp, Homo sapien
acaatcagcacaaaaaggacccggg

SEQ ID NO: 4446051 - DNA, 25 bp, Homo sapien
gctctgggtatcctcgatatctaaa

SEQ ID NO: 4446052 - DNA, 25 bp, Homo sapien
catgaacaaggcttataggaataaa

SEQ ID NO: 4446053 - DNA, 25 bp, Homo sapien
cctcaggaccatttactcaaggctt

SEQ ID NO: 4446054 - DNA, 25 bp, Homo sapien
ggccatggtcattcatattggctta

SEQ ID NO: 4446055 - DNA, 25 bp, Homo sapien
ggaccatttactcaaggcttcttga

SEQ ID NO: 4446056 - DNA, 25 bp, Homo sapien
caagtgtaagggcttgactcagaga

SEQ ID NO: 4446057 - DNA, 25 bp, Homo sapien
tactccaactgaaaggcttccctaa

SEQ ID NO: 4446058 - DNA, 25 bp, Homo sapien
agaagctccattctgcggccacagt

SEQ ID NO: 4446059 - DNA, 25 bp, Homo sapien
ggccacagtctacagtaccacagat

SEQ ID NO: 4446060 - DNA, 25 bp, Homo sapien
tttggtttgaatttcctcctgtagc

SEQ ID NO: 4446061 - DNA, 25 bp, Homo sapien
attctagttacacatttgtctaaat

SEQ ID NO: 4446062 - DNA, 25 bp, Homo sapien
tattctagttacacatttgtctaaa

SEQ ID NO: 4446063 - DNA, 25 bp, Homo sapien
ctttggtttgaatttcctcctgtag

SEQ ID NO: 4446064 - DNA, 25 bp, Homo sapien
ccagcactgtatacagggtcaacaa

SEQ ID NO: 4446065 - DNA, 25 bp, Homo sapien
gaggtcagatttataaaccctgaag

SEQ ID NO: 4446066 - DNA, 25 bp, Homo sapien
aggtcagatttataaaccctgaagg

SEQ ID NO: 4446067 - DNA, 25 bp, Homo sapien
cagcactgtatacagggtcaacaac

SEQ ID NO: 4446068 - DNA, 25 bp, Homo sapien
taatcacggttaccatgtagaaagt

SEQ ID NO: 4446069 - DNA, 25 bp, Homo sapien
cattctcagtgtgtgagtttctagg

SEQ ID NO: 4446070 - DNA, 25 bp, Homo sapien
gatgtaaagaggtattccacagaag

SEQ ID NO: 4446071 - DNA, 25 bp, Homo sapien
tttccagatgattgagatttactcc

SEQ ID NO: 4446072 - DNA, 25 bp, Homo sapien
aaccaaatttgccatcaatgatttc

SEQ ID NO: 4446073 - DNA, 25 bp, Homo sapien
taaatgttatgctgccttgtaggaa

SEQ ID NO: 4446074 - DNA, 25 bp, Homo sapien
ccaaatttgccatcaatgatttcac

SEQ ID NO: 4446075 - DNA, 25 bp, Homo sapien
tatgctgccttgtaggaaatgtcca

SEQ ID NO: 4446076 - DNA, 25 bp, Homo sapien
gattcatttggtatgagagagctcc

SEQ ID NO: 4446077 - DNA, 25 bp, Homo sapien
cacttgaagtgcagagaagaggtct

SEQ ID NO: 4446078 - DNA, 25 bp, Homo sapien
gagacagcctccatcaacataatag

SEQ ID NO: 4446079 - DNA, 25 bp, Homo sapien
taaggaggcaagaatatcagggaga

SEQ ID NO: 4446080 - DNA, 25 bp, Homo sapien
tgcttataacacaacagctgacttg

SEQ ID NO: 4446081 - DNA, 25 bp, Homo sapien
catttaatttatgctgaagtcccaa

SEQ ID NO: 4446082 - DNA, 25 bp, Homo sapien
tcatcttagaggcaggtatcattta

SEQ ID NO: 4446083 - DNA, 25 bp, Homo sapien
gactatgctgctatctgtcttggcg

SEQ ID NO: 4446084 - DNA, 25 bp, Homo sapien
aaaaagctagggtgccgtatgttgc

SEQ ID NO: 4446085 - DNA, 25 bp, Homo sapien
cagtagcataagtaggtgaacaggc

SEQ ID NO: 4446086 - DNA, 25 bp, Homo sapien
gaacaggtgtcagcagtgtcaacca

SEQ ID NO: 4446087 - DNA, 25 bp, Homo sapien
tgaagttgtgaccaaagcaccgctg

SEQ ID NO: 4446088 - DNA, 25 bp, Homo sapien
tcaggagctcaggtggctttttaac

SEQ ID NO: 4446089 - DNA, 25 bp, Homo sapien
aggagctcaggtggctttttaactg

SEQ ID NO: 4446090 - DNA, 25 bp, Homo sapien
gagctcaggtggctttttaactgca

SEQ ID NO: 4446091 - DNA, 25 bp, Homo sapien
agctcaggtggctttttaactgcac

SEQ ID NO: 4446092 - DNA, 25 bp, Homo sapien
tgcaggtatcagtagtgggtaatcc

SEQ ID NO: 4446093 - DNA, 25 bp, Homo sapien
gtccaggactccaaacgagcagctg

SEQ ID NO: 4446094 - DNA, 25 bp, Homo sapien
aacacttccgactaaggaagcagag

SEQ ID NO: 4446095 - DNA, 25 bp, Homo sapien
aagcagagagcccacaatcctgtgg

SEQ ID NO: 4446096 - DNA, 25 bp, Homo sapien
agggctcgtttccgtcaacaagccg

SEQ ID NO: 4446097 - DNA, 25 bp, Homo sapien
caagggctcgtttccgtcaacaagc

SEQ ID NO: 4446098 - DNA, 25 bp, Homo sapien
ggctcgtttccgtcaacaagccgtc

SEQ ID NO: 4446099 - DNA, 25 bp, Homo sapien
tcgtttccgtcaacaagccgtccag

SEQ ID NO: 4446100 - DNA, 25 bp, Homo sapien
ttgccgaaggccgcaaacacaggcc

SEQ ID NO: 4446101 - DNA, 25 bp, Homo sapien
gagccgcactgcgacagccgctcca

SEQ ID NO: 4446102 - DNA, 25 bp, Homo sapien
cggagccgcactgcgacagccgctc

SEQ ID NO: 4446103 - DNA, 25 bp, Homo sapien
aggccgcaaacacaggcctccgctg

SEQ ID NO: 4446104 - DNA, 25 bp, Homo sapien
ctgcaggtgcagttgcgctcgccat

SEQ ID NO: 4446105 - DNA, 25 bp, Homo sapien
ggagctgctccaaaggcgaagccag

SEQ ID NO: 4446106 - DNA, 25 bp, Homo sapien
tcgaggcaggagcaaccgcagctcc

SEQ ID NO: 4446107 - DNA, 25 bp, Homo sapien
tcctccgccaagtgccggagctgct

SEQ ID NO: 4446108 - DNA, 25 bp, Homo sapien
aaagctgaggtaagcggagccacct

SEQ ID NO: 4446109 - DNA, 25 bp, Homo sapien
tggaaaagctgaggtaagcggagcc

SEQ ID NO: 4446110 - DNA, 25 bp, Homo sapien
gaggtaagcggagccacctccctcg

SEQ ID NO: 4446111 - DNA, 25 bp, Homo sapien
ccgaacggtggcgaatggaaaagct

SEQ ID NO: 4446112 - DNA, 25 bp, Homo sapien
ctctcgattaaactcctcggtggtc

SEQ ID NO: 4446113 - DNA, 25 bp, Homo sapien
ctcgattaaactcctcggtggtctc

SEQ ID NO: 4446114 - DNA, 25 bp, Homo sapien
tctcgattaaactcctcggtggtct

SEQ ID NO: 4446115 - DNA, 25 bp, Homo sapien
tcgattaaactcctcggtggtctcc

SEQ ID NO: 4446116 - DNA, 25 bp, Homo sapien
gaggcaggtgccaatacgttagtgc

SEQ ID NO: 4446117 - DNA, 25 bp, Homo sapien
cacttcccgaatgtcgaggttagaa

SEQ ID NO: 4446118 - DNA, 25 bp, Homo sapien
gttagtgctgcacggacttggaaga

SEQ ID NO: 4446119 - DNA, 25 bp, Homo sapien
tatttcaccctctcaggtgctgagg

SEQ ID NO: 4446120 - DNA, 25 bp, Homo sapien
actatggtcagagtcgtggcttccc

SEQ ID NO: 4446121 - DNA, 25 bp, Homo sapien
gaagactatggtcagagtcgtggct

SEQ ID NO: 4446122 - DNA, 25 bp, Homo sapien
tggtcagagtcgtggcttcccttga

SEQ ID NO: 4446123 - DNA, 25 bp, Homo sapien
ctgagagaagactatggtcagagtc

SEQ ID NO: 4446124 - DNA, 25 bp, Homo sapien
tcacataccagggaggagttagcta

SEQ ID NO: 4446125 - DNA, 25 bp, Homo sapien
ccggcctagggcagatatttctaca

SEQ ID NO: 4446126 - DNA, 25 bp, Homo sapien
gaaggcaggcctactatactcatca

SEQ ID NO: 4446127 - DNA, 25 bp, Homo sapien
aagtggtcaacccttctgctgtgga

SEQ ID NO: 4446128 - DNA, 25 bp, Homo sapien
tgatggcagcatggacttgttcaca

SEQ ID NO: 4446129 - DNA, 25 bp, Homo sapien
atgccttgatggcagcatggacttg

SEQ ID NO: 4446130 - DNA, 25 bp, Homo sapien
caaatagtacactgcaataaatgcc

SEQ ID NO: 4446131 - DNA, 25 bp, Homo sapien
cttgttcacagaacttctgggtttc

SEQ ID NO: 4446132 - DNA, 25 bp, Homo sapien
ggaggccatttaacctatgcagatg

SEQ ID NO: 4446133 - DNA, 25 bp, Homo sapien
taagccacttgagtaaccctgaaga

SEQ ID NO: 4446134 - DNA, 25 bp, Homo sapien
caatgcatgattctacaggcagggc

SEQ ID NO: 4446135 - DNA, 25 bp, Homo sapien
gaccgtgatctcttaacaactgtag

SEQ ID NO: 4446136 - DNA, 25 bp, Homo sapien
cgccccgtaccagctttctcagggt

SEQ ID NO: 4446137 - DNA, 25 bp, Homo sapien
gatgtccagggtggcgccccgtacc

SEQ ID NO: 4446138 - DNA, 25 bp, Homo sapien
tggcgccccgtaccagctttctcag

SEQ ID NO: 4446139 - DNA, 25 bp, Homo sapien
ccacgatgtccagggtggcgccccg

SEQ ID NO: 4446140 - DNA, 25 bp, Homo sapien
tggagtgacggaaagtacttccatg

SEQ ID NO: 4446141 - DNA, 25 bp, Homo sapien
tgacggaaagtacttccatgagctg

SEQ ID NO: 4446142 - DNA, 25 bp, Homo sapien
gagttggagtgacggaaagtacttc

SEQ ID NO: 4446143 - DNA, 25 bp, Homo sapien
ctctgagttggagtgacggaaagta

SEQ ID NO: 4446144 - DNA, 25 bp, Homo sapien
tggtcattactctcagctgtcagta

SEQ ID NO: 4446145 - DNA, 25 bp, Homo sapien
gatatattaataacctaggttcctg

SEQ ID NO: 4446146 - DNA, 25 bp, Homo sapien
cagctgtcagtaactttgctgttaa

SEQ ID NO: 4446147 - DNA, 25 bp, Homo sapien
tggtaacctaaactgtggcatcact

SEQ ID NO: 4446148 - DNA, 25 bp, Homo sapien
ccagacactgttgtaggaaataagg

SEQ ID NO: 4446149 - DNA, 25 bp, Homo sapien
ggcatctgctggcacgcaacccaga

SEQ ID NO: 4446150 - DNA, 25 bp, Homo sapien
cacgcaacccagacactgttgtagg

SEQ ID NO: 4446151 - DNA, 25 bp, Homo sapien
gctggcacgcaacccagacactgtt

SEQ ID NO: 4446152 - DNA, 25 bp, Homo sapien
gaaaaatcagaagcactagaattag

SEQ ID NO: 4446153 - DNA, 25 bp, Homo sapien
tcttggtcagcatcaaaagagctgc

SEQ ID NO: 4446154 - DNA, 25 bp, Homo sapien
tctctgccactaacatccgaatttt

SEQ ID NO: 4446155 - DNA, 25 bp, Homo sapien
gatgctctcaccagcgcaaggcatg

SEQ ID NO: 4446156 - DNA, 25 bp, Homo sapien
gtggttgtcagagttgttctcctca

SEQ ID NO: 4446157 - DNA, 25 bp, Homo sapien
ccaatacaagtcctgattgctggga

SEQ ID NO: 4446158 - DNA, 25 bp, Homo sapien
tgtgcctccctaatatgataaaatg

SEQ ID NO: 4446159 - DNA, 25 bp, Homo sapien
tgagaactaacaatcacgtgaatcc

SEQ ID NO: 4446160 - DNA, 25 bp, Homo sapien
aatttagtaccaccaataatgaggc

SEQ ID NO: 4446161 - DNA, 25 bp, Homo sapien
taataactaatataggcaggcagcc

SEQ ID NO: 4446162 - DNA, 25 bp, Homo sapien
cacataggtggatatatgctcagag

SEQ ID NO: 4446163 - DNA, 25 bp, Homo sapien
aggtggatatatgctcagagccaaa

SEQ ID NO: 4446164 - DNA, 25 bp, Homo sapien
gtgacacataggtggatatatgctc

SEQ ID NO: 4446165 - DNA, 25 bp, Homo sapien
cataggtggatatatgctcagagcc

SEQ ID NO: 4446166 - DNA, 25 bp, Homo sapien
gcatcattttctaaggcctttgggc

SEQ ID NO: 4446167 - DNA, 25 bp, Homo sapien
tttatcaaccccaaacgcatgcaag

SEQ ID NO: 4446168 - DNA, 25 bp, Homo sapien
gcttttctgaatgattacccaggtg

SEQ ID NO: 4446169 - DNA, 25 bp, Homo sapien
gagagaactaccaaagctcatggct

SEQ ID NO: 4446170 - DNA, 25 bp, Homo sapien
atgctgatagctcaaaatataaagc

SEQ ID NO: 4446171 - DNA, 25 bp, Homo sapien
gctgatagctcaaaatataaagcag

SEQ ID NO: 4446172 - DNA, 25 bp, Homo sapien
tgctgatagctcaaaatataaagca

SEQ ID NO: 4446173 - DNA, 25 bp, Homo sapien
cagaagttattcaccctgagcccta

SEQ ID NO: 4446174 - DNA, 25 bp, Homo sapien
caagatcttattaatactattgcta

SEQ ID NO: 4446175 - DNA, 25 bp, Homo sapien
gccctaccataaaaaggtgagttca

SEQ ID NO: 4446176 - DNA, 25 bp, Homo sapien
tggcaggattacgggttcttttcta

SEQ ID NO: 4446177 - DNA, 25 bp, Homo sapien
ttaaaacagatacaagtttcgcaga

SEQ ID NO: 4446178 - DNA, 25 bp, Homo sapien
ctagggagttgagaacgtctggaca

SEQ ID NO: 4446179 - DNA, 25 bp, Homo sapien
gacagcagttccgttttactcacaa

SEQ ID NO: 4446180 - DNA, 25 bp, Homo sapien
gttgagaacgtctggacagcagttc

SEQ ID NO: 4446181 - DNA, 25 bp, Homo sapien
cgttttactcacaaaaagctatctg

SEQ ID NO: 4446182 - DNA, 25 bp, Homo sapien
ttcaagttcactctgagtgagctcc

SEQ ID NO: 4446183 - DNA, 25 bp, Homo sapien
ctgagtgagctccttgattctattc

SEQ ID NO: 4446184 - DNA, 25 bp, Homo sapien
agggatccaactatcttctggctga

SEQ ID NO: 4446185 - DNA, 25 bp, Homo sapien
gatcaatggcattaataagtaaagg

SEQ ID NO: 4446186 - DNA, 25 bp, Homo sapien
tgctaaatatagataggcactccct

SEQ ID NO: 4446187 - DNA, 25 bp, Homo sapien
gcagctttcctaggaatctctgaga

SEQ ID NO: 4446188 - DNA, 25 bp, Homo sapien
tcagagcctgaccatgacgatgaga

SEQ ID NO: 4446189 - DNA, 25 bp, Homo sapien
ttttaaaagcaggtatcagagcctg

SEQ ID NO: 4446190 - DNA, 25 bp, Homo sapien
tatgaattacacctacaaaaggaag

SEQ ID NO: 4446191 - DNA, 25 bp, Homo sapien
cataatgccctattcagctcaccag

SEQ ID NO: 4446192 - DNA, 25 bp, Homo sapien
gacctgtaggacatgcataatgccc

SEQ ID NO: 4446193 - DNA, 25 bp, Homo sapien
gtgggcaaacctaacaaatgagctc

SEQ ID NO: 4446194 - DNA, 25 bp, Homo sapien
tcactcaaagaatgactgctgttgc

SEQ ID NO: 4446195 - DNA, 25 bp, Homo sapien
cactcaaagaatgactgctgttgct

SEQ ID NO: 4446196 - DNA, 25 bp, Homo sapien
gaagttatacaatacaggacctgag

SEQ ID NO: 4446197 - DNA, 25 bp, Homo sapien
caaacatgactgaacgaagttatac

SEQ ID NO: 4446198 - DNA, 25 bp, Homo sapien
tccttcccttcatgacacttgttaa

SEQ ID NO: 4446199 - DNA, 25 bp, Homo sapien
taattcagctagaggtaagtcttta

SEQ ID NO: 4446200 - DNA, 25 bp, Homo sapien
tcattaccccaccaatggaacgaag

SEQ ID NO: 4446201 - DNA, 25 bp, Homo sapien
tacagataagggaaaggacctaaca

SEQ ID NO: 4446202 - DNA, 25 bp, Homo sapien
gggacatatagagcgagaacttact

SEQ ID NO: 4446203 - DNA, 25 bp, Homo sapien
tgccagcctcgttttaacagccagc

SEQ ID NO: 4446204 - DNA, 25 bp, Homo sapien
ctgtaacttgttgtgatgaattagt

SEQ ID NO: 4446205 - DNA, 25 bp, Homo sapien
gtaacttgttgtgatgaattagttg

SEQ ID NO: 4446206 - DNA, 25 bp, Homo sapien
aatctgtaacttgttgtgatgaatt

SEQ ID NO: 4446207 - DNA, 25 bp, Homo sapien
tctgtaacttgttgtgatgaattag

SEQ ID NO: 4446208 - DNA, 25 bp, Homo sapien
cttttcggaggtgctaagtcaagag

SEQ ID NO: 4446209 - DNA, 25 bp, Homo sapien
tttcggaggtgctaagtcaagagag

SEQ ID NO: 4446210 - DNA, 25 bp, Homo sapien
ggattgatgattggtagttcattgt

SEQ ID NO: 4446211 - DNA, 25 bp, Homo sapien
gggtagaggatgtagggaagcgaca

SEQ ID NO: 4446212 - DNA, 25 bp, Homo sapien
tacaaggcttaagtcagaagctccc

SEQ ID NO: 4446213 - DNA, 25 bp, Homo sapien
ggcacaagggaacagcttcaagcca

SEQ ID NO: 4446214 - DNA, 25 bp, Homo sapien
ttcttcaagatgcaaagctccctgg

SEQ ID NO: 4446215 - DNA, 25 bp, Homo sapien
aactggcttagatcgaatcgggtcc

SEQ ID NO: 4446216 - DNA, 25 bp, Homo sapien
ttttttggagcagattggcgcgccc

SEQ ID NO: 4446217 - DNA, 25 bp, Homo sapien
ttccaaagaaaggtcagccgcaagc

SEQ ID NO: 4446218 - DNA, 25 bp, Homo sapien
tcaattctggttggcgagatgcgct

SEQ ID NO: 4446219 - DNA, 25 bp, Homo sapien
tctgggacaaatggaactcacgaca

SEQ ID NO: 4446220 - DNA, 25 bp, Homo sapien
ccctctccactagctggtttccctc

SEQ ID NO: 4446221 - DNA, 25 bp, Homo sapien
cacaggaccaacacgcatgtgcagt

SEQ ID NO: 4446222 - DNA, 25 bp, Homo sapien
gaccaacacgcatgtgcagtatttg

SEQ ID NO: 4446223 - DNA, 25 bp, Homo sapien
tggtttccctcacaggaccaacacg

SEQ ID NO: 4446224 - DNA, 25 bp, Homo sapien
catcaatattagagcagggccagaa

SEQ ID NO: 4446225 - DNA, 25 bp, Homo sapien
ctaagcagcagagatcacaggcatg

SEQ ID NO: 4446226 - DNA, 25 bp, Homo sapien
agactgacctttaactagctgtgag

SEQ ID NO: 4446227 - DNA, 25 bp, Homo sapien
gatcctgaccttaatttgtgcccca

SEQ ID NO: 4446228 - DNA, 25 bp, Homo sapien
cttgctgcagtctcaagcttccaga

SEQ ID NO: 4446229 - DNA, 25 bp, Homo sapien
agcttgctgcagtctcaagcttcca

SEQ ID NO: 4446230 - DNA, 25 bp, Homo sapien
tctcaagcttccagactcaagcgat

SEQ ID NO: 4446231 - DNA, 25 bp, Homo sapien
tgctgcagtctcaagcttccagact

SEQ ID NO: 4446232 - DNA, 25 bp, Homo sapien
tttggcaattcagaatagaagtctg

SEQ ID NO: 4446233 - DNA, 25 bp, Homo sapien
agaagtctgtcttgcaaggctgttg

SEQ ID NO: 4446234 - DNA, 25 bp, Homo sapien
tccttcagattgctttacttccaca

SEQ ID NO: 4446235 - DNA, 25 bp, Homo sapien
tgcctctatcattttagcaggaaaa

SEQ ID NO: 4446236 - DNA, 25 bp, Homo sapien
ctaatggatccattcaagtgggcat

SEQ ID NO: 4446237 - DNA, 25 bp, Homo sapien
atccattcaagtgggcatgaagttc

SEQ ID NO: 4446238 - DNA, 25 bp, Homo sapien
ggtatgagaactaatggatccattc

SEQ ID NO: 4446239 - DNA, 25 bp, Homo sapien
tgagaactaatggatccattcaagt

SEQ ID NO: 4446240 - DNA, 25 bp, Homo sapien
tcgtggattttaagatctggcttct

SEQ ID NO: 4446241 - DNA, 25 bp, Homo sapien
aatcacagtcatctgatcgtggatt

SEQ ID NO: 4446242 - DNA, 25 bp, Homo sapien
cgtggattttaagatctggcttctg

SEQ ID NO: 4446243 - DNA, 25 bp, Homo sapien
cagtcatctgatcgtggattttaag

SEQ ID NO: 4446244 - DNA, 25 bp, Homo sapien
ctactagtaagctgatgaatagttt

SEQ ID NO: 4446245 - DNA, 25 bp, Homo sapien
cagggctactagtaagctgatgaat

SEQ ID NO: 4446246 - DNA, 25 bp, Homo sapien
gggctactagtaagctgatgaatag

SEQ ID NO: 4446247 - DNA, 25 bp, Homo sapien
ttcagggctactagtaagctgatga

SEQ ID NO: 4446248 - DNA, 25 bp, Homo sapien
gatttagccctttctgtgatgtgca

SEQ ID NO: 4446249 - DNA, 25 bp, Homo sapien
tagtgcggtaggtactgagaacagc

SEQ ID NO: 4446250 - DNA, 25 bp, Homo sapien
cctatgcgctggactgagaatatct

SEQ ID NO: 4446251 - DNA, 25 bp, Homo sapien
tgagacgctgcttagagaatgccct

SEQ ID NO: 4446252 - DNA, 25 bp, Homo sapien
gagtggctaggtacctgtaaaacca

SEQ ID NO: 4446253 - DNA, 25 bp, Homo sapien
gctgtttgacaacgaggaatacggt

SEQ ID NO: 4446254 - DNA, 25 bp, Homo sapien
tcctccaaggagcatgatactgcag

SEQ ID NO: 4446255 - DNA, 25 bp, Homo sapien
tcagtgactactatccaaggctccc

SEQ ID NO: 4446256 - DNA, 25 bp, Homo sapien
gtacttgacgccgtcatctgcaaat

SEQ ID NO: 4446257 - DNA, 25 bp, Homo sapien
tacttgacgccgtcatctgcaaatt

SEQ ID NO: 4446258 - DNA, 25 bp, Homo sapien
cttgacgccgtcatctgcaaattct

SEQ ID NO: 4446259 - DNA, 25 bp, Homo sapien
ttgacgccgtcatctgcaaattctt

SEQ ID NO: 4446260 - DNA, 25 bp, Homo sapien
aaagcacataggaaaaggacagtac

SEQ ID NO: 4446261 - DNA, 25 bp, Homo sapien
tcaaagcacataggaaaaggacagt

SEQ ID NO: 4446262 - DNA, 25 bp, Homo sapien
agtgatcaaagcacataggaaaagg

SEQ ID NO: 4446263 - DNA, 25 bp, Homo sapien
tgatcaaagcacataggaaaaggac

SEQ ID NO: 4446264 - DNA, 25 bp, Homo sapien
atgtaaagagatcatcaactatttc

SEQ ID NO: 4446265 - DNA, 25 bp, Homo sapien
catgtaaagagatcatcaactattt

SEQ ID NO: 4446266 - DNA, 25 bp, Homo sapien
tacatgtaaagagatcatcaactat

SEQ ID NO: 4446267 - DNA, 25 bp, Homo sapien
acatgtaaagagatcatcaactatt

SEQ ID NO: 4446268 - DNA, 25 bp, Homo sapien
tggactgttttataccttcaagtat

SEQ ID NO: 4446269 - DNA, 25 bp, Homo sapien
ttggactgttttataccttcaagta

SEQ ID NO: 4446270 - DNA, 25 bp, Homo sapien
ccttcaagtatagattccacataag

SEQ ID NO: 4446271 - DNA, 25 bp, Homo sapien
ataccttcaagtatagattccacat

SEQ ID NO: 4446272 - DNA, 25 bp, Homo sapien
ggaattctataagacttgaataccc

SEQ ID NO: 4446273 - DNA, 25 bp, Homo sapien
tagtccagaggcagatcaggttcca

SEQ ID NO: 4446274 - DNA, 25 bp, Homo sapien
taggagggtgagatccattatttca

SEQ ID NO: 4446275 - DNA, 25 bp, Homo sapien
gcccagcctttaacatgttgtccta

SEQ ID NO: 4446276 - DNA, 25 bp, Homo sapien
cagtctccttggctactaaagggcc

SEQ ID NO: 4446277 - DNA, 25 bp, Homo sapien
caaggccaagaactgtaccctcagt

SEQ ID NO: 4446278 - DNA, 25 bp, Homo sapien
tcctcggcaagttttacagtctcct

SEQ ID NO: 4446279 - DNA, 25 bp, Homo sapien
aaagggccacctcttctgtcaactg

SEQ ID NO: 4446280 - DNA, 25 bp, Homo sapien
aagaggttccaagaagtcttttgct

SEQ ID NO: 4446281 - DNA, 25 bp, Homo sapien
ctgaaagatgcaatgctaacttcag

SEQ ID NO: 4446282 - DNA, 25 bp, Homo sapien
gaggttccaagaagtcttttgcttg

SEQ ID NO: 4446283 - DNA, 25 bp, Homo sapien
agaggttccaagaagtcttttgctt

SEQ ID NO: 4446284 - DNA, 25 bp, Homo sapien
cggagttgagaaatgttccatgccc

SEQ ID NO: 4446285 - DNA, 25 bp, Homo sapien
ttgagaaatgttccatgcccgattc

SEQ ID NO: 4446286 - DNA, 25 bp, Homo sapien
catgcccgattctgtcaggaagcag

SEQ ID NO: 4446287 - DNA, 25 bp, Homo sapien
tgttccatgcccgattctgtcagga

SEQ ID NO: 4446288 - DNA, 25 bp, Homo sapien
ggtatccgatgttgcctcacaaagt

SEQ ID NO: 4446289 - DNA, 25 bp, Homo sapien
ccagtggtatccgatgttgcctcac

SEQ ID NO: 4446290 - DNA, 25 bp, Homo sapien
accagatccagggatcctccctcac

SEQ ID NO: 4446291 - DNA, 25 bp, Homo sapien
tgttgcctcacaaagtccaccagat

SEQ ID NO: 4446292 - DNA, 25 bp, Homo sapien
tcatctggaagacctgaaactccaa

SEQ ID NO: 4446293 - DNA, 25 bp, Homo sapien
ccaagcattggagaatgtaacaacg

SEQ ID NO: 4446294 - DNA, 25 bp, Homo sapien
gatgacattcgtacttttagaacag

SEQ ID NO: 4446295 - DNA, 25 bp, Homo sapien
gtaacaacgaataagacaagcaggg

SEQ ID NO: 4446296 - DNA, 25 bp, Homo sapien
caaagtcgacctttccttacgtgtg

SEQ ID NO: 4446297 - DNA, 25 bp, Homo sapien
ttgacgtttgaggtcaaacagagtt

SEQ ID NO: 4446298 - DNA, 25 bp, Homo sapien
actgtctgacttttgacgtttgagg

SEQ ID NO: 4446299 - DNA, 25 bp, Homo sapien
gggcaatgctgtaccagaatccgaa

SEQ ID NO: 4446300 - DNA, 25 bp, Homo sapien
ggtgctggtcataagatggaactgt

SEQ ID NO: 4446301 - DNA, 25 bp, Homo sapien
tgcaactcagggagcaaaaaggagc

SEQ ID NO: 4446302 - DNA, 25 bp, Homo sapien
aatctcatgggatgggtgcagagca

SEQ ID NO: 4446303 - DNA, 25 bp, Homo sapien
tcaagagtctaaacaagggcctaca

SEQ ID NO: 4446304 - DNA, 25 bp, Homo sapien
tgctagagagccaaaccagagtcac

SEQ ID NO: 4446305 - DNA, 25 bp, Homo sapien
ccagctggtactcttgagaaaggtg

SEQ ID NO: 4446306 - DNA, 25 bp, Homo sapien
cctcagttcagatctggtgctgtca

SEQ ID NO: 4446307 - DNA, 25 bp, Homo sapien
tcataagacagatcccacacctgag

SEQ ID NO: 4446308 - DNA, 25 bp, Homo sapien
tgctgtcagaagcaaagatgtagtt

SEQ ID NO: 4446309 - DNA, 25 bp, Homo sapien
agcttgtgagtcagttgaagacacg

SEQ ID NO: 4446310 - DNA, 25 bp, Homo sapien
ggcaggaacttgattgaaacacata

SEQ ID NO: 4446311 - DNA, 25 bp, Homo sapien
caaggaacttggttgctatgcttca

SEQ ID NO: 4446312 - DNA, 25 bp, Homo sapien
tagaaggcttaaaggtctcggcagt

SEQ ID NO: 4446313 - DNA, 25 bp, Homo sapien
tatctgtcactacggtcatccctag

SEQ ID NO: 4446314 - DNA, 25 bp, Homo sapien
ccgatgggacaatcataaagagggc

SEQ ID NO: 4446315 - DNA, 25 bp, Homo sapien
caatgtggcctggtgtcaatggtct

SEQ ID NO: 4446316 - DNA, 25 bp, Homo sapien
gacttcactttctagtaccgatggg

SEQ ID NO: 4446317 - DNA, 25 bp, Homo sapien
cacaatgttgccactactagaggta

SEQ ID NO: 4446318 - DNA, 25 bp, Homo sapien
tagggacctccatatgttcagttac

SEQ ID NO: 4446319 - DNA, 25 bp, Homo sapien
ttcaggtacagcaccctctagggac

SEQ ID NO: 4446320 - DNA, 25 bp, Homo sapien
gtgtttatgtaagcctgcaccagtg

SEQ ID NO: 4446321 - DNA, 25 bp, Homo sapien
tagtgactgcaatagatccacattt

SEQ ID NO: 4446322 - DNA, 25 bp, Homo sapien
taatgctatatataatgccacacaa

SEQ ID NO: 4446323 - DNA, 25 bp, Homo sapien
gctatcccctagagatggcatttga

SEQ ID NO: 4446324 - DNA, 25 bp, Homo sapien
tgacccctccttgagtttaatttgc

SEQ ID NO: 4446325 - DNA, 25 bp, Homo sapien
catatctctggatgcccaaagttgg

SEQ ID NO: 4446326 - DNA, 25 bp, Homo sapien
gaagcaacacttacagagactgggc

SEQ ID NO: 4446327 - DNA, 25 bp, Homo sapien
tagcagctatgttggtgaccaggta

SEQ ID NO: 4446328 - DNA, 25 bp, Homo sapien
tgtgagtcaccgagcacctgaatat

SEQ ID NO: 4446329 - DNA, 25 bp, Homo sapien
gccaaggactgggataagtagccgt

SEQ ID NO: 4446330 - DNA, 25 bp, Homo sapien
gcagacaggaagctacaagaaacac

SEQ ID NO: 4446331 - DNA, 25 bp, Homo sapien
ggtacttctgttatgttgcctaagc

SEQ ID NO: 4446332 - DNA, 25 bp, Homo sapien
caagaaacaccagtctgaagcagtg

SEQ ID NO: 4446333 - DNA, 25 bp, Homo sapien
ttacagccacctgccaccataccag

SEQ ID NO: 4446334 - DNA, 25 bp, Homo sapien
attacagccacctgccaccatacca

SEQ ID NO: 4446335 - DNA, 25 bp, Homo sapien
gccaccataccaggctaaattttgc

SEQ ID NO: 4446336 - DNA, 25 bp, Homo sapien
accataccaggctaaattttgcatt

SEQ ID NO: 4446337 - DNA, 25 bp, Homo sapien
tctgcggagactgagtcgcggtcgc

SEQ ID NO: 4446338 - DNA, 25 bp, Homo sapien
gtcgggcggtttgtgccgaatcaac

SEQ ID NO: 4446339 - DNA, 25 bp, Homo sapien
caccgagacaatcgctgcggcggag

SEQ ID NO: 4446340 - DNA, 25 bp, Homo sapien
gagtcccggaagttcggcagctcaa

SEQ ID NO: 4446341 - DNA, 25 bp, Homo sapien
ggccactccgcttgttccaggtgaa

SEQ ID NO: 4446342 - DNA, 25 bp, Homo sapien
tccaggtgaaaatggacccagggta

SEQ ID NO: 4446343 - DNA, 25 bp, Homo sapien
cagggtacccgctcagagccaagag

SEQ ID NO: 4446344 - DNA, 25 bp, Homo sapien
gagccaagagcagttcgtggatcat

SEQ ID NO: 4446345 - DNA, 25 bp, Homo sapien
catggcccgtgtactgttcaatgaa

SEQ ID NO: 4446346 - DNA, 25 bp, Homo sapien
gaatatagtctgtgccgagccggca

SEQ ID NO: 4446347 - DNA, 25 bp, Homo sapien
tgttcaatgaactcagtgaagcgaa

SEQ ID NO: 4446348 - DNA, 25 bp, Homo sapien
gcagagtcgattcaggacactggtc

SEQ ID NO: 4446349 - DNA, 25 bp, Homo sapien
ctctagaggtgtacacccacagaga

SEQ ID NO: 4446350 - DNA, 25 bp, Homo sapien
gaaatccataacttatttcacatga

SEQ ID NO: 4446351 - DNA, 25 bp, Homo sapien
gaggccttgccttcacttgaatatt

SEQ ID NO: 4446352 - DNA, 25 bp, Homo sapien
tcacatgaattaccgataaattcac

SEQ ID NO: 4446353 - DNA, 25 bp, Homo sapien
gccctgtgcagaaggcccgcaggta

SEQ ID NO: 4446354 - DNA, 25 bp, Homo sapien
cagtgcttggcgataaggctgcaaa

SEQ ID NO: 4446355 - DNA, 25 bp, Homo sapien
gtagattccatgtaacccaccttgg

SEQ ID NO: 4446356 - DNA, 25 bp, Homo sapien
tcttgttccaaatcaagcagtgctt

SEQ ID NO: 4446357 - DNA, 25 bp, Homo sapien
actcttaactacctgatcttatcaa

SEQ ID NO: 4446358 - DNA, 25 bp, Homo sapien
taactacctgatcttatcaaagggc

SEQ ID NO: 4446359 - DNA, 25 bp, Homo sapien
atttcagattcaagaacatgcccta

SEQ ID NO: 4446360 - DNA, 25 bp, Homo sapien
gccctaatctactgtcccagaggtg

SEQ ID NO: 4446361 - DNA, 25 bp, Homo sapien
gtctaggaagtagttgacatgtgat

SEQ ID NO: 4446362 - DNA, 25 bp, Homo sapien
tctaggaagtagttgacatgtgata

SEQ ID NO: 4446363 - DNA, 25 bp, Homo sapien
aggaagtagttgacatgtgatatgg

SEQ ID NO: 4446364 - DNA, 25 bp, Homo sapien
ctaggaagtagttgacatgtgatat

SEQ ID NO: 4446365 - DNA, 25 bp, Homo sapien
caatttgatgtggaggttcgctgca

SEQ ID NO: 4446366 - DNA, 25 bp, Homo sapien
caacttaagataaaatggcaatacc

SEQ ID NO: 4446367 - DNA, 25 bp, Homo sapien
gaataattagaagggtatgtaatca

SEQ ID NO: 4446368 - DNA, 25 bp, Homo sapien
gaacagtcaagatccagcatcctaa

SEQ ID NO: 4446369 - DNA, 25 bp, Homo sapien
tgacttttaatttgttctactacaa

SEQ ID NO: 4446370 - DNA, 25 bp, Homo sapien
ttgacttttaatttgttctactaca

SEQ ID NO: 4446371 - DNA, 25 bp, Homo sapien
gacacttaacatgataaccaagcag

SEQ ID NO: 4446372 - DNA, 25 bp, Homo sapien
gaacacccctaataagctaaggcac

SEQ ID NO: 4446373 - DNA, 25 bp, Homo sapien
ttgtggaccaattcaataggacagc

SEQ ID NO: 4446374 - DNA, 25 bp, Homo sapien
tctggaccaggaggtgtttaaaggc

SEQ ID NO: 4446375 - DNA, 25 bp, Homo sapien
caatcagctttgaagggccaatgag

SEQ ID NO: 4446376 - DNA, 25 bp, Homo sapien
ggacaatcagctttgaagggccaat

SEQ ID NO: 4446377 - DNA, 25 bp, Homo sapien
gacaatcagctttgaagggccaatg

SEQ ID NO: 4446378 - DNA, 25 bp, Homo sapien
aggacaatcagctttgaagggccaa

SEQ ID NO: 4446379 - DNA, 25 bp, Homo sapien
ttttccagtgcacttcgaacaggag

SEQ ID NO: 4446380 - DNA, 25 bp, Homo sapien
tgtttccaggatttgacaaccatga

SEQ ID NO: 4446381 - DNA, 25 bp, Homo sapien
gtgcacttcgaacaggaggcaaccc

SEQ ID NO: 4446382 - DNA, 25 bp, Homo sapien
tgtgtttgtagactgtttccaggat

SEQ ID NO: 4446383 - DNA, 25 bp, Homo sapien
ttcagatggtctcaaaggatcaccc

SEQ ID NO: 4446384 - DNA, 25 bp, Homo sapien
tatgtgaacactgatcggatcctgg

SEQ ID NO: 4446385 - DNA, 25 bp, Homo sapien
gaatattcaatacgtgagtgccagg

SEQ ID NO: 4446386 - DNA, 25 bp, Homo sapien
cctctataatggagcaggacgtgat

SEQ ID NO: 4446387 - DNA, 25 bp, Homo sapien
gaagatggcccctgtttgataaaga

SEQ ID NO: 4446388 - DNA, 25 bp, Homo sapien
gagctgtttatacatgaccccatga

SEQ ID NO: 4446389 - DNA, 25 bp, Homo sapien
ccaagaggagtccatggagcatcca

SEQ ID NO: 4446390 - DNA, 25 bp, Homo sapien
gaccccatgacaaacggccaggatt

SEQ ID NO: 4446391 - DNA, 25 bp, Homo sapien
caaacatctggacagattctccaac

SEQ ID NO: 4446392 - DNA, 25 bp, Homo sapien
ttttctagtcaggttcacattttga

SEQ ID NO: 4446393 - DNA, 25 bp, Homo sapien
ggaatgtaggatggcaaaatctcca

SEQ ID NO: 4446394 - DNA, 25 bp, Homo sapien
tcagcaaccctcactggaatgtagg

SEQ ID NO: 4446395 - DNA, 25 bp, Homo sapien
gagacggtgcagctctgcagcaaaa

SEQ ID NO: 4446396 - DNA, 25 bp, Homo sapien
ccacagtgctgcgaatgcgatccac

SEQ ID NO: 4446397 - DNA, 25 bp, Homo sapien
gctgctgcttgagacggtgcagctc

SEQ ID NO: 4446398 - DNA, 25 bp, Homo sapien
cgaatgcgatccaccacctgttcaa

SEQ ID NO: 4446399 - DNA, 25 bp, Homo sapien
ctctgatgaccaggagtttttgaga

SEQ ID NO: 4446400 - DNA, 25 bp, Homo sapien
gatgaccaggagtttttgagacagt

SEQ ID NO: 4446401 - DNA, 25 bp, Homo sapien
tgaccaggagtttttgagacagtga

SEQ ID NO: 4446402 - DNA, 25 bp, Homo sapien
ctgatgaccaggagtttttgagaca

SEQ ID NO: 4446403 - DNA, 25 bp, Homo sapien
acgcaccactgcacctggctaattt

SEQ ID NO: 4446404 - DNA, 25 bp, Homo sapien
actataggcacgcaccactgcacct

SEQ ID NO: 4446405 - DNA, 25 bp, Homo sapien
gactataggcacgcaccactgcacc

SEQ ID NO: 4446406 - DNA, 25 bp, Homo sapien
caccactgcacctggctaatttttg

SEQ ID NO: 4446407 - DNA, 25 bp, Homo sapien
cacacaccggggactgttgtagggt

SEQ ID NO: 4446408 - DNA, 25 bp, Homo sapien
aaaaaaagagatcgaaaccatcctg

SEQ ID NO: 4446409 - DNA, 25 bp, Homo sapien
cacaccggggactgttgtagggtgg

SEQ ID NO: 4446410 - DNA, 25 bp, Homo sapien
atcacacaccggggactgttgtagg

SEQ ID NO: 4446411 - DNA, 25 bp, Homo sapien
agtgagaactcctgcaaagaatggt

SEQ ID NO: 4446412 - DNA, 25 bp, Homo sapien
gaagactataccttgccccacatag

SEQ ID NO: 4446413 - DNA, 25 bp, Homo sapien
caagcatatcaatcatagacctggg

SEQ ID NO: 4446414 - DNA, 25 bp, Homo sapien
ttgtgagaaaatagcccaggcgtgg

SEQ ID NO: 4446415 - DNA, 25 bp, Homo sapien
gctgacccagtaaatcggattcttc

SEQ ID NO: 4446416 - DNA, 25 bp, Homo sapien
taaatcggattcttctaccatcaac

SEQ ID NO: 4446417 - DNA, 25 bp, Homo sapien
cttcagctgacccagtaaatcggat

SEQ ID NO: 4446418 - DNA, 25 bp, Homo sapien
tcttctaccatcaacttccagagat

SEQ ID NO: 4446419 - DNA, 25 bp, Homo sapien
ctctggaagtctgggtataggcaac

SEQ ID NO: 4446420 - DNA, 25 bp, Homo sapien
tataggcaaccagtgctctcaggaa

SEQ ID NO: 4446421 - DNA, 25 bp, Homo sapien
tagttccgcatagcaggatgactgg

SEQ ID NO: 4446422 - DNA, 25 bp, Homo sapien
tcaaagaggcatacttagttccgca

SEQ ID NO: 4446423 - DNA, 25 bp, Homo sapien
tgcagtgggtggtgttttcaacatg

SEQ ID NO: 4446424 - DNA, 25 bp, Homo sapien
cctgaaacagttctccacgtcccag

SEQ ID NO: 4446425 - DNA, 25 bp, Homo sapien
gctgtgtcaatgaaggcctgaaaca

SEQ ID NO: 4446426 - DNA, 25 bp, Homo sapien
ttcaacatgtgttgagctgtgtcaa

SEQ ID NO: 4446427 - DNA, 25 bp, Homo sapien
gggagaaggttgtcatcatctagca

SEQ ID NO: 4446428 - DNA, 25 bp, Homo sapien
tcgattgtcaagtgcaacagaggga

SEQ ID NO: 4446429 - DNA, 25 bp, Homo sapien
gtgctcctttccgtgatactcgatt

SEQ ID NO: 4446430 - DNA, 25 bp, Homo sapien
agagggagaaggttgtcatcatcta

SEQ ID NO: 4446431 - DNA, 25 bp, Homo sapien
gtaggaaagacctagggctgcccag

SEQ ID NO: 4446432 - DNA, 25 bp, Homo sapien
gtagtggccactgtactttgtagga

SEQ ID NO: 4446433 - DNA, 25 bp, Homo sapien
tttcccgagaaggcccttctcttgc

SEQ ID NO: 4446434 - DNA, 25 bp, Homo sapien
tgaagagaatatgtagtggccactg

SEQ ID NO: 4446435 - DNA, 25 bp, Homo sapien
ttcccactaattctgttcctgctag

SEQ ID NO: 4446436 - DNA, 25 bp, Homo sapien
cccttacaagtaaggtgggtcatat

SEQ ID NO: 4446437 - DNA, 25 bp, Homo sapien
catatttacctgtgagaaactcaga

SEQ ID NO: 4446438 - DNA, 25 bp, Homo sapien
tcctgctagtttcttcccttacaag

SEQ ID NO: 4446439 - DNA, 25 bp, Homo sapien
gaagacagtcccattctgtttggtt

SEQ ID NO: 4446440 - DNA, 25 bp, Homo sapien
aagacagtcccattctgtttggttt

SEQ ID NO: 4446441 - DNA, 25 bp, Homo sapien
tttgtaggtaggcttgcagaagaca

SEQ ID NO: 4446442 - DNA, 25 bp, Homo sapien
ctgtttgtaggtaggcttgcagaag

SEQ ID NO: 4446443 - DNA, 25 bp, Homo sapien
ctggagatagtactgaagattatcc

SEQ ID NO: 4446444 - DNA, 25 bp, Homo sapien
tcttaggcgccacttgattgcatca

SEQ ID NO: 4446445 - DNA, 25 bp, Homo sapien
acccggcgcacactcagtaagtact

SEQ ID NO: 4446446 - DNA, 25 bp, Homo sapien
ctggttcgacttgaggtgcttgcgc

SEQ ID NO: 4446447 - DNA, 25 bp, Homo sapien
tcaggaagtggtcatgagccaatcg

SEQ ID NO: 4446448 - DNA, 25 bp, Homo sapien
gagccaatcggatgctttcaaagtc

SEQ ID NO: 4446449 - DNA, 25 bp, Homo sapien
ggtagaattgatctgatgaagcagc

SEQ ID NO: 4446450 - DNA, 25 bp, Homo sapien
caataggataaaggattgagccagc

SEQ ID NO: 4446451 - DNA, 25 bp, Homo sapien
gaaaataactgccacgaaggagaca

SEQ ID NO: 4446452 - DNA, 25 bp, Homo sapien
taaagagtcccgatgattccaatgt

SEQ ID NO: 4446453 - DNA, 25 bp, Homo sapien
taaggacagcatctacccatcacag

SEQ ID NO: 4446454 - DNA, 25 bp, Homo sapien
tcctggtacagcagaaatagcccta

SEQ ID NO: 4446455 - DNA, 25 bp, Homo sapien
aactgtgacagagatctaggatttc

SEQ ID NO: 4446456 - DNA, 25 bp, Homo sapien
taggttctgactgaccagcgaacaa

SEQ ID NO: 4446457 - DNA, 25 bp, Homo sapien
gactgaccagcgaacaaaaactgtg

SEQ ID NO: 4446458 - DNA, 25 bp, Homo sapien
gctcatccagtgggcctaggttctg

SEQ ID NO: 4446459 - DNA, 25 bp, Homo sapien
gcaaggctgcatacttccaggcaga

SEQ ID NO: 4446460 - DNA, 25 bp, Homo sapien
ggctgcatacttccaggcagacgca

SEQ ID NO: 4446461 - DNA, 25 bp, Homo sapien
tgtcctttcggcaaggctgcatact

SEQ ID NO: 4446462 - DNA, 25 bp, Homo sapien
tttcggcaaggctgcatacttccag

SEQ ID NO: 4446463 - DNA, 25 bp, Homo sapien
tgaggaaatgctttactgactcaga

SEQ ID NO: 4446464 - DNA, 25 bp, Homo sapien
gagtttcttggaaaagccttgttca

SEQ ID NO: 4446465 - DNA, 25 bp, Homo sapien
caccaactctccatatggaggatgg

SEQ ID NO: 4446466 - DNA, 25 bp, Homo sapien
cattccacttcagctcaccaactct

SEQ ID NO: 4446467 - DNA, 25 bp, Homo sapien
gagagaaggactcagctgtcattcc

SEQ ID NO: 4446468 - DNA, 25 bp, Homo sapien
ggagtgaagactggcggctaaagcc

SEQ ID NO: 4446469 - DNA, 25 bp, Homo sapien
gagccaaatctgagttgatctgatg

SEQ ID NO: 4446470 - DNA, 25 bp, Homo sapien
tataatctagtcgtaacagtagttg

SEQ ID NO: 4446471 - DNA, 25 bp, Homo sapien
ctgatgattccgaacactggagaga

SEQ ID NO: 4446472 - DNA, 25 bp, Homo sapien
ctactgagttacccaagggttgctc

SEQ ID NO: 4446473 - DNA, 25 bp, Homo sapien
tctactgagttacccaagggttgct

SEQ ID NO: 4446474 - DNA, 25 bp, Homo sapien
cagctagttcatatcagaattggga

SEQ ID NO: 4446475 - DNA, 25 bp, Homo sapien
acagatgcggaagctagggaccagc

SEQ ID NO: 4446476 - DNA, 25 bp, Homo sapien
tgcctcccagcatagcaatacataa

SEQ ID NO: 4446477 - DNA, 25 bp, Homo sapien
gcaatacataacctagcaaaggact

SEQ ID NO: 4446478 - DNA, 25 bp, Homo sapien
ttatttgtgtgtggctagaatggga

SEQ ID NO: 4446479 - DNA, 25 bp, Homo sapien
ttgaatcttctgttacaaccttggg

SEQ ID NO: 4446480 - DNA, 25 bp, Homo sapien
tatttcaatttatgagccagaaatt

SEQ ID NO: 4446481 - DNA, 25 bp, Homo sapien
ggaacgtggctgttatttcaattta

SEQ ID NO: 4446482 - DNA, 25 bp, Homo sapien
gtaccaaggtacgtagtaggtgctc

SEQ ID NO: 4446483 - DNA, 25 bp, Homo sapien
gagagaaagcctatcttacctgttg

SEQ ID NO: 4446484 - DNA, 25 bp, Homo sapien
gatcagagatgccacatgttctcct

SEQ ID NO: 4446485 - DNA, 25 bp, Homo sapien
gaattgcccaatctgtgtaggtata

SEQ ID NO: 4446486 - DNA, 25 bp, Homo sapien
tcagtttaaggtaggtgaaggccca

SEQ ID NO: 4446487 - DNA, 25 bp, Homo sapien
gagaacgaaaggaccaactgccatg

SEQ ID NO: 4446488 - DNA, 25 bp, Homo sapien
taagttgtcagagcttcccagtgtg

SEQ ID NO: 4446489 - DNA, 25 bp, Homo sapien
tgaccttccgtaagataaacatggg

SEQ ID NO: 4446490 - DNA, 25 bp, Homo sapien
gatcctcatgactggtggtgcagcc

SEQ ID NO: 4446491 - DNA, 25 bp, Homo sapien
cagatgtacatgagtccctttgcag

SEQ ID NO: 4446492 - DNA, 25 bp, Homo sapien
tattcacttacggaggacagctggc

SEQ ID NO: 4446493 - DNA, 25 bp, Homo sapien
cacaagagtgggtgatccagtgcct

SEQ ID NO: 4446494 - DNA, 25 bp, Homo sapien
ggcccaagagatccaaccacgacag

SEQ ID NO: 4446495 - DNA, 25 bp, Homo sapien
gagatccaaccacgacagcctccca

SEQ ID NO: 4446496 - DNA, 25 bp, Homo sapien
aggcccaagagatccaaccacgaca

SEQ ID NO: 4446497 - DNA, 25 bp, Homo sapien
ccaagagatccaaccacgacagcct

SEQ ID NO: 4446498 - DNA, 25 bp, Homo sapien
cagtgtcttctaattgcggatcagc

SEQ ID NO: 4446499 - DNA, 25 bp, Homo sapien
ggatcagcattgtcgaacccggaag

SEQ ID NO: 4446500 - DNA, 25 bp, Homo sapien
tatctgttgccagctgggtacagcc

SEQ ID NO: 4446501 - DNA, 25 bp, Homo sapien
cagaatcccagcttcgagcaggagc

SEQ ID NO: 4446502 - DNA, 25 bp, Homo sapien
ttaggatagacacaaagggaacttc

SEQ ID NO: 4446503 - DNA, 25 bp, Homo sapien
caagttggaatatgtcactgtggga

SEQ ID NO: 4446504 - DNA, 25 bp, Homo sapien
gattgtgttcccatccctatcaacg

SEQ ID NO: 4446505 - DNA, 25 bp, Homo sapien
cctatcaacggtccggtgcaggaac

SEQ ID NO: 4446506 - DNA, 25 bp, Homo sapien
gagtctggggaactgtactacagca

SEQ ID NO: 4446507 - DNA, 25 bp, Homo sapien
gaaggagtctggggaactgtactac

SEQ ID NO: 4446508 - DNA, 25 bp, Homo sapien
gagtggtgaaaggacataggaagga

SEQ ID NO: 4446509 - DNA, 25 bp, Homo sapien
ggagtctggggaactgtactacagc

SEQ ID NO: 4446510 - DNA, 25 bp, Homo sapien
ccctctcggaggatgagtatttcag

SEQ ID NO: 4446511 - DNA, 25 bp, Homo sapien
tctgggaaaatcacacgagatgtcg

SEQ ID NO: 4446512 - DNA, 25 bp, Homo sapien
tggacactgaagtgacggccctctc

SEQ ID NO: 4446513 - DNA, 25 bp, Homo sapien
tgcgtcgtagtgactctccagaaat

SEQ ID NO: 4446514 - DNA, 25 bp, Homo sapien
tagcaggtgctatcagactaacttg

SEQ ID NO: 4446515 - DNA, 25 bp, Homo sapien
gcctgtcatgtagtctgagggccaa

SEQ ID NO: 4446516 - DNA, 25 bp, Homo sapien
tgcaggccttggcatcagacaggga

SEQ ID NO: 4446517 - DNA, 25 bp, Homo sapien
tagacttacatgaaggagaatgtcc

SEQ ID NO: 4446518 - DNA, 25 bp, Homo sapien
gaagagccaattgtagagtgtcagg

SEQ ID NO: 4446519 - DNA, 25 bp, Homo sapien
cagatcctaaatgttcagttcagtg

SEQ ID NO: 4446520 - DNA, 25 bp, Homo sapien
tgtgccatctgtaggattttccaac

SEQ ID NO: 4446521 - DNA, 25 bp, Homo sapien
gagatacagtatagtcccattagaa

SEQ ID NO: 4446522 - DNA, 25 bp, Homo sapien
ccttacttagctgccttccagtggg

SEQ ID NO: 4446523 - DNA, 25 bp, Homo sapien
agcacggcacaggactggtaggcag

SEQ ID NO: 4446524 - DNA, 25 bp, Homo sapien
agcccccgtgcgagatccactgggt

SEQ ID NO: 4446525 - DNA, 25 bp, Homo sapien
gctgagcctccctgatgagcactgc

SEQ ID NO: 4446526 - DNA, 25 bp, Homo sapien
gggtgtgggcttggcgggtcctgca

SEQ ID NO: 4446527 - DNA, 25 bp, Homo sapien
ggtgtgggcttggcgggtcctgcac

SEQ ID NO: 4446528 - DNA, 25 bp, Homo sapien
ggtgcgagcagcaaccggggctgtg

SEQ ID NO: 4446529 - DNA, 25 bp, Homo sapien
tgggtgtgggcttggcgggtcctgc

SEQ ID NO: 4446530 - DNA, 25 bp, Homo sapien
catggcaacgccgtgaggccgcgca

SEQ ID NO: 4446531 - DNA, 25 bp, Homo sapien
cagccccggagttgtctccatggca

SEQ ID NO: 4446532 - DNA, 25 bp, Homo sapien
tgactctctgtaccgatatcgccga

SEQ ID NO: 4446533 - DNA, 25 bp, Homo sapien
tatcgccgatcacaattagcaaaga

SEQ ID NO: 4446534 - DNA, 25 bp, Homo sapien
tacagcaagatagggacgtggattc

SEQ ID NO: 4446535 - DNA, 25 bp, Homo sapien
tccccagttgtggtggaagtgacac

SEQ ID NO: 4446536 - DNA, 25 bp, Homo sapien
ggacacctggtccaaaacactgcgg

SEQ ID NO: 4446537 - DNA, 25 bp, Homo sapien
caagggcgcagatctcaggaagtgc

SEQ ID NO: 4446538 - DNA, 25 bp, Homo sapien
aggttctggataaggttgcaggttg

SEQ ID NO: 4446539 - DNA, 25 bp, Homo sapien
gttctggataaggttgcaggttgta

SEQ ID NO: 4446540 - DNA, 25 bp, Homo sapien
tggataaggttgcaggttgtagggt

SEQ ID NO: 4446541 - DNA, 25 bp, Homo sapien
ttctggataaggttgcaggttgtag

SEQ ID NO: 4446542 - DNA, 25 bp, Homo sapien
ctgttggttcaagtcaaaggatgac

SEQ ID NO: 4446543 - DNA, 25 bp, Homo sapien
taggtgccgggtaatgaagagtctc

SEQ ID NO: 4446544 - DNA, 25 bp, Homo sapien
tgacaggtcaatgttccaggagaga

SEQ ID NO: 4446545 - DNA, 25 bp, Homo sapien
tctgaggagaagtgagctaggtgcc

SEQ ID NO: 4446546 - DNA, 25 bp, Homo sapien
tgtagcagtaaattcaggagcccct

SEQ ID NO: 4446547 - DNA, 25 bp, Homo sapien
tgattgatcactaagaggagtccct

SEQ ID NO: 4446548 - DNA, 25 bp, Homo sapien
cctggagatctgttggctaagccga

SEQ ID NO: 4446549 - DNA, 25 bp, Homo sapien
cactctggatttgatggtgcccatc

SEQ ID NO: 4446550 - DNA, 25 bp, Homo sapien
gaatggtagtgcctaacatcttatt

SEQ ID NO: 4446551 - DNA, 25 bp, Homo sapien
catctgtcatggaatggtagtgcct

SEQ ID NO: 4446552 - DNA, 25 bp, Homo sapien
gagctttccgtagtcacctcacaga

SEQ ID NO: 4446553 - DNA, 25 bp, Homo sapien
ttataatagcatgtagagctttccg

SEQ ID NO: 4446554 - DNA, 25 bp, Homo sapien
tttccagtaacatgactagatgcct

SEQ ID NO: 4446555 - DNA, 25 bp, Homo sapien
ggaaaggtgactactatactgagta

SEQ ID NO: 4446556 - DNA, 25 bp, Homo sapien
ccactaagctgatggattggtgtgt

SEQ ID NO: 4446557 - DNA, 25 bp, Homo sapien
cagtggctgttgacctggatggatt

SEQ ID NO: 4446558 - DNA, 25 bp, Homo sapien
tgcgtcctcactaacagaaggctgg

SEQ ID NO: 4446559 - DNA, 25 bp, Homo sapien
caaactctttgatggaaagggccta

SEQ ID NO: 4446560 - DNA, 25 bp, Homo sapien
taagctctgatctagggtacatggc

SEQ ID NO: 4446561 - DNA, 25 bp, Homo sapien
ggtacatggccctaagctccttgag

SEQ ID NO: 4446562 - DNA, 25 bp, Homo sapien
gaataagtgcactctccttgtcact

SEQ ID NO: 4446563 - DNA, 25 bp, Homo sapien
gtgtgtgggtatgtcaatgtggagg

SEQ ID NO: 4446564 - DNA, 25 bp, Homo sapien
gtgggtatgtcaatgtggagggggc

SEQ ID NO: 4446565 - DNA, 25 bp, Homo sapien
aataagtgcactctccttgtcactg

SEQ ID NO: 4446566 - DNA, 25 bp, Homo sapien
cccatgctagggcacagagcgaggc

SEQ ID NO: 4446567 - DNA, 25 bp, Homo sapien
cacagagcgaggctataggaggcat

SEQ ID NO: 4446568 - DNA, 25 bp, Homo sapien
gaggcatgggctgcgtgggctctcc

SEQ ID NO: 4446569 - DNA, 25 bp, Homo sapien
caaagccccatgctagggcacagag

SEQ ID NO: 4446570 - DNA, 25 bp, Homo sapien
gcagctccggcctcagccggcagct

SEQ ID NO: 4446571 - DNA, 25 bp, Homo sapien
cggcagctccggcctcagccggcag

SEQ ID NO: 4446572 - DNA, 25 bp, Homo sapien
caggatgatggtctctaggatctca

SEQ ID NO: 4446573 - DNA, 25 bp, Homo sapien
tttaccaggatgatggtctctagga

SEQ ID NO: 4446574 - DNA, 25 bp, Homo sapien
gatgatggtctctaggatctcactc

SEQ ID NO: 4446575 - DNA, 25 bp, Homo sapien
ccaggatgatggtctctaggatctc

SEQ ID NO: 4446576 - DNA, 25 bp, Homo sapien
gatgagctgctaagaagatgatgaa

SEQ ID NO: 4446577 - DNA, 25 bp, Homo sapien
ctttgcccactcaagattagtagtt

SEQ ID NO: 4446578 - DNA, 25 bp, Homo sapien
caaagttttcatatgagtaggtgcc

SEQ ID NO: 4446579 - DNA, 25 bp, Homo sapien
agtaggtgccactctgtaggatgag

SEQ ID NO: 4446580 - DNA, 25 bp, Homo sapien
tatcccagggtctctattgctgagc

SEQ ID NO: 4446581 - DNA, 25 bp, Homo sapien
aagcaggacacggtaaggaaggcct

SEQ ID NO: 4446582 - DNA, 25 bp, Homo sapien
tgcagggtctcttgggaactggata

SEQ ID NO: 4446583 - DNA, 25 bp, Homo sapien
gataatcccaggtggctccaatcac

SEQ ID NO: 4446584 - DNA, 25 bp, Homo sapien
gaccacctgggaagatgtagcaaca

SEQ ID NO: 4446585 - DNA, 25 bp, Homo sapien
gataaggttcttcacccagtcgctg

SEQ ID NO: 4446586 - DNA, 25 bp, Homo sapien
tgctgaccacacgatatagaggctc

SEQ ID NO: 4446587 - DNA, 25 bp, Homo sapien
aaaacaggacttgcgatcagagcca

SEQ ID NO: 4446588 - DNA, 25 bp, Homo sapien
caggtttggtatctttcctcttctc

SEQ ID NO: 4446589 - DNA, 25 bp, Homo sapien
tttcttccagctttgatatcttttc

SEQ ID NO: 4446590 - DNA, 25 bp, Homo sapien
tccttcatccttcttgagctctttc

SEQ ID NO: 4446591 - DNA, 25 bp, Homo sapien
ttcatccttcttgagctctttcctc

SEQ ID NO: 4446592 - DNA, 25 bp, Homo sapien
ctcaggagtaaagggctttaggtct

SEQ ID NO: 4446593 - DNA, 25 bp, Homo sapien
agtaaagggctttaggtctggcttg

SEQ ID NO: 4446594 - DNA, 25 bp, Homo sapien
ggctttaggtctggcttggaaatct

SEQ ID NO: 4446595 - DNA, 25 bp, Homo sapien
taaagggctttaggtctggcttgga

SEQ ID NO: 4446596 - DNA, 25 bp, Homo sapien
caggcccgggcaggtcatatgtact

SEQ ID NO: 4446597 - DNA, 25 bp, Homo sapien
tcagtgattgaagtggccgaggaca

SEQ ID NO: 4446598 - DNA, 25 bp, Homo sapien
gaacagcactatcggcaggttggct

SEQ ID NO: 4446599 - DNA, 25 bp, Homo sapien
gaataacgaggtctccttctcaggg

SEQ ID NO: 4446600 - DNA, 25 bp, Homo sapien
tgtgatcgccccaggtaagtacttc

SEQ ID NO: 4446601 - DNA, 25 bp, Homo sapien
gagaaggagctatcaggtgtcagaa

SEQ ID NO: 4446602 - DNA, 25 bp, Homo sapien
gatagatggctgtatccttcggctc

SEQ ID NO: 4446603 - DNA, 25 bp, Homo sapien
tctgtgcagagtatcgagttgtccc

SEQ ID NO: 4446604 - DNA, 25 bp, Homo sapien
tccagaagagcttctaacttctctt

SEQ ID NO: 4446605 - DNA, 25 bp, Homo sapien
tcgtgagggaaccagaccttccgct

SEQ ID NO: 4446606 - DNA, 25 bp, Homo sapien
agtgctttcccgttcctcagtgtag

SEQ ID NO: 4446607 - DNA, 25 bp, Homo sapien
tagccccttctgtggtgaggattcc

SEQ ID NO: 4446608 - DNA, 25 bp, Homo sapien
ctctggtggcaacccaactggtgat

SEQ ID NO: 4446609 - DNA, 25 bp, Homo sapien
tctctcatcaggatagggtgtgggc

SEQ ID NO: 4446610 - DNA, 25 bp, Homo sapien
tctctgcagatgtgtttcggccggc

SEQ ID NO: 4446611 - DNA, 25 bp, Homo sapien
tccaagggagggctaacatgtgcct

SEQ ID NO: 4446612 - DNA, 25 bp, Homo sapien
cacttccaggtattcatcatgccgg

SEQ ID NO: 4446613 - DNA, 25 bp, Homo sapien
ctagggccaagtccagtgaagctgg

SEQ ID NO: 4446614 - DNA, 25 bp, Homo sapien
tagggccaagtccagtgaagctggg

SEQ ID NO: 4446615 - DNA, 25 bp, Homo sapien
agggccaagtccagtgaagctgggg

SEQ ID NO: 4446616 - DNA, 25 bp, Homo sapien
agcaatgtgtcaggccgggagctcc

SEQ ID NO: 4446617 - DNA, 25 bp, Homo sapien
cccagcttcgacctcaggagaggca

SEQ ID NO: 4446618 - DNA, 25 bp, Homo sapien
aggatgccatcacccatgtctccag

SEQ ID NO: 4446619 - DNA, 25 bp, Homo sapien
ggtttcagttgggccattggctgca

SEQ ID NO: 4446620 - DNA, 25 bp, Homo sapien
tcagctgtgatggacggacactcct

SEQ ID NO: 4446621 - DNA, 25 bp, Homo sapien
cactcctcagtttctggcgggacat

SEQ ID NO: 4446622 - DNA, 25 bp, Homo sapien
tcctcagttgagaggtccctatcat

SEQ ID NO: 4446623 - DNA, 25 bp, Homo sapien
tcttcatctgagtcgagggctgcct

SEQ ID NO: 4446624 - DNA, 25 bp, Homo sapien
tttccttctcccgtagcctctctac

SEQ ID NO: 4446625 - DNA, 25 bp, Homo sapien
cttttccttctcccgtagcctctct

SEQ ID NO: 4446626 - DNA, 25 bp, Homo sapien
ttttccttctcccgtagcctctcta

SEQ ID NO: 4446627 - DNA, 25 bp, Homo sapien
tcctgccttgagtccattgactagg

SEQ ID NO: 4446628 - DNA, 25 bp, Homo sapien
cattgactaggcctttggacatggg

SEQ ID NO: 4446629 - DNA, 25 bp, Homo sapien
ggtgagcgttttccccgaagatcca

SEQ ID NO: 4446630 - DNA, 25 bp, Homo sapien
ggatgctcgatctgcaggcccttta

SEQ ID NO: 4446631 - DNA, 25 bp, Homo sapien
agcccggcttggctcgccattggca

SEQ ID NO: 4446632 - DNA, 25 bp, Homo sapien
cacatagtaggatgcacgcactcga

SEQ ID NO: 4446633 - DNA, 25 bp, Homo sapien
acggaagaagtcaaggtcagcagtc

SEQ ID NO: 4446634 - DNA, 25 bp, Homo sapien
cactgcaatgattcgggatgtaggc

SEQ ID NO: 4446635 - DNA, 25 bp, Homo sapien
caggaccaggacattcagttgttgc

SEQ ID NO: 4446636 - DNA, 25 bp, Homo sapien
tgcatcaccacggtgctgctgctag

SEQ ID NO: 4446637 - DNA, 25 bp, Homo sapien
cgtgtcatgagtagggatcagagtc

SEQ ID NO: 4446638 - DNA, 25 bp, Homo sapien
gtttgttggtaccactcacgagtca

SEQ ID NO: 4446639 - DNA, 25 bp, Homo sapien
cctgctagaactcagaccctggtgg

SEQ ID NO: 4446640 - DNA, 25 bp, Homo sapien
gatgaccacatgcagagaagccaag

SEQ ID NO: 4446641 - DNA, 25 bp, Homo sapien
tagattgagataaagaggtccctgg

SEQ ID NO: 4446642 - DNA, 25 bp, Homo sapien
gaacagtatagcagtgggatacccc

SEQ ID NO: 4446643 - DNA, 25 bp, Homo sapien
ctgcagggtccccaagaaatttgtc

SEQ ID NO: 4446644 - DNA, 25 bp, Homo sapien
tggccaaagaccaaacactgcaggg

SEQ ID NO: 4446645 - DNA, 25 bp, Homo sapien
ctgtagttgtgccagggacagactg

SEQ ID NO: 4446646 - DNA, 25 bp, Homo sapien
cagatatgattatgaagctttttcc

SEQ ID NO: 4446647 - DNA, 25 bp, Homo sapien
tttatgaaagccaaagcacacatca

SEQ ID NO: 4446648 - DNA, 25 bp, Homo sapien
gggcatttatgaaagccaaagcaca

SEQ ID NO: 4446649 - DNA, 25 bp, Homo sapien
atgaaagccaaagcacacatcatac

SEQ ID NO: 4446650 - DNA, 25 bp, Homo sapien
cttaatgaacatgataaagggcatt

SEQ ID NO: 4446651 - DNA, 25 bp, Homo sapien
gaagtaactcagtctactcacgctc

SEQ ID NO: 4446652 - DNA, 25 bp, Homo sapien
gaattatacaccagggctgatgaga

SEQ ID NO: 4446653 - DNA, 25 bp, Homo sapien
gaggtcagataacacatttcagatg

SEQ ID NO: 4446654 - DNA, 25 bp, Homo sapien
ccaatatcccttaattatagaggca

SEQ ID NO: 4446655 - DNA, 25 bp, Homo sapien
tgttgcccaggctgagctcaagaga

SEQ ID NO: 4446656 - DNA, 25 bp, Homo sapien
gttgcccaggctgagctcaagagat

SEQ ID NO: 4446657 - DNA, 25 bp, Homo sapien
gctcaagagatctgctggcttcggt

SEQ ID NO: 4446658 - DNA, 25 bp, Homo sapien
tgagctcaagagatctgctggcttc

SEQ ID NO: 4446659 - DNA, 25 bp, Homo sapien
gacctaggttcagcaaaagttttgc
